United States Patent Application Publication US 2006/0150283 A1 - sequence listing, part 14

SEQ ID NO: 53752 - protein, 375 aa, Glycine max
  peptide (1)..(375): Ceres Seq. ID no. 15175901
KVRSIAEKEKMTMDDDSSIYVGGLPYDATEETIRTVFNLYGAILDVKIINDPRTRGKCYCFVTFTNPRSAIDAINDMNGRTIDGRVVKVNGVRTRGGRSNFGRERYYYHNDERNGDWDRSRDRDRDYDHDSNDRDGYRNRSSDWGRDRDRSRDRDQDRDRRFEHMHDYDQAREAMLENDWIREDDRVENEQEHSRGHGGDVDRDHNIDLNVDRKMDRTSDPDRSFGEDRKDQSRRNNDLNVTNQHIMDLSSDSAGTHNEQLEAQLERSTQQLDQLKKEVSQMEEGLEEKRLHVKELQKQSKKLEDAVINAKKNSSYRQMQLMKLHKGFLQVKDCTEKLKTSEKELQALIDTAMSEIDCDGLKDGQLTNGSLDGRL

SEQ ID NO: 53753 - protein, 365 aa, Glycine max
  peptide (1)..(365): Ceres Seq. ID no. 15175902
MTMDDDSSIYVGGLPYDATEETIRTVFNLYGAILDVKIINDPRTRGKCYCFVTFTNPRSAIDAINDMNGRTIDGRVVKVNGVRTRGGRSNFGRERYYYHNDERNGDWDRSRDRDRDYDHDSNDRDGYRNRSSDWGRDRDRSRDRDQDRDRRFEHMHDYDQAREAMLENDWIREDDRVENEQEHSRGHGGDVDRDHNIDLNVDRKMDRTSDPDRSFGEDRKDQSRRNNDLNVTNQHIMDLSSDSAGTHNEQLEAQLERSTQQLDQLKKEVSQMEEGLEEKRLHVKELQKQSKKLEDAVINAKKNSSYRQMQLMKLHKGFLQVKDCTEKLKTSEKELQALIDTAMSEIDCDGLKDGQLTNGSLDGRL

SEQ ID NO: 53754 - protein, 363 aa, Glycine max
  peptide (1)..(363): Ceres Seq. ID no. 15175903
MDDDSSIYVGGLPYDATEETIRTVFNLYGAILDVKIINDPRTRGKCYCFVTFTNPRSAIDAINDMNGRTIDGRVVKVNGVRTRGGRSNFGRERYYYHNDERNGDWDRSRDRDRDYDHDSNDRDGYRNRSSDWGRDRDRSRDRDQDRDRRFEHMHDYDQAREAMLENDWIREDDRVENEQEHSRGHGGDVDRDHNIDLNVDRKMDRTSDPDRSFGEDRKDQSRRNNDLNVTNQHIMDLSSDSAGTHNEQLEAQLERSTQQLDQLKKEVSQMEEGLEEKRLHVKELQKQSKKLEDAVINAKKNSSYRQMQLMKLHKGFLQVKDCTEKLKTSEKELQALIDTAMSEIDCDGLKDGQLTNGSLDGRL

SEQ ID NO: 53755 - DNA, 1438 bp, Glycine max
  misc_feature (1)..(1438): Ceres Seq. ID no. 14310740
aagaacaaaaaataaaaataatattcttcgttattatttcatttcaatttcgttttcgttttcgttttctgttttgatttgatcttccaatggcgtccgatggctttaccgacaagaacaccgtgttcagaaagctcaaggcgaagtctgaaaataagatgtgtttcgattgcaatgcgaagaaccctacctgggcgtccgtcacgtatgggatctttctctgcatcgattgctccgccgtacaccgcagtctcggcgtgcacatcagcttcgtgaggtctacaaatttagactcatggagtcctgagcaactaaaaacaatgagctttggaggaaacaatcgtgcacaggttttctttaagcaacatggttggaatgatggtggtaaaatagaggctaagtacacatctagagctgcagacttgtataggcaaattctttcaaaggaagttgcaaaaagtatggctgaggatggaggcttgccttcatcacctgttgcttctcagtcttcccagggggttaatgggctaccagaagtcaagaccaatgaagtgccaaaagaaaacattctggagaagccagaaaagcctgagagcacttcttcccctagagcttcacatacagtaatttcaagtaccgttaagaaacctattggtgctaagaaagcagtgaagagtggggggctcggcgctcgtaaactcactaaaaagccaagtgagtctctctatgagcagaagcctgaggaaccccctgctccagtttcatcttcaacaaacaatatgcctgctgggccatctccaacgtctcggtttgagtatgcagaaaatgtccaatcatctgagttgaacactggaggttcacatttgcttagtcatgtgtctccaccaaagtcatcaagcttctttgcagactttggaatggatagtggctttccaaagaaatctgggccaagctcctccaaagtgcaaattcaggaaactgatgaagcaagaaggaagttctcaaatgctaaatctatttcttcatcccaatattttggagatcagaacaaggctgcagatgtggattctcaagctacattgtctaagttttcgggttcaagtgccatctccagtgctgatctttttggtgactcaagagacaacaacattgatcttactgctggtgacctcatcaatcgattatctttccaggcacaacaggatctctcttcccttaagaacattgcaggagagactggaaagaagctgagctcattggcctccacattgatgacagatcttcaggaccgaatcctctaaaatgtgtatgctctgtatttaagagaatctttggagttttttacatatgccagccaattatgtttcaaatgtaatagaagagttttcaatatacaattctttgagaaaataagatgctatattttcaggcttgtcac

SEQ ID NO: 53756 - protein, 403 aa, Glycine max
  peptide (1)..(403): Ceres Seq. ID no. 14310741
MASDGFTDKNTVFRKLKAKSENKMCFDCNAKNPTWASVTYGIFLCIDCSAVHRSLGVHISFVRSTNLDSWSPEQLKTMSFGGNNRAQVFFKQHGWNDGGKIEAKYTSRAADLYRQILSKEVAKSMAEDGGLPSSPVASQSSQGVNGLPEVKTNEVPKENILEKPEKPESTSSPRASHTVISSTVKKPIGAKKAVKSGGLGARKLTKKPSESLYEQKPEEPPAPVSSSTNNMPAGPSPTSRFEYAENVQSSELNTGGSHLLSHVSPPKSSSFFADFGMDSGFPKKSGPSSSKVQIQETDEARRKFSNAKSISSSQYFGDQNKAADVDSQATLSKFSGSSAISSADLFGDSRDNNIDLTAGDLINRLSFQAQQDLSSLKNIAGETGKKLSSLASTLMTDLQDRIL

SEQ ID NO: 53757 - protein, 380 aa, Glycine max
  peptide (1)..(380): Ceres Seq. ID no. 14310742
MCFDCNAKNPTWASVTYGIFLCIDCSAVHRSLGVHISFVRSTNLDSWSPEQLKTMSFGGNNRAQVFFKQHGWNDGGKIEAKYTSRAADLYRQILSKEVAKSMAEDGGLPSSPVASQSSQGVNGLPEVKTNEVPKENILEKPEKPESTSSPRASHTVISSTVKKPIGAKKAVKSGGLGARKLTKKPSESLYEQKPEEPPAPVSSSTNNMPAGPSPTSRFEYAENVQSSELNTGGSHLLSHVSPPKSSSFFADFGMDSGFPKKSGPSSSKVQIQETDEARRKFSNAKSISSSQYFGDQNKAADVDSQATLSKFSGSSAISSADLFGDSRDNNIDLTAGDLINRLSFQAQQDLSSLKNIAGETGKKLSSLASTLMTDLQDRIL

SEQ ID NO: 53758 - protein, 326 aa, Glycine max
  peptide (1)..(326): Ceres Seq. ID no. 14310743
MSFGGNNRAQVFFKQHGWNDGGKIEAKYTSRAADLYRQILSKEVAKSMAEDGGLPSSPVASQSSQGVNGLPEVKTNEVPKENILEKPEKPESTSSPRASHTVISSTVKKPIGAKKAVKSGGLGARKLTKKPSESLYEQKPEEPPAPVSSSTNNMPAGPSPTSRFEYAENVQSSELNTGGSHLLSHVSPPKSSSFFADFGMDSGFPKKSGPSSSKVQIQETDEARRKFSNAKSISSSQYFGDQNKAADVDSQATLSKFSGSSAISSADLFGDSRDNNIDLTAGDLINRLSFQAQQDLSSLKNIAGETGKKLSSLASTLMTDLQDRIL

SEQ ID NO: 53759 - DNA, 1055 bp, Glycine max
  misc_feature (1)..(1055): Ceres Seq. ID no. 15225222
ccgggccccccctckagtcagctacgtaggcccccccccatgaagcttatattgaacagcagaaacgagaaaagatggaagctgagcgcgcctcacgaatcacggtcaggaaaaagttacccaaagttaatcgggcccttgcagctcgcctcctagaaactgaagaagctgaaaatgagaagagggatgaagatgctgatgatggtgaaactaaaaaggcatccaagaaaaagaaagggctcagcatgcaagatcttcaggacgatcgatttaaagcaatatttacaaatgaggaatttgagattaaggattcctcacaagaatatctggctttacatcccatgggttctaagaagcaaacatccttgttaaaggaacattttgaacctgtcatgtcagatgatggtcaaagtctaagtgattctgatgcatcaacatcatcacaagatgaacctgcgaatggaatgaaagacaaatctcgggttccaagaatgtatgaaatcaagaatgagcagcatgcggaggcattctggagccaaaaatcacttgcaggggaggactcacttcctatgggagacagagtagcagctctaagagatgaccaacaatcttctcgtgttccaaaaggtattaagcagggtccaggaggatcacgagaaatcactttcgccacaagaagctcagctaagtacaaggaagacgaggaggataaagaagtgccaaacaggaaaaagaggggagttcaatccttggggcttaagcccaatagaccagtgtttcgtggtcaagggagagggaaacgagggaatggcagaagaggacgtcgataatgacctttacataatgtaaatggcatttgattcttcttagatcttgcttgcttgcttgatccttatggctcagttttccatccatggatagtcctgtgactgaagtcgcacaggatacgtgatctatgatgcatcatcatatgtagcttaacatctttttttacatttttgttctttccccctatttttggacactatcaagataaactattttgtgtggaacct

SEQ ID NO: 53760 - protein, 251 aa, Glycine max
  peptide (1)..(251): Ceres Seq. ID no. 15225223
MEAERASRITVRKKLPKVNRALAARLLETEEAENEKRDEDADDGETKKASKKKKGLSMQDLQDDRFKAIFTNEEFEIKDSSQEYLALHPMGSKKQTSLLKEHFEPVMSDDGQSLSDSDASTSSQDEPANGMKDKSRVPRMYEIKNEQHAEAFWSQKSLAGEDSLPMGDRVAALRDDQQSSRVPKGIKQGPGGSREITFATRSSAKYKEDEEDKEVPNRKKRGVQSLGLKPNRPVFRGQGRGKRGNGRRGRR

SEQ ID NO: 53761 - protein, 194 aa, Glycine max
  peptide (1)..(194): Ceres Seq. ID no. 15225224
MQDLQDDRFKAIFTNEEFEIKDSSQEYLALHPMGSKKQTSLLKEHFEPVMSDDGQSLSDSDASTSSQDEPANGMKDKSRVPRMYEIKNEQHAEAFWSQKSLAGEDSLPMGDRVAALRDDQQSSRVPKGIKQGPGGSREITFATRSSAKYKEDEEDKEVPNRKKRGVQSLGLKPNRPVFRGQGRGKRGNGRRGRR

SEQ ID NO: 53762 - protein, 162 aa, Glycine max
  peptide (1)..(162): Ceres Seq. ID no. 15225225
MGSKKQTSLLKEHFEPVMSDDGQSLSDSDASTSSQDEPANGMKDKSRVPRMYEIKNEQHAEAFWSQKSLAGEDSLPMGDRVAALRDDQQSSRVPKGIKQGPGGSREITFATRSSAKYKEDEEDKEVPNRKKRGVQSLGLKPNRPVFRGQGRGKRGNGRRGRR

SEQ ID NO: 53763 - DNA, 836 bp, Glycine max
  misc_feature (1)..(836): Ceres Seq. ID no. 12563476
gaaaacaaaggcagagcagagttgttgcgattaagaagatgaagagagtggagtttatggggctggggctgttagtggtggtgatgatgggatgttgtgggtctgcgactgctgcggatgacttggcaaccaagtgttcggcggtgattcagaaggtaataccgtgtctgaacttcgcgacggggaaggaagaaatgcccaaaaaggaatgttgcgacgccgccacggccataaaggagagcaacccagagtgcttgtgctacatcattcaagagacccacaagggtagcccacaggtcaaaagcttgggcattcaagaggccaagctgcttcagctcccttctgtttgcaacgtcaaaaacgccagcatcaccaactgtcctaagcttttgggtctatctccaagttcccccgatgctgctatcttcacatcaaattcttcgaagacaacaccttcagcacctacaacaacaaactcgcaaaccacgaccccgcagagccaaaacgcttctcatggaagcatggttcaacctagtagttaccgttacctatgtgatggtgatggctttggccattgttctggttgcagttccaaccgaaactgtgagcatttatacatgatgcggcattatgcactgttgaagacagttggggttgtcgttttgtttcctgcttttgttatgccataggacttcgcagctttgaattaatgaattagtttgcatttgtggcctgtgatggtttctcgaattttgagacctcgctgtaatgtttgcctttattgtggacttgtttcttttctgcttcccacaattaatgttaacggatagttggtg

SEQ ID NO: 53764 - protein, 228 aa, Glycine max
  peptide (1)..(228): Ceres Seq. ID no. 12563477
KQRQSRVVAIKKMKRVEFMGLGLLVVVMMGCCGSATAADDLATKCSAVIQKVIPCLNFATGKEEMPKKECCDAATAIKESNPECLCYIIQETHKGSPQVKSLGIQEAKLLQLPSVCNVKNASITNCPKLLGLSPSSPDAAIFTSNSSKTTPSAPTTTNSQTTTPQSQNASHGSMVQPSSYRYLCDGDGFGHCSGCSSNRNCEHLYMMRHYALLKTVGVVVLFPAFVMP

SEQ ID NO: 53765 - protein, 216 aa, Glycine max
  peptide (1)..(216): Ceres Seq. ID no. 12563478
MKRVEFMGLGLLVVVMMGCCGSATAADDLATKCSAVIQKVIPCLNFATGKEEMPKKECCDAATAIKESNPECLCYIIQETHKGSPQVKSLGIQEAKLLQLPSVCNVKNASITNCPKLLGLSPSSPDAAIFTSNSSKTTPSAPTTTNSQTTTPQSQNASHGSMVQPSSYRYLCDGDGFGHCSGCSSNRNCEHLYMMRHYALLKTVGVVVLFPAFVMP

SEQ ID NO: 53766 - protein, 210 aa, Glycine max
  peptide (1)..(210): Ceres Seq. ID no. 12563479
MGLGLLVVVMMGCCGSATAADDLATKCSAVIQKVIPCLNFATGKEEMPKKECCDAATAIKESNPECLCYIIQETHKGSPQVKSLGIQEAKLLQLPSVCNVKNASITNCPKLLGLSPSSPDAAIFTSNSSKTTPSAPTTTNSQTTTPQSQNASHGSMVQPSSYRYLCDGDGFGHCSGCSSNRNCEHLYMMRHYALLKTVGVVVLFPAFVMP

SEQ ID NO: 53767 - DNA, 846 bp, Glycine max
  misc_feature (1)..(846): Ceres Seq. ID no. 14304879
aaaaatctaaaccgaaattcccaattacccttcccaattttcaccaaaacctaatactcccacaccaatcttcgatcatggacgccgattcacaacctcaacaactcgaagagagaacagaggagcaagaactgaagtacctggaattcgtgcaattcgcgaccatacaggctctgatgcgctgcgccatcctctactcatacgccaaggagcgcgcgggtcctctgaagcccggtgtcgacaccgtggaggaggccgtgaagaccgtcgtggctccggtctacgataggttccaccttgtccccggcgaggtcctcaaatacgcggatcggaaggttgccgagttagacagccacgttccctccaacgtgaagaaggtctcctcccaggcctgctccgtcgtctctgaagtccgccgcgatggcgtctccgcctacgccaagaccgtttactccaagtacgagcctacggcggagcagtgcgcagtgtctgcatggcggaagctcaaccagcttccgctcttccctcaggtggccaatgttgtgttgcccaaggctgcctattgcaccgagaagtacaacgaggcggttgtttcctctgctgagaaaggttacagggtttctgcttatcttcctttggtgcctactgagaagatcgccaaagtcttcggtggaaactgatctcgatctattgcggttttgaatttcttattgtttttactttctttacaaagtgttgttgctagttgctactgttagtgtgtgagttggattggatatatgatgatgtgaatgttctgttttgttaattactatataataatatagaataatgttactcaatgct

SEQ ID NO: 53768 - protein, 225 aa, Glycine max
  peptide (1)..(225): Ceres Seq. ID no. 14304880
KSKPKFPITLPNFHQNLILPHQSSIMDADSQPQQLEERTEEQELKYLEFVQFATIQALMRCAILYSYAKERAGPLKPGVDTVEEAVKTVVAPVYDRFHLVPGEVLKYADRKVAELDSHVPSNVKKVSSQACSVVSEVRRDGVSAYAKTVYSKYEPTAEQCAVSAWRKLNQLPLFPQVANVVLPKAAYCTEKYNEAVVSSAEKGYRVSAYLPLVPTEKIAKVFGGN

SEQ ID NO: 53769 - protein, 200 aa, Glycine max
  peptide (1)..(200): Ceres Seq. ID no. 14304881
MDADSQPQQLEERTEEQELKYLEFVQFATIQALMRCAILYSYAKERAGPLKPGVDTVEEAVKTVVAPVYDRFHLVPGEVLKYADRKVAELDSHVPSNVKKVSSQACSVVSEVRRDGVSAYAKTVYSKYEPTAEQCAVSAWRKLNQLPLFPQVANVVLPKAAYCTEKYNEAVVSSAEKGYRVSAYLPLVPTEKIAKVFGGN

SEQ ID NO: 53770 - protein, 167 aa, Glycine max
  peptide (1)..(167): Ceres Seq. ID no. 14304882
MRCAILYSYAKERAGPLKPGVDTVEEAVKTVVAPVYDRFHLVPGEVLKYADRKVAELDSHVPSNVKKVSSQACSVVSEVRRDGVSAYAKTVYSKYEPTAEQCAVSAWRKLNQLPLFPQVANVVLPKAAYCTEKYNEAVVSSAEKGYRVSAYLPLVPTEKIAKVFGGN

SEQ ID NO: 53771 - DNA, 1708 bp, Glycine max
  misc_feature (1)..(1708): Ceres Seq. ID no. 14303888
gtatcgctttttggcggttttagcctttttcggtttcgaacattcggacgaatttctctctctctctcttcaattcaacacttggaggacatgagatggatcgggaagaatatttggggaagtgttccaatatgaaatgccaaagagtggatgaatcatatgtacatgctcttcaagatgaagtaatggaagttgagcatttgcttgcagaacctagaaatgatcatgcttccctggatggtagtttggattctcatacaactttgaatggaaaggatgatttggaactggaggcccttgatggattgctggatgatgttgaaatcaatgatcttgaaggaactgttggtttccctggtggtacatgtgaagaatattttttggattttggatttgctgacaaatttgaggaggtactaggctctggtccttttgtaggttcactcttgcaaaactcaagttctgaaagtcattcttccggattaagcggaagtagcattgttgatggggtattagaatcaacagaagtacctattgcacaatctgaatgcaaaaatgattctctagatgagacaataacctatgaatcacatggtgccttcaggaacaatccaagtcaaccatcaaaagtaaattgcagatacaacatttcacttgatatacaacatctgcaagatttggataacaaccgtcatttagctggtggtatattgacttgtaagaaggaaaagggtcctgttgaaaaaggccaacctgctgcacttagagagaagagattccgaaagcctactcagaggtacattgaagaattttcaaattcaaggtcaaaggaaaaggcaccaactgctggtacaaaaactaaatatttaagtgactcatcatgtgatgatgtacttcatataagaattaaagcattcaaaaagagtccaagtgaaaagtctagtattgaaaatagagatgtgatgcttcctgagttgcaagttcacaaagggcgtccgaagaaagagaaacttgagtatgacaacgagtcatttcccttggaatctgaggatgaatggttgacatcaaaaagatctagaaggaaagatcgaagaaagcatcagaagatgtggactctccctgaagtgttgaagttggttgaaggcatatctgaatatggagttggtcgatggactgacataaagaggtttctgttttcttctacaagctaccgaactcccatagatctcagagacaagtggcgaaaccttttgagagccagttctgcacagaaaagcacgagagaggctgaacaaaatgacgagcttgccctgcgtcccttgccatttaatgtggtacatcgtgtgcaagaattggctaaaattcacccatacccaagggaacgtggatcaaagaagttgcgtgttagccaagctggctcttctgtcattgctaaagattctcctccccttagtcttagcaaaagaaatgtacgtaggaagtttacttagaagtccatatggaaaacagtccatggaaatctatagtcaaaagaatcttgttgaaatttaggtaatcacattcgcacaattttatactgtgaagtaattttatgtttacaaaggcacagaaattttgaattgtaattatgaggaatcattagttgtcctacaatagtttgccatgcttaatgcctaatacttttatagtatgattttattagtgcact

SEQ ID NO: 53772 - protein, 464 aa, Glycine max
  peptide (1)..(464): Ceres Seq. ID no. 14303889
MDREEYLGKCSNMKCQRVDESYVHALQDEVMEVEHLLAEPRNDHASLDGSLDSHTTLNGKDDLELEALDGLLDDVEINDLEGTVGFPGGTCEEYFLDFGFADKFEEVLGSGPFVGSLLQNSSSESHSSGLSGSSIVDGVLESTEVPIAQSECKNDSLDETITYESHGAFRNNPSQPSKVNCRYNISLDIQHLQDLDNNRHLAGGILTCKKEKGPVEKGQPAALREKRFRKPTQRYIEEFSNSRSKEKAPTAGTKTKYLSDSSCDDVLHIRIKAFKKSPSEKSSIENRDVMLPELQVHKGRPKKEKLEYDNESFPLESEDEWLTSKRSRRKDRRKHQKMWTLPEVLKLVEGISEYGVGRWTDIKRFLFSSTSYRTPIDLRDKWRNLLRASSAQKSTREAEQNDELALRPLPFNVVHRVQELAKIHPYPRERGSKKLRVSQAGSSVIAKDSPPLSLSKRNVRRKFT

SEQ ID NO: 53773 - protein, 452 aa, Glycine max
  peptide (1)..(452): Ceres Seq. ID no. 14303890
MKCQRVDESYVHALQDEVMEVEHLLAEPRNDHASLDGSLDSHTTLNGKDDLELEALDGLLDDVEINDLEGTVGFPGGTCEEYFLDFGFADKFEEVLGSGPFVGSLLQNSSSESHSSGLSGSSIVDGVLESTEVPIAQSECKNDSLDETITYESHGAFRNNPSQPSKVNCRYNISLDIQHLQDLDNNRHLAGGILTCKKEKGPVEKGQPAALREKRFRKPTQRYIEEFSNSRSKEKAPTAGTKTKYLSDSSCDDVLHIRIKAFKKSPSEKSSIENRDVMLPELQVHKGRPKKEKLEYDNESFPLESEDEWLTSKRSRRKDRRKHQKMWTLPEVLKLVEGISEYGVGRWTDIKRFLFSSTSYRTPIDLRDKWRNLLRASSAQKSTREAEQNDELALRPLPFNVVHRVQELAKIHPYPRERGSKKLRVSQAGSSVIAKDSPPLSLSKRNVRRKFT

SEQ ID NO: 53774 - protein, 434 aa, Glycine max
  peptide (1)..(434): Ceres Seq. ID no. 14303891
MEVEHLLAEPRNDHASLDGSLDSHTTLNGKDDLELEALDGLLDDVEINDLEGTVGFPGGTCEEYFLDFGFADKFEEVLGSGPFVGSLLQNSSSESHSSGLSGSSIVDGVLESTEVPIAQSECKNDSLDETITYESHGAFRNNPSQPSKVNCRYNISLDIQHLQDLDNNRHLAGGILTCKKEKGPVEKGQPAALREKRFRKPTQRYIEEFSNSRSKEKAPTAGTKTKYLSDSSCDDVLHIRIKAFKKSPSEKSSIENRDVMLPELQVHKGRPKKEKLEYDNESFPLESEDEWLTSKRSRRKDRRKHQKMWTLPEVLKLVEGISEYGVGRWTDIKRFLFSSTSYRTPIDLRDKWRNLLRASSAQKSTREAEQNDELALRPLPFNVVHRVQELAKIHPYPRERGSKKLRVSQAGSSVIAKDSPPLSLSKRNVRRKFT

SEQ ID NO: 53775 - DNA, 1562 bp, Glycine max
  misc_feature (1)..(1562): Ceres Seq. ID no. 14303843
gagaagccatgatggatatgcttctatcttcttcttcttcttcccttaatctcatcaaacccttttttttctcttctccctcgatttgattccgccagattctcgtcaacgcgctgttccttcacctcaatttcttccagcatgaaaccccaccccctccattatcctattctcctcccaaaaccctaccatcccttatcccctctccgtctccgctcactccgaatcatttccaaaaaccaccaaaggcaataacagcccgaacatttgcaatactctctgctcttgttttgctcttaatccaaccagcttttgctcctgcagcttttgcaacgtttcaaaatgctgccaagaccagtggccctgctgctgcagcagttggtggaaaactaatccgcactgagcttctaagtagtgcttggactggtttctttgccggttgcttgcacacactatcagggcctgaccaccttgcagctttggctccattgtcaattggccgaacccaaatggagagtgctgctgttggagccctttggggttgtggccatgatgccggtcaagttatctttggcttaatatttttgctcttaaaagatcgacttcacattgaaattatccaaacttggggcacccgtgtggttggccttaccctgctagtaattggtgctatgggaattaaggaagcttcagaagtgcctatcctgtgtgttgccttagaaaatggtgaatgtgatgttagcgtctatgaatcacgcgatagtaatcctgttgtaggaaagaagaagattggttttgctacttttgccactggaatagttcatggactggaaccagatgcattgatgatggtgttgcctgcccttgctctaccttcacgcttggctggtgctgcatttctcatcatgttcttactgggaactgttgttgcaatggggagctatacggtatttattggttcatgtagcgaggcactaaaagatagagtacctagaataactgagaaactcacttgggcttcttctcttgttgcaatagccctcggatttgccatcatcactagccagttttttgggtttagcctgtattagtacccacgttattcagccaccaacccatggcccattaattggttaattatacccaaatcatacaagacaaggtcagcaagggcataaatgaagaaaaatccattgaaaagttgtgcttttgccatccttcctttgggatgaaaaaaaaaaaaaacctaccattccctcttaattgtgaatggctaactattacagaaatgtttctcatttcctagaagttctatcaattatcatagatgctgaaataatatatatatatcaaaaagcattagaaacttagagatggtgacaggaaaacttgtaggtcgaactattcaagagagatggtgaagagatatcatatgccagcaaaaaaagggttttgcatgaagttctactagggatgatttcaaatttagtcgggctaatgagttatttcttggaaatgttgcaaaacacaaaaaacccaacataggccttatttatgaacct

SEQ ID NO: 53776 - protein, 193 aa, Glycine max
  peptide (1)..(193): Ceres Seq. ID no. 14303844
MESAAVGALWGCGHDAGQVIFGLIFLLLKDRLHIEIIQTWGTRVVGLTLLVIGAMGIKEASEVPILCVALENGECDVSVYESRDSNPVVGKKKIGFATFATGIVHGLEPDALMMVLPALALPSRLAGAAFLIMFLLGTVVAMGSYTVFIGSCSEALKDRVPRITEKLTWASSLVAIALGFAIITSQFFGFSLY

SEQ ID NO: 53777 - protein, 139 aa, Glycine max
  peptide (1)..(139): Ceres Seq. ID no. 14303845
MGIKEASEVPILCVALENGECDVSVYESRDSNPVVGKKKIGFATFATGIVHGLEPDALMMVLPALALPSRLAGAAFLIMFLLGTVVAMGSYTVFIGSCSEALKDRVPRITEKLTWASSLVAIALGFAIITSQFFGFSLY

SEQ ID NO: 53778 - DNA, 1184 bp, Glycine max
  misc_feature (1)..(1184): Ceres Seq. ID no. 14311249
agagtaattttgcatcgtcgtcacacatggagatctccggcaccgttctccgtcaggtcagctacgtctccggctatgggacccacacgcggtcccgcggcctggctcctcgttttggggtgaggatggggatgggttctggtttctgtgacgaggggcatttgcggtattaccaggacaccaaaaaggttctcaccccaaagaagaagttgaagctgctcaagggtttctccaaattagggcttgcatcggatcccgagaaactcgccatgttctatgatcttcaacaaaacctcacctcggatgctggagatgtattactgagagagttagaagcagcaagagcaaaggagaaggaagtgaagaagaaaaggaaacaagagaagaaggccaaactcaaagctgccaagatgaattgtgaatcttcttcatcttcatcgtccgaatcaagtgacagcgattgtggttgtgatcaagtggttgacatgaacaccttcagagctggtgttggtgttggtgttggtgttggtgttggtgttgttgcccctgcacctgtcgaggaatccccactgcccaagaccgcccccattgttgaggatgcgaatgcgcattgcgttgccatggaactgtgttctaagaatgatatatatgttagcagtgctagtaatggttttaagaacgagagtgctgtagttacctctgctcctcagaagaggattgaggtatgcatggggaacaagtgcaaaagatcaggggctgctgcattgatgcaagagtttgagaaagtggtgggtgttgaaggtgtagctgttgttgcatgcaagtgcatgggcaagtgcaaaactgctcctaatgttaaagttcagaattctgttgatcataatagcctggctcagggacttgatgattctgttaagattcctgctaaccctctatgcattggggttggcttggaggatgtggatgccatcgtggctagatatttttgggagagtcacacagatataggcatggcaggtgcaggtgcagctacagctacttgatgttgtgggaatggctagtgtgttatttgtaattatatatatacgtagccaggatgccgaggaaacattattgacaatggttttttttagttgttcatattgtataatataaattagttatgaagtttcttttccttgttt

SEQ ID NO: 53779 - protein, 346 aa, Glycine max
  peptide (1)..(346): Ceres Seq. ID no. 14311250
SNFASSSHMEISGTVLRQVSYVSGYGTHTRSRGLAPRFGVRMGMGSGFCDEGHLRYYQDTKKVLTPKKKLKLLKGFSKLGLASDPEKLAMFYDLQQNLTSDAGDVLLRELEAARAKEKEVKKKRKQEKKAKLKAAKMNCESSSSSSSESSDSDCGCDQVVDMNTFRAGVGVGVGVGVGVVAPAPVEESPLPKTAPIVEDANAHCVAMELCSKNDIYVSSASNGFKNESAVVTSAPQKRIEVCMGNKCKRSGAAALMQEFEKVVGVEGVAVVACKCMGKCKTAPNVKVQNSVDHNSLAQGLDDSVKIPANPLCIGVGLEDVDAIVARYFWESHTDIGMAGAGAATAT

SEQ ID NO: 53780 - protein, 338 aa, Glycine max
  peptide (1)..(338): Ceres Seq. ID no. 14311251
MEISGTVLRQVSYVSGYGTHTRSRGLAPRFGVRMGMGSGFCDEGHLRYYQDTKKVLTPKKKLKLLKGFSKLGLASDPEKLAMFYDLQQNLTSDAGDVLLRELEAARAKEKEVKKKRKQEKKAKLKAAKMNCESSSSSSSESSDSDCGCDQVVDMNTFRAGVGVGVGVGVGVVAPAPVEESPLPKTAPIVEDANAHCVAMELCSKNDIYVSSASNGFKNESAVVTSAPQKRIEVCMGNKCKRSGAAALMQEFEKVVGVEGVAVVACKCMGKCKTAPNVKVQNSVDHNSLAQGLDDSVKIPANPLCIGVGLEDVDAIVARYFWESHTDIGMAGAGAATAT

SEQ ID NO: 53781 - protein, 305 aa, Glycine max
  peptide (1)..(305): Ceres Seq. ID no. 14311252
MGMGSGFCDEGHLRYYQDTKKVLTPKKKLKLLKGFSKLGLASDPEKLAMFYDLQQNLTSDAGDVLLRELEAARAKEKEVKKKRKQEKKAKLKAAKMNCESSSSSSSESSDSDCGCDQVVDMNTFRAGVGVGVGVGVGVVAPAPVEESPLPKTAPIVEDANAHCVAMELCSKNDIYVSSASNGFKNESAVVTSAPQKRIEVCMGNKCKRSGAAALMQEFEKVVGVEGVAVVACKCMGKCKTAPNVKVQNSVDHNSLAQGLDDSVKIPANPLCIGVGLEDVDAIVARYFWESHTDIGMAGAGAATAT

SEQ ID NO: 53782 - DNA, 1247 bp, Glycine max
  misc_feature (1)..(1247): Ceres Seq. ID no. 14304057
gacagtgagtggaacgcaatggttggtggtggcgtctctcgcatttcccaccattttcgagactgcgacttccatttccatttccacttcacttttacttactctgcttttcaaactttccacctttcgtctcccccactccctctcaaacctcgctggggaggcatttctcaaaccacagttccctcaaattaccgctgttttggcaccccacctaagtcccccggcgaaattcctctccttttcgattgtttcagccaacaagaagaggatcgtgaaattctctctgatggaacatctgccgtggcaggtggaattgtagcattgggaaagtttgatgctctacacataggtcatagagaacttgcaattcaagcatcaagggctggacctccatttcttttgtcatttgttggcatggcaaaagtacttggttgggaacctagggctcctatagttgctaaatgtgaccgaaagcgaattctttcatcttgggttccttattgctgtaacatggtcccagaagagtttgaggttgaattttcaagcgttcgacatctcaatccccgacaatttgttgaaaagttatcaaaagagcttagggtgcggggagttgttgcaggtgagaactaccgattcgggtataaagcagcaggtgatgccttggagttagttaagctttgtgaagagtacgggatggaagcttacataataaaatctgttatggacaagaatcgtttttctgctgatatgaattctgttaccaactccaaagagaggggacaggtctcatctacacgtgttcgtgaagcccttgccgtaggggacctgaagtatgtctcagagcttttggggaggcctcatcgtctcatattaatggccactgatcaagaaagattcagtactgggcagtataaagtgtctgctcctagatcctgcttattgaatctagcaccaaaggaaggattatatgagaagtgctcacttttacttgatcaggaaaatgttgtgcagtgtagtgtagttattgacagcaagtttgtccatatagaaacagattatggaggtctgagtgacattttttgttctcaaaatttgaagttcttgtttattgagtttggtgattcctgcacttgattcagtttagataattatttctatttaaatttttagtctactgaattgtagatgatttttatccatctcccaaagtagagtgatacaggtatatatgtacctttcttcct

SEQ ID NO: 53783 - protein, 378 aa, Glycine max
  peptide (1)..(378): Ceres Seq. ID no. 14304058
DSEWNAMVGGGVSRISHHFRDCDFHFHFHFTFTYSAFQTFHLSSPPLPLKPRWGGISQTTVPSNYRCFGTPPKSPGEIPLLFDCFSQQEEDREILSDGTSAVAGGIVALGKFDALHIGHRELAIQASRAGPPFLLSFVGMAKVLGWEPRAPIVAKCDRKRILSSWVPYCCNMVPEEFEVEFSSVRHLNPRQFVEKLSKELRVRGVVAGENYRFGYKAAGDALELVKLCEEYGMEAYIIKSVMDKNRFSADMNSVTNSKERGQVSSTRVREALAVGDLKYVSELLGRPHRLILMATDQERFSTGQYKVSAPRSCLLNLAPKEGLYEKCSLLLDQENVVQCSVVIDSKFVHIETDYGGLSDIFCSQNLKFLFIEFGDSCT

SEQ ID NO: 53784 - protein, 372 aa, Glycine max
  peptide (1)..(372): Ceres Seq. ID no. 14304059
MVGGGVSRISHHFRDCDFHFHFHFTFTYSAFQTFHLSSPPLPLKPRWGGISQTTVPSNYRCFGTPPKSPGEIPLLFDCFSQQEEDREILSDGTSAVAGGIVALGKFDALHIGHRELAIQASRAGPPFLLSFVGMAKVLGWEPRAPIVAKCDRKRILSSWVPYCCNMVPEEFEVEFSSVRHLNPRQFVEKLSKELRVRGVVAGENYRFGYKAAGDALELVKLCEEYGMEAYIIKSVMDKNRFSADMNSVTNSKERGQVSSTRVREALAVGDLKYVSELLGRPHRLILMATDQERFSTGQYKVSAPRSCLLNLAPKEGLYEKCSLLLDQENVVQCSVVIDSKFVHIETDYGGLSDIFCSQNLKFLFIEFGDSCT

SEQ ID NO: 53785 - protein, 239 aa, Glycine max
  peptide (1)..(239): Ceres Seq. ID no. 14304060
MAKVLGWEPRAPIVAKCDRKRILSSWVPYCCNMVPEEFEVEFSSVRHLNPRQFVEKLSKELRVRGVVAGENYRFGYKAAGDALELVKLCEEYGMEAYIIKSVMDKNRFSADMNSVTNSKERGQVSSTRVREALAVGDLKYVSELLGRPHRLILMATDQERFSTGQYKVSAPRSCLLNLAPKEGLYEKCSLLLDQENVVQCSVVIDSKFVHIETDYGGLSDIFCSQNLKFLFIEFGDSCT

SEQ ID NO: 53786 - DNA, 2376 bp, Glycine max
  misc_feature (1)..(2376): Ceres Seq. ID no. 15174879
gaccaaaacactcttcactataagaaaaaaaaaaagaataaaaaaggatgatactgcagcagattattaagctcctgaccttaactttgatatggtggagcagtattaatgttgaatgtgcagttgcggggacacgcgacacacgtgtgataaactctggatgcagcacaatcaacgcttccaacccgggtagtttctttgggaatgtcaatgagacaatctcagagctgagaggagaaattaggaaccaaagcttgcactttggcacatcattgaaatccaaaggagatgtcaatacatatactatgtttcaatgcagaaactatctctccagaaatgactgtcttgcttgcatcaacactgcctccacccaaatccgggatatatgcaaaaaagccaacggcgcaagactcatctacaatgactgcttcctcaggtatgagagtgagaggttctaccaacagaccaacgaaatcggtggtggggtaacatgtgggaacaagagcacaaatgccacaggttttagagaagttggacaacaagcactactggacctacaaaaagcaacacctaaaattaaaggtttctatgcagctactaagacacaggtggctggtggtagtgcaaatatttatgccattgcacagtgtgttgaaactgcttccccacagaaatgcctggattgcatgcaagttggatacaacaacttacaaagttgccttcccagcacagatggttcagcatatgatgctggctgtttcatgagattctccaccacaccgttctttgctgataatcaaaccattaatatcagaccctatttaaaagaaggaggttcaagcaagaagtgggccattataggtggcgtcgtaggaggtgttgttctcctccttgtgttgtttgcctggagattgtttacaaaaccaaagagagctcccaaagctgacatattgggagcaactgagttgaaaggtccagttagcttcaagtataaagatttgaaagctgcaacaaaaaatttcagtgctgataataaacttggagaaggaggttttggtgctgtatacaagggtactctgaaaaatggaaaagttgttgctgtgaagaaactaatgttggggaaatcaagcaagatggaggatgattttgaaagtgaagtgaagcttataagtaatgttcatcatcggaatctcgttagacttcttggttgttgcagcagaggccccgagagaatcctagtttatgaatatatggcaaatagcagccttgacaaattcttatttggttccaaaaaaggttccctcaattggaaacaacgttatgatataattttgggcacagcaaggggactagcatatctacatgaggagttccatgtgtccatcattcatagagatataaagaccggtaatatccttctagatgattatctccagcccaaaattgcagattttgggttggcaaggcttttgccaagggatcgttcacatctcagcacaaaatttgctggaacactgggatacacagcacctgaatatgcaatgcaaggtcaattatcagagaaagccgatacctacagttatggtattgtggtcctagaaatcttaagtggtcaaaagagtaccaatgtaaaggttgatgacgagggtcgcgagtaccttcttcaacgagcatggaaactgtatgagagaggcatgcagttggagcttgtggacaaggacatagaccccaatgaatatgatgcagaagaagcgaagaaaatcattgaaattgctttattatgcactcaagcatcagctgcagccaggccaacaatgtctgaattaatagttctactcaaaagcaagagcttagtggagcaccttcgaccaactatgccggtgtttgttgaaacgaatatgatgaatcaggaaggtggcagctctcctggtacatctaatgctactatctccatttccgttctatcggccagatgattattggatcaatgtggtaaagggtcttgatgaactgaatcaataagcaacagaataaaatggataaagattgcttttgattccagttgtttaattgtcaactgtttaagaatagctatgttgcaaagtagagactactgtgtggtgttgttgatttattagtagagtataaaattaaggatgttttgtcaatgtgtgatgctacatattttctactttgatagtttcctgttcaaaatcacgcaagtataagtgcatgcaatttcaaattccgtgttgtatatatgttaagctactatatgtatgtgatctgttggcacgacttgtgccttttaataaaatagttctttgaattccaaaaaaaaaaaaaaaaaaaaaaaaaaaaaaaaaaaaaaaaaat

SEQ ID NO: 53787 - protein, 642 aa, Glycine max
  peptide (1)..(642): Ceres Seq. ID no. 15174880
MILQQIIKLLTLTLIWWSSINVECAVAGTRDTRVINSGCSTINASNPGSFFGNVNETISELRGEIRNQSLHFGTSLKSKGDVNTYTMFQCRNYLSRNDCLACINTASTQIRDICKKANGARLIYNDCFLRYESERFYQQTNEIGGGVTCGNKSTNATGFREVGQQALLDLQKATPKIKGFYAATKTQVAGGSANIYAIAQCVETASPQKCLDCMQVGYNNLQSCLPSTDGSAYDAGCFMRFSTTPFFADNQTINIRPYLKEGGSSKKWAIIGGVVGGVVLLLVLFAWRLFTKPKRAPKADILGATELKGPVSFKYKDLKAATKNFSADNKLGEGGFGAVYKGTLKNGKVVAVKKLMLGKSSKMEDDFESEVKLISNVHHRNLVRLLGCCSRGPERILVYEYMANSSLDKFLFGSKKGSLNWKQRYDIILGTARGLAYLHEEFHVSIIHRDIKTGNILLDDYLQPKIADFGLARLLPRDRSHLSTKFAGTLGYTAPEYAMQGQLSEKADTYSYGIVVLEILSGQKSTNVKVDDEGREYLLQRAWKLYERGMQLELVDKDIDPNEYDAEEAKKIIEIALLCTQASAAARPTMSELIVLLKSKSLVEHLRPTMPVFVETNMMNQEGGSSPGTSNATISISVLSAR

SEQ ID NO: 53788 - protein, 556 aa, Glycine max
  peptide (1)..(556): Ceres Seq. ID no. 15174881
MFQCRNYLSRNDCLACINTASTQIRDICKKANGARLIYNDCFLRYESERFYQQTNEIGGGVTCGNKSTNATGFREVGQQALLDLQKATPKIKGFYAATKTQVAGGSANIYAIAQCVETASPQKCLDCMQVGYNNLQSCLPSTDGSAYDAGCFMRFSTTPFFADNQTINIRPYLKEGGSSKKWAIIGGVVGGVVLLLVLFAWRLFTKPKRAPKADILGATELKGPVSFKYKDLKAATKNFSADNKLGEGGFGAVYKGTLKNGKVVAVKKLMLGKSSKMEDDFESEVKLISNVHHRNLVRLLGCCSRGPERILVYEYMANSSLDKFLFGSKKGSLNWKQRYDIILGTARGLAYLHEEFHVSIIHRDIKTGNILLDDYLQPKIADFGLARLLPRDRSHLSTKFAGTLGYTAPEYAMQGQLSEKADTYSYGIVVLEILSGQKSTNVKVDDEGREYLLQRAWKLYERGMQLELVDKDIDPNEYDAEEAKKIIEIALLCTQASAAARPTMSELIVLLKSKSLVEHLRPTMPVFVETNMMNQEGGSSPGTSNATISISVLSAR

SEQ ID NO: 53789 - protein, 429 aa, Glycine max
  peptide (1)..(429): Ceres Seq. ID no. 15174882
MQVGYNNLQSCLPSTDGSAYDAGCFMRFSTTPFFADNQTINIRPYLKEGGSSKKWAIIGGVVGGVVLLLVLFAWRLFTKPKRAPKADILGATELKGPVSFKYKDLKAATKNFSADNKLGEGGFGAVYKGTLKNGKVVAVKKLMLGKSSKMEDDFESEVKLISNVHHRNLVRLLGCCSRGPERILVYEYMANSSLDKFLFGSKKGSLNWKQRYDIILGTARGLAYLHEEFHVSIIHRDIKTGNILLDDYLQPKIADFGLARLLPRDRSHLSTKFAGTLGYTAPEYAMQGQLSEKADTYSYGIVVLEILSGQKSTNVKVDDEGREYLLQRAWKLYERGMQLELVDKDIDPNEYDAEEAKKIIEIALLCTQASAAARPTMSELIVLLKSKSLVEHLRPTMPVFVETNMMNQEGGSSPGTSNATISISVLSAR

SEQ ID NO: 53790 - DNA, 1754 bp, Glycine max
  misc_feature (1)..(1754): Ceres Seq. ID no. 14310663
aagcaaggagatgcaactgaaaaagtgtctgttagaaagaagaggaaaggcagtgaggatacaatggcatctaaatctgtgcagaagagaaaagggttgttcctaaatactgatagaaatgcggcaggtgctgaaaatgatggtggtagttggggcaaagaggatggtgacaatggaacattggcgcagttgaaaaagaagaaaaaatcttttggtattggaaacactagtagtgggagcaaaaaggaaactgatcatgaaggaaaggccaaagtaaaaaatgggaagggttctttgtcaagagaaaggaagaaaagcaagtacctgtcccctccttttgctattccagccagagagcagaggaaaggagagagggaaacagaatcccctaaagtttctggcaaagatcagcaatcagagccactgaccagagcttctgatcaacttctgaagtcccctgtacctttgaagttgaatgatgagccatttcaggagaatgtttcgaaggaacttgtcatagaccaggaccttcctgatagctcaaattaccgaacaccagaatatgatgagaacaagactattgatacaacaaaaatccaggttccatcaggggaagttctgtctgaagtctgttatgcagctattaatccacaaactccaatgaatatcaattctcttgaaagaattgtggactttatttttatctacagaagctcgttatatcgccaaggatcctactacaaaatatacaagaagcataaacctagcaagaagggaaagaagccagaatctgatctggggattttgaggaaagatcaaatacaatctgataaaaaatcagctaataatgattcggagccaaagaagagaagaaagaatgagacaacttcaagtttgcctaaagagaagcaatctgctgcagctaagactggcaagaaggggattgataaaaaagcttcaggtgcttcccttttcatctcatttgggccaggatcctctctgccttcaaattcggatcttaccacactgtatggtaagtttggagctctgaatgaatcagaaacatctatgctctctagtgattgcactgctcgtgtgttcttcctgaaagcctctgatgctgaaaaggccttgagccattcacagaacatgaacccctttggctcttccgaagcctctttcagacttgagtatctttctgctggttccaagtctgaaaaatccaagtttaaagcttcttcaacaaagaagaaagacaagactccagccaagccatctgcttcattgtcaccaggtggtgaagcatccaaattgaactacataaaggaaaaacttcagggtctgacatcaatgctagaagcatcggatgctaaattacctgatatcaagacaaaattagagagtgagatgaaacagcttttggaggatgtgaacagaatggttgaatcttcttcctaaataacgcatggaatacatactagcaattatttagctagtaatcagggtaggtttatgatatgtcatttccatttagcggactgtctttatctgagaatcaatttatttgtctcatttctgagcctagctttagttaagaggtaaaattactcatatcggtttgttgtgtaggatatgtgacctgttgtatgcataggctgtatagacaccaacatccttttttagatcttctgtcctttttatagtggtgaacaaacagctttaaggatcaaaggtataatgttttcatttctgtc

SEQ ID NO: 53791 - protein, 485 aa, Glycine max
  peptide (1)..(485): Ceres Seq. ID no. 14310664
KQGDATEKVSVRKKRKGSEDTMASKSVQKRKGLFLNTDRNAAGAENDGGSWGKEDGDNGTLAQLKKKKKSFGIGNTSSGSKKETDHEGKAKVKNGKGSLSRERKKSKYLSPPFAIPAREQRKGERETESPKVSGKDQQSEPLTRASDQLLKSPVPLKLNDEPFQENVSKELVIDQDLPDSSNYRTPEYDENKTIDTTKIQVPSGEVLSEVCYAAINPQTPMNINSLERIVDFIFIYRSSLYRQGSYYKIYKKHKPSKKGKKPESDLGILRKDQIQSDKKSANNDSEPKKRRKNETTSSLPKEKQSAAAKTGKKGIDKKASGASLFISFGPGSSLPSNSDLTTLYGKFGALNESETSMLSSDCTARVFFLKASDAEKALSHSQNMNPFGSSEASFRLEYLSAGSKSEKSKFKASSTKKKDKTPAKPSASLSPGGEASKLNYIKEKLQGLTSMLEASDAKLPDIKTKLESEMKQLLEDVNRMVESSS

SEQ ID NO: 53792 - protein, 464 aa, Glycine max
  peptide (1)..(464): Ceres Seq. ID no. 14310665
MASKSVQKRKGLFLNTDRNAAGAENDGGSWGKEDGDNGTLAQLKKKKKSFGIGNTSSGSKKETDHEGKAKVKNGKGSLSRERKKSKYLSPPFAIPAREQRKGERETESPKVSGKDQQSEPLTRASDQLLKSPVPLKLNDEPFQENVSKELVIDQDLPDSSNYRTPEYDENKTIDTTKIQVPSGEVLSEVCYAAINPQTPMNINSLERIVDFIFIYRSSLYRQGSYYKIYKKHKPSKKGKKPESDLGILRKDQIQSDKKSANNDSEPKKRRKNETTSSLPKEKQSAAAKTGKKGIDKKASGASLFISFGPGSSLPSNSDLTTLYGKFGALNESETSMLSSDCTARVFFLKASDAEKALSHSQNMNPFGSSEASFRLEYLSAGSKSEKSKFKASSTKKKDKTPAKPSASLSPGGEASKLNYIKEKLQGLTSMLEASDAKLPDIKTKLESEMKQLLEDVNRMVESSS

SEQ ID NO: 53793 - protein, 265 aa, Glycine max
  peptide (1)..(265): Ceres Seq. ID no. 14310666
MNINSLERIVDFIFIYRSSLYRQGSYYKIYKKHKPSKKGKKPESDLGILRKDQIQSDKKSANNDSEPKKRRKNETTSSLPKEKQSAAAKTGKKGIDKKASGASLFISFGPGSSLPSNSDLTTLYGKFGALNESETSMLSSDCTARVFFLKASDAEKALSHSQNMNPFGSSEASFRLEYLSAGSKSEKSKFKASSTKKKDKTPAKPSASLSPGGEASKLNYIKEKLQGLTSMLEASDAKLPDIKTKLESEMKQLLEDVNRMVESSS

SEQ ID NO: 53794 - DNA, 1191 bp, Glycine max
  misc_feature (1)..(1191): Ceres Seq. ID no. 14310819
gaactcattcttcttcaactcaacagagcaagggttcgcactcgcagattcttgagcaagaataatggggaagaaaagaaaacacagtgagactactcaagctgtagcacaacccaaaaaggaagaggctgctccagagagaccggctaggacccttttggggtggaaggataagaatcaagttgaggatgattcaccaatatttaggaacaaagagaagctattggtcacttgctctaggcgcatcaattacaggtaccggcatttgatgttgaatttggtcacacttttgcctcattgtaagaaggataacaaagttgaatcaaaggaaactaaaggagccaccctcaacgagcttgttgagctaaaaaattgttcctcttgtttattttttgagtgcaggaagcataaagatctttatctctggatggcaaaatgccccaatggcccatctgtaaagtttctagttagtgccgttcacacaatggaggaattgaagctaacgggaaatcacctacaaggttcgcgtccaattttgacattttcagcaaattttgaaaaagatgcacattggaaactattaaaggagatgttgttacagatatttgaaacaccaaaggaccacagaaaggccaagcctttccatgatcacgtttttgttttctcaatagttgatgaccatatatggttccggaattatcagatctctgctcatcataatgagtcggacaaattacctagaggtggccttgataaaatgacattgattgaggttggtccgcgattctgcttgaacccaattaaaatatttggtggcagttttggaggcccaactttatatgagaatccgctctatgtgtcaccaaatcagattggagctttggagaaaaagaagaagtctggaaagtttgcaaagaaggtcaaagcaaagacaaggaggaaaatgcacgagatgtccaatcctctggagcctgatgagtttgcagatatgtggaaagattgattttaaatacaaccgcagctaccacataaaagaaaaacccatatttctcctatattatcctcgcattatattccataacattaaagggagacttttgtgattctataatgttattttcagtaatttcaggtggggtcgggttattctcttttatcagacattggccctagtggaaattaaattttgac

SEQ ID NO: 53795 - protein, 312 aa, Glycine max
  peptide (1)..(312): Ceres Seq. ID no. 14310820
MGKKRKHSETTQAVAQPKKEEAAPERPARTLLGWKDKNQVEDDSPIFRNKEKLLVTCSRRINYRYRHLMLNLVTLLPHCKKDNKVESKETKGATLNELVELKNCSSCLFFECRKHKDLYLWMAKCPNGPSVKFLVSAVHTMEELKLTGNHLQGSRPILTFSANFEKDAHWKLLKEMLLQIFETPKDHRKAKPFHDHVFVFSIVDDHIWFRNYQISAHHNESDKLPRGGLDKMTLIEVGPRFCLNPIKIFGGSFGGPTLYENPLYVSPNQIGALEKKKKSGKFAKKVKAKTRRKMHEMSNPLEPDEFADMWKD

SEQ ID NO: 53796 - protein, 244 aa, Glycine max
  peptide (1)..(244): Ceres Seq. ID no. 14310821
MLNLVTLLPHCKKDNKVESKETKGATLNELVELKNCSSCLFFECRKHKDLYLWMAKCPNGPSVKFLVSAVHTMEELKLTGNHLQGSRPILTFSANFEKDAHWKLLKEMLLQIFETPKDHRKAKPFHDHVFVFSIVDDHIWFRNYQISAHHNESDKLPRGGLDKMTLIEVGPRFCLNPIKIFGGSFGGPTLYENPLYVSPNQIGALEKKKKSGKFAKKVKAKTRRKMHEMSNPLEPDEFADMWKD

SEQ ID NO: 53797 - protein, 191 aa, Glycine max
  peptide (1)..(191): Ceres Seq. ID no. 14310822
MAKCPNGPSVKFLVSAVHTMEELKLTGNHLQGSRPILTFSANFEKDAHWKLLKEMLLQIFETPKDHRKAKPFHDHVFVFSIVDDHIWFRNYQISAHHNESDKLPRGGLDKMTLIEVGPRFCLNPIKIFGGSFGGPTLYENPLYVSPNQIGALEKKKKSGKFAKKVKAKTRRKMHEMSNPLEPDEFADMWKD

SEQ ID NO: 53798 - DNA, 1715 bp, Glycine max
  misc_feature (1)..(1715): Ceres Seq. ID no. 14304000
ggttaaggaccgactcttcacttgggaggaagtgacgatcgaaatctggtaagaggctgtaatcaatcaaccaaagcaacgatgtcgtggtttacaaggacaatcgcaaactcactcaaactcgacgacgacgacaatggcggtgacctaaaatcccctccgaagaaacccgattcggaacccgttcaacccgattccgcatccacccccaatcccaccacgcgcggcgtcaaagaggatttttccgagctcaccaaatccttttcccgccagctctggggagtcgcctccttcctcgccccgccgcccgatccccaatccgaaaagcccgtcgccgattccaatcccaatcccactgacgacgacgaagaggaagatatcatcgcaggaatccgaaacgatttcgcggagattagtggcaagttcaagagcgggatctccaaaatttctggtaataagacggtatccgaattcactaagatagcttcgagtttccttcagcttggatccgaggaggaatacgatctcgaaggtgtcctcggagttaccgaggatgtggttgccttcgccagaagcgtagctttgcatccagaaacttggctcgattttccccttcccgatgatgaggattctgatgattttgatttgtccgatgcacaacaagaacatgctctagctgttgaacacctggcaccaagcttagctgctcttagaatggagctgtgccccggatacatgagtgatggtaacttttggaagatatactttgttctcgtgcaccctagacttagcaaaactgatgctgctattttatccactccacaaataatggaagctagagcaatgttaactctggctttagacaaaagaagtaaggaaaagaaagaatctgacttatctgcaggagggaatgttccctcaaaagaggaggaacagcatctctttgtgccaagcactgttcaacttgaatcagcacctctccagacatctgctgctgaagctgccccatctgtggttgtttctaatgttgagatggagaaacatgccactcaaagtattgttccagaggttattgacaagtctgtggttaaagaagcaacggtaaatccatctgcagaacaatcatcatctggttcaaccaatagatttttggatgaatcctatgaggatgatgctgatgattggttgaaagaagaggatacttctgaaatggttggtcccagtggaactcctgttcacactggtaatgacgaggatgtatcattcagtgatcttgaggaggatgatggtgatgtacatgaaagttataaaaaaactagatcaggctctgattcttcaacaaaagactctcgagattgggttcagttaggtagaagttcacctaactctgataaggatttaaactgtgtagaaggcaaacatgttggctctgagcattcaagtgctcgtaattctatgaccaaggattccaatgattggcttaatgttgatgacattgatgtaatatgactatgccttggaatatgtcccagaggtaagtttttttttatttttaaatatgattctcttatattttgtgaatatctgcatatagttgtgtactctacgattgacattctgaagaatgcgtttctgtaaataaaaccagtctccactgggcattgtgctatgtatggttatttattgcaccgtacataaactaaatcttctatttg

SEQ ID NO: 53799 - protein, 475 aa, Glycine max
  peptide (1)..(475): Ceres Seq. ID no. 14304001
MSWFTRTIANSLKLDDDDNGGDLKSPPKKPDSEPVQPDSASTPNPTTRGVKEDFSELTKSFSRQLWGVASFLAPPPDPQSEKPVADSNPNPTDDDEEEDIIAGIRNDFAEISGKFKSGISKISGNKTVSEFTKIASSFLQLGSEEEYDLEGVLGVTEDVVAFARSVALHPETWLDFPLPDDEDSDDFDLSDAQQEHALAVEHLAPSLAALRMELCPGYMSDGNFWKIYFVLVHPRLSKTDAAILSTPQIMEARAMLTLALDKRSKEKKESDLSAGGNVPSKEEEQHLFVPSTVQLESAPLQTSAAEAAPSVVVSNVEMEKHATQSIVPEVIDKSVVKEATVNPSAEQSSSGSTNRFLDESYEDDADDWLKEEDTSEMVGPSGTPVHTGNDEDVSFSDLEEDDGDVHESYKKTRSGSDSSTKDSRDWVQLGRSSPNSDKDLNCVEGKHVGSEHSSARNSMTKDSNDWLNVDDIDVI

SEQ ID NO: 53800 - protein, 264 aa, Glycine max
  peptide (1)..(264): Ceres Seq. ID no. 14304002
MELCPGYMSDGNFWKIYFVLVHPRLSKTDAAILSTPQIMEARAMLTLALDKRSKEKKESDLSAGGNVPSKEEEQHLFVPSTVQLESAPLQTSAAEAAPSVVVSNVEMEKHATQSIVPEVIDKSVVKEATVNPSAEQSSSGSTNRFLDESYEDDADDWLKEEDTSEMVGPSGTPVHTGNDEDVSFSDLEEDDGDVHESYKKTRSGSDSSTKDSRDWVQLGRSSPNSDKDLNCVEGKHVGSEHSSARNSMTKDSNDWLNVDDIDVI

SEQ ID NO: 53801 - protein, 257 aa, Glycine max
  peptide (1)..(257): Ceres Seq. ID no. 14304003
MSDGNFWKIYFVLVHPRLSKTDAAILSTPQIMEARAMLTLALDKRSKEKKESDLSAGGNVPSKEEEQHLFVPSTVQLESAPLQTSAAEAAPSVVVSNVEMEKHATQSIVPEVIDKSVVKEATVNPSAEQSSSGSTNRFLDESYEDDADDWLKEEDTSEMVGPSGTPVHTGNDEDVSFSDLEEDDGDVHESYKKTRSGSDSSTKDSRDWVQLGRSSPNSDKDLNCVEGKHVGSEHSSARNSMTKDSNDWLNVDDIDVI

SEQ ID NO: 53802 - DNA, 1612 bp, Glycine max
  misc_feature (1)..(1612): Ceres Seq. ID no. 14303943
gcgctcacatcgtgttctctgcggcgcgagctagctagggtttagaacctcgcagttacagaaaacatggcgactgtggtgccaacctccgaagaagacgctgcactctccgtcgttcgattcgcctctgaacttgcctgggccgatgccggtcccgaggttgctgagccccaagttagcagactctgcgtggaggctgaagaattcattgttatgggaaagtggttggagctagcatcattgatgattacctctgctgaattgattttctcgaaggtttctgaaaaagatatagagtccatcttcactatcatctgcaatcttgttacaaagaccgaaaatccagatgaagtgatggagattgtaaaagttataactacaaaaatactccagcagccaaatgaaaagcctgctgtgcgattgaagattatgatcagcctgtacaaccttttggagactccatactgccagttttatgtctacatgaagttactgaatttagctgttgatgggaaagtcacagaacacattataccttcattcaataagattgataacttcttgaaagactggaaaattgggataccagaacagagagagctctttcttgctgtctctaatattttgaaggaaaataaaagcatgtcaaaggatgcttttaagttcctgaccagttatctggcaactttttcgggagatgactcacatgttttgagtgaagccaaggaggaggctgcacgtgcaattgtggaatttgtgagggcacctgacgtatttcagtgtgatttactagacttgcctgctgttacacaactggagaaggatgccaaatatgctctgttatatcagcttcttaagatttttcttacccagaggctggatgcatacttagactatcatgctgccaattccaccttgttgaaaagttatggccttgtgcatgaagaatgcattgccaaaatgaggcttttgtcattggtggatcttagctctgatggatctggccaaattccatatgaacttattagggacacacttcagatcagtgatgatgaggtggaactatgggtagttagaggattaactgctaacttaattgactgtaagatggaccaaatgaatcaagttgtagttgtcagtcatcctactgagcgtgtgtttggtcagcaccaatggcaagcactgagaacaaagctagtgacatggaggggaaacattgcaaatgtgatcagtaccattcaggccaacaaaataacggaggatgggtcccaggcagcccaaggcttggtagttcggtgaggacgattgagtgaagcaattatctgagtatctagattttatccaggtggaatttttttatcttaaacagaggataagagtgtaatttgctttgttgcaatttatttttccatttattttagttggctggtgactctaatttgtactaaactttggcagagccattttgattgaagtttttccatttttaatttagaccagcctcatttctaaatatctttctgtcgtctaagttaaccagtgcgattgttgttgccctgattgcatagtcaattcaactatcaaattcatattagtatattttcactcttac

SEQ ID NO: 53803 - protein, 410 aa, Glycine max
  peptide (1)..(410): Ceres Seq. ID no. 14303944
MATVVPTSEEDAALSVVRFASELAWADAGPEVAEPQVSRLCVEAEEFIVMGKWLELASLMITSAELIFSKVSEKDIESIFTIICNLVTKTENPDEVMEIVKVITTKILQQPNEKPAVRLKIMISLYNLLETPYCQFYVYMKLLNLAVDGKVTEHIIPSFNKIDNFLKDWKIGIPEQRELFLAVSNILKENKSMSKDAFKFLTSYLATFSGDDSHVLSEAKEEAARAIVEFVRAPDVFQCDLLDLPAVTQLEKDAKYALLYQLLKIFLTQRLDAYLDYHAANSTLLKSYGLVHEECIAKMRLLSLVDLSSDGSGQIPYELIRDTLQISDDEVELWVVRGLTANLIDCKMDQMNQVVVVSHPTERVFGQHQWQALRTKLVTWRGNIANVISTIQANKITEDGSQAAQGLVVR

SEQ ID NO: 53804 - protein, 361 aa, Glycine max
  peptide (1)..(361): Ceres Seq. ID no. 14303945
MGKWLELASLMITSAELIFSKVSEKDIESIFTIICNLVTKTENPDEVMEIVKVITTKILQQPNEKPAVRLKIMISLYNLLETPYCQFYVYMKLLNLAVDGKVTEHIIPSFNKIDNFLKDWKIGIPEQRELFLAVSNILKENKSMSKDAFKFLTSYLATFSGDDSHVLSEAKEEAARAIVEFVRAPDVFQCDLLDLPAVTQLEKDAKYALLYQLLKIFLTQRLDAYLDYHAANSTLLKSYGLVHEECIAKMRLLSLVDLSSDGSGQIPYELIRDTLQISDDEVELWVVRGLTANLIDCKMDQMNQVVVVSHPTERVFGQHQWQALRTKLVTWRGNIANVISTIQANKITEDGSQAAQGLVVR

SEQ ID NO: 53805 - protein, 351 aa, Glycine max
  peptide (1)..(351): Ceres Seq. ID no. 14303946
MITSAELIFSKVSEKDIESIFTIICNLVTKTENPDEVMEIVKVITTKILQQPNEKPAVRLKIMISLYNLLETPYCQFYVYMKLLNLAVDGKVTEHIIPSFNKIDNFLKDWKIGIPEQRELFLAVSNILKENKSMSKDAFKFLTSYLATFSGDDSHVLSEAKEEAARAIVEFVRAPDVFQCDLLDLPAVTQLEKDAKYALLYQLLKIFLTQRLDAYLDYHAANSTLLKSYGLVHEECIAKMRLLSLVDLSSDGSGQIPYELIRDTLQISDDEVELWVVRGLTANLIDCKMDQMNQVVVVSHPTERVFGQHQWQALRTKLVTWRGNIANVISTIQANKITEDGSQAAQGLVVR

SEQ ID NO: 53806 - DNA, 1143 bp, Glycine max
  misc_feature (1)..(1143): Ceres Seq. ID no. 14306654
tttgcattcagcctcccagtggaaagggccccaagcataagcagacatgcacatgtaatgtatgcttaacagtgaagcgacgattccgtacccttatgttacggcgtgagaagaaacaatcagaaaaagaagcagagacaactcgtaaaaagcaacagcaacaacatcctctaccattaccttcatctgaaattttgcttgatgaagattccttgccctgtagtaacacaggtgatagtagcccaaaccagaacaaagagggtaatgatggttctgatgatgatcctagccgaataaaatcatctgcttcgccgttcaaaggcaaaattgacctcaatatccaaccagagcgagaagaagaattatcacctggttcggattctggcggcatgatgaagttgctccatgatgctactgagcgatatctcaaacagcagactgtgaactctggtactggagattcatcaggcagtcagtcacagctggtaggagatgcaatgagggaagataaacttagcaatggtgttgcccatggcagtagtagtcataatactgataaggaacatgcccaatctttgcctatgaatgtgtgaaaatcatattggcgctagccataattgatacgttcttgcaaagctatattgaagtggggaaagattttgctgtacattttatccacttcggcttcttgctttttcttgtttgtacataaagaggagtaggaaaaaatggtgagaaaccaatatattccggtaatataagtgggcatcatagtggtttgtgtaggaaaactatgaaatgcagctgaatgggtagtaggttgaagctgtttagtttctttgagagctcaccgtgccacctgatttcaacaacgttgaaaatgtaactatgcctaatttgttctcccaatttattcttagcctgtaagatgtttatactttctagtaactgctagttctgttcgctgtttctctttattggaaatttggaggcacactttcacccgttttcagcaagcaacctatgctgtatacaatcaatgatggcagagaaatattggctgttttaaggggggaagtgcactcgtccattgttattgcactcggtacaaatctacccgtgtaattatttatagcctctgtt

SEQ ID NO: 53807 - protein, 196 aa, Glycine max
  peptide (1)..(196): Ceres Seq. ID no. 14306655
CIQPPSGKGPKHKQTCTCNVCLTVKRRFRTLMLRREKKQSEKEAETTRKKQQQQHPLPLPSSEILLDEDSLPCSNTGDSSPNQNKEGNDGSDDDPSRIKSSASPFKGKIDLNIQPEREEELSPGSDSGGMMKLLHDATERYLKQQTVNSGTGDSSGSQSQLVGDAMREDKLSNGVAHGSSSHNTDKEHAQSLPMNV

SEQ ID NO: 53808 - protein, 165 aa, Glycine max
  peptide (1)..(165): Ceres Seq. ID no. 14306656
MLRREKKQSEKEAETTRKKQQQQHPLPLPSSEILLDEDSLPCSNTGDSSPNQNKEGNDGSDDDPSRIKSSASPFKGKIDLNIQPEREEELSPGSDSGGMMKLLHDATERYLKQQTVNSGTGDSSGSQSQLVGDAMREDKLSNGVAHGSSSHNTDKEHAQSLPMNV

SEQ ID NO: 53809 - DNA, 1405 bp, Glycine max
  misc_feature (1)..(1405): Ceres Seq. ID no. 14306671
ggcttgtgagttctgacccaacagaggccaccacgcccatactatcccaatattctcttctttttggtggcagaagagaagagaaacaagaccacatccgcattcatcatacccaccttaatttcccctttccctttggcatagactatagactaaagtgtgtcaaactcactatgatactgacactactgcctcctccaaaatcaccattcttgaatacccttttgctcctctgcactactctcctcctcccaccttgctacctggctctccctgaccctgatgctgatgcggttcagccaatcatcccaaacccctcatcttcaacaggaacaatccctgcattcccagaacaagctgatgctgcagggtgccctctcagcctctcagatgagcactacgaaggcataaagagtgcatgtggctccaacaaacatgctgcagatgatgatgatgacctccaccgtagcagatgctgtcctgtgctggcagcgtggctctattctgcatactcagccactgcccttagtggtggaatgcaacatgaacgtgcctcaaagggccataccacatcctatgacatgcccttgttgcctgatgattcagaaacatgtgtgagtgacttggggaaggccttgaaaattagaggaatccagctttttcagcccaatgagacttgtgatctggtctattgctactgtggcattaggcttcaccctttgacctgtcctgagtcattctcagttactccaagtggaactcttgttgtcaatcaaagtgtgaaaagattggagagggattgcttcagtagcagcaccaatgtcaataagtttcccggcctgggaggatgctccaagtgcttgcatagtctctattcgcttaggaagaattcttcaaattcaagcaagtcagaagataggaccaccaagatccataacaaagattgtgaactaatgggcctgacatggcttctggctaagaatagaacagcttacattcacacagtttctggggttcttcgagctttgatgttgagcactgaaggctctgacccacaatcatgcactctaaacagtgatggaatgcctcttgccgttgattcctctgaaatgtcagatgaatcttcatcaaccaacctacaagcaccaattttcctctctttgttactatttctacattatttcactctattatggcacctaactgaaaacgagtgcaaagagattgatccccattccccaacatggcatttgtaaatttgaatctgtgctttggtgcttaggagtgtatttttattttctttcttgggtgttaatttgtttgaaagaaaattcataatggttttgttttggtggtcctggattgccatgtgctaatagcgaccggtgtttcgtttcggagggac

SEQ ID NO: 53810 - protein, 417 aa, Glycine max
  peptide (1)..(417): Ceres Seq. ID no. 14306672
LVSSDPTEATTPILSQYSLLFGGRREEKQDHIRIHHTHLNFPFPFGIDYRLKCVKLTMILTLLPPPKSPFLNTLLLLCTTLLLPPCYLALPDPDADAVQPIIPNPSSSTGTIPAFPEQADAAGCPLSLSDEHYEGIKSACGSNKHAADDDDDLHRSRCCPVLAAWLYSAYSATALSGGMQHERASKGHTTSYDMPLLPDDSETCVSDLGKALKIRGIQLFQPNETCDLVYCYCGIRLHPLTCPESFSVTPSGTLVVNQSVKRLERDCFSSSTNVNKFPGLGGCSKCLHSLYSLRKNSSNSSKSEDRTTKIHNKDCELMGLTWLLAKNRTAYIHTVSGVLRALMLSTEGSDPQSCTLNSDGMPLAVDSSEMSDESSSTNLQAPIFLSLLLFLHYFTLLWHLTENECKEIDPHSPTWHL

SEQ ID NO: 53811 - protein, 360 aa, Glycine max
  peptide (1)..(360): Ceres Seq. ID no. 14306673
MILTLLPPPKSPFLNTLLLLCTTLLLPPCYLALPDPDADAVQPIIPNPSSSTGTIPAFPEQADAAGCPLSLSDEHYEGIKSACGSNKHAADDDDDLHRSRCCPVLAAWLYSAYSATALSGGMQHERASKGHTTSYDMPLLPDDSETCVSDLGKALKIRGIQLFQPNETCDLVYCYCGIRLHPLTCPESFSVTPSGTLVVNQSVKRLERDCFSSSTNVNKFPGLGGCSKCLHSLYSLRKNSSNSSKSEDRTTKIHNKDCELMGLTWLLAKNRTAYIHTVSGVLRALMLSTEGSDPQSCTLNSDGMPLAVDSSEMSDESSSTNLQAPIFLSLLLFLHYFTLLWHLTENECKEIDPHSPTWHL

SEQ ID NO: 53812 - protein, 239 aa, Glycine max
  peptide (1)..(239): Ceres Seq. ID no. 14306674
MQHERASKGHTTSYDMPLLPDDSETCVSDLGKALKIRGIQLFQPNETCDLVYCYCGIRLHPLTCPESFSVTPSGTLVVNQSVKRLERDCFSSSTNVNKFPGLGGCSKCLHSLYSLRKNSSNSSKSEDRTTKIHNKDCELMGLTWLLAKNRTAYIHTVSGVLRALMLSTEGSDPQSCTLNSDGMPLAVDSSEMSDESSSTNLQAPIFLSLLLFLHYFTLLWHLTENECKEIDPHSPTWHL

SEQ ID NO: 53813 - DNA, 835 bp, Glycine max
  misc_feature (1)..(835): Ceres Seq. ID no. 14303973
gaaaaaagcaaaaatgcaatctatgtccctgacgctgagcaagaggctctccaattcaaagcctctcttcagaatctcttccaacctcgtcgctcacgcatcctccgccacaacctctccgccgccaccttcgccgccagtcccctctccatccgccctcaacagcctcctcaccgctccgtggtccgccactcagtcacgcggaatcacgctctctggatctgatgttcgagtcgggaatctcattggaaaccgaggacgcgctcacgaggttctcaaactgtatcgccctcttgaaggaacgggcaaagccactcttgaggttccgcctcaaagtgtagctggttatgccacagttgctactacagaggatggcgccgaaaggaaggaacgaaacagtggattgagtaaggcaacgaagacaaagagagagcagctcctaaaagctactgcagttgcctctcttcttctaatatacccgaacacttattcattgctcttcgcaaatttctttgtgttctggcacttatatgcagggatcggagagattttggcagactatgttcaccatgaaatgaccagagaatttgtcatgatttctctcaggttgttcttgataatggcattgaaggatgtatgcttaaattttgtatttgtataatcagatagtgcatgggttgtgctgacattactttccaataagaggccatttagggtcaaacttggcaaaaccttaatttgtagtttctagtcgttttctcaaacttaagaggcgaggcaacgtgataacttgatgatttatcatggtaatggatgaattttagcgtgtcttgcg

SEQ ID NO: 53814 - protein, 219 aa, Glycine max
  peptide (1)..(219): Ceres Seq. ID no. 14303974
KKAKMQSMSLTLSKRLSNSKPLFRISSNLVAHASSATTSPPPPSPPVPSPSALNSLLTAPWSATQSRGITLSGSDVRVGNLIGNRGRAHEVLKLYRPLEGTGKATLEVPPQSVAGYATVATTEDGAERKERNSGLSKATKTKREQLLKATAVASLLLIYPNTYSLLFANFFVFWHLYAGIGEILADYVHHEMTREFVMISLRLFLIMALKDVCLNFVFV

SEQ ID NO: 53815 - protein, 215 aa, Glycine max
  peptide (1)..(215): Ceres Seq. ID no. 14303975
MQSMSLTLSKRLSNSKPLFRISSNLVAHASSATTSPPPPSPPVPSPSALNSLLTAPWSATQSRGITLSGSDVRVGNLIGNRGRAHEVLKLYRPLEGTGKATLEVPPQSVAGYATVATTEDGAERKERNSGLSKATKTKREQLLKATAVASLLLIYPNTYSLLFANFFVFWHLYAGIGEILADYVHHEMTREFVMISLRLFLIMALKDVCLNFVFV

SEQ ID NO: 53816 - protein, 212 aa, Glycine max
  peptide (1)..(212): Ceres Seq. ID no. 14303976
MSLTLSKRLSNSKPLFRISSNLVAHASSATTSPPPPSPPVPSPSALNSLLTAPWSATQSRGITLSGSDVRVGNLIGNRGRAHEVLKLYRPLEGTGKATLEVPPQSVAGYATVATTEDGAERKERNSGLSKATKTKREQLLKATAVASLLLIYPNTYSLLFANFFVFWHLYAGIGEILADYVHHEMTREFVMISLRLFLIMALKDVCLNFVFV

SEQ ID NO: 53817 - DNA, 1240 bp, Glycine max
  misc_feature (1)..(1240): Ceres Seq. ID no. 14304650
aaaggtggaacccccatggctgttacagcctctagctttggaactacatggtgtcttagaagagcagctcaggcttttgctatctctcattctcatattctccgcaacaatgttaaactctctttgcagaggaacttttgctctcatcttctctccgtttctacttctttagcttcaggtgtaagccagacagtacaagctctaaagggagaagttgacttgttactcaaaggagtaggagaaagaagtgtaacgaaagaagtaaaacatattcttgagatggctagacgagcatcattaaagcgagagattctccatacagattttctaacccctccagtgttaaaggaatctatgcaagttttggaaaaactagcagacgtgaaagcaattgctcaaggaggttaccctcaggctgaacgttgtcggatttctgttggacatccagaagaactgaccagtgatccagatattatttcagcattaagcattacaggaaacttccagtttgaaccttgctcgcatggtgacttccttggctcaattcttggtacaggaattgtcagggagaaacttggagacattatattgcagggggaacagggtgctcagataattgttgtacctgaactcgttgaatttctcatgtcaacactggttaaggttcgtaatgttcctgtatcttgcactaagattccattaatttctcttgattatgaaccaccaagaacaaaatcattcaaaactatagaagcatcactaagagttgatgcactagctagtgctggatttaaagtttcacgttcaaagctagttgacatgatcagcaatggtgatgtgcgtatcaactggatccctgttactaccaaaggaaccacactcaagagtggagatattgtatcaattagtggcaagggaagattaaagataggagaaataaactccacaaagaaaggaaagtttgcagtggagctcattcggtatttgtagaagtttagagagttcagaagtactttcactctcaaagtaacaactttttctttcttcatttgtgtattggatttcacaaacatacttttcaaactttaaaccaacacagccgtagcctgtctaaaacgacatgcttttattttttgtggaaagatttgcttagcctcgcataacagttatgaagatagaaaaaaattgtacagacagaaccttgatgatgaaaccttaatatgaatcaaatttcagcatc

SEQ ID NO: 53818 - protein, 329 aa, Glycine max
  peptide (1)..(329): Ceres Seq. ID no. 14304651
KGGTPMAVTASSFGTTWCLRRAAQAFAISHSHILRNNVKLSLQRNFCSHLLSVSTSLASGVSQTVQALKGEVDLLLKGVGERSVTKEVKHILEMARRASLKREILHTDFLTPPVLKESMQVLEKLADVKAIAQGGYPQAERCRISVGHPEELTSDPDIISALSITGNFQFEPCSHGDFLGSILGTGIVREKLGDIILQGEQGAQIIVVPELVEFLMSTLVKVRNVPVSCTKIPLISLDYEPPRTKSFKTIEASLRVDALASAGFKVSRSKLVDMISNGDVRINWIPVTTKGTTLKSGDIVSISGKGRLKIGEINSTKKGKFAVELIRYL

SEQ ID NO: 53819 - protein, 324 aa, Glycine max
  peptide (1)..(324): Ceres Seq. ID no. 14304652
MAVTASSFGTTWCLRRAAQAFAISHSHILRNNVKLSLQRNFCSHLLSVSTSLASGVSQTVQALKGEVDLLLKGVGERSVTKEVKHILEMARRASLKREILHTDFLTPPVLKESMQVLEKLADVKAIAQGGYPQAERCRISVGHPEELTSDPDIISALSITGNFQFEPCSHGDFLGSILGTGIVREKLGDIILQGEQGAQIIVVPELVEFLMSTLVKVRNVPVSCTKIPLISLDYEPPRTKSFKTIEASLRVDALASAGFKVSRSKLVDMISNGDVRINWIPVTTKGTTLKSGDIVSISGKGRLKIGEINSTKKGKFAVELIRYL

SEQ ID NO: 53820 - protein, 236 aa, Glycine max
  peptide (1)..(236): Ceres Seq. ID no. 14304653
MARRASLKREILHTDFLTPPVLKESMQVLEKLADVKAIAQGGYPQAERCRISVGHPEELTSDPDIISALSITGNFQFEPCSHGDFLGSILGTGIVREKLGDIILQGEQGAQIIVVPELVEFLMSTLVKVRNVPVSCTKIPLISLDYEPPRTKSFKTIEASLRVDALASAGFKVSRSKLVDMISNGDVRINWIPVTTKGTTLKSGDIVSISGKGRLKIGEINSTKKGKFAVELIRYL

SEQ ID NO: 53821 - DNA, 1359 bp, Glycine max
  misc_feature (1)..(1359): Ceres Seq. ID no. 14310635
aacacagaagcaaaccgaacggtttcacatcagacgcagcagcaaaaagtttcaaatttggtactttggcaccctccacgtagtagttctcaccatgtccgacactggaagaagtgccaacaacaatggttccaagcggagcctgccatcatgcacgagtgcaagggaaaatgagagcgaaaacagtgcaaagaaaccaaatttggatggcaaaggtgagaaattcggtgaagccgagacacccaacaagagcaaagtccaaaatcaaaatggtggaaaatcttccgcctcatgtttggaatctaaaagcttcaacaagcttctggaaggggtggtttttgtgctttcagggtttgtgaatccggagaggggcatgttgaggtcacgagcgatggaaatgggagcagaatataagcctgattggaactctgattgcactctcttggtttgtgcttttccaaatacccctaagtttagacaagttgaagctgattgtggaaccattgtgtcaaaggtttggataatagagtgttacacccaaaggaagctgattgaaattgacagttaccttttgcatgctgggaaaccatggtgcaaaggaaatggatcaattgaagtaaatgaagataagaaaccatctgtacccaaaaaatcaccgaagcacattgaaagagaacagctttcaacatcaactgcctccctaaaatcaaagggaaaagaccctgatgttgctaggaaatgctttgagcctttggaagtgaaaaagtgggtcattgatgatttgaataaaacaattcagtggctggaaaatcaagaagaaaagccagaccctagtgagttgacaaaaatagctgcagaggggattctaacttgtttgcaagatgcaatatgttctctagaggaaaaacaggacatccggaaaggaactgaggactggatgttcttacctcgggttgttgaggagcttgcaaagtttgatgtagaaggcaacaagggctcattgttaaaggaagaacttcaaagacgggctttggattgtaagcgtatttatgaggaggaactaaatggtttagatcatgaaaggaaaacgaatacaaaggtaaataaagaacagacgagcaaaactagaagaacaaatgccatgtcttctggtgcagttgagtatgatagtgatgagacaattgagatgactgaacaagaaatagaccttgcatataagactttgtcctctaacatttgccacttgtgagtgatgattgaactttgtttctttaaggggttttggttcacctatatttttctttggatattctacggtgtatattacaaaaaaagaaaaggcccaagtgtgttagactg

SEQ ID NO: 53822 - protein, 415 aa, Glycine max
  peptide (1)..(415): Ceres Seq. ID no. 14310636
TQKQTERFHIRRSSKKFQIWYFGTLHVVVLTMSDTGRSANNNGSKRSLPSCTSARENESENSAKKPNLDGKGEKFGEAETPNKSKVQNQNGGKSSASCLESKSFNKLLEGVVFVLSGFVNPERGMLRSRAMEMGAEYKPDWNSDCTLLVCAFPNTPKFRQVEADCGTIVSKVWIIECYTQRKLIEIDSYLLHAGKPWCKGNGSIEVNEDKKPSVPKKSPKHIEREQLSTSTASLKSKGKDPDVARKCFEPLEVKKWVIDDLNKTIQWLENQEEKPDPSELTKIAAEGILTCLQDAICSLEEKQDIRKGTEDWMFLPRVVEELAKFDVEGNKGSLLKEELQRRALDCKRIYEEELNGLDHERKTNTKVNKEQTSKTRRTNAMSSGAVEYDSDETIEMTEQEIDLAYKTLSSNICHL

SEQ ID NO: 53823 - protein, 384 aa, Glycine max
  peptide (1)..(384): Ceres Seq. ID no. 14310637
MSDTGRSANNNGSKRSLPSCTSARENESENSAKKPNLDGKGEKFGEAETPNKSKVQNQNGGKSSASCLESKSFNKLLEGVVFVLSGFVNPERGMLRSRAMEMGAEYKPDWNSDCTLLVCAFPNTPKFRQVEADCGTIVSKVWIIECYTQRKLIEIDSYLLHAGKPWCKGNGSIEVNEDKKPSVPKKSPKHIEREQLSTSTASLKSKGKDPDVARKCFEPLEVKKWVIDDLNKTIQWLENQEEKPDPSELTKIAAEGILTCLQDAICSLEEKQDIRKGTEDWMFLPRVVEELAKFDVEGNKGSLLKEELQRRALDCKRIYEEELNGLDHERKTNTKVNKEQTSKTRRTNAMSSGAVEYDSDETIEMTEQEIDLAYKTLSSNICHL

SEQ ID NO: 53824 - protein, 291 aa, Glycine max
  peptide (1)..(291): Ceres Seq. ID no. 14310638
MLRSRAMEMGAEYKPDWNSDCTLLVCAFPNTPKFRQVEADCGTIVSKVWIIECYTQRKLIEIDSYLLHAGKPWCKGNGSIEVNEDKKPSVPKKSPKHIEREQLSTSTASLKSKGKDPDVARKCFEPLEVKKWVIDDLNKTIQWLENQEEKPDPSELTKIAAEGILTCLQDAICSLEEKQDIRKGTEDWMFLPRVVEELAKFDVEGNKGSLLKEELQRRALDCKRIYEEELNGLDHERKTNTKVNKEQTSKTRRTNAMSSGAVEYDSDETIEMTEQEIDLAYKTLSSNICHL

SEQ ID NO: 53825 - DNA, 1439 bp, Glycine max
  misc_feature (1)..(1439): Ceres Seq. ID no. 15177237
aaaattattattttaatgaattccatacataataattgattactaaatcaaattaaattcgtattttagtgattctgaacataggtaaattttccttcaagaacatacgttaagctttaggagaagtaatttgtcttaaaaacatatttttgtctgatcgtattgtccttatataaagaagaaataatggacactaatttgcttacatatttacccaagatcattcagaaagtgaaaataagtcatctatgtaaaattcaaaactgatctttacttttgttttggcccctgcaacctcccctaaaaaaaatacacaggcacttatatctgcatggaaaaccggtgagacgatgccattcatatatgacacggtgtgggacttgattaaattggcagattatctaacacagagaagagatatagacctttctaggataggaatcactggaatatcacttggaggaatgcatgcatggtttgctgcagttgctgatactcgctatgctgtggttgttcctcttattggcgttcagggttttcgatgggccatagacaacgataaatggcagggtcgagtcgatagtataaagcctctttttgaggtggcacgtgctgatttaggtaaaggtgctattgacaaagaagtggtggagaaggtgtggagccgaattgctcctggtttagcttcccaatttgattcaccctattcagttccaactatcgcaccacgtgctttgcttattgttaatggtaagacccttctatgtgtaatgtattgtacattaaacattttcaaaccgaatctggctacgtacgttattcatatacaacttcatgtaatgacaattcaagtcaaggtaaccacattgctgctacataaggtttctgcttctctaggatatatcaataacattgtaaattaacctctgcatccatccgtattgatcaattcaattatttcattcatttagaatttgtggatttcttttagctaacttggaactgaagcatttgcttgagtgttgggaactctaggtgcggaagatcctcggtgtcctcttggaggcttggaaattccaagagcaaaggcaaccgaggcatacagaaagtttcattgtttagataatttcaagtttattgcagaacctggaattggacaccaagtaacgagatttatgatgaaagaattagctgattggtttgacaggttcttaaacccttagctctttccctcatctgggtttttcaagctctgaggttataaaattataaaccaacttgctcagagctcaggctcattgcctctttccaatcgcctttgtatgattgtatgtccgtcgtgataatatgcaatacaaaatgctttacccgttgaaacccactagctactatggctgatttagtggagggattggataatggatatatagttaagactt

SEQ ID NO: 53826 - protein, 190 aa, Glycine max
  peptide (1)..(190): Ceres Seq. ID no. 15177238
MPFIYDTVWDLIKLADYLTQRRDIDLSRIGITGISLGGMHAWFAAVADTRYAVVVPLIGVQGFRWAIDNDKWQGRVDSIKPLFEVARADLGKGAIDKEVVEKVWSRIAPGLASQFDSPYSVPTIAPRALLIVNGKTLLCVMYCTLNIFKPNLATYVIHIQLHVMTIQVKVTTLLLHKVSASLGYINNIVN

SEQ ID NO: 53827 - protein, 152 aa, Glycine max
  peptide (1)..(152): Ceres Seq. ID no. 15177239
MHAWFAAVADTRYAVVVPLIGVQGFRWAIDNDKWQGRVDSIKPLFEVARADLGKGAIDKEVVEKVWSRIAPGLASQFDSPYSVPTIAPRALLIVNGKTLLCVMYCTLNIFKPNLATYVIHIQLHVMTIQVKVTTLLLHKVSASLGYINNIVN

SEQ ID NO: 53828 - DNA, 644 bp, Glycine max
  misc_feature (1)..(644): Ceres Seq. ID no. 13593831
ggtgatttcattgcataatccattgactagaaatcccatattttccccccacattaactcacccaacccctctttctaaaaggcctcaaggatacactccggacttaattacgttattttgttagggtcaccgtttcgagatattctaaacttgtactgaaaaatatggagggaaaagaagaggacgtaagagttggagccaacaggtacggagagaggcagccaatagggaccgctgctcaggctaaagactacagagagccaccgtcggcgcctctcttcgaaccgggagagttgtcatcgtggtctttctatagggctggcatagcagagtttgtggccactttcttgttcctctacatcacagtgctgactgtgatgggtgtgttcaaatctaagagcaagtgttccactgtgggtatccaaggcattgcttgggcttttgggggaatgatctttgctcttgtttattccactgctggaatctcagggggtcatattaacccagcagtgacgtttgggctgttcttggcacgcaagctctctctgacaagggcaattttttacataatcatgcagtgcttgggagctatatgtggtgctggtgtagttaaggggttcgagccacacctctatgagaggct

SEQ ID NO: 53829 - protein, 159 aa, Glycine max
  peptide (1)..(159): Ceres Seq. ID no. 13593832
MEGKEEDVRVGANRYGERQPIGTAAQAKDYREPPSAPLFEPGELSSWSFYRAGIAEFVATFLFLYITVLTVMGVFKSKSKCSTVGIQGIAWAFGGMIFALVYSTAGISGGHINPAVTFGLFLARKLSLTRAIFYIIMQCLGAICGAGVVKGFEPHLYER

SEQ ID NO: 53830 - protein, 88 aa, Glycine max
  peptide (1)..(88): Ceres Seq. ID no. 13593833
MGVFKSKSKCSTVGIQGIAWAFGGMIFALVYSTAGISGGHINPAVTFGLFLARKLSLTRAIFYIIMQCLGAICGAGVVKGFEPHLYER

SEQ ID NO: 53831 - DNA, 1305 bp, Glycine max
  misc_feature (1)..(1305): Ceres Seq. ID no. 14310904
tttttctgtgtagttccatcgcatcaaaccctggcaatggcagctacggccatacagaggttcccccaacacaaatacgtagacgcagttcgctggcttcccctacaatccgcattcgaccgattcgcagttttggcactcttcgacttcgattccgatgcttcctccatcgaaatccactctctcaacccaaaccccctctcattggaaccacactcttcgtggtcctctccttcccgcgtttcctccctcaaggcctcgcacttcctccagaagcccctcattgtcgcttccacttcctccggttctctccacttcctcttctccgattcctccgtcgcaacgctcgagtccgaggtctccattcccgagggcgcgctgcattccgttcccgcttcttgcgttgacctattggacggtggcgtcgagtgcgtgaccgttggggaagatgggaaggtcaacttggttggtattggggattccaatttgaactaccggaggttgtttgatagcgccggcctggtctcctacacggcggtgagctgggcgtctccgatggagttcgccaccggtggctacggcttcggtcttcattggtgggaccaacggaaaccgggaggtccggtttctcaatttaagggtaactgggataaaaaattgacatctgggattgtgcactctattgatattcatccgtcgcgaaagcatacttgcctggctggtggttccttaggtactgtttttgcctgggatcttaggtggcagcaacaaccgattatactttcaggcgcaggggctggtgctggtggcaacactgctgtccagtcaatatctgaaagtgaggtttgggaggttcagtatgatcgttgtataaaaccaaatacttcatctacccggatcttaccttccatgatctgctctgaggatggaattctcggtgtgattgagcaaggcgaggaacctattgagctgctggctgaaccttgtgccatcaatagctttgatattgatcgacataatccatcggatgtgatatgtagtttagaatgggaagcagtagccatattgacaagacaataacattcggggtttctactttttggtggcttgaatttcagaaagtttgtaactgatagaaggagtggagctcttaacggacaatttgtgttttttatgtattccggaatgttctattccttttctaaagccatttgcatgcaaatggattttgggattgtacaatatgtagcatgtgtataattgactttacacattggatcaatgctactaccatccgctttgcct

SEQ ID NO: 53832 - protein, 359 aa, Glycine max
  peptide (1)..(359): Ceres Seq. ID no. 14310905
FFCVVPSHQTLAMAATAIQRFPQHKYVDAVRWLPLQSAFDRFAVLALFDFDSDASSIEIHSLNPNPLSLEPHSSWSSPSRVSSLKASHFLQKPLIVASTSSGSLHFLFSDSSVATLESEVSIPEGALHSVPASCVDLLDGGVECVTVGEDGKVNLVGIGDSNLNYRRLFDSAGLVSYTAVSWASPMEFATGGYGFGLHWWDQRKPGGPVSQFKGNWDKKLTSGIVHSIDIHPSRKHTCLAGGSLGTVFAWDLRWQQQPIILSGAGAGAGGNTAVQSISESEVWEVQYDRCIKPNTSSTRILPSMICSEDGILGVIEQGEEPIELLAEPCAINSFDIDRHNPSDVICSLEWEAVAILTRQ

SEQ ID NO: 53833 - protein, 347 aa, Glycine max
  peptide (1)..(347): Ceres Seq. ID no. 14310906
MAATAIQRFPQHKYVDAVRWLPLQSAFDRFAVLALFDFDSDASSIEIHSLNPNPLSLEPHSSWSSPSRVSSLKASHFLQKPLIVASTSSGSLHFLFSDSSVATLESEVSIPEGALHSVPASCVDLLDGGVECVTVGEDGKVNLVGIGDSNLNYRRLFDSAGLVSYTAVSWASPMEFATGGYGFGLHWWDQRKPGGPVSQFKGNWDKKLTSGIVHSIDIHPSRKHTCLAGGSLGTVFAWDLRWQQQPIILSGAGAGAGGNTAVQSISESEVWEVQYDRCIKPNTSSTRILPSMICSEDGILGVIEQGEEPIELLAEPCAINSFDIDRHNPSDVICSLEWEAVAILTRQ

SEQ ID NO: 53834 - DNA, 1757 bp, Glycine max
  misc_feature (1)..(1757): Ceres Seq. ID no. 14311367
tattttcatcattcattcaaattctgcttccaatcatatttaaatagaaacacacactcctcatcccaaaccctacattttcttcaagcgctgcggtggatcagattccccattaaggatggaggatggtgagaaacccagccatggcattgctgatatggatgttgttgatgccactttgcaaagccatcgtgtggcttctgatcaagtaatggtcctacagggtcatgatatcaaaaacggcgattctgatcctgctcacgtgccagcaaccagtgcaattagcaataatcagtttgaacttgaagatgctaagactgtttcgcatcaggaactgatcactccaaagcctaaagaaaagaatgtcagagaaatgaagaatgtgctaaatgataccgagatgactgattatgatgagtatggcacgcctctggatcgagaaacatttatgaaagagcttgagactttctacagagagcggtccttggaatttaagcctcctaagttttatggagagccactcaattgtcttaagttgtggagagctgttatcagactaggcggctatgatgtggtaactggatccaagttgtggcggcaagtaggagagtctttccaccccccaaagacctgcactacagtctcatggacatttagaattttttatgagaaggcacttttagagtatgaaaagcacaagagagagattggggagctacagctccctgttggaccattccatcaatcttcaaatgtggaaaaagagcctgctgtttaccagactccaggctcaggtagagcaagaagggatgcagcagcacgtgcaatgcaaggttggcatgctcagcgccttcttggatacggtgaggttgctgagccagttattaaggacaagaacttcagttccacgccaaagcgtgaaaagaacctaaaaagtattggtatgaataataaacagaggacactgtctggtctggagcatgctgaaaaatctgcaaatattgaaggagatcggcaattggtcacagcagtagtggatgttggacccccagctgactgggtgaagatcaatgtgcgtgaaagtaaggattgttttgaggtatatgccctagttcctgggctccttcgtgaggaggtgcgagtccaatcagatccagttggacgtcttgttataactggtgtgccagaacatatagacaatccatggggaattacccccttcaaaaaggttgtgaacttacctgcaagaattgattcgcttcagacatctgctgttgttagtttgcatggtcgactatttgtacgcgttccttttgagcaaggagctgtgtgagatgtgaatgttcctcccttgaatcattgatttatgaaatctccccttcatattattagtcgaaactaccaccaactttaacatttttttagggaaaaatacccaatttaactaatacaatatgcttgaattttcccatcaaacgcctttttatccatatgcgaaagaaatggacttggtgttctggtgcatcattaacaagcaagagtccgagaagtggagtggtggaggactcgttcaaaagctcgttgctttcgaaaatgctaaatgaagatgttagtctggcaaaaaaaaaaaaacactattgtacatcgtcttccaattaagtgtggatgtgaacagaaaatattttaatcattactccaatccaaatgtgaacagaaaatattttaatcgtatatatgattttggttccctttccagt

SEQ ID NO: 53835 - protein, 404 aa, Glycine max
  peptide (1)..(404): Ceres Seq. ID no. 14311368
MEDGEKPSHGIADMDVVDATLQSHRVASDQVMVLQGHDIKNGDSDPAHVPATSAISNNQFELEDAKTVSHQELITPKPKEKNVREMKNVLNDTEMTDYDEYGTPLDRETFMKELETFYRERSLEFKPPKFYGEPLNCLKLWRAVIRLGGYDVVTGSKLWRQVGESFHPPKTCTTVSWTFRIFYEKALLEYEKHKREIGELQLPVGPFHQSSNVEKEPAVYQTPGSGRARRDAAARAMQGWHAQRLLGYGEVAEPVIKDKNFSSTPKREKNLKSIGMNNKQRTLSGLEHAEKSANIEGDRQLVTAVVDVGPPADWVKINVRESKDCFEVYALVPGLLREEVRVQSDPVGRLVITGVPEHIDNPWGITPFKKVVNLPARIDSLQTSAVVSLHGRLFVRVPFEQGAV

SEQ ID NO: 53836 - protein, 391 aa, Glycine max
  peptide (1)..(391): Ceres Seq. ID no. 14311369
MDVVDATLQSHRVASDQVMVLQGHDIKNGDSDPAHVPATSAISNNQFELEDAKTVSHQELITPKPKEKNVREMKNVLNDTEMTDYDEYGTPLDRETFMKELETFYRERSLEFKPPKFYGEPLNCLKLWRAVIRLGGYDVVTGSKLWRQVGESFHPPKTCTTVSWTFRIFYEKALLEYEKHKREIGELQLPVGPFHQSSNVEKEPAVYQTPGSGRARRDAAARAMQGWHAQRLLGYGEVAEPVIKDKNFSSTPKREKNLKSIGMNNKQRTLSGLEHAEKSANIEGDRQLVTAVVDVGPPADWVKINVRESKDCFEVYALVPGLLREEVRVQSDPVGRLVITGVPEHIDNPWGITPFKKVVNLPARIDSLQTSAVVSLHGRLFVRVPFEQGAV

SEQ ID NO: 53837 - protein, 373 aa, Glycine max
  peptide (1)..(373): Ceres Seq. ID no. 14311370
MVLQGHDIKNGDSDPAHVPATSAISNNQFELEDAKTVSHQELITPKPKEKNVREMKNVLNDTEMTDYDEYGTPLDRETFMKELETFYRERSLEFKPPKFYGEPLNCLKLWRAVIRLGGYDVVTGSKLWRQVGESFHPPKTCTTVSWTFRIFYEKALLEYEKHKREIGELQLPVGPFHQSSNVEKEPAVYQTPGSGRARRDAAARAMQGWHAQRLLGYGEVAEPVIKDKNFSSTPKREKNLKSIGMNNKQRTLSGLEHAEKSANIEGDRQLVTAVVDVGPPADWVKINVRESKDCFEVYALVPGLLREEVRVQSDPVGRLVITGVPEHIDNPWGITPFKKVVNLPARIDSLQTSAVVSLHGRLFVRVPFEQGAV

SEQ ID NO: 53838 - DNA, 1242 bp, Glycine max
  misc_feature (1)..(1242): Ceres Seq. ID no. 13593855
atgagaatagacccaccccttcacattcgagacccctctctgactcttcctcatcataacaataaactcaaaaggtgcatgtgtacctaaaaagaggagaaacaaaattgaaacagtttgtgtgaatttgtgtgacaaattagagatatggaaggaattaatgtgtgcaagaagagttcaaagttaggaaagaaagatgacctctatcatgttattcataaggtgccttatggagatagcccttatgtcaaagccaagcatgctcagttggttgataaggaccctgaagcagctatagtattgttttggaaggcaataaatgctggggataaagtggacagtgccctgaaggacatggctgttgtgatgaagcagttagatagatctgaagaagcaattgaagccatcaaatcttttagaggcctttgttccaaacactcacaagagtcacttgataatgttcttcttgacctttacaagaagtgtggaaaaatagaggagcaaattnaattgttaaagagaaagctaagattaatttaccaaggagaggcctttaatggaaggaccacgaggactgctcgctctcatggcaagaagttccaagtctccatcaagcaagaaactgcaagattattgggaaacttgggttgggcctacatgcaaaaggaaaactacatgatggctgaggttgtgttcaagaaagcacagatggtagatgctgatgccaacaaggcttgcaacttgggcttatgcctcatgagacaatgtcgttatgaggaagcctattacattctagaagaagtgttacagggaaaacatcaagggtctgatgaaatcaaatcaagaaaaagagctgaggaattgcttgaagagttgaatgcaaatctcccccaacctgagtttatggctgatttggaccttgacgatgattttgtgaaagggatagatgacatgctagatgcatggaacacaaatagatcaagaaggcttccaatctttgaggaaatctcttcctttagagatcaattggcatgttaataacttgtccttatcttgtagtattgtgtattgctcttaggtttaggctcctgcaaatagccccttaatttcttctctagttgcctgttcttcctctaccctttttcttcctaaaatggtgagggggaaaaaaggataaggtttgcttgtatcttgtaatttaaataataaatagcaatcaataaataaaaatataatcagtcg

SEQ ID NO: 53839 - protein, 296 aa, Glycine max
  peptide (1)..(296): Ceres Seq. ID no. 13593856
  misc_feature (121)..(121): Xaa is any aa, unknown or other
MEGINVCKKSSKLGKKDDLYHVIHKVPYGDSPYVKAKHAQLVDKDPEAAIVLFWKAINAGDKVDSALKDMAVVMKQLDRSEEAIEAIKSFRGLCSKHSQESLDNVLLDLYKKCGKIEEQIXLLKRKLRLIYQGEAFNGRTTRTARSHGKKFQVSIKQETARLLGNLGWAYMQKENYMMAEVVFKKAQMVDADANKACNLGLCLMRQCRYEEAYYILEEVLQGKHQGSDEIKSRKRAEELLEELNANLPQPEFMADLDLDDDFVKGIDDMLDAWNTNRSRRLPIFEEISSFRDQLAC

SEQ ID NO: 53840 - protein, 227 aa, Glycine max
  peptide (1)..(227): Ceres Seq. ID no. 13593857
  misc_feature (52)..(52): Xaa is any aa, unknown or other
MAVVMKQLDRSEEAIEAIKSFRGLCSKHSQESLDNVLLDLYKKCGKIEEQIXLLKRKLRLIYQGEAFNGRTTRTARSHGKKFQVSIKQETARLLGNLGWAYMQKENYMMAEVVFKKAQMVDADANKACNLGLCLMRQCRYEEAYYILEEVLQGKHQGSDEIKSRKRAEELLEELNANLPQPEFMADLDLDDDFVKGIDDMLDAWNTNRSRRLPIFEEISSFRDQLAC

SEQ ID NO: 53841 - protein, 223 aa, Glycine max
  peptide (1)..(223): Ceres Seq. ID no. 13593858
  misc_feature (48)..(48): Xaa is any aa, unknown or other
MKQLDRSEEAIEAIKSFRGLCSKHSQESLDNVLLDLYKKCGKIEEQIXLLKRKLRLIYQGEAFNGRTTRTARSHGKKFQVSIKQETARLLGNLGWAYMQKENYMMAEVVFKKAQMVDADANKACNLGLCLMRQCRYEEAYYILEEVLQGKHQGSDEIKSRKRAEELLEELNANLPQPEFMADLDLDDDFVKGIDDMLDAWNTNRSRRLPIFEEISSFRDQLAC

SEQ ID NO: 53842 - DNA, 1299 bp, Glycine max
  misc_feature (1)..(1299): Ceres Seq. ID no. 14310823
gagcgtgtgttgaagcaagtagtagaagaagaagagggtggaaaatcaaaaatgggagaagagagagaagatccacagaagctaaagcgattagcggcagattcatacgactacgacaacgactctcgatggcccgattactggaacaacgttctcatccctccccacatggcctctcgtgacgacgtcgtttcccacttcaagcgcaagttctaccagcgctacgttgatcctgattttgtggtggagccaatgtctgttggtggcagttcatcccagccagtgcgttcatcaactacctcctcatcgtcgcccctgacaaataatcaacctcgtgcaagaagttctggatcaactaatagaacttcagggacatccacaactgcaggtccaggtcctagtccaacacctttgcgttgggatcggcagacagttctattttctgtcaatgcttgggtttttgttgtggcttttcttgcagccattccactggtaccaaagcatctttctcatagggcttatcgcctttgttttctgggcactctttgctcttctttgtactcattgtactcacaatatgggaaaccaagagcatggaattggcaggccttgcaagtttactttcagtcaataattgcttcgaaggattttttatacttcatctactgccttacatttgttacatctcatctttgccttaaatttgctttgatccctatcttatgttggtcctttgaacatgttgccaagttccttagacgtaatttcagtcgctctaccttgtacaggaagtacttggaagagccttgtgtttgggtggagtcaaacagttctaccctcaatatagtgacatcacatgccgagattggacttggattcctgctgataatctcattgttctcgtggcagcggaacataatacaagcattcatgtactggcagcttctgaagctcatgtatcatattcctgttaccgccccttaccatcagagtgtttgggcccaaattgggaggtcggttaatccgctcatccaacgccatgcgccattcttgaagactcctatatctacaattcaaagatggtggctaaggtagaaggttggctaaaatgttttcatatggaacaccaagtatacattttctgttcctttttcttaaattacgagattggtttgacatcatgtggccagttggtcatgttacaaagaaccgaagtagattttgggatgaataatcttataacaccatgaatcttagttagtttgattgaatagtgtgtttatttacacttcagcattc

SEQ ID NO: 53843 - protein, 364 aa, Glycine max
  peptide (1)..(364): Ceres Seq. ID no. 14310824
ERVLKQVVEEEEGGKSKMGEEREDPQKLKRLAADSYDYDNDSRWPDYWNNVLIPPHMASRDDVVSHFKRKFYQRYVDPDFVVEPMSVGGSSSQPVRSSTTSSSSPLTNNQPRARSSGSTNRTSGTSTTAGPGPSPTPLRWDRQTVLFSVNAWVFVVAFLAAIPLVPKHLSHRAYRLCFLGTLCSSLYSLYSQYGKPRAWNWQALQVYFQSIIASKDFLYFIYCLTFVTSHLCLKFALIPILCWSFEHVAKFLRRNFSRSTLYRKYLEEPCVWVESNSSTLNIVTSHAEIGLGFLLIISLFSWQRNIIQAFMYWQLLKLMYHIPVTAPYHQSVWAQIGRSVNPLIQRHAPFLKTPISTIQRWWLR

SEQ ID NO: 53844 - protein, 347 aa, Glycine max
  peptide (1)..(347): Ceres Seq. ID no. 14310825
MGEEREDPQKLKRLAADSYDYDNDSRWPDYWNNVLIPPHMASRDDVVSHFKRKFYQRYVDPDFVVEPMSVGGSSSQPVRSSTTSSSSPLTNNQPRARSSGSTNRTSGTSTTAGPGPSPTPLRWDRQTVLFSVNAWVFVVAFLAAIPLVPKHLSHRAYRLCFLGTLCSSLYSLYSQYGKPRAWNWQALQVYFQSIIASKDFLYFIYCLTFVTSHLCLKFALIPILCWSFEHVAKFLRRNFSRSTLYRKYLEEPCVWVESNSSTLNIVTSHAEIGLGFLLIISLFSWQRNIIQAFMYWQLLKLMYHIPVTAPYHQSVWAQIGRSVNPLIQRHAPFLKTPISTIQRWWLR

SEQ ID NO: 53845 - protein, 308 aa, Glycine max
  peptide (1)..(308): Ceres Seq. ID no. 14310826
MASRDDVVSHFKRKFYQRYVDPDFVVEPMSVGGSSSQPVRSSTTSSSSPLTNNQPRARSSGSTNRTSGTSTTAGPGPSPTPLRWDRQTVLFSVNAWVFVVAFLAAIPLVPKHLSHRAYRLCFLGTLCSSLYSLYSQYGKPRAWNWQALQVYFQSIIASKDFLYFIYCLTFVTSHLCLKFALIPILCWSFEHVAKFLRRNFSRSTLYRKYLEEPCVWVESNSSTLNIVTSHAEIGLGFLLIISLFSWQRNIIQAFMYWQLLKLMYHIPVTAPYHQSVWAQIGRSVNPLIQRHAPFLKTPISTIQRWWLR

SEQ ID NO: 53846 - DNA, 1383 bp, Glycine max
  misc_feature (1)..(1383): Ceres Seq. ID no. 14315580
ttttcacgctttggaactgtatcaatggctgaaatcatccgtgatcaaaagaccggtgacagtttatgctatgctttcatagagtttgaggacaaacggtcatgtgagcaggcatattttaagatggataatgctttgattgatgatcgaaggatacacgtggattttagtcaaagtgtggcaaaactgtggtcacaatacaggcagaaagatcaaaagggtaaaggtggtggttgcttcaaatgtggttctacagatcatattgctaaggattgtacgggagaggctacaatgaaacaaccacaagcaaaatacatcttaaaggatgataatgtccaacgtggtggagatagtgcgagatatgaaatggtgtttgatgaagataattcacaacatccaaggcaagatgtaaaacaccaaaggcatgacagggatgacccagtcgaaagaaaagatcatagaagccgcagagatcaggatatgatagactcaaacaacagagataggtatggtgatagaagcagagggcatgggggaaatggtgagaacaaagcacggtctgaaagaggtgtaatagatttggattccaatgctgataagaaagacagagataggcacatgggaagacatggagatgatgattacaagcggaaggatgagcatgattccagaaaaagagacgaagattatgtctacaagtggaaagacaagcgagactcaagaaaaagagatgaagatgatgagtatagagaaatacaaactagtcgatatgataggagaaacacagattctagccatttggagagaaggaatagcagagattataggaagaaacctgaagacagtggaacgcaagatatgaagattgactctggacaaagaaaaggaagtccaggtgatgaggattacaaaaatggaagggatcatgaggattacgaacgtaaaatgaaggatgaggattacagaaatagaaaggaagaacgtgtgcataaaagccaagatattgaagcggatgatggctacaaacgtagaagggaggatgcagattacaaacgcagaagggatgatggagattacagacatagaagggaagagcgtggacacgacaggagatgattattggtgtcactatatcctaatgctaagcacagaacctttgaacggctatcttgtatgtcccttttgcttcaatttttctggtggagcaagatattgatatgttttagaacaaggtttttgaagtattctacatttactacttagaacatatttaattatttttacatagcttcagaaaacttgttttcatattccgtgcacaacagcacagttaagttttcatgttcagctaattgttaaaatggtgtttgacttaactaacgc

SEQ ID NO: 53847 - protein, 371 aa, Glycine max
  peptide (1)..(371): Ceres Seq. ID no. 14315581
FSRFGTVSMAEIIRDQKTGDSLCYAFIEFEDKRSCEQAYFKMDNALIDDRRIHVDFSQSVAKLWSQYRQKDQKGKGGGCFKCGSTDHIAKDCTGEATMKQPQAKYILKDDNVQRGGDSARYEMVFDEDNSQHPRQDVKHQRHDRDDPVERKDHRSRRDQDMIDSNNRDRYGDRSRGHGGNGENKARSERGVIDLDSNADKKDRDRHMGRHGDDDYKRKDEHDSRKRDEDYVYKWKDKRDSRKRDEDDEYREIQTSRYDRRNTDSSHLERRNSRDYRKKPEDSGTQDMKIDSGQRKGSPGDEDYKNGRDHEDYERKMKDEDYRNRKEERVHKSQDIEADDGYKRRREDADYKRRRDDGDYRHRREERGHDRR

SEQ ID NO: 53848 - protein, 363 aa, Glycine max
  peptide (1)..(363): Ceres Seq. ID no. 14315582
MAEIIRDQKTGDSLCYAFIEFEDKRSCEQAYFKMDNALIDDRRIHVDFSQSVAKLWSQYRQKDQKGKGGGCFKCGSTDHIAKDCTGEATMKQPQAKYILKDDNVQRGGDSARYEMVFDEDNSQHPRQDVKHQRHDRDDPVERKDHRSRRDQDMIDSNNRDRYGDRSRGHGGNGENKARSERGVIDLDSNADKKDRDRHMGRHGDDDYKRKDEHDSRKRDEDYVYKWKDKRDSRKRDEDDEYREIQTSRYDRRNTDSSHLERRNSRDYRKKPEDSGTQDMKIDSGQRKGSPGDEDYKNGRDHEDYERKMKDEDYRNRKEERVHKSQDIEADDGYKRRREDADYKRRRDDGDYRHRREERGHDRR

SEQ ID NO: 53849 - protein, 330 aa, Glycine max
  peptide (1)..(330): Ceres Seq. ID no. 14315583
MDNALIDDRRIHVDFSQSVAKLWSQYRQKDQKGKGGGCFKCGSTDHIAKDCTGEATMKQPQAKYILKDDNVQRGGDSARYEMVFDEDNSQHPRQDVKHQRHDRDDPVERKDHRSRRDQDMIDSNNRDRYGDRSRGHGGNGENKARSERGVIDLDSNADKKDRDRHMGRHGDDDYKRKDEHDSRKRDEDYVYKWKDKRDSRKRDEDDEYREIQTSRYDRRNTDSSHLERRNSRDYRKKPEDSGTQDMKIDSGQRKGSPGDEDYKNGRDHEDYERKMKDEDYRNRKEERVHKSQDIEADDGYKRRREDADYKRRRDDGDYRHRREERGHDRR

SEQ ID NO: 53850 - DNA, 1300 bp, Glycine max
  misc_feature (1)..(1300): Ceres Seq. ID no. 15169320
agaatttgttacaagcattatatttggaaatgaattttcatcacgcctttcaattggatccattatgcggctaagggcagctgcaatcacatcactatcgcaagatcctaaagcagatagtgccatgattttcaaacttgcccataggtttctagatgtaagcaaatatcagagaaataagtccaaggcagaggatgaatctgagtatcattcaggggccatccaggaagatctaaaccatcagatccgcagaagccagtgtgagactgataataaagcaggtagcatcgaacaagaggttcaggctattagaaaggatcttgttactgctgactatggtgaatatatgaatccttttggaagtgaagattgcctcaataatgagcatgaacaatgttcactttggtctgacactagggcaagggatcatatcattgaaattgacaatgccgaatttacaaatccatttgctatagatgcacattcaaatcatgatccagtgtctcagtttatagatactgttccgaattctgaaaatccatccgcagatgatcccccagagctgtatctgcctggttttgtaattcatgttgtactggagaagaaaagacctcaaactgatcttaagacatcgtggagaatgctagagaggggaaaatgttatagagcttacatagcaaatagagaaagcttcaaagatattattgtttcaccatccatgttccttgaccatcttccttggagatgtcacgatgccttgcaaaagatattgaaagctcaaactgctaaagatcaagtaacggaacctcacatcatctgatatatatatttaatatcaatgaacttctatgaaatgatttcaccggttcagccaattgtttggatcgtgagaaatcattaaaaaatagggatctacttatcaaaagatttccctgaacaatagaacttactctggcattattgaacgcgatatgatcttgattaattttttgctcccggttctccgtacgatgatgcttgtgagtgaaatcagcatctatgtcattttagaaatattaaatgtgcttattttcatatatatagggagcgtaaataatgagatgtggtggaaataatgttcgaatgttgactgtgactataattatttagatgattaatatttactcttttcctatgtataatatagggtagaatcaaatgacactagtgtaacatgtattaattaatattacattatttaataattttcaattaaaaaaaaaaaaaaaaaaaaaaaaaaaaaaaaataaaaaaaaaaaac

SEQ ID NO: 53851 - protein, 272 aa, Glycine max
  peptide (1)..(272): Ceres Seq. ID no. 15169321
EFVTSIIFGNEFSSRLSIGSIMRLRAAAITSLSQDPKADSAMIFKLAHRFLDVSKYQRNKSKAEDESEYHSGAIQEDLNHQIRRSQCETDNKAGSIEQEVQAIRKDLVTADYGEYMNPFGSEDCLNNEHEQCSLWSDTRARDHIIEIDNAEFTNPFAIDAHSNHDPVSQFIDTVPNSENPSADDPPELYLPGFVIHVVLEKKRPQTDLKTSWRMLERGKCYRAYIANRESFKDIIVSPSMFLDHLPWRCHDALQKILKAQTAKDQVTEPHII

SEQ ID NO: 53852 - protein, 251 aa, Glycine max
  peptide (1)..(251): Ceres Seq. ID no. 15169322
MRLRAAAITSLSQDPKADSAMIFKLAHRFLDVSKYQRNKSKAEDESEYHSGAIQEDLNHQIRRSQCETDNKAGSIEQEVQAIRKDLVTADYGEYMNPFGSEDCLNNEHEQCSLWSDTRARDHIIEIDNAEFTNPFAIDAHSNHDPVSQFIDTVPNSENPSADDPPELYLPGFVIHVVLEKKRPQTDLKTSWRMLERGKCYRAYIANRESFKDIIVSPSMFLDHLPWRCHDALQKILKAQTAKDQVTEPHII

SEQ ID NO: 53853 - protein, 231 aa, Glycine max
  peptide (1)..(231): Ceres Seq. ID no. 15169323
MIFKLAHRFLDVSKYQRNKSKAEDESEYHSGAIQEDLNHQIRRSQCETDNKAGSIEQEVQAIRKDLVTADYGEYMNPFGSEDCLNNEHEQCSLWSDTRARDHIIEIDNAEFTNPFAIDAHSNHDPVSQFIDTVPNSENPSADDPPELYLPGFVIHVVLEKKRPQTDLKTSWRMLERGKCYRAYIANRESFKDIIVSPSMFLDHLPWRCHDALQKILKAQTAKDQVTEPHII

SEQ ID NO: 53854 - DNA, 1179 bp, Glycine max
  misc_feature (1)..(1179): Ceres Seq. ID no. 14306420
agtgtgcagggaatgttgtgttttttatggttcaggaaaatttgagaataacaacgtgttccatgatagagatgtgtttctggaagactataaagaaatgaataggagcttaaagatatatgtttatcctcacagggaagacgatccttttgcaaatgtgcttttgcctgtggaatctgaacccggtggcaattatgccagtgaaagttacttcaaaaaggtacttatgaagagccatttcattacaaaagacccaccagaagcagatcttttctttcttcccttttccatggcaagattgtggcacgatcgaagagttggtgtgggaggtatacaagacttcattagagactacattcagaatatcagtcacaggtatccatattggaacaacacaggtggtgccgatcacttttatgttgcttgtcattcaattggaaggtctgccatggacaaagcacctgatgtgaaattcaatgccattcaagttgtattctcatctagttattttctaactgggtactttgctcataaggatgcatgtctaccacaaatttggccaagaaaaggaaatccccctaaccttgtttcatcaaagaggaaaaggctagctttctttgctggaggagtaaattccccagtacgtgtaaaacttcttgagacatggaaaaatgattcagaaatctttgtgcaccatggaagacttaaaacaccatatgcagatgaattgctaggtagcaagttctgccttcatgttaagggctttgaagtgaacacagctcgcattggagattctctatattatggttgcgttccagtgatcattgccaactactatgaccttccatttgctgatgtgctaaactggaagagcttttcagttgttgtcactaccttagatattcccttgctgaaaaagatcctcaaggatatcatcagttccaataaatatttgatgttacaaagcaatgttttgaaggtgaggaaacacttccaatggcattcacccccgcaagacttcgatgcattttatatggttatgtatgaattatggcttagacgaagttctataaaaaattcgtgggtagattctttcagagtttaatttatatgtatgccactgtaaaatattttcacacaagcatttaataagaatttactttatcatggttatatctt

SEQ ID NO: 53855 - protein, 367 aa, Glycine max
  peptide (1)..(367): Ceres Seq. ID no. 14306421
VCRECCVFYGSGKFENNNVFHDRDVFLEDYKEMNRSLKIYVYPHREDDPFANVLLPVESEPGGNYASESYFKKVLMKSHFITKDPPEADLFFLPFSMARLWHDRRVGVGGIQDFIRDYIQNISHRYPYWNNTGGADHFYVACHSIGRSAMDKAPDVKFNAIQVVFSSSYFLTGYFAHKDACLPQIWPRKGNPPNLVSSKRKRLAFFAGGVNSPVRVKLLETWKNDSEIFVHHGRLKTPYADELLGSKFCLHVKGFEVNTARIGDSLYYGCVPVIIANYYDLPFADVLNWKSFSVVVTTLDIPLLKKILKDIISSNKYLMLQSNVLKVRKHFQWHSPPQDFDAFYMVMYELWLRRSSIKNSWVDSFRV

SEQ ID NO: 53856 - protein, 335 aa, Glycine max
  peptide (1)..(335): Ceres Seq. ID no. 14306422
MNRSLKIYVYPHREDDPFANVLLPVESEPGGNYASESYFKKVLMKSHFITKDPPEADLFFLPFSMARLWHDRRVGVGGIQDFIRDYIQNISHRYPYWNNTGGADHFYVACHSIGRSAMDKAPDVKFNAIQVVFSSSYFLTGYFAHKDACLPQIWPRKGNPPNLVSSKRKRLAFFAGGVNSPVRVKLLETWKNDSEIFVHHGRLKTPYADELLGSKFCLHVKGFEVNTARIGDSLYYGCVPVIIANYYDLPFADVLNWKSFSVVVTTLDIPLLKKILKDIISSNKYLMLQSNVLKVRKHFQWHSPPQDFDAFYMVMYELWLRRSSIKNSWVDSFRV

SEQ ID NO: 53857 - protein, 292 aa, Glycine max
  peptide (1)..(292): Ceres Seq. ID no. 14306423
MKSHFITKDPPEADLFFLPFSMARLWHDRRVGVGGIQDFIRDYIQNISHRYPYWNNTGGADHFYVACHSIGRSAMDKAPDVKFNAIQVVFSSSYFLTGYFAHKDACLPQIWPRKGNPPNLVSSKRKRLAFFAGGVNSPVRVKLLETWKNDSEIFVHHGRLKTPYADELLGSKFCLHVKGFEVNTARIGDSLYYGCVPVIIANYYDLPFADVLNWKSFSVVVTTLDIPLLKKILKDIISSNKYLMLQSNVLKVRKHFQWHSPPQDFDAFYMVMYELWLRRSSIKNSWVDSFRV

SEQ ID NO: 53858 - DNA, 1438 bp, Glycine max
  misc_feature (1)..(1438): Ceres Seq. ID no. 14310639
gatatacacataaactatagtatactcttcccactttcactttcacatatagactatatataaaatatattagtcttgctgttttcttcggctaattgctgcagagaatggctgctggagtgtataaccaaccaattgttgcttttcaatcccattctcacatcaacaattttaatcatcagcaaaagtttaataatttggtaagactggtgacaaaggactttatcggcagtaatttcctctcaagaagggattgtagagtaattcaatctttagcatctcaaacatctgtggttgacacagtttcatccccttcaaaaagcaaaactagtgatagagacactcacaagaaatcaaatgaagcttctttaatccttattcgacatggtgaatccttgtggaacgaaaagaacttgttcacaggctgtgttgatgtccctctaagcaagaggggtatagatgaggcaattgaagctggcaaaagaattagcagtattcctgtggatctcatatttacatctgctttgattcgagcgcagatgacagccatgcttgccatgacacagcaccgccgcaggaaggtgcctatcataatgcacaatgaaagtgaacaagcaaggggatggagtcaagtttttagtgaggatacagaaaagcaatccattccagtcatagcagcttggcaattgaatgaaagaatgtatggggaactacagggtctcaataagcaagaaacagcagacagatatgggaaagaacaagtacatgagtggcgtcgaagttatgacatacctcctccaaatggtgaaagtttggaaatgtgtgctgaaagggcagtttcctatttcagagaccaaattgaacctcaacttttatctggaaagaatgttatgatttcagctcatgggaattcactgagatccattattatgtatcttgacaaactaacttcccaagaggtgattagtttagaattgtcaactggaattccaatgctttacatttttaaagaaggaagattcgttaggagagggagtccgatagggcccactgaagcaggagtttatgcctacactaggcgtttggctctttacaggcagaggttggatgatatgttccaataattttttgaagggttagggaatacatcacacgttaatcagcagtaaagtattacataaggggtaaaaaagatgttatcagtgttacagttagattgcatgaaaatttgagaggagtttaacacagtttcgaactagtggattaggatccatgcttgactccagtgttgttctcatatggtgaaggagtaattgcttccatgtgcctatatatatacaaataaatcattgaatcttagaaatgttttcgtgtctattacaattaattgtaaatgagttgtcatgtgaatttaattggacattcggaatgtttttat

SEQ ID NO: 53859 - protein, 338 aa, Glycine max
  peptide (1)..(338): Ceres Seq. ID no. 14310640
MAAGVYNQPIVAFQSHSHINNFNHQQKFNNLVRLVTKDFIGSNFLSRRDCRVIQSLASQTSVVDTVSSPSKSKTSDRDTHKKSNEASLILIRHGESLWNEKNLFTGCVDVPLSKRGIDEAIEAGKRISSIPVDLIFTSALIRAQMTAMLAMTQHRRRKVPIIMHNESEQARGWSQVFSEDTEKQSIPVIAAWQLNERMYGELQGLNKQETADRYGKEQVHEWRRSYDIPPPNGESLEMCAERAVSYFRDQIEPQLLSGKNVMISAHGNSLRSIIMYLDKLTSQEVISLELSTGIPMLYIFKEGRFVRRGSPIGPTEAGVYAYTRRLALYRQRLDDMFQ

SEQ ID NO: 53860 - protein, 194 aa, Glycine max
  peptide (1)..(194): Ceres Seq. ID no. 14310641
MTAMLAMTQHRRRKVPIIMHNESEQARGWSQVFSEDTEKQSIPVIAAWQLNERMYGELQGLNKQETADRYGKEQVHEWRRSYDIPPPNGESLEMCAERAVSYFRDQIEPQLLSGKNVMISAHGNSLRSIIMYLDKLTSQEVISLELSTGIPMLYIFKEGRFVRRGSPIGPTEAGVYAYTRRLALYRQRLDDMFQ

SEQ ID NO: 53861 - protein, 191 aa, Glycine max
  peptide (1)..(191): Ceres Seq. ID no. 14310642
MLAMTQHRRRKVPIIMHNESEQARGWSQVFSEDTEKQSIPVIAAWQLNERMYGELQGLNKQETADRYGKEQVHEWRRSYDIPPPNGESLEMCAERAVSYFRDQIEPQLLSGKNVMISAHGNSLRSIIMYLDKLTSQEVISLELSTGIPMLYIFKEGRFVRRGSPIGPTEAGVYAYTRRLALYRQRLDDMFQ

SEQ ID NO: 53862 - DNA, 1263 bp, Glycine max
  misc_feature (1)..(1263): Ceres Seq. ID no. 14304983
aaaagagaaagagagagaggctgaaacaaagaagtgaaaataacagcaaaaagtagcagctgctgcagctcccccgaagcttatctcagcagcagatactcaaccctgtttgagtagccgagaataacaccaatgggagaggaggaaaagaaaccagaggaacaacccaaggcagaggagaaaaaaccagaggaagagaagaagaaagaagaagcagcagcagcggaaaaaccaagcgaagagaaaaaaccggaacaagagtcgaaagaggaagttgctgctccgccaccgccaccgccaccggccgagattgtgctcaaagtgttcatgcattgcgagggttgcgctcgcaaggttcgtcgctccctcaaaggattcccaggtgtcgacgatgttgtcaccgattgcaaatctcacaaggtggtcgttaagggagagaaagcggatccgttgaaggttttggagagaatacagaggaagagtcacagacaggtcgagcttctttctccgatcccgaaaccgcaagaggagaagaaggtccaagaggaagaaaagcccaagcccacacccgaagagaagaaagaagaggctcagattgtgatgacggttctgaaagttggcatgcactgcgaagcttgctctcaggaaatcaagagacgcatacagagaatgaagggagtggaatcagcagaacccgatctgcagaactcacaagtgagcgtgaagggggtgtacgatccagcaaagttggttgagtacgtgtacaagagaaccggaaagcacgcagtgataatgaagcaagagccagaaaagaaagagaaagtggaggaagcaaaagaggaagagatgaagagtgatggcgaaggggaagaaaacaaagagaagaaggaaaaagaagaggcaaagggtgaagaagccaaagcagaggaaccaacaacaccaacaattactgaagacaccaacaaggttgttccagaggttaagattaatgaatacttctataacccaccaaggtatggcatggaggtgtatgcatatcctgcacaccctgcacacccagcgtatttccattcctaccctccccagattttcagcgatgagaacccaaatgcctgcactgtcatgtaaaaattgaaggtgtcaggggtgatatgggaattaggggaaattgtgaagtttggtgggggatatgaatatagataccctttcctgtgttacctgtactgtgaaagtacaatgtatgcataagctatagaattttgt

SEQ ID NO: 53863 - protein, 331 aa, Glycine max
  peptide (1)..(331): Ceres Seq. ID no. 14304984
MGEEEKKPEEQPKAEEKKPEEEKKKEEAAAAEKPSEEKKPEQESKEEVAAPPPPPPPAEIVLKVFMHCEGCARKVRRSLKGFPGVDDVVTDCKSHKVVVKGEKADPLKVLERIQRKSHRQVELLSPIPKPQEEKKVQEEEKPKPTPEEKKEEAQIVMTVLKVGMHCEACSQEIKRRIQRMKGVESAEPDLQNSQVSVKGVYDPAKLVEYVYKRTGKHAVIMKQEPEKKEKVEEAKEEEMKSDGEGEENKEKKEKEEAKGEEAKAEEPTTPTITEDTNKVVPEVKINEYFYNPPRYGMEVYAYPAHPAHPAYFHSYPPQIFSDENPNACTVM

SEQ ID NO: 53864 - protein, 266 aa, Glycine max
  peptide (1)..(266): Ceres Seq. ID no. 14304985
MHCEGCARKVRRSLKGFPGVDDVVTDCKSHKVVVKGEKADPLKVLERIQRKSHRQVELLSPIPKPQEEKKVQEEEKPKPTPEEKKEEAQIVMTVLKVGMHCEACSQEIKRRIQRMKGVESAEPDLQNSQVSVKGVYDPAKLVEYVYKRTGKHAVIMKQEPEKKEKVEEAKEEEMKSDGEGEENKEKKEKEEAKGEEAKAEEPTTPTITEDTNKVVPEVKINEYFYNPPRYGMEVYAYPAHPAHPAYFHSYPPQIFSDENPNACTVM

SEQ ID NO: 53865 - protein, 175 aa, Glycine max
  peptide (1)..(175): Ceres Seq. ID no. 14304986
MTVLKVGMHCEACSQEIKRRIQRMKGVESAEPDLQNSQVSVKGVYDPAKLVEYVYKRTGKHAVIMKQEPEKKEKVEEAKEEEMKSDGEGEENKEKKEKEEAKGEEAKAEEPTTPTITEDTNKVVPEVKINEYFYNPPRYGMEVYAYPAHPAHPAYFHSYPPQIFSDENPNACTVM

SEQ ID NO: 53866 - DNA, 1371 bp, Glycine max
  misc_feature (1)..(1371): Ceres Seq. ID no. 14306733
ggagacccttcattcacctatcagagacaaagcgctctctctccaaaaaaaaaaaaaactcgctaaattacaaaaatctcttcaaatcctctcaaccgaaaccctaatcataaaaccctagattttactttatttgtttccctcaatcgaatcgattttccccttccgaaaaccctaattccttcctcgctatcgaagatggacatcgagcagaagcaatcggagctcatagaccacttcgtcaagcgtgcctccgcggcctccgacgccgctgcactatcctccgttctcgtcgaagccacttctcacccttcgctcttcgctttctccgagattctcgctctgcccaatcttcttcagcttgaagcaactgagaattctgcttatcttgatatgcttcggttgtttgcacatggaacatggaatgattacaagagtaatgctgaccgtcttccacaattgatacctgatcagatcctcaagcttaagcaacttacagttcttacactggctgagacatataaggtactaccctatgaccaactgatgcaggagttagatgtgacaaatgttcgtgagcttgaagattttctaattaatgaatgcatgtatgcgggaatagttcgaggaaagttggatcagttgcggcggtgctttgaggtccaatttgcagctggtagggacttgaggcctgatcaactagggaatatgatacagactctctctaactggttgtctacatcagaaaatatgcttgtttcaattcaagagaagataaaatgggctgatgcaatgagtgaaattgacaagaagcacaggaaggatgtggaagagaaggtagaagaagtaaagaagtccattttcaaggccgacatcgacttcagagggcatgaggagatctgctctgaatctggtggagtgatggattatgaagaagatcgaagccgaccaaagaggaggcggcatccaatttcttgaagatttagtagataagggagctcattggagatgggttctttagttgcttgcctgacttttattcatggcatgcgtcaacagaggatatcagcttttgcagacagacaagtatatctcatcgatattgcccttgtctgtcacaccacaaagcgagatagggacaaggaaaaaaaggagggaaaacctgttaatttaggaaattgatagtgtttcttgaaccattatttaatcgtctactgagttggcaataacaagctgagatggtggtgcggctatttatttgcggttgctgaatgctatatatactgttttgttttgtattatgctgatatatttgctgcctcaattgcgttgttatactttgtggtgaatatatatattccaaaattatac

SEQ ID NO: 53867 - protein, 259 aa, Glycine max
  peptide (1)..(259): Ceres Seq. ID no. 14306734
MDIEQKQSELIDHFVKRASAASDAAALSSVLVEATSHPSLFAFSEILALPNLLQLEATENSAYLDMLRLFAHGTWNDYKSNADRLPQLIPDQILKLKQLTVLTLAETYKVLPYDQLMQELDVTNVRELEDFLINECMYAGIVRGKLDQLRRCFEVQFAAGRDLRPDQLGNMIQTLSNWLSTSENMLVSIQEKIKWADAMSEIDKKHRKDVEEKVEEVKKSIFKADIDFRGHEEICSESGGVMDYEEDRSRPKRRRHPIS

SEQ ID NO: 53868 - protein, 194 aa, Glycine max
  peptide (1)..(194): Ceres Seq. ID no. 14306735
MLRLFAHGTWNDYKSNADRLPQLIPDQILKLKQLTVLTLAETYKVLPYDQLMQELDVTNVRELEDFLINECMYAGIVRGKLDQLRRCFEVQFAAGRDLRPDQLGNMIQTLSNWLSTSENMLVSIQEKIKWADAMSEIDKKHRKDVEEKVEEVKKSIFKADIDFRGHEEICSESGGVMDYEEDRSRPKRRRHPIS

SEQ ID NO: 53869 - protein, 143 aa, Glycine max
  peptide (1)..(143): Ceres Seq. ID no. 14306736
MQELDVTNVRELEDFLINECMYAGIVRGKLDQLRRCFEVQFAAGRDLRPDQLGNMIQTLSNWLSTSENMLVSIQEKIKWADAMSEIDKKHRKDVEEKVEEVKKSIFKADIDFRGHEEICSESGGVMDYEEDRSRPKRRRHPIS

SEQ ID NO: 53870 - DNA, 1360 bp, Glycine max
  misc_feature (1)..(1360): Ceres Seq. ID no. 14306410
aaaaactcagacaaccacacaaatattagaacctctctttctccctcaccacaaccaccaccaccaccatttgagcttctttccaacattaatcctgcaaacgacaattacatgtataatggcactgttcaaagtagtgtcattcagaaggacttgactagtttggagaaaattgaagaaggtttagcgcaagcacgggcctcaattcaggaatatatcctatcaaggaactatacttcacaaaggagagaaagttttgtccccaaaggatccatttaccgaaatccccatgcttttctccagagccacatagagatggtgaaaagattcaaggtgtgggtttaccaagaaggggaacaaccattagtacatgatggtccagtaaacaacatatatgcgattgaaggtcaatttatggacgaaatagacaataatgataagtggagccaattcagggcaagacatcctgaggaggcacatgtgtttttccttccattcagcattgccaatgtggttcactatgtctacaagcctatcctaaagcaatctgactacgaacctgtccgtttgcaactcttggttgaagactatattagtgttattgaagataaatatccttactggaatagaagcaaaggtgcagaccattttttgctttcgtgtcatgattgggctccaaaagtttccaatggcaatcctgaactttttcaaagtttcattagggcactttgcaatgctaacacttcagaagggtttcatccaaatagagatgtgtccatccctgaagtgtacttgcctgttggaaagctaggtccgccgagcctaggccagcacccaaacagccgcactatattggcttttttcgcaggaggggtccatggagaaattagaaaaatatttttaaaacattggaaggacaaagataatgaagtgcgagttcatgaatatcttccaaaaagtcaaaattacacaaaattaatgggacaaagcaagttttgcttgtgccctagtgggcatgaagttgcaagtcccagagtggttgaagcaattcatgctgggtgtgtgcccgtaataatttgtgataattattctctacctttcagtgatgtgctgcattggagtcaattttcagtgaaggtttcggtacaaaaaataccagaaatcaaaagtatattacaaagtatttcaaggaaaaagtacttgagattgcacatgaatgtgttaagagttcgaagacactttatgattaatcggccagcaaaaccatttgatatgatgcatatgattcttcactcaatttggctgagaaggctaaacataaagttgattgcttcataattaatcaccagccattttccat

SEQ ID NO: 53871 - protein, 445 aa, Glycine max
  peptide (1)..(445): Ceres Seq. ID no. 14306411
KNSDNHTNIRTSLSPSPQPPPPPFELLSNINPANDNYMYNGTVQSSVIQKDLTSLEKIEEGLAQARASIQEYILSRNYTSQRRESFVPKGSIYRNPHAFLQSHIEMVKRFKVWVYQEGEQPLVHDGPVNNIYAIEGQFMDEIDNNDKWSQFRARHPEEAHVFFLPFSIANVVHYVYKPILKQSDYEPVRLQLLVEDYISVIEDKYPYWNRSKGADHFLLSCHDWAPKVSNGNPELFQSFIRALCNANTSEGFHPNRDVSIPEVYLPVGKLGPPSLGQHPNSRTILAFFAGGVHGEIRKIFLKHWKDKDNEVRVHEYLPKSQNYTKLMGQSKFCLCPSGHEVASPRVVEAIHAGCVPVIICDNYSLPFSDVLHWSQFSVKVSVQKIPEIKSILQSISRKKYLRLHMNVLRVRRHFMINRPAKPFDMMHMILHSIWLRRLNIKLIAS

SEQ ID NO: 53872 - protein, 408 aa, Glycine max
  peptide (1)..(408): Ceres Seq. ID no. 14306412
MYNGTVQSSVIQKDLTSLEKIEEGLAQARASIQEYILSRNYTSQRRESFVPKGSIYRNPHAFLQSHIEMVKRFKVWVYQEGEQPLVHDGPVNNIYAIEGQFMDEIDNNDKWSQFRARHPEEAHVFFLPFSIANVVHYVYKPILKQSDYEPVRLQLLVEDYISVIEDKYPYWNRSKGADHFLLSCHDWAPKVSNGNPELFQSFIRALCNANTSEGFHPNRDVSIPEVYLPVGKLGPPSLGQHPNSRTILAFFAGGVHGEIRKIFLKHWKDKDNEVRVHEYLPKSQNYTKLMGQSKFCLCPSGHEVASPRVVEAIHAGCVPVIICDNYSLPFSDVLHWSQFSVKVSVQKIPEIKSILQSISRKKYLRLHMNVLRVRRHFMINRPAKPFDMMHMILHSIWLRRLNIKLIAS

SEQ ID NO: 53873 - protein, 340 aa, Glycine max
  peptide (1)..(340): Ceres Seq. ID no. 14306413
MVKRFKVWVYQEGEQPLVHDGPVNNIYAIEGQFMDEIDNNDKWSQFRARHPEEAHVFFLPFSIANVVHYVYKPILKQSDYEPVRLQLLVEDYISVIEDKYPYWNRSKGADHFLLSCHDWAPKVSNGNPELFQSFIRALCNANTSEGFHPNRDVSIPEVYLPVGKLGPPSLGQHPNSRTILAFFAGGVHGEIRKIFLKHWKDKDNEVRVHEYLPKSQNYTKLMGQSKFCLCPSGHEVASPRVVEAIHAGCVPVIICDNYSLPFSDVLHWSQFSVKVSVQKIPEIKSILQSISRKKYLRLHMNVLRVRRHFMINRPAKPFDMMHMILHSIWLRRLNIKLIAS

SEQ ID NO: 53874 - DNA, 1053 bp, Glycine max
  misc_feature (1)..(1053): Ceres Seq. ID no. 15177670
atactttccttttgacatatacacagacactcccattgatgttgcaatggagatggtgaaggaattggagatcacagatttgaagccttctgatattgcaaatatgattgaaggagagatatctgtgctgctgccaaataagaggaatagtaactgttcagttatcacgatgacgacgacaacgaatcatcatttccactctgcctcttctcgttcatcatcccaaggatcaatatcaggctcagacagtagagctgatgacttattgaatggagattattggctccatggtgatgtacttgatgatgccagttcaatatgctcctcacatgggacatattccaactcaaacttttgttcagtggatgagcaggaggaaaaccataaggcttctacaagaaaagataaacatctcatcataaagagtcacatgtgcacaagattttcccctaatgaagaccccatcactttgaaccagtgcaaagttttggcaggaccacaagcaccttctactagcaaaaacaagaggatgatggacaatcgtagactaacaaggaacaagtcattgattgatacaaggagccagctactacacagatcactggttgaggaggtgaacaaaagaaggctattcaacacagttggagccgtggaaaatattggatttgtgacaccttatgaggttaccaacaaaaagtcacatccagcatgcggtgcttttgatgtgaactcttctagaagtagcaagagagaaaactttaatagagagaaatttttttagaaatggttgtctcttgagctttggagtcaaagaggagaaaatggataacttctgtgtcatggactagagaaaatgataaggctgatgtgctatggagttattattacacttacaaagaataatggtactatttggaaaaaatcgttgggccatagatatacctaaattattgtattattagggtgttcgatttcaaatgggtgtaaatagaaatacatggaatcctatctcccttaaaatggatcttaataattcaaaaaagattaatcttt

SEQ ID NO: 53875 - protein, 259 aa, Glycine max
  peptide (1)..(259): Ceres Seq. ID no. 15177671
YFPFDIYTDTPIDVAMEMVKELEITDLKPSDIANMIEGEISVLLPNKRNSNCSVITMTTTTNHHFHSASSRSSSQGSISGSDSRADDLLNGDYWLHGDVLDDASSICSSHGTYSNSNFCSVDEQEENHKASTRKDKHLIIKSHMCTRFSPNEDPITLNQCKVLAGPQAPSTSKNKRMMDNRRLTRNKSLIDTRSQLLHRSLVEEVNKRRLFNTVGAVENIGFVTPYEVTNKKSHPACGAFDVNSSRSSKRENFNREKFF

SEQ ID NO: 53876 - protein, 244 aa, Glycine max
  peptide (1)..(244): Ceres Seq. ID no. 15177672
MEMVKELEITDLKPSDIANMIEGEISVLLPNKRNSNCSVITMTTTTNHHFHSASSRSSSQGSISGSDSRADDLLNGDYWLHGDVLDDASSICSSHGTYSNSNFCSVDEQEENHKASTRKDKHLIIKSHMCTRFSPNEDPITLNQCKVLAGPQAPSTSKNKRMMDNRRLTRNKSLIDTRSQLLHRSLVEEVNKRRLFNTVGAVENIGFVTPYEVTNKKSHPACGAFDVNSSRSSKRENFNREKFF

SEQ ID NO: 53877 - protein, 242 aa, Glycine max
  peptide (1)..(242): Ceres Seq. ID no. 15177673
MVKELEITDLKPSDIANMIEGEISVLLPNKRNSNCSVITMTTTTNHHFHSASSRSSSQGSISGSDSRADDLLNGDYWLHGDVLDDASSICSSHGTYSNSNFCSVDEQEENHKASTRKDKHLIIKSHMCTRFSPNEDPITLNQCKVLAGPQAPSTSKNKRMMDNRRLTRNKSLIDTRSQLLHRSLVEEVNKRRLFNTVGAVENIGFVTPYEVTNKKSHPACGAFDVNSSRSSKRENFNREKFF

SEQ ID NO: 53878 - DNA, 2014 bp, Glycine max
  misc_feature (1)..(2014): Ceres Seq. ID no. 14304034
ttttttttttttttttttttttgaagaacctgcaattaatggataaagagcattgtttttagtgacacagaattacaggtatatacgacagtgttacaaaattttcctgactattctcatgttagtagattgggatcagaacagtatttgctcttgatacatctccaatgcttggaaaactttctccatgaacaatttcctgtgcaatctatactttattgcagcttcaagtgtcctcgtagcatctgccattgaatctagcaatttctggtcttgcttagaggttgtagcaaattctgcaagcatcttttgacattcatcttgcaactccttcgcagcctttctttccatgctagggattggaggcacatccccatctgaccaagttggcaatgttcgtgctgcagctatgactgctccatcaacaaaactatctccggcttttgacagacaattattatggtaatactcttcaggaaggccagatatattgaagattgacaagaaggaatccaaatgaatacgcgcattgcctgagaatttgatcttgtcccaaggattcacgggtgatgaaaatccatatctttgcatgaacatgtcattcttctgagcactcatgtaattaactgtcatctcatctcccttcctaatctgctgtccagcatttataagaacctcaagcatcctgtccttaaaacgccaatggaaaaaacaatttggctcaaatgaatggttcagcatatcagcataaggaatcagcatatttgcttcttgatttagagcaccaattctcgtttgcatgttaatacatcgtgactgtgcaatacctactgcccaagcaaacctttgaggatcacgcgcaagacgctttattttaaggggtacatcactgtgccagttattctcccagaattctaaggatcgttgttgctgttttctaatgtttaatgaatccacatgggaaaaaagatagtgtatgtttgctcatagtggtctttcaagaagattagtatttaataatagtatgttataaagaaataggtattaaaatggcaaaaacacaagatatataaggttgattcactgttgacatccttttagtaattaattgttgtatgcatggttatccatacatcatcttcatggatttgactgttcttcctttctttgtgtaccttgaaatcagcatgctcaaaacacttgaaaggtaccagaaatgcagttatggtgctgtggaagttaccaaacctgccaaagagctcgagagcagctatcgtgaatacttgaagctgaaagcaagatttgaatcacttcaaaggactcaaagaaaccttctaggggaagacctgggcccactgaataccaaagaacttgagcatcttgaacggcaattggattcatctctaaagcaagtgaggtccacaaagacacaattcatgctggaccagttatctgatcttcaaactaaggagcagatgttggtagaagcaaacagatccttgacagtgaagctggaagaaatcaattcaagaaaccactacaggcaatcatgggaagctggtgatcaaagtatgccatacggtggtggtccacagaattctcactctcatcagggcttcttccagccattggaatgcaaccctacattgcagattggtcctgattacaggtacaatgatgtagcttcagatcagataactgccacaactcaacctcaacaagtgagtggctttattccagggtggatgctgtgaaattaggctcagtattcagttggagacataaaagcaaacaccttacaaaagggcaaagccaaaaatgcatcttggtgttggcaaggtgtaaatgtaaccctgcttctattattattttggtataagaaacagatgtgttgtgacttgttcaaacttgtgagaacctttttagccatagacatatggcaatttataacattcggaatcttttgaaggatccttttttattattaaaatatccgagcgaccggtttcaattt

SEQ ID NO: 53879 - protein, 212 aa, Glycine max; identical to SEQ ID NO: 53651
  peptide (1)..(212): Ceres Seq. ID no. 14304035

SEQ ID NO: 53880 - protein, 203 aa, Glycine max; identical to SEQ ID NO: 53652
  peptide (1)..(203): Ceres Seq. ID no. 14304036

SEQ ID NO: 53881 - protein, 188 aa, Glycine max; identical to SEQ ID NO: 53653
  peptide (1)..(188): Ceres Seq. ID no. 14304037

SEQ ID NO: 53882 - DNA, 1313 bp, Glycine max
  misc_feature (1)..(1313): Ceres Seq. ID no. 14303811
ggtcaatccacaatctttagttgttgccaacctcctctagggttcctctgtttcttaactttcttcacatcaatggcaaagaagagaaccgcacctcagaagaagacccagatgatgaatcccatgccaaaacattctcaacagccaagaagctcacctcctaaacgccgcactgatttctctttcttcacgcgctctccctcctccttctccaaccctacttctggttcctcaccagattcatcttctggtgaagtgaggttgtccaatgttgcttcaagctgtttgcaggggaggagaatggcaatgaaacaattttctgaagatatgctggttcgatgcagcttttaccaagagggtagaccggtatgttcatctgagtcttttgatactccagttgtggaagttgattcagctgttcaagatgaaagtctcaaccttggtggacatagggatgcttgcaatgaaaaaattaatatttccaagatgtcagaatctacccctcttgaatcatctgtcagtgatagcagttctcttgctgtaactcctggaagtgttgtatgggcgaggacagattctcaagtgtggtggcctgctgagatcatggaagaaacatctgtgctatccaaccctggcaatgatggacatgttttagtgcagttttatggaaatcttcccagtgcctggattgatccaatgacagatatttcaacttttgaggattcttttgaagacaggagcaacaacccttcagaagattttcaaaaggctttaaagcaggccttacagaggaaggcacaacttagttcttgccaaaagttgactcctgataggtctgctcactatgatctgcaagaacgttcatctgataaatgcacttcaactagcacaagcaaaacaattgatgatgttcaagagagacggagagggaaaagggaacgtaaaccgaaagttcactttgatgaggtaacatatccaatgaaatcagaaacaaaggttcgtcggttgaagataatgcggtacctcggccttgcacctccagttggttctcccttttgagttttgaccatgatcacaagtaatgcatatttcaaatgtttgcagcctaacagctgtagttgaccctcccttttttaaccataataatcatgaaatatggatattttaaaaaaatgcttctatttcttgccattagctatgtaaaattttctaggattatatagtctcatagtattacattactatctgtaaaaaccatataagaatttcacggaatatcagattagttctctaataaaagttcaatttagcac

SEQ ID NO: 53883 - protein, 352 aa, Glycine max
  peptide (1)..(352): Ceres Seq. ID no. 14303812
GQSTIFSCCQPPLGFLCFLTFFTSMAKKRTAPQKKTQMMNPMPKHSQQPRSSPPKRRTDFSFFTRSPSSFSNPTSGSSPDSSSGEVRLSNVASSCLQGRRMAMKQFSEDMLVRCSFYQEGRPVCSSESFDTPVVEVDSAVQDESLNLGGHRDACNEKINISKMSESTPLESSVSDSSSLAVTPGSVVWARTDSQVWWPAEIMEETSVLSNPGNDGHVLVQFYGNLPSAWIDPMTDISTFEDSFEDRSNNPSEDFQKALKQALQRKAQLSSCQKLTPDRSAHYDLQERSSDKCTSTSTSKTIDDVQERRRGKRERKPKVHFDEVTYPMKSETKVRRLKIMRYLGLAPPVGSPF

SEQ ID NO: 53884 - protein, 328 aa, Glycine max
  peptide (1)..(328): Ceres Seq. ID no. 14303813
MAKKRTAPQKKTQMMNPMPKHSQQPRSSPPKRRTDFSFFTRSPSSFSNPTSGSSPDSSSGEVRLSNVASSCLQGRRMAMKQFSEDMLVRCSFYQEGRPVCSSESFDTPVVEVDSAVQDESLNLGGHRDACNEKINISKMSESTPLESSVSDSSSLAVTPGSVVWARTDSQVWWPAEIMEETSVLSNPGNDGHVLVQFYGNLPSAWIDPMTDISTFEDSFEDRSNNPSEDFQKALKQALQRKAQLSSCQKLTPDRSAHYDLQERSSDKCTSTSTSKTIDDVQERRRGKRERKPKVHFDEVTYPMKSETKVRRLKIMRYLGLAPPVGSPF

SEQ ID NO: 53885 - protein, 315 aa, Glycine max
  peptide (1)..(315): Ceres Seq. ID no. 14303814
MMNPMPKHSQQPRSSPPKRRTDFSFFTRSPSSFSNPTSGSSPDSSSGEVRLSNVASSCLQGRRMAMKQFSEDMLVRCSFYQEGRPVCSSESFDTPVVEVDSAVQDESLNLGGHRDACNEKINISKMSESTPLESSVSDSSSLAVTPGSVVWARTDSQVWWPAEIMEETSVLSNPGNDGHVLVQFYGNLPSAWIDPMTDISTFEDSFEDRSNNPSEDFQKALKQALQRKAQLSSCQKLTPDRSAHYDLQERSSDKCTSTSTSKTIDDVQERRRGKRERKPKVHFDEVTYPMKSETKVRRLKIMRYLGLAPPVGSPF

SEQ ID NO: 53886 - DNA, 1082 bp, Glycine max
  misc_feature (1)..(1082): Ceres Seq. ID no. 14304561
gatggtatcataaaaatctcacccttttctgcaactttctctctgacacacaccgaacactcaaacacacacagtgtgcagcagcagcagcaacaacaagagaagaagatggctctgcaactatgggagacattgaaggaggccatagttgcctacacggggctctccccgcccaccttcttcacccttctggccctgatcctagccctatactacgtcgtttctgggctcttcccctcttccgaccaccgccacaacaccgcctcgcgcgacttggagccccagatggagcctctgcgaccccccgttcagatcggcgaggtcaccgaggacgacctcaaggcctacgacggcaccgatcccgagaagcctctcctcatggccatcaagggccagatctatgatgtttcccagagcagaatgttttatggacctggtggaccctatgctctatttgctggcaaggatgctagcagagctttagcaaaaatgtcttttgaagagaaagatctaactggagatatctctggtcttggaccgtttgagcttgaggccttgcaagactgggaatacaaatttatgggcaagtatgtaaaagttggaaccgtaacaaagacagttccagtaactgaaccagaatccactgctgaaccatcagaatctactccccatgatgaatcttcaaagcctactgaagatgatggcccatcagaatcagcagctgctaaaaatgatgaaaccccttcaaaggttgatgcagataaagagtaataatcgttggataaagagtaattgtcttgcaaattctcttgcaaacagtggaaacggttacttagaagcttctgagaaatactgagccttgctgaatgtattcagcaaatgtgggacaaagtttgcctaagtattctgtttgataaataaggaaatcttggtatttaatttcagttttcctgggtttatagcttcttcttgtattccataagatctatattacttagaggcaacaaatcaatgaacatttgagaccatgtactgagccaagtattgaatgaatgcatttggtcttatatatggtatggtat

SEQ ID NO: 53887 - protein, 256 aa, Glycine max
  peptide (1)..(256): Ceres Seq. ID no. 14304562
DGIIKISPFSATFSLTHTEHSNTHSVQQQQQQQEKKMALQLWETLKEAIVAYTGLSPPTFFTLLALILALYYVVSGLFPSSDHRHNTASRDLEPQMEPLRPPVQIGEVTEDDLKAYDGTDPEKPLLMAIKGQIYDVSQSRMFYGPGGPYALFAGKDASRALAKMSFEEKDLTGDISGLGPFELEALQDWEYKFMGKYVKVGTVTKTVPVTEPESTAEPSESTPHDESSKPTEDDGPSESAAAKNDETPSKVDADKE

SEQ ID NO: 53888 - protein, 220 aa, Glycine max
  peptide (1)..(220): Ceres Seq. ID no. 14304563
MALQLWETLKEAIVAYTGLSPPTFFTLLALILALYYVVSGLFPSSDHRHNTASRDLEPQMEPLRPPVQIGEVTEDDLKAYDGTDPEKPLLMAIKGQIYDVSQSRMFYGPGGPYALFAGKDASRALAKMSFEEKDLTGDISGLGPFELEALQDWEYKFMGKYVKVGTVTKTVPVTEPESTAEPSESTPHDESSKPTEDDGPSESAAAKNDETPSKVDADKE

SEQ ID NO: 53889 - protein, 161 aa, Glycine max
  peptide (1)..(161): Ceres Seq. ID no. 14304564
MEPLRPPVQIGEVTEDDLKAYDGTDPEKPLLMAIKGQIYDVSQSRMFYGPGGPYALFAGKDASRALAKMSFEEKDLTGDISGLGPFELEALQDWEYKFMGKYVKVGTVTKTVPVTEPESTAEPSESTPHDESSKPTEDDGPSESAAAKNDETPSKVDADKE

SEQ ID NO: 53890 - DNA, 1588 bp, Glycine max
  misc_feature (1)..(1588): Ceres Seq. ID no. 14303770
tcagctacgtaccccccccgcctgaacctgatcgatctctttaccagttgccacactacaccgagattccccctaaacccgtttgcgttgttgtttgcgaagaaatggcgactaagaggagcgtgggaacgttgaaggagggtgatttgaaagggaagagggtgttcgtgagggtcgatctgaacgtgcctttggatgacaaccttaacatcaccgatgacactagagtccgtgctgctgttcccaccatcaagtacttaactggtcatggagccaaagtgatcctttctagccacttgggacgtcctaaaggtgtaacacctaaatacagtttgaagcctcttgtgccaaggctgtctcaacttctcggaattgaggttacgatggcaaatgactctattggggaggaagttgagaagttggttgcacaacttccagaaggtggtgttttgcttctagagaatgtgaggttctataaggaggaagagaagaatgaccctgagtttgcaaagaagttggcttctcttgctgatctctacgtgaatgatgctttcggcactgcccacagagctcatgcttctacagaaggagtggccaaatacttgaagccctctgttgcaggattccttatgcagaaggaacttgactatctagttggagctgtgtcaaaccccaagagaccatttgctgctatcgttggtgggtcaaaggtgtcttccaagattggagttattgagtccttgttggagaaagttaacgttctcttgcttggtggaggaatgatctttaccttttacaaggctcagggttattcagttggttcatctcttgtggaggaagacaagcttagccttgcaactacacttctcgaaaaggccaaggctaaaggggtttctttgttgcttccaactgatgtggtcatagcagacaagtttgctgctgatgctaacagcaagactgtgccagcatcaagcatcccagacgggtggatgggattagatattggtcccgattccatcaagacatttggtgaagcattggataagacccagaccgtcatttggaatggaccaatgggtgtttttgagtttgataagtttgccacaggaacagaggccatagccaagaaactggcagagctgagtgggaagggagtaacgaccatcattggaggaggtgactctgttgccgctgtggagaaggttggtcttgcagacaagatgagccacatctccactggtggtggtgccagcttagagcttcttgaggggaagcaactccctggtgtccttgcccttgatgatgcttgagtaaacatcactagttcctctgtaatttgtgctttatattattattatggttggatttcagccaacagtggattgaggtacaatgagagagctcttgttgctcctgtagaggcttaatataggttaggtttcgaaataagagggttttgtggcatccttggtgttgcattgagctttgatctaattgttcttgaacaatgttcatttcaaaaggagttttactttgttagttatgttcctttagttttatcagtgaccaattttcaacttttcgtgtt

SEQ ID NO: 53891 - protein, 435 aa, Glycine max
  peptide (1)..(435): Ceres Seq. ID no. 14303771
SYVPPPPEPDRSLYQLPHYTEIPPKPVCVVVCEEMATKRSVGTLKEGDLKGKRVFVRVDLNVPLDDNLNITDDTRVRAAVPTIKYLTGHGAKVILSSHLGRPKGVTPKYSLKPLVPRLSQLLGIEVTMANDSIGEEVEKLVAQLPEGGVLLLENVRFYKEEEKNDPEFAKKLASLADLYVNDAFGTAHRAHASTEGVAKYLKPSVAGFLMQKELDYLVGAVSNPKRPFAAIVGGSKVSSKIGVIESLLEKVNVLLLGGGMIFTFYKAQGYSVGSSLVEEDKLSLATTLLEKAKAKGVSLLLPTDVVIADKFAADANSKTVPASSIPDGWMGLDIGPDSIKTFGEALDKTQTVIWNGPMGVFEFDKFATGTEAIAKKLAELSGKGVTTIIGGGDSVAAVEKVGLADKMSHISTGGGASLELLEGKQLPGVLALDDA

SEQ ID NO: 53892 - protein, 401 aa, Glycine max
  peptide (1)..(401): Ceres Seq. ID no. 14303772
MATKRSVGTLKEGDLKGKRVFVRVDLNVPLDDNLNITDDTRVRAAVPTIKYLTGHGAKVILSSHLGRPKGVTPKYSLKPLVPRLSQLLGIEVTMANDSIGEEVEKLVAQLPEGGVLLLENVRFYKEEEKNDPEFAKKLASLADLYVNDAFGTAHRAHASTEGVAKYLKPSVAGFLMQKELDYLVGAVSNPKRPFAAIVGGSKVSSKIGVIESLLEKVNVLLLGGGMIFTFYKAQGYSVGSSLVEEDKLSLATTLLEKAKAKGVSLLLPTDVVIADKFAADANSKTVPASSIPDGWMGLDIGPDSIKTFGEALDKTQTVIWNGPMGVFEFDKFATGTEAIAKKLAELSGKGVTTIIGGGDSVAAVEKVGLADKMSHISTGGGASLELLEGKQLPGVLALDDA

SEQ ID NO: 53893 - protein, 308 aa, Glycine max
  peptide (1)..(308): Ceres Seq. ID no. 14303773
MANDSIGEEVEKLVAQLPEGGVLLLENVRFYKEEEKNDPEFAKKLASLADLYVNDAFGTAHRAHASTEGVAKYLKPSVAGFLMQKELDYLVGAVSNPKRPFAAIVGGSKVSSKIGVIESLLEKVNVLLLGGGMIFTFYKAQGYSVGSSLVEEDKLSLATTLLEKAKAKGVSLLLPTDVVIADKFAADANSKTVPASSIPDGWMGLDIGPDSIKTFGEALDKTQTVIWNGPMGVFEFDKFATGTEAIAKKLAELSGKGVTTIIGGGDSVAAVEKVGLADKMSHISTGGGASLELLEGKQLPGVLALDDA

SEQ ID NO: 53894 - DNA, 1202 bp, Glycine max
  misc_feature (1)..(1202): Ceres Seq. ID no. 15174883
attttactaccagtgagtggagtttgtagacagtagtagaaagggaaagagggttgatagaagagaagggtttaggattttgcacaactcactcatggaggaggaagaagccccagacgttatatgcgagctggaaaacgttcaaggcttagtggacgccctcaccgccgttcggtggaagcgccagcaggacgccgtgttggagttgtccgaacacggcattgttttgatcgtcgaagaaagcggttgcctccaagccaaggtttatctcaaacgagagttattcattcgttacgattacaacgcacgaggaggacgacctcgttttggagtgagtttggggcatttcgtagattgcttgaacgccttctcggttcctgctggtcaatcaatatcaagccttgttcagattcaatatccgggtcctgacatgcagcttcttctcaaatctgtagattcgctggatgccagtatttgtgcagagatcaggacaaggattccagatacaattgcatgggactacaattttgaacctgcaggggcaaaccctttaacctttactgttaaatctgcagctctgaaggaagctattgaggatcttgaatggcctggatcaagcatcaagattactctagagccagatcctccttctgtttcattaagagctgaaggacatggagacttgcagatagacttcatgtattatgtgaattccgaactcctggtggcatttcagtgtgatcatcaagcttctttcaagtacaaatataagttcctcagagcaacaacttctaatatgcctagcagtgttattaaagaaaatagaggaagtaagttaagcattgggagaggtggaatgttaaaagtccagcatctggtttcaattgccaaaccatctgtgtcacacccatatgctgattcggttggctatcagcaaccaagtagaatagctcatattgaattctttgtgaaaccagaggaaagtgaggactgagtgaatgattattagttactataaagactccgtcaagttttgctatgcaaaccattaacttcgcaaaagaattacaaaatggtttgtattcagaatgttgatcaaagaggtattttgcagaaaaatcctcgtttaatctgagttttagacggaacaagcttggtaaggccactgaaacttaaaacagaatcgtagcaatgttgctcag

SEQ ID NO: 53895 - protein, 299 aa, Glycine max
  peptide (1)..(299): Ceres Seq. ID no. 15174884
MEEEEAPDVICELENVQGLVDALTAVRWKRQQDAVLELSEHGIVLIVEESGCLQAKVYLKRELFIRYDYNARGGRPRFGVSLGHFVDCLNAFSVPAGQSISSLVQIQYPGPDMQLLLKSVDSLDASICAEIRTRIPDTIAWDYNFEPAGANPLTFTVKSAALKEAIEDLEWPGSSIKITLEPDPPSVSLRAEGHGDLQIDFMYYVNSELLVAFQCDHQASFKYKYKFLRATTSNMPSSVIKENRGSKLSIGRGGMLKVQHLVSIAKPSVSHPYADSVGYQQPSRIAHIEFFVKPEESED

SEQ ID NO: 53896 - protein, 187 aa, Glycine max
  peptide (1)..(187): Ceres Seq. ID no. 15174885
MQLLLKSVDSLDASICAEIRTRIPDTIAWDYNFEPAGANPLTFTVKSAALKEAIEDLEWPGSSIKITLEPDPPSVSLRAEGHGDLQIDFMYYVNSELLVAFQCDHQASFKYKYKFLRATTSNMPSSVIKENRGSKLSIGRGGMLKVQHLVSIAKPSVSHPYADSVGYQQPSRIAHIEFFVKPEESED

SEQ ID NO: 53897 - DNA, 1478 bp, Glycine max
  misc_feature (1)..(1478): Ceres Seq. ID no. 14305019
atattttttatgttaaattttattgttggctaaggctagagtatctgtatctatcaaaaacaaatcagcaattgagaagatgtcactgtattttctatattacctatagttgttttctttctttaaaataatatccctggtaaggggaactagtcaacaactggttaattggcctcaaatacatcagtttttctgcaactattgctggtggtgatgcatctctcgatgggagctttgtgatttaaaggttcgattagttgctgacaaagatataaataagcccaggggttatgctttcattgagtatctgcatacaagagacatgaaagctgcttataaacaagctgatggtaggaaaattgatggtagaagggtgcttgtggatgttgagcgtgggaggactgttccaaattggagaccccgtcgcttaggtggtggacttggtaccactagagttggaggtgaagaagttaatcagcgacattctgggagggagcaacaacagtctcgttctgaagaaccgagagtgcgagaggaccgacacgctgatagagacagggaaatatcacgtgaaagaggtagggacaaagacagagaacgggagcgatcacgtgaacattctcatgaaagggtcagggatcgtgatcatagggaggataggcaccacagagaccgggataggaacagggacagagaccgagacagggaaagagatagagatcgtgggcgtgatcgagatagaacacgggaccgtgatcgtgagcgagggagggaccgtgatcgggatcgagaatatgatcgacatcgtgagagggatagagattatgaagttggtgaccctgatcgaggacgctcacgtgatagggagtctgattatgatcgtgttgaatctaaacatggggaaaggaatcatgactatgaacctgaggatgatcgtggtaggcataaccagtatgaacatggacgtaggcatgcagaccctgatcatgaccctgagcggtatgaccactacaatcatggagatgaccatggtgaccattacaatcagtatcgtgaccatgatgggatggaagatgactaccatgctggacgtgcaacatctgaatcgcatgaaaaggagagaagtcatgatgtggaccgtgaatatcaacgctcagagagatcacattcccgggagtatgattattaggacttgggcatagttcttctcaactttgttggtaagattttataatttggtatgtttacttttgaatcttgctcacctgccggtattggtagttgttgaatggattaaggcacagtgtgatcattaaaaagaaaactgtagctgctgctatccatatggcccatatttgaaagctgccttttgtcaacgtggacttggacatctaatattggtatttgtttggcatttgtgttgttttcttctgacattttatgaaattaaacatctaatattggtatttgattttggc

SEQ ID NO: 53898 - protein, 288 aa, Glycine max
  peptide (1)..(288): Ceres Seq. ID no. 14305020
MKAAYKQADGRKIDGRRVLVDVERGRTVPNWRPRRLGGGLGTTRVGGEEVNQRHSGREQQQSRSEEPRVREDRHADRDREISRERGRDKDRERERSREHSHERVRDRDHREDRHHRDRDRNRDRDRDRERDRDRGRDRDRTRDRDRERGRDRDRDREYDRHRERDRDYEVGDPDRGRSRDRESDYDRVESKHGERNHDYEPEDDRGRHNQYEHGRRHADPDHDPERYDHYNHGDDHGDHYNQYRDHDGMEDDYHAGRATSESHEKERSHDVDREYQRSERSHSREYDY

SEQ ID NO: 53899 - protein, 192 aa, Glycine max
  peptide (1)..(192): Ceres Seq. ID no. 14305021
MKGSGIVIIGRIGTTETGIGTGTETETGKEIEIVGVIEIEHGTVIVSEGGTVIGIENMIDIVRGIEIMKLVTLIEDAHVIGSLIMIVLNLNMGKGIMTMNLRMIVVGITSMNMDVGMQTLIMTLSGMTTTIMEMTMVTITISIVTMMGWKMTTMLDVQHLNRMKRREVMMWTVNINAQRDHIPGSMIIRTWA

SEQ ID NO: 53900 - DNA, 1201 bp, Glycine max
  misc_feature (1)..(1201): Ceres Seq. ID no. 15176415
tgttaacctaattaagcttgctttaagttttatttgattggctttatgtgacttcaataaaagctcaattactcaagtgctgtttgtttgtttttttattttttttgccagctggttgatttgatgcatgcaaattcacaatgcgtttgtaacccctattttggttttattaaaggagattttgggttttcaagttattaggagcttgaacacaagagtataatatcatcatatatctcaatatctcatgctctcttcaaagttctgatctacgatttcatttgttcactttggtgctttctttaatagcaattgttggggacataactccattggatggaggttctaaagcagaaaagaatcaacgagaacaggcaacactagatcatatgtgtaaagtacttggaggaggatgtacaagtactttcttttcactatacatgagtttgttaatgagataataatgaaaattcacaactcttggtctttaaaaggtgagttacatattgatgcaaaggcatttcctctttaatttggaaattttcatatacaacatgtcattcttggtcattgtagtagtgtctgaaattggttgacaagctagctagttgttaaaacttaattaaaactattctgtattagtttcattatattttgccattgttgtagtctctcttagtcaggagttcgacttgtagtttgaatgatgtgataagaagagaaagaaacataagccatttgtacttgggcacacttgcaccaattatattaattatttttgtcttcctccgttaacagcgatagtcagttttacttgtgccttgaggaggaggaggagtaattttataccaagttgttcagtatcttatctaaagtttgttgagtttgctttggatgaaaccaaacgtcacactcacttgatcccttcgcctttacaggaaaagttcagtttcatgaattccaaggatgttaaagggagtcttagtatgctatcatttgaagctacaaaaattaggcttctacgaagattgatcattgagacagaaacaatgcaagtggtttttttaatgcccatcaattatcaaattgatatatggttggtatctactagtgtcttaacaaaatatgcctttgtgtagtaccttgtaatctattacaacaataacaatttcaaaatttgactttgtatttatttgtgccg

SEQ ID NO: 53901 - protein, 61 aa, Glycine max
  peptide (1)..(61): Ceres Seq. ID no. 15176416
MNSKDVKGSLSMLSFEATKIRLLRRLIIETETMQVVFLMPINYQIDIWLVSTSVLTKYAFV

SEQ ID NO: 53902 - protein, 50 aa, Glycine max
  peptide (1)..(50): Ceres Seq. ID no. 15176417
MLSFEATKIRLLRRLIIETETMQVVFLMPINYQIDIWLVSTSVLTKYAFV

SEQ ID NO: 53903 - protein, 39 aa, Glycine max
  peptide (1)..(39): Ceres Seq. ID no. 15176418
MYKYFLFTIHEFVNEIIMKIHNSWSLKGELHIDAKAFPL

SEQ ID NO: 53904 - DNA, 1368 bp, Glycine max
  misc_feature (1)..(1368): Ceres Seq. ID no. 14306970
ggtggatctccccaagcatagagcatgttagtcacgttagcagcgggcaagttggtccggcggcaccttccccttttctttcggctgttccatcttcaaaaccgtgggctcggatcttcaaaatcaaaacgaatttccattcgttatcatataaatacctcatcttcatccccaaaaccactttcagtttcagaacacaaagcaatggtggcgctcctagtggcaactacatccgaccctgcttccatcaacccggccaacgcgcttttgggcatgcccgggtggaaacccggtccccatttccaggatgatatgaagagctatgtgaatgaaggggtgagggtgttggtacatgggaagagcatagttgcggaagatgagttggacaagaggtgggaagaagttactggggaggttattgatgaagtgatcttcttcagcaagcacactgctgcctccaacaagcctgccctgactgttcaccctattggagttcctcatttgcgccaaggcgatgttcccccccaaggcggcagacctggatgggcagctcttccaaatcctaggatggggccttggcttcgccttttgaaaaaccttgcccaagctcataatcttgtccctgaatttgagattactttagaggccactcaccatggaccgttgaccaataagccaaccatgtttttggagattggtagtactgaagactattggaagagacaggatgctgctcaagttatggcacagttagtatgggaaggacttggacttggaggtgtgtcagatgtaggaaactggagcagggagaatgataacaagaaaatccttcttgggataggtggtggacattatgcacctcggcatgtggatgtagtattgaaagataatgtatgggtgggtcacctactttctggatattcgctgccaatggaagatccaaaccagtcaaaaggagaaaaaaatgtggagattggtggaacatggagacagtctataaaagctgcatatgaagccacttattctgcatttcctggtggtgaaattcttgcacatctagaccacaagagtttcaagggctggcagaagaatgccataacaggattccttgcggagcaaaacattaaaattggaaaacccaataacttctattgagtggatgctatgtgaacaacatagcttctgcagagtgcggaatgagtcaggctgaagattttggtagatcatactagcaatttaattcagttttcttgagatcacagtgatagttaatgaataactgaagtttgagataaactgatatatacataaatccaattctgatgaaaaacaatatttgcaattacatcaattaaaaccatatatagc

SEQ ID NO: 53905 - protein, 376 aa, Glycine max
  peptide (1)..(376): Ceres Seq. ID no. 14306971
MLVTLAAGKLVRRHLPLFFRLFHLQNRGLGSSKSKRISIRYHINTSSSSPKPLSVSEHKAMVALLVATTSDPASINPANALLGMPGWKPGPHFQDDMKSYVNEGVRVLVHGKSIVAEDELDKRWEEVTGEVIDEVIFFSKHTAASNKPALTVHPIGVPHLRQGDVPPQGGRPGWAALPNPRMGPWLRLLKNLAQAHNLVPEFEITLEATHHGPLTNKPTMFLEIGSTEDYWKRQDAAQVMAQLVWEGLGLGGVSDVGNWSRENDNKKILLGIGGGHYAPRHVDVVLKDNVWVGHLLSGYSLPMEDPNQSKGEKNVEIGGTWRQSIKAAYEATYSAFPGGEILAHLDHKSFKGWQKNAITGFLAEQNIKIGKPNNFY

SEQ ID NO: 53906 - protein, 316 aa, Glycine max
  peptide (1)..(316): Ceres Seq. ID no. 14306972
MVALLVATTSDPASINPANALLGMPGWKPGPHFQDDMKSYVNEGVRVLVHGKSIVAEDELDKRWEEVTGEVIDEVIFFSKHTAASNKPALTVHPIGVPHLRQGDVPPQGGRPGWAALPNPRMGPWLRLLKNLAQAHNLVPEFEITLEATHHGPLTNKPTMFLEIGSTEDYWKRQDAAQVMAQLVWEGLGLGGVSDVGNWSRENDNKKILLGIGGGHYAPRHVDVVLKDNVWVGHLLSGYSLPMEDPNQSKGEKNVEIGGTWRQSIKAAYEATYSAFPGGEILAHLDHKSFKGWQKNAITGFLAEQNIKIGKPNNFY

SEQ ID NO: 53907 - protein, 293 aa, Glycine max
  peptide (1)..(293): Ceres Seq. ID no. 14306973
MPGWKPGPHFQDDMKSYVNEGVRVLVHGKSIVAEDELDKRWEEVTGEVIDEVIFFSKHTAASNKPALTVHPIGVPHLRQGDVPPQGGRPGWAALPNPRMGPWLRLLKNLAQAHNLVPEFEITLEATHHGPLTNKPTMFLEIGSTEDYWKRQDAAQVMAQLVWEGLGLGGVSDVGNWSRENDNKKILLGIGGGHYAPRHVDVVLKDNVWVGHLLSGYSLPMEDPNQSKGEKNVEIGGTWRQSIKAAYEATYSAFPGGEILAHLDHKSFKGWQKNAITGFLAEQNIKIGKPNNFY

SEQ ID NO: 53908 - DNA, 1091 bp, Glycine max
  misc_feature (1)..(1091): Ceres Seq. ID no. 15172672
aatactgctacaaaccataacacaaagtcccttcatttattgattccacaaaatcaaatctcccactaccaacaacactgccaccactaaagcactgacaactctccttcactccaccactcctcactcttctcattcagatctacccaacacacacacaccaaaaaataaaataaaaatgcaactccaacccactctctccactctctacctctcccttttgttaacaataacgttaacatctccaaccttggcagcacaaagcaagccgcaggatctggtccggtcctcgtgcgtgcacgcgcggtacccgcgtctgtgcctgcgcaccctctcgaactacccgggtcccgccaacacgccgttagacgtggccagggcagctttgagggtaagcctggcccacacgcgccgggcctccaaattcctccatgcactttctcatggaggcgctgccgccatgagcaagcgccagcgctccgcgctgcgcgactgtaatgaacagatttcggactccgtcgaccagctgcggcggagcctcgacgagctgcagcacctgcgctccgagacgttcaagtggcagatgagcaacgccctgacttgggtcagcgccgccctcaccaacggcgacacctgcctcgacggcttcggagggaatgccaggcccgacgtcaaacgcagagtcacggatgtggcgagggttactagcaatgctttgtatatgattaatcggctcgggcaaagtagaaccgggaagcccaagcccaaacccaaacccaggtccaggcctcagcctcgctctgcctcaagtactgaaaaattgaattagatggtctctgctgggttggaaggaagaacgtgggaactgggaagtgaagctacttggtcaagaatagtacgatagtacgtctaagaggtgaaattgtgttgactagtcaattaatcaattaattaggtaacaaccaccgtctattgtcagtgcactgtgaccacatttgctttttttttttttcccttgtgtttttcttgctacaaataagatgtatattactatatatatatattagtataataataataataataataac

SEQ ID NO: 53909 - protein, 216 aa, Glycine max
  peptide (1)..(216): Ceres Seq. ID no. 15172673
MQLQPTLSTLYLSLLLTITLTSPTLAAQSKPQDLVRSSCVHARYPRLCLRTLSNYPGPANTPLDVARAALRVSLAHTRRASKFLHALSHGGAAAMSKRQRSALRDCNEQISDSVDQLRRSLDELQHLRSETFKWQMSNALTWVSAALTNGDTCLDGFGGNARPDVKRRVTDVARVTSNALYMINRLGQSRTGKPKPKPKPRSRPQPRSASSTEKLN

SEQ ID NO: 53910 - protein, 122 aa, Glycine max
  peptide (1)..(122): Ceres Seq. ID no. 15172674
MSKRQRSALRDCNEQISDSVDQLRRSLDELQHLRSETFKWQMSNALTWVSAALTNGDTCLDGFGGNARPDVKRRVTDVARVTSNALYMINRLGQSRTGKPKPKPKPRSRPQPRSASSTEKLN

SEQ ID NO: 53911 - DNA, 1426 bp, Glycine max
  misc_feature (1)..(1426): Ceres Seq. ID no. 14311423
aatatgacaatggttcttcaattctatcttttcctcaccttttcccccctggatacagaatctgtgctggatgcaagactgagattggccaaggaagatttttaagttgcatggggggtgtctggcatccagaatgcttctgctgccatgcatgccatcttccaatcactgattatgagttttccatgtctagcaatcgcccttaccataaatcatgctatagggagaagcatcacccaagatgtgatgtttgcaagaactttatcccaactaattcatctggcctcattgagtatagagctcatcctttctggctacaaaaatactgcccatcacatgagcttgatggcacttctcgttgttgtagttgcgaaagaatggagccaagggatacaaaatatcttttgcttgatgatggtcgaaagctatgtttagagtgtctagactcatcaattatggatactcatgaatgccaacctctttaccttgaaatacaagaattttatgaaggtttaaatatgaaattggagcaacaaattcctatgctcttggttgagagacaagcgctgaatgaggctatggagggagaaaagaatggtcatcaccacttacccgaaactagaggactatgcttgtcagaagagcaaactgtcaccactatttcaaggaggccaaggattgcagcaggctaccgagccatagacatgataactgaaccttataggctgatccgttgttgtgaagtgacagccattcttgttttgtatggccttcctaggttgttaacaggatcaatcctagctcatgagatgatgcatgcatggcttaggcttaaaggttatcctaacctcagtccagaagttgaagaaggaatctgccaagttttggctcatatgtggttagaatcagagctctattctggatttgggaatgatggtgcatcatcctcaacatcatctttgtcttcgtcatcaccttcctcctcttctgtctcaacaaagaagggtaaacggtccgactttgagaagaaacttggtgatttttttaaacaccagattgagtcagatacctcctcagcttatggagatggattcagattgggtaaccaagcaatggtcaagtatgggcttaaaaggacccttgaccatatccatatgacaggaagttttccatattaaaaattgaaaatttgaaagatatgattctctgacctatacaatggccattaccacagcttggttaataaattatatagttcaaagtttccaagatcatatagtttaacattagagaaaataaggaataaaattgctcctcttacgttgcggtcccttaatttcgtgtcaaatgtggcaccgcatgccttatatgtataattaaatactactcaggaactgaagcaatgaaagtatagaattaattttgt

SEQ ID NO: 53912 - protein, 391 aa, Glycine max
  peptide (1)..(391): Ceres Seq. ID no. 14311424
YDNGSSILSFPHLFPPGYRICAGCKTEIGQGRFLSCMGGVWHPECFCCHACHLPITDYEFSMSSNRPYHKSCYREKHHPRCDVCKNFIPTNSSGLIEYRAHPFWLQKYCPSHELDGTSRCCSCERMEPRDTKYLLLDDGRKLCLECLDSSIMDTHECQPLYLEIQEFYEGLNMKLEQQIPMLLVERQALNEAMEGEKNGHHHLPETRGLCLSEEQTVTTISRRPRIAAGYRAIDMITEPYRLIRCCEVTAILVLYGLPRLLTGSILAHEMMHAWLRLKGYPNLSPEVEEGICQVLAHMWLESELYSGFGNDGASSSTSSLSSSSPSSSSVSTKKGKRSDFEKKLGDFFKHQIESDTSSAYGDGFRLGNQAMVKYGLKRTLDHIHMTGSFPY

SEQ ID NO: 53913 - protein, 355 aa, Glycine max
  peptide (1)..(355): Ceres Seq. ID no. 14311425
MGGVWHPECFCCHACHLPITDYEFSMSSNRPYHKSCYREKHHPRCDVCKNFIPTNSSGLIEYRAHPFWLQKYCPSHELDGTSRCCSCERMEPRDTKYLLLDDGRKLCLECLDSSIMDTHECQPLYLEIQEFYEGLNMKLEQQIPMLLVERQALNEAMEGEKNGHHHLPETRGLCLSEEQTVTTISRRPRIAAGYRAIDMITEPYRLIRCCEVTAILVLYGLPRLLTGSILAHEMMHAWLRLKGYPNLSPEVEEGICQVLAHMWLESELYSGFGNDGASSSTSSLSSSSPSSSSVSTKKGKRSDFEKKLGDFFKHQIESDTSSAYGDGFRLGNQAMVKYGLKRTLDHIHMTGSFPY

SEQ ID NO: 53914 - protein, 330 aa, Glycine max
  peptide (1)..(330): Ceres Seq. ID no. 14311426
MSSNRPYHKSCYREKHHPRCDVCKNFIPTNSSGLIEYRAHPFWLQKYCPSHELDGTSRCCSCERMEPRDTKYLLLDDGRKLCLECLDSSIMDTHECQPLYLEIQEFYEGLNMKLEQQIPMLLVERQALNEAMEGEKNGHHHLPETRGLCLSEEQTVTTISRRPRIAAGYRAIDMITEPYRLIRCCEVTAILVLYGLPRLLTGSILAHEMMHAWLRLKGYPNLSPEVEEGICQVLAHMWLESELYSGFGNDGASSSTSSLSSSSPSSSSVSTKKGKRSDFEKKLGDFFKHQIESDTSSAYGDGFRLGNQAMVKYGLKRTLDHIHMTGSFPY

SEQ ID NO: 53915 - DNA, 1212 bp, Glycine max
  misc_feature (1)..(1212): Ceres Seq. ID no. 15177991
tttaacaaacacgtcttttctctctattcatgtgaaatcctaatacctatatttttctcacttattatctctgaaattggcagggtggtaatcttacgcttgcggcttgcgcgcattcattgtcgaaggcaaagtggtacgcatttcgttgtgtgagaaagaagatgtgttgtcgcttgagcaacagcctggtagggttgctgaacctgctctccttcctcctgtcgatacccattctggtaaccggcgtgtggctgcacaagcaagcggaaacggaatgcgagagatggctggagaagcccctcatcgtgttgggcgttttcctcttggtggtgtccctggcaggtcttctcggggcgtgttgccgcctctcgtgcctcctctggctctacctcttcgtcatgttcatcctcatcatcgttgtctccgccttcaccgtcttcgcattcgttgtcaccaacaagggcgctggcgaggtagtttctaaccgcggttacagggagtaccggcttggcgactactcaaactggttgcagaacagagtgaccaacccccacacgtggaaccggatcaagagctgcctccagtcggccaaactctgcgacaaattcgaaactcaatttgccaacgactccgcgcagcagttctacgcggagaacttgtccgcgctccagtccgggtgttgtaagccatcaaacgactgtaattttgcgtatcagggtccatctgtctggaacaagactgatggtgtaaatcattccaaccctgactgtaatgcttgggacaatgattccaatgttctgtgcttcaattgcgaatcttgcaaggctgggttcctgcagaaccttaagactgactggaagaaggtgacgattgtcaatgtgatattccttgtcttcctcattattgtgtactctgttggttgctgcgcgttccggaataacatgagaggcaattggaagtactagatgcagccttgtatgttacaagcatgtaaatgagttaagtaatttggtttcttttctggattctttgcagttgcatagttaatttacaattttatatcatctacagttagtttttaggctatgttcctgcactcgtcttctattggtgaatactcgtcatctatttgttaatttgtgtttaatgtgttaggcatggccatatgaattaagtattggagtggagctgtgcttcatttttcccatt

SEQ ID NO: 53916 - protein, 267 aa, Glycine max
  peptide (1)..(267): Ceres Seq. ID no. 15177992
MCCRLSNSLVGLLNLLSFLLSIPILVTGVWLHKQAETECERWLEKPLIVLGVFLLVVSLAGLLGACCRLSCLLWLYLFVMFILIIVVSAFTVFAFVVTNKGAGEVVSNRGYREYRLGDYSNWLQNRVTNPHTWNRIKSCLQSAKLCDKFETQFANDSAQQFYAENLSALQSGCCKPSNDCNFAYQGPSVWNKTDGVNHSNPDCNAWDNDSNVLCFNCESCKAGFLQNLKTDWKKVTIVNVIFLVFLIIVYSVGCCAFRNNMRGNWKY

SEQ ID NO: 53917 - protein, 188 aa, Glycine max
  peptide (1)..(188): Ceres Seq. ID no. 15177993
MFILIIVVSAFTVFAFVVTNKGAGEVVSNRGYREYRLGDYSNWLQNRVTNPHTWNRIKSCLQSAKLCDKFETQFANDSAQQFYAENLSALQSGCCKPSNDCNFAYQGPSVWNKTDGVNHSNPDCNAWDNDSNVLCFNCESCKAGFLQNLKTDWKKVTIVNVIFLVFLIIVYSVGCCAFRNNMRGNWKY

SEQ ID NO: 53918 - DNA, 1126 bp, Glycine max
  misc_feature (1)..(1126): Ceres Seq. ID no. 14307065
aattcccccttttggaagatggttccacagtcagtgataacgcaagtctccgattcaagtggcgtgaatgcgatatcaaacgtttcttctggccacggattctacgattggttgttcgaatgtcacgggttctggcacaatgccactctcaacatcccctcgttcctcttcgtcttctacttggcacttcaagccaggcacagcttactcaaactctcccttgcgcgctcctatataatcatttcatataacctttgcctctggctcattactctgctcaatctcgcttggtgctttctccaggcatgggagtgcacgtctgggagaaagttgacatggaacctgttatccttgttcactacttccggaatgctgtttttggaagtgagcttgctggcttttttatttcaaggaaataatgcaggcggcttagatgcaatgaaacgaacttttggtatctcaacgctcgttgttggcttggatatactgttgaaggcaatatatctatttgtatttgggattccattattcgtcgacagcaatgaacatactcatgggaagtggaacttgtgggttgtccacaagctgttgctcactgctgtttatggcttcataatgtttatataccattccggatggaaagaaacgttgcctgcaaaaattgccttttacaagtatgttgcaattatgttcatttttaatgcgattgcgacacttgcttgtggccttgctggaactggtgctgcgtttgctttctggctgtatcgtgtcacggttgtcttctaccatgcattttatcttccttttttgtatacaacattcctagcagacttttttcaggaggaaaatttccatttggaaaatgtgtattattccgagatgaaagatgcaggtttctttgacacggactgggagtgatgatgtatcagctataaattgacattgcctcagtatagtcatcgcagggaaccccgatcaggacatatgtaaataaaataaccatgttagcagatcggaatattattaaaaagatgtttatttttaagcacctcaagtgttataggcatgacgtagtataattcttaattattcagctagatacgagactgaataaaattaacatacg

SEQ ID NO: 53919 - protein, 305 aa, Glycine max
  peptide (1)..(305): Ceres Seq. ID no. 14307066
NSPFWKMVPQSVITQVSDSSGVNAISNVSSGHGFYDWLFECHGFWHNATLNIPSFLFVFYLALQARHSLLKLSLARSYIIISYNLCLWLITLLNLAWCFLQAWECTSGRKLTWNLLSLFTTSGMLFLEVSLLAFLFQGNNAGGLDAMKRTFGISTLVVGLDILLKAIYLFVFGIPLFVDSNEHTHGKWNLWVVHKLLLTAVYGFIMFIYHSGWKETLPAKIAFYKYVAIMFIFNAIATLACGLAGTGAAFAFWLYRVTVVFYHAFYLPFLYTTFLADFFQEENFHLENVYYSEMKDAGFFDTDWE

SEQ ID NO: 53920 - protein, 299 aa, Glycine max
  peptide (1)..(299): Ceres Seq. ID no. 14307067
MVPQSVITQVSDSSGVNAISNVSSGHGFYDWLFECHGFWHNATLNIPSFLFVFYLALQARHSLLKLSLARSYIIISYNLCLWLITLLNLAWCFLQAWECTSGRKLTWNLLSLFTTSGMLFLEVSLLAFLFQGNNAGGLDAMKRTFGISTLVVGLDILLKAIYLFVFGIPLFVDSNEHTHGKWNLWVVHKLLLTAVYGFIMFIYHSGWKETLPAKIAFYKYVAIMFIFNAIATLACGLAGTGAAFAFWLYRVTVVFYHAFYLPFLYTTFLADFFQEENFHLENVYYSEMKDAGFFDTDWE

SEQ ID NO: 53921 - protein, 182 aa, Glycine max
  peptide (1)..(182): Ceres Seq. ID no. 14307068
MLFLEVSLLAFLFQGNNAGGLDAMKRTFGISTLVVGLDILLKAIYLFVFGIPLFVDSNEHTHGKWNLWVVHKLLLTAVYGFIMFIYHSGWKETLPAKIAFYKYVAIMFIFNAIATLACGLAGTGAAFAFWLYRVTVVFYHAFYLPFLYTTFLADFFQEENFHLENVYYSEMKDAGFFDTDWE

SEQ ID NO: 53922 - DNA, 1291 bp, Glycine max
  misc_feature (1)..(1291): Ceres Seq. ID no. 15178596
aatttattttgtaacgccaaacgtccatccaaaattgcgttcctaaatcgccgctaccgaacacagccgtagacttttaattcattccgctgcgtttctttctctgcacttcaaagttcaaaccctagcgaagcatccactgtcgccgtcgcacactcgcacgccgctcacaggtttatgggctacgctgatgtcctgaatttgttgttggccgtggtggtttggtgcactgcttacgttactgttgtagttctcgcttcctttcgagccgtttgcactttctgaaaccttgcaatttcattgataacatgggttatgcacagcttgtcataggtcctgctggtagtggcaagtccacgtattgctcaagtttgtatgaacactgtgttgctgcacggcgatcgatacatgttgtgaatcttgaccctgctgctgaaaattttgactatcctgttgcgatggatataagggaactcatttccctagatgatgttatggaggaacttggattgggtcctaatggtggtcttgtctactgcatggaacaccttgaagataacctagatgattggctcactgaggaactggacaattatttagatgatgattacttggttttcgactgccctggtcagatagaactatattcacatgtcccagtgcttaagaattttgtggaacatttgaaacggaaaaattttagtgtttgtgctgtttacttacttgattcacagttcatgacagacgtgaccaagtttataagtggatgcatggcatgtctttctgcgatggttcaacttgaactacctcatgttaatatcctctcaaagatggaccttgtgactaaaaagaaggatcttgaagattttttggatccagagcccacctttttattgtctgaattgaatcaacggatgggtcctcagtatgcaaagctgaataaggctttgattgaattggtaaataactatagcatggtgagttttataccattagacttaaggaaggaaaaaagtatacaatatgtactggcccaaattgacaactgcattcaatatggagaagatgcagatgtgaaggttaaggattttgaccctgaggatgatgagtagccaatccccttctgcaacactgcttggtataattgaaagttctgcttaacttcgacattatggtgtaccaagctgaagttgttaatatgtagtatctcattagattgttttaatgtgaattgaggaagttgaacatttatacagtttatcctctaaatgggatgaaaaattggctaaaa

SEQ ID NO: 53923 - protein, 267 aa, Glycine max
  peptide (1)..(267): Ceres Seq. ID no. 15178597
MGYAQLVIGPAGSGKSTYCSSLYEHCVAARRSIHVVNLDPAAENFDYPVAMDIRELISLDDVMEELGLGPNGGLVYCMEHLEDNLDDWLTEELDNYLDDDYLVFDCPGQIELYSHVPVLKNFVEHLKRKNFSVCAVYLLDSQFMTDVTKFISGCMACLSAMVQLELPHVNILSKMDLVTKKKDLEDFLDPEPTFLLSELNQRMGPQYAKLNKALIELVNNYSMVSFIPLDLRKEKSIQYVLAQIDNCIQYGEDADVKVKDFDPEDDE

SEQ ID NO: 53924 - protein, 217 aa, Glycine max
  peptide (1)..(217): Ceres Seq. ID no. 15178598
MDIRELISLDDVMEELGLGPNGGLVYCMEHLEDNLDDWLTEELDNYLDDDYLVFDCPGQIELYSHVPVLKNFVEHLKRKNFSVCAVYLLDSQFMTDVTKFISGCMACLSAMVQLELPHVNILSKMDLVTKKKDLEDFLDPEPTFLLSELNQRMGPQYAKLNKALIELVNNYSMVSFIPLDLRKEKSIQYVLAQIDNCIQYGEDADVKVKDFDPEDDE

SEQ ID NO: 53925 - protein, 205 aa, Glycine max
  peptide (1)..(205): Ceres Seq. ID no. 15178599
MEELGLGPNGGLVYCMEHLEDNLDDWLTEELDNYLDDDYLVFDCPGQIELYSHVPVLKNFVEHLKRKNFSVCAVYLLDSQFMTDVTKFISGCMACLSAMVQLELPHVNILSKMDLVTKKKDLEDFLDPEPTFLLSELNQRMGPQYAKLNKALIELVNNYSMVSFIPLDLRKEKSIQYVLAQIDNCIQYGEDADVKVKDFDPEDDE

SEQ ID NO: 53926 - DNA, 1362 bp, Glycine max
  misc_feature (1)..(1362): Ceres Seq. ID no. 15169053
gggttttcttttcatccttccagcttggaaggattgaagtttctgtctttttctgatctccgtgtgcgtggtttggttttgttgttgaagatgttggtagctaatagctttgatctatggcgaaaggacgcttttttctctgcggcggaagaggtgcaggaatcagctgatataatggaatctgcatacagggcatggttgagagagaagagagaaaggtcaactcctgaggaattaaatgaactatgtagagagctgcaaactgctttaggtaccgcaaaatggcagttggaagaatttgataaagccgtcaggctaagctaccgacctcacagtgatgacaatacatccactaggcataggcagtttatttctgccattgaaagccaaattacccaggttgaagcagcactgagggaatcttacattgaggaaggtaagcaaccacttcggtgggtaaatcttgatgaagaagagcgagatgatctggctgcctttctatctggaacttgtcagaccacacaaagcactaacgatgaatacatggaggtgaaacaagccaagaaagaagataagattgtagatataaacactttccgcaaccgggatatatctgctagtgaaaagtcttctaaggatgtcatttctgttaacaaggatacagattatctgatagaaataaaagcagatgctgtttctagaagtaatgatgatttagtttctcaaacagatagaacaactagtacaaggaagacatggagtccgcctaattatggtgctttaaaaattgtaattgctgatgaaggtgagcagagagataaacccacacggactgttgatgccacccctaaagaaaaagggttcagaaatctattttggaaacaaaagtttgaagattatcctcaggccacgcgagtagttcgtatgttcaatcagcgttttgggggcattggtatatgccagagccagaggcagtttcaaagtcccttgcacttgcgacatggctgttctgttcaagttacacttgctctaatgttgaccatttttctcattgttccctttgtactttattcaacttgagttaaacagctgcttcgatcaatctgttcgagagggctttaattggtcatatgagatctcagccactgccttcaagtattggtgggacaagttagctaaagggacaatgagtgccaacttctattttgtcgttgttgagttacctatgtgagtgtggatactgataggataaccaacctcttgtcctacaggaacacctgtctattttagtttcatagggctgttaaatgtatatacattcatccaatatttaatgcaagttccgctttatttggttgcaac

SEQ ID NO: 53927 - protein, 359 aa, Glycine max
  peptide (1)..(359): Ceres Seq. ID no. 15169054
GFSFHPSSLEGLKFLSFSDLRVRGLVLLLKMLVANSFDLWRKDAFFSAAEEVQESADIMESAYRAWLREKRERSTPEELNELCRELQTALGTAKWQLEEFDKAVRLSYRPHSDDNTSTRHRQFISAIESQITQVEAALRESYIEEGKQPLRWVNLDEEERDDLAAFLSGTCQTTQSTNDEYMEVKQAKKEDKIVDINTFRNRDISASEKSSKDVISVNKDTDYLIEIKADAVSRSNDDLVSQTDRTTSTRKTWSPPNYGALKIVIADEGEQRDKPTRTVDATPKEKGFRNLFWKQKFEDYPQATRVVRMFNQRFGGIGICQSQRQFQSPLHLRHGCSVQVTLALMLTIFLIVPFVLYST

SEQ ID NO: 53928 - protein, 329 aa, Glycine max
  peptide (1)..(329): Ceres Seq. ID no. 15169055
MLVANSFDLWRKDAFFSAAEEVQESADIMESAYRAWLREKRERSTPEELNELCRELQTALGTAKWQLEEFDKAVRLSYRPHSDDNTSTRHRQFISAIESQITQVEAALRESYIEEGKQPLRWVNLDEEERDDLAAFLSGTCQTTQSTNDEYMEVKQAKKEDKIVDINTFRNRDISASEKSSKDVISVNKDTDYLIEIKADAVSRSNDDLVSQTDRTTSTRKTWSPPNYGALKIVIADEGEQRDKPTRTVDATPKEKGFRNLFWKQKFEDYPQATRVVRMFNQRFGGIGICQSQRQFQSPLHLRHGCSVQVTLALMLTIFLIVPFVLYST

SEQ ID NO: 53929 - protein, 301 aa, Glycine max
  peptide (1)..(301): Ceres Seq. ID no. 15169056
MESAYRAWLREKRERSTPEELNELCRELQTALGTAKWQLEEFDKAVRLSYRPHSDDNTSTRHRQFISAIESQITQVEAALRESYIEEGKQPLRWVNLDEEERDDLAAFLSGTCQTTQSTNDEYMEVKQAKKEDKIVDINTFRNRDISASEKSSKDVISVNKDTDYLIEIKADAVSRSNDDLVSQTDRTTSTRKTWSPPNYGALKIVIADEGEQRDKPTRTVDATPKEKGFRNLFWKQKFEDYPQATRVVRMFNQRFGGIGICQSQRQFQSPLHLRHGCSVQVTLALMLTIFLIVPFVLYST

SEQ ID NO: 53930 - DNA, 1416 bp, Glycine max
  misc_feature (1)..(1416): Ceres Seq. ID no. 14312216
gaagagataaataataactagttgtagctgctggggagagtggaacataataaacatgacaatgaagctgctgcttttggtagccgttgttgaagttgcatgcttagtttctgggatcttgtcctttggatctgagacactctctgagctttctttcttagaaaacgatgtcgtctcaacagcaagaccttcctcttcatctcaacctcttatggtcgacctcactctcattcaaggagctgattctaaaggagctgtctgtttggatggaacggtgcctggataccatttggatcgtggatttggatctggtgcagatagttggctaattcatttggagggaggaggatggtgtaataccatcagaaactgtgtctatagaaaaaatactcgtcgtggatcctcgaaatacatggaaaatcaaataccattcacgggaatattgatcaacaaacctgaagaaaaccctgatttctttaactggaatagagttaaattacggtactgtgatggggcgtctttcagtggagatagtgaagatgagtctgcacagcttcaatttcgaggacaaaaaatatggctagctgcaatggaggaattaatgtccaaaggaatgcagaaagccgatcaggcacttctctctggatgctctgcgggtggtctggcatcgataatacactgtgatgagttccggagcttgtttccaaaatcttccaaagtcaaatgtttgagtgatggaggtttttttcttgacgtaatggatgtatctgggggacgcacactgaggactctttttggaggtgtggttcagttgcaggagttacaaaaaaatctgccaaaaagttgtcttgaccaactagacccaacttcgtgcttctttcctcagaatatgatcgaacatgttgagaccccattgtttctactcaacgctgcttatgatgtgtggcaggtccaagctagtttagccccaccttcagctgaccgccttggctcttggaatgaatgcaaatcgaaccatgcaaattgtagctcatctcaaatgcagttcctccaagacttcagaaatcaaatgcttagtgacattaaagacttctcgagctcatctcaaactgggctattcataaattcttgttttgctcattgtcagtctgagagacaggagacatggtttgctgatgactctccccttatcgaggacaagccaattgcagttgctattggagactggtattttgatcgagaagttgtcaaagctattgactgtgcttacccgtgtgacaacagctgccataatctggtgtttaactttaagtgaacaaaatttgttgtctcctcgttccactttaatccttgtaactgcaatgagtattccacaattaccattcattgattattatggaaagaccattcttagtc

SEQ ID NO: 53931 - protein, 419 aa, Glycine max
  peptide (1)..(419): Ceres Seq. ID no. 14312217
MTMKLLLLVAVVEVACLVSGILSFGSETLSELSFLENDVVSTARPSSSSQPLMVDLTLIQGADSKGAVCLDGTVPGYHLDRGFGSGADSWLIHLEGGGWCNTIRNCVYRKNTRRGSSKYMENQIPFTGILINKPEENPDFFNWNRVKLRYCDGASFSGDSEDESAQLQFRGQKIWLAAMEELMSKGMQKADQALLSGCSAGGLASIIHCDEFRSLFPKSSKVKCLSDGGFFLDVMDVSGGRTLRTLFGGVVQLQELQKNLPKSCLDQLDPTSCFFPQNMIEHVETPLFLLNAAYDVWQVQASLAPPSADRLGSWNECKSNHANCSSSQMQFLQDFRNQMLSDIKDFSSSSQTGLFINSCFAHCQSERQETWFADDSPLIEDKPIAVAIGDWYFDREVVKAIDCAYPCDNSCHNLVFNFK

SEQ ID NO: 53932 - protein, 417 aa, Glycine max
  peptide (1)..(417): Ceres Seq. ID no. 14312218
MKLLLLVAVVEVACLVSGILSFGSETLSELSFLENDVVSTARPSSSSQPLMVDLTLIQGADSKGAVCLDGTVPGYHLDRGFGSGADSWLIHLEGGGWCNTIRNCVYRKNTRRGSSKYMENQIPFTGILINKPEENPDFFNWNRVKLRYCDGASFSGDSEDESAQLQFRGQKIWLAAMEELMSKGMQKADQALLSGCSAGGLASIIHCDEFRSLFPKSSKVKCLSDGGFFLDVMDVSGGRTLRTLFGGVVQLQELQKNLPKSCLDQLDPTSCFFPQNMIEHVETPLFLLNAAYDVWQVQASLAPPSADRLGSWNECKSNHANCSSSQMQFLQDFRNQMLSDIKDFSSSSQTGLFINSCFAHCQSERQETWFADDSPLIEDKPIAVAIGDWYFDREVVKAIDCAYPCDNSCHNLVFNFK

SEQ ID NO: 53933 - protein, 367 aa, Glycine max
  peptide (1)..(367): Ceres Seq. ID no. 14312219
MVDLTLIQGADSKGAVCLDGTVPGYHLDRGFGSGADSWLIHLEGGGWCNTIRNCVYRKNTRRGSSKYMENQIPFTGILINKPEENPDFFNWNRVKLRYCDGASFSGDSEDESAQLQFRGQKIWLAAMEELMSKGMQKADQALLSGCSAGGLASIIHCDEFRSLFPKSSKVKCLSDGGFFLDVMDVSGGRTLRTLFGGVVQLQELQKNLPKSCLDQLDPTSCFFPQNMIEHVETPLFLLNAAYDVWQVQASLAPPSADRLGSWNECKSNHANCSSSQMQFLQDFRNQMLSDIKDFSSSSQTGLFINSCFAHCQSERQETWFADDSPLIEDKPIAVAIGDWYFDREVVKAIDCAYPCDNSCHNLVFNFK

SEQ ID NO: 53934 - DNA, 1538 bp, Glycine max
  misc_feature (1)..(1538): Ceres Seq. ID no. 14307732
gaaaaaagaataaatacatattatcctcccatgtattgtatttgtggggagagagagcgagtggatgtggtgttccggagaagttggaatggcagcggttagtgttagtgttactgtgagagtgaggtggtgcactcgaaaaccacccactccaactccaaccagattcagcgttaatgctctgtttggtgattggggatttgggaatagaacaaggaactcccttcagcagcaattcacgttcactcttgctgatagtaaagtgataagcgtgtcggttgtttcttcgatctcagatgttgcatcgagcgaatgggacgcttgtgctttggatgcgactggccctgacaacttcaatccattcctttcgcatgcctttttgtcgaccttagagcactctgcttccgctgtcagggaaactggttggatcccacaccacatcgttgccaaagccaacaacaacagcaacaacaacgttgtagccgttgtcccactctatcttaaaacccactcctacggcgaatttgtttttgatcattcttgggctaatgcttaccattcttatggctacaattattaccccaagttacaatcttgtgtccccttcacacctgtaactggtccaaggatcttacttcgtaacacctccttcaaacatcaagttttcgacattattgtctccgcaatgaaggaactcgctctcacctcccagctttcatcattacatgttacttttccctctgaaaatgagtggcacaagctcactgagaaaggcttcctccccaggattggaatgcagtaccactggaaaaaccgtaactacaaaaattttgatgacttcttgatggacatgaagcaaagtaaaagaaaaaatatacgtcaagagcgcaaaaagatctcagcccagaacttgattatgaaacgcctccggggttatgaaataaaggctaggcactgggattccttctactctttttacaggaacacaactgataacaaatggggcactcctcacctgacaagggaattttttcatgagctgggagcaaaaatgggagataatgtgctacttgtggtggctgaagaaggggatgaactagttgctggagccctaaatcttatcggaggagataccttgtttgggcgcctatggggatgtcagccacgaagttactacccaagtttgcattttgaagcgtgttattaccaggcaattgaagcagctattgaactcaatcttaaaactgtagaggcaggagctcagggtgaacacaagattcagcggggatatcttcctgtgacaacttatagctgccattaccttattgatgaagaatttagagaagctatacaagattttttaatacgtgaagctgctcaggtgaagctagttataaaactcttgcatgattctggtccttttaaggaaggtatcctttagaaagtaaatttatgggtatagtatttgcaaatatgtatatgattgtaataatttatttataatttagcagaaatgtatatacagctgaagtaatgag

SEQ ID NO: 53935 - protein, 458 aa, Glycine max
  peptide (1)..(458): Ceres Seq. ID no. 14307733
MWCSGEVGMAAVSVSVTVRVRWCTRKPPTPTPTRFSVNALFGDWGFGNRTRNSLQQQFTFTLADSKVISVSVVSSISDVASSEWDACALDATGPDNFNPFLSHAFLSTLEHSASAVRETGWIPHHIVAKANNNSNNNVVAVVPLYLKTHSYGEFVFDHSWANAYHSYGYNYYPKLQSCVPFTPVTGPRILLRNTSFKHQVFDIIVSAMKELALTSQLSSLHVTFPSENEWHKLTEKGFLPRIGMQYHWKNRNYKNFDDFLMDMKQSKRKNIRQERKKISAQNLIMKRLRGYEIKARHWDSFYSFYRNTTDNKWGTPHLTREFFHELGAKMGDNVLLVVAEEGDELVAGALNLIGGDTLFGRLWGCQPRSYYPSLHFEACYYQAIEAAIELNLKTVEAGAQGEHKIQRGYLPVTTYSCHYLIDEEFREAIQDFLIREAAQVKLVIKLLHDSGPFKEGIL

SEQ ID NO: 53936 - protein, 450 aa, Glycine max
  peptide (1)..(450): Ceres Seq. ID no. 14307734
MAAVSVSVTVRVRWCTRKPPTPTPTRFSVNALFGDWGFGNRTRNSLQQQFTFTLADSKVISVSVVSSISDVASSEWDACALDATGPDNFNPFLSHAFLSTLEHSASAVRETGWIPHHIVAKANNNSNNNVVAVVPLYLKTHSYGEFVFDHSWANAYHSYGYNYYPKLQSCVPFTPVTGPRILLRNTSFKHQVFDIIVSAMKELALTSQLSSLHVTFPSENEWHKLTEKGFLPRIGMQYHWKNRNYKNFDDFLMDMKQSKRKNIRQERKKISAQNLIMKRLRGYEIKARHWDSFYSFYRNTTDNKWGTPHLTREFFHELGAKMGDNVLLVVAEEGDELVAGALNLIGGDTLFGRLWGCQPRSYYPSLHFEACYYQAIEAAIELNLKTVEAGAQGEHKIQRGYLPVTTYSCHYLIDEEFREAIQDFLIREAAQVKLVIKLLHDSGPFKEGIL

SEQ ID NO: 53937 - protein, 251 aa, Glycine max
  peptide (1)..(251): Ceres Seq. ID no. 14307735
MKELALTSQLSSLHVTFPSENEWHKLTEKGFLPRIGMQYHWKNRNYKNFDDFLMDMKQSKRKNIRQERKKISAQNLIMKRLRGYEIKARHWDSFYSFYRNTTDNKWGTPHLTREFFHELGAKMGDNVLLVVAEEGDELVAGALNLIGGDTLFGRLWGCQPRSYYPSLHFEACYYQAIEAAIELNLKTVEAGAQGEHKIQRGYLPVTTYSCHYLIDEEFREAIQDFLIREAAQVKLVIKLLHDSGPFKEGIL

SEQ ID NO: 53938 - DNA, 1233 bp, Glycine max
  misc_feature (1)..(1233): Ceres Seq. ID no. 14307820
gatgcgaaaatatctcgttcatgttaatgttatgataacgaggaatggactatgatgctgttctgttggtgacggtgtgattgattgtgacgaaatctgacaatgaagcgtggagcattgttgtcagtgcttgcctgcgccttcgcggcggtgatctgggcagcgaacggcgacgacaacctcgtcccgcctcgccgggaagtgtacggcaatgggcgaatattcgacatcagtcatcggtaccaacccgagatgccggaatgggaatcgaatgacggcatagggcagttcctgtggcttcccaagagcatgaagaacggttccctcgccaacaactccgaaatgaagtttcccacccacaccggcacgcacgtcgatgcccccggtcacgtgttcgaccactacttccacgccggcttcgatgtcgacacgctcgacttggacatcctcaacggacctgctatgttggttgatgttccaagagatagtaatattaccgctcaagttatgaagtcgttgaatattccaaggggtgtaatacgtgttctcttccgaactttaaataccgaccggcggctgatgtttcagaaggaatgggactcaagctatgtgggattcacagccgatggagccaaatggctagtggagaacacagatatcaaacttgtaggaattgattacctatctgttgcttcttatgattacttgattccatctcaccttgtttttctaaaagacagggagatcattctcgtggaaggcttgaagcttgatgatgttccagcagggttatattcagtccattgcttacctcttaggttggctggtgctgagggatcaccaatacggtgcattctgattaaaaattagggtgtccacatgtctgtgttcggtgtccgcgtcggtgtcggtgcttcataggctggaactgataaattggcatgggggtgtggtgtccttatggagcaagatagtttcaatgttgtgcaacaacttttgtagcttatgtttacacttactaaaaacatgcataagcacttcaaaaaatcattttgaaaaggaaaataatgtatatatagataatttgcacatttcattagcacttcaagagagatgcaacgatattggcattgcgctgaatttggttttcttttgtctgctaggttggaaaggaataagttggcacaatggtgtctttatggagcaagatagtatcaataatgtttgttaaag

SEQ ID NO: 53939 - protein, 255 aa, Glycine max
  peptide (1)..(255): Ceres Seq. ID no. 14307821
MKRGALLSVLACAFAAVIWAANGDDNLVPPRREVYGNGRIFDISHRYQPEMPEWESNDGIGQFLWLPKSMKNGSLANNSEMKFPTHTGTHVDAPGHVFDHYFHAGFDVDTLDLDILNGPAMLVDVPRDSNITAQVMKSLNIPRGVIRVLFRTLNTDRRLMFQKEWDSSYVGFTADGAKWLVENTDIKLVGIDYLSVASYDYLIPSHLVFLKDREIILVEGLKLDDVPAGLYSVHCLPLRLAGAEGSPIRCILIKN

SEQ ID NO: 53940 - protein, 205 aa, Glycine max
  peptide (1)..(205): Ceres Seq. ID no. 14307822
MPEWESNDGIGQFLWLPKSMKNGSLANNSEMKFPTHTGTHVDAPGHVFDHYFHAGFDVDTLDLDILNGPAMLVDVPRDSNITAQVMKSLNIPRGVIRVLFRTLNTDRRLMFQKEWDSSYVGFTADGAKWLVENTDIKLVGIDYLSVASYDYLIPSHLVFLKDREIILVEGLKLDDVPAGLYSVHCLPLRLAGAEGSPIRCILIKN

SEQ ID NO: 53941 - protein, 186 aa, Glycine max
  peptide (1)..(186): Ceres Seq. ID no. 14307823
MKNGSLANNSEMKFPTHTGTHVDAPGHVFDHYFHAGFDVDTLDLDILNGPAMLVDVPRDSNITAQVMKSLNIPRGVIRVLFRTLNTDRRLMFQKEWDSSYVGFTADGAKWLVENTDIKLVGIDYLSVASYDYLIPSHLVFLKDREIILVEGLKLDDVPAGLYSVHCLPLRLAGAEGSPIRCILIKN

SEQ ID NO: 53942 - DNA, 1175 bp, Glycine max
  misc_feature (1)..(1175): Ceres Seq. ID no. 15224302
aaacttatgttatggcattctaactctgaacgatgaaatgaaatggagttccaagataagcgtttatctctgagatcgagcttgacgttcagcgagacgctgtgcgcagtgttcattccgttcataggaatagtcgaagctttggttttcacattcactagttgcttcgatttccaatctcccaggaataagaagaaacattcttctaccttcgacgacattctcaccctcgccgaggattctccatttagtattaatgaaatcgaggccttgcgtgagttgttcaagaagttgagtagttctatcattgatgatggcctcatccacaaggaagaactcacattggcactgttgaagaccaccaccggggagaatcttttccttgacagggtgtttgatgtctttgatgaaaaaagaaacggcgttatagaatttgaggagtttgtgcatgctctcagtatctttcatccttgtactcctctggaaaagaaaattgattttgcttttagattgtatgacttgagacagactggatatattgagagagaagaagttaggcaaatggttgttgccattctgtcagaatgtggcatggatctggatgatgaaatccttgataccattattgataagacatttcaagatgctgatgctgacaaagatgataaaataagcaaagaagaatggaaggcatttgtcattcgacacccgacactcttgaagcacatgactctacctcatctaaaggacatcactacactgtttaccagtttcatcttcaacaccgaagttgatgattctcactggcatattaatggcaatcattaacattgaggagttgaagcttgttgttctgttgcactctcccaatgttgactgcatcacaccaacgagagaattcatggaagtgaatcaaaccaccaaagagtgttaaaaatttgatccgaaccagtaaaaagggcttaaattgaatccaattactgtttggtttgatcagcttactgtgcatagtacagctcattttggccggtgtacaaaatttattggtatgatcataaaaggtttaactatttagcctccatgtctacacaattttaggccccgatcggggatggttgtaacttatcagttttcaattttgaaatgttatttttaaatccaagacctgtttggat

SEQ ID NO: 53943 - protein, 261 aa, Glycine max
  peptide (1)..(261): Ceres Seq. ID no. 15224303
MEFQDKRLSLRSSLTFSETLCAVFIPFIGIVEALVFTFTSCFDFQSPRNKKKHSSTFDDILTLAEDSPFSINEIEALRELFKKLSSSIIDDGLIHKEELTLALLKTTTGENLFLDRVFDVFDEKRNGVIEFEEFVHALSIFHPCTPLEKKIDFAFRLYDLRQTGYIEREEVRQMVVAILSECGMDLDDEILDTIIDKTFQDADADKDDKISKEEWKAFVIRHPTLLKHMTLPHLKDITTLFTSFIFNTEVDDSHWHINGNH

SEQ ID NO: 53944 - DNA, 2182 bp, Glycine max
  misc_feature (1)..(2182): Ceres Seq. ID no. 15176426
gggaactaaccaaacagatcacagcttctagggttttaggttccgtccaattagcggtttctctctctctctcttcagaaatggataacagtagctcagaacagaccgtgcaagatggcaaactctacagaaacctcaattctctcatcgtcgctcatcttcgcgacaacagtctcactcaggctgcaagtgctgttgcttcagcaaccatgactccactgaatgtagaagcccctcctaacaggcttctcgacctggtcgctaaggttctcactttcgctttggccttgttgggataaatttctccttaagcacttataggacaagaaaataagaaggtgaaatacattgagcatccccataagctaaaatcaactcagggcctgttcggataaacccttcccataagagaagaaaataaaaaggaaaaatgaaacaaatttctccacaagctaaaattagcttacaacgcataagttaaaaatcagcttttggagaaactaatatcagagagtttctataaattagcttatgcataagctaattttagcttttggataagcttattctatttttccttcttattttcttctcatataagtgtttatggaaaaggaaaagtttatccaaacatgctcttatataccttagcttttgaagaagttgaatgaaaagagcttttataaaagtgcgtaagttgattttagtttacgtgagaatatcatcttctcatgtaagtacttatagagaagcttatccagagaggaccttatatgcttttcttatgtgaagtataatcctttcttttattctaagaaaataataacagggtcttgcagtggaaaagggcgacatcacaagaggcactggtttcactgctacactgcctctgcctcacacaacagctattgatttcagctctgtgcctgatgtgaaaggttcatcaaagagcttcccaaagcatgaaacgcgacacctttcagaacacaagatgtgctaggtttagtgctgatggaagatttgttgccactggaagtgcagatacatcaataaagttatttgaggtttcgaagatcaagcagatgttgctgccagaggcaaaggatggtcctgtgcggcctgtcatacgaacatattatgatcatatacaaccaataaatgatctggattttcatccacaaggtactatcctgatatctggagctaaagatcaaacaataaagttttttgatatttcaaaaacaaatgcaaagagagcatacagggttatccaggacacacacaatgttcgatctgtatcttttcatccatctggagactttctgctggcaggaactgatcatgcaattccacatttgtatgatataaatacctttcagtgctatctgtcggcaaatatcccagagactagccccagtggagccataaaccagatcagatattcttgtacaggttccatgtatgttacagcatctaaagatggtgctattcggttgtgggatggcatcactgccaattgtgtgcgctcaataactgcagcacatggaacagctgaggctaccagtgcaatttttacaaaagatcaaaggtttgttctctcttgcgggaaggattctaccttaaagctttgggaagttggctctggaagattagtcaaacaatatctgggtgctatacatacccagctaaggtgccaggctatttttaatgagacagaagaatttattctatccatagatgaactgagcaatgagatcgttatctgggatgcgatgacaacagaaaaagtagcaaagtggccttctaatcatgttggtgcaccccgctggcttgaacactcaccaatagagtctgcttttatttcctgtggaactgataggtcagttcggttctggaaggaaactgtataattaatgggaaggaggctgaatgcatttacagactaattaaagttatcacttattgaaagttaactctgggaatttccatttatttttctttaatttctagtagtagcctaaggctttttgcctgcagaagtagttaatgcattcagctctcggaattggaagattatctatttctgatgatttgttttgctccatctttcaaacaattcttaacagctactactgtttcatattccatattttcacgaaagtagcttaaagttggattggac

SEQ ID NO: 53945 - protein, 315 aa, Glycine max
  peptide (1)..(315): Ceres Seq. ID no. 15176427
MKRDTFQNTRCARFSADGRFVATGSADTSIKLFEVSKIKQMLLPEAKDGPVRPVIRTYYDHIQPINDLDFHPQGTILISGAKDQTIKFFDISKTNAKRAYRVIQDTHNVRSVSFHPSGDFLLAGTDHAIPHLYDINTFQCYLSANIPETSPSGAINQIRYSCTGSMYVTASKDGAIRLWDGITANCVRSITAAHGTAEATSAIFTKDQRFVLSCGKDSTLKLWEVGSGRLVKQYLGAIHTQLRCQAIFNETEEFILSIDELSNEIVIWDAMTTEKVAKWPSNHVGAPRWLEHSPIESAFISCGTDRSVRFWKETV

SEQ ID NO: 53946 - protein, 275 aa, Glycine max
  peptide (1)..(275): Ceres Seq. ID no. 15176428
MLLPEAKDGPVRPVIRTYYDHIQPINDLDFHPQGTILISGAKDQTIKFFDISKTNAKRAYRVIQDTHNVRSVSFHPSGDFLLAGTDHAIPHLYDINTFQCYLSANIPETSPSGAINQIRYSCTGSMYVTASKDGAIRLWDGITANCVRSITAAHGTAEATSAIFTKDQRFVLSCGKDSTLKLWEVGSGRLVKQYLGAIHTQLRCQAIFNETEEFILSIDELSNEIVIWDAMTTEKVAKWPSNHVGAPRWLEHSPIESAFISCGTDRSVRFWKETV

SEQ ID NO: 53947 - DNA, 764 bp, Glycine max
  misc_feature (1)..(764): Ceres Seq. ID no. 14307103
attcattccaaccattctccaccattcacaatctaagcatcccaaaactaactattgtgctagctacttagttgtgtaagatggcttccaagggaaatgttgcatccacttatgttgcactactcatgtgtctctatttgctttcattcaccatggtgagctctcaaatctcaaccccaccaccaatgccttctcaaaacggtacatgtcctataaatgtacttcgattgggtgtgtgtgccaatgtgttgaacctggtcaatgttacactaggatcaccaccaaccctcccctgttgcaccctcattcagggtttggctgatgttgatgttggtgtttgcctttgcactgccctcagagctaaccttcttggcatcaacttaaacttgccaatttccttgacattgcttctcaatacctgcagagggaacatccctaatatccagtgttcttaaatttatcttctctagtggaatatacatgtggtctatgaaaaaataaactcatcgcctccatccacaattccacatgttgtctctctcatatttcgtatctttttatggtgtttttttttctttcagttcttgttgtactccatgtatttcccctttttagcgctttccatcctaataataatttctcactccttcgacattgttctactatcggacgaaggattactcattagcctctttcattgcattgcatgtgtaagttgttatacaaataaagttatatgattcctaaaaaaaaaaaaaaaaaag

SEQ ID NO: 53948 - protein, 124 aa, Glycine max
  peptide (1)..(124): Ceres Seq. ID no. 14307104
MASKGNVASTYVALLMCLYLLSFTMVSSQISTPPPMPSQNGTCPINVLRLGVCANVLNLVNVTLGSPPTLPCCTLIQGLADVDVGVCLCTALRANLLGINLNLPISLTLLLNTCRGNIPNIQCS

SEQ ID NO: 53949 - protein, 109 aa, Glycine max
  peptide (1)..(109): Ceres Seq. ID no. 14307105
MCLYLLSFTMVSSQISTPPPMPSQNGTCPINVLRLGVCANVLNLVNVTLGSPPTLPCCTLIQGLADVDVGVCLCTALRANLLGINLNLPISLTLLLNTCRGNIPNIQCS

SEQ ID NO: 53950 - protein, 100 aa, Glycine max
  peptide (1)..(100): Ceres Seq. ID no. 14307106
MVSSQISTPPPMPSQNGTCPINVLRLGVCANVLNLVNVTLGSPPTLPCCTLIQGLADVDVGVCLCTALRANLLGINLNLPISLTLLLNTCRGNIPNIQCS

SEQ ID NO: 53951 - DNA, 1032 bp, Glycine max
  misc_feature (1)..(1032): Ceres Seq. ID no. 14307724
gagtcaagcaatcaacaaagaaaagatggaaaccatttccaaatttccctgttcacatcaacctgtaagatccattagtttccctcctagggtacaccccgtttctcaaagagttgaagcacttctaaaccacctaaaacctcatcattctcagcctatctcaatcactacttgtttagaagctgagacaattcagagcgacttagttgtgcttgctgagttgtacaactgcatggaagaacttttccattctccacaaaccaaacaaactcttctacgctaccaagatggaaaactagtagaagaagcattacgtggctcagtcacattgctagacgcatgtgagtctgcaagggatttgttattggttcttaaggaacacatgcaaacccttcattcagccgtgcgtagaagaaagggagattcaaacattgaaagcatcatttctgcttatgaaagcttcaagaagaaggcaaagaagacaattgctaaacaacttggacaattaaagagaatgaagaataaggctaattccttttctttattggatcaagatcaacagctagtgtttttggctagagttataaaagaagcaagcaccatcaccatctctatattacattctctattagtatttatgtccatgccaacatttggaacaaaagggtcttccctgatctcaaagttgaagccaacggttttgttttcttccctgaaagaacagaagaacacaaatggggttgcagatctcaacaatgttctgtgctctctccttagaagagagaaaaacggtgattccagtggtgaatttcaaagggcactaacagtgttagagacattgaatgttaatattggtggtcttgagggtggattagattgcatatttagatgtttagtcaaaaatagagtgtcgtttttgaatatgctggctcattaaatgaatggagcaaaaatacatatcctctgtaaatgtaaaatctccataaatcagtacatgtttgaacaacagcatcaagattaaaaaaaaaaaag

SEQ ID NO: 53952 - protein, 311 aa, Glycine max
  peptide (1)..(311): Ceres Seq. ID no. 14307725
SQAINKEKMETISKFPCSHQPVRSISFPPRVHPVSQRVEALLNHLKPHHSQPISITTCLEAETIQSDLVVLAELYNCMEELFHSPQTKQTLLRYQDGKLVEEALRGSVTLLDACESARDLLLVLKEHMQTLHSAVRRRKGDSNIESIISAYESFKKKAKKTIAKQLGQLKRMKNKANSFSLLDQDQQLVFLARVIKEASTITISILHSLLVFMSMPTFGTKGSSLISKLKPTVLFSSLKEQKNTNGVADLNNVLCSLLRREKNGDSSGEFQRALTVLETLNVNIGGLEGGLDCIFRCLVKNRVSFLNMLAH

SEQ ID NO: 53953 - protein, 303 aa, Glycine max
  peptide (1)..(303): Ceres Seq. ID no. 14307726
METISKFPCSHQPVRSISFPPRVHPVSQRVEALLNHLKPHHSQPISITTCLEAETIQSDLVVLAELYNCMEELFHSPQTKQTLLRYQDGKLVEEALRGSVTLLDACESARDLLLVLKEHMQTLHSAVRRRKGDSNIESIISAYESFKKKAKKTIAKQLGQLKRMKNKANSFSLLDQDQQLVFLARVIKEASTITISILHSLLVFMSMPTFGTKGSSLISKLKPTVLFSSLKEQKNTNGVADLNNVLCSLLRREKNGDSSGEFQRALTVLETLNVNIGGLEGGLDCIFRCLVKNRVSFLNMLAH

SEQ ID NO: 53954 - protein, 234 aa, Glycine max
  peptide (1)..(234): Ceres Seq. ID no. 14307727
MEELFHSPQTKQTLLRYQDGKLVEEALRGSVTLLDACESARDLLLVLKEHMQTLHSAVRRRKGDSNIESIISAYESFKKKAKKTIAKQLGQLKRMKNKANSFSLLDQDQQLVFLARVIKEASTITISILHSLLVFMSMPTFGTKGSSLISKLKPTVLFSSLKEQKNTNGVADLNNVLCSLLRREKNGDSSGEFQRALTVLETLNVNIGGLEGGLDCIFRCLVKNRVSFLNMLAH

SEQ ID NO: 53955 - DNA, 2108 bp, Glycine max
  misc_feature (1)..(2108): Ceres Seq. ID no. 15169072
agcaacccataaagacggtgactatgagtaatctgcaaaattttaatgctatactctgtgtctctgaatgaccatcaagtgatccggtgcggttggaaagaaccttccgaattacaaagattgactacttgttattctcattggtggagttaatagttattttgtagatgcaaacgtctcagaaacacccaagttcagctggtgtccatttctatcaccagcctgtgcaaggcatttaccaaatgttgcaaagcaatctatgccatgatagcagcagccagggaacaagtgtttcttttgaaacctgcaaggagcaatactttactctagaatcatgcccagcacccactacttgtttcgtggattgtgatgattctccttcctatgccagtgtatcatctaaaaggactccattttctccacagggttctcagtcatgctattcagatcaccagcagtcctctgacaacacctacggttcgccaataagcggcttgtccagtgttgatgacgggcatgaactgaagcacaagcttagagaactggagatttcattgttggggcctgaacaatcagacagttgcggctgctgcgtcgtcaagggtggcctccagggatcatctcagttggctaaacataactgggatcagattgcagagaacgttgcacaatttgacttgaaaggagtcctcagggtatgtgcacaggctgtgtctgatgatgatgttccaacagcaagaggctggatggataatgtattggggaaaatggtatcagtctctggtgatccaatccagaggctgggtgcttacttattggaggggcttagagcaaggttggaatcatcagggaatctcatctacaaatccttgaattgtgaacaaccaacaagcaaagaactaatgagttacatgcacattttgtaccagatttgcccgtactggaagtttgcatacatatctgcaaatgctgtcattgaagaagcaatggcaaatgagtccaggattcacataattgatttccaaattgcgcagggcacgcagtggcatttacttatccaggctcttgcacataggcctgggggacccccctcccttcgtgtgacaggtgttgatgattcgcagtcgattcatgcacgtggtggaggacttcagattgtaggagaaaggctttcagattttgccaggtcttgtggagttccatttgaattccgcagtgctgcaatatctggctgtgaggttgtacgaggaaatattgaagttctacccggagaagctctggctgtaagttttccctatgttttgcaccacatgcctgatgagagtgtgagcactgagaatcacagagatagattgctgaggttggttaagaggttgtctcccaaggttgttaccattgttgagcaagaatccaacaccaacacgtccccattctttcacaggtttgttgagaccctggattattatactgcaatgtttgaatctatagatgtggcttgccccagagatgacaagaagcggattagcgcagagcagcattgcgtggcacgagacatcgtcaacatgatagcttgtgagggggttgagagggtggagaggcatgaacttttgggaaagtggaggtcaagactttccatggctggatttaaacagtgtcaattgagttcttcagtgatggttgctatacaaaatctcctaaaggagttcagtcaaaattataggcttgaacatagagatggtgctctttatcttggttggatgaacagacatatggccacctcttctgcttggaggtgaaactcactgattcgagagtttgcctcctttttgacctttaattgagcataattcaccatatatccgtagtagtctctccataggacttgagatttacctctgttctaaaatgctttctgtagaatctcaaagctcgttgtaaatgctaatactgaaacgaaagaaaagaaacgtctgttatgactctagcattattttcctgccctcttccgctggctgtagtgttattttaactaatgtgatatgagttggatactcgtttagttccttgtactgactcaaatgagaaaccttacactacagatttacatt

SEQ ID NO: 53956 - protein, 542 aa, Glycine max
  peptide (1)..(542): Ceres Seq. ID no. 15169073
MQTSQKHPSSAGVHFYHQPVQGIYQMLQSNLCHDSSSQGTSVSFETCKEQYFTLESCPAPTTCFVDCDDSPSYASVSSKRTPFSPQGSQSCYSDHQQSSDNTYGSPISGLSSVDDGHELKHKLRELEISLLGPEQSDSCGCCVVKGGLQGSSQLAKHNWDQIAENVAQFDLKGVLRVCAQAVSDDDVPTARGWMDNVLGKMVSVSGDPIQRLGAYLLEGLRARLESSGNLIYKSLNCEQPTSKELMSYMHILYQICPYWKFAYISANAVIEEAMANESRIHIIDFQIAQGTQWHLLIQALAHRPGGPPSLRVTGVDDSQSIHARGGGLQIVGERLSDFARSCGVPFEFRSAAISGCEVVRGNIEVLPGEALAVSFPYVLHHMPDESVSTENHRDRLLRLVKRLSPKVVTIVEQESNTNTSPFFHRFVETLDYYTAMFESIDVACPRDDKKRISAEQHCVARDIVNMIACEGVERVERHELLGKWRSRLSMAGFKQCQLSSSVMVAIQNLLKEFSQNYRLEHRDGALYLGWMNRHMATSSAWR

SEQ ID NO: 53957 - protein, 517 aa, Glycine max
  peptide (1)..(517): Ceres Seq. ID no. 15169074
MLQSNLCHDSSSQGTSVSFETCKEQYFTLESCPAPTTCFVDCDDSPSYASVSSKRTPFSPQGSQSCYSDHQQSSDNTYGSPISGLSSVDDGHELKHKLRELEISLLGPEQSDSCGCCVVKGGLQGSSQLAKHNWDQIAENVAQFDLKGVLRVCAQAVSDDDVPTARGWMDNVLGKMVSVSGDPIQRLGAYLLEGLRARLESSGNLIYKSLNCEQPTSKELMSYMHILYQICPYWKFAYISANAVIEEAMANESRIHIIDFQIAQGTQWHLLIQALAHRPGGPPSLRVTGVDDSQSIHARGGGLQIVGERLSDFARSCGVPFEFRSAAISGCEVVRGNIEVLPGEALAVSFPYVLHHMPDESVSTENHRDRLLRLVKRLSPKVVTIVEQESNTNTSPFFHRFVETLDYYTAMFESIDVACPRDDKKRISAEQHCVARDIVNMIACEGVERVERHELLGKWRSRLSMAGFKQCQLSSSVMVAIQNLLKEFSQNYRLEHRDGALYLGWMNRHMATSSAWR

SEQ ID NO: 53958 - protein, 349 aa, Glycine max
  peptide (1)..(349): Ceres Seq. ID no. 15169075
MDNVLGKMVSVSGDPIQRLGAYLLEGLRARLESSGNLIYKSLNCEQPTSKELMSYMHILYQICPYWKFAYISANAVIEEAMANESRIHIIDFQIAQGTQWHLLIQALAHRPGGPPSLRVTGVDDSQSIHARGGGLQIVGERLSDFARSCGVPFEFRSAAISGCEVVRGNIEVLPGEALAVSFPYVLHHMPDESVSTENHRDRLLRLVKRLSPKVVTIVEQESNTNTSPFFHRFVETLDYYTAMFESIDVACPRDDKKRISAEQHCVARDIVNMIACEGVERVERHELLGKWRSRLSMAGFKQCQLSSSVMVAIQNLLKEFSQNYRLEHRDGALYLGWMNRHMATSSAWR

SEQ ID NO: 53959 - DNA, 1171 bp, Glycine max
  misc_feature (1)..(1171): Ceres Seq. ID no. 14303381
accacacactcaggaccctttctctattctcttctgcatcaccattcaccgctgagagaacatcacaacacaacaaacaaaggagcctctcggtttccaatgtgaagagagcgaacatggctctaatcgctgccaggattctcggttccaattcgaggccggcggtcgcgctccaccgctggcagtggctggcgtactcctccgcctccgcggcggtggcggagccggagaccacggaggtgaaggactacgccgattaccggcgctccctgtacggacagatcacgcacaaggcgctcctcgtcgacgccgttggcacgctcgtcctcccttcgcagcccatggctcagatatatagaaagattggggagaagtatggagtggagtattcggaggatgagatactgttcagatacagaagagcgtatggtcagccttggggaaaatctcgtcttagatatgttaatgatggtaggcctttttggcaatacatagttagttattccactggctgttcagatcctcaatattttgaagaactttataactattatacaacggacaaggcatggcacctcaatgatactggtgcagaagaagtattcagagctcttagaaaatcaggtgtgaaattagctgttgtgtcaaactttgacactagattaagacctctcttgcgggcattaaattgtgacaattggtttgatgcagtagcagtgtcagctgaggttgcagcagagaaaccaaatccaactatatttctcaaagcatgtgaattattggatgtaaaacccgaggatgctgttcatgttggggatgaccgcagaaatgatatatggggtgccagggatgctggctgtgatgcttggctttggggaagcgatgttcactcctttaaggaggtagcacagaggattggggttcaggtctgaaagatgatctctttacaataagtttgatgttatgtatagagtcctttaggctttagctgtaaggctgtacatgttctgctcccttttacaatgtatgtatatatgtatgaaaaagatgtgaacctataaaaaccattaataggtgtaggtaggagcttttgtttttccattgatccgtgttttctacgaagtttattttaaaattataaataaaacaaatgaaaaaaaaagaaattaat

SEQ ID NO: 53960 - protein, 309 aa, Glycine max
  peptide (1)..(309): Ceres Seq. ID no. 14303382
HTLRTLSLFSSASPFTAERTSQHNKQRSLSVSNVKRANMALIAARILGSNSRPAVALHRWQWLAYSSASAAVAEPETTEVKDYADYRRSLYGQITHKALLVDAVGTLVLPSQPMAQIYRKIGEKYGVEYSEDEILFRYRRAYGQPWGKSRLRYVNDGRPFWQYIVSYSTGCSDPQYFEELYNYYTTDKAWHLNDTGAEEVFRALRKSGVKLAVVSNFDTRLRPLLRALNCDNWFDAVAVSAEVAAEKPNPTIFLKACELLDVKPEDAVHVGDDRRNDIWGARDAGCDAWLWGSDVHSFKEVAQRIGVQV

SEQ ID NO: 53961 - protein, 271 aa, Glycine max
  peptide (1)..(271): Ceres Seq. ID no. 14303383
MALIAARILGSNSRPAVALHRWQWLAYSSASAAVAEPETTEVKDYADYRRSLYGQITHKALLVDAVGTLVLPSQPMAQIYRKIGEKYGVEYSEDEILFRYRRAYGQPWGKSRLRYVNDGRPFWQYIVSYSTGCSDPQYFEELYNYYTTDKAWHLNDTGAEEVFRALRKSGVKLAVVSNFDTRLRPLLRALNCDNWFDAVAVSAEVAAEKPNPTIFLKACELLDVKPEDAVHVGDDRRNDIWGARDAGCDAWLWGSDVHSFKEVAQRIGVQV

SEQ ID NO: 53962 - protein, 196 aa, Glycine max
  peptide (1)..(196): Ceres Seq. ID no. 14303384
MAQIYRKIGEKYGVEYSEDEILFRYRRAYGQPWGKSRLRYVNDGRPFWQYIVSYSTGCSDPQYFEELYNYYTTDKAWHLNDTGAEEVFRALRKSGVKLAVVSNFDTRLRPLLRALNCDNWFDAVAVSAEVAAEKPNPTIFLKACELLDVKPEDAVHVGDDRRNDIWGARDAGCDAWLWGSDVHSFKEVAQRIGVQV

SEQ ID NO: 53963 - DNA, 1303 bp, Glycine max
  misc_feature (1)..(1303): Ceres Seq. ID no. 14303434
aggagtcagccagacaagcaagccaccctctgctaccgcttctcatccatcatgtcgaatgaactaaaaaactatgatgtttttctcaattttcatggcaaagattccggttacaccttcactggtactctctataatgctttgcgcagcaagagaatcaagacctttttcacaaaacatgaatatggtcgtaaactacacactgatgacagccacattccaccctttactcttaaagcaattaaggaatcaaggatttcggtggttgttttgtcggaaaactatgcatcctcctcaagatgtcttgatgaacttgtggccatccttgagtgtaaaaggacgataaaccaactggtgtggcccatcttttacaaagtggatccgtcgcaagtaaggcaccagaaaggtagctatggagaacacatttgtaattttaaaaaaatttttagagattacaacgattccaatgagagggtgaagcaatggagagcagctttatctgaagtcagcaaattgagtggatggctttacaatgatcggaggtcccagtacgaatatgaattcatcgaaaggatcgtggaatcaaccgtgcaagccttgcccggatatgatgtttttctgagttttaccggagaggatacccgctacactttcacaggttttctctataatgcctttcgccgagagggattcaaaatcttcatggatgatgaggaattggagagtgggaaccaaatttcacagaagcttatgagagcaattgagagttcaaagatttcaattgttgtgctctctgaaaactatgcatattccacctggtgtcttgatgaacttgccaagatcattgagtgtatgaagaccaacaatcaaatggtttggccaatattttacaatgtgcaaaagtcggatgtatgcaatcaaacaaaaagttatggtgaagccatgactgaacatgaaaaaagatttggaaaggactctgagaaggtgcagaaatggaggtctgctttgtctgaaatcaaaaacttggaaggagaccatgtcaaacaaaatgagtaccaacatgaattaatcgaaaggattgtggaaaaggtcattaaaattgaaggtagcaagcatacagcaaatcctttccttttatccaatgacagctacgaggaagaatgagtgaaagagggtcaaatatatgctgtggagctgtgaaactaactgattgtaacctctataactgcccttgaattcatttgttcctatcaatgttgtttttacatccagttcaattcctaaggtttattgtattccttct

SEQ ID NO: 53964 - protein, 387 aa, Glycine max
  peptide (1)..(387): Ceres Seq. ID no. 14303435
RSQPDKQATLCYRFSSIMSNELKNYDVFLNFHGKDSGYTFTGTLYNALRSKRIKTFFTKHEYGRKLHTDDSHIPPFTLKAIKESRISVVVLSENYASSSRCLDELVAILECKRTINQLVWPIFYKVDPSQVRHQKGSYGEHICNFKKIFRDYNDSNERVKQWRAALSEVSKLSGWLYNDRRSQYEYEFIERIVESTVQALPGYDVFLSFTGEDTRYTFTGFLYNAFRREGFKIFMDDEELESGNQISQKLMRAIESSKISIVVLSENYAYSTWCLDELAKIIECMKTNNQMVWPIFYNVQKSDVCNQTKSYGEAMTEHEKRFGKDSEKVQKWRSALSEIKNLEGDHVKQNEYQHELIERIVEKVIKIEGSKHTANPFLLSNDSYEEE

SEQ ID NO: 53965 - protein, 370 aa, Glycine max
  peptide (1)..(370): Ceres Seq. ID no. 14303436
MSNELKNYDVFLNFHGKDSGYTFTGTLYNALRSKRIKTFFTKHEYGRKLHTDDSHIPPFTLKAIKESRISVVVLSENYASSSRCLDELVAILECKRTINQLVWPIFYKVDPSQVRHQKGSYGEHICNFKKIFRDYNDSNERVKQWRAALSEVSKLSGWLYNDRRSQYEYEFIERIVESTVQALPGYDVFLSFTGEDTRYTFTGFLYNAFRREGFKIFMDDEELESGNQISQKLMRAIESSKISIVVLSENYAYSTWCLDELAKIIECMKTNNQMVWPIFYNVQKSDVCNQTKSYGEAMTEHEKRFGKDSEKVQKWRSALSEIKNLEGDHVKQNEYQHELIERIVEKVIKIEGSKHTANPFLLSNDSYEEE

SEQ ID NO: 53966 - DNA, 1359 bp, Glycine max
  misc_feature (1)..(1359): Ceres Seq. ID no. 14307296
aacacaaatttcattttatttatttatttgtttattcatttatttttagaaaaagtggagagccatatggaatttgacgagcacgaggaccaagagcaagaagaggaggaggaggaggaggaaatgggattctcagtggcggcggcggcgagttacgactcgctgggaaacgccgcggtgaggtctaaaattagcggcggcgatggtgttgcggccaccgtgaattccggtcgcaaagggacggtgagatacagagaatgtcagaagaaccatgccgtcagcatcggcggccacgccgtcgacggatgctgcgagttcttggctgccggagaggaaggcacgctggaagccgtaatttgcgccgcctgtaactgccaccgcaacttccaccgcaaggagatcgacggcgaaaccagcccttaccagcaccgttcgcagccacagcctcagcctctgcaccctcagtaccaccaccaattctccccttactaccaccgcgcgcccccaccttccgccgccggatatctccaccaccaccttgtaacacctccggtgtcgcagcaccggcccttggctctgccaccgttagcttctggaggagtgttcagtagggaggaagaggacatgtcaaaccccagctccagcggcggcggcggtggtggcggttttagtggcggtggtggtagcgggagtggaacgaagaagaggtttagaacaaaattcacgcaggagcagaaggataagatgctggcatttgcggagaagctagggtggagaattcagaagcatgacgaagctgctgttgaacaattctgcgctgaaacttgcatcaagagacatgtactcaaggtttggatgcacaataacaaacacactcttgctaattctgagcaacattcggctgggaatggatcgaatcacttgaacagcaccacaataattgagaattctcaattctcctgagggatattaacgaaataaagagaaagaactgaagttggcagaagttcatggaagggtttgcaagtgttcatcttatcagtagcatcaggtgatggtgatcgaggagggggagtacgcaatggaagtatgcggatgagcacagagaataaattccaacataaagttgtatttaacgtgagtggaatgcaagtgcaaagctgtttatgttactactttgctgtgttccttcgcattatttgtcgtctttctttcctgtttttcctccctaacaccgccctagtttagttttattatcgtttgtctctctcatattaatgtctcctcttctatttctttgcttctggacacattagacctgaaagatttaatgagtcaaatagattcatcatgatccgt

SEQ ID NO: 53967 - protein, 320 aa, Glycine max
  peptide (1)..(320): Ceres Seq. ID no. 14307297
NTNFILFIYLFIHLFLEKVESHMEFDEHEDQEQEEEEEEEEMGFSVAAAASYDSLGNAAVRSKISGGDGVAATVNSGRKGTVRYRECQKNHAVSIGGHAVDGCCEFLAAGEEGTLEAVICAACNCHRNFHRKEIDGETSPYQHRSQPQPQPLHPQYHHQFSPYYHRAPPPSAAGYLHHHLVTPPVSQHRPLALPPLASGGVFSREEEDMSNPSSSGGGGGGGFSGGGGSGSGTKKRFRTKFTQEQKDKMLAFAEKLGWRIQKHDEAAVEQFCAETCIKRHVLKVWMHNNKHTLANSEQHSAGNGSNHLNSTTIIENSQFS

SEQ ID NO: 53968 - protein, 298 aa, Glycine max
  peptide (1)..(298): Ceres Seq. ID no. 14307298
MEFDEHEDQEQEEEEEEEEMGFSVAAAASYDSLGNAAVRSKISGGDGVAATVNSGRKGTVRYRECQKNHAVSIGGHAVDGCCEFLAAGEEGTLEAVICAACNCHRNFHRKEIDGETSPYQHRSQPQPQPLHPQYHHQFSPYYHRAPPPSAAGYLHHHLVTPPVSQHRPLALPPLASGGVFSREEEDMSNPSSSGGGGGGGFSGGGGSGSGTKKRFRTKFTQEQKDKMLAFAEKLGWRIQKHDEAAVEQFCAETCIKRHVLKVWMHNNKHTLANSEQHSAGNGSNHLNSTTIIENSQFS

SEQ ID NO: 53969 - protein, 279 aa, Glycine max
  peptide (1)..(279): Ceres Seq. ID no. 14307299
MGFSVAAAASYDSLGNAAVRSKISGGDGVAATVNSGRKGTVRYRECQKNHAVSIGGHAVDGCCEFLAAGEEGTLEAVICAACNCHRNFHRKEIDGETSPYQHRSQPQPQPLHPQYHHQFSPYYHRAPPPSAAGYLHHHLVTPPVSQHRPLALPPLASGGVFSREEEDMSNPSSSGGGGGGGFSGGGGSGSGTKKRFRTKFTQEQKDKMLAFAEKLGWRIQKHDEAAVEQFCAETCIKRHVLKVWMHNNKHTLANSEQHSAGNGSNHLNSTTIIENSQFS

SEQ ID NO: 53970 - DNA, 1342 bp, Glycine max
  misc_feature (1)..(1342): Ceres Seq. ID no. 14315346
gattcactactattatttccccttctctgttcgcgccactttgcctccactaccgcgcagaatccttccacattgaatgctcttcaggatcattatcaggccattgattttcctggaggagcagtacaattcatccctgaaatgaggtttatatccgaatcacctaaagagagaataccttgctaccgtgtccttgatgataatgggcaaccaattttgggccataattttgtgcaggtcagcaaggaagttgctgttaagatgtatactgacatggtcactctccgatctatggacactatcttctatgaagcacaaaggcaaggtagaatatcattttatgtgacagcaattggggaggaggctatcaatgttgcttcagctgcagctcttgccatggacgatgttgttttccctcagtatagggaagcgggagtcttgttatggcgtggtttcactttgcaagaatttgcaaaccagttattttccaatatatatgattatgggaaaggaaggcagatgccagctcattatgggtccaaaaagcacaattactttacagtagcatcaactattgctacacaaatttcccatgctgttggagccgcttattccttaaagatggataaaaaggatgcatgtgccgtcacttacttcggtgatggtggctcaagtgagggtgatttccacgctgccttaaattttgcagcagttttggaggccccagttatttttatatgccggaacaatggatgggctatcagcacacccatttcagatcagtttcgaagtgatggtgttgttgtgaaagggcaggcatatggagttcgtagcattcgtgtagatggcaatgatgccctggctatctatagtgctattcaagctgctcgtcaaatggcaattactgaagagagaccaattctaatagaagctcttacatatagagttggacaccacaccacatcagatgactctaccaagtatcgtccagcgaatgagattgaatggtggagagtggcacgtgatcctgtggttagatttagaaagtggatagaaaagcatggctggtggaatgatatggctgagtcagagcttataaacaatttgagacagcagcttctacatacaattcaagaagcagagggtgtagaaaaacctccacttgcagatagttttagtgatgtttatgatgtcgctccttttaatctccgtgaacaggagcaatggctgaaggagattgtaagaaaacaaccacaagagtatccaacaaatatttctgtgtagacttcaatatgctaatacacattacattgcttctaataaaaaattctcttcaaacttg

SEQ ID NO: 53971 - protein, 427 aa, Glycine max
  peptide (1)..(427): Ceres Seq. ID no. 14315347
DSLLLFPLLCSRHFASTTAQNPSTLNALQDHYQAIDFPGGAVQFIPEMRFISESPKERIPCYRVLDDNGQPILGHNFVQVSKEVAVKMYTDMVTLRSMDTIFYEAQRQGRISFYVTAIGEEAINVASAAALAMDDVVFPQYREAGVLLWRGFTLQEFANQLFSNIYDYGKGRQMPAHYGSKKHNYFTVASTIATQISHAVGAAYSLKMDKKDACAVTYFGDGGSSEGDFHAALNFAAVLEAPVIFICRNNGWAISTPISDQFRSDGVVVKGQAYGVRSIRVDGNDALAIYSAIQAARQMAITEERPILIEALTYRVGHHTTSDDSTKYRPANEIEWWRVARDPVVRFRKWIEKHGWWNDMAESELINNLRQQLLHTIQEAEGVEKPPLADSFSDVYDVAPFNLREQEQWLKEIVRKQPQEYPTNISV

SEQ ID NO: 53972 - protein, 380 aa, Glycine max
  peptide (1)..(380): Ceres Seq. ID no. 14315348
MRFISESPKERIPCYRVLDDNGQPILGHNFVQVSKEVAVKMYTDMVTLRSMDTIFYEAQRQGRISFYVTAIGEEAINVASAAALAMDDVVFPQYREAGVLLWRGFTLQEFANQLFSNIYDYGKGRQMPAHYGSKKHNYFTVASTIATQISHAVGAAYSLKMDKKDACAVTYFGDGGSSEGDFHAALNFAAVLEAPVIFICRNNGWAISTPISDQFRSDGVVVKGQAYGVRSIRVDGNDALAIYSAIQAARQMAITEERPILIEALTYRVGHHTTSDDSTKYRPANEIEWWRVARDPVVRFRKWIEKHGWWNDMAESELINNLRQQLLHTIQEAEGVEKPPLADSFSDVYDVAPFNLREQEQWLKEIVRKQPQEYPTNISV

SEQ ID NO: 53973 - protein, 340 aa, Glycine max
  peptide (1)..(340): Ceres Seq. ID no. 14315349
MYTDMVTLRSMDTIFYEAQRQGRISFYVTAIGEEAINVASAAALAMDDVVFPQYREAGVLLWRGFTLQEFANQLFSNIYDYGKGRQMPAHYGSKKHNYFTVASTIATQISHAVGAAYSLKMDKKDACAVTYFGDGGSSEGDFHAALNFAAVLEAPVIFICRNNGWAISTPISDQFRSDGVVVKGQAYGVRSIRVDGNDALAIYSAIQAARQMAITEERPILIEALTYRVGHHTTSDDSTKYRPANEIEWWRVARDPVVRFRKWIEKHGWWNDMAESELINNLRQQLLHTIQEAEGVEKPPLADSFSDVYDVAPFNLREQEQWLKEIVRKQPQEYPTNISV

SEQ ID NO: 53974 - DNA, 1794 bp, Glycine max
  misc_feature (1)..(1794): Ceres Seq. ID no. 14304855
tctctctctttcacacagagagatactttctctctctacaccgcaatggacgccggcgaagccctctccgacgatccgaatcggcccaattccgccgccgacgcagctccggcccccgcgggagcaaggtacaagctcctgtcgccggctaagctcccgatctcccgctccccgtgcgtcacgatttcgccggggctcagtccgacgtcgtttctcgagtcgccggtgctgctctccaacatgaaggtggaaccttcaccgactacagggtcgctttctttgcttcatcaaacagcatatggttccatgacttctgctgcatctgctacatttcctgtaaccactgtgtgcttcaatagcaataccgttgatgagagaaaacctagcttctttgagtttaaaccacacagtggatcaaatatggttcccgcagactttgacaaccatgcaagtgaaaaatctactcaaatagacagtcaaggaaaagctcaagcttttgattcatcagccttagtaaaaaatgagtcagcatccccttcaaatgaattaagtctatcatcgcctgttcaaatggattgctcaggagctagtgcccgtgttgaaggtgatttggatgaattgaaccctaggagcaacataacaactgggcttcaagcatcacaagttgacaatagaggtagtggacttaccgttgcagctgagcgagtatctgatgatggatacaactggagaaaatatgggcaaaaacatgttaaaggaagtgaatttccacgcagttattacaaatgtacacatcctaactgtgaagttaagaaactatttgaacgctcccatgatggacaaatcactgagataatttacaagggaacacatgatcatcctaaacctcaaccaaaccgccgttactctgcaggaactataatgtctgtgcaagaagacagatctgataaagcttctttgactagccgagatgacaaaggatccaatatgtgtggccaggggtctcacctggctgagcccgacggtaaaccagagttattgcctgtagcaacaaatgatggtgatctagatggtttgggggttttgtcaaaccggaataatgatgaggttgatgatgatgatcccttctcaaagcgaagaaaaatggacgttggaattgctgacatcactcctgtagttaagcctatccgggagccacgtgttgttgtacaaactctgagtgaggttgatatcttggatgatggctatcgctggcgcaagtatgggcagaaggtggtgagaggcaatcctaaccctaggagttattacaaatgcacgaacaccggttgccccgttagaaaacacgtggagagggcatctcatgatccaaaagctgtgattaccacgtatgaggggaaacacaatcatgatgtaccaactgcaaggaatagttgccatgacatggcaggaccagcaagtgcaagtggacagacaagagttaggcccgaagaaagtgataccatcagccttgaccttgggatgggaattagcccagctgccgaaaacacatcaaacagtcaagggagaatgatgctttctgaatttggggatagtcaaattcacaccagcaattccaatttcaagttcgttcataccacgaccgcgccggggtactttggtgttctaaataacaactctaacccatatggttctaaagaaaatccaagtgatggtccatctttaaaccattctgcttatccttgccctcagaacatagggagaatactaatgggtccttgaaattgtttgtaaaac

SEQ ID NO: 53975 - protein, 592 aa, Glycine max
  peptide (1)..(592): Ceres Seq. ID no. 14304856
SLSFTQRDTFSLYTAMDAGEALSDDPNRPNSAADAAPAPAGARYKLLSPAKLPISRSPCVTISPGLSPTSFLESPVLLSNMKVEPSPTTGSLSLLHQTAYGSMTSAASATFPVTTVCFNSNTVDERKPSFFEFKPHSGSNMVPADFDNHASEKSTQIDSQGKAQAFDSSALVKNESASPSNELSLSSPVQMDCSGASARVEGDLDELNPRSNITTGLQASQVDNRGSGLTVAAERVSDDGYNWRKYGQKHVKGSEFPRSYYKCTHPNCEVKKLFERSHDGQITEIIYKGTHDHPKPQPNRRYSAGTIMSVQEDRSDKASLTSRDDKGSNMCGQGSHLAEPDGKPELLPVATNDGDLDGLGVLSNRNNDEVDDDDPFSKRRKMDVGIADITPVVKPIREPRVVVQTLSEVDILDDGYRWRKYGQKVVRGNPNPRSYYKCTNTGCPVRKHVERASHDPKAVITTYEGKHNHDVPTARNSCHDMAGPASASGQTRVRPEESDTISLDLGMGISPAAENTSNSQGRMMLSEFGDSQIHTSNSNFKFVHTTTAPGYFGVLNNNSNPYGSKENPSDGPSLNHSAYPCPQNIGRILMGP

SEQ ID NO: 53976 - protein, 577 aa, Glycine max
  peptide (1)..(577): Ceres Seq. ID no. 14304857
MDAGEALSDDPNRPNSAADAAPAPAGARYKLLSPAKLPISRSPCVTISPGLSPTSFLESPVLLSNMKVEPSPTTGSLSLLHQTAYGSMTSAASATFPVTTVCFNSNTVDERKPSFFEFKPHSGSNMVPADFDNHASEKSTQIDSQGKAQAFDSSALVKNESASPSNELSLSSPVQMDCSGASARVEGDLDELNPRSNITTGLQASQVDNRGSGLTVAAERVSDDGYNWRKYGQKHVKGSEFPRSYYKCTHPNCEVKKLFERSHDGQITEIIYKGTHDHPKPQPNRRYSAGTIMSVQEDRSDKASLTSRDDKGSNMCGQGSHLAEPDGKPELLPVATNDGDLDGLGVLSNRNNDEVDDDDPFSKRRKMDVGIADITPVVKPIREPRVVVQTLSEVDILDDGYRWRKYGQKVVRGNPNPRSYYKCTNTGCPVRKHVERASHDPKAVITTYEGKHNHDVPTARNSCHDMAGPASASGQTRVRPEESDTISLDLGMGISPAAENTSNSQGRMMLSEFGDSQIHTSNSNFKFVHTTTAPGYFGVLNNNSNPYGSKENPSDGPSLNHSAYPCPQNIGRILMGP

SEQ ID NO: 53977 - protein, 512 aa, Glycine max
  peptide (1)..(512): Ceres Seq. ID no. 14304858
MKVEPSPTTGSLSLLHQTAYGSMTSAASATFPVTTVCFNSNTVDERKPSFFEFKPHSGSNMVPADFDNHASEKSTQIDSQGKAQAFDSSALVKNESASPSNELSLSSPVQMDCSGASARVEGDLDELNPRSNITTGLQASQVDNRGSGLTVAAERVSDDGYNWRKYGQKHVKGSEFPRSYYKCTHPNCEVKKLFERSHDGQITEIIYKGTHDHPKPQPNRRYSAGTIMSVQEDRSDKASLTSRDDKGSNMCGQGSHLAEPDGKPELLPVATNDGDLDGLGVLSNRNNDEVDDDDPFSKRRKMDVGIADITPVVKPIREPRVVVQTLSEVDILDDGYRWRKYGQKVVRGNPNPRSYYKCTNTGCPVRKHVERASHDPKAVITTYEGKHNHDVPTARNSCHDMAGPASASGQTRVRPEESDTISLDLGMGISPAAENTSNSQGRMMLSEFGDSQIHTSNSNFKFVHTTTAPGYFGVLNNNSNPYGSKENPSDGPSLNHSAYPCPQNIGRILMGP

SEQ ID NO: 53978 - DNA, 1155 bp, Glycine max
  misc_feature (1)..(1155): Ceres Seq. ID no. 13637685
accgggccccccctcgagtcctacgtaggcccccccccttttataatgagaagcatagcatcttgttacaacgaacatgcaattagagtgtccgattcatattgttcaagaccttcgaaccaggcgtatctctgtccagaactcaacccttccaccagagattccgttacctgcatgtacaaactctccctcatcaaaacgcaaaaacaactcttcatcacaataacttgggccaagaaactcttgggccaaggcttcaccataaccatctccaattctgaacattttctttctccctctaataataaatccaacgcaaggcaattgagaaagaacaaaggcaacgaaacattccaatcccaaaattttcaagtccaagtcttgtgggatctctccgatgcaaagtacgaggaaggaccagaaccggttggtggcttttacgtcgacgttttggtggactccgaactgggcctacgcctcggcgacaaaaattcctcaatggaagaattgttaccaaactttgacgcaaaggaagcgactttctcgatggtttcacggagcgagacgttttccggcacagcggcttacgcgacgaaggcgaaattctcgcagacgggaagttctcacgatatattgattaggtgcggcgcggaggcggagcgaggagagccgaagggtcacgtgttgtccgtgtgcgtggacaagaagacaatgttccaggttaagaggctgaggtggaactttcgtgggaaccaaacaatttttgtcgatggtttggtcgttgatatgatgtgggacgtgcacgattggctttttaattcgaattctgcttcatctgcagtgttcatgttcaggacaaggagtggcctcgatagtaggctatggttggagaagagtttgcacgcgcacaaggaacaggacaaaattgggttctctttgttgatttgtgcctgtaagaacaatgactgattcaatcttatatagatttttttttcgttttaattcatctggattttataagattgaaaacactgacacctatttagatgatttttttcttcttcttaatcttaatctctgtcgatgatatttggtcagtggttatgtaatcctgtccgtttgaaccagaatagatgaaagtttatagattatatt

SEQ ID NO: 53979 - protein, 322 aa, Glycine max
  peptide (1)..(322): Ceres Seq. ID no. 15219379
TGPPLESYVGPPPFIMRSIASCYNEHAIRVSDSYCSRPSNQAYLCPELNPSTRDSVTCMYKLSLIKTQKQLFITITWAKKLLGQGFTITISNSEHFLSPSNNKSNARQLRKNKGNETFQSQNFQVQVLWDLSDAKYEEGPEPVGGFYVDVLVDSELGLRLGDKNSSMEELLPNFDAKEATFSMVSRSETFSGTAAYATKAKFSQTGSSHDILIRCGAEAERGEPKGHVLSVCVDKKTMFQVKRLRWNFRGNQTIFVDGLVVDMMWDVHDWLFNSNSASSAVFMFRTRSGLDSRLWLEKSLHAHKEQDKIGFSLLICACKNND

SEQ ID NO: 53980 - protein, 307 aa, Glycine max
  peptide (1)..(307): Ceres Seq. ID no. 15219380
MRSIASCYNEHAIRVSDSYCSRPSNQAYLCPELNPSTRDSVTCMYKLSLIKTQKQLFITITWAKKLLGQGFTITISNSEHFLSPSNNKSNARQLRKNKGNETFQSQNFQVQVLWDLSDAKYEEGPEPVGGFYVDVLVDSELGLRLGDKNSSMEELLPNFDAKEATFSMVSRSETFSGTAAYATKAKFSQTGSSHDILIRCGAEAERGEPKGHVLSVCVDKKTMFQVKRLRWNFRGNQTIFVDGLVVDMMWDVHDWLFNSNSASSAVFMFRTRSGLDSRLWLEKSLHAHKEQDKIGFSLLICACKNND

SEQ ID NO: 53981 - protein, 264 aa, Glycine max
  peptide (1)..(264): Ceres Seq. ID no. 15219381
MYKLSLIKTQKQLFITITWAKKLLGQGFTITISNSEHFLSPSNNKSNARQLRKNKGNETFQSQNFQVQVLWDLSDAKYEEGPEPVGGFYVDVLVDSELGLRLGDKNSSMEELLPNFDAKEATFSMVSRSETFSGTAAYATKAKFSQTGSSHDILIRCGAEAERGEPKGHVLSVCVDKKTMFQVKRLRWNFRGNQTIFVDGLVVDMMWDVHDWLFNSNSASSAVFMFRTRSGLDSRLWLEKSLHAHKEQDKIGFSLLICACKNND

SEQ ID NO: 53982 - DNA, 1597 bp, Glycine max
  misc_feature (1)..(1597): Ceres Seq. ID no. 14307261
gaagaaacaagcttcacttccaccccttaatggcccgaggcaaggcgaagaagaaggaagaaggtgaagacaccgatgtcgcaaacccagaaacgttagagcggaagaggctgaaatccttggccatttccaacaagattctctcggagacccctgcacggagctccgttcacctcaacccttcctccgtcgtggccaagcaccacggcaaagatatcatcaagaagtctcagaggaagagctgcaggtacctcttctcgttccccgggctaattgctcccatcgccggtggcaagatcggtgacctcaaggacttgggcaccaaaaaccccgttctctacctcgatttcccacagggtcaaatgaagttattcgggaccattgtatatccaaagaacagatacttgactctacagttccctaaaggtggaaagagtgtaatgtgtgaggattattttgataacatgattgtattttcggatgcatggtggatcgggaggaaagatgaaaacccagaagaatccaagctggaatttcctaatgaattgtatgagggacaccaagctgagtatgactttaaagggggtgcgggtgcaggtgcagcttctgtagttaatcaaggtgttcccagaaccaacattcaacgtgtagagcaagagtcaccaaagacacccaccgaagatgatttgtcagacaatgaaatcaatttaaaagatacaaaggaattggttccggtccgacattcaacaagaactgcaaaaaaatcatacaaatttgctgaaatttcttccggtgatgattctggtgaaaacagccctgagctttctgatgatgaagagaaagtgatacagaaaaaaactgtagtttttgacctcgatgatgaggatgatgcaccagtagatcaacctgccaagataaatactgagtctgcttctcgatcaaaaagtaaagaagtgtctcaatctgcttcagccagtgcatctactgaagttaagtccagtaatcgtggatcacttgttcaggctactatatccacattattcaagaaagtggaagaaaagacaactccaagaagttcaaggaaatccccatcatcaaaagcttatggccagaagtcacagcctgctggttcaaaaagaaagattgatctggatgaaggatccaagaaaagggcaagaaagaccacggacaaagatcctggtaaaaaaatcaaggcaaaaagcaaggaagacgatgttgaagatggtgatgatgatggtgatgacattgaagaattttcaaatgcttcagaggatgctaatgaaagtgatgaagactggactgcttgagtgtgtaatctaagttgtggctgctagtcacaagaaatgacaaggcagggtcatgcaagtgatgtgattataccctttatctctctctacactaagatagaacgtaacgacttggttttgcataccatgtggttatgatgggaatatgagaatagagataataccatgtggttatgatggagaaagaatgaggaagttgtccaatgtttaccaatccaatcttcatctccaagttgggagtcattaaatgtatacttttaatttcgatt

SEQ ID NO: 53983 - protein, 441 aa, Glycine max
  peptide (1)..(441): Ceres Seq. ID no. 14307262
RNKLHFHPLMARGKAKKKEEGEDTDVANPETLERKRLKSLAISNKILSETPARSSVHLNPSSVVAKHHGKDIIKKSQRKSCRYLFSFPGLIAPIAGGKIGDLKDLGTKNPVLYLDFPQGQMKLFGTIVYPKNRYLTLQFPKGGKSVMCEDYFDNMIVFSDAWWIGRKDENPEESKLEFPNELYEGHQAEYDFKGGAGAGAASVVNQGVPRTNIQRVEQESPKTPTEDDLSDNEINLKDTKELVPVRHSTRTAKKSYKFAEISSGDDSGENSPELSDDEEKVIQKKTVVFDLDDEDDAPVDQPAKINTESASRSKSKEVSQSASASASTEVKSSNRGSLVQATISTLFKKVEEKTTPRSSRKSPSSKAYGQKSQPAGSKRKIDLDEGSKKRARKTTDKDPGKKIKAKSKEDDVEDGDDDGDDIEEFSNASEDANESDEDWTA

SEQ ID NO: 53984 - protein, 432 aa, Glycine max
  peptide (1)..(432): Ceres Seq. ID no. 14307263
MARGKAKKKEEGEDTDVANPETLERKRLKSLAISNKILSETPARSSVHLNPSSVVAKHHGKDIIKKSQRKSCRYLFSFPGLIAPIAGGKIGDLKDLGTKNPVLYLDFPQGQMKLFGTIVYPKNRYLTLQFPKGGKSVMCEDYFDNMIVFSDAWWIGRKDENPEESKLEFPNELYEGHQAEYDFKGGAGAGAASVVNQGVPRTNIQRVEQESPKTPTEDDLSDNEINLKDTKELVPVRHSTRTAKKSYKFAEISSGDDSGENSPELSDDEEKVIQKKTVVFDLDDEDDAPVDQPAKINTESASRSKSKEVSQSASASASTEVKSSNRGSLVQATISTLFKKVEEKTTPRSSRKSPSSKAYGQKSQPAGSKRKIDLDEGSKKRARKTTDKDPGKKIKAKSKEDDVEDGDDDGDDIEEFSNASEDANESDEDWTA

SEQ ID NO: 53985 - protein, 321 aa, Glycine max
  peptide (1)..(321): Ceres Seq. ID no. 14307264
MKLFGTIVYPKNRYLTLQFPKGGKSVMCEDYFDNMIVFSDAWWIGRKDENPEESKLEFPNELYEGHQAEYDFKGGAGAGAASVVNQGVPRTNIQRVEQESPKTPTEDDLSDNEINLKDTKELVPVRHSTRTAKKSYKFAEISSGDDSGENSPELSDDEEKVIQKKTVVFDLDDEDDAPVDQPAKINTESASRSKSKEVSQSASASASTEVKSSNRGSLVQATISTLFKKVEEKTTPRSSRKSPSSKAYGQKSQPAGSKRKIDLDEGSKKRARKTTDKDPGKKIKAKSKEDDVEDGDDDGDDIEEFSNASEDANESDEDWTA

SEQ ID NO: 53986 - DNA, 917 bp, Glycine max
  misc_feature (1)..(917): Ceres Seq. ID no. 14307320
aatgaagcttctgataataaaacaagtccctggtgtttcaatcaggcacctggacatcaatggttaattcctgtcatgtctccttctgaagggcttgtctacaagccatatcctgggcctggatttatgggaacaatgaatggaggatgcggcgggccattcgggcaagcacctctcggtgctactttcatgaatcctgcctatcaattcccagcttctcatccagtagttggggtttcaccgtttgtccctccagccagtcatgcctacttcccttcctttggcatgccagtagtgaatcaagcaacatcaggatcaactgttgaacaggtgaaccagtttgctgcacaaggttctcatggtcaaaatggtcattcatatatagagggaaccgattttaacactcatcataaccaaagctcatctaacctgccagttctgaagaatggagctacgctacatgttaaaaaatctcaggcgtctaaggagagagggttacaagggagcacaataagcagtcctagtgaaatggcacagggaatcagagcagggaaaatagctgaaggaaatgatgcacattctctttctcttcaagctgttgaaactagacagcaaacacaagtcatcaaagttgtaccacataaccggaaatcagcgacggaatcagcagctagaatttttcaatccattcaagaagagagaaaacaacatgatttagtctagtgctgtttatggaggtggagttatttgagttgattttgtacagtgcgtcaagtcctgtactttgttgttgtttggtaatatgtatcttgctgttttattctactcttcctttatgtcctttttcttacaacatattcgaatgtagatattgttataactacaatggaatgttaaaattgatcaaatttaatatt

SEQ ID NO: 53987 - protein, 240 aa, Glycine max
  peptide (1)..(240): Ceres Seq. ID no. 14307321
NEASDNKTSPWCFNQAPGHQWLIPVMSPSEGLVYKPYPGPGFMGTMNGGCGGPFGQAPLGATFMNPAYQFPASHPVVGVSPFVPPASHAYFPSFGMPVVNQATSGSTVEQVNQFAAQGSHGQNGHSYIEGTDFNTHHNQSSSNLPVLKNGATLHVKKSQASKERGLQGSTISSPSEMAQGIRAGKIAEGNDAHSLSLQAVETRQQTQVIKVVPHNRKSATESAARIFQSIQEERKQHDLV

SEQ ID NO: 53988 - protein, 215 aa, Glycine max
  peptide (1)..(215): Ceres Seq. ID no. 14307322
MSPSEGLVYKPYPGPGFMGTMNGGCGGPFGQAPLGATFMNPAYQFPASHPVVGVSPFVPPASHAYFPSFGMPVVNQATSGSTVEQVNQFAAQGSHGQNGHSYIEGTDFNTHHNQSSSNLPVLKNGATLHVKKSQASKERGLQGSTISSPSEMAQGIRAGKIAEGNDAHSLSLQAVETRQQTQVIKVVPHNRKSATESAARIFQSIQEERKQHDLV

SEQ ID NO: 53989 - protein, 198 aa, Glycine max
  peptide (1)..(198): Ceres Seq. ID no. 14307323
MGTMNGGCGGPFGQAPLGATFMNPAYQFPASHPVVGVSPFVPPASHAYFPSFGMPVVNQATSGSTVEQVNQFAAQGSHGQNGHSYIEGTDFNTHHNQSSSNLPVLKNGATLHVKKSQASKERGLQGSTISSPSEMAQGIRAGKIAEGNDAHSLSLQAVETRQQTQVIKVVPHNRKSATESAARIFQSIQEERKQHDLV

SEQ ID NO: 53990 - DNA, 1760 bp, Glycine max
  misc_feature (1)..(1760): Ceres Seq. ID no. 14303377
ggaaaaaccctttcgtttcgtcttctccaaatccggttgaatattcaattcatactctgcttctcaactttcttcccctttccttcacttgcttactcccattcgcaaaccctaacggccaacgcagcaagttgaattttcagaatcgattcgtccaagtttgattcgaagcaaaaagaagcgaaattggagttttagggaaagaagaagggaaaaaaaaatggcgtacggtggtgcaggtcccgtaggtggttcgggttcggcatcgacaataaagcaagtcaaattggagagagaaagcgaactgagaatagaagttggtaacgacgcacctcttcgccttcgactccttaacggcactgctgagatttttggcaccgagcttccacccgaaatctggctcaattttcctcccaggctcaagtttgctgtgtttacttggtatggtgcaaccattgaaatggatggtgctactgaaactgattatactgcagatgagactccaatggttagttatgtaaatgtccatgctgtgctagatggaagaagaagtcgtgctaaagcctcatcaccagatgattctggttcttctcagggccctagggtcattgttgtaggacctactgattctggaaagagtaccttgtcgaggatgcttcttagttgggcagctaaacaaggttggaagcctacctttgttgatctggatattggccaagggtctataacaattcctggatgcattgctgccactccaattgaaatgcccattgatcctgtggaaggcattccacttgaaatgcctcttgtttactattatgggcacgcgactcctagtaacaatgtagaattgtataaagtgcttgttaaggagcttgcagggatgattgagaggcaatttactggaaatgctgaatctagagcttcaggcatggtgataaatactatgggatggatagagggtgtaggctatgatttgctcttgcatgcaattcgtacattcaaggccaatgttgtcttggttttgggtcaggaaaaactgtgcagcatgctcaaagatgtgctcaagagtgagcccaaagtagacgtagttaaacttcagaggtcaggtggagttgtatctaggaatgcaaaagtccgtcagaaggccagaagttataggataagggaatacttctatggcctttcaaatgatctttctccacattctaatattgcaaattttagtgatttgtttgtttatcgagttggtggtgggccacaggccccacgctcagccttgcccattggagcagaacctgctgcagatccaacaagagttgtacctgtaaatataaatcgtgatttgctccatttagtccttgctgtttcatttgccaaggaacctgatgagatcatttccagcaatgttgctgggtttatttatgtaacagacgttgacattcagagaaagaagataacatatcttgctccatctgctggagaacttccaagcaagtatttgataatgggatccttgacatggcttgaaacatgagctaatgaacagttttgtactggaaaatctcgctaaattcgttgctctggtttgtgtcgtgatcaaatgtaaatactaaatgtagtttacaacactgttgtgatggggattgtttgtcgtagtgagagaggctgacctttgtaacggaatatctaatattctgatttaaaatcttattatactcgttgagtagcaagttacttatgattcttgaagttgaaag

SEQ ID NO: 53991 - protein, 438 aa, Glycine max
  peptide (1)..(438): Ceres Seq. ID no. 14303378
MAYGGAGPVGGSGSASTIKQVKLERESELRIEVGNDAPLRLRLLNGTAEIFGTELPPEIWLNFPPRLKFAVFTWYGATIEMDGATETDYTADETPMVSYVNVHAVLDGRRSRAKASSPDDSGSSQGPRVIVVGPTDSGKSTLSRMLLSWAAKQGWKPTFVDLDIGQGSITIPGCIAATPIEMPIDPVEGIPLEMPLVYYYGHATPSNNVELYKVLVKELAGMIERQFTGNAESRASGMVINTMGWIEGVGYDLLLHAIRTFKANVVLVLGQEKLCSMLKDVLKSEPKVDVVKLQRSGGVVSRNAKVRQKARSYRIREYFYGLSNDLSPHSNIANFSDLFVYRVGGGPQAPRSALPIGAEPAADPTRVVPVNINRDLLHLVLAVSFAKEPDEIISSNVAGFIYVTDVDIQRKKITYLAPSAGELPSKYLIMGSLTWLET

SEQ ID NO: 53992 - protein, 358 aa, Glycine max
  peptide (1)..(358): Ceres Seq. ID no. 14303379
MDGATETDYTADETPMVSYVNVHAVLDGRRSRAKASSPDDSGSSQGPRVIVVGPTDSGKSTLSRMLLSWAAKQGWKPTFVDLDIGQGSITIPGCIAATPIEMPIDPVEGIPLEMPLVYYYGHATPSNNVELYKVLVKELAGMIERQFTGNAESRASGMVINTMGWIEGVGYDLLLHAIRTFKANVVLVLGQEKLCSMLKDVLKSEPKVDVVKLQRSGGVVSRNAKVRQKARSYRIREYFYGLSNDLSPHSNIANFSDLFVYRVGGGPQAPRSALPIGAEPAADPTRVVPVNINRDLLHLVLAVSFAKEPDEIISSNVAGFIYVTDVDIQRKKITYLAPSAGELPSKYLIMGSLTWLET

SEQ ID NO: 53993 - protein, 343 aa, Glycine max
  peptide (1)..(343): Ceres Seq. ID no. 14303380
MVSYVNVHAVLDGRRSRAKASSPDDSGSSQGPRVIVVGPTDSGKSTLSRMLLSWAAKQGWKPTFVDLDIGQGSITIPGCIAATPIEMPIDPVEGIPLEMPLVYYYGHATPSNNVELYKVLVKELAGMIERQFTGNAESRASGMVINTMGWIEGVGYDLLLHAIRTFKANVVLVLGQEKLCSMLKDVLKSEPKVDVVKLQRSGGVVSRNAKVRQKARSYRIREYFYGLSNDLSPHSNIANFSDLFVYRVGGGPQAPRSALPIGAEPAADPTRVVPVNINRDLLHLVLAVSFAKEPDEIISSNVAGFIYVTDVDIQRKKITYLAPSAGELPSKYLIMGSLTWLET

SEQ ID NO: 53994 - DNA, 2271 bp, Glycine max
  misc_feature (1)..(2271): Ceres Seq. ID no. 15169346
ggaagtcgaagtcttcgcttgccaattgcatttcttctcagcttcttgctgcttccgcgaatggcccgaaacctaggaggattactggcgctacttttcgctgtttcgatctgcggagccgtcacgattcccggccccgtctccgatgctcaccgttccgccgcgttagagctcttcgatggatcgttttcaagtttagaagaggcctatgaggcactaagagtttttgagattcttacgattgggaataagcctgatgtgagcacaacgacttgcaagaaagtagtggaaaaccttgggtcgtcatcgcctgtgaaggatttgttctatgcgttaaaggttaatgacatattaaaatgcaaggttaatggggatgttttcaaggatattgctttgagacttaaagccactgtcaatgatgcgagtactttggttgagatgtactattcaataggaagtttggttcttataaaggaccaggcttctgatgttgatgtgcttcttactgatgccgatggatccttccattcaatcaaggctctgagccaaagtgatggaaggtggcgttatagttctaataatccagagtctagtacctatgctgctggattagcacttgaagcacttgctggagtgatctcattagcatcttctgaaattgatcagtctagggtgaatacagtgaaaaatgatatattgaagcttttcgacagcattgagaaatatgatgatggaacattctattttgatgagaaatttgttggtggacgtgagcatcagggttctctttccacaacttcttctgttgttcgaggggttacagcatttgctgctgtaacttctggaaaaataaatcttccaggggataaaatattgggtttagcaaattttttcctgggaattggaatcccaggagatgccaaggacttcttcaatcaagttgaatcattagctcttctagagaacaacaaggtttcgatcccattggtactgtcacttcctgcaacggtttattcattatccaaaaaagatcagctcaaggttagggtgaacactgtacttggttcagctgcaccacctttaacagttaagcttgtgcaagctttccgctctaacgctaaagattcagctattgagagcaaggagctccaatatgatcaaaataatggaattcatttcttggaagctttcccagacaatgtagatgtgggaacttatgtgtttgtttttgagattgcacttcacgattctgctggtgaaaaagtttatgctactggaggccaaattcatgtaccaatatatgtcactggcattattaaagtcagcaatgctgaaattgctgttcttgacagtgatcttggaagtgttgaaacccagaaaacgctagatttggctggaaatgatgatgtttcactctcagctaaccacttgcaaaagttgcgcttttctttccagttgacaacacctcacggtcatgcttttaagcctcatcaggcatttttcaagttgaagcatgagacaaagcatgaacacatctttgtggttggaaatactggcaggaagtttgagattattcttgattttcttggtttggtggagaaattttattacctctctggcagatatgacattgagctgactgttggggatactgtcatggagaactctttcttacggctgcttggtgaagttgatttagatcttcccgaagcacctgagaaggcagcccgtcttcctccactccctgtcgatccttactcaagatatgggcccaaagccgagatagcccacttattcagggctccagaaaagcgaccaccccaggaactctctcttactttcttgggtttgatccttctgccatttattggctttttagttgggctgttacgcctgggagtgaacttgaagaattttccttcttcagctgtacctgctacatatgccttcttattccatcttggcattgctgcagttctattgctttatgtacttttctggttgaagctggacttgttcactacactcaaaactgtaggatttttgggagcttttctgttgtttgtgggacacagaattctttcccatctcgcttcaacatcatctaagttgaagtctgcatgagtaaaaggaagattatctatttataaagacatgacatgataatgtgtttttccttgaaaaaatgatactaatccaattttgtaggactttgttgtactagttcgtaacgaatttagagctcaattatatcaagagaaaagttttatc

SEQ ID NO: 53995 - protein, 707 aa, Glycine max
  peptide (1)..(707): Ceres Seq. ID no. 15169347
GSRSLRLPIAFLLSFLLLPRMARNLGGLLALLFAVSICGAVTIPGPVSDAHRSAALELFDGSFSSLEEAYEALRVFEILTIGNKPDVSTTTCKKVVENLGSSSPVKDLFYALKVNDILKCKVNGDVFKDIALRLKATVNDASTLVEMYYSIGSLVLIKDQASDVDVLLTDADGSFHSIKALSQSDGRWRYSSNNPESSTYAAGLALEALAGVISLASSEIDQSRVNTVKNDILKLFDSIEKYDDGTFYFDEKFVGGREHQGSLSTTSSVVRGVTAFAAVTSGKINLPGDKILGLANFFLGIGIPGDAKDFFNQVESLALLENNKVSIPLVLSLPATVYSLSKKDQLKVRVNTVLGSAAPPLTVKLVQAFRSNAKDSAIESKELQYDQNNGIHFLEAFPDNVDVGTYVFVFEIALHDSAGEKVYATGGQIHVPIYVTGIIKVSNAEIAVLDSDLGSVETQKTLDLAGNDDVSLSANHLQKLRFSFQLTTPHGHAFKPHQAFFKLKHETKHEHIFVVGNTGRKFEIILDFLGLVEKFYYLSGRYDIELTVGDTVMENSFLRLLGEVDLDLPEAPEKAARLPPLPVDPYSRYGPKAEIAHLFRAPEKRPPQELSLTFLGLILLPFIGFLVGLLRLGVNLKNFPSSAVPATYAFLFHLGIAAVLLLYVLFWLKLDLFTTLKTVGFLGAFLLFVGHRILSHLASTSSKLKSA

SEQ ID NO: 53996 - protein, 687 aa, Glycine max
  peptide (1)..(687): Ceres Seq. ID no. 15169348
MARNLGGLLALLFAVSICGAVTIPGPVSDAHRSAALELFDGSFSSLEEAYEALRVFEILTIGNKPDVSTTTCKKVVENLGSSSPVKDLFYALKVNDILKCKVNGDVFKDIALRLKATVNDASTLVEMYYSIGSLVLIKDQASDVDVLLTDADGSFHSIKALSQSDGRWRYSSNNPESSTYAAGLALEALAGVISLASSEIDQSRVNTVKNDILKLFDSIEKYDDGTFYFDEKFVGGREHQGSLSTTSSVVRGVTAFAAVTSGKINLPGDKILGLANFFLGIGIPGDAKDFFNQVESLALLENNKVSIPLVLSLPATVYSLSKKDQLKVRVNTVLGSAAPPLTVKLVQAFRSNAKDSAIESKELQYDQNNGIHFLEAFPDNVDVGTYVFVFEIALHDSAGEKVYATGGQIHVPIYVTGIIKVSNAEIAVLDSDLGSVETQKTLDLAGNDDVSLSANHLQKLRFSFQLTTPHGHAFKPHQAFFKLKHETKHEHIFVVGNTGRKFEIILDFLGLVEKFYYLSGRYDIELTVGDTVMENSFLRLLGEVDLDLPEAPEKAARLPPLPVDPYSRYGPKAEIAHLFRAPEKRPPQELSLTFLGLILLPFIGFLVGLLRLGVNLKNFPSSAVPATYAFLFHLGIAAVLLLYVLFWLKLDLFTTLKTVGFLGAFLLFVGHRILSHLASTSSKLKSA

SEQ ID NO: 53997 - protein, 561 aa, Glycine max
  peptide (1)..(561): Ceres Seq. ID no. 15169349
MYYSIGSLVLIKDQASDVDVLLTDADGSFHSIKALSQSDGRWRYSSNNPESSTYAAGLALEALAGVISLASSEIDQSRVNTVKNDILKLFDSIEKYDDGTFYFDEKFVGGREHQGSLSTTSSVVRGVTAFAAVTSGKINLPGDKILGLANFFLGIGIPGDAKDFFNQVESLALLENNKVSIPLVLSLPATVYSLSKKDQLKVRVNTVLGSAAPPLTVKLVQAFRSNAKDSAIESKELQYDQNNGIHFLEAFPDNVDVGTYVFVFEIALHDSAGEKVYATGGQIHVPIYVTGIIKVSNAEIAVLDSDLGSVETQKTLDLAGNDDVSLSANHLQKLRFSFQLTTPHGHAFKPHQAFFKLKHETKHEHIFVVGNTGRKFEIILDFLGLVEKFYYLSGRYDIELTVGDTVMENSFLRLLGEVDLDLPEAPEKAARLPPLPVDPYSRYGPKAEIAHLFRAPEKRPPQELSLTFLGLILLPFIGFLVGLLRLGVNLKNFPSSAVPATYAFLFHLGIAAVLLLYVLFWLKLDLFTTLKTVGFLGAFLLFVGHRILSHLASTSSKLKSA

SEQ ID NO: 53998 - DNA, 1418 bp, Glycine max
  misc_feature (1)..(1418): Ceres Seq. ID no. 14315309
acttgccttgctttgcttaggtgcgagagagagagatggatactggtatgctatgaagatgggatctcagactcagcgtcatcaccactctctttgattctcttcaatcttgagtctccaggaatcacattagctgagtatttcagagatatgggttataatgtcagtatgatggcagattctacatctagatgggcagaagcattgcgtgaaatctctggacgactggcagaaatgcctgcagatagtggatatcctgcataccttgctgcacgtttagcctcgttctatgaacgtgctgggaaggtaaaatgtcttggaggccctgaacgtacaggtagcgtaactattgttggtgctgtttcgccacctggaggagatttctcagatcctgtgacatctgcaaccctgagcatagttcaggttttctggggtttggacaaaaagcttgctcagaggaagcactttccttctgtaaactggcttatttcttattcaaaatactcaacggcacttgaaaccttttatgagcaatttgatccagattttatcaacattaggacaaaggctcgtgaagttctgcaaagggaagatgacctgaatgaaattgttcagcttgtgggcaaggatgctttagctgaaggagataagatcaccttagaaactgcaaagcttttgagagaggattatcttgctcaaaatgcctttacaccatatgacaaattctgccccttctacaagtctgtttggatgatgcgcaacattatccatttctacaatttggcaaatcaggcagtagagaggggagctggttcagatggtcagaagatatcttacacccttatcaagcatcgtatgggagatctgttctaccgattagtgtctcagaaatttgaggatccagcagaaggggaagctgctttggttgcgaaatttcagaagttacatgaggacctgactaatggtttccgcaaccttgaggacgaaacccgatgattgatgattgaagatttggtagtttgctcaaatattgtgttatttccaattgtaagacgcagtctagcatcgcagggttgcaacgtcccgagtgttctcatatttgactgctcgattcattcatatcacatttatttcctttcttggtgctggtttggcttttgatctagtctcatgtgtagctataatcatgtgtttcagtcatcctcagtttgtttattgagaataagaaacgagacttgctctttcaatatgtatttaggagaataaaattatcttaggacatgaagtgcctacagcaagcggattctggattcatataggtggaatttttggtggaagtggattatcttgaatcctgtatttcatagatggacttcttgtagcaatgagtatttaattatttattcgaaatatgttgc

SEQ ID NO: 53999 - protein, 331 aa, Glycine max
  peptide (1)..(331): Ceres Seq. ID no. 14315310
TCLALLRCERERWILVCYEDGISDSASSPLSLILFNLESPGITLAEYFRDMGYNVSMMADSTSRWAEALREISGRLAEMPADSGYPAYLAARLASFYERAGKVKCLGGPERTGSVTIVGAVSPPGGDFSDPVTSATLSIVQVFWGLDKKLAQRKHFPSVNWLISYSKYSTALETFYEQFDPDFINIRTKAREVLQREDDLNEIVQLVGKDALAEGDKITLETAKLLREDYLAQNAFTPYDKFCPFYKSVWMMRNIIHFYNLANQAVERGAGSDGQKISYTLIKHRMGDLFYRLVSQKFEDPAEGEAALVAKFQKLHEDLTNGFRNLEDETR

SEQ ID NO: 54000 - protein, 281 aa, Glycine max
  peptide (1)..(281): Ceres Seq. ID no. 14315311
MGYNVSMMADSTSRWAEALREISGRLAEMPADSGYPAYLAARLASFYERAGKVKCLGGPERTGSVTIVGAVSPPGGDFSDPVTSATLSIVQVFWGLDKKLAQRKHFPSVNWLISYSKYSTALETFYEQFDPDFINIRTKAREVLQREDDLNEIVQLVGKDALAEGDKITLETAKLLREDYLAQNAFTPYDKFCPFYKSVWMMRNIIHFYNLANQAVERGAGSDGQKISYTLIKHRMGDLFYRLVSQKFEDPAEGEAALVAKFQKLHEDLTNGFRNLEDETR

SEQ ID NO: 54001 - protein, 275 aa, Glycine max
  peptide (1)..(275): Ceres Seq. ID no. 14315312
MMADSTSRWAEALREISGRLAEMPADSGYPAYLAARLASFYERAGKVKCLGGPERTGSVTIVGAVSPPGGDFSDPVTSATLSIVQVFWGLDKKLAQRKHFPSVNWLISYSKYSTALETFYEQFDPDFINIRTKAREVLQREDDLNEIVQLVGKDALAEGDKITLETAKLLREDYLAQNAFTPYDKFCPFYKSVWMMRNIIHFYNLANQAVERGAGSDGQKISYTLIKHRMGDLFYRLVSQKFEDPAEGEAALVAKFQKLHEDLTNGFRNLEDETR

SEQ ID NO: 54002 - DNA, 1701 bp, Glycine max
  misc_feature (1)..(1701): Ceres Seq. ID no. 14311371
atgataagtggtatggaacagaccagttttctatttcagcaagcttctaaggttggtttttctcatacaaacatccttagaagcattattcaccatgcttgcttgcgatttccaaatcttgcatcagttagtggtatatcaggtcagcttccaagcaggtcaaaatccttacaacgtaacaagtctttttctcgccgtgaaggaactcgaaaagtgtttgtcatttttggaggtaacacatcagaacggcaagtatctcttatgagtggtacgaatgtctggctcaatttgctagccttccatgatcttgaggtaactccatgtttgctttcccctacaagtgagtgtgcatctagcattgatatgggaaaaaaggctgatgatgtaatgaatagaacagtttggtcattgccttattctcttgtgctaagacatactactgaggaggtactagatgcatgcatggaagcaattgagccggaacatgctgcaataacatctgaactccggaagaaagtaatgaatgatcttatggagggtttgaaggaccacaattggtttaccgggtttgatattgctgatgatctgcctgtgaaattttcattaaggcagtggatcaagctagccaaggaagtccaagcaacagtttttattgcagtgcatggaggcattggagaagatggtacacttcaatctttgctggatgctgaaggagtgccctacacaggtcctggtgcaatggcatcaaagatttgtatggacaaagttgcaacctctgtggctttaaaacatcttgcaaattcgggagttcttaccataaataaggatgtcaggcaaaaagatgatctctctaataagcccataaatgatacatggcatgacctcaccagaaagctacagtgccaaacattatgtgtcaaaccagcaaaagatggatgctcaactggggtagcaagactatgctgtcccgaggaccttgcaatatatgtcaaagctctggaggactgtctactaagaattcctccaaattgcttatcaaaggcacatggtatgattgagatgccaaaccctcctccagaacacttaatcttcgaacctttcatagagacggatgaaataattgtgacatccaaatttgaggatgcaactggtcatggcctcacttggaaaggacacagcagatgggtggaaataactgttggcgtcataggaaaacgtggatcaatgcactcgctaagtcctagtgtaactgtcaaggaatctggtgatattttgtcacttgaggagaagttccaaggtgggactggcatcaatctgactccgcctcccttgtcaattatgagtgagaatgctttgaagagatgtaaacagcatattgaactgattgcaaacactcttcaattggaaggattttcacgcattgatgcatttgtaaatgttgacagtggagaggttttgattatagaggtaaatactgtgcctggaatgacaccttccactgttctgattcatcaggcactagtagagcaaccaccgttgtatcctcatcaattcttccgtaagcttcttgatttggcatctgaaaggtccatgtaaatctatttaatagaatgtttacattgtctatcaaatgttgttaccacttgaagttattgtgaaactttaatttcctatctggaacttgcgtccctttataatgtg

SEQ ID NO: 54003 - protein, 531 aa, Glycine max
  peptide (1)..(531): Ceres Seq. ID no. 14311372
MISGMEQTSFLFQQASKVGFSHTNILRSIIHHACLRFPNLASVSGISGQLPSRSKSLQRNKSFSRREGTRKVFVIFGGNTSERQVSLMSGTNVWLNLLAFHDLEVTPCLLSPTSECASSIDMGKKADDVMNRTVWSLPYSLVLRHTTEEVLDACMEAIEPEHAAITSELRKKVMNDLMEGLKDHNWFTGFDIADDLPVKFSLRQWIKLAKEVQATVFIAVHGGIGEDGTLQSLLDAEGVPYTGPGAMASKICMDKVATSVALKHLANSGVLTINKDVRQKDDLSNKPINDTWHDLTRKLQCQTLCVKPAKDGCSTGVARLCCPEDLAIYVKALEDCLLRIPPNCLSKAHGMIEMPNPPPEHLIFEPFIETDEIIVTSKFEDATGHGLTWKGHSRWVEITVGVIGKRGSMHSLSPSVTVKESGDILSLEEKFQGGTGINLTPPPLSIMSENALKRCKQHIELIANTLQLEGFSRIDAFVNVDSGEVLIIEVNTVPGMTPSTVLIHQALVEQPPLYPHQFFRKLLDLASERSM

SEQ ID NO: 54004 - protein, 527 aa, Glycine max
  peptide (1)..(527): Ceres Seq. ID no. 14311373
MEQTSFLFQQASKVGFSHTNILRSIIHHACLRFPNLASVSGISGQLPSRSKSLQRNKSFSRREGTRKVFVIFGGNTSERQVSLMSGTNVWLNLLAFHDLEVTPCLLSPTSECASSIDMGKKADDVMNRTVWSLPYSLVLRHTTEEVLDACMEAIEPEHAAITSELRKKVMNDLMEGLKDHNWFTGFDIADDLPVKFSLRQWIKLAKEVQATVFIAVHGGIGEDGTLQSLLDAEGVPYTGPGAMASKICMDKVATSVALKHLANSGVLTINKDVRQKDDLSNKPINDTWHDLTRKLQCQTLCVKPAKDGCSTGVARLCCPEDLAIYVKALEDCLLRIPPNCLSKAHGMIEMPNPPPEHLIFEPFIETDEIIVTSKFEDATGHGLTWKGHSRWVEITVGVIGKRGSMHSLSPSVTVKESGDILSLEEKFQGGTGINLTPPPLSIMSENALKRCKQHIELIANTLQLEGFSRIDAFVNVDSGEVLIIEVNTVPGMTPSTVLIHQALVEQPPLYPHQFFRKLLDLASERSM

SEQ ID NO: 54005 - protein, 444 aa, Glycine max
  peptide (1)..(444): Ceres Seq. ID no. 14311374
MSGTNVWLNLLAFHDLEVTPCLLSPTSECASSIDMGKKADDVMNRTVWSLPYSLVLRHTTEEVLDACMEAIEPEHAAITSELRKKVMNDLMEGLKDHNWFTGFDIADDLPVKFSLRQWIKLAKEVQATVFIAVHGGIGEDGTLQSLLDAEGVPYTGPGAMASKICMDKVATSVALKHLANSGVLTINKDVRQKDDLSNKPINDTWHDLTRKLQCQTLCVKPAKDGCSTGVARLCCPEDLAIYVKALEDCLLRIPPNCLSKAHGMIEMPNPPPEHLIFEPFIETDEIIVTSKFEDATGHGLTWKGHSRWVEITVGVIGKRGSMHSLSPSVTVKESGDILSLEEKFQGGTGINLTPPPLSIMSENALKRCKQHIELIANTLQLEGFSRIDAFVNVDSGEVLIIEVNTVPGMTPSTVLIHQALVEQPPLYPHQFFRKLLDLASERSM

SEQ ID NO: 54006 - DNA, 1174 bp, Glycine max
  misc_feature (1)..(1174): Ceres Seq. ID no. 14307559
agctaggtcgcagaaaatgccttccccactcacaaaacgaaacttttgatttccttaggcgcgtcattgtcatggagttagcagtgtgttaaacacaccagagggtgatagcagggagaaaaagacagagtgtgtaagaaagagaagagagagaaatgggaaggggaagagtggagttgaagagaattgagaacaagatcaacaggcaagtgacctttgcaaaacgaaggaacgggcttttgaagaaagcttacgagctttccgttctttgtgatgccgaggttgctctcatcatcttctccaatagaggaaaactgtacgagttctgcagcagttcaagcatgctcaaaacgctagagaggtaccagaaatgtaactatggtgcgcctgaggctaatgtgtctacacgggaagccttggagttaatcagtcaacaggagtacttgaagctgaaggcacgttatgaggccctacaacggtcccagaggaaccttatgggagaagatcttggtcctttaagcagcaaagagctcgagtctcttgaaaggcagctagattcgtccttgaagcaaataagatcaaccaggacccagttcatgttggatcagctctctgatcttcaacgtaaggaacacttgctaagtgaggctaacaggtctctcagacaaaggcagttggaagggtatcaaataaatccactccaactgaatcccggagttgaagagatgggatatggcaggcatccagctcaaactcatggtgaagccctctttcaacaaatggagtgtgagccaacgttacaaattgggtatcagcctgatccagtatcagtggtgacagcaggcccaagcatgagcaattacatggcaggatggttaccatagtttgcgtttcctgcataagatccactgcaccagcacatttgccgttccaattttatttgaaaacgaaaaaaaaaagaaggaagaaaatggctttggatgtaatgaagctgtaagtgtctgccgtgtatgaagtaggaacaaagttaagcagtgttgtttgtgtgtgctagctctttcataaaactgcacttctttgcttcggttactgtttcttcccttttaataagagtattgatgtcattaatgaactacatggttattttatatgctaccgtcagtgattttgaaag

SEQ ID NO: 54007 - protein, 242 aa, Glycine max
  peptide (1)..(242): Ceres Seq. ID no. 14307560
MGRGRVELKRIENKINRQVTFAKRRNGLLKKAYELSVLCDAEVALIIFSNRGKLYEFCSSSSMLKTLERYQKCNYGAPEANVSTREALELISQQEYLKLKARYEALQRSQRNLMGEDLGPLSSKELESLERQLDSSLKQIRSTRTQFMLDQLSDLQRKEHLLSEANRSLRQRQLEGYQINPLQLNPGVEEMGYGRHPAQTHGEALFQQMECEPTLQIGYQPDPVSVVTAGPSMSNYMAGWLP

SEQ ID NO: 54008 - protein, 180 aa, Glycine max
  peptide (1)..(180): Ceres Seq. ID no. 14307561
MLKTLERYQKCNYGAPEANVSTREALELISQQEYLKLKARYEALQRSQRNLMGEDLGPLSSKELESLERQLDSSLKQIRSTRTQFMLDQLSDLQRKEHLLSEANRSLRQRQLEGYQINPLQLNPGVEEMGYGRHPAQTHGEALFQQMECEPTLQIGYQPDPVSVVTAGPSMSNYMAGWLP

SEQ ID NO: 54009 - protein, 129 aa, Glycine max
  peptide (1)..(129): Ceres Seq. ID no. 14307562
MGEDLGPLSSKELESLERQLDSSLKQIRSTRTQFMLDQLSDLQRKEHLLSEANRSLRQRQLEGYQINPLQLNPGVEEMGYGRHPAQTHGEALFQQMECEPTLQIGYQPDPVSVVTAGPSMSNYMAGWLP

SEQ ID NO: 54010 - DNA, 1789 bp, Glycine max
  misc_feature (1)..(1789): Ceres Seq. ID no. 14314896
atcactctgtgctccctcgctctatttctcagtctctgtgtttgcggctgaggattccgaacgagtgaccttcttcgtttctcgcaaagtttaagtaatcatgggtaaggaaaaggttcacatcaacattgtcgtcattggacatgtcgactctgggaagtcaactaccactggtcacttgatctacaagcttggaggtattgacaagcgtgtgattgagaggttcgagaaggaggctgccgagatgaacaagaggtcattcaagtatgcctgggtgctcgacaagctcaaagctgagcgtgaaagaggaattaccattgatattgctttgtggaagtttgaaaccaccaagtactactgcacggtcattgatgctcctggacatcgtgactttatcaagaacatgattactggtacctcccaggccgactgtgctgtccttattattgactccaccactggtggttttgaagctggtatttctaaggatggacagacccgtgagcatgctcttcttgctttcaccctaggtgtgaagcagatgatctgttgctgtaacaagatggatgccactacccccaagtactctaaggctaggtatgatgaaatcgtgaaggaagtctcttcttacttgaagaaggttggttacaacccagacaagattccctttgttcccatctctggttttgagggtgacaacatgattgagaggtccaccaaccttgactggtacaagggaccaactctccttgaggctcttgaccaaatcaatgagcccaagaggccctctgacaagcctctaaggcttccattgcaggatgtctacaagattggtggtattggtactgtgccagtgggacgtgtagagactggggttgtgaagcctggtatggtggtgacttttggtcccactgggctgacaactgaggttaagtctgttgagatgcaccatgaggctctcacagaggctcttccaggtgacaatgttggatttaatgtgaagaatgttgcagtcaaggatctcaagcgtggttttgttgcatccaactccaaggacgaccctgccaaggaagctgccaacttcacatcccaagtcattatcatgaaccatcctggccagattggtaatggatacgcaccagtccttgactgccacacttctcacattgctgtgaagttttctgaaatcttgaccaagattgacaggcgatctggtaaggagcttgagaaggagcccaaatttttgaagaatggtgatgctggtatggttaagatggttccaaccaagcccatggtggttgaaactttctctgagtatcctccccttggtcgttttgctgtgagggacatgcgtcagaccgtagctgttggagtcatcaagagtgttgagaagaaagaccccaccggagccaaggtcacaaaggctgccgccaagaagaagtgattgcattttggcaattttgctagcacatgtgatcatcaacgtggtttcaaaaaaacttgttcctttacagtagtttatctttgcagagtcttaggtgtttgttttaccagttatattttgaagtgtccgccgatttcatgtagccgtagccttcaaaactgggttcttgatcggcggtaacattttcgttgctgtttgtttttgatgagtactgttttttgttttgatggtaaaagtctgagattttcaaattcacaagcagccatagggttttagtccatttcctttgctgctgaggagggatgtcttaaatttgcatttaatttataaggaagttttgttaag

SEQ ID NO: 54011 - protein, 447 aa, Glycine max
  peptide (1)..(447): Ceres Seq. ID no. 14314897
MGKEKVHINIVVIGHVDSGKSTTTGHLIYKLGGIDKRVIERFEKEAAEMNKRSFKYAWVLDKLKAERERGITIDIALWKFETTKYYCTVIDAPGHRDFIKNMITGTSQADCAVLIIDSTTGGFEAGISKDGQTREHALLAFTLGVKQMICCCNKMDATTPKYSKARYDEIVKEVSSYLKKVGYNPDKIPFVPISGFEGDNMIERSTNLDWYKGPTLLEALDQINEPKRPSDKPLRLPLQDVYKIGGIGTVPVGRVETGVVKPGMVVTFGPTGLTTEVKSVEMHHEALTEALPGDNVGFNVKNVAVKDLKRGFVASNSKDDPAKEAANFTSQVIIMNHPGQIGNGYAPVLDCHTSHIAVKFSEILTKIDRRSGKELEKEPKFLKNGDAGMVKMVPTKPMVVETFSEYPPLGRFAVRDMRQTVAVGVIKSVEKKDPTGAKVTKAAAKKK

SEQ ID NO: 54012 - protein, 399 aa, Glycine max
  peptide (1)..(399): Ceres Seq. ID no. 14314898
MNKRSFKYAWVLDKLKAERERGITIDIALWKFETTKYYCTVIDAPGHRDFIKNMITGTSQADCAVLIIDSTTGGFEAGISKDGQTREHALLAFTLGVKQMICCCNKMDATTPKYSKARYDEIVKEVSSYLKKVGYNPDKIPFVPISGFEGDNMIERSTNLDWYKGPTLLEALDQINEPKRPSDKPLRLPLQDVYKIGGIGTVPVGRVETGVVKPGMVVTFGPTGLTTEVKSVEMHHEALTEALPGDNVGFNVKNVAVKDLKRGFVASNSKDDPAKEAANFTSQVIIMNHPGQIGNGYAPVLDCHTSHIAVKFSEILTKIDRRSGKELEKEPKFLKNGDAGMVKMVPTKPMVVETFSEYPPLGRFAVRDMRQTVAVGVIKSVEKKDPTGAKVTKAAAKKK

SEQ ID NO: 54013 - protein, 346 aa, Glycine max
  peptide (1)..(346): Ceres Seq. ID no. 14314899
MITGTSQADCAVLIIDSTTGGFEAGISKDGQTREHALLAFTLGVKQMICCCNKMDATTPKYSKARYDEIVKEVSSYLKKVGYNPDKIPFVPISGFEGDNMIERSTNLDWYKGPTLLEALDQINEPKRPSDKPLRLPLQDVYKIGGIGTVPVGRVETGVVKPGMVVTFGPTGLTTEVKSVEMHHEALTEALPGDNVGFNVKNVAVKDLKRGFVASNSKDDPAKEAANFTSQVIIMNHPGQIGNGYAPVLDCHTSHIAVKFSEILTKIDRRSGKELEKEPKFLKNGDAGMVKMVPTKPMVVETFSEYPPLGRFAVRDMRQTVAVGVIKSVEKKDPTGAKVTKAAAKKK

SEQ ID NO: 54014 - DNA, 1616 bp, Glycine max
  misc_feature (1)..(1616): Ceres Seq. ID no. 14314851
ggtttttctgtcttaaggcttcattcattgagcttttctcttcttatttctatttctctctccccaaaagcttttgtttctctctgcttatggaaggcccttaaactttcgctctctctgcttcactttctcgcttttgcattttcttgtgaaaaaaaaaaatcctcagaacaaaaataggtcttcttcttctctgatctaccaaagcttcaaattctccttagtttggtttgtctgtgagtttggagtgtaatgtcgccgccgacgctggtaacggaggaggaggggcggagcaccgtggcgtccgattcttcgcaatccttggactgtttctctcagaatggtgctggattgaaagaacggaattacttagggttgtctgattgctcatcagtggatagctgtgcctctactgtgccaagcttgtgtgatgagaaaaaggagaacatgaatttgaaggctacagagttgaggcttggtcttcccggattccaatcgcctgaaagggaaccggatcttttctctttaagctcaccaaagcttgatgagaagccactcttccctttgcttcctactaaagacgggatttgctcgtcggggcagaaagctgttgtttctggcaacaaaagaggttttgctgataccatggatgggttttctcaggggaagtttgctggtaatacagggatgaacgcggtgctatcacctagaccttctggagctcaaccttctgctatgaaagaaacaccaagcaaattgtcagaacgtccttgctcaactaataatggaaccggtcataaccatacaggtgcttctatcagtggcagcgcaccggcttctaaggcacaggttgttggttggcctcctattagatcatttaggaaaaactcaatggctaccaccactaacaagaacaatgatgaagtcgatggaaaaccaggtgttggcgcactctttgtgaaggtcagcatggatggtgctccgtatcttaggaaggtagatctaagaagttatacaacatatcaggaactatcttctgcccttgagaagatgttcctaagctgttttaccctaggtcagtgtggttcccatggagctccaggaagagaaatgttgagtgagagcaagctgagggatcttctgcatggttctgagtatgttctcacttatgaagataaagatggagattggatgcttgtaggggatgtgccatgggaaatgttcattgagacttgcaaaaggctgaaaattatgaagggttctgatgccattggtttagctcccagggccatggaaaagtctaaaagcaggatttagggtatcctggatttcctcttttgtctaatcaagtgtttattgttggatcctccggaatgggaaaagcaaaggatgatgactgaaatcctggcattggtggtttaacgcccttccacttatttgttttcaagtccctcaagagtttgtcatggtcctgtgttaatttgttaccactgtaatatcatatgaaagctacaatgaaatattagtatttgtggagtctgtaatcattataggaatccgtttgttttggaagaattgaacatctgttacagccgccaccatacggttctaacact

SEQ ID NO: 54015 - protein, 354 aa, Glycine max
  peptide (1)..(354): Ceres Seq. ID no. 14314852
MSPPTLVTEEEGRSTVASDSSQSLDCFSQNGAGLKERNYLGLSDCSSVDSCASTVPSLCDEKKENMNLKATELRLGLPGFQSPEREPDLFSLSSPKLDEKPLFPLLPTKDGICSSGQKAVVSGNKRGFADTMDGFSQGKFAGNTGMNAVLSPRPSGAQPSAMKETPSKLSERPCSTNNGTGHNHTGASISGSAPASKAQVVGWPPIRSFRKNSMATTTNKNNDEVDGKPGVGALFVKVSMDGAPYLRKVDLRSYTTYQELSSALEKMFLSCFTLGQCGSHGAPGREMLSESKLRDLLHGSEYVLTYEDKDGDWMLVGDVPWEMFIETCKRLKIMKGSDAIGLAPRAMEKSKSRI

SEQ ID NO: 54016 - protein, 289 aa, Glycine max
  peptide (1)..(289): Ceres Seq. ID no. 14314853
MNLKATELRLGLPGFQSPEREPDLFSLSSPKLDEKPLFPLLPTKDGICSSGQKAVVSGNKRGFADTMDGFSQGKFAGNTGMNAVLSPRPSGAQPSAMKETPSKLSERPCSTNNGTGHNHTGASISGSAPASKAQVVGWPPIRSFRKNSMATTTNKNNDEVDGKPGVGALFVKVSMDGAPYLRKVDLRSYTTYQELSSALEKMFLSCFTLGQCGSHGAPGREMLSESKLRDLLHGSEYVLTYEDKDGDWMLVGDVPWEMFIETCKRLKIMKGSDAIGLAPRAMEKSKSRI

SEQ ID NO: 54017 - protein, 223 aa, Glycine max
  peptide (1)..(223): Ceres Seq. ID no. 14314854
MDGFSQGKFAGNTGMNAVLSPRPSGAQPSAMKETPSKLSERPCSTNNGTGHNHTGASISGSAPASKAQVVGWPPIRSFRKNSMATTTNKNNDEVDGKPGVGALFVKVSMDGAPYLRKVDLRSYTTYQELSSALEKMFLSCFTLGQCGSHGAPGREMLSESKLRDLLHGSEYVLTYEDKDGDWMLVGDVPWEMFIETCKRLKIMKGSDAIGLAPRAMEKSKSRI

SEQ ID NO: 54018 - DNA, 2193 bp, Glycine max
  misc_feature (1)..(2193): Ceres Seq. ID no. 15177203
atagtcagaacagttagttacctcttcataacatcaagtttggaggaattccccattgcattggcatctactattgaagtgtttgatgaaatgatggagctagaagatataaaactaaagaccgtcttggagtcctatggacaaatggatttggccagaaagggtcctttccgagccttacaaatagtttccatactcatatttaccctaaagaatctgattgataaacatgagaaagatgaatcaaaagacaaaaatgattgtcagcaacttgtgctgattcaactggcattagctgctgcattcattttcatgggccgttttgttgaaagatgccagaagtctagtcctttgaattattgccccttattgccttctgtacttgttttcgtggagtggtgtgcaagcatgcttgatgaaattgaagtatatgcaactgatcaaaagagtgaaacagctatttcttattttttttatgtgcttcttgaacttctaaatgaactaaatgagaatagaaaggaaaccaagaagcttgtagctaatagtacccctctttgggaagactatgaattgaggggctttgtatctatagctttttcacatgtctcattagatttctcagatggatgggaacacattgacaactttgagagtgacactgaattgcgcactcagcgcatgagtgaagcagcaatgaggattgctaacagatctaataatttgcaaaagtggattatatctgatgaattaggaagaaaatttcattctgctagatctgatgataatcatgagaagaaagaaacaggtaacatagagtccactgacaaaaggacaagtggggatgaccctaatcagaaaactcacaaagacaatggagaagatgggaaatgtgatacaagggataatccaagtagttccagcactaatgaagaaccttttgttgtggaagaagaagaagttattctcttcaggcctctagcgaggtatcattcagcaccatcgtacgcacttttttcccctcatgagcagatatcatcaccaaaagacaaggatgataaagtcttaccttctgatgattgtctgcaccgtactacatctctgcctatggcacaaaatccatttcaaattgatccttggggattccaaggtgagattatgaattcaaggatcaacaaatcgttccaagtgcaagaaccttcaatgaaggaatcaaatgcaaacacattttctgaaggtccaatctctgctgggcatccttcactcaatgcatgggtccttgatagaggagggttgagcaccaacaggttgcaccccattgaggaactagcttcttcatacttggctgatctttccatcaatagaactcagaatccagtcatcggtttggtggatgagttttcaaacttcccttcctcttctgctacatatactgctccagttccttctgctccactgttgccagataatgctccttggtataccgatgtcattgtacaatctactatgtctgctccattattgcaagaaaacccatcaccaataaatggttattcagcttggccttctacttatggaccccttggatatgatactagttttctattttattccaatggatacgcgccgccacctggtagaataacttcttcagaatggctgcgttggtacagagagaatcccccacctgagagggtcaacaacaatatgcagcctactcatttgaatgttcctggaaatcatgaaaatttcctccatcatgacacctacaggttcaaccaatttgaccaatggggtaaccctttgtctcctaaccagtacacttatatgaaaccaccaggtccccaaccattgcagccaggttatccctgtgcttttggtgctggtgaacacataaccaatcacttccacaattttcaaagaccaagcccttatgggtgtggttctgtgacagaacagagaaatgagccactgccactgctagaataccttaaggaaagggaatggagactccagcaggatcctaccctcagaggacctacatacatgggaaattgaaattcctcatctgaaatttagtttcttcattacaaaattgtacgccttcctttcacttagattccatacaatacaaggtatcaaacagtgtatgcaactatgtatatatttatgtgtatagtgttttaaccattccat

SEQ ID NO: 54019 - protein, 684 aa, Glycine max
  peptide (1)..(684): Ceres Seq. ID no. 15177204
IVRTVSYLFITSSLEEFPIALASTIEVFDEMMELEDIKLKTVLESYGQMDLARKGPFRALQIVSILIFTLKNLIDKHEKDESKDKNDCQQLVLIQLALAAAFIFMGRFVERCQKSSPLNYCPLLPSVLVFVEWCASMLDEIEVYATDQKSETAISYFFYVLLELLNELNENRKETKKLVANSTPLWEDYELRGFVSIAFSHVSLDFSDGWEHIDNFESDTELRTQRMSEAAMRIANRSNNLQKWIISDELGRKFHSARSDDNHEKKETGNIESTDKRTSGDDPNQKTHKDNGEDGKCDTRDNPSSSSTNEEPFVVEEEEVILFRPLARYHSAPSYALFSPHEQISSPKDKDDKVLPSDDCLHRTTSLPMAQNPFQIDPWGFQGEIMNSRINKSFQVQEPSMKESNANTFSEGPISAGHPSLNAWVLDRGGLSTNRLHPIEELASSYLADLSINRTQNPVIGLVDEFSNFPSSSATYTAPVPSAPLLPDNAPWYTDVIVQSTMSAPLLQENPSPINGYSAWPSTYGPLGYDTSFLFYSNGYAPPPGRITSSEWLRWYRENPPPERVNNNMQPTHLNVPGNHENFLHHDTYRFNQFDQWGNPLSPNQYTYMKPPGPQPLQPGYPCAFGAGEHITNHFHNFQRPSPYGCGSVTEQRNEPLPLLEYLKEREWRLQQDPTLRGPTYMGN

SEQ ID NO: 54020 - protein, 654 aa, Glycine max
  peptide (1)..(654): Ceres Seq. ID no. 15177205
MMELEDIKLKTVLESYGQMDLARKGPFRALQIVSILIFTLKNLIDKHEKDESKDKNDCQQLVLIQLALAAAFIFMGRFVERCQKSSPLNYCPLLPSVLVFVEWCASMLDEIEVYATDQKSETAISYFFYVLLELLNELNENRKETKKLVANSTPLWEDYELRGFVSIAFSHVSLDFSDGWEHIDNFESDTELRTQRMSEAAMRIANRSNNLQKWIISDELGRKFHSARSDDNHEKKETGNIESTDKRTSGDDPNQKTHKDNGEDGKCDTRDNPSSSSTNEEPFVVEEEEVILFRPLARYHSAPSYALFSPHEQISSPKDKDDKVLPSDDCLHRTTSLPMAQNPFQIDPWGFQGEIMNSRINKSFQVQEPSMKESNANTFSEGPISAGHPSLNAWVLDRGGLSTNRLHPIEELASSYLADLSINRTQNPVIGLVDEFSNFPSSSATYTAPVPSAPLLPDNAPWYTDVIVQSTMSAPLLQENPSPINGYSAWPSTYGPLGYDTSFLFYSNGYAPPPGRITSSEWLRWYRENPPPERVNNNMQPTHLNVPGNHENFLHHDTYRFNQFDQWGNPLSPNQYTYMKPPGPQPLQPGYPCAFGAGEHITNHFHNFQRPSPYGCGSVTEQRNEPLPLLEYLKEREWRLQQDPTLRGPTYMGN

SEQ ID NO: 54021 - protein, 653 aa, Glycine max
  peptide (1)..(653): Ceres Seq. ID no. 15177206
MELEDIKLKTVLESYGQMDLARKGPFRALQIVSILIFTLKNLIDKHEKDESKDKNDCQQLVLIQLALAAAFIFMGRFVERCQKSSPLNYCPLLPSVLVFVEWCASMLDEIEVYATDQKSETAISYFFYVLLELLNELNENRKETKKLVANSTPLWEDYELRGFVSIAFSHVSLDFSDGWEHIDNFESDTELRTQRMSEAAMRIANRSNNLQKWIISDELGRKFHSARSDDNHEKKETGNIESTDKRTSGDDPNQKTHKDNGEDGKCDTRDNPSSSSTNEEPFVVEEEEVILFRPLARYHSAPSYALFSPHEQISSPKDKDDKVLPSDDCLHRTTSLPMAQNPFQIDPWGFQGEIMNSRINKSFQVQEPSMKESNANTFSEGPISAGHPSLNAWVLDRGGLSTNRLHPIEELASSYLADLSINRTQNPVIGLVDEFSNFPSSSATYTAPVPSAPLLPDNAPWYTDVIVQSTMSAPLLQENPSPINGYSAWPSTYGPLGYDTSFLFYSNGYAPPPGRITSSEWLRWYRENPPPERVNNNMQPTHLNVPGNHENFLHHDTYRFNQFDQWGNPLSPNQYTYMKPPGPQPLQPGYPCAFGAGEHITNHFHNFQRPSPYGCGSVTEQRNEPLPLLEYLKEREWRLQQDPTLRGPTYMGN

SEQ ID NO: 54022 - DNA, 1480 bp, Glycine max; identical to SEQ ID NO: 53023
  misc_feature (1)..(1480): Ceres Seq. ID no. 14306627

SEQ ID NO: 54023 - protein, 253 aa, Glycine max; identical to SEQ ID NO: 53024
  peptide (1)..(253): Ceres Seq. ID no. 14306628

SEQ ID NO: 54024 - protein, 191 aa, Glycine max; identical to SEQ ID NO: 53025
  peptide (1)..(191): Ceres Seq. ID no. 14306629

SEQ ID NO: 54025 - DNA, 1155 bp, Glycine max
  misc_feature (1)..(1155): Ceres Seq. ID no. 14307245
aaaacaacacaccttcagccacggaatggggagacatgactttgacaaccgcgttttcttgttcgctcgccgctgcttctctctccaccgccgccagtttccgccggaataaatgcaccaccagcaagatttttcattcctcttccacgtgcatgccctctttcttgcatgatcatcactaccactctttcttattgcgagttgccaatgatgctgatagaagtgaagtgtcatctgatactgcaatcaagacatcgtattcagaagccgataagatggttgatggtatggactttggtgagctttgcaatgagtttgagtgcatcagcagtcccttggtagaatccactgcaagacaacttgcacgagatatacttgagctaagggagggaaatcgagcacttggaatctttgctgtttctgtcgcatacaaggatcctattaggagctttaccggtcgtgaaaagtataaaagacgactatgggcaaccggtgcactagacaacccatctgtgactgtgcaggaaatggtgatgctgtcaaccagtgttttaagtatcaagtggacaataagagggaaaccaaaatctgtgttaggaggagatctgataattagagttactttcaaatttactcttaaccaaattagtggccaagtcattgagcatgaagaattctgggacttatcagcttcatctgctagtgctcaggcatttttctggacatcacgtgctctctttgctgctgttgaatctgtcaaagatttgggtgacagtgctaagaatttgagtagtaaaatgtcaaccaaaaaagagaacttggagatgtatccagatccttcaggtgatccaaccaagttcttccagagggacgacagttttcaacaggatgcataccagattgcactactcctggcagttatttatttggtggtacaatttctaaggacaactttgtaaagctagcctgccattttatcaactgaacttgtatgtctttgttctccaagagttatcattataaagtgtgactatcagctcataatcatcaggtgtcatcaggttgttttgtcaaagtaaatatgttcacatttgtaagtgtacctataaactgtgacgtttccttcttttgatgccacaacctcaaaggaccact

SEQ ID NO: 54026 - protein, 318 aa, Glycine max
  peptide (1)..(318): Ceres Seq. ID no. 14307246
NNTPSATEWGDMTLTTAFSCSLAAASLSTAASFRRNKCTTSKIFHSSSTCMPSFLHDHHYHSFLLRVANDADRSEVSSDTAIKTSYSEADKMVDGMDFGELCNEFECISSPLVESTARQLARDILELREGNRALGIFAVSVAYKDPIRSFTGREKYKRRLWATGALDNPSVTVQEMVMLSTSVLSIKWTIRGKPKSVLGGDLIIRVTFKFTLNQISGQVIEHEEFWDLSASSASAQAFFWTSRALFAAVESVKDLGDSAKNLSSKMSTKKENLEMYPDPSGDPTKFFQRDDSFQQDAYQIALLLAVIYLVVQFLRTTL

SEQ ID NO: 54027 - protein, 307 aa, Glycine max
  peptide (1)..(307): Ceres Seq. ID no. 14307247
MTLTTAFSCSLAAASLSTAASFRRNKCTTSKIFHSSSTCMPSFLHDHHYHSFLLRVANDADRSEVSSDTAIKTSYSEADKMVDGMDFGELCNEFECISSPLVESTARQLARDILELREGNRALGIFAVSVAYKDPIRSFTGREKYKRRLWATGALDNPSVTVQEMVMLSTSVLSIKWTIRGKPKSVLGGDLIIRVTFKFTLNQISGQVIEHEEFWDLSASSASAQAFFWTSRALFAAVESVKDLGDSAKNLSSKMSTKKENLEMYPDPSGDPTKFFQRDDSFQQDAYQIALLLAVIYLVVQFLRTTL

SEQ ID NO: 54028 - protein, 268 aa, Glycine max
  peptide (1)..(268): Ceres Seq. ID no. 14307248
MPSFLHDHHYHSFLLRVANDADRSEVSSDTAIKTSYSEADKMVDGMDFGELCNEFECISSPLVESTARQLARDILELREGNRALGIFAVSVAYKDPIRSFTGREKYKRRLWATGALDNPSVTVQEMVMLSTSVLSIKWTIRGKPKSVLGGDLIIRVTFKFTLNQISGQVIEHEEFWDLSASSASAQAFFWTSRALFAAVESVKDLGDSAKNLSSKMSTKKENLEMYPDPSGDPTKFFQRDDSFQQDAYQIALLLAVIYLVVQFLRTTL

SEQ ID NO: 54029 - DNA, 455 bp, Glycine max
  misc_feature (1)..(455): Ceres Seq. ID no. 15227241
gtcagctacgtaggcccccccccccgagcagtatcttgccaatgttgagaaggaattggagagatggcagaatgcaaggaacgcaaggaaagttaacaatgaccagaatttacaggagacaatggacaaagagttggatactcataggctggagcatggtcccaagaaaagaaagatccctgacgaaaacaataatgacgacgatgatgatgtggaagatataaatgtgggagaggatgacatgatggatgatgaattagacgatgattctagtaggaggattgatgaaacaaccaagacggaagcaggtagtgccagttcagatcctgcagctgatgctgataatgcgggagggaagtgatcacccgcaaggacacaattttcaatagttttgagttatttatgtttttgtagtttattccttggtattctaacttttacgtatttggatttag

SEQ ID NO: 54030 - protein, 79 aa, Glycine max
  peptide (1)..(79): Ceres Seq. ID no. 15227242
MDKELDTHRLEHGPKKRKIPDENNNDDDDDVEDINVGEDDMMDDELDDDSSRRIDETTKTEAGSASSDPAADADNAGGK

SEQ ID NO: 54031 - protein, 73 aa, Glycine max
  peptide (1)..(73): Ceres Seq. ID no. 15227243
QLRRPPPPSSILPMLRRNWRDGRMQGTQGKLTMTRIYRRQWTKSWILIGWSMVPRKERSLTKTIMTTMMMWKI

SEQ ID NO: 54032 - protein, 60 aa, Glycine max
  peptide (1)..(60): Ceres Seq. ID no. 15227244
MLRRNWRDGRMQGTQGKLTMTRIYRRQWTKSWILIGWSMVPRKERSLTKTIMTTMMMWKI

SEQ ID NO: 54033 - DNA, 2168 bp, Glycine max
  misc_feature (1)..(2168): Ceres Seq. ID no. 14311361
gatcagttttcaaatcttggattcgattccatcactgatatttctcttctctctctctttctctgccgaatatggcgccgcctgcgccagcagttgaaggcggccaggcgccgcaagggcggcagcaacagccgcaaggagggtttggcctctccggaatcatacgcatggcagttttctggtacttcgcctccaaattcttttcccccaaaaaacctaccgaaccttccgctctcatctccaatctctatcagaaggcacagcctctggatatgtggctttatctttccgagtacgagaagttcaatgactttggtagtgaaagttctcttgtatggcatgaaaccaatattccgtatgccgtttggggacctgagagtaccaggactctaactttgaagtatcatccgtctgagtctttgaagcataatgggagtctatatgctcatgttttctttgcacactctggcttttcgcctgacccaagtgatccagaataccagcctcaagcagcatttggaaggacgcatcctgttgtgatgtacttgcccaagtcacaagcagataaaaagaaaagtctgttgggaggttcaccagattctagtgaggctcaagtgacatccaaggtggttgatgaatctgaagatgatgattctaatgatgatggtcctgtggagtgggcttcatattggaaaccaaatataacaataaacttggttgctgacttcactcagtacccaaaaacaggtgtagcaccaaacattgctccatacttgaacatcgatccttttactgggaactactatccaattgtttatttcaatgagttctggttactcagggataagctgatacctttaaacgagacagtgactgaattatcacttaacctggaagttggtcccattagtatgacaaagtggcagttattcctgcagattgaccagtccttccagattcaccgtagttattgaagcatgcttgaaggcgaggctgatgaactcaagagggtattcttggaagggaatccttacctcctggcaattaccatggttgtttctcttcttcattcagtctttgacttcttggctttcaagaatgacatccaattttggaacaaaaataaatctatggaaggactctctgcaaagaccgttgttgtgagctttgcttgtcagcttatcatcttcctttatctacttgacaatgacacctcttggatgattcttgcaagctctggaattggttgtgttattgagttttggaaaattggtaaagccatgcgcatagagattgataggacaggaaggatacctatgttgaagctccgcgatcgagaatcatacgtacggaataagacaaaggaatatgatgatattgctatgaagtatttgttctatgttttatttctccttgttgctggcttttctgtttactcactgatgtatgagcgtcacaagagctggtattcttggattttgtcttcgctcacaagttgtgtatacatgtttggttttattatgatgtgccctcaattgttcatcaactacaagctcaaatctgttgctcatctaccttggaggcaaatgacttacaagtttctcaacaccataattgatgacctttttgcctttgtcattaaaatgccaacactccatcggctttctgtcttccgtgatgatcttatctttgtcatatacttataccagaggtggatttataaagtggacaagaaacgtgttaacgaatttggttttggaggtgaggatgatcaggctgtggcagagacagacgctgcaaaggaagaagagaagaaaactaattgatttggttttctctcaacaatttgagaaaattttacagtagatacttaatactgtagaattcaacggggattgatttgtttttctccccttttgttacacatttgcaattagatttttgttgaaagaaagctctagtttggccctttctactggaatttttactagtaccgaaggatggagggaatttaactactgagaccttcatggttgactgtaagggtcataacagctttttagttgcccttctgtagtttttctttaatctcaaatgtcttttagtttgtgacagataacccttttatgtattattttcttccactcatgtatttttcactaatttat

SEQ ID NO: 54034 - protein, 300 aa, Glycine max
  peptide (1)..(300): Ceres Seq. ID no. 14311362
MAPPAPAVEGGQAPQGRQQQPQGGFGLSGIIRMAVFWYFASKFFSPKKPTEPSALISNLYQKAQPLDMWLYLSEYEKFNDFGSESSLVWHETNIPYAVWGPESTRTLTLKYHPSESLKHNGSLYAHVFFAHSGFSPDPSDPEYQPQAAFGRTHPVVMYLPKSQADKKKSLLGGSPDSSEAQVTSKVVDESEDDDSNDDGPVEWASYWKPNITINLVADFTQYPKTGVAPNIAPYLNIDPFTGNYYPIVYFNEFWLLRDKLIPLNETVTELSLNLEVGPISMTKWQLFLQIDQSFQIHRSY

SEQ ID NO: 54035 - protein, 282 aa, Glycine max
  peptide (1)..(282): Ceres Seq. ID no. 14311363
MLEGEADELKRVFLEGNPYLLAITMVVSLLHSVFDFLAFKNDIQFWNKNKSMEGLSAKTVVVSFACQLIIFLYLLDNDTSWMILASSGIGCVIEFWKIGKAMRIEIDRTGRIPMLKLRDRESYVRNKTKEYDDIAMKYLFYVLFLLVAGFSVYSLMYERHKSWYSWILSSLTSCVYMFGFIMMCPQLFINYKLKSVAHLPWRQMTYKFLNTIIDDLFAFVIKMPTLHRLSVFRDDLIFVIYLYQRWIYKVDKKRVNEFGFGGEDDQAVAETDAAKEEEKKTN

SEQ ID NO: 54036 - protein, 268 aa, Glycine max
  peptide (1)..(268): Ceres Seq. ID no. 14311364
MAVFWYFASKFFSPKKPTEPSALISNLYQKAQPLDMWLYLSEYEKFNDFGSESSLVWHETNIPYAVWGPESTRTLTLKYHPSESLKHNGSLYAHVFFAHSGFSPDPSDPEYQPQAAFGRTHPVVMYLPKSQADKKKSLLGGSPDSSEAQVTSKVVDESEDDDSNDDGPVEWASYWKPNITINLVADFTQYPKTGVAPNIAPYLNIDPFTGNYYPIVYFNEFWLLRDKLIPLNETVTELSLNLEVGPISMTKWQLFLQIDQSFQIHRSY

SEQ ID NO: 54037 - DNA, 1979 bp, Glycine max
  misc_feature (1)..(1979): Ceres Seq. ID no. 15175923
ccggtgagtatcaacaagaatactcataataatatagtggctagcatagagctagtaataatattaatattgttaagctagctctaagccatggctaatgaacgtgatctgttctcggcggagattgtgaaccgtggaattgaatcgtcaggaccaaacgctgggtcgttgacgttttcggtgagggtgagaaggcgcttaccggattttcttcaatcggtgaaccttaagtacgtgaaattgggttaccattatctgataaaccatggcatatacttgttcaccataccggttcttctcgtggtgtttagtgctgaggttggaagcctcagcaaagaggacctatggaagaagctttgggaagacgcgcgttacgaccttgctacggttcttgcttcctttggggtcttcgttttcaccttgtctgtctacttcatgtcgaggccacgtcccatttacctcattgattttgcatgttataaacccgatgatgaactcaaggtgtcaagggagcagttgatggaggtagcaagaaaatcaggcaagttcgacgaagcgagtctggagttccagaagaggatgctgatgtcctccggaatcggcgacgagacctacatcccgaaggccgtcgtggcctccacggagaacacggcgacaatgaaagaggggcgcggcgaggcctccatggtgatgttcggagccctggacgagctgttcgagaaaagccgcgtccgaccaaaggacgtgggcgtcctagtagtgaactgcagcatcttcaacccgacaccatcactctcagcgatgatcataaaccactacaagatgagagggaacattctgagctacaacctcggcggaatggggtgcagcgcggggatcattggtgtggacttggccaaggatattctccaggcgaaccctaataactacgcggtggtggtgagcacggagatggtggggtacaactggtaccaggggaaggacaggtctatgcttatcccgaatagcttcttccgcatggggtgttctgctgttctgctttccaaccgtcgaagggactatagccgcgcaaagtaccgtcttgaacacattgttcgcacgcataagggtgccgatgaccgcagcttcaggtgtgtttaccaagaggaagatgagcaaaaactcaagggactaaagatcagcaaagacttgattgagattggtggtgatgctctaaaaaccaacatcaccacactaggacccttggtgctacccttttctgagcagcttctcttctttgccacttttgtgtggaggcacttatttggcagcaaaaatggtgggaattcaccctcaatgaagaagccttacattcctgactacaaactagcttttgagcacttttgtgtgcatgctgcaagcaagaccattcttgatgagcttcaaaggaacttggaactgagtgacaagaacatcgaagcgtctagaatgacgctgcatcgctttggcaacacctctagcagcagcatttggtatgagttggcttacatggaagcaaaggagagtgttagaagaggagaccgtgtttggcaactcgcatttggctctggcttcaagtgcaacagtgtggtttggcgcgccatgcgccgagtcaccaagccttctaggaacccttggcttgattgcatcaacagatatcctgcacctctcaacaactgaagcagaatttgacggcactagtgttatgaatcttattatcagtgagggtatgcttaggatcaataagggtagtactaatttggtcttcaaaaatgttacagctgttttctgtttctttctcatttaattattcctggcttgaaattctatacttttaattcctcattaggcatatggatgcctccttgtttaatttctctgtttcttcataggatgattgatatcaaagttcatggatggctattacctatggtcaatgctacttgtctcatgttttattc

SEQ ID NO: 54038 - protein, 535 aa, Glycine max
  peptide (1)..(535): Ceres Seq. ID no. 15175924
MANERDLFSAEIVNRGIESSGPNAGSLTFSVRVRRRLPDFLQSVNLKYVKLGYHYLINHGIYLFTIPVLLVVFSAEVGSLSKEDLWKKLWEDARYDLATVLASFGVFVFTLSVYFMSRPRPIYLIDFACYKPDDELKVSREQLMEVARKSGKFDEASLEFQKRMLMSSGIGDETYIPKAVVASTENTATMKEGRGEASMVMFGALDELFEKSRVRPKDVGVLVVNCSIFNPTPSLSAMIINHYKMRGNILSYNLGGMGCSAGIIGVDLAKDILQANPNNYAVVVSTEMVGYNWYQGKDRSMLIPNSFFRMGCSAVLLSNRRRDYSRAKYRLEHIVRTHKGADDRSFRCVYQEEDEQKLKGLKISKDLIEIGGDALKTNITTLGPLVLPFSEQLLFFATFVWRHLFGSKNGGNSPSMKKPYIPDYKLAFEHFCVHAASKTILDELQRNLELSDKNIEASRMTLHRFGNTSSSSIWYELAYMEAKESVRRGDRVWQLAFGSGFKCNSVVWRAMRRVTKPSRNPWLDCINRYPAPLNN

SEQ ID NO: 54039 - protein, 420 aa, Glycine max
  peptide (1)..(420): Ceres Seq. ID no. 15175925
MSRPRPIYLIDFACYKPDDELKVSREQLMEVARKSGKFDEASLEFQKRMLMSSGIGDETYIPKAVVASTENTATMKEGRGEASMVMFGALDELFEKSRVRPKDVGVLVVNCSIFNPTPSLSAMIINHYKMRGNILSYNLGGMGCSAGIIGVDLAKDILQANPNNYAVVVSTEMVGYNWYQGKDRSMLIPNSFFRMGCSAVLLSNRRRDYSRAKYRLEHIVRTHKGADDRSFRCVYQEEDEQKLKGLKISKDLIEIGGDALKTNITTLGPLVLPFSEQLLFFATFVWRHLFGSKNGGNSPSMKKPYIPDYKLAFEHFCVHAASKTILDELQRNLELSDKNIEASRMTLHRFGNTSSSSIWYELAYMEAKESVRRGDRVWQLAFGSGFKCNSVVWRAMRRVTKPSRNPWLDCINRYPAPLNN

SEQ ID NO: 54040 - protein, 392 aa, Glycine max
  peptide (1)..(392): Ceres Seq. ID no. 15175926
MEVARKSGKFDEASLEFQKRMLMSSGIGDETYIPKAVVASTENTATMKEGRGEASMVMFGALDELFEKSRVRPKDVGVLVVNCSIFNPTPSLSAMIINHYKMRGNILSYNLGGMGCSAGIIGVDLAKDILQANPNNYAVVVSTEMVGYNWYQGKDRSMLIPNSFFRMGCSAVLLSNRRRDYSRAKYRLEHIVRTHKGADDRSFRCVYQEEDEQKLKGLKISKDLIEIGGDALKTNITTLGPLVLPFSEQLLFFATFVWRHLFGSKNGGNSPSMKKPYIPDYKLAFEHFCVHAASKTILDELQRNLELSDKNIEASRMTLHRFGNTSSSSIWYELAYMEAKESVRRGDRVWQLAFGSGFKCNSVVWRAMRRVTKPSRNPWLDCINRYPAPLNN

SEQ ID NO: 54041 - DNA, 916 bp, Glycine max
  misc_feature (1)..(916): Ceres Seq. ID no. 14307030
gatttttgaaaatggtaccatcccagtttcagattcatttccaaaactatcagatttgaacattgactattgcaaggatatggtggaattacctactgggatctgtgatattaccccactaaagaagctcagtattactaattgccacaagcttagttctctgccccaaaacattggaaagttgttgaatttggaactcctgaacctaagttcctgcactgatttggaagagataccagattctattgtaaaactttctaagctaagacttcttgacctctcaaactgcataagcctttcaattttaccagaggacattggtgatctatgcaatctcaggaatctcaatatgacaagctgtgcaaggtgtgaattgccgtactcagtaaccaatcttgagaatttaaaagtggtggtatgtgatgaagagacagctgcttcatgggaagcatttgaagctatgcttccaaatctgaagttagaggttcctcgagttgaggttaacttaaactggcttcattcaattagctcttaagacatgtcctgcttcatggaaagcatttgaagctatgctttcccaatctcaagtttgaggttcctcaagttgatgttaactgaagctggtttcattcaatttgctcctatgacctctttctataaaaatgttagaccaatgatcgtaactgtttcatgtgaaataatcttgtttaaaatagggataataaatgtgtattcaagttgctgtagtagtatttgcatgtcgtgcaaacagtactatgctacttgaaagaagttggtgattttatgtgttgtgtgttgtcacgattggacatcttagcataatgatgccaacaaaataattgaactatgataacttcaaaagtttgtttttatgaagtaggttttcttatcttcg

SEQ ID NO: 54042 - protein, 177 aa, Glycine max
  peptide (1)..(177): Ceres Seq. ID no. 14307031
IFENGTIPVSDSFPKLSDLNIDYCKDMVELPTGICDITPLKKLSITNCHKLSSLPQNIGKLLNLELLNLSSCTDLEEIPDSIVKLSKLRLLDLSNCISLSILPEDIGDLCNLRNLNMTSCARCELPYSVTNLENLKVVVCDEETAASWEAFEAMLPNLKLEVPRVEVNLNWLHSISS

SEQ ID NO: 54043 - protein, 151 aa, Glycine max
  peptide (1)..(151): Ceres Seq. ID no. 14307032
MVELPTGICDITPLKKLSITNCHKLSSLPQNIGKLLNLELLNLSSCTDLEEIPDSIVKLSKLRLLDLSNCISLSILPEDIGDLCNLRNLNMTSCARCELPYSVTNLENLKVVVCDEETAASWEAFEAMLPNLKLEVPRVEVNLNWLHSISS

SEQ ID NO: 54044 - DNA, 1372 bp, Glycine max
  misc_feature (1)..(1372): Ceres Seq. ID no. 14310394
gggaagctcaatttcccataggcatctatctccatactctgacagacacacaaaatttgagagaaaaaaaaccatcatcacaagagagtcacatgagaattgaaatggccacaaaacaagttacttctatggttcatgtagatgatgactacattgacatggaactatgttcctccccaaacttcttctcttattcccttagctctccaccatccaacagagagtttgaattccaaatgagtgaaaaagagtcatcaacttctccagctgatgatctcttctacaagggaaaactccttcctcttcaccttccccctcgtttgcaaatggttcaaaagctcgtagaaaactccaccaatgccaactttgagtacatcaaatcagattcagctttggaacacagaacctttcccttcaccactgaccttagagtgccttcaacaaatgccaacaccccttttgaatccaacatctctccttcagaatcacgccgtgtgagcagtgatgtgagcccaaatgaataccaactggggtggttttctgacatgaacaagtacaaccttattggtgatcttcctaagaagtcttggcccaagaaactgaaacagatgaagcagttctggcttggtcagagactcaaggcctcaagggcttacctgaaaactttattcaacaaatctggttgctcagacaagttctgcgccagtgctgcagcaagcaacaacattggagcggagaagaagtcatcaaggtgcaaagagtgtcagaacaagtacatgaaggttgcaaggagaaacccttttgagagtttctatgatggcaagcaccaggtaacttgttctatcatgaagagcatcaaaagagagatgcttgaagttgaagatgatttctgtgaccacaggaggtctttctctggggttggtcagcgacattgttccacaaaggcttcatctttgtccacatcttcatccgggtcctcttcttcgtcttcatctttttctttcagctcagctgggtactatgatttgcaacttttcaagaggagcatcagcgcgaattatgagttggaaagttcaattgagggagccattgctcattgcaaacagtctctgcagcagtgtggttcaaagaatggttcggatgatagcaggatttgttcttaatttgctaccaaaatgcaattggtgggaattagtgaatggccacactagccaacaccatagtgtgtgtgggtgtgtagaggggtgatagtgttgactgttgaaaaaaccttgtaagagaagaaagaggcatttttagttgaaatgctgtagcattttgatggagtttactgtttaaattaatagcttgggttttccagcattaatttgtc

SEQ ID NO: 54045 - protein, 386 aa, Glycine max
  peptide (1)..(386): Ceres Seq. ID no. 14310395
EAQFPIGIYLHTLTDTQNLREKKPSSQESHMRIEMATKQVTSMVHVDDDYIDMELCSSPNFFSYSLSSPPSNREFEFQMSEKESSTSPADDLFYKGKLLPLHLPPRLQMVQKLVENSTNANFEYIKSDSALEHRTFPFTTDLRVPSTNANTPFESNISPSESRRVSSDVSPNEYQLGWFSDMNKYNLIGDLPKKSWPKKLKQMKQFWLGQRLKASRAYLKTLFNKSGCSDKFCASAAASNNIGAEKKSSRCKECQNKYMKVARRNPFESFYDGKHQVTCSIMKSIKREMLEVEDDFCDHRRSFSGVGQRHCSTKASSLSTSSSGSSSSSSSFSFSSAGYYDLQLFKRSISANYELESSIEGAIAHCKQSLQQCGSKNGSDDSRICS

SEQ ID NO: 54046 - protein, 356 aa, Glycine max
  peptide (1)..(356): Ceres Seq. ID no. 14310396
MRIEMATKQVTSMVHVDDDYIDMELCSSPNFFSYSLSSPPSNREFEFQMSEKESSTSPADDLFYKGKLLPLHLPPRLQMVQKLVENSTNANFEYIKSDSALEHRTFPFTTDLRVPSTNANTPFESNISPSESRRVSSDVSPNEYQLGWFSDMNKYNLIGDLPKKSWPKKLKQMKQFWLGQRLKASRAYLKTLFNKSGCSDKFCASAAASNNIGAEKKSSRCKECQNKYMKVARRNPFESFYDGKHQVTCSIMKSIKREMLEVEDDFCDHRRSFSGVGQRHCSTKASSLSTSSSGSSSSSSSFSFSSAGYYDLQLFKRSISANYELESSIEGAIAHCKQSLQQCGSKNGSDDSRICS

SEQ ID NO: 54047 - protein, 352 aa, Glycine max
  peptide (1)..(352): Ceres Seq. ID no. 14310397
MATKQVTSMVHVDDDYIDMELCSSPNFFSYSLSSPPSNREFEFQMSEKESSTSPADDLFYKGKLLPLHLPPRLQMVQKLVENSTNANFEYIKSDSALEHRTFPFTTDLRVPSTNANTPFESNISPSESRRVSSDVSPNEYQLGWFSDMNKYNLIGDLPKKSWPKKLKQMKQFWLGQRLKASRAYLKTLFNKSGCSDKFCASAAASNNIGAEKKSSRCKECQNKYMKVARRNPFESFYDGKHQVTCSIMKSIKREMLEVEDDFCDHRRSFSGVGQRHCSTKASSLSTSSSGSSSSSSSFSFSSAGYYDLQLFKRSISANYELESSIEGAIAHCKQSLQQCGSKNGSDDSRICS

SEQ ID NO: 54048 - DNA, 1221 bp, Glycine max
  misc_feature (1)..(1221): Ceres Seq. ID no. 14311419
agcagatggcactggcagagaaatatcggaataaaggaaatgattctaagggtcatccaatgaaacaatgtactacacgtccagtgccgatgacttcacaaattccaccatgcgcttcatcacatgctatatctcgtcccaccgatccatttgctaggacatctgatgtgagagatccaccttctatacagggagtgcactcaccatgtacttcacaaccaacaaatttagatgcaggacatacccttagatcatttgttgcattagagacacaaaacaacgatggcaagccaattatataccttagtggacaaggattcttaccttcacgccctgttgctaatgagattggggatatcctcaagagtcattatactgatccctggtcatcatggaagaagataccaattatcacaagagacttgtggctcggagagtttttgagaaagttttctatttgtccaccggattacaattgggcaaaaaagaattttgaaatacaaggtgcagcaatgatgaaaaatattctaaatgaggctcgaaccacaatgaataaaccaaattgggtcaaagacgatgtttgggagagattatgtgagcattggaaatctgaagaattaaaaaagaagagcacccaagctaatatgagtaaagagactggcacccttcctactccattggacttgtttcgtctcaagcatcaactttcagacaacacatgggtggatatacaggaggaatttgcacgaacattggaacaattgaccaaaagtgcatttgcgcaaggaaatcctccaccaagtgagtcagatgtctggcatgctatagttagaaagaaggggcttggaatggtaggaaggccttgctatcatggctcatcttcatcaatggagtgggtaaaaagacaagattttgatgaattaagaaaaaaaatgaaagaaattagaaatgaaagagataggcttcaaagtagagttgcaaacattgagaggcttgccgagcataacaatgcattgattcgagaattgatggaaagtatgaacaagccatctacaatagatgaaagtcaagatgaggatgggagtaactgagtgaaccataatgactcattgatgctgatttacctttaatgtgattatgtctaaaggcaaatgtcctgtactttggatattaatgtattcatagttaaaaaattgctaatttaaaaaaaaaaaaaaaaag

SEQ ID NO: 54049 - protein, 362 aa, Glycine max
  peptide (1)..(362): Ceres Seq. ID no. 14311420
QMALAEKYRNKGNDSKGHPMKQCTTRPVPMTSQIPPCASSHAISRPTDPFARTSDVRDPPSIQGVHSPCTSQPTNLDAGHTLRSFVALETQNNDGKPIIYLSGQGFLPSRPVANEIGDILKSHYTDPWSSWKKIPIITRDLWLGEFLRKFSICPPDYNWAKKNFEIQGAAMMKNILNEARTTMNKPNWVKDDVWERLCEHWKSEELKKKSTQANMSKETGTLPTPLDLFRLKHQLSDNTWVDIQEEFARTLEQLTKSAFAQGNPPPSESDVWHAIVRKKGLGMVGRPCYHGSSSSMEWVKRQDFDELRKKMKEIRNERDRLQSRVANIERLAEHNNALIRELMESMNKPSTIDESQDEDGSN

SEQ ID NO: 54050 - protein, 361 aa, Glycine max
  peptide (1)..(361): Ceres Seq. ID no. 14311421
MALAEKYRNKGNDSKGHPMKQCTTRPVPMTSQIPPCASSHAISRPTDPFARTSDVRDPPSIQGVHSPCTSQPTNLDAGHTLRSFVALETQNNDGKPIIYLSGQGFLPSRPVANEIGDILKSHYTDPWSSWKKIPIITRDLWLGEFLRKFSICPPDYNWAKKNFEIQGAAMMKNILNEARTTMNKPNWVKDDVWERLCEHWKSEELKKKSTQANMSKETGTLPTPLDLFRLKHQLSDNTWVDIQEEFARTLEQLTKSAFAQGNPPPSESDVWHAIVRKKGLGMVGRPCYHGSSSSMEWVKRQDFDELRKKMKEIRNERDRLQSRVANIERLAEHNNALIRELMESMNKPSTIDESQDEDGSN

SEQ ID NO: 54051 - protein, 343 aa, Glycine max
  peptide (1)..(343): Ceres Seq. ID no. 14311422
MKQCTTRPVPMTSQIPPCASSHAISRPTDPFARTSDVRDPPSIQGVHSPCTSQPTNLDAGHTLRSFVALETQNNDGKPIIYLSGQGFLPSRPVANEIGDILKSHYTDPWSSWKKIPIITRDLWLGEFLRKFSICPPDYNWAKKNFEIQGAAMMKNILNEARTTMNKPNWVKDDVWERLCEHWKSEELKKKSTQANMSKETGTLPTPLDLFRLKHQLSDNTWVDIQEEFARTLEQLTKSAFAQGNPPPSESDVWHAIVRKKGLGMVGRPCYHGSSSSMEWVKRQDFDELRKKMKEIRNERDRLQSRVANIERLAEHNNALIRELMESMNKPSTIDESQDEDGSN

SEQ ID NO: 54052 - DNA, 1174 bp, Glycine max
  misc_feature (1)..(1174): Ceres Seq. ID no. 12581709
cagctacgtaggccccccccctatatatatatatatatatattttaatcaacgatattatgtcagtagctcttaaagagtaaacttaaagtatcaagagtgttatggttctattcattatgtgtctgctttgtgctttgttgattcatcatgttaaattaagcaacacatacaatacaaactatgaatatggaatgttacgatgctacagtgattggaaaatgagctgcttcaaatgcttgaacttgtatagggtcattgagttgatgaaattgaatgatatattttgaattttcaatctatacattaatcgtaatacatataatgtgatatggccactttttagtgtatgcagctggagtaacctctactgctttaaactaacatgttgctgattcagaacctaattaataattgtcctctaaaatagttaaaatttaaaccctgacagttagggtttgaacagaggatgactgccgcatagttctctagtcaattgttggtaagtttttaaatgcaacaggctcagggagcatgacacatggatcacccctacgctgtctggagatactattaaaaagttaattgatcttgcacaaactgagcttgacattataattcctactctgccatctatatctaattatctatactaaatctgatatataacacgctatctctagtatagtaatctctaacgagacttaaaatggccatgcaggtgcttgggatgcagttgtaacttgtttctttatcgatactgctcataatattgttgagtacattgaaataatttcaaaaattttgaaagatgggggagtttggataaatttgggacctctactttatcactttgcagatatgtatggacaggatgatgaaatgtccattgaattgagtttggaagatgttaagagggttgcatttcattatggatttgaatttgagaatgaaagaactattgagacaacttacaccgcaaattctagatcaatgatgcaaaatcgttactttgctgcattttggacaatgagaaaaaaatctgctgcagtgcagcagcaagtgccctgagaatagctgattcaattattgtgatataaagtacaaattagctctcttttacttggtcatgccttgtacttttccttgttggagtgaggaactttccttaattc

SEQ ID NO: 54053 - protein, 69 aa, Glycine max
  peptide (1)..(69): Ceres Seq. ID no. 12581710
MYGQDDEMSIELSLEDVKRVAFHYGFEFENERTIETTYTANSRSMMQNRYFAAFWTMRKKSAAVQQQVP

SEQ ID NO: 54054 - protein, 62 aa, Glycine max
  peptide (1)..(62): Ceres Seq. ID no. 12581711
MSIELSLEDVKRVAFHYGFEFENERTIETTYTANSRSMMQNRYFAAFWTMRKKSAAVQQQVP

SEQ ID NO: 54055 - protein, 61 aa, Glycine max
  peptide (1)..(61): Ceres Seq. ID no. 12581712
MVLFIMCLLCALLIHHVKLSNTYNTNYEYGMLRCYSDWKMSCFKCLNLYRVIELMKLNDIF

SEQ ID NO: 54056 - DNA, 1545 bp, Glycine max
  misc_feature (1)..(1545): Ceres Seq. ID no. 14311334
acatagctttttcttttgcgcacctgagcttcgtttcgacggagaacaaataacgcaacccacccaaggttcgcatcgcatcgcatcgcatcatggcccaagacaaaaaggagcgtaaaaggagcatgaagaagaagcagaaccaatctctgacaactctgcctcaggaattgatcagagaaattcttctgagattaccggtgaaatctcttctgcgtttcaagtgcgtctgtaagtcgtttctgtctctgatttcggatccccaatttgtgatttcccattatgccctagctgcctcgcccacccatagattaattcttatatcacatgatttttatgctcaatccatcgccacggaatcagtgttcaaaacctgtagccgagacgtggtttatttccctctccctcttccatcaattccatgccttcgccttgacgattttggcattcgacccaagattttgggttcatgcagaggccttgtacttctatactatgacgacagcgcaaatctcattctgtggaatccgtcccttggccgtcacaaacgattgccaaactacagggatgacataacttcattcccatatggttttggctatgacgaatcaaaagatgagtacttgctgattctaattggattgcccaagtttggacctgaaactggagctgacatctactccttcaaaaccgagtcttggaaaacagacactattgtttatgatccattagttaggtataaggctgaggatagaatagccagagcagggtcgctcctcaatggggctcttcattggtttgttttctcggagagcaaagaggatcatgtgattatcgcctttgatctcgtggaaaggactctatcggagattcctcttcctctcgctgatcgttctactgtgcaaaaagatgcagtttatggtctgagaataatgggagggtgtctcagtgtgtgttgctccagctgtggaatgactgagatatgggtgatgaaggaatataaagtgcggtcatcttggactatgacctttcttatccatacttctaatcggatttccccaatatgcacaatcaaagatggtgagattttaggatcaaattgcgcgggaactggaagattagagaaacgcaatgacaaaggagagctgcttgagcatttcatggacaccaaaggtcaacggttcagctgtgccaatctacaggctgctatgtatacagagagtctactgccactcccaacgtcattttgggaaacaagtgaagaggactaactgtaatagacaacaaaaatcagggccatgaaatatgcaaaataatgtagacagtatcttgatgtcactttcctataaatggtgaagctgttggtagaaggcattgcacttgggagagaatggcatatatatgatattaaattatctattgttggggtagaactagtggagctaacttcacctagtggaataaggctttattgctgttgttgcagtgtagaactagtgtcagttttaatgctatttcaataaagttggagtttgaagaaacttt

SEQ ID NO: 54057 - protein, 392 aa, Glycine max
  peptide (1)..(392): Ceres Seq. ID no. 14311335
MAQDKKERKRSMKKKQNQSLTTLPQELIREILLRLPVKSLLRFKCVCKSFLSLISDPQFVISHYALAASPTHRLILISHDFYAQSIATESVFKTCSRDVVYFPLPLPSIPCLRLDDFGIRPKILGSCRGLVLLYYDDSANLILWNPSLGRHKRLPNYRDDITSFPYGFGYDESKDEYLLILIGLPKFGPETGADIYSFKTESWKTDTIVYDPLVRYKAEDRIARAGSLLNGALHWFVFSESKEDHVIIAFDLVERTLSEIPLPLADRSTVQKDAVYGLRIMGGCLSVCCSSCGMTEIWVMKEYKVRSSWTMTFLIHTSNRISPICTIKDGEILGSNCAGTGRLEKRNDKGELLEHFMDTKGQRFSCANLQAAMYTESLLPLPTSFWETSEED

SEQ ID NO: 54058 - protein, 381 aa, Glycine max
  peptide (1)..(381): Ceres Seq. ID no. 14311336
MKKKQNQSLTTLPQELIREILLRLPVKSLLRFKCVCKSFLSLISDPQFVISHYALAASPTHRLILISHDFYAQSIATESVFKTCSRDVVYFPLPLPSIPCLRLDDFGIRPKILGSCRGLVLLYYDDSANLILWNPSLGRHKRLPNYRDDITSFPYGFGYDESKDEYLLILIGLPKFGPETGADIYSFKTESWKTDTIVYDPLVRYKAEDRIARAGSLLNGALHWFVFSESKEDHVIIAFDLVERTLSEIPLPLADRSTVQKDAVYGLRIMGGCLSVCCSSCGMTEIWVMKEYKVRSSWTMTFLIHTSNRISPICTIKDGEILGSNCAGTGRLEKRNDKGELLEHFMDTKGQRFSCANLQAAMYTESLLPLPTSFWETSEED

SEQ ID NO: 54059 - DNA, 1829 bp, Glycine max
  misc_feature (1)..(1829): Ceres Seq. ID no. 14307363
gaggcatcgaactcaaacattatcggtggacagaaacaccactgaacgaggttgcttgctccgacgccgaaatgaaagccccttcctctcttttcctcaaaggccacgttctcccttcttccatttttctcctcagaaactccaaaggaacacccaatgtgaaaatgcaccccatctggtgcttatgtaaagccattcaaactaattcatatgaaatttccaatggaagctatcatcccactgtgcaacaaacaacagaaaagaagacaatggaaaagctatccaggaaagttgaatctattggggcatttcaaaagttgcccatagtgatgccatctattgacattattggctctgcactcagaaaggcgaggaaggtttctccaacgaaaggaattgccaacattgcgaaaagggagaaaaataagggtgcaaagcaacttgatgcgttgatgaaagaaattgctgttcccttgaggacgtatgtggagaattttcctaacaaaatgcatcttcatccttatgagagatctcttattgagctgacacttggagatggatactacgaaatggtgctacgaaaggtagacagtttaaggaagagggtagtatctgttggaaaggaacatgcttcactttgcgctaagtcttcatcaaagcgagaagcagaggaaaggctgaatgaggggcttaagaaaattgaagagatttttgctcaagaacgaaaagttgttgatgatttgttaggcatagccaagactctcagggcaatgcctgtaattaatttggaaacaccaactctctgccttgttggagctcctaatgtaggcaaatcttctttggtccatgtactctctactggcaagcctgagatttgtaactatcccttcacaacaagaggaattcttatgggtcatattattttaaactttcagaagtttcaggtaacagatactccgggcctgctaaggagacatgatgaggacaggaataatttggaaaagttgactctggctgtcctttcgcacctgccgacagcagttttgtatgtccatgacctttctggggagtgtggcacctcaccttctgatcagttttcaatatacaaagaactcagagaaaggttcaatggacatttatggcttgatgtcgtgtcaaaatctgatttgttgaagacgtctcctgtagtctatgcaacagacgagcctcatccctcccaactcgagcttgaaaagtaccggaaatcaggtcccaatggagctattaacgtatctgtcaaaacacaaggagggctacatgagctaaagcagagagtgcatgaactgcttaatttgcagatggccaagataaatgatataagcaacaaccaggagaagtgaaaggtgtcactccactaagggttgatatcaaacttgtgaagaaacttcctgatcaaatagggaagtctgaaaccttcatgagccagaagcttatctttgtaaaatatgttagcagctctgtggccagcctccaagcaggaaaagaagcaaaggcttcttaattaataccttcaagcaattaagcattggtaggttgagcatacgaaacttccagaaaatgttcagtcacttttagctttgttgaggagatcatgttccacccgtattgggccttcttgaagaaacaataaatgcttgtttatcaacttttcagttcattgattgtcattggcttcaatcatgtgtcttaacttcttaagtccattgtcagaagtcttcataaattggttaatgttaagatctgaattgatattgagatataatgtattgatatattagatatgttcatag

SEQ ID NO: 54060 - protein, 458 aa, Glycine max
  peptide (1)..(458): Ceres Seq. ID no. 14307364
GIELKHYRWTETPLNEVACSDAEMKAPSSLFLKGHVLPSSIFLLRNSKGTPNVKMHPIWCLCKAIQTNSYEISNGSYHPTVQQTTEKKTMEKLSRKVESIGAFQKLPIVMPSIDIIGSALRKARKVSPTKGIANIAKREKNKGAKQLDALMKEIAVPLRTYVENFPNKMHLHPYERSLIELTLGDGYYEMVLRKVDSLRKRVVSVGKEHASLCAKSSSKREAEERLNEGLKKIEEIFAQERKVVDDLLGIAKTLRAMPVINLETPTLCLVGAPNVGKSSLVHVLSTGKPEICNYPFTTRGILMGHIILNFQKFQVTDTPGLLRRHDEDRNNLEKLTLAVLSHLPTAVLYVHDLSGECGTSPSDQFSIYKELRERFNGHLWLDVVSKSDLLKTSPVVYATDEPHPSQLELEKYRKSGPNGAINVSVKTQGGLHELKQRVHELLNLQMAKINDISNNQEK

SEQ ID NO: 54061 - protein, 435 aa, Glycine max
  peptide (1)..(435): Ceres Seq. ID no. 14307365
MKAPSSLFLKGHVLPSSIFLLRNSKGTPNVKMHPIWCLCKAIQTNSYEISNGSYHPTVQQTTEKKTMEKLSRKVESIGAFQKLPIVMPSIDIIGSALRKARKVSPTKGIANIAKREKNKGAKQLDALMKEIAVPLRTYVENFPNKMHLHPYERSLIELTLGDGYYEMVLRKVDSLRKRVVSVGKEHASLCAKSSSKREAEERLNEGLKKIEEIFAQERKVVDDLLGIAKTLRAMPVINLETPTLCLVGAPNVGKSSLVHVLSTGKPEICNYPFTTRGILMGHIILNFQKFQVTDTPGLLRRHDEDRNNLEKLTLAVLSHLPTAVLYVHDLSGECGTSPSDQFSIYKELRERFNGHLWLDVVSKSDLLKTSPVVYATDEPHPSQLELEKYRKSGPNGAINVSVKTQGGLHELKQRVHELLNLQMAKINDISNNQEK

SEQ ID NO: 54062 - protein, 404 aa, Glycine max
  peptide (1)..(404): Ceres Seq. ID no. 14307366
MHPIWCLCKAIQTNSYEISNGSYHPTVQQTTEKKTMEKLSRKVESIGAFQKLPIVMPSIDIIGSALRKARKVSPTKGIANIAKREKNKGAKQLDALMKEIAVPLRTYVENFPNKMHLHPYERSLIELTLGDGYYEMVLRKVDSLRKRVVSVGKEHASLCAKSSSKREAEERLNEGLKKIEEIFAQERKVVDDLLGIAKTLRAMPVINLETPTLCLVGAPNVGKSSLVHVLSTGKPEICNYPFTTRGILMGHIILNFQKFQVTDTPGLLRRHDEDRNNLEKLTLAVLSHLPTAVLYVHDLSGECGTSPSDQFSIYKELRERFNGHLWLDVVSKSDLLKTSPVVYATDEPHPSQLELEKYRKSGPNGAINVSVKTQGGLHELKQRVHELLNLQMAKINDISNNQEK

SEQ ID NO: 54063 - DNA, 1272 bp, Glycine max
  misc_feature (1)..(1272): Ceres Seq. ID no. 12611994
aaatgttattcctgatcctctttggagaaatgaattgatcccaggggctctgtgatttgatcagcagatagagattgaacatttgcagcgaaaagggaaagaaagagaaaatcatgtcaacagcagaagctcctccttctttccaagaagcagcgcgatgcgttgtctgcaattgcagtttcaacactttcagaagaaggcaccactgtcgatcctgtgggagaacattgtgtaatgaacattcatcaaatcaaatggctttaccacaatttggcctttactcaaatgtccgagtatgtgctgattgtttcaacaacttgcggtctgggaaggatgaaccacagacttcttcagacggagtaaacagtgtgacagatacaatttctaaattagatatcaacgcaaatgttgattcaaaatccatactaactgcagagactaagcttttgtcaggcattaaagagtgtaaatgtggaatgccactttgcatttgtgaagctccaaccccttcctctgatgcattcccccagcagaaacccaatccagttattgcagctccatcaaatcctaaacctaagaagacagatactgttccgaaaattagaagctccatttcaactagtaaatttagttctatgtttaacgttggtcatgtaactaatggtacctcagacagaccccagattgattatgaagttactggagagggtttaagagaagcaataaaaaatagtgacgttgctgctgttaagaaacttcttaatgagggtgtggatgcaaattacagggacaagcaaggactgtctttattacatttggctgcagtcttcaatcaaactgatatagttttcattctcatggattcgggggcaagcctggaatacagaaatgcacaaggagaaacacctttagattgtgcaccagctaccttgcaatacaaaatgcgaaagaagatggaggaaggtggagcagtggaccaaagcatttgaacaatctattacttttatcagtgttctttttatgcagtcctcccaaagagagcttcaaatattaccactgtctaaagctcctctgttaccagaacaaaaaatttcgccttctgtataattgtgacagaggagttcaattcatcttggcagactaagtatgcagacctatataagacatatctttgtcagctgcgcaacttgggcagtattactattcagcttgtaaatttctttggtctgtgacataagagcatttttaaatatgtgcatctttgtattgttg

SEQ ID NO: 54064 - protein, 291 aa, Glycine max
  peptide (1)..(291): Ceres Seq. ID no. 12611995
MSTAEAPPSFQEAARCVVCNCSFNTFRRRHHCRSCGRTLCNEHSSNQMALPQFGLYSNVRVCADCFNNLRSGKDEPQTSSDGVNSVTDTISKLDINANVDSKSILTAETKLLSGIKECKCGMPLCICEAPTPSSDAFPQQKPNPVIAAPSNPKPKKTDTVPKIRSSISTSKFSSMFNVGHVTNGTSDRPQIDYEVTGEGLREAIKNSDVAAVKKLLNEGVDANYRDKQGLSLLHLAAVFNQTDIVFILMDSGASLEYRNAQGETPLDCAPATLQYKMRKKMEEGGAVDQSI

SEQ ID NO: 54065 - protein, 244 aa, Glycine max
  peptide (1)..(244): Ceres Seq. ID no. 12611996
MALPQFGLYSNVRVCADCFNNLRSGKDEPQTSSDGVNSVTDTISKLDINANVDSKSILTAETKLLSGIKECKCGMPLCICEAPTPSSDAFPQQKPNPVIAAPSNPKPKKTDTVPKIRSSISTSKFSSMFNVGHVTNGTSDRPQIDYEVTGEGLREAIKNSDVAAVKKLLNEGVDANYRDKQGLSLLHLAAVFNQTDIVFILMDSGASLEYRNAQGETPLDCAPATLQYKMRKKMEEGGAVDQSI

SEQ ID NO: 54066 - protein, 170 aa, Glycine max
  peptide (1)..(170): Ceres Seq. ID no. 12611997
MPLCICEAPTPSSDAFPQQKPNPVIAAPSNPKPKKTDTVPKIRSSISTSKFSSMFNVGHVTNGTSDRPQIDYEVTGEGLREAIKNSDVAAVKKLLNEGVDANYRDKQGLSLLHLAAVFNQTDIVFILMDSGASLEYRNAQGETPLDCAPATLQYKMRKKMEEGGAVDQSI

SEQ ID NO: 54067 - DNA, 1380 bp, Glycine max
  misc_feature (1)..(1380): Ceres Seq. ID no. 14311407
gatgtccttcttcttaaccctttctttcaagtttcatctcttttcctcatttcattcttctaactttctctccgtttacttcacttcatgacggattcttctcctcttatccctcccttaccggtcacagtcaccgagatcgacctcgaagagggaccctccgaacaaattcaatgccggatttgtcttgaaactgatggtagaaatttcatagttccttgtaagtgcaaaggtacgtcaaagtacgtacatagagagtgtttagatcattggcgagccgtgaaggaagggtttgcatttgcccattgcactacttgcaaggctccataccatttgcgtgttcatggtgcttatagacaatggcgtactttcaaatttcggttttttgtaacccgagacattttgcttatatttctggctgttcagcttgtcattgcttcacttgcttatttggtttaccaaatagatggttacgagaagtattggcttcgtcttgtttggggttttggtagtgagctgagcttttactatatatgtggagcactggtgttttttgtgttgcttggcctgtctgggtgctttattacttgttctgatccaagaattcgcagtgatttgggtcagccttgtcgagaaatatgtctttgttgctgtcaacctggagtttgtgctgatcgtcatttgcatggtactccttatatgtacggtactccttatatgtcgactgattgcaatgcatgctgtgagaattgtggaactgaatgctgtggttgcacttgcatgagaggttctgaggacgaagcagggctaccattattattcataatggttttgttttttctggtactctttgctgtacttgggatattttacagtgtattagtggctacaatgataggacaacggatatggcagcgtcattatcacatacttgcgaaaaggatgctaacaaaggagtatgtcgttgagaacattgatggagagatagcagggcctaattggactcctccacccctcccccaggagcatgtacggcagctgaaaacattgggcctcctatgagtttgaaggagtcatctacctgctgaggagaatgacagtggcggtaaactgacaccttgcttcgtagtttggcccttgtcagggagatatgcagttaactgataaaattatgagtcacttaagtgactcagatcacttaggtttgacttggataattgttctagattgtggaaatttatgaatttctgttttgtctgcaaatgtaaagaaatggaagggaattctaagaatatatctaattacaaatgtacagttcaggatcttgatatgttttatattagcattaaatcaaccttgctatgtacggattttctctct

SEQ ID NO: 54068 - protein, 324 aa, Glycine max
  peptide (1)..(324): Ceres Seq. ID no. 14311408
MTDSSPLIPPLPVTVTEIDLEEGPSEQIQCRICLETDGRNFIVPCKCKGTSKYVHRECLDHWRAVKEGFAFAHCTTCKAPYHLRVHGAYRQWRTFKFRFFVTRDILLIFLAVQLVIASLAYLVYQIDGYEKYWLRLVWGFGSELSFYYICGALVFFVLLGLSGCFITCSDPRIRSDLGQPCREICLCCCQPGVCADRHLHGTPYMYGTPYMSTDCNACCENCGTECCGCTCMRGSEDEAGLPLLFIMVLFFLVLFAVLGIFYSVLVATMIGQRIWQRHYHILAKRMLTKEYVVENIDGEIAGPNWTPPPLPQEHVRQLKTLGLL

SEQ ID NO: 54069 - DNA, 1106 bp, Glycine max
  misc_feature (1)..(1106): Ceres Seq. ID no. 14307156
gaatcgacattttctttggatgttaattcaaagttggattgggaagcaatgggaaaagttcttgctcgcgggcacagccgagttcctgtctattctggaaatccaaggaatattattgggcttctactggtcaaaagtcttcttactgtacgaccagaaacagagacacctgtcagtgctgtatccatccggagaattccacgggttccatcagatatgcctctctatgatatactaaatgagttccaaaagggaagtagtcatatggctgctgttgttaaggctaggggaaaaggcaaagaaactccacaaatcattgatgaagagaaaaatgaagaaaacaaaagcattggtggggattcacagttgaccactccgttgctacagaagcaggatgcaaaatcaggaagtgttgttgttgacatagtcaagccttcaaagccttccagcattaataagctgtctgttttgcaacgtagtgatagcacaacaaatggtccctcttcagaaaatattgaagatggtgaagtgattggtattatcactttagaagatgtatttgaagaacttctgcaagaagaaattgttgatgagacagatgaatatgtggatgttcataagagaatacgtgttgctgcagctgcagctgcttcctcagtggcccgagctccatcatcgcgaaggttgactagccagaagggagcaggaatccaaagtaagccagggcaagctccaaagaaatctgcagaggaaaatggattgaactctacaaagcaataaggaaatgcatattagcctgtcgggataatgaacctttaatactgaggggctgtttatgtgtcagcaatatgatgaaaaagaagtcaaggagagttttttagtcatttgatctttatgatgtatcaaattaataactttccttttaggaagggcataaacggatgtattcctatttatataggttattaagccggtgccatgctgcaattttatgttagatccaaaatgtcttttgtttttaccgaaagaaaagtgtgtttgttagtttcttttacccatttctctcaataatctattatttacaaaaaaaaaaaaaaaaaaaagag

SEQ ID NO: 54070 - protein, 259 aa, Glycine max
  peptide (1)..(259): Ceres Seq. ID no. 14307157
ESTFSLDVNSKLDWEAMGKVLARGHSRVPVYSGNPRNIIGLLLVKSLLTVRPETETPVSAVSIRRIPRVPSDMPLYDILNEFQKGSSHMAAVVKARGKGKETPQIIDEEKNEENKSIGGDSQLTTPLLQKQDAKSGSVVVDIVKPSKPSSINKLSVLQRSDSTTNGPSSENIEDGEVIGIITLEDVFEELLQEEIVDETDEYVDVHKRIRVAAAAAASSVARAPSSRRLTSQKGAGIQSKPGQAPKKSAEENGLNSTKQ

SEQ ID NO: 54071 - protein, 243 aa, Glycine max
  peptide (1)..(243): Ceres Seq. ID no. 14307158
MGKVLARGHSRVPVYSGNPRNIIGLLLVKSLLTVRPETETPVSAVSIRRIPRVPSDMPLYDILNEFQKGSSHMAAVVKARGKGKETPQIIDEEKNEENKSIGGDSQLTTPLLQKQDAKSGSVVVDIVKPSKPSSINKLSVLQRSDSTTNGPSSENIEDGEVIGIITLEDVFEELLQEEIVDETDEYVDVHKRIRVAAAAAASSVARAPSSRRLTSQKGAGIQSKPGQAPKKSAEENGLNSTKQ

SEQ ID NO: 54072 - protein, 187 aa, Glycine max
  peptide (1)..(187): Ceres Seq. ID no. 14307159
MPLYDILNEFQKGSSHMAAVVKARGKGKETPQIIDEEKNEENKSIGGDSQLTTPLLQKQDAKSGSVVVDIVKPSKPSSINKLSVLQRSDSTTNGPSSENIEDGEVIGIITLEDVFEELLQEEIVDETDEYVDVHKRIRVAAAAAASSVARAPSSRRLTSQKGAGIQSKPGQAPKKSAEENGLNSTKQ

SEQ ID NO: 54073 - DNA, 1653 bp, Glycine max
  misc_feature (1)..(1653): Ceres Seq. ID no. 14307374
gaatatcaagtagatgaaaaccaactaatccgtgcagaaaaagtgccagcttgtagaagatccatcaaacagcaatcaaggcatgttggccaaaataaaaatggtgttcagaggctactgcaaactcgtactcacgaaggtggaagtccttttaatcgtgtttttcctgttagtcctgctccatttccttcagctcccccacctgccccagcaacgccaccagtggttcagaagccagctcctgttgaccgaaataattctgcttctccttctcccctgcctggaccacgatctgcaccgctatataaaagtagctcatcaaagaaccatgtagttgttattttggctggagttatgggtggtgctgtatttcttctcatttcaatcattggcctatatctctgtaaaacaaacaaggtagctactgtaaaaccttgggccacaggattaagcggacagcttcagaacgcatttgtaacaggtgtgccaaagctaaagagatcagagcttgaagcagcatgtgaagattttagtaatgtaattggtacttcatccattggtacagtgtacaaagggactttatctagtggtgttgaaatagctgtggcatctgttgcagcgacatcatccaaagattggtcaaagactttagaagcccaatttaggaacaagatagatacattatcaaaagtgaaccacaagaattttgtaaatcttcttgtacattgtgaagaagatgagcctttcaccagaatggtggtttttgagtatgccccgaatggaacactctttgagcatttacacataaaagaatctgagcacttggattggggaacaagacttagaattgccatgggcatggcttactgcctacaacatatgcaccagttggagcctcctttggtccttagcaacctgaattcttcagctgtccaactcactgatgattatgctgccaaaatctctgatttgagtttcttaaatgaaatagcttcagctgtgataaaatctcctgctagaaaaaacactgacatgacaccagcaagtaacatttacagctttggtgttatattatttgaaatggtaactggcagactcccttattcagtggacaatgatggctcacttgatgactgggcttcacactatttacaaggggatcagcccctcaaagaaatggtggatccgactctagcatccttccaagaagaacaactagaacaagtcgatgctttgattaaatcttgtgtccatcctgatcaaaagcaaagaccaacaatgaaagaagtttgtgtgagattaagagagataacaaaaataacacctgatgcagctgttccaaagctttctccactttggtgggcagagcttgagattgcttctgtaaatgcaagctgaaatcggtaaatcaggttgtaagtatggagttcttaccttcctcatcctttttccatcggtgaaggcacaaaaatgtattcacctgtagattaatacatcttgtgttaattatggaagagaggcaaatcacatgtacataagggagataaaagaatgcgattttttcttttcttttcctgcggtgcttcgtttggttatggtttatgaaattatactaacaaaaaaaagtttcacatcagttaatttcatttgctc

SEQ ID NO: 54074 - protein, 465 aa, Glycine max
  peptide (1)..(465): Ceres Seq. ID no. 14307375
EYQVDENQLIRAEKVPACRRSIKQQSRHVGQNKNGVQRLLQTRTHEGGSPFNRVFPVSPAPFPSAPPPAPATPPVVQKPAPVDRNNSASPSPLPGPRSAPLYKSSSSKNHVVVILAGVMGGAVFLLISIIGLYLCKTNKVATVKPWATGLSGQLQNAFVTGVPKLKRSELEAACEDFSNVIGTSSIGTVYKGTLSSGVEIAVASVAATSSKDWSKTLEAQFRNKIDTLSKVNHKNFVNLLVHCEEDEPFTRMVVFEYAPNGTLFEHLHIKESEHLDWGTRLRIAMGMAYCLQHMHQLEPPLVLSNLNSSAVQLTDDYAAKISDLSFLNEIASAVIKSPARKNTDMTPASNIYSFGVILFEMVTGRLPYSVDNDGSLDDWASHYLQGDQPLKEMVDPTLASFQEEQLEQVDALIKSCVHPDQKQRPTMKEVCVRLREITKITPDAAVPKLSPLWWAELEIASVNAS

SEQ ID NO: 54075 - protein, 347 aa, Glycine max
  peptide (1)..(347): Ceres Seq. ID no. 14307376
MGGAVFLLISIIGLYLCKTNKVATVKPWATGLSGQLQNAFVTGVPKLKRSELEAACEDFSNVIGTSSIGTVYKGTLSSGVEIAVASVAATSSKDWSKTLEAQFRNKIDTLSKVNHKNFVNLLVHCEEDEPFTRMVVFEYAPNGTLFEHLHIKESEHLDWGTRLRIAMGMAYCLQHMHQLEPPLVLSNLNSSAVQLTDDYAAKISDLSFLNEIASAVIKSPARKNTDMTPASNIYSFGVILFEMVTGRLPYSVDNDGSLDDWASHYLQGDQPLKEMVDPTLASFQEEQLEQVDALIKSCVHPDQKQRPTMKEVCVRLREITKITPDAAVPKLSPLWWAELEIASVNAS

SEQ ID NO: 54076 - DNA, 1239 bp, Glycine max
  misc_feature (1)..(1239): Ceres Seq. ID no. 15175765
gaagaaagaaagagagagacagcgtagggtaactgaaagagacgaaggaaatgaagaagtcttcgggaagcgcagctgacaaaaagagggtgcgacgctcatccgcaccagatcccacctccgacgctcctcctaggaaacaagttgtcaagaaagatgtgttccaggtttttgctgagaaggttagagatcataaggaattggtttcaaggtgggctgttctacaggagacgcgtgttgagtattttagagggaaggattttgtgagcttcttgaaaaaccatccggagctcaaagacgtcctagaatcagataggaatttggaaacagaggagattgccaacattctactcgcaaaaaatcttttagtgcgctgtgatcgtgttgtgaaaactgttcgtcctgggaagaaaaagctgtctacctggcctgcacatttagaaattttccctgaacaagtattttctgaaaatgatgctttttttgcatggacgtttgtaaaacgccatccactttggcagacactcctctcgtttttctggcctgtgttaacattggctatttgcttatttcctgtgtaccctcatcgctgcaagctattgatactttactcatgtgccgggatccttttcctcatcctctctctactcttgataagaggtacaatatttggcgctttatatattattcttggaaagcgaatctggtttttccctaacatccttgccgaggaagcaacactgcgggagttgttcagattttggcctaagaaagatgaagaggaaaagcccaagtggacaacaagacttttctatgctggggtagctgtgctgttcatattattgctgaggcatcatgcacccgatgaagctgccagagcaaggtaccagaagagggtatctaacatcattgatgatgttcttgaatggtctccgactctagccttgtctgggatgatggataagcaacaaaatgtggctaatgccacagggtccgccgatgcgagcaaagatggaccggaggatgcagctccagccgatggtgacgatgcaaaagatttcatggaacaggataataatactgaagaagtcataaacgatgtggatgatgataaacatcatgattaaaggttatcatatacctaaatgaaatatatttagtgactagatcacaattttccttttgagtgtaaaagtaccatgtatgaaataataacagtaaaaatggttcttcgccttc

SEQ ID NO: 54077 - protein, 358 aa, Glycine max
  peptide (1)..(358): Ceres Seq. ID no. 15175766
MKKSSGSAADKKRVRRSSAPDPTSDAPPRKQVVKKDVFQVFAEKVRDHKELVSRWAVLQETRVEYFRGKDFVSFLKNHPELKDVLESDRNLETEEIANILLAKNLLVRCDRVVKTVRPGKKKLSTWPAHLEIFPEQVFSENDAFFAWTFVKRHPLWQTLLSFFWPVLTLAICLFPVYPHRCKLLILYSCAGILFLILSLLLIRGTIFGALYIILGKRIWFFPNILAEEATLRELFRFWPKKDEEEKPKWTTRLFYAGVAVLFILLLRHHAPDEAARARYQKRVSNIIDDVLEWSPTLALSGMMDKQQNVANATGSADASKDGPEDAAPADGDDAKDFMEQDNNTEEVINDVDDDKHHD

SEQ ID NO: 54078 - DNA, 1193 bp, Glycine max
  misc_feature (1)..(1193): Ceres Seq. ID no. 13593932
gattttcactctaccaaaggtacacacgttgagagagacaggttagttggatacaaaagtggcatcgctcgcagtttgatagggtgcgtgacaagtataaaagggacaacattgaagacaacgttatcatatccttctttgcttggaatggaacaagctgggaagcaaggaattatggtggcgtctcagagtcaaaaccccattgagcaaatccaagcgcgcttcaaggacttggaaactggattccgcctctggctctccaagcagtccctccccgtcgaggccgccgtcgtcaccaccaccagcgccgcccagggcgccgccatcggcgccttcatgggcaccctcaccgccgacgcctcctccaccttccccacccctcctcccaacgcctctctcaatccccaagccatggcgtctcttaaacaagcgcaggctctagctggaggtcctttaattcaggcgcgaaactttgctgtgatgacgggagtgaacgctgggatttcctgtgtcttgaaaaggataaggggaaaggaagatgtccagtctagcatggcggcagcttttggttcaggggccttgttttcattagtaagtggcatgggtggaccaaatcaagcaacaaatgcactcacttctggacttttctttgcacttgttcaaggtggacttttccagataggacaaaagttttctcaaccacctgctgaagatactcactatgctaaaacaagacacatgttgaacaatcttggccttcagagttacgaaaagaatttcaagaaaggcttgttaacagacaacactctgcctttactcacagacagtgctctcagagatgtgaggattcctcctggacctaggcttttgattcttgaccacatccagagggacgcggatttgaaagataagcgaggaagccgaaagtgactgatatgaatagtttgctggcttggaactttgaaagccattgaaaaatggatagtagaaagtttgtgttgcaaatgaattttgtcttttttgtttgttagctctgttccattgttgttgcagtgtacttgataaaatttggttaactaatcagttattttagttgtgccatgacacgtaaatggcttgaaagtaaattagggagcacgaatttgttaactctaaaataagaaaagttattgcttccttgtgtaggaattgtt

SEQ ID NO: 54079 - protein, 309 aa, Glycine max
  peptide (1)..(309): Ceres Seq. ID no. 13593933
DFHSTKGTHVERDRLVGYKSGIARSLIGCVTSIKGTTLKTTLSYPSLLGMEQAGKQGIMVASQSQNPIEQIQARFKDLETGFRLWLSKQSLPVEAAVVTTTSAAQGAAIGAFMGTLTADASSTFPTPPPNASLNPQAMASLKQAQALAGGPLIQARNFAVMTGVNAGISCVLKRIRGKEDVQSSMAAAFGSGALFSLVSGMGGPNQATNALTSGLFFALVQGGLFQIGQKFSQPPAEDTHYAKTRHMLNNLGLQSYEKNFKKGLLTDNTLPLLTDSALRDVRIPPGPRLLILDHIQRDADLKDKRGSRK

SEQ ID NO: 54080 - protein, 260 aa, Glycine max
  peptide (1)..(260): Ceres Seq. ID no. 13593934
MEQAGKQGIMVASQSQNPIEQIQARFKDLETGFRLWLSKQSLPVEAAVVTTTSAAQGAAIGAFMGTLTADASSTFPTPPPNASLNPQAMASLKQAQALAGGPLIQARNFAVMTGVNAGISCVLKRIRGKEDVQSSMAAAFGSGALFSLVSGMGGPNQATNALTSGLFFALVQGGLFQIGQKFSQPPAEDTHYAKTRHMLNNLGLQSYEKNFKKGLLTDNTLPLLTDSALRDVRIPPGPRLLILDHIQRDADLKDKRGSRK

SEQ ID NO: 54081 - protein, 251 aa, Glycine max
  peptide (1)..(251): Ceres Seq. ID no. 13593935
MVASQSQNPIEQIQARFKDLETGFRLWLSKQSLPVEAAVVTTTSAAQGAAIGAFMGTLTADASSTFPTPPPNASLNPQAMASLKQAQALAGGPLIQARNFAVMTGVNAGISCVLKRIRGKEDVQSSMAAAFGSGALFSLVSGMGGPNQATNALTSGLFFALVQGGLFQIGQKFSQPPAEDTHYAKTRHMLNNLGLQSYEKNFKKGLLTDNTLPLLTDSALRDVRIPPGPRLLILDHIQRDADLKDKRGSRK

SEQ ID NO: 54082 - DNA, 1417 bp, Glycine max
  misc_feature (1)..(1417): Ceres Seq. ID no. 14311355
aggattatgtttattgacttgttctttctttatttgtattttcaatgaatcagttattcatcaatttcatagactgttgtgtagaactggaatatcacctgtgcactgaaaatcttataccagattcttttgttaccgcagtggaggttgagattgatggctctgttactgtcgaaacagtaggaaatactgctataggtgaggttagtagcatagcggatgacaacagagaaggtggaagttctgttgaaccaaatgacaaccaagatcaacatgataatgggactcaagattcctctggagggatcactatcccatctgcaattcccacagtatcggttgtttcagttgaagagccctacgttggtcaggagtttgggtcagaagcagcagcacatgcattttataatgcttatgccacagaagttggatttatcgtacgtgtgagtaaactctcgcggtcaaggcgtgatggaactgctattggacgtactcttgtttgcaacaaagagggattcagaatggctgacaaacgtgaaaagattgtgaggcaaagggccgagaccagggttggttgcagggcaatgattatggtgaggaaacttagttctggcaaatgggttgttgcaaagtttgtgaaggaacacacacatcctttgacccctggcaaaggtagaagggatttctactatgaacaatatccggtcagtttcttttctttcactactgaacaactgtacatattatgttgtgtcaagtgttacttgtgcttaatagatcagttatgaaatctgagtgagatcatgatgctctcatattgtgctaaatattagagaatttcaggctatttcagaacgaagttttcaggataacattggttctcttaacattttccatctctattataatccataatccagagaatttttttcttctgcattacctcacatcatttgaaatttgctcaaattggtcttattacccttgcccttgtacaaattcctttactcataatgtaatgcaacttagaaagtgccacgtaagtaaagagcaacttgtgagattagtaaatattatattcctcactctttttcagttcctttttatgctattttcagactgaacaggataaaattcgggaactatctcaacagttggcaactgagaaaaagcgatctgcggcctataaaagacatcttgaattgatatttgagcaaattgaagagcagaatgataacctttcaaagaaaatacagcacatagtagactgcgtgaaggagatggaagccaaagaagaacatagtagacagtgtgaaggagatggaagccaaagaacaacagagtagactcagatagattcaacttacaacgtgatacttttagttggtagaggaaactagttcagtcaatgtagagg

SEQ ID NO: 54083 - protein, 247 aa, Glycine max
  peptide (1)..(247): Ceres Seq. ID no. 14311356
MNQLFINFIDCCVELEYHLCTENLIPDSFVTAVEVEIDGSVTVETVGNTAIGEVSSIADDNREGGSSVEPNDNQDQHDNGTQDSSGGITIPSAIPTVSVVSVEEPYVGQEFGSEAAAHAFYNAYATEVGFIVRVSKLSRSRRDGTAIGRTLVCNKEGFRMADKREKIVRQRAETRVGCRAMIMVRKLSSGKWVVAKFVKEHTHPLTPGKGRRDFYYEQYPVSFFSFTTEQLYILCCVKCYLCLIDQL

SEQ ID NO: 54084 - DNA, 1592 bp, Glycine max
  misc_feature (1)..(1592): Ceres Seq. ID no. 14313714
agaagaaatggtgtttttggtagaccactttgtgtgaacccctctggcaggagaaacctagttggtccagctttttattctctggagactagtgcttatgacgtggctgctttagaatctccttcccgtgttgcagaagaaaaagttggtgtgctgcttctcaatctaggaggaccagagacattgagtgacgtgcaaccttttctgtttaatctttttgcagatcctgatatcattcgtcttccaaggttgtttcggtttctccagcgaccattggcaaaattgatttctgtacttcgggctcctaaatccaaggaagggtatgctgctattggtggtggctctcctttacgaaaaattacagatgaccaggcacttgcaattaaaatggctttggaagcaaagggcatctcttcaaatgtctacgttgggatgcgatactggtacccatttactgaagaagcaattcagcaaattaagagggacagaataacaaggcttgtggtactacccctttatccccagttttctatatccacaactggatcaagcatccgtgttcttgagcatatattcagggaagatgcctacttgtctaagctccctgtttccattataaactcttggtatcaacgagaaggttatattaagtcaatggctaacttaattcagaaagagctccagagtttttctgaaccaaaagaggtaatgatatttttcagtgcccatggtgtacctgtcagttacgttgaggaagctggggatccataccgagaccaaatggaggagtgcatcttcttgatcatgcaagagttgaaagctagaggaattagtaatgagcacactcttgcttatcagagtcgagtgggtcctgtacagtggctgaaaccatatactgatgaagttctcgttgagcttggccaaaaaggtgtgaagagtcttttagctgttccagtgagttttgtgagtgagcatattgaaacccttgaagaaattgacatggagtacaaggaattggctcttgaatctggcatcaagaattgggcacgtgtacctgcccttggtgttaccccttccttcattacagatttagcagatgcagtaatagaagctctcccatcagcaacagcaatatatgcaccgaccagaacctctgaagatgttgatcatgacccagttagatattttatcaagatgttctttggttcaatcttggcattcatcttgttcttgtcacccaaaatgatcacggcattcaggaatcatgtcatttagaagaattaaatcctgcttgctgaattcaatctgcaagcatatagatgaagcctattgatagcaacaaagtatactttgattttttgtctttgttttacttatttcaacctctactgtatacagcacagagctataaggaagcaatttttcgcacttgattataatgagaacttgcacctcggcttaaagaggattcaaagaataataattgtagaccaggatctattcaggagccaagaggcattgtctccatctccgatattaaaccccgaacaagttattgatttttgtatattatttatttacactttttctac

SEQ ID NO: 54085 - protein, 424 aa, Glycine max
  peptide (1)..(424): Ceres Seq. ID no. 14313715
RRNGVFGRPLCVNPSGRRNLVGPAFYSLETSAYDVAALESPSRVAEEKVGVLLLNLGGPETLSDVQPFLFNLFADPDIIRLPRLFRFLQRPLAKLISVLRAPKSKEGYAAIGGGSPLRKITDDQALAIKMALEAKGISSNVYVGMRYWYPFTEEAIQQIKRDRITRLVVLPLYPQFSISTTGSSIRVLEHIFREDAYLSKLPVSIINSWYQREGYIKSMANLIQKELQSFSEPKEVMIFFSAHGVPVSYVEEAGDPYRDQMEECIFLIMQELKARGISNEHTLAYQSRVGPVQWLKPYTDEVLVELGQKGVKSLLAVPVSFVSEHIETLEEIDMEYKELALESGIKNWARVPALGVTPSFITDLADAVIEALPSATAIYAPTRTSEDVDHDPVRYFIKMFFGSILAFILFLSPKMITAFRNHVI

SEQ ID NO: 54086 - protein, 295 aa, Glycine max
  peptide (1)..(295): Ceres Seq. ID no. 14313716
MALEAKGISSNVYVGMRYWYPFTEEAIQQIKRDRITRLVVLPLYPQFSISTTGSSIRVLEHIFREDAYLSKLPVSIINSWYQREGYIKSMANLIQKELQSFSEPKEVMIFFSAHGVPVSYVEEAGDPYRDQMEECIFLIMQELKARGISNEHTLAYQSRVGPVQWLKPYTDEVLVELGQKGVKSLLAVPVSFVSEHIETLEEIDMEYKELALESGIKNWARVPALGVTPSFITDLADAVIEALPSATAIYAPTRTSEDVDHDPVRYFIKMFFGSILAFILFLSPKMITAFRNHVI

SEQ ID NO: 54087 - protein, 280 aa, Glycine max
  peptide (1)..(280): Ceres Seq. ID no. 14313717
MRYWYPFTEEAIQQIKRDRITRLVVLPLYPQFSISTTGSSIRVLEHIFREDAYLSKLPVSIINSWYQREGYIKSMANLIQKELQSFSEPKEVMIFFSAHGVPVSYVEEAGDPYRDQMEECIFLIMQELKARGISNEHTLAYQSRVGPVQWLKPYTDEVLVELGQKGVKSLLAVPVSFVSEHIETLEEIDMEYKELALESGIKNWARVPALGVTPSFITDLADAVIEALPSATAIYAPTRTSEDVDHDPVRYFIKMFFGSILAFILFLSPKMITAFRNHVI

SEQ ID NO: 54088 - DNA, 951 bp, Glycine max
  misc_feature (1)..(951): Ceres Seq. ID no. 14303374
ggtaaacatcccttctttcatctttcaactctctctctccccccctctttctctcacacacaaatgtctaaaataacaataacctctccaaaacactgtgctgacaaagaaggactaaaaatcaagaactacaagaagatctacttcactttctcagcatttttcatcacaatcctactactaatacttgttatatggctcatcctccaccctgcaaagcctcaattctccctcaaagaagtcgacatcttccaacttaacctttcaggcccaaacctcaactcctccatccaactcaccctcctctccaaaaacccaaaccagaaagttggcatttactacgacgagattcaactctatgcaacctacaagggccaacaaattactggtgatacccctgtgccacccttttatcaaggccaagaagagagtaatctcataacagcttctttggtgggaaatgctttacccgtggctccgtctcttggctatgaacttggtcgtgatcaaattgttggaagactagtcttgaatctcaaagccaatggaaagcttcgttggaaagtgggaacatgggtctctggacgttacaggttcaatgttaattgtgttgctatcaatgcctttggaccctctattcctgctgggcctctcacttcaaagcaaggggctcagtgttccaccacactttaaagttaaactcagcatgatcttcttactaacaacttcaacatataaatgatataaattataatctactattcatatatatcacggcgagtttttcaagttttcttgttagtagattttgttgcttggctttgtattgaagcgttattttgcagccactataagtgatttgtaaataataaaaatatatgtgaatgataggacaaaaagttacactttgtgagtgattatgaaaagaggatgcgtattagatggttaaat

SEQ ID NO: 54089 - protein, 230 aa, Glycine max
  peptide (1)..(230): Ceres Seq. ID no. 14303375
GKHPFFHLSTLSLPPSFSHTQMSKITITSPKHCADKEGLKIKNYKKIYFTFSAFFITILLLILVIWLILHPAKPQFSLKEVDIFQLNLSGPNLNSSIQLTLLSKNPNQKVGIYYDEIQLYATYKGQQITGDTPVPPFYQGQEESNLITASLVGNALPVAPSLGYELGRDQIVGRLVLNLKANGKLRWKVGTWVSGRYRFNVNCVAINAFGPSIPAGPLTSKQGAQCSTTL

SEQ ID NO: 54090 - protein, 209 aa, Glycine max
  peptide (1)..(209): Ceres Seq. ID no. 14303376
MSKITITSPKHCADKEGLKIKNYKKIYFTFSAFFITILLLILVIWLILHPAKPQFSLKEVDIFQLNLSGPNLNSSIQLTLLSKNPNQKVGIYYDEIQLYATYKGQQITGDTPVPPFYQGQEESNLITASLVGNALPVAPSLGYELGRDQIVGRLVLNLKANGKLRWKVGTWVSGRYRFNVNCVAINAFGPSIPAGPLTSKQGAQCSTTL

SEQ ID NO: 54091 - DNA, 1602 bp, Glycine max
  misc_feature (1)..(1602): Ceres Seq. ID no. 14307460
gagaacaataggagcatcatggttaggctatggtgctcttctctctcaattacacttttattccaacagctcatcagattgtgcatttcttggagtgtgcaaaccccaacacccccattgccaatcctccctctcccaacatattcccagttgaaatggcaacaaagggagatcataatgtttttccattttggtgtgaacacattcagtgacagagaatggggcactggccaggaaaacccagcaatcttcaatccaacggggctcaacaccacccagtgggccactgtggcagcagatgcaggagtttcattgatgatattaactgcaaaacaccatgatggcttctgcctctggccttccaagtacactgaccattctgtcattagcagccctaggcaaggtggcaagggtgatgtggttcaagactttgtcaatgcagccactgcacaaggaattgatgtaggggtctacctttcaccttgggatagacatgaccctagatatggcaatgatttgctctacaaccaatactacttggctcaactacaagagttgctcaagaaatatccaaatgttagagagatttggttcgatggagcaaagggtgccaatgcaaaaaatatgacgtattacttttcagattggttttccatggtgaaggagctgcagagttccatcaacatcttctctgatgcaggtcctgatgttaggtgggtgggagatgaaacaggttctgcagggtatacatgttggtctaccattaatcgaacctctctatccattggaagtccagacatcattcagtatataaacactggtgatccaaaagggacagattggctaccggcggaatgtgatgtatccattcgaaaaggatggttttggcacaaatcagaatcaccaaaaaagctaagcgagctacttgacatttattacaattcggttgggagaaattgtgtgttacttctcaatgtgcctcctaatacaagtggccttataactgaagttgatgccaatagattgaaagagtttagaagtgcaatcaagacaattttccatcagaatcttgctgaggattgttttgttaaagttagtagccaaagagggggtttcgggccagaaaagatgctagacagtgaccacttgtggtcatactgggccccaagggacgatgatgatgaaaaggaccattgggttgaaatttgggccaaggaagggagattgagattcaatgtggttagaatacaagaggcaattggtcttggtcaaaggatcaaacggcatgaaatctatgtggatggtaaattgatcatcaaagccacaacggttggttataagaggcttcataggcttgatgggggtgaagtgcacgctcgtggtgtgaggataagaattagaaaggcaagaggagtgcctcttatctcttctattggcttgcattatgatcctttctggcactcaaagtttactgtatcctgaagagttaagtaagtttaggtaaaggagcataactgcaataaattaagtagagccttaagaagaatattgaaatattgttctatcagtaaagaacaaaaaataaatttactttaaatttcc

SEQ ID NO: 54092 - protein, 493 aa, Glycine max
  peptide (1)..(493): Ceres Seq. ID no. 14307461
ENNRSIMVRLWCSSLSITLLFQQLIRLCISWSVQTPTPPLPILPLPTYSQLKWQQREIIMFFHFGVNTFSDREWGTGQENPAIFNPTGLNTTQWATVAADAGVSLMILTAKHHDGFCLWPSKYTDHSVISSPRQGGKGDVVQDFVNAATAQGIDVGVYLSPWDRHDPRYGNDLLYNQYYLAQLQELLKKYPNVREIWFDGAKGANAKNMTYYFSDWFSMVKELQSSINIFSDAGPDVRWVGDETGSAGYTCWSTINRTSLSIGSPDIIQYINTGDPKGTDWLPAECDVSIRKGWFWHKSESPKKLSELLDIYYNSVGRNCVLLLNVPPNTSGLITEVDANRLKEFRSAIKTIFHQNLAEDCFVKVSSQRGGFGPEKMLDSDHLWSYWAPRDDDDEKDHWVEIWAKEGRLRFNVVRIQEAIGLGQRIKRHEIYVDGKLIIKATTVGYKRLHRLDGGEVHARGVRIRIRKARGVPLISSIGLHYDPFWHSKFTVS

SEQ ID NO: 54093 - protein, 487 aa, Glycine max
  peptide (1)..(487): Ceres Seq. ID no. 14307462
MVRLWCSSLSITLLFQQLIRLCISWSVQTPTPPLPILPLPTYSQLKWQQREIIMFFHFGVNTFSDREWGTGQENPAIFNPTGLNTTQWATVAADAGVSLMILTAKHHDGFCLWPSKYTDHSVISSPRQGGKGDVVQDFVNAATAQGIDVGVYLSPWDRHDPRYGNDLLYNQYYLAQLQELLKKYPNVREIWFDGAKGANAKNMTYYFSDWFSMVKELQSSINIFSDAGPDVRWVGDETGSAGYTCWSTINRTSLSIGSPDIIQYINTGDPKGTDWLPAECDVSIRKGWFWHKSESPKKLSELLDIYYNSVGRNCVLLLNVPPNTSGLITEVDANRLKEFRSAIKTIFHQNLAEDCFVKVSSQRGGFGPEKMLDSDHLWSYWAPRDDDDEKDHWVEIWAKEGRLRFNVVRIQEAIGLGQRIKRHEIYVDGKLIIKATTVGYKRLHRLDGGEVHARGVRIRIRKARGVPLISSIGLHYDPFWHSKFTVS

SEQ ID NO: 54094 - protein, 434 aa, Glycine max
  peptide (1)..(434): Ceres Seq. ID no. 14307463
MFFHFGVNTFSDREWGTGQENPAIFNPTGLNTTQWATVAADAGVSLMILTAKHHDGFCLWPSKYTDHSVISSPRQGGKGDVVQDFVNAATAQGIDVGVYLSPWDRHDPRYGNDLLYNQYYLAQLQELLKKYPNVREIWFDGAKGANAKNMTYYFSDWFSMVKELQSSINIFSDAGPDVRWVGDETGSAGYTCWSTINRTSLSIGSPDIIQYINTGDPKGTDWLPAECDVSIRKGWFWHKSESPKKLSELLDIYYNSVGRNCVLLLNVPPNTSGLITEVDANRLKEFRSAIKTIFHQNLAEDCFVKVSSQRGGFGPEKMLDSDHLWSYWAPRDDDDEKDHWVEIWAKEGRLRFNVVRIQEAIGLGQRIKRHEIYVDGKLIIKATTVGYKRLHRLDGGEVHARGVRIRIRKARGVPLISSIGLHYDPFWHSKFTVS

SEQ ID NO: 54095 - DNA, 625 bp, Glycine max
  misc_feature (1)..(625): Ceres Seq. ID no. 13637911
ttattgtattttgcagccaaatctggtattgatccttccgattgtgttgagcttgcaaaacatgtgaaattgagctgcccaaacctagtgttctctggcctaatgacgataggaatgccagactataccttaactccacagaactttcagacactatcaaattgcagaactgaagtatgcaaggcacttgaaatgcccgaggaggaatgtgaactgtcaatgggcatgtctggtgattttgagttagcggtatggaatagtttactaaagttatttagcagttcaaattttcttgatagttacgttgcatgattgcacctgcaattatctcagttctggatgctttttagctcatcagggaatgaattgacgattatcataggaatggggttctttgatacttgatgtgatgatgatagtgtatgaagattcctaacaaacaacacactaacatattctttattattgaatagaattcagacaggtcccactaaataaatgaaaatcattaaattatacagggggtaagacccacatcatttagtgaacctctcatgaatgccacccaacaatagagtaatagatagcttgttgttagcattttttatggtttgtagatattgtt

SEQ ID NO: 54096 - protein, 103 aa, Glycine max
  peptide (1)..(103): Ceres Seq. ID no. 13637912
LLYFAAKSGIDPSDCVELAKHVKLSCPNLVFSGLMTIGMPDYTLTPQNFQTLSNCRTEVCKALEMPEEECELSMGMSGDFELAVWNSLLKLFSSSNFLDSYVA

SEQ ID NO: 54097 - protein, 69 aa, Glycine max
  peptide (1)..(69): Ceres Seq. ID no. 13637913
MTIGMPDYTLTPQNFQTLSNCRTEVCKALEMPEEECELSMGMSGDFELAVWNSLLKLFSSSNFLDSYVA

SEQ ID NO: 54098 - protein, 65 aa, Glycine max
  peptide (1)..(65): Ceres Seq. ID no. 13637914
MPDYTLTPQNFQTLSNCRTEVCKALEMPEEECELSMGMSGDFELAVWNSLLKLFSSSNFLDSYVA

SEQ ID NO: 54099 - DNA, 1526 bp, Glycine max
  misc_feature (1)..(1526): Ceres Seq. ID no. 14313049
gatggctcaagagatgaatgagcctgcaatgaacatcatagagcagtctcaagttgctcctccacagggctcccttccttcaacaattatccccctcactttcctcgacattccatggctcctcagccgccacgccagacgcatcttcttctacgactttccctttcctaccacccacttcttgcaaacagcacttcctattctgaaacattctctttcccacacactccaacacttcttcccctttgcctccaatctcatcctccctccacacccccacgtcccttacatccgttaccttgagggtgactctctctcattcactgtcgcagagtccagtcctgcagacttcactcttctcacatcagattcccctcgagactcctatgactggcaaccccttgctccggtgctaccctcgcaacgtacttctcacgacggcacgtgcgagttccccctcatggccattcaggtaacgatgataccaaactctggattcagcatctgtgttatcttcgaccacgttgcaggagatgggagaacccttcatcatttcatgaagttttgggcctccgtttgcaaggccaaaggagatttggatttcccttgctctatgcctctacccttatatgataggaacatagtcaaagaccccaaagggctcatgcacgtttacatgcaagacctgagaaattcagcgttgctaactaaacagttccgaggggttttacgtggtgtttacactgacaaggtacgtgcgactttcatattcagtagcgaacaagctcagaaattaaaaaaatgggtctctcttaaatgtaacggttcgcggactttacatatatcaacctttgtggtgacatgttctttgatatgggtgtgtatgctcagatcagaacaaaaggaaaaggaaggtaataatgagccatgcaacatcggattttccgcagactgtcataaccatcctcagttttcattaccttcaaactactttgggaattgtttgatccctctcattacaaggctaaagaggggtgagttggtggaacaaaatgggattgttgcagctgcaaatgccattgaaaagaacattagagatttcaagagtgatgctttgagatgggccgaaacaacgatgtcagatattagaggcttaaggaaatctggtcaatctcttgtagtgattgttggctcgccaaagctgaccgcgtacaacactgactttggttgggggaagcccgtgaagtctgaagtggtgaatcttgattctgtgggaacagtttctctctctgattgtagggaccaagaaggtggaattcaggttggaatggtactcgagaggattcgaatgaacaatttcaccagcatcttggaagaacaccttagtcatgttgccgttcttgactaattaaaccattcacgtattagtcatcaataaactgtatctttcacgctctgcgtttaatttgtttgttatactcttttatggttttaaataaatattaaaagtattgttgttcggtatg

SEQ ID NO: 54100 - protein, 468 aa, Glycine max
  peptide (1)..(468): Ceres Seq. ID no. 14313050
MAQEMNEPAMNIIEQSQVAPPQGSLPSTIIPLTFLDIPWLLSRHARRIFFYDFPFPTTHFLQTALPILKHSLSHTLQHFFPFASNLILPPHPHVPYIRYLEGDSLSFTVAESSPADFTLLTSDSPRDSYDWQPLAPVLPSQRTSHDGTCEFPLMAIQVTMIPNSGFSICVIFDHVAGDGRTLHHFMKFWASVCKAKGDLDFPCSMPLPLYDRNIVKDPKGLMHVYMQDLRNSALLTKQFRGVLRGVYTDKVRATFIFSSEQAQKLKKWVSLKCNGSRTLHISTFVVTCSLIWVCMLRSEQKEKEGNNEPCNIGFSADCHNHPQFSLPSNYFGNCLIPLITRLKRGELVEQNGIVAAANAIEKNIRDFKSDALRWAETTMSDIRGLRKSGQSLVVIVGSPKLTAYNTDFGWGKPVKSEVVNLDSVGTVSLSDCRDQEGGIQVGMVLERIRMNNFTSILEEHLSHVAVLD

SEQ ID NO: 54101 - protein, 464 aa, Glycine max
  peptide (1)..(464): Ceres Seq. ID no. 14313051
MNEPAMNIIEQSQVAPPQGSLPSTIIPLTFLDIPWLLSRHARRIFFYDFPFPTTHFLQTALPILKHSLSHTLQHFFPFASNLILPPHPHVPYIRYLEGDSLSFTVAESSPADFTLLTSDSPRDSYDWQPLAPVLPSQRTSHDGTCEFPLMAIQVTMIPNSGFSICVIFDHVAGDGRTLHHFMKFWASVCKAKGDLDFPCSMPLPLYDRNIVKDPKGLMHVYMQDLRNSALLTKQFRGVLRGVYTDKVRATFIFSSEQAQKLKKWVSLKCNGSRTLHISTFVVTCSLIWVCMLRSEQKEKEGNNEPCNIGFSADCHNHPQFSLPSNYFGNCLIPLITRLKRGELVEQNGIVAAANAIEKNIRDFKSDALRWAETTMSDIRGLRKSGQSLVVIVGSPKLTAYNTDFGWGKPVKSEVVNLDSVGTVSLSDCRDQEGGIQVGMVLERIRMNNFTSILEEHLSHVAVLD

SEQ ID NO: 54102 - protein, 459 aa, Glycine max
  peptide (1)..(459): Ceres Seq. ID no. 14313052
MNIIEQSQVAPPQGSLPSTIIPLTFLDIPWLLSRHARRIFFYDFPFPTTHFLQTALPILKHSLSHTLQHFFPFASNLILPPHPHVPYIRYLEGDSLSFTVAESSPADFTLLTSDSPRDSYDWQPLAPVLPSQRTSHDGTCEFPLMAIQVTMIPNSGFSICVIFDHVAGDGRTLHHFMKFWASVCKAKGDLDFPCSMPLPLYDRNIVKDPKGLMHVYMQDLRNSALLTKQFRGVLRGVYTDKVRATFIFSSEQAQKLKKWVSLKCNGSRTLHISTFVVTCSLIWVCMLRSEQKEKEGNNEPCNIGFSADCHNHPQFSLPSNYFGNCLIPLITRLKRGELVEQNGIVAAANAIEKNIRDFKSDALRWAETTMSDIRGLRKSGQSLVVIVGSPKLTAYNTDFGWGKPVKSEVVNLDSVGTVSLSDCRDQEGGIQVGMVLERIRMNNFTSILEEHLSHVAVLD

SEQ ID NO: 54103 - DNA, 1491 bp, Glycine max
  misc_feature (1)..(1491): Ceres Seq. ID no. 15224590
cgagtcactgataaggaattgtttttcgtgtcccccctcgagtgccttacggaaagccccccccccattcttctcgaacgttattctcaaaaggaaacacactctgctttagtagaagaagaaactgcgctcagcatcattgaacactagcaaactcggtgacaacgaagtggtttctgtgaagcaagaaagaaacaattttacggatgctcctcaacgaaaggaaataaagcttttaaaacatgtgatggaaagtggtttttggagcaacgttccgcagcgattgcaaacaaagaggaagagtaaattcaatggcaagggagcactttctacatcgaaggcagtgctttctaaaacgaaggaagcactttctagatccaatgaagcactttctgcacccaaggaagctctttctaaaccgaaggaagcacattctagacccaataaagcacattctagacccaataaagcactttctacacccaagaaagcgctttctacactgaaggaagcactttctagatccaaggaaaagctaaacagtggagattttgatatttacttgaagaaaatatggaagattttctcagaagataggttgaggcattgtacatactgacagcttatggtttagtctctacaggacctcttcatctaaagacaaagtgttgacttggattaaaaaagaacctattttctcaaagtcatatgtttttgtgttcctatagtctgctggggtcattggagcctcgtgccattttggtgaaagcttggaatcaactaccagatcacggtgcatgttgttgctggattctcttgaaatggccaatccaagacggctcaaacctaagattagaagatttgttttagatatttatagaacaggggacaggcctgaggctaagcatctcatatctcgaattccttttttggtgcccaaggtaattatcaccctttctattattttcatctccagtgtaaccaaatattgaagaaaaaacaaattattgtatgtgccacaacaaagagatggtaatgaatgtggatttttcatcctctatttcattaatttgtttttggagtgtgcgcctgataactttagcatggagggataccctttgtaagttatctcatttgctgttcttgaaatttatttattaaaacatgcattttgattcagttatgtttgacattgacatgctgcagatgaaaaaagattggtttacctttgaagacctagataggttttatgagagacttggttcactgaattagatgtccccaaacttgaccagactagtgattagatctaacatactttattgttgactgattatattgtattggtaacggggggatttgttcatataggataataggaggcaagcataacttagaagtttcttctattagagagggtactctcttctatgcatgtagttcaactctattggaattatattatgttctggaattgatgtttacactact

SEQ ID NO: 54104 - protein, 123 aa, Glycine max
  peptide (1)..(123): Ceres Seq. ID no. 15224591
MESGFWSNVPQRLQTKRKSKFNGKGALSTSKAVLSKTKEALSRSNEALSAPKEALSKPKEAHSRPNKAHSRPNKALSTPKKALSTLKEALSRSKEKLNSGDFDIYLKKIWKIFSEDRLRHCTY

SEQ ID NO: 54105 - protein, 64 aa, Glycine max
  peptide (1)..(64): Ceres Seq. ID no. 15224592
MAREHFLHRRQCFLKRRKHFLDPMKHFLHPRKLFLNRRKHILDPIKHILDPIKHFLHPRKRFLH

SEQ ID NO: 54106 - protein, 64 aa, Glycine max
  peptide (1)..(64): Ceres Seq. ID no. 15224593
MLLLDSLEMANPRRLKPKIRRFVLDIYRTGDRPEAKHLISRIPFLVPKVIITLSIIFISSVTKY

SEQ ID NO: 54107 - DNA, 1173 bp, Glycine max
  misc_feature (1)..(1173): Ceres Seq. ID no. 14307300
gaagtgcgagattaacagtcgctaacaaacaagttcgttagtgcagtgaagctctccagttcctatgcatagcaacaacggtgattgccttaaagaagccatagtcagaccacctgattgcttatgaaggactcaagcatagagtgtttgaggtctccttgactgatcttcaaggggatgaggatgatgcattcaagaagattaggttgagagctgaagatgtgcaagggaagaatgttctgacaaatttctagggaatggatttcacaacagagttgctgaggtcattggtacgaaaatggcaaactcttattgaagcccatgtggatgtaaagacaactgataattacacattcagaatgttttgcattggatttaccaagagaagagctaaccaggtgaagagaacctgttatgcacaatcaagccagaaactgaacttgaatttgctcctatgatcattgaccctatggtgatatcggcaccagaaactcaatcagcagcagctagcatactagttgcagaaactgaacttgaatttgctgtttgtgactgttgtggactaacagttttatgtgcaccccagcctatatagaaagaatcagacagaggtactttggaaaatgggtttgtgggttgtgtgctgaggctgttaaggatgaaattgtgaggtctgagagggttgtttgcacacaaaaagcaatggctaagcacatgaacttctacaaaaacttcaaggcatcagggcctcatccaaatccgacagtgcacttgatatcagccttgagacagattcttagaaggactttggattctcctagagtaaggtccacaccaaaaagtccaaccaagactcgcacaaaaattcatggttctgtgcttacaacatctgagagctgtttccctacctctctgaagggttgtgatgaagggaatacttgggtaattagttggataaaaatggaagcaggaagcagaaataaggacaaaaaaatataagctgcaaaagtttagatgttcaattgtagttttggccagtacagaacttgcaatatgtttgttagaaaatttgaacataagttggtcaagaattttgcttcactcagaccagttatgtaccttgttttgtatggcatttatttgtttgaaataagaaaaatatgttcttaactg

SEQ ID NO: 54108 - protein, 141 aa, Glycine max
  peptide (1)..(141): Ceres Seq. ID no. 14307301
MCTPAYIERIRQRYFGKWVCGLCAEAVKDEIVRSERVVCTQKAMAKHMNFYKNFKASGPHPNPTVHLISALRQILRRTLDSPRVRSTPKSPTKTRTKIHGSVLTTSESCFPTSLKGCDEGNTWVISWIKMEAGSRNKDKKI

SEQ ID NO: 54109 - protein, 98 aa, Glycine max
  peptide (1)..(98): Ceres Seq. ID no. 14307302
MAKHMNFYKNFKASGPHPNPTVHLISALRQILRRTLDSPRVRSTPKSPTKTRTKIHGSVLTTSESCFPTSLKGCDEGNTWVISWIKMEAGSRNKDKKI

SEQ ID NO: 54110 - protein, 94 aa, Glycine max
  peptide (1)..(94): Ceres Seq. ID no. 14307303
MNFYKNFKASGPHPNPTVHLISALRQILRRTLDSPRVRSTPKSPTKTRTKIHGSVLTTSESCFPTSLKGCDEGNTWVISWIKMEAGSRNKDKKI

SEQ ID NO: 54111 - DNA, 1740 bp, Glycine max
  misc_feature (1)..(1740): Ceres Seq. ID no. 14306957
ataaaatgatttctgcgatttcgtgggtgcccaaaggggtttcgaagtcggaacctgtcgtggctgatcctcctcccgaagaggaaatccaagaaatcatcgccagccacactaccaaaagtggagacagtgacaatgaagtcgccaacaacgatgaagttgtggcacaagcattaaacgtagctgatgcagttggcaaagcctccaccggaagctgtgacgaaataacccttgcgttgaaggaccttgacatggaccgttatgacgacgaagatgaaggaattgaggtgttcagttctggaattggtgatctttattatcccagtaacgacatggatccatatatcaaagataaaaacgatgatgattctgatgaactcgaagacatgatcatcaacccaactgattctgtcattgtttatgcatgtactgaggatgaagtcagttatcttgaggttttggttatcgaggatgccgattctagcgaaatgaacgtgtatcctcaccataatatcattattccagcatttccactctgcacagcttggctcgattgcccccttaaaggaggagaaagagggaacttcatagctgttggttcaatggaaccttccatagaaatttgggaccttgatgttattgatgaggtgcagccatgtgtggttttgggtggatttgaagagaaaaagaaaaaggggaaaaagaaaccaatcaaatacaaagatgacagtcacactgactcagtacttggtcttgcttggaacaaggagtacaggaatatactagcaagtgccggtgctgacaagcgagtgaagatttgggatgtggttgccgggaagtgtgatattacaatggagcatcactcggacaaggttcaagcagttgcttggaatcatcatgcaccacaggttcttcttagtggttcatttgatcatactgttgtcttgaaggatggaaggatgccatcacattctggctataagtggtcagtcacagctgatgtagagagcttggcatgggatctacatactgagcactcgtttgtggtgagtcttgaagatggtattgtcaagggttttgatattcggactgccaactctgattcctcatcagatctgagttctacatttacacttcatgcacatgacaaagctgttacctcagtatcctataatccatcggcacccaatctccttgccactggatccatggacaaaacggtaaaactttgggatttgtcgaacaaccaaccctcttgtgtagcatctaaatctccgagagcaggggttatctttaaaatttctttctcagaggacaaccccttcttgttggctataggaggctcaaagggaaaattgcaagtttgggataccttatctgatgctggcatttctcgaagatatgggaattacaagaatagatcgcaatctgggtcttgaagttgtagtcttccttcccgtactgctcaagttgtgttgcataaatcaaaattttgggattcactgcaaaaatatgttcttgatttattctttttttgcatcctaataacctttatttgaaatagcataaatttgaattggttgaacgtaaattgttgtgattccaatttccaacactttatagtttagtttggacatcttttgggggggcaaggcccaatgaaaactacaaagacatgctccctctgttttatgttatttgccgtttaagataatgtatatatccatggtcttaacactt

SEQ ID NO: 54112 - protein, 478 aa, Glycine max
  peptide (1)..(478): Ceres Seq. ID no. 14306958
KMISAISWVPKGVSKSEPVVADPPPEEEIQEIIASHTTKSGDSDNEVANNDEVVAQALNVADAVGKASTGSCDEITLALKDLDMDRYDDEDEGIEVFSSGIGDLYYPSNDMDPYIKDKNDDDSDELEDMIINPTDSVIVYACTEDEVSYLEVLVIEDADSSEMNVYPHHNIIIPAFPLCTAWLDCPLKGGERGNFIAVGSMEPSIEIWDLDVIDEVQPCVVLGGFEEKKKKGKKKPIKYKDDSHTDSVLGLAWNKEYRNILASAGADKRVKIWDVVAGKCDITMEHHSDKVQAVAWNHHAPQVLLSGSFDHTVVLKDGRMPSHSGYKWSVTADVESLAWDLHTEHSFVVSLEDGIVKGFDIRTANSDSSSDLSSTFTLHAHDKAVTSVSYNPSAPNLLATGSMDKTVKLWDLSNNQPSCVASKSPRAGVIFKISFSEDNPFLLAIGGSKGKLQVWDTLSDAGISRRYGNYKNRSQSGS

SEQ ID NO: 54113 - protein, 477 aa, Glycine max
  peptide (1)..(477): Ceres Seq. ID no. 14306959
MISAISWVPKGVSKSEPVVADPPPEEEIQEIIASHTTKSGDSDNEVANNDEVVAQALNVADAVGKASTGSCDEITLALKDLDMDRYDDEDEGIEVFSSGIGDLYYPSNDMDPYIKDKNDDDSDELEDMIINPTDSVIVYACTEDEVSYLEVLVIEDADSSEMNVYPHHNIIIPAFPLCTAWLDCPLKGGERGNFIAVGSMEPSIEIWDLDVIDEVQPCVVLGGFEEKKKKGKKKPIKYKDDSHTDSVLGLAWNKEYRNILASAGADKRVKIWDVVAGKCDITMEHHSDKVQAVAWNHHAPQVLLSGSFDHTVVLKDGRMPSHSGYKWSVTADVESLAWDLHTEHSFVVSLEDGIVKGFDIRTANSDSSSDLSSTFTLHAHDKAVTSVSYNPSAPNLLATGSMDKTVKLWDLSNNQPSCVASKSPRAGVIFKISFSEDNPFLLAIGGSKGKLQVWDTLSDAGISRRYGNYKNRSQSGS

SEQ ID NO: 54114 - protein, 395 aa, Glycine max
  peptide (1)..(395): Ceres Seq. ID no. 14306960
MDRYDDEDEGIEVFSSGIGDLYYPSNDMDPYIKDKNDDDSDELEDMIINPTDSVIVYACTEDEVSYLEVLVIEDADSSEMNVYPHHNIIIPAFPLCTAWLDCPLKGGERGNFIAVGSMEPSIEIWDLDVIDEVQPCVVLGGFEEKKKKGKKKPIKYKDDSHTDSVLGLAWNKEYRNILASAGADKRVKIWDVVAGKCDITMEHHSDKVQAVAWNHHAPQVLLSGSFDHTVVLKDGRMPSHSGYKWSVTADVESLAWDLHTEHSFVVSLEDGIVKGFDIRTANSDSSSDLSSTFTLHAHDKAVTSVSYNPSAPNLLATGSMDKTVKLWDLSNNQPSCVASKSPRAGVIFKISFSEDNPFLLAIGGSKGKLQVWDTLSDAGISRRYGNYKNRSQSGS

SEQ ID NO: 54115 - DNA, 1322 bp, Glycine max
  misc_feature (1)..(1322): Ceres Seq. ID no. 14313694
aaaaaaaaaccgcatctgttccgtgtaaggagaagtcacaaaatttctcagctcctgcctgtatacttcacatggcctaatcccacagtcgcacactcttccaccctgccatcaccaatcatcaacacaacgcccattattatttaaaaatccttaatatattattattcttcgtccatcgctttttcttgaagactacttcatccttcttattagtttctttttatttcaatctttctcactcgcacgcacgcacgcacagtctctagtggtaccgtgccggttcatttgcttcatccaccacctcattttcagagatttcgtgcactcaacaaactctcatccacccatggcgtcatcactatcaacaatagctctattcctgccccaatcgctctatattaagccccgcctggcgccacggcctcttcctccccctcaattccgctcccttttcctaacctcaccggcgggtgctcgtactgctactgtcatgcctagaagggcggcagtcatcgtgtcggcggcgacggcggagacgccgaagaagaagggcgaatcgaaagggttcgtggaagagatgaggttcgtggcgatgaggctgcacacgagggaccaggccagggagggcgagaaggaggtcaagcagcccgaggagaaagccgttaccaagtgggacccatccgtcgaagggtacctgaaatttcttgtggacagtaagctcgtttatgacacgctggagaaaatcgttcaagaggctcctcatccttcttatgctgaattcagaaacactggattggaaaggtctgcaagtttggcagaagatttggagttgttcaaggagcaaggttataccattcctgaaccttcttctcctggtcttacctatgcacaatatcttaaggagttatctgtgaaggatccccaagcattcatttgccatttttacaatatctactttgctcattcagctggtggtcgaatgattgggaaaaaggttgctgaaaagttacttaacaacaaggcgttggagttctacaaatgggatgatgaccttccacgattgttgcagaatgtgagagacaagttgaataaagttgctgaaccttggagtcgggaagaaaaggaccactgtctggaagaaacagaaaaatcattcaagctctctggagagattctccgtttgattttatcatgataatagatgccctgctatctgtgtaattatgggtattaaagtgcatggcggaagccaacaacattaccatatgtgaattattttatttccaatacgcaaaggaataatagaactgatgttgatt

SEQ ID NO: 54116 - protein, 282 aa, Glycine max
  peptide (1)..(282): Ceres Seq. ID no. 14313695
MASSLSTIALFLPQSLYIKPRLAPRPLPPPQFRSLFLTSPAGARTATVMPRRAAVIVSAATAETPKKKGESKGFVEEMRFVAMRLHTRDQAREGEKEVKQPEEKAVTKWDPSVEGYLKFLVDSKLVYDTLEKIVQEAPHPSYAEFRNTGLERSASLAEDLELFKEQGYTIPEPSSPGLTYAQYLKELSVKDPQAFICHFYNIYFAHSAGGRMIGKKVAEKLLNNKALEFYKWDDDLPRLLQNVRDKLNKVAEPWSREEKDHCLEETEKSFKLSGEILRLILS

SEQ ID NO: 54117 - protein, 234 aa, Glycine max
  peptide (1)..(234): Ceres Seq. ID no. 14313696
MPRRAAVIVSAATAETPKKKGESKGFVEEMRFVAMRLHTRDQAREGEKEVKQPEEKAVTKWDPSVEGYLKFLVDSKLVYDTLEKIVQEAPHPSYAEFRNTGLERSASLAEDLELFKEQGYTIPEPSSPGLTYAQYLKELSVKDPQAFICHFYNIYFAHSAGGRMIGKKVAEKLLNNKALEFYKWDDDLPRLLQNVRDKLNKVAEPWSREEKDHCLEETEKSFKLSGEILRLILS

SEQ ID NO: 54118 - protein, 205 aa, Glycine max
  peptide (1)..(205): Ceres Seq. ID no. 14313697
MRFVAMRLHTRDQAREGEKEVKQPEEKAVTKWDPSVEGYLKFLVDSKLVYDTLEKIVQEAPHPSYAEFRNTGLERSASLAEDLELFKEQGYTIPEPSSPGLTYAQYLKELSVKDPQAFICHFYNIYFAHSAGGRMIGKKVAEKLLNNKALEFYKWDDDLPRLLQNVRDKLNKVAEPWSREEKDHCLEETEKSFKLSGEILRLILS

SEQ ID NO: 54119 - DNA, 1649 bp, Glycine max
  misc_feature (1)..(1649): Ceres Seq. ID no. 14314879
gaacaaagaaatcttcaatttgaattccaatgggtgaagagcgatccgagatagtgttcttcgatgtggagaccagcgttccgacccgggcggggcagggttttgcgcttctggaattcggcgccattttggtttgccccaggacgctcacggagctccgcgattactccactctcgtccgcccagccaacctctccgtcatcacccccttgtccgagcgctgcaacggcatcaacgccgccgctgtctccgccgcccctaccttcgccgacattgctcacctcgtttacgacctcctccacgggaggatttgggcggggcataacatcataagattcgactgtgttcggattagagatgcgtttgctgagattaatcagccaccgcctgaacctaaggggaccattgactcgctggttttgttgactcaaaagtttggtagaagagctggtgacatgaagatggctactcttgctacttattttgggcttggacgccagacacataggagcttggatgatgttcggatgaatcttgaagtcctcaaatactgtgcaacagttctattcttggagtcaagtctcccagatatattcactgcaaatagttgggtttcaccaaatgctactacaagaagccgcagtaatgggaaatctccatcacagtggggcttattaaatattaataaagattctgtattatcatctcctgcaactgaatccaaagacaaaaatcgtccaataatttcttttgcattgagcagcccaaaagggaatgtctcgaatattgcagatcctaacatggatcaatcagatccttttaacttgagcactcttgaggctgaaataaaaagagaatccattaagtcagatgtcgccttggaggaaaaacccatgcaagagtcaactgatttggcttcctcatcttctgtatctcagccttgcagcagctctattgctgttttggaacctgatggaatatgtataccttctattgatgcatctcttgttccatcttttcgtggcagtcaaagaatagagttactgcatgaaggtttcctgtttcagcttcattgtactgatttgaaagtgcggtttggaataaactcaaagttttttgatagtgctggccggccacgattgagttttgtggttgatccatcaccaagtctatgtaatgttcttgatgcatgtgaccgtgtagcacagaagttaaccgtggattctggtagcagctctgattggaggcctgttgttattaggaaagaaggcttcttcaactatcctactgtcagattacacatacctactgcagtagtggcagacattgctatttatgccacggaaatatatcaaagagaatcatctggaacagtgcaaagacttctcttcagtaagtttgatgctgcagaacttggttccttgttcatgcctgggacatttgttgatgccgtcttctccttagatccgtatgattatcagcagaatgcagggattaaattagttgccaaaaaattgatcattcatagcaaatagaaggaaattgataattaagtataggttagttattacatgctaaggttgatagattaaatattggttatgctgtaaagttagttccatttcatgtttgtagttcaattgaggttc

SEQ ID NO: 54120 - protein, 501 aa, Glycine max
  peptide (1)..(501): Ceres Seq. ID no. 14314880
MGEERSEIVFFDVETSVPTRAGQGFALLEFGAILVCPRTLTELRDYSTLVRPANLSVITPLSERCNGINAAAVSAAPTFADIAHLVYDLLHGRIWAGHNIIRFDCVRIRDAFAEINQPPPEPKGTIDSLVLLTQKFGRRAGDMKMATLATYFGLGRQTHRSLDDVRMNLEVLKYCATVLFLESSLPDIFTANSWVSPNATTRSRSNGKSPSQWGLLNINKDSVLSSPATESKDKNRPIISFALSSPKGNVSNIADPNMDQSDPFNLSTLEAEIKRESIKSDVALEEKPMQESTDLASSSSVSQPCSSSIAVLEPDGICIPSIDASLVPSFRGSQRIELLHEGFLFQLHCTDLKVRFGINSKFFDSAGRPRLSFVVDPSPSLCNVLDACDRVAQKLTVDSGSSSDWRPVVIRKEGFFNYPTVRLHIPTAVVADIAIYATEIYQRESSGTVQRLLFSKFDAAELGSLFMPGTFVDAVFSLDPYDYQQNAGIKLVAKKLIIHSK

SEQ ID NO: 54121 - protein, 359 aa, Glycine max
  peptide (1)..(359): Ceres Seq. ID no. 14314881
MKMATLATYFGLGRQTHRSLDDVRMNLEVLKYCATVLFLESSLPDIFTANSWVSPNATTRSRSNGKSPSQWGLLNINKDSVLSSPATESKDKNRPIISFALSSPKGNVSNIADPNMDQSDPFNLSTLEAEIKRESIKSDVALEEKPMQESTDLASSSSVSQPCSSSIAVLEPDGICIPSIDASLVPSFRGSQRIELLHEGFLFQLHCTDLKVRFGINSKFFDSAGRPRLSFVVDPSPSLCNVLDACDRVAQKLTVDSGSSSDWRPVVIRKEGFFNYPTVRLHIPTAVVADIAIYATEIYQRESSGTVQRLLFSKFDAAELGSLFMPGTFVDAVFSLDPYDYQQNAGIKLVAKKLIIHSK

SEQ ID NO: 54122 - protein, 357 aa, Glycine max
  peptide (1)..(357): Ceres Seq. ID no. 14314882
MATLATYFGLGRQTHRSLDDVRMNLEVLKYCATVLFLESSLPDIFTANSWVSPNATTRSRSNGKSPSQWGLLNINKDSVLSSPATESKDKNRPIISFALSSPKGNVSNIADPNMDQSDPFNLSTLEAEIKRESIKSDVALEEKPMQESTDLASSSSVSQPCSSSIAVLEPDGICIPSIDASLVPSFRGSQRIELLHEGFLFQLHCTDLKVRFGINSKFFDSAGRPRLSFVVDPSPSLCNVLDACDRVAQKLTVDSGSSSDWRPVVIRKEGFFNYPTVRLHIPTAVVADIAIYATEIYQRESSGTVQRLLFSKFDAAELGSLFMPGTFVDAVFSLDPYDYQQNAGIKLVAKKLIIHSK

SEQ ID NO: 54123 - DNA, 1896 bp, Glycine max
  misc_feature (1)..(1896): Ceres Seq. ID no. 14303500
gtacaatcccacatcctcaagatatatattggcttgttccggcgtgcagagaatctcacaggtgcggaatatgaagccatagacatgatactactgaagaaacacgaaatggtcttcaattttgtctctgcactaataacaacaatattgctctccggagccatagttgaagttaagggtcttccacttcacacggattcacgatggatcgtcaacgaagatgggcagagggtcaagctggcatgtgtgaattgggtgtcccatttggaagctgtggtggccgaagggctcagcaaaaagcccgtggatgtcatttcaaatggaataaagtccatgggcttcaactgtgtcaggctcacttggcctatagttttggtcactaatgactctcttgcttctctcaccgttagaagctcctttcagaaccttgccctccttgaatccattgctggtgtccaaaccaacaacccctccattatcgatcttcccctcatccaagcttttcaggcagtggtgaaaagtctcggtgacaacgatgtgatggtgatattggacaaccacataacccagccagggtggtgctgcagtaactccgacggcaatggcttcttcggtgacaaattttttgacccaaaccagtggatattgggcctcaccaagatggcctccctcttcaatggagtcactaatgtggtgggcatgagcttgaggaatgagctccgagggcccaaacagaatgtcaacgattggtacaagtacatggtgaaaggagcagaagcgattcatgcagcaaatccggatgttcttgttattttatccggcctgaattttgataaagacttatctttcattcaaaatcggccagtgagcctcacatttaaggggaaattagtatatgaggcacactggtatgccttcactgatggtcaagcttgggttaatgggaatccaaaccaagtatgtggacaagtggcaggaaatatgatgagaacctcaggctttttagtgaaccaaggatggccattgtttattagtgagtttggtggagacttgagaggtaccaacgtgaatgacaaccgctaccttaactgcttcttggcagtggcagctgagcttgacttggattgggccttgtggacacttgttggtagctactactttagacaaggagttataggaatggaagagttttatgggattcttagttgggactggacccaagttagaaataccactttcttaaacagaatctctgccctccaacttccatttcgaggtccaggaataacaagaggcaatccatacaaattgatattccatcctttgaccggtttgtgtgtcataagaaagtcattactagacccattgacattgggtccttgctatttatctgatggctggaaatacacaccccagaaaattctatcaataaaaggaacttacttctgcatacaagcagagaatgaagggatgcctgcaaaacttgggataatatgctcagatcctaactctagatgggaaatgatctcagattcgaagttgcatctctcatctaaactcagcgatgattctaatgtatgcttagatgtagacgataacaacaacattgtgaccaatgcttgcaaatgcttgagcagagatcgtacatgtgaccctagtagccaatggttcaaacttattgacagcggaaggagatcaatgttgacaacctcaacatcatccatgctaaattcatcagacctttatggaaaccattaagctcagcataagttgttttaagaatattactgtaaatttctctaaccatgtacttatgttttaatggcaggaaagtgatgcattaaacatgtccatatgtatgactattgaattcaatacataatataccactattag

SEQ ID NO: 54124 - protein, 585 aa, Glycine max
  peptide (1)..(585): Ceres Seq. ID no. 14303501
VQSHILKIYIGLFRRAENLTGAEYEAIDMILLKKHEMVFNFVSALITTILLSGAIVEVKGLPLHTDSRWIVNEDGQRVKLACVNWVSHLEAVVAEGLSKKPVDVISNGIKSMGFNCVRLTWPIVLVTNDSLASLTVRSSFQNLALLESIAGVQTNNPSIIDLPLIQAFQAVVKSLGDNDVMVILDNHITQPGWCCSNSDGNGFFGDKFFDPNQWILGLTKMASLFNGVTNVVGMSLRNELRGPKQNVNDWYKYMVKGAEAIHAANPDVLVILSGLNFDKDLSFIQNRPVSLTFKGKLVYEAHWYAFTDGQAWVNGNPNQVCGQVAGNMMRTSGFLVNQGWPLFISEFGGDLRGTNVNDNRYLNCFLAVAAELDLDWALWTLVGSYYFRQGVIGMEEFYGILSWDWTQVRNTTFLNRISALQLPFRGPGITRGNPYKLIFHPLTGLCVIRKSLLDPLTLGPCYLSDGWKYTPQKILSIKGTYFCIQAENEGMPAKLGIICSDPNSRWEMISDSKLHLSSKLSDDSNVCLDVDDNNNIVTNACKCLSRDRTCDPSSQWFKLIDSGRRSMLTTSTSSMLNSSDLYGNH

SEQ ID NO: 54125 - protein, 557 aa, Glycine max
  peptide (1)..(557): Ceres Seq. ID no. 14303502
MILLKKHEMVFNFVSALITTILLSGAIVEVKGLPLHTDSRWIVNEDGQRVKLACVNWVSHLEAVVAEGLSKKPVDVISNGIKSMGFNCVRLTWPIVLVTNDSLASLTVRSSFQNLALLESIAGVQTNNPSIIDLPLIQAFQAVVKSLGDNDVMVILDNHITQPGWCCSNSDGNGFFGDKFFDPNQWILGLTKMASLFNGVTNVVGMSLRNELRGPKQNVNDWYKYMVKGAEAIHAANPDVLVILSGLNFDKDLSFIQNRPVSLTFKGKLVYEAHWYAFTDGQAWVNGNPNQVCGQVAGNMMRTSGFLVNQGWPLFISEFGGDLRGTNVNDNRYLNCFLAVAAELDLDWALWTLVGSYYFRQGVIGMEEFYGILSWDWTQVRNTTFLNRISALQLPFRGPGITRGNPYKLIFHPLTGLCVIRKSLLDPLTLGPCYLSDGWKYTPQKILSIKGTYFCIQAENEGMPAKLGIICSDPNSRWEMISDSKLHLSSKLSDDSNVCLDVDDNNNIVTNACKCLSRDRTCDPSSQWFKLIDSGRRSMLTTSTSSMLNSSDLYGNH

SEQ ID NO: 54126 - protein, 549 aa, Glycine max
  peptide (1)..(549): Ceres Seq. ID no. 14303503
MVFNFVSALITTILLSGAIVEVKGLPLHTDSRWIVNEDGQRVKLACVNWVSHLEAVVAEGLSKKPVDVISNGIKSMGFNCVRLTWPIVLVTNDSLASLTVRSSFQNLALLESIAGVQTNNPSIIDLPLIQAFQAVVKSLGDNDVMVILDNHITQPGWCCSNSDGNGFFGDKFFDPNQWILGLTKMASLFNGVTNVVGMSLRNELRGPKQNVNDWYKYMVKGAEAIHAANPDVLVILSGLNFDKDLSFIQNRPVSLTFKGKLVYEAHWYAFTDGQAWVNGNPNQVCGQVAGNMMRTSGFLVNQGWPLFISEFGGDLRGTNVNDNRYLNCFLAVAAELDLDWALWTLVGSYYFRQGVIGMEEFYGILSWDWTQVRNTTFLNRISALQLPFRGPGITRGNPYKLIFHPLTGLCVIRKSLLDPLTLGPCYLSDGWKYTPQKILSIKGTYFCIQAENEGMPAKLGIICSDPNSRWEMISDSKLHLSSKLSDDSNVCLDVDDNNNIVTNACKCLSRDRTCDPSSQWFKLIDSGRRSMLTTSTSSMLNSSDLYGNH

SEQ ID NO: 54127 - DNA, 921 bp, Glycine max
  misc_feature (1)..(921): Ceres Seq. ID no. 14307370
gataaatagctgcaaccactttgatcttgactcatacaggtcccttgtagccacttgttctgtcttgaaaatccattttgcttcatttcattcctcacatttatttttcttccatggagaacttgttgggtctgctgagaattcatgttgaaaaaggtgtcaatcttgccatcagggatgtggtgagcagtgacccttatgttgtcatcaaaatgggcaagcagaagctgaagactcgggtagtcaataagaatctaaatcctgaatggaatgatgacttgaccttgtctatctctgaccctcatgctccaattcatctacatgtgtatgacaaggacacatttagcatggatgacaaaatgggggatgcagagtttttcataggtccatttattgaagcagtgaagatgcgcttatcaagtctccccaacaatactatagttacaaaagtgctacctagcagacaaaacagtttagctgaagagagtcacattgtgtggaaggatggcaaagttgtccaaaacatggttcttagactaagaaatgttgagactggggaagtggagctccagttgcattggattgacattcctggttcaaggcatctctagatcacagtccaaagcatggttcttacttcttagacttgccatattgtgaaaattagatttgcagcttcataaaccagcaggcagcagcaccttatgctttaatttctcctatccttttatctctttcgcacaacataaaaactgtttaatacgttggtattgcaattactagtagttaccgaaaaagaatgggagatgtagtttccctagctgtaatttagactttgaattatctgctagtcttgtgtaataatgtacaagaaatgtaacagaaagatgttgcacttaattagaacatccttagttaacg

SEQ ID NO: 54128 - protein, 165 aa, Glycine max
  peptide (1)..(165): Ceres Seq. ID no. 14307371
MENLLGLLRIHVEKGVNLAIRDVVSSDPYVVIKMGKQKLKTRVVNKNLNPEWNDDLTLSISDPHAPIHLHVYDKDTFSMDDKMGDAEFFIGPFIEAVKMRLSSLPNNTIVTKVLPSRQNSLAEESHIVWKDGKVVQNMVLRLRNVETGEVELQLHWIDIPGSRHL

SEQ ID NO: 54129 - protein, 132 aa, Glycine max
  peptide (1)..(132): Ceres Seq. ID no. 14307372
MGKQKLKTRVVNKNLNPEWNDDLTLSISDPHAPIHLHVYDKDTFSMDDKMGDAEFFIGPFIEAVKMRLSSLPNNTIVTKVLPSRQNSLAEESHIVWKDGKVVQNMVLRLRNVETGEVELQLHWIDIPGSRHL

SEQ ID NO: 54130 - protein, 87 aa, Glycine max
  peptide (1)..(87): Ceres Seq. ID no. 14307373
MDDKMGDAEFFIGPFIEAVKMRLSSLPNNTIVTKVLPSRQNSLAEESHIVWKDGKVVQNMVLRLRNVETGEVELQLHWIDIPGSRHL

SEQ ID NO: 54131 - DNA, 1063 bp, Glycine max
  misc_feature (1)..(1063): Ceres Seq. ID no. 14307324
gaagaagaagggttttaagagagagagagagagagcgaataattaaaaggcccttgccttcacctttggtgtccaaagatattgctagagagaagaactagttgttcaattagcttcttcttcttcttcttcttccacccttcttgtttgagtaaattaagaagcttgagatcagacatgtcgagctgcagcatcgatgttgcgcctgagcaactctgctacatcccctgcaacttctgcaatattgttcttgcggtgagtgttccatgcagtagcctgtttgacattgtgaccgttcgatgtgggcactgcaccaatctatggtccgtgaacatggccgccgcgtttcagtcactgtcatggcaagatgttcagggatctgggcactgcaatccagagtacaggattgacactggctccacgtccaaatgcaacaataggattgcaatgcgtgcgcccaccactcatgtaactgaggaaagggttgtgaacaggcctcccgagaagaggcagcgcgtaccttctgcttataaccagtttataaaggaagagattcagaggatcaaagccaataatcctgatatcagtcatagagaagctttcagtacagctgcaaagaactgggcacattttccccatattcatttcgggctgatgttggagagcaacaaccaagttaagatggagaatgtttctgagaagcatttaatgtcaagggctgcgctattgaataaatgaatgctatcttcatcatatcacaggacttgggtttcatttgaatctgtcaagtaaacaatgtcctgacctaaaaggagttttaaggacaatcatctctttttcttcgttagtgtacttgtcactacttactacttgttcaatggatgcttttcacttaatttgaagcaagaatgctagttttcccttgtcatctttcaataagttctatcttctagctgattcagatgaaagatgaaatatgtatgctactgttttaagctcgatggcgagaacatttatcatcatattttttggtaatactaataaacttttaagttaatttgtt

SEQ ID NO: 54132 - protein, 186 aa, Glycine max
  peptide (1)..(186): Ceres Seq. ID no. 14307325
MSSCSIDVAPEQLCYIPCNFCNIVLAVSVPCSSLFDIVTVRCGHCTNLWSVNMAAAFQSLSWQDVQGSGHCNPEYRIDTGSTSKCNNRIAMRAPTTHVTEERVVNRPPEKRQRVPSAYNQFIKEEIQRIKANNPDISHREAFSTAAKNWAHFPHIHFGLMLESNNQVKMENVSEKHLMSRAALLNK

SEQ ID NO: 54133 - protein, 134 aa, Glycine max
  peptide (1)..(134): Ceres Seq. ID no. 14307326
MAAAFQSLSWQDVQGSGHCNPEYRIDTGSTSKCNNRIAMRAPTTHVTEERVVNRPPEKRQRVPSAYNQFIKEEIQRIKANNPDISHREAFSTAAKNWAHFPHIHFGLMLESNNQVKMENVSEKHLMSRAALLNK

SEQ ID NO: 54134 - protein, 96 aa, Glycine max
  peptide (1)..(96): Ceres Seq. ID no. 14307327
MRAPTTHVTEERVVNRPPEKRQRVPSAYNQFIKEEIQRIKANNPDISHREAFSTAAKNWAHFPHIHFGLMLESNNQVKMENVSEKHLMSRAALLNK

SEQ ID NO: 54135 - DNA, 933 bp, Glycine max
  misc_feature (1)..(933): Ceres Seq. ID no. 13593919
aaawtcaaaatawtgaaaagccgcgagggaggtttcgtttcgtttcgttcagttcacacattctattctctatcgattcctcttccctttttctcaatccactacaccacagttatgaggagccaacttgtgtgtaatgggtgtaggagcatcttggtttaccctagaggagcaaccaatgtttgctgtgcgttgtgcaacaccattacctctgttcctcctcctggaatggacatgtcacaactctattgtggaggctgtacgacattgctaatgtacacacgtggtgctacaagtgtgagatgttcctgctgtcacactattaaccttgtaccagaatctaatcaagtcattcattgtgcgaactgccggacaacactcatgtatccttatggagcttcctcagtcaaatgtgcaatttgttgctatattactaatatcagtatgaccaatggaaggctttcaattcctgtacagagaccaaatggaacagccaactctggaacagtatcttcaacttcatcgtcaatgccttattctcagagccaaactgtcgtagtagaaaatcctatgtctgttgattcgagtgggaaattggtgaggaatgtcgttgtgggcgttacaacagataagaaatgatacttgccacatgaaaatgttacacaagtgtaaagggaacatcatttgactcgtcaactgctggtgcttgaaaatattgttcgtgtatatgaaattgcagcttataagttaaagatatttttgttctaaatgagatttagactgatttaatttacatatatgtatacgaggaccagtggaaagggcacacaacttgtcatttattgaattgccaaggtcctctttttgctgcagttgtatcacagggtttttcgcatctcgaattacaagtcctagatgcacatttgattcctc

SEQ ID NO: 54136 - protein, 212 aa, Glycine max
  peptide (1)..(212): Ceres Seq. ID no. 15221255
  misc_feature (2)..(2): Xaa is any aa, unknown or other
  misc_feature (5)..(5): Xaa is any aa, unknown or other
KXKIXKSREGGFVSFRSVHTFYSLSIPLPFFSIHYTTVMRSQLVCNGCRSILVYPRGATNVCCALCNTITSVPPPGMDMSQLYCGGCTTLLMYTRGATSVRCSCCHTINLVPESNQVIHCANCRTTLMYPYGASSVKCAICCYITNISMTNGRLSIPVQRPNGTANSGTVSSTSSSMPYSQSQTVVVENPMSVDSSGKLVRNVVVGVTTDKK

SEQ ID NO: 54137 - protein, 174 aa, Glycine max
  peptide (1)..(174): Ceres Seq. ID no. 15221256
MRSQLVCNGCRSILVYPRGATNVCCALCNTITSVPPPGMDMSQLYCGGCTTLLMYTRGATSVRCSCCHTINLVPESNQVIHCANCRTTLMYPYGASSVKCAICCYITNISMTNGRLSIPVQRPNGTANSGTVSSTSSSMPYSQSQTVVVENPMSVDSSGKLVRNVVVGVTTDKK

SEQ ID NO: 54138 - protein, 136 aa, Glycine max
  peptide (1)..(136): Ceres Seq. ID no. 15221257
MDMSQLYCGGCTTLLMYTRGATSVRCSCCHTINLVPESNQVIHCANCRTTLMYPYGASSVKCAICCYITNISMTNGRLSIPVQRPNGTANSGTVSSTSSSMPYSQSQTVVVENPMSVDSSGKLVRNVVVGVTTDKK

SEQ ID NO: 54139 - DNA, 1480 bp, Glycine max
  misc_feature (1)..(1480): Ceres Seq. ID no. 15178173
agaagaaagttgaatacagcccggcacgtatcttcggacccattaaaagtttggaaatctttgatatgggcaaacatataaaacgggaatcttcgtcgtggaatctgaggaaacgtcagtatgaaaatcatggagttttcctcgccataatgaacgagagagaatcactagaggcacatgttgttggtagaagaatttctctgggattgactttgattgaatgattgttcactgttcatgctaaacaacacaaaccaaacggctattctgactactttttgatcctgtttctaatcttgtttctaggatcctgtctgtctctcttggtttggtttattagacttgtgctgtgtctaagtctttctttcagggctctgtgagttgaattcaggtgtcacatccaaggcaacaaaacaagatgatgagtccaaaccttgcaaaacaagttggggacacaacctataccaagatctttgttggaggattagcttgggagactaagagagatactttaaaacgctatttcgatcagtttggggagatcttagaggccgtcgtcatcactgacagaatcacaggaagatcaaaaggatatggctttgtgatcttcagggacccaaattctgcaataagagcttgtcataatccctatcctgtgattgatggaaggagagctaactgtaatcttgcagctcttggtgcacagaaatttgatccatctataacaacaggaaggcaaaaattcagtagcccttcatggaatatggcaccaattccattgcaaggaacttccactcattacaatcagcacataccacactacccatttccgcatccagtctacaggtatcctggttatcctcacccacaagacttgtatgaaatgaactacaataatgcttatggtggacagcagcttccactctgttggtttccagcatattgccaacccttttatggccttagtagacagtttattccaacagcatatgtgaaaaaggcacaaacccctgacgtgtcacctcaggagttcacggttgttggcttctcagaacctatttcagcttctccctcaatttgcagcactggattagacacaggaacagtaccagctacaggagtgctagaatcccaccaagaacagaagtcttcaacttaaagctatgatgtcaatttactagaatagagaaagtaaaaaagaaaaatgacactgctgaataaaccaggaagctctaagtacattcccattgaggtggtctagcaaaggaactaaatcaagcaataacgtattgagatctcccatcgatggaacagctgatcctagagacctgacacttatgaagtgaatcctggatttgttcattgtctttgaacatttttttacttttcagcattctggtgcacagtattcattcttcggttttcctttttttttcattttagttttcttttttaaaattggattccagctaagctatag

SEQ ID NO: 54140 - protein, 246 aa, Glycine max
  peptide (1)..(246): Ceres Seq. ID no. 15178174
MMSPNLAKQVGDTTYTKIFVGGLAWETKRDTLKRYFDQFGEILEAVVITDRITGRSKGYGFVIFRDPNSAIRACHNPYPVIDGRRANCNLAALGAQKFDPSITTGRQKFSSPSWNMAPIPLQGTSTHYNQHIPHYPFPHPVYRYPGYPHPQDLYEMNYNNAYGGQQLPLCWFPAYCQPFYGLSRQFIPTAYVKKAQTPDVSPQEFTVVGFSEPISASPSICSTGLDTGTVPATGVLESHQEQKSST

SEQ ID NO: 54141 - protein, 245 aa, Glycine max
  peptide (1)..(245): Ceres Seq. ID no. 15178175
MSPNLAKQVGDTTYTKIFVGGLAWETKRDTLKRYFDQFGEILEAVVITDRITGRSKGYGFVIFRDPNSAIRACHNPYPVIDGRRANCNLAALGAQKFDPSITTGRQKFSSPSWNMAPIPLQGTSTHYNQHIPHYPFPHPVYRYPGYPHPQDLYEMNYNNAYGGQQLPLCWFPAYCQPFYGLSRQFIPTAYVKKAQTPDVSPQEFTVVGFSEPISASPSICSTGLDTGTVPATGVLESHQEQKSST

SEQ ID NO: 54142 - protein, 131 aa, Glycine max
  peptide (1)..(131): Ceres Seq. ID no. 15178176
MAPIPLQGTSTHYNQHIPHYPFPHPVYRYPGYPHPQDLYEMNYNNAYGGQQLPLCWFPAYCQPFYGLSRQFIPTAYVKKAQTPDVSPQEFTVVGFSEPISASPSICSTGLDTGTVPATGVLESHQEQKSST

SEQ ID NO: 54143 - DNA, 1882 bp, Glycine max
  misc_feature (1)..(1882): Ceres Seq. ID no. 14313739
ggaggtttctgttcgtttcatttcatttggtcacacagtgttgtcggccactttctctctctttcgcgcttcaactttcgtttttgcactgattgaaattgtgaggagcaacagaccacttgagatagtttaactcagctgcagggatggatctgtggggtgctcatcatcgacttttgttcattggtcggcatgaggaagatggaactcctgatacttctatgggagaggaatcaaacgatgaagaagaaaaaataattaaaactgaacccgtctttgtgcctgaaattaagaaaaggaaacgccttagccttagtcagcttaaagaggtgaaagaggagtcacatgggaagcaaagcagtagcaagcctaagagaaagaagcatgatagtagggatagatggtcagctgagaggtatcaattggctgagcaaaacatgtgggaggtactaaaggctgaaggggcgtcatttgaaaacccaataacccgacctgcactaagattggctgcccgcaaacacattggagatactggacttttagatcacttactgaagcacattgatggtaaagtggcacctggagggactgagagattccgaagatggttcaacaccaatggaatcatggagtattggttggagagtgctgacttggacaaggtgcgccaggaggcaggggtgcaggaccctttctggataccgccatctgcatatagggcagccggtgccccttcccaaaatattgattcttctgatgaattgaaacagcttaaaatagaactgacacaaatgaagaaagatatgcatgagctcattgccaagaaggaagagaaaagtgatattaacatgatggaggagacacacaaggaatttgtgaagtggaaatttatgactgaccatcgccttactgaaatcatgacttctttgaaggatgttcagggaaagtatggtgaattgatgatttggaaaactacagttgcgcaacaacttatggaaataactaataaattgaatgatcttcaagcatctagggaatgcaccacttatagtcctccttcagaaaggtggaaagattggatagaaagcaccaacctagacaatattcaggaagatgcatttgctacttggattgggaatccagagctacttaatgttccacaagaggttatacttgaagatcccaacacgaccatgccaacacagccacccagtgaagaactgactaacaagaagagcgatgtgctggagttagtacctgtaaaactagaagatcaaccaaatgtaacccctgattcttctacaactgttaattcgaagtcagaccttgacaactcattgattatgtttcaggagatgtttatggatttatacaaatggaaagagaaaatggaacagcagctgatggaggtatcgaatactgtatatggtatgcttgcaatgaagtagacatcactccgaagtatcgaggctaagataggatataaccaccgtttcgttctcaagttttctttgttactcttaaaactggtaaagtttagatattgtacagcattaacaatctgatcctgaaaatctatgccaaccactaagttcacagaagaggttgagtctcaccctgctggctgagctgcaaattgtcgatatgtctgactggccttttacagtatacttggccttttaaattgaatgacttaaggtaggtcttcagtggtaatgaaattggttgttttctcaacttattgggtaagattatgagttcctttagtataggtctttaggtaggctacccgtatttaacgtattagctgaaactatcttgttagagcttgtacttaacctatttggtaacaagttgccatatatatatatagaatttctac

SEQ ID NO: 54144 - protein, 433 aa, Glycine max
  peptide (1)..(433): Ceres Seq. ID no. 14313740
MDLWGAHHRLLFIGRHEEDGTPDTSMGEESNDEEEKIIKTEPVFVPEIKKRKRLSLSQLKEVKEESHGKQSSSKPKRKKHDSRDRWSAERYQLAEQNMWEVLKAEGASFENPITRPALRLAARKHIGDTGLLDHLLKHIDGKVAPGGTERFRRWFNTNGIMEYWLESADLDKVRQEAGVQDPFWIPPSAYRAAGAPSQNIDSSDELKQLKIELTQMKKDMHELIAKKEEKSDINMMEETHKEFVKWKFMTDHRLTEIMTSLKDVQGKYGELMIWKTTVAQQLMEITNKLNDLQASRECTTYSPPSERWKDWIESTNLDNIQEDAFATWIGNPELLNVPQEVILEDPNTTMPTQPPSEELTNKKSDVLELVPVKLEDQPNVTPDSSTTVNSKSDLDNSLIMFQEMFMDLYKWKEKMEQQLMEVSNTVYGMLAMK

SEQ ID NO: 54145 - protein, 408 aa, Glycine max
  peptide (1)..(408): Ceres Seq. ID no. 14313741
MGEESNDEEEKIIKTEPVFVPEIKKRKRLSLSQLKEVKEESHGKQSSSKPKRKKHDSRDRWSAERYQLAEQNMWEVLKAEGASFENPITRPALRLAARKHIGDTGLLDHLLKHIDGKVAPGGTERFRRWFNTNGIMEYWLESADLDKVRQEAGVQDPFWIPPSAYRAAGAPSQNIDSSDELKQLKIELTQMKKDMHELIAKKEEKSDINMMEETHKEFVKWKFMTDHRLTEIMTSLKDVQGKYGELMIWKTTVAQQLMEITNKLNDLQASRECTTYSPPSERWKDWIESTNLDNIQEDAFATWIGNPELLNVPQEVILEDPNTTMPTQPPSEELTNKKSDVLELVPVKLEDQPNVTPDSSTTVNSKSDLDNSLIMFQEMFMDLYKWKEKMEQQLMEVSNTVYGMLAMK

SEQ ID NO: 54146 - protein, 336 aa, Glycine max
  peptide (1)..(336): Ceres Seq. ID no. 14313742
MWEVLKAEGASFENPITRPALRLAARKHIGDTGLLDHLLKHIDGKVAPGGTERFRRWFNTNGIMEYWLESADLDKVRQEAGVQDPFWIPPSAYRAAGAPSQNIDSSDELKQLKIELTQMKKDMHELIAKKEEKSDINMMEETHKEFVKWKFMTDHRLTEIMTSLKDVQGKYGELMIWKTTVAQQLMEITNKLNDLQASRECTTYSPPSERWKDWIESTNLDNIQEDAFATWIGNPELLNVPQEVILEDPNTTMPTQPPSEELTNKKSDVLELVPVKLEDQPNVTPDSSTTVNSKSDLDNSLIMFQEMFMDLYKWKEKMEQQLMEVSNTVYGMLAMK

SEQ ID NO: 54147 - DNA, 2095 bp, Glycine max
  misc_feature (1)..(2095): Ceres Seq. ID no. 15177141
gttacaaaatacattaaatcacaactttaccatccaccaccctctctcctatggacaacctcgaatctagaatctctattggactcactttcaatgatgtcctccttgtcccccaatactccactgtcaattctcgctctgaaattgacctccgcactagattctccaagaacgtccctcttaatgtccccattgtctcttctcctatggacactgtcactgaaactgacatggccattgaaatggcaagatggggaggtttgggtattgttcacagatataatactatcgaagatcaagccaacatgatctctcaagtcaagagagctgaaagcttcgtcatcactactccttatactatcagtcaatctactaccgttagagctgtccaagctctttccaaggcttacagagtccaaactttccttgttactgatgatactcataagcctaatgaacttgctgatcctgtccaaaagcataaactcgtcggtatccttactggcagagatcttagaatcgctttgaacggtgatcaacttgtcgaagagattatgacccctagagaaagactcactactacttatgatcccgaaatctccctcaaggaagccaagagccttatgattaacaatagagttgaaaaacttcccattattactgagaagaatgacgtcttgggtcttattactcttcgtgatattatccttagagaacaaagacctttggctaatcttgatacttttggtagattgagagttggtgctgctgttggtgccaaggatgattatcttgaaagagccaagaagcttattgatgtcggaactgatgttcttgtcgttgatattgctaatggacatgctcaattatgtattgatgctgtcgaaagattgaaggaacaattcactgtcgatgttgttgctggatctattgcttccagagaaggtgctgaaaatctcatcaaggctggtgctgacggtatccgttgcggtattggaagtggtgctatttgcacaactagacttgttgctggctctggtgtccctcaattatctgctatctttgatgctgcctccgtttgtaatgaagctggtgttcctttaatctctgatggtggtaatggtaacagtggtaacatgtgcaaagctcttgctgctggtgctgattgcgtcatggttggaagacttattgctggttgtgatgaaagccctggtcaagttcttctcaaggatggtaagagagtcaagatctacagaggtatggctggctatggtgctaacttgtccaaggctcaaagaactaacgctgctgaacctcactctttgaacttcactcctgaaggtgttgaaggatatatcccatactgtggacctttgaaggatgtcttgaaccaattcgctcaaggaatcaagagtggtatgagctactgtggatctcatgagattatggagatgaagaagaaggctaaattcatcagattaagtcaaagcgctatagttgaaagtggcgttcatgacattaacaagttgtaaatttggaacatgagctttttggtaagagtgtctttggttattggttagaagaggttggattaactacttaaaaatcgttgtttttataaaaatacaaaaagaataaaaaaagcgatttgtgttttttttttcttgcttataaatatgttatcatggctgtaaatctgctttgatgatcattgcttattgatcgattcaaaagaatagatgagattcccttccctctgtcggtctcttaaggacgcttgaatgcaagaattaatgaaattgaacacatcacatcaaatgaaatgaagtcttctccctctcctctgcaattcataaaaacaacctgaaaacagccatagacatcatagaagcaatagactctctccctctaattaataattcgtgaaacacataatgaagcaatcaatacatttcttccaaaagctcttccaaaaaaacatcaaatcattataataaaacacacaaattcaataaattcatatattactaagtttctttttattttcaatatataaaaacacttcatcgtatttctcgacttttttcaatttatg

SEQ ID NO: 54148 - protein, 493 aa, Glycine max
  peptide (1)..(493): Ceres Seq. ID no. 15177142
MDNLESRISIGLTFNDVLLVPQYSTVNSRSEIDLRTRFSKNVPLNVPIVSSPMDTVTETDMAIEMARWGGLGIVHRYNTIEDQANMISQVKRAESFVITTPYTISQSTTVRAVQALSKAYRVQTFLVTDDTHKPNELADPVQKHKLVGILTGRDLRIALNGDQLVEEIMTPRERLTTTYDPEISLKEAKSLMINNRVEKLPIITEKNDVLGLITLRDIILREQRPLANLDTFGRLRVGAAVGAKDDYLERAKKLIDVGTDVLVVDIANGHAQLCIDAVERLKEQFTVDVVAGSIASREGAENLIKAGADGIRCGIGSGAICTTRLVAGSGVPQLSAIFDAASVCNEAGVPLISDGGNGNSGNMCKALAAGADCVMVGRLIAGCDESPGQVLLKDGKRVKIYRGMAGYGANLSKAQRTNAAEPHSLNFTPEGVEGYIPYCGPLKDVLNQFAQGIKSGMSYCGSHEIMEMKKKAKFIRLSQSAIVESGVHDINKL

SEQ ID NO: 54149 - protein, 441 aa, Glycine max
  peptide (1)..(441): Ceres Seq. ID no. 15177143
MDTVTETDMAIEMARWGGLGIVHRYNTIEDQANMISQVKRAESFVITTPYTISQSTTVRAVQALSKAYRVQTFLVTDDTHKPNELADPVQKHKLVGILTGRDLRIALNGDQLVEEIMTPRERLTTTYDPEISLKEAKSLMINNRVEKLPIITEKNDVLGLITLRDIILREQRPLANLDTFGRLRVGAAVGAKDDYLERAKKLIDVGTDVLVVDIANGHAQLCIDAVERLKEQFTVDVVAGSIASREGAENLIKAGADGIRCGIGSGAICTTRLVAGSGVPQLSAIFDAASVCNEAGVPLISDGGNGNSGNMCKALAAGADCVMVGRLIAGCDESPGQVLLKDGKRVKIYRGMAGYGANLSKAQRTNAAEPHSLNFTPEGVEGYIPYCGPLKDVLNQFAQGIKSGMSYCGSHEIMEMKKKAKFIRLSQSAIVESGVHDINKL

SEQ ID NO: 54150 - protein, 433 aa, Glycine max
  peptide (1)..(433): Ceres Seq. ID no. 15177144
MAIEMARWGGLGIVHRYNTIEDQANMISQVKRAESFVITTPYTISQSTTVRAVQALSKAYRVQTFLVTDDTHKPNELADPVQKHKLVGILTGRDLRIALNGDQLVEEIMTPRERLTTTYDPEISLKEAKSLMINNRVEKLPIITEKNDVLGLITLRDIILREQRPLANLDTFGRLRVGAAVGAKDDYLERAKKLIDVGTDVLVVDIANGHAQLCIDAVERLKEQFTVDVVAGSIASREGAENLIKAGADGIRCGIGSGAICTTRLVAGSGVPQLSAIFDAASVCNEAGVPLISDGGNGNSGNMCKALAAGADCVMVGRLIAGCDESPGQVLLKDGKRVKIYRGMAGYGANLSKAQRTNAAEPHSLNFTPEGVEGYIPYCGPLKDVLNQFAQGIKSGMSYCGSHEIMEMKKKAKFIRLSQSAIVESGVHDINKL

SEQ ID NO: 54151 - DNA, 1147 bp, Glycine max
  misc_feature (1)..(1147): Ceres Seq. ID no. 13593920
cgtgtatgtgtatcagcctctcttctcctcttctattcttcactgcactcccacccctcttattattaatatcagtgcttggaaagaaaaggaagcaaaagaaaagagaagatccatagctaataagctaggttcagtagttagtgagtgatcgatatctggagatgggtcgaggcaagattgagataaagttgattgagaaccccaccaacaggcaagtcacttactccaagcgaaggaatggtatcttcaagaaagctcatgaactcagtgttctctgtgatgccaaggtttcacttatcatgttctctaaaaacaacaagatgcatgaatacattagccctggcctcacgacaaaaaggatcattgatcagtatcagaagactttgggggatattgatctgtggcgttctcactatgagaaaatgcttgaaaacttgaagaagctgatagatattaacaacaagctcagaagacagatcaggcataggataggtgagggtttggacatggacgacatgagcttccagcaactgcgcactcttgaagaggatttggtttcttccatagggaaaatacgagaacgaaagttccacgtgatcaaaacacggactgatacctgcaggaaaaaggttaaaagcctggagcagatgaatagagatctgctgtttgaacttaaggaaaagtgtgcgatccatccacaatttattttgcacgatgaaggagacgaggaatcagcagttgcactggccaacggcgcctccaccctgtatgcgttctgtcatcagcaccattctcatctgaaccttccctcccaccattctcacggagaagaaccctttaaaactgatgaccttcgccttgcttaattgagtgcaacaattaactagcaatgtaaattaactagctagcaagcaagcactaagcacttgttaattatgctttgtattatcctatattggacctgttaaacttaaacgcaacgttgcttccaacctctctagtctctatccagatcgagaattagctgaagcttatatatattatgtagtatttggcaagagtgtggtatgaaaaacagaaagactgtattttatttgttattataagtttacattgagtggttatgtaatattaattgcttggt

SEQ ID NO: 54152 - protein, 234 aa, Glycine max
  peptide (1)..(234): Ceres Seq. ID no. 13593921
MGRGKIEIKLIENPTNRQVTYSKRRNGIFKKAHELSVLCDAKVSLIMFSKNNKMHEYISPGLTTKRIIDQYQKTLGDIDLWRSHYEKMLENLKKLIDINNKLRRQIRHRIGEGLDMDDMSFQQLRTLEEDLVSSIGKIRERKFHVIKTRTDTCRKKVKSLEQMNRDLLFELKEKCAIHPQFILHDEGDEESAVALANGASTLYAFCHQHHSHLNLPSHHSHGEEPFKTDDLRLA

SEQ ID NO: 54153 - protein, 188 aa, Glycine max
  peptide (1)..(188): Ceres Seq. ID no. 13593922
MFSKNNKMHEYISPGLTTKRIIDQYQKTLGDIDLWRSHYEKMLENLKKLIDINNKLRRQIRHRIGEGLDMDDMSFQQLRTLEEDLVSSIGKIRERKFHVIKTRTDTCRKKVKSLEQMNRDLLFELKEKCAIHPQFILHDEGDEESAVALANGASTLYAFCHQHHSHLNLPSHHSHGEEPFKTDDLRLA

SEQ ID NO: 54154 - protein, 181 aa, Glycine max
  peptide (1)..(181): Ceres Seq. ID no. 13593923
MHEYISPGLTTKRIIDQYQKTLGDIDLWRSHYEKMLENLKKLIDINNKLRRQIRHRIGEGLDMDDMSFQQLRTLEEDLVSSIGKIRERKFHVIKTRTDTCRKKVKSLEQMNRDLLFELKEKCAIHPQFILHDEGDEESAVALANGASTLYAFCHQHHSHLNLPSHHSHGEEPFKTDDLRLA

SEQ ID NO: 54155 - DNA, 1256 bp, Glycine max
  misc_feature (1)..(1256): Ceres Seq. ID no. 12612408
ggaagaagaatcagagttcagaatccatggcaggtgctatagtaaagtacggaatcataggagtaggaatgatgggtagagagcatcttgtgaatttgtaccatcttcgcacccaaggcgtggcagttgttgctattgctgaccctcatcttccctctcaacaactcgctcttgacttagcacactcctttacttggcctctcaaggttttctcaggtcaccaggagctgttggacagtggactatgtgatgttttggtggtatccactcctaacatgacccatcataggattcttatggacattatcaatcattccaaaccccatcatgtactggtagagaagcccttgtgcaccacaatctcacactgcaaagaggttgtcaatgctgctagaaagagacctgatatattggtacaagttggactggaatatagatacatgccacctgttgcaaagctgatagaaatagttaagggaggaaaccttggacatgtcaaaatggtagcaattcgggagcatcggtttccttttctggttaaggtgaacaattggaaccggttcaatattaactcagggggcactctggtagagaagtgttgccacttctttgatctgatgagactgtttgttggtgcaaatcctgttcgtgtgatggcttctggagctattgatgttaatcacaaggatgaagtatatgatggaaaggtgccagatatcattgacaatgcatatgttatagttgaatttgacaatggttctcgaggaatgcttgacctttgtatgtttgctgaagggagtaaaaatgagcaagaaatatctgttgtcggtgatattggaaagggagaagcctttgttcctgagagtgttgtgcagtttggtacccgagaggcggggcgagatggtgtccagactttgaaagctgaggatcacaggataaaatatgatgggttacaccatgggtctagctatctggaacaccttaacttcttgtctgcaatcagagcaaaaggagaaaaggctcctagtgtagatctccaagatggattaatatctgttgctatgggagttgcagcacagctctctatagaatatggtcgatttgtttctattcaggaagttatgaatgagtgcaaaatttgagtgttgcaacttggaagtgagagtaatggttgtctctgctgttatgtgttctttgacaaagggatgctgtattgttgctatcactgcctcaagaaaaagtgcaaaatgatttgc

SEQ ID NO: 54156 - protein, 379 aa, Glycine max
  peptide (1)..(379): Ceres Seq. ID no. 12612409
KKNQSSESMAGAIVKYGIIGVGMMGREHLVNLYHLRTQGVAVVAIADPHLPSQQLALDLAHSFTWPLKVFSGHQELLDSGLCDVLVVSTPNMTHHRILMDIINHSKPHHVLVEKPLCTTISHCKEVVNAARKRPDILVQVGLEYRYMPPVAKLIEIVKGGNLGHVKMVAIREHRFPFLVKVNNWNRFNINSGGTLVEKCCHFFDLMRLFVGANPVRVMASGAIDVNHKDEVYDGKVPDIIDNAYVIVEFDNGSRGMLDLCMFAEGSKNEQEISVVGDIGKGEAFVPESVVQFGTREAGRDGVQTLKAEDHRIKYDGLHHGSSYLEHLNFLSAIRAKGEKAPSVDLQDGLISVAMGVAAQLSIEYGRFVSIQEVMNECKI

SEQ ID NO: 54157 - protein, 371 aa, Glycine max
  peptide (1)..(371): Ceres Seq. ID no. 12612410
MAGAIVKYGIIGVGMMGREHLVNLYHLRTQGVAVVAIADPHLPSQQLALDLAHSFTWPLKVFSGHQELLDSGLCDVLVVSTPNMTHHRILMDIINHSKPHHVLVEKPLCTTISHCKEVVNAARKRPDILVQVGLEYRYMPPVAKLIEIVKGGNLGHVKMVAIREHRFPFLVKVNNWNRFNINSGGTLVEKCCHFFDLMRLFVGANPVRVMASGAIDVNHKDEVYDGKVPDIIDNAYVIVEFDNGSRGMLDLCMFAEGSKNEQEISVVGDIGKGEAFVPESVVQFGTREAGRDGVQTLKAEDHRIKYDGLHHGSSYLEHLNFLSAIRAKGEKAPSVDLQDGLISVAMGVAAQLSIEYGRFVSIQEVMNECKI

SEQ ID NO: 54158 - protein, 357 aa, Glycine max
  peptide (1)..(357): Ceres Seq. ID no. 12612411
MMGREHLVNLYHLRTQGVAVVAIADPHLPSQQLALDLAHSFTWPLKVFSGHQELLDSGLCDVLVVSTPNMTHHRILMDIINHSKPHHVLVEKPLCTTISHCKEVVNAARKRPDILVQVGLEYRYMPPVAKLIEIVKGGNLGHVKMVAIREHRFPFLVKVNNWNRFNINSGGTLVEKCCHFFDLMRLFVGANPVRVMASGAIDVNHKDEVYDGKVPDIIDNAYVIVEFDNGSRGMLDLCMFAEGSKNEQEISVVGDIGKGEAFVPESVVQFGTREAGRDGVQTLKAEDHRIKYDGLHHGSSYLEHLNFLSAIRAKGEKAPSVDLQDGLISVAMGVAAQLSIEYGRFVSIQEVMNECKI

SEQ ID NO: 54159 - DNA, 1397 bp, Glycine max
  misc_feature (1)..(1397): Ceres Seq. ID no. 15226526
ccgggccccccctcgagtcagctacgtaggcccccccccccccccaaaaaaaaaaattcaactagagaatggagatggtaaaaaacggggtaagcaatgagccatggaaattacgcgagcaaacagtttctgagtttcttctattttctgttcccaatttgtttcggatctctgttcacgaaccctaaatctgacgttaattcaccatgatctgaacacaacgtggttcccatctgatccactgcatcgtctttctcaattgtcgaaagatgagtacaagtggttaatgagattgaggaacttgcgttgtttgagcgaaacaaagcagagatgtacctgaaggagccgctatggagtgaaacagggaaaggcgatggaagtgcaaaaacagaggattatggtgcagtgagtgaggtcgtgaagtcactgcagcaacagagagtgtatagagaagtcactctcgcgctcagaacgggactcagagacgcgcgtgcagagttctcgtttctccgtgtccgtgctctccgttccattctcaagttcctgcgttccgttgcggagtctgattcaaccattgacctctttaaccaaatccaatccattccccaactccaagtggttccggttctgtttcagcactcgctcaaagagagtggggatgaatacagcgagaatagggtaggagatttgagtcatatattcggggttgaaccgatgaagttgacgagtccatccaccgatgctgaagttgcgcttgcccttagagtcttggaagggtgttgtttgcttcaccctcatagtacggctctcgcccatcaacacaacgctattcaggttttaatgaatatattatccactcgtggagtgcttgagcaaggtgcatgcttagatgctctaatctcattgatggtggattcatcattcaatcaaatggatttcgagaaatgtagtggtattatggaagttgctgaccttctaagagaccaagaactggatgaagatctcaggttaaaatgtggagagtttttgctgctgctcattggacatgtcaatggaagagatacgcctcctttagcaactatacacgaagatacaaggcgccttcttggggagaaatcagcctccttgatatgggcagccagtcgtcagttcgattcaacactagatactgagcagaggctaacagctcttcagatccaggctcgcagggtccttgaatcattggacttgtactgaattttatggtccgtttggaagagaaaatactagatggaaaaaaaacatggatcacgatgtctgatgtcgtttcttttatttgatttgatagaaaaactgaaagaaatactaaaggaatagttgacttcatgagacaaaaattttaatttttctttctttcc

SEQ ID NO: 54160 - protein, 301 aa, Glycine max
  peptide (1)..(301): Ceres Seq. ID no. 15226527
MYLKEPLWSETGKGDGSAKTEDYGAVSEVVKSLQQQRVYREVTLALRTGLRDARAEFSFLRVRALRSILKFLRSVAESDSTIDLFNQIQSIPQLQVVPVLFQHSLKESGDEYSENRVGDLSHIFGVEPMKLTSPSTDAEVALALRVLEGCCLLHPHSTALAHQHNAIQVLMNILSTRGVLEQGACLDALISLMVDSSFNQMDFEKCSGIMEVADLLRDQELDEDLRLKCGEFLLLLIGHVNGRDTPPLATIHEDTRRLLGEKSASLIWAASRQFDSTLDTEQRLTALQIQARRVLESLDLY

SEQ ID NO: 54161 - protein, 173 aa, Glycine max
  peptide (1)..(173): Ceres Seq. ID no. 15226528
MKLTSPSTDAEVALALRVLEGCCLLHPHSTALAHQHNAIQVLMNILSTRGVLEQGACLDALISLMVDSSFNQMDFEKCSGIMEVADLLRDQELDEDLRLKCGEFLLLLIGHVNGRDTPPLATIHEDTRRLLGEKSASLIWAASRQFDSTLDTEQRLTALQIQARRVLESLDLY

SEQ ID NO: 54162 - DNA, 1425 bp, Glycine max
  misc_feature (1)..(1425): Ceres Seq. ID no. 14313662
attttacactttcattacctttcacacgtgctctctcaatctctcacgtagctctctcactctcacactgatccaactccaccacaagtcagagaatccgcagatttggccaaagaatctgtagatctgacatccaaagttttaaatacactatcccctcccacctcctcgatcgtgtgtattgtgaacatcactgccacggtcatcgtcactagagtccagtgctagcttttggagcactgtgccaaattatgtcgtgccgctcatcgtcgattcagattcacaatgctaaaaacctgtcataattagattcacagtttttataaatcggtctttgcaatcgacaatctctttcttttcttttcgtgtttagggatttagtctgattcctctgtgtttcttgttattgtgcaggcattacttgcgttttctttgaatctgattttgttactattaccaaatccaaagaggctgcgtgggatttcctcaagcttgaaatatttgtcaccgatatggcttgctatggtgttttagaatttgtgatggaaagtggggccaaaggatgcgaggtttgtttatggactcctaatattgtattgcatcatgtaatggtttggttgttattgttgtttgacctgagtaggtcattactagtggaaaactgagagctctgagagccaagtccatgaaattcaaggatggatacatgatttcttttggacaaccagtcaaggattatattgactcagtagtgagacacgtgctactaagatagggtgctcttggtatcaaggttaagatcatgcttgattgggatcctaaagggaatcagagtcctaaaactccctttcctgatcttgtcacgatccacactccaaaggaggaagaatacaagtagcctccagctgtattggcaaatgatattgagtgaaagcttgtgcaaagattaaagagtaaagtctttggatctacatccaacaaaaccatgtgacaaatattgttgggggctcaattggctggagaagatatcttgatcatcttatcagttcactatgtcatgataaagatatatctagcatggaacttcttctcttacagctgcttgacagttcatgttcaagaaagagagcttgcatcagggaatagtcttcgtggttatatccacttagttgacttggcaggaagctataaaggtaacaggtaaaggatgtgtaaaggtcatctttttactacaccagaacagtgggaacaactttgtcttgaagttagaagtgttgatgttttcagaattcagcttctttccttggtgtttttttttttggttttatctactcttagttctcagtcacggcttagttattctgaagaataatgaagttgtcatttggcaatccttaattatgaaaatgaggaagcatttgtgtc

SEQ ID NO: 54163 - protein, 54 aa, Glycine max
  peptide (1)..(54): Ceres Seq. ID no. 14313663
MCKGHLFTTPEQWEQLCLEVRSVDVFRIQLLSLVFFFLVLSTLSSQSRLSYSEE

SEQ ID NO: 54164 - protein, 50 aa, Glycine max
  peptide (1)..(50): Ceres Seq. ID no. 14313664
MACYGVLEFVMESGAKGCEVCLWTPNIVLHHVMVWLLLLFDLSRSLLVEN

SEQ ID NO: 54165 - protein, 48 aa, Glycine max
  peptide (1)..(48): Ceres Seq. ID no. 14313665
MIKIYLAWNFFSYSCLTVHVQERELASGNSLRGYIHLVDLAGSYKGNR

SEQ ID NO: 54166 - DNA, 1596 bp, Glycine max
  misc_feature (1)..(1596): Ceres Seq. ID no. 14313147
tttttttgtcccaaaaataataaactgttaattttttttccacaaatggcacccagttttgattgcgtttcgagccttctctgtgccgaagacaacagtatttttgacgaaaacgattatgggggttcggtggaggttttggaggacgcgtggcaggatcctagatatcgtcgaaaccttagtcaaagtgagaacttggatgtcccaaatgggttttttccattgcagagtgatgagtgcttgagactgatggtggagaaggaatgggatcacttgcctaatggtgattatgtgaataggctgaggagtggggatttggattttggggccagaaaagaggccattgattggattgaaaaggttcaacagcactttggttttggacccctctgtgcatatctatccataaactacttggaccgtttcctttctgcatatgaattaccaaagcacagagcttggacaatgcaattgttggctgtggggtgcttatctctggcagccaaaatggaagagactgatgtccctttctctcttgatttgcaggtgggtgaatctaagtatatatttgaggctaaaacaatacagagaatggagcttctggtgctgagcacattgagatggagaatgcaggcaattaccccattttccttcattgaccatttcctttacaagatcaatgatgatcaaagtccaattggagcttcaattttgcaatccatccagcttatactgagcactgtaagaggaattgacttcttagaattcagaccctcagagattgcagcagcagtggcaatatctgtggtgggggagggccaaacagtgcacactgagaaagcaatttctgttctgattcagcttgtggaaaaggagagggtcttgaagtgtgttaaaatgatccaagagctggcatcaaatagtggtggttctgccaagggtgctagtgcttctgtttctgtccctagcgtgcccgaaagcccactaggggtgttggtcactgcatgcttcagctacaaaagtgatgacacaaatgctgcttcatatgcaaattcttcacataacattagtccagatgctaaaaggaggaagctaaacaaaacctttggataatagtcattgtggcctgtgattttcaacgtcattcctaggatgcctttacttaaaaaaataagatgttatgtgctttgaaggtgccccctcaagggaatacccaatgaaggaagtaggaatgtagatagggaaagtgaaaaaataaaaaaccatgcataaaagggtgccaaaaagataaaggtggatcgtgactagtgggagatttttaagggatggaatcaacaaatttcatgctccaagccggatgtgaccactcaacaccagctgttaaatattttataggtctttttaacagctataaaagaggtagtgaaagaggagggaataagaaagaaggactagtgtatttgtatgtgtaagtacattttgtctttttacttttaaatgagggagttaaatagaaacccataaggcagaaaaaaaaaaaaaacaaaacaaaataagatgcagagctactagtattgagaaatatttgcggcattc

SEQ ID NO: 54167 - protein, 370 aa, Glycine max
  peptide (1)..(370): Ceres Seq. ID no. 14313148
FFCPKNNKLLIFFPQMAPSFDCVSSLLCAEDNSIFDENDYGGSVEVLEDAWQDPRYRRNLSQSENLDVPNGFFPLQSDECLRLMVEKEWDHLPNGDYVNRLRSGDLDFGARKEAIDWIEKVQQHFGFGPLCAYLSINYLDRFLSAYELPKHRAWTMQLLAVGCLSLAAKMEETDVPFSLDLQVGESKYIFEAKTIQRMELLVLSTLRWRMQAITPFSFIDHFLYKINDDQSPIGASILQSIQLILSTVRGIDFLEFRPSEIAAAVAISVVGEGQTVHTEKAISVLIQLVEKERVLKCVKMIQELASNSGGSAKGASASVSVPSVPESPLGVLVTACFSYKSDDTNAASYANSSHNISPDAKRRKLNKTFG

SEQ ID NO: 54168 - protein, 355 aa, Glycine max
  peptide (1)..(355): Ceres Seq. ID no. 14313149
MAPSFDCVSSLLCAEDNSIFDENDYGGSVEVLEDAWQDPRYRRNLSQSENLDVPNGFFPLQSDECLRLMVEKEWDHLPNGDYVNRLRSGDLDFGARKEAIDWIEKVQQHFGFGPLCAYLSINYLDRFLSAYELPKHRAWTMQLLAVGCLSLAAKMEETDVPFSLDLQVGESKYIFEAKTIQRMELLVLSTLRWRMQAITPFSFIDHFLYKINDDQSPIGASILQSIQLILSTVRGIDFLEFRPSEIAAAVAISVVGEGQTVHTEKAISVLIQLVEKERVLKCVKMIQELASNSGGSAKGASASVSVPSVPESPLGVLVTACFSYKSDDTNAASYANSSHNISPDAKRRKLNKTFG

SEQ ID NO: 54169 - protein, 287 aa, Glycine max
  peptide (1)..(287): Ceres Seq. ID no. 14313150
MVEKEWDHLPNGDYVNRLRSGDLDFGARKEAIDWIEKVQQHFGFGPLCAYLSINYLDRFLSAYELPKHRAWTMQLLAVGCLSLAAKMEETDVPFSLDLQVGESKYIFEAKTIQRMELLVLSTLRWRMQAITPFSFIDHFLYKINDDQSPIGASILQSIQLILSTVRGIDFLEFRPSEIAAAVAISVVGEGQTVHTEKAISVLIQLVEKERVLKCVKMIQELASNSGGSAKGASASVSVPSVPESPLGVLVTACFSYKSDDTNAASYANSSHNISPDAKRRKLNKTFG

SEQ ID NO: 54170 - DNA, 1225 bp, Glycine max
  misc_feature (1)..(1225): Ceres Seq. ID no. 14307119
gttgggaatttagggatttgcgtttactgatctcaagtcttccacctcactgtcgtagcgtagtgattgtggggtttctcttctcagttctcatcgtgacgatcttgctgctccgaaaaagggttttcctaacatcgcccattcaatttccgggctgttcagttcgtgaatagactgttgtttgttctaaaaagtagtggatagtaaaaattatcgaacttttttaagagaaaaatgcagagtaaagaagcagttgtggaagatggggaaataaagagtgtgactgctgtagggtctgaaattgatgggtggaccaattttggggatgatgacataatgcaacagcagtatacaattctggctgaggaagccaagaaggttccatttgtgggtgacaaggaaccactgagtagcttagctgctgaatataaattaggcagtcctatcttgctggagaaaataaaggtgcttgatgagcaatatgctgccattcgtcgtactcggggagatggaaactgcttctttcgaagctttatgttttcatatcttgagcatattatggaatgtcaagaccaagcagaaattgatcgtatccaagccaatgttgaaaaaagtagaaaggcgctgcagaccttgggttatgcagacttgacttttgaagatttttttgcgttattccttgagcagctggaatctgttattcaagggaaagagacttccataagtcatgaagagcttgttcttagaagccgagatcagtcaatatctgattatgtcgttatgttcttcagatttgttacctctgctgaaatacaaaagcgtgcagaattttttgaaccattcatactgggcttaactaatacaacagtcgagcagttttgcaaatcatctgttgaaccaatgggtgaagagagcgaccacatgcacattactgccctttcggacgcattgggcattccaatccgtgttgtgtaccttgaccgcagctcatgtgatactggcggtgtcagtgtaaatcatcatgatttcatgccagtggctggtgatctcccaaatgctagttgcagctctgaaaagaacattcctttcatcacgctgctatatcgtcctggtcactatgatatcctctatacaaaatgatgacctttttggggggaaaagacctttgtttgttacttttttggtggtagtgggagccgcaacagctctgcactcagagctgttg

SEQ ID NO: 54171 - protein, 301 aa, Glycine max
  peptide (1)..(301): Ceres Seq. ID no. 14307120
MQSKEAVVEDGEIKSVTAVGSEIDGWTNFGDDDIMQQQYTILAEEAKKVPFVGDKEPLSSLAAEYKLGSPILLEKIKVLDEQYAAIRRTRGDGNCFFRSFMFSYLEHIMECQDQAEIDRIQANVEKSRKALQTLGYADLTFEDFFALFLEQLESVIQGKETSISHEELVLRSRDQSISDYVVMFFRFVTSAEIQKRAEFFEPFILGLTNTTVEQFCKSSVEPMGEESDHMHITALSDALGIPIRVVYLDRSSCDTGGVSVNHHDFMPVAGDLPNASCSSEKNIPFITLLYRPGHYDILYTK

SEQ ID NO: 54172 - protein, 267 aa, Glycine max
  peptide (1)..(267): Ceres Seq. ID no. 14307121
MQQQYTILAEEAKKVPFVGDKEPLSSLAAEYKLGSPILLEKIKVLDEQYAAIRRTRGDGNCFFRSFMFSYLEHIMECQDQAEIDRIQANVEKSRKALQTLGYADLTFEDFFALFLEQLESVIQGKETSISHEELVLRSRDQSISDYVVMFFRFVTSAEIQKRAEFFEPFILGLTNTTVEQFCKSSVEPMGEESDHMHITALSDALGIPIRVVYLDRSSCDTGGVSVNHHDFMPVAGDLPNASCSSEKNIPFITLLYRPGHYDILYTK

SEQ ID NO: 54173 - protein, 201 aa, Glycine max
  peptide (1)..(201): Ceres Seq. ID no. 14307122
MFSYLEHIMECQDQAEIDRIQANVEKSRKALQTLGYADLTFEDFFALFLEQLESVIQGKETSISHEELVLRSRDQSISDYVVMFFRFVTSAEIQKRAEFFEPFILGLTNTTVEQFCKSSVEPMGEESDHMHITALSDALGIPIRVVYLDRSSCDTGGVSVNHHDFMPVAGDLPNASCSSEKNIPFITLLYRPGHYDILYTK

SEQ ID NO: 54174 - DNA, 1360 bp, Glycine max
  misc_feature (1)..(1360): Ceres Seq. ID no. 15177803
atcatcgcatcttatcttcgctgccactgcaacagggtaggttaaagttctctctttatccttcttattccaataccacaataaacctcttaacttttcactaacctacgcaactcctatcactatccgtgcaaataaatgcaatcaatgaccctttttctctctcttgaaattaccttcttcctctgtaagagctgatttgccaggatcactaatttaacagcaacaaatggccaccttcattttcaaatgcttctgagacattatttcatcaataaggaagatgcatgagttctccattgttgatggttttgtggagataagtgaatgcatggcagagatgaccaagtacgtggctaatgaaccatccgttgggcttttctttatccaacagcatgctcaaaatgcagtacccaatatcatcaaagttaagaaaaatgttgttgagaagtctcatgaaacaactttgcacacagaagatttggaggactctgtcacaatggttcaatcaatgaaagagtgtggatttcccatagctgataagatgatcagagagattaaaaaatctctgataactatggaaacaaaacaaccgaaaagagggttaatccatccagcatcaagttctcattcagaaagagctagtttcttgggtaacgctgcattttatgctcaggagggcaatgaaaaaaggagtaactatttctcaaatgttttgaagtcagcaaaagagaaggctggcagcttcaagtggcggcagcttgatactcggggatcaatagattccacggatgagaagccaccaatgtaccctaatttgccgttgttggtcacatctgcaagcattacttcatcttttcgggctgccgaaactgatgagttgcctgtatcaagccaggttgaagacgagtctcagcacaaacagaccgatgttagtgatatcagcattaatttattgtcagtatcagaaagattcgacgacttcaaagctaataaagaagctaaactagcggagtggctggacggaactggcaaccttgatgataattgcggcacaggtgatgagaaaaggtcttagtttggcatgataaagaagctatacttcaataaaatgcttcaccccgtacatgctgttgtacaacatcaagtttctctgaattgtgattataaataaaatgatttttttgtaatgctgtagagattttctttgaaatttaaacaagcatgattctgtacggggtttgatcatgcatgatattgcattccttctacctggaacttcaatatttatttcttatgtcaactgatggaaaggagattttcaagaatgttgagaaaataagacttaaagagagtagtt

SEQ ID NO: 54175 - protein, 264 aa, Glycine max
  peptide (1)..(264): Ceres Seq. ID no. 15177804
MHEFSIVDGFVEISECMAEMTKYVANEPSVGLFFIQQHAQNAVPNIIKVKKNVVEKSHETTLHTEDLEDSVTMVQSMKECGFPIADKMIREIKKSLITMETKQPKRGLIHPASSSHSERASFLGNAAFYAQEGNEKRSNYFSNVLKSAKEKAGSFKWRQLDTRGSIDSTDEKPPMYPNLPLLVTSASITSSFRAAETDELPVSSQVEDESQHKQTDVSDISINLLSVSERFDDFKANKEAKLAEWLDGTGNLDDNCGTGDEKRS

SEQ ID NO: 54176 - protein, 248 aa, Glycine max
  peptide (1)..(248): Ceres Seq. ID no. 15177805
MAEMTKYVANEPSVGLFFIQQHAQNAVPNIIKVKKNVVEKSHETTLHTEDLEDSVTMVQSMKECGFPIADKMIREIKKSLITMETKQPKRGLIHPASSSHSERASFLGNAAFYAQEGNEKRSNYFSNVLKSAKEKAGSFKWRQLDTRGSIDSTDEKPPMYPNLPLLVTSASITSSFRAAETDELPVSSQVEDESQHKQTDVSDISINLLSVSERFDDFKANKEAKLAEWLDGTGNLDDNCGTGDEKRS

SEQ ID NO: 54177 - protein, 245 aa, Glycine max
  peptide (1)..(245): Ceres Seq. ID no. 15177806
MTKYVANEPSVGLFFIQQHAQNAVPNIIKVKKNVVEKSHETTLHTEDLEDSVTMVQSMKECGFPIADKMIREIKKSLITMETKQPKRGLIHPASSSHSERASFLGNAAFYAQEGNEKRSNYFSNVLKSAKEKAGSFKWRQLDTRGSIDSTDEKPPMYPNLPLLVTSASITSSFRAAETDELPVSSQVEDESQHKQTDVSDISINLLSVSERFDDFKANKEAKLAEWLDGTGNLDDNCGTGDEKRS

SEQ ID NO: 54178 - DNA, 1334 bp, Glycine max
  misc_feature (1)..(1334): Ceres Seq. ID no. 15171088
gggtaatgctttcggaacatgtgctgatttaactatacttcatattgccagcttggatacacaaaaaaacaagaagagagacatttccgaggagtgattacattagaggaatgcaatattgacgagattcctgatgatgatgaagcctccacaaagaattccaaggataaaaagtccaacggacctgattctggaaaagcatcaaaccttattttcaagataacaagcaaggtcccatacaagactgttatgaaatctgaaagtgcagttttgttaaaggctgagagtatggcagataaggttgagtggatcaacaagttaagaagtgttgcacaggctaaaggaggtcaagccattggtgaacctagttttcctatgcggcaaagcctttctgatgggtctcttgatacgatggccaggaaacctgcagatccagaggaggagctcagatggatgtctcaagaagtccgtggttatgttgaagctgttcttaacagccttgcagctaatgttccaaaagcagttgttctttgccaagtagagaaagccaaagaagacatgctgaaccagctatacagttccgtcagcgctcaaagctctgcaaaaattgaggagctgctccaggaagaccacaatgtcaagaacaaaagggagcgagttcagaaacagtctgcccttctttcaaaactcactaggcagcttggtgtccatgacaatagagcggctgcagcatccagttggtctgatagagggagtgcagcagaaagcagcccaagaagctctggaccctcatcaggtgatgattggaggtctgcatttgattctgctgccaatggtccaagcaacctgacgtctaggtatggttctggtggtcatagtagacgctacagtgacccatcccaaaatggtgatgtgagctcaggctcaaattccaacagtcgtcggacgccaactcggttgcccccggctcccccacaatctggttcaagatattagatgaagctacatatggttttaatcaaaattatgcactcatcggatggacgctttcagttttttctacttatatcgagactgtccctcctccttttagactttagtcggaatgttatagttttgtagataacgaaagtattgctatcgcattcatcttaaggtcatacgcagtctgcgtcctattttattcccttactgggtatgtgggggcattgttgggtgagatgattttgtgtcttcccaacattctttttctttacaaatgtaattgttttgtatgcaatgtgattatcagcatttacataaatgcgcattaatcgcgactgccttttgttttc

SEQ ID NO: 54179 - protein, 248 aa, Glycine max
  peptide (1)..(248): Ceres Seq. ID no. 15171089
MKSESAVLLKAESMADKVEWINKLRSVAQAKGGQAIGEPSFPMRQSLSDGSLDTMARKPADPEEELRWMSQEVRGYVEAVLNSLAANVPKAVVLCQVEKAKEDMLNQLYSSVSAQSSAKIEELLQEDHNVKNKRERVQKQSALLSKLTRQLGVHDNRAAAASSWSDRGSAAESSPRSSGPSSGDDWRSAFDSAANGPSNLTSRYGSGGHSRRYSDPSQNGDVSSGSNSNSRRTPTRLPPAPPQSGSRY

SEQ ID NO: 54180 - protein, 235 aa, Glycine max
  peptide (1)..(235): Ceres Seq. ID no. 15171090
MADKVEWINKLRSVAQAKGGQAIGEPSFPMRQSLSDGSLDTMARKPADPEEELRWMSQEVRGYVEAVLNSLAANVPKAVVLCQVEKAKEDMLNQLYSSVSAQSSAKIEELLQEDHNVKNKRERVQKQSALLSKLTRQLGVHDNRAAAASSWSDRGSAAESSPRSSGPSSGDDWRSAFDSAANGPSNLTSRYGSGGHSRRYSDPSQNGDVSSGSNSNSRRTPTRLPPAPPQSGSRY

SEQ ID NO: 54181 - protein, 206 aa, Glycine max
  peptide (1)..(206): Ceres Seq. ID no. 15171091
MRQSLSDGSLDTMARKPADPEEELRWMSQEVRGYVEAVLNSLAANVPKAVVLCQVEKAKEDMLNQLYSSVSAQSSAKIEELLQEDHNVKNKRERVQKQSALLSKLTRQLGVHDNRAAAASSWSDRGSAAESSPRSSGPSSGDDWRSAFDSAANGPSNLTSRYGSGGHSRRYSDPSQNGDVSSGSNSNSRRTPTRLPPAPPQSGSRY

SEQ ID NO: 54182 - DNA, 1575 bp, Glycine max
  misc_feature (1)..(1575): Ceres Seq. ID no. 14307123
gaactcaacaacaacccaaagataaaaagcacaacacaagacactgaactcgcactcactgggttttcaaccatggatgcgatacggaagcagctcgatgtgttgatgggagccaaccgtaacggcgacgtccgtgaagtcaatcgcaagtactacgatcgcgacgtctgtcgtctctacctcgtcggtctctgccctcacgaactcttccagttaacgaaaatggatatgggcccttgccctaaggtccactccttgcagctccggaaagaatacgaggaggcgaaagcaaaggggaccgataattatgacagggagttggaggatgtaatagataagcttattggtgagtgtgataggaaaattggcagggctctaaagcggctcgaggacgacgatgcgaaagcggctattgcaatttcggtctctgaagttactcaaacagatgaggtgcttgagttgtcgaagcaaatcaaagagaaattgaaagaagctgatcaatatgatcttgaaggcaagtcagatctcaagattcgagctttagaggttgtagaggaacttagaactaagagagcggacaagcagtctatgcttcttttagatgccttcaacaaagatagggcatctttgcctacacctctgccaaatccaccacctttggcacctcttcctgtagttgctcctgatgctcgaacacaggagatgataaatgaaaagctgaagaaggctgaggatcttggtgagcaaggaatggttgatgaggctcaaaaagcattggaagaggctgaagcacttaagaagcttcctgccaggcaggagccagtgttggattcttcaaagtatacagctgtggatgtgcggattactgatcagaagctacgtgtgtgcgacatttgtggagcatttttgagtgtttatgacagtgatcgccgtttagctgatcattttggaggcaaacttcatttagggtatatgcagattcgtgagaagttagccgaacttcaagaagaaaggaacaagagccgaaagactgatcggcttgatgacaggagatcaaaagaacggagtagggatcgagacagggagtctagtagggaccgtgaacttggtgatagtcgtgaacgagggcgagaccatgatcgtaggagcagagatcatgataggcattatgatagagatcgtggatatgatcgagaccgtgacagagactcagaccgcacccgctcctatgactcaagaagtcgtcggaggtcacgctctagatcccgagagcgatctagagattatgatcgacataggcgtcatgatcgatactagcaattgccatgaatcttatgggtatgagaaaatgtctagtttaggtgggtgttgaacctcatgttgaacaaataattttgcaatttcttctgtgttgaaccgtttctcggatgatggatgtaacttgagcttaggtgtcgctaaattatggtttgatgttgctttgcagacattaaatccaatttgtaatctgccttactttggagcagttcttgctattgtgcttaaaaatagtagtttgattggattgccatttac

SEQ ID NO: 54183 - protein, 438 aa, Glycine max
  peptide (1)..(438): Ceres Seq. ID no. 14307124
ELNNNPKIKSTTQDTELALTGFSTMDAIRKQLDVLMGANRNGDVREVNRKYYDRDVCRLYLVGLCPHELFQLTKMDMGPCPKVHSLQLRKEYEEAKAKGTDNYDRELEDVIDKLIGECDRKIGRALKRLEDDDAKAAIAISVSEVTQTDEVLELSKQIKEKLKEADQYDLEGKSDLKIRALEVVEELRTKRADKQSMLLLDAFNKDRASLPTPLPNPPPLAPLPVVAPDARTQEMINEKLKKAEDLGEQGMVDEAQKALEEAEALKKLPARQEPVLDSSKYTAVDVRITDQKLRVCDICGAFLSVYDSDRRLADHFGGKLHLGYMQIREKLAELQEERNKSRKTDRLDDRRSKERSRDRDRESSRDRELGDSRERGRDHDRRSRDHDRHYDRDRGYDRDRDRDSDRTRSYDSRSRRRSRSRSRERSRDYDRHRRHDRY

SEQ ID NO: 54184 - protein, 414 aa, Glycine max
  peptide (1)..(414): Ceres Seq. ID no. 14307125
MDAIRKQLDVLMGANRNGDVREVNRKYYDRDVCRLYLVGLCPHELFQLTKMDMGPCPKVHSLQLRKEYEEAKAKGTDNYDRELEDVIDKLIGECDRKIGRALKRLEDDDAKAAIAISVSEVTQTDEVLELSKQIKEKLKEADQYDLEGKSDLKIRALEVVEELRTKRADKQSMLLLDAFNKDRASLPTPLPNPPPLAPLPVVAPDARTQEMINEKLKKAEDLGEQGMVDEAQKALEEAEALKKLPARQEPVLDSSKYTAVDVRITDQKLRVCDICGAFLSVYDSDRRLADHFGGKLHLGYMQIREKLAELQEERNKSRKTDRLDDRRSKERSRDRDRESSRDRELGDSRERGRDHDRRSRDHDRHYDRDRGYDRDRDRDSDRTRSYDSRSRRRSRSRSRERSRDYDRHRRHDRY

SEQ ID NO: 54185 - protein, 403 aa, Glycine max
  peptide (1)..(403): Ceres Seq. ID no. 14307126
MGANRNGDVREVNRKYYDRDVCRLYLVGLCPHELFQLTKMDMGPCPKVHSLQLRKEYEEAKAKGTDNYDRELEDVIDKLIGECDRKIGRALKRLEDDDAKAAIAISVSEVTQTDEVLELSKQIKEKLKEADQYDLEGKSDLKIRALEVVEELRTKRADKQSMLLLDAFNKDRASLPTPLPNPPPLAPLPVVAPDARTQEMINEKLKKAEDLGEQGMVDEAQKALEEAEALKKLPARQEPVLDSSKYTAVDVRITDQKLRVCDICGAFLSVYDSDRRLADHFGGKLHLGYMQIREKLAELQEERNKSRKTDRLDDRRSKERSRDRDRESSRDRELGDSRERGRDHDRRSRDHDRHYDRDRGYDRDRDRDSDRTRSYDSRSRRRSRSRSRERSRDYDRHRRHDRY

SEQ ID NO: 54186 - DNA, 1831 bp, Glycine max
  misc_feature (1)..(1831): Ceres Seq. ID no. 15178007
gcggcgactcggattttaccggcgtagggtttgacttgccggtagtgaagcctcctggaaattcgccggcggtgaatgcgaaaaacgttgccggagaaaagagggaagagtctggcaaagaagtacaccctgatctgccatcaatttcaaagccactgaaagaaaaaaatacaaagggtgagagacgagcattgcaggaggcacaaagagctgcaaaagctgcttctaaagctgatggaaacacaacagttgctgaaactaggagggcagcccccagtaaaagaatgtggcagtcttcacaaaagaaagatggtcctcttgttatgtcaccagtggctactgacaagaaatcaggagatcgtcctttggagaaagagaggaaaaaagatgctcctcctccacgaatgcaatttgatgataaaaacagagtggaaaaggccaaaaggcgtgctgtagttgatcagaatgaagctagaaacagagttgaattatttcgccatttgcctcaatatgaacgttggactcagcttcctaaacttgaatcaaagtttttccaactggattcagtgcatcttgctgtgttcaaggttggaatgcgttatttggcaggagatatatctgggagtaatgcccgatgtattgaaatgcttagagcatttcaggaagccattatagactactccacaccgcctgggaaagtccttgtcagggatttaactgcaaaaatcagtagttatgtttcattttttagtgaatgcagaccactttctattagcatgggaaatgcaattaggtttgtaaagagttgtgttgccaagttgcctttaagtcatactgaatctgaagcaaaagcagctctttgttcagatattaatcaattcatcaacgaaaaaataattcttgctgataaggtgattgttggacatgctgcttcgaaagttagggatggagacgttcttcttacatatggatcatcatgtgttgttgagatgattcttttatatgcccatgatcttgggaaacagttccgtgttgtggtggtagactcacgaccaaagtttgaaagccgggccttacttcgtagactggtggctaggggcctgagttgtacatatacccatataaatgctgtttcttatgtcatgcatgaggtcacacgagtttttcttggagcatcttccattctgtgtaatggaactgcatatgcaaaggttgggactgcatgtgttgcaatggtagctcatacatttcgtgttcctgtattgatctgttgtgaagcttataagtttcatgaaagggtgcaacttgattcaatatgttctaatgaactaggtgacccagatgctgttgccgtggttcctggaagaatggatgtcaattatctggacaattggactaatcaagacaatttgcagcttctgaatttgttctatgatgctactccttcagattatgtatcggccattgttacagaccatggaatgatccctcctacaagtgtggccgtaattgtgcgcgagtatggacgagagcacttgatctagagatgcagagaagtcagcaagtggttttaacagcccacaaccgattttgataaatggaattttactgtatagttttatccctcaacgattatggagatgcatgttctttcaattgttccatttttttaatactcgatagtcttctgtaacactttgtttggatacaagttacaattaggaagtaaagaaatagagatgaaagaaatagaaatgaattttgaatggaaatgtgtgctgttttgattgatggaattgagaaaatgaatgaaataaaaggatttactttc

SEQ ID NO: 54187 - protein, 513 aa, Glycine max
  peptide (1)..(513): Ceres Seq. ID no. 15178008
GDSDFTGVGFDLPVVKPPGNSPAVNAKNVAGEKREESGKEVHPDLPSISKPLKEKNTKGERRALQEAQRAAKAASKADGNTTVAETRRAAPSKRMWQSSQKKDGPLVMSPVATDKKSGDRPLEKERKKDAPPPRMQFDDKNRVEKAKRRAVVDQNEARNRVELFRHLPQYERWTQLPKLESKFFQLDSVHLAVFKVGMRYLAGDISGSNARCIEMLRAFQEAIIDYSTPPGKVLVRDLTAKISSYVSFFSECRPLSISMGNAIRFVKSCVAKLPLSHTESEAKAALCSDINQFINEKIILADKVIVGHAASKVRDGDVLLTYGSSCVVEMILLYAHDLGKQFRVVVVDSRPKFESRALLRRLVARGLSCTYTHINAVSYVMHEVTRVFLGASSILCNGTAYAKVGTACVAMVAHTFRVPVLICCEAYKFHERVQLDSICSNELGDPDAVAVVPGRMDVNYLDNWTNQDNLQLLNLFYDATPSDYVSAIVTDHGMIPPTSVAVIVREYGREHLI

SEQ ID NO: 54188 - protein, 419 aa, Glycine max
  peptide (1)..(419): Ceres Seq. ID no. 15178009
MWQSSQKKDGPLVMSPVATDKKSGDRPLEKERKKDAPPPRMQFDDKNRVEKAKRRAVVDQNEARNRVELFRHLPQYERWTQLPKLESKFFQLDSVHLAVFKVGMRYLAGDISGSNARCIEMLRAFQEAIIDYSTPPGKVLVRDLTAKISSYVSFFSECRPLSISMGNAIRFVKSCVAKLPLSHTESEAKAALCSDINQFINEKIILADKVIVGHAASKVRDGDVLLTYGSSCVVEMILLYAHDLGKQFRVVVVDSRPKFESRALLRRLVARGLSCTYTHINAVSYVMHEVTRVFLGASSILCNGTAYAKVGTACVAMVAHTFRVPVLICCEAYKFHERVQLDSICSNELGDPDAVAVVPGRMDVNYLDNWTNQDNLQLLNLFYDATPSDYVSAIVTDHGMIPPTSVAVIVREYGREHLI

SEQ ID NO: 54189 - protein, 406 aa, Glycine max
  peptide (1)..(406): Ceres Seq. ID no. 15178010
MSPVATDKKSGDRPLEKERKKDAPPPRMQFDDKNRVEKAKRRAVVDQNEARNRVELFRHLPQYERWTQLPKLESKFFQLDSVHLAVFKVGMRYLAGDISGSNARCIEMLRAFQEAIIDYSTPPGKVLVRDLTAKISSYVSFFSECRPLSISMGNAIRFVKSCVAKLPLSHTESEAKAALCSDINQFINEKIILADKVIVGHAASKVRDGDVLLTYGSSCVVEMILLYAHDLGKQFRVVVVDSRPKFESRALLRRLVARGLSCTYTHINAVSYVMHEVTRVFLGASSILCNGTAYAKVGTACVAMVAHTFRVPVLICCEAYKFHERVQLDSICSNELGDPDAVAVVPGRMDVNYLDNWTNQDNLQLLNLFYDATPSDYVSAIVTDHGMIPPTSVAVIVREYGREHLI

SEQ ID NO: 54190 - DNA, 1563 bp, Glycine max
  misc_feature (1)..(1563): Ceres Seq. ID no. 15170354
gtaggccccccccccgggattagcatatttgacaaagtcatcatttcttttcctaactatggcctttgaataacaatgagggaaaagtaaccatgccatatgggaaagtttttgtgaagctagaactcaggaccaatttggtttctgcagggccaatgtttcaatgaaaaacttcctaaattgattttaagccacttctggagggtctaagactgcatgcattggatcattggctaagatttgcatgctaagagacagatttgaaaaacagatgcatgaactttgcaattctgtaaatgtgggtttggttagatcaattatttaggagtggaagatgagtttcttttcatgttgcacgtcacaagagaagatcgacaagaactcattgaaaaagagcagtaagaactaccatcacgcaaaagctctgccgtcgttagccaacatgtgttttaaatctgataccagcaaacggaagtacatagaagaagaaatagcaaaaattgggaaagggaatattacctctcagactttttcttatcacgagctatgtgttgcaactcggaactttcaccctgacaatatgattggcgaaggaggctttggaagggtttacaaaggacgcctcaaaagcataaatcaggttgttgctgtgaagaaacttaatagaaatggattccaaggaaacagggaatttcttgtagaggttttgattttgagtctcttgcaccaccctaaccttgtcaatttggtagggtattgcgcagatggtgatcaaaggattttggtatacgagtacatggtgaatggctctttagaagatcaccttcttgaactatctccggacagaaagcctttggattggcgtactagaatgaacattgcagccggtgcagctaaaggacttgaatatttacatgaagtagcaaatccgcctgtgatataccgtgatttcaaagcatcaaacatactattagatgaaaacttcaaccctaagctctctgattttggacttgcaaagcttggtccaactggtgataaaactcatgtatccaccagggtaatgggaacttatggctactgtgcacctgagtatgcctcaacaggtcaattgactacaaaatcagatatatatagctttggagtagtgtttctagagatgatcacaggaagaagagcaattgatcagtcaagaccatctgaagagcaaaacttggtcacttgggcacaaccactattcaaagacagaaggaaattttcatcaatggttgatccattgctgaaagggaactacccaacaaagggtctacaccaagcactagcagttgcagcaatgtgtattcaggaggaagctgatacccgacctttgattagtgacgtagttacagctcttgatgttttagcaaagaggcatatacaagtgggaagacaacaccgttcaaaagagacttttttcgagcatggggaatgtagttaacaaaacgaacctgaaaacagtagaggattacacaaaaggacaatgaatgaaaaagcagctgctaatgaagtttgagaatcattctatag

SEQ ID NO: 54191 - protein, 379 aa, Glycine max
  peptide (1)..(379): Ceres Seq. ID no. 15170355
MSFFSCCTSQEKIDKNSLKKSSKNYHHAKALPSLANMCFKSDTSKRKYIEEEIAKIGKGNITSQTFSYHELCVATRNFHPDNMIGEGGFGRVYKGRLKSINQVVAVKKLNRNGFQGNREFLVEVLILSLLHHPNLVNLVGYCADGDQRILVYEYMVNGSLEDHLLELSPDRKPLDWRTRMNIAAGAAKGLEYLHEVANPPVIYRDFKASNILLDENFNPKLSDFGLAKLGPTGDKTHVSTRVMGTYGYCAPEYASTGQLTTKSDIYSFGVVFLEMITGRRAIDQSRPSEEQNLVTWAQPLFKDRRKFSSMVDPLLKGNYPTKGLHQALAVAAMCIQEEADTRPLISDVVTALDVLAKRHIQVGRQHRSKETFFEHGECS

SEQ ID NO: 54192 - protein, 343 aa, Glycine max
  peptide (1)..(343): Ceres Seq. ID no. 15170356
MCFKSDTSKRKYIEEEIAKIGKGNITSQTFSYHELCVATRNFHPDNMIGEGGFGRVYKGRLKSINQVVAVKKLNRNGFQGNREFLVEVLILSLLHHPNLVNLVGYCADGDQRILVYEYMVNGSLEDHLLELSPDRKPLDWRTRMNIAAGAAKGLEYLHEVANPPVIYRDFKASNILLDENFNPKLSDFGLAKLGPTGDKTHVSTRVMGTYGYCAPEYASTGQLTTKSDIYSFGVVFLEMITGRRAIDQSRPSEEQNLVTWAQPLFKDRRKFSSMVDPLLKGNYPTKGLHQALAVAAMCIQEEADTRPLISDVVTALDVLAKRHIQVGRQHRSKETFFEHGECS

SEQ ID NO: 54193 - protein, 297 aa, Glycine max
  peptide (1)..(297): Ceres Seq. ID no. 15170357
MIGEGGFGRVYKGRLKSINQVVAVKKLNRNGFQGNREFLVEVLILSLLHHPNLVNLVGYCADGDQRILVYEYMVNGSLEDHLLELSPDRKPLDWRTRMNIAAGAAKGLEYLHEVANPPVIYRDFKASNILLDENFNPKLSDFGLAKLGPTGDKTHVSTRVMGTYGYCAPEYASTGQLTTKSDIYSFGVVFLEMITGRRAIDQSRPSEEQNLVTWAQPLFKDRRKFSSMVDPLLKGNYPTKGLHQALAVAAMCIQEEADTRPLISDVVTALDVLAKRHIQVGRQHRSKETFFEHGECS

SEQ ID NO: 54194 - DNA, 1449 bp, Glycine max
  misc_feature (1)..(1449): Ceres Seq. ID no. 14304871
gaccatgacggtcgccagcaccaagagactcttcaagatcacgctctctctcctccgcctcggcttcaactcctccaaatgcaaaacggcagccaagatggccgtggccaggatcaagctgctgaggaacaagcgagaggtggtcgtgaggcagatgcgtcgcgacattgctcttcttctccagtctggtcaagacgccaccgctcgcatcagggttgagcatgtcatgagagagcaaaatgttttggctgcaaatgagttcattgaactcttctgtgaattagtggtggccaggctcgcaatcatttcaaagcaaaaggaatgtccagcagatttgaaagaaggaattgctagcttgatatttgcagcccctaggtgctctgaaatcccagaacttgtggcacttaagaatatctttgagaagaaatatgggaaagattttgtatctgcagctgttgatctaagacctagctgcggtgtaaatcgccagttgatcgaaaagctctcagtacgaacaccacctggtgaagtaaaattgaaagtgttgaaggaaatagctaaggaacatcatattgattgggatactacagatagcgagaaagaacttctcaagcctccagaagagctaatagtagggccaagtgcttttgtcagtgccagcagcctaccagtgaagccttctacagttatgtcggtggattcaaataaacccgctactagattatcgaggggtggaaaacccgatgccgagcattacaaagattctaagtctgctgccgaagcagcagctgaggcagctaagcaagcaattgctgctgctgaagttgctgcttatatgactatgaaggactataataatgaagctcctcaaccatatgcttacaatgataagttgtataactcaggagtcaactctgggaccttccaatcaaacaatcctgcaaaatgcaccctgaacatgacacctaaatctttaactgaggagaaaatgtacaggtcacagagcttaccaagatctgatcatatgaacaatgaggaggatgcattgcctaaccaatatggtggaaatgattataggaggcacagctaccatccagcttccgcacattcagatattaagtttgatgaatcaagttgtgatgaagaaattgaagcagaagagcctcctccggttactatgccccctaatcggcttccaccaccggtaccctcatctctggctaaacaggaaagccacattcgtgttcatcccaaattgccagattatgatgaacttgctgcccgctttgatgcactaaaattcaagaagtcacaatcctgaacccactttagcaaccaaccgtttatgaatctattaaattaatttatacacaataaatacatataagaatagtatattttgttatatagagatactaagaatgtattggatgctaaactttgctatgc

SEQ ID NO: 54195 - protein, 439 aa, Glycine max
  peptide (1)..(439): Ceres Seq. ID no. 14304872
TMTVASTKRLFKITLSLLRLGFNSSKCKTAAKMAVARIKLLRNKREVVVRQMRRDIALLLQSGQDATARIRVEHVMREQNVLAANEFIELFCELVVARLAIISKQKECPADLKEGIASLIFAAPRCSEIPELVALKNIFEKKYGKDFVSAAVDLRPSCGVNRQLIEKLSVRTPPGEVKLKVLKEIAKEHHIDWDTTDSEKELLKPPEELIVGPSAFVSASSLPVKPSTVMSVDSNKPATRLSRGGKPDAEHYKDSKSAAEAAAEAAKQAIAAAEVAAYMTMKDYNNEAPQPYAYNDKLYNSGVNSGTFQSNNPAKCTLNMTPKSLTEEKMYRSQSLPRSDHMNNEEDALPNQYGGNDYRRHSYHPASAHSDIKFDESSCDEEIEAEEPPPVTMPPNRLPPPVPSSLAKQESHIRVHPKLPDYDELAARFDALKFKKSQS

SEQ ID NO: 54196 - protein, 438 aa, Glycine max
  peptide (1)..(438): Ceres Seq. ID no. 14304873
MTVASTKRLFKITLSLLRLGFNSSKCKTAAKMAVARIKLLRNKREVVVRQMRRDIALLLQSGQDATARIRVEHVMREQNVLAANEFIELFCELVVARLAIISKQKECPADLKEGIASLIFAAPRCSEIPELVALKNIFEKKYGKDFVSAAVDLRPSCGVNRQLIEKLSVRTPPGEVKLKVLKEIAKEHHIDWDTTDSEKELLKPPEELIVGPSAFVSASSLPVKPSTVMSVDSNKPATRLSRGGKPDAEHYKDSKSAAEAAAEAAKQAIAAAEVAAYMTMKDYNNEAPQPYAYNDKLYNSGVNSGTFQSNNPAKCTLNMTPKSLTEEKMYRSQSLPRSDHMNNEEDALPNQYGGNDYRRHSYHPASAHSDIKFDESSCDEEIEAEEPPPVTMPPNRLPPPVPSSLAKQESHIRVHPKLPDYDELAARFDALKFKKSQS

SEQ ID NO: 54197 - protein, 407 aa, Glycine max
  peptide (1)..(407): Ceres Seq. ID no. 14304874
MAVARIKLLRNKREVVVRQMRRDIALLLQSGQDATARIRVEHVMREQNVLAANEFIELFCELVVARLAIISKQKECPADLKEGIASLIFAAPRCSEIPELVALKNIFEKKYGKDFVSAAVDLRPSCGVNRQLIEKLSVRTPPGEVKLKVLKEIAKEHHIDWDTTDSEKELLKPPEELIVGPSAFVSASSLPVKPSTVMSVDSNKPATRLSRGGKPDAEHYKDSKSAAEAAAEAAKQAIAAAEVAAYMTMKDYNNEAPQPYAYNDKLYNSGVNSGTFQSNNPAKCTLNMTPKSLTEEKMYRSQSLPRSDHMNNEEDALPNQYGGNDYRRHSYHPASAHSDIKFDESSCDEEIEAEEPPPVTMPPNRLPPPVPSSLAKQESHIRVHPKLPDYDELAARFDALKFKKSQS

SEQ ID NO: 54198 - DNA, 1408 bp, Glycine max
  misc_feature (1)..(1408): Ceres Seq. ID no. 14304842
gaaggttaaggttttcacagaattcctctaatggcatccatcgtatccaccaaagccaaccaatttcgctattccacgcgccttctcttctcacaccttcttcgccaaggcagaccctccacgctttcaccacccttctcttctcatcttcaaccactccatcacccttacaaggttcggaatcaaagttatggaaatgggtcgttgaggttgtgtcaaaggtttctatcttcttcttcttctcctcctgctgctaatgttagtggagaaaaaccagcatcagattcagatcactctgcaaaagatggttctggccaagggaaagagtctgggagtggaggagatgagggtcagaaaagtgatgctgggaaatccgttcgtggagggcctgtttcttggttgagctttctcttgctggtgctcactggagctggattggtgttctactatgacagggaaaagaaacgacatattgaagggatacgttctaatacagaggctgttaagcagggaccttctgtaggaacagctgcaattgggggtccatttcaccttgtcaaccatcacggaaaacatgtaactgaaaaggatttcttgggaaagtggactttgttatattttggctttactcactgcccggatatctgtccagaggaactacagaagttagcagctgctgttgataaaataaaggagaaagctggaattgaaactgtaccggtttttatctctgttgatcctgagagggatactgttgaacaagtgggtgaatatgtcaaagaatttcatccaaagttaattggattaactggtagcccggatgagatcaagaatgttgctcgtgcatatcgtgtttattacatgaagacagcagaggaagactcagattatcttgttgatcactccatagttatatacttgatgagtcctgaaatgaaatttgtaaagttttttggcaagaacaatgatgttgattcgcttgccgatggagttattaaagaggtaaagcagtataagaagtaacctgaacaatgctattggtaccctcatttctttagtggaagcgaaattgtcaatgaattctggccttgtggtagtaaactacaacagtatgtctgattatacttctgaaggctagctgttctttaggtgtttctggagattggacagtttcaaaaagcaacttattgtcattgtttcaatgtttagttttgtacttgaaatttttttggtgacatttatttgtgtatttgagatgcaacgacattacaattgtcatgttcaacatatgccttatatcagatatggcatctataataagaaataccatggtttatattgatgagatattaaattacgatcttcaacagggaagagcctacaatttaaaatgaatttgattggtttc

SEQ ID NO: 54199 - protein, 330 aa, Glycine max
  peptide (1)..(330): Ceres Seq. ID no. 14304843
MASIVSTKANQFRYSTRLLFSHLLRQGRPSTLSPPFSSHLQPLHHPYKVRNQSYGNGSLRLCQRFLSSSSSPPAANVSGEKPASDSDHSAKDGSGQGKESGSGGDEGQKSDAGKSVRGGPVSWLSFLLLVLTGAGLVFYYDREKKRHIEGIRSNTEAVKQGPSVGTAAIGGPFHLVNHHGKHVTEKDFLGKWTLLYFGFTHCPDICPEELQKLAAAVDKIKEKAGIETVPVFISVDPERDTVEQVGEYVKEFHPKLIGLTGSPDEIKNVARAYRVYYMKTAEEDSDYLVDHSIVIYLMSPEMKFVKFFGKNNDVDSLADGVIKEVKQYKK

SEQ ID NO: 54200 - DNA, 1277 bp, Glycine max
  misc_feature (1)..(1277): Ceres Seq. ID no. 14304863
gaaaaatcgcaatatcttcaactctatctgcaacagccaactttctcgttcgtcgatcacaaaaatggcggcgaaacttcaaatatttacgggattgccccccgcgccatttcaatcttcctcctccactctctgcgtactcaagaagcctctcactacctccttcttcggcactgcacgagtggaagttctgaaacttcgagtgatgaggattgcgaagcctgcgcgcggtggaggtgctctcggtgctcgcatgaacctctttgacaggttcgccagagttgtgaagtcgtacgcaaacgctgtcttaagctcgtttgaagatccggagaaaatattggagcaagctgtgcttgaaatgaacgacgacttgaccaaaatgcgtcaagctactgcacaagtgttggcatctcaaaagcggttggaaaataaatacaaggctgcacaacaagcttctgaagagtggtaccggaaagcacaacttgctcttcagaaaggtgaagaggatcttgctcgtgaagcacttaagaggcgtaaatcttatgcggataatgccagttctttgaaagctcaacttgatcaacaaaagactgttgttgagaatcttgtctctaatacaaggcttttggagagtaagatacaagaggcaaggtcgaaaaaagatactctcaaagcaagagctcaatcggcaaagactgcaaccaaggtgagtgagatgctgggaaatgtcaatacaagtagtgctctttcagcttttgaaaagatggaagagaaagtgttgacaatggagtcccaagctgaagctcttggccagttgacaagtgatgatcttgaaggaaagtttgctttgcttgagggctcgtccgttgatgacgaccttgcgaatttgaaaaaagaattatctggtgcctcaaagaaaggggaccttcctcctggaagaagtaccaccagcgccaacactgggattccatttcgagatgctgagatcgagttggaacttgatcaattgaggcaaagagcaaaggaattttgaagcatggattcttttttgtttcttcatatcaaatcttcaatttagtttctttatttctgatatcaacgttgtacagctaaaggccaatcacgatattgttcgactactggccaaaaattgattagaaaaatgaactgattagctgcatgctcttgtagctcatgttatatgttaattaccttaagtgtgatgatattgtaatatataatttgtaccatcagaagtcttttttattcctattaag

SEQ ID NO: 54201 - protein, 343 aa, Glycine max
  peptide (1)..(343): Ceres Seq. ID no. 14304864
KNRNIFNSICNSQLSRSSITKMAAKLQIFTGLPPAPFQSSSSTLCVLKKPLTTSFFGTARVEVLKLRVMRIAKPARGGGALGARMNLFDRFARVVKSYANAVLSSFEDPEKILEQAVLEMNDDLTKMRQATAQVLASQKRLENKYKAAQQASEEWYRKAQLALQKGEEDLAREALKRRKSYADNASSLKAQLDQQKTVVENLVSNTRLLESKIQEARSKKDTLKARAQSAKTATKVSEMLGNVNTSSALSAFEKMEEKVLTMESQAEALGQLTSDDLEGKFALLEGSSVDDDLANLKKELSGASKKGDLPPGRSTTSANTGIPFRDAEIELELDQLRQRAKEF

SEQ ID NO: 54202 - protein, 322 aa, Glycine max
  peptide (1)..(322): Ceres Seq. ID no. 14304865
MAAKLQIFTGLPPAPFQSSSSTLCVLKKPLTTSFFGTARVEVLKLRVMRIAKPARGGGALGARMNLFDRFARVVKSYANAVLSSFEDPEKILEQAVLEMNDDLTKMRQATAQVLASQKRLENKYKAAQQASEEWYRKAQLALQKGEEDLAREALKRRKSYADNASSLKAQLDQQKTVVENLVSNTRLLESKIQEARSKKDTLKARAQSAKTATKVSEMLGNVNTSSALSAFEKMEEKVLTMESQAEALGQLTSDDLEGKFALLEGSSVDDDLANLKKELSGASKKGDLPPGRSTTSANTGIPFRDAEIELELDQLRQRAKEF

SEQ ID NO: 54203 - protein, 275 aa, Glycine max
  peptide (1)..(275): Ceres Seq. ID no. 14304866
MRIAKPARGGGALGARMNLFDRFARVVKSYANAVLSSFEDPEKILEQAVLEMNDDLTKMRQATAQVLASQKRLENKYKAAQQASEEWYRKAQLALQKGEEDLAREALKRRKSYADNASSLKAQLDQQKTVVENLVSNTRLLESKIQEARSKKDTLKARAQSAKTATKVSEMLGNVNTSSALSAFEKMEEKVLTMESQAEALGQLTSDDLEGKFALLEGSSVDDDLANLKKELSGASKKGDLPPGRSTTSANTGIPFRDAEIELELDQLRQRAKEF

SEQ ID NO: 54204 - DNA, 1349 bp, Glycine max
  misc_feature (1)..(1349): Ceres Seq. ID no. 14311330
aagatcaggaaagtggaaccttgccttttatgaagttaatgtcttgctttcattgctttcacagtgaatgtatcattagatggtggaaatggcttcaaaattctaacaaagtagactcttctaatacagatagtgcagctgcacatcgtaaccaagataatcctaagaaaacggaagagagtgttggaaactgcccagtctgtcgcaagccttttcttgccaaggatttggaccatgtgcttgctctagttggttcatattcttcccaattgagttcagataatgaagaactcaacgaagaggaaaagctccttcaatcagaggatgagatcaataggagacagaaatatgaagccatcttaaatttacagaaggagaacagtggtttgattgaacccaaaaaagagatggtaatattgcccggtatgtatcttccacaaccagtagcaatgcccagctccacaccaaccaaggaatctgatgagccgcaacaaaaagatccacctgcagttgtgccagaaaaacatgcaggtgggacatccaacagcagcatacctagttctagcaggcagaggaattttggagcaaggagacagaaagcaagaagtgataaccactctagttcaaccgcaagaaatccaagaaaaccagcccaacagcagtgggtaagaagagataatcctagcaataagccatagaagtgatgtctttcactgctataggtcttattatcacatcaatgtttaaaagttgcgaagtaaagtatagatagtagaaaaagacagaaataggtgcctctcgtgtgccccatttctgttaaaggggtgttggagaagcagaagaagcgaagacaagcacatggtgcttccttgcgcaatttgctgtgttttttgtttttccttttttgattccgtgagcaagttttgacttgacatactgccttttttcgtgatagtgttttcttaatcacgaaattttcaatatgaagttatgaatgctacttttaagtagttatgcaatctgcatgctacacaaatgcaagccttcagagtgtaaagtatattcaattcgtggaatgagcattgagcatagttgattttaagcctcatgtttcagttcttgcagaatgaatctgcatgcaactgcagtctgaagcactatgctctctcccttgttcaagttgtgggtgttttgtctttcaatcttgtatctcatggttttctagtgacagtccttttgagccaataattgatgaaagtatctttagtagattattggggatggaattatattcagtgacatcattcgaccaatgaaatgctccttaaatgtaatcacacatttattat

SEQ ID NO: 54205 - protein, 231 aa, Glycine max
  peptide (1)..(231): Ceres Seq. ID no. 14311331
DQESGTLPFMKLMSCFHCFHSECIIRWWKWLQNSNKVDSSNTDSAAAHRNQDNPKKTEESVGNCPVCRKPFLAKDLDHVLALVGSYSSQLSSDNEELNEEEKLLQSEDEINRRQKYEAILNLQKENSGLIEPKKEMVILPGMYLPQPVAMPSSTPTKESDEPQQKDPPAVVPEKHAGGTSNSSIPSSSRQRNFGARRQKARSDNHSSSTARNPRKPAQQQWVRRDNPSNKP

SEQ ID NO: 54206 - protein, 222 aa, Glycine max
  peptide (1)..(222): Ceres Seq. ID no. 14311332
MKLMSCFHCFHSECIIRWWKWLQNSNKVDSSNTDSAAAHRNQDNPKKTEESVGNCPVCRKPFLAKDLDHVLALVGSYSSQLSSDNEELNEEEKLLQSEDEINRRQKYEAILNLQKENSGLIEPKKEMVILPGMYLPQPVAMPSSTPTKESDEPQQKDPPAVVPEKHAGGTSNSSIPSSSRQRNFGARRQKARSDNHSSSTARNPRKPAQQQWVRRDNPSNKP

SEQ ID NO: 54207 - protein, 219 aa, Glycine max
  peptide (1)..(219): Ceres Seq. ID no. 14311333
MSCFHCFHSECIIRWWKWLQNSNKVDSSNTDSAAAHRNQDNPKKTEESVGNCPVCRKPFLAKDLDHVLALVGSYSSQLSSDNEELNEEEKLLQSEDEINRRQKYEAILNLQKENSGLIEPKKEMVILPGMYLPQPVAMPSSTPTKESDEPQQKDPPAVVPEKHAGGTSNSSIPSSSRQRNFGARRQKARSDNHSSSTARNPRKPAQQQWVRRDNPSNKP

SEQ ID NO: 54208 - DNA, 1857 bp, Glycine max
  misc_feature (1)..(1857): Ceres Seq. ID no. 14313784
tctagatgctcttgatacactttctagaactgaatcattcttcatgagctgtagtgtgagtggtttgagtgaatgggatgatcaagaggtccaactatcaggaaatttttcaacagatcaacaggcacgtgatttcatgattggcaggttcttgcctgcagcaaaggcaatggcttctgaaacacctcaaattcagcacaactctaggaagccacttgttacacaagaacaaccaaaacaggcatggaaggtagttagtggagcgaattcccgtccccttaatccaaaatggcaaaaggttttgccgcattatgctcaagatattggtagggaagagagcgaagatgaaagtgatgataatgatggatatgaaaacaatgcacccaaagtttgtgggctatttcctcggttctgccttttgaatccagttccaggattaagaatggagggtaggattcgaagttctacatttcatggagtgcagagtaaatcaattacttctcacagaagaactgcaaaagagcatggtagaactgctactaatgggaaaaagtcagtaaactcccagtctggttatacagaagagagagattttctgagtactgcagaaaaatctaagcatgatattgatccacatcgtagagcttgcagcaaatcatcagcctctgagagcaccgaatttgaatcaagttgtgatagccctgttgttgagaaaactctatatgtagattctgtacataaggtcaaatcttcagacaccaatatcagaggggatgattttgatactctaagaaaagacactgaccttgataaaagcctttctatagattcttcaattgaggatagcaaacccttgggtattgtggatgagaaggaagtatcagaacctaaaagtttagcttctcttgattcatctctccccgtttgttctgataattcaaatgacaatatgcaaatggaaatgaaaaatcattccaacaaaatatgcccagaaaagcaagagttgacaaagcctgattaccaaggaagtaacttagatcgcgatttggttgcaatctcaagtccagatatggttgcatgcaagaaaatagagtctgaaagcaaagattttagcactaaggaaagttctaatggcctaattaagaatcctgtttcaatgagaaacaggaaattttccagtgatgtgaaatttgattcaaagtgccaacaagctaccaaagtggttgatcaagaatgcactcttggatctagtgaggatcctagtaatttggctagctcaaaggtggtgggtgacacaaagatcaacttagaaagtcaattgcggatgaagttgagccatggaaagacttcaaatgcaagctcttcaaagcttcctcttgcccttccttcaccaaaagctccttcagagtcttggcttaagcgcacattaccaacagttccctcgaagagtatatctttacggtctaatcttgctacctacttccatgcacctgttaaaacttctgaagttaatcatgggcatcttcagtttgctcaggaactactcccacccattccagaagcatgaattttccggagatatcaggccattggttatttgatttgcttggtgaaatgtgccacgttttcttagtgtaattatttgttcttaggattctcattctacagcttggtcccccttttgcttttttatatatatacatgagacagtatactactcaaaagtgtaaatcacagttgccctttttgtcttgtaaatgtaataagttgtttcaactaaaatttatcactataaatcacaacaactttaaggtgatttgttcatgtaataatatcagggcaaaagaccttttgctt

SEQ ID NO: 54209 - protein, 521 aa, Glycine max
  peptide (1)..(521): Ceres Seq. ID no. 14313785
LDALDTLSRTESFFMSCSVSGLSEWDDQEVQLSGNFSTDQQARDFMIGRFLPAAKAMASETPQIQHNSRKPLVTQEQPKQAWKVVSGANSRPLNPKWQKVLPHYAQDIGREESEDESDDNDGYENNAPKVCGLFPRFCLLNPVPGLRMEGRIRSSTFHGVQSKSITSHRRTAKEHGRTATNGKKSVNSQSGYTEERDFLSTAEKSKHDIDPHRRACSKSSASESTEFESSCDSPVVEKTLYVDSVHKVKSSDTNIRGDDFDTLRKDTDLDKSLSIDSSIEDSKPLGIVDEKEVSEPKSLASLDSSLPVCSDNSNDNMQMEMKNHSNKICPEKQELTKPDYQGSNLDRDLVAISSPDMVACKKIESESKDFSTKESSNGLIKNPVSMRNRKFSSDVKFDSKCQQATKVVDQECTLGSSEDPSNLASSKVVGDTKINLESQLRMKLSHGKTSNASSSKLPLALPSPKAPSESWLKRTLPTVPSKSISLRSNLATYFHAPVKTSEVNHGHLQFAQELLPPIPEA

SEQ ID NO: 54210 - protein, 507 aa, Glycine max
  peptide (1)..(507): Ceres Seq. ID no. 14313786
MSCSVSGLSEWDDQEVQLSGNFSTDQQARDFMIGRFLPAAKAMASETPQIQHNSRKPLVTQEQPKQAWKVVSGANSRPLNPKWQKVLPHYAQDIGREESEDESDDNDGYENNAPKVCGLFPRFCLLNPVPGLRMEGRIRSSTFHGVQSKSITSHRRTAKEHGRTATNGKKSVNSQSGYTEERDFLSTAEKSKHDIDPHRRACSKSSASESTEFESSCDSPVVEKTLYVDSVHKVKSSDTNIRGDDFDTLRKDTDLDKSLSIDSSIEDSKPLGIVDEKEVSEPKSLASLDSSLPVCSDNSNDNMQMEMKNHSNKICPEKQELTKPDYQGSNLDRDLVAISSPDMVACKKIESESKDFSTKESSNGLIKNPVSMRNRKFSSDVKFDSKCQQATKVVDQECTLGSSEDPSNLASSKVVGDTKINLESQLRMKLSHGKTSNASSSKLPLALPSPKAPSESWLKRTLPTVPSKSISLRSNLATYFHAPVKTSEVNHGHLQFAQELLPPIPEA

SEQ ID NO: 54211 - protein, 476 aa, Glycine max
  peptide (1)..(476): Ceres Seq. ID no. 14313787
MIGRFLPAAKAMASETPQIQHNSRKPLVTQEQPKQAWKVVSGANSRPLNPKWQKVLPHYAQDIGREESEDESDDNDGYENNAPKVCGLFPRFCLLNPVPGLRMEGRIRSSTFHGVQSKSITSHRRTAKEHGRTATNGKKSVNSQSGYTEERDFLSTAEKSKHDIDPHRRACSKSSASESTEFESSCDSPVVEKTLYVDSVHKVKSSDTNIRGDDFDTLRKDTDLDKSLSIDSSIEDSKPLGIVDEKEVSEPKSLASLDSSLPVCSDNSNDNMQMEMKNHSNKICPEKQELTKPDYQGSNLDRDLVAISSPDMVACKKIESESKDFSTKESSNGLIKNPVSMRNRKFSSDVKFDSKCQQATKVVDQECTLGSSEDPSNLASSKVVGDTKINLESQLRMKLSHGKTSNASSSKLPLALPSPKAPSESWLKRTLPTVPSKSISLRSNLATYFHAPVKTSEVNHGHLQFAQELLPPIPEA

SEQ ID NO: 54212 - DNA, 1592 bp, Glycine max
  misc_feature (1)..(1592): Ceres Seq. ID no. 15225707
ggcgaattgggttccgggccccccctcgagtcagctacgtaggccccccccccccggaggagaagagagagaaagagaaaaactcaaagtcatcatcatctaccatggcaaattctgtggcattttccgacgagattcctaacatgagcatgagcttccctttctcccctgctttctctagtagcatctttgacatgatgccaccaccaccaccttcctcatctcacgatcctaaagctcccaactttgctaatagcttcatggacttgctcgctgtccctgctgattattataccccttctttattcgactggtcccaaaacaccgcccccacgtcagcaccaccaccttccaccacccaaatcaaccaccctcttccgtcgccagccagctccaatgtccccgacggctccgaggttctcaacactccggcgtctcccaattcttcgtctatttcatcatcgtccaacgaagcagcagccgccaccaccgccaacaaaacaacgggaaatgataatgaagaggaggaagatgaaacagcaatagatgcaacagcaggcagagaagaagaagatcatcaagaccaagacaagactaagaaacagctcaagccaaaaaagaagaaccaaaaaaagcaaagagagccgagatttgcgttcatgacaaagagtgaagtggatcacctcgacgatggctatagatggcgcaagtacggtcaaaaagccgtcaaaaacagccctcatccaaggagctattatcgttgcaccaccgcgacatgcggcgtgaagaagcgcgtggagcgttcctcggaggatcctacggtggtggtgacaacctacgaggggcaacacactcacccgtgtcctgccacgtcacgggctagcttcgggttcatgcactccgaagcaagtgggttcggacccaccagtggactaggttcggcacactttatgctgcaacaacaacaacagtttcgggaccaagcacaagcacaagcagcaatgttgtataactccacctcatcgtcattgtcattgccactgaatgttgttaactcagcttcttgtgttaataatagctatgccaatacgtcatcgttgagtggctttcttcagggccaagagaatcatcagcgaggttttgtgccgtctagggtggtggctcctcatattttcttgagggacaatgggcttcttcaggacattgttccaacgcagatggggaatgaggagaatgaagatcgtgtgtaggtgatgatcatcataatatatagtcatattttgggttaattaattaatcatagaacttaattatgacaaattagtttattttaattattttgttgtatattaattatatgtatctttgtatggtatattattatgtaccgttggttctttagctaactgaactaatggtgaaaagtgaaaacctctatgggcgggcttcttggggtgttttgtgttttactttagaggttaccatagagaaacctcgcttcaactgatggcttgtgttcatatgaaacattttggaggttcccactttttatggttagataatagatatatatggagggactttgtattctg

SEQ ID NO: 54213 - protein, 415 aa, Glycine max
  peptide (1)..(415): Ceres Seq. ID no. 15225708
RIGFRAPPRVSYVGPPPPEEKREKEKNSKSSSSTMANSVAFSDEIPNMSMSFPFSPAFSSSIFDMMPPPPPSSSHDPKAPNFANSFMDLLAVPADYYTPSLFDWSQNTAPTSAPPPSTTQINHPLPSPASSNVPDGSEVLNTPASPNSSSISSSSNEAAAATTANKTTGNDNEEEEDETAIDATAGREEEDHQDQDKTKKQLKPKKKNQKKQREPRFAFMTKSEVDHLDDGYRWRKYGQKAVKNSPHPRSYYRCTTATCGVKKRVERSSEDPTVVVTTYEGQHTHPCPATSRASFGFMHSEASGFGPTSGLGSAHFMLQQQQQFRDQAQAQAAMLYNSTSSSLSLPLNVVNSASCVNNSYANTSSLSGFLQGQENHQRGFVPSRVVAPHIFLRDNGLLQDIVPTQMGNEENEDRV

SEQ ID NO: 54214 - protein, 381 aa, Glycine max
  peptide (1)..(381): Ceres Seq. ID no. 15225709
MANSVAFSDEIPNMSMSFPFSPAFSSSIFDMMPPPPPSSSHDPKAPNFANSFMDLLAVPADYYTPSLFDWSQNTAPTSAPPPSTTQINHPLPSPASSNVPDGSEVLNTPASPNSSSISSSSNEAAAATTANKTTGNDNEEEEDETAIDATAGREEEDHQDQDKTKKQLKPKKKNQKKQREPRFAFMTKSEVDHLDDGYRWRKYGQKAVKNSPHPRSYYRCTTATCGVKKRVERSSEDPTVVVTTYEGQHTHPCPATSRASFGFMHSEASGFGPTSGLGSAHFMLQQQQQFRDQAQAQAAMLYNSTSSSLSLPLNVVNSASCVNNSYANTSSLSGFLQGQENHQRGFVPSRVVAPHIFLRDNGLLQDIVPTQMGNEENEDRV

SEQ ID NO: 54215 - protein, 368 aa, Glycine max
  peptide (1)..(368): Ceres Seq. ID no. 15225710
MSMSFPFSPAFSSSIFDMMPPPPPSSSHDPKAPNFANSFMDLLAVPADYYTPSLFDWSQNTAPTSAPPPSTTQINHPLPSPASSNVPDGSEVLNTPASPNSSSISSSSNEAAAATTANKTTGNDNEEEEDETAIDATAGREEEDHQDQDKTKKQLKPKKKNQKKQREPRFAFMTKSEVDHLDDGYRWRKYGQKAVKNSPHPRSYYRCTTATCGVKKRVERSSEDPTVVVTTYEGQHTHPCPATSRASFGFMHSEASGFGPTSGLGSAHFMLQQQQQFRDQAQAQAAMLYNSTSSSLSLPLNVVNSASCVNNSYANTSSLSGFLQGQENHQRGFVPSRVVAPHIFLRDNGLLQDIVPTQMGNEENEDRV

SEQ ID NO: 54216 - DNA, 2054 bp, Glycine max
  misc_feature (1)..(2054): Ceres Seq. ID no. 14307148
aagtctgatttctattttctacactcagagagtgaagcgaacgagtcacgactcagcgatggtgggcccacagtacgattttctggcgaaccctttgggcgtcgtcagatccaccttcgatgccgccgtagcctctgtttccgatccctccgccttcgacgggcgcgactggggcgtcttcccgctcttccaccacttcctctccgaccagtccagtctctctcaggttccacttctgacccctgccaccatcaaatgggtgaagcctaatactctggttcggtttcgcgggatgatacaagacatgctcgggaacgaattttacattggcgcttataaggatggttcggtgtggaggacgaacaagtttatggatgtttctcaatctcttatggcttcttcggtggatatgcgaatctgggaacgtcgactgctttattgtgttccggttccaggactgagtccatggactcaagtttcagttgaagaatttggcgatctatctatggattgcaaatcggagaatagagaaaagcggaggagagaagatggcgagtcttctgatatgcctgtatctggtgatgaggttcagaattccccaaatagtaaaagaatgagagaaggtgaacactcttctgttgcttctcattctcagggagctgcaactgagattgccagctctggtaccagtttggtgtctggtcttgatagcaattcacctccctgtcttgtgaagatatatgattctccagattctgaattgaaactgaatgacatttttgagtttgtgggtatccttacatctgatctagagcttgaagaggacgatgaagattgtgatttatcagatggattttctgaagatcctttgcgtcatctcccacctagcaaggtgccacaccttcattgttttattcagaggaaattagcggttcacgacttccttcagcacaatcctattgtagagccaaggcccaacttggtcagaggaatcagggaagcattgctaaggcatctcacggctgttcttagcaatgatgatttggctactcatttcatgttgctgcatcttctatccaaggtgcatgctagagcagatgatcttgctgtgggaaagctttcattaaatcttacttgttttagcaaagaaaccgtgtctgtatttggaaaaccactaagcgttgctttgaagaacctcctgccattcacattttgcataccccttacagttgaatacttgaattctgtttcacttacgccaaaaaagaattacgatactaatagactggaaactggagtcttacaactagctgaaggttcacacttgattgttgatgagaccaaactagaagctggaactctcaactctgtaggggtagagaatacaaggctactgaaaaatttaatggaattgcaaaaggttgaatatgatttcaagtactataaagtggatatgacaactgatttccaactgctagttttgtcggaggggaaatcaaatatcttgccagccgatgtaattgtaccgttccgaccttctgcaaccagttgctctggagctgtgactgcagaagctttggaggcctggaggtggtatttggccactgtcagacagctatcacacactattgaaccagaaatgcagaaggtgatagaaagtgatctagttgcagcaagacaagcagacaggagcttgagctcccaagatttaagcagattggtaacaatgggccgtctcatgtcattgagctatggtgagaccagcttgtcactagaacattggcaaatggtcaaggaactagaaaggctgcgaagagagaggctataatgaaaaacaccatggaattacaagtggttccaatttgtacaaggttttaaatgagtcaagttatggtgttgacgtcttaaattgtgttgtcggttcaaggaaatgaatgcagttcaaagggtcttggcggttagttgttctgattaccagaattgtcttatgaacagatactcggttccgtaagttgtgcattcagtaaaatgcaatataagaccatttcactaag

SEQ ID NO: 54217 - protein, 608 aa, Glycine max
  peptide (1)..(608): Ceres Seq. ID no. 14307149
SLISIFYTQRVKRTSHDSAMVGPQYDFLANPLGVVRSTFDAAVASVSDPSAFDGRDWGVFPLFHHFLSDQSSLSQVPLLTPATIKWVKPNTLVRFRGMIQDMLGNEFYIGAYKDGSVWRTNKFMDVSQSLMASSVDMRIWERRLLYCVPVPGLSPWTQVSVEEFGDLSMDCKSENREKRRREDGESSDMPVSGDEVQNSPNSKRMREGEHSSVASHSQGAATEIASSGTSLVSGLDSNSPPCLVKIYDSPDSELKLNDIFEFVGILTSDLELEEDDEDCDLSDGFSEDPLRHLPPSKVPHLHCFIQRKLAVHDFLQHNPIVEPRPNLVRGIREALLRHLTAVLSNDDLATHFMLLHLLSKVHARADDLAVGKLSLNLTCFSKETVSVFGKPLSVALKNLLPFTFCIPLTVEYLNSVSLTPKKNYDTNRLETGVLQLAEGSHLIVDETKLEAGTLNSVGVENTRLLKNLMELQKVEYDFKYYKVDMTTDFQLLVLSEGKSNILPADVIVPFRPSATSCSGAVTAEALEAWRWYLATVRQLSHTIEPEMQKVIESDLVAARQADRSLSSQDLSRLVTMGRLMSLSYGETSLSLEHWQMVKELERLRRERL

SEQ ID NO: 54218 - protein, 589 aa, Glycine max
  peptide (1)..(589): Ceres Seq. ID no. 14307150
MVGPQYDFLANPLGVVRSTFDAAVASVSDPSAFDGRDWGVFPLFHHFLSDQSSLSQVPLLTPATIKWVKPNTLVRFRGMIQDMLGNEFYIGAYKDGSVWRTNKFMDVSQSLMASSVDMRIWERRLLYCVPVPGLSPWTQVSVEEFGDLSMDCKSENREKRRREDGESSDMPVSGDEVQNSPNSKRMREGEHSSVASHSQGAATEIASSGTSLVSGLDSNSPPCLVKIYDSPDSELKLNDIFEFVGILTSDLELEEDDEDCDLSDGFSEDPLRHLPPSKVPHLHCFIQRKLAVHDFLQHNPIVEPRPNLVRGIREALLRHLTAVLSNDDLATHFMLLHLLSKVHARADDLAVGKLSLNLTCFSKETVSVFGKPLSVALKNLLPFTFCIPLTVEYLNSVSLTPKKNYDTNRLETGVLQLAEGSHLIVDETKLEAGTLNSVGVENTRLLKNLMELQKVEYDFKYYKVDMTTDFQLLVLSEGKSNILPADVIVPFRPSATSCSGAVTAEALEAWRWYLATVRQLSHTIEPEMQKVIESDLVAARQADRSLSSQDLSRLVTMGRLMSLSYGETSLSLEHWQMVKELERLRRERL

SEQ ID NO: 54219 - protein, 511 aa, Glycine max
  peptide (1)..(511): Ceres Seq. ID no. 14307151
MIQDMLGNEFYIGAYKDGSVWRTNKFMDVSQSLMASSVDMRIWERRLLYCVPVPGLSPWTQVSVEEFGDLSMDCKSENREKRRREDGESSDMPVSGDEVQNSPNSKRMREGEHSSVASHSQGAATEIASSGTSLVSGLDSNSPPCLVKIYDSPDSELKLNDIFEFVGILTSDLELEEDDEDCDLSDGFSEDPLRHLPPSKVPHLHCFIQRKLAVHDFLQHNPIVEPRPNLVRGIREALLRHLTAVLSNDDLATHFMLLHLLSKVHARADDLAVGKLSLNLTCFSKETVSVFGKPLSVALKNLLPFTFCIPLTVEYLNSVSLTPKKNYDTNRLETGVLQLAEGSHLIVDETKLEAGTLNSVGVENTRLLKNLMELQKVEYDFKYYKVDMTTDFQLLVLSEGKSNILPADVIVPFRPSATSCSGAVTAEALEAWRWYLATVRQLSHTIEPEMQKVIESDLVAARQADRSLSSQDLSRLVTMGRLMSLSYGETSLSLEHWQMVKELERLRRERL

SEQ ID NO: 54220 - DNA, 1256 bp, Glycine max
  misc_feature (1)..(1256): Ceres Seq. ID no. 13639419
ctttattgtgtttaaacagcaaacttgagtttggcctcattagtaacaaatgcaacggttctataaattttgcagatgatagtatcatggagatattacaaaagggtgagacagattctaatcgcattgaagcacaaatttactctttgaggtctgcaatagagagtgctgaaactaagcaccaggaagaacagatcgagtgttctgtgaagattaggaaagcctatgagttgattgaacagataaaatcagaatcaagcaagagggaatctcagctagaggctgaattaaaaagaaagaatgccgatattgaagagttgaaggctaacctaatggacaaggaaactgagttgcagtgcattgtggaggagaatgagaagttgaatttgaagcttgaaaaaaggatgtcatcacaaagagaacatgaacttcaaaaggagcttcgaaaactagatgaatgcgtggctggattgaaggccgacctgatggaaaagaaaacaacgttgcaaagcatatctgaagagaatgaaatgctgaagttggagatcagtaagaggtttgcacatggtggtaaggtgatggaggaagttgctgcacaactagaggcagctaaggcttcggaacgcgaggcggttatgaagcttggtattgtgatggaagattcagacagaagcaaccgaaaggcggcgagggtggccgagcaactggaagcatctcaagcagcaaattcaataatagaagctgaactaagaaggttgaagatacagtctgatcaatggagaaaggctgcagaggcagctgctgcaatgctctcagcagggaacaatgggaaacttagtgagagatcaatgtctttggacaacaactataactctataatgaacaagtactcacctttttgtgaagagcttgatgatgatgattttcagaccaagaaaaatggcaacatgctcaagaagattggggtcttgtggaggaaacctaaaaaatagtcaatgttggctgtttacgagttatgacccgcttctaatgttatgattatgttaactgtaatgtttatgttatgcaattttgtctgaccgctaccctcctttttgtttggtgaaacgttgtctacagatgcttagtagtttgaatgaattaagcgcttttataattcaaggacgtgtaggtagagattagagattgtcaatgtttaacccaaaagggttggggtaaggttttctttccatcagtgaaaatcgtgtttgatttct

SEQ ID NO: 54221 - protein, 329 aa, Glycine max
  peptide (1)..(329): Ceres Seq. ID no. 13639420
LLCLNSKLEFGLISNKCNGSINFADDSIMEILQKGETDSNRIEAQIYSLRSAIESAETKHQEEQIECSVKIRKAYELIEQIKSESSKRESQLEAELKRKNADIEELKANLMDKETELQCIVEENEKLNLKLEKRMSSQREHELQKELRKLDECVAGLKADLMEKKTTLQSISEENEMLKLEISKRFAHGGKVMEEVAAQLEAAKASEREAVMKLGIVMEDSDRSNRKAARVAEQLEASQAANSIIEAELRRLKIQSDQWRKAAEAAAAMLSAGNNGKLSERSMSLDNNYNSIMNKYSPFCEELDDDDFQTKKNGNMLKKIGVLWRKPKK

SEQ ID NO: 54222 - protein, 301 aa, Glycine max
  peptide (1)..(301): Ceres Seq. ID no. 13639421
MEILQKGETDSNRIEAQIYSLRSAIESAETKHQEEQIECSVKIRKAYELIEQIKSESSKRESQLEAELKRKNADIEELKANLMDKETELQCIVEENEKLNLKLEKRMSSQREHELQKELRKLDECVAGLKADLMEKKTTLQSISEENEMLKLEISKRFAHGGKVMEEVAAQLEAAKASEREAVMKLGIVMEDSDRSNRKAARVAEQLEASQAANSIIEAELRRLKIQSDQWRKAAEAAAAMLSAGNNGKLSERSMSLDNNYNSIMNKYSPFCEELDDDDFQTKKNGNMLKKIGVLWRKPKK

SEQ ID NO: 54223 - protein, 219 aa, Glycine max
  peptide (1)..(219): Ceres Seq. ID no. 13639422
MDKETELQCIVEENEKLNLKLEKRMSSQREHELQKELRKLDECVAGLKADLMEKKTTLQSISEENEMLKLEISKRFAHGGKVMEEVAAQLEAAKASEREAVMKLGIVMEDSDRSNRKAARVAEQLEASQAANSIIEAELRRLKIQSDQWRKAAEAAAAMLSAGNNGKLSERSMSLDNNYNSIMNKYSPFCEELDDDDFQTKKNGNMLKKIGVLWRKPKK

SEQ ID NO: 54224 - DNA, 1477 bp, Glycine max
  misc_feature (1)..(1477): Ceres Seq. ID no. 14314717
aatccaatgtagaggacattcactcgtattaatattgttccaaactcccaagtcccaaccttctctccctgtctttgcttctgcaattactcccactctggaaatgggttcgctacccgatttagacactctcccccctctgagctcgaggatttcaacggtggttccagcaacccctcgagaagatgaaaacggtgcgtttcaactcaactacatggacctcctcgtgaagctccattacatacgacccgttttcttcttcacttccgaagccgttcaaggcctctcaatctccgacttgaagaaacccatgttcccgcttctcgacccgtattaccacgtttcgggtcgggtcagaagatccgaatccggacgcccctttattaagtgcaacgacgccggtgttcgcatcgctgagtcgcactgcgacagaaccctcgaagaatggttccgtgaaaacggaaacggcgccgttgaagggcttgtccatgatcacgtgcttggacctgatcttgccttttctcctctcgttttcgtcaagttcacttggttcaaatgtggaggattatccgtgggattaagctgggctcacgttcttggagatgccttttctgcatttaatttcctgtccaagtggagtcaaatactagcagtttccattaaaaagacaaatattcttggagagtattggctcgctactaattaccacgatgtggctactcactcttttcacatcacttccaaacaacttcaccatttggtaacagccacatttaatcaaaccaatgacaataccaataaggccaagaccaccacctattttgaaattatttcagcattactttggaagtgtatagcaaacataaggggccaaaaaattggaccaaatgttgtgactatatgtactagtgaatctaatcgtgcagaaaacgaattccccaccaatggcttcttagtgttaagcaaaattgaagcagatttttcgactgggaaatatgaaatttcagaattggtgaagctgattgctgagaacaagatggttgagaaccatgtaatggaaaaattggtggaggcagatgaagggaaagaggattttatagtttatggggtaaacttgacgtttgtgaatttggaagaagctaatatttatgatgggatgaatctgaatggacagaaaccaattatggcaaattgtacatttcgtggggtgagtgataaaggggttgttttggttcttccagcaccagaagatgacgaagatggtggtaatggaaggattgttactgtttctttgcctcgtgaagaactatatcagctgaaagataagctaggaggagaatggggcatacactaattgttcgtgtccgtgttttttatttttggaagcaaaactggtttaagtcgtgtggattgtttttcatctatttgttattgcatttagtatgtttgccggtaataaaatactaatgatttggtc

SEQ ID NO: 54225 - protein, 450 aa, Glycine max
  peptide (1)..(450): Ceres Seq. ID no. 14314718
IQCRGHSLVLILFQTPKSQPSLPVFASAITPTLEMGSLPDLDTLPPLSSRISTVVPATPREDENGAFQLNYMDLLVKLHYIRPVFFFTSEAVQGLSISDLKKPMFPLLDPYYHVSGRVRRSESGRPFIKCNDAGVRIAESHCDRTLEEWFRENGNGAVEGLVHDHVLGPDLAFSPLVFVKFTWFKCGGLSVGLSWAHVLGDAFSAFNFLSKWSQILAVSIKKTNILGEYWLATNYHDVATHSFHITSKQLHHLVTATFNQTNDNTNKAKTTTYFEIISALLWKCIANIRGQKIGPNVVTICTSESNRAENEFPTNGFLVLSKIEADFSTGKYEISELVKLIAENKMVENHVMEKLVEADEGKEDFIVYGVNLTFVNLEEANIYDGMNLNGQKPIMANCTFRGVSDKGVVLVLPAPEDDEDGGNGRIVTVSLPREELYQLKDKLGGEWGIH

SEQ ID NO: 54226 - protein, 416 aa, Glycine max
  peptide (1)..(416): Ceres Seq. ID no. 14314719
MGSLPDLDTLPPLSSRISTVVPATPREDENGAFQLNYMDLLVKLHYIRPVFFFTSEAVQGLSISDLKKPMFPLLDPYYHVSGRVRRSESGRPFIKCNDAGVRIAESHCDRTLEEWFRENGNGAVEGLVHDHVLGPDLAFSPLVFVKFTWFKCGGLSVGLSWAHVLGDAFSAFNFLSKWSQILAVSIKKTNILGEYWLATNYHDVATHSFHITSKQLHHLVTATFNQTNDNTNKAKTTTYFEIISALLWKCIANIRGQKIGPNVVTICTSESNRAENEFPTNGFLVLSKIEADFSTGKYEISELVKLIAENKMVENHVMEKLVEADEGKEDFIVYGVNLTFVNLEEANIYDGMNLNGQKPIMANCTFRGVSDKGVVLVLPAPEDDEDGGNGRIVTVSLPREELYQLKDKLGGEWGIH

SEQ ID NO: 54227 - protein, 379 aa, Glycine max
  peptide (1)..(379): Ceres Seq. ID no. 14314720
MDLLVKLHYIRPVFFFTSEAVQGLSISDLKKPMFPLLDPYYHVSGRVRRSESGRPFIKCNDAGVRIAESHCDRTLEEWFRENGNGAVEGLVHDHVLGPDLAFSPLVFVKFTWFKCGGLSVGLSWAHVLGDAFSAFNFLSKWSQILAVSIKKTNILGEYWLATNYHDVATHSFHITSKQLHHLVTATFNQTNDNTNKAKTTTYFEIISALLWKCIANIRGQKIGPNVVTICTSESNRAENEFPTNGFLVLSKIEADFSTGKYEISELVKLIAENKMVENHVMEKLVEADEGKEDFIVYGVNLTFVNLEEANIYDGMNLNGQKPIMANCTFRGVSDKGVVLVLPAPEDDEDGGNGRIVTVSLPREELYQLKDKLGGEWGIH

SEQ ID NO: 54228 - DNA, 1151 bp, Glycine max
  misc_feature (1)..(1151): Ceres Seq. ID no. 14307424
aaaaaaacacaccccattacaattctctgtatttcagggttgaaaattcacacgttgaattgaaatttggaaatcgtgacaccaaccctacaccaccatggcctccgtagacaaattttgggcttttgccctcgctcttctcctccttgcctcccctctcctccaagttgctaggtgtcagtcagactccgaagatgtagtggaggctgctgaagaatcaagtgatatcggcattgttggtgatgatgtccaagactttggtgatgggaccttcccttctgctccaggaattgaaacaataagtgtttttccaaaaaatagtgcgagattgataacagctggagaagagacagagctgcttgttggtgttaaaaatgatggggattcaagcttgaatgttattgcgatcaaggctagtgttcaccttccttttgatcaccgtatgctggttcaaaatcttactgcacagggttttaacaatggttctgtaccagcctcagcacaagctactttcccatatttatttgcagtcagtaagttcttgcaggcaggaacttttgaccttgtgggcactattatatacgagatagatgaacatccatatcaaagcaccttttttaatggcactgttgaggttgttgaatctggtgcttttcttagcatggaatccgtttttcttgttactcttggggttgcactccttgtcctcctggggctatggattcatggccaaatacagtacctatctaagaaaacaaagagggctccaaaagttgaagttgggactaagactactgatgcttcaacagatgaatggctacagggaactgcttatactcagtctctgtcaagcaagtcaaagaagaagaagtagataaacaatttctcacgttcagccactcactagactctaccatggatatggaatacagaatcctgtaactgactagggttgagtatgagagaacacgaggaagtagttgtgaaattttggctgaaagatccagctttctgttgtagcttaagaatttttacttttctacatttgaatgaagttgagctttttctaaactaacaaggatttcagttaggaaggatacaacttttgagatgtggcataatttttattagataacgtttgttttactttt

SEQ ID NO: 54229 - protein, 258 aa, Glycine max
  peptide (1)..(258): Ceres Seq. ID no. 14307425
MASVDKFWAFALALLLLASPLLQVARCQSDSEDVVEAAEESSDIGIVGDDVQDFGDGTFPSAPGIETISVFPKNSARLITAGEETELLVGVKNDGDSSLNVIAIKASVHLPFDHRMLVQNLTAQGFNNGSVPASAQATFPYLFAVSKFLQAGTFDLVGTIIYEIDEHPYQSTFFNGTVEVVESGAFLSMESVFLVTLGVALLVLLGLWIHGQIQYLSKKTKRAPKVEVGTKTTDASTDEWLQGTAYTQSLSSKSKKKK

SEQ ID NO: 54230 - protein, 143 aa, Glycine max
  peptide (1)..(143): Ceres Seq. ID no. 14307426
MLVQNLTAQGFNNGSVPASAQATFPYLFAVSKFLQAGTFDLVGTIIYEIDEHPYQSTFFNGTVEVVESGAFLSMESVFLVTLGVALLVLLGLWIHGQIQYLSKKTKRAPKVEVGTKTTDASTDEWLQGTAYTQSLSSKSKKKK

SEQ ID NO: 54231 - DNA, 1353 bp, Glycine max
  misc_feature (1)..(1353): Ceres Seq. ID no. 14307404
ggtctccctcacatcgcacacgctttcgctttctttctctcactgtttctctggagtttgtgatctgagtataaagatggagctgagtagcatcaaagatgcatttgatcgtgtagccaagaagcaaaaattatcctcttccaagtctcaagaagttgttgaccaggtggggtgtgaaattgagcaagcattggcaacaattcagtcatcacatgacccctcagctcctgttgaccagaaatctgttctcacagaacttaagtttaagcttaatgctattggaccacttcaacagttggaaggatcaaataaggaattgaacataagtcttaccaagtatcaaaaactccttgaaaaattgttaaaccctgacatatcaaaggcatacagaaatgtggactttgatactcatattgtcaatcagataattgcaaaccacttttaccatcaaggtttgtttgatcttggagatagcatcataaatgaggctggagagcctgatgcagctgcacttagatctcaatttttggaaatgcatcagattattggagctatgagggagagaaaccttcagcctgctctcacatgggtctctgctaatcgagagaaacttgttcagattggttcaaatcttgagcttaagattcacacgttgcagtttgtagaggtcctgcaaaatggaacacgagctgatgccttaaaatatgcccgaacataccttgctccttttgcttctctcaacaagggtgagttcccaaagcttatgggttgcctcttgtatgcaggaaggctagagagctccccttattctgagctgttgtccccaattcattgggagatgacaactgaagagctcacacggcagttctgcactctcctgggtcagtcctatgagaacccactgagtgtagcagttgcagcaggagttgaggggttgcctacactgttaaagcttgcaaatgtaatggcagcaaagaagcaggagtggcaggaaatgaagcagttgccggtgccggttgaattgggtaaggagtttcagttccattcgatttttgtttgccctgtgagtagggatcaaggaagtgaagaaaatcctccaatgctgctgccatgcttacatgtcctttgcaaacaatcaattatgaagctatcaaaaaacagcacccgaacattcaagtgtccatactgtccagccgaagctactgttgcaaactgcaaacagctgtatttctgatgatgtttatgtattttatctcttccatacatttcatttgtgcaaatacagcatttacagctttctggttgtatataaatattctaaaaatcttttacattttgataagaccaacgagt

SEQ ID NO: 54232 - protein, 410 aa, Glycine max
  peptide (1)..(410): Ceres Seq. ID no. 14307405
VSLTSHTLSLSFSHCFSGVCDLSIKMELSSIKDAFDRVAKKQKLSSSKSQEVVDQVGCEIEQALATIQSSHDPSAPVDQKSVLTELKFKLNAIGPLQQLEGSNKELNISLTKYQKLLEKLLNPDISKAYRNVDFDTHIVNQIIANHFYHQGLFDLGDSIINEAGEPDAAALRSQFLEMHQIIGAMRERNLQPALTWVSANREKLVQIGSNLELKIHTLQFVEVLQNGTRADALKYARTYLAPFASLNKGEFPKLMGCLLYAGRLESSPYSELLSPIHWEMTTEELTRQFCTLLGQSYENPLSVAVAAGVEGLPTLLKLANVMAAKKQEWQEMKQLPVPVELGKEFQFHSIFVCPVSRDQGSEENPPMLLPCLHVLCKQSIMKLSKNSTRTFKCPYCPAEATVANCKQLYF

SEQ ID NO: 54233 - protein, 385 aa, Glycine max
  peptide (1)..(385): Ceres Seq. ID no. 14307406
MELSSIKDAFDRVAKKQKLSSSKSQEVVDQVGCEIEQALATIQSSHDPSAPVDQKSVLTELKFKLNAIGPLQQLEGSNKELNISLTKYQKLLEKLLNPDISKAYRNVDFDTHIVNQIIANHFYHQGLFDLGDSIINEAGEPDAAALRSQFLEMHQIIGAMRERNLQPALTWVSANREKLVQIGSNLELKIHTLQFVEVLQNGTRADALKYARTYLAPFASLNKGEFPKLMGCLLYAGRLESSPYSELLSPIHWEMTTEELTRQFCTLLGQSYENPLSVAVAAGVEGLPTLLKLANVMAAKKQEWQEMKQLPVPVELGKEFQFHSIFVCPVSRDQGSEENPPMLLPCLHVLCKQSIMKLSKNSTRTFKCPYCPAEATVANCKQLYF

SEQ ID NO: 54234 - protein, 233 aa, Glycine max
  peptide (1)..(233): Ceres Seq. ID no. 14307407
MHQIIGAMRERNLQPALTWVSANREKLVQIGSNLELKIHTLQFVEVLQNGTRADALKYARTYLAPFASLNKGEFPKLMGCLLYAGRLESSPYSELLSPIHWEMTTEELTRQFCTLLGQSYENPLSVAVAAGVEGLPTLLKLANVMAAKKQEWQEMKQLPVPVELGKEFQFHSIFVCPVSRDQGSEENPPMLLPCLHVLCKQSIMKLSKNSTRTFKCPYCPAEATVANCKQLYF

SEQ ID NO: 54235 - DNA, 794 bp, Glycine max
  misc_feature (1)..(794): Ceres Seq. ID no. 14307480
aaacgtggaacacacctgacacctgatccgcgagcgagggtttgtgaagatgacgacgattcgcaggttttgctgcaacgatcttcttcgctttgccgccgtcaatctcgaccatctcaccgaaacattcaacatgtccttctacatgacctatcttgcaagatggcctgactatttccacgttgccgaaggccctggaaatcgaatcatgggttacattatgggtaaagttgaggggcaaggagaatcttggcatggccatgtaactgcggtgaccgttgctccagagtatcgaaggcagcagttagccaaaaaacttatgaatctgctggaagacatcagtgacaatattgataaggctttttttgttgatctctttgtgagagcgtcaaatgcaccagccatcaagatgtatgaaaagcttggctatgtgatttatcgacgagtgctacgctactattctggggaagaagatggtttggatatgaggaaggcattgtctcgtgatgttgaaaagaagtccatcatccctcttaaacggccggtcactcctgatgaattagagtatgactaagtctgcgtttcatgcaacagagttgcatgagcttattgtgtctcaaagtaaaccatgttgtgcttgataggctgtcaagttgaaaggagttgaacatattatgttggaacttcgaaggtttagtaaatgaaaaatgatcctagaagataatcttgctagtaaaatgaaaaatcttgtcttgtatccaatatgttataattaaatatcacttgcgcgtgtt

SEQ ID NO: 54236 - protein, 174 aa, Glycine max
  peptide (1)..(174): Ceres Seq. ID no. 14307481
MTTIRRFCCNDLLRFAAVNLDHLTETFNMSFYMTYLARWPDYFHVAEGPGNRIMGYIMGKVEGQGESWHGHVTAVTVAPEYRRQQLAKKLMNLLEDISDNIDKAFFVDLFVRASNAPAIKMYEKLGYVIYRRVLRYYSGEEDGLDMRKALSRDVEKKSIIPLKRPVTPDELEYD

SEQ ID NO: 54237 - protein, 146 aa, Glycine max
  peptide (1)..(146): Ceres Seq. ID no. 14307482
MSFYMTYLARWPDYFHVAEGPGNRIMGYIMGKVEGQGESWHGHVTAVTVAPEYRRQQLAKKLMNLLEDISDNIDKAFFVDLFVRASNAPAIKMYEKLGYVIYRRVLRYYSGEEDGLDMRKALSRDVEKKSIIPLKRPVTPDELEYD

SEQ ID NO: 54238 - protein, 142 aa, Glycine max
  peptide (1)..(142): Ceres Seq. ID no. 14307483
MTYLARWPDYFHVAEGPGNRIMGYIMGKVEGQGESWHGHVTAVTVAPEYRRQQLAKKLMNLLEDISDNIDKAFFVDLFVRASNAPAIKMYEKLGYVIYRRVLRYYSGEEDGLDMRKALSRDVEKKSIIPLKRPVTPDELEYD

SEQ ID NO: 54239 - DNA, 1159 bp, Glycine max
  misc_feature (1)..(1159): Ceres Seq. ID no. 14307442
actattattgccacacacaaatcaattaactgaattcttagacagagaaagaggagtagtactagtgataaggtgatcataatagagcataatataagagagtgaaaactcatggaggttggcctcaacaagaaggagaacatggggtttgaggaaactgagctaaggcttggactgcctggaaacgtaggaggcactggcactgaagaagtgctcatcaggaagagaggtttctctgagactgaaactgaaactgaggaggatgagtctgctaccactgtggatttgatgcttaatctttcttctaaggaagctgctgctgctgcagatccaactgataagcacaagactttgcctaaggagaagactcttctgcctgcagatcctgctaagcctccagccaaggcacaggtggtaggttggccacctgtgcggtccttccggaagaacatgttagctgtacaaaagagcgtcggagaagagaacgagaagaacagcagcagccctaatgcaagctttgtcaaagttagcatggatggagcaccttacctccgcaaagtggacttgaagatgtacaagagttaccgagagctctctgattctttaggcaaaatgttcagctccttcaccataggcaattgtgaatcccaaggaatgaaggatttcatgaatgagagcaagctgaatgatcttttgaacagctctgattatgtcccaacctatgaggacaaggatggtgactggatgcttgtcggtgatgtcccatgggagatgtttgttgaatcatgcaagcgtttacgcatcatgaaaggaaaggaggccattggtcttggtcttgcaccaagagccatggcaaaatccaagaacaggagctagactagtcgcacaattcatgacctgccccatcctttgtaattgcggtgcccagttggcttagttactaaagtaaggataattaagctgcagcagacacggatggacattgctaagtggttgaattatagttaatttgtgtcattatggtttgttataatatttcatcaaacaaaacaatgagatgcatgtctaattaagtactaatcatgaacaggaacataatgactctcaatcatgttgttagacttggctttcttatatatcgatctttgcttgttttgtg

SEQ ID NO: 54240 - protein, 254 aa, Glycine max
  peptide (1)..(254): Ceres Seq. ID no. 14307443
MEVGLNKKENMGFEETELRLGLPGNVGGTGTEEVLIRKRGFSETETETEEDESATTVDLMLNLSSKEAAAAADPTDKHKTLPKEKTLLPADPAKPPAKAQVVGWPPVRSFRKNMLAVQKSVGEENEKNSSSPNASFVKVSMDGAPYLRKVDLKMYKSYRELSDSLGKMFSSFTIGNCESQGMKDFMNESKLNDLLNSSDYVPTYEDKDGDWMLVGDVPWEMFVESCKRLRIMKGKEAIGLGLAPRAMAKSKNRS

SEQ ID NO: 54241 - protein, 244 aa, Glycine max
  peptide (1)..(244): Ceres Seq. ID no. 14307444
MGFEETELRLGLPGNVGGTGTEEVLIRKRGFSETETETEEDESATTVDLMLNLSSKEAAAAADPTDKHKTLPKEKTLLPADPAKPPAKAQVVGWPPVRSFRKNMLAVQKSVGEENEKNSSSPNASFVKVSMDGAPYLRKVDLKMYKSYRELSDSLGKMFSSFTIGNCESQGMKDFMNESKLNDLLNSSDYVPTYEDKDGDWMLVGDVPWEMFVESCKRLRIMKGKEAIGLGLAPRAMAKSKNRS

SEQ ID NO: 54242 - protein, 195 aa, Glycine max
  peptide (1)..(195): Ceres Seq. ID no. 14307445
MLNLSSKEAAAAADPTDKHKTLPKEKTLLPADPAKPPAKAQVVGWPPVRSFRKNMLAVQKSVGEENEKNSSSPNASFVKVSMDGAPYLRKVDLKMYKSYRELSDSLGKMFSSFTIGNCESQGMKDFMNESKLNDLLNSSDYVPTYEDKDGDWMLVGDVPWEMFVESCKRLRIMKGKEAIGLGLAPRAMAKSKNRS

SEQ ID NO: 54243 - DNA, 1390 bp, Glycine max
  misc_feature (1)..(1390): Ceres Seq. ID no. 14303423
tggtcgatactaactggacaggaataatgcatcgcaattcacttaaaagatcaaatgatagtacccggattatcatcacagctattatgggaattgcctttggattttttattggtatttcaatttcatctgtgcatttgactaagcctgtagggaattcttttgatgtacctgtagctgaatctgaaatagacagattttcagctgaagtaaacagatctcctgctgttattgacgagtcttctggaaccaaaaatcttgaaaccctagggtcaattagattaccaaagatatttgttgcatcaaatcctcgtggagctgaatcactaccccctggaatcgttgtatcagaatcagatttttatttacgaagactatggggtgaacctagtgaggatctgaagaaaaagccgaagtatttagttacattcactgttggttatgaacaaaggcataatatcaatgctacagtgaaaaagttttctgatgattttgcaattttgctctttcattatgatggtcggactagtgaatgggatcaatttgagtggtcaaggaatgcaatccatgttagtgcaaggaaacaaactaaatggtggtatgctaaaagatttttgcaccctgatatagtatcagcttatgaatatatttttatttgggatgaagatcttggagtagaacacttcaatgcagacaagtatattcatttagtgaaaaaatatggtttggagatctctcaacctggtcttgagcctaataatggattgacatgggagatgacaaaaagaaggggtgacaaagaagttcacatggtgacagaagagaaaccaggctggtgtagtgatccacatttgcctccttgtgctgcatttgtggaaattatggcacctgtcttttctcgtgaagcttggcgttgtgtgtggcacatgattcagaatgatctagtgcatggatggggattggactttgctctcagaagatgtgtagagccagcacatgaaaaaattggtgtaattgattcacaatggattgttcatcaagtaattccttctcttgggaaccagggagagtctgacaaaggaaaaatgccatgggattcggtccgagccagatgcaaaagtgaatgggcccagtttcaacttcgcgtaaccaatgctgataagtcttatcttgaaggacataaacgtaatgggaaggattgatatgtggatccatctacctattgtatatgttttacgtacacactcggtggtagtatttgttttgcattgtttcctcccctcaggtgccatgcgaatttttgagccatatttttgaggaattaatctatagccatgtaaatcaatcacttttatgttattgaataacttttttatcagccgttagattg

SEQ ID NO: 54244 - protein, 399 aa, Glycine max
  peptide (1)..(399): Ceres Seq. ID no. 14303424
VDTNWTGIMHRNSLKRSNDSTRIIITAIMGIAFGFFIGISISSVHLTKPVGNSFDVPVAESEIDRFSAEVNRSPAVIDESSGTKNLETLGSIRLPKIFVASNPRGAESLPPGIVVSESDFYLRRLWGEPSEDLKKKPKYLVTFTVGYEQRHNINATVKKFSDDFAILLFHYDGRTSEWDQFEWSRNAIHVSARKQTKWWYAKRFLHPDIVSAYEYIFIWDEDLGVEHFNADKYIHLVKKYGLEISQPGLEPNNGLTWEMTKRRGDKEVHMVTEEKPGWCSDPHLPPCAAFVEIMAPVFSREAWRCVWHMIQNDLVHGWGLDFALRRCVEPAHEKIGVIDSQWIVHQVIPSLGNQGESDKGKMPWDSVRARCKSEWAQFQLRVTNADKSYLEGHKRNGKD

SEQ ID NO: 54245 - protein, 391 aa, Glycine max
  peptide (1)..(391): Ceres Seq. ID no. 14303425
MHRNSLKRSNDSTRIIITAIMGIAFGFFIGISISSVHLTKPVGNSFDVPVAESEIDRFSAEVNRSPAVIDESSGTKNLETLGSIRLPKIFVASNPRGAESLPPGIVVSESDFYLRRLWGEPSEDLKKKPKYLVTFTVGYEQRHNINATVKKFSDDFAILLFHYDGRTSEWDQFEWSRNAIHVSARKQTKWWYAKRFLHPDIVSAYEYIFIWDEDLGVEHFNADKYIHLVKKYGLEISQPGLEPNNGLTWEMTKRRGDKEVHMVTEEKPGWCSDPHLPPCAAFVEIMAPVFSREAWRCVWHMIQNDLVHGWGLDFALRRCVEPAHEKIGVIDSQWIVHQVIPSLGNQGESDKGKMPWDSVRARCKSEWAQFQLRVTNADKSYLEGHKRNGKD

SEQ ID NO: 54246 - protein, 371 aa, Glycine max
  peptide (1)..(371): Ceres Seq. ID no. 14303426
MGIAFGFFIGISISSVHLTKPVGNSFDVPVAESEIDRFSAEVNRSPAVIDESSGTKNLETLGSIRLPKIFVASNPRGAESLPPGIVVSESDFYLRRLWGEPSEDLKKKPKYLVTFTVGYEQRHNINATVKKFSDDFAILLFHYDGRTSEWDQFEWSRNAIHVSARKQTKWWYAKRFLHPDIVSAYEYIFIWDEDLGVEHFNADKYIHLVKKYGLEISQPGLEPNNGLTWEMTKRRGDKEVHMVTEEKPGWCSDPHLPPCAAFVEIMAPVFSREAWRCVWHMIQNDLVHGWGLDFALRRCVEPAHEKIGVIDSQWIVHQVIPSLGNQGESDKGKMPWDSVRARCKSEWAQFQLRVTNADKSYLEGHKRNGKD

SEQ ID NO: 54247 - DNA, 1288 bp, Glycine max
  misc_feature (1)..(1288): Ceres Seq. ID no. 14313768
tgcaatgctagctagacacgctgaaaggggcttaggcattgataatccgatgcaaggtggtaggaatgagttaccaaattatgaaaggtctggggtttcccgatattcagatgtacggccaacaagtgcacctcatcactctggtggggttcagctggctcgaaatgatggaaaaattgttgggtctgatttgcagcaccctatgccttctgaactaactgagcgacctaaactgaagttgctaccaagggcaaagccagtggaaagttcagaacctgctgtcatggattatgcacagggtaatcgtcaggttaatgattctggccatgttgaaaccgtttatcaagcacatggccatgctaattttgtgaagcctgtatcagctggaaatgacaatgggaaagacgcaggacagcgtccgaagctgaatttgaagcctcggtctcagcccactgaaaagctggatggaaacagtgaaagagacaggaatgttttatttggtggagctcgcccacgtgaactagtattgaaggagcgagggattgatgatgtttcaatcaatgtggtggagcattcaaacagggttgaaaacaatattttgagggttcagaaacatcctgaccattcaacccagactcgatatggtgaaaagaccgaggatgctcatcttgatcaaaagacaggcagaaaacctgaaaggaaggagcaaagggcagatggtgatagggctcatgcgcagaggagaaattggcggggtgatactcggagaaatgggaaggagaccgataggcagccgcatgccccggagaggcaaccttcacctgagacatggcgtaagcctgtggagcagcagctaaaatcagctccaggtgctgctagcacacggtacagtagagcagcttcggcggttgaacttgcacaagcattctccagatctgtatcagatccaaaagtgaatgataggttttcaggtcaaaggggtctgaacactggcaacagcagcaggacacaagttccattttcacggcttgttggtcctacatcaaggcctcagatcaatggttattaaaatatttggtggataattggactcactcaagaccaatttctatgagatagcattggattcatgcaatgtggaattgcagagcacttcatgtagtggctgtggttttagttattttctcctcattcacaacaattgagtgagaaattaatgatttctcaagttacatagccttggttgtgacaataccttcttacaattaccatgctttattttgttttt

SEQ ID NO: 54248 - protein, 355 aa, Glycine max
  peptide (1)..(355): Ceres Seq. ID no. 14313769
AMLARHAERGLGIDNPMQGGRNELPNYERSGVSRYSDVRPTSAPHHSGGVQLARNDGKIVGSDLQHPMPSELTERPKLKLLPRAKPVESSEPAVMDYAQGNRQVNDSGHVETVYQAHGHANFVKPVSAGNDNGKDAGQRPKLNLKPRSQPTEKLDGNSERDRNVLFGGARPRELVLKERGIDDVSINVVEHSNRVENNILRVQKHPDHSTQTRYGEKTEDAHLDQKTGRKPERKEQRADGDRAHAQRRNWRGDTRRNGKETDRQPHAPERQPSPETWRKPVEQQLKSAPGAASTRYSRAASAVELAQAFSRSVSDPKVNDRFSGQRGLNTGNSSRTQVPFSRLVGPTSRPQINGY

SEQ ID NO: 54249 - protein, 354 aa, Glycine max
  peptide (1)..(354): Ceres Seq. ID no. 14313770
MLARHAERGLGIDNPMQGGRNELPNYERSGVSRYSDVRPTSAPHHSGGVQLARNDGKIVGSDLQHPMPSELTERPKLKLLPRAKPVESSEPAVMDYAQGNRQVNDSGHVETVYQAHGHANFVKPVSAGNDNGKDAGQRPKLNLKPRSQPTEKLDGNSERDRNVLFGGARPRELVLKERGIDDVSINVVEHSNRVENNILRVQKHPDHSTQTRYGEKTEDAHLDQKTGRKPERKEQRADGDRAHAQRRNWRGDTRRNGKETDRQPHAPERQPSPETWRKPVEQQLKSAPGAASTRYSRAASAVELAQAFSRSVSDPKVNDRFSGQRGLNTGNSSRTQVPFSRLVGPTSRPQINGY

SEQ ID NO: 54250 - protein, 339 aa, Glycine max
  peptide (1)..(339): Ceres Seq. ID no. 14313771
MQGGRNELPNYERSGVSRYSDVRPTSAPHHSGGVQLARNDGKIVGSDLQHPMPSELTERPKLKLLPRAKPVESSEPAVMDYAQGNRQVNDSGHVETVYQAHGHANFVKPVSAGNDNGKDAGQRPKLNLKPRSQPTEKLDGNSERDRNVLFGGARPRELVLKERGIDDVSINVVEHSNRVENNILRVQKHPDHSTQTRYGEKTEDAHLDQKTGRKPERKEQRADGDRAHAQRRNWRGDTRRNGKETDRQPHAPERQPSPETWRKPVEQQLKSAPGAASTRYSRAASAVELAQAFSRSVSDPKVNDRFSGQRGLNTGNSSRTQVPFSRLVGPTSRPQINGY

SEQ ID NO: 54251 - DNA, 1412 bp, Glycine max
  misc_feature (1)..(1412): Ceres Seq. ID no. 14310362
atctctccatgatcgcctatactgtagtgatgtgaaaaaggaaccactaacatggaagcagagactaaagatctgcataggagcagcacgtggactacacttccttcacacaggtgtcaagcgaaccatctttcatcgtgacgtaacaccttataaaattcttttgggtagcaacatggtggccaaacttgcagacttccggctttccttaacaggaccgcattatgcatcaaagccaaaaccaaagacaatttcaaaagatggctttataggtacatatggttatgtggctcctgagatttccgaaaacaatacaataacagaaaaatgtgatgtttattcctttggggtagtgctactggaactggtatgcaaagacaagctaaaagatgttgagaagcgggagaagcaccctgttgaggagaatattgatccgaatatcaaaggaaagattgcaccagagtgttgggaagtatttatggatatcacagaaagatgcttgaagtttgatccgaatgagcggccagcaatgggtgaagtggaggtgcaacttgagcttgctctgtcactgcaggaagaagcagatataataaatactggcgatgattataccctattatcgatgatcattatgaattaatcctcaaccagaataggtaccatctttagctggaaactaaactgatagattatagaacttccaaggttgtctcaatgataattgataacagttcaacagattgttcaatcacagtagagcagatgaatgggaagtcatgggaaaatattttttttagttcaagaatgaaattgagttatttgccagttttgtcactcaaggcattttttgtctctctagtaagattttatgaccgcaaagacaagaagattgttgtgactggtgtatgagaacacaggcactgccaattgatctctccataatttcctaaactgtcatgatatgaaaatggaatcacttttgtggatatatataggctgaaagatccttcaaagctgcagtgcatggactacattacattcacacaggagtcacgtgcaccgactttcatcatgcagccaatatcctgcaatattttagcccttcattagtcattgcacagaaatgaaggaacagaaaaatgtaatgaatagttcctatttagctatagagaaaattttgatggagaggcaggagaggatccatacttgttttggataacaatacggtgcctgaactcagatttttgcttttttgaggtatctatactgttttcttgttaattatacatcacttacagcttagaagctggcccagtaatccagtatcaacttcaaatttgatctcttgttgtataaagtttgcgtctgtgtagatccatatagaaataatcgctatgaaagaatttgttggg

SEQ ID NO: 54252 - protein, 212 aa, Glycine max
  peptide (1)..(212): Ceres Seq. ID no. 14310363
SLHDRLYCSDVKKEPLTWKQRLKICIGAARGLHFLHTGVKRTIFHRDVTPYKILLGSNMVAKLADFRLSLTGPHYASKPKPKTISKDGFIGTYGYVAPEISENNTITEKCDVYSFGVVLLELVCKDKLKDVEKREKHPVEENIDPNIKGKIAPECWEVFMDITERCLKFDPNERPAMGEVEVQLELALSLQEEADIINTGDDYTLLSMIIMN

SEQ ID NO: 54253 - protein, 154 aa, Glycine max
  peptide (1)..(154): Ceres Seq. ID no. 14310364
MVAKLADFRLSLTGPHYASKPKPKTISKDGFIGTYGYVAPEISENNTITEKCDVYSFGVVLLELVCKDKLKDVEKREKHPVEENIDPNIKGKIAPECWEVFMDITERCLKFDPNERPAMGEVEVQLELALSLQEEADIINTGDDYTLLSMIIMN

SEQ ID NO: 54254 - DNA, 1191 bp, Glycine max
  misc_feature (1)..(1191): Ceres Seq. ID no. 14303479
aagtttcaaacgccgcaaccaccacacaattcctacacatttctactctttagtttctccaattttctttctcaattctcaacaatggccactacaacacaacttcacttaccccctggattcagattccatccaacagatgaagaactcgtcatccactacctttgtcgcaaatgcgcttcgcaacatatcgcggttcccataatcgccgaaattgatctgtacaagtacgacccttgggaccttccaggaatggctttgtacggagagaaagagtggtattttttcacgccgagggaccgcaagtacccgaacggttcgcggccgaaccggtccgcgggaaccgggtactggaaggcaaccggagcggataaaccagttggtaaaccgaaaccggttgggatcaagaaagcgttggttttttacgctggaaaagcgcccaagggagagaaaactaactggatcatgcacgagtatcgtcttgcagacgtggatcgttccgttcgcaaaaagaacagcttaaggctggatgactgggtgctgtgccgaatttacaacaagaaaggtgcaattgaaaagcaacaactaccaccaccgagtggggtccgcaaaattgaatgttccgaaatggaggacgagaagccggagattctgccgccagatccgccgtatacggcggcgacggtggcggattgcctgtacttcgaggcttccgactcggtgccccggctgcacacgacggactcgagctgctccgagcaggtggtgtcggcggagtttgcgagcgaggtgcagagcgagccgaagaggggcagcaacaacaacaacgagtttgcatataattacgtggatgccactctcgggaataatcagatgtcgccgctgcaggatattttcatgtacctctccaagtccttctgcaattaacacgcaccaccaccacgacgagacgacgtcgttctgtgttgtgtgtatgcattatgcatttttgcagtagctgctccactgcaccatttgcacggaagcacgagactgagtgaagatccgtgagtgtgtccgtgctggttcgtgtagacgattattacaaaaaaaaacaaaaaagcaccaagatgaagaagaagaaagattcttatatgaacatgatgaattatgagtatattaaattaatgaagtattaatacatcattgagc

SEQ ID NO: 54255 - protein, 308 aa, Glycine max
  peptide (1)..(308): Ceres Seq. ID no. 14303480
KFQTPQPPHNSYTFLLFSFSNFLSQFSTMATTTQLHLPPGFRFHPTDEELVIHYLCRKCASQHIAVPIIAEIDLYKYDPWDLPGMALYGEKEWYFFTPRDRKYPNGSRPNRSAGTGYWKATGADKPVGKPKPVGIKKALVFYAGKAPKGEKTNWIMHEYRLADVDRSVRKKNSLRLDDWVLCRIYNKKGAIEKQQLPPPSGVRKIECSEMEDEKPEILPPDPPYTAATVADCLYFEASDSVPRLHTTDSSCSEQVVSAEFASEVQSEPKRGSNNNNEFAYNYVDATLGNNQMSPLQDIFMYLSKSFCN

SEQ ID NO: 54256 - protein, 280 aa, Glycine max
  peptide (1)..(280): Ceres Seq. ID no. 14303481
MATTTQLHLPPGFRFHPTDEELVIHYLCRKCASQHIAVPIIAEIDLYKYDPWDLPGMALYGEKEWYFFTPRDRKYPNGSRPNRSAGTGYWKATGADKPVGKPKPVGIKKALVFYAGKAPKGEKTNWIMHEYRLADVDRSVRKKNSLRLDDWVLCRIYNKKGAIEKQQLPPPSGVRKIECSEMEDEKPEILPPDPPYTAATVADCLYFEASDSVPRLHTTDSSCSEQVVSAEFASEVQSEPKRGSNNNNEFAYNYVDATLGNNQMSPLQDIFMYLSKSFCN

SEQ ID NO: 54257 - protein, 224 aa, Glycine max
  peptide (1)..(224): Ceres Seq. ID no. 14303482
MALYGEKEWYFFTPRDRKYPNGSRPNRSAGTGYWKATGADKPVGKPKPVGIKKALVFYAGKAPKGEKTNWIMHEYRLADVDRSVRKKNSLRLDDWVLCRIYNKKGAIEKQQLPPPSGVRKIECSEMEDEKPEILPPDPPYTAATVADCLYFEASDSVPRLHTTDSSCSEQVVSAEFASEVQSEPKRGSNNNNEFAYNYVDATLGNNQMSPLQDIFMYLSKSFCN

SEQ ID NO: 54258 - DNA, 1263 bp, Glycine max
  misc_feature (1)..(1263): Ceres Seq. ID no. 15169286
gttttcttttaggaggatatattttgtttgttcttgtttctctcttctttaataacttttttgtaaaaaaaactaggtaaaaccatttctgaaactacaaaaccagactacggtgctcttgcacttgttcaattaaaatgatttgtgatctggtactaattgttttcaatgtgttacagacgggattttgggctccatgtctgagatacagaccttacctggtgaaattccttctaatgaaagggctggatgtgaagtgattaaatctgatgacaaactttcacattttgagaatttctgccagtctggattgtctcatcttggaattaaacattcacaggatataaaccttcaaggcatatggaaggaagcagaaccatttgccgaccttgtaggaccttattggtctctcagagctgctttagggcctcttttggaaactcttattatacttgataggttattgtttcttcaagagcaaggcagtgctctagaagcctgcttgttaccgatatttgatccaaaaatatcaccaagaaatgtggcaataattgcaaaaaagatcgacaaagatttaagatcctcctgttgctaaaaggtaagtagtggctgcacgtgtcatttatgtgtatccctaccatttaatactgttacccaattacagctctttgaatatcctttcattttattactctattactgtctttctgtaactggatacatcccaatcttctctttccaaaaaacaaaggtgtgaagctagacaatgcagcttctgtcttcaagcatgaatgactcaatgttgcttggttggagtggagtttctttatgagatccttttcttggttggatgatttttctgtcacatgttgatattgttaaatttgttaaaccatgtaaagtaacggtattgcttctccctattccactgctagactttcttgagagttgagttgattgtcaagattccctcagttgaagaaagtcaatttcacatgggacaaggtcacaatgatctacaattcaatgcctgtctttcatgagttgtgttgattctcaagatcggtgcaggtgaaggtcaagatcatttgggacaaggagacaatgctgctgactgctttcctctgttcttgttggtgaaagtttgttactcaggttccaacatcatgctaagttactttgttatcataatcatatgtaatgttctgagtagctagctgggcaattcacttaaatgatgcaagcttgtaaaatttttgcacc

SEQ ID NO: 54259 - protein, 132 aa, Glycine max
  peptide (1)..(132): Ceres Seq. ID no. 15169287
MSEIQTLPGEIPSNERAGCEVIKSDDKLSHFENFCQSGLSHLGIKHSQDINLQGIWKEAEPFADLVGPYWSLRAALGPLLETLIILDRLLFLQEQGSALEACLLPIFDPKISPRNVAIIAKKIDKDLRSSCC

SEQ ID NO: 54260 - DNA, 1548 bp, Glycine max
  misc_feature (1)..(1548): Ceres Seq. ID no. 14310398
gaagacgaagggtttggcttagacttagatggagtcgcgtggacactcaaacccgcttctgtcattttccagcttcatccatcaacactgcgtccgcttagggtccgacctcgcgactcgtttggatgacacgaagcgagccctagctcaatctcatcataatcttgtcttccccaaacacgccctcgcccacgccgccactgctaccctgggctcccagcacgtggctaagtccctcgtcggcacctccgttttcaccgtcagcaattccaacaatgagttcgttcttatctccgaccccgacggtgccaagtccattggattgctttgctttcgccaagaggacgccgaagcctttctcgctcaggttcgatcacggagtagagagcttcgaagcaaggctagggttgttccaattactctcgaccaggtatacatgttgaaggttgaaggcattgccttccgattcttacctgatcctgttcaaataaggaatgctttggagcttaaaccagtcaacaagggaggttttgatggagttcctgtttttcagtcggagcttttggttgtgaagaagaggaataagcgttactgccctgtgtatttctctaaggaggatattgagcaggaactgtccaaagtttccagggcatcaagaggacctggtgtttctcagcatatagcggtctagaatctaccatctctttctctttatttaatacttttgacaaatcaatgtatttgtcaaagctgcatactagtttcacaatttttctaatccccaaaagcagtagcatattttattgaaccctcagatagttaatttgtgttgcatatgctttatgcaagacttatcttggataaaaataaacatttaactacctgtatgatcaacatgaaaacttactgaacatttggttgaatcatagtggtttgtgtagtatatcttattgatatttgataaccatgagataaatttattttaaggcagtgattaaggtaagaaatgcttgtgctatttaaatttttctttgaaccaaactatatggctgtggaaacaattatgctaatggaataattagttttcgttctataaatgatttgctttttgttgatgtctttttcaattttcatgggaaacaaagcatctgttcaatggcaatgtggaaatagaaatctaagggatttttttatcaaagaaaatatttttgttctcatttttttgttttcactagtaactatgaaaatgctatgttgtttttattatattccctgtttgcaaaaatttactataggaaatgatgaaaggttaggtgaagatcaaagatttgtattcaccgatttttgtatatatctttgaaaacagttgaccaagtgaaaacaaagtaactattgtaattcttagtgaaaataagaaaagaaaacaaagaacattttttcaaaccaaacagagacttaaattctatccatgttcaattaagctcacgtaactcttgtaatctgtcttccatgaaaaaggttagaggaaaagggagaaacttttttttc

SEQ ID NO: 54261 - protein, 220 aa, Glycine max
  peptide (1)..(220): Ceres Seq. ID no. 14310399
MESRGHSNPLLSFSSFIHQHCVRLGSDLATRLDDTKRALAQSHHNLVFPKHALAHAATATLGSQHVAKSLVGTSVFTVSNSNNEFVLISDPDGAKSIGLLCFRQEDAEAFLAQVRSRSRELRSKARVVPITLDQVYMLKVEGIAFRFLPDPVQIRNALELKPVNKGGFDGVPVFQSELLVVKKRNKRYCPVYFSKEDIEQELSKVSRASRGPGVSQHIAV

SEQ ID NO: 54262 - DNA, 1270 bp, Glycine max
  misc_feature (1)..(1270): Ceres Seq. ID no. 14307053
ggttgcatcccaaatggaataagttcagacatgtccatagcgttgaacaaaactaacagcagcaaaatgagcacacccttgttccatgaattcaaaaagcaagcttctttcttcttcaaggagaaaattaagactgctagattagctctaacagatgtcacccctgcagaactgatgacagaagaggcaacaagtggaaatccatgggccccagatgccagaactctcagatcaatttcaagggatgcttttgagctagacgattattggaggattgtggagattctgcataaaaggtttcttaaatttgaaaagaagaattggaggatctcttacaattccctgatcgtgcttgagcacttgttgactcatggaccagagagtgttgcggaggaatttaagagtgacaaagatgtcattagccaaatgaaaggttttcagtatattgatgacactgggtttaattggggcctaactgtgagaaagaaatctgagaggataatgaaactgctggaaaaagggactcttctcaaggaagagagaaaaaatgctagaaggttatctagagggattgaaggtttcggaagtttctctcatcggtcaactccggcacaaggtgttctacgtgagaaatcattgccaaccacacttaagagatatgactcagacttaaacaaccatgaagatcaggaaaaccattcctcttgttcaaacaatgttgtgaatgtggacacagtggctgtcaaatctcctagccatcaaggtgaaacttttaagtcattgggtagtgtggaagccaaggaataccaggatgatgatcttggcaacaatcaaatgcttccgaaatctgaaacaagttctaaagaaaacatggagcctagcaaggaggagttccatctatggaacttgaatggggagtccaaagcacttttggattgtggtgaagaggattccaagcttggaatcatcagaacagaagatgatcaccccttcagttcagcagaaatgcatgccactgcctctttgctttcggcttgctagagacggaaatactagtatactacaagggtgttgaagcaatttgaagatttaaatgaacccaccaagttcaagttgttagcaaatattgcattttcaattcagaagagcatagtctaaagaacgtcttatggtacatgtattcatatttgatggatatgggcaaccattatgttactgctagaatttcccctctatcacggtttgttactcaacaaagagaaattttgtc

SEQ ID NO: 54263 - protein, 346 aa, Glycine max
  peptide (1)..(346): Ceres Seq. ID no. 14307054
GCIPNGISSDMSIALNKTNSSKMSTPLFHEFKKQASFFFKEKIKTARLALTDVTPAELMTEEATSGNPWAPDARTLRSISRDAFELDDYWRIVEILHKRFLKFEKKNWRISYNSLIVLEHLLTHGPESVAEEFKSDKDVISQMKGFQYIDDTGFNWGLTVRKKSERIMKLLEKGTLLKEERKNARRLSRGIEGFGSFSHRSTPAQGVLREKSLPTTLKRYDSDLNNHEDQENHSSCSNNVVNVDTVAVKSPSHQGETFKSLGSVEAKEYQDDDLGNNQMLPKSETSSKENMEPSKEEFHLWNLNGESKALLDCGEEDSKLGIIRTEDDHPFSSAEMHATASLLSAC

SEQ ID NO: 54264 - protein, 336 aa, Glycine max
  peptide (1)..(336): Ceres Seq. ID no. 14307055
MSIALNKTNSSKMSTPLFHEFKKQASFFFKEKIKTARLALTDVTPAELMTEEATSGNPWAPDARTLRSISRDAFELDDYWRIVEILHKRFLKFEKKNWRISYNSLIVLEHLLTHGPESVAEEFKSDKDVISQMKGFQYIDDTGFNWGLTVRKKSERIMKLLEKGTLLKEERKNARRLSRGIEGFGSFSHRSTPAQGVLREKSLPTTLKRYDSDLNNHEDQENHSSCSNNVVNVDTVAVKSPSHQGETFKSLGSVEAKEYQDDDLGNNQMLPKSETSSKENMEPSKEEFHLWNLNGESKALLDCGEEDSKLGIIRTEDDHPFSSAEMHATASLLSAC

SEQ ID NO: 54265 - protein, 324 aa, Glycine max
  peptide (1)..(324): Ceres Seq. ID no. 14307056
MSTPLFHEFKKQASFFFKEKIKTARLALTDVTPAELMTEEATSGNPWAPDARTLRSISRDAFELDDYWRIVEILHKRFLKFEKKNWRISYNSLIVLEHLLTHGPESVAEEFKSDKDVISQMKGFQYIDDTGFNWGLTVRKKSERIMKLLEKGTLLKEERKNARRLSRGIEGFGSFSHRSTPAQGVLREKSLPTTLKRYDSDLNNHEDQENHSSCSNNVVNVDTVAVKSPSHQGETFKSLGSVEAKEYQDDDLGNNQMLPKSETSSKENMEPSKEEFHLWNLNGESKALLDCGEEDSKLGIIRTEDDHPFSSAEMHATASLLSAC

SEQ ID NO: 54266 - DNA, 1236 bp, Glycine max
  misc_feature (1)..(1236): Ceres Seq. ID no. 15171080
atcattacattacatcttaggagtctttcttcctttgtaatagaaagcacgcgtttctctctctccctctctcaacgaatatttgtgtacttcctcttttgtgggtagattcaatttaccatgtcgagttcatcggaatactctcaattttccggccagaaaccggcgaggtcgccggagaaatcgagcttctctcagacttgtagcctgttgagtcaatacatcaaggagaagggtagcttcggagatcttaccctcggaatgacatcatgtgggtcacctgagacatcttgtcaatctgctacaaccatgaacttgtttcctaccaaggaaaacaacgtgacaccaaaggacctgacagctatggatttgttctctccacaagcttcctcctatcgtccttcagaggagattccaaccttgattaattccagtgcaattaaatctgtgagcaagagtgctaaaactgcacagatgacaatcttttatggtggacaagttgttgtctttgatgattttcctgctgacaaagcaagtgagatcatgtcctatgccaccaaagggatcccccaaagccagaacaattctgttttcacctacacaccgagccagccttcatttcctgctaatttggtcagaacttcagctgattcaagtgctccaattattcctagtgtgaacattaccaactccattcatgaacaccctcaagcatcatccagacctgttgtttgtgatctgccaattgctagaaaagcttcactccaccggtttctggagaagagaaaggatagaattgcttccaaagcaccatatcaactagcaaatgggtcttctaaccagccagctgagtccatgccatggcttgggctgagtgcttcttcacctcgaatctgagagcagctatagtttatatgtaatttttaagcattatttttgttgtgaaaatgctaactagtcagaagcttttttgccagaattcttgactaagtttctggttatattttttttcctgactaaatagcattattacttcttttttctcttttttttcgccgataaaaaaacctctttttttttttttctttaaatgtttttcagatgatttatgggcttcttgctaggcctgtatttgtcatagtaatgttggctctgctgggccgtatcatagatctaactattggttagttgatgctgctctaattatagtgattcaatatattcattgttaagatt

SEQ ID NO: 54267 - protein, 258 aa, Glycine max
  peptide (1)..(258): Ceres Seq. ID no. 15171081
MSSSSEYSQFSGQKPARSPEKSSFSQTCSLLSQYIKEKGSFGDLTLGMTSCGSPETSCQSATTMNLFPTKENNVTPKDLTAMDLFSPQASSYRPSEEIPTLINSSAIKSVSKSAKTAQMTIFYGGQVVVFDDFPADKASEIMSYATKGIPQSQNNSVFTYTPSQPSFPANLVRTSADSSAPIIPSVNITNSIHEHPQASSRPVVCDLPIARKASLHRFLEKRKDRIASKAPYQLANGSSNQPAESMPWLGLSASSPRI

SEQ ID NO: 54268 - protein, 211 aa, Glycine max
  peptide (1)..(211): Ceres Seq. ID no. 15171082
MTSCGSPETSCQSATTMNLFPTKENNVTPKDLTAMDLFSPQASSYRPSEEIPTLINSSAIKSVSKSAKTAQMTIFYGGQVVVFDDFPADKASEIMSYATKGIPQSQNNSVFTYTPSQPSFPANLVRTSADSSAPIIPSVNITNSIHEHPQASSRPVVCDLPIARKASLHRFLEKRKDRIASKAPYQLANGSSNQPAESMPWLGLSASSPRI

SEQ ID NO: 54269 - protein, 195 aa, Glycine max
  peptide (1)..(195): Ceres Seq. ID no. 15171083
MNLFPTKENNVTPKDLTAMDLFSPQASSYRPSEEIPTLINSSAIKSVSKSAKTAQMTIFYGGQVVVFDDFPADKASEIMSYATKGIPQSQNNSVFTYTPSQPSFPANLVRTSADSSAPIIPSVNITNSIHEHPQASSRPVVCDLPIARKASLHRFLEKRKDRIASKAPYQLANGSSNQPAESMPWLGLSASSPRI

SEQ ID NO: 54270 - DNA, 1564 bp, Glycine max
  misc_feature (1)..(1564): Ceres Seq. ID no. 14314964
gattattatgaagagcattttactgtgcctcatcagagaattgttttagtaaccaataaacgagtcatgcttcttcagtgtcttgctcccgacaagatggataaaaaagcatgcaagattatttgggacgtaccttgggatgagttgatggcactggagttggcaaaagcaggcagttcccaaccttctttcttgatcctccatctgaaacatttccggagatctgaaaattttgtgcgagtgataaaatgcaatagtgtggaagtgtttgaaggaagagaaccccaagctattaagatatgttcagtggtgcgtagagcatggaagacatatcagtctaacatgaaaaacttgattctgaaggttccttcaagtcagagacaagtgcatttttcctggactgaagttgatagtagagaaccacgaatccccaataaggccattattagttctagggagatttcatcaaacagtactgcatctgatgatagacgatttgtgagacacatcattactttttcaaagatctggagcagcgaacaagaatacaacggtcgatgctcgttatgcagcagaaaacagatctcgcaagatggcagaatatgtagcatttggaggcctgtgtgtcctgttggatatatatatattggggatattgctcgtgttggtatccatcctccaaatgttgctgctgtctaccgcaagattgatggattttttgctctcccgatgggatatgacctggtgtggcgaaattgtccggaagattatgttactccattatcaatttggcacccacgggcaccagatggatttgtggctcccggatgtgttgccattgctggttatttggaaccagagcctgatcttgtttactgtatcgcggagtcacttgttgaggaaacagaatttgaagagttgaaggtttggtctgcacctgactcatatccatggacctgtcatatctatccagtacagagtgatgctttgcattttgttgctctacgacaaagcaaggaagaatccgactggaagccaaagagggtccgtgataaccctcactgtcagttgcaatcaccttagtctttaaactggttaacctccgttttttatttctttggaggtcagctccaaagaatgtgcgtgtgccatctccgaaagaagacagtaatgtaagttggacgatgtttataataggagaggctgtgtttgtcgcgtgattattattactactttccagcatccaatggtgatgggactcagattgggatcatgtatattctctctgattctgtggtatatagtgtataaaagcaccacgtcggaaactgccaaaaggcacatgtaacttgtctacttatccttgtgtgtgttttgctcatgtctcagactattttgcgaagatgcgttggcgttttctttttcaaaagccacatacatacttgatttgcgagggatagaatattacatggttgacaatctaggcaaagactggccaccgaggtctatttttgaagatatgccaattttatgatgcgattcgaacattatatttccatggctc

SEQ ID NO: 54271 - protein, 360 aa, Glycine max
  peptide (1)..(360): Ceres Seq. ID no. 14314965
DYYEEHFTVPHQRIVLVTNKRVMLLQCLAPDKMDKKACKIIWDVPWDELMALELAKAGSSQPSFLILHLKHFRRSENFVRVIKCNSVEVFEGREPQAIKICSVVRRAWKTYQSNMKNLILKVPSSQRQVHFSWTEVDSREPRIPNKAIISSREISSNSTASDDRRFVRHIITFSKIWSSEQEYNGRCSLCSRKQISQDGRICSIWRPVCPVGYIYIGDIARVGIHPPNVAAVYRKIDGFFALPMGYDLVWRNCPEDYVTPLSIWHPRAPDGFVAPGCVAIAGYLEPEPDLVYCIAESLVEETEFEELKVWSAPDSYPWTCHIYPVQSDALHFVALRQSKEESDWKPKRVRDNPHCQLQSP

SEQ ID NO: 54272 - protein, 338 aa, Glycine max
  peptide (1)..(338): Ceres Seq. ID no. 14314966
MLLQCLAPDKMDKKACKIIWDVPWDELMALELAKAGSSQPSFLILHLKHFRRSENFVRVIKCNSVEVFEGREPQAIKICSVVRRAWKTYQSNMKNLILKVPSSQRQVHFSWTEVDSREPRIPNKAIISSREISSNSTASDDRRFVRHIITFSKIWSSEQEYNGRCSLCSRKQISQDGRICSIWRPVCPVGYIYIGDIARVGIHPPNVAAVYRKIDGFFALPMGYDLVWRNCPEDYVTPLSIWHPRAPDGFVAPGCVAIAGYLEPEPDLVYCIAESLVEETEFEELKVWSAPDSYPWTCHIYPVQSDALHFVALRQSKEESDWKPKRVRDNPHCQLQSP

SEQ ID NO: 54273 - protein, 328 aa, Glycine max
  peptide (1)..(328): Ceres Seq. ID no. 14314967
MDKKACKIIWDVPWDELMALELAKAGSSQPSFLILHLKHFRRSENFVRVIKCNSVEVFEGREPQAIKICSVVRRAWKTYQSNMKNLILKVPSSQRQVHFSWTEVDSREPRIPNKAIISSREISSNSTASDDRRFVRHIITFSKIWSSEQEYNGRCSLCSRKQISQDGRICSIWRPVCPVGYIYIGDIARVGIHPPNVAAVYRKIDGFFALPMGYDLVWRNCPEDYVTPLSIWHPRAPDGFVAPGCVAIAGYLEPEPDLVYCIAESLVEETEFEELKVWSAPDSYPWTCHIYPVQSDALHFVALRQSKEESDWKPKRVRDNPHCQLQSP

SEQ ID NO: 54274 - DNA, 1105 bp, Glycine max
  misc_feature (1)..(1105): Ceres Seq. ID no. 15169711
acacattctctagagcacacacaaacccgtccctcacactctccaaaccctagcggcactacacactagttctatcgctatctccccaagatgtcgagcgccgatcccgagcacagagaagaggaggaggcacccgccgttggcgacgacgaggacaccggagctcacgtcgctccaatcgtcaagctcgaggaggttgctgtcaccaccggcgaggaggacgaagatgcaatcctggatctcaaatcgaagctttaccggttcgacaaggacgggaaccagtggaaggagcgtggcgccggcactgtgaagttcctgaagcataaggcttccggcaaggttaggcttctcatgaggcaatccaagacgctcaagatctgcgctaatcatctcattttgcctacgatgagtgtgcaagagcacgctgggaacgagaaatcctgcgtttggcatgctagggattttgctgatggtgaactcaaggacgagctcttctgcatccgttttccttctattgaaaattgcaaaagcttcatggaaacattccaagaagttgctgaaacacaaaaggcagaggatgagaaggaatcatctgatgcagctggtcttattgagaaattaagtgttgaagagaaggctgatgcagagaagaaagatgaagagaagtctgaggacaaaactgtggagaaagaatctgcatcaggaaaggaaagcaaggcagttgaagagcctgcttcctcagcttgagtatttcttattcatattccatacttggctatctgacaaggttaggtggttgatgtttttgccgcccatatcttgggatattctcatacttgatggttgccggattgtgtcactgaattgagctgtttgtgtcctcttgagtttttgtcagcttgcaaagttagggttgggtttgaattttgaggcttgaatggttgagctttcggggtctgggagtctattattattgttattttcattctacatatgtatttgttgcgagtaatgggtcattttggttgggagggtgcagtccagaaatagtaaaaattatagacgaaggttttggtacaacttgtttgagttccacaattatttc

SEQ ID NO: 54275 - protein, 218 aa, Glycine max
  peptide (1)..(218): Ceres Seq. ID no. 15169712
MSSADPEHREEEEAPAVGDDEDTGAHVAPIVKLEEVAVTTGEEDEDAILDLKSKLYRFDKDGNQWKERGAGTVKFLKHKASGKVRLLMRQSKTLKICANHLILPTMSVQEHAGNEKSCVWHARDFADGELKDELFCIRFPSIENCKSFMETFQEVAETQKAEDEKESSDAAGLIEKLSVEEKADAEKKDEEKSEDKTVEKESASGKESKAVEEPASSA

SEQ ID NO: 54276 - protein, 131 aa, Glycine max
  peptide (1)..(131): Ceres Seq. ID no. 15169713
MRQSKTLKICANHLILPTMSVQEHAGNEKSCVWHARDFADGELKDELFCIRFPSIENCKSFMETFQEVAETQKAEDEKESSDAAGLIEKLSVEEKADAEKKDEEKSEDKTVEKESASGKESKAVEEPASSA

SEQ ID NO: 54277 - protein, 113 aa, Glycine max
  peptide (1)..(113): Ceres Seq. ID no. 15169714
MSVQEHAGNEKSCVWHARDFADGELKDELFCIRFPSIENCKSFMETFQEVAETQKAEDEKESSDAAGLIEKLSVEEKADAEKKDEEKSEDKTVEKESASGKESKAVEEPASSA

SEQ ID NO: 54278 - DNA, 1322 bp, Glycine max
  misc_feature (1)..(1322): Ceres Seq. ID no. 13593955
aaatcttcattccattgttgagggtcatcattgatatttattctggtccatcccttgctcatcctcatagctatcatggaagcctctaactcacattcgtttcgctctcgtgtgcacctttttgtgcttttcttgttatgttttgtggtcacaattgaagctaatttaaagaagaaggtcccagccttttatgtgtttggagactccacagtagactcaggaaacaacaacttcatagacacggctttcagaagcgattttcctccctatggtagagattttgttaaccaagctcccacgggaaggttcacaaatgggaagcttggcactgattttgtagcttcatatttaggcctaaaagagttggtgccaccatatttggatccaaatctcagtgacaaagaacttgtaactggtgtcagttttgcctctgctggttctggctttgaccctctcactccaatgctgggaaatgtaattccaatagcaaagcagttggaatatttcaaagaatacaaacagaggttagagggtatgcttggcaagaaaagaaccgaatatcacataaacaatgctttatttttcatcagcgcgggcacaaatgactacgtcattaattatttttcgttgccaatacgaagaaagacctacaccacccccttaacctacgggcacttcttgcttcaacacataaaagatttcatacagaatttatggaaagaaggtgcacgaaaaatagctttggttggagtacctccaatgggatgcttgccgatcatgatcaccttgaattcccataatgtatttctcgaacgtggttgtgtggacaagtattccgctgttgcaagagatcacaatatgatgcttcaacaggaattgttcttaatgcaactaaatttctctaataataaccctgccagtgctaaaatctcttacctcgacatatatggacccttggacgacatgattcaagcgcatcaaaatctaggttttgatgcggttgatcgtggctgttgtggaagtggttacatcgaagcaacttttttgtgtaatggggtttcatacgtgtgctctgatccatctaagtttgtcttctgggattcaatacaccctacggagaaggcatactatgacctatttatggcagcccgtcccaaaattgatgcccttatcaatggctagggatatatattctttttggcccccctcaatttggtcattagaaatttataacaaataaaggcttgcagctttgtgccaaactaaaaggaattattggaaaatagaaagaaaaaaaaaagaacaaagtttttttgtactgt

SEQ ID NO: 54279 - protein, 368 aa, Glycine max
  peptide (1)..(368): Ceres Seq. ID no. 15221268
MEASNSHSFRSRVHLFVLFLLCFVVTIEANLKKKVPAFYVFGDSTVDSGNNNFIDTAFRSDFPPYGRDFVNQAPTGRFTNGKLGTDFVASYLGLKELVPPYLDPNLSDKELVTGVSFASAGSGFDPLTPMLGNVIPIAKQLEYFKEYKQRLEGMLGKKRTEYHINNALFFISAGTNDYVINYFSLPIRRKTYTTPLTYGHFLLQHIKDFIQNLWKEGARKIALVGVPPMGCLPIMITLNSHNVFLERGCVDKYSAVARDHNMMLQQELFLMQLNFSNNNPASAKISYLDIYGPLDDMIQAHQNLGFDAVDRGCCGSGYIEATFLCNGVSYVCSDPSKFVFWDSIHPTEKAYYDLFMAARPKIDALING

SEQ ID NO: 54280 - protein, 239 aa, Glycine max
  peptide (1)..(239): Ceres Seq. ID no. 15221269
MLGNVIPIAKQLEYFKEYKQRLEGMLGKKRTEYHINNALFFISAGTNDYVINYFSLPIRRKTYTTPLTYGHFLLQHIKDFIQNLWKEGARKIALVGVPPMGCLPIMITLNSHNVFLERGCVDKYSAVARDHNMMLQQELFLMQLNFSNNNPASAKISYLDIYGPLDDMIQAHQNLGFDAVDRGCCGSGYIEATFLCNGVSYVCSDPSKFVFWDSIHPTEKAYYDLFMAARPKIDALING

SEQ ID NO: 54281 - protein, 215 aa, Glycine max
  peptide (1)..(215): Ceres Seq. ID no. 15221270
MLGKKRTEYHINNALFFISAGTNDYVINYFSLPIRRKTYTTPLTYGHFLLQHIKDFIQNLWKEGARKIALVGVPPMGCLPIMITLNSHNVFLERGCVDKYSAVARDHNMMLQQELFLMQLNFSNNNPASAKISYLDIYGPLDDMIQAHQNLGFDAVDRGCCGSGYIEATFLCNGVSYVCSDPSKFVFWDSIHPTEKAYYDLFMAARPKIDALING

SEQ ID NO: 54282 - DNA, 1478 bp, Glycine max
  misc_feature (1)..(1478): Ceres Seq. ID no. 14307813
gattgattttacttccttatcctctcttcttcttcttctcccgctcgcgccttctgtctcaatctcaatccaccagaaatggcaacaatagttagccaccaccaccgcctattctccgccgccacgcgcttcaattccactggcagagactcgcggcggcaaaggagcggcgcaaactcggtccggtgcgctgacgtaagcacggtcacgagcgagaatcagcgagtgacggtgagtaacaggagcgattcgctggagatatgccgcgtgctgaacggaatgtggcagaccagcggcggatggggccgaatcgaccgagacgacgccgtcgaggctatgcttcgctacgccgacgccggcctaactaccttcgacatggccgatcactatggacctgctgaagatctatatgggattttcattaatcgagttcgtcgagagcgtcctgctgaattgttggaacaggtcagaggtctcactaagtgggttcctccgccagttaagatgactagtagctatgtaagagacagcatcaatgtttcaaggaagagaatggatgtggaatccttggacatgcttcagtttcattggtgggattactcgaatccaggctacctggatgcactaaaacacctaacagatttgaaagaagaaggtaaaatcaagactgtggctctgacaaattttgatacggagagattacaaattattcttgaaaatgaggttcctgttgtaagcaatcaggtgcaacattcccttgttgatatgcgtccccaacagagaatggcagagctttgtcagcatacaggagtcaaacttataacgtatggaacagtaatgggtggtctgttgtctgagaagttccttgacaccaacatagctattccttttgctggtcctgcaataaacactccctccctccaaaagtacaaaaggatggtagatgcttggggaggatggagtttgttccagggactgcttcggactcttaaacaagtagcttctaaacatggcgtatcgatcgcaactgttgctgtgaagtatatactagatcagcctgcagtagcaggatcaatggttggtgtcagacttggcttggcagaacatattcaagataccaatgctatcttttcacttgttctcgatgaagatgacgtgaacagcataagagaagccacagcgaaaggaaaggatctgcttaaagtgattggtgattgtggagatgagtacaggcgtgcatgagtcatgttggcttatcaacctggtgaagtgctttaatttatataggacaaggggatggaaaaaaagggagggggacacaggaaaagtgttcaagctcaattttttgtcagttgaagaatttgtgtgtaatacttttatggattacccagtaatgatcaaaagacaaaatagatgaaaggaggaagtaatgtattctgtagtatatatcttgtgagatttatgcaaactttcctcac

SEQ ID NO: 54283 - protein, 387 aa, Glycine max
  peptide (1)..(387): Ceres Seq. ID no. 14307814
MATIVSHHHRLFSAATRFNSTGRDSRRQRSGANSVRCADVSTVTSENQRVTVSNRSDSLEICRVLNGMWQTSGGWGRIDRDDAVEAMLRYADAGLTTFDMADHYGPAEDLYGIFINRVRRERPAELLEQVRGLTKWVPPPVKMTSSYVRDSINVSRKRMDVESLDMLQFHWWDYSNPGYLDALKHLTDLKEEGKIKTVALTNFDTERLQIILENEVPVVSNQVQHSLVDMRPQQRMAELCQHTGVKLITYGTVMGGLLSEKFLDTNIAIPFAGPAINTPSLQKYKRMVDAWGGWSLFQGLLRTLKQVASKHGVSIATVAVKYILDQPAVAGSMVGVRLGLAEHIQDTNAIFSLVLDEDDVNSIREATAKGKDLLKVIGDCGDEYRRA

SEQ ID NO: 54284 - protein, 320 aa, Glycine max
  peptide (1)..(320): Ceres Seq. ID no. 14307815
MWQTSGGWGRIDRDDAVEAMLRYADAGLTTFDMADHYGPAEDLYGIFINRVRRERPAELLEQVRGLTKWVPPPVKMTSSYVRDSINVSRKRMDVESLDMLQFHWWDYSNPGYLDALKHLTDLKEEGKIKTVALTNFDTERLQIILENEVPVVSNQVQHSLVDMRPQQRMAELCQHTGVKLITYGTVMGGLLSEKFLDTNIAIPFAGPAINTPSLQKYKRMVDAWGGWSLFQGLLRTLKQVASKHGVSIATVAVKYILDQPAVAGSMVGVRLGLAEHIQDTNAIFSLVLDEDDVNSIREATAKGKDLLKVIGDCGDEYRRA

SEQ ID NO: 54285 - protein, 301 aa, Glycine max
  peptide (1)..(301): Ceres Seq. ID no. 14307816
MLRYADAGLTTFDMADHYGPAEDLYGIFINRVRRERPAELLEQVRGLTKWVPPPVKMTSSYVRDSINVSRKRMDVESLDMLQFHWWDYSNPGYLDALKHLTDLKEEGKIKTVALTNFDTERLQIILENEVPVVSNQVQHSLVDMRPQQRMAELCQHTGVKLITYGTVMGGLLSEKFLDTNIAIPFAGPAINTPSLQKYKRMVDAWGGWSLFQGLLRTLKQVASKHGVSIATVAVKYILDQPAVAGSMVGVRLGLAEHIQDTNAIFSLVLDEDDVNSIREATAKGKDLLKVIGDCGDEYRRA

SEQ ID NO: 54286 - DNA, 1265 bp, Glycine max
  misc_feature (1)..(1265): Ceres Seq. ID no. 14303939
actagaaatgctgctttcttcttcttcttctcgcggttatcttcactaacaacttctctctctctctccgtctgtgcattttccattgttgaagaaggagaaaggtcttgaggtgtggggtcggtgatggacggtggagtgaactacaaccctcgcactgtggaagaggttttccgggacttcaagggtcgtagagccggcatgatcaaggctctcaccactgatgttgaagaatttttccagcagtgcgatcctgaaaaggataacctttgtttatacgggttccctaatgagcaatgggaagttaatttacctgcggaagaagttcctccggagcttcctgagcctgcattgggcataaactttgctagggatgggatgcaggataaggactggctgtctttggttgccgttcacagtgatgcatggttacttgcagtggctttctactttggggcacgatttggttttgataaagctgacaggaaacgcctgttcactatgattaatgatttaccaacaatattcgagattgtgactggaagtgcaaaaaaacagactaaggaaaagtcatccatttcaaaccactccagcaacaaatcaaaatctggttcaaaagggcgaggatctgaatcagggaagtattcaaagcaaacaaaggacgaggaggaagaggtaccggatgaagaagatgacgaggagcatggggaaactttgtgtggggcatgtggagagaactatgcgtctgatgagttctggatttgttgtgacatatgtgagaagtggttccatggcaagtgtgtgaagatcactccagccagagccgagcacatcaagcagtataagtgcccctcatgcagcaataagagagcacggccttgatatagttgagagtgggacagttctcaccccttgtaactaaatcatgttggacttctaacttgttagtggcttaggattcctgtgccatgccatgatgggcatatgtattcagtactttgggtcttgtgaacttcttagtggatatatttttttttaatatttatagtttgcaggttctggatatgtctccaatcttcatcctgactggtatacttatatttgtagcatatgatagtgcacgtgtgcacacatacatgtatgtttgaacatatgtcgtatttgctagcatgacgcattggattgatcagatttatggtctacccaatgtagcagtgtggcatctgtgttagctttggaagaacggcagagttggcttaaggtgt

SEQ ID NO: 54287 - protein, 251 aa, Glycine max
  peptide (1)..(251): Ceres Seq. ID no. 14303940
MDGGVNYNPRTVEEVFRDFKGRRAGMIKALTTDVEEFFQQCDPEKDNLCLYGFPNEQWEVNLPAEEVPPELPEPALGINFARDGMQDKDWLSLVAVHSDAWLLAVAFYFGARFGFDKADRKRLFTMINDLPTIFEIVTGSAKKQTKEKSSISNHSSNKSKSGSKGRGSESGKYSKQTKDEEEEVPDEEDDEEHGETLCGACGENYASDEFWICCDICEKWFHGKCVKITPARAEHIKQYKCPSCSNKRARP

SEQ ID NO: 54288 - protein, 226 aa, Glycine max
  peptide (1)..(226): Ceres Seq. ID no. 14303941
MIKALTTDVEEFFQQCDPEKDNLCLYGFPNEQWEVNLPAEEVPPELPEPALGINFARDGMQDKDWLSLVAVHSDAWLLAVAFYFGARFGFDKADRKRLFTMINDLPTIFEIVTGSAKKQTKEKSSISNHSSNKSKSGSKGRGSESGKYSKQTKDEEEEVPDEEDDEEHGETLCGACGENYASDEFWICCDICEKWFHGKCVKITPARAEHIKQYKCPSCSNKRARP

SEQ ID NO: 54289 - protein, 167 aa, Glycine max
  peptide (1)..(167): Ceres Seq. ID no. 14303942
MQDKDWLSLVAVHSDAWLLAVAFYFGARFGFDKADRKRLFTMINDLPTIFEIVTGSAKKQTKEKSSISNHSSNKSKSGSKGRGSESGKYSKQTKDEEEEVPDEEDDEEHGETLCGACGENYASDEFWICCDICEKWFHGKCVKITPARAEHIKQYKCPSCSNKRARP

SEQ ID NO: 54290 - DNA, 1137 bp, Glycine max
  misc_feature (1)..(1137): Ceres Seq. ID no. 14310890
aaatttatttttaaatataattttacaataattttttttaaggtatattagtactaaaaaaaatttgggatcttttttttttgaacctaaagccgttgtttgggccttaagccagcctgtcgctgaacatataagctattaacgaatgtcacacaataataatagagatcaaaaataaaattttaactttttgcgggatgaaaattacaagtaaaattataaggaaaaaaaaatcaaaattactaattttatagaaattaaaaatatatttaagtcaaattataaagatacacccacttttattacaatctcaaagcttttttacctaagaatataatgtcaaagaagatgaattcataattaatttgtaaactacagattaagtcgtcaccgtgtacgtgttttggtaaaattagcatgtactttatcacatttgtatgtttctatttgttgtattgttttgcagtgttagaggaacgatcgataggtacaagaaagcatgtgctgcctccacaaatccagaatctgtctctgaagctaatacacagttttatcagcaggaagcgtccaaattaaaacgacaaatcagagacattcagaatctaaacaggcacatccttggtgaagctcttagctctctgagtctgaaggaattaaagaacctggagagtagactggagaaaggtttaagcagagttagatccagaaagcatgaaactttgtttgccgatatcgagttcatgcaaaagcgggaaatagagctgcaaaaccataataattttctgagagctaagatagctgaacacgagaaagcacaacaacggcaacaggatatgataccgggaaatgtgtgcgagtcaaccatacctccacaatcatatgaccgcaatttcttccctgttaatctcatagattccaataatcaatattcaaatcaagaccagactgctcttcaacttgtcctttcaagtggtgtgggatcccttacatcgtcctatgtttcgtgaaggagagtgcccttagaaactcctctgctaaagttcttacaacggagaacaagagaaaaactaatcagcatttgtaccaatacatcatttgatattgtttatgtatctttcaatatatatagtttctatt

SEQ ID NO: 54291 - protein, 189 aa, Glycine max
  peptide (1)..(189): Ceres Seq. ID no. 14310891
MFLFVVLFCSVRGTIDRYKKACAASTNPESVSEANTQFYQQEASKLKRQIRDIQNLNRHILGEALSSLSLKELKNLESRLEKGLSRVRSRKHETLFADIEFMQKREIELQNHNNFLRAKIAEHEKAQQRQQDMIPGNVCESTIPPQSYDRNFFPVNLIDSNNQYSNQDQTALQLVLSSGVGSLTSSYVS

SEQ ID NO: 54292 - DNA, 726 bp, Glycine max
  misc_feature (1)..(726): Ceres Seq. ID no. 15174662
gaaagtgctgcagatttgtgcgttaagaaagaaagaaaaaaaaaaaaagtcatggcagcgagtgacggttgcagcagcttcttaacattgtcgtgtgcaggtgcagtgcaaaatcaacatgtatcacaccctacaacgtttttgggagttcctaaaaacaatcagagaaaaaggaaaacaccgcacaggttagttgtggttgcggtgactcaaggctctgctgaatcaagcaagtccgatgaaaaaatcccttcgtgggccaaaccggactccgatgaacctccgccgtgggcccgggacgagcccaacaacaacagttcgcaacaagaaggatttgagatcccgttctatgcttatttgtttgcctctgctatcactgctattgccgctataggctccattttcgaatatgtgaatcaaaagcctgttttcggagtattaagctctgacagcgtgttttatgctcccttgcttggtttttttgtcttcaccggcattccctcatcggcttttctgtggttcaagtccgttcaagctgctaacaaggaagcggaggaacaagataagagggatggctatttgtagggtgtgagtggttctgagttgaacacgcttcctttgttttattgatgtaagttatatgagtaaattgcacataatgcctattgtatgtcacactttaaatttaatgtgaatattcatgctttgtatgaaatcagagattag

SEQ ID NO: 54293 - protein, 194 aa, Glycine max
  peptide (1)..(194): Ceres Seq. ID no. 15174663
ESAADLCVKKERKKKKVMAASDGCSSFLTLSCAGAVQNQHVSHPTTFLGVPKNNQRKRKTPHRLVVVAVTQGSAESSKSDEKIPSWAKPDSDEPPPWARDEPNNNSSQQEGFEIPFYAYLFASAITAIAAIGSIFEYVNQKPVFGVLSSDSVFYAPLLGFFVFTGIPSSAFLWFKSVQAANKEAEEQDKRDGYL

SEQ ID NO: 54294 - protein, 177 aa, Glycine max
  peptide (1)..(177): Ceres Seq. ID no. 15174664
MAASDGCSSFLTLSCAGAVQNQHVSHPTTFLGVPKNNQRKRKTPHRLVVVAVTQGSAESSKSDEKIPSWAKPDSDEPPPWARDEPNNNSSQQEGFEIPFYAYLFASAITAIAAIGSIFEYVNQKPVFGVLSSDSVFYAPLLGFFVFTGIPSSAFLWFKSVQAANKEAEEQDKRDGYL

SEQ ID NO: 54295 - DNA, 1308 bp, Glycine max
  misc_feature (1)..(1308): Ceres Seq. ID no. 15176465
atagggctggaccccacaaaacagtttttagttcacatagcaactggagcagaagttgaaaaagatcttcgaattcagaagagcatgctccctgcagttggccagatagaaataagagctgatctaatggacgcccacttgtatgcattcaaaagatcagttctacaagaagttctagatcagaagagtgcatttcatagcttaaagcatgatgtattgccatatctagtccggagccaactgaagtattattaaatggtatgccacaagcagaagaaaacggaactgaaaaggttatttctcaaagcaatcaacaaatgctatctcaaatactcgctaatgcatctgaaccaatctttcatctacgaaatgcactgggtcctcatggttctacttctgatcgaagaacccacaaatgttgtgtgtatattgctggaagcagcaagtactgtgctcgcttaaattctatacaagcatacagtgacataaaccgagatgtgacaggagaggctagtcacttatcagggtattccttctctgctcaaaacaacattatccatccttctgcagagcttggggcaaaaacaactgttggaccacattgtatactgggggaaggttcacagatgggtgacaaatgcagtgtgaaacgatctgtcattggccgtcattgtcggataggtcccaatgttaaggttgtcaattcagtagttatgaatcatgttactattggagaatcttgttcaatccaaggttctattatctccagcaatgtacagctccaagaacgtgccatcctaaaagattgccaagttggagcaggttttgtggtcactgctggtagtgagtgcaagggggaggtcttggctaagaaatgaatctggaatgtgaaaatggaggctggggaaatacatagcaaaatgacttctattctgcttgatcattgcttggagcaaattttgtgctttttgctgtcagcagttacaatttggtgatgttagcagaaggagcaactaagaaattctaatacttccaatttatatgcatgccctttgcagtttcttgcaatttgtttgaaaatggctgcaatcggtgttgaatattcatttgtgtaaatgactaccaattgcttccctttcatcacaattttctgccatatgttacaagggactttcggttggtatcttgctgctgtgctaaagcggtataatccagcgccatcagttttgtattcgagcaaatgtagtactattggcgtatctcgtttgggctttttgtttgagatctagtgataataatgtttacttg

SEQ ID NO: 54296 - protein, 205 aa, Glycine max
  peptide (1)..(205): Ceres Seq. ID no. 15176466
MPQAEENGTEKVISQSNQQMLSQILANASEPIFHLRNALGPHGSTSDRRTHKCCVYIAGSSKYCARLNSIQAYSDINRDVTGEASHLSGYSFSAQNNIIHPSAELGAKTTVGPHCILGEGSQMGDKCSVKRSVIGRHCRIGPNVKVVNSVVMNHVTIGESCSIQGSIISSNVQLQERAILKDCQVGAGFVVTAGSECKGEVLAKK

SEQ ID NO: 54297 - protein, 186 aa, Glycine max
  peptide (1)..(186): Ceres Seq. ID no. 15176467
MLSQILANASEPIFHLRNALGPHGSTSDRRTHKCCVYIAGSSKYCARLNSIQAYSDINRDVTGEASHLSGYSFSAQNNIIHPSAELGAKTTVGPHCILGEGSQMGDKCSVKRSVIGRHCRIGPNVKVVNSVVMNHVTIGESCSIQGSIISSNVQLQERAILKDCQVGAGFVVTAGSECKGEVLAKK

SEQ ID NO: 54298 - DNA, 1246 bp, Glycine max
  misc_feature (1)..(1246): Ceres Seq. ID no. 14307265
ttctctgttctctctcatctcatcggatcgatcaagcatcagggagctttgagggttgattctctggtgtagtagcaatcagcacaatagaaaatgttttttgacggatatggatatcatgggacatcatttgagcagatatatcgatgctacccagcttcctttattgaaaagccccaaatcgaaagtggtgacaaaattatcatgcctccatcagcccttgaccgtctagcatctctgcatattgattacccaatgttgtttgaactccgtaatgatgctgccgagcgggtttctcattgtggggttctggagttcattgctgaggaaggcatgatatacatgccatactggatgatggagaacatgcttttacaagagggggacattgtcaaagtgaaaaatgtgacacttccaaaggggacatatgttaagttacagccccacacaaaagactttttggatatttccaatccaaaagctatcttagaaacaacattgaggaatttttcctgcttgactactggagatagcattatggtggcttacaacaacaagaaatattacatagatattatagaaactaagcctgacactgccataagcataattgagactgactgtgaggtggactttgctcctcccttggattacaaggaacctgaaaaacccactgcacccctttctgctgggaaggcagcagtggctgctgaggtgatccctgctgaagatgagcccaagttcaacccattttctggaactgggagacgcttggatggaaaacctttgaattatcagcctcctccagtttcctcttcagggtctaaggaccagaaacctgatgttgtcaatttgcagtcttctacagcttctagttcacaaagtaatgctcgtcaatctcagggcaagcttgtgtttgggtcaaatgctaaccgtactaaagagacaggaaaggcgaaagagtcaaaaccagagccacctaaagagaaagaagagccgaaatttcaacctttttcagggaagaagtattctttacggggttaaattaaaatggccttttacttttaaagcaagttactttgttgatctatgcatggatcgatgtctattgcaaaaacttttatttatttattgtattataagcagtagatagaccagtagatgccacagaaaatacctttgattacttgtgaacgaagctcttgacgagggttgcaatcgtgtctgaatggtaacatgctgtgtg

SEQ ID NO: 54299 - protein, 316 aa, Glycine max
  peptide (1)..(316): Ceres Seq. ID no. 14307266
MFFDGYGYHGTSFEQIYRCYPASFIEKPQIESGDKIIMPPSALDRLASLHIDYPMLFELRNDAAERVSHCGVLEFIAEEGMIYMPYWMMENMLLQEGDIVKVKNVTLPKGTYVKLQPHTKDFLDISNPKAILETTLRNFSCLTTGDSIMVAYNNKKYYIDIIETKPDTAISIIETDCEVDFAPPLDYKEPEKPTAPLSAGKAAVAAEVIPAEDEPKFNPFSGTGRRLDGKPLNYQPPPVSSSGSKDQKPDVVNLQSSTASSSQSNARQSQGKLVFGSNANRTKETGKAKESKPEPPKEKEEPKFQPFSGKKYSLRG

SEQ ID NO: 54300 - protein, 279 aa, Glycine max
  peptide (1)..(279): Ceres Seq. ID no. 14307267
MPPSALDRLASLHIDYPMLFELRNDAAERVSHCGVLEFIAEEGMIYMPYWMMENMLLQEGDIVKVKNVTLPKGTYVKLQPHTKDFLDISNPKAILETTLRNFSCLTTGDSIMVAYNNKKYYIDIIETKPDTAISIIETDCEVDFAPPLDYKEPEKPTAPLSAGKAAVAAEVIPAEDEPKFNPFSGTGRRLDGKPLNYQPPPVSSSGSKDQKPDVVNLQSSTASSSQSNARQSQGKLVFGSNANRTKETGKAKESKPEPPKEKEEPKFQPFSGKKYSLRG

SEQ ID NO: 54301 - protein, 262 aa, Glycine max
  peptide (1)..(262): Ceres Seq. ID no. 14307268
MLFELRNDAAERVSHCGVLEFIAEEGMIYMPYWMMENMLLQEGDIVKVKNVTLPKGTYVKLQPHTKDFLDISNPKAILETTLRNFSCLTTGDSIMVAYNNKKYYIDIIETKPDTAISIIETDCEVDFAPPLDYKEPEKPTAPLSAGKAAVAAEVIPAEDEPKFNPFSGTGRRLDGKPLNYQPPPVSSSGSKDQKPDVVNLQSSTASSSQSNARQSQGKLVFGSNANRTKETGKAKESKPEPPKEKEEPKFQPFSGKKYSLRG

SEQ ID NO: 54302 - DNA, 1382 bp, Glycine max
  misc_feature (1)..(1382): Ceres Seq. ID no. 14307273
gggtgatcttttggagttgtaggagcccttacaccttgcagagtcatctcaacattcccaagggctcctactacgcaataacgccaagctcgatctcaaattaatatatcatttattcctcttaatcaaatattaaataagaaaagatgggagagatgtcaaacttccaattgggtgtgattggtgcactatttctctcggttgcttcttctgtctccattgtcatctgcaacaaagccttgatgagcaatcttggcttccctttcgccacaacgcttactagttggcatttgatggtcacattttgcacccttcatgcggctcaacgcttgaatctatttgtgtccaaatccgttgacttgaaaacggtcatgctttttggtattctaaatggcatttccattggatttctcaacttgagtcttggctttaattccattggattctaccagatgacaaaacttgcgatcataccattcactgtattattagaaactattttcttaaagaagcagttcagctcgaaaataaaattctctttatccctattacttgtgggagttggcattgcttctatcacagaccttcagctcaattttgtgggaaccattctttcccttctggcaatcataacgacatgtgttggccaaatcctgaccaacacaatacagaagaagcttaacgtctcttccacacagctgctctaccagtctgctccattccaagcagcaattctttttgtttcaggccctcttgtggatcagatgctcaccaagcaaaatgtctttgcctacaaatattctcctgtggtcttggcattcatcatcttgtcttgcttgatagctgtttctgtgaacttcagcacatttctggtcataggcaaaacatctcctgtaacatatcaagtgctaggccacctcaagacatgccttgttctaggatttggctacacattactgcatgaccctttcaccggaaggaacattcttggaatactaattgccgtttttgggatgggtttatactcttatttctgcactgaggagaacaaaaagaaacagttagctagtgatctcccactggcctctcaggtcaaagacaaagatagcttaccacttttggccgggaaaaacgtgggtaatcaaaacgaggaaaatcatgagactaagaaattaagcaaggattctgttatttgaaaggacaggctccatgtctttttaagatttcgtatattttgggtttctttcaatttctaggaaactagtaatgagtgtaaatcaaatttgtttaataagttttctgtaactttaagtcggtgcatttcatttacctaccatatattcattaaactgcaggaggaaattcaaatttcataaaattgc

SEQ ID NO: 54303 - protein, 349 aa, Glycine max
  peptide (1)..(349): Ceres Seq. ID no. 14307274
MGEMSNFQLGVIGALFLSVASSVSIVICNKALMSNLGFPFATTLTSWHLMVTFCTLHAAQRLNLFVSKSVDLKTVMLFGILNGISIGFLNLSLGFNSIGFYQMTKLAIIPFTVLLETIFLKKQFSSKIKFSLSLLLVGVGIASITDLQLNFVGTILSLLAIITTCVGQILTNTIQKKLNVSSTQLLYQSAPFQAAILFVSGPLVDQMLTKQNVFAYKYSPVVLAFIILSCLIAVSVNFSTFLVIGKTSPVTYQVLGHLKTCLVLGFGYTLLHDPFTGRNILGILIAVFGMGLYSYFCTEENKKKQLASDLPLASQVKDKDSLPLLAGKNVGNQNEENHETKKLSKDSVI

SEQ ID NO: 54304 - protein, 346 aa, Glycine max
  peptide (1)..(346): Ceres Seq. ID no. 14307275
MSNFQLGVIGALFLSVASSVSIVICNKALMSNLGFPFATTLTSWHLMVTFCTLHAAQRLNLFVSKSVDLKTVMLFGILNGISIGFLNLSLGFNSIGFYQMTKLAIIPFTVLLETIFLKKQFSSKIKFSLSLLLVGVGIASITDLQLNFVGTILSLLAIITTCVGQILTNTIQKKLNVSSTQLLYQSAPFQAAILFVSGPLVDQMLTKQNVFAYKYSPVVLAFIILSCLIAVSVNFSTFLVIGKTSPVTYQVLGHLKTCLVLGFGYTLLHDPFTGRNILGILIAVFGMGLYSYFCTEENKKKQLASDLPLASQVKDKDSLPLLAGKNVGNQNEENHETKKLSKDSVI

SEQ ID NO: 54305 - protein, 317 aa, Glycine max
  peptide (1)..(317): Ceres Seq. ID no. 14307276
MSNLGFPFATTLTSWHLMVTFCTLHAAQRLNLFVSKSVDLKTVMLFGILNGISIGFLNLSLGFNSIGFYQMTKLAIIPFTVLLETIFLKKQFSSKIKFSLSLLLVGVGIASITDLQLNFVGTILSLLAIITTCVGQILTNTIQKKLNVSSTQLLYQSAPFQAAILFVSGPLVDQMLTKQNVFAYKYSPVVLAFIILSCLIAVSVNFSTFLVIGKTSPVTYQVLGHLKTCLVLGFGYTLLHDPFTGRNILGILIAVFGMGLYSYFCTEENKKKQLASDLPLASQVKDKDSLPLLAGKNVGNQNEENHETKKLSKDSVI

SEQ ID NO: 54306 - DNA, 1813 bp, Glycine max
  misc_feature (1)..(1813): Ceres Seq. ID no. 15171943
caatctttcaattttgttctgtttctggttgatttttctgtgtcaatatatgacacataatcacgcatcgctcaatatgcaccaccagcttaatccttcaagggtcgctagctatctaagtgttgtaaaaaactagctttgtcccaatgtggattatgctgaattatatcctgttggcacccacttggattatcaagctttcataactcaagcattggaagggaataacaagctatagtacactcagaaaaaacgatgagtcccatgaccatgatcacgaccacgatgtttctttagacatgtcaaagttcgatacctgctaaggttgccttgatttctgtgaagattctcgtatatacgtgtttaccctccatattatattaacatttggacagtgattccctgtggctactagttagagtgtgtctggttggtgagatttggcttgtgtgttgagttctgaccaccgattttgatggagctgaaatcgttctcttcttgttctgtgtccacatctgaggttgcccatgttggaagatcctactccactttgatctccagtttcagacacaaagttggagttagattttctacccacttccagtgtcgcagagggttgtttctgacgacttattgtgcctcggataacacttatttgacagataaagcagtcattagttcagttggtcaagataattttgcagcagaaacgagttcccatcgaattaatggaacaaatggctcaatttcaagattctattccacaaatctgaaattacttgatgcctttgatgatgaatatgggggagttgttgttcatccagataggttaccatccaacccatatacctttgcatctgtgttgcgtttgtctctttctcagtggaaaaagatgggaaagaagggaatttggcttaagttgcctttagaccaatctgaccttgttccaattgctgtgaaggaaggcttccaataccaccatgcagagccaggatatgtgatgttaacatactggattcctgaaggacctagcatgcttccagcgaatgcatcacatcaagttggagttgggggatttgtcatcaatgacaacaatgaagtgcttgtagtacaagagaggcattgttctccaacaactcttggtctttggaagataccaactggattcattcttgaggctgaggagatatatacaggagctgtaagagaagtgaaggaggaaactgggatcgatacagagttcgttgaagtcatagcattcaggcatgcacataatgtggcctttgagaagtcagatttgttcttcatctgtattctaagacccctgtcatctaagatcattgttgatgatcttgaaattgcagcagcgaagtggatgcccctggttgactttgtagagcaaccactcatccaagaagactccatgttcaagaaaatcgtagatatcttcattgctcgtctcgggaagcgatattgtggcttgtcaactcatcaagtagtttcaaagtttgatggcatggtgtcttccttatactacaatgtcattgacaatgcggataacaactgtgttggaaaatgaagactcgaacacgcacaactcttcttggcttctcaaatgtcagcaacaagttgaaaactgggctaaccactatactgcagatatccaatcggatatgtaaacattcaaatgacaatttattcctatagttataatgtatataaatatctctgataacaatgttcctgtggaacatgtttgatcatcacagttgttccacatttactaatgattcttgcaaacagaacattaacc

SEQ ID NO: 54307 - protein, 367 aa, Glycine max
  peptide (1)..(367): Ceres Seq. ID no. 15171944
MELKSFSSCSVSTSEVAHVGRSYSTLISSFRHKVGVRFSTHFQCRRGLFLTTYCASDNTYLTDKAVISSVGQDNFAAETSSHRINGTNGSISRFYSTNLKLLDAFDDEYGGVVVHPDRLPSNPYTFASVLRLSLSQWKKMGKKGIWLKLPLDQSDLVPIAVKEGFQYHHAEPGYVMLTYWIPEGPSMLPANASHQVGVGGFVINDNNEVLVVQERHCSPTTLGLWKIPTGFILEAEEIYTGAVREVKEETGIDTEFVEVIAFRHAHNVAFEKSDLFFICILRPLSSKIIVDDLEIAAAKWMPLVDFVEQPLIQEDSMFKKIVDIFIARLGKRYCGLSTHQVVSKFDGMVSSLYYNVIDNADNNCVGK

SEQ ID NO: 54308 - protein, 228 aa, Glycine max
  peptide (1)..(228): Ceres Seq. ID no. 15171945
MGKKGIWLKLPLDQSDLVPIAVKEGFQYHHAEPGYVMLTYWIPEGPSMLPANASHQVGVGGFVINDNNEVLVVQERHCSPTTLGLWKIPTGFILEAEEIYTGAVREVKEETGIDTEFVEVIAFRHAHNVAFEKSDLFFICILRPLSSKIIVDDLEIAAAKWMPLVDFVEQPLIQEDSMFKKIVDIFIARLGKRYCGLSTHQVVSKFDGMVSSLYYNVIDNADNNCVGK

SEQ ID NO: 54309 - protein, 192 aa, Glycine max
  peptide (1)..(192): Ceres Seq. ID no. 15171946
MLTYWIPEGPSMLPANASHQVGVGGFVINDNNEVLVVQERHCSPTTLGLWKIPTGFILEAEEIYTGAVREVKEETGIDTEFVEVIAFRHAHNVAFEKSDLFFICILRPLSSKIIVDDLEIAAAKWMPLVDFVEQPLIQEDSMFKKIVDIFIARLGKRYCGLSTHQVVSKFDGMVSSLYYNVIDNADNNCVGK

SEQ ID NO: 54310 - DNA, 1159 bp, Glycine max
  misc_feature (1)..(1159): Ceres Seq. ID no. 14307698
agtcacacaagaagcccaacaagccagatcagaattccatgaaagcaagaggcagaagctggagcgacagccgtggtgccgtggaagtggcgagtcatggaggcagagttggtcagtgcaaagttgtgcgaagcgaagccaggctacgcagacaagcaggccgagggcgaaggcggtcgggtgccacagatggaggcgctgggacagggtggtgaggtgaagaggacggggtcgagagcagctacagtgcgtgcatctgtcccctcctttgttttttcaccaagcctacctaaaatctatcaaattattcagggtaagatagccgaatacatctacctctggttaattttattttttttttaacatgcaagtactttattcagctgattgggtcttcttttacttccgttcctcaattgtattcattggctgatcgccatgcatctagaaggtgatgtcctgaagcatctatcaacatggattatagaccgaattatcaacaagtatggtgttagccagtgttaccgtgctctaaaactatgcaatagtgatctcaaagaaccataaatatccaacatagtggtggactttggcattttgtgtttctgttatgactttcctttgaatattttgttaattttctaattaatctttccttaccagcactgtcagagtgtgattcattatagaaaatttgattgaagatctcaatgatggcaattctttacatatgtatagttgttcagctcctgctttctgaaactatacaggaaatttgattgaagatatgattgatggcgattctagaaaagtgtttgctccatcagattcacataaaaagaaattgcacaactgcatcatggctgtccagtatatgaaggaagctccggttctgatatctgattcagatgcagtcagagtttcagcagaatatattcttaatggcgacaaggaactaattcttgcatttctatggaatatgttcattcatatgcaggttaatctacacatgtcgttcagtatctcattactcatgttgaagttttatactgttttatttcacctttcgtttgtactgaagaggtggactaatggactgactttgtatttttcactcactgcataggcagcattacagtagagatatgttgtacttctc

SEQ ID NO: 54311 - protein, 112 aa, Glycine max
  peptide (1)..(112): Ceres Seq. ID no. 14307699
MIDGDSRKVFAPSDSHKKKLHNCIMAVQYMKEAPVLISDSDAVRVSAEYILNGDKELILAFLWNMFIHMQVNLHMSFSISLLMLKFYTVLFHLSFVLKRWTNGLTLYFSLTA

SEQ ID NO: 54312 - protein, 88 aa, Glycine max
  peptide (1)..(88): Ceres Seq. ID no. 14307700
MEAELVSAKLCEAKPGYADKQAEGEGGRVPQMEALGQGGEVKRTGSRAATVRASVPSFVFSPSLPKIYQIIQGKIAEYIYLWLILFFF

SEQ ID NO: 54313 - protein, 88 aa, Glycine max
  peptide (1)..(88): Ceres Seq. ID no. 14307701
MAVQYMKEAPVLISDSDAVRVSAEYILNGDKELILAFLWNMFIHMQVNLHMSFSISLLMLKFYTVLFHLSFVLKRWTNGLTLYFSLTA

SEQ ID NO: 54314 - DNA, 1350 bp, Glycine max
  misc_feature (1)..(1350): Ceres Seq. ID no. 14307206
tttatttttctttcttctcttcctctgcccttcttggcttggttcttctgttttaagcagctttctcttgttgatcattaatcatgtccgatatttaagacatagggttattgctatggcagtcgtacctgttgagagtattgcctcattgaatagtgatctcctctatgacatattacgacgccttgatggccctacgttggctagtgcagcttgcacttgtgcatcattttcttccatctcaaaagaagagagtttatgggaaaatgtatgttcttctgtgtggccttcaaccaatagggaagatgtcaaaagtttaatatcttctaccggtggattcagaaaattctatgcagattgttttcctcttattataaacaaggaggtaggagagtatcaattgagcagctatcttgagtaccctgatgattggactgaggccaaatattatggggacatgattgaatttgaaagcatctctccatcagattttgtttccattgtggatatcaggtttaaggagaaaccaatctgctccaaagttctatgcggaattccaaacgcaaatggctatgatgagtggttctacaactgtccttttcggattgatcttctgagttgtgcggatagagatgataacaatgatggtgtggttaccctttctgtatctgatggattgccaccaataacatccatggaaagggaaaagaaagatgggaaactatggcaggagcttcgtgatggtctcttgcttagttggatcatagtaaacaagaaaataaagcaatctgctaatcttgcaagttggatctccttagatggacaaagacattggccaacagataaggatttcgtctttcgtttcggatctgttctctctgccaaggacatttttccttctcaagtagtgcagtgcatccttattatgaagtttagagtggttcacactgaagaagagggggttcaaacaactcttaaaacaacagagttgagtatgcagttggaagacatggaaggtgctcatgttaatgggaggaacagtttgcttattcttaaggaagcacttagctgccgaaggagcaaaaactatagtgaagtacttgaatcctgtcttattttctcaaaagtgcaaaataagttgaaagaggagaagattaaaaacgaaagtaggttggacacactttgtatattaagtggcattgttgctgtaatgacattctggtactatgttttctgatatggtatggcgttgttcgttttactggaataagctaatgttgatctagcagatgatcaaatttggcactccccttctgtaacataagattcctaataaagtaactaattgat

SEQ ID NO: 54315 - protein, 411 aa, Glycine max
  peptide (1)..(411): Ceres Seq. ID no. 14307207
LFFFLLFLCPSWLGSSVLSSFLLLIINHVRYLRHRVIAMAVVPVESIASLNSDLLYDILRRLDGPTLASAACTCASFSSISKEESLWENVCSSVWPSTNREDVKSLISSTGGFRKFYADCFPLIINKEVGEYQLSSYLEYPDDWTEAKYYGDMIEFESISPSDFVSIVDIRFKEKPICSKVLCGIPNANGYDEWFYNCPFRIDLLSCADRDDNNDGVVTLSVSDGLPPITSMEREKKDGKLWQELRDGLLLSWIIVNKKIKQSANLASWISLDGQRHWPTDKDFVFRFGSVLSAKDIFPSQVVQCILIMKFRVVHTEEEGVQTTLKTTELSMQLEDMEGAHVNGRNSLLILKEALSCRRSKNYSEVLESCLIFSKVQNKLKEEKIKNESRLDTLCILSGIVAVMTFWYYVF

SEQ ID NO: 54316 - protein, 373 aa, Glycine max
  peptide (1)..(373): Ceres Seq. ID no. 14307208
MAVVPVESIASLNSDLLYDILRRLDGPTLASAACTCASFSSISKEESLWENVCSSVWPSTNREDVKSLISSTGGFRKFYADCFPLIINKEVGEYQLSSYLEYPDDWTEAKYYGDMIEFESISPSDFVSIVDIRFKEKPICSKVLCGIPNANGYDEWFYNCPFRIDLLSCADRDDNNDGVVTLSVSDGLPPITSMEREKKDGKLWQELRDGLLLSWIIVNKKIKQSANLASWISLDGQRHWPTDKDFVFRFGSVLSAKDIFPSQVVQCILIMKFRVVHTEEEGVQTTLKTTELSMQLEDMEGAHVNGRNSLLILKEALSCRRSKNYSEVLESCLIFSKVQNKLKEEKIKNESRLDTLCILSGIVAVMTFWYYVF

SEQ ID NO: 54317 - protein, 259 aa, Glycine max
  peptide (1)..(259): Ceres Seq. ID no. 14307209
MIEFESISPSDFVSIVDIRFKEKPICSKVLCGIPNANGYDEWFYNCPFRIDLLSCADRDDNNDGVVTLSVSDGLPPITSMEREKKDGKLWQELRDGLLLSWIIVNKKIKQSANLASWISLDGQRHWPTDKDFVFRFGSVLSAKDIFPSQVVQCILIMKFRVVHTEEEGVQTTLKTTELSMQLEDMEGAHVNGRNSLLILKEALSCRRSKNYSEVLESCLIFSKVQNKLKEEKIKNESRLDTLCILSGIVAVMTFWYYVF

SEQ ID NO: 54318 - DNA, 1356 bp, Glycine max
  misc_feature (1)..(1356): Ceres Seq. ID no. 14307288
gattgatcaatcaaagagagagagagagagggaatgggagatcaagtggagggaacggtgcagaacgttctggaacaggagactctgaagtggatcttcgttggtggcaaaggcggcgtcggcaaaacgacatgcagttcaatcctctccattctcctcgccaccgttcgctcctccgtcctcatcatctccaccgaccccgcccacaacctcagcgacgccttccagcagcgtttcaccaaaacccccactctcgtcaatggcttttccaacctctacgccatggaggtggatcctactgttgagcatgaggacatgggtggcgctgatgggatggactccttgttctccgagctcgccggcgcgattcccgggattgatgaggccatgagctttgctgagatgttgaaattggtgcagacaatggattattctgttattgtatttgatactgctcccactggccatacactcagactattgcaattcccatcggttttagaaaagggtcttgcaaaagtgatgtctttgaaaaataaatttggtggtttgtttaatcagatgacccgcatgtttggcatgggtgatgattttggagatgatcaaattcttgggaggcttgaaggcatgaaggatgtaattgaacaagttaataagcaattcaaagatccggacatgacaacctttgtctgtgtgtgcattcctgaattcctttctctatatgaaacagaaagattggttcaggagcttacaaagtttgaaattgacacccacaatatcatcatcaatcaagtaatctttgatgatgaagatgttgaatccaagttacttaaagcaagaatgaaaatgcaacagaaatatctggaccagttttacatgttgtatgatgactttaacattaccaagctgccactgctcccagaagaggttactggggttgaagctctgaaagcattttcaagacattttacatcaccatatcaagccttatgcagtaaaggagatccagtagaacggttggagagtaaagtatcagcattacagcgccagttacacgaggctgaagaagagttggagagactcaaaagtggcaattaggtttgatggtatccattcatgaataatgtcattgtatgcctttttggttcacattattttttagcttaaatttgataaagcatctttttctttgttgggctgccaacacaagtcattccctatatgctttttatttaattattgtcacagtgagctttcttataaccccccaaaaaatattgctgaggttagtctaatttgtttcatgaatattctttacttgtatctttcatattatgagtagaatagtttcttatc

SEQ ID NO: 54319 - protein, 354 aa, Glycine max
  peptide (1)..(354): Ceres Seq. ID no. 14307289
MGDQVEGTVQNVLEQETLKWIFVGGKGGVGKTTCSSILSILLATVRSSVLIISTDPAHNLSDAFQQRFTKTPTLVNGFSNLYAMEVDPTVEHEDMGGADGMDSLFSELAGAIPGIDEAMSFAEMLKLVQTMDYSVIVFDTAPTGHTLRLLQFPSVLEKGLAKVMSLKNKFGGLFNQMTRMFGMGDDFGDDQILGRLEGMKDVIEQVNKQFKDPDMTTFVCVCIPEFLSLYETERLVQELTKFEIDTHNIIINQVIFDDEDVESKLLKARMKMQQKYLDQFYMLYDDFNITKLPLLPEEVTGVEALKAFSRHFTSPYQALCSKGDPVERLESKVSALQRQLHEAEEELERLKSGN

SEQ ID NO: 54320 - protein, 271 aa, Glycine max
  peptide (1)..(271): Ceres Seq. ID no. 14307290
MEVDPTVEHEDMGGADGMDSLFSELAGAIPGIDEAMSFAEMLKLVQTMDYSVIVFDTAPTGHTLRLLQFPSVLEKGLAKVMSLKNKFGGLFNQMTRMFGMGDDFGDDQILGRLEGMKDVIEQVNKQFKDPDMTTFVCVCIPEFLSLYETERLVQELTKFEIDTHNIIINQVIFDDEDVESKLLKARMKMQQKYLDQFYMLYDDFNITKLPLLPEEVTGVEALKAFSRHFTSPYQALCSKGDPVERLESKVSALQRQLHEAEEELERLKSGN

SEQ ID NO: 54321 - protein, 260 aa, Glycine max
  peptide (1)..(260): Ceres Seq. ID no. 14307291
MGGADGMDSLFSELAGAIPGIDEAMSFAEMLKLVQTMDYSVIVFDTAPTGHTLRLLQFPSVLEKGLAKVMSLKNKFGGLFNQMTRMFGMGDDFGDDQILGRLEGMKDVIEQVNKQFKDPDMTTFVCVCIPEFLSLYETERLVQELTKFEIDTHNIIINQVIFDDEDVESKLLKARMKMQQKYLDQFYMLYDDFNITKLPLLPEEVTGVEALKAFSRHFTSPYQALCSKGDPVERLESKVSALQRQLHEAEEELERLKSGN

SEQ ID NO: 54322 - DNA, 2166 bp, Glycine max
  misc_feature (1)..(2166): Ceres Seq. ID no. 14307069
atgccagtcttttagacctcaacctgaagaaagtgatcaaaaaacttttccagacacaaaatcgttggaccctgcattatcttctatggctgcacctaatgctaaacttccccaaagcctcgacagaaatgaaaatgatgataaagaacaaactgaaaatattacaaataatctggatgcatccagatatgttgaggcaaacacagatcagtgcagaaaaatgaagacacatacacacgaactttcaagatcaggggatgctttgctgactgatgctgaaattgatgaccatcttgaacaaaatgccaatgggagatcagaacaagtgattggcaagttagagactgtcgggagtatggttaatacagagctgactgattttgaagatgcacctaaattttcatcacttgaaccttcattgttttgcaatcctcagccaaatgctgaaggctccttgacatctggttatgataagttccatggtggtgataaaggccaatctggatctgagaaatgtgcagaggactcactagaaaacaatgaagttgttcaatcaagccactgccgtaacctcaaaatgaaagcgcctgtgaaatcaaccaagttagttattaaaaagaaacaaatttcaccagacactgaaggttcttgcaaactgaagattgttagttctaaggcagattcaactggtgctagaggtattgtaatatctggaagttcctcctttatggggcctaatctagtcacagaagtaccagaaggtgaagatgacagaaaatttagttctccacagctactgcattcatattctgacaagagaagttatgatcatgtccataaaagggacaagtcatataaaggtaaagtcaatcaagatggttttgaatcttttgattgtgatacggaagaacatacttctgttttcagcaatccacatggtttaggaattggtttgtttgatgttacaagtgatcctatgcgtcaaacacgatctataaggatgaagacaacttctgaggagccaagcacttcaaacagaagaattaaaattcgacagggtcaaagctccaggggcaaacctgaagagggtgtcaatgattctggtacttcaactcgaagggtgtcaaatcaccatgtcaaaaaattgtcatggctgatgttgtcagagcttgaagagggttaccgatatattcctcaacttggtgatgaagttgtgtactttagacagggccatcaagagtacatagagtcatattcattatctgaatcaggtccatggagactatttgtaggactaggtgcttctgaaatttgcaaggttgaagaacttgagtatgcggagctaccaggctctggggatagctgttgtaaacttaaacttagatttgtggatccttcttcgtgtgtgcatggcaaatcatttaaattaactctacctgaattgattaacttcactgactttgttattgagaaaacatggtatgatactgccatgaagagaaattggtcttcaagagataaatgcatggtctggtggagaaatgaagatgggaaaggtggaagttggtgggatggtcggattattcaagtgcaggccaagtctgatgacttccctaacagtccctgggaaaggtatcgggtccagtacaagactgatccaagcgagaatcatctgcatagtccgtgggaactatatgatcctgagatgctgtgggagcatccccacattgatcatgagatcagagataagctgctttcctatttcatcaaattagaccacaggcagaggtttgatatccaagcattgaaccaagtagctgagaggttagagtttgcaaacaggtttcctgccccattctatcctgaactaattcaatcaagattgaagaatgactactatcggagtgtggaaggtgtgaagcatgatataatggtaatgttatcaaatgctgaagaatactttaaaattacaaaaaatgctcagctggtgagcaagatcaggagaatatcagaatggtttagaaggaaacttgaaaggatatagaaagctcaaattgggttttataggcttcttctaacattgttttgcattctttaatccaattttggagaattagttggtgtttaagttggttttataaaatgaaaaaggtcataggtggtggc

SEQ ID NO: 54323 - protein, 680 aa, Glycine max
  peptide (1)..(680): Ceres Seq. ID no. 14307070
CQSFRPQPEESDQKTFPDTKSLDPALSSMAAPNAKLPQSLDRNENDDKEQTENITNNLDASRYVEANTDQCRKMKTHTHELSRSGDALLTDAEIDDHLEQNANGRSEQVIGKLETVGSMVNTELTDFEDAPKFSSLEPSLFCNPQPNAEGSLTSGYDKFHGGDKGQSGSEKCAEDSLENNEVVQSSHCRNLKMKAPVKSTKLVIKKKQISPDTEGSCKLKIVSSKADSTGARGIVISGSSSFMGPNLVTEVPEGEDDRKFSSPQLLHSYSDKRSYDHVHKRDKSYKGKVNQDGFESFDCDTEEHTSVFSNPHGLGIGLFDVTSDPMRQTRSIRMKTTSEEPSTSNRRIKIRQGQSSRGKPEEGVNDSGTSTRRVSNHHVKKLSWLMLSELEEGYRYIPQLGDEVVYFRQGHQEYIESYSLSESGPWRLFVGLGASEICKVEELEYAELPGSGDSCCKLKLRFVDPSSCVHGKSFKLTLPELINFTDFVIEKTWYDTAMKRNWSSRDKCMVWWRNEDGKGGSWWDGRIIQVQAKSDDFPNSPWERYRVQYKTDPSENHLHSPWELYDPEMLWEHPHIDHEIRDKLLSYFIKLDHRQRFDIQALNQVAERLEFANRFPAPFYPELIQSRLKNDYYRSVEGVKHDIMVMLSNAEEYFKITKNAQLVSKIRRISEWFRRKLERI

SEQ ID NO: 54324 - protein, 652 aa, Glycine max
  peptide (1)..(652): Ceres Seq. ID no. 14307071
MAAPNAKLPQSLDRNENDDKEQTENITNNLDASRYVEANTDQCRKMKTHTHELSRSGDALLTDAEIDDHLEQNANGRSEQVIGKLETVGSMVNTELTDFEDAPKFSSLEPSLFCNPQPNAEGSLTSGYDKFHGGDKGQSGSEKCAEDSLENNEVVQSSHCRNLKMKAPVKSTKLVIKKKQISPDTEGSCKLKIVSSKADSTGARGIVISGSSSFMGPNLVTEVPEGEDDRKFSSPQLLHSYSDKRSYDHVHKRDKSYKGKVNQDGFESFDCDTEEHTSVFSNPHGLGIGLFDVTSDPMRQTRSIRMKTTSEEPSTSNRRIKIRQGQSSRGKPEEGVNDSGTSTRRVSNHHVKKLSWLMLSELEEGYRYIPQLGDEVVYFRQGHQEYIESYSLSESGPWRLFVGLGASEICKVEELEYAELPGSGDSCCKLKLRFVDPSSCVHGKSFKLTLPELINFTDFVIEKTWYDTAMKRNWSSRDKCMVWWRNEDGKGGSWWDGRIIQVQAKSDDFPNSPWERYRVQYKTDPSENHLHSPWELYDPEMLWEHPHIDHEIRDKLLSYFIKLDHRQRFDIQALNQVAERLEFANRFPAPFYPELIQSRLKNDYYRSVEGVKHDIMVMLSNAEEYFKITKNAQLVSKIRRISEWFRRKLERI

SEQ ID NO: 54325 - protein, 607 aa, Glycine max
  peptide (1)..(607): Ceres Seq. ID no. 14307072
MKTHTHELSRSGDALLTDAEIDDHLEQNANGRSEQVIGKLETVGSMVNTELTDFEDAPKFSSLEPSLFCNPQPNAEGSLTSGYDKFHGGDKGQSGSEKCAEDSLENNEVVQSSHCRNLKMKAPVKSTKLVIKKKQISPDTEGSCKLKIVSSKADSTGARGIVISGSSSFMGPNLVTEVPEGEDDRKFSSPQLLHSYSDKRSYDHVHKRDKSYKGKVNQDGFESFDCDTEEHTSVFSNPHGLGIGLFDVTSDPMRQTRSIRMKTTSEEPSTSNRRIKIRQGQSSRGKPEEGVNDSGTSTRRVSNHHVKKLSWLMLSELEEGYRYIPQLGDEVVYFRQGHQEYIESYSLSESGPWRLFVGLGASEICKVEELEYAELPGSGDSCCKLKLRFVDPSSCVHGKSFKLTLPELINFTDFVIEKTWYDTAMKRNWSSRDKCMVWWRNEDGKGGSWWDGRIIQVQAKSDDFPNSPWERYRVQYKTDPSENHLHSPWELYDPEMLWEHPHIDHEIRDKLLSYFIKLDHRQRFDIQALNQVAERLEFANRFPAPFYPELIQSRLKNDYYRSVEGVKHDIMVMLSNAEEYFKITKNAQLVSKIRRISEWFRRKLERI

SEQ ID NO: 54326 - DNA, 1629 bp, Glycine max
  misc_feature (1)..(1629): Ceres Seq. ID no. 15170885
attaaatgccactcttattttgcctgttttgaagcaggaccagatttggaaggaccaaacgaaatttgaagacatttttgatgtggatcacttcattgactacctgaagtatgatgttcgtattgtccgtgatatcccagaatggtttaccgataaatcagagctatttactagcataagacggactgtaaaaaacattcccaaatatgcaccagcacaattttacatcgataatgttctgccccgagtcaaggagaagaagattatggctctgaaaccctttgttgacaggctgggatatgacaatgttcctcctgaaatcaacaagttgagatgcagagttaattatcatgcactgaaatttcttcctgatatagagcagatggctaattcacttgcatcaagaatgagaaaccgaactggcagttcaaatccttacatggctctgcatcttagatttgagaaaggaatggtgggactatcattctgtgattttgtggggacaagagaggagaaagccaaaatggcggagtatagaaaaaaggagtggcctcgacggtacaagaatggttcccatctgtggcaattagctctgcagaagcgaaaggaaggacggtgtcctctagagcctggagaagtggctgttattcttcgggccatgggctatccaaaggaaactcaaatttacgtagcttctggacaggtgtatggtggacagaaccggatggctccgctaaggaatatgttccctaatctggttaccaaggaggagttggcaactaaagaggagttagatggtttcagaaagcatgtgacaagcctggcagctcttgacttcttggtgtgcttgaagtcagatgtattcgtgatgacccatggaggcaactttgctaagctgatcattggagcacgtagatacatgggtcaccgtctaaaatcaattaagcctgacaaagggctaatgtccaagtcttttggggatccatatatgggttgggctccttttgtagaagatgttgttgttactcaccagacacggacgggattgccagaagagactttccctaactacgacctctgggagaaccctctgacaccctgcatgtgtagagcctgattacagcaattttatcgataacaatgggactttactcaagatgcatttgggagaaatatgccatctaagttatgaattctatctatctacagggtaaacgacggaatctgggctcctgccaatgcaagctttgaggtaggaggggcagtaaatagaaatttgaagcagtgatattggcttgaagggaatgagattggactgttggttatcactttaatgaacagatttcctattctgagtattctctttgccgagaccaggtggattttgtcttttcgtctaacttgtagcaattccccgccctcttttcttcttccaggaaaaaaaattgatcaattttttgtaccaagaaagatgtgcaaatcattaatgaatttcatgttgctattataggaggatttggctccttaaaagtgcagagtgtaattgaagatgcattagaaattgtgataaaacagatgcccatgtaaaataagttataaaattattaatattttaacttttgattttcc

SEQ ID NO: 54327 - protein, 371 aa, Glycine max
  peptide (1)..(371): Ceres Seq. ID no. 15170886
LNATLILPVLKQDQIWKDQTKFEDIFDVDHFIDYLKYDVRIVRDIPEWFTDKSELFTSIRRTVKNIPKYAPAQFYIDNVLPRVKEKKIMALKPFVDRLGYDNVPPEINKLRCRVNYHALKFLPDIEQMANSLASRMRNRTGSSNPYMALHLRFEKGMVGLSFCDFVGTREEKAKMAEYRKKEWPRRYKNGSHLWQLALQKRKEGRCPLEPGEVAVILRAMGYPKETQIYVASGQVYGGQNRMAPLRNMFPNLVTKEELATKEELDGFRKHVTSLAALDFLVCLKSDVFVMTHGGNFAKLIIGARRYMGHRLKSIKPDKGLMSKSFGDPYMGWAPFVEDVVVTHQTRTGLPEETFPNYDLWENPLTPCMCRA

SEQ ID NO: 54328 - protein, 283 aa, Glycine max
  peptide (1)..(283): Ceres Seq. ID no. 15170887
MALKPFVDRLGYDNVPPEINKLRCRVNYHALKFLPDIEQMANSLASRMRNRTGSSNPYMALHLRFEKGMVGLSFCDFVGTREEKAKMAEYRKKEWPRRYKNGSHLWQLALQKRKEGRCPLEPGEVAVILRAMGYPKETQIYVASGQVYGGQNRMAPLRNMFPNLVTKEELATKEELDGFRKHVTSLAALDFLVCLKSDVFVMTHGGNFAKLIIGARRYMGHRLKSIKPDKGLMSKSFGDPYMGWAPFVEDVVVTHQTRTGLPEETFPNYDLWENPLTPCMCRA

SEQ ID NO: 54329 - protein, 244 aa, Glycine max
  peptide (1)..(244): Ceres Seq. ID no. 15170888
MANSLASRMRNRTGSSNPYMALHLRFEKGMVGLSFCDFVGTREEKAKMAEYRKKEWPRRYKNGSHLWQLALQKRKEGRCPLEPGEVAVILRAMGYPKETQIYVASGQVYGGQNRMAPLRNMFPNLVTKEELATKEELDGFRKHVTSLAALDFLVCLKSDVFVMTHGGNFAKLIIGARRYMGHRLKSIKPDKGLMSKSFGDPYMGWAPFVEDVVVTHQTRTGLPEETFPNYDLWENPLTPCMCRA

SEQ ID NO: 54330 - DNA, 1232 bp, Glycine max
  misc_feature (1)..(1232): Ceres Seq. ID no. 14307202
gattttcgcagcgattcggatagcgaaagcaatcccccacccctaattttgatttgtgtcgaggaaaggacaggtcttggaaccctaaccgcacctctctctttcttcccgtgtgcgtcaaagcgaagcaacgcgacacgatggtgttctacttcaaagcgcgccccgaagccggcgatttcaccatcttcatgggccttgacaagtacgagaacgaggaactcatcaaatacggttttcccgaagacatctggttccatgtcgataaaatgtcttcagcccatgtctatgtcaggttgcacaaaggccagaccatcgatgacatgagtgagggtttactggaagactgtgctcagcttgtcaaagcaaattcaattcaaggaaataaagtgaacaatgtcgatgttgtttacacaccctggtctaatttaaagaaaactgcttcaatggatgttggccaagttggttttcacaactcaaaaatggttcgaactgtaagagttgagaagaggataaatgagattgttaacaggctaaacaagacaaaagtggaaaggaaacctgatttgaaagctgagcgagaagcagttaatgcagctgagagagctgagagaaaacaacaactgagagaaaaaaaacgtcgggaggaattgggaaggcttgaaaaggagaaacaaacagagcttaggagctacaagggtttgatggttgcagaaaatatgacatccaacaaacaaattgcatcaggaagcaaatcattacaggaactggaggaggatttcatgtaatcatttattgggttatggacagatgactggtggtcaacttactacctggcagatttatgtttttgattaaccaaccctactttggattttgaagctgcattatcttggttggttgaggaaaccaagtagtgtgtacacaaattgtgattgagggatgccgggtggggaggtgaatcctgataaggtcaatataccttatctacaactataaccttgcttgagacaatggtttttgttatttaatgttctcacagtcgagtcaaaaactggaatttcgtgctatttttatcgtggtcgtttacgctagtcgggttttgaaatttgtttccctctttgaattggtgttcactgcttgcgaaattattggggacattatgtagtgtttatgctacatgcaatgataatactcttgttgggaacattatgtagtgttccctgtttgga

SEQ ID NO: 54331 - protein, 215 aa, Glycine max
  peptide (1)..(215): Ceres Seq. ID no. 14307203
MVFYFKARPEAGDFTIFMGLDKYENEELIKYGFPEDIWFHVDKMSSAHVYVRLHKGQTIDDMSEGLLEDCAQLVKANSIQGNKVNNVDVVYTPWSNLKKTASMDVGQVGFHNSKMVRTVRVEKRINEIVNRLNKTKVERKPDLKAEREAVNAAERAERKQQLREKKRREELGRLEKEKQTELRSYKGLMVAENMTSNKQIASGSKSLQELEEDFM

SEQ ID NO: 54332 - protein, 198 aa, Glycine max
  peptide (1)..(198): Ceres Seq. ID no. 14307204
MGLDKYENEELIKYGFPEDIWFHVDKMSSAHVYVRLHKGQTIDDMSEGLLEDCAQLVKANSIQGNKVNNVDVVYTPWSNLKKTASMDVGQVGFHNSKMVRTVRVEKRINEIVNRLNKTKVERKPDLKAEREAVNAAERAERKQQLREKKRREELGRLEKEKQTELRSYKGLMVAENMTSNKQIASGSKSLQELEEDFM

SEQ ID NO: 54333 - protein, 172 aa, Glycine max
  peptide (1)..(172): Ceres Seq. ID no. 14307205
MSSAHVYVRLHKGQTIDDMSEGLLEDCAQLVKANSIQGNKVNNVDVVYTPWSNLKKTASMDVGQVGFHNSKMVRTVRVEKRINEIVNRLNKTKVERKPDLKAEREAVNAAERAERKQQLREKKRREELGRLEKEKQTELRSYKGLMVAENMTSNKQIASGSKSLQELEEDFM

SEQ ID NO: 54334 - DNA, 1245 bp, Glycine max
  misc_feature (1)..(1245): Ceres Seq. ID no. 14313644
atcaacaacaatgcaacatcatttgttagtaataattttttatacatctttgtcaaaaaaaactttttttcatacttctccacccatgaaccacttaacacacttctccaatagaaaacacctttactcaaaataaaatttacttggttttaaaaaaccattatgtaaaataaaatttacatttactctaagtaaaagaaaatattcaataatttactcaaaatccctttcactaatgcaaattgctaaaccctaataatccttctctctctctctctctccatgagcacagtaccgtaacgtaacgtaaccacgagatgcctctattctagcacttggaaccccaaatccgtgccaattcctccgctccttttcgcagacgaaggcacattctgacgattggaaggcaagactaaagattccaccacctgatacaagctagaaaacagaggtttgaaatggctgtgtcactgtggagaagtcgcactgcttcatcagcactgaacttgttcaacaatactcttcgctgtttctcttccgaggcaacaaactccagtcctcatagtacacgagagagtatgatgtattctgacataaactcacgaattgggagttgcatgccactgtctgcaatgcgcattggaacaatcattcacaacattgagttgaacccagggcaaggtggcaagctcgtccgagctgctggaactagtgcaaagatcttgaaagagcccacatcggcatactgtttaatccaactgccctcgggtgttaaaaagttgattgattctcgatgtagggccactgttggtgttgtatctaatcctagccatggggatcgcaaacttaggaaggccggacacagccgatggcttggtcgaagaccagttgtccgaggagtggcaatgaatccagtagatcatcctcatggtggaggagagggtaagagcaagagtggtggacgatttgggcgaggatctctcactccttggggcaagccaactaagagtggctacaagactggacccctgaagcgcaaaaggtagtaggataccatattcattatagctgtttctgatgtttccttatgagatgcttgtaagttgtaataattgtggaaactgtcattcctatttaggaaattcattgaactgattaggttcacagccaatttgtggattttatgggttcaaattttattgttgttaaagtaaaatgtttttgaaatgatcacattttcctctg

SEQ ID NO: 54335 - protein, 195 aa, Glycine max
  peptide (1)..(195): Ceres Seq. ID no. 14313645
MAVSLWRSRTASSALNLFNNTLRCFSSEATNSSPHSTRESMMYSDINSRIGSCMPLSAMRIGTIIHNIELNPGQGGKLVRAAGTSAKILKEPTSAYCLIQLPSGVKKLIDSRCRATVGVVSNPSHGDRKLRKAGHSRWLGRRPVVRGVAMNPVDHPHGGGEGKSKSGGRFGRGSLTPWGKPTKSGYKTGPLKRKR

SEQ ID NO: 54336 - protein, 155 aa, Glycine max
  peptide (1)..(155): Ceres Seq. ID no. 14313646
MMYSDINSRIGSCMPLSAMRIGTIIHNIELNPGQGGKLVRAAGTSAKILKEPTSAYCLIQLPSGVKKLIDSRCRATVGVVSNPSHGDRKLRKAGHSRWLGRRPVVRGVAMNPVDHPHGGGEGKSKSGGRFGRGSLTPWGKPTKSGYKTGPLKRKR

SEQ ID NO: 54337 - protein, 154 aa, Glycine max
  peptide (1)..(154): Ceres Seq. ID no. 14313647
MYSDINSRIGSCMPLSAMRIGTIIHNIELNPGQGGKLVRAAGTSAKILKEPTSAYCLIQLPSGVKKLIDSRCRATVGVVSNPSHGDRKLRKAGHSRWLGRRPVVRGVAMNPVDHPHGGGEGKSKSGGRFGRGSLTPWGKPTKSGYKTGPLKRKR

SEQ ID NO: 54338 - DNA, 1317 bp, Glycine max
  misc_feature (1)..(1317): Ceres Seq. ID no. 14310907
aagcaaactcataaattctcctacaccgacaaaaaatggaactttcaccacaagaattcattttccgttccccactccccgatattcccatccccacacacctcccattgtactcttactgcttccaaaagttgtcacagttccatgaccgtccatgcctcatcgacggcgacaccagcgaaaccctcacctacgccgacgtcgatctctccgctcgccgcatctccgccggcctccacaaaatcggcatctgccagggtgacgtcatcatgctcgtcctccgcaactgcccgcagttcgcactcgccttcctgggcgccactcaccgcggcgccgtcgtcaccaccgccaaccccttctacactccggcggagctcgcgaagcaagcgatggccacgaaaaccaggctggtcataacgcaatccgcgtaccttgagaaaatcaagagtttcgcggacgacagcgatgtcatggtgatgtgcattgatgacgattattcttctgaaaacgatggcgttttgcatttctcaacgctcaccaacgccgacgaaagggaagcccctgccgttaagattaaccctgacgacctcgttgcgcttccgttttcttctggcacgtctgggctccccaagggggttatgttatcgcatgaaaacttggttaccacgatatcgcagttagttgacggcgaaaacccgcaccagtacacgcacagcgaggatgtgttactctgtgtgctgcctatgtttcacatctatgcgctcaattctattttgctctgcgggattcgatctggtgcggctgtacttattgtgcaaaagtttgagatcactactctgtttgagctcatcgagaagtacaaggtgacggttgcgtcgtttgttcctcccatcgttttggcgttggttaagagcggagagactcatcgctacgacctgtcgtctattcgcgctgtggtcaccggtgcggcaccgttgggaggggaactccaagaagccgttaaggctaggctaccacacgctacttttggacaggtttcattttcattattatttttaaaaattaattagtttataaaaaggacattttcatttttcaagatttaacttctaattttacaaagtgacatggcaaattttgattggtttataacaagtcagattttagcgacctaagctgcagtaacagtcgcagtcgcagtttcttcacacgcttcttcacgatataataactacaaaacacttaatttctattcataaaattaaggaaaatgttttatcaacacccattaacctatttaacatcgagaaagagaat

SEQ ID NO: 54339 - protein, 344 aa, Glycine max
  peptide (1)..(344): Ceres Seq. ID no. 14310908
MELSPQEFIFRSPLPDIPIPTHLPLYSYCFQKLSQFHDRPCLIDGDTSETLTYADVDLSARRISAGLHKIGICQGDVIMLVLRNCPQFALAFLGATHRGAVVTTANPFYTPAELAKQAMATKTRLVITQSAYLEKIKSFADDSDVMVMCIDDDYSSENDGVLHFSTLTNADEREAPAVKINPDDLVALPFSSGTSGLPKGVMLSHENLVTTISQLVDGENPHQYTHSEDVLLCVLPMFHIYALNSILLCGIRSGAAVLIVQKFEITTLFELIEKYKVTVASFVPPIVLALVKSGETHRYDLSSIRAVVTGAAPLGGELQEAVKARLPHATFGQVSFSLLFLKIN

SEQ ID NO: 54340 - protein, 266 aa, Glycine max
  peptide (1)..(266): Ceres Seq. ID no. 14310909
MLVLRNCPQFALAFLGATHRGAVVTTANPFYTPAELAKQAMATKTRLVITQSAYLEKIKSFADDSDVMVMCIDDDYSSENDGVLHFSTLTNADEREAPAVKINPDDLVALPFSSGTSGLPKGVMLSHENLVTTISQLVDGENPHQYTHSEDVLLCVLPMFHIYALNSILLCGIRSGAAVLIVQKFEITTLFELIEKYKVTVASFVPPIVLALVKSGETHRYDLSSIRAVVTGAAPLGGELQEAVKARLPHATFGQVSFSLLFLKIN

SEQ ID NO: 54341 - protein, 226 aa, Glycine max
  peptide (1)..(226): Ceres Seq. ID no. 14310910
MATKTRLVITQSAYLEKIKSFADDSDVMVMCIDDDYSSENDGVLHFSTLTNADEREAPAVKINPDDLVALPFSSGTSGLPKGVMLSHENLVTTISQLVDGENPHQYTHSEDVLLCVLPMFHIYALNSILLCGIRSGAAVLIVQKFEITTLFELIEKYKVTVASFVPPIVLALVKSGETHRYDLSSIRAVVTGAAPLGGELQEAVKARLPHATFGQVSFSLLFLKIN

SEQ ID NO: 54342 - DNA, 1383 bp, Glycine max
  misc_feature (1)..(1383): Ceres Seq. ID no. 13595688
gaaacacgcgaatggctgctactgctccttggttttttagttgttgtgttgttgtcttcaactccacacagttccctcacttctcttccctttgaccattcaaccttcctcgcctttgcctccgtttccgtgactgagatggctggaggtgttattcagcagatattgaggaggaaactccaccctcggtttactaactctcccttgttgtcacccatcgtagcaaaaaaagatgatgctggctctactggcagtcagtccttaagagcacttgcattaattggagctggtttgtcaggtcttttcagtttttcaacaatggcagcagctgatgaagctgaacatggcctggcatgtccaagctatccatggcctcacaagggaattcttagttcatatgatcacgcttcgattcgtcgtggtcatcaagtttatacagaagtctgtgcttcctgccattctatgtctttgatatcgtatcgtgatttggttggtgttgcttatacagaagaagaggtaaaggctatggcagctgagattgaggtggttgatggccctaacgatgagggtgagatgtttacacgccctggtaaactcagtgatcgttttcctcagccatatgcaaatgaagcagctgctaggtttgctaatggaggagcttatcctccagatctaagtcttgttaccaaagcccgtcacaatggtcagaactatgtttttgcccttctgactggttatcgtgacccacctgctggtgtttcgataagagagggacttcattataatccttactttcctggtggagcaattgccatgcctaaaatgcttaatgatggtgctgtggaatatgaagatggtactcctgctacagaagctcagatggggaaggatgttgtgtcattcttaacttgggccgccgaacccgagatggaagagagaaaactgatgggatttaaatggatatttgtactgtcattggcactacttcaggctgcctattaccgccgcttgaggtggtcagttctaaagtctcgcaagctggttcttgatgttgtcaactagctctgcctcgagtttcattttcacttgaacaaagtttactgttggcaataatttgtcagatgattaagttgtttcatcatttcaaattctttcagctaagttaatgtttaatggaacaacaactagaagagtgttataattttgtttgagataaaaaaaaatgttccatgcacgagatgcgtttaatttttctcatcacccatctcggacttgtgtattgttgcattttccgagagctgttcctgtttcataaactattgaattttgtggaacttgtcgttattattcaagaaaaataatagataaatatgctcacgttgg

SEQ ID NO: 54343 - protein, 353 aa, Glycine max
  peptide (1)..(353): Ceres Seq. ID no. 13595689
ETREWLLLLLGFLVVVLLSSTPHSSLTSLPFDHSTFLAFASVSVTEMAGGVIQQILRRKLHPRFTNSPLLSPIVAKKDDAGSTGSQSLRALALIGAGLSGLFSFSTMAAADEAEHGLACPSYPWPHKGILSSYDHASIRRGHQVYTEVCASCHSMSLISYRDLVGVAYTEEEVKAMAAEIEVVDGPNDEGEMFTRPGKLSDRFPQPYANEAAARFANGGAYPPDLSLVTKARHNGQNYVFALLTGYRDPPAGVSIREGLHYNPYFPGGAIAMPKMLNDGAVEYEDGTPATEAQMGKDVVSFLTWAAEPEMEERKLMGFKWIFVLSLALLQAAYYRRLRWSVLKSRKLVLDVVN

SEQ ID NO: 54344 - protein, 307 aa, Glycine max
  peptide (1)..(307): Ceres Seq. ID no. 13595690
MAGGVIQQILRRKLHPRFTNSPLLSPIVAKKDDAGSTGSQSLRALALIGAGLSGLFSFSTMAAADEAEHGLACPSYPWPHKGILSSYDHASIRRGHQVYTEVCASCHSMSLISYRDLVGVAYTEEEVKAMAAEIEVVDGPNDEGEMFTRPGKLSDRFPQPYANEAAARFANGGAYPPDLSLVTKARHNGQNYVFALLTGYRDPPAGVSIREGLHYNPYFPGGAIAMPKMLNDGAVEYEDGTPATEAQMGKDVVSFLTWAAEPEMEERKLMGFKWIFVLSLALLQAAYYRRLRWSVLKSRKLVLDVVN

SEQ ID NO: 54345 - protein, 247 aa, Glycine max
  peptide (1)..(247): Ceres Seq. ID no. 13595691
MAAADEAEHGLACPSYPWPHKGILSSYDHASIRRGHQVYTEVCASCHSMSLISYRDLVGVAYTEEEVKAMAAEIEVVDGPNDEGEMFTRPGKLSDRFPQPYANEAAARFANGGAYPPDLSLVTKARHNGQNYVFALLTGYRDPPAGVSIREGLHYNPYFPGGAIAMPKMLNDGAVEYEDGTPATEAQMGKDVVSFLTWAAEPEMEERKLMGFKWIFVLSLALLQAAYYRRLRWSVLKSRKLVLDVVN

SEQ ID NO: 54346 - DNA, 1248 bp, Glycine max
  misc_feature (1)..(1248): Ceres Seq. ID no. 14314164
actctcatcttttcagtttatctgtttctcaatcgttagatctcatcttatactcaccggcgagtccatctcgcgccagcgtcgacgccgctccggcaaccgctccggccaccgcctttggttccctcactttctcgtccttcttcttctcagaaatatgccttctcagaaagttgaaacgggtcatcaagacacggtccatgatgttgcaatggattactatggtaagaggctggccacggcttcatcagatcacacaattaagataattggggtgagtaatacggcctctcagcatctcgcaacattgactggtcaccaaggacctgtttggcaagtggcgtgggctcaccctaagtttggttctctacttgcatcgtgttcctatgatggtcgtgtcattgtttggaaggagggcaaccaaaatgaatggactcaagctcatgtgtttgatgaccacaagtcatctgtgaattcggttgcttgggcgcctcacgagttgggtctttgcttggcttgtggctcgtctgatgggaatatatctgttctgactgcaagagcagacggtggctgggacactgtgagaattgatcaggctcatccagttggtgtcacttcggtgtcatgggcgccatcgatggcacccggagcccttgtcggtgcagggttgcttgatccagtacagaagctgtgctctggtggttgtgataatactgtgaaggtatggaagctaaacaatggactctggaagatggactgcttccctgctcttcagatgcacacggattgggttcgagatgttgcttgggcacccaatttagggctccctaaatctaccattgctagcgcatcacaggacggtaaagtgattatatggaccgtggcgaaagagggggatcagtgggaaggcaaggttttgaatgatttcaacacccctgtttggagggtctcatggtcattgacaggaaacatattggctgtggctgatgggaacaacaatgtgacattgtggaaggaagcagttgatggggaatggcaacaggtgacaacagtggagccttagaatttgatattttttttttgaaaatggttagaattttcgttttgaaatatatagttgacgacatcttgtttctttgcatactatacagttgattaattgtgcttcataatgcactaagttccttgacgtttgtgatccattgagtattccgtgattggaagaatgaagttaattagtttgagttg

SEQ ID NO: 54347 - protein, 353 aa, Glycine max
  peptide (1)..(353): Ceres Seq. ID no. 14314165
LSSFQFICFSIVRSHLILTGESISRQRRRRSGNRSGHRLWFPHFLVLLLLRNMPSQKVETGHQDTVHDVAMDYYGKRLATASSDHTIKIIGVSNTASQHLATLTGHQGPVWQVAWAHPKFGSLLASCSYDGRVIVWKEGNQNEWTQAHVFDDHKSSVNSVAWAPHELGLCLACGSSDGNISVLTARADGGWDTVRIDQAHPVGVTSVSWAPSMAPGALVGAGLLDPVQKLCSGGCDNTVKVWKLNNGLWKMDCFPALQMHTDWVRDVAWAPNLGLPKSTIASASQDGKVIIWTVAKEGDQWEGKVLNDFNTPVWRVSWSLTGNILAVADGNNNVTLWKEAVDGEWQQVTTVEP

SEQ ID NO: 54348 - protein, 301 aa, Glycine max
  peptide (1)..(301): Ceres Seq. ID no. 14314166
MPSQKVETGHQDTVHDVAMDYYGKRLATASSDHTIKIIGVSNTASQHLATLTGHQGPVWQVAWAHPKFGSLLASCSYDGRVIVWKEGNQNEWTQAHVFDDHKSSVNSVAWAPHELGLCLACGSSDGNISVLTARADGGWDTVRIDQAHPVGVTSVSWAPSMAPGALVGAGLLDPVQKLCSGGCDNTVKVWKLNNGLWKMDCFPALQMHTDWVRDVAWAPNLGLPKSTIASASQDGKVIIWTVAKEGDQWEGKVLNDFNTPVWRVSWSLTGNILAVADGNNNVTLWKEAVDGEWQQVTTVEP

SEQ ID NO: 54349 - protein, 283 aa, Glycine max
  peptide (1)..(283): Ceres Seq. ID no. 14314167
MDYYGKRLATASSDHTIKIIGVSNTASQHLATLTGHQGPVWQVAWAHPKFGSLLASCSYDGRVIVWKEGNQNEWTQAHVFDDHKSSVNSVAWAPHELGLCLACGSSDGNISVLTARADGGWDTVRIDQAHPVGVTSVSWAPSMAPGALVGAGLLDPVQKLCSGGCDNTVKVWKLNNGLWKMDCFPALQMHTDWVRDVAWAPNLGLPKSTIASASQDGKVIIWTVAKEGDQWEGKVLNDFNTPVWRVSWSLTGNILAVADGNNNVTLWKEAVDGEWQQVTTVEP

SEQ ID NO: 54350 - DNA, 1379 bp, Glycine max
  misc_feature (1)..(1379): Ceres Seq. ID no. 14314174
ggaaggatgcttcttcaattccctttccttctttcttagctttgaagaccaactcatttcaacttaacccatcaaaaccatcgctctctattttcgtcctttctacctttctccgatcccaatccctaatctttctctcttcaaactctaattttttcatctggggagatcggctgacgaatcgagaggatctcatcgctcgcaagggattagggtttcaatcgatcgcatcacatatcacaatcatgtttagccggatgttcggtaaacctaaacaggaaaccaatgctgttgccactttggacaagctaaacgagacacttgaaatgctggagaaaaaggagaaagtgctccttaaaaaggtggcagcagaagttgaaaaggccaaagaattcacaagggggaagaacaaaagggcggcaatacaatgtctgaagaggaagaggttatatgaacagcaaatagagcagcttggaaatttccagttgcgtattcatgaccagatgataatgttggaaggtgctaaagccaccacagaaacggtagacgcgttaagaactggagcagctgctatgaaggctatgcaaaaagcaacgaatattgatgatgttgacaagactatggatgagatcaatgaacagactgagaatatgaaacagattcaggatgcattgtctgctccaattggtgcggctgctgattttgacgaggatgaattggaagcagaacttgaagaactggagggtgctgagttggaagaacagcttcttcagccagcaactacagctcctgcggccccagtgcaggtcccagctgggcagcaacctactcgcccagttcccgcaaagcgaactccggaagaagatgaattggcagctttgcaggctgagatggcactttgagcagaattttgcaggcttttttttgtgcatggcttcaatgaagaattgtaaccactattacgtggagaattctgcttctctcctgctcgcttatctttgaaattattgagctgaccagaggatgtatataaaagtggaaaaaaaattatcataaaagtcttcaaaacgtactacttttattttggatgagttcgaacccctcctttccattatacgtatcaagtatattgatgcatttgactatcttatactttatgtggttgagtttaacgtggtcagtttaatcaatgtattatatcttaaacatgcttacagcaaagtataaggaataagaatttggttagcctatgagctagaacacagccatgattaaggtgatgatttttatttgtccataggaggatttacaagctgcactgccactgtgaatgtaaaattttattttctttatattataataatgattaagtaattaag

SEQ ID NO: 54351 - protein, 299 aa, Glycine max
  peptide (1)..(299): Ceres Seq. ID no. 14314175
KDASSIPFPSFLALKTNSFQLNPSKPSLSIFVLSTFLRSQSLIFLSSNSNFFIWGDRLTNREDLIARKGLGFQSIASHITIMFSRMFGKPKQETNAVATLDKLNETLEMLEKKEKVLLKKVAAEVEKAKEFTRGKNKRAAIQCLKRKRLYEQQIEQLGNFQLRIHDQMIMLEGAKATTETVDALRTGAAAMKAMQKATNIDDVDKTMDEINEQTENMKQIQDALSAPIGAAADFDEDELEAELEELEGAELEEQLLQPATTAPAAPVQVPAGQQPTRPVPAKRTPEEDELAALQAEMAL

SEQ ID NO: 54352 - protein, 218 aa, Glycine max
  peptide (1)..(218): Ceres Seq. ID no. 14314176
MFSRMFGKPKQETNAVATLDKLNETLEMLEKKEKVLLKKVAAEVEKAKEFTRGKNKRAAIQCLKRKRLYEQQIEQLGNFQLRIHDQMIMLEGAKATTETVDALRTGAAAMKAMQKATNIDDVDKTMDEINEQTENMKQIQDALSAPIGAAADFDEDELEAELEELEGAELEEQLLQPATTAPAAPVQVPAGQQPTRPVPAKRTPEEDELAALQAEMAL

SEQ ID NO: 54353 - protein, 214 aa, Glycine max
  peptide (1)..(214): Ceres Seq. ID no. 14314177
MFGKPKQETNAVATLDKLNETLEMLEKKEKVLLKKVAAEVEKAKEFTRGKNKRAAIQCLKRKRLYEQQIEQLGNFQLRIHDQMIMLEGAKATTETVDALRTGAAAMKAMQKATNIDDVDKTMDEINEQTENMKQIQDALSAPIGAAADFDEDELEAELEELEGAELEEQLLQPATTAPAAPVQVPAGQQPTRPVPAKRTPEEDELAALQAEMAL

SEQ ID NO: 54354 - DNA, 1982 bp, Glycine max
  misc_feature (1)..(1982): Ceres Seq. ID no. 14313167
atgatttctactctctttactctttagtttttttgttttgtatatattaaggcggcacagcacaggcctaagtgggtgtaagtgagtcttgggagtgagtcactcttcctgcagaacccagatctgtagacaatatgggaagcactggtttgctacatttgatatgccttgtcattgctttagtaagtgtgtcgcttgtgcaagcagaagatgcgtataagtatttcacatggacggtgacttatgggactctttatcccttggctagtccccagcaggttattcttatcaatggtcagtttcctgggcctagacttgacttggtaactaatgaaaatgtaattctcaaccttatcaacaagctggacgaaccatttttactcacttggaacggtattaaacaaaggaagaattcatggcaagatggagttttgggaaccaactgccccattcctccaaactcaaattacacatacaagtttcaggccaaggatcagattggcacatatacatactttccatcaactcaactgcataaagcagctggagggtttggagcactcaatgtttatcacagatctgtcatcccaatcccttatccaaaccctgatggagattttactctactcgttggtgattggtacaagaccaaccacaagacactaaggcaaactttagattctggaaaatctcttgcatttcctgatggcctccttattaatggtcaggctcattctaccttcactggtaaccaggggaaaacctatatgtttaggatctcaaatgtaggcttgtcaacctcaattaacttcagaattcagggtcataccctaaaattagttgaggttgaaggatcacacactgttcagaacctatacgattcacttgatgtgcatgttgggcaatcagttgcagtgttagtaaccttgaatcagcctccaaaggactactacattgttgcctcaacaagatttaccgagacacctctcactacaactgcagtactacactatgcaaactctttttcctctgcattaggacccgtgcctgctccccccgttgataaatatgactttgattggtccatgaagcaagctagaacctacagatggaatctgacagcaaatgctgctaggcctaatccacaagggtcattccattatgggaagattactcctacaaaagtaattaagttggccaattcagcacctttgatcaatggaaagctccgttatgctgttaacagtgtctcatatgttaaccctgacacccctctcaagcttgctgattacttcaacattcccggagtcttcagtgtgaatttactccaaaactctccctcaaacggtccaggatacataggcacctcagtgttgcaaacttctctccatgattttattgaggttattttccagaacaacgaaaacaccatgcaatcttggcatcttgatggttatgatttttgggtcattggtcatggtttcggccagtggacagatgctagcagaaaaacatataatctagtggatgccctgactagacacactgcacaggtgtatccaaaatcctggactactatattggtgtctttggataaccaaggcatgtggaacttgaggtctgcaatatgggaaagacaatatcttgggcaacagttctatcttagagtgtggaatgcacagaaaagccttgctaatgaatatgacattcccaataatgttctgctttgtggcaaagctgttggacatcacccttagtatatatatcggtgtattttctggtcatgagggcttgactacacaactagaattatttttcctttttcttaagaaagaaaaggacaatgtgggagaagtcaatttctccaaatttcggatagacttgcgtatatttgagaaaaaagtcttgtattaatttttcgttgctcgtttatgtattaacaattgagttcatacttaatttatttatagctgtaagttgtg

SEQ ID NO: 54355 - protein, 540 aa, Glycine max
  peptide (1)..(540): Ceres Seq. ID no. 14313168
MGSTGLLHLICLVIALVSVSLVQAEDAYKYFTWTVTYGTLYPLASPQQVILINGQFPGPRLDLVTNENVILNLINKLDEPFLLTWNGIKQRKNSWQDGVLGTNCPIPPNSNYTYKFQAKDQIGTYTYFPSTQLHKAAGGFGALNVYHRSVIPIPYPNPDGDFTLLVGDWYKTNHKTLRQTLDSGKSLAFPDGLLINGQAHSTFTGNQGKTYMFRISNVGLSTSINFRIQGHTLKLVEVEGSHTVQNLYDSLDVHVGQSVAVLVTLNQPPKDYYIVASTRFTETPLTTTAVLHYANSFSSALGPVPAPPVDKYDFDWSMKQARTYRWNLTANAARPNPQGSFHYGKITPTKVIKLANSAPLINGKLRYAVNSVSYVNPDTPLKLADYFNIPGVFSVNLLQNSPSNGPGYIGTSVLQTSLHDFIEVIFQNNENTMQSWHLDGYDFWVIGHGFGQWTDASRKTYNLVDALTRHTAQVYPKSWTTILVSLDNQGMWNLRSAIWERQYLGQQFYLRVWNAQKSLANEYDIPNNVLLCGKAVGHHP

SEQ ID NO: 54356 - protein, 329 aa, Glycine max
  peptide (1)..(329): Ceres Seq. ID no. 14313169
MFRISNVGLSTSINFRIQGHTLKLVEVEGSHTVQNLYDSLDVHVGQSVAVLVTLNQPPKDYYIVASTRFTETPLTTTAVLHYANSFSSALGPVPAPPVDKYDFDWSMKQARTYRWNLTANAARPNPQGSFHYGKITPTKVIKLANSAPLINGKLRYAVNSVSYVNPDTPLKLADYFNIPGVFSVNLLQNSPSNGPGYIGTSVLQTSLHDFIEVIFQNNENTMQSWHLDGYDFWVIGHGFGQWTDASRKTYNLVDALTRHTAQVYPKSWTTILVSLDNQGMWNLRSAIWERQYLGQQFYLRVWNAQKSLANEYDIPNNVLLCGKAVGHHP

SEQ ID NO: 54357 - DNA, 1373 bp, Glycine max
  misc_feature (1)..(1373): Ceres Seq. ID no. 14315388
ggtttatggaatagctggaaagcggagtcagtcacatcgataaaaaaaaagggcgggaaagaaagggtgtgtcaaaattttgagagccactcccagttttgcaccctcccacaaaatcaaaatcttcgttccgtgttttagcaatcggtagagagcgagacacggaatttgaaaattcatccaaaaactctccctctctacgcggcgcgaccctcacttcggcactccgcactgtctcggatcactcgctctctctgttggttctggtcatttctgatgtttatgaatctcacctaatgtgtgaatatgtgactttaaacttgttttgacaactggtctgtaaacaatattccaaaatttgataatactgtagctcataatgctagtaaatgagtgtcatatgcttgtaattttgagccaatatccatctactcaatctcatatgtaatctcaacatgctatttctttcatgtttctgcattattgctttcagagggactcattgcaggtaattgttgctcacatctttgcttcaaagttcactcatttcaatgacatatgataatatgatttgctcattgattgtaagcaatggagaaaacgcccaaacaaggttccgatgcatcactttttccttctactggaattggatcgaggttctccaatttgaacaagtctttcaaatattctctcagatctttgctcacttcatgctcaaaggaggaattttataaagcattttcaagtttctctaacactgaaaaggaattgctccatcgcctatttcttcaggtcattacttcgttgcatgaaaacttagaggatgggtttgagacggtctgtcttcaaacacaggcaggagctactcttgatgctgtggaggaaattgtggaagaacaagatctggatgtcttattttcagataggagtaacataatggatgttgctgagaatctgtctatggcaaagaagaatgaaatccaacacttaaagcatatggttcaattgggagaggaacataatcaaatgttgcgcactcgactgcaactccttagagaaggcaatcaagtgttatctggtgcctcacaagctgttgagaagttcaaaagcatgaatgtaaattatggggcaaacagcggtgatggccatgatgtataacatgtcttgctcattctttcctgcaaattgacgaaggttcattctctggtgaataattcccattgttttatgttgtagcaatgtttcttaagattcttacttcacgagtaagtctaccttagtccttgagattatagggtcatgtattttagaagctaagattttaaaaatcgtgcattagttcctgactttataaaacatactaatttgctttc

SEQ ID NO: 54358 - protein, 188 aa, Glycine max
  peptide (1)..(188): Ceres Seq. ID no. 14315389
MEKTPKQGSDASLFPSTGIGSRFSNLNKSFKYSLRSLLTSCSKEEFYKAFSSFSNTEKELLHRLFLQVITSLHENLEDGFETVCLQTQAGATLDAVEEIVEEQDLDVLFSDRSNIMDVAENLSMAKKNEIQHLKHMVQLGEEHNQMLRTRLQLLREGNQVLSGASQAVEKFKSMNVNYGANSGDGHDV

SEQ ID NO: 54359 - DNA, 1078 bp, Glycine max
  misc_feature (1)..(1078): Ceres Seq. ID no. 15172503
tcaatgcaaaacaattttatcaaaatcaagaaatgtgttggtttcccgaaatgcgactcaaatacccaatatcattgttagactcaccggatttaacgccggccgccaaggattcgatcaatcattttcataattttaaatatgattatccacaagaagtgcttaatacacatccatccataatggtatgctccgtattaaaagaacaatgcaatgctgactcatctctgccaaagcgcttggtcactgttctattggctgctctacgctcaaatggatcgtttggtgtgcatgtgtgcatcaatacaaccgatcgttttatgcatcaattctattcgaagctcggattcaccgaaattttcgaagacaccacaaaagtgtatttaggtcgaaatttctgaaacacaaatttacgttaaacacttttgatttcatcgaattttcatacgtgacaaccgatcgattagcgaaacaaatttcttttttgtttcacggaaattggaaaaaaagtggtttgaagttagatatttgttacttactttgaatccaaacataaaaatattaagagatgatattaatatagataaactattccgttcgtaaaaaaaagtgcccatgacttggaagcagcatacttcaaatggctcatggctaactgagatgtgaatgaatgtcaatacatatctattcaatatttaaataattgtcttcaaccctcttttttcattggtttgttgtattttgtaattgaatggatcgaaaaattgaagataagaaaataaatcgatggaacatttgcaggtaaatatatgaatttttttaaaattaaactgaaaatgcatgttatgtctgcagaatagcacacatagaaaaatatcaataaatctaaatgtgaatttaatgtattcaagcaatccaaaatgaaaaaccacaacaacaacaataagaaaaaaacacacagacttaatattaatccatttttttttctctattttattttatttcaaaacattatttatgtaaatttcatcaacaaaacatgaaataaataaaaaaaagcgattcattggaaatgaac

SEQ ID NO: 54360 - protein, 132 aa, Glycine max
  peptide (1)..(132): Ceres Seq. ID no. 15172504
NAKQFYQNQEMCWFPEMRLKYPISLLDSPDLTPAAKDSINHFHNFKYDYPQEVLNTHPSIMVCSVLKEQCNADSSLPKRLVTVLLAALRSNGSFGVHVCINTTDRFMHQFYSKLGFTEIFEDTTKVYLGRNF

SEQ ID NO: 54361 - protein, 122 aa, Glycine max
  peptide (1)..(122): Ceres Seq. ID no. 15172505
MCWFPEMRLKYPISLLDSPDLTPAAKDSINHFHNFKYDYPQEVLNTHPSIMVCSVLKEQCNADSSLPKRLVTVLLAALRSNGSFGVHVCINTTDRFMHQFYSKLGFTEIFEDTTKVYLGRNF

SEQ ID NO: 54362 - protein, 116 aa, Glycine max
  peptide (1)..(116): Ceres Seq. ID no. 15172506
MRLKYPISLLDSPDLTPAAKDSINHFHNFKYDYPQEVLNTHPSIMVCSVLKEQCNADSSLPKRLVTVLLAALRSNGSFGVHVCINTTDRFMHQFYSKLGFTEIFEDTTKVYLGRNF

SEQ ID NO: 54363 - DNA, 676 bp, Glycine max
  misc_feature (1)..(676): Ceres Seq. ID no. 14314120
ttcattaaatggaaattaccctgcaaaatcattgtcaaattttgcagacattatctctagatgccttcagtctgagccagaatttaggccagcaatgtccgaggtcgtcctatacttgctaaatatgataaggaaggagtctcagcaaactgaatcaaatgaaaaatgagaaaggtagtgacatttgtttgtgaatttatcataatgtgcagagatgagagatccacttgctgaatatcaacttgtagagatgtcatgtcgtctgaggggagcccaattagttgtctccatgcttcattattccctactaacctattcaacattcacatgccaagttctaccaagagttttgtccaatcaaaaacttaagagaatggtagtgaccaacctcatatttgtagtcttatgatatctgataatttcatagtggattaaaatatgccatattaatattgtagatacgtgccaactaacccatttgtttgataattgtttcccaagtcttgatagcaaatgtaattccgttgtggcatccttgtggtttttaggttcatccttcgtaataaaagtttgttgatcatttgtattaaatcacagacaagcattgtaatttattgattgttctttgtacactacaaaaagatgttaggataaaatcattgtattttggtctttg

SEQ ID NO: 54364 - protein, 64 aa, Glycine max
  peptide (1)..(64): Ceres Seq. ID no. 14314121
MRDPLAEYQLVEMSCRLRGAQLVVSMLHYSLLTYSTFTCQVLPRVLSNQKLKRMVVTNLIFVVL

SEQ ID NO: 54365 - protein, 55 aa, Glycine max
  peptide (1)..(55): Ceres Seq. ID no. 14314122
SLNGNYPAKSLSNFADIISRCLQSEPEFRPAMSEVVLYLLNMIRKESQQTESNEK

SEQ ID NO: 54366 - protein, 52 aa, Glycine max
  peptide (1)..(52): Ceres Seq. ID no. 14314123
MSCRLRGAQLVVSMLHYSLLTYSTFTCQVLPRVLSNQKLKRMVVTNLIFVVL

SEQ ID NO: 54367 - DNA, 1409 bp, Glycine max
  misc_feature (1)..(1409): Ceres Seq. ID no. 14307827
ggaaacattcctaaatgctaacctacttttgtttgtttcctctcatgttttcgctttcctttcttcttcttcttcttctgcattgagccttctttctttttctgttttcatggcatcaagcaacaacaacattcaggcaatatctcgcagccgaaaacatcaaaactcagccgtgacgatcgcccttggccgcaggagggggacccacaagaaacactctggtggtggtgatggcaattgcagttccccagttgtgaattcttgggaaggtggttccaagaaaagtgaggtttctgcgaggaagctcgctgctgggttgtggcagatgcagtatattcaagtctcaagggatcatcatgctgctgcttttggacacagctcctttccttcctccatgtcccagctggctaatggaaatgcaaagatcaggtttccccattatgacaaacctggtgaaaagtttcaagagaccaaggatcagctaaagaggccaataaccatcttgcgttcaagaaacggacttcgatctgagcttgaatcttctatgccacatctcaatggttcaaaagaaatggccacagaatggagccctactctcaatgaagcatccaatgagttcatcatgatccatagcaggaagcttctcgaagacaaaaaattagtaggtgaccataactctgttgtctccactttgctagaagaactccttcaagctcaaagatccatcaataaactcaaagcagagcaaaagaccatccagaaaaacgttgaacattttttgcagaatctcaaagatgacaaaatctttttgaagagcaaggaacaccacaagattaaagcaacaataggtgaattaaagggtaagttggaaagggaaagaagaagtagagagaggatggagttacttaacaccaaattggtgcatgaactagctgaagccaacttattaaggaagcagtttatgacaaactgcgagaaagagaagaaagagagagaactaatggaggaaatgtgcgaagaactagccatgcaaataggagaagacaaggctaagcttacagtaatactaagtgagtccaagagaatttgcgaggaagtggaagaagagaggaacatgatgcaaatggctgaactttggcgcgaagaacgcgtgcaaatgaagcttgttgatgcacaatttgttcttgaagacaagtataaccggttggtgcaacttgctgcttctcttgaaaggttcttgatatcaaggggtgctgaacttgacactacggaactagaggatgctgagttgatcaaacaagaagttgaatcattgaatattcaacgtgttatggagctttcttttgatgtctaaaaaacttccaagatatatatagttcacaatattctaggaacatggtatgaacagt

SEQ ID NO: 54368 - protein, 450 aa, Glycine max
  peptide (1)..(450): Ceres Seq. ID no. 14307828
ETFLNANLLLFVSSHVFAFLSSSSSSALSLLSFSVFMASSNNNIQAISRSRKHQNSAVTIALGRRRGTHKKHSGGGDGNCSSPVVNSWEGGSKKSEVSARKLAAGLWQMQYIQVSRDHHAAAFGHSSFPSSMSQLANGNAKIRFPHYDKPGEKFQETKDQLKRPITILRSRNGLRSELESSMPHLNGSKEMATEWSPTLNEASNEFIMIHSRKLLEDKKLVGDHNSVVSTLLEELLQAQRSINKLKAEQKTIQKNVEHFLQNLKDDKIFLKSKEHHKIKATIGELKGKLERERRSRERMELLNTKLVHELAEANLLRKQFMTNCEKEKKERELMEEMCEELAMQIGEDKAKLTVILSESKRICEEVEEERNMMQMAELWREERVQMKLVDAQFVLEDKYNRLVQLAASLERFLISRGAELDTTELEDAELIKQEVESLNIQRVMELSFDV

SEQ ID NO: 54369 - protein, 414 aa, Glycine max
  peptide (1)..(414): Ceres Seq. ID no. 14307829
MASSNNNIQAISRSRKHQNSAVTIALGRRRGTHKKHSGGGDGNCSSPVVNSWEGGSKKSEVSARKLAAGLWQMQYIQVSRDHHAAAFGHSSFPSSMSQLANGNAKIRFPHYDKPGEKFQETKDQLKRPITILRSRNGLRSELESSMPHLNGSKEMATEWSPTLNEASNEFIMIHSRKLLEDKKLVGDHNSVVSTLLEELLQAQRSINKLKAEQKTIQKNVEHFLQNLKDDKIFLKSKEHHKIKATIGELKGKLERERRSRERMELLNTKLVHELAEANLLRKQFMTNCEKEKKERELMEEMCEELAMQIGEDKAKLTVILSESKRICEEVEEERNMMQMAELWREERVQMKLVDAQFVLEDKYNRLVQLAASLERFLISRGAELDTTELEDAELIKQEVESLNIQRVMELSFDV

SEQ ID NO: 54370 - protein, 342 aa, Glycine max
  peptide (1)..(342): Ceres Seq. ID no. 14307830
MQYIQVSRDHHAAAFGHSSFPSSMSQLANGNAKIRFPHYDKPGEKFQETKDQLKRPITILRSRNGLRSELESSMPHLNGSKEMATEWSPTLNEASNEFIMIHSRKLLEDKKLVGDHNSVVSTLLEELLQAQRSINKLKAEQKTIQKNVEHFLQNLKDDKIFLKSKEHHKIKATIGELKGKLERERRSRERMELLNTKLVHELAEANLLRKQFMTNCEKEKKERELMEEMCEELAMQIGEDKAKLTVILSESKRICEEVEEERNMMQMAELWREERVQMKLVDAQFVLEDKYNRLVQLAASLERFLISRGAELDTTELEDAELIKQEVESLNIQRVMELSFDV

SEQ ID NO: 54371 - DNA, 1745 bp, Glycine max
  misc_feature (1)..(1745): Ceres Seq. ID no. 15174535
gccttcatgataagctatctattgaattcatcatgctcttgctggctactatatatggtaccccttttgtatgttatggcttttaatataatcatttacaggtaaacacggcagcagaggttatatatgacctcgtggaccctactgctaatttaatatttggagcagtaatagatccatcactcagtggtcaagtaagttaaactatgtaaatctgtatcattaattatatgaagttgtaaataatatgcagtgattccaccagaaatgaattgcaccacataccccactctcgtgtaatgtgtataactagaagaaggagatatactgccattgttccttaatattaaagtcagtatgatgtaacgggcatgtgataaccattagtaattcatgactgtagaaaagattttacgataagttctctttgcaagtgatagagactagttagcaatcaatttgaatttctaaaatattagtataatcctttcattgttttgggttaatttcgccaagtgaaggatcattagctttaaaaaagtcacccaacacaattgacctcaaatattaattatttagtcctcaaaggaaataactaaatgtcctactttcacattgtggaccacaaaatctgagtactattaggtgaaaagaactaaaattaatatattgcttgtgtataagtgggccaagtttaaactaccatgttaaatacattaaataagaatagtgcttctctttcagtaagaggttagagaataataaagttcaatatatgctttattctcctaacataattgttaatatgttagatgatagtggtagaaaagattaataaatttgggttgttctggacacattaatagtcataatatggaacagaatggacttttattcaagataactatttgcttgaactgtatgtaagactttaattttacaatatgtacataccagtatcattttgctgaatttgagattctgtcctttgcaagtcaatttcttcaactcaaatgctcatttcttattacaagttaatggtagtgatctttctttatttatggtgaacttgtccagtgattatttgtgttgctggcatttgggttgagtgttagtttaattatttggacatataatatgatcattatggtgaaccatgaaatttggtttcatacaggtgagcataacattgattgcaactgggttcaagcgtcaagaggagagccaagggaggcctctgcaggtaaggatcatctcttccaactactctgtttctgtcatgcatatggcatactgtaattctggttttgttctgatcacaggtcagtcaactcactcaagcggatacaacctatggcaccaaccggcggtcttcctctttcgctgatggtggtttgtttgagataccagaattcctaaagaagaaaggaggaggttcacgctatccaagggcgtaatactcttcatcctaatttctttgatcccttgcatttcttcacctttggatatacatagcattggtctagttcttaggtccctgtcttgcccttttttggattttagtcagagtagtgaatacagtttgttcatgaaagttgattactttccactgtccagtcttgtgcgcctaactggaggtattgcagcatggatgcttttcttggcatatttgaataagtttgttagcttgtacagagaatatttcagtaatgctgagagcttgttatagaaaattcattattgtt

SEQ ID NO: 54372 - protein, 76 aa, Glycine max
  peptide (1)..(76): Ceres Seq. ID no. 15174536
MKFGFIQVSITLIATGFKRQEESQGRPLQVRIISSNYSVSVMHMAYCNSGFVLITGQSTHSSGYNLWHQPAVFLFR

SEQ ID NO: 54373 - protein, 53 aa, Glycine max
  peptide (1)..(53): Ceres Seq. ID no. 15174537
MIIMVNHEIWFHTGEHNIDCNWVQASRGEPREASAGKDHLFQLLCFCHAYGIL

SEQ ID NO: 54374 - protein, 50 aa, Glycine max
  peptide (1)..(50): Ceres Seq. ID no. 15174538
MVNHEIWFHTGEHNIDCNWVQASRGEPREASAGKDHLFQLLCFCHAYGIL

SEQ ID NO: 54375 - DNA, 1813 bp, Glycine max
  misc_feature (1)..(1813): Ceres Seq. ID no. 14304867
gtgattctgaaaatctgaaatttcatttctctctgtataaatatcctagtccttatcagcttcactatttcgattgaaatcgccgaagaaggtattgacgtcgatgatgaaaatgaaattggtgaaaacattactgcttctcctttgtgtgaaactcttctgttatgcagtgattggtgctcctcaaacttgtcctgctaacaatgaggataaatgcggcgattcagatgaatggaaaggggagtttttccctgacattcccaaaattaaatatgagggtccgtcaagtaagaatgtgctttcatttaaatggtataatgcagaggaggaaattcttgggaagaagatgaaggattggttaagatttagtgttgcattttggcatacattccgtggaacaggtgctgacccatttggtgcacctaccaaatactggctatgggaagatggtaccaattcattaaacatggctaaaagacgaatgagagctaactttgagttcataagcaaactcggtgttgacttttggtgtttccacgacagggatatagcccctgatggaaaaactcttgaggaatctaatgcaaacttggatgaagtggttgcccttgctcaagagctccagactaaggctaaaaaaagagtgttatggggaacagctcagttgttcatgcatcctcgttacatgcatggtgctgctactagctctgaattaaaggtctatgcatatgctgctgctcaagtgaagaaagccatagaggtgacacattatttggggggagaaaattatgttttctggggtggtcgtgaaggttatcaatctcttttgaacacagatatggagcgagagcttaatcatttggctaggttttttgaagctgctgttgcatacaaaaagaagattggattcaatgggacatttctaatcgaaccaaagccacaagaacctacaaaacaccagtatgattgggatgctgcaacctcagctaatttcttgcgaaaatatggacttacaggggaattcaaactcaacatagagtgcaaccatgccaccctctctggccacagttgtcatcatgagctcgaaactgcaaggatcaatggattgctgggtaatattgatgcaaacactggtgatcctcaagttggttgggacactgatcagtttcttgtagatattcaagaggcgacactgattatgctcagtgtgatcagaaatggaggacttgcacccggtggattcaacttcgatgcgaaattgcggagagagagcacagatgttgaagacttgttcatagcccacattgttggaatggataccctggcccgtggcctgaggaatgctgccaagttgattgaggatggttctcttgctgagcttgttcgtaagcgttatcagagttttgacactgaaattggggctcaaatagaggctggtaaggctgactttgaactgcttgagaagaaggtcaaggaatggggagaaccaaaggttgcttctgcgaaacaggagctagccgagatgatcctccaatctgttctgtagaaagtagaatctagccgtgtgtggtggctatttttcgtctattatattaggaacaattcggtataattaggtttactaataaaaggaaattaagattgacttatgcctgcttcgttttccttgggaaaatataagtgtgaagctgttatctgctaggtggatacgaagcctggtgaagtgcatgttagcttatgtataaaactacgtgatgcatagcttccctggctttgagcatgcttgagttaattaattttagtttcactccgc

SEQ ID NO: 54376 - protein, 480 aa, Glycine max
  peptide (1)..(480): Ceres Seq. ID no. 14304868
MMKMKLVKTLLLLLCVKLFCYAVIGAPQTCPANNEDKCGDSDEWKGEFFPDIPKIKYEGPSSKNVLSFKWYNAEEEILGKKMKDWLRFSVAFWHTFRGTGADPFGAPTKYWLWEDGTNSLNMAKRRMRANFEFISKLGVDFWCFHDRDIAPDGKTLEESNANLDEVVALAQELQTKAKKRVLWGTAQLFMHPRYMHGAATSSELKVYAYAAAQVKKAIEVTHYLGGENYVFWGGREGYQSLLNTDMERELNHLARFFEAAVAYKKKIGFNGTFLIEPKPQEPTKHQYDWDAATSANFLRKYGLTGEFKLNIECNHATLSGHSCHHELETARINGLLGNIDANTGDPQVGWDTDQFLVDIQEATLIMLSVIRNGGLAPGGFNFDAKLRRESTDVEDLFIAHIVGMDTLARGLRNAAKLIEDGSLAELVRKRYQSFDTEIGAQIEAGKADFELLEKKVKEWGEPKVASAKQELAEMILQSVL

SEQ ID NO: 54377 - protein, 479 aa, Glycine max
  peptide (1)..(479): Ceres Seq. ID no. 14304869
MKMKLVKTLLLLLCVKLFCYAVIGAPQTCPANNEDKCGDSDEWKGEFFPDIPKIKYEGPSSKNVLSFKWYNAEEEILGKKMKDWLRFSVAFWHTFRGTGADPFGAPTKYWLWEDGTNSLNMAKRRMRANFEFISKLGVDFWCFHDRDIAPDGKTLEESNANLDEVVALAQELQTKAKKRVLWGTAQLFMHPRYMHGAATSSELKVYAYAAAQVKKAIEVTHYLGGENYVFWGGREGYQSLLNTDMERELNHLARFFEAAVAYKKKIGFNGTFLIEPKPQEPTKHQYDWDAATSANFLRKYGLTGEFKLNIECNHATLSGHSCHHELETARINGLLGNIDANTGDPQVGWDTDQFLVDIQEATLIMLSVIRNGGLAPGGFNFDAKLRRESTDVEDLFIAHIVGMDTLARGLRNAAKLIEDGSLAELVRKRYQSFDTEIGAQIEAGKADFELLEKKVKEWGEPKVASAKQELAEMILQSVL

SEQ ID NO: 54378 - protein, 477 aa, Glycine max
  peptide (1)..(477): Ceres Seq. ID no. 14304870
MKLVKTLLLLLCVKLFCYAVIGAPQTCPANNEDKCGDSDEWKGEFFPDIPKIKYEGPSSKNVLSFKWYNAEEEILGKKMKDWLRFSVAFWHTFRGTGADPFGAPTKYWLWEDGTNSLNMAKRRMRANFEFISKLGVDFWCFHDRDIAPDGKTLEESNANLDEVVALAQELQTKAKKRVLWGTAQLFMHPRYMHGAATSSELKVYAYAAAQVKKAIEVTHYLGGENYVFWGGREGYQSLLNTDMERELNHLARFFEAAVAYKKKIGFNGTFLIEPKPQEPTKHQYDWDAATSANFLRKYGLTGEFKLNIECNHATLSGHSCHHELETARINGLLGNIDANTGDPQVGWDTDQFLVDIQEATLIMLSVIRNGGLAPGGFNFDAKLRRESTDVEDLFIAHIVGMDTLARGLRNAAKLIEDGSLAELVRKRYQSFDTEIGAQIEAGKADFELLEKKVKEWGEPKVASAKQELAEMILQSVL

SEQ ID NO: 54379 - DNA, 1169 bp, Glycine max
  misc_feature (1)..(1169): Ceres Seq. ID no. 14307839
atgttgcaacagagagacagaaaaaggactcacaatcacgaaggagaagaaacccaataagtgattctcatttttatggctcttgccctgaagtcaagttgcttcttgcaattgaagaaacctgaggctggtttcaatgtttgtttttcatctaagaaagctataatctccgtgaaacgacacactcccgtggctgctatcaggaccatggaagcagtgggactctctgcaacattcaccaggttgaaaaaagaaggaaaagtagctttcatcccgtatgtcactgctggtgatcctgacctttcaaccacagcagaagcactgaaagtgcttgattcatgtgggtctgacataattgagctaggtgttccatactctgatcctttggcagatggtcctgttatccaggctgctgctacaagatctttagcaaaggggaccaatttgaatgcgattattgatatgttgaaggaggttgttccgcaactgtcatgtccaattgcactgtttacatattacaatccaatactgaagcgtggtactgataaatttatgtccactataagagacagtggtgtacatgggcttgtagtcccagatgtccctctggaggagacggaaactttaaggacagaagctaagaaacatggaattgaactggtactcctcacaacacccacaactccaacaaaccgaatgagagccattgttgatgtggcagaaggatttgtgtatcttgtgagctcagtgggggtcactggagcccgagcatcagttagtggttctgttcagtctcttttgaaggaaattaaagaggcaactactaaacctgtggcagttggttttggaatatcaaaacctgagcatgtgaaacaggtagtggtatggggagctgatggtgtgattgttggcagtgctatagtgaaggtgcttggtgaggccaaatctcctcaagagggattgaaagaacttgaagttttcacccgctccttaaaagcggcacttccttaaaaaatatgttttaagagctcgaacttcatgtagttgttgtcgtcatcgtagatattggattcaataaaatgcggttcagttgtttttcttctgttcatgatatagtagttttgacatttttatttccttttcaattatgattggatttcttagttacc

SEQ ID NO: 54380 - protein, 311 aa, Glycine max
  peptide (1)..(311): Ceres Seq. ID no. 14307840
MALALKSSCFLQLKKPEAGFNVCFSSKKAIISVKRHTPVAAIRTMEAVGLSATFTRLKKEGKVAFIPYVTAGDPDLSTTAEALKVLDSCGSDIIELGVPYSDPLADGPVIQAAATRSLAKGTNLNAIIDMLKEVVPQLSCPIALFTYYNPILKRGTDKFMSTIRDSGVHGLVVPDVPLEETETLRTEAKKHGIELVLLTTPTTPTNRMRAIVDVAEGFVYLVSSVGVTGARASVSGSVQSLLKEIKEATTKPVAVGFGISKPEHVKQVVVWGADGVIVGSAIVKVLGEAKSPQEGLKELEVFTRSLKAALP

SEQ ID NO: 54381 - protein, 267 aa, Glycine max
  peptide (1)..(267): Ceres Seq. ID no. 14307841
MEAVGLSATFTRLKKEGKVAFIPYVTAGDPDLSTTAEALKVLDSCGSDIIELGVPYSDPLADGPVIQAAATRSLAKGTNLNAIIDMLKEVVPQLSCPIALFTYYNPILKRGTDKFMSTIRDSGVHGLVVPDVPLEETETLRTEAKKHGIELVLLTTPTTPTNRMRAIVDVAEGFVYLVSSVGVTGARASVSGSVQSLLKEIKEATTKPVAVGFGISKPEHVKQVVVWGADGVIVGSAIVKVLGEAKSPQEGLKELEVFTRSLKAALP

SEQ ID NO: 54382 - protein, 182 aa, Glycine max
  peptide (1)..(182): Ceres Seq. ID no. 14307842
MLKEVVPQLSCPIALFTYYNPILKRGTDKFMSTIRDSGVHGLVVPDVPLEETETLRTEAKKHGIELVLLTTPTTPTNRMRAIVDVAEGFVYLVSSVGVTGARASVSGSVQSLLKEIKEATTKPVAVGFGISKPEHVKQVVVWGADGVIVGSAIVKVLGEAKSPQEGLKELEVFTRSLKAALP

SEQ ID NO: 54383 - DNA, 1194 bp, Glycine max
  misc_feature (1)..(1194): Ceres Seq. ID no. 15177071
gaaaaacctcgtcctttcccctgcttcgttttcaaaacttttgcgaaatttctatcttcttcaccttgctctcaccttctgggtaatgtttgaaacttggtgttagctgagctgtttgacaaaaatgaatattgcacaagttacagcatggcagcctgggatttgtgtgaaaaatatgtctcagttgcaccggcttcaatctaaaccatgtgttataccaaagagttttggtcctctcacttgtgttctactgagcttaagagcaagacaatcgtttagctcgaaatgttggcccattttacaatctcggaaacctcttcatatttgcttagccggtggaaaagggatgatgggaaatgatgagaattccccatggaaatctattgagaaagctattggaaaatttaagggagaatcatcaatagaggatgtattacggcgccaaattgaaaagggtgtatattatgacagtggtggtggtggagtgaaaccaccaggaggcgggaacagtggtggtggccctgatggctctggtgaatcagaagaagaaagccttgctgggatgtgggaagaaaatatccaagtgattttagcgacccttggctttatatttctgtacatttatattctcactggggaggaactcacaaagctagctagagactatatcaagtatctatttgggggaagccagagtgtccgactgaaaaatgccatgtatcaatggggacaactctatgaaagcatgacagctcagaaagaagaggaagacgagtattggttgcagaaggccattctggatacaccaacttggtggcacgaccctgctgattaccgtgaagcccttaaaaactacttgctatcaggtacagatgaggccattgccaccaggaattacttagaattagattcagatgcagacgttaggtattgcttggaatcagatgacgaagaagatgaagatgaagatcaatatcaatataaagatgattatgaagaaaagtttgcctagagtccggagcaacttctattgctctccatctattttcccctcctcaagtttaataaagctttgtatacgttgtatcatcatgcttgtagtgtattgccctttcttgcatttgtttttcccacaatactaatggaatcatgacaacaatttgacttttatatgaactgaagttgtttctctat

SEQ ID NO: 54384 - protein, 295 aa, Glycine max
  peptide (1)..(295): Ceres Seq. ID no. 15177072
MNIAQVTAWQPGICVKNMSQLHRLQSKPCVIPKSFGPLTCVLLSLRARQSFSSKCWPILQSRKPLHICLAGGKGMMGNDENSPWKSIEKAIGKFKGESSIEDVLRRQIEKGVYYDSGGGGVKPPGGGNSGGGPDGSGESEEESLAGMWEENIQVILATLGFIFLYIYILTGEELTKLARDYIKYLFGGSQSVRLKNAMYQWGQLYESMTAQKEEEDEYWLQKAILDTPTWWHDPADYREALKNYLLSGTDEAIATRNYLELDSDADVRYCLESDDEEDEDEDQYQYKDDYEEKFA

SEQ ID NO: 54385 - protein, 278 aa, Glycine max
  peptide (1)..(278): Ceres Seq. ID no. 15177073
MSQLHRLQSKPCVIPKSFGPLTCVLLSLRARQSFSSKCWPILQSRKPLHICLAGGKGMMGNDENSPWKSIEKAIGKFKGESSIEDVLRRQIEKGVYYDSGGGGVKPPGGGNSGGGPDGSGESEEESLAGMWEENIQVILATLGFIFLYIYILTGEELTKLARDYIKYLFGGSQSVRLKNAMYQWGQLYESMTAQKEEEDEYWLQKAILDTPTWWHDPADYREALKNYLLSGTDEAIATRNYLELDSDADVRYCLESDDEEDEDEDQYQYKDDYEEKFA

SEQ ID NO: 54386 - protein, 221 aa, Glycine max
  peptide (1)..(221): Ceres Seq. ID no. 15177074
MMGNDENSPWKSIEKAIGKFKGESSIEDVLRRQIEKGVYYDSGGGGVKPPGGGNSGGGPDGSGESEEESLAGMWEENIQVILATLGFIFLYIYILTGEELTKLARDYIKYLFGGSQSVRLKNAMYQWGQLYESMTAQKEEEDEYWLQKAILDTPTWWHDPADYREALKNYLLSGTDEAIATRNYLELDSDADVRYCLESDDEEDEDEDQYQYKDDYEEKFA

SEQ ID NO: 54387 - DNA, 1524 bp, Glycine max
  misc_feature (1)..(1524): Ceres Seq. ID no. 15177434
ataccatcattactttttgcgttaggtttcgtatttatgtttactattgggggattatcaggtgtggttcttgctaacgcatcacttgatattgctttccacgatacttactacgtagttgctcatttccactacgtgttaagtatgggtgccgtatttgccttatttagtggatgatacttctgaatccctaaaatattagggttagattataacttactatattctaaagctcacttctgagttctatttactggagttaatttaactttcttccctcaacacttcttaggattacaaggtatgccacgtagaattagtgattaccctgacgcctttacaggttgaaacttcattagtagtattggttcacttatctctgttgctgctactgtgttattcttacacatagtatacttacaacttgttaaagggaaagctatatttggttacccttgagcagttcctcaactatttagtgattacttaagaatacttaaagataaatgtgctccagggttagagtgagcattaagtaatccacctaaacctcacgcatttactagcttaccattacaaagtagtacaatcttatcttctatttttgccgcaattagcactttatttgctgtttctagtgaattcgtatgtgatgcacctagagcgtgaggattatacttccaagatagtgctagtccacaaatggaagctttaatcgaattacatgataacattatgtattacttagttgctattttatttagtgttggttgaatacaaggagctattattaaaaattttgatagcgcaaaatcacctataagtaataaataccttaaccacggtacattaatagaattaatttgaacaattacacctgctctaatattagtattaattgctttcccttctttcaaactattatacttaatggatgaagttactgatccttcactatctgtattagcagaagggcaccaatgatactgaagttacgagtacccagatttcttaaatagtgatggagactttgtagaatttgattcttacttagtatctgaatctgacttagaagaaggggctttaagaatgttagaagtagataatagagttattcttcctgaaattacacacactagatttattcttactgctgctgatgtaatccattcatttgctataccagcattaggtgttaaatgtgatgcatacccaggtagattaaatcaattctctgttttaattaacagattaggaacattctacggtcaatgttcagaaatatgtggtattttacacagttctatgccaattgttgtagaatctgtatcactagaaaaattcttatcatgattacaagaacaataataagtaatttacaataagaaattactgagtctcttaaagataaaagggctttagacaaaaaagtttaaagtctgaactttacaaagatttaaccattttttttactttaatttgaatacctaaatttcttaatgtaaaaattaaaattagttaagc

SEQ ID NO: 54388 - protein, 87 aa, Glycine max
  peptide (1)..(87): Ceres Seq. ID no. 15177435
MLEVDNRVILPEITHTRFILTAADVIHSFAIPALGVKCDAYPGRLNQFSVLINRLGTFYGQCSEICGILHSSMPIVVESVSLEKFLS

SEQ ID NO: 54389 - protein, 58 aa, Glycine max
  peptide (1)..(58): Ceres Seq. ID no. 15177436
IPSLLFALGFVFMFTIGGLSGVVLANASLDIAFHDTYYVVAHFHYVLSMGAVFALFSG

SEQ ID NO: 54390 - protein, 46 aa, Glycine max
  peptide (1)..(46): Ceres Seq. ID no. 15177437
MFTIGGLSGVVLANASLDIAFHDTYYVVAHFHYVLSMGAVFALFSG

SEQ ID NO: 54391 - DNA, 1392 bp, Glycine max
  misc_feature (1)..(1392): Ceres Seq. ID no. 14307736
tctcttctcgtatcacacgatccatctacacggtcaaaaagaaaatcgttttccttgagaaaatacggacacagagacagagagagggagagagagaaggaaatgggaagcacaaagtttctattgttggtgatggtgtttctcgcagtgtgcgtggggacatgcaggccttggggtgatgatgtagttgaagatggagaggaggccaaacattttgcagcaaaagccgtgcatgatgtcgaggaagagacccgctcttgggctgattgggctcaagacaagttctccaaaagtttcggggccgaagaggatcatgaaaaacaagcgactcaaaacatgaagtatcaagctgaagatgctgcttcaagggccacggagagagtgaaatctgcagcatcaggagcctcggactatgcttctcaaaaggctacggatgctaagtaagcagtttcaggtgctaaggtcatcaaaatgccaacagatagcattaacaatgcaaaacacacaatgggagatacctacgaggatgctaagcaaaaaatgaacacagcttcagataaggcttcaagtatggctcacaatgccaaagataacacggctgagtccatggaatatggaaaagatatagcagccaatgcctatgaccagggtaagcaaaaaataaacattgcttcagatacagcatcagagaaattctatgatgccaaggacaaggcaagtgatgttaggcataaagtgaaaggagccatgggttgtggaggagataaggccaataatgatgctaaaaataacatgggcgtgaaaatggaacatggaagggacaaagtagccgaaacttttgaccaggctaaacgtgaagtgggtgaagcatatgtatcagcaaagaataccatgactgaagaggccaaagctaagtacgaggctgcaaaggagaaggcttcggatgcaacaggtgatttaggagctaagatgaggaacaccccaaacgtataagcgcatggttagtttaccgcttattcttaactatgacaacctctattagtttttagctctagtttccacaagttatcgtttatattgtgctttaatctcttgtaatgtgttagtcttttacacgttcttgtatgcttttctctttaatagagatgcaaaaaatacttgttagacattatgaaaaagtcattacgtacaaatctattctccataatgataggagagagcctgaaaggtcccacggttaggttcttctatgatctatcacgatgccaggtagattcatatacagggtgctgccccataatgttgtagggactttgcagcttatatatagtaggctatatgtatgtgtaattataacattttgcagttagtggatcctctcacgattggtac

SEQ ID NO: 54392 - protein, 173 aa, Glycine max
  peptide (1)..(173): Ceres Seq. ID no. 14307737
MPTDSINNAKHTMGDTYEDAKQKMNTASDKASSMAHNAKDNTAESMEYGKDIAANAYDQGKQKINIASDTASEKFYDAKDKASDVRHKVKGAMGCGGDKANNDAKNNMGVKMEHGRDKVAETFDQAKREVGEAYVSAKNTMTEEAKAKYEAAKEKASDATGDLGAKMRNTPNV

SEQ ID NO: 54393 - protein, 161 aa, Glycine max
  peptide (1)..(161): Ceres Seq. ID no. 14307738
MGDTYEDAKQKMNTASDKASSMAHNAKDNTAESMEYGKDIAANAYDQGKQKINIASDTASEKFYDAKDKASDVRHKVKGAMGCGGDKANNDAKNNMGVKMEHGRDKVAETFDQAKREVGEAYVSAKNTMTEEAKAKYEAAKEKASDATGDLGAKMRNTPNV

SEQ ID NO: 54394 - protein, 150 aa, Glycine max
  peptide (1)..(150): Ceres Seq. ID no. 14307739
MNTASDKASSMAHNAKDNTAESMEYGKDIAANAYDQGKQKINIASDTASEKFYDAKDKASDVRHKVKGAMGCGGDKANNDAKNNMGVKMEHGRDKVAETFDQAKREVGEAYVSAKNTMTEEAKAKYEAAKEKASDATGDLGAKMRNTPNV

SEQ ID NO: 54395 - DNA, 1449 bp, Glycine max
  misc_feature (1)..(1449): Ceres Seq. ID no. 14307233
aacatagactagtgcggtgcattccctcgtttaccatgctttcctaagagaaagagaaaagtaaaacccctcactactgatagattttcattcctccgaggaaaaaaaaaacatgtcggatgctttgatcaatggattggccggagctggaggagggatcattgctcagctcatcacatacccacttcaaactgtaaacactcgccaacaaaccgagcgtgatccgaagaaagacacgaggagtcaaggggccctcgaacgaatgtgccaggttgtaaaagaagaggggtgggaacggttgtatggaggcttgatgccatcggtagtgggtacagctgcgtctcagggagtttactattatttctatcaaatattcaggaacaaagctgaagcagctgcactacaacaaaagaaaatgggcgttggtgatggatcagttgggatgctctcctctcttgttgttgctgctttatctgggtgtgttaacgtgctcttgacaaatcccatatgggtagttgttacgcgtatgcagacacatagaaaagagtcgaacagaactccagctgatcagggtttgtttgttgccactgagcagccaattctttctgcagttgagcctcttccttatggaactagtcatgtgattcaagaaatctacggtgaagctggaatttggggtttctggaaaggtgtattaccaacattaatcatggtaagcaatccttccatacagttcatgctgtatgaagccatgttggcaaagttaagaaaaagacgtgcttggagtaagaagggtagcaacggggtaactgctttagagatatttcttattggagctttagctaagcttggagctactgttgtaacttatccgatcctagttgtgaaggcaaggctccaagctagacaggataaaactggagacaggagacaccattacaaaggtacatgggatgctattattaaaatgatccgctatgaggggtttaatgggttttacaaaggcatgggcacaaaaatcgtacaaagtgtgctggctgctgctgttttgttcatgatgaaggaagaattagttaggggggttcgtttcttgcttgccaaggatgctgtaaagccaaagaatctgtgattggaggccactagcttgatcaagatttcatgtaccatcttcagttagcaaattagttcaaatggtaggggaattagagtgattcaaacaacatattgaaatatggctttaactgtatcttgattattttcatcaggttagtttccatagaggaaattcatgccaaaaattacacactgggttcattggtttgtttcatgaacaagacagggttgtagatttgaagtatgctgctgaaacaaatattctttttacgaacgaatatcactatctgatttcattggcagctaaagatttagatcaaaatttaattcacgaat

SEQ ID NO: 54396 - protein, 338 aa, Glycine max
  peptide (1)..(338): Ceres Seq. ID no. 14307234
MSDALINGLAGAGGGIIAQLITYPLQTVNTRQQTERDPKKDTRSQGALERMCQVVKEEGWERLYGGLMPSVVGTAASQGVYYYFYQIFRNKAEAAALQQKKMGVGDGSVGMLSSLVVAALSGCVNVLLTNPIWVVVTRMQTHRKESNRTPADQGLFVATEQPILSAVEPLPYGTSHVIQEIYGEAGIWGFWKGVLPTLIMVSNPSIQFMLYEAMLAKLRKRRAWSKKGSNGVTALEIFLIGALAKLGATVVTYPILVVKARLQARQDKTGDRRHHYKGTWDAIIKMIRYEGFNGFYKGMGTKIVQSVLAAAVLFMMKEELVRGVRFLLAKDAVKPKNL

SEQ ID NO: 54397 - protein, 288 aa, Glycine max
  peptide (1)..(288): Ceres Seq. ID no. 14307235
MCQVVKEEGWERLYGGLMPSVVGTAASQGVYYYFYQIFRNKAEAAALQQKKMGVGDGSVGMLSSLVVAALSGCVNVLLTNPIWVVVTRMQTHRKESNRTPADQGLFVATEQPILSAVEPLPYGTSHVIQEIYGEAGIWGFWKGVLPTLIMVSNPSIQFMLYEAMLAKLRKRRAWSKKGSNGVTALEIFLIGALAKLGATVVTYPILVVKARLQARQDKTGDRRHHYKGTWDAIIKMIRYEGFNGFYKGMGTKIVQSVLAAAVLFMMKEELVRGVRFLLAKDAVKPKNL

SEQ ID NO: 54398 - protein, 271 aa, Glycine max
  peptide (1)..(271): Ceres Seq. ID no. 14307236
MPSVVGTAASQGVYYYFYQIFRNKAEAAALQQKKMGVGDGSVGMLSSLVVAALSGCVNVLLTNPIWVVVTRMQTHRKESNRTPADQGLFVATEQPILSAVEPLPYGTSHVIQEIYGEAGIWGFWKGVLPTLIMVSNPSIQFMLYEAMLAKLRKRRAWSKKGSNGVTALEIFLIGALAKLGATVVTYPILVVKARLQARQDKTGDRRHHYKGTWDAIIKMIRYEGFNGFYKGMGTKIVQSVLAAAVLFMMKEELVRGVRFLLAKDAVKPKNL

SEQ ID NO: 54399 - DNA, 1646 bp, Glycine max
  misc_feature (1)..(1646): Ceres Seq. ID no. 14312212
acctaggaaaaaccgtttccaactttacattttcccaccaaccctcctctccattcctcaaaacaatcgttaatctcttctccattgtgaactctgatattctccaagtacacaacacaaacacacatcaatttatagcacccgatttctcttttccccctcaaattcagctccattttgttacagattcaaataataagccaagcagccacaccatgatctcgtcaatgaaatgcacagcctcatctctcacatgttctgctttctcaaacagaaagcttcccattgcaaggcctcaactcgtgacattaccaaccatcaacaacgttgaacaaaacatgggtccctctcagttgtgttcacagaagcctctctacctttcatccaccgagaacttggcattggtgaggagaaggagagtgacggagtgccaggcctatgaagctgacaggtcacggcctctggagatcaacattgagctgccggctgaagaggcggcgcagaggttcaagattggtgtgtattttgctacatggtgggctttgaatgtagttttcaacatttacaataagaaggttttgaatgcttttccttacccgtggctcacctccactttgtcccttgctgctggctccctcatgatgttagtctcatgggccaccagggttgctgaggtcccaaaagtcaacttggacttctggaagggcttgtttcctgttgccgtggcacacacaattgggcatgttgctgcaactgtgagcatgtccaaggttgctgtttcattcactcacatcatcaagagtggagagccagctttcagtgtccttgtgtcaaggttcttgctcggagaagcattcccaatgccggtttatctgtcactgctgccaattattggtggttgtgcactagctgcagtgactgagctcaatttcaacatgattggcttcatgggggctatgatatcaaatttggcatttgtcttccgcaatatattctcaaagaaagggatgaagggaatgtctgttagtggaatgaactactatgcttgtctttccataatgtcactgttaattctgacaccttttgccattgctgttgagggccccaaggtttgggctgcaggctggcaaacagctgtatctcaaattggtcccaattttgtatggtgggtagctgcacagagtgtcttttaccacttgtacaatcaagtctcatacatgtctcttgatcagatttctcccttaacatttagcattggaaacacaatgaagaggatttcggtcattgtttcttccatccttatctttcacacgcctgttcagcccatcaatgctcttggtgctgccattgcaattcttggcaccttcctctattcacaggctaaacagtaaggtggttattttgaagcttttatgtaacacaaggaaacgatgactcatggttggagctcaaagtgtcactgatgaggactatggcattaattagctagtatgttttgttgttaataggaatttaagtttatttcttttgggccatagcagcagcatttgtaatcacgttttgatctttgtaaattagctttagaaggatggaatgcactaaactgtacttaatcttgaggctgaaagtctatgaagaatttcttg

SEQ ID NO: 54400 - protein, 462 aa, Glycine max
  peptide (1)..(462): Ceres Seq. ID no. 14312213
LGKTVSNFTFSHQPSSPFLKTIVNLFSIVNSDILQVHNTNTHQFIAPDFSFPPQIQLHFVTDSNNKPSSHTMISSMKCTASSLTCSAFSNRKLPIARPQLVTLPTINNVEQNMGPSQLCSQKPLYLSSTENLALVRRRRVTECQAYEADRSRPLEINIELPAEEAAQRFKIGVYFATWWALNVVFNIYNKKVLNAFPYPWLTSTLSLAAGSLMMLVSWATRVAEVPKVNLDFWKGLFPVAVAHTIGHVAATVSMSKVAVSFTHIIKSGEPAFSVLVSRFLLGEAFPMPVYLSLLPIIGGCALAAVTELNFNMIGFMGAMISNLAFVFRNIFSKKGMKGMSVSGMNYYACLSIMSLLILTPFAIAVEGPKVWAAGWQTAVSQIGPNFVWWVAAQSVFYHLYNQVSYMSLDQISPLTFSIGNTMKRISVIVSSILIFHTPVQPINALGAAIAILGTFLYSQAKQ

SEQ ID NO: 54401 - protein, 391 aa, Glycine max
  peptide (1)..(391): Ceres Seq. ID no. 14312214
MISSMKCTASSLTCSAFSNRKLPIARPQLVTLPTINNVEQNMGPSQLCSQKPLYLSSTENLALVRRRRVTECQAYEADRSRPLEINIELPAEEAAQRFKIGVYFATWWALNVVFNIYNKKVLNAFPYPWLTSTLSLAAGSLMMLVSWATRVAEVPKVNLDFWKGLFPVAVAHTIGHVAATVSMSKVAVSFTHIIKSGEPAFSVLVSRFLLGEAFPMPVYLSLLPIIGGCALAAVTELNFNMIGFMGAMISNLAFVFRNIFSKKGMKGMSVSGMNYYACLSIMSLLILTPFAIAVEGPKVWAAGWQTAVSQIGPNFVWWVAAQSVFYHLYNQVSYMSLDQISPLTFSIGNTMKRISVIVSSILIFHTPVQPINALGAAIAILGTFLYSQAKQ

SEQ ID NO: 54402 - protein, 387 aa, Glycine max
  peptide (1)..(387): Ceres Seq. ID no. 14312215
MKCTASSLTCSAFSNRKLPIARPQLVTLPTINNVEQNMGPSQLCSQKPLYLSSTENLALVRRRRVTECQAYEADRSRPLEINIELPAEEAAQRFKIGVYFATWWALNVVFNIYNKKVLNAFPYPWLTSTLSLAAGSLMMLVSWATRVAEVPKVNLDFWKGLFPVAVAHTIGHVAATVSMSKVAVSFTHIIKSGEPAFSVLVSRFLLGEAFPMPVYLSLLPIIGGCALAAVTELNFNMIGFMGAMISNLAFVFRNIFSKKGMKGMSVSGMNYYACLSIMSLLILTPFAIAVEGPKVWAAGWQTAVSQIGPNFVWWVAAQSVFYHLYNQVSYMSLDQISPLTFSIGNTMKRISVIVSSILIFHTPVQPINALGAAIAILGTFLYSQAKQ

SEQ ID NO: 54403 - DNA, 1422 bp, Glycine max
  misc_feature (1)..(1422): Ceres Seq. ID no. 14314144
gatgaggctgatagactcttagatatgggattccagaagcagataacttctattataactctcttgcctaagcttcggagaactggtctgttctctgctactcaaactgaggctattgaagagcttgctaaggcaggattgaggaacccagtgagggttgaagttcgagcagaaacaaaatcagaaaatggtcctgcatcatcaaaacaaccagaatcttccaaaacaccttcaggacttcacattgagtacttggaatgcgaggcagataagaagccatcacagctagtacatatcctgataaagaatctctcgaaaaaaattattatatatttcatgacttgtgcttgtgttgattattggggagctgtccttccttgtctttctgttttgaaaggcttctccttgattcccctgcatggaaagatgaagcagtctgccagggagaaagcactagcttcatttacatccctttcaaatggaattcttctatgtacggatgttgcagcacgtggactggacataccaggtgtagattgtatagtgcagtatgatcctcctcaagatccaaatgttttcatacatagagtaggtcgaactgctcggctgggtaaacaaggtcatgctgttgtcttcttattaccaaaggaggaatcttatgtagaattcctgcgtataagaagagttcctcttcaagagagaatatgtgctgatgaagcatctgatgttgttcctcagattcgttctgctgcaaaaaaagatcgcgatgtcatggaaaagggaattaaggcctttgtctcttacatccgtgcttataaagagcatcactgttcctatatttttaggtggaaagaacttgaaattggtaaattggccacaggatttggcttattacaacttccttcaatgccagaggtaaaacaccactcactttccattgatggatttgaaccagttgaagatatcaatttgggggacattaagtacagggataaatcacgggagaaacaaaggaagaagaaccttcaagcaaagaaagaagccaaagagaaagagccaaaacctcaaaaaccgaagaaaaccccaaatgcacccactgacatgcggaagaaaacagcccgacagagacgtgctcagcagacaatggaagacgaggaagagttgatgcatgaataccgcttgttgaagaaattgaagaaagggaccatagatgagaatgaatatgccaagttgacaggcactgaggaattactttgaaagcaaagtatgcatgcctgattatgctgttctggataccatggttgaaagcaaagtaatgaatgacagtttcaaacaccacaattttggctagtaagttactagattcttgccatgtgggtacactgtaggcatctaatctaataatataaaatttgttaatcc

SEQ ID NO: 54404 - protein, 418 aa, Glycine max
  peptide (1)..(418): Ceres Seq. ID no. 14314145
DEADRLLDMGFQKQITSIITLLPKLRRTGLFSATQTEAIEELAKAGLRNPVRVEVRAETKSENGPASSKQPESSKTPSGLHIEYLECEADKKPSQLVHILIKNLSKKIIIYFMTCACVDYWGAVLPCLSVLKGFSLIPLHGKMKQSAREKALASFTSLSNGILLCTDVAARGLDIPGVDCIVQYDPPQDPNVFIHRVGRTARLGKQGHAVVFLLPKEESYVEFLRIRRVPLQERICADEASDVVPQIRSAAKKDRDVMEKGIKAFVSYIRAYKEHHCSYIFRWKELEIGKLATGFGLLQLPSMPEVKHHSLSIDGFEPVEDINLGDIKYRDKSREKQRKKNLQAKKEAKEKEPKPQKPKKTPNAPTDMRKKTARQRRAQQTMEDEEELMHEYRLLKKLKKGTIDENEYAKLTGTEELL

SEQ ID NO: 54405 - protein, 410 aa, Glycine max
  peptide (1)..(410): Ceres Seq. ID no. 14314146
MGFQKQITSIITLLPKLRRTGLFSATQTEAIEELAKAGLRNPVRVEVRAETKSENGPASSKQPESSKTPSGLHIEYLECEADKKPSQLVHILIKNLSKKIIIYFMTCACVDYWGAVLPCLSVLKGFSLIPLHGKMKQSAREKALASFTSLSNGILLCTDVAARGLDIPGVDCIVQYDPPQDPNVFIHRVGRTARLGKQGHAVVFLLPKEESYVEFLRIRRVPLQERICADEASDVVPQIRSAAKKDRDVMEKGIKAFVSYIRAYKEHHCSYIFRWKELEIGKLATGFGLLQLPSMPEVKHHSLSIDGFEPVEDINLGDIKYRDKSREKQRKKNLQAKKEAKEKEPKPQKPKKTPNAPTDMRKKTARQRRAQQTMEDEEELMHEYRLLKKLKKGTIDENEYAKLTGTEELL

SEQ ID NO: 54406 - protein, 306 aa, Glycine max
  peptide (1)..(306): Ceres Seq. ID no. 14314147
MTCACVDYWGAVLPCLSVLKGFSLIPLHGKMKQSAREKALASFTSLSNGILLCTDVAARGLDIPGVDCIVQYDPPQDPNVFIHRVGRTARLGKQGHAVVFLLPKEESYVEFLRIRRVPLQERICADEASDVVPQIRSAAKKDRDVMEKGIKAFVSYIRAYKEHHCSYIFRWKELEIGKLATGFGLLQLPSMPEVKHHSLSIDGFEPVEDINLGDIKYRDKSREKQRKKNLQAKKEAKEKEPKPQKPKKTPNAPTDMRKKTARQRRAQQTMEDEEELMHEYRLLKKLKKGTIDENEYAKLTGTEELL

SEQ ID NO: 54407 - DNA, 1322 bp, Glycine max
  misc_feature (1)..(1322): Ceres Seq. ID no. 14313955
gaatcaattgatgtcttgtccttctcctccctcagttcctcttcactccctttcattctccctcgcctcacacgcacacgcacacttgtcattctcaaaacacgcccaaattcgaatcaaattagggttagggtttccaactcccctcgaattatccctgtaatgcagtttaattcccgggtcctactaccatggagccatcagcaatgtacggacactcccagcccctgagcatgccctcgcagatcggcggcggcgaaagcgacgacggctccggaaacgagcacgccgtcgacggccaccaccaccacattcagtacgaaacgcacgcgctcgaggacggtgccgccgtcgtcgtcgaggatgttacctcggatgcggtctatgtctccggcggtggaggccccgtagagtccagccagcttacgctgtcgtttcgtggccaagtgtacgtcttcgatgccgttacgcctgataaggttcaagcggtgttgttactgttgggtggatgtgaactatcttcaggtggttcgccatgtgtggatccgggggctcaacataatcaaaggggttcaatggaatttcctaaatgtagtctaccacaccgagctgcctcattacataggttcaggcagaagaggaaagagcgatgctttgacaaaaaagtgagatatagcgtgcggcaagaagttgcgctcaggatgcaccgtaacaagggccagtttacttcatctaagaaacaagatggagctaatagttatggtactgaccaagattcaggacaggatgatagtcaatccgaaacctcatgtacacattgtggcattagttcaaaatccaccccaatgatgcggcgagggccatctggtccaaggtcactttgcaacgcttgtgggcttttttgggcaaataggggtgctttgcgagacctttctaagagaaatcaggaacactctcttccaccagttgagcaggttgatgaaggtaatgactcggactgtcggactgccactgccgaccctgcacataacaatcttcctgctttctcagagcatgataatccagctttggtagctgatcataaagttttccagtctcagaaaatgttgaagtagtttactctggcataagtaggtctatagttcttccattcagattgaccaataggaatgtacagacataacaatactcccatcaatgcaagaactttgtttttatatggttggatctatggcattaaccattgatctctggatgtataacctgaaacttgaatgatgacttggtgatggtctcacccaataccttgaatttaattttac

SEQ ID NO: 54408 - protein, 307 aa, Glycine max
  peptide (1)..(307): Ceres Seq. ID no. 14313956
MEPSAMYGHSQPLSMPSQIGGGESDDGSGNEHAVDGHHHHIQYETHALEDGAAVVVEDVTSDAVYVSGGGGPVESSQLTLSFRGQVYVFDAVTPDKVQAVLLLLGGCELSSGGSPCVDPGAQHNQRGSMEFPKCSLPHRAASLHRFRQKRKERCFDKKVRYSVRQEVALRMHRNKGQFTSSKKQDGANSYGTDQDSGQDDSQSETSCTHCGISSKSTPMMRRGPSGPRSLCNACGLFWANRGALRDLSKRNQEHSLPPVEQVDEGNDSDCRTATADPAHNNLPAFSEHDNPALVADHKVFQSQKMLK

SEQ ID NO: 54409 - protein, 302 aa, Glycine max
  peptide (1)..(302): Ceres Seq. ID no. 14313957
MYGHSQPLSMPSQIGGGESDDGSGNEHAVDGHHHHIQYETHALEDGAAVVVEDVTSDAVYVSGGGGPVESSQLTLSFRGQVYVFDAVTPDKVQAVLLLLGGCELSSGGSPCVDPGAQHNQRGSMEFPKCSLPHRAASLHRFRQKRKERCFDKKVRYSVRQEVALRMHRNKGQFTSSKKQDGANSYGTDQDSGQDDSQSETSCTHCGISSKSTPMMRRGPSGPRSLCNACGLFWANRGALRDLSKRNQEHSLPPVEQVDEGNDSDCRTATADPAHNNLPAFSEHDNPALVADHKVFQSQKMLK

SEQ ID NO: 54410 - protein, 293 aa, Glycine max
  peptide (1)..(293): Ceres Seq. ID no. 14313958
MPSQIGGGESDDGSGNEHAVDGHHHHIQYETHALEDGAAVVVEDVTSDAVYVSGGGGPVESSQLTLSFRGQVYVFDAVTPDKVQAVLLLLGGCELSSGGSPCVDPGAQHNQRGSMEFPKCSLPHRAASLHRFRQKRKERCFDKKVRYSVRQEVALRMHRNKGQFTSSKKQDGANSYGTDQDSGQDDSQSETSCTHCGISSKSTPMMRRGPSGPRSLCNACGLFWANRGALRDLSKRNQEHSLPPVEQVDEGNDSDCRTATADPAHNNLPAFSEHDNPALVADHKVFQSQKMLK

SEQ ID NO: 54411 - DNA, 816 bp, Glycine max
  misc_feature (1)..(816): Ceres Seq. ID no. 14303437
aagggaaaaatgacagaggagcaattaaaaaaggtggctcagactgagagtatttcccctaatcctgcacctgaacctgaacctgaacctgctgttccaaaagaggaagtggctgaggagaaatctgtaattccacaaccctcttcctctccttctgatgagtccaaagctcttgtcatagttgagaagactagtgaagttgctcaagagaaaccaattgaggggtctgtgaaccgagatgctgtccttgcgagagttgcaactgagaagaggctgtcactaatcaaagcatgggaagaaagtgaaaagtcaaaatcagagaacaagtctcacaaaaagctttcagtcatttcagcatgggagaacagtatgaaagctgcagcggaggcagaattgagaaagattgaagaacaactggagaagaaaaaagcagaatatggagagaaattgaaaaacaaaatagctacaatccaccgagaagctgaagaaaagagggcatttattgaggcccaaaaaggggaagatttcttgaaggcagaggagacagctgcaaagtacagggcaactggaacagccccaacgaaactctttggttgtttctaacaaccctgatcattaaaaaatgctgtattattattatggttattattattattatgtattttctttgatagttcatgtaacatgtgtggtttggttgtcttttgctgagttgtgttcatgttcatttattacgtgtgcatagtgatatgttggttcgaatataacaatttatctttgtgtatacacaagaaattgaattattcaatttggggt

SEQ ID NO: 54412 - protein, 200 aa, Glycine max
  peptide (1)..(200): Ceres Seq. ID no. 14303438
KGKMTEEQLKKVAQTESISPNPAPEPEPEPAVPKEEVAEEKSVIPQPSSSPSDESKALVIVEKTSEVAQEKPIEGSVNRDAVLARVATEKRLSLIKAWEESEKSKSENKSHKKLSVISAWENSMKAAAEAELRKIEEQLEKKKAEYGEKLKNKIATIHREAEEKRAFIEAQKGEDFLKAEETAAKYRATGTAPTKLFGCF

SEQ ID NO: 54413 - protein, 197 aa, Glycine max
  peptide (1)..(197): Ceres Seq. ID no. 14303439
MTEEQLKKVAQTESISPNPAPEPEPEPAVPKEEVAEEKSVIPQPSSSPSDESKALVIVEKTSEVAQEKPIEGSVNRDAVLARVATEKRLSLIKAWEESEKSKSENKSHKKLSVISAWENSMKAAAEAELRKIEEQLEKKKAEYGEKLKNKIATIHREAEEKRAFIEAQKGEDFLKAEETAAKYRATGTAPTKLFGCF

SEQ ID NO: 54414 - DNA, 2017 bp, Glycine max
  misc_feature (1)..(2017): Ceres Seq. ID no. 12581821
cagctacgtaggccccccccccagatattccctagtgtcacctttgtgttaaacttccaactccactcttttttttcttcttcctctttcctcagccattactctctctctgacacctacctgtgtctcttcattatttttcttctgccttcaaacaaagtgatgaaagaggtgacggttgaagctgaaggaggagcaccaggagtggtgcaagagggtggaaaaggaaccacggttaggccagacatacacaacagtgccatgaaaattttgagggctagagagccttataatgggtacactgaggaagtgggagagaagccctcagggtttgaggttatggggtggtacctttatgagttttgcttctactttgttcaaactgtgcttgttcctgttgtgttccctctcattatcagtcagctacagcctctccctgctgcagattcacttcaggaatggaacaaaaaccacccaaccaagcactgctcacaaaaggaatttcatctgtatagcaaactgacaaatcacaccataagaaccagtggtggatcaaacttctctgctctggagtggacatcaattgcttgggccacaggactagccctggctgctccaattcttggcttcatttcctttcaccttgatggccacttcccaaagctcatcacagcagcagccacaggcattggagtgttcttctgccttcctgcaggcttcttcaaggtcacagccatcttcattccctacattgccggcattgtcgcggccagcacggtggccagcgctgctcacacccaccacctaggcctcatgatccgctgcttcacaggaccaaccctaaaaagaagcgaattctccatcaggcaagcagtctccagcaggctctccctccatgccacggcggctggatgcctcggagcagccttaatttcatcattcacataccatatgctccgggaactcaactacaacgaccgtgacgtgatgagtctctgggttgtttcaatctttagtggcctaatttggcttgttggggttttgcacattgtcacagccataggaagaaccactgattccatctcattctcctcaaggctccaccctttctccatcttcaagtaccctcatgcaattggaggccttgcaggggttttcctctcctcattcaccaccatgtcaattttcactggaggagttattttcatagtgggacaactctgcattaagccactgcacttgctctatctctggctaacctacttcctttttcctcttgtttctttgtcactgctacaacccttgttgcacgtgatcaagatgaattctgtgaagatgcaaattgtggggtttcttttgtcactcttgtcatcagggtttggattctactacggccacagtcactggaaatggggccacttggtgctatttggtgcagttcaaagcacagccacagggattttatacgcttttggaaggctcttggtgttggactgtgctccctctggcaaagaaggtgcgttctccatttggtatgcttggatgagagctgcagggctgtgcgtggggttcacggtggggtcggtcgcgccgggacgagttaggacctcgtttggagttgcgttttgcactgccattgctggaattgtggtactgcttttcgggaacatcagtgatgttggtggtgctgttgctgcggggcacgttagagatgaatgcgagagaagttcggctgtgctgcctggcttggattctaaggaatctgcacgcgtttgaataatggaaactggaaaatgaagaagattattattgttgttgtcttgtgggtcatatgattctttgcaaaatgatgttaatgcatgcaagagtagtattataaggtttctttttatgattgatttttagatgtattctggtagttagttttactgttgttgtgcatgcatatgatgtttggtctctgttgaggatttgggtgctgctgctgctggcttgtgtaactgtcttagtattttgt

SEQ ID NO: 54415 - protein, 591 aa, Glycine max
  peptide (1)..(591): Ceres Seq. ID no. 12581822
QLRRPPPQIFPSVTFVLNFQLHSFFSSSSFLSHYSLSDTYLCLFIIFLLPSNKVMKEVTVEAEGGAPGVVQEGGKGTTVRPDIHNSAMKILRAREPYNGYTEEVGEKPSGFEVMGWYLYEFCFYFVQTVLVPVVFPLIISQLQPLPAADSLQEWNKNHPTKHCSQKEFHLYSKLTNHTIRTSGGSNFSALEWTSIAWATGLALAAPILGFISFHLDGHFPKLITAAATGIGVFFCLPAGFFKVTAIFIPYIAGIVAASTVASAAHTHHLGLMIRCFTGPTLKRSEFSIRQAVSSRLSLHATAAGCLGAALISSFTYHMLRELNYNDRDVMSLWVVSIFSGLIWLVGVLHIVTAIGRTTDSISFSSRLHPFSIFKYPHAIGGLAGVFLSSFTTMSIFTGGVIFIVGQLCIKPLHLLYLWLTYFLFPLVSLSLLQPLLHVIKMNSVKMQIVGFLLSLLSSGFGFYYGHSHWKWGHLVLFGAVQSTATGILYAFGRLLVLDCAPSGKEGAFSIWYAWMRAAGLCVGFTVGSVAPGRVRTSFGVAFCTAIAGIVVLLFGNISDVGGAVAAGHVRDECERSSAVLPGLDSKESARV

SEQ ID NO: 54416 - protein, 537 aa, Glycine max
  peptide (1)..(537): Ceres Seq. ID no. 12581823
MKEVTVEAEGGAPGVVQEGGKGTTVRPDIHNSAMKILRAREPYNGYTEEVGEKPSGFEVMGWYLYEFCFYFVQTVLVPVVFPLIISQLQPLPAADSLQEWNKNHPTKHCSQKEFHLYSKLTNHTIRTSGGSNFSALEWTSIAWATGLALAAPILGFISFHLDGHFPKLITAAATGIGVFFCLPAGFFKVTAIFIPYIAGIVAASTVASAAHTHHLGLMIRCFTGPTLKRSEFSIRQAVSSRLSLHATAAGCLGAALISSFTYHMLRELNYNDRDVMSLWVVSIFSGLIWLVGVLHIVTAIGRTTDSISFSSRLHPFSIFKYPHAIGGLAGVFLSSFTTMSIFTGGVIFIVGQLCIKPLHLLYLWLTYFLFPLVSLSLLQPLLHVIKMNSVKMQIVGFLLSLLSSGFGFYYGHSHWKWGHLVLFGAVQSTATGILYAFGRLLVLDCAPSGKEGAFSIWYAWMRAAGLCVGFTVGSVAPGRVRTSFGVAFCTAIAGIVVLLFGNISDVGGAVAAGHVRDECERSSAVLPGLDSKESARV

SEQ ID NO: 54417 - protein, 504 aa, Glycine max
  peptide (1)..(504): Ceres Seq. ID no. 12581824
MKILRAREPYNGYTEEVGEKPSGFEVMGWYLYEFCFYFVQTVLVPVVFPLIISQLQPLPAADSLQEWNKNHPTKHCSQKEFHLYSKLTNHTIRTSGGSNFSALEWTSIAWATGLALAAPILGFISFHLDGHFPKLITAAATGIGVFFCLPAGFFKVTAIFIPYIAGIVAASTVASAAHTHHLGLMIRCFTGPTLKRSEFSIRQAVSSRLSLHATAAGCLGAALISSFTYHMLRELNYNDRDVMSLWVVSIFSGLIWLVGVLHIVTAIGRTTDSISFSSRLHPFSIFKYPHAIGGLAGVFLSSFTTMSIFTGGVIFIVGQLCIKPLHLLYLWLTYFLFPLVSLSLLQPLLHVIKMNSVKMQIVGFLLSLLSSGFGFYYGHSHWKWGHLVLFGAVQSTATGILYAFGRLLVLDCAPSGKEGAFSIWYAWMRAAGLCVGFTVGSVAPGRVRTSFGVAFCTAIAGIVVLLFGNISDVGGAVAAGHVRDECERSSAVLPGLDSKESARV

SEQ ID NO: 54418 - DNA, 1592 bp, Glycine max
  misc_feature (1)..(1592): Ceres Seq. ID no. 14303366
attacacaattcaagcaccttcttctctcgtgtttcacaaactaaagaacaacaatatgcctccaatcttgccggatttctccaactcggtgaaactcaagtacgtgaaactagggtaccaatacctggtgaaccacattctgactctcactctcatacccatgatgatcgccatcttcatggagattctacgcttaggccctgaagagatcctgaacctctggcactccctccacttggaccttgtccaaatcctctgctccgccttcctcatcatcttcatcgccaccgtctacttcatgtccaaaccccgcaccatctacctcgtcgactacgcctgcttcaagccacccgtcacctgccgcgtccccttcgcaaccttcatggaacactccaggctcatccttaaagacaaccctaagagcgtcgagttccaaatgcgtattctcgaacgttccggtctcggtgaagaaacatgtctccccccagcaatccactacatccctcccaagcccaccatggaggccgcccgaggagaagccgaacttgttatcttctccgccatggattctttgttcaacaaaacaggtctcaagcctaaggacatagatattcttattgtcaattgcagtcttttttctcccactccttctttgtctgctatggtcatcaacaagtactagctcaggagcaacataaagagcttcaacctctccggcatgggttgcagtgatggcttgatatccgttgacttggctcgtgaccttctccaggttcaccctaactcaaacgccgtcgttgtaagcaccgagatcatcacccctaactactaccaaggcaaagagagagccatgcttcttcctaattgcctcttccgaatggggggtgctgctattctcttatccaaccgaacctccgaacgcaggagagccaagtacaggttggtgcacgttgttcgcactcacaaaggcgctgatgacaaagcctaccgttgcgtttttgaagaggaagacagagaagggaaagtggggatttcacttcagaaggatctcatggctattgcaggtgaggctctcaagtctaacattactactatgggtcctcttgttcttccggcttccgagcagttgctgttccttctcactctcattgggaggaaaatcttcaaccccaaatggaagccttatattcctgacttcaaacaagcctttgagcacttctgcatccacgctggtggacgtgctgtgattgatgagcttcagaagaatcttcagctttctactgaacacgttgaggcttctagaatgacccttcacaggtttgggaacacttcgtcttcttcgctgtggtatgagctcaactacattgagtccaaggggaggatgaagaagggtgatagggtgtggcagatagcgtttgggagtggctttaaatgcaacagtgctgtgtggaagtgcaacagaagcattaagacaccggttgatgggccttgggctgattgcattgatcgttacccggtcgatattcctgagatcgttaagctctaggatggagaattgttcaagaacaagaagataattgcttattttatg

SEQ ID NO: 54419 - protein, 275 aa, Glycine max
  peptide (1)..(275): Ceres Seq. ID no. 14303367
MGCSDGLISVDLARDLLQVHPNSNAVVVSTEIITPNYYQGKERAMLLPNCLFRMGGAAILLSNRTSERRRAKYRLVHVVRTHKGADDKAYRCVFEEEDREGKVGISLQKDLMAIAGEALKSNITTMGPLVLPASEQLLFLLTLIGRKIFNPKWKPYIPDFKQAFEHFCIHAGGRAVIDELQKNLQLSTEHVEASRMTLHRFGNTSSSSLWYELNYIESKGRMKKGDRVWQIAFGSGFKCNSAVWKCNRSIKTPVDGPWADCIDRYPVDIPEIVKL

SEQ ID NO: 54420 - protein, 231 aa, Glycine max
  peptide (1)..(231): Ceres Seq. ID no. 14303368
MLLPNCLFRMGGAAILLSNRTSERRRAKYRLVHVVRTHKGADDKAYRCVFEEEDREGKVGISLQKDLMAIAGEALKSNITTMGPLVLPASEQLLFLLTLIGRKIFNPKWKPYIPDFKQAFEHFCIHAGGRAVIDELQKNLQLSTEHVEASRMTLHRFGNTSSSSLWYELNYIESKGRMKKGDRVWQIAFGSGFKCNSAVWKCNRSIKTPVDGPWADCIDRYPVDIPEIVKL

SEQ ID NO: 54421 - protein, 226 aa, Glycine max
  peptide (1)..(226): Ceres Seq. ID no. 14303369
YTIQAPSSLVFHKLKNNNMPPILPDFSNSVKLKYVKLGYQYLVNHILTLTLIPMMIAIFMEILRLGPEEILNLWHSLHLDLVQILCSAFLIIFIATVYFMSKPRTIYLVDYACFKPPVTCRVPFATFMEHSRLILKDNPKSVEFQMRILERSGLGEETCLPPAIHYIPPKPTMEAARGEAELVIFSAMDSLFNKTGLKPKDIDILIVNCSLFSPTPSLSAMVINKY

SEQ ID NO: 54422 - DNA, 1477 bp, Glycine max
  misc_feature (1)..(1477): Ceres Seq. ID no. 14307431
aaaaaattgccaccttctacatactgtccgaaagcagcaagttcagtacttcagttcactgcgccttcctctccttttcgatggcaaagggttgctccaacaacacttatgaagaggctagaaaacaaagacttgaagaaaacaaaaagaggtttgaggatttgggaatttcgaggatttcaaaaaacttgactgaaatcgcaagttctgcaaagaagaagctgcgtcatgttcctaaacagaaaacaaagaagacaaatgttgaagtggaacctaggcgatcttctcgtgtgcgaaacccagttcgttcataccgtgaagatgtgaacatagaccttccacccttgcggaagaggtcaaggtcaagttcttcatcatggggaagttacattgcgaggcctctagatgaaatcaaagaagcaacaaaagaggaaagactttgtgctctggaggctgcagaggcaatccaaatcaatttgaactcatcaaatccatcatttatcaagtcaatggttcggtctcatgtttatagctgcttttggttgggtcttccttctaaattttgtgaggaacatctgccaaaaactttacatgacatggttttagaagatgaaaatggctcagaatatgaggctgtttacattggcaacagagctgggcttagtggtggttggagagcatttgcattggatcataaactcgatgatggtgatgcccttgtttttgaattgattgaagcttcaagatttaagatttatattgtaagagcatttccagattcagttgaagaaaagggaaataatattttagaggaagaaggaaatgtgcgtgcaaccaaagcaccaaaagctgcctgtaatcttgaatcggaatgtaagacaaaaaagccaaaacaggctgcagtttatgaaactaaggaatcagagagttctcaggaatatcttctagatagcagcattgacaacgaagtgaaaccacagggagtaaatccaactaataaggaaactaaattttctcagaaaaatacgccaaagaaatctaaatatcctgctactgctgattcaaaagggaaagtgcaaattaaaactgagaaaccaaaggcatctataaagctgtcaaacaatacaaggaagtcgaaagaaggtataaatgaaattggtggttcagacaagttagagaagaatgagtttgttcaggatgctgatagcaagttagagaaagttgaactagttgaagaagcaagaaaatgtgtcacaaaaaagctagaaaaaaccagctccaaatttttcagaaagaaagcataatcttggagctaatgactggtaaattataaaatgtattaagacttgtatggagtatattatggtagtagacaatattttctgttgtggattaatggaagtaaagtgtaagatatgtatttgatttgatatctatcagtatgttagttataatacataaaaaacaatgttttgtt

SEQ ID NO: 54423 - protein, 433 aa, Glycine max
  peptide (1)..(433): Ceres Seq. ID no. 14307432
KIATFYILSESSKFSTSVHCAFLSFSMAKGCSNNTYEEARKQRLEENKKRFEDLGISRISKNLTEIASSAKKKLRHVPKQKTKKTNVEVEPRRSSRVRNPVRSYREDVNIDLPPLRKRSRSSSSSWGSYIARPLDEIKEATKEERLCALEAAEAIQINLNSSNPSFIKSMVRSHVYSCFWLGLPSKFCEEHLPKTLHDMVLEDENGSEYEAVYIGNRAGLSGGWRAFALDHKLDDGDALVFELIEASRFKIYIVRAFPDSVEEKGNNILEEEGNVRATKAPKAACNLESECKTKKPKQAAVYETKESESSQEYLLDSSIDNEVKPQGVNPTNKETKFSQKNTPKKSKYPATADSKGKVQIKTEKPKASIKLSNNTRKSKEGINEIGGSDKLEKNEFVQDADSKLEKVELVEEARKCVTKKLEKTSSKFFRKKA

SEQ ID NO: 54424 - protein, 407 aa, Glycine max
  peptide (1)..(407): Ceres Seq. ID no. 14307433
MAKGCSNNTYEEARKQRLEENKKRFEDLGISRISKNLTEIASSAKKKLRHVPKQKTKKTNVEVEPRRSSRVRNPVRSYREDVNIDLPPLRKRSRSSSSSWGSYIARPLDEIKEATKEERLCALEAAEAIQINLNSSNPSFIKSMVRSHVYSCFWLGLPSKFCEEHLPKTLHDMVLEDENGSEYEAVYIGNRAGLSGGWRAFALDHKLDDGDALVFELIEASRFKIYIVRAFPDSVEEKGNNILEEEGNVRATKAPKAACNLESECKTKKPKQAAVYETKESESSQEYLLDSSIDNEVKPQGVNPTNKETKFSQKNTPKKSKYPATADSKGKVQIKTEKPKASIKLSNNTRKSKEGINEIGGSDKLEKNEFVQDADSKLEKVELVEEARKCVTKKLEKTSSKFFRKKA

SEQ ID NO: 54425 - protein, 264 aa, Glycine max
  peptide (1)..(264): Ceres Seq. ID no. 14307434
MVRSHVYSCFWLGLPSKFCEEHLPKTLHDMVLEDENGSEYEAVYIGNRAGLSGGWRAFALDHKLDDGDALVFELIEASRFKIYIVRAFPDSVEEKGNNILEEEGNVRATKAPKAACNLESECKTKKPKQAAVYETKESESSQEYLLDSSIDNEVKPQGVNPTNKETKFSQKNTPKKSKYPATADSKGKVQIKTEKPKASIKLSNNTRKSKEGINEIGGSDKLEKNEFVQDADSKLEKVELVEEARKCVTKKLEKTSSKFFRKKA

SEQ ID NO: 54426 - DNA, 1697 bp, Glycine max
  misc_feature (1)..(1697): Ceres Seq. ID no. 14310452
gatttcagaacacaatggagcaaccacaactcttgcatgacccaaatttccctctcttcaaaaccccttcttcacccgccgtaaccaccaccgccactcacaaacccctttcaaccacacccatcaccaccacctccaacggtgagcgtcgagaagaccactccgtcgaaaccgccgccaccgttgccgccgacgcggaggcgttcggcgacctcgggctggcggaatgggcggtgaagacgtgccgggagctcgggatgcggaggccgcgccccgtgcagcggcggtgcatcccgcgcgtgctggagggccggcacgtgctgggcatcgacgagacagggagcgggaagacggccgccttcgcgctcccgatcctgcaccgtctcgccgagcatcccttcggcgtgttcgccctcgtggtgacgcccacgcgcgagctcgccttccagctcgccgagcagttccgcgccctcggctccgccgtgcacctccgcatcacggtggttgtcgggggcatggacatgctcaggcagaccaaggagctcgccgcgaggccgcacctcgtcattgccacccccgggaggatccacgccctgctccgcaataaccctgatattccccccgttttctccagaactaagttccttgtcttggatgaagcagatcgtgtcctggatgttggttttcaggaggaattgagatttatctttcagtgcttaccagaaaatcgacaaaacctgttcttttctgcaacaactacaagtaatctgcaaaagttgcgtgaacgttaccaagataagatgtatgtctatgaggcttatgaaggttttaaaacagttgaaacacttaagcaacaggctatattcatccctaaaaaggtgaaggatgtatatttgatgcatattttggctaaaatggaagatatgggaattcggtctgccattgtatttatctcaacatgcagagattgtcatcgtttaagtttaatgctggaagtgcttgatcaagaagcagcagctctgtattcattcaaatcacaagctcagaggcttgaagcacttcaccaatttaaatcaggaaaggtttcaatactgctagcaactgatgttgctagccgcggtttggatattcctacagttgatcttgtcatcaattatgatgttccaaggtttccacgagattatattcatcgtgtaggtcgtacagcaagagcaggtagagggggactggctttgagtcttgtcacccagaatgatgttgatcttattcatgaaatagaagcacttattgagaagcaacttgaaatgattgaatacaaagaaaatgaggtgctttctctcatgaaaaaggttttcagtgctaagaacgtagcagaaatgaagatgatagatgatggctttgaagagaaagctaaagagcggaaaaaacagaagctgaaaatgctagcagataaaggattgttaaataaaagaagtaaaaagagaaaacgaaataaagaatttgcagaggaaggggaagaacaaaaaaatgaggttttcactgttaggaatgtgacggaaatgaagaggatggatgaggatggcattgaggagaaagcagaagaggggggaatacaaaaacttaaaatgcgaacacagaaaggtttgtcaaagaaaaaaaagttaaaagaaagaaataacgaatttgcagatgaaagg

SEQ ID NO: 54427 - protein, 565 aa, Glycine max
  peptide (1)..(565): Ceres Seq. ID no. 14310453
FQNTMEQPQLLHDPNFPLFKTPSSPAVTTTATHKPLSTTPITTTSNGERREDHSVETAATVAADAEAFGDLGLAEWAVKTCRELGMRRPRPVQRRCIPRVLEGRHVLGIDETGSGKTAAFALPILHRLAEHPFGVFALVVTPTRELAFQLAEQFRALGSAVHLRITVVVGGMDMLRQTKELAARPHLVIATPGRIHALLRNNPDIPPVFSRTKFLVLDEADRVLDVGFQEELRFIFQCLPENRQNLFFSATTTSNLQKLRERYQDKMYVYEAYEGFKTVETLKQQAIFIPKKVKDVYLMHILAKMEDMGIRSAIVFISTCRDCHRLSLMLEVLDQEAAALYSFKSQAQRLEALHQFKSGKVSILLATDVASRGLDIPTVDLVINYDVPRFPRDYIHRVGRTARAGRGGLALSLVTQNDVDLIHEIEALIEKQLEMIEYKENEVLSLMKKVFSAKNVAEMKMIDDGFEEKAKERKKQKLKMLADKGLLNKRSKKRKRNKEFAEEGEEQKNEVFTVRNVTEMKRMDEDGIEEKAEEGGIQKLKMRTQKGLSKKKKLKERNNEFADER

SEQ ID NO: 54428 - protein, 561 aa, Glycine max
  peptide (1)..(561): Ceres Seq. ID no. 14310454
MEQPQLLHDPNFPLFKTPSSPAVTTTATHKPLSTTPITTTSNGERREDHSVETAATVAADAEAFGDLGLAEWAVKTCRELGMRRPRPVQRRCIPRVLEGRHVLGIDETGSGKTAAFALPILHRLAEHPFGVFALVVTPTRELAFQLAEQFRALGSAVHLRITVVVGGMDMLRQTKELAARPHLVIATPGRIHALLRNNPDIPPVFSRTKFLVLDEADRVLDVGFQEELRFIFQCLPENRQNLFFSATTTSNLQKLRERYQDKMYVYEAYEGFKTVETLKQQAIFIPKKVKDVYLMHILAKMEDMGIRSAIVFISTCRDCHRLSLMLEVLDQEAAALYSFKSQAQRLEALHQFKSGKVSILLATDVASRGLDIPTVDLVINYDVPRFPRDYIHRVGRTARAGRGGLALSLVTQNDVDLIHEIEALIEKQLEMIEYKENEVLSLMKKVFSAKNVAEMKMIDDGFEEKAKERKKQKLKMLADKGLLNKRSKKRKRNKEFAEEGEEQKNEVFTVRNVTEMKRMDEDGIEEKAEEGGIQKLKMRTQKGLSKKKKLKERNNEFADER

SEQ ID NO: 54429 - protein, 480 aa, Glycine max
  peptide (1)..(480): Ceres Seq. ID no. 14310455
MRRPRPVQRRCIPRVLEGRHVLGIDETGSGKTAAFALPILHRLAEHPFGVFALVVTPTRELAFQLAEQFRALGSAVHLRITVVVGGMDMLRQTKELAARPHLVIATPGRIHALLRNNPDIPPVFSRTKFLVLDEADRVLDVGFQEELRFIFQCLPENRQNLFFSATTTSNLQKLRERYQDKMYVYEAYEGFKTVETLKQQAIFIPKKVKDVYLMHILAKMEDMGIRSAIVFISTCRDCHRLSLMLEVLDQEAAALYSFKSQAQRLEALHQFKSGKVSILLATDVASRGLDIPTVDLVINYDVPRFPRDYIHRVGRTARAGRGGLALSLVTQNDVDLIHEIEALIEKQLEMIEYKENEVLSLMKKVFSAKNVAEMKMIDDGFEEKAKERKKQKLKMLADKGLLNKRSKKRKRNKEFAEEGEEQKNEVFTVRNVTEMKRMDEDGIEEKAEEGGIQKLKMRTQKGLSKKKKLKERNNEFADER

SEQ ID NO: 54430 - DNA, 1622 bp, Glycine max
  misc_feature (1)..(1622): Ceres Seq. ID no. 15176571
cccaaaaaggaacctttcactttgcctgcacccacaccgctctctctctctccacaactctttctcacccgctagggtttccttccatcgcatcttgatttcgcaacctcgtctagcaattctccatggagggtgctgggatggaagagaataatattattaatgatgataataagtctgaggcgcatttgacttctgccgctgcttttgtggagggtggaattcaggatgcttgtgatgatgcttgcagcatatgccttgaagctttctgtgatagtgatccctccacggtgacaagttgcaagcatgagtttcatcttcagtgcattctggaatggtgtcaaagaagctcccagtgccccatgtgttggcaacctatcagtctcaaagatccaacaagccaagaattacttgaggcagtggaaagagagcggaactttaggttcaatccatctagaaatgccaccatatttcatcatccaacactgggggattttgagttacaacatttgccagttggagctagtgatgctgatcttgaagagcgcattatccaacacttagctgctgcagcagcgatgggaagagcacggcacgttgctagaagagaaggccagagaaacagatcatcagctcaaggtcgccaacattttttggttttttcaactcatcctaattcaccacccatggctcctgcttcttcctctccatctcagaggggggatgatgaaccaactcctacaattgatgttgccaatctgtctccaactcctgcaactggagaagaatcatcgcagccgactttagtttcgcctgttcaagcagaacaggtgtctgcttcaggatctggaactactgctcttgctacagatcatcagggatcatcctacaacaataggagatctcctaatcagtcatctccaagtagtcaagacagagcaggaccatcagaattacagtcattttcagaatctctgaaatctaaactgaatgctgtgtcaacaagatacaaggaatcaatttccaagagcacaagagggtggaaggagagatggttctcccgtaacaacactatgtctgaccttggatctgaagttaggcgagaagttaatgcagggattgcaactgtgtcacgcatgatggaacgcctggagaccagagacaataatagaagcaatagcaattctgctccaagtaatatagaggatggttcagtgcagggatctaatgatcagactttaacagcaggcaatgaagggggctctcttgtgagagacaataacacaaaagcttcttgtgctgcaggttctagttcgaactaagcatatagaaggaattgcttgaactctgagatttgttttgtccaaaaggaagaaatagaattgcccattggggatgtgaaattccatggatggcattgcctattggctggcgcagaccaggcaagtgataatccattggcctgcagaagaccaacaattgtgatattggaaataaaaaacttaaaaaaggaagcagtggtctctttcgtttgaaacctaggaacctatatatgattgtatattcacattgtaaacttatttatggatattcctcagataatctttgcataaagtactgtg

SEQ ID NO: 54431 - protein, 398 aa, Glycine max
  peptide (1)..(398): Ceres Seq. ID no. 15176572
MEGAGMEENNIINDDNKSEAHLTSAAAFVEGGIQDACDDACSICLEAFCDSDPSTVTSCKHEFHLQCILEWCQRSSQCPMCWQPISLKDPTSQELLEAVERERNFRFNPSRNATIFHHPTLGDFELQHLPVGASDADLEERIIQHLAAAAAMGRARHVARREGQRNRSSAQGRQHFLVFSTHPNSPPMAPASSSPSQRGDDEPTPTIDVANLSPTPATGEESSQPTLVSPVQAEQVSASGSGTTALATDHQGSSYNNRRSPNQSSPSSQDRAGPSELQSFSESLKSKLNAVSTRYKESISKSTRGWKERWFSRNNTMSDLGSEVRREVNAGIATVSRMMERLETRDNNRSNSNSAPSNIEDGSVQGSNDQTLTAGNEGGSLVRDNNTKASCAAGSSSN

SEQ ID NO: 54432 - protein, 393 aa, Glycine max
  peptide (1)..(393): Ceres Seq. ID no. 15176573
MEENNIINDDNKSEAHLTSAAAFVEGGIQDACDDACSICLEAFCDSDPSTVTSCKHEFHLQCILEWCQRSSQCPMCWQPISLKDPTSQELLEAVERERNFRFNPSRNATIFHHPTLGDFELQHLPVGASDADLEERIIQHLAAAAAMGRARHVARREGQRNRSSAQGRQHFLVFSTHPNSPPMAPASSSPSQRGDDEPTPTIDVANLSPTPATGEESSQPTLVSPVQAEQVSASGSGTTALATDHQGSSYNNRRSPNQSSPSSQDRAGPSELQSFSESLKSKLNAVSTRYKESISKSTRGWKERWFSRNNTMSDLGSEVRREVNAGIATVSRMMERLETRDNNRSNSNSAPSNIEDGSVQGSNDQTLTAGNEGGSLVRDNNTKASCAAGSSSN

SEQ ID NO: 54433 - protein, 319 aa, Glycine max
  peptide (1)..(319): Ceres Seq. ID no. 15176574
MCWQPISLKDPTSQELLEAVERERNFRFNPSRNATIFHHPTLGDFELQHLPVGASDADLEERIIQHLAAAAAMGRARHVARREGQRNRSSAQGRQHFLVFSTHPNSPPMAPASSSPSQRGDDEPTPTIDVANLSPTPATGEESSQPTLVSPVQAEQVSASGSGTTALATDHQGSSYNNRRSPNQSSPSSQDRAGPSELQSFSESLKSKLNAVSTRYKESISKSTRGWKERWFSRNNTMSDLGSEVRREVNAGIATVSRMMERLETRDNNRSNSNSAPSNIEDGSVQGSNDQTLTAGNEGGSLVRDNNTKASCAAGSSSN

SEQ ID NO: 54434 - DNA, 986 bp, Glycine max
  misc_feature (1)..(986): Ceres Seq. ID no. 15169682
ggtcatagcacaaccttctatcgcttcacacacaagttcattcacagagagatagaatcactgaagagcttcaatggcggtttctctctctgttactcctctttctctctccaattcttctccttctctatcttccaagccaaagtttccatctttgtgctttttctctggcaacaacaccttgagggtcaaatgcccaaaaccttcgcactcaacaactgttgttcatgttgctccagaagcgttggattcttcacttgatcccttagacccacctccagaaacccttgatgatgactctgacgccaccacctttgaggttggtgacttggggactcctagcacttcggcaattagcattggtggcgatgcagatacaatggcaccaaagcagaagattagaatcaagcttagatcttactgggtgcccttgatagaggattcctgcaagcagatattagatgtagcaaggaataccaatgcaaaaacgatgggacctgtgccattaccaaccaagaagcgaatctactgtgttcttaaatccccacacgtacataaggatgctcggttccatttcgagatcagaacacaccagcgtctcattgatattctataccctacagctcaaacaatagattctctgatgcaactagatcttcctgctggtgttgatgtggaggtcaagctctagagatattttcttttcaggttgctaaccattttgaatctgagtgaggttcaacttgttatatcaatggccaaaatatattggcagatatcatgtatttcaatgaacaatgttaaaatccttttgcttgctttccccttttgtccccaacaaggtttcaattagtgtattcctgatttcctgttcttgcttagatatttgtatatcatatacaatgttatgtaattctgatgtccccacaatcgcttcatttttttctctggtaaattatgtttatgaatttatttattttgatctc

SEQ ID NO: 54435 - protein, 205 aa, Glycine max
  peptide (1)..(205): Ceres Seq. ID no. 15169683
MAVSLSVTPLSLSNSSPSLSSKPKFPSLCFFSGNNTLRVKCPKPSHSTTVVHVAPEALDSSLDPLDPPPETLDDDSDATTFEVGDLGTPSTSAISIGGDADTMAPKQKIRIKLRSYWVPLIEDSCKQILDVARNTNAKTMGPVPLPTKKRIYCVLKSPHVHKDARFHFEIRTHQRLIDILYPTAQTIDSLMQLDLPAGVDVEVKL

SEQ ID NO: 54436 - protein, 103 aa, Glycine max
  peptide (1)..(103): Ceres Seq. ID no. 15169684
MAPKQKIRIKLRSYWVPLIEDSCKQILDVARNTNAKTMGPVPLPTKKRIYCVLKSPHVHKDARFHFEIRTHQRLIDILYPTAQTIDSLMQLDLPAGVDVEVKL

SEQ ID NO: 54437 - DNA, 1374 bp, Glycine max
  misc_feature (1)..(1374): Ceres Seq. ID no. 14307022
gagccattcttttccaccacaagataagaaaaaagaaaaaatgtttgcagggaaaggggctgtttggttctccagagcggtggcgttggcagcaatcgcggtggtagcttgcgttggccttacacaggcccaacccgaggccaggttcaactgcaacagcgcgaacatccccacgtgtcgcgcgctcataagctactctcacccgaacaccaccaccctcggcgacatccaaaagctcttcaacgtgaaacacatcctcgacatcgtgggagcgaacaacctcccaagcaacgccacaaaaacatacgcggtgggccccaacgaggttgtgaaggtccctttcccgtgcaggtgcagcaacaacacgggactctcggaccgtgttccgctgtacaggatcaagaagggggacacgctgtactacatcgcgacgacgacgttcgcgggtctgatgaagtggccgcagatccaggtggccaataacatagccaacgcgaataatatcaccaccggggacatgctttatattccgctgccgtgtagctgcgacgaggtgggtgggaagagtgtggtgcactatgcgcatcttgtggcgccgcagagcaccgtggaggggattgcggaggagtttggtaccactcagcagatactgctcaaccttaatggaatttctgaccccaaaaatcttcaggcagggcagattctcgatgttcccctccaagcttgttcctcgaatgtgaaaaatgattcattggactatcccttgcttgtcccaaatgctacttacgcctatactgcccatgaatgcgtcaaatgcaagtgtgactccagtaacaatttcatattacaatgtgagccatcccaactcaaaccaaccaactggtctgtttgcccctctatggaatgctcagccaacgtcttgattggcaaaaccatttcctcagattcctgcaatcgcacaacctgcgcctatactggttatagattccacaatatctctgcagaagctgtaactgagaacacttgtgctgtgccgccgactccgagtggttcaggaggatcaactggttctgattcaggagcgtcaaggagcaccttgcaaggcttgttttggagtaatcttttcattgtcattcactttgtcctctttcttgtctatgttttgtagtaaaatagaataccctgcacttccgcagctattttttataatagattagtccactctgtaatttgctgagttcagatagattggttcgtgttgtgagtgttgcaataactgaaccttttgtgtttttcctttgcaatatttgtatcttaaataaataaatatgttccgaagaataagagtgatgtctaatctattttaatgtgatc

SEQ ID NO: 54438 - protein, 388 aa, Glycine max
  peptide (1)..(388): Ceres Seq. ID no. 14307023
SHSFPPQDKKKEKMFAGKGAVWFSRAVALAAIAVVACVGLTQAQPEARFNCNSANIPTCRALISYSHPNTTTLGDIQKLFNVKHILDIVGANNLPSNATKTYAVGPNEVVKVPFPCRCSNNTGLSDRVPLYRIKKGDTLYYIATTTFAGLMKWPQIQVANNIANANNITTGDMLYIPLPCSCDEVGGKSVVHYAHLVAPQSTVEGIAEEFGTTQQILLNLNGISDPKNLQAGQILDVPLQACSSNVKNDSLDYPLLVPNATYAYTAHECVKCKCDSSNNFILQCEPSQLKPTNWSVCPSMECSANVLIGKTISSDSCNRTTCAYTGYRFHNISAEAVTENTCAVPPTPSGSGGSTGSDSGASRSTLQGLFWSNLFIVIHFVLFLVYVL

SEQ ID NO: 54439 - protein, 375 aa, Glycine max
  peptide (1)..(375): Ceres Seq. ID no. 14307024
MFAGKGAVWFSRAVALAAIAVVACVGLTQAQPEARFNCNSANIPTCRALISYSHPNTTTLGDIQKLFNVKHILDIVGANNLPSNATKTYAVGPNEVVKVPFPCRCSNNTGLSDRVPLYRIKKGDTLYYIATTTFAGLMKWPQIQVANNIANANNITTGDMLYIPLPCSCDEVGGKSVVHYAHLVAPQSTVEGIAEEFGTTQQILLNLNGISDPKNLQAGQILDVPLQACSSNVKNDSLDYPLLVPNATYAYTAHECVKCKCDSSNNFILQCEPSQLKPTNWSVCPSMECSANVLIGKTISSDSCNRTTCAYTGYRFHNISAEAVTENTCAVPPTPSGSGGSTGSDSGASRSTLQGLFWSNLFIVIHFVLFLVYVL

SEQ ID NO: 54440 - protein, 238 aa, Glycine max
  peptide (1)..(238): Ceres Seq. ID no. 14307025
MKWPQIQVANNIANANNITTGDMLYIPLPCSCDEVGGKSVVHYAHLVAPQSTVEGIAEEFGTTQQILLNLNGISDPKNLQAGQILDVPLQACSSNVKNDSLDYPLLVPNATYAYTAHECVKCKCDSSNNFILQCEPSQLKPTNWSVCPSMECSANVLIGKTISSDSCNRTTCAYTGYRFHNISAEAVTENTCAVPPTPSGSGGSTGSDSGASRSTLQGLFWSNLFIVIHFVLFLVYVL

SEQ ID NO: 54441 - DNA, 1339 bp, Glycine max
  misc_feature (1)..(1339): Ceres Seq. ID no. 15175488
cgggacatcaagctaagaaagggaaagagaaagatcacagaaagagaattcatctttctttgcgaacagctaaaaacctcaaagggaaagaaggcatgaatagaggtgttcttcagagctcaccagtgcaacaaatgatgactggaaaccctaactggtggaacatcaatatcaatagcatggctccacaagctcctcctttcttgtccactcctaacaactttcctatcccttgtgctcccacttctcttccctttccttcttggcatgagaatcaagatcttccagagtcatggagccagctacttatgagtggagtggtggatgaacaaggtaaggctgggatgggtcagtttattcagactaagaagttggagagctgggaggatcaaatgctaggtcaggctccaaacgcttctcttgttgatgttaaacaagaaaacttggttaacagctatgcatatgggcatggaagcgaagaacttcagtcatcaaagccatcttggtctccaaaatcatgtgtgacaacaagtttcagtagcaacatgttagatttctctaacaataagacagatgcaaggcatccaccaccagatctatcttctgagtgcaacagcactgcagctggtggggcactcaagaaagctagggttcaaccctctgctacaacgcagactacgttcaaggttaggaaggaaaagctaggtgagagaattacggcccttcatcagctcgtttccccatttgggaagactgacacggcctctgtcttgttagaagctattgggtatatcagattccttcagagtcaaattgaggctcttagcttaccatacttgagcggtggatcagggaacacgaggcagcaacattctgttcaaggagagaagagatgtatattccctgaagaccccggtcagctgctggatgaaaactgcttgaagaggaaagcagctggagagccggatactcaagaagaaccaaagaaggggctgaggagtagagggttgtgtctggtgccagtgtcatgcacactgcaagttggaagtgacaatggagcagattattgggctccagccctaggagggggctttcgttaggagttttttacaaatggggcagcatatacatataaatatggtagcatgcatagaggtaaattcatggaaatgatataacatcatgagcagtcaatctgctaaaaaaatctaaggctgattgctcatgatgctatacttcattattcctgaataaaatgtgtgctagctagccgtgacagtatttgcaagcccttgaagacttcataattcatggaaatcaagcttaattagttttcttt

SEQ ID NO: 54442 - protein, 365 aa, Glycine max
  peptide (1)..(365): Ceres Seq. ID no. 15175489
GHQAKKGKEKDHRKRIHLSLRTAKNLKGKEGMNRGVLQSSPVQQMMTGNPNWWNININSMAPQAPPFLSTPNNFPIPCAPTSLPFPSWHENQDLPESWSQLLMSGVVDEQGKAGMGQFIQTKKLESWEDQMLGQAPNASLVDVKQENLVNSYAYGHGSEELQSSKPSWSPKSCVTTSFSSNMLDFSNNKTDARHPPPDLSSECNSTAAGGALKKARVQPSATTQTTFKVRKEKLGERITALHQLVSPFGKTDTASVLLEAIGYIRFLQSQIEALSLPYLSGGSGNTRQQHSVQGEKRCIFPEDPGQLLDENCLKRKAAGEPDTQEEPKKGLRSRGLCLVPVSCTLQVGSDNGADYWAPALGGGFR

SEQ ID NO: 54443 - protein, 334 aa, Glycine max
  peptide (1)..(334): Ceres Seq. ID no. 15175490
MNRGVLQSSPVQQMMTGNPNWWNININSMAPQAPPFLSTPNNFPIPCAPTSLPFPSWHENQDLPESWSQLLMSGVVDEQGKAGMGQFIQTKKLESWEDQMLGQAPNASLVDVKQENLVNSYAYGHGSEELQSSKPSWSPKSCVTTSFSSNMLDFSNNKTDARHPPPDLSSECNSTAAGGALKKARVQPSATTQTTFKVRKEKLGERITALHQLVSPFGKTDTASVLLEAIGYIRFLQSQIEALSLPYLSGGSGNTRQQHSVQGEKRCIFPEDPGQLLDENCLKRKAAGEPDTQEEPKKGLRSRGLCLVPVSCTLQVGSDNGADYWAPALGGGFR

SEQ ID NO: 54444 - protein, 321 aa, Glycine max
  peptide (1)..(321): Ceres Seq. ID no. 15175491
MMTGNPNWWNININSMAPQAPPFLSTPNNFPIPCAPTSLPFPSWHENQDLPESWSQLLMSGVVDEQGKAGMGQFIQTKKLESWEDQMLGQAPNASLVDVKQENLVNSYAYGHGSEELQSSKPSWSPKSCVTTSFSSNMLDFSNNKTDARHPPPDLSSECNSTAAGGALKKARVQPSATTQTTFKVRKEKLGERITALHQLVSPFGKTDTASVLLEAIGYIRFLQSQIEALSLPYLSGGSGNTRQQHSVQGEKRCIFPEDPGQLLDENCLKRKAAGEPDTQEEPKKGLRSRGLCLVPVSCTLQVGSDNGADYWAPALGGGFR

SEQ ID NO: 54445 - DNA, 621 bp, Glycine max
  misc_feature (1)..(621): Ceres Seq. ID no. 15176290
atatatcatcagcctcagccatgtcttattcgctcttgcacctcctcttccttcagcaactacgatcttcgatagtgatttatcagattcttcctttgcggtcgaatcatggagcccatggacatcgttggtaaatcaaaggaagacgcttcgcttcctaaagcaacaatgacaaaaattattaaagagatgttacccccagatgtacgtgttgcaagagatgcccaagatctattgattgagtgttgtgtagagtttataaaccttgtctcgtcagaatccaatgaagtctgtaatagagaggataaacggacaattgcacctgagcatgtattgaaggctctacaggttctaggatttggtgagtacattgaagaagtttatgcagcatatgaacagcacaaactggagaccatgcaggactctttaagagggggtggtggtggtggtaaatggaacaatggagctgagatgactgaggaagaagcattagcagagcagcaaaggatgtttgcagaggcacgtgctaggatgaatggtggagccattgcttctaagcagccagatgctgaccaaagtttagatagctaactttaggatctttattgaagcataggcaag

SEQ ID NO: 54446 - protein, 160 aa, Glycine max
  peptide (1)..(160): Ceres Seq. ID no. 15176291
MEPMDIVGKSKEDASLPKATMTKIIKEMLPPDVRVARDAQDLLIECCVEFINLVSSESNEVCNREDKRTIAPEHVLKALQVLGFGEYIEEVYAAYEQHKLETMQDSLRGGGGGGKWNNGAEMTEEEALAEQQRMFAEARARMNGGAIASKQPDADQSLDS

SEQ ID NO: 54447 - protein, 157 aa, Glycine max
  peptide (1)..(157): Ceres Seq. ID no. 15176292
MDIVGKSKEDASLPKATMTKIIKEMLPPDVRVARDAQDLLIECCVEFINLVSSESNEVCNREDKRTIAPEHVLKALQVLGFGEYIEEVYAAYEQHKLETMQDSLRGGGGGGKWNNGAEMTEEEALAEQQRMFAEARARMNGGAIASKQPDADQSLDS

SEQ ID NO: 54448 - protein, 140 aa, Glycine max
  peptide (1)..(140): Ceres Seq. ID no. 15176293
MTKIIKEMLPPDVRVARDAQDLLIECCVEFINLVSSESNEVCNREDKRTIAPEHVLKALQVLGFGEYIEEVYAAYEQHKLETMQDSLRGGGGGGKWNNGAEMTEEEALAEQQRMFAEARARMNGGAIASKQPDADQSLDS

SEQ ID NO: 54449 - DNA, 1446 bp, Glycine max
  misc_feature (1)..(1446): Ceres Seq. ID no. 14313034
agaagcatttttttgcattgctttcatctgtctggaaagtggcatcacacgttgaccacaggcgaaatccatcaccctcctgtaatggtctctatttcgatcagagtttctatacttccattggccagccttcacaaaattccttgaagaaatcctctgaaaggatggcatttgcaaatttggccccgagcaagaatttagtagcagctgcacttgatgatatcacaactaggcaagtgaatgacaaagtcattctgtctaaccaaggggaagacatgccagtgagtgcagatcagctggatataacactggagtttgcaaaagaggatagcgacgtcctatcttcatttccatctgttataaatttatcaatacatgggactgaaccaacaccatctttaaataagctaacaggagaagatgatcttaaagttggtttgttcattgctgagaatcgtttcagggaggctgcaagagtttgtggagaagacagctctggatgggcatcatctgcattcccaaccaacgatacaaggtctcgacctggatccaggttacaatcctccggaaagcggaagtcttctgtatctgactcttctaagccttctaggtcaaagtccaaaaaagcttcaatggatcgtagtgaaatgcatccctatcaggctgactcaatgttccagtcaatgccatcacttaaagatctgagaattgatctcacttcattaactactgatgaagttggaattgatggtatggatagcattttctcctttgacttgaatggggaaagttcattggaaatggagagtgttggaatgatcccacatgattatgttgctggtttaatctcagaccttgatgatagtacagcattccctgaatatactgacattagataaggatgaaatcaagcctgaaatgcagttttgaaatgacctttggcttaccaagtggcatactcttggcaagttagtcttgatcagttcatgaattgctgttggcttacaattggaaatgcattcttgcagttcgctccttggcatgccatttttggatatacagacaaaacatttcaaaggctagcctgctgaaggtttcgatatgaaaatatagagatgtagaacgctgtcaatgatttaatttcttacttggaattatgtattggcttggtggttcagctcgaattttgacagcgccattcttccatagatcagtgctgattggtaagaagcccttcattttctcttccctctaatggtgcacatggatttgccttggatgttttgcatgctcacgtacatatgtttttagctgaggcatgcctagggtttagttctttaacttgcaacattttgttatgccaacagaacaatttagtcctttagtggctagttcattagtcccattcatttagaacaacacttcacatgatttaacatgagtttc

SEQ ID NO: 54450 - protein, 298 aa, Glycine max
  peptide (1)..(298): Ceres Seq. ID no. 14313035
KHFFALLSSVWKVASHVDHRRNPSPSCNGLYFDQSFYTSIGQPSQNSLKKSSERMAFANLAPSKNLVAAALDDITTRQVNDKVILSNQGEDMPVSADQLDITLEFAKEDSDVLSSFPSVINLSIHGTEPTPSLNKLTGEDDLKVGLFIAENRFREAARVCGEDSSGWASSAFPTNDTRSRPGSRLQSSGKRKSSVSDSSKPSRSKSKKASMDRSEMHPYQADSMFQSMPSLKDLRIDLTSLTTDEVGIDGMDSIFSFDLNGESSLEMESVGMIPHDYVAGLISDLDDSTAFPEYTDIR

SEQ ID NO: 54451 - protein, 244 aa, Glycine max
  peptide (1)..(244): Ceres Seq. ID no. 14313036
MAFANLAPSKNLVAAALDDITTRQVNDKVILSNQGEDMPVSADQLDITLEFAKEDSDVLSSFPSVINLSIHGTEPTPSLNKLTGEDDLKVGLFIAENRFREAARVCGEDSSGWASSAFPTNDTRSRPGSRLQSSGKRKSSVSDSSKPSRSKSKKASMDRSEMHPYQADSMFQSMPSLKDLRIDLTSLTTDEVGIDGMDSIFSFDLNGESSLEMESVGMIPHDYVAGLISDLDDSTAFPEYTDIR

SEQ ID NO: 54452 - protein, 207 aa, Glycine max
  peptide (1)..(207): Ceres Seq. ID no. 14313037
MPVSADQLDITLEFAKEDSDVLSSFPSVINLSIHGTEPTPSLNKLTGEDDLKVGLFIAENRFREAARVCGEDSSGWASSAFPTNDTRSRPGSRLQSSGKRKSSVSDSSKPSRSKSKKASMDRSEMHPYQADSMFQSMPSLKDLRIDLTSLTTDEVGIDGMDSIFSFDLNGESSLEMESVGMIPHDYVAGLISDLDDSTAFPEYTDIR

SEQ ID NO: 54453 - DNA, 1490 bp, Glycine max
  misc_feature (1)..(1490): Ceres Seq. ID no. 15176795
gaatgcctagtgaattagctatgaacaatgatgagctacatgtggttatgttcccattccttgcatttggccacattagtccatttgttcagctctccaacaagttgttctctcatggtgttcatgtcactttcttgtcagctgcatccaacattcccagaatcagatcaactcttaatctcaatccagccatcaatgttatctcactaaagttcccaaatggtataaccaacactgctgaattgccacctcacttagctggaaatctcatacacgcccttgacctcactcaagatcaggtgaagtcccttttgttggaactcaaaccccactatgttttctttgactttgcacaacattggctcccaaaattagcttctgaagttggcatcaagtctgttcatttctcagtctactctgccatttctgatgcttacattaccgtgccttctagatttgctgatgttgaaggaagaaacatcacttttgaggatcttaaaaagcctccacctgggtatcctcaaaactctaatatttccctcaaggcctttgaggccatggactttatgttcctcttcacaagatttggtgaaaaaaaccttactggttatgagcgagttttgcaaagccttggtgagtgttcattcatagtgttcaaaacgtgcaaggaaatagaaggaccctacttagactacatagaaacgcaatttcgaaaaccagttttgctatctggtccactagtccccgagccatcaaccgatgtgcttgaggaaaagtggtccaaatggttagatggtttccctgccaaatctgtcatattatgctcctttggcagtgagacatttctgagtgattatcaaatcaaagaactagccagtgggttagaactcactggcttacctttcattttggttctgaatttcccatccaatctctctgccaaagctgagttggagagagcattgccaaaagggtatttggaaagagtgaagaataggggagtggtgcacagtggttggtttcagcagcagcttgtgctgaaacactcaagtgtggggtgctatgtatgccatggtggctttagttcagtgattgaagctatggtcaatgagtgtcaactggtgctgttgcctttcaagggtgaccagtttttcaactctaaactcattgccaatgatttaaaggcaggggtagaggtgaataggagtgatgaagatgggttctttcacaaagaggatatactggaggcattgaaaactgtcatgttggaggataacaaagagcaagggaagcaaataagagaaaaccacatgcaatggagcaagtttttatcaaataaggaaattcagaacaaattcatcacagatctggttgcccagttaaagtctatggcttagtcttgtctcttccaatggaaaataaagtctaccaagactagaaagtataaactataattcaaaatgatcatattatcatatatcaattgagat

SEQ ID NO: 54454 - protein, 464 aa, Glycine max
  peptide (1)..(464): Ceres Seq. ID no. 15176796
MPSELAMNNDELHVVMFPFLAFGHISPFVQLSNKLFSHGVHVTFLSAASNIPRIRSTLNLNPAINVISLKFPNGITNTAELPPHLAGNLIHALDLTQDQVKSLLLELKPHYVFFDFAQHWLPKLASEVGIKSVHFSVYSAISDAYITVPSRFADVEGRNITFEDLKKPPPGYPQNSNISLKAFEAMDFMFLFTRFGEKNLTGYERVLQSLGECSFIVFKTCKEIEGPYLDYIETQFRKPVLLSGPLVPEPSTDVLEEKWSKWLDGFPAKSVILCSFGSETFLSDYQIKELASGLELTGLPFILVLNFPSNLSAKAELERALPKGYLERVKNRGVVHSGWFQQQLVLKHSSVGCYVCHGGFSSVIEAMVNECQLVLLPFKGDQFFNSKLIANDLKAGVEVNRSDEDGFFHKEDILEALKTVMLEDNKEQGKQIRENHMQWSKFLSNKEIQNKFITDLVAQLKSMA

SEQ ID NO: 54455 - protein, 458 aa, Glycine max
  peptide (1)..(458): Ceres Seq. ID no. 15176797
MNNDELHVVMFPFLAFGHISPFVQLSNKLFSHGVHVTFLSAASNIPRIRSTLNLNPAINVISLKFPNGITNTAELPPHLAGNLIHALDLTQDQVKSLLLELKPHYVFFDFAQHWLPKLASEVGIKSVHFSVYSAISDAYITVPSRFADVEGRNITFEDLKKPPPGYPQNSNISLKAFEAMDFMFLFTRFGEKNLTGYERVLQSLGECSFIVFKTCKEIEGPYLDYIETQFRKPVLLSGPLVPEPSTDVLEEKWSKWLDGFPAKSVILCSFGSETFLSDYQIKELASGLELTGLPFILVLNFPSNLSAKAELERALPKGYLERVKNRGVVHSGWFQQQLVLKHSSVGCYVCHGGFSSVIEAMVNECQLVLLPFKGDQFFNSKLIANDLKAGVEVNRSDEDGFFHKEDILEALKTVMLEDNKEQGKQIRENHMQWSKFLSNKEIQNKFITDLVAQLKSMA

SEQ ID NO: 54456 - protein, 449 aa, Glycine max
  peptide (1)..(449): Ceres Seq. ID no. 15176798
MFPFLAFGHISPFVQLSNKLFSHGVHVTFLSAASNIPRIRSTLNLNPAINVISLKFPNGITNTAELPPHLAGNLIHALDLTQDQVKSLLLELKPHYVFFDFAQHWLPKLASEVGIKSVHFSVYSAISDAYITVPSRFADVEGRNITFEDLKKPPPGYPQNSNISLKAFEAMDFMFLFTRFGEKNLTGYERVLQSLGECSFIVFKTCKEIEGPYLDYIETQFRKPVLLSGPLVPEPSTDVLEEKWSKWLDGFPAKSVILCSFGSETFLSDYQIKELASGLELTGLPFILVLNFPSNLSAKAELERALPKGYLERVKNRGVVHSGWFQQQLVLKHSSVGCYVCHGGFSSVIEAMVNECQLVLLPFKGDQFFNSKLIANDLKAGVEVNRSDEDGFFHKEDILEALKTVMLEDNKEQGKQIRENHMQWSKFLSNKEIQNKFITDLVAQLKSMA

SEQ ID NO: 54457 - DNA, 1135 bp, Glycine max
  misc_feature (1)..(1135): Ceres Seq. ID no. 15178717
acgaacaagaagaagaagaagaaatcgtttgcttagacgcgtcgttcttcgtcgatgacaactgacgaaattcacgttcggttcgcaagacattcagctcttctgtctgcattctgcttccactgattttgatttgacagggcagctggtttggcctggagccatgttgctgaatgagtatctttcaaaaaatgttaacctgcttcagggttgcactgccattgaattaggttctggtgttggtattaccggaatactttgcagcagattctgccataaagttgtgatgacagatcataatgaagaagtgatcaagatcttaaagaaaaacatagagctgcattcatgtcctgagaatattacttctatttctcatggattagtagcagagaaactagaatgggggaacactgatcagataaatgaaatattacaaaaacatcctggaggtttcgacttcatacttggagctgatatatgctttcagcagtcaagcatacctatgctttttgatagtgttaaacagctcctgcaggctagggaggacagaaagtgcaaattcattctagcctatatatcaagagctaagaccatggattcaatgattcttattgaagcttctaagctacagatgcagatgaaagaagtgcctggaactcggtgcacagttaagaatcttgaaggagtcatctttgtagttactcttgagtagaaacactaaatatagttgagtttccagaaacagacattgcatgtgaaaaggaaaactgatgggggttagcaatagttggaatttctatttccattcaaagctactcccttgctgacaacatggtgttgatgactcaggaaacccatgggggaagataaagaacatgcaagaatgagaacctatcttgtggagtttatcttccaaaacataattctctatttaaagcatacatgaccaaccacagaagattttctagatagatttggttggactgagtggagtctatcatcccaaaggtagtctttgggaactttgagggtcaagaagagaaatcaggaattcattttgttaatcataaagtattaatcacacattttccaccttatgattttctcaatgaaataattaatgtcttacggtgtg

SEQ ID NO: 54458 - protein, 182 aa, Glycine max
  peptide (1)..(182): Ceres Seq. ID no. 15178718
MLLNEYLSKNVNLLQGCTAIELGSGVGITGILCSRFCHKVVMTDHNEEVIKILKKNIELHSCPENITSISHGLVAEKLEWGNTDQINEILQKHPGGFDFILGADICFQQSSIPMLFDSVKQLLQAREDRKCKFILAYISRAKTMDSMILIEASKLQMQMKEVPGTRCTVKNLEGVIFVVTLE

SEQ ID NO: 54459 - protein, 141 aa, Glycine max
  peptide (1)..(141): Ceres Seq. ID no. 15178719
MTDHNEEVIKILKKNIELHSCPENITSISHGLVAEKLEWGNTDQINEILQKHPGGFDFILGADICFQQSSIPMLFDSVKQLLQAREDRKCKFILAYISRAKTMDSMILIEASKLQMQMKEVPGTRCTVKNLEGVIFVVTLE

SEQ ID NO: 54460 - DNA, 1175 bp, Glycine max
  misc_feature (1)..(1175): Ceres Seq. ID no. 15174606
attttttatctacttattttttgcatgagttgcgccaaaagtacttagataattagattgatggctaatgtttatttattttgttaggtataactttaacaaggattgcttagttgttcaatggtcaggagacaatccgaatagtgtggcaggtttgaccctaaatattccaggagatctcgccatcagccttggcactagtgatactgtatttatgatcactaaagatcctaatccaggattagagggacatgtcttccccaatccagttgatgcagaaggttacatggtaatgctggtatacaaaaatggatcccttacccgagaagatgtgcgcaactgttatgcaaacaaatcttgggatgttttcaataaatttttgcagcaaacacagcctttaaatggtggaaagttaggtttctactacaaggagcatgaaattctacctcctcttccagttggtttccaccgctatatcatagaaaatttctcagacacaccagatggactgaaggaacaggaaatggaggagtttgatcctccatctgaggtccgggcattaattgagggtcaatttctctcaatgcgggctcatgctgaaagatttggaatgccttctcccccaaagagaattatagctactggtggagcatcagcgaatcattgcatccttagtgcaatagcttcaatttttggctgtgatgtctatacagttcaaagacctgattcagcttcacttggagctgcattgagagctgctcatggctggctctgcaacaagaagggcgggtttttaccgatatctgatatgtacgtggacaaattggagaaaacgtccctgagctgcaaactttcagtgagtgctggagatcatgaattggtttccaagtatgccaccctcatgaaaaagagaattgaaatagagaatcggctcgttcaaaagcttggacgcttttgaaacatctaacctgctgtttctctctgaattcttacattgagttggctgtgaaatgtgaataaaataaagtgaatcagagaagattaagcattactttcaagtttgagttagaaatttttttttactaatattgctgccagaagggacggatcaatgacacatgccctcctaaaatccaatctttttttaagactaaaatatgtgtttttattccagc

SEQ ID NO: 54461 - protein, 296 aa, Glycine max
  peptide (1)..(296): Ceres Seq. ID no. 15174607
MFIYFVRYNFNKDCLVVQWSGDNPNSVAGLTLNIPGDLAISLGTSDTVFMITKDPNPGLEGHVFPNPVDAEGYMVMLVYKNGSLTREDVRNCYANKSWDVFNKFLQQTQPLNGGKLGFYYKEHEILPPLPVGFHRYIIENFSDTPDGLKEQEMEEFDPPSEVRALIEGQFLSMRAHAERFGMPSPPKRIIATGGASANHCILSAIASIFGCDVYTVQRPDSASLGAALRAAHGWLCNKKGGFLPISDMYVDKLEKTSLSCKLSVSAGDHELVSKYATLMKKRIEIENRLVQKLGRF

SEQ ID NO: 54462 - protein, 247 aa, Glycine max
  peptide (1)..(247): Ceres Seq. ID no. 15174608
MITKDPNPGLEGHVFPNPVDAEGYMVMLVYKNGSLTREDVRNCYANKSWDVFNKFLQQTQPLNGGKLGFYYKEHEILPPLPVGFHRYIIENFSDTPDGLKEQEMEEFDPPSEVRALIEGQFLSMRAHAERFGMPSPPKRIIATGGASANHCILSAIASIFGCDVYTVQRPDSASLGAALRAAHGWLCNKKGGFLPISDMYVDKLEKTSLSCKLSVSAGDHELVSKYATLMKKRIEIENRLVQKLGRF

SEQ ID NO: 54463 - protein, 223 aa, Glycine max
  peptide (1)..(223): Ceres Seq. ID no. 15174609
MVMLVYKNGSLTREDVRNCYANKSWDVFNKFLQQTQPLNGGKLGFYYKEHEILPPLPVGFHRYIIENFSDTPDGLKEQEMEEFDPPSEVRALIEGQFLSMRAHAERFGMPSPPKRIIATGGASANHCILSAIASIFGCDVYTVQRPDSASLGAALRAAHGWLCNKKGGFLPISDMYVDKLEKTSLSCKLSVSAGDHELVSKYATLMKKRIEIENRLVQKLGRF

SEQ ID NO: 54464 - DNA, 1839 bp, Glycine max
  misc_feature (1)..(1839): Ceres Seq. ID no. 14311028
gaaaacaatctgaagcagatggttataatttcaaaagctcaagagtggagttattcatgttaaagtgaattgctgaaggcttgaagcttaattcttaacaaattcactatcagtgaccacaccagaattgaaaatattaaggaatggacggagcttcatcagtgattccagaatattcggagataggcagcacaagtagttcagagagtcaagctcaggctcagtatttggagacacaattaaccaacatgcttcgaaaagtggatccagaaattacagaactcaatgagaaatgcatttatagagtaccagaaaaatttcgccgtgttaatccaaaagcctatactcctcgggttgtttcaattggcccgtttcacaatccacggtactctaacggaggtgacaatttgaaactaatggaagaacgaaagctgaaatatcttgagaaatttctaaatagaaacaagcacttgagcatgaagggtttatttctcagacttattgagaaggaaaagcagataagaggttattatgcagagcctgtcagttatagcagcgacgatttcttaacgatgattctagttgatgcttgttttataattgagcattttcttagatactatacaggcttaactttaacagaaagagacaccttatcagaaccatgcttgttaagtgatatttatcatgatatgattctgcttgaaaatcaacttccttttttcgttcttgaagacatattcaactctgctcacccgggtatgattgttgaatttccctacaaggatgttaaaggcataaacgacgactacgctggccctattacagatgttgagtctctctcctttattgctattactttccactattttcgaaaatacaaccactatatcatagaacctgcccatattgatcgtccatatcatttcattgatcttctaagaatcttttggcttccaattccaattcctcctgaaagtctaaaatcaggttttatggataaacttataccaagtgcaagccaactatcagaggtaggtctgatattcaaagctagtttaactccaggcttgtttgacataaaatatgatcatcatatgggtgttatggaaattccatgcatacttataaatcacaagacggagacggagttgagaaatatactggcattagagcaatgtcgctacatactttcacccaacatgactcagtacttgttcatcctagattgtcttgtcaacaccgacaaagacgcaagcatactaattgataacaaaatttttatcaattggttgggtgatgccaatgctgtggctaaaatgtttaacagtctttgttcaaatgttggtctgccatttatcagtgaagagtgtttttctctctgtgataacttggttaaattctatgaaaatcctcgcaacaagtacaaggctatcttttatcatgagtacttcaacactccatggaaaaaagcatctacatctgctgcagttctactccttttgctcactctgattcagactatatgttccgtcatctcgtttttttgaaggtaatggtaatgattcagttgatcaccctcaagctactatcatctgaagaagatcatggaaatcattctagttgtattgtttttataaaacttttaactattatgtgtttgatgtccaactttggaacataaaatttgtatgactttttttaaatgttttttttaataatttcttaacaaggttgcaccgctagcaataattaggacaaatggtgacagttggaacacatcatcaatttcattaaattaatccataaaggacaatgtcgattactaatagtctaaag

SEQ ID NO: 54465 - protein, 468 aa, Glycine max
  peptide (1)..(468): Ceres Seq. ID no. 14311029
MDGASSVIPEYSEIGSTSSSESQAQAQYLETQLTNMLRKVDPEITELNEKCIYRVPEKFRRVNPKAYTPRVVSIGPFHNPRYSNGGDNLKLMEERKLKYLEKFLNRNKHLSMKGLFLRLIEKEKQIRGYYAEPVSYSSDDFLTMILVDACFIIEHFLRYYTGLTLTERDTLSEPCLLSDIYHDMILLENQLPFFVLEDIFNSAHPGMIVEFPYKDVKGINDDYAGPITDVESLSFIAITFHYFRKYNHYIIEPAHIDRPYHFIDLLRIFWLPIPIPPESLKSGFMDKLIPSASQLSEVGLIFKASLTPGLFDIKYDHHMGVMEIPCILINHKTETELRNILALEQCRYILSPNMTQYLFILDCLVNTDKDASILIDNKIFINWLGDANAVAKMFNSLCSNVGLPFISEECFSLCDNLVKFYENPRNKYKAIFYHEYFNTPWKKASTSAAVLLLLLTLIQTICSVISFF

SEQ ID NO: 54466 - protein, 433 aa, Glycine max
  peptide (1)..(433): Ceres Seq. ID no. 14311030
MLRKVDPEITELNEKCIYRVPEKFRRVNPKAYTPRVVSIGPFHNPRYSNGGDNLKLMEERKLKYLEKFLNRNKHLSMKGLFLRLIEKEKQIRGYYAEPVSYSSDDFLTMILVDACFIIEHFLRYYTGLTLTERDTLSEPCLLSDIYHDMILLENQLPFFVLEDIFNSAHPGMIVEFPYKDVKGINDDYAGPITDVESLSFIAITFHYFRKYNHYIIEPAHIDRPYHFIDLLRIFWLPIPIPPESLKSGFMDKLIPSASQLSEVGLIFKASLTPGLFDIKYDHHMGVMEIPCILINHKTETELRNILALEQCRYILSPNMTQYLFILDCLVNTDKDASILIDNKIFINWLGDANAVAKMFNSLCSNVGLPFISEECFSLCDNLVKFYENPRNKYKAIFYHEYFNTPWKKASTSAAVLLLLLTLIQTICSVISFF

SEQ ID NO: 54467 - protein, 377 aa, Glycine max
  peptide (1)..(377): Ceres Seq. ID no. 14311031
MEERKLKYLEKFLNRNKHLSMKGLFLRLIEKEKQIRGYYAEPVSYSSDDFLTMILVDACFIIEHFLRYYTGLTLTERDTLSEPCLLSDIYHDMILLENQLPFFVLEDIFNSAHPGMIVEFPYKDVKGINDDYAGPITDVESLSFIAITFHYFRKYNHYIIEPAHIDRPYHFIDLLRIFWLPIPIPPESLKSGFMDKLIPSASQLSEVGLIFKASLTPGLFDIKYDHHMGVMEIPCILINHKTETELRNILALEQCRYILSPNMTQYLFILDCLVNTDKDASILIDNKIFINWLGDANAVAKMFNSLCSNVGLPFISEECFSLCDNLVKFYENPRNKYKAIFYHEYFNTPWKKASTSAAVLLLLLTLIQTICSVISFF

SEQ ID NO: 54468 - DNA, 1784 bp, Glycine max
  misc_feature (1)..(1784): Ceres Seq. ID no. 15176411
gatactgtgaaaaacacatacacacaataatagctctctctgattaagttgtcactcacgcacagaaacacagaaagaagatgatggcgaacaaattgcaaggggcaattgttagctgccattccagaacaaggcagttgtcgatagatgagaaagggcgcgccatctccgctgtgctcactactcatcaggaaccctttaagactaaggttcctgagttgacaattagccatgtgcccccacctacaccctccatcaagaacaaagacttcatcatcccctccaccactagtggaaagtttggtaggtttggtggcaagtttgtacctgagacacttgtagcttctttgacccagctcgaagcagagttcaaaaacgccctccgtgatcatgcttttcaggcagagctagcggaggcattaagagactatgcggggagagagacacctctgtatcatgcaaagcgattgccggagtattacaagagcgtgaataatgggaaggggcctgacatatacttaaagagagaggatctcaaccacagtggctctcacaagatgaacaacgctcttgctcaagccatgattgctaagcgcatgggctgcaaaagcgtcgtcaccgccactggctctggacaacatggccttgcaacagctgcagcttgcgcaaaacttgctttggactgcaccgtcttcatggccgacaaagacatccacagacaatattcaaatgtgaggttgatcaagttgttgggagctcaggttgaagcagtagatggagggttcacagatgcagcatcagaggcgtttcggtattgggtaggggatttggaaaacaggtaccacttgagtggctcagcggtgggaccacacccgtgtccaaccatggttcgggagtttcagtcagtgatagggaaagaaacgaggatgcaagcattggaaaaatggggtgggaagccagatgttcttgttgccagcgtagggactgggtcaaacgctttgggtctgtttcatgagtttatagcagacaaagatgtgaggttcgttggagttgaggctgggggtttgggcttggagagtggaaagcattcttcaacgttgaccacaggagaagtgggtgcgtaccatggagccatcagctatttactgcaggaccaagatggtcaaattattcatccacattccatcgctgctgggatggagtatccaggagttggtccagagttaagcttccttaaagaaagcgggcgtgcggaattctgcgttgcaaatgatgaagaggctcttgatgcgtaccaaagactatgcaaattagagggcatatttccctctttggaggccgcacatgcattggctatcttagataaattggtccctactctatgcaatggtactaaggttgttgtgaattgtagtgggcgaggagataaggatgcagcaatagtcttcaatcggggaatatatatttgacaaggaataacaaagatggatgaagacctgtgttaaataacgatttgacctagcttacgatgaatactataaatgctatatataaataaaaactacacgattcatacgttgttaaaggctaggaagtggcctcggtaaataattattttcaccgtcattaactatcatcagatatttattcatgttactgtgaaaaagggattaaaggaaagtattaaactctttagagagatttgtgtaagaagatattcagtgacaaatctttatcttgtaaaaagaaagaaatgataatgaaaatattcaattaaaaaaaat

SEQ ID NO: 54469 - protein, 462 aa, Glycine max
  peptide (1)..(462): Ceres Seq. ID no. 15176412
MMANKLQGAIVSCHSRTRQLSIDEKGRAISAVLTTHQEPFKTKVPELTISHVPPPTPSIKNKDFIIPSTTSGKFGRFGGKFVPETLVASLTQLEAEFKNALRDHAFQAELAEALRDYAGRETPLYHAKRLPEYYKSVNNGKGPDIYLKREDLNHSGSHKMNNALAQAMIAKRMGCKSVVTATGSGQHGLATAAACAKLALDCTVFMADKDIHRQYSNVRLIKLLGAQVEAVDGGFTDAASEAFRYWVGDLENRYHLSGSAVGPHPCPTMVREFQSVIGKETRMQALEKWGGKPDVLVASVGTGSNALGLFHEFIADKDVRFVGVEAGGLGLESGKHSSTLTTGEVGAYHGAISYLLQDQDGQIIHPHSIAAGMEYPGVGPELSFLKESGRAEFCVANDEEALDAYQRLCKLEGIFPSLEAAHALAILDKLVPTLCNGTKVVVNCSGRGDKDAAIVFNRGIYI

SEQ ID NO: 54470 - protein, 461 aa, Glycine max
  peptide (1)..(461): Ceres Seq. ID no. 15176413
MANKLQGAIVSCHSRTRQLSIDEKGRAISAVLTTHQEPFKTKVPELTISHVPPPTPSIKNKDFIIPSTTSGKFGRFGGKFVPETLVASLTQLEAEFKNALRDHAFQAELAEALRDYAGRETPLYHAKRLPEYYKSVNNGKGPDIYLKREDLNHSGSHKMNNALAQAMIAKRMGCKSVVTATGSGQHGLATAAACAKLALDCTVFMADKDIHRQYSNVRLIKLLGAQVEAVDGGFTDAASEAFRYWVGDLENRYHLSGSAVGPHPCPTMVREFQSVIGKETRMQALEKWGGKPDVLVASVGTGSNALGLFHEFIADKDVRFVGVEAGGLGLESGKHSSTLTTGEVGAYHGAISYLLQDQDGQIIHPHSIAAGMEYPGVGPELSFLKESGRAEFCVANDEEALDAYQRLCKLEGIFPSLEAAHALAILDKLVPTLCNGTKVVVNCSGRGDKDAAIVFNRGIYI

SEQ ID NO: 54471 - protein, 303 aa, Glycine max
  peptide (1)..(303): Ceres Seq. ID no. 15176414
MNNALAQAMIAKRMGCKSVVTATGSGQHGLATAAACAKLALDCTVFMADKDIHRQYSNVRLIKLLGAQVEAVDGGFTDAASEAFRYWVGDLENRYHLSGSAVGPHPCPTMVREFQSVIGKETRMQALEKWGGKPDVLVASVGTGSNALGLFHEFIADKDVRFVGVEAGGLGLESGKHSSTLTTGEVGAYHGAISYLLQDQDGQIIHPHSIAAGMEYPGVGPELSFLKESGRAEFCVANDEEALDAYQRLCKLEGIFPSLEAAHALAILDKLVPTLCNGTKVVVNCSGRGDKDAAIVFNRGIYI

SEQ ID NO: 54472 - DNA, 1481 bp, Glycine max
  misc_feature (1)..(1481): Ceres Seq. ID no. 14316239
aaataaaaacgtgataaaaaagtgattctgctcacagtcgtttcggggtagcattcttgcgcactcagttattctctctctctctctagagcgtcgtcgtttagttagggcagaaaaccccttttcggatcggtggagcgaagcctcgccggcgagacccccgaggctgttcaatcggcgatcgagcaacggcgaaaagcgacgaagatgaaggttttcgtgaagactctcaagggcacgcacttcgaaattgaagtgaacccttcggacacgctttctgaagtgaagaaaaatatagaaactgttcagggtgcagatgtctatcctgctgcacagcaaatgcttattcatcaaggaaaagttctaaaagatggtactactttggaggaaaataaagtagctgaaagtagttttattgtaattatgctatcaaagccaagtgcaactcctacttcaacttctgtgtctactgcacctcaagctcctgcttcaactggagcatcggctacacctgttactgccccaacagctgctcctgcacctgcacctgcaccagctgctccagctccagctcctgctcctatattttcaggctcttctgtgccagagtctgatatatatgggcaggcagcatccaatcttgttgctggaagtaacttggagggaacaattcagcaaatccttgacatgggtggaggaagctgggacagggatactgttgttcgcacccttcgtgctgcttataacaaccccgagagagctgttgaatatttgtattctggcataccagagcaagccgaagctccaccagttaccggagtgcctgcaagtgctcaaccttcaaatcctccagctgatactccacaggcagcacaaccagcatctgttccttctagtggacctaatgctaatcctttagacctctttccccagggccttcctaatgttgggtctggtgctgctggtgctggttccttagactttcttcgcaacagtcaacagttccaagccttacgcgctatggtacaggctaatccacaaatattgcagcctatgctacaagagcttggcaaacaaaatcctcatcttatgcgattgattcaagagcatcaagttgacttccttcgcctaattaatgaacctgttgaagggggtgagggaaatatactgggacagctggctggtgccatgccgcaagcagtgactgtcacccctgaggagcggcaagcaattgagcgtctcgaagcaatgggttttgatcgtgcaactgtattggaggtgtactttgcttgtaacaaaaatgaggagctggctgccaactaccttttagatcacatgcatgagtttgatgaataattagatctcctttacaatttgtcaaaatatttgttttatgtttccttttgaatggtctttgttatgtaatgaaggtaatatttgataatgacaagtctcgaatggacaaggaatattttaatcag

SEQ ID NO: 54473 - protein, 382 aa, Glycine max
  peptide (1)..(382): Ceres Seq. ID no. 14316240
MKVFVKTLKGTHFEIEVNPSDTLSEVKKNIETVQGADVYPAAQQMLIHQGKVLKDGTTLEENKVAESSFIVIMLSKPSATPTSTSVSTAPQAPASTGASATPVTAPTAAPAPAPAPAAPAPAPAPIFSGSSVPESDIYGQAASNLVAGSNLEGTIQQILDMGGGSWDRDTVVRTLRAAYNNPERAVEYLYSGIPEQAEAPPVTGVPASAQPSNPPADTPQAAQPASVPSSGPNANPLDLFPQGLPNVGSGAAGAGSLDFLRNSQQFQALRAMVQANPQILQPMLQELGKQNPHLMRLIQEHQVDFLRLINEPVEGGEGNILGQLAGAMPQAVTVTPEERQAIERLEAMGFDRATVLEVYFACNKNEELAANYLLDHMHEFDE

SEQ ID NO: 54474 - protein, 338 aa, Glycine max
  peptide (1)..(338): Ceres Seq. ID no. 14316241
MLIHQGKVLKDGTTLEENKVAESSFIVIMLSKPSATPTSTSVSTAPQAPASTGASATPVTAPTAAPAPAPAPAAPAPAPAPIFSGSSVPESDIYGQAASNLVAGSNLEGTIQQILDMGGGSWDRDTVVRTLRAAYNNPERAVEYLYSGIPEQAEAPPVTGVPASAQPSNPPADTPQAAQPASVPSSGPNANPLDLFPQGLPNVGSGAAGAGSLDFLRNSQQFQALRAMVQANPQILQPMLQELGKQNPHLMRLIQEHQVDFLRLINEPVEGGEGNILGQLAGAMPQAVTVTPEERQAIERLEAMGFDRATVLEVYFACNKNEELAANYLLDHMHEFDE

SEQ ID NO: 54475 - protein, 310 aa, Glycine max
  peptide (1)..(310): Ceres Seq. ID no. 14316242
MLSKPSATPTSTSVSTAPQAPASTGASATPVTAPTAAPAPAPAPAAPAPAPAPIFSGSSVPESDIYGQAASNLVAGSNLEGTIQQILDMGGGSWDRDTVVRTLRAAYNNPERAVEYLYSGIPEQAEAPPVTGVPASAQPSNPPADTPQAAQPASVPSSGPNANPLDLFPQGLPNVGSGAAGAGSLDFLRNSQQFQALRAMVQANPQILQPMLQELGKQNPHLMRLIQEHQVDFLRLINEPVEGGEGNILGQLAGAMPQAVTVTPEERQAIERLEAMGFDRATVLEVYFACNKNEELAANYLLDHMHEFDE

SEQ ID NO: 54476 - DNA, 1132 bp, Glycine max
  misc_feature (1)..(1132): Ceres Seq. ID no. 14307388
aaagtgatctagagtcaatggattatgctggaatgtttacaaatacccaatggacttccaatgtgtcttcacatcacaagagacaagcttttgtgatgtatttgcagacgaatccaggaggaatcactatatttggatggacagttgaccggtctctggtcaacaccatatttttccttgaattaagtctggttacctttgttctcggtcagaccctaatctaaggataaaatttgcaaaatgacataaaaaaaaaaaccctttggctttaggtcttcctggttaccaccatcaatttgattgaaagtcctccgcatgccgagccagaatgtcgcatgcacacagtagccatgcagagaagtagagaaacagtgtgtattgtccacccagggactggaccaggcacactactgttaaatgcgaggcctcttcctcaatccccagcaacacagatgtctccaaaattctattcgtcattctcattcctcagtcagcatacttatctccgtggatcttgtgacttctaatttgcacaatatgcaatcaaacaacataccttaaactaataccaccttaaaagatacttgggagttttctgcctactagggctcctcgaagcagtcgttctcaaattgtttcaattcataacctaaggtttgcatcatctcatttgtaatcgaaggatcatagctatagtcatgtctccccctgcgttgaagattccagcctctggacatttgtgacctttataagagcgttcgcatgttgaactcgtatgtgttttgctttggagtagttggaagcaagaaagggtgttgggcactaggaaggacataaaggtttaaattttcaactaggaatatggagagaacctaaggaccaatcgtgttgggtgtgcaagtgccggtggatagtcatattaccgagtaatgttgcttgcaaattctgatctagttagattacagtgattgtttttattattattatttgagatatgcctaaggctgatttcaattgtataatagacaataatagagttgcgtatttcgaatgacaagtttataattattggttggtcgtgcaccaaccctcttttattttcttcacgaaatttataaatttctttttaaac

SEQ ID NO: 54477 - protein, 73 aa, Glycine max
  peptide (1)..(73): Ceres Seq. ID no. 14307389
SDLESMDYAGMFTNTQWTSNVSSHHKRQAFVMYLQTNPGGITIFGWTVDRSLVNTIFFLELSLVTFVLGQTLI

SEQ ID NO: 54478 - protein, 68 aa, Glycine max
  peptide (1)..(68): Ceres Seq. ID no. 14307390
MDYAGMFTNTQWTSNVSSHHKRQAFVMYLQTNPGGITIFGWTVDRSLVNTIFFLELSLVTFVLGQTLI

SEQ ID NO: 54479 - protein, 63 aa, Glycine max
  peptide (1)..(63): Ceres Seq. ID no. 14307391
MFTNTQWTSNVSSHHKRQAFVMYLQTNPGGITIFGWTVDRSLVNTIFFLELSLVTFVLGQTLI

SEQ ID NO: 54480 - DNA, 1208 bp, Glycine max
  misc_feature (1)..(1208): Ceres Seq. ID no. 14307456
gggcaaaatcattcttcacttagttaggaaccgaaccatggctataacgttcggtttagtgactcctaactccaacactttgtgtctcactctcaccacaccacccctcatcgccaatcatcgtactactaatgttgtgttctctggtcaaagtgtcttcagctatggacacactaatctttcttattcacaccaaagggcttcttcctttgccactattgtctgttctgctgctaataaaccatcctcttcttctgaaattagctctacagccaagataaggagcgaggttctctctccctttcgttcagttaggatgttcttttatattgcttttgttgcaagtggtgctcttgggggattcatagcaaccacacaactaattggtgcactggctaactcatcaagagcatctgaagtccctgagattctgaagggccttggcatcgaccttgcagcagtgtctttatttgctttcttgtatttcagagagaacaaagcaaagaatgcacaagtggctcgcctatcaagagaggaaagcttatcaaatcttaagctccgtgtggatgagaagaagatcattcctgtgaactcattgagagggattgctcgacttgtcatctgtgctggccctgcatcctttgtaaccgagtcttttaagcgcagtgagcctttcaccgatagtcttttggatagaggggtgcttgttgtgccctttgtaacagatggaaattcacctgctttggagtttgaggagactgaggaacttgccactagaaggaagagactctggcaactggctccagtttacatcaatgagtggtctgagtggttagatgagcaaaagaagttagctggtgtaccttctgattctccagtgtacctatccctacgcttggatggtcgtgttcgtggcagtggtgttggttatcctccttggaatgctttggttgcacaattaccacaggtaaagggaatgtggactggcctactagatggctttgatggtagagtttagaagagcaagtgtttttttctacttctgaaggttgaactctcatacttaccccctcccccacaaaacaaaaagttcttcagcccgttttcttcatattctctttctggttttgtttctaatagtggagattccattaaacttttatgatttgattttaattgtatttattatttattatttattttatttc

SEQ ID NO: 54481 - protein, 338 aa, Glycine max
  peptide (1)..(338): Ceres Seq. ID no. 14307457
GKIILHLVRNRTMAITFGLVTPNSNTLCLTLTTPPLIANHRTTNVVFSGQSVFSYGHTNLSYSHQRASSFATIVCSAANKPSSSSEISSTAKIRSEVLSPFRSVRMFFYIAFVASGALGGFIATTQLIGALANSSRASEVPEILKGLGIDLAAVSLFAFLYFRENKAKNAQVARLSREESLSNLKLRVDEKKIIPVNSLRGIARLVICAGPASFVTESFKRSEPFTDSLLDRGVLVVPFVTDGNSPALEFEETEELATRRKRLWQLAPVYINEWSEWLDEQKKLAGVPSDSPVYLSLRLDGRVRGSGVGYPPWNALVAQLPQVKGMWTGLLDGFDGRV

SEQ ID NO: 54482 - protein, 326 aa, Glycine max
  peptide (1)..(326): Ceres Seq. ID no. 14307458
MAITFGLVTPNSNTLCLTLTTPPLIANHRTTNVVFSGQSVFSYGHTNLSYSHQRASSFATIVCSAANKPSSSSEISSTAKIRSEVLSPFRSVRMFFYIAFVASGALGGFIATTQLIGALANSSRASEVPEILKGLGIDLAAVSLFAFLYFRENKAKNAQVARLSREESLSNLKLRVDEKKIIPVNSLRGIARLVICAGPASFVTESFKRSEPFTDSLLDRGVLVVPFVTDGNSPALEFEETEELATRRKRLWQLAPVYINEWSEWLDEQKKLAGVPSDSPVYLSLRLDGRVRGSGVGYPPWNALVAQLPQVKGMWTGLLDGFDGRV

SEQ ID NO: 54483 - protein, 233 aa, Glycine max
  peptide (1)..(233): Ceres Seq. ID no. 14307459
MFFYIAFVASGALGGFIATTQLIGALANSSRASEVPEILKGLGIDLAAVSLFAFLYFRENKAKNAQVARLSREESLSNLKLRVDEKKIIPVNSLRGIARLVICAGPASFVTESFKRSEPFTDSLLDRGVLVVPFVTDGNSPALEFEETEELATRRKRLWQLAPVYINEWSEWLDEQKKLAGVPSDSPVYLSLRLDGRVRGSGVGYPPWNALVAQLPQVKGMWTGLLDGFDGRV

SEQ ID NO: 54484 - DNA, 1235 bp, Glycine max
  misc_feature (1)..(1235): Ceres Seq. ID no. 14303493
actgagtgaaaaaccacaacctagaaagaaatgaagaaaatacagcactctgaacaaaaagcaacggaaccaaccaaaaaggattcaaagggcaacaaacaagaaggcacagactcagagtcagagcaataccaaaacgaagaaaatcaactccacacgctttcggaaccatcaccatccttctctctccgttcccgcaaatccccttcgccaccactccactccctctctgactcccccatctccgatgcccacctctcccctgcgccgcagaagccgccgcccgattcctcgccggactcctcgatctccgacggccacttcacgatcggtgaacagcgcctctccccggcgccgccgaccgtggtgacggctcatcggttgaaggtggagcccgcggtgttgaccagggtcgatcccggcgccgaagagggtttcgtgaaagacgtcgaacaagccaccggcagcgccggtagtcgacgcctcagaccggatatgaccggtttgttgaggtcgaaaaaaatcgccacgtggagcaagctcttgctgggtcttcgagtaaccgcttttgttttctgcttggcgtctttctcggtgttggccactgataagaaacagggctgggctatcgactctttctatttatacaaggaattcaggtatagtttgtcagtgaatgttattgggtttgtgcattccgcgttgcagatatgtgatcttgggcggtactttgcaacgggaaagcacttggtggagcaccagctaaggggttatttcactttcgcgctggatcagatcttgacataccttctaatgtcagcatcatcatcagctgccactagagcttatgattgggtttccaattggggtgaggacaagttcccctacatggcaaatgcatctgtggctttgtccttggttgcttttgtggcctttgccttagcctctcttgtctctggttctattgttgtaaggttcacataatttatacaagtactatgtgtgaggtgtgcaaactcttatctgagatactggattaagctttatcctttctcgattgaaaatcgtcccatattttcagaaggcagactgactcactttgtacagaagggaaactcactttatttctctgtcaactttaatttgtatagatgcaggtggatttacagcttgctgaactggcttgtatatgaacttttgcattattgagatggtattaagcttacttttttatc

SEQ ID NO: 54485 - protein, 317 aa, Glycine max
  peptide (1)..(317): Ceres Seq. ID no. 14303494
MKKIQHSEQKATEPTKKDSKGNKQEGTDSESEQYQNEENQLHTLSEPSPSFSLRSRKSPSPPLHSLSDSPISDAHLSPAPQKPPPDSSPDSSISDGHFTIGEQRLSPAPPTVVTAHRLKVEPAVLTRVDPGAEEGFVKDVEQATGSAGSRRLRPDMTGLLRSKKIATWSKLLLGLRVTAFVFCLASFSVLATDKKQGWAIDSFYLYKEFRYSLSVNVIGFVHSALQICDLGRYFATGKHLVEHQLRGYFTFALDQILTYLLMSASSSAATRAYDWVSNWGEDKFPYMANASVALSLVAFVAFALASLVSGSIVVRFT

SEQ ID NO: 54486 - protein, 162 aa, Glycine max
  peptide (1)..(162): Ceres Seq. ID no. 14303495
MTGLLRSKKIATWSKLLLGLRVTAFVFCLASFSVLATDKKQGWAIDSFYLYKEFRYSLSVNVIGFVHSALQICDLGRYFATGKHLVEHQLRGYFTFALDQILTYLLMSASSSAATRAYDWVSNWGEDKFPYMANASVALSLVAFVAFALASLVSGSIVVRFT

SEQ ID NO: 54487 - DNA, 997 bp, Glycine max
  misc_feature (1)..(997): Ceres Seq. ID no. 14307377
aataaagccactcgccgctctctgcaccctcctctctctctctttggtgctggacaaggacaagtaaccaaaattccaagaagggttcattaatacatggccttagagcactacctttcgcaggaatggaaaaccagccccagcccgagcccgagccccatgacagtgacagaaaaccttgatgggtgttttgattgcaacatctgcttagattttgcacatgaaccagtggtcaccctttgtggccacctatactgctggccctgcatctacaagtggctccatgtccaaagtgcttctcttgcaccagatgagcaccctcaatgccctgtttgcaaggatgacatatgccacaccacaatggttcctctctatggccgtggccagggcatagctcatagtgaccgtgatggaaaggcatcatcctatagaggcagttttataccaccaagaccacctgctttgggtgctcaatctctcatgtcaacatcatctcaaagtgctcaacaacttccatatcgcaacccttatcagaatcagcatttcaaccctcctttgtaccaagatgaggatgaatcatcatcacaaatgctgaatcctggtgccaacatggtggcaccaggattcccccaccttgtggttgggatgtttggagagatgctttatgccagagtctttggcaactcagaaaatttatacaactatccaaattcttatcacctggggggaagtaataataatagccccaggttgagaaggcaagagatgcaagcaaacaaatcattgaacagaatctcaatttttctgttttgttgcttccttctgtgtcttattgtcttctaagcaagtaattggattgttattatctattgtcccattgtataatttgtaaagaaacacgggtgtaagctctgagaacgagatagattgagcaatgttagggtaaaataactggtgttcttcaacatttactgcaatatatcagagctcatttttc

SEQ ID NO: 54488 - protein, 248 aa, Glycine max
  peptide (1)..(248): Ceres Seq. ID no. 14307378
MALEHYLSQEWKTSPSPSPSPMTVTENLDGCFDCNICLDFAHEPVVTLCGHLYCWPCIYKWLHVQSASLAPDEHPQCPVCKDDICHTTMVPLYGRGQGIAHSDRDGKASSYRGSFIPPRPPALGAQSLMSTSSQSAQQLPYRNPYQNQHFNPPLYQDEDESSSQMLNPGANMVAPGFPHLVVGMFGEMLYARVFGNSENLYNYPNSYHLGGSNNNSPRLRRQEMQANKSLNRISIFLFCCFLLCLIVF

SEQ ID NO: 54489 - protein, 227 aa, Glycine max
  peptide (1)..(227): Ceres Seq. ID no. 14307379
MTVTENLDGCFDCNICLDFAHEPVVTLCGHLYCWPCIYKWLHVQSASLAPDEHPQCPVCKDDICHTTMVPLYGRGQGIAHSDRDGKASSYRGSFIPPRPPALGAQSLMSTSSQSAQQLPYRNPYQNQHFNPPLYQDEDESSSQMLNPGANMVAPGFPHLVVGMFGEMLYARVFGNSENLYNYPNSYHLGGSNNNSPRLRRQEMQANKSLNRISIFLFCCFLLCLIVF

SEQ ID NO: 54490 - protein, 160 aa, Glycine max
  peptide (1)..(160): Ceres Seq. ID no. 14307380
MVPLYGRGQGIAHSDRDGKASSYRGSFIPPRPPALGAQSLMSTSSQSAQQLPYRNPYQNQHFNPPLYQDEDESSSQMLNPGANMVAPGFPHLVVGMFGEMLYARVFGNSENLYNYPNSYHLGGSNNNSPRLRRQEMQANKSLNRISIFLFCCFLLCLIVF

SEQ ID NO: 54491 - DNA, 2089 bp, Glycine max
  misc_feature (1)..(2089): Ceres Seq. ID no. 14313670
ggtataccaaattgcttgaggccttcaatttcacccttcacacgtggtggtggtgttgttcttcttctcttcccctttctttttcttcttctgagcttgtttaagctctttctatttgattccattaacatatattatcacaatgtgtggtattcttgctgttcttggttgttctgatgactctcgagccaaaagggtccgcgtgcttgagctctctcgcagattgaagcaccgtggccctgactggagtgggctccatcaacatggtgactgctttttagcacatcaacggttagccatagttgatcctgcttctggggatcaacctctctttaacgaggacaaatccgtcattgtcacggtgaatggagagatttacaaccatgaagagctcaggaaacagctgcctaatcacaagttccgtactggatgtgattgtgatgttattgcacacctgtacgaggaacatggagaagactttgtggacatgctggatggtatcttctcatttgttctactggacacccgtgacaacagttttatagtggctcgggatgctattggggtcacttccttgtacattggatggggattagatggctctgtttggatttcatcagaaatgaaaggcctgaatgatgattgtgaacactttgagtgttttccacctggtcacttgtactctagcaaagaaagagggtttcgcagatggtacaatcctccttggttctctgaggctactccatccaccccttatgatcctctcgttttaagacacacctttgagcaggcagtcataaaaagattgatgactgatgtgccttttggtgttctactctctggaggtttggactcttcattggttgcatccgtcacttctcgctacttggccaacacaaaggctgctgagcagtggggatcaaagttacattcattctgtgtaggccttgagggctcaccagatttgaaggctgcaaaagaagttgctgactatctaggcactgtccaccatgagtttaccttcactgttcaggatggaatagatgccattgaagatgttatctaccatgttgaaacatatgatgtgactacaattagagctagcacacccatgtttctcatgtctcggaagattaaatcacttggtgtcaaatgggttatctccggagaaggatctgatgagatctttggagggtatctgtacttccacaaggcacccaacaaggaggagtttcacagagaaacatgccgcaagatcaaagcactccaccaatatgattgcttgcgagccaataaatcaacatttgcttggggtctagaagcccgtgtaccatttttggacaaggcatttatcaatactgcaatgagtattgaccctgagtcgaaaatgataaaaagagatgaaggacgaattgagaagtggattctgaggagagcctttgatgatgaagagcatccttatctgccaaagcacattttatacaggcagaaagagcaattcagtgatggagttggctatagctggattgatggccttaaggcccatgctgcaaaacatgtgactgacaaaatgatgcttaatgctggtaacatctaccctcacaacaccccaacaaccaaggaagcatattactacagaatgatctttgagaggttcttccctcagaactcagctaggctcaccgttcctggaggagcaagtgttgcatgtagcacagccaaagctgttgagtgggatgctgcttggtctaacaaccttgatccttctggtagagcagcacttggagtgcacatttcagcctatgaaaaccagaacaacaacaagggtgtagaaattgagaagattatacctatggatgctgctcctcttggtgttgcaatccagggataatataaagctgtgacaaagaataattgggggagaatgaactatgctaaacgtgtatgaaaaatttgcctgcagtgtacttttatcttggcaaagctttgtagtgtatagatatagatataaggctttctaaaagtgtagcgtattgtattatcttgaatgctgtgatttgaagtcttaataaaagtgtttctattatcg

SEQ ID NO: 54492 - protein, 582 aa, Glycine max
  peptide (1)..(582): Ceres Seq. ID no. 14313671
MCGILAVLGCSDDSRAKRVRVLELSRRLKHRGPDWSGLHQHGDCFLAHQRLAIVDPASGDQPLFNEDKSVIVTVNGEIYNHEELRKQLPNHKFRTGCDCDVIAHLYEEHGEDFVDMLDGIFSFVLLDTRDNSFIVARDAIGVTSLYIGWGLDGSVWISSEMKGLNDDCEHFECFPPGHLYSSKERGFRRWYNPPWFSEATPSTPYDPLVLRHTFEQAVIKRLMTDVPFGVLLSGGLDSSLVASVTSRYLANTKAAEQWGSKLHSFCVGLEGSPDLKAAKEVADYLGTVHHEFTFTVQDGIDAIEDVIYHVETYDVTTIRASTPMFLMSRKIKSLGVKWVISGEGSDEIFGGYLYFHKAPNKEEFHRETCRKIKALHQYDCLRANKSTFAWGLEARVPFLDKAFINTAMSIDPESKMIKRDEGRIEKWILRRAFDDEEHPYLPKHILYRQKEQFSDGVGYSWIDGLKAHAAKHVTDKMMLNAGNIYPHNTPTTKEAYYYRMIFERFFPQNSARLTVPGGASVACSTAKAVEWDAAWSNNLDPSGRAALGVHISAYENQNNNKGVEIEKIIPMDAAPLGVAIQG

SEQ ID NO: 54493 - protein, 467 aa, Glycine max
  peptide (1)..(467): Ceres Seq. ID no. 14313672
MLDGIFSFVLLDTRDNSFIVARDAIGVTSLYIGWGLDGSVWISSEMKGLNDDCEHFECFPPGHLYSSKERGFRRWYNPPWFSEATPSTPYDPLVLRHTFEQAVIKRLMTDVPFGVLLSGGLDSSLVASVTSRYLANTKAAEQWGSKLHSFCVGLEGSPDLKAAKEVADYLGTVHHEFTFTVQDGIDAIEDVIYHVETYDVTTIRASTPMFLMSRKIKSLGVKWVISGEGSDEIFGGYLYFHKAPNKEEFHRETCRKIKALHQYDCLRANKSTFAWGLEARVPFLDKAFINTAMSIDPESKMIKRDEGRIEKWILRRAFDDEEHPYLPKHILYRQKEQFSDGVGYSWIDGLKAHAAKHVTDKMMLNAGNIYPHNTPTTKEAYYYRMIFERFFPQNSARLTVPGGASVACSTAKAVEWDAAWSNNLDPSGRAALGVHISAYENQNNNKGVEIEKIIPMDAAPLGVAIQG

SEQ ID NO: 54494 - protein, 422 aa, Glycine max
  peptide (1)..(422): Ceres Seq. ID no. 14313673
MKGLNDDCEHFECFPPGHLYSSKERGFRRWYNPPWFSEATPSTPYDPLVLRHTFEQAVIKRLMTDVPFGVLLSGGLDSSLVASVTSRYLANTKAAEQWGSKLHSFCVGLEGSPDLKAAKEVADYLGTVHHEFTFTVQDGIDAIEDVIYHVETYDVTTIRASTPMFLMSRKIKSLGVKWVISGEGSDEIFGGYLYFHKAPNKEEFHRETCRKIKALHQYDCLRANKSTFAWGLEARVPFLDKAFINTAMSIDPESKMIKRDEGRIEKWILRRAFDDEEHPYLPKHILYRQKEQFSDGVGYSWIDGLKAHAAKHVTDKMMLNAGNIYPHNTPTTKEAYYYRMIFERFFPQNSARLTVPGGASVACSTAKAVEWDAAWSNNLDPSGRAALGVHISAYENQNNNKGVEIEKIIPMDAAPLGVAIQG

SEQ ID NO: 54495 - DNA, 1435 bp, Glycine max
  misc_feature (1)..(1435): Ceres Seq. ID no. 15176525
gattgtaaagttacttgtgttcttaagtatgagaatcatttatttagcgaaaaaaatacttatttgattttttctacaaaattttcttgagccagcaagagtcacacatcataagaccgtgatctttaagcaggacaaaacaaaatctatcaaggaagccatatattggtatccaaattccaaacttgtgttgggtttggttccttgagttgagaggagtgaaaaaatggatcacagtgcggatgctcaacgcacggacctgatgaccatcacccgtttcgtgctgaacgaacagtcgaagcacccagagtctcgtggcgatttctcaatcctgctcagtcacattgttctcggctgcaagttcgtctgctctgctgttaacaaggcgggtcttgctaagcttattggacttgcaggagagacaaatgttcagggtgaagagcaaaagaaattggatgtcctatccaatgatgtcttcatcaaggcattgatcagcagtggacgaacatgcatcttggtgtctgaagaagatgaggaagcaacatttgtggaaccttctaagcgtggaaaatactgtgttgtttttgacccgctggatggttcctctaacattgattgtggtgtttcaattggcacaatctttgggatttatttgataaaagaagaccatgaaccaaccgtagaagatgttttgcaacctgggaagaacatgttggcagctggttattgcatgtatggaagctcttgcacgcttgtgttaagcactggaagtggtgttaatggtttcacccttgatccatctcttggggagttcattctaactcaccctgacatcaagatcccaaagaaaggcaagatctattcagtgaatgaaggaaatgctaaaaactgggatggccctactaccatgtatgtggaaaactgcaagtatccaaaagatggttcatcaccaaagtccctaagatatattggaagcatggttgctgatgttcaccgcacactgctttatggaggtatctttctgtacccggctgataaaaagagtccaaatgggaaacttcgtgtactctatgaagtcttcccaatgtcattcttgatggaacaagcaggaggacaggctttcaccggcaaccaaagggcacttgatttggttccaaagaagttgcacgagcgatctcccatattccttggtagctatgaagatgtagaggaaatcaaggctctttactctgctgatgaaaaataggaatgaagctggaagaaagctatctttgtctttcgctactcacaagcaattgttatctaattgttacacatgtcatgtatatgttaagaaaagttattaatgttttgtgatttagaaaaattattttattccttatatctaaatattttaaaatttaataataattataatttatgcagatagttttat

SEQ ID NO: 54496 - protein, 339 aa, Glycine max
  peptide (1)..(339): Ceres Seq. ID no. 15176526
MDHSADAQRTDLMTITRFVLNEQSKHPESRGDFSILLSHIVLGCKFVCSAVNKAGLAKLIGLAGETNVQGEEQKKLDVLSNDVFIKALISSGRTCILVSEEDEEATFVEPSKRGKYCVVFDPLDGSSNIDCGVSIGTIFGIYLIKEDHEPTVEDVLQPGKNMLAAGYCMYGSSCTLVLSTGSGVNGFTLDPSLGEFILTHPDIKIPKKGKIYSVNEGNAKNWDGPTTMYVENCKYPKDGSSPKSLRYIGSMVADVHRTLLYGGIFLYPADKKSPNGKLRVLYEVFPMSFLMEQAGGQAFTGNQRALDLVPKKLHERSPIFLGSYEDVEEIKALYSADEK

SEQ ID NO: 54497 - protein, 327 aa, Glycine max
  peptide (1)..(327): Ceres Seq. ID no. 15176527
MTITRFVLNEQSKHPESRGDFSILLSHIVLGCKFVCSAVNKAGLAKLIGLAGETNVQGEEQKKLDVLSNDVFIKALISSGRTCILVSEEDEEATFVEPSKRGKYCVVFDPLDGSSNIDCGVSIGTIFGIYLIKEDHEPTVEDVLQPGKNMLAAGYCMYGSSCTLVLSTGSGVNGFTLDPSLGEFILTHPDIKIPKKGKIYSVNEGNAKNWDGPTTMYVENCKYPKDGSSPKSLRYIGSMVADVHRTLLYGGIFLYPADKKSPNGKLRVLYEVFPMSFLMEQAGGQAFTGNQRALDLVPKKLHERSPIFLGSYEDVEEIKALYSADEK

SEQ ID NO: 54498 - protein, 178 aa, Glycine max
  peptide (1)..(178): Ceres Seq. ID no. 15176528
MLAAGYCMYGSSCTLVLSTGSGVNGFTLDPSLGEFILTHPDIKIPKKGKIYSVNEGNAKNWDGPTTMYVENCKYPKDGSSPKSLRYIGSMVADVHRTLLYGGIFLYPADKKSPNGKLRVLYEVFPMSFLMEQAGGQAFTGNQRALDLVPKKLHERSPIFLGSYEDVEEIKALYSADEK

SEQ ID NO: 54499 - DNA, 1747 bp, Glycine max
  misc_feature (1)..(1747): Ceres Seq. ID no. 15174646
ttgtgtctgcctcttctgaaacgccactatttctgctttctctctcattaataataatattattgccttacactttttccacaatggagttgggaagcatactccattttcttcaggacaagaacattttgatcactggagccactggctttcttgccaaagttttgttggagaagatattgagggtccaaccaaatgttaagaagctttaccttcttctaagagctgcagatgccaaatctgccactcatcgcttgaacaatgagatcatagggaaggatttgtttagggtactaaaggagaaattgggtgcaaattttaattcctttgtctcgaaaaagttgactctggtacccggggacatctctcgtgaagacttgggattggaggattccattctaagggaagagatttatgatcaaacagatgtcattattaacttagctgcaacaactaactttgatgaaaggtatgatatatcgttgggtctaaatacctttggtgttaagtatgtcatcaacttcgccaaaaaatgtaccaaactcgaggttcttgtgcatgtatcaacagcctatgtatgtggtgagggaggccgagaagggctcatattagagaaaccatatcatttgggtgattcactgaatggagtgtctggattagacattaatgcagaagagaaagttgtgcgtgacaaattaagtgagttacaacaactgggggccacagaaaaggaaattaaagaggttatgaaggacttgggcattagcagggcaaagttatatggatggccaaacacatatgtattcaccaaggcaatgggagagatgcttgtggagcaactaaaaggaaacttatccgttgtgaccattcgtcccaccattgttaccagcacattcaaagaacctttccctggttgggctgaaggtgtaagaaccattgacagtttagctgtaacttatgggaaaggaaaattaacatgcttccttggagatctcaaagcaattgttgatgcgataccagctgacatggtggtgaatgcaatacttgtggccatggtggctcatgcaaatcatcctagtgatgatgttatatatcatgttggttcctctgttagaagaccactaagatatggcaatcttcaagagtatggctttagatatttcacagcaaaaccatgcataaacaaggatggaaggccagttaaggttggaaaagttacagtgttgagcaacatggatagcttcagaagatatatgttcattcgctacctgcttgtgttaaagggacttgagctggccaatactgcattttgccagtatttccaaggaacatatcttaatctcaataggaagattcagattgtgatgcggttggtggacctttacaagccttacttgttctttaaagctgcatttgatgatatgaacacagagaagttgagaatggcagcaagacaaggtggggtggagacagatttgttttattttgaccccgaactgattgattgggaagattactttttgaacatccatcttcctggtgtggtgaagtacattttgaagtgatatatagagctttgaaactagtaattttattatgttcaaatttgtactagctagaagagtcacattatagttatgttatttgtttctcaagggcagtataattgtgttagctagctgccaaatgtgtttcaaaactttgatcaagtgtacccaatatcatatattttaattttaatttgctc

SEQ ID NO: 54500 - protein, 520 aa, Glycine max
  peptide (1)..(520): Ceres Seq. ID no. 15174647
VSASSETPLFLLSLSLIIILLPYTFSTMELGSILHFLQDKNILITGATGFLAKVLLEKILRVQPNVKKLYLLLRAADAKSATHRLNNEIIGKDLFRVLKEKLGANFNSFVSKKLTLVPGDISREDLGLEDSILREEIYDQTDVIINLAATTNFDERYDISLGLNTFGVKYVINFAKKCTKLEVLVHVSTAYVCGEGGREGLILEKPYHLGDSLNGVSGLDINAEEKVVRDKLSELQQLGATEKEIKEVMKDLGISRAKLYGWPNTYVFTKAMGEMLVEQLKGNLSVVTIRPTIVTSTFKEPFPGWAEGVRTIDSLAVTYGKGKLTCFLGDLKAIVDAIPADMVVNAILVAMVAHANHPSDDVIYHVGSSVRRPLRYGNLQEYGFRYFTAKPCINKDGRPVKVGKVTVLSNMDSFRRYMFIRYLLVLKGLELANTAFCQYFQGTYLNLNRKIQIVMRLVDLYKPYLFFKAAFDDMNTEKLRMAARQGGVETDLFYFDPELIDWEDYFLNIHLPGVVKYILK

SEQ ID NO: 54501 - protein, 493 aa, Glycine max
  peptide (1)..(493): Ceres Seq. ID no. 15174648
MELGSILHFLQDKNILITGATGFLAKVLLEKILRVQPNVKKLYLLLRAADAKSATHRLNNEIIGKDLFRVLKEKLGANFNSFVSKKLTLVPGDISREDLGLEDSILREEIYDQTDVIINLAATTNFDERYDISLGLNTFGVKYVINFAKKCTKLEVLVHVSTAYVCGEGGREGLILEKPYHLGDSLNGVSGLDINAEEKVVRDKLSELQQLGATEKEIKEVMKDLGISRAKLYGWPNTYVFTKAMGEMLVEQLKGNLSVVTIRPTIVTSTFKEPFPGWAEGVRTIDSLAVTYGKGKLTCFLGDLKAIVDAIPADMVVNAILVAMVAHANHPSDDVIYHVGSSVRRPLRYGNLQEYGFRYFTAKPCINKDGRPVKVGKVTVLSNMDSFRRYMFIRYLLVLKGLELANTAFCQYFQGTYLNLNRKIQIVMRLVDLYKPYLFFKAAFDDMNTEKLRMAARQGGVETDLFYFDPELIDWEDYFLNIHLPGVVKYILK

SEQ ID NO: 54502 - protein, 272 aa, Glycine max
  peptide (1)..(272): Ceres Seq. ID no. 15174649
MKDLGISRAKLYGWPNTYVFTKAMGEMLVEQLKGNLSVVTIRPTIVTSTFKEPFPGWAEGVRTIDSLAVTYGKGKLTCFLGDLKAIVDAIPADMVVNAILVAMVAHANHPSDDVIYHVGSSVRRPLRYGNLQEYGFRYFTAKPCINKDGRPVKVGKVTVLSNMDSFRRYMFIRYLLVLKGLELANTAFCQYFQGTYLNLNRKIQIVMRLVDLYKPYLFFKAAFDDMNTEKLRMAARQGGVETDLFYFDPELIDWEDYFLNIHLPGVVKYILK

SEQ ID NO: 54503 - DNA, 769 bp, Glycine max
  misc_feature (1)..(769): Ceres Seq. ID no. 15169720
atatatacatttagacttggaaagtatcaaattgacttgtaaacaaacgcatgcaattaatctattttgactagttccttctaaaatctttacggtttttttttcccacacaaatttgaaatttcttcttatttataatctttttttaatgacaaaatgattcaaatattatgttctgtggtgtcctaaaagtttgaaaatccaattgttttcatggtattcagagaatcctccagaaggaaaagcaaagaatggaaaattcacataatgcaaatacaaagttgctgcatgagtgtgcaatccttcagaagaggcttcgggagtgtagtgtaaatttccttgttgaagaggaagataaactaaatatcgacactttgccatctgatgctctggatttattagcaacatcagataatcggattggtctcttgcttgcagaggcacagctcttggcacaagatgtagaagatactgttgttgctgttgaagagacccgggatataaccacagacaatactgggaaaactcatgatgaattgagaaagatgctggcacatatgtttgttgacaatgccagtttaaggaaacaaatcaattctgttattcgttgtgctctaaatgcaaatatcaattccgaagaggacggtgaagaaatccatttgcaaaaaactgtcctaagcaagttcttagaaagatagcttgttcaatactacaccgtgtatctattattgagttacttctctgttaattatggtctataaatttttgc

SEQ ID NO: 54504 - protein, 148 aa, Glycine max
  peptide (1)..(148): Ceres Seq. ID no. 15169721
MENSHNANTKLLHECAILQKRLRECSVNFLVEEEDKLNIDTLPSDALDLLATSDNRIGLLLAEAQLLAQDVEDTVVAVEETRDITTDNTGKTHDELRKMLAHMFVDNASLRKQINSVIRCALNANINSEEDGEEIHLQKTVLSKFLER

SEQ ID NO: 54505 - DNA, 1344 bp, Glycine max
  misc_feature (1)..(1344): Ceres Seq. ID no. 15171884
acacttcaaattcaccgccacttctgccgccctccataagctccatcgcgcctcttttcctctccgtctccgacctccgatcctccctcgccgagacatcctccgacggtggcagaatcgtaattttccgcggcaccgtcgacacacctcgaaaaccttgagacccggtgtcttggtttctcgcaagtccagcgataacagcgtcgttcttcaaagaactcaaacgtgtttgtccactgttttctgcttcctatttggcagagtttttatctgatctctggagaaatatggctgccaatttctggacatcatctcattacaagcatcttctggatcaggaagatgtggatgtggtgaatacactcgacaaggaaaagggtattacactggaggattttaagcttattaagatgcacatggctaattatattttgaaattggctcaacaagtaaaagtgaggcagagggttgtggccacagcagttacatacatgaggcgtgtttacaccaggaagagtatggctgaatatgatccacgcttggtagctccaacatgcttgtacctggcatcaaaagcagaagaaagcacagtgcaggctcggcttcttgtattttacattaaaaaattatacagtgatgacaagtatagatatgaaatcaaggacatacttgaaatggaaatgaagattttagaagctcttaattattacctggttgtataccatccataccgttcactagttccgttgcttcaggatgcaggtctgaatgatctaaacatgactcaactaacttgggggcttgtaaatgacacatacaagatggacctaattcttgtacatcctccgcatttgattgctttagcttgcatatacattgctagtgtgctcagggagaaagacaccactgcttggtttgaagaacttcgtgttgatatgaatgtggttaaaaacatatcaatggagatacttgatttttatgaaagcaatagaatgttcactgatgagagaatcaatgctgctcttcagaagctgagcctgagaccctagaacttactgtagatgactcaacgctgaatatgtggaatgaagttaatgctatggtgatttgtctgaatgatttttctgggtcaatgacatgttttacggtagaacactatctaaatgtatccaaaagtaagggcacgtaatattgggggtcaattcaaagtgtcctattaaagagcaaaaggaggatgaaaaaaggtgattctcggtgaggaccagatagactcccacctgattcatagaatcttttgtttttatctatttattgtcataaatcaaagtgtctacaatttttttg

SEQ ID NO: 54506 - protein, 253 aa, Glycine max
  peptide (1)..(253): Ceres Seq. ID no. 15171885
MAANFWTSSHYKHLLDQEDVDVVNTLDKEKGITLEDFKLIKMHMANYILKLAQQVKVRQRVVATAVTYMRRVYTRKSMAEYDPRLVAPTCLYLASKAEESTVQARLLVFYIKKLYSDDKYRYEIKDILEMEMKILEALNYYLVVYHPYRSLVPLLQDAGLNDLNMTQLTWGLVNDTYKMDLILVHPPHLIALACIYIASVLREKDTTAWFEELRVDMNVVKNISMEILDFYESNRMFTDERINAALQKLSLRP

SEQ ID NO: 54507 - protein, 212 aa, Glycine max
  peptide (1)..(212): Ceres Seq. ID no. 15171886
MHMANYILKLAQQVKVRQRVVATAVTYMRRVYTRKSMAEYDPRLVAPTCLYLASKAEESTVQARLLVFYIKKLYSDDKYRYEIKDILEMEMKILEALNYYLVVYHPYRSLVPLLQDAGLNDLNMTQLTWGLVNDTYKMDLILVHPPHLIALACIYIASVLREKDTTAWFEELRVDMNVVKNISMEILDFYESNRMFTDERINAALQKLSLRP

SEQ ID NO: 54508 - protein, 210 aa, Glycine max
  peptide (1)..(210): Ceres Seq. ID no. 15171887
MANYILKLAQQVKVRQRVVATAVTYMRRVYTRKSMAEYDPRLVAPTCLYLASKAEESTVQARLLVFYIKKLYSDDKYRYEIKDILEMEMKILEALNYYLVVYHPYRSLVPLLQDAGLNDLNMTQLTWGLVNDTYKMDLILVHPPHLIALACIYIASVLREKDTTAWFEELRVDMNVVKNISMEILDFYESNRMFTDERINAALQKLSLRP

SEQ ID NO: 54509 - DNA, 1418 bp, Glycine max
  misc_feature (1)..(1418): Ceres Seq. ID no. 15176353
atttgaaaaataaacaagaagagcaagagagtaaagcagcagaaggggtgaagatagggatggcgggcatgtctggatgtagttgccgttggcagtgggcggaggcgaaatccatgggagtgggctgttggttcccttcctcaactaccaaaaggagtttccggcctgtgattgtttctgtttctgctatctccgataataactctcactcttacactagcagcggaagaaagctagaagaagaaggcatcaaagggtcaggaactaccgccagagatcgcaggttgcttagaattcgccaagagaaacgacagcgggaatacgacctccttaacaactaccctgcttgggcaaaagtcctggaaaacgcttgcaaagacgatgctgaactccgtgccgttctcggagatagcattggcaaccccgaactcatgaggaaacgagtcgaagatagggtgagaaagaagggtagagactttcaaaagtctaaaacaggatccgtccttgctttcaaagtcaccttcagagacttcaatccacttgattcatatatctggtttgaattgtttggatcaccatcagatcgggatgttaatctaattggtaatgttattcaatcatggtatgtcatgggtcgtcttggtgcctttaattcttcaaatttgcagctggcaaattcatcagtggagtatgatcctctatatgatgcagataaaggtttcaaagtgatgccgtcatctttccatgatatcagtgatattgagttccaggaaaactggggacgtgtttggtattagctctagaactcgactctttaaaactaaaataaaaaacttgttttatgaccttaaaatgcacggaggttaaaaatattgactgataaagataaatttaaactataataagattttttaaaataagtttatgcaataaaaattcaatattaaaagtattaaattcgctgtaaaactcgtctaattagatatcgaaaagttgagaagttttctttaatctcacgaagcttttagtatctaaaaggccgtggcatcttttaaagaagagtatagacttaataagtttctatacggacaatcactaactaataaacaatgccatttacttaaatacatgaatgtagaagaatatgaaatcataatagggtatatatttttttaaataaaagttctctactaatttgatatattgtagaatattcaccgtataatttataagctgtcattaaaaaatggttaatttctcatgttgagaattatgataaattcacaaaaaataatacgaatttgcataaactctaaacaatccaaatgttttccagcaaaatttctatcaaaagacaaagttcaaaattagttacataatcttttattgacaaaaaaaaaggtaatgtatactcaaac

SEQ ID NO: 54510 - protein, 264 aa, Glycine max
  peptide (1)..(264): Ceres Seq. ID no. 15176354
LKNKQEEQESKAAEGVKIGMAGMSGCSCRWQWAEAKSMGVGCWFPSSTTKRSFRPVIVSVSAISDNNSHSYTSSGRKLEEEGIKGSGTTARDRRLLRIRQEKRQREYDLLNNYPAWAKVLENACKDDAELRAVLGDSIGNPELMRKRVEDRVRKKGRDFQKSKTGSVLAFKVTFRDFNPLDSYIWFELFGSPSDRDVNLIGNVIQSWYVMGRLGAFNSSNLQLANSSVEYDPLYDADKGFKVMPSSFHDISDIEFQENWGRVWY

SEQ ID NO: 54511 - protein, 245 aa, Glycine max
  peptide (1)..(245): Ceres Seq. ID no. 15176355
MAGMSGCSCRWQWAEAKSMGVGCWFPSSTTKRSFRPVIVSVSAISDNNSHSYTSSGRKLEEEGIKGSGTTARDRRLLRIRQEKRQREYDLLNNYPAWAKVLENACKDDAELRAVLGDSIGNPELMRKRVEDRVRKKGRDFQKSKTGSVLAFKVTFRDFNPLDSYIWFELFGSPSDRDVNLIGNVIQSWYVMGRLGAFNSSNLQLANSSVEYDPLYDADKGFKVMPSSFHDISDIEFQENWGRVWY

SEQ ID NO: 54512 - protein, 242 aa, Glycine max
  peptide (1)..(242): Ceres Seq. ID no. 15176356
MSGCSCRWQWAEAKSMGVGCWFPSSTTKRSFRPVIVSVSAISDNNSHSYTSSGRKLEEEGIKGSGTTARDRRLLRIRQEKRQREYDLLNNYPAWAKVLENACKDDAELRAVLGDSIGNPELMRKRVEDRVRKKGRDFQKSKTGSVLAFKVTFRDFNPLDSYIWFELFGSPSDRDVNLIGNVIQSWYVMGRLGAFNSSNLQLANSSVEYDPLYDADKGFKVMPSSFHDISDIEFQENWGRVWY

SEQ ID NO: 54513 - DNA, 1630 bp, Glycine max
  misc_feature (1)..(1630): Ceres Seq. ID no. 15176579
gaaatttatactgactttagatgctcttcaatcattgttatttctatcagcagcagcatctgttagtgggttgaaaacgttagagaggaactttgcaacaagcatggagacagcctcagactatggagcattcacagagaaattcactttaccaccaaattctgcaccagctcttcctctcaaatcactcacctttgcagtgaaagagattttcgacacggaaggatacgtgaccggcttcgggaatcctgactgggcaaggactcatccggtggctacctctactgctccaacagctctggctctcctcagagcaggtgccacttgtgttggtaaaactgtcatggatgaaatggcttacagtataaatggagagaatatacattatggcacacctagaaatccttgtgcaccagaccgggttcctggaggatcttctagtggctctgctgttgcagttggtgcaaagcttgtggatttctcattaggaactgatactggaggaagtgtaagagtacctgcatcatactgtgggatttttggttttcgtccttctcatggtgctgtctcagaatcaggagtaatccctatgtcgcaaagttttgataccgtgggatggtttgccagggatccaatgattttgagcagagtaggaggtgtaattctacagttaccagatgtagctccaccaattagacctacttccattatcattgcagaggactgtttccagctttcaagcactccatttgatgtagttacaggaactgtcatcaaagcggtagagaagttatatggaggggatgtattgaagcctgaaatccttggagactatgtgaaaaccaatgttccaagtttgaaacatttcatgagtaaagataatacagaccaaatatataacattccatcactggctgcactttcaagtgccatgcggttgcttcaaaggtttgaattcaagaataaccatggtgaatggatcagtgcagttaaacctgatttaggtcctggaatatcagaacgtgtatcagatgccctaaggacaacgggggagaacattgatatctgttattctataaaaagggaactacacgatgctctttcggctcttcttggggactttggtgttctaatgatccccacagttccaggtcctcccccaaaactacaaacaaatacatccgacttagaaatttttcgtgcaagggcttttagcctgctgtccattgctggagtatcaggattttgtcaggtaagcataccgctagggatgtataataaccttcccctatcaatttctctggtggccagacatggtgcagataaatttttgcttcaccttgttgagagtctttatgacagcattgaagatagaaagcagcatatcatagagcacaaactttaatctgactgcaaggatgtagatatgctttgagtatgcctactatgccaaaagctgggagagaagcgaattatggacataaatcaaagaagggatattgtataaaggaaatttttgctgatctatatcctgtttctttcagatattatgagttcaattattcattaaatcatatcattttgattgtgctagcttgggtacgaaagcaaaaaagccacattggaattc

SEQ ID NO: 54514 - protein, 467 aa, Glycine max
  peptide (1)..(467): Ceres Seq. ID no. 15176580
KFILTLDALQSLLFLSAAASVSGLKTLERNFATSMETASDYGAFTEKFTLPPNSAPALPLKSLTFAVKEIFDTEGYVTGFGNPDWARTHPVATSTAPTALALLRAGATCVGKTVMDEMAYSINGENIHYGTPRNPCAPDRVPGGSSSGSAVAVGAKLVDFSLGTDTGGSVRVPASYCGIFGFRPSHGAVSESGVIPMSQSFDTVGWFARDPMILSRVGGVILQLPDVAPPIRPTSIIIAEDCFQLSSTPFDVVTGTVIKAVEKLYGGDVLKPEILGDYVKTNVPSLKHFMSKDNTDQIYNIPSLAALSSAMRLLQRFEFKNNHGEWISAVKPDLGPGISERVSDALRTTGENIDICYSIKRELHDALSALLGDFGVLMIPTVPGPPPKLQTNTSDLEIFRARAFSLLSIAGVSGFCQVSIPLGMYNNLPLSISLVARHGADKFLLHLVESLYDSIEDRKQHIIEHKL

SEQ ID NO: 54515 - protein, 433 aa, Glycine max
  peptide (1)..(433): Ceres Seq. ID no. 15176581
METASDYGAFTEKFTLPPNSAPALPLKSLTFAVKEIFDTEGYVTGFGNPDWARTHPVATSTAPTALALLRAGATCVGKTVMDEMAYSINGENIHYGTPRNPCAPDRVPGGSSSGSAVAVGAKLVDFSLGTDTGGSVRVPASYCGIFGFRPSHGAVSESGVIPMSQSFDTVGWFARDPMILSRVGGVILQLPDVAPPIRPTSIIIAEDCFQLSSTPFDVVTGTVIKAVEKLYGGDVLKPEILGDYVKTNVPSLKHFMSKDNTDQIYNIPSLAALSSAMRLLQRFEFKNNHGEWISAVKPDLGPGISERVSDALRTTGENIDICYSIKRELHDALSALLGDFGVLMIPTVPGPPPKLQTNTSDLEIFRARAFSLLSIAGVSGFCQVSIPLGMYNNLPLSISLVARHGADKFLLHLVESLYDSIEDRKQHIIEHKL

SEQ ID NO: 54516 - protein, 353 aa, Glycine max
  peptide (1)..(353): Ceres Seq. ID no. 15176582
MDEMAYSINGENIHYGTPRNPCAPDRVPGGSSSGSAVAVGAKLVDFSLGTDTGGSVRVPASYCGIFGFRPSHGAVSESGVIPMSQSFDTVGWFARDPMILSRVGGVILQLPDVAPPIRPTSIIIAEDCFQLSSTPFDVVTGTVIKAVEKLYGGDVLKPEILGDYVKTNVPSLKHFMSKDNTDQIYNIPSLAALSSAMRLLQRFEFKNNHGEWISAVKPDLGPGISERVSDALRTTGENIDICYSIKRELHDALSALLGDFGVLMIPTVPGPPPKLQTNTSDLEIFRARAFSLLSIAGVSGFCQVSIPLGMYNNLPLSISLVARHGADKFLLHLVESLYDSIEDRKQHIIEHKL

SEQ ID NO: 54517 - DNA, 1590 bp, Glycine max
  misc_feature (1)..(1590): Ceres Seq. ID no. 14316184
ttttttaccatggagtgctcagatactaagcctgtgaaacccaactcgaataatatatcggaaatggtgtgcaagtttgccaaagtttgtaaattgaagtctattggggtgttctcttccgaaatccccaatctccctcacttgcaaagatccatttacaatgagacccttctgagtgaagacagcagtgaagagagcagatgctatgaccagaaagtgcatccccaccccactgaagttcctgccaaagaaaatgcttgtgctggtttggaggtcatgaggaagctgtttgatgctgtttcggcgctgaaattggcataccttcagcttcagcaggctcatatcccttatgaccctcagaagattgttgcagctgatgaccttgttgttgctgagcttgagaagctttgcaagttcaagcgcgaatatgtgcagaaacattgcaagaaaacaaggttcaatgccgctcgttcttctctcttgatggctgaaattgtggccaaagaggcacttttggggaagctgaagtctcagaacagtgccaaagattctgatattcttcagttgtggcgggagctgcaagatttggagatggggaatagaaatctgagtgagaagatcaagcagataagtttggagaaaaggagagtaggtgttttgagtgttactaagtttcaggatgtcttcaaggctgcttcaaagtccattcatgattttgcaaaaccgttgattagcttgatgaaagcttcgggttgggaccttgatagggctgcaaactccattgagaatggtgctgtttattccaaaaggtgtgacaagaagtatgcttttgaggcctacattgcgcgcagaatgtttcatgggatcgctttaacatcttatgatgtgagtgatattatgaagtttgatgacccttttgatgcactgatggagaatccacattctgattttgccaaattttgtcaagcaaagtaccttcttgttgtgcatccgaaaattgaagagtcattctttggcaatttggatcacagaacattcgtaatgagtggcaagcaccctagaaccaagttctatcagttgtttgctaaaatggcaaaatgggtttgggttttacttggatctgctgtgtcaatagatcctgaagcaaccttgttttcggtgagcagaggaagtgtgttttccagcttgtacatggaatctgttgaggaagaaaaggagagtgcaatactttcagatgaagaaagagtgacatataaagttcagttcatgatcatgccagggtttcaaattggaaagatggtggtgaagtctcgagtttatgtctcgaaacattctttaagctaaatggtggaccttttaactggtaattcagctaacagaaccacataatttttgtactagagttcttttaatggtaccttagctagtcaagataaccatggctactaggttatgctagaacctcaatccaccatctctatatttgtaatctttcctattaatgtgagacctgggatatgtagtcgttacagtggtcttatatttctttctttctgcactgtatttatttttaacctttcaaaaaaaaat

SEQ ID NO: 54518 - protein, 447 aa, Glycine max
  peptide (1)..(447): Ceres Seq. ID no. 14316185
FFTMECSDTKPVKPNSNNISEMVCKFAKVCKLKSIGVFSSEIPNLPHLQRSIYNETLLSEDSSEESRCYDQKVHPHPTEVPAKENACAGLEVMRKLFDAVSALKLAYLQLQQAHIPYDPQKIVAADDLVVAELEKLCKFKREYVQKHCKKTRFNAARSSLLMAEIVAKEALLGKLKSQNSAKDSDILQLWRELQDLEMGNRNLSEKIKQISLEKRRVGVLSVTKFQDVFKAASKSIHDFAKPLISLMKASGWDLDRAANSIENGAVYSKRCDKKYAFEAYIARRMFHGIALTSYDVSDIMKFDDPFDALMENPHSDFAKFCQAKYLLVVHPKIEESFFGNLDHRTFVMSGKHPRTKFYQLFAKMAKWVWVLLGSAVSIDPEATLFSVSRGSVFSSLYMESVEEEKESAILSDEERVTYKVQFMIMPGFQIGKMVVKSRVYVSKHSLS

SEQ ID NO: 54519 - protein, 444 aa, Glycine max
  peptide (1)..(444): Ceres Seq. ID no. 14316186
MECSDTKPVKPNSNNISEMVCKFAKVCKLKSIGVFSSEIPNLPHLQRSIYNETLLSEDSSEESRCYDQKVHPHPTEVPAKENACAGLEVMRKLFDAVSALKLAYLQLQQAHIPYDPQKIVAADDLVVAELEKLCKFKREYVQKHCKKTRFNAARSSLLMAEIVAKEALLGKLKSQNSAKDSDILQLWRELQDLEMGNRNLSEKIKQISLEKRRVGVLSVTKFQDVFKAASKSIHDFAKPLISLMKASGWDLDRAANSIENGAVYSKRCDKKYAFEAYIARRMFHGIALTSYDVSDIMKFDDPFDALMENPHSDFAKFCQAKYLLVVHPKIEESFFGNLDHRTFVMSGKHPRTKFYQLFAKMAKWVWVLLGSAVSIDPEATLFSVSRGSVFSSLYMESVEEEKESAILSDEERVTYKVQFMIMPGFQIGKMVVKSRVYVSKHSLS

SEQ ID NO: 54520 - protein, 426 aa, Glycine max
  peptide (1)..(426): Ceres Seq. ID no. 14316187
MVCKFAKVCKLKSIGVFSSEIPNLPHLQRSIYNETLLSEDSSEESRCYDQKVHPHPTEVPAKENACAGLEVMRKLFDAVSALKLAYLQLQQAHIPYDPQKIVAADDLVVAELEKLCKFKREYVQKHCKKTRFNAARSSLLMAEIVAKEALLGKLKSQNSAKDSDILQLWRELQDLEMGNRNLSEKIKQISLEKRRVGVLSVTKFQDVFKAASKSIHDFAKPLISLMKASGWDLDRAANSIENGAVYSKRCDKKYAFEAYIARRMFHGIALTSYDVSDIMKFDDPFDALMENPHSDFAKFCQAKYLLVVHPKIEESFFGNLDHRTFVMSGKHPRTKFYQLFAKMAKWVWVLLGSAVSIDPEATLFSVSRGSVFSSLYMESVEEEKESAILSDEERVTYKVQFMIMPGFQIGKMVVKSRVYVSKHSLS

SEQ ID NO: 54521 - DNA, 1995 bp, Glycine max
  misc_feature (1)..(1995): Ceres Seq. ID no. 14303487
aatttgtctttgttcatcctctactgtgggaaaatgctttggaaccagttttgatgttgttaaagcttaatgtgggatatcccttttgtattattcacaggaaatatccatttgtttctttgccagtttatgttcagtgaaaaggctggcttgatgccactcccattggtagatgtcacatgaatactcagtactatcagtgccaacatttccatctttcttcttccagcctttgctttgtcttggttggtatagaagtgacaatccagccgcactcttaacgtggataatgatttcatttttgaatattgataacctagtcccctggagtagtgttaatattctttttggcagtgaacacacagtccactgtcaagttacctagttaatgaagtgaagggttataatttgatccaaaggaatctgccaaggtgcagatgatgtggagtttttatgttcttccttttggtaagtttcagttcttggaggagtcaaatgctgaactgcgttttaaggttggagtgtctattgattggatcagtatagttggatttggttcagagagttcttcaaggattcaagtgaccattcaatgctattggtttctatttactgcttgaggctgtcaagtaccccagtgccaccttatagtaatatgtggaattcttgtatatacactagttttgatgtgttctcctcttggagtagtgctgattggagctgcattaatcgattttgttgttgctgatttcaattggtctgcggcagtatagaagaaatcaacgatgcattggtgtttacctggcttgatggggtgactgaatatgcctttagaagttttaggattatttctaaatgtgttcctacatgcaggtccctaaagcttacttcctgcttctagatagttggtaatcttatctgagggtagctagtaccatgggagaagtggcagtaatgcactctgagcctctgcagttcgagtgcaatgacattactgtgaatatgactgagaaggaagtgtatcctccagaatcaaatgtggatcacttgcctggagaagaatcgagtcaatcaacagaccacaaaaatatcaattacttgcaagagaaaggatttatggaatatggatgtcagcattaccggagaagatgccgtattagggccccctgttgcaatgagatttttgattgccgccattgtcacaatgaggcaaaaaatgatatcaacattgatctgaagcttagacatgatattccacgacacgaagtcaaacaggtgatttgttcactttgtgggactgaacaagaggttcagcaaaactgtataaattgtggtgtttgtatgggaaaatacttctgtggaacatgcaagctttttgatgatgatatatctaagcagcagtaccattgctgtggctgtggaatttgcagaactggaggaagcgaaaatttcttccattgctacaagtgtggttgttgctactcaactcttctgaaaaacagtcacccttgtgtagaaggagcaatgcatcatgattgccctgtttgttttgagtatttgtttgaatcaagaaacgatgtcactgttatgccatgtggacatacgatccataagagctgcctgaatgaaatgagagaacatttccagtatgcatgccctctctgctcaaagtcagtctgtgacatgtcaaaggtttgggagaaatttgaccttgagattgctgctacacgaatgcctgagcaatatcaaaataaaatggtttggatcctgtgcaatgactgtggtaaaacttctcacgttcagttccattttgtggctcaaaagtgtccgaactgcaaatcctacaacacacgacaaacatgaggcggagcaggtggccacgattattcattggcttcatcaaaagccttcactcgagagctctcttgatgttgtcgtgacttgtgaaggcagtgaaaatagatgtgcatccattgggtacgtggatgtgcacgt

SEQ ID NO: 54522 - protein, 308 aa, Glycine max
  peptide (1)..(308): Ceres Seq. ID no. 14303488
MGEVAVMHSEPLQFECNDITVNMTEKEVYPPESNVDHLPGEESSQSTDHKNINYLQEKGFMEYGCQHYRRRCRIRAPCCNEIFDCRHCHNEAKNDINIDLKLRHDIPRHEVKQVICSLCGTEQEVQQNCINCGVCMGKYFCGTCKLFDDDISKQQYHCCGCGICRTGGSENFFHCYKCGCCYSTLLKNSHPCVEGAMHHDCPVCFEYLFESRNDVTVMPCGHTIHKSCLNEMREHFQYACPLCSKSVCDMSKVWEKFDLEIAATRMPEQYQNKMVWILCNDCGKTSHVQFHFVAQKCPNCKSYNTRQT

SEQ ID NO: 54523 - protein, 302 aa, Glycine max
  peptide (1)..(302): Ceres Seq. ID no. 14303489
MHSEPLQFECNDITVNMTEKEVYPPESNVDHLPGEESSQSTDHKNINYLQEKGFMEYGCQHYRRRCRIRAPCCNEIFDCRHCHNEAKNDINIDLKLRHDIPRHEVKQVICSLCGTEQEVQQNCINCGVCMGKYFCGTCKLFDDDISKQQYHCCGCGICRTGGSENFFHCYKCGCCYSTLLKNSHPCVEGAMHHDCPVCFEYLFESRNDVTVMPCGHTIHKSCLNEMREHFQYACPLCSKSVCDMSKVWEKFDLEIAATRMPEQYQNKMVWILCNDCGKTSHVQFHFVAQKCPNCKSYNTRQT

SEQ ID NO: 54524 - protein, 286 aa, Glycine max
  peptide (1)..(286): Ceres Seq. ID no. 14303490
MTEKEVYPPESNVDHLPGEESSQSTDHKNINYLQEKGFMEYGCQHYRRRCRIRAPCCNEIFDCRHCHNEAKNDINIDLKLRHDIPRHEVKQVICSLCGTEQEVQQNCINCGVCMGKYFCGTCKLFDDDISKQQYHCCGCGICRTGGSENFFHCYKCGCCYSTLLKNSHPCVEGAMHHDCPVCFEYLFESRNDVTVMPCGHTIHKSCLNEMREHFQYACPLCSKSVCDMSKVWEKFDLEIAATRMPEQYQNKMVWILCNDCGKTSHVQFHFVAQKCPNCKSYNTRQT

SEQ ID NO: 54525 - DNA, 1359 bp, Glycine max
  misc_feature (1)..(1359): Ceres Seq. ID no. 14313947
acattgccacataacacaacatcgaaaccctctctccctctccctctcttcctctccctctcttccaaccattccgaatgtgaacaagttgttgttgttgaacggtattatatatagtgtgtagtgtggtggtttttttttctcttcttgaaggtgcaaaaatgaatgatggtagacaaatgggggtgcattacgtagacgctgggttcccttatgctgttaatgataacttcgtggattttttccaaggattcactcatgtgcccgtcaattatgcctttgctggctcaattcctgatcaggaaagtgtctactggtcaatgaacatgaatccctataagtttggattgtctggtcctgggagtacatcttactatagttcttatgaggtaaatggtcatttgccgagaatggagatagatagggctgagtgggaatacccttcgacaattaccactgtggaagaaccagctacaacagattctccacctagaagagatggagtcacgagcatgcagaccatccctgaagaatgcagtccaaatcatcatgagtccaacagtagtagccaggtcatatggcaagacaacatctatcctgatgatatgacttatgaggaactactggacctgggggaggcagttgggactcaaagccgaggtctttcccaagaacttattgatatgcttccaacctcaaagtacaaatttggtagtttattcaagagaaaaaattctgggaaaaggtgtgtaatttgtcagatgacatacagaagaggtgaccagcaaatgaaattgccatgcagccatgtctatcatggtgaatgcatcaccaagtggcttagcattaacaagaaatgtcctgtttgcaacactgaggtttttggcgaggaatcaacgcattagcatcaaggtggcaaaagaggatcctttttgctctattaatttttgcttctcatccaactcaccctctccctcccattctcttttttaagttttaattttttacacgtaggtaggtgtagtatgaagaactatggcagctctcacacaatatatgttttgtttactagaaacaacctattggagtcgcatcttcttgtggttaatgtgtgattttgtgtgtattcatgcaatatatattctcttagcttttgtgccccttcctttggtatttgggattgaaaaatctgcttctcagccattgaccaacatagaagtgttgagattttggagtaacaatctcatgagcatgctaaatggattgaaaaaggaaatgtgtggaatgctcggggatatggagatcttaatttgagaaaagtgcatgtttcgatatccagtgaaaaattacttgaagcat

SEQ ID NO: 54526 - protein, 247 aa, Glycine max
  peptide (1)..(247): Ceres Seq. ID no. 14313948
MNDGRQMGVHYVDAGFPYAVNDNFVDFFQGFTHVPVNYAFAGSIPDQESVYWSMNMNPYKFGLSGPGSTSYYSSYEVNGHLPRMEIDRAEWEYPSTITTVEEPATTDSPPRRDGVTSMQTIPEECSPNHHESNSSSQVIWQDNIYPDDMTYEELLDLGEAVGTQSRGLSQELIDMLPTSKYKFGSLFKRKNSGKRCVICQMTYRRGDQQMKLPCSHVYHGECITKWLSINKKCPVCNTEVFGEESTH

SEQ ID NO: 54527 - protein, 241 aa, Glycine max
  peptide (1)..(241): Ceres Seq. ID no. 14313949
MGVHYVDAGFPYAVNDNFVDFFQGFTHVPVNYAFAGSIPDQESVYWSMNMNPYKFGLSGPGSTSYYSSYEVNGHLPRMEIDRAEWEYPSTITTVEEPATTDSPPRRDGVTSMQTIPEECSPNHHESNSSSQVIWQDNIYPDDMTYEELLDLGEAVGTQSRGLSQELIDMLPTSKYKFGSLFKRKNSGKRCVICQMTYRRGDQQMKLPCSHVYHGECITKWLSINKKCPVCNTEVFGEESTH

SEQ ID NO: 54528 - protein, 194 aa, Glycine max
  peptide (1)..(194): Ceres Seq. ID no. 14313950
MNMNPYKFGLSGPGSTSYYSSYEVNGHLPRMEIDRAEWEYPSTITTVEEPATTDSPPRRDGVTSMQTIPEECSPNHHESNSSSQVIWQDNIYPDDMTYEELLDLGEAVGTQSRGLSQELIDMLPTSKYKFGSLFKRKNSGKRCVICQMTYRRGDQQMKLPCSHVYHGECITKWLSINKKCPVCNTEVFGEESTH

SEQ ID NO: 54529 - DNA, 2150 bp, Glycine max
  misc_feature (1)..(2150): Ceres Seq. ID no. 14307682
gagaacccatttttcattttctctctcatcttgtagtgctagttgttcttttgagaatagtgggtgtttttgtgcttaaaactataatgtctgtcttaaagtacagaaatctttttctttgtctggtttcatggttgtgctgttgttgtgtggctgtggcttcgagtgagagtagtattggttccaaagaccttgatcagacaccaacatgggctgtggctggtgtctgcactgttttcatcttgatatccataactctggagaaaagccttcacaaagtgggaacgtggctaagggaaaaacacaagaaagctttgcttgaggctttggaaaaggtcaaagctgagttgatggttcttggtttcctttcactgcttctgactttcgggcagagttacattgttagaatatgcattcctatggatgtggcagacaaattgttgccatgtccttatgttggtaacgacaagggatcaagtagtgaagaggaacaccgtaggaaacttctttcttatgaacgcagatatttgtcagatgatgctaccccttaccaatgtaaggagagacatcagccacttatatctggcaatggattgcaccagttacacatcctcgtatttttcttagcagtcctacatgtgttttacagtgccattacaatgcttcttgggagattaaagattcgtggatggaaggcatgggaggcggagacttcatctcatgggtacgagttcgccaatgatccttcaagattccggttgacacatgaaacatcatttgtgaaagctcacgcttctttttggacaagatattcaatcttcttctatataggatgcttctttagacaattttataggtctgtaggcaaggctgactacttggctttgcgcaatggatttatcacggttcacctggctcctggaagtaaatttaacttccaaaagtatatcaaaagatccttggaggatgacttcaaggtagttgttggagtcagtcctgtcctctgggcatcgtttgttgtttttctgctcctaaatgttaacggatggcatgctatgttttgggcatccttaattcctgttgtgataattttggctgttggaacaaaacttcaagctgcactggcaaacatggctattgaaattacagaaagacatgctgttgtccaagggattcctcttgttcaaggctcagacagatatttttggtttggtcggcctcaattagttcttcatcttatccattttgctttgttccagaatgcgttccaaataacatatttcttgtggatatggtattcttttgggctgagaaattgtttccatgctgactacaagcttgcagtagtgaaagtagctttagggcttggggtgctatgtctctgcagctacatcacccttccattatatgctcttgttactcagatgggctcaagaatgaaaaaatcaatatttgacgaacaaacatcgaaggcgttgaagaaatggcacatggctgtgaaaaagaagcaaggagtgaaacttggaaattccaaggtgcgagccatggatggaagcagcactgattcaacaatacactcttctggccccacactacaccgttacaaaactaccggtcactcaactcacttcgtatcaaactacgatgaccaagatgattaccattctgataccgagttgtcttccatttcaccaacaccaaacttgatagtaagagtggaccatgatgaggaagaagcaaaagaaaatgaacaccacccaacagccaacaatcaagaggcccctttacatttgtcaagcctggaaagaagcatgaaatagcatcagaagttactccattcaaccattctttgttcttttacagctttctagatattgttatacttgatcatgatatagtcagttttgtacattcttgttcttaaaaacacttgccgggcattggaaacttttaagcttgctcaaaatcatgcttatagccttattatattgctttgattcgtgtgcttgagcaaaaggatcgttaggaacaattagaggacagaattgttaggtatattatgtgttatatgttgaagggtatatgtaaatcccaattataatataagctttttggccaagtagagcatatagaagaatatacattcagtc

SEQ ID NO: 54530 - protein, 605 aa, Glycine max
  peptide (1)..(605): Ceres Seq. ID no. 14307683
EPIFHFLSHLVVLVVLLRIVGVFVLKTIMSVLKYRNLFLCLVSWLCCCCVAVASSESSIGSKDLDQTPTWAVAGVCTVFILISITLEKSLHKVGTWLREKHKKALLEALEKVKAELMVLGFLSLLLTFGQSYIVRICIPMDVADKLLPCPYVGNDKGSSSEEEHRRKLLSYERRYLSDDATPYQCKERHQPLISGNGLHQLHILVFFLAVLHVFYSAITMLLGRLKIRGWKAWEAETSSHGYEFANDPSRFRLTHETSFVKAHASFWTRYSIFFYIGCFFRQFYRSVGKADYLALRNGFITVHLAPGSKFNFQKYIKRSLEDDFKVVVGVSPVLWASFVVFLLLNVNGWHAMFWASLIPVVIILAVGTKLQAALANMAIEITERHAVVQGIPLVQGSDRYFWFGRPQLVLHLIHFALFQNAFQITYFLWIWYSFGLRNCFHADYKLAVVKVALGLGVLCLCSYITLPLYALVTQMGSRMKKSIFDEQTSKALKKWHMAVKKKQGVKLGNSKVRAMDGSSTDSTIHSSGPTLHRYKTTGHSTHFVSNYDDQDDYHSDTELSSISPTPNLIVRVDHDEEEAKENEHHPTANNQEAPLHLSSLERSMK

SEQ ID NO: 54531 - protein, 577 aa, Glycine max
  peptide (1)..(577): Ceres Seq. ID no. 14307684
MSVLKYRNLFLCLVSWLCCCCVAVASSESSIGSKDLDQTPTWAVAGVCTVFILISITLEKSLHKVGTWLREKHKKALLEALEKVKAELMVLGFLSLLLTFGQSYIVRICIPMDVADKLLPCPYVGNDKGSSSEEEHRRKLLSYERRYLSDDATPYQCKERHQPLISGNGLHQLHILVFFLAVLHVFYSAITMLLGRLKIRGWKAWEAETSSHGYEFANDPSRFRLTHETSFVKAHASFWTRYSIFFYIGCFFRQFYRSVGKADYLALRNGFITVHLAPGSKFNFQKYIKRSLEDDFKVVVGVSPVLWASFVVFLLLNVNGWHAMFWASLIPVVIILAVGTKLQAALANMAIEITERHAVVQGIPLVQGSDRYFWFGRPQLVLHLIHFALFQNAFQITYFLWIWYSFGLRNCFHADYKLAVVKVALGLGVLCLCSYITLPLYALVTQMGSRMKKSIFDEQTSKALKKWHMAVKKKQGVKLGNSKVRAMDGSSTDSTIHSSGPTLHRYKTTGHSTHFVSNYDDQDDYHSDTELSSISPTPNLIVRVDHDEEEAKENEHHPTANNQEAPLHLSSLERSMK

SEQ ID NO: 54532 - protein, 489 aa, Glycine max
  peptide (1)..(489): Ceres Seq. ID no. 14307685
MVLGFLSLLLTFGQSYIVRICIPMDVADKLLPCPYVGNDKGSSSEEEHRRKLLSYERRYLSDDATPYQCKERHQPLISGNGLHQLHILVFFLAVLHVFYSAITMLLGRLKIRGWKAWEAETSSHGYEFANDPSRFRLTHETSFVKAHASFWTRYSIFFYIGCFFRQFYRSVGKADYLALRNGFITVHLAPGSKFNFQKYIKRSLEDDFKVVVGVSPVLWASFVVFLLLNVNGWHAMFWASLIPVVIILAVGTKLQAALANMAIEITERHAVVQGIPLVQGSDRYFWFGRPQLVLHLIHFALFQNAFQITYFLWIWYSFGLRNCFHADYKLAVVKVALGLGVLCLCSYITLPLYALVTQMGSRMKKSIFDEQTSKALKKWHMAVKKKQGVKLGNSKVRAMDGSSTDSTIHSSGPTLHRYKTTGHSTHFVSNYDDQDDYHSDTELSSISPTPNLIVRVDHDEEEAKENEHHPTANNQEAPLHLSSLERSMK

SEQ ID NO: 54533 - DNA, 1704 bp, Glycine max
  misc_feature (1)..(1704): Ceres Seq. ID no. 14307076
tctgcgcgatgttaaggagaagaatgaaggatcttcaaacatgtttgggaatgtagtgttctctgatggcaatgtgatccatggttcaagttcggattctagatatgcacttggatctggttttgttgttgggactgattctgagaatagcgaggatcagagtagcaagtcttctacagcggctagtgagcccaagttgaggcaagagaaaagccgtagcaagaatgtgaattccaagcatttagctaactcggctcaacgagttcaaccaggaaagggacgaactgaaggcagtaagaaaccaggaggaggtggaagagtgaaaattgagaaggaaaattctttttctagtttggaatctgattcaagaagctccaactttaagcaaggtgttttttcggttactagtaatggaaagcatactagtaggccaaatgtttacgatggagttaatagtggtgaagcacacactaatgaacatttcactgagggtgttgaggctggttatggtaacgaaaatgttgttgaggatgaatatcttttacaagagaatttgggtacaaatttgtcttgggatgttacagaagaaaaaagtgtgaacaaccaatcttcagccgttgaagatcctataattgaatcggttagttgccttcaggctgtccaggaggcccttcaagaagaactccagaaattcagggagattgggattgaagctatttcaccagatgatgactcagctaagtgtagcagtgcatctgctggtactactattgatcttggacttaataaatcaagccaatctggtcagtctggtgcagaagaaattagacaaactgcttcaagttcctcagatcctcaggtattgagcctgacacaaaatataaatattttggaaagcaagttggaggatttacagggtgtgcttgctctgaaggactctaggattgctgaactcgaagcatccttgagtagtgttaagatttctagggaagaatctgcaagcaccatagatttgtccgagaaaaaatgtgaaggggttgagtcggagctcgagggccttttcaagctaaggattgaagctgaggttgaatacctagccatctcaaaggtaatgcagaacatgaagggtggggcaggtatccaacagacattattggaagaacaagagaaactgtctgaaaatcaagcgcagattctcgacaaagttgtagatgcagagagtaaggcttcagtgctgaagaacaaaacagaagagttggaaaaatattgtggtgatagtgtagtagttgaggagtcttttgtgctgcagagaagggtatgtaagatgtcattttatcttttcatacagtttatgtttttagttttgatcttttggctttacatgtcacagttatcgcacaattctgggatggttgtgcccacttaggcctgcaaaattaggttcattttgtgcaatcttaatagttttttccttttctttttttctcttttcttttcctgatctttgaatgtaaaatttcgttgttatagaaaactgacccttctttctctgggtagggggagagcgtgtatttgctctcgttgttttaatatcattttgtgcacagccccttgtaatttgggcttggcaaaacaattgttattgttactttttttgttcttcttgagtttaattttaataacatagatttgtatattgtgaac

SEQ ID NO: 54534 - protein, 474 aa, Glycine max
  peptide (1)..(474): Ceres Seq. ID no. 14307077
LRDVKEKNEGSSNMFGNVVFSDGNVIHGSSSDSRYALGSGFVVGTDSENSEDQSSKSSTAASEPKLRQEKSRSKNVNSKHLANSAQRVQPGKGRTEGSKKPGGGGRVKIEKENSFSSLESDSRSSNFKQGVFSVTSNGKHTSRPNVYDGVNSGEAHTNEHFTEGVEAGYGNENVVEDEYLLQENLGTNLSWDVTEEKSVNNQSSAVEDPIIESVSCLQAVQEALQEELQKFREIGIEAISPDDDSAKCSSASAGTTIDLGLNKSSQSGQSGAEEIRQTASSSSDPQVLSLTQNINILESKLEDLQGVLALKDSRIAELEASLSSVKISREESASTIDLSEKKCEGVESELEGLFKLRIEAEVEYLAISKVMQNMKGGAGIQQTLLEEQEKLSENQAQILDKVVDAESKASVLKNKTEELEKYCGDSVVVEESFVLQRRVCKMSFYLFIQFMFLVLIFWLYMSQLSHNSGMVVPT

SEQ ID NO: 54535 - protein, 461 aa, Glycine max
  peptide (1)..(461): Ceres Seq. ID no. 14307078
MFGNVVFSDGNVIHGSSSDSRYALGSGFVVGTDSENSEDQSSKSSTAASEPKLRQEKSRSKNVNSKHLANSAQRVQPGKGRTEGSKKPGGGGRVKIEKENSFSSLESDSRSSNFKQGVFSVTSNGKHTSRPNVYDGVNSGEAHTNEHFTEGVEAGYGNENVVEDEYLLQENLGTNLSWDVTEEKSVNNQSSAVEDPIIESVSCLQAVQEALQEELQKFREIGIEAISPDDDSAKCSSASAGTTIDLGLNKSSQSGQSGAEEIRQTASSSSDPQVLSLTQNINILESKLEDLQGVLALKDSRIAELEASLSSVKISREESASTIDLSEKKCEGVESELEGLFKLRIEAEVEYLAISKVMQNMKGGAGIQQTLLEEQEKLSENQAQILDKVVDAESKASVLKNKTEELEKYCGDSVVVEESFVLQRRVCKMSFYLFIQFMFLVLIFWLYMSQLSHNSGMVVPT

SEQ ID NO: 54536 - DNA, 1176 bp, Glycine max
  misc_feature (1)..(1176): Ceres Seq. ID no. 14310886
tgaatgaagcatattcattttctagtaccattcctatgtacagtgatcgcagtggcatgaacttctcatctcatggagttgaaaagatcaaaaactcagcaggccaaatcatgaaacaagagaaacttgaaagggacaagtctcagcttgaaaaactacaagttcctggaaatcatgattcaccactgtgctcaatagatttaaatgatgtagtcaactatgaggagtttatgagaaacttgacaaatgaagagcagcagcaattactgaagtatctcccggtggttgatactgctaaatttcctgatagccttagaaacatgttcaatagcttccaattcaaggagaacttaatctattttcagcaacttcttggggaaggagtctttgacatctctttgttgggggcaaaacctgaagaatggaagacattaaaaaggcttgcgttatctaatctgtcaaagtcaaaatgggtagaacactataatttcctgaagaaatgtgaaaacaaatctggaaaatctattggtttgggatctactgctatggaatctagttatgttacaactgccaagagaatgcgtgagcatgacagccaaaatcaaaattttccagaattgaagacaacaatgagaagccccaaaagggtgttcataaagcctagctgtgaggtcaaagaagttgtagaagaaggctctagcttcagtccaaaaagcctatttgctttaccccatggtgttggtagcttgcacatgttggattctttcaactttgttggtgagagttctgaagatctgctgttagaggtgccttctaacagttcttttccacaggcagagcttctgcacccatctttaagctatggtgctcaggtcagcaccactagtagctcagtacactctcttgttactcatccttaactaatctttactaggttacttggatgggtatggacacaatatttagtcataatagggttcacatgttttgcatctgaaacaccaaaattcctgtacaagagatatcatggttgtgtttttgtttccttgcaaccttgagcttggatttacaaaggatggaagttgaatgggcttttttttttttttttttgtatagattggtaatagattgtaacatatagcatgaaattcggagtgatcatctccggagttttgt

SEQ ID NO: 54537 - protein, 305 aa, Glycine max
  peptide (1)..(305): Ceres Seq. ID no. 14310887
NEAYSFSSTIPMYSDRSGMNFSSHGVEKIKNSAGQIMKQEKLERDKSQLEKLQVPGNHDSPLCSIDLNDVVNYEEFMRNLTNEEQQQLLKYLPVVDTAKFPDSLRNMFNSFQFKENLIYFQQLLGEGVFDISLLGAKPEEWKTLKRLALSNLSKSKWVEHYNFLKKCENKSGKSIGLGSTAMESSYVTTAKRMREHDSQNQNFPELKTTMRSPKRVFIKPSCEVKEVVEEGSSFSPKSLFALPHGVGSLHMLDSFNFVGESSEDLLLEVPSNSSFPQAELLHPSLSYGAQVSTTSSSVHSLVTHP

SEQ ID NO: 54538 - protein, 294 aa, Glycine max
  peptide (1)..(294): Ceres Seq. ID no. 14310888
MYSDRSGMNFSSHGVEKIKNSAGQIMKQEKLERDKSQLEKLQVPGNHDSPLCSIDLNDVVNYEEFMRNLTNEEQQQLLKYLPVVDTAKFPDSLRNMFNSFQFKENLIYFQQLLGEGVFDISLLGAKPEEWKTLKRLALSNLSKSKWVEHYNFLKKCENKSGKSIGLGSTAMESSYVTTAKRMREHDSQNQNFPELKTTMRSPKRVFIKPSCEVKEVVEEGSSFSPKSLFALPHGVGSLHMLDSFNFVGESSEDLLLEVPSNSSFPQAELLHPSLSYGAQVSTTSSSVHSLVTHP

SEQ ID NO: 54539 - protein, 287 aa, Glycine max
  peptide (1)..(287): Ceres Seq. ID no. 14310889
MNFSSHGVEKIKNSAGQIMKQEKLERDKSQLEKLQVPGNHDSPLCSIDLNDVVNYEEFMRNLTNEEQQQLLKYLPVVDTAKFPDSLRNMFNSFQFKENLIYFQQLLGEGVFDISLLGAKPEEWKTLKRLALSNLSKSKWVEHYNFLKKCENKSGKSIGLGSTAMESSYVTTAKRMREHDSQNQNFPELKTTMRSPKRVFIKPSCEVKEVVEEGSSFSPKSLFALPHGVGSLHMLDSFNFVGESSEDLLLEVPSNSSFPQAELLHPSLSYGAQVSTTSSSVHSLVTHP

SEQ ID NO: 54540 - DNA, 1441 bp, Glycine max
  misc_feature (1)..(1441): Ceres Seq. ID no. 14313803
aactaaactgagaaaaagaagagagagaatcatccttccttttccgagaaagaggaagaaaacgccgagaaaacacagaaaccgatttcgccatcatccatcaaagatccacaaattcattcattcattcagcaatcccaattcattaatctgcaaaatgggttttggatgttgaagcgggggaggattgacaatttgcgatggaaagggaaaattggagagaacacatcaacagcaatagcaatgggaattattacgataggtttgtgtgtgattacgacaacggagaacgaagccctgcaaagccttcttcgcctcccagacttggctacatcgaacaccatgtttccaaattcgataccttggccggtgtcgctatcaagtacggtgttgaggtggcagacataagaaagatgaatagccttgttacagaccatcaaatgtttgcacttaaaactctccacattccgctacctgcaaggcatcctccatctccttatttgtcaaatggttccagtactccaggacatggtaactcggatcacagtccacctaatcaggcacaccatgatctgcttgattcattccaatccctgagaataaagtcatcagagcggaaggtctccccagccatgaactcattacagggctactatggacttaaggggaccccaagtccctcagaagatggtccattccccagaaacttacctatgtctgaccgacctctgagtcatcaccggaaatccagaagtttggtcaatgtaattttggaagaaattatggaaaaatcagatgatgcactggctgcagaaaccagggaagttggctccaataaatggaatgacaaacttggcctgagacatcagaaatctgtagctgactttattaggataccggagttgcttttgagggaggataatagcagcagtggtgttcttccatcaagaacaggaaagggcttagctctgagacagaaagcagctaaccgaaccacagcaacaactgattctgaaccaattggtttgaatcctgcggcgttgggcatgggggatgcttctctaattgatggttcatccggggtcaggaaatcatcaagcacttcttgtttacaggatcaagataacagtggctcctcgtccatttggccaaccaaaatgtggaatttgaaaccagacttacaagccctctcaactgcagccattggaaaaccaatctttgatggctttcccaagccaataactggtcggaaaaataaagctgctcttgattaatgtatagaaaatttatgaacacagttttgaccccgtttgtcaggttatggaatcattagccgctacaccagtgggtagattggaggaagtaagacaatgtagaagggacataaaaaatcaaacatcatattttatttctctttgaataggggcattatttttatgcc

SEQ ID NO: 54541 - protein, 357 aa, Glycine max
  peptide (1)..(357): Ceres Seq. ID no. 14313804
MERENWREHINSNSNGNYYDRFVCDYDNGERSPAKPSSPPRLGYIEHHVSKFDTLAGVAIKYGVEVADIRKMNSLVTDHQMFALKTLHIPLPARHPPSPYLSNGSSTPGHGNSDHSPPNQAHHDLLDSFQSLRIKSSERKVSPAMNSLQGYYGLKGTPSPSEDGPFPRNLPMSDRPLSHHRKSRSLVNVILEEIMEKSDDALAAETREVGSNKWNDKLGLRHQKSVADFIRIPELLLREDNSSSGVLPSRTGKGLALRQKAANRTTATTDSEPIGLNPAALGMGDASLIDGSSGVRKSSSTSCLQDQDNSGSSSIWPTKMWNLKPDLQALSTAAIGKPIFDGFPKPITGRKNKAALD

SEQ ID NO: 54542 - protein, 286 aa, Glycine max
  peptide (1)..(286): Ceres Seq. ID no. 14313805
MNSLVTDHQMFALKTLHIPLPARHPPSPYLSNGSSTPGHGNSDHSPPNQAHHDLLDSFQSLRIKSSERKVSPAMNSLQGYYGLKGTPSPSEDGPFPRNLPMSDRPLSHHRKSRSLVNVILEEIMEKSDDALAAETREVGSNKWNDKLGLRHQKSVADFIRIPELLLREDNSSSGVLPSRTGKGLALRQKAANRTTATTDSEPIGLNPAALGMGDASLIDGSSGVRKSSSTSCLQDQDNSGSSSIWPTKMWNLKPDLQALSTAAIGKPIFDGFPKPITGRKNKAALD

SEQ ID NO: 54543 - protein, 277 aa, Glycine max
  peptide (1)..(277): Ceres Seq. ID no. 14313806
MFALKTLHIPLPARHPPSPYLSNGSSTPGHGNSDHSPPNQAHHDLLDSFQSLRIKSSERKVSPAMNSLQGYYGLKGTPSPSEDGPFPRNLPMSDRPLSHHRKSRSLVNVILEEIMEKSDDALAAETREVGSNKWNDKLGLRHQKSVADFIRIPELLLREDNSSSGVLPSRTGKGLALRQKAANRTTATTDSEPIGLNPAALGMGDASLIDGSSGVRKSSSTSCLQDQDNSGSSSIWPTKMWNLKPDLQALSTAAIGKPIFDGFPKPITGRKNKAALD

SEQ ID NO: 54544 - DNA, 1246 bp, Glycine max
  misc_feature (1)..(1246): Ceres Seq. ID no. 14313796
attcttgtattttgttgcgctgaacaagacaagaaaactacaaagctatgggcaccatcatcgactcccatttcttggccttcactgcccttgtcactattgcctatcagtttttgtttttcgtcgtcactgcgctcctcaaattcgacaaagtcactgattttgctggaagtacgaatttcattataattgctgcattgaccctggtcatcaaaggctcctggtattttcgacagataatcctcactttgtttgttgggatatggggaattcgcctcggccttttcctcctattcagaattttgcagtggggagaggaccgacgctttgatgaaatgcgcagtaatttgggtagactggccatattttggatatttcaggctgtctgggtgtgggctgtgagtttacctgttacagtggttaatgcaagcgacagaaatcccttcctacaggttgttgatatagtagggtggattttgtgggctgtgggttttattgtggaaggtacagcagatcaacaaaagctgcatttcaaaagatcttcagaaaatagagggaagtggtgtaatgttggactttggaaatattctcgtcatcctaactattttggtgaaatattgctttggtggggaatttttgtggcatctacacctgtactgaagggtgctgaatggctggtgatcattggaccaatctttctcacattattgcttctttttgtcagtggcattccacttcttgaggattcagcggataaaaagtttggcaatgtagatggatataggatatacaaaaagagaaccagccctttaatcccgttgccacgatcaatctatgggaacttatccgcatggttcaaaacaacttttctcttcgagtttccattctacagtcgtaatctaccacaagaagagaactggtgaaatggtattaaattttttagtatctgctcaaggtgcagtgcaaacagtgggaaaatcagtgatgctctgaaaattggctagcacttggttctttgaatttgtttggttcctgtcttacgtcagactgaagttgcagctggtatcatcatccgccatggttagggatgtggctttgtaatgctattgcagctttccttctagatttaatctttctaatttgcttgttctctcttagatatgtataaatttacgtactatatatgttgtgtgcaagtactatggcttgtgcaggtaactaatggatcaatcatgtttttcatctt

SEQ ID NO: 54545 - protein, 291 aa, Glycine max
  peptide (1)..(291): Ceres Seq. ID no. 14313797
MGTIIDSHFLAFTALVTIAYQFLFFVVTALLKFDKVTDFAGSTNFIIIAALTLVIKGSWYFRQIILTLFVGIWGIRLGLFLLFRILQWGEDRRFDEMRSNLGRLAIFWIFQAVWVWAVSLPVTVVNASDRNPFLQVVDIVGWILWAVGFIVEGTADQQKLHFKRSSENRGKWCNVGLWKYSRHPNYFGEILLWWGIFVASTPVLKGAEWLVIIGPIFLTLLLLFVSGIPLLEDSADKKFGNVDGYRIYKKRTSPLIPLPRSIYGNLSAWFKTTFLFEFPFYSRNLPQEENW

SEQ ID NO: 54546 - protein, 195 aa, Glycine max
  peptide (1)..(195): Ceres Seq. ID no. 14313798
MRSNLGRLAIFWIFQAVWVWAVSLPVTVVNASDRNPFLQVVDIVGWILWAVGFIVEGTADQQKLHFKRSSENRGKWCNVGLWKYSRHPNYFGEILLWWGIFVASTPVLKGAEWLVIIGPIFLTLLLLFVSGIPLLEDSADKKFGNVDGYRIYKKRTSPLIPLPRSIYGNLSAWFKTTFLFEFPFYSRNLPQEENW

SEQ ID NO: 54547 - DNA, 1554 bp, Glycine max
  misc_feature (1)..(1554): Ceres Seq. ID no. 14312204
aacagccggcggcggccacagaggcgagcagagcagagcagagtgggcaacaagcgaagaatggcgacggagatggaagaactcgtctcctttctttcttccccatcgccacagatcagaaaagccgccgttgacatagttcgcggcttaaccggctccgtcgagggcttgcagtccctcgccaattactcaaacgccctcttacccgccttgtctcgcctcttaacgttacccaaggaggtttcggaggctgctgcggaggcgctggtgaacctgtcgcagaactcgagcctcgcggaggtgatggttcgaatgggactggtcaaaacggcgatggatgttctgtacaagcccgactgcggcattgctcgcttgcttgtcatgcttttggtcaacctcactcaactcgaagctggtgctgcttccttgcttcagactgaagatgagaaggtgcttggattatatgttattaagcttgtgagatcattttgtagaaccacccatgagaataatgttttctctttgggctgaagcacctgtattggagagttcagattcaaagatgatgcttttgaacatgttggttcaatacttgttaacatctcaaaacagcggaaagggagggagcttctacttgacccaaaacggggtctcttaaagcagataatcagacagtttgattccaacagttcattgagaaagaaaggggtctctggaactattcgcaactgttgttttgaagctgagaatcagctacaaaatttgcttttggtatcagagtttctctggcccgcattacttcttcctgtagctggcaacaagatctacagtgagcaagacagatcgaaaatgccacttgaacttgggactgcactctcgattgaacgtgaactagttaatgatccagaaattcgtattcaggcattggaagccatatacttgatcatattgcaggaggcaggtcgaagagccttttggtctgtaaatggacctagaatagtacaaattggctacgaagatgaggaagatccaaaggtgatggaagcatatgaacaattgggatctttgttggttcacagcagcagtgcggaggaaccatccagtcagaccacaaagtagttattttatattaccatcagttgacccttcaatatctctccataagaactttaataattatgaaggtaattccaagtcaattttccattttgaggttagaattaccaattttagaaatatgtaaattatgcggctcagagtagttagtcaaaattatttatacacatggcagaatgagtgaagatgctcccttgatgcaaaatttcagtttgcttcttcagtttctgtatttggaattttgaattctctaaactgcaggtacaatatttcactttggaagatattatgtagcctgttttctttggattattagtaatcattcatttggctggtaaacgccactgataattcctagcacctatgtcattagtgtgcatttggttgtagtatttgagaatttcaaataatttaacatttaagaattttaattgcttc

SEQ ID NO: 54548 - protein, 176 aa, Glycine max
  peptide (1)..(176): Ceres Seq. ID no. 14312205
NSRRRPQRRAEQSRVGNKRRMATEMEELVSFLSSPSPQIRKAAVDIVRGLTGSVEGLQSLANYSNALLPALSRLLTLPKEVSEAAAEALVNLSQNSSLAEVMVRMGLVKTAMDVLYKPDCGIARLLVMLLVNLTQLEAGAASLLQTEDEKVLGLYVIKLVRSFCRTTHENNVFSLG

SEQ ID NO: 54549 - protein, 156 aa, Glycine max
  peptide (1)..(156): Ceres Seq. ID no. 14312206
MATEMEELVSFLSSPSPQIRKAAVDIVRGLTGSVEGLQSLANYSNALLPALSRLLTLPKEVSEAAAEALVNLSQNSSLAEVMVRMGLVKTAMDVLYKPDCGIARLLVMLLVNLTQLEAGAASLLQTEDEKVLGLYVIKLVRSFCRTTHENNVFSLG

SEQ ID NO: 54550 - protein, 152 aa, Glycine max
  peptide (1)..(152): Ceres Seq. ID no. 14312207
MEELVSFLSSPSPQIRKAAVDIVRGLTGSVEGLQSLANYSNALLPALSRLLTLPKEVSEAAAEALVNLSQNSSLAEVMVRMGLVKTAMDVLYKPDCGIARLLVMLLVNLTQLEAGAASLLQTEDEKVLGLYVIKLVRSFCRTTHENNVFSLG

SEQ ID NO: 54551 - DNA, 649 bp, Glycine max
  misc_feature (1)..(649): Ceres Seq. ID no. 13581273
acaatmaaccaaacacaacacttcactctcaagnttcaagcatgactcctttttacytcctcctatttgccttcatccttttcctctccataaacttcttgatccaaacaagaaggttcaaaaaccttcctccgggaccattttctttccctataatcggaaacctccaccaactcaagcaacccctccaccgcacgttccatgccttatcacaaaaatatggccctattttctccctctggttcggctcccgttttgtcgtcgtcgtttcgtcgccgctcgcggtgcaagaatgcttcaccaagaacgacatcgtcttggccaaccgccctcacttcctcaccggcaagtatatagggtacaacaacaccaccgtcgccgtttccccctacggcgaccactggcgcaacctccgccgcatcatggcgctcgaggttctctccacccaccggataaactccttcttggaaaatcggagggacgagatcatgaggctcgtgcaaaagcttgctcgggactcgcgcaatggcttcaccaaagtagaacttaaatccaggttttcggagatgacatttaacactataatgaggatggtgtcagggaagavgtactatggtgaagactgkgatgtgagtgatgtacavgaagc

SEQ ID NO: 54552 - protein, 215 aa, Glycine max
  peptide (1)..(215): Ceres Seq. ID no. 13581274
  misc_feature (2)..(2): Xaa is any aa, unknown or other
  misc_feature (11)..(11): Xaa is any aa, unknown or other
  misc_feature (19)..(19): Xaa is any aa, unknown or other
  misc_feature (202)..(202): Xaa is any aa, unknown or other
  misc_feature (208)..(208): Xaa is any aa, unknown or other
  misc_feature (214)..(214): Xaa is any aa, unknown or other
NXPNTTLHSQXSSMTPFYXLLFAFILFLSINFLIQTRRFKNLPPGPFSFPIIGNLHQLKQPLHRTFHALSQKYGPIFSLWFGSRFVVVVSSPLAVQECFTKNDIVLANRPHFLTGKYIGYNNTTVAVSPYGDHWRNLRRIMALEVLSTHRINSFLENRRDEIMRLVQKLARDSRNGFTKVELKSRFSEMTFNTIMRMVSGKXYYGEDXDVSDVXE

SEQ ID NO: 54553 - protein, 202 aa, Glycine max
  peptide (1)..(202): Ceres Seq. ID no. 13581275
  misc_feature (6)..(6): Xaa is any aa, unknown or other
  misc_feature (189)..(189): Xaa is any aa, unknown or other
  misc_feature (195)..(195): Xaa is any aa, unknown or other
  misc_feature (201)..(201): Xaa is any aa, unknown or other
MTPFYXLLFAFILFLSINFLIQTRRFKNLPPGPFSFPIIGNLHQLKQPLHRTFHALSQKYGPIFSLWFGSRFVVVVSSPLAVQECFTKNDIVLANRPHFLTGKYIGYNNTTVAVSPYGDHWRNLRRIMALEVLSTHRINSFLENRRDEIMRLVQKLARDSRNGFTKVELKSRFSEMTFNTIMRMVSGKXYYGEDXDVSDVXE

SEQ ID NO: 54554 - protein, 182 aa, Glycine max
  peptide (1)..(182): Ceres Seq. ID no. 13581276
  misc_feature (2)..(2): Xaa is any aa, unknown or other
  misc_feature (11)..(11): Xaa is any aa, unknown or other
  misc_feature (19)..(19): Xaa is any aa, unknown or other
QXTKHNTSLSXFKHDSFLXPPICLHPFPLHKLLDPNKKVQKPSSGTIFFPYNRKPPPTQATPPPHVPCLITKIWPYFLPLVRLPFCRRRFVAARGARMLHQERHRLGQPPSLPHRQVYRVQQHHRRRFPLRRPLAQPPPHHGARGSLHPPDKLLLGKSEGRDHEARAKACSGLAQWLHQSRT

SEQ ID NO: 54555 - DNA, 1157 bp, Glycine max
  misc_feature (1)..(1157): Ceres Seq. ID no. 14303405
aatttctcatggaagatggctacagttttgaaggtttttgggaaaaaccacattttggtcaggctacttggatcttctttggaatttcaagtgagcaaatttgacattcgggtgagacagtcttggcaagatgacaagtggattatagttggaaagggttcttccagccatgaaaacagaaaacgttctagcgcccaacttcagaagatgtatacaaagacaaaactgtcaggttccgcttactatcgtcctgaaaagaaaaaactgagtattctggaatccaaactcgtttcttttaaaacattgaaacgaggaagcaattcacaagttgacgcatatgctaagcctcccccaaagtttagagcacgtgaaaatgaaggcagatgtcacagagcaagacttagaaatccacccacaccactcaaacaggtacagggtgtcagttttccaagagaagtgatcgctgaagaatgcatacctgcttctgtaaacaacagaaaaactgggatttctaatatggttgacatggagaggaggaaacagacaggagaaaacttagaatcaaatcatgcttatagtgttacatgctctgttggtagttgtagtatcactagcaggaattcctataaatcgcaatttcctgtatatgcaggtccttttgatgatgtagacagttcatttagtgatgctgagtctgtctgccagaggagtgatgaggaagggaattgttcccctcctacacaagaggaattggcggcagaaattcataggttagagttgcatgcctatcattgtacaattgaggcattgcatgcatcaggacccttaagttgggaacaggaagcattaatgacaaacctccgtctttcgctccacatatcaaacgatgaacacttaatggagctaagaaatttgatttcttctgaaaacagcattcctttcagatgacaggaatttttttcctcttcaatttaatactttttccctaggatagagtttcggaatagtttgatctcagcctcattcaactgtaagaagaaagatgaaatatttcggtccttcatttatgttttatgacttagtgatatagtttgatgtgaatgtacatgctaaacttcgtaaataagtgatcatttctgaactcttgttaatcaaag

SEQ ID NO: 54556 - protein, 315 aa, Glycine max
  peptide (1)..(315): Ceres Seq. ID no. 14303406
NFSWKMATVLKVFGKNHILVRLLGSSLEFQVSKFDIRVRQSWQDDKWIIVGKGSSSHENRKRSSAQLQKMYTKTKLSGSAYYRPEKKKLSILESKLVSFKTLKRGSNSQVDAYAKPPPKFRARENEGRCHRARLRNPPTPLKQVQGVSFPREVIAEECIPASVNNRKTGISNMVDMERRKQTGENLESNHAYSVTCSVGSCSITSRNSYKSQFPVYAGPFDDVDSSFSDAESVCQRSDEEGNCSPPTQEELAAEIHRLELHAYHCTIEALHASGPLSWEQEALMTNLRLSLHISNDEHLMELRNLISSENSIPFR

SEQ ID NO: 54557 - protein, 310 aa, Glycine max
  peptide (1)..(310): Ceres Seq. ID no. 14303407
MATVLKVFGKNHILVRLLGSSLEFQVSKFDIRVRQSWQDDKWIIVGKGSSSHENRKRSSAQLQKMYTKTKLSGSAYYRPEKKKLSILESKLVSFKTLKRGSNSQVDAYAKPPPKFRARENEGRCHRARLRNPPTPLKQVQGVSFPREVIAEECIPASVNNRKTGISNMVDMERRKQTGENLESNHAYSVTCSVGSCSITSRNSYKSQFPVYAGPFDDVDSSFSDAESVCQRSDEEGNCSPPTQEELAAEIHRLELHAYHCTIEALHASGPLSWEQEALMTNLRLSLHISNDEHLMELRNLISSENSIPFR

SEQ ID NO: 54558 - protein, 246 aa, Glycine max
  peptide (1)..(246): Ceres Seq. ID no. 14303408
MYTKTKLSGSAYYRPEKKKLSILESKLVSFKTLKRGSNSQVDAYAKPPPKFRARENEGRCHRARLRNPPTPLKQVQGVSFPREVIAEECIPASVNNRKTGISNMVDMERRKQTGENLESNHAYSVTCSVGSCSITSRNSYKSQFPVYAGPFDDVDSSFSDAESVCQRSDEEGNCSPPTQEELAAEIHRLELHAYHCTIEALHASGPLSWEQEALMTNLRLSLHISNDEHLMELRNLISSENSIPFR

SEQ ID NO: 54559 - DNA, 1086 bp, Glycine max
  misc_feature (1)..(1086): Ceres Seq. ID no. 14307472
atagagagaaggattcagactctggaagcttcctttggccggagaagaagacggtgtcgtttgagacttgggggagaggagaatgacagagttgagcagcagagaggtggaatacataaggagacaccacagcaaggcagcagaggacaatcagtgtgcctctgctctcgttaagcacataagggccccacttcctctcgtaattccctttgcatcattaagtaattaagtaattattatattattaattactttatgatttgtaggtgtggtcgttggtgaggagatttgatgagccgcagaagtataaaccgtttgtgagcaggtgcgtggtgaggggaaaccttgagattgggagtttgagagaggttgatgttaagtccggccttccagcgactactagtactgaaagattagagattcttgatgacaatcatcatatacttagcgtcaggattattggcggtgatcatagacttaggaactactcgtctatcatgtccctccacccagaaattgttgatggaaggccaggtaccctggtaattgaatcatttgtggtggacatacctgaaggcaacaccaaggatgagacctgctacttcgttgaagcattgatcaaatgcaatctcaaatcacttgctgatgtctcagaaggccttactttgcaggaccacactgaaccaattgatcgaaaatacgagttattgatcacaagaggctgagaatttggctgccatggatgaagctttcccaactttggaggcatagaagacggaatgccaaatggcaatggtgctttattctctgttatatatgattgcttttgctcgtttctctctttagtggtagttaaaaagaatagaatgttttagacaaatgtctgaatcagtgcaggaaaaggtgactgcatgttatgttctttctgtatataggtgttggtcaaagttggtccgtaaaattgtttccattggtcagtactcagttgtaatttctggttgcagtaaatttttagcaaataacagaggtttcttcttaaatgagtactattatattataaataatatctcgacagcttatgtaaag

SEQ ID NO: 54560 - protein, 75 aa, Glycine max
  peptide (1)..(75): Ceres Seq. ID no. 14307473
MSLHPEIVDGRPGTLVIESFVVDIPEGNTKDETCYFVEALIKCNLKSLADVSEGLTLQDHTEPIDRKYELLITRG

SEQ ID NO: 54561 - protein, 69 aa, Glycine max
  peptide (1)..(69): Ceres Seq. ID no. 14307474
MSESVQEKVTACYVLSVYRCWSKLVRKIVSIGQYSVVISGCSKFLANNRGFFLNEYYYIINNISTAYVK

SEQ ID NO: 54562 - protein, 57 aa, Glycine max
  peptide (1)..(57): Ceres Seq. ID no. 14307475
IERRIQTLEASFGRRRRRCRLRLGGEENDRVEQQRGGIHKETPQQGSRGQSVCLCSR

SEQ ID NO: 54563 - DNA, 1101 bp, Glycine max
  misc_feature (1)..(1101): Ceres Seq. ID no. 14303324
gaacataatgatacacaatatttttctcctttcaactttaaatccttcccaatttatgtcatacccacttcgaggcttcaagtgctagctagcaacgtgcaaggaaactcactcttgaagtttgtgaatgtcctttgttggtaaggatgggaaggaagccatgttgtgacaagatggggttgaagaagggttcttggactgctgaagaggatgagattcttgttaattatatcaacaagaatggtggtcatggaagttggcgttctctccctaagttagcaggtcttcttcgttgtggcaagagttgccggctaagatggacaaactacctcagaccagatattaaacgtggttcctttacacttgaggaagaaaaactaatcatacagcttcatggtatccttggaaataggtgggctgctatagcctctcagctaccaggaagaacagacaatgagatcaagaacttatggaacacccacttaaagaaacgtctcatttgcatgggcctggacccacaaacccaccaaccactagcctctcctcataacctaaacgacaaggcccatgcatcatccacttcaacccgccacatggcccagtgggagactgcaaggcttgaagcagaggccaggctctcaagggagccacatttcaacaacaaaactgactctgactacttcctccgcatttggaactctgaagttggagaatcttttcgtgatgtccacaaatcagaatcttcaatcaaatgtgagtcattgtctgccaccactactactaccactacagatttggcttcctcaaccccagcaagcattgtcaaaaaggagtttttgtggggtgttaagaaaattgtctcttattcatcatcaagctctagtgaactagaacatgactcttgtgacacttcattgcagttcttgttggactttcctataaacaatgacatgagcttcttagaattatgagacaccaacccttccttacccttaattagtgcacgtatgatgttgttgatatgctgacatgtatccttctgttggctattttgtagacttatatcatgtttggataactataaaaattgattctgaaacc

SEQ ID NO: 54564 - protein, 274 aa, Glycine max
  peptide (1)..(274): Ceres Seq. ID no. 14303325
MGRKPCCDKMGLKKGSWTAEEDEILVNYINKNGGHGSWRSLPKLAGLLRCGKSCRLRWTNYLRPDIKRGSFTLEEEKLIIQLHGILGNRWAAIASQLPGRTDNEIKNLWNTHLKKRLICMGLDPQTHQPLASPHNLNDKAHASSTSTRHMAQWETARLEAEARLSREPHFNNKTDSDYFLRIWNSEVGESFRDVHKSESSIKCESLSATTTTTTTDLASSTPASIVKKEFLWGVKKIVSYSSSSSSELEHDSCDTSLQFLLDFPINNDMSFLEL

SEQ ID NO: 54565 - protein, 265 aa, Glycine max
  peptide (1)..(265): Ceres Seq. ID no. 14303326
MGLKKGSWTAEEDEILVNYINKNGGHGSWRSLPKLAGLLRCGKSCRLRWTNYLRPDIKRGSFTLEEEKLIIQLHGILGNRWAAIASQLPGRTDNEIKNLWNTHLKKRLICMGLDPQTHQPLASPHNLNDKAHASSTSTRHMAQWETARLEAEARLSREPHFNNKTDSDYFLRIWNSEVGESFRDVHKSESSIKCESLSATTTTTTTDLASSTPASIVKKEFLWGVKKIVSYSSSSSSELEHDSCDTSLQFLLDFPINNDMSFLEL

SEQ ID NO: 54566 - protein, 155 aa, Glycine max
  peptide (1)..(155): Ceres Seq. ID no. 14303327
MGLDPQTHQPLASPHNLNDKAHASSTSTRHMAQWETARLEAEARLSREPHFNNKTDSDYFLRIWNSEVGESFRDVHKSESSIKCESLSATTTTTTTDLASSTPASIVKKEFLWGVKKIVSYSSSSSSELEHDSCDTSLQFLLDFPINNDMSFLEL

SEQ ID NO: 54567 - DNA, 1017 bp, Glycine max
  misc_feature (1)..(1017): Ceres Seq. ID no. 14303336
atatttacttatttctcttccgtcttctgtaaatggttgatgatcatgttcacttttctttcagccaagtgattctcttccccccttgatctgcctataaatccactaagcacacactcaaaggacacagtcacatttagatataaacaaaagaagaaaagaaagaaaataatgtcaatggaaatgatggcaaccgaacgtgtttgttatgttcactgcaacttctgcaacaccattttggcggttagtgttccatacagcagtttgctaaccatagtgacggttagatgtggacattgtgccaatttgctatcagttaacatgggagcgtcacttcaagcatttccccctcaagaccctcagtcacagaaacagcttctaagctttgaagaaccaagcagctgcaaggaactgggatcatcatcttcaaaatgtaacaaaatagcgccatttcacgaggcagtagagcatgaacaacctaggattcctcccattcgtcctacagagaagagacatcgtgttccttctgcttataatcgcttcattaaggaggaaattcaaaggattaaggctagtaatccagatatcagccacagggaggctttcagctcagcagccaaaaactgggcacatttccctcacattcactttgggttaaagaacttaaagctggatggcaacaagcaagaaaagttggaccagggggaaggagctgaaaagtctaatggattctactgatgatataaatggaagcctgtgagtatgagcttgtttttgttatgcttgacctaaatcagtgaaaaatatgaggttgatcaaatttcttcccaatatatcgtacaactggatgggagactcctgcaagttaacctcagcctctcacaccaatgtttaatagtactacatatatatgtattgcccttttctatatatcgttgttatgaaatgattgctattcttgtgattgcatttattgtgttgaatttgagcacttaagtaaacaacacgttcctctat

SEQ ID NO: 54568 - protein, 188 aa, Glycine max
  peptide (1)..(188): Ceres Seq. ID no. 14303337
MSMEMMATERVCYVHCNFCNTILAVSVPYSSLLTIVTVRCGHCANLLSVNMGASLQAFPPQDPQSQKQLLSFEEPSSCKELGSSSSKCNKIAPFHEAVEHEQPRIPPIRPTEKRHRVPSAYNRFIKEEIQRIKASNPDISHREAFSSAAKNWAHFPHIHFGLKNLKLDGNKQEKLDQGEGAEKSNGFY

SEQ ID NO: 54569 - protein, 186 aa, Glycine max
  peptide (1)..(186): Ceres Seq. ID no. 14303338
MEMMATERVCYVHCNFCNTILAVSVPYSSLLTIVTVRCGHCANLLSVNMGASLQAFPPQDPQSQKQLLSFEEPSSCKELGSSSSKCNKIAPFHEAVEHEQPRIPPIRPTEKRHRVPSAYNRFIKEEIQRIKASNPDISHREAFSSAAKNWAHFPHIHFGLKNLKLDGNKQEKLDQGEGAEKSNGFY

SEQ ID NO: 54570 - protein, 184 aa, Glycine max
  peptide (1)..(184): Ceres Seq. ID no. 14303339
MMATERVCYVHCNFCNTILAVSVPYSSLLTIVTVRCGHCANLLSVNMGASLQAFPPQDPQSQKQLLSFEEPSSCKELGSSSSKCNKIAPFHEAVEHEQPRIPPIRPTEKRHRVPSAYNRFIKEEIQRIKASNPDISHREAFSSAAKNWAHFPHIHFGLKNLKLDGNKQEKLDQGEGAEKSNGFY

SEQ ID NO: 54571 - DNA, 1491 bp, Glycine max
  misc_feature (1)..(1491): Ceres Seq. ID no. 15171594
agagatgcagccttgtgtatctaatgtcttcccaaatagatttcctattaaaaagaacattgctgcaaagcttgacaagtgcaggaaacaaataaaatatgctaagaaatcgttggacaatgggataccctattatggaattgatgcatgtaatgaggttttgaatggctatagccatattattgggcctgcactgaaacatgaatgcttgtgtactcgtgctgcactattggtcaagaggaagtggaaaaacgatgctcatatggctataagagactgctatgctgctaggataattgataattcctcttacaaagcactatactatatgtcagaagcattgtcacagttgggtagacatgaagatgctttggagtttgctgttgcttcccattctttggccccatccaaatctgaagttgcagaaagagtagcgaatgtgaagagggacattgctttagctgaagctgaaaaaaatagtcagaccaatgatggggcatcaaggtttgatagtaggggtggaagaatattatcattaagcgacatactctattgtcctgagtctaatagtgatgatccacatgatggttcaagatcagagagggatgattctgattacgatgacgaattggagttggactttgaaacatcaatatctggtgatgagggacatgatcttgaatcaaatattcttcatggaaatttaaatcttagaattcatgggagaggtgactccagagacaatgctgatgcaagtggctcatgtgaatcaccttcatcatcgtcacagaacagtagaacttcttatcagcctgaaccagctgttgatatgaaacagagatttgttggccactgcaatattgggactgacataaaacaagccagttttcttggtcaaagaggtgaatatgttgctagtggaagtgatgatggcagatggtttatttgggaaaagtgtacgggcagactaataaaaatgctgagtggtgatgaatctgttgtaaattgtgtacaatgccatccatttgattttgttgttgcaaccagtgggattgatagcacaataaagatctggactccaactgctcctgttccatcttctgtagctggtggttcagcaggaccagaaactggtgatgtgttggttgctatggagagcaatcaacaaaaactatcccgtagccataattctatcttgcccttattggaatcatttaggaggcaggattttcctgaagggtcgttacgcttgcatccatttgaatgtgctcaaagctaaaggtttgctaattgtcttctggtgggtgctctattcggttgtgcatatgaatctggactgattagtgatgacattgatggggaggagccactatcgatgggtatgaggtatatgagctttttcactatggaaggcattgggacgcgcagaataatttggagcggtgaaaataaaatcctgggtgttatcctggatttctttccaggattgac

SEQ ID NO: 54572 - protein, 425 aa, Glycine max
  peptide (1)..(425): Ceres Seq. ID no. 15171595
EMQPCVSNVFPNRFPIKKNIAAKLDKCRKQIKYAKKSLDNGIPYYGIDACNEVLNGYSHIIGPALKHECLCTRAALLVKRKWKNDAHMAIRDCYAARIIDNSSYKALYYMSEALSQLGRHEDALEFAVASHSLAPSKSEVAERVANVKRDIALAEAEKNSQTNDGASRFDSRGGRILSLSDILYCPESNSDDPHDGSRSERDDSDYDDELELDFETSISGDEGHDLESNILHGNLNLRIHGRGDSRDNADASGSCESPSSSSQNSRTSYQPEPAVDMKQRFVGHCNIGTDIKQASFLGQRGEYVASGSDDGRWFIWEKCTGRLIKMLSGDESVVNCVQCHPFDFVVATSGIDSTIKIWTPTAPVPSSVAGGSAGPETGDVLVAMESNQQKLSRSHNSILPLLESFRRQDFPEGSLRLHPFECAQS

SEQ ID NO: 54573 - protein, 424 aa, Glycine max
  peptide (1)..(424): Ceres Seq. ID no. 15171596
MQPCVSNVFPNRFPIKKNIAAKLDKCRKQIKYAKKSLDNGIPYYGIDACNEVLNGYSHIIGPALKHECLCTRAALLVKRKWKNDAHMAIRDCYAARIIDNSSYKALYYMSEALSQLGRHEDALEFAVASHSLAPSKSEVAERVANVKRDIALAEAEKNSQTNDGASRFDSRGGRILSLSDILYCPESNSDDPHDGSRSERDDSDYDDELELDFETSISGDEGHDLESNILHGNLNLRIHGRGDSRDNADASGSCESPSSSSQNSRTSYQPEPAVDMKQRFVGHCNIGTDIKQASFLGQRGEYVASGSDDGRWFIWEKCTGRLIKMLSGDESVVNCVQCHPFDFVVATSGIDSTIKIWTPTAPVPSSVAGGSAGPETGDVLVAMESNQQKLSRSHNSILPLLESFRRQDFPEGSLRLHPFECAQS

SEQ ID NO: 54574 - protein, 338 aa, Glycine max
  peptide (1)..(338): Ceres Seq. ID no. 15171597
MAIRDCYAARIIDNSSYKALYYMSEALSQLGRHEDALEFAVASHSLAPSKSEVAERVANVKRDIALAEAEKNSQTNDGASRFDSRGGRILSLSDILYCPESNSDDPHDGSRSERDDSDYDDELELDFETSISGDEGHDLESNILHGNLNLRIHGRGDSRDNADASGSCESPSSSSQNSRTSYQPEPAVDMKQRFVGHCNIGTDIKQASFLGQRGEYVASGSDDGRWFIWEKCTGRLIKMLSGDESVVNCVQCHPFDFVVATSGIDSTIKIWTPTAPVPSSVAGGSAGPETGDVLVAMESNQQKLSRSHNSILPLLESFRRQDFPEGSLRLHPFECAQS

SEQ ID NO: 54575 - DNA, 1135 bp, Glycine max
  misc_feature (1)..(1135): Ceres Seq. ID no. 14304848
ggaaacgcggctttctactgccacgtcttctctcgctccttaaccttaaaccctaaccctctgctcctcgtttccccgtttcggaaacccgaaacgtttcgcctcgcttcacccgtttcgtgcttatcctcctcctcaatggcggtgcctccgtcttcgctggagaagcaattcgatgactttagggttcagctggaagaatctggaaccttgcgcgaacgaattcgaagcgtcgtttcggagattgagtcctccactaggctcatctatgccacacttcttctcgttcaccagtctcgtcccactcccgagcttttagagaaggccaagtctcatgttaatgtgttaaagaagcagtataagcaacttgctgaagttgttggaggatgccctgggcaatactataggtaccatggtgattggaagagtgagacacagtctgtagtttcaatgcttacatttatgcactggcttgaaacaggaagccttctcgagcacaaagaggctgaggaaaaacttgggttgaatagttcagaatttggcctagacgttgaagattacttaataggtgtctgttttatgtctaatgaattgccaaggtatgtggtgaatcaagtgacagctggggactatgattgtccaaggaaggtcttaaagttcttaacagatctccatgctgcattccgcatgcttaatctacgaaatgattttttgcgaaagaagtttgatggcatgaagtatgacttaagaaaagtcgaagaagtttactatgatgttaagattcggggtttgacaccgaatggtgagccagttggagacttggagatcaaggaatcgcaggacaatcttaatcttaagttgtgatacctgtagacccaaagtacatggagctttactagcttcttaacaaactatggaccttaaaaattgataggcttagctttttgttagctgtaacgggagttctatttctaatggttgatgaaagcaagattcatgagtaaggaaatacaattgccagtatgtgctgctgactttcaaccatcgtgagaactaagaaccctgtactcaatgcttgtgggttgaacggggattttcaattcaatccacagcggacaatttgaagtttttcttt

SEQ ID NO: 54576 - protein, 287 aa, Glycine max
  peptide (1)..(287): Ceres Seq. ID no. 14304849
GNAAFYCHVFSRSLTLNPNPLLLVSPFRKPETFRLASPVSCLSSSSMAVPPSSLEKQFDDFRVQLEESGTLRERIRSVVSEIESSTRLIYATLLLVHQSRPTPELLEKAKSHVNVLKKQYKQLAEVVGGCPGQYYRYHGDWKSETQSVVSMLTFMHWLETGSLLEHKEAEEKLGLNSSEFGLDVEDYLIGVCFMSNELPRYVVNQVTAGDYDCPRKVLKFLTDLHAAFRMLNLRNDFLRKKFDGMKYDLRKVEEVYYDVKIRGLTPNGEPVGDLEIKESQDNLNLKL

SEQ ID NO: 54577 - protein, 241 aa, Glycine max
  peptide (1)..(241): Ceres Seq. ID no. 14304850
MAVPPSSLEKQFDDFRVQLEESGTLRERIRSVVSEIESSTRLIYATLLLVHQSRPTPELLEKAKSHVNVLKKQYKQLAEVVGGCPGQYYRYHGDWKSETQSVVSMLTFMHWLETGSLLEHKEAEEKLGLNSSEFGLDVEDYLIGVCFMSNELPRYVVNQVTAGDYDCPRKVLKFLTDLHAAFRMLNLRNDFLRKKFDGMKYDLRKVEEVYYDVKIRGLTPNGEPVGDLEIKESQDNLNLKL

SEQ ID NO: 54578 - DNA, 1613 bp, Glycine max
  misc_feature (1)..(1613): Ceres Seq. ID no. 14313811
ggtcagccactgcaaccaagccaacggcatcatggaagacagtttcagagtacgagcagagagagcctttggttctcttccaatcccttcttcttctctcaacactctctggtctctcaccgaagacgaaatcaataactccccttccaatcgcacccccaaacctaaacccaaaccctacccctcttcaagctcccgggttcagctccagaagggcctccacgatctcgacgacgacgacgacgacgacgacgaagaagaagaagagcctcgtggagtctctaaaccccctgattacgacgatgaacagtggcagattagggctggtattggccgagattgcaccctcgattacgaggaagaggaggatcaatatgacaagcaggctataggcaaagagaattcgggtgatcgtgtgtatatgaaggatctaaacgacgatggagttgagattagttcttgcaatgttttccccacttcattcagagattttgtcagagacccgcgtgcaaatcatttggcggcaaggattaggctgaagcaggatgacgaagcagcagccaaaaaaattgatgctctgcatgtctctgagaaatctgcaccagacattggtggtggtagtggcagtgatgttattaaccccaagtcaatcttgaagagtaaggataatctttcggagcccagggatgttcgcaaacgtgttcggtttgattctgaatgtgatgatagtggtaacgatgatgatgggcttgaaggaagaaccagggatgttcgcatgaagacctcttcaatggaagaggctacagcttctgaccagttgtcaaagtcaaaagaatttgattcagctgttccagattacattcgtaatccttcaagatacacccgttacacttttgatgattctccaagtgacatggatgacaaatcaaataaggaagcatgcatgagcttccttttgcagttgaaggggtcaaatgctgccaagagaactggacctcaagaagatgaagctttggaagatcttccatcagtaacatttatatcgaagaagaaatctggtgatgccaatatgtgcgacagcgagatggtgtcaaagccgaagcttgatgctggcacggaggccatgaataaaagagccttccctgttggcatagctgccagtgactctgaaaacagtgacgcttgtgcaatggaggaagatgaaccagaagttaaagacattaaaaagagctcacagaaggtgaaccgccagtacaggaagaaagctcaggagaatttggaggagcctgtgtaatgtaatggcgcagttagttcctagacttgcataatttgacatgatcagacttgtaccttttccccccattgtttccctcagactaatgctcccttttcgtaaatttgtgaaactacatcatgtgccaagatctgcctatggccaagttcgttagtttctttctagaagtagaactgctataggtataagcttcaactcaagcataatgatcagagattcagagctaagatgagatgtgttaaaaatgtatttttcatcataaaatatcaaattgtgagcagttgcccataatagcaattttcacctggtttatatttcg

SEQ ID NO: 54579 - protein, 430 aa, Glycine max
  peptide (1)..(430): Ceres Seq. ID no. 14313812
VSHCNQANGIMEDSFRVRAERAFGSLPIPSSSLNTLWSLTEDEINNSPSNRTPKPKPKPYPSSSSRVQLQKGLHDLDDDDDDDDEEEEEPRGVSKPPDYDDEQWQIRAGIGRDCTLDYEEEEDQYDKQAIGKENSGDRVYMKDLNDDGVEISSCNVFPTSFRDFVRDPRANHLAARIRLKQDDEAAAKKIDALHVSEKSAPDIGGGSGSDVINPKSILKSKDNLSEPRDVRKRVRFDSECDDSGNDDDGLEGRTRDVRMKTSSMEEATASDQLSKSKEFDSAVPDYIRNPSRYTRYTFDDSPSDMDDKSNKEACMSFLLQLKGSNAAKRTGPQEDEALEDLPSVTFISKKKSGDANMCDSEMVSKPKLDAGTEAMNKRAFPVGIAASDSENSDACAMEEDEPEVKDIKKSSQKVNRQYRKKAQENLEEPV

SEQ ID NO: 54580 - protein, 420 aa, Glycine max
  peptide (1)..(420): Ceres Seq. ID no. 14313813
MEDSFRVRAERAFGSLPIPSSSLNTLWSLTEDEINNSPSNRTPKPKPKPYPSSSSRVQLQKGLHDLDDDDDDDDEEEEEPRGVSKPPDYDDEQWQIRAGIGRDCTLDYEEEEDQYDKQAIGKENSGDRVYMKDLNDDGVEISSCNVFPTSFRDFVRDPRANHLAARIRLKQDDEAAAKKIDALHVSEKSAPDIGGGSGSDVINPKSILKSKDNLSEPRDVRKRVRFDSECDDSGNDDDGLEGRTRDVRMKTSSMEEATASDQLSKSKEFDSAVPDYIRNPSRYTRYTFDDSPSDMDDKSNKEACMSFLLQLKGSNAAKRTGPQEDEALEDLPSVTFISKKKSGDANMCDSEMVSKPKLDAGTEAMNKRAFPVGIAASDSENSDACAMEEDEPEVKDIKKSSQKVNRQYRKKAQENLEEPV

SEQ ID NO: 54581 - protein, 290 aa, Glycine max
  peptide (1)..(290): Ceres Seq. ID no. 14313814
MKDLNDDGVEISSCNVFPTSFRDFVRDPRANHLAARIRLKQDDEAAAKKIDALHVSEKSAPDIGGGSGSDVINPKSILKSKDNLSEPRDVRKRVRFDSECDDSGNDDDGLEGRTRDVRMKTSSMEEATASDQLSKSKEFDSAVPDYIRNPSRYTRYTFDDSPSDMDDKSNKEACMSFLLQLKGSNAAKRTGPQEDEALEDLPSVTFISKKKSGDANMCDSEMVSKPKLDAGTEAMNKRAFPVGIAASDSENSDACAMEEDEPEVKDIKKSSQKVNRQYRKKAQENLEEPV

SEQ ID NO: 54582 - DNA, 1302 bp, Glycine max
  misc_feature (1)..(1302): Ceres Seq. ID no. 14310358
aggggactatcaaacattttggcccccttccgtgcccaactttctctcagacccgaaaatgaaagacatcttctaatggcagaagaagcacagaacagcaactccatgaatgccttgccaaaggttctcgttctgggtccccctacgtgcttcataaccctccaacctctctactctcacaagttccatttcctcaacccccacacctcaagcctttcactgcaacacttcctccaccaccaccaccaccaccacccttcctccatctccgccgttctctgcggtgcatcctactccgtcaccgccaacgtcctctgcctcctgcccgcgctccgcctcatcgtcaccaccagcgccggaaccgaccacatcgacctcgccgagtgccgccgccgcggaatccaggtcgccggcgccggagagctgttctccgaggacgtcgccgatatggccgtcgccctgctcgctgacgttatgaggaaaatttcggcggcggatcggtatttgaggactcagcagaatcacgacactacgccttgggattttttcacattcggctccaagttagcaggtaagcgagttgagattattggactgggaagcattggcatggaagtggccaagaggttggagtcttttggttgcattatcttatacaactctaagcataaaaaagcttcagtttcgtatcctttctattctagcatggtggatcttgcaactacttgcgacgctcttgtgttatgttgcgcactaaatgagcaaacaaagcacataattaacagggaagtcatgttggcattgggaaaacaaggatttattgtcaatgttggaagagggggtcttattgatgaaaaggaattggtcaagtgtttgatggaaggtgaaattggaggtgctggtttggatgtgtttgagaacgagcctcatgttcccaaagaactccttgcaatgaataatgtggttttatctccacattctgctgcttttactgtggaatctatgatgaatttgtgtgaacttatgggaggcaatttagaagccttcttcttaaataagcccctaattactcctgtaatgttgcctcaataacttgttcttttgataacctagtatcgtacgtgtggtacaattttatgacattcctgcaatgattctgattaagttttaaatgaatttgttctattccaaaaaccatctctgcaaagtgccttggcaagtgtatttcaaactctgttgtgccgttactctgtttgatcagtttttaagctcatttttatatggaaactctattgtgccgtt

SEQ ID NO: 54583 - protein, 363 aa, Glycine max
  peptide (1)..(363): Ceres Seq. ID no. 14310359
RGLSNILAPFRAQLSLRPENERHLLMAEEAQNSNSMNALPKVLVLGPPTCFITLQPLYSHKFHFLNPHTSSLSLQHFLHHHHHHHPSSISAVLCGASYSVTANVLCLLPALRLIVTTSAGTDHIDLAECRRRGIQVAGAGELFSEDVADMAVALLADVMRKISAADRYLRTQQNHDTTPWDFFTFGSKLAGKRVEIIGLGSIGMEVAKRLESFGCIILYNSKHKKASVSYPFYSSMVDLATTCDALVLCCALNEQTKHIINREVMLALGKQGFIVNVGRGGLIDEKELVKCLMEGEIGGAGLDVFENEPHVPKELLAMNNVVLSPHSAAFTVESMMNLCELMGGNLEAFFLNKPLITPVMLPQ

SEQ ID NO: 54584 - protein, 338 aa, Glycine max
  peptide (1)..(338): Ceres Seq. ID no. 14310360
MAEEAQNSNSMNALPKVLVLGPPTCFITLQPLYSHKFHFLNPHTSSLSLQHFLHHHHHHHPSSISAVLCGASYSVTANVLCLLPALRLIVTTSAGTDHIDLAECRRRGIQVAGAGELFSEDVADMAVALLADVMRKISAADRYLRTQQNHDTTPWDFFTFGSKLAGKRVEIIGLGSIGMEVAKRLESFGCIILYNSKHKKASVSYPFYSSMVDLATTCDALVLCCALNEQTKHIINREVMLALGKQGFIVNVGRGGLIDEKELVKCLMEGEIGGAGLDVFENEPHVPKELLAMNNVVLSPHSAAFTVESMMNLCELMGGNLEAFFLNKPLITPVMLPQ

SEQ ID NO: 54585 - protein, 328 aa, Glycine max
  peptide (1)..(328): Ceres Seq. ID no. 14310361
MNALPKVLVLGPPTCFITLQPLYSHKFHFLNPHTSSLSLQHFLHHHHHHHPSSISAVLCGASYSVTANVLCLLPALRLIVTTSAGTDHIDLAECRRRGIQVAGAGELFSEDVADMAVALLADVMRKISAADRYLRTQQNHDTTPWDFFTFGSKLAGKRVEIIGLGSIGMEVAKRLESFGCIILYNSKHKKASVSYPFYSSMVDLATTCDALVLCCALNEQTKHIINREVMLALGKQGFIVNVGRGGLIDEKELVKCLMEGEIGGAGLDVFENEPHVPKELLAMNNVVLSPHSAAFTVESMMNLCELMGGNLEAFFLNKPLITPVMLPQ

SEQ ID NO: 54586 - DNA, 1207 bp, Glycine max
  misc_feature (1)..(1207): Ceres Seq. ID no. 14307111
gcgccaaagcaaagatgaatgaagcggaggagcaactttgcgaggcggccagaaaaggtgacacggagaaagtgaggtctctcatagactccggcgctgacgtcagccacttcgacggcgagggcctcaatcctctgatgcacgccgcaaagcacggccatgcacccgtcctcaccctcctcctctccgccggcgctccctggaacgctctttccccctccaacctctccgccggcgactacgccatgcaagaaggccacaacgaagccttcgagcttctcgtcaacgccgggattcaagccgaactgatcctgggaacaattgcgaggaaggaaaacaagaacggcgattccggtcacgattacttggaagacagggtgagttttagcgaagacaagcttatggactctgaaagcaaggctgtgatgatggcgtgggagaatccgttgatggaggctcatgccaaagctgtttgttcgggaggtggccacgtactcaatattgggtttggaatggggctggtggattcggccattcagcgatatgcacctgcttcacacaccattgttgaggctcatcctgaggtttatgaacgcatgcttagctccggttggggtcagaaggaaagtgtcaagattgtttttggacgatggcaagatgttctgcctcagcttgaaacatatgatggaatattctttgacacctatggggagtactacgaagatctgagggagttccatcagcatctccccgcattgttgaagcctggtggtatctactcattcttcaacggtctttgtggcagtaatgcatttttccatgttgtttactgcaatttggtatcccttgagcttgagaatttggggtattccacacaattaattccattgccggttaaggattgtttgggagaacaagtttgggaaggtgtgaaacaaagatattggcagctcgatacgtactatcttcctgtctgtcaggccgtagaggaccctgagtgaggcaggaaatggatttcctgcagcttagaaagaactgcaccatgtgcagttaaaatttcaccgtccatgcaagttttttctcttctttatatattaaaattaaaggaataattgaaatctcatgcagttttttttttaactgtagagaatcttaatcccagtgatgtatgattttatttttaatcacatcgtcaaaatattctaac

SEQ ID NO: 54587 - protein, 332 aa, Glycine max
  peptide (1)..(332): Ceres Seq. ID no. 14307112
AKAKMNEAEEQLCEAARKGDTEKVRSLIDSGADVSHFDGEGLNPLMHAAKHGHAPVLTLLLSAGAPWNALSPSNLSAGDYAMQEGHNEAFELLVNAGIQAELILGTIARKENKNGDSGHDYLEDRVSFSEDKLMDSESKAVMMAWENPLMEAHAKAVCSGGGHVLNIGFGMGLVDSAIQRYAPASHTIVEAHPEVYERMLSSGWGQKESVKIVFGRWQDVLPQLETYDGIFFDTYGEYYEDLREFHQHLPALLKPGGIYSFFNGLCGSNAFFHVVYCNLVSLELENLGYSTQLIPLPVKDCLGEQVWEGVKQRYWQLDTYYLPVCQAVEDPE

SEQ ID NO: 54588 - protein, 328 aa, Glycine max
  peptide (1)..(328): Ceres Seq. ID no. 14307113
MNEAEEQLCEAARKGDTEKVRSLIDSGADVSHFDGEGLNPLMHAAKHGHAPVLTLLLSAGAPWNALSPSNLSAGDYAMQEGHNEAFELLVNAGIQAELILGTIARKENKNGDSGHDYLEDRVSFSEDKLMDSESKAVMMAWENPLMEAHAKAVCSGGGHVLNIGFGMGLVDSAIQRYAPASHTIVEAHPEVYERMLSSGWGQKESVKIVFGRWQDVLPQLETYDGIFFDTYGEYYEDLREFHQHLPALLKPGGIYSFFNGLCGSNAFFHVVYCNLVSLELENLGYSTQLIPLPVKDCLGEQVWEGVKQRYWQLDTYYLPVCQAVEDPE

SEQ ID NO: 54589 - protein, 287 aa, Glycine max
  peptide (1)..(287): Ceres Seq. ID no. 14307114
MHAAKHGHAPVLTLLLSAGAPWNALSPSNLSAGDYAMQEGHNEAFELLVNAGIQAELILGTIARKENKNGDSGHDYLEDRVSFSEDKLMDSESKAVMMAWENPLMEAHAKAVCSGGGHVLNIGFGMGLVDSAIQRYAPASHTIVEAHPEVYERMLSSGWGQKESVKIVFGRWQDVLPQLETYDGIFFDTYGEYYEDLREFHQHLPALLKPGGIYSFFNGLCGSNAFFHVVYCNLVSLELENLGYSTQLIPLPVKDCLGEQVWEGVKQRYWQLDTYYLPVCQAVEDPE

SEQ ID NO: 54590 - DNA, 1299 bp, Glycine max
  misc_feature (1)..(1299): Ceres Seq. ID no. 14311032
gaaaagtacgtgtcccattcttgtcaacaaacgtggcgcgcttcttaacataagcacttgcaatggcggattcagagcgaatccaaaattcgtggatggcttcggatcaaactgcaattgaaatgagcggcgagggcacaggttccagggaatgctcttctctccctccgccgccgcaaaaaccattcaattctgatcaattgggaatcggagaacgagctttctccgccgccggcgccgccttcctctccgccatcattgtcaatcccctcgacgttgccaagacaaggttgcaagcacaagcggcaggggtcgcatattctcatccactcagtaatatgaccagtagaatggcttgttttgggccaaatatgatatttgctgatttaaaatgttctccatcatgccaccgggctggattccagggcacagtgtccatttgtcctcccgagtgttttcgctacaaaggaacactagatgttatctacaaaattataaaacaggagggaatttctaggctatggagaggcacaaatgctggcctggctcttgcagtaccaactgtgggaatataccttccttgctatgacatactccgcaattggttggaggaattcacagctaaaaaggcaccaaccacaactacttatgtacctctagtagctggttcattggcacgctctctagcttgcactacttgctaccctattgaacttgctaaaactcgtatgcaggcatttaaagagactcaaattggtaaaaagcctcctggagtgatccagactctgctaggtgttgtttcaaatgtcaagagcacaaacactccacagaacagcttgcaaggttatcgtgttttgtggactggcatgggagctcaacttgcccgtgatgtacccttctctgctatttgttggtcgacacttgaaccgactagaagaaaacttcttggtttgattggaggtgatgatgccaatgcattgagtgttcttggggcaaattttggagctgggtttgttgcaggaaccttagcagctggagccacatgtccgctagatgttgtaaaaactcgaaggcagatagagagggatcctgttagggcattgaaaatgactacaagacagacactgatggaggtgtggagagatggaggcttgaaaggattgtttacaggtgttggtccacgagttggtcgagcaggcccctctgttggaattgtgatttcattttatgaagttgtaaagtttgttctacatcatcagtacacataatcatgattttctgcacactttttttgctgcc

SEQ ID NO: 54591 - protein, 401 aa, Glycine max
  peptide (1)..(401): Ceres Seq. ID no. 14311033
MADSERIQNSWMASDQTAIEMSGEGTGSRECSSLPPPPQKPFNSDQLGIGERAFSAAGAAFLSAIIVNPLDVAKTRLQAQAAGVAYSHPLSNMTSRMACFGPNMIFADLKCSPSCHRAGFQGTVSICPPECFRYKGTLDVIYKIIKQEGISRLWRGTNAGLALAVPTVGIYLPCYDILRNWLEEFTAKKAPTTTTYVPLVAGSLARSLACTTCYPIELAKTRMQAFKETQIGKKPPGVIQTLLGVVSNVKSTNTPQNSLQGYRVLWTGMGAQLARDVPFSAICWSTLEPTRRKLLGLIGGDDANALSVLGANFGAGFVAGTLAAGATCPLDVVKTRRQIERDPVRALKMTTRQTLMEVWRDGGLKGLFTGVGPRVGRAGPSVGIVISFYEVVKFVLHHQYT

SEQ ID NO: 54592 - protein, 390 aa, Glycine max
  peptide (1)..(390): Ceres Seq. ID no. 14311034
MASDQTAIEMSGEGTGSRECSSLPPPPQKPFNSDQLGIGERAFSAAGAAFLSAIIVNPLDVAKTRLQAQAAGVAYSHPLSNMTSRMACFGPNMIFADLKCSPSCHRAGFQGTVSICPPECFRYKGTLDVIYKIIKQEGISRLWRGTNAGLALAVPTVGIYLPCYDILRNWLEEFTAKKAPTTTTYVPLVAGSLARSLACTTCYPIELAKTRMQAFKETQIGKKPPGVIQTLLGVVSNVKSTNTPQNSLQGYRVLWTGMGAQLARDVPFSAICWSTLEPTRRKLLGLIGGDDANALSVLGANFGAGFVAGTLAAGATCPLDVVKTRRQIERDPVRALKMTTRQTLMEVWRDGGLKGLFTGVGPRVGRAGPSVGIVISFYEVVKFVLHHQYT

SEQ ID NO: 54593 - protein, 381 aa, Glycine max
  peptide (1)..(381): Ceres Seq. ID no. 14311035
MSGEGTGSRECSSLPPPPQKPFNSDQLGIGERAFSAAGAAFLSAIIVNPLDVAKTRLQAQAAGVAYSHPLSNMTSRMACFGPNMIFADLKCSPSCHRAGFQGTVSICPPECFRYKGTLDVIYKIIKQEGISRLWRGTNAGLALAVPTVGIYLPCYDILRNWLEEFTAKKAPTTTTYVPLVAGSLARSLACTTCYPIELAKTRMQAFKETQIGKKPPGVIQTLLGVVSNVKSTNTPQNSLQGYRVLWTGMGAQLARDVPFSAICWSTLEPTRRKLLGLIGGDDANALSVLGANFGAGFVAGTLAAGATCPLDVVKTRRQIERDPVRALKMTTRQTLMEVWRDGGLKGLFTGVGPRVGRAGPSVGIVISFYEVVKFVLHHQYT

SEQ ID NO: 54594 - DNA, 1219 bp, Glycine max
  misc_feature (1)..(1219): Ceres Seq. ID no. 14303955
gttcaacacgttacaataatggcccatttttctctctcccctctctcctgtgcaccttctcctctaccaccacgccgccgaatctttctctctcctcctcgagccgccgcatcttccgccaccgacgtcgtttccacttccacttccacttcattttctgcttcgaatttcgcgcccaaagtcgttgtcaccagagagcgcggcaagaacgccaagcttatcgctgctctggctaaacatgaaatcaattgtttggagcttccactcattgagcacatgcaaggacctgatttagataggcttccttctgtattaggtgacaatgcatttgattgggttgtgataacgtctcctgaggcaggctcagtctttctagaggcatggagagcttctgggatgcctcatgtcaaaataggtgttgttggggctggcactgcaagcattttcaaggaagctttgcagtcttccaaccgatcccttgatattgcctttgtgccatcaaaagcaacaggaaaggttttggctactgagcttcctaagattggaagtaaatgcacggttctctatcctgcttctgcaaaggctagtaatgagattgaggaaggactttcaaatcgtggatttgaggttactaggatgaatacatatacaacggtgccagttcaacatgttgaccatacggttctaaagatagcacttgctgcccctgttgttacagtagcttcaccatcttctattcgggcctggaagaatcttctttcagattcagagtggaacaattctgttgcgtgcattggtgagacaactgctacaatggcaagaagtttaggtttcacaaatgtgtacttcccaacacaaccaggcatcgaaggctgggtcgagagcattcttgaagcattagggttcctatgatgaattattgaggtaggtctcaggctctcagccctctgtagcaacctggagatgttttcaactttttctcatgctgcaagattaatataatgatttggcaccgtggatgtatatactttctctgttctgtagtatttttaaggataaatttagcttcaataaattaaggagagtgtagtgtatattaggaaataaagtgcacttatagtcattgattaaaatatcaatagttgagattgtaattaattcccaattttgttatacgggcacttgttttttaatcacaaactctaatcattaacttttt

SEQ ID NO: 54595 - protein, 303 aa, Glycine max
  peptide (1)..(303): Ceres Seq. ID no. 14303956
VQHVTIMAHFSLSPLSCAPSPLPPRRRIFLSPPRAAASSATDVVSTSTSTSFSASNFAPKVVVTRERGKNAKLIAALAKHEINCLELPLIEHMQGPDLDRLPSVLGDNAFDWVVITSPEAGSVFLEAWRASGMPHVKIGVVGAGTASIFKEALQSSNRSLDIAFVPSKATGKVLATELPKIGSKCTVLYPASAKASNEIEEGLSNRGFEVTRMNTYTTVPVQHVDHTVLKIALAAPVVTVASPSSIRAWKNLLSDSEWNNSVACIGETTATMARSLGFTNVYFPTQPGIEGWVESILEALGFL

SEQ ID NO: 54596 - protein, 297 aa, Glycine max
  peptide (1)..(297): Ceres Seq. ID no. 14303957
MAHFSLSPLSCAPSPLPPRRRIFLSPPRAAASSATDVVSTSTSTSFSASNFAPKVVVTRERGKNAKLIAALAKHEINCLELPLIEHMQGPDLDRLPSVLGDNAFDWVVITSPEAGSVFLEAWRASGMPHVKIGVVGAGTASIFKEALQSSNRSLDIAFVPSKATGKVLATELPKIGSKCTVLYPASAKASNEIEEGLSNRGFEVTRMNTYTTVPVQHVDHTVLKIALAAPVVTVASPSSIRAWKNLLSDSEWNNSVACIGETTATMARSLGFTNVYFPTQPGIEGWVESILEALGFL

SEQ ID NO: 54597 - protein, 211 aa, Glycine max
  peptide (1)..(211): Ceres Seq. ID no. 14303958
MQGPDLDRLPSVLGDNAFDWVVITSPEAGSVFLEAWRASGMPHVKIGVVGAGTASIFKEALQSSNRSLDIAFVPSKATGKVLATELPKIGSKCTVLYPASAKASNEIEEGLSNRGFEVTRMNTYTTVPVQHVDHTVLKIALAAPVVTVASPSSIRAWKNLLSDSEWNNSVACIGETTATMARSLGFTNVYFPTQPGIEGWVESILEALGFL

SEQ ID NO: 54598 - DNA, 1623 bp, Glycine max
  misc_feature (1)..(1623): Ceres Seq. ID no. 15170288
aataattaaatctttaatccgagcatttcattttgatatttcatcattcccatggctaaacatgatgattgcggtcgtatgattgacactaagggtggacaatccttcgaaattgaaatgaaaggaagccctgctactcctactcctgctgctacacaagatagtttcaaaggtggagtcaaaatccaacaatcttccaacgtacaagcttcctttactcttttcaaaagtttccttggtaccggagtcctagcactcccttatgcttataaaactgccggccttggtctctctttgattgttctcataatcgtttctgcaatgactactcgttgcttctctttacttctcgatgtagcagctcaaagaatcggaactggcaaaatctcactccagaaactcactcaagatgtcttgggaaccaagggaaaatatgcagtccaagcttcaatcatgatcatgcaattgggatgttgtattggtattttgatctttactagagatttcttgaaccatatcctttgtgaatttggtatcagctctctctgtaacaatacccttttcaatgtcctcttttgcttggctctgactgtccctttgactttgatcaacaatatgcattatttctacatcccaagtcttgctgccaacttctttatcttggtcggacttgccgctcaaatgttttacaacactcaagtcttacaagataaccctgaactcagatcaactttaggcactcatcttaaagaattcaactggaaagatttacctctcttctttggtattgctacatatgcctttgaaggtgttggtattatcttcagtatcagaagctcaatggaaaagccccaagactttaaattcctcttaaagaatcaaatgttgatccttactttgatctatgtcatcttccctactttctgctatattgctttggatgacagattaacagatattattttctttactctccctactgatgatcctttctaccttttaatccaaatcttttatgctatctctgctcttttatcattccccgttcagttcttccctgctattcgtatcatggaaaactccaaaattatgagatatagactctttaatgaaagaggaaaatgcaataataaacccctcagatatggaatgagaatggctgttattggtgtggtctttcttgttgcttataccgcgaccagtttccatcttttcttaaacttgctgggatcttgtgtattcacttttgttggatttatcttgccagtctggatctattctgtccatttcaagggaaagaccggcatcgcgaaaagacttatcaattatacaatgcttactgttgctgtcgtctttggagcagctggttttgttatgtcaatcatggaaatggttaacaaaagctctgaagatgttgcaactctctaaagtaaaattttttcttaactgactcattctatgaaaactctgtacttttttaactgtagtcaaagttgtaaattatatttgtgtaattgattgtatgtctttttaataaaaaacctctccttggatatgtctataatctgatccccgtatctaaataacttacaaaaataatgccatatcatttaaaatttactc

SEQ ID NO: 54599 - protein, 458 aa, Glycine max
  peptide (1)..(458): Ceres Seq. ID no. 15170289
MAKHDDCGRMIDTKGGQSFEIEMKGSPATPTPAATQDSFKGGVKIQQSSNVQASFTLFKSFLGTGVLALPYAYKTAGLGLSLIVLIIVSAMTTRCFSLLLDVAAQRIGTGKISLQKLTQDVLGTKGKYAVQASIMIMQLGCCIGILIFTRDFLNHILCEFGISSLCNNTLFNVLFCLALTVPLTLINNMHYFYIPSLAANFFILVGLAAQMFYNTQVLQDNPELRSTLGTHLKEFNWKDLPLFFGIATYAFEGVGIIFSIRSSMEKPQDFKFLLKNQMLILTLIYVIFPTFCYIALDDRLTDIIFFTLPTDDPFYLLIQIFYAISALLSFPVQFFPAIRIMENSKIMRYRLFNERGKCNNKPLRYGMRMAVIGVVFLVAYTATSFHLFLNLLGSCVFTFVGFILPVWIYSVHFKGKTGIAKRLINYTMLTVAVVFGAAGFVMSIMEMVNKSSEDVATL

SEQ ID NO: 54600 - protein, 449 aa, Glycine max
  peptide (1)..(449): Ceres Seq. ID no. 15170290
MIDTKGGQSFEIEMKGSPATPTPAATQDSFKGGVKIQQSSNVQASFTLFKSFLGTGVLALPYAYKTAGLGLSLIVLIIVSAMTTRCFSLLLDVAAQRIGTGKISLQKLTQDVLGTKGKYAVQASIMIMQLGCCIGILIFTRDFLNHILCEFGISSLCNNTLFNVLFCLALTVPLTLINNMHYFYIPSLAANFFILVGLAAQMFYNTQVLQDNPELRSTLGTHLKEFNWKDLPLFFGIATYAFEGVGIIFSIRSSMEKPQDFKFLLKNQMLILTLIYVIFPTFCYIALDDRLTDIIFFTLPTDDPFYLLIQIFYAISALLSFPVQFFPAIRIMENSKIMRYRLFNERGKCNNKPLRYGMRMAVIGVVFLVAYTATSFHLFLNLLGSCVFTFVGFILPVWIYSVHFKGKTGIAKRLINYTMLTVAVVFGAAGFVMSIMEMVNKSSEDVATL

SEQ ID NO: 54601 - protein, 436 aa, Glycine max
  peptide (1)..(436): Ceres Seq. ID no. 15170291
MKGSPATPTPAATQDSFKGGVKIQQSSNVQASFTLFKSFLGTGVLALPYAYKTAGLGLSLIVLIIVSAMTTRCFSLLLDVAAQRIGTGKISLQKLTQDVLGTKGKYAVQASIMIMQLGCCIGILIFTRDFLNHILCEFGISSLCNNTLFNVLFCLALTVPLTLINNMHYFYIPSLAANFFILVGLAAQMFYNTQVLQDNPELRSTLGTHLKEFNWKDLPLFFGIATYAFEGVGIIFSIRSSMEKPQDFKFLLKNQMLILTLIYVIFPTFCYIALDDRLTDIIFFTLPTDDPFYLLIQIFYAISALLSFPVQFFPAIRIMENSKIMRYRLFNERGKCNNKPLRYGMRMAVIGVVFLVAYTATSFHLFLNLLGSCVFTFVGFILPVWIYSVHFKGKTGIAKRLINYTMLTVAVVFGAAGFVMSIMEMVNKSSEDVATL

SEQ ID NO: 54602 - DNA, 1464 bp, Glycine max
  misc_feature (1)..(1464): Ceres Seq. ID no. 14313123
ttctctctcgcacacgcaaacacttgttccggtgtccctctctctttcgcttcatcttcaacattaggtcttctctgactctgtggttgtcactgttcaacgtctttgagagtttatgctgagtagttcggctttacctcaaaagtcctgatcaattgaattcagtttccattggtaggatttattgccgggccttgaggtaatcagcttaccaacatgggaacacaaccccagcaaacatttcgggaggaagaggaggaggagatgcaaggccatggaactacgatgtcaggtcaatcaatgtcaacaagcagaagtgtcgggtctccatccagccggagtgagcagacaatggcaacacctgctagtgatagcacttttcttaggttaaaccatcttgacatacatggtgatgatgctggatcacagggcaccgttgccaagaagaaaaagaggggccaacgggctgttggaggtgataagagtggaagaggtctccgtcaattcagtatgaaagtgtgtgagaaggtagaaagcaagggcagaacaacttacaatgaggtagctgatgaacttgtggccgaatttgctgatccaatcaatggtgtttcaactcctgatcagcaacaatatgatgagaaaaacattcgtcgaagggtgtatgatgctttgaatgttctcatggcaatggatattatttctaaggataaaaaggaaattcaatggaagggtctccctcgtactagtctaagcgatattgaagagctaaagtcggagcgtcttgggctaaggaatagaattgaaaagaaagcagcctatttgcaagagctggaggagcaatacataggtcttcagaaacttatacaacgaaatgagcaactatatagctcaggaaatgctcccaatggaggtgtatctttgcccttcattctggtgcagacacggccccatgcaactgttgaagtggaaatatcagaagatatgcagcttgtgcattttgatttcaatagcactccctttgagctgcatgatgataactatgttctcaaggcaatgaaattttgtgagagatctcagaatgataatacaacagataattctacagatggcggtgaaggttctagcatatatgcacaggttcctacttcagtttcaaaccctccaaataggcctccttcatctccaccactccctggaatattaaaggcaagagttaagaacgagcattgatatgcaattttgtactgcatcgccttatttaagcatgtttgtatatttttgtaaagtaatttgtcagtaattaattgtccttcataatagttaatcagtacagccaattcactcagtaggttagaagcgaaccagtgtgcttgagtctatattcttctgggttgattttggcaaattctttgctaaccatatccattatttactaccttaagaccttaactgatttttttcccc

SEQ ID NO: 54603 - protein, 337 aa, Glycine max
  peptide (1)..(337): Ceres Seq. ID no. 14313124
MGTQPQQTFREEEEEEMQGHGTTMSGQSMSTSRSVGSPSSRSEQTMATPASDSTFLRLNHLDIHGDDAGSQGTVAKKKKRGQRAVGGDKSGRGLRQFSMKVCEKVESKGRTTYNEVADELVAEFADPINGVSTPDQQQYDEKNIRRRVYDALNVLMAMDIISKDKKEIQWKGLPRTSLSDIEELKSERLGLRNRIEKKAAYLQELEEQYIGLQKLIQRNEQLYSSGNAPNGGVSLPFILVQTRPHATVEVEISEDMQLVHFDFNSTPFELHDDNYVLKAMKFCERSQNDNTTDNSTDGGEGSSIYAQVPTSVSNPPNRPPSSPPLPGILKARVKNEH

SEQ ID NO: 54604 - protein, 321 aa, Glycine max
  peptide (1)..(321): Ceres Seq. ID no. 14313125
MQGHGTTMSGQSMSTSRSVGSPSSRSEQTMATPASDSTFLRLNHLDIHGDDAGSQGTVAKKKKRGQRAVGGDKSGRGLRQFSMKVCEKVESKGRTTYNEVADELVAEFADPINGVSTPDQQQYDEKNIRRRVYDALNVLMAMDIISKDKKEIQWKGLPRTSLSDIEELKSERLGLRNRIEKKAAYLQELEEQYIGLQKLIQRNEQLYSSGNAPNGGVSLPFILVQTRPHATVEVEISEDMQLVHFDFNSTPFELHDDNYVLKAMKFCERSQNDNTTDNSTDGGEGSSIYAQVPTSVSNPPNRPPSSPPLPGILKARVKNEH

SEQ ID NO: 54605 - protein, 314 aa, Glycine max
  peptide (1)..(314): Ceres Seq. ID no. 14313126
MSGQSMSTSRSVGSPSSRSEQTMATPASDSTFLRLNHLDIHGDDAGSQGTVAKKKKRGQRAVGGDKSGRGLRQFSMKVCEKVESKGRTTYNEVADELVAEFADPINGVSTPDQQQYDEKNIRRRVYDALNVLMAMDIISKDKKEIQWKGLPRTSLSDIEELKSERLGLRNRIEKKAAYLQELEEQYIGLQKLIQRNEQLYSSGNAPNGGVSLPFILVQTRPHATVEVEISEDMQLVHFDFNSTPFELHDDNYVLKAMKFCERSQNDNTTDNSTDGGEGSSIYAQVPTSVSNPPNRPPSSPPLPGILKARVKNEH

SEQ ID NO: 54606 - DNA, 1014 bp, Glycine max
  misc_feature (1)..(1014): Ceres Seq. ID no. 14307654
gcatcgcagtgtatctgagtaatatcactgtccctttccctctccctttcatcagaaacacaaacaaaacaccgattcgctatattaccagatcggactcaattcctgaaccgatgaagttgaagccgcagtgaaccaaaccatcatcatcgcgttaccggaataatcgacccatcatcaattagatcgaaatgaaggatgaggacgggcttccgacgacgaccgcggttacaaagaaggaaaacttggattcgagtctgtttggaaaaggcaggtacaaattctgggcgttagcggccatcttgcttctggcgttctggtccatgttcaccggtaccgtctcgctccgctggtccggcactctcaattccctttccaacgacatcgacactcccatccacgacgacctagatgttcttgaaatggaggagagggagaaggttgtgaggcacatgtgggatgtgtacaccaacagtcgcagtgtgaggttgccgcggttctggcaagaggccttcgaggctgcctatgaggatttgacgagcgatgtcgctgaggtcagagacgctgccgtcgccgagatcgccaagatgtctgttcgctccattcattttgatccacctcctcttcaatccacgagtgcccgagaattcagcaagagccttaagcaagccgagaaaggaaaagatgcaacaacctcaaggcgtgcttaaaggttagtgtgtggagcattcaagcgtctgcggtgtacttgaaaaatgctcgagtggtaccggaagattgtgaagagatagtaatggacgaactcatactcggatttcatgtttccatcacagggataatgatgtattttaataggctgtggttcttgcaaattttgcagtcaaaattcgtagtcttcacgaagtgaggagtagtaaatcgaaacacgaacttttgaacagacaaattcaattgagcatgttctgtttagctttattccacaacatctaaattataaaactctcatgtttctac

SEQ ID NO: 54607 - protein, 172 aa, Glycine max
  peptide (1)..(172): Ceres Seq. ID no. 14307655
MKDEDGLPTTTAVTKKENLDSSLFGKGRYKFWALAAILLLAFWSMFTGTVSLRWSGTLNSLSNDIDTPIHDDLDVLEMEEREKVVRHMWDVYTNSRSVRLPRFWQEAFEAAYEDLTSDVAEVRDAAVAEIAKMSVRSIHFDPPPLQSTSAREFSKSLKQAEKGKDATTSRRA

SEQ ID NO: 54608 - protein, 128 aa, Glycine max
  peptide (1)..(128): Ceres Seq. ID no. 14307656
MFTGTVSLRWSGTLNSLSNDIDTPIHDDLDVLEMEEREKVVRHMWDVYTNSRSVRLPRFWQEAFEAAYEDLTSDVAEVRDAAVAEIAKMSVRSIHFDPPPLQSTSAREFSKSLKQAEKGKDATTSRRA

SEQ ID NO: 54609 - protein, 95 aa, Glycine max
  peptide (1)..(95): Ceres Seq. ID no. 14307657
MEEREKVVRHMWDVYTNSRSVRLPRFWQEAFEAAYEDLTSDVAEVRDAAVAEIAKMSVRSIHFDPPPLQSTSAREFSKSLKQAEKGKDATTSRRA

SEQ ID NO: 54610 - DNA, 1091 bp, Glycine max
  misc_feature (1)..(1091): Ceres Seq. ID no. 14307355
atcaattaattgtgcacgaaataccaattctgtcccaaatattatactaacatattagaagctgtccaattccaatggttccttgtgttaaagcaatggttgcgcttgtcctagcgtttctaatctctttgccttctatggttgcctatgctggcaacatgtaccaagatgttgatgtcacgtggggagatggcagaggcaagattctgaacaatggtcagcttcttactctgtctcttgacagagcctctggctctggctttcagtccaagaatcagtatctatttggcaaaattgacatgcaaatcaaacttgtgcctgcaaattccgctggcacggtcaccgctttttacttacgttcagaagggtcatcttgggatgagatagattttgagttcctgggaaatctgagtggtgatccttacatagttcatactaatgtgtacacacaaggcaagggtaatagggagcaacaattttatctttggtttgacccaactgcagattttcacacctattcctttctctggaatcctacacatgttgtattctatgttgatggaagaccaattagggagttcaagaacttggagggagtgggtgttgaatacccaaagaagcagcctatgaggttatatgccagtctatggaacgctgatgactgggcaacgagaggagggctagtgaagacagattggagtcaagcaccattcactgcttctttcaggaacttcaaagccaatggttgcgtttggtccaatggggtttcttcatgcaactccacctcctcttctgaaaaagcttggctatattctcaacggcttgattccacaaaccagaagaagctaaaatgggtgcacaagaattacatgatttatgattactgcacagaccttaagcgattccctcagggtctccctctcgaatgcacagtccgcaccaagtcataacaaaaatatatgcaaactgctattgtatttgcatgtgtgtgcattccattttcccattacactgcatcgcttctcaatctcattctttatgcaattaatttggatacaaagggcatcgtaatgtaacaattaatgtttatt

SEQ ID NO: 54611 - protein, 291 aa, Glycine max
  peptide (1)..(291): Ceres Seq. ID no. 14307356
MVPCVKAMVALVLAFLISLPSMVAYAGNMYQDVDVTWGDGRGKILNNGQLLTLSLDRASGSGFQSKNQYLFGKIDMQIKLVPANSAGTVTAFYLRSEGSSWDEIDFEFLGNLSGDPYIVHTNVYTQGKGNREQQFYLWFDPTADFHTYSFLWNPTHVVFYVDGRPIREFKNLEGVGVEYPKKQPMRLYASLWNADDWATRGGLVKTDWSQAPFTASFRNFKANGCVWSNGVSSCNSTSSSEKAWLYSQRLDSTNQKKLKWVHKNYMIYDYCTDLKRFPQGLPLECTVRTKS

SEQ ID NO: 54612 - protein, 284 aa, Glycine max
  peptide (1)..(284): Ceres Seq. ID no. 14307357
MVALVLAFLISLPSMVAYAGNMYQDVDVTWGDGRGKILNNGQLLTLSLDRASGSGFQSKNQYLFGKIDMQIKLVPANSAGTVTAFYLRSEGSSWDEIDFEFLGNLSGDPYIVHTNVYTQGKGNREQQFYLWFDPTADFHTYSFLWNPTHVVFYVDGRPIREFKNLEGVGVEYPKKQPMRLYASLWNADDWATRGGLVKTDWSQAPFTASFRNFKANGCVWSNGVSSCNSTSSSEKAWLYSQRLDSTNQKKLKWVHKNYMIYDYCTDLKRFPQGLPLECTVRTKS

SEQ ID NO: 54613 - protein, 270 aa, Glycine max
  peptide (1)..(270): Ceres Seq. ID no. 14307358
MVAYAGNMYQDVDVTWGDGRGKILNNGQLLTLSLDRASGSGFQSKNQYLFGKIDMQIKLVPANSAGTVTAFYLRSEGSSWDEIDFEFLGNLSGDPYIVHTNVYTQGKGNREQQFYLWFDPTADFHTYSFLWNPTHVVFYVDGRPIREFKNLEGVGVEYPKKQPMRLYASLWNADDWATRGGLVKTDWSQAPFTASFRNFKANGCVWSNGVSSCNSTSSSEKAWLYSQRLDSTNQKKLKWVHKNYMIYDYCTDLKRFPQGLPLECTVRTKS

SEQ ID NO: 54614 - DNA, 1210 bp, Glycine max
  misc_feature (1)..(1210): Ceres Seq. ID no. 14303397
aaaaaataagaagatatacataaaaataaaacacaccctctacgtgtccacactctctgatcacaacacacccgcttaattaaatctctatatataaaccccttcaggcactccactatgacgggcaaagaaatttttcataagatgaaggaaaaagttttgggatcatctgatcccgattcaggtaaaggaaagagcaagatgaagaagcacataactcatggctttcacttggtaaagggaagatcaggtcatgccatggaagactatcttgttgctcaatttaagcaagttgacaacaaagagttgggtttatttgcaatatttgatggccactctggtcacagtgtacctgattacttgaagtctcatttgtttgataatatcttgaaagagcctaacttctggacagaacctgctgaggctgttaagagagcatatagtataactgattctactattttagacaaatcaggtgaattgggtagagggggttcaactgcggttacagcaatattgatcaactgttacaagctactagtggccaatattggggattcccgggctgtcttatgtaagaatggcgtagccaaacaactatcggtggatcatgaaccaagcatagaaagtgaagatataaaaaacagaggtggttttgtgtcaaacttcccaggggatgtgccacgtgtcgatggtcagttggcagtgtcaagggcatttggtgacaaaagcctgaagatacatttgagctcagaaccatatgtaactgtggagatgatagaagatgatgcagagtttcttatactagccagtgatgggttatggaaggtaatgtcaaatcaagaagcagttagtgctatcagagatgttaaggatgctagatctgcagcaaaggtgcttactgaagaagcaaagaacaggaaaagctcagatgatatctcttgcgttgttgtgaaatttcagtgatcagtaaactcacatagtatatttttatctacgaacttgaaagtgtaacatatactttagtgtaatgttgataccttttaggtgttattatgtcatgccattcagtgtgtgatatttaatcttctttaatttcatacaaatgaaactgctgagaacgtgttgtttgatgtaccaatgttcaaaaggatttagttttggattgtgtagaccaaaataattcgtatgaatgcaaggaagtttggtc

SEQ ID NO: 54615 - protein, 282 aa, Glycine max
  peptide (1)..(282): Ceres Seq. ID no. 14303398
MTGKEIFHKMKEKVLGSSDPDSGKGKSKMKKHITHGFHLVKGRSGHAMEDYLVAQFKQVDNKELGLFAIFDGHSGHSVPDYLKSHLFDNILKEPNFWTEPAEAVKRAYSITDSTILDKSGELGRGGSTAVTAILINCYKLLVANIGDSRAVLCKNGVAKQLSVDHEPSIESEDIKNRGGFVSNFPGDVPRVDGQLAVSRAFGDKSLKIHLSSEPYVTVEMIEDDAEFLILASDGLWKVMSNQEAVSAIRDVKDARSAAKVLTEEAKNRKSSDDISCVVVKFQ

SEQ ID NO: 54616 - protein, 273 aa, Glycine max
  peptide (1)..(273): Ceres Seq. ID no. 14303399
MKEKVLGSSDPDSGKGKSKMKKHITHGFHLVKGRSGHAMEDYLVAQFKQVDNKELGLFAIFDGHSGHSVPDYLKSHLFDNILKEPNFWTEPAEAVKRAYSITDSTILDKSGELGRGGSTAVTAILINCYKLLVANIGDSRAVLCKNGVAKQLSVDHEPSIESEDIKNRGGFVSNFPGDVPRVDGQLAVSRAFGDKSLKIHLSSEPYVTVEMIEDDAEFLILASDGLWKVMSNQEAVSAIRDVKDARSAAKVLTEEAKNRKSSDDISCVVVKFQ

SEQ ID NO: 54617 - protein, 254 aa, Glycine max
  peptide (1)..(254): Ceres Seq. ID no. 14303400
MKKHITHGFHLVKGRSGHAMEDYLVAQFKQVDNKELGLFAIFDGHSGHSVPDYLKSHLFDNILKEPNFWTEPAEAVKRAYSITDSTILDKSGELGRGGSTAVTAILINCYKLLVANIGDSRAVLCKNGVAKQLSVDHEPSIESEDIKNRGGFVSNFPGDVPRVDGQLAVSRAFGDKSLKIHLSSEPYVTVEMIEDDAEFLILASDGLWKVMSNQEAVSAIRDVKDARSAAKVLTEEAKNRKSSDDISCVVVKFQ

SEQ ID NO: 54618 - DNA, 1424 bp, Glycine max
  misc_feature (1)..(1424): Ceres Seq. ID no. 14313666
gcagagagaaggtttcaaagaaatggccacatgggtgaatggttggggcaaattactaccatttctggggatgttgatggctatgctaactcaaagtggaagcatggtggtaatcaaatttgctatgactgatgggatgaacaagtatgttatggttgtatattcaatggcactctccagctccatacttctcccctttgtcttgtttctacatagcaggtcagagcttcctcttctcacagttcctgcacttggaagcttctttttgcttgcactctttgcgagttcagcacatataatggcttatgttggcatagaactcagctctcctactcttgcatcagctatacttaatgtcattccagctttcacttttgtacttgctctcattttcaggatggaagaagtacattggagatattttagcagccaagctaaagtcttgggaacaatagtgtcaattggtggagcatttgttgtgatactgtacaagggtccacccatctttaggacacattcatcatacacttcaaacaaacttcaattttcggcacaaccaaactggatcttgggagggatatttttggttgctgattctttccttagttccatgtggtacatatatcaggcttcggttgcaaagaaataccctgctgtaacagtcatagtattcttccaattcttattttcaaccattcagtgtggagtatttgccttaattgcagttagagatccaacggaatgggagctgaagttcgatagagggttgagtgtcattttatatcaggcaatagttgcaacaatgttacgttacaccctaaccacatggtgcgtccatagagcaggacctctgttttgtgctatgttcaagccagtgggaatcatcttcaccgtttctatgagtgcaatctttctgggggagaatttcggccttggaagtttgattggtgcggttataatcgtgataggattttatgctgtactatggggaaattccagagaggagaacaagattgagaatttggagtcatcgagccataatgctcctttattgcaagataggtcgtaacaggtaggttgaaatcatcgtaccataatttggcgtatcagaaacaggtgaatgaatcgtatcatgctaaccattgatatgcacttccttgttggatatattttccgtgagtggaatacttgtgtaaaaattttagtcactcatggcacccgtgaatagcttttgttggtgggattttaatccacaaattatagcttcttcttttgtaaatgataggcaaactatacctaattacaggtttaggtagtttacttttggttttgattcacagtttggcctctgtcccccatgtttgttttgtaatcttgcttcctttttttaatatattctggatgtgctgcttttcgtggttaag

SEQ ID NO: 54619 - protein, 355 aa, Glycine max
  peptide (1)..(355): Ceres Seq. ID no. 14313667
QREGFKEMATWVNGWGKLLPFLGMLMAMLTQSGSMVVIKFAMTDGMNKYVMVVYSMALSSSILLPFVLFLHSRSELPLLTVPALGSFFLLALFASSAHIMAYVGIELSSPTLASAILNVIPAFTFVLALIFRMEEVHWRYFSSQAKVLGTIVSIGGAFVVILYKGPPIFRTHSSYTSNKLQFSAQPNWILGGIFLVADSFLSSMWYIYQASVAKKYPAVTVIVFFQFLFSTIQCGVFALIAVRDPTEWELKFDRGLSVILYQAIVATMLRYTLTTWCVHRAGPLFCAMFKPVGIIFTVSMSAIFLGENFGLGSLIGAVIIVIGFYAVLWGNSREENKIENLESSSHNAPLLQDRS

SEQ ID NO: 54620 - protein, 348 aa, Glycine max
  peptide (1)..(348): Ceres Seq. ID no. 14313668
MATWVNGWGKLLPFLGMLMAMLTQSGSMVVIKFAMTDGMNKYVMVVYSMALSSSILLPFVLFLHSRSELPLLTVPALGSFFLLALFASSAHIMAYVGIELSSPTLASAILNVIPAFTFVLALIFRMEEVHWRYFSSQAKVLGTIVSIGGAFVVILYKGPPIFRTHSSYTSNKLQFSAQPNWILGGIFLVADSFLSSMWYIYQASVAKKYPAVTVIVFFQFLFSTIQCGVFALIAVRDPTEWELKFDRGLSVILYQAIVATMLRYTLTTWCVHRAGPLFCAMFKPVGIIFTVSMSAIFLGENFGLGSLIGAVIIVIGFYAVLWGNSREENKIENLESSSHNAPLLQDRS

SEQ ID NO: 54621 - protein, 332 aa, Glycine max
  peptide (1)..(332): Ceres Seq. ID no. 14313669
MLMAMLTQSGSMVVIKFAMTDGMNKYVMVVYSMALSSSILLPFVLFLHSRSELPLLTVPALGSFFLLALFASSAHIMAYVGIELSSPTLASAILNVIPAFTFVLALIFRMEEVHWRYFSSQAKVLGTIVSIGGAFVVILYKGPPIFRTHSSYTSNKLQFSAQPNWILGGIFLVADSFLSSMWYIYQASVAKKYPAVTVIVFFQFLFSTIQCGVFALIAVRDPTEWELKFDRGLSVILYQAIVATMLRYTLTTWCVHRAGPLFCAMFKPVGIIFTVSMSAIFLGENFGLGSLIGAVIIVIGFYAVLWGNSREENKIENLESSSHNAPLLQDRS

SEQ ID NO: 54622 - DNA, 1591 bp, Glycine max
  misc_feature (1)..(1591): Ceres Seq. ID no. 14310920
aagaaagaagtgagaatacgaaagaaggggttttattgccaaatgaagaaggctcacgagacacgcatggggtcagccacatgctatccctcctcctcctccttctctctccggtggtggtgactcgccggaaaacacccactgccacctctaacgccgccgccggcgaacacccttctcaaaatctcacccgacccaattcacctttctcctctctcttctcaattccccatctgggtatccctgtttccctcaaagttctcttctttttcgtgattcagaagtgctcagtgatacccttttcttagaacaatgagagcggggaaagggagtcaggaagaggatgagtacgaggaagaagagtttggttcttccaagaaacagggcacttcctctgcccctaacaccaataaagcagatggaaaagccatcgataaggctagtgcgataagatcgaaacattctgtgactgagcagcggagaaggagcaagataaatgagagattccagatattgagggatctcatacctcatagtgatcaaaagagggacacggcatcatttttattagaggtgatagagtatgttcagtacttacaggagaaggtacaaaagtatgaaggttcatatcaaggttggggtcaagaaccctcgaagttgatgccatggagaaatagtcattggcgtgtccagagctttgccggtcaacccacggctgtaaagaatggtttgggtccagtatcaccttttcctggaaagtttgatgaaagcaatgttagtatctctccaactatgcttaatggctcccagaatacaatagatcctgatcagagcagggatattgtcaacaaaacggctgagaggcaacctgatttagtaagcaagggaatacctcttccccttgctatgcatgcaaacatgtctgttcctgtcagaagtgatggcgtacttgcacatcctcttcagggaactgtttctaatgcacaatcaactgaatgcccaacaactagtgaaccacagaatcaacaggatgaactctcggttgaaggagggacaattagcatctcaagtgcatactcccaagggttgttgaataatctaactcaagcgctacaaagtgctggtttagatctgtctcaggctagcatatcagttcagattaatcttgggaaacgggcaaacaaaggactgaattgtgggacctcttctctcaagcatcatgacaacccttcttcaaacaatcaaacaattgcacattttagagatgcaggcagtggagaagactctgatcaagcacaaaaaagaatgaaaacatataagtgatatatatgtggcattttcatgagaatccacttgcatccagatttctcacttattcttggtgcagcatataacttgtggttactgtacatccttccccatttgtttgacttttaatggttattttaaaactatttaaaccttgaacacgatcatttgtggagatattgaggcttctactgtagggagcatgtcatctatttcgcttgtatgatacatattataattataattattcagtattattgagcttttggatggcaattttatg

SEQ ID NO: 54623 - protein, 336 aa, Glycine max
  peptide (1)..(336): Ceres Seq. ID no. 14310921
MRAGKGSQEEDEYEEEEFGSSKKQGTSSAPNTNKADGKAIDKASAIRSKHSVTEQRRRSKINERFQILRDLIPHSDQKRDTASFLLEVIEYVQYLQEKVQKYEGSYQGWGQEPSKLMPWRNSHWRVQSFAGQPTAVKNGLGPVSPFPGKFDESNVSISPTMLNGSQNTIDPDQSRDIVNKTAERQPDLVSKGIPLPLAMHANMSVPVRSDGVLAHPLQGTVSNAQSTECPTTSEPQNQQDELSVEGGTISISSAYSQGLLNNLTQALQSAGLDLSQASISVQINLGKRANKGLNCGTSSLKHHDNPSSNNQTIAHFRDAGSGEDSDQAQKRMKTYK

SEQ ID NO: 54624 - protein, 220 aa, Glycine max
  peptide (1)..(220): Ceres Seq. ID no. 14310922
MPWRNSHWRVQSFAGQPTAVKNGLGPVSPFPGKFDESNVSISPTMLNGSQNTIDPDQSRDIVNKTAERQPDLVSKGIPLPLAMHANMSVPVRSDGVLAHPLQGTVSNAQSTECPTTSEPQNQQDELSVEGGTISISSAYSQGLLNNLTQALQSAGLDLSQASISVQINLGKRANKGLNCGTSSLKHHDNPSSNNQTIAHFRDAGSGEDSDQAQKRMKTYK

SEQ ID NO: 54625 - protein, 176 aa, Glycine max
  peptide (1)..(176): Ceres Seq. ID no. 14310923
MLNGSQNTIDPDQSRDIVNKTAERQPDLVSKGIPLPLAMHANMSVPVRSDGVLAHPLQGTVSNAQSTECPTTSEPQNQQDELSVEGGTISISSAYSQGLLNNLTQALQSAGLDLSQASISVQINLGKRANKGLNCGTSSLKHHDNPSSNNQTIAHFRDAGSGEDSDQAQKRMKTYK

SEQ ID NO: 54626 - DNA, 1121 bp, Glycine max
  misc_feature (1)..(1121): Ceres Seq. ID no. 13593968
atcacagctgcaatcaacaagacttagaatgcgatgagcaaaaatagacctcaattccgaattcagagatagcacgcaccaggagaagccatggctactcaatccccttcacctcagaacctaggtggtgaaattgagcaaacagaaaatgtagatcagcataataggggagaagagcttggtaaacagagttcagacacatcggtgtttgtgaactcagagccattgcgtgaggaacaaattcagaatgctgtgaaatttctgtcgcacccgaaagttagaggttctcctgtcatccacagacgatcgtttctggagaagaagggccttacgaaggaggagattgatgaagcctttcggcgtgtgcctgattcacctccaagtgtgcagacagctggcataaatcaagatggacaattgaagccatcatcaaacattcagcagcaaggccaaccacaggctttgcagctgactgtaccagcttctactggtgttactactacgcttggaaccttatctcgccgcagttttcactggtcacatgcccttattgcagttggattactggctgcttcaggtgctggtacagttatagtaattaagaattctattctccctcggttaaaatcctggatacgcaatgttgtcctagaagaggatcatgaccaatcaaagagaacaggctcaaaaccaacattggcagaagaagctgcacaggctgcaaaagcagctgcagttgcagctgctgatattgcaaaagcaagccaagaattactgagttcaaaaattgaagagaagagatattttgtagaagttgtgaaccttttggataagcaagtgcaggaaatgaagttgatgactaatgcaataggaagattggaagcttctggtggactctctgtctcaaagcaagaagaccgcttagtcactcaaacaggttcaaagacacagcaactgatcgtgaatgggaagtcagactatgagtcccgatcagtgagatcttcatcccctcctgtatctgntgaaccatctagtgctcctcatcctaaatcatatatggagataatggccatgatccaaagaggggagaagccttctaacattagggaaattgatgattc

SEQ ID NO: 54627 - protein, 343 aa, Glycine max
  peptide (1)..(343): Ceres Seq. ID no. 13593969
  misc_feature (311)..(311): Xaa is any aa, unknown or other
MATQSPSPQNLGGEIEQTENVDQHNRGEELGKQSSDTSVFVNSEPLREEQIQNAVKFLSHPKVRGSPVIHRRSFLEKKGLTKEEIDEAFRRVPDSPPSVQTAGINQDGQLKPSSNIQQQGQPQALQLTVPASTGVTTTLGTLSRRSFHWSHALIAVGLLAASGAGTVIVIKNSILPRLKSWIRNVVLEEDHDQSKRTGSKPTLAEEAAQAAKAAAVAAADIAKASQELLSSKIEEKRYFVEVVNLLDKQVQEMKLMTNAIGRLEASGGLSVSKQEDRLVTQTGSKTQQLIVNGKSDYESRSVRSSSPPVSXEPSSAPHPKSYMEIMAMIQRGEKPSNIREIDD

SEQ ID NO: 54628 - DNA, 749 bp, Glycine max
  misc_feature (1)..(749): Ceres Seq. ID no. 14307257
tatttttcatgattttaataatcatcgaccaatgtagtctatcaaaatcaacattatcagtcaatttgatttctggcgttaccaaatcagttaactaaattatgaatttgcactttgtgtgtatacaggtattcacacaaccagttttccagcttgtggaaacttgggttgcgaagcgttggcctgaaagcaacttcatgggaaaagaatatcgtgttggcaagttcagattcaatggattcaggatgatatggaggacagtgtacgtgattttcacagcagtggttgctatgatacttcccttcttcaacagcattgtgggtttgcttggagctatttccttctttcctttgacagtgtattttccaacagagatgtatctggtgcaggctaaagtgcccaagttttctctggtctggattggggtcaaaattctaagtggcttctgcttgattgtcactcttgttgctgcagctggatcaatccaaggaatcatcgcagaccttaaaatctatgagcccttcaagtaaatatcctttgtgtagtttagctctttggatgaacaatggtttgtggctaagtttgtggtcattattgatcagttgtttggataaactttctttcaagtgttttcataatatatacttttataatggatcgataagaatgcttttagatcctagaaaaattttaaattgctttttgtcctcaacttctataatcaataatagttttcgtttctgtatttc

SEQ ID NO: 54629 - protein, 142 aa, Glycine max
  peptide (1)..(142): Ceres Seq. ID no. 14307258
MNLHFVCIQVFTQPVFQLVETWVAKRWPESNFMGKEYRVGKFRFNGFRMIWRTVYVIFTAVVAMILPFFNSIVGLLGAISFFPLTVYFPTEMYLVQAKVPKFSLVWIGVKILSGFCLIVTLVAAAGSIQGIIADLKIYEPFK

SEQ ID NO: 54630 - protein, 110 aa, Glycine max
  peptide (1)..(110): Ceres Seq. ID no. 14307259
MGKEYRVGKFRFNGFRMIWRTVYVIFTAVVAMILPFFNSIVGLLGAISFFPLTVYFPTEMYLVQAKVPKFSLVWIGVKILSGFCLIVTLVAAAGSIQGIIADLKIYEPFK

SEQ ID NO: 54631 - protein, 94 aa, Glycine max
  peptide (1)..(94): Ceres Seq. ID no. 14307260
MIWRTVYVIFTAVVAMILPFFNSIVGLLGAISFFPLTVYFPTEMYLVQAKVPKFSLVWIGVKILSGFCLIVTLVAAAGSIQGIIADLKIYEPFK

SEQ ID NO: 54632 - DNA, 1388 bp, Glycine max
  misc_feature (1)..(1388): Ceres Seq. ID no. 14313758
gaaccatcattgcgccttgcagcagctacgccttctacttaaatcgtaagaaggaactctctctccaccgtcccatcctctttccactcaacttctgccaatgcgtccgtttgcacctcaagtcgcacgcttcacgaacagatcaacttcatcctcaccagcactacagtccgcagcaagttattttacatccggttaccgcagcactccttctcccacacaacaacaaaccagaatgtcttcctccaccgagactggcgagcttaagctcgagagcaccgtcaagaccgccactggtgtcgagctcagcaacgagcagaggactatcgtgtcttcagtgctggacctcttcgctggcaggccctcccttgccaagctacagctctggaaggacgatgccgtcttcagcgaccccatcactgtcgcaaagggcaggaaggagtttgagcctcaatggtacggcctccaaaccgccttctccgaaatcgagcgcaaagaccacagcgtcacctcctccggcaaccccatcgagctagacatgaccacaatgtacaaggtcaagggtatcggcaaggagacgaccatcaccagcaaggtcaacatcttccacgagaacggcaagatcacccgcgtcgaggacaagtggaacggcaacctccccgactctggcatcgcaaatgcattccgacgactcaacgccgttagtgtccccaagatggtcggcgtgcccaagaacgcagaggaggatgccaagcgcggcaattagaagcgctgctacattgtagcctcccactgctttcgtttcggctttctactcggtggttttcgttctgttgtcaaggagtcggacgttcaacctgcgacagcgcctggcattatgaggaatcctggtcctcagggtggacaagatcgaccgcgcgattctgcaacggctgtgcatttcgagcctgctttgagcgacattccggaagaggctgcttctactggggcttcaccacctccggctgcatcgtcctcggtctcagatccttcagcttcatcttcttctcaacctcgcgatcccgcgccaactgttcactttgatcctaacttgaagaaaccgaagaagggtcgtccctctactgcgactgctttaccttcagacgggtcacctcctccaccaattcggccctatcttaagcagcctccgcaatcgctaccgccgactcccgagtcagagccacctgaggcgtcgaatgctcctccggcagttgctgaagccgaagcgagttcggggaagcgggtgtcgcctctacgtttgctgggttttcgttgattaagatacttttacggttggacagtacacacagcattattcttagcaggatgtatcactattcattatgatg

SEQ ID NO: 54633 - protein, 221 aa, Glycine max
  peptide (1)..(221): Ceres Seq. ID no. 14313759
MRPFAPQVARFTNRSTSSSPALQSAASYFTSGYRSTPSPTQQQTRMSSSTETGELKLESTVKTATGVELSNEQRTIVSSVLDLFAGRPSLAKLQLWKDDAVFSDPITVAKGRKEFEPQWYGLQTAFSEIERKDHSVTSSGNPIELDMTTMYKVKGIGKETTITSKVNIFHENGKITRVEDKWNGNLPDSGIANAFRRLNAVSVPKMVGVPKNAEEDAKRGN

SEQ ID NO: 54634 - protein, 177 aa, Glycine max
  peptide (1)..(177): Ceres Seq. ID no. 14313760
TIIAPCSSYAFYLNRKKELSLHRPILFPLNFCQCVRLHLKSHASRTDQLHPHQHYSPQQVILHPVTAALLLPHNNKPECLPPPRLASLSSRAPSRPPLVSSSATSRGLSCLQCWTSSLAGPPLPSYSSGRTMPSSATPSLSQRAGRSLSLNGTASKPPSPKSSAKTTASPPPATPSS

SEQ ID NO: 54635 - protein, 176 aa, Glycine max
  peptide (1)..(176): Ceres Seq. ID no. 14313761
MSSSTETGELKLESTVKTATGVELSNEQRTIVSSVLDLFAGRPSLAKLQLWKDDAVFSDPITVAKGRKEFEPQWYGLQTAFSEIERKDHSVTSSGNPIELDMTTMYKVKGIGKETTITSKVNIFHENGKITRVEDKWNGNLPDSGIANAFRRLNAVSVPKMVGVPKNAEEDAKRGN

SEQ ID NO: 54636 - DNA, 1484 bp, Glycine max
  misc_feature (1)..(1484): Ceres Seq. ID no. 14310387
ggtaaaaatgaacatgatagtcctgatgctcaatgcatggaaaggctcattgtgagtgatacttcattgcctaaatctgctaccagtcattttgaaagcccagctatttcagagtcttcagacattgtggatgatgggcctgtgaacaagtcaaatggtacagagtgcagaaatacaaatccactaccaggtgcccagaaagacataaaagaagatgaagtctatattaatatcaaactaaatgaagaatataacaagtctgttgatgttgatactcctaccgagtcacatcaagcagaagatgctggactattagtgaaggctgcagaagaccttgctagggagtatacatctcctttaactactgaaccttctgctcagcctgacagggaagtgtccggacttactgctgtgcctgttcaagatcaagctggtaataacttgggtaaacttggttcatccagagttgatgcttcagttgagtcaggtagccggtgtgacagtttggaaggcatctggggctctgtttcagttctgtcaattcaatccgatgcaccagctgttattgatgctgaaaccttgccatcaactggcttgctggcatcaacagaagcagggaaatcaaacttcaacgactcaaaagctacacctgacagacagcagtctggaaaatcagaaatgtttgaagcaccatctttcatgacattggttgatcctggtcaggttagcccaaaagccaatgcttctgaagtccagaagggacagaacacacaacagccagattccacttcacaggctgcttggtttcccactcttacacaagttgtcaatgagtctcaagggagaaagaagaatgaagaaataatagccaaggtgacaaactggagcactagtaaggagcacactcctcttaagagcctcttaggtgaggctgcccatagcagcaagccaagatctccaaaaatggaagaaaaatcagtgagtcagaagagtggtaaagttccggaaaagaatggttctgggttgacaactgttaactccattctgggtcctgaatcccctgtggctcaagtggtaaaaggagaggttgcaaaagaatggaactctccagcaagatatcctgctgatatcaagagagaaaaaaggaaagttaagagcagaccatactggatacaattggtatgctgcacatctgtcagtcctcagcgaaggtagaaaatcactaggttctgataatgcttccactctgatggattctggtcatagacatgctatttgcagtatttttctgtttttagtttgtctttgggtgcatattttgatcatgtgtcttctgttcattttggtagcctcctaggagtttggttgtatatgttgaccatcttcagttattatttatccctgcggtcatacatttttaccatacatagtaacgtatcattattttggcctggacccatattttagtccggtcttagttcttg

SEQ ID NO: 54637 - protein, 404 aa, Glycine max
  peptide (1)..(404): Ceres Seq. ID no. 14310388
GKNEHDSPDAQCMERLIVSDTSLPKSATSHFESPAISESSDIVDDGPVNKSNGTECRNTNPLPGAQKDIKEDEVYINIKLNEEYNKSVDVDTPTESHQAEDAGLLVKAAEDLAREYTSPLTTEPSAQPDREVSGLTAVPVQDQAGNNLGKLGSSRVDASVESGSRCDSLEGIWGSVSVLSIQSDAPAVIDAETLPSTGLLASTEAGKSNFNDSKATPDRQQSGKSEMFEAPSFMTLVDPGQVSPKANASEVQKGQNTQQPDSTSQAAWFPTLTQVVNESQGRKKNEEIIAKVTNWSTSKEHTPLKSLLGEAAHSSKPRSPKMEEKSVSQKSGKVPEKNGSGLTTVNSILGPESPVAQVVKGEVAKEWNSPARYPADIKREKRKVKSRPYWIQLVCCTSVSPQRR

SEQ ID NO: 54638 - protein, 392 aa, Glycine max
  peptide (1)..(392): Ceres Seq. ID no. 14310389
MERLIVSDTSLPKSATSHFESPAISESSDIVDDGPVNKSNGTECRNTNPLPGAQKDIKEDEVYINIKLNEEYNKSVDVDTPTESHQAEDAGLLVKAAEDLAREYTSPLTTEPSAQPDREVSGLTAVPVQDQAGNNLGKLGSSRVDASVESGSRCDSLEGIWGSVSVLSIQSDAPAVIDAETLPSTGLLASTEAGKSNFNDSKATPDRQQSGKSEMFEAPSFMTLVDPGQVSPKANASEVQKGQNTQQPDSTSQAAWFPTLTQVVNESQGRKKNEEIIAKVTNWSTSKEHTPLKSLLGEAAHSSKPRSPKMEEKSVSQKSGKVPEKNGSGLTTVNSILGPESPVAQVVKGEVAKEWNSPARYPADIKREKRKVKSRPYWIQLVCCTSVSPQRR

SEQ ID NO: 54639 - DNA, 1003 bp, Glycine max
  misc_feature (1)..(1003): Ceres Seq. ID no. 14303321
gaagacaccgagcgacaaagatcgacgatgacggacgaaaccgaagaattggaaccgttgtttgattacagccgggttcagcctctgaaccccatcgacctcgatgatgattttgatgattacgaggatgtgatttgcgttgatagtaaaaagaggaagaattcccaggctgttgggaatgagaagactaatgggaaaggagtaacagtggtggacattgaggatgatgattggttgcctcctccaccaaagatcgcaagtaatgcacagaagaccacggacgaggactcaactttgaaaaaattgagattaaagaagcaggaacttgcctggtttgctgaatcagcaaaagaattgttaaaagatgttgaagagtcatcaaaattggaaattaataattcgttgcagtcttctgtggttggtgtagatgagaaaagtacagagcattctgaaagagcaaagattgtcatttccgttcaggacaaggatggaacaaagcagattcgtatgttcatggatgacaagtttgaaaggattgtcaaaatatatgcagagaaaatcaaatgtgacatgaaactgatagtattgtcctttgatggtgataaaataagtttgtctgaaacccctgcaagccttgggatggaagacgatgatattattgaagttcacttgaaatcaagttgatcgaggtcttcagtcatggattcatgaagctcaaactgacattttggggccacatttgggagttacgtaccctagaaggttgtttgtttttagcatctttagtacaagaaaaacagtgccagttcggccgaactgtatagcacattatttttttatgtaattgtctagtatcgctccttttggtggatgtttctttgtttatggtataggtttctgataatgcagaaaccctcctgtttttggatgtgcattattgcttttggttttctgcaatcagtttgcttgattgttcaaatagatgtaagtcaagatgaagctc

SEQ ID NO: 54640 - protein, 227 aa, Glycine max
  peptide (1)..(227): Ceres Seq. ID no. 14303322
EDTERQRSTMTDETEELEPLFDYSRVQPLNPIDLDDDFDDYEDVICVDSKKRKNSQAVGNEKTNGKGVTVVDIEDDDWLPPPPKIASNAQKTTDEDSTLKKLRLKKQELAWFAESAKELLKDVEESSKLEINNSLQSSVVGVDEKSTEHSERAKIVISVQDKDGTKQIRMFMDDKFERIVKIYAEKIKCDMKLIVLSFDGDKISLSETPASLGMEDDDIIEVHLKSS

SEQ ID NO: 54641 - protein, 218 aa, Glycine max
  peptide (1)..(218): Ceres Seq. ID no. 14303323
MTDETEELEPLFDYSRVQPLNPIDLDDDFDDYEDVICVDSKKRKNSQAVGNEKTNGKGVTVVDIEDDDWLPPPPKIASNAQKTTDEDSTLKKLRLKKQELAWFAESAKELLKDVEESSKLEINNSLQSSVVGVDEKSTEHSERAKIVISVQDKDGTKQIRMFMDDKFERIVKIYAEKIKCDMKLIVLSFDGDKISLSETPASLGMEDDDIIEVHLKSS

SEQ ID NO: 54642 - DNA, 1212 bp, Glycine max
  misc_feature (1)..(1212): Ceres Seq. ID no. 14303340
gaaacaatggaaaagaaatcacctgaaccacccgaagaagcatcacagtcacgagactcatcgcgagataaccagacctggataactgcacaaaacattctgagagaaaaactgatcacagaggactgtttcgcatggaaattacaagctggttccaaagaggaagaagcattgagatacgttggtggggttgacataagcttctcaaaggatgacccatcaagggcatgtggcacccttgtagtcttggacttccacactcttcaagttctctatcaagatttctctttggtcactcttcaagtcccttatgtgcctggctttctagcatttagagaggccccagttcttctgcagcttctagagaaaatgaaaaggagcaataatcctttctaccctcagctattaatggttgatggaaacggaatacttcatccccgaggttttgggctggcctgtcatattggagttgaggccaatctcccaacaattgggattggaaagaatttgcatcatgtggatggtcttactcattctagagtgagagaacttcttggagctgaagaaaactgttctgaagattttattaatttggtgggttgttctgggcatatatggggagtggccatgagatctacccagggttccataaaaccaatatttatatcaattggtcacaagatatcacttcagactgccattatgattgttcaaatgacatgcaagtaccgtgtgcctgagccaattaggcaggctgacataagatctagagactacattcggaaacttgaagcaaatgccaaagtaaagtaatttcactcatatggtttaagtttttatcctgttaaattatgaaatagctagccatgtgagatgacaataacaagtttggctgcaaggggctcaaatgaacttgatagaaccatcacaattcgtcaagtggttagaaacaatgccagtgccagtggatttgcttatagcttcattgaatgatccatttcacctcacaggattacataaggactcagcattccatccattagcataattatatctaaaccactcatgtaaaagagtgatgatatatgcacaaccaaatcactctcaaaatagaactatttgcgagctagcattctgtgtagtgtagaagcagaatttttatttctggttgctttgattgtctgatgagaagtgctagcaacattctttaat

SEQ ID NO: 54643 - protein, 270 aa, Glycine max
  peptide (1)..(270): Ceres Seq. ID no. 14303341
ETMEKKSPEPPEEASQSRDSSRDNQTWITAQNILREKLITEDCFAWKLQAGSKEEEALRYVGGVDISFSKDDPSRACGTLVVLDFHTLQVLYQDFSLVTLQVPYVPGFLAFREAPVLLQLLEKMKRSNNPFYPQLLMVDGNGILHPRGFGLACHIGVEANLPTIGIGKNLHHVDGLTHSRVRELLGAEENCSEDFINLVGCSGHIWGVAMRSTQGSIKPIFISIGHKISLQTAIMIVQMTCKYRVPEPIRQADIRSRDYIRKLEANAKVK

SEQ ID NO: 54644 - protein, 268 aa, Glycine max
  peptide (1)..(268): Ceres Seq. ID no. 14303342
MEKKSPEPPEEASQSRDSSRDNQTWITAQNILREKLITEDCFAWKLQAGSKEEEALRYVGGVDISFSKDDPSRACGTLVVLDFHTLQVLYQDFSLVTLQVPYVPGFLAFREAPVLLQLLEKMKRSNNPFYPQLLMVDGNGILHPRGFGLACHIGVEANLPTIGIGKNLHHVDGLTHSRVRELLGAEENCSEDFINLVGCSGHIWGVAMRSTQGSIKPIFISIGHKISLQTAIMIVQMTCKYRVPEPIRQADIRSRDYIRKLEANAKVK

SEQ ID NO: 54645 - protein, 147 aa, Glycine max
  peptide (1)..(147): Ceres Seq. ID no. 14303343
MKRSNNPFYPQLLMVDGNGILHPRGFGLACHIGVEANLPTIGIGKNLHHVDGLTHSRVRELLGAEENCSEDFINLVGCSGHIWGVAMRSTQGSIKPIFISIGHKISLQTAIMIVQMTCKYRVPEPIRQADIRSRDYIRKLEANAKVK

SEQ ID NO: 54646 - DNA, 1523 bp, Glycine max
  misc_feature (1)..(1523): Ceres Seq. ID no. 14313893
aatgcagtcaaacaataacatatcgtaaaaagtactactatagttgctgttttgttgaagaagaaaacaaagtagaagcaaagttctttaagagtgaaagagaccatttttgcaaccccaattgatcagctcttgaaacaaacatgaagaagaacacctctgcgatggagaatgccggtggcatcaaggcatggagtttccgtcgccaccagcttttggttagaagggtgatgcaattaaccatgttcattgctggacttcctgtgttgtgggtgtttctctctaactctgcctcttccattgaattccataccttctcacattacttcactgctcagtcaacaaaggctggttatgaatcaaagctagagagtgtttttagaactgcgtctatgaaggataagacagtgataatcacaactttaaacgatgcatgggcaaagccaggttcggtatttgacctctttcttgagagttttcgcctagggaatgagacacaatggcttttaaatcacttggtggtaataacttgggaccaaaagacaaatgcttattgccttgctttgcacaaacattgttaccaagttgaaactaaaggtgccaatttcaccggtgaagtattattcatgaccccgacatacctacacatgatgtgtagaagaactgaattcctcacttctgttcttgagatgggatataactttgtgttcacggatactgatataatgtggcttagagatcccttcaaacaattttatgaagatgcagatttccaaatagcttgtgatgctttcaatggcaactcctctgacatatacaactatccaaatggagggtttaaatacataaaatcgaataaccgaactatttggtttaacaagttctggttcaactctagcaaagagtacccagggttgggtgagcaggctgtgttcaataagatcaaaatgcaccccttaatttcccacatgaagctgaagattaggttccttagcactagctattttggagggttttgtgagcctagcaaggacttcaacaaggtctcaacaatgcatgccaattgttgtgttggcatagacaacaaagtcaatgatcttaaaattttgcttgaggattggaagaagtatatggcattgtctgaaattgacaaaaaacagtcaaatcttacttggagcgtaccacaaagttgcagtaagtcctttgaacatgccaaagaaaggaagaataaagggaggttgcgacgggctttggttgaaactgtttgatgcatttataaagaggtttgagaatgattgactcaaattttggatcaaagcaaaaggtttactttgccaagccaattcttttgcaatggaaaagaaatgtgtggaagtggtacacccattgaaaatgtaggaaacagagaaaagtttgttcaaagttttattatgagatgtaatatatgcagtatgtacaataatttatataacagtttgtataacattttttttgggtttatatctatcattataaaatgtaac

SEQ ID NO: 54647 - protein, 374 aa, Glycine max
  peptide (1)..(374): Ceres Seq. ID no. 14313894
MKKNTSAMENAGGIKAWSFRRHQLLVRRVMQLTMFIAGLPVLWVFLSNSASSIEFHTFSHYFTAQSTKAGYESKLESVFRTASMKDKTVIITTLNDAWAKPGSVFDLFLESFRLGNETQWLLNHLVVITWDQKTNAYCLALHKHCYQVETKGANFTGEVLFMTPTYLHMMCRRTEFLTSVLEMGYNFVFTDTDIMWLRDPFKQFYEDADFQIACDAFNGNSSDIYNYPNGGFKYIKSNNRTIWFNKFWFNSSKEYPGLGEQAVFNKIKMHPLISHMKLKIRFLSTSYFGGFCEPSKDFNKVSTMHANCCVGIDNKVNDLKILLEDWKKYMALSEIDKKQSNLTWSVPQSCSKSFEHAKERKNKGRLRRALVETV

SEQ ID NO: 54648 - protein, 367 aa, Glycine max
  peptide (1)..(367): Ceres Seq. ID no. 14313895
MENAGGIKAWSFRRHQLLVRRVMQLTMFIAGLPVLWVFLSNSASSIEFHTFSHYFTAQSTKAGYESKLESVFRTASMKDKTVIITTLNDAWAKPGSVFDLFLESFRLGNETQWLLNHLVVITWDQKTNAYCLALHKHCYQVETKGANFTGEVLFMTPTYLHMMCRRTEFLTSVLEMGYNFVFTDTDIMWLRDPFKQFYEDADFQIACDAFNGNSSDIYNYPNGGFKYIKSNNRTIWFNKFWFNSSKEYPGLGEQAVFNKIKMHPLISHMKLKIRFLSTSYFGGFCEPSKDFNKVSTMHANCCVGIDNKVNDLKILLEDWKKYMALSEIDKKQSNLTWSVPQSCSKSFEHAKERKNKGRLRRALVETV

SEQ ID NO: 54649 - protein, 345 aa, Glycine max
  peptide (1)..(345): Ceres Seq. ID no. 14313896
MQLTMFIAGLPVLWVFLSNSASSIEFHTFSHYFTAQSTKAGYESKLESVFRTASMKDKTVIITTLNDAWAKPGSVFDLFLESFRLGNETQWLLNHLVVITWDQKTNAYCLALHKHCYQVETKGANFTGEVLFMTPTYLHMMCRRTEFLTSVLEMGYNFVFTDTDIMWLRDPFKQFYEDADFQIACDAFNGNSSDIYNYPNGGFKYIKSNNRTIWFNKFWFNSSKEYPGLGEQAVFNKIKMHPLISHMKLKIRFLSTSYFGGFCEPSKDFNKVSTMHANCCVGIDNKVNDLKILLEDWKKYMALSEIDKKQSNLTWSVPQSCSKSFEHAKERKNKGRLRRALVETV

SEQ ID NO: 54650 - DNA, 1492 bp, Glycine max
  misc_feature (1)..(1492): Ceres Seq. ID no. 13637842
gacaagtgagtttgttgatcgagataactagaaacagtgtgatgaaaatgaaggtccttgttttcttcgttgctacaattttggtagcatggcaatgccatgcgtacgatatgttccctctccgaatgaacactggctatggtgcccgtactccggaggtgaaatgcgcaagttggaggcttgctgtggaagcacacaacatctttggctttgagaccattcctgaagagtgcgttgaagcaacaaaggaatacatccatggcgaacaatatagatcagactccaaaacagttaaccaacaagcttacttttatgccagagacctcgaagtccatcccaaggacacatttgtgttcagtatagatggcaccgtactctctaatattccatactacaaaaaacatggatatgggtattatgctcttagttaattttcttctaatactctctttttccgtttttgctattactaggttactcccttatatgcgcatcatttattttcaactatttttggtattgatcgagtttcggtgtttggcccgactaacaacattaaggtttctcatcacatgcatgtagatttgaaaccttcattatatatgacattttatgattagatataatataaagaaaaagtttcattgtgagtgcataaatatatatatatacagacacaggcacatacatgctttcaggatcgtgttcattgttcttaatgcaatattttatgtgatagggtggagaaatttaactcgaccttgtatgatgaatgggttaacaagggcaatgcaccggcactgcccgagactcttaagaattacaacaagctggtgtctcttggcttcaagattatattcttgtcaggaagaacactggacaaacaggccgtaacagaagcaaacttaaagaaggctggctaccacacatgggaaaaattaattctcaagtcagttttcttttttctctatactatattctcaagtcaattaattctcaacgttgcaccaaatctgccaggaaggaacagtttatagataatcagaaattatataattattttaagtacatggtgcgatatgagtttgaaatactagtagctaattggatctatttttggttggtgcagggatccacaagatccttccactccaaatgcagtttcatacaaaacagcagcgagagagaaactgataaggcagggatacaacattgttgggatcattggagaccaatggagcgatctcctcggaggccacagaggcgaaagcaggacctttaagcttcctaatcccctgtactacattcagtagttccttcacctctcaacaatctagcttgctcctatctatctatatgtaataagatgcgttcaaataggggcactagcttcactttatgttgtttcagctgtgtgtcaacaagtcatgtaagagacttcactatgttgttttctctttcgtggctttaataaattatgcgcccttgttcc

SEQ ID NO: 54651 - protein, 142 aa, Glycine max
  peptide (1)..(142): Ceres Seq. ID no. 15220387
QVSLLIEITRNSVMKMKVLVFFVATILVAWQCHAYDMFPLRMNTGYGARTPEVKCASWRLAVEAHNIFGFETIPEECVEATKEYIHGEQYRSDSKTVNQQAYFYARDLEVHPKDTFVFSIDGTVLSNIPYYKKHGYGYYALS

SEQ ID NO: 54652 - protein, 129 aa, Glycine max
  peptide (1)..(129): Ceres Seq. ID no. 15220388
MKMKVLVFFVATILVAWQCHAYDMFPLRMNTGYGARTPEVKCASWRLAVEAHNIFGFETIPEECVEATKEYIHGEQYRSDSKTVNQQAYFYARDLEVHPKDTFVFSIDGTVLSNIPYYKKHGYGYYALS

SEQ ID NO: 54653 - protein, 127 aa, Glycine max
  peptide (1)..(127): Ceres Seq. ID no. 15220389
MKVLVFFVATILVAWQCHAYDMFPLRMNTGYGARTPEVKCASWRLAVEAHNIFGFETIPEECVEATKEYIHGEQYRSDSKTVNQQAYFYARDLEVHPKDTFVFSIDGTVLSNIPYYKKHGYGYYALS

SEQ ID NO: 54654 - DNA, 1410 bp, Glycine max
  misc_feature (1)..(1410): Ceres Seq. ID no. 15170881
ggacgctgctgctataaaaaagctcgaatactcggataaggagagtaagggcggtgcagtgcttcaaacccctttttctcttctcatttcctttcatcactctcttgcttcttttcttcttctcgcaattttccattttcacacttttagcgtaagaacatcttttaatggcgtcccaaatccgtgagtggtctggaatcaatacattcgcacctgctacccagactaagttgcttgaactcttgggaaatcttaaacaagagaatgtgaactccttgactatacttgtgatgggaaaaggaggtgttggaaaatcttcaactgtgaactccatcattggggaaagagtggtttcgattagtcctttccagtcggaagggccaagacctgtgatggtgtcacgatcaagggctggttttacattgaacattattgacactcctggtctcattgaaggggggtacatcaatgatatggcacttgatataataaaacgtttccttctgaacaagaccatagatgtgctgctttacgtggatcgcttggatgtgtacagagtggacaacttggataagttagtcgccaaagctataacagatagttttggcaaaggaatatggaacaaggccattgtaacactcacacatgcccagttctctccaccagatggattgccctatgatgaattcttttcacaaagatctgagtctctcttgaaggttcttaggtcaggtgccaggataaagaaagaagcctttcaggctgcttcaattcctgttgttttggtcgagaacagtgggagatgcaacaaaaatgacagtgatgaaaaggttcttccaaatgggactgcttggattcctaatctagtccagacaatcacagaaatcgcattgaacaaaagtgagtctattcatgttgacaagaatttgattgaagggccaaatccgaatcagagaggaaaattatggattcctctcgtgttcgctctccaatacttccttatcatgaagccaataaaaggactgatcgagaaggacattgcaaatgagagaaagccaacatgggagagacgcgatgctgcttttcggaagagagatttatattagttgtgcatttctgtgcccatgaaattccattgatgttttagcttcctttgctgacacattttagtttttgtctgttctatgagtgaaacttggatgattttccttatactgtaattgctagtagtctggcataggaatttgtttgtgcctgagaggattgcatgtatgctggtaagtttttggcttttgcatgattcagtttgttaatgttagtatttagttgtcttgtaaacatagctctagatgtggctactatcgataatagcttgatattctaataaaattagcccgaagtatcgatatc

SEQ ID NO: 54655 - protein, 312 aa, Glycine max
  peptide (1)..(312): Ceres Seq. ID no. 15170882
MASQIREWSGINTFAPATQTKLLELLGNLKQENVNSLTILVMGKGGVGKSSTVNSIIGERVVSISPFQSEGPRPVMVSRSRAGFTLNIIDTPGLIEGGYINDMALDIIKRFLLNKTIDVLLYVDRLDVYRVDNLDKLVAKAITDSFGKGIWNKAIVTLTHAQFSPPDGLPYDEFFSQRSESLLKVLRSGARIKKEAFQAASIPVVLVENSGRCNKNDSDEKVLPNGTAWIPNLVQTITEIALNKSESIHVDKNLIEGPNPNQRGKLWIPLVFALQYFLIMKPIKGLIEKDIANERKPTWERRDAAFRKRDLY

SEQ ID NO: 54656 - protein, 271 aa, Glycine max
  peptide (1)..(271): Ceres Seq. ID no. 15170883
MGKGGVGKSSTVNSIIGERVVSISPFQSEGPRPVMVSRSRAGFTLNIIDTPGLIEGGYINDMALDIIKRFLLNKTIDVLLYVDRLDVYRVDNLDKLVAKAITDSFGKGIWNKAIVTLTHAQFSPPDGLPYDEFFSQRSESLLKVLRSGARIKKEAFQAASIPVVLVENSGRCNKNDSDEKVLPNGTAWIPNLVQTITEIALNKSESIHVDKNLIEGPNPNQRGKLWIPLVFALQYFLIMKPIKGLIEKDIANERKPTWERRDAAFRKRDLY

SEQ ID NO: 54657 - protein, 237 aa, Glycine max
  peptide (1)..(237): Ceres Seq. ID no. 15170884
MVSRSRAGFTLNIIDTPGLIEGGYINDMALDIIKRFLLNKTIDVLLYVDRLDVYRVDNLDKLVAKAITDSFGKGIWNKAIVTLTHAQFSPPDGLPYDEFFSQRSESLLKVLRSGARIKKEAFQAASIPVVLVENSGRCNKNDSDEKVLPNGTAWIPNLVQTITEIALNKSESIHVDKNLIEGPNPNQRGKLWIPLVFALQYFLIMKPIKGLIEKDIANERKPTWERRDAAFRKRDLY

SEQ ID NO: 54658 - DNA, 1218 bp, Glycine max
  misc_feature (1)..(1218): Ceres Seq. ID no. 15170857
gaaagccattttccgatttctaagaaggaaccagtttttgttcccactttcctaagtttccttctcgctcccgtctctgaaatttcgagggtttcatcgttgctgaatcaacaattcggaaccagttagcaatgttcagattctggggatcacaagagcaacaatcacaggatggttcttcgcagtcacagtcgtggtatccgccgtcggtggtgagttcaccaacttcgtcgaggcctgttacaccgactgcatcttcttcttcattatcacagaggccttcgtctcatgttccaccttctgaagctgctgcagttattgccgttttgaaggacaagagtgttgatgagttgcggaagcttttatctgacaaagatgcgtatcaacagtttttgcattcacttgatcaggtcaagattcaaactaatctgaaagatgaactttgcaaggagaatttacagcttgcagaggaaaatcttcaaaaggaacctcgtatcatggaacttaggaatcaatgtagaataattcggacaaccgagttagctgctgctaaggagaaactaaatgagcttgagaagcagaaagaagacatgttgaaattgaattccgcagcatcccttctccaaaggattcaagagtctgtgaataagaccgacgaggaatctgaaaacttgcaccacaatctccttgacagagagattgaccttggtgcttttttgcaaaagtacaagaagctacgtaccacttaccacaggaagactctcgtacatcttgctgccaaaacatcaacagtatgagcactgacatgaaatattaagaaattaaaactggttttggcaagtatgtatttgatttttggttcattattgtcaatagttatcattggtcaaagatacttgccaccaaattacatagagtcacagtcgttgggatagaaccatctactacaaattagattgttcatatatgtgcagcctgagattgttcattgtggtgacattgtcgagtggtttcatgccacttggaatgaggtatggacttgcatttacttttctagtttgccatcggctatcttcaactttatttgtatgaactctgaagtgtgctgtagcttatgagatcatcatcgccgatataggatttactgttgtgttgtaaaatgtaaaaaatgctgactttcttttctttgggagcaactacaagtttttcagaacccag

SEQ ID NO: 54659 - protein, 221 aa, Glycine max
  peptide (1)..(221): Ceres Seq. ID no. 15170858
MFRFWGSQEQQSQDGSSQSQSWYPPSVVSSPTSSRPVTPTASSSSLSQRPSSHVPPSEAAAVIAVLKDKSVDELRKLLSDKDAYQQFLHSLDQVKIQTNLKDELCKENLQLAEENLQKEPRIMELRNQCRIIRTTELAAAKEKLNELEKQKEDMLKLNSAASLLQRIQESVNKTDEESENLHHNLLDREIDLGAFLQKYKKLRTTYHRKTLVHLAAKTSTV

SEQ ID NO: 54660 - DNA, 1344 bp, Glycine max
  misc_feature (1)..(1344): Ceres Seq. ID no. 14307091
attggaagaatgcatcaccgcgttgtgttgtgattgaaaatggagagcgatgttgaagaatctatgcggaagaggcccagaaaatatcctttctccgccgattcatcctctcgcaagcaatttgaacaatattctggacggacatttgcaattatgggggaagtgaattttatgcaagatgatgataatcgtttggagattacccgaactaaatttggaagtttgcttaaaagacatggagatttgacagagcggcttgctagggattctgacaagataatatttgagcgtctacagaaggagtttgaagctgcacgagcttctcaaactgaagagatatgtttagacggggaagagtggaatgatggtctactagctacaataagagagcgggtgcatatggaggcggacagaaaagcaatgcaaggggatgcggacatattagcatgtcccctggaaaaaattacatataaaattggaaacaaggtaatttgctgtttggaaggggcaagaatcggcgtacaatatgagacatcgtttgctggtgaaccttgtgagttttaccattgtgtgctggaaagcaagtcatttcttgaaaagatgactgtccttgaacacacagttccatttttcctgccaatacgagaaatagaaaatgatctccattcatccaatgcaatgaaactcatagatcatgttggagatctattgcaggcttttgtggatagacgggaacaggtcagacttataaaggagctgtatggaaatcagattagagagctgtatcatagccttccctaccatatggtcgaatttgtattagatgattctgattgcaaggtgacagtcagccttagatatgcagatctcatttcggtgcttccaactcgaatttcagtgctagcctggcctatgttcaataaaaatactatgagtaggaaggaagatggactctcgggaagtcattcttccccaattcgcctaacatatgcagaagatgccttacgaaccatgagtttacccgaagcatatgcagagattgtattaaacttaccacaggcgattcggcagacgtatcatcaaaaagccaccgcttagagctttgccctttcagtagcctagatgcatctgtaaaaattcttggtagagatgttaaatattagaaaaacaacttcagaattattacctatttacctagtcaaattgctcaggttgagttcattttgctgtaatattgtcatatagcatttagcatttgtacttcggcctctctggcctcgttattccttcaatacctactccggtgtcttgtatcattaatacaacagggctaggtttacatct

SEQ ID NO: 54661 - protein, 352 aa, Glycine max
  peptide (1)..(352): Ceres Seq. ID no. 14307092
MESDVEESMRKRPRKYPFSADSSSRKQFEQYSGRTFAIMGEVNFMQDDDNRLEITRTKFGSLLKRHGDLTERLARDSDKIIFERLQKEFEAARASQTEEICLDGEEWNDGLLATIRERVHMEADRKAMQGDADILACPLEKITYKIGNKVICCLEGARIGVQYETSFAGEPCEFYHCVLESKSFLEKMTVLEHTVPFFLPIREIENDLHSSNAMKLIDHVGDLLQAFVDRREQVRLIKELYGNQIRELYHSLPYHMVEFVLDDSDCKVTVSLRYADLISVLPTRISVLAWPMFNKNTMSRKEDGLSGSHSSPIRLTYAEDALRTMSLPEAYAEIVLNLPQAIRQTYHQKATA

SEQ ID NO: 54662 - protein, 344 aa, Glycine max
  peptide (1)..(344): Ceres Seq. ID no. 14307093
MRKRPRKYPFSADSSSRKQFEQYSGRTFAIMGEVNFMQDDDNRLEITRTKFGSLLKRHGDLTERLARDSDKIIFERLQKEFEAARASQTEEICLDGEEWNDGLLATIRERVHMEADRKAMQGDADILACPLEKITYKIGNKVICCLEGARIGVQYETSFAGEPCEFYHCVLESKSFLEKMTVLEHTVPFFLPIREIENDLHSSNAMKLIDHVGDLLQAFVDRREQVRLIKELYGNQIRELYHSLPYHMVEFVLDDSDCKVTVSLRYADLISVLPTRISVLAWPMFNKNTMSRKEDGLSGSHSSPIRLTYAEDALRTMSLPEAYAEIVLNLPQAIRQTYHQKATA

SEQ ID NO: 54663 - protein, 314 aa, Glycine max
  peptide (1)..(314): Ceres Seq. ID no. 14307094
MGEVNFMQDDDNRLEITRTKFGSLLKRHGDLTERLARDSDKIIFERLQKEFEAARASQTEEICLDGEEWNDGLLATIRERVHMEADRKAMQGDADILACPLEKITYKIGNKVICCLEGARIGVQYETSFAGEPCEFYHCVLESKSFLEKMTVLEHTVPFFLPIREIENDLHSSNAMKLIDHVGDLLQAFVDRREQVRLIKELYGNQIRELYHSLPYHMVEFVLDDSDCKVTVSLRYADLISVLPTRISVLAWPMFNKNTMSRKEDGLSGSHSSPIRLTYAEDALRTMSLPEAYAEIVLNLPQAIRQTYHQKATA

SEQ ID NO: 54664 - DNA, 2061 bp, Glycine max
  misc_feature (1)..(2061): Ceres Seq. ID no. 14313151
tttatgttcaaagcatttcttttgggcttctgacccaaataattcctcctaacgattcaacccatttcaaacaatctgtaatagtgttataggatagatgaatcagaagacaacgttgcatggaaagcaattggatactgcggacctgatccagaattcaaagctcggttgaagagccactttttagatggaacatctaaaggaggacaagaggataaggaagatgaagatgctgaagaggtgataggaccactttacaaaggtctagtccatctcaattacccacgagacatcactgcagatgctctaaaacgactcggattccctgtatcggtcatccgtcagaagcataaagctgctgcaaacttatcatctccttctttggtgatacaatgtgatgcagtggtggttggttctggctcaggaggtggagtgatagctggtgttcttgcaaaagctggttacaaagtgttggtgttggagaaaggaggttattctgctaggaacaatctttctcttcttgaaggaccaaccatggatcaaatgtacctcaatggtggtctggttgcaagtgatgatatgggtgtgttcattctatcaggatccactgttggtggagggtcagcaatcaactggtctgcgtgcattaaaacccctcagcatgtgtgcaaggagtggagtgataaacatggtctagagctgtttgagagtgaactgtatagagaagccttgaatgctgtttgtgagaagatggaagttcaatctgagattgaagatgaaggattcaacaatgcaatactaagaaaagggtgtcaagaaatggggtatcctgttagtaacattcctaggaattctgcggcagatcactactgtggctggtgttgcatgggttgtaaggatgggaggaagaagggtacctcagaaacatggttagtggacttggtgaaatctggcaatggagcaattcttccaggttgtgaggcaataaaagtcttgcacaagaaaaaggaagggagggatagaaagattgcgcgtggagtggcttttgaatttgaatataaagggactaaagacatttgtgtggtggagtccaaggtcacaattgtagcatgtggagcactgagtactccagcattgcttaaaaaaagtggcttgaggaatcagaacatagggaggaacttgcatcttcatccagtggcgatggcttggggatacttcccagatgcacctgaatctgaggtgtggccagaggcatataagaagagctatgaaggagggataatgacagcaatgtcaactgttgttgcagagtttgaacaatctggatatggtgcagtgatccaaacaccttcattgcatcctggtatgttctcaattgtcacaccatggacttctggaatcgatataagagaccgaatgcgaaagttttcaagaacagctcatatatttgcactggcaagggatcaaggatcagggactgtaaaagccccagatcgtatcagttataagccggcaggtgtagatgaagagaatttaaagaaaggaattgagaaggtgctgagaattctggcagcagctggtgctgaagaaattgggacacatcataataagggaaggaccttaaatgtaaagcaggtaagatatcatgagtttgagaaatttgttaaagaggaaagttcaaggtcattgacagaccttacaacaccattgtgctcggcacatcaaatggggagttgccggatgggttctaatccaaagcaatcagcggtgaatcagacaggggagacatgggaagtggagggcctttatgtggcagatacaagtgtcttcccaacagcattgggtgtgaatccaatggttactgttcaagctattgcttattgcacagcacaatctgttgttgaagtacttagaaggaaaagaactaaatgagaaaaataaaataaaatcttttgctgcttctgttgctccaatggtactgaatattcatggcattgggcagaaaactttgttcaaataataattgtttggtgagaaaagcaatggttgaaattttaacat

SEQ ID NO: 54665 - protein, 465 aa, Glycine max
  peptide (1)..(465): Ceres Seq. ID no. 14313152
MDQMYLNGGLVASDDMGVFILSGSTVGGGSAINWSACIKTPQHVCKEWSDKHGLELFESELYREALNAVCEKMEVQSEIEDEGFNNAILRKGCQEMGYPVSNIPRNSAADHYCGWCCMGCKDGRKKGTSETWLVDLVKSGNGAILPGCEAIKVLHKKKEGRDRKIARGVAFEFEYKGTKDICVVESKVTIVACGALSTPALLKKSGLRNQNIGRNLHLHPVAMAWGYFPDAPESEVWPEAYKKSYEGGIMTAMSTVVAEFEQSGYGAVIQTPSLHPGMFSIVTPWTSGIDIRDRMRKFSRTAHIFALARDQGSGTVKAPDRISYKPAGVDEENLKKGIEKVLRILAAAGAEEIGTHHNKGRTLNVKQVRYHEFEKFVKEESSRSLTDLTTPLCSAHQMGSCRMGSNPKQSAVNQTGETWEVEGLYVADTSVFPTALGVNPMVTVQAIAYCTAQSVVEVLRRKRTK

SEQ ID NO: 54666 - protein, 462 aa, Glycine max
  peptide (1)..(462): Ceres Seq. ID no. 14313153
MYLNGGLVASDDMGVFILSGSTVGGGSAINWSACIKTPQHVCKEWSDKHGLELFESELYREALNAVCEKMEVQSEIEDEGFNNAILRKGCQEMGYPVSNIPRNSAADHYCGWCCMGCKDGRKKGTSETWLVDLVKSGNGAILPGCEAIKVLHKKKEGRDRKIARGVAFEFEYKGTKDICVVESKVTIVACGALSTPALLKKSGLRNQNIGRNLHLHPVAMAWGYFPDAPESEVWPEAYKKSYEGGIMTAMSTVVAEFEQSGYGAVIQTPSLHPGMFSIVTPWTSGIDIRDRMRKFSRTAHIFALARDQGSGTVKAPDRISYKPAGVDEENLKKGIEKVLRILAAAGAEEIGTHHNKGRTLNVKQVRYHEFEKFVKEESSRSLTDLTTPLCSAHQMGSCRMGSNPKQSAVNQTGETWEVEGLYVADTSVFPTALGVNPMVTVQAIAYCTAQSVVEVLRRKRTK

SEQ ID NO: 54667 - protein, 450 aa, Glycine max
  peptide (1)..(450): Ceres Seq. ID no. 14313154
MGVFILSGSTVGGGSAINWSACIKTPQHVCKEWSDKHGLELFESELYREALNAVCEKMEVQSEIEDEGFNNAILRKGCQEMGYPVSNIPRNSAADHYCGWCCMGCKDGRKKGTSETWLVDLVKSGNGAILPGCEAIKVLHKKKEGRDRKIARGVAFEFEYKGTKDICVVESKVTIVACGALSTPALLKKSGLRNQNIGRNLHLHPVAMAWGYFPDAPESEVWPEAYKKSYEGGIMTAMSTVVAEFEQSGYGAVIQTPSLHPGMFSIVTPWTSGIDIRDRMRKFSRTAHIFALARDQGSGTVKAPDRISYKPAGVDEENLKKGIEKVLRILAAAGAEEIGTHHNKGRTLNVKQVRYHEFEKFVKEESSRSLTDLTTPLCSAHQMGSCRMGSNPKQSAVNQTGETWEVEGLYVADTSVFPTALGVNPMVTVQAIAYCTAQSVVEVLRRKRTK

SEQ ID NO: 54668 - DNA, 1474 bp, Glycine max
  misc_feature (1)..(1474): Ceres Seq. ID no. 15172325
ggatgggcgtccctcactttcttctaattccatatccaacactaggacatgtgaacccccttatgcagttgtctcaggttcttgccagacatggctgcaagatcacttttctgaacacagaattcaaccacaaaggagcaaatacagcagcaggtgttgggatagacaacgcccatataaagtttgtgacactcccagatggtttggtccctgaagatgacagaagtgaccacaaaaaagttattttctcaatcaaaagccacatgcctcctatgcttcccaaactcattcaagatatcgatgctttggatgctaacaataacatcacttgcattgttgtcacagtgaatatgggttgggccttggaagttggccacaaattgggaattaaaggagctcttctgtggcctgcatctgcaacttcgttggccacgtgtgattgtatcccatggttgattcatgatggaattatagattcagatggaaaccccatcaaaaaacaagaaattcaactctccacaaatctgccaatgatggacacagaaaacttgccatggtgtagcctaggtaagatgctctttcatcatattgcacaagagatgcaaactattaagttaggagactggtggctttgcaacacaacatatgatcttgagtctgccgcattttccatatcacgacggttcctaccaattggtccattgattgcaagtgacagcaacaaaagttcactctggcaaggagacacaactttcttagactggttagatcagcagccacctcaatcagttatatatgttgcctttggtagtttggcagtaattgatcacaaccaacttaaggaattagctctaggactcaatttccttgacaagccttttctttgggttgtacggccgagtaatgataatgaggcaaacaatgcatgctctgatgaattccatggaagtaaaggcagaattgtaagttgggcaccacagaagaagatattgaaccaccctgccatagcttgtttcattagtcactgtggttggaattctaccatagaaggtgtatgtggtggcgtacctttcttgtgttggccattagccaaggatcagtttgttaacaagtcatatatttgtgatgtgtggaaggttggactgggattagacaaggctgagaatggattaatatcaaagggagagataaggaagaaggtagagcaattacttggcgatgaaggcataaaagcaaggtcgttgaaactgaaggaattgaccttgaataacatagtagaaggtggtcactcttcaaagaatctcaaaaactttatcagctgggcagagtaataatgctttggtatagtttggaaatcgttgtaaacttgcaatgtagttagtaaaattgttcattccgttatgtagtattttgaggacattgaatattataaatatcatcatttccattccatgataaaggattagagaccttt

SEQ ID NO: 54669 - protein, 442 aa, Glycine max
  peptide (1)..(442): Ceres Seq. ID no. 15172326
MGVPHFLLIPYPTLGHVNPLMQLSQVLARHGCKITFLNTEFNHKGANTAAGVGIDNAHIKFVTLPDGLVPEDDRSDHKKVIFSIKSHMPPMLPKLIQDIDALDANNNITCIVVTVNMGWALEVGHKLGIKGALLWPASATSLATCDCIPWLIHDGIIDSDGNPIKKQEIQLSTNLPMMDTENLPWCSLGKMLFHHIAQEMQTIKLGDWWLCNTTYDLESAAFSISRRFLPIGPLIASDSNKSSLWQGDTTFLDWLDQQPPQSVIYVAFGSLAVIDHNQLKELALGLNFLDKPFLWVVRPSNDNEANNACSDEFHGSKGRIVSWAPQKKILNHPAIACFISHCGWNSTIEGVCGGVPFLCWPLAKDQFVNKSYICDVWKVGLGLDKAENGLISKGEIRKKVEQLLGDEGIKARSLKLKELTLNNIVEGGHSSKNLKNFISWAE

SEQ ID NO: 54670 - protein, 422 aa, Glycine max
  peptide (1)..(422): Ceres Seq. ID no. 15172327
MQLSQVLARHGCKITFLNTEFNHKGANTAAGVGIDNAHIKFVTLPDGLVPEDDRSDHKKVIFSIKSHMPPMLPKLIQDIDALDANNNITCIVVTVNMGWALEVGHKLGIKGALLWPASATSLATCDCIPWLIHDGIIDSDGNPIKKQEIQLSTNLPMMDTENLPWCSLGKMLFHHIAQEMQTIKLGDWWLCNTTYDLESAAFSISRRFLPIGPLIASDSNKSSLWQGDTTFLDWLDQQPPQSVIYVAFGSLAVIDHNQLKELALGLNFLDKPFLWVVRPSNDNEANNACSDEFHGSKGRIVSWAPQKKILNHPAIACFISHCGWNSTIEGVCGGVPFLCWPLAKDQFVNKSYICDVWKVGLGLDKAENGLISKGEIRKKVEQLLGDEGIKARSLKLKELTLNNIVEGGHSSKNLKNFISWAE

SEQ ID NO: 54671 - protein, 355 aa, Glycine max
  peptide (1)..(355): Ceres Seq. ID no. 15172328
MPPMLPKLIQDIDALDANNNITCIVVTVNMGWALEVGHKLGIKGALLWPASATSLATCDCIPWLIHDGIIDSDGNPIKKQEIQLSTNLPMMDTENLPWCSLGKMLFHHIAQEMQTIKLGDWWLCNTTYDLESAAFSISRRFLPIGPLIASDSNKSSLWQGDTTFLDWLDQQPPQSVIYVAFGSLAVIDHNQLKELALGLNFLDKPFLWVVRPSNDNEANNACSDEFHGSKGRIVSWAPQKKILNHPAIACFISHCGWNSTIEGVCGGVPFLCWPLAKDQFVNKSYICDVWKVGLGLDKAENGLISKGEIRKKVEQLLGDEGIKARSLKLKELTLNNIVEGGHSSKNLKNFISWAE

SEQ ID NO: 54672 - DNA, 1220 bp, Glycine max
  misc_feature (1)..(1220): Ceres Seq. ID no. 14307041
aaaaacataagaatgcattcaacgcgttgagttgttgtctggaagagcttatgctgtttgttcgcaattcgcatggaaccatcagtttcagctccaccaaaaccttgggagaaagcagcatcatcatctgggccagcaccttttaaacccccatcagcaggtagcacaagtgatgtagttgaggcttcagggactgcaaaacctggcgaaatagttccagcttccgataagactgcaactgtcaataggaatgctcttgggagaccccttcccacaaggccatgggagcagaataatggaagtaccagctatggaggttatggttccacaatgaattataattctggatatggatcttatggtggagtgggagggttgtatggcggaggaatgtatggcagcagtatgtacaggggaggatatgggggcctctatggttcctctgggatgtatggagggggaatgtataatggtggctttggtggtccaatgggtggttatggtatgggtggtggtggtccttatggagctgaagatcccaataatccgtacggagttccttcatcgcccccaggattttggatttcttttatgcgtgtgatgcaaggtgtggttaacttttttggccggatttcaatgctcatagaccagaacacgcaggctttccatatgttcatgactgcacttcttcagctttttgatcgttctggtgtactgtatggagagctagctagatttgtgttgcggttgcttggaatcagaactaaaccaaagaagattaaccctccaggtccagatggacttccactacctgggcaacacaattcctctgtaaatcagaacttcattgagggaacaaagcctgctccaagtggttcttgggacaatgtatgggaaaatgacgccaaaaaatgatgatgcaaatttgttttgctgatagagcaagtccaaatacaaaccaaggaattgaggaacagatgaagcaatacaagtgaatatactgaagctgtgaaatcgatgcttaatctggaagtttaagttcattattgctttgcttagattgctctgataagagagaacaaactagcaatacagttgccttctaagcatttgttctgaatcttgtaggatgctatttgtatagatagttgtattactttgtatttcaaatgtttcttaatcttttgggggcgacaaattgaaagaagtaaattgagtgg

SEQ ID NO: 54673 - protein, 280 aa, Glycine max
  peptide (1)..(280): Ceres Seq. ID no. 14307042
MEPSVSAPPKPWEKAASSSGPAPFKPPSAGSTSDVVEASGTAKPGEIVPASDKTATVNRNALGRPLPTRPWEQNNGSTSYGGYGSTMNYNSGYGSYGGVGGLYGGGMYGSSMYRGGYGGLYGSSGMYGGGMYNGGFGGPMGGYGMGGGGPYGAEDPNNPYGVPSSPPGFWISFMRVMQGVVNFFGRISMLIDQNTQAFHMFMTALLQLFDRSGVLYGELARFVLRLLGIRTKPKKINPPGPDGLPLPGQHNSSVNQNFIEGTKPAPSGSWDNVWENDAKK

SEQ ID NO: 54674 - protein, 194 aa, Glycine max
  peptide (1)..(194): Ceres Seq. ID no. 14307043
MNYNSGYGSYGGVGGLYGGGMYGSSMYRGGYGGLYGSSGMYGGGMYNGGFGGPMGGYGMGGGGPYGAEDPNNPYGVPSSPPGFWISFMRVMQGVVNFFGRISMLIDQNTQAFHMFMTALLQLFDRSGVLYGELARFVLRLLGIRTKPKKINPPGPDGLPLPGQHNSSVNQNFIEGTKPAPSGSWDNVWENDAKK

SEQ ID NO: 54675 - protein, 174 aa, Glycine max
  peptide (1)..(174): Ceres Seq. ID no. 14307044
MYGSSMYRGGYGGLYGSSGMYGGGMYNGGFGGPMGGYGMGGGGPYGAEDPNNPYGVPSSPPGFWISFMRVMQGVVNFFGRISMLIDQNTQAFHMFMTALLQLFDRSGVLYGELARFVLRLLGIRTKPKKINPPGPDGLPLPGQHNSSVNQNFIEGTKPAPSGSWDNVWENDAKK

SEQ ID NO: 54676 - DNA, 1264 bp, Glycine max
  misc_feature (1)..(1264): Ceres Seq. ID no. 14313159
agtagttttaggcacatagggtttggactttggaaaggcttattctccgctctcgtctgaaacctgaaaccctttgttcttcgtcggcggaagcatgtcatcgtcatcatcaagcaacgcctacgacgtgccatgggtagaaaagtaccgtcccagcaaggtcgccgacatcgtcggcaacgaggacgccgtctccaggctccaagtcatcgctcgcgacggcaacatgcccaatctcattttatccggtcctcccggaaccggcaaaaccactagcattctcgccctcgcgcacgagcttctcggaggaccaaattgcaaggaagctgttctcgaactaaacgcttcggatgatagaggaattgatgttgtgaggaacaagatcaagatgtttgctcagaagaaagtcacactgaccccggggaggcacaagatagtgatactggatgaagctgatagcatgaccacaggggcacaacaagcattgagaaggacgatggagatatattcaaacaccactcggtttgcccttgcttgcaatacctcagctaagattattgagcccattcagagtagatgtgccattgtgcgattttcacggttgtctgatcaagagatacttggtcgtctcatggttgtggttcaagctgagaaggttccctatgttcctgaaggacttgaagccatcattttcacagctgacggtgatatgagacaggcattgaataacttgcaagcaacatacagtgggttccaatttgttaaccaagcaaatgttttcaaggtttgtgaccagccacatccactgcatgtgaagaatatggtgcgtaatgtgattgaagggaattttgatgaagcttgttcaggcctcaagcaactgtacgacttgggatattcccccacagatatcatcacgacactctttcgtataataaaaaattatgatatggccgagtacctgaaattggaattcatgaaggaaactggttttgctcatatgagaatttgtgatggagttggttcttatcttcagttgtgtggtctattggctaagctttctctagttcgtgagacagctaaagctgtatgagctggtcctaagtgcaactgagatgtcattatttttaagttttccgatagtgaaatgttctgctgatgtagccttatattttttatgtccagatgctaactgatacatcaatatttcggcttctataaatatgttgtgttttagcttggatcaataactcccacttttgaaaat

SEQ ID NO: 54677 - protein, 331 aa, Glycine max
  peptide (1)..(331): Ceres Seq. ID no. 14313160
MSSSSSSNAYDVPWVEKYRPSKVADIVGNEDAVSRLQVIARDGNMPNLILSGPPGTGKTTSILALAHELLGGPNCKEAVLELNASDDRGIDVVRNKIKMFAQKKVTLTPGRHKIVILDEADSMTTGAQQALRRTMEIYSNTTRFALACNTSAKIIEPIQSRCAIVRFSRLSDQEILGRLMVVVQAEKVPYVPEGLEAIIFTADGDMRQALNNLQATYSGFQFVNQANVFKVCDQPHPLHVKNMVRNVIEGNFDEACSGLKQLYDLGYSPTDIITTLFRIIKNYDMAEYLKLEFMKETGFAHMRICDGVGSYLQLCGLLAKLSLVRETAKAV

SEQ ID NO: 54678 - protein, 287 aa, Glycine max
  peptide (1)..(287): Ceres Seq. ID no. 14313161
MPNLILSGPPGTGKTTSILALAHELLGGPNCKEAVLELNASDDRGIDVVRNKIKMFAQKKVTLTPGRHKIVILDEADSMTTGAQQALRRTMEIYSNTTRFALACNTSAKIIEPIQSRCAIVRFSRLSDQEILGRLMVVVQAEKVPYVPEGLEAIIFTADGDMRQALNNLQATYSGFQFVNQANVFKVCDQPHPLHVKNMVRNVIEGNFDEACSGLKQLYDLGYSPTDIITTLFRIIKNYDMAEYLKLEFMKETGFAHMRICDGVGSYLQLCGLLAKLSLVRETAKAV

SEQ ID NO: 54679 - protein, 233 aa, Glycine max
  peptide (1)..(233): Ceres Seq. ID no. 14313162
MFAQKKVTLTPGRHKIVILDEADSMTTGAQQALRRTMEIYSNTTRFALACNTSAKIIEPIQSRCAIVRFSRLSDQEILGRLMVVVQAEKVPYVPEGLEAIIFTADGDMRQALNNLQATYSGFQFVNQANVFKVCDQPHPLHVKNMVRNVIEGNFDEACSGLKQLYDLGYSPTDIITTLFRIIKNYDMAEYLKLEFMKETGFAHMRICDGVGSYLQLCGLLAKLSLVRETAKAV

SEQ ID NO: 54680 - DNA, 1374 bp, Glycine max
  misc_feature (1)..(1374): Ceres Seq. ID no. 15226103
gcagctacgtaggcccccccccatgtgtgttgagcgttcccctgatgaaataaggccctggtgcaaggtttcttgagatattttcagctgaaacagttgctaaactttctacttgcatctccaatactgtctctggcacttcgctcagagttgtccattatgctaagtcaaggcctcagaactttttctctctgggttttttaactcctatggaagaagagagccgtggagttgtgtttttatcagatgaactctcaaggtccaaagaagctggaagtgtggaaaaatcctctgtttgattagaagaacactccaatcttaggaggagcaagaatgtgagcaagggagacattgctaatgttcccatggaatctgagccagcagcaatttggccgggatacttgtctgcttctgttctcccattcgtgctacacttgggattcatggtgtcaactcgtttcttgtctgccagccctcctctttattggtttgcttcatatataatggcgaatctttattggtttgcttcatatataatggcgaatcctgcaaaatactttagatggggatacgtgatatgggcatactctatggcatacatttttcttggcagtctgctgttttcaaacttctaccctttcacctaacgagaagaaaggtagatggttcttgaaagctgttagtctttttatttcatgcaaatgcaatgcacaaaggcatatagctatcatgaagtgttcaccacaaaaaaaaataaaaaaaaaccaggatttagcgtcggttatatatgacacttttctggcggttcaaaccaggatttaacgttgctgctgaatttcatatttatgttggcttcttcagtgcttttgcccatttggtggttgctgtttgatcttaaacgcctgtgatttactagtagtggagaaaatgcccccttccctctctcaaattagcacgttttgttttggtcagtgtgtattcagtataatatctagatgagtaaactaatagaattcctttttcctttgttgtaattttcttttttgactattatttttctttttattcgatgatagcttttgttgaagtccaataccactttattttcaatgagtggcaaagtgatctatcttagaaacatggtcatagatgaaaaaaaaaaaaaaaaaaaaaaaaaaaaaaaaaaaaaaaaaaaaaaaaaaaaaaaaaaaaaaaaggaaaaaaaaaaaaaaaaargatttcctgcaccccggggaatccacwakttcaaaaggggccgccmccgcggrggagccccagtttttgttcccttaagggaagggtaaatttcaagtttggcgaaacaagggccaaaattgtttcctggggaaaatt

SEQ ID NO: 54681 - protein, 93 aa, Glycine max
  peptide (1)..(93): Ceres Seq. ID no. 15226104
MESEPAAIWPGYLSASVLPFVLHLGFMVSTRFLSASPPLYWFASYIMANLYWFASYIMANPAKYFRWGYVIWAYSMAYIFLGSLLFSNFYPFT

SEQ ID NO: 54682 - protein, 71 aa, Glycine max
  peptide (1)..(71): Ceres Seq. ID no. 15226105
  misc_feature (43)..(43): Xaa is any aa, unknown or other
  misc_feature (52)..(52): Xaa is any aa, unknown or other
  misc_feature (58)..(58): Xaa is any aa, unknown or other
  misc_feature (60)..(60): Xaa is any aa, unknown or other
MSGKVIYLRNMVIDEKKKKKKKKKKKKKKKKKKKKKEKKKKKXFPAPRGIHXFKRGRXRXGAPVFVPLREG

SEQ ID NO: 54683 - protein, 67 aa, Glycine max
  peptide (1)..(67): Ceres Seq. ID no. 15226106
MVSTRFLSASPPLYWFASYIMANLYWFASYIMANPAKYFRWGYVIWAYSMAYIFLGSLLFSNFYPFT

SEQ ID NO: 54684 - DNA, 517 bp, Glycine max
  misc_feature (1)..(517): Ceres Seq. ID no. 15225715
ccctcgagtcagctacgtaggcccccccccattttttttctgggaaaaactgcaggtttatgcctttcctgatcttatctggacaactttgtcctccaggaattgaagggactttatttgcacttttcatgtcaataaacaacttgggatccacagtggggtcttttgtgggtgctggcttggcttctatattgaacattgattcaggatcatttgacaatcttctcttgggcatcattgttcatgccttgtgcaatttcatcccaattgcttttctgtttctgataccaaaggaagctacaggttcttcaacatagattatgactactacacagggattggctttgcttcattaggttcttctaggcctaccatagttgtaattttacacttgtagatgggaatattttggagcaaatgaggaacatattaatctgatttatgcgaactcggatcatagtaattgtatatactattttactgacaattttggtcagcaagtctattttcttgcatg

SEQ ID NO: 54685 - protein, 85 aa, Glycine max
  peptide (1)..(85): Ceres Seq. ID no. 15225716
MPFLILSGQLCPPGIEGTLFALFMSINNLGSTVGSFVGAGLASILNIDSGSFDNLLLGIIVHALCNFIPIAFLFLIPKEATGSST

SEQ ID NO: 54686 - protein, 62 aa, Glycine max
  peptide (1)..(62): Ceres Seq. ID no. 15225717
MSINNLGSTVGSFVGAGLASILNIDSGSFDNLLLGIIVHALCNFIPIAFLFLIPKEATGSST

SEQ ID NO: 54687 - DNA, 1897 bp, Glycine max
  misc_feature (1)..(1897): Ceres Seq. ID no. 14307510
gattacatattgaaaagtcaatctaacaagtactccaccctaaaggaaaagctttctagttgcttgtcatctaatatggttcgcagatggtttgtttttgaatggttttatagtgcaattgattatccatggtttgccaaaagggaattcatggagtacttaaatcatgttggactagggaatatcccaaggttaactcgtgtcgagtggagtgtcataaaaagttcccttggcaaaccccgcaggttttctgaacactttctatgtgaagaaaggcaaaaacttgaacagtatcgggaatcagtgaggaaacattacactgaactgcggactggtattagggatggacttccaacagatttagccaaaccattatatgttggacaacatgtaattgctcttcatccaaaaacaagagagattcatgatggtagtgtgcttaccgttgactatgacaagtgcaggattcagtttgaccgtcctgaattaggtgttgaatttgtaatggacattgattgcatgcctttgaattcatcagataatatgccagaagctctgaggaggcatattggttccccaatatcctctttcatgaataaagagccacaaattagtggaaattcaaattttggggggtgcgaaatgaatcattcctcacccgtgaaggcaaaggttgctaccgttgataatctctgtgcacaagcaggttgtgctcaaccatgtaaagtaacacaccatcaagctaaggaagctgacatacaggcagtttctgaactaaagcatgctctagataaaaaggagacattgttgatggagcttcgaagtgcaaatagcgacatattggaaaacaaaaatggcatagactgcttaaaagattctgaggttttcaagaagcattatgcgacggtttctgatgctatgctacaactgaggcaacgcaatacttacagaggaaactctctgccatcctggatgaagccacaagcaagtttcaatgttcatgatgatcttcccagtatgttggatagttctctgacacaagagttagggtcaactgttgttcaagttattaaaggatccaggctaagggcacatgcaatggtagatgctgcatttcaggcattgtctttggcaaaggaaggtgaagatgctttcataaagattgggcaagcattggattctataaatcatcagcagttagcctcccagtctaggttacccgtgatcaggtctcaagagcaagtgaacgcgaatggcagtttttatcatcttaatcattcaactagcggtgtatcagaacctatacttaatgatccatcgcttccaaaaccacataattgttctgacaaatttgatactgaacttccatcagatcttatcacttcgtgtgttgctacattaatcatgattcagacttgtactgaacggcaataccctccagctgatgtggctcagatattagattctgccgttaccagtctgcatccatgctgttctcaaaaccttcctatttatagagaaattcaaatgtgcatgggaagaatcaaaacgcagatgttagctctcatccctacttgacttacatcttttcttctgcagatctctctctaatgtagctgctgctgtacatatgatgctgaagctgaactattagttcagaacttcagatcacatacgggctcgtcgcctaccttgtaatgtctttattgagaggtacaataatttatttcttttactccacaccgatagggtcaaacggtggtattagaaatcatgtaattcactaccgtgtctttttttatctttggtgtcaaatggtggtacttaataaaaatgattatttaatattttgatgattcaaaaattaataaaaagcactaaaggttattttttgttt

SEQ ID NO: 54688 - protein, 525 aa, Glycine max
  peptide (1)..(525): Ceres Seq. ID no. 14307511
DYILKSQSNKYSTLKEKLSSCLSSNMVRRWFVFEWFYSAIDYPWFAKREFMEYLNHVGLGNIPRLTRVEWSVIKSSLGKPRRFSEHFLCEERQKLEQYRESVRKHYTELRTGIRDGLPTDLAKPLYVGQHVIALHPKTREIHDGSVLTVDYDKCRIQFDRPELGVEFVMDIDCMPLNSSDNMPEALRRHIGSPISSFMNKEPQISGNSNFGGCEMNHSSPVKAKVATVDNLCAQAGCAQPCKVTHHQAKEADIQAVSELKHALDKKETLLMELRSANSDILENKNGIDCLKDSEVFKKHYATVSDAMLQLRQRNTYRGNSLPSWMKPQASFNVHDDLPSMLDSSLTQELGSTVVQVIKGSRLRAHAMVDAAFQALSLAKEGEDAFIKIGQALDSINHQQLASQSRLPVIRSQEQVNANGSFYHLNHSTSGVSEPILNDPSLPKPHNCSDKFDTELPSDLITSCVATLIMIQTCTERQYPPADVAQILDSAVTSLHPCCSQNLPIYREIQMCMGRIKTQMLALIPT

SEQ ID NO: 54689 - protein, 500 aa, Glycine max
  peptide (1)..(500): Ceres Seq. ID no. 14307512
MVRRWFVFEWFYSAIDYPWFAKREFMEYLNHVGLGNIPRLTRVEWSVIKSSLGKPRRFSEHFLCEERQKLEQYRESVRKHYTELRTGIRDGLPTDLAKPLYVGQHVIALHPKTREIHDGSVLTVDYDKCRIQFDRPELGVEFVMDIDCMPLNSSDNMPEALRRHIGSPISSFMNKEPQISGNSNFGGCEMNHSSPVKAKVATVDNLCAQAGCAQPCKVTHHQAKEADIQAVSELKHALDKKETLLMELRSANSDILENKNGIDCLKDSEVFKKHYATVSDAMLQLRQRNTYRGNSLPSWMKPQASFNVHDDLPSMLDSSLTQELGSTVVQVIKGSRLRAHAMVDAAFQALSLAKEGEDAFIKIGQALDSINHQQLASQSRLPVIRSQEQVNANGSFYHLNHSTSGVSEPILNDPSLPKPHNCSDKFDTELPSDLITSCVATLIMIQTCTERQYPPADVAQILDSAVTSLHPCCSQNLPIYREIQMCMGRIKTQMLALIPT

SEQ ID NO: 54690 - protein, 475 aa, Glycine max
  peptide (1)..(475): Ceres Seq. ID no. 14307513
MEYLNHVGLGNIPRLTRVEWSVIKSSLGKPRRFSEHFLCEERQKLEQYRESVRKHYTELRTGIRDGLPTDLAKPLYVGQHVIALHPKTREIHDGSVLTVDYDKCRIQFDRPELGVEFVMDIDCMPLNSSDNMPEALRRHIGSPISSFMNKEPQISGNSNFGGCEMNHSSPVKAKVATVDNLCAQAGCAQPCKVTHHQAKEADIQAVSELKHALDKKETLLMELRSANSDILENKNGIDCLKDSEVFKKHYATVSDAMLQLRQRNTYRGNSLPSWMKPQASFNVHDDLPSMLDSSLTQELGSTVVQVIKGSRLRAHAMVDAAFQALSLAKEGEDAFIKIGQALDSINHQQLASQSRLPVIRSQEQVNANGSFYHLNHSTSGVSEPILNDPSLPKPHNCSDKFDTELPSDLITSCVATLIMIQTCTERQYPPADVAQILDSAVTSLHPCCSQNLPIYREIQMCMGRIKTQMLALIPT

SEQ ID NO: 54691 - DNA, 1674 bp, Glycine max
  misc_feature (1)..(1674): Ceres Seq. ID no. 15227226
cagctaagtaggccccccccccccgaagactcgctacatcttctttccaaatcccaactactactcacactcactgcagatctcaatccatggctaccattgttagcatcaaggcccgccagatctttgacagtcgtggcaatccaaccgtcgaggtggatttgacatgctccgatggtacttttgctagagctgctgttccaagtggtgcatccactgggatttatgaggcccttgaattgagagatggaggatctgactaccttggaaagggtgtatcaaaggctgttgacaatgtgaacaccattattgcccctgctttggttggcaaggacccaactcagcagactgctattgacaacttaatggttcaacaacttgatggaactgttaacgaatggggttggtgcaagcaaaagcttggagcaaatgccatattggcagtgtctcttgcagtctgcaaagctggtgctgctgtcctgaaagttcctctttacaagcatattgcaaatattgcgggtaacaaaaagttggttttgcctgttcctgctttcaatgtcattaatggtggatcacatgctggaaacaaacttgctatgcaggagtttatggttcttcccgtgggagcttcctctttcaaggaagccatgaagatgggtgtagaagtatatcacaatttgaagtctgtgattaagaagaaatatggtcaagatgcagtaaatgttggtgacgaaggtggctttgcccctaacatccaggaaaacaaggaaggtttggaattgctgaaaactgccattgccaaagctggttacacaggcaaagttgtcattggaatggatgttgcagcttctgaattctacaaggaagataaaacatacgatttgaacttcaaggaagataacaatgatggctcacagaagatctctggagatgctttgaaagatctatacaagtcatttgtgacagagtatccaattgtttcaattgaggatccttttgaccaggatgactgggagcactatgctaagcttactgctgaggttggaaccaatgtacaaattgttggtgatgatctcttggttaccaaccccaagagggttcagaaggcaattgatacaaaagcatgcaatgctcttctccttaaggtcaaccaaattggttctgtgactgagagtattgaagctgtcaggatgtccaaaaaagctggatggggtgtcatggcgagtcacagaagtggagagactgaggataccttcattgctgacctttctgttggtttggcaacgggtcaaattaagactggagctccatgcaggtcagagcgtcttgctaaatataaccagctcttgagaattgaggaggagcttggtgcggaagcagtgtatgctggagctaacttccgtacccctgttgagccctactaaagttttcaagtggaaaaaacctggagatccccacgagtttgagcaatgagatttggatgcgcggttttagttgtgatcaataagtcgatagttagaacaatagtcttggtataaggaccttgccaataattttttagttctgattcacagagctaagacagttccgtcttagactttaaaagttttgatatttagctttaatacttgaagtttacttccaattttatggggtatccccaaaacatttcat

SEQ ID NO: 54692 - protein, 444 aa, Glycine max
  peptide (1)..(444): Ceres Seq. ID no. 15227227
MATIVSIKARQIFDSRGNPTVEVDLTCSDGTFARAAVPSGASTGIYEALELRDGGSDYLGKGVSKAVDNVNTIIAPALVGKDPTQQTAIDNLMVQQLDGTVNEWGWCKQKLGANAILAVSLAVCKAGAAVLKVPLYKHIANIAGNKKLVLPVPAFNVINGGSHAGNKLAMQEFMVLPVGASSFKEAMKMGVEVYHNLKSVIKKKYGQDAVNVGDEGGFAPNIQENKEGLELLKTAIAKAGYTGKVVIGMDVAASEFYKEDKTYDLNFKEDNNDGSQKISGDALKDLYKSFVTEYPIVSIEDPFDQDDWEHYAKLTAEVGTNVQIVGDDLLVTNPKRVQKAIDTKACNALLLKVNQIGSVTESIEAVRMSKKAGWGVMASHRSGETEDTFIADLSVGLATGQIKTGAPCRSERLAKYNQLLRIEEELGAEAVYAGANFRTPVEPY

SEQ ID NO: 54693 - protein, 352 aa, Glycine max
  peptide (1)..(352): Ceres Seq. ID no. 15227228
MVQQLDGTVNEWGWCKQKLGANAILAVSLAVCKAGAAVLKVPLYKHIANIAGNKKLVLPVPAFNVINGGSHAGNKLAMQEFMVLPVGASSFKEAMKMGVEVYHNLKSVIKKKYGQDAVNVGDEGGFAPNIQENKEGLELLKTAIAKAGYTGKVVIGMDVAASEFYKEDKTYDLNFKEDNNDGSQKISGDALKDLYKSFVTEYPIVSIEDPFDQDDWEHYAKLTAEVGTNVQIVGDDLLVTNPKRVQKAIDTKACNALLLKVNQIGSVTESIEAVRMSKKAGWGVMASHRSGETEDTFIADLSVGLATGQIKTGAPCRSERLAKYNQLLRIEEELGAEAVYAGANFRTPVEPY

SEQ ID NO: 54694 - protein, 275 aa, Glycine max
  peptide (1)..(275): Ceres Seq. ID no. 15227229
MQEFMVLPVGASSFKEAMKMGVEVYHNLKSVIKKKYGQDAVNVGDEGGFAPNIQENKEGLELLKTAIAKAGYTGKVVIGMDVAASEFYKEDKTYDLNFKEDNNDGSQKISGDALKDLYKSFVTEYPIVSIEDPFDQDDWEHYAKLTAEVGTNVQIVGDDLLVTNPKRVQKAIDTKACNALLLKVNQIGSVTESIEAVRMSKKAGWGVMASHRSGETEDTFIADLSVGLATGQIKTGAPCRSERLAKYNQLLRIEEELGAEAVYAGANFRTPVEPY

SEQ ID NO: 54695 - DNA, 1409 bp, Glycine max
  misc_feature (1)..(1409): Ceres Seq. ID no. 14310443
aaaaagactctgtgaagtgtgcgtgagaaaggaacagagagaagaaaaagaaaaaagatggaaggagagaaagagaatcccgattgtaacgccactttggtgaactccttctgcgaaatcacttcctcttccaaagaagaagcccttttctttttggagagccacaatttcgacctagacgccgccgtttccactttcctcgacaacgccaacaaccctctcatccctcaaaacgacgacgtcgttgtcgccgcaaacccaaaccccaactccgtttcccctccctccgattctcactccccggacttcaacccttccaggtctccttcgccgtctccgtcgccgactcgcacgccctacgagctccgatcccgcaggtctctcggcaagaaaccctccaccagccgccaaggcaaaattcgcactctcggcgatctcaaacgctcctcccgcgatgatgattccgattccgatcccgatttcgaacccgacgagtactacaccggcggcgaaaagagtgggatgcttgttcgagatcctaccagaggaaacagcaacaacaacaacagtgtggatgatatctttgatcaagcgaggcaggttgctgttgatgcacctccggagaatcctcgaagctcgtcgaggtcgggaagttttagtggcacggcgaggttgctctctggagagagattgccatctgctgctgctgctgctcctgctcctcagcgtgtagaggaagttacccacactgtcactttctggaggaatgggttctctgtcaatgatggtcctctacggaggttggatgatccgcaaaacgcaccgtttctggagagcataaagaagtccgaatgtcccaaagagcttgagccagcagataggaggactgctgtccatgtcaacctcacaaggcgggatgaagactaccctgaaccagtgaagccacgccatcgtgctttccagggtgttggaagaactttaggtagcaccagctccagcaatgatgaacctattcaaacaactggtgcttcaccaagtactgctccattgccaacaatgggtttaattgtagatgaggcacagtcagtgacatcaatccagctgaggttggctgatggcacacgcatggtttctcgcttcaatcaccatcatacaatccgagatgttcgagcattcattgatgcatcaagacccgggggtgtaagaagttaccaactgcagtcaatgggttttcctcccaaacaactcgctaatttggaccagactatagaacaagctggtattgccaactcagttgtcatccaaaagttgtaggttgtttaccagattctattttcagtcgacttgaaattactatttttatgcttaaacattgattgatctacttatattttattagtgaatttgat

SEQ ID NO: 54696 - protein, 418 aa, Glycine max
  peptide (1)..(418): Ceres Seq. ID no. 14310444
MEGEKENPDCNATLVNSFCEITSSSKEEALFFLESHNFDLDAAVSTFLDNANNPLIPQNDDVVVAANPNPNSVSPPSDSHSPDFNPSRSPSPSPSPTRTPYELRSRRSLGKKPSTSRQGKIRTLGDLKRSSRDDDSDSDPDFEPDEYYTGGEKSGMLVRDPTRGNSNNNNSVDDIFDQARQVAVDAPPENPRSSSRSGSFSGTARLLSGERLPSAAAAAPAPQRVEEVTHTVTFWRNGFSVNDGPLRRLDDPQNAPFLESIKKSECPKELEPADRRTAVHVNLTRRDEDYPEPVKPRHRAFQGVGRTLGSTSSSNDEPIQTTGASPSTAPLPTMGLIVDEAQSVTSIQLRLADGTRMVSRFNHHHTIRDVRAFIDASRPGGVRSYQLQSMGFPPKQLANLDQTIEQAGIANSVVIQKL

SEQ ID NO: 54697 - protein, 263 aa, Glycine max
  peptide (1)..(263): Ceres Seq. ID no. 14310445
MLVRDPTRGNSNNNNSVDDIFDQARQVAVDAPPENPRSSSRSGSFSGTARLLSGERLPSAAAAAPAPQRVEEVTHTVTFWRNGFSVNDGPLRRLDDPQNAPFLESIKKSECPKELEPADRRTAVHVNLTRRDEDYPEPVKPRHRAFQGVGRTLGSTSSSNDEPIQTTGASPSTAPLPTMGLIVDEAQSVTSIQLRLADGTRMVSRFNHHHTIRDVRAFIDASRPGGVRSYQLQSMGFPPKQLANLDQTIEQAGIANSVVIQKL

SEQ ID NO: 54698 - DNA, 1352 bp, Glycine max
  misc_feature (1)..(1352): Ceres Seq. ID no. 15176919
gagttagttagtttagttgggtgagggaaagaaaagccacttcaaatttcagccccataccatactcattaaagtccacacacacagagcaacactgcactgtgtggaaacgaaacatggcaagagtggtggcactccaacagaaccaactatctttctctaccttagcttcctctctttctgacttcagtggaaccagacttcaaactcaacttcagttcaagagaaagcaatgccatccaaaagggtctttctacgtctccgcatcgagcaccaagaaaatcctaataatgggaggcaccaggtttattggtgtgtttttgtctaggctccttgtcaaagagggtcaccaggtgactttattcacaagaggtaaagcgcctgtcactcaacagttgccaggtgaatcagacagtgattatgctgatttttcttccaagatcttgcatttgaaaggagacaggaaggacttcgactttgtaaaatccagtctctcagcagagggatttgatgttgtttatgacataaatggacgcgaggcagatgaagttgaacccatactggatgctctgcctaatctggagcagtttatttactgctcttctgccggtgtctatctcaaatctgatctattacctcacgcagagactgatgcagttgatcctaagagcagacacaagggaaagcttgagacagagagtttgctacaagcaaggggtgttaattggacatctataaggccagtctacatctatggacccttgaactacaaccctgttgaagagtggttcttccatagattgaaagcgggacgcccaattcctatccccggctcaggaatacagataacccaacttggtcatgttaaggatttggcaaaagcttttatccaggttcttggtaatgagaaggccagcaaggaagtattcaacatctcgggagataagtatgtcacatttgatggattagcaagagcatgtgctaaggctggtgggttcccagagccagagatcattcactacaaccctaaagattttgattttgggaaaaagaaatcatttccattccgtgaccagcatttctttgcatcagttgagaaagcaaagagcgtgcttggattggaacctgaatttggacttgtagagggtctagcagactcgtacaacctggactttggtagaggaacatatcggaaagaggctgatttctcaacagatgacataattcttggcaagagtcttgttagcgtataaacttttctatttcaattttaagtatttcacttgtatttagaaaagctgttcggatttgctacattatgaagtcgtgaaatattcatgagcttttcgttc

SEQ ID NO: 54699 - protein, 378 aa, Glycine max
  peptide (1)..(378): Ceres Seq. ID no. 15176920
MARVVALQQNQLSFSTLASSLSDFSGTRLQTQLQFKRKQCHPKGSFYVSASSTKKILIMGGTRFIGVFLSRLLVKEGHQVTLFTRGKAPVTQQLPGESDSDYADFSSKILHLKGDRKDFDFVKSSLSAEGFDVVYDINGREADEVEPILDALPNLEQFIYCSSAGVYLKSDLLPHAETDAVDPKSRHKGKLETESLLQARGVNWTSIRPVYIYGPLNYNPVEEWFFHRLKAGRPIPIPGSGIQITQLGHVKDLAKAFIQVLGNEKASKEVFNISGDKYVTFDGLARACAKAGGFPEPEIIHYNPKDFDFGKKKSFPFRDQHFFASVEKAKSVLGLEPEFGLVEGLADSYNLDFGRGTYRKEADFSTDDIILGKSLVSV

SEQ ID NO: 54700 - protein, 320 aa, Glycine max
  peptide (1)..(320): Ceres Seq. ID no. 15176921
MGGTRFIGVFLSRLLVKEGHQVTLFTRGKAPVTQQLPGESDSDYADFSSKILHLKGDRKDFDFVKSSLSAEGFDVVYDINGREADEVEPILDALPNLEQFIYCSSAGVYLKSDLLPHAETDAVDPKSRHKGKLETESLLQARGVNWTSIRPVYIYGPLNYNPVEEWFFHRLKAGRPIPIPGSGIQITQLGHVKDLAKAFIQVLGNEKASKEVFNISGDKYVTFDGLARACAKAGGFPEPEIIHYNPKDFDFGKKKSFPFRDQHFFASVEKAKSVLGLEPEFGLVEGLADSYNLDFGRGTYRKEADFSTDDIILGKSLVSV

SEQ ID NO: 54701 - DNA, 1492 bp, Glycine max
  misc_feature (1)..(1492): Ceres Seq. ID no. 15175931
gatatgtaaacagtaaaccaaactggactgaggcgagaaggagtagagcatagtatggagcacacagtctcaaactcaagcagtgtcgagcagattctgaatcttctctacgcagccggctacgtcgacgccacaaatcccgatgcgccgccgtctcagaaaatcgccgccggcctctcctggtgcatcgccgccataacaggcgacgacaacacacgtgacatcgaggaatcgtttggattagttggatgcccgcaccctctgcgatcctctcacattcaggatcttgataccgatgctctttttcctgtaattcagtggcttgcgtcacacattcggcaaaatcaagaacactgtgtcaatgaggttcatcatgctgaaaataccattgaagtggatgagtgtagaacttcgattcaggcattaagtggcaacttggatgaactgaatcagcggaagatgaatgttgtgaagcaattatatattctacaagagagaatcaataaggagggtgctgattctgcagtacagaagttgctttctttactgacatctttgaagaatcttgaaaagcaggaaaaatactttcagtccaatcgtgatgctaaacactcagaacttcaagatgatattagtgaattagagaggaaaataacaaatgacagtgataatgagaaccttcctgatgaactacatcattcatttggtgaattagttgaaaaagtcaatttgatgaaaaagcaacttgctgctagactgagggatattgtggtattaagacgacagattgatgacctaccgtgccaatcagaagtcatccagtacgaacgccggctctcagaactgtatgcacaaatttaggttcatgaattgttttgatgaaaaagagtttattattaagaaaagaggaaaagttaagttagtgggaggctaatacttttttttgtttatcaaatcatactcactctggttctcacttaacttctaattgttatgcatgtctttggttttgcctatgcacagggaaaacatcgacaaactcgtaaatactatgctacctacaatgctctcttggaaataaaagaattgatgctaaaggaaacatctttattgaattcgatcatttcccagtttcaagaggcctttagtagcactgatggacgtataaaacttgttcattccatggaaggaattgtcaagggaagtcaacagaagctagaaagggttcatgtaggacttcaagaagaagagagaattcgtaatgatctgaaggataggtatgctgcagcaaccggtgagcacaagcactgctattctctgttgaaagcttttcaggcccaatgtgcgaagaattagaggtttcgatgacaagacaactttgaggttgagttgcacaaagtactgtatcgcgtcaaagcgtagaggtttctctgtaactgtagacgatcccagtaagggtggagaattctccaattgaaatttactttaacgt

SEQ ID NO: 54702 - protein, 268 aa, Glycine max
  peptide (1)..(268): Ceres Seq. ID no. 15175932
MEHTVSNSSSVEQILNLLYAAGYVDATNPDAPPSQKIAAGLSWCIAAITGDDNTRDIEESFGLVGCPHPLRSSHIQDLDTDALFPVIQWLASHIRQNQEHCVNEVHHAENTIEVDECRTSIQALSGNLDELNQRKMNVVKQLYILQERINKEGADSAVQKLLSLLTSLKNLEKQEKYFQSNRDAKHSELQDDISELERKITNDSDNENLPDELHHSFGELVEKVNLMKKQLAARLRDIVVLRRQIDDLPCQSEVIQYERRLSELYAQI

SEQ ID NO: 54703 - DNA, 1445 bp, Glycine max
  misc_feature (1)..(1445): Ceres Seq. ID no. 14307702
atatcctctctctctctctctctctctctctgaacaagagcctgcagccagagttagagggaaatcaagcacggctcaatcatcgaatcatagagaacacatacagaagaaggaaaagtggaaccctggaagctgatattgtaggaaggtttgcaagaaaacggattttgttttgagatatatgcatgtgcaagtgcatagggaaattaacaaaaaataagatgacatggtgcaatgactctgacgagaatagggttattgaatcaatcacgccaagaataactattactcctaacactgatgacaaaaagctcacccaagaaattagaaccacagcatgcccctcgtgcggccataacattgcattcaaagataagggtggaatccatgacttgccggggttaccagctggagttaagtttgacccaaatgaccaagaaatattagaacatttggaggcaaaagttgcgtctgatgcatgcaagcttcatcccctaattgatgagttcataccaacgctcgaaggcgagaatgggatctgttatacacacccagaaaaactaccaggagttagcaaagatgggcagatccgccatttctttcacaggccctcaaaagcatacacgactggaacaaggaaaagaagaaaggttcacactgatgatgaaggaattgaaacaagatggcacaaaacgggaaaaactagagcagtttttgcatctggtggtgcagtgaaaggttttaagaaaatactagtactctacaccaactatggaaggcaaaagaagcctgagaaaacttactgggtgatgcatcaataccatcttggcaatactgaagaagagaaagatggagaactagttgtttcaaaagtcttctaccaaacacaacctagacaatgtgttaatcccattatcataaaggacccgtacgaaaaaatgttgaatggtggaagtgtccaagacagcacaaatacatcaataactaaaactactgcaactcttttggattgctacaatgctccttacatagattatgatcatgcccatgcgagtcataatagggaaagttcctcacaactaataattcccagctcggttgttcaggttgatggctcttatattcgctcaacaatggatgcaaagaaagcaagatttgaaagtaacactgggaagagcttctaggtagacaagcagtgacaatgatttacagcatgtcctccatattgtttccattactaattgagtaatagtatttatatgtgaaattagactgaaggaattccaagggttggaaaaatataggtttttccttgaattattgagatcaatatggcgcaggcatgatggactttcccataattgaccctggttgaagttgagagacaagcaagaaggtatatatatttgcggtactgtagtttgattttaattttagggtacatg

SEQ ID NO: 54704 - protein, 332 aa, Glycine max
  peptide (1)..(332): Ceres Seq. ID no. 14307703
MCKCIGKLTKNKMTWCNDSDENRVIESITPRITITPNTDDKKLTQEIRTTACPSCGHNIAFKDKGGIHDLPGLPAGVKFDPNDQEILEHLEAKVASDACKLHPLIDEFIPTLEGENGICYTHPEKLPGVSKDGQIRHFFHRPSKAYTTGTRKRRKVHTDDEGIETRWHKTGKTRAVFASGGAVKGFKKILVLYTNYGRQKKPEKTYWVMHQYHLGNTEEEKDGELVVSKVFYQTQPRQCVNPIIIKDPYEKMLNGGSVQDSTNTSITKTTATLLDCYNAPYIDYDHAHASHNRESSSQLIIPSSVVQVDGSYIRSTMDAKKARFESNTGKSF

SEQ ID NO: 54705 - protein, 320 aa, Glycine max
  peptide (1)..(320): Ceres Seq. ID no. 14307704
MTWCNDSDENRVIESITPRITITPNTDDKKLTQEIRTTACPSCGHNIAFKDKGGIHDLPGLPAGVKFDPNDQEILEHLEAKVASDACKLHPLIDEFIPTLEGENGICYTHPEKLPGVSKDGQIRHFFHRPSKAYTTGTRKRRKVHTDDEGIETRWHKTGKTRAVFASGGAVKGFKKILVLYTNYGRQKKPEKTYWVMHQYHLGNTEEEKDGELVVSKVFYQTQPRQCVNPIIIKDPYEKMLNGGSVQDSTNTSITKTTATLLDCYNAPYIDYDHAHASHNRESSSQLIIPSSVVQVDGSYIRSTMDAKKARFESNTGKSF

SEQ ID NO: 54706 - DNA, 1776 bp, Glycine max
  misc_feature (1)..(1776): Ceres Seq. ID no. 14313155
agaaaaaaaaaaagaaggaaaaaggggctagacggcatgttggactgatttgaccttgaagaaggggtcattcatatgatcccgtgtttgtttgggtctttcttcattcttcaaccaacccattccttcccccacgcgccattctccggccaccgtcgacgacggaacgccgttcaccgcttcatattctcccaaaggcttcggcgaccgcccgtgatggataaagtcttcaacaagctccgcaatttggacgcttacccaaaagtcaatgaagatttttacaaccgcacgctcgccggcggcgttgtcaccgtcgtttccgccgccgtcatgctctttctcttcttttccgagctaagtttatacctctacacagttacggagagtaagcttttggtggatacttcaaggggagataccttgcacatcaattttgatgtcacttttcctgctgttcgatgttcaatactcagcttagatgcaatggatattagtggcgagcagcatcttgacatacgacataatatagtgaagaaaagaattgatgctaatggtaatgtgatagaagagaggaaggatggaattggtgcaccaaagattgagagacccttacagaaacatggtggcagacttggacatgatgaaaagtattgtggttcatgttttggtgcagaagagtcagatgaacactgttgtaattcttgtgaagaagtgcgtgaagcatataggaaaaagggctgggcaatgacaaatatggatttgattgatcagtgtcaaagagagggttatgtgcaaagggtaaaggatgaagaaggtgaaggatgcaatcttcaaggatctcttgaagttaataaagtagcaggaaattttcattttgcaactgggaaaagctttcttcagtctgctatatttctggctgatctgcttgctctacaggataatcattataatattagccatcggatcaacaaattaagttttggtcaccatttccctggattggtaaatcctcttgacggggtaaagtgggtgcaaggacctgctcatggcatgtaccagtatttcataaaggtggtccctacaatatacacagacattagaggccgtgttatccattcaaatcagtattctgtgactgagcatttcaagagttcagagctgggtgttgcagttcctggagttttcttcttttatgacatatctccaatcaaggtcaactttaaagaggaacatattccatttttacatttcctgaccaatatttgtgcaattattggaggtgtatttactgttgcgggaataatagattcatcgatatattatggtcagagaacaatcaagaggaagatggagcttggaaaatttacatgatgtggtcaaattctgcatgagtgctctaatatcctaattgatttgacgtatttggttggctggtgcattgagtatcgtttataatgtggtagcatatgcacataatgccaagggtaagcagagccgtaggttcggttgatgcatgaagtgtattttttggatcatgatttttcctttaatgtgtagcaatttctattaagttgctactttggtgggtttttaatatatggatgaagatgaggaatgcaaagagttgttgggaactttttagatatttttgctgcataatacatgacatggttgattatgcataacatacagttcttgtgttgctgttccccgtgctgtaatctagccaatgttttcattgaacttgaagaatttgaagctgctaagttaggattt

SEQ ID NO: 54707 - protein, 431 aa, Glycine max
  peptide (1)..(431): Ceres Seq. ID no. 14313156
MIPCLFGSFFILQPTHSFPHAPFSGHRRRRNAVHRFIFSQRLRRPPVMDKVFNKLRNLDAYPKVNEDFYNRTLAGGVVTVVSAAVMLFLFFSELSLYLYTVTESKLLVDTSRGDTLHINFDVTFPAVRCSILSLDAMDISGEQHLDIRHNIVKKRIDANGNVIEERKDGIGAPKIERPLQKHGGRLGHDEKYCGSCFGAEESDEHCCNSCEEVREAYRKKGWAMTNMDLIDQCQREGYVQRVKDEEGEGCNLQGSLEVNKVAGNFHFATGKSFLQSAIFLADLLALQDNHYNISHRINKLSFGHHFPGLVNPLDGVKWVQGPAHGMYQYFIKVVPTIYTDIRGRVIHSNQYSVTEHFKSSELGVAVPGVFFFYDISPIKVNFKEEHIPFLHFLTNICAIIGGVFTVAGIIDSSIYYGQRTIKRKMELGKFT

SEQ ID NO: 54708 - protein, 384 aa, Glycine max
  peptide (1)..(384): Ceres Seq. ID no. 14313157
MDKVFNKLRNLDAYPKVNEDFYNRTLAGGVVTVVSAAVMLFLFFSELSLYLYTVTESKLLVDTSRGDTLHINFDVTFPAVRCSILSLDAMDISGEQHLDIRHNIVKKRIDANGNVIEERKDGIGAPKIERPLQKHGGRLGHDEKYCGSCFGAEESDEHCCNSCEEVREAYRKKGWAMTNMDLIDQCQREGYVQRVKDEEGEGCNLQGSLEVNKVAGNFHFATGKSFLQSAIFLADLLALQDNHYNISHRINKLSFGHHFPGLVNPLDGVKWVQGPAHGMYQYFIKVVPTIYTDIRGRVIHSNQYSVTEHFKSSELGVAVPGVFFFYDISPIKVNFKEEHIPFLHFLTNICAIIGGVFTVAGIIDSSIYYGQRTIKRKMELGKFT

SEQ ID NO: 54709 - protein, 346 aa, Glycine max
  peptide (1)..(346): Ceres Seq. ID no. 14313158
MLFLFFSELSLYLYTVTESKLLVDTSRGDTLHINFDVTFPAVRCSILSLDAMDISGEQHLDIRHNIVKKRIDANGNVIEERKDGIGAPKIERPLQKHGGRLGHDEKYCGSCFGAEESDEHCCNSCEEVREAYRKKGWAMTNMDLIDQCQREGYVQRVKDEEGEGCNLQGSLEVNKVAGNFHFATGKSFLQSAIFLADLLALQDNHYNISHRINKLSFGHHFPGLVNPLDGVKWVQGPAHGMYQYFIKVVPTIYTDIRGRVIHSNQYSVTEHFKSSELGVAVPGVFFFYDISPIKVNFKEEHIPFLHFLTNICAIIGGVFTVAGIIDSSIYYGQRTIKRKMELGKFT

SEQ ID NO: 54710 - DNA, 1352 bp, Glycine max
  misc_feature (1)..(1352): Ceres Seq. ID no. 14307728
atcatgtttttaagttttaagcttctctctcttaatttcatcagtagtgtgtgtttgaatgcaaagaagcacatgtgccaatgtgcatttgtgtgtcatgcagtaatgccaggcttatacttgcatatgcttggtaattatattcttgtaattatctagctagttgccacaaaaggtgtgattagatttgtttctagttggactatgaaataggaagaattaacattgagttaaatacaaagattttaatattcataattgttggttatatattcccccaatgaccaaattgttgatctcttgttagttcttgagcttatttcctagcaacttgatcttttgtgtaacttcatttctctccaccagttttaccaatataccaattttaaattataaatatttgtgtaggagcatgccaacctctgctgccctggatgttgttgccaaacatctgaatttgaaattttttgaggtccccacgggttggaagttctttggtaatttaatggatgctggattatgttcagtctgtggtgaagaaagttttgggactggttctgaccatattcgtgagaaagatggaatctgggcagttttggcctggctatctatacttgcatataaaaataaagataaacttgaagacaagcttgtcactgttgaagacatagttcgccagcattgggctacttatgggcgccattattatactcgatatgactatgaaaacgtggatgcaggtgcagcaaaggaactgatggcatatttggtcaagctgcagtcctcactttcagaagtcaatcagattgttaaggggataaggtcagatgtttcgaatgttgtccacggtgatgaatttgagtacaatgatcctgtggatggttccatctcatcacatcagggaatccgatatttgtttgaggatggatcacgattgattttccgcctatctggaactggatcagaaggtgcaacaattcgattatacattgagcaatatgagaaggatccatcaaagattgggagactttcaaacgaagcacttgctcctcttgtggaagttgcgttgaaactttcgaagatggaagaattcactggtcgatccgctccaacagtcattacatgaacacattcaagtggaaggtggttagatcctgaagcttctcccagtcatttcatttcttctttgtccagtatcttacggatagccgaacagtagatttggttgtttgcagcctttgctatgggaaattgagtggaatttgagtttctttatctaaattttgatatgctgaataatttgcaacagccgagtgctaattatatagtcttaatataatggtttctcttgc

SEQ ID NO: 54711 - protein, 237 aa, Glycine max
  peptide (1)..(237): Ceres Seq. ID no. 14307729
MPTSAALDVVAKHLNLKFFEVPTGWKFFGNLMDAGLCSVCGEESFGTGSDHIREKDGIWAVLAWLSILAYKNKDKLEDKLVTVEDIVRQHWATYGRHYYTRYDYENVDAGAAKELMAYLVKLQSSLSEVNQIVKGIRSDVSNVVHGDEFEYNDPVDGSISSHQGIRYLFEDGSRLIFRLSGTGSEGATIRLYIEQYEKDPSKIGRLSNEALAPLVEVALKLSKMEEFTGRSAPTVIT

SEQ ID NO: 54712 - protein, 206 aa, Glycine max
  peptide (1)..(206): Ceres Seq. ID no. 14307730
MDAGLCSVCGEESFGTGSDHIREKDGIWAVLAWLSILAYKNKDKLEDKLVTVEDIVRQHWATYGRHYYTRYDYENVDAGAAKELMAYLVKLQSSLSEVNQIVKGIRSDVSNVVHGDEFEYNDPVDGSISSHQGIRYLFEDGSRLIFRLSGTGSEGATIRLYIEQYEKDPSKIGRLSNEALAPLVEVALKLSKMEEFTGRSAPTVIT

SEQ ID NO: 54713 - protein, 122 aa, Glycine max
  peptide (1)..(122): Ceres Seq. ID no. 14307731
MAYLVKLQSSLSEVNQIVKGIRSDVSNVVHGDEFEYNDPVDGSISSHQGIRYLFEDGSRLIFRLSGTGSEGATIRLYIEQYEKDPSKIGRLSNEALAPLVEVALKLSKMEEFTGRSAPTVIT

SEQ ID NO: 54714 - DNA, 1478 bp, Glycine max
  misc_feature (1)..(1478): Ceres Seq. ID no. 15176895
tattcgcacactccctgaggagtgaagagaatctctctcctttttataaacccataaatttagggcgcgctttttcccggcctcccctcgccaccgcatctccatccatctccgccacgtcgcctcctctctctctcgcttttcgtagttatacttcttctctcgttcctagaaatgagcttctcaacatgcgcagagctgtcgcgttgtttcgccgcagcatcggcgaaacctaattccggtcagtcaaacggcacttccacaacaagcctcagttttctcactccaatcggtcgttacggcgccgtttcatcagtatcgaggtcgaataagaccaacagaatagtcgcggaagctactcaaggtcttacttacagggacgccggcgtggacatcgacgccggctccgaactcgtgcgcaggatagcgaagatggcgccagggattgtaggcttcggtggtttattccctctcggtgactcgtacctcgttgctggtaccgatggcgtgggaacgaaggtgatgcttgccttcgaaactggaatccacgatactattgggattgacctggttgcgatgagtgtgaatgacattgttacttcgggggcgaagcctttgtttttccttgattactttgccactgggcaccttgacgtggacgttgctgaaaaggttataaaaggcattgttgatggttgtaagcaatctgattgtgttcttttaggaggagagactgcagagatgcctggtctctataaagaaggtgagtatgatcttagtggctgtgcagttggcattgtgaagaaagattctgtaatcaatgggtcaaacattgttgctggtgatgttattattggtcttccatctagtggagttcactctaatggtttctctcttgtaagaagagtgcttgctcaaagtggtctgtcactgaaagatcaacttcctggcagtgatgttacaattgcagaggcattgatggccccaactgttatctatgttaaacaggtacttgacttagttagtaagggaggggtgaaaggaattgcccacatcaccggtggtggtttcacagataacataccccgagtttttccagaaggccttggagctgtaatatacgacggttcatgggaagtgcctgcagtgtttaagtggcttcaggaggctgggaagatagaagactctgagatgagacggacttttaatatgggcatagggatgatcctggtagttagtccggaggcagctaatagaatactcgagaacagaggcgaaacagagaaattctatcgcattggtgaaattataagcggcaagggagtgacctttagctaattttaattgagtttaatcatgtagtacccttttaatactttcatggaaaatttctgggaatatgagatttgaatggtcagtttatttggagcctaataattttccatacataaatgatgaaatttgcaacaattttgagg

SEQ ID NO: 54715 - protein, 387 aa, Glycine max
  peptide (1)..(387): Ceres Seq. ID no. 15176896
MSFSTCAELSRCFAAASAKPNSGQSNGTSTTSLSFLTPIGRYGAVSSVSRSNKTNRIVAEATQGLTYRDAGVDIDAGSELVRRIAKMAPGIVGFGGLFPLGDSYLVAGTDGVGTKVMLAFETGIHDTIGIDLVAMSVNDIVTSGAKPLFFLDYFATGHLDVDVAEKVIKGIVDGCKQSDCVLLGGETAEMPGLYKEGEYDLSGCAVGIVKKDSVINGSNIVAGDVIIGLPSSGVHSNGFSLVRRVLAQSGLSLKDQLPGSDVTIAEALMAPTVIYVKQVLDLVSKGGVKGIAHITGGGFTDNIPRVFPEGLGAVIYDGSWEVPAVFKWLQEAGKIEDSEMRRTFNMGIGMILVVSPEAANRILENRGETEKFYRIGEIISGKGVTFS

SEQ ID NO: 54716 - protein, 301 aa, Glycine max
  peptide (1)..(301): Ceres Seq. ID no. 15176897
MAPGIVGFGGLFPLGDSYLVAGTDGVGTKVMLAFETGIHDTIGIDLVAMSVNDIVTSGAKPLFFLDYFATGHLDVDVAEKVIKGIVDGCKQSDCVLLGGETAEMPGLYKEGEYDLSGCAVGIVKKDSVINGSNIVAGDVIIGLPSSGVHSNGFSLVRRVLAQSGLSLKDQLPGSDVTIAEALMAPTVIYVKQVLDLVSKGGVKGIAHITGGGFTDNIPRVFPEGLGAVIYDGSWEVPAVFKWLQEAGKIEDSEMRRTFNMGIGMILVVSPEAANRILENRGETEKFYRIGEIISGKGVTFS

SEQ ID NO: 54717 - protein, 271 aa, Glycine max
  peptide (1)..(271): Ceres Seq. ID no. 15176898
MLAFETGIHDTIGIDLVAMSVNDIVTSGAKPLFFLDYFATGHLDVDVAEKVIKGIVDGCKQSDCVLLGGETAEMPGLYKEGEYDLSGCAVGIVKKDSVINGSNIVAGDVIIGLPSSGVHSNGFSLVRRVLAQSGLSLKDQLPGSDVTIAEALMAPTVIYVKQVLDLVSKGGVKGIAHITGGGFTDNIPRVFPEGLGAVIYDGSWEVPAVFKWLQEAGKIEDSEMRRTFNMGIGMILVVSPEAANRILENRGETEKFYRIGEIISGKGVTFS

SEQ ID NO: 54718 - DNA, 1572 bp, Glycine max
  misc_feature (1)..(1572): Ceres Seq. ID no. 15175651
gaacaatatggcccaaaacggcgacactgaggcccaaagcccatcaacccccgaggcccggcccgtcggcggcaccgagttcagctggtgcaaggctgttcccatcggcactggcgtaacggttctgagcctcctcctctcaaaaccgccgcaaatcgctgttgtccaaaatgccctccacaaactccaaaattcccaccctattctccgctccaagatccatctcgatccctccaacaacactttccacttcctcacccctcccactcccaccgtccaaatccaccccttcgatctcgcttcaacggctcacatcatccaatgccaatccgacggccacgatcccttccacgtgctcctcgagcacgagatgaaccaggaggacacgtggcgcaattacgccgccgacgtcgacgtactccacgccgccgtgtatagcatcagccacgaccgcttcgccgtgttcctccgcctccacaccgcttcgtgcgaccgcgcctccgccgtggcgctgctcaacgagctcctccgcttcgtcgccggcggcgacgaggcgagcggggagaaggtaaattctccgatcgaggatctgattcctgaggggaagacgaacaagccgttctgggcgcgtggactggacgtgctcgggtacacgctcaacgcgttcaggttcgcgaatttgagtttcgtcgacgctggctcgccccggagttcgaggataataaggttgcaactgaacgtagctgaaaccgagaacttattagctggatgcaaatcaagagggatcaaactttgtggggcacttgctgcagctggaatgattgctgcatggacctctagatgccttcctgattatcaaagagaaaagtatgctgtagtaacacttgttgattgccgctcacttcttgatccagtccttcccagcaaccatgctggattttaccattctgccgtcctgaacacacatgacgtgtgtggggaaacagaaaccttatgggagttggcaaagaaaagctacacagcctttgtaaatgctatgaactgcaacaagcatttcacagacatgtctgacctgaactacctcatgtgcaaggctattgagaaccccggtttgacgccatcgtcatcacttaggacagccttgatctctgtgtttgaagatcctgtcttcgacgactcggccgaaatgcatggagagattggattggaagactatgtaggttgtgcttctgctcatggtgttggtccatccattgccgtattcgacaccatacggaatggaaagttggattgtgcttgtatatatccatcaccccttcattcaagagagcagattcaaggactagttgatcatatgaagagaatacttgtggaaggttgtaacagtgaaaatcaacaaattgaaccataatccgcttctgaggctgggcaattggttataatttcataatcaaattcataaacttcgttgcctcttcaatttcagtctgtgactctgtgattctccttgctctgttgaatttcccagggccaggtattttaatatgaaggtagaaataaatatattgcatg

SEQ ID NO: 54719 - protein, 469 aa, Glycine max
  peptide (1)..(469): Ceres Seq. ID no. 15175652
NNMAQNGDTEAQSPSTPEARPVGGTEFSWCKAVPIGTGVTVLSLLLSKPPQIAVVQNALHKLQNSHPILRSKIHLDPSNNTFHFLTPPTPTVQIHPFDLASTAHIIQCQSDGHDPFHVLLEHEMNQEDTWRNYAADVDVLHAAVYSISHDRFAVFLRLHTASCDRASAVALLNELLRFVAGGDEASGEKVNSPIEDLIPEGKTNKPFWARGLDVLGYTLNAFRFANLSFVDAGSPRSSRIIRLQLNVAETENLLAGCKSRGIKLCGALAAAGMIAAWTSRCLPDYQREKYAVVTLVDCRSLLDPVLPSNHAGFYHSAVLNTHDVCGETETLWELAKKSYTAFVNAMNCNKHFTDMSDLNYLMCKAIENPGLTPSSSLRTALISVFEDPVFDDSAEMHGEIGLEDYVGCASAHGVGPSIAVFDTIRNGKLDCACIYPSPLHSREQIQGLVDHMKRILVEGCNSENQQIEP

SEQ ID NO: 54720 - protein, 467 aa, Glycine max
  peptide (1)..(467): Ceres Seq. ID no. 15175653
MAQNGDTEAQSPSTPEARPVGGTEFSWCKAVPIGTGVTVLSLLLSKPPQIAVVQNALHKLQNSHPILRSKIHLDPSNNTFHFLTPPTPTVQIHPFDLASTAHIIQCQSDGHDPFHVLLEHEMNQEDTWRNYAADVDVLHAAVYSISHDRFAVFLRLHTASCDRASAVALLNELLRFVAGGDEASGEKVNSPIEDLIPEGKTNKPFWARGLDVLGYTLNAFRFANLSFVDAGSPRSSRIIRLQLNVAETENLLAGCKSRGIKLCGALAAAGMIAAWTSRCLPDYQREKYAVVTLVDCRSLLDPVLPSNHAGFYHSAVLNTHDVCGETETLWELAKKSYTAFVNAMNCNKHFTDMSDLNYLMCKAIENPGLTPSSSLRTALISVFEDPVFDDSAEMHGEIGLEDYVGCASAHGVGPSIAVFDTIRNGKLDCACIYPSPLHSREQIQGLVDHMKRILVEGCNSENQQIEP

SEQ ID NO: 54721 - protein, 346 aa, Glycine max
  peptide (1)..(346): Ceres Seq. ID no. 15175654
MNQEDTWRNYAADVDVLHAAVYSISHDRFAVFLRLHTASCDRASAVALLNELLRFVAGGDEASGEKVNSPIEDLIPEGKTNKPFWARGLDVLGYTLNAFRFANLSFVDAGSPRSSRIIRLQLNVAETENLLAGCKSRGIKLCGALAAAGMIAAWTSRCLPDYQREKYAVVTLVDCRSLLDPVLPSNHAGFYHSAVLNTHDVCGETETLWELAKKSYTAFVNAMNCNKHFTDMSDLNYLMCKAIENPGLTPSSSLRTALISVFEDPVFDDSAEMHGEIGLEDYVGCASAHGVGPSIAVFDTIRNGKLDCACIYPSPLHSREQIQGLVDHMKRILVEGCNSENQQIEP

SEQ ID NO: 54722 - DNA, 1250 bp, Glycine max
  misc_feature (1)..(1250): Ceres Seq. ID no. 14307817
agttatctggaaatggtttctgtgtgaaatataaatttgataaaggcagaatataatgatgttttatttcaagatatgtttcacaaaccgacctaaagaagtgcattgtgcagttagtaaattgaattgagttttcaagttgtttaagaattttgtataaatgaggatctattatttaattacacggattgcatatattatggattcaatgcattttaaattttttcccattcatgtcctctgttaacagaagttctatataaaacttttactgtatcactttcagtcatgcagatcttgtattgagtgctaataaaaagataaccattactggtataaacctttcttattcatgttaattttgcagccttcaatacttccaattcagatcctccgaattgggcagcttatcattcttagtgtaccaggagaattcacaacaatggccgggaggcgtcttcgtgatgcagtgaagacagtgctaactagtgaagaatattttgaatttgatgacattcacattgttatagcagggttaactaatacttattcacagtacatcactacatacgaagagtaccaggtgcaaagatatgagggtgcttctacgctatatggtccacacacactcagtgcatacattcaggagtttaagaaacttgcagaggctctcgtctacggcgaaccagtagaacctggtcctcaacctcctgatctcctggagaagcaaataagcttacttccacctgttgtggtggatgcaaccccccttggtgtaaattttggggatgtttgcactgatgtaccacggaactccaccttcaagagtggtgacttggtgacagcttcgttctggtctgcatgtcctcgtaacgaccttatgactgaaggcacctttgcactggtggaatttctccaagaaaaggatgcttggactcctgcttatgatgatgatgatttctgcctgcgctataagtggtcaaggccttccaaactgagttctaggagcaaagcaaccttggaatggaggataccacagagtgtggctcctggtgtgtacagattaagacactttggagctgcaaagggcttatttggatcaattcatcactttacaggttcatccactgcgtttgtagtagcctaaagggaggcatgttgtttcagccgttactatatttgtgatttgtttttctgaactttagcagaatctattcaatcctaaagaaggatgtttcactatggatcag

SEQ ID NO: 54723 - protein, 264 aa, Glycine max
  peptide (1)..(264): Ceres Seq. ID no. 14307818
MLILQPSILPIQILRIGQLIILSVPGEFTTMAGRRLRDAVKTVLTSEEYFEFDDIHIVIAGLTNTYSQYITTYEEYQVQRYEGASTLYGPHTLSAYIQEFKKLAEALVYGEPVEPGPQPPDLLEKQISLLPPVVVDATPLGVNFGDVCTDVPRNSTFKSGDLVTASFWSACPRNDLMTEGTFALVEFLQEKDAWTPAYDDDDFCLRYKWSRPSKLSSRSKATLEWRIPQSVAPGVYRLRHFGAAKGLFGSIHHFTGSSTAFVVA

SEQ ID NO: 54724 - protein, 234 aa, Glycine max
  peptide (1)..(234): Ceres Seq. ID no. 14307819
MAGRRLRDAVKTVLTSEEYFEFDDIHIVIAGLTNTYSQYITTYEEYQVQRYEGASTLYGPHTLSAYIQEFKKLAEALVYGEPVEPGPQPPDLLEKQISLLPPVVVDATPLGVNFGDVCTDVPRNSTFKSGDLVTASFWSACPRNDLMTEGTFALVEFLQEKDAWTPAYDDDDFCLRYKWSRPSKLSSRSKATLEWRIPQSVAPGVYRLRHFGAAKGLFGSIHHFTGSSTAFVVA

SEQ ID NO: 54725 - DNA, 2311 bp, Glycine max
  misc_feature (1)..(2311): Ceres Seq. ID no. 14313943
aagcgtcgagcctctgttctgttcatttgcatttccatttttcacactctctctgctttcaccatgtggacacttcgtcgagcttctcttcgtctcagtacgagccaaggacttaacgcgggagctacccgtgcttcggctgtcaaattagtgccaatcactgttgaagaaaatgaggctggtatccctcagtctcgtcaaatcactcacagtagatttctgtccgctgacacattttgccgcacgggtcgggtgtccctgaaatttgctgtgggcacgcgtgaactttcctcacaagctggtgctagcagcacgaaagtggatgatgatgatttggagggtgggttgtctgagctggagatacagggaagtaatgatgaatctgatgctgacctgtctgatgaagacgaggatggtggaaaaccagttgatgagatggacttatcagatgctgacccaaccaagaaaaaatcacaaggtagaaggactcaatcggaactattcaaggcaattgcaaatgctcctgggttgtctgttgattctgctctcaataagtgggttgagcatgggaaagaactaagtcggaaggagatcttgttggctgtgcgtgagcttcggagacgtaaaatgtatgggagggctttccagctctttcagtggttagagtcaaacaagaagcttgaatttatggagagtgattatgcttctcaacttgatttgattgccaagttgcgtggcctcccaaaggcagagaaatacattgagagtgttccagaatcttttagaggctagctattataccgaacattactggctaactgtgctagtcagaacaatttgattgcaacagagaaaatattcaacaaaatgaaggacttggatttaccacttacagcatttgcttgtaaccagttgctgcttttgtataagaagctggacaagaagaaaatagctgatgttttactgctgatggaaaaagagaatgtcaaaccttctctttttacttacagaatcttaatagactcaaagggccagtccaatgatattgctggaatggagcaagtgtttgagacaatgaaggaagaaggctttgaaccagacatccaaatacaggcactcttggctaggcattacacctcatctgggcttaaagaaaaagctgaagctatgttgaaggagatggaaggtgaaaacttgaaagagaatcagtgggtatgtgcaactttgctccgcctttatgcaaacctgggaaaggctgatgaagtggagagaatttggaaggtctgtgaatcaaaacctcgagttgaggactgcctggctgcagttgaagcctggggaaagttaaataaaattgaagaagcagaggcagtttttgagatggtgtcaaagaaatggaaacttaattccaagaattactcagttcttctgaagatttatgcaaataataagatgctaacgaagggtaaggaacttgtcaagctaatggctgatagtggggtgaggataggcccattaacatgggatgcacttgtgaaactgtatatccaagctggggaagttgagaaggcagactctattttgcataaggcaatccaacagaatcagctgcagccaatgtttaccacctatttggctattttagagcagtatgcaaagaggggtgacgtccataactcggagaagattttccttaaaatgagacaagcaggttatacgtcccgaataagtcagttccaagttctaatacaggcatatgtaaacgccaaggttccagcgtatggaatcagagagaggattaaagctgataacctatttcccaacaaaacgttggctaaccagttggctctagttgatgcatttaggaaaaatgcagtttccgatttgcttgattgaggcatatttagtattctgcaagggttgtttcctacgctttccatgcaactattattattagttgaatagtagattgcacatttagtttgaatgaatgttgtcttgcactgctatctataagttagatacacttttgccttttaagcgcattatattaatgcttaaatactgcttttatgattttattatgcccgcttgtttttagttgtaaagctttctttttttaaaatttagaggctacaatcttcttcccgataggataacaaaatagtagataaatgttgttttgctccccttccctcttgagtgaaataaaattaatgctttatgtagtatcttagtatctggtcaaaatgaaaagaaaatgtagtatcttttcatcttcaaactaaataaattttactataaagttttcaac

SEQ ID NO: 54726 - protein, 341 aa, Glycine max
  peptide (1)..(341): Ceres Seq. ID no. 14313944
MKDLDLPLTAFACNQLLLLYKKLDKKKIADVLLLMEKENVKPSLFTYRILIDSKGQSNDIAGMEQVFETMKEEGFEPDIQIQALLARHYTSSGLKEKAEAMLKEMEGENLKENQWVCATLLRLYANLGKADEVERIWKVCESKPRVEDCLAAVEAWGKLNKIEEAEAVFEMVSKKWKLNSKNYSVLLKIYANNKMLTKGKELVKLMADSGVRIGPLTWDALVKLYIQAGEVEKADSILHKAIQQNQLQPMFTTYLAILEQYAKRGDVHNSEKIFLKMRQAGYTSRISQFQVLIQAYVNAKVPAYGIRERIKADNLFPNKTLANQLALVDAFRKNAVSDLLD

SEQ ID NO: 54727 - protein, 307 aa, Glycine max
  peptide (1)..(307): Ceres Seq. ID no. 14313945
MEKENVKPSLFTYRILIDSKGQSNDIAGMEQVFETMKEEGFEPDIQIQALLARHYTSSGLKEKAEAMLKEMEGENLKENQWVCATLLRLYANLGKADEVERIWKVCESKPRVEDCLAAVEAWGKLNKIEEAEAVFEMVSKKWKLNSKNYSVLLKIYANNKMLTKGKELVKLMADSGVRIGPLTWDALVKLYIQAGEVEKADSILHKAIQQNQLQPMFTTYLAILEQYAKRGDVHNSEKIFLKMRQAGYTSRISQFQVLIQAYVNAKVPAYGIRERIKADNLFPNKTLANQLALVDAFRKNAVSDLLD

SEQ ID NO: 54728 - protein, 279 aa, Glycine max
  peptide (1)..(279): Ceres Seq. ID no. 14313946
MEQVFETMKEEGFEPDIQIQALLARHYTSSGLKEKAEAMLKEMEGENLKENQWVCATLLRLYANLGKADEVERIWKVCESKPRVEDCLAAVEAWGKLNKIEEAEAVFEMVSKKWKLNSKNYSVLLKIYANNKMLTKGKELVKLMADSGVRIGPLTWDALVKLYIQAGEVEKADSILHKAIQQNQLQPMFTTYLAILEQYAKRGDVHNSEKIFLKMRQAGYTSRISQFQVLIQAYVNAKVPAYGIRERIKADNLFPNKTLANQLALVDAFRKNAVSDLLD

SEQ ID NO: 54729 - DNA, 984 bp, Glycine max
  misc_feature (1)..(984): Ceres Seq. ID no. 12612005
agaccaaacaaaacactgcacctggttaaggatagagtatagcatggcacagtctagttgcaaaactttggtgcagtggttggtagcagcattgctcattgccttgttgggtggtgcacaagctgttgcaatatgtaacatagactcaagtcaattaaacttgtgtcgtgctgcagttactggtcaaaaccctccaccaccggatgagaaatgttgtgcagttgttcgccaagccaatttgcgttgcctctgcagttacaagtctaccctaccttcatttggaataaaccccaaaaatgctttggccttgcctggtaaatgtggtctgcaatggcctcctaattgttgaggtaatcatttgtagcttcaatacactttgaacatattaattactttcaggggtgtttatgaagaagttattaaatggtcctggactaccacttttctttgatatcgattaatctttatgtaacatgtatttaagattttaatttaagagaaaaagaattaataaaacttaattaaacatcttcaataatatatatatatatagactaagttgaacaattcggagcataactcaaactcattttctacatgcattggttctagtttcttaaacccggacctgccaaaagtcctttcaagcagggttgtgttagtgagacaagactcatgtgaacacccctaattacttttgcagttttaattatattaattttacgagataatgtttcatttttacagtgtagtgaagcagtcaatgaaggtcacggactcatggtcattacaagcaccttagtcttcaatattgctttcaggtgtttcattaacactgaagataaattttaagacagcatttgatatctctcgaataacggtgcagtttattttaatcagtatgtaatgtccaaaagtttgctagcagatgtgtacgtgtattagtgttgatgttgcagaggtattgaagatatatcatactct

SEQ ID NO: 54730 - protein, 115 aa, Glycine max
  peptide (1)..(115): Ceres Seq. ID no. 12612006
DQTKHCTWLRIEYSMAQSSCKTLVQWLVAALLIALLGGAQAVAICNIDSSQLNLCRAAVTGQNPPPPDEKCCAVVRQANLRCLCSYKSTLPSFGINPKNALALPGKCGLQWPPNC

SEQ ID NO: 54731 - protein, 101 aa, Glycine max
  peptide (1)..(101): Ceres Seq. ID no. 12612007
MAQSSCKTLVQWLVAALLIALLGGAQAVAICNIDSSQLNLCRAAVTGQNPPPPDEKCCAVVRQANLRCLCSYKSTLPSFGINPKNALALPGKCGLQWPPNC

SEQ ID NO: 54732 - DNA, 1484 bp, Glycine max
  misc_feature (1)..(1484): Ceres Seq. ID no. 14307831
aaattcttaagcgttcacacaagcttttcacatggaaatcggctcccccgcattccttaccctcgaagactattcttccttcttcttccctgacatggatcccattcccaattccaatgtcaacaagcgtcgtgcaaacaacgaccagttcgacttaaatgactccgcattcagccacctcctcaattccatcatggatcctaaccatttccaacaccaatccaaaccaatccaattcgactcctccccgaccaagagagctcgccgtgacctcctcgttctcgaagacagccacctcaaccccgcctcggccccgcaacagcagcgccgtctctgggtcaaggaccgctccaaggactggtggcagcggtgcaacagcccggacttccccgaagaggaattccggcgccacttccgcatgagcaaggccaccttcgacatgatctgccagcacctggactccgccgtcaccaagaagaacaccatgctccgagaagccatcccggtccggcagcgcgtggcggtgtgcatttggcgcctcgccaccggcgaccccctccgcgaagtttcgaagcgcttcggcttgggaatctccacgtgtcacaagctggttctggaggtctgctccgccatcaaaagcgttctgatgcccaagttcctccactggccaaacgaagccgaaatgaaacccatcaccgaaaaattcgagtctctctccggaatccccaacgtgggaggctcaatgtacaccactcacattcccatcattgcaccaaaatccaacgtcaacgcttacttcaacaagcgccacacagaaagaaaccagaagacatgttactctataaccgtccagggcgtggttgatcccaaaggtatttttagcgatgtttgtataggttggcctgggtctctctcagacgatcaagtgttggagaaaagcgcgttgtatcagagagccactatgggaaatttgaaggacgtgtgggtggtgggaaactcgggacaccctctgatggagggtgttttggttccttacactcatcagaatcttacttggacgcagcacgcgtttaatcagaaggttggggagattcagagcattgctaaggacgctttcgccaggctcaaagggaggtggtcttgcttgcagaagaggactgaagtcaagcttgaggacttgcccgtgcttcttggggcctgctgtgttttgcataatatttgtgagatgagggatgaggaaatgaagcctcagtggaactttgacatctttgatgatcagatgctgccccagaataataacgttcgctctaatgcttccgagcaagccagagatcagatagcgcactacttgttgcaccatggccgtgcagggactaattttttctagacttcttgggatatcacactttctcattaattcttttggctatgccttattattatagtcacttgcattataataacattctcatcatctacttctc

SEQ ID NO: 54733 - protein, 451 aa, Glycine max
  peptide (1)..(451): Ceres Seq. ID no. 14307832
MEIGSPAFLTLEDYSSFFFPDMDPIPNSNVNKRRANNDQFDLNDSAFSHLLNSIMDPNHFQHQSKPIQFDSSPTKRARRDLLVLEDSHLNPASAPQQQRRLWVKDRSKDWWQRCNSPDFPEEEFRRHFRMSKATFDMICQHLDSAVTKKNTMLREAIPVRQRVAVCIWRLATGDPLREVSKRFGLGISTCHKLVLEVCSAIKSVLMPKFLHWPNEAEMKPITEKFESLSGIPNVGGSMYTTHIPIIAPKSNVNAYFNKRHTERNQKTCYSITVQGVVDPKGIFSDVCIGWPGSLSDDQVLEKSALYQRATMGNLKDVWVVGNSGHPLMEGVLVPYTHQNLTWTQHAFNQKVGEIQSIAKDAFARLKGRWSCLQKRTEVKLEDLPVLLGACCVLHNICEMRDEEMKPQWNFDIFDDQMLPQNNNVRSNASEQARDQIAHYLLHHGRAGTNFF

SEQ ID NO: 54734 - protein, 430 aa, Glycine max
  peptide (1)..(430): Ceres Seq. ID no. 14307833
MDPIPNSNVNKRRANNDQFDLNDSAFSHLLNSIMDPNHFQHQSKPIQFDSSPTKRARRDLLVLEDSHLNPASAPQQQRRLWVKDRSKDWWQRCNSPDFPEEEFRRHFRMSKATFDMICQHLDSAVTKKNTMLREAIPVRQRVAVCIWRLATGDPLREVSKRFGLGISTCHKLVLEVCSAIKSVLMPKFLHWPNEAEMKPITEKFESLSGIPNVGGSMYTTHIPIIAPKSNVNAYFNKRHTERNQKTCYSITVQGVVDPKGIFSDVCIGWPGSLSDDQVLEKSALYQRATMGNLKDVWVVGNSGHPLMEGVLVPYTHQNLTWTQHAFNQKVGEIQSIAKDAFARLKGRWSCLQKRTEVKLEDLPVLLGACCVLHNICEMRDEEMKPQWNFDIFDDQMLPQNNNVRSNASEQARDQIAHYLLHHGRAGTNFF

SEQ ID NO: 54735 - protein, 397 aa, Glycine max
  peptide (1)..(397): Ceres Seq. ID no. 14307834
MDPNHFQHQSKPIQFDSSPTKRARRDLLVLEDSHLNPASAPQQQRRLWVKDRSKDWWQRCNSPDFPEEEFRRHFRMSKATFDMICQHLDSAVTKKNTMLREAIPVRQRVAVCIWRLATGDPLREVSKRFGLGISTCHKLVLEVCSAIKSVLMPKFLHWPNEAEMKPITEKFESLSGIPNVGGSMYTTHIPIIAPKSNVNAYFNKRHTERNQKTCYSITVQGVVDPKGIFSDVCIGWPGSLSDDQVLEKSALYQRATMGNLKDVWVVGNSGHPLMEGVLVPYTHQNLTWTQHAFNQKVGEIQSIAKDAFARLKGRWSCLQKRTEVKLEDLPVLLGACCVLHNICEMRDEEMKPQWNFDIFDDQMLPQNNNVRSNASEQARDQIAHYLLHHGRAGTNFF

SEQ ID NO: 54736 - DNA, 1065 bp, Glycine max
  misc_feature (1)..(1065): Ceres Seq. ID no. 15178201
ggtgagtgagagtccgaatcctgaaacgctgaacagttgattgttggtagccatggctgcagcagccaccgcgaaaccgcttctgtcactgtggtttatgcttctgctaccgtcgtttcttcggatcgccgtcgcttaccgacccggcgacatcgttcccatgagctgcatgggtcaataccactcctcgcgaaccgtgtggcaggacctcattggccgccactgccccatcttcgccgtgaatcgcgaggtgttgatgcccatacccaagcccacgggttacactggtgctgatgcttataaaatattgtttcaagttggaagggaaaagtttttaatcccgtggcttcttgtggtgaatcggaaaagtacagaggttccaatgatcgaagtagatctgaggtattcaggaaatgatttgcatggtgtcacagctaaagttgtggatatgcctcatcactatgttgaagttcatcctgagattagtaaacaattctgggattctcagcattggccaaagcatatactcgtccgatatacatggaaagaacattcagagatagatgtaacttcaggattttttgttctgtttggttcagggctcatgttgtctttcatcctttcaatctatgtattgcaatcgtcacgtgacaaattggaaagatttgtaagggaaacagttgtagaaagcagtgtgcctggcgaggtggtagcaaaggttgaatgatgcatctctgatgtcaatgatgcaatgtatacattgtaatattgtattcgtgaattgacaaaatcagttttgttttggaggagggggagaaggggatgttgttcttgcatatacaaagctatgaaccagttgtttcttttcatgatgaaggaagtgacttaggtgggtgagttggagtgcattaatttatcaggaccaactgtggagtgagaagctgtaaaagttgagagattgagtgtattaattcatagggaaggctggatttgtaactacattaggttaaatacttgaaaagctatacaagaagaataaatcaaagtgtagggtattgatttggc

SEQ ID NO: 54737 - protein, 224 aa, Glycine max
  peptide (1)..(224): Ceres Seq. ID no. 15178202
MAAAATAKPLLSLWFMLLLPSFLRIAVAYRPGDIVPMSCMGQYHSSRTVWQDLIGRHCPIFAVNREVLMPIPKPTGYTGADAYKILFQVGREKFLIPWLLVVNRKSTEVPMIEVDLRYSGNDLHGVTAKVVDMPHHYVEVHPEISKQFWDSQHWPKHILVRYTWKEHSEIDVTSGFFVLFGSGLMLSFILSIYVLQSSRDKLERFVRETVVESSVPGEVVAKVE

SEQ ID NO: 54738 - protein, 209 aa, Glycine max
  peptide (1)..(209): Ceres Seq. ID no. 15178203
MLLLPSFLRIAVAYRPGDIVPMSCMGQYHSSRTVWQDLIGRHCPIFAVNREVLMPIPKPTGYTGADAYKILFQVGREKFLIPWLLVVNRKSTEVPMIEVDLRYSGNDLHGVTAKVVDMPHHYVEVHPEISKQFWDSQHWPKHILVRYTWKEHSEIDVTSGFFVLFGSGLMLSFILSIYVLQSSRDKLERFVRETVVESSVPGEVVAKVE

SEQ ID NO: 54739 - protein, 188 aa, Glycine max
  peptide (1)..(188): Ceres Seq. ID no. 15178204
MSCMGQYHSSRTVWQDLIGRHCPIFAVNREVLMPIPKPTGYTGADAYKILFQVGREKFLIPWLLVVNRKSTEVPMIEVDLRYSGNDLHGVTAKVVDMPHHYVEVHPEISKQFWDSQHWPKHILVRYTWKEHSEIDVTSGFFVLFGSGLMLSFILSIYVLQSSRDKLERFVRETVVESSVPGEVVAKVE

SEQ ID NO: 54740 - protein, 185 aa, Glycine max
  peptide (1)..(185): Ceres Seq. ID no. 15178205
MGQYHSSRTVWQDLIGRHCPIFAVNREVLMPIPKPTGYTGADAYKILFQVGREKFLIPWLLVVNRKSTEVPMIEVDLRYSGNDLHGVTAKVVDMPHHYVEVHPEISKQFWDSQHWPKHILVRYTWKEHSEIDVTSGFFVLFGSGLMLSFILSIYVLQSSRDKLERFVRETVVESSVPGEVVAKVE

SEQ ID NO: 54741 - DNA, 1130 bp, Glycine max
  misc_feature (1)..(1130): Ceres Seq. ID no. 14307760
gtttagttctctcttctctctctctcaaacctgaattcggttgtgatataaacctgcgttgcgctaaacgacaccgttttcactgtctctgagaatggaggcactaagtcgctttgtggaagaaatattcgaggatttccagggccgaagagccggcatcatcaaagcccttaccaccgatgttgaagatttctacagccaatgtgatcctgagaaggagaatttgtgcttatatggatttcctaatgagcaatgggaggtaaatttacccgttgaagaagttcctccagagcttcctgagcctgtcctaggcattaactttgctagggatggcatgctggaaaaagactggttatcattagttgctgttcatagtgatacatggttacttgcccttgccttttattttggagccagatttggatttgataaaactgacaggaaacgactattcggtatgatcaatgaactaccaacaatatttgaagttgttactggtgaagcaaagaaacaagttaaagagaagtcttcggtttcaaacaacagtggcaacaaatctaagtctaactctcaagcgcaggcttccgaaacccagggcagacagtcaaaggcattacaaacaaaagatgaggatgaagaactagaagagcaagataacgatgaacatggagataccttgtgtggggcatgtggtgagaattatggtactgatgaattctggatttgctgtgacatctgtgagaagtggttccatggcaaatgtgtgaagatcacccctgctagagcagagcttatcaagcaatacaagtgcccatcatgcagtaacaagagagctcgctaagcaaatttccatcagggacaataaaccatttgagtcttaacgaatctgattaatattttttttttctagatgtagctgatggatagtttttatgtttgacacatgtagatttcttgtctttctgtgggatttatgctgtgttggttgtctgggggaagttcattctttttccaagccttgtcctagctatggatccacatcggcataagcttcatatgaatggggttgaaaccataatctcctggccaccttaatactatggaaatgaaagtacttcgacatttgcacc

SEQ ID NO: 54742 - protein, 248 aa, Glycine max
  peptide (1)..(248): Ceres Seq. ID no. 14307761
MEALSRFVEEIFEDFQGRRAGIIKALTTDVEDFYSQCDPEKENLCLYGFPNEQWEVNLPVEEVPPELPEPVLGINFARDGMLEKDWLSLVAVHSDTWLLALAFYFGARFGFDKTDRKRLFGMINELPTIFEVVTGEAKKQVKEKSSVSNNSGNKSKSNSQAQASETQGRQSKALQTKDEDEELEEQDNDEHGDTLCGACGENYGTDEFWICCDICEKWFHGKCVKITPARAELIKQYKCPSCSNKRAR

SEQ ID NO: 54743 - protein, 168 aa, Glycine max
  peptide (1)..(168): Ceres Seq. ID no. 14307762
MLEKDWLSLVAVHSDTWLLALAFYFGARFGFDKTDRKRLFGMINELPTIFEVVTGEAKKQVKEKSSVSNNSGNKSKSNSQAQASETQGRQSKALQTKDEDEELEEQDNDEHGDTLCGACGENYGTDEFWICCDICEKWFHGKCVKITPARAELIKQYKCPSCSNKRAR

SEQ ID NO: 54744 - protein, 127 aa, Glycine max
  peptide (1)..(127): Ceres Seq. ID no. 14307763
MINELPTIFEVVTGEAKKQVKEKSSVSNNSGNKSKSNSQAQASETQGRQSKALQTKDEDEELEEQDNDEHGDTLCGACGENYGTDEFWICCDICEKWFHGKCVKITPARAELIKQYKCPSCSNKRAR

SEQ ID NO: 54745 - DNA, 1101 bp, Glycine max
  misc_feature (1)..(1101): Ceres Seq. ID no. 14307312
attttccattttcaattttaatttcctctcaaaccctaaccctaaccctaaccctccccgtcacaaaagaaaaccctctttgtccgatcatcgtcgtcaagatgttggaactccgtctcgtgcaaggctccctcctgaagaaggttttggaatccgtcaaggagctcgtgaacgacgcgaacttcgactgctcctccaccgggttctccctccaggccatggactccagccacgtcgccctcgtcgctctcctcctccgatccgagggcttcgagcactaccgctgcgaccgcaacatctccatgggcatgaacctcaacaacatggccaagatgcttaagtgtgctggtaatgacgacatcatcaccatcaaggccgacgacggcagcgacactgtcactttcatgttcgaaagccctacacaagacaagatttctgattttgaaatgaagctgatggacattgatagtgaacacctkgggattccggaggcagagtatcatgctatggttaagatgccatcctctgagtttgctaggatctgcaaggatctcagtagtattggtgacactgttgtcatttcggttactaaggagggtgtgaagttttccaccaaaggagatattggaactgccaatatagtttgtaggcagaatacttctgtggacaagcctgaagaagcaactgtcattgagatgaatgagcccgtgtccttgacatttgctttgcgatatatgaactcttttacaaaggcaacgccattgtctaacacagttaccattagtctttcaaatgagttgccagttgttgttgagtacaagattgctgagatgggttatgtgcggttctatttggctcccaagatagaagaggatgaagaagatacgaaacctcaagtttaatctacctattagatggttgggttaggatattaggattttaatgtctttgaacttgtagctttcgtcatacatcttctgttgaagatattttaaccgtgtgagcaatgaattcacattttgtggatttcttagatgtgtattggttacctaccaccttattttccctcgatttgattgttaagaacaattcgaaacaaat

SEQ ID NO: 54746 - protein, 299 aa, Glycine max
  peptide (1)..(299): Ceres Seq. ID no. 14307313
  misc_feature (159)..(159): Xaa is any aa, unknown or other
FPFSILISSQTLTLTLTLPVTKENPLCPIIVVKMLELRLVQGSLLKKVLESVKELVNDANFDCSSTGFSLQAMDSSHVALVALLLRSEGFEHYRCDRNISMGMNLNNMAKMLKCAGNDDIITIKADDGSDTVTFMFESPTQDKISDFEMKLMDIDSEHXGIPEAEYHAMVKMPSSEFARICKDLSSIGDTVVISVTKEGVKFSTKGDIGTANIVCRQNTSVDKPEEATVIEMNEPVSLTFALRYMNSFTKATPLSNTVTISLSNELPVVVEYKIAEMGYVRFYLAPKIEEDEEDTKPQV

SEQ ID NO: 54747 - protein, 266 aa, Glycine max
  peptide (1)..(266): Ceres Seq. ID no. 14307314
  misc_feature (126)..(126): Xaa is any aa, unknown or other
MLELRLVQGSLLKKVLESVKELVNDANFDCSSTGFSLQAMDSSHVALVALLLRSEGFEHYRCDRNISMGMNLNNMAKMLKCAGNDDIITIKADDGSDTVTFMFESPTQDKISDFEMKLMDIDSEHXGIPEAEYHAMVKMPSSEFARICKDLSSIGDTVVISVTKEGVKFSTKGDIGTANIVCRQNTSVDKPEEATVIEMNEPVSLTFALRYMNSFTKATPLSNTVTISLSNELPVVVEYKIAEMGYVRFYLAPKIEEDEEDTKPQV

SEQ ID NO: 54748 - protein, 227 aa, Glycine max
  peptide (1)..(227): Ceres Seq. ID no. 14307315
  misc_feature (87)..(87): Xaa is any aa, unknown or other
MDSSHVALVALLLRSEGFEHYRCDRNISMGMNLNNMAKMLKCAGNDDIITIKADDGSDTVTFMFESPTQDKISDFEMKLMDIDSEHXGIPEAEYHAMVKMPSSEFARICKDLSSIGDTVVISVTKEGVKFSTKGDIGTANIVCRQNTSVDKPEEATVIEMNEPVSLTFALRYMNSFTKATPLSNTVTISLSNELPVVVEYKIAEMGYVRFYLAPKIEEDEEDTKPQV

SEQ ID NO: 54749 - DNA, 1082 bp, Glycine max
  misc_feature (1)..(1082): Ceres Seq. ID no. 14307085
atcttcttctctaagctataagccatatacaccaaatattttttcacttgctctccatcttttttcagttcatcagtggccaggtaggccatgggaagggctccatgttgtgacaaatccaatgtgaaaagagggccttggtctcctgatgaagatgccaccctcaaaaactaccttgagaaacatggcacaggtggtaactggatagctctccccaaaaaagcaggccttaagcgttgtgggaagagctgtcgtctaagatggctaaactatctcaggcctcatattaagcttggaggtttcactgaagaggaagacaaaattatctgcaccctttatgacaccatcggaagcaggtggtcctttatagcagctcaacttcccgggagaacagacaatgatgtgaaaaatcactggaacaccaagctaaagaaaaagttcttggcaggaaacacaagtagtactgctgccacgacaagcaacaacaatgtcactttcagcaatactagttattctgatcaagttaagacccttgtcttggatcatcaaaaactgaactcagctgataattggtttgactactcctacaatgttttggaattggaacaaacaccaattccagttccttttccaatgtctcaggaattagaggcttttaattatactgctgggagtataagttgtagtgcaccaccaccctctaaggaagtttcaatgctttccaatgcagacaatcatacgctatggtttggttatgaccatgcaagtgaagatgatccaaatttgcttgagtttgtgcttgatgatgatctgctgaatcatggatttgtttctcaagacaaaagctgcagccaagttggtccaccatctggctaattaaccaagatcactcattctttctactcgtcaaaaacttgaaaaaaccaaggctacagaaaataaaggtaaaatggaatattgatcaagttattatagtatagtactagtgatgaattatatacctctaaatctaactggtgtttaaatttgtgattaaagtggttggttgaatgtggaattgtgtgagtttctgaattgttttc

SEQ ID NO: 54750 - protein, 261 aa, Glycine max
  peptide (1)..(261): Ceres Seq. ID no. 14307086
MGRAPCCDKSNVKRGPWSPDEDATLKNYLEKHGTGGNWIALPKKAGLKRCGKSCRLRWLNYLRPHIKLGGFTEEEDKIICTLYDTIGSRWSFIAAQLPGRTDNDVKNHWNTKLKKKFLAGNTSSTAATTSNNNVTFSNTSYSDQVKTLVLDHQKLNSADNWFDYSYNVLELEQTPIPVPFPMSQELEAFNYTAGSISCSAPPPSKEVSMLSNADNHTLWFGYDHASEDDPNLLEFVLDDDLLNHGFVSQDKSCSQVGPPSG

SEQ ID NO: 54751 - DNA, 1590 bp, Glycine max
  misc_feature (1)..(1590): Ceres Seq. ID no. 15176262
aattaatttaaataatttggacaaatggaaaacaagccagaagaagtaaaagcaaaccaagaaggtgaaactgagaccgttgagaatgtcgaggccacaaagcacgttgagctagatgaaggaaaagatgaacaaattgaatgtgatgacaaagaaaacaacactcagctatcttccaacgatttgcaataccttcttgcagataaagaatggaaagatgctattgtaaacttccctgaaaccgaaaagattatcagtagacttattgagctcggttttgcaaagccctccaaaatccaatccaaaactgttccttttgcacttgctaagaaagacgtcggtatcattgctcaatcacataatggttcaggaaagactctcggcttcgtgttaccagctgttctgagaattgatgccacaaagcctttgatgaaaagccagacaactttcttaccacaagcaatccttattgctccaaatgctgaactttgctctcaaattgttaagattgctgaactagtagctcaaccatttaaagatattaaggtatctggtggcagaactccagctcaccttattgttaagacttcccaaagtctagtcagtgcaattagtaaaaaggagattgatttagctaatgcagatgtccttattgttgatgaagctgatgatcaattaaaaggagacactgctcttagactcctccaaattgtatccaaactgccaaaaggagctggtttattcttcttctctgctactttcaccaaagaagccattgattatatgaaccaattctttgcaaagttgagcttaaaattcgtgttaagatatatgcttaagaccgatgagctaaaacttgacggaattgaacaatatagccgaaaatgtgaccctaatggcaaggcagactatattgctaagcttctcgataagttagaagttgatacacaagctatcatattctctaacactaagaattttgctttgagagttagtaatgaattgaaaagtaaaggtcacaatgttggcttgctaatgggtggtcttatgcctcaagaaagaagtgaaatcttgaactcatttagagaatctaagattaaagtcctgattacaaccaatcttttggcaagaggatttgatcaaagatccattggacttgttatcaacttagacgttcctagacactttggagcagaaaataataaagctgattgcgagacttacttatatagagttggaagaacaggaagatttggagacgtcggattagcaattaacttatattcaaaagaagatgaaaaagacttaatcgatcaagttgaaaagttctacaccgtagaaatcaaggatctttcaaaggaaagtggtgataatgaatttgatttaatcaacgataagcttggaaaagttgtcaagattaatagcaaaaagcgtgaagaaaacagggaaaaaatcgttaaatcctaaacctatctataaaatagttatgcgtttatttcataatatacatgcgtttacgtaaactagtttcatgtttcaaaatagcagcaaattagagtttattcatttattaaattagtctaaaatccc

SEQ ID NO: 54752 - protein, 480 aa, Glycine max
  peptide (1)..(480): Ceres Seq. ID no. 15176263
MENKPEEVKANQEGETETVENVEATKHVELDEGKDEQIECDDKENNTQLSSNDLQYLLADKEWKDAIVNFPETEKIISRLIELGFAKPSKIQSKTVPFALAKKDVGIIAQSHNGSGKTLGFVLPAVLRIDATKPLMKSQTTFLPQAILIAPNAELCSQIVKIAELVAQPFKDIKVSGGRTPAHLIVKTSQSLVSAISKKEIDLANADVLIVDEADDQLKGDTALRLLQIVSKLPKGAGLFFFSATFTKEAIDYMNQFFAKLSLKFVLRYMLKTDELKLDGIEQYSRKCDPNGKADYIAKLLDKLEVDTQAIIFSNTKNFALRVSNELKSKGHNVGLLMGGLMPQERSEILNSFRESKIKVLITTNLLARGFDQRSIGLVINLDVPRHFGAENNKADCETYLYRVGRTGRFGDVGLAINLYSKEDEKDLIDQVEKFYTVEIKDLSKESGDNEFDLINDKLGKVVKINSKKREENREKIVKS

SEQ ID NO: 54753 - protein, 345 aa, Glycine max
  peptide (1)..(345): Ceres Seq. ID no. 15176264
MKSQTTFLPQAILIAPNAELCSQIVKIAELVAQPFKDIKVSGGRTPAHLIVKTSQSLVSAISKKEIDLANADVLIVDEADDQLKGDTALRLLQIVSKLPKGAGLFFFSATFTKEAIDYMNQFFAKLSLKFVLRYMLKTDELKLDGIEQYSRKCDPNGKADYIAKLLDKLEVDTQAIIFSNTKNFALRVSNELKSKGHNVGLLMGGLMPQERSEILNSFRESKIKVLITTNLLARGFDQRSIGLVINLDVPRHFGAENNKADCETYLYRVGRTGRFGDVGLAINLYSKEDEKDLIDQVEKFYTVEIKDLSKESGDNEFDLINDKLGKVVKINSKKREENREKIVKS

SEQ ID NO: 54754 - DNA, 974 bp, Glycine max
  misc_feature (1)..(974): Ceres Seq. ID no. 15174694
gatatgtctcattgctggtccttttcaaacaaaattatcctgtgacttttctcctatgtaatgaataatcaaatggaaaatttcccatctttctcttttctataactccattttagtagtagttctagcctttgctcatcgattgaatttgtttaggtaatttttcacaaggcgtgagccaattatagaggaagctgtgcggtatcttattatgttttcttggtaatagtgtcatcatcaaattcaaaatgtacatatattttttgcacttttcatgttgcaggtggtatgaatggttctatagtctatgaacttgaaagacctgaaaatgctggcctgaaaaaatcagtaaaggttctgcaaaaagcaaagactcagatagatgctatccaaccagtatcttgggcggacatgattgctgtggctggagctgaagcagttgaagtatgtggaggtccacctattcaagtttcactgggcagattagatacactggtgcctgatccagaagggagacttcctgaggaatctctcaatgcttctggtttgaagaaatgtttccagagcaaaggcttttcaacacaagaacttgtggctttgtctggagcccacactattggaagtaaaggttttggaagcccaatttcttttgacaattcatattataaggttcttttggagaagccgtggacgtcttcaggtggtatgccgagtatgattgggcttccttcagatcacgctcttgttgaggatgatgaatgcttaagatggattaaaaaatacgcagacagtgagaatctattctttgaagatttcaaaaatgcgtatgtcaagctggtgaattctggtgtgaggcggaatagcttataaattcaggagttgaatgttccaacttccactgaaggggcaacttgcatttttattgactttctaacagtgtttatgcacagttgccatgaagttttgggtgcttt

SEQ ID NO: 54755 - protein, 193 aa, Glycine max
  peptide (1)..(193): Ceres Seq. ID no. 15174695
MNGSIVYELERPENAGLKKSVKVLQKAKTQIDAIQPVSWADMIAVAGAEAVEVCGGPPIQVSLGRLDTLVPDPEGRLPEESLNASGLKKCFQSKGFSTQELVALSGAHTIGSKGFGSPISFDNSYYKVLLEKPWTSSGGMPSMIGLPSDHALVEDDECLRWIKKYADSENLFFEDFKNAYVKLVNSGVRRNSL

SEQ ID NO: 54756 - protein, 152 aa, Glycine max
  peptide (1)..(152): Ceres Seq. ID no. 15174696
MIAVAGAEAVEVCGGPPIQVSLGRLDTLVPDPEGRLPEESLNASGLKKCFQSKGFSTQELVALSGAHTIGSKGFGSPISFDNSYYKVLLEKPWTSSGGMPSMIGLPSDHALVEDDECLRWIKKYADSENLFFEDFKNAYVKLVNSGVRRNSL

SEQ ID NO: 54757 - DNA, 1513 bp, Glycine max
  misc_feature (1)..(1513): Ceres Seq. ID no. 14312333
gagaagaggatgaagggagagaagagttttgggagtggcggtgcgaagagtgggtccaaatttgggagtggaaagaaagggtttggtgggaaggcagggaaggatcatgatggtgaagttaaggagatgtgggatacaattgctgggggagattctgaggatgatcaagagggtctcaggaatgtggatgatgacaactttattgatgacactggagtggaacctgcttattatggtagtgatgaaccacgttctcccggtgatgctccccaggcagaggagggtgaagaggacgaagaaattaaggatcttttcaagataggtaagaaaaagaagaagaatgagagaagtcctgcagaaatagcttatttagttgagactgtcatggctgagcttgaggttacagctgaggaggatgctgaacttaatagacaggggaagcctgccgttaataaactcaagaagttgaatcttcttacagaagtcctctcaaagaaacagcttcaactggagtttttagatcatggagtgctaactttattgaagaattggcttgagccacttcctgatggaagcttgccaaatataaatatacgcacagaagttttgaagatattgaatgattttcctatagatctagagcagtatgatagaagagaacagctgaagaagagtggtcttgggaaggtcattatgtttctatcgaagtctgatgaagaaatcaatgtgaataggaaactagccaaggagctggttgataagtggagccggcctatatttaataagagtacccggtttgaagacatgagaaatgtggaggatgatagggttccttataggagattatcagttaaaaagccggcaaataaagctgcaggaatggaatctagagacagtgatcttgatttagaactttcacagcctaggtctggacagtcctcttctaggcagcatgcatcaaggccggaagcaacacctttggattttgtggtccggccccagtctaaaattgatccagaagaaattagagcacgagcaaaacaagctgcacaagatcagcagcgtatgaagatgaataagaaattgcagcaattgagggcaccaaaaaagaagcagcttcaggctacaaaattgagcgtggaaggtcgtggtatgatcaaatatttataaatgtgaccacgttgatactggatgggtttgtttgtcctgctgcaagcttttcatataatgtgctgcctgcattgatgtggattcttctaaaggtgggctattcgttcagtgatctacatggaaatttgatggagagggatgttatgaaaatacatccgtatgctgcatttgtgtattcatctagtgcagcaggaaatccaaaatacattggacggttatgcattcgtatatatagtcaagcttgtcatcagtttaatgaaaatgtggattttgcattcgtccttggtacaagtaatctttgtagtgcagcgctgcagcagtaataccaaccaaaatacactgg

SEQ ID NO: 54758 - protein, 389 aa, Glycine max
  peptide (1)..(389): Ceres Seq. ID no. 14312334
EKRMKGEKSFGSGGAKSGSKFGSGKKGFGGKAGKDHDGEVKEMWDTIAGGDSEDDQEGLRNVDDDNFIDDTGVEPAYYGSDEPRSPGDAPQAEEGEEDEEIKDLFKIGKKKKKNERSPAEIAYLVETVMAELEVTAEEDAELNRQGKPAVNKLKKLNLLTEVLSKKQLQLEFLDHGVLTLLKNWLEPLPDGSLPNINIRTEVLKILNDFPIDLEQYDRREQLKKSGLGKVIMFLSKSDEEINVNRKLAKELVDKWSRPIFNKSTRFEDMRNVEDDRVPYRRLSVKKPANKAAGMESRDSDLDLELSQPRSGQSSSRQHASRPEATPLDFVVRPQSKIDPEEIRARAKQAAQDQQRMKMNKKLQQLRAPKKKQLQATKLSVEGRGMIKYL

SEQ ID NO: 54759 - protein, 386 aa, Glycine max
  peptide (1)..(386): Ceres Seq. ID no. 14312335
MKGEKSFGSGGAKSGSKFGSGKKGFGGKAGKDHDGEVKEMWDTIAGGDSEDDQEGLRNVDDDNFIDDTGVEPAYYGSDEPRSPGDAPQAEEGEEDEEIKDLFKIGKKKKKNERSPAEIAYLVETVMAELEVTAEEDAELNRQGKPAVNKLKKLNLLTEVLSKKQLQLEFLDHGVLTLLKNWLEPLPDGSLPNINIRTEVLKILNDFPIDLEQYDRREQLKKSGLGKVIMFLSKSDEEINVNRKLAKELVDKWSRPIFNKSTRFEDMRNVEDDRVPYRRLSVKKPANKAAGMESRDSDLDLELSQPRSGQSSSRQHASRPEATPLDFVVRPQSKIDPEEIRARAKQAAQDQQRMKMNKKLQQLRAPKKKQLQATKLSVEGRGMIKYL

SEQ ID NO: 54760 - protein, 347 aa, Glycine max
  peptide (1)..(347): Ceres Seq. ID no. 14312336
MWDTIAGGDSEDDQEGLRNVDDDNFIDDTGVEPAYYGSDEPRSPGDAPQAEEGEEDEEIKDLFKIGKKKKKNERSPAEIAYLVETVMAELEVTAEEDAELNRQGKPAVNKLKKLNLLTEVLSKKQLQLEFLDHGVLTLLKNWLEPLPDGSLPNINIRTEVLKILNDFPIDLEQYDRREQLKKSGLGKVIMFLSKSDEEINVNRKLAKELVDKWSRPIFNKSTRFEDMRNVEDDRVPYRRLSVKKPANKAAGMESRDSDLDLELSQPRSGQSSSRQHASRPEATPLDFVVRPQSKIDPEEIRARAKQAAQDQQRMKMNKKLQQLRAPKKKQLQATKLSVEGRGMIKYL

SEQ ID NO: 54761 - DNA, 733 bp, Glycine max
  misc_feature (1)..(733): Ceres Seq. ID no. 12582039
aaatacaaataaaaactaataattgtttagctcctacaaagtatccaaatgaagaaagtcattatcatcttagctcttcttgcagtagcttttgcaggtttttccgatgattgtctctactctcacaaccaagctagatccgtccttgggcttccaaaaatgacttattcaagcaaattagcctctacagccctcaagtacgctaaagttctggctggaactaatcacttgaaacacagtagcggtagaaataatattggtgaaaatcttgctatgggaacaaagggatcttatgacaccgaaagacttatctctttatggactanggaaaagaagaactatattcccgcaaagaaattccccaacgtatctagaactggaaactggaaggatgtcgcacattacactcagatcgtttggagaaacactaaacaagttggttgtggtaccgctactaatagcaagaacattatcatagtttgtcactacagtggtgccggtaactgggttggttcatatccctattagataatagatgatataattaatgacagctaaacattatcgtgttttttgaacaaaagaacctgattaaaaagctcaacttattttttcatttgaatgcatttacaaagttatatattactaacttctaaacattgtatgtaagtacacacatactctatacttttttaataattcaaacctcaaatgtctttaagacattgagtcc

SEQ ID NO: 54762 - protein, 159 aa, Glycine max
  peptide (1)..(159): Ceres Seq. ID no. 12582040
  misc_feature (93)..(93): Xaa is any aa, unknown or other
MKKVIIILALLAVAFAGFSDDCLYSHNQARSVLGLPKMTYSSKLASTALKYAKVLAGTNHLKHSSGRNNIGENLAMGTKGSYDTERLISLWTXEKKNYIPAKKFPNVSRTGNWKDVAHYTQIVWRNTKQVGCGTATNSKNIIIVCHYSGAGNWVGSYPY

SEQ ID NO: 54763 - protein, 122 aa, Glycine max
  peptide (1)..(122): Ceres Seq. ID no. 12582041
  misc_feature (56)..(56): Xaa is any aa, unknown or other
MTYSSKLASTALKYAKVLAGTNHLKHSSGRNNIGENLAMGTKGSYDTERLISLWTXEKKNYIPAKKFPNVSRTGNWKDVAHYTQIVWRNTKQVGCGTATNSKNIIIVCHYSGAGNWVGSYPY

SEQ ID NO: 54764 - protein, 84 aa, Glycine max
  peptide (1)..(84): Ceres Seq. ID no. 12582042
  misc_feature (18)..(18): Xaa is any aa, unknown or other
MGTKGSYDTERLISLWTXEKKNYIPAKKFPNVSRTGNWKDVAHYTQIVWRNTKQVGCGTATNSKNIIIVCHYSGAGNWVGSYPY

SEQ ID NO: 54765 - DNA, 1229 bp, Glycine max
  misc_feature (1)..(1229): Ceres Seq. ID no. 14310369
acactacagccacttctatagcttcatttaagaatggcactttctcctattcgttcttctactttctcttcatcatcagctattgttacattagctgtgttacttcttcttacaaggacctcttcagctaccctctcaaagaacttctattctaagacatgtccaaacgttttcaacacggtaaaatctgtagtaaaatctgctgtggccaaagaacctcgcattggagcttctattgttcgcctcttcttccatgactgctttgttcaaggttgtgatggaccaatactacttgatgacactccaaccttccagggggagaagactgcagctgctaacaacaattcagtgagaggttatgaattaatcgatgatatcaagtctaaggtcgagaaaatatgccccggtgtggtctcatgtgctgatatcttggacattgcttctcgtgactctgttgttcttcttggaggaccattttggaatgttagacttggaagaagggattctagaagtgccaatttcactgctgcaaacactggtgttattccacctcccacatctaacctcaccaaccttatcacaaggtttcaagatcaaggactctctgctagggacatggttgccttatctggagctcacacatttggcaaagcaaggtgtactagtttcagagatcgcatatacaatcaaaccaacattgacagaacatttgcattggccaggcagaggaggtgccctaggaccaatggcacaggtgacaacaatctagcaaatctagacttcagaactccaaatcattttgacaacaactacttcaaaaaccttctcattaaaaggggactcctcaattctgatcaagtgcttttcaatggtggatccactgattcactggtcagaacatacagccagaataacaaggcctttgattctgactttgttaaagcaatgattaggatgggagatatcaaacccttaactgggtcacaaggggagattaggaagaactgcaggagagtgaattaattagaagtgacacataaatttgtttggtgtacactttgtacccttcaaaagggggaagttgtttggtgtgttgggttgtttaagtgatttctcatgacttggaaattgtgaattgtttgtttagttcagtttaaattgtacttgtgtaaccttataattgtattatggaataaattataaggcattttgccttttgtaccaaaaat

SEQ ID NO: 54766 - protein, 329 aa, Glycine max
  peptide (1)..(329): Ceres Seq. ID no. 14310370
MALSPIRSSTFSSSSAIVTLAVLLLLTRTSSATLSKNFYSKTCPNVFNTVKSVVKSAVAKEPRIGASIVRLFFHDCFVQGCDGPILLDDTPTFQGEKTAAANNNSVRGYELIDDIKSKVEKICPGVVSCADILDIASRDSVVLLGGPFWNVRLGRRDSRSANFTAANTGVIPPPTSNLTNLITRFQDQGLSARDMVALSGAHTFGKARCTSFRDRIYNQTNIDRTFALARQRRCPRTNGTGDNNLANLDFRTPNHFDNNYFKNLLIKRGLLNSDQVLFNGGSTDSLVRTYSQNNKAFDSDFVKAMIRMGDIKPLTGSQGEIRKNCRRVN

SEQ ID NO: 54767 - DNA, 1654 bp, Glycine max
  misc_feature (1)..(1654): Ceres Seq. ID no. 14311156
aattcagaacacagagagacctcgtcaaggctaaatacgagaaaatgcagaaaaatatcgagaaatttggttcagaccctaaaagtcgtcgtattgtgagtgacagacaacctcgtattgagattataaatgaccaaccgggaatgccacttattgtttatgtgtctcgcgaaagaaggccatcccttcctcacaaattcaaaggaggagccgtcaacacattgctcagagtctcaggtttaatcagtaatggaccttatgttctagtaatggactgtgatatgtatagcaatgatccaacctctgccaaacaagccatgtgcttctttcttgatcctgaaacgtccaaatatattgcatttgttcaattccctcaaatgtttcacaaccttagcaaaaaggacatttatgatagtcaagctagaactgcttttaagacaatgtggcaaggcatggatggactaagaggtccaggtctttctggcagcggcaattacttaagtagaagtgctttactatttggaagtccaaaccaaaaagatgactatctgcaagatgcacaaaagtacttcggcaagtctaccgcctacattgaatcactgaaggccatccgtggacagaaaagtagcaaaaagaatatttcaagagatgaaatgttaagagaagctcaagtagtggcctcttgttcctacgaaaataacacaaattggggcacagaggtgggattctcatatggcatattactagagagttctattactggctatattcttcacagcagaggatggaaatcagcatatctttacccgaaaacaccatgtttcttaggttgtgctcccactgacatcaaggaaggcatgcttcagttggttaagtggttgtctgaacttttgttgcttggtgtctcctccaaatacagcccattcacttatggattttcaagaatgtccatacttcacacattcacttattgcttcatcacaatgtcatccctttatgctgttgtcttcatcctctacggcattgtacctcaagtatgcctcctcaaaggaatccctgtgtttccaaaggccacagacccttggtttgccgtgtttgcatttgtgtatgtatctactcagattcaacatttgattgaggttctctctggggatggatctgtgacaatgtggtgggatgaacaaagaatttggattctgaagtcagttaccagcatatttgcaattatagatggaatcaagaagtggttggggttgagcaaggtgaaattcaacttgtcaaacaaagccattgacaaagagaagctcaagaaatatgagcaaggtagattcgatttccaaggtgcagctgtgttcatggctccattggttctattactcacagccaacattgttagcttcttagttggtatatggagactatttaatttcaatgtgaaggattttgaagaaatgtttggtcaacttttcctagttacctatgtaatggttcttagttatccacttcttgaggccatggtaacaatgaaaagcaagagtggatagtgaaatttggtcacaaataattaggctcattcaagagtctaaattgattatgtatcttgagatgaaattgcttaatgcaatcttgttcgttcagtttagattaatctaat

SEQ ID NO: 54768 - protein, 513 aa, Glycine max
  peptide (1)..(513): Ceres Seq. ID no. 14311157
FRTQRDLVKAKYEKMQKNIEKFGSDPKSRRIVSDRQPRIEIINDQPGMPLIVYVSRERRPSLPHKFKGGAVNTLLRVSGLISNGPYVLVMDCDMYSNDPTSAKQAMCFFLDPETSKYIAFVQFPQMFHNLSKKDIYDSQARTAFKTMWQGMDGLRGPGLSGSGNYLSRSALLFGSPNQKDDYLQDAQKYFGKSTAYIESLKAIRGQKSSKKNISRDEMLREAQVVASCSYENNTNWGTEVGFSYGILLESSITGYILHSRGWKSAYLYPKTPCFLGCAPTDIKEGMLQLVKWLSELLLLGVSSKYSPFTYGFSRMSILHTFTYCFITMSSLYAVVFILYGIVPQVCLLKGIPVFPKATDPWFAVFAFVYVSTQIQHLIEVLSGDGSVTMWWDEQRIWILKSVTSIFAIIDGIKKWLGLSKVKFNLSNKAIDKEKLKKYEQGRFDFQGAAVFMAPLVLLLTANIVSFLVGIWRLFNFNVKDFEEMFGQLFLVTYVMVLSYPLLEAMVTMKSKSG

SEQ ID NO: 54769 - protein, 499 aa, Glycine max
  peptide (1)..(499): Ceres Seq. ID no. 14311158
MQKNIEKFGSDPKSRRIVSDRQPRIEIINDQPGMPLIVYVSRERRPSLPHKFKGGAVNTLLRVSGLISNGPYVLVMDCDMYSNDPTSAKQAMCFFLDPETSKYIAFVQFPQMFHNLSKKDIYDSQARTAFKTMWQGMDGLRGPGLSGSGNYLSRSALLFGSPNQKDDYLQDAQKYFGKSTAYIESLKAIRGQKSSKKNISRDEMLREAQVVASCSYENNTNWGTEVGFSYGILLESSITGYILHSRGWKSAYLYPKTPCFLGCAPTDIKEGMLQLVKWLSELLLLGVSSKYSPFTYGFSRMSILHTFTYCFITMSSLYAVVFILYGIVPQVCLLKGIPVFPKATDPWFAVFAFVYVSTQIQHLIEVLSGDGSVTMWWDEQRIWILKSVTSIFAIIDGIKKWLGLSKVKFNLSNKAIDKEKLKKYEQGRFDFQGAAVFMAPLVLLLTANIVSFLVGIWRLFNFNVKDFEEMFGQLFLVTYVMVLSYPLLEAMVTMKSKSG

SEQ ID NO: 54770 - protein, 466 aa, Glycine max
  peptide (1)..(466): Ceres Seq. ID no. 14311159
MPLIVYVSRERRPSLPHKFKGGAVNTLLRVSGLISNGPYVLVMDCDMYSNDPTSAKQAMCFFLDPETSKYIAFVQFPQMFHNLSKKDIYDSQARTAFKTMWQGMDGLRGPGLSGSGNYLSRSALLFGSPNQKDDYLQDAQKYFGKSTAYIESLKAIRGQKSSKKNISRDEMLREAQVVASCSYENNTNWGTEVGFSYGILLESSITGYILHSRGWKSAYLYPKTPCFLGCAPTDIKEGMLQLVKWLSELLLLGVSSKYSPFTYGFSRMSILHTFTYCFITMSSLYAVVFILYGIVPQVCLLKGIPVFPKATDPWFAVFAFVYVSTQIQHLIEVLSGDGSVTMWWDEQRIWILKSVTSIFAIIDGIKKWLGLSKVKFNLSNKAIDKEKLKKYEQGRFDFQGAAVFMAPLVLLLTANIVSFLVGIWRLFNFNVKDFEEMFGQLFLVTYVMVLSYPLLEAMVTMKSKSG

SEQ ID NO: 54771 - DNA, 1080 bp, Glycine max
  misc_feature (1)..(1080): Ceres Seq. ID no. 13581092
cagctacgtaggccccccccccaattgactagagagggaatagtgctgcacaatgggtctgaataaagctgtaaaattgcctgcttttttccctatggtggttgagctatcatagacttgggtttcacaaaaacaaaacccatggaaaaggaaatggaatcttggacaattcatgggtcttcagcataatatgtaggtacatttgtttgtgttaccatgccgatcatttaaattttgcatgcagtacacatcacaagttgcaagactttttaattgtactataaaataaaacttgaatccaaggttttaaatattggactgccgtggcaaacactgtcccaatttgcgttagaaaaccttgatgtcacggtccacgttaagatgcaaactgtttttttaaaaccttatttaaatcaaattcaacacaattgatttgattataatgttgtatatgtttttttttatgtgatcagatttttggtggatgaaacgccaataagggtgcacacgaacatggagcacaagggaattccatttcctaaggaccaacccatgggtgtgtacagttcattatggaatgctgatgattgggccacgcagggtggtcgtgtgaaaacagattggagccacgcacccttcattgccacatacaagaacttcgagataaatgcgtgtgagtgtcccgtgtcagtggctgcaatggataatgctaagaagtgcaccagcagtgaggggaataagtattggtgggatgagcctaatttggctgaactcaacttgcaccagagccaccagcttatgtgggttagggcaaggcacattttctatgactattgcactgacactgctaggttcccagtcacgcctgctgagtgtgtccatcaccgtcacacctgagcagacttagtgattagtctaaactttattttgttataacttatgggaagttatgaaaataggattggggcataagaaaaaaatggtgggtggtgaacaaagttgtggaacatgtccttcatgtttctgattgtaatatatattgccacaacattaatgtgaattgttggtttttcttcttgt

SEQ ID NO: 54772 - protein, 127 aa, Glycine max
  peptide (1)..(127): Ceres Seq. ID no. 13581093
MEHKGIPFPKDQPMGVYSSLWNADDWATQGGRVKTDWSHAPFIATYKNFEINACECPVSVAAMDNAKKCTSSEGNKYWWDEPNLAELNLHQSHQLMWVRARHIFYDYCTDTARFPVTPAECVHHRHT

SEQ ID NO: 54773 - protein, 114 aa, Glycine max
  peptide (1)..(114): Ceres Seq. ID no. 13581094
MGVYSSLWNADDWATQGGRVKTDWSHAPFIATYKNFEINACECPVSVAAMDNAKKCTSSEGNKYWWDEPNLAELNLHQSHQLMWVRARHIFYDYCTDTARFPVTPAECVHHRHT

SEQ ID NO: 54774 - protein, 79 aa, Glycine max
  peptide (1)..(79): Ceres Seq. ID no. 13581095
MRVSVPCQWLQWIMLRSAPAVRGISIGGMSLIWLNSTCTRATSLCGLGQGTFSMTIALTLLGSQSRLLSVSITVTPEQT

SEQ ID NO: 54775 - DNA, 1580 bp, Glycine max
  misc_feature (1)..(1580): Ceres Seq. ID no. 14307164
acttcacttcagttgactctctctctcctccaccagcccgccatttttctctctctaaaacacaaacacatgacatctccttatgctcctcgccggcgatccagctccgaccaccggaccacgcccggaagagcaccgccctcccccagcttcgcctcttccgagctgagcacctcctccaccgtctccacccaccggaaccccgtctccgccgtcgccaagtccttcgccggaatctttgccggctgcttcgctcggccggatttcgacaactccaagagcctcggggattccgaggagttcaagtcttcttcctctgtatcgaatgcttcaagagctggtagtcagagagggcgtggctcaaatcgaggtatcagcatcagttcatacaacatattgccagcgaaagaaccaggcattgtgaagttcaccatggaggaaatcttccgagtcacaaggaacttctccccttctttcaagattggccaaggtggttttggtgctgtctataaggccaaactcctagatgggactgttgttgcagtaaagcgtgctaagaagagtatgtatgagaagcatttgggggtggagttccaaagcgagatccaaacactatcacgggtggaacatttgaacttggtcaagttctttggatatttggagcaagaggatgaaaggatcattgttgtggagcatgttccaaatggaacccttagagaacatttagattgcattcatggaagcgttctggaccttgctgcacgtctagatatagcaattgatgtttctcatgctatcacctatcttcatatgtatatagatcatcctatcatccatagagacataaaatcttcaaacattcttctcactgaaaattttcgagctaaagtagcagactttggttttgctagacaagcccctgacagtgactctggcatgacacatatttccacccaaataaaaggaacagctggctacttggaccctgaatacctgaaaacttatcaactaactgaaaagagtgacgtgtattcatttggagttttgcttgttgaacttgtcacaggcagacgccccattgaaccaaaatttgaactcagggagcgaatcacggcaaaatgggtgggtattggtattgtgtactatctgccttcattttattcttctagtttgctatttagtagtttttcataatttcatgaaaaccaacaatatcttctatgacactccattttgctcagtagttaagcatcttttcttcatgattacacaatctcaatccattttgttccaagctttagttggtaagaatgatggagaaggcatttgaaaagacttacatgatgcttaataatgctcacaaaatgatgacatttctataagctccttttagcttattttagtaagagtttatcatacatgcattttctgtaaaggtttttacaatgtcaatcaataaaaaattattattattacttttaaggtaattattataaaatttggtaaacttataatacatcacagtttgtgattgaatgatgatataaaagaaaatgctaaccaatgcccttgggtcattg

SEQ ID NO: 54776 - protein, 397 aa, Glycine max
  peptide (1)..(397): Ceres Seq. ID no. 14307165
TSLQLTLSLLHQPAIFLSLKHKHMTSPYAPRRRSSSDHRTTPGRAPPSPSFASSELSTSSTVSTHRNPVSAVAKSFAGIFAGCFARPDFDNSKSLGDSEEFKSSSSVSNASRAGSQRGRGSNRGISISSYNILPAKEPGIVKFTMEEIFRVTRNFSPSFKIGQGGFGAVYKAKLLDGTVVAVKRAKKSMYEKHLGVEFQSEIQTLSRVEHLNLVKFFGYLEQEDERIIVVEHVPNGTLREHLDCIHGSVLDLAARLDIAIDVSHAITYLHMYIDHPIIHRDIKSSNILLTENFRAKVADFGFARQAPDSDSGMTHISTQIKGTAGYLDPEYLKTYQLTEKSDVYSFGVLLVELVTGRRPIEPKFELRERITAKWVGIGIVYYLPSFYSSSLLFSSFS

SEQ ID NO: 54777 - protein, 374 aa, Glycine max
  peptide (1)..(374): Ceres Seq. ID no. 14307166
MTSPYAPRRRSSSDHRTTPGRAPPSPSFASSELSTSSTVSTHRNPVSAVAKSFAGIFAGCFARPDFDNSKSLGDSEEFKSSSSVSNASRAGSQRGRGSNRGISISSYNILPAKEPGIVKFTMEEIFRVTRNFSPSFKIGQGGFGAVYKAKLLDGTVVAVKRAKKSMYEKHLGVEFQSEIQTLSRVEHLNLVKFFGYLEQEDERIIVVEHVPNGTLREHLDCIHGSVLDLAARLDIAIDVSHAITYLHMYIDHPIIHRDIKSSNILLTENFRAKVADFGFARQAPDSDSGMTHISTQIKGTAGYLDPEYLKTYQLTEKSDVYSFGVLLVELVTGRRPIEPKFELRERITAKWVGIGIVYYLPSFYSSSLLFSSFS

SEQ ID NO: 54778 - protein, 253 aa, Glycine max
  peptide (1)..(253): Ceres Seq. ID no. 14307167
MEEIFRVTRNFSPSFKIGQGGFGAVYKAKLLDGTVVAVKRAKKSMYEKHLGVEFQSEIQTLSRVEHLNLVKFFGYLEQEDERIIVVEHVPNGTLREHLDCIHGSVLDLAARLDIAIDVSHAITYLHMYIDHPIIHRDIKSSNILLTENFRAKVADFGFARQAPDSDSGMTHISTQIKGTAGYLDPEYLKTYQLTEKSDVYSFGVLLVELVTGRRPIEPKFELRERITAKWVGIGIVYYLPSFYSSSLLFSSFS

SEQ ID NO: 54779 - DNA, 1214 bp, Glycine max
  misc_feature (1)..(1214): Ceres Seq. ID no. 14307639
aaaaaatcatcaaagctcaaacccccctctctctactcaaactaaccactctgtttctcttgctctacttttaccctgtttccagtggaacaaatcttcatccaaattaggttttgttttggagaaatgtatgcagagactggtcttttcttcccatatttgcacaacgtctctcacggccttcatcagcttgaggagtactgcaaaacccagaagtccaatgcttcaatggatgaccttgttcagtcttctgccatgtcagagtatgatttggcagctgagggagatctgttcaaagctcctgaacctattattgaagagccaatcatggacatgtcagcggccatctcaatgatgtcttgtggggaagatgtctcgtcacagggactaaagtccactgatattgatattcttcaaaatgatcagtttctgagtgaggtgttctatgaatgtgaaaaggatctcttagaaaaggcagcaatagagtcaccattctctgagattctggaaatcaaggttccttttctgaacattgatgagaacacaattcaagaaaacaagccatttactgacatgcaattagcaaagagtgtcagctcaggaagtttgagctcaatggactggatgcgtggagctgcaatgaagcctgctttcattgatatctctgcaatagatttcaatgcagattatggcatgcggagatcatttagtgaaggagatataaagactcttggtaatggtaacatgaacatcgtccaatcaccccttgagaggccccttcttatcagcaactgcaccagtgaggaacgcttccaaaagctctccagatacaggaataagaagacaaagaggaattttgggaggaaaatcaagtatgcttgcaggaaggcacttgctgacagtcagccaagaatccgtggaagatttgcaaggactgaagaatctgatgtcaagagggaatgaatgacttaaaactgatttagtaggaagaaaatagagttgagtagctatatctgatcaagctatatggaaaaactcagcagtaatatgtgattagaacttatgtggggagtctctgtttgtttgagcagatatttgctgaataaaccaggcctcaaacttcttaggctagttcatctcttatctattgtattaacgtctctatagacggaaataaccttccagatatgtaaatagttttgttgaataatgga

SEQ ID NO: 54780 - protein, 278 aa, Glycine max
  peptide (1)..(278): Ceres Seq. ID no. 14307640
MYAETGLFFPYLHNVSHGLHQLEEYCKTQKSNASMDDLVQSSAMSEYDLAAEGDLFKAPEPIIEEPIMDMSAAISMMSCGEDVSSQGLKSTDIDILQNDQFLSEVFYECEKDLLEKAAIESPFSEILEIKVPFLNIDENTIQENKPFTDMQLAKSVSSGSLSSMDWMRGAAMKPAFIDISAIDFNADYGMRRSFSEGDIKTLGNGNMNIVQSPLERPLLISNCTSEERFQKLSRYRNKKTKRNFGRKIKYACRKALADSQPRIRGRFARTEESDVKRE

SEQ ID NO: 54781 - protein, 244 aa, Glycine max
  peptide (1)..(244): Ceres Seq. ID no. 14307641
MDDLVQSSAMSEYDLAAEGDLFKAPEPIIEEPIMDMSAAISMMSCGEDVSSQGLKSTDIDILQNDQFLSEVFYECEKDLLEKAAIESPFSEILEIKVPFLNIDENTIQENKPFTDMQLAKSVSSGSLSSMDWMRGAAMKPAFIDISAIDFNADYGMRRSFSEGDIKTLGNGNMNIVQSPLERPLLISNCTSEERFQKLSRYRNKKTKRNFGRKIKYACRKALADSQPRIRGRFARTEESDVKRE

SEQ ID NO: 54782 - protein, 235 aa, Glycine max
  peptide (1)..(235): Ceres Seq. ID no. 14307642
MSEYDLAAEGDLFKAPEPIIEEPIMDMSAAISMMSCGEDVSSQGLKSTDIDILQNDQFLSEVFYECEKDLLEKAAIESPFSEILEIKVPFLNIDENTIQENKPFTDMQLAKSVSSGSLSSMDWMRGAAMKPAFIDISAIDFNADYGMRRSFSEGDIKTLGNGNMNIVQSPLERPLLISNCTSEERFQKLSRYRNKKTKRNFGRKIKYACRKALADSQPRIRGRFARTEESDVKRE

SEQ ID NO: 54783 - DNA, 1531 bp, Glycine max
  misc_feature (1)..(1531): Ceres Seq. ID no. 14307253
gaataaatagtaactctaatctaacacgctttctctgctgtgtctttgcagtgagtttcattgcaaagctacttttctctgtttggggataaataaaatgggttgcttttcatgtttcgattcgagttccaaggaggatcacaatctccgtcctcagcaccaacccaatcaacctctcccttctcagatttccagattgccctctggagcagacaagttacggtccagaagtaatggaggttccaaaagagaactgcaacagcctcctcccaccgtccaaattgctgctcaaacatttactttccgtgaacttgccgctgcaactaaaaactttagaccagagtcctttgttggggaaggtggttttggaagggtctacaaaggcaggcttgaaaccactgctcagattgttgctgtcaaacagttagacaaaaatggtcttcagggtaatcgggaattccttgtagaggttctcatgctcagtcttctacatcaccctaaccttgtcaatctcattggatactgtgcggatggggatcaacgcctcctcgtttatgaatttatgcctttgggatcattggaagatcaccttcatgatcttccccctgataaggaaccactagattggaacactagaatgaaaattgctgttggtgctgcaaaaggattagaataccttcacgataaggcaaatcctcctgtcatctacagagacttcaagtcatctaacatattacttgatgaaggataccacccaaaactttctgactttggtcttgcgaagcttggtcctgttggtgacaaatcacatgtttctacccgtgtcatgggaacttatggttactgtgctcctgagtatgctatgactggacagctgactgtgaagtctgatgtatatagttttggggtggtcttcttagagctgattactggccgtaaagcaattgacagcacccagccgcagggagaacagaaccttgtcacatgggcacgtccactttttaatgaccgcaggaagttttcaaagttggctgatcccaggctgcaggggcgatttcccatgcggggtctttaccaggctcttgctgtggcatcaatgtgcattcaagaatcagctgcaacgcgtcctctaattggagatgtggtgacagccctctcttatctggccaaccaggcatatgaccccaatggttatagggggtctagtgatgataaaaggaacagagatgataaaggtggaagaatatccaaaaatgatgaagctgggggatctggacgcagatgggacttggaaggatccgagaaagatgactccccacgagaaactgcaaggattttaaacagagatctagatagagaacgagctgtggctgaagccaagatgtggggagagaacttgagacaaaaaagaaaacaaagtttgcagcagggcagtcttgatgcttaattttctgccttgaggctatggaagatggaagaaaatatggggagcttatctagagaaacaactcaaacagccagccatttaggc

SEQ ID NO: 54784 - protein, 449 aa, Glycine max
  peptide (1)..(449): Ceres Seq. ID no. 14307254
MGCFSCFDSSSKEDHNLRPQHQPNQPLPSQISRLPSGADKLRSRSNGGSKRELQQPPPTVQIAAQTFTFRELAAATKNFRPESFVGEGGFGRVYKGRLETTAQIVAVKQLDKNGLQGNREFLVEVLMLSLLHHPNLVNLIGYCADGDQRLLVYEFMPLGSLEDHLHDLPPDKEPLDWNTRMKIAVGAAKGLEYLHDKANPPVIYRDFKSSNILLDEGYHPKLSDFGLAKLGPVGDKSHVSTRVMGTYGYCAPEYAMTGQLTVKSDVYSFGVVFLELITGRKAIDSTQPQGEQNLVTWARPLFNDRRKFSKLADPRLQGRFPMRGLYQALAVASMCIQESAATRPLIGDVVTALSYLANQAYDPNGYRGSSDDKRNRDDKGGRISKNDEAGGSGRRWDLEGSEKDDSPRETARILNRDLDRERAVAEAKMWGENLRQKRKQSLQQGSLDA

SEQ ID NO: 54785 - protein, 323 aa, Glycine max
  peptide (1)..(323): Ceres Seq. ID no. 14307255
MLSLLHHPNLVNLIGYCADGDQRLLVYEFMPLGSLEDHLHDLPPDKEPLDWNTRMKIAVGAAKGLEYLHDKANPPVIYRDFKSSNILLDEGYHPKLSDFGLAKLGPVGDKSHVSTRVMGTYGYCAPEYAMTGQLTVKSDVYSFGVVFLELITGRKAIDSTQPQGEQNLVTWARPLFNDRRKFSKLADPRLQGRFPMRGLYQALAVASMCIQESAATRPLIGDVVTALSYLANQAYDPNGYRGSSDDKRNRDDKGGRISKNDEAGGSGRRWDLEGSEKDDSPRETARILNRDLDRERAVAEAKMWGENLRQKRKQSLQQGSLDA

SEQ ID NO: 54786 - protein, 294 aa, Glycine max
  peptide (1)..(294): Ceres Seq. ID no. 14307256
MPLGSLEDHLHDLPPDKEPLDWNTRMKIAVGAAKGLEYLHDKANPPVIYRDFKSSNILLDEGYHPKLSDFGLAKLGPVGDKSHVSTRVMGTYGYCAPEYAMTGQLTVKSDVYSFGVVFLELITGRKAIDSTQPQGEQNLVTWARPLFNDRRKFSKLADPRLQGRFPMRGLYQALAVASMCIQESAATRPLIGDVVTALSYLANQAYDPNGYRGSSDDKRNRDDKGGRISKNDEAGGSGRRWDLEGSEKDDSPRETARILNRDLDRERAVAEAKMWGENLRQKRKQSLQQGSLDA

SEQ ID NO: 54787 - DNA, 1217 bp, Glycine max
  misc_feature (1)..(1217): Ceres Seq. ID no. 15178042
gggaaaagggttttacattttattcgttctccggtgagaaacagaaacacacagaagacagagtgagacgcttctcacgatggagggaggagtatcctacgcgcgcatgcctcgggtcaaaatccgcgagctgaaggacgactacgccaagttcgagctccgcgacaccgacgcgagcatcgccaacgcgctgcggcgcgtgatgatcgcggaggtgccgacggtcgccatcgacctcgtggagatcgaggtcaactcctcggtgctcaatgacgagtttatcgctcacaggctgggcctcatccccctcactagcgagcgcgccatgtccatgcgcttctcacgtgactgcgacgcgtgcgacggtgacggacagtgcgagttttgctccgtcgagtttcatcttagggttaagtgcatgactgatcagaccctcgatgttacgagcaaggacctctacagttctgaccctactgtcagtcccgttgatttctctgacccctctgccactgactccgacaacaacagggggattatcattgtgaagttgcggcgcggacaagagctgaagctgagagcgatagctaggaaggggattgggaaggatcatgctaaatggtcacctgctgcaactgtcactttcatgtatgaaccggagattcatataaatgaggatttgatggaaaccttgactctggaagagaaaagagaatgggttgacagtagtccaacccgtgtctttgaaattgatccagtgacacaacaggtgatggtggttgatgctgaggcatacacatatgatgatgaggtgcttaagaaagcagaagctatgggcaagcctgggcttgtagaaatcattgcgaggcaggatagcttcatattcactgtggagtctactggagcggttaaagcttctcaattggttctaaatgccatagaaattctcaagcagaagctggatgctgtgaggctatctgaagatacagtggaggctgatgatcagtttggcgagcttggtgcacatatgcgaggaggttgattaatttgttagaaggatatcagacttgtttcccacaacttgtttcccggaacttgtttcttacttgtctttaactgaatacctgcagaacgtattaacttgttgagccaaggatgctaattagtaattactgtgattaccatttgaagatagatagttatctttcacattttatttc

SEQ ID NO: 54788 - protein, 319 aa, Glycine max
  peptide (1)..(319): Ceres Seq. ID no. 15178043
MEGGVSYARMPRVKIRELKDDYAKFELRDTDASIANALRRVMIAEVPTVAIDLVEIEVNSSVLNDEFIAHRLGLIPLTSERAMSMRFSRDCDACDGDGQCEFCSVEFHLRVKCMTDQTLDVTSKDLYSSDPTVSPVDFSDPSATDSDNNRGIIIVKLRRGQELKLRAIARKGIGKDHAKWSPAATVTFMYEPEIHINEDLMETLTLEEKREWVDSSPTRVFEIDPVTQQVMVVDAEAYTYDDEVLKKAEAMGKPGLVEIIARQDSFIFTVESTGAVKASQLVLNAIEILKQKLDAVRLSEDTVEADDQFGELGAHMRGG

SEQ ID NO: 54789 - protein, 310 aa, Glycine max
  peptide (1)..(310): Ceres Seq. ID no. 15178044
MPRVKIRELKDDYAKFELRDTDASIANALRRVMIAEVPTVAIDLVEIEVNSSVLNDEFIAHRLGLIPLTSERAMSMRFSRDCDACDGDGQCEFCSVEFHLRVKCMTDQTLDVTSKDLYSSDPTVSPVDFSDPSATDSDNNRGIIIVKLRRGQELKLRAIARKGIGKDHAKWSPAATVTFMYEPEIHINEDLMETLTLEEKREWVDSSPTRVFEIDPVTQQVMVVDAEAYTYDDEVLKKAEAMGKPGLVEIIARQDSFIFTVESTGAVKASQLVLNAIEILKQKLDAVRLSEDTVEADDQFGELGAHMRGG

SEQ ID NO: 54790 - protein, 278 aa, Glycine max
  peptide (1)..(278): Ceres Seq. ID no. 15178045
MIAEVPTVAIDLVEIEVNSSVLNDEFIAHRLGLIPLTSERAMSMRFSRDCDACDGDGQCEFCSVEFHLRVKCMTDQTLDVTSKDLYSSDPTVSPVDFSDPSATDSDNNRGIIIVKLRRGQELKLRAIARKGIGKDHAKWSPAATVTFMYEPEIHINEDLMETLTLEEKREWVDSSPTRVFEIDPVTQQVMVVDAEAYTYDDEVLKKAEAMGKPGLVEIIARQDSFIFTVESTGAVKASQLVLNAIEILKQKLDAVRLSEDTVEADDQFGELGAHMRGG

SEQ ID NO: 54791 - DNA, 1539 bp, Glycine max
  misc_feature (1)..(1539): Ceres Seq. ID no. 14313863
acatacatacactgattcgaatgcatcatctcctagtgcaaacacagctatcttaggattggttgtagttgataatagagacaaggaaaaagtagtagatttgagttcttctctgtcaaaggaagacaaaagattgaacaatatgcaccaagattttgttcttccctctccaaaagaaatttctgtgtgcatgacaggaaacagtacaagtagttctagaaccttgaagttgagccgaagtagaagttgtatagcaagtatcatgaggaatttatcttcagattggtttgaagatgaagacgtaattcagaacactcctccaatagggaatgaaaaagccttccctggaagaccagagggctttccgaagaacatttatgcactaaattacaatgccaatgcagagaggctttcatgtaatggccatgggaattctgtgcaaaattcttctgttcatgatgttcagaatgtgaaatcctccactaacaaggaaagagagggtaatggtcccttggctccaaaaggaaaggaaacagaaaatcttaacaggttgagtttactggctgaccatgaggttccggggacaggattggatcccatcttgtctgcaaagaatgtcaaagatattggcttggatcccatgcaagctgatggagaaactcactcacactcacattggccttcaaaattccagaggctacaaagagagatcattgaattctgggatgcgtgtaatgtttcattggttcacaggacttactttttccttctattcaaaggggaaccatcagattctatttatatggaggtagagttgagaagactatcataccttacgcaaactttttcccaaggcaatcaaactgtggaagatggacgaaccctcacacctgagttaagcatgagatatcttagaaaagagaggcaaatgctgagcaagcaaatgcataagcgactgtctaaatatgatagacagaacctgtacttgaaatggggccttcgtttgagttcaaagcataggagtttgcagttggcccatcaattgtggagtgacacaaaagacatggaccacgttagagacagtgcatcaattgttgcaaagctggttggtttagtagagccagaacaggcatttaaggagatgtttggactcaactttaccccacaacccacgagtagaaaatcttttagttggacagccagtgtgaggcatattttgtgactttggattactttttaggtagtagcttggtatggccatgtgaaaatgtagataattcttttctccccttatcttagaaacaaattgctttctgctgtatgcttctaactctgattgctattgattgtaaagaatgtgcaattctatggttgcagatttgttcatctgtcctaggttggttccaggtagaacatcatgaatagttcaatatggattgttacctgggaaaaaatatgcaatgtgattttttacgtgtgtgctttattgtaacagtccattctttagttaacattaagaatcataaaacctagacgaac

SEQ ID NO: 54792 - protein, 406 aa, Glycine max
  peptide (1)..(406): Ceres Seq. ID no. 14313864
HTYTDSNASSPSANTAILGLVVVDNRDKEKVVDLSSSLSKEDKRLNNMHQDFVLPSPKEISVCMTGNSTSSSRTLKLSRSRSCIASIMRNLSSDWFEDEDVIQNTPPIGNEKAFPGRPEGFPKNIYALNYNANAERLSCNGHGNSVQNSSVHDVQNVKSSTNKEREGNGPLAPKGKETENLNRLSLLADHEVPGTGLDPILSAKNVKDIGLDPMQADGETHSHSHWPSKFQRLQREIIEFWDACNVSLVHRTYFFLLFKGEPSDSIYMEVELRRLSYLTQTFSQGNQTVEDGRTLTPELSMRYLRKERQMLSKQMHKRLSKYDRQNLYLKWGLRLSSKHRSLQLAHQLWSDTKDMDHVRDSASIVAKLVGLVEPEQAFKEMFGLNFTPQPTSRKSFSWTASVRHIL

SEQ ID NO: 54793 - protein, 359 aa, Glycine max
  peptide (1)..(359): Ceres Seq. ID no. 14313865
MHQDFVLPSPKEISVCMTGNSTSSSRTLKLSRSRSCIASIMRNLSSDWFEDEDVIQNTPPIGNEKAFPGRPEGFPKNIYALNYNANAERLSCNGHGNSVQNSSVHDVQNVKSSTNKEREGNGPLAPKGKETENLNRLSLLADHEVPGTGLDPILSAKNVKDIGLDPMQADGETHSHSHWPSKFQRLQREIIEFWDACNVSLVHRTYFFLLFKGEPSDSIYMEVELRRLSYLTQTFSQGNQTVEDGRTLTPELSMRYLRKERQMLSKQMHKRLSKYDRQNLYLKWGLRLSSKHRSLQLAHQLWSDTKDMDHVRDSASIVAKLVGLVEPEQAFKEMFGLNFTPQPTSRKSFSWTASVRHIL

SEQ ID NO: 54794 - protein, 343 aa, Glycine max
  peptide (1)..(343): Ceres Seq. ID no. 14313866
MTGNSTSSSRTLKLSRSRSCIASIMRNLSSDWFEDEDVIQNTPPIGNEKAFPGRPEGFPKNIYALNYNANAERLSCNGHGNSVQNSSVHDVQNVKSSTNKEREGNGPLAPKGKETENLNRLSLLADHEVPGTGLDPILSAKNVKDIGLDPMQADGETHSHSHWPSKFQRLQREIIEFWDACNVSLVHRTYFFLLFKGEPSDSIYMEVELRRLSYLTQTFSQGNQTVEDGRTLTPELSMRYLRKERQMLSKQMHKRLSKYDRQNLYLKWGLRLSSKHRSLQLAHQLWSDTKDMDHVRDSASIVAKLVGLVEPEQAFKEMFGLNFTPQPTSRKSFSWTASVRHIL

SEQ ID NO: 54795 - DNA, 1716 bp, Glycine max
  misc_feature (1)..(1716): Ceres Seq. ID no. 14303430
aaggtcccgagtaagatgtttagatccattaatcataacaaggattttgaagtttcacttgcttatgaaagtgagaatcatttgcctcctggtgttacctctcctgaaattgctcgataccagatatctggtttgacagatgcaagtgagaaatactcatctcggaatctgtcatcccccatcaagacaaacatacatttttctcttagtagaagtggaattctttcactggatcgggctgatgctgttattgaaataacagagtgggtggaagttcctagaaagaatttgaccatagagaattcaaccgtttcatcaaatgtttcagctgaatctgctgcgggtaatagttctgaagaaaacaacgaaagcgtgcaaactgatagtgggattaataagacatccaacattagttcagaggagcaagctgctgctgagcctgctacagagaaaaagctgaaaaagcggacctttagggtaccattaaagattgtagagaagataactggatttggaatgtctctatcacaagattttcttgctgaagccaaaagaaaactacaagtactagataaaaaagatgcagacagaaaaagaacagctgagttaaaaaataatttagaaggatatatatatacaactaaggaaaagattgaaactcttgaggagtttgaaaaagtttctacaagtgaggaacgccagtccttcattgagaagcttgatcaggtgcaagattggttgtatacagatggtgaagatgccaatgccacagagtttcaagagcgtctagatcagttaaaagctgttggagatccaattttcttcaggttaaaagagcttacagctcggccagcagcagttgagcatgctaataaatacattgatgagttgaaacagattgttgaggagtggaaagcaaagaagtcttggcttccacaagaacgagtagacgaggtcataaaaagttctgaaaaattgaagaattggttggatgagaaagaagctgagcaaacaaagacttctggattcagtaagccagcatttacatctgaagaagtatatttgaaggtgcttgatctgcaaaccaaggttgccagtattaatagaattcccaagcccaaacctaaggttcagaagcccgtaaaaaatgaaaccgaaagcagtgagcagaatacagagaattctgattctaactcagctgatagttcctcttcaagtgattcatccgttaacagttcagaaggcacaagcgaagagacggtaactgagcaaactgaaggtcatgatgagctatgattaacctggcatacatgttaggccggtttgaatcatctacctgcaacgtttttatagtcagagatgtagactggtaatggtagaattaataggtgaaaaggaggcagtgtcggttctcggcgagcaggagaatagagttgaggcaacatttgctggttgagttctaaaattttgaggttagatggctactactgtagtagatgatttattacccttttatatttaagggggcaacttgtaatttgcagtcatatgaaagcttgtatttgccgaaacacaatgtgataggggaagaaaaaaaaagaaaaactcacgagatttgatttgctcagaacatataggaattttgcttgagtgactcgtagttctaaacgatttttgtttttaattaatttagcagatacatcttatcttattttt

SEQ ID NO: 54796 - protein, 431 aa, Glycine max
  peptide (1)..(431): Ceres Seq. ID no. 14303431
KVPSKMFRSINHNKDFEVSLAYESENHLPPGVTSPEIARYQISGLTDASEKYSSRNLSSPIKTNIHFSLSRSGILSLDRADAVIEITEWVEVPRKNLTIENSTVSSNVSAESAAGNSSEENNESVQTDSGINKTSNISSEEQAAAEPATEKKLKKRTFRVPLKIVEKITGFGMSLSQDFLAEAKRKLQVLDKKDADRKRTAELKNNLEGYIYTTKEKIETLEEFEKVSTSEERQSFIEKLDQVQDWLYTDGEDANATEFQERLDQLKAVGDPIFFRLKELTARPAAVEHANKYIDELKQIVEEWKAKKSWLPQERVDEVIKSSEKLKNWLDEKEAEQTKTSGFSKPAFTSEEVYLKVLDLQTKVASINRIPKPKPKVQKPVKNETESSEQNTENSDSNSADSSSSSDSSVNSSEGTSEETVTEQTEGHDEL

SEQ ID NO: 54797 - protein, 426 aa, Glycine max
  peptide (1)..(426): Ceres Seq. ID no. 14303432
MFRSINHNKDFEVSLAYESENHLPPGVTSPEIARYQISGLTDASEKYSSRNLSSPIKTNIHFSLSRSGILSLDRADAVIEITEWVEVPRKNLTIENSTVSSNVSAESAAGNSSEENNESVQTDSGINKTSNISSEEQAAAEPATEKKLKKRTFRVPLKIVEKITGFGMSLSQDFLAEAKRKLQVLDKKDADRKRTAELKNNLEGYIYTTKEKIETLEEFEKVSTSEERQSFIEKLDQVQDWLYTDGEDANATEFQERLDQLKAVGDPIFFRLKELTARPAAVEHANKYIDELKQIVEEWKAKKSWLPQERVDEVIKSSEKLKNWLDEKEAEQTKTSGFSKPAFTSEEVYLKVLDLQTKVASINRIPKPKPKVQKPVKNETESSEQNTENSDSNSADSSSSSDSSVNSSEGTSEETVTEQTEGHDEL

SEQ ID NO: 54798 - protein, 259 aa, Glycine max
  peptide (1)..(259): Ceres Seq. ID no. 14303433
MSLSQDFLAEAKRKLQVLDKKDADRKRTAELKNNLEGYIYTTKEKIETLEEFEKVSTSEERQSFIEKLDQVQDWLYTDGEDANATEFQERLDQLKAVGDPIFFRLKELTARPAAVEHANKYIDELKQIVEEWKAKKSWLPQERVDEVIKSSEKLKNWLDEKEAEQTKTSGFSKPAFTSEEVYLKVLDLQTKVASINRIPKPKPKVQKPVKNETESSEQNTENSDSNSADSSSSSDSSVNSSEGTSEETVTEQTEGHDEL

SEQ ID NO: 54799 - DNA, 1371 bp, Glycine max
  misc_feature (1)..(1371): Ceres Seq. ID no. 14303427
gaacaggagaagagaaaatgttgaggaaggaggagtggaggggaacggatctgctgggtgggactagataaagtgaagcaagctgacaagactaagggaagattggatggtggaaatggaatcggcagctgaaaaccctaattacccggcggtggactacaagcgaccttccatcttgtcatttcctcggaggcccgccctcagagttacatccgagttcgatagtgaaagcgcagtcttcttccataagatttcctgcaagttgttggacagccttgccaagttcaagttttcgttcaaccacagcggtaagggcggcgacatctccgaacctcaattcagctttgtctccaagcaccttagcctccactacgacctcgaagaccataatgctctcgttaagacctccatcgatcttgctcccagtttgcaactcactgcttctcatgatctcaaggctcaacaaggagaggttaccgtgcttgcaaacctcgccgatcctgcctattcacttcaactatctactccacttccatccgttggattgccaaaagctaccttcagatttcctctgggtgaactttcgctgcaggagaaacaagaggaggaagtcaataatttgttgtcagtcgatggggttcttaaaggacaattgtttaatgggctctgctctgcccattacaaggacgaagaactgaaattaagatatggctataaggacgatgaaatctcatttcttccaatactttcacttccttcaaatgccctgtcatttgcatttaagcgtcggtttggtccttccgacaaattaagttactggtacaattgcgattccaactattggagtgctgtctacaagcgcacctatggtaaagatttcaaatttaaagctggttatgattcagagattcgccttggctgggcatctctttgggttggagatgaaggtgggaaagccaaaacagctccgatgcagatgaaagttcaattcatgctacaagtgccacaggacgacataaaatcttctgctttgatgtttcggattaagaaaagatgggacttttaaggctctactggtgactttacctgttttttatatataaaaaatgggtatttgactttgggcagttccattgtgttttagtttgttgcatccacagtccactctttgcaaaagggggtattgactatttgacaggttgatatttctccaagtcagctaattgcttcgtggtgtgacaagtaagaacaattttcaatcgtacaaaatttgtaaagatgattttctgatttgtaagttggcagattatggttatcgaatgcagacagtgctgaaattggttatgcatttggctaaaggccattcaactt

SEQ ID NO: 54800 - protein, 319 aa, Glycine max
  peptide (1)..(319): Ceres Seq. ID no. 14303428
MVEMESAAENPNYPAVDYKRPSILSFPRRPALRVTSEFDSESAVFFHKISCKLLDSLAKFKFSFNHSGKGGDISEPQFSFVSKHLSLHYDLEDHNALVKTSIDLAPSLQLTASHDLKAQQGEVTVLANLADPAYSLQLSTPLPSVGLPKATFRFPLGELSLQEKQEEEVNNLLSVDGVLKGQLFNGLCSAHYKDEELKLRYGYKDDEISFLPILSLPSNALSFAFKRRFGPSDKLSYWYNCDSNYWSAVYKRTYGKDFKFKAGYDSEIRLGWASLWVGDEGGKAKTAPMQMKVQFMLQVPQDDIKSSALMFRIKKRWDF

SEQ ID NO: 54801 - protein, 316 aa, Glycine max
  peptide (1)..(316): Ceres Seq. ID no. 14303429
MESAAENPNYPAVDYKRPSILSFPRRPALRVTSEFDSESAVFFHKISCKLLDSLAKFKFSFNHSGKGGDISEPQFSFVSKHLSLHYDLEDHNALVKTSIDLAPSLQLTASHDLKAQQGEVTVLANLADPAYSLQLSTPLPSVGLPKATFRFPLGELSLQEKQEEEVNNLLSVDGVLKGQLFNGLCSAHYKDEELKLRYGYKDDEISFLPILSLPSNALSFAFKRRFGPSDKLSYWYNCDSNYWSAVYKRTYGKDFKFKAGYDSEIRLGWASLWVGDEGGKAKTAPMQMKVQFMLQVPQDDIKSSALMFRIKKRWDF

SEQ ID NO: 54802 - DNA, 1117 bp, Glycine max
  misc_feature (1)..(1117): Ceres Seq. ID no. 14307797
gacacgcatctatacttgtccagaagaagtaagatccatgaactaacattcccacacgctcgcttcaccatatttgccacccttttaacctcacttcttagggttattttgctcccttttccttgtttgggaattgggtttggtttggtttttcttggttgtaaaaggaaacaaagaaagaactaagatgggaagaggtagggtacagctgaagaggatagagaacaagatcaatcgccaggtaactttctccaaaaggagaggtgggttgctcaagaaagctcatgaaatatctgtactctgtgatgctgaggtagctttgattatcttctctcacaaaggaaagctctttgagtatgctactgattcatgcatggagaagatactggaacgccatgaaaggtatgcctatgcagagaggcagctagtagcaaatgattctgagacacaggaaaactggaccattgaatacactagactgaaggcaaaaattgaccttttacagagaaaccacaggcactatatgggagaagatttggcttcaatgagcctcaaagagcttcagagtttggagcagcagttggttactggtatcaaaaacatccgcacaaggaggaatgatctcatgtccgagtccatttctgagcttcagaaaaaggagaaaaggatacaagaggagaataacacccttgcaaagaagatcaaggagaaagagcaggctgtagcacagcaagctgcacaatgggagcagccaaactacagggttgatacatctttcatgccacagcagcaaccccttcccaccagtttgaacatatgtggcaataattactgccaggaagctgcaccagaactaggaaggaacggtctagacctgaccctggaaccactctattcttgcaaccttggatgcttctgaaaagttgtttcttctgagttggattatattatataagtgctggcatatatgaactactataagtagtctgtttgaatgttttatatgtattttggtctatggcttttccctctactttgaagacattattttgaattgcttctgttgtaaacaaattgaatttgaaatctaattgtgtatttttgaaatatgttaaag

SEQ ID NO: 54803 - protein, 243 aa, Glycine max
  peptide (1)..(243): Ceres Seq. ID no. 14307798
MGRGRVQLKRIENKINRQVTFSKRRGGLLKKAHEISVLCDAEVALIIFSHKGKLFEYATDSCMEKILERHERYAYAERQLVANDSETQENWTIEYTRLKAKIDLLQRNHRHYMGEDLASMSLKELQSLEQQLVTGIKNIRTRRNDLMSESISELQKKEKRIQEENNTLAKKIKEKEQAVAQQAAQWEQPNYRVDTSFMPQQQPLPTSLNICGNNYCQEAAPELGRNGLDLTLEPLYSCNLGCF

SEQ ID NO: 54804 - protein, 181 aa, Glycine max
  peptide (1)..(181): Ceres Seq. ID no. 14307799
MEKILERHERYAYAERQLVANDSETQENWTIEYTRLKAKIDLLQRNHRHYMGEDLASMSLKELQSLEQQLVTGIKNIRTRRNDLMSESISELQKKEKRIQEENNTLAKKIKEKEQAVAQQAAQWEQPNYRVDTSFMPQQQPLPTSLNICGNNYCQEAAPELGRNGLDLTLEPLYSCNLGCF

SEQ ID NO: 54805 - protein, 131 aa, Glycine max
  peptide (1)..(131): Ceres Seq. ID no. 14307800
MGEDLASMSLKELQSLEQQLVTGIKNIRTRRNDLMSESISELQKKEKRIQEENNTLAKKIKEKEQAVAQQAAQWEQPNYRVDTSFMPQQQPLPTSLNICGNNYCQEAAPELGRNGLDLTLEPLYSCNLGCF

SEQ ID NO: 54806 - DNA, 1097 bp, Glycine max
  misc_feature (1)..(1097): Ceres Seq. ID no. 14307186
agcctcctcaatttctctctctctctctctctctaacacggagtgatggctgtgcagctgtgggaaaccctgaaggaagccatcgtagcctacactggcttctctccttccaccttcttcacggtgctggcgcttctttttgccgtttactacgtcgtcacgggtctctttggctcctccgacgatcaccatcaccgccaccgccacgtcgaggaggaggaggagatgccgcctctgcgccccccggttcagctcggcgagatcacagcggaggagctcaaggcctacgacggcaccgatcccgagaagcccttgctcatggccatcaaggcccagatctatgatgtctcccagagcaggatgttttatggacctggtggaccttatgccctatttgctggcaaggatgctagcagagccttagcaaagatgtcttttgaagagaaagatctgactggggatatttctggtcttggcccgtttgagcttgatgccttacaagactgggaatataagtttatgagcaagtatgtgaaggttggaactgttaaaagtgaagaagttccagtaactgaaccagagtccattggtgaaccattagaatctacttcccgtgatattgatgctgctgccaagcctactgatactgaagatggcaaattagaaactccagctgttaaaagtgatgaaaccccttcaaatgttgatgccgataaagagtaatggctgagttgtgccacaaatacccctgcagaaaatggagaaaaaaagaacttcatagtaaagactgaccaaatgtaaggcaagttttcgaagatagtctaggccacctcttctgcaccgtgcctttgcttgaatatttagtctcataaataatgaattgccgggtcaatttatgtgtggatccaaaaaaaaggggagtaactttaagttagatcttcttttagaattccgtagtatgtataccatttaaatgcaacagagcaatgacatttggggtcttatcttacttaggctgagtaatgaatgatcttttgtttaattgaataatacgttgctctatggcaagaataaatgaagggtaagtcttttgaacc

SEQ ID NO: 54807 - protein, 225 aa, Glycine max
  peptide (1)..(225): Ceres Seq. ID no. 14307187
MAVQLWETLKEAIVAYTGFSPSTFFTVLALLFAVYYVVTGLFGSSDDHHHRHRHVEEEEEMPPLRPPVQLGEITAEELKAYDGTDPEKPLLMAIKAQIYDVSQSRMFYGPGGPYALFAGKDASRALAKMSFEEKDLTGDISGLGPFELDALQDWEYKFMSKYVKVGTVKSEEVPVTEPESIGEPLESTSRDIDAAAKPTDTEDGKLETPAVKSDETPSNVDADKE

SEQ ID NO: 54808 - protein, 165 aa, Glycine max
  peptide (1)..(165): Ceres Seq. ID no. 14307188
MPPLRPPVQLGEITAEELKAYDGTDPEKPLLMAIKAQIYDVSQSRMFYGPGGPYALFAGKDASRALAKMSFEEKDLTGDISGLGPFELDALQDWEYKFMSKYVKVGTVKSEEVPVTEPESIGEPLESTSRDIDAAAKPTDTEDGKLETPAVKSDETPSNVDADKE

SEQ ID NO: 54809 - protein, 134 aa, Glycine max
  peptide (1)..(134): Ceres Seq. ID no. 14307189
MAIKAQIYDVSQSRMFYGPGGPYALFAGKDASRALAKMSFEEKDLTGDISGLGPFELDALQDWEYKFMSKYVKVGTVKSEEVPVTEPESIGEPLESTSRDIDAAAKPTDTEDGKLETPAVKSDETPSNVDADKE

SEQ ID NO: 54810 - DNA, 1285 bp, Glycine max
  misc_feature (1)..(1285): Ceres Seq. ID no. 15170866
gagagtcagtgtacgcagaagagtaaaatcgattggcgatgatggagttgaaagagattcagagactcgaaggccacaccgataaggtttggagcttggcctggaacccgaccaccggtcacgccggtatcccactcgtcttcgcttcttgcagcggcgacaaaaccgtccgaatctgggagcagaacctctcctctggcctctgggcctgcacggcggttctggatgaaacgcacactcgaactgttcgatcttgtgcttggtcaccgtcgggtaagctattggccactgcaagcttcgatgccaccactgccatttgggaaaatgttggtggtgattttgagtgtgtttctactttggagggacacgaaaatgaagtcaagtgtgtgtcttggaacgcggctgggacgttgcttgcaacttgtagtagagataagtctgtttggatatgggaagtgctgcctgggaatgagtttgagtgtgtgtcagtgctgcaaggacactcgcaggatgtgaaaatggtgaagtggcatcccacagaggatatcttgttttcatgtagctacgataatagtgttaaggtttgggcggatgaaggtgatagtgatgattggcagtgtgttcaaacgcttggggaacccaataacggtcatacttccactgtttgggccctctccttcaatgtgagtggtgacaaaatggttacgtgtagtgatgatcttacactgaaggtatgggaaacagaaagtgtagggacgcaatctggtggtggatttgcaccttggacacatctttgcactctttcagggtatcatgatcggacaatattctcagttcattggtcaagagaaggtatctttgccagtggagccgcagataatgctatacggctttttgtggatgacaatgaaagtcaggttggtggtcctctctacaagttgctgctgaagaaggagaaggcccatgacatggatataaattctgtgcagtggagccctggggagaagccggtactagcctctgcaagcgatgatgggacaatcaaggtgtgggagttgacatcatactagttttccacatttgctgtatgagtagcagatattttatactggaggagcctaatagaagtgctagatgtgcaggcatcctcatagctatttttcttttcttagttatatttactaaaattttacaacagacattgaatattatatttttttaggggagtcagtagtgtgactgtaaattgtaattactgtcacaactaaactttacatttttgctc

SEQ ID NO: 54811 - protein, 343 aa, Glycine max
  peptide (1)..(343): Ceres Seq. ID no. 15170867
MMELKEIQRLEGHTDKVWSLAWNPTTGHAGIPLVFASCSGDKTVRIWEQNLSSGLWACTAVLDETHTRTVRSCAWSPSGKLLATASFDATTAIWENVGGDFECVSTLEGHENEVKCVSWNAAGTLLATCSRDKSVWIWEVLPGNEFECVSVLQGHSQDVKMVKWHPTEDILFSCSYDNSVKVWADEGDSDDWQCVQTLGEPNNGHTSTVWALSFNVSGDKMVTCSDDLTLKVWETESVGTQSGGGFAPWTHLCTLSGYHDRTIFSVHWSREGIFASGAADNAIRLFVDDNESQVGGPLYKLLLKKEKAHDMDINSVQWSPGEKPVLASASDDGTIKVWELTSY

SEQ ID NO: 54812 - protein, 342 aa, Glycine max
  peptide (1)..(342): Ceres Seq. ID no. 15170868
MELKEIQRLEGHTDKVWSLAWNPTTGHAGIPLVFASCSGDKTVRIWEQNLSSGLWACTAVLDETHTRTVRSCAWSPSGKLLATASFDATTAIWENVGGDFECVSTLEGHENEVKCVSWNAAGTLLATCSRDKSVWIWEVLPGNEFECVSVLQGHSQDVKMVKWHPTEDILFSCSYDNSVKVWADEGDSDDWQCVQTLGEPNNGHTSTVWALSFNVSGDKMVTCSDDLTLKVWETESVGTQSGGGFAPWTHLCTLSGYHDRTIFSVHWSREGIFASGAADNAIRLFVDDNESQVGGPLYKLLLKKEKAHDMDINSVQWSPGEKPVLASASDDGTIKVWELTSY

SEQ ID NO: 54813 - protein, 183 aa, Glycine max
  peptide (1)..(183): Ceres Seq. ID no. 15170869
MVKWHPTEDILFSCSYDNSVKVWADEGDSDDWQCVQTLGEPNNGHTSTVWALSFNVSGDKMVTCSDDLTLKVWETESVGTQSGGGFAPWTHLCTLSGYHDRTIFSVHWSREGIFASGAADNAIRLFVDDNESQVGGPLYKLLLKKEKAHDMDINSVQWSPGEKPVLASASDDGTIKVWELTSY

SEQ ID NO: 54814 - DNA, 1507 bp, Glycine max
  misc_feature (1)..(1507): Ceres Seq. ID no. 15170420
agaagaatcgtggaatcttcatgcaatgcttcttcccattttcacactttgttaacacttaattttctgatcccaatctcgttaagcttcttagcaacaacacaaaatgagcgccatctctttcagttccatccattttcacacttggaaaaaccccaaggggtttggaaaggtgagaaaacaaccacatgggaagctacttgtaaagtgttccagccagagtgggaacccatcttcttcgcaaaatgcggttcgtgttggtgttgttggagctagtggctacactggttctgaggttctgcgactcttggcaaatcatccacagtttgggattgcactgatgactgcggataggaaagctgggcagccaatctcttctgtgttcccacatttgagcacttgggacttgccagatttgatttcaataaaggatgcaaacttttctgatgtggatgctgtattctgttgtttgcctcatggaactactcaggaaattattaaaggcctaccaaagcacctgaagattgttgatctttctgcagattttcgtctaaaagatctttctgagtatgaagaatggtatggtcagccgcatagagcaccagatttacagaaagaagctatatacggattgacagaggttttaagggaggaaatacagaatgctcgtctagttgctaatcctggttgttatccaacttctgttcaacttcctcttgtcccattgataaaggctagtcttattgagcttaaaaatattatcattgatgctaaatctggtgtgagtggagcaggacgcagtgccaaagaaaatttattgttcactgaagtaactgaaggtctcaattcttatggtgttacccggcatcgccatgttcctgaaattgaacagggacttgctgatgcttcaggttcaaaagtaactgttagttttacaccacacctaattccaatgagccgtggtatgcaatcaactatttatgtggaaatggctccaggagtgagaattgaggacctgtaccagcaactgaagctctcatatgaggacgaagaatttgttgttgtgttggaaaatggagccattcctcgaactcacagcgttaaagggactaattactgtttaatcaatgtttttccagaccgaattcctggaagagcaatcattatatctgttattgataatttagtgaagggagcttcaggtcaagctttacaaaaccttaatttgttaatgggatttccagaaaatttgggacttcattacctgcctctttttccttagagtagttgtcttgtccaactagagctccaaatctgaagccacagttccaccaaaatacttgatggagcagaggaaatattttcaagttatgtattttcattctctagattgtaatgtgagattcttcaagaatttagaagggaattggttatgacattggcagggatattaaagcaatttctgttttttttaaaaaaaaaaaaaaaaaaaaaaaaaaaaaaaaat

SEQ ID NO: 54815 - protein, 391 aa, Glycine max
  peptide (1)..(391): Ceres Seq. ID no. 15170421
MSAISFSSIHFHTWKNPKGFGKVRKQPHGKLLVKCSSQSGNPSSSQNAVRVGVVGASGYTGSEVLRLLANHPQFGIALMTADRKAGQPISSVFPHLSTWDLPDLISIKDANFSDVDAVFCCLPHGTTQEIIKGLPKHLKIVDLSADFRLKDLSEYEEWYGQPHRAPDLQKEAIYGLTEVLREEIQNARLVANPGCYPTSVQLPLVPLIKASLIELKNIIIDAKSGVSGAGRSAKENLLFTEVTEGLNSYGVTRHRHVPEIEQGLADASGSKVTVSFTPHLIPMSRGMQSTIYVEMAPGVRIEDLYQQLKLSYEDEEFVVVLENGAIPRTHSVKGTNYCLINVFPDRIPGRAIIISVIDNLVKGASGQALQNLNLLMGFPENLGLHYLPLFP

SEQ ID NO: 54816 - protein, 313 aa, Glycine max
  peptide (1)..(313): Ceres Seq. ID no. 15170422
MTADRKAGQPISSVFPHLSTWDLPDLISIKDANFSDVDAVFCCLPHGTTQEIIKGLPKHLKIVDLSADFRLKDLSEYEEWYGQPHRAPDLQKEAIYGLTEVLREEIQNARLVANPGCYPTSVQLPLVPLIKASLIELKNIIIDAKSGVSGAGRSAKENLLFTEVTEGLNSYGVTRHRHVPEIEQGLADASGSKVTVSFTPHLIPMSRGMQSTIYVEMAPGVRIEDLYQQLKLSYEDEEFVVVLENGAIPRTHSVKGTNYCLINVFPDRIPGRAIIISVIDNLVKGASGQALQNLNLLMGFPENLGLHYLPLFP

SEQ ID NO: 54817 - DNA, 1562 bp, Glycine max
  misc_feature (1)..(1562): Ceres Seq. ID no. 14307879
tcctttaagccagcacgccaaaaagaacttctttgcaaaacacgactgaggaccttgcaacaccggcgtctccctccttcctctcctctctctgcctttacctttgattgtaggtttttcattatttggcggcgaaacagggttgaatatttttgttttagcgtctgagctttgaattacagagcaaagtgaagcgtgaacatggtgatgcatctaaacgggacaccgtgcgctctcggattccacatgcctgcggagtgggaaacccacgcgcagtgctggatgggttggcctgaacgtgccgataactggcgtgacggcgccgttcacgcccaacgcgtgtttgcgagggtagcgtcagcaatctcaagattcgagtctgtaacagtttgtgttagttctgcacagtgggagaacgcgcggagtcagctaccggagcatatcagggtcgttgagatgaacatgaacgattcttggttccgtgatattggacctacttttgttatgagaagaagcaccacgccggaatctggtgatgcagtgagcaggattgcagggattgactggaattttaatagttggggaggcttagaagatggatgttactgtgattggagtcttgatttgcttgtggctaagaagattttgggaattgagaagattcctagattttcacattcgatggtgcttgaaggtggaagcatccatgtggatggagaaggaacttgtcttaccacagaagagtgcctcttgaacaagaacaggaaccctcacttgagtaagaaccaaatagaggatgaacttaagacatatcttggaatccggaaggttatatggttgcctcgtggattatatggagatgatgacacaaatggtcatattgataacatgtgctgttttgtgaggcctggtgtggttatgctgtcttggattgatgatgaaactgatcctcagtatgaaagatctgtagaagcatattctttgctttcaaatgaaacagatgctaatggtagaaagtttgaaatcattaaactccatgttcccagtccactctatatgacagaggacgaggctgctggggtttctctggataatgaggctaagccaagacttccaggtactaggcttgctgcttcctatgtaaacttttacattgcaaataaagctatcattgcaccacaatttggagataaaaagtgggatgatgaagctgtccgagtcctatctaaggccttccctcatcatgaagttgtgggaattgaaggtgccagggagattgttttggccggtggaaatatacattgcattactcagcaacaaccagccatttgagcggcggcactctcgatattcgttgataggtgttgtattgttgcttatgggtttccagaataaattgatttggttaaattgcttggttagttagttggtttgctccaattgggcatgtatgctaatttttggagattagcaaaatccaataattgcagcctggatgaaagtgtatgcaaatagatggaaaaccgttgaaaatataaaacctaatttatatttaaattggc

SEQ ID NO: 54818 - protein, 376 aa, Glycine max
  peptide (1)..(376): Ceres Seq. ID no. 14307880
MVMHLNGTPCALGFHMPAEWETHAQCWMGWPERADNWRDGAVHAQRVFARVASAISRFESVTVCVSSAQWENARSQLPEHIRVVEMNMNDSWFRDIGPTFVMRRSTTPESGDAVSRIAGIDWNFNSWGGLEDGCYCDWSLDLLVAKKILGIEKIPRFSHSMVLEGGSIHVDGEGTCLTTEECLLNKNRNPHLSKNQIEDELKTYLGIRKVIWLPRGLYGDDDTNGHIDNMCCFVRPGVVMLSWIDDETDPQYERSVEAYSLLSNETDANGRKFEIIKLHVPSPLYMTEDEAAGVSLDNEAKPRLPGTRLAASYVNFYIANKAIIAPQFGDKKWDDEAVRVLSKAFPHHEVVGIEGAREIVLAGGNIHCITQQQPAI

SEQ ID NO: 54819 - protein, 374 aa, Glycine max
  peptide (1)..(374): Ceres Seq. ID no. 14307881
MHLNGTPCALGFHMPAEWETHAQCWMGWPERADNWRDGAVHAQRVFARVASAISRFESVTVCVSSAQWENARSQLPEHIRVVEMNMNDSWFRDIGPTFVMRRSTTPESGDAVSRIAGIDWNFNSWGGLEDGCYCDWSLDLLVAKKILGIEKIPRFSHSMVLEGGSIHVDGEGTCLTTEECLLNKNRNPHLSKNQIEDELKTYLGIRKVIWLPRGLYGDDDTNGHIDNMCCFVRPGVVMLSWIDDETDPQYERSVEAYSLLSNETDANGRKFEIIKLHVPSPLYMTEDEAAGVSLDNEAKPRLPGTRLAASYVNFYIANKAIIAPQFGDKKWDDEAVRVLSKAFPHHEVVGIEGAREIVLAGGNIHCITQQQPAI

SEQ ID NO: 54820 - protein, 361 aa, Glycine max
  peptide (1)..(361): Ceres Seq. ID no. 14307882
MPAEWETHAQCWMGWPERADNWRDGAVHAQRVFARVASAISRFESVTVCVSSAQWENARSQLPEHIRVVEMNMNDSWFRDIGPTFVMRRSTTPESGDAVSRIAGIDWNFNSWGGLEDGCYCDWSLDLLVAKKILGIEKIPRFSHSMVLEGGSIHVDGEGTCLTTEECLLNKNRNPHLSKNQIEDELKTYLGIRKVIWLPRGLYGDDDTNGHIDNMCCFVRPGVVMLSWIDDETDPQYERSVEAYSLLSNETDANGRKFEIIKLHVPSPLYMTEDEAAGVSLDNEAKPRLPGTRLAASYVNFYIANKAIIAPQFGDKKWDDEAVRVLSKAFPHHEVVGIEGAREIVLAGGNIHCITQQQPAI

SEQ ID NO: 54821 - DNA, 1415 bp, Glycine max
  misc_feature (1)..(1415): Ceres Seq. ID no. 15169316
aaatacttgctattcgggatcatggcgatgtttgtttgaaacaacagcaacggagaggatgagaagagagtgaagtttgtgaaagagatggcactcgtaacaacaaacccaaccatcaatgaggggcctctgttcgccgaagttgacatgggttccgacttcaacgccccaacggttcgagctaccgttgttcaagcctccaccatcttctacgacacaccagccaccttagataaggctgagaggttgttggctgaagctactagctatgggtcccagcttgtggtgtttccagaagcctttgtgggtggctacccgcgtggttcagcttttggtctttcgatcggaaatcgcactgttaagggtagagaggagtttcgcaagtatcattctgcagccattgatgtgcctggtcctgaagttgatagattggcagcaatggcagggaagtataaagtacatttagtgatgggtgtgatagagagggacggctacacactttattgcaccgttctgttctttgattctcagggtcattacctaggaaagcacaggaaaatcatgccaactgcattggagcgggttatctggggatttggggatggatcaaccattccagtgtttgaaactcccgttggaaaaataggtgctgccatttgttgggagaacagaatgccactattaaggacagcaatgtatgccaaaggtgtggagatatattgtgctccaacagctgatgccagggatgtgtggcaggcatcaatgacccatattgcacttgaaggtggatgttttgttttgtcagcaaaccagttttgtcggagaagggattacccaccccctccagagtatgtttttgctggcacagaagtggacctgacaccggattctgttgtgtgcgccggaggtagtgtcattatatcaccattaggggctgttctggctggaccaaattatgacggggaggcgctaatctcagcagaccttgatcttggagaaattgcaagagctaagtttgattttgatgtggttggacactattcaaggcctgaagtgcttagcttaactgtaaaggaccatccaacgaaccccgttacttttacatcaacatcgacaaaaattgaagacaagaccaagtagtttcttcctttcatggcttgcaacttccaaacctccagttctggacctgtccacatagccttatttgaccccttgtatgttaactcttgtgtccatatatgaaaggttatttgggcattttgtcgtggtttatatcaccacattaaaatgacattggaactcatatttgctatttttcacataatttcataagctaaaaattaagcttatgaaagtaaccttgcacgaaagcttaagcaaatcaactggttgttttaattatcgagtttttactg

SEQ ID NO: 54822 - protein, 350 aa, Glycine max
  peptide (1)..(350): Ceres Seq. ID no. 15169317
MALVTTNPTINEGPLFAEVDMGSDFNAPTVRATVVQASTIFYDTPATLDKAERLLAEATSYGSQLVVFPEAFVGGYPRGSAFGLSIGNRTVKGREEFRKYHSAAIDVPGPEVDRLAAMAGKYKVHLVMGVIERDGYTLYCTVLFFDSQGHYLGKHRKIMPTALERVIWGFGDGSTIPVFETPVGKIGAAICWENRMPLLRTAMYAKGVEIYCAPTADARDVWQASMTHIALEGGCFVLSANQFCRRRDYPPPPEYVFAGTEVDLTPDSVVCAGGSVIISPLGAVLAGPNYDGEALISADLDLGEIARAKFDFDVVGHYSRPEVLSLTVKDHPTNPVTFTSTSTKIEDKTK

SEQ ID NO: 54823 - protein, 330 aa, Glycine max
  peptide (1)..(330): Ceres Seq. ID no. 15169318
MGSDFNAPTVRATVVQASTIFYDTPATLDKAERLLAEATSYGSQLVVFPEAFVGGYPRGSAFGLSIGNRTVKGREEFRKYHSAAIDVPGPEVDRLAAMAGKYKVHLVMGVIERDGYTLYCTVLFFDSQGHYLGKHRKIMPTALERVIWGFGDGSTIPVFETPVGKIGAAICWENRMPLLRTAMYAKGVEIYCAPTADARDVWQASMTHIALEGGCFVLSANQFCRRRDYPPPPEYVFAGTEVDLTPDSVVCAGGSVIISPLGAVLAGPNYDGEALISADLDLGEIARAKFDFDVVGHYSRPEVLSLTVKDHPTNPVTFTSTSTKIEDKTK

SEQ ID NO: 54824 - protein, 233 aa, Glycine max
  peptide (1)..(233): Ceres Seq. ID no. 15169319
MAGKYKVHLVMGVIERDGYTLYCTVLFFDSQGHYLGKHRKIMPTALERVIWGFGDGSTIPVFETPVGKIGAAICWENRMPLLRTAMYAKGVEIYCAPTADARDVWQASMTHIALEGGCFVLSANQFCRRRDYPPPPEYVFAGTEVDLTPDSVVCAGGSVIISPLGAVLAGPNYDGEALISADLDLGEIARAKFDFDVVGHYSRPEVLSLTVKDHPTNPVTFTSTSTKIEDKTK

SEQ ID NO: 54825 - DNA, 1440 bp, Glycine max
  misc_feature (1)..(1440): Ceres Seq. ID no. 13639469
agatgtttctataatggaggttggattaggtggaaaatatgatgcaacgaatgtggtcccaacacctattgtgtgtggtataacctcccttgggtatgaccacatggagattcttgggaatactcttggagaaattgctggtgagaaagctggtatcttcaagcatcggattccagcatttactgtgcctcaacctgatgaagcaatgcatgtactcagagagaaggcttctcagttaaatgtacctcttcaagtggtaaccccattagatgccaaattgctaaatggttcaagactagcgcttggaggtgaacaccaatatataaatgctggtcttgctattgcattatgctctacgtggctgaaaatgaatgggcatcttgaagactcgtacttgaaacatatatgactcatctgcctgtatgaagcaacacactttaccagagaagttcataaaagggttaacaactgcaagtttgcaaggaagggctcagattgttcctgatcagttcatcaatgatgaaataccaaatgaacttgtcttctttttagatggggctcatagtcctgaaagcatggaagcatgtgccaggtggttttctcttgctattaaagatcaagaccagattttgtttcatcagaaacttgataattctaacttctcaaaccaagtagtgaagatgcacaatggtgaaactgtacagaagaaatccacacagattttgctgttcaattgtatgtctgagcgaaaccctcagttgcttcttccccacttgatgaaaacatgtgctgatcatggtgtctacttcaagaaggcactctttgtacctggtttatcagtgtatcacaaagttggatcccatgctttaccagcgacagattctgatgttgacctgtcgtggcagcttactctacaaagagtgtgggaaaatctcatgcaagggaacaaagaaggcaagagtaataattctgctcctgaagaattaaacatggaaatgagtgccagcaattgtgaacacagtgccgtgttttcctcattgccactggttctcaaatggcttagggacacggtgcaacaaaaccagtcaactcgttttcaggtccttgttactggttctatacatcttattggtgacatgttgaaattagtcaagaagtgattcgttgggctacttgaaagattggctttcattcagattttttaagtaccactatttgagtccatgaaagtgctgttacacttggttcaaaagctgttgacagaaggttatcaatataataactacattcttgattgtagacattgatgcatccattacattggtttaaatcagcatcactctggctacttcgtgggtctttcaactttcatttcactgtaattgaaaataaaggtggattaagggacatgaataaagaataacatctatcaattttctt

SEQ ID NO: 54826 - protein, 245 aa, Glycine max
  peptide (1)..(245): Ceres Seq. ID no. 13639470
MKQHTLPEKFIKGLTTASLQGRAQIVPDQFINDEIPNELVFFLDGAHSPESMEACARWFSLAIKDQDQILFHQKLDNSNFSNQVVKMHNGETVQKKSTQILLFNCMSERNPQLLLPHLMKTCADHGVYFKKALFVPGLSVYHKVGSHALPATDSDVDLSWQLTLQRVWENLMQGNKEGKSNNSAPEELNMEMSASNCEHSAVFSSLPLVLKWLRDTVQQNQSTRFQVLVTGSIHLIGDMLKLVKK

SEQ ID NO: 54827 - protein, 194 aa, Glycine max
  peptide (1)..(194): Ceres Seq. ID no. 13639471
MEACARWFSLAIKDQDQILFHQKLDNSNFSNQVVKMHNGETVQKKSTQILLFNCMSERNPQLLLPHLMKTCADHGVYFKKALFVPGLSVYHKVGSHALPATDSDVDLSWQLTLQRVWENLMQGNKEGKSNNSAPEELNMEMSASNCEHSAVFSSLPLVLKWLRDTVQQNQSTRFQVLVTGSIHLIGDMLKLVKK

SEQ ID NO: 54828 - protein, 159 aa, Glycine max
  peptide (1)..(159): Ceres Seq. ID no. 13639472
MHNGETVQKKSTQILLFNCMSERNPQLLLPHLMKTCADHGVYFKKALFVPGLSVYHKVGSHALPATDSDVDLSWQLTLQRVWENLMQGNKEGKSNNSAPEELNMEMSASNCEHSAVFSSLPLVLKWLRDTVQQNQSTRFQVLVTGSIHLIGDMLKLVKK

SEQ ID NO: 54829 - DNA, 1111 bp, Glycine max
  misc_feature (1)..(1111): Ceres Seq. ID no. 15169781
gaacaagtaaaataaacaaaagccaaaggaacaaatgaataatgttttatgttacattacatagtattataatattctcacgctattcactactctccatttggcctcagttgatcatacacactcttcttcttcttcttcttctctcttcttgcttgcaatatggacatgaattcctcaggtggtgcctgcggttggctttatgattatggctttgatatccctgttgctggttctgacttcatggcttcagactctggtggtttcagttgggggccccagagttacaacttcaagggtccttcaaatatgagcttggaaatggaatactcactggattcaactgtcatggaaaatggtccttcaaagcggttaaggactgaatcatgtgcatctggctccaaggcatgtcgtgagaaattgcgaagggataaacttaatgagaggtttctggaattgagttcgatcttggagcctggtagacagcccaaaacagacaaagttgcattattaagcgatgcggctcgagtggtaatccaattgagaaatgaagccgagaggctgaaggaaatgaatgatgaattacaggcaaaagttaaagaattgaagggtgagaagaatgagcttcgtgatgagaagaataggctgaaggaagagaaagaaaagttggagaagcaagtgaaactgacaaatatacaacccagcttcctacctcaagccccagatgctaaagggcaagttggtagccacaagctgatacctttcattggataccctggaattgccatgtggcagtttatgtcccctgctgcagttgatacttcaaaggatcatctgcttcgacctccagttgcataaagtggttagcaatagcatccacttctttgttgtatgtgttctttacatgtgttatatttttgtgtttaagttatccatcctgtctaatgtgtgttttctaaagtcactggtagaaagtgtgctcggaaactggttaatagtataagtttgtgctgttgctgtctgaactatgataagaaagtgctacatgtcatggctacaaagtgtgttgcattattaaaaataaaagtgagtttaagtggttctttgctgc

SEQ ID NO: 54830 - protein, 231 aa, Glycine max
  peptide (1)..(231): Ceres Seq. ID no. 15169782
MDMNSSGGACGWLYDYGFDIPVAGSDFMASDSGGFSWGPQSYNFKGPSNMSLEMEYSLDSTVMENGPSKRLRTESCASGSKACREKLRRDKLNERFLELSSILEPGRQPKTDKVALLSDAARVVIQLRNEAERLKEMNDELQAKVKELKGEKNELRDEKNRLKEEKEKLEKQVKLTNIQPSFLPQAPDAKGQVGSHKLIPFIGYPGIAMWQFMSPAAVDTSKDHLLRPPVA

SEQ ID NO: 54831 - protein, 229 aa, Glycine max
  peptide (1)..(229): Ceres Seq. ID no. 15169783
MNSSGGACGWLYDYGFDIPVAGSDFMASDSGGFSWGPQSYNFKGPSNMSLEMEYSLDSTVMENGPSKRLRTESCASGSKACREKLRRDKLNERFLELSSILEPGRQPKTDKVALLSDAARVVIQLRNEAERLKEMNDELQAKVKELKGEKNELRDEKNRLKEEKEKLEKQVKLTNIQPSFLPQAPDAKGQVGSHKLIPFIGYPGIAMWQFMSPAAVDTSKDHLLRPPVA

SEQ ID NO: 54832 - protein, 204 aa, Glycine max
  peptide (1)..(204): Ceres Seq. ID no. 15169784
MASDSGGFSWGPQSYNFKGPSNMSLEMEYSLDSTVMENGPSKRLRTESCASGSKACREKLRRDKLNERFLELSSILEPGRQPKTDKVALLSDAARVVIQLRNEAERLKEMNDELQAKVKELKGEKNELRDEKNRLKEEKEKLEKQVKLTNIQPSFLPQAPDAKGQVGSHKLIPFIGYPGIAMWQFMSPAAVDTSKDHLLRPPVA

SEQ ID NO: 54833 - DNA, 1239 bp, Glycine max
  misc_feature (1)..(1239): Ceres Seq. ID no. 14307210
agccaatcaaatccattgttttctcttctcctcctccttcaatggattctctgacttccatcaacggcgatttcggcttcgccggcggcaccgatcgcagattcgcgttttcgcgccaagcctccttccaacagcctcacacgccgatagacattccggcgcacggccaccactactggtccgcgcgtgacgataaaccctcctccgcctcgctccaaagatcctctctgtcctccttcgttttctccgttttccgaaacgttaggtccggccacaggtacatgaagaggctctttctcttgatctcgctcaatgtcgcgtactccaccgccgaattgctctttggactcttcaccggtcgcgtaggtttggtgtctgatgcggttcacttgacttttggatgtggtcttcttacattttcgttatttgttatggccgcgtctaggaagaaagccgatcgagagtatacttatgggtataaaaggctagaagtcttgtctgcatttacaaatgccctatttcttttgtttatgtcattctccctagcagttgaggcacttcatgcattcatacaagatgaatcagagcacaagcattacttgattgtttctgcagtgaccaatttatttgtgaatcttgttggtgtatggttcttcagaaactatgctcggattaatcttgcttacagaaatgccgaagatatgaatcaccactctgttttcctgcatgttcttgcagattccattcgcagtgcaggtctgatattggcatcctggttattgtcaatcggggttcagaatgcagaagtcttgtgtttaggacttgtttctgttgcagtttttatgcttgttctgcctctctttagggcaactggtggtatcttgctccaaatggcacctcccagcatcccaactactgctttgaacaaatgcttgagacagatttctgctcgggaagatgtaatggaagtctcccaggctcgtttttgggaattagtgcctggttatgtggttggttcacttataatacaggtaaagaaagggacgaacgatcggccaatactagaatttgtgcatggtctataccatgatttgggtgtacaggacctcacggtgcaaactgatgatgcatgagactatcttaacacttttatgctaatagttattaccaaggattgtatacgcattaatgtcattgtttattactggtggaatagatggttaacgtgatttctcattt

SEQ ID NO: 54834 - protein, 376 aa, Glycine max
  peptide (1)..(376): Ceres Seq. ID no. 14307211
PIKSIVFSSPPPSMDSLTSINGDFGFAGGTDRRFAFSRQASFQQPHTPIDIPAHGHHYWSARDDKPSSASLQRSSLSSFVFSVFRNVRSGHRYMKRLFLLISLNVAYSTAELLFGLFTGRVGLVSDAVHLTFGCGLLTFSLFVMAASRKKADREYTYGYKRLEVLSAFTNALFLLFMSFSLAVEALHAFIQDESEHKHYLIVSAVTNLFVNLVGVWFFRNYARINLAYRNAEDMNHHSVFLHVLADSIRSAGLILASWLLSIGVQNAEVLCLGLVSVAVFMLVLPLFRATGGILLQMAPPSIPTTALNKCLRQISAREDVMEVSQARFWELVPGYVVGSLIIQVKKGTNDRPILEFVHGLYHDLGVQDLTVQTDDA

SEQ ID NO: 54835 - protein, 363 aa, Glycine max
  peptide (1)..(363): Ceres Seq. ID no. 14307212
MDSLTSINGDFGFAGGTDRRFAFSRQASFQQPHTPIDIPAHGHHYWSARDDKPSSASLQRSSLSSFVFSVFRNVRSGHRYMKRLFLLISLNVAYSTAELLFGLFTGRVGLVSDAVHLTFGCGLLTFSLFVMAASRKKADREYTYGYKRLEVLSAFTNALFLLFMSFSLAVEALHAFIQDESEHKHYLIVSAVTNLFVNLVGVWFFRNYARINLAYRNAEDMNHHSVFLHVLADSIRSAGLILASWLLSIGVQNAEVLCLGLVSVAVFMLVLPLFRATGGILLQMAPPSIPTTALNKCLRQISAREDVMEVSQARFWELVPGYVVGSLIIQVKKGTNDRPILEFVHGLYHDLGVQDLTVQTDDA

SEQ ID NO: 54836 - protein, 283 aa, Glycine max
  peptide (1)..(283): Ceres Seq. ID no. 14307213
MKRLFLLISLNVAYSTAELLFGLFTGRVGLVSDAVHLTFGCGLLTFSLFVMAASRKKADREYTYGYKRLEVLSAFTNALFLLFMSFSLAVEALHAFIQDESEHKHYLIVSAVTNLFVNLVGVWFFRNYARINLAYRNAEDMNHHSVFLHVLADSIRSAGLILASWLLSIGVQNAEVLCLGLVSVAVFMLVLPLFRATGGILLQMAPPSIPTTALNKCLRQISAREDVMEVSQARFWELVPGYVVGSLIIQVKKGTNDRPILEFVHGLYHDLGVQDLTVQTDDA

SEQ ID NO: 54837 - DNA, 1618 bp, Glycine max
  misc_feature (1)..(1618): Ceres Seq. ID no. 14304851
acaagaacaagtaccagaacaataggagcatcatggttaggctatggtgctcttctctctcaattacacttttattccaacagctcatcagattgtgcatttcttggagtgtgcaaaccccaacacccccattgccaatcctccctctcccaatatattcccagttgaaatggcaacaaagggagatcataatgtttttccattttggtgtgaacacattcagtgacagagaatggggcactggccaggaaaacccagcaatcttcaatccaacggggctcaacaccacccagtgggccactgtggcagcagatgcaggagtttcattgatgatattaactgcaaaacaccatgatggcttctgcctctggccttccaagtacactgaccattctgtcattagcagcccctggcaaggtggcaagggtgatgtggttcaagactttgtcaatgcagccactgcacaaggaattgatgtaggggtctacctttcaccttgggatagacatgaccctagatatggcaatgatttgctctacaaccaatactacttggctcaactacaagagttgctcaagaaatatccaaatgttagagagatttggttcgatggagcaaagggtgccaatgcaaaaaatatgacgtattacttttcagattggttttccatggtgaaggagctgcagagtttcatcaacatcttctctgatgcaggtcctgatgttaggtgggtgggagatgaaacaggttctgcagggtatacatgttggtctaccattaatcgaacctctctatccattggaagtccagacatcattcagtatataaacactggtgatccaaaagggacagattggctaccggcggaatgtgatgtatccattcgaaaaggatggttttggcacaaatcagaatcaccaaaaaagctaagcgagctacttgacatttattacaattcggttgggagaaattgtgtgttacttctcaatgtgcctcctaatacaagtggccttataactgaagttgatgccaatagattgaaagagtttagaagtgcaatcaagacaattttccatcagaatcttgctgaggattgttttgttaaagttagtagccaaagagggggtttcgggccagaaaagatgctagacagtgaccacttgtggtcatactgggccccaagggacgatgatgatgaaaaggaccattgggttgaaatttgggccaaggaagggagattgagattcaatgtggttagaatacaagaggcaattggtcttggtcaaaggatcaaacggcatgaaatctatgtggatggtaaattgatcatcaaagccacaacggttggttataagaggcttcataggcttgatgggggtgaagtgcacgctcgtggtgtgaggataagaattagaaaggcaagaggagtgcctcttatctcttctattggcttgcattatgatcctttctggcactcaaagtttactgtatcctgaagagttaagtaagtttaggtaaaggagcataactgcaataaattaagtagagccttaagaagaatattgaaatattgttctatcagtaaagaacaaaaaataaatttactttaaatttctac

SEQ ID NO: 54838 - protein, 497 aa, Glycine max
  peptide (1)..(497): Ceres Seq. ID no. 14304852
KNKYQNNRSIMVRLWCSSLSITLLFQQLIRLCISWSVQTPTPPLPILPLPIYSQLKWQQREIIMFFHFGVNTFSDREWGTGQENPAIFNPTGLNTTQWATVAADAGVSLMILTAKHHDGFCLWPSKYTDHSVISSPWQGGKGDVVQDFVNAATAQGIDVGVYLSPWDRHDPRYGNDLLYNQYYLAQLQELLKKYPNVREIWFDGAKGANAKNMTYYFSDWFSMVKELQSFINIFSDAGPDVRWVGDETGSAGYTCWSTINRTSLSIGSPDIIQYINTGDPKGTDWLPAECDVSIRKGWFWHKSESPKKLSELLDIYYNSVGRNCVLLLNVPPNTSGLITEVDANRLKEFRSAIKTIFHQNLAEDCFVKVSSQRGGFGPEKMLDSDHLWSYWAPRDDDDEKDHWVEIWAKEGRLRFNVVRIQEAIGLGQRIKRHEIYVDGKLIIKATTVGYKRLHRLDGGEVHARGVRIRIRKARGVPLISSIGLHYDPFWHSKFTVS

SEQ ID NO: 54839 - protein, 487 aa, Glycine max
  peptide (1)..(487): Ceres Seq. ID no. 14304853
MVRLWCSSLSITLLFQQLIRLCISWSVQTPTPPLPILPLPIYSQLKWQQREIIMFFHFGVNTFSDREWGTGQENPAIFNPTGLNTTQWATVAADAGVSLMILTAKHHDGFCLWPSKYTDHSVISSPWQGGKGDVVQDFVNAATAQGIDVGVYLSPWDRHDPRYGNDLLYNQYYLAQLQELLKKYPNVREIWFDGAKGANAKNMTYYFSDWFSMVKELQSFINIFSDAGPDVRWVGDETGSAGYTCWSTINRTSLSIGSPDIIQYINTGDPKGTDWLPAECDVSIRKGWFWHKSESPKKLSELLDIYYNSVGRNCVLLLNVPPNTSGLITEVDANRLKEFRSAIKTIFHQNLAEDCFVKVSSQRGGFGPEKMLDSDHLWSYWAPRDDDDEKDHWVEIWAKEGRLRFNVVRIQEAIGLGQRIKRHEIYVDGKLIIKATTVGYKRLHRLDGGEVHARGVRIRIRKARGVPLISSIGLHYDPFWHSKFTVS

SEQ ID NO: 54840 - protein, 434 aa, Glycine max
  peptide (1)..(434): Ceres Seq. ID no. 14304854
MFFHFGVNTFSDREWGTGQENPAIFNPTGLNTTQWATVAADAGVSLMILTAKHHDGFCLWPSKYTDHSVISSPWQGGKGDVVQDFVNAATAQGIDVGVYLSPWDRHDPRYGNDLLYNQYYLAQLQELLKKYPNVREIWFDGAKGANAKNMTYYFSDWFSMVKELQSFINIFSDAGPDVRWVGDETGSAGYTCWSTINRTSLSIGSPDIIQYINTGDPKGTDWLPAECDVSIRKGWFWHKSESPKKLSELLDIYYNSVGRNCVLLLNVPPNTSGLITEVDANRLKEFRSAIKTIFHQNLAEDCFVKVSSQRGGFGPEKMLDSDHLWSYWAPRDDDDEKDHWVEIWAKEGRLRFNVVRIQEAIGLGQRIKRHEIYVDGKLIIKATTVGYKRLHRLDGGEVHARGVRIRIRKARGVPLISSIGLHYDPFWHSKFTVS

SEQ ID NO: 54841 - DNA, 1056 bp, Glycine max
  misc_feature (1)..(1056): Ceres Seq. ID no. 14313014
aaatctgaaccaaaccacaaacacttaatttctcatctcatcatttctaattctacctcttttctcttgcactaacaatccaagatgaataccaacaacgacaccgaaaaaaaccaatcatttccagaagcacaaggagcatcatcatcatcatcttctccacccaatgttgggactgagaattggggaactcacataatgggcacccctgctgttccaagcagccacccagataacaaaaaagcagctttacaaagtggacaacctcaaccagttcaatactaccatgaccaacatcaacatccctacgtgcaacatagcccagttgacaaaccaagcaacagtcccatggagtcaatccttaacatgttcgattcatggagcaaaaaagctgaagccaccgcacacaacgtctggcacaaccttaaaactggtccatcagtgtcttcagctgcactggggaagatgaatctgactgtgaaagcaatatcagagggtggatttgagtccctctacaagcaaacattcacaacctatccaaacgagaagctcaagaagagctttgcttgttacctttcaacatcaacaggtcctgttgcaggaaccctttacctgtccaatattcatgtagcgttttgcagcgatcgccctttgtgtttcactgcaccctctggccaagaaacttggacatactacaaggtaatggtgcctttgggaaaggttggagtggtcaacccagtgaccatgagggaaaacccatcagaaaagtacattcaggttgtaacggtggaagggcatgatttttggttcatgggttttgttaattttgacaaagcagttaagaacatctcagaaggtatctcacattttgtagcgccaggagtggccgtgccatccactagtggttcggaagctaatcgaaagaactttcagtgatttctagtttttggagtactatgatgtatactaattttgtttagaatttgactttgcggtttgtgtcgtatactagaacaatactttgttgtaaaaaaacttaggagtgtatgctataag

SEQ ID NO: 54842 - protein, 283 aa, Glycine max
  peptide (1)..(283): Ceres Seq. ID no. 14313015
MNTNNDTEKNQSFPEAQGASSSSSSPPNVGTENWGTHIMGTPAVPSSHPDNKKAALQSGQPQPVQYYHDQHQHPYVQHSPVDKPSNSPMESILNMFDSWSKKAEATAHNVWHNLKTGPSVSSAALGKMNLTVKAISEGGFESLYKQTFTTYPNEKLKKSFACYLSTSTGPVAGTLYLSNIHVAFCSDRPLCFTAPSGQETWTYYKVMVPLGKVGVVNPVTMRENPSEKYIQVVTVEGHDFWFMGFVNFDKAVKNISEGISHFVAPGVAVPSTSGSEANRKNFQ

SEQ ID NO: 54843 - protein, 245 aa, Glycine max
  peptide (1)..(245): Ceres Seq. ID no. 14313016
MGTPAVPSSHPDNKKAALQSGQPQPVQYYHDQHQHPYVQHSPVDKPSNSPMESILNMFDSWSKKAEATAHNVWHNLKTGPSVSSAALGKMNLTVKAISEGGFESLYKQTFTTYPNEKLKKSFACYLSTSTGPVAGTLYLSNIHVAFCSDRPLCFTAPSGQETWTYYKVMVPLGKVGVVNPVTMRENPSEKYIQVVTVEGHDFWFMGFVNFDKAVKNISEGISHFVAPGVAVPSTSGSEANRKNFQ

SEQ ID NO: 54844 - protein, 195 aa, Glycine max
  peptide (1)..(195): Ceres Seq. ID no. 14313017
MESILNMFDSWSKKAEATAHNVWHNLKTGPSVSSAALGKMNLTVKAISEGGFESLYKQTFTTYPNEKLKKSFACYLSTSTGPVAGTLYLSNIHVAFCSDRPLCFTAPSGQETWTYYKVMVPLGKVGVVNPVTMRENPSEKYIQVVTVEGHDFWFMGFVNFDKAVKNISEGISHFVAPGVAVPSTSGSEANRKNFQ

SEQ ID NO: 54845 - DNA, 1340 bp, Glycine max
  misc_feature (1)..(1340): Ceres Seq. ID no. 14312208
gggagaaagaaagaaggaaagcaaagtagacgagtgattgcgttgcgattgacgacgacgaggaatcatgtcttccggcggcggcggtggtaagccgttcttctgccacgtgtgcagtcagaggattacgtgctccgatgagtcggaaccattctgcccgatgtgtatggaaagtttcgtagaagaatgcaaccctaacaatcccaaccctaatctcttccccgacagtgatgaatcttcggatcccgaactccccttccaccgcttctcacttctccctctcttgctctcatcagtctctaggtcccgatccgaacccgacgtgttcgacccgatggtcttcctccagaaccaccttcaggaccttcgcgccgacggtgccaacattcaagttgactttgaccatccttccaacgagaatcaaggctttcgccttgcgaacatcggcgactactttatgggccccggcctcgagcagtttattcagcagcttgccgacaacgaccccaaccgctacggaacgccgcccgccgccaaggacgccgtcgagaatctccccaccgttaccgtcgacgacgacttgctgaactccgagctgaaccagtgcgctgtctgccaggacgagttcgaaaagggttctaaggtgacacagatgccctgcaagcacgcgtatcacggcgactgcttgattccgtggcttcggctgcataattcatgccctgtgtgccgctatgaattgcccacggacgacgccgattacgagaacgaggttcacggtggtgatgctgggtcgaggacaggtgggagcgacggtggaggtgggagtaatagaccttttcgcaggactgttaggatatatttgcgccatcctgatgctggtgactctgcgcaggacggtgctgaaagggaatggagatggagaagttgagattgaaatttatgttttgtttcatgttgaaaaactggaaactatcttgtgcagctctgagcttccgtgaatagattgtagcattgcaatgtttacagaagtccttgtgaggaatgcaagaaatgttatttcccgtggcaaggaactttgttcgatcaaaggtctttgtttgttatggtagtagatagctggaacatgggaatgcacgaaaacacaactattgagattttaggtactgtgttaatgagcgttgataagaaacttcccgttacttttgtacagatcatcttccaaacatccaatattgattatcgtccttttgtacaatatgaactagtcatggtctatattgctcctgtgtgtgtgtataaaacgttttaatttagaaaaatgttcttttgacctatttaag

SEQ ID NO: 54846 - protein, 253 aa, Glycine max
  peptide (1)..(253): Ceres Seq. ID no. 14312209
MESFVEECNPNNPNPNLFPDSDESSDPELPFHRFSLLPLLLSSVSRSRSEPDVFDPMVFLQNHLQDLRADGANIQVDFDHPSNENQGFRLANIGDYFMGPGLEQFIQQLADNDPNRYGTPPAAKDAVENLPTVTVDDDLLNSELNQCAVCQDEFEKGSKVTQMPCKHAYHGDCLIPWLRLHNSCPVCRYELPTDDADYENEVHGGDAGSRTGGSDGGGGSNRPFRRTVRIYLRHPDAGDSAQDGAEREWRWRS

SEQ ID NO: 54847 - protein, 286 aa, Glycine max
  peptide (1)..(286): Ceres Seq. ID no. 14312210
MSSGGGGGKPFFCHVCSQRITCSDESEPFCPMCMESFVEECNPNNPNPNLFPDSDESSDPELPFHRFSLLPLLLSSVSRSRSEPDVFDPMVFLQNHLQDLRADGANIQVDFDHPSNENQGFRLANIGDYFMGPGLEQFIQQLADNDPNRYGTPPAAKDAVENLPTVTVDDDLLNSELNQCAVCQDEFEKGSKVTQMPCKHAYHGDCLIPWLRLHNSCPVCRYELPTDDADYENEVHGGDAGSRTGGSDGGGGSNRPFRRTVRIYLRHPDAGDSAQDGAEREWRWRS

SEQ ID NO: 54848 - protein, 255 aa, Glycine max
  peptide (1)..(255): Ceres Seq. ID no. 14312211
MCMESFVEECNPNNPNPNLFPDSDESSDPELPFHRFSLLPLLLSSVSRSRSEPDVFDPMVFLQNHLQDLRADGANIQVDFDHPSNENQGFRLANIGDYFMGPGLEQFIQQLADNDPNRYGTPPAAKDAVENLPTVTVDDDLLNSELNQCAVCQDEFEKGSKVTQMPCKHAYHGDCLIPWLRLHNSCPVCRYELPTDDADYENEVHGGDAGSRTGGSDGGGGSNRPFRRTVRIYLRHPDAGDSAQDGAEREWRWRS

SEQ ID NO: 54849 - DNA, 1137 bp, Glycine max
  misc_feature (1)..(1137): Ceres Seq. ID no. 14302047
aaagaatccttcatcacattaatcagtccagacagagaactgagagaagaccctcacttcctgtttggctcgacgaagacctcacttcgcccaacctccgtctccggcggcgtctcttatcctaacggctccttccctcaccgtcactgaaacggcgtccctgaactcgcaacactgccctccctctgactctgatttcgttcgaacttcgaactcattcccacttcgcagtcctcgccatgcttcgttgtcggcgactcctcgcagtggcaaacctcaaacgacatagctagagatacagggtgcgatttgtttccattttccagtcaatcctatactccttaggctattgtaatcttctgctaataaggaggaattattattgggttctgaaaacatgttgaaacaagcaattggcagaatcttcagaaccggtgtttatgcttgtgaaggaaatagagttttgccttggatttatgtgccttcgagctttttccaccatggacaagcgcacatggcacctagaagcttttttggggtagaggatttccttgatgatgacaatagccgaccttacacataccaaaaagggaagaagtcaaagaatccaaataagcacatatcattcaaacaaagaacaattgcctacatggaaccttttacacttgatgtgtttatctcaaagcgctttgtatcggcttcactcactcatagggtaacaagcaaacaggttgcagttgccgggaccaactccaaggacataaaagctgttcttaggtctcgttcagacataccagcatgcatagcaattggtaggattttagctgaaagagcaaaagaagctgatgtttacactggttcttatactccaagggacagggacaagtttgaagggaaaatcagagctgtagttcaatcacttattgacaatgggattgatatcaaggtttatcttgattgagtttagtcactcaagtttgtgggactatcagttaaggtgttgatattttggttgaagcagtaggccccttgtgtgtttgaacatgtccatttagtttggttttgatgataatgggaatatcattattcgaattacagatttggtaatttagttttatgaatgagttatgttgtcgc

SEQ ID NO: 54850 - protein, 187 aa, Glycine max
  peptide (1)..(187): Ceres Seq. ID no. 14302048
MLKQAIGRIFRTGVYACEGNRVLPWIYVPSSFFHHGQAHMAPRSFFGVEDFLDDDNSRPYTYQKGKKSKNPNKHISFKQRTIAYMEPFTLDVFISKRFVSASLTHRVTSKQVAVAGTNSKDIKAVLRSRSDIPACIAIGRILAERAKEADVYTGSYTPRDRDKFEGKIRAVVQSLIDNGIDIKVYLD

SEQ ID NO: 54851 - protein, 148 aa, Glycine max
  peptide (1)..(148): Ceres Seq. ID no. 14302049
MAPRSFFGVEDFLDDDNSRPYTYQKGKKSKNPNKHISFKQRTIAYMEPFTLDVFISKRFVSASLTHRVTSKQVAVAGTNSKDIKAVLRSRSDIPACIAIGRILAERAKEADVYTGSYTPRDRDKFEGKIRAVVQSLIDNGIDIKVYLD

SEQ ID NO: 54852 - protein, 103 aa, Glycine max
  peptide (1)..(103): Ceres Seq. ID no. 14302050
MEPFTLDVFISKRFVSASLTHRVTSKQVAVAGTNSKDIKAVLRSRSDIPACIAIGRILAERAKEADVYTGSYTPRDRDKFEGKIRAVVQSLIDNGIDIKVYLD

SEQ ID NO: 54853 - DNA, 1471 bp, Glycine max
  misc_feature (1)..(1471): Ceres Seq. ID no. 14306986
gatccaagaccatatttaatttgccaaccgcgccagatcgccattactacaacaacatagactagtgcggtgcattccctcgtttaccatgctttcctaagagaaagagaaaagtaaaacccctcactactgatagattttcattcctccgaggaaaaaaaaaacatgtcggatgctttgatcaatggattggccggagctggaggagggatcattgctcagctcatcacatacccacttcaaactgtaaacactcgccaacaaaccgagcgtgatccgaagaaagacacgaggagtcaaggggccctcgaacgaatgtgccaggttgtaaaagaagaggggtgggaacggttgtatggaggcttgatgccatcggtagtgggtacagctgcgtctcagggagtttactattatttctatcaaatattcaggaacaaagctgaagcagctgcactacaacaaaagaaaatgggcgttggtgatggatcagttgggatgctctcctctcttgttgttgctgctttatctgggtgtgttaacgtgctcttgacaaatcccatatgggtagttgttacgcgtatgcagacacatagaaaagagtcgaacagaactccagctgatcagggtttgtttgttgccactgagcagccaattctttctgcagttgagcctcttccttatggaactagtcatgtgattcaagaaatctacggtgaagctggaatttggggtttctggaaaggtgtattaccaacattaatcatggtaagcaatccttccatacagttcatgctgtatgaagccatgttggcaaagttaagaaaaagacgtgcttggagtaagaagggtagcaacggggtaactgctttagagatatttcttattggagctttagctaagcttggagctactgttgtaacttatccgatcctagttgtgaaggcaaggctccaagctagacaggataaaactggagacaggagacaccattacaaaggtacatgggatgctattattaaaatgatccgctatgaggggtttaatgggttttacaaaggcatgggcacaaaaatcgtacaaagtgtgctggctgctgctgttttgttcatgatgaaggaagaattagttaggggggttcgtttcttgcttgccaaggatgctgtaaagccaaagaatctgtgattggaggccactagcttgatcaagatttcatgtaccatcttcagttagcaaattagttcaaatggtaggggaattagagtgattcaaacaacatattgaaatatggctttaactgtatcttgattattttcatcaggttagtttccatagaggaaattcatgccaaaaattacacactgggttcattggtttgtttcatgaacaagacagggttgtagatttgaagtatgctgctgaaacaaatattctttttacgaacgaatatcactatctgatttcattggcagcc

SEQ ID NO: 54854 - protein, 338 aa, Glycine max; identical to SEQ ID NO: 54396
  peptide (1)..(338): Ceres Seq. ID no. 14306987

SEQ ID NO: 54855 - protein, 288 aa, Glycine max; identical to SEQ ID NO: 54397
  peptide (1)..(288): Ceres Seq. ID no. 14306988

SEQ ID NO: 54856 - protein, 271 aa, Glycine max; identical to SEQ ID NO: 54398
  peptide (1)..(271): Ceres Seq. ID no. 14306989

SEQ ID NO: 54857 - DNA, 808 bp, Glycine max
  misc_feature (1)..(808): Ceres Seq. ID no. 14301742
acagcagttgttgagtcagcggttctgggttggagacagagagagagaagttttcagtttcagaaagaaagcaaaagcaatagcaatgggttggatcggtgagactgttgattccatcaaatctcttcagatccgccaggtcctcacccaggctgtgagcctaggcatgattgttacgtctgcactgataatatggaaggcattgatgtgcgttactggcagtgaatctcccgttgttgttgttctttctggaagcatggaacccggattcaagcggggagacatcttgttcttgcacatgagtaaagatcctattcgggcaggggagattgttgtgtttaatgttgatggacgtgagattccaattgttcatcgtgtaattaaggtacatgaaagggaagatactggggaggttgatgttctcacaaaaggagacaacaattatggggatgacaggctactgtatgctcatggtcaactttggctgcaaaggcaccacattatgggtagagccgtcgggttcttaccatacgtaggctgggtgaccatcattatgactgaaaagcctattatcaagtatattctcattggtgctttggggttgctcgtgataacttcgaaagattaaatgatgaatatgaagtcaaaactgcggtctaacttcggatggtagggtgagcagaatataatggtaagattaaaagatgaatctgaaatcattttgtaccattcatagtatatgggggacaatatgatgttaaggatttatgcaaaatagttgaattttggtatattcttacttcttcct

SEQ ID NO: 54858 - protein, 208 aa, Glycine max
  peptide (1)..(208): Ceres Seq. ID no. 14301743
QQLLSQRFWVGDREREVFSFRKKAKAIAMGWIGETVDSIKSLQIRQVLTQAVSLGMIVTSALIIWKALMCVTGSESPVVVVLSGSMEPGFKRGDILFLHMSKDPIRAGEIVVFNVDGREIPIVHRVIKVHEREDTGEVDVLTKGDNNYGDDRLLYAHGQLWLQRHHIMGRAVGFLPYVGWVTIIMTEKPIIKYILIGALGLLVITSKD

SEQ ID NO: 54859 - protein, 180 aa, Glycine max
  peptide (1)..(180): Ceres Seq. ID no. 14301744
MGWIGETVDSIKSLQIRQVLTQAVSLGMIVTSALIIWKALMCVTGSESPVVVVLSGSMEPGFKRGDILFLHMSKDPIRAGEIVVFNVDGREIPIVHRVIKVHEREDTGEVDVLTKGDNNYGDDRLLYAHGQLWLQRHHIMGRAVGFLPYVGWVTIIMTEKPIIKYILIGALGLLVITSKD

SEQ ID NO: 54860 - protein, 153 aa, Glycine max
  peptide (1)..(153): Ceres Seq. ID no. 14301745
MIVTSALIIWKALMCVTGSESPVVVVLSGSMEPGFKRGDILFLHMSKDPIRAGEIVVFNVDGREIPIVHRVIKVHEREDTGEVDVLTKGDNNYGDDRLLYAHGQLWLQRHHIMGRAVGFLPYVGWVTIIMTEKPIIKYILIGALGLLVITSKD

SEQ ID NO: 54861 - DNA, 1349 bp, Glycine max
  misc_feature (1)..(1349): Ceres Seq. ID no. 15176437
atggtgacggaccaagatatagcgaaaggggtggagtccctactgcgtcactctgacccaaactccataactacggtaaacggcgtcgttcagcagctggaggccaaactagggttagacctctctcacaaggccagtttcatcagagaccagatcgatcatcttctccggtcacagccacagacatttgctcctcaccctcctccacttcacaaagactattttgcccctcacacccaactgcacttcccaaccacccactttgctccccattttgccctccatgacgagatcaacttcctgcagcacccccaccctcctccaccgcgtaaagtcgagacctttcctcctcaaaatgttgcccctcctcaagtgcccaaagaaagtgtgcaaactggaagcaaaagaagaggtggtgctggtggtctaaacaaagtttgtggtgtttctcctgaacttcaggcggttgttggtgagccggcaatgccaagaactgaaattgtgaggcagctgtgggcatacataaagaaaaacaacctccaagatcctggtaacaaaagaaagataatttgtgatgatgccctgcgtttggtatttgagacagactgcaccgatatgttcaagatgaatcagttgctagctaaacacattatcccacttggtcctacaaaggagtcacaggctaaacgagtgaaggtggatactgaaattaagactgaaagtgctgaacctgctccatctaccgtggcaatatctgaagcgcttgccaaatttttgggcactgagggaagagagatgcaacagtctgaagccataagacttgtttgggagtacatcaagcttcaccatttggaggatcctttaaattcaatggtgatattatgcgatgcaaagcttcaagagctacttggatgtgaaagcatttctgctttaggaataccagagatgttagcacgtcatcatctatttaaacagtctgacacccgttagtgctgatcaattattgccatataagggtatgatctgcacaaaacgctggttatatgtttctgctcgttgctagatcgtataggaactttttacttattcctgtcacttcatttatctctttgttcactgacgtatgtaaactgtatgttgtctgacggttattaggttggttgtttagaatgacaatgtataccttgagctaggcaagaagtatattgtatttaatatatgccctttaggttacccgtgcattttattttatcagttctcaatgtctaacctcaactggctgatcgaattagtgatacttttgtacattgagatacaccaactactctgaaatgcaccttgtttttact

SEQ ID NO: 54862 - protein, 329 aa, Glycine max
  peptide (1)..(329): Ceres Seq. ID no. 15176438
MVTDQDIAKGVESLLRHSDPNSITTVNGVVQQLEAKLGLDLSHKASFIRDQIDHLLRSQPQTFAPHPPPLHKDYFAPHTQLHFPTTHFAPHFALHDEINFLQHPHPPPPRKVETFPPQNVAPPQVPKESVQTGSKRRGGAGGLNKVCGVSPELQAVVGEPAMPRTEIVRQLWAYIKKNNLQDPGNKRKIICDDALRLVFETDCTDMFKMNQLLAKHIIPLGPTKESQAKRVKVDTEIKTESAEPAPSTVAISEALAKFLGTEGREMQQSEAIRLVWEYIKLHHLEDPLNSMVILCDAKLQELLGCESISALGIPEMLARHHLFKQSDTR

SEQ ID NO: 54863 - protein, 168 aa, Glycine max
  peptide (1)..(168): Ceres Seq. ID no. 15176439
MPRTEIVRQLWAYIKKNNLQDPGNKRKIICDDALRLVFETDCTDMFKMNQLLAKHIIPLGPTKESQAKRVKVDTEIKTESAEPAPSTVAISEALAKFLGTEGREMQQSEAIRLVWEYIKLHHLEDPLNSMVILCDAKLQELLGCESISALGIPEMLARHHLFKQSDTR

SEQ ID NO: 54864 - DNA, 1950 bp, Glycine max
  misc_feature (1)..(1950): Ceres Seq. ID no. 14303351
tttttgagaaaagaggaagccgtttgtgtctgtgtgtgtttgtgaaatagtgtgttaatatgagtaactggttggggttctctctcactccacacttgaggattgatgaagaatttgagagagaaaaccaagagcgtggaggagggtaccatcatccttctccttcttgtcaccctcacttgtctgttatgccccttcgctctgatggctctctctgtgttgctgactcctttagtcactctgctgcatctcaagaatggagatatgatagtgcaataggtggagggaattccaatgaagaaggtccaaagcttgaagactttttgggttgctactcaaactcccccgctaaggtcttttgccaagactctcagcctgaccaaaaccaaagccagaacaatgtttccaaaatcaatgttaatgtggcaccaagcttttgcaccaacaattcagagattgaaactggggataatctcacaaatccttcttccttgctccattctttccatgcatataatgataactcacatgctcttatccccaccaatggcatgtacaagtcctggttggcacaaacccagttttcttctgatggaaaaccttcaaatgaggctaatgggtgcaatttccaatctttgtccctcactatgagccccagtgtgcaaaatggggtgggtgcaatttcctctgttcaagtgaatgaggatagtaggaaacgggtcatggcgaaatctcatgctagagaaccagttcctcgcaaatctattgacacttttgggcaaagaacatctcaatatcgtggtgttacaaggcatagatggactggaagatatgaggcccatttgtgggataatagttgcagaaaggaagggcaaacaaggaaaggaaggcaagtttaccttggtggttatgataaggaagaaaaagcagcaaaggcttacgacttagctgcactcaagtattggggtccaacaactcacataaatttccctttaagcacttatgagaaggaacttgaagagatgaagcacatgaccaggcaagaatttgtcgccaatttaagaaggaagagcagtggattttcaagaggggcatctgtgtatagaggtgtgacaagacaccatcaacatggaaggtggcaggcccgaataggaagggttgcaggaaacaaggacttgtatcttggtacatttagcacacaagaagaagctgctgaagcatatgatatagcagcaatcaagttcagaggaacaagtgctgtgaccaactttgacataagtaggtatgatgtgaagagaatctgctcaagctccactcttattgcaggagatcttgcaaaacggtctcctaaagaatcaccagctccggttcctgcctctgacttcaattcgtgcggttcatcgccgatgccgctggtgtctcagccacctcctttggctataactgatggtgaacattctgatgagttgtccaacatgatgtggaatgccaacaacagtgatgagcaagcacagaatgagagtggtggtgctgaattcaacaacaatgtaactgaatcatcatcatcacaacaggtttcaccaagcagcaacaaggatgctttgaaccctcaaagccccaatgagtttggagtcagtggagcagattatggacatggctacttcacccttgatggaccaaaatatgatgatgggaacaatgaaaatgaccacatgagcaccaacaggcttggaaatttgggattggttaatcaagttcccatgtttgctttgtggaatgaatgaagggaatgttatgttgatgagttgagattacaaaaaacattagcttagaaaaaaaaactaagatcagatggcagaattattgaatgattattatattgtagcttggtatggtaactttttattttatgttgaaagaaaggggatatgtcagtagtgctgattcctt

SEQ ID NO: 54865 - protein, 574 aa, Glycine max
  peptide (1)..(574): Ceres Seq. ID no. 14303352
MSNWLGFSLTPHLRIDEEFERENQERGGGYHHPSPSCHPHLSVMPLRSDGSLCVADSFSHSAASQEWRYDSAIGGGNSNEEGPKLEDFLGCYSNSPAKVFCQDSQPDQNQSQNNVSKINVNVAPSFCTNNSEIETGDNLTNPSSLLHSFHAYNDNSHALIPTNGMYKSWLAQTQFSSDGKPSNEANGCNFQSLSLTMSPSVQNGVGAISSVQVNEDSRKRVMAKSHAREPVPRKSIDTFGQRTSQYRGVTRHRWTGRYEAHLWDNSCRKEGQTRKGRQVYLGGYDKEEKAAKAYDLAALKYWGPTTHINFPLSTYEKELEEMKHMTRQEFVANLRRKSSGFSRGASVYRGVTRHHQHGRWQARIGRVAGNKDLYLGTFSTQEEAAEAYDIAAIKFRGTSAVTNFDISRYDVKRICSSSTLIAGDLAKRSPKESPAPVPASDFNSCGSSPMPLVSQPPPLAITDGEHSDELSNMMWNANNSDEQAQNESGGAEFNNNVTESSSSQQVSPSSNKDALNPQSPNEFGVSGADYGHGYFTLDGPKYDDGNNENDHMSTNRLGNLGLVNQVPMFALWNE

SEQ ID NO: 54866 - protein, 531 aa, Glycine max
  peptide (1)..(531): Ceres Seq. ID no. 14303353
MPLRSDGSLCVADSFSHSAASQEWRYDSAIGGGNSNEEGPKLEDFLGCYSNSPAKVFCQDSQPDQNQSQNNVSKINVNVAPSFCTNNSEIETGDNLTNPSSLLHSFHAYNDNSHALIPTNGMYKSWLAQTQFSSDGKPSNEANGCNFQSLSLTMSPSVQNGVGAISSVQVNEDSRKRVMAKSHAREPVPRKSIDTFGQRTSQYRGVTRHRWTGRYEAHLWDNSCRKEGQTRKGRQVYLGGYDKEEKAAKAYDLAALKYWGPTTHINFPLSTYEKELEEMKHMTRQEFVANLRRKSSGFSRGASVYRGVTRHHQHGRWQARIGRVAGNKDLYLGTFSTQEEAAEAYDIAAIKFRGTSAVTNFDISRYDVKRICSSSTLIAGDLAKRSPKESPAPVPASDFNSCGSSPMPLVSQPPPLAITDGEHSDELSNMMWNANNSDEQAQNESGGAEFNNNVTESSSSQQVSPSSNKDALNPQSPNEFGVSGADYGHGYFTLDGPKYDDGNNENDHMSTNRLGNLGLVNQVPMFALWNE

SEQ ID NO: 54867 - protein, 410 aa, Glycine max
  peptide (1)..(410): Ceres Seq. ID no. 14303354
MYKSWLAQTQFSSDGKPSNEANGCNFQSLSLTMSPSVQNGVGAISSVQVNEDSRKRVMAKSHAREPVPRKSIDTFGQRTSQYRGVTRHRWTGRYEAHLWDNSCRKEGQTRKGRQVYLGGYDKEEKAAKAYDLAALKYWGPTTHINFPLSTYEKELEEMKHMTRQEFVANLRRKSSGFSRGASVYRGVTRHHQHGRWQARIGRVAGNKDLYLGTFSTQEEAAEAYDIAAIKFRGTSAVTNFDISRYDVKRICSSSTLIAGDLAKRSPKESPAPVPASDFNSCGSSPMPLVSQPPPLAITDGEHSDELSNMMWNANNSDEQAQNESGGAEFNNNVTESSSSQQVSPSSNKDALNPQSPNEFGVSGADYGHGYFTLDGPKYDDGNNENDHMSTNRLGNLGLVNQVPMFALWNE

SEQ ID NO: 54868 - DNA, 1902 bp, Glycine max
  misc_feature (1)..(1902): Ceres Seq. ID no. 15176911
tcacacacttgaccagcatctcattcccgtccccggcgactgagtagcggtctcttcccaactcggaactcagtccattccgcatttcaattttctcttcacttggcaaagcccaaaccaaaccctggctgaagaagagaattgactgagaagaagaacacagaaatgggctccgaactgattttcagagggcacgagacccagcccgtggacgacgcgtactcaccaaagccccacaaaccctggctcaccgtgactcgcccgattcactacatgctccgtgagcagcgactcctcttcgttctcctcggcgtcatcatagcaaccctcttcttcacattcgtcccttcctcttccccttccgcttcctcctcaagcgtttcgtacgagtctctcccgatctcctacttcgagcgcgagtcaaagattccggcgtaccaccaccgcgtggctgcggcggtgcattcggtggggaaggtgccgctggggattaagaggaagggactccggatcgtagtgacgggcggcgcggggttcgtggggtcgcacctggtggatcggttgattgcgagaggggacagcgtgatcgtggtggacaatttcttcacgggaagaaaagagaacgtgatgcaccattttgggaaccctagattcgagctcatccgacacgacgtcgttgagcctctcctgctcgaggttgatcagatctaccatctggcttgccctgcttcccctgtccactacaagttcaaccccgtcaagactatcaagacgaatgtggtggggaccttgaacatgctggggcttgcaaagagagtgggcgcgaggttcttgttgacgagtaccagtgaggtttatggagatcctctgcagcaccctcagaaggagacttactggggcaacgtcaacccaattggtgtccgaagctgctacgacgagggaaagcgtacggccgagacgttgaccatggactaccaccgaggtgccggcgtcgaggttagaattgctagaatctttaacacctacgggcctagaatgtgcttagatgatggtcgtgttgttagtaacttcgttgctcaggcactaaggaaggagcctctgaccgtttatggagatgggaagcagacaagaagtttccaatatgtctctgatttggtggagggtctaatccgccttatggaaggagaacacgtgggacctttcaatcttggaaatccgggagaatttacaatgctagaacttgccaaggtggttcaagaaacaatcgaccctgatgctaggatagagtacaggccgaacacagaggatgatccgcacaagagaaagcctgatataagtagggctaaggatcaacttggctgggaattcaaggttgatctgcgcaagggcctcccactaatggtttctgacttccggcaacgcatttttggtgaccagaaggaaaaggcaaccgtagcctaattcttgcgtgtcatgtatcttagagtgagaaagggatataagataataatagttcgaggataaccctggcccgccaaaggtcccattagtcatcacaggattatatgagctctactaaaatgtccctttgtcgtttgttctccgtcaatctttacatgccgggttatttaccctctttcaagattgaccaccacccctgattccatttttcaaattcctgccatctatattctatttctttctctttttttttggatgtaattggtatgtgcaacagtgcaagaggctacagttatagttatttcaacattttaccttctcacttgttctatttttatttaaacttcattacttctccacttatttgcaatttgatctctgaatttgtagagtttgctacactcttgttgaaattattactatcatcatcattcgttgttt

SEQ ID NO: 54869 - protein, 431 aa, Glycine max
  peptide (1)..(431): Ceres Seq. ID no. 15176912
MGSELIFRGHETQPVDDAYSPKPHKPWLTVTRPIHYMLREQRLLFVLLGVIIATLFFTFVPSSSPSASSSSVSYESLPISYFERESKIPAYHHRVAAAVHSVGKVPLGIKRKGLRIVVTGGAGFVGSHLVDRLIARGDSVIVVDNFFTGRKENVMHHFGNPRFELIRHDVVEPLLLEVDQIYHLACPASPVHYKFNPVKTIKTNVVGTLNMLGLAKRVGARFLLTSTSEVYGDPLQHPQKETYWGNVNPIGVRSCYDEGKRTAETLTMDYHRGAGVEVRIARIFNTYGPRMCLDDGRVVSNFVAQALRKEPLTVYGDGKQTRSFQYVSDLVEGLIRLMEGEHVGPFNLGNPGEFTMLELAKVVQETIDPDARIEYRPNTEDDPHKRKPDISRAKDQLGWEFKVDLRKGLPLMVSDFRQRIFGDQKEKATVA

SEQ ID NO: 54870 - protein, 395 aa, Glycine max
  peptide (1)..(395): Ceres Seq. ID no. 15176913
MLREQRLLFVLLGVIIATLFFTFVPSSSPSASSSSVSYESLPISYFERESKIPAYHHRVAAAVHSVGKVPLGIKRKGLRIVVTGGAGFVGSHLVDRLIARGDSVIVVDNFFTGRKENVMHHFGNPRFELIRHDVVEPLLLEVDQIYHLACPASPVHYKFNPVKTIKTNVVGTLNMLGLAKRVGARFLLTSTSEVYGDPLQHPQKETYWGNVNPIGVRSCYDEGKRTAETLTMDYHRGAGVEVRIARIFNTYGPRMCLDDGRVVSNFVAQALRKEPLTVYGDGKQTRSFQYVSDLVEGLIRLMEGEHVGPFNLGNPGEFTMLELAKVVQETIDPDARIEYRPNTEDDPHKRKPDISRAKDQLGWEFKVDLRKGLPLMVSDFRQRIFGDQKEKATVA

SEQ ID NO: 54871 - protein, 277 aa, Glycine max
  peptide (1)..(277): Ceres Seq. ID no. 15176914
MHHFGNPRFELIRHDVVEPLLLEVDQIYHLACPASPVHYKFNPVKTIKTNVVGTLNMLGLAKRVGARFLLTSTSEVYGDPLQHPQKETYWGNVNPIGVRSCYDEGKRTAETLTMDYHRGAGVEVRIARIFNTYGPRMCLDDGRVVSNFVAQALRKEPLTVYGDGKQTRSFQYVSDLVEGLIRLMEGEHVGPFNLGNPGEFTMLELAKVVQETIDPDARIEYRPNTEDDPHKRKPDISRAKDQLGWEFKVDLRKGLPLMVSDFRQRIFGDQKEKATVA

SEQ ID NO: 54872 - DNA, 2571 bp, Glycine max
  misc_feature (1)..(2571): Ceres Seq. ID no. 14313875
aacacaacacgcgccctacccttcatcaattgcttctttctcactcactgaaactcaacccttactttgcaattgcattcccagattcatttcagacaacgcaaccttaactttcccacatacgctaactcaataaccctttcattccgttcattgctctttccagattctattttgcctcttagaagttggaatagagaactagagctgggtggatggaggatgacaagaggaggaggaagaacaagaagaagaagaacaagcagaacaagaatgtggaaaatggggtgggagaaactgctaatagggatcagaatctgctgagtaatggaaaggatgagcatactaatctttccaagactgcaaatgagcaaagctcgaatgtcgatttgaatggggttggagagacattaagtagggatcacaatctggtaaataatggtaaggatgaacctgctaatctttcaggagtcgctgatgagcaatgcatggatgcagatcggaatggggttgttgaaacccccaatagtgatcaaaatctggtgaaaagtggaaaggatgagaatattccatcattagagtttgcagatgggcaaagtactaatatggattcaaatggtcatccgccaaatggctatatcagaagagacaatcaggaaattaaaagaagagaatgatatacatattcagaaagagactttatcaaaagagacaatcaggaaattaaaggcagaaaatgatatgcacattcagaaggaggccataatggaagagacaatcagaaaattgacagaacaaaatgacatgcatatgcagaaagagattgcatcagaagagactatcagaaaattaaaagaaaaacatgatatggatgttcagaaagaggccatatcagaagatacaattagaaatttgaaagaaaaaaatgatgtgcacgtgcagaaagaggagacaataaaaaaattgaaagaagaaaatgaagtgcacattcaggaagaggccatatcaaaggagacaattaaaaatctcaaagaagaaaatgataaactacttcagaaagtggtttccttggaagaggtcatcaataatttacaaactgataatgaattgcagacacaaaaacatactagtctggaaatgagaattgcacaattgcaaagtgagaataattccttacttcaaaaagaggcgagtgattatgttttccctttaaaaagattaggaatcattgattttgagaatattatacatccagatatttaatagtatatcatatgtaggctggattggtggaaaaaactaatcagttgctgaatgaaaaggtagttttgagcctgaaagctgagagtttagagagaaaaataaatcttctggagaatgagttgagttcttttagtgagaaagaggttggacttgaaacaagaattgcacaattgcagagtgagaataattccttacttcaaaaagaggctacattggtggaaagaaccaatcaattgctgaatgaaaaggcagttttgagcctgaaaggggagagtttagaacaaaaaatatatcttctggaaagcgatttgaattctttagtcaagaaggagaattcaactaaagaaactatttcaaacctgaatggaaacattgctgtgctacaagcgcaggtggaagaattggaggagtccaggaataatctttttctagaaaaccagcaattgagggaaaaagtgtcgagtcttcagtcaacggtccaaaatcatgaaaacagtaacacttcttcctgctcatgggatgcatctgtaaaggatcttgcttctgaaaacgaggacttgaagtctgaaattgaagcagcctttacgttggtggagaaattgatggctgaaaatgcagaacttgttgagaaggtcaccgagttatgtgttgagctggatcaccgaagtgcagaagtcggacattctggagtcactgaatccaatgggatgactgaatttgttaaacctactggtgttgccattcctctaccagaatctgctgagtatgcgtctgtatcatcccccaagttgaattcattggaagagacttcagtgaaggataatggtaactctaatgatgctaagcatgttgttggggtaacgtcaaactcgtcgttggtatcggctgatgacgctggagaaatcgtgcaaattccattggatgataatgaaatacaagatatagagttgcaggatgctaagaatgtggaaaatgatgctgatgctgtgccaatcacagatgctccgcttatcggtgctccatttcgtttgatatcatttgttgctaattttgttagtggtgctgacttggttaaccaaagctcttcaaacactgctcgttgacttggttgaccaaagctctgttttttttggctggcagtcttgaacatacaataacctcacttacattaggcagaataccaatataggttggcctaatttgggccattttaatgtttgtatgttaattctttgaacacggaaatattgtactggggaaaagcatatagttttatgtgttcttacttcatattgctttcacttttgg

SEQ ID NO: 54873 - protein, 224 aa, Glycine max
  peptide (1)..(224): Ceres Seq. ID no. 14313876
MGKVLIWIQMVIRQMAISEETIRKLKEENDIHIQKETLSKETIRKLKAENDMHIQKEAIMEETIRKLTEQNDMHMQKEIASEETIRKLKEKHDMDVQKEAISEDTIRNLKEKNDVHVQKEETIKKLKEENEVHIQEEAISKETIKNLKEENDKLLQKVVSLEEVINNLQTDNELQTQKHTSLEMRIAQLQSENNSLLQKEASDYVFPLKRLGIIDFENIIHPDI

SEQ ID NO: 54874 - protein, 215 aa, Glycine max
  peptide (1)..(215): Ceres Seq. ID no. 14313877
MVIRQMAISEETIRKLKEENDIHIQKETLSKETIRKLKAENDMHIQKEAIMEETIRKLTEQNDMHMQKEIASEETIRKLKEKHDMDVQKEAISEDTIRNLKEKNDVHVQKEETIKKLKEENEVHIQEEAISKETIKNLKEENDKLLQKVVSLEEVINNLQTDNELQTQKHTSLEMRIAQLQSENNSLLQKEASDYVFPLKRLGIIDFENIIHPDI

SEQ ID NO: 54875 - protein, 210 aa, Glycine max
  peptide (1)..(210): Ceres Seq. ID no. 14313878
MAISEETIRKLKEENDIHIQKETLSKETIRKLKAENDMHIQKEAIMEETIRKLTEQNDMHMQKEIASEETIRKLKEKHDMDVQKEAISEDTIRNLKEKNDVHVQKEETIKKLKEENEVHIQEEAISKETIKNLKEENDKLLQKVVSLEEVINNLQTDNELQTQKHTSLEMRIAQLQSENNSLLQKEASDYVFPLKRLGIIDFENIIHPDI

SEQ ID NO: 54876 - DNA, 2005 bp, Glycine max
  misc_feature (1)..(2005): Ceres Seq. ID no. 15172108
tatttttttaatataaaataaaatattatattttaaatatatttattattttttcagcttgctgcactaaatcagttaagaaatatatttggactgggtaaacgtgaagccgaggcgatttcacttgatgttacgtcgaaggtatatcgcaaacgacttgcacaggctgttgcagatggtgagttagaaatggcagatagcaaagcagccttccttcaaaatctatgtgatgaacttcattttgatccacaaaaggccagtgaacttcatgaagaaatttatcggcaaaagcttcagaaatgtgtagctgatggggagctcaatgaggaagatgttgctgctttgttgaggttgcgtgtaatgctctgcataccgcaacagattgttgaaacagctcattcagatatatgtggcagtttgtttgaaaaggttgtgaaggaggcaatcgcatcaggggttgatggatatgatgctgaaatccagaaatcagtaagaaaagcagcacatggcctgcgacttactagggaggttgctatttctattgcgagcaaggcggtaaggaagatttttattaattacataaaacgtgcgcgggcagctggaaatcgtacagagtctgcgaaagaactgaagaagatgatagccttcaacaccttagttgtaactaatttggtggaggacattaaaggggagtcagctgatatttcaactgaagaacctgtgaaagaggacattacacaaactgacgacgaagaatgggaatcacttcagacactcaagaaaataagaccgaacaaagaacttacggaaaagttgggaaaacctggtcagacagaaattactctgaaagatgatcttcctgaaagggataggactgatctttacaagacatacttactttattgtctaactggtgaagtgacaagggttccgttcggtgctcagatcactactaagaaggatgattctgagtatcttcttctaaatcagcttggtgggatcctgggattgagtagtcaagaaatagtggaagtgcacaggggtctagctgagcaagcttttaggcaacaggctgaggtaattttagctgatggacagttgacaaaggccagggtggagcagcttaataacctccagaagcaagtaggcttacctcaagaatatgctcagaaaataatcaagagtataaccactacaaaaatggcagctgccattgaaactgctgtaactcaagggaggctcaatatgaagcagattagggaactcaaggaagctaatgttgatttagacagtatggtatccgagaacttgagagaaaccctcttcaaaaaaactgttgatgacattttctcatccggtacaggagagtttgacaatgaggaagtatatgaaaaaatcccatcagatctcaacattaacaaagagaaggcaagaggtgttgttcatgagcttgcaaaaagtagactatctaactcattggttcaggccgtgtctctactaagacagagaaatcacaagggagtggtttcttcactcaatgacttgttggcatgtgacaaagcagtaccctcacagccagtttcatgggaagtgccagaggagcttgctgatctatacaccatatacttgaagagtgatccaactcctgagaatttgtctcgtttgcagtatctgttgggtataaatgattcaacagctgctgctcttagggagatgggagatagattactcaataccactgctgaggaagagaagtttgtattctagtgttgtgataaaatgtttggcattttaggcatactagagatgcttcaagtccccttaattttgccattttttatttgccattttgtttaacggtagcagaaaaagaatatcaccatgtataaactttggaatagagatgagtgcagtgctgaaatcttagataatattttgtttgagatagttaaattaatcaattgttattttgtatgaatgaaaataagttctcataatcgtgaac

SEQ ID NO: 54877 - protein, 525 aa, Glycine max
  peptide (1)..(525): Ceres Seq. ID no. 15172109
MADSKAAFLQNLCDELHFDPQKASELHEEIYRQKLQKCVADGELNEEDVAALLRLRVMLCIPQQIVETAHSDICGSLFEKVVKEAIASGVDGYDAEIQKSVRKAAHGLRLTREVAISIASKAVRKIFINYIKRARAAGNRTESAKELKKMIAFNTLVVTNLVEDIKGESADISTEEPVKEDITQTDDEEWESLQTLKKIRPNKELTEKLGKPGQTEITLKDDLPERDRTDLYKTYLLYCLTGEVTRVPFGAQITTKKDDSEYLLLNQLGGILGLSSQEIVEVHRGLAEQAFRQQAEVILADGQLTKARVEQLNNLQKQVGLPQEYAQKIIKSITTTKMAAAIETAVTQGRLNMKQIRELKEANVDLDSMVSENLRETLFKKTVDDIFSSGTGEFDNEEVYEKIPSDLNINKEKARGVVHELAKSRLSNSLVQAVSLLRQRNHKGVVSSLNDLLACDKAVPSQPVSWEVPEELADLYTIYLKSDPTPENLSRLQYLLGINDSTAAALREMGDRLLNTTAEEEKFVF

SEQ ID NO: 54878 - protein, 468 aa, Glycine max
  peptide (1)..(468): Ceres Seq. ID no. 15172110
MLCIPQQIVETAHSDICGSLFEKVVKEAIASGVDGYDAEIQKSVRKAAHGLRLTREVAISIASKAVRKIFINYIKRARAAGNRTESAKELKKMIAFNTLVVTNLVEDIKGESADISTEEPVKEDITQTDDEEWESLQTLKKIRPNKELTEKLGKPGQTEITLKDDLPERDRTDLYKTYLLYCLTGEVTRVPFGAQITTKKDDSEYLLLNQLGGILGLSSQEIVEVHRGLAEQAFRQQAEVILADGQLTKARVEQLNNLQKQVGLPQEYAQKIIKSITTTKMAAAIETAVTQGRLNMKQIRELKEANVDLDSMVSENLRETLFKKTVDDIFSSGTGEFDNEEVYEKIPSDLNINKEKARGVVHELAKSRLSNSLVQAVSLLRQRNHKGVVSSLNDLLACDKAVPSQPVSWEVPEELADLYTIYLKSDPTPENLSRLQYLLGINDSTAAALREMGDRLLNTTAEEEKFVF

SEQ ID NO: 54879 - protein, 376 aa, Glycine max
  peptide (1)..(376): Ceres Seq. ID no. 15172111
MIAFNTLVVTNLVEDIKGESADISTEEPVKEDITQTDDEEWESLQTLKKIRPNKELTEKLGKPGQTEITLKDDLPERDRTDLYKTYLLYCLTGEVTRVPFGAQITTKKDDSEYLLLNQLGGILGLSSQEIVEVHRGLAEQAFRQQAEVILADGQLTKARVEQLNNLQKQVGLPQEYAQKIIKSITTTKMAAAIETAVTQGRLNMKQIRELKEANVDLDSMVSENLRETLFKKTVDDIFSSGTGEFDNEEVYEKIPSDLNINKEKARGVVHELAKSRLSNSLVQAVSLLRQRNHKGVVSSLNDLLACDKAVPSQPVSWEVPEELADLYTIYLKSDPTPENLSRLQYLLGINDSTAAALREMGDRLLNTTAEEEKFVF

SEQ ID NO: 54880 - DNA, 1988 bp, Glycine max
  misc_feature (1)..(1988): Ceres Seq. ID no. 12581802
cagctacgtaggcccccccccccgcgatctccctctctctaacgacgccgtttcgatcctctccttctgcttcgtagtaacagagttcaaaccataccatggatgagacttcagctctcatcgaagccattctccgagagcaagaggaagaagaagaagaagctcacagaagaagaaggaaccacaccacaatcaaaaataacaacaacaacaacaacgaatggcaaacggtgtcgtatacaaagcgcaaccgcaaccgcaacaataataggaagcctctcgccgacgacaatttcgccgccgatccttcttcctccgacgtcttcagctccgtccagcgccattccgaggaccgccgcctccggctactcaagtctcagatcgccgccgctgaagcggctgctgcggaagccacaccgagcagatcgaagcggcattccgacaacgaggaggacggcgatgccgagcctgaagccgaggtgaagaaggcgaagcagaagaagccgaagaagccgaaggtgacggtggccgaagctgcttccggaatcagcgccgatgatctcgacgcgtttctcgctgaaattaccgcttcgtatgaatcgcagcaagatattatgctgatgcggtttgctgattacttcggtcgcgcgttctcgtcggtgagtggagctcaattcccatggttgaagacgttcaaagagtctaccgttgcaaagattgttgatatccctcttttgcatatatctgaggatatttacaaaatatcaacggattgggtcagtcatcgatcatatgaagcacttggttcctttgtgctatggtcgttggacagcattcttgcagaccttgccagtcatcaaggagttgttaagggatctaagaaggcagtccagcaatcatcaccgaaatctcaggttgccatgtttgtggttttagcaatggtgcttcgacgaaaacctgatgtcttgattagtttattaccaataataaaggagaataaaaaatatcaaggacaggataaactccctgtcattgtttgggtgataactcaggcttctcaaggagatctagttatggggttgtacttgtgggtatatcttctattgccaatgctgagtgtgaagtctggttgtaatccacagtcaagagacttgatattacagttggttgagagaattatcacatctcctaaagctcgttctatcttgctaaatggggctgtcagaaggggggagcgtgttgtgcccccatgggcacttgattctctattgagagttactttccctcttccttcagcccgggtcaaggccactgaaagatttgaagctgtttatccaacattaagagaagttgcccttgccagttcccctggaagcaaagcaataaagcatcttgcacaacagatactaagctttgcaattaaagctgcaggagaagctaattctgacctatcaaaggaggcaagtgacatttttatttggtgtttgactcagaaccctgaatgttacaagcaatgggattttctttatatggataaccttgaagcaagtgttgttgtattgagaaaactttctggtgaatggaaggaatactttgtcaaacatcctactcttgatcctttgagggaaaatcttaagagcttcagtcaaaagaatgaaaaggcattggctaaggtggatgatggtgctcgccatgcattattgaaggatgcagacaagtactgcaaagtccttttgggacaattgtcacaaggccatggatgcttgaagagcatgatagttctttctgttgtacttgctgttggtgccgttttcatgtcccagaacttgcatttatgggattatagtcaactgacagaaatgttgaatctctcctaggatgagagttatcctgtgatttgctcggtgcttatgcccagtgtggatcacttcagtcaatagtgaggtgtgatgaggaatatttaatttattttagtcttcgattgagcg

SEQ ID NO: 54881 - protein, 592 aa, Glycine max
  peptide (1)..(592): Ceres Seq. ID no. 12581803
MDETSALIEAILREQEEEEEEAHRRRRNHTTIKNNNNNNNEWQTVSYTKRNRNRNNNRKPLADDNFAADPSSSDVFSSVQRHSEDRRLRLLKSQIAAAEAAAAEATPSRSKRHSDNEEDGDAEPEAEVKKAKQKKPKKPKVTVAEAASGISADDLDAFLAEITASYESQQDIMLMRFADYFGRAFSSVSGAQFPWLKTFKESTVAKIVDIPLLHISEDIYKISTDWVSHRSYEALGSFVLWSLDSILADLASHQGVVKGSKKAVQQSSPKSQVAMFVVLAMVLRRKPDVLISLLPIIKENKKYQGQDKLPVIVWVITQASQGDLVMGLYLWVYLLLPMLSVKSGCNPQSRDLILQLVERIITSPKARSILLNGAVRRGERVVPPWALDSLLRVTFPLPSARVKATERFEAVYPTLREVALASSPGSKAIKHLAQQILSFAIKAAGEANSDLSKEASDIFIWCLTQNPECYKQWDFLYMDNLEASVVVLRKLSGEWKEYFVKHPTLDPLRENLKSFSQKNEKALAKVDDGARHALLKDADKYCKVLLGQLSQGHGCLKSMIVLSVVLAVGAVFMSQNLHLWDYSQLTEMLNLS

SEQ ID NO: 54882 - protein, 420 aa, Glycine max
  peptide (1)..(420): Ceres Seq. ID no. 12581804
MLMRFADYFGRAFSSVSGAQFPWLKTFKESTVAKIVDIPLLHISEDIYKISTDWVSHRSYEALGSFVLWSLDSILADLASHQGVVKGSKKAVQQSSPKSQVAMFVVLAMVLRRKPDVLISLLPIIKENKKYQGQDKLPVIVWVITQASQGDLVMGLYLWVYLLLPMLSVKSGCNPQSRDLILQLVERIITSPKARSILLNGAVRRGERVVPPWALDSLLRVTFPLPSARVKATERFEAVYPTLREVALASSPGSKAIKHLAQQILSFAIKAAGEANSDLSKEASDIFIWCLTQNPECYKQWDFLYMDNLEASVVVLRKLSGEWKEYFVKHPTLDPLRENLKSFSQKNEKALAKVDDGARHALLKDADKYCKVLLGQLSQGHGCLKSMIVLSVVLAVGAVFMSQNLHLWDYSQLTEMLNLS

SEQ ID NO: 54883 - protein, 418 aa, Glycine max
  peptide (1)..(418): Ceres Seq. ID no. 12581805
MRFADYFGRAFSSVSGAQFPWLKTFKESTVAKIVDIPLLHISEDIYKISTDWVSHRSYEALGSFVLWSLDSILADLASHQGVVKGSKKAVQQSSPKSQVAMFVVLAMVLRRKPDVLISLLPIIKENKKYQGQDKLPVIVWVITQASQGDLVMGLYLWVYLLLPMLSVKSGCNPQSRDLILQLVERIITSPKARSILLNGAVRRGERVVPPWALDSLLRVTFPLPSARVKATERFEAVYPTLREVALASSPGSKAIKHLAQQILSFAIKAAGEANSDLSKEASDIFIWCLTQNPECYKQWDFLYMDNLEASVVVLRKLSGEWKEYFVKHPTLDPLRENLKSFSQKNEKALAKVDDGARHALLKDADKYCKVLLGQLSQGHGCLKSMIVLSVVLAVGAVFMSQNLHLWDYSQLTEMLNLS

SEQ ID NO: 54884 - DNA, 1227 bp, Glycine max
  misc_feature (1)..(1227): Ceres Seq. ID no. 14304830
agctttaagcttttaacagtcaaaacttactacaacccagatcaattgcagggactaatatggggataacaaaaattttaatcagttataatttttctgttcttgaaaggtaaagtaggacagtggtgtgaaattggtggaaagaaaaaacatcagtgatcttgagtaactaacaatccatccgtgtaaaacgtgattggatttgggtcagtaatttaatgtacgaattacgaggtggcagcgactttaagtgttgaatggtgtgcaacatagaatcgcattggcgcgaacacgatgatgaggtcaaagatagtgttgtttggagactccatcacggagcaatcgatccgagagaatggatggggtgttcctcttgccaatgcctattctcgcagggctgatgtacttgttcgtggttatggtggatacaacactaggtgggctatgttcttactgggccatctcttccctctggactcaactaaaccacctactgctaccacaattttctttggcgctaatgatgcagctttgttaggaagaaccagtgaaaggcaacatgtacctattgaagaattcaaagagaacctcagaaaatttgttcgacacttaaaggattgctcaccaactatggtaattgtgcttattactccacctccacttagtgaggaaggacgcctggcatacgtaagatccgtatatggtgagaatgctactaaaatacctgaaagaacaaatgaagtaactggtcaatatgcaaatgcctgtgttgaggtagcaaaggaaatgggcgtgtggtatatcaatctatggtccaaaatgcaagaaaccgatggctggcaaacaaaatttttgtgggatggattgcacctgacaacagaaggaaatgcagtagtctacgaagaagtgataaatgtgttcaatgaagcagggctttctgctgataacatgccaatggatttccctcaccactcaaaaattgattccaaacatcctgagagagctttccagcagaatgtttgtgatatcccattgtgacactgctttggtctagtctagcaattttataccacgttctatttgatgatctagattttcttccagaactatattcgagtttaatgctttgatgaaaccacggtgaagaatattttttgtaatgacgtctgattcatgtagttcatctcatataataatggaataaaactattgttgttgtaatgcttt

SEQ ID NO: 54885 - protein, 247 aa, Glycine max
  peptide (1)..(247): Ceres Seq. ID no. 14304831
MMRSKIVLFGDSITEQSIRENGWGVPLANAYSRRADVLVRGYGGYNTRWAMFLLGHLFPLDSTKPPTATTIFFGANDAALLGRTSERQHVPIEEFKENLRKFVRHLKDCSPTMVIVLITPPPLSEEGRLAYVRSVYGENATKIPERTNEVTGQYANACVEVAKEMGVWYINLWSKMQETDGWQTKFLWDGLHLTTEGNAVVYEEVINVFNEAGLSADNMPMDFPHHSKIDSKHPERAFQQNVCDIPL

SEQ ID NO: 54886 - protein, 246 aa, Glycine max
  peptide (1)..(246): Ceres Seq. ID no. 14304832
MRSKIVLFGDSITEQSIRENGWGVPLANAYSRRADVLVRGYGGYNTRWAMFLLGHLFPLDSTKPPTATTIFFGANDAALLGRTSERQHVPIEEFKENLRKFVRHLKDCSPTMVIVLITPPPLSEEGRLAYVRSVYGENATKIPERTNEVTGQYANACVEVAKEMGVWYINLWSKMQETDGWQTKFLWDGLHLTTEGNAVVYEEVINVFNEAGLSADNMPMDFPHHSKIDSKHPERAFQQNVCDIPL

SEQ ID NO: 54887 - protein, 197 aa, Glycine max
  peptide (1)..(197): Ceres Seq. ID no. 14304833
MFLLGHLFPLDSTKPPTATTIFFGANDAALLGRTSERQHVPIEEFKENLRKFVRHLKDCSPTMVIVLITPPPLSEEGRLAYVRSVYGENATKIPERTNEVTGQYANACVEVAKEMGVWYINLWSKMQETDGWQTKFLWDGLHLTTEGNAVVYEEVINVFNEAGLSADNMPMDFPHHSKIDSKHPERAFQQNVCDIPL

SEQ ID NO: 54888 - DNA, 690 bp, Glycine max
  misc_feature (1)..(690): Ceres Seq. ID no. 15227245
ccgggccccccctcgagtcagctwcgtaggccccccccccccaccgcagagaggatcaagggccacaacttctaatttatcagtttctcgttgatgatcttgacagtatggtgagtgatgctatgtggacagatgctaatggcatcgtgggttgtgaggattctaaacagagaaaggagctaaaggggtttcttcttgattgtgttatagaatatctagaatcaaattgctgccaatattttaactctggattcaagaaatggacgaagctgcccttgtgcatggaagctgagatgttggctcaagaggtgaagagggagatcaacaagtggttatctatggttgggatggtgcctgatgaaataatagaatgggaaatgagccactccttggggaaatggactgactttgacattgaagcatttgaggctggtgttgatatagatggggatatacttcaaattttggttgatgaagttgttcaagacctgcaggttgcaagcaggggcaccatttacttctaaaattcctttcagctgatcataggatatacttctaaaattcctttctctggtgagatatgtgatctaacaaggtgtattttttgtacaaataggattatgttatttctaatggaggcttttttttggggctctttgaattagtggacaaaataaagtccattgacct

SEQ ID NO: 54889 - protein, 138 aa, Glycine max
  peptide (1)..(138): Ceres Seq. ID no. 15227246
MVSDAMWTDANGIVGCEDSKQRKELKGFLLDCVIEYLESNCCQYFNSGFKKWTKLPLCMEAEMLAQEVKREINKWLSMVGMVPDEIIEWEMSHSLGKWTDFDIEAFEAGVDIDGDILQILVDEVVQDLQVASRGTIYF

SEQ ID NO: 54890 - protein, 133 aa, Glycine max
  peptide (1)..(133): Ceres Seq. ID no. 15227247
MWTDANGIVGCEDSKQRKELKGFLLDCVIEYLESNCCQYFNSGFKKWTKLPLCMEAEMLAQEVKREINKWLSMVGMVPDEIIEWEMSHSLGKWTDFDIEAFEAGVDIDGDILQILVDEVVQDLQVASRGTIYF

SEQ ID NO: 54891 - protein, 80 aa, Glycine max
  peptide (1)..(80): Ceres Seq. ID no. 15227248
MEAEMLAQEVKREINKWLSMVGMVPDEIIEWEMSHSLGKWTDFDIEAFEAGVDIDGDILQILVDEVVQDLQVASRGTIYF

SEQ ID NO: 54892 - DNA, 1362 bp, Glycine max
  misc_feature (1)..(1362): Ceres Seq. ID no. 14307351
actctcactggttttctctctccctttctctctctatctctgctctgtgctttttctctctgcagaatttcccaaatttctccactaccctatctcctctgctcctgaaactcgcacattcttcaccagcaatgcacgatcttcaatacgaatgcaatatcgatatttgacatccgagtatcagtgcttgagcgggtgaattggaaaatgctagaggcaatggaaagttcggtcaatggtggcttctcccatttgcagagctgtggagatagcagcgaagaagagttatcggtgcttcctcgtcacaccaaagttgtcgtaaccggaaataaccgcaccaaatcggtgctcgttggtcttcaaggtgtcgttaagaaagccgttggactaggcggatggcattggctggttcttacaaatggtattgaagtgaagctacaaaggaatgcacttagcgtgattgaagcacccactggtaatgaggaagatgatgaccttgagtttgaaaatatgccgtggaatggatcagatatggcatcggacgacacacacaagtcccacaaatcgaggcatagaatgtatagaacaatgggatcatctcacaagaccatgagtaggtccttctctggcgattcacagtcgaaggggtccgtttctatgcctaatgggtccgcgaaggtggacttgagcaaacttgaaatggctgcactgtggagatattggcgacattttaatctagtggatgcggtcccaaacccatcaaaagagcagctagtagacgttgttcagaggcatttcatgtcgcagcaaatcgacgaattgcaggtgattgtgggatttgtccaagctgcaaagaggctttagactgtatgcaattgagatggaatgatgcgagaaatgatatttgaatgaaaagtataattgtctatgctaacaaagataatgtatgtaatatccacttcccttcgtattatgtagcatgttttatcggtgatttttaactttctgttgtagtagtaggttagtagtttgaggttatagaggttcttactcttttgtagccacccggttgtgtagatatatatgacattgcaactggatcatcagggaagtcaccaccatggctttcttttcaacttgattcgatgtattactgactggggaagtgggttttcagagaccttaatgtatatatattttagtttctccctttgattcgtcttagatgaattcaagtgttgtgttgctccgggtggagtagtggatcgttgctaccatctccaagttaaagatactgttcaaatactattgagctaatgctagtgtgcgttcacaaagacaaaaatcactttatcattattc

SEQ ID NO: 54893 - protein, 218 aa, Glycine max
  peptide (1)..(218): Ceres Seq. ID no. 14307352
MLEAMESSVNGGFSHLQSCGDSSEEELSVLPRHTKVVVTGNNRTKSVLVGLQGVVKKAVGLGGWHWLVLTNGIEVKLQRNALSVIEAPTGNEEDDDLEFENMPWNGSDMASDDTHKSHKSRHRMYRTMGSSHKTMSRSFSGDSQSKGSVSMPNGSAKVDLSKLEMAALWRYWRHFNLVDAVPNPSKEQLVDVVQRHFMSQQIDELQVIVGFVQAAKRL

SEQ ID NO: 54894 - protein, 214 aa, Glycine max
  peptide (1)..(214): Ceres Seq. ID no. 14307353
MESSVNGGFSHLQSCGDSSEEELSVLPRHTKVVVTGNNRTKSVLVGLQGVVKKAVGLGGWHWLVLTNGIEVKLQRNALSVIEAPTGNEEDDDLEFENMPWNGSDMASDDTHKSHKSRHRMYRTMGSSHKTMSRSFSGDSQSKGSVSMPNGSAKVDLSKLEMAALWRYWRHFNLVDAVPNPSKEQLVDVVQRHFMSQQIDELQVIVGFVQAAKRL

SEQ ID NO: 54895 - protein, 117 aa, Glycine max
  peptide (1)..(117): Ceres Seq. ID no. 14307354
MPWNGSDMASDDTHKSHKSRHRMYRTMGSSHKTMSRSFSGDSQSKGSVSMPNGSAKVDLSKLEMAALWRYWRHFNLVDAVPNPSKEQLVDVVQRHFMSQQIDELQVIVGFVQAAKRL

SEQ ID NO: 54896 - DNA, 1690 bp, Glycine max
  misc_feature (1)..(1690): Ceres Seq. ID no. 12581920
cagctacgtaggccccccccccgattcataactttgcgggttaggctcagacccaatctctattattagtattacatatcttggtcttaattttgattgaagctgaagcatcttggaggaaccaaatggctccactcttgtaccttggttgcagaagggtgctcctgttctctcttcttttgttcttttttgtttctgtttgctcagaacctcatcaaccagagagcaaagccttgtctggtgatggcagcagcagaagcagaagaagaatgttgttgttggagttggattctgaaaaggaagaatttgaacaacccctgaaaaagaaatccaccaaaaaccaaaccaagttaatcaaacccaccactagcctctcctccaaaaaccaaaccaaaaccatcaaatccaataaccttagttcctccaaaaaccaaaccaagctagccaaaaccaaagccaccaccctcaccgacaccgaggttgtcgtgaagaagctcaactccaccaccttaaagtccaagaagctgaattccacatccaaaggctccacgaaatcatcctcattggatctcgcgaaaacaagtggtactagtggcggcaagaacaaaacgacaaaagccaccgccaccaaggacaaggaagttaccaataaaaagaccaagttggatcaaaccgaagaatccgacaagcagagtaataagaagagtaacaccaccaacaacaagaagaagaaagaacaacaaggacaacctagttgggtgttcgaagacgaggtggacgatgatttggtttcggagttcaaagatctacccatgaagttccaacaaacactgatcccagacctggaacgaatctccacaacctcaaaagcctacataacaaaagccaacaaagagatcacgagagggttcaaaccctacgttggcaacaagtacgcacccaccatcaccactttactctcttgcgcattcgctttgatccctttgcttttggcctcactcctcttcaacaaaatcaaagcctatttctcactccaaaagctcttaatcttcatccaagcctacctcgctatctacttctccattctttgcctttcttccttcgtcactggccttgaacctctcaggtttttctactctgcttcgcgctccacctatctttgcctgcaggtcctccaaactctcgcttacgttctctaccttttgctgctactcatgtatctcgttttggtgttctcaactgattctggattgggctccaaattcttgggcctggcccaaacttttgtgggcttttccgtggggttgcattactacgtgactgtgtttcacagggttgtgttgaagcaaccgcccaagaccaattggaagattcacgccatttatgccacgtgttttttcctcatttgtgtcattgctagggctgatagaaagaagaagacctacttggaagaaggtggagaagagggcaagaaaaattgaaattagtcaaattggctatatatattagctattagctatacctacattttcgttttttttcctcataattaaaattttcaaattatccaaagcaacatataccaatattgttctattatattgtagcgaaatgccgtaaggcttttggcttttgtgtcaaccagcattcagattcgttccataaataaattcatgatgaggtgatggct

SEQ ID NO: 54897 - protein, 451 aa, Glycine max
  peptide (1)..(451): Ceres Seq. ID no. 12581921
MAPLLYLGCRRVLLFSLLLFFFVSVCSEPHQPESKALSGDGSSRSRRRMLLLELDSEKEEFEQPLKKKSTKNQTKLIKPTTSLSSKNQTKTIKSNNLSSSKNQTKLAKTKATTLTDTEVVVKKLNSTTLKSKKLNSTSKGSTKSSSLDLAKTSGTSGGKNKTTKATATKDKEVTNKKTKLDQTEESDKQSNKKSNTTNNKKKKEQQGQPSWVFEDEVDDDLVSEFKDLPMKFQQTLIPDLERISTTSKAYITKANKEITRGFKPYVGNKYAPTITTLLSCAFALIPLLLASLLFNKIKAYFSLQKLLIFIQAYLAIYFSILCLSSFVTGLEPLRFFYSASRSTYLCLQVLQTLAYVLYLLLLLMYLVLVFSTDSGLGSKFLGLAQTFVGFSVGLHYYVTVFHRVVLKQPPKTNWKIHAIYATCFFLICVIARADRKKKTYLEEGGEEGKKN

SEQ ID NO: 54898 - protein, 403 aa, Glycine max
  peptide (1)..(403): Ceres Seq. ID no. 12581922
MLLLELDSEKEEFEQPLKKKSTKNQTKLIKPTTSLSSKNQTKTIKSNNLSSSKNQTKLAKTKATTLTDTEVVVKKLNSTTLKSKKLNSTSKGSTKSSSLDLAKTSGTSGGKNKTTKATATKDKEVTNKKTKLDQTEESDKQSNKKSNTTNNKKKKEQQGQPSWVFEDEVDDDLVSEFKDLPMKFQQTLIPDLERISTTSKAYITKANKEITRGFKPYVGNKYAPTITTLLSCAFALIPLLLASLLFNKIKAYFSLQKLLIFIQAYLAIYFSILCLSSFVTGLEPLRFFYSASRSTYLCLQVLQTLAYVLYLLLLLMYLVLVFSTDSGLGSKFLGLAQTFVGFSVGLHYYVTVFHRVVLKQPPKTNWKIHAIYATCFFLICVIARADRKKKTYLEEGGEEGKKN

SEQ ID NO: 54899 - DNA, 1027 bp, Glycine max
  misc_feature (1)..(1027): Ceres Seq. ID no. 15170299
ttttaaatctgcaacctgcatagtgagacgtagatgccctggaaaatttctgtactgtagcaaacagagtagcaccaaaacaattttggttaaagagagtgaaaaacggggttagtaaattgcaatatcatattaagggcatgttgcaaatacgagtgaatgaatgtcttcgtttacgggtgcacgttccaaagcaaatgctaagtctgaaatgatcatagctaacgagattaacctctgccccatcaacacaagtaccattacatcaacctcgccagatacaagtgccaagaatgagaagaaaaagaagtctatccttccaaagattttcggatcaaagcgaaatgggagaggttcagacgaagagacactcaaatcatcaagtgcagaagaaggagatggagttactcttgatttggagaataagattgagacgagaagaaaagcatttttggaagcggcccccatcatgagaaaaagtttctcagaaagggagactagtcctgggatcgaaggcctaaatttgtccaattttgaacggcctatgatgactatggaaactgaacttctcaggatctttgttgcagcgtggaatgtgggagtcaccaagttatgacctcaacctccaagatttcttgctagtggaaggctccgcagatatatatgttttggggtacgaacatccatgcaacaaagtgaagaagaaaaaaataacgaacgaaagaagaagaagaagaagtatccctccccttcaccttaaaatttagttttcccttctcacaagtttggcatgttcgatgattgtgtgaatttagggcggaaagtgaaatacgggaaaaatggttgcttatggtaaattttgtttggaattgagattttatacatggacgtctcgaatgctcacttatgttgtatattttgttagttggttgttttgtgtttgtatctcttgatggctacaacatctcaccctttgtgactcctcttttataaaaatatcatcccaattttttctatgaatttgaat

SEQ ID NO: 54900 - protein, 150 aa, Glycine max
  peptide (1)..(150): Ceres Seq. ID no. 15170300
MSSFTGARSKANAKSEMIIANEINLCPINTSTITSTSPDTSAKNEKKKKSILPKIFGSKRNGRGSDEETLKSSSAEEGDGVTLDLENKIETRRKAFLEAAPIMRKSFSERETSPGIEGLNLSNFERPMMTMETELLRIFVAAWNVGVTKL

SEQ ID NO: 54901 - protein, 134 aa, Glycine max
  peptide (1)..(134): Ceres Seq. ID no. 15170301
MIIANEINLCPINTSTITSTSPDTSAKNEKKKKSILPKIFGSKRNGRGSDEETLKSSSAEEGDGVTLDLENKIETRRKAFLEAAPIMRKSFSERETSPGIEGLNLSNFERPMMTMETELLRIFVAAWNVGVTKL

SEQ ID NO: 54902 - DNA, 1602 bp, Glycine max
  misc_feature (1)..(1602): Ceres Seq. ID no. 14304823
accaaacctggttcatgtttaagacacggacatgtcacgtaaaccaagccaactattactcgcagatgagacaagaaacaattaaaaaaatcaattaaaatataaaaccagtgaagttgccacataactctttgattcccattactcatttccaccatttcaccttctcaatctgtttctctgctttactaatttgtcccaaatcagaaccagattgagcttctgcacaaccagaccagagattcaacgcagaaactatgcttatccctggtccataggatctgatttggttcataagagagtagtacacgtttcattgctcgaaatagagttgaaaaatctggagtttccatgtctgagaaaccatcttcatcgttgacatctaccgtagctgctcgagaagttgatcccttgttgcaggatttgaatgaaaaaaagcagagctttaggcgcaacgtggtgtcgttagcggtggagttgaaggagctacgtagtcgcctagcttcgcaggaacaatcgtatgctaaggaaactcaaaccagacaggaagcagagacaaatgccaagaacatggaattgcaaattggaaggttgcagaagaatttggaagaaagaaatgagcagcttcaggcgtcagcctcctctgctgagaagtatctgaaggagttggatgatcttagaacacagcttgtaacaacaagagcaactgctgatgcaagtgctgcatcagctcaatcagctcagctccaatgtttagaacttgtaaaagaattaaatgagaaaaatggttcactaagagagcatgaggatcgtgtcctgaggctaggggagcaactagacaatttacagaaggatcttcaggcaagggaatcttcacagaaacaattgaaagatgaagttttgaggattgagcacgatattatggaggctcttgcaaaagccggagagaacaagaattgtgaactgcggaaaatattggatgaggtttctcctaaaaattttgagaagatgaataagattctaggtgttaaggatgatgaaatagcaaaacttaaggatgaaattaagatcatgtctgctcactggaagctcaagactaaggaattagagtcacagttggagaaacagcggcgtgctgatcaagagctgaagaagaaagtgttgaagttagaattctgtctgcaggaagctcgttctcagacacgaaaactgcaaaggatgggtgaacgacgggacaaagctatcaaagaactgagagatcaattagctgcaaagcaacaaagagaagttgcagccgcagataagctaaaccagaatttctgggacacttctggattcaaaatggtggtctcgatgtccatgttgatcttggtggtattttcaaggcggtgaaaccattcctatatccaaaacaattcttgtatatagacccatatataccttcaaattctaggagtctagacaagttgtagaagccattttgcgcggcagtttttatagataatctactagctttagcttgtgcaaaatgtacgcgtagcaccaggatcagaaggcatttttgcggtgatctataaaattacattgcgtagttgcatttac

SEQ ID NO: 54903 - protein, 346 aa, Glycine max
  peptide (1)..(346): Ceres Seq. ID no. 14304824
MSEKPSSSLTSTVAAREVDPLLQDLNEKKQSFRRNVVSLAVELKELRSRLASQEQSYAKETQTRQEAETNAKNMELQIGRLQKNLEERNEQLQASASSAEKYLKELDDLRTQLVTTRATADASAASAQSAQLQCLELVKELNEKNGSLREHEDRVLRLGEQLDNLQKDLQARESSQKQLKDEVLRIEHDIMEALAKAGENKNCELRKILDEVSPKNFEKMNKILGVKDDEIAKLKDEIKIMSAHWKLKTKELESQLEKQRRADQELKKKVLKLEFCLQEARSQTRKLQRMGERRDKAIKELRDQLAAKQQREVAAADKLNQNFWDTSGFKMVVSMSMLILVVFSRR

SEQ ID NO: 54904 - protein, 273 aa, Glycine max
  peptide (1)..(273): Ceres Seq. ID no. 14304825
MELQIGRLQKNLEERNEQLQASASSAEKYLKELDDLRTQLVTTRATADASAASAQSAQLQCLELVKELNEKNGSLREHEDRVLRLGEQLDNLQKDLQARESSQKQLKDEVLRIEHDIMEALAKAGENKNCELRKILDEVSPKNFEKMNKILGVKDDEIAKLKDEIKIMSAHWKLKTKELESQLEKQRRADQELKKKVLKLEFCLQEARSQTRKLQRMGERRDKAIKELRDQLAAKQQREVAAADKLNQNFWDTSGFKMVVSMSMLILVVFSRR

SEQ ID NO: 54905 - DNA, 1252 bp, Glycine max
  misc_feature (1)..(1252): Ceres Seq. ID no. 15170265
atgcgtgctagttaatgtcttttccagaagaactgttttctgtacttcggacagtgcatctactgaggggacttagcattggacttggaatcaattactcttgtgcagaacagtggagacccttcgcagaagaagctttgtcccgagctggcagattaaaacgtggcactgtgactcttgcttaagacaggcatttctgaatggcatgccttacatgatttctagtattatcattcgttggttgcttctgatgtgtctatttcatatgaagatatctctccatcctactaaaccaactacatctagttatgatgtcacttgatgttttcacaggtaaggatgttaagcccagaggcagcaaaatgttgagtaaaatatttttttggagacactaaataggcaggtctggatcaatctagtttgttgattctgattcactggtaacttcttgtgtgacgtttaggaaagattatccgacccggaccgacccgacccgacccgaagcgagttgcagcaccgaaaaatgttcggcagaatcagagcatccacttcgtcgctcgacaccttagacggttctccgtccaagattctcaaagacgacactttctccttctacgaggctactctcatgaagctaatgcttggtgcgcgacgcgatacgagtgaggttacaaatgattcttcagttaattcaccttctgcggaagaagcaaatctcaagccagattttaatcctgcaacaagcacttcttgttccgagacaacgatgatggacacggagtctgataacgataactcttcacctagggttactgatcacgtttctagtgggagctcggaacagctaaagcagagcaacgtttccattcttcatttcttcaaagttaaggataccggacaggccggtgtgtcttcttccgaagaggcaacaacgtcaatgcggaatggaagttctgaatctatctcatcaatttgtgttgaatctgattgcagaagtgaagtggaaggtgttcaaattttgcaatattgtgaaatgtcggattaaaggttatacaaatatttattactcctactgcttctatcagttaaatgccatgctaaatatttttctgttgtgttgtactgtatctcactctggttacacttgagtgtggaccatgtattgttatattagatacactggtttttataccaaagtttggtaaattaagagtgtgtttccagtgaataaattagatgaagttgcaaagtt

SEQ ID NO: 54906 - protein, 173 aa, Glycine max
  peptide (1)..(173): Ceres Seq. ID no. 15170266
MFGRIRASTSSLDTLDGSPSKILKDDTFSFYEATLMKLMLGARRDTSEVTNDSSVNSPSAEEANLKPDFNPATSTSCSETTMMDTESDNDNSSPRVTDHVSSGSSEQLKQSNVSILHFFKVKDTGQAGVSSSEEATTSMRNGSSESISSICVESDCRSEVEGVQILQYCEMSD

SEQ ID NO: 54907 - protein, 138 aa, Glycine max
  peptide (1)..(138): Ceres Seq. ID no. 15170267
MKLMLGARRDTSEVTNDSSVNSPSAEEANLKPDFNPATSTSCSETTMMDTESDNDNSSPRVTDHVSSGSSEQLKQSNVSILHFFKVKDTGQAGVSSSEEATTSMRNGSSESISSICVESDCRSEVEGVQILQYCEMSD

SEQ ID NO: 54908 - protein, 135 aa, Glycine max
  peptide (1)..(135): Ceres Seq. ID no. 15170268
MLGARRDTSEVTNDSSVNSPSAEEANLKPDFNPATSTSCSETTMMDTESDNDNSSPRVTDHVSSGSSEQLKQSNVSILHFFKVKDTGQAGVSSSEEATTSMRNGSSESISSICVESDCRSEVEGVQILQYCEMSD

SEQ ID NO: 54909 - DNA, 566 bp, Glycine max
  misc_feature (1)..(566): Ceres Seq. ID no. 13581144
atatatggagagaatggagtttcagacagcaataaattatattcagaggaagtgaagaaggataatatcattagccctaaaatgaagaatgtaactgtgaaatggaatccctgttctgagaaagagcatcagttttatatttcagaagctgaactgcaaatgcatcaagctaagacgccattgtggggaaagactgggatatattttcattcagtgggtaaagaggctactttgatgatggatgaagaagctgctctcgaaggggaatttgagatcgaaaagattccaactcgtgtgatacaagctaggtcaaaagacttggttccaatttttgactatattcagacctcaaaatttcaacaaataaggtctgctttgatgactaactaattaacttactaattatctattaggtaggtcaaaagatttaggctttcgacattttgctattaatttttttgtcataacgacattacctcactttcgaaggctagagaataccaaaattgattatgttcatattgcatgtactctttgctgcatgcaaggagacagtttatttatgg

SEQ ID NO: 54910 - protein, 129 aa, Glycine max
  peptide (1)..(129): Ceres Seq. ID no. 13581145
IYGENGVSDSNKLYSEEVKKDNIISPKMKNVTVKWNPCSEKEHQFYISEAELQMHQAKTPLWGKTGIYFHSVGKEATLMMDEEAALEGEFEIEKIPTRVIQARSKDLVPIFDYIQTSKFQQIRSALMTN

SEQ ID NO: 54911 - protein, 102 aa, Glycine max
  peptide (1)..(102): Ceres Seq. ID no. 13581146
MKNVTVKWNPCSEKEHQFYISEAELQMHQAKTPLWGKTGIYFHSVGKEATLMMDEEAALEGEFEIEKIPTRVIQARSKDLVPIFDYIQTSKFQQIRSALMTN

SEQ ID NO: 54912 - protein, 76 aa, Glycine max
  peptide (1)..(76): Ceres Seq. ID no. 13581147
MHQAKTPLWGKTGIYFHSVGKEATLMMDEEAALEGEFEIEKIPTRVIQARSKDLVPIFDYIQTSKFQQIRSALMTN

SEQ ID NO: 54913 - DNA, 1107 bp, Glycine max
  misc_feature (1)..(1107): Ceres Seq. ID no. 14303359
ttttctctctctctctccccactttcatctgtaacaagttgtcaagggcgtgtgtttttgccccacttgggagttgggacactattctatttaatttaatttcacttctggtgagagggcctcaactcttctctacttctgtgctccaatttcctgttgcttcatgcatggctccctaagggaagaaagcttgtcatttgactcttattacgttatcctgtttgcaaatttatttgctctacaatctgcttcacaggtttctctctctgtttctgctggagttgttcaaatgggagaaagagttttattctctacgtagagtttggtagacaaagataatattttgagataatgctagttccacttgccccgtaccctccaccccctccaccagctccatatacgcctccaccaaatggtgcacagagtcaactagtctgttctgggtgtagaaaccttctgctctatccagttggagccacctctgtgtgctgtgctgtttgcaatgcagtcacaacagtgccacctcctggcacagaaatggcccagttagtttgtggaggctgtcacactttcctcatgtacatccgtggagccacaagtgtgcaatgctcttgctgtcacacggtcaatctagctttggaagcaaatctggtggcgcatgtcaactgtgggaactgtaagatgctactcaggtaccaatatggagcaagatccgtgaaatgtgccgtttgcagttttgtaacgtcagttggggcctcgacaagcaccactgagcagaaattcagcacctaaatcttactgtaaaattggtgacagacaccacgaccttggttttaatcaaatatcgcccttgaggaataacgagtgcatatgagatagctgaggaaattttcttaacatgtatagagctatttttcccttgagtgaaataattaaataaattttgtattattggtgtaccatgtaatgctttatttgtaagcagtgtaagcctctaaaggaatgagtagtggagtttatagttctccaatttcaattgcagtgtgccaaaaagctatttggaataactatatatgataagattattgattctgagtgcttttg

SEQ ID NO: 54914 - protein, 147 aa, Glycine max
  peptide (1)..(147): Ceres Seq. ID no. 14303360
MLVPLAPYPPPPPPAPYTPPPNGAQSQLVCSGCRNLLLYPVGATSVCCAVCNAVTTVPPPGTEMAQLVCGGCHTFLMYIRGATSVQCSCCHTVNLALEANLVAHVNCGNCKMLLRYQYGARSVKCAVCSFVTSVGASTSTTEQKFST

SEQ ID NO: 54915 - protein, 84 aa, Glycine max
  peptide (1)..(84): Ceres Seq. ID no. 14303361
MAQLVCGGCHTFLMYIRGATSVQCSCCHTVNLALEANLVAHVNCGNCKMLLRYQYGARSVKCAVCSFVTSVGASTSTTEQKFST

SEQ ID NO: 54916 - DNA, 937 bp, Glycine max
  misc_feature (1)..(937): Ceres Seq. ID no. 15170269
gaagatgcttcttcttatatgaagaatgcatctcaagtagatattccctttcctggaccattgcaagtttcaaaatcaagtggcttcgcatgggcaaaaaggcgtagagatgacacttcagttagatcccacagtcggtctatttctagaggatatatctttaattcatcagaaacttctacactaaattcaaggaataattctgaatccagaaaccatgaaaataagaaatttttcggggcacatgccaattctaggggccatgacctacttgaaatttctaagcttgccatgcaaaatcaatggagtaagtttgatcgtctagattcgtttgatacttgtgacgaataccattcacaagaactgtccgtggcactttataacaggcaagattcactatccaagagaagtaacctgagttaccaggatcaagcagaaaaggtagagttttcagggccactactatctcaaatgcacacagttgatgagctcttagaaagacacgagagtcatatccggcgtacggtcagaagatcatggtttcagagaggtaagaagcaagggaagtaactgcaactgtaatatttattcttgaaaggatatagatcctcgtatatcaaatcaaatgtccttgtgaaagggccttctccattcaccaagcacactcgctgctgtgactttgagcaacaatgaacattatcatgtacacatagacacagttaccagcagcatgagatgttacctagaagcttggaaactaactaatttgaggagtgtaattcaatttatagaaatcagaaggccgtggagaagagaagagaggctttttttttcttctttttcaccatggattctctatttttggccaattataatatagaaaaatttatttctgtatgatctaaacttcctcaatcctattgcctttgcctttggt

SEQ ID NO: 54917 - protein, 189 aa, Glycine max
  peptide (1)..(189): Ceres Seq. ID no. 15170270
EDASSYMKNASQVDIPFPGPLQVSKSSGFAWAKRRRDDTSVRSHSRSISRGYIFNSSETSTLNSRNNSESRNHENKKFFGAHANSRGHDLLEISKLAMQNQWSKFDRLDSFDTCDEYHSQELSVALYNRQDSLSKRSNLSYQDQAEKVEFSGPLLSQMHTVDELLERHESHIRRTVRRSWFQRGKKQGK

SEQ ID NO: 54918 - protein, 183 aa, Glycine max
  peptide (1)..(183): Ceres Seq. ID no. 15170271
MKNASQVDIPFPGPLQVSKSSGFAWAKRRRDDTSVRSHSRSISRGYIFNSSETSTLNSRNNSESRNHENKKFFGAHANSRGHDLLEISKLAMQNQWSKFDRLDSFDTCDEYHSQELSVALYNRQDSLSKRSNLSYQDQAEKVEFSGPLLSQMHTVDELLERHESHIRRTVRRSWFQRGKKQGK

SEQ ID NO: 54919 - DNA, 1377 bp, Glycine max
  misc_feature (1)..(1377): Ceres Seq. ID no. 14306949
tttttcttccctttttttataaattttttagaggctaacatggaggaggttgagcaagctaatagagtagctgttgaaagctgccatagggttctgagtttgttgtctcaaccaagggatcaggttcagcataggaatttaatggtggaaaccggtgaaactgtggtgaggttcaagaaggttgtttccatgcttcacaatggtttgggtcatgcaagagtgaggaaacttaaaaaccctcaaatcccctcttcccaccaaagcatcttcttagacaaccccaattgcaaaaccttaaccaacaacagcaacaacaaccatcactccaaaaaaaatctatactttccccaaaccagctaccctgacaattcagttcaggaacatggttcaaccattaagaattctctctctcttggacaaccctctttggaattgagctccaatgggaaaagtcctcttcacctcacacagcagggttcatcaaatcactatcacttctttcagcagcagcaacagcaaaggttgttgcagcagcagcagcaacaacaacaaatgaagcatcaagctgaaatgttgttccgaaggaacaatagtggcataaacctgaattttgacagcactagctgcacaccaacaatgtcatccactaagtcttttatttcttccttgagcatagatggaagtgtggctaacttggatggaagtgccttccatttaataggagctccacactcttctgatcagaattcgcaacagcctaagagaaaatgttctgccagaggcgatgagggaagcttgaaatgtgggagcagtgctagatgtcattgctctaagaagaggaaacatagagtgaagagggcaattaaggtgcctgctatcagcaacaaacttgcagatatccctcctgatgattattcgtggaggaagtatggacagaagccaatcaagggctctcctcaccctaggggatattacaagtgcagcagcatgagagggtgtcctgcaaggaagcatgttgagaggtgcttggaagagcctaccatgctaattgtcacctatgaaggtgaacataaccaccccaagttaccaacacaatctgcaaatgcatgaaactatgtggagagcttaaccagatcaagccaatcattcaattcgtcaaatcctctatgtgattggcttgagatgctgctgtacatatttttagtgatgcaaacaagcagggatggataatattgttggcgcagattttgtcttttggatagtttggctatccagccgttttatttagagggtgaggatgaggatcactgattaaatgaacaaagtctgtaaaattagctagtttcaattcctaagaactatttaatctttcttaag

SEQ ID NO: 54920 - protein, 369 aa, Glycine max
  peptide (1)..(369): Ceres Seq. ID no. 14306950
FFFPFFINFLEANMEEVEQANRVAVESCHRVLSLLSQPRDQVQHRNLMVETGETVVRFKKVVSMLHNGLGHARVRKLKNPQIPSSHQSIFLDNPNCKTLTNNSNNNHHSKKNLYFPQTSYPDNSVQEHGSTIKNSLSLGQPSLELSSNGKSPLHLTQQGSSNHYHFFQQQQQQRLLQQQQQQQQMKHQAEMLFRRNNSGINLNFDSTSCTPTMSSTKSFISSLSIDGSVANLDGSAFHLIGAPHSSDQNSQQPKRKCSARGDEGSLKCGSSARCHCSKKRKHRVKRAIKVPAISNKLADIPPDDYSWRKYGQKPIKGSPHPRGYYKCSSMRGCPARKHVERCLEEPTMLIVTYEGEHNHPKLPTQSANA

SEQ ID NO: 54921 - protein, 356 aa, Glycine max
  peptide (1)..(356): Ceres Seq. ID no. 14306951
MEEVEQANRVAVESCHRVLSLLSQPRDQVQHRNLMVETGETVVRFKKVVSMLHNGLGHARVRKLKNPQIPSSHQSIFLDNPNCKTLTNNSNNNHHSKKNLYFPQTSYPDNSVQEHGSTIKNSLSLGQPSLELSSNGKSPLHLTQQGSSNHYHFFQQQQQQRLLQQQQQQQQMKHQAEMLFRRNNSGINLNFDSTSCTPTMSSTKSFISSLSIDGSVANLDGSAFHLIGAPHSSDQNSQQPKRKCSARGDEGSLKCGSSARCHCSKKRKHRVKRAIKVPAISNKLADIPPDDYSWRKYGQKPIKGSPHPRGYYKCSSMRGCPARKHVERCLEEPTMLIVTYEGEHNHPKLPTQSANA

SEQ ID NO: 54922 - protein, 322 aa, Glycine max
  peptide (1)..(322): Ceres Seq. ID no. 14306952
MVETGETVVRFKKVVSMLHNGLGHARVRKLKNPQIPSSHQSIFLDNPNCKTLTNNSNNNHHSKKNLYFPQTSYPDNSVQEHGSTIKNSLSLGQPSLELSSNGKSPLHLTQQGSSNHYHFFQQQQQQRLLQQQQQQQQMKHQAEMLFRRNNSGINLNFDSTSCTPTMSSTKSFISSLSIDGSVANLDGSAFHLIGAPHSSDQNSQQPKRKCSARGDEGSLKCGSSARCHCSKKRKHRVKRAIKVPAISNKLADIPPDDYSWRKYGQKPIKGSPHPRGYYKCSSMRGCPARKHVERCLEEPTMLIVTYEGEHNHPKLPTQSANA

SEQ ID NO: 54923 - DNA, 1296 bp, Glycine max
  misc_feature (1)..(1296): Ceres Seq. ID no. 14303417
ggtgccattcccttcacaccattctcacaaaacaactttcaaactctgagaaagaatggctgccaacacattgatgagtactgctatctcagccttcccatctctcctttcttcctcaaaatccagatttgccaccgcagttcctctttctagctttggtgtcaccaatgcctcttcttctcgcttttctatgagtgctgactggatgccaggccagcctagacctccttaccttgatggttcagcacctggtgactttggattcgaccctcttcgtcttggtgaagtaccagagaatcttgagaggttcaaagagtcagaactcattcactgcagatgggccatgcttgctgttccagggattttggttccagaggcattgggcttaggcaactgggtaaaggctcaggaatgggcagcagttcctgggggccaagcaacctacctaggcaatccagttccatggggcaccctacccaccattctggccattgaattccttgctatttcctttgtggagcaccaaaggagcatggagaaggacccagagaagaagaaataccctggtggtgcttttgatcctttgggatactctaaggaccctaaaacattccatgaatacaaagtcaaagaacttaagaatggacgtcttgttttgttggcttttgtgggattctgtgttcaacaatcagcttatcccggcactggacctttggagaacttggctgctcacttggctgacccatggcacaacaacattggaaacatcattattccacaatcgattttgccttgaaaaaaaaaaatcaaatatttgtttcaatagctacctgtataattccatgtaacattttgtaacgaatcgggttgctacgttggtatctctgtgttgtaattaaacttcgaattcaaactcatactctggcaactcgttggtatgacagaaaagcttgaaacaaacttccaagtccaagtttaaaacttgcattacatgattacatccatatctaatgatgaataaaacatgttttggaccaactgcagcctgcaaagtgccaatttccttgaatgcttcctaaagtattaggcatccggtgtattccagcaaatattatgtcagctaacgacttttcaacaacatttggttttgttaaaactgattttcctgcaaaataataagtcagctaaacttatatacatgtctcaaattcagcattcagaactaagggagtctaacttgagtagggtgcatgagtttttaaaccccttggtacctgtgtttgattcctacaagtc

SEQ ID NO: 54924 - protein, 246 aa, Glycine max
  peptide (1)..(246): Ceres Seq. ID no. 14303418
MAANTLMSTAISAFPSLLSSSKSRFATAVPLSSFGVTNASSSRFSMSADWMPGQPRPPYLDGSAPGDFGFDPLRLGEVPENLERFKESELIHCRWAMLAVPGILVPEALGLGNWVKAQEWAAVPGGQATYLGNPVPWGTLPTILAIEFLAISFVEHQRSMEKDPEKKKYPGGAFDPLGYSKDPKTFHEYKVKELKNGRLVLLAFVGFCVQQSAYPGTGPLENLAAHLADPWHNNIGNIIIPQSILP

SEQ ID NO: 54925 - protein, 240 aa, Glycine max
  peptide (1)..(240): Ceres Seq. ID no. 14303419
MSTAISAFPSLLSSSKSRFATAVPLSSFGVTNASSSRFSMSADWMPGQPRPPYLDGSAPGDFGFDPLRLGEVPENLERFKESELIHCRWAMLAVPGILVPEALGLGNWVKAQEWAAVPGGQATYLGNPVPWGTLPTILAIEFLAISFVEHQRSMEKDPEKKKYPGGAFDPLGYSKDPKTFHEYKVKELKNGRLVLLAFVGFCVQQSAYPGTGPLENLAAHLADPWHNNIGNIIIPQSILP

SEQ ID NO: 54926 - protein, 201 aa, Glycine max
  peptide (1)..(201): Ceres Seq. ID no. 14303420
MSADWMPGQPRPPYLDGSAPGDFGFDPLRLGEVPENLERFKESELIHCRWAMLAVPGILVPEALGLGNWVKAQEWAAVPGGQATYLGNPVPWGTLPTILAIEFLAISFVEHQRSMEKDPEKKKYPGGAFDPLGYSKDPKTFHEYKVKELKNGRLVLLAFVGFCVQQSAYPGTGPLENLAAHLADPWHNNIGNIIIPQSILP

SEQ ID NO: 54927 - DNA, 1279 bp, Glycine max
  misc_feature (1)..(1279): Ceres Seq. ID no. 15225873
tttctatcatggaaacattatcagttggcttgaatgccaaaccatttcagaagactaaaaacacttcgaacttctctgcacctgcaagtgatcctgtttcctttcagagagaaaactgcagtgctgaaagtaaagaggctgttttgggagcaagaactaatgttgaggccaatggattgaggtcaaaagtaaacagcacacctctttctctgccaaaaaagagtacacatgaacctagaaagtcatttgacaattctagcagcaatacagacattcaagcacagaagagtgcaccttctcccaataacttgcagaagacagcgaaagaaagagataattcagatcaagtttctgaagtgcaccatgatgcttccgatgcttttccaacagagtgggtgccaccaaatttgagtgtacccattttggatctggttgatgttatcttccaggttcatgatggtggatggattaggcggaaggctttttgggttgctaaacaaatcttacaactaggaatgggtgatgcctttgatgactggttgatagagaaaattcagcttctccgtaagggttcagtggttgcttcaggggtcaagcgagttgagcaaatactctggcctgatggaatattcataaccaagcatccaaatcgacgacctccgtcaccttctagtccatctcagaattctcctcatggcaatcaacctacacaagtgtcttctccaaggttggatgatgagcagaaacaggaggcagatcggcgtgcaaaatttgtatatgagctaatgattgatcatgcaccgccagctattgtaggtcttgttggtcggaaggagtacgagcaatgtgcaagggatttatattttttccttcagtcatccgttatcttgaagcagctggcttttgacatcctggagctgctgctgacatcggcatttccggagcttgataatgtatttaagcagctgcatgaagaaaagcataaatttggtgagttcagaacacagtaaatattacaattttcagacgaggcacggagaaataatggtttagatgtttcgtcttccgaaatacattctttttcttgtgattgttcctgattgcccttttgtctctgcaaccgctatccttctctttctgccaactaatgagccaaaggcaattcaatttttccatctaccaagtcaagttttgtaattaaggttggcattttgaggcagacgtcatgtaaattttgagattaatgcaattattttgagattctttattggctaaaaag

SEQ ID NO: 54928 - protein, 335 aa, Glycine max
  peptide (1)..(335): Ceres Seq. ID no. 15225874
SIMETLSVGLNAKPFQKTKNTSNFSAPASDPVSFQRENCSAESKEAVLGARTNVEANGLRSKVNSTPLSLPKKSTHEPRKSFDNSSSNTDIQAQKSAPSPNNLQKTAKERDNSDQVSEVHHDASDAFPTEWVPPNLSVPILDLVDVIFQVHDGGWIRRKAFWVAKQILQLGMGDAFDDWLIEKIQLLRKGSVVASGVKRVEQILWPDGIFITKHPNRRPPSPSSPSQNSPHGNQPTQVSSPRLDDEQKQEADRRAKFVYELMIDHAPPAIVGLVGRKEYEQCARDLYFFLQSSVILKQLAFDILELLLTSAFPELDNVFKQLHEEKHKFGEFRTQ

SEQ ID NO: 54929 - protein, 333 aa, Glycine max
  peptide (1)..(333): Ceres Seq. ID no. 15225875
METLSVGLNAKPFQKTKNTSNFSAPASDPVSFQRENCSAESKEAVLGARTNVEANGLRSKVNSTPLSLPKKSTHEPRKSFDNSSSNTDIQAQKSAPSPNNLQKTAKERDNSDQVSEVHHDASDAFPTEWVPPNLSVPILDLVDVIFQVHDGGWIRRKAFWVAKQILQLGMGDAFDDWLIEKIQLLRKGSVVASGVKRVEQILWPDGIFITKHPNRRPPSPSSPSQNSPHGNQPTQVSSPRLDDEQKQEADRRAKFVYELMIDHAPPAIVGLVGRKEYEQCARDLYFFLQSSVILKQLAFDILELLLTSAFPELDNVFKQLHEEKHKFGEFRTQ

SEQ ID NO: 54930 - DNA, 1109 bp, Glycine max
  misc_feature (1)..(1109): Ceres Seq. ID no. 13637939
gttctaggggaacctgacagaggcagttaacgaacaaacagatgggttgggccatagcactacacggcggcgccggcgacatcccgctttcccttccaccggagcgccgccagcctcgcgaggaggccctccgccactgcctccaaatcggcgtggaagctctcaaggccaaactgcctcctctcgacgtggttgaacttgtctttcgggagttggagaacattccgcagtttaacgcgggaaggggatctgtgctgacttgcagaggcaccgtggaaatggaagcttccataatggacggcaccactatgaattgcggagctgtttccggcctcactaccgtcgtcaacgccatctctcttgctcgattggtcatggaaaacacgcctcacatctatctcgctttcgatggagcagaggaatttgcaagacaacaaggcgttgagactgtggattcaagccattttattacaaaagaaaatattgaaaggctaaagcaggcaaaagaagctaacagggttcagattgattatacgcaacctatccaaaatgatactaagaaagagaccgcattggctaatggtgatagccaaattggaactgttgggtgtgtggctgtagatagtcttgggaatttggcttctgcaacatctactggtggattagtgaacaaaatggtgggtcgaattggtgacacaccagtcattggtgctggtacctatgcggatgcacgttgtgcggtttcagcgacaggcaaaggtgaagcaataatacgtgggacagtggcaagagatgtggctgctctgatggagtttaagggtctttctctcgtggaagctgctaattgtgttgtacatgagcgcacaccaaaaggcactgttggtttggttgctgtgtctgccaaaggagaagttgcaatgccttttaatacaacaggcatgttcagagcgtgtgctactgaagatggatattctgagattgcaatttggcctgctgccaaaatagagtagtctttaggctttactgatttccaagcttaatgtattctgacatttgatgatgcttcacgcatgcttatatcacagggaaatctatttgcttttcaaggt

SEQ ID NO: 54931 - protein, 322 aa, Glycine max
  peptide (1)..(322): Ceres Seq. ID no. 13637940
MGWAIALHGGAGDIPLSLPPERRQPREEALRHCLQIGVEALKAKLPPLDVVELVFRELENIPQFNAGRGSVLTCRGTVEMEASIMDGTTMNCGAVSGLTTVVNAISLARLVMENTPHIYLAFDGAEEFARQQGVETVDSSHFITKENIERLKQAKEANRVQIDYTQPIQNDTKKETALANGDSQIGTVGCVAVDSLGNLASATSTGGLVNKMVGRIGDTPVIGAGTYADARCAVSATGKGEAIIRGTVARDVAALMEFKGLSLVEAANCVVHERTPKGTVGLVAVSAKGEVAMPFNTTGMFRACATEDGYSEIAIWPAAKIE

SEQ ID NO: 54932 - protein, 243 aa, Glycine max
  peptide (1)..(243): Ceres Seq. ID no. 13637941
MEASIMDGTTMNCGAVSGLTTVVNAISLARLVMENTPHIYLAFDGAEEFARQQGVETVDSSHFITKENIERLKQAKEANRVQIDYTQPIQNDTKKETALANGDSQIGTVGCVAVDSLGNLASATSTGGLVNKMVGRIGDTPVIGAGTYADARCAVSATGKGEAIIRGTVARDVAALMEFKGLSLVEAANCVVHERTPKGTVGLVAVSAKGEVAMPFNTTGMFRACATEDGYSEIAIWPAAKIE

SEQ ID NO: 54933 - protein, 238 aa, Glycine max
  peptide (1)..(238): Ceres Seq. ID no. 13637942
MDGTTMNCGAVSGLTTVVNAISLARLVMENTPHIYLAFDGAEEFARQQGVETVDSSHFITKENIERLKQAKEANRVQIDYTQPIQNDTKKETALANGDSQIGTVGCVAVDSLGNLASATSTGGLVNKMVGRIGDTPVIGAGTYADARCAVSATGKGEAIIRGTVARDVAALMEFKGLSLVEAANCVVHERTPKGTVGLVAVSAKGEVAMPFNTTGMFRACATEDGYSEIAIWPAAKIE

SEQ ID NO: 54934 - DNA, 1906 bp, Glycine max
  misc_feature (1)..(1906): Ceres Seq. ID no. 14313131
atttattacattttaactttgctccaactcaaatttgtaagtaagtggtttcaaggacgcatgcaattcttcaatctcagttgagtgataatatagaggccttgaagccttttcaagtttagtagaggctgagaaatgtattgtatctagaaaataatgcttgtttgtgtttgtatactatactattcaagaaatgctatagtatcaatatcttgtgatgtttttaatttagataaagaataataacgaaactttccaaagagactgagagtatgtgtaatcttcataaagtgatttttgtgctagaaactagaaagcacaaatacaacaaatgatacatatacaatatggcagacaatagataattttaaaaatagcaggacaccacaactataataagatatataaaattagcacaaaaaatttttaattcaaaagataaaattgatgttttatttttgaatgaatcattgtatacatataagactgttgttgttgtcttctaattattgtgatattcccatcggtattgctacaaaagtgtaagaaataaaggtaaacaatataaaatgtaacttagagtatttgaagtgtccatgaccgacatgacacaactgtaattttgtagtgtccgtgcttccttgtttatgtataagatccagatctgaagattttcctattctattaatgcatatatctaataatgtaaatactgtcttctgctctagattcaatcataaaacaggcgctgaggatgtgcatttcactgccatgtcctctaatgatgaatctgatactgatgttgatggctgtaacaatgatgagggcattgtcgaggaggaagcattggctcaaaattcctctatagatatgactgcgttaaataatgggaactgcaatgtcagtgacttggatagttcttcacttagtgagagtgatacttctatgctggagatgattatgacaaaagatgtcagcagtggaagtgaggtatttaatacttatgggatactgggtaatgctgctttgcttcatagatatggatttactgagcaagataattcctatgatattgtaaacatagatatggaactggtaattcaatggtgttcttccgtgttttcggaccgccacagtagagcaagagtttccctttggagaaggttaggctattctgtatgtggcagccaagactctgactattttgagatctcatttgatggagaaccacagattgaactcctcagtttgttacacatcatgttattaccagataatgcctaccataagttagacctatcagtatcggttgccggaaattatgatgaatcaaatggaaccacccttctgaatggtgatatctttcctagtaaagcatttaatatgaacaataaatccttgctgcccaaaaaagtttgtgatgccctgttgtcgctttctgatatgagggagagtctctatggtttgaaatcaattgaagatgatattgaggcattgggaaggtgtagtttaattagagagagaaaactgtatcattctttgatgctgcgcatcaatgaaaggaagatccttcagaggctcagaaattatgcttcacagccatttaaaaataaaatcacgaaccatggttctccgaggaagaagttgaaaagaacaacaaagaaaacaagttgatttttttagtgtttattttattttaattatttttctatgagatgctttaacttgtattttggtgcaccaagtcattggcctatgcaaagtagcaaagccgtctctttcatttgtcgcatttggtttttggtcagcaataaaacatcgtttttctttcattagttccttaatttatcatttgtgtttccgtcattttatgccatgatctttcatctcatgctcttatattgat

SEQ ID NO: 54935 - protein, 328 aa, Glycine max
  peptide (1)..(328): Ceres Seq. ID no. 14313132
MHISNNVNTVFCSRFNHKTGAEDVHFTAMSSNDESDTDVDGCNNDEGIVEEEALAQNSSIDMTALNNGNCNVSDLDSSSLSESDTSMLEMIMTKDVSSGSEVFNTYGILGNAALLHRYGFTEQDNSYDIVNIDMELVIQWCSSVFSDRHSRARVSLWRRLGYSVCGSQDSDYFEISFDGEPQIELLSLLHIMLLPDNAYHKLDLSVSVAGNYDESNGTTLLNGDIFPSKAFNMNNKSLLPKKVCDALLSLSDMRESLYGLKSIEDDIEALGRCSLIRERKLYHSLMLRINERKILQRLRNYASQPFKNKITNHGSPRKKLKRTTKKTS

SEQ ID NO: 54936 - protein, 300 aa, Glycine max
  peptide (1)..(300): Ceres Seq. ID no. 14313133
MSSNDESDTDVDGCNNDEGIVEEEALAQNSSIDMTALNNGNCNVSDLDSSSLSESDTSMLEMIMTKDVSSGSEVFNTYGILGNAALLHRYGFTEQDNSYDIVNIDMELVIQWCSSVFSDRHSRARVSLWRRLGYSVCGSQDSDYFEISFDGEPQIELLSLLHIMLLPDNAYHKLDLSVSVAGNYDESNGTTLLNGDIFPSKAFNMNNKSLLPKKVCDALLSLSDMRESLYGLKSIEDDIEALGRCSLIRERKLYHSLMLRINERKILQRLRNYASQPFKNKITNHGSPRKKLKRTTKKTS

SEQ ID NO: 54937 - protein, 267 aa, Glycine max
  peptide (1)..(267): Ceres Seq. ID no. 14313134
MTALNNGNCNVSDLDSSSLSESDTSMLEMIMTKDVSSGSEVFNTYGILGNAALLHRYGFTEQDNSYDIVNIDMELVIQWCSSVFSDRHSRARVSLWRRLGYSVCGSQDSDYFEISFDGEPQIELLSLLHIMLLPDNAYHKLDLSVSVAGNYDESNGTTLLNGDIFPSKAFNMNNKSLLPKKVCDALLSLSDMRESLYGLKSIEDDIEALGRCSLIRERKLYHSLMLRINERKILQRLRNYASQPFKNKITNHGSPRKKLKRTTKKTS

SEQ ID NO: 54938 - DNA, 1463 bp, Glycine max
  misc_feature (1)..(1463): Ceres Seq. ID no. 15172093
aattcattccacacaacaaaaacaccaattctccaccctctcattgaaaaaaaaacaaccaaacaaaaaaaatcaatcattttattttatttttttacgaaaatggttgatttacattggaaatcaaagatgcctagttccaaaacaccaaaactctctctctccgacaacaagtccttaccctctttgcaactacccttccgcaccacagatatctctcccgccgctccttccgtttgcgccgcttacgactactatctccgtcttccttaactcagaaagctttggaactccactgattttcctaattggaacaacgaaccgattctaaaaccaattttgcaagctctcgaaatcacgttccgctttctttccattgttctctccgatcccagaccttactccaaccacagagaatggactcgccggatagagtctctcatcatgcatcaaattgaaatcattgccatactttgtgaagaagaggaacaaaattccgacacacgtggcactgcaccaaccgctgatctcagcagcagcaatagcagcgtgagcagaagctacagcgaggcgagcctgcttcctcggcttgccacgtggtacaaatccagggacgtggcgcagaggatccttctctccgtggaatgccaaatgaggaggtgctcctacacgcttggtttgggcgagccgaacctagcggggaagccgagcctgctctacgacctcgtgtgcaagccgaatgagatccacgcgctgaagacgacgccgtacgacgagcgcgtggagaaccacgagaaccacgcggtgcacgccacgcaccagatcgcggagtcgtggattcacgcgtcgcggaaggttctggagagaatcgcggacgcggtgctctccagaaccttcctgaaagcagcagaggactgctacgccgtggagaggatctggaagcttctcgcggaggtggaggacctccacctgatgatggatccggacgatttcttgaggctaaagaatcaactctcggtgaaatcctcgagcggcgaaacggcatcgttctgcttcagatcgaatgagttagtggaactgacgaagatgtgcagagatctgaggcacaaggtgccggagatattggaggtggaggtggatccgaagggaggaccgaggattcaagaggcggcgatgaagctctacgtttcgaagagcgagttcgagaaggttcacttgttgcaggcgatgcaggcgattgaggcggcgatgaagagattcttctacgcgtataagcaggtgttggcggtggtgatgggaagttcagaggctaacggtaaccgagttgggttgagttgcgactcggctgactcgttgactcagattttccttgaaccgacgtattttccaagcttggatgccgccaagacttttcttggatacctgtgggataataacgataataacaaatggatatgaaaacg

SEQ ID NO: 54939 - protein, 337 aa, Glycine max
  peptide (1)..(337): Ceres Seq. ID no. 15172094
MHQIEIIAILCEEEEQNSDTRGTAPTADLSSSNSSVSRSYSEASLLPRLATWYKSRDVAQRILLSVECQMRRCSYTLGLGEPNLAGKPSLLYDLVCKPNEIHALKTTPYDERVENHENHAVHATHQIAESWIHASRKVLERIADAVLSRTFLKAAEDCYAVERIWKLLAEVEDLHLMMDPDDFLRLKNQLSVKSSSGETASFCFRSNELVELTKMCRDLRHKVPEILEVEVDPKGGPRIQEAAMKLYVSKSEFEKVHLLQAMQAIEAAMKRFFYAYKQVLAVVMGSSEANGNRVGLSCDSADSLTQIFLEPTYFPSLDAAKTFLGYLWDNNDNNKWI

SEQ ID NO: 54940 - protein, 268 aa, Glycine max
  peptide (1)..(268): Ceres Seq. ID no. 15172095
MRRCSYTLGLGEPNLAGKPSLLYDLVCKPNEIHALKTTPYDERVENHENHAVHATHQIAESWIHASRKVLERIADAVLSRTFLKAAEDCYAVERIWKLLAEVEDLHLMMDPDDFLRLKNQLSVKSSSGETASFCFRSNELVELTKMCRDLRHKVPEILEVEVDPKGGPRIQEAAMKLYVSKSEFEKVHLLQAMQAIEAAMKRFFYAYKQVLAVVMGSSEANGNRVGLSCDSADSLTQIFLEPTYFPSLDAAKTFLGYLWDNNDNNKWI

SEQ ID NO: 54941 - DNA, 1411 bp, Glycine max
  misc_feature (1)..(1411): Ceres Seq. ID no. 15170272
gtttgagagagcagaatggttctatcaaacaagaaactgaagcttaagctgagagctgaattagcccaaagcaactccaacgccgccgctgaacccccttcattttctattaataataataactctctcaaaactcttctggactctgccacgcccacacccagattcttcaagagagagaagcgaagaaagcttcgatccgaccaacctccacaacaacccaacaaggaaaatgaaactgaaacacagggttcgcccaataagaagacaaagaggaagaagctagaggacgatgacgtggcagcaactggagtttccgacacaccaaagaagaagaaaaaccccaggacggctaaggaaaacgaatctaatggtggaggggaaatgccagaggctacagagttaaccaagaccaatacaactaccagtcaagacaatggtgatgctcctaatacaaatacaaagatttatgttggaggaattccctattattcaactgaggatgatattcgaagttattttgaaagctgtggcaccataactgaagttgattgcatgacttttcctgaaactggcaagtttagagggattgccattattactttcaagactgaagcagcagccaaaagagcattggctcttgatggagctgacatgggaggactctttcttaaaatccaaccatataaagcaactcgagccaataaagcctcagattttgctccagaaattttggaggggtacaatagaatatatgttggaaatttgtcgtgggatataacagaggaagaactgaggaaattcttcaataattctgagataacatcgctacgattcggtatggacaaggagacaggagagtttcgagggtatgcccatgtggattttggtgatagtcagtcactaaaaaaagcacttgcattggaccaaaatgttttgtttgggagacctgtcaggataagttgtgcggttcctttgaagaaaaaaactggaactcatgcaagctccacagttaatgaagctaatggtgataaatcaagttccacaggaagtgacaagataaatggagctgatggtgataaatcaagttccacaggaagtggcaagatgaggaggaggacatgctatgagtgtggtgagaaaggacatacatttgcggcatgcccaacgaaacaaacagttgctgcaactacaacctaaagcgtgtaggaaaactcaaacaggtcactgttcttttttcttctagcaaacagtttgattgtagtttataaaatacaataatgaggcatccataactgatcggatttacagtttcctacttcccttgttattgttatcattttttcctcttgaaatgaaaattctttgtctttgttataagcaaagaaaagtaggaagagattaaaaagtc

SEQ ID NO: 54942 - protein, 394 aa, Glycine max
  peptide (1)..(394): Ceres Seq. ID no. 15170273
MVLSNKKLKLKLRAELAQSNSNAAAEPPSFSINNNNSLKTLLDSATPTPRFFKREKRRKLRSDQPPQQPNKENETETQGSPNKKTKRKKLEDDDVAATGVSDTPKKKKNPRTAKENESNGGGEMPEATELTKTNTTTSQDNGDAPNTNTKIYVGGIPYYSTEDDIRSYFESCGTITEVDCMTFPETGKFRGIAIITFKTEAAAKRALALDGADMGGLFLKIQPYKATRANKASDFAPEILEGYNRIYVGNLSWDITEEELRKFFNNSEITSLRFGMDKETGEFRGYAHVDFGDSQSLKKALALDQNVLFGRPVRISCAVPLKKKTGTHASSTVNEANGDKSSSTGSDKINGADGDKSSSTGSGKMRRRTCYECGEKGHTFAACPTKQTVAATTT

SEQ ID NO: 54943 - protein, 271 aa, Glycine max
  peptide (1)..(271): Ceres Seq. ID no. 15170274
MPEATELTKTNTTTSQDNGDAPNTNTKIYVGGIPYYSTEDDIRSYFESCGTITEVDCMTFPETGKFRGIAIITFKTEAAAKRALALDGADMGGLFLKIQPYKATRANKASDFAPEILEGYNRIYVGNLSWDITEEELRKFFNNSEITSLRFGMDKETGEFRGYAHVDFGDSQSLKKALALDQNVLFGRPVRISCAVPLKKKTGTHASSTVNEANGDKSSSTGSDKINGADGDKSSSTGSGKMRRRTCYECGEKGHTFAACPTKQTVAATTT

SEQ ID NO: 54944 - protein, 214 aa, Glycine max
  peptide (1)..(214): Ceres Seq. ID no. 15170275
MTFPETGKFRGIAIITFKTEAAAKRALALDGADMGGLFLKIQPYKATRANKASDFAPEILEGYNRIYVGNLSWDITEEELRKFFNNSEITSLRFGMDKETGEFRGYAHVDFGDSQSLKKALALDQNVLFGRPVRISCAVPLKKKTGTHASSTVNEANGDKSSSTGSDKINGADGDKSSSTGSGKMRRRTCYECGEKGHTFAACPTKQTVAATTT

SEQ ID NO: 54945 - DNA, 1733 bp, Glycine max
  misc_feature (1)..(1733): Ceres Seq. ID no. 15172476
ggttaatttcgtcggtcaactgcatgggtctccgcttctcctctggctcggcacctcactcctcttccctcaacggctctcactgttcaggttcagcaagaactggctgcaagaacgtggggttctccgcaaccgggaagagtcagttttcggagattgcgagtggaagcgacgatcgcgaagagtctcttggtcggattctgaaatggccaaacttgaaggtgtttagttttgaggagctgatttctgcctcaaggcgtttcaggtatgacatacaggggttagtgatcggtaaaggttgttttggcccagtttacaagggatgtttggatgagaatacccttacccctgccaaagtaggctatggaatggccgttgcgatcaaaatgtttaaccaagattacttccgagggtttgaagagtggcagtcagaagtaaactttttaggaaggctttctcaccccaacctggttaatctattgggatactgttgggacgaggataagcttcttctagtgtatgagttcatgccaaagggaagcttagactatcatctattcagaggaaacataacaccactttcttggaacacacggcttaaaatagctattggtgcagctcggggattagctttcttgcacgcctctgaaaacaatgtcatattcagtgatttcaaggcctcaaatatacttcttgacgggaattacaatgcaaagatctcagattttggctttgctagatgggggccttttgaaggagaatcacatgtatctaccagggtcattggcacatatgattatgctgctccagaatacatagcaacaggtaattatatttagccattattaacaactaaggtagctttaaaatgcatgttttgactttattaatgtctcataaggcaagatgtgagccaagattacattctatgccatgtaaaaaagacacggaagcaaaataaattaaaaaacaaaggatctgtttggtttaagaagatgttttcatctttgtttcctgtttttcacaaataattactgaaatgctatgtggtttcttgatttcaaagatttacacgagaaacagttaacaccagatttgcgttcttttcactgtttctgaaagtaggaaacaaagtcaaaacaaggtgacatattgacatttttgtagttatcaatacaaacaggaaatgaaaacagacgaagttttcttaaaccaaacaggacttagtgtaacacaaacagtcgatgctgtggaaggtgaagttgggagaaggcagactaaaataaggaatagtgtaatgctctgatccaccacaaactaacatgcctttgaattgtatcaatatttcaaaaggccacttgtatgtgaagagtgatatctatggatttggtgtagtgctgcttgaaatacttacaggcatgcgggcacttgacacaaatcgacctcaaaccatgcagaacctagttgaatggactaagccttgtctttcttccaaaaaaaagttgaaagccataatggatgctaagatagagggtcaatattcacttgaggcagcatggcaagcagcaaaacttactctaaaatgcctaaaatctgtccctgaagaacgtccttctatgaaagatgtagttgaggcattggaagccattgaagctatccaaaacccacaattcgcagcgtacatctcatccaccccctcggcagggtcgtaagagtataaacaaatttataag

SEQ ID NO: 54946 - protein, 278 aa, Glycine max
  peptide (1)..(278): Ceres Seq. ID no. 15172477
LISSVNCMGLRFSSGSAPHSSSLNGSHCSGSARTGCKNVGFSATGKSQFSEIASGSDDREESLGRILKWPNLKVFSFEELISASRRFRYDIQGLVIGKGCFGPVYKGCLDENTLTPAKVGYGMAVAIKMFNQDYFRGFEEWQSEVNFLGRLSHPNLVNLLGYCWDEDKLLLVYEFMPKGSLDYHLFRGNITPLSWNTRLKIAIGAARGLAFLHASENNVIFSDFKASNILLDGNYNAKISDFGFARWGPFEGESHVSTRVIGTYDYAAPEYIATGNYI

SEQ ID NO: 54947 - protein, 271 aa, Glycine max
  peptide (1)..(271): Ceres Seq. ID no. 15172478
MGLRFSSGSAPHSSSLNGSHCSGSARTGCKNVGFSATGKSQFSEIASGSDDREESLGRILKWPNLKVFSFEELISASRRFRYDIQGLVIGKGCFGPVYKGCLDENTLTPAKVGYGMAVAIKMFNQDYFRGFEEWQSEVNFLGRLSHPNLVNLLGYCWDEDKLLLVYEFMPKGSLDYHLFRGNITPLSWNTRLKIAIGAARGLAFLHASENNVIFSDFKASNILLDGNYNAKISDFGFARWGPFEGESHVSTRVIGTYDYAAPEYIATGNYI

SEQ ID NO: 54948 - protein, 156 aa, Glycine max
  peptide (1)..(156): Ceres Seq. ID no. 15172479
MAVAIKMFNQDYFRGFEEWQSEVNFLGRLSHPNLVNLLGYCWDEDKLLLVYEFMPKGSLDYHLFRGNITPLSWNTRLKIAIGAARGLAFLHASENNVIFSDFKASNILLDGNYNAKISDFGFARWGPFEGESHVSTRVIGTYDYAAPEYIATGNYI

SEQ ID NO: 54949 - DNA, 1380 bp, Glycine max
  misc_feature (1)..(1380): Ceres Seq. ID no. 15176234
gcattgttctaacacgataatcctgtgaaggcgttaactccaaagatccaatttcactatataaattgtgacgaaagcaaaatgaattcacatagctgagagagaaaggaaaggttaactaagaagcaatacttcaatggccacccttgttgttcataaccaaacttcttctgctcaagatgctgaggctctccaacaggctttcaaaggatggggggctgatgacaaggccattatagcaatactgggtcacagaaatgttcatcagaggcaagaaatcagaaaagcttatgaggagatttaccaagaggatctcatcaaacgccttgagtccgagatctctggtgactttgagagagctatgtaccggtggatgttgcagcctgcggatcgtgatgctgttttggtgaatgtggcaatcaagaatggcaccaaagactaccatgtgattgcagagattgcttgtgtcctatcagctgaagagctcttggcagtgaggcgggcctaccaccgccgctacaagtgttccttggaggaagatgtggcagctaacaccaccggcaatcttcgccagcttttggttggattggtgacctcatataggtatgagggtgatgagatcaatgtaaaattttcacaaactgaagctaatgttcttcatgaatctgtcaaggagaagaaaggcaacagtgaagaagtcatcaggatccttactacaagaagcaaaactcaacttgtggcaactttcaaccgctacagagatgaacatggaatttccatcagtaagaaattgttggatcaaacatctgatgacttccacaaggtgttgcacactgctattcgctgcatcaatgaccataagaagtactatgagaaggttttgcgcaatgcagtcaagaagtttggaactgacgaggatggactaagccgtgtgattgttacaagggctgagaaggatctgaaggacatcaaagagctctactacaagagaaacagtgttcaccttgaggatgaagtgtccaaggaaacttctggggactacaagaagttcctcctcactctcttggggaaataagactaagttaagaacttgctctaagggcatcttagtaatgggtttttgttaattatgtcattggtttctggtttgtgcgatttcattatgttagttttccagtaagagtttgttatatctggttaagtttttgagacaacaagaactcgtgtcttgtttgagggcatgcgtgccatttcttagggttgtgttggtacttggcatgctcttattagaggacctctatgctgcgtgtttcctttggattatgctattacctcacctggtttgcttttaatgaaaggttgataacaaatttatatgtg

SEQ ID NO: 54950 - protein, 312 aa, Glycine max
  peptide (1)..(312): Ceres Seq. ID no. 15176235
MATLVVHNQTSSAQDAEALQQAFKGWGADDKAIIAILGHRNVHQRQEIRKAYEEIYQEDLIKRLESEISGDFERAMYRWMLQPADRDAVLVNVAIKNGTKDYHVIAEIACVLSAEELLAVRRAYHRRYKCSLEEDVAANTTGNLRQLLVGLVTSYRYEGDEINVKFSQTEANVLHESVKEKKGNSEEVIRILTTRSKTQLVATFNRYRDEHGISISKKLLDQTSDDFHKVLHTAIRCINDHKKYYEKVLRNAVKKFGTDEDGLSRVIVTRAEKDLKDIKELYYKRNSVHLEDEVSKETSGDYKKFLLTLLGK

SEQ ID NO: 54951 - protein, 237 aa, Glycine max; identical to SEQ ID NO: 53326
  peptide (1)..(237): Ceres Seq. ID no. 15176236

SEQ ID NO: 54952 - protein, 233 aa, Glycine max; identical to SEQ ID NO: 53327
  peptide (1)..(233): Ceres Seq. ID no. 15176237

SEQ ID NO: 54953 - DNA, 1440 bp, Glycine max
  misc_feature (1)..(1440): Ceres Seq. ID no. 12607348
gcccccccccctgggaaaatgctttttatttggttcttttaatttcatggcttgtagttagaactgaatagcataaactgtaatctgttgaatctgcttgtgttttaatttcaaagaagcaagacaattatctagctactttaatggccttttgttatcgttttgcattggtggcatattaagccttttcaatgtgtggattcaataccatcaaggatgggactggggctttgggttctccaccattgaatgaaattgaacagaaaataggagaaagaattctccttctcccccaaggatttgtcctttcacaactcatttctctattaacaaactaactaactactatcctatctgtcttaactaactctcccttccttctctcctaactcctaacataaaaactcttcttaacttggtgagatgaaataactttttatcatgtactgtcatgatattgtagtgattagaaaagaaaactgtgttgctattttgttgatctgattatatttattagagatctcagctgaacagagtggaaagaaacaatttataatataattttttacttctgagaattaggcttaaagtaattatggataaactaacacactggtttctgtgagcttgtcaagcatacacatttcccttggggcttatttaaaggttaatgcttatattggaatttaatggtttaattagaattggatgagaagtatactgtatagatttgattatgaagccaactattgttctttggactttgattattagtttacataattattgaagtggtttgaagtgaactgtctgtttaggatgactaagcatgcacttcaatcttctatttattccctgccccatatctcagcatatgaaattttagttgttacgtcattatacctaccagtgcatgcttgagtgttctctacttgtttaattgaaagcttcatgtaatttgctatgttttgcaggaggacaagatcacaatcatgccctttttgccgcgacaatcttaagagagtaaactcgggtgatctctgggtgttcactgacaatagggatgtagtagacatggcaacagtgacaagggagaatcttagaaggcttttcatgtacatagataagttgcctttggtcattccagactttctctttgacacatatgactctcacctaagatgagtggttgcaacagacagattttactgtctggtgtgtggtcttggaggggtggttcctttctatttagtaacgtaaactccgaatgcaatttggtaaatttagtttatatagagttgtattgttgcttcccacgtcttccagaagtatccagccctgtgtttactgtgggttggtggtgaagttgagatggtaaattgtatgtaggtcatttgtatatcctgtacagattgaattacttattaagaagagttttgc

SEQ ID NO: 54954 - protein, 73 aa, Glycine max
  peptide (1)..(73): Ceres Seq. ID no. 12607349
MFCRRTRSQSCPFCRDNLKRVNSGDLWVFTDNRDVVDMATVTRENLRRLFMYIDKLPLVIPDFLFDTYDSHLR

SEQ ID NO: 54955 - protein, 60 aa, Glycine max
  peptide (1)..(60): Ceres Seq. ID no. 12607350
MSGCNRQILLSGVWSWRGGSFLFSNVNSECNLVNLVYIELYCCFPRLPEVSSPVFTVGWW

SEQ ID NO: 54956 - protein, 48 aa, Glycine max
  peptide (1)..(48): Ceres Seq. ID no. 12607351
MCGFNTIKDGTGALGSPPLNEIEQKIGERILLLPQGFVLSQLISLLTN

SEQ ID NO: 54957 - DNA, 1683 bp, Glycine max
  misc_feature (1)..(1683): Ceres Seq. ID no. 15169252
agatataacagcagacactacctgcggaagacgatccggagccgccacctattcttttgttcatcacatattcaatggcttcctctcttctctctccatcatttacatccttcctccgcaccaaggatctctctctctctgctttcacttctcagcgatgcttcaaagcggtgccaaggaaaataatccgttgtgctattgcggcgcctcagcgccaaccttccaccactggatcagtgaggactgcaatgaccatgactgagaagatattggccagagcttctgagaaggcacagctgacccctggggataatgtttgggtcaatgttgatattttgatgacacatgatgtgtgtggccctggttctattgggattttcaagagggagtttggcgaggatgccaaggtttgggaccgtgaaaagcttgtaataatacctgaccactatattttcacaagtgatgaacgtgccaatcgcaatgtagacatattaagagatttctgccatgagcagaatatcaagtacttttatgatattaaggatcttagtaattttaaggtaaatccagactataagggtgtttgccatgttgctcttgctcaggaaggtcattgtaggccaggagaggttctcttaggtactgattctcacacttgtactgctggagcatttggtcaatttgctacagggattggtaatactgatgccggctttgtgctgggaactgggaaacttctgctcaaggtgcccccaactttgagatttgtaatggatggagaaatgcccgattatttgctttctaaggatttgattctgcaaattattggtgaaataactgtggctggggcaacatataaatcgatggagtttgttggtacaaccgttgaaagtttaactatggaagaacggatgacattgtgcaacatggttgttgaagctggtggaaagaatggtgttgttcctgctgacagcactacatttaaatatcttgagggcaagacatctctgccatatgaacctgtttatagtgacgatcaagcaagatttctcgcagagtatagatttgatgtctcaaaattggagccagtggtggccaagcctcattctccggataatcgtgctttggcaagagagtgcaaggatgtgaaaattgacagagtatacataggatcttgtacaggtggcaaaacagaggatttcatggctgcagcaaaagtttttctggcatcaggtaaacaggtcaaagttcctacatttcttgtgcctgcaacacaaaaggtttggatggacttgtactccctccctgtccctggatctggtggtaagacatgctcacagatatttgaagaagttgggtgtgacacaccagctagtcctagttgtggtgcttgtttgggtggcccaaaagatacttacgcacgcatgaatgaacctaaggtttgtgtttcaactacgaacaggaacttcccgggccgaatgggacacaaggaaggtcaaatctatttggcttccccttatacagctgctgcatctgcattgaccggttatgttactgatcctagagagttcttgtagtagaatgttgttacaatcatctcattgtgttgtactcgttgttggttatttgtgtattctctactctctactagtcataagttaaaactgacaactatttaagctc

SEQ ID NO: 54958 - protein, 500 aa, Glycine max
  peptide (1)..(500): Ceres Seq. ID no. 15169253
MASSLLSPSFTSFLRTKDLSLSAFTSQRCFKAVPRKIIRCAIAAPQRQPSTTGSVRTAMTMTEKILARASEKAQLTPGDNVWVNVDILMTHDVCGPGSIGIFKREFGEDAKVWDREKLVIIPDHYIFTSDERANRNVDILRDFCHEQNIKYFYDIKDLSNFKVNPDYKGVCHVALAQEGHCRPGEVLLGTDSHTCTAGAFGQFATGIGNTDAGFVLGTGKLLLKVPPTLRFVMDGEMPDYLLSKDLILQIIGEITVAGATYKSMEFVGTTVESLTMEERMTLCNMVVEAGGKNGVVPADSTTFKYLEGKTSLPYEPVYSDDQARFLAEYRFDVSKLEPVVAKPHSPDNRALARECKDVKIDRVYIGSCTGGKTEDFMAAAKVFLASGKQVKVPTFLVPATQKVWMDLYSLPVPGSGGKTCSQIFEEVGCDTPASPSCGACLGGPKDTYARMNEPKVCVSTTNRNFPGRMGHKEGQIYLASPYTAAASALTGYVTDPREFL

SEQ ID NO: 54959 - protein, 442 aa, Glycine max
  peptide (1)..(442): Ceres Seq. ID no. 15169254
MTMTEKILARASEKAQLTPGDNVWVNVDILMTHDVCGPGSIGIFKREFGEDAKVWDREKLVIIPDHYIFTSDERANRNVDILRDFCHEQNIKYFYDIKDLSNFKVNPDYKGVCHVALAQEGHCRPGEVLLGTDSHTCTAGAFGQFATGIGNTDAGFVLGTGKLLLKVPPTLRFVMDGEMPDYLLSKDLILQIIGEITVAGATYKSMEFVGTTVESLTMEERMTLCNMVVEAGGKNGVVPADSTTFKYLEGKTSLPYEPVYSDDQARFLAEYRFDVSKLEPVVAKPHSPDNRALARECKDVKIDRVYIGSCTGGKTEDFMAAAKVFLASGKQVKVPTFLVPATQKVWMDLYSLPVPGSGGKTCSQIFEEVGCDTPASPSCGACLGGPKDTYARMNEPKVCVSTTNRNFPGRMGHKEGQIYLASPYTAAASALTGYVTDPREFL

SEQ ID NO: 54960 - protein, 440 aa, Glycine max
  peptide (1)..(440): Ceres Seq. ID no. 15169255
MTEKILARASEKAQLTPGDNVWVNVDILMTHDVCGPGSIGIFKREFGEDAKVWDREKLVIIPDHYIFTSDERANRNVDILRDFCHEQNIKYFYDIKDLSNFKVNPDYKGVCHVALAQEGHCRPGEVLLGTDSHTCTAGAFGQFATGIGNTDAGFVLGTGKLLLKVPPTLRFVMDGEMPDYLLSKDLILQIIGEITVAGATYKSMEFVGTTVESLTMEERMTLCNMVVEAGGKNGVVPADSTTFKYLEGKTSLPYEPVYSDDQARFLAEYRFDVSKLEPVVAKPHSPDNRALARECKDVKIDRVYIGSCTGGKTEDFMAAAKVFLASGKQVKVPTFLVPATQKVWMDLYSLPVPGSGGKTCSQIFEEVGCDTPASPSCGACLGGPKDTYARMNEPKVCVSTTNRNFPGRMGHKEGQIYLASPYTAAASALTGYVTDPREFL

SEQ ID NO: 54961 - DNA, 937 bp, Glycine max
  misc_feature (1)..(937): Ceres Seq. ID no. 13593987
ttacctccaggtcgccctcctgctccatctcaaatgatacctcatccaaatgttggtgcatatatgtcaagccaacagccaactgttggatatactaatttaattagttctctaatgtcgcaaggtgtgatctcattggctaaccagctgcctgcacaggattctgttggaactgagtttaatccagatattctgaaggttcgtcatgagtctgcagtcaatgccttatatggtgatctccctagacaatgcacaacttgtgggctgagattcaaatgccaagaggaacacagtagtcatatggattggcatgtgactaagaatcggatgtctaaaacccgtaagcagaaaccctctcggaagtggtttgttagtgacaggatgtggctcagtggtgcagaggcattgggaacagaatcagctccaggttttttgccaacagaaaccatagaagaaaggaaagatgatgaagagttggcagtgcctgcagaagaagaccagaatacatgtgcattatgcggagagccttttgatgagttttacagtgatgaaatggaggaatggatgtatcgaggagcagtatacctcaatgcacctacgggaacaacagcaggcatggataggactcagttaggccccataattcatgctaaatgcagatcagaatctaatatggccacctctgaagatcttggaccagatgaaaagggtgccgatgaagagggttcccaaaggaaacgaatgcgaagttgatcaatgttgaccagttttgtgcattgtaacttatgattttccgttggtgtatctcatagagttgaatcttgcaataccatggccattctgccaaagtcatgtacatgtatagttggactagtaacgttcatattttcttgcagccaacggttacattttaacttaaaattatttcgtcccttgc

SEQ ID NO: 54962 - protein, 250 aa, Glycine max
  peptide (1)..(250): Ceres Seq. ID no. 13593988
LPPGRPPAPSQMIPHPNVGAYMSSQQPTVGYTNLISSLMSQGVISLANQLPAQDSVGTEFNPDILKVRHESAVNALYGDLPRQCTTCGLRFKCQEEHSSHMDWHVTKNRMSKTRKQKPSRKWFVSDRMWLSGAEALGTESAPGFLPTETIEERKDDEELAVPAEEDQNTCALCGEPFDEFYSDEMEEWMYRGAVYLNAPTGTTAGMDRTQLGPIIHAKCRSESNMATSEDLGPDEKGADEEGSQRKRMRS

SEQ ID NO: 54963 - protein, 239 aa, Glycine max
  peptide (1)..(239): Ceres Seq. ID no. 13593989
MIPHPNVGAYMSSQQPTVGYTNLISSLMSQGVISLANQLPAQDSVGTEFNPDILKVRHESAVNALYGDLPRQCTTCGLRFKCQEEHSSHMDWHVTKNRMSKTRKQKPSRKWFVSDRMWLSGAEALGTESAPGFLPTETIEERKDDEELAVPAEEDQNTCALCGEPFDEFYSDEMEEWMYRGAVYLNAPTGTTAGMDRTQLGPIIHAKCRSESNMATSEDLGPDEKGADEEGSQRKRMRS

SEQ ID NO: 54964 - protein, 229 aa, Glycine max
  peptide (1)..(229): Ceres Seq. ID no. 13593990
MSSQQPTVGYTNLISSLMSQGVISLANQLPAQDSVGTEFNPDILKVRHESAVNALYGDLPRQCTTCGLRFKCQEEHSSHMDWHVTKNRMSKTRKQKPSRKWFVSDRMWLSGAEALGTESAPGFLPTETIEERKDDEELAVPAEEDQNTCALCGEPFDEFYSDEMEEWMYRGAVYLNAPTGTTAGMDRTQLGPIIHAKCRSESNMATSEDLGPDEKGADEEGSQRKRMRS

SEQ ID NO: 54965 - DNA, 2151 bp, Glycine max
  misc_feature (1)..(2151): Ceres Seq. ID no. 14310556
gggagttacacattattctctctctcactcacactcagagtggtagctagacaacaacgagagagagagagagagagatggaggatctcgaggaggaagagaacggagcggaggaggtgttggggtcaagcttgaccatggagaaagtggcggctgcgaagaagttcattgagaatcattatagggctcagatgaagaacatccaagagaggaaggagaggcgctgggttttagaaagaaaattggcatcatcagatgtgccaaatgaggagcggatcaacctcatcaaagatttagagaggaaggagactgaatatatgcgattgaaaagacacaagatttgtgttaatgattttgaacttttgaccatcattggaaggggggcttttggggaggttagactgtgccgggagaagaaatctggaaatatttatgctatgaaaaagctgaagaaatctgaaatgcttaggagaggccaggtggaacatgttagagctgagaggaatttgctggccgaagttgccagtcattgcattgtgaaactttactactcatttcaggatgctgagtacttgtatttaattatggagtatctgcctgggggtgacgttatgactctgctgatgagggaagacaccttaagtgaaaatgttgctagattttacattgcacaaagtgttctggccatagaatctattcacaaacacaattacattcacagagatattaaacctgataaccttcttctggataaaaatggtcacatgaagctctctgattttggtctctgtaagcctctggattgtattgccttgtctacactgcatgaaaatcagaccatagatgatgaaactttggcagaaccaatggatgttgatgatgcggacaatcgaagtagctggagaagtccacgtgaacagcttcaacattggcagatgaacaggaggaagttggcattttcaacagtggggacaccagactacattgctcctgaagtacttttgaaaaaaggatatgggatggaatgtgattggtggtcactgggagcaataatgtatgaaatgctggttggttacccaccattttactccgatgatccaataaccacatgcagaaagattgttcattggagaaatcatttaagatttccagatgatgcccagttaacacttgaggctaaggatctaatttataggttgctctgtgatgttgatcataggttaggtactcgaggggccattgaaataaaggctcatccttggttcaagggtgttgattgggataaactgtatgaaatggaggcagcatttaaacctcaagtcaacggggaactggatacccaaaacttcatgaagtttgatgaggttgatccaccaacagcagcaagaaccgggtctggatcctcacgaaagatgctaactaccaaagatctaagtttcgttggttatacttacaagaatttcgatgctgtaaaggaagggctccgtcaatcttttggtgattccatgcaagagtatgcttctaaacgggcagctgaagaaacaagtttacaaatgcttgcatcctctggagatccaatggttccataactttgtgcaaattgaagtccatcctgttgggtttttgtgtacttgctttggctttaaatattcggccaagaacatgtattatggtgtactccaattcctatgccatttgcaagaaaaatgtgtacagcaagcagttgacagcattgtcaaagcttgtagggcaaccccgcgcgtctgtatttgaattttcaacttaggaactgagagttgtgcgactgagtgctcctgtcctggctgcccaggttggctgaggaagacttgccttctctagtggcagttgctggttaaatgttagttatggacaaaaattgctaaggaactattaaagcatcctgaaaattattcgatgtgatgtgtacatttattggaagataacataaattaaactattaaaacaaactatgcttggggatggagtgtggaattgtctttagcagctcagttgcttgccctttttccctttttatctatttcatgtggaaaagtgcaattagtgacgtcaacctcactgtcctggtcactagctaatgcttgattgaatacaaacaactttttcttaaag

SEQ ID NO: 54966 - protein, 503 aa, Glycine max
  peptide (1)..(503): Ceres Seq. ID no. 14310557
MEDLEEEENGAEEVLGSSLTMEKVAAAKKFIENHYRAQMKNIQERKERRWVLERKLASSDVPNEERINLIKDLERKETEYMRLKRHKICVNDFELLTIIGRGAFGEVRLCREKKSGNIYAMKKLKKSEMLRRGQVEHVRAERNLLAEVASHCIVKLYYSFQDAEYLYLIMEYLPGGDVMTLLMREDTLSENVARFYIAQSVLAIESIHKHNYIHRDIKPDNLLLDKNGHMKLSDFGLCKPLDCIALSTLHENQTIDDETLAEPMDVDDADNRSSWRSPREQLQHWQMNRRKLAFSTVGTPDYIAPEVLLKKGYGMECDWWSLGAIMYEMLVGYPPFYSDDPITTCRKIVHWRNHLRFPDDAQLTLEAKDLIYRLLCDVDHRLGTRGAIEIKAHPWFKGVDWDKLYEMEAAFKPQVNGELDTQNFMKFDEVDPPTAARTGSGSSRKMLTTKDLSFVGYTYKNFDAVKEGLRQSFGDSMQEYASKRAAEETSLQMLASSGDPMVP

SEQ ID NO: 54967 - protein, 483 aa, Glycine max
  peptide (1)..(483): Ceres Seq. ID no. 14310558
MEKVAAAKKFIENHYRAQMKNIQERKERRWVLERKLASSDVPNEERINLIKDLERKETEYMRLKRHKICVNDFELLTIIGRGAFGEVRLCREKKSGNIYAMKKLKKSEMLRRGQVEHVRAERNLLAEVASHCIVKLYYSFQDAEYLYLIMEYLPGGDVMTLLMREDTLSENVARFYIAQSVLAIESIHKHNYIHRDIKPDNLLLDKNGHMKLSDFGLCKPLDCIALSTLHENQTIDDETLAEPMDVDDADNRSSWRSPREQLQHWQMNRRKLAFSTVGTPDYIAPEVLLKKGYGMECDWWSLGAIMYEMLVGYPPFYSDDPITTCRKIVHWRNHLRFPDDAQLTLEAKDLIYRLLCDVDHRLGTRGAIEIKAHPWFKGVDWDKLYEMEAAFKPQVNGELDTQNFMKFDEVDPPTAARTGSGSSRKMLTTKDLSFVGYTYKNFDAVKEGLRQSFGDSMQEYASKRAAEETSLQMLASSGDPMVP

SEQ ID NO: 54968 - protein, 465 aa, Glycine max
  peptide (1)..(465): Ceres Seq. ID no. 14310559
MKNIQERKERRWVLERKLASSDVPNEERINLIKDLERKETEYMRLKRHKICVNDFELLTIIGRGAFGEVRLCREKKSGNIYAMKKLKKSEMLRRGQVEHVRAERNLLAEVASHCIVKLYYSFQDAEYLYLIMEYLPGGDVMTLLMREDTLSENVARFYIAQSVLAIESIHKHNYIHRDIKPDNLLLDKNGHMKLSDFGLCKPLDCIALSTLHENQTIDDETLAEPMDVDDADNRSSWRSPREQLQHWQMNRRKLAFSTVGTPDYIAPEVLLKKGYGMECDWWSLGAIMYEMLVGYPPFYSDDPITTCRKIVHWRNHLRFPDDAQLTLEAKDLIYRLLCDVDHRLGTRGAIEIKAHPWFKGVDWDKLYEMEAAFKPQVNGELDTQNFMKFDEVDPPTAARTGSGSSRKMLTTKDLSFVGYTYKNFDAVKEGLRQSFGDSMQEYASKRAAEETSLQMLASSGDPMVP

SEQ ID NO: 54969 - DNA, 1316 bp, Glycine max
  misc_feature (1)..(1316): Ceres Seq. ID no. 14313620
catttgctttgcattgttccttcacacaacagttctttaccattcttctgttaatagattctggatccatgttcctgataatattgttccattctcaggatccagtgttgtgcagtgtgacagttggtgtttcccactttgaaagatgtgctctttgggttcaagtattgtattacccattctatggtagtggtgctgtcggagactatgaaggtgactatgccgaagaggatcctcaaatcatgagacagaagagaagcctaaggcccgaattaggtgaacctgtgattttgagatgtcagccatataaaattccattgactgagcttcttttgccacaccaaatatcacctgttgagtttttccgactgtggcccagtttgccagctatcgtagaatatactggcacatatacatatgaaggtagtggctttaaggctactgctgctcagcagtatggtgcatctcctttcttaagtggactgaaatccttgtcttccaagccattccacatagtttgttcacatataatccgcacggtggcagggtttgagatgtgttatgctgctaaaacttggcatggtggcttcttgggcatgatgatatttggtgcaagtgaagtgagtagaaatgtggacttgggtgatgagactacaaccatgctgtgcaagtttgtggttcgagcatccgatccatctattaccaaggagattggatcagatcttcaaggctggttggatgaccttactgatggcggtgtggagtatatgcctgaagatgaagtgaaagtagctgcagccgagaggcttcgcatatcaatggaaaggatagccttgttaaaggcggcccaaccacgacccaagactccaaaatctgacaacgaagatgaagaggaggaagatgacaaaaataaagaaaagaaagatggcgaagatgagaaaaagaaggggccttcaactctatcgaaactaactgctgaggaagctgaacatcaagctcttcaagcagcagtactacaggagtggcatatgatctgcaaggatagaacaactgaagttaattaactattttcttttggtgtttttgatttttcttttttccatggctttccgagaaatgtacgagtgtattctttgtaattttttctcattttacatacacgaattaggtagaagccaaaatttgcccgagaaacgttcgagtgtattctttgtatactctttcccatattttcaggaaagtgttttgtacatgtaccgcgcggctattgatctgctattttatatttgaagcatttgttggaggtgttaggcatt

SEQ ID NO: 54970 - protein, 353 aa, Glycine max
  peptide (1)..(353): Ceres Seq. ID no. 14313621
FALHCSFTQQFFTILLLIDSGSMFLIILFHSQDPVLCSVTVGVSHFERCALWVQVLYYPFYGSGAVGDYEGDYAEEDPQIMRQKRSLRPELGEPVILRCQPYKIPLTELLLPHQISPVEFFRLWPSLPAIVEYTGTYTYEGSGFKATAAQQYGASPFLSGLKSLSSKPFHIVCSHIIRTVAGFEMCYAAKTWHGGFLGMMIFGASEVSRNVDLGDETTTMLCKFVVRASDPSITKEIGSDLQGWLDDLTDGGVEYMPEDEVKVAAAERLRISMERIALLKAAQPRPKTPKSDNEDEEEEDDKNKEKKDGEDEKKKGPSTLSKLTAEEAEHQALQAAVLQEWHMICKDRTTEVN

SEQ ID NO: 54971 - protein, 331 aa, Glycine max
  peptide (1)..(331): Ceres Seq. ID no. 14313622
MFLIILFHSQDPVLCSVTVGVSHFERCALWVQVLYYPFYGSGAVGDYEGDYAEEDPQIMRQKRSLRPELGEPVILRCQPYKIPLTELLLPHQISPVEFFRLWPSLPAIVEYTGTYTYEGSGFKATAAQQYGASPFLSGLKSLSSKPFHIVCSHIIRTVAGFEMCYAAKTWHGGFLGMMIFGASEVSRNVDLGDETTTMLCKFVVRASDPSITKEIGSDLQGWLDDLTDGGVEYMPEDEVKVAAAERLRISMERIALLKAAQPRPKTPKSDNEDEEEEDDKNKEKKDGEDEKKKGPSTLSKLTAEEAEHQALQAAVLQEWHMICKDRTTEVN

SEQ ID NO: 54972 - protein, 273 aa, Glycine max
  peptide (1)..(273): Ceres Seq. ID no. 14313623
MRQKRSLRPELGEPVILRCQPYKIPLTELLLPHQISPVEFFRLWPSLPAIVEYTGTYTYEGSGFKATAAQQYGASPFLSGLKSLSSKPFHIVCSHIIRTVAGFEMCYAAKTWHGGFLGMMIFGASEVSRNVDLGDETTTMLCKFVVRASDPSITKEIGSDLQGWLDDLTDGGVEYMPEDEVKVAAAERLRISMERIALLKAAQPRPKTPKSDNEDEEEEDDKNKEKKDGEDEKKKGPSTLSKLTAEEAEHQALQAAVLQEWHMICKDRTTEVN

SEQ ID NO: 54973 - DNA, 1741 bp, Glycine max
  misc_feature (1)..(1741): Ceres Seq. ID no. 14313425
gatgatggaagaaacaaagagaagggaaatatcaggaggtgcgagtaccggagccaaacgcgggtgtgtgtgtgtgtgagggagagagagatgcagttccattcagaaactccaaactaaacatccctggcgacaaccttaggaatctcgatcgctgaaaaaacctatgcagccccgaacacactctctgcattccaacttgtttaagtcatgcctttcgattcacccttctctcaataaatttttaatcagattcttggccaccgccacactcataataaagttttgtttttccaaataaagggaatggcgactcctgttgagcctccaaatgggatcagaactgaagggaagcattattattccatgtggcaaaccctgtttgagattgactcaaaatacgttcccatcaagccgattggtcgcggagcatatggaattgtgtgctcttctgtgaatagagagataaatgagaaggttgccatcaagaagatacagaatgcctttgaaaaccgggttgatgccctgaggactttgcgcgaactcaagcttcttcgccaccttcaccatgagaatgtgattgctttgaaggacatcatgatgcctgttcacaggaatagtttcaaggatgtctatctggtttatgaactcatggacacggatttgcatcagattattaagtcttctcaagctttgtctaatgatcactgccagtatttcctctttcagttgctccggggcttgaaatatcttcactccgctaacattcttcatcgtgacttgaaacctgggaatcttctaatcaatgcaaattgtgacctaaaaatatgtgatttcgggctagctcgtactaattgcagcaagaaccagttcatgaccgagtatgttgtcactcggtggtatagggcaccagagctcctactctgctgtgacaactatgggacatctattgatgtttggtcagttggatgtatctttgcagagcttcttggccgaaaaccgattttccctggttcagagtgtctcaaccagctgaagttgattatcaatatccttggtagtcaaagggaggaggatattgaattcattgataacccaaaggcaaagaagtatatcaaatcacttccttattctcctggaacccccctttcgcaactttatcctaatgcgcatccattggcaattgatcttctggcaaagatgcttgttttcgatccaacaaagaggatcagtgtcactcaagcacttcaacacccttacatggcccctctgtatgatcctaactgtgaccctccagccgtcattccaattgatcttgacattgatgaggatctaggggaagagatgataagggacatgatgtggaaagaaatgcttcattaccatcctgaatctgctatggagagtgcagggttgtgctaatgatatttacttcctttcatagttatgttcccttttgttggtgccaggatagttctaatatcataacttgcttcaaataattaggagggctttgtcatcagtgagctccttatatgttctgttttctatttattgaaagcagagagaaacagcaaaaagatgaccatcttaaaaaaaaatgtgttattgctgatgatgcattgtagtctttaaacgccatgttgagagattgattttgtactgaactttgtattgtagttgccttgttttgttgtacataattatgtttctgtgtctttcataaaccattttgtaaatc

SEQ ID NO: 54974 - protein, 371 aa, Glycine max
  peptide (1)..(371): Ceres Seq. ID no. 14313426
MATPVEPPNGIRTEGKHYYSMWQTLFEIDSKYVPIKPIGRGAYGIVCSSVNREINEKVAIKKIQNAFENRVDALRTLRELKLLRHLHHENVIALKDIMMPVHRNSFKDVYLVYELMDTDLHQIIKSSQALSNDHCQYFLFQLLRGLKYLHSANILHRDLKPGNLLINANCDLKICDFGLARTNCSKNQFMTEYVVTRWYRAPELLLCCDNYGTSIDVWSVGCIFAELLGRKPIFPGSECLNQLKLIINILGSQREEDIEFIDNPKAKKYIKSLPYSPGTPLSQLYPNAHPLAIDLLAKMLVFDPTKRISVTQALQHPYMAPLYDPNCDPPAVIPIDLDIDEDLGEEMIRDMMWKEMLHYHPESAMESAGLC

SEQ ID NO: 54975 - protein, 351 aa, Glycine max
  peptide (1)..(351): Ceres Seq. ID no. 14313427
MWQTLFEIDSKYVPIKPIGRGAYGIVCSSVNREINEKVAIKKIQNAFENRVDALRTLRELKLLRHLHHENVIALKDIMMPVHRNSFKDVYLVYELMDTDLHQIIKSSQALSNDHCQYFLFQLLRGLKYLHSANILHRDLKPGNLLINANCDLKICDFGLARTNCSKNQFMTEYVVTRWYRAPELLLCCDNYGTSIDVWSVGCIFAELLGRKPIFPGSECLNQLKLIINILGSQREEDIEFIDNPKAKKYIKSLPYSPGTPLSQLYPNAHPLAIDLLAKMLVFDPTKRISVTQALQHPYMAPLYDPNCDPPAVIPIDLDIDEDLGEEMIRDMMWKEMLHYHPESAMESAGLC

SEQ ID NO: 54976 - protein, 274 aa, Glycine max
  peptide (1)..(274): Ceres Seq. ID no. 14313428
MMPVHRNSFKDVYLVYELMDTDLHQIIKSSQALSNDHCQYFLFQLLRGLKYLHSANILHRDLKPGNLLINANCDLKICDFGLARTNCSKNQFMTEYVVTRWYRAPELLLCCDNYGTSIDVWSVGCIFAELLGRKPIFPGSECLNQLKLIINILGSQREEDIEFIDNPKAKKYIKSLPYSPGTPLSQLYPNAHPLAIDLLAKMLVFDPTKRISVTQALQHPYMAPLYDPNCDPPAVIPIDLDIDEDLGEEMIRDMMWKEMLHYHPESAMESAGLC

SEQ ID NO: 54977 - DNA, 1400 bp, Glycine max
  misc_feature (1)..(1400): Ceres Seq. ID no. 15170239
gaaaccaagtctcgcaagccatcttggctagcactctctccttccccaccgcgccgccgagctccgcctccggccgacgcaagcagcccacctcggacgaattcttcttcccctactactcgtatctaccgggatggcgtcgggtggagatctcccatccgggttcgctgatgagagcaaaagtacaaaaacagaaggatcatccaacgaatgtcaaggggtccctccagctgccgctgcaggcttgtcgggtcctttcgatttttcttctatgcaaagtttgctcaatgatccatctataaaggagatggcggaccagattgcaagggaccctgcattcaatcagatggctgagcagctacagaaaggtgctcagactgcaggagaacagggcatgcctccattggatcctcatcaatacatggaaacaatgcaaaaggtcatggaaaaccctcagtttatgacaatggcagagcgcctcgggactgctcttatgcaggatcctactatgtccagtatgctggaaaatttgactagtccaacacataaggaggagcttgaagagcgcatgtctcggattaaggaagatccagccttgaagccaattcttgatgagttagagaatggtggtcctgctgcaatgataaagtactggaatgaccctgaaactcttcaaaagattggccaggcaatgggaactaccatgccgtttagcactgtctctactgctgaaccttctggtactgaagaaactgaagaagaaggtgaagatgaagacgaatccattgtccaccacactgccagtgttggtgacggtgagggtctgaagaaggctctagatggtggagcagacaaggatgaagaagactctgagggaagaagggccttgcactttgcatgtggatatggtgagttcaagtgtgcggaaatcctccttgaggcgggtgctgctgtagatgccatggataagaacaagaacaccccactgcattacgctgctggctatggccggaaagagtgtgtggatcttctgttgaagcacggtgctgctgtcactctccaaaacatggatgggaagacgcccatcgacgtcgccaagctcaacaaccaggacgaggtcctcaagctgctcgagaaggacgtgttcctgtaaatcacttcacttggcccccatgaagaggcatcatgttttacatcccttggcattggttttatatagtcatactcgaatcggcattttattcgttgtgtaagaatctactgttagctagcctgcaggccgactggctgaggttagaactgcatgttactgtatatggagacttgtgtatcgtccactttgttgctgttgattccactagagtaatccaagatgtacccaagattatttttgtcgtttg

SEQ ID NO: 54978 - protein, 339 aa, Glycine max
  peptide (1)..(339): Ceres Seq. ID no. 15170240
MASGGDLPSGFADESKSTKTEGSSNECQGVPPAAAAGLSGPFDFSSMQSLLNDPSIKEMADQIARDPAFNQMAEQLQKGAQTAGEQGMPPLDPHQYMETMQKVMENPQFMTMAERLGTALMQDPTMSSMLENLTSPTHKEELEERMSRIKEDPALKPILDELENGGPAAMIKYWNDPETLQKIGQAMGTTMPFSTVSTAEPSGTEETEEEGEDEDESIVHHTASVGDGEGLKKALDGGADKDEEDSEGRRALHFACGYGEFKCAEILLEAGAAVDAMDKNKNTPLHYAAGYGRKECVDLLLKHGAAVTLQNMDGKTPIDVAKLNNQDEVLKLLEKDVFL

SEQ ID NO: 54979 - protein, 293 aa, Glycine max
  peptide (1)..(293): Ceres Seq. ID no. 15170241
MQSLLNDPSIKEMADQIARDPAFNQMAEQLQKGAQTAGEQGMPPLDPHQYMETMQKVMENPQFMTMAERLGTALMQDPTMSSMLENLTSPTHKEELEERMSRIKEDPALKPILDELENGGPAAMIKYWNDPETLQKIGQAMGTTMPFSTVSTAEPSGTEETEEEGEDEDESIVHHTASVGDGEGLKKALDGGADKDEEDSEGRRALHFACGYGEFKCAEILLEAGAAVDAMDKNKNTPLHYAAGYGRKECVDLLLKHGAAVTLQNMDGKTPIDVAKLNNQDEVLKLLEKDVFL

SEQ ID NO: 54980 - protein, 281 aa, Glycine max
  peptide (1)..(281): Ceres Seq. ID no. 15170242
MADQIARDPAFNQMAEQLQKGAQTAGEQGMPPLDPHQYMETMQKVMENPQFMTMAERLGTALMQDPTMSSMLENLTSPTHKEELEERMSRIKEDPALKPILDELENGGPAAMIKYWNDPETLQKIGQAMGTTMPFSTVSTAEPSGTEETEEEGEDEDESIVHHTASVGDGEGLKKALDGGADKDEEDSEGRRALHFACGYGEFKCAEILLEAGAAVDAMDKNKNTPLHYAAGYGRKECVDLLLKHGAAVTLQNMDGKTPIDVAKLNNQDEVLKLLEKDVFL

SEQ ID NO: 54981 - DNA, 953 bp, Glycine max
  misc_feature (1)..(953): Ceres Seq. ID no. 15224823
gagtcagctacgtaggccccccccccaatcagtcaaaggcatgtgtttagtcataccttctcaatgatttggcaaaatatgtttgtggggacttttgtttcatgttggaagttgaagaaacacaaaaatagatatggagtttctaaaaggtttcaggttttatataggccaggaaattacttatgtttctatcactaagtatgggtcctttggtatatatggattttggcatttgtcacgctcattgatatatggttgtcccccaagtttaagttcttacatgccttatctttggcgggttattggaatgtgactgagtatcctgacatgaaagttaatcttaatgttgaaatgatttggcaggagcatgcttataagtcataaccacacgtgtacaatttgtttatttggagctgtcctaaatttgtatcatttcccaaaaggaagactgtgtgcaccaggcctaattgtatgcacaccctcctccttccttctcttagttgtccacaactggagtcactctctaatgccatcaaatgggaagttttgcaaactcctcttaattacgagactcgaggaagcaaagttctcttcactacatgcagtaagagagttgcttcaaccatgcagtcaaataaagcgagtcaactagagcaattacatgaagaacattgctagaaatatgaattttggttcttgtctctcacgttgatgtgtatgacttgttctccatgggactgtgggtattgattgccgtgttttatgttctactttttcatttgtatcattggaattctataattgaaagagtgggaatataaaaatgtgaargggtgttgttttcttttgtttaataagacagcttctatacagaattatcctaagctaaatgcaagaatycyttwttygtttttttwwaaramaaagawaaaaaaaaaaaaaaagaattcctg

SEQ ID NO: 54982 - protein, 94 aa, Glycine max
  peptide (1)..(94): Ceres Seq. ID no. 15224824
MLISHNHTCTICLFGAVLNLYHFPKGRLCAPGLIVCTPSSFLLLVVHNWSHSLMPSNGKFCKLLLITRLEEAKFSSLHAVRELLQPCSQIKRVN

SEQ ID NO: 54983 - protein, 68 aa, Glycine max
  peptide (1)..(68): Ceres Seq. ID no. 15224825
MHTLLLPSLSCPQLESLSNAIKWEVLQTPLNYETRGSKVLFTTCSKRVASTMQSNKASQLEQLHEEHC

SEQ ID NO: 54984 - protein, 59 aa, Glycine max
  peptide (1)..(59): Ceres Seq. ID no. 15224826
MEFLKGFRFYIGQEITYVSITKYGSFGIYGFWHLSRSLIYGCPPSLSSYMPYLWRVIGM

SEQ ID NO: 54985 - DNA, 1262 bp, Glycine max
  misc_feature (1)..(1262): Ceres Seq. ID no. 15175666
agtagagataatgagattaggtgtgagtgtgagtgtgcggtgctcaatcggcaccgcttcaggcaacacccaaaccgattatcccgccaaattccaacggtcatctttctcaactgccaacttcctccccgacaacgcttcttcagatttagcagtttcaatttcgagtagtagcagcaggagagggctaatacgcatagccacgttgccatgtcttcttcccctcataggttgcctcccagccaacgccatgcagccaggttcaaaggaatatcttctcattaaagaagaggtgaggaaggtcttgtccaagggaaaggctgctggcgtgcttcgattggtattccatgatgccggaacctttgacatcgatgacagtacaggtggtatgaatggttctatagtctatgaacttgaaagacctgaaaatgctggcctgaaaaaatcagtaaaggttctgcaaaaagcaaagactcagatagatgctatccaaccagtatcttgggcggacatgattgctgtggctggagctgaagcagttgaagtatgtggaggtccacctattcaagtttcactgggcagattagatacactggtgcctgatccagaagggagacttcctgaggaatctctcaatgcttctggtttgaagaaatgtttccagagcaaaggcttttcaacacaagaacttgtggctttgtctggagcccacactattggaagtaaaggttttggaagcccaatttcttttgacaattcatattataaggttcttttggagaagccgtggacgtcttcaggtggtatgccgagtatgattgggcttccttcagatcacgctcttgttgaggatgatgaatgcttaagatggattaaaaaatacgcagacagtgagaatctattctttgaagatttcaaaaatgcgtatgtcaagctggtgaattctggtgtgaggcggaatagcttataaattcaggagttgaatgttccaacttccactgaaggggcaacttgcatttttattgactttctaacagtgtttatgcacagttgccatgaagttttgggtgctttattattgatttgaacatcaagatctactaccccctaaaaatcaaccaacgaagtatgtgcatgcagggccaataaatttcatggaaaagtcgtttaaggggtgtattggattaagattttaaaagactattttagcataatttttttttttgaattttaaagattatgtaaaattattatgatttatc

SEQ ID NO: 54986 - protein, 322 aa, Glycine max
  peptide (1)..(322): Ceres Seq. ID no. 15175667
VEIMRLGVSVSVRCSIGTASGNTQTDYPAKFQRSSFSTANFLPDNASSDLAVSISSSSSRRGLIRIATLPCLLPLIGCLPANAMQPGSKEYLLIKEEVRKVLSKGKAAGVLRLVFHDAGTFDIDDSTGGMNGSIVYELERPENAGLKKSVKVLQKAKTQIDAIQPVSWADMIAVAGAEAVEVCGGPPIQVSLGRLDTLVPDPEGRLPEESLNASGLKKCFQSKGFSTQELVALSGAHTIGSKGFGSPISFDNSYYKVLLEKPWTSSGGMPSMIGLPSDHALVEDDECLRWIKKYADSENLFFEDFKNAYVKLVNSGVRRNSL

SEQ ID NO: 54987 - protein, 319 aa, Glycine max
  peptide (1)..(319): Ceres Seq. ID no. 15175668
MRLGVSVSVRCSIGTASGNTQTDYPAKFQRSSFSTANFLPDNASSDLAVSISSSSSRRGLIRIATLPCLLPLIGCLPANAMQPGSKEYLLIKEEVRKVLSKGKAAGVLRLVFHDAGTFDIDDSTGGMNGSIVYELERPENAGLKKSVKVLQKAKTQIDAIQPVSWADMIAVAGAEAVEVCGGPPIQVSLGRLDTLVPDPEGRLPEESLNASGLKKCFQSKGFSTQELVALSGAHTIGSKGFGSPISFDNSYYKVLLEKPWTSSGGMPSMIGLPSDHALVEDDECLRWIKKYADSENLFFEDFKNAYVKLVNSGVRRNSL

SEQ ID NO: 54988 - protein, 239 aa, Glycine max
  peptide (1)..(239): Ceres Seq. ID no. 15175669
MQPGSKEYLLIKEEVRKVLSKGKAAGVLRLVFHDAGTFDIDDSTGGMNGSIVYELERPENAGLKKSVKVLQKAKTQIDAIQPVSWADMIAVAGAEAVEVCGGPPIQVSLGRLDTLVPDPEGRLPEESLNASGLKKCFQSKGFSTQELVALSGAHTIGSKGFGSPISFDNSYYKVLLEKPWTSSGGMPSMIGLPSDHALVEDDECLRWIKKYADSENLFFEDFKNAYVKLVNSGVRRNSL

SEQ ID NO: 54989 - DNA, 1261 bp, Glycine max
  misc_feature (1)..(1261): Ceres Seq. ID no. 14313599
ggtaataaggcaaaaccctctctctctctctctcaatttgtttacctcttcaactcaaccacacttctaagatcaaaagctacctttgttgctttgagtttgaactttgaatcaatcaatcaatcaaagtgggtggtgactcatggaagtgaaaggaaggataagcaactccaccatcaccaccaccacaatccaaagtgaggatgagatggaccttcgaagaggtccttggaccgtcgatgaggatcttgctctcatcaattacattgctaatcatggtgaaggtcgatggaactccctagctcgttcagctggactcaaacgaactggcaagagctgcagattgagatggttgaattatttgcgtcccgatgttcgacgtggcaacatcacacttgaagaacagcttcttattctcgagctccatggtcgctggggaaaccgatggtctaaaattgctcaatatttgcctggaagaaccgataatgagataaagaattattggagaacccgtgtccaaaagcaagccaagcaactcaaatgtgacgtgaatagcaagcaattcaaggatgccatgcgctacctttggatgccaaggctggtggagcgcattcaagccgccgccgtggccgccaccactgccacggccaccgtgggttctccaactgcatcagctagtgctactacaaccatcaccactaacaacaacgccaccacatacaactacgagaacaacaacaacaacaaccttaacaacagttttgaagtgcacagtgggaacatgatgttgagaaatccagcaatcatgaacattaataattttgttggttcacacagttacactccagagaataatagtacgggtgcctcatcggattcatttggtgctcaggtttcgcctgtctcggacttgactcaggattattacaataatgtcacggttgggaataataacaacaacaataaccctaatcctgagtattaccaacaagcacatgatcaattgagtttcttagactgcatcacaagcccttcagggttgttcgatttccagtccatggaaccaaacaccccgtggattcagagtaatgttggggacacgtcaaccaacggtttctggaatgttgaaaacatgttgctctttcaacaactctctgacaacatgtgaaacatcaattcgtaggagaattcatggtgagagggactaaaaaaactgtgaagggttgtgaaatttacagatgataaaattatataattaagt

SEQ ID NO: 54990 - protein, 341 aa, Glycine max
  peptide (1)..(341): Ceres Seq. ID no. 14313600
MEVKGRISNSTITTTTIQSEDEMDLRRGPWTVDEDLALINYIANHGEGRWNSLARSAGLKRTGKSCRLRWLNYLRPDVRRGNITLEEQLLILELHGRWGNRWSKIAQYLPGRTDNEIKNYWRTRVQKQAKQLKCDVNSKQFKDAMRYLWMPRLVERIQAAAVAATTATATVGSPTASASATTTITTNNNATTYNYENNNNNNLNNSFEVHSGNMMLRNPAIMNINNFVGSHSYTPENNSTGASSDSFGAQVSPVSDLTQDYYNNVTVGNNNNNNNPNPEYYQQAHDQLSFLDCITSPSGLFDFQSMEPNTPWIQSNVGDTSTNGFWNVENMLLFQQLSDNM

SEQ ID NO: 54991 - protein, 319 aa, Glycine max
  peptide (1)..(319): Ceres Seq. ID no. 14313601
MDLRRGPWTVDEDLALINYIANHGEGRWNSLARSAGLKRTGKSCRLRWLNYLRPDVRRGNITLEEQLLILELHGRWGNRWSKIAQYLPGRTDNEIKNYWRTRVQKQAKQLKCDVNSKQFKDAMRYLWMPRLVERIQAAAVAATTATATVGSPTASASATTTITTNNNATTYNYENNNNNNLNNSFEVHSGNMMLRNPAIMNINNFVGSHSYTPENNSTGASSDSFGAQVSPVSDLTQDYYNNVTVGNNNNNNNPNPEYYQQAHDQLSFLDCITSPSGLFDFQSMEPNTPWIQSNVGDTSTNGFWNVENMLLFQQLSDNM

SEQ ID NO: 54992 - protein, 197 aa, Glycine max
  peptide (1)..(197): Ceres Seq. ID no. 14313602
MRYLWMPRLVERIQAAAVAATTATATVGSPTASASATTTITTNNNATTYNYENNNNNNLNNSFEVHSGNMMLRNPAIMNINNFVGSHSYTPENNSTGASSDSFGAQVSPVSDLTQDYYNNVTVGNNNNNNNPNPEYYQQAHDQLSFLDCITSPSGLFDFQSMEPNTPWIQSNVGDTSTNGFWNVENMLLFQQLSDNM

SEQ ID NO: 54993 - DNA, 1674 bp, Glycine max
  misc_feature (1)..(1674): Ceres Seq. ID no. 15177903
ggtctgtttcgttgcaaagaagagtgttgaagcttttcttcttcctctgccttgtcttcttccctttgccttcaacctcgttttcttttcttcgtcttctatcaccgattccgattctcttcttccttattttattgatcctctctgcgattaccaattttctcatttcctccgttttctcggcgaccgaacggaggagtagaacgcagttctgaaaacgattggaaaatgctgggaactgcactgcaattcggcggcgttcgcggcgatgatcggttttacattccggtgaagacgcggaagagccagaatcagcgcaaacagagtcacagagccaagaacaatgaacctgaaaacacggatttagtttcgaagagcaaaatcgatatctctgaggataacaacagcaatagcgatagcaatctcaaccaatctctgaaaccaactctttctccgtccgtagagtctgtcagtaacatcgataggttcttggagtccacaacaccgtcagttccggctcagtatttctccaagacaacgatgagaagatggaagttttgcgatgtggagtatcagtcttattttgcactgagtgatctgtgggagtcttttaaggagtggagtgcgtacggagctggagtgcctttggtgcttgatcaaagtgattctgttgttcagtattatgttccgtatttgtcggctattcaactctatgctcactctgctgagaaggcaactgcaaagccaaggtacaccggtgaagatagtgatggtgattactacagagattcatgcagtgaaggaagtagtgattatgaatatggaaaaaggactgaatttatgactcaaagaagtagtcagtatctaacaggtggtatctcactgcaaatgaacacactatctatgcatgataaacacagtactgtgcaagaaggattttctagtgatgatagtgaaactgggaatcctcaagatctactttttgagtattttgaacaagatcctccgtatagtcgtgagcccttggctgacaagattcaagatcttgcacgccactatcctgccctcaagtcgttgagaagctgtgatttattaccagtcagttgggtgtctgtggcatggtatcctatatatcgaatacccacaggtccaactttaaaagatttagatggatgctttctaacataccatacactccatacacccttgacaggaagtggtcgtactcatgctccaacactggtttatcccagtgagatggatggtgtaccaaagatttctatacctacttttgcaatggcttcctataagttaaaggggtctatttggatgaaaaaaggagttagtgaatctcaacaagtgagttccctcttgcaggctgctgataactggttaagactagttcaggttaatcacccggattttcagttctttaaatcacatggcacataccatagatgaactgcataagccgacatgtctttcctgcttttggctaaaactgagccttaatttctgtgttcgttgcttggtgcaaacttggtaaaagcccatccatctgtagagattgtgatgacgcgatagctgcctaattttggattcttgtgatatgcctaagcagcacaaaaagatgaagccaatatgaagcaatgaattcatagagattgctaaagc

SEQ ID NO: 54994 - protein, 410 aa, Glycine max
  peptide (1)..(410): Ceres Seq. ID no. 15177904
MLGTALQFGGVRGDDRFYIPVKTRKSQNQRKQSHRAKNNEPENTDLVSKSKIDISEDNNSNSDSNLNQSLKPTLSPSVESVSNIDRFLESTTPSVPAQYFSKTTMRRWKFCDVEYQSYFALSDLWESFKEWSAYGAGVPLVLDQSDSVVQYYVPYLSAIQLYAHSAEKATAKPRYTGEDSDGDYYRDSCSEGSSDYEYGKRTEFMTQRSSQYLTGGISLQMNTLSMHDKHSTVQEGFSSDDSETGNPQDLLFEYFEQDPPYSREPLADKIQDLARHYPALKSLRSCDLLPVSWVSVAWYPIYRIPTGPTLKDLDGCFLTYHTLHTPLTGSGRTHAPTLVYPSEMDGVPKISIPTFAMASYKLKGSIWMKKGVSESQQVSSLLQAADNWLRLVQVNHPDFQFFKSHGTYHR

SEQ ID NO: 54995 - protein, 306 aa, Glycine max
  peptide (1)..(306): Ceres Seq. ID no. 15177905
MRRWKFCDVEYQSYFALSDLWESFKEWSAYGAGVPLVLDQSDSVVQYYVPYLSAIQLYAHSAEKATAKPRYTGEDSDGDYYRDSCSEGSSDYEYGKRTEFMTQRSSQYLTGGISLQMNTLSMHDKHSTVQEGFSSDDSETGNPQDLLFEYFEQDPPYSREPLADKIQDLARHYPALKSLRSCDLLPVSWVSVAWYPIYRIPTGPTLKDLDGCFLTYHTLHTPLTGSGRTHAPTLVYPSEMDGVPKISIPTFAMASYKLKGSIWMKKGVSESQQVSSLLQAADNWLRLVQVNHPDFQFFKSHGTYHR

SEQ ID NO: 54996 - protein, 206 aa, Glycine max
  peptide (1)..(206): Ceres Seq. ID no. 15177906
MTQRSSQYLTGGISLQMNTLSMHDKHSTVQEGFSSDDSETGNPQDLLFEYFEQDPPYSREPLADKIQDLARHYPALKSLRSCDLLPVSWVSVAWYPIYRIPTGPTLKDLDGCFLTYHTLHTPLTGSGRTHAPTLVYPSEMDGVPKISIPTFAMASYKLKGSIWMKKGVSESQQVSSLLQAADNWLRLVQVNHPDFQFFKSHGTYHR

SEQ ID NO: 54997 - DNA, 1455 bp, Glycine max
  misc_feature (1)..(1455): Ceres Seq. ID no. 14311989
gttatgactctttgacttctccttcatctctttcgctggacaaaacccctttcgccggaaaacccaccgcaacctttgtggttcgcaactccgtttccggcttcaccgtgctcctcttacacgcagtatatatatatgtatgtatatggggaaaactaggtggttgataatattggttacctgtttatgcctgctttccttttctgatggcagagaactcaaggttaggcataaaaagcaacattaccaatacaatcatacagttgctacaatattagtggaatatgcttctgcggtatacttgtcagatttaactgaactttttacttggacgtgctctaggtgtaatggcttgaccaagggatttgaaatgatagagttagttgttgacgtcgagcattgcttacaggcatttgttggagtggccgatgatcctcatgccattatcattgcattcagaggaacaaatgaacacagcttacagaattggattgaagatttatattggaagcagcatgatataaattatccaggcatggatgatgcaatggtacaccgtggtttttataccgcgtaccacaatacaacaatacgtcctgcaattttagatgctgttgaaagagcaaagaagttttatggagatattgaaattatagcaacagggcattcaatgggaggggcaatggcttcattttgtggacttgatttaacggtaaatcaaaatgaaaaaaatgttcaagttatgacatttggacaacctcgtattggaaatgctgcttttgcatctctctatacgaaactagttccaaataccatccgagtcacaaatgaccatgatattgtacctcatttgcctccatactattattatttaccgcagaagacataccgccacttcccaagagaggtatggctttataacatcggattaggtagtcttgtgtacagtgttgagaagatttgtgatgaatctggtgaggatccaaattgcagcagatcggtgactgggaatagcattgctgatcacttggtctattatggcgttgacatgggatcagatgagccaagttcatgcagaattgttatggattcttatgttcagaatactaacatcaaagattcaagaggaaacttaatcttgtccagagatcctgcaacccccctcatcaaattgagtggagagggtgacaatcaggaaaatcccattaatgttgattgaattggcatcagatatctgttgcatgatatgttccagaggtttgccgtgtggcattattcttcagatttcttctttcttcatggtccatacagctgaacaattttattgaacaggctagggctggaaggagtttgtatagtcttggactcgtgtacatatgctcatacttgtatatataactaataattatatttttttacttcataattaataattcttgatactttgttaagtgc

SEQ ID NO: 54998 - protein, 359 aa, Glycine max
  peptide (1)..(359): Ceres Seq. ID no. 14311990
MYMGKTRWLIILVTCLCLLSFSDGRELKVRHKKQHYQYNHTVATILVEYASAVYLSDLTELFTWTCSRCNGLTKGFEMIELVVDVEHCLQAFVGVADDPHAIIIAFRGTNEHSLQNWIEDLYWKQHDINYPGMDDAMVHRGFYTAYHNTTIRPAILDAVERAKKFYGDIEIIATGHSMGGAMASFCGLDLTVNQNEKNVQVMTFGQPRIGNAAFASLYTKLVPNTIRVTNDHDIVPHLPPYYYYLPQKTYRHFPREVWLYNIGLGSLVYSVEKICDESGEDPNCSRSVTGNSIADHLVYYGVDMGSDEPSSCRIVMDSYVQNTNIKDSRGNLILSRDPATPLIKLSGEGDNQENPINVD

SEQ ID NO: 54999 - protein, 357 aa, Glycine max
  peptide (1)..(357): Ceres Seq. ID no. 14311991
MGKTRWLIILVTCLCLLSFSDGRELKVRHKKQHYQYNHTVATILVEYASAVYLSDLTELFTWTCSRCNGLTKGFEMIELVVDVEHCLQAFVGVADDPHAIIIAFRGTNEHSLQNWIEDLYWKQHDINYPGMDDAMVHRGFYTAYHNTTIRPAILDAVERAKKFYGDIEIIATGHSMGGAMASFCGLDLTVNQNEKNVQVMTFGQPRIGNAAFASLYTKLVPNTIRVTNDHDIVPHLPPYYYYLPQKTYRHFPREVWLYNIGLGSLVYSVEKICDESGEDPNCSRSVTGNSIADHLVYYGVDMGSDEPSSCRIVMDSYVQNTNIKDSRGNLILSRDPATPLIKLSGEGDNQENPINVD

SEQ ID NO: 55000 - protein, 282 aa, Glycine max
  peptide (1)..(282): Ceres Seq. ID no. 14311992
MIELVVDVEHCLQAFVGVADDPHAIIIAFRGTNEHSLQNWIEDLYWKQHDINYPGMDDAMVHRGFYTAYHNTTIRPAILDAVERAKKFYGDIEIIATGHSMGGAMASFCGLDLTVNQNEKNVQVMTFGQPRIGNAAFASLYTKLVPNTIRVTNDHDIVPHLPPYYYYLPQKTYRHFPREVWLYNIGLGSLVYSVEKICDESGEDPNCSRSVTGNSIADHLVYYGVDMGSDEPSSCRIVMDSYVQNTNIKDSRGNLILSRDPATPLIKLSGEGDNQENPINVD

SEQ ID NO: 55001 - DNA, 1414 bp, Glycine max
  misc_feature (1)..(1414): Ceres Seq. ID no. 13594080
ggggggggggsagctacgtaggccccccccccccatctctttcatactctcacgtcattatattaagctagctttgctaatattggacccttcttcaaccccaaaaatataaaaaactaaaaaaacatcaaccgaaggggtcatttctcccaatccgtttctgtttctgtcttccaggaacactgtcagtgagtgaaggatacgatgaacatcatgtctacccaccagtgtagttggcctgtgagaattcaggatcatcctgacaaaggaagtattaatagggctccattttccagaggatcagacttccttaatgttggataccatactcaaaaatatggtcatagtgccagaaaatgtaggcccgttttttccagttcagtgagcaacattacggatccttcagattcagataacactgataagaaaaaacctcagaatggtgaaatgggaggagtgaatagtgaaatgcttagagagagtctcgagaaaatagttggaaaagatgattccacgtttagtggatttgaccttgctacccttatcaggaacaaatatgggaggtcttatgatgttcagttgataaagaaggagttcatgggaagaaatctccttgcgatgaatgtcatgtggaagtacatggagcagagatccttcccattgaccgaagaagagtatattttgaggcttgatgatattgcaaacaacttaaaatgttggggagctgtgtctcatattcggaacagcctagaaaagtcgaaggaacgacctcggatagggaaggcagtaagcatttttatagatatggatgagtcgggtgctcgttccaacgagtggatctacaaatagaatgtgttactgatttgaaatcctaaagttagtcactggtttccagataacagtgaaggaaaagtccataggcagcaggtccaccacttttagtgaatttcgttagtttggaatttattacacttggatcttaacatctacagaagcttttctgacgtttctgttggcaacttggcatcaggcctaggcaactatatttttggttctgcccttctttttttcctttgttcatattgatgtaaaatgagttaatataagaaaaagcattcatattaaatttctaacaaactttctcttcaaattagaggagacactaatattaaaggtgttgtcctaagtgcatgcacattcctcgtgggaattacttgaaacatgagagaaatttgaatcctttgccagcaagtatgattatagccagctgatgctataactgcttggatagagaatacgatttttcagtgtagcttttatcaaagtagaaatttctttcgatgccaaaaaaaaaaaaaaaaaaaaaaaaaaaaaaaaagaaaaaaaaaaaaaaaaaagaattcctgcagcccgg

SEQ ID NO: 55002 - protein, 214 aa, Glycine max
  peptide (1)..(214): Ceres Seq. ID no. 15221297
MNIMSTHQCSWPVRIQDHPDKGSINRAPFSRGSDFLNVGYHTQKYGHSARKCRPVFSSSVSNITDPSDSDNTDKKKPQNGEMGGVNSEMLRESLEKIVGKDDSTFSGFDLATLIRNKYGRSYDVQLIKKEFMGRNLLAMNVMWKYMEQRSFPLTEEEYILRLDDIANNLKCWGAVSHIRNSLEKSKERPRIGKAVSIFIDMDESGARSNEWIYK

SEQ ID NO: 55003 - protein, 211 aa, Glycine max
  peptide (1)..(211): Ceres Seq. ID no. 15221298
MSTHQCSWPVRIQDHPDKGSINRAPFSRGSDFLNVGYHTQKYGHSARKCRPVFSSSVSNITDPSDSDNTDKKKPQNGEMGGVNSEMLRESLEKIVGKDDSTFSGFDLATLIRNKYGRSYDVQLIKKEFMGRNLLAMNVMWKYMEQRSFPLTEEEYILRLDDIANNLKCWGAVSHIRNSLEKSKERPRIGKAVSIFIDMDESGARSNEWIYK

SEQ ID NO: 55004 - protein, 133 aa, Glycine max
  peptide (1)..(133): Ceres Seq. ID no. 15221299
MGGVNSEMLRESLEKIVGKDDSTFSGFDLATLIRNKYGRSYDVQLIKKEFMGRNLLAMNVMWKYMEQRSFPLTEEEYILRLDDIANNLKCWGAVSHIRNSLEKSKERPRIGKAVSIFIDMDESGARSNEWIYK

SEQ ID NO: 55005 - DNA, 1555 bp, Glycine max
  misc_feature (1)..(1555): Ceres Seq. ID no. 15226529
gaaggtaaccccaaatcaaatccgagttgtttcttgtttaagggttcaagggtattatgcttgctggattcattctcttgctgaaatgcagtctttctagaaagtttgttcaactgtcccattattggcgttagctatgctacccactggagcaaaagagacccaattacgtgagagcaacagtcagaaggtccatcctcaaccaatagaagaggccatgaatcagaatccagaagcaatggaaaccctaatatctaaagtttttatgaatatctcttccttgaagtcagcttatattgagcttcaagctgctcatactccctacgaccctgataaaattcacactgctgataaacttgttattagtgagctgaaaaatctgtctgaactcaagcatttctacagggagaacaacccaaaaccagtgtgtgtttctccccaagactcacgtttagctgcagaaattcaagaacaacagagccttctgaaaacttatgaggtcatggtgaagaagttccaatctgaaatccagaataaagattcagagatccatcaattacagcagcagattgagcaggctagccagaagcgagcaaaactagagaaaaatctgaagcttagaggtttgtcaaccaaagaatcggaagatgaaaatggctttttccctgttgatctaactccagatctcttcacctctgctgtggaagtggctgcaaaagccattcatgatttttctaaacctttgatcaacatgatgaaagcagctgggtgggaccttgatgctgctgccaactcaatcgaacctgatgttgtttacgcaaagagagctcataagaaatatgcatttgagtcttacatatgccaaagaatgttcagtggctttgagcaggaaaacttctctgtcaaattagacaatactactgcaactaaagagagcttcttccaccagtttctcgctttaagagagatggatcccttggatatgctggggcaaaatccagattccatttttgggaaattttgcaggagcaaatacctggtggtagttcatcccaagatggaggcatcgttctttggaaatttagatcagcgaaattatgtgatgggtggagggcatccaaggactcctttttaccaggcttttcttaaactgaccaagtcaatttggcttttacacaggttggcttattcttttgagccgaatgttaaggtatttcaggttaaaggagggagtgagttctctgatgtttatatggaaagtgtggtcaagaatctgataatggatgacaatgatgaaaaacccaaaattggtttgatggttatgcctggattttggattgggggaagtttgattcagagtaaagtctatctctctggtatgaaggcggctgaatgattcctgaacacagtcaagactttcagaaaatgcatagttgattgtatgtggtttgtttgaattgtcgtttctttatcttgtaagaaaatgctgttgtctgtaatttttaatatcctttttagtggttgtaagagtaaatgagccctttatcctttgttt

SEQ ID NO: 55006 - protein, 419 aa, Glycine max
  peptide (1)..(419): Ceres Seq. ID no. 15226530
MLPTGAKETQLRESNSQKVHPQPIEEAMNQNPEAMETLISKVFMNISSLKSAYIELQAAHTPYDPDKIHTADKLVISELKNLSELKHFYRENNPKPVCVSPQDSRLAAEIQEQQSLLKTYEVMVKKFQSEIQNKDSEIHQLQQQIEQASQKRAKLEKNLKLRGLSTKESEDENGFFPVDLTPDLFTSAVEVAAKAIHDFSKPLINMMKAAGWDLDAAANSIEPDVVYAKRAHKKYAFESYICQRMFSGFEQENFSVKLDNTTATKESFFHQFLALREMDPLDMLGQNPDSIFGKFCRSKYLVVVHPKMEASFFGNLDQRNYVMGGGHPRTPFYQAFLKLTKSIWLLHRLAYSFEPNVKVFQVKGGSEFSDVYMESVVKNLIMDDNDEKPKIGLMVMPGFWIGGSLIQSKVYLSGMKAAE

SEQ ID NO: 55007 - protein, 392 aa, Glycine max
  peptide (1)..(392): Ceres Seq. ID no. 15226531
MNQNPEAMETLISKVFMNISSLKSAYIELQAAHTPYDPDKIHTADKLVISELKNLSELKHFYRENNPKPVCVSPQDSRLAAEIQEQQSLLKTYEVMVKKFQSEIQNKDSEIHQLQQQIEQASQKRAKLEKNLKLRGLSTKESEDENGFFPVDLTPDLFTSAVEVAAKAIHDFSKPLINMMKAAGWDLDAAANSIEPDVVYAKRAHKKYAFESYICQRMFSGFEQENFSVKLDNTTATKESFFHQFLALREMDPLDMLGQNPDSIFGKFCRSKYLVVVHPKMEASFFGNLDQRNYVMGGGHPRTPFYQAFLKLTKSIWLLHRLAYSFEPNVKVFQVKGGSEFSDVYMESVVKNLIMDDNDEKPKIGLMVMPGFWIGGSLIQSKVYLSGMKAAE

SEQ ID NO: 55008 - protein, 385 aa, Glycine max
  peptide (1)..(385): Ceres Seq. ID no. 15226532
METLISKVFMNISSLKSAYIELQAAHTPYDPDKIHTADKLVISELKNLSELKHFYRENNPKPVCVSPQDSRLAAEIQEQQSLLKTYEVMVKKFQSEIQNKDSEIHQLQQQIEQASQKRAKLEKNLKLRGLSTKESEDENGFFPVDLTPDLFTSAVEVAAKAIHDFSKPLINMMKAAGWDLDAAANSIEPDVVYAKRAHKKYAFESYICQRMFSGFEQENFSVKLDNTTATKESFFHQFLALREMDPLDMLGQNPDSIFGKFCRSKYLVVVHPKMEASFFGNLDQRNYVMGGGHPRTPFYQAFLKLTKSIWLLHRLAYSFEPNVKVFQVKGGSEFSDVYMESVVKNLIMDDNDEKPKIGLMVMPGFWIGGSLIQSKVYLSGMKAAE

SEQ ID NO: 55009 - DNA, 1381 bp, Glycine max
  misc_feature (1)..(1381): Ceres Seq. ID no. 14308625
tgtaactcccgtagtcccgctgtatgttgtgttgaattgcttgctcaggcagcttgaaggagcacattgctaaggttaaaatagctgaaattgcatttatggtgcaattatgcaatttgctgtaagcagtgttgtggtagtaatgttctaaatcttgaaagtgttgtttcctaggtttatagcatctatttaaggactcatgagaaatcccagtttattggaacatgtttgtctcgctgacatctatctgctgtagcattcaactagtctgtgttttggtaactgtgtggacatgccattcaatccctgagtaaaatgtgaaaacattttacatttattgccactgctaatagtttccaaggataacgaaagcaataatctaattttgtttttgtaccctctactctagaaggtacaaagaaaatgcatgcttgaataaatttttaattgttctcatttgtagaaaaaagttggaattccattttacttgaagatgtttgagctaataacttctcttctaagttcgaacttacatggtttcttaaatggcaatcacaggcagcattgcatgctctaggaaacatctcgggagaaaccagatctgagaacaacatcatactcaatgccgaagaagaagaaaacctgcgacgcttaatttatgaaacagcatccagaagctcaaagctgactccatcgggtctttttctgtcagtattgcagcaggattcagaaatacgtctagcgggctatagaatgctaagtggattggttgcccgaccatggtgcttgatggagatatgttcaaaacaagagattataaataaagttacggacccaagtactgaaacgacaaaaataggtatggaaggcagatataactgctgcaaggcaatacacaaatcattgacagtgtctagtagagtttctgctaatcctgcttttgcaggaatagctgcaaagtttcaggaagctgttggaatgggtccatatcttgttaaaaggcatgttgaagctcaacctgctgtgataacggctgatagattttagttttcacacctgagtggtcaagcaatacctgtaatggagcagttttttttctcttctcaaatacaatgtggagtgttatagaacaaaaaccttttccccctcaaatgttgaaacttgatggaatgagtatattaatcatagttttttagtgtattatatttcaatggcttttgtcaactctagcaaatagatattctttttggctttggatgtgtgttgcatgtgtgaagtagtagtctttgtcaacaattacattgtctactaactggcatatatactgaacttgcattcagctataatttagcttattcaagttcgactgcagcatgttgtt

SEQ ID NO: 55010 - protein, 97 aa, Glycine max
  peptide (1)..(97): Ceres Seq. ID no. 14308626
MLSGLVARPWCLMEICSKQEIINKVTDPSTETTKIGMEGRYNCCKAIHKSLTVSSRVSANPAFAGIAAKFQEAVGMGPYLVKRHVEAQPAVITADRF

SEQ ID NO: 55011 - protein, 85 aa, Glycine max
  peptide (1)..(85): Ceres Seq. ID no. 14308627
MEICSKQEIINKVTDPSTETTKIGMEGRYNCCKAIHKSLTVSSRVSANPAFAGIAAKFQEAVGMGPYLVKRHVEAQPAVITADRF

SEQ ID NO: 55012 - protein, 61 aa, Glycine max
  peptide (1)..(61): Ceres Seq. ID no. 14308628
MEGRYNCCKAIHKSLTVSSRVSANPAFAGIAAKFQEAVGMGPYLVKRHVEAQPAVITADRF

SEQ ID NO: 55013 - DNA, 1271 bp, Glycine max
  misc_feature (1)..(1271): Ceres Seq. ID no. 15169032
aaaagactgaaggataaaacaggcagacattgtcaccagcccccaagcccaaatactatagtgaatggactcacttggccatgtttggcagtggcaccactgacaccttaaggtggaaccagtgtagccatgttagaccatgtttggtgtccataccttggtgcattcgtctgttcttttcataggccaaaatctgattttacaagttattgtgacagggagttgtagtgtttagctttgatactactaatctgtgtttctcatctgctttaaactgtgagcagtgagattctcgcatcttatacatttaagcaattgaaagcatgatgaatcattactattaattttgttatcatatttttgcaatgcaagttctcagtctttcaaagtcttgtcaccttgctttgtgtttgctgatgtaagatttctggttaattaatttgaatctgaaatgtgggcgttcacctcaccatatgctattatagtgcaatctccttaatatatatttgagtatagtattatcaatccaagaaaaaagaaaaaagatattactgcatatcatttttttgttatcatacttttgcaaaataagttctgtctttcgacgttttgaaatcttgtgatgcaacttatttgccatttgtgtttgctgatgcaagattttccttgttaatttgaatcggaaatgcaggtgttagcccaacagctattgcagtgcaatccccttatgttgctcaagtacaacttttgagggacaagcttgatgaatttccagaagcagcaggtactgaggttgcaaccattgacagttttcaaggtcgggaagctgatgcagtaattttatccatggtacgatcaaacacattgggagctgttggattccttggggatagcagaagaatcaatgttgccatcacaagagcacgcaaacatttagctttggtctgtgacagctcgactatatgccacaataccttcttagcaaggcttctgcgtcatattagacactttggtagggtgaagcatgcagaaccaggtagttttggaggatatggacttgggatgaatccaatattaccttccattaattagtgtgcaacagtagcacgaaacaagttcctatttaatccaatattacttggaggatatggacttgggatggataggttttttctttaaacttgtatagttgtatagcaattcataaattcaaaattgtgtagcgtatcaagtacgtacagaaaagttcattgaaaccccaagattggtat

SEQ ID NO: 55014 - protein, 81 aa, Glycine max
  peptide (1)..(81): Ceres Seq. ID no. 15169033
MVRSNTLGAVGFLGDSRRINVAITRARKHLALVCDSSTICHNTFLARLLRHIRHFGRVKHAEPGSFGGYGLGMNPILPSIN

SEQ ID NO: 55015 - DNA, 2314 bp, Glycine max
  misc_feature (1)..(2314): Ceres Seq. ID no. 15224874
gatggaagagctctccgcggggcctctcgtccccgccgtcgtcaaaccggaagcgtccaaaggcgccgccgtcgccgccgacacctccgccgcggcctccggcggcacgttcccggcctccacgtcggagccggacaaggacttcctctgcccgatttgcatgcagatcatcaaggacgcgttcctcaccgcgtgcggccacagcttctgctacatgtgcatcatcacgcacctccgcaacaagagcgattgcccttgctgcggccactacctcaccaacaccaacctcttccctaacttcttgctcgacaagctactgaagaagacttctgcgcgtcaaatatcaaaaaccgcttcacctgtggaacatttccggcaggcattgcaaaagggttgtgatgtgtcaattaaggagctagacacccttttgtcacttcttgccgagaagaaaagaaaaatggaacaagaagaagctgagagaaatatgcaaatattgttagacttcttgcattgcttacgcaagcaaaaagttgatgagttgaaggaggtacaaactgatctccagtttataaaagaggacattaatgctgtggagaaacatagaatggatttgtatcgtgcacgggacaggtactctgtaaaattacggatgcttgatgactctggtggaagaaaatcatggcattcatcaatggacaagaacaacagtggccttatatctcgtcctctaaatctacgaggagggttgtcatcagggagccatactaagaaaaatgatggaaagtcccaaattagctctcacgggcatggagttcagagaagggatgccatcactggatccgattcacaatatataaatcaatcgggtctttctctagttagaaagaagagggtgcatacacagttcaatgacctacaagaatgttacctacaaaagcgacgacatgcagctgataggccccatagccaacaagtaagagatataaatctcataagtcgagaaggttatactgctggtcttgaagattttcagtcagtcttgacaactttcacacgctatagccgattgagagtcattgcagaactaagacatggggatatatttcattcagcaaatatagtgtcaagcatagagtttgactgcgatgatgatttgtttgctactgctggagtttcccggcgcatcaaagtttttgacttttctgctgttgtgaatgaacctacagatgctcactgtcctgttgtggagatgtctacacgttcaaaacttagttgcttgagttggaataaatatgctaagaatcaaatagctagtagtgattatgaaggaattgtgactgtttgggatgtaaccactcgaaagagtttaatggaatatgaagagcatgaaaagcgtgcatggagtgttgatttttcaagaacagatccctctatgcttgtatctggtagcgatgactgtaaggtcaaaatttggtgtacaaatcaggaagctagtgttctaaatatagacatgaaagcaaacatatgctgtgtcaaatataatcctggatctggcaattatattgcagttggatcagcagaccatcacatccattattatgatttgagaaatatcagccgtccagtccatgttttcagtgggcacaggaaggctgtttcatatgtgaaatttctgtctaatgatgaacttgcttctgcatcaacagatagtacactgcgattatgggatgtgaaggaaaacttgccagttcgtactttcaaaggccatgcaaatgagaaaaactttgttggccttacagtaagcagtgaatacattgcgtgtggcagtgaaacaaatgaagtctttgtgtaccacaaggaaatctcgagacctttgacttgccacagatttgggtcccctgatatggatgacgctgaagatgaggctggatcgtacttcattagtgctgtatgctggaagagtgatcgccccactattctaactgcaaatagtcaaggcaccatcaaagtgctggtgcttgcagcttgaacacgagaaaaaagaatagaatgtggaattggtattatcttttcccatgctattatgattgtatcatttattaattgtacatagttttcaagtgtatatggcaggctttagggatcttaatgagatattagttgagtgcttaaacctttatcaacaaacctatttaagggactgaactttaatttttaccaattgaggacctcaaatttattaaattttgtattaataaatgctcaggagacaaaataaaatatcaaatttggcatgcaaaaaaaaaaaaaaaaa

SEQ ID NO: 55016 - protein, 675 aa, Glycine max
  peptide (1)..(675): Ceres Seq. ID no. 15224875
MEELSAGPLVPAVVKPEASKGAAVAADTSAAASGGTFPASTSEPDKDFLCPICMQIIKDAFLTACGHSFCYMCIITHLRNKSDCPCCGHYLTNTNLFPNFLLDKLLKKTSARQISKTASPVEHFRQALQKGCDVSIKELDTLLSLLAEKKRKMEQEEAERNMQILLDFLHCLRKQKVDELKEVQTDLQFIKEDINAVEKHRMDLYRARDRYSVKLRMLDDSGGRKSWHSSMDKNNSGLISRPLNLRGGLSSGSHTKKNDGKSQISSHGHGVQRRDAITGSDSQYINQSGLSLVRKKRVHTQFNDLQECYLQKRRHAADRPHSQQVRDINLISREGYTAGLEDFQSVLTTFTRYSRLRVIAELRHGDIFHSANIVSSIEFDCDDDLFATAGVSRRIKVFDFSAVVNEPTDAHCPVVEMSTRSKLSCLSWNKYAKNQIASSDYEGIVTVWDVTTRKSLMEYEEHEKRAWSVDFSRTDPSMLVSGSDDCKVKIWCTNQEASVLNIDMKANICCVKYNPGSGNYIAVGSADHHIHYYDLRNISRPVHVFSGHRKAVSYVKFLSNDELASASTDSTLRLWDVKENLPVRTFKGHANEKNFVGLTVSSEYIACGSETNEVFVYHKEISRPLTCHRFGSPDMDDAEDEAGSYFISAVCWKSDRPTILTANSQGTIKVLVLAA

SEQ ID NO: 55017 - protein, 622 aa, Glycine max
  peptide (1)..(622): Ceres Seq. ID no. 15224876
MQIIKDAFLTACGHSFCYMCIITHLRNKSDCPCCGHYLTNTNLFPNFLLDKLLKKTSARQISKTASPVEHFRQALQKGCDVSIKELDTLLSLLAEKKRKMEQEEAERNMQILLDFLHCLRKQKVDELKEVQTDLQFIKEDINAVEKHRMDLYRARDRYSVKLRMLDDSGGRKSWHSSMDKNNSGLISRPLNLRGGLSSGSHTKKNDGKSQISSHGHGVQRRDAITGSDSQYINQSGLSLVRKKRVHTQFNDLQECYLQKRRHAADRPHSQQVRDINLISREGYTAGLEDFQSVLTTFTRYSRLRVIAELRHGDIFHSANIVSSIEFDCDDDLFATAGVSRRIKVFDFSAVVNEPTDAHCPVVEMSTRSKLSCLSWNKYAKNQIASSDYEGIVTVWDVTTRKSLMEYEEHEKRAWSVDFSRTDPSMLVSGSDDCKVKIWCTNQEASVLNIDMKANICCVKYNPGSGNYIAVGSADHHIHYYDLRNISRPVHVFSGHRKAVSYVKFLSNDELASASTDSTLRLWDVKENLPVRTFKGHANEKNFVGLTVSSEYIACGSETNEVFVYHKEISRPLTCHRFGSPDMDDAEDEAGSYFISAVCWKSDRPTILTANSQGTIKVLVLAA

SEQ ID NO: 55018 - protein, 604 aa, Glycine max
  peptide (1)..(604): Ceres Seq. ID no. 15224877
MCIITHLRNKSDCPCCGHYLTNTNLFPNFLLDKLLKKTSARQISKTASPVEHFRQALQKGCDVSIKELDTLLSLLAEKKRKMEQEEAERNMQILLDFLHCLRKQKVDELKEVQTDLQFIKEDINAVEKHRMDLYRARDRYSVKLRMLDDSGGRKSWHSSMDKNNSGLISRPLNLRGGLSSGSHTKKNDGKSQISSHGHGVQRRDAITGSDSQYINQSGLSLVRKKRVHTQFNDLQECYLQKRRHAADRPHSQQVRDINLISREGYTAGLEDFQSVLTTFTRYSRLRVIAELRHGDIFHSANIVSSIEFDCDDDLFATAGVSRRIKVFDFSAVVNEPTDAHCPVVEMSTRSKLSCLSWNKYAKNQIASSDYEGIVTVWDVTTRKSLMEYEEHEKRAWSVDFSRTDPSMLVSGSDDCKVKIWCTNQEASVLNIDMKANICCVKYNPGSGNYIAVGSADHHIHYYDLRNISRPVHVFSGHRKAVSYVKFLSNDELASASTDSTLRLWDVKENLPVRTFKGHANEKNFVGLTVSSEYIACGSETNEVFVYHKEISRPLTCHRFGSPDMDDAEDEAGSYFISAVCWKSDRPTILTANSQGTIKVLVLAA

SEQ ID NO: 55019 - DNA, 1366 bp, Glycine max
  misc_feature (1)..(1366): Ceres Seq. ID no. 12581680
cagctacgtaggcccccccccccccaccgcgtataccacaccgaacaacacaacagagagacagagcattaaggatgttggagctgtgccgcaagccactgaagatgtgcttcggtggtggaggcaacgacgacggcctcctctggcacacagaccttaagccccacgcttcagggaactactcaattgcagtggtgcaagctaattcatccttggaagaccaagcacaagtatttacctctccctccgcaacctttgttggtgtatacgacggtcacggtggtcctgaagcttcccgtttcatcaccaaccacctcttctccttccttcgcaaattcacaacagaggagggtggtttgtcggaggaagttataaagaaggcgttcgaggcaacggaagatgagtttttgcgtgtagtgagggaatcatggattgcgcggccacagatagcttccgtgggttcgtgttgtcttctgggagcgatttcaaagggagttctttatgttgctaatctcggggattcgagggcggttttgggtcggaaagcgttggaaggagaggtgaattgtggtgctggtgctgtggtggcagagcgtttgtccactgatcataatgttggagtggagaatgttagaaaggaggttgaagctcttcaccctgatgatccacacattgtggtttgcactcgtggagtttggcgaatcaagggcattattcaggtctcaagatcaataggagatgtttacctaaagaaaccagaatttgacactaatcctctgttccaacaatttgtatgtccactatacttgaggagacctgtaatgacagctgaaccatcgatattggcgcgtaaattgaaggcagatgatctgtttttgatctttgcatcagacgggctttgggagcatttaactgatgaagcggctgttgaaatcatctccagaagtcccagaataggaattgcaaaacgattggcgagagctgcactagaagaggttgcaaagaaaagagaaatgaggtatggggatctaaggaaaacagataaaggtctaaggcgccattttcatgatgatattacagtgatcgttctatatctcgatcattcaaaagaatctcaaaatggtagatcaagacgtaaaggagtttatgattgcattaatactcctattgatatcttctctgtgagctcagatgaagctgatctttaaattgaattagctattagcagtgactctccacgtactgctttttacacaagaaatttgtcacatacaaaagtagtagttacggtggccaaatgaaaaggattgtaaaagaagtaatactcattatcttaatcatcatatttttttctatttctctaact

SEQ ID NO: 55020 - protein, 377 aa, Glycine max
  peptide (1)..(377): Ceres Seq. ID no. 12581681
MLELCRKPLKMCFGGGGNDDGLLWHTDLKPHASGNYSIAVVQANSSLEDQAQVFTSPSATFVGVYDGHGGPEASRFITNHLFSFLRKFTTEEGGLSEEVIKKAFEATEDEFLRVVRESWIARPQIASVGSCCLLGAISKGVLYVANLGDSRAVLGRKALEGEVNCGAGAVVAERLSTDHNVGVENVRKEVEALHPDDPHIVVCTRGVWRIKGIIQVSRSIGDVYLKKPEFDTNPLFQQFVCPLYLRRPVMTAEPSILARKLKADDLFLIFASDGLWEHLTDEAAVEIISRSPRIGIAKRLARAALEEVAKKREMRYGDLRKTDKGLRRHFHDDITVIVLYLDHSKESQNGRSRRKGVYDCINTPIDIFSVSSDEADL

SEQ ID NO: 55021 - protein, 367 aa, Glycine max
  peptide (1)..(367): Ceres Seq. ID no. 12581682
MCFGGGGNDDGLLWHTDLKPHASGNYSIAVVQANSSLEDQAQVFTSPSATFVGVYDGHGGPEASRFITNHLFSFLRKFTTEEGGLSEEVIKKAFEATEDEFLRVVRESWIARPQIASVGSCCLLGAISKGVLYVANLGDSRAVLGRKALEGEVNCGAGAVVAERLSTDHNVGVENVRKEVEALHPDDPHIVVCTRGVWRIKGIIQVSRSIGDVYLKKPEFDTNPLFQQFVCPLYLRRPVMTAEPSILARKLKADDLFLIFASDGLWEHLTDEAAVEIISRSPRIGIAKRLARAALEEVAKKREMRYGDLRKTDKGLRRHFHDDITVIVLYLDHSKESQNGRSRRKGVYDCINTPIDIFSVSSDEADL

SEQ ID NO: 55022 - DNA, 1449 bp, Glycine max
  misc_feature (1)..(1449): Ceres Seq. ID no. 15169248
ggggaggaagcacagaccacaggggcatatctcaaatttttttacaaagtggataatataatataaattgaataactgagggtttggtacttaagtttaatttagttaaagttgtttgtgtctggaattggtgtttgaaaatggctctctttgctgcattttccatttgtaaagttgccaaggatgcagctggagttgcaggaaatgtctttgcttttgggttgtttgtgtctcccatacccacatttaggaggattatcagaaatgggtcaacagagatgttctcagggttgccatatatttattcccttctaaactgcttgatctgcatgtggtatggcacacctctgatatctgctgataatttgttggttacaactgttaattcaattggagctgtctttcaatttgtgtacataatcatcttcctgatgtatgctgagaaagcaaaaaaggtgagaatgattggattatcgctggcagttcttggcatatttgcaatcatattagttggaagcttgcaaatagatgacattataatgcggcggttctttgtgggattcttgagctgtgcctctctcatttcaatgtttgcctctccattgtttataattaaattggtcattcagacaaagagtgttgaattcatgccgttttatctctcactttccaccttcctaatgagcacctctttcttactttatggattattcaacgatgatgcctttatttatgtgccaaatgggataggaaccatattgggattgatacagttgatattatacttctatttcgagggtaaatctagagtgaactccagagaacctttgatagtgtcatatgcatgatcagttctgctgaaaagactggagtgacaacttcttgttcctgcacaaaacagaatcagagttagaaatgaccttttgctgctagatgtggtctgaaactggagttggcaacatccctgtctgtttgattcaatttataggagagcaattaccgttgcatctttgagagagaccagaagttgtgataatgaataacttgaaattgtctatatcatagttaccatatatctggtacaagtactggtacgtggtacttgtagttgtaggtacagatggccagtttttacattattattactagactttctttaaagagaacacggtatgcagtttgtggtacgttgaatacagcacacaatatgcaggattaactatggtctgtatatttatgcaagccttgagaaggtgaaccatgctccgaaatgggactatttcaagaaaggcacatcgcacctctcctgcagtcgttggtggtgctctaggctggcttctcttgcagtgaggccatttccaagttcatcagatgtttacagacaaatatgtacacattatttgagtggcatatattatttattatagtctgatgttgatcaccaaaaag

SEQ ID NO: 55023 - protein, 235 aa, Glycine max
  peptide (1)..(235): Ceres Seq. ID no. 15169249
MALFAAFSICKVAKDAAGVAGNVFAFGLFVSPIPTFRRIIRNGSTEMFSGLPYIYSLLNCLICMWYGTPLISADNLLVTTVNSIGAVFQFVYIIIFLMYAEKAKKVRMIGLSLAVLGIFAIILVGSLQIDDIIMRRFFVGFLSCASLISMFASPLFIIKLVIQTKSVEFMPFYLSLSTFLMSTSFLLYGLFNDDAFIYVPNGIGTILGLIQLILYFYFEGKSRVNSREPLIVSYA

SEQ ID NO: 55024 - protein, 189 aa, Glycine max
  peptide (1)..(189): Ceres Seq. ID no. 15169250
MFSGLPYIYSLLNCLICMWYGTPLISADNLLVTTVNSIGAVFQFVYIIIFLMYAEKAKKVRMIGLSLAVLGIFAIILVGSLQIDDIIMRRFFVGFLSCASLISMFASPLFIIKLVIQTKSVEFMPFYLSLSTFLMSTSFLLYGLFNDDAFIYVPNGIGTILGLIQLILYFYFEGKSRVNSREPLIVSYA

SEQ ID NO: 55025 - protein, 172 aa, Glycine max
  peptide (1)..(172): Ceres Seq. ID no. 15169251
MWYGTPLISADNLLVTTVNSIGAVFQFVYIIIFLMYAEKAKKVRMIGLSLAVLGIFAIILVGSLQIDDIIMRRFFVGFLSCASLISMFASPLFIIKLVIQTKSVEFMPFYLSLSTFLMSTSFLLYGLFNDDAFIYVPNGIGTILGLIQLILYFYFEGKSRVNSREPLIVSYA

SEQ ID NO: 55026 - DNA, 1799 bp, Glycine max
  misc_feature (1)..(1799): Ceres Seq. ID no. 15169264
atcatttttcaattcttatcatcaaaactggtcccaaggagccagaaacaccaaagccaaaaacacttcctttgttacacaagatgaaaacagtttctcttgtccacaaaacagaagaactggctaataaaacagtggtttttgattttgagggtaccttgttaagatcagcttcactgtttccttacttcatgctggttgcttttgaagctggtgggttgctaaggtctctcgtgttgtttgtctcataccctttggtgtggctggttggtgaagatcaacttggcttgaagatcatggttttcttgaccctttttggcataaaaaaggacacgttcagaatagggtcagctgttctgccaaagttcttcttagaaaacatggggtgggaaggctttggagctattatgcgttgtaacaaaaaggtggcatcaagtaagttgccaagggccatggttgaaggtttcttgaaggactacttgggggttgagggtgttatagcaagagacatcaagtccttcaaagggtattttttgggattgtttgaggaaaagaaggaaaacaacacccctacccatatatatgatgaggctacagcaggcaacgacaacactattagtatcactggtagccatattgagtatattgaccaagagcttttcccttatttcaagaaggtttgcttaatgttaagctcagaggagaggagaaattggcatgtccttccaaaagagaggtatccaaagccattgatcttccatgatggaaggttggcattcaggccaacccctgcatcttctctagctttcttcatgtggttaccccttggactattcctttccatctgcagattcacctttggcactgcattgcccttcaatttatctgctccagtattggccttctcaggaacaagaaccactctttcaagaccccaaaaccctttgtcattggtccaaaatgaggaaaaccaaaagggcatgctctatgtgtgcaaccacagaaccttgcttgaccctctttacattgcatatgttttggacaaacctctctctgcagttacatacagcttgagcagattcaatgagctagtagcccccatcagaaccataagactaacaagggacagagaaagagacagagaaacaatggacaaattgctgagcctaggaaaccttgtggtgtgtcctgagggaacaacttgcagggaaccttatttgctaaggttcagtcctttgtttgctgaactcactgatgacattgttcctgtggcggttgatgttaaggttagcatgttctatggaacaacagctagtggacacaaatgtttggacccgtttttccacttcatgaacccgaatcccacgtacttcattaaaatcctcgacagggtaccgctgtcagaaacatgtcttggaggtggaagatcaagaattgaagttgccaattttgtgcaacgtgagattgggaatgctttaggatttgcatgcaccagcttgaccagaaaagacaagtacatgatcttggcaggtaacgagggtgtcaatgaagggccttgtcataactgcaagtagctactggctttgtgtcaaactttagagagaagaaattattacataatccgagaagtatgatggtgtctaccaattttcatgtaacatgttacggagttttcccgaatctttttcatgaaatgaaattctcaattgcatatcatataaattaagattggttgtatggtggtcgcgcatcatgtaatacttttttcttaagcaacaaatagttatgaatgttacacg

SEQ ID NO: 55027 - protein, 523 aa, Glycine max
  peptide (1)..(523): Ceres Seq. ID no. 15169265
HFSILIIKTGPKEPETPKPKTLPLLHKMKTVSLVHKTEELANKTVVFDFEGTLLRSASLFPYFMLVAFEAGGLLRSLVLFVSYPLVWLVGEDQLGLKIMVFLTLFGIKKDTFRIGSAVLPKFFLENMGWEGFGAIMRCNKKVASSKLPRAMVEGFLKDYLGVEGVIARDIKSFKGYFLGLFEEKKENNTPTHIYDEATAGNDNTISITGSHIEYIDQELFPYFKKVCLMLSSEERRNWHVLPKERYPKPLIFHDGRLAFRPTPASSLAFFMWLPLGLFLSICRFTFGTALPFNLSAPVLAFSGTRTTLSRPQNPLSLVQNEENQKGMLYVCNHRTLLDPLYIAYVLDKPLSAVTYSLSRFNELVAPIRTIRLTRDRERDRETMDKLLSLGNLVVCPEGTTCREPYLLRFSPLFAELTDDIVPVAVDVKVSMFYGTTASGHKCLDPFFHFMNPNPTYFIKILDRVPLSETCLGGGRSRIEVANFVQREIGNALGFACTSLTRKDKYMILAGNEGVNEGPCHNCK

SEQ ID NO: 55028 - protein, 496 aa, Glycine max
  peptide (1)..(496): Ceres Seq. ID no. 15169266
MKTVSLVHKTEELANKTVVFDFEGTLLRSASLFPYFMLVAFEAGGLLRSLVLFVSYPLVWLVGEDQLGLKIMVFLTLFGIKKDTFRIGSAVLPKFFLENMGWEGFGAIMRCNKKVASSKLPRAMVEGFLKDYLGVEGVIARDIKSFKGYFLGLFEEKKENNTPTHIYDEATAGNDNTISITGSHIEYIDQELFPYFKKVCLMLSSEERRNWHVLPKERYPKPLIFHDGRLAFRPTPASSLAFFMWLPLGLFLSICRFTFGTALPFNLSAPVLAFSGTRTTLSRPQNPLSLVQNEENQKGMLYVCNHRTLLDPLYIAYVLDKPLSAVTYSLSRFNELVAPIRTIRLTRDRERDRETMDKLLSLGNLVVCPEGTTCREPYLLRFSPLFAELTDDIVPVAVDVKVSMFYGTTASGHKCLDPFFHFMNPNPTYFIKILDRVPLSETCLGGGRSRIEVANFVQREIGNALGFACTSLTRKDKYMILAGNEGVNEGPCHNCK

SEQ ID NO: 55029 - protein, 460 aa, Glycine max
  peptide (1)..(460): Ceres Seq. ID no. 15169267
MLVAFEAGGLLRSLVLFVSYPLVWLVGEDQLGLKIMVFLTLFGIKKDTFRIGSAVLPKFFLENMGWEGFGAIMRCNKKVASSKLPRAMVEGFLKDYLGVEGVIARDIKSFKGYFLGLFEEKKENNTPTHIYDEATAGNDNTISITGSHIEYIDQELFPYFKKVCLMLSSEERRNWHVLPKERYPKPLIFHDGRLAFRPTPASSLAFFMWLPLGLFLSICRFTFGTALPFNLSAPVLAFSGTRTTLSRPQNPLSLVQNEENQKGMLYVCNHRTLLDPLYIAYVLDKPLSAVTYSLSRFNELVAPIRTIRLTRDRERDRETMDKLLSLGNLVVCPEGTTCREPYLLRFSPLFAELTDDIVPVAVDVKVSMFYGTTASGHKCLDPFFHFMNPNPTYFIKILDRVPLSETCLGGGRSRIEVANFVQREIGNALGFACTSLTRKDKYMILAGNEGVNEGPCHNCK

SEQ ID NO: 55030 - DNA, 1330 bp, Glycine max
  misc_feature (1)..(1330): Ceres Seq. ID no. 15177137
acggactgatgctgttctgttggtgacgattgtatccacattgagacgaaatctgacgatgaaacgtggagcattattgtcagtgcttgcgttcgccttcgcggcggcgatctgggcggcgaacggcaacgacaacctcgtcccgcctaggcgggaagtgtacggcaatggccgaatattcgacatcagtcaccggtaccaacccgagatgccggaatgggaatcgaataacggcattgggcagttcctgtggcttcccaagagcatgaagaacggttccctcgccaacaactccgaaatgaaactcccaacacacaccggcacgcatgtcgacgcccccggccacgtgttcgaccactacttcgatgccggcttcgatgtcgacaccctcgacttggacatcctcaacggacctgctctattagttgatgttccaagagatagtaatataactgctcaagttatgaagtcgttgaatattccaaggggtgttgtacgtgttctcttccgaacgttaaataccgacaggcggcttatgtttcagaaggaatgggacacaagctatgtaggattcacagttgatggagctaagtggctagtggataacacggatatcaaacttgttggaattgattacctatctgttgcttcttatgattacttgattccatctcaccttgtttttctaaaagacagggagatcattctcgtggaaggcttgaagcttgatgatgttccagcaggattatattcagtccattgcttacctcttaggttggctggtgctgagggatcaccaatacggtgcattctgattaaaaattagggaaacagtgctgtttcaaagtagtttttgcatttgcagagcaagagggatgcatcaatctttgcaatacttgaatttggttctcttttgtctgctaggctggaactgataaattggcatagtggtgtggtgtccttatggagcaagatagtttcaatgttgtgcatcaacttttgtggcttacgtttacacttgttaaaaacatgcataagcacttcaagaaatcattttgaaatggaaaataatgtatatatagataatttgcacgtagcattagcacttcgagaaagatgcaatggaataagttggcacaatggtgtgtctttgtggagcaagattagtaatgtttgttaactttagtggctcatgtgtacacttattcttgtttcctagtacagaattgcaactttcgttttgggcttgtttcaatagttagtccatcatagagcaccatgtacttgaaagttgatggattgaagatcaaggtgggattgttattactag

SEQ ID NO: 55031 - protein, 274 aa, Glycine max
  peptide (1)..(274): Ceres Seq. ID no. 15177138
RTDAVLLVTIVSTLRRNLTMKRGALLSVLAFAFAAAIWAANGNDNLVPPRREVYGNGRIFDISHRYQPEMPEWESNNGIGQFLWLPKSMKNGSLANNSEMKLPTHTGTHVDAPGHVFDHYFDAGFDVDTLDLDILNGPALLVDVPRDSNITAQVMKSLNIPRGVVRVLFRTLNTDRRLMFQKEWDTSYVGFTVDGAKWLVDNTDIKLVGIDYLSVASYDYLIPSHLVFLKDREIILVEGLKLDDVPAGLYSVHCLPLRLAGAEGSPIRCILIKN

SEQ ID NO: 55032 - protein, 255 aa, Glycine max
  peptide (1)..(255): Ceres Seq. ID no. 15177139
MKRGALLSVLAFAFAAAIWAANGNDNLVPPRREVYGNGRIFDISHRYQPEMPEWESNNGIGQFLWLPKSMKNGSLANNSEMKLPTHTGTHVDAPGHVFDHYFDAGFDVDTLDLDILNGPALLVDVPRDSNITAQVMKSLNIPRGVVRVLFRTLNTDRRLMFQKEWDTSYVGFTVDGAKWLVDNTDIKLVGIDYLSVASYDYLIPSHLVFLKDREIILVEGLKLDDVPAGLYSVHCLPLRLAGAEGSPIRCILIKN

SEQ ID NO: 55033 - protein, 205 aa, Glycine max
  peptide (1)..(205): Ceres Seq. ID no. 15177140
MPEWESNNGIGQFLWLPKSMKNGSLANNSEMKLPTHTGTHVDAPGHVFDHYFDAGFDVDTLDLDILNGPALLVDVPRDSNITAQVMKSLNIPRGVVRVLFRTLNTDRRLMFQKEWDTSYVGFTVDGAKWLVDNTDIKLVGIDYLSVASYDYLIPSHLVFLKDREIILVEGLKLDDVPAGLYSVHCLPLRLAGAEGSPIRCILIKN

SEQ ID NO: 55034 - DNA, 1371 bp, Glycine max
  misc_feature (1)..(1371): Ceres Seq. ID no. 15170956
gaagaagaagaagaatggaagagaagcagagagtgataatagtgggagcagggccttcggggatatcggcggcagcatgcttcacgaaacagtcgattccgtacataatcctggagagggaagactgttccgcttccctgtggaagaaatattcatacgagcgcctccacctccacctcaggaaacagtactgccagcttccccacaaacccttcccagcatcttttcctccctacgttcccaagaagcagttcttgcagtacctggacgactacgtctcccacttcggaatcacgccgctgtaccgaagaaccgtggagctggccgagtacgaccagggctgccacaactggagggtcatggccctcaacggggactccggtcagctcgaggagtaccgtgggaggtttctggtggtggccactggtgaaaccactgacccttttgtgccggagcttcaaggcctcagtggctttcctgggaagctcattcattccactgggtttcgttctgggaaggatttcaaagatcagcatgttcttgttgttggatcggggaattctggcatggaaatcgcattggaccttgtcaaccatggtgccaaaacttccattctcgttaggagcccggttcattttctatcaagggagatggtgagtttggggttgtttctgttgaaatatttgtcgttgagcaccgtggactcgctgatggtgatgcttagtacaatgatttacggggatgtgaccaaatatggggttgcaaggcccaatgagggtcccttttatatgaaggtcaagtatggaaagtacccagttattgacgttggaacctataaaaaaatcaagtctggagaattgaaggttttgccatcagaaatagaaagcctaagaggcaaggatgtcctattcaagaatggtgagtcgcacccatttgactccattgttttctgcaccggcttcaagagatcaaccaacaagtggcttaagggggatgattaccttctgaatgatgagggtcttccgaagccgagttacccgatccattggaagggaaataatggtttgtactgcgttgggctatcaaggagaggcttctatggcgctgccgcagatgctgaaaatatagcaaatgatgtaagctccttcacgcagcatccatgtccctgagaagtgagaacaaactacaagaccaacgacagttttgctgctgcaagtttttgaaacataattattacgacatatcatggcttcgcagattgccctgttagctgccattgctgctagctagagggacaacaatataatctccaaataatactatgagctctgtatattaagagtctctaacaattaattatttataaatgtc

SEQ ID NO: 55035 - protein, 388 aa, Glycine max
  peptide (1)..(388): Ceres Seq. ID no. 15170957
RRRRMEEKQRVIIVGAGPSGISAAACFTKQSIPYIILEREDCSASLWKKYSYERLHLHLRKQYCQLPHKPFPASFPPYVPKKQFLQYLDDYVSHFGITPLYRRTVELAEYDQGCHNWRVMALNGDSGQLEEYRGRFLVVATGETTDPFVPELQGLSGFPGKLIHSTGFRSGKDFKDQHVLVVGSGNSGMEIALDLVNHGAKTSILVRSPVHFLSREMVSLGLFLLKYLSLSTVDSLMVMLSTMIYGDVTKYGVARPNEGPFYMKVKYGKYPVIDVGTYKKIKSGELKVLPSEIESLRGKDVLFKNGESHPFDSIVFCTGFKRSTNKWLKGDDYLLNDEGLPKPSYPIHWKGNNGLYCVGLSRRGFYGAAADAENIANDVSSFTQHPCP

SEQ ID NO: 55036 - protein, 384 aa, Glycine max
  peptide (1)..(384): Ceres Seq. ID no. 15170958
MEEKQRVIIVGAGPSGISAAACFTKQSIPYIILEREDCSASLWKKYSYERLHLHLRKQYCQLPHKPFPASFPPYVPKKQFLQYLDDYVSHFGITPLYRRTVELAEYDQGCHNWRVMALNGDSGQLEEYRGRFLVVATGETTDPFVPELQGLSGFPGKLIHSTGFRSGKDFKDQHVLVVGSGNSGMEIALDLVNHGAKTSILVRSPVHFLSREMVSLGLFLLKYLSLSTVDSLMVMLSTMIYGDVTKYGVARPNEGPFYMKVKYGKYPVIDVGTYKKIKSGELKVLPSEIESLRGKDVLFKNGESHPFDSIVFCTGFKRSTNKWLKGDDYLLNDEGLPKPSYPIHWKGNNGLYCVGLSRRGFYGAAADAENIANDVSSFTQHPCP

SEQ ID NO: 55037 - protein, 269 aa, Glycine max
  peptide (1)..(269): Ceres Seq. ID no. 15170959
MALNGDSGQLEEYRGRFLVVATGETTDPFVPELQGLSGFPGKLIHSTGFRSGKDFKDQHVLVVGSGNSGMEIALDLVNHGAKTSILVRSPVHFLSREMVSLGLFLLKYLSLSTVDSLMVMLSTMIYGDVTKYGVARPNEGPFYMKVKYGKYPVIDVGTYKKIKSGELKVLPSEIESLRGKDVLFKNGESHPFDSIVFCTGFKRSTNKWLKGDDYLLNDEGLPKPSYPIHWKGNNGLYCVGLSRRGFYGAAADAENIANDVSSFTQHPCP

SEQ ID NO: 55038 - DNA, 1597 bp, Glycine max
  misc_feature (1)..(1597): Ceres Seq. ID no. 14308803
ggcagctgagacactgcaaaaagagttatatagagagagaaaagaaaaatgcactgacacagtgacacagtggttctctcacctctccttctctgtgtaactctgccaccatcttcatttccccaagagaaaaagaaaaaggaaaagaaaaaaactgttcaacttttttttaactgaatcaatcactagcttccatttcttcacaggtggaactgtgaatgtgcaccacagctttttgatcctgttcctaaaattttcctgtgaaagattctgaaggcaattgaagtaaatgccatggatcgtggggaccaaatggcgttatccgggtcttactatatgcagcaaagaggaatacctggatctggagcaccacctgagttacatatttcgcctaatatgcgtccaatctctaatccaaatttaccatttcaatccagcattggtggtggtaccattggatccacattgccattggaatcttcagcaatttcagctcatggtgtcaatgtgggagctcctactggggcacctccaggggaacctgttaagaggaagagaggaaggcctaggaaatatggaaccgacggaagtgtgtcattggcattgactccaactccaacatcatctagctatcctggagccttgacacaaagccagaaacggggcagagggcgcccacccgggactgggaagaaacagcaattggcttcgcttggtgaattgatgtctggttcagctgggatgggattcactcctcatataatcaatattgcaagtggagaagacattacaacaaaaatcatggcattttctcagcagggagctagagctgtatgcattttgtcagccaatggtgctgtctctactgtcacacttcgtcagccatcaacttcaggtggcactgtcacatacgaggggcgctttgagatagtgtgtctgtcaggctcttacttggtcaccgataatggtggctcacgcaatcgaactggtggattgagtgtgtcccttgctagtcctgatggtcgtgtcattggtggtggagttggtggagtgcttattgcatcaagtcctgttcaggtggtagttgggagttttctatggggtggatcaaagacaaagaacaagaaaaaggaatcctcagaaggttcagaagttgctgtggagtcagatcaccagggagttcataatccagtttcactgaatagcagcatctcaccaaatcaaaaccttcctccaacccccccatctttaaatccttggtcgacatcgcgtccattggacatgcgtaattcccatgttgacatcgatttaatgcgtgggtgacacattgttgaatatacactagtgctgtgtatatatatttcagattcatggtcgctcatctaatttttgttgtagtagtaaaatgacagaatgggaagtaccaacagcagagtagagccagctgacttttgcaaattgataaatctcacttatatccatccacccttgatgattattgacttggggttgtactcatatttttgtagctgtgaggaattttcaatttgaaggttgtatgttcctgattggtaatgatacaatttgtcttattttg

SEQ ID NO: 55039 - protein, 342 aa, Glycine max
  peptide (1)..(342): Ceres Seq. ID no. 14308804
MDRGDQMALSGSYYMQQRGIPGSGAPPELHISPNMRPISNPNLPFQSSIGGGTIGSTLPLESSAISAHGVNVGAPTGAPPGEPVKRKRGRPRKYGTDGSVSLALTPTPTSSSYPGALTQSQKRGRGRPPGTGKKQQLASLGELMSGSAGMGFTPHIINIASGEDITTKIMAFSQQGARAVCILSANGAVSTVTLRQPSTSGGTVTYEGRFEIVCLSGSYLVTDNGGSRNRTGGLSVSLASPDGRVIGGGVGGVLIASSPVQVVVGSFLWGGSKTKNKKKESSEGSEVAVESDHQGVHNPVSLNSSISPNQNLPPTPPSLNPWSTSRPLDMRNSHVDIDLMRG

SEQ ID NO: 55040 - protein, 336 aa, Glycine max
  peptide (1)..(336): Ceres Seq. ID no. 14308805
MALSGSYYMQQRGIPGSGAPPELHISPNMRPISNPNLPFQSSIGGGTIGSTLPLESSAISAHGVNVGAPTGAPPGEPVKRKRGRPRKYGTDGSVSLALTPTPTSSSYPGALTQSQKRGRGRPPGTGKKQQLASLGELMSGSAGMGFTPHIINIASGEDITTKIMAFSQQGARAVCILSANGAVSTVTLRQPSTSGGTVTYEGRFEIVCLSGSYLVTDNGGSRNRTGGLSVSLASPDGRVIGGGVGGVLIASSPVQVVVGSFLWGGSKTKNKKKESSEGSEVAVESDHQGVHNPVSLNSSISPNQNLPPTPPSLNPWSTSRPLDMRNSHVDIDLMRG

SEQ ID NO: 55041 - protein, 328 aa, Glycine max
  peptide (1)..(328): Ceres Seq. ID no. 14308806
MQQRGIPGSGAPPELHISPNMRPISNPNLPFQSSIGGGTIGSTLPLESSAISAHGVNVGAPTGAPPGEPVKRKRGRPRKYGTDGSVSLALTPTPTSSSYPGALTQSQKRGRGRPPGTGKKQQLASLGELMSGSAGMGFTPHIINIASGEDITTKIMAFSQQGARAVCILSANGAVSTVTLRQPSTSGGTVTYEGRFEIVCLSGSYLVTDNGGSRNRTGGLSVSLASPDGRVIGGGVGGVLIASSPVQVVVGSFLWGGSKTKNKKKESSEGSEVAVESDHQGVHNPVSLNSSISPNQNLPPTPPSLNPWSTSRPLDMRNSHVDIDLMRG

SEQ ID NO: 55042 - DNA, 1198 bp, Glycine max
  misc_feature (1)..(1198): Ceres Seq. ID no. 14312408
atcatttcttttctcttgttatttgagtaacccattcattaatttccctaatcgaaatggagcagagggatcaaaaccaacggcccatggagtggtgtttagagattcattgggtggaagacacaaagtgtacctgaaggccgatccaaggaacgagataattgtttcagccggtgcacttggaagcccacaacttctaatgttgagtggaattggacccagagagcaccttaaagcccacaacatcagaataacattgaatcagccattagtaggacaggaaatgactgacaaccccatgaacgccatctttgtcccttctcctgtccccgtagaggtctctctgattgaggtggtgggcatcaccagttttggcagctacattgaagctgccagtggtgaaaactttgccggtggttctccaaaagactacggaatgttctcccccaagattgggcaactctccacggtgcctccaaaggaaaggaccccagaggccctggccaaggcaacagaactgatggaaactctagaacaagcagccttcagaggaggattcatattggaaaaaatcatgggtccaatctcaagcgggcatttggagctccgaacccgcgacccgaacgacaacccatcagtgaccttcaactacttccaggaccctcgagacttgcagcgatgcgtgcagggcctgagcaccgtggagaagataatcgagtccaaagctttctctcccttcagataccccaacatgccagtgcccgttctgctcaacctgaccgcaagtgcccccgttaacttgttgcccaagcacaccaattcttcactttctttggaacagtattgcagagacactgtcatgaccatttggcactaccacggtggctgccaagtagggaaggttcttgatagggactacaagcttcttggtgtggatgcactgcgtgttattgatggctccacctttaactactctcctggaactaatcctcaggccactgttatgatgcttggcaggtatatgggagtgaaaatattgagcgagagactaggtggtgcggctgctgctgctgaaacagagcaataagttgtatatttttcctttcaacaaagtgtcttcgtgtcactgaggaaaaacaaattcttgtgagaatgatttgtgaagtaacctttcaatgagaaaaataacaaattaaac

SEQ ID NO: 55043 - protein, 361 aa, Glycine max
  peptide (1)..(361): Ceres Seq. ID no. 14312409
SFLFSCYLSNPFINFPNRNGAEGSKPTAHGVVFRDSLGGRHKVYLKADPRNEIIVSAGALGSPQLLMLSGIGPREHLKAHNIRITLNQPLVGQEMTDNPMNAIFVPSPVPVEVSLIEVVGITSFGSYIEAASGENFAGGSPKDYGMFSPKIGQLSTVPPKERTPEALAKATELMETLEQAAFRGGFILEKIMGPISSGHLELRTRDPNDNPSVTFNYFQDPRDLQRCVQGLSTVEKIIESKAFSPFRYPNMPVPVLLNLTASAPVNLLPKHTNSSLSLEQYCRDTVMTIWHYHGGCQVGKVLDRDYKLLGVDALRVIDGSTFNYSPGTNPQATVMMLGRYMGVKILSERLGGAAAAAETEQ

SEQ ID NO: 55044 - protein, 295 aa, Glycine max
  peptide (1)..(295): Ceres Seq. ID no. 14312410
MLSGIGPREHLKAHNIRITLNQPLVGQEMTDNPMNAIFVPSPVPVEVSLIEVVGITSFGSYIEAASGENFAGGSPKDYGMFSPKIGQLSTVPPKERTPEALAKATELMETLEQAAFRGGFILEKIMGPISSGHLELRTRDPNDNPSVTFNYFQDPRDLQRCVQGLSTVEKIIESKAFSPFRYPNMPVPVLLNLTASAPVNLLPKHTNSSLSLEQYCRDTVMTIWHYHGGCQVGKVLDRDYKLLGVDALRVIDGSTFNYSPGTNPQATVMMLGRYMGVKILSERLGGAAAAAETEQ

SEQ ID NO: 55045 - protein, 267 aa, Glycine max
  peptide (1)..(267): Ceres Seq. ID no. 14312411
MTDNPMNAIFVPSPVPVEVSLIEVVGITSFGSYIEAASGENFAGGSPKDYGMFSPKIGQLSTVPPKERTPEALAKATELMETLEQAAFRGGFILEKIMGPISSGHLELRTRDPNDNPSVTFNYFQDPRDLQRCVQGLSTVEKIIESKAFSPFRYPNMPVPVLLNLTASAPVNLLPKHTNSSLSLEQYCRDTVMTIWHYHGGCQVGKVLDRDYKLLGVDALRVIDGSTFNYSPGTNPQATVMMLGRYMGVKILSERLGGAAAAAETEQ

SEQ ID NO: 55046 - DNA, 1100 bp, Glycine max
  misc_feature (1)..(1100): Ceres Seq. ID no. 15172291
ttatatataccaaaattgaattttatgcagcaaaaagtgatattgaaagtgaagcctatacttgaagaaagcatcaagaggttgtgttgcaccaattttaaaagtaagttgagggtggcggatttaggatgtgcttcgggaccaaatgcacttatggtcatggtacaagaaaggcgagatggagtaggtgcatgcgttgtcaatgcaacaccagggagcttttacggaagactctttccgaataattacattcacttctttcaatcttcctatagcctccattggctctcacaaacccctgaagagttgatcaagggagcaaaaccactaaacaagggaaacatttatataacaactacaagctctccaatagtctttaaagcatacttagagcaattccaaagagatttcagtttttttctaaaatcacgttcagatgaactaaaagttggtggcattatggtactaactttccaaggcagagaaaaagctcatgaaattactcatcctttagtggtgattgggatgctgctcaaagatatgatattagagggtttggttgaggagacaaagttggactcatttaacttgcctatatattttccaacgatggaggaagttagagaagttattgaagcagaaggatcttttaccctacaaacattgaaaactttcaaactgggttgggatgcaaaccttcaagatgaagttaatggttctcttcttgatagtaaaataagaggagagttcatagctaagtccatcagagttgtttttgaacccattttaactgttgaatttggcaatgagatcatggatgaattattctcaaggtttgcaactaagatttcacaactcatagagttcgaagcattggagtatacaaacttggtcatgtccatgggaaaagcataaagggaaggaggaagtgggtgtatgctttactaaagatatctacaattaatccaagtgggttgtatcatgaaatttacttgagctacacttcatcatgttcaatatcttgttagtctccatcttcaaatcaactttaaagtttgaatcttgtacatattgataattcccttgtacactctttaatt

SEQ ID NO: 55047 - protein, 304 aa, Glycine max
  peptide (1)..(304): Ceres Seq. ID no. 15172292
LYIPKLNFMQQKVILKVKPILEESIKRLCCTNFKSKLRVADLGCASGPNALMVMVQERRDGVGACVVNATPGSFYGRLFPNNYIHFFQSSYSLHWLSQTPEELIKGAKPLNKGNIYITTTSSPIVFKAYLEQFQRDFSFFLKSRSDELKVGGIMVLTFQGREKAHEITHPLVVIGMLLKDMILEGLVEETKLDSFNLPIYFPTMEEVREVIEAEGSFTLQTLKTFKLGWDANLQDEVNGSLLDSKIRGEFIAKSIRVVFEPILTVEFGNEIMDELFSRFATKISQLIEFEALEYTNLVMSMGKA

SEQ ID NO: 55048 - protein, 296 aa, Glycine max
  peptide (1)..(296): Ceres Seq. ID no. 15172293
MQQKVILKVKPILEESIKRLCCTNFKSKLRVADLGCASGPNALMVMVQERRDGVGACVVNATPGSFYGRLFPNNYIHFFQSSYSLHWLSQTPEELIKGAKPLNKGNIYITTTSSPIVFKAYLEQFQRDFSFFLKSRSDELKVGGIMVLTFQGREKAHEITHPLVVIGMLLKDMILEGLVEETKLDSFNLPIYFPTMEEVREVIEAEGSFTLQTLKTFKLGWDANLQDEVNGSLLDSKIRGEFIAKSIRVVFEPILTVEFGNEIMDELFSRFATKISQLIEFEALEYTNLVMSMGKA

SEQ ID NO: 55049 - protein, 253 aa, Glycine max
  peptide (1)..(253): Ceres Seq. ID no. 15172294
MVMVQERRDGVGACVVNATPGSFYGRLFPNNYIHFFQSSYSLHWLSQTPEELIKGAKPLNKGNIYITTTSSPIVFKAYLEQFQRDFSFFLKSRSDELKVGGIMVLTFQGREKAHEITHPLVVIGMLLKDMILEGLVEETKLDSFNLPIYFPTMEEVREVIEAEGSFTLQTLKTFKLGWDANLQDEVNGSLLDSKIRGEFIAKSIRVVFEPILTVEFGNEIMDELFSRFATKISQLIEFEALEYTNLVMSMGKA

SEQ ID NO: 55050 - DNA, 1368 bp, Glycine max
  misc_feature (1)..(1368): Ceres Seq. ID no. 14310419
gacatccaaaaaacatgaaacgaaaccataatttccccttccaccaccggccacgcaagtgggcgatggtgatccccaccgtcacaatatgcttcctcctcctcttcctcccgctccttcccctcaccaaaccctcatcttcatcttcttctttttctgcgacatggtcttcttcttcgctgaatttaacggaagaactagaagtgggtgttccgagattggcgtacatgttgacggcgacgaaaggggagggggcgcagctgaagagggtccttcaggcagtgtaccatcccaggaactactacctgctccatctcgatctagaggcttctgatgcggagaggctggagctggccaaatacgtcaagtccgagactgtgcttgcggcgtttgggaacgtcttggtggtgggtaagcctgatttggtcacctacaagggccccaccatgattgcttctactcttcacggtattgcccttttgctcaagagggccccacactgggactggttaatcaatctcagcgcctctgattatcctctcctctcccaggacgatatcttgcacatcttttcattcttgcccagggatctaaatttcattgagcatacaagtaatattggttggaaagagcatcaaagagctaggcctatcattatagatccaggcttatatcattcaaagaaatctggtgtttactgggctaaagagaagagatctgttccatcttcgttcaagttattcacagggtctgcatgggttgtcctgacaaaatcatttcttgagttttgtgtttggggttgggataatcttcctcgaactctccttatgtattacacaaattttctttcatcccctgagggttacttccatacggtcatttgcaatcataaggactatcaaaacacaaccattaatcatgatttacgttacataaggtgggacaacccgccaaagcagcatccagttttcttgaaattggagcattttgatgacatggtccatagtggtgcaccttttgctcgaaagtttaccaaggatgatccagttctcaacaaaattgataaggaacttttgagaagatcagatggtcactttacaccgggaggttggtgtattggcaatcctcttttgggaaaagatccttgtgctgtttatggaaatccaattgtagttaaacctaccttacaatcaaagaagctagaaaaactaatagtgaaactattagattctgaaaattttaggccgaaacaatgtaaatagtagtcactctgcaacgtgaaatttttatacacaattctattggcatttttaatgcgtcgtctgttcaaatttaacattatgaattgttatgaaacatctttctagc

SEQ ID NO: 55051 - protein, 419 aa, Glycine max
  peptide (1)..(419): Ceres Seq. ID no. 14310420
HPKNMKRNHNFPFHHRPRKWAMVIPTVTICFLLLFLPLLPLTKPSSSSSSFSATWSSSSLNLTEELEVGVPRLAYMLTATKGEGAQLKRVLQAVYHPRNYYLLHLDLEASDAERLELAKYVKSETVLAAFGNVLVVGKPDLVTYKGPTMIASTLHGIALLLKRAPHWDWLINLSASDYPLLSQDDILHIFSFLPRDLNFIEHTSNIGWKEHQRARPIIIDPGLYHSKKSGVYWAKEKRSVPSSFKLFTGSAWVVLTKSFLEFCVWGWDNLPRTLLMYYTNFLSSPEGYFHTVICNHKDYQNTTINHDLRYIRWDNPPKQHPVFLKLEHFDDMVHSGAPFARKFTKDDPVLNKIDKELLRRSDGHFTPGGWCIGNPLLGKDPCAVYGNPIVVKPTLQSKKLEKLIVKLLDSENFRPKQCK

SEQ ID NO: 55052 - protein, 415 aa, Glycine max
  peptide (1)..(415): Ceres Seq. ID no. 14310421
MKRNHNFPFHHRPRKWAMVIPTVTICFLLLFLPLLPLTKPSSSSSSFSATWSSSSLNLTEELEVGVPRLAYMLTATKGEGAQLKRVLQAVYHPRNYYLLHLDLEASDAERLELAKYVKSETVLAAFGNVLVVGKPDLVTYKGPTMIASTLHGIALLLKRAPHWDWLINLSASDYPLLSQDDILHIFSFLPRDLNFIEHTSNIGWKEHQRARPIIIDPGLYHSKKSGVYWAKEKRSVPSSFKLFTGSAWVVLTKSFLEFCVWGWDNLPRTLLMYYTNFLSSPEGYFHTVICNHKDYQNTTINHDLRYIRWDNPPKQHPVFLKLEHFDDMVHSGAPFARKFTKDDPVLNKIDKELLRRSDGHFTPGGWCIGNPLLGKDPCAVYGNPIVVKPTLQSKKLEKLIVKLLDSENFRPKQCK

SEQ ID NO: 55053 - protein, 398 aa, Glycine max
  peptide (1)..(398): Ceres Seq. ID no. 14310422
MVIPTVTICFLLLFLPLLPLTKPSSSSSSFSATWSSSSLNLTEELEVGVPRLAYMLTATKGEGAQLKRVLQAVYHPRNYYLLHLDLEASDAERLELAKYVKSETVLAAFGNVLVVGKPDLVTYKGPTMIASTLHGIALLLKRAPHWDWLINLSASDYPLLSQDDILHIFSFLPRDLNFIEHTSNIGWKEHQRARPIIIDPGLYHSKKSGVYWAKEKRSVPSSFKLFTGSAWVVLTKSFLEFCVWGWDNLPRTLLMYYTNFLSSPEGYFHTVICNHKDYQNTTINHDLRYIRWDNPPKQHPVFLKLEHFDDMVHSGAPFARKFTKDDPVLNKIDKELLRRSDGHFTPGGWCIGNPLLGKDPCAVYGNPIVVKPTLQSKKLEKLIVKLLDSENFRPKQCK

SEQ ID NO: 55054 - DNA, 1440 bp, Glycine max
  misc_feature (1)..(1440): Ceres Seq. ID no. 13638058
aattgattgatactgcaatctcaacctgcctgaaagaaagcaagcctgtgtacataagcataagttgtaacttgcctggcattcctcaccccacattcagtcgcgagccggttccattttctctgtctccaagattgagtaacaagatggggttggaggctgcagtggaagcagcagcagagttcctaaacaaggcagtgaagcctgtaatggttggaggtcctaaactaagggtggctaatgcatgtgatgcatttgttgagcttgctgatgcatgtggctatccatttgctgtgatgccatcagccaagggactagtcccggagcacaaaccccacttcattggcacattctggggtgctgtgagcaccgcattctgtgctgaaatcgtcgaatctgctgatgcatacttgtttgctggccccattttcaatgactacagctctgttgggtactcactcctcctcaagaaggagaaggccatcatcgtgcagccggagcgcgttgtgatctccaatggacccgcattcgggtgtgtcctcatgaaggacttcctcagggaactcgcaaagcgtctcaagcacaacaacactgcttatgaaaattactcaaggatttttgtccctgagggaaagcctgtgaaagctgaacccagagagcctttgagggttaatgttctgtttaagcatatacaagatatgctgtctggcgaaaccgcggtgattgctgagacaggggactcttggtttaactgccagaagctgaagttgccaaaggggtgtgggtatgagttccaaatgcaatatggttcaattggttggtctgttggtgctacacttggttatgctcaggcggttcctgagaagcgagtgatttcttgcattggtgatggaagctttcaggtgacagctcaggatgtgtccacaatgctgcgaaatgagcagaagaccatcatcttcctgataaacaatggtggatacaccattgaagttgaaattcatgatgggccatacaatgtgattaagaactggaactacactggcttggttgatgcaatccacaatggtgaaggaaaatgctggaccactaaggttacatgtgaagaggagcttgttgaggcaattcagacagcaacaggtgacaagaaagattgcttgtgcttcattgaagtgattgttcacaaggatgacacaagcaaagaattgcttgaatggggctcaagggtttgtgctgctaacggtcgtcctcccaatcctcagtgaatttcaaacacttaattgagccattacaaatttgctggagtttctccctatttcaaacacttactcttgctgatagaaaaaagaaaatagaacaatttaatttcatgttttatttaacaaagacaataactaccatgagatttacttatatttatttttaaataaaattgagtttttt

SEQ ID NO: 55055 - protein, 419 aa, Glycine max
  peptide (1)..(419): Ceres Seq. ID no. 13638059
LIDTAISTCLKESKPVYISISCNLPGIPHPTFSREPVPFSLSPRLSNKMGLEAAVEAAAEFLNKAVKPVMVGGPKLRVANACDAFVELADACGYPFAVMPSAKGLVPEHKPHFIGTFWGAVSTAFCAEIVESADAYLFAGPIFNDYSSVGYSLLLKKEKAIIVQPERVVISNGPAFGCVLMKDFLRELAKRLKHNNTAYENYSRIFVPEGKPVKAEPREPLRVNVLFKHIQDMLSGETAVIAETGDSWFNCQKLKLPKGCGYEFQMQYGSIGWSVGATLGYAQAVPEKRVISCIGDGSFQVTAQDVSTMLRNEQKTIIFLINNGGYTIEVEIHDGPYNVIKNWNYTGLVDAIHNGEGKCWTTKVTCEEELVEAIQTATGDKKDCLCFIEVIVHKDDTSKELLEWGSRVCAANGRPPNPQ

SEQ ID NO: 55056 - protein, 371 aa, Glycine max
  peptide (1)..(371): Ceres Seq. ID no. 13638060
MGLEAAVEAAAEFLNKAVKPVMVGGPKLRVANACDAFVELADACGYPFAVMPSAKGLVPEHKPHFIGTFWGAVSTAFCAEIVESADAYLFAGPIFNDYSSVGYSLLLKKEKAIIVQPERVVISNGPAFGCVLMKDFLRELAKRLKHNNTAYENYSRIFVPEGKPVKAEPREPLRVNVLFKHIQDMLSGETAVIAETGDSWFNCQKLKLPKGCGYEFQMQYGSIGWSVGATLGYAQAVPEKRVISCIGDGSFQVTAQDVSTMLRNEQKTIIFLINNGGYTIEVEIHDGPYNVIKNWNYTGLVDAIHNGEGKCWTTKVTCEEELVEAIQTATGDKKDCLCFIEVIVHKDDTSKELLEWGSRVCAANGRPPNPQ

SEQ ID NO: 55057 - protein, 350 aa, Glycine max
  peptide (1)..(350): Ceres Seq. ID no. 13638061
MVGGPKLRVANACDAFVELADACGYPFAVMPSAKGLVPEHKPHFIGTFWGAVSTAFCAEIVESADAYLFAGPIFNDYSSVGYSLLLKKEKAIIVQPERVVISNGPAFGCVLMKDFLRELAKRLKHNNTAYENYSRIFVPEGKPVKAEPREPLRVNVLFKHIQDMLSGETAVIAETGDSWFNCQKLKLPKGCGYEFQMQYGSIGWSVGATLGYAQAVPEKRVISCIGDGSFQVTAQDVSTMLRNEQKTIIFLINNGGYTIEVEIHDGPYNVIKNWNYTGLVDAIHNGEGKCWTTKVTCEEELVEAIQTATGDKKDCLCFIEVIVHKDDTSKELLEWGSRVCAANGRPPNPQ

SEQ ID NO: 55058 - DNA, 1254 bp, Glycine max
  misc_feature (1)..(1254): Ceres Seq. ID no. 15176238
aactcccaaaaattattctgattgaatttatatttatatttatataaatggaagacacgttaacgttgtggggaaaaaagatagaagaggaaaagtcataaaaagcataagaatctgcaacaaatagtcatggctgcgcttggggaccaatcagaggaacaagccatggctgcccaacctaaacctcagaaccgacccatttctaacatcgtcatcgtcgttgctatgcagacggaggcacttcccattgttaacagattccagctcactgaggaccctgacaccccgtttccgcaaggggttccttgggtccgttatcaggggacatacaaagatcttaatataagcttgatttggccgggaaaagatccaactttgggggttgatagtgtaggcacgatatcatctgctcttgtaacgtatgctgctattcaagcattacaaccagacttgatcatcaatgcaggcactgctggtggcttcaaggccaaaggagctagtattggtgatgttttcattgtatcagattgtgcttttcacgacagaagaatacccatacctgtttttgatctgtatggagttggtttacgtaaagcctttgtagcacccaaccttgtaaaggagcttaatctaaaggtgggtaaattgtctactggtgactctttagatatgacacagcaggatgaatcgtcaatcattgcaaatgatgccacagttaaagatatggagggagcagctattgcttatgtttctgaccttctgaaagttcctgcaatatttgtaaaagctgtgactgatatcattgatggtgacaaaccaactgcagaagaattcctgcaaaatttggcagctgtaactactgcacttgatctggcagttgaacaagttattaattttattaatggaaagtgcgaatctgaactttgacaacccaatttcaccttccagagtttttttttgtatgcaatgttacacggtgggctccaattgtacactactaccattatttggttgggaatttgtgagatttaagtaaaaatacaaacttataaactgaagatattgcagccccacctcccatctctcttttgtactgttctggccctgcaggctgtataagttatctggcaaagattgtggcaatcattgtaaacatgtacgatgacatactttagtgaatcacatgtagcatatggatgattatttgtctctgaaattttccatgatgatggaatgattgagtaagttgatttc

SEQ ID NO: 55059 - protein, 265 aa, Glycine max
  peptide (1)..(265): Ceres Seq. ID no. 15176239
MAALGDQSEEQAMAAQPKPQNRPISNIVIVVAMQTEALPIVNRFQLTEDPDTPFPQGVPWVRYQGTYKDLNISLIWPGKDPTLGVDSVGTISSALVTYAAIQALQPDLIINAGTAGGFKAKGASIGDVFIVSDCAFHDRRIPIPVFDLYGVGLRKAFVAPNLVKELNLKVGKLSTGDSLDMTQQDESSIIANDATVKDMEGAAIAYVSDLLKVPAIFVKAVTDIIDGDKPTAEEFLQNLAAVTTALDLAVEQVINFINGKCESEL

SEQ ID NO: 55060 - protein, 253 aa, Glycine max
  peptide (1)..(253): Ceres Seq. ID no. 15176240
MAAQPKPQNRPISNIVIVVAMQTEALPIVNRFQLTEDPDTPFPQGVPWVRYQGTYKDLNISLIWPGKDPTLGVDSVGTISSALVTYAAIQALQPDLIINAGTAGGFKAKGASIGDVFIVSDCAFHDRRIPIPVFDLYGVGLRKAFVAPNLVKELNLKVGKLSTGDSLDMTQQDESSIIANDATVKDMEGAAIAYVSDLLKVPAIFVKAVTDIIDGDKPTAEEFLQNLAAVTTALDLAVEQVINFINGKCESEL

SEQ ID NO: 55061 - protein, 233 aa, Glycine max
  peptide (1)..(233): Ceres Seq. ID no. 15176241
MQTEALPIVNRFQLTEDPDTPFPQGVPWVRYQGTYKDLNISLIWPGKDPTLGVDSVGTISSALVTYAAIQALQPDLIINAGTAGGFKAKGASIGDVFIVSDCAFHDRRIPIPVFDLYGVGLRKAFVAPNLVKELNLKVGKLSTGDSLDMTQQDESSIIANDATVKDMEGAAIAYVSDLLKVPAIFVKAVTDIIDGDKPTAEEFLQNLAAVTTALDLAVEQVINFINGKCESEL

SEQ ID NO: 55062 - DNA, 2254 bp, Glycine max
  misc_feature (1)..(2254): Ceres Seq. ID no. 15169439
gaagatgacgcgtcgataagtaaaaaaccctagaaaccacactgatatactcttagtgtcttacacacactgtggctttggcagcgcgactcgtcttcgttccttaccctcgggttgatctgtgagaggggcttgatagccctctctctctgctgctgcaattcagattgttggcaactattttttatacagacgatttgtcttcacatggaagcattgcttgcttgagggacgcctttgtctcaaaggagttggaattttcgggttttttgtgggattggagatttagagagtgcccttgcactccctgttttatttcatcaccatgattgccactgaaactatagtaccaagtacaaaattgaagatcaagttctcaaccaaaaggatagagattgattctgggccaaaatgtgagtttggacagaaagtgtatcacaatgataaaaacaggcgctgtaattctaatgaaaattcctcagcactgaattctaacaagaggggaccaccagtaagtgttgagggccaaaaggagaaaagacaaaagattgatcggaaagggtcgatgcagtgtgctacaatacttaagagtttaatgtctcactcatatagttgggtgtttcttaagccagtggaccctgtagcattgagtattccagattattttacaatcatatctcatccaatggatttgggcacaattaaatctaagctggagagaaacatttattctggcactgaggagtttgcagatgatgtcagactgaccttctcaaatgcaatgaaatataatcctcccggtaatgatgttcatatgatggcgaaggaactcagcaaaatatttgacagaaaatggaaagactttggtaggaaatggaagtttgaagatgagcatgataaaagcgaaactgaaacaattaaggaaactgggagaaaaagtcttgatgcaatgcttccccggcataaagattccttgcccaaaaaaacacaattattcgaacacataggaatgcacaagattagatcattggcaacaaaagatgccagagtggagacacctaaattatcacagattccttgcaagttgattgagaaagacttgcacaaaggcagcaaaggtaatcatgatgtggaacagccttctggctctctaaagtcatatttttcagtacgttttgtcacatccaagtgtagaatttgtggcaatatcatatgccattgtgaaaatcctagcaattcaacacaggtgtcatcagacatatcatccgaaggatctgaaggaagggacctaattgcacgtggtgccgattcattgagacaggattgccggactaaatgtacatcacctatggagaagaaatctgatcttgattctgatggagctgtaagttctttggacagtgaacatgtttgtcctagttctcagcatgtaactcctactactgatgcctcttctggggaagtatggagcatgcctgttttgcccgtccagctttctcctaaaaaggctcttcgtgctgctatacttaaaagccgctttgcagataccattttgaaagcacagcaaaagacccttcttgatcatggtgataaaggtaatcctcaaaaaatgcagcaggaaaaggagagattggaaaggattcagcgtgaagaaagagctaggatcgaagcccaaattaaaactgctgaagctgctgcaagaatgagggctgaggaagagtcaaggcagcggagagaaaaggaaagagaagcttcacgagctgcaatagaaaagatgaaaagaaccgttgatatagaacataatatggagattattaaagaacttgaaagtttgagtggatgcacgctatcttataaggccgttggcggtagaaatggctacaaagttgcattggagacattggataaacatcagtttgagaacccattggagcggcttggtttatttatcaaggaagacttcaccacagatcttgatgaggaggttttgaacggaggctttgaagaaggggaaatttttaactgaatgcaccttcatgcagttctgccagctctaagtgtttatatcccttttagacatggaaacagacaattattgtaaatgcacatattgtttggaatcaagtctttcgactatatctgccttaattaccctcttgtctgggaattagataactacacacgcttgcaattttgttttacaatattaaagtattccttccagcaaacatataaagaaagctcttacaggcga

SEQ ID NO: 55063 - protein, 566 aa, Glycine max
  peptide (1)..(566): Ceres Seq. ID no. 15169440
MIATETIVPSTKLKIKFSTKRIEIDSGPKCEFGQKVYHNDKNRRCNSNENSSALNSNKRGPPVSVEGQKEKRQKIDRKGSMQCATILKSLMSHSYSWVFLKPVDPVALSIPDYFTIISHPMDLGTIKSKLERNIYSGTEEFADDVRLTFSNAMKYNPPGNDVHMMAKELSKIFDRKWKDFGRKWKFEDEHDKSETETIKETGRKSLDAMLPRHKDSLPKKTQLFEHIGMHKIRSLATKDARVETPKLSQIPCKLIEKDLHKGSKGNHDVEQPSGSLKSYFSVRFVTSKCRICGNIICHCENPSNSTQVSSDISSEGSEGRDLIARGADSLRQDCRTKCTSPMEKKSDLDSDGAVSSLDSEHVCPSSQHVTPTTDASSGEVWSMPVLPVQLSPKKALRAAILKSRFADTILKAQQKTLLDHGDKGNPQKMQQEKERLERIQREERARIEAQIKTAEAAARMRAEEESRQRREKEREASRAAIEKMKRTVDIEHNMEIIKELESLSGCTLSYKAVGGRNGYKVALETLDKHQFENPLERLGLFIKEDFTTDLDEEVLNGGFEEGEIFN

SEQ ID NO: 55064 - protein, 486 aa, Glycine max
  peptide (1)..(486): Ceres Seq. ID no. 15169441
MQCATILKSLMSHSYSWVFLKPVDPVALSIPDYFTIISHPMDLGTIKSKLERNIYSGTEEFADDVRLTFSNAMKYNPPGNDVHMMAKELSKIFDRKWKDFGRKWKFEDEHDKSETETIKETGRKSLDAMLPRHKDSLPKKTQLFEHIGMHKIRSLATKDARVETPKLSQIPCKLIEKDLHKGSKGNHDVEQPSGSLKSYFSVRFVTSKCRICGNIICHCENPSNSTQVSSDISSEGSEGRDLIARGADSLRQDCRTKCTSPMEKKSDLDSDGAVSSLDSEHVCPSSQHVTPTTDASSGEVWSMPVLPVQLSPKKALRAAILKSRFADTILKAQQKTLLDHGDKGNPQKMQQEKERLERIQREERARIEAQIKTAEAAARMRAEEESRQRREKEREASRAAIEKMKRTVDIEHNMEIIKELESLSGCTLSYKAVGGRNGYKVALETLDKHQFENPLERLGLFIKEDFTTDLDEEVLNGGFEEGEIFN

SEQ ID NO: 55065 - protein, 476 aa, Glycine max
  peptide (1)..(476): Ceres Seq. ID no. 15169442
MSHSYSWVFLKPVDPVALSIPDYFTIISHPMDLGTIKSKLERNIYSGTEEFADDVRLTFSNAMKYNPPGNDVHMMAKELSKIFDRKWKDFGRKWKFEDEHDKSETETIKETGRKSLDAMLPRHKDSLPKKTQLFEHIGMHKIRSLATKDARVETPKLSQIPCKLIEKDLHKGSKGNHDVEQPSGSLKSYFSVRFVTSKCRICGNIICHCENPSNSTQVSSDISSEGSEGRDLIARGADSLRQDCRTKCTSPMEKKSDLDSDGAVSSLDSEHVCPSSQHVTPTTDASSGEVWSMPVLPVQLSPKKALRAAILKSRFADTILKAQQKTLLDHGDKGNPQKMQQEKERLERIQREERARIEAQIKTAEAAARMRAEEESRQRREKEREASRAAIEKMKRTVDIEHNMEIIKELESLSGCTLSYKAVGGRNGYKVALETLDKHQFENPLERLGLFIKEDFTTDLDEEVLNGGFEEGEIFN

SEQ ID NO: 55066 - DNA, 1151 bp, Glycine max
  misc_feature (1)..(1151): Ceres Seq. ID no. 14310498
aattctgagaaaaactccaacgaacttcgcatttccacgaaaatggcttcccaaaacccagcggaggaagaaaattcaaagcgacattggtcccttgaagacttcgagatcggaaaacctctcggtaggggcaaattcggtagagtttacgtcgccagagaagttaagagcaaatttgttgtggcgttgaaggttatatttaaggaacaaattgataagtacagagttcatcaccaactgaggagagagatggagatacagaccagtctccggcacgcaaacatcctgcgtctttacggttggtttcatgatgctgaccgtgttttcttgattcttgagtatgctcataagggagagctttacaaggagctgagaaaaaagggtcatctcactgagaagcaagctgccacgtatattttgagcctcacaaaggcgttggcatattgtcatgagaaacatgttattcatagggatatcaagccagaaaatttgttgcttgaccatgaggggcgtcttaaaattgcagactttggttggtctgttcagtctagaagcaaaagacataccatgtgtggaacattggattatttagcaccagaaatggttgaaaacaaagctcatgactatgcagttgacaactggactttgggtatcctttgttatgagttcctctatggtgctcctccatttgaggctgagagtcaatctgataccttcaaaaggataatgaaggttgatctaagcttcccttccaccccttctgtctctatagaggcgaaaaatctgattagtcggctcctggtgaaagactcctcacgaaggctctctcttcagaagataatggagcatccttggataatcaagaatgcagattttgtgggtatttgctagtagcatcaactcactaatttaactttggccacgagggattaagactgaattctgtatatgatgttataaaatgcatgtaagtgttttgcagtgttcaagtgtttaatcaacttgaatgacacattacctttgctgcgaggttaggaacattaggatggtatatctgcctatttgtaatagttgtattgtaggtgtaatttcttccagttctttgtgcatctaaaccaggcatgactaatgacttgcacagatttattttg

SEQ ID NO: 55067 - protein, 296 aa, Glycine max
  peptide (1)..(296): Ceres Seq. ID no. 14310499
NSEKNSNELRISTKMASQNPAEEENSKRHWSLEDFEIGKPLGRGKFGRVYVAREVKSKFVVALKVIFKEQIDKYRVHHQLRREMEIQTSLRHANILRLYGWFHDADRVFLILEYAHKGELYKELRKKGHLTEKQAATYILSLTKALAYCHEKHVIHRDIKPENLLLDHEGRLKIADFGWSVQSRSKRHTMCGTLDYLAPEMVENKAHDYAVDNWTLGILCYEFLYGAPPFEAESQSDTFKRIMKVDLSFPSTPSVSIEAKNLISRLLVKDSSRRLSLQKIMEHPWIIKNADFVGIC

SEQ ID NO: 55068 - protein, 282 aa, Glycine max
  peptide (1)..(282): Ceres Seq. ID no. 14310500
MASQNPAEEENSKRHWSLEDFEIGKPLGRGKFGRVYVAREVKSKFVVALKVIFKEQIDKYRVHHQLRREMEIQTSLRHANILRLYGWFHDADRVFLILEYAHKGELYKELRKKGHLTEKQAATYILSLTKALAYCHEKHVIHRDIKPENLLLDHEGRLKIADFGWSVQSRSKRHTMCGTLDYLAPEMVENKAHDYAVDNWTLGILCYEFLYGAPPFEAESQSDTFKRIMKVDLSFPSTPSVSIEAKNLISRLLVKDSSRRLSLQKIMEHPWIIKNADFVGIC

SEQ ID NO: 55069 - protein, 213 aa, Glycine max
  peptide (1)..(213): Ceres Seq. ID no. 14310501
MEIQTSLRHANILRLYGWFHDADRVFLILEYAHKGELYKELRKKGHLTEKQAATYILSLTKALAYCHEKHVIHRDIKPENLLLDHEGRLKIADFGWSVQSRSKRHTMCGTLDYLAPEMVENKAHDYAVDNWTLGILCYEFLYGAPPFEAESQSDTFKRIMKVDLSFPSTPSVSIEAKNLISRLLVKDSSRRLSLQKIMEHPWIIKNADFVGIC

SEQ ID NO: 55070 - DNA, 1353 bp, Glycine max
  misc_feature (1)..(1353): Ceres Seq. ID no. 14312391
aaggtctggacagtggcgtggaaggcgaatcagccactggcactgaacaattaaccattaacaagaacaagaacatttcaagggaggacatagtaatggacatggttctgcattcagccttgtacccaccatctctgtcttgttcctcttctactactggaacaagatggcccaattcccgggttggtgttagtttgagttggaggagcttgtccttggtgccttgtgcactgaaggcatattatgattctgaattggagaataaaaagcatctacttctgacctctgtccaagacacgcaaaggggcctcttaacaactcctgatcaacgctcttgtatcgaggaggctctggtgagtctcgaaggatgcaacattggctctcaccctatcaatctctccaacttggatggaacatggcgcctccagtacacttctgcctctgatgttctcattcttctccaagctgctgctactcttcctttctttcaagttggacagatctttcaaaaatttgaatgtcgtgatcaatctaatggaggtgttatccgcaatgttgttcgatggagcattccaaatttgttagaggaacaagaaggtgctacactgcttgtatccgccaagtttaatgtagtatctgtccgtaatatctaccttcagtttcaagagatcacaatccaagatataaatattagtgaagagctgcaggctctaatagctccagcaatactaccaagatcttttataagtcttcagattttgcaatttctccgcactttcaaagcttaaatccctgtgagggatccaggaaggcaatcagttggaggactatattaccttagctatttggatgataatatgcttttgggtcgtgctgttggtggaggaggggtatttgtgtttacgagagcccaatctctctactgatgagcaccgagcaggagttaaaacttgtgtttgccagcaataacactcaatgagcctctgtttatagaagtgaccccatggagagagcaagaaattgattcaaagcatatagcgcataaggaattctgcaaagcttattgaagaaggctattatgtgcagttgtcgtgttgactttagtcgaactgcttttttgtttatgtatgtatatttgcattgtttgtatcaatttggttatatattggcaaagtacgaagatggtgagtgttcaatgtaagtgatacaactcgtgggaaaatgataaggagcccagtcctcgctatgtgcagtgtaggcatcttataattatgttatgttgcataggatagatagtattatgtctcttgttagttttcttatctagttagtttaatctgtgatttttaactt

SEQ ID NO: 55071 - protein, 261 aa, Glycine max
  peptide (1)..(261): Ceres Seq. ID no. 14312392
GLDSGVEGESATGTEQLTINKNKNISREDIVMDMVLHSALYPPSLSCSSSTTGTRWPNSRVGVSLSWRSLSLVPCALKAYYDSELENKKHLLLTSVQDTQRGLLTTPDQRSCIEEALVSLEGCNIGSHPINLSNLDGTWRLQYTSASDVLILLQAAATLPFFQVGQIFQKFECRDQSNGGVIRNVVRWSIPNLLEEQEGATLLVSAKFNVVSVRNIYLQFQEITIQDINISEELQALIAPAILPRSFISLQILQFLRTFKA

SEQ ID NO: 55072 - protein, 230 aa, Glycine max
  peptide (1)..(230): Ceres Seq. ID no. 14312393
MDMVLHSALYPPSLSCSSSTTGTRWPNSRVGVSLSWRSLSLVPCALKAYYDSELENKKHLLLTSVQDTQRGLLTTPDQRSCIEEALVSLEGCNIGSHPINLSNLDGTWRLQYTSASDVLILLQAAATLPFFQVGQIFQKFECRDQSNGGVIRNVVRWSIPNLLEEQEGATLLVSAKFNVVSVRNIYLQFQEITIQDINISEELQALIAPAILPRSFISLQILQFLRTFKA

SEQ ID NO: 55073 - protein, 228 aa, Glycine max
  peptide (1)..(228): Ceres Seq. ID no. 14312394
MVLHSALYPPSLSCSSSTTGTRWPNSRVGVSLSWRSLSLVPCALKAYYDSELENKKHLLLTSVQDTQRGLLTTPDQRSCIEEALVSLEGCNIGSHPINLSNLDGTWRLQYTSASDVLILLQAAATLPFFQVGQIFQKFECRDQSNGGVIRNVVRWSIPNLLEEQEGATLLVSAKFNVVSVRNIYLQFQEITIQDINISEELQALIAPAILPRSFISLQILQFLRTFKA

SEQ ID NO: 55074 - DNA, 580 bp, Glycine max
  misc_feature (1)..(580): Ceres Seq. ID no. 15169825
aacattctttccatattaactagttaacatcatggctcatggcttgagttatattttacttttcaactaacatgttaatgttcttgaagatgtttgttatactttgtttgatgcaggatgtgatggatgacccttgtgttgctgctgatggatatacatatgatcgcaaagcaattgaaaagtggcttgaagagaacgacaaatcaccaatgacgaacatggctttacctcataagcatttaattcctaattacacactgctctcagcaattttggagtggaagtccagagaatcgtgatatcagcattatctttctccatgttaatattgagaccaatgatttctctgatgtagagagtggctagaaagtttggtgggtatgacctttagcagtgtcttggatgcagatttttttcgtagttgtaccattccaagcatgctgtctggttaatttaggtagagcgatttcaagtgtagataaatttgattctattgtctgattctgtgtatacatacatatgtcaaatcttgttcttactataaataaaataagaaccatgtatacattcaaggctagct

SEQ ID NO: 55075 - protein, 75 aa, Glycine max
  peptide (1)..(75): Ceres Seq. ID no. 15169826
MLMFLKMFVILCLMQDVMDDPCVAADGYTYDRKAIEKWLEENDKSPMTNMALPHKHLIPNYTLLSAILEWKSRES

SEQ ID NO: 55076 - protein, 73 aa, Glycine max
  peptide (1)..(73): Ceres Seq. ID no. 15169827
MFLKMFVILCLMQDVMDDPCVAADGYTYDRKAIEKWLEENDKSPMTNMALPHKHLIPNYTLLSAILEWKSRES

SEQ ID NO: 55077 - protein, 69 aa, Glycine max
  peptide (1)..(69): Ceres Seq. ID no. 15169828
MFVILCLMQDVMDDPCVAADGYTYDRKAIEKWLEENDKSPMTNMALPHKHLIPNYTLLSAILEWKSRES

SEQ ID NO: 55078 - DNA, 1255 bp, Glycine max
  misc_feature (1)..(1255): Ceres Seq. ID no. 12581768
cagctacgtaggcccccccccccgaatatcagagcattagtaaatctaattaatataagttcaagcaaaccacatatgaccgaaaagaagcctgttcatattctaataagctcaacattagctacaattgttgttactgctttaaccaaccctctcgatgtgttgaaggtgagaattcaaaataacgataagaattgcagcactatcaaccacactcattgcgtgactcgatcaagttctcactctgctcccaattccttacgacaagcttccttatatcgtcttgtaatgacaccgaaccttcaagaacattatcaagtcttgtgtgattgcctcccctttagatcaaacgcaaaagcccttgtttacttgactcgtaaagagggatacagagtacttaccaacggattggctcaaggtttgatgggttctgtactgagcaccgtaacttacttttactgctacgaggctgcaagaaagcgtgtgaagcaatatacttcacacaatattggtcttccattgttgacagctctgacagccagaaccatcacgacatgtatcgctttcccatttgaatattggaagaccttgcaacaaagttcggttggtgtgagtggaaagtcttcaatgaaactcggaacaaaaataaatgcaggattcggtactttgctcggaagagacttgatgttttctgggctttattgggtgttggtggaaaatatcagaagacatgtgaagagctggagccaacaaaatgaagagggatatcaagataaaggaagtctattgctttctaatgtgattgccggtggtttggcaggaggaatatcagcatccgtgacattacccttggatgtggtaaaaacaagaaaacaattgaatccaaaagaatataagaagaaatccacaattcgaattctcaaggatatctattataatgaaggaaaggatgctttgacagcaggtatgagacaaagagtgaccaaggttactatggcatgtgcaggcatcttgacattatatgagctcttctctgacatgttgagagaagacaatgtttactgagtggagtagttaggtttgcttgattgattttttaaattaaatattttggctgatttcgtacatttttattgtaattttagctagtgctcttcctttcgaataatgtctttttatctctttgtttatttatctatccctgtataaagataattaaatatcgtattgtataaccatatcatgaaaattattg

SEQ ID NO: 55079 - protein, 354 aa, Glycine max
  peptide (1)..(354): Ceres Seq. ID no. 12581769
QLRRPPPPNIRALVNLINISSSKPHMTEKKPVHILISSTLATIVVTALTNPLDVLKVRIQNNDKNCSTINHTHCVTRSSSHSAPNSLRQASLYRLVMTPNLQEHYQVLCDCLPFRSNAKALVYLTRKEGYRVLTNGLAQGLMGSVLSTVTYFYCYEAARKRVKQYTSHNIGLPLLTALTARTITTCIAFPFEYWKTLQQSSVGVSGKSSMKLGTKINAGFGTLLGRDLMFSGLYWVLVENIRRHVKSWSQQNEEGYQDKGSLLLSNVIAGGLAGGISASVTLPLDVVKTRKQLNPKEYKKKSTIRILKDIYYNEGKDALTAGMRQRVTKVTMACAGILTLYELFSDMLREDNVY

SEQ ID NO: 55080 - protein, 329 aa, Glycine max
  peptide (1)..(329): Ceres Seq. ID no. 12581770
MTEKKPVHILISSTLATIVVTALTNPLDVLKVRIQNNDKNCSTINHTHCVTRSSSHSAPNSLRQASLYRLVMTPNLQEHYQVLCDCLPFRSNAKALVYLTRKEGYRVLTNGLAQGLMGSVLSTVTYFYCYEAARKRVKQYTSHNIGLPLLTALTARTITTCIAFPFEYWKTLQQSSVGVSGKSSMKLGTKINAGFGTLLGRDLMFSGLYWVLVENIRRHVKSWSQQNEEGYQDKGSLLLSNVIAGGLAGGISASVTLPLDVVKTRKQLNPKEYKKKSTIRILKDIYYNEGKDALTAGMRQRVTKVTMACAGILTLYELFSDMLREDNVY

SEQ ID NO: 55081 - protein, 258 aa, Glycine max
  peptide (1)..(258): Ceres Seq. ID no. 12581771
MTPNLQEHYQVLCDCLPFRSNAKALVYLTRKEGYRVLTNGLAQGLMGSVLSTVTYFYCYEAARKRVKQYTSHNIGLPLLTALTARTITTCIAFPFEYWKTLQQSSVGVSGKSSMKLGTKINAGFGTLLGRDLMFSGLYWVLVENIRRHVKSWSQQNEEGYQDKGSLLLSNVIAGGLAGGISASVTLPLDVVKTRKQLNPKEYKKKSTIRILKDIYYNEGKDALTAGMRQRVTKVTMACAGILTLYELFSDMLREDNVY

SEQ ID NO: 55082 - DNA, 1295 bp, Glycine max
  misc_feature (1)..(1295): Ceres Seq. ID no. 14308401
atgtgtggcaggctccttccactgcgcaccatttggtggcatgatatagataacagctagtaattaggaagttggcgttacaagaacaagaacaaaaccccactcactcaatgcacataataatacaataatttcttagggagtgaatggcgaacttgccccaatccatctccacaagcggcgcgacgtcgtttggagcttcttctgccaccgccaaggatcgcagcaggatagcgtctgtggaacacctcgttctccaactcaacaaccccgatctccgagaaaacgctctccatgaactctccaagaagagagagttatttcaggatcttgctccattattgtggaattcttttggtaccatgtcagcacttttacaggaaatagtttcaatattccctgttatttcacctccaaaccttactccagcacaatcaactcgagtgtgcaatgctcttgctctttttcagtgtgtggcatctcaccttgatacaaggatgcaattcctccatgctcatatacctctatatctgtatcccttccttaatacaaccagtaagtccagaccatttgagtatttgaggcttaccagtcttggagtcattggtgccttagtgaaggttgatgatacaaaagttataagtttccttctttcaacagagattattccgttgtgcctgcgcagtatggaaatgggcagtgaattgtcaaaaactgttgcaacctttatagttcaaaaaattctgttggacgaaattggtttgaaatatatttgtactacagcagagcgcttttatgcagtagctcaagttttgggaaacatggtggaaactcttgttgagcaaccttcaagtcgtcttttgaagcacattattcgttgttatcttcgtctgtcagataatcagagtgcttgcaaggcattaagaacctgtcttccagacatgttaagagatgctacattcagtaattgccttcgtgaagacccaacagctaggatgtggctacagcagttgcttcataatattggagacaatcgggttcctgcactacaaggtggaggaggattcgatcgtatgatggggtcgtgagaacaaagacttgctactttgtgaaaattatcaactagctacatacataaaataggattttcagttgggcatgtattgagaatgaagaattgaatgggaagggaactatctttccgtaagatgttaagagtgaagtatacatgagaatagtgacctcttaattgaatacaaatattaaaatcataatgagccatatattttaaactg

SEQ ID NO: 55083 - protein, 313 aa, Glycine max
  peptide (1)..(313): Ceres Seq. ID no. 14308402
MANLPQSISTSGATSFGASSATAKDRSRIASVEHLVLQLNNPDLRENALHELSKKRELFQDLAPLLWNSFGTMSALLQEIVSIFPVISPPNLTPAQSTRVCNALALFQCVASHLDTRMQFLHAHIPLYLYPFLNTTSKSRPFEYLRLTSLGVIGALVKVDDTKVISFLLSTEIIPLCLRSMEMGSELSKTVATFIVQKILLDEIGLKYICTTAERFYAVAQVLGNMVETLVEQPSSRLLKHIIRCYLRLSDNQSACKALRTCLPDMLRDATFSNCLREDPTARMWLQQLLHNIGDNRVPALQGGGGFDRMMGS

SEQ ID NO: 55084 - protein, 241 aa, Glycine max
  peptide (1)..(241): Ceres Seq. ID no. 14308403
MSALLQEIVSIFPVISPPNLTPAQSTRVCNALALFQCVASHLDTRMQFLHAHIPLYLYPFLNTTSKSRPFEYLRLTSLGVIGALVKVDDTKVISFLLSTEIIPLCLRSMEMGSELSKTVATFIVQKILLDEIGLKYICTTAERFYAVAQVLGNMVETLVEQPSSRLLKHIIRCYLRLSDNQSACKALRTCLPDMLRDATFSNCLREDPTARMWLQQLLHNIGDNRVPALQGGGGFDRMMGS

SEQ ID NO: 55085 - protein, 196 aa, Glycine max
  peptide (1)..(196): Ceres Seq. ID no. 14308404
MQFLHAHIPLYLYPFLNTTSKSRPFEYLRLTSLGVIGALVKVDDTKVISFLLSTEIIPLCLRSMEMGSELSKTVATFIVQKILLDEIGLKYICTTAERFYAVAQVLGNMVETLVEQPSSRLLKHIIRCYLRLSDNQSACKALRTCLPDMLRDATFSNCLREDPTARMWLQQLLHNIGDNRVPALQGGGGFDRMMGS

SEQ ID NO: 55086 - DNA, 1202 bp, Glycine max
  misc_feature (1)..(1202): Ceres Seq. ID no. 15176487
gaacaaaaggagtagataaggaactcttgtgaagtctatacttgtcttagcattgttttcactcttgtttcttcatctgaatcaagtaagaagagcatggaggtggatttcaagtctccttcccttgaaaaaacagaagctgagcctcaagtagaagaaaacatgcgctttcacaagtctcttcaggttcatatataactatatatgcacatgtactctgttgtataatatttgtatgtaatctatttctttctgttgttctagtattcttctacagtttttctatgaagttctgtgttttggttatggtggttttaggagctaagagaatcgcagtctcagttgcaccatgctgcagattattgtgaaacaactttcttgaaaagtgaagctaagagagatgtgttggaaaatacaaaagaatacatatgcagggccatggttactgttgttgatcatcttgggaacgtctcggctaatcttgatgaccttatttctcaaacaaatgcattttctgaggctgagtctagaatccggtgcctcaaacaaagacttttctcatgtgaacaatatgctgataagcttgcgctcacaaaaatgagatggagggagaaagtgccaagactccatacacgatatttatcatcaccacccatccttgagagatcaagcagcgagaaattaagagattctaaaactgaagatacctcaaaattagatgataaacacatactagaaaagcatgaggatttgccactctttttgtacacccaaaagccacatggagataagaatttgaagccaaccagctttactacattgaaggagcataatttgaccatggtggtaccgattcgggatggtttgtcagtcttaacaaaagtttcaaatcctacatttcatttccaaggttccccgaaggttgcacgccatagaagatccttgcatggcagtgacatcttatggttcatacggcgtacaaaaagaatccaataaaaaacaatgttgcctattgcttcatgtgctattagccttaagtactcatggtggtggtctatcattttcatgtggcagttcaatgttagttgtttgattcaggaaccaaacattatttacaaatatttatattttgaggcactttgaagtagttatttatgtaattttggtaggaaacgtcatcatggttataatgatttagattt

SEQ ID NO: 55087 - protein, 185 aa, Glycine max
  peptide (1)..(185): Ceres Seq. ID no. 15176488
MVTVVDHLGNVSANLDDLISQTNAFSEAESRIRCLKQRLFSCEQYADKLALTKMRWREKVPRLHTRYLSSPPILERSSSEKLRDSKTEDTSKLDDKHILEKHEDLPLFLYTQKPHGDKNLKPTSFTTLKEHNLTMVVPIRDGLSVLTKVSNPTFHFQGSPKVARHRRSLHGSDILWFIRRTKRIQ

SEQ ID NO: 55088 - protein, 132 aa, Glycine max
  peptide (1)..(132): Ceres Seq. ID no. 15176489
MRWREKVPRLHTRYLSSPPILERSSSEKLRDSKTEDTSKLDDKHILEKHEDLPLFLYTQKPHGDKNLKPTSFTTLKEHNLTMVVPIRDGLSVLTKVSNPTFHFQGSPKVARHRRSLHGSDILWFIRRTKRIQ

SEQ ID NO: 55089 - DNA, 1555 bp, Glycine max
  misc_feature (1)..(1555): Ceres Seq. ID no. 15225530
actcctttcccccctcccgttcccaacttttcttgtgtttaaacagcgaaytgggtaccggcccccccctcgagtcagctacgtaggccccccccccactgtctgcctttgttgtcatctttcttggtgctttatttgattgaaagagttctgggaattattatgcattgtggaaaccttcatgctgagaatgcttttacaggaagctccagtgcttgggaagccaacaatttttaccagtgatagtgtgggtgaaaagatccagtgggctcaatgtgaagattgtttcaagtggcgcaaattgccagcaagtgcgcttcttccatcaaaatggacgtgttctgataattcatgggatccagaaagattttcttgttcagctgcgcaagagctgacagcagagcaacttgagaatttgctacctccttgtaattcagctgttcccaagaaaatgaaggccaccaaacaggatcccgataatgctgaagctttggagggacttgacacccttgcaaatctakctatcctgggagagggtgaggcactcccagcatccgcccaggccacaactaagcatccacgccatagacctggctgctcttgcattgtttgcattcagcctcccagtggaaagggccccaagcataagcagacatgcacatgtaatgtatgcttaacagtgaagcgacgattccgtacccttatgttacggcgtgagaagaaacaatcagaaaaagaagcagagacaactcgtaaaaagcaacagcaacaacatcctctaccattaccttcatctgaaattttgcttgatgaagattccttgccctgtagtaacacaggtgatagtagcccaaaccagaaccaaaagagggtaatgatggttctgatgatgatcctagccgaataaaatcatctgcttcgccgttcaaaggcaaaattgacctcaatatccmaccagagcgagaagaagaattatcacctggttcggattctggcggcatgatgaagttgctccatgatgctactgagcgatatctcaaacagcagactgktgaactctggtactggagattcatcaggcagtcagtcacagctggtaggagatgcaatgagggaagataaacttagcaatggtgttgcccatggcagtagtagtcataatactgataaggaacatgcccaatctttgcctatgaatgtgtgaaaatcatattggcgctagccataattgatacgttcttgcaaagctatattgaagtggggaaagattttgctgtacattttatccacttcggcttcttgctttttcttgtttgtacataaagaggagtaggaaaaaatggtgagaaaccaatatattccggtaatataagtgggcatcatagtggtttgtgtaggaaaactatgaaatgcagctgaatgggtagtaggttgaagctgtttagtttctttgagagctcaccgtgccacctgatttcaacaacgttgaaaatgtaactatgcctaatttgttctcccaatttattcttagcctgtaagatgtttatactttctt

SEQ ID NO: 55090 - protein, 241 aa, Glycine max
  peptide (1)..(241): Ceres Seq. ID no. 15225531
  misc_feature (114)..(114): Xaa is any aa, unknown or other
MLRMLLQEAPVLGKPTIFTSDSVGEKIQWAQCEDCFKWRKLPASALLPSKWTCSDNSWDPERFSCSAAQELTAEQLENLLPPCNSAVPKKMKATKQDPDNAEALEGLDTLANLXILGEGEALPASAQATTKHPRHRPGCSCIVCIQPPSGKGPKHKQTCTCNVCLTVKRRFRTLMLRREKKQSEKEAETTRKKQQQQHPLPLPSSEILLDEDSLPCSNTGDSSPNQNQKRVMMVLMMILAE

SEQ ID NO: 55091 - protein, 238 aa, Glycine max
  peptide (1)..(238): Ceres Seq. ID no. 15225532
  misc_feature (111)..(111): Xaa is any aa, unknown or other
MLLQEAPVLGKPTIFTSDSVGEKIQWAQCEDCFKWRKLPASALLPSKWTCSDNSWDPERFSCSAAQELTAEQLENLLPPCNSAVPKKMKATKQDPDNAEALEGLDTLANLXILGEGEALPASAQATTKHPRHRPGCSCIVCIQPPSGKGPKHKQTCTCNVCLTVKRRFRTLMLRREKKQSEKEAETTRKKQQQQHPLPLPSSEILLDEDSLPCSNTGDSSPNQNQKRVMMVLMMILAE

SEQ ID NO: 55092 - protein, 151 aa, Glycine max
  peptide (1)..(151): Ceres Seq. ID no. 15225533
  misc_feature (24)..(24): Xaa is any aa, unknown or other
MKATKQDPDNAEALEGLDTLANLXILGEGEALPASAQATTKHPRHRPGCSCIVCIQPPSGKGPKHKQTCTCNVCLTVKRRFRTLMLRREKKQSEKEAETTRKKQQQQHPLPLPSSEILLDEDSLPCSNTGDSSPNQNQKRVMMVLMMILAE

SEQ ID NO: 55093 - DNA, 2086 bp, Glycine max
  misc_feature (1)..(2086): Ceres Seq. ID no. 15169400
gtccctttgcagcagtcaaagaaatcagaacctgagaagccaaattatagtgaagccaacaagggtgaaccagctcatgaaacatttatgcaacaaacaaagggtaaggataaacaatctgcaactgctactgcagaaacagatgataatcaagaagttagtggcctacctactaatattccaggaagcaacactaaaacagttatcaaaaatgagttaaaggcagtcagttctgttgccacacagaatactgaattaccttcagcgagagcttggaaacctgctcctggtttcaaggcaaaatctctcttagaaattcaactggaagaacaaaaaaagtcactgacagaaaagcttgtatctgaggttgctactcctgtcaattccatgagctcaacaactccctgggttggagttgtcgccaatccagactctatgaaggtgtcaaatgatggccacagagaagcagaaaatactgaatatctggctaaagctgaaaaatctcaaaatagtaaaagcaagaaaagcccattacatgatctattggcagaagatcttgtaccaaaatctagtgaaagagatggcaaggttcctgacagtatgctcccctcacaaaatatagctgttcactcaaaactggtagatgatggagactttattgaagctaaagacactaaaagaagccggaaaaaatctgcaaagttgaagagttcaggagctaaggtttcaatgccagttgcctctagtgaagtacccataagcccaattcacattgaaaaggtaaaaagctcccgttctgttcagcaggagaaagaacaactgccttccattccttcaggaccctctttgggagattttgttctttggaaaggagagccaacaagcccatctcctcctccagcatggactactgattctgctaggattcctaaaccaacatcattaagggacattctaaaggagcaggagaagaagtcctctgcagtactcccaaatcaactgcctactcctcaaaaatcacaaactgcccaagctgcacggagtagtggttcttcacgcccaatttcagcttcatctccatcaaaaactgcaccttctagccagataaactcccaagcttctctgtcaaaatacagaggggatgatgatatgttttggggtccagtcgagcaatccaagcaagaaaataagcagtcaaatttccctcaacttgctaggcaggggagctggggttctaaaagtgttcccatgaaaggtaattcacctggatcattgagtcgacaaaaatctgggagtggcaaaccaactgagcaatctctatcatcatcacctgcctcttctcaatcactgctaaaactgaaaaaagatgcaatgaccaagaattctgaagccatggacttcagagtttggtgtgagaatgaatgtgcgaggctcattgggacaaaagatacaagtttccttgagttttgcttgaagcagacaagatctgaagcagagatatttctcacagaaaacctgggattatatgaccatgatcatgaattcattgataaattcctcaattacatggacctactaccatcagatgttttggaaatagcttttcaaaccgtgaatgatcggaaagttgatgcaaatacagatgtactagagctaggttacactgatggatccttttcaaaagttggaaagaagaaaggcggcaacaaaggaaaaaaggtaagctcttcagttttgggattcaatgtcgtgagtaacaggatcatgatgggtgagatccagacagtagaagactaacataacataggttattgcggaacgtgtaaatattttttggccatacgtgtattttgtaaatgtattttctgttattcatttaactttttttggcttttttaacagtagcagcatcaattgtatctgctcaatcagttttgttgtcttaaatgtattttgacgtttgatcacgctgacaaacataatattgtgtcagccttaacttgattcaattaatttgctgtttatcttttgtaagcaagctaattgattcgtaggcagagtctgtagcttgtaaagcccgttttgg

SEQ ID NO: 55094 - protein, 598 aa, Glycine max
  peptide (1)..(598): Ceres Seq. ID no. 15169401
VPLQQSKKSEPEKPNYSEANKGEPAHETFMQQTKGKDKQSATATAETDDNQEVSGLPTNIPGSNTKTVIKNELKAVSSVATQNTELPSARAWKPAPGFKAKSLLEIQLEEQKKSLTEKLVSEVATPVNSMSSTTPWVGVVANPDSMKVSNDGHREAENTEYLAKAEKSQNSKSKKSPLHDLLAEDLVPKSSERDGKVPDSMLPSQNIAVHSKLVDDGDFIEAKDTKRSRKKSAKLKSSGAKVSMPVASSEVPISPIHIEKVKSSRSVQQEKEQLPSIPSGPSLGDFVLWKGEPTSPSPPPAWTTDSARIPKPTSLRDILKEQEKKSSAVLPNQLPTPQKSQTAQAARSSGSSRPISASSPSKTAPSSQINSQASLSKYRGDDDMFWGPVEQSKQENKQSNFPQLARQGSWGSKSVPMKGNSPGSLSRQKSGSGKPTEQSLSSSPASSQSLLKLKKDAMTKNSEAMDFRVWCENECARLIGTKDTSFLEFCLKQTRSEAEIFLTENLGLYDHDHEFIDKFLNYMDLLPSDVLEIAFQTVNDRKVDANTDVLELGYTDGSFSKVGKKKGGNKGKKVSSSVLGFNVVSNRIMMGEIQTVED

SEQ ID NO: 55095 - protein, 569 aa, Glycine max
  peptide (1)..(569): Ceres Seq. ID no. 15169402
MQQTKGKDKQSATATAETDDNQEVSGLPTNIPGSNTKTVIKNELKAVSSVATQNTELPSARAWKPAPGFKAKSLLEIQLEEQKKSLTEKLVSEVATPVNSMSSTTPWVGVVANPDSMKVSNDGHREAENTEYLAKAEKSQNSKSKKSPLHDLLAEDLVPKSSERDGKVPDSMLPSQNIAVHSKLVDDGDFIEAKDTKRSRKKSAKLKSSGAKVSMPVASSEVPISPIHIEKVKSSRSVQQEKEQLPSIPSGPSLGDFVLWKGEPTSPSPPPAWTTDSARIPKPTSLRDILKEQEKKSSAVLPNQLPTPQKSQTAQAARSSGSSRPISASSPSKTAPSSQINSQASLSKYRGDDDMFWGPVEQSKQENKQSNFPQLARQGSWGSKSVPMKGNSPGSLSRQKSGSGKPTEQSLSSSPASSQSLLKLKKDAMTKNSEAMDFRVWCENECARLIGTKDTSFLEFCLKQTRSEAEIFLTENLGLYDHDHEFIDKFLNYMDLLPSDVLEIAFQTVNDRKVDANTDVLELGYTDGSFSKVGKKKGGNKGKKVSSSVLGFNVVSNRIMMGEIQTVED

SEQ ID NO: 55096 - protein, 469 aa, Glycine max
  peptide (1)..(469): Ceres Seq. ID no. 15169403
MSSTTPWVGVVANPDSMKVSNDGHREAENTEYLAKAEKSQNSKSKKSPLHDLLAEDLVPKSSERDGKVPDSMLPSQNIAVHSKLVDDGDFIEAKDTKRSRKKSAKLKSSGAKVSMPVASSEVPISPIHIEKVKSSRSVQQEKEQLPSIPSGPSLGDFVLWKGEPTSPSPPPAWTTDSARIPKPTSLRDILKEQEKKSSAVLPNQLPTPQKSQTAQAARSSGSSRPISASSPSKTAPSSQINSQASLSKYRGDDDMFWGPVEQSKQENKQSNFPQLARQGSWGSKSVPMKGNSPGSLSRQKSGSGKPTEQSLSSSPASSQSLLKLKKDAMTKNSEAMDFRVWCENECARLIGTKDTSFLEFCLKQTRSEAEIFLTENLGLYDHDHEFIDKFLNYMDLLPSDVLEIAFQTVNDRKVDANTDVLELGYTDGSFSKVGKKKGGNKGKKVSSSVLGFNVVSNRIMMGEIQTVED

SEQ ID NO: 55097 - DNA, 1758 bp, Glycine max
  misc_feature (1)..(1758): Ceres Seq. ID no. 14308359
gcgaccaacttttcctgactcatccacaccactgcttccctttcttccatcacttttcttcctcataacttgcattttctccaaaaaccaaagaaagaaagaaacacacacacacacacctctctctctctctcactcacacatggcagctttttcataccaataccatccttttcttgttgaccctgcattcttccccaacaacttaaacaccccttcccctcctcctcatcagtttcaacaactccctcatgaaacatcatcttttaatgtcacaaaccaggagactagctgtgttgatcagagctccaagatcaccatcagtgacaatgagccttctgtcactgaaaaccttagccctcagtcctccatggtagtggacaagcttgaaactggggagcaggtcactcagaaggtgaacactcctgtggagaagaaaaggaaaaccagaaatggatcttccttgactagtaacccccaatccaaggatgctgcaacagaaaggaaaaacaagaaacaaaggaagggcaatggtgggttgaaagaagaggacaaggcaaaagaagagaagaaggaacagagaaagtgtcccgaagagcctccaacaggctatatccatgtcagagcaagaaggggtcaggcaacggatagccacagccttgctgaaagggtgagaagagagaagataagtgaaaggatgaaggtgttgcaacggcttgtgccaggctgtgacaaggtgactggaaaggcccttatgttggacgaaataatcaattatgttcagtctctacagaatcaagttgagttcttgtcaatgaagcttgcttcagtgaatcccatgttttatgacttggcaacggatctagacaccctcttggttagaccagagaaactaaatagcatggcatcaccatcaccaccactaccatctgtgtcacattgcaacagccctaacaaccaagccactacttttgctgatacaaccaccatgacccccaccaacatcttccacattgctagtgactatcttttggataattcagtctcattttttcttcaagggcagaggtcaaatgtgttctctgaggaggatactggtagtcatttctgggacgcagaggaccagcggcaaaagtttcttcatccatgtggattcagcaacaacttatgttcctttcattaatataaaattcatagagctgccctacaaaactacgaacatgttgatttagcttttacactagctaggtaaggaaattccaaagaggcatgagaatgagccaacaagaagttaggcattaggaggaaaaaccaaagctacgcttggtatcggtatataagtacatcatcattccagggtaattcgtagcgtaaagagtctggcttggttcctagtccatcagattaaagtggcctttgaagatgaataattaaggggcaccaaaattaatggatgaagaaccaaaaggacagaaaataccgaccaaataagaccatatctttttctagatccattgttctgtttcagtgattgttgactctccaaggacttatgatgcacaaattccgagagactatcaatcctatatacagagcagacattgaaattaatttctgttccatgtaaattatatccaagtattgattcttgtggtggcagttattctgttggtacagttaatttcaccattattgagaaatgaggggttgatgcaactgatcatgttcttgacatgactggccatgcatttgtttgtt

SEQ ID NO: 55098 - protein, 393 aa, Glycine max
  peptide (1)..(393): Ceres Seq. ID no. 14308360
RPTFPDSSTPLLPFLPSLFFLITCIFSKNQRKKETHTHTPLSLSHSHMAAFSYQYHPFLVDPAFFPNNLNTPSPPPHQFQQLPHETSSFNVTNQETSCVDQSSKITISDNEPSVTENLSPQSSMVVDKLETGEQVTQKVNTPVEKKRKTRNGSSLTSNPQSKDAATERKNKKQRKGNGGLKEEDKAKEEKKEQRKCPEEPPTGYIHVRARRGQATDSHSLAERVRREKISERMKVLQRLVPGCDKVTGKALMLDEIINYVQSLQNQVEFLSMKLASVNPMFYDLATDLDTLLVRPEKLNSMASPSPPLPSVSHCNSPNNQATTFADTTTMTPTNIFHIASDYLLDNSVSFFLQGQRSNVFSEEDTGSHFWDAEDQRQKFLHPCGFSNNLCSFH

SEQ ID NO: 55099 - protein, 346 aa, Glycine max
  peptide (1)..(346): Ceres Seq. ID no. 14308361
MAAFSYQYHPFLVDPAFFPNNLNTPSPPPHQFQQLPHETSSFNVTNQETSCVDQSSKITISDNEPSVTENLSPQSSMVVDKLETGEQVTQKVNTPVEKKRKTRNGSSLTSNPQSKDAATERKNKKQRKGNGGLKEEDKAKEEKKEQRKCPEEPPTGYIHVRARRGQATDSHSLAERVRREKISERMKVLQRLVPGCDKVTGKALMLDEIINYVQSLQNQVEFLSMKLASVNPMFYDLATDLDTLLVRPEKLNSMASPSPPLPSVSHCNSPNNQATTFADTTTMTPTNIFHIASDYLLDNSVSFFLQGQRSNVFSEEDTGSHFWDAEDQRQKFLHPCGFSNNLCSFH

SEQ ID NO: 55100 - protein, 270 aa, Glycine max
  peptide (1)..(270): Ceres Seq. ID no. 14308362
MVVDKLETGEQVTQKVNTPVEKKRKTRNGSSLTSNPQSKDAATERKNKKQRKGNGGLKEEDKAKEEKKEQRKCPEEPPTGYIHVRARRGQATDSHSLAERVRREKISERMKVLQRLVPGCDKVTGKALMLDEIINYVQSLQNQVEFLSMKLASVNPMFYDLATDLDTLLVRPEKLNSMASPSPPLPSVSHCNSPNNQATTFADTTTMTPTNIFHIASDYLLDNSVSFFLQGQRSNVFSEEDTGSHFWDAEDQRQKFLHPCGFSNNLCSFH

SEQ ID NO: 55101 - DNA, 1865 bp, Glycine max
  misc_feature (1)..(1865): Ceres Seq. ID no. 15170990
gagtgatgctatgttatggcttgggtgtttgagttgcggagtcgttccctctgcacgtcctcctcctcgaaatggagggtgaagcaggtgacaacctccaacttccaagagtccctgcaagagataaagacgcacatctccaactccgactttgtcgccatttccatgggaaaaacgggctctccctccgcgccgtcgtggctccgccctctacccttcgacaccgcccagactgcctactccaaggcccgccgcgccgcccagagattccagctcctccacttcgccgtctgccccttctccgtctcccgctccgacaaactcctcgctcacccgtataatttcatgttgtttccaagagatgaaatgaagatggggatgcccacttacagcttttcgtgccagacttcgctacttgcctccatggctcgccaggggtttgatttcaatgcttgcgtctacaatggcatatcatatctatccagagcacaagagtcagcagctagaattcgtcttgggactgctctcccttctcttcgtgtgatgaaatcttcttcaccctctactgttgctgatacagtgtttgttgagaggattagatcaaaggttaaatattggagagagtcatgtaaaagctccgacacaaacaaaagcagagatgaagaacttgtcaactcccttaggaatattgtcctgggcaatgaacagttcagatcaagaccttgcatgactgtagatgtttgcagtgaacgtcaagtgcaacttattctggagatggtgttagactactcagatgatcttcttcctttgccaatccctactaagagtgggaccattcatgcagtacgaattgttttggcaaattctaaagaagataaggatttattggagagagagcttcgaaatcttgaagaggaggaaagcaagaaaattcgtggattccgagagattgtacactaattcattcaaaattcattgctccacttccgcctgagatagatgaatttgtgagctccttgtgctcggttttccctgaggtgcttgacataaattatttgatgaagaaacatggaaccatgagaaaagtgaccaacattccgagtgctatatcctacttgaataatcatttttttgcaccagttgatttggaaattcctgaccaagctacagtaaaagaaggcaagattcacggacttactgcattaaggctatcctatttatttatgaagctttgctctatattgaaaatttccccaaatgttactgaatctggcaacaagcatttggcccccgagcttgaagacttcaccaatgtattccatccattctcaacccctatccaagattcatttaatggtggggatgtcggcatgtggaccaataatacaaaaaaagtcagttgtgagcatttggttttcttatggggattcaaaattggtatcacagctggcatgctgaagagtttacttcgttcttcccatgatatcttttcacgagagtttgatgttaaattggtggacaagagttgtgccattgttgttttctggcaatctggggtatcaaaaagatttctagacatattgaatagtgaagaaataagaggagacttaaaggagttagtgtcagatggcatgagggtaaccagttatgagacctacaacacaatatgtaggttaggtttgtgggagatggatcttgcagaatcattagaaagagccttggaaagttcttgctgtgatattgagagtaattgtgagagaaaatcttctgagattcattggtataatgacaatgtaattaacttggatgatctttaatgttgtcatgaaccaattattgaaatgttagttctatcattcattgag

SEQ ID NO: 55102 - protein, 314 aa, Glycine max
  peptide (1)..(314): Ceres Seq. ID no. 15170991
MAWVFELRSRSLCTSSSSKWRVKQVTTSNFQESLQEIKTHISNSDFVAISMGKTGSPSAPSWLRPLPFDTAQTAYSKARRAAQRFQLLHFAVCPFSVSRSDKLLAHPYNFMLFPRDEMKMGMPTYSFSCQTSLLASMARQGFDFNACVYNGISYLSRAQESAARIRLGTALPSLRVMKSSSPSTVADTVFVERIRSKVKYWRESCKSSDTNKSRDEELVNSLRNIVLGNEQFRSRPCMTVDVCSERQVQLILEMVLDYSDDLLPLPIPTKSGTIHAVRIVLANSKEDKDLLERELRNLEEEESKKIRGFREIVH

SEQ ID NO: 55103 - protein, 264 aa, Glycine max
  peptide (1)..(264): Ceres Seq. ID no. 15170992
MGKTGSPSAPSWLRPLPFDTAQTAYSKARRAAQRFQLLHFAVCPFSVSRSDKLLAHPYNFMLFPRDEMKMGMPTYSFSCQTSLLASMARQGFDFNACVYNGISYLSRAQESAARIRLGTALPSLRVMKSSSPSTVADTVFVERIRSKVKYWRESCKSSDTNKSRDEELVNSLRNIVLGNEQFRSRPCMTVDVCSERQVQLILEMVLDYSDDLLPLPIPTKSGTIHAVRIVLANSKEDKDLLERELRNLEEEESKKIRGFREIVH

SEQ ID NO: 55104 - protein, 252 aa, Glycine max
  peptide (1)..(252): Ceres Seq. ID no. 15170993
MKKHGTMRKVTNIPSAISYLNNHFFAPVDLEIPDQATVKEGKIHGLTALRLSYLFMKLCSILKISPNVTESGNKHLAPELEDFTNVFHPFSTPIQDSFNGGDVGMWTNNTKKVSCEHLVFLWGFKIGITAGMLKSLLRSSHDIFSREFDVKLVDKSCAIVVFWQSGVSKRFLDILNSEEIRGDLKELVSDGMRVTSYETYNTICRLGLWEMDLAESLERALESSCCDIESNCERKSSEIHWYNDNVINLDDL

SEQ ID NO: 55105 - DNA, 1186 bp, Glycine max
  misc_feature (1)..(1186): Ceres Seq. ID no. 14310460
agttagcacttagcagactctgctgcagtgaggtgaggggaggtttgtttgttgtttcgtttttcctttcctttccgccagaatccgttgagaatggcgttgccggtagtcgtcgatgcagagtacctcaaggaggtcgacaaggctcgccgcgatctccgcgcactcatcgctaacaggaactgcgctcctctcatgctccgattagcctggcacgatgccggaacttacgatgctaagaccaagaccggtggacctaacggttcgatccggaacgaggaagagtattctcacggagccaataatggcttgaagaaagctattgatttctgccaggaagtgaaggcaaaatatcctaaaattacatatgcagatctcttccagcttgcgggtgttgttgcagttgaggttactgggggtccaacaattgatttcgttcctggtagaagagattcaaaagtatctcctaatgaagggcggcttcctgatgctaaaaaaggtgttccacatctccgtgatatcttttatcgaatgggcttgactgaccgagatattgttgcactatctggaggacatacactggggagagcacatccagagagatcagggtttgatggcccttggacggaggaccctctgaagtttgataactcatactttgtggaacttttgaaagaagattctgctgggctgcttaaacttccaacagacaaggctttattggaggatgctgaatttcgctgttatgttgagctatatgcaaaggatgaggatgcattttttcgagattatgctgaatcacataagaaactttcagagctaggctttgtgccaagttcaaagccgatttctattaaggaagggaccatactggcacaaggtgctgtaggagttgtagttgctaccgcagtggtgatcctcagttacttgtatgaagttcgcaaaagagggaagtaaactggatttgttcatctcttggctgttacggttgcgtgaccctgaccctgacccatagtgtgcaaaacagggttcatttttgcagcttcagtttctgtttacttagtaacaataaagaataatgctacagacattcagacttttatatgaatagactaaaaacatccctgagtactcaaattgagagcaacttcattatacgtaaatacaaattttaacattcttagtt

SEQ ID NO: 55106 - protein, 287 aa, Glycine max
  peptide (1)..(287): Ceres Seq. ID no. 14310461
MALPVVVDAEYLKEVDKARRDLRALIANRNCAPLMLRLAWHDAGTYDAKTKTGGPNGSIRNEEEYSHGANNGLKKAIDFCQEVKAKYPKITYADLFQLAGVVAVEVTGGPTIDFVPGRRDSKVSPNEGRLPDAKKGVPHLRDIFYRMGLTDRDIVALSGGHTLGRAHPERSGFDGPWTEDPLKFDNSYFVELLKEDSAGLLKLPTDKALLEDAEFRCYVELYAKDEDAFFRDYAESHKKLSELGFVPSSKPISIKEGTILAQGAVGVVVATAVVILSYLYEVRKRGK

SEQ ID NO: 55107 - protein, 253 aa, Glycine max
  peptide (1)..(253): Ceres Seq. ID no. 14310462
MLRLAWHDAGTYDAKTKTGGPNGSIRNEEEYSHGANNGLKKAIDFCQEVKAKYPKITYADLFQLAGVVAVEVTGGPTIDFVPGRRDSKVSPNEGRLPDAKKGVPHLRDIFYRMGLTDRDIVALSGGHTLGRAHPERSGFDGPWTEDPLKFDNSYFVELLKEDSAGLLKLPTDKALLEDAEFRCYVELYAKDEDAFFRDYAESHKKLSELGFVPSSKPISIKEGTILAQGAVGVVVATAVVILSYLYEVRKRGK

SEQ ID NO: 55108 - DNA, 1564 bp, Glycine max
  misc_feature (1)..(1564): Ceres Seq. ID no. 14308455
aaagcaaaactgtcaagggttctgtaattgccaaaaataatcctaaatcttctggtttaatgaagccaaacaagttaaagtctacacatagaaatgggattttaagcagcacgatatctgagactgtggctgatacaggaaaagatatcaaaattctaaacaaggctcctcatttgcgttctaattttccagcagccactgctccaaatacatatcaccaaataggaaaattttcatcattagccaacccaacatgccatgtttccccccccacaaaccacaggccaaatacctctactaactacagaccaactgggagagtgtctaatgtaaatgatcgagttttgttgggtgacaacaaattcaggagtggacaatctgaaatgtcaatggagatgactcggggtcctcggggtcattacaacaattttcttctacaaccatcacttgttaaggatgcacttgcaatcacaatatgtagagacgaatataacctttcagatttccaaactgaatacgaaattgctaaattttatgtgattaaatctttcaatgaagatgacgttcataagagtgttaaatataatgtttggacaagtactccaaatggaaataagaagttgaacgccgcattccttgatgcagaagctaaattgagacagacagggactaagtgtccagttttcctcttcttctcggttaatgctagcagacagtttgttggagtggctgagatgcttggaccggtggactttaaaaacgacatgaacttttggaaacttgataagtacaacggtttcttcccaattaagtggcacataataaaagatgttcccaacaatcagtttgtgcatatcatccttccaagcaatgagaacaagcctgtaacttacactagggacacacaagagattggattgaaggagggcctggagatgctgaatatttttagaagttatacagctaagacatctctattggatgattttgacttctatgagaggcgagaaaagttatttcgttcccagaggagtactaagcacaagcatgcaaggccggaacaggaagtatatggcaatgacaattatcaaaacactgtcaaagccagagagaagaaaatggagatgcaatcgagtggtaccaagcaaggtactctcatcaaacataccaaaaacctttctctcaacaactctggatttagatagcaagattgggagaggagaaaaagagagcccgatatttatttctacacgtatgtaggcatttaagagttgcagacgcaattgcagtttggtttgtttagagcttctgaagcacacgcacgcttcctttttgatttgtgtgatatgccgataagatgaccacgacaacacattttaagtttgaccaattatttttatattactcaatgagttgatgtttgccattggcaaatgaggaggtatttgatagtatggttcgatgtctccaatatttccgtataactcattggctttggtctgtatttactattttgtttcacgtggatgagcgcccagttccatagttgtgttttgtttggttg

SEQ ID NO: 55109 - protein, 400 aa, Glycine max
  peptide (1)..(400): Ceres Seq. ID no. 14308456
SKTVKGSVIAKNNPKSSGLMKPNKLKSTHRNGILSSTISETVADTGKDIKILNKAPHLRSNFPAATAPNTYHQIGKFSSLANPTCHVSPPTNHRPNTSTNYRPTGRVSNVNDRVLLGDNKFRSGQSEMSMEMTRGPRGHYNNFLLQPSLVKDALAITICRDEYNLSDFQTEYEIAKFYVIKSFNEDDVHKSVKYNVWTSTPNGNKKLNAAFLDAEAKLRQTGTKCPVFLFFSVNASRQFVGVAEMLGPVDFKNDMNFWKLDKYNGFFPIKWHIIKDVPNNQFVHIILPSNENKPVTYTRDTQEIGLKEGLEMLNIFRSYTAKTSLLDDFDFYERREKLFRSQRSTKHKHARPEQEVYGNDNYQNTVKAREKKMEMQSSGTKQGTLIKHTKNLSLNNSGFR

SEQ ID NO: 55110 - protein, 381 aa, Glycine max
  peptide (1)..(381): Ceres Seq. ID no. 14308457
MKPNKLKSTHRNGILSSTISETVADTGKDIKILNKAPHLRSNFPAATAPNTYHQIGKFSSLANPTCHVSPPTNHRPNTSTNYRPTGRVSNVNDRVLLGDNKFRSGQSEMSMEMTRGPRGHYNNFLLQPSLVKDALAITICRDEYNLSDFQTEYEIAKFYVIKSFNEDDVHKSVKYNVWTSTPNGNKKLNAAFLDAEAKLRQTGTKCPVFLFFSVNASRQFVGVAEMLGPVDFKNDMNFWKLDKYNGFFPIKWHIIKDVPNNQFVHIILPSNENKPVTYTRDTQEIGLKEGLEMLNIFRSYTAKTSLLDDFDFYERREKLFRSQRSTKHKHARPEQEVYGNDNYQNTVKAREKKMEMQSSGTKQGTLIKHTKNLSLNNSGFR

SEQ ID NO: 55111 - protein, 273 aa, Glycine max
  peptide (1)..(273): Ceres Seq. ID no. 14308458
MSMEMTRGPRGHYNNFLLQPSLVKDALAITICRDEYNLSDFQTEYEIAKFYVIKSFNEDDVHKSVKYNVWTSTPNGNKKLNAAFLDAEAKLRQTGTKCPVFLFFSVNASRQFVGVAEMLGPVDFKNDMNFWKLDKYNGFFPIKWHIIKDVPNNQFVHIILPSNENKPVTYTRDTQEIGLKEGLEMLNIFRSYTAKTSLLDDFDFYERREKLFRSQRSTKHKHARPEQEVYGNDNYQNTVKAREKKMEMQSSGTKQGTLIKHTKNLSLNNSGFR

SEQ ID NO: 55112 - DNA, 1382 bp, Glycine max
  misc_feature (1)..(1382): Ceres Seq. ID no. 14308294
gttagaatcgaaactccacagtccagtgagaggaagagaaagcatgaagttcacagactcgccggtgatcgagcttgcggtgaacgacgccgttctgtcgcttcagcaagacaacgggtccatgcacgtgggaaccaccgtgtggccatgctccctcgtcctcgtcaaattcgcggagcgctggggcccaccctctgacaacaacccctacgctcgcgtgctcgacttccaaggcaagcgggccgtggagctcggcacgggctgcggcgtggcgggaatgggcctctacctgttgggcctgacggacctgctcctcaccgacatcgcacccgtcatgccggccctgaagcgcaacctgaaagtcaacaagcccatcctccgcaaggccctcaaacactccgtgctctactggaacaacccgcagcagatcgctgccctaaatcctcccttcgatttcgttatcgcaaccgatgtcgtttacattccggaatctgttccttccttggtttctgcaatggaaaccctcgtctctgacgacggcgtcgttttgcttgggtaccagcttagggcacccgaggcgcacgagcttttctgggaactgtgtcaacaagtcttccacgttgagaaagtcccgcacgagcatctgcatcccgattacgcttacgaagaaaccgatgtttatctgttgaagaagaaaaacaagaaacagtgactgattatagctaatagggtgtgatagaaagttgttagccgtggtgtttatgttgacccttcaaatgattgccaacaaaggatcctggaatatacctgagacgcgtgtgcttgctgctgtttttgtctttgtttttctgagctttaggctcccttgacataagggggaaaaagttagtgaatggagggtattaaatatgagagtaaagctacctatatctaattgttacataaattttattatttaatcatagctcatttaaccttctttttaatcattaatattcggattctggtatatgtcccatgtgtgagtaggagtgtgcagacctggtttgcaatacatctcattgtaaataaatgaatatgcaaatcataggcaaatacaaatttcttatggttgaaggtatggctctgcaagacttggtttggtggcataaagtagtagacttgattgcaccacaagtcaatacaccatcagtattattttattttagtacaaacaagctaccgaatggcagatggtgaatagtctgccactgatgtaagaacaagaccgagaagaagacgcagatgaagagaagctgactatttatgtgtgcactttgccctttctgtatacaaagataattttgatttcatgcatcatcgaatataaatgttagttaatc

SEQ ID NO: 55113 - protein, 236 aa, Glycine max
  peptide (1)..(236): Ceres Seq. ID no. 14308295
LESKLHSPVRGRESMKFTDSPVIELAVNDAVLSLQQDNGSMHVGTTVWPCSLVLVKFAERWGPPSDNNPYARVLDFQGKRAVELGTGCGVAGMGLYLLGLTDLLLTDIAPVMPALKRNLKVNKPILRKALKHSVLYWNNPQQIAALNPPFDFVIATDVVYIPESVPSLVSAMETLVSDDGVVLLGYQLRAPEAHELFWELCQQVFHVEKVPHEHLHPDYAYEETDVYLLKKKNKKQ

SEQ ID NO: 55114 - protein, 222 aa, Glycine max
  peptide (1)..(222): Ceres Seq. ID no. 14308296
MKFTDSPVIELAVNDAVLSLQQDNGSMHVGTTVWPCSLVLVKFAERWGPPSDNNPYARVLDFQGKRAVELGTGCGVAGMGLYLLGLTDLLLTDIAPVMPALKRNLKVNKPILRKALKHSVLYWNNPQQIAALNPPFDFVIATDVVYIPESVPSLVSAMETLVSDDGVVLLGYQLRAPEAHELFWELCQQVFHVEKVPHEHLHPDYAYEETDVYLLKKKNKKQ

SEQ ID NO: 55115 - protein, 196 aa, Glycine max
  peptide (1)..(196): Ceres Seq. ID no. 14308297
MHVGTTVWPCSLVLVKFAERWGPPSDNNPYARVLDFQGKRAVELGTGCGVAGMGLYLLGLTDLLLTDIAPVMPALKRNLKVNKPILRKALKHSVLYWNNPQQIAALNPPFDFVIATDVVYIPESVPSLVSAMETLVSDDGVVLLGYQLRAPEAHELFWELCQQVFHVEKVPHEHLHPDYAYEETDVYLLKKKNKKQ

SEQ ID NO: 55116 - DNA, 1912 bp, Glycine max
  misc_feature (1)..(1912): Ceres Seq. ID no. 15172237
gccgagcaacagtgaatttggccaccataccataccatgagcataagggcgcgcgcgcgcaaaggattagggtttcgaacgtagcgattttggagcttccatttcgatttatacttgcgcacgatctgatgcaaaaaatgccagggacaaagcagagagatacatcccaaaatccagactcaccagaggggaacagtgagcctgagaaacctacagattctgatgagcgagtagactttgatggggacaatgatcaagaggagacaatggaggaagaagttgagtatgaagaagtagaggaggaggaagaagaggaggaggaggaggaggaagaagaagaagaagaagagactaagctctcagataagacaagagtggcagacactaaggatgaagttgagaaaaagaagcatgctgagcttcttgcacttccacctcatgggtctgaggtttacattgggggcattcctcaaaatgtttctgaagaagatttgagggtcttctgtcaatctgtgggagaagtttcagaggttaggataatgaagggaaaagaatccggtgaagcaaaaggttatgcttttgtgaccttcatgacaaaggaattggcatctaaggctattgaggagctgaacaactctgaatttaagggaaaaagaataaagtgctccacatctcaagttaagcacaagttgttcattggtaatgttcctaaatattggactgaaggagatatgaaaaaagttgttgctgaaattggccctggagtaatttgtgtggaactgttgaaggacccacagaattctagccgtaaccgaggatatgcttttatagagtattacaatcatgcttgtgcagagtattcaaggcagaagatgtcaaactcaaactttaaacttggcagcaatgctccaacggtgagctgggctgatccaaggaattctgaatcatctgcaatctctctggtaaaatcagtgtatgtaaagaaccttccagaaaacattactcaggatcgtctcaaggagctgtttgaacatcatggaaagatcacaaaagtggttctcccttctgctaaatcgggtcaagaaaagagcagatttggttttgttcactttgctgaaaggtcaagtgccatgaaggctttgaagaacacagagaaatatgaaattgatggacaattgctggagtgttcgctagcaaagccacaagcaaattcacaaaaaccagctttacttcccacttatccacctcatcttggttatggtatggttggtggtgctataggtgcaggatatggtgctgctggctttgcacaaccactgatgtatggtcccggaccaacccctggtggcatggcaatgatgccaatgatgttatcagatggaaggattgcatacatagtgcaacagccagggtttcaacagcctgccccagtatcccgacatgggaggagtggtggcagtagctccagtggtgggaaatgcagtaatgatgataatcgcaatcgtgggcatggccgctatcatccctactaacttaatgggctttaaggagctagcaaaacaaggaattgcacctgaggcctaaaagtgttgacgattcaaggcacagcgcccaactgattaagacaaacagggcgctgctgtgaatgcagttatgattttgtaatacatctacctagggccaagattcagttaagcatctaagtcaggttttcgtataattttacttatcttgtccatcaattttttgatctcaaattcttaaagagaccacagtgatctatctgaaggacatgataaatcttactagattgatgaaaaattatgtagaggtgtttcagatgtttagcttgcggttcatgtattcatgtttctaaccgtcgttctagaagaattggaacgatgtttgaatg

SEQ ID NO: 55117 - protein, 509 aa, Glycine max
  peptide (1)..(509): Ceres Seq. ID no. 15172238
RATVNLATIPYHEHKGARAQRIRVSNVAILELPFRFILAHDLMQKMPGTKQRDTSQNPDSPEGNSEPEKPTDSDERVDFDGDNDQEETMEEEVEYEEVEEEEEEEEEEEEEEEEEETKLSDKTRVADTKDEVEKKKHAELLALPPHGSEVYIGGIPQNVSEEDLRVFCQSVGEVSEVRIMKGKESGEAKGYAFVTFMTKELASKAIEELNNSEFKGKRIKCSTSQVKHKLFIGNVPKYWTEGDMKKVVAEIGPGVICVELLKDPQNSSRNRGYAFIEYYNHACAEYSRQKMSNSNFKLGSNAPTVSWADPRNSESSAISLVKSVYVKNLPENITQDRLKELFEHHGKITKVVLPSAKSGQEKSRFGFVHFAERSSAMKALKNTEKYEIDGQLLECSLAKPQANSQKPALLPTYPPHLGYGMVGGAIGAGYGAAGFAQPLMYGPGPTPGGMAMMPMMLSDGRIAYIVQQPGFQQPAPVSRHGRSGGSSSSGGKCSNDDNRNRGHGRYHPY

SEQ ID NO: 55118 - protein, 467 aa, Glycine max
  peptide (1)..(467): Ceres Seq. ID no. 15172239
MQKMPGTKQRDTSQNPDSPEGNSEPEKPTDSDERVDFDGDNDQEETMEEEVEYEEVEEEEEEEEEEEEEEEEEETKLSDKTRVADTKDEVEKKKHAELLALPPHGSEVYIGGIPQNVSEEDLRVFCQSVGEVSEVRIMKGKESGEAKGYAFVTFMTKELASKAIEELNNSEFKGKRIKCSTSQVKHKLFIGNVPKYWTEGDMKKVVAEIGPGVICVELLKDPQNSSRNRGYAFIEYYNHACAEYSRQKMSNSNFKLGSNAPTVSWADPRNSESSAISLVKSVYVKNLPENITQDRLKELFEHHGKITKVVLPSAKSGQEKSRFGFVHFAERSSAMKALKNTEKYEIDGQLLECSLAKPQANSQKPALLPTYPPHLGYGMVGGAIGAGYGAAGFAQPLMYGPGPTPGGMAMMPMMLSDGRIAYIVQQPGFQQPAPVSRHGRSGGSSSSGGKCSNDDNRNRGHGRYHPY

SEQ ID NO: 55119 - protein, 464 aa, Glycine max
  peptide (1)..(464): Ceres Seq. ID no. 15172240
MPGTKQRDTSQNPDSPEGNSEPEKPTDSDERVDFDGDNDQEETMEEEVEYEEVEEEEEEEEEEEEEEEEEETKLSDKTRVADTKDEVEKKKHAELLALPPHGSEVYIGGIPQNVSEEDLRVFCQSVGEVSEVRIMKGKESGEAKGYAFVTFMTKELASKAIEELNNSEFKGKRIKCSTSQVKHKLFIGNVPKYWTEGDMKKVVAEIGPGVICVELLKDPQNSSRNRGYAFIEYYNHACAEYSRQKMSNSNFKLGSNAPTVSWADPRNSESSAISLVKSVYVKNLPENITQDRLKELFEHHGKITKVVLPSAKSGQEKSRFGFVHFAERSSAMKALKNTEKYEIDGQLLECSLAKPQANSQKPALLPTYPPHLGYGMVGGAIGAGYGAAGFAQPLMYGPGPTPGGMAMMPMMLSDGRIAYIVQQPGFQQPAPVSRHGRSGGSSSSGGKCSNDDNRNRGHGRYHPY

SEQ ID NO: 55120 - DNA, 1927 bp, Glycine max
  misc_feature (1)..(1927): Ceres Seq. ID no. 15171856
gctcttccaaaccttcccttcaccttctataccctgccttgcaaaacaatattccaccccctcatcttcttttcttacacaaaccaatattttcataaaacagaaaccatggtgtcatcaaaacctagtggcttctatgaacaaaggagctttccatcaatcaaaatcctcatacttatactccttaattctatacttcacaaagccaactcaggctgcagcaactctgtttccaactccttagttccatttctatctcatgagatactctcatcattgcaaacactacctctagatggccactttagcctaagggacaatgaggatgctgccaaggactttggcaacatacaccattttcctcccctagcagtgctgtatccaaaaacagtttctgacatatcactcaccatcaagcatgtttttgaaatggggtttgccgcacagctgaagattgctgctagaggccatggccattcacttcaaggccaagcacaagtacatggaggcctagtcattaacatggagtctttacagggtcctgaaatgaaagttcacaatggagaattgccttatgtggatgtctcaggaggtgagttgtggataaacattctgcatgagactcttaaacttgggttggcaccaaagtcatggacagattaccttcacctcactgttgggggtactctttcaaatgctggcataagtgggcaagccttcaaacatggacctcagatcaataacatctttcagcttgaagtgatcacaggaaaaggagaggtggttacctgctcagggaaccgaaacgctgaccttttttatggtgttcttggagggcttggtcaatttggcatcattacaagggctagaatttctcttgaaccagcacctaagatggttaaatggattagggtgctctactcagagttctctacatttactagggatcaagagtatttggtatcacttaacaacacatttgattatattgaagggtttgtgatcataaacagaactggcatccttaacaattggagatcatcctttgatcccaaaaaccaacttcaagccagccaattcagttctgatgggaaaaccttctactgtctagagatggcaaaatatttcaaccctggtgaagctgaagccatgaatcagagtgtagcttacctactgtcaaagttgagttacattccatccacactcttcctatcagaagtttcttacgtggaattcttagacagagtgcatgtttctgagaaaaagctaagagcacaaggcttgtgggaagttccccatccttggctgaaccttctgatcccaaggagtgagattcataactttgctgaagaagtatttggcaatattcttaaagacacaaacaatggacccatactcattcaccccgtcaaccaaacacggtggaacagcaaaacatcattgattaccccagaggaagatattttttacctagtagcattcctatccttagctctcccaaattctaccggtgcagacagtttagaacacattctagcccaaaacaaaagagtcatagatttctacactggtgccaaaatgagagtgaagcaataccttccccattacagcacacaggaagaatggcaagtccattttgggtcacgatgggagacattcgtggaaagaaaaagggcctatgacccactagcactgctagcccctggccacaaaatctttcaaaaggctgtctcctcttcgtgttagttttctagtgtgttgtaaggttgtgaactaatgataaattacgtaagagtgttgcttcctgcacctctctggcatcccattacattacggaatgtccaatctgtaatgtaatttaatcattctgtaatgtaatggggcatgaagcaaaatttgaaggtgcacgaagtttcacttgttaatc

SEQ ID NO: 55121 - protein, 581 aa, Glycine max
  peptide (1)..(581): Ceres Seq. ID no. 15171857
ALPNLPFTFYTLPCKTIFHPLIFFSYTNQYFHKTETMVSSKPSGFYEQRSFPSIKILILILLNSILHKANSGCSNSVSNSLVPFLSHEILSSLQTLPLDGHFSLRDNEDAAKDFGNIHHFPPLAVLYPKTVSDISLTIKHVFEMGFAAQLKIAARGHGHSLQGQAQVHGGLVINMESLQGPEMKVHNGELPYVDVSGGELWINILHETLKLGLAPKSWTDYLHLTVGGTLSNAGISGQAFKHGPQINNIFQLEVITGKGEVVTCSGNRNADLFYGVLGGLGQFGIITRARISLEPAPKMVKWIRVLYSEFSTFTRDQEYLVSLNNTFDYIEGFVIINRTGILNNWRSSFDPKNQLQASQFSSDGKTFYCLEMAKYFNPGEAEAMNQSVAYLLSKLSYIPSTLFLSEVSYVEFLDRVHVSEKKLRAQGLWEVPHPWLNLLIPRSEIHNFAEEVFGNILKDTNNGPILIHPVNQTRWNSKTSLITPEEDIFYLVAFLSLALPNSTGADSLEHILAQNKRVIDFYTGAKMRVKQYLPHYSTQEEWQVHFGSRWETFVERKRAYDPLALLAPGHKIFQKAVSSSC

SEQ ID NO: 55122 - protein, 545 aa, Glycine max
  peptide (1)..(545): Ceres Seq. ID no. 15171858
MVSSKPSGFYEQRSFPSIKILILILLNSILHKANSGCSNSVSNSLVPFLSHEILSSLQTLPLDGHFSLRDNEDAAKDFGNIHHFPPLAVLYPKTVSDISLTIKHVFEMGFAAQLKIAARGHGHSLQGQAQVHGGLVINMESLQGPEMKVHNGELPYVDVSGGELWINILHETLKLGLAPKSWTDYLHLTVGGTLSNAGISGQAFKHGPQINNIFQLEVITGKGEVVTCSGNRNADLFYGVLGGLGQFGIITRARISLEPAPKMVKWIRVLYSEFSTFTRDQEYLVSLNNTFDYIEGFVIINRTGILNNWRSSFDPKNQLQASQFSSDGKTFYCLEMAKYFNPGEAEAMNQSVAYLLSKLSYIPSTLFLSEVSYVEFLDRVHVSEKKLRAQGLWEVPHPWLNLLIPRSEIHNFAEEVFGNILKDTNNGPILIHPVNQTRWNSKTSLITPEEDIFYLVAFLSLALPNSTGADSLEHILAQNKRVIDFYTGAKMRVKQYLPHYSTQEEWQVHFGSRWETFVERKRAYDPLALLAPGHKIFQKAVSSSC

SEQ ID NO: 55123 - protein, 438 aa, Glycine max
  peptide (1)..(438): Ceres Seq. ID no. 15171859
MGFAAQLKIAARGHGHSLQGQAQVHGGLVINMESLQGPEMKVHNGELPYVDVSGGELWINILHETLKLGLAPKSWTDYLHLTVGGTLSNAGISGQAFKHGPQINNIFQLEVITGKGEVVTCSGNRNADLFYGVLGGLGQFGIITRARISLEPAPKMVKWIRVLYSEFSTFTRDQEYLVSLNNTFDYIEGFVIINRTGILNNWRSSFDPKNQLQASQFSSDGKTFYCLEMAKYFNPGEAEAMNQSVAYLLSKLSYIPSTLFLSEVSYVEFLDRVHVSEKKLRAQGLWEVPHPWLNLLIPRSEIHNFAEEVFGNILKDTNNGPILIHPVNQTRWNSKTSLITPEEDIFYLVAFLSLALPNSTGADSLEHILAQNKRVIDFYTGAKMRVKQYLPHYSTQEEWQVHFGSRWETFVERKRAYDPLALLAPGHKIFQKAVSSSC

SEQ ID NO: 55124 - DNA, 1192 bp, Glycine max
  misc_feature (1)..(1192): Ceres Seq. ID no. 14308776
atatcacgttgttcttcacctctgtttcacttcactagctgctaatcaagccctctcttcctacatttctcaggggggacttgaagcaagcacattaatggagagggacccaaacatgggcaaggaaaaagtggtttcaaattccacattgcttccctcgtccacaaaagggttcaaggacaagggcatccccaacaatagcatgccctcctggcttctcaccaacatttctgacttggaggagaggatgaaagtgttggcaatgagtacaacagaagatgaagaaatgggagacacatttgctgatagagcagaaacttactaccaaaagaggcctcagctactgtcccttctgcaggacttgtacaatggctacataaccttatctgaccgttacatccaaacactggccaaacacaagcaccatagtagacactcttctcaagtttcaactgtagatgaaggcttctctgaccaagaagaagaagctagtggtgtgagccacagtgattcagacattgaaagctcaatctcctaccaacacccccaacacatgatgatgccaataggcctcccaaaaagctccatgcttgatgttgatgctattgttgctgagcttttgataaggaatattgagtatgacatgttgatgcatgaagttggtgtcatggagaggaggtactgtgagtcctcaaggaaaagtgagcttcaaaagagccttcttgaggtgttggagtctgagaggattgttcttttgaatgagaatgctagcttgggctatagggtcaacactttggtggaagaaaacaaggagcttgcatctgagtcagtgttcatcaagagaaaagccggtgagcttgctaagtgtgtgctgaagatgagggaggatcatagagtgtacttgctgcacaggaaaattgaggatcttcaggctcagatacatgccttggagaagaggaacaaggagtactatgataagcttctgagaagagatggtcatgaagatggtaaaaaaggtgtggctttggaggtttgtgttcagatggacaagcaaaagaggttcaagtggaaagatggcaacacttctgggatgaagaaatttcatgggaagaagtcccccccaagtttgtggaaaaagctgaagaacatggatttgttgttgtgtggtactaatccaacttgtgcttgatga

SEQ ID NO: 55125 - protein, 395 aa, Glycine max
  peptide (1)..(395): Ceres Seq. ID no. 14308777
YHVVLHLCFTSLAANQALSSYISQGGLEASTLMERDPNMGKEKVVSNSTLLPSSTKGFKDKGIPNNSMPSWLLTNISDLEERMKVLAMSTTEDEEMGDTFADRAETYYQKRPQLLSLLQDLYNGYITLSDRYIQTLAKHKHHSRHSSQVSTVDEGFSDQEEEASGVSHSDSDIESSISYQHPQHMMMPIGLPKSSMLDVDAIVAELLIRNIEYDMLMHEVGVMERRYCESSRKSELQKSLLEVLESERIVLLNENASLGYRVNTLVEENKELASESVFIKRKAGELAKCVLKMREDHRVYLLHRKIEDLQAQIHALEKRNKEYYDKLLRRDGHEDGKKGVALEVCVQMDKQKRFKWKDGNTSGMKKFHGKKSPPSLWKKLKNMDLLLCGTNPTCA

SEQ ID NO: 55126 - protein, 363 aa, Glycine max
  peptide (1)..(363): Ceres Seq. ID no. 14308778
MERDPNMGKEKVVSNSTLLPSSTKGFKDKGIPNNSMPSWLLTNISDLEERMKVLAMSTTEDEEMGDTFADRAETYYQKRPQLLSLLQDLYNGYITLSDRYIQTLAKHKHHSRHSSQVSTVDEGFSDQEEEASGVSHSDSDIESSISYQHPQHMMMPIGLPKSSMLDVDAIVAELLIRNIEYDMLMHEVGVMERRYCESSRKSELQKSLLEVLESERIVLLNENASLGYRVNTLVEENKELASESVFIKRKAGELAKCVLKMREDHRVYLLHRKIEDLQAQIHALEKRNKEYYDKLLRRDGHEDGKKGVALEVCVQMDKQKRFKWKDGNTSGMKKFHGKKSPPSLWKKLKNMDLLLCGTNPTCA

SEQ ID NO: 55127 - protein, 357 aa, Glycine max
  peptide (1)..(357): Ceres Seq. ID no. 14308779
MGKEKVVSNSTLLPSSTKGFKDKGIPNNSMPSWLLTNISDLEERMKVLAMSTTEDEEMGDTFADRAETYYQKRPQLLSLLQDLYNGYITLSDRYIQTLAKHKHHSRHSSQVSTVDEGFSDQEEEASGVSHSDSDIESSISYQHPQHMMMPIGLPKSSMLDVDAIVAELLIRNIEYDMLMHEVGVMERRYCESSRKSELQKSLLEVLESERIVLLNENASLGYRVNTLVEENKELASESVFIKRKAGELAKCVLKMREDHRVYLLHRKIEDLQAQIHALEKRNKEYYDKLLRRDGHEDGKKGVALEVCVQMDKQKRFKWKDGNTSGMKKFHGKKSPPSLWKKLKNMDLLLCGTNPTCA

SEQ ID NO: 55128 - DNA, 2255 bp, Glycine max
  misc_feature (1)..(2255): Ceres Seq. ID no. 15176771
gaattaagattgcattgcattaggctttcacaacacctcagcgtcactgtaccagttggaaatggagacaataacagagaacggatcagatggtgtgagtttggcaagaaatacatccaacaacgcccgtcgagggttgccaatgatccaaacaaacatgaagccaacggattcggaattccaagtgtgccacgacgacagcaccccgccggtcagagcccaaaccattcacgagctccattctctgcagaagaaaaagtcaaccccttccactcccctctcagcaacgcaaggccccttcgccactgtttccgatgaggaacgccagaaacagcaactccaatcaatcagtgcgtcgttggcgtcgttgacgagggagtcagggcctaaggtggtgaaaggagacccagccactaaggcagagaaggggacacatgttcatcaccatccgcaaccacattactttgcttcaacggcgtttgatgtcagtgacagtgcgctcaaattcacccacgtcctctacaatctctcccccgctgagctgtatgagcaagcgattaagcacgagaaaggatcattcataacggcaacgggagcgttagctacactttctggagcaaaaacgggacgctctccccgagacaaacgggttgtcagggacgacaccaccgagcatgacctctggtggggaaagggctcgcccaatattgaaatggacgaacataccttcttaatcaacagagaaagagcagttgattacttgaactcccttgaaaaggtttatgtgaatgatcaatttctgaattgggatccagaacacagaatcaaagtccggatagtatctgcaagagcttatcactccctatttatgcacaatatgtgcatccgacccactcctgaagagctagaggaatttggaactccagacttcactatatacaatgcaggacagttcccttgtaatcgttacacacactacatgacttcatcaactagtattgacatcaacattgcaaggaaagaaatggtcatccttggcacacaatatgctggggaaatgaagaaaggtctctttggtttaatgcactacctcatgcccaagcgcaatattctctccctacattctgggtgcaatatgggcaaagatggcgatgttgcactcttttttggattatcaggtactggaaagacaactctgtctaccgatcataaccggtacttaattggagatgatgagcattgctggagtgaaaatggagtggcaaatattgaagggggttgctatgcaaagtgtgtcgatctttcaaaggataaagaaccagacatctggaatgccatcaaatttgggacagtactcgaaaatgttgtttttgatgagcatactcgagaggtagatttctctgacaaatctgtgaccgagaacactcgtgcagcatatcctattgagtacatacccaatgctaagataccgtgtgttgctccccatgcaaagaatgtcatccttctagcttgtgatgcatttggggtgctccccccagtaagcaagctgagcttggcccaaacaatgtaccatttcatcagtggctacacagccctggttgctgggacagaggatggtataaaagaaccacaggctacattctctgcttgtttcggggcagcgtttataatgatgcaccctaccaaatatgcagcaatgctagccgaaaagatgcagaagcatggggctactggatggcttgtcaatactggctggtcaggaggaagttatggattaggcaatcggattaagttagcgtatactaggaaaatcattgatgctattcactctgggagccttttgaatgcacagtacactaagactgaagtgtttgggcttgagatcccaacagcactagagggagtcccttctgaaatcttggaccctgtgaatacttggtctgacaagaaggcctatcaagatacacgcttgaaactagcaagcttattcaagaagaattttgatggattcacgacctacaagataggaggggatcagaagttgactgaagagattgtctctgctggtcctatattctgatgagagcatttcctatttagcgaaaaaaaaaatgaagtccaaaagcattcggttgattatttctacttaaaggttttcactgtatttagcttgcttgactataagacgatccctttattattgacacttacgagacaatacacaaatctgttattttgcgagcgtttaattattc

SEQ ID NO: 55129 - protein, 672 aa, Glycine max
  peptide (1)..(672): Ceres Seq. ID no. 15176772
METITENGSDGVSLARNTSNNARRGLPMIQTNMKPTDSEFQVCHDDSTPPVRAQTIHELHSLQKKKSTPSTPLSATQGPFATVSDEERQKQQLQSISASLASLTRESGPKVVKGDPATKAEKGTHVHHHPQPHYFASTAFDVSDSALKFTHVLYNLSPAELYEQAIKHEKGSFITATGALATLSGAKTGRSPRDKRVVRDDTTEHDLWWGKGSPNIEMDEHTFLINRERAVDYLNSLEKVYVNDQFLNWDPEHRIKVRIVSARAYHSLFMHNMCIRPTPEELEEFGTPDFTIYNAGQFPCNRYTHYMTSSTSIDINIARKEMVILGTQYAGEMKKGLFGLMHYLMPKRNILSLHSGCNMGKDGDVALFFGLSGTGKTTLSTDHNRYLIGDDEHCWSENGVANIEGGCYAKCVDLSKDKEPDIWNAIKFGTVLENVVFDEHTREVDFSDKSVTENTRAAYPIEYIPNAKIPCVAPHAKNVILLACDAFGVLPPVSKLSLAQTMYHFISGYTALVAGTEDGIKEPQATFSACFGAAFIMMHPTKYAAMLAEKMQKHGATGWLVNTGWSGGSYGLGNRIKLAYTRKIIDAIHSGSLLNAQYTKTEVFGLEIPTALEGVPSEILDPVNTWSDKKAYQDTRLKLASLFKKNFDGFTTYKIGGDQKLTEEIVSAGPIF

SEQ ID NO: 55130 - protein, 645 aa, Glycine max
  peptide (1)..(645): Ceres Seq. ID no. 15176773
MIQTNMKPTDSEFQVCHDDSTPPVRAQTIHELHSLQKKKSTPSTPLSATQGPFATVSDEERQKQQLQSISASLASLTRESGPKVVKGDPATKAEKGTHVHHHPQPHYFASTAFDVSDSALKFTHVLYNLSPAELYEQAIKHEKGSFITATGALATLSGAKTGRSPRDKRVVRDDTTEHDLWWGKGSPNIEMDEHTFLINRERAVDYLNSLEKVYVNDQFLNWDPEHRIKVRIVSARAYHSLFMHNMCIRPTPEELEEFGTPDFTIYNAGQFPCNRYTHYMTSSTSIDINIARKEMVILGTQYAGEMKKGLFGLMHYLMPKRNILSLHSGCNMGKDGDVALFFGLSGTGKTTLSTDHNRYLIGDDEHCWSENGVANIEGGCYAKCVDLSKDKEPDIWNAIKFGTVLENVVFDEHTREVDFSDKSVTENTRAAYPIEYIPNAKIPCVAPHAKNVILLACDAFGVLPPVSKLSLAQTMYHFISGYTALVAGTEDGIKEPQATFSACFGAAFIMMHPTKYAAMLAEKMQKHGATGWLVNTGWSGGSYGLGNRIKLAYTRKIIDAIHSGSLLNAQYTKTEVFGLEIPTALEGVPSEILDPVNTWSDKKAYQDTRLKLASLFKKNFDGFTTYKIGGDQKLTEEIVSAGPIF

SEQ ID NO: 55131 - protein, 640 aa, Glycine max
  peptide (1)..(640): Ceres Seq. ID no. 15176774
MKPTDSEFQVCHDDSTPPVRAQTIHELHSLQKKKSTPSTPLSATQGPFATVSDEERQKQQLQSISASLASLTRESGPKVVKGDPATKAEKGTHVHHHPQPHYFASTAFDVSDSALKFTHVLYNLSPAELYEQAIKHEKGSFITATGALATLSGAKTGRSPRDKRVVRDDTTEHDLWWGKGSPNIEMDEHTFLINRERAVDYLNSLEKVYVNDQFLNWDPEHRIKVRIVSARAYHSLFMHNMCIRPTPEELEEFGTPDFTIYNAGQFPCNRYTHYMTSSTSIDINIARKEMVILGTQYAGEMKKGLFGLMHYLMPKRNILSLHSGCNMGKDGDVALFFGLSGTGKTTLSTDHNRYLIGDDEHCWSENGVANIEGGCYAKCVDLSKDKEPDIWNAIKFGTVLENVVFDEHTREVDFSDKSVTENTRAAYPIEYIPNAKIPCVAPHAKNVILLACDAFGVLPPVSKLSLAQTMYHFISGYTALVAGTEDGIKEPQATFSACFGAAFIMMHPTKYAAMLAEKMQKHGATGWLVNTGWSGGSYGLGNRIKLAYTRKIIDAIHSGSLLNAQYTKTEVFGLEIPTALEGVPSEILDPVNTWSDKKAYQDTRLKLASLFKKNFDGFTTYKIGGDQKLTEEIVSAGPIF

SEQ ID NO: 55132 - DNA, 1523 bp, Glycine max
  misc_feature (1)..(1523): Ceres Seq. ID no. 14310547
atccaaaatgaagcttgaagaatctgtgtccagctccaacatcattgcccggctgcttccaccggaagatccgaatccgcaaaatggatcaatctccggagcggtgttcaacataacaaccaccatgatcggtgccggaatcatgtccattccggcgaccatgaaggttttaggcatagttccggggttggtggtgatcgtgttggtggcactgataacagatgtgactgtggagtttatgctaaggtacacaagttccggtaaatcctctacttacgctggcatgatggcagagtcctttgcctccataggatccctcgccgttaagatttgcgtcatcatatccaatttgggggtcctcatcatctatttcattatccttggagacgtgctctctggaaacgagtcgaacggaatcacacacttgggtattctacaagaatggtttggcatcaactggtggacctctcgtgcttttgctcttcttattgttgcactcttcataatgcttccacttgttatgttacgacgtgttgattcactgaagtatagttctgctatagcaatcctactagcatttgtgtttgttgtaatatgttcatcaatggcggttagtgcattgttgtctggaaaaactcaaacactaagaatagtgcctgatttctctcaagccaccgtccttgaccttttcaccactatcccagtgtttgtcacgggtttcggattccatgtcaatgttcatccaattagagcagagctaggaaaagttgcacacatgggtttggctgcacggatttcgttgataatctgcgtggctatttactttgctattggtttctttgggtaccttttatttggggactccatcatgcccgatgtgttggtaaactttgaccaaaactcccatacaagtgctggtcgattactcaataccattgttcggttaagttatgcactccatcttgcacttgtgttcccaatcatgaactattccttgagggccaacatagatgaactaattttctcaaacaaaaataagcctccccttgcatcagataccccaagatttgtgtcactcactttgactttgctagccctcacatactttgtggctgtggccatcccaaatatatggtttttttttcagttcttgggatccacaaccattgtttgcacctcattcatcttccctgccgcaattgttctaagggacatgcatggcatatcaaagacaaaagatcaagtgatggcaatagtggtgattgttttggctgtaggaacaagcggaattgctatatggaccaacttgaatggttcaggggctgctcaatgattaaccatgatgctatataacacccagtcttttcaagttttagggaagcctagtgaacagctgcatcaatttggtccttaatttgattaatttatcttatagaaattaatttaataacatttaaaggtgagattgagaattgcacatcttgtattttgaaactatagacgatcctactttgattcaaacg

SEQ ID NO: 55133 - protein, 443 aa, Glycine max
  peptide (1)..(443): Ceres Seq. ID no. 14310548
SKMKLEESVSSSNIIARLLPPEDPNPQNGSISGAVFNITTTMIGAGIMSIPATMKVLGIVPGLVVIVLVALITDVTVEFMLRYTSSGKSSTYAGMMAESFASIGSLAVKICVIISNLGVLIIYFIILGDVLSGNESNGITHLGILQEWFGINWWTSRAFALLIVALFIMLPLVMLRRVDSLKYSSAIAILLAFVFVVICSSMAVSALLSGKTQTLRIVPDFSQATVLDLFTTIPVFVTGFGFHVNVHPIRAELGKVAHMGLAARISLIICVAIYFAIGFFGYLLFGDSIMPDVLVNFDQNSHTSAGRLLNTIVRLSYALHLALVFPIMNYSLRANIDELIFSNKNKPPLASDTPRFVSLTLTLLALTYFVAVAIPNIWFFFQFLGSTTIVCTSFIFPAAIVLRDMHGISKTKDQVMAIVVIVLAVGTSGIAIWTNLNGSGAAQ

SEQ ID NO: 55134 - protein, 441 aa, Glycine max
  peptide (1)..(441): Ceres Seq. ID no. 14310549
MKLEESVSSSNIIARLLPPEDPNPQNGSISGAVFNITTTMIGAGIMSIPATMKVLGIVPGLVVIVLVALITDVTVEFMLRYTSSGKSSTYAGMMAESFASIGSLAVKICVIISNLGVLIIYFIILGDVLSGNESNGITHLGILQEWFGINWWTSRAFALLIVALFIMLPLVMLRRVDSLKYSSAIAILLAFVFVVICSSMAVSALLSGKTQTLRIVPDFSQATVLDLFTTIPVFVTGFGFHVNVHPIRAELGKVAHMGLAARISLIICVAIYFAIGFFGYLLFGDSIMPDVLVNFDQNSHTSAGRLLNTIVRLSYALHLALVFPIMNYSLRANIDELIFSNKNKPPLASDTPRFVSLTLTLLALTYFVAVAIPNIWFFFQFLGSTTIVCTSFIFPAAIVLRDMHGISKTKDQVMAIVVIVLAVGTSGIAIWTNLNGSGAAQ

SEQ ID NO: 55135 - protein, 402 aa, Glycine max
  peptide (1)..(402): Ceres Seq. ID no. 14310550
MIGAGIMSIPATMKVLGIVPGLVVIVLVALITDVTVEFMLRYTSSGKSSTYAGMMAESFASIGSLAVKICVIISNLGVLIIYFIILGDVLSGNESNGITHLGILQEWFGINWWTSRAFALLIVALFIMLPLVMLRRVDSLKYSSAIAILLAFVFVVICSSMAVSALLSGKTQTLRIVPDFSQATVLDLFTTIPVFVTGFGFHVNVHPIRAELGKVAHMGLAARISLIICVAIYFAIGFFGYLLFGDSIMPDVLVNFDQNSHTSAGRLLNTIVRLSYALHLALVFPIMNYSLRANIDELIFSNKNKPPLASDTPRFVSLTLTLLALTYFVAVAIPNIWFFFQFLGSTTIVCTSFIFPAAIVLRDMHGISKTKDQVMAIVVIVLAVGTSGIAIWTNLNGSGAAQ

SEQ ID NO: 55136 - DNA, 1507 bp, Glycine max
  misc_feature (1)..(1507): Ceres Seq. ID no. 12612470
acctcccaagctccctagcaccatatgctaaggtcgttaacaacttcaatgggaattgtatcagtagcaccaactcagactgtggtgtatttggtccctcggtatcctccatcaatctccacatatctctatgcttcttctcttaccaaggctaagaccattcatcaacccacacaatcttatgttcactccaaatcagtagaaactgcaatagagagtacatcacagttggtgccattcccattgttgacgaatgggaattacacagcatgcaccattccttggaggttcccttcagacgatccaagcattcccactcccaccgagctatcttggattaatctcctcctcaatactatccccaccttcaagaagcatgctgagaatgatacttctgttcctgatgctgcaaataaagctgaaaattttgctcaaaggtatgctagaatacttgaagatttcaagaaagatcctgcaagtcaaggcaggcctcttgatatccttattctatgcagacttcgtgagcaagtccttagagaacagggattcagagatatcttcaagaaaataaaggatgtagagaatgcaaatgccatatccctatttcagaatgttgttcatcttaatgatgccattgaagatgaagggaaacgactggagaatttggttagaggaatttttgcagggaacatatttgatcttggtgctacacagcttgcagaggttttctcaagggatggagtatctttttcgactacttgtcaaaatcttgtccctcgaccctggattattgatgaccttgaaactttcagaatagcatggagcaagaagtcctggaagaaggtaatcatatttgtggataactctggtgcagatgtcattttgggtattctgccatttgcaagggagctccttcgacgtgggagtcaggttatattggctgctaatgacttaccttccatcaatgatgtgacttactctgacctaattgaaattataccaaagttaaaggatgaagaaggacgtctcacgggtgtcagtacttcaaatcttctaattgccaactccggaaatgatttacctgttattgatcttacaagggtgtcacaagaacttgcataccttgctaatgatgtagatcttgtcatcttagaagggatgggtcgtggaatagaaacaaatctctatgctcaatttaaatgtgattcccttaagattgggatggtaaaacatcctgaggttgcagaatttcttgggtcacgtttgtatgactgcgtgatcaaatacgatgaagtttagagcttataattaagttgattctttactttgataaatacctaacactacatttgcaatttcaactgcaaatttccaaataatcaaaattgaaatttccaaacaattactttttcaatgtacaagtccgaatttggatcaacaatgctggaaaaaaaaaatctgaacccattaaatttaattagattgaattaaaaaaatatttattatt

SEQ ID NO: 55137 - protein, 424 aa, Glycine max
  peptide (1)..(424): Ceres Seq. ID no. 12612471
MLRSLTTSMGIVSVAPTQTVVYLVPRYPPSISTYLYASSLTKAKTIHQPTQSYVHSKSVETAIESTSQLVPFPLLTNGNYTACTIPWRFPSDDPSIPTPTELSWINLLLNTIPTFKKHAENDTSVPDAANKAENFAQRYARILEDFKKDPASQGRPLDILILCRLREQVLREQGFRDIFKKIKDVENANAISLFQNVVHLNDAIEDEGKRLENLVRGIFAGNIFDLGATQLAEVFSRDGVSFSTTCQNLVPRPWIIDDLETFRIAWSKKSWKKVIIFVDNSGADVILGILPFARELLRRGSQVILAANDLPSINDVTYSDLIEIIPKLKDEEGRLTGVSTSNLLIANSGNDLPVIDLTRVSQELAYLANDVDLVILEGMGRGIETNLYAQFKCDSLKIGMVKHPEVAEFLGSRLYDCVIKYDEV

SEQ ID NO: 55138 - protein, 416 aa, Glycine max
  peptide (1)..(416): Ceres Seq. ID no. 12612472
MGIVSVAPTQTVVYLVPRYPPSISTYLYASSLTKAKTIHQPTQSYVHSKSVETAIESTSQLVPFPLLTNGNYTACTIPWRFPSDDPSIPTPTELSWINLLLNTIPTFKKHAENDTSVPDAANKAENFAQRYARILEDFKKDPASQGRPLDILILCRLREQVLREQGFRDIFKKIKDVENANAISLFQNVVHLNDAIEDEGKRLENLVRGIFAGNIFDLGATQLAEVFSRDGVSFSTTCQNLVPRPWIIDDLETFRIAWSKKSWKKVIIFVDNSGADVILGILPFARELLRRGSQVILAANDLPSINDVTYSDLIEIIPKLKDEEGRLTGVSTSNLLIANSGNDLPVIDLTRVSQELAYLANDVDLVILEGMGRGIETNLYAQFKCDSLKIGMVKHPEVAEFLGSRLYDCVIKYDEV

SEQ ID NO: 55139 - DNA, 1215 bp, Glycine max
  misc_feature (1)..(1215): Ceres Seq. ID no. 14308632
agcaatacatgtaacaaagcttcagttcaaattgaagccagaaaatcaggtgcagtttctagtgcttctgagaaatatgattgccatagagactatgcagacaggggaatggttgattcttttcaaggttcaattcagtcatcagagcaagcatcatccaagaatgggtccatgtttatcaaggaaaagaagagggaaatgttggtcaatggtggtgtcagtggttcttcctcaagagcatcaaatcttgatggtgctgttcatggtggagtgaagggaaagagaagcgagagggagaggaatcaaagccgggatcagagcagacaaaattctattggcagagctggacgcatgtcactggacagtagccaaaatgagaacaaaccaaaagctaagaagcaaaagagtactgctagtggacatgataggtttatggaagcaaaggaatctgctcgtttaccaattcatgatacaatcaataatgatagcaaagatggggctacgttatctggtaaccaggacacttctcaaataaaggaatccaatgactttgggaatttgccgctacctgacttaagttcaatagaagaatttggtggtgcgcaagatcttagttcatggttgaactttgaagaagatggtttgccagaccatgattctattggccttgatattccaatggatgacctatcggatttaaatatgcttatgtgaagggatgtacacgtgttatatctgaaggagagtttgtatgtactcagtgaaccttgtggggcgtcaagatcttgatggtatacttgggtttctctggaggggaaatttttgtgattggaattatgaattttgacacatttatagggtgaacgggagatggggagtgacttaaaattgcaatttgatatttttgtggacgttgtatagaggaagctacaatcatggatttcatgaaattgctgtcagatatctcccttctcccatgaatcaaactagttttgctgtgttaaagtcatgatctcagaaatggcttttctataggagattagattaattaaagtgctatagcctgagagtggtttcatttctgaagctgtgacttcagctaccatactatgtaaaatgtttattgttcttgtagaccgaaactcgcacaattttgattgttttctcctgaataatggagaatgagtttttaattaagtttttctaggattaaag

SEQ ID NO: 55140 - protein, 237 aa, Glycine max
  peptide (1)..(237): Ceres Seq. ID no. 14308633
SNTCNKASVQIEARKSGAVSSASEKYDCHRDYADRGMVDSFQGSIQSSEQASSKNGSMFIKEKKREMLVNGGVSGSSSRASNLDGAVHGGVKGKRSERERNQSRDQSRQNSIGRAGRMSLDSSQNENKPKAKKQKSTASGHDRFMEAKESARLPIHDTINNDSKDGATLSGNQDTSQIKESNDFGNLPLPDLSSIEEFGGAQDLSSWLNFEEDGLPDHDSIGLDIPMDDLSDLNMLM

SEQ ID NO: 55141 - protein, 201 aa, Glycine max
  peptide (1)..(201): Ceres Seq. ID no. 14308634
MVDSFQGSIQSSEQASSKNGSMFIKEKKREMLVNGGVSGSSSRASNLDGAVHGGVKGKRSERERNQSRDQSRQNSIGRAGRMSLDSSQNENKPKAKKQKSTASGHDRFMEAKESARLPIHDTINNDSKDGATLSGNQDTSQIKESNDFGNLPLPDLSSIEEFGGAQDLSSWLNFEEDGLPDHDSIGLDIPMDDLSDLNMLM

SEQ ID NO: 55142 - protein, 180 aa, Glycine max
  peptide (1)..(180): Ceres Seq. ID no. 14308635
MFIKEKKREMLVNGGVSGSSSRASNLDGAVHGGVKGKRSERERNQSRDQSRQNSIGRAGRMSLDSSQNENKPKAKKQKSTASGHDRFMEAKESARLPIHDTINNDSKDGATLSGNQDTSQIKESNDFGNLPLPDLSSIEEFGGAQDLSSWLNFEEDGLPDHDSIGLDIPMDDLSDLNMLM

SEQ ID NO: 55143 - DNA, 1232 bp, Glycine max
  misc_feature (1)..(1232): Ceres Seq. ID no. 14308586
aaagaatgcaatgactcaactccagatagtagatagtgagtgagtgaagctaaagctacaaaaacaacaaccaaacaaaaaactcaattctcttctgttcttggtttttgcttttcctcattctctcattctcaacaccaccaaaatgggccttgtttcccaggatgccctcaaccaactccaagctctcatggatcaagtgctacttgaggaggagccactgcagagaacgtttcagaatgttcatcaaggatgtgtcgccgaaaccttaacgcggtttctaaaagcaagggagtggaatgctaccaaggcccataaaatgatagtcgattgtttaaagtggagagtacaaaatgagattgacaacatattatctaaaccaataatccctactgatttatacagaggcattcgtgattcacaacttataggattgtccgggtactccagagagggtctgccagtctttgcaattggtgttgggcttagcacatttgacaaagcgtctgtccattattatgtgcagtctcacattcaaattaatgaatatcgtgatcgtgtaatcttgccttcagcatcaaagaagcatgagcggcctattaccacatgtgtaaaggttttggatatgactggtctgaagttgtcagccctgaatcagataaagttgttaacaataatatcatccattgatgatctgaactaccccgagaaaacaaatacttattacattgtaaatgccccatacatattttcagcttgttggaaggttgtgaagccacttttacaagagaggacaagaagaaaagtacaagtcttacaaggttgtgggcgagatgagctattaaagatcatggattacacgtctctgccacatttctgtagaagagaaggctctggatcatcaagacattcagagaatggaaatgaaaattgctattccgtggatcatcctttccataagcagctctacaactacatcaaggagcaatccagaatccatgaagctgttgaacccatcaagcagggatcgttccatgtagattttcccgaacctcctgccgagaaagcagagattgtcaagactttagagtctgagctacacaagtttaagatcagcaatgagaatggtgattgaagattgatactgttaccaatggtgtcttggccatgttgtcttttacctgtcctactaaccatttgaaccaaactaatgatgtaacaacggttcttcc

SEQ ID NO: 55144 - protein, 329 aa, Glycine max
  peptide (1)..(329): Ceres Seq. ID no. 14308587
MGLVSQDALNQLQALMDQVLLEEEPLQRTFQNVHQGCVAETLTRFLKAREWNATKAHKMIVDCLKWRVQNEIDNILSKPIIPTDLYRGIRDSQLIGLSGYSREGLPVFAIGVGLSTFDKASVHYYVQSHIQINEYRDRVILPSASKKHERPITTCVKVLDMTGLKLSALNQIKLLTIISSIDDLNYPEKTNTYYIVNAPYIFSACWKVVKPLLQERTRRKVQVLQGCGRDELLKIMDYTSLPHFCRREGSGSSRHSENGNENCYSVDHPFHKQLYNYIKEQSRIHEAVEPIKQGSFHVDFPEPPAEKAEIVKTLESELHKFKISNENGD

SEQ ID NO: 55145 - protein, 314 aa, Glycine max
  peptide (1)..(314): Ceres Seq. ID no. 14308588
MDQVLLEEEPLQRTFQNVHQGCVAETLTRFLKAREWNATKAHKMIVDCLKWRVQNEIDNILSKPIIPTDLYRGIRDSQLIGLSGYSREGLPVFAIGVGLSTFDKASVHYYVQSHIQINEYRDRVILPSASKKHERPITTCVKVLDMTGLKLSALNQIKLLTIISSIDDLNYPEKTNTYYIVNAPYIFSACWKVVKPLLQERTRRKVQVLQGCGRDELLKIMDYTSLPHFCRREGSGSSRHSENGNENCYSVDHPFHKQLYNYIKEQSRIHEAVEPIKQGSFHVDFPEPPAEKAEIVKTLESELHKFKISNENGD

SEQ ID NO: 55146 - protein, 271 aa, Glycine max
  peptide (1)..(271): Ceres Seq. ID no. 14308589
MIVDCLKWRVQNEIDNILSKPIIPTDLYRGIRDSQLIGLSGYSREGLPVFAIGVGLSTFDKASVHYYVQSHIQINEYRDRVILPSASKKHERPITTCVKVLDMTGLKLSALNQIKLLTIISSIDDLNYPEKTNTYYIVNAPYIFSACWKVVKPLLQERTRRKVQVLQGCGRDELLKIMDYTSLPHFCRREGSGSSRHSENGNENCYSVDHPFHKQLYNYIKEQSRIHEAVEPIKQGSFHVDFPEPPAEKAEIVKTLESELHKFKISNENGD

SEQ ID NO: 55147 - DNA, 1434 bp, Glycine max
  misc_feature (1)..(1434): Ceres Seq. ID no. 15176254
gaaaaataggtattttcagtgtgaagctgcaccagaaatcgcgtagtggctgcatctccgttcaccactgatcgcttacgagctcgaaaaggttaatgaaggagcacgtcattgcgcttctactactcttccactttcacagataaccctattgcataatcgcgctccttcctctctagggtttcttcaacttcatggcttcccctactcatttcgacgatgacttcgatttcggaggcggatttggcggaaggcattcaggtaataagaggtcgtctcccgattacgacgacgaggattatgacaacgatccttttgcaccgaagaaggctataacaaaagctgaagaagcttctggtgtaacaacaggaatgatcttgtcacttcgtgagagtctccagaactgtaaggatacacttgcaacatgccaaaatgaacttgaggctgcaaaatcagagattcagagttggcattctacacttaaaaatcagccatccatacttgccgggatcactccagagcccaagatgttgattaattatctgcaggccttgaaatcctctgaagagtctttaagagagcagcttgaaaaggcaaagaaaaaggaagctgcattcattgtaacatttgcaaaacgagaacaagagatagcagagttgaagtctgcggtgcgagatctgaaagtgcaactcaagccaccatcaatgcaggctaggaggttgttactagatccagctgttcatgaagagttcacgcgtttaaagaacttagttgaggaaaaggataaaaaagtaaaggagttgcaagataacattgctgctgtaagttttactccccaaagcaagatggggaagatgctgatggctaaatgtagaaccctgcaagaggaaaatgaagagattggaaatcaagcgtctgaggggaagatgcatgaattagggatgaaacttgcattgcagaagtcccaaaattcacaacttagaaatcaatttgaagggttgcagaagcacatggaaggactgacaaatgatgtggaaagatccaatgaaatggttcttatgttacaagaaaaattagaagagaaggatcggcagatacagagactaaaacatgagattaaacagaagaacttggaggatcaaagactaaaacatgagcttcaacagaaaaacttggaggatcaaagactaaaacatgaacttcaacagaagaacttggaggatggaaatgacaataatgccggggaggctgctaactaatttgatatatatatatatatatatatatatatatatatatatatatatttactgctgtacattatattaattttttttgcgaaaactgtggatatttatgaggaatgattatgcttctgctttgaatggaattatggaaaatatagtagatggagctactttttaatacaaaaag

SEQ ID NO: 55148 - protein, 354 aa, Glycine max
  peptide (1)..(354): Ceres Seq. ID no. 15176255
MASPTHFDDDFDFGGGFGGRHSGNKRSSPDYDDEDYDNDPFAPKKAITKAEEASGVTTGMILSLRESLQNCKDTLATCQNELEAAKSEIQSWHSTLKNQPSILAGITPEPKMLINYLQALKSSEESLREQLEKAKKKEAAFIVTFAKREQEIAELKSAVRDLKVQLKPPSMQARRLLLDPAVHEEFTRLKNLVEEKDKKVKELQDNIAAVSFTPQSKMGKMLMAKCRTLQEENEEIGNQASEGKMHELGMKLALQKSQNSQLRNQFEGLQKHMEGLTNDVERSNEMVLMLQEKLEEKDRQIQRLKHEIKQKNLEDQRLKHELQQKNLEDQRLKHELQQKNLEDGNDNNAGEAAN

SEQ ID NO: 55149 - protein, 295 aa, Glycine max
  peptide (1)..(295): Ceres Seq. ID no. 15176256
MILSLRESLQNCKDTLATCQNELEAAKSEIQSWHSTLKNQPSILAGITPEPKMLINYLQALKSSEESLREQLEKAKKKEAAFIVTFAKREQEIAELKSAVRDLKVQLKPPSMQARRLLLDPAVHEEFTRLKNLVEEKDKKVKELQDNIAAVSFTPQSKMGKMLMAKCRTLQEENEEIGNQASEGKMHELGMKLALQKSQNSQLRNQFEGLQKHMEGLTNDVERSNEMVLMLQEKLEEKDRQIQRLKHEIKQKNLEDQRLKHELQQKNLEDQRLKHELQQKNLEDGNDNNAGEAAN

SEQ ID NO: 55150 - protein, 243 aa, Glycine max
  peptide (1)..(243): Ceres Seq. ID no. 15176257
MLINYLQALKSSEESLREQLEKAKKKEAAFIVTFAKREQEIAELKSAVRDLKVQLKPPSMQARRLLLDPAVHEEFTRLKNLVEEKDKKVKELQDNIAAVSFTPQSKMGKMLMAKCRTLQEENEEIGNQASEGKMHELGMKLALQKSQNSQLRNQFEGLQKHMEGLTNDVERSNEMVLMLQEKLEEKDRQIQRLKHEIKQKNLEDQRLKHELQQKNLEDQRLKHELQQKNLEDGNDNNAGEAAN

SEQ ID NO: 55151 - DNA, 1129 bp, Glycine max
  misc_feature (1)..(1129): Ceres Seq. ID no. 14312572
aattatttattataacacgtacattaaactaaaacatagttacatacgtaaaaaaacttgcaattgttttataaggaatcagattagttacacttccattcccttccagcagctgggtttgagaagacaattgattatataggttttgttagtaaacaaaagaaaaggaaacatgaaggacgcagatgtgtcaaggcagatccagcagatgatcaggttcatccgtcaagaggctgaagagaaagctaatgaaatatctgttgctgctgaagaggaattcaatattgagaaactgcaattgcttgaagctgaaaaaagaaagatcaggcaagagtacgaacgaaaagccaaacaaattgacgttcgaagaaagattgaatactcaacacaactgaatgcagcccgaataaaagtgcttcaagcacaagatgatgcggtgggtgctatgaaggacgctgctaaaaaggggcttttacgtatctcaaatgataagaaagtatacaggaaactcgtcaaagacatgattgttcagggtttactacgcctgagggaaccatcagtgctattaagatgcagagagagtgaccgtaagcttgttgagtcattgatagaggaagccaaaaaagaatactcggagaaagccaatatgcaagcccctaagattgcccttgatgatcgtgtttacctcccaccgtcgccaaagaacagtgccgtggattcccatgaaccttattgcaccggaggaatagtattggcctcagaggatgggaagattgtgttggaaaatacccttgatgcacggcttgatgtcattttccggcagaaactacctgaggtaaggaagcgcctgttaggttgaacaacatactgcaatttgaattctcgctttatgtcagcaaatggaagagcaaggatgttgccacttcttttccgctgagcctgatcaaagcaaatgcaccaccccttttgttttttcttttctctaagaccaagttttaaatgttaagtctctttatttttgtaatttttaattctaataagctagactagaggaagaacatttcagtaatgtttttccggtacatttttttttctcagaagagagtaataaaatagactatttaaaatt

SEQ ID NO: 55152 - protein, 228 aa, Glycine max
  peptide (1)..(228): Ceres Seq. ID no. 14312573
MKDADVSRQIQQMIRFIRQEAEEKANEISVAAEEEFNIEKLQLLEAEKRKIRQEYERKAKQIDVRRKIEYSTQLNAARIKVLQAQDDAVGAMKDAAKKGLLRISNDKKVYRKLVKDMIVQGLLRLREPSVLLRCRESDRKLVESLIEEAKKEYSEKANMQAPKIALDDRVYLPPSPKNSAVDSHEPYCTGGIVLASEDGKIVLENTLDARLDVIFRQKLPEVRKRLLG

SEQ ID NO: 55153 - protein, 216 aa, Glycine max
  peptide (1)..(216): Ceres Seq. ID no. 14312574
MIRFIRQEAEEKANEISVAAEEEFNIEKLQLLEAEKRKIRQEYERKAKQIDVRRKIEYSTQLNAARIKVLQAQDDAVGAMKDAAKKGLLRISNDKKVYRKLVKDMIVQGLLRLREPSVLLRCRESDRKLVESLIEEAKKEYSEKANMQAPKIALDDRVYLPPSPKNSAVDSHEPYCTGGIVLASEDGKIVLENTLDARLDVIFRQKLPEVRKRLLG

SEQ ID NO: 55154 - protein, 137 aa, Glycine max
  peptide (1)..(137): Ceres Seq. ID no. 14312575
MKDAAKKGLLRISNDKKVYRKLVKDMIVQGLLRLREPSVLLRCRESDRKLVESLIEEAKKEYSEKANMQAPKIALDDRVYLPPSPKNSAVDSHEPYCTGGIVLASEDGKIVLENTLDARLDVIFRQKLPEVRKRLLG

SEQ ID NO: 55155 - DNA, 1461 bp, Glycine max
  misc_feature (1)..(1461): Ceres Seq. ID no. 14308061
aaagaaaggaatgaatgaaagagggatggtaggagaaaaatgagaatggcgtgaatgtgaggagagaagagcctgaatattagaatcggatacccttaaagaagcggagataggagtgtgcgcctccaaacccaaggggcttcggaggggctcttcatcggaggcggtgctatattcccctccggatattcccaccatgaagagcctcttcaagcccaagccccgcacttttccgatatcgtcaaacaaacgcgagatcttcttctccgtctcacctcccgagatgacgataacatgcccgacttgaccaaaaacctcagggacttaaagtcaatcctctatggtaacagtgaatccgaacccgtccccgaagcttgtgcacagctcactcaggaattcttcgccgacaacaccttacgcctccttatccaatatcttcccaaactcaacttggaggctagaaaagatgccactcagattgttgcaaatttacagaggcagcaggttcagtccaagctcatcgcctctgattacttggatactaatttggatcttatggatgtcttggtatctggatatgaaaacacagacatggctttacactacggtgcaatgttgagggagtgcataagacaccagattgttgcaaaatatgttctggactcacctcatatgaagaagttttttgactacattcagcttccaaattttgacatagctgcagatgccgcagcaacttttaaggagctaatgacaaggcataaatctactgtagctgatttccttagcaattattatgaatggttttttgatgaatataactctaaactgttggaatcttccaattatattacaaggcgccaagctgtcaagttgctgggagatatgttacttgatcgcacaaattcagcagtaatgacaagatatgtcagctcacgagacaacttaaggattttaatgaatcttctacgtgagtcaagcaagagcatacagatagaagcatttcatgttttcaagctgtttgctgctaaccaaaagaaaccagctgatatcatcagcatatttgttgcaaacagaagcaagcttcttagacttttgggtgacttaaaaaccgataaagaggatgaacagttcgaagctgataaagctcaagttataaaagaaattgcggctcttgaacctagggacctcgcttgagcttcagtttgtgtcgagtaacaagttgcattgtggcattttaccttatttaattgtctattgttatagttcttttagtcttcatcaagatgagactaacattcaacacaaattccagtgttttctttctgaattttcatttcggttctgtaattcctagatgaataaattgctgaaagagctacatgcagtggcagtattcggctttcatggtgttagaaagctttgcttgcctagcagttagtttataaattatacgatgcc

SEQ ID NO: 55156 - protein, 300 aa, Glycine max
  peptide (1)..(300): Ceres Seq. ID no. 14308062
MPDLTKNLRDLKSILYGNSESEPVPEACAQLTQEFFADNTLRLLIQYLPKLNLEARKDATQIVANLQRQQVQSKLIASDYLDTNLDLMDVLVSGYENTDMALHYGAMLRECIRHQIVAKYVLDSPHMKKFFDYIQLPNFDIAADAAATFKELMTRHKSTVADFLSNYYEWFFDEYNSKLLESSNYITRRQAVKLLGDMLLDRTNSAVMTRYVSSRDNLRILMNLLRESSKSIQIEAFHVFKLFAANQKKPADIISIFVANRSKLLRLLGDLKTDKEDEQFEADKAQVIKEIAALEPRDLA

SEQ ID NO: 55157 - protein, 213 aa, Glycine max
  peptide (1)..(213): Ceres Seq. ID no. 14308063
MDVLVSGYENTDMALHYGAMLRECIRHQIVAKYVLDSPHMKKFFDYIQLPNFDIAADAAATFKELMTRHKSTVADFLSNYYEWFFDEYNSKLLESSNYITRRQAVKLLGDMLLDRTNSAVMTRYVSSRDNLRILMNLLRESSKSIQIEAFHVFKLFAANQKKPADIISIFVANRSKLLRLLGDLKTDKEDEQFEADKAQVIKEIAALEPRDLA

SEQ ID NO: 55158 - protein, 201 aa, Glycine max
  peptide (1)..(201): Ceres Seq. ID no. 14308064
MALHYGAMLRECIRHQIVAKYVLDSPHMKKFFDYIQLPNFDIAADAAATFKELMTRHKSTVADFLSNYYEWFFDEYNSKLLESSNYITRRQAVKLLGDMLLDRTNSAVMTRYVSSRDNLRILMNLLRESSKSIQIEAFHVFKLFAANQKKPADIISIFVANRSKLLRLLGDLKTDKEDEQFEADKAQVIKEIAALEPRDLA

SEQ ID NO: 55159 - DNA, 911 bp, Glycine max
  misc_feature (1)..(911): Ceres Seq. ID no. 15226780
aaatttttgtcgtctccctgttggtccaaagaaatattttcaggcttttggactctattagctgcatctacaggaaagaaatgaagctgtcacaagaagagcttgtccctagcccagtcatccataaggaaaagaaaaagggtatattcagctctgttatcaaagattttactggcagtaaagaaaagcatgctcccattttggaaacagaagatactaaagaaagcatcctggaactctcagctatcttctcaaatgaaaattttccatgtgatgctgataataatgataatctgactgttgatgaagatgagattgaattaaacatagatgacattgacctggatgatcatgaagaaaaacgcaaagatcaaagtatattgggagctcttaataagaagaaattgactgggaagtttcaggttctaaaaggtagattgaaagagatgaagggcaacatccagaaaacatcaagcaaggaaaagcaacaagatgagcaagctggttcagtcgatcaaattaagaagaaatatggattttcttcttccaatgaaacaagcgtcgctaaattggcagaaagcaagctacaggagaacatgaaaaaactgcagggtatcaaccttcgaaccacagaaatgcaagataaagcaaaatcattttcaacattggcaaaccaagtgctgtggactgcagaacaggaaaggcgaaattaagaagcaccaacctcatggattacaccaaaaattacaaagccccccttttacccctcttgtacttatgcttctttattttgtgactggattctcatctcagtttttgggttgatattgaatgaaagtaaattaagaacaatgtcttcccttttttgccaattacataattctaccgagaatgaagtgaaaagccctact

SEQ ID NO: 55160 - protein, 236 aa, Glycine max
  peptide (1)..(236): Ceres Seq. ID no. 15226781
IFVVSLLVQRNIFRLLDSISCIYRKEMKLSQEELVPSPVIHKEKKKGIFSSVIKDFTGSKEKHAPILETEDTKESILELSAIFSNENFPCDADNNDNLTVDEDEIELNIDDIDLDDHEEKRKDQSILGALNKKKLTGKFQVLKGRLKEMKGNIQKTSSKEKQQDEQAGSVDQIKKKYGFSSSNETSVAKLAESKLQENMKKLQGINLRTTEMQDKAKSFSTLANQVLWTAEQERRN

SEQ ID NO: 55161 - protein, 210 aa, Glycine max
  peptide (1)..(210): Ceres Seq. ID no. 15226782
MKLSQEELVPSPVIHKEKKKGIFSSVIKDFTGSKEKHAPILETEDTKESILELSAIFSNENFPCDADNNDNLTVDEDEIELNIDDIDLDDHEEKRKDQSILGALNKKKLTGKFQVLKGRLKEMKGNIQKTSSKEKQQDEQAGSVDQIKKKYGFSSSNETSVAKLAESKLQENMKKLQGINLRTTEMQDKAKSFSTLANQVLWTAEQERRN

SEQ ID NO: 55162 - DNA, 1384 bp, Glycine max
  misc_feature (1)..(1384): Ceres Seq. ID no. 15170945
agcagctcccattccaacagattctagaagcacttagttgctcaacgataatcttaattgaagaagccaattcgtttattcttcttctgctttggaacatggctgataatattgttacctccagcaattcttctacggcctcgctgaaccctactcggataatctgtcacgtatgtcagaagcagttttcccagtacacgtgtcctcgatgcaattcgcgatactgttccctccaatgttacaaatcccatagtctccgttgcactgaatccttcatgaaagaaaatgtagttcagcaacttcaccaaatgcagcctgatgaacaaactaaaaataagatgttggacatactgaaaagatttcattcacaagaggaaatggatgaggattgacaggaaatcagctttgacgatttatcacttgaagaaaagaaacggtttcacatagcaattgcttatggggaactgagcaagatgatcaaaccatgggatccatggtggtcaaagccttctgcaagaaacatctgtctcagtaaggaaggaactcagcttgttcaacctattccagatcaggaattgctagatgatgatattggaagtgatgaattcagcaaagttcctcttggacctgaaactccacttcctcctctaagcaggcttagttccaaggagccatcaccccttttaacagttcacctagtcgatattctgtatagctattgcttcactcttcgtctctacaatggagattggaggtcagatgccttagggtcagtcatggttgtattgagtgtgtcctcggtgttgggtcaaggtgcacagccggagacagtactagaagccctttctcattgcttggagcaggtatgctgtccagcttacagacacattggaggattgcaatttggtttgggtgtcattgatgatgtgatcagtctgcttggtttgggaactcctgcattggtttgtgcccttcgtgatatgcattggtgcattcaagaaggcgaaaaggaggccaaatcagaaaggccaagaaagtcccagagaggtgggactagaagtgccattaagctggctgaaaggaagatatatttcatcatgtgttgggttcatgagcagccagaggaagtctggtcttccttagcagccattgtaagagcagaaaagacatcagccatggaatttcaacagatcaatagatctgaagatttgaacaataagacagaggccaaaggcaaaagtttaatccaggagatttaatgatttacgtagactgctaccccttacggttgtagtggactacgaggggtccgggagttcttgcagtggcaagaaagttaagtttcaaactagtttgggttgataatctatctacatttctttcg

SEQ ID NO: 55163 - protein, 261 aa, Glycine max
  peptide (1)..(261): Ceres Seq. ID no. 15170946
MIKPWDPWWSKPSARNICLSKEGTQLVQPIPDQELLDDDIGSDEFSKVPLGPETPLPPLSRLSSKEPSPLLTVHLVDILYSYCFTLRLYNGDWRSDALGSVMVVLSVSSVLGQGAQPETVLEALSHCLEQVCCPAYRHIGGLQFGLGVIDDVISLLGLGTPALVCALRDMHWCIQEGEKEAKSERPRKSQRGGTRSAIKLAERKIYFIMCWVHEQPEEVWSSLAAIVRAEKTSAMEFQQINRSEDLNNKTEAKGKSLIQEI

SEQ ID NO: 55164 - protein, 160 aa, Glycine max
  peptide (1)..(160): Ceres Seq. ID no. 15170947
MVVLSVSSVLGQGAQPETVLEALSHCLEQVCCPAYRHIGGLQFGLGVIDDVISLLGLGTPALVCALRDMHWCIQEGEKEAKSERPRKSQRGGTRSAIKLAERKIYFIMCWVHEQPEEVWSSLAAIVRAEKTSAMEFQQINRSEDLNNKTEAKGKSLIQEI

SEQ ID NO: 55165 - DNA, 1252 bp, Glycine max
  misc_feature (1)..(1252): Ceres Seq. ID no. 15175697
atacattaccgtttttttccccttcttattcgtcgttcagttcaatttctcgcgagtttttcttccatatgctaccaatcgttgccgttgatccacgcgccggcgaatttcagttttgattctccgccaccgttttggctgttgttactttggttcttccgagagaagggagccatatatagaaagtattttatggtgcgccgatgagcagaactgatgttattggcagtagaaggaggaggattcttctctgcttcggcttcagggtatactaagggcctgagccttctcctcttgggtcagaggaatgaggataaacccatgagagtagcgccgtggaaccagtatcagttggtagaccaagaatctgaccctgagctccagctggcttccacaaagaatcgcctctcccgcggctgtgcctcctttgtttgctttggtcgcacttccgcaggacttgatactccgtctcctcttaaagtgggccctgctcaacaacatgatgtctcaccagggccactggtttccaacaagggaaaggatccttctgcacatgtagatgatgaaagtgataacagaaaggctacactaaaaagtagcataaagaagccacaaaatagaaaatccgttcctgttgaggttgctaatgaacatgaagcatcaagtggacaggggatttgtactcctggaggtcaacccgaaagaaggaaagtgcagtggacagataattgtggtagtgagcttgtggaaattcgagaatttgagcccagtgaagtggatggatcagatgatgaatttgatagtggaaatgacagaacttgttcctgtgcgattatgtaaattggagtttcattaagttgataggttcatcgggtcattcactgctaacatccatcactcgatttgagacaaaagaggcaaaggtttcagttctgtggagatatatacacaaacatcttgcctgagtgatgtgtctgttattgcttgctgcggctttaaattttgctcctctgcccctcatcaatttgtataattcttgtcatgtgtgaattctttgcctttgattcatcatttttatgctactttatgttcttatttttataaggattaacaaagttttctttctatgatctggcattatcttgaaaaaaggtaatacaagtgtaagattttgtaaaaaaatcagtgtgccaacctggtaacaaacttgtgatgagactaggatttgttaaggcttatctgttgaaagtat

SEQ ID NO: 55166 - protein, 207 aa, Glycine max
  peptide (1)..(207): Ceres Seq. ID no. 15175698
MLLAVEGGGFFSASASGYTKGLSLLLLGQRNEDKPMRVAPWNQYQLVDQESDPELQLASTKNRLSRGCASFVCFGRTSAGLDTPSPLKVGPAQQHDVSPGPLVSNKGKDPSAHVDDESDNRKATLKSSIKKPQNRKSVPVEVANEHEASSGQGICTPGGQPERRKVQWTDNCGSELVEIREFEPSEVDGSDDEFDSGNDRTCSCAIM

SEQ ID NO: 55167 - protein, 172 aa, Glycine max
  peptide (1)..(172): Ceres Seq. ID no. 15175699
MRVAPWNQYQLVDQESDPELQLASTKNRLSRGCASFVCFGRTSAGLDTPSPLKVGPAQQHDVSPGPLVSNKGKDPSAHVDDESDNRKATLKSSIKKPQNRKSVPVEVANEHEASSGQGICTPGGQPERRKVQWTDNCGSELVEIREFEPSEVDGSDDEFDSGNDRTCSCAIM

SEQ ID NO: 55168 - DNA, 1448 bp, Glycine max
  misc_feature (1)..(1448): Ceres Seq. ID no. 15176596
ggcattggcttacaaatctcaaccaccctatcttaaaatcttctgtgcaaccagaaaaaaacggaccttgccctcagtctcttttttccatcatcacttcattaaacattattcactctctttctctgtctctagtttttacaacatggctactgcggtaactgctgcagtgtcctttccagccaccaagtccacttctctttcaagcagaacctctatcactgccccagatagaattgtcttcaagaaggtttcgttgcaatacagagatgtttcaaccagtggaagggtagtttcaatcagagcacaagtgaccacagaggcacctgctaaggttgaaaaggaatcaaagaaacaggaggaaggtgtgatcgtgaacaagttcaaacccaagaacccatatattggtaggtgtcttctcaacacaaagatcactggggatgatgcacctggagaaacttggcacatggtcttcagcactgagggagaagttccttacagagaaggacaatcaatcggggtaattcctgatggggttgacaagaatggcaagcctcacaagctgagattgtattcaattgctagcagtgcccttggtgattttggagattccaaaactgtttctttatgcgtgaaacgtcttgtgtacacaaatgaaaacggagaacttgtcaaaggagtttgctcaaatttcttgtgcgacttgaagccaggagccgaagtaaagattactggacctgttggtaaagaaatgcttatgccaaaagatcctaatgcaaccgtcatcatgttggcaactggaacaggaattgccccattccgctcatttttatggaaaatgttctttgagaagcatgatgattacaagttcaatggtttggcatggctcttcttgggtgtccccacaagcagctcactactttataaggaggaatttgaaaagatgaaggagaaagcacctgacaacttcaggcttgactttgctgtgagcagagagcaaacaaacgaaaaaggagagaaaatgtacatccaaacacgaatggctcaatatgcagaagagttatgggaattactgaagaaagataacacttttgtctatatgtgtggactgaagggaatggaaaagggtatagatgacataatggtttcattggctgcaaaagatggtattgattggattgagtacaagaggcaattgaagaaggcagagcaatggaatgtcgaagtctactaattaatatcacttgcacttgctcagatatcatgccctactttgtgcagcagcaaatctattttgctgtcatgcgctgtgtagatagattacggccctgtaatttttctatgatgggattttttaccttccttatgaacgtacaagcttcattgcaacagccttgcatgaaataattttgaggatctatcaatatagatgaagtcaacttctgttt

SEQ ID NO: 55169 - protein, 410 aa, Glycine max
  peptide (1)..(410): Ceres Seq. ID no. 15176597
ALAYKSQPPYLKIFCATRKKRTLPSVSFFHHHFIKHYSLSFSVSSFYNMATAVTAAVSFPATKSTSLSSRTSITAPDRIVFKKVSLQYRDVSTSGRVVSIRAQVTTEAPAKVEKESKKQEEGVIVNKFKPKNPYIGRCLLNTKITGDDAPGETWHMVFSTEGEVPYREGQSIGVIPDGVDKNGKPHKLRLYSIASSALGDFGDSKTVSLCVKRLVYTNENGELVKGVCSNFLCDLKPGAEVKITGPVGKEMLMPKDPNATVIMLATGTGIAPFRSFLWKMFFEKHDDYKFNGLAWLFLGVPTSSSLLYKEEFEKMKEKAPDNFRLDFAVSREQTNEKGEKMYIQTRMAQYAEELWELLKKDNTFVYMCGLKGMEKGIDDIMVSLAAKDGIDWIEYKRQLKKAEQWNVEVY

SEQ ID NO: 55170 - protein, 362 aa, Glycine max
  peptide (1)..(362): Ceres Seq. ID no. 15176598
MATAVTAAVSFPATKSTSLSSRTSITAPDRIVFKKVSLQYRDVSTSGRVVSIRAQVTTEAPAKVEKESKKQEEGVIVNKFKPKNPYIGRCLLNTKITGDDAPGETWHMVFSTEGEVPYREGQSIGVIPDGVDKNGKPHKLRLYSIASSALGDFGDSKTVSLCVKRLVYTNENGELVKGVCSNFLCDLKPGAEVKITGPVGKEMLMPKDPNATVIMLATGTGIAPFRSFLWKMFFEKHDDYKFNGLAWLFLGVPTSSSLLYKEEFEKMKEKAPDNFRLDFAVSREQTNEKGEKMYIQTRMAQYAEELWELLKKDNTFVYMCGLKGMEKGIDDIMVSLAAKDGIDWIEYKRQLKKAEQWNVEVY

SEQ ID NO: 55171 - protein, 255 aa, Glycine max
  peptide (1)..(255): Ceres Seq. ID no. 15176599
MVFSTEGEVPYREGQSIGVIPDGVDKNGKPHKLRLYSIASSALGDFGDSKTVSLCVKRLVYTNENGELVKGVCSNFLCDLKPGAEVKITGPVGKEMLMPKDPNATVIMLATGTGIAPFRSFLWKMFFEKHDDYKFNGLAWLFLGVPTSSSLLYKEEFEKMKEKAPDNFRLDFAVSREQTNEKGEKMYIQTRMAQYAEELWELLKKDNTFVYMCGLKGMEKGIDDIMVSLAAKDGIDWIEYKRQLKKAEQWNVEVY

SEQ ID NO: 55172 - DNA, 1377 bp, Glycine max
  misc_feature (1)..(1377): Ceres Seq. ID no. 15170994
agtgcaggcttcagtcatgccaggctttgggagcctcttacctcaaagattaaagcaattagctcaaacaataacaggttctgctggcaaaaatcttggccttgataactcagtttttggcagagttaaagaagtcagattatcttctttcttgaagaatacactacatgcttcctcaccttctcctgctcctgctccatctccacagttaattgatcactctgagccatcaacttcaccacatcgtgctagtccttacactccaatatcaccagcagctgctgaacaacctccttgtttcgattgtgaagtaccctcacctgcaccttctatggtgcctgcgcatcctccagatccctgtctatatagtggcttccttcatcatccaatcccttcgccaaaatcttattctaaaccatcctttccccctgattattcacctgctgctgcccctacctcaaattctgctagccacaccagtgaggaagcttctgatccgtctcgtgaagccgaggtgtcccatggatccaagcttcggcagggtgaagagacgtctaataaactggtgtctcatctacttgctccatcctctttatcttcagcgagtggtgatttccgtggggaaatgttgctaatgggattttgtatggtattaatttcatttgtttttctcaatgataccacattttgatgatatggagatgttgcctgctgaaggatcctggagacatgcgaggactactacaacagcctaatgacgtgctttgcaagttttgtttagataatggaaggaagaaacttccgtccaattttaatttgccttaattttacttcaagtatgcaaccgaccaccatgtaaagctccggtgggtaaagggtcaaagccagaaagttggcaggcctctcatctagtactacatatttctatgaagcatgaaattgatcccaaaggggtcaactaacaaacatcatgatcgagagcaaaattggctttcagatgtcagaagaaccatcccttgtattcgatcaagtgtatgatatgcaaagaaatgtgggttctttgagcatctgaatctgtaaaacaaccatagtaatatctagcaaaaagataaattagtcacacttgtatagctctatgctcccccccttctccctacttttgaaagaaaataagaattcaaattcatccatgaagaaacgcgtgttctttgtagtctagacagatcttttactctggaaaaaagtggtcaaaggaaaacatatagagaaaagtgaatgttaactacatgtgttagagtttcttgggactagcaagtgtcaagataaagaaaaataataagagggttcggaacagatgttctgcccagatttctgttt

SEQ ID NO: 55173 - protein, 229 aa, Glycine max
  peptide (1)..(229): Ceres Seq. ID no. 15170995
VQASVMPGFGSLLPQRLKQLAQTITGSAGKNLGLDNSVFGRVKEVRLSSFLKNTLHASSPSPAPAPSPQLIDHSEPSTSPHRASPYTPISPAAAEQPPCFDCEVPSPAPSMVPAHPPDPCLYSGFLHHPIPSPKSYSKPSFPPDYSPAAAPTSNSASHTSEEASDPSREAEVSHGSKLRQGEETSNKLVSHLLAPSSLSSASGDFRGEMLLMGFCMVLISFVFLNDTTF

SEQ ID NO: 55174 - protein, 224 aa, Glycine max
  peptide (1)..(224): Ceres Seq. ID no. 15170996
MPGFGSLLPQRLKQLAQTITGSAGKNLGLDNSVFGRVKEVRLSSFLKNTLHASSPSPAPAPSPQLIDHSEPSTSPHRASPYTPISPAAAEQPPCFDCEVPSPAPSMVPAHPPDPCLYSGFLHHPIPSPKSYSKPSFPPDYSPAAAPTSNSASHTSEEASDPSREAEVSHGSKLRQGEETSNKLVSHLLAPSSLSSASGDFRGEMLLMGFCMVLISFVFLNDTTF

SEQ ID NO: 55175 - protein, 119 aa, Glycine max
  peptide (1)..(119): Ceres Seq. ID no. 15170997
MVPAHPPDPCLYSGFLHHPIPSPKSYSKPSFPPDYSPAAAPTSNSASHTSEEASDPSREAEVSHGSKLRQGEETSNKLVSHLLAPSSLSSASGDFRGEMLLMGFCMVLISFVFLNDTTF

SEQ ID NO: 55176 - DNA, 1857 bp, Glycine max
  misc_feature (1)..(1857): Ceres Seq. ID no. 15169274
aggattcaaatccatttttcagtccatatgttgtccaagcttgaagaatgtaggaacgagaatgtctcatcaagaaggaaagagtagtcaggatttagtgccaggtaacatggaacatggaatagatgctactccaataacctgttgggcagaaaacaatagcctttccaaactgtgtttgcaatcaaataagtttgaagtatctactgggggaaatgatgccggtctgtcctcgcagcctaagattaaacctctaaatttttttaactgtcatgaaagcagcaaaaacaacccagtggagactaaaaattattccatcttgggccatagtaaggacaaggaagaagtggcatcacattcatcttcaaccaaacaaaatacagataataatgataacatcgattctaatgtgctatgtgatagaaaggaagaagagaatatctgtcacagaagagataatctgggaagtctgtggataactcgtttttctccaaaattcactgctcccttgagagaacaacctgccaatgacacagaggtctctactgatcttaaggaagataagggaaataatgatcataaatcaatgtatttgttcaaacccctttcatcttccccaggattcagaaatttagagccaacggcttcaatgtttggaaggagatttggtgccatcaaacaaatcataccaacaaatgcaacagatactaccacacaggttaatatgttgtgttttttttgtggaacaagaggacatcaactctctgattgcttagctattgcagaaaacaagttagaagatctccagaagaatatagattcatatggaggattggaagaacatcattgtctatgcatcaaatgttttcagcccaaccattgggcaatttcatgtcccacttcaatctcaactaggaaacatgaactgaaagctaatgccttggtcaatgattgtggaaaacatttaatctcgatcaatgaagggagtgccaggctgctgactgatgaggatgaccgagttttatctggaggttctattaatgatgaaacagatcaacgagcaggtcaaaatattaatttgaagtggaaatcaaatgaaattataacccataaggtagggtgcaatgcatcattcaagaaataccgtggtttgagttcagaggaaaacaaattcagagaaaatcctacattatctccatccaaattggctgaaaggcagatttcacaggtgccaaaggaaatatttgaagcagtaaaaaagcttcaattgtcccgcaccgacatcttgaaatggatcaatactcgtgggtcaatctctcaacttgatggttttttcctacgcctgcggctcggaaagtgggaagaagggccagggggaactggataccatgtggcatacataaatgagacccagtcccagagacagtgttcagagcagaatacaagaaaatctctctcagtgaaagtggggagtatcaagtgtatggtcgaaagtcagtatatatccaatcatgattttcttgaggaagaaatcatggaatggtggtccaacacctcacaagctggtgccgagatttcatctgaagaatatataatagaaaaatttaaaaagaaagaaatgttaggtctctaggcatttattaaattaaatgttaatatattcataagcaaggttactctcacttttagaaaaaagttatgtttcctttttattatccaattaattgtatatcaaaggaagcttaaaaaattgaagatggtggcaactcaccatcatgattttgtgaatgtcttaccaaaacattcctatacaaagaattgctttatcttacgcaatgaaagttatagtaattcatt

SEQ ID NO: 55177 - protein, 543 aa, Glycine max
  peptide (1)..(543): Ceres Seq. ID no. 15169275
GFKSIFQSICCPSLKNVGTRMSHQEGKSSQDLVPGNMEHGIDATPITCWAENNSLSKLCLQSNKFEVSTGGNDAGLSSQPKIKPLNFFNCHESSKNNPVETKNYSILGHSKDKEEVASHSSSTKQNTDNNDNIDSNVLCDRKEEENICHRRDNLGSLWITRFSPKFTAPLREQPANDTEVSTDLKEDKGNNDHKSMYLFKPLSSSPGFRNLEPTASMFGRRFGAIKQIIPTNATDTTTQVNMLCFFCGTRGHQLSDCLAIAENKLEDLQKNIDSYGGLEEHHCLCIKCFQPNHWAISCPTSISTRKHELKANALVNDCGKHLISINEGSARLLTDEDDRVLSGGSINDETDQRAGQNINLKWKSNEIITHKVGCNASFKKYRGLSSEENKFRENPTLSPSKLAERQISQVPKEIFEAVKKLQLSRTDILKWINTRGSISQLDGFFLRLRLGKWEEGPGGTGYHVAYINETQSQRQCSEQNTRKSLSVKVGSIKCMVESQYISNHDFLEEEIMEWWSNTSQAGAEISSEEYIIEKFKKKEMLGL

SEQ ID NO: 55178 - protein, 523 aa, Glycine max
  peptide (1)..(523): Ceres Seq. ID no. 15169276
MSHQEGKSSQDLVPGNMEHGIDATPITCWAENNSLSKLCLQSNKFEVSTGGNDAGLSSQPKIKPLNFFNCHESSKNNPVETKNYSILGHSKDKEEVASHSSSTKQNTDNNDNIDSNVLCDRKEEENICHRRDNLGSLWITRFSPKFTAPLREQPANDTEVSTDLKEDKGNNDHKSMYLFKPLSSSPGFRNLEPTASMFGRRFGAIKQIIPTNATDTTTQVNMLCFFCGTRGHQLSDCLAIAENKLEDLQKNIDSYGGLEEHHCLCIKCFQPNHWAISCPTSISTRKHELKANALVNDCGKHLISINEGSARLLTDEDDRVLSGGSINDETDQRAGQNINLKWKSNEIITHKVGCNASFKKYRGLSSEENKFRENPTLSPSKLAERQISQVPKEIFEAVKKLQLSRTDILKWINTRGSISQLDGFFLRLRLGKWEEGPGGTGYHVAYINETQSQRQCSEQNTRKSLSVKVGSIKCMVESQYISNHDFLEEEIMEWWSNTSQAGAEISSEEYIIEKFKKKEMLGL

SEQ ID NO: 55179 - protein, 507 aa, Glycine max
  peptide (1)..(507): Ceres Seq. ID no. 15169277
MEHGIDATPITCWAENNSLSKLCLQSNKFEVSTGGNDAGLSSQPKIKPLNFFNCHESSKNNPVETKNYSILGHSKDKEEVASHSSSTKQNTDNNDNIDSNVLCDRKEEENICHRRDNLGSLWITRFSPKFTAPLREQPANDTEVSTDLKEDKGNNDHKSMYLFKPLSSSPGFRNLEPTASMFGRRFGAIKQIIPTNATDTTTQVNMLCFFCGTRGHQLSDCLAIAENKLEDLQKNIDSYGGLEEHHCLCIKCFQPNHWAISCPTSISTRKHELKANALVNDCGKHLISINEGSARLLTDEDDRVLSGGSINDETDQRAGQNINLKWKSNEIITHKVGCNASFKKYRGLSSEENKFRENPTLSPSKLAERQISQVPKEIFEAVKKLQLSRTDILKWINTRGSISQLDGFFLRLRLGKWEEGPGGTGYHVAYINETQSQRQCSEQNTRKSLSVKVGSIKCMVESQYISNHDFLEEEIMEWWSNTSQAGAEISSEEYIIEKFKKKEMLGL

SEQ ID NO: 55180 - DNA, 1611 bp, Glycine max
  misc_feature (1)..(1611): Ceres Seq. ID no. 15169005
gatttgtcgtagtttattttcatccacaccacagagtaaaactacaacctcaggaggagaatgttcctctgaatccgaagcccgtgctctacccagcgactttgccagaagtccaccatttcttgatttttggaggttaacagtcttcatattcaacactttgctatttcttaacttcaagtgcaagagaacaaagagcataaaatcctttagagtgtcagcagtcaagaatgcatacaggaatggcttcgttaactcaactccattataaagtacatgcctccactctcagaagggtgcattcaagaagccaagggctattgaagtctggaaaactatcccaactccaacgatctgcctttcctagtattcacattaatcaatcctgcatatgctgcacaaagttaactccatgggagtcatcacctgtcacatatgctcctactgataatcaaattgatacttttttgccgcaaaatgccaatatatttgaaactcttgaatctagtaaaacagctgattcatcaataacaaatgctgaaggggttgtagagacagaatctcagccaggcctgcagcttcaggttttcaaatggccattgtggcttttgggcccttccgttctcctagcaactggcatggtcccaacattgtggttaccgatatcatcaatctttctcggccccaatatagccagcctactttccttaattggacttgattgcatatttaacctcggtgcaaccctttttctcctcatggctgatgcttgttcacgaccaaagtctccaacacaagactgcaaaagcaaggctcccttcagttaccaattctggaacattgttgcaactcttaccggttttgttatcccactgttgatgatgtttggatctcagaagggttttctccaacctcaactacctttcatcccatttgcagttctacttggtccatatcttcttcttttgtctgtacagtttctgactgagatgttgacttggcattggcaatcaccagtctggcttgttacccctgtcatttacgagtcctaccgtgtcttgcagctaatgaggggattaaagcttggggttgagctcagtgcaccggcatgggtgatgcatacaattagggggctggtttgctggtgggtgctaattcttggtctgcagttgatgagggttgcttggtttgctggcttagctgcacgagctcgtaagcagcaattgtcttctgatacttctagtgttaatggtgattagtgattaatacattgtaaaaatattctgaaagagacagattatagaataagtagatgttgtttattttagttatggatgttttccatcccatccatataccatagtgatagtggtacacatctaatagatatatacacaagtaaattgcatacaagacttactttatcactgggctttatgctgtatcaatggttttgtctgtgctatcttcaagttgtgaacaaagtggtttatctgtttttacctcaacttatgaagatggaaaaattatatagtggttggttcaagtaaaagtttatggatttattatttttgataaattataggtaataaaataagttatattaattag

SEQ ID NO: 55181 - protein, 342 aa, Glycine max
  peptide (1)..(342): Ceres Seq. ID no. 15169006
MHTGMASLTQLHYKVHASTLRRVHSRSQGLLKSGKLSQLQRSAFPSIHINQSCICCTKLTPWESSPVTYAPTDNQIDTFLPQNANIFETLESSKTADSSITNAEGVVETESQPGLQLQVFKWPLWLLGPSVLLATGMVPTLWLPISSIFLGPNIASLLSLIGLDCIFNLGATLFLLMADACSRPKSPTQDCKSKAPFSYQFWNIVATLTGFVIPLLMMFGSQKGFLQPQLPFIPFAVLLGPYLLLLSVQFLTEMLTWHWQSPVWLVTPVIYESYRVLQLMRGLKLGVELSAPAWVMHTIRGLVCWWVLILGLQLMRVAWFAGLAARARKQQLSSDTSSVNGD

SEQ ID NO: 55182 - protein, 338 aa, Glycine max
  peptide (1)..(338): Ceres Seq. ID no. 15169007
MASLTQLHYKVHASTLRRVHSRSQGLLKSGKLSQLQRSAFPSIHINQSCICCTKLTPWESSPVTYAPTDNQIDTFLPQNANIFETLESSKTADSSITNAEGVVETESQPGLQLQVFKWPLWLLGPSVLLATGMVPTLWLPISSIFLGPNIASLLSLIGLDCIFNLGATLFLLMADACSRPKSPTQDCKSKAPFSYQFWNIVATLTGFVIPLLMMFGSQKGFLQPQLPFIPFAVLLGPYLLLLSVQFLTEMLTWHWQSPVWLVTPVIYESYRVLQLMRGLKLGVELSAPAWVMHTIRGLVCWWVLILGLQLMRVAWFAGLAARARKQQLSSDTSSVNGD

SEQ ID NO: 55183 - protein, 206 aa, Glycine max
  peptide (1)..(206): Ceres Seq. ID no. 15169008
MVPTLWLPISSIFLGPNIASLLSLIGLDCIFNLGATLFLLMADACSRPKSPTQDCKSKAPFSYQFWNIVATLTGFVIPLLMMFGSQKGFLQPQLPFIPFAVLLGPYLLLLSVQFLTEMLTWHWQSPVWLVTPVIYESYRVLQLMRGLKLGVELSAPAWVMHTIRGLVCWWVLILGLQLMRVAWFAGLAARARKQQLSSDTSSVNGD

SEQ ID NO: 55184 - DNA, 1373 bp, Glycine max
  misc_feature (1)..(1373): Ceres Seq. ID no. 14311625
atccaacttgttcttatatgatgaataccttgatgagtacatgtccacaatagctgtggaacatttaccacaaaataggccactatgggaacttcacattataaaatacccaacaagcaatgctaagggtaccttggtgttcaaactccaccatgcccttggggatggtttttctctcatgggtgcccttctttcatgcatgcaaagagctgacaacacctctcttcccttcacactcccatcaagccaaaggcccaaagcatcatcaatttccaacaccaaagggtttttcaagaaattgccctccattttcttccaaactatatccgaatttggatggagtttcttgaaaagtaagttgattgaagatgatcaaacaccaataaggtcttgtgcggaagacttcaagactcgccaaatgaccatctcagatgtcaccttctcattggatcttatcaaagacgtgaaatccaaacttggagtgagcataaatgatgtgcttgctggagtaattttttttggcattcggctatacatgcaagaaattaatctgaaatcaagccaaacccaatccacagcattggtgttgctgaacacaagaaacattgaaggttacaagtctgttaaggagatgattgagaagaccaatagtcgttctgcatgggggaatcaatatgcctttttgcatgtttcaattccagagcttagtgactccaaatatgcaaacccacttgagtttataagggaagcccataaggatatgaccaaaaagaaaaattctttggccactcctctcactggcatgcttctagatatgctcagaaaactcaggggtcctgaggctgcagctagctacttacgcagtactttgagaaactcaagcacaacaatctcaaacatcattggaccagtggagcaaatggctgtggctaatcatccaattaaagggttttacttcatggtagctggttcacctgagagtctcaccatgacgatcatgagctacatgggaaagataagaattgcatttggagtagagaagaacttcatcgacaagcaattattcaagtcgtgtttggagaattctcttgagatgataaaggaagcagcaaaaaagatttccgcataaaatcaaatatggaagatatgtactttttttgttgttgttgtggaagatatgtactaccactatattctatctatattcttgttaatatttaattattttatttaaatatatgtgatgtggtgattctgtaatagaaatttgtttctgagtggaatgtattttattgaactggaacagtatcattacggccgggcatggctgtttttagttgggaagtccctacattacatcaaaaagtagaatt

SEQ ID NO: 55185 - protein, 375 aa, Glycine max
  peptide (1)..(375): Ceres Seq. ID no. 14311626
SNLFLYDEYLDEYMSTIAVEHLPQNRPLWELHIIKYPTSNAKGTLVFKLHHALGDGFSLMGALLSCMQRADNTSLPFTLPSSQRPKASSISNTKGFFKKLPSIFFQTISEFGWSFLKSKLIEDDQTPIRSCAEDFKTRQMTISDVTFSLDLIKDVKSKLGVSINDVLAGVIFFGIRLYMQEINLKSSQTQSTALVLLNTRNIEGYKSVKEMIEKTNSRSAWGNQYAFLHVSIPELSDSKYANPLEFIREAHKDMTKKKNSLATPLTGMLLDMLRKLRGPEAAASYLRSTLRNSSTTISNIIGPVEQMAVANHPIKGFYFMVAGSPESLTMTIMSYMGKIRIAFGVEKNFIDKQLFKSCLENSLEMIKEAAKKISA

SEQ ID NO: 55186 - protein, 362 aa, Glycine max
  peptide (1)..(362): Ceres Seq. ID no. 14311627
MSTIAVEHLPQNRPLWELHIIKYPTSNAKGTLVFKLHHALGDGFSLMGALLSCMQRADNTSLPFTLPSSQRPKASSISNTKGFFKKLPSIFFQTISEFGWSFLKSKLIEDDQTPIRSCAEDFKTRQMTISDVTFSLDLIKDVKSKLGVSINDVLAGVIFFGIRLYMQEINLKSSQTQSTALVLLNTRNIEGYKSVKEMIEKTNSRSAWGNQYAFLHVSIPELSDSKYANPLEFIREAHKDMTKKKNSLATPLTGMLLDMLRKLRGPEAAASYLRSTLRNSSTTISNIIGPVEQMAVANHPIKGFYFMVAGSPESLTMTIMSYMGKIRIAFGVEKNFIDKQLFKSCLENSLEMIKEAAKKISA

SEQ ID NO: 55187 - protein, 316 aa, Glycine max
  peptide (1)..(316): Ceres Seq. ID no. 14311628
MGALLSCMQRADNTSLPFTLPSSQRPKASSISNTKGFFKKLPSIFFQTISEFGWSFLKSKLIEDDQTPIRSCAEDFKTRQMTISDVTFSLDLIKDVKSKLGVSINDVLAGVIFFGIRLYMQEINLKSSQTQSTALVLLNTRNIEGYKSVKEMIEKTNSRSAWGNQYAFLHVSIPELSDSKYANPLEFIREAHKDMTKKKNSLATPLTGMLLDMLRKLRGPEAAASYLRSTLRNSSTTISNIIGPVEQMAVANHPIKGFYFMVAGSPESLTMTIMSYMGKIRIAFGVEKNFIDKQLFKSCLENSLEMIKEAAKKISA

SEQ ID NO: 55188 - DNA, 1733 bp, Glycine max
  misc_feature (1)..(1733): Ceres Seq. ID no. 15176200
atagacatctgcgatgatattgctatcaaacacttcacgtatataccaatgctgtttgtttcagtcgcactctgcaatcctatcttgtttgcatgtcaaaatctcattcatcatcatcttcttcttaaaagttaaaaggttaagagagagagagaaagatgagtagcgtgttggagcatggtgttgtgggatgttgcaaatcagggccaggctatgctaccccactggaagccatgtctggtccaagagagtctcttatttatgtaactgctgtctacacagggacaggaatagagaagccggactatttggccacagtggacatagatccaaactctccaacttattccaaagtcatccataggcttcgtgttccttatttaggtgacgaattgcatcacactggttggaattcatgcagctcttgccatggagacccctcggcagaccgacgatttctcatcgcacctgcactcgtttcaggtcgcatatatgtggttgatgtgaaaacaaatccaagggctccatctttgcacaaagttgttgagcctgccgatatcatacagaagactggattagcttatccacacacatctcactgccttgcttctggtgacataatgatctcatgtcttggagataaagatggaaatgctgcaggaaatggatttcttcttcttgattcagagtttaatgtgaagggaaggtgggagaaaccgggtcacagtccactatttggatatgacttttggtaccaaccacgtcacaataccatgattagcacatcatggggtgctcctagtgcttttacaaaaggttttaacttacagcatctttctgatggattatacgggaggcatctccatgtatatagctggcctgggggcgaactgagacaaacactggaccttggtgattcagggcttttacccttagagataaggttcttgcatgatcctgctaaagatacaggttttgtcgggagtgcattgacaagtaacatgatacgattttttaagacccaagatgaatcatggagccatgaggttgccatatcagtgaaaccactgaaagtgcaaaactggattcttcctgaaatgcctgggcttataactgattttttgatttctcttgatgatcggtttctgtactttgtaaactggcttcatggggatatcagacagtataacattgagaaccttaaaaatcctaaactgaccggacaagtatgggttggtggacttatccagaaaggaagccctgtagtagctataactgatgatggtgaaacttggcaagctgaagtgcctgagattcagggcaacaagttgagagggggccctcagatgattcaattgagtttagatgggaaacggctctatgctaccaactcactatttagtacatgggacaaacagttttatccagagtttgtccagaaaggctcccacataatacagattgatgttgatactgagaaaggtggcctgaaaatcaaccccaacttctttgtggactttggagctgagcctgatggtccttctcttgcccatgagatgagatatcctggtggtgactgcacttcagatatatggatttaagcttacgtgtcgttatttccctttaataaacggtatctgtcatatggttgtaatgagctattatgctttataaataatgctcctgtgaatcttcaacatttcgaagacagtttgcagttgcataaatatatg

SEQ ID NO: 55189 - protein, 480 aa, Glycine max
  peptide (1)..(480): Ceres Seq. ID no. 15176201
MSSVLEHGVVGCCKSGPGYATPLEAMSGPRESLIYVTAVYTGTGIEKPDYLATVDIDPNSPTYSKVIHRLRVPYLGDELHHTGWNSCSSCHGDPSADRRFLIAPALVSGRIYVVDVKTNPRAPSLHKVVEPADIIQKTGLAYPHTSHCLASGDIMISCLGDKDGNAAGNGFLLLDSEFNVKGRWEKPGHSPLFGYDFWYQPRHNTMISTSWGAPSAFTKGFNLQHLSDGLYGRHLHVYSWPGGELRQTLDLGDSGLLPLEIRFLHDPAKDTGFVGSALTSNMIRFFKTQDESWSHEVAISVKPLKVQNWILPEMPGLITDFLISLDDRFLYFVNWLHGDIRQYNIENLKNPKLTGQVWVGGLIQKGSPVVAITDDGETWQAEVPEIQGNKLRGGPQMIQLSLDGKRLYATNSLFSTWDKQFYPEFVQKGSHIIQIDVDTEKGGLKINPNFFVDFGAEPDGPSLAHEMRYPGGDCTSDIWI

SEQ ID NO: 55190 - protein, 455 aa, Glycine max
  peptide (1)..(455): Ceres Seq. ID no. 15176202
MSGPRESLIYVTAVYTGTGIEKPDYLATVDIDPNSPTYSKVIHRLRVPYLGDELHHTGWNSCSSCHGDPSADRRFLIAPALVSGRIYVVDVKTNPRAPSLHKVVEPADIIQKTGLAYPHTSHCLASGDIMISCLGDKDGNAAGNGFLLLDSEFNVKGRWEKPGHSPLFGYDFWYQPRHNTMISTSWGAPSAFTKGFNLQHLSDGLYGRHLHVYSWPGGELRQTLDLGDSGLLPLEIRFLHDPAKDTGFVGSALTSNMIRFFKTQDESWSHEVAISVKPLKVQNWILPEMPGLITDFLISLDDRFLYFVNWLHGDIRQYNIENLKNPKLTGQVWVGGLIQKGSPVVAITDDGETWQAEVPEIQGNKLRGGPQMIQLSLDGKRLYATNSLFSTWDKQFYPEFVQKGSHIIQIDVDTEKGGLKINPNFFVDFGAEPDGPSLAHEMRYPGGDCTSDIWI

SEQ ID NO: 55191 - protein, 326 aa, Glycine max
  peptide (1)..(326): Ceres Seq. ID no. 15176203
MISCLGDKDGNAAGNGFLLLDSEFNVKGRWEKPGHSPLFGYDFWYQPRHNTMISTSWGAPSAFTKGFNLQHLSDGLYGRHLHVYSWPGGELRQTLDLGDSGLLPLEIRFLHDPAKDTGFVGSALTSNMIRFFKTQDESWSHEVAISVKPLKVQNWILPEMPGLITDFLISLDDRFLYFVNWLHGDIRQYNIENLKNPKLTGQVWVGGLIQKGSPVVAITDDGETWQAEVPEIQGNKLRGGPQMIQLSLDGKRLYATNSLFSTWDKQFYPEFVQKGSHIIQIDVDTEKGGLKINPNFFVDFGAEPDGPSLAHEMRYPGGDCTSDIWI

SEQ ID NO: 55192 - DNA, 1777 bp, Glycine max
  misc_feature (1)..(1777): Ceres Seq. ID no. 13594023
acaatcgctctcaatctttccagattttctcccaaaccgttcaaacccgtatcgcgtgtcaaattgttcttctgattttctcattgatcgcgattatcgcatctcaaatcgaacttgaatcagagaagacgttgaatttttgaaaagtgagaaaagagggattctggaacgtctctatcgtggtttgtcagtaccctatctcaaacgaaaatgtcatctttatatggaggggaatccaagaggtacaataatatacccagaggacaccatcatttgacaacacagaagaaacaggagattagggaagcctttgaattattcaatactgatggctcaggtactattgatgccaaggatctgaatgttgccatgagggccattggatttgaaatgacagaagagctcattaatcaaatgaaagcagatttggacaaggatggaagtggagcaattgattatgaagaatttgagtacatgatgacaaccaaaataggagagcgggacagtaaagagggaaagatatctgcatcagacatcaagtgcattgcgaaagagccaggtcaaaatttcactaacagagacattcaggagatggttgacgaagcagaccaagatagtaagttattccaatcttatccttgtcaacattctaattttacagcaaaacttttacttctaatactgtggatttttattctgaggtttactgggtgtggatgcatgggagtgatgggaccatggacttcagatcttgctgacataatgtgtgtatataaaaaaaatactatcatttctttgaaattcaaattggccgttttctgcattaaaataaataaatggacaatacagaggccaaaagattaaaaaaaaaagtattcatgaatcattatgataagaggtcactaaattgtatacaagactcactggaaaaataagtagtttgtagttttacctcagtaacactaatcagtttaccaaaaaaatgatacaaagtggtatatatgtttgaaaaattaaataggaatatttcttattcaaaagttatttttcaatgtagtttttaaaagtatattgggatgtttgcattggaatcataatgctcaggggaggtcaatgtattatacactcttgtctgttggatgacaaattctattatataaatgataaaggaacactatatttgccattattttatttttaatgatagatttagtgatcaaccttgacttgttttatttgttcgacattgcataggtttaatgtctgttaatttattattcatgttaattaccatagaattgaaaatatcacagcctgaggtcttaaaaggaaaaggaagaaaacattaccttttgcgaaaagtattttaaagcttgctaggatagaggcttaatcgtggttcaattataatttataacaggggtgcctcattttttattttgcttccccattagtgtactatttcttctcatgattatcagatgttatatctatttttaagttataaaatatgcagattgtcctgaagttagtgcagaggagtttataaggatgttgttcgatcccccctactacggccactaatcgtacagaaattaatgcagtcatattttcataaatttaaattggagatgctagttatgatcaaacaacctcgaacctcgaagttatcgtgtgtaatttttaatttcttttatcaatctatatattgttcattttcataaatttaaattggagatcctagttatgatcaaacaacctcgaagttctcgtgttt

SEQ ID NO: 55193 - protein, 217 aa, Glycine max
  peptide (1)..(217): Ceres Seq. ID no. 13594024
MSSLYGGESKRYNNIPRGHHHLTTQKKQEIREAFELFNTDGSGTIDAKDLNVAMRAIGFEMTEELINQMKADLDKDGSGAIDYEEFEYMMTTKIGERDSKEGKISASDIKCIAKEPGQNFTNRDIQEMVDEADQDSKLFQSYPCQHSNFTAKLLLLILWIFILRFTGCGCMGVMGPWTSDLADIMCVYKKNTIISLKFKLAVFCIKINKWTIQRPKD

SEQ ID NO: 55194 - protein, 164 aa, Glycine max
  peptide (1)..(164): Ceres Seq. ID no. 13594025
MRAIGFEMTEELINQMKADLDKDGSGAIDYEEFEYMMTTKIGERDSKEGKISASDIKCIAKEPGQNFTNRDIQEMVDEADQDSKLFQSYPCQHSNFTAKLLLLILWIFILRFTGCGCMGVMGPWTSDLADIMCVYKKNTIISLKFKLAVFCIKINKWTIQRPKD

SEQ ID NO: 55195 - protein, 157 aa, Glycine max
  peptide (1)..(157): Ceres Seq. ID no. 13594026
MTEELINQMKADLDKDGSGAIDYEEFEYMMTTKIGERDSKEGKISASDIKCIAKEPGQNFTNRDIQEMVDEADQDSKLFQSYPCQHSNFTAKLLLLILWIFILRFTGCGCMGVMGPWTSDLADIMCVYKKNTIISLKFKLAVFCIKINKWTIQRPKD

SEQ ID NO: 55196 - DNA, 1291 bp, Glycine max
  misc_feature (1)..(1291): Ceres Seq. ID no. 14308413
aatatgacgcgctccggcgccgccaggggtggtaagaccctgccgccgcgggcttcagcccgcgatgatgagatcaatgacacgattccgactttgggatcggagactaattttaggaatgggaagtatttgtattactcgagaggtggggattactgcaagggaatgaatcattatttgtggagtttcttgtgtggattgggggaagctatgtttttgaacaggacttttgttatggatttgagtgtttgtttggcttcaacttataaccctagtaacaaggatgaggaggggaaggattttaggtactacttcgatttcgagcatttgaaggagacggcttcgtttgtggaggaaggtgagtttttgagggattggaagaattgggataaaacgcatttgaagaagaagaagattcctgttaggaaggttgtcaatcacaaggtgactcctatgcagcttaagaaggataagagtacgattatatggaggcagtttgatgcgccggagcctgaaaattattggtatagggtttgtgaaggtgaggccgctaagaatattcagaggccttggcatgctgtgtggaaatccaagaggttgatgaatattgttactgagattagtggaaggttggactgggattttgacgccgttcatgtggttcggggagagaaagctcagaacaaggagttgtggcctcatttggattatgatacgtcgccggatgttcttgtcgagaagcttaaatggatggttcagccttggagacatttgtacattgccaccaatgagccttattataattactttgataagttgaggtcaaattacaaggtgcatctgcttgatgactataaggagctgtggggaaatacaagtgagtggtataacgagaccacacttctcaacaatggaaagcctgttgagtttgatgggtacatgagagttgcagtggatactgaggtcttttaccgtggaaagacacgcgtggaaacgttctacaatttgactaaagattgcaaggatggagttaatacatgctgatcaggttggcactactgattatgatgctttttcagaatacatggtacactcgggccttgcttttggattcagtttcagattcataccattgggttagatatgagcttgttgttgtgcttgcttgttcttttattatattgatgatttatattgattatcatgattttgtatacatactatagaatccctttctaccctctttcctttctgttgactcaagctgctaaatccattctcgtattctttc

SEQ ID NO: 55197 - protein, 347 aa, Glycine max
  peptide (1)..(347): Ceres Seq. ID no. 14308414
NMTRSGAARGGKTLPPRASARDDEINDTIPTLGSETNFRNGKYLYYSRGGDYCKGMNHYLWSFLCGLGEAMFLNRTFVMDLSVCLASTYNPSNKDEEGKDFRYYFDFEHLKETASFVEEGEFLRDWKNWDKTHLKKKKIPVRKVVNHKVTPMQLKKDKSTIIWRQFDAPEPENYWYRVCEGEAAKNIQRPWHAVWKSKRLMNIVTEISGRLDWDFDAVHVVRGEKAQNKELWPHLDYDTSPDVLVEKLKWMVQPWRHLYIATNEPYYNYFDKLRSNYKVHLLDDYKELWGNTSEWYNETTLLNNGKPVEFDGYMRVAVDTEVFYRGKTRVETFYNLTKDCKDGVNTC

SEQ ID NO: 55198 - protein, 346 aa, Glycine max
  peptide (1)..(346): Ceres Seq. ID no. 14308415
MTRSGAARGGKTLPPRASARDDEINDTIPTLGSETNFRNGKYLYYSRGGDYCKGMNHYLWSFLCGLGEAMFLNRTFVMDLSVCLASTYNPSNKDEEGKDFRYYFDFEHLKETASFVEEGEFLRDWKNWDKTHLKKKKIPVRKVVNHKVTPMQLKKDKSTIIWRQFDAPEPENYWYRVCEGEAAKNIQRPWHAVWKSKRLMNIVTEISGRLDWDFDAVHVVRGEKAQNKELWPHLDYDTSPDVLVEKLKWMVQPWRHLYIATNEPYYNYFDKLRSNYKVHLLDDYKELWGNTSEWYNETTLLNNGKPVEFDGYMRVAVDTEVFYRGKTRVETFYNLTKDCKDGVNTC

SEQ ID NO: 55199 - protein, 292 aa, Glycine max
  peptide (1)..(292): Ceres Seq. ID no. 14308416
MNHYLWSFLCGLGEAMFLNRTFVMDLSVCLASTYNPSNKDEEGKDFRYYFDFEHLKETASFVEEGEFLRDWKNWDKTHLKKKKIPVRKVVNHKVTPMQLKKDKSTIIWRQFDAPEPENYWYRVCEGEAAKNIQRPWHAVWKSKRLMNIVTEISGRLDWDFDAVHVVRGEKAQNKELWPHLDYDTSPDVLVEKLKWMVQPWRHLYIATNEPYYNYFDKLRSNYKVHLLDDYKELWGNTSEWYNETTLLNNGKPVEFDGYMRVAVDTEVFYRGKTRVETFYNLTKDCKDGVNTC

SEQ ID NO: 55200 - DNA, 1363 bp, Glycine max
  misc_feature (1)..(1363): Ceres Seq. ID no. 15169195
tactataaagtataaacccactgcgcgcaccattctccactgtccaaggagatcaagcaccaaacccaacacacacctctctctctctctctctctctcttgtgctgttgttctatttctcattctttcgcaagtgaatgttgaactgactctgcggttcggttcggttttttttttttctgtttatggatccgggcgcgatgatgaacgagggttccttcgcgaacaatgcgagcggtaatacggcgccgtttagcttggcggagatctggcagcagttcccgccggcgattagtggcggcggtggattggggctcagaagcccgcagttcggtcacgggccaggagggcagtttggggatttcaccaccgggccgagccacggactcggacccagtaacagcagaaagcggcgcgactccgaggaggacgattccgctaagggcgtgtccaccagcaatgccgtgaatgagggtgatggaaaacgtgttaaagggaataggaacgagggtggtggtgatggtggtaataataaaggtgaaggtgaagtcagttcaggaaagcctgcggagcaaagcgctaagccagcttcggagcctccgaagcaagactacattcacgttcgagccagaaggggtcaagccactgatagtcacagtcttgcagaacgagctcgaagggaaaagattagtgaaaggatgaaaattcttcaggatttggtccctggttgtaataaggttattgggaaagcattggtccttgatgagataattaattatattcaatctcttcagcgccaagttgagtttttgtcaatgaagcttgaagcagtgaattcaagacttaactctggtattgaagcgtttcctcctaaagattttggtcagcaagcatttgatcctgctggcataccattcggttcgcaagctccaagagagtatagcagaggttcttcaccagactggttacatatgcagataggaggtagttttgaaagaacaacgtagtctacgagatcccttggtaataaatacataaaccagtggtattccattcttcagtagcacccagaaaacatcaatggtatactcagggaagcaagtacaatgggcacctcattcccattttctacactaggcatggagctgtcactgtttttcacaggactgcttcagtttctatttaagcatctccatatgttggtgtgttggaaaatgaattcatttactcaatatatgtagtatagtggacttttaggctttgtattctgctactcaacataacccttaaaatgatcattcttcttgtaaaagaatgctgcttcatcttaatacatgatgcttacagattgtgtaatactctc

SEQ ID NO: 55201 - protein, 273 aa, Glycine max
  peptide (1)..(273): Ceres Seq. ID no. 15169196
MDPGAMMNEGSFANNASGNTAPFSLAEIWQQFPPAISGGGGLGLRSPQFGHGPGGQFGDFTTGPSHGLGPSNSRKRRDSEEDDSAKGVSTSNAVNEGDGKRVKGNRNEGGGDGGNNKGEGEVSSGKPAEQSAKPASEPPKQDYIHVRARRGQATDSHSLAERARREKISERMKILQDLVPGCNKVIGKALVLDEIINYIQSLQRQVEFLSMKLEAVNSRLNSGIEAFPPKDFGQQAFDPAGIPFGSQAPREYSRGSSPDWLHMQIGGSFERTT

SEQ ID NO: 55202 - protein, 268 aa, Glycine max
  peptide (1)..(268): Ceres Seq. ID no. 15169197
MMNEGSFANNASGNTAPFSLAEIWQQFPPAISGGGGLGLRSPQFGHGPGGQFGDFTTGPSHGLGPSNSRKRRDSEEDDSAKGVSTSNAVNEGDGKRVKGNRNEGGGDGGNNKGEGEVSSGKPAEQSAKPASEPPKQDYIHVRARRGQATDSHSLAERARREKISERMKILQDLVPGCNKVIGKALVLDEIINYIQSLQRQVEFLSMKLEAVNSRLNSGIEAFPPKDFGQQAFDPAGIPFGSQAPREYSRGSSPDWLHMQIGGSFERTT

SEQ ID NO: 55203 - protein, 267 aa, Glycine max
  peptide (1)..(267): Ceres Seq. ID no. 15169198
MNEGSFANNASGNTAPFSLAEIWQQFPPAISGGGGLGLRSPQFGHGPGGQFGDFTTGPSHGLGPSNSRKRRDSEEDDSAKGVSTSNAVNEGDGKRVKGNRNEGGGDGGNNKGEGEVSSGKPAEQSAKPASEPPKQDYIHVRARRGQATDSHSLAERARREKISERMKILQDLVPGCNKVIGKALVLDEIINYIQSLQRQVEFLSMKLEAVNSRLNSGIEAFPPKDFGQQAFDPAGIPFGSQAPREYSRGSSPDWLHMQIGGSFERTT

SEQ ID NO: 55204 - DNA, 2013 bp, Glycine max
  misc_feature (1)..(2013): Ceres Seq. ID no. 15175670
atgtagaatgattcacctaaggaaaaattagtagcttcttgttgtgctttttattttgttttgttttgtgtagagataaatctgtttggtattgttttgtgttttatgaattatttgatgggtgaagagggagaagaagtggtgagaaagcaaggacaaaggggtgttgatggagataaatggtacttgtatagctgcttacaagactgtaaatattggtgctgtaatttaatacacgagactagcagttctttttcgatggttccttttgagtgaaaaaaaccttgtcttctcatcagctttctttggagagatcttaaagacgacattgactgctaacaacaataaagtggatcaatcattaaaggcttacttcttcttcttcttcttcttcttcttcttctaacaacaataagatcccatctttcccactcatgaagagacttaacagctcagattcttccactgccctcatgacaatttttccatcatcatcaacagaggaacatagtccgaggaacagccaccacatgtatggcagggagttccgatcgatgttggacggactcgacgaggaagggtgtgttgaagaaccggggcatcaatctgagaagaagcgtcgactaagtgtggaacaagtgaaggctttggagaagaactttgaggttgaaaacaagcttgaacctgagaggaaggtcaagcttgcccaagaacttgggttgcaacctagacaagtagccgtttggttccaaaaccgccgagccagatggaaaaccaaacaattggagagagattatggtgtcctcaaagccaattatgatgctcttaagcttaactttggcaccctcaatcaggacaacgaagccttacgaaagcagataaaggaattgaaatcgaggctgctgcaagaagagaacacagcaggaagcggtgtttcggtgaaggaagaagagataacaacgatgcctgcagactcagaagagaaaacgatggaacaaagtaagagtgacccaccttctgaaacctcgaacattaatcctagttcggagtcgtcggaggaggaccacttgaattacgaatgtttcaacaacaacagcgacgactgtgtcgtcggaggatccgccgcagcatcgctcttgcaagtggacttcatgaaagacgggttcttccgacagcgacggatcaagcgcgatcttgaacgaagacaccatgtacttgccgtcttcgatgactgttttcagttccagaaaccgtatcatcacgcgcagtacgtgaagacggaggagcacaatttcttgagcgccgatgaggcctgcaatttcttctccgatgaacaagcaccgaccctgcaatggtactgtccagaacagtggagctgagatagaagaaacatgggaaaattggaaaccgctttcagaaatttttgtttaatatgttgcacggttgtgttgaacacagctcattgaggtaaaagttgtaaaaaaaggttgccacttgccaacagaggctgcttgaaggtagaaaatgaaacactgtgcagaagatagagttacgaaagagagaacagagatcaatggctgcatggcgtggggtcggagatgaaggatgacgattaaggttaattattactctcgatcgtgggtaatatcaataattattcaatcgtaaagcaaaccatgctgtaaaaaacaaatttcaattcaagtatagaataacgatgtagtactttatcaaacagaaaacgaaaaaaaaaattataaatctgttaaacaatatccttttgcctcactgaactcagtttactagtgtttatgattgattatccttttcctgtaaaagtatttttttttcaccaacaattgctactaaactgaatttgagttggaggcaacatatgagttgttttttaatgttcatttccattgacattgtttattcattagtcgtgtcaagtaaaaatatttttgttattagtatatcattcaaataaaatttattttatcaacatatttt

SEQ ID NO: 55205 - protein, 314 aa, Glycine max
  peptide (1)..(314): Ceres Seq. ID no. 15175671
MKRLNSSDSSTALMTIFPSSSTEEHSPRNSHHMYGREFRSMLDGLDEEGCVEEPGHQSEKKRRLSVEQVKALEKNFEVENKLEPERKVKLAQELGLQPRQVAVWFQNRRARWKTKQLERDYGVLKANYDALKLNFGTLNQDNEALRKQIKELKSRLLQEENTAGSGVSVKEEEITTMPADSEEKTMEQSKSDPPSETSNINPSSESSEEDHLNYECFNNNSDDCVVGGSAAASLLQVDFMKDGFFRQRRIKRDLERRHHVLAVFDDCFQFQKPYHHAQYVKTEEHNFLSADEACNFFSDEQAPTLQWYCPEQWS

SEQ ID NO: 55206 - protein, 301 aa, Glycine max
  peptide (1)..(301): Ceres Seq. ID no. 15175672
MTIFPSSSTEEHSPRNSHHMYGREFRSMLDGLDEEGCVEEPGHQSEKKRRLSVEQVKALEKNFEVENKLEPERKVKLAQELGLQPRQVAVWFQNRRARWKTKQLERDYGVLKANYDALKLNFGTLNQDNEALRKQIKELKSRLLQEENTAGSGVSVKEEEITTMPADSEEKTMEQSKSDPPSETSNINPSSESSEEDHLNYECFNNNSDDCVVGGSAAASLLQVDFMKDGFFRQRRIKRDLERRHHVLAVFDDCFQFQKPYHHAQYVKTEEHNFLSADEACNFFSDEQAPTLQWYCPEQWS

SEQ ID NO: 55207 - protein, 282 aa, Glycine max
  peptide (1)..(282): Ceres Seq. ID no. 15175673
MYGREFRSMLDGLDEEGCVEEPGHQSEKKRRLSVEQVKALEKNFEVENKLEPERKVKLAQELGLQPRQVAVWFQNRRARWKTKQLERDYGVLKANYDALKLNFGTLNQDNEALRKQIKELKSRLLQEENTAGSGVSVKEEEITTMPADSEEKTMEQSKSDPPSETSNINPSSESSEEDHLNYECFNNNSDDCVVGGSAAASLLQVDFMKDGFFRQRRIKRDLERRHHVLAVFDDCFQFQKPYHHAQYVKTEEHNFLSADEACNFFSDEQAPTLQWYCPEQWS

SEQ ID NO: 55208 - DNA, 761 bp, Glycine max
  misc_feature (1)..(761): Ceres Seq. ID no. 12607455
cagtgaagagcaggtcaaacttgctctgctgtctgacccctctctctccactggcccctttattttctaatttattttgattttacgctgaacaaatatgctgcagcagctgcttactgttgcaaacaaaaatttgaatcctgtagacgaaagctattctatccgatgccattaaatgtaatcaagaagaaaaacaccttgcagtcaccctggaatttgcaaaatgggaattgggcgatactgagaaggaattgaagttgctcaagtctgctgtttcctcttcagagaaagaatacgatcaaattccgaaagatacggaagctattcaaatggaattggagagtgaaaggagtttacggaagaagcttgaggaagaacttggagaattgaacagcaaaattgatgagctgacttctgaaactggagaaaccacaatacaaaaactcgaaaaagaaataaggatttgcaagaacatgatcaagtgtactgtctgtactgatcgtccaaaggaggttgtgattgtcaagtgctatcatctgttctgcaatccatgcattcagagaaatctagagcttcggcaccgcaaatgtcctgcatgtggaacagcatttggacagagtgatgtccgctttgtaaaaatatgaaacagatgttaagatagatactttgtagataggtgttgattgattgtaatgttttggatccttggttaccctgatcatagtttcaaacaagcattcttagccgaaagaaatatatgc

SEQ ID NO: 55209 - protein, 104 aa, Glycine max
  peptide (1)..(104): Ceres Seq. ID no. 12607456
MELESERSLRKKLEEELGELNSKIDELTSETGETTIQKLEKEIRICKNMIKCTVCTDRPKEVVIVKCYHLFCNPCIQRNLELRHRKCPACGTAFGQSDVRFVKI

SEQ ID NO: 55210 - protein, 56 aa, Glycine max
  peptide (1)..(56): Ceres Seq. ID no. 12607457
MIKCTVCTDRPKEVVIVKCYHLFCNPCIQRNLELRHRKCPACGTAFGQSDVRFVKI

SEQ ID NO: 55211 - DNA, 1320 bp, Glycine max
  misc_feature (1)..(1320): Ceres Seq. ID no. 14310780
atgcaaaaccactgctcagaaagccaacacaagtactagagattaataatgtgtttgcagcagacactattttgtctttatccgacatggccattgaagaaattttggatgatgtacggttggaatgtgcaagatttgggactattaaatcaattaatgtagtcaagcatagcagtggcgagaatttagcaaccaaattagaagaatgcaaagtcataaacaaagtggatgctaaagaagtttctcaagacacaaactgtattactaataatacagaatctagtttttctgacaaggctacttaccccgactttgaaggaacaaatgggatggaaatccatgataacaatgaaatggaagaagttaaagttgacgagggtagctgtgtttatgttgataaaaatgctgaagtttttgactataaatcatgtagagaacacgtggatgattcagcagtagaagatgtgggggataagggcataccttgtagtatcattcaagaatgtcctgatcaacaagatacacccaatgatgggccagaattttatgataagatggttgctaacgatattgatgtgaatattgaaaataatatggaatctaaagacacagtttgtgcatttcaggaaggcttttctgaatgggatatcagtgcagaattggttagtccccaaaagagcattgacacggaagaggatatttatggtcatgtatttaaaccaggttctgttcttgttgagtatggaagagctgaagcatgttgttcggcagcacatagtttgcacggacgattctttgatggcagaattgtgacggtgggatatgttgctctcagcctatacagatcaagatttacaaaatgagcatttcaaagcagcaactcgtggttatatgatgaaacaccaaattatatttttgcatgattgtggaagaatagattaatcaatctgattggttatgccagcctgcttcctggatagctttttaactttcagatttacacttctgatgtttagtatttcaacatttggagtgggtaaaagcttaactgagcaatgtcgatttgaggaaaatgcagtatagcacacatcaagtttgtaactgcagactatctgatgatttgttatgcaaatcgggcatatgatttttatttttttattttgtacgtttaaatgtggttacatttcgagctggtggtcttatgctatttggcaatattttgtgtacatggttatgttgcgttacaaactgattattgtatcgtagttatttttagatgttggttacagggccatacttttcataattattttttttgac

SEQ ID NO: 55212 - protein, 286 aa, Glycine max
  peptide (1)..(286): Ceres Seq. ID no. 14310781
AKPLLRKPTQVLEINNVFAADTILSLSDMAIEEILDDVRLECARFGTIKSINVVKHSSGENLATKLEECKVINKVDAKEVSQDTNCITNNTESSFSDKATYPDFEGTNGMEIHDNNEMEEVKVDEGSCVYVDKNAEVFDYKSCREHVDDSAVEDVGDKGIPCSIIQECPDQQDTPNDGPEFYDKMVANDIDVNIENNMESKDTVCAFQEGFSEWDISAELVSPQKSIDTEEDIYGHVFKPGSVLVEYGRAEACCSAAHSLHGRFFDGRIVTVGYVALSLYRSRFTK

SEQ ID NO: 55213 - protein, 258 aa, Glycine max
  peptide (1)..(258): Ceres Seq. ID no. 14310782
MAIEEILDDVRLECARFGTIKSINVVKHSSGENLATKLEECKVINKVDAKEVSQDTNCITNNTESSFSDKATYPDFEGTNGMEIHDNNEMEEVKVDEGSCVYVDKNAEVFDYKSCREHVDDSAVEDVGDKGIPCSIIQECPDQQDTPNDGPEFYDKMVANDIDVNIENNMESKDTVCAFQEGFSEWDISAELVSPQKSIDTEEDIYGHVFKPGSVLVEYGRAEACCSAAHSLHGRFFDGRIVTVGYVALSLYRSRFTK

SEQ ID NO: 55214 - protein, 177 aa, Glycine max
  peptide (1)..(177): Ceres Seq. ID no. 14310783
MEIHDNNEMEEVKVDEGSCVYVDKNAEVFDYKSCREHVDDSAVEDVGDKGIPCSIIQECPDQQDTPNDGPEFYDKMVANDIDVNIENNMESKDTVCAFQEGFSEWDISAELVSPQKSIDTEEDIYGHVFKPGSVLVEYGRAEACCSAAHSLHGRFFDGRIVTVGYVALSLYRSRFTK

SEQ ID NO: 55215 - DNA, 1235 bp, Glycine max
  misc_feature (1)..(1235): Ceres Seq. ID no. 14315843
aatgcctcaaagctaaaccccaaaccatcttcttcaccttttctctctgcacacgaatatggcatcaatttgcgacaaagatatccctcttcgactacacaacatcgacgctttcatcgcttcttacagaaactccctccactcgctcagagccaccgcactcgaagccgcgcgatctcaatccgaattagccgaggttaaagctaaactgcgagaggctgaggatgaattggtaaaggcacttgcagttaagactcggagagaggcgaagcgaatggccttgaaagaggcgattgtttctgtgaagggaagaattgaggatctgaagacgagtattcagaagcagagaacccaaaacgaggaatgtgccacggttgtgtcgcatcaccgtcttgttttggaagtgtctgaacagaaatcaaatgaaagcagtgaacatagagatgaagtccaggaggccatatcttggtacaataggatccttggttttcagattgaaggtggacgtggggtaaaattcagcttcaagaatattaatgtggacaacccaaatgaggagttcttttttaccatccgccacgaagatgacgtgtatacattgctaaattgtaaaccatctgtcaaagatactgacgagttgatccatgaattaaacaacacaaatgggctatttaaatttgtcagaacaatgaggaaaaagtttcaagaagtagtggcacaaggccgtttatctatgacaacaaatgaacattaagaatctgcctttatctctgcatctggtccagttttatcaatatcaaccattactgaagataatgatcatcaagatgaacccaccaaaggtaatgcacatctccagaaacaagttaatcgaagaagggtaaaatcagcaattctatctcctggatctgcatcatctgtccgtcaatctcctcgtttgaaggtcaggaaatgaagcggtgtgggggatgctcacctgctcggtaccttattttgatgagacatgctggttcatgtagggaattaattgctaactaattgacatgtaaattaagacatacccaggttccagatgtctgaacctgtatataatagaccagaagatccctacattttttgtgtatggtccatttgatatttgtgtgtattttattttgttttttccattgctgatatactggtattgttcaataaaacatcagtcattctagtgagatatcttgtcttggcattgt

SEQ ID NO: 55216 - protein, 231 aa, Glycine max
  peptide (1)..(231): Ceres Seq. ID no. 14315844
MASICDKDIPLRLHNIDAFIASYRNSLHSLRATALEAARSQSELAEVKAKLREAEDELVKALAVKTRREAKRMALKEAIVSVKGRIEDLKTSIQKQRTQNEECATVVSHHRLVLEVSEQKSNESSEHRDEVQEAISWYNRILGFQIEGGRGVKFSFKNINVDNPNEEFFFTIRHEDDVYTLLNCKPSVKDTDELIHELNNTNGLFKFVRTMRKKFQEVVAQGRLSMTTNEH

SEQ ID NO: 55217 - protein, 159 aa, Glycine max
  peptide (1)..(159): Ceres Seq. ID no. 14315845
MALKEAIVSVKGRIEDLKTSIQKQRTQNEECATVVSHHRLVLEVSEQKSNESSEHRDEVQEAISWYNRILGFQIEGGRGVKFSFKNINVDNPNEEFFFTIRHEDDVYTLLNCKPSVKDTDELIHELNNTNGLFKFVRTMRKKFQEVVAQGRLSMTTNEH

SEQ ID NO: 55218 - DNA, 1285 bp, Glycine max
  misc_feature (1)..(1285): Ceres Seq. ID no. 14308080
gtgcagaccactgtctccccttttgctctcttcattttccattcgtagacgccaagaaccctaacaggagaatgcagtggacctggataatttgtgaggatatttaacatcgtgtacattgtgctcctttaattattttcatcagttggtgttgtgatggatggtaataatggtcttaacatacgtaattggggttactatgaacccgctacgtcgtttaagagccacctggggctgcagctgatgtcatccttgccggaaaaacctttaattggagggcgcaatgctgtggttttagctggcactgatggggcatttcaccatagggacattggtggtatgccccaagctacataccctatcgaatacatgagggatacatggattagtcagagagacaaatatatgaatatgatacctacaaaccataattatggtggtattccggagacatcttcagcacatcaaattcaaatgattcaagcaccggaattgccaaaggaagaaaagccagtggaagaagcacctgtcgtcaagaaggcaaatggaactcgtaagaaaagacaggggcccaaggttcccaaatctcccaaggctaagaagccaaagagggtgcctcgtgcgccaaaggatgagaatgctcctgcagttcaacgtgcaagggttccgaagaaaactactgaaattgtaataaatgggattgatatggatatttctcgcattccaattccagtttgttcatgcaccggggcaacgcaacagtgttataaatggggatctggtggttggcagtctgcatgttgcacaacaggcatgtcggtatatcctttgcctatgagtaccaagcggcgtggtgctaggattgctggaaggaaaatgagtataggagcatttaagaaagtgttagagaaactcgccgccgagggttataacttttctaatccgattgatttgaggacttattgggcaaaacatggcaccaacaagtttgtcaccatcaggtagatctagtctgtggccatctggcctgttatgtcttttagcctgtttgtgatgtatatacatgcgtatttggccagagacagactttttagctggtttgtagtacaacaattttcaaattcattagacatcttgttttgtcttctaactctctttgttagtatcttcactttattggatgtagtacatgggaactcatctatcggttggttggttcagattgggaactacctgatgaggtcttgttttattaatatttagtaggagaatttaattggttcac

SEQ ID NO: 55219 - protein, 282 aa, Glycine max
  peptide (1)..(282): Ceres Seq. ID no. 14308081
MDGNNGLNIRNWGYYEPATSFKSHLGLQLMSSLPEKPLIGGRNAVVLAGTDGAFHHRDIGGMPQATYPIEYMRDTWISQRDKYMNMIPTNHNYGGIPETSSAHQIQMIQAPELPKEEKPVEEAPVVKKANGTRKKRQGPKVPKSPKAKKPKRVPRAPKDENAPAVQRARVPKKTTEIVINGIDMDISRIPIPVCSCTGATQQCYKWGSGGWQSACCTTGMSVYPLPMSTKRRGARIAGRKMSIGAFKKVLEKLAAEGYNFSNPIDLRTYWAKHGTNKFVTIR

SEQ ID NO: 55220 - protein, 253 aa, Glycine max
  peptide (1)..(253): Ceres Seq. ID no. 14308082
MSSLPEKPLIGGRNAVVLAGTDGAFHHRDIGGMPQATYPIEYMRDTWISQRDKYMNMIPTNHNYGGIPETSSAHQIQMIQAPELPKEEKPVEEAPVVKKANGTRKKRQGPKVPKSPKAKKPKRVPRAPKDENAPAVQRARVPKKTTEIVINGIDMDISRIPIPVCSCTGATQQCYKWGSGGWQSACCTTGMSVYPLPMSTKRRGARIAGRKMSIGAFKKVLEKLAAEGYNFSNPIDLRTYWAKHGTNKFVTIR

SEQ ID NO: 55221 - protein, 221 aa, Glycine max
  peptide (1)..(221): Ceres Seq. ID no. 14308083
MPQATYPIEYMRDTWISQRDKYMNMIPTNHNYGGIPETSSAHQIQMIQAPELPKEEKPVEEAPVVKKANGTRKKRQGPKVPKSPKAKKPKRVPRAPKDENAPAVQRARVPKKTTEIVINGIDMDISRIPIPVCSCTGATQQCYKWGSGGWQSACCTTGMSVYPLPMSTKRRGARIAGRKMSIGAFKKVLEKLAAEGYNFSNPIDLRTYWAKHGTNKFVTIR

SEQ ID NO: 55222 - DNA, 1829 bp, Glycine max
  misc_feature (1)..(1829): Ceres Seq. ID no. 15225341
tcagctacgtaggccccccccccttatttatacggtaaacaaaacacaacacaccaaacatcattcgaccatacacattgctgttcaccattttcaattttctaagtggtttggcttggtttgacatacataaacctttcaagatctcagaggggcagaagatcaaagccaagacatcctctcgtatataaagagtgtctctgatttgatctttgtttcttctctttctctcgtttgagatttttcagtactccaccaaggttttgtcagaaaagcttgaatttttcgcctaccctttacaatgatctcttcgttgagacagcctgttgtagggatcagtggttctgatcttcttttgaggcaaagacatgcaactccaattaaggcaaggtcgtttttaccctctttgtcaagagaaaagggtcaaggatctcttgtttcagttcaaaagccactccacattggtgcttctcttggtgttggaaattttgtgtcagtgaagagtgatgctaaaaggggtgatttggtgaagtgtgaggcctatgaggcagacagatcagaggttgagggtgcaagcacaccgtcagaggctgcaaagaaggtaaaaattgggatatattttgcaacctggtgggctctgaatgtggtgttcaatatttataacaagaaggttctgaatgcctacccttacccttggcttacttcaactctctcacttgcatgtgggtctcttatgatgttgatctcttgggccactgggattgcagaagcccccaagactgatcctgagttttggaagtctttgttccctgttgctgttgcacatacaataggacatgtagcggcaacagttagtatgtcaaaagttgcggtatcgtttacacatattatcaagagtggtgaacctgcttttagtgttctggtttcaagatttcttttgggtgagagcttccctgtgcctgtctatctgtctttaattccaatcattggtggatgtgcacttgctgctgtgactgagctcaatttcaatatgatcggttttatgggagctatgatatcgaatttggcatttgtattccgtaatatcttttccaaaaagggcatgaagggaaagtctgtcagtggaatgaattactatgcttgtttatctattttgtcccttgcaattctcacacccttcgcaattgctgtggaaggaccacagatgtgggctgctggatggcaaacagctatgtctcaaattggaccccaattcatatggtgggtagctgctcaaagtgtattctatcatctatacaatcaagtgtcgtacatgtctctggatcagatctctcccttgacgtttagcattggaaacaccatgaaacgtatatctgtcattgtgtcttccattattatcttccacacaccagttcaacccatcaatgctcttggtgctgccattgctatccttggaaccttcttgtattcacaggcgaaacaatagagttggggaactaagattcctctagggacttgtttgttactgttcttcatgctcaaccacggacaaggaagttgattttgtaatgtgtcactgctggaattttgtaatactaggatgatctggctgtcagtccatctgtagatataataataagaataatgctgctgaggaaacgttatcataatacagatgattaggtttttttttttttttttgaatttctgaaatgccaatgatttgaaataaatgccttttgtttatatagtatgagaagaatttctcaagacattgtttactataaggagcttgcaataaagtgatgcctatgatcaatttgatgctc

SEQ ID NO: 55223 - protein, 394 aa, Glycine max
  peptide (1)..(394): Ceres Seq. ID no. 15225342
MISSLRQPVVGISGSDLLLRQRHATPIKARSFLPSLSREKGQGSLVSVQKPLHIGASLGVGNFVSVKSDAKRGDLVKCEAYEADRSEVEGASTPSEAAKKVKIGIYFATWWALNVVFNIYNKKVLNAYPYPWLTSTLSLACGSLMMLISWATGIAEAPKTDPEFWKSLFPVAVAHTIGHVAATVSMSKVAVSFTHIIKSGEPAFSVLVSRFLLGESFPVPVYLSLIPIIGGCALAAVTELNFNMIGFMGAMISNLAFVFRNIFSKKGMKGKSVSGMNYYACLSILSLAILTPFAIAVEGPQMWAAGWQTAMSQIGPQFIWWVAAQSVFYHLYNQVSYMSLDQISPLTFSIGNTMKRISVIVSSIIIFHTPVQPINALGAAIAILGTFLYSQAKQ

SEQ ID NO: 55224 - protein, 250 aa, Glycine max
  peptide (1)..(250): Ceres Seq. ID no. 15225343
MMLISWATGIAEAPKTDPEFWKSLFPVAVAHTIGHVAATVSMSKVAVSFTHIIKSGEPAFSVLVSRFLLGESFPVPVYLSLIPIIGGCALAAVTELNFNMIGFMGAMISNLAFVFRNIFSKKGMKGKSVSGMNYYACLSILSLAILTPFAIAVEGPQMWAAGWQTAMSQIGPQFIWWVAAQSVFYHLYNQVSYMSLDQISPLTFSIGNTMKRISVIVSSIIIFHTPVQPINALGAAIAILGTFLYSQAKQ

SEQ ID NO: 55225 - protein, 249 aa, Glycine max
  peptide (1)..(249): Ceres Seq. ID no. 15225344
MLISWATGIAEAPKTDPEFWKSLFPVAVAHTIGHVAATVSMSKVAVSFTHIIKSGEPAFSVLVSRFLLGESFPVPVYLSLIPIIGGCALAAVTELNFNMIGFMGAMISNLAFVFRNIFSKKGMKGKSVSGMNYYACLSILSLAILTPFAIAVEGPQMWAAGWQTAMSQIGPQFIWWVAAQSVFYHLYNQVSYMSLDQISPLTFSIGNTMKRISVIVSSIIIFHTPVQPINALGAAIAILGTFLYSQAKQ

SEQ ID NO: 55226 - DNA, 1503 bp, Glycine max
  misc_feature (1)..(1503): Ceres Seq. ID no. 14308389
gcaggaagcacataagatccaagccatttacaaaaatggtaaccattaaagcatcttacacagtccttccaaatgaaccaactccggagggccttttatggctatctgatattgatcaagtggcacgtctacgccacacacccaccatctacattttccatgcaaaacacaaccatgatacattaattgagaggatgagaaactctcttagcaagattttggttcactactatccaatagccggtcgattgagaaggatagaaggtagtggtcgattggaattggattgcaatgcaaaaggggtggtgttgcttgaagctgaatccacaaaaacattggatgattatggagactttttacgtgagtccatcaaggacttggttccaacggttgattacacaagccctatagaggaacttccctcgctactagttcaagtaacaacattccatggtggtaaatcctttgccattggagttgccttatgccatatcttgtgtgatggggttggtgccattcagtttatcaactcttgggcaaagttagctcgaggagacacattggagccacatgagatgccatttctggatcgaacagtgctcaagttcccacaccctctgtcgccgccgcgctttgatcacctggagttcaagcctttgccacttatattgggaagatctgacaacacagtagagaaaaacaagaaggttgatgccaccttgctgaagctaacaccagaacaagtggggaagctgaagaagaaggccaatgatgactcaacaaaagaagggtcaagaccttatagcagatttgaagctattgctgcacatatatggagatgtgcctctaaggctcgtaaactagataagaatcaaccaactctagttcggttcaatgccgatattcgcaatagactaattccacctctccctaagaattattttgggaatgctttgtccttaacaacagcatcatgtcacgttggagatgtcatatcaaattctttgagttatgctgctcagaagataagggaagcaattgaagtggttacatatgagtatatatggtcacagatagatgtgattagaggtcaggagcaactggataatgcaagggctttgttctttggacaaaatgaaggaaaggatgccttgttttatgggaaccctaaccttcttattacaagttggatgagcatgccaatgcacgaagcagattttggctggggaaagcctgtgtatttaggtctaggaagtgtatctacacaagatagggcactgattattcaaagccctgatggtgacggctctattattctgtccatacactttcagatggaacatatgcagcttttcaagaaatatttttatgaagatatgtgaactatattcacatcgctactatcttgaacttcttgtatgggagcttaatttacgtgtgatctgcaatttctcatgtttaataaatttagttaaccatgtgggttaactataagcttgaatg

SEQ ID NO: 55227 - protein, 459 aa, Glycine max
  peptide (1)..(459): Ceres Seq. ID no. 14308390
RKHIRSKPFTKMVTIKASYTVLPNEPTPEGLLWLSDIDQVARLRHTPTIYIFHAKHNHDTLIERMRNSLSKILVHYYPIAGRLRRIEGSGRLELDCNAKGVVLLEAESTKTLDDYGDFLRESIKDLVPTVDYTSPIEELPSLLVQVTTFHGGKSFAIGVALCHILCDGVGAIQFINSWAKLARGDTLEPHEMPFLDRTVLKFPHPLSPPRFDHLEFKPLPLILGRSDNTVEKNKKVDATLLKLTPEQVGKLKKKANDDSTKEGSRPYSRFEAIAAHIWRCASKARKLDKNQPTLVRFNADIRNRLIPPLPKNYFGNALSLTTASCHVGDVISNSLSYAAQKIREAIEVVTYEYIWSQIDVIRGQEQLDNARALFFGQNEGKDALFYGNPNLLITSWMSMPMHEADFGWGKPVYLGLGSVSTQDRALIIQSPDGDGSIILSIHFQMEHMQLFKKYFYEDM

SEQ ID NO: 55228 - protein, 448 aa, Glycine max
  peptide (1)..(448): Ceres Seq. ID no. 14308391
MVTIKASYTVLPNEPTPEGLLWLSDIDQVARLRHTPTIYIFHAKHNHDTLIERMRNSLSKILVHYYPIAGRLRRIEGSGRLELDCNAKGVVLLEAESTKTLDDYGDFLRESIKDLVPTVDYTSPIEELPSLLVQVTTFHGGKSFAIGVALCHILCDGVGAIQFINSWAKLARGDTLEPHEMPFLDRTVLKFPHPLSPPRFDHLEFKPLPLILGRSDNTVEKNKKVDATLLKLTPEQVGKLKKKANDDSTKEGSRPYSRFEAIAAHIWRCASKARKLDKNQPTLVRFNADIRNRLIPPLPKNYFGNALSLTTASCHVGDVISNSLSYAAQKIREAIEVVTYEYIWSQIDVIRGQEQLDNARALFFGQNEGKDALFYGNPNLLITSWMSMPMHEADFGWGKPVYLGLGSVSTQDRALIIQSPDGDGSIILSIHFQMEHMQLFKKYFYEDM

SEQ ID NO: 55229 - protein, 395 aa, Glycine max
  peptide (1)..(395): Ceres Seq. ID no. 14308392
MRNSLSKILVHYYPIAGRLRRIEGSGRLELDCNAKGVVLLEAESTKTLDDYGDFLRESIKDLVPTVDYTSPIEELPSLLVQVTTFHGGKSFAIGVALCHILCDGVGAIQFINSWAKLARGDTLEPHEMPFLDRTVLKFPHPLSPPRFDHLEFKPLPLILGRSDNTVEKNKKVDATLLKLTPEQVGKLKKKANDDSTKEGSRPYSRFEAIAAHIWRCASKARKLDKNQPTLVRFNADIRNRLIPPLPKNYFGNALSLTTASCHVGDVISNSLSYAAQKIREAIEVVTYEYIWSQIDVIRGQEQLDNARALFFGQNEGKDALFYGNPNLLITSWMSMPMHEADFGWGKPVYLGLGSVSTQDRALIIQSPDGDGSIILSIHFQMEHMQLFKKYFYEDM

SEQ ID NO: 55230 - DNA, 1478 bp, Glycine max
  misc_feature (1)..(1478): Ceres Seq. ID no. 13518411
cagctacgtaggccccccccccagatttgaatttatttaagagagaatcgtatgttgtggaattgggactattaagtaaggttccacatgcaagattggtcccaatcctgggccactgcttggacaatgaaaatgagaaattcatagtttacaagtacatgccaaatcgagatttagctacttccttgcacagagtcaccggttcagatggtaaattacagtccctggattggatcacgagattgaaaattgcaataggagctgctgaaggcatagcttacctacatgagtgcagccctccccttgtccacagagatatccaagctagcagtatactacttgatgataaatttgaagtgcgacttggaagtttgagtgaggttactgcccaaggagatcttcaacaaggagtcatctcaagggttttcagcaagccaccatcttccaatcaagcagattctggtaaatcatcagtgacatgtgcctatgatatctactgttttggcaagattttacttgagctcattaccggtaacattgaagtcagcaagttagatgatgcctctacaaaggagtggttagagcaaaccttgccttacatcactatatacgataaagaacgggtgactaagattattgacccatcattgatcgtggatgaggacctgttggaagaggtatgggctatggcaattgtggccaatgcatgcttgaatcccaagccttccaaacgccctcctatgaggcatgtcctgaaagcattggaaaatccattgaagattgtgagagaagaaaatactagctcagcaaggttgagatcaaactcttctaggaaatcttggagcactgcattctttggtagctggagacacagctcatcagacagtgttgttgccacaaacaaagagggttctagtgacactaaaaaatcaggaaaagtaggttctcaaagtagtggaaacgatcactcttcttccaataaaagatcgtccaatgaaattttccccgaaccattggaaatactagatgtggagacaggagtggcaagataagcacttgtgaaatggatttggttattctttagtctgtgaggttttttttttaccactttctcagataactggtggtgccatagcaattgcttgttattagcacatcaaactcactacccagcatccattatggtccgtattgaagcaatggaaaaccttaatactgctagtgatagcttttgctttccaaagctcagattaagcagtacagattgaaatgtctggtatgagaactccgaaaaaaactgaataattttactcattcaatagattgtttgaaacacacagccctcccctaggttaaaagttgtgtgacaaaatgtaaaataatgagagggttttcatttttacgagtaattgtaggtgggaaaaacgttgttactcactcgaggttttctttggtaggttatatgtatttagcattgt

SEQ ID NO: 55231 - protein, 297 aa, Glycine max
  peptide (1)..(297): Ceres Seq. ID no. 13518412
MPNRDLATSLHRVTGSDGKLQSLDWITRLKIAIGAAEGIAYLHECSPPLVHRDIQASSILLDDKFEVRLGSLSEVTAQGDLQQGVISRVFSKPPSSNQADSGKSSVTCAYDIYCFGKILLELITGNIEVSKLDDASTKEWLEQTLPYITIYDKERVTKIIDPSLIVDEDLLEEVWAMAIVANACLNPKPSKRPPMRHVLKALENPLKIVREENTSSARLRSNSSRKSWSTAFFGSWRHSSSDSVVATNKEGSSDTKKSGKVGSQSSGNDHSSSNKRSSNEIFPEPLEILDVETGVAR

SEQ ID NO: 55232 - DNA, 1228 bp, Glycine max
  misc_feature (1)..(1228): Ceres Seq. ID no. 14316302
tttaagttgaacatgatggaatggccgtctttctcttttgggtatcttcccaaatcaggaaacactttctcatcttccctttcccagtttcacaccctacctcatggaaggctctgtcaacgaacgtcttcattttgggaagattggatatggatgcaatcattacaggagaagatgcaggattcgtgctccctgctgcaacgagatctactcatgccgtcactgtcataacgaggccgcgagcttgttgaagaatccctttgatcgccacgagctcgttcgccaagatgttaaacaagttatttgttcagtttgtgacactgagcaacctgttgctcaagtttgcacaaactgtggcgtcaaaatgggagaatatttctgcaacatctgcaaattcttcgatgatgatgttgagaaagaacagtttcactgtgatgattgtgggatctgcagggttggtggtcgagataattttttccactgcaagaagtgcgggtcttgttatgcagttggtctgcatgataatcatttatgtgtggagaactccatgaggcatcactgtcccatttgttacgagtacctttttgattcattgaaagatgtcattgttatgaaatgtggtcacacaatgcaccatgaatgttacctggagatgataaaaaatgacaaatattgttgtcccatatgctccaagtcagtgattgacatgtctaagacatggaagagaattgatgaagagattgaagcaaccgtcatgcctcaagattatcgaaacaggaaggtttggatactatgtaatgactgcaatgacacaacagaagtttacttccacattcttggccaaaaatgtggtcactgcagatcatataatacccgcacagttgcacctccagttcttccccaatgaccagatctcttgggttcaagaagggaacactgtcagcagaaagttaaagttagcaccctgttattactatggagggttattgaattaattgagcatcaaaagtgattggtgtattgtgtcctagatagttttcttaggttattcttcctccaacatatggagtgggattgttgtctcttggttatttattgggcaggtataaacatctttatactgtaatagagggaaaacatttttcccgtcatgaattgctggtaatagtgatgcattgatacttgatgattgattgcattgtcggccatagtggttttctataaaaag

SEQ ID NO: 55233 - protein, 267 aa, Glycine max
  peptide (1)..(267): Ceres Seq. ID no. 14316303
MEGSVNERLHFGKIGYGCNHYRRRCRIRAPCCNEIYSCRHCHNEAASLLKNPFDRHELVRQDVKQVICSVCDTEQPVAQVCTNCGVKMGEYFCNICKFFDDDVEKEQFHCDDCGICRVGGRDNFFHCKKCGSCYAVGLHDNHLCVENSMRHHCPICYEYLFDSLKDVIVMKCGHTMHHECYLEMIKNDKYCCPICSKSVIDMSKTWKRIDEEIEATVMPQDYRNRKVWILCNDCNDTTEVYFHILGQKCGHCRSYNTRTVAPPVLPQ

SEQ ID NO: 55234 - protein, 180 aa, Glycine max
  peptide (1)..(180): Ceres Seq. ID no. 14316304
MGEYFCNICKFFDDDVEKEQFHCDDCGICRVGGRDNFFHCKKCGSCYAVGLHDNHLCVENSMRHHCPICYEYLFDSLKDVIVMKCGHTMHHECYLEMIKNDKYCCPICSKSVIDMSKTWKRIDEEIEATVMPQDYRNRKVWILCNDCNDTTEVYFHILGQKCGHCRSYNTRTVAPPVLPQ

SEQ ID NO: 55235 - DNA, 1504 bp, Glycine max
  misc_feature (1)..(1504): Ceres Seq. ID no. 14310764
gacaccatttcgttcgttctatatgcttcctcttcaacccttcttctttccatcatctcccaccactttcacgctgctctggaatttacaacactaactcacataaaaccaaagttaaatgatgaatttcattgtaaattttcaattgaaatctgttgtggaaatttcctttgttcattgagattttttcgaggtgcagaagatttcccagttttgaagatatatttctcttcagacgggttttgaaactctgaactttttgcaagtcgtacgtgacaaggacgatcgctacttggccatcgtcgcagacagaagctcagaaatgtgattagtagttgagttttcggcatagatttgcattttccatagctctggaactgaaatctggataattttccaggtttcctacagctttgaacaaagttttagcaggagcagacttaggagatagaaaaatcagctccttttccccttagtttcagaaggaattgattgctcgacgattgctacttttttaaggaacgggttcaagagatggagaacgagtcaattattcagagcaataacaatacgaacacaatgtctagtgttagagaaaaaaacggaggggatgggtcgttgctgttgagggcgaattccgatagcgctaggcaagcaacgacgtcggatttggtgttgcagtgggggaatcggaagcggctaaggtgcatgaaggtgcaggttaaggacgattcttccggtccggttcagaggactacggttcgggtggatcgccgggtcgttagaaccgacaaggattctttaaataagctcactttcggtgtcaataataataatcatcatcatcagagtaacgggtatccgaatctccgtcaacgtccatcttcgccgcaaccacgaattctcaggaactcagaaagttcaagtgccatgagaggaggacaaagcaacgggggcgttagtgttaggggaattgcctcaccggacaggggtgcgcatgataagagagggacccataatgacaataacaagtccgcggcctcatcggatactgcgcacgatagcaagaagggagggtcgccgtccggcagcggagatgcggctgctccgccggtgtggccacccaagttcgtgattgccttgaccaacaaggagaaggaagaagattttctcgccattaagggctcaaagctgcctcagagacccaagaagagagctaaattcattcaacgaaccctcaatctcgttagtcctggcgcatggttgtgcgatcttaccttggaacgatacgaggttagggagaagaagatatccaaaaagcagagaccaagaggtttgaaagcaatgggaaacatggactcggactctgaatagagaatgagtgaaggtgctaagtaagctttatgtttgctaaggatgtgtaggaaatgcatggcatggcatctcagctaggtgccaacgaatccaaatcgaaatacaaaatattttagctttgccgctgctt

SEQ ID NO: 55236 - protein, 279 aa, Glycine max
  peptide (1)..(279): Ceres Seq. ID no. 14310765
MENESIIQSNNNTNTMSSVREKNGGDGSLLLRANSDSARQATTSDLVLQWGNRKRLRCMKVQVKDDSSGPVQRTTVRVDRRVVRTDKDSLNKLTFGVNNNNHHHQSNGYPNLRQRPSSPQPRILRNSESSSAMRGGQSNGGVSVRGIASPDRGAHDKRGTHNDNNKSAASSDTAHDSKKGGSPSGSGDAAAPPVWPPKFVIALTNKEKEEDFLAIKGSKLPQRPKKRAKFIQRTLNLVSPGAWLCDLTLERYEVREKKISKKQRPRGLKAMGNMDSDSE

SEQ ID NO: 55237 - protein, 264 aa, Glycine max
  peptide (1)..(264): Ceres Seq. ID no. 14310766
MSSVREKNGGDGSLLLRANSDSARQATTSDLVLQWGNRKRLRCMKVQVKDDSSGPVQRTTVRVDRRVVRTDKDSLNKLTFGVNNNNHHHQSNGYPNLRQRPSSPQPRILRNSESSSAMRGGQSNGGVSVRGIASPDRGAHDKRGTHNDNNKSAASSDTAHDSKKGGSPSGSGDAAAPPVWPPKFVIALTNKEKEEDFLAIKGSKLPQRPKKRAKFIQRTLNLVSPGAWLCDLTLERYEVREKKISKKQRPRGLKAMGNMDSDSE

SEQ ID NO: 55238 - protein, 221 aa, Glycine max
  peptide (1)..(221): Ceres Seq. ID no. 14310767
MKVQVKDDSSGPVQRTTVRVDRRVVRTDKDSLNKLTFGVNNNNHHHQSNGYPNLRQRPSSPQPRILRNSESSSAMRGGQSNGGVSVRGIASPDRGAHDKRGTHNDNNKSAASSDTAHDSKKGGSPSGSGDAAAPPVWPPKFVIALTNKEKEEDFLAIKGSKLPQRPKKRAKFIQRTLNLVSPGAWLCDLTLERYEVREKKISKKQRPRGLKAMGNMDSDSE

SEQ ID NO: 55239 - DNA, 1076 bp, Glycine max
  misc_feature (1)..(1076): Ceres Seq. ID no. 15226410
ataacgacttgctcttcaagcactttgggatctgccttttctttaacaggcgctatgaactcagggtacgtatgtttttccattttgaattaatctttatttgatttaagtgttgatctgcatttgaatattttaagtactagtggacaagatgttgctttataagtatttttcaataaaacagaacaaatatttacaagttgatcaatgaaaatataacacatgcagtatttgtcacatgtacattgtgtataagagtggaaatataggtcaggacaaacaagacttagtcggaacttgtttaaaaaaattcaaggcttaaattaggttggttgccggtttatcaatggaagtggcatgtgcttttttctcacaatcatgatgcagtctgactctgataacataataaactctaatgtcttggttgttatttctctatattttacttttttttattcgtagaaattaaaataattaaaaaaattataacaattcatacatcttcttaaatcaactaagttaaactccttgattttttctatattttgctaacttcagtattctctatctttttcttaaataatgaattaaatccttttttctacacacaagaatagatatttttattaaacatgtatttcatatagcaagttggccctatatatgaagtgaacaattcattgtttaattttattgcagattctcgaagaagagcctaataagaattatttctcgccatggtgtgtgatacccatgatgttcaatgctgttttggaactaataaggagctttaccattgcgttcaagaatggacctcactatagagaaggatggtttctttttggcttcaggttgtttggtttgctgattcctggcttacctgctcatggtccacaagattatattaattccactcttctgggatcaattgaaaaacattttaaagcagattgatgtgtccgtgtactgtacatgatcattccgtaccactccatgtgtatggtcatgcaaactaaaatttacgtgatatataatcaagtttttcaatttaaataatgaaaaaaaaaaaaaaaaaa

SEQ ID NO: 55240 - protein, 66 aa, Glycine max
  peptide (1)..(66): Ceres Seq. ID no. 15226411
MMFNAVLELIRSFTIAFKNGPHYREGWFLFGFRLFGLLIPGLPAHGPQDYINSTLLGSIEKHFKAD

SEQ ID NO: 55241 - protein, 65 aa, Glycine max
  peptide (1)..(65): Ceres Seq. ID no. 15226412
MFNAVLELIRSFTIAFKNGPHYREGWFLFGFRLFGLLIPGLPAHGPQDYINSTLLGSIEKHFKAD

SEQ ID NO: 55242 - protein, 34 aa, Glycine max
  peptide (1)..(34): Ceres Seq. ID no. 15226413
MCFFLTIMMQSDSDNIINSNVLVVISLYFTFFYS

SEQ ID NO: 55243 - DNA, 1607 bp, Glycine max
  misc_feature (1)..(1607): Ceres Seq. ID no. 15176002
gagcaccgtgtgcgtagaggactggtgaacactcactcgccactgctcacgaaccgtataaaccctaaaaccttgatttttcccaatccattccacgcacaatatggcttcagatgctgacatggaggactacggtttcgagtactccgatgaggaggaagtggagcaagacgttgatatcgagaatcaatattacaattcaaaaggtatggtagaaagtgatccagaaggtgcgcttgctggttttgctcaggtagtgcaaatggaacaagaaaaagcagaatggggatttaaagctctaaaacagactgtcaagctatattatcgactgggaaggtataaagagatgatggaagcctatagggagatgttgacatatattaagtcagcagtgactcgtaactatagtgaaaaatgcataaacagcattatggactatgtctcaggttcagcaagccagaactttggccttctccaggaattctaccagactactctgaggtcccttgaagatgcaaagaacgagagattgtggtttaagacaaatctgaagctttgcaagatatattttgatattggtgaatatgggcgtatgaataagatcttgaaggaacttcacaaatcttgtcaaaaagaagatggcacagatgaccacaaaaaaggaactcaacttttggaggtatatgctgtagagattcaaatgtacacagagaccaagaacaacaaaaaacttaagcaactttaccagaaagcactcactattaagtcagcaattccccatccaaggataatgggaataatccatgaatgtggcgggaaaatgcatatggcagagcgccagtgggcagaagcagctactgatttctttgaagctttcaagaattatgatgaagctgggagtcagagacgtatccaatgcttgaagtaccttgttcttgccaacatgttgatggagtctgaagtaaatccatttgatgggcaggaagctaagccatacaagaatgaccctgaaattttggtgatgactaacttaatagcggcttatcaacgtaatgaaatattggaatttgagaaaattctgaagagtaacagaagaactatcatggatgatccatttatcagaaattacattgaggatctgctaaagaatattagaacacaagtcttgctgaagctcatcaaaccatatacaaggatcaggatcccttttatatctaaggaacttaatgttcctgagcatgatgttgagcagctattggtgtcgctgattttggataatagaattcaagggcatattgatcaagtgaaccggctcttagaacgcgctgataggtcgaaaggaatgaaaaagtacactgcagttgacaaatggaacacacagcttaaatctctttatcaaactattaacaacagagtttgttaaaacgtgtatcatggaagtgttatatttcttgttttccccaacttgcagttttgccatgtgaattattgtaagctacactgaggggaggagggagatgggagtgtattaccactatagcggaattcaggtcaaaccaacttgtggttcttgttttatattatagaaaaatataattgtttgaaac

SEQ ID NO: 55244 - protein, 439 aa, Glycine max
  peptide (1)..(439): Ceres Seq. ID no. 15176003
MASDADMEDYGFEYSDEEEVEQDVDIENQYYNSKGMVESDPEGALAGFAQVVQMEQEKAEWGFKALKQTVKLYYRLGRYKEMMEAYREMLTYIKSAVTRNYSEKCINSIMDYVSGSASQNFGLLQEFYQTTLRSLEDAKNERLWFKTNLKLCKIYFDIGEYGRMNKILKELHKSCQKEDGTDDHKKGTQLLEVYAVEIQMYTETKNNKKLKQLYQKALTIKSAIPHPRIMGIIHECGGKMHMAERQWAEAATDFFEAFKNYDEAGSQRRIQCLKYLVLANMLMESEVNPFDGQEAKPYKNDPEILVMTNLIAAYQRNEILEFEKILKSNRRTIMDDPFIRNYIEDLLKNIRTQVLLKLIKPYTRIRIPFISKELNVPEHDVEQLLVSLILDNRIQGHIDQVNRLLERADRSKGMKKYTAVDKWNTQLKSLYQTINNRVC

SEQ ID NO: 55245 - protein, 433 aa, Glycine max
  peptide (1)..(433): Ceres Seq. ID no. 15176004
MEDYGFEYSDEEEVEQDVDIENQYYNSKGMVESDPEGALAGFAQVVQMEQEKAEWGFKALKQTVKLYYRLGRYKEMMEAYREMLTYIKSAVTRNYSEKCINSIMDYVSGSASQNFGLLQEFYQTTLRSLEDAKNERLWFKTNLKLCKIYFDIGEYGRMNKILKELHKSCQKEDGTDDHKKGTQLLEVYAVEIQMYTETKNNKKLKQLYQKALTIKSAIPHPRIMGIIHECGGKMHMAERQWAEAATDFFEAFKNYDEAGSQRRIQCLKYLVLANMLMESEVNPFDGQEAKPYKNDPEILVMTNLIAAYQRNEILEFEKILKSNRRTIMDDPFIRNYIEDLLKNIRTQVLLKLIKPYTRIRIPFISKELNVPEHDVEQLLVSLILDNRIQGHIDQVNRLLERADRSKGMKKYTAVDKWNTQLKSLYQTINNRVC

SEQ ID NO: 55246 - protein, 404 aa, Glycine max
  peptide (1)..(404): Ceres Seq. ID no. 15176005
MVESDPEGALAGFAQVVQMEQEKAEWGFKALKQTVKLYYRLGRYKEMMEAYREMLTYIKSAVTRNYSEKCINSIMDYVSGSASQNFGLLQEFYQTTLRSLEDAKNERLWFKTNLKLCKIYFDIGEYGRMNKILKELHKSCQKEDGTDDHKKGTQLLEVYAVEIQMYTETKNNKKLKQLYQKALTIKSAIPHPRIMGIIHECGGKMHMAERQWAEAATDFFEAFKNYDEAGSQRRIQCLKYLVLANMLMESEVNPFDGQEAKPYKNDPEILVMTNLIAAYQRNEILEFEKILKSNRRTIMDDPFIRNYIEDLLKNIRTQVLLKLIKPYTRIRIPFISKELNVPEHDVEQLLVSLILDNRIQGHIDQVNRLLERADRSKGMKKYTAVDKWNTQLKSLYQTINNRVC

SEQ ID NO: 55247 - DNA, 1509 bp, Glycine max
  misc_feature (1)..(1509): Ceres Seq. ID no. 14308863
gctataattgggagtagcagtacgggatctttatcagttcaacaaactgttaatacaacatctgggtctgtagcaccaagtacaacagctggtcttaatatggctgaggcattggcacagactccatcccgagctcgctctgctccccaggtgctagtcaaaacccaaaggcttgaggaactggctatcaagcagtcaagacagttgattccagtaacaccctcaatgcctaaagcttcggttcataattctgagaaatcaaagcccaaaacagctatcagaaatgctgatatgaatgtagttaccaagactgtgccacagcaaccgtctgcattgcacattgcaagccaatctgttcgcagtgttaatgccaaagttgatactccaaagacatctgggaagtttactgatctcaaatcagtagtgtgggaaaatggtgcttcccctacctctaaggatgtatcaaatccaacaaattattctaacagcaaaccaggaaatcaacatgctgttgcttcaggagctgcctctgcaccattgaggaacccaaataacctaaaatcccctacggagcggaagccatcttctatggatttgaaattaggttccaatttggagaagaaacattccatctctcaagtgcagagccggaatgatttcttcaatctcattaagaagaaaacattgatgaactgctctgcagttcttccagattctggcccgatggtttcatctcctgcgatggagaaatctggtgaagtaaatagggaaatagttaacccttctgcaagtccccagtctcttggaaatggtactgaactgaccagcaatggtacccatgctcatgaagtgattcacagaatttctgataatgaggagaaagaatcaaatcccagtgttacaatatatcccgaggaggaagaagctgctttccttcgttctcttggctgggaggagaactcagatgaggatgaaggccttacagaggaggaaatcaatgctttctatcaagagtgcaagaaattggacccaactgcattcaagctaagccagggaatgcagccaaagctgtccaagttgtttgaatcttatgcatctaacttgcgtgaatcttctgctgagttgagctcttctgatcccggatctgaagcttgatgtattgtttctttaatcatagttagatccaagcttcaaattttgatggcagatgactagttccattccttttgttctgaaggccaatgatttgagagtgaaagaagaggggtgggtttgattggaaccctgcattttgcaaatattgcaataagttacaggtgcctcaatcctgcctggtttacagggaatttttttttccttttttgttttttggttatagggttggtagggtaggggctattttaaggtgctgggccattgcatcttttggggtattttgatccgtttcttttctttcatgagggtttgattctacttgataaagtttatgctgtttttggtcaattttac

SEQ ID NO: 55248 - protein, 384 aa, Glycine max
  peptide (1)..(384): Ceres Seq. ID no. 14308864
AIIGSSSTGSLSVQQTVNTTSGSVAPSTTAGLNMAEALAQTPSRARSAPQVLVKTQRLEELAIKQSRQLIPVTPSMPKASVHNSEKSKPKTAIRNADMNVVTKTVPQQPSALHIASQSVRSVNAKVDTPKTSGKFTDLKSVVWENGASPTSKDVSNPTNYSNSKPGNQHAVASGAASAPLRNPNNLKSPTERKPSSMDLKLGSNLEKKHSISQVQSRNDFFNLIKKKTLMNCSAVLPDSGPMVSSPAMEKSGEVNREIVNPSASPQSLGNGTELTSNGTHAHEVIHRISDNEEKESNPSVTIYPEEEEAAFLRSLGWEENSDEDEGLTEEEINAFYQECKKLDPTAFKLSQGMQPKLSKLFESYASNLRESSAELSSSDPGSEA

SEQ ID NO: 55249 - protein, 351 aa, Glycine max
  peptide (1)..(351): Ceres Seq. ID no. 14308865
MAEALAQTPSRARSAPQVLVKTQRLEELAIKQSRQLIPVTPSMPKASVHNSEKSKPKTAIRNADMNVVTKTVPQQPSALHIASQSVRSVNAKVDTPKTSGKFTDLKSVVWENGASPTSKDVSNPTNYSNSKPGNQHAVASGAASAPLRNPNNLKSPTERKPSSMDLKLGSNLEKKHSISQVQSRNDFFNLIKKKTLMNCSAVLPDSGPMVSSPAMEKSGEVNREIVNPSASPQSLGNGTELTSNGTHAHEVIHRISDNEEKESNPSVTIYPEEEEAAFLRSLGWEENSDEDEGLTEEEINAFYQECKKLDPTAFKLSQGMQPKLSKLFESYASNLRESSAELSSSDPGSEA

SEQ ID NO: 55250 - protein, 309 aa, Glycine max
  peptide (1)..(309): Ceres Seq. ID no. 14308866
MPKASVHNSEKSKPKTAIRNADMNVVTKTVPQQPSALHIASQSVRSVNAKVDTPKTSGKFTDLKSVVWENGASPTSKDVSNPTNYSNSKPGNQHAVASGAASAPLRNPNNLKSPTERKPSSMDLKLGSNLEKKHSISQVQSRNDFFNLIKKKTLMNCSAVLPDSGPMVSSPAMEKSGEVNREIVNPSASPQSLGNGTELTSNGTHAHEVIHRISDNEEKESNPSVTIYPEEEEAAFLRSLGWEENSDEDEGLTEEEINAFYQECKKLDPTAFKLSQGMQPKLSKLFESYASNLRESSAELSSSDPGSEA

SEQ ID NO: 55251 - DNA, 2160 bp, Glycine max
  misc_feature (1)..(2160): Ceres Seq. ID no. 15176922
ggcatttccataaattccactctcaagattcatatctgattctgaagctcgaaattgagaatggcgtcttctctctctactacctcttttctctgcacacactctctgaaatccccaacgctgaaacctctcacaaagcctcattgcttcgctcgttttcgtgctcgagttcgagttccacccaaagcttcttcgcaaaacaacaatgccgataatgattctgttgaaactccgtccctccaaccctcttcccctaaaccaccatataattcctcttcttcgctgcttcgtcatttcagtaatggctggtttaaatttgatgaacttgggatggagatagtgctcattgctctgcctgctgctttggctttggcggctgatcctattgcctcattgattgacacagcgttcgttggccatataggggcagttgaattggctgcagttggggtttcagcttctgtgtttaatctagtgtcaaaagcattcaatgttcctttacttaatgttactacatcctttgttgcggaggagcaggcactgattaggaaggaggaagagtccattctgagtgatgaaaatggaaaggaccaaagcaagaagctccttccttcagtatcaacttctttagcacttgctgcaactcttggaattgctgaaactgtggtgcttacgcttggctctggcattcttatgaatatcatgggtatacctgctgattctccgatgcgtggacctgctgagcagtttcttacattgagggcctttggtgctccagcaattgtgctcgcattagctgcacaaggcacctttcgtggatttttggatacaaagacacctctatatgctgttggtgtgggaaactttcttaatgccatattggatccaatattgatatttctttttggtcttggcattggtggtgctgcagttgctaccgttatctctgaatatttaatagctttcattctgctatggaaattgagtgacaaagtgctgctaatcccttccgaatttgatgggagaaaattttttagctatctgaaatccggtggtcttgtttctgctaggactttggctgtgtttataactgtgacactgtcaacatccgtggcagctcagcagggccctatacctatggcaggccatcaaatttgcatgcaagtctggttgtcggtttctttgctcaatgatgctttggcgcttgctggtcaggcacttcttgcccgtaattactccctgggaaactatgagcaagcacgccttgttatatatagagtgatacagattggtttaggagcaggaatcattttgtcaataatcttattctttgggtttggagcgttttctagtttatttagcacagattctgaagttctggatgttgcttggtcaggtatatggtttgttgctggatctcaaccagtgaatgctttggcatttgttattgatgggatttattatggggtatcagactttggatatgctgcttactcgatggttctagttggactagtttcttcaactttccttctggtggcggctccagtagggcttcctggagtctggactggattgtttattttcatggctttgcgtgttctagctggagtttggaggttgagcagtaaaagtgggccttgggatacaatctggtatagagatggagcagaagattgaccaacatgcattcagtactcagaagttccaacattcactcctcaggttaaaaaaccattttcagaatgatcagaaaatgattctctcaagagctctcttatatgagggcactaaattcctgcaaagagaatccagtatcactgcaggactatagtaaattattgaaatgtagcagccaattactgctaaccgattgccaaaatcttgctgattcaagtattgattgaatggccaatagaacagggagggagaaaattattgaatgaccagcctacagcttagagggtagtctttttgaccctctgttttttgttggaaatttgtatttattaggaaattgcacaattttgtatattttcattgctaaaggtagctgcaatgcatgtaagaataagtactctgacttgtccattgcagctattcaagttagttaggtgtgtactgtgtagtaattacaattttttaatagttttttacgtt

SEQ ID NO: 55252 - protein, 539 aa, Glycine max
  peptide (1)..(539): Ceres Seq. ID no. 15176923
MASSLSTTSFLCTHSLKSPTLKPLTKPHCFARFRARVRVPPKASSQNNNADNDSVETPSLQPSSPKPPYNSSSSLLRHFSNGWFKFDELGMEIVLIALPAALALAADPIASLIDTAFVGHIGAVELAAVGVSASVFNLVSKAFNVPLLNVTTSFVAEEQALIRKEEESILSDENGKDQSKKLLPSVSTSLALAATLGIAETVVLTLGSGILMNIMGIPADSPMRGPAEQFLTLRAFGAPAIVLALAAQGTFRGFLDTKTPLYAVGVGNFLNAILDPILIFLFGLGIGGAAVATVISEYLIAFILLWKLSDKVLLIPSEFDGRKFFSYLKSGGLVSARTLAVFITVTLSTSVAAQQGPIPMAGHQICMQVWLSVSLLNDALALAGQALLARNYSLGNYEQARLVIYRVIQIGLGAGIILSIILFFGFGAFSSLFSTDSEVLDVAWSGIWFVAGSQPVNALAFVIDGIYYGVSDFGYAAYSMVLVGLVSSTFLLVAAPVGLPGVWTGLFIFMALRVLAGVWRLSSKSGPWDTIWYRDGAED

SEQ ID NO: 55253 - protein, 449 aa, Glycine max
  peptide (1)..(449): Ceres Seq. ID no. 15176924
MEIVLIALPAALALAADPIASLIDTAFVGHIGAVELAAVGVSASVFNLVSKAFNVPLLNVTTSFVAEEQALIRKEEESILSDENGKDQSKKLLPSVSTSLALAATLGIAETVVLTLGSGILMNIMGIPADSPMRGPAEQFLTLRAFGAPAIVLALAAQGTFRGFLDTKTPLYAVGVGNFLNAILDPILIFLFGLGIGGAAVATVISEYLIAFILLWKLSDKVLLIPSEFDGRKFFSYLKSGGLVSARTLAVFITVTLSTSVAAQQGPIPMAGHQICMQVWLSVSLLNDALALAGQALLARNYSLGNYEQARLVIYRVIQIGLGAGIILSIILFFGFGAFSSLFSTDSEVLDVAWSGIWFVAGSQPVNALAFVIDGIYYGVSDFGYAAYSMVLVGLVSSTFLLVAAPVGLPGVWTGLFIFMALRVLAGVWRLSSKSGPWDTIWYRDGAED

SEQ ID NO: 55254 - protein, 328 aa, Glycine max
  peptide (1)..(328): Ceres Seq. ID no. 15176925
MNIMGIPADSPMRGPAEQFLTLRAFGAPAIVLALAAQGTFRGFLDTKTPLYAVGVGNFLNAILDPILIFLFGLGIGGAAVATVISEYLIAFILLWKLSDKVLLIPSEFDGRKFFSYLKSGGLVSARTLAVFITVTLSTSVAAQQGPIPMAGHQICMQVWLSVSLLNDALALAGQALLARNYSLGNYEQARLVIYRVIQIGLGAGIILSIILFFGFGAFSSLFSTDSEVLDVAWSGIWFVAGSQPVNALAFVIDGIYYGVSDFGYAAYSMVLVGLVSSTFLLVAAPVGLPGVWTGLFIFMALRVLAGVWRLSSKSGPWDTIWYRDGAED

SEQ ID NO: 55255 - DNA, 1747 bp, Glycine max
  misc_feature (1)..(1747): Ceres Seq. ID no. 15171005
aataaggctttcacatgtcagatgtgtgaactcagtgtcaatgaggttgatactgtacttctctgtgatgcttgtgaaaagggatttcacttgaagtgcctgcagccatcagtcttgagaggaattcataatagagttgattggcattgtatgaggtgcttgagtttaagtggtggaaagcctttgcctccaaaatatggtcgtgtcatgagatcctcaaacacaccgccaaaattgccctctaatacaggtggcgttcaaccatgttctgagaagaaagtagagaatatcgatccaaaggtcatcccacagacgttagcaacaaatgggagctctgttccaactgtttccggtggccatcacaatgttgagttgccatccgaatcaaagataccagataccaaagatatgcaagggactggcatttcatccaccattgaagctattgataagaagcctgatccaaagaactctatgaaatctcttagtgcagcttatagtccttccccttgcttgctaggtgaaaattctgctcaacaaataaattctaaggttttgactggtagagagacttcggaatctgagtctcttcctaaattatctgagctagctaagtgtgaaaatttgcaatcatcacaagattttcaagttgaacatacaatgtcacaagacaatgctgaagtatcatcagataaacatgttgacagtaatatgatgaataaccaacagaaggaatctcatggagaagaaaatttagtttatgatataaagcgtgatgaccaagatgctgcacttgaaaattctgttggaacttctggaactaatactgatggtagacagcactctgcattatcttcagatagttcacatgctgtagaatggattggtgatgtagtacaacttgtagatgagaaaaagtattaccaatcttgctgtgttgatggagtaacatataggctgcagggtcatgctcttttccccaccggccatgggaaactaactccttctaaactccagtctatgtgggaagattgcaaaactgggttaaagtgggttaaggtgacaaactgctactttcctgatgatttgcctgggaatattggtcatccgtgtatatctgaagtcaacgaggtttatgaatctaatagtgatagaactgaaatggctagctctattcgagggccatgtgaagtcctcccatctgataaatttaaacaagagaatgacaggcgatgtcagttacgaaatgaggaaagttctagagtgcagcccattttcctatgcaggtggttttatgatgaattcaagaagttatttcaacctgtaatcagttgattatgtcttgaacttatatgttttgtggttcctacatggtgccatttttgtggtatttggtggggcttcgaacaggatatttcttggatgggtaattaagcatgcattaagattcaattgagacccattataaggcacattgcagaagcattgcctcctcgtacagagtgttttatcatttcagcatgaattgcttttggtgtaaaatatgtaactgaatctgtggactgcttagtttagctttcgctttggtagttctttttctgatagatattcattctgtataattcttttttgggcattaggctctttaggcccaataattacattattatctttgaattagatcagtgtagttcccttagtttgctgaattgtaagatacttcatttgtacaaaagccatttcttct

SEQ ID NO: 55256 - protein, 444 aa, Glycine max
  peptide (1)..(444): Ceres Seq. ID no. 15171006
NKAFTCQMCELSVNEVDTVLLCDACEKGFHLKCLQPSVLRGIHNRVDWHCMRCLSLSGGKPLPPKYGRVMRSSNTPPKLPSNTGGVQPCSEKKVENIDPKVIPQTLATNGSSVPTVSGGHHNVELPSESKIPDTKDMQGTGISSTIEAIDKKPDPKNSMKSLSAAYSPSPCLLGENSAQQINSKVLTGRETSESESLPKLSELAKCENLQSSQDFQVEHTMSQDNAEVSSDKHVDSNMMNNQQKESHGEENLVYDIKRDDQDAALENSVGTSGTNTDGRQHSALSSDSSHAVEWIGDVVQLVDEKKYYQSCCVDGVTYRLQGHALFPTGHGKLTPSKLQSMWEDCKTGLKWVKVTNCYFPDDLPGNIGHPCISEVNEVYESNSDRTEMASSIRGPCEVLPSDKFKQENDRRCQLRNEESSRVQPIFLCRWFYDEFKKLFQPVIS

SEQ ID NO: 55257 - protein, 437 aa, Glycine max
  peptide (1)..(437): Ceres Seq. ID no. 15171007
MCELSVNEVDTVLLCDACEKGFHLKCLQPSVLRGIHNRVDWHCMRCLSLSGGKPLPPKYGRVMRSSNTPPKLPSNTGGVQPCSEKKVENIDPKVIPQTLATNGSSVPTVSGGHHNVELPSESKIPDTKDMQGTGISSTIEAIDKKPDPKNSMKSLSAAYSPSPCLLGENSAQQINSKVLTGRETSESESLPKLSELAKCENLQSSQDFQVEHTMSQDNAEVSSDKHVDSNMMNNQQKESHGEENLVYDIKRDDQDAALENSVGTSGTNTDGRQHSALSSDSSHAVEWIGDVVQLVDEKKYYQSCCVDGVTYRLQGHALFPTGHGKLTPSKLQSMWEDCKTGLKWVKVTNCYFPDDLPGNIGHPCISEVNEVYESNSDRTEMASSIRGPCEVLPSDKFKQENDRRCQLRNEESSRVQPIFLCRWFYDEFKKLFQPVIS

SEQ ID NO: 55258 - protein, 394 aa, Glycine max
  peptide (1)..(394): Ceres Seq. ID no. 15171008
MRCLSLSGGKPLPPKYGRVMRSSNTPPKLPSNTGGVQPCSEKKVENIDPKVIPQTLATNGSSVPTVSGGHHNVELPSESKIPDTKDMQGTGISSTIEAIDKKPDPKNSMKSLSAAYSPSPCLLGENSAQQINSKVLTGRETSESESLPKLSELAKCENLQSSQDFQVEHTMSQDNAEVSSDKHVDSNMMNNQQKESHGEENLVYDIKRDDQDAALENSVGTSGTNTDGRQHSALSSDSSHAVEWIGDVVQLVDEKKYYQSCCVDGVTYRLQGHALFPTGHGKLTPSKLQSMWEDCKTGLKWVKVTNCYFPDDLPGNIGHPCISEVNEVYESNSDRTEMASSIRGPCEVLPSDKFKQENDRRCQLRNEESSRVQPIFLCRWFYDEFKKLFQPVIS

SEQ ID NO: 55259 - DNA, 1592 bp, Glycine max
  misc_feature (1)..(1592): Ceres Seq. ID no. 14312423
ttttttacaaaacttggatcttttctttcttaaaaccaaaggcacgctgaagcctcacaatagtgcaagtgatcccaaccaggttggcaccccacacgctatcattcatctgcagcacaccaagagatatagatctagttccttatgtcattgccatatcaagttctcattttgaacaatgacatatggatgttttctaaaattctacaacttactcttagtggagactatttatggttggagaaaattccatgtcattgtttgatttgagaacttgttaacaaggatataaatagcttgatataggttttgtcctatttttctttgatcaactatgccttctttctttgcaatctcaatttacaattggtgtgattcttaataatactaattaattcccatgaattaattgtcagagcatggttgcaatgatggtgaagcatctttaggttcaccccttgctggacgattgtttgtgctagttggtgcgggaggtgcagggaaagcactggcatttggtgctaaaagcagaggagctcgtctagtcatctttgacattgattttggtataaaacaaaggcacatatgttgtctactataaaatttaattttcctttgattctctctcgtgatagagttgaagttttaccaacatcaacatacctgtcacaccttccaattactttccccaaaaagtgccacaaagggtaggtggggtgggtggaattacagaaacacccttacctcaatctgcataactttgatcaatcaagtttaatactacctttttttttgttacgtcaagtttaataccttgatgtagcatattatagtttttcacgaatttcactgttatacaaaaactgctctatatctagagattatgttgcattgacatgttttcttattctcttgtgttcaaaaagatagagcaaaatctcttgcttgtgctgtatttggtgaagctcagcctttcaaagagttggtcaactttcagccagagaaaggggcaattcttgcgaatgcaacacctgtaggaatgcatcccaatacagacagaattcctgtggcagaggctactttggaagactaccggttagtctttgatgctgtgtatactccaagaagaaccagattgttgaacgaagcggatgctgcaggagcaataactgtggctggggtagaaatgttcctaaggcaggccattggtcagttcaatcttttcactggcctagaagcacctgaagaatttatgcgggaaattgttttatccaaattttgaaggcgccgctttcataaattgatcctacaacttgaaggaggctgcatgcctgcacctatcaagaaattcttgtatcacattgcataacatttttctttaaaaaaaatcccttatttttagttgggacgacaactataatgcaacataataaattgaaataataggcaaaatagcaaaagttgttgtgggcgcagctgaaagacatggttcaacttaatttgtggttttaggaataaaaatgttgtgattctctgaagaagaaaaaaatgttgtcatagcttcataggtaatattaacttgggccttacac

SEQ ID NO: 55260 - protein, 80 aa, Glycine max
  peptide (1)..(80): Ceres Seq. ID no. 14312424
MHPNTDRIPVAEATLEDYRLVFDAVYTPRRTRLLNEADAAGAITVAGVEMFLRQAIGQFNLFTGLEAPEEFMREIVLSKF

SEQ ID NO: 55261 - protein, 57 aa, Glycine max
  peptide (1)..(57): Ceres Seq. ID no. 14312425
FLQNLDLFFLKTKGTLKPHNSASDPNQVGTPHAIIHLQHTKRYRSSSLCHCHIKFSF

SEQ ID NO: 55262 - protein, 46 aa, Glycine max
  peptide (1)..(46): Ceres Seq. ID no. 14312426
MFSYSLVFKKIEQNLLLVLYLVKLSLSKSWSTFSQRKGQFLRMQHL

SEQ ID NO: 55263 - DNA, 1704 bp, Glycine max
  misc_feature (1)..(1704): Ceres Seq. ID no. 15169180
aactccctactaccagtattacccttctctctctctccctctttctctgttgggtcactcacattattaaaaataaccaccctcacacttcccaacgcttccttaaccatgagccacgccggcctctggcttccgccgcagttcctcgccggagaccctgacacaaccctttcgaactccgatttcagcttcccttccgagttcccctacgagttcggattgtcttctccggagagcagcgacgacggcgaagaggacttcttcgccggcctcagtcgccgactcggtcagacctcgcttcacgaaactcgcaagcaactctcatccactgtttcggagattccaaggaaaactcagggtttggtcggttcccctcagtccacgctcgccggaataggaagctggtccggtcggagcgccgtttccggcgacggaagccccaacgggtactcgcgtgtcccttcgccctcgacgacgccgtttgacgaaaacaacgacccctgggaagtgatttacgcagccgcagttcaaatcgcaaggatgaagatgaacaacaacaacaaccgagttccagcacagtatgattttcacaataatagaaggttactcactcatcattgccctaaccggagtttcaatcaggtcgtgagagcgaagcaacagtgtggttcggattggggaaggccaaccaagcctaataactatttggttcagcagcaacaggttaaggttcagagtagagcgcgtgagtttgggcacgagagtgtgaatgcgaaatgcactcgtccatctgcgtggcccccttcgcaagttcagcagcaaaacaaccgggtacagtttggcggatccgggtctagggttggtggatcttctgtgaaaagggggtgtggtggaactggggtgttcttgcctcgccattatgaaaccccttctgagccacgtcgccagaaaactggttgtgcgcctgttttgttaccagcaaaggtggttcatgctttgaacttgaatattgatgacttgaatgggactacccaaccgcgtttctcgaatgcttttgctacggattatgaagcgattttagcgaggagaaacgcgcttctcatgcaggagcagcagcagcagcagcagaggttaataagtgttcggcgagaagaggcagccaactatgaaattcgccttcctcaagagtggacttactgacaaaagaaggcacaaatttctcctaaggaatttgaagaaatttggaatagtctattttggttgttttgacagaagatgaaattgaagaatgtgtttgggctagtgtttaggttcaaataaaacatctagtttttctagggagaaaaaaaggttgcattgcagcttttgggacctggttttagtggaaggaaatagtgagaggatagtagttttaggcaaggcttctttttcctttttttaccctttttatagtaatattataagttgttgtaataagataggataagcgggtcgttttcatttgccttatggttatggtgatgacactgatggggctaaagcgcaaggtatggtatggttcaacgttggccaagtttcaagtccaagtgttgaaaattggtcgattacccatgtgtgcctttactgaaaatccctgctcattattatggtatatagtttgtaataagttatacttacaatgtaataaaattagctcttctatcg

SEQ ID NO: 55264 - protein, 399 aa, Glycine max
  peptide (1)..(399): Ceres Seq. ID no. 15169181
NSLLPVLPFSLSPSFSVGSLTLLKITTLTLPNASLTMSHAGLWLPPQFLAGDPDTTLSNSDFSFPSEFPYEFGLSSPESSDDGEEDFFAGLSRRLGQTSLHETRKQLSSTVSEIPRKTQGLVGSPQSTLAGIGSWSGRSAVSGDGSPNGYSRVPSPSTTPFDENNDPWEVIYAAAVQIARMKMNNNNNRVPAQYDFHNNRRLLTHHCPNRSFNQVVRAKQQCGSDWGRPTKPNNYLVQQQQVKVQSRAREFGHESVNAKCTRPSAWPPSQVQQQNNRVQFGGSGSRVGGSSVKRGCGGTGVFLPRHYETPSEPRRQKTGCAPVLLPAKVVHALNLNIDDLNGTTQPRFSNAFATDYEAILARRNALLMQEQQQQQQRLISVRREEAANYEIRLPQEWTY

SEQ ID NO: 55265 - protein, 363 aa, Glycine max
  peptide (1)..(363): Ceres Seq. ID no. 15169182
MSHAGLWLPPQFLAGDPDTTLSNSDFSFPSEFPYEFGLSSPESSDDGEEDFFAGLSRRLGQTSLHETRKQLSSTVSEIPRKTQGLVGSPQSTLAGIGSWSGRSAVSGDGSPNGYSRVPSPSTTPFDENNDPWEVIYAAAVQIARMKMNNNNNRVPAQYDFHNNRRLLTHHCPNRSFNQVVRAKQQCGSDWGRPTKPNNYLVQQQQVKVQSRAREFGHESVNAKCTRPSAWPPSQVQQQNNRVQFGGSGSRVGGSSVKRGCGGTGVFLPRHYETPSEPRRQKTGCAPVLLPAKVVHALNLNIDDLNGTTQPRFSNAFATDYEAILARRNALLMQEQQQQQQRLISVRREEAANYEIRLPQEWTY

SEQ ID NO: 55266 - protein, 219 aa, Glycine max
  peptide (1)..(219): Ceres Seq. ID no. 15169183
MKMNNNNNRVPAQYDFHNNRRLLTHHCPNRSFNQVVRAKQQCGSDWGRPTKPNNYLVQQQQVKVQSRAREFGHESVNAKCTRPSAWPPSQVQQQNNRVQFGGSGSRVGGSSVKRGCGGTGVFLPRHYETPSEPRRQKTGCAPVLLPAKVVHALNLNIDDLNGTTQPRFSNAFATDYEAILARRNALLMQEQQQQQQRLISVRREEAANYEIRLPQEWTY

SEQ ID NO: 55267 - DNA, 1422 bp, Glycine max
  misc_feature (1)..(1422): Ceres Seq. ID no. 15170968
acttctcagttctcactctcactccgtagaaagaaccctagaatcagaattctccgtctatgttgcagaagcagctacctccccccattgaggcctcttccgatgaagagcaacgaccttcctccaagcaacacacagaagaaggagtttcctcttcagaagaagcttcttcccaagaagaagacgacgacgaccaacctcccacccttcctctcgcttccgcaaacccccacccgaaaccgtcgtcctccgactccgacaccgacttcgagcccaccaaagtaaaacccaagcccacggaccaggcccagaagccccagccctcacccgcgccgcccaaatggggatccaagcgccctgcccagaacaacgcccctgccactgacccgaaacgcgcgaagaagaaattgaccaattcttcttccgccgctgccgcccacgagacggaggagaagtccggtggcggccaagcgaagttgtctcagagactcttcagcaaggaagacgaactcgccattcttaagggcatggctgagttcatttcgaagacgggccaagacccttacaagtacgccgatgccttccaaaatttcgttaagaattcgctccgcgtggaggcttcgagcaaccagatcaaggagaagatccgacggctgaagaagaagtttgaaactaaagcacagagagcgaagaaatgggaggaccctgagttctccaaatttcacgaccggactgtgtttgaattatcaaagaaggtttggggagaaggagccaatgggctggtggagaagccaaaacctaataatggaaaaagaaaaactgccaagactccaaagaaggatgctactagcaggaatgtagtagcaaaatctgaaactacaacactactggagtcgatggagttggaggagtgtgggaatgtaaatttgctttaccgcgaagtatctggtttcaaagaactgaatgaggatgagatgaagaggggattggcgttaattggagaatctaagaggaaagagttggagggcaagtggaggaaattgcgacttgctgagatggaactggttgcgaatcgctcactacttattggggagcagattaagttgatatttgaagcacttcagtaatccaacaactagggtttattgtgttaggtatcactttttgccttttcggtactgcctgccatatgtattgtggatcattgtaattttgtgtctatggtattgatatagtcttttttattaagtaggcagtgttgtttagttgttggccttgtgaaaatgtgccgcatagtcgtccatttcaggttctctttttcaattaagatgtgccatcattaactccagaaaatgccgaaattaaacacttaccattttgtgtagatatatgatggacacatcatggttatgtgtacgtttc

SEQ ID NO: 55268 - protein, 355 aa, Glycine max
  peptide (1)..(355): Ceres Seq. ID no. 15170969
MLQKQLPPPIEASSDEEQRPSSKQHTEEGVSSSEEASSQEEDDDDQPPTLPLASANPHPKPSSSDSDTDFEPTKVKPKPTDQAQKPQPSPAPPKWGSKRPAQNNAPATDPKRAKKKLTNSSSAAAAHETEEKSGGGQAKLSQRLFSKEDELAILKGMAEFISKTGQDPYKYADAFQNFVKNSLRVEASSNQIKEKIRRLKKKFETKAQRAKKWEDPEFSKFHDRTVFELSKKVWGEGANGLVEKPKPNNGKRKTAKTPKKDATSRNVVAKSETTTLLESMELEECGNVNLLYREVSGFKELNEDEMKRGLALIGESKRKELEGKWRKLRLAEMELVANRSLLIGEQIKLIFEALQ

SEQ ID NO: 55269 - protein, 199 aa, Glycine max
  peptide (1)..(199): Ceres Seq. ID no. 15170970
MAEFISKTGQDPYKYADAFQNFVKNSLRVEASSNQIKEKIRRLKKKFETKAQRAKKWEDPEFSKFHDRTVFELSKKVWGEGANGLVEKPKPNNGKRKTAKTPKKDATSRNVVAKSETTTLLESMELEECGNVNLLYREVSGFKELNEDEMKRGLALIGESKRKELEGKWRKLRLAEMELVANRSLLIGEQIKLIFEALQ

SEQ ID NO: 55270 - DNA, 1382 bp, Glycine max
  misc_feature (1)..(1382): Ceres Seq. ID no. 14312416
aaaaaacccctaaagtctcattcttcttccccgcagcgccgcacagactcatcaaactcgttgtgactgcagctgcacagattttcctcttctctgtgcctttgcgagaacgcgcgtttggtttcaattcaatggcgggaggtaaagcgaagaaggaaaaggggaagccccatcagcagcagaagcacatgccctaccaaggcggaatatcgttccacaaatcaaagggtcagcacattctcaagaaccccttgctcgtcgattccattgtggagaaggccggcgtcaagagcaccgacgtcatcctcgagatcggtcccgggaccggtaacttgacgaagaagcttctcgaagccggcaagaaggtcatcgccgtcgagatcgatccccggatggttctcgagctccagagacggttccagggtacccctcactccaatcgcctcacggttatccaaggtgatgtgttgaagactgaacttccttattttgacatttgtgttgcaaacattccctaccaaatatcttctcctctcacattcaagttactcaagcacgaacctgcttttagggctgcaatcataatgttccagagagaatttgccatgagactggttgctcagcccggtgataaactatattgtcgtctcacggtcaacactcaactacatgctcgagtcttccacctcctcaaagttggaagaaacaacttcaggccccctcccaaggtggattcctctgtggtgcgaattgagcccaggaaaccccgtattgaagttaagcaaaaggagtgggatgggtttttgcggatttgttttaacaggaagaacaaaacacttggttcgatatttaggcagaagagtgtgatctccttgcttgaaaaaaactataggactgtgcgggcactggaacttgggcaagaagattcactaaaggaagtggatgctaaaatggacttctctagttttggtgatgatcgaggtatggagatggatgatgatggagcagatgatgatgaaatggaagttgaggatggggaagcagatgaggtgcaatctgaattcaaggacaaggttttgggtgttctgaaagagggagattttgaagagaagaggtcatccaagctcacattgcaggaattcctatacctgctttctctgtttaacaaaactggcatacacttctattgattttagattatcaattttctcgatagtttcttccctatttaaatctacactattctttcaataggcttatcattattcagaagttttccaagagagagtgatatcaaaaactgttaactatttatgcattgtattttgttaagctccatcgtggatgtatactactctatataatctttaggaggtttgatc

SEQ ID NO: 55271 - protein, 395 aa, Glycine max
  peptide (1)..(395): Ceres Seq. ID no. 14312417
KTPKVSFFFPAAPHRLIKLVVTAAAQIFLFSVPLRERAFGFNSMAGGKAKKEKGKPHQQQKHMPYQGGISFHKSKGQHILKNPLLVDSIVEKAGVKSTDVILEIGPGTGNLTKKLLEAGKKVIAVEIDPRMVLELQRRFQGTPHSNRLTVIQGDVLKTELPYFDICVANIPYQISSPLTFKLLKHEPAFRAAIIMFQREFAMRLVAQPGDKLYCRLTVNTQLHARVFHLLKVGRNNFRPPPKVDSSVVRIEPRKPRIEVKQKEWDGFLRICFNRKNKTLGSIFRQKSVISLLEKNYRTVRALELGQEDSLKEVDAKMDFSSFGDDRGMEMDDDGADDDEMEVEDGEADEVQSEFKDKVLGVLKEGDFEEKRSSKLTLQEFLYLLSLFNKTGIHFY

SEQ ID NO: 55272 - protein, 352 aa, Glycine max
  peptide (1)..(352): Ceres Seq. ID no. 14312418
MAGGKAKKEKGKPHQQQKHMPYQGGISFHKSKGQHILKNPLLVDSIVEKAGVKSTDVILEIGPGTGNLTKKLLEAGKKVIAVEIDPRMVLELQRRFQGTPHSNRLTVIQGDVLKTELPYFDICVANIPYQISSPLTFKLLKHEPAFRAAIIMFQREFAMRLVAQPGDKLYCRLTVNTQLHARVFHLLKVGRNNFRPPPKVDSSVVRIEPRKPRIEVKQKEWDGFLRICFNRKNKTLGSIFRQKSVISLLEKNYRTVRALELGQEDSLKEVDAKMDFSSFGDDRGMEMDDDGADDDEMEVEDGEADEVQSEFKDKVLGVLKEGDFEEKRSSKLTLQEFLYLLSLFNKTGIHFY

SEQ ID NO: 55273 - protein, 333 aa, Glycine max
  peptide (1)..(333): Ceres Seq. ID no. 14312419
MPYQGGISFHKSKGQHILKNPLLVDSIVEKAGVKSTDVILEIGPGTGNLTKKLLEAGKKVIAVEIDPRMVLELQRRFQGTPHSNRLTVIQGDVLKTELPYFDICVANIPYQISSPLTFKLLKHEPAFRAAIIMFQREFAMRLVAQPGDKLYCRLTVNTQLHARVFHLLKVGRNNFRPPPKVDSSVVRIEPRKPRIEVKQKEWDGFLRICFNRKNKTLGSIFRQKSVISLLEKNYRTVRALELGQEDSLKEVDAKMDFSSFGDDRGMEMDDDGADDDEMEVEDGEADEVQSEFKDKVLGVLKEGDFEEKRSSKLTLQEFLYLLSLFNKTGIHFY

SEQ ID NO: 55274 - DNA, 1687 bp, Glycine max
  misc_feature (1)..(1687): Ceres Seq. ID no. 14312347
gaagctatcacagctccagctcctggttccactttcgctcttcacaaaatgaaccgagtgataaagaagaccgtttcaaatatctgtgctctcaaggttccaagaaagtctttttgtagtactgagggtgtgaaagttgctggttgctctattccagaggtttccaatgaccatgagaagaagcaggctattagcaaagttattccacaatatgatattgctattgttggaggaggcatggttggcatggctttatcttttttcttggcaagtaatccaatgacaaagcagttgagtgttgcaattattgatagcaatccagctcttggaagtagcttgcacatcaagaaggaagatccccctgatccaagagtcagtacagtaactcctgcttctatttcttttctccaagatgctggtgcatggaaatatgttgagcaaaatagacgtgcttattttaatacaatgcaggtctgggattatactggtttggggtatgctagatatcatgcaagagatgtaaataaagactttctagggtgcgtggcagagaataaagtgctccataatgccttattgtcatgtgtaaaggattctgatttcaagacaacaatctatcctttgaggttaagttcaatgactttgaatacaagctctatgtctatggcggaggagaatccaacatccaaagaaccaccatctgctcaaggtcatggtgcagaactgcagcttagtgatggcagtagcatatatgcaaagttggtggttggcgctgatggaggaaaatcacatgttagggagttagcaggaatcaaaacaactggatggaattactcccagaatgcaataatctgcacggtggagcatacttatgaaaatgaatgtgcatggcaacgttttctaccaacaggtccaattgctcttttacccatgggtgataagtttagcaatattgtttggaccatgagcccaacagagtcaaataaccgcaagtcaattaccgaggaagaatttttaaaggatgtgaattatgctttagattatggacatggacctcatcctacatcaagcttatcaggaactcgagacgtgttctcttggtttaaaacggatgcaacactatcaactaatgaattctttgaaattcctccaaaagtaacaaggttggcatctgaaaggatggtgtttcctttgtctttaaggcatgccaattcctatgcattgaaacgtgtggttcttattggggatgcagcccacacagtccatcctcttgctggtcaaggagttaatttgggttttggagatgcattttctctttcaagaattattgcagaggggattgctttgggcactgatattggagaggtaaatatgttaaagaagtatgaagcagagagaaaaacagcaaatattatgatgatggcaatccttgatggcgtccaaaaagcctattctattgattttggaccttttaatattctgcgagctgcagccttccatggggcaaactatatatcaccactcaaaagaagtatcatttcctatgcttcaggggaacataaattacccattttcttctgaatacagaaatgtcatttaggttaagaagtggacctacaaaatgcagggtgagaatatcaactccctaacttatttaatatattcactttactttggagattaaaag

SEQ ID NO: 55275 - protein, 526 aa, Glycine max
  peptide (1)..(526): Ceres Seq. ID no. 14312348
EAITAPAPGSTFALHKMNRVIKKTVSNICALKVPRKSFCSTEGVKVAGCSIPEVSNDHEKKQAISKVIPQYDIAIVGGGMVGMALSFFLASNPMTKQLSVAIIDSNPALGSSLHIKKEDPPDPRVSTVTPASISFLQDAGAWKYVEQNRRAYFNTMQVWDYTGLGYARYHARDVNKDFLGCVAENKVLHNALLSCVKDSDFKTTIYPLRLSSMTLNTSSMSMAEENPTSKEPPSAQGHGAELQLSDGSSIYAKLVVGADGGKSHVRELAGIKTTGWNYSQNAIICTVEHTYENECAWQRFLPTGPIALLPMGDKFSNIVWTMSPTESNNRKSITEEEFLKDVNYALDYGHGPHPTSSLSGTRDVFSWFKTDATLSTNEFFEIPPKVTRLASERMVFPLSLRHANSYALKRVVLIGDAAHTVHPLAGQGVNLGFGDAFSLSRIIAEGIALGTDIGEVNMLKKYEAERKTANIMMMAILDGVQKAYSIDFGPFNILRAAAFHGANYISPLKRSIISYASGEHKLPIFF

SEQ ID NO: 55276 - protein, 510 aa, Glycine max
  peptide (1)..(510): Ceres Seq. ID no. 14312349
MNRVIKKTVSNICALKVPRKSFCSTEGVKVAGCSIPEVSNDHEKKQAISKVIPQYDIAIVGGGMVGMALSFFLASNPMTKQLSVAIIDSNPALGSSLHIKKEDPPDPRVSTVTPASISFLQDAGAWKYVEQNRRAYFNTMQVWDYTGLGYARYHARDVNKDFLGCVAENKVLHNALLSCVKDSDFKTTIYPLRLSSMTLNTSSMSMAEENPTSKEPPSAQGHGAELQLSDGSSIYAKLVVGADGGKSHVRELAGIKTTGWNYSQNAIICTVEHTYENECAWQRFLPTGPIALLPMGDKFSNIVWTMSPTESNNRKSITEEEFLKDVNYALDYGHGPHPTSSLSGTRDVFSWFKTDATLSTNEFFEIPPKVTRLASERMVFPLSLRHANSYALKRVVLIGDAAHTVHPLAGQGVNLGFGDAFSLSRIIAEGIALGTDIGEVNMLKKYEAERKTANIMMMAILDGVQKAYSIDFGPFNILRAAAFHGANYISPLKRSIISYASGEHKLPIFF

SEQ ID NO: 55277 - protein, 447 aa, Glycine max
  peptide (1)..(447): Ceres Seq. ID no. 14312350
MVGMALSFFLASNPMTKQLSVAIIDSNPALGSSLHIKKEDPPDPRVSTVTPASISFLQDAGAWKYVEQNRRAYFNTMQVWDYTGLGYARYHARDVNKDFLGCVAENKVLHNALLSCVKDSDFKTTIYPLRLSSMTLNTSSMSMAEENPTSKEPPSAQGHGAELQLSDGSSIYAKLVVGADGGKSHVRELAGIKTTGWNYSQNAIICTVEHTYENECAWQRFLPTGPIALLPMGDKFSNIVWTMSPTESNNRKSITEEEFLKDVNYALDYGHGPHPTSSLSGTRDVFSWFKTDATLSTNEFFEIPPKVTRLASERMVFPLSLRHANSYALKRVVLIGDAAHTVHPLAGQGVNLGFGDAFSLSRIIAEGIALGTDIGEVNMLKKYEAERKTANIMMMAILDGVQKAYSIDFGPFNILRAAAFHGANYISPLKRSIISYASGEHKLPIFF

SEQ ID NO: 55278 - DNA, 1159 bp, Glycine max
  misc_feature (1)..(1159): Ceres Seq. ID no. 14312351
aatagatgctcattcatgatcatacctatggctgctgtttcttgcgtgtttcttttctttctttcttgtctatttctaaaatccatatctcaagccagcgcccagataatgttaaccgaatcctgtgataataacagcaacggcacctataacaccaatctcaacacccttttatctactctctcttccaacactgaaattaactatggtttctacaacttctcatatggtcaaaatgaagacaaagttaacgccattgggctctgcagaggagaccttaagccagatgagtgtcgtagttgtctcaacgatgccagaagcaatctcacagtcaattgtccaaaccaggaggaagagaaagagggaattttgcaccttgacaaatgcatgttgcgctactcaaatcgctcaatatttagcgtcatggagacttctcctacgctttatatgtggaattccaccaatgcaaccgacgtggatcagttcaatcaggtgctccagaacctgatgaggactctaactgagagagctgcatcgggtgactctcgtcgtaagtatgcagagggaagttcgtctgctccaaattttcaaaccatacatggtcttgtgcagtgtactcctgatttgtctcagcaagactgcaaacaatgcttggatcgtgtggctatctcacaaatcccaagttgttgcaatggcaagatcatgggtggtaaagttcttacaccaagttgtaatactagattcgaaacttaccggcatcttccgtcttcaaaaggaaatagcgacgcgtcacgaactgtactcctcgtcgccatggcagtgctagtcgttagcgttgatttggtgctcggttttatctgaaatgaaaactcgccaacttcactgcagctattatctatatggaaataattcttggacactcttttattaaagtattaccaataccaactaccaatcttttttttacaacttacactgaaattgcctttttctttcagtatatacatcttgagatatataggaagagaagggagataagattgatgatgtaacatcacagattaaaaaaaaaagttagatagataaaatgaaaggcattattagtaggatgtttgtaaattatagatgtctgtcaccattctatatatatccaccgttt

SEQ ID NO: 55279 - protein, 286 aa, Glycine max
  peptide (1)..(286): Ceres Seq. ID no. 14312352
NRCSFMIIPMAAVSCVFLFFLSCLFLKSISQASAQIMLTESCDNNSNGTYNTNLNTLLSTLSSNTEINYGFYNFSYGQNEDKVNAIGLCRGDLKPDECRSCLNDARSNLTVNCPNQEEEKEGILHLDKCMLRYSNRSIFSVMETSPTLYMWNSTNATDVDQFNQVLQNLMRTLTERAASGDSRRKYAEGSSSAPNFQTIHGLVQCTPDLSQQDCKQCLDRVAISQIPSCCNGKIMGGKVLTPSCNTRFETYRHLPSSKGNSDASRTVLLVAMAVLVVSVDLVLGFI

SEQ ID NO: 55280 - protein, 281 aa, Glycine max
  peptide (1)..(281): Ceres Seq. ID no. 14312353
MIIPMAAVSCVFLFFLSCLFLKSISQASAQIMLTESCDNNSNGTYNTNLNTLLSTLSSNTEINYGFYNFSYGQNEDKVNAIGLCRGDLKPDECRSCLNDARSNLTVNCPNQEEEKEGILHLDKCMLRYSNRSIFSVMETSPTLYMWNSTNATDVDQFNQVLQNLMRTLTERAASGDSRRKYAEGSSSAPNFQTIHGLVQCTPDLSQQDCKQCLDRVAISQIPSCCNGKIMGGKVLTPSCNTRFETYRHLPSSKGNSDASRTVLLVAMAVLVVSVDLVLGFI

SEQ ID NO: 55281 - protein, 277 aa, Glycine max
  peptide (1)..(277): Ceres Seq. ID no. 14312354
MAAVSCVFLFFLSCLFLKSISQASAQIMLTESCDNNSNGTYNTNLNTLLSTLSSNTEINYGFYNFSYGQNEDKVNAIGLCRGDLKPDECRSCLNDARSNLTVNCPNQEEEKEGILHLDKCMLRYSNRSIFSVMETSPTLYMWNSTNATDVDQFNQVLQNLMRTLTERAASGDSRRKYAEGSSSAPNFQTIHGLVQCTPDLSQQDCKQCLDRVAISQIPSCCNGKIMGGKVLTPSCNTRFETYRHLPSSKGNSDASRTVLLVAMAVLVVSVDLVLGFI

SEQ ID NO: 55282 - DNA, 1448 bp, Glycine max
  misc_feature (1)..(1448): Ceres Seq. ID no. 15176246
gagaaaaaaaaggttaccccttttccatattttacctttcaaactctctctctctgtatgtatatataaagtctctttctcatgtttccttacttgggtgtagctttatttggtcatcaatttaattgcctgaccaaagtaaccatctcgttcccttttctgctttgttgaaatgccatgacagttcagatttgtaggaagcttattggaagaaaaatagctttgatatttggaaatgtctgaagtgagaaacaaagtggatttcatccagttgcttggacctgacatgtcaatcaagattctcacccatttggatgacccttgtgatcttattcgggtttcttctgtttccagttcttggcaccgatttgttattgaacatggcctctgcaagcaactttgcttgaaaatgtttcctgaaatatctggtgttgctcatataattgagcttgacaacattattgaaccactaagcaacactcttggcagttatgtaagttgggagtctcataagagaaatcatagagtctatgcatttttggcttctggtcttactcctatgaggaaaaattgcatctcaaaagccattagtgcatccagcactgataactaccctgaagaaagcattctacatacgttggagcctggggatagaactgaatatagagcatcatactggtcaagcaaaggggaaagcgatccttctgttcctgagactttagtttatgagctagcttcaaaattatgtcttgttacggagatttatgtccatccattccaagcatattttcagcatggcttccctatatattctgctaaggctgtccgattcagaatgggccattcgaaacacccaatggaattagagagtcctgtggacaacatggctgctaatcacgtcttgggcaataatcaattcatatggacatatacatcacctgaatttccaatgcttcaagaaaaccgcttgcaaaaattcaagctacctgaacctgttctgtgcattggaggtgtactgctagttgagctgttgggtagagttcaaaagcaagaaatggatgaattattctatatatgatggtgcagcatctctcatgttcaagttatgggacgactgctttttccggaatttgatgtcaaaattcatcattggtcaggaaagtgtaccttgaaatactgccctcaaacagattgttatatgtcttctccaacatcatcaccgagaagcaactcgagtaatccgtcacgcctgcggaccataacctcaagcataatgcagaggggtgtgagacgttgggagcaatttctcttgggtgcattgcttggtactggtcctgttgtagttgataatgaagatcaatgaaaaaaaaaaatgtaagtaataaagtacttccattctcaaatggaagatattggtcccaatatctgtatagcatggaatatgttga

SEQ ID NO: 55283 - protein, 280 aa, Glycine max
  peptide (1)..(280): Ceres Seq. ID no. 15176247
MSEVRNKVDFIQLLGPDMSIKILTHLDDPCDLIRVSSVSSSWHRFVIEHGLCKQLCLKMFPEISGVAHIIELDNIIEPLSNTLGSYVSWESHKRNHRVYAFLASGLTPMRKNCISKAISASSTDNYPEESILHTLEPGDRTEYRASYWSSKGESDPSVPETLVYELASKLCLVTEIYVHPFQAYFQHGFPIYSAKAVRFRMGHSKHPMELESPVDNMAANHVLGNNQFIWTYTSPEFPMLQENRLQKFKLPEPVLCIGGVLLVELLGRVQKQEMDELFYI

SEQ ID NO: 55284 - protein, 263 aa, Glycine max
  peptide (1)..(263): Ceres Seq. ID no. 15176248
MSIKILTHLDDPCDLIRVSSVSSSWHRFVIEHGLCKQLCLKMFPEISGVAHIIELDNIIEPLSNTLGSYVSWESHKRNHRVYAFLASGLTPMRKNCISKAISASSTDNYPEESILHTLEPGDRTEYRASYWSSKGESDPSVPETLVYELASKLCLVTEIYVHPFQAYFQHGFPIYSAKAVRFRMGHSKHPMELESPVDNMAANHVLGNNQFIWTYTSPEFPMLQENRLQKFKLPEPVLCIGGVLLVELLGRVQKQEMDELFYI

SEQ ID NO: 55285 - protein, 222 aa, Glycine max
  peptide (1)..(222): Ceres Seq. ID no. 15176249
MFPEISGVAHIIELDNIIEPLSNTLGSYVSWESHKRNHRVYAFLASGLTPMRKNCISKAISASSTDNYPEESILHTLEPGDRTEYRASYWSSKGESDPSVPETLVYELASKLCLVTEIYVHPFQAYFQHGFPIYSAKAVRFRMGHSKHPMELESPVDNMAANHVLGNNQFIWTYTSPEFPMLQENRLQKFKLPEPVLCIGGVLLVELLGRVQKQEMDELFYI

SEQ ID NO: 55286 - DNA, 1213 bp, Glycine max
  misc_feature (1)..(1213): Ceres Seq. ID no. 14308095
caaggtgaattctctctctctctctctctctcaaatcatcctctgcttttctctttcttttctttgaattttcatggctgtagctactgcagtggccaaaggacaatattggacttataattgtgagagtagtcatggaggggatggctcccaattcatgtgcaaggccagttgtagagaagaaagcaaggccacaagagcaactgaattgtccaaggtgcaattcaaccaatacaaagttctgctactacaacaactacagcctcacacagccaagatacttctgcaagacttgtagaaggtattggacagaaggagggtctctgagaaacgttccagttggaggtggttcaagaaagaacaagaaggtctctgtgacagcttcatcatcaccaaaggttccagacctaaacccaccaaaccactcagctatctcatcacacaaccctaaaataatgcatggtggccaagatctcaatcttgctttcccagccatggaaaagtaccatcatcatggcatgtcaccttataacgttgagatgcaaaacagtaacaccaccactactcatcatcatcaccaaacctctccttcttgttctgctcctccagctaattctctttcagctcttgagctacttaggtccagcatggcatctaggggtttgaacccttatgctcctaattcttccttgatgccaaactcaacaaacaacaacaacaatgccctttacccatcagggtttcccatgcaagaagttaaacctagtcttaacttttcttcagttgatgggatcggaaataatagatcatatgatcaagagaggggtggtggcagagttttgttcccttttggagacgtcaaacagctttctgctgctgcaggtgctgctgatcaagtggaacaacaacaacaaggaaattcaactggttattggactggaatgattggtgaaggaacatggtaagaaagaaaaaaaaaagggaggacaaaggaaaattaagagaacatgcattaataacattatatttatatatcttttttttttattttggtcttccctttttttttctctttccacaatatggatatcatttggcagctgaagttgttcaggaactaacaataggacacacatggttaattatttctttgttttgtacacacctcctttgttttatttgagagaacgtaagaggattttacttctaaaag

SEQ ID NO: 55287 - protein, 276 aa, Glycine max
  peptide (1)..(276): Ceres Seq. ID no. 14308096
MEGMAPNSCARPVVEKKARPQEQLNCPRCNSTNTKFCYYNNYSLTQPRYFCKTCRRYWTEGGSLRNVPVGGGSRKNKKVSVTASSSPKVPDLNPPNHSAISSHNPKIMHGGQDLNLAFPAMEKYHHHGMSPYNVEMQNSNTTTTHHHHQTSPSCSAPPANSLSALELLRSSMASRGLNPYAPNSSLMPNSTNNNNNALYPSGFPMQEVKPSLNFSSVDGIGNNRSYDQERGGGRVLFPFGDVKQLSAAAGAADQVEQQQQGNSTGYWTGMIGEGTW

SEQ ID NO: 55288 - protein, 273 aa, Glycine max
  peptide (1)..(273): Ceres Seq. ID no. 14308097
MAPNSCARPVVEKKARPQEQLNCPRCNSTNTKFCYYNNYSLTQPRYFCKTCRRYWTEGGSLRNVPVGGGSRKNKKVSVTASSSPKVPDLNPPNHSAISSHNPKIMHGGQDLNLAFPAMEKYHHHGMSPYNVEMQNSNTTTTHHHHQTSPSCSAPPANSLSALELLRSSMASRGLNPYAPNSSLMPNSTNNNNNALYPSGFPMQEVKPSLNFSSVDGIGNNRSYDQERGGGRVLFPFGDVKQLSAAAGAADQVEQQQQGNSTGYWTGMIGEGTW

SEQ ID NO: 55289 - protein, 169 aa, Glycine max
  peptide (1)..(169): Ceres Seq. ID no. 14308098
MHGGQDLNLAFPAMEKYHHHGMSPYNVEMQNSNTTTTHHHHQTSPSCSAPPANSLSALELLRSSMASRGLNPYAPNSSLMPNSTNNNNNALYPSGFPMQEVKPSLNFSSVDGIGNNRSYDQERGGGRVLFPFGDVKQLSAAAGAADQVEQQQQGNSTGYWTGMIGEGTW

SEQ ID NO: 55290 - DNA, 1206 bp, Glycine max
  misc_feature (1)..(1206): Ceres Seq. ID no. 15170911
atcactctgttaaaagcttatcaacttttctctttctctctggcgaatatgctttcttggaaagttctcctcgtctccgccgccgtcttgttcgcggcgttaggcctcagagtctctcttccagtcgccgccaccaacctccctcttctttggagtttcttcctcttgtgtttcaagcctccttacctcttcgttgttctcaacgccatcatcatctccatcgtcgcttcttcacggtttcatcactcatcaaaccctcaatctccggagccaactcctccacgtgttgaatccatgcccgctcccaccgttccagaaccaccgcttttccaagtaaaagccgttctcgaagtggagaagaaagtaatcgaagaagatgttgtggcactaaagagaaaagactcgacggagattccatcgccggaggagaagccactggtgtctgctaggttcactcaccggaaattccttaaatccagttcagaaggtgggagagcgttgagagtggtggctaaggcaaaacgggacgagacgttggagagcacgtggaaggccataacggagggtcgatcaatgccattgagcaggcacatgaagaagtccgacatgtggcacaaccgcaacgtgaccccacaaccccaagagacattcaacgatgcactgagtgtgtcgtccgggaggctgcggaaagaaccctcgctgagtcaagacgagttgaatcgtcgcgtcgaagccttcatacaaaagttcaaccaagagatgaggctgcaaagacaacaatccttagaacagtacatgcagatgattaaccgcggtgccgcttaatctcaacctcaacataatcaatattttcattttacagaacaaaaaaacatatatagtgtaagtatttctgcaggtgtagacagtaggggtatttattttattgccatatattagtttatggttgggttaggctcatcatcattatttctttaatttgtttgttttgtgcctttatatgctccacataccaaaaatgtggttcatgttcaatatcaattagctagctagctagaaaacaaacacaccaaaaaaacacttcggggaacttaggattaatgttgttcctctttgtaatttttcggggtcattttttttagtcaaacctctttctctgtaattaataccatgaatgtaagcctgtaacgtttagtttgctattct

SEQ ID NO: 55291 - protein, 274 aa, Glycine max
  peptide (1)..(274): Ceres Seq. ID no. 15170912
ITLLKAYQLFSFSLANMLSWKVLLVSAAVLFAALGLRVSLPVAATNLPLLWSFFLLCFKPPYLFVVLNAIIISIVASSRFHHSSNPQSPEPTPPRVESMPAPTVPEPPLFQVKAVLEVEKKVIEEDVVALKRKDSTEIPSPEEKPLVSARFTHRKFLKSSSEGGRALRVVAKAKRDETLESTWKAITEGRSMPLSRHMKKSDMWHNRNVTPQPQETFNDALSVSSGRLRKEPSLSQDELNRRVEAFIQKFNQEMRLQRQQSLEQYMQMINRGAA

SEQ ID NO: 55292 - protein, 258 aa, Glycine max
  peptide (1)..(258): Ceres Seq. ID no. 15170913
MLSWKVLLVSAAVLFAALGLRVSLPVAATNLPLLWSFFLLCFKPPYLFVVLNAIIISIVASSRFHHSSNPQSPEPTPPRVESMPAPTVPEPPLFQVKAVLEVEKKVIEEDVVALKRKDSTEIPSPEEKPLVSARFTHRKFLKSSSEGGRALRVVAKAKRDETLESTWKAITEGRSMPLSRHMKKSDMWHNRNVTPQPQETFNDALSVSSGRLRKEPSLSQDELNRRVEAFIQKFNQEMRLQRQQSLEQYMQMINRGAA

SEQ ID NO: 55293 - protein, 176 aa, Glycine max
  peptide (1)..(176): Ceres Seq. ID no. 15170914
MPAPTVPEPPLFQVKAVLEVEKKVIEEDVVALKRKDSTEIPSPEEKPLVSARFTHRKFLKSSSEGGRALRVVAKAKRDETLESTWKAITEGRSMPLSRHMKKSDMWHNRNVTPQPQETFNDALSVSSGRLRKEPSLSQDELNRRVEAFIQKFNQEMRLQRQQSLEQYMQMINRGAA

SEQ ID NO: 55294 - DNA, 1301 bp, Glycine max
  misc_feature (1)..(1301): Ceres Seq. ID no. 14316263
aggatcacagtaggagataaggagagcattcaccattttcttgtggtttggtttcctagagacactaagtactcccatggaacaaaacaacaaaagccttgtttcttctaaattcttatgtttatgtttgttgatcaccttgatcagcattattgttgctccacaagcggaagcagcacgagcatttttcgtgtttggcgattcgcttgtagacaacgggaacaacaatttcttggccaccacggcgcgtgccgattcatatccttatggcattgattctgcatctcatagagcctctggtcgtttctccaatggcctcaacatgcctgaccttatcagtgagaaaattggctcagaacccacattaccatatttgagtccacagctcaatggtgaaaggctgcttgttggtgcaaactttgcttctgctgggataggaattctcaacgacactggaattcagtttataaacataatccgaattacagaacaattggcatacttcaaacagtatcagcagagggtgagtgcactaattggagaagagcagactcgaaatttagtgaacaaagcattggtgctcataaccttaggtggcaatgattttgtcaacaactattatttggttcctttctctgccagatcccgcgaatatgctcttccagactacgttgtcttcctcatttcggagtatcgtaaaattcttgcgaatctgtatgaattgggggcacgaagggttctagtgacaggcacgggaccactgggttgcgtgccagcagaattggctatgcacagccaaaacggagaatgtgcgactgagctgcaacgagccgttaacctgttcaatcctcaactcgtccaactactgcacgaacttaacactcaaattggctccgatgtcttcatttccgcaaacgccttcaccatgcatttggatttcgttagtaacccacaagcctatgggtttgtcacgtcaaaagtagcatgctgtggtcaaggagcatacaatggaatcggactctgcactccagcttcaaacttgtgcccaaacagggatttatatgcattttgggaccccttccatccatcagagagagcaaatagattgatcgtggataaattcatgactggatccaccgaatacatgcaccctatgaaccttagtacaattattgctttagattctacaacctaatgcaccattactgtatgagttgtcttcttttcttgtctatgcacacctagttcctacaagatattgtatttttcttgaatgtttaaaactatgacgttaattactc

SEQ ID NO: 55295 - protein, 372 aa, Glycine max
  peptide (1)..(372): Ceres Seq. ID no. 14316264
MEQNNKSLVSSKFLCLCLLITLISIIVAPQAEAARAFFVFGDSLVDNGNNNFLATTARADSYPYGIDSASHRASGRFSNGLNMPDLISEKIGSEPTLPYLSPQLNGERLLVGANFASAGIGILNDTGIQFINIIRITEQLAYFKQYQQRVSALIGEEQTRNLVNKALVLITLGGNDFVNNYYLVPFSARSREYALPDYVVFLISEYRKILANLYELGARRVLVTGTGPLGCVPAELAMHSQNGECATELQRAVNLFNPQLVQLLHELNTQIGSDVFISANAFTMHLDFVSNPQAYGFVTSKVACCGQGAYNGIGLCTPASNLCPNRDLYAFWDPFHPSERANRLIVDKFMTGSTEYMHPMNLSTIIALDSTT

SEQ ID NO: 55296 - protein, 290 aa, Glycine max
  peptide (1)..(290): Ceres Seq. ID no. 14316265
MPDLISEKIGSEPTLPYLSPQLNGERLLVGANFASAGIGILNDTGIQFINIIRITEQLAYFKQYQQRVSALIGEEQTRNLVNKALVLITLGGNDFVNNYYLVPFSARSREYALPDYVVFLISEYRKILANLYELGARRVLVTGTGPLGCVPAELAMHSQNGECATELQRAVNLFNPQLVQLLHELNTQIGSDVFISANAFTMHLDFVSNPQAYGFVTSKVACCGQGAYNGIGLCTPASNLCPNRDLYAFWDPFHPSERANRLIVDKFMTGSTEYMHPMNLSTIIALDSTT

SEQ ID NO: 55297 - DNA, 1624 bp, Glycine max
  misc_feature (1)..(1624): Ceres Seq. ID no. 15169199
gaagaaaaaataattaaaaatagaaaagatggtggaaagataatgtggatctgattcaaaccacacgattccacgaccttattttggagccgcggtggcggtagcggtggccggcgattgtagcggcgtaggagcaagaaatggttttatgttgtgaggaagattgttaagctgtgggaatatgtcattgagaagcatagtccgtgaactcaaggagatgagagatggaataggaagcacatcaaagcggggtgcagaaagcaagcatcggctcagtcggacaaagtcacatgtagctccagatgttcttgcaactccatttgaacctattcaacagggacaatgggcaaatctaccatcagaattgcttttggacataatccagagggtcgaagagagtgagacatcttggcctgcccgtgctgttgttgtcttttgtgcttcagtatgtaaatcatggaggtccattacaagagagattgtcaagactcctgaacaatgtggaaggatcacatttcccatttcattgaagcagccgggtccgcgtgattctccaatacagtgctttatcaggaggaacaaagaaacttctacatatctattgtactttggtctggttccatcagagaatgacagtaataagttgttattagctgccaaaaggataagaagggcaacaggctccggttttgtcatatccttggctgctgatgatttttctcgagccagcaacaaatatgttggtaaactaaggtctaactttttgggtaccaagttcaccgtatatgacagtcaagctccacatgattctgcaattcaatcaaattgtcaatctagtaggagatttcattctaagcaggtgtcaccaagagttccagcatgtagctatcttgtcagcactgtttcctacgagctgaatgtcctttgcactagagggccaagaagaatgcattgtgtcatgaactctatacctgtctcagctattcaggaaggaggcaacgccccaactccaacatctttccctcaaatatttgatgaacctttttctccatcaccagcactgaaagaaaaagctcaagtcacagatttaaactctgcaagcttatcagagccaccagtattgagccaaggctcaaccgagcaattagcactgaaaaacaaggctcccagatggcatgagcagctacagtgctggtgtctaaacttcaagggtcgcgtttcagtggcttctgttaagaactttcaacttgtagctgctgttgatccatctcataatatttctgccgaggagcaagaaaaggtaatcttgcagtttggaaagattggaaaagacatatttaccatggattactgttatccactctctactttccaagccttcgccatctgcttgagcagctttgacactaaacctgcctgtgaatgagaggtgttgcattactacattgtaatcgtcatctgctgagttgttgattgccaatcctggtggcatacagctgaaatcatagctgtgctgccgttggaatcccccccttataaattggttgttgattctggaatttattctgtcttttgttttgtggtcctgtaaaattaaattaaatgaagtttagtgaattctatg

SEQ ID NO: 55298 - protein, 414 aa, Glycine max
  peptide (1)..(414): Ceres Seq. ID no. 15169200
MSLRSIVRELKEMRDGIGSTSKRGAESKHRLSRTKSHVAPDVLATPFEPIQQGQWANLPSELLLDIIQRVEESETSWPARAVVVFCASVCKSWRSITREIVKTPEQCGRITFPISLKQPGPRDSPIQCFIRRNKETSTYLLYFGLVPSENDSNKLLLAAKRIRRATGSGFVISLAADDFSRASNKYVGKLRSNFLGTKFTVYDSQAPHDSAIQSNCQSSRRFHSKQVSPRVPACSYLVSTVSYELNVLCTRGPRRMHCVMNSIPVSAIQEGGNAPTPTSFPQIFDEPFSPSPALKEKAQVTDLNSASLSEPPVLSQGSTEQLALKNKAPRWHEQLQCWCLNFKGRVSVASVKNFQLVAAVDPSHNISAEEQEKVILQFGKIGKDIFTMDYCYPLSTFQAFAICLSSFDTKPACE

SEQ ID NO: 55299 - protein, 402 aa, Glycine max
  peptide (1)..(402): Ceres Seq. ID no. 15169201
MRDGIGSTSKRGAESKHRLSRTKSHVAPDVLATPFEPIQQGQWANLPSELLLDIIQRVEESETSWPARAVVVFCASVCKSWRSITREIVKTPEQCGRITFPISLKQPGPRDSPIQCFIRRNKETSTYLLYFGLVPSENDSNKLLLAAKRIRRATGSGFVISLAADDFSRASNKYVGKLRSNFLGTKFTVYDSQAPHDSAIQSNCQSSRRFHSKQVSPRVPACSYLVSTVSYELNVLCTRGPRRMHCVMNSIPVSAIQEGGNAPTPTSFPQIFDEPFSPSPALKEKAQVTDLNSASLSEPPVLSQGSTEQLALKNKAPRWHEQLQCWCLNFKGRVSVASVKNFQLVAAVDPSHNISAEEQEKVILQFGKIGKDIFTMDYCYPLSTFQAFAICLSSFDTKPACE

SEQ ID NO: 55300 - DNA, 1315 bp, Glycine max
  misc_feature (1)..(1315): Ceres Seq. ID no. 14308867
aacgaaacccgtcgtcaaagtgggtttccggcagagatcatatatcttctagggtgtccacctttgaaattcaatctccaattgagcatcacaaaccctagaaaatcgttccagatgaatacaaaatcgctccaaatcctggtgcactcaccggacctcggaatttcccttcaatccacaaccaaccacgaaaccctttccgatctcaaaaactctcttttccctcaatcacaccaatccttctacttcaccttcaatggcaaacccctccccgacaaaacccctctttcccaattcccccctctctccaccctctctctccgctcccgcctccttggcggcggcggagacggcggcgccaccggagccgagtcccgcgactgctacctcaacatgtacgccgacaagaagcccgacaaggtggaccccaatgaacagcgtctctccaagtggcacaattgcgccctctccaacgaacccttgagagagccctgcgtgatcgataaattggggaatatcttcaacaaggaagcgctggtggaagcgttgttggggaagaagcttcccaaggaatttgggcacatcaagggtttgaaggatatgattaatgttcagctttctgcgattcctggagcggatgatggggcaaagtttcagtgccctgttgcggggcttgaattcaacgggaagtataggtttttcgcgctgaggaattgtgggcatgttttgagtgcgaaggctctgagggaggttaagtcttcgtcgtgtttggtttgtcacaaggagtatgctgacgtggataaggttgtgctcaatgggagtgatgaggaggttgcggttttgagggagaggatggaggaggagaaagctaagattagggagaagaagagtaagaaggttaagaataatggtaatgatgacggtgtgagtttggaagggactaggttgagtggtactaagcatggtgttgatggtaagggtgtagagaaagcttcggctaaggtggaacgaaatgggaaggttggtaatggtaatgttggtgtgaatggtggtgctgctgctgctgccaagcgtttcaaggctgttgatctggccccggcgaatgctacaaaggatgtgtatgcttccatcttcacttcgtcgaggaagtctgagtttaaagaaacttatagctgtaggtctcttcctcttggaagaaactgattcaggtgtctggtatacagttgtctctactgttttattgttatccaatgtactgaattctagtttgtgcctttgtggttatataagtgattgacttttcctgtgaaaaaag

SEQ ID NO: 55301 - protein, 400 aa, Glycine max
  peptide (1)..(400): Ceres Seq. ID no. 14308868
NETRRQSGFPAEIIYLLGCPPLKFNLQLSITNPRKSFQMNTKSLQILVHSPDLGISLQSTTNHETLSDLKNSLFPQSHQSFYFTFNGKPLPDKTPLSQFPPLSTLSLRSRLLGGGGDGGATGAESRDCYLNMYADKKPDKVDPNEQRLSKWHNCALSNEPLREPCVIDKLGNIFNKEALVEALLGKKLPKEFGHIKGLKDMINVQLSAIPGADDGAKFQCPVAGLEFNGKYRFFALRNCGHVLSAKALREVKSSSCLVCHKEYADVDKVVLNGSDEEVAVLRERMEEEKAKIREKKSKKVKNNGNDDGVSLEGTRLSGTKHGVDGKGVEKASAKVERNGKVGNGNVGVNGGAAAAAKRFKAVDLAPANATKDVYASIFTSSRKSEFKETYSCRSLPLGRN

SEQ ID NO: 55302 - protein, 362 aa, Glycine max
  peptide (1)..(362): Ceres Seq. ID no. 14308869
MNTKSLQILVHSPDLGISLQSTTNHETLSDLKNSLFPQSHQSFYFTFNGKPLPDKTPLSQFPPLSTLSLRSRLLGGGGDGGATGAESRDCYLNMYADKKPDKVDPNEQRLSKWHNCALSNEPLREPCVIDKLGNIFNKEALVEALLGKKLPKEFGHIKGLKDMINVQLSAIPGADDGAKFQCPVAGLEFNGKYRFFALRNCGHVLSAKALREVKSSSCLVCHKEYADVDKVVLNGSDEEVAVLRERMEEEKAKIREKKSKKVKNNGNDDGVSLEGTRLSGTKHGVDGKGVEKASAKVERNGKVGNGNVGVNGGAAAAAKRFKAVDLAPANATKDVYASIFTSSRKSEFKETYSCRSLPLGRN

SEQ ID NO: 55303 - protein, 269 aa, Glycine max
  peptide (1)..(269): Ceres Seq. ID no. 14308870
MYADKKPDKVDPNEQRLSKWHNCALSNEPLREPCVIDKLGNIFNKEALVEALLGKKLPKEFGHIKGLKDMINVQLSAIPGADDGAKFQCPVAGLEFNGKYRFFALRNCGHVLSAKALREVKSSSCLVCHKEYADVDKVVLNGSDEEVAVLRERMEEEKAKIREKKSKKVKNNGNDDGVSLEGTRLSGTKHGVDGKGVEKASAKVERNGKVGNGNVGVNGGAAAAAKRFKAVDLAPANATKDVYASIFTSSRKSEFKETYSCRSLPLGRN

SEQ ID NO: 55304 - DNA, 1142 bp, Glycine max
  misc_feature (1)..(1142): Ceres Seq. ID no. 15170370
attattttctcttcatcaatatgtgttgttagacaagtacagcatggctgccttgaaattattgggaaaattgcctgcttatgcaaacttaagcttctaagaattggtcaggaacattcatgttgaaaaggacaaaacactgggtagacttttggtagttgcaaaattcacatcatattttagctagcaagttgatttggaatttttattaattgacatacttgtggactttattttagtcaaagttgaaatttgacttgtttaaaaaatttatttctcttcattcctgtagataaatgccttatgcatggcattttatgctcgatctgaagaagctcgtcaaagtcatgctacacaaaattttgctttgagagcacttgcattggaagatgcactatctaaaggacttccaattgagacagaaatagcatctttgcagtcttatcttggaagcacagataaagattcagttttggatttggtgctagcatcccttcctgaagaaacacgaagcaacggcacagacacacaactgcagttaaagcagaagtttgatgccttaaaaggtagtgtaagacacttcagcttcttcccaccgggagggggaggtatgttggcacattctttggcacatgtagcatcctggttgaaggttagggaagacaatcaatctggtgatgggatcgaatctgtgatcaataaagttgaagtttatttggcagaaggaaaacttgctgaagcagcagcttgtctagaagaaagtgtgagaggcacacaagctgcagaaattgttgcaggttgggtgaggcaagcaagaaacagggctatttctgagcaagcagtgctgcttcttcaatcctatgccaattcccttagctttacatgattcttaaattttgaatatttacaaaaccatgtgaattcaatacatggcagagattatctttggcggattattccaacgggaattattgacctatgaggaaaaaaaataacgtttttgtttcataggagcagaaattagttgattctgtgaattctatgcaactccagtggcattggagttttgaccgaagtgatatcaggctctgtataattttgccttttgttttacctgaataacagaaatgttgcattgcaac

SEQ ID NO: 55305 - protein, 192 aa, Glycine max
  peptide (1)..(192): Ceres Seq. ID no. 15170371
MAFYARSEEARQSHATQNFALRALALEDALSKGLPIETEIASLQSYLGSTDKDSVLDLVLASLPEETRSNGTDTQLQLKQKFDALKGSVRHFSFFPPGGGGMLAHSLAHVASWLKVREDNQSGDGIESVINKVEVYLAEGKLAEAAACLEESVRGTQAAEIVAGWVRQARNRAISEQAVLLLQSYANSLSFT

SEQ ID NO: 55306 - DNA, 1507 bp, Glycine max
  misc_feature (1)..(1507): Ceres Seq. ID no. 12607536
aggatgatctgggagctttgaggtagctatcttattgaaagagtaacttaacctctatgtgaatgtgtgtgtataagatcaatcccttgccatattagtttccctttgtattttgtctcacttaaagaaaataaaatattagatgggaagcgttttatctctttctctgttatgaattctattagcctgaaatgaattttctttttaagattatatggccgagtggctgagttgatttcaattgatataaacctctatttcccatatgatattttccaagcatgttttctactaaaagtattgtgatcactgacagaaaatgtttttaaaagttcatcgtttattgtattcaagagattttcccctagtatatgattggccgtttatatgtgattgctggacactggtgtttatgtagtaggtatactgtgaacattggagttaactttggatttgtgagcatcgggtagctcatttttattcaagtttgatataattttaatttgtttgttcatattttaatgtctacaagtgcaacccttaatctattagccattgatatgtcttgtctatattgttaaatttcttacacatctttttccacagccaataggtttggggaaaattgcaaagtttattaatgctgggaagatagattcttctgaactgattacaatgaaaacactaaaggttttatgactgttacctcacttcttctggaaatgcttttgcttcatgtgcttcctctcattcttctggtcattattattaccataggatgcaggggtactagggaagcaaatgaaagatggagtaagattgatggggcgtggttctgagcagatcaagtggccaattcatctagaggtatcaagggttactgttagggctaaggaagcagttgaagcagctggtgggtctgtgagaagggtgtattacaataagttgggcttgaaggcactggtgaagcctgagtggtttgaaaagaaaggaagattgctgcctaaagcagctagacctcctccaaagcaaaaggataaagttgatagcattggtcggttgcctgccccaacaaagccatttccatttttagttgaagcaagcaaggatcttccagttcagcatcttagttgaataactaacatttttggcaccagtttttaggattttgtaattctgtgtggtgcaaacgtctgactcacaagtttttcatgcagttcttgcaaatgctcaggtagttaattcaagaatgagataaatgaatttccttggggacaaatgaaagggagaatcttgtttattatttaatttcttttaaggatttgatcttcgtcactcagttgaaaagagagccttagtttcttgtgtatgtgtgcttggagtaggatcatagccccttcatgaagggaaaattgcaagaacagtntgcaatgtttaacttttctccggatatggatggnacttgtcaaatgacttggctgaattttaataaatggacgattgtttc

SEQ ID NO: 55307 - protein, 110 aa, Glycine max
  peptide (1)..(110): Ceres Seq. ID no. 12607537
MKDGVRLMGRGSEQIKWPIHLEVSRVTVRAKEAVEAAGGSVRRVYYNKLGLKALVKPEWFEKKGRLLPKAARPPPKQKDKVDSIGRLPAPTKPFPFLVEASKDLPVQHLS

SEQ ID NO: 55308 - protein, 103 aa, Glycine max
  peptide (1)..(103): Ceres Seq. ID no. 12607538
MGRGSEQIKWPIHLEVSRVTVRAKEAVEAAGGSVRRVYYNKLGLKALVKPEWFEKKGRLLPKAARPPPKQKDKVDSIGRLPAPTKPFPFLVEASKDLPVQHLS

SEQ ID NO: 55309 - DNA, 911 bp, Glycine max
  misc_feature (1)..(911): Ceres Seq. ID no. 12582051
cagctacgtaggcccccccccccaagaacaaaagcagttggcatcatttgatattccttatagagtaattgaatgtttcttgaggctttggtcatataaggtagtctaagagttataaggtggtgattaagggccggaagattgttgttttcactgctgtgaattttagttcccgcatacactattttcgggctcaggtctgttctatggctgcaagaaaaatgctaagtttagtgtttttaaaggaaaaacataccacttttagggttttatcatacttttgaaaactgttatggtgttaaatcctgtattgtttagctttatttcttatatatagagcattacccatataattttggattgtgggctaacctcctcagggaaaagctcctagtatggttgctagcaccccaaaagttccaaaatccccttggatgccttttcctttgcttcttgatgctatcagaaatcaggttcctcccaagggtatggatgtaatcaaaatatattatgaacaattcaggtcaaagcatatatcgcgggatgattttgtgaagatgctgaggttaatagttggagatggtctgttgagaactacaataacaaatcttcagttcaagataccttccggtggtgaattgaaaggctcaatcaagaaggaagtctgaggctgtatttctgtgaggtggagatctttctccttggagtcaattaatgtcaactttttgctggataaatcaaaatgaagttgtgatattgttatctcttaggcaaactatctttttcatttccttttgccatctttatttggacttgagacatacatgcaactagaactatattagagtttagtttgaactgttcgtgatcaggtgacctgtcaatcaatcctcttgtttatgttggatttc

SEQ ID NO: 55310 - protein, 90 aa, Glycine max
  peptide (1)..(90): Ceres Seq. ID no. 12582052
MVASTPKVPKSPWMPFPLLLDAIRNQVPPKGMDVIKIYYEQFRSKHISRDDFVKMLRLIVGDGLLRTTITNLQFKIPSGGELKGSIKKEV

SEQ ID NO: 55311 - protein, 77 aa, Glycine max
  peptide (1)..(77): Ceres Seq. ID no. 12582053
MPFPLLLDAIRNQVPPKGMDVIKIYYEQFRSKHISRDDFVKMLRLIVGDGLLRTTITNLQFKIPSGGELKGSIKKEV

SEQ ID NO: 55312 - protein, 59 aa, Glycine max
  peptide (1)..(59): Ceres Seq. ID no. 12582054
MDVIKIYYEQFRSKHISRDDFVKMLRLIVGDGLLRTTITNLQFKIPSGGELKGSIKKEV

SEQ ID NO: 55313 - DNA, 1457 bp, Glycine max
  misc_feature (1)..(1457): Ceres Seq. ID no. 15170555
aaaagatataagcctaagctaagtggagacgctgttgccatttctgctcattgagtgaaagttccattgggcgtggtttaatggaagggatgaagcagcttgcgtacaacactgcggtgaagctcattctggctgcactcgaacacaacttgctccctgactttgtcaccaggagatatggtcgcttcatggcggctaacatccttcgctctggctacaaatcatcctccgaacttcaactctccgatctccttcactttgcgcattctctacaacagatgcccatagcaatcgacactgatgagacaaattctcaactttatgagttgcctaccgctttcttcaagttggtgctcggaaacaaactcaatttcagctgttgctatttcccttctgcctctatgacactggatgatgctgaagaagcaatgttgaaactgtgctgcgagagatcaaatttgaaagatggtcatacagtacttgatttgggatgcggttggggatcactggttttgtacattgccaagaagtacactaactgcagggttacaggaatcagctattcgacaactcaaaagacttatattgaggagaagtgccgggatcttcagctgcaaaatttgaatattatagttgctgatattggcacatttgaaatggaggcttcttacgacagaatattttccatagaaatgtttgagcatatgaagaactataaagatcttctcaagaagatatccaaatggatgaaagaggatagccttttatttgttcatatcatgtgccacaaagcatttgcctaccactttgaggacaaaaatgaagatgactggattacaagatacttctttgctggagcaactatgccttctgcaaatctacttctttatttccaagatgatgttacagtcatcaaccattggctagtaaatgggaaacactccgcacagaccagtgaagaatggctcaaaagaatggaccagaaaatgacttacatcaagccaattatggaatcaacgtatggcaaggattcagctaccaagtggactgcctattggagagcattcttcatagttggagcagaaacttttgcatataataacggtgaagaatggatgattgcacacttccttttcaaaaagaaataaaataagaccaaacctaatcttttaatttggctatttaagaatggcgttaaaagaagctgctaaacgaggttgcacccttcaatgatgttgcataattttatcagttaacttgttttaattggttgcttgtctgtattttttcctgtctcaatcctttgtcttcggcccctaatgttatggtgtagccattccagtcttgttttatcttaaatttagggaaagtccaattcaaccctcagaacttgggtcgaagggtcatgcatgtgctccctggttcataaactttaaaatatgcacttagacccctct

SEQ ID NO: 55314 - protein, 355 aa, Glycine max
  peptide (1)..(355): Ceres Seq. ID no. 15170556
MEGMKQLAYNTAVKLILAALEHNLLPDFVTRRYGRFMAANILRSGYKSSSELQLSDLLHFAHSLQQMPIAIDTDETNSQLYELPTAFFKLVLGNKLNFSCCYFPSASMTLDDAEEAMLKLCCERSNLKDGHTVLDLGCGWGSLVLYIAKKYTNCRVTGISYSTTQKTYIEEKCRDLQLQNLNIIVADIGTFEMEASYDRIFSIEMFEHMKNYKDLLKKISKWMKEDSLLFVHIMCHKAFAYHFEDKNEDDWITRYFFAGATMPSANLLLYFQDDVTVINHWLVNGKHSAQTSEEWLKRMDQKMTYIKPIMESTYGKDSATKWTAYWRAFFIVGAETFAYNNGEEWMIAHFLFKKK

SEQ ID NO: 55315 - protein, 352 aa, Glycine max
  peptide (1)..(352): Ceres Seq. ID no. 15170557
MKQLAYNTAVKLILAALEHNLLPDFVTRRYGRFMAANILRSGYKSSSELQLSDLLHFAHSLQQMPIAIDTDETNSQLYELPTAFFKLVLGNKLNFSCCYFPSASMTLDDAEEAMLKLCCERSNLKDGHTVLDLGCGWGSLVLYIAKKYTNCRVTGISYSTTQKTYIEEKCRDLQLQNLNIIVADIGTFEMEASYDRIFSIEMFEHMKNYKDLLKKISKWMKEDSLLFVHIMCHKAFAYHFEDKNEDDWITRYFFAGATMPSANLLLYFQDDVTVINHWLVNGKHSAQTSEEWLKRMDQKMTYIKPIMESTYGKDSATKWTAYWRAFFIVGAETFAYNNGEEWMIAHFLFKKK

SEQ ID NO: 55316 - protein, 319 aa, Glycine max
  peptide (1)..(319): Ceres Seq. ID no. 15170558
MAANILRSGYKSSSELQLSDLLHFAHSLQQMPIAIDTDETNSQLYELPTAFFKLVLGNKLNFSCCYFPSASMTLDDAEEAMLKLCCERSNLKDGHTVLDLGCGWGSLVLYIAKKYTNCRVTGISYSTTQKTYIEEKCRDLQLQNLNIIVADIGTFEMEASYDRIFSIEMFEHMKNYKDLLKKISKWMKEDSLLFVHIMCHKAFAYHFEDKNEDDWITRYFFAGATMPSANLLLYFQDDVTVINHWLVNGKHSAQTSEEWLKRMDQKMTYIKPIMESTYGKDSATKWTAYWRAFFIVGAETFAYNNGEEWMIAHFLFKKK

SEQ ID NO: 55317 - DNA, 1667 bp, Glycine max
  misc_feature (1)..(1667): Ceres Seq. ID no. 15178767
gagtgtcttgttctcgtttatggaggatcaaagcggagaagctgaaggagaagaacaacaaatacaaccttcactctttcattatttaataacaattattattctcaatgggcaagactcctttctcctttcgtcgctccgcctctcgccgccgccccaagaagaccgccgccccgccccctcctccctctccgccgcaacatccctacgcggccggattcgccgcctcacccgacgacaacaaccgtctcatcgccgccgccgccggcagcagcgccttgacgaaggcgaagaagaagaccggcaacgtccgcttgtggatgaggtttgaccggtccggccggtcagaactggtggagttggagaagaacgccatcgtccgccacgcagcgattcccgctagagacttgcgaattttgggccccgtcttctcccactcctccaacatcctcgctagagagaaagcaatggtggttaatttggagtttataaaggcaattgtgactgctgaagaagtgttattgcttgatcctcttcggcaggaggttcttccctttgttgagcaactcaggcaacagcttcctggcaaaagtcaacctaaacttctcggcggcacggaagagcaggaaggcgaaatgcatgtctctaatggaagacaatggttgcctacaccggaggcagccgatggtttgcagtctgagcttccgtttgagtttcaagttctggagattgctttggaggctgtgtgcacttatctggactcgaatgtggcggaccttgagcgaggtgcttaccctgtgttggatgaattggctaggaatgttagcaccaagaatcttgagcatgtgcggagtttaaagagtaatcttacgcggttgctggcacgagtgcagaaggtgcgagatgaaattgaacatctgttagatgacaatgaagatatggcacaactatatttgacaaggaagtggttgcagaatcaacaatttgaggaggctcatttgggtgccacaacctcaaataactttcctaatacctcacgttctgttcgtcaacttggttctatcagaagtgaaagtcttgtgaccagccattatgaggatgataacaatgtggaggacttggagatgttgcttgatgcatatttcatgcagttggatggaactcgtaacaaaatattatcagttagggagtatattgacgacactgaagactatgtcaacatccaacttgataaccaccgaaatgaacttattcagctgcagttgacgttgactattgcatcatttgctattgctattgaaactttgattgctggtgcatttggtatgaacattccttgtaacttatataacattgatggagtattttggcccttcgtttggaccacgtctgcggcttgcgtattacttttcttgcttattttagcatatgcaagatggaagaagttgctgggatcataaggcaaggctgttgtgtgacaattggcaatttgaatctccgcagcgagtgacctgaagaacagacacaaatgtgtcaccggagaagtggcttaggaagcaactatcttaatttctgacaaaaattgtaatagttgatgtataggatgttccaacattgcttttagcatcatatattttatagccgatactattcacagcatctttttt

SEQ ID NO: 55318 - protein, 450 aa, Glycine max
  peptide (1)..(450): Ceres Seq. ID no. 15178768
MGKTPFSFRRSASRRRPKKTAAPPPPPSPPQHPYAAGFAASPDDNNRLIAAAAGSSALTKAKKKTGNVRLWMRFDRSGRSELVELEKNAIVRHAAIPARDLRILGPVFSHSSNILAREKAMVVNLEFIKAIVTAEEVLLLDPLRQEVLPFVEQLRQQLPGKSQPKLLGGTEEQEGEMHVSNGRQWLPTPEAADGLQSELPFEFQVLEIALEAVCTYLDSNVADLERGAYPVLDELARNVSTKNLEHVRSLKSNLTRLLARVQKVRDEIEHLLDDNEDMAQLYLTRKWLQNQQFEEAHLGATTSNNFPNTSRSVRQLGSIRSESLVTSHYEDDNNVEDLEMLLDAYFMQLDGTRNKILSVREYIDDTEDYVNIQLDNHRNELIQLQLTLTIASFAIAIETLIAGAFGMNIPCNLYNIDGVFWPFVWTTSAACVLLFLLILAYARWKKLLGS

SEQ ID NO: 55319 - protein, 379 aa, Glycine max
  peptide (1)..(379): Ceres Seq. ID no. 15178769
MRFDRSGRSELVELEKNAIVRHAAIPARDLRILGPVFSHSSNILAREKAMVVNLEFIKAIVTAEEVLLLDPLRQEVLPFVEQLRQQLPGKSQPKLLGGTEEQEGEMHVSNGRQWLPTPEAADGLQSELPFEFQVLEIALEAVCTYLDSNVADLERGAYPVLDELARNVSTKNLEHVRSLKSNLTRLLARVQKVRDEIEHLLDDNEDMAQLYLTRKWLQNQQFEEAHLGATTSNNFPNTSRSVRQLGSIRSESLVTSHYEDDNNVEDLEMLLDAYFMQLDGTRNKILSVREYIDDTEDYVNIQLDNHRNELIQLQLTLTIASFAIAIETLIAGAFGMNIPCNLYNIDGVFWPFVWTTSAACVLLFLLILAYARWKKLLGS

SEQ ID NO: 55320 - protein, 330 aa, Glycine max
  peptide (1)..(330): Ceres Seq. ID no. 15178770
MVVNLEFIKAIVTAEEVLLLDPLRQEVLPFVEQLRQQLPGKSQPKLLGGTEEQEGEMHVSNGRQWLPTPEAADGLQSELPFEFQVLEIALEAVCTYLDSNVADLERGAYPVLDELARNVSTKNLEHVRSLKSNLTRLLARVQKVRDEIEHLLDDNEDMAQLYLTRKWLQNQQFEEAHLGATTSNNFPNTSRSVRQLGSIRSESLVTSHYEDDNNVEDLEMLLDAYFMQLDGTRNKILSVREYIDDTEDYVNIQLDNHRNELIQLQLTLTIASFAIAIETLIAGAFGMNIPCNLYNIDGVFWPFVWTTSAACVLLFLLILAYARWKKLLGS

SEQ ID NO: 55321 - DNA, 991 bp, Glycine max
  misc_feature (1)..(991): Ceres Seq. ID no. 12581874
cagctacgtaggccccccccccgaagagagtagcattcctatttcctagctagtgtatactccacaacagtacacagctgacagcacccatttagtaaacgtgagtagtgactaccaaagtttatctttccatactccactccgttcactttttagactttcttcgccgtttgtggaagatgaggttgtgtctgtgtttaacgttgttgctggttctggctagtgtggcaatgggagaagaagatgcagatcataataagcactccctaaaagccaagtcacacgcgcagatccagtgcacaatgtgttcctcttgtaacaacccttgcaaccaagttccatctccaccaccaccatctccttcctccaacaactgtcctccaccaccctctcctccttcctccggcggcggaggcgaaggagctccgtactattactccccgcctccaccctctcagtatacctactcctcaccacctcctcccgcatccaccggcggaggaatgtactactacactcctcccagcaacagaaactacccaagaccgccgccgcctaacccgattgtgccgtattttccgttctactactacagccctctgccgcccgggtccactgcagctcctccgccctccacggcctcctcgattctctgtgcacttgctttctcatcttttctattgttgttgctttgatagtaaatgtaagaaaagaaaaaaaatgaaggaaaatggtaggaataacggcgcatatttgcagatctagagattctgagggaaatgagagggaggtagaactgtacaagtgcacgtgaatttcccaatctgccctgcacacgtgaactgaagtaccagtattatgttttctctctgaatttcttgtgccaatgtagattcatctgcaatttgttaataatttttatttttatgtactattaatactagtaagtcgtatttcgttagtataaaaataaaataaattacaaagattt

SEQ ID NO: 55322 - protein, 171 aa, Glycine max
  peptide (1)..(171): Ceres Seq. ID no. 12581875
MRLCLCLTLLLVLASVAMGEEDADHNKHSLKAKSHAQIQCTMCSSCNNPCNQVPSPPPPSPSSNNCPPPPSPPSSGGGGEGAPYYYSPPPPSQYTYSSPPPPASTGGGMYYYTPPSNRNYPRPPPPNPIVPYFPFYYYSPLPPGSTAAPPPSTASSILCALAFSSFLLLLL

SEQ ID NO: 55323 - protein, 154 aa, Glycine max
  peptide (1)..(154): Ceres Seq. ID no. 12581876
MGEEDADHNKHSLKAKSHAQIQCTMCSSCNNPCNQVPSPPPPSPSSNNCPPPPSPPSSGGGGEGAPYYYSPPPPSQYTYSSPPPPASTGGGMYYYTPPSNRNYPRPPPPNPIVPYFPFYYYSPLPPGSTAAPPPSTASSILCALAFSSFLLLLL

SEQ ID NO: 55324 - protein, 130 aa, Glycine max
  peptide (1)..(130): Ceres Seq. ID no. 12581877
MCSSCNNPCNQVPSPPPPSPSSNNCPPPPSPPSSGGGGEGAPYYYSPPPPSQYTYSSPPPPASTGGGMYYYTPPSNRNYPRPPPPNPIVPYFPFYYYSPLPPGSTAAPPPSTASSILCALAFSSFLLLLL

SEQ ID NO: 55325 - DNA, 653 bp, Glycine max
  misc_feature (1)..(653): Ceres Seq. ID no. 15226569
gagaccaaacaaaacactgcacctggttaaggatagagtatagcatggcacagtctagttgcaaaactttggtgcagtggttggtagcagcattgctcattgccttgttgggtggtgcacaagctgttgcaatatgtaacatagactcaagtcaattaaacttgtgtcgtgctgcagttactggtcaaaaccctccaccaccggatgagaaatgttgtgcagttgttcgccaagccaatttgcgttgcctctgcagttacaagtctaccctaccttcatttggaataaaccccaaaaatgctttggccttgcctggtaaatgtggtctgcaatggcctcctaattgttgagtgtagtgaagcagtcaatgaaggtcacggactcatggtcattacaagcaccttagtcttcaatattgctttcaggtgtttcattaacactgaagataaattttaagacagcatttgatatctctcgaataacggtgcagtttattttaatcagtatgtaatgtccaaaagtttgctagcagatgtgtacgtgtattagtgtttgatgttgcagaggtatttgaagatatatcattactcttttccctctatatgtctagacctgtaatatgtataataaaatgtctggtttttggactctcc

SEQ ID NO: 55326 - protein, 115 aa, Glycine max; identical to SEQ ID NO: 54730
  peptide (1)..(115): Ceres Seq. ID no. 15226570

SEQ ID NO: 55327 - protein, 101 aa, Glycine max; identical to SEQ ID NO: 54731
  peptide (1)..(101): Ceres Seq. ID no. 15226571

SEQ ID NO: 55328 - DNA, 1402 bp, Glycine max
  misc_feature (1)..(1402): Ceres Seq. ID no. 15170986
agactcgcctcttgccctcaccggcgcggccaccaaacggtgcaacgccaccagcgtttattcacagatcacacggcggcgacgacctcccttaccagcgctttgtctcgaaaacgcgcatctttgactcacttcctcacaggcacggatcgcgctgcgccctccctcaccgacgtcaacgtgaccggcttctggtggcacatagcgcactgcactcgcacaaagccaacacttcctttgaactcacgcgttcctggtggagacccaaaagttcgaaactgaacattttcacaagctttcggagggcgttgatgagttcggtagctattttgctttcagagttctcaggtgcaaattagggttcttaaccatgagtattgattatttcaagcaggacattgatgaacttatcggtgaattcacccaggtgagtgacaggatgagtcaacaactttggctgagataaaaagagtatggctttctaggaagttctcctacatttatgaagctcgtccttctgccaacctggccttctttatgcaatcactgtatgctcattgtataggttacatggttggtaccgcaactttatctcacagattaggtggcctttactgcctctactgtctttatgagactcaaccatttaatccttcttttaaggtctatctatcccttggagaattaaagaaacttagaatccttgttgctgatgcaaaagcaaatgatattaaagtagcacttgctttagtaaaaagaatgcttgaaagaaacacattcctttttggctctgttgacttgatggaaggttgtgtcacagagacagtaaatgaactccaacaattacagaatgcccgtattcaagttgcatatgaaaagttatttgatagcacttcaattgacaactacatccagatggaccttggcttggaagttgaccttgatttgctgaagaaaaagtcatctggatatgccacggccaagaatgtggctattcaagaggcgagcaatattttagacgttgaaaacataaagcacttacaaaaagataaggaactgataggagatgttgtggagaaggttgctaacgactggcacgttcagaaacaaacattttataaacaaacaggattaggggacgatgcatatgagaaggaactggagcaattacttctagagcagcatccacatgatggaaactcttaaccaagattgaagatggacatctgggtcgtcgtggttacttttgcatggggaattcataattaatatccctgtttagatagtaggaggaaatgtgttccttttccagttattgctgctttaaacaagacaatgaaacaaaaaaaaaatgataaaatgtattatgcttcattttattcaacatttctatttttcttct

SEQ ID NO: 55329 - protein, 222 aa, Glycine max
  peptide (1)..(222): Ceres Seq. ID no. 15170987
MQSLYAHCIGYMVGTATLSHRLGGLYCLYCLYETQPFNPSFKVYLSLGELKKLRILVADAKANDIKVALALVKRMLERNTFLFGSVDLMEGCVTETVNELQQLQNARIQVAYEKLFDSTSIDNYIQMDLGLEVDLDLLKKKSSGYATAKNVAIQEASNILDVENIKHLQKDKELIGDVVEKVANDWHVQKQTFYKQTGLGDDAYEKELEQLLLEQHPHDGNS

SEQ ID NO: 55330 - protein, 211 aa, Glycine max
  peptide (1)..(211): Ceres Seq. ID no. 15170988
MVGTATLSHRLGGLYCLYCLYETQPFNPSFKVYLSLGELKKLRILVADAKANDIKVALALVKRMLERNTFLFGSVDLMEGCVTETVNELQQLQNARIQVAYEKLFDSTSIDNYIQMDLGLEVDLDLLKKKSSGYATAKNVAIQEASNILDVENIKHLQKDKELIGDVVEKVANDWHVQKQTFYKQTGLGDDAYEKELEQLLLEQHPHDGNS

SEQ ID NO: 55331 - protein, 148 aa, Glycine max
  peptide (1)..(148): Ceres Seq. ID no. 15170989
MLERNTFLFGSVDLMEGCVTETVNELQQLQNARIQVAYEKLFDSTSIDNYIQMDLGLEVDLDLLKKKSSGYATAKNVAIQEASNILDVENIKHLQKDKELIGDVVEKVANDWHVQKQTFYKQTGLGDDAYEKELEQLLLEQHPHDGNS

SEQ ID NO: 55332 - DNA, 1459 bp, Glycine max
  misc_feature (1)..(1459): Ceres Seq. ID no. 15171040
aaatctgtgttgacaatgaaaatttttagcttagaaaatgatttagaagtgaggcattcaattggccttaccgatattgactttcaattgaaaactcatgttaacaatttacattaatgaatagatcaatagaaatggtttgttaagtattgttttatatattctattaagtgcctatatcttccctaagtacacttcacttaaaatgtctctcctcaaacattacaaattcagttgcatgcctaattttctttgaataaatctgtgctgatgtcacatactaatttctgtattttgcacatgcttcttatttgtcttagtttccttaagggttgcatgttcttaaaatatttagttaaatttcttctttgcaactgtcttcttatttttatacatggaacagaaagagataaaaacatagtgagtatatttatgaactgcaattttactgcagaacttaggcctggagtctgttggtgtgaaaatagctaaagatggagctatagaggttgatgaatactctcaaacatcagttccttcaatttgggcagttggagatgttacaaacaggataaatctcaccccagttgctttgatggagggaggggcattagtaaaaacactgtttcaggataacccaacaaaacctgattatagagctgttccttctgctgtattttctcaaccaccaattggacaagttggtcttactgaggaacaggctgtacaacaatatggagatattgacatcttcactgcaaattttaggccactgaaagctactctctctgggcttccagaccgtgtttttatgaaattagtagtctgtgcaaaaacaaacgaagttctaggtttgcatatgtgtggagacgatgctcctgaaattgtgcaggtttttagagttgctacagctgctctgtattgctttgataatgatacatgagttttcaattcatttgttatacatctgcttgatacccaggggtttgcagttgctcttaaagctcgcttgaccaaggctgactttgatgccactgtaggcattcacccaagtgccgctgaggaatttgttaccatgaggacacctactaggaagattcgaaagagtgaatcgtctgagggaaagtcgggttctgaagcaaaaactgcagcaggggtttaaacagcattacactgcttcaattgttatacttgaagaaaccagctggtgcctcaagttacctggcgggttgtcactgaatttagcgtggttgtcaaattgttgggaagacattcagaacaatcttccgcaactgagttttcagagcaatacatggaatatctcattgaggtcgtgtgtcatacttctcaagtcttgcagtgtaattatcagagttggggagcctggtaagggcgagtggaatttttggtgccattgtttgccatttgtaatttaacttgccagtcctttcatgtacag

SEQ ID NO: 55333 - protein, 115 aa, Glycine max
  peptide (1)..(115): Ceres Seq. ID no. 15171041
MEGGALVKTLFQDNPTKPDYRAVPSAVFSQPPIGQVGLTEEQAVQQYGDIDIFTANFRPLKATLSGLPDRVFMKLVVCAKTNEVLGLHMCGDDAPEIVQVFRVATAALYCFDNDT

SEQ ID NO: 55334 - protein, 73 aa, Glycine max
  peptide (1)..(73): Ceres Seq. ID no. 15171042
MSHTNFCILHMLLICLSFLKGCMFLKYLVKFLLCNCLLIFIHGTERDKNIVSIFMNCNFTAELRPGVCWCENS

SEQ ID NO: 55335 - protein, 63 aa, Glycine max
  peptide (1)..(63): Ceres Seq. ID no. 15171043
MLLICLSFLKGCMFLKYLVKFLLCNCLLIFIHGTERDKNIVSIFMNCNFTAELRPGVCWCENS

SEQ ID NO: 55336 - DNA, 1176 bp, Glycine max
  misc_feature (1)..(1176): Ceres Seq. ID no. 12607540
ccccccccccccaaaattttcacatctgattgaccttgatttcatgggtgatctaatgaaccatctagagagtacttgcttctggaagtagcaactcaggcaacacttctgacaagtgttctaaatgtttgaccgtatcggaacgtctccagtgttgcattgttgcttttaaagtgatgaggaacaatcttgatgccttgaatgttgatttacaggacttctttctccatctttacaatcttgtacttgaatacaggccaggaagagatcaaggagaggtgttagcagaagctttgaagataatgttgtgtgatgataagcaacacgacatgcagaagactgctgcatttataaaacgattagcaacgctttcactgtgtgttggatcagcagattccatggctgccttggtcacagtaaagcatcttcttcagaagaatgttaagtgcagaaatttattggaaaatgacattggagggggctctgtttcgggcacaattcataaatatctaccatattccacagatcccaatttaagtggtgcccttgcctcagtactttgggaactcaatcttttgtctagtcattatcatccagctatatcaacactggcctcgggcatttcaagcatgagtaatgcacataaccagatccttttatccaagtcctctcctcaacaagcttataaggaaatgtctctttgtctggaattatgtttcacacaatatattgacggtataaaattaaataacaagaagagacgtgcaaatggccctgctatttcaccttccattggttctacaacagttacgagttcatttgatgacaatgaattgcaaaggcaacttagttcccattttatggttcttcatgacataaaggagaatgaaaggttgagaaaggagttggataggactgctctatcactacagctatatgaacaatataagaaacacaagaaacgatcaaaaccaagtagatgatcagccattgctttgtgatgtgtatggccccataggtttcagttatgcagttacagttcatttccagtggagataattctcaaatgcgttcctcaaacgagttcacctcatttgagtgcatgaaatatggaggagagatattttttcaattgaagtaatgcaatgcaaaatgaacttgaggctatccttcttt

SEQ ID NO: 55337 - protein, 268 aa, Glycine max
  peptide (1)..(268): Ceres Seq. ID no. 12607541
MRNNLDALNVDLQDFFLHLYNLVLEYRPGRDQGEVLAEALKIMLCDDKQHDMQKTAAFIKRLATLSLCVGSADSMAALVTVKHLLQKNVKCRNLLENDIGGGSVSGTIHKYLPYSTDPNLSGALASVLWELNLLSSHYHPAISTLASGISSMSNAHNQILLSKSSPQQAYKEMSLCLELCFTQYIDGIKLNNKKRRANGPAISPSIGSTTVTSSFDDNELQRQLSSHFMVLHDIKENERLRKELDRTALSLQLYEQYKKHKKRSKPSR

SEQ ID NO: 55338 - protein, 226 aa, Glycine max
  peptide (1)..(226): Ceres Seq. ID no. 12607542
MLCDDKQHDMQKTAAFIKRLATLSLCVGSADSMAALVTVKHLLQKNVKCRNLLENDIGGGSVSGTIHKYLPYSTDPNLSGALASVLWELNLLSSHYHPAISTLASGISSMSNAHNQILLSKSSPQQAYKEMSLCLELCFTQYIDGIKLNNKKRRANGPAISPSIGSTTVTSSFDDNELQRQLSSHFMVLHDIKENERLRKELDRTALSLQLYEQYKKHKKRSKPSR

SEQ ID NO: 55339 - protein, 217 aa, Glycine max
  peptide (1)..(217): Ceres Seq. ID no. 12607543
MQKTAAFIKRLATLSLCVGSADSMAALVTVKHLLQKNVKCRNLLENDIGGGSVSGTIHKYLPYSTDPNLSGALASVLWELNLLSSHYHPAISTLASGISSMSNAHNQILLSKSSPQQAYKEMSLCLELCFTQYIDGIKLNNKKRRANGPAISPSIGSTTVTSSFDDNELQRQLSSHFMVLHDIKENERLRKELDRTALSLQLYEQYKKHKKRSKPSR

SEQ ID NO: 55340 - DNA, 1112 bp, Glycine max
  misc_feature (1)..(1112): Ceres Seq. ID no. 15172911
gatcgtgtgtttttctccatcttaaactgactgaaattgagttctccggtcgagcgttcttccacaaaccctaatgtcgtttcttgaagaatttcaagccaatttggattcactgccagttattcttcagaagaagtatgcgttgttgcgtgacctagataagagcttacatgatattcaaaggcaaaatgaacagcgttgtgaacaagaaattgaagatattaggcgaggagttaggtctggaaacatcacgcctgatacttcagtaattagattctctgatgaagcgcttgatgagcaaaatcatagtatcagggttgctgatgaaaaagtagccttggctgtccaggcatatgatttggtagatacacacatacaacatcttgatcagtatctgaaaaggtttggtgaggagattcggcgtgaaagagaaaatgctgcaataactggagtgcctgcttcaggttctgagggtaatacaaaatctggaaggggtaatgaaagtggtactggtagaggagggcgaaaaaaaacacgccaaacgactgtcacacccgcagcaacagaagcacaagccactgcaaacccaactggcatggatttagagttaccagttgatccaaatgaacccacatactgcttttgtaatcaagttagctatggagcgatggttgcatgtgataaccccaattgtaaaatagagtggtttcattttggttgtgttggcctgaaagaacaaccaaaaggaaaatggtactgttcgaattgtgcagcaaccaaaaatcggcgtagaggcaaatgaggctggcagaagaataagaataatgttaaaaatgattgaatgtgtatataaattttaatatctctagaagggagttatttatattgggcctagaagctttgttttcgtagctgttattaatcgggaaattatgaaagtacaaatttccaatgacttatagtggctgtgtttgtacattccgttggttttgtacacatttgaaagctatggttcttttttattgtagatctgggttgaaaaggcccggaattattgtgtgtatgtgactatgtgtgtaccatacaatgaagtttctgcactaattatagtt

SEQ ID NO: 55341 - protein, 242 aa, Glycine max
  peptide (1)..(242): Ceres Seq. ID no. 15172912
MSFLEEFQANLDSLPVILQKKYALLRDLDKSLHDIQRQNEQRCEQEIEDIRRGVRSGNITPDTSVIRFSDEALDEQNHSIRVADEKVALAVQAYDLVDTHIQHLDQYLKRFGEEIRRERENAAITGVPASGSEGNTKSGRGNESGTGRGGRKKTRQTTVTPAATEAQATANPTGMDLELPVDPNEPTYCFCNQVSYGAMVACDNPNCKIEWFHFGCVGLKEQPKGKWYCSNCAATKNRRRGK

SEQ ID NO: 55342 - DNA, 1342 bp, Glycine max
  misc_feature (1)..(1342): Ceres Seq. ID no. 14310880
gacccgccaaaccattacaaaactaaacacccagctaccacattgtctagtatggctcttaatctcttaatttcaatcccattctttttactctttgtagtgaatccatttcactttgttgagccaagaaccttagaagtctccgagcatccattcaccagaactctccgaaaactcaaggacatcaacaagggacaaagggtgagaggcgtgggcgagctcaaaagctacctaaaaaaatttggctacctaacaacaaatgacaattcttcaaacaacaaccacttcgacaaaaacgttgagtttgctctcaaagaataccaagtgttccatcacttacgtcccacgggtcgtgtggatgccgaaaccatcaaaagaatgggcctcccacgttgtggtgtgcctgatattatcacccctcaaaaccataagcttaaggggttggtgattcttgcaaactatagcttcttctcgggttcaccaaaatgggaagagtctaaaagggcactaacctacacattcgtatcaagtgctaacgtgttgaggatgtatgatgtgaggctagcaacaaggaatgccttccaaagttgggcaagagcctctaacttcacatttatggaaatgccaagtgagtataataacctagctaacatagtcctagggtttcatcgtggggaccatggtgatgggtacccatttgatgggccgggccaggttttggcccacacttttgcaccacaagatggtaggttgcattttgatgctgatgaaccatggagcattgaatcaacaagctggaatgtaggaccaggatggaatgtgggttgggattggaggaggtgggtgcgtcctagatggcaaagccgaaggaccattgatttgcaaaccgtggctttgcatgaaataggtcaccttttagggctagggcatagtaacgttcccggctccattatgtatccctcttatgaaggggtaaagagggatctaactcaggatgatgtggatggcatacgggctctatatagattgcccaactagaacttgagaaatgttgttccacttgagttttgtgaaatagttgtcaagtgtaacaactaagccttggtgggttgttaacttaaattggttaagtagtgtgtttcgtaacaagttgatttgcattgatcgaggtttcttgaatcaataagtaggtgcttttatgttgattttattgttatcttatagtgactgtagatttctaatgtcttactagctatatgcttgaatgtttttatcttaaaagcaaatttactataaaacttagtgtaaaatttccaattcaacacagaagttactttttatt

SEQ ID NO: 55343 - protein, 345 aa, Glycine max
  peptide (1)..(345): Ceres Seq. ID no. 14310881
DPPNHYKTKHPATTLSSMALNLLISIPFFLLFVVNPFHFVEPRTLEVSEHPFTRTLRKLKDINKGQRVRGVGELKSYLKKFGYLTTNDNSSNNNHFDKNVEFALKEYQVFHHLRPTGRVDAETIKRMGLPRCGVPDIITPQNHKLKGLVILANYSFFSGSPKWEESKRALTYTFVSSANVLRMYDVRLATRNAFQSWARASNFTFMEMPSEYNNLANIVLGFHRGDHGDGYPFDGPGQVLAHTFAPQDGRLHFDADEPWSIESTSWNVGPGWNVGWDWRRWVRPRWQSRRTIDLQTVALHEIGHLLGLGHSNVPGSIMYPSYEGVKRDLTQDDVDGIRALYRLPN

SEQ ID NO: 55344 - protein, 328 aa, Glycine max
  peptide (1)..(328): Ceres Seq. ID no. 14310882
MALNLLISIPFFLLFVVNPFHFVEPRTLEVSEHPFTRTLRKLKDINKGQRVRGVGELKSYLKKFGYLTTNDNSSNNNHFDKNVEFALKEYQVFHHLRPTGRVDAETIKRMGLPRCGVPDIITPQNHKLKGLVILANYSFFSGSPKWEESKRALTYTFVSSANVLRMYDVRLATRNAFQSWARASNFTFMEMPSEYNNLANIVLGFHRGDHGDGYPFDGPGQVLAHTFAPQDGRLHFDADEPWSIESTSWNVGPGWNVGWDWRRWVRPRWQSRRTIDLQTVALHEIGHLLGLGHSNVPGSIMYPSYEGVKRDLTQDDVDGIRALYRLPN

SEQ ID NO: 55345 - protein, 219 aa, Glycine max
  peptide (1)..(219): Ceres Seq. ID no. 14310883
MGLPRCGVPDIITPQNHKLKGLVILANYSFFSGSPKWEESKRALTYTFVSSANVLRMYDVRLATRNAFQSWARASNFTFMEMPSEYNNLANIVLGFHRGDHGDGYPFDGPGQVLAHTFAPQDGRLHFDADEPWSIESTSWNVGPGWNVGWDWRRWVRPRWQSRRTIDLQTVALHEIGHLLGLGHSNVPGSIMYPSYEGVKRDLTQDDVDGIRALYRLPN

SEQ ID NO: 55346 - DNA, 1238 bp, Glycine max
  misc_feature (1)..(1238): Ceres Seq. ID no. 14316502
tatatgctctgtccaatgtgttctgtggtgtctttcacttttccctttccacagagcaggggtccacttggaattttaatatgtatgaaggatgaaccaataccatggtcatattttaccaacttaggttatattgttgatacatactgttgaggaactgcctgtgcagaattacaattagaagaattgtttatggacatatttgcaattagggagcaaattagcctaattttggaaatttggattaccaagttaatttatgtttaacatattaactactctttgaatttgaacattgattaccgattcttttttcttggcaaattactccctaaattagaaaaaagtttgccagaacttcagtaatgccaactaagcttttatgttataatcttggcttcaactgacttcttttatggaaggaatatcaggttcatatcttttagaaagccctggcgctgataactcatctccaaagttgccaacttcagatacaaatgagggttatgaaatcaaggaggcattgagagcacagatggaagtgcaaagtaaattacatttgcaagtggaggcagagaagcacttgcagattcgccaggatgcagaaaggagatacatggccatgctcgaaagagcttgcaagatgctggctgatcaatttattggtgccacagtcatagacacagacagccaaaagtttcaaggaattggaagcaaagcacctagaggtaccttggttgatcctcttggtttttactccatgccatccactgaggtggctggagtgaatgtcccagaagaagaaataccgctgagtctcccaccccaaagggctgattgttcaaccgaaagttgtttaacctcacatgagagttctggaggattggctttagaaggatctcctggcgagggaaaaaggaggatgcttggcatggactcgatggcagcacctttgatatggagtgaagctaagatgagaactcaagccatcaatgtagcccaaggtaatcttcctcaaggaataactaggtatggcatgtagggatggaaggtctacttgatggtttatcccggcatgatatataaacctttgggctttcattcattcctttttttataggtacttgaactcttcatgtcttgtaagttagtgagacataggtggaatcaattttacccctttgtaaattcaatctactctgtgactttaaaaattgcaaaaaactagctttgactat

SEQ ID NO: 55347 - protein, 208 aa, Glycine max
  peptide (1)..(208): Ceres Seq. ID no. 14316503
MEGISGSYLLESPGADNSSPKLPTSDTNEGYEIKEALRAQMEVQSKLHLQVEAEKHLQIRQDAERRYMAMLERACKMLADQFIGATVIDTDSQKFQGIGSKAPRGTLVDPLGFYSMPSTEVAGVNVPEEEIPLSLPPQRADCSTESCLTSHESSGGLALEGSPGEGKRRMLGMDSMAAPLIWSEAKMRTQAINVAQGNLPQGITRYGM

SEQ ID NO: 55348 - protein, 168 aa, Glycine max
  peptide (1)..(168): Ceres Seq. ID no. 14316504
MEVQSKLHLQVEAEKHLQIRQDAERRYMAMLERACKMLADQFIGATVIDTDSQKFQGIGSKAPRGTLVDPLGFYSMPSTEVAGVNVPEEEIPLSLPPQRADCSTESCLTSHESSGGLALEGSPGEGKRRMLGMDSMAAPLIWSEAKMRTQAINVAQGNLPQGITRYGM

SEQ ID NO: 55349 - protein, 141 aa, Glycine max
  peptide (1)..(141): Ceres Seq. ID no. 14316505
MAMLERACKMLADQFIGATVIDTDSQKFQGIGSKAPRGTLVDPLGFYSMPSTEVAGVNVPEEEIPLSLPPQRADCSTESCLTSHESSGGLALEGSPGEGKRRMLGMDSMAAPLIWSEAKMRTQAINVAQGNLPQGITRYGM

SEQ ID NO: 55350 - DNA, 1266 bp, Glycine max
  misc_feature (1)..(1266): Ceres Seq. ID no. 14308430
gaagtcagactaaactcaataataggaaacacgcaacaagtgggggtggcgagcggaatatgatatatatgatatattgatatatcataacaataatcccaaaatattaagggtactgttttcgattcgatcaactcactcacgcgcacgcctttcattccattccattccgatgcgatgacgacgacgaattccctcttcttctcccttgactggcacaatgaattctatcctacctatcatgatttctaccttctcccccttttcgctctcttcttcccttcccttcgcttctttctcgaccgattcatattcgagaaagtggcgagacggttgattttcggaaaggggcatgcggcgctggactaccattcagacgagagaagaaaaaagattaggaaatttaaggaatcagcttggaaatgtgtttattatctttcagctgagattcttgctttgtctgtaacatacgatgaaccatggtttacaaatactagaaacttttgggtgggcccagggacccaggtctggccagatcaaaagatcaagttgaaattgaaggcagtctatatgtacgctgctggattttactcatactccatttttgctttgatattttgggaaacgaggcgctccgactttggagtgtccatgagtcatcatgttgctactgtaattctcattgttctgtcttacattttcaggtttgcacgtgttggatcagtggttttagcacttcatgatgctagcgatgtgtttctggagatagggaaaatgtccaaatacagtggtgctgaaactatggctagctttgcttttattctatttgttttatcttggatcatattgcgtctcatttactacccattctggattctttggagtacaagctatgaagttctgctcaccttggataaggaaaagcaccaagtggatggtccaatatattattatgtgttcaatagtcttctttactgcttgcttgttatgcatatttattggtgggtgctgatatttcggatgcttgttaaacaaatccaagcaagaggaaaagttagtgaagatgttcgatctgattcagaagatgaagatgaacatgaagattgagtagggaagcaaaagcacaatgtattctttaggcaaaggtgaatctaaaatgatgacaaattgttttacactctaacatgatgaatattgtcgtatgttatgtggatttattttatgttaaattgtccatattttattttatttttttataaaaaaaag

SEQ ID NO: 55351 - protein, 309 aa, Glycine max
  peptide (1)..(309): Ceres Seq. ID no. 14308431
MTTTNSLFFSLDWHNEFYPTYHDFYLLPLFALFFPSLRFFLDRFIFEKVARRLIFGKGHAALDYHSDERRKKIRKFKESAWKCVYYLSAEILALSVTYDEPWFTNTRNFWVGPGTQVWPDQKIKLKLKAVYMYAAGFYSYSIFALIFWETRRSDFGVSMSHHVATVILIVLSYIFRFARVGSVVLALHDASDVFLEIGKMSKYSGAETMASFAFILFVLSWIILRLIYYPFWILWSTSYEVLLTLDKEKHQVDGPIYYYVFNSLLYCLLVMHIYWWVLIFRMLVKQIQARGKVSEDVRSDSEDEDEHED

SEQ ID NO: 55352 - protein, 178 aa, Glycine max
  peptide (1)..(178): Ceres Seq. ID no. 14308432
MYAAGFYSYSIFALIFWETRRSDFGVSMSHHVATVILIVLSYIFRFARVGSVVLALHDASDVFLEIGKMSKYSGAETMASFAFILFVLSWIILRLIYYPFWILWSTSYEVLLTLDKEKHQVDGPIYYYVFNSLLYCLLVMHIYWWVLIFRMLVKQIQARGKVSEDVRSDSEDEDEHED

SEQ ID NO: 55353 - DNA, 2098 bp, Glycine max
  misc_feature (1)..(2098): Ceres Seq. ID no. 14309715
tctctctctctctttctctctttctctctgtctagaatgcctctattctcctctgtcggtcacacacagcgatagatagataatagagaagagaagcattcataggcgccaattgtgagtgagagagaagtttctgttttttctacttttccatttttttgggagagatagagagagagagatctgattcttcaccataactgtcattgctttgcttctctcactcagcacaagttgacaagaagggcattgccatttcaatcccatacaaaaagcacacaccccaattcaccaccattttcctaaagcttcactcttttctctgctaagagaagaaagcaagaaagaaaaagccaaaatggttgaatctcagcccaagttcttcatcccggactcaatcaacggcgtgaatttcgacgtagcggcgcagattaagatggtgtgggaagtgatgaaggcgccactgatcgtgcctctgctgaacctggcagtgtacattagcctcgccatggcgctcatgctcttcatggagagggtctacatgggcattgtcatcatcctcgtcaagctcttctggaagaagccacaccagcgctacaagttcgagccactccaagacgacgaggaactcggcaactctaattaccccgtcgtgcttgtccagattccaatgttcaatgagaaagaggtgtacaaggtgtcgattggagcagcttgtaatctttcatggcctgcggatcgtctcgtcatccaagtgcttgatgattctactgaccctaccgtcaagcaaatggtggagatggaatgccagagatgggcaagtaagggcataaacatagtgtaccaaatcagagaaacaagaggagggtacaaagcgggtgctctaaaagaaggcctaaaacgtaactatgtgaaacactgtgagtacgtggcaattttcgatgcagatttcaggccagagccagattttctcagacgttccattcctttcttggtgggcaaccccgacattgctcttgttcaagctcgttggagatttgtgaattctgacgagtgcttattgacaagaatgcaagagatgtccctggattaccatttcacagtagagcaagaagttggatcagccactcatgctttcttcggtttcaacggaactgctggtatttggagaatagctgctatcaacgaagctggtgggtggaaagacagaacaacagtggaagatatggaccttgctgttcgtgctagtcttaggggatggaaatttttgtaccttggtgacctccaggccaaaagtgagcttcccagtactttgagagccttcagattccagcagcacagatggtcatgtggtcctgctaatttgttccgcaaaatggtgatggagattgtgaggaacaagaaagttaggttttggaagaaagtgtatgttatatacagctttttctttgttcgcaaaatcatcgcccacatggtcaccttcttcttctactgtgttgtgattccccttacaatcttggtcccagaggttcatgttccaatctggggagctgtttatattccttctgtcatcaccattctcaattcagttggaacaccaaggtccattcaccttctgttctattggatcctctttgagaatgtgatgtctttgcaccgtaccaaggcaacatttataggtctcttagagtatgggagggctaatgaatgggttgtgactgaaaaacttggtgactctgtcaataataataagaataaatcaggagatgctgccaagaagaataatgccatcaaggccacccccaaaaagactcgatccaaatttgttgaaagacttaatttactggagttgggatttgctgccttcctcttcgtatgtggatgctatgattatgttcatgggaaacacaactacttcatctacctcttccttcagaccttaacattctcaattgtaggatttggctacgttggcaccatcgtgtaaacctcgttgagccaaatttctcaagttacttaagtttcatcaatgttgtgtccatatttttctagtttctcctaaaaaaaaatacatcaaaagaggctgatttcttcaagc

SEQ ID NO: 55354 - protein, 542 aa, Glycine max
  peptide (1)..(542): Ceres Seq. ID no. 14309716
MVESQPKFFIPDSINGVNFDVAAQIKMVWEVMKAPLIVPLLNLAVYISLAMALMLFMERVYMGIVIILVKLFWKKPHQRYKFEPLQDDEELGNSNYPVVLVQIPMFNEKEVYKVSIGAACNLSWPADRLVIQVLDDSTDPTVKQMVEMECQRWASKGINIVYQIRETRGGYKAGALKEGLKRNYVKHCEYVAIFDADFRPEPDFLRRSIPFLVGNPDIALVQARWRFVNSDECLLTRMQEMSLDYHFTVEQEVGSATHAFFGFNGTAGIWRIAAINEAGGWKDRTTVEDMDLAVRASLRGWKFLYLGDLQAKSELPSTLRAFRFQQHRWSCGPANLFRKMVMEIVRNKKVRFWKKVYVIYSFFFVRKIIAHMVTFFFYCVVIPLTILVPEVHVPIWGAVYIPSVITILNSVGTPRSIHLLFYWILFENVMSLHRTKATFIGLLEYGRANEWVVTEKLGDSVNNNKNKSGDAAKKNNAIKATPKKTRSKFVERLNLLELGFAAFLFVCGCYDYVHGKHNYFIYLFLQTLTFSIVGFGYVGTIV

SEQ ID NO: 55355 - protein, 516 aa, Glycine max
  peptide (1)..(516): Ceres Seq. ID no. 14309717
MVWEVMKAPLIVPLLNLAVYISLAMALMLFMERVYMGIVIILVKLFWKKPHQRYKFEPLQDDEELGNSNYPVVLVQIPMFNEKEVYKVSIGAACNLSWPADRLVIQVLDDSTDPTVKQMVEMECQRWASKGINIVYQIRETRGGYKAGALKEGLKRNYVKHCEYVAIFDADFRPEPDFLRRSIPFLVGNPDIALVQARWRFVNSDECLLTRMQEMSLDYHFTVEQEVGSATHAFFGFNGTAGIWRIAAINEAGGWKDRTTVEDMDLAVRASLRGWKFLYLGDLQAKSELPSTLRAFRFQQHRWSCGPANLFRKMVMEIVRNKKVRFWKKVYVIYSFFFVRKIIAHMVTFFFYCVVIPLTILVPEVHVPIWGAVYIPSVITILNSVGTPRSIHLLFYWILFENVMSLHRTKATFIGLLEYGRANEWVVTEKLGDSVNNNKNKSGDAAKKNNAIKATPKKTRSKFVERLNLLELGFAAFLFVCGCYDYVHGKHNYFIYLFLQTLTFSIVGFGYVGTIV

SEQ ID NO: 55356 - protein, 511 aa, Glycine max
  peptide (1)..(511): Ceres Seq. ID no. 14309718
MKAPLIVPLLNLAVYISLAMALMLFMERVYMGIVIILVKLFWKKPHQRYKFEPLQDDEELGNSNYPVVLVQIPMFNEKEVYKVSIGAACNLSWPADRLVIQVLDDSTDPTVKQMVEMECQRWASKGINIVYQIRETRGGYKAGALKEGLKRNYVKHCEYVAIFDADFRPEPDFLRRSIPFLVGNPDIALVQARWRFVNSDECLLTRMQEMSLDYHFTVEQEVGSATHAFFGFNGTAGIWRIAAINEAGGWKDRTTVEDMDLAVRASLRGWKFLYLGDLQAKSELPSTLRAFRFQQHRWSCGPANLFRKMVMEIVRNKKVRFWKKVYVIYSFFFVRKIIAHMVTFFFYCVVIPLTILVPEVHVPIWGAVYIPSVITILNSVGTPRSIHLLFYWILFENVMSLHRTKATFIGLLEYGRANEWVVTEKLGDSVNNNKNKSGDAAKKNNAIKATPKKTRSKFVERLNLLELGFAAFLFVCGCYDYVHGKHNYFIYLFLQTLTFSIVGFGYVGTIV

SEQ ID NO: 55357 - DNA, 1635 bp, Glycine max
  misc_feature (1)..(1635): Ceres Seq. ID no. 14308417
gaaactccaacaaaaagacccaaagagtgtgtttttgcgcattcattcatttggtgatgtgcaacaagaacagtccttcttcttcggacattcaagcaacctctattatgaagaggacgcggaagccgaatagaaggtatcatcataataccacttcttcctcttcctcttcttcttcttcttcttcttcttcttcttcctccacgacgtcgtttaagccgcaccggcgcgggaacagaaccaagacgcggaagcccaagtttgtcagcctgcggcttcagttatccgatcctaagaaaaagatgaaaacaacccagcccaagcccaagcccaagcccaagcccaagcctaaggcccaacaacaagaacagcagcagcaacagccgcagctgaatctcttccctctccatccggaccaccatgacatgcacgaggagcagaacgtggcgcttctctttagctccgatggtggggccacactcaacggcctactggaggaggagacgactacgacggaggaagggtcgatgtcggtgctgacgtgtccggcggaggacaccgggaaccggctggtacggaaggcgatgcggcggagggagagcgaggaggggagtgaagagcggtgggtgtgctactcggaggtggtggaggagaagaaggaggccatggaggaggtcacgagttattgcgtcacgggggaaacgaagacgaagacgaagacgaaaacgccgtcgtttggattgttgtcgttgaagctggatcaccaggggatattgaatgcatggtctgataaaggctctctctacgtcgcggcggaggaggaggaggaggggggcccacagactgtccctgacatattcaatggtttcctttttcataatgttgcatgggacgggttggggagtggtggtgttgttgggaatgcatggaatgttcctgaaaattgtggggctaacaagactaatgtgaaggaagaaatgggttggaagttggggcagagagaggcaagtttgcagagatacaaggagaagaggcaaagcaggctcttctataagaaaatccgttatgaagttcgcaagctgaatgctgagaaacggcccaggatgaagggacgatttgtgaagagggaatgacaagtgtagaaggatagacacggttgataataagaatgttgtcatattacagcgttggaatagaagttttcgtgcctttggttttgggtagtgctgggaagctttttcttgatggatacgatataattaattatgcaatgtaaaatcccagtggtacaaatatgaacaccccgggaaaatctatattcagctgctgtgcgacacaacatgtaaggggcagtttctagacctttgattgaatgagtttgacaaagttttcacatgtgttttgatctcaatccaaggctttagaaacagtcaaaagcatgttgtacaagtacaactaccaaaaaaatgtataggttgttctaaagacttgtacaaattctctcacaaaatttaaatatttggaacatcaaacgaactggaaattgaaacattagtcagatcgtcaacactaggggagtgatctctaggaggaagtgttgtgtgactacaacctcccactgatatatcttggcat

SEQ ID NO: 55358 - protein, 376 aa, Glycine max
  peptide (1)..(376): Ceres Seq. ID no. 14308418
NSNKKTQRVCFCAFIHLVMCNKNSPSSSDIQATSIMKRTRKPNRRYHHNTTSSSSSSSSSSSSSSSSTTSFKPHRRGNRTKTRKPKFVSLRLQLSDPKKKMKTTQPKPKPKPKPKPKAQQQEQQQQQPQLNLFPLHPDHHDMHEEQNVALLFSSDGGATLNGLLEEETTTTEEGSMSVLTCPAEDTGNRLVRKAMRRRESEEGSEERWVCYSEVVEEKKEAMEEVTSYCVTGETKTKTKTKTPSFGLLSLKLDHQGILNAWSDKGSLYVAAEEEEEGGPQTVPDIFNGFLFHNVAWDGLGSGGVVGNAWNVPENCGANKTNVKEEMGWKLGQREASLQRYKEKRQSRLFYKKIRYEVRKLNAEKRPRMKGRFVKRE

SEQ ID NO: 55359 - protein, 358 aa, Glycine max
  peptide (1)..(358): Ceres Seq. ID no. 14308419
MCNKNSPSSSDIQATSIMKRTRKPNRRYHHNTTSSSSSSSSSSSSSSSSTTSFKPHRRGNRTKTRKPKFVSLRLQLSDPKKKMKTTQPKPKPKPKPKPKAQQQEQQQQQPQLNLFPLHPDHHDMHEEQNVALLFSSDGGATLNGLLEEETTTTEEGSMSVLTCPAEDTGNRLVRKAMRRRESEEGSEERWVCYSEVVEEKKEAMEEVTSYCVTGETKTKTKTKTPSFGLLSLKLDHQGILNAWSDKGSLYVAAEEEEEGGPQTVPDIFNGFLFHNVAWDGLGSGGVVGNAWNVPENCGANKTNVKEEMGWKLGQREASLQRYKEKRQSRLFYKKIRYEVRKLNAEKRPRMKGRFVKRE

SEQ ID NO: 55360 - protein, 341 aa, Glycine max
  peptide (1)..(341): Ceres Seq. ID no. 14308420
MKRTRKPNRRYHHNTTSSSSSSSSSSSSSSSSTTSFKPHRRGNRTKTRKPKFVSLRLQLSDPKKKMKTTQPKPKPKPKPKPKAQQQEQQQQQPQLNLFPLHPDHHDMHEEQNVALLFSSDGGATLNGLLEEETTTTEEGSMSVLTCPAEDTGNRLVRKAMRRRESEEGSEERWVCYSEVVEEKKEAMEEVTSYCVTGETKTKTKTKTPSFGLLSLKLDHQGILNAWSDKGSLYVAAEEEEEGGPQTVPDIFNGFLFHNVAWDGLGSGGVVGNAWNVPENCGANKTNVKEEMGWKLGQREASLQRYKEKRQSRLFYKKIRYEVRKLNAEKRPRMKGRFVKRE

SEQ ID NO: 55361 - DNA, 1853 bp, Glycine max
  misc_feature (1)..(1853): Ceres Seq. ID no. 15172472
gatttcaaagagagagagagagatttcacagaccaaattgcagaggacgacaaagttcacaacttcaaggaaaatcgaaatggcccaagtgagcagagtgcacaatcttgctcaaagcactcaaattttcggtcattcttccaatcccaacaaacccaaatcggcgaattcggtttcattgaggccacgcctttggggtccctcaaaatctcgcatcttggtgaacaaaactggaagccttatgggaaattttaatgcggggaagggaaattccggcatgtttaaggtttctgcctccgtcgccgccgccgcagagaagccttcgacggcgccggagatcgtgttggaacctatcaaagacatctcgggtaccatcacattgccagggtctaagtctctgtccaatcgaattttgcttcttgctgctctctctgagggaacaactgttatagacaacttgctgtacagcgaggatattcattacatgcttggtgcattaaggacccttggactgcgtgtggaagacgaccaaacaaccaaacaagcaattgtggaaggctgtgggggattgtttcccactattaaagaatctaaagatgaaatcaatttattccttggaaatgctggtactgcgatgcgtcctttgacagcagctgtagttgctgcaggtggaaatgcaagctacgtacttgatggagtgccccgaatgagagagaggccaattggggatttggttgctggtcttaagcagctcggtgcagatgttgattgctttcttggcacaaactgtccacctgttcgtgtaaatgggaagggaggacttcctggcggaaaggtgaaactgtctggatcagttagcagtcaatacctaactgctttgcttatggcggctcctttagctcttggcgatgtggaaattgagattgttgataaactgatttctgttccatatgttgaaatgactctgaagttgatggagcgttttggagtttctgtggaacacagtggtaattgggataagttcttggtccatggaggtcaaaagtacaagtctcctggcaatgcttttgttgaaggtgatgcttcaagtgccagttacttcctagctggtgcagcagttactggtgggactatcactgttaatggctgtggcacaagcagtttacagggagatgtaaaatttgctgaagttcttgaaaagatgggagctaaggttacatggtcagagaacagtgtcaccgttactggaccgccacaagattcttctggtcaaaaagtcttgcaaggcattgatgtcaatatgaacaagatgccagatgttgccatgactcttgccgttgtcgcactatttgctaatggtcaaactaccatcagagatgtggcaagttggagagttaaagagactgagaggatgatagcaatctgcacagaactcagaaagctaggagcaacagttgaagaaggtcctgattactgtgtgattactccacctgagaaattgaatgtcacagctatagacacatatgatgaccacagaatggccatggcattctctcttgctgcttgtggggatgttccagtaaccatcaaggatcctggttgcaccaggaagacatttcccgactactttgaagtccttgagaggttcacaaagcactaagcattttgtacattgagtaggaagagagagagagataaatactcacaaaacagtgagtatatgcatgacttgcttttgtttcttaacattcccttgtaagaacttgagataatttgtattgttggaaagagctattgattctgttgtatcaaagtaatttaatttccagtacagacttggctctaaaaaaaag

SEQ ID NO: 55362 - protein, 552 aa, Glycine max
  peptide (1)..(552): Ceres Seq. ID no. 15172473
ISKREREISQTKLQRTTKFTTSRKIEMAQVSRVHNLAQSTQIFGHSSNPNKPKSANSVSLRPRLWGPSKSRILVNKTGSLMGNFNAGKGNSGMFKVSASVAAAAEKPSTAPEIVLEPIKDISGTITLPGSKSLSNRILLLAALSEGTTVIDNLLYSEDIHYMLGALRTLGLRVEDDQTTKQAIVEGCGGLFPTIKESKDEINLFLGNAGTAMRPLTAAVVAAGGNASYVLDGVPRMRERPIGDLVAGLKQLGADVDCFLGTNCPPVRVNGKGGLPGGKVKLSGSVSSQYLTALLMAAPLALGDVEIEIVDKLISVPYVEMTLKLMERFGVSVEHSGNWDKFLVHGGQKYKSPGNAFVEGDASSASYFLAGAAVTGGTITVNGCGTSSLQGDVKFAEVLEKMGAKVTWSENSVTVTGPPQDSSGQKVLQGIDVNMNKMPDVAMTLAVVALFANGQTTIRDVASWRVKETERMIAICTELRKLGATVEEGPDYCVITPPEKLNVTAIDTYDDHRMAMAFSLAACGDVPVTIKDPGCTRKTFPDYFEVLERFTKH

SEQ ID NO: 55363 - protein, 526 aa, Glycine max
  peptide (1)..(526): Ceres Seq. ID no. 15172474
MAQVSRVHNLAQSTQIFGHSSNPNKPKSANSVSLRPRLWGPSKSRILVNKTGSLMGNFNAGKGNSGMFKVSASVAAAAEKPSTAPEIVLEPIKDISGTITLPGSKSLSNRILLLAALSEGTTVIDNLLYSEDIHYMLGALRTLGLRVEDDQTTKQAIVEGCGGLFPTIKESKDEINLFLGNAGTAMRPLTAAVVAAGGNASYVLDGVPRMRERPIGDLVAGLKQLGADVDCFLGTNCPPVRVNGKGGLPGGKVKLSGSVSSQYLTALLMAAPLALGDVEIEIVDKLISVPYVEMTLKLMERFGVSVEHSGNWDKFLVHGGQKYKSPGNAFVEGDASSASYFLAGAAVTGGTITVNGCGTSSLQGDVKFAEVLEKMGAKVTWSENSVTVTGPPQDSSGQKVLQGIDVNMNKMPDVAMTLAVVALFANGQTTIRDVASWRVKETERMIAICTELRKLGATVEEGPDYCVITPPEKLNVTAIDTYDDHRMAMAFSLAACGDVPVTIKDPGCTRKTFPDYFEVLERFTKH

SEQ ID NO: 55364 - protein, 472 aa, Glycine max
  peptide (1)..(472): Ceres Seq. ID no. 15172475
MGNFNAGKGNSGMFKVSASVAAAAEKPSTAPEIVLEPIKDISGTITLPGSKSLSNRILLLAALSEGTTVIDNLLYSEDIHYMLGALRTLGLRVEDDQTTKQAIVEGCGGLFPTIKESKDEINLFLGNAGTAMRPLTAAVVAAGGNASYVLDGVPRMRERPIGDLVAGLKQLGADVDCFLGTNCPPVRVNGKGGLPGGKVKLSGSVSSQYLTALLMAAPLALGDVEIEIVDKLISVPYVEMTLKLMERFGVSVEHSGNWDKFLVHGGQKYKSPGNAFVEGDASSASYFLAGAAVTGGTITVNGCGTSSLQGDVKFAEVLEKMGAKVTWSENSVTVTGPPQDSSGQKVLQGIDVNMNKMPDVAMTLAVVALFANGQTTIRDVASWRVKETERMIAICTELRKLGATVEEGPDYCVITPPEKLNVTAIDTYDDHRMAMAFSLAACGDVPVTIKDPGCTRKTFPDYFEVLERFTKH

SEQ ID NO: 55365 - DNA, 1407 bp, Glycine max
  misc_feature (1)..(1407): Ceres Seq. ID no. 15226401
atgcaagtcgatcagttcgcccttaagaaataggcaacatcggttcgaatccgataccgataaagggctttttcctttttttttcggtatgccgctccgccagcaaggagcgaaagaaccaagtggtttgtggtaatgttagaatttgcacctatttgtatctatttagtgatcagtctgctagtttctttgatcttactcggtcttccttttctctttgcttccaatagttcgacctatccagaaaaattgtcggcctacgaatgtggtttcgatcctttcggtgatgccagaagtcgtttcgatatacgattttatcttgtttccattttatttattatttttgatctggaagtaacctttttctttccttgggcagtatctctcaacaagattgatctgtttggattttggtctatgatggcctttttattgattttgacgattggatttctctatgaatggaaaaggggtgctttggattgggagtaatcactagtgatagggcaaaaatagggaggaaggataaaggaaagagcgatgcctacattaaatcaattgattcgtcatggtagagaagaaaaacggcgcacggaccgtactcgagctttggatcaatgtccccagaagcaaggagtatgcctgcgtgttccaacgagaacaccgaaaaaaccaaattcagctctacgtaagatagccaaagtacgattgagcaatcgacatgatatatttgcttacattccgggcgaaggtcataatttgcaggaacattctatggtgttaataagaggaggtagagtgaaagatttgccaggtgtgaaattccattgtattcgaggagtcaaggatttgttgggaattccggatcgaagaagaggcagatccaaatatggtgcagaaaaacccaaatcgatatgaatggaggatgcccctggaacttcttttttttctcggtcaggagaggtacgaagtcactcgccctatatataatagaatagtgaaagcaggagaggtttagcggatcagtgaaaaaaatcttattctagtaagtcatttgtccgttgctggtcatcaatctccggtatcgattcccggttttcccgggcctactcccttaaagcttgttacggtattctcactccgatcgccccaatgaagggcaatctctatcccttctaactttattctgggatttcttattggcattggattttacaagtgagctaatcaccaaatgagcattaacccttataaagtaagctagtacaaggtagacttaagcaatctcattgccctgaaagaaagctcagtaggtggatcttctttccaggtcgcaggtggagagccggttgaaaggccttctgccaattgagaatgatccattaatataaaaaaaaaaaaaaaaaa

SEQ ID NO: 55366 - protein, 125 aa, Glycine max
  peptide (1)..(125): Ceres Seq. ID no. 15226402
MPTLNQLIRHGREEKRRTDRTRALDQCPQKQGVCLRVPTRTPKKPNSALRKIAKVRLSNRHDIFAYIPGEGHNLQEHSMVLIRGGRVKDLPGVKFHCIRGVKDLLGIPDRRRGRSKYGAEKPKSI

SEQ ID NO: 55367 - protein, 118 aa, Glycine max
  peptide (1)..(118): Ceres Seq. ID no. 15226403
MLEFAPICIYLVISLLVSLILLGLPFLFASNSSTYPEKLSAYECGFDPFGDARSRFDIRFYLVSILFIIFDLEVTFFFPWAVSLNKIDLFGFWSMMAFLLILTIGFLYEWKRGALDWE

SEQ ID NO: 55368 - DNA, 1181 bp, Glycine max
  misc_feature (1)..(1181): Ceres Seq. ID no. 15227214
gttatgttcttacaagttctatatatatatatatatatacatacatacgcatacttacttgagtcacttgtttaaatatttttctgtttcaaaaaattggaacctttcactgttgaattttgatgactacacccttggaacatgattacataggcttatcagaggctccatccatggagaaaagctgtgataagatatcctcttcagtttcctccaatctttcttctgaggatgagaacactacttcatctctgaacttcaaggagacagagctgaggcttggcctgccaggttgtgattctcctgagaacaacaacaaatcaggggtctctctttttggcaaggatttgcagaagaagaataatggctattcttctgcttcttcaactccttccaacaagaacctcaagaggggcttccctgatgccattagctcttcttcttcctcttctgggaaatggattttctcggcgagtgatgcagcaactgaagctgatttggaaagtggttctaatatctctggaggatgcaacaaagaggttggaatggttcctcactatgagaaaccagctcaagttgctgcaacaaatgaacatgctcctgctcctgctccaaaagcacaagttgtgggatggccaccaattcgatcttttcgaaagaacacgatgatggcttataatttggcaaaatgtgacaacgaagctgaggagaaatcaggagtaggttgtctttacgttaaggtcagcatggatggtgctccatatctcagaaaggttgatctgaaaacctacagcaactatattgaactttcttcagctcttgagaaaatgttcagctgctttaccattggtcaatgcaattctcgtgcacttcctgggaaagatggattaagtgagagtgcattcagggatcttgttgatggctctgaatatgttcttacatatgaagataaggaaggagactggatgcttgtgggtgatgtcccttggaaaatgttcactgagtcatgtaagaaactaaggataatgaaaggctctgaggcaatcgggctagctccaaggggtatggaaaaatttaggagccaatactagtacagaagattctgctccaccactgggtcattcactgaagcatataaagaaggtttagaggagaatttgagcttaataaaaaaataaaat

SEQ ID NO: 55369 - protein, 322 aa, Glycine max
  peptide (1)..(322): Ceres Seq. ID no. 15227215
MTTPLEHDYIGLSEAPSMEKSCDKISSSVSSNLSSEDENTTSSLNFKETELRLGLPGCDSPENNNKSGVSLFGKDLQKKNNGYSSASSTPSNKNLKRGFPDAISSSSSSSGKWIFSASDAATEADLESGSNISGGCNKEVGMVPHYEKPAQVAATNEHAPAPAPKAQVVGWPPIRSFRKNTMMAYNLAKCDNEAEEKSGVGCLYVKVSMDGAPYLRKVDLKTYSNYIELSSALEKMFSCFTIGQCNSRALPGKDGLSESAFRDLVDGSEYVLTYEDKEGDWMLVGDVPWKMFTESCKKLRIMKGSEAIGLAPRGMEKFRSQY

SEQ ID NO: 55370 - protein, 305 aa, Glycine max
  peptide (1)..(305): Ceres Seq. ID no. 15227216
MEKSCDKISSSVSSNLSSEDENTTSSLNFKETELRLGLPGCDSPENNNKSGVSLFGKDLQKKNNGYSSASSTPSNKNLKRGFPDAISSSSSSSGKWIFSASDAATEADLESGSNISGGCNKEVGMVPHYEKPAQVAATNEHAPAPAPKAQVVGWPPIRSFRKNTMMAYNLAKCDNEAEEKSGVGCLYVKVSMDGAPYLRKVDLKTYSNYIELSSALEKMFSCFTIGQCNSRALPGKDGLSESAFRDLVDGSEYVLTYEDKEGDWMLVGDVPWKMFTESCKKLRIMKGSEAIGLAPRGMEKFRSQY

SEQ ID NO: 55371 - protein, 181 aa, Glycine max
  peptide (1)..(181): Ceres Seq. ID no. 15227217
MVPHYEKPAQVAATNEHAPAPAPKAQVVGWPPIRSFRKNTMMAYNLAKCDNEAEEKSGVGCLYVKVSMDGAPYLRKVDLKTYSNYIELSSALEKMFSCFTIGQCNSRALPGKDGLSESAFRDLVDGSEYVLTYEDKEGDWMLVGDVPWKMFTESCKKLRIMKGSEAIGLAPRGMEKFRSQY

SEQ ID NO: 55372 - DNA, 1813 bp, Glycine max
  misc_feature (1)..(1813): Ceres Seq. ID no. 14308747
ggctcgttcgtttacctcaaacctcaaagaaaaaaaaaaacattgagttatcacttgttttcttttttgggaagacaaaaacattgagttcagcttctcacttccatggctgaggccagactctacgctcccccctctcaattggatattaagcaaattattttagaagcacagcatcgatggctacgtccggctgaaatttgtgcaattctcggtaattataagaagtttcgaattgctccagaacctgcacatatgccaccaagtggttcacttttcttatttgatcggaaggtgctgagacacttcagaaaggatggccataactggaggaagaaaaaagatggaaaaacagtgagagaagctcatgagagactaaaggctggaagtgtggatgtgttgcattgctactatgcccatggagaagaaaatgaaaattttcaaagacgcacgtattggttgcttgaagaggaactctctcacattgttctcgtccattatcgacaagtgaagggaaccaaggcgaattttacaagtgctaaagaaaatgaagaatctcttccttatgctcaacaaactgataaaattatgccccaaacagagatggacacttctttatcatctactcttcatccacatagttaccaggttccttcaaaaactgtcgatacaagcatgaacagtgcccaaacatcagaatatgaagaagctgaatctggtatttcttttgtgcgcattaataatttaaaatgttctgttttcaatttttcatatctagagggcattctgagtagcctttttgttgactttgttcttcgtatcactttcttgtgtgtatttaaattttttaactgtgtaatttttacagcattcaataaccatgcaagttctgagttttattctttcctcgagttacaacgccctgttgagaagatttcacctcaacctgctgatttttattctcctcggccactcataagtaaatttcttcattttaaattgtttttgagtttaactttgatgcattgtcagtttgtcactgtaaatttacattaccactctgtcatacattgtcgtatcattaaatgagtatgacttttttgaactaattttaagaatcaaacctttttaaatgttgtgacagtgcatgattgcatgatagtgtaaaaaactttacactaatattgcatcaaaaatcaaataccttgttatatatcttccatacatactggccttaatcaggaaagtctgtacctaacatgaatcatattattgaaactgggacagatgatcaagagaagttacctattattcctggggtgaattatatctcactcactcaagacaataaaaacaaagacattcttaatgctggattgacatatgaatccccaaaaccccttggcttttcctcatgggaaggtatcttagaaaataatgctggaagtcaacatgtgcattttcagcctttatttcctggaacacagcctgataacatgggaatcaatagcaatttttctcaaggagaagagataatggtgccatatttgaccaccagcattgctaagcagcatgagaatggaagtatcattaaagctgaaggaaattggcaggtttatgatgttgattctttacgcatgtccagttggcctatagatagtgcttattcaggctcaacatgtgaggtaagttgtagcaactgtgagcaggaagttaatgatgttgattttcagaaatccttggaacagtgtcttctacattcacacaaacaaaacaaggttctcatgcaaaatgatcttcaagaaaaactttt

SEQ ID NO: 55373 - protein, 327 aa, Glycine max
  peptide (1)..(327): Ceres Seq. ID no. 14308748
MAEARLYAPPSQLDIKQIILEAQHRWLRPAEICAILGNYKKFRIAPEPAHMPPSGSLFLFDRKVLRHFRKDGHNWRKKKDGKTVREAHERLKAGSVDVLHCYYAHGEENENFQRRTYWLLEEELSHIVLVHYRQVKGTKANFTSAKENEESLPYAQQTDKIMPQTEMDTSLSSTLHPHSYQVPSKTVDTSMNSAQTSEYEEAESGISFVRINNLKCSVFNFSYLEGILSSLFVDFVLRITFLCVFKFFNCVIFTAFNNHASSEFYSFLELQRPVEKISPQPADFYSPRPLISKFLHFKLFLSLTLMHCQFVTVNLHYHSVIHCRIIK

SEQ ID NO: 55374 - protein, 277 aa, Glycine max
  peptide (1)..(277): Ceres Seq. ID no. 14308749
MPPSGSLFLFDRKVLRHFRKDGHNWRKKKDGKTVREAHERLKAGSVDVLHCYYAHGEENENFQRRTYWLLEEELSHIVLVHYRQVKGTKANFTSAKENEESLPYAQQTDKIMPQTEMDTSLSSTLHPHSYQVPSKTVDTSMNSAQTSEYEEAESGISFVRINNLKCSVFNFSYLEGILSSLFVDFVLRITFLCVFKFFNCVIFTAFNNHASSEFYSFLELQRPVEKISPQPADFYSPRPLISKFLHFKLFLSLTLMHCQFVTVNLHYHSVIHCRIIK

SEQ ID NO: 55375 - protein, 184 aa, Glycine max
  peptide (1)..(184): Ceres Seq. ID no. 14308750
MNHIIETGTDDQEKLPIIPGVNYISLTQDNKNKDILNAGLTYESPKPLGFSSWEGILENNAGSQHVHFQPLFPGTQPDNMGINSNFSQGEEIMVPYLTTSIAKQHENGSIIKAEGNWQVYDVDSLRMSSWPIDSAYSGSTCEVSCSNCEQEVNDVDFQKSLEQCLLHSHKQNKVLMQNDLQEKL

SEQ ID NO: 55376 - DNA, 1240 bp, Glycine max
  misc_feature (1)..(1240): Ceres Seq. ID no. 14308709
tttcaattttgttttgcacactactatcaattattgggaggtaagggctagaaaacaagttgtatcaattccaattgtggacaccattatacatacatcaaattttgcatgtcacgtgtattcacagtttgaccttagtattcaattattgggaggggaggaaaggaaaacaaagttatttcaattccaattgttgacactactatacatataatttcacatttcatatttgtttatgaatttaatggtgatatgctaacaatataaaatagttttacactttcatccaatcatagatcaccatctacatgacttctacgatagttttgtaaaaatcaacaaacttattacaaattatagattataaatggatgacaatgtaaattagttttacacttttacattgtcaatacatatctttttctctcttcatttattgacattaattttcaattaaatttgcagtttttacctggggcatgtttgatatccaatgatggcacaaagaagatgtgtggtgatgatcatagggcatggtacactagggggtgtcctagcaaatatggttgggctgctctaataggccttgctctttacatcatattcttctcacctggcatgggaactgttccatgggttgtgaactcagagatctatcccttgaggtacagaggggtttgtggaggaatagcatccacaactgtttggatttccaacctcattgtttctgagtccttcttgtccctcacaaaagctctagggacagcatggacattcatgatgtttggaattgtggccattgtggcaatcttctttgtcattatttttgtgcctgagaccaaaggggttcctatggaggaagtggagaagatgctagaacaaagatctgtgcagttcaagttttgggagaagagagattctggctctgagaagcattgactcaaagaacaaaaaaaaaagcaaaattgtttgagtcatttttattagttttatagcttaaaatagtgaaattaagtggcttgtgaagttatggttatttgatgacaatgattgttctctctgggtaagatttggtgatagttagcattttagctctaatgtgtatgtagttgtctagatgattagttggattgatgaaaatccttatgaaattccttagaggattggaatatgagaattggtaataagctcttatttgtgatataatgaagaaaaaaagtgtatcaagaatttgatcttt

SEQ ID NO: 55377 - protein, 142 aa, Glycine max
  peptide (1)..(142): Ceres Seq. ID no. 14308710
MCGDDHRAWYTRGCPSKYGWAALIGLALYIIFFSPGMGTVPWVVNSEIYPLRYRGVCGGIASTTVWISNLIVSESFLSLTKALGTAWTFMMFGIVAIVAIFFVIIFVPETKGVPMEEVEKMLEQRSVQFKFWEKRDSGSEKH

SEQ ID NO: 55378 - protein, 106 aa, Glycine max
  peptide (1)..(106): Ceres Seq. ID no. 14308711
MGTVPWVVNSEIYPLRYRGVCGGIASTTVWISNLIVSESFLSLTKALGTAWTFMMFGIVAIVAIFFVIIFVPETKGVPMEEVEKMLEQRSVQFKFWEKRDSGSEKH

SEQ ID NO: 55379 - DNA, 1160 bp, Glycine max
  misc_feature (1)..(1160): Ceres Seq. ID no. 14310592
aaacgtgtttcatgaaatatctaacttttaaagagctcaatgtgtacaaactcattgtgagcggatgcaacgttaaataagagcatgaatagactcatgtctacacatctaactagagtagaagccaagacgcactgttctacaaattaaagaaaagactcctttatggataatatttatatcaaacaagcgttggtattgaaggaagttaagcatgtattccaaaagcttattggcgaggatcccatggagagtatgtatatggttgacactatccaaaggcttggcattgaacaccacttcgaagaggaaattgaagctgctcttcagaagcaacatttgatatttagcagtcatctcagtgattttgcgaataaccataaactttgtgaagttgcacttccattccgtttacttagacaaagaggccattatgttcttgcagatgtatttgacaacctgaagagtaacaaaaaagagtttagagaaaaacacggtgaagatgtgaagggtcttatttctctgtatgaggcaacccagctaggtattgaaggagaagacagtcttgatgatgcaggttacctctgccaccaacttcttcatgcatggctgacaagacatgaagagcataatgaagctatgtatgttgctaagactcttcagcatccgcttcattatgacttatcaagattcagggacgacacaagtatacttctaaatgatttcaagaccaagagagaatgggaatgcttagaggaacttgctgaaatcaattccagcatagttaggttcgtgaaccagaatgaaataactcaagtttacaaatggtggaaagaccttgggctgaacaatgaggtgaagttcgctagatatcaacctcttaaatggtacatgtggccaatggcatgcttcacagatccacgcttctcagagcaaaggattgagctcaccaaacctatctctctggtctacattattgatgacattttcgatgtttatgggacattagaccagcttactttatttacagatgctattaaaaggtattcaaatatatatatttctagtgtgtgcggcagacaatcaatagaattagcgatgccaacctagttagaatctttactcctattgtgatgcttaatcatgcaccttttacttac

SEQ ID NO: 55380 - protein, 314 aa, Glycine max
  peptide (1)..(314): Ceres Seq. ID no. 14310593
MDNIYIKQALVLKEVKHVFQKLIGEDPMESMYMVDTIQRLGIEHHFEEEIEAALQKQHLIFSSHLSDFANNHKLCEVALPFRLLRQRGHYVLADVFDNLKSNKKEFREKHGEDVKGLISLYEATQLGIEGEDSLDDAGYLCHQLLHAWLTRHEEHNEAMYVAKTLQHPLHYDLSRFRDDTSILLNDFKTKREWECLEELAEINSSIVRFVNQNEITQVYKWWKDLGLNNEVKFARYQPLKWYMWPMACFTDPRFSEQRIELTKPISLVYIIDDIFDVYGTLDQLTLFTDAIKRYSNIYISSVCGRQSIELAMPT

SEQ ID NO: 55381 - protein, 287 aa, Glycine max
  peptide (1)..(287): Ceres Seq. ID no. 14310594
MESMYMVDTIQRLGIEHHFEEEIEAALQKQHLIFSSHLSDFANNHKLCEVALPFRLLRQRGHYVLADVFDNLKSNKKEFREKHGEDVKGLISLYEATQLGIEGEDSLDDAGYLCHQLLHAWLTRHEEHNEAMYVAKTLQHPLHYDLSRFRDDTSILLNDFKTKREWECLEELAEINSSIVRFVNQNEITQVYKWWKDLGLNNEVKFARYQPLKWYMWPMACFTDPRFSEQRIELTKPISLVYIIDDIFDVYGTLDQLTLFTDAIKRYSNIYISSVCGRQSIELAMPT

SEQ ID NO: 55382 - protein, 284 aa, Glycine max
  peptide (1)..(284): Ceres Seq. ID no. 14310595
MYMVDTIQRLGIEHHFEEEIEAALQKQHLIFSSHLSDFANNHKLCEVALPFRLLRQRGHYVLADVFDNLKSNKKEFREKHGEDVKGLISLYEATQLGIEGEDSLDDAGYLCHQLLHAWLTRHEEHNEAMYVAKTLQHPLHYDLSRFRDDTSILLNDFKTKREWECLEELAEINSSIVRFVNQNEITQVYKWWKDLGLNNEVKFARYQPLKWYMWPMACFTDPRFSEQRIELTKPISLVYIIDDIFDVYGTLDQLTLFTDAIKRYSNIYISSVCGRQSIELAMPT

SEQ ID NO: 55383 - DNA, 1275 bp, Glycine max
  misc_feature (1)..(1275): Ceres Seq. ID no. 15170220
gattccatgcacattaatttattaattatatatgtaactctctccatcgatcagaattcattcagagaagtgagagttaaagatggaagggatagagcaccaaacactgaacgtgaatggcataaacatgcacatagccgagaagggtgaaggcccattgatcctcttcatccatggcttccccgacctatggtactcctggcgccaccagatcacagctcttgcctccctaggttaccgctgcgtggcgccggaccttcgtgggtacggcgacactgacgtgccggccaaccccacagcctacaccagcctccacgtcgtcggcgacctcgttgggcttctcgacgcgatcgtcggcgacgaggagaaggtgtttgtggtgggtcatgactggggtgcaatgactgcatggtctctttccctctatcgccccgaacgaatcagggctcttgttaacttgagcgttgttttcactccccgaaaccccaagagaaaaccccttgacactttaagagcagtgtacggaaatgactactatatctgcagatttcaggagcctggggaaatagaagctgagtttgcacagatcggcactgcaagagttctgaaggaattcctgacataccgcaaccctggtccactttatctaccaaagggtaaagcgtttgcacatccaactgattctcccatagcgttgccctcatggctatctgaagaagaatgtgactactatgccagtaaatatgacaagactggcttcacagggggattgaactactacagaaatttggatctaaattgggagctgacagcatcgtggactggtgctcaagtgaaagttccagttaagtttatagtgggtgatctagacctgacctataatgcaccaggagccaaggaatacattcacaaaggtgggttcaagagagatgtgccgcttctggaggatgtggttgttcttgaaggggctggtcactttctccatcaagaaaggcctgatgaaatcagcaaccacatttacgatttctttaagaaattctgatatgcctatgctcatgttggatgtgtctccctttgttcttggtttcattgaacggccttgttcttgctggctgagtggctgggtctgtattctcatagtggatgtgcatgcgtccatcgaaaactcttgctgagtgtgttttctcagtgtctgctcgtgtttttatataaataaatgtaaaaagtgtgtaaaaatcgttttacaaatttatcgtaaaaataacattactaaag

SEQ ID NO: 55384 - protein, 319 aa, Glycine max
  peptide (1)..(319): Ceres Seq. ID no. 15170221
MEGIEHQTLNVNGINMHIAEKGEGPLILFIHGFPDLWYSWRHQITALASLGYRCVAPDLRGYGDTDVPANPTAYTSLHVVGDLVGLLDAIVGDEEKVFVVGHDWGAMTAWSLSLYRPERIRALVNLSVVFTPRNPKRKPLDTLRAVYGNDYYICRFQEPGEIEAEFAQIGTARVLKEFLTYRNPGPLYLPKGKAFAHPTDSPIALPSWLSEEECDYYASKYDKTGFTGGLNYYRNLDLNWELTASWTGAQVKVPVKFIVGDLDLTYNAPGAKEYIHKGGFKRDVPLLEDVVVLEGAGHFLHQERPDEISNHIYDFFKKF

SEQ ID NO: 55385 - protein, 304 aa, Glycine max
  peptide (1)..(304): Ceres Seq. ID no. 15170222
MHIAEKGEGPLILFIHGFPDLWYSWRHQITALASLGYRCVAPDLRGYGDTDVPANPTAYTSLHVVGDLVGLLDAIVGDEEKVFVVGHDWGAMTAWSLSLYRPERIRALVNLSVVFTPRNPKRKPLDTLRAVYGNDYYICRFQEPGEIEAEFAQIGTARVLKEFLTYRNPGPLYLPKGKAFAHPTDSPIALPSWLSEEECDYYASKYDKTGFTGGLNYYRNLDLNWELTASWTGAQVKVPVKFIVGDLDLTYNAPGAKEYIHKGGFKRDVPLLEDVVVLEGAGHFLHQERPDEISNHIYDFFKKF

SEQ ID NO: 55386 - protein, 213 aa, Glycine max
  peptide (1)..(213): Ceres Seq. ID no. 15170223
MTAWSLSLYRPERIRALVNLSVVFTPRNPKRKPLDTLRAVYGNDYYICRFQEPGEIEAEFAQIGTARVLKEFLTYRNPGPLYLPKGKAFAHPTDSPIALPSWLSEEECDYYASKYDKTGFTGGLNYYRNLDLNWELTASWTGAQVKVPVKFIVGDLDLTYNAPGAKEYIHKGGFKRDVPLLEDVVVLEGAGHFLHQERPDEISNHIYDFFKKF

SEQ ID NO: 55387 - DNA, 1550 bp, Glycine max
  misc_feature (1)..(1550): Ceres Seq. ID no. 15170509
tgatagaagacatggataaagaaattgttcgaagagaatcagcgacagagcctgcggaacagagcaggttatggtcccgtgaggatataaagaaagttttacaagaaaataagaggctcgtgaatttgacaagtttaattttggacgagtgtgatagtttaacagagatatcagatgtatcttgtctctcaaatttggaaattttgtcatttagagagcgtcggaatttatttagaattcaccattcagttggtttattggaaaagcttaaaatcttggatgctgaaggttgcccagagcttaagagttttccaccgttgaagttgacctctcttgaaagccttgatctttcgtattgttccaatctcgagagttttcctgaaatattaggaaagatggaaaatataacacgacttcacttgattggattttccataagaaaactcccaccttcatttcgaaatcttactcggcttaaagtgttatatgtgggaaccgaaactactccgttaatggactttgatgttgccaccctcatttcgaacatctgcatgatgtcagaactgtttgaaattgcagcaaacagtttgcaatggaggctatggcctgacgatgcttgtttgcaatggaggctatggcctgacgattttttgaaattgacctctcttctgaattcaagcattgaatttctttgtcacggcgacctgtcagatgagcttcttcggctatttctgtcatgttttgtaaatgtgataaatttagagctaaaagggagtaaattaacagttattcccgaatgcatcaaagaatgccgctttttatctacccctaaattgaatggttgcgatcgtcttcaagaaattagagggattcctccaaacttgaaaagattctctgcaatagcatgcccagacttgacttcctcaagcataagcatgttgctgaatcaggaactgcacgaggctggagacacctactttagtttgccaatagtaaagattccagagtggtttgagtgccagagtcgggaaccgtcaatttttttctggttccgtaacgaattcccagccataactgtttgcattgttgagtcacattttaaggaatattccaatgatctggttctcagcgtgatcattaataagaaacataaacataaacaaagagaaatattcgattcagtgatcctgatcctgatccttttagaaagagaaaaatttgtagttcagaggttggggttggggaaaaagcaaagattagtaggcagtgaagttgttgagacacaatttgtagagcagcaacaacatatgggtttttttctcacacgtgtagaactgggcactatcacttgtaatgtctcgctgctccggcaatcaataattggatgaaagagagaattcaagttcagcagtacgtggcatggtatcaacgctgacaaaagacaacactgtaagtagccctactgattcttgttgtctagtcaagtttggttttagatattctattttgttttggattcaataaaaatagatcgagcatttcaatctctt

SEQ ID NO: 55388 - protein, 461 aa, Glycine max
  peptide (1)..(461): Ceres Seq. ID no. 15170510
IEDMDKEIVRRESATEPAEQSRLWSREDIKKVLQENKRLVNLTSLILDECDSLTEISDVSCLSNLEILSFRERRNLFRIHHSVGLLEKLKILDAEGCPELKSFPPLKLTSLESLDLSYCSNLESFPEILGKMENITRLHLIGFSIRKLPPSFRNLTRLKVLYVGTETTPLMDFDVATLISNICMMSELFEIAANSLQWRLWPDDACLQWRLWPDDFLKLTSLLNSSIEFLCHGDLSDELLRLFLSCFVNVINLELKGSKLTVIPECIKECRFLSTPKLNGCDRLQEIRGIPPNLKRFSAIACPDLTSSSISMLLNQELHEAGDTYFSLPIVKIPEWFECQSREPSIFFWFRNEFPAITVCIVESHFKEYSNDLVLSVIINKKHKHKQREIFDSVILILILLEREKFVVQRLGLGKKQRLVGSEVVETQFVEQQQHMGFFLTRVELGTITCNVSLLRQSIIG

SEQ ID NO: 55389 - protein, 458 aa, Glycine max
  peptide (1)..(458): Ceres Seq. ID no. 15170511
MDKEIVRRESATEPAEQSRLWSREDIKKVLQENKRLVNLTSLILDECDSLTEISDVSCLSNLEILSFRERRNLFRIHHSVGLLEKLKILDAEGCPELKSFPPLKLTSLESLDLSYCSNLESFPEILGKMENITRLHLIGFSIRKLPPSFRNLTRLKVLYVGTETTPLMDFDVATLISNICMMSELFEIAANSLQWRLWPDDACLQWRLWPDDFLKLTSLLNSSIEFLCHGDLSDELLRLFLSCFVNVINLELKGSKLTVIPECIKECRFLSTPKLNGCDRLQEIRGIPPNLKRFSAIACPDLTSSSISMLLNQELHEAGDTYFSLPIVKIPEWFECQSREPSIFFWFRNEFPAITVCIVESHFKEYSNDLVLSVIINKKHKHKQREIFDSVILILILLEREKFVVQRLGLGKKQRLVGSEVVETQFVEQQQHMGFFLTRVELGTITCNVSLLRQSIIG

SEQ ID NO: 55390 - protein, 330 aa, Glycine max
  peptide (1)..(330): Ceres Seq. ID no. 15170512
MENITRLHLIGFSIRKLPPSFRNLTRLKVLYVGTETTPLMDFDVATLISNICMMSELFEIAANSLQWRLWPDDACLQWRLWPDDFLKLTSLLNSSIEFLCHGDLSDELLRLFLSCFVNVINLELKGSKLTVIPECIKECRFLSTPKLNGCDRLQEIRGIPPNLKRFSAIACPDLTSSSISMLLNQELHEAGDTYFSLPIVKIPEWFECQSREPSIFFWFRNEFPAITVCIVESHFKEYSNDLVLSVIINKKHKHKQREIFDSVILILILLEREKFVVQRLGLGKKQRLVGSEVVETQFVEQQQHMGFFLTRVELGTITCNVSLLRQSIIG

SEQ ID NO: 55391 - DNA, 1381 bp, Glycine max
  misc_feature (1)..(1381): Ceres Seq. ID no. 15171016
aaatgtcttaaggttcagggtttacaaaacgaaaaggcatatttttgtttttctttcatcttatacacggcaaaatttattcagaagtttcatttataaacctctatatgttctgcccctgcttgttgctggatttacttggttgtgttaaattctttgtttttagtattttgatatttagacacatgtaattgctggttctatagcctctggcaaaacccagtcgaagtgtattgcctttgtttttatcccccctcctttggtggaccgttgcctaaattgtgagcctagctttggatgtccaaggtgttttctatttcattgatcattaaatgtttatgtatttgttttatgcagtaatttgtttacaaattccaactggtttgccttccaagatgacagaattggtgatgcacctgggggcacatcatcctctgagatgatggatgagataaaattgaatgcagttgcaaatagtggtagcaacagtagtgatgatgaggtagtggttggagaggatgaagaattggctgacagcaaaaatactgtgaatggtacatctagcttaagtgcagacttctttagtggattgactgccagtgattccatgaatgggggcactttaaactttgaaagtgagaagacaagtccttcaaatgatatgggattcttcaggtttgaggcaccagacaacgaggacttgtttggagataggcctttacctgattgggttggatggggtgaaccatcagaaatgcaagatgctggctcaagtatgaacccctttctggataatgacgagtctggtaggcctcaagtaggcagccctaatcttagttctccttcaaatggggaatccgtaccttcaaatgggttgccaactactagcgattctatcaatgggaacagtgactcaagtccaacatctgtagcggtaccctcgctatttgaagaggatgtggaatttgtaggtgtagaattagaaggtacagagaaggcaatggaccaggctctcaaagaagggatagttggggaagcaggaccattgaaaagaaacgtagtctcaaaagttccagataaggaaaattctgaagaaggcagtcctggtgtgaaggagttcaacgatgcaaattactggagggttgacaacgaggttgctgttctagagtgatggacaaattggtaaatcttgcttccattgtttgtctgtatgaaaatttggatcaacgccaaggttatgcaacaaattagtgtacagtatttttgtttccattatgttctgtttctgttgtttcatcattgttagatattaaggttgtttattaatttgaagttttgcctctacctgcaagagacttaaagggaattcccacatttattg

SEQ ID NO: 55392 - protein, 243 aa, Glycine max
  peptide (1)..(243): Ceres Seq. ID no. 15171017
MMDEIKLNAVANSGSNSSDDEVVVGEDEELADSKNTVNGTSSLSADFFSGLTASDSMNGGTLNFESEKTSPSNDMGFFRFEAPDNEDLFGDRPLPDWVGWGEPSEMQDAGSSMNPFLDNDESGRPQVGSPNLSSPSNGESVPSNGLPTTSDSINGNSDSSPTSVAVPSLFEEDVEFVGVELEGTEKAMDQALKEGIVGEAGPLKRNVVSKVPDKENSEEGSPGVKEFNDANYWRVDNEVAVLE

SEQ ID NO: 55393 - protein, 242 aa, Glycine max
  peptide (1)..(242): Ceres Seq. ID no. 15171018
MDEIKLNAVANSGSNSSDDEVVVGEDEELADSKNTVNGTSSLSADFFSGLTASDSMNGGTLNFESEKTSPSNDMGFFRFEAPDNEDLFGDRPLPDWVGWGEPSEMQDAGSSMNPFLDNDESGRPQVGSPNLSSPSNGESVPSNGLPTTSDSINGNSDSSPTSVAVPSLFEEDVEFVGVELEGTEKAMDQALKEGIVGEAGPLKRNVVSKVPDKENSEEGSPGVKEFNDANYWRVDNEVAVLE

SEQ ID NO: 55394 - protein, 187 aa, Glycine max
  peptide (1)..(187): Ceres Seq. ID no. 15171019
MNGGTLNFESEKTSPSNDMGFFRFEAPDNEDLFGDRPLPDWVGWGEPSEMQDAGSSMNPFLDNDESGRPQVGSPNLSSPSNGESVPSNGLPTTSDSINGNSDSSPTSVAVPSLFEEDVEFVGVELEGTEKAMDQALKEGIVGEAGPLKRNVVSKVPDKENSEEGSPGVKEFNDANYWRVDNEVAVLE

SEQ ID NO: 55395 - DNA, 488 bp, Glycine max
  misc_feature (1)..(488): Ceres Seq. ID no. 15169930
atgggcgagatattgaaagctagtggtgctagctattcttcagttgtgaagacaacgatcatgttggctgatctgcaggatttcaataaagtaaacgagatctatggcaaatatttcccggcgccagcacctgcacgatcaacctaccaagtggcggcgctgccactgaatgcccggattgagattgagtgcatcgctgctctctaatcagatcatccaaccactcattaaatcatcaataagcacccaggaatttgtggtagaggtacctgtaccagttcagtgtctgaaaactgcgggtaacaaacctttgtgtcccggataagtgatgtgtgtgtgtgtgtgtgtgagtgaacagtgcatctagtaggagaattgttgcgtggtttgttacttggattcttcgctctttagacaagaagtaccatggcatcaacatcaatagcctactgttttcttcccaataagaatgaattggcttccccaac

SEQ ID NO: 55396 - protein, 68 aa, Glycine max
  peptide (1)..(68): Ceres Seq. ID no. 15169931
MGEILKASGASYSSVVKTTIMLADLQDFNKVNEIYGKYFPAPAPARSTYQVAALPLNARIEIECIAAL

SEQ ID NO: 55397 - protein, 51 aa, Glycine max
  peptide (1)..(51): Ceres Seq. ID no. 15169932
MPGLRLSASLLSNQIIQPLIKSSISTQEFVVEVPVPVQCLKTAGNKPLCPG

SEQ ID NO: 55398 - protein, 48 aa, Glycine max
  peptide (1)..(48): Ceres Seq. ID no. 15169933
MLADLQDFNKVNEIYGKYFPAPAPARSTYQVAALPLNARIEIECIAAL

SEQ ID NO: 55399 - DNA, 2232 bp, Glycine max
  misc_feature (1)..(2232): Ceres Seq. ID no. 14308370
tttttttttacaacgcttgactgcaattggataaatatttttgatgttgtagaattaaaattagagtttcatctcctaatttatactgcaatgcaaagtcaaattttggagtaaacactaggttgtagttttttgttttcttaacaaatctttattgtgtgaaataccaaaactccaattcaaacaacaaaatgataccaaaaacatttcaggaattgcatgtacttttttcgttttcaatttaaaaaattaaaaaatgctttaattattaatatctctttgatttcttagagggatttggttgcatggtcagtggattactaatatgatttaacgaaggatagttctttgtaaattcttgatgcctgccccgtgtgttagtttactttctgatgtagaagaagattatgattagcagaacaacattgaaaattttgacttaaagaaagtagaggaacaagcagcagagttggagaaggatttgattgtcaaggaacttgaaacgcttgacgtgcttgaagaattaggagctaccaagaggattgtggaggacttgaagcagcagttacaaaaggaggctatgaaatgtttagcaactcgagatgtaaattcatatgaagaagctggaactcctgttattaaggagaaggatgaggaaaattgtggaaatattgtcaatgatgaagaacaggtgatgcaaattccaagcccatgctctatgtcatcatcacctgatatgatcttaatggagttgaaaaaagccaaattgaatctaggcaaaactataaatgaacttggggtgatacaatcctcgattgaatctttgaataagaagatgaagaaggagaaaaattttctggagaggacacgtgaaaagctagcatcaaagtttgcagcagaatctgctcaagagagggtccaagagcaaacaagattgaatccaccggcccctcatgtagagttcacctttggtaaccctgcaaataatttcaattctgattctgggcagtgcaatggaatggcagagacaagaagacctgaaccttcaaagcccttaagtgtatatgaagaatatggatttagtgttaaaactgctgagataaggtggcttgcggctaaaaagatggaagaagctgcaagggcagcagaagctattgctcttgctgaaatcaaggctctatctaatgcccagagatctttaggatttgttctgccagaacctgagaaagtcacttttgcttttggagagcgctctcccctaaaccccaaggctcagatacccaaggagtcaaccttgaagaaggtaatagattccaagtttcaaattgatgaaacaaaaatttctaagctgacaattttgaagaagttggaggaagcagctgaagaagttctacacagcaaacaagtcttgacagatgctttaaacagaattgaaactgcaaacagaaagcaacatgctgctaaggaggctctaaggagatggattccagaggatgatatgaaggagtatagcactattaattgcaacaagtttaatcaaactggaatttatcaagattctctgcaggatgtaaccaggtcaacaacagcaaacaatgatccaaagcctgctttaaggcccacaatttcaatgagagatgtacttagcagaaagcaggttcctgaaggatatgctacaagaaaggagatggaagagcacactgaacggcaaaaggtagcgttgagtcaaatgcttcaagcattgagggaagatctaactcttccaccaaagactgagaaagatgggaacaatcagaagccgtacgtagcacagaggaagaaatttggattcattcaaatatcactccccttggcaaagccaaataagaaaaggggatgaaatttcgatcctcaatccctatgcatggatgaatagccactacccatgcatctttatgttttcccatgccattctttattggttcatgtgttcacactttcatttgtttatgtagaagtttgagtgggtgtttgattctgtaaaatatatgttgtgcttgagtgattggcttataattctgtagctagctttaatggagctagtagattatgttgctattgttggatgcattggagtgatgaggaatttatccatagggtaggaaggtttttatcattggattgataatcttattgttagaagtatgatctatcatgtggttgtaccaatatataaaattatatttgttgatt

SEQ ID NO: 55400 - protein, 432 aa, Glycine max
  peptide (1)..(432): Ceres Seq. ID no. 14308371
MKCLATRDVNSYEEAGTPVIKEKDEENCGNIVNDEEQVMQIPSPCSMSSSPDMILMELKKAKLNLGKTINELGVIQSSIESLNKKMKKEKNFLERTREKLASKFAAESAQERVQEQTRLNPPAPHVEFTFGNPANNFNSDSGQCNGMAETRRPEPSKPLSVYEEYGFSVKTAEIRWLAAKKMEEAARAAEAIALAEIKALSNAQRSLGFVLPEPEKVTFAFGERSPLNPKAQIPKESTLKKVIDSKFQIDETKISKLTILKKLEEAAEEVLHSKQVLTDALNRIETANRKQHAAKEALRRWIPEDDMKEYSTINCNKFNQTGIYQDSLQDVTRSTTANNDPKPALRPTISMRDVLSRKQVPEGYATRKEMEEHTERQKVALSQMLQALREDLTLPPKTEKDGNNQKPYVAQRKKFGFIQISLPLAKPNKKRG

SEQ ID NO: 55401 - protein, 394 aa, Glycine max
  peptide (1)..(394): Ceres Seq. ID no. 14308372
MQIPSPCSMSSSPDMILMELKKAKLNLGKTINELGVIQSSIESLNKKMKKEKNFLERTREKLASKFAAESAQERVQEQTRLNPPAPHVEFTFGNPANNFNSDSGQCNGMAETRRPEPSKPLSVYEEYGFSVKTAEIRWLAAKKMEEAARAAEAIALAEIKALSNAQRSLGFVLPEPEKVTFAFGERSPLNPKAQIPKESTLKKVIDSKFQIDETKISKLTILKKLEEAAEEVLHSKQVLTDALNRIETANRKQHAAKEALRRWIPEDDMKEYSTINCNKFNQTGIYQDSLQDVTRSTTANNDPKPALRPTISMRDVLSRKQVPEGYATRKEMEEHTERQKVALSQMLQALREDLTLPPKTEKDGNNQKPYVAQRKKFGFIQISLPLAKPNKKRG

SEQ ID NO: 55402 - protein, 386 aa, Glycine max
  peptide (1)..(386): Ceres Seq. ID no. 14308373
MSSSPDMILMELKKAKLNLGKTINELGVIQSSIESLNKKMKKEKNFLERTREKLASKFAAESAQERVQEQTRLNPPAPHVEFTFGNPANNFNSDSGQCNGMAETRRPEPSKPLSVYEEYGFSVKTAEIRWLAAKKMEEAARAAEAIALAEIKALSNAQRSLGFVLPEPEKVTFAFGERSPLNPKAQIPKESTLKKVIDSKFQIDETKISKLTILKKLEEAAEEVLHSKQVLTDALNRIETANRKQHAAKEALRRWIPEDDMKEYSTINCNKFNQTGIYQDSLQDVTRSTTANNDPKPALRPTISMRDVLSRKQVPEGYATRKEMEEHTERQKVALSQMLQALREDLTLPPKTEKDGNNQKPYVAQRKKFGFIQISLPLAKPNKKRG

SEQ ID NO: 55403 - DNA, 1245 bp, Glycine max
  misc_feature (1)..(1245): Ceres Seq. ID no. 14308278
gaagcaaacaagagcatatggatctgtggagcctaaatgcctaaaccatgctgctcaatgcacaagcattactataagacaaacctcgccaaccccggaccggacgccaaccggtccaaccaaacatcacaccggttcgaaccggccttttccttccttatatcaatcactctcctacatccccccacttcatcaagctccaattatcaactctttcaaaagggagaagaaaaggaaaggaaacaaaacgcacaaaggattattatagcaatggcagaacaaaaccaaaaccagacaactgaagctggaaggcaccaagaggttggccacaagagccttctccagagtgatgctctttaccagtatattctggagaccagtgtctacccaagagaacctgaatccatgaaagaactgagagagttgacagcaaaacacccatggaacatcatgacaacctctgcagacgaagggcaattcttgaacatgctccttaagctcatcaatgccaagaacaccatggaaattggtgtctacactggatattcacttcttgccaccgctctcgctcttcctgaagatggaaagatcttggccatggatattaacagggagaattatgaattgggtttgccagtaattaagaaagctggtgttgaccacaaaattgaattcagagaaggtcctgctctcccagttcttgatgaaatggttaaagatgagaagaaccatgggagctatgacttcatctttgtggacgcagacaaggacaactacctcaactaccacaagaggttgatagagcttgtcaaagttgggggagtgatcgggtacgacaacaccctatggaacggctctgtggtggcacccccagatgctcctctcaggaagtacgttagatactacagggacttcgtgctcgagctcaacaaggcactcgctgtggaccccaggatcgagatttgcatgctcccggttggtgatggaatcactatatgccgtcggatcaagtgattctgattttctgataatcacacaatcgtggaccaagaccaccgttgcttcttctgcaccctagtgatgattggtcatcattgagtggcacctgctaatgcatttaaaagcaatcgatattttccttttatttttttttcttcaaaatatttgtgtttgtacttttcttttctctattattcatgtggaaaacggtggacaattaattatatgcaaatgactttttttctc

SEQ ID NO: 55404 - protein, 325 aa, Glycine max
  peptide (1)..(325): Ceres Seq. ID no. 14308279
MPKPCCSMHKHYYKTNLANPGPDANRSNQTSHRFEPAFSFLISITLLHPPTSSSSNYQLFQKGEEKERKQNAQRIIIAMAEQNQNQTTEAGRHQEVGHKSLLQSDALYQYILETSVYPREPESMKELRELTAKHPWNIMTTSADEGQFLNMLLKLINAKNTMEIGVYTGYSLLATALALPEDGKILAMDINRENYELGLPVIKKAGVDHKIEFREGPALPVLDEMVKDEKNHGSYDFIFVDADKDNYLNYHKRLIELVKVGGVIGYDNTLWNGSVVAPPDAPLRKYVRYYRDFVLELNKALAVDPRIEICMLPVGDGITICRRIK

SEQ ID NO: 55405 - protein, 318 aa, Glycine max
  peptide (1)..(318): Ceres Seq. ID no. 14308280
MHKHYYKTNLANPGPDANRSNQTSHRFEPAFSFLISITLLHPPTSSSSNYQLFQKGEEKERKQNAQRIIIAMAEQNQNQTTEAGRHQEVGHKSLLQSDALYQYILETSVYPREPESMKELRELTAKHPWNIMTTSADEGQFLNMLLKLINAKNTMEIGVYTGYSLLATALALPEDGKILAMDINRENYELGLPVIKKAGVDHKIEFREGPALPVLDEMVKDEKNHGSYDFIFVDADKDNYLNYHKRLIELVKVGGVIGYDNTLWNGSVVAPPDAPLRKYVRYYRDFVLELNKALAVDPRIEICMLPVGDGITICRRIK

SEQ ID NO: 55406 - protein, 247 aa, Glycine max
  peptide (1)..(247): Ceres Seq. ID no. 14308281
MAEQNQNQTTEAGRHQEVGHKSLLQSDALYQYILETSVYPREPESMKELRELTAKHPWNIMTTSADEGQFLNMLLKLINAKNTMEIGVYTGYSLLATALALPEDGKILAMDINRENYELGLPVIKKAGVDHKIEFREGPALPVLDEMVKDEKNHGSYDFIFVDADKDNYLNYHKRLIELVKVGGVIGYDNTLWNGSVVAPPDAPLRKYVRYYRDFVLELNKALAVDPRIEICMLPVGDGITICRRIK

SEQ ID NO: 55407 - DNA, 1159 bp, Glycine max
  misc_feature (1)..(1159): Ceres Seq. ID no. 14308351
tttgctatatctgattgcagcaagtaaaaatgagctcagcaagatgattgagctgcagaaagaaatggaaatgctccttcaaaatgcgaaaggggaactgcaaagtaaagattcacttcttaagccattgaaacaaagtgacacacttgccctttccataactgatattcaagaagtttccagctctagtagtcatctttctattcattcgaatatacaatatgttcaaccagagtcaaaaagcgatacggttcctaatcggtttctggaatataacactagcgaacaagatgaatgtgcagaagagataaatgagctccgggcagaatttgaaattgagttgcagcgcttgcagttgtatttggatggagaagctggatttgatgatgcacaacaagagggagtcaaggtaactcttgaggattctagttcaaaaagccatagttcaagttttggtgaaataataatggaacctcaaggagcaacttatgatgtatcttttggagttcctccaattgaattggagagaaggttgcatgaactgcttgaagcaagactggaagaacggatatcagagctggagtctgcattagaatgtaagacgcaaaagcttattaagaaagagatagaggttacttggtggaaagacactgcacaacttatctcacaacatgttccagaaacttctcggttcacttttccacttgatcctgatatttctttgaagttgagtcaacttgtaggatagtttttatgaaagagtgatgttgattaagccatcaaaatattgttatcagcagtacagtttcatgacctgttgtttcttgttcttcaaaattttggtttagtcctctggagtaaatagtggtttggaggatgattttaaatgagagaacagaaattgaagggagtcaaaattgttttccattgtagagcaatacacaagatgtgtaaaaactgaaaatgttggagtcttttgagatttattcttatgttaagattggagttgggtgactgtagtaagctactgcagtgaaatttgttggatgcaacaaaactcaagcatttgactccctgcagctatttatagacaatcgcatctatattagcttgtaagatccttatcttgttcaaagacagtataattttctttcaccat

SEQ ID NO: 55408 - protein, 248 aa, Glycine max
  peptide (1)..(248): Ceres Seq. ID no. 14308352
LLYLIAASKNELSKMIELQKEMEMLLQNAKGELQSKDSLLKPLKQSDTLALSITDIQEVSSSSSHLSIHSNIQYVQPESKSDTVPNRFLEYNTSEQDECAEEINELRAEFEIELQRLQLYLDGEAGFDDAQQEGVKVTLEDSSSKSHSSSFGEIIMEPQGATYDVSFGVPPIELERRLHELLEARLEERISELESALECKTQKLIKKEIEVTWWKDTAQLISQHVPETSRFTFPLDPDISLKLSQLVG

SEQ ID NO: 55409 - protein, 234 aa, Glycine max
  peptide (1)..(234): Ceres Seq. ID no. 14308353
MIELQKEMEMLLQNAKGELQSKDSLLKPLKQSDTLALSITDIQEVSSSSSHLSIHSNIQYVQPESKSDTVPNRFLEYNTSEQDECAEEINELRAEFEIELQRLQLYLDGEAGFDDAQQEGVKVTLEDSSSKSHSSSFGEIIMEPQGATYDVSFGVPPIELERRLHELLEARLEERISELESALECKTQKLIKKEIEVTWWKDTAQLISQHVPETSRFTFPLDPDISLKLSQLVG

SEQ ID NO: 55410 - protein, 227 aa, Glycine max
  peptide (1)..(227): Ceres Seq. ID no. 14308354
MEMLLQNAKGELQSKDSLLKPLKQSDTLALSITDIQEVSSSSSHLSIHSNIQYVQPESKSDTVPNRFLEYNTSEQDECAEEINELRAEFEIELQRLQLYLDGEAGFDDAQQEGVKVTLEDSSSKSHSSSFGEIIMEPQGATYDVSFGVPPIELERRLHELLEARLEERISELESALECKTQKLIKKEIEVTWWKDTAQLISQHVPETSRFTFPLDPDISLKLSQLVG

SEQ ID NO: 55411 - DNA, 1742 bp, Glycine max
  misc_feature (1)..(1742): Ceres Seq. ID no. 12581696
cagctacgtaggccccccccccagaatgctctctgcaaccaaggaacatgaatatcacaagactacagggaggtgtgaatgtcagcagtagtgacaatcccaaacctaaaagtttaggtccagaaagttcaaatggttcagcccatgtggatcatccatctagagagttccagattgcagttagcagcaataggaaggtagtgaacgggagtacctgtagttctgttaggacaacagtaaatgaatttagtgaacgggaaatgccttacatgactaatgccaatgcttccatcattgtgaaggatgattttgataatgtcacaactacctctcaaaggattgaagatcatatggttaaggataggttagccttaaatgatgacgacttgggatccattgaaggagatatgtgtgcttcttcaacaggagttgtaagagtgcaatcaagaaagaaagctgagatgttcctagttcgaacagatggattttcttgtaccagagaaaaagtgactgaatcttctttggctttcactcatcctagcacccagcagcagatgcttatgtggaagtctatgccaaagaatgtgttattgttgaaaaagctgggggaagaactaatggaagaagcaaaaatggttgcttcttttctttatcaccaagagaaaatgaatgttcttgtggaacctgatgtgcatgacatatttgctagaattccaggctttggatttgttcagaccttctatagtcaagataccagtgatctacatgagaaagtcgattttgtggcatgcttgggtggagatggcgttatactgcatgcgtcaaatctattcagagatgctgttccccctattgtgtcatttaaccttggctcccttggttttctgacttctcatgattttgaagattacaagcaagacctacgacaagtcatccatggaaataatacacgagatggtgtgtatattactcttagaatgcgcctccgatgtgaaatttttcgtaaaggtaaagcaatgccagggaaagtatttgacatcctcaatgaggttgttgttgatcggggttctaatccatacctttcaaagattgaatgctatgaacatgatcgacttataaccaaagtacaaggtgatggagtcattgtggccacccctacaggaagtactgcctattctacagctgccggaggttccatggtccatcctaatgtcccttgcatactgtttaccccaatctgtccacattcactctcatttaggccagttatacttccagattctgctcaactagaattaaagattccggaagatgctagaagtaatgcctgggtttcatttgatgggaagagaaggcagcaactctcgagaggcgattctgtccgaatatcgatgagccagcatccccttccaactgttaacaagtttgaccaaacgggtgattggttcagtagcttgattcgctgcctaaattggaatgagaggcttgatcaaaaggctctgtgatgcatgtgaaagtgaagaacagatatgcattaccctaacgtgaggatagggcttctataattactgtacagcttgtacattgagattacagaacttagatatatagcagatacctacactttattacattggctaccattgtgaagatagggtttgccaatgttttttcaacatgtcataatggcaagatgctgttgtatatacatttataaaatgtagtaatttttttttaatctt

SEQ ID NO: 55412 - protein, 485 aa, Glycine max
  peptide (1)..(485): Ceres Seq. ID no. 12581697
MNITRLQGGVNVSSSDNPKPKSLGPESSNGSAHVDHPSREFQIAVSSNRKVVNGSTCSSVRTTVNEFSEREMPYMTNANASIIVKDDFDNVTTTSQRIEDHMVKDRLALNDDDLGSIEGDMCASSTGVVRVQSRKKAEMFLVRTDGFSCTREKVTESSLAFTHPSTQQQMLMWKSMPKNVLLLKKLGEELMEEAKMVASFLYHQEKMNVLVEPDVHDIFARIPGFGFVQTFYSQDTSDLHEKVDFVACLGGDGVILHASNLFRDAVPPIVSFNLGSLGFLTSHDFEDYKQDLRQVIHGNNTRDGVYITLRMRLRCEIFRKGKAMPGKVFDILNEVVVDRGSNPYLSKIECYEHDRLITKVQGDGVIVATPTGSTAYSTAAGGSMVHPNVPCILFTPICPHSLSFRPVILPDSAQLELKIPEDARSNAWVSFDGKRRQQLSRGDSVRISMSQHPLPTVNKFDQTGDWFSSLIRCLNWNERLDQKAL

SEQ ID NO: 55413 - protein, 414 aa, Glycine max
  peptide (1)..(414): Ceres Seq. ID no. 12581698
MPYMTNANASIIVKDDFDNVTTTSQRIEDHMVKDRLALNDDDLGSIEGDMCASSTGVVRVQSRKKAEMFLVRTDGFSCTREKVTESSLAFTHPSTQQQMLMWKSMPKNVLLLKKLGEELMEEAKMVASFLYHQEKMNVLVEPDVHDIFARIPGFGFVQTFYSQDTSDLHEKVDFVACLGGDGVILHASNLFRDAVPPIVSFNLGSLGFLTSHDFEDYKQDLRQVIHGNNTRDGVYITLRMRLRCEIFRKGKAMPGKVFDILNEVVVDRGSNPYLSKIECYEHDRLITKVQGDGVIVATPTGSTAYSTAAGGSMVHPNVPCILFTPICPHSLSFRPVILPDSAQLELKIPEDARSNAWVSFDGKRRQQLSRGDSVRISMSQHPLPTVNKFDQTGDWFSSLIRCLNWNERLDQKAL

SEQ ID NO: 55414 - protein, 411 aa, Glycine max
  peptide (1)..(411): Ceres Seq. ID no. 12581699
MTNANASIIVKDDFDNVTTTSQRIEDHMVKDRLALNDDDLGSIEGDMCASSTGVVRVQSRKKAEMFLVRTDGFSCTREKVTESSLAFTHPSTQQQMLMWKSMPKNVLLLKKLGEELMEEAKMVASFLYHQEKMNVLVEPDVHDIFARIPGFGFVQTFYSQDTSDLHEKVDFVACLGGDGVILHASNLFRDAVPPIVSFNLGSLGFLTSHDFEDYKQDLRQVIHGNNTRDGVYITLRMRLRCEIFRKGKAMPGKVFDILNEVVVDRGSNPYLSKIECYEHDRLITKVQGDGVIVATPTGSTAYSTAAGGSMVHPNVPCILFTPICPHSLSFRPVILPDSAQLELKIPEDARSNAWVSFDGKRRQQLSRGDSVRISMSQHPLPTVNKFDQTGDWFSSLIRCLNWNERLDQKAL

SEQ ID NO: 55415 - DNA, 1552 bp, Glycine max
  misc_feature (1)..(1552): Ceres Seq. ID no. 15172321
gtgagttaattgcatttgcagagagagagagagagagagggggaagacggttgtggggattcgatgggggccaccgttcactcgccgctagtcacttatgcttccgtcatatctctgcttacactctgtcctccgtttgtcatacttctatggtacaccatgactcttgctgacggatctgtttccgagacattccattatttaaggcagaatgggttgcagggtttgctacatatatggcccacccccactcccaccgcctgcaaaatcattgcagtctatgctgcatttgaggcagcacttcagcttcttcttcccgggaaaaccgtttacggccctatttctccaaccggccaccgacctgtctacaaggcaaatggtctgcaagcctattttgtcaccttgattacttattttgctctctggtggtttgggatattcaaccctacgattgtttatcatcatttgggagaaatttattcagctctcatcttcggcagctttctcttctgtgttttcttgtacatcaagggtcatttggcaccgtcttctacagattctggctcatctggaaacttaatcattgatttttactgggggatggaactttatccacgcattggaaaacattttgacataaaagtcttcacaaactgcagatttggaatgatgtcatgggctgttcttgcactgacctactgcataaagcagtatgaagaaaatggaaaagtagcggactcaatgcttgtaaatactgcattaatgctggtatatgttaccaagtttttctggtgggaagctggatattggagcacaatggatattgcacatgatcgagctggattttatatttgctggggttgcttggtgtgggttccatctgtttatacgtctcctggaatgtaccttgtcaaccatcctgtaaatcttggcatcaagctagcgctctcaattttagtagctggcattctttgcatatacatcaactatgattgtgacaggcaaaggcaagaatttcgtaggacaaatggaaaaggcacagtctggggaaaagctccttcaaagatagaggccacatatactactacttctggggaaactaaaagaagccttcttttaacctctggatggtggggattatctcgtcactttcattatgtccctgaaatactggcagctttcttctggacagtcccagctcttttcgaacattttttgccttacttctacgtgatatttcttaccatccttctctttgatcgagcaaaacgagatgatgatcgttgcagatccaagtatggcaagtactggaaactatattgcgacaaggtaccttacagaatcattccaggaatatactgaagaatgattatcgaaaacggcttatctggagtcccccaacttaaaattaaaaaccaaggacgccatctgtagctttatattgtttggtgcctccttaagacacgtggtagattagactttcgctgagagctaattattgaattattgaaccggattttttaagctaatgtcgagacttgatttcggctcc

SEQ ID NO: 55416 - protein, 432 aa, Glycine max
  peptide (1)..(432): Ceres Seq. ID no. 15172322
MGATVHSPLVTYASVISLLTLCPPFVILLWYTMTLADGSVSETFHYLRQNGLQGLLHIWPTPTPTACKIIAVYAAFEAALQLLLPGKTVYGPISPTGHRPVYKANGLQAYFVTLITYFALWWFGIFNPTIVYHHLGEIYSALIFGSFLFCVFLYIKGHLAPSSTDSGSSGNLIIDFYWGMELYPRIGKHFDIKVFTNCRFGMMSWAVLALTYCIKQYEENGKVADSMLVNTALMLVYVTKFFWWEAGYWSTMDIAHDRAGFYICWGCLVWVPSVYTSPGMYLVNHPVNLGIKLALSILVAGILCIYINYDCDRQRQEFRRTNGKGTVWGKAPSKIEATYTTTSGETKRSLLLTSGWWGLSRHFHYVPEILAAFFWTVPALFEHFLPYFYVIFLTILLFDRAKRDDDRCRSKYGKYWKLYCDKVPYRIIPGIY

SEQ ID NO: 55417 - protein, 400 aa, Glycine max
  peptide (1)..(400): Ceres Seq. ID no. 15172323
MTLADGSVSETFHYLRQNGLQGLLHIWPTPTPTACKIIAVYAAFEAALQLLLPGKTVYGPISPTGHRPVYKANGLQAYFVTLITYFALWWFGIFNPTIVYHHLGEIYSALIFGSFLFCVFLYIKGHLAPSSTDSGSSGNLIIDFYWGMELYPRIGKHFDIKVFTNCRFGMMSWAVLALTYCIKQYEENGKVADSMLVNTALMLVYVTKFFWWEAGYWSTMDIAHDRAGFYICWGCLVWVPSVYTSPGMYLVNHPVNLGIKLALSILVAGILCIYINYDCDRQRQEFRRTNGKGTVWGKAPSKIEATYTTTSGETKRSLLLTSGWWGLSRHFHYVPEILAAFFWTVPALFEHFLPYFYVIFLTILLFDRAKRDDDRCRSKYGKYWKLYCDKVPYRIIPGIY

SEQ ID NO: 55418 - protein, 253 aa, Glycine max
  peptide (1)..(253): Ceres Seq. ID no. 15172324
MELYPRIGKHFDIKVFTNCRFGMMSWAVLALTYCIKQYEENGKVADSMLVNTALMLVYVTKFFWWEAGYWSTMDIAHDRAGFYICWGCLVWVPSVYTSPGMYLVNHPVNLGIKLALSILVAGILCIYINYDCDRQRQEFRRTNGKGTVWGKAPSKIEATYTTTSGETKRSLLLTSGWWGLSRHFHYVPEILAAFFWTVPALFEHFLPYFYVIFLTILLFDRAKRDDDRCRSKYGKYWKLYCDKVPYRIIPGIY

SEQ ID NO: 55419 - DNA, 1212 bp, Glycine max
  misc_feature (1)..(1212): Ceres Seq. ID no. 12607856
agaactaaggctgaaggaccagccaattgcggaagtaagaaatctacgtgaaaatccacaaggggatgaatgtccaaatataatctctgaaaatattcttaagtgtttatcaaacattatcttgagaatgagtgctgcaaaaaatttggattctacagctgatgtaccaccctttaggactccaaaatctaaaaactgtgtagaaggaagtgagttttgggatccttatagtatctgtttggaatttggaaagagggatagtggtccattcaagcaattacgttcaattgaagctaaatcattcgatccaaaacgaactgcaaagtctttgtttttactgcatcggttgaagcttcttctgagaaaactagcttgtgtcaacatcgagaacctcaaccaccaggagaagcttgccttctggatcaacatctacaattcatgtatgatgaatgcgtacctagaaaagggtataccagagagtcctgaaatggttgttgcgctgatgcacaaggcaacgataaatgtgggtggacacttgctaagtgcaacaactatagaacattgcattttaagacttccttatcactggaaatttacattatcgaagggagggaaaaatcatgaaacttatggactggaattgtcagaacctctagtgacatttgctctatcctgtggaacttggtcctctcctgctgtgagaatttacagagcatctcaggttgagaacgaacttgaaatggcaaaaaaagaatatttgcagactgcagttggaatttcgatatcaaagttccttatcccgaagttgctggattggtatttactggactttgcaaaagacttggaatcattgctggattggatatgcctccaactaccaagtgatgtggggaaagaagccattaagttccttgagaaaagaaaaaccgagcccctctcacaatatgtacagattatgccatatgagttcaattttagatacttgctttgcacatagtttttcttctatttctgtaatgttttattgattatgtggataggatacgatttgtaaacagctttagatcatacatatagtaagcatgcaaatgccatttgttcttttctcacttttaatagattttttaaaatgccttattaactgaagtgaacatgggaagttggagtatagaattgggtcataaatataatccttccatgtttttgatgctc

SEQ ID NO: 55420 - protein, 331 aa, Glycine max
  peptide (1)..(331): Ceres Seq. ID no. 12607857
ELRLKDQPIAEVRNLRENPQGDECPNIISENILKCLSNIILRMSAAKNLDSTADVPPFRTPKSKNCVEGSEFWDPYSICLEFGKRDSGPFKQLRSIEAKSFDPKRTAKSLFLLHRLKLLLRKLACVNIENLNHQEKLAFWINIYNSCMMNAYLEKGIPESPEMVVALMHKATINVGGHLLSATTIEHCILRLPYHWKFTLSKGGKNHETYGLELSEPLVTFALSCGTWSSPAVRIYRASQVENELEMAKKEYLQTAVGISISKFLIPKLLDWYLLDFAKDLESLLDWICLQLPSDVGKEAIKFLEKRKTEPLSQYVQIMPYEFNFRYLLCT

SEQ ID NO: 55421 - protein, 289 aa, Glycine max
  peptide (1)..(289): Ceres Seq. ID no. 12607858
MSAAKNLDSTADVPPFRTPKSKNCVEGSEFWDPYSICLEFGKRDSGPFKQLRSIEAKSFDPKRTAKSLFLLHRLKLLLRKLACVNIENLNHQEKLAFWINIYNSCMMNAYLEKGIPESPEMVVALMHKATINVGGHLLSATTIEHCILRLPYHWKFTLSKGGKNHETYGLELSEPLVTFALSCGTWSSPAVRIYRASQVENELEMAKKEYLQTAVGISISKFLIPKLLDWYLLDFAKDLESLLDWICLQLPSDVGKEAIKFLEKRKTEPLSQYVQIMPYEFNFRYLLCT

SEQ ID NO: 55422 - protein, 184 aa, Glycine max
  peptide (1)..(184): Ceres Seq. ID no. 12607859
MMNAYLEKGIPESPEMVVALMHKATINVGGHLLSATTIEHCILRLPYHWKFTLSKGGKNHETYGLELSEPLVTFALSCGTWSSPAVRIYRASQVENELEMAKKEYLQTAVGISISKFLIPKLLDWYLLDFAKDLESLLDWICLQLPSDVGKEAIKFLEKRKTEPLSQYVQIMPYEFNFRYLLCT

SEQ ID NO: 55423 - DNA, 1469 bp, Glycine max
  misc_feature (1)..(1469): Ceres Seq. ID no. 15169228
gactctcttcttacttcccctttctctctgtctctaaaaaccctttttttctctctctttcacacacaccaaccagactcgatcagtggtggcagatagagagagacatgatgtcaacttccggcgccggcaggtacatggcttttccgccgtctccgtccgcgcctccgtcgccgcacctctccggtcttcgctccactcccctctccgacccggacaaatatctagctgagttgttgggagaacgtaacaagcttagtcccttcatggctgtgcttcctcactgctttcgattgtttaaccaagaaattttgcgtgtaaccacgctgatggggaatgcatcagttttaggtcaaagtgggcttgaacacgctagccccctggctactggaggaatattttcaaatggaggtgccgatgtgaacggatgggcatcacgatttcaatcagaaagacccagcttgttacagtcctcatcaacacaaaactggctgagtccacaaggtagctcatctggtattattgttaaaaagacggtcagagtagatattcctgtggacgcatatcctaattttaactttgttggtcgcctcctaggccctagaggaaactctctaaagcgtgtagaagcaagtactgagtgtcgtgtcttgatcaggggccgaggtagcattaaggatccagctagggaggaaatgatgagaggaaaacctgggtatgagcatctgaatgaacctctccacattctagttgaggcagaattaccagttgaaatagtagatgctcgcctgatgcaggcacgtgaaatacttgaagatttgctcaaaccggtggatgaatctcaggatttctacaagaagcagcaacttcgggagctagcaatgctgaatggcactcttcgtgaggagggttctcccatgtctggttctgtttcacccttccacaacagccttggtatgaagagggccaagaccagggggtaaattatcctaaagggtgagagggattttggagcttgtgttaattttctacatcatcacttaccgtgccacaggtaatgctgtcaacgaatgccctgatctgcgatcggggcactggcatcatagtgccagttctaacttgttctatgtgcagtgtgtttatattgagtttgggggaggtttaaagatggtagcacgtagtaaaggtccaattgagtttggtgaatttgcttttatagtgttggttaaggtttggttagatattcaccaaatctgtctatactactattatatggggttatatttgctgataaaaaaaaatatggggttatatttaagcttgcaataacagttttgatatgtttttggtattttctgcgaggaaggtaatgttaatggtttgtacccagattgtgaggcagataaatatctacttcaatgcgtctatgggtgacattttgtagtatctaatttagattataaattcgc

SEQ ID NO: 55424 - protein, 326 aa, Glycine max
  peptide (1)..(326): Ceres Seq. ID no. 15169229
LSSYFPFLSVSKNPFFLSLSHTPTRLDQWWQIERDMMSTSGAGRYMAFPPSPSAPPSPHLSGLRSTPLSDPDKYLAELLGERNKLSPFMAVLPHCFRLFNQEILRVTTLMGNASVLGQSGLEHASPLATGGIFSNGGADVNGWASRFQSERPSLLQSSSTQNWLSPQGSSSGIIVKKTVRVDIPVDAYPNFNFVGRLLGPRGNSLKRVEASTECRVLIRGRGSIKDPAREEMMRGKPGYEHLNEPLHILVEAELPVEIVDARLMQAREILEDLLKPVDESQDFYKKQQLRELAMLNGTLREEGSPMSGSVSPFHNSLGMKRAKTRG

SEQ ID NO: 55425 - protein, 291 aa, Glycine max
  peptide (1)..(291): Ceres Seq. ID no. 15169230
MMSTSGAGRYMAFPPSPSAPPSPHLSGLRSTPLSDPDKYLAELLGERNKLSPFMAVLPHCFRLFNQEILRVTTLMGNASVLGQSGLEHASPLATGGIFSNGGADVNGWASRFQSERPSLLQSSSTQNWLSPQGSSSGIIVKKTVRVDIPVDAYPNFNFVGRLLGPRGNSLKRVEASTECRVLIRGRGSIKDPAREEMMRGKPGYEHLNEPLHILVEAELPVEIVDARLMQAREILEDLLKPVDESQDFYKKQQLRELAMLNGTLREEGSPMSGSVSPFHNSLGMKRAKTRG

SEQ ID NO: 55426 - protein, 290 aa, Glycine max
  peptide (1)..(290): Ceres Seq. ID no. 15169231
MSTSGAGRYMAFPPSPSAPPSPHLSGLRSTPLSDPDKYLAELLGERNKLSPFMAVLPHCFRLFNQEILRVTTLMGNASVLGQSGLEHASPLATGGIFSNGGADVNGWASRFQSERPSLLQSSSTQNWLSPQGSSSGIIVKKTVRVDIPVDAYPNFNFVGRLLGPRGNSLKRVEASTECRVLIRGRGSIKDPAREEMMRGKPGYEHLNEPLHILVEAELPVEIVDARLMQAREILEDLLKPVDESQDFYKKQQLRELAMLNGTLREEGSPMSGSVSPFHNSLGMKRAKTRG

SEQ ID NO: 55427 - DNA, 1458 bp, Glycine max
  misc_feature (1)..(1458): Ceres Seq. ID no. 14309703
gcgattcggtaccatccatcatcgccgttttcaaattcttcaattttcaccatcaattccctttcgcctctctcaatcgatataatttttttgcagagtttgggatttcagggttttggacgatgaacgtgggcgacctaaacaaggtttgggaaatcagggctctgaagaggaaacccgcggctgaagaagccacgaagatgttggaaaagatcgccaaacaggtccaacccatcatgcgcaaacacaaatggaggatcaaacttctctctgaaatgtgcccaagcaatccacgtcttctggggttgaatgttggagctggtatacatgtgaagttgcggctacggagaccgaacagggatttggacttctacccgtttgatcaggttctggatacgatgcttcatgagctttgccataatgcccatggccctcataatgccaacttctacaagctctgggatgaacttagaaaggaatgtgaagagttgatggctaagggaataagtggtgctggggagggatttgatcttccaggaaggcgtttaggtggttattcccgtcaacctccactttcatccctccgtaaaactgcactggaagctgcagaaaaaagagtacaattgggatctcttcttccgtctgggccaaaacgtctaggtggtgatagtgttataatgagggcccttagtccagtacaagctgctgcaatggctgcagaacggagattacaggatgacgtatggtgtggttctcaatcttgtgaaaatttggatcatgaagatgttgactatgaagttgctgagaacatcgtgcataagggggaaaatgtgggaagctcaagacaaacagacaattctactctaccttcgaatctgttatctcgaaaaagaagtcaggataccaattcaagtttacctgctaagtcatcatctagtacttctgaatttgtagatttgactatggatacaccgaaaagtagacctgacaaggagcatcaaactggacctaaacgaagatgcggtggatcagaaagcttttcacattctcaatcaaattatcaggcaggatctagttcagcaaatttatcaagtgtatctgggcgacattctgaagaatctggaatgtgggagtgtacaatgtgcactctgttgaataaaagattggctcccatatgtgagttgtgtggcactcaacagccaaaagattttagtaccaaatgcaacacttggtcttgtaaattctgtacgttggaaaacaatgtgaagttggagaagtgctcagcctgtgatcagtggagatactctcatggcccatcagtgtcaatccgagcacccaaccttggtacatagaagagctgcgtagtttgcttaatggagcacttttgatccatttttggctttagtctttacaaaattgcattactttctccaccaatctatttatttttggtttctt

SEQ ID NO: 55428 - protein, 449 aa, Glycine max
  peptide (1)..(449): Ceres Seq. ID no. 14309704
DSVPSIIAVFKFFNFHHQFPFASLNRYNFFAEFGISGFWTMNVGDLNKVWEIRALKRKPAAEEATKMLEKIAKQVQPIMRKHKWRIKLLSEMCPSNPRLLGLNVGAGIHVKLRLRRPNRDLDFYPFDQVLDTMLHELCHNAHGPHNANFYKLWDELRKECEELMAKGISGAGEGFDLPGRRLGGYSRQPPLSSLRKTALEAAEKRVQLGSLLPSGPKRLGGDSVIMRALSPVQAAAMAAERRLQDDVWCGSQSCENLDHEDVDYEVAENIVHKGENVGSSRQTDNSTLPSNLLSRKRSQDTNSSLPAKSSSSTSEFVDLTMDTPKSRPDKEHQTGPKRRCGGSESFSHSQSNYQAGSSSANLSSVSGRHSEESGMWECTMCTLLNKRLAPICELCGTQQPKDFSTKCNTWSCKFCTLENNVKLEKCSACDQWRYSHGPSVSIRAPNLGT

SEQ ID NO: 55429 - protein, 409 aa, Glycine max
  peptide (1)..(409): Ceres Seq. ID no. 14309705
MNVGDLNKVWEIRALKRKPAAEEATKMLEKIAKQVQPIMRKHKWRIKLLSEMCPSNPRLLGLNVGAGIHVKLRLRRPNRDLDFYPFDQVLDTMLHELCHNAHGPHNANFYKLWDELRKECEELMAKGISGAGEGFDLPGRRLGGYSRQPPLSSLRKTALEAAEKRVQLGSLLPSGPKRLGGDSVIMRALSPVQAAAMAAERRLQDDVWCGSQSCENLDHEDVDYEVAENIVHKGENVGSSRQTDNSTLPSNLLSRKRSQDTNSSLPAKSSSSTSEFVDLTMDTPKSRPDKEHQTGPKRRCGGSESFSHSQSNYQAGSSSANLSSVSGRHSEESGMWECTMCTLLNKRLAPICELCGTQQPKDFSTKCNTWSCKFCTLENNVKLEKCSACDQWRYSHGPSVSIRAPNLGT

SEQ ID NO: 55430 - protein, 383 aa, Glycine max
  peptide (1)..(383): Ceres Seq. ID no. 14309706
MLEKIAKQVQPIMRKHKWRIKLLSEMCPSNPRLLGLNVGAGIHVKLRLRRPNRDLDFYPFDQVLDTMLHELCHNAHGPHNANFYKLWDELRKECEELMAKGISGAGEGFDLPGRRLGGYSRQPPLSSLRKTALEAAEKRVQLGSLLPSGPKRLGGDSVIMRALSPVQAAAMAAERRLQDDVWCGSQSCENLDHEDVDYEVAENIVHKGENVGSSRQTDNSTLPSNLLSRKRSQDTNSSLPAKSSSSTSEFVDLTMDTPKSRPDKEHQTGPKRRCGGSESFSHSQSNYQAGSSSANLSSVSGRHSEESGMWECTMCTLLNKRLAPICELCGTQQPKDFSTKCNTWSCKFCTLENNVKLEKCSACDQWRYSHGPSVSIRAPNLGT

SEQ ID NO: 55431 - DNA, 1246 bp, Glycine max
  misc_feature (1)..(1246): Ceres Seq. ID no. 14313583
acaagcatctctgttcagagcctcattaagtttttctctctttcacttatttattgactctccataagcccttcaaacctctctctattcctctctactagtcaccttctcccttccattcactccacttcttaacacccccaaacagaacaacggcagagcaagcagccagaaaaatggtgttgctgtccaaagcaacaacagaacaatactcctacatcaagaactacatgccaactgcattctcctcaacaattcccatagtggacctctccaaacccgatgcaaagaccctcatagtgaaggcttgtgaggagtttggattcttcaaagtcatcaaccatggtgttcccattgaagctatatcccaattggaatccgaagccttcaagttcttctctatgccactcaatgagaaggaaaaagcagggcctcccaaaccatttgggtgtctattaaacagttacatgtcttctgtgagaaaaatggcatgcgagattcttgagttgatggcagaaggattgaagattcagcaaaagaatgtgtttagcaagcttctgatggataaacagagtgactctgttttcagggtgaatcactaccctgcttgtcctgaacttgccgtgaatggtcagaacttgattgggttcggagaacatacagacccacaaatcatttctttacttaggtccaacaacacttcaggccttcagatttttcttagagatggaaactggatttcagtcccacctgatcacaaatctttcttcataaatgttggtgattctcttcaggttatgaccaatggaagatttcggagtgtgagacatagagttttggcaaatggatttaagtctaggctctcaatgatttactttggaggtccacctttgagtgaaaaaatagcgccattaccttctctcatgaaaggaaaagaaagcttatataaagaatttacgtggtttgagtacaagaattcaacctatggttcaagattggctgataataggcttggacattttgagagaattgttgcttgataatatgtagagaattatgggggcacttgtcaatacaaaatgggggttacaatagtctatatactataaatgttttttctttttcttttttctactttaaggttatttatcaattagaatgcctcacagatataggacaacgcatacaccccttttgcttcaacactagtgaatgcatctgatgtagttaacaatggagatttgat

SEQ ID NO: 55432 - protein, 287 aa, Glycine max
  peptide (1)..(287): Ceres Seq. ID no. 14313584
MVLLSKATTEQYSYIKNYMPTAFSSTIPIVDLSKPDAKTLIVKACEEFGFFKVINHGVPIEAISQLESEAFKFFSMPLNEKEKAGPPKPFGCLLNSYMSSVRKMACEILELMAEGLKIQQKNVFSKLLMDKQSDSVFRVNHYPACPELAVNGQNLIGFGEHTDPQIISLLRSNNTSGLQIFLRDGNWISVPPDHKSFFINVGDSLQVMTNGRFRSVRHRVLANGFKSRLSMIYFGGPPLSEKIAPLPSLMKGKESLYKEFTWFEYKNSTYGSRLADNRLGHFERIVA

SEQ ID NO: 55433 - protein, 269 aa, Glycine max
  peptide (1)..(269): Ceres Seq. ID no. 14313585
MPTAFSSTIPIVDLSKPDAKTLIVKACEEFGFFKVINHGVPIEAISQLESEAFKFFSMPLNEKEKAGPPKPFGCLLNSYMSSVRKMACEILELMAEGLKIQQKNVFSKLLMDKQSDSVFRVNHYPACPELAVNGQNLIGFGEHTDPQIISLLRSNNTSGLQIFLRDGNWISVPPDHKSFFINVGDSLQVMTNGRFRSVRHRVLANGFKSRLSMIYFGGPPLSEKIAPLPSLMKGKESLYKEFTWFEYKNSTYGSRLADNRLGHFERIVA

SEQ ID NO: 55434 - protein, 212 aa, Glycine max
  peptide (1)..(212): Ceres Seq. ID no. 14313586
MPLNEKEKAGPPKPFGCLLNSYMSSVRKMACEILELMAEGLKIQQKNVFSKLLMDKQSDSVFRVNHYPACPELAVNGQNLIGFGEHTDPQIISLLRSNNTSGLQIFLRDGNWISVPPDHKSFFINVGDSLQVMTNGRFRSVRHRVLANGFKSRLSMIYFGGPPLSEKIAPLPSLMKGKESLYKEFTWFEYKNSTYGSRLADNRLGHFERIVA

SEQ ID NO: 55435 - DNA, 1456 bp, Glycine max
  misc_feature (1)..(1456): Ceres Seq. ID no. 14310495
agggtgtagtaccgttagaagcgagtccttctacggtccttgcctctgttcagtttcattcactcctcactgtaaaacctagcaagccaaaatcacaaccattccaagtgcatgtgaaatcgcaggtttaaggtttccgtttctccatgcaatgtatcgtgtgtgttccatttgtcgctttgactttcgttctcatttcctttgaccgttaatctcggcttttcttgcggaaagtaactgttggctgatcataaatggcgcccaatccaagagtggtggcggcctttacggcaatggcgaatctcgggattcatgaatcaaaagtgaaaccagtgttgaagaaactgcttaaattgtatgataagaactgggcactcattgaagaagagagttatagggccctggctgatgcaatatttgaggaggaagagaataaggtgaatgagccagaccagaataataaaaacaagaacggagttgtggacgatgaagaagctcatacgcatggggagcctgtgcgacctttgaagaggttgcgtttgagaggccaagagggtcaatctttgcgccctctgactagcagtggccccagctcagctgcatttccgttgaaagcgcctaaattagaagatggggcagtgcccgagagtagttccagacggcagcctcaaagcatggctgcattatctgatggaaatgcaaggattggtgctcgtcatgttcccccacaagatgctgttgtcgacaagggaaagaaacctatatcacctcaacttactcccagagcgagaaggtcccttgcagagccaacagttgaagcaggagctgctctgttggcaaataacaaaatgcctcatccatttattttgatcaagcccaaggatgagcctgttgatggtataccagattatgagattccccttgcagtgattcctcctgaaccatcaagtggaggagactctctaatgggtgcagctggaaagaaagattgccatgacactgtggtatcacagtgcagagatgaaaacgttgaacatgaatatgtttttccttcctcaaattaagaagcaacttctaatgtagatgtagctttgtcgtctatgggtgaggaacaatctgtaaagataacacaaactgatgatgtttcaaaggaatctgagaccaatgactcacctattgtcagaggaaacaaagattcggtcattgcaaatggatcaatcagtgttgagtcttctgccatggctgaacttcaagttcctagttctataccctgctcgagtgatctggataatgctgtaccagctcccaagaaggttggaatgaatggtttcttacaaagtgatagtggaaaggagctggagcatcctataatcccaaattcacgtactttagtggttgttccaaaacatcagcttactaatgatgatgtaagggcagttcatgatgttaatgacct

SEQ ID NO: 55436 - protein, 269 aa, Glycine max
  peptide (1)..(269): Ceres Seq. ID no. 14310496
MAPNPRVVAAFTAMANLGIHESKVKPVLKKLLKLYDKNWALIEEESYRALADAIFEEEENKVNEPDQNNKNKNGVVDDEEAHTHGEPVRPLKRLRLRGQEGQSLRPLTSSGPSSAAFPLKAPKLEDGAVPESSSRRQPQSMAALSDGNARIGARHVPPQDAVVDKGKKPISPQLTPRARRSLAEPTVEAGAALLANNKMPHPFILIKPKDEPVDGIPDYEIPLAVIPPEPSSGGDSLMGAAGKKDCHDTVVSQCRDENVEHEYVFPSSN

SEQ ID NO: 55437 - protein, 256 aa, Glycine max
  peptide (1)..(256): Ceres Seq. ID no. 14310497
MANLGIHESKVKPVLKKLLKLYDKNWALIEEESYRALADAIFEEEENKVNEPDQNNKNKNGVVDDEEAHTHGEPVRPLKRLRLRGQEGQSLRPLTSSGPSSAAFPLKAPKLEDGAVPESSSRRQPQSMAALSDGNARIGARHVPPQDAVVDKGKKPISPQLTPRARRSLAEPTVEAGAALLANNKMPHPFILIKPKDEPVDGIPDYEIPLAVIPPEPSSGGDSLMGAAGKKDCHDTVVSQCRDENVEHEYVFPSSN

SEQ ID NO: 55438 - DNA, 1819 bp, Glycine max
  misc_feature (1)..(1819): Ceres Seq. ID no. 15176361
gatatcctctctctctctctctctctctgaacaagacccagccagccgttagggaaatcaagcacagctcaatcattgaatcttagcataaacacatacagaagaaggaaaagtggcaccctgggaggagctgatattgaaggagggtttggaagaaaaagaattttgttttgagatatatatacatatatgtgcaagtgcataggaaattaacacaaaaagatgacatggtgcaatgactctgatgaggatagggttattgaatcaacgacgccaacaataactattactcctaacactgatggcataaagctcaccgaagaaattagaaccataacatgcccctcgtgcggccataacattgaattcaaagatcagggtggaatccatgacttgccggggttaccagctggagtgaagtttgacccaaatgaccaagaaatattagaacatttggaggcaaaagtggcgtctgatgcatgcaagcttcatccccttattgacgagttcataccaacgcttgaaggcgaaaatgggatctgttatacacacccagaaaagctaccaggtgttagcaaagatggacagatccgccacttctttcacaggccctcaaaagcatacacaactggaacgaggaaaagaagaaaagttcacactgatgatgaaggaagtgaaacaagatggcacaaaacgggaaaaactagagcagtttttgcagcagccggtggtgcagtaaaaggttttaagaaaatactagtactctacaccaactatggaagacaaaagaagcctgagaaaactaattgggtgatgcatcaataccatcttggcagtactgaagaagagaaagatggagaattagttgtttcaaaggtcttctatcagacacaacctagacaatgtggcaatcccattataataaaggattcatacgaaaaaatgttgaatgatggaagtggccaagacaacattaatatatcattaatacctaaaactactgcaactcttttggattgctacactgctccttacatagattatgatcacgtccatgtgagtcataacagggaaagttcctcacaactaattattcccagctcggttgttcaagttgatggctcttatattcgcttaacaatggatgcaaagaaagcaagatttgaaagtaacactgggaagagattctaggcagagcagcaatgacaaagacttgcatataaatgttctccatattgtttcctttactaattgatcagtacgtaacattatttatatgtgggattagaatgaaggaatttcaagggttggaaaaataagttggcttccttattaagatcaatatggtgcaggcatggtggacttaatttcccataattgaccctggttgaagttgagagacaagcaagttaggtatatatatttgcggtactgtagtttgattttaattttagggtacatgtatattcgtaaaatgtgcttatagatattacaatagtagcagggatatcgtttattgactactcttcagaactatagtcagtctatatactgtattttgtctagaattgaattttgcaccccctcaatcctgaaaaaaatgctgagatgtttcattattattatattatgcgtgtcagctacttaatttgctgggaagtttgtcccttgtagttttcccccctgttttctttgaaaggtcgattgtaaaataaggtgaagacagtagatttatcttatttatggttctaaattgcggttccttgtagtttttctccctctttccaattagtgatgcggattgcagctactatgactc

SEQ ID NO: 55439 - protein, 322 aa, Glycine max
  peptide (1)..(322): Ceres Seq. ID no. 15176362
MTWCNDSDEDRVIESTTPTITITPNTDGIKLTEEIRTITCPSCGHNIEFKDQGGIHDLPGLPAGVKFDPNDQEILEHLEAKVASDACKLHPLIDEFIPTLEGENGICYTHPEKLPGVSKDGQIRHFFHRPSKAYTTGTRKRRKVHTDDEGSETRWHKTGKTRAVFAAAGGAVKGFKKILVLYTNYGRQKKPEKTNWVMHQYHLGSTEEEKDGELVVSKVFYQTQPRQCGNPIIIKDSYEKMLNDGSGQDNINISLIPKTTATLLDCYTAPYIDYDHVHVSHNRESSSQLIIPSSVVQVDGSYIRLTMDAKKARFESNTGKRF

SEQ ID NO: 55440 - DNA, 1164 bp, Glycine max
  misc_feature (1)..(1164): Ceres Seq. ID no. 12506279
gtagcttggagcggtgttacggtgacagagtgagagtgagagtgagaaatgggtctgctttctaacagagtggagagacatgagatcaagcctggtgatcacatctacacttacagagccgttttcacctattcccatcatggcatttttgttgggggaagcaaggttgtacatttcagacctgaaaggaacttaaagtcaatgactgagacatcatcaaactgggatgatccaacatcaaacccatgtccaacctttcctgattgtggattcagacagccaaactgtggtgtagtcctttcctgcttagactgtttccttcgaaatgggtctctttactgttttgagtatgaggtttcaccatctgttttcctcagcagaataaggggtggcacatgcactactgcatcagctgacccaccagagactgttattcatcgagcaatgtatcttcttcaaaacggctttggtaattataatgtttttcagaacaattgtgaggattttgccttgtactgcaaaactggtcttttgatacaagacaagcaaggggttggaagaagtggccaagcttcttctgttattggtgctccattggctgcaatgatcacttctcctctcaagttgttaatgccaagtcctgttggtgttgctactgtaacagcaggtatgtactgcatgagcagatatgcaactgacattggtgtcagaagtgatgtgatcaaggtgccagtggaagacttggctgtgaaccttggatggacttgtcaagaggaggagatagctgaacatgaaacttcagacagacagattactaccagatgatttagcattgctctttatccttgttatggacatgaaactgttgcatgtgtcactggagttatacactagttcatagcagatttgtcttcattcatgcttatatcttttgtaattggtgtctagttattcaagttgtgtatgagatggaaatgcaataatattattacctacagtagtaactacaatgtgatgtattcctctgagacaaattttcttctggttgcctataataatgcaacatctacctactacagtgtgatgtattcctctgtgatgtattcctctgattgaaccatcttgttgtgtatcatagaaaatcaagttgaattctattttgct

SEQ ID NO: 55441 - protein, 258 aa, Glycine max
  peptide (1)..(258): Ceres Seq. ID no. 12506280
MGLLSNRVERHEIKPGDHIYTYRAVFTYSHHGIFVGGSKVVHFRPERNLKSMTETSSNWDDPTSNPCPTFPDCGFRQPNCGVVLSCLDCFLRNGSLYCFEYEVSPSVFLSRIRGGTCTTASADPPETVIHRAMYLLQNGFGNYNVFQNNCEDFALYCKTGLLIQDKQGVGRSGQASSVIGAPLAAMITSPLKLLMPSPVGVATVTAGMYCMSRYATDIGVRSDVIKVPVEDLAVNLGWTCQEEEIAEHETSDRQITTR

SEQ ID NO: 55442 - protein, 207 aa, Glycine max
  peptide (1)..(207): Ceres Seq. ID no. 12506281
MTETSSNWDDPTSNPCPTFPDCGFRQPNCGVVLSCLDCFLRNGSLYCFEYEVSPSVFLSRIRGGTCTTASADPPETVIHRAMYLLQNGFGNYNVFQNNCEDFALYCKTGLLIQDKQGVGRSGQASSVIGAPLAAMITSPLKLLMPSPVGVATVTAGMYCMSRYATDIGVRSDVIKVPVEDLAVNLGWTCQEEEIAEHETSDRQITTR

SEQ ID NO: 55443 - DNA, 1925 bp, Glycine max
  misc_feature (1)..(1925): Ceres Seq. ID no. 15175771
ttcgttttcaacaggcagggcatttgggagtgtctttgtttcccttcttgccctgtatgatatgagtgcttgattcgttgtcttcaaatcctgcaaggccagaggaagcaatcaactcaaacgacaccatgtctggaactatgtctccaaaaggttctttcaagaagaaagcaatcaatgcctcaaacatgctgaggaattctttgaccaggaagggtaggcgaagcagtaaggtcatgtccgttgaaatcgaggatgtccacgatgctgaggagttgaaaattgttgacgagttccgtcaagctcttattttggacgaacttcttcctgcaaaacacgatgattatcatatgatgcttagattcctgaaggctaggaaatttgatatcgagaaaacaaagcaaatgtggtctgaaatgctcaaatggaggaaggaatttggtgctgacaccatcacggaggacttcgaattcaaagaacttgatgaagtcttgcaatattatccccaaggccatcatggagtggacaaagatggaagacctgtgtacatagagagattaggccaagtcgatgccacgaagatgatgcaagtcacaaccatggatcgctacatcaaataccacgtaaaggagtttgagaggacatttgatgttaagtttgcagcttgttcaattgctgcaaagaagcacatagatcaaagtacaactatcctggacgtgcagggagtggggcttaaaagcttcagcaaacatgctagggaacttgttactcgccttcagaagattgacggtgacaactatccagagaccttgaatcgcatgttcatcatcaatgcaggttctggatttaggatactgtggaacaccgtaaaatcattccttgatcctaagaccacggcaaaaatcaatgttcttggcaacaagtatgacaccaaattgctagaaataattgatgcaagtgagttgcctgaatttttaggaggcacttgtacatgtgctgatcaaggaggctgtatgcgctctgataagggcccatggaaggatgcagaagtaatgaggatggttcagaatggtgatcacaaatgttcaaaaaaaagtgcctcacaaggcgaggaagagaaagaaaattctgaggaacacaagacttccaaattggaggcaaatcacaccccccagctttctccagttgttgaagaagaggtccctgctactaaaacttcccagcccttatcaccgatggctgataaatctgctgtgaaaaaagttgatgagaaagcttccaagcctaaggacttagcccctacagctgataaaactgcagcatcaactgagttttcgactgtgatgaaacgcatggctgagttggaggagaaaatcgtcaccatcaataataagcccactgctatgccacctgagaaggagcaaatgctgaatgcaactataactcgagccgatgacttggagaaacaacttttggctaccaagaaggctctggaggattcacttgttaagcaagaagagctttcggcttatcttgacaaaaagaagaagaagaagaagaagagatttttcttcttttaaagagcaaatccgtggatgcccaaacaagaggtccagatattaacgggaaattagcttttagtttctgcctttcaggagacttcccaaatgccccccttacatcaatgttcaacatgcgaactagtaaatattcaaaacgatcagaagagaagcatttgctcaaaatatatgaattatgataatcagaattttggtctctattaggataggacttactctctatgtgtagtatatatatatagggctatggcgatctgcacattatgcaaagcctgctctattattatgtacgtacagaatcaatcaatatctagtacaaaattagagagtatgacaatatgtttg

SEQ ID NO: 55444 - protein, 483 aa, Glycine max
  peptide (1)..(483): Ceres Seq. ID no. 15175772
MSGTMSPKGSFKKKAINASNMLRNSLTRKGRRSSKVMSVEIEDVHDAEELKIVDEFRQALILDELLPAKHDDYHMMLRFLKARKFDIEKTKQMWSEMLKWRKEFGADTITEDFEFKELDEVLQYYPQGHHGVDKDGRPVYIERLGQVDATKMMQVTTMDRYIKYHVKEFERTFDVKFAACSIAAKKHIDQSTTILDVQGVGLKSFSKHARELVTRLQKIDGDNYPETLNRMFIINAGSGFRILWNTVKSFLDPKTTAKINVLGNKYDTKLLEIIDASELPEFLGGTCTCADQGGCMRSDKGPWKDAEVMRMVQNGDHKCSKKSASQGEEEKENSEEHKTSKLEANHTPQLSPVVEEEVPATKTSQPLSPMADKSAVKKVDEKASKPKDLAPTADKTAASTEFSTVMKRMAELEEKIVTINNKPTAMPPEKEQMLNATITRADDLEKQLLATKKALEDSLVKQEELSAYLDKKKKKKKKRFFFF

SEQ ID NO: 55445 - protein, 479 aa, Glycine max
  peptide (1)..(479): Ceres Seq. ID no. 15175773
MSPKGSFKKKAINASNMLRNSLTRKGRRSSKVMSVEIEDVHDAEELKIVDEFRQALILDELLPAKHDDYHMMLRFLKARKFDIEKTKQMWSEMLKWRKEFGADTITEDFEFKELDEVLQYYPQGHHGVDKDGRPVYIERLGQVDATKMMQVTTMDRYIKYHVKEFERTFDVKFAACSIAAKKHIDQSTTILDVQGVGLKSFSKHARELVTRLQKIDGDNYPETLNRMFIINAGSGFRILWNTVKSFLDPKTTAKINVLGNKYDTKLLEIIDASELPEFLGGTCTCADQGGCMRSDKGPWKDAEVMRMVQNGDHKCSKKSASQGEEEKENSEEHKTSKLEANHTPQLSPVVEEEVPATKTSQPLSPMADKSAVKKVDEKASKPKDLAPTADKTAASTEFSTVMKRMAELEEKIVTINNKPTAMPPEKEQMLNATITRADDLEKQLLATKKALEDSLVKQEELSAYLDKKKKKKKKRFFFF

SEQ ID NO: 55446 - protein, 463 aa, Glycine max
  peptide (1)..(463): Ceres Seq. ID no. 15175774
MLRNSLTRKGRRSSKVMSVEIEDVHDAEELKIVDEFRQALILDELLPAKHDDYHMMLRFLKARKFDIEKTKQMWSEMLKWRKEFGADTITEDFEFKELDEVLQYYPQGHHGVDKDGRPVYIERLGQVDATKMMQVTTMDRYIKYHVKEFERTFDVKFAACSIAAKKHIDQSTTILDVQGVGLKSFSKHARELVTRLQKIDGDNYPETLNRMFIINAGSGFRILWNTVKSFLDPKTTAKINVLGNKYDTKLLEIIDASELPEFLGGTCTCADQGGCMRSDKGPWKDAEVMRMVQNGDHKCSKKSASQGEEEKENSEEHKTSKLEANHTPQLSPVVEEEVPATKTSQPLSPMADKSAVKKVDEKASKPKDLAPTADKTAASTEFSTVMKRMAELEEKIVTINNKPTAMPPEKEQMLNATITRADDLEKQLLATKKALEDSLVKQEELSAYLDKKKKKKKKRFFFF

SEQ ID NO: 55447 - DNA, 1139 bp, Glycine max
  misc_feature (1)..(1139): Ceres Seq. ID no. 15170037
aaataaaaataacaaagcgatccaaaaaaacacacaaacaacaatcaccatgggagaggaagtagacactgcttttgtccaagcaccagaacacaggccaaaatcctcagtgatcgtggcagaaggaatccctctgattgatctctctcccataaactaccaaaacgaagacaccctcttggattcttctatcgaaaacttagtcaaagaaataggcagtgcttgcaagaaatggggtttctttcaggtgatcaatcacaaggtgcctttggataaacgagagaggattgaagaggctgcaaaaaagttctttgcacttggtttagaggaaaagttgaaggtgagaagggatgcggttaacgtgttgggttactttgaagcagaacataccaagaacgttagggactggaaagagatctatgatttcaatgttcaggaacccacttttataccaccctcagatgaaccagatgatgaggaaaacgttcagttccaatgggataaccggtggcctcagaatcctcctgagttcaaagaagcatgccaagagtatgcacaagaagtggagaaacttgcttataagttgatggaacttgttgcactgagcttaggcttagtgccaaataggttccgcgggtatttcacacataacacgagcaatatccgtctgaatcattatccagcttgcccctaccctcatctggctcttggactcggacgccacaaggacactggtgtcttgactgtgcttgctcaagatgacactggtggtctagaagttaggagaaaatcagatggagagtggattcgagtcaagcccattttcaattccttcatcatcaatgtcggtgatatgatccaggtttggagcaatgatgcttatgagagtgtagaacacagggttatggtgaactctgagaaggataggttttcaattccattctttctgaaaccagcactctacactgatgtgaagcccttggaagagttgctagatgatagaaaccctcctatatatagaccagtcaactggggtaagttccgctctgcaagaatgcgaagtaattttgccaaatccaaagttgaaaacctccaaatttatgatttcaagtttcctagtaactgagtcagagtccata

SEQ ID NO: 55448 - protein, 374 aa, Glycine max
  peptide (1)..(374): Ceres Seq. ID no. 15170038
NKNNKAIQKNTQTTITMGEEVDTAFVQAPEHRPKSSVIVAEGIPLIDLSPINYQNEDTLLDSSIENLVKEIGSACKKWGFFQVINHKVPLDKRERIEEAAKKFFALGLEEKLKVRRDAVNVLGYFEAEHTKNVRDWKEIYDFNVQEPTFIPPSDEPDDEENVQFQWDNRWPQNPPEFKEACQEYAQEVEKLAYKLMELVALSLGLVPNRFRGYFTHNTSNIRLNHYPACPYPHLALGLGRHKDTGVLTVLAQDDTGGLEVRRKSDGEWIRVKPIFNSFIINVGDMIQVWSNDAYESVEHRVMVNSEKDRFSIPFFLKPALYTDVKPLEELLDDRNPPIYRPVNWGKFRSARMRSNFAKSKVENLQIYDFKFPSN

SEQ ID NO: 55449 - protein, 358 aa, Glycine max
  peptide (1)..(358): Ceres Seq. ID no. 15170039
MGEEVDTAFVQAPEHRPKSSVIVAEGIPLIDLSPINYQNEDTLLDSSIENLVKEIGSACKKWGFFQVINHKVPLDKRERIEEAAKKFFALGLEEKLKVRRDAVNVLGYFEAEHTKNVRDWKEIYDFNVQEPTFIPPSDEPDDEENVQFQWDNRWPQNPPEFKEACQEYAQEVEKLAYKLMELVALSLGLVPNRFRGYFTHNTSNIRLNHYPACPYPHLALGLGRHKDTGVLTVLAQDDTGGLEVRRKSDGEWIRVKPIFNSFIINVGDMIQVWSNDAYESVEHRVMVNSEKDRFSIPFFLKPALYTDVKPLEELLDDRNPPIYRPVNWGKFRSARMRSNFAKSKVENLQIYDFKFPSN

SEQ ID NO: 55450 - DNA, 1323 bp, Glycine max
  misc_feature (1)..(1323): Ceres Seq. ID no. 14308664
attatgtttattattttcttaaatcacaaacttatcttttgcttctctctcatcactccactaccccttcttcctctttatatctcttgtgtctataataacctaatccattctacgcgatcatatatcatatcccccgattcctttttcccaccctctcaccatgactcatccctactgctctaatgacttgaatgcttggtttgacctcaattctccatgccttttttccaattcttcatcaccttgctccaataacccaccattctactttcctactactaatattagttaccgtcataactgcacaaataatggcatctcttttactcagcatattcaatcttctcccagctcctttcctcctccaaaagaagcacttactcttaacctaagccccgcaagaggtgaagatcttgatcttgaatcttccttcagtgccatgaaagtcaacaaagagaaggagaaagaattactaagcatcatgtcttctaataataactctttggatgatgaaactgtgacggtggctttgcacttagggcttccaagcactactgctacttcatcagctgatttaacttcaaacatgtactcagaaaaagaagaaaaagccacttttgcttctgagtattctccgactagaattaacaagggtcagtattggatccctacccctgctcaaattctgatcggtccaacacggttctcatgccccctttgttgcaagacgttcaacagatacaacaacatgcagatgcatatgtgggggcatggatctcaatatagaaaggggccagagtctctaaggggaactcaaccaacagcaatgcttagactcccttgctattgctgtgcacaaggatgcaagaacaacattgaccatccaagagcaaagccactcaaagactttaggaccctccaaacccattacaagagaaagcatggaatcaagcctttcatgtgtagaaaatgttgcaaagcatttgctgtgaggggtgattggaggactcacgagaaaaactgtgggaagctatggtattgctcttgtgggtccgattttaagcacaagagatctctcaaagatcatatcaaggcatttgggaatggacatagagcttatggaatcgactcatgtcttgatcaagatgatgaaccgggctcagaaattgagcaggaaaataatgaatctttaatttccaatcatagttgacgtgtaatttcaactatgaagactagacaattgaggattctcatgttttgaactaattaaattgttgactatgactaccatctctaattaacgagttctccactcccccc

SEQ ID NO: 55451 - protein, 349 aa, Glycine max
  peptide (1)..(349): Ceres Seq. ID no. 14308665
MTHPYCSNDLNAWFDLNSPCLFSNSSSPCSNNPPFYFPTTNISYRHNCTNNGISFTQHIQSSPSSFPPPKEALTLNLSPARGEDLDLESSFSAMKVNKEKEKELLSIMSSNNNSLDDETVTVALHLGLPSTTATSSADLTSNMYSEKEEKATFASEYSPTRINKGQYWIPTPAQILIGPTRFSCPLCCKTFNRYNNMQMHMWGHGSQYRKGPESLRGTQPTAMLRLPCYCCAQGCKNNIDHPRAKPLKDFRTLQTHYKRKHGIKPFMCRKCCKAFAVRGDWRTHEKNCGKLWYCSCGSDFKHKRSLKDHIKAFGNGHRAYGIDSCLDQDDEPGSEIEQENNESLISNHS

SEQ ID NO: 55452 - protein, 256 aa, Glycine max
  peptide (1)..(256): Ceres Seq. ID no. 14308666
MKVNKEKEKELLSIMSSNNNSLDDETVTVALHLGLPSTTATSSADLTSNMYSEKEEKATFASEYSPTRINKGQYWIPTPAQILIGPTRFSCPLCCKTFNRYNNMQMHMWGHGSQYRKGPESLRGTQPTAMLRLPCYCCAQGCKNNIDHPRAKPLKDFRTLQTHYKRKHGIKPFMCRKCCKAFAVRGDWRTHEKNCGKLWYCSCGSDFKHKRSLKDHIKAFGNGHRAYGIDSCLDQDDEPGSEIEQENNESLISNHS

SEQ ID NO: 55453 - protein, 242 aa, Glycine max
  peptide (1)..(242): Ceres Seq. ID no. 14308667
MSSNNNSLDDETVTVALHLGLPSTTATSSADLTSNMYSEKEEKATFASEYSPTRINKGQYWIPTPAQILIGPTRFSCPLCCKTFNRYNNMQMHMWGHGSQYRKGPESLRGTQPTAMLRLPCYCCAQGCKNNIDHPRAKPLKDFRTLQTHYKRKHGIKPFMCRKCCKAFAVRGDWRTHEKNCGKLWYCSCGSDFKHKRSLKDHIKAFGNGHRAYGIDSCLDQDDEPGSEIEQENNESLISNHS

SEQ ID NO: 55454 - DNA, 1802 bp, Glycine max
  misc_feature (1)..(1802): Ceres Seq. ID no. 15225119
gtcagctacgtaggccccccccccccaaaaaattagaaaatcaaaagcagtcattcgaccaggaacacgcacgcttgagcaaagaactgtcgaataatgccgatacaatcgctgaattgcgaaaagaaatcgctcgattgatgggcgaaaatgagaaactattgaaaaatcaagccgttgctattcaaccagagagtacaagtaacagagacgatgagatccagaaattagaaaaaattgtgaatgaattacgtgaggaaaaggcaaatatggaagccgaattacaggtgctaaacgatcaagtcattaaaaacttagaaattgaagaccgaatcaagagcaccgtttttgaacttgacacaaagaacattgaaatcgccgaattgaaaaatagtttacaacaaattaaagagaatcaaaatgtgccacctgcggctatagatccgaccacgcaacaacaaatcgctgaattaaccgcaaaattgctagagaaagacgcactgcaccagtctaacatcgatttattgaatgcccaatggcaacaagtggttgatcaaaaatgtgctgaagtagcagacagttggcgtcatcatttgcaattgaaagaggaagaattcgcagccgtggaaagcgatttacgtgagaaaatgctacaacttgagcaacaatcgaataccagttcaacaacacctgaaacacaaaatacacctacctctggtgattcacgatcaaatatccaagaatcacctgaactcaaatctgacattgcgaacgccgatcaaagtgaactcgttaaaacgatgcaaagtgcattggagcaacaggaactggaaatagtttcgcttaaagaacagttggccattcgcagtgctgaatatgcccgaattgctgcgtccgtcgacccgtatgccatgaaatccacatcgagtaacagtttccaatcggttagtcaaacagaagaaactccatcgaaaggaaatgaattggatttggcactttatatgctacatcaacgtgatatgcggtgcgaagaactaaccgaagaagtgatacacttgctggaggaacgtgatacactacagctgaaactatcgaattccattcgccagattgaggagttcaaacagcgaactggagctgatgccaccgatgcatctgaagcaggcagcagcagtccggttaaatcaaacccagcttcgagcgatgcacagtcctcacacgatggcagttttaatgaacagtcacaaaatttggatttgaaattatctgaattgcacaaagtcagtcattctcgtgataaaaccctaaaggaggagcgtgaccaacggcgtcgtcaaatgaatgtattccaaaaagatgtagcaaacatgccacctgaagcgattgccgaactgtttggacccgatttcaagccaaatacacgaaacacccaaaatgcatcgtcgatgctgatggattggctgtggggacgaagtgataatgaaccacacaactgatgttccatatttaaatcattcaacttctgccaggtgcacgactacagtttgatttgtttctcttttaatctgaaacgattcggttttgatgtgggtgatctgttctttattagaaacgactcgtttaacgacctcaaattaaagtagttgcacttcaaaatcaacatgaattattaaaagccaatatttgaacgtaaaaacacataagcaaaaaaaaatcattcaatttacctgagaagaaaaaaaattatatttgtttttagattttatgatttatcgttaaatgtaaaataataaaaaatattg

SEQ ID NO: 55455 - protein, 497 aa, Glycine max
  peptide (1)..(497): Ceres Seq. ID no. 15225120
QLRRPPPPKKLENQKQSFDQEHARLSKELSNNADTIAELRKEIARLMGENEKLLKNQAVAIQPESTSNRDDEIQKLEKIVNELREEKANMEAELQVLNDQVIKNLEIEDRIKSTVFELDTKNIEIAELKNSLQQIKENQNVPPAAIDPTTQQQIAELTAKLLEKDALHQSNIDLLNAQWQQVVDQKCAEVADSWRHHLQLKEEEFAAVESDLREKMLQLEQQSNTSSTTPETQNTPTSGDSRSNIQESPELKSDIANADQSELVKTMQSALEQQELEIVSLKEQLAIRSAEYARIAASVDPYAMKSTSSNSFQSVSQTEETPSKGNELDLALYMLHQRDMRCEELTEEVIHLLEERDTLQLKLSNSIRQIEEFKQRTGADATDASEAGSSSPVKSNPASSDAQSSHDGSFNEQSQNLDLKLSELHKVSHSRDKTLKEERDQRRRQMNVFQKDVANMPPEAIAELFGPDFKPNTRNTQNASSMLMDWLWGRSDNEPHN

SEQ ID NO: 55456 - protein, 451 aa, Glycine max
  peptide (1)..(451): Ceres Seq. ID no. 15225121
MGENEKLLKNQAVAIQPESTSNRDDEIQKLEKIVNELREEKANMEAELQVLNDQVIKNLEIEDRIKSTVFELDTKNIEIAELKNSLQQIKENQNVPPAAIDPTTQQQIAELTAKLLEKDALHQSNIDLLNAQWQQVVDQKCAEVADSWRHHLQLKEEEFAAVESDLREKMLQLEQQSNTSSTTPETQNTPTSGDSRSNIQESPELKSDIANADQSELVKTMQSALEQQELEIVSLKEQLAIRSAEYARIAASVDPYAMKSTSSNSFQSVSQTEETPSKGNELDLALYMLHQRDMRCEELTEEVIHLLEERDTLQLKLSNSIRQIEEFKQRTGADATDASEAGSSSPVKSNPASSDAQSSHDGSFNEQSQNLDLKLSELHKVSHSRDKTLKEERDQRRRQMNVFQKDVANMPPEAIAELFGPDFKPNTRNTQNASSMLMDWLWGRSDNEPHN

SEQ ID NO: 55457 - protein, 408 aa, Glycine max
  peptide (1)..(408): Ceres Seq. ID no. 15225122
MEAELQVLNDQVIKNLEIEDRIKSTVFELDTKNIEIAELKNSLQQIKENQNVPPAAIDPTTQQQIAELTAKLLEKDALHQSNIDLLNAQWQQVVDQKCAEVADSWRHHLQLKEEEFAAVESDLREKMLQLEQQSNTSSTTPETQNTPTSGDSRSNIQESPELKSDIANADQSELVKTMQSALEQQELEIVSLKEQLAIRSAEYARIAASVDPYAMKSTSSNSFQSVSQTEETPSKGNELDLALYMLHQRDMRCEELTEEVIHLLEERDTLQLKLSNSIRQIEEFKQRTGADATDASEAGSSSPVKSNPASSDAQSSHDGSFNEQSQNLDLKLSELHKVSHSRDKTLKEERDQRRRQMNVFQKDVANMPPEAIAELFGPDFKPNTRNTQNASSMLMDWLWGRSDNEPHN

SEQ ID NO: 55458 - DNA, 1782 bp, Glycine max
  misc_feature (1)..(1782): Ceres Seq. ID no. 15175681
agaactcctacttcaccaaactttcagatgcctcctccctattgggatccacaatctgctgcaaacatcaatccagactttatgggaatgaattacttggattctattgtagaacttcagaagcagacacagatgctcactttggagaatcaaatagatgctgtaaaaactgggactggaggaatcgccaacgatcactatggcttagacgcttctgctgccaatttgggtgggagaaggttttctgaatttccaatgaagatgtgtcactatttcaacaaaggattctgtaagcatggaactagctgcagattctatcatgggcaagttgtccctgagaatttctctcagatgcatgcaaatgatgctattggtgaggatcaggtgatttccccagggtcactggctcagttagagtctgaaattattgagctcctaagagcaaaaggcggtccaatgtcaattgcttccctgccaatggcatactacgataaatataaaaaggtactgcaagcagatggttatttaactgagagtcagaggcatggtaagtctggctatagtttgacaaagcttcttgcacgactgaaaaatagtattcagctaataggcagacctcatgggcagcattcagtggttctggcagaagattctcccacacaaatgcaaaagggagattttgctcgaaatatcagtgcttcataccaaatatatctgacgttcccagctgacagcactttcacagaggatgatgtctcaaactacttcaacacttttggacctgttgcagatgtcagaattccaaaccagcagagaaggatgtttggatttgtgacatttgttcattcagaaactgtcaaaagtgttttggataaggggaatccccattgtgttcggggttctcgggtgcttgtgaaaccttaccgggagaaggcaaaggttaatgaaaggaagtacacagatagaattgagcaccctatttgttattcaccacactatgtagatatggacgctgaacttaactcaattccaagaagttttgggagccattgatccattaggagacacttacaactaattgaacaggaagagcaggagcaagctcttgaacgtcagagaagtcttgcacagctgcattttgcccaaaaatctttcttcagttcacctcattttggcttctccatggatgagtcaaggatttcagatgatcacttcaatttccagccagcagaagaatctttcagttttccactgcatgtcaaatccaggcatacagactccaattactctgatgaggacagcaatgaaggactcaatctcccggacagtccatttgcatttccactagatagatagtgggatgtaaacattcatagtttcagacacatacaagaaatatagagttcaaacagatccaggccaatggtagcagctttcttttgatacataatacagttcttctattgaactatttctcaattagtacagcaatttagtcaaaattccagcaagtacatacacgctgaagaagagacatgggaagaatttcctcttaacaattgggattggtggcattaacagaagtttaatgatacatgtaagaaggttatagtttttaattacagacaggtggcaaaaggtttgaattttagatcgtatagttgggttttattcatgaagtcatcggtggatgaaaagaactaagcgtattattgtacacagttttaattagattgaaggacctcttagaatccgtgtctactcactgtgaaccgctttaac

SEQ ID NO: 55459 - protein, 350 aa, Glycine max
  peptide (1)..(350): Ceres Seq. ID no. 15175682
RTPTSPNFQMPPPYWDPQSAANINPDFMGMNYLDSIVELQKQTQMLTLENQIDAVKTGTGGIANDHYGLDASAANLGGRRFSEFPMKMCHYFNKGFCKHGTSCRFYHGQVVPENFSQMHANDAIGEDQVISPGSLAQLESEIIELLRAKGGPMSIASLPMAYYDKYKKVLQADGYLTESQRHGKSGYSLTKLLARLKNSIQLIGRPHGQHSVVLAEDSPTQMQKGDFARNISASYQIYLTFPADSTFTEDDVSNYFNTFGPVADVRIPNQQRRMFGFVTFVHSETVKSVLDKGNPHCVRGSRVLVKPYREKAKVNERKYTDRIEHPICYSPHYVDMDAELNSIPRSFGSH

SEQ ID NO: 55460 - protein, 341 aa, Glycine max
  peptide (1)..(341): Ceres Seq. ID no. 15175683
MPPPYWDPQSAANINPDFMGMNYLDSIVELQKQTQMLTLENQIDAVKTGTGGIANDHYGLDASAANLGGRRFSEFPMKMCHYFNKGFCKHGTSCRFYHGQVVPENFSQMHANDAIGEDQVISPGSLAQLESEIIELLRAKGGPMSIASLPMAYYDKYKKVLQADGYLTESQRHGKSGYSLTKLLARLKNSIQLIGRPHGQHSVVLAEDSPTQMQKGDFARNISASYQIYLTFPADSTFTEDDVSNYFNTFGPVADVRIPNQQRRMFGFVTFVHSETVKSVLDKGNPHCVRGSRVLVKPYREKAKVNERKYTDRIEHPICYSPHYVDMDAELNSIPRSFGSH

SEQ ID NO: 55461 - protein, 323 aa, Glycine max
  peptide (1)..(323): Ceres Seq. ID no. 15175684
MGMNYLDSIVELQKQTQMLTLENQIDAVKTGTGGIANDHYGLDASAANLGGRRFSEFPMKMCHYFNKGFCKHGTSCRFYHGQVVPENFSQMHANDAIGEDQVISPGSLAQLESEIIELLRAKGGPMSIASLPMAYYDKYKKVLQADGYLTESQRHGKSGYSLTKLLARLKNSIQLIGRPHGQHSVVLAEDSPTQMQKGDFARNISASYQIYLTFPADSTFTEDDVSNYFNTFGPVADVRIPNQQRRMFGFVTFVHSETVKSVLDKGNPHCVRGSRVLVKPYREKAKVNERKYTDRIEHPICYSPHYVDMDAELNSIPRSFGSH

SEQ ID NO: 55462 - DNA, 1735 bp, Glycine max
  misc_feature (1)..(1735): Ceres Seq. ID no. 14315110
gtgagtgtttttgttcctcaatcaatctaattctcccatttctcttccaatggcgtcttctctttccaccaaaccattctcagccgacgctctctccgccttcgcttctctcaattccgatctcggatccctctcccccgcctacctccgactctcactccgtcctcgtcttcccaagagacttcacatacaggcggctgggagtacctatggaaatcactttcgtgttacaacatatggggaatcacatggaggaggtgttggttgtgttattgatggatgtcctcctcgccttcctctctctgaagctgatatgcaagtggatcttgacagaaggaggccaggtcagagccgaattacaactcctagaaaggagactgatacatgtaaaatattttcaggagtttccgaaggaatcactactggaactccaattcatgtatctgtacccaatactgatcaaagaggacatgactatagcgagatggcagtagcttataggccctcccatgcagatgctacctatgacatgaagtatggtgtcagatcagttcagggtggtggtagatcttctgcaagagaaacaattggaagggttgcttctggtgctgttgctaagaaaatccttaaagaattttctggaactgagattctggcctatgtctctcaagttcataagattgttcttccagaggaccttattgatcatgacactctgactcttgatcagattgagagtaacattgttcgatgtccagacccggagtatgcagagaagatgatatctgcaattgatgctgtgcgagtgagaggtgattctgttggtggtgttgtgacatgcattgtgaggaactgtccacgaggtctcggttcaccagtatttgacaaacttgaagctgagctggctaaagctgcaatgtcattgcctgcaaccaagggctttcagtttggtagtgggtttgcaggcacctttttgactgggagtgaacacaatgatgagttctatatagatgaacatggaaacacaagaacaagaacaaatcgctctggtgggatacagggtggaatttccaatggggaaatcattaatatgagaatagctttcaagccaacatcaacaattggaaagaagcaaaagactgtgactcgagataaaaaagaaacagagtttatagcccgtggtcgccatgatccttgtgttgtcccaagagctgtacctatggtagaagcaatggtagctttggttcttgtggaccaattgatggcacaatatgcgcagtgtaatctttttcccgtaaactcagatttgcaagaacccttggtgcccatactacggccagaagaagcgctcctctgaagaggaagggggtccataaatcagtaattggcctttgataaaatcttccttatggctagtgtttaattgacacggttaattcactttgatgacaagtccaagtgaacattgtggcagatatttttgcgggtgcaatctatcgttttgtattaatgtaagttaaactatgttttcttttcctctcttcttctattttcattctgagggtgaacattgtttctagtaaaccttgttgcaaaagcagagatagatgtattcttaaagtgaactgatattaaaaattgtaagaaacgtatcagtttttggtcttaataagtgttgctctgctttgcaataaatgaaagctttggcaactttaactggctgttcacattatgt

SEQ ID NO: 55463 - protein, 435 aa, Glycine max
  peptide (1)..(435): Ceres Seq. ID no. 14315111
MASSLSTKPFSADALSAFASLNSDLGSLSPAYLRLSLRPRLPKRLHIQAAGSTYGNHFRVTTYGESHGGGVGCVIDGCPPRLPLSEADMQVDLDRRRPGQSRITTPRKETDTCKIFSGVSEGITTGTPIHVSVPNTDQRGHDYSEMAVAYRPSHADATYDMKYGVRSVQGGGRSSARETIGRVASGAVAKKILKEFSGTEILAYVSQVHKIVLPEDLIDHDTLTLDQIESNIVRCPDPEYAEKMISAIDAVRVRGDSVGGVVTCIVRNCPRGLGSPVFDKLEAELAKAAMSLPATKGFQFGSGFAGTFLTGSEHNDEFYIDEHGNTRTRTNRSGGIQGGISNGEIINMRIAFKPTSTIGKKQKTVTRDKKETEFIARGRHDPCVVPRAVPMVEAMVALVLVDQLMAQYAQCNLFPVNSDLQEPLVPILRPEEALL

SEQ ID NO: 55464 - protein, 347 aa, Glycine max
  peptide (1)..(347): Ceres Seq. ID no. 14315112
MQVDLDRRRPGQSRITTPRKETDTCKIFSGVSEGITTGTPIHVSVPNTDQRGHDYSEMAVAYRPSHADATYDMKYGVRSVQGGGRSSARETIGRVASGAVAKKILKEFSGTEILAYVSQVHKIVLPEDLIDHDTLTLDQIESNIVRCPDPEYAEKMISAIDAVRVRGDSVGGVVTCIVRNCPRGLGSPVFDKLEAELAKAAMSLPATKGFQFGSGFAGTFLTGSEHNDEFYIDEHGNTRTRTNRSGGIQGGISNGEIINMRIAFKPTSTIGKKQKTVTRDKKETEFIARGRHDPCVVPRAVPMVEAMVALVLVDQLMAQYAQCNLFPVNSDLQEPLVPILRPEEALL

SEQ ID NO: 55465 - protein, 290 aa, Glycine max
  peptide (1)..(290): Ceres Seq. ID no. 14315113
MAVAYRPSHADATYDMKYGVRSVQGGGRSSARETIGRVASGAVAKKILKEFSGTEILAYVSQVHKIVLPEDLIDHDTLTLDQIESNIVRCPDPEYAEKMISAIDAVRVRGDSVGGVVTCIVRNCPRGLGSPVFDKLEAELAKAAMSLPATKGFQFGSGFAGTFLTGSEHNDEFYIDEHGNTRTRTNRSGGIQGGISNGEIINMRIAFKPTSTIGKKQKTVTRDKKETEFIARGRHDPCVVPRAVPMVEAMVALVLVDQLMAQYAQCNLFPVNSDLQEPLVPILRPEEALL

SEQ ID NO: 55466 - DNA, 1694 bp, Glycine max
  misc_feature (1)..(1694): Ceres Seq. ID no. 15175690
gaccaaaaaataattaggaaaaaaataaaaagatggaaagataatgtggttccgattcaaaccacacgattccacgaccttattatggagccgcggtggcggtagcggtggccggcgattataacggcggaggagtaagagatggttgtgttgtgaggaagattggtaagctgtgggaacatgtcgttgagaagcatagtccgtgaactcaaggagatgagagatggaattggcagcacatcaaagcggggtgcagaaagcaagcattggctcagtcggacaaagtcacatgtagcaccagatattcttgctactccatttgaacctattcaacagggacaatgggcaaatctaccatcagaattgcttctggacataatccagaggatcgaagagagtgagacatcttggcctgcccgtgctgttgttgtcttttgtgcttcagtatgtaaatcatggaggtccattacaagagagattgtcaagactcctgaacaatgtggaaggatcacatttcccatttcattgaagcagccgggtccgcgtgattctccaatacagtgctttatcaggaggaacaaagaaacttctacatatctattgtactttggtctggttccatcagagaatgacggtaataagttgttattagctgccaaaaggataagaagggcaacggacactgactttatcatatccttggctgcagatgatttttctcgagccagcaacaaatatgttggtaaactaaggtctaattttttaggtaccaagttcaccatatttgacagtcaagctccaaatgatgttgcaattcaaccaaattgtcaatctagtaggagatttcattctaagcaggtgtcaccaagacttccagcttgtaattatcttgttagcactgtttcctacgagctgaatgtcctatgcactagagggccaagaagaatgtactgtgtcatgaactccatacctgtctcagctattcaggaaggcggcaatgccccaactccagcatcttaccctcaaatatttgatgaacatttttctccatcaccagcactgaaagaaaaagttccagtcacagatttaaactctgcaagcttatcagagccaccagtatcgagccaatgctcagccgagcaattagcactgaaaaacagggctcccagatggcatgagcagcttcagtgctggtgcctaaacttcaagggtcgtgtttcagtggcttctgttaagaactttcaacttgtagctgttgttgatccatctcataatatttctgctgaggagcaagaaaaggtaatcttgcagtttggaaagattggaaaagacatattcaccatggattactgttatccgctctctaccttccaagcctttgccatctgcttgagcagctttgacactaaacctgcctgtgaatgagaagcgttacattactacattgtaattgacatctgctgagttgctggttgtcaatcatggtggcatgcagctgaaaatcatagctgttctgccgttagtattttccccttgaattggttgctgattctggaatttgttcaatctgttgtttcgtggtcctgtaaaattaaaattaaatgaagtttagtgaattctgtaatatatatgtttctggtgttcctcactcacgaatactttgatctgcttaaatactgagttttcagttgccg

SEQ ID NO: 55467 - protein, 414 aa, Glycine max
  peptide (1)..(414): Ceres Seq. ID no. 15175691
MSLRSIVRELKEMRDGIGSTSKRGAESKHWLSRTKSHVAPDILATPFEPIQQGQWANLPSELLLDIIQRIEESETSWPARAVVVFCASVCKSWRSITREIVKTPEQCGRITFPISLKQPGPRDSPIQCFIRRNKETSTYLLYFGLVPSENDGNKLLLAAKRIRRATDTDFIISLAADDFSRASNKYVGKLRSNFLGTKFTIFDSQAPNDVAIQPNCQSSRRFHSKQVSPRLPACNYLVSTVSYELNVLCTRGPRRMYCVMNSIPVSAIQEGGNAPTPASYPQIFDEHFSPSPALKEKVPVTDLNSASLSEPPVSSQCSAEQLALKNRAPRWHEQLQCWCLNFKGRVSVASVKNFQLVAVVDPSHNISAEEQEKVILQFGKIGKDIFTMDYCYPLSTFQAFAICLSSFDTKPACE

SEQ ID NO: 55468 - protein, 402 aa, Glycine max
  peptide (1)..(402): Ceres Seq. ID no. 15175692
MRDGIGSTSKRGAESKHWLSRTKSHVAPDILATPFEPIQQGQWANLPSELLLDIIQRIEESETSWPARAVVVFCASVCKSWRSITREIVKTPEQCGRITFPISLKQPGPRDSPIQCFIRRNKETSTYLLYFGLVPSENDGNKLLLAAKRIRRATDTDFIISLAADDFSRASNKYVGKLRSNFLGTKFTIFDSQAPNDVAIQPNCQSSRRFHSKQVSPRLPACNYLVSTVSYELNVLCTRGPRRMYCVMNSIPVSAIQEGGNAPTPASYPQIFDEHFSPSPALKEKVPVTDLNSASLSEPPVSSQCSAEQLALKNRAPRWHEQLQCWCLNFKGRVSVASVKNFQLVAVVDPSHNISAEEQEKVILQFGKIGKDIFTMDYCYPLSTFQAFAICLSSFDTKPACE

SEQ ID NO: 55469 - DNA, 1286 bp, Glycine max
  misc_feature (1)..(1286): Ceres Seq. ID no. 14308536
aaaacccaaaacctcttcttcttactctcttacgttaattcttcgttgtctatgatggcattggatatgattgatgttgttcccaggacgaggatggaagaagaaaatatagcaatacaagaagcagcttccgctgggttaaagagcatggagcatctcattcgtctcctttctccttcttcttctcttcacaacaacgttaataatctcaatctcaaccacctcgactgctccgaaatcaccggcttcactgtctccaagttcaaacaagtcatcaaccttctcaaccgcaccggccacgcccgcttccgccgctctccaccccaagcccaagcccaagcccaagcccaagcccaagcccaaactaatcctcaaccacaacctcagatccaacaacaagggttcagtttagatttcgtgaagcccaccattctaaactcaaagcccatcaacaaagacgaaactttgactctttcaacaacctcttcttccttcatgtcctccgtcaccaacgacgccagcgtctccgacggcaagatcggacctttcctccctccctccgccgccaaaccccctctctcctccgcccaccggaaaaagtgccgcgacgccgccgcagcactctccgccaaaccctcctgccactgctccaagaaaaggaaatcacgcgtgaaacgaacgattcgggtgccggcgataagctcaaagatcgcagatatcccaccggacgagtattcgtggagaaaatacggtcaaaaaccgatcaagggctcaccttaccctcgagggtactacaagtgcagcaccgtgagagggtgtccggcgaggaagcacgtggagcgagcgcaggatgaccccaagatgctaatagtgacttacgagggtgagcaccgtcacgtgctgccgttaacttccgccgccggcgttagtttcggccattgagttaatcgacggcgtcttttggaaacttgacgggggacgttaaatgagcgtcggatcgtgaagtaacggcggatgcgaacaaggatcgattcggttcgaggacggaaaaagaaaagtggcaactaaagtcaactttcgcgttgtggaatgattttgttgacgaggacttttgtgtaaatttgaccccaagtaaagtagtgcaggtctcaaagaatgaaaattatagtgatctcatctgtttttctttatttctattttttttttaaaagagacatttatttatttatttatttgatgttagagttgaattggttgaaggatggggctgcaataattttcttggt

SEQ ID NO: 55470 - protein, 313 aa, Glycine max
  peptide (1)..(313): Ceres Seq. ID no. 14308537
KTQNLFFLLSYVNSSLSMMALDMIDVVPRTRMEEENIAIQEAASAGLKSMEHLIRLLSPSSSLHNNVNNLNLNHLDCSEITGFTVSKFKQVINLLNRTGHARFRRSPPQAQAQAQAQAQAQTNPQPQPQIQQQGFSLDFVKPTILNSKPINKDETLTLSTTSSSFMSSVTNDASVSDGKIGPFLPPSAAKPPLSSAHRKKCRDAAAALSAKPSCHCSKKRKSRVKRTIRVPAISSKIADIPPDEYSWRKYGQKPIKGSPYPRGYYKCSTVRGCPARKHVERAQDDPKMLIVTYEGEHRHVLPLTSAAGVSFGH

SEQ ID NO: 55471 - protein, 296 aa, Glycine max
  peptide (1)..(296): Ceres Seq. ID no. 14308538
MMALDMIDVVPRTRMEEENIAIQEAASAGLKSMEHLIRLLSPSSSLHNNVNNLNLNHLDCSEITGFTVSKFKQVINLLNRTGHARFRRSPPQAQAQAQAQAQAQTNPQPQPQIQQQGFSLDFVKPTILNSKPINKDETLTLSTTSSSFMSSVTNDASVSDGKIGPFLPPSAAKPPLSSAHRKKCRDAAAALSAKPSCHCSKKRKSRVKRTIRVPAISSKIADIPPDEYSWRKYGQKPIKGSPYPRGYYKCSTVRGCPARKHVERAQDDPKMLIVTYEGEHRHVLPLTSAAGVSFGH

SEQ ID NO: 55472 - protein, 295 aa, Glycine max
  peptide (1)..(295): Ceres Seq. ID no. 14308539
MALDMIDVVPRTRMEEENIAIQEAASAGLKSMEHLIRLLSPSSSLHNNVNNLNLNHLDCSEITGFTVSKFKQVINLLNRTGHARFRRSPPQAQAQAQAQAQAQTNPQPQPQIQQQGFSLDFVKPTILNSKPINKDETLTLSTTSSSFMSSVTNDASVSDGKIGPFLPPSAAKPPLSSAHRKKCRDAAAALSAKPSCHCSKKRKSRVKRTIRVPAISSKIADIPPDEYSWRKYGQKPIKGSPYPRGYYKCSTVRGCPARKHVERAQDDPKMLIVTYEGEHRHVLPLTSAAGVSFGH

SEQ ID NO: 55473 - DNA, 1118 bp, Glycine max
  misc_feature (1)..(1118): Ceres Seq. ID no. 14312730
ttattagtttctatataaatataaggacttaaatattaagtctatcaggaacaacatatatatgctcatcccttctcctctggtttacaaagttctctttaagctgtggtgaagaaagtcatgatcaactaatatttactttatcactgcctctcaaactagaggttttatttggttactttctcattgagcatgtcaataaaagtttgtctatagagacccttattacgctattgcttgcaggtaatggatgagtatgacgagcaatccgaggttgctgaccgacttagaatcagggtatttctcttctattctcttgattactatttactgagtatcaaatgaaacttaatctggataaaactgacctacctcccttggagacagctaagtatcagccatcaggttaatctaaatgtttgttggccaacttgtcttcaatgttccgtggttagtcttcatttgcatgatttctctagtttactctaattaactggtgcacatgccattttcgttttgggtctggtttatcttggcattgctttttatgattatctctaaaactatctttactttcttcacctctcttttatggttaattccatcttcttcctatccgcgatatagatatcggttgtgcatcatttttgctactagctactgcatgtaatcactacactttctagtattcatgctttatgatatgttgaatatgaagcggaaacaaactgatgcaggccgtgcctcttttccacttctacaaagatggggtcctgttggaagcattcccaaccagagacaaagataggattcttgcagctattctcaagtactcatctcttgaagctgaagatatcttaggttaacatcaagagatggggtcatggcaccctcggggactgttgtgcactgcagggaaattagtaaatttttgtacgtgacaaagttcattaaacagcatgttgtatacacaaaataaaatactttagtcctgtcagcctaattcactttgttaggataggatattttcttgcaaaatatctagtgaagagtttaatgtacactacgatacgccttctctttctccagaggtcataaataaaattttcattctgctt

SEQ ID NO: 55474 - protein, 55 aa, Glycine max
  peptide (1)..(55): Ceres Seq. ID no. 14312731
MPFSFWVWFILALLFMIISKTIFTFFTSLLWLIPSSSYPRYRYRLCIIFATSYCM

SEQ ID NO: 55475 - protein, 44 aa, Glycine max
  peptide (1)..(44): Ceres Seq. ID no. 14312732
MQAVPLFHFYKDGVLLEAFPTRDKDRILAAILKYSSLEAEDILG

SEQ ID NO: 55476 - protein, 40 aa, Glycine max
  peptide (1)..(40): Ceres Seq. ID no. 14312733
MIISKTIFTFFTSLLWLIPSSSYPRYRYRLCIIFATSYCM

SEQ ID NO: 55477 - DNA, 1426 bp, Glycine max
  misc_feature (1)..(1426): Ceres Seq. ID no. 14308148
aatttttttttcattcaaggacaacatgtagagtttttttatagcaactacgggccagaaaaatgtagagtaaacattatggatcaattcataaacattttttcacgtggggaggaaaatgtgagttgtgatttagtgaataaaattttaacaatatatcaaattgttacacaactgatcatggaccttgcctgagcctgaaccatcattttttttaagttagagctttaagaatacagcaggacataatgtttttcttggagtaggagaatgtgaggttggcagtggaaagatgcctgttgcatttactgtctcttgatctgtgattgttttttggtccctttattaataaaattgagttgagagtcatgactacaggagctgaaactattcactgagcagtcttagtaatatatacattaacaaaaggtaatatacgtatacagactttatatttttattttttcaatttaagcgtcctatacttcagtgacagactagtgtgtggttttttataacttccaatttatcttccgagcttgaccgttgattctacattgcagagggaaaaatcccatgaattggttagagtgacaagtcccatggtctactagtctttattctttaccaagtaacatacatagtatcttcaacaaggacttatctgcatacattgtggcactaaaattcattttatatcgtaaatttgaaacccaagacatgtatagacatctcagctgcacagtgagactaatggtgggtaagcattctcacatgcgtgggagaaaaaaggaaagatttacttgttttaagtatatattaatttatttggtctctccttttaaaatcttctcccagggagcaaattttgctgatgttatacaaatgactgacatctttgaggggagtattattcggagtgctagaaggcttgacgagtttttgaatcagttgcgtgctgctgctaatgcagttggagaggctgacttggagaagaaatttgcagctgcaagtgaaagccttcgacgaggtattatgtttgcaaattctttgtatctgtgacttgtttttctccagaccttacgttatatctcacggtcattccggctggctgaaagtttactttcccatccaaccttttggcatgcacccacttccttctcttaaaagctttctggtgtaaatatttgtatgctgtcactaatggtaaagggtgtgaatatagagtgatagaaaaatctggtcaatagatagaaaattccggtcaataaaggttcatcttgagagtcgcagatcattcatttatttaccttcagaacctctagtctgtctggggcttgaggagtgagggtgccgaagatatttgtttgtaatttgctgaaaaattttcaatacaaattttgattgatagttcattattttagtg

SEQ ID NO: 55478 - protein, 113 aa, Glycine max
  peptide (1)..(113): Ceres Seq. ID no. 14308149
MYRHLSCTVRLMVGKHSHMRGRKKERFTCFKYILIYLVSPFKIFSQGANFADVIQMTDIFEGSIIRSARRLDEFLNQLRAAANAVGEADLEKKFAAASESLRRGIMFANSLYL

SEQ ID NO: 55479 - protein, 102 aa, Glycine max
  peptide (1)..(102): Ceres Seq. ID no. 14308150
MVGKHSHMRGRKKERFTCFKYILIYLVSPFKIFSQGANFADVIQMTDIFEGSIIRSARRLDEFLNQLRAAANAVGEADLEKKFAAASESLRRGIMFANSLYL

SEQ ID NO: 55480 - protein, 95 aa, Glycine max
  peptide (1)..(95): Ceres Seq. ID no. 14308151
MRGRKKERFTCFKYILIYLVSPFKIFSQGANFADVIQMTDIFEGSIIRSARRLDEFLNQLRAAANAVGEADLEKKFAAASESLRRGIMFANSLYL

SEQ ID NO: 55481 - DNA, 1182 bp, Glycine max
  misc_feature (1)..(1182): Ceres Seq. ID no. 15169220
ttacttggaagatgggaagcagggacgccttcattgtcttgtttgcggcactggcactggcaggtctgcaaaagattttccagatatgcatgctctcattatgcacacatacaacccagataatgccgattcacgtattgatcatttgggattacacaaagctctgtgtgttttaatgcgttggaactactcaaagcctcctgataactcaaaggcatatcagtttttacctgctgatgaagcagcagcaaatcaggatgatctgatcatgtggccacctttggtgatcattcataacacaaataccggaaaaaatagagatggtcgtatggagggtttgggaaacaaaatgatggataataaaattagagagcttggatttgtgggtggcaaatcaaagtcattatacggaagagatggtcatttgggcataacactggttaaatttgctggggaccaatcaggctttaaggaggccattcgacttgctgaacactttgagaaggaaaaccatggacgcaaggattgggaccgtgtgcagtcacaaacattaggaaaggatgatgagaataatgcaaaccttgtgaaggtggatgagaaaaaagtagataaaaggagggttttgtatggctatcttgggactgcttttgatcttgacaaagttgattttgacacaaggaagaaggctttcatagagagcaggagagaatacaaaccacccatgtagtttttggactatacatgggaatggctatgtaaaatggaatacatggaaagtttttccagttgcattataatcccgattcctgaagatgataaaaagcttttatgtattgtgctgaccatttcatgtacaataggaggcagcattgccatcatttttattttattccacataatttatgctgaattttcctgccatagtaatatttaggcacattaagaagatttgtttgtctttccaccatctgacaacctggaacgcactactcacttaaagtcaatgactggaatctaaagtcttggtcttgtcctcgcttttctccatgttgtctgggaactgtttgtttacagtttagattttttcaattacaatggtggggcatggaaatttgtacgcatgatttcctgccaactctgtaaatccctcattagtagccctcctagtagttgattgtttgt

SEQ ID NO: 55482 - protein, 241 aa, Glycine max
  peptide (1)..(241): Ceres Seq. ID no. 15169221
YLEDGKQGRLHCLVCGTGTGRSAKDFPDMHALIMHTYNPDNADSRIDHLGLHKALCVLMRWNYSKPPDNSKAYQFLPADEAAANQDDLIMWPPLVIIHNTNTGKNRDGRMEGLGNKMMDNKIRELGFVGGKSKSLYGRDGHLGITLVKFAGDQSGFKEAIRLAEHFEKENHGRKDWDRVQSQTLGKDDENNANLVKVDEKKVDKRRVLYGYLGTAFDLDKVDFDTRKKAFIESRREYKPPM

SEQ ID NO: 55483 - protein, 213 aa, Glycine max
  peptide (1)..(213): Ceres Seq. ID no. 15169222
MHALIMHTYNPDNADSRIDHLGLHKALCVLMRWNYSKPPDNSKAYQFLPADEAAANQDDLIMWPPLVIIHNTNTGKNRDGRMEGLGNKMMDNKIRELGFVGGKSKSLYGRDGHLGITLVKFAGDQSGFKEAIRLAEHFEKENHGRKDWDRVQSQTLGKDDENNANLVKVDEKKVDKRRVLYGYLGTAFDLDKVDFDTRKKAFIESRREYKPPM

SEQ ID NO: 55484 - protein, 208 aa, Glycine max
  peptide (1)..(208): Ceres Seq. ID no. 15169223
MHTYNPDNADSRIDHLGLHKALCVLMRWNYSKPPDNSKAYQFLPADEAAANQDDLIMWPPLVIIHNTNTGKNRDGRMEGLGNKMMDNKIRELGFVGGKSKSLYGRDGHLGITLVKFAGDQSGFKEAIRLAEHFEKENHGRKDWDRVQSQTLGKDDENNANLVKVDEKKVDKRRVLYGYLGTAFDLDKVDFDTRKKAFIESRREYKPPM

SEQ ID NO: 55485 - DNA, 1628 bp, Glycine max
  misc_feature (1)..(1628): Ceres Seq. ID no. 14308813
agtgcagtgtgaagtgcgtataatccatattctcatggcttccgttgcattcagaaacctaaattctaagcgcttccttttctctttgcatttcacaaatgctaattaccattcactctctcgtggaacttgcaccgtcatatcccaaaactgcaataatgcatttcctttggagctcgtttctctacggagatccttagccactttcgctcgaacaaagccccatcttaacgtgggcacaattgggcatgttgatcatgggaaaaccacactgactgctgcaattaccaaggtgctagctgaagaaggtaaagctaaggccattgcctttgaggacatagacaaggctcccgaggagaagaagagagggattactattgcgactgctcatgtagagtacgagacagcaaagaggcactatgcccatgttgattgcccaggacatgcagactatgttaagaacatgataactggagctgcacaaatggatggtggaattcttgtcgtttctgctcctgatgggccaatgcctcaaacaaaggaacatatactgcttgctcgtcaggttggtgtgccatcattggtctgctttctaaataaggttgatgctgttgatgatccagagttgcttgaacttgtggaaatggagcttcgtgaactgcttaatttctacaaatttcctggggatgatattccaattgtacgaggttctgctctggctgcattgcagggaactaatgaagaacttggaaagaaggctatcttaaaactaatggatgctgtggatgaatacatttcggatcctgtgcggcaacttgacaaacctttcttaatgccagtagaagatgttttctcaattcaggggcgtggaactgttgtgactggtcgtgttgaacaaggcaccatcaaagtaggtgaggaggttgaagtattgggactaacacagagtggacctttgaagactactgtaactggtgtggaaatgttcaagaaaattttggatcgaggggaagctggtgataatgtgggacttcttctacgtggtctgaagcgcgatgatgtacagagaggaatggtcgtgaccaagcctggtgcatttaaaacatataagaagtttgaagcagagatttatgttctctcaaaagatgaaggtggccgtcatactgcttttttctctaattataagccacagttttacttgaggactgcagatgttaccggaaaggtggaattaccggaaagtgttaagatggttatgcctggtgataatgtgactgctacttttgagctgatatcacctgttcctcttgaaataggacaaagatttgctttgagagagggaggcagaacagttggtgcaggagttgtttccaaagtgatggcctaggatgttggtctaaattctacaacatcttttgtaatttgtaaataagttgagtagggactgagagctatgttctaggaggattctatggtgtgactattttttgacacttggtgcgctggttccgtttcaatgtgttttgttttgtttattttagagaattatactagttcattatgtttttcgtggaccagagggaaaatggttcaaattttttggtttagttaataatgtcaatttcttc

SEQ ID NO: 55486 - protein, 461 aa, Glycine max
  peptide (1)..(461): Ceres Seq. ID no. 14308814
VQCEVRIIHILMASVAFRNLNSKRFLFSLHFTNANYHSLSRGTCTVISQNCNNAFPLELVSLRRSLATFARTKPHLNVGTIGHVDHGKTTLTAAITKVLAEEGKAKAIAFEDIDKAPEEKKRGITIATAHVEYETAKRHYAHVDCPGHADYVKNMITGAAQMDGGILVVSAPDGPMPQTKEHILLARQVGVPSLVCFLNKVDAVDDPELLELVEMELRELLNFYKFPGDDIPIVRGSALAALQGTNEELGKKAILKLMDAVDEYISDPVRQLDKPFLMPVEDVFSIQGRGTVVTGRVEQGTIKVGEEVEVLGLTQSGPLKTTVTGVEMFKKILDRGEAGDNVGLLLRGLKRDDVQRGMVVTKPGAFKTYKKFEAEIYVLSKDEGGRHTAFFSNYKPQFYLRTADVTGKVELPESVKMVMPGDNVTATFELISPVPLEIGQRFALREGGRTVGAGVVSKVMA

SEQ ID NO: 55487 - protein, 450 aa, Glycine max
  peptide (1)..(450): Ceres Seq. ID no. 14308815
MASVAFRNLNSKRFLFSLHFTNANYHSLSRGTCTVISQNCNNAFPLELVSLRRSLATFARTKPHLNVGTIGHVDHGKTTLTAAITKVLAEEGKAKAIAFEDIDKAPEEKKRGITIATAHVEYETAKRHYAHVDCPGHADYVKNMITGAAQMDGGILVVSAPDGPMPQTKEHILLARQVGVPSLVCFLNKVDAVDDPELLELVEMELRELLNFYKFPGDDIPIVRGSALAALQGTNEELGKKAILKLMDAVDEYISDPVRQLDKPFLMPVEDVFSIQGRGTVVTGRVEQGTIKVGEEVEVLGLTQSGPLKTTVTGVEMFKKILDRGEAGDNVGLLLRGLKRDDVQRGMVVTKPGAFKTYKKFEAEIYVLSKDEGGRHTAFFSNYKPQFYLRTADVTGKVELPESVKMVMPGDNVTATFELISPVPLEIGQRFALREGGRTVGAGVVSKVMA

SEQ ID NO: 55488 - protein, 307 aa, Glycine max
  peptide (1)..(307): Ceres Seq. ID no. 14308816
MITGAAQMDGGILVVSAPDGPMPQTKEHILLARQVGVPSLVCFLNKVDAVDDPELLELVEMELRELLNFYKFPGDDIPIVRGSALAALQGTNEELGKKAILKLMDAVDEYISDPVRQLDKPFLMPVEDVFSIQGRGTVVTGRVEQGTIKVGEEVEVLGLTQSGPLKTTVTGVEMFKKILDRGEAGDNVGLLLRGLKRDDVQRGMVVTKPGAFKTYKKFEAEIYVLSKDEGGRHTAFFSNYKPQFYLRTADVTGKVELPESVKMVMPGDNVTATFELISPVPLEIGQRFALREGGRTVGAGVVSKVMA

SEQ ID NO: 55489 - DNA, 1772 bp, Glycine max
  misc_feature (1)..(1772): Ceres Seq. ID no. 15177814
aatgtaatgtaatgcagcaaagagggaaaggtaacaaccgtagatccaggagtttctcaaggtcccgtctcgctgttgaaggcacttagccacacacacacacccaccgctttcagctatggatgagcgtcacattcagaaatcttactggcttcagcattccgccgatctctccgtcgaggcaatgatgctcgattccaaagccgctcatctcgacaaagaagagagacccgaggtgctttccctattacctccattcgaaggcaagtccgttattgagcttggtgctggtattggtcgatttactggtgaattggctctgaaagctggtcaattgcttgctgtggacttcattgacactgctatcaagaagaatgaaaccatcaatggacaccacaaccatgtcaaattcttgtgtgctgatgtcacatctccaaatatgtcaaataacgtttctgaaggatccgttgacgtcgttttctcaaattggttacttatgtatctctcagatattgaggttgaaaaattagctgaaaggatggtcagatggttaaaagatggtggatatatattctttagagaatcttgtttccaccaatctggagattcaaagagaaaatacaaccctactcactacagggaacccagattttataccaaggtatttaaagagtgccatatgagtgataatactgggaattcctttgagctttctcttgtgggatgtaaatgcattggagcttatgttcgaaataagaagaatcaaaaccagatttgctggatatggcagaaagttaggtcacaagatgataggggtttccagcgcttcttggatagagttgaatacagccacaagagtattttacgatatgaacggatgtatggcccaggctttgtgagcactggtggacttgaaacgacaaaggagtttgtggcaaagctgggactaaagcctggtcagaaagttctggatgttggttgtggtgttgggggaggtgatttctacatggctgagaattttgatgttgaggttattggcattgacctctccataaacatgatttctcttgctattgaacgtgctattggactgaactacgctgttgaatttgattgtgcggattgctatagaaaaacatatcctgagaatacatttgatgtaatatacactcgggacaccatgctgcacgtcaaagataaaccaacattattcagatcattttacaagtggttgaagcctggaggaaaaattctaatcacagattactgcaaaagtgctggaagtccatctttagaatttgctgagtacataaaaaaaggaggatattatctccatgacattaaagcgtataggcagatgcttgaggatgcgggatttgatgatgtcattgccgaggatcgaactgatcagtttgtgaacacgctacagcaggagttaaatgcccttgagaacaagaaggacgattttattggtgacttcagcgaggaagactacaatgagattgtcgaaagatggaaggcaaagcagaccaggggtgcatctagagagcagatgtggggcttgttcattgccaagaaaaattgacatgctttattgctatcatatgccttgttctagctatatttaattcctgtgtggccggaatagttatctgtgtcttttatgttggtttaagattcatagctgctttcgaattagaatgacgatctgctgagaggagaatgctcttcgatttgaataacaatggtcacttgccattggcttccttgct

SEQ ID NO: 55490 - protein, 488 aa, Glycine max
  peptide (1)..(488): Ceres Seq. ID no. 15177815
MDERHIQKSYWLQHSADLSVEAMMLDSKAAHLDKEERPEVLSLLPPFEGKSVIELGAGIGRFTGELALKAGQLLAVDFIDTAIKKNETINGHHNHVKFLCADVTSPNMSNNVSEGSVDVVFSNWLLMYLSDIEVEKLAERMVRWLKDGGYIFFRESCFHQSGDSKRKYNPTHYREPRFYTKVFKECHMSDNTGNSFELSLVGCKCIGAYVRNKKNQNQICWIWQKVRSQDDRGFQRFLDRVEYSHKSILRYERMYGPGFVSTGGLETTKEFVAKLGLKPGQKVLDVGCGVGGGDFYMAENFDVEVIGIDLSINMISLAIERAIGLNYAVEFDCADCYRKTYPENTFDVIYTRDTMLHVKDKPTLFRSFYKWLKPGGKILITDYCKSAGSPSLEFAEYIKKGGYYLHDIKAYRQMLEDAGFDDVIAEDRTDQFVNTLQQELNALENKKDDFIGDFSEEDYNEIVERWKAKQTRGASREQMWGLFIAKKN

SEQ ID NO: 55491 - protein, 466 aa, Glycine max
  peptide (1)..(466): Ceres Seq. ID no. 15177816
MMLDSKAAHLDKEERPEVLSLLPPFEGKSVIELGAGIGRFTGELALKAGQLLAVDFIDTAIKKNETINGHHNHVKFLCADVTSPNMSNNVSEGSVDVVFSNWLLMYLSDIEVEKLAERMVRWLKDGGYIFFRESCFHQSGDSKRKYNPTHYREPRFYTKVFKECHMSDNTGNSFELSLVGCKCIGAYVRNKKNQNQICWIWQKVRSQDDRGFQRFLDRVEYSHKSILRYERMYGPGFVSTGGLETTKEFVAKLGLKPGQKVLDVGCGVGGGDFYMAENFDVEVIGIDLSINMISLAIERAIGLNYAVEFDCADCYRKTYPENTFDVIYTRDTMLHVKDKPTLFRSFYKWLKPGGKILITDYCKSAGSPSLEFAEYIKKGGYYLHDIKAYRQMLEDAGFDDVIAEDRTDQFVNTLQQELNALENKKDDFIGDFSEEDYNEIVERWKAKQTRGASREQMWGLFIAKKN

SEQ ID NO: 55492 - protein, 465 aa, Glycine max
  peptide (1)..(465): Ceres Seq. ID no. 15177817
MLDSKAAHLDKEERPEVLSLLPPFEGKSVIELGAGIGRFTGELALKAGQLLAVDFIDTAIKKNETINGHHNHVKFLCADVTSPNMSNNVSEGSVDVVFSNWLLMYLSDIEVEKLAERMVRWLKDGGYIFFRESCFHQSGDSKRKYNPTHYREPRFYTKVFKECHMSDNTGNSFELSLVGCKCIGAYVRNKKNQNQICWIWQKVRSQDDRGFQRFLDRVEYSHKSILRYERMYGPGFVSTGGLETTKEFVAKLGLKPGQKVLDVGCGVGGGDFYMAENFDVEVIGIDLSINMISLAIERAIGLNYAVEFDCADCYRKTYPENTFDVIYTRDTMLHVKDKPTLFRSFYKWLKPGGKILITDYCKSAGSPSLEFAEYIKKGGYYLHDIKAYRQMLEDAGFDDVIAEDRTDQFVNTLQQELNALENKKDDFIGDFSEEDYNEIVERWKAKQTRGASREQMWGLFIAKKN

SEQ ID NO: 55493 - DNA, 1107 bp, Glycine max
  misc_feature (1)..(1107): Ceres Seq. ID no. 14312769
tctagattcacaagtactatcaaagcatatgaagaataaatcatcgtgcgattttatggttccttctaatcataactactctgttaggctgagtccaatatgttgtaagctatcagaaagtgggattgaggagaaccacacgagcacgagcacgggcgagaggccctctaagatcaaggacaggatggaggagtacaatatagctatgaagaaaatgatgaggaacccttatgagtatcaccatgatctgggtatgaattatactcttataacggacaatttgattgttggctcccaaccacagaaacctgaagacatagatcacctcaaaaaggaagagggtgtggcatacattttaaacttgcaacaagataacgatgttgagtattggggagtagacttgcagtcaataataagaaggtctcgtgaacttgaaattagccacacaaggagaccggcaaaagactttgatccagattccttgcaaaatgaactacctaaagcagtctcatccttagaatgggcaatttctgagggaaaaggaagagtttatgtgcattgtacggctggacttggaagagctccagcggtggcaattgcttatttgttctggttttgtgacatgaatctaaatgaagcatatgatatgctaacttcaaagagaccttgtggaccaaataaaagagcaatacgtggcgctacttatgatttggctaagaatgatccttggaaggagccatttgagactcttccagaatatgcatttgaggatatagcagattgggaaaggaacttgattcaagatcgtgcccgctcccttcgtggaatttgacaacttcggtttctacttatctgagattcctacataggttgccacccttgctgggatggtatcaggtgccatgatactgctcaagttggagatattttttcaagcatattcatactgatatgggcacatagcttacaacgtgtacgaaatattcagtatagtacagactatagagtggtaaataatcaattttgcgaataatgcaccataattgtagacgtcctaataatatctgagagtgcaaaatgcctagttgatctattggtctgtcaaag

SEQ ID NO: 55494 - protein, 276 aa, Glycine max
  peptide (1)..(276): Ceres Seq. ID no. 14312770
LDSQVLSKHMKNKSSCDFMVPSNHNYSVRLSPICCKLSESGIEENHTSTSTGERPSKIKDRMEEYNIAMKKMMRNPYEYHHDLGMNYTLITDNLIVGSQPQKPEDIDHLKKEEGVAYILNLQQDNDVEYWGVDLQSIIRRSRELEISHTRRPAKDFDPDSLQNELPKAVSSLEWAISEGKGRVYVHCTAGLGRAPAVAIAYLFWFCDMNLNEAYDMLTSKRPCGPNKRAIRGATYDLAKNDPWKEPFETLPEYAFEDIADWERNLIQDRARSLRGI

SEQ ID NO: 55495 - protein, 267 aa, Glycine max
  peptide (1)..(267): Ceres Seq. ID no. 14312771
MKNKSSCDFMVPSNHNYSVRLSPICCKLSESGIEENHTSTSTGERPSKIKDRMEEYNIAMKKMMRNPYEYHHDLGMNYTLITDNLIVGSQPQKPEDIDHLKKEEGVAYILNLQQDNDVEYWGVDLQSIIRRSRELEISHTRRPAKDFDPDSLQNELPKAVSSLEWAISEGKGRVYVHCTAGLGRAPAVAIAYLFWFCDMNLNEAYDMLTSKRPCGPNKRAIRGATYDLAKNDPWKEPFETLPEYAFEDIADWERNLIQDRARSLRGI

SEQ ID NO: 55496 - protein, 258 aa, Glycine max
  peptide (1)..(258): Ceres Seq. ID no. 14312772
MVPSNHNYSVRLSPICCKLSESGIEENHTSTSTGERPSKIKDRMEEYNIAMKKMMRNPYEYHHDLGMNYTLITDNLIVGSQPQKPEDIDHLKKEEGVAYILNLQQDNDVEYWGVDLQSIIRRSRELEISHTRRPAKDFDPDSLQNELPKAVSSLEWAISEGKGRVYVHCTAGLGRAPAVAIAYLFWFCDMNLNEAYDMLTSKRPCGPNKRAIRGATYDLAKNDPWKEPFETLPEYAFEDIADWERNLIQDRARSLRGI

SEQ ID NO: 55497 - DNA, 1522 bp, Glycine max
  misc_feature (1)..(1522): Ceres Seq. ID no. 15169061
atagagaaccaaaacgcgacgcaattgcactttttcttcttctttcgcagctcagaatcgctcaaacaatgacagaggatagcagcgttagggtttcttcttccgacaaaacctccgcggccaacgatgcttcgcagacgcggcagagaaagaagagaaagtgggatcaaccggcggagtcattgatgccagttgggatggcagttcctggagcactccctttgagcaatgccgtgtctcttggaggggttgcatttcctgccatggctccgatgatctccggagctcttttgaggaatcctctggcagcttcttctcagcttccgcaacacacagttgcagctgctgttgccgcacaaaaattgaatcaacaaaagatccaagatgaattaataattgctcgagaaattgtcataaatgatgcagagtcttctgttcgctacaagttgacaaaacgccagacacaagaggagatccagaggtgcactggtgccatagttataactagggggaagtatcggctacctaatgcgccacatgatggagggaagccgctgtatcttcacatctctgcaggagctcatataaaagagacagcagaacggattttagctgttgatcgtgctgctgcaatgattgaagaaatgctcaaacaggagcaaaattcacagtcaatttcttccgcctcaccttctgctttggttaatatactgaagatgctgagtacatgcgtgtttttgggctttgatgctgatccttctttgaacattgttgctcgtatacgtggaccaaatgtaagcccttccctacccaattgatttatctagtcactcttggaggttgggttcatctatgacctgatgtggtttagtctgccacattttattagacaattgccacagtctagaagttttttttggtctcttttgattgtgatgtgaccccttggtcatctgctgtttttgttttcatactattctagtctttcactcactaggattacctgtgtctttgttctcaacttatgatttgatggtgcgaaaatacttgggtgttactaggagtactgattttccaagagttgattaagcaataaaagggaggactggggagactggaagagtgttgttacagtttatggttacatgagaaatactaggaacacactcttttaaacacaccctcttttatttgttgaaatttattgaaaatgactaaattttgtgtgtctcacatcatatttaatgattctctctcttgattttgtagtttcaataatttttaaccaattagagagtgtgtttctagcacttctcatgtttacatatggcattgtaatacttgttaggtgctgaaagtgatattcagatggatggaattggaaaatggttcttctgatgacttttgaagcacattttgtatgtgaatactttaatccaagagactggggtgaaagtatgtccacacatacactcaatcacaagtcacaagaacaaatgatgcttatcaaatatttctttac

SEQ ID NO: 55498 - protein, 271 aa, Glycine max
  peptide (1)..(271): Ceres Seq. ID no. 15169062
REPKRDAIALFLLLSQLRIAQTMTEDSSVRVSSSDKTSAANDASQTRQRKKRKWDQPAESLMPVGMAVPGALPLSNAVSLGGVAFPAMAPMISGALLRNPLAASSQLPQHTVAAAVAAQKLNQQKIQDELIIAREIVINDAESSVRYKLTKRQTQEEIQRCTGAIVITRGKYRLPNAPHDGGKPLYLHISAGAHIKETAERILAVDRAAAMIEEMLKQEQNSQSISSASPSALVNILKMLSTCVFLGFDADPSLNIVARIRGPNVSPSLPN

SEQ ID NO: 55499 - protein, 249 aa, Glycine max
  peptide (1)..(249): Ceres Seq. ID no. 15169063
MTEDSSVRVSSSDKTSAANDASQTRQRKKRKWDQPAESLMPVGMAVPGALPLSNAVSLGGVAFPAMAPMISGALLRNPLAASSQLPQHTVAAAVAAQKLNQQKIQDELIIAREIVINDAESSVRYKLTKRQTQEEIQRCTGAIVITRGKYRLPNAPHDGGKPLYLHISAGAHIKETAERILAVDRAAAMIEEMLKQEQNSQSISSASPSALVNILKMLSTCVFLGFDADPSLNIVARIRGPNVSPSLPN

SEQ ID NO: 55500 - protein, 210 aa, Glycine max
  peptide (1)..(210): Ceres Seq. ID no. 15169064
MPVGMAVPGALPLSNAVSLGGVAFPAMAPMISGALLRNPLAASSQLPQHTVAAAVAAQKLNQQKIQDELIIAREIVINDAESSVRYKLTKRQTQEEIQRCTGAIVITRGKYRLPNAPHDGGKPLYLHISAGAHIKETAERILAVDRAAAMIEEMLKQEQNSQSISSASPSALVNILKMLSTCVFLGFDADPSLNIVARIRGPNVSPSLPN

SEQ ID NO: 55501 - DNA, 1494 bp, Glycine max
  misc_feature (1)..(1494): Ceres Seq. ID no. 14313336
attagaatcttggaatatactaatagacatgaatatttttataaatattaatagtagattatataacaacttgaaatttattgcagagatctaaattgtggtaattttaaggtaaccgaaaatgcacacttggtttctcaaaaacaattctctgatttctctctttctgtatctctatcatctctctttcttttcaattatacattttatttctgagtagctacatctaccttgttgcagaacttctaggtctgaaaacaggttatttcagtttaagacaaattaaagctgctactaataactttgacccagcaaataagataggtgaaggaggctttggaccagtattcaagggtgtactatcagatggtgctgtgattgctgttaagcagctctcctccaaatcaaagcaagggaatcgtgaattcatcaatgaaataggcatgatatctgctttgcagcatccaaaccttgtgaaactttatggctgctgcattgaaggaaaccagctgctgctagtatatcagtacatggagaacaatagtcttgctcgtgcactttttggtaaagaacatgagaggatgcaattggactggcccagaagaatgcaaatttgtctgggtatagcaaagggcttagcttatcttcataaggaatcaaggttgaaaatagtgcacagggatattaaggcaaccaatgtcttacttgataaacatctgcatgccaagatctctgactttggtttagccaaacttgatgaagaagagaatactcatatcagcacaagaatagctgggacaattggttacatggctcctgagtatgctatgaggggttacttgactgacaaagcagatgtctatagctttggaattgtagctttagagattgttagtggaaagagcaacacaaattataggccaaaggaggagtttgtatatcttttagattgggcctatgttctccaagagcaaggaaaccttctggagctggtggatccaagtcttggttcaaagtactcctcagaagaggccatgagaatgctgctgttagcactcttgtgcaccaacccttctcccactcttagaccatgtatgtcatcagtagtgagcatgcttgagggaaaaactccaattcaagcaccaataattaaacgcggtgacagtgcagaagatgtaagatttaaagcctttgagatgctatcacaagacagtcaaactcatgtctcttctgcattctcagaagaaagtatagagcaaagaagcaaatcaatggggggaccatggcttgactcctccatatcacttccaagtagaattgattaggcttcaaccgatcaacttattagatattccaattatgtgtgatttgcaagtcggggaagttaactcattaaattttaattcatagttgcttgctatatgtatggtggtttaaaggctattaatggaggtttccaacaaaaggggtaatttcatttggaattttattaag

SEQ ID NO: 55502 - protein, 293 aa, Glycine max
  peptide (1)..(293): Ceres Seq. ID no. 14313337
MISALQHPNLVKLYGCCIEGNQLLLVYQYMENNSLARALFGKEHERMQLDWPRRMQICLGIAKGLAYLHKESRLKIVHRDIKATNVLLDKHLHAKISDFGLAKLDEEENTHISTRIAGTIGYMAPEYAMRGYLTDKADVYSFGIVALEIVSGKSNTNYRPKEEFVYLLDWAYVLQEQGNLLELVDPSLGSKYSSEEAMRMLLLALLCTNPSPTLRPCMSSVVSMLEGKTPIQAPIIKRGDSAEDVRFKAFEMLSQDSQTHVSSAFSEESIEQRSKSMGGPWLDSSISLPSRID

SEQ ID NO: 55503 - protein, 264 aa, Glycine max
  peptide (1)..(264): Ceres Seq. ID no. 14313338
MENNSLARALFGKEHERMQLDWPRRMQICLGIAKGLAYLHKESRLKIVHRDIKATNVLLDKHLHAKISDFGLAKLDEEENTHISTRIAGTIGYMAPEYAMRGYLTDKADVYSFGIVALEIVSGKSNTNYRPKEEFVYLLDWAYVLQEQGNLLELVDPSLGSKYSSEEAMRMLLLALLCTNPSPTLRPCMSSVVSMLEGKTPIQAPIIKRGDSAEDVRFKAFEMLSQDSQTHVSSAFSEESIEQRSKSMGGPWLDSSISLPSRID

SEQ ID NO: 55504 - protein, 247 aa, Glycine max
  peptide (1)..(247): Ceres Seq. ID no. 14313339
MQLDWPRRMQICLGIAKGLAYLHKESRLKIVHRDIKATNVLLDKHLHAKISDFGLAKLDEEENTHISTRIAGTIGYMAPEYAMRGYLTDKADVYSFGIVALEIVSGKSNTNYRPKEEFVYLLDWAYVLQEQGNLLELVDPSLGSKYSSEEAMRMLLLALLCTNPSPTLRPCMSSVVSMLEGKTPIQAPIIKRGDSAEDVRFKAFEMLSQDSQTHVSSAFSEESIEQRSKSMGGPWLDSSISLPSRID

SEQ ID NO: 55505 - DNA, 535 bp, Glycine max
  misc_feature (1)..(535): Ceres Seq. ID no. 13594104
ggcatcatcacagacatggnnntctctgcctctgcaattcagcgggctcaagtgctccccactctcatcttcttctctcttctttaaaccttctctttggacccaacaatcccaaaagcgcgtttcaattaccattgcgaactcaatagcaatagccaatgcgcagaacaaagagagagcgaggcttaagaaactcttcgaagaagcctacgagagatgccgcaatgctccaatggaaggtgtctccttcaccatcgaagacttcactgctgctcttgacaagtacgacttcgattctgaagttggcggcaagattaaaggcactgtgttctacacagataacaatggagcagttgttgatatcactgcaaagtcttcggcatatttgccactgcaagaggcgtgcatccacagggttaagcatgttgaagaagcaggcttagttcctgggttcaaagaggagtttttgatcattggtgagaactcaatagatgatagcttggtcttgagtttaaggtctcttcagtttgacctt

SEQ ID NO: 55506 - protein, 178 aa, Glycine max
  peptide (1)..(178): Ceres Seq. ID no. 13594105
  misc_feature (7)..(7): Xaa is any aa, unknown or other
ASSQTWXSLPLQFSGLKCSPLSSSSLFFKPSLWTQQSQKRVSITIANSIAIANAQNKERARLKKLFEEAYERCRNAPMEGVSFTIEDFTAALDKYDFDSEVGGKIKGTVFYTDNNGAVVDITAKSSAYLPLQEACIHRVKHVEEAGLVPGFKEEFLIIGENSIDDSLVLSLRSLQFDL

SEQ ID NO: 55507 - protein, 101 aa, Glycine max
  peptide (1)..(101): Ceres Seq. ID no. 13594106
MEGVSFTIEDFTAALDKYDFDSEVGGKIKGTVFYTDNNGAVVDITAKSSAYLPLQEACIHRVKHVEEAGLVPGFKEEFLIIGENSIDDSLVLSLRSLQFDL

SEQ ID NO: 55508 - protein, 94 aa, Glycine max
  peptide (1)..(94): Ceres Seq. ID no. 13594107
MRRTKRERGLRNSSKKPTRDAAMLQWKVSPSPSKTSLLLLTSTTSILKLAARLKALCSTQITMEQLLISLQSLRHICHCKRRASTGLSMLKKQA

SEQ ID NO: 55509 - DNA, 824 bp, Glycine max
  misc_feature (1)..(824): Ceres Seq. ID no. 12467471
atcagcaaatcctcttcagtttctgcatctctaatacttcaactcactgtattatcttgagtaattttgcagagaagtaaaatatgagcaggccaggagactggaattgcaggtcgtgccagcacctgaactttcagaggagagactcatgccagcgatgtggggactcaaaatatggagatagagttgttgattttggtggttttggaggaagaggagggtcctcatttggtttaactggctcagatgttcgccccggcgactggtactgtgctgctgctaactgtggtgcacacaactttgctagccgctcaagctgcttcaagtgtggtgctttcaaggatgacttggctggaggaggctataacagttctgacatcttgcgctccagagcttttggtggcagtggaagacctggatggaaatctggtgattggatatgcagcagatcaggatgcaatgagcacaactttgctagcagaatggaatgttttaaatgcagtgctcccagggacacgtactagaaaaaatgagtttatcctagcaagaaaggctacattaattaatggagatgctgcaagatttctttattaatttctttgggatgttgaagacagtgtgaattctgaaaaggtggtttaaaatcccatgttacagagaagctagccagctgcatcccttagggtctttctcagatttacctcaagagctacaacaatgttgttttggtgctttaaactactttctttagttttggcgttagagagttcatttattgtatggtgcgtggttttcttaaatgaatatgaatctcttttcttgtc

SEQ ID NO: 55510 - protein, 146 aa, Glycine max
  peptide (1)..(146): Ceres Seq. ID no. 12467472
MSRPGDWNCRSCQHLNFQRRDSCQRCGDSKYGDRVVDFGGFGGRGGSSFGLTGSDVRPGDWYCAAANCGAHNFASRSSCFKCGAFKDDLAGGGYNSSDILRSRAFGGSGRPGWKSGDWICSRSGCNEHNFASRMECFKCSAPRDTY

SEQ ID NO: 55511 - protein, 115 aa, Glycine max
  peptide (1)..(115): Ceres Seq. ID no. 12467473
MFAPATGTVLLLTVVHTTLLAAQAASSVVLSRMTWLEEAITVLTSCAPELLVAVEDLDGNLVIGYAADQDAMSTTLLAEWNVLNAVLPGTRTRKNEFILARKATLINGDAARFLY

SEQ ID NO: 55512 - protein, 83 aa, Glycine max
  peptide (1)..(83): Ceres Seq. ID no. 12467474
MTWLEEAITVLTSCAPELLVAVEDLDGNLVIGYAADQDAMSTTLLAEWNVLNAVLPGTRTRKNEFILARKATLINGDAARFLY

SEQ ID NO: 55513 - DNA, 1347 bp, Glycine max
  misc_feature (1)..(1347): Ceres Seq. ID no. 14307573
gaatgaagcgattattgattagtacaaaaaaaaaaaaaaaaaagagaattttggggagcactcatcaaccatggtgatgttgtttgcacacacagattcagtagtcactcactagttctcggagaaaaccaagtgtcagtaataactaacaagcaaaacagaaaagaatacggattcgattcggagagatcaaccatgaagaacgaccacaacaacaacaacaacaacagcgccgagcatagcaaagacactaccgttggaatcctagattcccgattcaaccagaccctcagaaatgttcaagggttactcaagggtcgtaacattcctggtaaaatattattgagccagagggttgaatctcccgattacacaagcttatcctcaccgacttatataaggagctcctcatacagtgaaactggcacaagtgaccagacatctgagacggtagaggaggaagttcacagtacaagtaaaccatttggtattcccaatgacaataagttaaaaatatcagcatccaatgtagagagctcatccgaagaagtccggaaatcttccatgggtgcaagagctacagattctgcaagagttatgaagttcactaaggtgctttcagagacaatggttaaattagagaaattgcgtgaattttcttggagtggtgttccagattatatgcgtcctacagtgtggagacttctcttgggatatgcaccacctaattcagatagaagggagggagttttgaaaaggaagcgccttgagtatcttgactgtgtttctcagtattatgatattcctgatacagaacgctcggatgatgagatcaatatgcttcgccagattgctgttgattgtccaagaactgtacctgaagtttcattctttcaacaacagcaagttcagaaatcattggagcgtattctgtacacatgggccattcggcatcctgcaagtggatatgttcaggggataaatgatcttgttacgccatttttagttgttttcctatcagaatacttggaagggggcatagataattggtcaatgtctgatttatcttcagatgaaatctctaatatagaggccgactgctattggtgcttgtcaaagttgcttgatggtatgcaagaccattatacgtttgcccaaccaggaattcaaaggcttgtttttaagttgaaggaattggtcaggaggattgatggtaacttttttctcttaccgaacctcagttttaggaaaatataactacatttggctaaattattctctcactctatattaatgctctctcttatttcacattgtggagataccgagagattaggataaaattgc

SEQ ID NO: 55514 - protein, 353 aa, Glycine max
  peptide (1)..(353): Ceres Seq. ID no. 14307574
MKNDHNNNNNNSAEHSKDTTVGILDSRFNQTLRNVQGLLKGRNIPGKILLSQRVESPDYTSLSSPTYIRSSSYSETGTSDQTSETVEEEVHSTSKPFGIPNDNKLKISASNVESSSEEVRKSSMGARATDSARVMKFTKVLSETMVKLEKLREFSWSGVPDYMRPTVWRLLLGYAPPNSDRREGVLKRKRLEYLDCVSQYYDIPDTERSDDEINMLRQIAVDCPRTVPEVSFFQQQQVQKSLERILYTWAIRHPASGYVQGINDLVTPFLVVFLSEYLEGGIDNWSMSDLSSDEISNIEADCYWCLSKLLDGMQDHYTFAQPGIQRLVFKLKELVRRIDGNFFLLPNLSFRKI

SEQ ID NO: 55515 - protein, 230 aa, Glycine max
  peptide (1)..(230): Ceres Seq. ID no. 14307575
MGARATDSARVMKFTKVLSETMVKLEKLREFSWSGVPDYMRPTVWRLLLGYAPPNSDRREGVLKRKRLEYLDCVSQYYDIPDTERSDDEINMLRQIAVDCPRTVPEVSFFQQQQVQKSLERILYTWAIRHPASGYVQGINDLVTPFLVVFLSEYLEGGIDNWSMSDLSSDEISNIEADCYWCLSKLLDGMQDHYTFAQPGIQRLVFKLKELVRRIDGNFFLLPNLSFRKI

SEQ ID NO: 55516 - protein, 219 aa, Glycine max
  peptide (1)..(219): Ceres Seq. ID no. 14307576
MKFTKVLSETMVKLEKLREFSWSGVPDYMRPTVWRLLLGYAPPNSDRREGVLKRKRLEYLDCVSQYYDIPDTERSDDEINMLRQIAVDCPRTVPEVSFFQQQQVQKSLERILYTWAIRHPASGYVQGINDLVTPFLVVFLSEYLEGGIDNWSMSDLSSDEISNIEADCYWCLSKLLDGMQDHYTFAQPGIQRLVFKLKELVRRIDGNFFLLPNLSFRKI

SEQ ID NO: 55517 - DNA, 622 bp, Glycine max
  misc_feature (1)..(622): Ceres Seq. ID no. 14307522
attttgatttgtcagttttattggtttgctgaatagaagtaggattagaaatcatgaggatcaatagccaatgatattttgtaagtgataggaactactggacctgggggaggcagttgggactcaaagccgaggtctttcccaagaacttattgatatgcttccaacctcaaagtacaaatttggtagtttattcaagagaaaaaattctgggaaaaggtgtgtaatttgtcagatgacatacagaagaggtgaccagcaaatgaaattgccatgcagccatgtctatcatggtgaatgcatcaccaagtggcttagcattaacaagaaatgtcctgtttgcaacactgaggtttttggcgaggaatcaacgcattagcatcaaggtggcaaaagaggatcctttttgctctattaatttttgcttctcatccaactcaccctctccctcccattctcttttttaagttttaattttttacacgtaggtaggtgtagtatgaagaactatggcagctctcacacaatatatgttttgtttactagaaacaacctattggagtcgcatcttcttgtggttaatgtgtgattttgtgtgtattcatgcaatatatattctctt

SEQ ID NO: 55518 - protein, 73 aa, Glycine max
  peptide (1)..(73): Ceres Seq. ID no. 14307523
MLPTSKYKFGSLFKRKNSGKRCVICQMTYRRGDQQMKLPCSHVYHGECITKWLSINKKCPVCNTEVFGEESTH

SEQ ID NO: 55519 - protein, 61 aa, Glycine max
  peptide (1)..(61): Ceres Seq. ID no. 14307524
MSIMVNASPSGLALTRNVLFATLRFLARNQRISIKVAKEDPFCSINFCFSSNSPSPSHSLF

SEQ ID NO: 55520 - protein, 58 aa, Glycine max
  peptide (1)..(58): Ceres Seq. ID no. 14307525
MVNASPSGLALTRNVLFATLRFLARNQRISIKVAKEDPFCSINFCFSSNSPSPSHSLF

SEQ ID NO: 55521 - DNA, 1160 bp, Glycine max
  misc_feature (1)..(1160): Ceres Seq. ID no. 13589868
tctctctttcactctttctccgagaacaaaaaaaaaaacgtgattcgctcttctcttcgaataaaccacaaaaccaacaaacgagaagaggagtgagagaagatggggttgtcgttcacgaagctgttcagcaggttgtttgcgaagaaggaaatgaggattctgatggtaggtctcgatgctgctggtaagacaaccatcttgtacaagctcaagcttggagaaatcgtcaccaccatccccaccatcggatttaatgttgagactgtggagtacaagaacatcagcttcactgtgtgggatgttggtggtcaggacaagatccgtcctctgtggaggcattatttccagaacactcagggtctcatttttgtggttgatagcaatgatagggatcgagtggttgaggcaagggatgagttgcacaggatgttgaatgaggatgaacttagagatgctgttttgcttgtttttgccaacaagcaagatcttcctaatgcaatgaatgctgcagaaataactgacaagcttggacttcattcactccgtcaacgccactggtatatccaaagcacttgtgcaacttctggagagggtctctatgagggtttggactggctttctaacaacattgccagcaaggcatgagacatttgaaaatttttggtcttgtctggtgatttcctgctgagtatggcggttcttggagaaagatgcttatcctttcttgtcaatgttgtaatagcagaatgcttgctagaagtattctcttcttttgtgtaacttgggtttgtatgattgcttaaattagctaatacttttagctataattggaactcttggatcctcttgtgcgtgccttgtttgtgttcattttgttagtttgatttttggttgaatatttccgtgcgttttgttcttggagtgcttgttggtgatgatagttgaatgaggattagaaaattgcgccagtttttgctcttgggccaagagtcacctgttcaaatattgtctttgcgaaattccagttcagatagacttggtacctgtttgttttaaagttgagcagacctaattttgatagaattggttaattatttattgtgattcagatgtgtgtctaaattaattatagtaataaagtttatattgaaacatgc

SEQ ID NO: 55522 - protein, 181 aa, Glycine max
  peptide (1)..(181): Ceres Seq. ID no. 13589869
MGLSFTKLFSRLFAKKEMRILMVGLDAAGKTTILYKLKLGEIVTTIPTIGFNVETVEYKNISFTVWDVGGQDKIRPLWRHYFQNTQGLIFVVDSNDRDRVVEARDELHRMLNEDELRDAVLLVFANKQDLPNAMNAAEITDKLGLHSLRQRHWYIQSTCATSGEGLYEGLDWLSNNIASKA

SEQ ID NO: 55523 - protein, 164 aa, Glycine max; identical to SEQ ID NO: 22740
  peptide (1)..(164): Ceres Seq. ID no. 13589870

SEQ ID NO: 55524 - protein, 160 aa, Glycine max; identical to SEQ ID NO: 22741
  peptide (1)..(160): Ceres Seq. ID no. 13589871

SEQ ID NO: 55525 - DNA, 1575 bp, Glycine max
  misc_feature (1)..(1575): Ceres Seq. ID no. 14303790
gtcattgacttcatcaactctttgcaggacgatgagtactcctccagttgttgagcgcgtttcagaatgcttcatcaagccgcagcactccaaccatgaatcaaaccaaatctgctacttaacaccttgggatattgctatgttgtctgctcactatatccaaaagggccttctcttcaagaagccctcatcaccacttgttagtcacaataatttcatagagaacctgttgcagaagctcaagcactctctttctctcaccctcttccatttctatcctttggctggtcgccttgtcacccaccaaacccatgaccctcccttctatgctgttttcgttgattgcaacaacagtgatggagccagattcatccatgcaactttagatatgaccatatctgatatcctctctcccgttgacgttccacccattgttcaatcattgtttgaccaccacaaagctgtcaaccatgacggtcacacaatgccgttgttgtccgtccaagtcactgaatttgtggatggtgttttcataggttgttccatgaaccacactcttggtgatggcacttcttattggaatttcttcaacacatggtctcagatctttcaagttcaaggccatgaacatgatgttcccatttcgcacccacccattcacaatcgctggtttccagagggttgcggtccattaatcaaccttcccttcaaacatcacgacgattttataaacagatatgaaacaccgttgctgagagagagaatcttccacttctcagcagagtctattgcaaaactgaaagcaaaggctaactcggagtgcaacacaaccaaaatctcatcgttccaatcattatcggcacttgtttggagatgcataactcgtgcgcggcgcttgccgtatgatcaaagaacaagttgcaagttgtccgcaaacaacagaacaagaatggaaccaccactgcctcaggagtactttggaaactcaatttatacactgaatgcaggaaccgccacctcagggaaattgcttgagaatggtataggttgggcagcatggaagttgcacaaatcggttgtaaaccataacgacagagcggtgttggaaacgctcaaagagtggttagagagtcctctgatatatgatcttggtcgttattttgacccgtactgtgtgatgatgggtagctcacccaggttcaacatgtatgggaatgagtttggaatgggaaaggcagttgcacttagaagtgggtatgccaacaaatttgatggaaaagtaacatcatacccaggccatgaaggaggaggaagcgtagatttggaagtgtgtctttcgccagctgtaatgagtgcactggaatcggacgaggagttcatgaatattgctctagtttctgtttacaatcctctctagtcattattcactgttacttccatcgcccccataataatcatttgtcctagaataatccgttatctttaattagtattattttaaaatatatcatgttaatgtgttttatgtattgtgaattcatatatcatataataacaacacgtgatttattttgt

SEQ ID NO: 55526 - protein, 471 aa, Glycine max
  peptide (1)..(471): Ceres Seq. ID no. 14303791
SLTSSTLCRTMSTPPVVERVSECFIKPQHSNHESNQICYLTPWDIAMLSAHYIQKGLLFKKPSSPLVSHNNFIENLLQKLKHSLSLTLFHFYPLAGRLVTHQTHDPPFYAVFVDCNNSDGARFIHATLDMTISDILSPVDVPPIVQSLFDHHKAVNHDGHTMPLLSVQVTEFVDGVFIGCSMNHTLGDGTSYWNFFNTWSQIFQVQGHEHDVPISHPPIHNRWFPEGCGPLINLPFKHHDDFINRYETPLLRERIFHFSAESIAKLKAKANSECNTTKISSFQSLSALVWRCITRARRLPYDQRTSCKLSANNRTRMEPPLPQEYFGNSIYTLNAGTATSGKLLENGIGWAAWKLHKSVVNHNDRAVLETLKEWLESPLIYDLGRYFDPYCVMMGSSPRFNMYGNEFGMGKAVALRSGYANKFDGKVTSYPGHEGGGSVDLEVCLSPAVMSALESDEEFMNIALVSVYNPL

SEQ ID NO: 55527 - protein, 461 aa, Glycine max
  peptide (1)..(461): Ceres Seq. ID no. 14303792
MSTPPVVERVSECFIKPQHSNHESNQICYLTPWDIAMLSAHYIQKGLLFKKPSSPLVSHNNFIENLLQKLKHSLSLTLFHFYPLAGRLVTHQTHDPPFYAVFVDCNNSDGARFIHATLDMTISDILSPVDVPPIVQSLFDHHKAVNHDGHTMPLLSVQVTEFVDGVFIGCSMNHTLGDGTSYWNFFNTWSQIFQVQGHEHDVPISHPPIHNRWFPEGCGPLINLPFKHHDDFINRYETPLLRERIFHFSAESIAKLKAKANSECNTTKISSFQSLSALVWRCITRARRLPYDQRTSCKLSANNRTRMEPPLPQEYFGNSIYTLNAGTATSGKLLENGIGWAAWKLHKSVVNHNDRAVLETLKEWLESPLIYDLGRYFDPYCVMMGSSPRFNMYGNEFGMGKAVALRSGYANKFDGKVTSYPGHEGGGSVDLEVCLSPAVMSALESDEEFMNIALVSVYNPL

SEQ ID NO: 55528 - protein, 425 aa, Glycine max
  peptide (1)..(425): Ceres Seq. ID no. 14303793
MLSAHYIQKGLLFKKPSSPLVSHNNFIENLLQKLKHSLSLTLFHFYPLAGRLVTHQTHDPPFYAVFVDCNNSDGARFIHATLDMTISDILSPVDVPPIVQSLFDHHKAVNHDGHTMPLLSVQVTEFVDGVFIGCSMNHTLGDGTSYWNFFNTWSQIFQVQGHEHDVPISHPPIHNRWFPEGCGPLINLPFKHHDDFINRYETPLLRERIFHFSAESIAKLKAKANSECNTTKISSFQSLSALVWRCITRARRLPYDQRTSCKLSANNRTRMEPPLPQEYFGNSIYTLNAGTATSGKLLENGIGWAAWKLHKSVVNHNDRAVLETLKEWLESPLIYDLGRYFDPYCVMMGSSPRFNMYGNEFGMGKAVALRSGYANKFDGKVTSYPGHEGGGSVDLEVCLSPAVMSALESDEEFMNIALVSVYNPL

SEQ ID NO: 55529 - DNA, 1619 bp, Glycine max
  misc_feature (1)..(1619): Ceres Seq. ID no. 14310427
agaatctgtgacacagtctgatgggattattggtatacaaagcactgagacagtcaatgcaagaatggaagagggatatcatcatgcatccacatctacacagaccagtccagatgaaaatgggatgaaaaatattcaaccagagcaactggaaatacaagaaatggggagaagagagagtgcattaggcaaagatatagagcaacaacctaccctcctagaggagtatcacttgaggaataaatcagaaagaagccctgcaacttatatatctagtcatgactttactgagaatagccattttcctgaaggaaaagaggcacttaatggtgctatggaggagttaaaagatggttacatttctgagaatgggaaactggttcttgatttcttgcaagccatccatgctgcagagaaaaggcaggctgacttagatgcacatgcttttaacgaagagaagaaagtgttaaaggaaaaatatgaaaagaagttgaaagatgcagctgccagagaacttatgctcgctgaggaggctgcaatgttggacagggagctaaaaagagagagagcaaaagcatcccttgctatcaagtcacttcaagaaaagatggaagagaaactgaagacagaactagaacaaaaggagattgaaactgatttgaagtttaaacaaactcaggaattagcaaaggcagagttaaatgcagccatagcaaatgagaaggcagctcaaattgaaaaaatggctgaagcaaatgttaatataaatgccttatgcatggcattttatgctcgatctgaagaagctcgtcaaagtcatgctacacaaaattttgctttgagagcacttgcattggaagatgcactatctaaaggacttccaattgagacagaaatagcatctttgcagtcttatcttggaagcacagataaagattcagttttggatttggtgctagcatcccttcctgaagaaacacgaagcaacggcacagacacacaactgcagttaaagcagaagtttgatgccttaaaaggtagtgtaagacacttcagcttcttcccaccgggagggggaggtatgttggcacattctttggcacatgtagcatcctggttgaaggttagggaagacaatcaatctggtgatgggatcgaatctgtgatcaataaagttgaagtttatttggcagaaggaaaacttgctgaagcagcagcttgtctagaagaaagtgtgagaggcacacaagctgcagaaattgttgcaggttgggtgaggcaagcaagaaacagggctatttctgagcaagcagtgctgcttcttcaatcctatgccaattcccttagctttacatgattctcaaattttgaatatttacaaaaccatgtgaattcaatacatggcagagattatctttggcggattattccaacgggaattattgacctatgaggaaaaaaaataacgtttttgtttcataggagcagaaattagttgattctgtgaattctatgcaactccagtggcattggagttttgaccgaagtgatatcaggctctgtataattttgccttttgttttacctgaataacagaaatgttgcattgcaacatattg

SEQ ID NO: 55530 - protein, 451 aa, Glycine max
  peptide (1)..(451): Ceres Seq. ID no. 14310428
ESVTQSDGIIGIQSTETVNARMEEGYHHASTSTQTSPDENGMKNIQPEQLEIQEMGRRESALGKDIEQQPTLLEEYHLRNKSERSPATYISSHDFTENSHFPEGKEALNGAMEELKDGYISENGKLVLDFLQAIHAAEKRQADLDAHAFNEEKKVLKEKYEKKLKDAAARELMLAEEAAMLDRELKRERAKASLAIKSLQEKMEEKLKTELEQKEIETDLKFKQTQELAKAELNAAIANEKAAQIEKMAEANVNINALCMAFYARSEEARQSHATQNFALRALALEDALSKGLPIETEIASLQSYLGSTDKDSVLDLVLASLPEETRSNGTDTQLQLKQKFDALKGSVRHFSFFPPGGGGMLAHSLAHVASWLKVREDNQSGDGIESVINKVEVYLAEGKLAEAAACLEESVRGTQAAEIVAGWVRQARNRAISEQAVLLLQSYANSLSFT

SEQ ID NO: 55531 - protein, 430 aa, Glycine max
  peptide (1)..(430): Ceres Seq. ID no. 14310429
MEEGYHHASTSTQTSPDENGMKNIQPEQLEIQEMGRRESALGKDIEQQPTLLEEYHLRNKSERSPATYISSHDFTENSHFPEGKEALNGAMEELKDGYISENGKLVLDFLQAIHAAEKRQADLDAHAFNEEKKVLKEKYEKKLKDAAARELMLAEEAAMLDRELKRERAKASLAIKSLQEKMEEKLKTELEQKEIETDLKFKQTQELAKAELNAAIANEKAAQIEKMAEANVNINALCMAFYARSEEARQSHATQNFALRALALEDALSKGLPIETEIASLQSYLGSTDKDSVLDLVLASLPEETRSNGTDTQLQLKQKFDALKGSVRHFSFFPPGGGGMLAHSLAHVASWLKVREDNQSGDGIESVINKVEVYLAEGKLAEAAACLEESVRGTQAAEIVAGWVRQARNRAISEQAVLLLQSYANSLSFT

SEQ ID NO: 55532 - protein, 410 aa, Glycine max
  peptide (1)..(410): Ceres Seq. ID no. 14310430
MKNIQPEQLEIQEMGRRESALGKDIEQQPTLLEEYHLRNKSERSPATYISSHDFTENSHFPEGKEALNGAMEELKDGYISENGKLVLDFLQAIHAAEKRQADLDAHAFNEEKKVLKEKYEKKLKDAAARELMLAEEAAMLDRELKRERAKASLAIKSLQEKMEEKLKTELEQKEIETDLKFKQTQELAKAELNAAIANEKAAQIEKMAEANVNINALCMAFYARSEEARQSHATQNFALRALALEDALSKGLPIETEIASLQSYLGSTDKDSVLDLVLASLPEETRSNGTDTQLQLKQKFDALKGSVRHFSFFPPGGGGMLAHSLAHVASWLKVREDNQSGDGIESVINKVEVYLAEGKLAEAAACLEESVRGTQAAEIVAGWVRQARNRAISEQAVLLLQSYANSLSFT

SEQ ID NO: 55533 - DNA, 942 bp, Glycine max
  misc_feature (1)..(942): Ceres Seq. ID no. 15170072
aacagaccttctacttttgcgaacagctgttagacttgagttgagtcacagtcatcgtctgttcaggatcatattcacgccccctctctctctctctctctctctctctctcttactttgtgtctttctatctctctcttcaattccaaaaccctacccccatccaattccaattcaccctcaatcatgggttctgaaggttccactgtcgtcgttcctaggaacttcagattattggaagagcttgagagaggtgagaagggaattggagatggaactgttagctatggaatggatgatgctgatgatatctacatgcagtcctggactgggactattattggtccccctggtactgttcatgaagggcgtatataccagctgaaattattttgtggcaaggattatccagacaatccaccaactgttagatttcagactaggattaacatgacttgtgtcaaccaagaaactggagtggttgagccacatttgtttcctatgcttgctaattggcaaagagagtgtacaatggaagacattttgatgcaattgaagaaagaaatgatatctccacaaaatcggaagctagctcagccacctgaaggcaatgaagatggcaggattgaccaaaaggggcttgctctgagatgttgtgtcatgtaattcaggtgagaaccaaagaataataatgtaaataattcaatagataatccttttgtgggttaactcatttataaatgtaattatggaccattcgcttatgtaacatggagcaattaaagagcgactacgaatccttgaaaatttatagtcaatcgtgttgaagctgattttactgtggtttctaatttggaagtgtgtatacattcatctgtgtaggtgtgaaccgtatgcacactttgatcctaatattgtgggataacattcaatttatcattg

SEQ ID NO: 55534 - protein, 159 aa, Glycine max
  peptide (1)..(159): Ceres Seq. ID no. 15170073
MGSEGSTVVVPRNFRLLEELERGEKGIGDGTVSYGMDDADDIYMQSWTGTIIGPPGTVHEGRIYQLKLFCGKDYPDNPPTVRFQTRINMTCVNQETGVVEPHLFPMLANWQRECTMEDILMQLKKEMISPQNRKLAQPPEGNEDGRIDQKGLALRCCVM

SEQ ID NO: 55535 - protein, 127 aa, Glycine max
  peptide (1)..(127): Ceres Seq. ID no. 15170074
TDLLLLRTAVRLELSHSHRLFRIIFTPPLSLSLSLSLLLCVFLSLSSIPKPYPHPIPIHPQSWVLKVPLSSFLGTSDYWKSLREVRRELEMELLAMEWMMLMISTCSPGLGLLLVPLVLFMKGVYTS

SEQ ID NO: 55536 - protein, 124 aa, Glycine max
  peptide (1)..(124): Ceres Seq. ID no. 15170075
MDDADDIYMQSWTGTIIGPPGTVHEGRIYQLKLFCGKDYPDNPPTVRFQTRINMTCVNQETGVVEPHLFPMLANWQRECTMEDILMQLKKEMISPQNRKLAQPPEGNEDGRIDQKGLALRCCVM

SEQ ID NO: 55537 - DNA, 539 bp, Glycine max
  misc_feature (1)..(539): Ceres Seq. ID no. 15226994
tcagctacgtaggccccccccccatgcttcatgttgcgtaaatgggtatcctctgaacatgaaagttctcagttagaagatgagaatgtgcagtcacaagatggtagtagtgtcaaatcttctggacttgtagaaaatgctgaagttcaaaatgagcgatccaagtccttgtcaatttttggagttttaatttccccaaagcttcgagcctcccagctgtcatttgagaaagcactagagacactcatagaaatagccaatatgcaatcgtcattgttatattcttttcaccaacttcgaagggtggaagataccaaagaataaaaaagtaccagctctttcaggtgtttgtgtcaaataataaattactgcggttgacaggctgacaatatcacaaggggttacattattttcctaaataaaattctcttatctttccctccacctaaagaggagagagacaagaaaattactagcaaagtctttggaatatgttattgattttatgaggaactaatgaagatgagtttttttttccc

SEQ ID NO: 55538 - protein, 97 aa, Glycine max
  peptide (1)..(97): Ceres Seq. ID no. 15226995
MLRKWVSSEHESSQLEDENVQSQDGSSVKSSGLVENAEVQNERSKSLSIFGVLISPKLRASQLSFEKALETLIEIANMQSSLLYSFHQLRRVEDTKE

SEQ ID NO: 55539 - DNA, 2640 bp, Glycine max
  misc_feature (1)..(2640): Ceres Seq. ID no. 15176110
gagtgaacaaattccgcggcatacaatccagccgcaagggcatctgggtattgcaggaagtgaattgcccttctgtattgatagaagcagggttcatgtccaacccatctgatatgtccaatctgaagagcactgcttaccagcagaaaatggccggcgctatattgaccggtatccagcaatatttatcggctcatgaaaatcaaaccaccttcattccggtagatactaccatagaagtgaaagtaaaagatacggctgctcatcctttgtttgtagttgacggagaaaaaatgggtcggaagggtttgaaagaattaaaactggatccaaatgatattgacaatattagtgttttaaaagatgaggccgcctttaaaaagtatggcgaggaaggcaaaaacggagttgtagagatcaccactaaaaagcaagtagctgactctacaacgacaaagcagcatagtaaagctgatctgatgatgaaaaaattgaatgagctgaaaaaagataatgagaaatcttatttcgagattgatggtaaatccgtcatcactaccaaaagcgggcagacggtttggatagaagttgtcacagacctggtattggtagacggaaagcgggtgagtgttgacgaacttaacacatcatacaagcgaaatgattttgttgaggccgctggaaacgattattcaaaaaaataccacaaaggaatattgttactatccacacgcacacattcaattaaagaaatacaaaaaatgctggcagtaaactaaactgctgatcattcgattattttttcttctttcgcttctttgaaggatggtatatttcaatagcttgtttgataagttgcaatagttcctcttgctgaatattagcaggatcaacaacaggttcagcgaatgccagcactttctctaaagtgaggtcttttgtataaggagaacctttcaatacagcgccgaacatgcttactgccgcagcgaattggtaagcatgttcggctttttcaattgctatgggttgattagatgctgtaaatgcatgatgcataaaagatgcgctgtcgggaagctggtagcgcaaatcaatggaggccaggttttccgttgatgaatgagtagttgccggttctatttcaaacaaagccatcagggcatgcccactgccgatttctccaccttccaattcacgggtactgtcgttcaaagcggttctcttgttgtcaaagccaatcaggcggtaggttttgacaaggttgggattgaagcgaacgataaccgttgcattgttggcaacagcatataatgtttgtgtgaattcagttaccaatactttttgtgcttcgcctaaatgatccagataagcaaaattgccattgccttttttagccagcacttccagcttgctgtctttataattgcccatgcctactcccaggcaagtaaggtaaataccgcttttgcgatattgaacaatcaggtcttccagctctttttccgatgattgtcccacattgaaatccccatcggtagccagtatcaccctattgttgccattgcgcatataagtgtgcgaagccaatgcataagcctgctggatggctccggcgcccggtgtatcacccgcagcactcagcgaatcgatgactgctttgatctttttcttttcagcgcctcctgttggcgccaatgcaatgcgcacattgccgccgtaagtcatgatactgatggtatcctgcggacgtaaattatctgccagtaacttgaatgccgactgcagcaaggggagccggttgggcttatccatcgagccagacacatcgatcaaaaaaacaagattggaaggaggcacactgtcaagttgcaattgcggtgcatgaatatgaaggtacagcagttgatgttcctgctgccaggggcaggatgtaacggttgtctggcaggtaaaggcacgggaattttcagcagcagggtaactgaaataattgagcatttcttcaatgcggatcgcatgcacaggcacccgcatattattgtgaatgaaacgacggatattactataagaagctttgtcgatgttcagtgcaaaacctgtttccggatattgcgatgcctgaataaaacggttttccataatgtcgctgtagctctcgcccattacagaagcaggtacaactggttctgtttggagatggttggtgagagagctgagcctggccctgtaaaaatttgccaactcaggctgcattttcaaaacaaagaactggggcttcctggtatcgatggcagtacgcagggtatcataaccttcgtaagacaatgtgatggtatcaatgagcctggaagaagggatgccaaagctgcccaggttgccggtataatatggataagtgccggtgcttgccaattgtatgcgtacgccctgtaataaacgcccctgctcatccttcacttctccacgcaggtaattctgccccatgagcaggcagggaagtaaacaagcaagtaataaccaggcgacagctttcatctgtatgcatggatttactacaatttactgaaaaaagcgcgtatttacacgctaggcatctgttttgagctggtataattcgcggatattcctgcccaggcc

SEQ ID NO: 55540 - protein, 258 aa, Glycine max
  peptide (1)..(258): Ceres Seq. ID no. 15176111
VNKFRGIQSSRKGIWVLQEVNCPSVLIEAGFMSNPSDMSNLKSTAYQQKMAGAILTGIQQYLSAHENQTTFIPVDTTIEVKVKDTAAHPLFVVDGEKMGRKGLKELKLDPNDIDNISVLKDEAAFKKYGEEGKNGVVEITTKKQVADSTTTKQHSKADLMMKKLNELKKDNEKSYFEIDGKSVITTKSGQTVWIEVVTDLVLVDGKRVSVDELNTSYKRNDFVEAAGNDYSKKYHKGILLLSTRTHSIKEIQKMLAVN

SEQ ID NO: 55541 - protein, 227 aa, Glycine max
  peptide (1)..(227): Ceres Seq. ID no. 15176112
MSNPSDMSNLKSTAYQQKMAGAILTGIQQYLSAHENQTTFIPVDTTIEVKVKDTAAHPLFVVDGEKMGRKGLKELKLDPNDIDNISVLKDEAAFKKYGEEGKNGVVEITTKKQVADSTTTKQHSKADLMMKKLNELKKDNEKSYFEIDGKSVITTKSGQTVWIEVVTDLVLVDGKRVSVDELNTSYKRNDFVEAAGNDYSKKYHKGILLLSTRTHSIKEIQKMLAVN

SEQ ID NO: 55542 - protein, 221 aa, Glycine max
  peptide (1)..(221): Ceres Seq. ID no. 15176113
MSNLKSTAYQQKMAGAILTGIQQYLSAHENQTTFIPVDTTIEVKVKDTAAHPLFVVDGEKMGRKGLKELKLDPNDIDNISVLKDEAAFKKYGEEGKNGVVEITTKKQVADSTTTKQHSKADLMMKKLNELKKDNEKSYFEIDGKSVITTKSGQTVWIEVVTDLVLVDGKRVSVDELNTSYKRNDFVEAAGNDYSKKYHKGILLLSTRTHSIKEIQKMLAVN

SEQ ID NO: 55543 - DNA, 1006 bp, Glycine max
  misc_feature (1)..(1006): Ceres Seq. ID no. 15169858
aattcacttccgctaacacgcaattcacaaatcacaaatcacaaatcacaaatcacaaaggtcttttcatttctgctgattatcctcttcagccgccatggaatcggaggctgtcttgaacctcttcgattcttgctggtttgaggttaacattttgaagacaaattcaagtcctcacatatcaattacaagttataacgaaagtttagattatgagataaaagaagaagaagaagaagaagaagaaccaaagctacccttgatccgaaccagccacaccagatccatgagtgaccaattatccatgataacgacaagcttcaaccatgattctctgtcaccagactcagtgcttcttctccatccaaagctccaaatcatactctcaggaaaagaagccactgactcagaatctgatgaggtgttgtgtcccaagaagaacaaaaaaatctcaagcaatggaactaggaagaggagggagagcaagagtttgtcagaccttgaatttgaggagctaaaagggttcatggatctgggttttgttttctcagaggaggataaagactcaagcttggcttcaattattcctgggttgcaaaggctagggaaaaaggaagaggaaaaagaagaagatgatgattgtgatgagataagtgttccaaggccttacctttctgaagcatgggaggttcaggaatgtgataggagaaaaaaagagaaccctttggtgaattggaaaatgcctgctatcaacaatgaaactgacatgaaagaaagtctcagatggtgggctcacactgttgcttccactgtcagatgatgatgaacttcttcataatccaaaaattttcttctttttctttcgtttcatatatacattttccttgttcttttttcaatttttctatgtatttattcccttttctaaaattttttctggaatctggcattccacaaaatttgttacatgtaattttagataaaaagagaggaaatttcattttgc

SEQ ID NO: 55544 - protein, 240 aa, Glycine max
  peptide (1)..(240): Ceres Seq. ID no. 15169859
MESEAVLNLFDSCWFEVNILKTNSSPHISITSYNESLDYEIKEEEEEEEEPKLPLIRTSHTRSMSDQLSMITTSFNHDSLSPDSVLLLHPKLQIILSGKEATDSESDEVLCPKKNKKISSNGTRKRRESKSLSDLEFEELKGFMDLGFVFSEEDKDSSLASIIPGLQRLGKKEEEKEEDDDCDEISVPRPYLSEAWEVQECDRRKKENPLVNWKMPAINNETDMKESLRWWAHTVASTVR

SEQ ID NO: 55545 - protein, 177 aa, Glycine max
  peptide (1)..(177): Ceres Seq. ID no. 15169860
MSDQLSMITTSFNHDSLSPDSVLLLHPKLQIILSGKEATDSESDEVLCPKKNKKISSNGTRKRRESKSLSDLEFEELKGFMDLGFVFSEEDKDSSLASIIPGLQRLGKKEEEKEEDDDCDEISVPRPYLSEAWEVQECDRRKKENPLVNWKMPAINNETDMKESLRWWAHTVASTVR

SEQ ID NO: 55546 - protein, 171 aa, Glycine max
  peptide (1)..(171): Ceres Seq. ID no. 15169861
MITTSFNHDSLSPDSVLLLHPKLQIILSGKEATDSESDEVLCPKKNKKISSNGTRKRRESKSLSDLEFEELKGFMDLGFVFSEEDKDSSLASIIPGLQRLGKKEEEKEEDDDCDEISVPRPYLSEAWEVQECDRRKKENPLVNWKMPAINNETDMKESLRWWAHTVASTVR

SEQ ID NO: 55547 - DNA, 1782 bp, Glycine max
  misc_feature (1)..(1782): Ceres Seq. ID no. 15176457
cgagacttcttttttcttgtgatgacaattcacaaaacaccaaagttaatcaaacaacgttctatgatggttgtgggatgccgacaccattaacaaacgggaagtgcggtttaggacctccatgatcaacaagaacatgctagagctactcagctagttactattttttttatctgtaagaattgaagacaaattatctcttacatgctcaatagactaagctagctagtataagaaaaggccctctctgccctactcctttttcactacactttctcacccactacactacactatgtttccccagccatggatcttcttgatagctaccatcattgcaatttcactgttcatgtcctcactggttgagtcatttccagtagctgataaggtcaaatccttgcctgaacagtcacctgtttccttccaacaatttgctggctttgtacccgttgatgacaagaaccagagagctcttttttactactttgttgaagcagaaaccaaccctgcttcaaagcctctagttctctggctcaatggagggcctggttgtacatctgtaggagttggagccttcacagaacatggtccttttgttacaaatcaaggagaagctattgagaaaaatcagtatagttggaacaaagaggcaaacattttgtacctagagtcaccagcaggcgttggattctcttactctctcaatttgtcattttataaaacactgaacgatgaaatcacagcccgagacagtctggttttcctgcggcgctggtttgccaagttcccagaatacaagaatagagatttttatataacgggagagagttatggaggtcactatgtacctcaacttgctgaactcataattaagagtaaagtgaatttcaacctaaagggcatagcaataggaaaccctcttctggatttcgacactgatatgaatgcagtcgatgaatattactggtctcatggaataataagtgattatgcatacaaaatcaggacctctctatgtaactcgtctagagtattaagagaatacttcagtggccaaatttccaaagattgtcttgttgcagctcaaaaagtctcagaagaatattcttttacaaatttcatcgacccatattacgttgttggggagaaatgtctttcttacaatgtttctcaggcaggttttcttagggagacgctaaattcagggatgtttcagtttaggaactctcattatgtgcttcaaacagaagaacctgaccagcaagttgatgagtgtaatttgaaatattcagagatgtacttgaacaggaaagatgtgcagaaggctctccatgcccggctggagggaaccaccaaatatcgtttgtgcagcaagattgtacaaacaaattatgacccattgaacagagagataccaacaattaatgttgtcggcttccttgtaaaatcaggtcttcgagtcatcgtatacagtggggatcaagactctgtgattccattcatgggcacgagaagattggttgatagactagcaaagacactaggacttaaaacaaccctgccttacagtgcctggtttgtggacaagcaggttggaggatggacaaaagtttatggcaatcacctcacgtacaccacaataagaggagcttcacatggcactccagctactcaaccaaagagatcttttgttttgtttaatgcgtttcttcaagggaaaccactccctaaagcatgaaaaatttaatgcttagttaataaatgtcattgccatataag

SEQ ID NO: 55548 - protein, 481 aa, Glycine max
  peptide (1)..(481): Ceres Seq. ID no. 15176458
MFPQPWIFLIATIIAISLFMSSLVESFPVADKVKSLPEQSPVSFQQFAGFVPVDDKNQRALFYYFVEAETNPASKPLVLWLNGGPGCTSVGVGAFTEHGPFVTNQGEAIEKNQYSWNKEANILYLESPAGVGFSYSLNLSFYKTLNDEITARDSLVFLRRWFAKFPEYKNRDFYITGESYGGHYVPQLAELIIKSKVNFNLKGIAIGNPLLDFDTDMNAVDEYYWSHGIISDYAYKIRTSLCNSSRVLREYFSGQISKDCLVAAQKVSEEYSFTNFIDPYYVVGEKCLSYNVSQAGFLRETLNSGMFQFRNSHYVLQTEEPDQQVDECNLKYSEMYLNRKDVQKALHARLEGTTKYRLCSKIVQTNYDPLNREIPTINVVGFLVKSGLRVIVYSGDQDSVIPFMGTRRLVDRLAKTLGLKTTLPYSAWFVDKQVGGWTKVYGNHLTYTTIRGASHGTPATQPKRSFVLFNAFLQGKPLPKA

SEQ ID NO: 55549 - protein, 462 aa, Glycine max
  peptide (1)..(462): Ceres Seq. ID no. 15176459
MSSLVESFPVADKVKSLPEQSPVSFQQFAGFVPVDDKNQRALFYYFVEAETNPASKPLVLWLNGGPGCTSVGVGAFTEHGPFVTNQGEAIEKNQYSWNKEANILYLESPAGVGFSYSLNLSFYKTLNDEITARDSLVFLRRWFAKFPEYKNRDFYITGESYGGHYVPQLAELIIKSKVNFNLKGIAIGNPLLDFDTDMNAVDEYYWSHGIISDYAYKIRTSLCNSSRVLREYFSGQISKDCLVAAQKVSEEYSFTNFIDPYYVVGEKCLSYNVSQAGFLRETLNSGMFQFRNSHYVLQTEEPDQQVDECNLKYSEMYLNRKDVQKALHARLEGTTKYRLCSKIVQTNYDPLNREIPTINVVGFLVKSGLRVIVYSGDQDSVIPFMGTRRLVDRLAKTLGLKTTLPYSAWFVDKQVGGWTKVYGNHLTYTTIRGASHGTPATQPKRSFVLFNAFLQGKPLPKA

SEQ ID NO: 55550 - protein, 265 aa, Glycine max
  peptide (1)..(265): Ceres Seq. ID no. 15176460
MNAVDEYYWSHGIISDYAYKIRTSLCNSSRVLREYFSGQISKDCLVAAQKVSEEYSFTNFIDPYYVVGEKCLSYNVSQAGFLRETLNSGMFQFRNSHYVLQTEEPDQQVDECNLKYSEMYLNRKDVQKALHARLEGTTKYRLCSKIVQTNYDPLNREIPTINVVGFLVKSGLRVIVYSGDQDSVIPFMGTRRLVDRLAKTLGLKTTLPYSAWFVDKQVGGWTKVYGNHLTYTTIRGASHGTPATQPKRSFVLFNAFLQGKPLPKA

SEQ ID NO: 55551 - DNA, 1322 bp, Glycine max
  misc_feature (1)..(1322): Ceres Seq. ID no. 15225507
tcacagatgaacaaagtcacagctagaagctctcaagaaatgtcttccaagaggcaccactttcattggacaaataaggttgggactgaggatggcgaagttcccacttcagaatcattctcaacactcatcaaagaggagaaaaaacatgaagacaaggtttctattgttgctgctgctgccgaggcaacaaaagcaccagcatctcatgtaacaaggaagaagaagctgcaagcagtggcagtctcaagaatccggtctgtgctcaccgtgttcaacaacaacagcaacaacaaccgatcctcgaactcatctttaggcctcggctcgcgcgtggtcggaaccttattcggctatcgacgagggcacgtgcactttgcattccagaaggaccccacttcccagccagccttcctcatagagctggctacgccaataagtgttcttgttcgcgagatggcgtccgggttggtcagaattgcccttgaatgtgacaaggagaaagaaacagagaagaaacatgtgaggctgcttgaagagcctctgtggaggacttactgcaatggcaagaagtgtggctttgccaccagaagagagtgtggaccaaaggattgggatgttctcaaagcagttgaaccaatttcaatgggtgctggtgttttgccaggaaataatagtaataataataataatagtggagctgaagcagtagggtcagagggtgaaatcatgtacatgagggcaaagtttgagagaattgttgggtccagagactctgaagctttctacatgatgaatcctgatagcaatggtgctcctgaactcagtgtttacttgcttagagtctagcaaccttgcaagcttgcaagatctctgtttattatacttaattttcctctttgttttgggttattggtatactacttgcttagctcttcaatcatgaacatggttgatctagtcttctccagatttttctttttttcatgtagtatattaagtgggtttacttttttttttgttagaataggtgagtaggctaagtaaggaagacggggggagatagtgggtaaccaatactttacagcattgtggtgtgtggggggtgggtcatgaaaggtgtatatgtgtaattttttttccctttccaatccttttaattaatgatatgagggatggaggttaatgcaagtcatcattgtcttggcatttttagttggttgaaatagcttttgatcatttcatcatgtcatcttattgtgaaattgccctcttcgccgttatgtactaattgcttgtcgattaatcaattaattccctat

SEQ ID NO: 55552 - protein, 282 aa, Glycine max
  peptide (1)..(282): Ceres Seq. ID no. 15225508
SQMNKVTARSSQEMSSKRHHFHWTNKVGTEDGEVPTSESFSTLIKEEKKHEDKVSIVAAAAEATKAPASHVTRKKKLQAVAVSRIRSVLTVFNNNSNNNRSSNSSLGLGSRVVGTLFGYRRGHVHFAFQKDPTSQPAFLIELATPISVLVREMASGLVRIALECDKEKETEKKHVRLLEEPLWRTYCNGKKCGFATRRECGPKDWDVLKAVEPISMGAGVLPGNNSNNNNNSGAEAVGSEGEIMYMRAKFERIVGSRDSEAFYMMNPDSNGAPELSVYLLRV

SEQ ID NO: 55553 - protein, 280 aa, Glycine max
  peptide (1)..(280): Ceres Seq. ID no. 15225509
MNKVTARSSQEMSSKRHHFHWTNKVGTEDGEVPTSESFSTLIKEEKKHEDKVSIVAAAAEATKAPASHVTRKKKLQAVAVSRIRSVLTVFNNNSNNNRSSNSSLGLGSRVVGTLFGYRRGHVHFAFQKDPTSQPAFLIELATPISVLVREMASGLVRIALECDKEKETEKKHVRLLEEPLWRTYCNGKKCGFATRRECGPKDWDVLKAVEPISMGAGVLPGNNSNNNNNSGAEAVGSEGEIMYMRAKFERIVGSRDSEAFYMMNPDSNGAPELSVYLLRV

SEQ ID NO: 55554 - protein, 269 aa, Glycine max
  peptide (1)..(269): Ceres Seq. ID no. 15225510
MSSKRHHFHWTNKVGTEDGEVPTSESFSTLIKEEKKHEDKVSIVAAAAEATKAPASHVTRKKKLQAVAVSRIRSVLTVFNNNSNNNRSSNSSLGLGSRVVGTLFGYRRGHVHFAFQKDPTSQPAFLIELATPISVLVREMASGLVRIALECDKEKETEKKHVRLLEEPLWRTYCNGKKCGFATRRECGPKDWDVLKAVEPISMGAGVLPGNNSNNNNNSGAEAVGSEGEIMYMRAKFERIVGSRDSEAFYMMNPDSNGAPELSVYLLRV

SEQ ID NO: 55555 - DNA, 1427 bp, Glycine max
  misc_feature (1)..(1427): Ceres Seq. ID no. 14302555
tctttccttctatctgacacacagagtcgccgactgactctgcactctgcaacagatgaagcacccaacatggcctcgcacctcctcttctcccttctcctctcttcctttctccaaccgttccgaattcttcaccacgcgcctctgcgcgcgtcctccgctgccgtcccctcccggcgccggcgacttctcggcgctcccctacgacgtgctggcgaagatcgccgcctccttcgacgaccccaacctccgcgcggcgtcactggtgtgccgcgcctggtgcgaggcgctgcggccgctgcgggaggccatggcgctgctcctctgggggaagcgcttcaagcacggccaccgtggcgtcggccccaaccccgatagggccctcgactccttcatcaaagccgccgcgcgcggctccgccctcgccatggtcgacgccggcctcatctactgggagcgaggcgagaagcccaaggccatggagttttatcataaggctgcggaactcggaaacccttctgcgcagtgcaatttgggactttcctatctccaagctgaacctccgaacactgagctagctgtcaaatggttacataaagcttctgtttgtgggaatgttcgtgcccagtaccagcttgcgctttgtctgcatcgcggtggtgggagggtccgtagcaatctgaaagaagctgctaaatggtatatgaaagctgcagagggtgggtatgtccgtgccatgtacaatatctccttgtgcttctcctttggggaaggactgacacgtaatcatcaactagcaagaaaatggatgaagcgggctgcggatcgtgggcatagtaaagctcaatttgagcatggacttgctctcttttctgagggagacatgatgaaggctgtggtttacttggaacttgctactcgtgctggtgaaaaaggtgctgctcatgtcaagaatgcagttcttcatcggctttcatcagcttcacgtgatcacgccatgcatctagctaacagttggcgtgcattgccatcaagttgagccaatccttatgttggtttgtgatgaagaagttgcatgaccttggtcggtggcatcagaagagtgaagtcaactaagaatacctaagcatagaaacaaggaaagcaggaggagctgactaagaaactacctttgcctgctaatcctgactatagtggttttcctataatataaagaaaactagttggtgggcgtttgtaaaagctagttgaatttgaatcctttgtaaaacgccccattgactagttgcaagttcctctcaagttccccttacaactgtgcagggtagaatgtggtgggcgttttttgtcataagtggcatctagaaaattgcaacgtcatatactcatattactccatattatataggatgaatgactgattaagt

SEQ ID NO: 55556 - protein, 327 aa, Glycine max
  peptide (1)..(327): Ceres Seq. ID no. 14302556
MKHPTWPRTSSSPFSSLPFSNRSEFFTTRLCARPPLPSPPGAGDFSALPYDVLAKIAASFDDPNLRAASLVCRAWCEALRPLREAMALLLWGKRFKHGHRGVGPNPDRALDSFIKAAARGSALAMVDAGLIYWERGEKPKAMEFYHKAAELGNPSAQCNLGLSYLQAEPPNTELAVKWLHKASVCGNVRAQYQLALCLHRGGGRVRSNLKEAAKWYMKAAEGGYVRAMYNISLCFSFGEGLTRNHQLARKWMKRAADRGHSKAQFEHGLALFSEGDMMKAVVYLELATRAGEKGAAHVKNAVLHRLSSASRDHAMHLANSWRALPSS

SEQ ID NO: 55557 - protein, 242 aa, Glycine max
  peptide (1)..(242): Ceres Seq. ID no. 14302557
MALLLWGKRFKHGHRGVGPNPDRALDSFIKAAARGSALAMVDAGLIYWERGEKPKAMEFYHKAAELGNPSAQCNLGLSYLQAEPPNTELAVKWLHKASVCGNVRAQYQLALCLHRGGGRVRSNLKEAAKWYMKAAEGGYVRAMYNISLCFSFGEGLTRNHQLARKWMKRAADRGHSKAQFEHGLALFSEGDMMKAVVYLELATRAGEKGAAHVKNAVLHRLSSASRDHAMHLANSWRALPSS

SEQ ID NO: 55558 - protein, 203 aa, Glycine max
  peptide (1)..(203): Ceres Seq. ID no. 14302558
MVDAGLIYWERGEKPKAMEFYHKAAELGNPSAQCNLGLSYLQAEPPNTELAVKWLHKASVCGNVRAQYQLALCLHRGGGRVRSNLKEAAKWYMKAAEGGYVRAMYNISLCFSFGEGLTRNHQLARKWMKRAADRGHSKAQFEHGLALFSEGDMMKAVVYLELATRAGEKGAAHVKNAVLHRLSSASRDHAMHLANSWRALPSS

SEQ ID NO: 55559 - DNA, 1482 bp, Glycine max
  misc_feature (1)..(1482): Ceres Seq. ID no. 15176941
gataagtaattaaatcaagaatcttctaagattaacaaatggtgcatataggttgtatgatagtcatcttttttcctttaccattgttataacataatcatcacattggtgatattaattggcaggattgtttggagttataagagacccaaaatttagacttggtcattatgatgagtatggatataactcatttgtatttattacctttggacactactttctaccattcttggcaggcaagtttttgtttgggatgacattgtttattgtgcttttgatatacaaatggagaaaaaggcatttgtcaatatatgaaaatattgaaaattatctggaacaaaataacctgatgcctattggatactcatacaaagaaattaagaagatggctagaggtttcaaggagaaattgggtggaggaggctatggcattgtattcaagggaaagttgcatagtgggccttctgtggcaattaaaatgctacataaagcaaaaggtagcggccaagactttattagtgaaattgcaacaattggaagaatacatcatcaaaatgtagtacaactaattggatattgtgttgaaggctcaaaacgtgcccttgtttatgaattcatgcccaatggatctcttgacaaatttatttttcccaaagatggaaatatacatttaacatatgacgaaatatataatatagcaattggagtagctcgtgggattgcttatctccatcatgggtgtgagatgaaaattttgcattttgatatcaaaccccataacatccttcttgatgaaacattcaccccaaaggtctctgactttggattggcaaaactatatccaatagataatagcattgtgactaggacagaggcaagagggacaattggatatatggctccagaattattttatggaaatattggaggaatatcccacaaggctgatgtttatagctttgggatgcttttgatagatatgacaaataagaggaagaacccaaatccccatgcagatgatcattcaagtcaactttactttcctacttggatttataatcaacttggaaaagagacagatatagaaatggaaggtgtcacagaggaggaaaagaagatgatcattgtttcactttggtgtatacagttgaaaccaagcgatcgcccctcaatgaacaaagtagtggaaatgcttgaaggagatattgaaagcctggaaatacctccaaagccttctctatatccacatgatacaatggaaaatgatcaaagcatctactctagtcaaacaatgtcaacggacttcattagttcttctagttattccaaggaaattgtgactaatcctttggtagaggatgttatttgataatgcacagtagttatgtatttgtattcaccttattgtcttaaacacctgttcatctgtaatatttattttatctaaaagatttcctattgttttatctttcaaagttc

SEQ ID NO: 55560 - protein, 371 aa, Glycine max
  peptide (1)..(371): Ceres Seq. ID no. 15176942
MTLFIVLLIYKWRKRHLSIYENIENYLEQNNLMPIGYSYKEIKKMARGFKEKLGGGGYGIVFKGKLHSGPSVAIKMLHKAKGSGQDFISEIATIGRIHHQNVVQLIGYCVEGSKRALVYEFMPNGSLDKFIFPKDGNIHLTYDEIYNIAIGVARGIAYLHHGCEMKILHFDIKPHNILLDETFTPKVSDFGLAKLYPIDNSIVTRTEARGTIGYMAPELFYGNIGGISHKADVYSFGMLLIDMTNKRKNPNPHADDHSSQLYFPTWIYNQLGKETDIEMEGVTEEEKKMIIVSLWCIQLKPSDRPSMNKVVEMLEGDIESLEIPPKPSLYPHDTMENDQSIYSSQTMSTDFISSSSYSKEIVTNPLVEDVI

SEQ ID NO: 55561 - protein, 339 aa, Glycine max
  peptide (1)..(339): Ceres Seq. ID no. 15176943
MPIGYSYKEIKKMARGFKEKLGGGGYGIVFKGKLHSGPSVAIKMLHKAKGSGQDFISEIATIGRIHHQNVVQLIGYCVEGSKRALVYEFMPNGSLDKFIFPKDGNIHLTYDEIYNIAIGVARGIAYLHHGCEMKILHFDIKPHNILLDETFTPKVSDFGLAKLYPIDNSIVTRTEARGTIGYMAPELFYGNIGGISHKADVYSFGMLLIDMTNKRKNPNPHADDHSSQLYFPTWIYNQLGKETDIEMEGVTEEEKKMIIVSLWCIQLKPSDRPSMNKVVEMLEGDIESLEIPPKPSLYPHDTMENDQSIYSSQTMSTDFISSSSYSKEIVTNPLVEDVI

SEQ ID NO: 55562 - protein, 327 aa, Glycine max
  peptide (1)..(327): Ceres Seq. ID no. 15176944
MARGFKEKLGGGGYGIVFKGKLHSGPSVAIKMLHKAKGSGQDFISEIATIGRIHHQNVVQLIGYCVEGSKRALVYEFMPNGSLDKFIFPKDGNIHLTYDEIYNIAIGVARGIAYLHHGCEMKILHFDIKPHNILLDETFTPKVSDFGLAKLYPIDNSIVTRTEARGTIGYMAPELFYGNIGGISHKADVYSFGMLLIDMTNKRKNPNPHADDHSSQLYFPTWIYNQLGKETDIEMEGVTEEEKKMIIVSLWCIQLKPSDRPSMNKVVEMLEGDIESLEIPPKPSLYPHDTMENDQSIYSSQTMSTDFISSSSYSKEIVTNPLVEDVI

SEQ ID NO: 55563 - DNA, 1282 bp, Glycine max
  misc_feature (1)..(1282): Ceres Seq. ID no. 15226408
agcacaaatcaaactgtgtgttctttgattgtgaagaaaaagctttgatgcaataggtaccatgatggtaggctctctgatcagcaaatggctttgctgcaatatcagcgtgaaaatcttcattttttgagtgaggagattcttcgattgcaagagtgtctaagcaaatatgagggaactgatgatcggagcacaccacaggttgaccttgcccatctactagctgctcgtgatcaagagttacggacactttctgcagagatgaaccaagtgcaatctgagttgaggcttgcccgttccttgattgctgaaagggactcagagatccaacatgttcgcacgaccaacaaccaggtatctcactggatttactaatactgaaaagtgtatgtgctttgactgcaaggtgcttacagtaaacatcctaacagtatgtagaagagaatgaaagactaagagctatcttaggggaatggagcacccgggctgccaaggtatttattattcatatctgcaataaatgcgaacagctaccaactgttacaatatatactccatccggtcttaatttataagcaaaaaagacatgtttcacacttattaagaaaattagttaattttattaaattgtgtcattttcaattaaaaaataaacattttctaaactatatttcattgaaacttgatatcaagcataaaaaaaagtctttgaccttaataaatgaagaatattttagagagaatctcattaaataagacataggtaattaagatttgtttatatttaagacacaaaaataagaaacatgcccagttcgtgttgagcatttaacactacagtattatattcgagaccagaggttgagtacttcggttgggttttgttgttgtgaaagtatattctgcttaaaccttttattatcaatgattaaagcttgagcgagcactggaggctgagcggatgtcaactcttgaattacaaaggaaactttcaacgcttagaagtcaatcatatacagcagatgaagcaaacgaacttggagcttaactcacttgcaggcaaatatggaacatgcccagttcgtgttgttgagcatttaaccttgttctcacaatttaaaaagaacacttagacgtgtgtccaaggtaccgtcactattgtggagagattcaatgtacatattagcttcaaatagggttttatttttgttaagagaaattcaaattgatgtaatttaattgagttatcgtgcgccattgttctccaaaaaaaaaaaaaaaa

SEQ ID NO: 55564 - protein, 95 aa, Glycine max
  peptide (1)..(95): Ceres Seq. ID no. 15226409
MALLQYQRENLHFLSEEILRLQECLSKYEGTDDRSTPQVDLAHLLAARDQELRTLSAEMNQVQSELRLARSLIAERDSEIQHVRTTNNQVSHWIY

SEQ ID NO: 55565 - DNA, 1238 bp, Glycine max
  misc_feature (1)..(1238): Ceres Seq. ID no. 14312789
tttcaccgatttcatgttgtgtacttggagaccaatgcgaaatgctgccaaaattttgtcaaatttaacaaaatagaattaaccctgatgtatgaagctaccataaaagacggtcttcccaaatgggatagggccacacctataataaaaaagtgagattttcatgcatcgaataactttgagagtatgaccgagttattacttagatggatcgaagttggatgaatgaaagtcgcatcagcccagaatatgaggaaggcgtcgagcaattcttacaatttgcttcagaaagaggtcaaccggatgaagatggaaaatattattgtccttgcatcaattgtttgaatgaaagacgacaaatactggatgacatacgagagcatctgttgtgtgatggaattaagaggaattatacgacgtggatatggcatggtgaaatgacagacatgcagagtgggcaacaatccgaaccgtttgatgtagaaatgggagatcgcttggaggatatgattcgtgaccttggacaagagtcttttcagcaagcacatgcccctatgtatgatacattacaaactgattcaaagaaacctttgtatccggggtgcaagaattcgttgacgctgttgtcggcagttttaagtctggttaatatcaaagccagatatgggtggagtgacaaaaactttagttcactgcttcaagtagtgcacgacatgcttccagaggaaaacacattgcctaaaagttactatcaagcaaagaaaatattgtgtcccatgggtatggagtatcagaagattcatgtttgcccgaatgattgcatattatacagacatcaatttcaagaaatgtacaataagaatctatgtttgtattcaatagtgctttgaaaggacttgacgatactcaacaaagtaaatccaagactcctgctaggtggattgttgttaaatgtaatagacaaaaaggaagcactgagtgtgagtattacgtcatgcattggatgtcaactataatcttaggaaatttccagaataattgggaaatgtatttcactgatcctagaccattggaaccagaaagattgaaggcacttcgcaaccagtgggcaaagtactatttgaaagtgaaaaatgaaacttaggatgtttagacaatcttgtaattgtagtttatatttacttaatttacaattcatgtctcaacattaaatatgttttaaattcatagtaattagt

SEQ ID NO: 55566 - protein, 227 aa, Glycine max
  peptide (1)..(227): Ceres Seq. ID no. 14312790
MDRSWMNESRISPEYEEGVEQFLQFASERGQPDEDGKYYCPCINCLNERRQILDDIREHLLCDGIKRNYTTWIWHGEMTDMQSGQQSEPFDVEMGDRLEDMIRDLGQESFQQAHAPMYDTLQTDSKKPLYPGCKNSLTLLSAVLSLVNIKARYGWSDKNFSSLLQVVHDMLPEENTLPKSYYQAKKILCPMGMEYQKIHVCPNDCILYRHQFQEMYNKNLCLYSIVL

SEQ ID NO: 55567 - protein, 222 aa, Glycine max
  peptide (1)..(222): Ceres Seq. ID no. 14312791
MNESRISPEYEEGVEQFLQFASERGQPDEDGKYYCPCINCLNERRQILDDIREHLLCDGIKRNYTTWIWHGEMTDMQSGQQSEPFDVEMGDRLEDMIRDLGQESFQQAHAPMYDTLQTDSKKPLYPGCKNSLTLLSAVLSLVNIKARYGWSDKNFSSLLQVVHDMLPEENTLPKSYYQAKKILCPMGMEYQKIHVCPNDCILYRHQFQEMYNKNLCLYSIVL

SEQ ID NO: 55568 - protein, 150 aa, Glycine max
  peptide (1)..(150): Ceres Seq. ID no. 14312792
MTDMQSGQQSEPFDVEMGDRLEDMIRDLGQESFQQAHAPMYDTLQTDSKKPLYPGCKNSLTLLSAVLSLVNIKARYGWSDKNFSSLLQVVHDMLPEENTLPKSYYQAKKILCPMGMEYQKIHVCPNDCILYRHQFQEMYNKNLCLYSIVL

SEQ ID NO: 55569 - DNA, 1694 bp, Glycine max
  misc_feature (1)..(1694): Ceres Seq. ID no. 15171476
agagttaagagagccatatatcatggggtactatttggtattcgttggtgtgttcttgtggtgtgccatggctagtcacattaatggactagccatgatggatggaaagttaatgagttcctcggcaaataattatgactatggagatgctcttggcaaagccatcttgttttttgaaggacaacgctcggggaacttgcccgccacccaaagagtgaagtggaggggagactccgctctctctgatggcaaacttcaaaacgtggatttgattggaggatattacgatgctggagataacgtcaagtttggatggccaatggcatttacaactagcttattgagttgggctgctgtagagtacgagagtgagatatcttcggtgaaccagcttggttacctccacagtgctattcattggggcgcagactttatactgagagcccacacttccccaaccaccctctatacacaggtgggagatgggaacgctgatcacaattgttgggagcgcccggaagacatggatacagcaagggcagtgtacaagatagatgctaattccccgggaactgaagccgcagctgagtctgctgctgctcttgctgctgcttcaattgtcttcaagaaaatagatgccaattattcctccacgctattaagcaagtcaaaatcactgtttgattttgcagacaagtataggggttcttactcgggttcttgtccattctattgctcgtactcaggttaccaggatgaactgttatgggctgcttcttggctatataaggcgagtggagaaagcaagtacttgagttactccataggcaaccaaggttggagtcaggcggtgtctgaattcagctgggataacaaatatgttggagctcagacattactaacggaggaattctatggtgggaagaaagacttggccaagtttaagagtgacgttgaatcatttatatgttcagtgatgccagcaagtagctctctacagattaaaacaactcctggtgggcttctatttactagagacagcagtaatttgcaatatgccacgagctcaaccatggtgctattcattttctctaaaatcctaaacagaaatcacattgatagaatacattgtggttctgcgcttttcaccccgtctcagattagagcctttgcaaaaacacaggtggactacatactaggaagcaatccgatgaagatgtcttacatggtgggatttggcagtaaatacccaaagcaattacatcacagaggctcatccatcccttcaatcaatgttcatccgaccaaggtgggttgcaatgatggtctctcagtttattacaattctgctaatccaaatccaaatactcatgtgggtgcgattgttggaggccccgattcaaatgaccgattcagtgatgcaagatctgactattcccacagcgaacctaccacctacatgaatgctgctttcgtggcttcagtgtctgctttgcttggcaaaacgaccgatcgaaaccaaattcaggactctgcagtttccccatatcgatgctagggaaactaatgaagttaattaatgtaacataatcaccgattatatatgtgtcagtggtactagttatttaccctgccatatattgaaactccacttttatgggctggtataataaaatcatacgtactgttttacc

SEQ ID NO: 55570 - protein, 518 aa, Glycine max
  peptide (1)..(518): Ceres Seq. ID no. 15171477
ELREPYIMGYYLVFVGVFLWCAMASHINGLAMMDGKLMSSSANNYDYGDALGKAILFFEGQRSGNLPATQRVKWRGDSALSDGKLQNVDLIGGYYDAGDNVKFGWPMAFTTSLLSWAAVEYESEISSVNQLGYLHSAIHWGADFILRAHTSPTTLYTQVGDGNADHNCWERPEDMDTARAVYKIDANSPGTEAAAESAAALAAASIVFKKIDANYSSTLLSKSKSLFDFADKYRGSYSGSCPFYCSYSGYQDELLWAASWLYKASGESKYLSYSIGNQGWSQAVSEFSWDNKYVGAQTLLTEEFYGGKKDLAKFKSDVESFICSVMPASSSLQIKTTPGGLLFTRDSSNLQYATSSTMVLFIFSKILNRNHIDRIHCGSALFTPSQIRAFAKTQVDYILGSNPMKMSYMVGFGSKYPKQLHHRGSSIPSINVHPTKVGCNDGLSVYYNSANPNPNTHVGAIVGGPDSNDRFSDARSDYSHSEPTTYMNAAFVASVSALLGKTTDRNQIQDSAVSPYRC

SEQ ID NO: 55571 - protein, 511 aa, Glycine max
  peptide (1)..(511): Ceres Seq. ID no. 15171478
MGYYLVFVGVFLWCAMASHINGLAMMDGKLMSSSANNYDYGDALGKAILFFEGQRSGNLPATQRVKWRGDSALSDGKLQNVDLIGGYYDAGDNVKFGWPMAFTTSLLSWAAVEYESEISSVNQLGYLHSAIHWGADFILRAHTSPTTLYTQVGDGNADHNCWERPEDMDTARAVYKIDANSPGTEAAAESAAALAAASIVFKKIDANYSSTLLSKSKSLFDFADKYRGSYSGSCPFYCSYSGYQDELLWAASWLYKASGESKYLSYSIGNQGWSQAVSEFSWDNKYVGAQTLLTEEFYGGKKDLAKFKSDVESFICSVMPASSSLQIKTTPGGLLFTRDSSNLQYATSSTMVLFIFSKILNRNHIDRIHCGSALFTPSQIRAFAKTQVDYILGSNPMKMSYMVGFGSKYPKQLHHRGSSIPSINVHPTKVGCNDGLSVYYNSANPNPNTHVGAIVGGPDSNDRFSDARSDYSHSEPTTYMNAAFVASVSALLGKTTDRNQIQDSAVSPYRC

SEQ ID NO: 55572 - protein, 496 aa, Glycine max
  peptide (1)..(496): Ceres Seq. ID no. 15171479
MASHINGLAMMDGKLMSSSANNYDYGDALGKAILFFEGQRSGNLPATQRVKWRGDSALSDGKLQNVDLIGGYYDAGDNVKFGWPMAFTTSLLSWAAVEYESEISSVNQLGYLHSAIHWGADFILRAHTSPTTLYTQVGDGNADHNCWERPEDMDTARAVYKIDANSPGTEAAAESAAALAAASIVFKKIDANYSSTLLSKSKSLFDFADKYRGSYSGSCPFYCSYSGYQDELLWAASWLYKASGESKYLSYSIGNQGWSQAVSEFSWDNKYVGAQTLLTEEFYGGKKDLAKFKSDVESFICSVMPASSSLQIKTTPGGLLFTRDSSNLQYATSSTMVLFIFSKILNRNHIDRIHCGSALFTPSQIRAFAKTQVDYILGSNPMKMSYMVGFGSKYPKQLHHRGSSIPSINVHPTKVGCNDGLSVYYNSANPNPNTHVGAIVGGPDSNDRFSDARSDYSHSEPTTYMNAAFVASVSALLGKTTDRNQIQDSAVSPYRC

SEQ ID NO: 55573 - DNA, 1141 bp, Glycine max
  misc_feature (1)..(1141): Ceres Seq. ID no. 14312777
aaaaaaaaaaaaaacgcgcactctatataagtgcattttttccctttctctttcatcaaattgtgcttgtgattgtctttgtatcacgaaaactatacgattcgattccttgttttcaatggacaccttcttcaattctcaatcttcttcttcttcgagaagccgctggagttacgatactctcaagaatttccgtgagatctctccgctggttcagaatcacatcaaacgggtttattttacgttatgttgcgctgtggtggctgctgctgttggagcttttcttcatgttctgtggaacattgggggttttctcaccacgttggcttccattggaagcatggtttggttgctatctacaccccctgttgaagagcaaaagaggttgtctctgttgatggcttcggccttgtttcagggcgcttccattggacctctgattgatttggctattgccattgatcctagccttattgttagtgcatttgtggcaacttctttggcttttgcttgcttctctgcggcagctttagttgcaaggcgtagggagtacctctaccttggtggtttgctttcttctgggctgtccattcttatgtggttgcactttgcttcctctctctttgggggctcaattgcactcttcaagtttgagctgtactttgggcttttggtgtttgtgggctacgttatagtagacactcaagaaattattgaaagggctcactttggtgacctggattatgtgaagcatgcattgacattgttcactgatttggctgcaatctttgtgcgaattcttattataatgttgaagaattcatctgagagaaatgagaagaagaagaaaaggagagattagtaggctgaccgaccgactcgagctcaggcttctctacagtaatttagtttgtggagaatacataattagctgtttagatgatgttggtcccttgtgtagttagttagctatgtgtttgctgtaatggtaaatgtcaggatttcttttaaacatcttcatatgtatttgccaatatcataatgtgtcgtataacatcataccttggtttaagcagcatgttgacgaaaccttcactaaattttatttttgggtttagtttattttatacattaagtggac

SEQ ID NO: 55574 - protein, 286 aa, Glycine max
  peptide (1)..(286): Ceres Seq. ID no. 14312778
KKKKTRTLYKCIFSLSLSSNCACDCLCITKTIRFDSLFSMDTFFNSQSSSSSRSRWSYDTLKNFREISPLVQNHIKRVYFTLCCAVVAAAVGAFLHVLWNIGGFLTTLASIGSMVWLLSTPPVEEQKRLSLLMASALFQGASIGPLIDLAIAIDPSLIVSAFVATSLAFACFSAAALVARRREYLYLGGLLSSGLSILMWLHFASSLFGGSIALFKFELYFGLLVFVGYVIVDTQEIIERAHFGDLDYVKHALTLFTDLAAIFVRILIIMLKNSSERNEKKKKRRD

SEQ ID NO: 55575 - protein, 247 aa, Glycine max
  peptide (1)..(247): Ceres Seq. ID no. 14312779
MDTFFNSQSSSSSRSRWSYDTLKNFREISPLVQNHIKRVYFTLCCAVVAAAVGAFLHVLWNIGGFLTTLASIGSMVWLLSTPPVEEQKRLSLLMASALFQGASIGPLIDLAIAIDPSLIVSAFVATSLAFACFSAAALVARRREYLYLGGLLSSGLSILMWLHFASSLFGGSIALFKFELYFGLLVFVGYVIVDTQEIIERAHFGDLDYVKHALTLFTDLAAIFVRILIIMLKNSSERNEKKKKRRD

SEQ ID NO: 55576 - protein, 173 aa, Glycine max
  peptide (1)..(173): Ceres Seq. ID no. 14312780
MVWLLSTPPVEEQKRLSLLMASALFQGASIGPLIDLAIAIDPSLIVSAFVATSLAFACFSAAALVARRREYLYLGGLLSSGLSILMWLHFASSLFGGSIALFKFELYFGLLVFVGYVIVDTQEIIERAHFGDLDYVKHALTLFTDLAAIFVRILIIMLKNSSERNEKKKKRRD

SEQ ID NO: 55577 - DNA, 1551 bp, Glycine max
  misc_feature (1)..(1551): Ceres Seq. ID no. 14308437
gggagagaaaaacgaagagtgagtcaccgttccgtgttcccgccgagtcggtataaacgagtgagcgagtcacaactcaccgcgctgcatggaccctctagaagctttggtcgcccaaatccaagggctttcgagcactcccggcgacctcactcgcctccacagtgttctgaagcaagccgatgactcgctccgatccgagtcaagtcgcctcgctccgattctcacccagctcgacccctccattcattccctcgggtttctctacatcctagaagcttcaatgaccgatccggtaaccaaaacgcaggctgagaccgtcgttccgatcgttactaggtttattggcgcttgcagcccggagcagattcgcttagcgcctgataaatttttatctgtctgtaagaggttaaaggatcaagtgatgctgctggaagctccgatacggggtgtggctcctttgttcactgctcttcggaaacttcaggtctccacagaacacttgactccactacactcagagtttcttctgctgtgcttgttggcaaagtgctacaaaactggtctatccattttggatgatgatgtttttgaagtagaccaaccacgagacctttttctctactgttattatggaggtatgatatgcattggacagaagcgctttcagaaggcattggacctcctgcataatgttgtaactgctcccatgtctaccataaatgctatagctgttgaagcttacaaaaagtatatattggtttctctcattcgtcatggacagttctcaaccagtcttcctaagtattcttcttcgactgctcaaaggaacctgaagaacttttgtcagccttacgtcgaattggctaatagttatggcactggacaaattgaagaactagaggcatatgccagggcaaatgcagagaagtttgaatctgacaacaaccttggactggttaatcaggttgtatcatccatgtataagcggaatattcagagattgacccagacatacttgaccctttctctccatgatatagccagcacagtgcagttaaatagccccaaagaagctgaaatgcatgtgctacaaatgattcaggatggcgaaatatatgcaactatcaaccagaaggatggaatggtgagattcttggaggatcctgaacagtataaaacctgtgaaatgattgaacatattgattcatcaatccaaagaataatggcactctcaaggaaacttactgcgacagacgaacaaatttcatgcgatcagttgtatttgtctaaggctggaagagagagacaaagatatgactttgatgactttgacgttccacaaaagttcaacatttaaggggctaggaatgatggaagtagatctggttatggtccatcacccgtttcctttatcttttgttattcctggttctgagagtgggggagtgttttatttcagtcccaaatggaagagtgcttgttctgaggatgttgaattgtctcaacttattaactatataaaatctataactgattctttgcacattt

SEQ ID NO: 55578 - protein, 423 aa, Glycine max
  peptide (1)..(423): Ceres Seq. ID no. 14308438
MDPLEALVAQIQGLSSTPGDLTRLHSVLKQADDSLRSESSRLAPILTQLDPSIHSLGFLYILEASMTDPVTKTQAETVVPIVTRFIGACSPEQIRLAPDKFLSVCKRLKDQVMLLEAPIRGVAPLFTALRKLQVSTEHLTPLHSEFLLLCLLAKCYKTGLSILDDDVFEVDQPRDLFLYCYYGGMICIGQKRFQKALDLLHNVVTAPMSTINAIAVEAYKKYILVSLIRHGQFSTSLPKYSSSTAQRNLKNFCQPYVELANSYGTGQIEELEAYARANAEKFESDNNLGLVNQVVSSMYKRNIQRLTQTYLTLSLHDIASTVQLNSPKEAEMHVLQMIQDGEIYATINQKDGMVRFLEDPEQYKTCEMIEHIDSSIQRIMALSRKLTATDEQISCDQLYLSKAGRERQRYDFDDFDVPQKFNI

SEQ ID NO: 55579 - protein, 358 aa, Glycine max
  peptide (1)..(358): Ceres Seq. ID no. 14308439
MTDPVTKTQAETVVPIVTRFIGACSPEQIRLAPDKFLSVCKRLKDQVMLLEAPIRGVAPLFTALRKLQVSTEHLTPLHSEFLLLCLLAKCYKTGLSILDDDVFEVDQPRDLFLYCYYGGMICIGQKRFQKALDLLHNVVTAPMSTINAIAVEAYKKYILVSLIRHGQFSTSLPKYSSSTAQRNLKNFCQPYVELANSYGTGQIEELEAYARANAEKFESDNNLGLVNQVVSSMYKRNIQRLTQTYLTLSLHDIASTVQLNSPKEAEMHVLQMIQDGEIYATINQKDGMVRFLEDPEQYKTCEMIEHIDSSIQRIMALSRKLTATDEQISCDQLYLSKAGRERQRYDFDDFDVPQKFNI

SEQ ID NO: 55580 - protein, 311 aa, Glycine max
  peptide (1)..(311): Ceres Seq. ID no. 14308440
MLLEAPIRGVAPLFTALRKLQVSTEHLTPLHSEFLLLCLLAKCYKTGLSILDDDVFEVDQPRDLFLYCYYGGMICIGQKRFQKALDLLHNVVTAPMSTINAIAVEAYKKYILVSLIRHGQFSTSLPKYSSSTAQRNLKNFCQPYVELANSYGTGQIEELEAYARANAEKFESDNNLGLVNQVVSSMYKRNIQRLTQTYLTLSLHDIASTVQLNSPKEAEMHVLQMIQDGEIYATINQKDGMVRFLEDPEQYKTCEMIEHIDSSIQRIMALSRKLTATDEQISCDQLYLSKAGRERQRYDFDDFDVPQKFNI

SEQ ID NO: 55581 - DNA, 1508 bp, Glycine max
  misc_feature (1)..(1508): Ceres Seq. ID no. 15176748
ggaagaaagagagaaggtataagcagccgttttttctgttggtatatgaaggtggtgaaggaagaagaagaagaatggtgacggaccaagatatagcgaaaggggtggagtccctactgcgtcactctgacccaaactccataactacggtaaacggcgtcgttcagcagctggaggccaaactagggttagacctctctcacaaggccagtttcatcagagaccagatcgatcatcttctccggtcacagccacagacatttgctcctcaccctcctccacttcacaaagactattttgcccctcacacccaactgcacttcccaaccacccactttgctccccattttgccctccatgacgagatcaacttcctgcagcacccccaccctcctccaccgcgtaaagtcgagacctttcctcctcaaaatgttgcccctcctcaagtgcccaaagaaagtgtgcaaactggaagcaaaagaagaggtggtgctggtggtctaaacaaagtttgtggtgtttctcctgaacttcaggcggttgttggtgagccggcaatgccaagaactgaaattgtgaggcagctgtgggcatacataaagaaaaacaacctccaagatcctggtaacaaaagaaagataatttgtgatgatgccctgcgtttggtatttgagacagactgcaccgatatgttcaagatgaatcagttgctagctaaacacattatcccacttggtcctacaaaggagtcacaggctaaacgagtgaaggtggatactgaaattaagactgaaagtgctgaacctgctccatctaccgtggcaatatctgaagcgcttgccaaatttttgggcactgagggaagagagatgcaacagtctgaagccataagacttgtttgggagtacatcaagcttcaccatttggaggatcctttaaattcaatggtgatattatgcgatgcaaagcttcaagagctacttggatgtgaaagcatttctgctttaggaataccagagatgttagcacgtcatcatctatttaaacagtctgacacccgttagtgctgatcaattattgccatataagggtatgatctgcacaaaacgctggttatatgtttctgctcgttgctagatcgtataggaactttttacttattcctgtcacttcatttatctctttgttcactgacgtatgtaaactgtatgttgtctgacggttattaggttggttgtttagaatgacaatgtataccttgagctaggcaagaagtatattgtatttaatatatgccctttaggttacccgtgcattttattttatcagttctcaatgtctaacctcaactggctgatcgaattagtgatacttttgtacattgagatacaccaactactctgaaatgcaccttgtttttaccaaattttgtgaaaaatctcttggctttacatacatgagccgtgtgcagacttacatctaatctgaagtttctaatgtatacttat

SEQ ID NO: 55582 - protein, 353 aa, Glycine max
  peptide (1)..(353): Ceres Seq. ID no. 15176749
KKERRYKQPFFLLVYEGGEGRRRRMVTDQDIAKGVESLLRHSDPNSITTVNGVVQQLEAKLGLDLSHKASFIRDQIDHLLRSQPQTFAPHPPPLHKDYFAPHTQLHFPTTHFAPHFALHDEINFLQHPHPPPPRKVETFPPQNVAPPQVPKESVQTGSKRRGGAGGLNKVCGVSPELQAVVGEPAMPRTEIVRQLWAYIKKNNLQDPGNKRKIICDDALRLVFETDCTDMFKMNQLLAKHIIPLGPTKESQAKRVKVDTEIKTESAEPAPSTVAISEALAKFLGTEGREMQQSEAIRLVWEYIKLHHLEDPLNSMVILCDAKLQELLGCESISALGIPEMLARHHLFKQSDTR

SEQ ID NO: 55583 - protein, 329 aa, Glycine max; identical to SEQ ID NO: 54862
  peptide (1)..(329): Ceres Seq. ID no. 15176750

SEQ ID NO: 55584 - DNA, 1256 bp, Glycine max
  misc_feature (1)..(1256): Ceres Seq. ID no. 14316326
aattccacctcacattccttatcttccttcttcttttcaatcgtcgtcgattttcagtttccgattatgagaatctgatttcagaattcaaaaaaagaaaaagaaaaagaaaaaatgaacacgttaatctcaccgccttctacaaaccgttaccttggtggggtcccttactctttcctctctccgcttcgaaacatcaccaccaaccttaaccttccgaggttccattccacggttgctaccaacttcttgtcacactctccggttcttgccacactctccgcacgtgccacttctgatgaagtagacacgcaaacagtggttgaggaacttgcagaggagaagaaagtggaagagaacaccaacgaggacaacacatccactttttcttctcctattgacaaagaacttaaaaaggttgctcagaagactgctgctacctttgcaccaagggcttccacggctacaaaaaaccctgcagtgcccggaacggttctgtacagtgtttttgaggttcaagggtatgtttcaatgttgttggggggagctttgtcttttaatctcatcttcccttctgatgaacctgacatttggagattaatgggaatgtggtccatttggatgttcacaattccttcattacgagctcgagattgctcaaagaatgagaaagaagctctcaactatctttttctcctcatcccattgatcaatgttataatcccattcttttggaagtcctttgctgttgtttggtcagcagatgtagtagccttcttgggaatgtacgcatggaagtttggatggcttcagagaacggattaaggaacccaaacttggttgttaacagttatcaaggcttgttggctcgtctttcgcatggatctcaattttatgacacacaccaatgagatgtgacattccttgtagcacttcatggtccccaactcctggatgagtgatttctcatggagtagcctttgcatctacaagggcagtaagataccgacgttgcatccttcctattatcaaatgaagagaatgctataggtcgttttcaaaagttttgcatattgtattatcgccgtgtctcacattgcagaaaatttgaaatttcagaatgtaatcaagaatctcccaaagatgaaatataacgtagtcatgatatgtagattttgcatcagaggtggttgagattttagttttcaaatgcaattttcgaaataaaacatttgataaaaatagagttgaaattc

SEQ ID NO: 55585 - protein, 236 aa, Glycine max
  peptide (1)..(236): Ceres Seq. ID no. 14316327
MNTLISPPSTNRYLGGVPYSFLSPLRNITTNLNLPRFHSTVATNFLSHSPVLATLSARATSDEVDTQTVVEELAEEKKVEENTNEDNTSTFSSPIDKELKKVAQKTAATFAPRASTATKNPAVPGTVLYSVFEVQGYVSMLLGGALSFNLIFPSDEPDIWRLMGMWSIWMFTIPSLRARDCSKNEKEALNYLFLLIPLINVIIPFFWKSFAVVWSADVVAFLGMYAWKFGWLQRTD

SEQ ID NO: 55586 - DNA, 1404 bp, Glycine max
  misc_feature (1)..(1404): Ceres Seq. ID no. 14313317
tttttacttttatttatttttaccgtgcccacattgtaaaatagagaagttaattgataacactacatgccacacatttgagcgcataagtaccaacataagcatgtgatgaagtgggtacgaggggagaagttgaaagttgaaacaacagtcactctctattagattagatcagcagtgtaaggtaattctgtgtgagactggtcctctctgcaaactgtgttttgggacgaagatattgtaattttgcacccttggcttttaacgcacaattggaaacccccacatggcccatatctgaattgacaaaatacaaattagttgcagcacttaaaagcctctttttttcagcaacttcagtgggttctcacaactaattaacaacttgatagtacaatataaacaaatcaaaatgaaataagctaaggtgaatttactttaactcgcgcgtgaaccgatcaacactaaccctataggcatgtaaaaagttgtttcaggtaatgttaaatgaatactgaatgtgtagttgtgtattcttctatatatgttttaaactgatattgctcacgttatataacgttttggctaaactcatatttttatgtattgttcaatcaatgttacatgtttcatggttgtttcaattatttgccagccccctcctgtggtaacagtagttctcaaagttcgaatgcattgtgaagcatgtgctcaagttatacaaaagcgaatccgcaagattcaaggagtagagtcagtggagacaagcttgggaaatgatcaagtcatagtaaaaggtgtgattgacccagcaaagcttgttgattatgtgtacaagaggaccaaaaagcaagcttctattgtgaaagaggaggaaaaggaaaagaaggaagaagaggagaaaaaggaagagaaagaaaaagagaaaaaagaaggtgaagaaagcaagggagaagatgctgaagagggtgatactaaaactgacatcaagcgaagtgaatactggccattaaggtcctacgttgactacgttgactacccttatgctcctcagattttcagtgatgagaacccaaatgcatgcactgtaatgtagatcagtctattgtactaactcggtattttttagtagctgatcaactgaagcaacttgtgctgtgctgagtcgttggagcgtggaataagatgcatggttgtgaatatttcaaggctttgtatatgatttccacggcatccctcagagttggcattctatatatggagatggatgccttgtttcttatgtttatgagctttctacgtatttccttgccaaagggtggctagaatcagttgtgttagtgtgtactgaatttcggcctacaacttcaattatgtacctataatgatggcattaattaatag

SEQ ID NO: 55587 - protein, 164 aa, Glycine max
  peptide (1)..(164): Ceres Seq. ID no. 14313318
MYCSINVTCFMVVSIICQPPPVVTVVLKVRMHCEACAQVIQKRIRKIQGVESVETSLGNDQVIVKGVIDPAKLVDYVYKRTKKQASIVKEEEKEKKEEEEKKEEKEKEKKEGEESKGEDAEEGDTKTDIKRSEYWPLRSYVDYVDYPYAPQIFSDENPNACTVM

SEQ ID NO: 55588 - protein, 154 aa, Glycine max
  peptide (1)..(154): Ceres Seq. ID no. 14313319
MVVSIICQPPPVVTVVLKVRMHCEACAQVIQKRIRKIQGVESVETSLGNDQVIVKGVIDPAKLVDYVYKRTKKQASIVKEEEKEKKEEEEKKEEKEKEKKEGEESKGEDAEEGDTKTDIKRSEYWPLRSYVDYVDYPYAPQIFSDENPNACTVM

SEQ ID NO: 55589 - protein, 134 aa, Glycine max
  peptide (1)..(134): Ceres Seq. ID no. 14313320
MHCEACAQVIQKRIRKIQGVESVETSLGNDQVIVKGVIDPAKLVDYVYKRTKKQASIVKEEEKEKKEEEEKKEEKEKEKKEGEESKGEDAEEGDTKTDIKRSEYWPLRSYVDYVDYPYAPQIFSDENPNACTVM

SEQ ID NO: 55590 - DNA, 1350 bp, Glycine max
  misc_feature (1)..(1350): Ceres Seq. ID no. 12364854
cagctacgtaggccccccccccccgatgaaaccatgctgttgcaaagaaaggatggcaagattacagctggtactacgaatgctaaagtttcccatttaatggagtccatcgagaaagattatgtctttgtcaattcccatttcgcatcattggaggctttctctgactactttgaagcatctgtgcaagatagttcctcgcacaggatttctctgtttccttcaaagaggactaatatggaggttagagatgcaaaacaaacaaaggatctgccctcttcctccactgaaggattagaaaatttaaaaagcaataaacttgaggcatgtgcagcttcctgtgaatttgctgccttaaggaaagaacatcaaatttccccactgcacccttcaaacaggttacagttgttgcatcagtatgtgcagatcattgctgaactttcacaagaaaagtataacacaggactgtatctagagtctcttgcagttgagttggtggttttggctatatggaaacagactctagaaatttgtagctcttggatggcctcaattacaaagagtgagttgcctggaagcagttcagctaatgaatccatatctgccagagatattaacttgccacagtctacagaacagaaaataaattttagtgatccttcatctatctccctgtgggccaaacatgagtttattgatgcagttgatcgtgctgagaaactatcatgtcatgttcaaaatatggataaggcaactgagatgccagatgcaatggaaattatattccaaaaagctctcttaattgggacaagtggtgctgtagatgaatatatggagatcagagatagggctgctgcatcttactcaaaagcgatgcttctactttcatttattgtggcagaagcagagaaccttccactgaacccaccattttcacttgttgccactaataaggagcgaatctcacaatatattcacagcttgcagtctcgtaaagaatcttcatcagagtcctcttcaaagaaagtgcttatacttttatcaaagtaaattactggtttttatagtttgtcttttcatcaccacttttggaatcggtgaagcaatttgttgctgacatcaatgttgacttcctgtgatgagtgcagacgagagactacctttgacagataccatgttgtatatagatagatagatataacctatcatggccttgtaaggggactttgcctttactgcatgatttcatgtatagaatgttatttctttgacatggaatttgtaaatagtgtatagctcatagtcttttacaattttgaaaccactatgatcaatcaattgaaatttctc

SEQ ID NO: 55591 - protein, 349 aa, Glycine max
  peptide (1)..(349): Ceres Seq. ID no. 12364855
QLRRPPPPDETMLLQRKDGKITAGTTNAKVSHLMESIEKDYVFVNSHFASLEAFSDYFEASVQDSSSHRISLFPSKRTNMEVRDAKQTKDLPSSSTEGLENLKSNKLEACAASCEFAALRKEHQISPLHPSNRLQLLHQYVQIIAELSQEKYNTGLYLESLAVELVVLAIWKQTLEICSSWMASITKSELPGSSSANESISARDINLPQSTEQKINFSDPSSISLWAKHEFIDAVDRAEKLSCHVQNMDKATEMPDAMEIIFQKALLIGTSGAVDEYMEIRDRAAASYSKAMLLLSFIVAEAENLPLNPPFSLVATNKERISQYIHSLQSRKESSSESSSKKVLILLSK

SEQ ID NO: 55592 - protein, 338 aa, Glycine max
  peptide (1)..(338): Ceres Seq. ID no. 12364856
MLLQRKDGKITAGTTNAKVSHLMESIEKDYVFVNSHFASLEAFSDYFEASVQDSSSHRISLFPSKRTNMEVRDAKQTKDLPSSSTEGLENLKSNKLEACAASCEFAALRKEHQISPLHPSNRLQLLHQYVQIIAELSQEKYNTGLYLESLAVELVVLAIWKQTLEICSSWMASITKSELPGSSSANESISARDINLPQSTEQKINFSDPSSISLWAKHEFIDAVDRAEKLSCHVQNMDKATEMPDAMEIIFQKALLIGTSGAVDEYMEIRDRAAASYSKAMLLLSFIVAEAENLPLNPPFSLVATNKERISQYIHSLQSRKESSSESSSKKVLILLSK

SEQ ID NO: 55593 - protein, 316 aa, Glycine max
  peptide (1)..(316): Ceres Seq. ID no. 12364857
MESIEKDYVFVNSHFASLEAFSDYFEASVQDSSSHRISLFPSKRTNMEVRDAKQTKDLPSSSTEGLENLKSNKLEACAASCEFAALRKEHQISPLHPSNRLQLLHQYVQIIAELSQEKYNTGLYLESLAVELVVLAIWKQTLEICSSWMASITKSELPGSSSANESISARDINLPQSTEQKINFSDPSSISLWAKHEFIDAVDRAEKLSCHVQNMDKATEMPDAMEIIFQKALLIGTSGAVDEYMEIRDRAAASYSKAMLLLSFIVAEAENLPLNPPFSLVATNKERISQYIHSLQSRKESSSESSSKKVLILLSK

SEQ ID NO: 55594 - DNA, 1253 bp, Glycine max
  misc_feature (1)..(1253): Ceres Seq. ID no. 15176208
gggcatcccttgtctgtcgtttggcatcatatttcaaaggaggctcagaatagctggtcgacacgccagccagatccacaaatcggaaagaatcagagcgccgtcaaaaaccgccgtccacggcggtgaaactcgccttcgaatccagagcctctctcggttcctcactcttctcacatcgagcgcaacgccaaaaaatcgaatttcacgatggaagagttggagcagtggaaggaacaactttctcacttcgctaacctagctttggatcgtcttctcgaggttcctccgaatcagctctacgcagctgctgcaatcgtgattttcacaacgctgcttcttctctcaattcggttgttcaagcgtgcgaagtcaaacactgttgtgttggccgggctcagcgggagtggaaaaactgttatcttctatcagcttagggatggctctactcatcagggtactgttacatcaatggagcctaatgaaggcacttttattcttcacaacgagaaaacaaggaagggcaagataaaacctgttcatgttgttgatgttcctgggcattctcggcttcgacccaaactggatgagtacttgcctcaagcagctgggatagtttttgtggtagatgctttggactttttaccaaactgccgtgctgcttcagagtacctttatgatctattgactaaaggaagtgttgtgaggaagaagattccagtgcttattctctgcaacaaaacagacaaagtcactgctcatactaaagagtttatccgaaaacagatggagaaggaaatagacaaattacgggcatcaaggagtgcaatatcagcagctgacattgcaaatgagttcaccctgggggtacccggtgagccatttttttttacccagtgctctaacaaagtgacaactgcagatgcttctggtttaactggggaaatatctcagctggaagagtttatcagagaacatgtaaagcaatagctggatgttgtgtttaaacttgcggatttttgctgaattgaatgaatgtgtagtgttgttcttcttggttgctatttctttgatttcaaagaactgtctggataagaagaggcaaaaaagagaaaaaggtgttttggggtggggcttggggtgttcggagtaggaatcatgatgttgggatcaataaggatttacttcattgcaagccctggtattttgattggactataatgatttatctaattgtatcgatacttttattt

SEQ ID NO: 55595 - protein, 259 aa, Glycine max
  peptide (1)..(259): Ceres Seq. ID no. 15176209
MEELEQWKEQLSHFANLALDRLLEVPPNQLYAAAAIVIFTTLLLLSIRLFKRAKSNTVVLAGLSGSGKTVIFYQLRDGSTHQGTVTSMEPNEGTFILHNEKTRKGKIKPVHVVDVPGHSRLRPKLDEYLPQAAGIVFVVDALDFLPNCRAASEYLYDLLTKGSVVRKKIPVLILCNKTDKVTAHTKEFIRKQMEKEIDKLRASRSAISAADIANEFTLGVPGEPFFFTQCSNKVTTADASGLTGEISQLEEFIREHVKQ

SEQ ID NO: 55596 - protein, 172 aa, Glycine max
  peptide (1)..(172): Ceres Seq. ID no. 15176210
MEPNEGTFILHNEKTRKGKIKPVHVVDVPGHSRLRPKLDEYLPQAAGIVFVVDALDFLPNCRAASEYLYDLLTKGSVVRKKIPVLILCNKTDKVTAHTKEFIRKQMEKEIDKLRASRSAISAADIANEFTLGVPGEPFFFTQCSNKVTTADASGLTGEISQLEEFIREHVKQ

SEQ ID NO: 55597 - DNA, 1388 bp, Glycine max
  misc_feature (1)..(1388): Ceres Seq. ID no. 14308274
gaagaaaacatctagctgaagattccaatcggagctcagaaaaaagaaacctaatcgccgatcgcgtcgccgtcgcgccgaaagtcaccggactactgcctgcttctaaatagcttataatcttatctgaagatagagatatcatcatgggagaggtggcagtaatgcattctgagcctctgcagtttgattgcaatgacatgaagcatatcactgagaaagatgtatataatctattgtcaaacgaagagcacatacttggagaagaatcaagtcaatcatcaaatgacaaaaagatcaatgatttgagagagagaggatacatgaagtatggatgtcaacattaccgaagaagatgccgtattagggccccctgttgtgatgagatttttgattgccgccattgtcacaatgaggcaaaaaataatatcaacattgaccagaagcatagacacgatattccccgccatcaagttaaacaggtgatatgttctctttgtgagacagaacaagaggttcagcaaaattgtattaactgtggcgtttgtatgggcaagtacttctgtgggacgtgtaagctctttgatgatgatgtatctaagcagcagtatcattgcagtggctgtggaatttgcagaactggaggatgtgaaaatttcttccactgccacaaatgtggttgttgctactcaactcagctgaaaaacagccacccttgcgtggaaggagcaatgcatcatgattgccccatttgctttgagtatttgtttgaatctgtgaatgatgtcactgttctgctctgtggacatacaatacataagagctgcctaaaggaaatgagggaacatttccagtatgcatgccctctctgcttgaagtcggtttgtgatatgtcaaaggtttgggagaaatttgacttggagattgctgctacaccaatgcctgaaccgtatcaaaacaaaatggtttggatcctttgcaatgattgtggcaaaagttctcacgtgcagttccatcttgttgctcaaaagtgcttgaactgcaagtcctacaacacacgggaaacaagaggctgagcaagtggtaatggttatttataggaccacttttgctctcacttcattgctgtgtaggtgtagtggcaatccaagtgcatcctttattgaggaaaatgcatgtgggaattgtcatttaattgcaggcaggccgaaccacatccaagagaaaaacggtttatcacgttgatgtggtgtcgagggtagtgtagagtcagcaattgtcgtgttggttatttcgtgttggggaaacccttttagtgttccagtgttcactcctgtaatgtttgtttgggattaatgccaactttcaaattagctgttactttatag

SEQ ID NO: 55598 - protein, 309 aa, Glycine max
  peptide (1)..(309): Ceres Seq. ID no. 14308275
MGEVAVMHSEPLQFDCNDMKHITEKDVYNLLSNEEHILGEESSQSSNDKKINDLRERGYMKYGCQHYRRRCRIRAPCCDEIFDCRHCHNEAKNNINIDQKHRHDIPRHQVKQVICSLCETEQEVQQNCINCGVCMGKYFCGTCKLFDDDVSKQQYHCSGCGICRTGGCENFFHCHKCGCCYSTQLKNSHPCVEGAMHHDCPICFEYLFESVNDVTVLLCGHTIHKSCLKEMREHFQYACPLCLKSVCDMSKVWEKFDLEIAATPMPEPYQNKMVWILCNDCGKSSHVQFHLVAQKCLNCKSYNTRETRG

SEQ ID NO: 55599 - protein, 303 aa, Glycine max
  peptide (1)..(303): Ceres Seq. ID no. 14308276
MHSEPLQFDCNDMKHITEKDVYNLLSNEEHILGEESSQSSNDKKINDLRERGYMKYGCQHYRRRCRIRAPCCDEIFDCRHCHNEAKNNINIDQKHRHDIPRHQVKQVICSLCETEQEVQQNCINCGVCMGKYFCGTCKLFDDDVSKQQYHCSGCGICRTGGCENFFHCHKCGCCYSTQLKNSHPCVEGAMHHDCPICFEYLFESVNDVTVLLCGHTIHKSCLKEMREHFQYACPLCLKSVCDMSKVWEKFDLEIAATPMPEPYQNKMVWILCNDCGKSSHVQFHLVAQKCLNCKSYNTRETRG

SEQ ID NO: 55600 - protein, 291 aa, Glycine max
  peptide (1)..(291): Ceres Seq. ID no. 14308277
MKHITEKDVYNLLSNEEHILGEESSQSSNDKKINDLRERGYMKYGCQHYRRRCRIRAPCCDEIFDCRHCHNEAKNNINIDQKHRHDIPRHQVKQVICSLCETEQEVQQNCINCGVCMGKYFCGTCKLFDDDVSKQQYHCSGCGICRTGGCENFFHCHKCGCCYSTQLKNSHPCVEGAMHHDCPICFEYLFESVNDVTVLLCGHTIHKSCLKEMREHFQYACPLCLKSVCDMSKVWEKFDLEIAATPMPEPYQNKMVWILCNDCGKSSHVQFHLVAQKCLNCKSYNTRETRG

SEQ ID NO: 55601 - DNA, 1314 bp, Glycine max
  misc_feature (1)..(1314): Ceres Seq. ID no. 14312844
aaggaataagtttgcacaccgaaggaagtaggaagtattgctcagttactttccatgatgtctaatttcgtttccaattagactcgtatttctagacttgcgggacagagctgccctcgagaaaatattttcaaccaataagtttgatgctgtgatacattttgctgggcttaaggcagtgggtgaaagcgtggataaaccactgctctactttgacaacaacttgatagggacaatcgttctatttgaagtcatggctgcccacggatgcaagaagcttgtgttctcatcttcagcaactgtatatggctggccaaaggaggtcccatgtaccgaagagttccctttgtcagcgacaaacccatatggacgaaccaagcttatcatcgaagaaatttgtcgtgatatctaccgtgcagattctgattggaaagttatactgttgagatacttcaacccagttggtgcacatcccagtggttatattggtgaagatcctcgtggaattccaaacaatctcatgccctttgttcaacaagtggcagttggcagacgccctgcattgactgtttttggaaacgattataaaacaactgacggcactggagttcgtgattacattcatgttcttgatttagcagatgggcatattgcggcattgcgtaaactcaatgatcctaaaataggttgtgaggtttataacttgggaacaggaaagggaacatctgttttggagatggtaaacgcttttgaacaggcctctggaaagaaaattccacttgcaatggctggtcggagacctggagatgctgaaattgtttatgcatcaacagagaaagcggaaagagaacttaattggaagactaaatatagcatcgatgatatgtgccgcgatcaatggaattgggctagcaaaaacccttatggctatggtgcatctgcagattcctccaattgatgtcgatgattgtcggatatagtatatatgttctcttttggggtctttttgaaccctgtcgcccaataggtccctaaagtttttctttagctattctaaggtggaagttaaatcatttcctagtttattatgaattataataaagtggtaaataagtagtggtttagtttacttagcgattctttaggttccaactcacagaatattgaatgggtattctctcatgttcttcatgaacatgactgcatcctgttttgtaaatctaaaccacacattatagagtatgactaaccggtataatcttaccttacctcattatccataataaagttttacatagcattatatgctaaaag

SEQ ID NO: 55602 - protein, 234 aa, Glycine max
  peptide (1)..(234): Ceres Seq. ID no. 14312845
MAAHGCKKLVFSSSATVYGWPKEVPCTEEFPLSATNPYGRTKLIIEEICRDIYRADSDWKVILLRYFNPVGAHPSGYIGEDPRGIPNNLMPFVQQVAVGRRPALTVFGNDYKTTDGTGVRDYIHVLDLADGHIAALRKLNDPKIGCEVYNLGTGKGTSVLEMVNAFEQASGKKIPLAMAGRRPGDAEIVYASTEKAERELNWKTKYSIDDMCRDQWNWASKNPYGYGASADSSN

SEQ ID NO: 55603 - protein, 145 aa, Glycine max
  peptide (1)..(145): Ceres Seq. ID no. 14312846
MPFVQQVAVGRRPALTVFGNDYKTTDGTGVRDYIHVLDLADGHIAALRKLNDPKIGCEVYNLGTGKGTSVLEMVNAFEQASGKKIPLAMAGRRPGDAEIVYASTEKAERELNWKTKYSIDDMCRDQWNWASKNPYGYGASADSSN

SEQ ID NO: 55604 - DNA, 1378 bp, Glycine max
  misc_feature (1)..(1378): Ceres Seq. ID no. 15226111
cagctacgtaggccccccccccaaaacttgagtatgagaagcagcttgttgatgatgatcaggtgaaaatgaatcatttcaaatcctttcttatttcttaaattttaatctaaaaaaattacatatttattatttttctttgaaccaactgcaattgttcaaatgcttcttccattatgcaatattaaccagttactaatacaactatgaattttgttttattaaaagtgtttattgcttcataagtaggtagctttactctggccattcttgatattaattcctttttgatatttattgtgttaaattgttgcttgtaattagcaaatattggaagaatgttgaacctcaaccgtatctagatattcatgttgatactcgtagcagccatggataataagtccacacagcatatatgttaccactgttacttgtatttgctatttgtgcaatgcttcatttgaagcttaaaagtctcatttggatagtcaattttagtcttgatgctcgatatttttgactaaattctagtttctgaattgtaggatcagcaagcagagacaacaacttttagatttgaaaagaatatgaaagatgtaggtgtgggttcaatgttagaggcacctgaatctcctgtggaatggcctctgcaattcaagcagcagcaaagagaaatagtggaactgtggcaagcctgcaaggtatcattgttccacaggacttacttctttcttttattcaggggtgatccaactgactccatatacnnnnnaggtggagtttagaagattatctttcctcaaagaaacatttgccagtggaaatcagtccatgaacgcttcaaggttctctttctctcttgtttctgtcacatgagcatctgatatgcatggtgcttaatgttgactgacatacatgtgtttgtttggggaaacagcgcgaagggtgttcagcgggagagagaggtgctggtcaagcttatgcagagaaggctatccgaggaagagaggaagaatctcttcagcaagtggggcattgaattggattcaaagcgccggaggaagcagctggcgaatcgcatatggagcagcaccgatatgaatcacatcgtggagagtgctgcggttgttgcaaagttattgagctttacagggctgaaggagatgtttggccttagcttctcaccacatacctgggcgtctcttttttaggccaccaaatttattcttattttaattacctaatccctgtcaagtgtgaatactcagtctcttagatacattacaacctgtatttcaacgagttaagaacaatttctagtataacataacatgttctgctcgtttcattttgcctattaatcaatatgttttccgct

SEQ ID NO: 55605 - protein, 103 aa, Glycine max
  peptide (1)..(103): Ceres Seq. ID no. 15226112
MLTDIHVFVWGNSAKGVQREREVLVKLMQRRLSEEERKNLFSKWGIELDSKRRRKQLANRIWSSTDMNHIVESAAVVAKLLSFTGLKEMFGLSFSPHTWASLF

SEQ ID NO: 55606 - protein, 76 aa, Glycine max
  peptide (1)..(76): Ceres Seq. ID no. 15226113
MQRRLSEEERKNLFSKWGIELDSKRRRKQLANRIWSSTDMNHIVESAAVVAKLLSFTGLKEMFGLSFSPHTWASLF

SEQ ID NO: 55607 - protein, 65 aa, Glycine max
  peptide (1)..(65): Ceres Seq. ID no. 15226114
  misc_feature (61)..(61): Xaa is any aa, unknown or other
  misc_feature (62)..(62): Xaa is any aa, unknown or other
MKDVGVGSMLEAPESPVEWPLQFKQQQREIVELWQACKVSLFHRTYFFLLFRGDPTDSIYXXGGV

SEQ ID NO: 55608 - DNA, 1217 bp, Glycine max
  misc_feature (1)..(1217): Ceres Seq. ID no. 15176204
ggagtgagaatagccatgtctacttcaaagagcgtcagcagttctagtgaagatgacaatgaacttagaagagggccttggactcttgaagaggataatttgctctcccaatatatttctagtcatggagaagggcgatggaatttgctagctaaacgttcaggattaaagcgaactgggaaaagttgcagattaaggtggctaaattatctaaagccagatgtaaaacggggaaatttaaccccacaagagcaacttataatcctcgaactccactcaaagtggggaaacaggtggtcaaaaattgcacaaaatttgccaggcagaacagacaatgaaatcaagaactattggagaactaggattcagaaacaggcaagacatttgaaaattgacactgacagcagagagtttcaggaacttgttaggcgtttctggatgcctagattgcttcaaaaagccaaagaatcatcttcttcagccatgtcaattcaaaaccaggcaactcctatgccttttgatggtgtttctcagcattcaactgttgggaccataccatcacattcacacaccccttggcagggaccttgtatgaatgaagctggtcccacttacatggaccaacatgagcagaactcagactctgaacacaacaatggttcatgcatctccttgtctgagtcagcaaattttccaaaagtgcctcagcattttggacgcaccaccatcacccaatatcatgccttgaataacaatgactttggcaccttcacatatgacggctacaatgtaagcaacaatgtctatgagatggacaacttcaaaacgcctactacaagggtggctgaggatgcgcaatacccaactggtgattgtcaaatggtaggaagcaattgggtaaacagcgattttgcatgtaacatgtggaacatggatgaattgtggcaatttagcaagttacaaaaataagattttagggtttggtttttttggagttaccaagactctatctttggtgatgttattattgttatcatgaactgttgattagctactaccaaattaattaatacagatggtgattgttttctgtacatctgttttgcattactctgttttgcaatttgtattgattgagaaaagtcattaattagtcactagttcaaaacacaaacagttggagattgagtgctaataaagatttcgtaaatataaag

SEQ ID NO: 55609 - protein, 322 aa, Glycine max
  peptide (1)..(322): Ceres Seq. ID no. 15176205
GVRIAMSTSKSVSSSSEDDNELRRGPWTLEEDNLLSQYISSHGEGRWNLLAKRSGLKRTGKSCRLRWLNYLKPDVKRGNLTPQEQLIILELHSKWGNRWSKIAQNLPGRTDNEIKNYWRTRIQKQARHLKIDTDSREFQELVRRFWMPRLLQKAKESSSSAMSIQNQATPMPFDGVSQHSTVGTIPSHSHTPWQGPCMNEAGPTYMDQHEQNSDSEHNNGSCISLSESANFPKVPQHFGRTTITQYHALNNNDFGTFTYDGYNVSNNVYEMDNFKTPTTRVAEDAQYPTGDCQMVGSNWVNSDFACNMWNMDELWQFSKLQK

SEQ ID NO: 55610 - protein, 317 aa, Glycine max
  peptide (1)..(317): Ceres Seq. ID no. 15176206
MSTSKSVSSSSEDDNELRRGPWTLEEDNLLSQYISSHGEGRWNLLAKRSGLKRTGKSCRLRWLNYLKPDVKRGNLTPQEQLIILELHSKWGNRWSKIAQNLPGRTDNEIKNYWRTRIQKQARHLKIDTDSREFQELVRRFWMPRLLQKAKESSSSAMSIQNQATPMPFDGVSQHSTVGTIPSHSHTPWQGPCMNEAGPTYMDQHEQNSDSEHNNGSCISLSESANFPKVPQHFGRTTITQYHALNNNDFGTFTYDGYNVSNNVYEMDNFKTPTTRVAEDAQYPTGDCQMVGSNWVNSDFACNMWNMDELWQFSKLQK

SEQ ID NO: 55611 - protein, 176 aa, Glycine max
  peptide (1)..(176): Ceres Seq. ID no. 15176207
MPRLLQKAKESSSSAMSIQNQATPMPFDGVSQHSTVGTIPSHSHTPWQGPCMNEAGPTYMDQHEQNSDSEHNNGSCISLSESANFPKVPQHFGRTTITQYHALNNNDFGTFTYDGYNVSNNVYEMDNFKTPTTRVAEDAQYPTGDCQMVGSNWVNSDFACNMWNMDELWQFSKLQK

SEQ ID NO: 55612 - DNA, 1158 bp, Glycine max
  misc_feature (1)..(1158): Ceres Seq. ID no. 14316324
aatcccaagagagttggaaaacaaagtatagagtgaaagaatgggtgagaaaagcaagattttgatcataggaggcaccggctacatcggcaaacatatagtggaagcaagcgcaaaggctggaaatcccacttttgctttggtgagggaatccacactctctgacccctccaaggcacaactcatccacaattttgaggctttgggcgttaatttggtccgcggggatctgtacgatcatgagaagttggtgaaagctatcaagcaagtagatgtcgtcatatccacgctgggtcacctgcagcttgccgatcagctcaagatcatcgctgccattaaggaagccggtaatgttaagaggtttttcccttcggaattcggtaacgacgtggatcgtgtccatgccgtggaaccagcaaaatctgcattagctatcaaagcccaaattcgacgcagcattgaagccgaaggcatcccctatacgtacgtttccagcaactacttcgctggctattttcttcccacattagcacaaccaggtgcttttgctccacctccacccaaagacaaagtcattatcttgggcgatggaaatcctaaagcaattttcaacaaggaagaggacattggaacctacaccatcagggctgtggatgaccctaggacattgaacaagattctctacctcaggccccctaagaacatttactcgttcaacgagcttgtggccttgtgggagaacaagattggcaagaccctcgaaaaaatttatgtaccagaggagaaggttctcaaggacatcgaagaggcacctcttccaatcaatgtggtattagcaatcaaccactcagtgttcgtgaagggtgaccacaccaactttgagattgagccatctttcggggttgaggcttctgagttgtacccggatgtcaactacaccaccgtggaagaataccttggtcagttcgcttgagaatttaaaaggagaaagatgctcttgtgatcggatatttaaataatctgagttgttgatttggagagtggaagattgtgttttatgtcaaaagatcgctatgtgatgtaatcttgcctttcatgtgtagaatgttcctacttgaatggttgaaaaataataaatgacttacgagttgagataac

SEQ ID NO: 55613 - protein, 310 aa, Glycine max
  peptide (1)..(310): Ceres Seq. ID no. 14316325
MGEKSKILIIGGTGYIGKHIVEASAKAGNPTFALVRESTLSDPSKAQLIHNFEALGVNLVRGDLYDHEKLVKAIKQVDVVISTLGHLQLADQLKIIAAIKEAGNVKRFFPSEFGNDVDRVHAVEPAKSALAIKAQIRRSIEAEGIPYTYVSSNYFAGYFLPTLAQPGAFAPPPPKDKVIILGDGNPKAIFNKEEDIGTYTIRAVDDPRTLNKILYLRPPKNIYSFNELVALWENKIGKTLEKIYVPEEKVLKDIEEAPLPINVVLAINHSVFVKGDHTNFEIEPSFGVEASELYPDVNYTTVEEYLGQFA

SEQ ID NO: 55614 - DNA, 1298 bp, Glycine max
  misc_feature (1)..(1298): Ceres Seq. ID no. 14308787
gatcagcaccaattaaagaagaaatatgggaaatgaaggtattatgaatggtgttacccccgggaaggctaccatattagctcttggcaaggctttccctcatcagcttgtcatgcaagagtatttagttgatggatatttcagggacacaaactgtgacagtcctgaactcaagcagaagctcactagactttgcaagacaaccacagtgaaaacaaggtatgtggtaatgtcagaggagatactgaaaaagtatccagaacttgcggctgaaggcatccccacagtaaagcaacgactagagatatgcaatgaggcagtgacagaaatggccattgaagcttcccaagcttgcatcaacaactggggtggatctttatcagacataacacacttagtttatgtgtcatccagtgaagctagattacccggtggtgacctttacctagccaaaggactaggactgagccctgatactcaacgagtcatgctctattttgctggttgttcgggaggcgtggccggcttacgtgttgcgaaagacatagctgagaacaaccctggaagccgagtgctgattgctacctcagaaactacaattattgggttcaagccaccaagtgcagatagaccttatgatctagttggggtggcactctttggggatggtgctggtgcaatgataattggctcagacccaatattggagtctgagaagcctctctttgagcttcacactgcagttcaggagtttttgccacacactgagaagaaaatagatgggaggctgacagaagaaggaataagcttcaagttagcaagggaacttcctcaaataattgaagacaatgttgaaggattctgtgacaagttaataagtgttgttgggtttgagaacaaggagtacaacaagatgttttgggctgttcatccggggggtcctgccatcttgaaccgcattgaaaagaggcttgatttgttgccagagaagctgagtgcaagtagaagggctctcatggattatggcaatgctagcagtaacaccattgtgtatgtgcttgagtatatgatagaggaaggtctcaagattagaaaggatgccagaggagatcttgaatggggcttaatacttgcttttggaccagggattacatttgagggaattcttgccaggaacttgtgtgcttgatgatattattatcacaagatgtgtttatgtgatacgtgactccatcaaaagcatattcaagactataatgatcaaaagaagaaaagtcttaaataaaaactttaaccgt

SEQ ID NO: 55615 - protein, 387 aa, Glycine max
  peptide (1)..(387): Ceres Seq. ID no. 14308788
MGNEGIMNGVTPGKATILALGKAFPHQLVMQEYLVDGYFRDTNCDSPELKQKLTRLCKTTTVKTRYVVMSEEILKKYPELAAEGIPTVKQRLEICNEAVTEMAIEASQACINNWGGSLSDITHLVYVSSSEARLPGGDLYLAKGLGLSPDTQRVMLYFAGCSGGVAGLRVAKDIAENNPGSRVLIATSETTIIGFKPPSADRPYDLVGVALFGDGAGAMIIGSDPILESEKPLFELHTAVQEFLPHTEKKIDGRLTEEGISFKLARELPQIIEDNVEGFCDKLISVVGFENKEYNKMFWAVHPGGPAILNRIEKRLDLLPEKLSASRRALMDYGNASSNTIVYVLEYMIEEGLKIRKDARGDLEWGLILAFGPGITFEGILARNLCA

SEQ ID NO: 55616 - protein, 381 aa, Glycine max
  peptide (1)..(381): Ceres Seq. ID no. 14308789
MNGVTPGKATILALGKAFPHQLVMQEYLVDGYFRDTNCDSPELKQKLTRLCKTTTVKTRYVVMSEEILKKYPELAAEGIPTVKQRLEICNEAVTEMAIEASQACINNWGGSLSDITHLVYVSSSEARLPGGDLYLAKGLGLSPDTQRVMLYFAGCSGGVAGLRVAKDIAENNPGSRVLIATSETTIIGFKPPSADRPYDLVGVALFGDGAGAMIIGSDPILESEKPLFELHTAVQEFLPHTEKKIDGRLTEEGISFKLARELPQIIEDNVEGFCDKLISVVGFENKEYNKMFWAVHPGGPAILNRIEKRLDLLPEKLSASRRALMDYGNASSNTIVYVLEYMIEEGLKIRKDARGDLEWGLILAFGPGITFEGILARNLCA

SEQ ID NO: 55617 - protein, 358 aa, Glycine max
  peptide (1)..(358): Ceres Seq. ID no. 14308790
MQEYLVDGYFRDTNCDSPELKQKLTRLCKTTTVKTRYVVMSEEILKKYPELAAEGIPTVKQRLEICNEAVTEMAIEASQACINNWGGSLSDITHLVYVSSSEARLPGGDLYLAKGLGLSPDTQRVMLYFAGCSGGVAGLRVAKDIAENNPGSRVLIATSETTIIGFKPPSADRPYDLVGVALFGDGAGAMIIGSDPILESEKPLFELHTAVQEFLPHTEKKIDGRLTEEGISFKLARELPQIIEDNVEGFCDKLISVVGFENKEYNKMFWAVHPGGPAILNRIEKRLDLLPEKLSASRRALMDYGNASSNTIVYVLEYMIEEGLKIRKDARGDLEWGLILAFGPGITFEGILARNLCA

SEQ ID NO: 55618 - DNA, 1670 bp, Glycine max
  misc_feature (1)..(1670): Ceres Seq. ID no. 14308851
ggcgaaacactcccctttgccgctgttgttgttgctgcaccaccgaacaacttcccctgtaaatcgcgtttcgtttgtgcaaggttttaaaagatggctgatgctgaggacattcaacctcttgttgttgataatggaactggaatggtcaaggctggttttgcaggtgatgatgctcctagggccgtgttccccagcattattgggagaccacgccatactggtgtaatggttgggatgggtcagaaggatgcttacgtgggtgatgaagcccaatcaaaaaggggtatactcaccttgaagtatcctatagagcatggcatagtcagcaactgggacgatatggagaagatttggcatcacacattttacaatgagctacgtgttgcccctgaagaacaccccgtacttcttaccgaggcaccactcaatcccaaggccaacagagagaagatgacccaaattatgtttgagactttcaatgtgcctgccatgtatgttgcaattcaggctgtcttgtctctgtatgccagtggacgtactacaggtattgtgcttgattctggtgatggtgtgagccacacggtgcccatatatgaagggtatgctcttcctcatgcaattcttcggttggaccttgctggccgtgatttaacagagtacttggtgaaaatccttaccgagagaggatactccttcagcacctctgccgaaaaggaaattgtccgtgatgtgaaggagaaattggcatacgtggcccttgatttcgaacaagaaatggagactactaagagtagttctgcagtggaaaagagctatgaattgcctgatggacaggtcattacaataggttctgagagattccgttgcccagaagtactgttccagccttctctgattggtatggaagctactggaattcatgaaacgacatacaattccatcatgaaatgtgatgttgatattaggaaggatctgtatggaaacatcgtgcttagtggagggtctactatgtttccgggaattgctgatcgcatgagcaaggaaattagtgctcttgcacccagtagcatgaaaatcaaggtggttgcacctcctgagagaaagtacagtgtctggattggtggttctatcttggcatcacttagcaccttccaacagatgtggatctccaagggtgaatatgatgaatctgggccagccatcgttcatcggaagtgcttctaaagttgggtcaagtcgagctggatggtgatcaagttcttcatgcacccagtcctgtgccatatttcagtaaagtttggttgacttatttggtatttgaagctttgggtttttaatagatatatctagtttaatgaatggatttgtaagttgagtatgttataagtttctccgttaggtcaccttggaagccagactttttatgctattggcggatggtattggaactttgtaggttctgcttggtttggtttttccttttattcgattttcatgttgtggccaagaattaggtgcctcgagttaggaggacgatagtctaagcatcttttctcacagggatttttgagtcagtttctgtttatatttattatatgcataattggtttttatgtttgcagtacactcagaaatcagaatgtttttattgtttgaggtgattaaag

SEQ ID NO: 55619 - protein, 377 aa, Glycine max
  peptide (1)..(377): Ceres Seq. ID no. 14308852
MADAEDIQPLVVDNGTGMVKAGFAGDDAPRAVFPSIIGRPRHTGVMVGMGQKDAYVGDEAQSKRGILTLKYPIEHGIVSNWDDMEKIWHHTFYNELRVAPEEHPVLLTEAPLNPKANREKMTQIMFETFNVPAMYVAIQAVLSLYASGRTTGIVLDSGDGVSHTVPIYEGYALPHAILRLDLAGRDLTEYLVKILTERGYSFSTSAEKEIVRDVKEKLAYVALDFEQEMETTKSSSAVEKSYELPDGQVITIGSERFRCPEVLFQPSLIGMEATGIHETTYNSIMKCDVDIRKDLYGNIVLSGGSTMFPGIADRMSKEISALAPSSMKIKVVAPPERKYSVWIGGSILASLSTFQQMWISKGEYDESGPAIVHRKCF

SEQ ID NO: 55620 - protein, 360 aa, Glycine max
  peptide (1)..(360): Ceres Seq. ID no. 14308853
MVKAGFAGDDAPRAVFPSIIGRPRHTGVMVGMGQKDAYVGDEAQSKRGILTLKYPIEHGIVSNWDDMEKIWHHTFYNELRVAPEEHPVLLTEAPLNPKANREKMTQIMFETFNVPAMYVAIQAVLSLYASGRTTGIVLDSGDGVSHTVPIYEGYALPHAILRLDLAGRDLTEYLVKILTERGYSFSTSAEKEIVRDVKEKLAYVALDFEQEMETTKSSSAVEKSYELPDGQVITIGSERFRCPEVLFQPSLIGMEATGIHETTYNSIMKCDVDIRKDLYGNIVLSGGSTMFPGIADRMSKEISALAPSSMKIKVVAPPERKYSVWIGGSILASLSTFQQMWISKGEYDESGPAIVHRKCF

SEQ ID NO: 55621 - protein, 332 aa, Glycine max
  peptide (1)..(332): Ceres Seq. ID no. 14308854
MVGMGQKDAYVGDEAQSKRGILTLKYPIEHGIVSNWDDMEKIWHHTFYNELRVAPEEHPVLLTEAPLNPKANREKMTQIMFETFNVPAMYVAIQAVLSLYASGRTTGIVLDSGDGVSHTVPIYEGYALPHAILRLDLAGRDLTEYLVKILTERGYSFSTSAEKEIVRDVKEKLAYVALDFEQEMETTKSSSAVEKSYELPDGQVITIGSERFRCPEVLFQPSLIGMEATGIHETTYNSIMKCDVDIRKDLYGNIVLSGGSTMFPGIADRMSKEISALAPSSMKIKVVAPPERKYSVWIGGSILASLSTFQQMWISKGEYDESGPAIVHRKCF

SEQ ID NO: 55622 - DNA, 1632 bp, Glycine max
  misc_feature (1)..(1632): Ceres Seq. ID no. 14312785
actgtcataacataagagtcgtggacgcggttggctgttgctgtctacggttccaacttccaagttacaagcttcacccattttataaaagttacggttcggttccgctgcattcgtgctttctagcaacacaaaatgagcgccatctctttcagttccacccatttgcacagttggaaaaatcccaaggggtttggaaaggtgagaaagcaacgagatgggaagctacttgtcaagtgttccagcaagagtgggaacccaacttcattgcaaaatggggttcgtgttggtgttcttggagctagtggctacactggttctgaggttatgcgactcttggctaatcatccacagtttgggattgcactgatgactgctgataggaaagctgggcagccaatctcttctgtattcccacatttgagcactcgggacttgccagatttgattgcaataaaggatgcaaacttttctgatgtggatgctgtattctgttgtttgcctcatggaactactcaggaaattattaaaggcctaccaaagcacttgaagattgttgatctttctgcagattttcgtctaaaagatctttctgagtatgaagagtggtatggtcagccgcatagagcaccagatttgcagaaagaagctatatatggattaacagaggttttaagggaggaaataaagaatgcacgtctagttgctaatcctggttgttatccaacttctgttcaacttcctcttgtcccattgataaaggctagtcttattgagcttaaaaatattatcattgatgctaaatctggtgtgagtggagcagggcgcagtgccaaagaaaatttattgttcactgaagtaactgaaggtctcaattcttatggtgttaccctacatcgccatgttcctgaaattgagcagggacttgctgatgcttcaggttcaaaagtaactgttagttttacaccacatctaattccaatgagccgtggtatgtaatcaactatttatgtggaaatggctccaggagtgagaattgaggacctgtaccagcaactgaagctctcatatgagaatgaagaatttgtttttgtgttggaaaatggagtcattcctcgaactcacagcgttaaagggactaattactgtttaatcaatgtttttccagaccgaattcctggaagagcaatcattatatctgttattgataatctagtgaagggagcttcaggtcaagctttacaaaaccttaatttgttaatgggatttccagaaaatttgggacttcattacctgcctctttttccatagagtagttgtcttgtccaactagagctccaattctgcagtcacagttccaccaaaatacttgatggagcagaggaaatattttcaagttatgtattttcgttctctagattgtaatgtgagattcttcaagaatttagaagggaattgattatggcattggcagggatactatagcaatttctgtcttttttgtcctttgttttgatctgtaatgttagaaatcactgaaggtggtggcgtgtagttttccaagtttgggttttggtttatttgtaatgccaatattttagtggactatgaaatcaccatctcaagtttttg

SEQ ID NO: 55623 - protein, 287 aa, Glycine max
  peptide (1)..(287): Ceres Seq. ID no. 14312786
MSAISFSSTHLHSWKNPKGFGKVRKQRDGKLLVKCSSKSGNPTSLQNGVRVGVLGASGYTGSEVMRLLANHPQFGIALMTADRKAGQPISSVFPHLSTRDLPDLIAIKDANFSDVDAVFCCLPHGTTQEIIKGLPKHLKIVDLSADFRLKDLSEYEEWYGQPHRAPDLQKEAIYGLTEVLREEIKNARLVANPGCYPTSVQLPLVPLIKASLIELKNIIIDAKSGVSGAGRSAKENLLFTEVTEGLNSYGVTLHRHVPEIEQGLADASGSKVTVSFTPHLIPMSRGM

SEQ ID NO: 55624 - protein, 223 aa, Glycine max
  peptide (1)..(223): Ceres Seq. ID no. 14312787
MRLLANHPQFGIALMTADRKAGQPISSVFPHLSTRDLPDLIAIKDANFSDVDAVFCCLPHGTTQEIIKGLPKHLKIVDLSADFRLKDLSEYEEWYGQPHRAPDLQKEAIYGLTEVLREEIKNARLVANPGCYPTSVQLPLVPLIKASLIELKNIIIDAKSGVSGAGRSAKENLLFTEVTEGLNSYGVTLHRHVPEIEQGLADASGSKVTVSFTPHLIPMSRGM

SEQ ID NO: 55625 - protein, 209 aa, Glycine max
  peptide (1)..(209): Ceres Seq. ID no. 14312788
MTADRKAGQPISSVFPHLSTRDLPDLIAIKDANFSDVDAVFCCLPHGTTQEIIKGLPKHLKIVDLSADFRLKDLSEYEEWYGQPHRAPDLQKEAIYGLTEVLREEIKNARLVANPGCYPTSVQLPLVPLIKASLIELKNIIIDAKSGVSGAGRSAKENLLFTEVTEGLNSYGVTLHRHVPEIEQGLADASGSKVTVSFTPHLIPMSRGM

SEQ ID NO: 55626 - DNA, 1213 bp, Glycine max
  misc_feature (1)..(1213): Ceres Seq. ID no. 15224566
ggaacaccaatacaacacgcctaagccaaacccaaatccaccgctctttattttcgtcttttctacccttcccggatcccaatccctaatctttctaccactctcactccaaaaatctctaattttttcatctgggaagatcggttgacgaatcgaggatccgatcgcttgcgaggaactagggtttcaatcgatcgcatcacacacaaacaatcatgtttagccggatgttcggtaaacctaaacaggaaaccaatgctgttgccactttggacaagctaaacgagacacttgaaatgctggagaaaaaggagaaagtgctccttaaaaaggtggcagcggaagttgaaaaggccaaagaattcacaagggggaagaacaaaagggcggcaatacaatgtctgaagaggaagaggttatatgaacagcaaatagagcagcttggaaatttccagttgcgtattcatgaccagatgatattgttggaaggtgctaaagctaccactgaaacagtagatgcattaagaactggagcagctgctatgaaggctatgcaaaaagcaacgaatattgatgatgttgacaagaccatggatgagatcaatgaacagaccgagaacatgaaacagattcaggatgcattgtcagctccaattggtgcagctgctgattttgacgaggacgaattggaagcagaacttgaagaattggagggtgctgagttggaagaacagcttcttcagccagcaactacagctcctgcagccccagtgcaggtcccagctgggcgccaacctactcgcccagttcctgcaaagcgaactcctgaagaagatgaattggcagctttgcaggctgagatggcactttgagcagaattttgcaggcattttttgtgtgcatgatgcgtggcttcaatgaggaattgtaaccactattacgtggattcctactcgcttatctgtgaaattattgagctggccagaggatgtatataaaaggtgaaaaaaaaaaggatcataaaagtcgttcaaaacttatttactattattttggatgagttcgaacccccctttccattatacgtaacaattattgatgcatttggctatcttatattttatgtggtcgagtttaacatggtcagtttaatcaatgtatatcttaaacatgctacaacgaagtataaggaataagaatttggttagccaac

SEQ ID NO: 55627 - protein, 218 aa, Glycine max
  peptide (1)..(218): Ceres Seq. ID no. 15224567
MFSRMFGKPKQETNAVATLDKLNETLEMLEKKEKVLLKKVAAEVEKAKEFTRGKNKRAAIQCLKRKRLYEQQIEQLGNFQLRIHDQMILLEGAKATTETVDALRTGAAAMKAMQKATNIDDVDKTMDEINEQTENMKQIQDALSAPIGAAADFDEDELEAELEELEGAELEEQLLQPATTAPAAPVQVPAGRQPTRPVPAKRTPEEDELAALQAEMAL

SEQ ID NO: 55628 - protein, 214 aa, Glycine max
  peptide (1)..(214): Ceres Seq. ID no. 15224568
MFGKPKQETNAVATLDKLNETLEMLEKKEKVLLKKVAAEVEKAKEFTRGKNKRAAIQCLKRKRLYEQQIEQLGNFQLRIHDQMILLEGAKATTETVDALRTGAAAMKAMQKATNIDDVDKTMDEINEQTENMKQIQDALSAPIGAAADFDEDELEAELEELEGAELEEQLLQPATTAPAAPVQVPAGRQPTRPVPAKRTPEEDELAALQAEMAL

SEQ ID NO: 55629 - protein, 191 aa, Glycine max
  peptide (1)..(191): Ceres Seq. ID no. 15224569
MLEKKEKVLLKKVAAEVEKAKEFTRGKNKRAAIQCLKRKRLYEQQIEQLGNFQLRIHDQMILLEGAKATTETVDALRTGAAAMKAMQKATNIDDVDKTMDEINEQTENMKQIQDALSAPIGAAADFDEDELEAELEELEGAELEEQLLQPATTAPAAPVQVPAGRQPTRPVPAKRTPEEDELAALQAEMAL

SEQ ID NO: 55630 - DNA, 1475 bp, Glycine max
  misc_feature (1)..(1475): Ceres Seq. ID no. 14312866
aagatttccaacaacccctctctgcaaaacgcttcgcataaggtacttatgcgcgataagactgtactggtaaccggcggagccggttacatcggcagccacaccgttcttcagctcttgctcggaggtttcagagccgtcgtcctcgacaacctcgaaaattcctccgaggttgccatccacagagtcagggagctcgccggcgaatttgggaacaacctctcctttcacaaggtggacctacgggacagagctgctctagaccaaatattttcttccacacaattcgatgctgtcatacattttgctggactgaaagcagtaggagaaagtgtgcaaaaacctttactatactataacaacaacttgactgggacaatcactctattggaagtcatggctgcccatggatgcaagaagctcgtgttttcatcttcagcaactgtatatggttggccaaaggaggttccatgcacagaagagttccctctgtcagcaatgaacccatatggacgaactaagcttatcattgaagaaatttgccgtgatgtccactgtgcagagccagattgtaaaataattttgttaagatacttcaacccagttggtgcacaccttagtggttatattggggaggatcctcgtggaattccaaacaatctcatgccatttgttcagcaagtagcagttggccgacggcctgcactgacagtttttggaaatgattataatacaagtgatggcactggggttcgggattacattcatgttgttgatttagcagatgggcacattgctgcattgcttaaactagatgaacctaatataggttgtgaggtttataacctgggaacaggaaagggaacatcagttttggagatggttagagcttttgaaatggcatctggaaagaaaattccacttgtgatggctggccgtagacctggtgatgctgaaattgtttatgcatcaacaaagaaagcggaaagagagcttaaatggaaggcaaaatatggcattgatgagatgtgccgtgatcaatggaactgggctagcaaaaacccttatggctatggagatcagggctccaccgattaaccacttagttttctctttgggttcttttctgaactcacccacaccgtagtccgtaggtcttgtgaatttagttttcccaaaagcttttctttctttagtgatcttaaggtgacaaagtacttgtattattactattcatagttacatagtaagtaagtagtggtttactatactgtaatttaaaggttctctaggttccttcttacaggttattgattattagattcggattctctcatgttccacatgagcagcatcctgttttgtaaatctaaatcacatgtttgtttaaagtgtgactaacaggtatccttacctcattattgagattaatttattttgaatgttacctttagtaataaatagcatttttcatg

SEQ ID NO: 55631 - protein, 365 aa, Glycine max
  peptide (1)..(365): Ceres Seq. ID no. 14312867
KISNNPSLQNASHKVLMRDKTVLVTGGAGYIGSHTVLQLLLGGFRAVVLDNLENSSEVAIHRVRELAGEFGNNLSFHKVDLRDRAALDQIFSSTQFDAVIHFAGLKAVGESVQKPLLYYNNNLTGTITLLEVMAAHGCKKLVFSSSATVYGWPKEVPCTEEFPLSAMNPYGRTKLIIEEICRDVHCAEPDCKIILLRYFNPVGAHLSGYIGEDPRGIPNNLMPFVQQVAVGRRPALTVFGNDYNTSDGTGVRDYIHVVDLADGHIAALLKLDEPNIGCEVYNLGTGKGTSVLEMVRAFEMASGKKIPLVMAGRRPGDAEIVYASTKKAERELKWKAKYGIDEMCRDQWNWASKNPYGYGDQGSTD

SEQ ID NO: 55632 - protein, 349 aa, Glycine max
  peptide (1)..(349): Ceres Seq. ID no. 14312868
MRDKTVLVTGGAGYIGSHTVLQLLLGGFRAVVLDNLENSSEVAIHRVRELAGEFGNNLSFHKVDLRDRAALDQIFSSTQFDAVIHFAGLKAVGESVQKPLLYYNNNLTGTITLLEVMAAHGCKKLVFSSSATVYGWPKEVPCTEEFPLSAMNPYGRTKLIIEEICRDVHCAEPDCKIILLRYFNPVGAHLSGYIGEDPRGIPNNLMPFVQQVAVGRRPALTVFGNDYNTSDGTGVRDYIHVVDLADGHIAALLKLDEPNIGCEVYNLGTGKGTSVLEMVRAFEMASGKKIPLVMAGRRPGDAEIVYASTKKAERELKWKAKYGIDEMCRDQWNWASKNPYGYGDQGSTD

SEQ ID NO: 55633 - protein, 233 aa, Glycine max
  peptide (1)..(233): Ceres Seq. ID no. 14312869
MAAHGCKKLVFSSSATVYGWPKEVPCTEEFPLSAMNPYGRTKLIIEEICRDVHCAEPDCKIILLRYFNPVGAHLSGYIGEDPRGIPNNLMPFVQQVAVGRRPALTVFGNDYNTSDGTGVRDYIHVVDLADGHIAALLKLDEPNIGCEVYNLGTGKGTSVLEMVRAFEMASGKKIPLVMAGRRPGDAEIVYASTKKAERELKWKAKYGIDEMCRDQWNWASKNPYGYGDQGSTD

SEQ ID NO: 55634 - DNA, 1317 bp, Glycine max
  misc_feature (1)..(1317): Ceres Seq. ID no. 15178027
cgttcagcttcaccaacaataaataaataaaaaatcataacaccgttcatcaatggcggttccgctgcattcctagactactctctttttccgcaatttttcattggctgcgttcgttcgttcgttgcgtgctttagttgttacttttccgttacggcgatggagttggagcacccgaccgcgacgccgctcaactccgccatgacctacgacgaagcctccatggagcgcagcaagagcttcgtcaacgccttgcaggaacttaagaacctaaggcctcaactttattctgctgcagaatactgtgaaaaatcttatctccatagtgaacagaaacaaatggtacttgacaacctgaaagactatgctgtaagagcccttgtgaatgctgttgatcatctaggaacagttgcatacaagttaactgaccttcttgagcagcaaacatttgatgtctcaactatggatttgaaggtcgctaccataaatcagaaacttcttacatgccaaatttacactgataaagaaggtctacggcagcagcaattgttagctttcattcccagacatcataagcactacattttgccaaattctgtcaataaaaaggtacatttcagtccacaaatacagattgatgcaaggcagaatccatttcaaaccagaacccgttttcaatcttcaggtacccctgcagcgaaaactctttcatggcatttagcatcagagacaaagtctaccttaaaagggtcttcgcatgcttccccttccccaaacactgagaacccaaagttttctgccaaggcctctggagttttccatctcttagataatgaagagaacacctggatgaaatcctcacctgcacaaatttactttccaaatggagttcctacctctagtacacccatgcatactttaggtggtacaggcaaggatgcattggagggatccaaaccattgacagcattcagatcatttgactaccaaaatcggcgtgagactgtccaagtccctactcgaagcaaaagtgtgctatcagctttctttgtcaagcagaaaacaccaaagttgaaagccggttctttcttatgaatacctctaaagccatcccctcccctatgcaaatcctcagaattaattagtttctgattcaagcctttgaataatgatcctgtaagtagccggttccctggcaatcataatggttgggatcttggtcttctaatcgctttatgttgctcttgtggattgtgatctagttcaggcacctgcaaaatgtatatttgttgtatgctatgcaaaaaaagtttcatt

SEQ ID NO: 55635 - protein, 311 aa, Glycine max
  peptide (1)..(311): Ceres Seq. ID no. 15178028
MELEHPTATPLNSAMTYDEASMERSKSFVNALQELKNLRPQLYSAAEYCEKSYLHSEQKQMVLDNLKDYAVRALVNAVDHLGTVAYKLTDLLEQQTFDVSTMDLKVATINQKLLTCQIYTDKEGLRQQQLLAFIPRHHKHYILPNSVNKKVHFSPQIQIDARQNPFQTRTRFQSSGTPAAKTLSWHLASETKSTLKGSSHASPSPNTENPKFSAKASGVFHLLDNEENTWMKSSPAQIYFPNGVPTSSTPMHTLGGTGKDALEGSKPLTAFRSFDYQNRRETVQVPTRSKSVLSAFFVKQKTPKLKAGSFL

SEQ ID NO: 55636 - protein, 297 aa, Glycine max
  peptide (1)..(297): Ceres Seq. ID no. 15178029
MTYDEASMERSKSFVNALQELKNLRPQLYSAAEYCEKSYLHSEQKQMVLDNLKDYAVRALVNAVDHLGTVAYKLTDLLEQQTFDVSTMDLKVATINQKLLTCQIYTDKEGLRQQQLLAFIPRHHKHYILPNSVNKKVHFSPQIQIDARQNPFQTRTRFQSSGTPAAKTLSWHLASETKSTLKGSSHASPSPNTENPKFSAKASGVFHLLDNEENTWMKSSPAQIYFPNGVPTSSTPMHTLGGTGKDALEGSKPLTAFRSFDYQNRRETVQVPTRSKSVLSAFFVKQKTPKLKAGSFL

SEQ ID NO: 55637 - protein, 290 aa, Glycine max
  peptide (1)..(290): Ceres Seq. ID no. 15178030
MERSKSFVNALQELKNLRPQLYSAAEYCEKSYLHSEQKQMVLDNLKDYAVRALVNAVDHLGTVAYKLTDLLEQQTFDVSTMDLKVATINQKLLTCQIYTDKEGLRQQQLLAFIPRHHKHYILPNSVNKKVHFSPQIQIDARQNPFQTRTRFQSSGTPAAKTLSWHLASETKSTLKGSSHASPSPNTENPKFSAKASGVFHLLDNEENTWMKSSPAQIYFPNGVPTSSTPMHTLGGTGKDALEGSKPLTAFRSFDYQNRRETVQVPTRSKSVLSAFFVKQKTPKLKAGSFL

SEQ ID NO: 55638 - DNA, 1403 bp, Glycine max
  misc_feature (1)..(1403): Ceres Seq. ID no. 14312825
aaccttcactccgaccgttgtgcggagtcaggacagcaaccatatacgttcaaatctgttgcagctgggcaggaaaggttcaggactctacacagtacttactatagaaaagcacaacgaatcattctcgcttgtgggtcactttttggaagaaacctgtgtaaatcctacattcatcataaaccacctgagatcatgagtcctctagcaaagtggcacagatccaaaccaggcctgactgaacgttttcaattgtttgttaataaacgtgaactttgctatgcatatactgaattgaatgaccctgtagtacaacgacagagatttgctgaacaactcaaggatcggcaatctggcgatgatgaagcaatggccttagatgaaacattttgtacggctctagagtatggtttaccacctactggtggttggggtttgggcattgatcggttcaccatgttactgactgattcacagaatattaaggtttttgctttttctatatctgcataattactttgtttttgaaatttcttaccatcttctgtctttttggtgacgggaggttcttctcttccctgccatgaaacctcaagactgagccttcaaccaaaactatttgaatctctgagaagtaaaatcatcatacacaggtattttatacctcaagcttttaaattaaaagtatactccacattactgccaagtaccaagtatttccaaggaaattgtgagcacggtactgcgtaacttcattaacttgtaactagtagtgaaatggttaatcttgggtagcgatgttgagtggcaaaccccaataatgctagcagtttagtggactgtaaaaagctgctacataacgatagcagatagaaatcatataattcccaatacaaaatactcaaaaaatactaaaaaagcttcatatattcatcattacttctcaaaagtcacatcttatagacacaatcatcattaatacaaggcttaactaataacaattagaaaaataacaaaggctgggtgtggaagacctacaactcaggtgccaactgaagcctgctaaaaggggtgggcttggttagaaaatgggcgggcagcagaactgaggctagcaagcaggtgttctgtgtgtaattttgcgacaatacaaataactagataaaaatgcatcaaattgtatgcaatgggttaaggaacgatgatgggctagcttgaagttcctgagcttttacattgcagtctggtgagaaatagggctgctaactttgaaaattagtttccccatggcatgtgcatcaagtcatgaaaaacaaagaactcaatcgatggaagcagatgagtttgtgtgggcaaatagagattttgtttgtttaagcgagcataaaacacaacattaattc

SEQ ID NO: 55639 - protein, 170 aa, Glycine max
  peptide (1)..(170): Ceres Seq. ID no. 14312826
NLHSDRCAESGQQPYTFKSVAAGQERFRTLHSTYYRKAQRIILACGSLFGRNLCKSYIHHKPPEIMSPLAKWHRSKPGLTERFQLFVNKRELCYAYTELNDPVVQRQRFAEQLKDRQSGDDEAMALDETFCTALEYGLPPTGGWGLGIDRFTMLLTDSQNIKVFAFSISA

SEQ ID NO: 55640 - protein, 105 aa, Glycine max
  peptide (1)..(105): Ceres Seq. ID no. 14312827
MSPLAKWHRSKPGLTERFQLFVNKRELCYAYTELNDPVVQRQRFAEQLKDRQSGDDEAMALDETFCTALEYGLPPTGGWGLGIDRFTMLLTDSQNIKVFAFSISA

SEQ ID NO: 55641 - DNA, 1528 bp, Glycine max
  misc_feature (1)..(1528): Ceres Seq. ID no. 15177994
attttgcttcatttttttttttactttgttgagacttgagagtgttggaaaatgttggggactgctctgcaatttggttgtgttcgtggtgatgatcggttttacattccggtgaaggcaaggaagaaccagaaccagcgtaaaccggttcagagagagaagggtgttggtgaaactgagagaactgattcagtttcaaagagggaacttgttgcttctgagaatgggaattccaatgagtcttcctactcgttgaagaaacccatctcttgcccttctgtagagcctgctagtaacattgataggtttctggaatccacaactcctttagtcacagctcaatatttggccaagacaacaatgagaggttggaagacttgtgatgtggagtatcaatcttactttgctcttgatgatctctgggaatcgtttaaggagtggagtgcgtatggagcaggagtccctttggtacttgatcaaagacaatctgttgtgcaatattatgttccgtatttgtcggctattcaactatatggtcaatcagataagaagtcaaatgctaagccaaggtacaccagtgaagatagtgacggtgattactgccgagattcaagcagcgatggaagcagtgacagtgaatttggaaaaaggactgaactttttacagcacaaagaaatagtcactatcatataggtgatgcttcgtttcaaatgagcaggctatctgtacatgatcacaatacaatgcaagagggattttctagtgacgatagtgaaactgggaatcctaaagatcttctttttgagtattttgatcatgatcctccttatagccgtgaacctttgtctgacaagatacttgatcttgcacgcgactatcctagcctcaagtctgtaagaagttgtgatttattaccggccagttggatgtgtgtagcatggtatcctatatatcgaatacccaccggtccaacattaaaagatttagatgcctgctttcttacataccatacactccatacacccttgacaggaaatggaggtactcaggccccaattttggtttatccaaatgacattgatggcggtgtgccaaagatttccttaccaacttttgcaatggcttcctataagttaaagggatctatttggacacaaaatggagttagtgagagtcaagtagtaaattctctcttgcaggctgcagataactggttaaggctgcttcaggtgaatcaccctgattatcagttcttcgtatcgcatggcacataccacaggtgaatcaaatgagatgccttaaatttctgtgttcattgctctttgcaaacttggtatggtccttctatccatcaatccatcaatccatccatagagactgatgatggagttgggatttctaatgtggattcttgttactcattgcataagcagcacaaaagatgagcttgtctcaagtgaagaatgaaatagagattgctaaagtaaaaaaaaaaaaaacagaaaaaaaaaaaagattgctaaagtg

SEQ ID NO: 55642 - protein, 410 aa, Glycine max
  peptide (1)..(410): Ceres Seq. ID no. 15177995
MLGTALQFGCVRGDDRFYIPVKARKNQNQRKPVQREKGVGETERTDSVSKRELVASENGNSNESSYSLKKPISCPSVEPASNIDRFLESTTPLVTAQYLAKTTMRGWKTCDVEYQSYFALDDLWESFKEWSAYGAGVPLVLDQRQSVVQYYVPYLSAIQLYGQSDKKSNAKPRYTSEDSDGDYCRDSSSDGSSDSEFGKRTELFTAQRNSHYHIGDASFQMSRLSVHDHNTMQEGFSSDDSETGNPKDLLFEYFDHDPPYSREPLSDKILDLARDYPSLKSVRSCDLLPASWMCVAWYPIYRIPTGPTLKDLDACFLTYHTLHTPLTGNGGTQAPILVYPNDIDGGVPKISLPTFAMASYKLKGSIWTQNGVSESQVVNSLLQAADNWLRLLQVNHPDYQFFVSHGTYHR

SEQ ID NO: 55643 - protein, 307 aa, Glycine max
  peptide (1)..(307): Ceres Seq. ID no. 15177996
MRGWKTCDVEYQSYFALDDLWESFKEWSAYGAGVPLVLDQRQSVVQYYVPYLSAIQLYGQSDKKSNAKPRYTSEDSDGDYCRDSSSDGSSDSEFGKRTELFTAQRNSHYHIGDASFQMSRLSVHDHNTMQEGFSSDDSETGNPKDLLFEYFDHDPPYSREPLSDKILDLARDYPSLKSVRSCDLLPASWMCVAWYPIYRIPTGPTLKDLDACFLTYHTLHTPLTGNGGTQAPILVYPNDIDGGVPKISLPTFAMASYKLKGSIWTQNGVSESQVVNSLLQAADNWLRLLQVNHPDYQFFVSHGTYHR

SEQ ID NO: 55644 - DNA, 1904 bp, Glycine max
  misc_feature (1)..(1904): Ceres Seq. ID no. 15175849
attttaccggcggtggaagagagatagaccaataatctgaatctgaaacctccgtgttggtgttgcatatccaaaccctaatttggaaattgaattgttgaagggaagaagatcaagatggttctggcggagttaggtgggagcatttcgcgtgctctccagctgatgagcaatgcgacagtaatcgacgagaaggtgctcaacgattgcctcaacgacatcactcgcgctcttcttcaatccgatgttcaattcaagcttgtccgcgacatgcagaccaacatcaagaacattgtcaacctcgacgatctcgctgccggtcacaacaaacgcaggatcatccaacaagctgtgtttaacgaactctgcaaaattctggaccctgggaagccctctttcactcccaaaaagggcaaaacaagtgttgtcatgtttgttggtttgcaaggttctggaaaaaccacaacgtgtacaaagtatgcatattatcatcagaagaaaggctggaagccggctctagtatgtgcagatacattcagagctggtgcatttgatcaattgaagcaaaatgcaactaaagctaagatccctttctatggaagctatatggaatccgatccggtaaaaattgctgtggaaggtgtggagagattcaagaaagaaaactgtgatcttataattgttgatactagtgggaggcacaaacaagaagcttctctttttgaagaaatgcgccaagtttcggaagcaacgaaaccagatcttgttatatttgttatggatagcagtattggtcaggctgcttttgatcaagcccaagcatttaagcagagtgttgcagttggagctgtaattgttaccaaaatggatggccatgcaaaaggtggtggtgctcttagtgctgttgcagcaacaaagagtcctgtcatattcattggaactggagaacatatggacgagtttgaagtttttgatgttaagccatttgtcagtcgtctattaggaatgggcgactggtctgggtttatggacaaaattcatgaagtcgttcctatggatcaacaacctgaactgcttcagaagctgtcagaaggaaacttcaccttgaggattatgtatgagcagtttcagaacatacttaaaatgggtcctatcagccaggttttttctatgcttcccggatttagtgctgaattaatgccaaaaggccgtgagaaagaaagccaggcaaaaattaagcgttacatgacaatgatggattcaatgacaaacgaagagttggatagttcaaaccccaagctcatgaatgagtcacgcatgatgcggatagctcgaggtgcaggtcgtcagattagggaagtgatggagatgttggaagagtacaaacgtcttgcaaagatatggagcaaaatgaaagggcttaaaataccaaagaaaggtgatatgagtgccctatcccgaaatatgaatgcccaacacatgagcaaagtccttcctcctcagatgctgaagcaaattgggtggcatgggtgggttacaaaacttgatgaagcagatgggatccgccaaagacatgatgggaatgggaggaatgtttggtggtggtggtggtggtgattagttaattggcttgtgagctgaggattgttcctgaccatagccactgtcattgcattgtggtgttttacaactagactcgattgagcaggttatgcagttcaatcggtgttggagtgccatctgcaatagccgcaatgggtgcaagtgtctctttttgtaaaattaaatccttcttccctttttgggtatatttacttatttattattcagagcaatcaaagtaatcttattagaaattttcatagtctaggaacattaaaaacaaaagctatattcctcggatc

SEQ ID NO: 55645 - protein, 499 aa, Glycine max
  peptide (1)..(499): Ceres Seq. ID no. 15175850
MVLAELGGSISRALQLMSNATVIDEKVLNDCLNDITRALLQSDVQFKLVRDMQTNIKNIVNLDDLAAGHNKRRIIQQAVFNELCKILDPGKPSFTPKKGKTSVVMFVGLQGSGKTTTCTKYAYYHQKKGWKPALVCADTFRAGAFDQLKQNATKAKIPFYGSYMESDPVKIAVEGVERFKKENCDLIIVDTSGRHKQEASLFEEMRQVSEATKPDLVIFVMDSSIGQAAFDQAQAFKQSVAVGAVIVTKMDGHAKGGGALSAVAATKSPVIFIGTGEHMDEFEVFDVKPFVSRLLGMGDWSGFMDKIHEVVPMDQQPELLQKLSEGNFTLRIMYEQFQNILKMGPISQVFSMLPGFSAELMPKGREKESQAKIKRYMTMMDSMTNEELDSSNPKLMNESRMMRIARGAGRQIREVMEMLEEYKRLAKIWSKMKGLKIPKKGDMSALSRNMNAQHMSKVLPPQMLKQIGWHGWVTKLDEADGIRQRHDGNGRNVWWWWWW

SEQ ID NO: 55646 - protein, 483 aa, Glycine max
  peptide (1)..(483): Ceres Seq. ID no. 15175851
MSNATVIDEKVLNDCLNDITRALLQSDVQFKLVRDMQTNIKNIVNLDDLAAGHNKRRIIQQAVFNELCKILDPGKPSFTPKKGKTSVVMFVGLQGSGKTTTCTKYAYYHQKKGWKPALVCADTFRAGAFDQLKQNATKAKIPFYGSYMESDPVKIAVEGVERFKKENCDLIIVDTSGRHKQEASLFEEMRQVSEATKPDLVIFVMDSSIGQAAFDQAQAFKQSVAVGAVIVTKMDGHAKGGGALSAVAATKSPVIFIGTGEHMDEFEVFDVKPFVSRLLGMGDWSGFMDKIHEVVPMDQQPELLQKLSEGNFTLRIMYEQFQNILKMGPISQVFSMLPGFSAELMPKGREKESQAKIKRYMTMMDSMTNEELDSSNPKLMNESRMMRIARGAGRQIREVMEMLEEYKRLAKIWSKMKGLKIPKKGDMSALSRNMNAQHMSKVLPPQMLKQIGWHGWVTKLDEADGIRQRHDGNGRNVWWWWWW

SEQ ID NO: 55647 - protein, 448 aa, Glycine max
  peptide (1)..(448): Ceres Seq. ID no. 15175852
MQTNIKNIVNLDDLAAGHNKRRIIQQAVFNELCKILDPGKPSFTPKKGKTSVVMFVGLQGSGKTTTCTKYAYYHQKKGWKPALVCADTFRAGAFDQLKQNATKAKIPFYGSYMESDPVKIAVEGVERFKKENCDLIIVDTSGRHKQEASLFEEMRQVSEATKPDLVIFVMDSSIGQAAFDQAQAFKQSVAVGAVIVTKMDGHAKGGGALSAVAATKSPVIFIGTGEHMDEFEVFDVKPFVSRLLGMGDWSGFMDKIHEVVPMDQQPELLQKLSEGNFTLRIMYEQFQNILKMGPISQVFSMLPGFSAELMPKGREKESQAKIKRYMTMMDSMTNEELDSSNPKLMNESRMMRIARGAGRQIREVMEMLEEYKRLAKIWSKMKGLKIPKKGDMSALSRNMNAQHMSKVLPPQMLKQIGWHGWVTKLDEADGIRQRHDGNGRNVWWWWWW

SEQ ID NO: 55648 - DNA, 836 bp, Glycine max
  misc_feature (1)..(836): Ceres Seq. ID no. 12607763
aacattttttaaaccttagtagatattgaactagcaagatctctaggtcacaattgatttgttaaactggttaaattagtggttgaaccatggttgaactggataatatgatttaacagaagtctacgaaaatgtagtctacaaggaggtattcctgattccagttcaatacccaagctttcctatttgtatgtttgagtatatttgttggctttgctttatattgtgcctaatgatagagaaatcatttttttctgccattttggctacaaactcatttgtgactggttcatgttttctagagatcttagctggaatcaaatcactagacccatatcatcaaataaagtggcagacgacaatatgacaactttttgaaggttggtaagaatgatgattgcatcccccataacagaaggtggaattttaataagaagttgtgatactagttacatatcaagggagctgatcagatgtggaatgagcaagggcattaacatcgaacgaccatatactttgatagaggaggaaccacagttgagaaaatctaaccctgctgcatgggttgaaagaatgtttgacctgcttgcatcaaaactgaatagagaaccaaagttgattctttgtgtcttgccatagagtaaaatttgtgatatatatgggccttggaaaaagaagtgtctgagtgaaattggtgttatcacttagtacatttgcccctgtcaagatcactgatcaataccttaccaatgtacttcttaaaatcaattctaaggaatgaattctttgttggcaataaagcattatgagcatcttcccttgattaaagatacccc

SEQ ID NO: 55649 - protein, 82 aa, Glycine max
  peptide (1)..(82): Ceres Seq. ID no. 12607764
MMIASPITEGGILIRSCDTSYISRELIRCGMSKGINIERPYTLIEEEPQLRKSNPAAWVERMFDLLASKLNREPKLILCVLP

SEQ ID NO: 55650 - protein, 81 aa, Glycine max
  peptide (1)..(81): Ceres Seq. ID no. 12607765
MIASPITEGGILIRSCDTSYISRELIRCGMSKGINIERPYTLIEEEPQLRKSNPAAWVERMFDLLASKLNREPKLILCVLP

SEQ ID NO: 55651 - protein, 58 aa, Glycine max
  peptide (1)..(58): Ceres Seq. ID no. 12607766
MFEYICWLCFILCLMIEKSFFSAILATNSFVTGSCFLEILAGIKSLDPYHQIKWQTTI

SEQ ID NO: 55652 - DNA, 1323 bp, Glycine max
  misc_feature (1)..(1323): Ceres Seq. ID no. 15168374
gacatgatatcagcacactttcactcactgtgctttcccgtgacacgcatctatacttgtccagaagaagtaagatccatgaactaacattcccacacgctcgcttcaccatatttgccacccttttaacctcacttcttagggttattttgctcccttttccttgtttgggaattgggtttggtttggtttttcttggttgtaaaaggtaaagaagaactaattggttaagttactatatatctagctagggtatataatattatataattattgttattaaaggaaacaaagaaagaactaagatgggaagaggtagggtacagctgaagaggatagagaacaagatcaatcgccaggtaactttctccaaaaggagaggtgggttgctcaagaaagctcatgaaatatctgtactctgtgatgctgaggtagctttgattatcttctctcacaaaggaaagctctttgagtatgctactgattcatgcatggagaagatactggaacgccatgaaaggtatgcctatgcagagaggcagctagtagcaaatgattctgagacacaggaaaactggaccattgaatacactagactgaaggcaaaaattgaccttttacagagaaaccacaggcactatatgggagaagatttggcttcaatgagcctcaaagagcttcagagtttggagcagcagttggttactggtatcaaaaacatccgcacaaggagggtacatatataacacataattcattatgttaatttcactttcatgcttcatgtgtgtgtgttagtttgacacttatcattgaaatttgttatgttttaatagaatgatctcatgtccgagtccatttctgagcttcagaaaaaggagaaaaggatacaagaggagaataacacccttgcaaagaagatcaaggagaaagagcaggctgtagcacagcaagctgcacaatgggagcagccaaactacagggttgatacatctttcatgccacagcagcaaccccttcccaccagtttgaacatatgtggcaataattactgccaggaagctgcaccagaactaggaaggaacggtctagacctgaccctggaaccactctattcttgcaaccttggatgcttctgaaaagttgtttcttctgagttggattatattatataagtgctggcatatatgaactactataagtagtctgtttgaatgttttatatgtattttggtctatggcttttccctctactttgaagacattattttgaattgcttctgttgtaaacaaattgaatttgaaatctaattgtgtattttt

SEQ ID NO: 55653 - protein, 146 aa, Glycine max
  peptide (1)..(146): Ceres Seq. ID no. 15168375
MGRGRVQLKRIENKINRQVTFSKRRGGLLKKAHEISVLCDAEVALIIFSHKGKLFEYATDSCMEKILERHERYAYAERQLVANDSETQENWTIEYTRLKAKIDLLQRNHRHYMGEDLASMSLKELQSLEQQLVTGIKNIRTRRVHI

SEQ ID NO: 55654 - protein, 97 aa, Glycine max
  peptide (1)..(97): Ceres Seq. ID no. 15168376
MSESISELQKKEKRIQEENNTLAKKIKEKEQAVAQQAAQWEQPNYRVDTSFMPQQQPLPTSLNICGNNYCQEAAPELGRNGLDLTLEPLYSCNLGCF

SEQ ID NO: 55655 - protein, 84 aa, Glycine max
  peptide (1)..(84): Ceres Seq. ID no. 15168377
MEKILERHERYAYAERQLVANDSETQENWTIEYTRLKAKIDLLQRNHRHYMGEDLASMSLKELQSLEQQLVTGIKNIRTRRVHI

SEQ ID NO: 55656 - DNA, 1396 bp, Glycine max
  misc_feature (1)..(1396): Ceres Seq. ID no. 14312047
acgtttcaaatcgcagtctcagagcaaagcagagccaagaagaagaagaagaaaaccaacataatcaacaacaacaacaacaaaaagcttgcaaattagaagaatcttcagttaaaagggaagaagaacacacaagaagaaagagaagaagaaacgcgcgcgaatgaagggagaattagagttgccacctgggttcagatttcaccccactgatgaagaattggtgaatcactacttgtgtaggaagtgcgctggtcaaccaatcgcggttcccgtcatcaaagaggtcgatttgtacaagtttgatccatggcagcttccagaaattggtttttacggcgagaaagaatggtacttcttttctcctcgggaccggaaatacccgaacggttcacggccgaaccgcgccgccggaagcggctattggaaagccaccggcgctgataaaccgatcggaaaaccgaaagcgcttgggatcaagaaagctctggttttttacgccggaaaagcccccaaaggtgtgaaaaccaattggattatgcacgaatatcgcctcgccaatgttgaccgatctgcctccaagaaaaaaaacaacaacttgaggcttgatgattgggtgttgtgtcgaatctacaacaagaaagggaagattgagaaatacaacacaggcgcagcgaagatgaatgttgagatggttcatagttttgagcacgagaacgagacgaagccagagattcataagctaggaaatgagcaattgtacatggagacttcggattcggtgccaaggttgaacacggactcgagcagttcggagcacgtggtttcgcccgatgtcacgtgcgagagggaggtgcagagcgaccccaagtggaacgatgatctggacctaaagctagaaaacgcgtttgattttcagtttaattacttggacgataataacctttccgtggatgattacctttttggcactgttcagtatcaaatgggccagctctcgcccttgcaggacatgttcatgtacctacagaagatgtgaaaactgaaaacgaaacgttttgagcaacatgggacccgcaaatatctttgttttattatttttttaaaaggaaaagtcagcatttgtatgcaattgcattgcacctaacatgtgatgtgggctaggccaagcttagcaactattcttattctttgttctagagagatgagggaatgttgaattcggctgaaatgggctatttggattggttcttggtgtaaagaaaaaatgagagaaggagattaggtgctgcagtaagtaaaaagtaagtgagcaaattgatgataggttattggagggttaatgtgtgggtgtaaggactcacttaggaaaattcttgttcattgctattccagc

SEQ ID NO: 55657 - protein, 291 aa, Glycine max
  peptide (1)..(291): Ceres Seq. ID no. 14312048
MKGELELPPGFRFHPTDEELVNHYLCRKCAGQPIAVPVIKEVDLYKFDPWQLPEIGFYGEKEWYFFSPRDRKYPNGSRPNRAAGSGYWKATGADKPIGKPKALGIKKALVFYAGKAPKGVKTNWIMHEYRLANVDRSASKKKNNNLRLDDWVLCRIYNKKGKIEKYNTGAAKMNVEMVHSFEHENETKPEIHKLGNEQLYMETSDSVPRLNTDSSSSEHVVSPDVTCEREVQSDPKWNDDLDLKLENAFDFQFNYLDDNNLSVDDYLFGTVQYQMGQLSPLQDMFMYLQKM

SEQ ID NO: 55658 - protein, 166 aa, Glycine max
  peptide (1)..(166): Ceres Seq. ID no. 14312049
MHEYRLANVDRSASKKKNNNLRLDDWVLCRIYNKKGKIEKYNTGAAKMNVEMVHSFEHENETKPEIHKLGNEQLYMETSDSVPRLNTDSSSSEHVVSPDVTCEREVQSDPKWNDDLDLKLENAFDFQFNYLDDNNLSVDDYLFGTVQYQMGQLSPLQDMFMYLQKM

SEQ ID NO: 55659 - DNA, 945 bp, Glycine max
  misc_feature (1)..(945): Ceres Seq. ID no. 12607767
aatatagatttaacttcgttaataatttaaagatattacatgtttctgttacatgttggcttttatataaacaagatatataagaggattcttttagcttattttttttaaagaagaataaacatatttaaagataatcttacatcacaatttaatttattcaccataaatctaatatgtaatttatatatctaaatatattcatttgttataaatatcaattgtaatacaatttatatttatatatttagaaaattttaattatacgaaaataaacatttatgtggtataatatatattctaaaatgttaatattatcattgaaatatatttattataacgaaaaatactttatttaattgtataagaatatatttatcaaaaagaaaatattagaatttgatttgattcgtctttctctctctctgactcgaaattttgcagatctggaaatggcgacggcaacgtaccctccaccgccaccttattacagactttacaaagattacttgcaaaaccctaagtctgctcccgaccctccaccgcctattgaaggcacttatctttgttttggagccaattacaccactagtgatgttctaccaaccttggaagaacaaggggtgcgccagctctattctaagggccctaatgttggtaagctttaacctttcaatgcttctgctgatccttgcttcctaatgttggtaagctttgtctgctctttgttgccataggttcggaattttatattatcattattatgttgcaaaatactcggtcacattttcatccttttttggaaattccattatgggaaagtggaatcactgaggcacgaacctagaacagaaacaaatcaattacagctttgcatgctctgctttttcaaattgggtattcattcccttactttgtaggttgggatattacatggtgagctac

SEQ ID NO: 55660 - protein, 71 aa, Glycine max
  peptide (1)..(71): Ceres Seq. ID no. 12607768
MATATYPPPPPYYRLYKDYLQNPKSAPDPPPPIEGTYLCFGANYTTSDVLPTLEEQGVRQLYSKGPNVGKL

SEQ ID NO: 55661 - protein, 35 aa, Glycine max
  peptide (1)..(35): Ceres Seq. ID no. 12607769
MFYQPWKNKGCASSILRALMLVSFNLSMLLLILAS

SEQ ID NO: 55662 - DNA, 1411 bp, Glycine max
  misc_feature (1)..(1411): Ceres Seq. ID no. 14313429
aacacacaaccaaaccctcttgaccttgtgatatctctctcttttaatttctaggatcaaaccaaaaaatggtcttagaagagagtgtagtgcatgatgtgaggctatcctcagttgggccgggccgggccaccgggtcggacgtattccacaacccgggtggcttggacttggccatgaagcttcactaccttagagtggtgtacttctttgatagtgaggctgcacaagacctaaccatcatgaaaattaaggatggcatgttcactttgttcaaccattacttcatcacctgtggccggttccggcgatcggattccggtcgacccttaatcaagtgcaatgattgtggagcaaggttcattgaggccaagtgcaacaaaaccctagatgagtggctagccatgaaggattggcccttgtacaagttgctcgtctctcaccaagtcattggcccagaactatctttttctcctcctgttttgttccaggtgactaaatttaagtgcggcggaatttcattgggtcttagttgggcccacgtattgggggatcctctttcggcttcagaattcattaactcttggggtctaatattgaaaaatatgggcctaaaaatgctttttaacatcccaagatccatcccaacacccggacagcccggacctgaaaaggatccagtttcagcaaaacggatcgacccggtgggagatcattggattccagccaacaacaaaaaaatggagacattctccttccacctaactagctcccagttgaactacttgcaagcacaaatttggggtacaagtcttgaccaaacccctccttttgaatcactatgtgccatgatttggcgttgcatggcccgaattcgaccaggatccgaacccaaaaccgtaactgtgtgtagaagcaacccctataagaggggcaatcatatcattggtaacaaccaagtgatatgcaaggttgatgctgcaagtgaatcctcaattcttgacactgatttgacagttttagctagcatgcttgtggatcaaggtgtggatgagaggaagcaaattgaggaagcagttgagagagaccaaggtgtgagtgatttcttcgtctatggtgtcaacttgacatttctagacttacaagaaaccaatgtgtatgacttgcaattgaagggacacacaccaaagtttgtttactacacccttcaaggtgttggagatgaaggggttgttttggtgtatccattgcccaaaggttctatggagaatggtgttgatgggaagtttctgaccatgatttttccggaggatgaaatggtgaagcttaaatctgagctcaagataattggtcttttgcttgagaataattaagttttaatgagattaaaagcatgtttgactttccgttc

SEQ ID NO: 55663 - protein, 434 aa, Glycine max
  peptide (1)..(434): Ceres Seq. ID no. 14313430
MVLEESVVHDVRLSSVGPGRATGSDVFHNPGGLDLAMKLHYLRVVYFFDSEAAQDLTIMKIKDGMFTLFNHYFITCGRFRRSDSGRPLIKCNDCGARFIEAKCNKTLDEWLAMKDWPLYKLLVSHQVIGPELSFSPPVLFQVTKFKCGGISLGLSWAHVLGDPLSASEFINSWGLILKNMGLKMLFNIPRSIPTPGQPGPEKDPVSAKRIDPVGDHWIPANNKKMETFSFHLTSSQLNYLQAQIWGTSLDQTPPFESLCAMIWRCMARIRPGSEPKTVTVCRSNPYKRGNHIIGNNQVICKVDAASESSILDTDLTVLASMLVDQGVDERKQIEEAVERDQGVSDFFVYGVNLTFLDLQETNVYDLQLKGHTPKFVYYTLQGVGDEGVVLVYPLPKGSMENGVDGKFLTMIFPEDEMVKLKSELKIIGLLLENN

SEQ ID NO: 55664 - protein, 398 aa, Glycine max
  peptide (1)..(398): Ceres Seq. ID no. 14313431
MKLHYLRVVYFFDSEAAQDLTIMKIKDGMFTLFNHYFITCGRFRRSDSGRPLIKCNDCGARFIEAKCNKTLDEWLAMKDWPLYKLLVSHQVIGPELSFSPPVLFQVTKFKCGGISLGLSWAHVLGDPLSASEFINSWGLILKNMGLKMLFNIPRSIPTPGQPGPEKDPVSAKRIDPVGDHWIPANNKKMETFSFHLTSSQLNYLQAQIWGTSLDQTPPFESLCAMIWRCMARIRPGSEPKTVTVCRSNPYKRGNHIIGNNQVICKVDAASESSILDTDLTVLASMLVDQGVDERKQIEEAVERDQGVSDFFVYGVNLTFLDLQETNVYDLQLKGHTPKFVYYTLQGVGDEGVVLVYPLPKGSMENGVDGKFLTMIFPEDEMVKLKSELKIIGLLLENN

SEQ ID NO: 55665 - protein, 376 aa, Glycine max
  peptide (1)..(376): Ceres Seq. ID no. 14313432
MKIKDGMFTLFNHYFITCGRFRRSDSGRPLIKCNDCGARFIEAKCNKTLDEWLAMKDWPLYKLLVSHQVIGPELSFSPPVLFQVTKFKCGGISLGLSWAHVLGDPLSASEFINSWGLILKNMGLKMLFNIPRSIPTPGQPGPEKDPVSAKRIDPVGDHWIPANNKKMETFSFHLTSSQLNYLQAQIWGTSLDQTPPFESLCAMIWRCMARIRPGSEPKTVTVCRSNPYKRGNHIIGNNQVICKVDAASESSILDTDLTVLASMLVDQGVDERKQIEEAVERDQGVSDFFVYGVNLTFLDLQETNVYDLQLKGHTPKFVYYTLQGVGDEGVVLVYPLPKGSMENGVDGKFLTMIFPEDEMVKLKSELKIIGLLLENN

SEQ ID NO: 55666 - DNA, 1191 bp, Glycine max
  misc_feature (1)..(1191): Ceres Seq. ID no. 13594037
cccccatgtttttattaatttgattttctctttcgtggttttttttttatacataacttgagagaattgttttttgttttggcattatgtggctttaaattgtttgacatgacaataattgagtggtaattaaatttgatgtgaacgagtgtagatttgtgatacacataaaagccggggcatacttcgagaatgtggaggtaatcaggaagaagaccaatctgatgttcgtcggagatgggattggaaagactgttgtgaaggccagtaggaatgttgtggatggctggaccactttccaatcagccactgttgctgtggttggagacggattcatagcaaagggtataacctttgaaaattctgctgggccaagcaaacaccaagccgtggccctaaggagtggttctgatttctcagccttctataaatgcagcttcgttgcctaccaagatactctctatgtccactccctgcgccaattctaccgcgattgtgacgtttatggcacagtcgacttcatcttcggcaatgcagcaacagtgctccagaactgcaacttgtacgcacgcaagcccaatgaaaaccaaaggaacttgttcactgcacaaggaagagaagaccctaaccaaaacaccggcatttccatcttgaactgcaaggttgcagcagctgctgatttaatcccggtcaaatctcagttcaagaactacttgggtcgtccttggaagaagtattcgagaactgtttatcttaattcttacatggaggatctgatagaccccaaagggtggttggagtggaatggcacgtttgcattggatacgttgtattatggagagtacaacaataggggtcccggttcaaacacaagtgcaagagttacgtggcctggttatagggttatcaagaacgccactgaggcaaaccagttcacagttcgcaatttcattcaagggaatgaatggttgagttccaccgacattccattcttctctgatttcagttgaatacgttatggttattagtggcttcatgctcttttggtatccccatttaataaagtattagatgtttgttgtggaaatagaattcaaggaatgttattgttccttgcgacaaaagcactaactaaaataaaaaagtattttatattaattttttatcgataaawawtaatttattaatttt

SEQ ID NO: 55667 - protein, 261 aa, Glycine max
  peptide (1)..(261): Ceres Seq. ID no. 15221289
MFVGDGIGKTVVKASRNVVDGWTTFQSATVAVVGDGFIAKGITFENSAGPSKHQAVALRSGSDFSAFYKCSFVAYQDTLYVHSLRQFYRDCDVYGTVDFIFGNAATVLQNCNLYARKPNENQRNLFTAQGREDPNQNTGISILNCKVAAAADLIPVKSQFKNYLGRPWKKYSRTVYLNSYMEDLIDPKGWLEWNGTFALDTLYYGEYNNRGPGSNTSARVTWPGYRVIKNATEANQFTVRNFIQGNEWLSSTDIPFFSDFS

SEQ ID NO: 55668 - DNA, 1288 bp, Glycine max
  misc_feature (1)..(1288): Ceres Seq. ID no. 15170521
aaaagttggcacctggcagcaagtagtagtaacaatttaggattgtggtgtgttgttgttgttgtagctatcagtaggtgaatccaaaaccctagccctcactctcaccaccattttttcaattcttgagctatgtttcagggataatagggcagggatgtacaaagaacgagagcgaggtggtgtttccgtttccgcctctaaatccgaggatcggaagcgaatcaacgacgttctcgataagcacttggaacgatcctctccttccacttcccgccccatcaacaccgcttccaagaattccaacctccaagtggaggaatctgagacggagagtgaagagtctgatgttagtggctctgatggggatgacacctcttggatctcgtggttctgtaatctaagagggaatgagttcttttgtgaggtggatgatgattacatacaggatgactttaacctctgtggattgagcagtcaagtgccctactttgattatgcccttgatttgattctcgacgttgagtcatcccatggtgacatgttcacggaggaacagaatgagttgattgaatcggcggcggaaatgctttatggtatgattcatgctcgatatgtgttgaccagcaaaggaatggctgccatgcttgacaaatacaagagctatgattttggtagatgcccaagagtttactgctctggacagccctgccttccagttggtcaatcggacattcctaggtcaagtactgtgaaaatatactgccctaggtgtgaagatctttactatccgcgttccaagtatcaaggcaacattgatggagcttactttggaacaacatttccacacctcttcttgatgacttatggacaactgaagccacagaaaccagcacaaggctatgttccgagagtttttgggttcaaagttcacaagccataaagccgaagttgaagctttcatgaaagtaaaaatctccccgtgtctcatttaactcttcttatggttctctttgcaacaacaggcgaatcatatgctttccaaaccagtacaatctaggcatctgttttacttgttataggagcttgttgtaaagaaatatgcagacatgtgaagcaagtgcttagtttcagcttctgattcaatgagcaagtgcttaggtactcgatggtacttcttaatggctttttacaaattgtattcttgcaattaacttaatattgtctatggttatgtctcgaattacaaataccctgctatttttatattgttttattccatttcaag

SEQ ID NO: 55669 - protein, 261 aa, Glycine max
  peptide (1)..(261): Ceres Seq. ID no. 15170522
MYKERERGGVSVSASKSEDRKRINDVLDKHLERSSPSTSRPINTASKNSNLQVEESETESEESDVSGSDGDDTSWISWFCNLRGNEFFCEVDDDYIQDDFNLCGLSSQVPYFDYALDLILDVESSHGDMFTEEQNELIESAAEMLYGMIHARYVLTSKGMAAMLDKYKSYDFGRCPRVYCSGQPCLPVGQSDIPRSSTVKIYCPRCEDLYYPRSKYQGNIDGAYFGTTFPHLFLMTYGQLKPQKPAQGYVPRVFGFKVHKP

SEQ ID NO: 55670 - protein, 133 aa, Glycine max
  peptide (1)..(133): Ceres Seq. ID no. 15170523
MFTEEQNELIESAAEMLYGMIHARYVLTSKGMAAMLDKYKSYDFGRCPRVYCSGQPCLPVGQSDIPRSSTVKIYCPRCEDLYYPRSKYQGNIDGAYFGTTFPHLFLMTYGQLKPQKPAQGYVPRVFGFKVHKP

SEQ ID NO: 55671 - DNA, 1773 bp, Glycine max
  misc_feature (1)..(1773): Ceres Seq. ID no. 15170532
agttcttcatctcttctttctctttctctctactcagttcttcatctcttctttctctctctctctctcccctcacaacacacattgagaaaaacaaccctcactccctagatggggccttccgagaacgagccacttgtaaattcccaatttttcagttgaattttaactgcaattggtagattacgatttcccctacctgaaaccctagccatttgtagatgactcacttgtaaattcgcaattttgttgctgaatttcagctgtgattggtagtttcattgcatcttcgcgaccaattttcgggagaaaatggcagaactcgatctgtccaagaaagtagccgataggtatctcaagcgtgaagtccttggtgagggtacatacggtgtcgtttacaaagccattgataccaagacagggcagacggttgcaattaagaagatccggcttggcaagcagaaagaaggggtcaattttacggctctcagagaaattaaactgcttaaagagctcaaagatccaaacattattgagttgattgatgcctttccacataaagggaatttgcatcttgtgtttgagttcatggagacggacctcgaagctgttatacgggacaggaatattgttctttcacctagtgatataaaatcttaccttcagatgacattaaaaggccttgctatttgccacaagaaatgggtgttgcatagggatatgaagccaaataacttgttgataggatccaacggacagctgaaacttgcagattttggtttagcacgggtatttggaagcccagatcgcaggttcactcatcaggtgtttgctcggtggtatagagcacctgagctattatttggcaccaagcagtatggtcctggggtagatgtttgggctgcagcttgtatatttgctgaatttcttcttcgtcgacccttcctgcagggttcaagtgatattgatcaattaggaaagatttttgcagcatttggaactccatctgcttctcagtggcctgatatgattttccttcctgattatgttgaatatcaacatgttcctgccccacctttgcgttctttatttccaatggctagtgacgatgccttagatttgttgtcaaagatgtttacttatgatccaaaggctagaatatctgtaccgcaggcattagagcacaggtacttctcatctgcgcctctgcccacagatcctgttaagctttcaagacctgctcctaagaaggaatctaaggtttcagatgtaatttcaaacgaaggtcctactgtcttgtcacctccaagaaagtccaggagagtaatgccagggcgtgatgggtctgaaggaaattctttgcaaggagataagtttgatgacagtgttgttagtgtcagacaggcagctggtgataatatgggaaagaatgagccagctccaatgtcactagatttttctctttttggattaaaacctccaaatagacctacaattaccagtgctgacagatcacatttaaaaagaaaattagatctagagttctagcagccagaatgaatattctatgatggttccatcagtaagagaggggtctgatgcatttgagaaaattctgtgaatcagcttcgcttgtatgccattccctatatttttctctctgcataaagttcccatgaatatgttgatgtttaaaggaagaagtatctgtgacagcagattagcatctcacttgaatagtagttcagagagctgaaagtaactatcatagac

SEQ ID NO: 55672 - protein, 411 aa, Glycine max
  peptide (1)..(411): Ceres Seq. ID no. 15170533
MAELDLSKKVADRYLKREVLGEGTYGVVYKAIDTKTGQTVAIKKIRLGKQKEGVNFTALREIKLLKELKDPNIIELIDAFPHKGNLHLVFEFMETDLEAVIRDRNIVLSPSDIKSYLQMTLKGLAICHKKWVLHRDMKPNNLLIGSNGQLKLADFGLARVFGSPDRRFTHQVFARWYRAPELLFGTKQYGPGVDVWAAACIFAEFLLRRPFLQGSSDIDQLGKIFAAFGTPSASQWPDMIFLPDYVEYQHVPAPPLRSLFPMASDDALDLLSKMFTYDPKARISVPQALEHRYFSSAPLPTDPVKLSRPAPKKESKVSDVISNEGPTVLSPPRKSRRVMPGRDGSEGNSLQGDKFDDSVVSVRQAAGDNMGKNEPAPMSLDFSLFGLKPPNRPTITSADRSHLKRKLDLEF

SEQ ID NO: 55673 - protein, 319 aa, Glycine max
  peptide (1)..(319): Ceres Seq. ID no. 15170534
METDLEAVIRDRNIVLSPSDIKSYLQMTLKGLAICHKKWVLHRDMKPNNLLIGSNGQLKLADFGLARVFGSPDRRFTHQVFARWYRAPELLFGTKQYGPGVDVWAAACIFAEFLLRRPFLQGSSDIDQLGKIFAAFGTPSASQWPDMIFLPDYVEYQHVPAPPLRSLFPMASDDALDLLSKMFTYDPKARISVPQALEHRYFSSAPLPTDPVKLSRPAPKKESKVSDVISNEGPTVLSPPRKSRRVMPGRDGSEGNSLQGDKFDDSVVSVRQAAGDNMGKNEPAPMSLDFSLFGLKPPNRPTITSADRSHLKRKLDLEF

SEQ ID NO: 55674 - protein, 293 aa, Glycine max
  peptide (1)..(293): Ceres Seq. ID no. 15170535
MTLKGLAICHKKWVLHRDMKPNNLLIGSNGQLKLADFGLARVFGSPDRRFTHQVFARWYRAPELLFGTKQYGPGVDVWAAACIFAEFLLRRPFLQGSSDIDQLGKIFAAFGTPSASQWPDMIFLPDYVEYQHVPAPPLRSLFPMASDDALDLLSKMFTYDPKARISVPQALEHRYFSSAPLPTDPVKLSRPAPKKESKVSDVISNEGPTVLSPPRKSRRVMPGRDGSEGNSLQGDKFDDSVVSVRQAAGDNMGKNEPAPMSLDFSLFGLKPPNRPTITSADRSHLKRKLDLEF

SEQ ID NO: 55675 - DNA, 1095 bp, Glycine max
  misc_feature (1)..(1095): Ceres Seq. ID no. 15169749
ggagacggtagcagataagcctaaacacgaaactcgcaaattccctcaacactggagtcgctggaaaattcattctgggactcagctgagctgaccaagcatgattcaaaatggttgcattgtatcccaagggtgtgcccctctgaattctaggtcacgcaaccatggcatacctagtacctctgcctttcgttgcgcttctctaatgcctcccaaggttgccgtctctaacatccggagcttttggggacataatctggaatgtaaacccttgttgccaagaggaatgacattgacaaacacgtttgctgtatcaagcctgcgtgtaagggagggtcaaaatcatctctttcgtgctctccctcttttaccccggttgcgcaagtctaatatggcccctcgagcatcaaaggatgtcccaactagcttccgttatcctccaatgaccaagaaaccgcaatggtggtggagatcattagcatgcctcccttacctcatgcctctccatgagacatggatgtatgccgagacagcatacaatcttcacccatttttggaatgctttgaattctatacttacccttttcttatggccattggaagccttcctagctggtttctcatggcatacttctttgttgcatatcttggaattgtgaggagaaaagagtggcctcatttcttcagatttcatgttgtgatgggaatgttattggagattgccctgcaggttatagggactgtgagccgctggatgccgctatcactctactggggtaaactgggaatgcatttttggactgccgtatcatttggttatctatttaccgtcttggagtccataaggtgtgctcttgccggtatgtatgctgacattcctttcatctgtgacgcagcatatatccagataccatatgattaacaaggcagatgtaaggaagtttaagtttacattatgtatcacttttcgttgtatcagaatttttcttgagcagaattgaaggattactagtctattagtgattatgcccaaaaaaaaatgtgtttgagatttcccttgcgtacattttgtttatatgaattgactttatctgc

SEQ ID NO: 55676 - protein, 273 aa, Glycine max
  peptide (1)..(273): Ceres Seq. ID no. 15169750
MIQNGCIVSQGCAPLNSRSRNHGIPSTSAFRCASLMPPKVAVSNIRSFWGHNLECKPLLPRGMTLTNTFAVSSLRVREGQNHLFRALPLLPRLRKSNMAPRASKDVPTSFRYPPMTKKPQWWWRSLACLPYLMPLHETWMYAETAYNLHPFLECFEFYTYPFLMAIGSLPSWFLMAYFFVAYLGIVRRKEWPHFFRFHVVMGMLLEIALQVIGTVSRWMPLSLYWGKLGMHFWTAVSFGYLFTVLESIRCALAGMYADIPFICDAAYIQIPYD

SEQ ID NO: 55677 - protein, 238 aa, Glycine max
  peptide (1)..(238): Ceres Seq. ID no. 15169751
MPPKVAVSNIRSFWGHNLECKPLLPRGMTLTNTFAVSSLRVREGQNHLFRALPLLPRLRKSNMAPRASKDVPTSFRYPPMTKKPQWWWRSLACLPYLMPLHETWMYAETAYNLHPFLECFEFYTYPFLMAIGSLPSWFLMAYFFVAYLGIVRRKEWPHFFRFHVVMGMLLEIALQVIGTVSRWMPLSLYWGKLGMHFWTAVSFGYLFTVLESIRCALAGMYADIPFICDAAYIQIPYD

SEQ ID NO: 55678 - protein, 211 aa, Glycine max
  peptide (1)..(211): Ceres Seq. ID no. 15169752
MTLTNTFAVSSLRVREGQNHLFRALPLLPRLRKSNMAPRASKDVPTSFRYPPMTKKPQWWWRSLACLPYLMPLHETWMYAETAYNLHPFLECFEFYTYPFLMAIGSLPSWFLMAYFFVAYLGIVRRKEWPHFFRFHVVMGMLLEIALQVIGTVSRWMPLSLYWGKLGMHFWTAVSFGYLFTVLESIRCALAGMYADIPFICDAAYIQIPYD

SEQ ID NO: 55679 - DNA, 1124 bp, Glycine max
  misc_feature (1)..(1124): Ceres Seq. ID no. 14305409
atagtagcagcctcacattacattctgtgttactctgtgttaacatgacaacagatgataagaaggaagtttaaaatgattgtatgtatgggcgctaagttgtatatatatatatatataaagatctaagtaaaaataagttctaaactaaaattaagtttgtggcaatacagaattctcagttgtgctgaattgtgttttcaggtggaatcagatccatgatcatggtacaagtcatttaagtataatagatcctgagagaaatgccatttccatgactagcactgtgaatgcatattttggttcaaagatcctttcaccaagtacaggaatagtactgaacaatgaaatggatgatttttccatgcctagaaatgttaccaaggatgttccaccaccagctcctgccaatttcatcatgccaggaaagcggccactatcatccatgtcacccactattgcccttaaggatgggaagctaaaagctgtagtaggtgcaagtggaggtgctttcatcattggtggaactgcagaagttcttttgaatcacttcgttaaaggaatggatcctttttcttctgtaacagctccaagggtctatcatcagctactacctaacgtggttaattatgagaattggaccactttaggtgaacactttgaacttcctgctgatatcagggaagcccttaaaagtaagggtcatgtcctaaagggccttgccggtgggactatttgccaatttattgttctagacaattctgtgccgtccagacaaaataaagggattggaaatggaaagcttgtggcagtgagtgacccaagaaagggtggttttcctgcaggcttttgagataattcattgatgttgtgatatcttcatctcatctatgcaagttttctcctttgcatgattcttatactgcttgctgtattttattaatggggataaaaaatctacacaatttggcttctggttatctcaagtatctacaagtacaactactaccctgcttgttctcgtctattcaagttttcctttacatgattctcgtactgctaaatgctaattgtattgaaattaaataatgggaatgaaaaatctacacaattttcttctggtt

SEQ ID NO: 55680 - protein, 192 aa, Glycine max
  peptide (1)..(192): Ceres Seq. ID no. 14305410
MTSTVNAYFGSKILSPSTGIVLNNEMDDFSMPRNVTKDVPPPAPANFIMPGKRPLSSMSPTIALKDGKLKAVVGASGGAFIIGGTAEVLLNHFVKGMDPFSSVTAPRVYHQLLPNVVNYENWTTLGEHFELPADIREALKSKGHVLKGLAGGTICQFIVLDNSVPSRQNKGIGNGKLVAVSDPRKGGFPAGF

SEQ ID NO: 55681 - protein, 167 aa, Glycine max
  peptide (1)..(167): Ceres Seq. ID no. 14305411
MDDFSMPRNVTKDVPPPAPANFIMPGKRPLSSMSPTIALKDGKLKAVVGASGGAFIIGGTAEVLLNHFVKGMDPFSSVTAPRVYHQLLPNVVNYENWTTLGEHFELPADIREALKSKGHVLKGLAGGTICQFIVLDNSVPSRQNKGIGNGKLVAVSDPRKGGFPAGF

SEQ ID NO: 55682 - protein, 162 aa, Glycine max
  peptide (1)..(162): Ceres Seq. ID no. 14305412
MPRNVTKDVPPPAPANFIMPGKRPLSSMSPTIALKDGKLKAVVGASGGAFIIGGTAEVLLNHFVKGMDPFSSVTAPRVYHQLLPNVVNYENWTTLGEHFELPADIREALKSKGHVLKGLAGGTICQFIVLDNSVPSRQNKGIGNGKLVAVSDPRKGGFPAGF

SEQ ID NO: 55683 - DNA, 1351 bp, Glycine max
  misc_feature (1)..(1351): Ceres Seq. ID no. 15226049
gtctgtggcagccacacgtcttggcagttctcttctctgattacgaaattttttcagcaaaagcaggcaatggacttcttttttaagggaatgaacagggatggatctgagtgtccctttgatgtgaaagacatccaacggtgtccgtttttaagaaacatcaatgaacctacaaacttctctttctcctcaactaaaatctccattcctgttcatggatccaagggtcctatatttgaagatggtcctagttttggcatggcatttaagctatttcatgggaaggatggagtcattcccctatctgagaaatctgactttcacaatggcagcacagaagcagattctctgcctgttttcaaccctttggcaggaagagctgcctccataagtctgtctggaccaggtggcccatttagtttttggaatttttctgagaaatggaagaagcagaagaattccgaatcatcaaataaaaaggaatactcacctcagaatggagatgtatcaaagcatgaggcacttggaaatgaatggttggccaaaggaacttgcccaattgccaagtcttatagagctgtaagcaatgttctaccccttgttgcaacagcttttcggccaccgagtggagtgaagcttagatgtccacatgcaattgttgctgcaagggctgcccttgcccgtacaacctttgtgaaaaacatgcgccctcagcctcttcctgcaaaaatgcttgttattgcagcgttaggcatggcggttaatgtgccctttggcatgtggaaggagcataccaagaaattttcattatcttggtttgtagccgtgcatgctgctgttccctttatagccatgcttcggaagtcagtggtgatgcctaaatcagcaatggcactgaccattgcagcttctatacttggacaagttattggctcaagagctgagcgaatccggctgaaaacaatagctgttgagatgggaaaagtgaaaacagagacagtatgcagcatggaaagctataatagtcccatgcaacttggtgatattagggccaatcactgtggtgctgaaggaatggtcctcaagtcgtcacttcctgtgaaggatactggttcaacttcaactgctggcgtgtgttattgatctataaagattggaaagaaatccattcaggttctatttgaacatattgatgaactggaattgtaataaaattgattaatataaataagatccttatgagctatgtataacttgaacagaaattaagacatgctgttactatgcatgcagaaatgtatatggagaattgatcgcttaattctgataaaagttgagttcgtcttaaatt

SEQ ID NO: 55684 - protein, 380 aa, Glycine max
  peptide (1)..(380): Ceres Seq. ID no. 15226050
VCGSHTSWQFSSLITKFFQQKQAMDFFFKGMNRDGSECPFDVKDIQRCPFLRNINEPTNFSFSSTKISIPVHGSKGPIFEDGPSFGMAFKLFHGKDGVIPLSEKSDFHNGSTEADSLPVFNPLAGRAASISLSGPGGPFSFWNFSEKWKKQKNSESSNKKEYSPQNGDVSKHEALGNEWLAKGTCPIAKSYRAVSNVLPLVATAFRPPSGVKLRCPHAIVAARAALARTTFVKNMRPQPLPAKMLVIAALGMAVNVPFGMWKEHTKKFSLSWFVAVHAAVPFIAMLRKSVVMPKSAMALTIAASILGQVIGSRAERIRLKTIAVEMGKVKTETVCSMESYNSPMQLGDIRANHCGAEGMVLKSSLPVKDTGSTSTAGVCY

SEQ ID NO: 55685 - protein, 357 aa, Glycine max
  peptide (1)..(357): Ceres Seq. ID no. 15226051
MDFFFKGMNRDGSECPFDVKDIQRCPFLRNINEPTNFSFSSTKISIPVHGSKGPIFEDGPSFGMAFKLFHGKDGVIPLSEKSDFHNGSTEADSLPVFNPLAGRAASISLSGPGGPFSFWNFSEKWKKQKNSESSNKKEYSPQNGDVSKHEALGNEWLAKGTCPIAKSYRAVSNVLPLVATAFRPPSGVKLRCPHAIVAARAALARTTFVKNMRPQPLPAKMLVIAALGMAVNVPFGMWKEHTKKFSLSWFVAVHAAVPFIAMLRKSVVMPKSAMALTIAASILGQVIGSRAERIRLKTIAVEMGKVKTETVCSMESYNSPMQLGDIRANHCGAEGMVLKSSLPVKDTGSTSTAGVCY

SEQ ID NO: 55686 - protein, 350 aa, Glycine max
  peptide (1)..(350): Ceres Seq. ID no. 15226052
MNRDGSECPFDVKDIQRCPFLRNINEPTNFSFSSTKISIPVHGSKGPIFEDGPSFGMAFKLFHGKDGVIPLSEKSDFHNGSTEADSLPVFNPLAGRAASISLSGPGGPFSFWNFSEKWKKQKNSESSNKKEYSPQNGDVSKHEALGNEWLAKGTCPIAKSYRAVSNVLPLVATAFRPPSGVKLRCPHAIVAARAALARTTFVKNMRPQPLPAKMLVIAALGMAVNVPFGMWKEHTKKFSLSWFVAVHAAVPFIAMLRKSVVMPKSAMALTIAASILGQVIGSRAERIRLKTIAVEMGKVKTETVCSMESYNSPMQLGDIRANHCGAEGMVLKSSLPVKDTGSTSTAGVCY

SEQ ID NO: 55687 - DNA, 1023 bp, Glycine max
  misc_feature (1)..(1023): Ceres Seq. ID no. 15168370
ttgctacgtaggccccccccccttgttgcatcgcatcgcagtgtatctgagtaataacacggtcccgctccctctccatcccatcacaaagaaaacagagattcgcattattagcagatcggactcaaccgatgaagttgaagccgcagtgaaacaaaccagaataattgacgcatcatcaattagatcgagctgctagaaatgaaggatgaggacgggcttccgacgaccgccgccacgaagaaggaaagcatggattcgagtctgtttgggaaagggaggtacaaattctgggcgttagcggccatcttgcttctggcgttctggtccatgttcaccggcaccgtctcgctccgctggtccggcactctcaattccctttccagcgacatcgacactcccatccacgacgacctcgatgttctcgaaatggaggagagggagaaggtggtgaggcacatgtgggatgtgtacaccaacagtcgcagggtgaggttgccgaggttctggcaagaggccttcgaggctgcctatgaggatttgacgagcgatgtcactgaggtcagagacgctgccgtcaccgagatcgccaagatgtctgttcgctccattcattttgatccacctcctcttcaatccacgagtgcccgagaatttagcaagagccttaagcaagccgagaaaggaaaagatgcaacaacctaaaggggtgcttaaaggttagtgtgtggagcattcaagcgtatgcaatgtacttgaaaatgctcgagtgctaccagaagattgtgaagagagagtaatggacgaactcaactcagacttagatttgcatgtttcaatcacagggataatgatgtattttaataggctgtgtggttctttccaattttgcagtcttcacgaagtgaggagtagtaaatcgaaacacgaccttttgaacagacaaattgaactgagcatgctcttctgtttagctttattccacaacatctaaattataaatctctcatgtttctataaagt

SEQ ID NO: 55688 - protein, 167 aa, Glycine max
  peptide (1)..(167): Ceres Seq. ID no. 15168371
MKDEDGLPTTAATKKESMDSSLFGKGRYKFWALAAILLLAFWSMFTGTVSLRWSGTLNSLSSDIDTPIHDDLDVLEMEEREKVVRHMWDVYTNSRRVRLPRFWQEAFEAAYEDLTSDVTEVRDAAVTEIAKMSVRSIHFDPPPLQSTSAREFSKSLKQAEKGKDATT

SEQ ID NO: 55689 - protein, 150 aa, Glycine max
  peptide (1)..(150): Ceres Seq. ID no. 15168372
MDSSLFGKGRYKFWALAAILLLAFWSMFTGTVSLRWSGTLNSLSSDIDTPIHDDLDVLEMEEREKVVRHMWDVYTNSRRVRLPRFWQEAFEAAYEDLTSDVTEVRDAAVTEIAKMSVRSIHFDPPPLQSTSAREFSKSLKQAEKGKDATT

SEQ ID NO: 55690 - protein, 124 aa, Glycine max
  peptide (1)..(124): Ceres Seq. ID no. 15168373
MFTGTVSLRWSGTLNSLSSDIDTPIHDDLDVLEMEEREKVVRHMWDVYTNSRRVRLPRFWQEAFEAAYEDLTSDVTEVRDAAVTEIAKMSVRSIHFDPPPLQSTSAREFSKSLKQAEKGKDATT

SEQ ID NO: 55691 - DNA, 1338 bp, Glycine max
  misc_feature (1)..(1338): Ceres Seq. ID no. 13594056
ttttttttttttgccttcttttcattcctttcttttcttcaaatcaaggaactcagctatgactaccagagaaatccttcaaaagatgaaggtaaaagttggtttgggttcatcagaccctgactcagggaaaggaaagagcaagatgtcaaagaacataactcatggttatcatttggtgaaaggaaaatcatatcatgacatggaggattacgttgtggctcaatttaagcaaatagataacaatgaattgggtttgtttgcaatattcgacggccatgcgggtcagaacgtacctaattacttgcggtcccatttgtttgataatatcttacatgagcctgacttctggaaagaacctgcagatgctgtgaagagagcatacagtaaaactgattctaatattttagatatgtcgggtgaattaggtagagggggttcaactgcagttacagcaatattagtcaattgtcagaagttaatagtagccaacattggggattctagggccgtcttatgcaagaagggtgtggccaagcaactatcagtggatcatgagccaaccgcagaacatgaggatattaaaaatagaggtggttttgtatcaaactttccaggggatgttcctcgtgttgatggacggctggcagtgtcaagggcatttggtgacaaaagcttgaagaaacacttgagttcagagccatttgtgactgtggagaatataggtgatgatgcagagtttgttatattagccagtgatggattatggaaggtaatgtcaaatcaagaagcagctaattgtataaaaaatataaaggatgctcggtcttcagcaaagcgccttactgaagaagcagttaacaggaaaagcaccgatgatatctcctgcatcgttgtgaaatttcagtgatctcaaggctcgcatgatagactttgatccagcaacttgcaagtgtaacataaacttcggtgtaatgaataaaacgataatgcttcatagccatcaggtggtgttattatgttgagtcattcatgcaaattaaatgggacaactgtgttatttaaagtaataatgtgggaaagatgtagattctgattatgtatagaccaaactttaatatgtgagtttgcaaggaagtttgtcagtgatcttgaaagcttgctttcagatcactgcctaggcccataagattttagattaagttattcgattgtattattggccaacactcctacctttgttggataattagagtctagagtgtgtgggaagctttctcacaatttcttgtaatttttcagaacgaacctgggaatgaccttcaacgatatcttttc

SEQ ID NO: 55692 - protein, 302 aa, Glycine max
  peptide (1)..(302): Ceres Seq. ID no. 13594057
FFFLPSFHSFLFFKSRNSAMTTREILQKMKVKVGLGSSDPDSGKGKSKMSKNITHGYHLVKGKSYHDMEDYVVAQFKQIDNNELGLFAIFDGHAGQNVPNYLRSHLFDNILHEPDFWKEPADAVKRAYSKTDSNILDMSGELGRGGSTAVTAILVNCQKLIVANIGDSRAVLCKKGVAKQLSVDHEPTAEHEDIKNRGGFVSNFPGDVPRVDGRLAVSRAFGDKSLKKHLSSEPFVTVENIGDDAEFVILASDGLWKVMSNQEAANCIKNIKDARSSAKRLTEEAVNRKSTDDISCIVVKFQ

SEQ ID NO: 55693 - protein, 283 aa, Glycine max
  peptide (1)..(283): Ceres Seq. ID no. 13594058
MTTREILQKMKVKVGLGSSDPDSGKGKSKMSKNITHGYHLVKGKSYHDMEDYVVAQFKQIDNNELGLFAIFDGHAGQNVPNYLRSHLFDNILHEPDFWKEPADAVKRAYSKTDSNILDMSGELGRGGSTAVTAILVNCQKLIVANIGDSRAVLCKKGVAKQLSVDHEPTAEHEDIKNRGGFVSNFPGDVPRVDGRLAVSRAFGDKSLKKHLSSEPFVTVENIGDDAEFVILASDGLWKVMSNQEAANCIKNIKDARSSAKRLTEEAVNRKSTDDISCIVVKFQ

SEQ ID NO: 55694 - protein, 274 aa, Glycine max
  peptide (1)..(274): Ceres Seq. ID no. 13594059
MKVKVGLGSSDPDSGKGKSKMSKNITHGYHLVKGKSYHDMEDYVVAQFKQIDNNELGLFAIFDGHAGQNVPNYLRSHLFDNILHEPDFWKEPADAVKRAYSKTDSNILDMSGELGRGGSTAVTAILVNCQKLIVANIGDSRAVLCKKGVAKQLSVDHEPTAEHEDIKNRGGFVSNFPGDVPRVDGRLAVSRAFGDKSLKKHLSSEPFVTVENIGDDAEFVILASDGLWKVMSNQEAANCIKNIKDARSSAKRLTEEAVNRKSTDDISCIVVKFQ

SEQ ID NO: 55695 - DNA, 1969 bp, Glycine max
  misc_feature (1)..(1969): Ceres Seq. ID no. 15170524
aaattttcagatctacgattctctctctcttcgatggcttccacggttgttgcggccgccgtgaggagtgacgtgccgcctcggcagccggtggatccttcggcgtcgtcctcccccgacgtcgctgatcggagcgattccttcaattcctctcccaaccacttctccgacactgaaattcagttacaaactccagacgtattgaagagtgaagagtatcgccaattgttccgtcttccactggaggaagtcctcattgaagattttaattgtgccctccaggaaaacctacttattcagggtcatatgtacctctttgtcaacttcatttgtttctactcaaacatatttggatatgagacaaagaaaataatcccattccctgaagtcacaagtgtaaggagggcaaagacggctgggctctttcccaatgccattgagattctagccggaaacaagaagtacttctttgcatccttcctatcccgtgatgaagctttcaggattattaatgagggatggtcgcgacatggcaatggagccatagcaattatggaacagaaggaatcaatgtcagagtccagctgccaagagaatggatttgtagctgttgaaaatgtcaaaagttcttatataactaacaacggatcactttctactgatctgagcaaagatacggcgcttccatccattgtagatgatccattattgacggaagattcagcgaagcaatgcagtgtaaaacaggttgctgaacctgaattgaatattgatgccccaaatgctgcaagtgtgagttggaagtggaacgaggaggatattgatgccccatcaatccttgaagcatatacatgtgttgcagattcagtgtttccgataaaggttgaagacttctttaggtacttattctcagatgatgctctaaattttcttgagtcttttcgccaaaaatgtggtgataaagactttaggtgttcttcgtggcatcctcaagagaaatttgggtatgctcgtgaactgtcatttcaacatccaataaaaatttatcttggagcgaaatttggtggctgccatgaggtccagaaatttcgtgtttataggaacagtcatttggttatagagacgtcgcaagaagtcagtgatgtaccttacgcagattatttccgggttgagggactgtggagtgtagagagagacaaggatgaatcaaaagaatgctgctttttgcgggtatatgtgaatgtggcattttctaaaaaaactatttggaaaggcaaaataatacaatcaacaattgaagaatgtcgagatgcttatgcgacatggataaacatggcacatgaaatgttgaagcagaagaaccttgaaaaacaagctcaaaatggtgaaatcaatttagatagagaagtgaagactggagaatcttcagaagggtcacaggagcaaagtaaccatacaaagatactagctacttccaatgcctttgatgctactacccacaatgtcggctctcatttgccgggaaatttcatcgaaccatcatctgttccactgtttaaagagtttatgacgaagttcagatcatctttgagaagtcatagcaatctttctctgctccttattactgttgtcgctctgattttcttcattcagcagtgtagcatacttgtgctgttggctagacctcaacacatacatatgaacactcctgtagacatcacgaataggatgaacaatgaggtcactagaagtccttcagacatagcgtggttggagaaaagaattcatcacctcaaagatgaaatgtacatggttgagagtaggcttgaaaggatgcggtatgaacatttacttttaaaaaaccaactaaaggacctagaacacaagtagctaccaaatttcattgttgaatcatatccttcttatagcatttttttgtatattcatgtgatatatagatatgacattc

SEQ ID NO: 55696 - protein, 629 aa, Glycine max
  peptide (1)..(629): Ceres Seq. ID no. 15170525
KFSDLRFSLSSMASTVVAAAVRSDVPPRQPVDPSASSSPDVADRSDSFNSSPNHFSDTEIQLQTPDVLKSEEYRQLFRLPLEEVLIEDFNCALQENLLIQGHMYLFVNFICFYSNIFGYETKKIIPFPEVTSVRRAKTAGLFPNAIEILAGNKKYFFASFLSRDEAFRIINEGWSRHGNGAIAIMEQKESMSESSCQENGFVAVENVKSSYITNNGSLSTDLSKDTALPSIVDDPLLTEDSAKQCSVKQVAEPELNIDAPNAASVSWKWNEEDIDAPSILEAYTCVADSVFPIKVEDFFRYLFSDDALNFLESFRQKCGDKDFRCSSWHPQEKFGYARELSFQHPIKIYLGAKFGGCHEVQKFRVYRNSHLVIETSQEVSDVPYADYFRVEGLWSVERDKDESKECCFLRVYVNVAFSKKTIWKGKIIQSTIEECRDAYATWINMAHEMLKQKNLEKQAQNGEINLDREVKTGESSEGSQEQSNHTKILATSNAFDATTHNVGSHLPGNFIEPSSVPLFKEFMTKFRSSLRSHSNLSLLLITVVALIFFIQQCSILVLLARPQHIHMNTPVDITNRMNNEVTRSPSDIAWLEKRIHHLKDEMYMVESRLERMRYEHLLLKNQLKDLEHK

SEQ ID NO: 55697 - protein, 618 aa, Glycine max
  peptide (1)..(618): Ceres Seq. ID no. 15170526
MASTVVAAAVRSDVPPRQPVDPSASSSPDVADRSDSFNSSPNHFSDTEIQLQTPDVLKSEEYRQLFRLPLEEVLIEDFNCALQENLLIQGHMYLFVNFICFYSNIFGYETKKIIPFPEVTSVRRAKTAGLFPNAIEILAGNKKYFFASFLSRDEAFRIINEGWSRHGNGAIAIMEQKESMSESSCQENGFVAVENVKSSYITNNGSLSTDLSKDTALPSIVDDPLLTEDSAKQCSVKQVAEPELNIDAPNAASVSWKWNEEDIDAPSILEAYTCVADSVFPIKVEDFFRYLFSDDALNFLESFRQKCGDKDFRCSSWHPQEKFGYARELSFQHPIKIYLGAKFGGCHEVQKFRVYRNSHLVIETSQEVSDVPYADYFRVEGLWSVERDKDESKECCFLRVYVNVAFSKKTIWKGKIIQSTIEECRDAYATWINMAHEMLKQKNLEKQAQNGEINLDREVKTGESSEGSQEQSNHTKILATSNAFDATTHNVGSHLPGNFIEPSSVPLFKEFMTKFRSSLRSHSNLSLLLITVVALIFFIQQCSILVLLARPQHIHMNTPVDITNRMNNEVTRSPSDIAWLEKRIHHLKDEMYMVESRLERMRYEHLLLKNQLKDLEHK

SEQ ID NO: 55698 - protein, 527 aa, Glycine max
  peptide (1)..(527): Ceres Seq. ID no. 15170527
MYLFVNFICFYSNIFGYETKKIIPFPEVTSVRRAKTAGLFPNAIEILAGNKKYFFASFLSRDEAFRIINEGWSRHGNGAIAIMEQKESMSESSCQENGFVAVENVKSSYITNNGSLSTDLSKDTALPSIVDDPLLTEDSAKQCSVKQVAEPELNIDAPNAASVSWKWNEEDIDAPSILEAYTCVADSVFPIKVEDFFRYLFSDDALNFLESFRQKCGDKDFRCSSWHPQEKFGYARELSFQHPIKIYLGAKFGGCHEVQKFRVYRNSHLVIETSQEVSDVPYADYFRVEGLWSVERDKDESKECCFLRVYVNVAFSKKTIWKGKIIQSTIEECRDAYATWINMAHEMLKQKNLEKQAQNGEINLDREVKTGESSEGSQEQSNHTKILATSNAFDATTHNVGSHLPGNFIEPSSVPLFKEFMTKFRSSLRSHSNLSLLLITVVALIFFIQQCSILVLLARPQHIHMNTPVDITNRMNNEVTRSPSDIAWLEKRIHHLKDEMYMVESRLERMRYEHLLLKNQLKDLEHK

SEQ ID NO: 55699 - DNA, 1278 bp, Glycine max
  misc_feature (1)..(1278): Ceres Seq. ID no. 14310616
attcccaacgaaccaacacagcctcacaagtaacaaacttataacacacactctctctctctctctctgcaatggctggaatggttcccctttgcattgcatcattggtcactctttttgttgcaacaagtgctagaattcctggggttttcaatggtggtgcatggcagggtgcccacgccactttctacggtggaaatgatgcctctggaacaatgggtggggcatgtgggtacgggaacctatacagccaagggtatggcgtgaacaccgcggccttgagcacggcgctgttcaacaacgggttgagctgcggcgcgtgcttcgagataaagtgcgaccaagatccgaggtggtgcaacccgggaagcccttccatcgtcatcaccgccacgaatttttgccctcccaactttgcccttcccagcgacaacggcggctggtgcaaccctcctcggccccacttcgacctcgccatgcccatgttcctcaagatcgctcagtataaagccggcatcgtgcccgtcagttaccgccgggttccatgcagaaaggtcggtggaatcagatttacgatcaacggttttcgttacttcaacttggttctaatcaccaacgtggcgggtgcaggggatatcgcgcgcgtgagcgttaaaggttccaaaaccgggtggaacagcatgagcagaaactgggggcaaaattggcaatcaaacgcgaatttagtgggccaggccctttccttcagagtcacgggcagtgacagacgcacctcaacctcttggaacgtggcaccttctcattggaagttcggccagaccttcacgggcaagaatttccgcgtctgaaaaaaataacaaaatttaaacatggatgtttgtttttgtagttgcgttttggttttttagttttcccgcgttcaactttccctctattttcccgggaaagtttgaagccgtgttttggtttaagtgtgtagtaggggacagaaagtaagagaagggtagataaggtaaaatgaaagtgactttactataaatgctagtagtgggtgtgagtagatgtttctaccaccttttgttattggagggtgaatttgtgtgatattaattattactaaagtgtattgggtgttgctggcaatatttattacccagcaatgctttttgttgacttggtgggggctgaggaggctgcaaggttcatgtagcccgcatctcctttattatgaactagaaacattatattatgtaatatctttcagttataatgcatgcc

SEQ ID NO: 55700 - protein, 258 aa, Glycine max
  peptide (1)..(258): Ceres Seq. ID no. 14310617
MAGMVPLCIASLVTLFVATSARIPGVFNGGAWQGAHATFYGGNDASGTMGGACGYGNLYSQGYGVNTAALSTALFNNGLSCGACFEIKCDQDPRWCNPGSPSIVITATNFCPPNFALPSDNGGWCNPPRPHFDLAMPMFLKIAQYKAGIVPVSYRRVPCRKVGGIRFTINGFRYFNLVLITNVAGAGDIARVSVKGSKTGWNSMSRNWGQNWQSNANLVGQALSFRVTGSDRRTSTSWNVAPSHWKFGQTFTGKNFRV

SEQ ID NO: 55701 - protein, 255 aa, Glycine max
  peptide (1)..(255): Ceres Seq. ID no. 14310618
MVPLCIASLVTLFVATSARIPGVFNGGAWQGAHATFYGGNDASGTMGGACGYGNLYSQGYGVNTAALSTALFNNGLSCGACFEIKCDQDPRWCNPGSPSIVITATNFCPPNFALPSDNGGWCNPPRPHFDLAMPMFLKIAQYKAGIVPVSYRRVPCRKVGGIRFTINGFRYFNLVLITNVAGAGDIARVSVKGSKTGWNSMSRNWGQNWQSNANLVGQALSFRVTGSDRRTSTSWNVAPSHWKFGQTFTGKNFRV

SEQ ID NO: 55702 - protein, 210 aa, Glycine max
  peptide (1)..(210): Ceres Seq. ID no. 14310619
MGGACGYGNLYSQGYGVNTAALSTALFNNGLSCGACFEIKCDQDPRWCNPGSPSIVITATNFCPPNFALPSDNGGWCNPPRPHFDLAMPMFLKIAQYKAGIVPVSYRRVPCRKVGGIRFTINGFRYFNLVLITNVAGAGDIARVSVKGSKTGWNSMSRNWGQNWQSNANLVGQALSFRVTGSDRRTSTSWNVAPSHWKFGQTFTGKNFRV

SEQ ID NO: 55703 - DNA, 1355 bp, Glycine max
  misc_feature (1)..(1355): Ceres Seq. ID no. 14311981
tcaagccaaagtcttgtgcttttcacatccccattttcccatttccctttctgcttcctctttcgccaaatgggtctcccataacacaatcttcacctttttttttcctctttctttcttcttcgcttctcggtggggcttcaagtttcaccataggatgttttctaggttgatacatcctcatgaagggcaggaagacatgcagggtggctccaatcacgctcacctcggagacccttgtcttgttttaacctccgatcccaaacctcgtcttcgttggaccgctgaccttcatgaacgctttgttgatgctgtcactcaacttgggggtgccagtaaagccactccaaaagcaatcatgaggaccatgaatgtcaagggtttgacgctctatcatttgaagagtcatcttcagaagtacaggctaggtaagcaatcaggaaaagattctgatgagggatgcaaagatgcttcatatcttcaagaaagccctggtactgataactcttctccaaagttaccagatgctaacgagggtcatgaagtcaaggaggcattaagagcacagatggaagtgcaaagtaaactacacttactagtggaggcagagaagcacttgcaaattcgccaggatgcagagcgaagatacatgggcatgcttgagcgagcgtgtaagatgttggcagatcaatttattggggatgtaactattgacatggacggccaaaaatttcaagggctggaaagcaaaacatcccagaagttccctagttgatcacgttggcttttatccccaagcgtgtactgaggtcggcggaatgcatgcttcagtagtatcacctattcttcaacctcaaggggctgactgtttcactgaaagttgcctaacatcacttgagagtctgggagggttgacactagaagaatctcctggcggatcgaagaagaggatgctgaacttggactcgatggtagcacctttgatctggagtgaagccaacaccagaactcaaggaattcatttagccaaagttaatccttcaggaatgactaggtacggcatgtaggtagggtagggaaggttagttcctcatgaagagagtttatgacattgtgctttgtcccaagcttttaggattaagtactgagtagggaaggttagctcctcatgaagagagttcatgacattgtgctttgccccaagcttttaggattaagtactgagttagattattatcggttgttgtccattaagttggtgagaatcaacttatctcacatcattgtgtaaattgaaatactatatggcttaacttggcccgtcactaaatgttggcgctgaccatttatgatcg

SEQ ID NO: 55704 - protein, 257 aa, Glycine max
  peptide (1)..(257): Ceres Seq. ID no. 14311982
QAKVLCFSHPHFPISLSASSFAKWVSHNTIFTFFFPLSFFFASRWGFKFHHRMFSRLIHPHEGQEDMQGGSNHAHLGDPCLVLTSDPKPRLRWTADLHERFVDAVTQLGGASKATPKAIMRTMNVKGLTLYHLKSHLQKYRLGKQSGKDSDEGCKDASYLQESPGTDNSSPKLPDANEGHEVKEALRAQMEVQSKLHLLVEAEKHLQIRQDAERRYMGMLERACKMLADQFIGDVTIDMDGQKFQGLESKTSQKFPS

SEQ ID NO: 55705 - protein, 205 aa, Glycine max
  peptide (1)..(205): Ceres Seq. ID no. 14311983
MFSRLIHPHEGQEDMQGGSNHAHLGDPCLVLTSDPKPRLRWTADLHERFVDAVTQLGGASKATPKAIMRTMNVKGLTLYHLKSHLQKYRLGKQSGKDSDEGCKDASYLQESPGTDNSSPKLPDANEGHEVKEALRAQMEVQSKLHLLVEAEKHLQIRQDAERRYMGMLERACKMLADQFIGDVTIDMDGQKFQGLESKTSQKFPS

SEQ ID NO: 55706 - protein, 191 aa, Glycine max
  peptide (1)..(191): Ceres Seq. ID no. 14311984
MQGGSNHAHLGDPCLVLTSDPKPRLRWTADLHERFVDAVTQLGGASKATPKAIMRTMNVKGLTLYHLKSHLQKYRLGKQSGKDSDEGCKDASYLQESPGTDNSSPKLPDANEGHEVKEALRAQMEVQSKLHLLVEAEKHLQIRQDAERRYMGMLERACKMLADQFIGDVTIDMDGQKFQGLESKTSQKFPS

SEQ ID NO: 55707 - DNA, 1413 bp, Glycine max
  misc_feature (1)..(1413): Ceres Seq. ID no. 14309674
gagtgtatgaaatgacccagtactcagaaggtgaagggagtaagtgagaactgagaacttctaagaaacgccgccaatggcgcatcgctcactcttcctctctctcagacgaaatagcggtttagcttgtgtcctgaacagaacaagattcgtgtcttcgggtgctgtgagcagtgatttggtggaagagagtgtggaaggtgatgatgacctaaggagcagaatcttcaggcttaggctccccaagcgaagcgccaccaacgttcttcagaaatgggtcctccaagggaatcctattacgctctctcagcttcgggatatatccaaagagcttcgaagatctcaacgttacaaacacgctttggagatatcagagtggatggttagcaatgaggaatatgagttatcagactctgattatgcagtccgcatagatttgatgacccaagtttttggcattgatgctgcagagcgctactttgagggtctacctcttgctacaaagactactgaaacatacacagcactcctccattcttacgcaggagcaaaattgactgaaaaggctgaggaactttatcaaaggataaaggattcaaacctttcctttgatgctcttacttacaatgaaatgatgactctttacatgtcagtggggcagtttgaaaaggtccctatagttgttgaagaactgaaacaacaaaaggtttcccctgatatctttacttacaatctatggataagttcctgtgccgctattcttaatatcgatgaagttaggaggattcttgatgaaatgagtcacggtgctggttctaatgaaagttggatcagatatttgaacctggccaatatatatattagtgtagctcatcttgataatgcaagttccaacacacttgttgagactgagaaaaggatcacccaaaggcaatggataacttatgacttcttaatcattctttatggtgggttgggaagtaaggataaacttgatcagatatggaattccttgggaatgaccaaacagaaaatgattagcaggaattacatgtgcatcatttcttcctatctgatgcttggtcttacgaaagaagtgggtgaagttattgatcaatggaagcaatcaacgaccacggattttgatatgcttgcctgtaaaaagattttggttgcttttagggacattggcttagctgaaatagccaacaacttgaatgtgattctcattgagaagaacctcagtcttggaagtgattaactaggagttctctgagcatgaatgtaatatagaatatatatagatttgagatcaattttgcaacttcggaagggaaaatatatttcatttgaaatttgttaatccatcccgaatgaataaatatgctgtgtgaatggaagtcttgcaatgct

SEQ ID NO: 55708 - protein, 394 aa, Glycine max
  peptide (1)..(394): Ceres Seq. ID no. 14309675
MAHRSLFLSLRRNSGLACVLNRTRFVSSGAVSSDLVEESVEGDDDLRSRIFRLRLPKRSATNVLQKWVLQGNPITLSQLRDISKELRRSQRYKHALEISEWMVSNEEYELSDSDYAVRIDLMTQVFGIDAAERYFEGLPLATKTTETYTALLHSYAGAKLTEKAEELYQRIKDSNLSFDALTYNEMMTLYMSVGQFEKVPIVVEELKQQKVSPDIFTYNLWISSCAAILNIDEVRRILDEMSHGAGSNESWIRYLNLANIYISVAHLDNASSNTLVETEKRITQRQWITYDFLIILYGGLGSKDKLDQIWNSLGMTKQKMISRNYMCIISSYLMLGLTKEVGEVIDQWKQSTTTDFDMLACKKILVAFRDIGLAEIANNLNVILIEKNLSLGSD

SEQ ID NO: 55709 - protein, 293 aa, Glycine max
  peptide (1)..(293): Ceres Seq. ID no. 14309676
MVSNEEYELSDSDYAVRIDLMTQVFGIDAAERYFEGLPLATKTTETYTALLHSYAGAKLTEKAEELYQRIKDSNLSFDALTYNEMMTLYMSVGQFEKVPIVVEELKQQKVSPDIFTYNLWISSCAAILNIDEVRRILDEMSHGAGSNESWIRYLNLANIYISVAHLDNASSNTLVETEKRITQRQWITYDFLIILYGGLGSKDKLDQIWNSLGMTKQKMISRNYMCIISSYLMLGLTKEVGEVIDQWKQSTTTDFDMLACKKILVAFRDIGLAEIANNLNVILIEKNLSLGSD

SEQ ID NO: 55710 - protein, 273 aa, Glycine max
  peptide (1)..(273): Ceres Seq. ID no. 14309677
MTQVFGIDAAERYFEGLPLATKTTETYTALLHSYAGAKLTEKAEELYQRIKDSNLSFDALTYNEMMTLYMSVGQFEKVPIVVEELKQQKVSPDIFTYNLWISSCAAILNIDEVRRILDEMSHGAGSNESWIRYLNLANIYISVAHLDNASSNTLVETEKRITQRQWITYDFLIILYGGLGSKDKLDQIWNSLGMTKQKMISRNYMCIISSYLMLGLTKEVGEVIDQWKQSTTTDFDMLACKKILVAFRDIGLAEIANNLNVILIEKNLSLGSD

SEQ ID NO: 55711 - DNA, 1194 bp, Glycine max
  misc_feature (1)..(1194): Ceres Seq. ID no. 14308660
gaattttactttggctgtgaaaatgtatcaaaactgcttgcggaagttttatcataacacagactctcaaatacttctatatttagctcgtacacattacgaggctgaacagtggcaagactgtataaaaactctactgagggccatacatttggcaccctcaaactataccttaaggtttgatgcaggggttgcaatgcaaaagttttcagcatcaacactacaaaaagcaaagaggactgcagatgaggtaagagcaactgttgctgagcttcaaaatgctgttcgtgtatttagtcagttgtctgctgcttccaatctacatattcacgggtttgatgagaagaaaattgacacacatgttggatactgcaaccacttactttcggctgcaaaagttcatcttgaagcagctgagcatgaagagcagcaagtacggcaaagacaagaacttgctcgtcaggttgcattggctgaggaagcccggcgaaaggctgaagagcaaaggaaatttcagatggaaaggggaaaacaagaagacgagctaaagcgtgtgcaaaaacaggaggaacattttaggcgtgttaaggagcaatggaagagcagcagtcattcaaaacggagagaaagatcagacgatgaagagggagggactggtgagaagaagagaaaaaaaggtggaaaacggagaaaaaaggataagcactctaaattgcgctatgacgcagaggaaccagaagatgatttgatggatgaacagggaatggaggatgaagaagctgatataaactacagagaggagccccaaactcagatgaatgatgatgctgaggaaaatgctcagggtcttcttgcagcggctgggcttgaagattctgatgcagatgaggaaacagctgcaccttcctcaagcatagcccgacgaaggcaagcattatcggaatctgatgatgacgaaccattattacaaaggcagtcaagtccagtaagacaaaactctgctgatatgcagttgagtgatggagaaataagggatggggataagacaaatggagatgatggcaatgatgaggagaaacaatattgaccctacaggttagtctttaatatccgccaagtgattttgtaagagtgataacattatttaaattttatgtatatatacttgaaaaattttaaaaaaaggttttattc

SEQ ID NO: 55712 - protein, 361 aa, Glycine max
  peptide (1)..(361): Ceres Seq. ID no. 14308661
NFTLAVKMYQNCLRKFYHNTDSQILLYLARTHYEAEQWQDCIKTLLRAIHLAPSNYTLRFDAGVAMQKFSASTLQKAKRTADEVRATVAELQNAVRVFSQLSAASNLHIHGFDEKKIDTHVGYCNHLLSAAKVHLEAAEHEEQQVRQRQELARQVALAEEARRKAEEQRKFQMERGKQEDELKRVQKQEEHFRRVKEQWKSSSHSKRRERSDDEEGGTGEKKRKKGGKRRKKDKHSKLRYDAEEPEDDLMDEQGMEDEEADINYREEPQTQMNDDAEENAQGLLAAAGLEDSDADEETAAPSSSIARRRQALSESDDDEPLLQRQSSPVRQNSADMQLSDGEIRDGDKTNGDDGNDEEKQY

SEQ ID NO: 55713 - protein, 354 aa, Glycine max
  peptide (1)..(354): Ceres Seq. ID no. 14308662
MYQNCLRKFYHNTDSQILLYLARTHYEAEQWQDCIKTLLRAIHLAPSNYTLRFDAGVAMQKFSASTLQKAKRTADEVRATVAELQNAVRVFSQLSAASNLHIHGFDEKKIDTHVGYCNHLLSAAKVHLEAAEHEEQQVRQRQELARQVALAEEARRKAEEQRKFQMERGKQEDELKRVQKQEEHFRRVKEQWKSSSHSKRRERSDDEEGGTGEKKRKKGGKRRKKDKHSKLRYDAEEPEDDLMDEQGMEDEEADINYREEPQTQMNDDAEENAQGLLAAAGLEDSDADEETAAPSSSIARRRQALSESDDDEPLLQRQSSPVRQNSADMQLSDGEIRDGDKTNGDDGNDEEKQY

SEQ ID NO: 55714 - protein, 296 aa, Glycine max
  peptide (1)..(296): Ceres Seq. ID no. 14308663
MQKFSASTLQKAKRTADEVRATVAELQNAVRVFSQLSAASNLHIHGFDEKKIDTHVGYCNHLLSAAKVHLEAAEHEEQQVRQRQELARQVALAEEARRKAEEQRKFQMERGKQEDELKRVQKQEEHFRRVKEQWKSSSHSKRRERSDDEEGGTGEKKRKKGGKRRKKDKHSKLRYDAEEPEDDLMDEQGMEDEEADINYREEPQTQMNDDAEENAQGLLAAAGLEDSDADEETAAPSSSIARRRQALSESDDDEPLLQRQSSPVRQNSADMQLSDGEIRDGDKTNGDDGNDEEKQY

SEQ ID NO: 55715 - DNA, 1700 bp, Glycine max
  misc_feature (1)..(1700): Ceres Seq. ID no. 14307534
aaaaccctgctagtgttgttccgttgagataaacataaacctgagtgagtgaggctaagggagaaagctagaactaaaaatgtcatcagcttctaagctcacactgtacggaatcggaaccgcactgttccgcacccgtcgaactgcacctgtaagtgtaactccctttctcttcttcaaacccattcccttacctcggccgccgcgcttcctcctcctccgcgattcctcttcctcctccgccgccgccgcagaaatcctaccctccgttgaccacccctggccggaatgggtctccttcgtcgaccgcttgagcaccaaaggctacctccccaaaccctcctcttcttccgatgacaccgtaagcctttacaccaacatgaactctctcaaggacgcttgtctcagcttctcgcgtgaccgttacgaccttttcaagttgctgcctacgcacgatatccaagcagtagttgagggtgggtgccctaatcttctccgtaaagctgttaattcggccaagagactgagagcacacctgcaattagatgaaggggatgtttgtggtgcttgcaatctacgaagctcttgtgatagagcttatgtgattctaaaggattttgaaactgatgctcgaactattgatatagttcgaatacttttgttctacgcactagatccactagtgctttctagtggagacaaaccaccaggccgagaagttattgaatcatccgccagaaaacttctctctcagctaattgagttgagtgagtcccctgctccagcccctgcttctgctcgttcaaagcctactgcacaggatgctgtgggagaaggccaatctctaagtgttacgactaatcaattgtttaaagatgctgagatgaagaaaggtgactggatgtgtccaaaatgcaatttcatgaacttttctagaaatacgcaatgcctgaattgtaacgaagacaagcctaaggatattaacccatctactgttcaaatgaagccaggagattggacctgtcctgaatgcaattttttaaattttgccagaaacacacgatgtctaaaatgcaaaacagcggggccgacaaaggaagccaatactaatgaagttgaaaggaaaaaaggagattggacttgcccacaatgtgggttcatgaattatgctaggaacacgaaatgtttgcgttgtcctgagacaaggcctaagaaacatcctggtgactggaattgtcccgggtgtgggttcatgaattttggtagtaaaatgaagtgcttgcactgtcaagagccaaacccaagttccaagaaatataacggggattggagttgtcccaaatgtgatttctacaattatgcaagaaatatggcttgcctgaagtgcaatactgaacgccctaaagaacaaccaaccgttgactatgatggccatgaatggagacgatcaaattgattaaaaaaaaaccgccatcgagggaggtcacaattttggtcttggctgtaacaaatattttgattgcatatgaattaattctccaattaatggtgctgagtgcttcttaacttaattagagatactttaaagttatttgattgcatatgaatttgtgttttaatttaatcatgtacagatctaaaagcaaatttacagagattgaatcttgtgaatgttatagctttattttgcttctgattcc

SEQ ID NO: 55716 - protein, 458 aa, Glycine max
  peptide (1)..(458): Ceres Seq. ID no. 14307535
MSSASKLTLYGIGTALFRTRRTAPVSVTPFLFFKPIPLPRPPRFLLLRDSSSSSAAAAEILPSVDHPWPEWVSFVDRLSTKGYLPKPSSSSDDTVSLYTNMNSLKDACLSFSRDRYDLFKLLPTHDIQAVVEGGCPNLLRKAVNSAKRLRAHLQLDEGDVCGACNLRSSCDRAYVILKDFETDARTIDIVRILLFYALDPLVLSSGDKPPGREVIESSARKLLSQLIELSESPAPAPASARSKPTAQDAVGEGQSLSVTTNQLFKDAEMKKGDWMCPKCNFMNFSRNTQCLNCNEDKPKDINPSTVQMKPGDWTCPECNFLNFARNTRCLKCKTAGPTKEANTNEVERKKGDWTCPQCGFMNYARNTKCLRCPETRPKKHPGDWNCPGCGFMNFGSKMKCLHCQEPNPSSKKYNGDWSCPKCDFYNYARNMACLKCNTERPKEQPTVDYDGHEWRRSN

SEQ ID NO: 55717 - protein, 358 aa, Glycine max
  peptide (1)..(358): Ceres Seq. ID no. 14307536
MNSLKDACLSFSRDRYDLFKLLPTHDIQAVVEGGCPNLLRKAVNSAKRLRAHLQLDEGDVCGACNLRSSCDRAYVILKDFETDARTIDIVRILLFYALDPLVLSSGDKPPGREVIESSARKLLSQLIELSESPAPAPASARSKPTAQDAVGEGQSLSVTTNQLFKDAEMKKGDWMCPKCNFMNFSRNTQCLNCNEDKPKDINPSTVQMKPGDWTCPECNFLNFARNTRCLKCKTAGPTKEANTNEVERKKGDWTCPQCGFMNYARNTKCLRCPETRPKKHPGDWNCPGCGFMNFGSKMKCLHCQEPNPSSKKYNGDWSCPKCDFYNYARNMACLKCNTERPKEQPTVDYDGHEWRRSN

SEQ ID NO: 55718 - DNA, 1396 bp, Glycine max
  misc_feature (1)..(1396): Ceres Seq. ID no. 15170345
actgatctttcttttggtgttgaagaagagaagatcaatgatctacctgatcaatggacgactccaactcacctgatcccaccgcatcctttgcttttagatccacaaccacaaccacaacacctcagagcaacttcttgagaagccattctactaaagaaacccctttctcaaacttcattcactccccaccacgcctctcttgtcccactctttctcgtagcctccaaaactctcctatttcctctccacttcaccaccgtcaattctcaccccctccctctcctccttctcccacaaaactctctgattctgaacctcaaaccacttaccactgtgcctcttcagtcctcagaaacgatggacagatcctctccattgccctgtcatcaaatggtttggtctacactggctctgactcaaaccttgtgagggtgtggaagctccctgagttcaccgaatgtggacaactcaggaccaaggcttgcagggtggtggccctcgaagtgtccaatgacacggtttatgcagcatatggtgatggcaaaataagggtatggagaagaacttgggataaggtgttgaagcatgttcggttggctaccatcccaaagacactcggctatgttcgcagctacatcgccggcaaagacaagacaatgcacaaggggctaatcacggcaatggcaataaacacagcagaggacattctatacacagcttccctggacaaaacggtgaaagtgtggagaatctcagacctgaagtgcatagagaccatcaaggcacacactgagccaatcaacgccatcatagtggcagatgatggagtcctctaaacttgacttttatagaatttagttcacctattttcatctttatttcatgctttgaataatcataattttgatttttataaattatagttttatttatataaaatttttctaaaaaatttataagtcaataatgtccaatataaagagaagctaaatttatataaaactttaatataaaataggtctttaaaaagactcatcaaactagatattcaaataggtgaacaaaattatcaattaaaaattcacctattcccaattgccttccctatccacaactcatgaattaagaattttcaaagtagcaacatctattgaactaactctcttacttcatggaaatctttcataaaaaaatttagtaaaaaaaaaatctttcacaaatattactaattaatcctaaagatccatgctgaacaatttatataacattttttaaaaataaattttatcatgtcactatttttttatatttgattttttaaataatatgatagtaataaatgattgtattaaaagacttccgtttacatagagacagtgtgtggcagttggtt

SEQ ID NO: 55719 - protein, 261 aa, Glycine max
  peptide (1)..(261): Ceres Seq. ID no. 15170346
MDDSNSPDPTASFAFRSTTTTTTPQSNFLRSHSTKETPFSNFIHSPPRLSCPTLSRSLQNSPISSPLHHRQFSPPPSPPSPTKLSDSEPQTTYHCASSVLRNDGQILSIALSSNGLVYTGSDSNLVRVWKLPEFTECGQLRTKACRVVALEVSNDTVYAAYGDGKIRVWRRTWDKVLKHVRLATIPKTLGYVRSYIAGKDKTMHKGLITAMAINTAEDILYTASLDKTVKVWRISDLKCIETIKAHTEPINAIIVADDGVL

SEQ ID NO: 55720 - DNA, 1779 bp, Glycine max
  misc_feature (1)..(1779): Ceres Seq. ID no. 14310772
attccaaaatggtggaaacattaccacaccatactcctcctcctcctaaccatcaccaagtcttggttctaaaatctgcaatatgttcgagactcctcctcgtaaccctaatcatcctcttccgaaccctcgtttccccctacgacacatccgcatccttaaaccctccatgcctctccacccccaaccccaactccaccacccacccttcccccctcgaaaacggcgtcgtttgggactccgtctacttcctccgcatcgcccaatgcggctacgagtacgaacaaaccttcgccttcttacccctccttcctctctctctctccctctcttctcacaccctcttcgcctttctctctccctttctaaaccaaaggcccctcctcgctctctccgcttacgtcatcaacaacatggctttcgttctcgccgctctctacttctacaagctctccctcaccgtcttgaaggacccccaaatagcgcttcgggccaccgttttcttctgctttaatcctgcctctatattttattcatccatatactcggagagtttgtacgcgcttctgtgtttcggaggaatgtaccacttcatgtctggtgggaacaatttggctgttcttttctttgcgctctccggttgtgctaggtctaatggggtgctgaatgctggctatctctgctttcagactatgcatcgcgcttatcatgctatgtttcaagaaaagcgtgttactttggctttgcagattgttattgctggagctttacgtactgcatgtatttttgctccatttgtagctttccaggcttatggctactacaatatgtgtgttggacgttctcctgatgaaataaggccatggtgcaaggcaagaataccattactttacaattacatccaaagtcattattggggtgtaggtttcttgagatattttcagctgaaacagttgcctaactttcttcttgcttccccaatactgtctctggcactttgctcagttgtccattatgctaagtcaaggcctcaaaactttctctcactgggttttttagctcctatggaagaaaagagccgtggagttgtgtttttattagatgaactctcaaggtccaaagaagcccgaagtgtgaagaaatcctctgttagggtagaagcagaacattccaatcttaggagaagaaagaatgtgagcaagggagatgctgctaatgttcacctagaatctgagccagcagcaatttggccaggatacttgtctgcttctgttcttccatttgtgttacacttgggattcatggcatgcactgctttcttcatcatgcatgtacaggtttcaactcgtttcttgtctgccagccctccactttattggtttgcttcatatataatggcatatcctggaaaatactctagatggggatacgtgatgtgggcatactctatagcatatatttttcttggcagtttgctgttttcaaacttctatccttttacttaacgagaagaaaggtagatggttcttgaaagctgttggtcttcttattccatgcaatgcacaaaggcataactatccaccctgaagcgttgctgctgaatttcagatttctgctggttgctgtttgatctttacacgcctgagtagtggagaaaatgcccccttccctccctcaaattagcaatttttttttacgttggtcaaccgggattcttatcatctagatgagtaaactaatagaaatccttttcctttgttgtaattttcatttttgtct

SEQ ID NO: 55721 - protein, 500 aa, Glycine max
  peptide (1)..(500): Ceres Seq. ID no. 14310773
SKMVETLPHHTPPPPNHHQVLVLKSAICSRLLLVTLIILFRTLVSPYDTSASLNPPCLSTPNPNSTTHPSPLENGVVWDSVYFLRIAQCGYEYEQTFAFLPLLPLSLSLSSHTLFAFLSPFLNQRPLLALSAYVINNMAFVLAALYFYKLSLTVLKDPQIALRATVFFCFNPASIFYSSIYSESLYALLCFGGMYHFMSGGNNLAVLFFALSGCARSNGVLNAGYLCFQTMHRAYHAMFQEKRVTLALQIVIAGALRTACIFAPFVAFQAYGYYNMCVGRSPDEIRPWCKARIPLLYNYIQSHYWGVGFLRYFQLKQLPNFLLASPILSLALCSVVHYAKSRPQNFLSLGFLAPMEEKSRGVVFLLDELSRSKEARSVKKSSVRVEAEHSNLRRRKNVSKGDAANVHLESEPAAIWPGYLSASVLPFVLHLGFMACTAFFIMHVQVSTRFLSASPPLYWFASYIMAYPGKYSRWGYVMWAYSIAYIFLGSLLFSNFYPFT

SEQ ID NO: 55722 - protein, 498 aa, Glycine max
  peptide (1)..(498): Ceres Seq. ID no. 14310774
MVETLPHHTPPPPNHHQVLVLKSAICSRLLLVTLIILFRTLVSPYDTSASLNPPCLSTPNPNSTTHPSPLENGVVWDSVYFLRIAQCGYEYEQTFAFLPLLPLSLSLSSHTLFAFLSPFLNQRPLLALSAYVINNMAFVLAALYFYKLSLTVLKDPQIALRATVFFCFNPASIFYSSIYSESLYALLCFGGMYHFMSGGNNLAVLFFALSGCARSNGVLNAGYLCFQTMHRAYHAMFQEKRVTLALQIVIAGALRTACIFAPFVAFQAYGYYNMCVGRSPDEIRPWCKARIPLLYNYIQSHYWGVGFLRYFQLKQLPNFLLASPILSLALCSVVHYAKSRPQNFLSLGFLAPMEEKSRGVVFLLDELSRSKEARSVKKSSVRVEAEHSNLRRRKNVSKGDAANVHLESEPAAIWPGYLSASVLPFVLHLGFMACTAFFIMHVQVSTRFLSASPPLYWFASYIMAYPGKYSRWGYVMWAYSIAYIFLGSLLFSNFYPFT

SEQ ID NO: 55723 - protein, 363 aa, Glycine max
  peptide (1)..(363): Ceres Seq. ID no. 14310775
MAFVLAALYFYKLSLTVLKDPQIALRATVFFCFNPASIFYSSIYSESLYALLCFGGMYHFMSGGNNLAVLFFALSGCARSNGVLNAGYLCFQTMHRAYHAMFQEKRVTLALQIVIAGALRTACIFAPFVAFQAYGYYNMCVGRSPDEIRPWCKARIPLLYNYIQSHYWGVGFLRYFQLKQLPNFLLASPILSLALCSVVHYAKSRPQNFLSLGFLAPMEEKSRGVVFLLDELSRSKEARSVKKSSVRVEAEHSNLRRRKNVSKGDAANVHLESEPAAIWPGYLSASVLPFVLHLGFMACTAFFIMHVQVSTRFLSASPPLYWFASYIMAYPGKYSRWGYVMWAYSIAYIFLGSLLFSNFYPFT

SEQ ID NO: 55724 - DNA, 2113 bp, Glycine max
  misc_feature (1)..(2113): Ceres Seq. ID no. 12582251
cagctacgtaggccccccccccgagttgttgttgttgtttgtgccgcgaaagagaaggcaagcaaaaaaggtgatcctgggcgtacaagaccataacaccaccttccagctcactctccataaaccctaacgcttcgtctagggtttcgctgaattccccaattttcccaacccccgaccggacatgctccttctccgatggccgtcgtaactagcaacggcaagcgccgccaacattggccctccgcgaattaccactttccatctcccaattccaaaagacccagacttccaacaatgtcccaaaaccacgcgcaatccgtgttatcctccagtagtatcatttctagaatttctacgtaccccgaaaccaagccacccctccatagggaggttcacgccccgtgtagaccacgtaagtttgattctcctgccttcaatagaagtgctcattattatcgcaaggaagagattagtcacgatgtgggcaacttgttaagtaaaaattaccaaagggcgaaaaattccgcgttagctagcattaggtttggggaaaagggcaaggaggtgatagaagtggatgctgatagttccaaggatatggtttcggaggaggattcgagtgtggaagaggttcgttttgtggaagaagatggacgagaagtgcgctccgtggtgacggagcacaagtggcaagagggtgatttggttgtgactgaggttaaggatttggatgctaaggatatgtgtggtggccctcagcagcagtcaacttcatccgtggtttctgagttgactaatggtgatctgaatgtggttaatgctgagaagatgttggacattctttctttgactccggatcatgatctttcctccgttcaagcctacaagaagttgctcgatgctcttggccagcgaacggatacccttaacaggctggaggctgaaattaaagttaacgagaagcgtatgtccacgtttgaattgttgcgcccgaagaaggaactagtagaggaagttccattggaaccttttattcctcttactaaagaggaagaagttgaggttgcacatgccttttctaccaaccggaaaaagatcttggtttcccatgagaaatctggcattgagatctcgggagaaaagtttcaatgccttagaccgggtgcatggttaaacgatgaggtaataaatgtgtaccttgaattgctgaaagagagggagagaagagagccacagaagtttctgaactgtcattttttcagtacctttttctacaagaggttaataagtggcaagaatgggtatgatttcaaatctgtgaggagatggaccagccaaaagaaattgggatatggcctacatgaatgtgataaaatatttgttcctatccataaagagattcattggtgcttggctgttatcaataagaaagataagaaatttcagtatctggactcactaagaggaacagatgcccaagtaatgaaagttctggctagctatattgtagatgaagtaaaggacaagactggaaaagatattgatgtaagttcttggaaaaaagaatttgttgaagaccttcctgagcagcagaacgggtatgattgtggggtgtttatgatcaaatatgccgacttctatagcagaaacttggggctatgtttcaaccaggaacacatgtcttactttcggcgcagaacagctaaagaaatcttgagattaaaagctaactaagcaaaagaatattcatttgtatttccatattggattttggtcatcagaaattgaaacaatcattaatgtaaaatcagtagagcactttttgatgaaggatccttcactcctgtcactatctcgaccttaaccattcaaaagttctggcatttgttagattgtggactggactgattatacatatcatcccgatatccaggtacaccatgttggtagtgtagtgtgtagtgggttgtatatgctacgcaaaggtgaaatcatagatgagatgaggcattaggttgtggttttaattatgtaatcataaatgtgctccctcaccttttttggtgtctggttactaaaaaaaaaaaaaaaagaaaaaaaaaaaaaaaaa

SEQ ID NO: 55725 - protein, 512 aa, Glycine max
  peptide (1)..(512): Ceres Seq. ID no. 12582252
MAVVTSNGKRRQHWPSANYHFPSPNSKRPRLPTMSQNHAQSVLSSSSIISRISTYPETKPPLHREVHAPCRPRKFDSPAFNRSAHYYRKEEISHDVGNLLSKNYQRAKNSALASIRFGEKGKEVIEVDADSSKDMVSEEDSSVEEVRFVEEDGREVRSVVTEHKWQEGDLVVTEVKDLDAKDMCGGPQQQSTSSVVSELTNGDLNVVNAEKMLDILSLTPDHDLSSVQAYKKLLDALGQRTDTLNRLEAEIKVNEKRMSTFELLRPKKELVEEVPLEPFIPLTKEEEVEVAHAFSTNRKKILVSHEKSGIEISGEKFQCLRPGAWLNDEVINVYLELLKERERREPQKFLNCHFFSTFFYKRLISGKNGYDFKSVRRWTSQKKLGYGLHECDKIFVPIHKEIHWCLAVINKKDKKFQYLDSLRGTDAQVMKVLASYIVDEVKDKTGKDIDVSSWKKEFVEDLPEQQNGYDCGVFMIKYADFYSRNLGLCFNQEHMSYFRRRTAKEILRLKAN

SEQ ID NO: 55726 - protein, 479 aa, Glycine max
  peptide (1)..(479): Ceres Seq. ID no. 12582253
MSQNHAQSVLSSSSIISRISTYPETKPPLHREVHAPCRPRKFDSPAFNRSAHYYRKEEISHDVGNLLSKNYQRAKNSALASIRFGEKGKEVIEVDADSSKDMVSEEDSSVEEVRFVEEDGREVRSVVTEHKWQEGDLVVTEVKDLDAKDMCGGPQQQSTSSVVSELTNGDLNVVNAEKMLDILSLTPDHDLSSVQAYKKLLDALGQRTDTLNRLEAEIKVNEKRMSTFELLRPKKELVEEVPLEPFIPLTKEEEVEVAHAFSTNRKKILVSHEKSGIEISGEKFQCLRPGAWLNDEVINVYLELLKERERREPQKFLNCHFFSTFFYKRLISGKNGYDFKSVRRWTSQKKLGYGLHECDKIFVPIHKEIHWCLAVINKKDKKFQYLDSLRGTDAQVMKVLASYIVDEVKDKTGKDIDVSSWKKEFVEDLPEQQNGYDCGVFMIKYADFYSRNLGLCFNQEHMSYFRRRTAKEILRLKAN

SEQ ID NO: 55727 - protein, 378 aa, Glycine max
  peptide (1)..(378): Ceres Seq. ID no. 12582254
MVSEEDSSVEEVRFVEEDGREVRSVVTEHKWQEGDLVVTEVKDLDAKDMCGGPQQQSTSSVVSELTNGDLNVVNAEKMLDILSLTPDHDLSSVQAYKKLLDALGQRTDTLNRLEAEIKVNEKRMSTFELLRPKKELVEEVPLEPFIPLTKEEEVEVAHAFSTNRKKILVSHEKSGIEISGEKFQCLRPGAWLNDEVINVYLELLKERERREPQKFLNCHFFSTFFYKRLISGKNGYDFKSVRRWTSQKKLGYGLHECDKIFVPIHKEIHWCLAVINKKDKKFQYLDSLRGTDAQVMKVLASYIVDEVKDKTGKDIDVSSWKKEFVEDLPEQQNGYDCGVFMIKYADFYSRNLGLCFNQEHMSYFRRRTAKEILRLKAN

SEQ ID NO: 55728 - DNA, 1604 bp, Glycine max
  misc_feature (1)..(1604): Ceres Seq. ID no. 15175677
gagttctctgcattcttcaaacacacacacacacacacagaatgggtgacatgtaccactttgacaagaacctctcctcacaagacgaaatctcactttttctgcgtcagattctgctccgttcatctttaccttcccactccatgcctgctggatcctgcacctccaacgctgctcaacaaaacgtaaatgcacaccacccttctttcacggcgtcacagctccaagatgggaagatcttggccgttgattccaccgcttcttttgtctccggttctgctgcttgcagttccttcaagggccatggtgcttctgctgcaaatgtgtcttcttcttctgctggagtgagtgagaacgagaatgatgactatgattgtgagagtgaggagggtgttgaggctccggccgaagaagttccaacaaaggctgcttcttctaggagttcatctaaaagatcaagagctgcagaagttcataatttgtcagagaagcggagaaggggtaggatcaacgagaaaatgaaggctttgcaaaacctaattccaaattctaacaagacagataaggcttcaatgctcgatgaagctattgaataccttaaacagcttcagctacaagtacagatgctgtcaatgagaaatgggttgagtttgcatcctatgtgctttcctgaaggcttgcagcctctgcagttgtctcagatgggtatggaattaagtgaaagaaacaggtttacctctttaaacatgtcagctactctgcctctgcaccaagacaacaatcccttgcactatgcatccaatctacctaacaaacacaatctcccaaatcagccatcagtgccctatcctccatacattgacaacccagaaacttctttcggtctggaaccccgaatccaaacggatatgaaacctcttcaacacaaaggaggatcttctgagccaatacgaggggaagacattttgcagcaccagcaatcaagtggtatccattcagatgccaatacattaggtggttctcaagttgtcaaagaattcgaatcaggcacgagactatcattcccttttgacacgcaagcatgtgaacccaaagacaacagcaactcttcgcaaccatgcattggcggaagagatcattcaggagtgatcataagaaatagtgagaccaacattgttggtaggtaggtatatgatgcttatgtgaatgatatgtagctaggttcgtgcatgcaatgcaacatgtcttgaaaagcttttcaccagagactgcagaagggagaaagtggtcagtggcaactcgaagaccgaaaagtcagatttttgaagtttactgccagtaatgccttctgaattttggtttcgtaaaagcaggaatctcaatattatcccttgagcattttgtaatgttctcaaaaagcctctggcctacgtgacatgagagcagattttttttttttctctttctagcttctcgagttgataaaattatgtatgtataatgtatgcagagaatataactacccattgttatgcggattatataaccactgtagaatatcctatggtggttttatttcagttcacgataaaaacaaattgccc

SEQ ID NO: 55729 - protein, 394 aa, Glycine max
  peptide (1)..(394): Ceres Seq. ID no. 15175678
VLCILQTHTHTHRMGDMYHFDKNLSSQDEISLFLRQILLRSSLPSHSMPAGSCTSNAAQQNVNAHHPSFTASQLQDGKILAVDSTASFVSGSAACSSFKGHGASAANVSSSSAGVSENENDDYDCESEEGVEAPAEEVPTKAASSRSSSKRSRAAEVHNLSEKRRRGRINEKMKALQNLIPNSNKTDKASMLDEAIEYLKQLQLQVQMLSMRNGLSLHPMCFPEGLQPLQLSQMGMELSERNRFTSLNMSATLPLHQDNNPLHYASNLPNKHNLPNQPSVPYPPYIDNPETSFGLEPRIQTDMKPLQHKGGSSEPIRGEDILQHQQSSGIHSDANTLGGSQVVKEFESGTRLSFPFDTQACEPKDNSNSSQPCIGGRDHSGVIIRNSETNIVGR

SEQ ID NO: 55730 - protein, 381 aa, Glycine max
  peptide (1)..(381): Ceres Seq. ID no. 15175679
MGDMYHFDKNLSSQDEISLFLRQILLRSSLPSHSMPAGSCTSNAAQQNVNAHHPSFTASQLQDGKILAVDSTASFVSGSAACSSFKGHGASAANVSSSSAGVSENENDDYDCESEEGVEAPAEEVPTKAASSRSSSKRSRAAEVHNLSEKRRRGRINEKMKALQNLIPNSNKTDKASMLDEAIEYLKQLQLQVQMLSMRNGLSLHPMCFPEGLQPLQLSQMGMELSERNRFTSLNMSATLPLHQDNNPLHYASNLPNKHNLPNQPSVPYPPYIDNPETSFGLEPRIQTDMKPLQHKGGSSEPIRGEDILQHQQSSGIHSDANTLGGSQVVKEFESGTRLSFPFDTQACEPKDNSNSSQPCIGGRDHSGVIIRNSETNIVGR

SEQ ID NO: 55731 - protein, 378 aa, Glycine max
  peptide (1)..(378): Ceres Seq. ID no. 15175680
MYHFDKNLSSQDEISLFLRQILLRSSLPSHSMPAGSCTSNAAQQNVNAHHPSFTASQLQDGKILAVDSTASFVSGSAACSSFKGHGASAANVSSSSAGVSENENDDYDCESEEGVEAPAEEVPTKAASSRSSSKRSRAAEVHNLSEKRRRGRINEKMKALQNLIPNSNKTDKASMLDEAIEYLKQLQLQVQMLSMRNGLSLHPMCFPEGLQPLQLSQMGMELSERNRFTSLNMSATLPLHQDNNPLHYASNLPNKHNLPNQPSVPYPPYIDNPETSFGLEPRIQTDMKPLQHKGGSSEPIRGEDILQHQQSSGIHSDANTLGGSQVVKEFESGTRLSFPFDTQACEPKDNSNSSQPCIGGRDHSGVIIRNSETNIVGR

SEQ ID NO: 55732 - DNA, 1386 bp, Glycine max
  misc_feature (1)..(1386): Ceres Seq. ID no. 15226511
aatctttaataaaagatattaaaatcctatggcttccagcaacaagattcacgttgttatcgacaacaagctctatgacttgaccaagtttggcaagacccatccaggtggcagtctcatccttgaaaacttccacgactgtgatgtcactgattatttctatgccatccactctaagcaagcccaaaagatgctcaagaacatgccctcatctgacattgctgaagaggacaaagtcccccaaaccgattatttgaagctcttgttccaactcgaaaagaccgatcttttcaaggcagattatgttgttgagtttgttcaaatcttccacacaatcgttttgttcttcttggcaacttggtatggtcaaacctaccctgtcttttccgctatttgcctcggtttcggtaccctcatcggtggttgggttggccatcaatgcgatcatcagagagataacattatgagagacgtcaacttggtttacgccactgtttgcgacggcctttctccccactggtggtccaccaagcacaaccgtcaccacttgagcaccaacgaaactgaacatgatggtgatattcaactcttccctttcatctacctctggacccccaagaaggaccaagattcctggaacagagccatccaacacatctatttcaccgcattatacactatccttcaaattaaatggcaaattgactctgttcaatgggccatttctcaaagaaactacaaggagatggttggtttggctatccactgggcctggtacatcttcttcttgccttggcaagtctggactttgggagtccttattgctggtaccatttccgcttttgtcgtcacagctagtcaccaagctgagcacaaatacgaaggaaagaaggaattcgaaggagaagcagcaaatgttcgtagatccaaataccaaatccacgactatttcacccatcaagtcgtcaccaccagaaacatcgacctccacaactggttccttaattacatctgcggaggtatgcaataccaaatcgaacaccacgtcttccccagaatccctctttataaacttcctcttgtcaagggtgttgttcaagaatattgccaaaagcatggtgtagaatatagagatgaaggtttcatggatatcatgatgagaaactattatcacattgaaacaatcgctaaggtcaaagcccaagcctaaggttacaaagtataagaagaatttaataaattcatattttcttatatatgcttgcttgttctttctttatataatgcgtgaataaatttgcctatcccatttgttggaagtaagcagaatttgattttttttatcaaacgataattcaaacattattttaaaaaaaaaaaaaaaaa

SEQ ID NO: 55733 - protein, 393 aa, Glycine max
  peptide (1)..(393): Ceres Seq. ID no. 15226512
MASSNKIHVVIDNKLYDLTKFGKTHPGGSLILENFHDCDVTDYFYAIHSKQAQKMLKNMPSSDIAEEDKVPQTDYLKLLFQLEKTDLFKADYVVEFVQIFHTIVLFFLATWYGQTYPVFSAICLGFGTLIGGWVGHQCDHQRDNIMRDVNLVYATVCDGLSPHWWSTKHNRHHLSTNETEHDGDIQLFPFIYLWTPKKDQDSWNRAIQHIYFTALYTILQIKWQIDSVQWAISQRNYKEMVGLAIHWAWYIFFLPWQVWTLGVLIAGTISAFVVTASHQAEHKYEGKKEFEGEAANVRRSKYQIHDYFTHQVVTTRNIDLHNWFLNYICGGMQYQIEHHVFPRIPLYKLPLVKGVVQEYCQKHGVEYRDEGFMDIMMRNYYHIETIAKVKAQA

SEQ ID NO: 55734 - protein, 339 aa, Glycine max
  peptide (1)..(339): Ceres Seq. ID no. 15226513
MLKNMPSSDIAEEDKVPQTDYLKLLFQLEKTDLFKADYVVEFVQIFHTIVLFFLATWYGQTYPVFSAICLGFGTLIGGWVGHQCDHQRDNIMRDVNLVYATVCDGLSPHWWSTKHNRHHLSTNETEHDGDIQLFPFIYLWTPKKDQDSWNRAIQHIYFTALYTILQIKWQIDSVQWAISQRNYKEMVGLAIHWAWYIFFLPWQVWTLGVLIAGTISAFVVTASHQAEHKYEGKKEFEGEAANVRRSKYQIHDYFTHQVVTTRNIDLHNWFLNYICGGMQYQIEHHVFPRIPLYKLPLVKGVVQEYCQKHGVEYRDEGFMDIMMRNYYHIETIAKVKAQA

SEQ ID NO: 55735 - protein, 335 aa, Glycine max
  peptide (1)..(335): Ceres Seq. ID no. 15226514
MPSSDIAEEDKVPQTDYLKLLFQLEKTDLFKADYVVEFVQIFHTIVLFFLATWYGQTYPVFSAICLGFGTLIGGWVGHQCDHQRDNIMRDVNLVYATVCDGLSPHWWSTKHNRHHLSTNETEHDGDIQLFPFIYLWTPKKDQDSWNRAIQHIYFTALYTILQIKWQIDSVQWAISQRNYKEMVGLAIHWAWYIFFLPWQVWTLGVLIAGTISAFVVTASHQAEHKYEGKKEFEGEAANVRRSKYQIHDYFTHQVVTTRNIDLHNWFLNYICGGMQYQIEHHVFPRIPLYKLPLVKGVVQEYCQKHGVEYRDEGFMDIMMRNYYHIETIAKVKAQA

SEQ ID NO: 55736 - DNA, 1358 bp, Glycine max
  misc_feature (1)..(1358): Ceres Seq. ID no. 13639514
gctctttctctcttagaaaacaccctctaccgcctctaagtcctacaagaacccatcccctccccagccgctcccaaaatctcactcttcttactcttcttcctccaagagaagtaaacaaccctcacattcaccacagcagcacacacagacaaagacaaccttgtttgtctccaatcaaaacctttcaagctggcgttcgaaaaccaagacaaccctgtccgagaaatcaagcccaagaataggagaatcatgggtgctggaggccctgatgatgaggacaacaacaggtggccaccgtggctgaagcctctgctaaaagaaagtttctttgttcaatgcaagcttcacgctgattcgcacaagagcgagtgcaacatgtactgcttggattgtatgaacggtgctctctgctctctctgcctcgcttaccataaagatcatcgtgctattcagataaggaggtcctcataccatgatgtgattagggtgaatgagattcagaaggtgttggacatcacaggggtccaaacctacattatcaacagcgcgagggttgttttcttgaatgagaggccgcagccaaggcctggtaaaggtgtcaccaacacttgtgaagtctgcgagcgtagccttcttgattcctaccgattctgttctctaggttgtaagattgttgggacttcaaggaacttcctgaagaaaaagtcagcggcaatggtatcagactcagaggattcttacagcagcaacagcagccatgggaagaagaacagcttcacaccttccacaccgccaccaacttttgttaattacagaacggccaagagaagaaagggaattccacaccgtgccccaatgggagggctagtcatagaatactagaaagttagtaacttttggttatttgctataatgcccctgatatattttacctcaaaatgcaactttctccgtgcagtttcacccgttccaacatacgtgagctttttgctgaaaaaggccggtgctggaagtgtttccttctctgttccttacttgttaatagcgtttgtctatatgggaaaattccaatagaagtgggaaaaaaggttgagaaagtagaaaaaataagacatctgtgaaatagtttgagaaaaagaatggtgtagcaaaataagcaaagttcctttcaaccaaagtacaagaagatgaggaacattataggtttggtttctagagctattatacctaagttttgggtggtgggtgtaaatagtggcttggggaagaagacagtgacaatgtactctttacaaataggtggattgtctatatatggaatggtgaaataataaatagtactaatagtttttctc

SEQ ID NO: 55737 - protein, 210 aa, Glycine max
  peptide (1)..(210): Ceres Seq. ID no. 13639515
MGAGGPDDEDNNRWPPWLKPLLKESFFVQCKLHADSHKSECNMYCLDCMNGALCSLCLAYHKDHRAIQIRRSSYHDVIRVNEIQKVLDITGVQTYIINSARVVFLNERPQPRPGKGVTNTCEVCERSLLDSYRFCSLGCKIVGTSRNFLKKKSAAMVSDSEDSYSSNSSHGKKNSFTPSTPPPTFVNYRTAKRRKGIPHRAPMGGLVIEY

SEQ ID NO: 55738 - protein, 168 aa, Glycine max
  peptide (1)..(168): Ceres Seq. ID no. 13639516
MYCLDCMNGALCSLCLAYHKDHRAIQIRRSSYHDVIRVNEIQKVLDITGVQTYIINSARVVFLNERPQPRPGKGVTNTCEVCERSLLDSYRFCSLGCKIVGTSRNFLKKKSAAMVSDSEDSYSSNSSHGKKNSFTPSTPPPTFVNYRTAKRRKGIPHRAPMGGLVIEY

SEQ ID NO: 55739 - protein, 162 aa, Glycine max
  peptide (1)..(162): Ceres Seq. ID no. 13639517
MNGALCSLCLAYHKDHRAIQIRRSSYHDVIRVNEIQKVLDITGVQTYIINSARVVFLNERPQPRPGKGVTNTCEVCERSLLDSYRFCSLGCKIVGTSRNFLKKKSAAMVSDSEDSYSSNSSHGKKNSFTPSTPPPTFVNYRTAKRRKGIPHRAPMGGLVIEY

SEQ ID NO: 55740 - DNA, 823 bp, Glycine max
  misc_feature (1)..(823): Ceres Seq. ID no. 12610381
aacccaaacccccgctaagcatcagcagcagtgcagcacctcccttctacctcctctgctctgcattcctccttccagctccagccgcaatcaatggccgccatgaagatcaccctcctcgccgtggccgcgatggccgtcttactaggcagcgcgtcagcggtaacctacaacgtcggcgatcagggcggttgggccctcagcaccgactacagcaactgggtgtccggcaagaagttcaacgtgggtgatgacatcgtcttcaagtactcgaccccgacgcacgacgtggtcgaggtcagcaaggccggctacgactcctgcagcaccgacggcgccatcaacaccttaacctccggcaacgacgtcatctccctcaacgccaccggcacccgctacttcatctgtggcgtccctaaccattgcagccccgccgccgccgccagcatgaaggtcgtgatcgacgtcgcctcgggctcctcctcgccgtcgtcacccatgccagctgcaggtcctggcgcgagcaactctcccccggcgccgccctccaacgccgctacctccgtcggtgccacagcaggatttggcctcgtcgccctcctggcggccggtctcatggcttgaacgcatatattgatcagctgccgcgcgcacatacgactttatcttttgttattaactactatactgtagttattatcacgggtgaatacatgtattcttttttagagcgagaatgtgatagttacttgtatctatcacgtctatatgtaatctgcaggccttcatgtctttttatataatgattctagactattatttt

SEQ ID NO: 55741 - protein, 176 aa, Glycine max
  peptide (1)..(176): Ceres Seq. ID no. 12610382
MAAMKITLLAVAAMAVLLGSASAVTYNVGDQGGWALSTDYSNWVSGKKFNVGDDIVFKYSTPTHDVVEVSKAGYDSCSTDGAINTLTSGNDVISLNATGTRYFICGVPNHCSPAAAASMKVVIDVASGSSSPSSPMPAAGPGASNSPPAPPSNAATSVGATAGFGLVALLAAGLMA

SEQ ID NO: 55742 - protein, 173 aa, Glycine max
  peptide (1)..(173): Ceres Seq. ID no. 12610383
MKITLLAVAAMAVLLGSASAVTYNVGDQGGWALSTDYSNWVSGKKFNVGDDIVFKYSTPTHDVVEVSKAGYDSCSTDGAINTLTSGNDVISLNATGTRYFICGVPNHCSPAAAASMKVVIDVASGSSSPSSPMPAAGPGASNSPPAPPSNAATSVGATAGFGLVALLAAGLMA

SEQ ID NO: 55743 - protein, 163 aa, Glycine max
  peptide (1)..(163): Ceres Seq. ID no. 12610384
MAVLLGSASAVTYNVGDQGGWALSTDYSNWVSGKKFNVGDDIVFKYSTPTHDVVEVSKAGYDSCSTDGAINTLTSGNDVISLNATGTRYFICGVPNHCSPAAAASMKVVIDVASGSSSPSSPMPAAGPGASNSPPAPPSNAATSVGATAGFGLVALLAAGLMA

SEQ ID NO: 55744 - DNA, 764 bp, Glycine max
  misc_feature (1)..(764): Ceres Seq. ID no. 13595055
attttaggaggatctctctctctctctgcttctctccatctctctcttagccatggctgctttcacctgtacctctcgtcctcccgtttccctccgttcggagtcaagaatcgcttcctctccatcagcttcactctctgctcggcggatgttcgccgtctcgcctgactcagcaggattgagaatccgtctttcccagtctccctcctcgttgacctcgaaggttcctcgaccacgaagaggcatcgtctgtgaggctcaggaaaccactacagatatagtttcaatagtcaacgacacaacatgggactctctagttctcaaggcggacgggcctgtattggttgacttttgggcaccatggtgtgggccttgcaaaatgattgacccgctcgtgaacgagctagcaaaagagtacaccgggaaggtcaagttctacaaactgaacacggacgactctccttcaaccccaagcaagtacaatgttagaagcatcccaacgatcatgatctttgtcaatggggagaagaaggatgcaatcataggtgcagtgcctagatctacgctcgcgtctagcattgataaattcttgcaatgagatttagactggtgagtctgtgagatctgtttctcctcctcttctgtcttgtgttctcattctctcttgtaatttgtgcttctttgtagctatctgtttcttctattgtatcttttattcatcactgaacatggataaataagatgatgtcatgtttttttatgtt

SEQ ID NO: 55745 - protein, 181 aa, Glycine max
  peptide (1)..(181): Ceres Seq. ID no. 15221468
MAAFTCTSRPPVSLRSESRIASSPSASLSARRMFAVSPDSAGLRIRLSQSPSSLTSKVPRPRRGIVCEAQETTTDIVSIVNDTTWDSLVLKADGPVLVDFWAPWCGPCKMIDPLVNELAKEYTGKVKFYKLNTDDSPSTPSKYNVRSIPTIMIFVNGEKKDAIIGAVPRSTLASSIDKFLQ

SEQ ID NO: 55746 - protein, 149 aa, Glycine max
  peptide (1)..(149): Ceres Seq. ID no. 15221469
MFAVSPDSAGLRIRLSQSPSSLTSKVPRPRRGIVCEAQETTTDIVSIVNDTTWDSLVLKADGPVLVDFWAPWCGPCKMIDPLVNELAKEYTGKVKFYKLNTDDSPSTPSKYNVRSIPTIMIFVNGEKKDAIIGAVPRSTLASSIDKFLQ

SEQ ID NO: 55747 - DNA, 959 bp, Glycine max
  misc_feature (1)..(959): Ceres Seq. ID no. 13594918
catcctaatcgaaaaagagtactaaacggaatttgaaaaccaaggctgaagaagttttaagagacatggagctctccgtggttgcaagagacatggaagaagttgtattgctggttgatgatttgagatcactttctgggatttctcgctgtagaatatgtcatgaagaagaatttgagagctccaaaaccttggaagctccttgtgcttgttctgggacagttaagtttgctcacagagattgcattcagacatggtgcgatgagaaaggaaatacaacttgtgaaatatgtctccagcaatatgaacctggatatacagcagccccaaagaaatcgcaaataactgatgcagcaatgaccattagggatagcctgcaaatttcaaggaatgaacaagaaccgttaaacacaagaatagtgggtatcgttgaaggaaacaattactctgaatgcacgtatgctgcagataggaccgcggcttgttgtcgatctctggctctagcttttacactcatcttgcttgtaagacatctttttgcactccttacagatggaatggaagattatccatttacaattcttacggtctttttactaagggccagtggaattattatacccatgtacataattattaaggcgatcggagctattcatgacaatattaagcgtcaccatcatgaggattctgacgatgactcatcgatatctgatggagatgatgaagaaaatgagacaccaaatgatgaaattttaagacattcacaatcataggtcattatttgatttaatttgtatcagagcattatgctgatgctctgtcaagttttaccattttggaggcataattttttattgtaaaaaaaaagaagaacgaaattcacattgaaatacatatagctttgcagtatttatactgtttcctaccaacccaagtatataaaacaaccaaatttc

SEQ ID NO: 55748 - protein, 236 aa, Glycine max
  peptide (1)..(236): Ceres Seq. ID no. 13594919
MELSVVARDMEEVVLLVDDLRSLSGISRCRICHEEEFESSKTLEAPCACSGTVKFAHRDCIQTWCDEKGNTTCEICLQQYEPGYTAAPKKSQITDAAMTIRDSLQISRNEQEPLNTRIVGIVEGNNYSECTYAADRTAACCRSLALAFTLILLVRHLFALLTDGMEDYPFTILTVFLLRASGIIIPMYIIIKAIGAIHDNIKRHHHEDSDDDSSISDGDDEENETPNDEILRHSQS

SEQ ID NO: 55749 - protein, 227 aa, Glycine max
  peptide (1)..(227): Ceres Seq. ID no. 13594920
MEEVVLLVDDLRSLSGISRCRICHEEEFESSKTLEAPCACSGTVKFAHRDCIQTWCDEKGNTTCEICLQQYEPGYTAAPKKSQITDAAMTIRDSLQISRNEQEPLNTRIVGIVEGNNYSECTYAADRTAACCRSLALAFTLILLVRHLFALLTDGMEDYPFTILTVFLLRASGIIIPMYIIIKAIGAIHDNIKRHHHEDSDDDSSISDGDDEENETPNDEILRHSQS

SEQ ID NO: 55750 - protein, 139 aa, Glycine max
  peptide (1)..(139): Ceres Seq. ID no. 13594921
MTIRDSLQISRNEQEPLNTRIVGIVEGNNYSECTYAADRTAACCRSLALAFTLILLVRHLFALLTDGMEDYPFTILTVFLLRASGIIIPMYIIIKAIGAIHDNIKRHHHEDSDDDSSISDGDDEENETPNDEILRHSQS

SEQ ID NO: 55751 - DNA, 820 bp, Glycine max
  misc_feature (1)..(820): Ceres Seq. ID no. 13594922
gtttttcccaaataagcgtacgtcgatgtcaaacttggtttgagcaaacgcgcattcgctgacactttcactgcgtgattgattaaccttgctggtttccaccaaattggaattgtttgattgttctttgattttcaaacagcaatcactttcacaatggtgattgcaacaagaaatttcttcgtatctcttttcttaatatcctcatttttttgcacaacactccttgccaagtcttctcacccaatctccgatgctcaagtcaggaagaacaagcttcagtgctatgctgatattgacagtgggttgtggggttggtcatgcaaatcaacggtgatagcaagggagaattgtgctctaagatgcctttcacccgcttgttacgagctcatctacgagagtgacccgctcgaagagggagaaaaggactttattcgaagccaagagtacaaatactgcatgcacaagttgtccatgggagagagccttgagggtgttaagggtgcttttagcaactaatcaagcgaaaattctaaattggaggtggaagctatgatgaatttatatatgccctgttaaatgtagattaaagaaaatgccaagagtcttgagagcatttttttctttcaattaattaattataatgaaccatatacaagtatatgctcttagaaatccagtacaatctagaagaaaacaacgcttctcaaaaggtgagtgctttagtttctaacccttcaagactctattaaggtagtatataagttgcttcatattttgacatttctaaaagaattttatctgttagtaaatttccgtc

SEQ ID NO: 55752 - protein, 120 aa, Glycine max
  peptide (1)..(120): Ceres Seq. ID no. 15221432
MVIATRNFFVSLFLISSFFCTTLLAKSSHPISDAQVRKNKLQCYADIDSGLWGWSCKSTVIARENCALRCLSPACYELIYESDPLEEGEKDFIRSQEYKYCMHKLSMGESLEGVKGAFSN

SEQ ID NO: 55753 - DNA, 785 bp, Glycine max
  misc_feature (1)..(785): Ceres Seq. ID no. 12609177
gagaagagattagagattccagattcggtcgctaataatatttggagttgggaggggtgacctgagattcacgacgcaaaacaaatcatcatgtggagaagaatcgtttcctctggtctcaaaaccctagcctccgatttcgccgctgcttctcctcgtcgatccgtagccaccaccgccgtgagacccttgaggttctatctcgcatccaattcccttttccctcgccatttcagctccgaatcagtggagaccgttgggaagaagaaggtggaggatgttatgcccattgcaaccggacatgaaaaggaggagcttgaagctgaacttgaggggaggaggctgcttgacattgacttccctgaaggtccttttggaactaaggaagctcctgctatcgtaaagtcctactatgacaagcgaattgtgggatgccctggtggtgaaggcgaggatgaacacgatgttgtgtggttctggctggagaaaggaaagtcttttgaatgccccgtttgcactcagtactttgagctggaagtggttggtccaggtggacctcccgatggtcacggtgatgaagacgatgagcaccaccactgattccggcttctcccttgctgcgagttttgcttttttttttttattattttttactgcaataaaaaacatatgctgctgggtgagacagttaaaaatgtttttgatccttttggaacaacacttcggtatcggaagttgtcaaaatgcctaaaaatgttttacttttgtaccaattcttgaatcag

SEQ ID NO: 55754 - protein, 169 aa, Glycine max
  peptide (1)..(169): Ceres Seq. ID no. 12609178
MWRRIVSSGLKTLASDFAAASPRRSVATTAVRPLRFYLASNSLFPRHFSSESVETVGKKKVEDVMPIATGHEKEELEAELEGRRLLDIDFPEGPFGTKEAPAIVKSYYDKRIVGCPGGEGEDEHDVVWFWLEKGKSFECPVCTQYFELEVVGPGGPPDGHGDEDDEHHH

SEQ ID NO: 55755 - protein, 112 aa, Glycine max
  peptide (1)..(112): Ceres Seq. ID no. 12609179
MTSELWDALVVKARMNTMLCGSGWRKESLLNAPFALSTLSWKWLVQVDLPMVTVMKTMSTTTDSGFSLAASFAFFFLLFFTAIKNICCWVRQLKMFLILLEQHFGIGSCQNA

SEQ ID NO: 55756 - protein, 105 aa, Glycine max
  peptide (1)..(105): Ceres Seq. ID no. 12609180
MPIATGHEKEELEAELEGRRLLDIDFPEGPFGTKEAPAIVKSYYDKRIVGCPGGEGEDEHDVVWFWLEKGKSFECPVCTQYFELEVVGPGGPPDGHGDEDDEHHH

SEQ ID NO: 55757 - DNA, 827 bp, Glycine max
  misc_feature (1)..(827): Ceres Seq. ID no. 12609935
agatcaaatcgagcctgcccttctcgctcgcgtctccactccatttccctttcccccgaggaggccgccgccgtgacctgagagcacacgcacgcaccatgtggcgccgcctccaaaccctagcccccgccctccgccgcgctgccgccgcagccggcgcggccccctccccggccagcgcccgggccgctcccctctccacggcggtcgcggccttccgccgcactgggctcctcctctctgcggacaagccggcggcgtcagggacgagtgtggaggacgtcatgcccattgccacggggttggagcgcgaggagctcgaggcggagctccaggggaagaagcgcttcgacatggatcctcctgtcggtccctttggtaccaaggaggcaccggccgtcattgagtcctattttgacaagagaatagtaggttgccctggtgatgaaggagaggatgagcatgacgtcgtatggttctggttgaaaaaagatgagccacatgaatgcccagtctgctcacaatactttgtgcttaaggtcattggtgatggtggaaatccagatgggcatgatgatgatgatgatggtcatcaccactaaggatgcctcgtggttctgaaaataagaattttatgaggcatatgatttcgcttacgcgttctaagcaccagactgctccacggcatccttgtttatgaatatacatttggccatcaagcaggcggtagttttcgccttagtttttttttgtggaaacaaaactcttttcagatttgtccagtgcatgtcttatggagcatcatcaaataagagatgactgcagag

SEQ ID NO: 55758 - protein, 199 aa, Glycine max
  peptide (1)..(199): Ceres Seq. ID no. 12609936
IKSSLPFSLASPLHFPFPRGGRRRDLRAHARTMWRRLQTLAPALRRAAAAAGAAPSPASARAAPLSTAVAAFRRTGLLLSADKPAASGTSVEDVMPIATGLEREELEAELQGKKRFDMDPPVGPFGTKEAPAVIESYFDKRIVGCPGDEGEDEHDVVWFWLKKDEPHECPVCSQYFVLKVIGDGGNPDGHDDDDDGHHH

SEQ ID NO: 55759 - protein, 167 aa, Glycine max
  peptide (1)..(167): Ceres Seq. ID no. 12609937
MWRRLQTLAPALRRAAAAAGAAPSPASARAAPLSTAVAAFRRTGLLLSADKPAASGTSVEDVMPIATGLEREELEAELQGKKRFDMDPPVGPFGTKEAPAVIESYFDKRIVGCPGDEGEDEHDVVWFWLKKDEPHECPVCSQYFVLKVIGDGGNPDGHDDDDDGHHH

SEQ ID NO: 55760 - protein, 105 aa, Glycine max
  peptide (1)..(105): Ceres Seq. ID no. 12609938
MPIATGLEREELEAELQGKKRFDMDPPVGPFGTKEAPAVIESYFDKRIVGCPGDEGEDEHDVVWFWLKKDEPHECPVCSQYFVLKVIGDGGNPDGHDDDDDGHHH

SEQ ID NO: 55761 - DNA, 1186 bp, Glycine max
  misc_feature (1)..(1186): Ceres Seq. ID no. 12609185
agaaaccgaccaagaagcaccagcacacgagttcgaggtagacaaacgtctcgagagaaagacagggagaacatggcggccatctcctccacctcctacttctcctcgcagccgcagctgccggcgtccgacggcgccaaccctgccaccgccagaagcagcagcagcaacggccgggagccccggaggcggcggaccggcaggtgcatcatgctggaagcagacgctgcctctgctagtggcagtggcggcgcggcggcggggaggacgaggagcctgacggaggaggacctggaggagctcaagggctgcctcgacctcggcttcggcttctcctaccaccagatcccgggcctctgcgggacgctccccggcctggagctctgctactccatgacgcggaggttcctcgacgagcagaggactctggtcgggcagctggagcctgctactgcggcggcagcgcccatcacggattggaagatctccggccctggtgatgatcctgacgaagtgaaagctcggctcaagtattgggcacagacagtggcatgcacagtcaaactctgcacctagtggagtggaggtcgggactagggagtttgcgagttcatcccatgacatgtgtgctaagatgggctcaactgaaggtggctgaagctgaagattctgcttacatggctctaagatatgttataccgaggagatgcttcggttgcgcgctatcgggataatataacagatcggtgctttccgaaaacttcagagagggagatgacttatgacaccacagaactgcgagaaatcttgaggcgatatgtcgtctaagctttaatgaaagcatcagaagcttgtcattcgtcataggcaatggtcactaggtgttctaaacgtgcaactcggagacctgctagtgcttttaatcttccttgtaatggtcattaggagctccaactgtgttctactgcgccaagttgagctttgcaaatatgtcagtaggttggctcaagtatggatttgttctcacgttcctgaactttaatttgctttcaaagagtagacactgtataggacgttcgtgatggacacagcgattcggtgctcgagctcagatgctcccgaaatcactgtcgtccgttcctgtcttgggatcccaacaattcagaatcgaatattccgttcatgg

SEQ ID NO: 55762 - protein, 191 aa, Glycine max
  peptide (1)..(191): Ceres Seq. ID no. 12609186
RNRPRSTSTRVRGRQTSREKDRENMAAISSTSYFSSQPQLPASDGANPATARSSSSNGREPRRRRTGRCIMLEADAASASGSGGAAAGRTRSLTEEDLEELKGCLDLGFGFSYHQIPGLCGTLPGLELCYSMTRRFLDEQRTLVGQLEPATAAAAPITDWKISGPGDDPDEVKARLKYWAQTVACTVKLCT

SEQ ID NO: 55763 - protein, 167 aa, Glycine max
  peptide (1)..(167): Ceres Seq. ID no. 12609187
MAAISSTSYFSSQPQLPASDGANPATARSSSSNGREPRRRRTGRCIMLEADAASASGSGGAAAGRTRSLTEEDLEELKGCLDLGFGFSYHQIPGLCGTLPGLELCYSMTRRFLDEQRTLVGQLEPATAAAAPITDWKISGPGDDPDEVKARLKYWAQTVACTVKLCT

SEQ ID NO: 55764 - protein, 121 aa, Glycine max
  peptide (1)..(121): Ceres Seq. ID no. 12609188
MLEADAASASGSGGAAAGRTRSLTEEDLEELKGCLDLGFGFSYHQIPGLCGTLPGLELCYSMTRRFLDEQRTLVGQLEPATAAAAPITDWKISGPGDDPDEVKARLKYWAQTVACTVKLCT

SEQ ID NO: 55765 - DNA, 906 bp, Glycine max
  misc_feature (1)..(906): Ceres Seq. ID no. 13594624
acacattcaaactaataactctcaaaaactgagagcagaagagagtagaggagaaacaaatgtccatatccatggcgctattctctccgccgatctcttcttcagttcaaaaccccaagatctcgttccctctcctctccaccaagcgcttctctctcctctccgtcactcgcgcttcctccgattctgctgcagtctctgcaaccaccgtagagattccgaagcccgcgtcggtttctgtagaggaggtgccatctaaacctcctgcggaaagctcctccgacgagactgatctgccaaccacggcgacgggaatcaagtttcaggatgcgaagtgggttaatggaacctgggatctgaaacagttcgagaaagacgggaaaaccgattgggattctattatcgtcgctgaggcaaagaggagaaagtggcttgaagataacccagaaacaactactaacgctgagcctgttcttttcgacacctcgatcattccatggtgggcgtggatgaagagataccatctaccagaagctgaactcctcaatggtcgtgctgcgatgatagggttcttcatggcttactttgttgacagccttaccggagtaggacttgttgatcaaatgggaaacttcttctgcaaaacactcttgtttgtggctgtagctggagttcttttcatccgcaagaacgaagatttagataagctcaaggttctgatcgaagagacgacgctatatgacaagcaatggcaagcggcttggaaagagccggaatcatcatcatcgacgctttcttcaaagaagtgaacaaaatctttctcgctttttgtttcctcttttctcatgtgatgtttgtgatcagtgaaaaaagtctcaagataaacgcaaaatctatttggctttg

SEQ ID NO: 55766 - protein, 249 aa, Glycine max
  peptide (1)..(249): Ceres Seq. ID no. 13594625
MSISMALFSPPISSSVQNPKISFPLLSTKRFSLLSVTRASSDSAAVSATTVEIPKPASVSVEEVPSKPPAESSSDETDLPTTATGIKFQDAKWVNGTWDLKQFEKDGKTDWDSIIVAEAKRRKWLEDNPETTTNAEPVLFDTSIIPWWAWMKRYHLPEAELLNGRAAMIGFFMAYFVDSLTGVGLVDQMGNFFCKTLLFVAVAGVLFIRKNEDLDKLKVLIEETTLYDKQWQAAWKEPESSSSTLSSKK

SEQ ID NO: 55767 - protein, 245 aa, Glycine max
  peptide (1)..(245): Ceres Seq. ID no. 13594626
MALFSPPISSSVQNPKISFPLLSTKRFSLLSVTRASSDSAAVSATTVEIPKPASVSVEEVPSKPPAESSSDETDLPTTATGIKFQDAKWVNGTWDLKQFEKDGKTDWDSIIVAEAKRRKWLEDNPETTTNAEPVLFDTSIIPWWAWMKRYHLPEAELLNGRAAMIGFFMAYFVDSLTGVGLVDQMGNFFCKTLLFVAVAGVLFIRKNEDLDKLKVLIEETTLYDKQWQAAWKEPESSSSTLSSKK

SEQ ID NO: 55768 - DNA, 819 bp, Glycine max
  misc_feature (1)..(819): Ceres Seq. ID no. 14301427
ctaattccagaaccatcccctccgacctaggctatggctttcatcgtgtccaagctcgcgcgggcagccctcgcatcccgccccgttggagatattgctggtggcatctccccgtgtctctcccggctctatctggcggctggtaccagccgtcgcatgtttgcagctgcaggcggtcccaagtcaaaagaagcaccccgaatatttccccttgttgatgagaattccattaagtcgaaggaatccctatgggccttgtatgaatgctggtgcaagtattggggggtatcccgtgaccgtgaagagatggtccgccggttcaagtcatttgaggctactgcacagtgggtttacaaaatgaacaactctgggtgttcgcaagtgtctcaactgggcccgcatgcagatttttcagagagtgagtttgctgaggtggtgtttcctccacttcctgatgatgatgatgaagacataaaagagatggtgccaggtcaagatttgggccaggagcttgaggagcccttaaataattaattcgagaaattatgaacttgtcttactccatccgttcccaaatataagtctttctagagattcaacaagtgactacatacggagcaaaatgagtgaatctgcactctaaaatatgtctacatgcatacgtatgttgtagtccatttgaaatgtctaaaaagacttatatgtaggaacggatgagtatttggttgtggtaatactgtggtactgggattattgttgttgtctggttgttctcatggaaccaaattagaattgaaataactttgtgttattgctctt

SEQ ID NO: 55769 - protein, 166 aa, Glycine max
  peptide (1)..(166): Ceres Seq. ID no. 14301428
MAFIVSKLARAALASRPVGDIAGGISPCLSRLYLAAGTSRRMFAAAGGPKSKEAPRIFPLVDENSIKSKESLWALYECWCKYWGVSRDREEMVRRFKSFEATAQWVYKMNNSGCSQVSQLGPHADFSESEFAEVVFPPLPDDDDEDIKEMVPGQDLGQELEEPLNN

SEQ ID NO: 55770 - protein, 125 aa, Glycine max
  peptide (1)..(125): Ceres Seq. ID no. 14301429
MFAAAGGPKSKEAPRIFPLVDENSIKSKESLWALYECWCKYWGVSRDREEMVRRFKSFEATAQWVYKMNNSGCSQVSQLGPHADFSESEFAEVVFPPLPDDDDEDIKEMVPGQDLGQELEEPLNN

SEQ ID NO: 55771 - DNA, 618 bp, Glycine max
  misc_feature (1)..(618): Ceres Seq. ID no. 15224985
tcccaaacccaaagcactagtagctatcccactcaagcacacgctcacgatggcatccagagctgctaccttcgtcgccctgagcctcctcctctccgccgtcgccacgcacggctgcggaccctattgccagccgccagtcgtcgtgccgacaccgcccgttgtcgttccgccgccgtaccatggaggaggagcgcacggccacggcgggcagtgctctatcgacgccctaaagctgagggtgtgcgccaacgttctcggcggcctgctcggcctcaaggtcggcgttccggcgcacgacgagtgctgcccgctgctccaggggttggtcgaccttgacgccgccgtctgcctgtgcaccgccgtcagggccaacgtcctcggcatccacctcaacgtgcctgtggacatcagcctcctcctcaaccactgcggcaagacgtgcccgtccgagttcacttgcccagcccattaacggacgcctactgctcacgggcgccgaataaaatttgctttcgatccgtacgtcgttgttattttcgtgtccacatttgaatccttgtaaccagtactactctttttgtaacaatcatcagccatccaaaaaaaaaaaaaaaa

SEQ ID NO: 55772 - protein, 157 aa, Glycine max
  peptide (1)..(157): Ceres Seq. ID no. 15224986
PKPKALVAIPLKHTLTMASRAATFVALSLLLSAVATHGCGPYCQPPVVVPTPPVVVPPPYHGGGAHGHGGQCSIDALKLRVCANVLGGLLGLKVGVPAHDECCPLLQGLVDLDAAVCLCTAVRANVLGIHLNVPVDISLLLNHCGKTCPSEFTCPAH

SEQ ID NO: 55773 - protein, 141 aa, Glycine max
  peptide (1)..(141): Ceres Seq. ID no. 15224987
MASRAATFVALSLLLSAVATHGCGPYCQPPVVVPTPPVVVPPPYHGGGAHGHGGQCSIDALKLRVCANVLGGLLGLKVGVPAHDECCPLLQGLVDLDAAVCLCTAVRANVLGIHLNVPVDISLLLNHCGKTCPSEFTCPAH

SEQ ID NO: 55774 - protein, 112 aa, Glycine max
  peptide (1)..(112): Ceres Seq. ID no. 15224988
SQTQSTSSYPTQAHAHDGIQSCYLRRPEPPPLRRRHARLRTLLPAASRRADTARCRSAAVPWRRSARPRRAVLYRRPKAEGVRQRSRRPARPQGRRSGARRVLPAAPGVGRP

SEQ ID NO: 55775 - DNA, 861 bp, Glycine max
  misc_feature (1)..(861): Ceres Seq. ID no. 13594925
gacacaagtaacttctctgcatccaaaatgccaggtcttaccatcggagacactattcctgatcttcaagttgaaactaaccaaggcaaaatcaagcttcatcagttctgtgctgatggctggaccatccttttctctcacccaggtgatttcaccccggtttgtaccactgagcttggtaagatggctcagtatgctaaggagttttatcaacgaggagtgaagctcttaggtttatcttgtgatgatgtgcaatcccacaatgagtggatcaaagacattgaagcctacactccaggtgcgaaagtgaattatccaataattgctgatccgaagagagaaatcatcaagcaactcaacatggttgaccctgatgagaaagactccactggcaacctaccctcaagggctcttcatattgttggcccagatttgaagatcaagctgagttttctgtaccctgccactactgggaggaacatggatgaagtgctgagggtgatagagtcattgcagaaggcctcaaagttcaaggttgctaccccagcaaactggaagccaggggaccctgttgtcattacccctgatgtcaccaatgagcaagccaaggaaatgttccctcaagggttcgagagtgtgaaactccatcaaagaaggaatatttgcgcttaactaaagtttgatgatgttctgcttcaagtagtagaaccttcttcagctgtgccaaatctcaatgcaatctagtcatctatctaccctaatcaaactatatatatgttttgtttaagtacactattttgtggcactgcttttgttattataagaaagaatgtacagtttaattgatcttttgttgactgc

SEQ ID NO: 55776 - protein, 223 aa, Glycine max
  peptide (1)..(223): Ceres Seq. ID no. 13594926
DTSNFSASKMPGLTIGDTIPDLQVETNQGKIKLHQFCADGWTILFSHPGDFTPVCTTELGKMAQYAKEFYQRGVKLLGLSCDDVQSHNEWIKDIEAYTPGAKVNYPIIADPKREIIKQLNMVDPDEKDSTGNLPSRALHIVGPDLKIKLSFLYPATTGRNMDEVLRVIESLQKASKFKVATPANWKPGDPVVITPDVTNEQAKEMFPQGFESVKLHQRRNICA

SEQ ID NO: 55777 - protein, 214 aa, Glycine max
  peptide (1)..(214): Ceres Seq. ID no. 13594927
MPGLTIGDTIPDLQVETNQGKIKLHQFCADGWTILFSHPGDFTPVCTTELGKMAQYAKEFYQRGVKLLGLSCDDVQSHNEWIKDIEAYTPGAKVNYPIIADPKREIIKQLNMVDPDEKDSTGNLPSRALHIVGPDLKIKLSFLYPATTGRNMDEVLRVIESLQKASKFKVATPANWKPGDPVVITPDVTNEQAKEMFPQGFESVKLHQRRNICA

SEQ ID NO: 55778 - protein, 162 aa, Glycine max
  peptide (1)..(162): Ceres Seq. ID no. 13594928
MAQYAKEFYQRGVKLLGLSCDDVQSHNEWIKDIEAYTPGAKVNYPIIADPKREIIKQLNMVDPDEKDSTGNLPSRALHIVGPDLKIKLSFLYPATTGRNMDEVLRVIESLQKASKFKVATPANWKPGDPVVITPDVTNEQAKEMFPQGFESVKLHQRRNICA

SEQ ID NO: 55779 - DNA, 944 bp, Glycine max
  misc_feature (1)..(944): Ceres Seq. ID no. 12610129
taaaaccctagccgccgtccgtccccaaccttcaccgccgctccccctcaaccctccgccccccaaaccccgccgccgcctccgccatgcggccgctcgacgagaaggagaccacgatggtcttcgagaagctgttcaagttcaccggccccaacctgaagcacctcctggagcggccctccgtggagggccccgacccggagcccggccgctactgcctccgcctccacaagaaccgcgtcttctacgcctccgagtcgctcgtccgccgcgccaccgccgtgtcccgcacgcgcctcgccggggtcggcacgcccatcggcaagttcacccacggcggcgccttccacctcaccgtccacgcgctcgacctcctcgccgcccacgcgcgccgccgcatctggctcaagcccgacacggagcgctcgttcctcttcggcaactccgtgcccaagtccgcgctcgcgcgcatcacggagaacaccaagtccggcgatggcgtcgtcgtcatgtccatggccgacgtgccgctcgggttcggggtcgccgccaggggcgcgcaggactgcaggaaggccgacaccaacgccgtggtggtgctccaccagtccgacgccggcgagtacctccgcaaggaggaggagctcatgtgaggtgatgtgtgactgttctgaaagatgtgttccctcccttggttgtgatcaccgatcatctgtgcttgcaatcagtgtgcagttcgtcgaccattctgtattctgtagttttcatacagggcaaggaaaagcggatgtctgatctatctgagtgtcatagtagagtagttctcttttcaggcagttctgatggctataatttttgtcacgccgtagcttatcagtaagctactgcattgtatcgtgtgaactgtgaactgaagattccgtgaactaaatattatgataatg

SEQ ID NO: 55780 - protein, 218 aa, Glycine max
  peptide (1)..(218): Ceres Seq. ID no. 12610130
KTLAAVRPQPSPPLPLNPPPPKPRRRLRHAAARREGDHDGLREAVQVHRPQPEAPPGAALRGGPRPGARPLLPPPPQEPRLLRLRVARPPRHRRVPHAPRRGRHAHRQVHPRRRLPPHRPRARPPRRPRAPPHLAQARHGALVPLRQLRAQVRARAHHGEHQVRRWRRRHVHGRRAARVRGRRQGRAGLQEGRHQRRGGAPPVRRRRVPPQGGGAHVR

SEQ ID NO: 55781 - protein, 188 aa, Glycine max
  peptide (1)..(188): Ceres Seq. ID no. 12610131
MRPLDEKETTMVFEKLFKFTGPNLKHLLERPSVEGPDPEPGRYCLRLHKNRVFYASESLVRRATAVSRTRLAGVGTPIGKFTHGGAFHLTVHALDLLAAHARRRIWLKPDTERSFLFGNSVPKSALARITENTKSGDGVVVMSMADVPLGFGVAARGAQDCRKADTNAVVVLHQSDAGEYLRKEEELM

SEQ ID NO: 55782 - protein, 178 aa, Glycine max
  peptide (1)..(178): Ceres Seq. ID no. 12610132
MVFEKLFKFTGPNLKHLLERPSVEGPDPEPGRYCLRLHKNRVFYASESLVRRATAVSRTRLAGVGTPIGKFTHGGAFHLTVHALDLLAAHARRRIWLKPDTERSFLFGNSVPKSALARITENTKSGDGVVVMSMADVPLGFGVAARGAQDCRKADTNAVVVLHQSDAGEYLRKEEELM

SEQ ID NO: 55783 - DNA, 788 bp, Glycine max
  misc_feature (1)..(788): Ceres Seq. ID no. 12610133
aaaccaagcagataagcagctgtcctactgtcgcatacacacacaagtgctagctagctaatcgatcagccggcggccatggcggaggagaagcaccaccaccacctgttccaccacaaggagggcgaggacttccagcccgccgctgacggcggcgtcgacacgtacgggtactcgaccgagacggtggtgaccgccaccggcaacgagggggagtacgagcggatcaccaaggaggagaagcaccacaagcacaaggagcacctcggcgagatgggcgccgccgccgccggagccttcgccctctacgagaagcacgaggcgaagaaggacccggagcacgcgcacaagcacaagatcgaggaggaggtggccgccgctgcagccgtcggcgccggcggcttcgtcttccacgagcaccacgagaagaagcaggaccacaaggaggccaaggaggccagcggcgagaagaagcaccaccacttcggctagatcaccgttgacgtgcggtggccggcctcgccgccggccgtgcgtgtgcttacgttacgtgtgttccatagtgagagaggctgggacgtgggcctggtctcgtgctcgcctgtgcgtgattttctctgcgtgcttagcttccgagtgctgaataagtggggctgctgttcatgcagtggctcccacacctcatgcgtcggtgtgtgtcgtgtgtcggtgtgtgtttcaattctaccggcgccctgtatttgtaatttcactttattatgcaagtcctcacgaaactttttgtggcc

SEQ ID NO: 55784 - protein, 137 aa, Glycine max
  peptide (1)..(137): Ceres Seq. ID no. 12610134
MAEEKHHHHLFHHKEGEDFQPAADGGVDTYGYSTETVVTATGNEGEYERITKEEKHHKHKEHLGEMGAAAAGAFALYEKHEAKKDPEHAHKHKIEEEVAAAAAVGAGGFVFHEHHEKKQDHKEAKEASGEKKHHHFG

SEQ ID NO: 55785 - protein, 72 aa, Glycine max
  peptide (1)..(72): Ceres Seq. ID no. 12610135
MGAAAAGAFALYEKHEAKKDPEHAHKHKIEEEVAAAAAVGAGGFVFHEHHEKKQDHKEAKEASGEKKHHHFG

SEQ ID NO: 55786 - DNA, 733 bp, Glycine max
  misc_feature (1)..(733): Ceres Seq. ID no. 13638927
gaccatcgccgcagacagaggtcggaagaagaggaaggaaaaggcgctctctctctgtctctcccacacggcggcgcggtgtagccggcggcggcgatggctttctggcaggcgcgcgacttcctgttctgcggcgtgtgcggcaccctcctcgacttcaactcccaccgctacgcctcctgccctctctgcggcttcaagcgcaaggccaaagagatcgaagggaaagaaactcgctacgcggtcaccgcggaggatattagaagagagctaaagataaaaccgtttgtggttcttgaatcggcgccgaatatggacatagtcgtgcaaagatccctgacagagcgagcctgtccagaatgcaaccatcatgaactcgaatattacaccaagcagcttcggtcggcggatgaggggcagactatcttctacgagtgcccggagtgcggccacgcattcaacgagaatacctaagagaaaagttttctactatcagggtatgggtatgcgtggaagaatctgctcctgccattggttgacaatcgatgttcaccgaaatttcgcctgccatgggttgaccattgatgttccagctttttggcgtgtattctaatcttcaatgttacctgggatatgttaatgctcctttctatctaacggtttttgatggaacctgtctgtctgatgtatttgactgaatgtggccatagaaagagcaggatatattgtttct

SEQ ID NO: 55787 - protein, 125 aa, Glycine max
  peptide (1)..(125): Ceres Seq. ID no. 13638928
MAFWQARDFLFCGVCGTLLDFNSHRYASCPLCGFKRKAKEIEGKETRYAVTAEDIRRELKIKPFVVLESAPNMDIVVQRSLTERACPECNHHELEYYTKQLRSADEGQTIFYECPECGHAFNENT

SEQ ID NO: 55788 - protein, 90 aa, Glycine max
  peptide (1)..(90): Ceres Seq. ID no. 13638929
TIAADRGRKKRKEKALSLCLSHTAARCSRRRRWLSGRRATSCSAACAAPSSTSTPTATPPALSAASSARPKRSKGKKLATRSPRRILEES

SEQ ID NO: 55789 - protein, 86 aa, Glycine max
  peptide (1)..(86): Ceres Seq. ID no. 13638930
PSPQTEVGRRGRKRRSLSVSPTRRRGVAGGGDGFLAGARLPVLRRVRHPPRLQLPPLRLLPSLRLQAQGQRDRRERNSLRGHRGGY

SEQ ID NO: 55790 - DNA, 1006 bp, Glycine max
  misc_feature (1)..(1006): Ceres Seq. ID no. 13638976
atctactgcccccgccgtcctcgcctcctcccccgatccaaatccgaaatttttcccctccccgcagcccgctccctcctccgcgcccgcactgtagcccgagcgctcggctccaccgccgtgggctgtagccgccgtcgctgccatggcgaacgacgggtcccccaagtccggtgacatcccgccctaccccgagatgattctcgcggcgatcgaggcgctgggcgacaagaacggctcgagcaagtccgccatctccagctacatcgaggagaagtacgagggcctcccctcggcgcacgcctccctcctcacggccaacctcgccagcatgaaggaggccggcaagctcgccttcgtcaagaacaactacctcaaggctgacgctccctccgccaccccggcaaagcgcggccgcggccgcccgcctaaggaccctaacgcgccgcccaagccgaaggctgcgcccaaggaccccaacacgcccaagcgcggccggggccgcccgcccaaggctaaggatcccatggccgacgccgtcaaggatgccgtcgccaaggcgaccaccggcatgccccggggccgcggccgcccgccgggtccctcctcggccaagaaggccaaggtcgccaaggaggctgcctctccggctcccgcggacggctccgctcctgccaagcgtggccgtgggcgcccacgcaaggtggcggtgtgaggcctgcgtgctgatgcctttcggtctgtgtatctcgctgtggttgcgacggtggtaagctcctaggtgtgaccgtgcttcttcgatttgtgctccgtactaattgttccgtcggcttagttgctcagtatgtgttgtaacctaatcgagatgagtgtgcacaatggatggatggatgtttttagcttcggttgtagttgactgtgctgctgtgagtgaacatgttcattttttttatcgccatctctgttgcttccgcattatgatgaagatgtttgtcatgttgttgtg

SEQ ID NO: 55791 - protein, 189 aa, Glycine max
  peptide (1)..(189): Ceres Seq. ID no. 13638977
MANDGSPKSGDIPPYPEMILAAIEALGDKNGSSKSAISSYIEEKYEGLPSAHASLLTANLASMKEAGKLAFVKNNYLKADAPSATPAKRGRGRPPKDPNAPPKPKAAPKDPNTPKRGRGRPPKAKDPMADAVKDAVAKATTGMPRGRGRPPGPSSAKKAKVAKEAASPAPADGSAPAKRGRGRPRKVAV

SEQ ID NO: 55792 - protein, 172 aa, Glycine max
  peptide (1)..(172): Ceres Seq. ID no. 13638978
MILAAIEALGDKNGSSKSAISSYIEEKYEGLPSAHASLLTANLASMKEAGKLAFVKNNYLKADAPSATPAKRGRGRPPKDPNAPPKPKAAPKDPNTPKRGRGRPPKAKDPMADAVKDAVAKATTGMPRGRGRPPGPSSAKKAKVAKEAASPAPADGSAPAKRGRGRPRKVAV

SEQ ID NO: 55793 - protein, 127 aa, Glycine max
  peptide (1)..(127): Ceres Seq. ID no. 13638979
MKEAGKLAFVKNNYLKADAPSATPAKRGRGRPPKDPNAPPKPKAAPKDPNTPKRGRGRPPKAKDPMADAVKDAVAKATTGMPRGRGRPPGPSSAKKAKVAKEAASPAPADGSAPAKRGRGRPRKVAV

SEQ ID NO: 55794 - DNA, 1141 bp, Glycine max
  misc_feature (1)..(1141): Ceres Seq. ID no. 13638877
aaccaaagccagagcgcccgtctctcccccctcccacgccgccgcacaccgaaccctagcgccccagcgagcgagcgagcgacagccatgccggcggacgcgaagatccggtggggggagctcgaggaggacgacgggggcgacctcgacttcctgctgccgccgcgggtggtcatcgggcccgacgagaacggcttcaagaagacgatcgagtaccgcttcgacgacgacggcaacaaggtcaaggtcaccaccaccacccgcgtccgcaagctcgcgcgcgcgcgcctctccaaggccgccgtcgagcgtcgcaactggtccaagttcggcgacgccgccagcggcgacgacgcctccgcgcgcctcaccgtcgtctccaccgaggagatcctcctcgagcgcccgcgcgccccagggagcaaagctgatgaaccaagtgcgtctggtgacccactggcaatggcaagcaagggaggtgctgttctcatggtttgcagaacctgtggtaagaagggtgaccactggacctcaaagtgcccctacaaggacctcgctccaccaaccgatgcatcggacatgcctcctacttctgacggccctgcagcactgagtggccctgccaagggctcatacgttgctccaaggctaagggctggtgctgttcataccgatgctgggcacgacatgaggcgcaggaacgacgagaacagtgtccgtgttaccaatctgtctgaggacacccgcgagcccgacctcctcgagctgttccgcacgtttggcccggtcagccgtgtctatgtcgcggtggatcagaagactggaatgagcaggggctttgggtttgtcaactttgttcacagggaggacgccgagaaggccatcagcaagctcaatgggtatggttatgataacctcatcctccatgtggagatggctgcacctaggcctacttagttactgcctactaagcatccagatttcctacaagtgtcgtatcattatggtctccgaaatacccgtacgtttgtgtcgtgagcttgtgtcatgttttgccttgttgagaataactacactctggtggtgaaaaagtgaatttcttaagggatggcacttgagtttatatttcatcaagctttgt

SEQ ID NO: 55795 - protein, 318 aa, Glycine max
  peptide (1)..(318): Ceres Seq. ID no. 13638878
NQSQSARLSPLPRRRTPNPSAPASERATAMPADAKIRWGELEEDDGGDLDFLLPPRVVIGPDENGFKKTIEYRFDDDGNKVKVTTTTRVRKLARARLSKAAVERRNWSKFGDAASGDDASARLTVVSTEEILLERPRAPGSKADEPSASGDPLAMASKGGAVLMVCRTCGKKGDHWTSKCPYKDLAPPTDASDMPPTSDGPAALSGPAKGSYVAPRLRAGAVHTDAGHDMRRRNDENSVRVTNLSEDTREPDLLELFRTFGPVSRVYVAVDQKTGMSRGFGFVNFVHREDAEKAISKLNGYGYDNLILHVEMAAPRPT

SEQ ID NO: 55796 - protein, 289 aa, Glycine max
  peptide (1)..(289): Ceres Seq. ID no. 13638879
MPADAKIRWGELEEDDGGDLDFLLPPRVVIGPDENGFKKTIEYRFDDDGNKVKVTTTTRVRKLARARLSKAAVERRNWSKFGDAASGDDASARLTVVSTEEILLERPRAPGSKADEPSASGDPLAMASKGGAVLMVCRTCGKKGDHWTSKCPYKDLAPPTDASDMPPTSDGPAALSGPAKGSYVAPRLRAGAVHTDAGHDMRRRNDENSVRVTNLSEDTREPDLLELFRTFGPVSRVYVAVDQKTGMSRGFGFVNFVHREDAEKAISKLNGYGYDNLILHVEMAAPRPT

SEQ ID NO: 55797 - protein, 203 aa, Glycine max
  peptide (1)..(203): Ceres Seq. ID no. 13638880
TKARAPVSPPSHAAAHRTLAPQRASERQPCRRTRRSGGGSSRRTTGATSTSCCRRGWSSGPTRTASRRRSSTASTTTATRSRSPPPPASASSRARASPRPPSSVATGPSSATPPAATTPPRASPSSPPRRSSSSARAPQGAKLMNQVRLVTHWQWQAREVLFSWFAEPVVRRVTTGPQSAPTRTSLHQPMHRTCLLLLTALQH

SEQ ID NO: 55798 - DNA, 892 bp, Glycine max
  misc_feature (1)..(892): Ceres Seq. ID no. 13594992
cccgcccccgtccggcacctctctcgcttcttcctccggcccatgcgacggcgctgacatctttgcccgcctgacctttcgatggccgccgccgccaccgccgccgccgcgaccggcacacttcttccccacgcactattgaatcatcgctcgcctccgccgccgcagctccttgcgctgtcctcctccttccgccgcctctccttatccacctcccatcgcaggaccacccatttagtcgcccactcagacgccggcgccgttgagccggagcccgtgtctgagcctgctcctgagggcgagcctgtcgctgcctctgctgactccgaggagggggaggcggagggggctgtggcattggcggaggaagaggaggagccggcgccgaggcccaagccgattaagttcggcgagatcatcgggattctgaacaagcagttcatcgaggaggctgagaaggtgaaagtgcttccggatttgaagcctggtgacatcatcgagcttagaatgcaacgtcccaacaagaggagattgtctctctttaagggtataatcattgcaaagcacaaatctggtgttcacaccacgatccgcgtcaggaggattattgccggtgttggagttgaaattacattccccatatactcaccaaggatcaaggagatcaaagtaatcagacacaagaaggtgaggagggcaaagttgtactacctgaagtacaagcttccccgtttctcaactttcaagtgagattagatacgcggcttctcacactagcatgtcgatttctccttggcaaacgagttttcacgatcatgttcagatctgtgcatccactgtaatgatctctgaacctcgagtcgcataattttacatctttttttaattggcg

SEQ ID NO: 55799 - protein, 222 aa, Glycine max
  peptide (1)..(222): Ceres Seq. ID no. 13594993
MAAAATAAAATGTLLPHALLNHRSPPPPQLLALSSSFRRLSLSTSHRRTTHLVAHSDAGAVEPEPVSEPAPEGEPVAASADSEEGEAEGAVALAEEEEEPAPRPKPIKFGEIIGILNKQFIEEAEKVKVLPDLKPGDIIELRMQRPNKRRLSLFKGIIIAKHKSGVHTTIRVRRIIAGVGVEITFPIYSPRIKEIKVIRHKKVRRAKLYYLKYKLPRFSTFK

SEQ ID NO: 55800 - DNA, 1156 bp, Glycine max
  misc_feature (1)..(1156): Ceres Seq. ID no. 13594929
ccatcgtacggtacactcgtaccaatcagcgttagcgcgaagggataacgtacgtccgttccatcctcgcgcgcgcggccgctccggctccggctccggccatggcgtccacctccgcctccctcggcgccatcctccagcgcttcccgctgctcgcgccccgccccgcctcccgccgcgcgcccaccgcccgccgcgccgtcgccaacaagatctcctgcatcggatgggacccggagggcatcctggcgccgccgcagccgggccacatcgcgcgcctcgagttccggcgccgcctcgacagcgacgccgacgcgcgcgccgccttcgacctccaggtcaaggaggagcaggagcgccgccgcaaggagcgcgaggcgcgggtgatacctgagacggacgccgggctggtggagttcttcctggacacggacgcgcgggagatcgagatcgagatcggcaggctccggcccaggctcaacaagggcttcttcgaccacatccagcgcgagatcgcgcagatcaagttcgcagtcaccagaacagcggcaaatgaagacagactgatcgagctggaggcgatgcagaaggtcatcggggagggagtcgaggcctacgacaagctgcaaaacgacctggtcacggccaaggagcggctcaccaacatcctgcaatccaaagataggaagaaaactctgctcgacatggttgaacggaacgagctcaacatgtccatattaacgcttctcgacgagaacatagcgagcgccaagaccagtaaccaggaggaggccgtggctttcatggaggatgtgcgctcatctatgctgaaatacataacagtataaattttgcctacatacaccggtgaccagttatctctgctatggcactggagtcgtcttcggcgcatagttgttcgaattaattcaatggagctgtaattcacaagtccatcttgtgtgttgtaattttgtttcggttgtatctagttgttctgtctgatatatgttgcaattgtcagtagctttactggcaaaaagagattgtacaatcatatatacatgcacggctgtaccagaaacaaatacaacaagactatgatctaaaaaaaaaaaaaaaaaagcttatcgataccgtcgacctcgaggggggg

SEQ ID NO: 55801 - protein, 248 aa, Glycine max
  peptide (1)..(248): Ceres Seq. ID no. 13594930
MASTSASLGAILQRFPLLAPRPASRRAPTARRAVANKISCIGWDPEGILAPPQPGHIARLEFRRRLDSDADARAAFDLQVKEEQERRRKEREARVIPETDAGLVEFFLDTDAREIEIEIGRLRPRLNKGFFDHIQREIAQIKFAVTRTAANEDRLIELEAMQKVIGEGVEAYDKLQNDLVTAKERLTNILQSKDRKKTLLDMVERNELNMSILTLLDENIASAKTSNQEEAVAFMEDVRSSMLKYITV

SEQ ID NO: 55802 - protein, 130 aa, Glycine max
  peptide (1)..(130): Ceres Seq. ID no. 13594931
HRTVHSYQSALARRDNVRPFHPRARGRSGSGSGHGVHLRLPRRHPPALPAARAPPRLPPRAHRPPRRRQQDLLHRMGPGGHPGAAAAGPHRAPRVPAPPRQRRRRARRLRPPGQGGAGAPPQGARGAGDT

SEQ ID NO: 55803 - DNA, 963 bp, Glycine max
  misc_feature (1)..(963): Ceres Seq. ID no. 13638885
acagacgcgagcgcgttaaacgagagaagaacagagagacagatcagacaacaatggcagccaaaccagacctgaagttgttgggcatgtcggtgagtccattcgtcatccgtgttcgcatggcgctgcacatgaagggcgtgagccacgagtacatcgagcaggacctcttcaacaagagcgagctcctcctcgagtccagcccggtggagaagaaggtgcccgtgctcatccacgacggcaagcccgtatgcgactcgccggccatcgtgcagtacatcgacgaggtctgggccgccacggggccgccgatcctccccgccgacccctatgagcgcgccgtcgctcgtttctggaccgcctacgtggacgacaagctattccctgcttacgctggcactgctaaggcagccacggaggaggagaggacgcaacagattaacgagatgttcgcggtgatggggcagctggaggaggcatttgcccagtgctcaaacgggaaggccttcttcgccggcgactccatcggcaacctcgacatcgccgttggatgcaatctgctcttgctcgaggtgctacgcagtatgtatggcgtggagttcgtcgacactgggaggaccccgctcttggcagcgtgggcgaagcggttcggggaaaccgatgcggcgagggaggtggtgcccgacgtgcacgtcgccgtggagtacgccaagaagcgtcaggcttattgggctgctgccgcggctacaaagtgacatgattcagatcagatcagtccgagtactacggactgaaaattatctcaagtccataggatgttgctccaacaataaagaggacaaatcatggatacaccatcttaaacatgatgattaacttacctcacggggttatccaacaatcgctgatttagttattgatcctagtagtagtctagatacgcaacgaagtgacatttttttc

SEQ ID NO: 55804 - protein, 250 aa, Glycine max
  peptide (1)..(250): Ceres Seq. ID no. 13638886
RRERVKREKNRETDQTTMAAKPDLKLLGMSVSPFVIRVRMALHMKGVSHEYIEQDLFNKSELLLESSPVEKKVPVLIHDGKPVCDSPAIVQYIDEVWAATGPPILPADPYERAVARFWTAYVDDKLFPAYAGTAKAATEEERTQQINEMFAVMGQLEEAFAQCSNGKAFFAGDSIGNLDIAVGCNLLLLEVLRSMYGVEFVDTGRTPLLAAWAKRFGETDAAREVVPDVHVAVEYAKKRQAYWAAAAATK

SEQ ID NO: 55805 - protein, 233 aa, Glycine max
  peptide (1)..(233): Ceres Seq. ID no. 13638887
MAAKPDLKLLGMSVSPFVIRVRMALHMKGVSHEYIEQDLFNKSELLLESSPVEKKVPVLIHDGKPVCDSPAIVQYIDEVWAATGPPILPADPYERAVARFWTAYVDDKLFPAYAGTAKAATEEERTQQINEMFAVMGQLEEAFAQCSNGKAFFAGDSIGNLDIAVGCNLLLLEVLRSMYGVEFVDTGRTPLLAAWAKRFGETDAAREVVPDVHVAVEYAKKRQAYWAAAAATK

SEQ ID NO: 55806 - protein, 222 aa, Glycine max
  peptide (1)..(222): Ceres Seq. ID no. 13638888
MSVSPFVIRVRMALHMKGVSHEYIEQDLFNKSELLLESSPVEKKVPVLIHDGKPVCDSPAIVQYIDEVWAATGPPILPADPYERAVARFWTAYVDDKLFPAYAGTAKAATEEERTQQINEMFAVMGQLEEAFAQCSNGKAFFAGDSIGNLDIAVGCNLLLLEVLRSMYGVEFVDTGRTPLLAAWAKRFGETDAAREVVPDVHVAVEYAKKRQAYWAAAAATK

SEQ ID NO: 55807 - DNA, 793 bp, Glycine max
  misc_feature (1)..(793): Ceres Seq. ID no. 13594932
aggacaggccaagcggagaatcgagggtttcggcttccttgtcatctcgccgtctccgacgccggcgacccgggagcgagacctccaaccgccgccctctcgccggcggcgtatttccccgttccgtagaccaggtatgaagagggccgcgccgtcggaggagccggtggagctctcttcgggcgacgacctgagctcggattccgacgatgaggccgggaacgggaaaggcgagaactccttccggctgcccatgtcctccaaatctacagctccagcaaaaggtgcattgatcaggagggctgaaatgtatcaagagtacatgaagcacatcccaattcctgatcactgcagctccttgatcccatccacatcatggctgggactcggaagatcggtgaagcagttgtacgagcagcccttgcattacctcaccaacatcctcttgagacagtgggatcaacagagggttgggagcgataatgagcaccagcctctggatgctatcattcaccctatgaaagctcaggccctcatttgggccactgaagaagtccataggctgaccacctctagtgaccacttagagaagctctgggccaaagaccccatgtatcatgctaacatagatccagtgttcccttccctaaagttgcattagcaaacatcgcaagttggaccgtcttatcctgtctattttgtttctgcctgctgtaatctggcacattttggttgttagcgaagtaatatgaaccatatgtcactgatgttaaaagtatgatatgtgatggcc

SEQ ID NO: 55808 - protein, 219 aa, Glycine max
  peptide (1)..(219): Ceres Seq. ID no. 13594933
GQAKRRIEGFGFLVISPSPTPATRERDLQPPPSRRRRISPFRRPGMKRAAPSEEPVELSSGDDLSSDSDDEAGNGKGENSFRLPMSSKSTAPAKGALIRRAEMYQEYMKHIPIPDHCSSLIPSTSWLGLGRSVKQLYEQPLHYLTNILLRQWDQQRVGSDNEHQPLDAIIHPMKAQALIWATEEVHRLTTSSDHLEKLWAKDPMYHANIDPVFPSLKLH

SEQ ID NO: 55809 - protein, 174 aa, Glycine max
  peptide (1)..(174): Ceres Seq. ID no. 13594934
MKRAAPSEEPVELSSGDDLSSDSDDEAGNGKGENSFRLPMSSKSTAPAKGALIRRAEMYQEYMKHIPIPDHCSSLIPSTSWLGLGRSVKQLYEQPLHYLTNILLRQWDQQRVGSDNEHQPLDAIIHPMKAQALIWATEEVHRLTTSSDHLEKLWAKDPMYHANIDPVFPSLKLH

SEQ ID NO: 55810 - protein, 135 aa, Glycine max
  peptide (1)..(135): Ceres Seq. ID no. 13594935
MSSKSTAPAKGALIRRAEMYQEYMKHIPIPDHCSSLIPSTSWLGLGRSVKQLYEQPLHYLTNILLRQWDQQRVGSDNEHQPLDAIIHPMKAQALIWATEEVHRLTTSSDHLEKLWAKDPMYHANIDPVFPSLKLH

SEQ ID NO: 55811 - DNA, 830 bp, Glycine max
  misc_feature (1)..(830): Ceres Seq. ID no. 12610031
atcacttaaacaagccaactgtgaccgcaagcttagacaaagaaacagagagagagagagaaacagaaagatggtgctaaaggtgtacggacctcactttgcttcaccgaagcgagctctggtaacgctcatcgagaagggcgtcgccttcgagaccgtccccgtcgatctcatgaaaggagaacacaagcagcctgcttatctcgccttacagcctttcggtaccgtccctgctgttgtcgacggcgactacaaaatctttgagtcacgtgccgtcatgaggtacgtagctgagaagtacaggtcacaaggacctgaccttttggggaaaaccgtggaagaaagaggtcaagttgagcaatggctagacgtggaggcgaccacttaccacccaccgctacttaacctgacacttcacataatgttcgcgtcagttatgggattcccatctgatgagaagctgatcaaggagagcgaagagaagctctcggctgttctcgatgtctacgaggcacatctctcaaagagcaagtacttggccggtgatttcgtgagcttggctgacttggctcacctcccgttcactgattacttggtgggtccgatcgggaaggcttacatgatcaaagataggaagcacgtgagcgcgtggtgggacagtattagcagccgtcctgcgtggaaggagactcttgagaagtattcattcccggcttaagaacatgatgttctttgttgttgttgtttgtgtgtttatgtgaggtttaataataatgtggcaatgtatgcttcttcttatattatgttacctctactctgtttcgttttgg

SEQ ID NO: 55812 - protein, 238 aa, Glycine max
  peptide (1)..(238): Ceres Seq. ID no. 12610032
SLKQANCDRKLRQRNRERERNRKMVLKVYGPHFASPKRALVTLIEKGVAFETVPVDLMKGEHKQPAYLALQPFGTVPAVVDGDYKIFESRAVMRYVAEKYRSQGPDLLGKTVEERGQVEQWLDVEATTYHPPLLNLTLHIMFASVMGFPSDEKLIKESEEKLSAVLDVYEAHLSKSKYLAGDFVSLADLAHLPFTDYLVGPIGKAYMIKDRKHVSAWWDSISSRPAWKETLEKYSFPA

SEQ ID NO: 55813 - protein, 215 aa, Glycine max
  peptide (1)..(215): Ceres Seq. ID no. 12610033
MVLKVYGPHFASPKRALVTLIEKGVAFETVPVDLMKGEHKQPAYLALQPFGTVPAVVDGDYKIFESRAVMRYVAEKYRSQGPDLLGKTVEERGQVEQWLDVEATTYHPPLLNLTLHIMFASVMGFPSDEKLIKESEEKLSAVLDVYEAHLSKSKYLAGDFVSLADLAHLPFTDYLVGPIGKAYMIKDRKHVSAWWDSISSRPAWKETLEKYSFPA

SEQ ID NO: 55814 - protein, 181 aa, Glycine max
  peptide (1)..(181): Ceres Seq. ID no. 12610034
MKGEHKQPAYLALQPFGTVPAVVDGDYKIFESRAVMRYVAEKYRSQGPDLLGKTVEERGQVEQWLDVEATTYHPPLLNLTLHIMFASVMGFPSDEKLIKESEEKLSAVLDVYEAHLSKSKYLAGDFVSLADLAHLPFTDYLVGPIGKAYMIKDRKHVSAWWDSISSRPAWKETLEKYSFPA

SEQ ID NO: 55815 - DNA, 742 bp, Glycine max
  misc_feature (1)..(742): Ceres Seq. ID no. 13595021
attacctagaacatcctaatcgaaaaaaacaaacacaaaaaaaaaaacatggcagctcaagcctcgggtctctttagctccgccgtaacaaccgccgctacctccggcgtaaaaaaactccaccttttcacaacaacccaccgtccaagatccctctccttccccaaaaccgcaatccgcgccgagaaaacagactccgccgccgccgccgccgccccggccgccgccgtgaaagaagaagctccggtgggattcacgccgccgcagctggacccgaacacgccgtctccgatcttcgcgggaagcacgggtggtcttctccgcaaggcccaggtggaggagttctacgtcatcacgtggaactcgccgaaggagcagatcttcgagatgccgacgggaggcgcggcgatcatgagggaaggtccgaacctgctgaagctggcgaggaaggagcagtgcttggcgttggggacgaggctcaggtccaagtacaagattaactaccagttctacagggtgttccctaacggtgaggttcagtatcttcatcctaaagatggggtttatccggagaaggcgaatgcgggaagagaaggtgtcggtcagaacatgagatctattgggaaaaatgttagtcccattgaagttaagtttactgggaaacaaagttatgatttgtaagttgtggaaacttaaaatgtgaaaaaacaaaaatcatgtggatgtgactatgtttggtttt

SEQ ID NO: 55816 - protein, 210 aa, Glycine max
  peptide (1)..(210): Ceres Seq. ID no. 15221456
MAAQASGLFSSAVTTAATSGVKKLHLFTTTHRPRSLSFPKTAIRAEKTDSAAAAAAPAAAVKEEAPVGFTPPQLDPNTPSPIFAGSTGGLLRKAQVEEFYVITWNSPKEQIFEMPTGGAAIMREGPNLLKLARKEQCLALGTRLRSKYKINYQFYRVFPNGEVQYLHPKDGVYPEKANAGREGVGQNMRSIGKNVSPIEVKFTGKQSYDL

SEQ ID NO: 55817 - DNA, 1240 bp, Glycine max
  misc_feature (1)..(1240): Ceres Seq. ID no. 15177057
actccatttagattctgcttgctcaccaatagaagtgtggtatagccggtggaaatgcagctcctaccgacactctgcttcttgttcttgcagctgctgccgagaggagacgcatccacctctcactctaatcgccacagatcagccccacattggctccccgccacggccacctggtacggaagtcctgagggcgatggcagcagcggaggagcatgcgggtatgggtcgctggtggacgtgaagccgttcaaggctcgcgttggagcagtgagtccgttgctgttcaagagcggcgaaggctgcggtgcttgctacaaggtcaggtgtctggacaagaccatctgctcaaagagagcagtcacaataattgtcacagaccagtcaccgtcaggaccatctgctcgagcaaagcacattcactttgaccttagtggcgccgcatttggccatttggctatccccggccattccggcatcatccgcaaccgcggcctcatctccctcctctatcgccggacggcatgcaaatacagagagaagaacatagcattccatgtgaacgcaggatcaacagcttattggttatctcttctcattgagtatgaagacggagaaggtgacattggctctatgcacattcgtcaagcggggtcgaaggagtggatagcaatgaagcacatatggggagcaaactggtgcatcgtcggaggaccactaaagggaccactctccgttaagctcaccactttgtcaaacaacaaaacgctctccgcagctgacgtcatccccaaaaaatgggttcccaaagctacttacacctcccgcctcaacttctcccctgtcctctaactaaactgaagctccccacccccatttctctgtcctcacttcttttttgttgggagagagaatcggtgaggatactgagtgagtgagagtgagaggatgctctcctccctcttccctcgtttttctttttctgttttgtttggggttgtgtttatgtgtgttggtgaaggaagccatcagagcttgattctgtgactacttactatagtacttactacttactaatgttggacctactctttatgtaatcctttttttaatattttttcttatttgcttctaaaccttgtaaaaggcgataggagtaaagtactgtattatcatcatatttagtgtcatttgtgggacattattatataatgagacagcctacaaatgcataaataat

SEQ ID NO: 55818 - protein, 265 aa, Glycine max
  peptide (1)..(265): Ceres Seq. ID no. 15177058
MQLLPTLCFLFLQLLPRGDASTSHSNRHRSAPHWLPATATWYGSPEGDGSSGGACGYGSLVDVKPFKARVGAVSPLLFKSGEGCGACYKVRCLDKTICSKRAVTIIVTDQSPSGPSARAKHIHFDLSGAAFGHLAIPGHSGIIRNRGLISLLYRRTACKYREKNIAFHVNAGSTAYWLSLLIEYEDGEGDIGSMHIRQAGSKEWIAMKHIWGANWCIVGGPLKGPLSVKLTTLSNNKTLSAADVIPKKWVPKATYTSRLNFSPVL

SEQ ID NO: 55819 - DNA, 1037 bp, Glycine max
  misc_feature (1)..(1037): Ceres Seq. ID no. 13594940
aatttctccttcctctctgcccatacatatctctctctccatcgatctaacctacacacacagagaaagagagagaagcagcagtagcacatgtaacctagctagcctgcggttctccacggcaacgcttcttcttcttggctgccgcctggtgaacctcgccgtagtctgaacggctaggggggcagcgaggcggcggcgccaggggataatcaggaggaatgtcgtcgtcgggccagatcgcgccggcagaacaagtctgctacgtccactgcaacttctgcaacaccgtactcgcggtgagtgtccctgggaacagcatgctcaacattgtgacagtccggtgtgggcactgtacaaacctactttcggtgagcctgagagggcagatgcactcaccagtccctcctgcagcacaggtccaggagagcagcctgagcaagcccaatggcagcaacggcttcattcgcgatcacagcgtctacaatagcccggagtttggttcgtcttcttcttcgtcgtcgtccaaattccggatgccgacgatgatgttctcgtcgcaaaatgatctgctgcaggaacagacgctgcacgcacgtcctccggagaagaggcagcgtgttccttcagcgtacaacagattcatcaaggaagagatacgaaggataaaggcaaacaaccccgacattagccacagggaagccttcagcactgccgcaaagaactgggcacattacccaaacatccatttcggtctaaaccccgagcgcgacggtggcaagaggctcgccgtcgacgatgccgcgccggctgccaagaagatccaaggtttctgttcatagacacgacggttgggagtccaaacaagaacaattgtatctatatatagtattagtatatcgcatatgtgtatacgtaccgcatgtgagtaagtaaagatgcaaaggaaaagagaagaagtcactacgtaccttaccttatacaattgtacgtacatatacggtgatcgagtgaataaataattagtctgtcttttt

SEQ ID NO: 55820 - protein, 206 aa, Glycine max
  peptide (1)..(206): Ceres Seq. ID no. 13594941
MSSSGQIAPAEQVCYVHCNFCNTVLAVSVPGNSMLNIVTVRCGHCTNLLSVSLRGQMHSPVPPAAQVQESSLSKPNGSNGFIRDHSVYNSPEFGSSSSSSSSKFRMPTMMFSSQNDLLQEQTLHARPPEKRQRVPSAYNRFIKEEIRRIKANNPDISHREAFSTAAKNWAHYPNIHFGLNPERDGGKRLAVDDAAPAAKKIQGFCS

SEQ ID NO: 55821 - protein, 173 aa, Glycine max
  peptide (1)..(173): Ceres Seq. ID no. 13594942
MLNIVTVRCGHCTNLLSVSLRGQMHSPVPPAAQVQESSLSKPNGSNGFIRDHSVYNSPEFGSSSSSSSSKFRMPTMMFSSQNDLLQEQTLHARPPEKRQRVPSAYNRFIKEEIRRIKANNPDISHREAFSTAAKNWAHYPNIHFGLNPERDGGKRLAVDDAAPAAKKIQGFCS

SEQ ID NO: 55822 - protein, 150 aa, Glycine max
  peptide (1)..(150): Ceres Seq. ID no. 13594943
MHSPVPPAAQVQESSLSKPNGSNGFIRDHSVYNSPEFGSSSSSSSSKFRMPTMMFSSQNDLLQEQTLHARPPEKRQRVPSAYNRFIKEEIRRIKANNPDISHREAFSTAAKNWAHYPNIHFGLNPERDGGKRLAVDDAAPAAKKIQGFCS

SEQ ID NO: 55823 - DNA, 1181 bp, Glycine max
  misc_feature (1)..(1181): Ceres Seq. ID no. 12610002
aaagtaaaagtcttatagatctctacagatcccaccactgaaaggaccattttgattcttccatcaaatttctctcgacgtccggcggattttgaggaagtggagagcaaaagcttgattttagcaactatggagagcttctggcaactgggtgatgagctccgaggtcagtcaagagcatcagaggatcacaagtggtccactgttgctacaaagttagctgagcagactaggatgaaaggggagaggacgaacaaccttgatctctccaaaagctactctgagttcagaccaagcgacaagtttagtttccaggagaacaacaacctcaacttcaacatgaatctgatgcagggcaatgtttacaacaacatgaatggatttaaaagtggaggcaacatgaaagttaacaagtacattggcaatgttgttgctaacaaagagatgagcaatgatagtgttgttgacaagaggtttaaaacgctgcctgcatcagagacgcttccgaggaatgaagttcttggcgggtacatctttgtttgcaacaatgataccatgcaggacgacttgaaacgtcacctatttggtttacctccgagatatagggactctgtaagggctataacacctgggttgcctctgtttctttacaattacactactcaccagttgcatggtatcttcgaggcaacaacttttggaggtactaacattgatgccactgcttgggaagacaaaaagtgcaaaggagagtctagatttccagctcaggtaaggatcagagtgaggaaaatatgcaaagccttggaagaggattctttcaggcctgttcttcaccattatgatggtccaaagttccgccttgagctcactgttcccgagacattggatctgctagatctctgtgaacaagctggctctccataagccggggatcaacctttgcaataccacgttgctaagtttgtctgaaacggcgaaacctatctaaatatatatatgcatattaccataagagcgtaagcttttggggtttagttaagagtctagttcaaatgtatggtttactaagaagcgactattctcagttcttgttgtgtctagtgtgtgagtttgtctgtgtctgtaagagtcttgataacccttttgagacgatgatttatgtagagagaaagtaaaag

SEQ ID NO: 55824 - protein, 265 aa, Glycine max
  peptide (1)..(265): Ceres Seq. ID no. 12610003
MESFWQLGDELRGQSRASEDHKWSTVATKLAEQTRMKGERTNNLDLSKSYSEFRPSDKFSFQENNNLNFNMNLMQGNVYNNMNGFKSGGNMKVNKYIGNVVANKEMSNDSVVDKRFKTLPASETLPRNEVLGGYIFVCNNDTMQDDLKRHLFGLPPRYRDSVRAITPGLPLFLYNYTTHQLHGIFEATTFGGTNIDATAWEDKKCKGESRFPAQVRIRVRKICKALEEDSFRPVLHHYDGPKFRLELTVPETLDLLDLCEQAGSP

SEQ ID NO: 55825 - protein, 230 aa, Glycine max
  peptide (1)..(230): Ceres Seq. ID no. 12610004
MKGERTNNLDLSKSYSEFRPSDKFSFQENNNLNFNMNLMQGNVYNNMNGFKSGGNMKVNKYIGNVVANKEMSNDSVVDKRFKTLPASETLPRNEVLGGYIFVCNNDTMQDDLKRHLFGLPPRYRDSVRAITPGLPLFLYNYTTHQLHGIFEATTFGGTNIDATAWEDKKCKGESRFPAQVRIRVRKICKALEEDSFRPVLHHYDGPKFRLELTVPETLDLLDLCEQAGSP

SEQ ID NO: 55826 - protein, 195 aa, Glycine max
  peptide (1)..(195): Ceres Seq. ID no. 12610005
MNLMQGNVYNNMNGFKSGGNMKVNKYIGNVVANKEMSNDSVVDKRFKTLPASETLPRNEVLGGYIFVCNNDTMQDDLKRHLFGLPPRYRDSVRAITPGLPLFLYNYTTHQLHGIFEATTFGGTNIDATAWEDKKCKGESRFPAQVRIRVRKICKALEEDSFRPVLHHYDGPKFRLELTVPETLDLLDLCEQAGSP

SEQ ID NO: 55827 - DNA, 981 bp, Glycine max
  misc_feature (1)..(981): Ceres Seq. ID no. 12610286
aaaaaatcaaaaatctcagccatggcgattgcttcaacctccactcttatcttctcctgcgccaaacccgatctccggccatttccgtcccattttcgttcttcttctccgtctccctctcctcttgtgagtcagctccgtatccctagcctaacccatgacccgatttctctgtcgggtcttatcggaaccggtttggtggctgcgacgttcatggcggcaggaccaggtagtactgctatggcggcggttgattctcttcagctaagcgaaccggcgaatgcgttgtctttacccacttgggctgttcatgtttccagcgttgtcgaatggattacggcgatggtgttggtatggaaatatggagaaagagagggttacgagtcatggaaaggtctctcatggggaatggtgcctttgcttggtggagctctttgcgcatgcacatggcatttcttttacaatgctgaatctcttgaggtgttggtagcgcttcagggagcactaactgtgattggtaatattactctgtgcattgctgcctttcgaatcaacaagtctgcatccaaaatggaaacctctgaagagccgtgagggctaaatacacatctatgtgtttaaaataaaggtcaaaggaatgatttgttttcagtaatttctacaggcaggaatctgaggtgtagcctttttggagagtggtgatggttagagaagcaactggatctttggatgtggtattagcggaaagatctttttgctttatatctctagtgattgcactaaacatgtttcttgagcgtgtgtgtgtatatacttttatattgtagtgtattgtattgtattatcctgattatattcctggtgagtgaggccagtgcttcatgttcataacctattatgtaaacattcttcttctgcaatcgttgtagtcctgacttcattattttcggtcttaggcttggatgatcacagagttcatgc

SEQ ID NO: 55828 - protein, 197 aa, Glycine max
  peptide (1)..(197): Ceres Seq. ID no. 12610287
KKSKISAMAIASTSTLIFSCAKPDLRPFPSHFRSSSPSPSPLVSQLRIPSLTHDPISLSGLIGTGLVAATFMAAGPGSTAMAAVDSLQLSEPANALSLPTWAVHVSSVVEWITAMVLVWKYGEREGYESWKGLSWGMVPLLGGALCACTWHFFYNAESLEVLVALQGALTVIGNITLCIAAFRINKSASKMETSEEP

SEQ ID NO: 55829 - protein, 190 aa, Glycine max
  peptide (1)..(190): Ceres Seq. ID no. 12610288
MAIASTSTLIFSCAKPDLRPFPSHFRSSSPSPSPLVSQLRIPSLTHDPISLSGLIGTGLVAATFMAAGPGSTAMAAVDSLQLSEPANALSLPTWAVHVSSVVEWITAMVLVWKYGEREGYESWKGLSWGMVPLLGGALCACTWHFFYNAESLEVLVALQGALTVIGNITLCIAAFRINKSASKMETSEEP

SEQ ID NO: 55830 - protein, 126 aa, Glycine max
  peptide (1)..(126): Ceres Seq. ID no. 12610289
MAAGPGSTAMAAVDSLQLSEPANALSLPTWAVHVSSVVEWITAMVLVWKYGEREGYESWKGLSWGMVPLLGGALCACTWHFFYNAESLEVLVALQGALTVIGNITLCIAAFRINKSASKMETSEEP

SEQ ID NO: 55831 - DNA, 870 bp, Glycine max
  misc_feature (1)..(870): Ceres Seq. ID no. 13638889
atcatcgataaaagcaaagaaacaagattcgaaaaagttagcgttaaacaatctccacttctctctcccacaagaaaatcaccaagaaaccgttaatcatctatggcgaacatgaacactcttcaacagatgatcttccctgacgagaacgctccgattcatcgcaaaaagagtgttactgctgcttctcttaagaccaaaggaactgtacttggtcagaagaaacctggaggggctcgtaaggctctgaatgatatcacaaacaagtctggtgttcttcccaaagcttcttctaagaacaagcaactcgcgtctgctgcaaagggagaaatcaacatagctggagagatgttcttgcatgatcacagcaagtgcatcaaagagcagcagagtctctgggatgatcacttctctgctgacattctactccaccatgattcgtccagcgtcaagggaaagaatctcaagtatgacaaagaagtgatggatggtaagaacaatctgacttgtgaggaaccagaagagattccatctcccaagctgactgattggctcaagagctcaaccccctggcgctctccaatacgtcatggctctatgatgatgccttccacacctctggcttggcggtttgattcagacgaattcactctcaaggaagactttgacgacctcttctgaatgtctgtttcttaagtgtctaagcttttcatccttcggatgaagtagtagtagtagtaatagcaagcaactttctttcgtttcagctcatcaatgcttcagttctttatgtacttaacaactctgtgtccgtccatcactctctttaactgatttcatgaattaaaaaagttggaatcttttcaagcg

SEQ ID NO: 55832 - protein, 192 aa, Glycine max
  peptide (1)..(192): Ceres Seq. ID no. 13638890
MANMNTLQQMIFPDENAPIHRKKSVTAASLKTKGTVLGQKKPGGARKALNDITNKSGVLPKASSKNKQLASAAKGEINIAGEMFLHDHSKCIKEQQSLWDDHFSADILLHHDSSSVKGKNLKYDKEVMDGKNNLTCEEPEEIPSPKLTDWLKSSTPWRSPIRHGSMMMPSTPLAWRFDSDEFTLKEDFDDLF

SEQ ID NO: 55833 - protein, 189 aa, Glycine max
  peptide (1)..(189): Ceres Seq. ID no. 13638891
MNTLQQMIFPDENAPIHRKKSVTAASLKTKGTVLGQKKPGGARKALNDITNKSGVLPKASSKNKQLASAAKGEINIAGEMFLHDHSKCIKEQQSLWDDHFSADILLHHDSSSVKGKNLKYDKEVMDGKNNLTCEEPEEIPSPKLTDWLKSSTPWRSPIRHGSMMMPSTPLAWRFDSDEFTLKEDFDDLF

SEQ ID NO: 55834 - protein, 183 aa, Glycine max
  peptide (1)..(183): Ceres Seq. ID no. 13638892
MIFPDENAPIHRKKSVTAASLKTKGTVLGQKKPGGARKALNDITNKSGVLPKASSKNKQLASAAKGEINIAGEMFLHDHSKCIKEQQSLWDDHFSADILLHHDSSSVKGKNLKYDKEVMDGKNNLTCEEPEEIPSPKLTDWLKSSTPWRSPIRHGSMMMPSTPLAWRFDSDEFTLKEDFDDLF

SEQ ID NO: 55835 - DNA, 766 bp, Glycine max
  misc_feature (1)..(766): Ceres Seq. ID no. 13638893
actcttcaaagtctccgccagacacttctccatcaaaactcctctcacacaatggccacttccttccctaccttgacaccttttcttttcatcctccttctctccatcccctccgttcttgaagcagctcatcaccacacggcggcgccggctccggctgtagactgttcgatgctcatactcaacatggctgattgtttgtcctttgtttccgctggaggcacggaggccaagccggctagttcgtgttgcaacggccttaagacggtgctcaagactgacgcagagtgtctatgtgaggcgtttaaaagcagtgcttctctaggagttactttgaacatgactaaagcagctacacttcccgctgcatgcaagcttcacgctccttctatggctgcttgtggattgtccgccgctcctactatggctccaggtcttgctccaggaggagctgctggacccgacttaagttttctatctccaaacccatctccagggaaccgcggatcttccttgcttcccttctccttcaccaccgtactcggtgctatgtccttcgtattgttattcttgtctcgtgtctgaagaagccagctagatttggttgtatgaaatggctttgggtttgggttttcgtgactttagttttgcgtgtcttttgagtctacttctgttttagaccatgtcggtttctgttcgtagtttatttaatcttaattacgtttcacattggtccttttatctaagaacatctctgatccctcgt

SEQ ID NO: 55836 - protein, 194 aa, Glycine max
  peptide (1)..(194): Ceres Seq. ID no. 13638894
TLQSLRQTLLHQNSSHTMATSFPTLTPFLFILLLSIPSVLEAAHHHTAAPAPAVDCSMLILNMADCLSFVSAGGTEAKPASSCCNGLKTVLKTDAECLCEAFKSSASLGVTLNMTKAATLPAACKLHAPSMAACGLSAAPTMAPGLAPGGAAGPDLSFLSPNPSPGNRGSSLLPFSFTTVLGAMSFVLLFLSRV

SEQ ID NO: 55837 - protein, 177 aa, Glycine max
  peptide (1)..(177): Ceres Seq. ID no. 13638895
MATSFPTLTPFLFILLLSIPSVLEAAHHHTAAPAPAVDCSMLILNMADCLSFVSAGGTEAKPASSCCNGLKTVLKTDAECLCEAFKSSASLGVTLNMTKAATLPAACKLHAPSMAACGLSAAPTMAPGLAPGGAAGPDLSFLSPNPSPGNRGSSLLPFSFTTVLGAMSFVLLFLSRV

SEQ ID NO: 55838 - protein, 137 aa, Glycine max
  peptide (1)..(137): Ceres Seq. ID no. 13638896
MLILNMADCLSFVSAGGTEAKPASSCCNGLKTVLKTDAECLCEAFKSSASLGVTLNMTKAATLPAACKLHAPSMAACGLSAAPTMAPGLAPGGAAGPDLSFLSPNPSPGNRGSSLLPFSFTTVLGAMSFVLLFLSRV

SEQ ID NO: 55839 - DNA, 957 bp, Glycine max
  misc_feature (1)..(957): Ceres Seq. ID no. 13638897
agacacgcgaaagcaaacacacagggagcgaagaagaaacccagctaggggcgtctggtgcattggcgcaggagaccaatggcgggcctcgggtttgaggagaccaagctccggctcggcctgccaggcggcagcaacgaggccgaggaggcggccgccgcggtgaggagctccggcaagaggggctacgccgagaccatcgacctcgtgctgaagctggagccagcgtcggcggccgcgccgccgtccgaggacgacgaggaagtggccgatggtgtcgcggaggcgcagccctctccggctgctgccgacgggcagttgaagcggtcgccgagccagtgcagcgtggtcaccgccgcgcagccggacgcgggaccccgagaagccgcgcgcgcccaaggcgcaggcggtggggtggccgccggtgcggtcgttccggaggaacatgctggcggcgacggcggagagagggggggcggcgctggtgaaggtgagcatggacggcgcgccctacctgcgcaaggtggacatgggcacctacaagagctaccaggagctgtccaaggccctggagaagatgttcagctccttcaccatcggcaacgactgctcgcaggctcaggggatgacgggcatgaacgagagcaagctggtggacctgctcaacggctccgactatgtgcccacctacgaggacaaggacggcgactggatgctcgtcggcgacgtcccctgggagatgttcgtcgcgtcctgcaagcgcctccggataatgaaaggatcagaagccatcggcctggcaccaagggcaatggagaaatgcaagagcaggagctgaccgtttgctaccaattcaagattatggctctgcttgcccaactatgtaccatactatactgcgtactcctacttcctatgttttatcttgttgttatatatgtgtagtatgtatacgtg

SEQ ID NO: 55840 - protein, 288 aa, Glycine max
  peptide (1)..(288): Ceres Seq. ID no. 13638898
MAGLGFEETKLRLGLPGGSNEAEEAAAAVRSSGKRGYAETIDLVLKLEPASAAAPPSEDDEEVADGVAEAQPSPAAADGQLKRSPSQCSVVTAAQPDAGPREAARAQGAGGGVAAGAVVPEEHAGGDGGERGGGAGEGEHGRRALPAQGGHGHLQELPGAVQGPGEDVQLLHHRQRLLAGSGDDGHEREQAGGPAQRLRLCAHLRGQGRRLDARRRRPLGDVRRVLQAPPDNERIRSHRPGTKGNGEMQEQELTVCYQFKIMALLAQLCTILYCVLLLPMFYLVVIYV

SEQ ID NO: 55841 - DNA, 844 bp, Glycine max
  misc_feature (1)..(844): Ceres Seq. ID no. 12610046
atttttcttttcaaaacgctttacctctcagttctcttcgtccctggacattcttccggtcaccatcggagccggcgaccggtggcgaccgcgcggggacgccgttccctctcataactgtcgcacgccgggacgccgagcgatctcctacccccacccccatcccagtctaccacagcgacaccgtgtgagatccgtgcttcatcggtaggctcagttggtgccttggtggactagtgaactgaaactgtattaatatcttcaggctctggtgcaatggcctacgagatcagtgagatcaaaaaaattggcataggtctggtgggctttggcatcctgttctcgttcctaggtgttatccttttctttgacaggggtttgttggctctgggtaatattttcttcttgactggagtaggccttcttctcggttggcaatctatgtggcagctatttacaaagaaggcaaacattaagggatctgtacctttcttccttggtctctttcttctatttgtcagatggcctgttgctggtataatcctggaactgtatggatcttttgtcctcttcagtggttacgggcctcctatccaagccttcctatatcagattccaatcattggatggattctgcaatacccctttcagctatttggtctgaggcgtaagcgtgcttgacaattatggtggcagaaattcatgataattcatggggaaatagcatattgcccaatgttaaattgtcagtagaaaattattgtagccttcatcttttgtaactaagctctttaacactgcatctgcatgacatgggctttctaaccttggttgtgatgactcc

SEQ ID NO: 55842 - protein, 134 aa, Glycine max
  peptide (1)..(134): Ceres Seq. ID no. 12610047
MAYEISEIKKIGIGLVGFGILFSFLGVILFFDRGLLALGNIFFLTGVGLLLGWQSMWQLFTKKANIKGSVPFFLGLFLLFVRWPVAGIILELYGSFVLFSGYGPPIQAFLYQIPIIGWILQYPFQLFGLRRKRA

SEQ ID NO: 55843 - protein, 79 aa, Glycine max
  peptide (1)..(79): Ceres Seq. ID no. 12610048
MWQLFTKKANIKGSVPFFLGLFLLFVRWPVAGIILELYGSFVLFSGYGPPIQAFLYQIPIIGWILQYPFQLFGLRRKRA

SEQ ID NO: 55844 - protein, 69 aa, Glycine max
  peptide (1)..(69): Ceres Seq. ID no. 12610049
FFFSKRFTSQFSSSLDILPVTIGAGDRWRPRGDAVPSHNCRTPGRRAISYPHPHPSLPQRHRVRSVLHR

SEQ ID NO: 55845 - DNA, 797 bp, Glycine max
  misc_feature (1)..(797): Ceres Seq. ID no. 13595847
acattttctttacactgaaccatcacttagagagtgcgcttcacacaagaaacaaaacaaaatggctaggcgatttgccattgttgcgatctgcatcgtcctcatcgccggcgtcggaggtcaagctccgtcgtcaccaccaaccaccacaccagcaccacccaccacaacaacccccccgccagcagccactcctcctcctgtctcagctcctccaccagtcacaacttctcctcctccagccaccaccgctcctcctcctgctactcctcctccagttgcttctcctcctccggccactcctcctccagtggcaactcctcctccagcaactccccctcccgtcgcttctcctccaccagcaactcctccacccgtcgcatctcctcctccagcaactcctcctccagctcctcttgcatctcctcccgctcaggttccagctcttgctcctacgacgccagaagctccctctacatctccgtcgtctagcccgcctctcccggcgactgatggccctggaccgagcgtcgaagggccaggaccttccacagattcgaatgaccagaatggagcaagcaagacagtttcaagcttggtacttggatctgttctcgtttggtttatgatctaagcgtgggagcctttcgctcggtgttccttgcatttgttttcatgttgatgtttgtttgttccattgttattactttcggaaccgtattcttttggattattatcttttggagaggatattattgaggagttgagatggagatatcaggatatatttcgtttgg

SEQ ID NO: 55846 - protein, 210 aa, Glycine max
  peptide (1)..(210): Ceres Seq. ID no. 13595848
HFLYTEPSLRECASHKKQNKMARRFAIVAICIVLIAGVGGQAPSSPPTTTPAPPTTTTPPPAATPPPVSAPPPVTTSPPPATTAPPPATPPPVASPPPATPPPVATPPPATPPPVASPPPATPPPVASPPPATPPPAPLASPPAQVPALAPTTPEAPSTSPSSSPPLPATDGPGPSVEGPGPSTDSNDQNGASKTVSSLVLGSVLVWFMI

SEQ ID NO: 55847 - protein, 208 aa, Glycine max
  peptide (1)..(208): Ceres Seq. ID no. 13595849
IFFTLNHHLESALHTRNKTKWLGDLPLLRSASSSSPASEVKLRRHHQPPHQHHPPQQPPRQQPLLLLSQLLHQSQLLLLQPPPLLLLLLLLQLLLLLRPLLLQWQLLLQQLPLPSLLLHQQLLHPSHLLLQQLLLQLLLHLLPLRFQLLLLRRQKLPLHLRRLARLSRRLMALDRASKGQDLPQIRMTRMEQARQFQAWYLDLFSFGL

SEQ ID NO: 55848 - protein, 190 aa, Glycine max
  peptide (1)..(190): Ceres Seq. ID no. 13595850
MARRFAIVAICIVLIAGVGGQAPSSPPTTTPAPPTTTTPPPAATPPPVSAPPPVTTSPPPATTAPPPATPPPVASPPPATPPPVATPPPATPPPVASPPPATPPPVASPPPATPPPAPLASPPAQVPALAPTTPEAPSTSPSSSPPLPATDGPGPSVEGPGPSTDSNDQNGASKTVSSLVLGSVLVWFMI

SEQ ID NO: 55849 - DNA, 1281 bp, Glycine max
  misc_feature (1)..(1281): Ceres Seq. ID no. 13595066
ctttttcttcagaaacagtaaaccaaaaactatccattgctttccccctagcgttttcttctcggtcgatcttcttctccaactcacactccggcgtctcttagtcgaccgaccgctccttcagcagagaaagtcattccggaaacatgccgggtcagaagattgaaacaggtcatgaggacatggtccatgatgtgcagatggactactacggaaagagagttgcaactgcctcatctgactgcaccatcaagataaccggcgtcagcaacaacggtggatcccagcacctagctacattaaccggccaccgtggtcccgtctggcaggtcgcgtgggcccaccctaagtttggatcattccttgcttcatgctcctatgacggtcaggtcatactctggaaagaaggcagccaaaaccagtggacccaagctcatgtcttcacggaccataaatcttcggtcaactccatcgcttgggctcctcatgacctcggactgtccttggcttgtgggtcatccgacggaaacatttcggtattcacaggccgtgctgatggtggttgggacacgacgaagatcgaccaagcgcatccggtyggagtcacttctgtctcatgggcaccagccactgcgcctggtgctcttgtcagctctggattgcttgatccggtttacaagctggcttccggtgggtgtgataatactgtgaaagtgtggaagctctcaaatgggtcgtggaagatggattgctttccggctcttcagaagcatactgattgggttcgtgatgtggcttgggcaccgaacttgggtctccctaagtccaccatagccagtggctcacaggatgggaaagtgatcatatggacagtggggaaagaaggtgagcagtgggaaggtaaggttctgaaggactttatgaccccggtgtggcgggtatcgtggtcgttgacaggtaacatgttggctgtgtccgatgggaacaacaacatgacggtgtggaaagaggctgttgatggagagtgggaacaggtcaccgttatggaatgatacgtttcgctatttactttactgaattaaagtctttttaaaaggatcctttttctcaggctggtttggtggtctatctgtgagggaatgtggatgtgtttttttcttcttcttaatttgggtttcggaacattttggtcattttcatctttcctagcgactttttcttttgtttttcctttttaaaaacactatcttcgtgaaatataatatcttagttttaaactgg

SEQ ID NO: 55850 - protein, 301 aa, Glycine max
  peptide (1)..(301): Ceres Seq. ID no. 15221470
  misc_feature (151)..(151): Xaa is any aa, unknown or other
MPGQKIETGHEDMVHDVQMDYYGKRVATASSDCTIKITGVSNNGGSQHLATLTGHRGPVWQVAWAHPKFGSFLASCSYDGQVILWKEGSQNQWTQAHVFTDHKSSVNSIAWAPHDLGLSLACGSSDGNISVFTGRADGGWDTTKIDQAHPXGVTSVSWAPATAPGALVSSGLLDPVYKLASGGCDNTVKVWKLSNGSWKMDCFPALQKHTDWVRDVAWAPNLGLPKSTIASGSQDGKVIIWTVGKEGEQWEGKVLKDFMTPVWRVSWSLTGNMLAVSDGNNNMTVWKEAVDGEWEQVTVME

SEQ ID NO: 55851 - protein, 289 aa, Glycine max
  peptide (1)..(289): Ceres Seq. ID no. 15221471
  misc_feature (139)..(139): Xaa is any aa, unknown or other
MVHDVQMDYYGKRVATASSDCTIKITGVSNNGGSQHLATLTGHRGPVWQVAWAHPKFGSFLASCSYDGQVILWKEGSQNQWTQAHVFTDHKSSVNSIAWAPHDLGLSLACGSSDGNISVFTGRADGGWDTTKIDQAHPXGVTSVSWAPATAPGALVSSGLLDPVYKLASGGCDNTVKVWKLSNGSWKMDCFPALQKHTDWVRDVAWAPNLGLPKSTIASGSQDGKVIIWTVGKEGEQWEGKVLKDFMTPVWRVSWSLTGNMLAVSDGNNNMTVWKEAVDGEWEQVTVME

SEQ ID NO: 55852 - protein, 283 aa, Glycine max
  peptide (1)..(283): Ceres Seq. ID no. 15221472
  misc_feature (133)..(133): Xaa is any aa, unknown or other
MDYYGKRVATASSDCTIKITGVSNNGGSQHLATLTGHRGPVWQVAWAHPKFGSFLASCSYDGQVILWKEGSQNQWTQAHVFTDHKSSVNSIAWAPHDLGLSLACGSSDGNISVFTGRADGGWDTTKIDQAHPXGVTSVSWAPATAPGALVSSGLLDPVYKLASGGCDNTVKVWKLSNGSWKMDCFPALQKHTDWVRDVAWAPNLGLPKSTIASGSQDGKVIIWTVGKEGEQWEGKVLKDFMTPVWRVSWSLTGNMLAVSDGNNNMTVWKEAVDGEWEQVTVME

SEQ ID NO: 55853 - DNA, 935 bp, Glycine max
  misc_feature (1)..(935): Ceres Seq. ID no. 12611082
attgttcacgtactgtgtcaagagcaaagagccaagagggtgcaattacatgagctgaaagaagtaacgcaaaagcccctttatttttaatggttagaacttagaagctgattgtgacaatggatgctcgtggagaagggtcttctacttcttactacaacgttcttggtgttagctcagattctaacgtggatgagattagacgtgcttataggaagctggctatgcaatggcatcctgataagtgcacaaggtcgccttctttgctgggtgaagctaagcgcaaattccagcaaattcaagaagcctattcagtgttgtctgatagtaagaaaagaactatgtatgatgcgggcttgtatgatcctcaagaggaagaggatgagggcttttctgattttgtggaagaaatgttgtcccatatggctcaagtgaggcgagagggaaagcattacggtttggaagagttgcagggcatgttaatggaaatggctaaaggatttgagtgtccttcaatgtattgtggggtgaactctgtgattgatgagtctccatgcgtaaagagaacgcgttttgacacaaacatgatggagaataaggggtcacatttccaagtacctgatcttaacctctattgcagttaagatgtttttcacggatcgatatcaagaaaaaacagatgggtagtgatgatgaattttggtagttattttcaacattttgacaatggatttatctgtacatattccttgtatggtgctaaattcccagggctttgtctcagtttttctagttgtaaatgatatatatcttctgaaggggaagagaggagaaaataatgattgagtagtttggaaattatgttttgagtaaggattttctgccacgggattgttcactttttgtatttctttgatttggataagaagttttgc

SEQ ID NO: 55854 - protein, 174 aa, Glycine max
  peptide (1)..(174): Ceres Seq. ID no. 12611083
MDARGEGSSTSYYNVLGVSSDSNVDEIRRAYRKLAMQWHPDKCTRSPSLLGEAKRKFQQIQEAYSVLSDSKKRTMYDAGLYDPQEEEDEGFSDFVEEMLSHMAQVRREGKHYGLEELQGMLMEMAKGFECPSMYCGVNSVIDESPCVKRTRFDTNMMENKGSHFQVPDLNLYCS

SEQ ID NO: 55855 - protein, 139 aa, Glycine max
  peptide (1)..(139): Ceres Seq. ID no. 12611084
MQWHPDKCTRSPSLLGEAKRKFQQIQEAYSVLSDSKKRTMYDAGLYDPQEEEDEGFSDFVEEMLSHMAQVRREGKHYGLEELQGMLMEMAKGFECPSMYCGVNSVIDESPCVKRTRFDTNMMENKGSHFQVPDLNLYCS

SEQ ID NO: 55856 - protein, 103 aa, Glycine max
  peptide (1)..(103): Ceres Seq. ID no. 12611085
MLVEKGLLLLTTTFLVLAQILTWMRLDVLIGSWLCNGILISAQGRLLCWVKLSANSSKFKKPIQCCLIVRKELCMMRACMILKRKRMRAFLILWKKCCPIWLK

SEQ ID NO: 55857 - DNA, 743 bp, Glycine max
  misc_feature (1)..(743): Ceres Seq. ID no. 13595067
attgttcctgcgtctccccccttccttccaaacagcggtgacctccaccacctccaccaccacccaagagccgagcgaggagaagagagaagaggagatcgaccatggctgcggacggcgggaggtgggtgggcctggcggtggacttctcggaggggagccgcgcggcgctgcagtgggcggcggacaacctgctccgcgccggcgacaacctgctcctcctgcacgtcctcaaggaccccgactacgagcagggcgagaccctcctctgggaggcctccggctcgcctttgatccccctctcggagttctctcacccttcaattgcaaagaagtatggtgtgaagcctgatgctgaaacgctggacatgctcaacactatagcgaagcagaaggaggttgccgtggtttccaaagtcctgtttggagatccccgcgagaagctgtgccaagccatccatgacatgcccatcagctccctggtcattgggagcaggggccttggcaagctcaagagggtgctcttgggcagcgtcagcgattacgtcgtgaacaacgccgcctgcccggtcaccgttgtcaagccagcgagtaaccatgcctgatctcatggtcgcaaatgtctacatgtgttttagtttgccggagtcctatatatccagttggccgcaacttattgaaccatccagtgttattcgtaataataattgacaattagcctgtggatgattcccaggttgtgc

SEQ ID NO: 55858 - protein, 166 aa, Glycine max
  peptide (1)..(166): Ceres Seq. ID no. 13595068
MAADGGRWVGLAVDFSEGSRAALQWAADNLLRAGDNLLLLHVLKDPDYEQGETLLWEASGSPLIPLSEFSHPSIAKKYGVKPDAETLDMLNTIAKQKEVAVVSKVLFGDPREKLCQAIHDMPISSLVIGSRGLGKLKRVLLGSVSDYVVNNAACPVTVVKPASNHA

SEQ ID NO: 55859 - protein, 116 aa, Glycine max
  peptide (1)..(116): Ceres Seq. ID no. 13595069
LFLRLPPSFQTAVTSTTSTTTQEPSEEKREEEIDHGCGRREVGGPGGGLLGGEPRGAAVGGGQPAPRRRQPAPPARPQGPRLRAGRDPPLGGLRLAFDPPLGVLSPFNCKEVWCEA

SEQ ID NO: 55860 - protein, 97 aa, Glycine max
  peptide (1)..(97): Ceres Seq. ID no. 13595070
IVPASPPFLPNSGDLHHLHHHPRAERGEERRGDRPWLRTAGGGWAWRWTSRRGAARRCSGRRTTCSAPATTCSSCTSSRTPTTSRARPSSGRPPARL

SEQ ID NO: 55861 - DNA, 972 bp, Glycine max
  misc_feature (1)..(972): Ceres Seq. ID no. 12610896
cgaaaaatcacattcaccttcaaacatcaaacatcacatctcttaaaagagtttctttgtatcaatggcaggtatcaaagttttcggacacgctgcttccatttccaccagaagagtcctcctcaccctccacgagaaaaacctcgactttgagctcgttcatgtcgacctcaaggacggtgagcacaagaaagagtctttcctatcccacaacccttttggtaaagttccggcctttgaagatggagacctcaaaatcttcgagtcaagagctatcactcagtacatagctcaccgatacgaaggccaaggaactaaccttctccagcccgactccaagaacctggcccactatgcaatcatggccatgggaatgcaagtagaagctcaccagttcgacccactggcttcaaagcttgcttgggaacatgtatttaagctcatctatggcttgaccacagaccaagccgttgttgccgaagaagaggctaagttagccaaggtccttaatgtatacgaggctcggctcaaggagttcaagtatttggctggtgacacttttactttgaccgatcttcaccacattcctgcggttcaatacttgcttgaaactcccaccaagaagcttttcaccgagcgtccacatgtcaacaagtgggtggctgagatcaccaagaggccagcttcacagaagatccttcagtgaggaatttctaaaaggctctgcttcagtaacagtaataatgctcagactaaataagtggctgcttcactgcccaatttctcattaatctgtttttctttctcagttatgtgtgtgtgtgttcttgagagatctttgttgaatcaaaaactatctatctaatctttaagctcttttataataaaaaggttagttaattaatacaaaggttgcaatgtcttaactgcaatgtcttaactgcagagttattactgagaatattatacatt

SEQ ID NO: 55862 - protein, 213 aa, Glycine max
  peptide (1)..(213): Ceres Seq. ID no. 12610897
MAGIKVFGHAASISTRRVLLTLHEKNLDFELVHVDLKDGEHKKESFLSHNPFGKVPAFEDGDLKIFESRAITQYIAHRYEGQGTNLLQPDSKNLAHYAIMAMGMQVEAHQFDPLASKLAWEHVFKLIYGLTTDQAVVAEEEAKLAKVLNVYEARLKEFKYLAGDTFTLTDLHHIPAVQYLLETPTKKLFTERPHVNKWVAEITKRPASQKILQ

SEQ ID NO: 55863 - protein, 114 aa, Glycine max
  peptide (1)..(114): Ceres Seq. ID no. 12610898
MAMGMQVEAHQFDPLASKLAWEHVFKLIYGLTTDQAVVAEEEAKLAKVLNVYEARLKEFKYLAGDTFTLTDLHHIPAVQYLLETPTKKLFTERPHVNKWVAEITKRPASQKILQ

SEQ ID NO: 55864 - protein, 112 aa, Glycine max
  peptide (1)..(112): Ceres Seq. ID no. 12610899
MGMQVEAHQFDPLASKLAWEHVFKLIYGLTTDQAVVAEEEAKLAKVLNVYEARLKEFKYLAGDTFTLTDLHHIPAVQYLLETPTKKLFTERPHVNKWVAEITKRPASQKILQ

SEQ ID NO: 55865 - DNA, 677 bp, Glycine max
  misc_feature (1)..(677): Ceres Seq. ID no. 12610904
atttttctagggttctgagattcaggagagagataacgaacagcaatggcgaatcaagtgatctccggaatcaaggaaacggttcaatcgatcaacggcgcggctcgtccatggggcgatttcctcgatctctccgctttcagcttcccgtcctccttctccgacgccacaactcgcctcactcagaaccttgctcatttccgcatcaactacaccatcatcctctccgtcctcctcgctctaaccttgatcacacgcccgatcgccatcctcgctttcgtagccgtcggcttagcttggttcttcctctatttcgctcgcgaggaggcgctcaccgtcttcgggttcaccgtcgacgatggcgtcgtggcggtgcttctcatcgttctaacgatcgcagcgctagttaccactggagtttggctcagtgctctcaccaccgttggattcggagctctggttttgatcttacacgcggcgctgagaggaacggaggatcttgtgacggatgatctggaatcgccttacggaccaatgctctctaccgccggcggagataacggtgattacagtgggatttgagctacatttggtgcttgtaactaaactctaattgttttctttgtgttcattattagacattgttcaagacgttaaggaatcaaatgaaagtttat

SEQ ID NO: 55866 - protein, 178 aa, Glycine max
  peptide (1)..(178): Ceres Seq. ID no. 12610905
MANQVISGIKETVQSINGAARPWGDFLDLSAFSFPSSFSDATTRLTQNLAHFRINYTIILSVLLALTLITRPIAILAFVAVGLAWFFLYFAREEALTVFGFTVDDGVVAVLLIVLTIAALVTTGVWLSALTTVGFGALVLILHAALRGTEDLVTDDLESPYGPMLSTAGGDNGDYSGI

SEQ ID NO: 55867 - protein, 169 aa, Glycine max
  peptide (1)..(169): Ceres Seq. ID no. 12610906
FSRVLRFRREITNSNGESSDLRNQGNGSIDQRRGSSMGRFPRSLRFQLPVLLLRRHNSPHSEPCSFPHQLHHHPLRPPRSNLDHTPDRHPRFRSRRLSLVLPLFRSRGGAHRLRVHRRRWRRGGASHRSNDRSASYHWSLAQCSHHRWIRSSGFDLTRGAERNGGSCDG

SEQ ID NO: 55868 - protein, 133 aa, Glycine max
  peptide (1)..(133): Ceres Seq. ID no. 12610907
MGRFPRSLRFQLPVLLLRRHNSPHSEPCSFPHQLHHHPLRPPRSNLDHTPDRHPRFRSRRLSLVLPLFRSRGGAHRLRVHRRRWRRGGASHRSNDRSASYHWSLAQCSHHRWIRSSGFDLTRGAERNGGSCDG

SEQ ID NO: 55869 - DNA, 1013 bp, Glycine max
  misc_feature (1)..(1013): Ceres Seq. ID no. 12610908
aaaatcgccttcgtctttccccgtcgtctccaccaacgccagtttttccccgtcgtctccaccaacgccagtccaaatccaaacccgaaggaggaagagaggctagctagctagggttccgcctcccgccggccggagagagggagagagaggatgacgacggcggcgcggccaacgtgggcgccagcgaagggcgggaacgagcagggcggcacgcgtatcttcgggccctccgggaagtactcctcccgcgacctcgccgcacacacctccctcaagcccagaaaagagggacaacaaactcaagaggaggtacagaagaggaatcttagggatgaacttgaggagcgtgaacgcaagcacttctcatccaaggataagtcctatgttgacgagagggaccggcgaaaaagttcaggcctgctcttagaaggttcaaaacgggatgaggataagatagttccacgtgaaattgatgcagatgactctgacgtggaactaaaaagtgatgatgaaagcgacgatgatgacgacgacgatgacactgaggcactaatggcagagcttgaaaggattaaaaaagaaagagccgaggacaggcttagaaaggagcgtcagcaagcagaagaagaggccaagatgaaggaggctgagctgatgcgaggaaacccactgatcaatatgaataattctggctccttcaatgtgaagagaaggtgggatgatgatgttgtattcaagaaccaggctcgtggagagactaagacaccgaaacggttcatcaatgacaccatcagaagtgatttccaccgcaagtttctgcataggtacatgaaatgatgctgctgtatgctttatgttgtctggacagtatgcatgctgaaagagcctgtgatgtttctgtattctgaagatcgatttgtatgacataactgtaacagctacgttatcttaatggtgatatgtttaccctgttcctaagagtaaagaaaagaacccactgcttgtgtatt

SEQ ID NO: 55870 - protein, 228 aa, Glycine max
  peptide (1)..(228): Ceres Seq. ID no. 12610909
MTTAARPTWAPAKGGNEQGGTRIFGPSGKYSSRDLAAHTSLKPRKEGQQTQEEVQKRNLRDELEERERKHFSSKDKSYVDERDRRKSSGLLLEGSKRDEDKIVPREIDADDSDVELKSDDESDDDDDDDDTEALMAELERIKKERAEDRLRKERQQAEEEAKMKEAELMRGNPLINMNNSGSFNVKRRWDDDVVFKNQARGETKTPKRFINDTIRSDFHRKFLHRYMK

SEQ ID NO: 55871 - DNA, 841 bp, Glycine max
  misc_feature (1)..(841): Ceres Seq. ID no. 13595230
aaccaagcagccgctgcaacatactgtacaattactttgcactagcaacacaacgctcttactgagctcatagcgtttgcacctgcccatcttaactagttgatcaccgcagcaatggcctccaccaacagctggacccacgagatcgagtcgtcggtcgcggcaccgcgcctgttccgtgccggcgtcatggactggcacactctggcacccaagctcgcgccccacatcgtcgccagcgcccaccccgtggagggcgaaggcggcatcggcagcgtcaggcagttcaacttcacctcagtcatgccctttaccctcatgaaggagaggcttgagttcctggacacagacaagtgtgagtgcaagtcgaccctcgtcgagggcggcggcatcgacacggcgatcgagactgcgacgtcgcacatcaaggtggagccggcggccaacggagggtgcttcgtgaaggtggactcgacgtacaagctgctgccaggcgtggaggtgaatgacgaaatcaccaaggccaaggaatccgtcaccgccatctttaaagccgccgatgcctacctcatcgccaaccctgacgcctacaactgaatcagttgagagggatcatatatgattatgatgtccctagtttgattcttttgtgctttcttcccgatgtaataaagctgctccatctctaagctacaaatagtaacgccgagggcgagagcaccgaggagagtgtggacgtgagaagttgaaaatttagtatttgtaactactaaaggggcctgtttgtttgatgatgttggtgcttgctttatgtgaaatacctaaacgctcttgttttctt

SEQ ID NO: 55872 - protein, 160 aa, Glycine max
  peptide (1)..(160): Ceres Seq. ID no. 13595231
MASTNSWTHEIESSVAAPRLFRAGVMDWHTLAPKLAPHIVASAHPVEGEGGIGSVRQFNFTSVMPFTLMKERLEFLDTDKCECKSTLVEGGGIDTAIETATSHIKVEPAANGGCFVKVDSTYKLLPGVEVNDEITKAKESVTAIFKAADAYLIANPDAYN

SEQ ID NO: 55873 - protein, 135 aa, Glycine max
  peptide (1)..(135): Ceres Seq. ID no. 13595232
MDWHTLAPKLAPHIVASAHPVEGEGGIGSVRQFNFTSVMPFTLMKERLEFLDTDKCECKSTLVEGGGIDTAIETATSHIKVEPAANGGCFVKVDSTYKLLPGVEVNDEITKAKESVTAIFKAADAYLIANPDAYN

SEQ ID NO: 55874 - protein, 97 aa, Glycine max
  peptide (1)..(97): Ceres Seq. ID no. 13595233
MPFTLMKERLEFLDTDKCECKSTLVEGGGIDTAIETATSHIKVEPAANGGCFVKVDSTYKLLPGVEVNDEITKAKESVTAIFKAADAYLIANPDAYN

SEQ ID NO: 55875 - DNA, 788 bp, Glycine max
  misc_feature (1)..(788): Ceres Seq. ID no. 13595288
gtgaagataagaagttgaatgcaacatatataatcagtgtcgcccgaaaacttgggtgttccattttcctgttacctgaggacataatagaggtcaaccagaagatgattctcattttagntgctagtataatgtattggagcctcaagaaacctgaagaaaacatcacccctgaagcatcgcctaaagcttcagtagatggtgaaagcgaaacagatttagttgatgaggtatcccatttagccattgacgaggtatccaatttagccattgatgatacaacttcggagaatgctagctcttcttaagttagtaaggttgaagcaaaccatacccaatggagaatgagcgggaaaaaacgcatttttgtttatagggcaaaaggaagatgccaacctcttggttcccagttcgaaagaaagcttattgttatgaaaaaccacagataatagaaggatcttgtaaattattctttagaatttttttgtacttaggcatattctttcatgaaaattgcatgcaaattttcccaataataatgtgggcggaaggcatcattttattttcggtctgattgttaagattattcttaatgcgtgcatacggatacgggttgaagtggatgaactgaaccagtaatgattatgcacttcatttaagtggtttttctatttcaagtctgggattcaagtataatacatgtagttgatgctatagcaattggagacctttatgccaaaaaaaaaaaaaaaaaatatcgataccgtcgacctcgagggggggcccgg

SEQ ID NO: 55876 - protein, 101 aa, Glycine max
  peptide (1)..(101): Ceres Seq. ID no. 13595289
  misc_feature (40)..(40): Xaa is any aa, unknown or other
EDKKLNATYIISVARKLGCSIFLLPEDIIEVNQKMILILXASIMYWSLKKPEENITPEASPKASVDGESETDLVDEVSHLAIDEVSNLAIDDTTSENASSS

SEQ ID NO: 55877 - protein, 67 aa, Glycine max
  peptide (1)..(67): Ceres Seq. ID no. 13595290
  misc_feature (6)..(6): Xaa is any aa, unknown or other
MILILXASIMYWSLKKPEENITPEASPKASVDGESETDLVDEVSHLAIDEVSNLAIDDTTSENASSS

SEQ ID NO: 55878 - protein, 61 aa, Glycine max
  peptide (1)..(61): Ceres Seq. ID no. 13595291
MPTSWFPVRKKAYCYEKPQIIEGSCKLFFRIFLYLGIFFHENCMQIFPIIMWAEGIILFSV

SEQ ID NO: 55879 - DNA, 818 bp, Glycine max
  misc_feature (1)..(818): Ceres Seq. ID no. 13595292
tactcatccccactcctgtcccccgtccactccgccgccgccgccgccgccgcgaattccgcccgcgtccaccgccgcgcgtcgccccggcggactccaggacctccggatcggagccccgcgcctcgccatggcggtcgccgcgctcaaggtgcagctgaacgcgctcctctccaacatgttcgccacgggtatggtggacgagcagttccagcagctgcagtcgctggaggaggggggcaccgcgtcgggcttcgtcgccgaggtcgccaccctcttcatcgaagacgccgaccggatcatcgcctacatcgccgccctgctggaccagcccgtggtggatttcgacaaggtggacgcccacgtgcaccagctcaaggggagcagctcgagtgttggtgctcagaaagtgaagctcgcctgcatgcacttccgccagttctatgaggcaaaaagcaaagaagggtgcctcatggcgctggctcttgttaggagcgagttctgtgatgtgcgcaacaagttccagaccatgatgcagctggagcagcagatcgaggcgtgcagtccgaagtagagtagcagtaactgaagcaaaaggagcttagctccctccgtgtgacccctgacatgatggggggcagtgtgtatgtatctctgaagcttgtaggcagtgtaacgggcgtcgggggctttggagggcgtgtgcgcggaaccgggccgaccgattcccgcggcggaactccgggctcgcgacccccttggaacggaacttgcttgtaccgtgtcaacgctatacctgtttgtgttgtgcccgccct

SEQ ID NO: 55880 - protein, 190 aa, Glycine max
  peptide (1)..(190): Ceres Seq. ID no. 15221525
THPHSCPPSTPPPPPPPRIPPASTAARRPGGLQDLRIGAPRLAMAVAALKVQLNALLSNMFATGMVDEQFQQLQSLEEGGTASGFVAEVATLFIEDADRIIAYIAALLDQPVVDFDKVDAHVHQLKGSSSSVGAQKVKLACMHFRQFYEAKSKEGCLMALALVRSEFCDVRNKFQTMMQLEQQIEACSPK

SEQ ID NO: 55881 - protein, 148 aa, Glycine max
  peptide (1)..(148): Ceres Seq. ID no. 15221526
YSSPLLSPVHSAAAAAAANSARVHRRASPRRTPGPPDRSPAPRHGGRRAQGAAERAPLQHVRHGYGGRAVPAAAVAGGGGHRVGLRRRGRHPLHRRRRPDHRLHRRPAGPARGGFRQGGRPRAPAQGEQLECWCSESEARLHALPPVL

SEQ ID NO: 55882 - protein, 147 aa, Glycine max
  peptide (1)..(147): Ceres Seq. ID no. 15221527
MAVAALKVQLNALLSNMFATGMVDEQFQQLQSLEEGGTASGFVAEVATLFIEDADRIIAYIAALLDQPVVDFDKVDAHVHQLKGSSSSVGAQKVKLACMHFRQFYEAKSKEGCLMALALVRSEFCDVRNKFQTMMQLEQQIEACSPK

SEQ ID NO: 55883 - DNA, 1245 bp, Glycine max
  misc_feature (1)..(1245): Ceres Seq. ID no. 12609965
aatcgaaaatctctctctctctctagcctctccattccgtgtggcgaccgagcgaaccctagccgagattagactaccatccccaatctaccggaggaggacgaggacgacgccgacgagatgctgagggttgcggggaggaggctctcgtcttcgctctcctggcgccccgtggcgaccgtcggagccaggggcccgctcgctggcgccggcggccctgggagagacgacgacgacggttcggcctaccagcggcggttcgccatcgagtcccccttcttcaccgccgcgagaggcttttcttcagctgaaacacttgttccacggaaccaagatgctgggttggctgaactcccagccactgttgctgcactgaagaaccccaactcaaaaatcctttatgaccagtacaaccatgaaagatatcctcctggagatcccagcaagcgtgcctttgcctactttgttctgagtggtgggagattcgtatatgcatcactgctgcgtctccttgtcttgaagtttgtcttgagcatgtcagcaagtaaggatgtgcttgcacttgcttcccttgaggttgatctatccagcattgaacccggtagcacagtgactgtcaagtggcgtggaaagccagtcttcatcaggcgacggacagacgatgacatcaagctggccaacagcgtggatgttgcatccctgcgccacccagagcaagacgctgagcgtgtgaagaacccagagtggctggtggttattggtgtctgcactcatcttggttgcattccccttcccaactctggagactttggtggctggttctgcccgtgccatggctcccactatgacatctctggcagaatccgcaagggccctgccccgtacaaccttgaggtgcccacctacagtttcttggaagataacaagatgctcataggctaagagcctaaaaccagtacctaccgacatatattatccacaggagtgaattcctgttgcgctgttattttgttttcaatgtggctaggagtttttgtttcaggactattgcaacggtgatccactgttacctactgaagttcatttgcagtgcgaaataattatttctcctatgttgctactggattgcaagttgttttgtactgattttctgagaccctatcggaaggatattgtatacctcttctggtccttgctacctatatatttgttaaataagcaaacatactattcttcatctgtgtc

SEQ ID NO: 55884 - protein, 273 aa, Glycine max
  peptide (1)..(273): Ceres Seq. ID no. 12609966
MLRVAGRRLSSSLSWRPVATVGARGPLAGAGGPGRDDDDGSAYQRRFAIESPFFTAARGFSSAETLVPRNQDAGLAELPATVAALKNPNSKILYDQYNHERYPPGDPSKRAFAYFVLSGGRFVYASLLRLLVLKFVLSMSASKDVLALASLEVDLSSIEPGSTVTVKWRGKPVFIRRRTDDDIKLANSVDVASLRHPEQDAERVKNPEWLVVIGVCTHLGCIPLPNSGDFGGWFCPCHGSHYDISGRIRKGPAPYNLEVPTYSFLEDNKMLIG

SEQ ID NO: 55885 - DNA, 798 bp, Glycine max
  misc_feature (1)..(798): Ceres Seq. ID no. 15178253
atattattccactcttaccctttctggctcagtcgctctcctctcaagtctcacttcaccgtaacgcgcatgcctttgtttgaagctagccttcgtcgaattcaatttgttttccctctcacgcggtcctaagtgctaacctgtatctgagtataacgtgggggaattgacccttagatgtcatatcttcctttaacagatacaaaatgccaaaagtaaagacaaaccgtgttacatacccagagggctgggaattaattgagcctactctccatgaacttcaagcaaagatgagggaagctgagaacgatccacatgatggcaagagaaactgtgagacattatggcctatatttaagattgcacaccagaagagccgctacatatttgacctctatcatcaaaggaaggagatttctaaagaattgtatgaattctgtttagatcaaggatatgctgaccacaatctaattgcaaaatggaagaagcctggttatgaacgtctatgctgcttggggtgtatgcagccacgcaatcacaattttgccaccacttgtgtttgcagagttcccaagaaccttagggaggagaaggttatagagtgtgttcattgtggttgcaagggctgtgctagcggggactgagtggacatcaattctattatcagttgccaaaaagggggtttcttaggattattttgttggtgtttttagcattctccagattgtgttaactatttactacatgaatactatactatgtaatgaaaaatattagttaattgttaactatctgcac

SEQ ID NO: 55886 - protein, 145 aa, Glycine max
  peptide (1)..(145): Ceres Seq. ID no. 15178254
MPKVKTNRVTYPEGWELIEPTLHELQAKMREAENDPHDGKRNCETLWPIFKIAHQKSRYIFDLYHQRKEISKELYEFCLDQGYADHNLIAKWKKPGYERLCCLGCMQPRNHNFATTCVCRVPKNLREEKVIECVHCGCKGCASGD

SEQ ID NO: 55887 - protein, 117 aa, Glycine max
  peptide (1)..(117): Ceres Seq. ID no. 15178255
MREAENDPHDGKRNCETLWPIFKIAHQKSRYIFDLYHQRKEISKELYEFCLDQGYADHNLIAKWKKPGYERLCCLGCMQPRNHNFATTCVCRVPKNLREEKVIECVHCGCKGCASGD

SEQ ID NO: 55888 - DNA, 989 bp, Glycine max
  misc_feature (1)..(989): Ceres Seq. ID no. 12610925
caattttcattccgaagtccctttcaacgagagagagggagagagagaggagcagttagttgagacccgagacggagatggatctgctggagaggagcgcagccactattaaggcggagcagggggaggcccagcgcaaggaagccgagaggaaggagcaggagcacaaggagcaggagacccagcagccagggctcaccggccgacccccgctcgccaacggcaggtctggaatgttgccaatgtcgagccctccagcaaatccgggacagcttaccattttttatggtgggtcagtatgtgtgtatgactcagtgccaccagagaaggctcaagcaatcatgctcattgcagcagcagcagctgcggcctcaaaaagcaatggcaccactgctgttaagcctccagcgatgtctgcgaccaatgctatccaagccatgcttacgcggtcgctctcactccagagcacttctgtagcaaatggacaacctcaggctgtcgcggatcctggctcgatttgcaagcttcaggctgatcttcccatcgccaggagacactcccttcagcgcttcctggagaagcgccgtgacagggtggtgagcaaagctccttacggcgccgggaagccatccgaaggcatgggagcatcttctgggatggaagtggtcgcggagggcaaggcccagtaaccatgaaagaagaaagacggccctgcccctgatgtttggaaggaaaggggcgtgtgttagctgatgtgatgttacaccgtagaaccatcatcgttcgtgacgataataatgatccgaccagaacctctattgtcattgttctgttgtcattgtgtagtttactctgtatctgaacttgttttggtctgcggaaccgtactgctatgatgaatgtgtcgatgatgtaaatcgtggctgtcgtgcctgtctgactgatacattgttatcgtagtcgataaatgatatcatctgtgccgtctc

SEQ ID NO: 55889 - protein, 203 aa, Glycine max
  peptide (1)..(203): Ceres Seq. ID no. 12610926
MDLLERSAATIKAEQGEAQRKEAERKEQEHKEQETQQPGLTGRPPLANGRSGMLPMSSPPANPGQLTIFYGGSVCVYDSVPPEKAQAIMLIAAAAAAASKSNGTTAVKPPAMSATNAIQAMLTRSLSLQSTSVANGQPQAVADPGSICKLQADLPIARRHSLQRFLEKRRDRVVSKAPYGAGKPSEGMGASSGMEVVAEGKAQ

SEQ ID NO: 55890 - protein, 151 aa, Glycine max
  peptide (1)..(151): Ceres Seq. ID no. 12610927
MLPMSSPPANPGQLTIFYGGSVCVYDSVPPEKAQAIMLIAAAAAAASKSNGTTAVKPPAMSATNAIQAMLTRSLSLQSTSVANGQPQAVADPGSICKLQADLPIARRHSLQRFLEKRRDRVVSKAPYGAGKPSEGMGASSGMEVVAEGKAQ

SEQ ID NO: 55891 - protein, 148 aa, Glycine max
  peptide (1)..(148): Ceres Seq. ID no. 12610928
MSSPPANPGQLTIFYGGSVCVYDSVPPEKAQAIMLIAAAAAAASKSNGTTAVKPPAMSATNAIQAMLTRSLSLQSTSVANGQPQAVADPGSICKLQADLPIARRHSLQRFLEKRRDRVVSKAPYGAGKPSEGMGASSGMEVVAEGKAQ

SEQ ID NO: 55892 - DNA, 1164 bp, Glycine max
  misc_feature (1)..(1164): Ceres Seq. ID no. 12610930
agacaataacccacggagagggttagaagacggcgaaatatccgcaacgagctcgtggaaatggcgacgacggtggtgccgctcgccgcggccatggccgccgctccaaggtctctcctcctgggcgctccagaccccttcccgttcctcgggatccgcccgctcctctgccgctctccgcgcggcgtcgcctgcgcccttcgccgaccttccaagtacaagaataaaattaagaacgaggtggtggtagcagaggatgacattgatggcagtgacgaggatgacgacgacgacgagggtgggttggaagcgcttttcaagcagctggaagaagatctgaagaacgacgatttgtctgtcgaggatgatgaaatatcagaggaagacatggccaggtttgaacaggtattggcagaagccattggagatgtcgatgttgctgatgaatctgcagtagatttggtgtcaggctccgaagttgttggtaatgatgaggcagcagatccagtcgaacggccagagcttaaaagctggcagctccggagattggctcgtgcaatgcaaattggtcggcgtaaaactagtataaagaatcttgcaggggagcttggcctggataggggtttggtcattgaattgctccgcaatccgcctccagaacttctacttatgtctgattctttgcctgatgaagccccctctaaacctgaaactaaggaaatagagccctctccagtagctgatgaggttgtagttgatgagattgatgccactgaagccaatccacagatggaccttccggttcatgtcatgagcacagaatggtctgcgcagaaaaggctgaaaaaggcgcaactggaaacactggaaaaggtttacttcaaatccaaacgccccactaatactatgatcagtagcatagttcaagttacaagccttccacgaaagaccattattaagtggtttgaggatagaagggagcaagatggtgtaccagaccgtcgtgccgcatacatgagatccctatctgagacaatggctagttgataacttcagataagcttgtgttatagtgttctcttttaggtctgaactacgtaggaatttgtaaattcaaactgtgaaatgcaaccagtttcataaggccaacacggcgtatctttc

SEQ ID NO: 55893 - protein, 328 aa, Glycine max
  peptide (1)..(328): Ceres Seq. ID no. 12610931
MATTVVPLAAAMAAAPRSLLLGAPDPFPFLGIRPLLCRSPRGVACALRRPSKYKNKIKNEVVVAEDDIDGSDEDDDDDEGGLEALFKQLEEDLKNDDLSVEDDEISEEDMARFEQVLAEAIGDVDVADESAVDLVSGSEVVGNDEAADPVERPELKSWQLRRLARAMQIGRRKTSIKNLAGELGLDRGLVIELLRNPPPELLLMSDSLPDEAPSKPETKEIEPSPVADEVVVDEIDATEANPQMDLPVHVMSTEWSAQKRLKKAQLETLEKVYFKSKRPTNTMISSIVQVTSLPRKTIIKWFEDRREQDGVPDRRAAYMRSLSETMAS

SEQ ID NO: 55894 - protein, 317 aa, Glycine max
  peptide (1)..(317): Ceres Seq. ID no. 12610932
MAAAPRSLLLGAPDPFPFLGIRPLLCRSPRGVACALRRPSKYKNKIKNEVVVAEDDIDGSDEDDDDDEGGLEALFKQLEEDLKNDDLSVEDDEISEEDMARFEQVLAEAIGDVDVADESAVDLVSGSEVVGNDEAADPVERPELKSWQLRRLARAMQIGRRKTSIKNLAGELGLDRGLVIELLRNPPPELLLMSDSLPDEAPSKPETKEIEPSPVADEVVVDEIDATEANPQMDLPVHVMSTEWSAQKRLKKAQLETLEKVYFKSKRPTNTMISSIVQVTSLPRKTIIKWFEDRREQDGVPDRRAAYMRSLSETMAS

SEQ ID NO: 55895 - protein, 219 aa, Glycine max
  peptide (1)..(219): Ceres Seq. ID no. 12610933
MARFEQVLAEAIGDVDVADESAVDLVSGSEVVGNDEAADPVERPELKSWQLRRLARAMQIGRRKTSIKNLAGELGLDRGLVIELLRNPPPELLLMSDSLPDEAPSKPETKEIEPSPVADEVVVDEIDATEANPQMDLPVHVMSTEWSAQKRLKKAQLETLEKVYFKSKRPTNTMISSIVQVTSLPRKTIIKWFEDRREQDGVPDRRAAYMRSLSETMAS

SEQ ID NO: 55896 - DNA, 864 bp, Glycine max
  misc_feature (1)..(864): Ceres Seq. ID no. 13582138
atggaagagaagagatcgatggagcaacccaccgatcgattcgccatggccacctttctgatcttcctcatacttgccctcgccgccggcagcagcaaccaaggaggagcagctgctgccgccgccggagcccgacctgaccttatcgtcatgaagctgcacggtcacgaccccgagggcccctccgtggccttccagacccacgacctctccttcgccggcttcaccaacgggggcggccactggcaggctttcccaggcctcgcccacctgttcccgacgtccacgcccctcccgttcggcagcagctacgacgacctcatcggcggcctcgccaacctgccgagggtgcctctggggcggcaggccatggccgacgccgcccgggtgctctccgcctacgacccgtccgcggccgcggccgccgacgtcgagccagtcaagcgcgcactggcagcgctcaaggtgatgctaggcgatgcccagcggctgcagcccatccacgagacggtcgttcgggggtgggagagcgagtcccgcgtcgcgcccgagcacctgccctacattgaccactgggacaccatctcctacgagatcatccgcgccaaccggacgggcaagtggaacgggcccttcgccaagatgctggaaacccaagccaacatccgcagccaggaggaggcgctcgccgtcgtccgggtgctgctccatgccgacttcgagcaggtgctccaggctcacggcaccaagatcaacttccagtgaacatgcatgcatgcatgcatgcttgctggcttagacttcagatttgtgctccatctcctattcgagtccatgtttctttaattaaccatgttcgttgtt

SEQ ID NO: 55897 - protein, 254 aa, Glycine max
  peptide (1)..(254): Ceres Seq. ID no. 13582139
MEEKRSMEQPTDRFAMATFLIFLILALAAGSSNQGGAAAAAAGARPDLIVMKLHGHDPEGPSVAFQTHDLSFAGFTNGGGHWQAFPGLAHLFPTSTPLPFGSSYDDLIGGLANLPRVPLGRQAMADAARVLSAYDPSAAAAADVEPVKRALAALKVMLGDAQRLQPIHETVVRGWESESRVAPEHLPYIDHWDTISYEIIRANRTGKWNGPFAKMLETQANIRSQEEALAVVRVLLHADFEQVLQAHGTKINFQ

SEQ ID NO: 55898 - protein, 248 aa, Glycine max
  peptide (1)..(248): Ceres Seq. ID no. 13582140
MEQPTDRFAMATFLIFLILALAAGSSNQGGAAAAAAGARPDLIVMKLHGHDPEGPSVAFQTHDLSFAGFTNGGGHWQAFPGLAHLFPTSTPLPFGSSYDDLIGGLANLPRVPLGRQAMADAARVLSAYDPSAAAAADVEPVKRALAALKVMLGDAQRLQPIHETVVRGWESESRVAPEHLPYIDHWDTISYEIIRANRTGKWNGPFAKMLETQANIRSQEEALAVVRVLLHADFEQVLQAHGTKINFQ

SEQ ID NO: 55899 - protein, 239 aa, Glycine max
  peptide (1)..(239): Ceres Seq. ID no. 13582141
MATFLIFLILALAAGSSNQGGAAAAAAGARPDLIVMKLHGHDPEGPSVAFQTHDLSFAGFTNGGGHWQAFPGLAHLFPTSTPLPFGSSYDDLIGGLANLPRVPLGRQAMADAARVLSAYDPSAAAAADVEPVKRALAALKVMLGDAQRLQPIHETVVRGWESESRVAPEHLPYIDHWDTISYEIIRANRTGKWNGPFAKMLETQANIRSQEEALAVVRVLLHADFEQVLQAHGTKINFQ

SEQ ID NO: 55900 - DNA, 823 bp, Glycine max
  misc_feature (1)..(823): Ceres Seq. ID no. 12611052
atctagtgaggctagtccagacagataaccacaagtcggaaaggaaaaccaggcgagatgaacgcacgcgacctcctcttctccggcttcgacatcgtcaagcaacaggcgagcgccgtggcctccaccgtctcgctggccaagccgtacctcccggcaaagctaaccgagatgaacacgggcaacatcgtcgccggtctcggctacgtcaagaaccatacaggagcggccgtggcctccaccgtttcgttggccaagccgtacctccccgcaaggcttaccgggatgaacaccggcgacatcgtcgcaggtctcggctacgtcaagaaccatacgggagcggccatggtctccaccgtctcgttggccaagccgtacctgcccgcaaagctctccacgcgggacggtgccgtgggaaccgcggcgatggtcatcgggggcgccgtgggcgcctacttcctctggcccgctgcggccgcccccgccgcggccggcgccatgatgaaggcgcctggtgccgccggcttcctcatctcccgcacggcgttcctggccaacccgcaggtctactaccagatcctccgcaccgctggcgccgcggcggccgccgccgctttcgtgtagggaagcaagcaaacgcgccccttggatctctcccccgtttgctttgtttcgcgtagtgtgtttaattaagcgtggttcgactatatggtggttcattccatctattctactgctgtatacagtatactccttgccgtgggagcgagagaagatgggggtgataataagcggtgcctcgtactcgtgtttgccattttcc

SEQ ID NO: 55901 - protein, 225 aa, Glycine max
  peptide (1)..(225): Ceres Seq. ID no. 12611053
LVRLVQTDNHKSERKTRRDERTRPPLLRLRHRQATGERRGLHRLAGQAVPPGKANRDEHGQHRRRSRLRQEPYRSGRGLHRFVGQAVPPRKAYRDEHRRHRRRSRLRQEPYGSGHGLHRLVGQAVPARKALHAGRCRGNRGDGHRGRRGRLLPLARCGRPRRGRRHDEGAWCRRLPHLPHGVPGQPAGLLPDPPHRWRRGGRRRFRVGKQANAPLGSLPRLLCFA

SEQ ID NO: 55902 - protein, 188 aa, Glycine max
  peptide (1)..(188): Ceres Seq. ID no. 12611054
MNARDLLFSGFDIVKQQASAVASTVSLAKPYLPAKLTEMNTGNIVAGLGYVKNHTGAAVASTVSLAKPYLPARLTGMNTGDIVAGLGYVKNHTGAAMVSTVSLAKPYLPAKLSTRDGAVGTAAMVIGGAVGAYFLWPAAAAPAAAGAMMKAPGAAGFLISRTAFLANPQVYYQILRTAGAAAAAAAFV

SEQ ID NO: 55903 - protein, 150 aa, Glycine max
  peptide (1)..(150): Ceres Seq. ID no. 12611055
MNTGNIVAGLGYVKNHTGAAVASTVSLAKPYLPARLTGMNTGDIVAGLGYVKNHTGAAMVSTVSLAKPYLPAKLSTRDGAVGTAAMVIGGAVGAYFLWPAAAAPAAAGAMMKAPGAAGFLISRTAFLANPQVYYQILRTAGAAAAAAAFV

SEQ ID NO: 55904 - DNA, 743 bp, Glycine max
  misc_feature (1)..(743): Ceres Seq. ID no. 12610934
aaacacaacacacaatccaagttaaagaaaccgttaaaaagaaaaaaaaaactacgctgtttcttgaaaatggagattgttaggttcgcggtcatttttgtactttgctccatctcgtcttccaacgccgcaattacaccgccgagcggcggagcaggagatgctcactcaatgccatgtatacaaaaactgatgccgtgtcagccgtatcttcactcggcgactcccccgcctccagcgtcgtgttgtatgccgttgaaggagatcgtcgagaccgacgtgaactgtctttgctccgtcttcaacaacgtagatatgcttaaatcgcttaaccttactaaagaaaacgctcttgttctccccaaagcttgtggcgccaacgctgatgtgtcacaatgcaaagccagcaccggtactacgacgccttcgacgtcaccgggaactactaaaactcctccggcatctcccgctgaaagcggatctaccggaggtccagcctcttcaacggccaaaccatcagactcggctcccgccatcaacttttctggaattagcttcgcctccgctttcgtggcattggcaacaatcttattctgatatcctactaattagtcacgtctttattcagcttagttggtttaaaatgttggaaactactattatcagacaatattcggtaactgatgagtattaatatgtactatgaaaattctaataatagtaataatttccaacagctcttt

SEQ ID NO: 55905 - protein, 198 aa, Glycine max
  peptide (1)..(198): Ceres Seq. ID no. 12610935
KHNTQSKLKKPLKRKKKLRCFLKMEIVRFAVIFVLCSISSSNAAITPPSGGAGDAHSMPCIQKLMPCQPYLHSATPPPPASCCMPLKEIVETDVNCLCSVFNNVDMLKSLNLTKENALVLPKACGANADVSQCKASTGTTTPSTSPGTTKTPPASPAESGSTGGPASSTAKPSDSAPAINFSGISFASAFVALATILF

SEQ ID NO: 55906 - protein, 175 aa, Glycine max
  peptide (1)..(175): Ceres Seq. ID no. 12610936
MEIVRFAVIFVLCSISSSNAAITPPSGGAGDAHSMPCIQKLMPCQPYLHSATPPPPASCCMPLKEIVETDVNCLCSVFNNVDMLKSLNLTKENALVLPKACGANADVSQCKASTGTTTPSTSPGTTKTPPASPAESGSTGGPASSTAKPSDSAPAINFSGISFASAFVALATILF

SEQ ID NO: 55907 - protein, 141 aa, Glycine max
  peptide (1)..(141): Ceres Seq. ID no. 12610937
MPCIQKLMPCQPYLHSATPPPPASCCMPLKEIVETDVNCLCSVFNNVDMLKSLNLTKENALVLPKACGANADVSQCKASTGTTTPSTSPGTTKTPPASPAESGSTGGPASSTAKPSDSAPAINFSGISFASAFVALATILF

SEQ ID NO: 55908 - DNA, 817 bp, Glycine max
  misc_feature (1)..(817): Ceres Seq. ID no. 13639161
aagttagtcagacaacgggccactctctcgcgcctttagaaaccacgagtacgtagatcaatcttgattgatttctctctccgtcccggccggccatgaggagctcagtgcacgtgccagccgcggtagaggcgctgctgggccacccggtggcggcactgtcggagaggccggcgccgcggctaacgcggctgctggtgaacgtgacggtggagcggagcctgtggccggtgcacgtgctgctgggcgccgatgccacggtggccgacctggcgcgcgccgccgtcgacgcctatgccgccgaggggcgcaggccgccgctccccaccgatgacggcgccaccgacgcggccgcgcggttcgaagctgcacctctccaagtacgccctcgacgctcttgacccggaagagaaggtgcttgacctgggctctcgcaacttcttcctttgcgccgccaggtcgacgctgggatcagatcatcatctgcgacttcgctcatcactgacatgtcttgatgtctgaaggaaaaaagtgtgtgccatgtaaaacgagttggcatgtcggcctatatatgtggagtatatataactcatgttcgatccttctttggttgatcggtctgccagatcctctgcatcagtgtgtacgtagtgttagcttaggtatacatacagttcggccaagcaacgatacatacagatacatgtccggcgtatttacgagctcaagatatgtacgtggcgacgctgtatgtatacagctgcaagatgcaacgtttatgtatgtacctagtgccatgatgttacgtttctggact

SEQ ID NO: 55909 - protein, 101 aa, Glycine max
  peptide (1)..(101): Ceres Seq. ID no. 13639162
MRSSVHVPAAVEALLGHPVAALSERPAPRLTRLLVNVTVERSLWPVHVLLGADATVADLARAAVDAYAAEGRRPPLPTDDGATDAAARFEAAPLQVRPRRS

SEQ ID NO: 55910 - protein, 101 aa, Glycine max
  peptide (1)..(101): Ceres Seq. ID no. 13639163
MSEGKKCVPCKTSWHVGLYMWSIYNSCSILLWLIGLPDPLHQCVRSVSLGIHTVRPSNDTYRYMSGVFTSSRYVRGDAVCIQLQDATFMYVPSAMMLRFWT

SEQ ID NO: 55911 - protein, 89 aa, Glycine max
  peptide (1)..(89): Ceres Seq. ID no. 13639164
MPRWPTWRAPPSTPMPPRGAGRRSPPMTAPPTRPRGSKLHLSKYALDALDPEEKVLDLGSRNFFLCAARSTLGSDHHLRLRSSLTCLDV

SEQ ID NO: 55912 - DNA, 1013 bp, Glycine max
  misc_feature (1)..(1013): Ceres Seq. ID no. 13595000
cgttctccgctcgccgccgcgccgcaatatcgtcgggaacatgagcggcgcgacgggcaccgccgacttcttctaccgggaggcgctgcgcctcggctacgtcgcccgctctgccttcaagctgatccagatacagaagcagcacaagctcatcgccccgggcgccgccgtgctcgacctcgggtgcgcccccggcgcgtggctccaggtggcctgccagaaccttggcccgctcgagaagggcggcctggtcgtcggcgtcgatgtcaagaaggtgaaggtcccctcagcgcactgcgactggcgggtcaggacggtctgcaccgatgtgatggctttgatgaagcagcaagccagggcgatgtcgccgcaggaacggggattttctgtgatattatccgacatgtgtccggtagtttcagggatcacaaccagagacgaagctatatcttgtgagctgggcatgcgtgcgctctcgttggcagttggtaagataaaggtcaaagaatcggccgactatcgtgagactatggagaggtttcagagctccacaggcccagatcctgatgaggacggtgttcttagacgtggaggcagcctagtaatcaagtttcttgagaacgaggatataccagggtttaacaaattttgcaaagagaagtttaagaaagtatctctcctgaggcctaaggcgacgaggtctagttcgagggagatctacatgatctgcgaagggttgcggtagaagattggccaccactcacctcccatgagatcttgcaagcttgtgctgagcagagtggctggaccaagaactctacaaatttgccggtgagctgtaggcgtgtaggcctgagatgatgctaacttcatcggcaattcatgattactgagttgaggaaactccgatggtatctctcctggaggtgatttggtttggtgcctttgttaaagaacagccgtattggctttgcgttcgtgcttttagaagaaaaaaggttgtacctgtctcg

SEQ ID NO: 55913 - protein, 247 aa, Glycine max
  peptide (1)..(247): Ceres Seq. ID no. 13595001
VLRSPPRRNIVGNMSGATGTADFFYREALRLGYVARSAFKLIQIQKQHKLIAPGAAVLDLGCAPGAWLQVACQNLGPLEKGGLVVGVDVKKVKVPSAHCDWRVRTVCTDVMALMKQQARAMSPQERGFSVILSDMCPVVSGITTRDEAISCELGMRALSLAVGKIKVKESADYRETMERFQSSTGPDPDEDGVLRRGGSLVIKFLENEDIPGFNKFCKEKFKKVSLLRPKATRSSSREIYMICEGLR

SEQ ID NO: 55914 - protein, 234 aa, Glycine max
  peptide (1)..(234): Ceres Seq. ID no. 13595002
MSGATGTADFFYREALRLGYVARSAFKLIQIQKQHKLIAPGAAVLDLGCAPGAWLQVACQNLGPLEKGGLVVGVDVKKVKVPSAHCDWRVRTVCTDVMALMKQQARAMSPQERGFSVILSDMCPVVSGITTRDEAISCELGMRALSLAVGKIKVKESADYRETMERFQSSTGPDPDEDGVLRRGGSLVIKFLENEDIPGFNKFCKEKFKKVSLLRPKATRSSSREIYMICEGLR

SEQ ID NO: 55915 - protein, 151 aa, Glycine max
  peptide (1)..(151): Ceres Seq. ID no. 13595003
RSPLAAAPQYRREHERRDGHRRLLLPGGAAPRLRRPLCLQADPDTEAAQAHRPGRRRARPRVRPRRVAPGGLPEPWPAREGRPGRRRRCQEGEGPLSALRLAGQDGLHRCDGFDEAASQGDVAAGTGIFCDIIRHVSGSFRDHNQRRSYIL

SEQ ID NO: 55916 - DNA, 1153 bp, Glycine max
  misc_feature (1)..(1153): Ceres Seq. ID no. 13595190
atcaccggtttcgaaatccatccatccaaaccagcggaagaagaagaaaagaaaaagagaaaaatccacgcgaaagggcgagcgcaggacagggacgaacaaccttgcgtgcgaggcgaggccgctccgattcgacagacgcaggcgcagcgcagggatggacgccttctactcgacctcgtcggcggcggccagcggatggggctacgactccctcaagaacttccgcgagatctcccccgccgtgcagtcccacctcaagctcgtttacctgaccctatgctttgccctggcctcatctgccgtgggtgcttacctgcacattgccctgaacattggcgggatgctgacaatgctcgcgtgtatcggaaccatcgcctggatgttctcggtgccagtctatgaggagaggaagaggtttgggctgctgatgggtgcagccctcctggaaggggcttcagttggacctctgattgagcttgccatagactttgacccaagcatcctcgtgacagggtttgtcggaaccgccatcgccttcgggtgcttctctggcgccgccatcatcgccaagcgcagggagtacctgtacctcggcggcctgctctcctctggcctgtcgatcctgctctggctgcagtttgccacgtccatctttggccactcctctggcagcttcatgtttgaggtttactttggcctgttgatcttcctggggtacatggtgtacgacacgcaggagatcatcgagagggcgcaccacggtgacatggactacatcaagcacgcgctcaccctcttcaccgacttcgtcgccgtcctcgtccgcatcctcatcatcatgctcaagaacgcaggcgacaagtcggaggacaagaagaagtggaagaggaggtcctgaacgtgtcctctgcacatcgtagataccatcaccaccgcgctactggtaccaccaccactgctaagtacttgtaggaattaagctggcgcagtaacttggcgccgtgccacccttgttaattcgcgctcgtgtgaacattgtgtgagtttgatgctgctgatgaagcatttgcagatgctgtctgcgttccggatctcttgtgttcctgttaccgtcacgataatagaaacctgagacgatttggtttggttc

SEQ ID NO: 55917 - protein, 299 aa, Glycine max
  peptide (1)..(299): Ceres Seq. ID no. 13595191
SPVSKSIHPNQRKKKKRKREKSTRKGERRTGTNNLACEARPLRFDRRRRSAGMDAFYSTSSAAASGWGYDSLKNFREISPAVQSHLKLVYLTLCFALASSAVGAYLHIALNIGGMLTMLACIGTIAWMFSVPVYEERKRFGLLMGAALLEGASVGPLIELAIDFDPSILVTGFVGTAIAFGCFSGAAIIAKRREYLYLGGLLSSGLSILLWLQFATSIFGHSSGSFMFEVYFGLLIFLGYMVYDTQEIIERAHHGDMDYIKHALTLFTDFVAVLVRILIIMLKNAGDKSEDKKKWKRRS

SEQ ID NO: 55918 - protein, 247 aa, Glycine max
  peptide (1)..(247): Ceres Seq. ID no. 13595192
MDAFYSTSSAAASGWGYDSLKNFREISPAVQSHLKLVYLTLCFALASSAVGAYLHIALNIGGMLTMLACIGTIAWMFSVPVYEERKRFGLLMGAALLEGASVGPLIELAIDFDPSILVTGFVGTAIAFGCFSGAAIIAKRREYLYLGGLLSSGLSILLWLQFATSIFGHSSGSFMFEVYFGLLIFLGYMVYDTQEIIERAHHGDMDYIKHALTLFTDFVAVLVRILIIMLKNAGDKSEDKKKWKRRS

SEQ ID NO: 55919 - protein, 185 aa, Glycine max
  peptide (1)..(185): Ceres Seq. ID no. 13595193
MLTMLACIGTIAWMFSVPVYEERKRFGLLMGAALLEGASVGPLIELAIDFDPSILVTGFVGTAIAFGCFSGAAIIAKRREYLYLGGLLSSGLSILLWLQFATSIFGHSSGSFMFEVYFGLLIFLGYMVYDTQEIIERAHHGDMDYIKHALTLFTDFVAVLVRILIIMLKNAGDKSEDKKKWKRRS

SEQ ID NO: 55920 - DNA, 960 bp, Glycine max
  misc_feature (1)..(960): Ceres Seq. ID no. 12611101
aacaaacacatcttcctctcagtactcgtcgtctctctactctattcttcttctctgacaaaagccaatacctgccccttgcaatatcatgggtcatgaatgtatcgatgcatcaaaggagttcaagtggggtgaggacgtcaaaagtgaagtgactgagattgttcttgttcgccatggagaaaccacttggaatgctgctggaagaatccagggacaaattgaatcggatcttaacgaaattggacaaaagcaggctgttgcaatcgctgagagattaggaaaagaggagagacccatagctatatattcatcagacctcaagcgagccaaagacactgctctcaagatcgcggaaacttgtttttgttccaaggtgactgaagtgcccgagttaaaggagaggcatgtgggtagtctccaagggttgtattggaaagaaggagcagagaaagaacctgaagcttactctgctttcttttcttcccaaaatgacctcgagattcctggaggaggagagagctttgaccaactttgtgagaggtccatgaatgcccttgagcgaattgcaaagaagcacaaaggggagagagtgatagtagtgactcatggaggagtgttaagggcaatctacatgaggatcacgcaagcttcctctgctgggaaactccttaatgcttcagtgaatgttgttcacttcagtgacgagaaatggatcattgattcatggagcgatgtttctcatctctcatcagttggattcctccaacgtggcttcgatggtgacgccaagccctagaggaccatcatccattctctagatctcctccataaataatattctctgtggtgcgtttaagatacgaagtgtttccattggtgcggtcgatgttcttgtggaaaagttgtttatctttttgtattttgcattaatcgattaataataaagctctcttcttg

SEQ ID NO: 55921 - protein, 236 aa, Glycine max
  peptide (1)..(236): Ceres Seq. ID no. 12611102
MGHECIDASKEFKWGEDVKSEVTEIVLVRHGETTWNAAGRIQGQIESDLNEIGQKQAVAIAERLGKEERPIAIYSSDLKRAKDTALKIAETCFCSKVTEVPELKERHVGSLQGLYWKEGAEKEPEAYSAFFSSQNDLEIPGGGESFDQLCERSMNALERIAKKHKGERVIVVTHGGVLRAIYMRITQASSAGKLLNASVNVVHFSDEKWIIDSWSDVSHLSSVGFLQRGFDGDAKP

SEQ ID NO: 55922 - DNA, 820 bp, Glycine max
  misc_feature (1)..(820): Ceres Seq. ID no. 13595350
atcgctaatctcgtcattcgtctctcgaatccttaaaaagaaccgtaggaagaaacaatggatccagctgagatgaggtacttggaagaagaggacggccccatgatgaagaccatcaaaggcagcgtgactggtttcgccgccgggaccatctacggaaccattttggccacgtggaaagacgttccgagggtggagaggaacgtggctcttccggggctcatcagaaccctgaagatgatgggaactcacgggctcactttcgccgccattggaggagtttacatcggtgttgagcaggtggttcagggttatagaggcaagagagattttttcaatggtgctattggtgggtttgttgctggagcttctgtccttggctatagagcaaggagcatcccaacagcgatagctgcaggtgcaacactagcggttacatctgctttgattgactctggaggtcagaccacaagagtagacaacggcagagagtattatccttacgctcccgttgagaaaacagctaaagctgatgcttgatctctcttttggcgttcggaactcttaataaagctctgcatctgcttatcatgggctcttgagatcatctctcttccctgtcctctctatttttttgttttgtttctggagatataaaattgctcttgtttcctcctgtgtttatggagagtgacttacatcttttgtctgaacttttccttgcaataaaaaatcaactttgttttcaaaaaaaaaaaaaaaaaagcttatcgataccgtcgacctgtttaaacacaataaagtkggaactggagggggg

SEQ ID NO: 55923 - protein, 160 aa, Glycine max
  peptide (1)..(160): Ceres Seq. ID no. 15221551
MDPAEMRYLEEEDGPMMKTIKGSVTGFAAGTIYGTILATWKDVPRVERNVALPGLIRTLKMMGTHGLTFAAIGGVYIGVEQVVQGYRGKRDFFNGAIGGFVAGASVLGYRARSIPTAIAAGATLAVTSALIDSGGQTTRVDNGREYYPYAPVEKTAKADA

SEQ ID NO: 55924 - protein, 155 aa, Glycine max
  peptide (1)..(155): Ceres Seq. ID no. 15221552
MRYLEEEDGPMMKTIKGSVTGFAAGTIYGTILATWKDVPRVERNVALPGLIRTLKMMGTHGLTFAAIGGVYIGVEQVVQGYRGKRDFFNGAIGGFVAGASVLGYRARSIPTAIAAGATLAVTSALIDSGGQTTRVDNGREYYPYAPVEKTAKADA

SEQ ID NO: 55925 - protein, 145 aa, Glycine max
  peptide (1)..(145): Ceres Seq. ID no. 15221553
MMKTIKGSVTGFAAGTIYGTILATWKDVPRVERNVALPGLIRTLKMMGTHGLTFAAIGGVYIGVEQVVQGYRGKRDFFNGAIGGFVAGASVLGYRARSIPTAIAAGATLAVTSALIDSGGQTTRVDNGREYYPYAPVEKTAKADA

SEQ ID NO: 55926 - DNA, 805 bp, Glycine max
  misc_feature (1)..(805): Ceres Seq. ID no. 12610699
aaaaagaatcattcaaatgaaatggtggttcagaaatgggggaaggaggagcctccctttctctctgtgtgtatgggttgcgagaaggagtagaaccatgcgttcagacgcggcgttggaagccatagccaaagcttcagaagacagagttcccaacatagttctctacaactacccttccttttctggagcatactctgctctctttgctcacctcttctacactcaccacaatctcccttccctcatattacccttctcttcggttccccttctcgctctcagggttgaagatttgtgctttgaaggcctggagacgtgttatctacttgactttattcctccgaaggaattccttttcgacctttctcgtaaatcaaaatgcaagattattgggtttgatcatcggaaatcggtacttggacatattccccctgccaatgattgccctgagaatattatgattaatgtaaatcttgagaagagtagctccagtgttgtttatgagtactttgccggcaaatgtgaggatgctaatatttctaatggtgaggctccatgtttggtggactcaaaagacaaaggccgagtggagccttccaaaattttggtttgttctgctgcttttgttttgttcctcatccctgaaggacgtcttatttcaagttataaaagttctactagatgaaaagataaagtagtcaggtgatcctgtgatatatttgttctcttatctatcgaaatctgctggaataataagcatttagatcaaaaaaaaaaaaaaatatcgataccgtcgacctcg

SEQ ID NO: 55927 - protein, 228 aa, Glycine max
  peptide (1)..(228): Ceres Seq. ID no. 12610700
KRIIQMKWWFRNGGRRSLPFSLCVWVARRSRTMRSDAALEAIAKASEDRVPNIVLYNYPSFSGAYSALFAHLFYTHHNLPSLILPFSSVPLLALRVEDLCFEGLETCYLLDFIPPKEFLFDLSRKSKCKIIGFDHRKSVLGHIPPANDCPENIMINVNLEKSSSSVVYEYFAGKCEDANISNGEAPCLVDSKDKGRVEPSKILVCSAAFVLFLIPEGRLISSYKSSTR

SEQ ID NO: 55928 - protein, 223 aa, Glycine max
  peptide (1)..(223): Ceres Seq. ID no. 12610701
MKWWFRNGGRRSLPFSLCVWVARRSRTMRSDAALEAIAKASEDRVPNIVLYNYPSFSGAYSALFAHLFYTHHNLPSLILPFSSVPLLALRVEDLCFEGLETCYLLDFIPPKEFLFDLSRKSKCKIIGFDHRKSVLGHIPPANDCPENIMINVNLEKSSSSVVYEYFAGKCEDANISNGEAPCLVDSKDKGRVEPSKILVCSAAFVLFLIPEGRLISSYKSSTR

SEQ ID NO: 55929 - protein, 196 aa, Glycine max
  peptide (1)..(196): Ceres Seq. ID no. 12610702
MRSDAALEAIAKASEDRVPNIVLYNYPSFSGAYSALFAHLFYTHHNLPSLILPFSSVPLLALRVEDLCFEGLETCYLLDFIPPKEFLFDLSRKSKCKIIGFDHRKSVLGHIPPANDCPENIMINVNLEKSSSSVVYEYFAGKCEDANISNGEAPCLVDSKDKGRVEPSKILVCSAAFVLFLIPEGRLISSYKSSTR

SEQ ID NO: 55930 - DNA, 743 bp, Glycine max
  misc_feature (1)..(743): Ceres Seq. ID no. 12610954
atagactctttcatttcctcttttctttgtgtactaacatttttttgttcaaatccatttgctcctttagacaccgatctccttcatggctccgattgctgtcggtagtgttttaccagacggaaaaattttcctctttgacgagaacgatcagctccagacggtcaccgttcactctctcttggctggtaagaaggtcattctctttggtgtccccggtgctttcacttccgcctgcagcttgcagcatgtgcctagtttcattgagaaagcggaccagctgaaagcaaagggtgttaatgagataatatgctatggcatgaatgatccgtatgtgatgaaagcatggggaaagacattcccagagaacaagcatgtcaagtttgtctcagacggctcaggagaatacacaaagctcctcggactggagcttgaccttaaggacaaaggtcttggtattaggacaaggagatttgctatgttgctcgataacctcaaggtgactgtcgccaacattgaaacaggtggcgagttcacggtttctagcgccgaggatatcctcaaggctctctaagaaactaccatgtgaaagtagaggatctctagcctgattttcagaataagaagttggcataataaattagttttagttgtttaattcctctttctaattataataacgtactagtttttgaaggcccggtttgtttccaaagtttaataaatttttaataaatttctct

SEQ ID NO: 55931 - protein, 162 aa, Glycine max
  peptide (1)..(162): Ceres Seq. ID no. 12610955
MAPIAVGSVLPDGKIFLFDENDQLQTVTVHSLLAGKKVILFGVPGAFTSACSLQHVPSFIEKADQLKAKGVNEIICYGMNDPYVMKAWGKTFPENKHVKFVSDGSGEYTKLLGLELDLKDKGLGIRTRRFAMLLDNLKVTVANIETGGEFTVSSAEDILKAL

SEQ ID NO: 55932 - protein, 93 aa, Glycine max
  peptide (1)..(93): Ceres Seq. ID no. 12610956
RLFHFLFSLCTNIFLFKSICSFRHRSPSWLRLLSVVFYQTEKFSSLTRTISSRRSPFTLSWLVRRSFSLVSPVLSLPPAACSMCLVSLRKRTS

SEQ ID NO: 55933 - protein, 84 aa, Glycine max
  peptide (1)..(84): Ceres Seq. ID no. 12610957
MNDPYVMKAWGKTFPENKHVKFVSDGSGEYTKLLGLELDLKDKGLGIRTRRFAMLLDNLKVTVANIETGGEFTVSSAEDILKAL

SEQ ID NO: 55934 - DNA, 1453 bp, Glycine max
  misc_feature (1)..(1453): Ceres Seq. ID no. 13595351
agaaccacaagcagttagcaccccgcattgtttctctgtagatcactaacaggttgtagagagagagagagagagagagagagagagagagaggaggaaggagggagagatggggagggatcagcaggcaggtgtaggtgcaggcgcggcggcggcgcaccgggagaaggtgaagctgttcatgggggtgctggcgctgcagttcctgctcgccggcttccacatcgtcagccgggcggcgctcaacatgggcatcagcaagctcgtcttcatcgtctaccgcaacgtcatctccctcgccctcctcgcccccttcgcctacttcctcgagaagaaggaccggccgccgctcaccttctcgctgctggcggagttcttcgtgctggcgctcatcgggatcacggcgaaccaggggttctacctgctggggctgtaccacctgtcgccgacctacgcgtcggcgatccagaacatggtgccagccatcaccttcgtgctggccacggtcctccggctggagcaggtggacctgggccggcggcacggggtggccaaggtggtgggcaccgtggtgagcatcggcggcgccacggtgatcacgctctacaagggcctgccgctcttcagccacaacctgcacgtgcaggccgtcctctcctggacctccggcagccccatcttcaactggaccctaggctgcgtcttcatcctcggccactgcctctcctggtccggctggatggtgctccaggtgccggtgctcaagcggtacccggcgaggctgtcggtcatctcgctcacctgcgtcttcgggctgctccagttcctcgtcatcgccgccttcaccgaggaggacctcagccggtggaaggtgcagtccggcggggagctgttcaccatcctctacgcggggctggtggcctccggcgtggcgttcgcgctgcagatctggtgcatcgaccgcggcggcccgctcttcaccgccgtgttccagcccgtgcagaccgtcgccgtcgccgtcatggccgccgtcatcctcggcgaccagctctacaccggagggatcatcggcgcggtgctgatcgtcatcgggctctacttcgtgctgtggggcaagagcgaggagaagaagacgaggagccaagacccggagatggcgaggcgcctgctcggggaagacggcggcgcagctgacaaagatcagcaagtgagcaccactgtcctggcgtgaaagctgctgcttgctggatttggagatgtgtgtactgatgtgggtgtttgtacctacgtttttaactagtgtttcaagcgtgcgaccaagaagaagaagactcgtactagttgacgatgtgaactgccaaacacactcagtcatatttggtacctactgtgtatagccccttgtcttcgagttgtgtgtgtgtctataaatacactatgctccctaattttc

SEQ ID NO: 55935 - protein, 373 aa, Glycine max
  peptide (1)..(373): Ceres Seq. ID no. 13595352
MGRDQQAGVGAGAAAAHREKVKLFMGVLALQFLLAGFHIVSRAALNMGISKLVFIVYRNVISLALLAPFAYFLEKKDRPPLTFSLLAEFFVLALIGITANQGFYLLGLYHLSPTYASAIQNMVPAITFVLATVLRLEQVDLGRRHGVAKVVGTVVSIGGATVITLYKGLPLFSHNLHVQAVLSWTSGSPIFNWTLGCVFILGHCLSWSGWMVLQVPVLKRYPARLSVISLTCVFGLLQFLVIAAFTEEDLSRWKVQSGGELFTILYAGLVASGVAFALQIWCIDRGGPLFTAVFQPVQTVAVAVMAAVILGDQLYTGGIIGAVLIVIGLYFVLWGKSEEKKTRSQDPEMARRLLGEDGGAADKDQQVSTTVLA

SEQ ID NO: 55936 - protein, 349 aa, Glycine max
  peptide (1)..(349): Ceres Seq. ID no. 13595353
MGVLALQFLLAGFHIVSRAALNMGISKLVFIVYRNVISLALLAPFAYFLEKKDRPPLTFSLLAEFFVLALIGITANQGFYLLGLYHLSPTYASAIQNMVPAITFVLATVLRLEQVDLGRRHGVAKVVGTVVSIGGATVITLYKGLPLFSHNLHVQAVLSWTSGSPIFNWTLGCVFILGHCLSWSGWMVLQVPVLKRYPARLSVISLTCVFGLLQFLVIAAFTEEDLSRWKVQSGGELFTILYAGLVASGVAFALQIWCIDRGGPLFTAVFQPVQTVAVAVMAAVILGDQLYTGGIIGAVLIVIGLYFVLWGKSEEKKTRSQDPEMARRLLGEDGGAADKDQQVSTTVLA

SEQ ID NO: 55937 - protein, 327 aa, Glycine max
  peptide (1)..(327): Ceres Seq. ID no. 13595354
MGISKLVFIVYRNVISLALLAPFAYFLEKKDRPPLTFSLLAEFFVLALIGITANQGFYLLGLYHLSPTYASAIQNMVPAITFVLATVLRLEQVDLGRRHGVAKVVGTVVSIGGATVITLYKGLPLFSHNLHVQAVLSWTSGSPIFNWTLGCVFILGHCLSWSGWMVLQVPVLKRYPARLSVISLTCVFGLLQFLVIAAFTEEDLSRWKVQSGGELFTILYAGLVASGVAFALQIWCIDRGGPLFTAVFQPVQTVAVAVMAAVILGDQLYTGGIIGAVLIVIGLYFVLWGKSEEKKTRSQDPEMARRLLGEDGGAADKDQQVSTTVLA

SEQ ID NO: 55938 - DNA, 889 bp, Glycine max
  misc_feature (1)..(889): Ceres Seq. ID no. 12610385
aacctttttttctctcgtctccaattttctcagcttctgctggatctctccagcagagacgatccttcctacgggactgtttgatcaatcaaggcttctcgggcaaacaggtgaatagaagtgagattaggctatgtgggttttgtatgttttacagatttgctattgaaggttcatttctaagaaggaagaaatggaccacgacaagacaggatgccaaagcccacctgaaggtcccaagctatgcatcaacaactgcggtttcttcggaagctctgccacaatgaacatgtgttccaagtgtcacaaggctatcctgtttcaacaggaacagggggctaggtttgcatctgcagtgtctggtggtacatcttcatccagcaacatcttaaaggaaacctttgctgctaccgcgctggttgatgctgaaaccaaatccgttgagccggtggctgtctctttacagccatcttctgtccaagtcgtcgtcgcagaggtagtagctccagaagcagctgcatcaataccaaaggaaggaccaagccgatgtgctacttgcaataaacgggttggtctgactggattcaaatgtcgctgcggtgacctcttctgcgggacgcaccgctatgcagacatacacaactgctccttcaattaccatgccgctgcgcaagaagctatagctaaagcaaacccggttgtgaaggcagagaagcttgacaaaatctgaagaactcaaacaccaaagtgatagactacgacctccttaggagcatttagaattggaaaagaaggtttagaattttacatatttgttattattgcctactaaggtgtttactcctataagagggagacatttgattctaataaaatcatccattaagag

SEQ ID NO: 55939 - protein, 178 aa, Glycine max
  peptide (1)..(178): Ceres Seq. ID no. 12610386
MDHDKTGCQSPPEGPKLCINNCGFFGSSATMNMCSKCHKAILFQQEQGARFASAVSGGTSSSSNILKETFAATALVDAETKSVEPVAVSLQPSSVQVVVAEVVAPEAAASIPKEGPSRCATCNKRVGLTGFKCRCGDLFCGTHRYADIHNCSFNYHAAAQEAIAKANPVVKAEKLDKI

SEQ ID NO: 55940 - protein, 148 aa, Glycine max
  peptide (1)..(148): Ceres Seq. ID no. 12610387
MNMCSKCHKAILFQQEQGARFASAVSGGTSSSSNILKETFAATALVDAETKSVEPVAVSLQPSSVQVVVAEVVAPEAAASIPKEGPSRCATCNKRVGLTGFKCRCGDLFCGTHRYADIHNCSFNYHAAAQEAIAKANPVVKAEKLDKI

SEQ ID NO: 55941 - protein, 146 aa, Glycine max
  peptide (1)..(146): Ceres Seq. ID no. 12610388
MCSKCHKAILFQQEQGARFASAVSGGTSSSSNILKETFAATALVDAETKSVEPVAVSLQPSSVQVVVAEVVAPEAAASIPKEGPSRCATCNKRVGLTGFKCRCGDLFCGTHRYADIHNCSFNYHAAAQEAIAKANPVVKAEKLDKI

SEQ ID NO: 55942 - DNA, 977 bp, Glycine max
  misc_feature (1)..(977): Ceres Seq. ID no. 12610391
aagggttttttaagttcttgaaatcttctcgatcgaaggattccaaatgggttcggtttcgggtcaaacccgaattgctacgatgagcctctccctctcctcatcagagaagagctctaataatcgctcctcctcgcttctcaatcctaagaacgcagtttcagatagttacggggtctcttccaaatgcagcacattcctcaggggccagttccaaagaatacaactctcttatactcgccacactcgacctttgccaaaacgtgcaggccacgttgtgtctccgagctgcgtcatgccgttgacggaagagaatgtggagagagtgctcgacgaagtacgccccgcgttgatggcagacggaggaaacgtggcgctgcatgagatcgacggactcgtggtggttcttaagctacaaggagcttgtggttcgtgtcccagctcgtcgatgacgttaaagatgggaatcgagagtcgtctccgcgacaagattccggagatcatgtccgtcgagcagtttcttgaagcggagactggagggttggagctcaacgaggaaaacatcgaaaaggttctcgctgagctacggccttacctatcgggaacaggaggtggagggcttgagcttgttgagatcgatggttatatagttaagattcggctcactggaccagctgctggagtcatgacggttcgtgtcgcgttgactcagaaactgagggaaaacattccttcaataggtgcagtccagcttctagagtgaccactttttgtattgttcatctacgagagcctatatttcgattatatgtacatcattttcaaatctaacatccataccattcagttcctggtggctcttgtgttggctctcatttttgtcatatgctaagtctagatccataggctctcatctcataagtagaccttggattcatccaggttacgttctatatacaagtaactgagtttaatcc

SEQ ID NO: 55943 - protein, 238 aa, Glycine max
  peptide (1)..(238): Ceres Seq. ID no. 12610392
MGSVSGQTRIATMSLSLSSSEKSSNNRSSSLLNPKNAVSDSYGVSSKCSTFLRGQFQRIQLSYTRHTRPLPKRAGHVVSPSCVMPLTEENVERVLDEVRPALMADGGNVALHEIDGLVVVLKLQGACGSCPSSSMTLKMGIESRLRDKIPEIMSVEQFLEAETGGLELNEENIEKVLAELRPYLSGTGGGGLELVEIDGYIVKIRLTGPAAGVMTVRVALTQKLRENIPSIGAVQLLE

SEQ ID NO: 55944 - protein, 226 aa, Glycine max
  peptide (1)..(226): Ceres Seq. ID no. 12610393
MSLSLSSSEKSSNNRSSSLLNPKNAVSDSYGVSSKCSTFLRGQFQRIQLSYTRHTRPLPKRAGHVVSPSCVMPLTEENVERVLDEVRPALMADGGNVALHEIDGLVVVLKLQGACGSCPSSSMTLKMGIESRLRDKIPEIMSVEQFLEAETGGLELNEENIEKVLAELRPYLSGTGGGGLELVEIDGYIVKIRLTGPAAGVMTVRVALTQKLRENIPSIGAVQLLE

SEQ ID NO: 55945 - protein, 155 aa, Glycine max
  peptide (1)..(155): Ceres Seq. ID no. 12610394
MPLTEENVERVLDEVRPALMADGGNVALHEIDGLVVVLKLQGACGSCPSSSMTLKMGIESRLRDKIPEIMSVEQFLEAETGGLELNEENIEKVLAELRPYLSGTGGGGLELVEIDGYIVKIRLTGPAAGVMTVRVALTQKLRENIPSIGAVQLLE

SEQ ID NO: 55946 - DNA, 777 bp, Glycine max
  misc_feature (1)..(777): Ceres Seq. ID no. 12612272
actacaaacagcctggtagcatatctgtctcgtggggcatcgtgtcaaccagacaccaccgtgcgtgtcagccatgtcgctcatgccttggttcggcggtggccggggagggatggaccccttctcctccgacctctgggaccccttcggctctccttggcccttggaccgcagccgccgcgaaggcggcagccgggacgacgcaaccgccatggctcgcaccaacgtcgactggcatgagaacgacaaagagcacattttctccgcagagatccccggggtgaggaaggaggacgtgaaggtggaggtggaggacggcaacgtgctcaagatcagcggggagaagacgcgggaggaggagcacaagggcgacgcctggaaccgcgtggagcgcagcttcgggtccttcatgcgccggttccgcctgccggagaacgccaaggcggacagcatccggtgcaccatgctggacggcgtgctcagggtcgtcgttcccaaggacgaggaggcacagaagcagcgcaacgtccgctccatcgacatagcataaaggctaaaagcaccgcgccgtgacaatgccatctcctcttttattagcgtgtactcgtggtagtaatctgtatcgtgtgttctactttagcagtaatgctaggttattctgtacggtagtttagaagtgtgctttatgcgccatatagctgctacggcatatggcacttttaatcgtgttgagtccaagaatttactactagtggacgagcatccatcgtaaactgc

SEQ ID NO: 55947 - protein, 158 aa, Glycine max
  peptide (1)..(158): Ceres Seq. ID no. 12612273
MSLMPWFGGGRGGMDPFSSDLWDPFGSPWPLDRSRREGGSRDDATAMARTNVDWHENDKEHIFSAEIPGVRKEDVKVEVEDGNVLKISGEKTREEEHKGDAWNRVERSFGSFMRRFRLPENAKADSIRCTMLDGVLRVVVPKDEEAQKQRNVRSIDIA

SEQ ID NO: 55948 - protein, 155 aa, Glycine max
  peptide (1)..(155): Ceres Seq. ID no. 12612274
MPWFGGGRGGMDPFSSDLWDPFGSPWPLDRSRREGGSRDDATAMARTNVDWHENDKEHIFSAEIPGVRKEDVKVEVEDGNVLKISGEKTREEEHKGDAWNRVERSFGSFMRRFRLPENAKADSIRCTMLDGVLRVVVPKDEEAQKQRNVRSIDIA

SEQ ID NO: 55949 - protein, 145 aa, Glycine max
  peptide (1)..(145): Ceres Seq. ID no. 12612275
MDPFSSDLWDPFGSPWPLDRSRREGGSRDDATAMARTNVDWHENDKEHIFSAEIPGVRKEDVKVEVEDGNVLKISGEKTREEEHKGDAWNRVERSFGSFMRRFRLPENAKADSIRCTMLDGVLRVVVPKDEEAQKQRNVRSIDIA

SEQ ID NO: 55950 - DNA, 708 bp, Glycine max
  misc_feature (1)..(708): Ceres Seq. ID no. 13582188
atttttcgaaaaatggcctgaaaaataataattaaattgagaccattccaataagtgttaattaactgggagaaccaacccgcaaggctgccgaagatcttacggaaccttggatgcgtttgcttgtgttgtgtgattccgggaataaatgatccgattcatattgttgcagaacagacaaggcaagactcgtcttgcaaagtactatgttcctctcgaggagtccgagaaacacaaggttgaatacgaggttcatagattggtggtcaatcgcgactcgaagttcaccaatttcgtcgagtttagaacgcataaggttatataccggagatatgcagggttgtttttctcattgtgcgttgacataacagacaatgagttggcttaccttgaatgcatccacttgttcgttgagattttggaccatttcttcagcaatgtctgtgagcttgatttggttttcaacttccacaaggtgtacttaatactggatgaattcattcttgctggagagcttcaagaaacaagcaagcgggcgatcattgagaggatgtcagaactggagaagctcgagtaatgaggttgggatattatatgatagtcaagaatgaaaatgagcagtatgagtcttcctttttgctcctctctgttatgttctgtctaccttaaacacacaccttttcattttgatttattaaaactctaatg

SEQ ID NO: 55951 - protein, 142 aa, Glycine max
  peptide (1)..(142): Ceres Seq. ID no. 13582189
MIRFILLQNRQGKTRLAKYYVPLEESEKHKVEYEVHRLVVNRDSKFTNFVEFRTHKVIYRRYAGLFFSLCVDITDNELAYLECIHLFVEILDHFFSNVCELDLVFNFHKVYLILDEFILAGELQETSKRAIIERMSELEKLE

SEQ ID NO: 55952 - DNA, 1310 bp, Glycine max
  misc_feature (1)..(1310): Ceres Seq. ID no. 13639177
atttcccttcatccgtcggcctttgagagtccacccgaccagccgccgcgccgcgcgcagcaggagcccctcgacggcggccgtcggcgctagggttcttcacgtccaccttcgtaccttagccttctcgctattctcgttccgtcctccggatacccaccctctcttgccgtgtttctgccgaggcagcggaatctcccccgatggaggcggccgccgtcgcttcctccggccccgggctgcgctgcgcgcttaaccccgccccgaaccagcataggaaaggcgcgcgcttgagcttaccggccaagagtcagcagcgctgcgccgtcacttgcgggcgcttgctgctccgccccaacgctcgcgtatgcacggcggcatcggcatcggcatcgacggtgatggatagcggggctggggactccggggtgaggaggaagaggctcgcggtgttcgtctcaggcgggggctcgaacttccggtcgatccacgaggccgttctgggtgggaaggtgaacggggatgttgttgcgctcgtcaccgataagccaggctgcggtggcgcggagtatgcaaggtgcaatggcatgcccgtggtcgtgtttcccaagtcgaaatcggcgccggagggggtctccacagatgaacttctgaatgttctgagggatctgaaggtagactttattctacttgctggttacttgaagctcatacctggtgagctagttaagtcatttcccagatccatgctgaatatacatccttcactgctcccggcatttggaggcaagggttattatggtttgaaagtgcataaagcagttattgcatctggagccagatactcaggaccaactgtgcactttgtggatgagcagttcgacacagggaaaaccttggcccaaagagttgtgccagtgttagccaatgatactccagagcaattggctgcaagggttcttcacgaggagcaccaagtttacgttgaggcagttgctgccttgtgtgaggatcgaattgtgtggcgagacgatggtgtcccacttatcagaagtcagacaaaccccaatgcgtatacctaattcgtgatctctgtcctgagatctcctgaaaactaatgaagtttgtagtgtccgcaccaagtgccagttttcgccacggcatgtagtcaacacacaccgtttgtctgattgagtgaaataacatgtctaataatctggtcccagaaacataatgtgtaccttgcactgtgtttaactcattgtatggcttggcttcgatgataatctgtgcctgaaataacatttctg

SEQ ID NO: 55953 - protein, 292 aa, Glycine max
  peptide (1)..(292): Ceres Seq. ID no. 13639178
MEAAAVASSGPGLRCALNPAPNQHRKGARLSLPAKSQQRCAVTCGRLLLRPNARVCTAASASASTVMDSGAGDSGVRRKRLAVFVSGGGSNFRSIHEAVLGGKVNGDVVALVTDKPGCGGAEYARCNGMPVVVFPKSKSAPEGVSTDELLNVLRDLKVDFILLAGYLKLIPGELVKSFPRSMLNIHPSLLPAFGGKGYYGLKVHKAVIASGARYSGPTVHFVDEQFDTGKTLAQRVVPVLANDTPEQLAARVLHEEHQVYVEAVAALCEDRIVWRDDGVPLIRSQTNPNAYT

SEQ ID NO: 55954 - protein, 226 aa, Glycine max
  peptide (1)..(226): Ceres Seq. ID no. 13639179
MDSGAGDSGVRRKRLAVFVSGGGSNFRSIHEAVLGGKVNGDVVALVTDKPGCGGAEYARCNGMPVVVFPKSKSAPEGVSTDELLNVLRDLKVDFILLAGYLKLIPGELVKSFPRSMLNIHPSLLPAFGGKGYYGLKVHKAVIASGARYSGPTVHFVDEQFDTGKTLAQRVVPVLANDTPEQLAARVLHEEHQVYVEAVAALCEDRIVWRDDGVPLIRSQTNPNAYT

SEQ ID NO: 55955 - protein, 164 aa, Glycine max
  peptide (1)..(164): Ceres Seq. ID no. 13639180
MPVVVFPKSKSAPEGVSTDELLNVLRDLKVDFILLAGYLKLIPGELVKSFPRSMLNIHPSLLPAFGGKGYYGLKVHKAVIASGARYSGPTVHFVDEQFDTGKTLAQRVVPVLANDTPEQLAARVLHEEHQVYVEAVAALCEDRIVWRDDGVPLIRSQTNPNAYT

SEQ ID NO: 55956 - DNA, 1021 bp, Glycine max
  misc_feature (1)..(1021): Ceres Seq. ID no. 15177112
gtgacagaaatgagcaacgaaatccggttcttcgagctaaacactggagctaatatcccttcactagggctgggaacttggctggctgatcctggtgttgttggtgatgttatagctcatgccgtcgaggttggttatcgccatattgattgtgctcaaatttacggcaatcaggaggagattggtttagcattaaagaagttatttgaagagggtgtagtcaagcgagaagatttatggatcacctctaaactctggtgtacagatcatgctccagaagatgtaccagaagctctggacagaacattgagagacttgcaacttgattatatagatttataccttattcactggccaattcgaatgaagaagggttcagtgggctttaaggctgaaaacattgtgccatcagacatacctaacacttggaaggcaatggaagctttgaataaaagtggcaaggctagagctataggtgtaagcaatttctcaactaagaagttgggagaattgcttgagtatgctcgtgttactcctgcggttaaccagtcagagtgtcatcctgcatggaggcaggacaagttgaaggccttttgcaaatctaagggtgtccacttctctggatattcacctttgggttcccctgcctggcttgaaggtgatttccttaaccatccagttataaatatgatcgcaaagaaattaggaaagactccagcacaggtagctcttcgatggggactgcaaatgggccatagtgtgcttcccaagagttctaatccagcaaggataaaggaaaactttgatatttttgactggtccattcctgaggacatgcttgataaattttttgagattcaacaggaaagattactcaaggctagcttcttccatgaaccaaatgggggttacttaccagaagacgaattgtgggatgggggtatatgaaaagtcggttgaatgattagttaaaaaagtggatggaataaaagaaacgcatcttctgtttggggtgttaggc

SEQ ID NO: 55957 - protein, 315 aa, Glycine max
  peptide (1)..(315): Ceres Seq. ID no. 15177113
VTEMSNEIRFFELNTGANIPSLGLGTWLADPGVVGDVIAHAVEVGYRHIDCAQIYGNQEEIGLALKKLFEEGVVKREDLWITSKLWCTDHAPEDVPEALDRTLRDLQLDYIDLYLIHWPIRMKKGSVGFKAENIVPSDIPNTWKAMEALNKSGKARAIGVSNFSTKKLGELLEYARVTPAVNQSECHPAWRQDKLKAFCKSKGVHFSGYSPLGSPAWLEGDFLNHPVINMIAKKLGKTPAQVALRWGLQMGHSVLPKSSNPARIKENFDIFDWSIPEDMLDKFFEIQQERLLKASFFHEPNGGYLPEDELWDGGI

SEQ ID NO: 55958 - protein, 312 aa, Glycine max
  peptide (1)..(312): Ceres Seq. ID no. 15177114
MSNEIRFFELNTGANIPSLGLGTWLADPGVVGDVIAHAVEVGYRHIDCAQIYGNQEEIGLALKKLFEEGVVKREDLWITSKLWCTDHAPEDVPEALDRTLRDLQLDYIDLYLIHWPIRMKKGSVGFKAENIVPSDIPNTWKAMEALNKSGKARAIGVSNFSTKKLGELLEYARVTPAVNQSECHPAWRQDKLKAFCKSKGVHFSGYSPLGSPAWLEGDFLNHPVINMIAKKLGKTPAQVALRWGLQMGHSVLPKSSNPARIKENFDIFDWSIPEDMLDKFFEIQQERLLKASFFHEPNGGYLPEDELWDGGI

SEQ ID NO: 55959 - protein, 194 aa, Glycine max
  peptide (1)..(194): Ceres Seq. ID no. 15177115
MKKGSVGFKAENIVPSDIPNTWKAMEALNKSGKARAIGVSNFSTKKLGELLEYARVTPAVNQSECHPAWRQDKLKAFCKSKGVHFSGYSPLGSPAWLEGDFLNHPVINMIAKKLGKTPAQVALRWGLQMGHSVLPKSSNPARIKENFDIFDWSIPEDMLDKFFEIQQERLLKASFFHEPNGGYLPEDELWDGGI

SEQ ID NO: 55960 - DNA, 1082 bp, Glycine max
  misc_feature (1)..(1082): Ceres Seq. ID no. 13639033
attgtgtggatgaggacagtgtagtgtagtgccattgagaagcattaatgatactagttagccatatccaagctccttgcgtaggagccatgttttcaaagtgttgttctctattgtctctacccaaattcatcactgttacaaacccaccaacgttttccaaccctgtacctaatttcatcactagaagaataagctccacaagaccctttcatctcacactcgccaaagcagagggaaacctcgattcagattcaccctcaacctccacttcttctccttctccttctccttttgccactgaccaaacggttttcgtgactggcaaggatgttccattggagggtgtcatccagttcgagaaaccagcctcttctcctccttttgaaaaatgggggcgtgtggctctgctagctggtgcggatgtgttggccttgtttgtgttttcgacaattggaagatatagtcatggactttctgttttggaccttgagacaccgcgcactgctgacccttttattgcggggtggtttttgggtgcttacttccttggaggttttggggaggatggccgcgggatgaacggtctctcgaagggtgtcgttgctactgcgaagtcatgggctgttgggatccctataggaatagtaataaaggcagcaacatcgggtcatctaccgaattatggttttgtatttgtgagtctgggaagcactgctgttttacttgttacattcagagcattattatatactattcttccagttgacaatagtaagaagagcgatgactatcgccgcggcagtccctttgaactctttgagctgctaacatcattagtacggcggtggtagcaatggtttgcatgttcaaggcaccataatgtgtatgcatctaaacatcagtttccatcgctagtctccttgtactatctgctcgtatgaaaaaagtaagagtagatgtttactgcagttgaattttattcaactaaatgtgtatactattattacacctttgatcaatcaaaagtgcattaactaccaaaaaaaaaaaaaaaaaatcaagattcgcacgagaccatt

SEQ ID NO: 55961 - protein, 268 aa, Glycine max
  peptide (1)..(268): Ceres Seq. ID no. 13639034
MILVSHIQAPCVGAMFSKCCSLLSLPKFITVTNPPTFSNPVPNFITRRISSTRPFHLTLAKAEGNLDSDSPSTSTSSPSPSPFATDQTVFVTGKDVPLEGVIQFEKPASSPPFEKWGRVALLAGADVLALFVFSTIGRYSHGLSVLDLETPRTADPFIAGWFLGAYFLGGFGEDGRGMNGLSKGVVATAKSWAVGIPIGIVIKAATSGHLPNYGFVFVSLGSTAVLLVTFRALLYTILPVDNSKKSDDYRRGSPFELFELLTSLVRRW

SEQ ID NO: 55962 - protein, 254 aa, Glycine max
  peptide (1)..(254): Ceres Seq. ID no. 13639035
MFSKCCSLLSLPKFITVTNPPTFSNPVPNFITRRISSTRPFHLTLAKAEGNLDSDSPSTSTSSPSPSPFATDQTVFVTGKDVPLEGVIQFEKPASSPPFEKWGRVALLAGADVLALFVFSTIGRYSHGLSVLDLETPRTADPFIAGWFLGAYFLGGFGEDGRGMNGLSKGVVATAKSWAVGIPIGIVIKAATSGHLPNYGFVFVSLGSTAVLLVTFRALLYTILPVDNSKKSDDYRRGSPFELFELLTSLVRRW

SEQ ID NO: 55963 - DNA, 746 bp, Glycine max
  misc_feature (1)..(746): Ceres Seq. ID no. 12610958
aaaagtcaaaacactctagtcagcaatgtggagcgtcaccggagctttgtgcgtggcggtgcctaccgccgccgcattccgtccaaaaccctttctcgtctcctctaaccttctccccaaccagacgaagaagctccatctctctcctcggcagcctccggctctatcatcacatttctcctcgtcttctttcaaaaccgccgctacttccgttcaacaacagtcagatgataaaaagggggagaagggcactaagtactacttccttgttgcaaacgctaagttcatgctcgacgaggaggagcactttcaggagcaactgtttgaacgtcttagatactacggagagcgtgacaaggaacaagacttctggctcgtcattgagcctaggttcctcgacaagttccccaacatcactcagagactccgtcgccctgctgttgctcttgtttccaccaatggcccctggatcacgtttatgaagttgagattggatcgagttctagctgaatcatttgaagcttcatctctggatgaagccttggcctctagtcctacaactctagagttcgaccagcctggaaactgggtggctccgtacccaaagtatgaacctggatggtgggacaccttcttgcccaaagcaaaacaagaatctctagcatagaactttgtccacctttgtcttagtgctttgtagtttgtattactgagcttcttgtgttatccaaatatgattgcaaccc

SEQ ID NO: 55964 - protein, 213 aa, Glycine max
  peptide (1)..(213): Ceres Seq. ID no. 12610959
MWSVTGALCVAVPTAAAFRPKPFLVSSNLLPNQTKKLHLSPRQPPALSSHFSSSSFKTAATSVQQQSDDKKGEKGTKYYFLVANAKFMLDEEEHFQEQLFERLRYYGERDKEQDFWLVIEPRFLDKFPNITQRLRRPAVALVSTNGPWITFMKLRLDRVLAESFEASSLDEALASSPTTLEFDQPGNWVAPYPKYEPGWWDTFLPKAKQESLA

SEQ ID NO: 55965 - protein, 159 aa, Glycine max
  peptide (1)..(159): Ceres Seq. ID no. 12610960
KSKHSSQQCGASPELCAWRCLPPPHSVQNPFSSPLTFSPTRRRSSISLLGSLRLYHHISPRLLSKPPLLPFNNSQMIKRGRRALSTTSLLQTLSSCSTRRSTFRSNCLNVLDTTESVTRNKTSGSSLSLGSSTSSPTSLRDSVALLLLLFPPMAPGSRL

SEQ ID NO: 55966 - protein, 126 aa, Glycine max
  peptide (1)..(126): Ceres Seq. ID no. 12610961
MLDEEEHFQEQLFERLRYYGERDKEQDFWLVIEPRFLDKFPNITQRLRRPAVALVSTNGPWITFMKLRLDRVLAESFEASSLDEALASSPTTLEFDQPGNWVAPYPKYEPGWWDTFLPKAKQESLA

SEQ ID NO: 55967 - DNA, 711 bp, Glycine max
  misc_feature (1)..(711): Ceres Seq. ID no. 12611129
acgagaaacaggagagattttttgcagatctcaacaacatttgtaggtgacgatggcgcttcgtgctactcaatcgactgctcgcatggcggcgaatctccgacgcgtggctcggcctttctcaacagacgcggtggtggagtcggattacaagcgtggcgagatcggcaaggtctccggaatcccagaggagcatctcgcacgaaaggtgataatatactcgcctgcaagaacagcgacccagcaaggatctgggaaacttgggaaatggaagattaacttcgtctccaccctcaagtgggaaaatccattgatgggctggacttctactggtgacccttatgccaatgttggggactccgctcttggttttgattctgagctagctgccaagtcctttgctgagcgtcatggctgggactatgtggtcaaggagcccaaaacaccgttattgaaggccaagtcatactcggacaacttcaagtggaaaggcaaacctcaactagagaactgatctccttcttcttcttcttccatttctcgaacaaaaggagaagcccccacttgatataaagaaaggctctcattttttattcgctatttaccatctgtgagctttttttctgaactattatccatggttggattctcttttttttttttaattccttataacaataatatgatgatgatgatgacaaacagttcttt

SEQ ID NO: 55968 - protein, 153 aa, Glycine max
  peptide (1)..(153): Ceres Seq. ID no. 12611130
MALRATQSTARMAANLRRVARPFSTDAVVESDYKRGEIGKVSGIPEEHLARKVIIYSPARTATQQGSGKLGKWKINFVSTLKWENPLMGWTSTGDPYANVGDSALGFDSELAAKSFAERHGWDYVVKEPKTPLLKAKSYSDNFKWKGKPQLEN

SEQ ID NO: 55969 - protein, 142 aa, Glycine max
  peptide (1)..(142): Ceres Seq. ID no. 12611131
MAANLRRVARPFSTDAVVESDYKRGEIGKVSGIPEEHLARKVIIYSPARTATQQGSGKLGKWKINFVSTLKWENPLMGWTSTGDPYANVGDSALGFDSELAAKSFAERHGWDYVVKEPKTPLLKAKSYSDNFKWKGKPQLEN

SEQ ID NO: 55970 - protein, 92 aa, Glycine max
  peptide (1)..(92): Ceres Seq. ID no. 12611132
TRNRRDFLQISTTFVGDDGASCYSIDCSHGGESPTRGSAFLNRRGGGVGLQAWRDRQGLRNPRGASRTKGDNILACKNSDPARIWETWEMED

SEQ ID NO: 55971 - DNA, 741 bp, Glycine max
  misc_feature (1)..(741): Ceres Seq. ID no. 13595072
acagaccagagcacaatcccctatgttagctccagttccttaaatagctccatcctccacacgtctcaaaccatctccacactcttcagttttcattgtttggagaacacacaatacacctcccaccttagcagcgcaatggcgaccaccaccatgtccctctcctcgaccttcgccggcaagtcggtgaagaacgtggcttcatcagctctctttggtgaggcccgtgtcactatgcgcaagaccgctgcaaaggccaagccggtttcatcaggcagcccatggtacggtgccgaccgtgtgctctacctcggcccgctttccggagagcccccgagctacttgaccggcgagttccccggcgactacggatgggacaccgccgggctctcggccgaccccgagacctttgccaagaaccgggagctcgaggtgatccactgccggtgggccatgctcggtgcgcttggatgtgtcttccccgagcttcttgcacgcaacggcgtcaagttcggcgaggcggtatggttcaaggccggttcccagatcttcagcgagggtggcctcgactacctgggcaaccccagcctcgtgcacgcacaaagcatccttgctatctgggcatgccaagtcgtgctcatgggcgctgttgaggggtaccgcattgctggcggcccactcggtgaggtagtcgacccactctacctgtttaaacacaataaagttggaacgggagggggg

SEQ ID NO: 55972 - protein, 247 aa, Glycine max
  peptide (1)..(247): Ceres Seq. ID no. 13595073
TDQSTIPYVSSSSLNSSILHTSQTISTLFSFHCLENTQYTSHLSSAMATTTMSLSSTFAGKSVKNVASSALFGEARVTMRKTAAKAKPVSSGSPWYGADRVLYLGPLSGEPPSYLTGEFPGDYGWDTAGLSADPETFAKNRELEVIHCRWAMLGALGCVFPELLARNGVKFGEAVWFKAGSQIFSEGGLDYLGNPSLVHAQSILAIWACQVVLMGAVEGYRIAGGPLGEVVDPLYLFKHNKVGTGGG

SEQ ID NO: 55973 - protein, 201 aa, Glycine max
  peptide (1)..(201): Ceres Seq. ID no. 13595074
MATTTMSLSSTFAGKSVKNVASSALFGEARVTMRKTAAKAKPVSSGSPWYGADRVLYLGPLSGEPPSYLTGEFPGDYGWDTAGLSADPETFAKNRELEVIHCRWAMLGALGCVFPELLARNGVKFGEAVWFKAGSQIFSEGGLDYLGNPSLVHAQSILAIWACQVVLMGAVEGYRIAGGPLGEVVDPLYLFKHNKVGTGGG

SEQ ID NO: 55974 - protein, 196 aa, Glycine max
  peptide (1)..(196): Ceres Seq. ID no. 13595075
MSLSSTFAGKSVKNVASSALFGEARVTMRKTAAKAKPVSSGSPWYGADRVLYLGPLSGEPPSYLTGEFPGDYGWDTAGLSADPETFAKNRELEVIHCRWAMLGALGCVFPELLARNGVKFGEAVWFKAGSQIFSEGGLDYLGNPSLVHAQSILAIWACQVVLMGAVEGYRIAGGPLGEVVDPLYLFKHNKVGTGGG

SEQ ID NO: 55975 - DNA, 1310 bp, Glycine max
  misc_feature (1)..(1310): Ceres Seq. ID no. 13638980
gaaaaatcttctccctgcctctgcgtagctcttctcgcccccgcttgtctccgccgcgggcgcggccggcgctcggccgtccgcacacgacgcaacgccccgccccgccctccgctcccactgttcggtcggcccaagatcctcatccgaacttaagacaaaatgggctcaagagtttttgctttgttcatcactggcgttgtccttttgggcagtagaatcttggccttggaccacactgttgttgaaaagagattaaatgagaacacggtatcacttacaacaaagggaagtccacaactatgccaactttgtgagcagtttgccacagaaaccctcttctatttgaaggagaatgagacccggatcgaaattatagatactcttcaccaagcttgtttgaaatttcattcacttaagttagagtgtacaaagttggttgattattatgcagcactgttcttcgcacaaattgattctctaagccctgaagaattttgcgtatcagcaagtctttgtgaggaagttacatacattcgcctcccaggacatgaacatgcttgcaccctttgtcatgaggttgttgatgagattcgtactggtcttgaagaccctgagatggagctcaagataatcgagatacttctgaaaggatgcaacaacacagagagcttcgtacagaagtgcaagaagatgataatccaaaatgcaccactcatactagaagatatcaagaagtttctcgagaagagagatttctgcgattctatccgtgtctgtggaggcaaaattgctcgccctccaggaggaggtctgagaggcctgtctactgtgtgagctctttcttttcctgaacacgcatgacgattgcgtggcatttaatgaagaacacgggggctatctgacctcacgcggtgatgtttagaagaaagattggtggtgtaagtctacgaacgaaaagatcttccataatgctatttccgagcagtgtactccctccgtcccataattcttgtcttagatttgtctagatacggatgtacctaacactaaaacgtgacttgatacatccgtatttggacaaatctaagacaagaattttgagacggagggagcatatattatacagcattggcattgtacctgtggagaagtgtatatattatcacagtcatcaaatgaaatttctgtgatagttgttgctacatgatcgttcatggaacgtaagcaaaatgtatgcttaaagtgtagagcatatacgcgtgtaaacaaattatgaactatgtgcagtggacttttatttatgatgc

SEQ ID NO: 55976 - protein, 224 aa, Glycine max
  peptide (1)..(224): Ceres Seq. ID no. 13638981
MGSRVFALFITGVVLLGSRILALDHTVVEKRLNENTVSLTTKGSPQLCQLCEQFATETLFYLKENETRIEIIDTLHQACLKFHSLKLECTKLVDYYAALFFAQIDSLSPEEFCVSASLCEEVTYIRLPGHEHACTLCHEVVDEIRTGLEDPEMELKIIEILLKGCNNTESFVQKCKKMIIQNAPLILEDIKKFLEKRDFCDSIRVCGGKIARPPGGGLRGLSTV

SEQ ID NO: 55977 - DNA, 946 bp, Glycine max
  misc_feature (1)..(946): Ceres Seq. ID no. 12610412
aacattcctaagaagattacacagagagatcagtttttgagcattctctcatctctcaaagccaaagctctctccctctctctctgtctctgcttgtgtagccatggctaactcgataatggcttcctccaaaccactcatctccctctcctcctccactcaaccaacccgcgtcaacctccccaaatccatcaaactcccccagatccccaaacccatctcctcctcctcctcctcctcctccctcagcagcaaggctctgtctttctcctccgccaccgtcaagtctctagctttaatcgccgccctcgctcccccttccatggccgaagctatggagaaggcccagctcttcgacttcaacctgacgctcccgatcatcgtcgtggagtttctcttcctcatgttcgcgctcgacaaagtctactactctccccttgggaactttatggataagagagacggtgagatcaaggagaagctcgcgagcgtgaaggatacttccactgaggtgaaggcgctcgatgaacaagctgccgctgtgatgagggcggctagggctgagatcgccgccgcgcttaacaagatgaagaaggagacggaggtggaagtggagcagcagctggcggtagggaggaagaaggtggaggcggagctgcaggaagctttggcgagcttggagaagcagaaggaggagaccattaaggctttggattctcagatcgctgctcttagtgaagacattgtcaagaaggttcttccttcttaaaaacaaactcttgtgtgttctgtcttttctcaatctcaatttatatgaaattactgtaaatctctcttcttttctctctatgtctttgtctgatcgttggatgaatcaacaacaattttatatgtaagtttttataaatgattagctctcttttcttatttagtttgataaagattg

SEQ ID NO: 55978 - protein, 221 aa, Glycine max
  peptide (1)..(221): Ceres Seq. ID no. 12610413
MANSIMASSKPLISLSSSTQPTRVNLPKSIKLPQIPKPISSSSSSSSLSSKALSFSSATVKSLALIAALAPPSMAEAMEKAQLFDFNLTLPIIVVEFLFLMFALDKVYYSPLGNFMDKRDGEIKEKLASVKDTSTEVKALDEQAAAVMRAARAEIAAALNKMKKETEVEVEQQLAVGRKKVEAELQEALASLEKQKEETIKALDSQIAALSEDIVKKVLPS

SEQ ID NO: 55979 - protein, 216 aa, Glycine max
  peptide (1)..(216): Ceres Seq. ID no. 12610414
MASSKPLISLSSSTQPTRVNLPKSIKLPQIPKPISSSSSSSSLSSKALSFSSATVKSLALIAALAPPSMAEAMEKAQLFDFNLTLPIIVVEFLFLMFALDKVYYSPLGNFMDKRDGEIKEKLASVKDTSTEVKALDEQAAAVMRAARAEIAAALNKMKKETEVEVEQQLAVGRKKVEAELQEALASLEKQKEETIKALDSQIAALSEDIVKKVLPS

SEQ ID NO: 55980 - protein, 148 aa, Glycine max
  peptide (1)..(148): Ceres Seq. ID no. 12610415
MAEAMEKAQLFDFNLTLPIIVVEFLFLMFALDKVYYSPLGNFMDKRDGEIKEKLASVKDTSTEVKALDEQAAAVMRAARAEIAAALNKMKKETEVEVEQQLAVGRKKVEAELQEALASLEKQKEETIKALDSQIAALSEDIVKKVLPS

SEQ ID NO: 55981 - DNA, 738 bp, Glycine max
  misc_feature (1)..(738): Ceres Seq. ID no. 12610964
acaagacaagcgtcgattgccccccatccgtggctgcgcgtccgccggtggccgggggttctaatccgagcgattcccaatcccaaccgccgctggaagaccccgcagctccacgacagcgcgggcagaggcagacatggcgcccgtgctacctgcaccggcggcggcggcggcggcggctcctcctcccttctgccgtgtctctctcccggcccgcagcgctttcccctcctccttccccgtcagaagccttggcaggtttgcagccaggagcagcggcggcggcggccgtcccgagcccaaagcaggtgatgaagagagcaaggccgtcctcgacgccttcttcctcgggaaggccttggcggaggctctgacggagagggccgagtcggtggtgggcgaggtgttcagcgtcgtcgggcagtggcaggcggagcagcagaagcaggtccaggaatttcaggaggaggtagttcagagagcccaaaaggctaaggaaagagctgctgaggaggtcgttgatgataagggaccaaagactctaaagggatcttcaacaaccattgtgacgcctgcacctacaccccctccttctcctactattcccacacaggcagaatagttataagcgacgatgaagagttagtgctgcatgtagactcacttttgtgctccaagaaagttacgaaattctcctttgagatatttattgatcaagttgtcctttctttgatagtg

SEQ ID NO: 55982 - protein, 161 aa, Glycine max
  peptide (1)..(161): Ceres Seq. ID no. 12610965
MAPVLPAPAAAAAAAPPPFCRVSLPARSAFPSSFPVRSLGRFAARSSGGGGRPEPKAGDEESKAVLDAFFLGKALAEALTERAESVVGEVFSVVGQWQAEQQKQVQEFQEEVVQRAQKAKERAAEEVVDDKGPKTLKGSSTTIVTPAPTPPPSPTIPTQAE

SEQ ID NO: 55983 - protein, 123 aa, Glycine max
  peptide (1)..(123): Ceres Seq. ID no. 12610966
KTSVDCPPSVAARPPVAGGSNPSDSQSQPPLEDPAAPRQRGQRQTWRPCYLHRRRRRRRLLLPSAVSLSRPAALSPPPSPSEALAGLQPGAAAAAAVPSPKQVMKRARPSSTPSSSGRPWRRL

SEQ ID NO: 55984 - protein, 103 aa, Glycine max
  peptide (1)..(103): Ceres Seq. ID no. 12610967
TRQASIAPHPWLRVRRWPGVLIRAIPNPNRRWKTPQLHDSAGRGRHGARATCTGGGGGGGSSSLLPCLSPGPQRFPLLLPRQKPWQVCSQEQRRRRPSRAQSR

SEQ ID NO: 55985 - DNA, 1015 bp, Glycine max
  misc_feature (1)..(1015): Ceres Seq. ID no. 15226426
sgcwcgagamcattwcctagaacatcstaatsgaaaagttgcagtcattgttagtttattgtgtactagcagcgccactcagtctgttcaaggagtattagtcttgtaatggcttcattttcttgttttcattcttcgattcgggagattgttcaataaagacctggcatgtaatctcttaaagcttaattcaggccactttcattatataaaactgtagatctaagatgtactgtactagtgagtatgctgttcagcttgagctagtaattctggtatctgccctgcatccctttactagcagaatgtgaaatgcctgtcatgagccacttgcaaattctaccattatatagactgtaaatctgagatgtactactgagtatgctctttcttgtgtgtgttcctaggccatactggagatgctactttccaaacactcaggctatcatatatgttgttgattcaagtgatactgataggctggtaactgcaaaagaagaatttcattccatccttgaggaggatgagctgaaaggtgcggttgttcttgtatatgcgaataaacaggaccttccaggtgcacttgatgatgctgccataactgaatcattagaacttcacaagattaagagccgccaatgggcaattttcaaaacatctgctataaaaggggaggggctttttgaaggcttgaactggctcagtaatgcactcaagtccggaggcagctaatgtaggaggcccagcctccattccgtgaatcattgcttgatggtaaggaacagggacgatgacagccttctcgctagtctgcgtggaaatcagaatctctttattttaactctggaagttatacacaatcagttatctgtagagtgcttgttgaagtttccagacacaacactaggtgtaccatgtcgagagcaagaatatatttgtagaaaataccgagcaaacgattacggtttgaaatatgtggcttcaccgcgtaaattttcaccccattttctttttc

SEQ ID NO: 55986 - protein, 116 aa, Glycine max
  peptide (1)..(116): Ceres Seq. ID no. 15226427
MLFLVCVPRPYWRCYFPNTQAIIYVVDSSDTDRLVTAKEEFHSILEEDELKGAVVLVYANKQDLPGALDDAAITESLELHKIKSRQWAIFKTSAIKGEGLFEGLNWLSNALKSGGS

SEQ ID NO: 55987 - protein, 81 aa, Glycine max
  peptide (1)..(81): Ceres Seq. ID no. 15226428
MVRNRDDDSLLASLRGNQNLFILTLEVIHNQLSVECLLKFPDTTLGVPCREQEYICRKYRANDYGLKYVASPRKFSPHFLF

SEQ ID NO: 55988 - DNA, 1256 bp, Glycine max
  misc_feature (1)..(1256): Ceres Seq. ID no. 15176047
aaacgataaggtgtgtctcctccgactctctcgtcatcgtctgagcttacctaactccagttaatggcgatgtcgacgactacactcttccatgcacttgttccttccaacacttacaaatccagagctgtctcctcttccttcgtctcagttcctcgctcctcaactccaccttcttcgccgtctctccagttccgctcgcttgtttcagacacgacgtcgatctacggtcggaggaaatttaccggcaatctcagaagagtatccttaaccgtctccgccgccgcagcagctgagcctctcaccgtcctcgtcaccggtgccggtggcagaacagggcaaatcgtgtacaagaagttgaaggagaggtcggatcagttcgtggcgagaggcttggtgaggacgaaagagagcaaggagaagatcggtggagaggacgaagtgttcgtcggtgatattcgagaccctgaatccattgctcctgctgtgcaagggattgatgctttggtcattcttacgagcgctgtaccgaagatgaaacctggttttgatcctagcaaaggagagagacctgagttctactttgaagaaggagcttatcctgaacaggttgattggattggtcagaagaatcagatagatgctgctaaggcagcaggaattaagcagattgttttggtggggtcgatgggaggaacaaacataaacaaccccttgaatagcattggcaatgccaacattctggtttggaagaggaaagctgagcagtacttggctgattccggtattccgtacaccatcatcagggcgggcggtctgcaggacaaagaaggtggcattcgagaattaattgtgggaaaagatgacgagattctagagacagaaatgagaacaattgcaagggctgatgttgctgaagtctgcgttcaggcgttgcagctcgaggaggcaaagtataaagcacttgatctggcctcaaagcctgagggaacaggcaccccaacaaaggatttcaaggcacttttcactcaagttaccgctcggttctgatcttctgttactttgtcttttaagcagagtaataggacaagagactgagagggataataagttcattatgtgagatacacatgtctgaatcggctctttctatatttttcaaggggtctttcccgaagtatctaagtatattttgtatgcaccattcacaaaatcccaaagtcgaaaagatcgggattgatctttgaaagtaaaag

SEQ ID NO: 55989 - protein, 328 aa, Glycine max
  peptide (1)..(328): Ceres Seq. ID no. 15176048
MAMSTTTLFHALVPSNTYKSRAVSSSFVSVPRSSTPPSSPSLQFRSLVSDTTSIYGRRKFTGNLRRVSLTVSAAAAAEPLTVLVTGAGGRTGQIVYKKLKERSDQFVARGLVRTKESKEKIGGEDEVFVGDIRDPESIAPAVQGIDALVILTSAVPKMKPGFDPSKGERPEFYFEEGAYPEQVDWIGQKNQIDAAKAAGIKQIVLVGSMGGTNINNPLNSIGNANILVWKRKAEQYLADSGIPYTIIRAGGLQDKEGGIRELIVGKDDEILETEMRTIARADVAEVCVQALQLEEAKYKALDLASKPEGTGTPTKDFKALFTQVTARF

SEQ ID NO: 55990 - protein, 326 aa, Glycine max
  peptide (1)..(326): Ceres Seq. ID no. 15176049
MSTTTLFHALVPSNTYKSRAVSSSFVSVPRSSTPPSSPSLQFRSLVSDTTSIYGRRKFTGNLRRVSLTVSAAAAAEPLTVLVTGAGGRTGQIVYKKLKERSDQFVARGLVRTKESKEKIGGEDEVFVGDIRDPESIAPAVQGIDALVILTSAVPKMKPGFDPSKGERPEFYFEEGAYPEQVDWIGQKNQIDAAKAAGIKQIVLVGSMGGTNINNPLNSIGNANILVWKRKAEQYLADSGIPYTIIRAGGLQDKEGGIRELIVGKDDEILETEMRTIARADVAEVCVQALQLEEAKYKALDLASKPEGTGTPTKDFKALFTQVTARF

SEQ ID NO: 55991 - protein, 171 aa, Glycine max
  peptide (1)..(171): Ceres Seq. ID no. 15176050
MKPGFDPSKGERPEFYFEEGAYPEQVDWIGQKNQIDAAKAAGIKQIVLVGSMGGTNINNPLNSIGNANILVWKRKAEQYLADSGIPYTIIRAGGLQDKEGGIRELIVGKDDEILETEMRTIARADVAEVCVQALQLEEAKYKALDLASKPEGTGTPTKDFKALFTQVTARF

SEQ ID NO: 55992 - DNA, 677 bp, Glycine max
  misc_feature (1)..(677): Ceres Seq. ID no. 12611141
gagagggagagcgaaacatacaaaggaattcgagtgaggatctaatcgtccatatctttgacctaaccctagtatcgggggctctgtgccgtcggagcaccctttctgatcggaataagactttatacagctcagttgagtctgtttccttctgaaataaaaaaagggtgatggaaacccagaagaaaactagggaacatagcctacaccatatagttgatgacatcggtgctgcatttggaatgggagctattggaggttctgtggtccacttcataaaaggaacccaaaattccccgaaaggccgtcggtttgttgggggagcacaagctgtgagcatgaatgctcctcgtataggaggtagttttgctgtgttcggaggccttttctctgcgtttgactacacaatggtgtacattaggaagaaggaagatccatggaactctatcgtagcaggtgctgctacaggagggtttctgtctatgcgacaagggcttgctgctgcttcgagatcagctcttatgggagggctcttgcttgctttgatcaaaggggtccattaatgttaaacaagttagcttattggattgtgtttattgagctttctctgctcagtcttggaacctatatactcttttgtttaaatcattctacagtaattcatgtattggtggtat

SEQ ID NO: 55993 - protein, 130 aa, Glycine max
  peptide (1)..(130): Ceres Seq. ID no. 12611142
METQKKTREHSLHHIVDDIGAAFGMGAIGGSVVHFIKGTQNSPKGRRFVGGAQAVSMNAPRIGGSFAVFGGLFSAFDYTMVYIRKKEDPWNSIVAGAATGGFLSMRQGLAAASRSALMGGLLLALIKGVH

SEQ ID NO: 55994 - protein, 106 aa, Glycine max
  peptide (1)..(106): Ceres Seq. ID no. 12611143
MGAIGGSVVHFIKGTQNSPKGRRFVGGAQAVSMNAPRIGGSFAVFGGLFSAFDYTMVYIRKKEDPWNSIVAGAATGGFLSMRQGLAAASRSALMGGLLLALIKGVH

SEQ ID NO: 55995 - protein, 80 aa, Glycine max
  peptide (1)..(80): Ceres Seq. ID no. 12611144
MELYRSRCCYRRVSVYATRACCCFEISSYGRALACFDQRGPLMLNKLAYWIVFIELSLLSLGTYILFCLNHSTVIHVLVV

SEQ ID NO: 55996 - DNA, 917 bp, Glycine max
  misc_feature (1)..(917): Ceres Seq. ID no. 13594958
aatttaatcaaccccctttcaacagtatcatttttagtaatttttttatcagtaaaagggaaaacaaatccttttgttttcattctcacttttgcagctaagttgggaaacattttttgcaggtaagatcactgacacttgatgttaaagtgtgggatccctctgttttaagtatgcttaagtcactgggcaatctttttgcaaactcagtttgggaggagctgctgtatccaccgagtaatttgcaaactgttgacacccctgcgagttcatccaaggaaaatggagaggagttctttcatgcaagaaaaccaaaacatgacgattctatttcattaaaggaaaggttcattcatgcaaagtattctgagaaaatatttattccccggacaaagaaatatcaccctctcttttcacccgcacaactggtgctggaaagcatctatgccaatgataagaaagcagtctaccagcatattatcaagtcagattttgacatcaatgccatcggttggcaagcatcgtctgatgactctttcaacatggtttcttcaaataatttaaacattgcctctcaaagtgaaattcagcccattgaggccatacaagatggttctagcgtgcttcaccttgcatgcctaactagtgacattggcatggtggagctgctcctacaacatggggcaaatataaatgcttgtgattctagaggtcagacaccactacattattgtattattaaagggaagaccgcagctgcaaaagtgcttatcatgaggggagccaatacatatgtcgcagataaagaaggcaaaactcctgttaagcttgcatcagaatctggctgtggtgatgatgaaattctcgctctcttgacaagcagatgacatgtttaaaatcttacaatgagcggtcat

SEQ ID NO: 55997 - protein, 237 aa, Glycine max
  peptide (1)..(237): Ceres Seq. ID no. 13594959
MLKSLGNLFANSVWEELLYPPSNLQTVDTPASSSKENGEEFFHARKPKHDDSISLKERFIHAKYSEKIFIPRTKKYHPLFSPAQLVLESIYANDKKAVYQHIIKSDFDINAIGWQASSDDSFNMVSSNNLNIASQSEIQPIEAIQDGSSVLHLACLTSDIGMVELLLQHGANINACDSRGQTPLHYCIIKGKTAAAKVLIMRGANTYVADKEGKTPVKLASESGCGDDEILALLTSR

SEQ ID NO: 55998 - DNA, 970 bp, Glycine max
  misc_feature (1)..(970): Ceres Seq. ID no. 13595294
atctcttgtgcaactcttagggtttttatcctccaaagtcacagtgccccttcttctcttatcctcaaggacagcagaaatggcggcgactcaacttacagcatcaccagtgactgtttcagctaggagcttagcctcactcagagcttcgagtgccaagtttggaactttgaaaccaggcacccttaagcagagccagttccgttctttcgttgtcagagctgcttctgtggttgctcctaagtatacttccattaagccattgggagatagagttttggtgaagatcaaggaggcagaggagaagactatgggaggtatcttacttccatccacagctcaatcaaagcctcaaggaggtgaagtcgttactgtgggtgaaggaagaactattgggaagaccaaaatcgacatagatgtccctactggcgcgcaaattatttactccaaatacgcaggaactgaggtggagttcaacgatgttcagcatcttattctcaaggaagatgatattgttggccttcttgagaccgaggacataaaagatctcaagcccttgaatgaccgtgtcttcattaaggtagctgaggctgaggagaaaacagctggagggttgttgctaaccgagactaccaaagagaagccttctattggcacggtgatagcagttggaccaggttctctagatgaggaaggtaagcgccagccactatcgatatctaccggaagcacagttctttactccaagtatgctggtaacgacttcaagggcaaagatggttccaactacatcgccctgagagcttcagatgtgatggctatcctttcttagtttatatctctgtaacctgcaatttgtatcccagttgtggaaatttttcataaacggcttctgcataatctgaaacaaagacttgagttttaaaatatggttcttaaaaaaaaaaaaaaaaaagcttatcgataccgt

SEQ ID NO: 55999 - protein, 276 aa, Glycine max
  peptide (1)..(276): Ceres Seq. ID no. 15221530
SLVQLLGFLSSKVTVPLLLLSSRTAEMAATQLTASPVTVSARSLASLRASSAKFGTLKPGTLKQSQFRSFVVRAASVVAPKYTSIKPLGDRVLVKIKEAEEKTMGGILLPSTAQSKPQGGEVVTVGEGRTIGKTKIDIDVPTGAQIIYSKYAGTEVEFNDVQHLILKEDDIVGLLETEDIKDLKPLNDRVFIKVAEAEEKTAGGLLLTETTKEKPSIGTVIAVGPGSLDEEGKRQPLSISTGSTVLYSKYAGNDFKGKDGSNYIALRASDVMAILS

SEQ ID NO: 56000 - protein, 250 aa, Glycine max
  peptide (1)..(250): Ceres Seq. ID no. 15221531
MAATQLTASPVTVSARSLASLRASSAKFGTLKPGTLKQSQFRSFVVRAASVVAPKYTSIKPLGDRVLVKIKEAEEKTMGGILLPSTAQSKPQGGEVVTVGEGRTIGKTKIDIDVPTGAQIIYSKYAGTEVEFNDVQHLILKEDDIVGLLETEDIKDLKPLNDRVFIKVAEAEEKTAGGLLLTETTKEKPSIGTVIAVGPGSLDEEGKRQPLSISTGSTVLYSKYAGNDFKGKDGSNYIALRASDVMAILS

SEQ ID NO: 56001 - protein, 173 aa, Glycine max
  peptide (1)..(173): Ceres Seq. ID no. 15221532
MGGILLPSTAQSKPQGGEVVTVGEGRTIGKTKIDIDVPTGAQIIYSKYAGTEVEFNDVQHLILKEDDIVGLLETEDIKDLKPLNDRVFIKVAEAEEKTAGGLLLTETTKEKPSIGTVIAVGPGSLDEEGKRQPLSISTGSTVLYSKYAGNDFKGKDGSNYIALRASDVMAILS

SEQ ID NO: 56002 - DNA, 840 bp, Glycine max
  misc_feature (1)..(840): Ceres Seq. ID no. 13582184
gtttaaaaaaaaaaaccctagcaccagtcccgccgccgccgctgccgccctgaccctcgccgctgctgcagcctccaccgcgcaaccatgggtatcgacctcgtcgccggcggccgcaacaagaggaccaagcgcacggcgcccaaatcggacgatgtgtacctcaagctgctcgtcaagctctaccgcttcctggtccggaggaccaagagccagttcaacgccgtgatcctgaagcgcctcttcatgagcaagaccaaccgccccccgctctcgatgcgccgcctcgtcaggttcatggaggggaaggaggacaagatcgctgtgatagtgggcaccatcaccgatgaccagagggtctacgagataccggcaatgaaggtggccgcgctcaggttcaccgagacggcgagggccaggattgtcaatgccggtggcgagtgccttacctttgaccagctcgcgctccgtgctccgcttggacagaacacgcttctcctgaggggtcccaagaacgccagggaggctgttaggcactttggcaaggctccaggagtgccacacagccacaccaagccatatgtccactccaagggcaggaaattcgagaaggcaagaggaaggaggaacagcaggggcttcaaggtttaagccgtggagttttcggcacccttgtcacatttgctgttatcggtcaatcttcacttttttgggtaccagaatcatactgctttagatgtcagagtcttgtgtcgatgagtattcagaaccagttcattcttgtttcagtattttgcaacttgagaccatgcttgcaatccagttatgaatatcattttt

SEQ ID NO: 56003 - protein, 187 aa, Glycine max
  peptide (1)..(187): Ceres Seq. ID no. 13582185
MGIDLVAGGRNKRTKRTAPKSDDVYLKLLVKLYRFLVRRTKSQFNAVILKRLFMSKTNRPPLSMRRLVRFMEGKEDKIAVIVGTITDDQRVYEIPAMKVAALRFTETARARIVNAGGECLTFDQLALRAPLGQNTLLLRGPKNAREAVRHFGKAPGVPHSHTKPYVHSKGRKFEKARGRRNSRGFKV

SEQ ID NO: 56004 - protein, 134 aa, Glycine max
  peptide (1)..(134): Ceres Seq. ID no. 13582186
MSKTNRPPLSMRRLVRFMEGKEDKIAVIVGTITDDQRVYEIPAMKVAALRFTETARARIVNAGGECLTFDQLALRAPLGQNTLLLRGPKNAREAVRHFGKAPGVPHSHTKPYVHSKGRKFEKARGRRNSRGFKV

SEQ ID NO: 56005 - protein, 124 aa, Glycine max
  peptide (1)..(124): Ceres Seq. ID no. 13582187
MRRLVRFMEGKEDKIAVIVGTITDDQRVYEIPAMKVAALRFTETARARIVNAGGECLTFDQLALRAPLGQNTLLLRGPKNAREAVRHFGKAPGVPHSHTKPYVHSKGRKFEKARGRRNSRGFKV

SEQ ID NO: 56006 - DNA, 844 bp, Glycine max
  misc_feature (1)..(844): Ceres Seq. ID no. 13581971
aaaaaaaacgagaagtaggatctgttgttcttcgttttctacgaggaagcaaaataacaataacagaggaagaaagaaaatcacacagtttcagtttcagtttcagcttcgctttgtagaaatggctactctatcaagcttcattgctacgccgaagaatcccaagacccactttctctcaggttcctcattcatgtcgatggacaaatgcttcttgaaaatcagcaccagcggacactttacagatttctctttaagggctaaagcaacatgtaacaaaccacttgttattcaagctggtggtgatggtggaagaccaagtagtggaagtatttttgttggtggttttgtattgggaggactaattgctggagcattgggttgtctatatgcacctcagataagcagggcactagctggagctgacagtaaagacttaatgaggaaacttccaaaattcatgtatgatgaagaaaaagcactggagaggactcgcgaggtgctaactgagaaaatagcgcagttgaactctgccatagatggtgtttctgcacagttgcggccagatgaagactcaaatgaaattgccgtgaactcagaggaaattgaaacaccaatcagcgatgaaagtgaaatcgaagtcaacaaataaaaagctgttgtcatttactccaagttgatgtcacaaattgcttttgcatcattgaatctattaatgtatgtacttgacacaagttggttccagcaaacgtagattatgttctgttgctgaacaagtctccgttaaatagacaatttgttacattgacaagttataccaataattcatttaatttactgtccc

SEQ ID NO: 56007 - protein, 216 aa, Glycine max
  peptide (1)..(216): Ceres Seq. ID no. 13581972
KKTRSRICCSSFSTRKQNNNNRGRKKITQFQFQFQLRFVEMATLSSFIATPKNPKTHFLSGSSFMSMDKCFLKISTSGHFTDFSLRAKATCNKPLVIQAGGDGGRPSSGSIFVGGFVLGGLIAGALGCLYAPQISRALAGADSKDLMRKLPKFMYDEEKALERTREVLTEKIAQLNSAIDGVSAQLRPDEDSNEIAVNSEEIETPISDESEIEVNK

SEQ ID NO: 56008 - protein, 176 aa, Glycine max
  peptide (1)..(176): Ceres Seq. ID no. 13581973
MATLSSFIATPKNPKTHFLSGSSFMSMDKCFLKISTSGHFTDFSLRAKATCNKPLVIQAGGDGGRPSSGSIFVGGFVLGGLIAGALGCLYAPQISRALAGADSKDLMRKLPKFMYDEEKALERTREVLTEKIAQLNSAIDGVSAQLRPDEDSNEIAVNSEEIETPISDESEIEVNK

SEQ ID NO: 56009 - protein, 152 aa, Glycine max
  peptide (1)..(152): Ceres Seq. ID no. 13581974
MSMDKCFLKISTSGHFTDFSLRAKATCNKPLVIQAGGDGGRPSSGSIFVGGFVLGGLIAGALGCLYAPQISRALAGADSKDLMRKLPKFMYDEEKALERTREVLTEKIAQLNSAIDGVSAQLRPDEDSNEIAVNSEEIETPISDESEIEVNK

SEQ ID NO: 56010 - DNA, 827 bp, Glycine max
  misc_feature (1)..(827): Ceres Seq. ID no. 13594974
agaacatcctaatcgaaaaatatttcttttaacatttccttagtttctgaacctaccctcatcgggtctccaaggagccaagaaagaactgctttctcggcttctcggagtctcaccatcctctgttttcaccatttcttcatccacacgcaacctctaatctaaacctaaccctaaaaaatggactccacggagctaaaacgtgtgttccaaatgttcgacaaggacggagacggtcggatcacacagaaggagctaaacgagtcattcaaaaacctcggcatcataatccctgaaaacgagctgtcgcagatgatcgagaagatcgatgtgaacggagatggttgcgttgacgtcgaagagtttggagagctttacaagtcgataatggtccaaggcgaggatgagataggagatgaagatatgaaggaagcgttcaacgtttttgatcagaatggagatgggtttattacggtggatgagttgaaaacggtgttgtcttccttgggcctcaagcaaggtaagaccttggaggagtgtaggaagatgataatacaagtggatgttgatggtgatggtagggttaattacaaggagtttaggcaaatgatgaagaagggtcagattttagctcaatgagctgatgatctatgatttgtttgtttatatattttttttggttatttgtgttaacctttttctctcgcattctagaaggaaatatcacattatctgtaactggagctgttttatagtgtctaggtttgcgagagcacattgtaaaaattgtagacctgtttgtttctaatgtgatttgtgataatttt

SEQ ID NO: 56011 - protein, 152 aa, Glycine max
  peptide (1)..(152): Ceres Seq. ID no. 15221441
MDSTELKRVFQMFDKDGDGRITQKELNESFKNLGIIIPENELSQMIEKIDVNGDGCVDVEEFGELYKSIMVQGEDEIGDEDMKEAFNVFDQNGDGFITVDELKTVLSSLGLKQGKTLEECRKMIIQVDVDGDGRVNYKEFRQMMKKGQILAQ

SEQ ID NO: 56012 - protein, 141 aa, Glycine max
  peptide (1)..(141): Ceres Seq. ID no. 15221442
MFDKDGDGRITQKELNESFKNLGIIIPENELSQMIEKIDVNGDGCVDVEEFGELYKSIMVQGEDEIGDEDMKEAFNVFDQNGDGFITVDELKTVLSSLGLKQGKTLEECRKMIIQVDVDGDGRVNYKEFRQMMKKGQILAQ

SEQ ID NO: 56013 - protein, 108 aa, Glycine max
  peptide (1)..(108): Ceres Seq. ID no. 15221443
MIEKIDVNGDGCVDVEEFGELYKSIMVQGEDEIGDEDMKEAFNVFDQNGDGFITVDELKTVLSSLGLKQGKTLEECRKMIIQVDVDGDGRVNYKEFRQMMKKGQILAQ

SEQ ID NO: 56014 - DNA, 926 bp, Glycine max
  misc_feature (1)..(926): Ceres Seq. ID no. 15224629
aaaattacaacctctctctctcgccgtctgctcgctcgctcgtcccccaaatcccaccccctccccgaccgaaccccagcggcgtcgccggcgatggagtgcgtcatcggcgtggtgggcagcgacttcgcggtggtggcggcggacacgtccgccgtgcagagcatcctcgtccacaagacggacgaggacaagatcatgctcctcgactcccacaagctcatgggcgcctccggggagcccggcgaccgcgtgcagttcaccgagttcatccagaagaacctccacctctaccagttccgcaacaacatgccgctcagcaccgccgccaccgccaacttcacccgcggcgagctcgccaccgccctgcgcaagaatccctactccgtaaacatcatacttgcagggtttgataaagacgctggtgcatcgatgtactacattgactacatcgcgacgctccacaagatcgacaagggagcattcgggtacgggtcgtacttctgtctgtcgctgatggacaagttgtaccgccctgacatgtctgtcgaggaagcggtagaccttgttgacaagtgcatcaaggagatcagactccggctggtcgtcgcgcctcagaatttcgccatcaagatcgtggacaaggatggcgccagggactatgctaggcgtgagatcggaggtgacagtcctgcagccgcaaccgcaaccgcagcagtagcaacaattgcctgaggtgattggccctgtcggtggtcatttggctgggtggaggctgaacccttcctgtcaattgtttccgagtactgtcactatgtaatcgcaatacgtttcggttcgagaactgtgttgcaaattctcccagatgtggactagtctgtttatgaccccctatttcatggttatatgtttcactgtttcttgcc

SEQ ID NO: 56015 - protein, 244 aa, Glycine max
  peptide (1)..(244): Ceres Seq. ID no. 15224630
KITTSLSRRLLARSSPKSHPLPDRTPAASPAMECVIGVVGSDFAVVAADTSAVQSILVHKTDEDKIMLLDSHKLMGASGEPGDRVQFTEFIQKNLHLYQFRNNMPLSTAATANFTRGELATALRKNPYSVNIILAGFDKDAGASMYYIDYIATLHKIDKGAFGYGSYFCLSLMDKLYRPDMSVEEAVDLVDKCIKEIRLRLVVAPQNFAIKIVDKDGARDYARREIGGDSPAAATATAAVATIA

SEQ ID NO: 56016 - protein, 213 aa, Glycine max
  peptide (1)..(213): Ceres Seq. ID no. 15224631
MECVIGVVGSDFAVVAADTSAVQSILVHKTDEDKIMLLDSHKLMGASGEPGDRVQFTEFIQKNLHLYQFRNNMPLSTAATANFTRGELATALRKNPYSVNIILAGFDKDAGASMYYIDYIATLHKIDKGAFGYGSYFCLSLMDKLYRPDMSVEEAVDLVDKCIKEIRLRLVVAPQNFAIKIVDKDGARDYARREIGGDSPAAATATAAVATIA

SEQ ID NO: 56017 - protein, 178 aa, Glycine max
  peptide (1)..(178): Ceres Seq. ID no. 15224632
MLLDSHKLMGASGEPGDRVQFTEFIQKNLHLYQFRNNMPLSTAATANFTRGELATALRKNPYSVNIILAGFDKDAGASMYYIDYIATLHKIDKGAFGYGSYFCLSLMDKLYRPDMSVEEAVDLVDKCIKEIRLRLVVAPQNFAIKIVDKDGARDYARREIGGDSPAAATATAAVATIA

SEQ ID NO: 56018 - DNA, 892 bp, Glycine max
  misc_feature (1)..(892): Ceres Seq. ID no. 13638917
ctctttcgctgcggctctcgcgactcatcctccccatcccaaaaccctcgaaaagcaaaggcggcggcgcgacatggcagaggtcgaagctgcgctcccggtggcggcgacagagaccccggaggtcgccgccgagggcgacgcgggtgcggccgaggcgaaggggccgcacaagctgcagcggcagtggaccttctggtacgacatccagaccaagcccaagcccggcgccgcctggggcacctcgctcaaaaagggctacaccttcgacaccgtcgaagagttctggtgcttgtatgatcagattttccgtccgagtaagctggtaggaagtgctgattttcatttattcaaggctggggtagaaccaaagtgggaagatccagagtgcgcaaatggaggcaaatggactgtgatatctagcaggaagaccaatcttgataccatgtggcttgaaacgtgtatggctctgattggagagcagttcgatgaaagccaggaaatttgtggtgttgttgctagtgtccgccagagacaggataagctttcattatggactaagactgccagtaacgaagctgttcaggtggacattggcaagaaatggaaggaggttattgactacaatgataagatggtctacagcttccacgatgactcaagaagtcagaaaccaagcagaggtggacgatacaccgtctaaggctgcacacatgatgaagaccgcagcttggaaaagtggccgtgtagtgttttaccgagattcgaaccgcctcagctaatgttgtttgaggcaattttccaatctactatgtcgttttgctctctgattgcttgtggtatgcagagatgtcgtatgcactcaattttcctcgcaatatcccttgatttt

SEQ ID NO: 56019 - protein, 233 aa, Glycine max
  peptide (1)..(233): Ceres Seq. ID no. 13638918
SFAAALATHPPHPKTLEKQRRRRDMAEVEAALPVAATETPEVAAEGDAGAAEAKGPHKLQRQWTFWYDIQTKPKPGAAWGTSLKKGYTFDTVEEFWCLYDQIFRPSKLVGSADFHLFKAGVEPKWEDPECANGGKWTVISSRKTNLDTMWLETCMALIGEQFDESQEICGVVASVRQRQDKLSLWTKTASNEAVQVDIGKKWKEVIDYNDKMVYSFHDDSRSQKPSRGGRYTV

SEQ ID NO: 56020 - protein, 209 aa, Glycine max
  peptide (1)..(209): Ceres Seq. ID no. 13638919
MAEVEAALPVAATETPEVAAEGDAGAAEAKGPHKLQRQWTFWYDIQTKPKPGAAWGTSLKKGYTFDTVEEFWCLYDQIFRPSKLVGSADFHLFKAGVEPKWEDPECANGGKWTVISSRKTNLDTMWLETCMALIGEQFDESQEICGVVASVRQRQDKLSLWTKTASNEAVQVDIGKKWKEVIDYNDKMVYSFHDDSRSQKPSRGGRYTV

SEQ ID NO: 56021 - DNA, 1105 bp, Glycine max
  misc_feature (1)..(1105): Ceres Seq. ID no. 14302008
atctccaaaaccatggatctctgcacttacttcaaatcccagccctcatggctcctcctcctcttcgccctcggctccctccaactcctcaaattcaccctctccctcctcaactccctctacatctacttcctccgccccgccaagaacctccgccgctacggctcctgggccatcatcaccggccccaccgacggcatcggcaaagccttcgcctttcagctcgcccgcaaggggctcaacctcgtcctcgtcgcccgcaaccccgacaagctcagagacgtctccgagtccatcagatccaagcactccaacgtcgagatcaagaccgtggtgatggacttctccggagatatcgatgatggagtgaggaggatcaaggagacgatcgaagggttggaggttgggattctgattaataacgcggggatgtcgtatccttacgcgaagtactttcacgaggtggatgaggagctgcttgggaacttgcttaagatcaatgttgaggggacgacgaaggttactcaggctgtgttggggaatatgctgaagaggaagcgaggggctattgttaatatgggttctggtgctgctgcgcttatcccttcgtatcctttctactctgtttacgccggtgctaaaacgtacgtggatcagttcacgaggtgtcttcatgttgagtacaagaagagtgggattgatgttcaatgccaggttcccttgtatgttgcgacaaagatgacatcaataagaagagcatcgttcttagtggcatctccagagggatacgcaaaggcagcactgcgttttgtagggtatgaagcacgctgcacaccttactggcctcacgccctcatgggttatgttgtctctgcattgcccgagagcgtctttgaatcctttaacattaagaggtgcctccagatcaggaagaaaggtatgcttaaagactcgaggaaaaaggaatgaaaacttttcgagggtgcatgattttcttctgcagcacttggtttcttgcaagtttctgtttagacttttgcaagacttgtacgctttagtttccgatgtttccaaggttgtttccttattttgaaaattaaaaacc

SEQ ID NO: 56022 - protein, 322 aa, Glycine max
  peptide (1)..(322): Ceres Seq. ID no. 14302009
ISKTMDLCTYFKSQPSWLLLLFALGSLQLLKFTLSLLNSLYIYFLRPAKNLRRYGSWAIITGPTDGIGKAFAFQLARKGLNLVLVARNPDKLRDVSESIRSKHSNVEIKTVVMDFSGDIDDGVRRIKETIEGLEVGILINNAGMSYPYAKYFHEVDEELLGNLLKINVEGTTKVTQAVLGNMLKRKRGAIVNMGSGAAALIPSYPFYSVYAGAKTYVDQFTRCLHVEYKKSGIDVQCQVPLYVATKMTSIRRASFLVASPEGYAKAALRFVGYEARCTPYWPHALMGYVVSALPESVFESFNIKRCLQIRKKGMLKDSRKKE

SEQ ID NO: 56023 - protein, 318 aa, Glycine max
  peptide (1)..(318): Ceres Seq. ID no. 14302010
MDLCTYFKSQPSWLLLLFALGSLQLLKFTLSLLNSLYIYFLRPAKNLRRYGSWAIITGPTDGIGKAFAFQLARKGLNLVLVARNPDKLRDVSESIRSKHSNVEIKTVVMDFSGDIDDGVRRIKETIEGLEVGILINNAGMSYPYAKYFHEVDEELLGNLLKINVEGTTKVTQAVLGNMLKRKRGAIVNMGSGAAALIPSYPFYSVYAGAKTYVDQFTRCLHVEYKKSGIDVQCQVPLYVATKMTSIRRASFLVASPEGYAKAALRFVGYEARCTPYWPHALMGYVVSALPESVFESFNIKRCLQIRKKGMLKDSRKKE

SEQ ID NO: 56024 - protein, 210 aa, Glycine max
  peptide (1)..(210): Ceres Seq. ID no. 14302011
MDFSGDIDDGVRRIKETIEGLEVGILINNAGMSYPYAKYFHEVDEELLGNLLKINVEGTTKVTQAVLGNMLKRKRGAIVNMGSGAAALIPSYPFYSVYAGAKTYVDQFTRCLHVEYKKSGIDVQCQVPLYVATKMTSIRRASFLVASPEGYAKAALRFVGYEARCTPYWPHALMGYVVSALPESVFESFNIKRCLQIRKKGMLKDSRKKE

SEQ ID NO: 56025 - DNA, 606 bp, Glycine max
  misc_feature (1)..(606): Ceres Seq. ID no. 12610977
agtgaaggagtcagcagtccagtccccccctgctgccggaagatatggcgatcgcgctcagattcgccgccaccccgccccgcctcgccgcgccgatacctccgacgagtgcccctcgcgcacatggaggagttgtgcgcgtcggcgcccagggcgggactcgctgtggcaggagactggcaatggcggccgcggattccgctcgctgtcgggccaagagagagggcgacggcgacggcgtcctcgcgggagtcgccgtccacggaggaaccggagcggaaggggaagatcagctgagcgtggtaatgaagttcggtggttcgtccgtgtcgtcggcggcgaagatgaaggaggtggcggggctcatccaagctttccccgaggagcggcccgtcgtcgtcctctccgccatggggaagaccaccaatctactcctcctcgtacgactgctttctggtcattttttcagacttacagccaaaaaaagttgtaaggctcactgtttcagtacatcaagaatcttcagtcacggaagtgttagttaaagtgaagtttgcatcttttgtcataatcaagctgaaattcgtcaagaatctgtcaagattc

SEQ ID NO: 56026 - protein, 166 aa, Glycine max
  peptide (1)..(166): Ceres Seq. ID no. 12610978
MAIALRFAATPPRLAAPIPPTSAPRAHGGVVRVGAQGGTRCGRRLAMAAADSARCRAKREGDGDGVLAGVAVHGGTGAEGEDQLSVVMKFGGSSVSSAAKMKEVAGLIQAFPEERPVVVLSAMGKTTNLLLLVRLLSGHFFRLTAKKSCKAHCFSTSRIFSHGSVS

SEQ ID NO: 56027 - protein, 163 aa, Glycine max
  peptide (1)..(163): Ceres Seq. ID no. 12610979
VKESAVQSPPAAGRYGDRAQIRRHPAPPRRADTSDECPSRTWRSCARRRPGRDSLWQETGNGGRGFRSLSGQERGRRRRRPRGSRRPRRNRSGRGRSAERGNEVRWFVRVVGGEDEGGGGAHPSFPRGAARRRPLRHGEDHQSTPPRTTAFWSFFQTYSQKKL

SEQ ID NO: 56028 - protein, 120 aa, Glycine max
  peptide (1)..(120): Ceres Seq. ID no. 12610980
MAAADSARCRAKREGDGDGVLAGVAVHGGTGAEGEDQLSVVMKFGGSSVSSAAKMKEVAGLIQAFPEERPVVVLSAMGKTTNLLLLVRLLSGHFFRLTAKKSCKAHCFSTSRIFSHGSVS

SEQ ID NO: 56029 - DNA, 980 bp, Glycine max
  misc_feature (1)..(980): Ceres Seq. ID no. 15173035
tacactccctctcttgttccatcacttctccgagagagtaaaacagttaactttatagtttttggatatatcagccaaaaggggtgtgaaagaacacaatgcaacaaagttcagcttcagggtcattgatgaagcaactgagtgtgaaggaggcttggaaatcaacatcaagtaggtggagtgggaaggacaagtatagcagtgttgggggagggagcattgaggggtgtgaggcaagtttgagccaaatggaaggtttttctatgtatgggaatgaggacaataatggggtggtgatggggaagaagagagtgatggtggtggtggatcacacttctcattccaagcatgcaatgatgtgggcactcactcatgtagctaataagggtgatttgctcactttgcttcatgttgtacctactcataggggttctgaatcttcttgctctacctatcttgtcaatcatcttggttcactttgcaaagattgcaagccagaggtggaagtggaagcacttgttatccaaggaccaaaactggccacagtgatgagccaagtgaagaagctggaggtttctctcttggtattgggccaaaagaagccctctcctctacttagctgcctgtgtggaagcaacagtatcagcagctcagaggagtttgctgagcactgcatcaacaatgcagaatgcttgacagtaggagtaaggaagagaagccaaggtaacaatggctacctcatcagcacaaggtggcagaagaacttctggctactggcttaaaaatttcgagttcttaactttagttaccagctatagttaggatctcacaaacaaaaaaaggggtcaaatgggaaaattaacacaataataatatgtacctcctgttctagttctaactacattgtcattgtactcatgatgtgactcggtggcatcaatttagttctatactatgattaatgaaacatgattgtgacc

SEQ ID NO: 56030 - protein, 227 aa, Glycine max
  peptide (1)..(227): Ceres Seq. ID no. 15173036
MQQSSASGSLMKQLSVKEAWKSTSSRWSGKDKYSSVGGGSIEGCEASLSQMEGFSMYGNEDNNGVVMGKKRVMVVVDHTSHSKHAMMWALTHVANKGDLLTLLHVVPTHRGSESSCSTYLVNHLGSLCKDCKPEVEVEALVIQGPKLATVMSQVKKLEVSLLVLGQKKPSPLLSCLCGSNSISSSEEFAEHCINNAECLTVGVRKRSQGNNGYLISTRWQKNFWLLA

SEQ ID NO: 56031 - protein, 217 aa, Glycine max
  peptide (1)..(217): Ceres Seq. ID no. 15173037
MKQLSVKEAWKSTSSRWSGKDKYSSVGGGSIEGCEASLSQMEGFSMYGNEDNNGVVMGKKRVMVVVDHTSHSKHAMMWALTHVANKGDLLTLLHVVPTHRGSESSCSTYLVNHLGSLCKDCKPEVEVEALVIQGPKLATVMSQVKKLEVSLLVLGQKKPSPLLSCLCGSNSISSSEEFAEHCINNAECLTVGVRKRSQGNNGYLISTRWQKNFWLLA

SEQ ID NO: 56032 - protein, 177 aa, Glycine max
  peptide (1)..(177): Ceres Seq. ID no. 15173038
MEGFSMYGNEDNNGVVMGKKRVMVVVDHTSHSKHAMMWALTHVANKGDLLTLLHVVPTHRGSESSCSTYLVNHLGSLCKDCKPEVEVEALVIQGPKLATVMSQVKKLEVSLLVLGQKKPSPLLSCLCGSNSISSSEEFAEHCINNAECLTVGVRKRSQGNNGYLISTRWQKNFWLLA

SEQ ID NO: 56033 - DNA, 1225 bp, Glycine max
  misc_feature (1)..(1225): Ceres Seq. ID no. 15177862
aaaccttatcccttcccccaaagcacagcgagagagaaagtaaagtgagccatgtctgcctctgcttcctccctttccctttcttccttcaaccctaaatccctccctctctgcatttcccgctccgcctccgttctcccaccttccctctccttcaaactctactccatcttcgcttcctccgccgtcaaatgctcctcctcccccgcccaacacccgtcgcgtttcgccagaaacgtggccgtatcatcggatttcgaggtggaggaagacgacgtgttcaccgacgatgactctcccccgccgcagcaagagcgcagctcctccttctccgcggacctcaaactcttcgtcggtaacctctccttcgatgtggatagcgctcagctcgctcagttgtttgagagcgccgggactgttgagatggttgaggttatctatgataaagtgactggcagaagcagaggttttggatttgtgacaatgtccactgcagctgaagtcgaagcagctgctcagcagtttaatggctatgaacttgagggcagagctttgagggttaacgctggccctcctccacctaagagggaggaatcattctccaggggaccaagaagtggtggttacggttcagaacgttctggttacggctctgaacgttccggctacgggtctcaacgttcaggacgttctggttacgggtctgagcgttccagctatggttctgggtcaggttcgggctcaggctcaggttcaggttcatcagaccgtgtgtatgtgggaaacctttcgtggggtgtggatgacacggctcttgagagcttgttcagcgagcaaggaaaggttgttgaggccagggtcatttacgacagggacactggtcgatccaagggttttgggtttgtgacactcggctctcctcaagaggtcacacgagccatcaactctttgaatggcgcagatttggatggaagacagattagagtctcggaggctgaggctagaccaccaaggcgccagttttgagcgaccatgtcacttcactgctctcaaagaaatgcagattcttgaggtgtatcatgtatgtcatcttggctgacgaacaagctatctatgtttcgagttttgggctttgtttctttattttaagtcgttttgggctttgcttttatttttgcagactacttacggttttggacttttacttctttcttcattatgctcg

SEQ ID NO: 56034 - protein, 324 aa, Glycine max
  peptide (1)..(324): Ceres Seq. ID no. 15177863
MSASASSLSLSSFNPKSLPLCISRSASVLPPSLSFKLYSIFASSAVKCSSSPAQHPSRFARNVAVSSDFEVEEDDVFTDDDSPPPQQERSSSFSADLKLFVGNLSFDVDSAQLAQLFESAGTVEMVEVIYDKVTGRSRGFGFVTMSTAAEVEAAAQQFNGYELEGRALRVNAGPPPPKREESFSRGPRSGGYGSERSGYGSERSGYGSQRSGRSGYGSERSSYGSGSGSGSGSGSGSSDRVYVGNLSWGVDDTALESLFSEQGKVVEARVIYDRDTGRSKGFGFVTLGSPQEVTRAINSLNGADLDGRQIRVSEAEARPPRRQF

SEQ ID NO: 56035 - protein, 200 aa, Glycine max
  peptide (1)..(200): Ceres Seq. ID no. 15177864
MVEVIYDKVTGRSRGFGFVTMSTAAEVEAAAQQFNGYELEGRALRVNAGPPPPKREESFSRGPRSGGYGSERSGYGSERSGYGSQRSGRSGYGSERSSYGSGSGSGSGSGSGSSDRVYVGNLSWGVDDTALESLFSEQGKVVEARVIYDRDTGRSKGFGFVTLGSPQEVTRAINSLNGADLDGRQIRVSEAEARPPRRQF

SEQ ID NO: 56036 - protein, 180 aa, Glycine max
  peptide (1)..(180): Ceres Seq. ID no. 15177865
MSTAAEVEAAAQQFNGYELEGRALRVNAGPPPPKREESFSRGPRSGGYGSERSGYGSERSGYGSQRSGRSGYGSERSSYGSGSGSGSGSGSGSSDRVYVGNLSWGVDDTALESLFSEQGKVVEARVIYDRDTGRSKGFGFVTLGSPQEVTRAINSLNGADLDGRQIRVSEAEARPPRRQF

SEQ ID NO: 56037 - DNA, 878 bp, Glycine max
  misc_feature (1)..(878): Ceres Seq. ID no. 15172729
aacatcaaagcagcaagcagcacggaggtccaacaatggcggagaagggagtgaaggtgtttggcatgtgggcgagcccgatggccatccgggtggagtgggcgctccggctgaagggcgtcgggtacgagtacgtcgacgaggacctcgccagcaagagcgacgcgctgctccgccacaacccggtgaccaagaaggtgccggtgctggtccacgacggcaagccgatcgccgagtccaccatcatcgtcgagtacatcgacgaggcgtggaaggacggctaccccatcatgccggccgacccctacgaccgggctcaggcgaggttctgggccaggttcgccgacgacaagtgcaacgccgccatcttcccggtcttcacggcgaccggcgaggcgcagcgcgaggtggtgcgcgaggcccagcggtgcctgaagacgctggagaaggccctggaggggaagaagttcttcgggggcgacgccgtcggctacctcgacgtcgtggttgggtggtacgcgtattggctgcccatcatcgaggaggtctccggcgccgacgtggtcaccgacgaggagctgcctctgatgaaggcctggttcggccggttcctggccgtcgacgtggtgaaggagaccctgcccccgagggacaagctcctggcgctcaacaaggctcgccgtgagcagctctcggcgtagagcagcacttgttccgagccttccagctagtacttaagcttctgccatggattatccatgatggataaataagcggcgagcatttgcacattgtgcaacaaatgtttggagcttctttcagccgcctgcttcacactcccagtttccgttatataaacttcacccatgatgttatat

SEQ ID NO: 56038 - protein, 232 aa, Glycine max
  peptide (1)..(232): Ceres Seq. ID no. 15172730
HQSSKQHGGPTMAEKGVKVFGMWASPMAIRVEWALRLKGVGYEYVDEDLASKSDALLRHNPVTKKVPVLVHDGKPIAESTIIVEYIDEAWKDGYPIMPADPYDRAQARFWARFADDKCNAAIFPVFTATGEAQREVVREAQRCLKTLEKALEGKKFFGGDAVGYLDVVVGWYAYWLPIIEEVSGADVVTDEELPLMKAWFGRFLAVDVVKETLPPRDKLLALNKARREQLSA

SEQ ID NO: 56039 - protein, 227 aa, Glycine max
  peptide (1)..(227): Ceres Seq. ID no. 15172731
TSKQQAARRSNNGGEGSEGVWHVGEPDGHPGGVGAPAEGRRVRVRRRGPRQQERRAAPPQPGDQEGAGAGPRRQADRRVHHHRRVHRRGVEGRLPHHAGRPLRPGSGEVLGQVRRRQVQRRHLPGLHGDRRGAARGGARGPAVPEDAGEGPGGEEVLRGRRRRLPRRRGWVVRVLAAHHRGGLRRRRGHRRGAASDEGLVRPVPGRRRGEGDPAPEGQAPGAQQGSP

SEQ ID NO: 56040 - protein, 221 aa, Glycine max
  peptide (1)..(221): Ceres Seq. ID no. 15172732
MAEKGVKVFGMWASPMAIRVEWALRLKGVGYEYVDEDLASKSDALLRHNPVTKKVPVLVHDGKPIAESTIIVEYIDEAWKDGYPIMPADPYDRAQARFWARFADDKCNAAIFPVFTATGEAQREVVREAQRCLKTLEKALEGKKFFGGDAVGYLDVVVGWYAYWLPIIEEVSGADVVTDEELPLMKAWFGRFLAVDVVKETLPPRDKLLALNKARREQLSA

SEQ ID NO: 56041 - DNA, 721 bp, Glycine max
  misc_feature (1)..(721): Ceres Seq. ID no. 13595008
cgcacgaggatcaacagcagcagagagaagcaaaccggccggccggcgagatggcgcaggagagcctgaggctggtgtgcccgccggtgtcggcgcacgaggggcggctgccgcggcagtacacgctggaggggcagggcgcgaagaaggacatctcgccgccgctggagtggtacggggtgcccgacggcacgcggtcgctggcggtggtggtgcaggacgtcgacgcggacgagcgggtgccgtggacgcactgggtggtcgtcaacatctcgcccgaggagaaggggctgcccgagggcttctccggcgccgggggcaacgccaacgccggcggcggcgacggcggcgtccaggagggggtcaacgactggaagcagcccgggtggcgcggccccgtcccggactcccacggccaccgcatccagttccggctctacgcgctcgacgacgtgctcagcctcggcaacaaggtgactgtggacaaggtcatggaggccatcgaggggcacgtgctgggggaggccgagatcacggccgtgttctaaggagttcttgtggattttgacactcggctctgtgtgtgtgtgtgacctgcttgttacttcttgcgaattgtgtgtggtctgttctgtagcgtgcctgtatacgcatggccacgagcagcctttgtaattttgatccaataaatgaagtgacttcttatcagccgggtacggtt

SEQ ID NO: 56042 - protein, 188 aa, Glycine max
  peptide (1)..(188): Ceres Seq. ID no. 13595009
ARGSTAAERSKPAGRRDGAGEPEAGVPAGVGARGAAAAAVHAGGAGREEGHLAAAGVVRGARRHAVAGGGGAGRRRGRAGAVDALGGRQHLARGEGAARGLLRRRGQRQRRRRRRRRPGGGQRLEAARVARPRPGLPRPPHPVPALRARRRAQPRQQGDCGQGHGGHRGARAGGGRDHGRVLRSSCGF

SEQ ID NO: 56043 - protein, 181 aa, Glycine max
  peptide (1)..(181): Ceres Seq. ID no. 13595010
HEDQQQQREANRPAGEMAQESLRLVCPPVSAHEGRLPRQYTLEGQGAKKDISPPLEWYGVPDGTRSLAVVVQDVDADERVPWTHWVVVNISPEEKGLPEGFSGAGGNANAGGGDGGVQEGVNDWKQPGWRGPVPDSHGHRIQFRLYALDDVLSLGNKVTVDKVMEAIEGHVLGEAEITAVF

SEQ ID NO: 56044 - protein, 165 aa, Glycine max
  peptide (1)..(165): Ceres Seq. ID no. 13595011
MAQESLRLVCPPVSAHEGRLPRQYTLEGQGAKKDISPPLEWYGVPDGTRSLAVVVQDVDADERVPWTHWVVVNISPEEKGLPEGFSGAGGNANAGGGDGGVQEGVNDWKQPGWRGPVPDSHGHRIQFRLYALDDVLSLGNKVTVDKVMEAIEGHVLGEAEITAVF

SEQ ID NO: 56045 - DNA, 410 bp, Glycine max
  misc_feature (1)..(410): Ceres Seq. ID no. 13595367
acagccacatcctaggtcaccatggcttcttctccctctccgtcggctgctcgtgccctgctcgtcctcgccgcagcagctctggtgctgagctctgtgtcagccgcggctggctcgccgccgcttgccaagggcctgtcgttcgacttctacagcgccaagtgcccgcaggcggaggccatcgtcttctccttcctcaaggacgccgtccgcaaggacgtcggcctcgccgcggcgctcctccgcatccacttccacgactgcttcgtgcagggctgcgacggctccgtgctcctcgacamgaccamcggcgtcgacagcgagaaggtgtctcctccgaacgtcacsctccgtccgtccgcgttcaaggccatcaacgccatccgcgcgctcctccagagkgcgtgcgg

SEQ ID NO: 56046 - protein, 136 aa, Glycine max
  peptide (1)..(136): Ceres Seq. ID no. 13595368
  misc_feature (100)..(100): Xaa is any aa, unknown or other
  misc_feature (102)..(102): Xaa is any aa, unknown or other
  misc_feature (116)..(116): Xaa is any aa, unknown or other
  misc_feature (134)..(134): Xaa is any aa, unknown or other
SHILGHHGFFSLSVGCSCPARPRRSSSGAELCVSRGWLAAACQGPVVRLLQRQVPAGGGHRLLLPQGRRPQGRRPRRGAPPHPLPRLLRAGLRRLRAPRXDXRRRQREGVSSERHXPSVRVQGHQRHPRAPPEXVR

SEQ ID NO: 56047 - protein, 129 aa, Glycine max
  peptide (1)..(129): Ceres Seq. ID no. 13595369
  misc_feature (94)..(94): Xaa is any aa, unknown or other
  misc_feature (96)..(96): Xaa is any aa, unknown or other
  misc_feature (109)..(109): Xaa is any aa, unknown or other
  misc_feature (127)..(127): Xaa is any aa, unknown or other
MASSPSPSAARALLVLAAAALVLSSVSAAAGSPPLAKGLSFDFYSAKCPQAEAIVFSFLKDAVRKDVGLAAALLRIHFHDCFVQGCDGSVLLDXTXGVDSEKVSPPNVXLRPSAFKAINAIRALLQXAC

SEQ ID NO: 56048 - DNA, 1213 bp, Glycine max
  misc_feature (1)..(1213): Ceres Seq. ID no. 15177104
aaagccaaaagaaaccaaaccgaatcaagccgattatctgccggatcgaatttccgagggatggcaaccggtagcgaagctggaaagcccgcggaggtcgtgctggagtggcctaagcaggacaaaaagaggatgctgcatgctgtttaccgtgtgggagatctggaccgtaccattaagtgttacacagaatgctttgggatgaagctgttgaggaaaagagatgttcctgaagagaagtacaccaatgcgtttcttgggtttggacctgaggacactaattttgcacttgagctgacttacaagtatggtgttgacaagtatgacattggagcgggctttggacattttgccatcgcaaatgaggatgtgtacaagctggctgagacaattaaatcatcttcttgttgtaagatcactcgtgaacctggtcctgtcaagggagggtccactgtgattgcctttgcacaagacccagatggttacatgttcgagcttatccagaggggtccgacgcctgagcctctctgtcaagttatgcttcgtgttggtgaccttgatcggtctatcatgttctacgagaaggcccttgggatgaagcttctgaggaaaaaagatgtgcctcagtacaagtacacaattgccatgatgggctatgccgaggaggataagaccactgttctggagttgacatacaactatggtgtcacagaatataacaagggcaatgcatatgctcaggttgctattggcactgacgatgtgtacaagagtgctgaagcagttgagctggttaccaaagaactaggtggaaagattctacggcagcctgggccactaccggggctgaacacgaagatcacctctttccttgaccccgatggctggaaagtggttctggtggatcatgcggacttcctcaaggaactccactaaagatcagcaggccccacgcccgggagttgttgaagaggcaaaccttatgcagcaatggtctttgatgtaataaaatggcagcctcttccgctcgaccaacaaaaataaaagctactgtaccaccgaatacctatgccgtgattggcctagttagaggacttgctctgtacagtatgtgctatgatcgctgaacatgaatactcctactactgagatgggtctgcatgcgcagtcggagagtggtttccaatgatctgatatgttttctacctctgtt

SEQ ID NO: 56049 - protein, 311 aa, Glycine max
  peptide (1)..(311): Ceres Seq. ID no. 15177105
KAKRNQTESSRLSAGSNFRGMATGSEAGKPAEVVLEWPKQDKKRMLHAVYRVGDLDRTIKCYTECFGMKLLRKRDVPEEKYTNAFLGFGPEDTNFALELTYKYGVDKYDIGAGFGHFAIANEDVYKLAETIKSSSCCKITREPGPVKGGSTVIAFAQDPDGYMFELIQRGPTPEPLCQVMLRVGDLDRSIMFYEKALGMKLLRKKDVPQYKYTIAMMGYAEEDKTTVLELTYNYGVTEYNKGNAYAQVAIGTDDVYKSAEAVELVTKELGGKILRQPGPLPGLNTKITSFLDPDGWKVVLVDHADFLKELH

SEQ ID NO: 56050 - protein, 291 aa, Glycine max
  peptide (1)..(291): Ceres Seq. ID no. 15177106
MATGSEAGKPAEVVLEWPKQDKKRMLHAVYRVGDLDRTIKCYTECFGMKLLRKRDVPEEKYTNAFLGFGPEDTNFALELTYKYGVDKYDIGAGFGHFAIANEDVYKLAETIKSSSCCKITREPGPVKGGSTVIAFAQDPDGYMFELIQRGPTPEPLCQVMLRVGDLDRSIMFYEKALGMKLLRKKDVPQYKYTIAMMGYAEEDKTTVLELTYNYGVTEYNKGNAYAQVAIGTDDVYKSAEAVELVTKELGGKILRQPGPLPGLNTKITSFLDPDGWKVVLVDHADFLKELH

SEQ ID NO: 56051 - protein, 267 aa, Glycine max
  peptide (1)..(267): Ceres Seq. ID no. 15177107
MLHAVYRVGDLDRTIKCYTECFGMKLLRKRDVPEEKYTNAFLGFGPEDTNFALELTYKYGVDKYDIGAGFGHFAIANEDVYKLAETIKSSSCCKITREPGPVKGGSTVIAFAQDPDGYMFELIQRGPTPEPLCQVMLRVGDLDRSIMFYEKALGMKLLRKKDVPQYKYTIAMMGYAEEDKTTVLELTYNYGVTEYNKGNAYAQVAIGTDDVYKSAEAVELVTKELGGKILRQPGPLPGLNTKITSFLDPDGWKVVLVDHADFLKELH

SEQ ID NO: 56052 - DNA, 828 bp, Glycine max
  misc_feature (1)..(828): Ceres Seq. ID no. 13595187
acactctttctctcaatttctctctcttttaaaacactaatcactaaaatcttgattcactatatcgtcaaaaccaacgctaaatcaattaaactctctcaaagaaaacaagacaaagccctacttttgatggattcagggtcacaacgaccggggcctgttagcgaaggcgatccgggtccgtccatcgtaaccccctcttcaccgcctgcgacgcctagcaggtacgagtcgcagaaacgacgtgactggaccacgttcttgcagtacctcaagaaccacaagccgcctctttccttgtcacggtgtagcggagcacatgccatcgagttcctcaagtacttagatcagttcggtaagaccaaagtccacgtggcggcatgtccttactttggccatcagcaacctccgtctccttgcgcttgtcctctcaagcaagcctgggggtctctcgatgccctgatcggacggttgagagcagcctacgaagagaacggtggacggcccgagtcgaacccgttcgcggcacgtgcggttaggatttacttgagggaagtcagagaaagtcaagccaaggcccgtgggagaccctacgagaaaaagaaacggaaacggccaacaactgttaccaccgtgagagttgacgttgcttcgtcgagacaaagtgaaggagatggttgtaacatcggtgatccgtcgtatgtggccgaggctgtacctccttaattaagttattattattgtcatgatatattaaatacattatatatgtctggaactcacatcaccttcttgagttaactattgaaaatatttttgttctagttc

SEQ ID NO: 56053 - protein, 241 aa, Glycine max
  peptide (1)..(241): Ceres Seq. ID no. 13595188
TLFLSISLSFKTLITKILIHYIVKTNAKSIKLSQRKQDKALLLMDSGSQRPGPVSEGDPGPSIVTPSSPPATPSRYESQKRRDWTTFLQYLKNHKPPLSLSRCSGAHAIEFLKYLDQFGKTKVHVAACPYFGHQQPPSPCACPLKQAWGSLDALIGRLRAAYEENGGRPESNPFAARAVRIYLREVRESQAKARGRPYEKKKRKRPTTVTTVRVDVASSRQSEGDGCNIGDPSYVAEAVPP

SEQ ID NO: 56054 - protein, 198 aa, Glycine max
  peptide (1)..(198): Ceres Seq. ID no. 13595189
MDSGSQRPGPVSEGDPGPSIVTPSSPPATPSRYESQKRRDWTTFLQYLKNHKPPLSLSRCSGAHAIEFLKYLDQFGKTKVHVAACPYFGHQQPPSPCACPLKQAWGSLDALIGRLRAAYEENGGRPESNPFAARAVRIYLREVRESQAKARGRPYEKKKRKRPTTVTTVRVDVASSRQSEGDGCNIGDPSYVAEAVPP

SEQ ID NO: 56055 - DNA, 1404 bp, Glycine max
  misc_feature (1)..(1404): Ceres Seq. ID no. 12610323
aacaatgtcagatctgccgccggaaaaccccaatctgccgctcacttcatcgtcttcctctttgcaccattcctacagccggaagcagaaatctctgggccttctttgcaccaatttcctagctctgtacaatcgacatggaatcgaaaccattgggcttgatgacgccgcctccaaattaggagttgagagacggagaatctacgatattgttaatgttctggagagtgttggggttttaacaaaaagagcgaagaatcagtatacgtggaaaggattttctgcgattccggcagcgttgaaggagctacaagaagaaggtgctaaggacactttccaccgtttttataccaacgagaatgtcaaagtatctgatgatgaagatgatgaggaagagtcttcttctcagcctctttctagtagccagactgatacctccaaacctggctcccttgattcctctaaaatagataatcgacgagagaaatctttaggactgcttactcagaactttatcaagctctttgtttgctctgaagctaggatcatctcccttgacgaggctgcaaaattactacttggagatgcccacaatacatcaataatgagaacaaaagtgaggcggctttatgatattgcgaatgtcttgtcatcaatgaatctcattgagaagactcacaccttagattctagaaaaccagctttcaaatggttaggatacaatggtgagcctactttcacactcagcagcgatttgatgcaagccgaatcaacgaagagagtttttggaactgatctcactaacgtcagtgtcaagagaagcagaacccatgaaaatgctaccgagaggaggataaagatgaaacaacacgcaatagcagatagttcttataatcaaagctctgatgatgctcatgaatcaagacgctacaagtttggtctttttgcaccagccgctggtggtacatatccagctgctcgtttggaggacaactccaagagagcttttgatgttgagaatctagtttcggattatcgtcctacttaccaaaatcaagttttgaaagacctctttgcgcattacatggacgcttggaagtcatggtacagcgaagtcacgcagaagaatccattaccagatacatcaaaacgccattagagatattcttaatcttctcttactagtgaacatttcgttttgaccaatgtgggtttagtttctccacacaaattttaacggcaggaatccgacattttaagatgcagactgcaccatctctgtgccttcactgtaggctgtttagaaatcatcttttgcttgattccaatgccagttgtatgtaacttatatataatccccatcttttatttttaaagaatctcaaaagtgaaaacctaggttct

SEQ ID NO: 56056 - protein, 385 aa, Glycine max
  peptide (1)..(385): Ceres Seq. ID no. 12610324
TMSDLPPENPNLPLTSSSSSLHHSYSRKQKSLGLLCTNFLALYNRHGIETIGLDDAASKLGVERRRIYDIVNVLESVGVLTKRAKNQYTWKGFSAIPAALKELQEEGAKDTFHRFYTNENVKVSDDEDDEEESSSQPLSSSQTDTSKPGSLDSSKIDNRREKSLGLLTQNFIKLFVCSEARIISLDEAAKLLLGDAHNTSIMRTKVRRLYDIANVLSSMNLIEKTHTLDSRKPAFKWLGYNGEPTFTLSSDLMQAESTKRVFGTDLTNVSVKRSRTHENATERRIKMKQHAIADSSYNQSSDDAHESRRYKFGLFAPAAGGTYPAARLEDNSKRAFDVENLVSDYRPTYQNQVLKDLFAHYMDAWKSWYSEVTQKNPLPDTSKRH

SEQ ID NO: 56057 - protein, 384 aa, Glycine max
  peptide (1)..(384): Ceres Seq. ID no. 12610325
MSDLPPENPNLPLTSSSSSLHHSYSRKQKSLGLLCTNFLALYNRHGIETIGLDDAASKLGVERRRIYDIVNVLESVGVLTKRAKNQYTWKGFSAIPAALKELQEEGAKDTFHRFYTNENVKVSDDEDDEEESSSQPLSSSQTDTSKPGSLDSSKIDNRREKSLGLLTQNFIKLFVCSEARIISLDEAAKLLLGDAHNTSIMRTKVRRLYDIANVLSSMNLIEKTHTLDSRKPAFKWLGYNGEPTFTLSSDLMQAESTKRVFGTDLTNVSVKRSRTHENATERRIKMKQHAIADSSYNQSSDDAHESRRYKFGLFAPAAGGTYPAARLEDNSKRAFDVENLVSDYRPTYQNQVLKDLFAHYMDAWKSWYSEVTQKNPLPDTSKRH

SEQ ID NO: 56058 - DNA, 1147 bp, Glycine max
  misc_feature (1)..(1147): Ceres Seq. ID no. 13595271
accattacctagaacatcctaatcgaaaacagccctacctgccattttcctccgttcgttcatctccttcgcctcgccaccgtccctcctcctctcttccctccctcatccctcatctcgtgtcggctcgaaagtcgaaaccctagaccaaccaccctcccctagtacgtaggaacagggacagagatgtatgcagaccagatctccaccggccgcaagcgctccatccatgaccgccttgacgccgacctcccctccgaccgcggcggcgcggacgccgccggccgggctcgtaacgcgctgtccaagaggcaacgacaaactgatgataaatggaagcatgatctttaccgggatgatgaatcagcttcaagatcagttgatccacgggatttgcgattcaagcttcagaagaaaagctctcagcaagggtttgctggccaaaagggttccggggtacgtgatctacgtgagatgttatctggaacaatgcacgcacaaccatcaaatgttgaccctcaaaagaggaaaccggtgtcagaggttgtgaaagtcacaaggcgtgaaattgttgatgaaaggcctgtacgcctaagtaagaaagtatcaaaaccatcaacatccaagaagacttctcagccaaaggctgaaagtccactcgacagttttctgaaatcacttggacttgagaagtattctattaccttccaggcggaggaggttgacatggcggccctacgtcacatgactgaaagtgatctcaaggcgttgggcatcccgatgggtcctaggaagaagattacccttgccttggaatccagagcgtagggcaatgtccctggagtacaatgtagaaaagcagggagatgtggtaggtttttgctcatctgcaaatttggcatatcttggaaagcagtggtacaggtaaacaatgcggtgtctcttgtaatggcatgttgctgtaagattattagactgctgttgtttatctggtctgcatgctttcctggccagaccagctgatttaactgatgaggtatccgtgctgttgaagctgcggtgatgttctcgctgtatactattattatgccttttttttcattggaaactggcattattagagtaatagagttgagattcttcagtc

SEQ ID NO: 56059 - protein, 213 aa, Glycine max
  peptide (1)..(213): Ceres Seq. ID no. 13595272
MYADQISTGRKRSIHDRLDADLPSDRGGADAAGRARNALSKRQRQTDDKWKHDLYRDDESASRSVDPRDLRFKLQKKSSQQGFAGQKGSGVRDLREMLSGTMHAQPSNVDPQKRKPVSEVVKVTRREIVDERPVRLSKKVSKPSTSKKTSQPKAESPLDSFLKSLGLEKYSITFQAEEVDMAALRHMTESDLKALGIPMGPRKKITLALESRA

SEQ ID NO: 56060 - protein, 119 aa, Glycine max
  peptide (1)..(119): Ceres Seq. ID no. 13595273
MQTRSPPAASAPSMTALTPTSPPTAAARTPPAGLVTRCPRGNDKLMINGSMIFTGMMNQLQDQLIHGICDSSFRRKALSKGLLAKRVPGYVIYVRCYLEQCTHNHQMLTLKRGNRCQRL

SEQ ID NO: 56061 - protein, 117 aa, Glycine max
  peptide (1)..(117): Ceres Seq. ID no. 13595274
MLSGTMHAQPSNVDPQKRKPVSEVVKVTRREIVDERPVRLSKKVSKPSTSKKTSQPKAESPLDSFLKSLGLEKYSITFQAEEVDMAALRHMTESDLKALGIPMGPRKKITLALESRA

SEQ ID NO: 56062 - DNA, 1061 bp, Glycine max
  misc_feature (1)..(1061): Ceres Seq. ID no. 13595183
gctaggttttcagtctctcgcctccaccagcgcctccacgccgccgaggaacggagcaggaagtgacgccggaggaggacgctctgctcgtcgtccgccgcatctcgcgcccgcccaacccgaacgccccgaaaggccaccaaagccgtagccttcttcttcctagagctcccgcagcatgtcggcatccaccagcggcggcggggggctctcgccgcaggcggccgcggcgctccaggagggcgtcgggctggtgttcatgcggtggacggcgctgcagatggcggtggagaacgggtggggcggccgcgactcccgcgccaaggccgaccggctcgccgccgacgtcctcgccttcttcaccacctccaaaggtccatattattatgatgacttggaggagatgatgtttgacagcatatccgaatccttcaatgctgactttgaggatggaagtgttggggaggttgctgaacaagtattgattatgcatgaagaatgcctgcaaaacaactattcgtcgattgagaagctaaggaacacacgtgctcaaggaaatgctgtttcccaaagtagaatgatggtaactgatgaaggcgatgatagctcggatgatagctcggacgatgacgacggcgatgaaccagccagcgcagatgatatgtcggtggatgagccaaagcctcccaagcctgcccctgacgctgatgggtggactgttgtgccaccgaagcgcggcggccggggcaagaattaagcacagaagcaaaccctggcaacaaactgccatctgagaggccgttttggtctgaaggctttgaggtgtgattagcaaaaccttggcaaccacttcctgccacttgtgccattttggtcttggaggttttgaagtgttgcgcttcacctgtattacttcgattttgtcaggaatgttggttgtgtagcatgttttccttggttactctcttggtgttcagacttggcggcgaaagatctggattgtaagcgggtctgacatatccttatgcacattttgaactgatgcttatctgtatcgtcgc

SEQ ID NO: 56063 - protein, 192 aa, Glycine max
  peptide (1)..(192): Ceres Seq. ID no. 13595184
MSASTSGGGGLSPQAAAALQEGVGLVFMRWTALQMAVENGWGGRDSRAKADRLAADVLAFFTTSKGPYYYDDLEEMMFDSISESFNADFEDGSVGEVAEQVLIMHEECLQNNYSSIEKLRNTRAQGNAVSQSRMMVTDEGDDSSDDSSDDDDGDEPASADDMSVDEPKPPKPAPDADGWTVVPPKRGGRGKN

SEQ ID NO: 56064 - protein, 165 aa, Glycine max
  peptide (1)..(165): Ceres Seq. ID no. 13595185
MRWTALQMAVENGWGGRDSRAKADRLAADVLAFFTTSKGPYYYDDLEEMMFDSISESFNADFEDGSVGEVAEQVLIMHEECLQNNYSSIEKLRNTRAQGNAVSQSRMMVTDEGDDSSDDSSDDDDGDEPASADDMSVDEPKPPKPAPDADGWTVVPPKRGGRGKN

SEQ ID NO: 56065 - protein, 158 aa, Glycine max
  peptide (1)..(158): Ceres Seq. ID no. 13595186
MAVENGWGGRDSRAKADRLAADVLAFFTTSKGPYYYDDLEEMMFDSISESFNADFEDGSVGEVAEQVLIMHEECLQNNYSSIEKLRNTRAQGNAVSQSRMMVTDEGDDSSDDSSDDDDGDEPASADDMSVDEPKPPKPAPDADGWTVVPPKRGGRGKN

SEQ ID NO: 56066 - DNA, 931 bp, Glycine max
  misc_feature (1)..(931): Ceres Seq. ID no. 12611212
gcggtgtgaacgatgggctctctgtcggactcgcaggcgaatggcgaccgtcagccgccgccggcggaggcggaggatgccgggccgcaggtcgaggagggagataccggcgagaagatggagggcgtcgcatccatcgcgctgctaccctctggcgccatctccggccacttcatccgcctcccggactccgcctgctacggcctccagggcaccccgataccatgcgagagggaatgtagccgaggagatgattaccgccttataaagctatccatcattaattttaagaggaagacagagaaggtggttgtggtggaatgcaggggacatgatgctgctcgattacaaaacattgaccatttgcatggatgggaagatgacgttgttggactggttcaaaagaaacatgggaataagaaagtcttggtctctttcgaatgcgagacgctgaaggctgataaagccgctgaagaacatattagcaagtatatgccaaatctttgcggactggacgcagttgtaaacacggggaagatgagtatctccggcatcaacctagacgaggacgatgaaccaagcggcgacagctgagagcagaaacacgttgtcaatgtgttagctgcgacggtttctctgcctcgtcgatgccgtcgacaaagcaggactgtgtgtcgctgttacccacagcatgagttttatgcaacaaatcagcacttgtgcacttgaaacggagcgctgtgtagcaagtgtatacctaaacggaatgtgtgttgctgttgctgcctctggcatgatcctgctgaggcgattgtacacccttggacctaggtttggtgttgggtgggccattggcggcgcaagccttcgtccccgcccgtgctgtttgtcacgcatgtacgggcagatatcttgcatttcctgtttcctc

SEQ ID NO: 56067 - protein, 193 aa, Glycine max
  peptide (1)..(193): Ceres Seq. ID no. 12611213
MGSLSDSQANGDRQPPPAEAEDAGPQVEEGDTGEKMEGVASIALLPSGAISGHFIRLPDSACYGLQGTPIPCERECSRGDDYRLIKLSIINFKRKTEKVVVVECRGHDAARLQNIDHLHGWEDDVVGLVQKKHGNKKVLVSFECETLKADKAAEEHISKYMPNLCGLDAVVNTGKMSISGINLDEDDEPSGDS

SEQ ID NO: 56068 - protein, 158 aa, Glycine max
  peptide (1)..(158): Ceres Seq. ID no. 12611214
MEGVASIALLPSGAISGHFIRLPDSACYGLQGTPIPCERECSRGDDYRLIKLSIINFKRKTEKVVVVECRGHDAARLQNIDHLHGWEDDVVGLVQKKHGNKKVLVSFECETLKADKAAEEHISKYMPNLCGLDAVVNTGKMSISGINLDEDDEPSGDS

SEQ ID NO: 56069 - DNA, 708 bp, Glycine max
  misc_feature (1)..(708): Ceres Seq. ID no. 15172705
atcaccaccacttctaacacagcctcctcctcctcttcgatctctctctctctcgatcaaaatggctaacccaagagtcttcttcgacatgaccctcgacggcgcccccgccggccgcatcgtgatggagctttacaaagacacgaccccgaacaccgccgagaacttccgagccctctgcaccggcgagaaaggtgtcggaaagaaggggaagcctctccacttcaagggatcggccttccaccgcgtgatccccgggttcatgtgccagggaggcgatttcaccgccgggaacgggaccggcggggagtcgatctacggcgataagttcaaggacgagaacttcgcgaagaagcacaccggggcggggatcctctccatggcgaactctggtcccaacactaacggatctcagttttttatctgcaccgcggagacgtcgtggctcgatgggaagcacgtggtgtttgggaaggttgttgaaggtatggaggttgtgaaggcgatcgagaaggttggatcgtcttctgggacgacgaagaagaaggttgttgttgctgattgtggtcaggttgcttagatctgagtgatctgatgatgatgaatgttatcttttgcttttttaatgtttttttttctgatcgttcgagtttgtaaaaccctgagggttttttggatttgactgcctttgaataattatgaataact

SEQ ID NO: 56070 - protein, 192 aa, Glycine max
  peptide (1)..(192): Ceres Seq. ID no. 15172706
SPPLLTQPPPPLRSLSLSIKMANPRVFFDMTLDGAPAGRIVMELYKDTTPNTAENFRALCTGEKGVGKKGKPLHFKGSAFHRVIPGFMCQGGDFTAGNGTGGESIYGDKFKDENFAKKHTGAGILSMANSGPNTNGSQFFICTAETSWLDGKHVVFGKVVEGMEVVKAIEKVGSSSGTTKKKVVVADCGQVA

SEQ ID NO: 56071 - protein, 172 aa, Glycine max
  peptide (1)..(172): Ceres Seq. ID no. 15172707
MANPRVFFDMTLDGAPAGRIVMELYKDTTPNTAENFRALCTGEKGVGKKGKPLHFKGSAFHRVIPGFMCQGGDFTAGNGTGGESIYGDKFKDENFAKKHTGAGILSMANSGPNTNGSQFFICTAETSWLDGKHVVFGKVVEGMEVVKAIEKVGSSSGTTKKKVVVADCGQVA

SEQ ID NO: 56072 - protein, 163 aa, Glycine max
  peptide (1)..(163): Ceres Seq. ID no. 15172708
MTLDGAPAGRIVMELYKDTTPNTAENFRALCTGEKGVGKKGKPLHFKGSAFHRVIPGFMCQGGDFTAGNGTGGESIYGDKFKDENFAKKHTGAGILSMANSGPNTNGSQFFICTAETSWLDGKHVVFGKVVEGMEVVKAIEKVGSSSGTTKKKVVVADCGQVA

SEQ ID NO: 56073 - DNA, 801 bp, Glycine max
  misc_feature (1)..(801): Ceres Seq. ID no. 12610341
cttaaaagaaaaattagcaggcaatgtctgagaattctgataattgaagagaaaacagccgggttcgtgaaaaatatttgatcgtctggcgtaaatctaaccttgttcgcattcagcttttcttgtggaaggatagaaaaggttgagaagagacttgtgaatggcagacatacctagacacctgcgtgcttgtttggatatggggaaaatagctttcttagctatccttgtttctggaggaatcgtcttgcaaattctggcttgtgctctgtataataactggtggccaatgctaagtgtgataatgtatgtgcttctcccaatgcctttgctcttcttcgctggatcggacagtacatctctcttcaatgaatcagacaatagctggatcaatgcagcaaagttcttgactggtgcatcagcagttggaagcatcgccataccttcgattctaaaacacgctggactcatcggttggggagcattagcctttgatctctcttcctacgttgtcttcattgttgctattctgagttacatttgcataggagatgacagtgacaactactacagctacatataaaagtgacatacaaagtcatcatcattattttctcaagctctctgctcttttaccaccttgccgacggttcaaaaaggagaatctcttcttgagagggatcactcaattgtatgtatgattgaatgaatgaatgactgaatggctgttgtaagttgaaaactttatatgtttttgtgttggttttggtgtatagaatgaaaatatttcatttttttcct

SEQ ID NO: 56074 - protein, 140 aa, Glycine max
  peptide (1)..(140): Ceres Seq. ID no. 12610342
MADIPRHLRACLDMGKIAFLAILVSGGIVLQILACALYNNWWPMLSVIMYVLLPMPLLFFAGSDSTSLFNESDNSWINAAKFLTGASAVGSIAIPSILKHAGLIGWGALAFDLSSYVVFIVAILSYICIGDDSDNYYSYI

SEQ ID NO: 56075 - protein, 127 aa, Glycine max
  peptide (1)..(127): Ceres Seq. ID no. 12610343
MGKIAFLAILVSGGIVLQILACALYNNWWPMLSVIMYVLLPMPLLFFAGSDSTSLFNESDNSWINAAKFLTGASAVGSIAIPSILKHAGLIGWGALAFDLSSYVVFIVAILSYICIGDDSDNYYSYI

SEQ ID NO: 56076 - protein, 97 aa, Glycine max
  peptide (1)..(97): Ceres Seq. ID no. 12610344
MLSVIMYVLLPMPLLFFAGSDSTSLFNESDNSWINAAKFLTGASAVGSIAIPSILKHAGLIGWGALAFDLSSYVVFIVAILSYICIGDDSDNYYSYI

SEQ ID NO: 56077 - DNA, 711 bp, Glycine max
  misc_feature (1)..(711): Ceres Seq. ID no. 12610679
aaggtaatcaactcgctcctactgactcagtccgagtcacccgattcactaacgaatcttcactcttgttcacagaacttgagatgaaaggcggccaatcgaaagcagaagcaacgagcacagatcaaagactcaaaaccagaggaaggaagaagaagacggcgacgaaggacccaaacaaacctaagagacctccaagcgctttcttcgtcttcttagatgattttcgacgggagttcaaagaggcgaaccctaacaacaagtccgtcgccgccgttggtaaggctgctggagctaagtggaagtctatgactgaggaagagaaagctccttatgcttccaaggcagagaccaggaagagtgaatataataagagtatgcaacagtacaacatgaaactggctaatggaaccagtagaggtgaagatgatgagtccaagtctgaagttgacgaagctggaggagcaagcgaagcggaggaagaagacgatgattaaggaggctttctcgtctaggttactgccattgactgactcagatttgtggatgggattagtaatttaaatgtgtcccaaaaaaaaactgaaaaactggttatgctttgtgtttgtaatattaagaacctcagttgctacttcttcgtgtttaggtcagttgtatggtcggataggatcacttggatgctatgtctccttattaccttctgtgttt

SEQ ID NO: 56078 - protein, 164 aa, Glycine max
  peptide (1)..(164): Ceres Seq. ID no. 12610680
GNQLAPTDSVRVTRFTNESSLLFTELEMKGGQSKAEATSTDQRLKTRGRKKKTATKDPNKPKRPPSAFFVFLDDFRREFKEANPNNKSVAAVGKAAGAKWKSMTEEEKAPYASKAETRKSEYNKSMQQYNMKLANGTSRGEDDESKSEVDEAGGASEAEEEDDD

SEQ ID NO: 56079 - protein, 137 aa, Glycine max
  peptide (1)..(137): Ceres Seq. ID no. 12610681
MKGGQSKAEATSTDQRLKTRGRKKKTATKDPNKPKRPPSAFFVFLDDFRREFKEANPNNKSVAAVGKAAGAKWKSMTEEEKAPYASKAETRKSEYNKSMQQYNMKLANGTSRGEDDESKSEVDEAGGASEAEEEDDD

SEQ ID NO: 56080 - DNA, 1128 bp, Glycine max
  misc_feature (1)..(1128): Ceres Seq. ID no. 13595304
atttacctcgtcaggtcctcccaacaccataacttagcaggtaggttcgcttagagttcagccgaggtttctccatcagccaagcgcaatcggactaggaaagtgtactgcgactccggagtgagggataggaaggaggaggaggcttcagccgagacccaagggagaaagatctcgtatcagataggcaactgcagcagtagagttcaacaagcgaagggggaaatggcaattggacagaccatgccgaaggggtctctcgccacgagcttgagcttcccaagcagcggcagcacaaggattctggggaggaagagggtcgctgtttctccggctccaagcccctcaggcccgcactccccggttcggactctgcgcaagcagcgcagcattaggttccacatggacgacaccatctgcctccttgaatcgctgcctcaagatgtattggtcaaagtcctgtgcaaggtgaaccacagcgacctgaggcagctcctcctggtgtcgaagccagtcagcgaagcaacagtggttgctaaggagctgcatttcgccttcgcgacgccctcgaaggcctccgcggatgcggaggaagaagacgatggccccggggcgcccaagcaacacagggttgcacggtcgcgctgccggggcatgaatttggcaagcgtcgccgtcaatctgtcggagtcgttcagcagcttgatgtcagaggtgtaggtgtacataccacggcacgaattttcccgcttgtacttgtccatcggagcgctcttttttcttcataggccacgtcgaacaaactttagttagtgatatatgtagtgatcatcatatgtattagtagtaagttatatatggtcattcttcaatgatgcgattgaagaggacacgctgtcttatttctgtgtactgtatgtaatagtgtaagttatatgtaagcgtctgagtgttggagctcatcaaaagagtatttagtgtaagttwwwtgcaagcgtcagtgttggaactcatgagaagagaagtctcttctcactttgtgtatgctgtagtgtacgatctctgtatactcgtgtgcatgggaagtttctcttatcaataaaagtaaaagcagtttgttntcggtcg

SEQ ID NO: 56081 - protein, 164 aa, Glycine max
  peptide (1)..(164): Ceres Seq. ID no. 15221536
MAIGQTMPKGSLATSLSFPSSGSTRILGRKRVAVSPAPSPSGPHSPVRTLRKQRSIRFHMDDTICLLESLPQDVLVKVLCKVNHSDLRQLLLVSKPVSEATVVAKELHFAFATPSKASADAEEEDDGPGAPKQHRVARSRCRGMNLASVAVNLSESFSSLMSEV

SEQ ID NO: 56082 - protein, 158 aa, Glycine max
  peptide (1)..(158): Ceres Seq. ID no. 15221537
MPKGSLATSLSFPSSGSTRILGRKRVAVSPAPSPSGPHSPVRTLRKQRSIRFHMDDTICLLESLPQDVLVKVLCKVNHSDLRQLLLVSKPVSEATVVAKELHFAFATPSKASADAEEEDDGPGAPKQHRVARSRCRGMNLASVAVNLSESFSSLMSEV

SEQ ID NO: 56083 - protein, 105 aa, Glycine max
  peptide (1)..(105): Ceres Seq. ID no. 15221538
MDDTICLLESLPQDVLVKVLCKVNHSDLRQLLLVSKPVSEATVVAKELHFAFATPSKASADAEEEDDGPGAPKQHRVARSRCRGMNLASVAVNLSESFSSLMSEV

SEQ ID NO: 56084 - DNA, 978 bp, Glycine max
  misc_feature (1)..(978): Ceres Seq. ID no. 13595376
acctagaacatcctaatcgaaaaaaaaaaactccgattccgagtaccataggacccaacggtaaaaggatggcgaccaaagcagccccaccgaccctggtggtctcgcaccattagaatccccttccccaacccaaatcggccgccgccgagccctcgaccgtcaccggagccgccgagccaaccaccgaagcgcctcgaacccctcgtcctcctcctcgtgcctgccatcctccaccggatcggcgcggatcggaggctcccgcgaagcgattcctcctgtcaggcagtcgagatgtcggagtaccagaacgtcgttggggggaggctcaagctgaaggggaaaccgctggatgtcaaggagggcggagtcaagaagaagaataagaagaagcaccgccgcgaggagtcgtctcaaggcgagcacggcgagctccgcgaaggtggaagctctgaattgccaggtgaccctgacaatgagttcagtgaagctgacaagctgggagaggaagggagtgcgcaagccgattatgatcacctcactccagctgagaggcgttacattgaacagaagcagaagatcgacgtacacaagttggccaaggtggctgacaagtcgcacagggaccgcatccaggacttcaaccagtacctcgcaaatcttagtgagcactatgatatcccgaaggtcggccctggttaattaaggtccgcaagtgctccagtgtgctggacctatgcatgtagctcgtcaatttcgcgtgggtgtgctctgaaacaatggatgattgtgttgtcttcagagataaactgagtatctctgcacttataagctgattgcactttatctctgtttaaagaccatgtttaatatacttccaagtgttctgagtaaaaaaaaaaaaaaaaaagcttatcgataccgtcgacctcgagggggggcccgkttaaacmcaataaagttggaacgggagggggg

SEQ ID NO: 56085 - protein, 135 aa, Glycine max
  peptide (1)..(135): Ceres Seq. ID no. 15221565
MSEYQNVVGGRLKLKGKPLDVKEGGVKKKNKKKHRREESSQGEHGELREGGSSELPGDPDNEFSEADKLGEEGSAQADYDHLTPAERRYIEQKQKIDVHKLAKVADKSHRDRIQDFNQYLANLSEHYDIPKVGPG

SEQ ID NO: 56086 - protein, 117 aa, Glycine max
  peptide (1)..(117): Ceres Seq. ID no. 15221566
MSRRAESRRRIRRSTAARSRLKASTASSAKVEALNCQVTLTMSSVKLTSWERKGVRKPIMITSLQLRGVTLNRSRRSTYTSWPRWLTSRTGTASRTSTSTSQILVSTMISRRSALVN

SEQ ID NO: 56087 - protein, 76 aa, Glycine max
  peptide (1)..(76): Ceres Seq. ID no. 15221567
MSSVKLTSWERKGVRKPIMITSLQLRGVTLNRSRRSTYTSWPRWLTSRTGTASRTSTSTSQILVSTMISRRSALVN

SEQ ID NO: 56088 - DNA, 809 bp, Glycine max
  misc_feature (1)..(809): Ceres Seq. ID no. 13595377
ccatcccaccacattcaagtcgaagaagctcctcgatctccatcactgcaaccagccacttgagctctgaatctttgaagctcagccagttcgccgcgaccaccgagagcctcaagtttcgccatgtcgagcgccggccagaagcagcagcagcagcagcaggcgaagaagccggcggcggcggaggacgtcgagatcaagaaggtcttctcccgcttcgacacggacggcgacggccggatctcgccgtccgagctggcggccgtgtcgcgcgccatcgcgccgccggccaccgagtccgcgcagggccgcgaggtggcgtccatgatggacgagctcgacaccgaccgcgacggctacgtggacctcggcgagttcgccgccttccacggccgcggccgcgaggagcgcgagctcgacgccgagctgcgcgacgccttcgacgtctacgacatcaacggcgacggccgcatctccgtcgccgagctcagcaaggtcctgagccgcatcggcgagggatgcagcaccgaggagtgcgagaagatgatcgcctccgtcgacgtcgacggcgacggctgcgtcggattcgaggagttcaagaagatgatgaccgccggtgacgccggcgcaccacctcaacccgaagcgatcgccgtgcctgacagcaacaaacccaagaaggagtgatacatgtgcttttgcttgtaaaaaaattgtaatccgagggagcgaattagttgtcagtccctgttggccatagtcttctggtctgaaaaaaaatgggaataaggatcaatgtgcaattgccg

SEQ ID NO: 56089 - protein, 205 aa, Glycine max
  peptide (1)..(205): Ceres Seq. ID no. 13595378
IPPHSSRRSSSISITATSHLSSESLKLSQFAATTESLKFRHVERRPEAAAAAAGEEAGGGGGRRDQEGLLPLRHGRRRPDLAVRAGGRVARHRAAGHRVRAGPRGGVHDGRARHRPRRLRGPRRVRRLPRPRPRGARARRRAARRLRRLRHQRRRPHLRRRAQQGPEPHRRGMQHRGVREDDRLRRRRRRRLRRIRGVQEDDDRR

SEQ ID NO: 56090 - protein, 187 aa, Glycine max
  peptide (1)..(187): Ceres Seq. ID no. 13595379
MSSAGQKQQQQQQAKKPAAAEDVEIKKVFSRFDTDGDGRISPSELAAVSRAIAPPATESAQGREVASMMDELDTDRDGYVDLGEFAAFHGRGREERELDAELRDAFDVYDINGDGRISVAELSKVLSRIGEGCSTEECEKMIASVDVDGDGCVGFEEFKKMMTAGDAGAPPQPEAIAVPDSNKPKKE

SEQ ID NO: 56091 - protein, 120 aa, Glycine max
  peptide (1)..(120): Ceres Seq. ID no. 13595380
MMDELDTDRDGYVDLGEFAAFHGRGREERELDAELRDAFDVYDINGDGRISVAELSKVLSRIGEGCSTEECEKMIASVDVDGDGCVGFEEFKKMMTAGDAGAPPQPEAIAVPDSNKPKKE

SEQ ID NO: 56092 - DNA, 679 bp, Glycine max
  misc_feature (1)..(679): Ceres Seq. ID no. 13595826
acaaccaatcatacaaaaacacacacaacagataaaaagaagaaaatcttcggttgataaaaactatttaaatgaagaggaacggtgaaactaagcggcggaggaacgtggcggaagaggcggagcagggaggaggagatccggcgatgtgggaggatcttgatcggaatttcagacaagtgcaatctgttttggacagaaacagatcacttatccagcaagtcaacgacaatcaccagtcaagaatggcagataacatgtccaagaacgttgctttgatccaagaactcaatggaaacatctctaaggttgcttcgatgtattctgacctcaacaccaatttctcctcggcgtttcacggtggaaagaacggacgcgacggtggtggaactaccggaaccagagctaattaaccaaccctgatcaaattgatctttcttagttggaccggccggtttgaaaatttcgaatcagtcggtttaacatataattttttttttgttgtcacggaacatatgatctaaacctgttatataagttatgttattgcaatgattgtcgttagaataatccgtgggagaaaacccattgtttgggttattttaattatggttttgagtctttttcaacgtgtctctactctactgcaatttctctgataataacaataaatatttag

SEQ ID NO: 56093 - protein, 113 aa, Glycine max
  peptide (1)..(113): Ceres Seq. ID no. 13595827
MKRNGETKRRRNVAEEAEQGGGDPAMWEDLDRNFRQVQSVLDRNRSLIQQVNDNHQSRMADNMSKNVALIQELNGNISKVASMYSDLNTNFSSAFHGGKNGRDGGGTTGTRAN

SEQ ID NO: 56094 - protein, 88 aa, Glycine max
  peptide (1)..(88): Ceres Seq. ID no. 13595828
MWEDLDRNFRQVQSVLDRNRSLIQQVNDNHQSRMADNMSKNVALIQELNGNISKVASMYSDLNTNFSSAFHGGKNGRDGGGTTGTRAN

SEQ ID NO: 56095 - DNA, 1010 bp, Glycine max
  misc_feature (1)..(1010): Ceres Seq. ID no. 13595084
cgtcgcctcgtgcgcatcaccacttcaccacaatccccatttcccaaagctcgaccaaagccgtgacactcctcccccacctcgtcccaaaccctagccacccccgccgatcccaatggccgccgcccaccaccggcccctccacgccctcctcggcggcggcgcagtcgccgacctgctcctctggaggcggaggaacgcctccgcggcggccgtcgcgggcgccacgctcgtctggttcctcttcgagcgcgccgggtacagcctcgcgtcggtcctctccaacgccctcctcctcctcgtcgtcatcctcttcttctgggccaagtccgcctcgctgctcaacagacctcttccaccactgcctaatctagaggtctcagatggggtcgttgagaaagttgtaggtcgggctcttgtatggataaacaaggtgttggctgttgcccatgacattgccatcaagagagaccggacagtttttatacaggttataatggctctatgggtggtttcatgtattgggatgctcttcaacttctttacgctcatttacattggtgtactactcgctctgttggttcccccggtatatgagaggcaccaggatgttattgatgaaaaggttggtttagcacacagcatactgtcaaggcagttgagtaccgtcgctagcaagacagggcaaccacctaaacaaaagaaggctgagtagaagaaatattttggcccatttggaagctctccagttgttctactatgttacaaacaccgtgatccatccaccgctgagagtatttctggatatccagggcataatgtttaactgctgatacgtgggtttagatgcacgctcttcaatctgggaagtggaatgatttgtatattgtttccatgaacatgaaacttgtcgaggtttaccatgggcacatcttgtggataatgctgtatacctttctctacgtgcgatgttgtgtcttgcatgtacaaatgcggtgcttgctcgtgtc

SEQ ID NO: 56096 - protein, 199 aa, Glycine max
  peptide (1)..(199): Ceres Seq. ID no. 13595085
MAAAHHRPLHALLGGGAVADLLLWRRRNASAAAVAGATLVWFLFERAGYSLASVLSNALLLLVVILFFWAKSASLLNRPLPPLPNLEVSDGVVEKVVGRALVWINKVLAVAHDIAIKRDRTVFIQVIMALWVVSCIGMLFNFFTLIYIGVLLALLVPPVYERHQDVIDEKVGLAHSILSRQLSTVASKTGQPPKQKKAE

SEQ ID NO: 56097 - protein, 123 aa, Glycine max
  peptide (1)..(123): Ceres Seq. ID no. 13595086
SPRAHHHFTTIPISQSSTKAVTLLPHLVPNPSHPRRSQWPPPTTGPSTPSSAAAQSPTCSSGGGGTPPRRPSRAPRSSGSSSSAPGTASRRSSPTPSSSSSSSSSSGPSPPRCSTDLFHHCLI

SEQ ID NO: 56098 - DNA, 654 bp, Glycine max
  misc_feature (1)..(654): Ceres Seq. ID no. 13638986
actgttctctaatctaaatctaatttcacctttcctacaaaacctaaaacctttttcttattacacaacctaaaagtctctaagtttctgacaatgtcggaagagttcgacgaatctgagatcattttctccgacagcttcttcccaattcgccgccgcgaggacgtgatcgagaaagagaatcgtccggttaatttccgagaaaactccgaaagcagaatgagaaacacatcgaggctgagtaaaacgacgccgttgccttcaccggcggttttctcatcgtcgcttccagtgaatattccgggaaggaggtattctgaggatgaggaatattcggaagacggaggaaggagaatggttccgccgcatctgatcgttggacggaggatcgaaagcggtcaaatggcgttttccgtttgtacaggtcagggaaggactcttaaaggccgagatctgagccgggttcgtaattcggttctcaggttaaccggttttttggaggcttaaatatggaccggtttttgatttattaaaaaaattcgtcttccaatttttttttttatttagcggaagaaatcagttgtctgatattgttgttagtttagtcacttgaacgaatgtcaaaaggaaaatgtcaaaaagaacatttatttc

SEQ ID NO: 56099 - protein, 137 aa, Glycine max
  peptide (1)..(137): Ceres Seq. ID no. 13638987
MSEEFDESEIIFSDSFFPIRRREDVIEKENRPVNFRENSESRMRNTSRLSKTTPLPSPAVFSSSLPVNIPGRRYSEDEEYSEDGGRRMVPPHLIVGRRIESGQMAFSVCTGQGRTLKGRDLSRVRNSVLRLTGFLEA

SEQ ID NO: 56100 - protein, 95 aa, Glycine max
  peptide (1)..(95): Ceres Seq. ID no. 13638988
MRNTSRLSKTTPLPSPAVFSSSLPVNIPGRRYSEDEEYSEDGGRRMVPPHLIVGRRIESGQMAFSVCTGQGRTLKGRDLSRVRNSVLRLTGFLEA

SEQ ID NO: 56101 - DNA, 1165 bp, Glycine max
  misc_feature (1)..(1165): Ceres Seq. ID no. 12611235
agagcgagggcgaccaataaattcctaatttttcccacttttccaccccgggattccccgcctcttgttccaatcgattggtgggcgtcctcgttcttggcttcccgattgaatccgtgggaagccagagataattctctctccgctgcgaatttttttttggtggtttgagttcttgatttgtttgcgaggaagccatcatgagcgccggaagcgccagtttcctcgagatccagccctcggagctggcatttccctttgaattgatgaagcagagctcgtgctccatgcaactcgcaaataagaccgaccgttatgtagcattcaaggtcaaaactaccaacccaaagcagtactgtgtgcgccctaatatcggcgttgtacttcctgggtcgacttgtgatgttacagttacaatgcaagcgcagagggaagcacctgctgatctgcagtgtaaggacaagttcctagttcaaagtgttgcagctgagaatggcgcagcaactcaagatattagtgcagcaatgttcaacaaagagccagggaaggttgttgatgaatgcaagctgcgtgtaatttatgtgccaacatcttcacctagcccgttctctgaagattcagaacaagggagttctgctcgttcattggaaaacgggacccctaattctacattgccacaatctgtatttagatcatctggtgaagcatcaaaggataagtcctcggaggcgacgtccatgatttccaagctaactgaggagaaaatgtctgctgttcagcaaaaccagaagttgagacaagagctggatgtcctacgcaaagagagcagcaaaagcaacggcggtttctcaatcaccttcttgattgtggtgggtattctgggcatcatcgctggtttcatcctcaagaagacataggagaagagtagtccccaacaaagttacattcccaggaaaggacggataccagcaacatcccttgtgtttttactcctaaaaggagcgcctgttctattctaacttgtaacggcttagaagctttggtttgtgtacattacatggtggttttcatgattttaatcacatcgagtagacttgttttaattataattcttaacagctgcaagttatgtcacgttcaccataacctttaattcattctggtc

SEQ ID NO: 56102 - protein, 238 aa, Glycine max
  peptide (1)..(238): Ceres Seq. ID no. 12611236
MSAGSASFLEIQPSELAFPFELMKQSSCSMQLANKTDRYVAFKVKTTNPKQYCVRPNIGVVLPGSTCDVTVTMQAQREAPADLQCKDKFLVQSVAAENGAATQDISAAMFNKEPGKVVDECKLRVIYVPTSSPSPFSEDSEQGSSARSLENGTPNSTLPQSVFRSSGEASKDKSSEATSMISKLTEEKMSAVQQNQKLRQELDVLRKESSKSNGGFSITFLIVVGILGIIAGFILKKT

SEQ ID NO: 56103 - protein, 216 aa, Glycine max
  peptide (1)..(216): Ceres Seq. ID no. 12611237
MKQSSCSMQLANKTDRYVAFKVKTTNPKQYCVRPNIGVVLPGSTCDVTVTMQAQREAPADLQCKDKFLVQSVAAENGAATQDISAAMFNKEPGKVVDECKLRVIYVPTSSPSPFSEDSEQGSSARSLENGTPNSTLPQSVFRSSGEASKDKSSEATSMISKLTEEKMSAVQQNQKLRQELDVLRKESSKSNGGFSITFLIVVGILGIIAGFILKKT

SEQ ID NO: 56104 - protein, 209 aa, Glycine max
  peptide (1)..(209): Ceres Seq. ID no. 12611238
MQLANKTDRYVAFKVKTTNPKQYCVRPNIGVVLPGSTCDVTVTMQAQREAPADLQCKDKFLVQSVAAENGAATQDISAAMFNKEPGKVVDECKLRVIYVPTSSPSPFSEDSEQGSSARSLENGTPNSTLPQSVFRSSGEASKDKSSEATSMISKLTEEKMSAVQQNQKLRQELDVLRKESSKSNGGFSITFLIVVGILGIIAGFILKKT

SEQ ID NO: 56105 - DNA, 750 bp, Glycine max
  misc_feature (1)..(750): Ceres Seq. ID no. 13639786
accggtaaagtaactagtggcaagtggtactgtaaaacatcacatcgtcgcaccgtgacggtgttcggccgagccggtcgatcgacacggcagccagcatgaaggcgtcctgcttactggtcgtgcttctgctcgccgtcgccacggggagcaggctctcgctcgccgcccgcgagggcagcaccctgggcggcgagctcggcgagctcatcgccaaggccggcagcttcctcacgtcggcgcgccgcgcgggagcagacggctggcactccgccacggccgcggaggtggacgcctcggcgaagaaggggcacggccatccggcggggccgaggaagcgtctgaagaagtcgtcggtgaactgcatcccggccgacatgtgccggaagaagaaggtgctgtgcggcaagcggtgctacaagacgtcgcacgctgccggcgccggcctcgaccacgtcccctccaaccggtgcgtcgtcaggtgcaagaagtgcgtgcccacctgctagatcgatcgttggttgctcctacccttccctcttctgggttacgtgtcgtgtcgtgtcgtggtgctcgatccgtgcatgctagctacatttgcttttccttccatagggttcatgcatcagttgaataagcaggcgggcttcccgccatcatgcatgcagtataggtagtggatgggttctactctaaaagaaatgcaccacggttgtgtgctaagtttgaacgtgatctcatctcatcttt

SEQ ID NO: 56106 - protein, 136 aa, Glycine max
  peptide (1)..(136): Ceres Seq. ID no. 13639787
MKASCLLVVLLLAVATGSRLSLAAREGSTLGGELGELIAKAGSFLTSARRAGADGWHSATAAEVDASAKKGHGHPAGPRKRLKKSSVNCIPADMCRKKKVLCGKRCYKTSHAAGAGLDHVPSNRCVVRCKKCVPTC

SEQ ID NO: 56107 - DNA, 1003 bp, Glycine max
  misc_feature (1)..(1003): Ceres Seq. ID no. 13504028
ttgacaatgtgaaatccatataatgtagtgcttgatttgggatgcttgttattgttattccatactgaaaaggtgtgtccttgtggttaactttcattaactatgttgctattgccagatgaattgaagccttctaatgtgggtcttgaacaagaggcgcaattggtgcgtggatggaaaggttctttgaatggcaccaatggcaaaaaggggcgcaatggaagttatcagtatccaccctccattaagtacattcacttgcatgaatgtgacaaattctctatgggaatcttctgtatgtctcctggttccgttattccgcttcataaccatcccggaatgactgttttgagcaagcttctttatggttcattacttgtgaggtcatatgattggctggatttacctgggccagatgatccatctcaagctagaccagcaaaacttgtgaaagattgtcagatgagtgccccctgtaacaccacagttctttatccaagcaagggtggcaacattcattgtttcaaagccttaaccccttgcgctctctttgacgttctttcccctccttactcatcagaagatggaagacactgctcatatttcaggaagtcaactaggaaagatcttccaggtgttgagcttgatcagctgagtggtgtaaagccatctgaaataacctggctagaagagatccaagcacctgaaaacctggtggttagaagaggtgtttacaaaggccctactataagacgatgaaggatacaactaatttgtatttacataacattagccaggcatgactagaaactaaatatgatggggatataaattaaaggtggtatatcttgggaataattgaccatctgctttatatgattgttaactgtacatactgtgataaatgatggcagttaatgttgatcatgccttgtgtatccttgttctaactagcccctttttagattattagaggaatagcaccaacatggtgatctttggc

SEQ ID NO: 56108 - protein, 218 aa, Glycine max
  peptide (1)..(218): Ceres Seq. ID no. 13504029
MLLLPDELKPSNVGLEQEAQLVRGWKGSLNGTNGKKGRNGSYQYPPSIKYIHLHECDKFSMGIFCMSPGSVIPLHNHPGMTVLSKLLYGSLLVRSYDWLDLPGPDDPSQARPAKLVKDCQMSAPCNTTVLYPSKGGNIHCFKALTPCALFDVLSPPYSSEDGRHCSYFRKSTRKDLPGVELDQLSGVKPSEITWLEEIQAPENLVVRRGVYKGPTIRR

SEQ ID NO: 56109 - protein, 158 aa, Glycine max
  peptide (1)..(158): Ceres Seq. ID no. 13504030
MGIFCMSPGSVIPLHNHPGMTVLSKLLYGSLLVRSYDWLDLPGPDDPSQARPAKLVKDCQMSAPCNTTVLYPSKGGNIHCFKALTPCALFDVLSPPYSSEDGRHCSYFRKSTRKDLPGVELDQLSGVKPSEITWLEEIQAPENLVVRRGVYKGPTIRR

SEQ ID NO: 56110 - protein, 153 aa, Glycine max
  peptide (1)..(153): Ceres Seq. ID no. 13504031
MSPGSVIPLHNHPGMTVLSKLLYGSLLVRSYDWLDLPGPDDPSQARPAKLVKDCQMSAPCNTTVLYPSKGGNIHCFKALTPCALFDVLSPPYSSEDGRHCSYFRKSTRKDLPGVELDQLSGVKPSEITWLEEIQAPENLVVRRGVYKGPTIRR

SEQ ID NO: 56111 - DNA, 794 bp, Glycine max
  misc_feature (1)..(794): Ceres Seq. ID no. 12583773
gacacgaaacacgcagaagtgttgtggcattcggtagataaaaatctctcgaaacataggcttataaaatgccaaagattgggccattttggtaatttcatgttacaagatatgttttctgcgttccccttttgcctatataaatgctagtatgtagagtgagcaagtcactaactcaattagaattcttcaaaaaactctagaatttgcatgcactgttcttcatacaatggcattacgcgagcttattgtgatggggttattgctgctggtttgtcttgcaaaggtttcatctgatgttaacatagaaaaggagcaagatgaagaatttcgctttcctgttgaccatcttatcgtgagaggcgggaacagaaggctaatgcaggacatagattgtggaggattgtgcaagacaaggtgcagtgcccattcaaggccaaatgtgtgcaacagggcttgtggcacatgttgtgtgaggtgcaagtgtgttccacctggaacttccggcaacagggagctttgtgggacctgctatactgatatgaccacccatggtaacaagaccaagtgcccgtaaagcccatagaaggtgagccctatccaattgggcccttcacacacctagctaatcacaccaagcaaagctagcatagtttagtaaataataaatgtgttatctacacttttgtagatttggatttgtcatctttaagatgtgttctagtttttatctttgttataaaggtatggtactatatgaatcaagtatataaactttgcgcttagattactcc

SEQ ID NO: 56112 - protein, 115 aa, Glycine max
  peptide (1)..(115): Ceres Seq. ID no. 12583774
MALRELIVMGLLLLVCLAKVSSDVNIEKEQDEEFRFPVDHLIVRGGNRRLMQDIDCGGLCKTRCSAHSRPNVCNRACGTCCVRCKCVPPGTSGNRELCGTCYTDMTTHGNKTKCP

SEQ ID NO: 56113 - protein, 107 aa, Glycine max
  peptide (1)..(107): Ceres Seq. ID no. 12583775
MGLLLLVCLAKVSSDVNIEKEQDEEFRFPVDHLIVRGGNRRLMQDIDCGGLCKTRCSAHSRPNVCNRACGTCCVRCKCVPPGTSGNRELCGTCYTDMTTHGNKTKCP

SEQ ID NO: 56114 - protein, 65 aa, Glycine max
  peptide (1)..(65): Ceres Seq. ID no. 12583776
MQDIDCGGLCKTRCSAHSRPNVCNRACGTCCVRCKCVPPGTSGNRELCGTCYTDMTTHGNKTKCP

SEQ ID NO: 56115 - DNA, 633 bp, Glycine max
  misc_feature (1)..(633): Ceres Seq. ID no. 12610457
tgtggctgagaattaattattattatcaattatgggtctctcaaatttcccaagtgcatctgaaggggtgctacctgcttgtgataaacacggttctctcagtggcagtgttgaagaacatgtttagatccatgctccaagtagtacttggtggcagtgctgctgctaatggttcaaacattgaacatgatgaaagttcatcatcatcatgggaaaggagggtgtcaataactcagtacaagtcattgtgccacagccacgacataggaggaacaagtatggctatggtggagtgctgcgtttgtttgtgtcgttttgaagccaatcaagaggtcagtgatttgccttgcaagcattacttccacagaggttgcttggacaaatggtttgataacaaacacaccacttgtcccttgtgccgttccatcgactagacatgcagacatatacatacaaaggttgattaattaccattagagatatagctagctagttaattagttgttgctatatactgttaactggttatagtgaaaagaatcaatgcctcttttcatttctttactttagatttgtaaaactccttcaaccaactcagtttctctttgttttagtttttatggaacgtaagag

SEQ ID NO: 56116 - protein, 143 aa, Glycine max
  peptide (1)..(143): Ceres Seq. ID no. 12610458
WLRINYYYQLWVSQISQVHLKGCYLLVINTVLSVAVLKNMFRSMLQVVLGGSAAANGSNIEHDESSSSSWERRVSITQYKSLCHSHDIGGTSMAMVECCVCLCRFEANQEVSDLPCKHYFHRGCLDKWFDNKHTTCPLCRSID

SEQ ID NO: 56117 - protein, 104 aa, Glycine max
  peptide (1)..(104): Ceres Seq. ID no. 12610459
MFRSMLQVVLGGSAAANGSNIEHDESSSSSWERRVSITQYKSLCHSHDIGGTSMAMVECCVCLCRFEANQEVSDLPCKHYFHRGCLDKWFDNKHTTCPLCRSID

SEQ ID NO: 56118 - protein, 100 aa, Glycine max
  peptide (1)..(100): Ceres Seq. ID no. 12610460
MLQVVLGGSAAANGSNIEHDESSSSSWERRVSITQYKSLCHSHDIGGTSMAMVECCVCLCRFEANQEVSDLPCKHYFHRGCLDKWFDNKHTTCPLCRSID

SEQ ID NO: 56119 - DNA, 808 bp, Glycine max
  misc_feature (1)..(808): Ceres Seq. ID no. 12610475
aggacgagccggcggcgcagccagtcagaggagcggcggcggcgcgagctctgtctccggggagaagccgaggagcgagtgagcagcagccactccgtgcgttgcggggtggggaggcaactccgtgagctcgtcttcgtgcggccgccggcgccggtggtgaccaggccaggtccgccatgtcggccttcaccggcgtgtccatcgccgacggctacaagcggtgcggctgcgagacgctggccgtggacgcccgcggggacagcggctaccacctgctcatggtcaacggctactcgcgcaccaaagagctgattcccaccggccagagcatcaccgccaactctttcaatgtgggaggccatgactggttgatcgagtactaccctaacggcgagaaccttctctacgacaccgatgacgacgacgaagagcccgtggaggtcaggttcagtttcagcttggtggaccaggtggagaagcagatgcccatgtacattcgtgcaacccgcagcttctccagcaccacttcaatctggggcaacgacaggtttatcagaaagagcgattcattcctgataaaatccttatgttctataccataagagaacctacctcaaggccaacacgttccctagtggaaaatgatgctgatgcttgttctatactatatgttggtgatgcattctttcagcattgccatgagcctctgttttctttctactcctctgttttcttagtttttttcctgaaagagtatgtttctttcagtggaagcactatgcatgtttacgtcattcattcattc

SEQ ID NO: 56120 - protein, 141 aa, Glycine max
  peptide (1)..(141): Ceres Seq. ID no. 12610476
MSAFTGVSIADGYKRCGCETLAVDARGDSGYHLLMVNGYSRTKELIPTGQSITANSFNVGGHDWLIEYYPNGENLLYDTDDDDEEPVEVRFSFSLVDQVEKQMPMYIRATRSFSSTTSIWGNDRFIRKSDSFLIKSLCSIP

SEQ ID NO: 56121 - protein, 107 aa, Glycine max
  peptide (1)..(107): Ceres Seq. ID no. 12610477
MVNGYSRTKELIPTGQSITANSFNVGGHDWLIEYYPNGENLLYDTDDDDEEPVEVRFSFSLVDQVEKQMPMYIRATRSFSSTTSIWGNDRFIRKSDSFLIKSLCSIP

SEQ ID NO: 56122 - protein, 104 aa, Glycine max
  peptide (1)..(104): Ceres Seq. ID no. 12610478
RTSRRRSQSEERRRRELCLRGEAEERVSSSHSVRCGVGRQLRELVFVRPPAPVVTRPGPPCRPSPACPSPTATSGAAARRWPWTPAGTAATTCSWSTATRAPKS

SEQ ID NO: 56123 - DNA, 1213 bp, Glycine max
  misc_feature (1)..(1213): Ceres Seq. ID no. 12610790
attaaccccaggcacgcctcccgctgcaaccaacccgagtccttccaccctgcacagaatctcagcccaacccacaggtctcgactcaagccatgggcgccggcgacaagacggccgcgggcatgccgcgcatcggcatgggcacggcggtgcaggggcccaagccggaccccatccgccgcgccgtcctccgcgccatcgaggtagggtaccgccacttcgacacggccgcgcactacgagaccgaggcccccatcggcgaggccgccgccgaggccgtgcgctccggcgccgtcgcctcccgggacgacctcttcatcacctccaagctctggtgcagcgatgcgcaccgcgacagggtcgtccccgccctcaggcagacgctccggaatctccagatggagtacgtggacctgtacctcgtccactggccggtgtccatgaagcccgggcggttcaaggcccccttcacggcggaggacttcgtgccgttcgacatgcgggccgtgtgggaggccatggaggagtgccacaggctgggcctcgccaaggccatcggcgtcgccaatttctcctgcaagaagcttgagaccctcctctccttcgccaccatccctcccaccgtcaatcaggtggaggtgaacccggtgtggcagcagaggaagctgagggagttctgcaggggcaagggcatccagctgtgcgcctactcgccgctgggggccaagggcacgcactggggcagcgacgccgtgatggacgcgggcgtcctgcaggagatcgccgcgtccaggggcaagagtgtggcgcaggtgtgcctgaggtgggtgtacgagcagggggactgcctcatcgtcaagagcttcgacgaggcccggatgcgggagaacctggacgtggacggctgggagctcaccgaggaggagcaccgcaggatcgcggagatcccgcagcgcaagatcaacctcggcaagcgctacgtgtccgagcacgggccctacaagtccctcgaggagctctgggacggtgagatatgagtgatcactggagaggctggctggccggtgcgacgggttctgttgggttgtcatccttggccatggatgggtggttgatcgggggacgatttccctttgaataaaatcatgttctgcattgtgtttcagtgaataaatggagatgtttactaccggatttaaggagagttactaag

SEQ ID NO: 56124 - protein, 314 aa, Glycine max
  peptide (1)..(314): Ceres Seq. ID no. 12610791
MGAGDKTAAGMPRIGMGTAVQGPKPDPIRRAVLRAIEVGYRHFDTAAHYETEAPIGEAAAEAVRSGAVASRDDLFITSKLWCSDAHRDRVVPALRQTLRNLQMEYVDLYLVHWPVSMKPGRFKAPFTAEDFVPFDMRAVWEAMEECHRLGLAKAIGVANFSCKKLETLLSFATIPPTVNQVEVNPVWQQRKLREFCRGKGIQLCAYSPLGAKGTHWGSDAVMDAGVLQEIAASRGKSVAQVCLRWVYEQGDCLIVKSFDEARMRENLDVDGWELTEEEHRRIAEIPQRKINLGKRYVSEHGPYKSLEELWDGEI

SEQ ID NO: 56125 - protein, 304 aa, Glycine max
  peptide (1)..(304): Ceres Seq. ID no. 12610792
MPRIGMGTAVQGPKPDPIRRAVLRAIEVGYRHFDTAAHYETEAPIGEAAAEAVRSGAVASRDDLFITSKLWCSDAHRDRVVPALRQTLRNLQMEYVDLYLVHWPVSMKPGRFKAPFTAEDFVPFDMRAVWEAMEECHRLGLAKAIGVANFSCKKLETLLSFATIPPTVNQVEVNPVWQQRKLREFCRGKGIQLCAYSPLGAKGTHWGSDAVMDAGVLQEIAASRGKSVAQVCLRWVYEQGDCLIVKSFDEARMRENLDVDGWELTEEEHRRIAEIPQRKINLGKRYVSEHGPYKSLEELWDGEI

SEQ ID NO: 56126 - protein, 299 aa, Glycine max
  peptide (1)..(299): Ceres Seq. ID no. 12610793
MGTAVQGPKPDPIRRAVLRAIEVGYRHFDTAAHYETEAPIGEAAAEAVRSGAVASRDDLFITSKLWCSDAHRDRVVPALRQTLRNLQMEYVDLYLVHWPVSMKPGRFKAPFTAEDFVPFDMRAVWEAMEECHRLGLAKAIGVANFSCKKLETLLSFATIPPTVNQVEVNPVWQQRKLREFCRGKGIQLCAYSPLGAKGTHWGSDAVMDAGVLQEIAASRGKSVAQVCLRWVYEQGDCLIVKSFDEARMRENLDVDGWELTEEEHRRIAEIPQRKINLGKRYVSEHGPYKSLEELWDGEI

SEQ ID NO: 56127 - DNA, 1479 bp, Glycine max
  misc_feature (1)..(1479): Ceres Seq. ID no. 15175496
gatcctagctctctcctcaggccttttctttctctctctctctcgcgagctcctcgctctctagattcttttctaggatgggtactgccagcggtgccgtggccctgctgctggtggtgctaggagccagcgtctccagctccagtgggcagctgcaggtggggttctactccaagtcgtgccccagcgccgagtccaccgtcgcgtccgtcgtccggggaaccgccgccgccgactccaccatcctccccgccctcctccggctccagttccacgactgcttcgtcagggggtgcgacgcgtcggtgctgatcaagggcgggaacaacaacgcggaggtggacaacaacaagcaccaggggctccgcgggatggacgtcatcgaaaacgccaaggcgcagctcgagtccgagtgccccggcgtcgtctcgtgcgccgacatcgtcgtcctcgccgcgcgcgacgccgtcgcattcaccggcgggccgtcgttcgacgtgccgacggggcgccgcgacgggaaggtgtccaacgtgcgggacggcgacgtgctgccggacgtgcgcgactccgcccaggtgctccgctccaagttccgcgccagcggcctcgacgacaaggacctcgtcctcctcagctcggcgcacacggtgggcacaacggcgtgcttcttcatccaggaccggctctacaagttcccgctcccgggcggcgggctcgggtcagatccgtcgatcccggacggcttcctgtcggagctcaagtcccggtgcgcgccgggggactccaactcgcgcgtctccctggaccgcggcagcgagcgcgtgttcgacacctccatcctccgcaacatccgcaacggcttcgcggtgatcgcctccgacgccgcgctctacaacgacaccagcaccgtcgacgtggtggactcctactcgggcctcctcagcaccatcttcgggccctacttccggcaggacttcgcggactccatggtgaagatgggcagcatcggcgtgctcaccggcgccagcggggaggtcaggaaggtctgctccaagttcaactgagagagacccatccatggatccagattccattcattgcgctgccggccggagtactggtactggttggctagctggagatgaaaagcactagctagcccatgcggacatgcatctcgtgggtgcatggcccggtctcgtggcgctttcatggcttttcttcttcttcaatttattgtgtacatgttattgaaaagagagaggggaaatttagtggattcatgtgattctggcgccaaggtctagtacgtacggccaaggatctgtgcagttttctcttttgcagcggctggaagcgagattaaattcatatagctagggtatatataagatgtgcttctgtatgcttgtatgtacactacacacaccatatgtgcaattaagtggaggtgtaatttatggtcttgtcttgggt

SEQ ID NO: 56128 - protein, 329 aa, Glycine max
  peptide (1)..(329): Ceres Seq. ID no. 15175497
MGTASGAVALLLVVLGASVSSSSGQLQVGFYSKSCPSAESTVASVVRGTAAADSTILPALLRLQFHDCFVRGCDASVLIKGGNNNAEVDNNKHQGLRGMDVIENAKAQLESECPGVVSCADIVVLAARDAVAFTGGPSFDVPTGRRDGKVSNVRDGDVLPDVRDSAQVLRSKFRASGLDDKDLVLLSSAHTVGTTACFFIQDRLYKFPLPGGGLGSDPSIPDGFLSELKSRCAPGDSNSRVSLDRGSERVFDTSILRNIRNGFAVIASDAALYNDTSTVDVVDSYSGLLSTIFGPYFRQDFADSMVKMGSIGVLTGASGEVRKVCSKFN

SEQ ID NO: 56129 - protein, 231 aa, Glycine max
  peptide (1)..(231): Ceres Seq. ID no. 15175498
MDVIENAKAQLESECPGVVSCADIVVLAARDAVAFTGGPSFDVPTGRRDGKVSNVRDGDVLPDVRDSAQVLRSKFRASGLDDKDLVLLSSAHTVGTTACFFIQDRLYKFPLPGGGLGSDPSIPDGFLSELKSRCAPGDSNSRVSLDRGSERVFDTSILRNIRNGFAVIASDAALYNDTSTVDVVDSYSGLLSTIFGPYFRQDFADSMVKMGSIGVLTGASGEVRKVCSKFN

SEQ ID NO: 56130 - DNA, 438 bp, Glycine max
  misc_feature (1)..(438): Ceres Seq. ID no. 13582222
agattagtcacactcttcgcaagcacacaaaaaaaaaaaacccccaaatagcgtaaggataagcctcgccggcgacgaaatcagggtttcatcgaacaagaagatggctcacgcttgcgtctccacatcagcttcctctctcaggtttacagccggattcgtctccgcgagtcccaacgcctcctctttcgattctcagaagctttccctccctttcgagcctcttcgttcaagaaagacgaagaagttggttagcggcagaaagacggctccgaaggctgtatactccggcaatgtctggactccggagactccttcgcctcaaggagtttggtccatcagagatgatttacaagtcccttcttcgccgtattttcctgtgtacgctcaaggacaaggaccacctcctatggtgcaagagcgtttccagagtatcat

SEQ ID NO: 56131 - protein, 111 aa, Glycine max
  peptide (1)..(111): Ceres Seq. ID no. 13582223
MAHACVSTSASSLRFTAGFVSASPNASSFDSQKLSLPFEPLRSRKTKKLVSGRKTAPKAVYSGNVWTPETPSPQGVWSIRDDLQVPSSPYFPVYAQGQGPPPMVQERFQSI

SEQ ID NO: 56132 - DNA, 1005 bp, Glycine max
  misc_feature (1)..(1005): Ceres Seq. ID no. 13595093
ctagaacatcctaatcgaaaaacaacacttgactgatcttttctctcatcctcagacgcaacaagcagcttgttgcaacacacaaaaatggatcaaaccatgctgctaacttccggcatctctgcaaaccatttcttgaggaacaagaaccctctggctcagcccaaagttcaccatctcttcctctccggaaactctccggttactctaccatctcgaataccatcgttggttcctctcgctatcttcaaacccaaaaccaaagctgctcccaaaaaggttgagaaagtgaagccaaaggttgaagacggtatcttcggaacgtctggtgggataggattcacgaagcagaacgagctctttgtgggccgtgttgctatgatcggtttcgctgcatcgttgctaggtgaggcgttgactgggaaagggatattagcacagctgaatttggagacaggaataccgatttacgaagcagagccattgcttctcttcttcatattgttcactctgttgggtgccattggagctcttggagacagaggaaaattcgtcgacgatcctcccaccggactcgagaaagccgtcattcctcccggcaaaggcgttcgctctgccctcggtctcaaagaacaaggtcctttgtttgggttcacgaaggcgaacgagttgttcgtaggaagattggcacaattgggaatagcattttcattgataggagagattattacagggaaaggagcacttgctcaactcaacattgagactggtattccaattcaagatatcgaaccactcgtcctcttaaacgttgctttcttcttcgctgctgccattaatcctggtaatggaaagttcattactgatgatggtgaagaaagctaaactctctatgtactttccagttagtagtttgggagaccattatcatgttgagacaaaaaagaaatggacatcttaaactattgtaatacttaaatccttttgttttaacttggtttttct

SEQ ID NO: 56133 - protein, 265 aa, Glycine max
  peptide (1)..(265): Ceres Seq. ID no. 13595094
MDQTMLLTSGISANHFLRNKNPLAQPKVHHLFLSGNSPVTLPSRIPSLVPLAIFKPKTKAAPKKVEKVKPKVEDGIFGTSGGIGFTKQNELFVGRVAMIGFAASLLGEALTGKGILAQLNLETGIPIYEAEPLLLFFILFTLLGAIGALGDRGKFVDDPPTGLEKAVIPPGKGVRSALGLKEQGPLFGFTKANELFVGRLAQLGIAFSLIGEIITGKGALAQLNIETGIPIQDIEPLVLLNVAFFFAAAINPGNGKFITDDGEES

SEQ ID NO: 56134 - protein, 261 aa, Glycine max
  peptide (1)..(261): Ceres Seq. ID no. 13595095
MLLTSGISANHFLRNKNPLAQPKVHHLFLSGNSPVTLPSRIPSLVPLAIFKPKTKAAPKKVEKVKPKVEDGIFGTSGGIGFTKQNELFVGRVAMIGFAASLLGEALTGKGILAQLNLETGIPIYEAEPLLLFFILFTLLGAIGALGDRGKFVDDPPTGLEKAVIPPGKGVRSALGLKEQGPLFGFTKANELFVGRLAQLGIAFSLIGEIITGKGALAQLNIETGIPIQDIEPLVLLNVAFFFAAAINPGNGKFITDDGEES

SEQ ID NO: 56135 - protein, 168 aa, Glycine max
  peptide (1)..(168): Ceres Seq. ID no. 13595096
MIGFAASLLGEALTGKGILAQLNLETGIPIYEAEPLLLFFILFTLLGAIGALGDRGKFVDDPPTGLEKAVIPPGKGVRSALGLKEQGPLFGFTKANELFVGRLAQLGIAFSLIGEIITGKGALAQLNIETGIPIQDIEPLVLLNVAFFFAAAINPGNGKFITDDGEES

SEQ ID NO: 56136 - DNA, 1076 bp, Glycine max
  misc_feature (1)..(1076): Ceres Seq. ID no. 12583280
accatcacacaatatccagaaccatctcactgtcatggcgttccgacgccctctcgcattccaccatgagtgcatgctcgtgatcgccttcgtgctggtctcctgtctcgccggcgccgccacggcgaagcagacgggccagctgaccgtgttctggggccggaacgccggcgagggcacgctgcgcgaggcctgcgacacggggctctactccaccgtcgtcatctccttctacagcgtcttcgggcacggccgctactggggcgacctctccggccaccctctcgccggcgtcggtgccgacatcaagcactgccagtccaggaacatcctcgtcctcctctccatcggcgggcccgggaacggctactccctcccgtcctccgcctccgccgcagccgtcgccgacaacctctggaacgcgcacctcggcgggcgccggaacggcgtgtaccgcccgttcggcgacgccgccgtcgacggcatcgacttctacatcgaccagggcgcccccgaccactacgacgagctggccagccgccttgacgggtacaaccggttctaccgcggccggaagggtgtgcgcctgacggccacgccgcggtgcgggttgcccgaccgccgcctgggggcggcgctccggacggggctgttcgagcgcatccacgtcaggttctacggcaacgacacatgctcgctggggaagggcggcacgtacggcgtggtagggcagtgggagaagtggacggcggcgttcccgaggacgcaggtgtacctgggcctcgcgccggcggagagtggcgtgccggagggggcgcagggcaccgtcgccgtttacctcaagtacctgtactacgacctgctgcccaaggtgcagaaggccaacaactatggcggggtcatggtctgggacaggttcgccgacaagaagacacgctggagcagcgtcgtcagcggatgggcctgatcgtttatatcgctggtttacagctacggatcggagtacatactactcctactgtgtatgcgtgtgtatgaataaaacggcatccatatgataatgatatatggatgtg

SEQ ID NO: 56137 - protein, 321 aa, Glycine max
  peptide (1)..(321): Ceres Seq. ID no. 12583281
PSHNIQNHLTVMAFRRPLAFHHECMLVIAFVLVSCLAGAATAKQTGQLTVFWGRNAGEGTLREACDTGLYSTVVISFYSVFGHGRYWGDLSGHPLAGVGADIKHCQSRNILVLLSIGGPGNGYSLPSSASAAAVADNLWNAHLGGRRNGVYRPFGDAAVDGIDFYIDQGAPDHYDELASRLDGYNRFYRGRKGVRLTATPRCGLPDRRLGAALRTGLFERIHVRFYGNDTCSLGKGGTYGVVGQWEKWTAAFPRTQVYLGLAPAESGVPEGAQGTVAVYLKYLYYDLLPKVQKANNYGGVMVWDRFADKKTRWSSVVSGWA

SEQ ID NO: 56138 - protein, 310 aa, Glycine max
  peptide (1)..(310): Ceres Seq. ID no. 12583282
MAFRRPLAFHHECMLVIAFVLVSCLAGAATAKQTGQLTVFWGRNAGEGTLREACDTGLYSTVVISFYSVFGHGRYWGDLSGHPLAGVGADIKHCQSRNILVLLSIGGPGNGYSLPSSASAAAVADNLWNAHLGGRRNGVYRPFGDAAVDGIDFYIDQGAPDHYDELASRLDGYNRFYRGRKGVRLTATPRCGLPDRRLGAALRTGLFERIHVRFYGNDTCSLGKGGTYGVVGQWEKWTAAFPRTQVYLGLAPAESGVPEGAQGTVAVYLKYLYYDLLPKVQKANNYGGVMVWDRFADKKTRWSSVVSGWA

SEQ ID NO: 56139 - protein, 297 aa, Glycine max
  peptide (1)..(297): Ceres Seq. ID no. 12583283
MLVIAFVLVSCLAGAATAKQTGQLTVFWGRNAGEGTLREACDTGLYSTVVISFYSVFGHGRYWGDLSGHPLAGVGADIKHCQSRNILVLLSIGGPGNGYSLPSSASAAAVADNLWNAHLGGRRNGVYRPFGDAAVDGIDFYIDQGAPDHYDELASRLDGYNRFYRGRKGVRLTATPRCGLPDRRLGAALRTGLFERIHVRFYGNDTCSLGKGGTYGVVGQWEKWTAAFPRTQVYLGLAPAESGVPEGAQGTVAVYLKYLYYDLLPKVQKANNYGGVMVWDRFADKKTRWSSVVSGWA

SEQ ID NO: 56140 - DNA, 1004 bp, Glycine max
  misc_feature (1)..(1004): Ceres Seq. ID no. 13594962
ccccctcacaactcgccaacgccaaatccgtctccgccaccggccagccagcgagcgattcgccgccgccgccgtcaccgccgccgccggcgtcaagcccctctctccacccagcaggctcaccctcgcggcccccgccccctcacgggccccgcgtctcccgcgagaaccgcgcccgcccgcctagggtttccgccgccgccggagaggaggggagaagcggaaccagggcgagatggccggacggctcctcgggcagctcctcgtcatgggcggcgccgtcgtcggcagggccgtggtccaggcctaccgccaggccatcgtcaatgcacaaagaaccggagctgctcaggaagctgtgaatggtattcgaagggctagcaaggctatgaccgagcaagaagcccggcaaatattaggtatcagtgaaaagacgagttgggaagagatcgtaaagaagtacgacacgatgtttgagaagaacgccaagagcggaagcttctatctccagtcgaaagtccaccgggccaaagaatgtctggagtccatataccatgataagcccgacataatgaactgagatggccagcgtttcatctaatcgatcgattttgtcgtcgatgtcctgtctgagctatgctgggctgctgcatcaggtcaaatttggttgtaacaggaagtttgttccacttgactcgaataatatattcaacaaaaggaacaccgtcaccgtttgatttgtttttctggaggcgatgcctcgtttccatgcaaattcagatgttgacactttgtgttgttgccatcatctgcaatgtttgattgttgtagcagcttgtgttttgaacctgatatcccatgttgctagcattgacccgtaattttgaagcgcgattatggggttagacacctactttctcccttgaaagtacgctggttggaaaatgtaatctttgatgttggtatggttccaaagatgtaatctctatcacagcatccttccc

SEQ ID NO: 56141 - protein, 126 aa, Glycine max
  peptide (1)..(126): Ceres Seq. ID no. 13594963
PPHNSPTPNPSPPPASQRAIRRRRRHRRRRRQAPLSTQQAHPRGPRPLTGPASPARTAPARLGFPPPPERRGEAEPGRDGRTAPRAAPRHGRRRRRQGRGPGLPPGHRQCTKNRSCSGSCEWYSKG

SEQ ID NO: 56142 - protein, 119 aa, Glycine max
  peptide (1)..(119): Ceres Seq. ID no. 13594964
PSQLANAKSVSATGQPASDSPPPPSPPPPASSPSLHPAGSPSRPPPPHGPRVSRENRARPPRVSAAAGEEGRSGTRARWPDGSSGSSSSWAAPSSAGPWSRPTARPSSMHKEPELLRKL

SEQ ID NO: 56143 - protein, 114 aa, Glycine max
  peptide (1)..(114): Ceres Seq. ID no. 13594965
MAGRLLGQLLVMGGAVVGRAVVQAYRQAIVNAQRTGAAQEAVNGIRRASKAMTEQEARQILGISEKTSWEEIVKKYDTMFEKNAKSGSFYLQSKVHRAKECLESIYHDKPDIMN

SEQ ID NO: 56144 - DNA, 990 bp, Glycine max
  misc_feature (1)..(990): Ceres Seq. ID no. 13595308
aaaccgtccaacaaacctctttcccctccccgcatcccaagcctcccagctccatcgccacacgctcgaacccactcctctcacgctcaagcgcacaccgcaccaaccagagcagccatggctctcaccggcggcgccaccaccgcagcgtgcatcctcgtcctcctcgcgctcgccgacgccgcgggggcggctacccgggcgccagcgccggcgccggcgccggactgcatggaggcgttgattagcctcgcagactgcctcgactatgtgacgcccagcaccaagtcggctcggccttccaaggcttgctgcacggaggtgaagaccgccgtcggcacccccgccaccgtgaagtgcctctgcgctgccatggacgccaagacaactccgataccgatcaacatgacacgggtgctcgctctccccaccgcctgcggccaatccgcctccgtcttgaacaagtgccacgctgcacatgggccgggtggtgctcctgctgaagcaccgtcaccttcagcatccagtggcggcgcgaccgcttcaccaccgaaggcgaatgtggcggcgaggtctccgggcggctccgccaccgttctcttggcaactgtggtgacttcgctgctcgccttctattacctctgagggccaacatctcagcctctctcacgtgttatgttgcacagaccttgtgactctgcgttgcgcggtgttgtaatctgagtttactttgtttatcgggatgggttattatcatgtagtgtcgtggactgaatattgagtgcgtagtaaattgcaatgtaccgtggactgggtattttgaagtcgttgccagttatgacactttatttacttttgaatgcgcagatgactttgttgactttggaatgcgcagatgatctgctacgatcttcttttgggctaaaaaaaaaaaaaaaaaagcttatcgatannnnnnnraacctcgaaggggggggcccggtacccaat

SEQ ID NO: 56145 - protein, 214 aa, Glycine max
  peptide (1)..(214): Ceres Seq. ID no. 15221539
KPSNKPLSPPRIPSLPAPSPHARTHSSHAQAHTAPTRAAMALTGGATTAACILVLLALADAAGAATRAPAPAPAPDCMEALISLADCLDYVTPSTKSARPSKACCTEVKTAVGTPATVKCLCAAMDAKTTPIPINMTRVLALPTACGQSASVLNKCHAAHGPGGAPAEAPSPSASSGGATASPPKANVAARSPGGSATVLLATVVTSLLAFYYL

SEQ ID NO: 56146 - protein, 175 aa, Glycine max
  peptide (1)..(175): Ceres Seq. ID no. 15221540
MALTGGATTAACILVLLALADAAGAATRAPAPAPAPDCMEALISLADCLDYVTPSTKSARPSKACCTEVKTAVGTPATVKCLCAAMDAKTTPIPINMTRVLALPTACGQSASVLNKCHAAHGPGGAPAEAPSPSASSGGATASPPKANVAARSPGGSATVLLATVVTSLLAFYYL

SEQ ID NO: 56147 - protein, 137 aa, Glycine max
  peptide (1)..(137): Ceres Seq. ID no. 15221541
MEALISLADCLDYVTPSTKSARPSKACCTEVKTAVGTPATVKCLCAAMDAKTTPIPINMTRVLALPTACGQSASVLNKCHAAHGPGGAPAEAPSPSASSGGATASPPKANVAARSPGGSATVLLATVVTSLLAFYYL

SEQ ID NO: 56148 - DNA, 831 bp, Glycine max
  misc_feature (1)..(831): Ceres Seq. ID no. 15172691
atctcaatttcgctgtacagaagagcttgattcccagagagacaaacccgacccgacaacccggaagaatcgaaaaaaatgggaaaggacggtctgagcgacgaccaggtctcatcgatgaaggaggcattcatgctcttcgacaccgacggtgacggcaaaatcgccccctccgagctcgggatcctgatgcgatccctcggcgggaacccgacccaagcccagctgaaatcgatcaccgcctccgagagcctaaccgccccgttcgatttcaaccgtttcctggatctcatggcgaagcacctgaagacggagcccttcgatcgccagctccgcgacgccttcaaggtgctcgacaaggaaggcactgggttcgttgccgttgcggatctgaggcatatcctcaccagcatcggcgagaagctggagcctaacgagttcgatgagtggatcaaggaggtggatgttggatccgatgggaagatccggtatgaggatttcattgcgaggatggtcgccaagtgagatctaatctgagtcctttgtttccaagtttgaattttgaaattcgaatttttattttgaagtatgttttaatttttttacataaagtttcagtctttatgctcttgtggtttggtttggtttggatcagtgaatctaattgattccagtctgtttactgttcgttgttttattttgttttaactaactctattgttgtgtgcttgtgattcctacttttattccaaggatgttaagtttcgctcttatgcccttataaatttgtaattcgttggtttggatcatgatcatggagtctgattgagt

SEQ ID NO: 56149 - protein, 148 aa, Glycine max
  peptide (1)..(148): Ceres Seq. ID no. 15172692
MGKDGLSDDQVSSMKEAFMLFDTDGDGKIAPSELGILMRSLGGNPTQAQLKSITASESLTAPFDFNRFLDLMAKHLKTEPFDRQLRDAFKVLDKEGTGFVAVADLRHILTSIGEKLEPNEFDEWIKEVDVGSDGKIRYEDFIARMVAK

SEQ ID NO: 56150 - protein, 135 aa, Glycine max
  peptide (1)..(135): Ceres Seq. ID no. 15172693
MKEAFMLFDTDGDGKIAPSELGILMRSLGGNPTQAQLKSITASESLTAPFDFNRFLDLMAKHLKTEPFDRQLRDAFKVLDKEGTGFVAVADLRHILTSIGEKLEPNEFDEWIKEVDVGSDGKIRYEDFIARMVAK

SEQ ID NO: 56151 - protein, 130 aa, Glycine max
  peptide (1)..(130): Ceres Seq. ID no. 15172694
MLFDTDGDGKIAPSELGILMRSLGGNPTQAQLKSITASESLTAPFDFNRFLDLMAKHLKTEPFDRQLRDAFKVLDKEGTGFVAVADLRHILTSIGEKLEPNEFDEWIKEVDVGSDGKIRYEDFIARMVAK

SEQ ID NO: 56152 - DNA, 1022 bp, Glycine max
  misc_feature (1)..(1022): Ceres Seq. ID no. 13594966
aaaaccaacagctgctactccagcatccacccatccatctctcatcttcttcttcttgcgaccaaacgagcgtctagctagctaaagattcgaacgatggccgttcttgtggcgaggcaggggcgcgagctgcagcggtacagcacgagcaccggcgggcgcatcgtggtggggtgcatcccgtaccggatgcgcgacggcggcgacagcgacggcgagggcgagctggaggtgctggtcatcagctcgcagaaggggcacggcatgatgtttcccaagggcgggtgggagctggacgagtccatggacgacgcggcacggcgcgaggccctcgaggaggccggcgtccgcggggagatgggcaaggtgctcggctgctggcactaccagagccgccgctaccagaccacctacgagggcatcatgtacccgctccgcgtcaccgacgagctccagcagtggcccgagatggcgtcccgcaagcgcacctgggcaactgtgcagcaggtcatggagggatgccagcactgctggatgcgggaggcgctcgaggagctcgtcgcccggcacgccaagccgcagtccgccctgtgagcagccaagcgggctggcggggtgactggagctcgagcgcgcgcgactctcgcgagaagaggccgggagcgagcaccaacgtccgtccgtcgtcctcgtcgtctctctctcttctttcctcggtgcagcggcaggcctgccggcgtgtccggtgtcgtacgacgaccggaccggagcatatatttggccgcccttgccggagagacggactgggatccacgatggcacgcgcgcgtcgacgctttcctgaggcgcagagtcgtcgtcgccgtcgtcgcggcaaataatggggacgaacttagaaatgtgtgaggtagagatcgaaagcgaacggggcaggaaaacttgtcaaaacactgccgaacgaacatgctcacgattctttccttaggctctgggagtaaaagatcaaattgtaaattaattct

SEQ ID NO: 56153 - protein, 165 aa, Glycine max
  peptide (1)..(165): Ceres Seq. ID no. 13594967
MAVLVARQGRELQRYSTSTGGRIVVGCIPYRMRDGGDSDGEGELEVLVISSQKGHGMMFPKGGWELDESMDDAARREALEEAGVRGEMGKVLGCWHYQSRRYQTTYEGIMYPLRVTDELQQWPEMASRKRTWATVQQVMEGCQHCWMREALEELVARHAKPQSAL

SEQ ID NO: 56154 - protein, 134 aa, Glycine max
  peptide (1)..(134): Ceres Seq. ID no. 13594968
MRDGGDSDGEGELEVLVISSQKGHGMMFPKGGWELDESMDDAARREALEEAGVRGEMGKVLGCWHYQSRRYQTTYEGIMYPLRVTDELQQWPEMASRKRTWATVQQVMEGCQHCWMREALEELVARHAKPQSAL

SEQ ID NO: 56155 - protein, 120 aa, Glycine max
  peptide (1)..(120): Ceres Seq. ID no. 13594969
MPALLDAGGARGARRPARQAAVRPVSSQAGWRGDWSSSARDSREKRPGASTNVRPSSSSSLSLLSSVQRQACRRVRCRTTTGPEHIFGRPCRRDGLGSTMARARRRFPEAQSRRRRRRGK

SEQ ID NO: 56156 - DNA, 1265 bp, Glycine max
  misc_feature (1)..(1265): Ceres Seq. ID no. 13581959
ctctcagatgctccggttgtcacgttttctctgctgaaatatttacttttaggatgctaagatgataaagatccacccttgctgtcatttacctgttaacatcttattctctccgttctttgcttgcttattagctgagacggctagtacatgttaacagtatcacccttagggatcagtttcttccagtagtgcccctctgtttttccttttaccttctaagttcatgaagtatacattggagtccaggaaggttcgtcacaagaatgttgtgcaatttattggtgcatgcactaaacccccaaggctatgcatagtcacagaatttatgtccggtgggagtgtgtatgattatcttcataagcataaaggtatcttcaagctccctgccttagttggagttgcaatggatgtgtcaaaaggcatgagctacttacaccaaaataatattattcatcgggatctgaaaaccgccaatcttcttatggatgagaacgggatggttaaagttgctgattttggtgttgcacgtgttaaagttcagtctggagtaatgactgcagaaaccgggacataccgttggatggccccggaggttatagaacacaagccctacgaccacaaggctgatgtttttagttttggaattttgttgtgggaactgctcactgggaagattccttacgagtacctgacaccattacaagcagctgtaggtgtggttcagaagggattgcggcccacaataccaaaaaatgctcatgcaaagcttgcggagctccttcagaagtgctggcagcaggaccctgctgaaaggccagatttctccgagatattagaagctctcaagaaaatagcagaggaggtcggagatgagcacgacggaaagcacaaggacaaaagcctggggggattcttttcgtctctgagggggcgaggacactaaggtggcgctggtgtacatggcttgcaatccgttcggacgggcctgagcgaagatcagcgcctgtttatcagcatacccagtgccagtacattgagatggacagtgaactgggccggatggcaacttttcagctgtagctccactcatcggccacagccaatagtttttttttttgtctggttatttacttccgggttctgttacatgtaacataggaagagaatgcttgtggactgtacattgtttaatctgattttaacaggctgtaacttgcacatgaaataataagcctagcttagggcatgctgtgattctttct

SEQ ID NO: 56157 - protein, 239 aa, Glycine max
  peptide (1)..(239): Ceres Seq. ID no. 13581960
MKYTLESRKVRHKNVVQFIGACTKPPRLCIVTEFMSGGSVYDYLHKHKGIFKLPALVGVAMDVSKGMSYLHQNNIIHRDLKTANLLMDENGMVKVADFGVARVKVQSGVMTAETGTYRWMAPEVIEHKPYDHKADVFSFGILLWELLTGKIPYEYLTPLQAAVGVVQKGLRPTIPKNAHAKLAELLQKCWQQDPAERPDFSEILEALKKIAEEVGDEHDGKHKDKSLGGFFSSLRGRGH

SEQ ID NO: 56158 - protein, 205 aa, Glycine max
  peptide (1)..(205): Ceres Seq. ID no. 13581961
MSGGSVYDYLHKHKGIFKLPALVGVAMDVSKGMSYLHQNNIIHRDLKTANLLMDENGMVKVADFGVARVKVQSGVMTAETGTYRWMAPEVIEHKPYDHKADVFSFGILLWELLTGKIPYEYLTPLQAAVGVVQKGLRPTIPKNAHAKLAELLQKCWQQDPAERPDFSEILEALKKIAEEVGDEHDGKHKDKSLGGFFSSLRGRGH

SEQ ID NO: 56159 - protein, 179 aa, Glycine max
  peptide (1)..(179): Ceres Seq. ID no. 13581962
MDVSKGMSYLHQNNIIHRDLKTANLLMDENGMVKVADFGVARVKVQSGVMTAETGTYRWMAPEVIEHKPYDHKADVFSFGILLWELLTGKIPYEYLTPLQAAVGVVQKGLRPTIPKNAHAKLAELLQKCWQQDPAERPDFSEILEALKKIAEEVGDEHDGKHKDKSLGGFFSSLRGRGH

SEQ ID NO: 56160 - DNA, 1424 bp, Glycine max
  misc_feature (1)..(1424): Ceres Seq. ID no. 13595337
ctaaaccacccctgaaaaccctcagacgaacgaaagacctagcgctcctctcccttcgtctctcgcgactggcggcggcggtcgaacgaggccacccgacggcggcagagcgagtaggtgctttccaagcttcgccagaggtgtaaacccttcgctagaggcctcagtccctttcccgcgcggcttgagcaagatgagcaagatggcgatcagggttcccaagtccatgcgcgccaagcgtgagctcctcaagcacgcgcccaagctcgttgagaatggcaagaagatgcttattcttcatggtacaaagaccagcgcagttttgaactctgtgctggcagatcttttccacctgaagcgtgatcatgctgtcaagtacaccaagaagaacgacagcatcaggccatttgagagcgggggtgaaacttccctggagttcttctcccttaaatctgactgcagcctcttagtgtatggttctcactcaaagaagaggcccaacaatcttgttctgggaaggacttacgatcaccacatatatgacctcgttgaagtgggagttgagaactacaaatccatagaatcctatgcatatgataaaaagttggcacctaaacttgggacaaagcctttctttgctttcattggggagcactttgagagtgttgaaggactgaagcatttgaaggaaatgctgcttgatcatttcaaaggagaggtggtagagaatctgaaccttgctggtgtagatcggatattcgtgtgcacagcaatttctcctactaccgtctacatgatgcactgcgctctccgtctaaaaaggtcaggcacatctattcctagaatggagctggttgaagttgggccttcagtggacctggtacttaggcggcaccgacaagcagctgaaagtttacagaaagaagctatgaaggctcctggtcatgctaagaaggtgaaaaatgtcaccaataatccagttgaaggcaagcagggcaggatctacattccagaccaggaggtctcaaaattgaccgtaacaagcaacataaagggtctgaagcgggagcgccgtgacgccaagaaaaacaaggagcactcgaagaagcaaaaggtggccgaaaaccctgagtgaccactggagaaggctagtatctgtaaccggtcagtttaaggactttcggtcgataggttcagtggtaaatagtccagtaccatcttttaaggctatcaaacctgtgtacggacttaggcatcagtatcgaggcagcctctctatcagacataagcatgaaattttggagcaacatatgctacaagtattttttttactgttgttattcgcccctgatattagccaatcagagacgactgttgtgatgacatggttaagtttggttatcatggacattatgccttttctg

SEQ ID NO: 56161 - protein, 313 aa, Glycine max
  peptide (1)..(313): Ceres Seq. ID no. 13595338
MSKMAIRVPKSMRAKRELLKHAPKLVENGKKMLILHGTKTSAVLNSVLADLFHLKRDHAVKYTKKNDSIRPFESGGETSLEFFSLKSDCSLLVYGSHSKKRPNNLVLGRTYDHHIYDLVEVGVENYKSIESYAYDKKLAPKLGTKPFFAFIGEHFESVEGLKHLKEMLLDHFKGEVVENLNLAGVDRIFVCTAISPTTVYMMHCALRLKRSGTSIPRMELVEVGPSVDLVLRRHRQAAESLQKEAMKAPGHAKKVKNVTNNPVEGKQGRIYIPDQEVSKLTVTSNIKGLKRERRDAKKNKEHSKKQKVAENPE

SEQ ID NO: 56162 - protein, 310 aa, Glycine max
  peptide (1)..(310): Ceres Seq. ID no. 13595339
MAIRVPKSMRAKRELLKHAPKLVENGKKMLILHGTKTSAVLNSVLADLFHLKRDHAVKYTKKNDSIRPFESGGETSLEFFSLKSDCSLLVYGSHSKKRPNNLVLGRTYDHHIYDLVEVGVENYKSIESYAYDKKLAPKLGTKPFFAFIGEHFESVEGLKHLKEMLLDHFKGEVVENLNLAGVDRIFVCTAISPTTVYMMHCALRLKRSGTSIPRMELVEVGPSVDLVLRRHRQAAESLQKEAMKAPGHAKKVKNVTNNPVEGKQGRIYIPDQEVSKLTVTSNIKGLKRERRDAKKNKEHSKKQKVAENPE

SEQ ID NO: 56163 - protein, 302 aa, Glycine max
  peptide (1)..(302): Ceres Seq. ID no. 13595340
MRAKRELLKHAPKLVENGKKMLILHGTKTSAVLNSVLADLFHLKRDHAVKYTKKNDSIRPFESGGETSLEFFSLKSDCSLLVYGSHSKKRPNNLVLGRTYDHHIYDLVEVGVENYKSIESYAYDKKLAPKLGTKPFFAFIGEHFESVEGLKHLKEMLLDHFKGEVVENLNLAGVDRIFVCTAISPTTVYMMHCALRLKRSGTSIPRMELVEVGPSVDLVLRRHRQAAESLQKEAMKAPGHAKKVKNVTNNPVEGKQGRIYIPDQEVSKLTVTSNIKGLKRERRDAKKNKEHSKKQKVAENPE

SEQ ID NO: 56164 - DNA, 1283 bp, Glycine max
  misc_feature (1)..(1283): Ceres Seq. ID no. 13595392
cttgccttagttttagacgccggcgccgtagagcccgttccccctcacgcggccagcgaccatgtcgagtggcctgaacatgtccctagatgacctcatcaagcaatccaagtccaggcccaaagccaaccccgccttctcttccgggcccacccgccgggcggcgccgtccgcccggaccatgccctacccgccgtctgctcccaaggccgccaccgccgactctctgtacggtgtctactccgagcacgttgccgccatggcaacctccccgccaccgccggcggtggccgggccacaggcactcgagacgggcacgaagctgcacatctccaacctcgactccagcgtcaccgtcgaggacgtccaggaactcttttcagagattggtgagctcaaacgttattctgttaactacgataaggatgggaagtctcagggaagtgcggaagttgtctttgcaagaaaagtagatgctttggatgctattgagagatataatggtgttctgcttgatgggaagccaatgaagatagagctcattggaaataagaccgagccacacccaacagaacctttgatgtacaacggcacttcttctaactacaatgcaatgccaaacagtctgcttcagagaggtggcccgagagggccatttcatggtaatggtcgttctggaggcagtggtcagggcggtgctggcaaaagaggaatgtttcaaggcaacgttcgtcctggaaacactgtccaggacggtggtgggcggggacagggtagagccagggggcatgatcgcagccgagttccgacctctgctgcggatcttgatgctgaactggagcagtatcatgcagcagcagtgaagcaaaaatgaggctctgatgtatattttatactccctccttccatatataagtgacgtagttttagtccaaatttaaactaaaaccacgtcacttatttatgaactgagggagtatatacatagactgttgcattattagttttctgcttttagtcgtcaggtaccatgttgagaaaagttggaaggcattaattcgacatttacatctgctgcgctttttatatccctactccgagtgctggatatattgtattacctaattttgaaacatgggtgttctcttggggtttatttggatagtaagattacaaagaactagttcttgttaaattcaatttctaactgaatcttggatatgtcatatcatcttgtttggattgtctaactgaatctttagatataaaatcctgagttttgc

SEQ ID NO: 56165 - protein, 270 aa, Glycine max
  peptide (1)..(270): Ceres Seq. ID no. 13595393
MSSGLNMSLDDLIKQSKSRPKANPAFSSGPTRRAAPSARTMPYPPSAPKAATADSLYGVYSEHVAAMATSPPPPAVAGPQALETGTKLHISNLDSSVTVEDVQELFSEIGELKRYSVNYDKDGKSQGSAEVVFARKVDALDAIERYNGVLLDGKPMKIELIGNKTEPHPTEPLMYNGTSSNYNAMPNSLLQRGGPRGPFHGNGRSGGSGQGGAGKRGMFQGNVRPGNTVQDGGGRGQGRARGHDRSRVPTSAADLDAELEQYHAAAVKQK

SEQ ID NO: 56166 - protein, 264 aa, Glycine max
  peptide (1)..(264): Ceres Seq. ID no. 13595394
MSLDDLIKQSKSRPKANPAFSSGPTRRAAPSARTMPYPPSAPKAATADSLYGVYSEHVAAMATSPPPPAVAGPQALETGTKLHISNLDSSVTVEDVQELFSEIGELKRYSVNYDKDGKSQGSAEVVFARKVDALDAIERYNGVLLDGKPMKIELIGNKTEPHPTEPLMYNGTSSNYNAMPNSLLQRGGPRGPFHGNGRSGGSGQGGAGKRGMFQGNVRPGNTVQDGGGRGQGRARGHDRSRVPTSAADLDAELEQYHAAAVKQK

SEQ ID NO: 56167 - protein, 230 aa, Glycine max
  peptide (1)..(230): Ceres Seq. ID no. 13595395
MPYPPSAPKAATADSLYGVYSEHVAAMATSPPPPAVAGPQALETGTKLHISNLDSSVTVEDVQELFSEIGELKRYSVNYDKDGKSQGSAEVVFARKVDALDAIERYNGVLLDGKPMKIELIGNKTEPHPTEPLMYNGTSSNYNAMPNSLLQRGGPRGPFHGNGRSGGSGQGGAGKRGMFQGNVRPGNTVQDGGGRGQGRARGHDRSRVPTSAADLDAELEQYHAAAVKQK

SEQ ID NO: 56168 - DNA, 661 bp, Glycine max
  misc_feature (1)..(661): Ceres Seq. ID no. 12610112
attaacccgctccaaaaccctgagctgcgcacccaccggcgatgtcggcgacggccatccgctccggcgagctcctcgcttttcccgccgcgctgaggcgtggcctgcccgtggcttctgcctcggtggtcgcgttccggttgagggcgccagtggccgggcgcgtggcggtcagggttgtcgcggcggcggcggagggggcaggggcggaggcggaggcggaagggaagccgaagccgaagaagaagagggcagcgagcgggatcatgaagcctaagccgatttctccggagctaagggagtttgtcggaggcgcggcggagctgccccggacagaggcgctcaagatcatctgggcgcacatcaagggaaacaacctccaggatcccgagaacaagaagataatagtctgcgatgagaaactgaagaagatatttggagggcgtgaccgtgttgggtttcttgagatctctgggctcctcaatccccatttccagaaatgatagggtttatgtagatgttgcactttttctgtattagctaagacagttgtatcagcatatttagctgaacctggtatggagggtccgtaattctggtttgagaatggtacgtctagtatttgcagtaaatggctttgctggtttttggctcgtgattt

SEQ ID NO: 56169 - protein, 153 aa, Glycine max
  peptide (1)..(153): Ceres Seq. ID no. 12610113
MSATAIRSGELLAFPAALRRGLPVASASVVAFRLRAPVAGRVAVRVVAAAAEGAGAEAEAEGKPKPKKKRAASGIMKPKPISPELREFVGGAAELPRTEALKIIWAHIKGNNLQDPENKKIIVCDEKLKKIFGGRDRVGFLEISGLLNPHFQK

SEQ ID NO: 56170 - protein, 91 aa, Glycine max
  peptide (1)..(91): Ceres Seq. ID no. 12610114
LTRSKTLSCAPTGDVGDGHPLRRAPRFSRRAEAWPARGFCLGGRVPVEGASGRARGGQGCRGGGGGGRGGGGGGREAEAEEEEGSERDHEA

SEQ ID NO: 56171 - protein, 78 aa, Glycine max
  peptide (1)..(78): Ceres Seq. ID no. 12610115
MKPKPISPELREFVGGAAELPRTEALKIIWAHIKGNNLQDPENKKIIVCDEKLKKIFGGRDRVGFLEISGLLNPHFQK

SEQ ID NO: 56172 - DNA, 660 bp, Glycine max
  misc_feature (1)..(660): Ceres Seq. ID no. 13594979
accaagcaattcaaacaacacggtaacacgcaaactccgagaaaatccccaaatcacataaaattagggttacgaatcggggaaagttgtctctcctttcaccctaattcgatgcctataggtttcaggaaccaagtgatgcggtcgttctcgtggatcatcatccctttactcttattgctattctgcttgatcggctcctcacaagcagcggacgagaaatcaagcggcgacgtgtgcaatacggtttcggatccgggcgggtgcccaataaactgtttccgggcggatccggtttgcggagccgacggagtcacgtactggtgcggttgtcccgacgcggcgtgccacggagctcgcgtggtgaaaacgggagcctgcgacgcgggtaacgcgggaagcgcttctgtgccgggtcaagctttgttactgatccatatcgtttggctcttcttgctcggactctctcttctcgtcggtgctttctgaatggattagataataaggaaattgatcccaattcgtttctgtagcttcttcttttgtcgtgatttatagatcagcacttgtgtttgagatgattcatgcttctgtagatcacacgttatgtgtttgtatgtgtaacgttgagttggtttctcttaatggatttgcttcgtc

SEQ ID NO: 56173 - protein, 162 aa, Glycine max
  peptide (1)..(162): Ceres Seq. ID no. 13594980
TKQFKQHGNTQTPRKSPNHIKLGLRIGESCLSFHPNSMPIGFRNQVMRSFSWIIIPLLLLLFCLIGSSQAADEKSSGDVCNTVSDPGGCPINCFRADPVCGADGVTYWCGCPDAACHGARVVKTGACDAGNAGSASVPGQALLLIHIVWLFLLGLSLLVGAF

SEQ ID NO: 56174 - protein, 125 aa, Glycine max
  peptide (1)..(125): Ceres Seq. ID no. 13594981
MPIGFRNQVMRSFSWIIIPLLLLLFCLIGSSQAADEKSSGDVCNTVSDPGGCPINCFRADPVCGADGVTYWCGCPDAACHGARVVKTGACDAGNAGSASVPGQALLLIHIVWLFLLGLSLLVGAF

SEQ ID NO: 56175 - protein, 116 aa, Glycine max
  peptide (1)..(116): Ceres Seq. ID no. 13594982
MRSFSWIIIPLLLLLFCLIGSSQAADEKSSGDVCNTVSDPGGCPINCFRADPVCGADGVTYWCGCPDAACHGARVVKTGACDAGNAGSASVPGQALLLIHIVWLFLLGLSLLVGAF

SEQ ID NO: 56176 - DNA, 472 bp, Glycine max
  misc_feature (1)..(472): Ceres Seq. ID no. 13582224
cccaaaacccatggttggacccaaggatcaccagcgctttcaagcttcttatgcaactatattaaaggcccatatgactgctataaagaagagagaaaggaaagacaagaagaagcctgcaaaggcagataaaagagaaggaagttcaaagagactgaaaagattttggcttgttttgttttcattagtgttcctatcacaaatggactagatacctgtccttctaccaaagggtcttctgttcatagttccttgccaaagtctcgggtgtgtgagtattcggcagagcgaagggagatatctacaaaaggcacttcaatgctcaagtgaaggtgttacgactaacccttggatcatgaccagcgcacagactatgatttcgttagtctggctagcctaccctatattaaataacctgtaaaagaacacatgatatatctaggcaaatctatatatatatctcattccatcc

SEQ ID NO: 56177 - protein, 69 aa, Glycine max
  peptide (1)..(69): Ceres Seq. ID no. 13582225
PKPMVGPKDHQRFQASYATILKAHMTAIKKRERKDKKKPAKADKREGSSKRLKRFWLVLFSLVFLSQMD

SEQ ID NO: 56178 - protein, 66 aa, Glycine max
  peptide (1)..(66): Ceres Seq. ID no. 13582226
MVGPKDHQRFQASYATILKAHMTAIKKRERKDKKKPAKADKREGSSKRLKRFWLVLFSLVFLSQMD

SEQ ID NO: 56179 - protein, 45 aa, Glycine max
  peptide (1)..(45): Ceres Seq. ID no. 13582227
MTAIKKRERKDKKKPAKADKREGSSKRLKRFWLVLFSLVFLSQMD

SEQ ID NO: 56180 - DNA, 718 bp, Glycine max
  misc_feature (1)..(718): Ceres Seq. ID no. 12611008
gtgtgattcatatctgcttctcagacgaactctctctgcttaatccaaattttaacgcgttctttcgaatttgcccctccaattttaatttaattacgtaaatgtccggaactctaatctacttaggcgttaactcccttcgatcctcgccgggaaatagccttcgtcaaccgaagccaaccagactccacaacggaaacgcgcggctctccaccggagctacgtcgtttagagcttcggcagcgcagactctcaacgccgaaccagccgtaacggaatccgttcgccggcgagcgtcgaacctctacgaactgctgagagtggacgaaacggcgtcgttgacggagattaagacggcgtaccggagcttagctaaggttcaccatccggacgcgtcgtcggaatcggacggacgagatttcatggagattcacaaagcttacgcgacgctggcggatccgacgacgagagcgatctacgattcgacgctgggagcaagagggagacgagtgcacgctggagcgatggggaggacgagtcgggtttacccgacgacccggagatgggagacggatcagtgttggtagtttagtctttaggtttccgattacttttttttactcaatttccccttttcattattttttttactaaggggtaaataagttttttttaccacagatggtttaatgaatagagaggatgtacatttttgggg

SEQ ID NO: 56181 - protein, 161 aa, Glycine max
  peptide (1)..(161): Ceres Seq. ID no. 12611009
MSGTLIYLGVNSLRSSPGNSLRQPKPTRLHNGNARLSTGATSFRASAAQTLNAEPAVTESVRRRASNLYELLRVDETASLTEIKTAYRSLAKVHHPDASSESDGRDFMEIHKAYATLADPTTRAIYDSTLGARGRRVHAGAMGRTSRVYPTTRRWETDQCW

SEQ ID NO: 56182 - DNA, 991 bp, Glycine max
  misc_feature (1)..(991): Ceres Seq. ID no. 12611286
aagcagatcgcgcacccgacgcgatccagaccgcccagcacagacgccgacccacgccgctggcactcccgtctctcggcgatcctcccttctctggcgaccggctgtcaccccgtccgccctcgccgccagatccgcgcggccacgcccacccggcctcgctcctcctctcgggcctcggcagatctacgcgggcggcgaccctccctagccatgattaatttcgtgctcctaatcagccgccagggtaaggtgaggctcaccaagtggtactcgccttacacccagaaggagaggactaaggtcatccgtgagcttagtgggctcattcttactcgagggccaaaactctgcaactttgtcgagtggagaggttacaaggttgtgtacagaaggtatgccagcctctatttctgcatgtgtattgatgctgatgacaatgagcttgaagtccttgaaattatccatcattttgttgagatactcgaccgctatttcggcagtgtatgcgagctggatttgatattcaatttccacaaggcttactacgtactggatgagattctcatttctggtgagcttcaggagtctagcaagaagaatgttgcaagacttattgctgcacaggattcattggtagaggctgctaaagaggaagctggctccatcagtaacatcatcgcccaggctacgaagtaaaagtccgcgtctgatgatgcccctctgctctttggtttatgcttatgttggtaaatttgatgtaatagctcctttgctgtatccattttcccaaagaaatacgactccctggattcaggcctgttcagaatgagtgatatgtaattacaatgcatgtgttcctttgcaactgaatttggaatcttccaaagataaaactgtcatggagattgttcaccagtagtctgtttagtgggtatttaagaaatatttgtaaattcttggtcttaattcggcagagcattatcttgtg

SEQ ID NO: 56183 - protein, 232 aa, Glycine max
  peptide (1)..(232): Ceres Seq. ID no. 12611287
KQIAHPTRSRPPSTDADPRRWHSRLSAILPSLATGCHPVRPRRQIRAATPTRPRSSSRASADLRGRRPSLAMINFVLLISRQGKVRLTKWYSPYTQKERTKVIRELSGLILTRGPKLCNFVEWRGYKVVYRRYASLYFCMCIDADDNELEVLEIIHHFVEILDRYFGSVCELDLIFNFHKAYYVLDEILISGELQESSKKNVARLIAAQDSLVEAAKEEAGSISNIIAQATK

SEQ ID NO: 56184 - protein, 161 aa, Glycine max
  peptide (1)..(161): Ceres Seq. ID no. 12611288
MINFVLLISRQGKVRLTKWYSPYTQKERTKVIRELSGLILTRGPKLCNFVEWRGYKVVYRRYASLYFCMCIDADDNELEVLEIIHHFVEILDRYFGSVCELDLIFNFHKAYYVLDEILISGELQESSKKNVARLIAAQDSLVEAAKEEAGSISNIIAQATK

SEQ ID NO: 56185 - DNA, 749 bp, Glycine max
  misc_feature (1)..(749): Ceres Seq. ID no. 15178083
acagcagtcgctctccaaaagcctttctttccctttctctccacagtacgagaagagtagttctaggtagagatgacgagcttcaagggccttgtaggcgaggggagcacggcgctgccgcacgtcctcgccgtggacgacagctcggtggaccgcgccgtcatctccggcatcctccgcagctccaagttccgcgtgaccgccgtggacagcgggaagagggccctggagcttcttggctccgagaccaatgtgagcatgataatcaccgactactggatgccggagatgacgggctacgagctcctcaagaaggtcaaggggtcgtccaagctgagggagatccccgtggtgatcatgtcctcggagaacgtgcctacaaggatcaacaggtgcctggaggagggagccgaggatttcctgctgaagcccgtccagccgtccgacgtgtcgcgcctctgcagccgcgtcctccgctgagcgccgagtggtccggtaactccggttgcaccgtcggacgcccctgcactgcactacatggcgtgcggattcagtgttttggccttctgggacatggtgcgcatatgatggccgtcagtgtgaatgcatgcagcctgtgttttgcttctgctaagtaggatgtgccctgtttccccctgttatgtagcagtcgacgtatatccctgtcagtgttctgtgcttcagtctcgtggatcagtgttcagtaaaaaggaagtttgcctcaagac

SEQ ID NO: 56186 - protein, 211 aa, Glycine max
  peptide (1)..(211): Ceres Seq. ID no. 15178084
SSRSPKAFLSLSLHSTRRVVLGRDDELQGPCRRGEHGAAARPRRGRQLGGPRRHLRHPPQLQVPRDRRGQREEGPGASWLRDQCEHDNHRLLDAGDDGLRAPQEGQGVVQAEGDPRGDHVLGERAYKDQQVPGGGSRGFPAEARPAVRRVAPLQPRPPLSAEWSGNSGCTVGRPCTALHGVRIQCFGLLGHGAHMMAVSVNACSLCFASAK

SEQ ID NO: 56187 - protein, 135 aa, Glycine max
  peptide (1)..(135): Ceres Seq. ID no. 15178085
MTSFKGLVGEGSTALPHVLAVDDSSVDRAVISGILRSSKFRVTAVDSGKRALELLGSETNVSMIITDYWMPEMTGYELLKKVKGSSKLREIPVVIMSSENVPTRINRCLEEGAEDFLLKPVQPSDVSRLCSRVLR

SEQ ID NO: 56188 - DNA, 1098 bp, Glycine max
  misc_feature (1)..(1098): Ceres Seq. ID no. 15173129
aattagtccagttcgtcggttggtggtggtggcgtgcgtgcctgggcgactctgcctcaaaccctcatcaggtccctcgatcgccgcgctcgagttggttatatagaactgaagggaggtaaggtgagtataagcatcagagggagtacatagcatgagtaataccagcggcgcacggcgtgccgcaaggaggcaatcgctggatggatctgctgataaagttgttgtggacttggatgcaagctcgccggtggcggggaaccatcatgggctctcggtcttccctggtgcacgcacatcgcctattgatgtggaagctctcgatgatgaagtgcaggccctatcgccttcacaagtgcctccctcgggggtgaaccggagaactagagggcaacctgtgacacaattttctctggatgaagatgctgtcctggaagagaattggagaattataaggcaatgtgcgacaccattttatcttgatgaagatgctgccatggaagagaatcggagaactagaagtcaatttttgacaccactttatctggatgaagatgctgccctggaagataatgcagctatgccttctcatagcacttggaacaaacgccaaagggttgcgcctttgatatgtctctccccagaaagggaagaagggtccagcctgcagtcgaacaatgcggtgcaaattagccaagagcctgctaaggtggtggttccaaaggaaccgaatttcacttgcccggtgtgccttaacaagctggtggagccttcgacaacaaaatgtggccatgatgttgtgggcagagtgcatcaagcaagccatccagtttcagaagaaatgccctacttgccgcaaggccctgaggaagaacaacttccatcgtatttaccttccgaactcggatggttaaggtcagcatcggatcaatcgccaaagagtatcatcacatagattatggttgctgaggaacctgtagcaggtgctcagatgaacaattgattaagttgactgctgtacgtatcattagatggttggtctatgatgtaactgagattaagcttgaagctgagataaaacagtggatagcatcttcg

SEQ ID NO: 56189 - protein, 266 aa, Glycine max
  peptide (1)..(266): Ceres Seq. ID no. 15173130
MSNTSGARRAARRQSLDGSADKVVVDLDASSPVAGNHHGLSVFPGARTSPIDVEALDDEVQALSPSQVPPSGVNRRTRGQPVTQFSLDEDAVLEENWRIIRQCATPFYLDEDAAMEENRRTRSQFLTPLYLDEDAALEDNAAMPSHSTWNKRQRVAPLICLSPEREEGSSLQSNNAVQISQEPAKVVVPKEPNFTCPVCLNKLVEPSTTKCGHDVVGRVHQASHPVSEEMPYLPQGPEEEQLPSYLPSELGWLRSASDQSPKSIIT

SEQ ID NO: 56190 - protein, 152 aa, Glycine max
  peptide (1)..(152): Ceres Seq. ID no. 15173131
MEENRRTRSQFLTPLYLDEDAALEDNAAMPSHSTWNKRQRVAPLICLSPEREEGSSLQSNNAVQISQEPAKVVVPKEPNFTCPVCLNKLVEPSTTKCGHDVVGRVHQASHPVSEEMPYLPQGPEEEQLPSYLPSELGWLRSASDQSPKSIIT

SEQ ID NO: 56191 - DNA, 980 bp, Glycine max
  misc_feature (1)..(980): Ceres Seq. ID no. 12611293
cccagctcactcactcactcactctcacacacccactttacttcctccactcttcaggtcacatcggcagctgctagccaagtagccaagccaacgaagagatcgagaaagcgagagcgtagcaagaaggtggcatcatggcgacggcggtgcagtggccggtgatggtggtggtggtgatgatgggggcggtgatggcggcgcgcgtgggggcggacatggacgcggaccggagcgagtgcgcggagcagctggtggggttggcgccgtgcctgcagtacgtgcaggggcaggcgcggtcgccggcgccggactgctgcggcgggctgagccaggtgctggacaagagccccaagtgcctgtgcgtgctggtcaaggacaaggacgaccccaacctgggcatcaagatcaacgcctccctcgcgctcgccctcccctccgcctgccgcaacaccaaggccaacgtctcccactgcccagagctgctgcacctccctccgaactccaaggacgccgccatcttcagccccggcggcgacaagggctccgctgcagctctagccaaggacaacacggcgtcgacggccaactcccgcgcgcagcaggcggccagcgccggcaccgcctcctcgacggcgaccgccggcgtcgcactggcggcgttgctcgccggctaccttgcgctgctcctgcccgctgacttcctggccgccgcctcctccttctagtccatctccgtacgtgcgcgtctgtctcctcccccctacggcgctaccgaagatcgatcaggagcaggggagccaggaaccagtgactctgtttgggggaatgaaatgcctcaagtaggatcgatcatgcatgttgtagtatgtgacagagatggtagtggtggtagtggttggtttgttttggtgctgtattgaactcttatgttttcgctgtatggatgacgcaacaattccacacttacggatgcggcc

SEQ ID NO: 56192 - protein, 196 aa, Glycine max
  peptide (1)..(196): Ceres Seq. ID no. 12611294
MATAVQWPVMVVVVMMGAVMAARVGADMDADRSECAEQLVGLAPCLQYVQGQARSPAPDCCGGLSQVLDKSPKCLCVLVKDKDDPNLGIKINASLALALPSACRNTKANVSHCPELLHLPPNSKDAAIFSPGGDKGSAAALAKDNTASTANSRAQQAASAGTASSTATAGVALAALLAGYLALLLPADFLAAASSF

SEQ ID NO: 56193 - protein, 187 aa, Glycine max
  peptide (1)..(187): Ceres Seq. ID no. 12611295
MVVVVMMGAVMAARVGADMDADRSECAEQLVGLAPCLQYVQGQARSPAPDCCGGLSQVLDKSPKCLCVLVKDKDDPNLGIKINASLALALPSACRNTKANVSHCPELLHLPPNSKDAAIFSPGGDKGSAAALAKDNTASTANSRAQQAASAGTASSTATAGVALAALLAGYLALLLPADFLAAASSF

SEQ ID NO: 56194 - protein, 182 aa, Glycine max
  peptide (1)..(182): Ceres Seq. ID no. 12611296
MMGAVMAARVGADMDADRSECAEQLVGLAPCLQYVQGQARSPAPDCCGGLSQVLDKSPKCLCVLVKDKDDPNLGIKINASLALALPSACRNTKANVSHCPELLHLPPNSKDAAIFSPGGDKGSAAALAKDNTASTANSRAQQAASAGTASSTATAGVALAALLAGYLALLLPADFLAAASSF

SEQ ID NO: 56195 - DNA, 795 bp, Glycine max
  misc_feature (1)..(795): Ceres Seq. ID no. 13639196
actcaggacaataagtttaaagccatcaaatccaaaaaaaaatatttgttttaataatctaagcttcatcaatggcgaatcaagcagctatagcatttttctttttcgttttggcggtcttctccaacttggagctctcgtcttctacgcttttccatggcaaggtctcttgccttgactgccaccgcggtttcgacttctcaggcgttaaggttctcctaaagtgcgaaggcgagaagaaacacataaccacgatggcgacttcagacggatctttccggtcagtgcttccgaccaatgacagaaaacactccatgaactgtcttgcaaagctcttgggaggtcctgagcaactttatgctcataaacacaacatggtctctgaactggttaagtcaaaacacgataccaaggttcttactacctcaaacccactttccttctctctctcatgccctaaaccaactggagataatgtcggaaacatgataggagattcgaagactgttaattttcctgggacaggaggttttggattcccacctgctagcttctttcccttcttaccaatcattggcatcccatgattttaattaaatgtgcttgataagacgggggacgtatttattcataaatgttgttgtttatgtgaatttaagtgagcgaacaaaattgtttttgttttgtgagatataattaaggtttgtttatgtgataagaaaatgttggttatcggcttcttggatccgttgctttgtaccatgtttgtgataataataaagattgcattagtcc

SEQ ID NO: 56196 - protein, 171 aa, Glycine max
  peptide (1)..(171): Ceres Seq. ID no. 13639197
MANQAAIAFFFFVLAVFSNLELSSSTLFHGKVSCLDCHRGFDFSGVKVLLKCEGEKKHITTMATSDGSFRSVLPTNDRKHSMNCLAKLLGGPEQLYAHKHNMVSELVKSKHDTKVLTTSNPLSFSLSCPKPTGDNVGNMIGDSKTVNFPGTGGFGFPPASFFPFLPIIGIP

SEQ ID NO: 56197 - protein, 110 aa, Glycine max
  peptide (1)..(110): Ceres Seq. ID no. 13639198
MATSDGSFRSVLPTNDRKHSMNCLAKLLGGPEQLYAHKHNMVSELVKSKHDTKVLTTSNPLSFSLSCPKPTGDNVGNMIGDSKTVNFPGTGGFGFPPASFFPFLPIIGIP

SEQ ID NO: 56198 - protein, 90 aa, Glycine max
  peptide (1)..(90): Ceres Seq. ID no. 13639199
MNCLAKLLGGPEQLYAHKHNMVSELVKSKHDTKVLTTSNPLSFSLSCPKPTGDNVGNMIGDSKTVNFPGTGGFGFPPASFFPFLPIIGIP

SEQ ID NO: 56199 - DNA, 959 bp, Glycine max
  misc_feature (1)..(959): Ceres Seq. ID no. 12610239
atatcattatcaatatcaacatatagagagatgcagatacgtttcaaaagaagaagaggataactagcgaatctttattttttttgttataaaagtcaacagaatctttactgatccctcgtagacttttcttctagggcttatccgaattttatcatcaaattaaaatctaatcaaccactaaccacatcctcccatctccagattcatcgtcgcgggtagacggagaagaagatatggcggttactatgaagcatatgtcgttgatcgtctctttgttcggcgtcttgtccttccttcttggggtcatcgcggagaacaagaagcctgcgtctgggactcctataaacgggaagggagtagttatctgcaaatatccatctgatccaactgtcgccttgggttacctttctgctgcctttctccttgcctccacaatagctggatacaaatccttgttcatgtcttacaagggaaggtctgttcccaactctgtcttgttcaaaagcaccaccttctctgtcttcttcaacattgccttgatcacatctggactggcactgtctctgttgctatggccaaccattacagagcaacttcacttgacacgtaatgtccatcggaacttagagaccagttgccccacggctaagaccggtctgcttggtggaggtgcctttgtttcattagactcgtgccttttctggttggtcgctctgatgctcgctgataacgcacgtgaagaccattttgatgaaactgagaacaggaacgtcaatgggaactcttcctctagggatgttaatctcaagattgatgcttgagagaataatctgcatccgattattagtattgggttttaataaatggttttttacattattctattacttgtttgattaagaaaataactattcgtttcttctggttcttctatgttcttaataatatttgatctt

SEQ ID NO: 56200 - protein, 195 aa, Glycine max
  peptide (1)..(195): Ceres Seq. ID no. 12610240
MAVTMKHMSLIVSLFGVLSFLLGVIAENKKPASGTPINGKGVVICKYPSDPTVALGYLSAAFLLASTIAGYKSLFMSYKGRSVPNSVLFKSTTFSVFFNIALITSGLALSLLLWPTITEQLHLTRNVHRNLETSCPTAKTGLLGGGAFVSLDSCLFWLVALMLADNAREDHFDETENRNVNGNSSSRDVNLKIDA

SEQ ID NO: 56201 - protein, 191 aa, Glycine max
  peptide (1)..(191): Ceres Seq. ID no. 12610241
MKHMSLIVSLFGVLSFLLGVIAENKKPASGTPINGKGVVICKYPSDPTVALGYLSAAFLLASTIAGYKSLFMSYKGRSVPNSVLFKSTTFSVFFNIALITSGLALSLLLWPTITEQLHLTRNVHRNLETSCPTAKTGLLGGGAFVSLDSCLFWLVALMLADNAREDHFDETENRNVNGNSSSRDVNLKIDA

SEQ ID NO: 56202 - protein, 188 aa, Glycine max
  peptide (1)..(188): Ceres Seq. ID no. 12610242
MSLIVSLFGVLSFLLGVIAENKKPASGTPINGKGVVICKYPSDPTVALGYLSAAFLLASTIAGYKSLFMSYKGRSVPNSVLFKSTTFSVFFNIALITSGLALSLLLWPTITEQLHLTRNVHRNLETSCPTAKTGLLGGGAFVSLDSCLFWLVALMLADNAREDHFDETENRNVNGNSSSRDVNLKIDA

SEQ ID NO: 56203 - DNA, 875 bp, Glycine max
  misc_feature (1)..(875): Ceres Seq. ID no. 13582167
agtaatcggaaaattctagagcatcgagagtttcttcaatggcgaatctccccaccgttctcgttaccggcgctagtggcaaaacaggtcagattgtgtacaagaagctgaaggagaggtcagacaagtttgtggcgaaggggttagtgagaactcctcaagggaaagaggagattggaggagaagatgatgtgttcattggtgatataagggatgctgatagcattacccctgcgattcaagggatcgatgcgcttgtgattctcactagcgctgtgcccaagatgaaacctgggtttgatcccactaaaggtggaagacctgagttcattttcgatgatggacaataccctgaacaggttgattggattggccagaagaaccaaatagatgctgccaaggctgctggtgttaagcatattgtcttggttgggtccatgggtggaacaaatcctgatcatcctctcaacaaactgggaaatgggaacatactgatttggaagaggaaagctgaacagtaccttgctgattctggtactccttacacaataatcagagctggaggacttctagacaaagaaggaggtgcacgagagctcctagttggcaaagacgatgagcttcttcaaacagacaccaaaaccgtccccagggctgatgttgctgaagtctgcattcaggcattgctgttcgaggaagctaagaataaagcatttgatctcggttcaaaaccagagggaaccagttctcccaccaatgacttcaaggctctcttctctcaagtcatcgctcgtttttagatcttctatctctattgcaactgaataatttgtgttgtaatgtaccaaaccttttaaaataaaatctccgggttc

SEQ ID NO: 56204 - protein, 253 aa, Glycine max; identical to SEQ ID NO: 1068
  peptide (1)..(253): Ceres Seq. ID no. 13582168

SEQ ID NO: 56205 - protein, 171 aa, Glycine max; identical to SEQ ID NO: 1069
  peptide (1)..(171): Ceres Seq. ID no. 13582169

SEQ ID NO: 56206 - DNA, 817 bp, Glycine max
  misc_feature (1)..(817): Ceres Seq. ID no. 12610243
aaaaagcttaaactaaaacccccaagaaacggagatgggtttggtcacagaggaggtgagagctaaggcagagatgtacacgggagatgagatatgccgggagaagacaaaatgcttcctcaaggaaatatctatgcccaatggcttactacctttgaaggacatagaagaggctgggtatgacagagagtcaggtgttgtgtggctgaagcagaaacagagcatcacccacaagttcgaaaatatcgataagctcgtctcctatggaaccgaggtcactgccgtggtcaaaaccgggaagatcaagaagctcactggtgtcaaggccaaggagcttcttatttgggtcagtgtcagtgagatctatacagaggagaaagagaagatcacctttaagtcaccaaccacactgtccaggactttccctgtctcagcttttattgtcccagaggaagtggaaccagccaaggaagagcctgctaaggagaagagcagtgaagccaccgaggaggtcaccgaggaagaacctgccaaggaggctgccaaggttgaacctgccaaagaggctgttgccgtcaaggaggcctaaccaagcttatcactgcttctatagtaaaaagagaccaaaatcttttgaagtgtgcttcaacaatttaaaccgacctttgagagttagtgcttctcactgctcttactctcatctattacctaccactcgttgctgcttatttttacctgtaataagatgtcaacatcatcctgttcttacaagtattaccgtataattatttataaactacactgaagttggttctgt

SEQ ID NO: 56207 - protein, 184 aa, Glycine max
  peptide (1)..(184): Ceres Seq. ID no. 12610244
MGLVTEEVRAKAEMYTGDEICREKTKCFLKEISMPNGLLPLKDIEEAGYDRESGVVWLKQKQSITHKFENIDKLVSYGTEVTAVVKTGKIKKLTGVKAKELLIWVSVSEIYTEEKEKITFKSPTTLSRTFPVSAFIVPEEVEPAKEEPAKEKSSEATEEVTEEEPAKEAAKVEPAKEAVAVKEA

SEQ ID NO: 56208 - protein, 173 aa, Glycine max
  peptide (1)..(173): Ceres Seq. ID no. 12610245
MEPRSLPWSKPGRSRSSLVSRPRSFLFGSVSVRSIQRRKRRSPLSHQPHCPGLSLSQLLLSQRKWNQPRKSLLRRRAVKPPRRSPRKNLPRRLPRLNLPKRLLPSRRPNQAYHCFYSKKRPKSFEVCFNNLNRPLRVSASHCSYSHLLPTTRCCLFLPVIRCQHHPVLTSITV

SEQ ID NO: 56209 - protein, 171 aa, Glycine max
  peptide (1)..(171): Ceres Seq. ID no. 12610246
MYTGDEICREKTKCFLKEISMPNGLLPLKDIEEAGYDRESGVVWLKQKQSITHKFENIDKLVSYGTEVTAVVKTGKIKKLTGVKAKELLIWVSVSEIYTEEKEKITFKSPTTLSRTFPVSAFIVPEEVEPAKEEPAKEKSSEATEEVTEEEPAKEAAKVEPAKEAVAVKEA

SEQ ID NO: 56210 - DNA, 852 bp, Glycine max
  misc_feature (1)..(852): Ceres Seq. ID no. 12610597
acaccacccggagaactgagctgagatactacttctgttctcttctccccccttttccgagccccccacccgtcatctctccagcctccagtctccgccgacgccatggggcaggtctgggcgtctctgcaagagaagctccaagggcggcactggaaggagaggcaggtgcggaagatcaccgacagggtgttcgaccggctcaccgaggatacccggaagcccgagaaggacgccctcaagttcgaggaggtctacatcgccgtcctctgcgtctacaatgacatcaacaagtacttgccggggccgcactacgaccctccgtccaaggagaggctcaaggaactcatgaaagagtttgacatcgacatgaacggtctcctggatcgcgaggagttcgcggagttcatccggaagctgaccgccgagtcactctgcgcgatcagcctcaagctgatcatcacgctggtcgccgcccctgcgctggcgctggcgaccaagagggcaaccgagggcgtccccggcgtcggcaaggtagtgcacaaggtgcccaatgccatctatgccgccgccatcaccatggctgccgtgctcatccagagatccgccgagggcgtcgagtagaagcggcatcgcgccgtgaactgtagatgcaccaggcaaccagggagggtgtaaatgtgctgtgatttgccgtgtgaagggtgatgccctgtgggacttatagttttttctgtaataccttcctgtctgtgcttcttggtgttgctagcctggtgtgattcaaaaagacagtattcgctgcttgttgacatgataaattcttggactaaataaagccgtggtcctgct

SEQ ID NO: 56211 - protein, 172 aa, Glycine max
  peptide (1)..(172): Ceres Seq. ID no. 12610598
MGQVWASLQEKLQGRHWKERQVRKITDRVFDRLTEDTRKPEKDALKFEEVYIAVLCVYNDINKYLPGPHYDPPSKERLKELMKEFDIDMNGLLDREEFAEFIRKLTAESLCAISLKLIITLVAAPALALATKRATEGVPGVGKVVHKVPNAIYAAAITMAAVLIQRSAEGVE

SEQ ID NO: 56212 - protein, 93 aa, Glycine max
  peptide (1)..(93): Ceres Seq. ID no. 12610599
TTRRTELRYYFCSLLPPFPSPPPVISPASSLRRRHGAGLGVSAREAPRAALEGEAGAEDHRQGVRPAHRGYPEAREGRPQVRGGLHRRPLRLQ

SEQ ID NO: 56213 - protein, 91 aa, Glycine max
  peptide (1)..(91): Ceres Seq. ID no. 12610600
MKEFDIDMNGLLDREEFAEFIRKLTAESLCAISLKLIITLVAAPALALATKRATEGVPGVGKVVHKVPNAIYAAAITMAAVLIQRSAEGVE

SEQ ID NO: 56214 - DNA, 945 bp, Glycine max
  misc_feature (1)..(945): Ceres Seq. ID no. 12610607
gctagggttcgaatcagattatctgcaacaacaacaaaaaaaatggcgttggctggtcgtatcagatccgggatctccttcttcaagaccatctccgtctctgattccgtctcctccgctagatctcacctccgtggagcgccgcttatccccgcgttgagagattatgcaacagcttcggctcagaagaccggcaatgttaaggtgcctgtggctttagttggtgaatctggcaactttgcttcgtggctatacattgcagctgtgaaaatgaactctttggagaagatcgagtctgatctttctgagctggttgaggctatgaagacaagccctattttttcgcagtttactaaagatccctctgttcctagagagacaagactcgctgctattgtggatgtttgtgataaagcaaagtttgcggaacccaccaagaacttcctctctttgttagctgagaacgggaagctgaagaatttagacgtgattgtgaagaaattcatgcagctgacaacagcacataggggagacgtcaaggttttggttaccacagtcatgccgcttccccctgctgaggagaaggagttgaaggagacactccaggagataattggagaagggaagaaagtaactgtggaacaaaagattgatccgagtatctatggagggctaatagtagagtttcaacaaaaggtgttggacatgtctatcaggacaagggcacagcagatggagaggctcctccgtgaacctgttgacctcagcaacctttgaagattttccctaaagaaaacgtgcttgtgatgatgctaccaccagttgacaaataaaatatgacactctcctgaggaacaacatacagacacttgtgtcatgttttaaattttatcatttcattttacagttgttgttttccttcgaaataagcttttttgaagacgt

SEQ ID NO: 56215 - protein, 258 aa, Glycine max
  peptide (1)..(258): Ceres Seq. ID no. 12610608
ARVRIRLSATTTKKMALAGRIRSGISFFKTISVSDSVSSARSHLRGAPLIPALRDYATASAQKTGNVKVPVALVGESGNFASWLYIAAVKMNSLEKIESDLSELVEAMKTSPIFSQFTKDPSVPRETRLAAIVDVCDKAKFAEPTKNFLSLLAENGKLKNLDVIVKKFMQLTTAHRGDVKVLVTTVMPLPPAEEKELKETLQEIIGEGKKVTVEQKIDPSIYGGLIVEFQQKVLDMSIRTRAQQMERLLREPVDLSNL

SEQ ID NO: 56216 - protein, 244 aa, Glycine max
  peptide (1)..(244): Ceres Seq. ID no. 12610609
MALAGRIRSGISFFKTISVSDSVSSARSHLRGAPLIPALRDYATASAQKTGNVKVPVALVGESGNFASWLYIAAVKMNSLEKIESDLSELVEAMKTSPIFSQFTKDPSVPRETRLAAIVDVCDKAKFAEPTKNFLSLLAENGKLKNLDVIVKKFMQLTTAHRGDVKVLVTTVMPLPPAEEKELKETLQEIIGEGKKVTVEQKIDPSIYGGLIVEFQQKVLDMSIRTRAQQMERLLREPVDLSNL

SEQ ID NO: 56217 - protein, 168 aa, Glycine max
  peptide (1)..(168): Ceres Seq. ID no. 12610610
MNSLEKIESDLSELVEAMKTSPIFSQFTKDPSVPRETRLAAIVDVCDKAKFAEPTKNFLSLLAENGKLKNLDVIVKKFMQLTTAHRGDVKVLVTTVMPLPPAEEKELKETLQEIIGEGKKVTVEQKIDPSIYGGLIVEFQQKVLDMSIRTRAQQMERLLREPVDLSNL

SEQ ID NO: 56218 - DNA, 950 bp, Glycine max
  misc_feature (1)..(950): Ceres Seq. ID no. 13582073
gaccccccgctccgctcgtctgccgccgcccacacaccaaaccctaaccctaccgccgccgccgccatggccgacccgcggatgttcccatcgggatcaaacggcccggaagaccacgcccccggccgccggaagtacaacccctaccaggacctcaacatgccctacaactacaagaacctctacgacctccccacctcgccggagttcctcttcgaggaggagtccgcggtgcagcgccgatcctggggcgagaacctcacttactacacgggcatcgggtacctctctggcgccgtgggcggcgccgccctcggcctccgcgacgccgccgcgggcgcggagcccggggagaccgccaagatccgcgccaaccgcttgctcaacgcctgcggcagctccggccgccgttacggcaacaggctcggggtcatcgggctgatgtacgccgggatggagagcggcatggtcgcggcacgcgaccaagacgactggatcaacagcgtcgccgcagggctcggcaccggcgcgctcttccgcgccgctaacgggccgcggtctgccgccgtcgcgggcgctgtcggcggggtccttgctgccgccgccttggccgggaagcagcttgcgaagcgatacgtacaggcaatatgaatctcttcctgttctctcagatcaattgatcaaatcaatcagtcgccaagaatggattatttttgcgtttgtcgttctccagtttagctgctccattagagaatgcataatatctatgctgtgttagtcacatgtatacgatcggaatggatgattttggctttgttacaatgtcggatgccagcatgatgttatacatttttcgggtgttgctgagcaataagagtctatttgatattttgcagcgattacagttgtgaaacatgtactgcagtatttagtaagaatgttcttcagtc

SEQ ID NO: 56219 - protein, 216 aa, Glycine max
  peptide (1)..(216): Ceres Seq. ID no. 13582074
DPPLRSSAAAHTPNPNPTAAAAMADPRMFPSGSNGPEDHAPGRRKYNPYQDLNMPYNYKNLYDLPTSPEFLFEEESAVQRRSWGENLTYYTGIGYLSGAVGGAALGLRDAAAGAEPGETAKIRANRLLNACGSSGRRYGNRLGVIGLMYAGMESGMVAARDQDDWINSVAAGLGTGALFRAANGPRSAAVAGAVGGVLAAAALAGKQLAKRYVQAI

SEQ ID NO: 56220 - protein, 194 aa, Glycine max
  peptide (1)..(194): Ceres Seq. ID no. 13582075
MADPRMFPSGSNGPEDHAPGRRKYNPYQDLNMPYNYKNLYDLPTSPEFLFEEESAVQRRSWGENLTYYTGIGYLSGAVGGAALGLRDAAAGAEPGETAKIRANRLLNACGSSGRRYGNRLGVIGLMYAGMESGMVAARDQDDWINSVAAGLGTGALFRAANGPRSAAVAGAVGGVLAAAALAGKQLAKRYVQAI

SEQ ID NO: 56221 - protein, 189 aa, Glycine max
  peptide (1)..(189): Ceres Seq. ID no. 13582076
MFPSGSNGPEDHAPGRRKYNPYQDLNMPYNYKNLYDLPTSPEFLFEEESAVQRRSWGENLTYYTGIGYLSGAVGGAALGLRDAAAGAEPGETAKIRANRLLNACGSSGRRYGNRLGVIGLMYAGMESGMVAARDQDDWINSVAAGLGTGALFRAANGPRSAAVAGAVGGVLAAAALAGKQLAKRYVQAI

SEQ ID NO: 56222 - DNA, 1327 bp, Glycine max
  misc_feature (1)..(1327): Ceres Seq. ID no. 13595164
ctagaacmcccctccyratcgaaaaacttctgttcatccatttgtccaagacattcgagcttgttaagttctagtagttttatttgttgcagagttagtaccagagaaatggagccacaggaaggaaggaaagggataccatctctgctgtcctcgcagggggagtgcattgccaccaacatcacacagctcattggttggacaccactgatagaactgagaaacatcactgagaaagacagcataggtgctcggctgattgggaagattgagccgtaccagcccctttcctctgtgaaggatcggagtgctctcagattgattgaagatgcagaggagaaaggcttgatcacacctggcatcacaacactgctgggggtcacaagtggtaatcttggcatcggcgtggcgttcattgctgctcagaaaggatacaagttcatcgccctcatgcctgctaaactctcgcttgataagcagatactgatgcgataccttggcgtagaagtggtattagttgatgctgtacagcatggattcaaagctttacttgatagggtagaacagatgaagaaggatgtggaagatgtgtatgttctagatcaattcaccaatcctgcaaatcccgatgcccacttcagatggactggacctgagatatggaaagatacagcaggcaaagtggacatatttatagctgcttcaggttcaggaggcaccatcacaggcgtggggaggtatctcaagacgaagaacccatctgtaaaattaatatgcgttgaaccagctgaaagtccagtgatttcaggtggcgagccagccttccacaacatcctaggaatagggcctggttttgtcccagaaatattggatagatcccagatagatgaaattgtaacagtaactactcaagaagctatggacatggctagaagattggcaagggaagaaggattgcttgttggcatatcttcaggggcaaatgcagctgcctgcttaaaggttgcatcaagagaggagaacaggggaaagatgattgtgacaatgttttccagtggtgcagagaggtatctgaactcggagctctttgcgcaggttaaggaagagtgcgtcaacgtcaacatgaccttctgatgtccatatcaaggcaatgacaccgtaggggtgatccagaagtctagtgttatcttacactggcttataagaagcggaggtctcagttactcaaataccagacactgttttgttaggagacaaaacgaaatgcactagcgtkrmmaabtaaatactccctctgttcactccctctgttcacaaaaaaaaaaaa

SEQ ID NO: 56223 - protein, 377 aa, Glycine max
  peptide (1)..(377): Ceres Seq. ID no. 15221496
  misc_feature (3)..(3): Xaa is any aa, unknown or other
  misc_feature (6)..(6): Xaa is any aa, unknown or other
LEXPSXSKNFCSSICPRHSSLLSSSSFICCRVSTREMEPQEGRKGIPSLLSSQGECIATNITQLIGWTPLIELRNITEKDSIGARLIGKIEPYQPLSSVKDRSALRLIEDAEEKGLITPGITTLLGVTSGNLGIGVAFIAAQKGYKFIALMPAKLSLDKQILMRYLGVEVVLVDAVQHGFKALLDRVEQMKKDVEDVYVLDQFTNPANPDAHFRWTGPEIWKDTAGKVDIFIAASGSGGTITGVGRYLKTKNPSVKLICVEPAESPVISGGEPAFHNILGIGPGFVPEILDRSQIDEIVTVTTQEAMDMARRLAREEGLLVGISSGANAAACLKVASREENRGKMIVTMFSSGAERYLNSELFAQVKEECVNVNMTF

SEQ ID NO: 56224 - protein, 341 aa, Glycine max
  peptide (1)..(341): Ceres Seq. ID no. 15221497
MEPQEGRKGIPSLLSSQGECIATNITQLIGWTPLIELRNITEKDSIGARLIGKIEPYQPLSSVKDRSALRLIEDAEEKGLITPGITTLLGVTSGNLGIGVAFIAAQKGYKFIALMPAKLSLDKQILMRYLGVEVVLVDAVQHGFKALLDRVEQMKKDVEDVYVLDQFTNPANPDAHFRWTGPEIWKDTAGKVDIFIAASGSGGTITGVGRYLKTKNPSVKLICVEPAESPVISGGEPAFHNILGIGPGFVPEILDRSQIDEIVTVTTQEAMDMARRLAREEGLLVGISSGANAAACLKVASREENRGKMIVTMFSSGAERYLNSELFAQVKEECVNVNMTF

SEQ ID NO: 56225 - protein, 227 aa, Glycine max
  peptide (1)..(227): Ceres Seq. ID no. 15221498
MPAKLSLDKQILMRYLGVEVVLVDAVQHGFKALLDRVEQMKKDVEDVYVLDQFTNPANPDAHFRWTGPEIWKDTAGKVDIFIAASGSGGTITGVGRYLKTKNPSVKLICVEPAESPVISGGEPAFHNILGIGPGFVPEILDRSQIDEIVTVTTQEAMDMARRLAREEGLLVGISSGANAAACLKVASREENRGKMIVTMFSSGAERYLNSELFAQVKEECVNVNMTF

SEQ ID NO: 56226 - DNA, 774 bp, Glycine max
  misc_feature (1)..(774): Ceres Seq. ID no. 12610615
atagatagatccatagaagaagggcaggggcagaggcgcggagcagaggaaatcaagaaggcggggaagatcgtcggagcggcgatggaggggtgggacaagggcacgaagagcgtggtgggcgagatcccgctgctgtcgacgcgggcgggcccccgggacggcgatgcgtggcggcagcggctcaaggaggagtaccgcgctctcatcgcctacacctccgtcaacaaggccaaggacaacgactggttccgcatcgccgccgccaacccggagggcacccgctgggagggcacctgctggtacgtccacaacctccgccgctacgagttccccctccagttcgacatccccgtcgcctacccccaggtcgcccccgagatcgagctccccaccctcgacggcaagacccacaagatgtaccgcggggggaagatctgcctcaccgtgcacttcaagccgctgtgggccaagaactgcccgcggttcgggctcgcccacgctctctgcctcggactcgcgccgtggctcgccgcggaggtgcccatcctggtcgactcgggcatggtgaagcacaaggacgatgaggctgctcctgcagatgccgctgctgcgtctggctctgccgctgcctcttagctgcaagacagttacagtatgccttttttgttgtcgctgacagtgacagttacagtatgatggttgtcaaggggattggaggattgaaaatccactcggttgtggactaataagagccagcaatacctatactcg

SEQ ID NO: 56227 - protein, 212 aa, Glycine max
  peptide (1)..(212): Ceres Seq. ID no. 12610616
IDRSIEEGQGQRRGAEEIKKAGKIVGAAMEGWDKGTKSVVGEIPLLSTRAGPRDGDAWRQRLKEEYRALIAYTSVNKAKDNDWFRIAAANPEGTRWEGTCWYVHNLRRYEFPLQFDIPVAYPQVAPEIELPTLDGKTHKMYRGGKICLTVHFKPLWAKNCPRFGLAHALCLGLAPWLAAEVPILVDSGMVKHKDDEAAPADAAAASGSAAAS

SEQ ID NO: 56228 - protein, 184 aa, Glycine max
  peptide (1)..(184): Ceres Seq. ID no. 12610617
MEGWDKGTKSVVGEIPLLSTRAGPRDGDAWRQRLKEEYRALIAYTSVNKAKDNDWFRIAAANPEGTRWEGTCWYVHNLRRYEFPLQFDIPVAYPQVAPEIELPTLDGKTHKMYRGGKICLTVHFKPLWAKNCPRFGLAHALCLGLAPWLAAEVPILVDSGMVKHKDDEAAPADAAAASGSAAAS

SEQ ID NO: 56229 - protein, 134 aa, Glycine max
  peptide (1)..(134): Ceres Seq. ID no. 12610618
MRGGSGSRRSTALSSPTPPSTRPRTTTGSASPPPTRRAPAGRAPAGTSTTSAATSSPSSSTSPSPTPRSPPRSSSPPSTARPTRCTAGGRSASPCTSSRCGPRTARGSGSPTLSASDSRRGSPRRCPSWSTRAW

SEQ ID NO: 56230 - DNA, 784 bp, Glycine max
  misc_feature (1)..(784): Ceres Seq. ID no. 12610253
aaaatgtttgttgtgtctcttctcttcccaaactctcttcttctattccaaagacccttttgaagtaatcgatggagtttcagtctctttccggattctaccttcttctttccttaaccattctcttccttgcaccctttcacgctcaagctaaaattaaagtcacttactgcgataagaaggcagactatcctgtgaaggtgtctggagttgaaatatcaccagaccctgtggagagtggcaagcctgctacctttaagatctcggctacttctagtaaagctatttatggtggagaagttgtaattggagtttcatacgttggggtgcctgtccatactgaaagaattgatctctgtcatgaagtatcctgtcctgttgccaatggcaattttctgatttctcacacccaaacattgccttcgattactccaccgggaccctactctctgaagatgacactgaagaatgatcgggacgaggtgttaacttgcattaagtttaattttaaaattgtttttggatcttttgtgtctgatatgtaaagtgtcctttgcatgcctgatctgggggaacttttttgctttgttgtgaagtgttttattgtattttgtactggatatcacctttcaattcgagtcgtatcttgtaaggccaatgttctctagtgtcagagtaatgtcaatgacattagactcatgatgttgtataaggtccatgactggaaatttttctttctgtatgatttgcacagtacaatccatagttctaaattgcggtcgag

SEQ ID NO: 56231 - protein, 157 aa, Glycine max
  peptide (1)..(157): Ceres Seq. ID no. 12610254
MEFQSLSGFYLLLSLTILFLAPFHAQAKIKVTYCDKKADYPVKVSGVEISPDPVESGKPATFKISATSSKAIYGGEVVIGVSYVGVPVHTERIDLCHEVSCPVANGNFLISHTQTLPSITPPGPYSLKMTLKNDRDEVLTCIKFNFKIVFGSFVSDM

SEQ ID NO: 56232 - DNA, 615 bp, Glycine max
  misc_feature (1)..(615): Ceres Seq. ID no. 13639061
gtctgacagcgctggccgatcaagctcgctcgctcgcaccgacgacgacgactaggaagaagaggaacggccgatggagcacggcgaggggaggcacgaggcggcgctgagggcggtgcagagggcgccggccaagccgtggcgcggcgccggcgccccgccgccgcccagggtgtaccgggtggagccccgggacttccgggagctcgtgcagaggctcaccggcgccggcacggccacgaccggctcgccggccgtgggagcgaggaaggcgccgggtcatgcggccgcggcgcacgggcgcagggaggccgcccccgtggagcagttcgactactcgtcgtggttctccgcgccgctgctcagccccgcgtccatgccggccggcatggacgcccaccatggcgctctgcggtaggagagttgtggtacggtcgccgctcgccgccactcggcacttgtaaaatcgagctacatgccacagttccatcgcttcttccctcctcgttatttcctttcgagggatgatgacacatgacagtgctttcgctcgtgtacgtaattgagtatagttctttttatgaatataataaatgaattattagtttgctctgc

SEQ ID NO: 56233 - protein, 114 aa, Glycine max
  peptide (1)..(114): Ceres Seq. ID no. 13639062
MEHGEGRHEAALRAVQRAPAKPWRGAGAPPPPRVYRVEPRDFRELVQRLTGAGTATTGSPAVGARKAPGHAAAAHGRREAAPVEQFDYSSWFSAPLLSPASMPAGMDAHHGALR

SEQ ID NO: 56234 - protein, 60 aa, Glycine max
  peptide (1)..(60): Ceres Seq. ID no. 13639063
MRPRRTGAGRPPPWSSSTTRRGSPRRCSAPRPCRPAWTPTMALCGRRVVVRSPLAATRHL

SEQ ID NO: 56235 - DNA, 766 bp, Glycine max
  misc_feature (1)..(766): Ceres Seq. ID no. 12610334
gtttttcctatcctctccctcttcttcatctctcgtatacaatcaaaaccaacacatacagagagacacgaaccaaagagtgcaaaatggcagcgacgtctctctccatcgcaaccacattccgctcctcgtcttacctcactcacgcttctccccatggcttcttcccttcccgacccaacacaacattccgcatctgttcaccttcctccacaccgacccaccgtgcaacccacctccgtcccgtctccgccgtcgaagctccggagaagatcgagaagattgggtccgagatctcttctctgactctcgaggaagcccgcgtcctcgtggactaccttcaggacaagttcggtgtgtcgccgctctcgttagctcccgctgcggcggctgtggctgctccgggagacggtggcggtgcggcggctgcggtggaggagcagacggagttcgacgtggtgattaacgaagtgccgagcagtgcgcgtatcgcggtgattaaagcggtgagggctttgactagcttggcgttgaaggaagcgaaggagcttatcgaagggttgccgaagaagtttaaggaaggtgtgacgaaggatgaagctgaagaagctaagaagcagcttgaagaagctggcgctaaggtctcgattgcttaaagaatgtgtgggtctttttttgctgtgttgttagtatagttggcgaatgagaattgttgattaaatttttgaaaaaaaaaaaaaaaaaagcttatcgataccgtcgacct

SEQ ID NO: 56236 - protein, 217 aa, Glycine max
  peptide (1)..(217): Ceres Seq. ID no. 12610335
FSYPLPLLHLSYTIKTNTYRETRTKECKMAATSLSIATTFRSSSYLTHASPHGFFPSRPNTTFRICSPSSTPTHRATHLRPVSAVEAPEKIEKIGSEISSLTLEEARVLVDYLQDKFGVSPLSLAPAAAAVAAPGDGGGAAAAVEEQTEFDVVINEVPSSARIAVIKAVRALTSLALKEAKELIEGLPKKFKEGVTKDEAEEAKKQLEEAGAKVSIA

SEQ ID NO: 56237 - protein, 189 aa, Glycine max
  peptide (1)..(189): Ceres Seq. ID no. 12610336
MAATSLSIATTFRSSSYLTHASPHGFFPSRPNTTFRICSPSSTPTHRATHLRPVSAVEAPEKIEKIGSEISSLTLEEARVLVDYLQDKFGVSPLSLAPAAAAVAAPGDGGGAAAAVEEQTEFDVVINEVPSSARIAVIKAVRALTSLALKEAKELIEGLPKKFKEGVTKDEAEEAKKQLEEAGAKVSIA

SEQ ID NO: 56238 - protein, 154 aa, Glycine max
  peptide (1)..(154): Ceres Seq. ID no. 12610337
FFLSSPSSSSLVYNQNQHIQRDTNQRVQNGSDVSLHRNHIPLLVLPHSRFSPWLLPFPTQHNIPHLFTFLHTDPPCNPPPSRLRRRSSGEDREDWVRDLFSDSRGSPRPRGLPSGQVRCVAALVSSRCGGCGCSGRRWRCGGCGGGADGVRRGD

SEQ ID NO: 56239 - DNA, 1087 bp, Glycine max
  misc_feature (1)..(1087): Ceres Seq. ID no. 13595050
accagctccatcgcaagggacaatactaccactctagccacttactactggagctagcaggcgccaccccacccaccaaccaacgacaacgagcgcgccgcgagcgcacgccggagcaagcatgtcgatgtcggtgtccatgtccgggaaggcgagcgacccgggttccgcctggttcggcggcggcagcaggagcccgcaaccggggccgacgcacaacgtgcggctcatcgccatggccgttgccgcgttcgtctccgtgctcggcctctccctgctcctgcacctctacatctgccgcgtccgccgcaggaaccgcaggcaggcggaggcagccgcggcggctctggaggccggctcggcggcccccaagccggccaaggttggcctggacccgtccgccatcgcggcgctgccgacagcggcgtacaaggagacgggcgagccgggcagcggcgcaagcgagtgcaccatctgcctcggcgccatgcaggagggcgaggcggtgcgcgtgctgccggcctgcgcccacgtgttccacgtcccctgcgtcgacacgtggctcgcgtccagctcgtcgtgcccggtctgccgcgccctggtggagccgccgccgtcgccggccgcgccagcgtgggtgcaggagaagcagggcctggagaaggagtgtggtgcaagtgggagctcggcgccgccatgtgggctgggggcgtcgctgatgaggatgctgagcagggagaggccgctggcgcggaggccgacgcagggtgaccacgcgcacccgatggaaatgcatgtcgaggacttggaaagccagcagccccagctgcaacactctgtggatagcaattagtctacttttctgttcttcttttttgggttttcgccattcgccgctgctcgattgcaaatcttgcatttgggtggccgattcagaggtgtgaaatacggaaatacacccctgaaagtgtcctatgttttaattaggcactggcgcttgtggatgtgcttggagctcacccatatctctcgtatttgtgcaaacaagggatcatggatatataaatagagctccgttttctcttcc

SEQ ID NO: 56240 - protein, 243 aa, Glycine max
  peptide (1)..(243): Ceres Seq. ID no. 13595051
MSMSVSMSGKASDPGSAWFGGGSRSPQPGPTHNVRLIAMAVAAFVSVLGLSLLLHLYICRVRRRNRRQAEAAAAALEAGSAAPKPAKVGLDPSAIAALPTAAYKETGEPGSGASECTICLGAMQEGEAVRVLPACAHVFHVPCVDTWLASSSSCPVCRALVEPPPSPAAPAWVQEKQGLEKECGASGSSAPPCGLGASLMRMLSRERPLARRPTQGDHAHPMEMHVEDLESQQPQLQHSVDSN

SEQ ID NO: 56241 - protein, 241 aa, Glycine max
  peptide (1)..(241): Ceres Seq. ID no. 13595052
MSVSMSGKASDPGSAWFGGGSRSPQPGPTHNVRLIAMAVAAFVSVLGLSLLLHLYICRVRRRNRRQAEAAAAALEAGSAAPKPAKVGLDPSAIAALPTAAYKETGEPGSGASECTICLGAMQEGEAVRVLPACAHVFHVPCVDTWLASSSSCPVCRALVEPPPSPAAPAWVQEKQGLEKECGASGSSAPPCGLGASLMRMLSRERPLARRPTQGDHAHPMEMHVEDLESQQPQLQHSVDSN

SEQ ID NO: 56242 - protein, 238 aa, Glycine max
  peptide (1)..(238): Ceres Seq. ID no. 13595053
QLHRKGQYYHSSHLLLELAGATPPTNQRQRARRERTPEQACRCRCPCPGRRATRVPPGSAAAAGARNRGRRTTCGSSPWPLPRSSPCSASPCSCTSTSAASAAGTAGRRRQPRRLWRPARRPPSRPRLAWTRPPSRRCRQRRTRRRASRAAAQASAPSASAPCRRARRCACCRPAPTCSTSPASTRGSRPARRARSAAPWWSRRRRRPRQRGCRRSRAWRRSVVQVGARRRHVGWGRR

SEQ ID NO: 56243 - DNA, 782 bp, Glycine max
  misc_feature (1)..(782): Ceres Seq. ID no. 12611019
aacaaacccctcacccctcgcccccgccgcccccgcccccgccgccaaacacccatcgccatgcggccaccgagaggcggcggaggtttccgcggacgcggcggcgaccgaggtggccgcttcggtggaggcggccgcggcggcggcggtaggggccgcttcggtggaggcggcggcgggttccgcgacgagggccctccagccgaggtcgtcgaggtgtcgacgttcctgcacgcctgcgagggggacgcggtaacgaagctgacgaacgagaaagtgccctacttcaacgcgcccatatacctccagaacaagacccagatcggcaaagtcgacgagatcttcggccccatcaacgaatcatatttctcggtcaagatgttcgagggagtcattgcaacatcttacaacgaaggtgacaagttcttcattgaccccatgaagctgctgcccctctcacgcttcctgccgcagccaaagggctcgactccaagaggtggtggtcgcggtggaagaggtggtggtcgcggtggaagaggtggccgtggtggattccgtggaagaggtgcaccaaggggtcgtggacctcccaggggtggagggcgtggtttcagaggacgaggcagattctaggatgtagttttaagtttgctgattgttgaaacatgatgctctacattatctgttcagctggaaacattatgctaagtcagctgcaagcgcactttgtgtggaagttgattcaatatttgtatgaatgaaatgttgtcaagtgttgagtt

SEQ ID NO: 56244 - protein, 210 aa, Glycine max
  peptide (1)..(210): Ceres Seq. ID no. 12611020
NKPLTPRPRRPRPRRQTPIAMRPPRGGGGFRGRGGDRGGRFGGGGRGGGGRGRFGGGGGGFRDEGPPAEVVEVSTFLHACEGDAVTKLTNEKVPYFNAPIYLQNKTQIGKVDEIFGPINESYFSVKMFEGVIATSYNEGDKFFIDPMKLLPLSRFLPQPKGSTPRGGGRGGRGGGRGGRGGRGGFRGRGAPRGRGPPRGGGRGFRGRGRF

SEQ ID NO: 56245 - protein, 190 aa, Glycine max
  peptide (1)..(190): Ceres Seq. ID no. 12611021
MRPPRGGGGFRGRGGDRGGRFGGGGRGGGGRGRFGGGGGGFRDEGPPAEVVEVSTFLHACEGDAVTKLTNEKVPYFNAPIYLQNKTQIGKVDEIFGPINESYFSVKMFEGVIATSYNEGDKFFIDPMKLLPLSRFLPQPKGSTPRGGGRGGRGGGRGGRGGRGGFRGRGAPRGRGPPRGGGRGFRGRGRF

SEQ ID NO: 56246 - DNA, 852 bp, Glycine max
  misc_feature (1)..(852): Ceres Seq. ID no. 12610648
tcccacaacaccccacccgcccctctccccctccccaatctccgacccgaaccccagcggcggagccgacgaagaggaggagaccaaggctcgacggacaaggggaagacctccgctccctcggcgatcgcgacaccaccctcctcatcaagatggtgctgatgcaggcagatccgttcctgagcgagctgaccaacatgtacgagcggagcacggagaagggctccgtgtgggtcaccatgaagcgatcgtcgatgaagtgtcaggctaggttgaagaagatggcgagtaagggggagcctgttgagtaccggtgcctggtccgcgccactgatggcaagaggaacatctccacctcgctgtctgcaaaggagtatctgaaattccaagcttcatatgccctggtccttaaagcccatatgcacgctttgaagaagagggagaggaaggacaggaagaagacggtcgaggcagagaagatacccgagaaggaaccgaagaagcagaagaaatcatcttcgaaaaaatccgcagggtctaagtagtgaggtacttgcagaatttgactgagacctttttcgcccacatgtgcggtcaagacgttgtcacccgttttacccttaattcatgtccgcgagatgaagcctgtgaatacctatatagagacgcctcgtcgcctggcatttttgaagctgcgttttgttctggttgtaagcctccctggatggcatgggcatgctttcttgaactgctagatctgaccaccaaagtcttagttcaggttggaatggttcgccggtttgatggttttatgcctatggtatgaatgaagaatctgtagcttggttgttg

SEQ ID NO: 56247 - protein, 180 aa, Glycine max
  peptide (1)..(180): Ceres Seq. ID no. 12610649
PQHPTRPSPPPQSPTRTPAAEPTKRRRPRLDGQGEDLRSLGDRDTTLLIKMVLMQADPFLSELTNMYERSTEKGSVWVTMKRSSMKCQARLKKMASKGEPVEYRCLVRATDGKRNISTSLSAKEYLKFQASYALVLKAHMHALKKRERKDRKKTVEAEKIPEKEPKKQKKSSSKKSAGSK

SEQ ID NO: 56248 - protein, 130 aa, Glycine max
  peptide (1)..(130): Ceres Seq. ID no. 12610650
MVLMQADPFLSELTNMYERSTEKGSVWVTMKRSSMKCQARLKKMASKGEPVEYRCLVRATDGKRNISTSLSAKEYLKFQASYALVLKAHMHALKKRERKDRKKTVEAEKIPEKEPKKQKKSSSKKSAGSK

SEQ ID NO: 56249 - protein, 127 aa, Glycine max
  peptide (1)..(127): Ceres Seq. ID no. 12610651
MQADPFLSELTNMYERSTEKGSVWVTMKRSSMKCQARLKKMASKGEPVEYRCLVRATDGKRNISTSLSAKEYLKFQASYALVLKAHMHALKKRERKDRKKTVEAEKIPEKEPKKQKKSSSKKSAGSK

SEQ ID NO: 56250 - DNA, 975 bp, Glycine max
  misc_feature (1)..(975): Ceres Seq. ID no. 13595166
agaacatcctaatcgaataattttcccttgttcgagttttctcaggaaagctagtagagagagatactggttttgattcatacgatggctgccacagctattctccgatcgatccgccgacgcgacgtcgtctctgcgcctctttccgtctacaaatctcttgctggtaatgctcaaccttcattgggttcgtacactggtcagaactatgcaagtttgtgtagagctttcggatcgagagccggtgtgaatgaaaatgttgggactggttttggaactagcaacataagcaatgccgttagagaggagagagagcattcaaaagctactgtgaatgctatgggagctcatctgagagctcttggtgtgggaacaccaagacgtgtgttgtctacaatcgccgagggtatcaagatgacagaggaggaccagacttctccaaaaccccaaagctttcgccctctatctcctcacctcacggtttaccagcctcagaagaactcaatgttatccattttcaacagaatctcggggatttacttgaccggagtcttttatggcggctatcttctctacctgaagatgggtatgatctgcctcacttacccggctttctaccaagttcattaccatgtacagcagcaacttccggttatcacctcggttactgcattggccgcgctttaccatactatcaagagtattcactcgctcttgacccattgaagcaacatttcccctaagctcttttcgttgtttggttaagccaccagagtctccagtaagagtttccttgagatgcacaagatttaataaaagagagttagaaacgtttgttaaactctcattgtcttttgagaaagcaagtgtctagcttttgttttgggattttaggctttgaaaacttatgtttgttggctttttctttgttctaagaccttattgatggggttggaatgtaataaaatgtttacc

SEQ ID NO: 56251 - protein, 213 aa, Glycine max
  peptide (1)..(213): Ceres Seq. ID no. 15221501
MAATAILRSIRRRDVVSAPLSVYKSLAGNAQPSLGSYTGQNYASLCRAFGSRAGVNENVGTGFGTSNISNAVREEREHSKATVNAMGAHLRALGVGTPRRVLSTIAEGIKMTEEDQTSPKPQSFRPLSPHLTVYQPQKNSMLSIFNRISGIYLTGVFYGGYLLYLKMGMICLTYPAFYQVHYHVQQQLPVITSVTALAALYHTIKSIHSLLTH

SEQ ID NO: 56252 - protein, 128 aa, Glycine max
  peptide (1)..(128): Ceres Seq. ID no. 15221502
MGAHLRALGVGTPRRVLSTIAEGIKMTEEDQTSPKPQSFRPLSPHLTVYQPQKNSMLSIFNRISGIYLTGVFYGGYLLYLKMGMICLTYPAFYQVHYHVQQQLPVITSVTALAALYHTIKSIHSLLTH

SEQ ID NO: 56253 - DNA, 815 bp, Glycine max
  misc_feature (1)..(815): Ceres Seq. ID no. 13595054
aacacaacttactcatcctcatcaagcagcacagcyccmstmctagtaagtagcmgcacttyatyrtgtttaacartgatctagctaagagacacacacagtgcacgtgaaatggctcggctggtcggtgccgccggcgcgtgcgcgctcctcgtcatcctgctcatggcgtgcgcggcgtccgcagcgcgcagcgagccaggcgccgcgcggcagctgtgggacgacgggaggaaggtggggggacggacggaggtgacggacgtggagggcgacagggaggtgcaggagctggggcgatactccgtcgaagagcacaaccggcgccgggaggagggctgcgagggcggcggcggtgtctgcggccggctggagttcgcccgcgtggtgtcggcgcagcgccaggtggtctccggaatcaagtactacctccgcgtcgcggccgccgaggaaggtggcgcggggagcaacggcgtcaccgacggccgcgtgttcgacgccgtggtggtcgtgaagccctggctccagtcccgcgctctgatcaggttcgcgtcggccgacgccaaatgagcagctgcatgcgcgatccgacgagaaccgctgcgtgtcttctttgcgcgccagagtacgtaatgtaagctcgaataacggagtgtgaggtaccgaggtagggttgagcgccagagtatggagaatgtatgtacgatgcggcggtcgaagttttgtgaggtctcccggataaaaagttttgcaagaagagatgagagtgtcgaaataaatactaactagtatgacaagactgttttttcccctgt

SEQ ID NO: 56254 - protein, 152 aa, Glycine max
  peptide (1)..(152): Ceres Seq. ID no. 15221466
MARLVGAAGACALLVILLMACAASAARSEPGAARQLWDDGRKVGGRTEVTDVEGDREVQELGRYSVEEHNRRREEGCEGGGGVCGRLEFARVVSAQRQVVSGIKYYLRVAAAEEGGAGSNGVTDGRVFDAVVVVKPWLQSRALIRFASADAK

SEQ ID NO: 56255 - protein, 134 aa, Glycine max
  peptide (1)..(134): Ceres Seq. ID no. 15221467
MACAASAARSEPGAARQLWDDGRKVGGRTEVTDVEGDREVQELGRYSVEEHNRRREEGCEGGGGVCGRLEFARVVSAQRQVVSGIKYYLRVAAAEEGGAGSNGVTDGRVFDAVVVVKPWLQSRALIRFASADAK

SEQ ID NO: 56256 - DNA, 1358 bp, Glycine max
  misc_feature (1)..(1358): Ceres Seq. ID no. 15177012
accaatcccctccccgacctcgtgggttgcagaacccagccccagccccattcacaccctcccgtcttccttcctcctcccgcaccataccatcaaggtgcttgtctgcttggggccttgagggacataggaagaaagaggggaggacatggatcggtacgaggtggtgagggacatcgggtccggcaacttcggggtggccaagctggtgcgggacgtccggaccaaggagcacttcgccgtcaagttcatcgagcgaggccacaagattgatgaacatgttcaaagggagattatgaaccaccggtcactcaagcatccaaatattattcgattcaaggaggtcgtgctaactcccacacatttggcaatagttatggaatatgcctctggcggcgagctatttcaaaggatttgcaacgcagggagatttagcgaggatgagggaagattcttcttccaacaattgatttctggagtgagctattgtcactctatgcaagtatgtcatagagatttgaaactagaaaacactctcttggatggtagtgtcgcacctcggctcaagatttgtgacttcggttactccaagtcttctgtcttgcactctcaaccgaagtcaactgtcggcacaccggcatacatcgccccagaggtcctctctagaagagaatatgatggaaaggtcgccgatgtttggtcatgcggagtaacgctctatgtgatgcttgtcggggcatatcctttcgaggaccctgatgagccaaggaacttccgcaaaacgatcactaggatactcagcgtacagtactctgttccggactacgttcgagtctcgatggactgcatacatctactgtcccgcattttcgttggaaatcctcagcagcgaataaccatcccggagatcaagaaccatccatggttcctcaagagattgcccgttgagatgaccgatgagtaccaaaggagcatgcagctggcagacatgaacacgccgtcacagagcctggaagaagccatggcgatcatccaggaggcgcagaaacctggcgataacgccctaggggttgccgggcaggttgcctgcctggggagcatggatttggacgacatcgatttcgatatcgacgacattgacgttgagagcagcggggatttcgtgtgcccgttgtgattgctcatgagtggttcaaaagttctcttgatggtttgcctgtggatggatccctgttttgtcatgcttccactagattttgttctgggtcacaaattctctgtagcctacagattggcttgatgtgtaaacagtgtaagataagtttacatgcttatatcgaaatcagtagttttaccct

SEQ ID NO: 56257 - protein, 342 aa, Glycine max
  peptide (1)..(342): Ceres Seq. ID no. 15177013
MDRYEVVRDIGSGNFGVAKLVRDVRTKEHFAVKFIERGHKIDEHVQREIMNHRSLKHPNIIRFKEVVLTPTHLAIVMEYASGGELFQRICNAGRFSEDEGRFFFQQLISGVSYCHSMQVCHRDLKLENTLLDGSVAPRLKICDFGYSKSSVLHSQPKSTVGTPAYIAPEVLSRREYDGKVADVWSCGVTLYVMLVGAYPFEDPDEPRNFRKTITRILSVQYSVPDYVRVSMDCIHLLSRIFVGNPQQRITIPEIKNHPWFLKRLPVEMTDEYQRSMQLADMNTPSQSLEEAMAIIQEAQKPGDNALGVAGQVACLGSMDLDDIDFDIDDIDVESSGDFVCPL

SEQ ID NO: 56258 - protein, 293 aa, Glycine max
  peptide (1)..(293): Ceres Seq. ID no. 15177014
MNHRSLKHPNIIRFKEVVLTPTHLAIVMEYASGGELFQRICNAGRFSEDEGRFFFQQLISGVSYCHSMQVCHRDLKLENTLLDGSVAPRLKICDFGYSKSSVLHSQPKSTVGTPAYIAPEVLSRREYDGKVADVWSCGVTLYVMLVGAYPFEDPDEPRNFRKTITRILSVQYSVPDYVRVSMDCIHLLSRIFVGNPQQRITIPEIKNHPWFLKRLPVEMTDEYQRSMQLADMNTPSQSLEEAMAIIQEAQKPGDNALGVAGQVACLGSMDLDDIDFDIDDIDVESSGDFVCPL

SEQ ID NO: 56259 - protein, 266 aa, Glycine max
  peptide (1)..(266): Ceres Seq. ID no. 15177015
MEYASGGELFQRICNAGRFSEDEGRFFFQQLISGVSYCHSMQVCHRDLKLENTLLDGSVAPRLKICDFGYSKSSVLHSQPKSTVGTPAYIAPEVLSRREYDGKVADVWSCGVTLYVMLVGAYPFEDPDEPRNFRKTITRILSVQYSVPDYVRVSMDCIHLLSRIFVGNPQQRITIPEIKNHPWFLKRLPVEMTDEYQRSMQLADMNTPSQSLEEAMAIIQEAQKPGDNALGVAGQVACLGSMDLDDIDFDIDDIDVESSGDFVCPL

SEQ ID NO: 56260 - DNA, 1232 bp, Glycine max
  misc_feature (1)..(1232): Ceres Seq. ID no. 13595321
gaaaaactccttcgttttcgtcgtctttagtaattttcactaccttcttctttacctcaccttctccatgatcctctccgtcatccgcaaatcatgactctcactcctcctccctcgcagcaaacacctaactcacctcatcgccgagtcctcatcgtcggaaactactgccacgacgttctaatccaaaacggcaccgtcgtggccgaaaccctcggcggcgccgcctccttcatctccaacgtcctagattcctcctccgtctcctgcgacctaatctccaaagtcggccgcgacttcaaatacgacgtcgcccaccctccgatcgtggctccggagaaggagaccacggtcttcaaagcctatttcgatctcgcagccgatcgggtcctgaaacgcgtcgctgcatgcgacccgatcctcccgtcggacatccccgactcgaggttcgacatcgggatggccgtcggcgtcggcggggagattctccccgagacgctcgagaagatggtggagatctgcgacgtggtggctgtggacatacaagctctgattagaggtttcgatcctgtcgacggagccgtgaagcttgttgatttgaaggagagtgggtttcgtcacctcatgggtaagkwkatygggttcttgaaagcyymtaagatcgggttctkgaaagcttcgtcggacgaagctttgttcatggatgttgaagagatgaggcgtttgtgctgtgtggtggtgactagtggtgaaaaagggtgcaggatttatgacaaggatgatgagacggtggttcctccgttcgtggcgaagcaggtggatcctacgggcgctggagatagttttcttggaggtttggtggttggtcttgtggagggtttggatgttcctgatgctgctttgttggggaacctctttggttccgtcactgttgagcacattggtcagcctaagttcgatttgacgatgcttcagagagtaaaggatgaggtacagaggaggaagaagcaatgtaatctctcaagtagccacaacaatgatcatgacgagttccatgcgcgtctaagtccagctcggtttcaggagtctccacttcaaccaaagatattggtcaatggtcacttgtgtgaccggtcatgattggttcctgcaaatacgaatcttttaatcactaacaacgctcttctgaattgtgtaaactttctacgtttatgaattttggaaatttatct

SEQ ID NO: 56261 - protein, 348 aa, Glycine max
  peptide (1)..(348): Ceres Seq. ID no. 15221542
  misc_feature (181)..(181): Xaa is any aa, unknown or other
  misc_feature (182)..(182): Xaa is any aa, unknown or other
  misc_feature (187)..(187): Xaa is any aa, unknown or other
  misc_feature (188)..(188): Xaa is any aa, unknown or other
  misc_feature (193)..(193): Xaa is any aa, unknown or other
MTLTPPPSQQTPNSPHRRVLIVGNYCHDVLIQNGTVVAETLGGAASFISNVLDSSSVSCDLISKVGRDFKYDVAHPPIVAPEKETTVFKAYFDLAADRVLKRVAACDPILPSDIPDSRFDIGMAVGVGGEILPETLEKMVEICDVVAVDIQALIRGFDPVDGAVKLVDLKESGFRHLMGKXXGFLKXXKIGFXKASSDEALFMDVEEMRRLCCVVVTSGEKGCRIYDKDDETVVPPFVAKQVDPTGAGDSFLGGLVVGLVEGLDVPDAALLGNLFGSVTVEHIGQPKFDLTMLQRVKDEVQRRKKQCNLSSSHNNDHDEFHARLSPARFQESPLQPKILVNGHLCDRS

SEQ ID NO: 56262 - protein, 226 aa, Glycine max
  peptide (1)..(226): Ceres Seq. ID no. 15221543
  misc_feature (59)..(59): Xaa is any aa, unknown or other
  misc_feature (60)..(60): Xaa is any aa, unknown or other
  misc_feature (65)..(65): Xaa is any aa, unknown or other
  misc_feature (66)..(66): Xaa is any aa, unknown or other
  misc_feature (71)..(71): Xaa is any aa, unknown or other
MAVGVGGEILPETLEKMVEICDVVAVDIQALIRGFDPVDGAVKLVDLKESGFRHLMGKXXGFLKXXKIGFXKASSDEALFMDVEEMRRLCCVVVTSGEKGCRIYDKDDETVVPPFVAKQVDPTGAGDSFLGGLVVGLVEGLDVPDAALLGNLFGSVTVEHIGQPKFDLTMLQRVKDEVQRRKKQCNLSSSHNNDHDEFHARLSPARFQESPLQPKILVNGHLCDRS

SEQ ID NO: 56263 - protein, 210 aa, Glycine max
  peptide (1)..(210): Ceres Seq. ID no. 15221544
  misc_feature (43)..(43): Xaa is any aa, unknown or other
  misc_feature (44)..(44): Xaa is any aa, unknown or other
  misc_feature (49)..(49): Xaa is any aa, unknown or other
  misc_feature (50)..(50): Xaa is any aa, unknown or other
  misc_feature (55)..(55): Xaa is any aa, unknown or other
MVEICDVVAVDIQALIRGFDPVDGAVKLVDLKESGFRHLMGKXXGFLKXXKIGFXKASSDEALFMDVEEMRRLCCVVVTSGEKGCRIYDKDDETVVPPFVAKQVDPTGAGDSFLGGLVVGLVEGLDVPDAALLGNLFGSVTVEHIGQPKFDLTMLQRVKDEVQRRKKQCNLSSSHNNDHDEFHARLSPARFQESPLQPKILVNGHLCDRS

SEQ ID NO: 56264 - DNA, 1055 bp, Glycine max
  misc_feature (1)..(1055): Ceres Seq. ID no. 14302705
ctgcagcagagccctcgccgccgccgccgcccgcgcggagctagaagcgggagtggagggggcaaaacagtcccaccatggagtacgtcaaccctctcacgggcttccgcgtcgacggccgccgccccaacgagatgcggcagctcaagggcgaggtcggcgtcgtctccagggccgacggctcggcgctcttcgagatgggcaacaccagggtcatcgccgctgtctacgggccccgagagatccaaaacaggagtcagcaacaaaacagtaaagaggctttggtgcgttgtgagtatagaatggcagaatttagcactggggatcgaaggagaaagccaaaaggtgacaggcgatcaacagaaatttctcttgttattcgacaaacaatggaggcaagcatattaacacatttaatgccacactcacagattgacatatttgtccaagttcttcaagctgatggtggaaccaggtctgcatgcatcaatgctgcaactctagcacttgcagatgctgggattccaatgcgagacatagtcacttcttgcagtgctgggtatctgtgttctactcctttgcttgatctgaattatatagaagacagcgctggaggcgcggatgtcactgttggcattcttgcaaagatggacaaagtgactcttctgcagatggacgcgaaactaccaatggatacatttgagactgtgatggaccttgcaactgaagggtgcaaagccatcgcaacctacatccgagaggtgctattggagaacacgaagcagctggagtgtcagcgaggctagttaaacctagcaggtggaggctattgaacgagagcctgtggcacttgaaggcgggtctgttgtgtaacgctgattgatggcttatctgcctagcagagctagcattgagagaaaaaaatgacactgaacctgtcaaagatagctggaccatcattttccctcctaacgtacatgctgtagcgcgcaggagatgacatcttgattatgtaaaactttgatgttgaacttggtatccatgttgtacttttg

SEQ ID NO: 56265 - protein, 242 aa, Glycine max
  peptide (1)..(242): Ceres Seq. ID no. 14302706
MEYVNPLTGFRVDGRRPNEMRQLKGEVGVVSRADGSALFEMGNTRVIAAVYGPREIQNRSQQQNSKEALVRCEYRMAEFSTGDRRRKPKGDRRSTEISLVIRQTMEASILTHLMPHSQIDIFVQVLQADGGTRSACINAATLALADAGIPMRDIVTSCSAGYLCSTPLLDLNYIEDSAGGADVTVGILAKMDKVTLLQMDAKLPMDTFETVMDLATEGCKAIATYIREVLLENTKQLECQRG

SEQ ID NO: 56266 - protein, 223 aa, Glycine max
  peptide (1)..(223): Ceres Seq. ID no. 14302707
MRQLKGEVGVVSRADGSALFEMGNTRVIAAVYGPREIQNRSQQQNSKEALVRCEYRMAEFSTGDRRRKPKGDRRSTEISLVIRQTMEASILTHLMPHSQIDIFVQVLQADGGTRSACINAATLALADAGIPMRDIVTSCSAGYLCSTPLLDLNYIEDSAGGADVTVGILAKMDKVTLLQMDAKLPMDTFETVMDLATEGCKAIATYIREVLLENTKQLECQRG

SEQ ID NO: 56267 - protein, 202 aa, Glycine max
  peptide (1)..(202): Ceres Seq. ID no. 14302708
MGNTRVIAAVYGPREIQNRSQQQNSKEALVRCEYRMAEFSTGDRRRKPKGDRRSTEISLVIRQTMEASILTHLMPHSQIDIFVQVLQADGGTRSACINAATLALADAGIPMRDIVTSCSAGYLCSTPLLDLNYIEDSAGGADVTVGILAKMDKVTLLQMDAKLPMDTFETVMDLATEGCKAIATYIREVLLENTKQLECQRG

SEQ ID NO: 56268 - DNA, 839 bp, Glycine max
  misc_feature (1)..(839): Ceres Seq. ID no. 12610734
agaggaacaaatcgcagttacacactgaaaacgaacacagaatcccccaaaagaagccacctttagggttttcgtctccaaatcaattcgtgattcgctttcgaatcgattcgtcacgaatccaatcctctggtttcctttattttctccagttttcgatttcaatctctttgccgtgagaaacgatgggaagaggcaagttcaaggggaaacctactggccagcgccgattctcaagtgcagctgatattcttgctggaacttctgctgcgcgtcctcggtcattcaagcagaaggaagctgagtacgaagaagatgttgaagaggagtctgaagaggaatctgaagaggaatccgaagatgaatctgacgtgaagaagaaaggacatgaagctcttattgaagttgataaccctaacagagccaaaccaacgactttaaaagctagagaccttgatgctagtaaaaccactgaactctcaaggcgtgaaagggaggagctagagaagcagcgagctcatgagcgatacatgaggttgcaggagcaaggcaaaaccgaacaagcaagaaaggatttggatcgtctggctctgattcgccaacagagagaagaagcggccaagaagcgagaagaggaaaaagcagcgaaagacgccaagaaagtagatgctcgcaaatgagacaagtgttcaccctaaaaaaaataaactacataaaagaagaagaatactcatcgagttttactttgttcttttttcgattggtaaacagatcataaaacattttccgaatacttagtgcccaggggatttctccatcttaatacattggaagttaat

SEQ ID NO: 56269 - protein, 164 aa, Glycine max
  peptide (1)..(164): Ceres Seq. ID no. 12610735
MGRGKFKGKPTGQRRFSSAADILAGTSAARPRSFKQKEAEYEEDVEEESEEESEEESEDESDVKKKGHEALIEVDNPNRAKPTTLKARDLDASKTTELSRREREELEKQRAHERYMRLQEQGKTEQARKDLDRLALIRQQREEAAKKREEEKAAKDAKKVDARK

SEQ ID NO: 56270 - DNA, 496 bp, Glycine max
  misc_feature (1)..(496): Ceres Seq. ID no. 13582034
aagtctaagtgcatactcccaccaaatacagtagcagcaatggcgccagcgcagcaagtgcaagttccggtgcaagtctcgccacccccgattctcagcgtcctcgagaccactctcgtagcgccctcgcccagcgctggcgccgccccgccggagtcctccctcccgctcaccttcttcgacgtcctctggctcacgtccccgcccgtcgagcgtgttttcttctaccgcctcgccgctgacgccgacgtccccgaaatcctctccaacctcaagacctcactggccaaagctctcagcacctaccacccgctcgctggccgcctccgcctcacgcctgggacggctgaccgctacgagatctactaccagccgggcgacggcgtcaccttcaccgtcgccaagtaccgcgacgacattgacttcgacgagctcgtggttgacaagccgagggaggtcagcaagatcgcgccgctcgcaccgcctcttcccaagg

SEQ ID NO: 56271 - protein, 165 aa, Glycine max
  peptide (1)..(165): Ceres Seq. ID no. 13582035
KSKCILPPNTVAAMAPAQQVQVPVQVSPPPILSVLETTLVAPSPSAGAAPPESSLPLTFFDVLWLTSPPVERVFFYRLAADADVPEILSNLKTSLAKALSTYHPLAGRLRLTPGTADRYEIYYQPGDGVTFTVAKYRDDIDFDELVVDKPREVSKIAPLAPPLPK

SEQ ID NO: 56272 - protein, 152 aa, Glycine max
  peptide (1)..(152): Ceres Seq. ID no. 13582036
MAPAQQVQVPVQVSPPPILSVLETTLVAPSPSAGAAPPESSLPLTFFDVLWLTSPPVERVFFYRLAADADVPEILSNLKTSLAKALSTYHPLAGRLRLTPGTADRYEIYYQPGDGVTFTVAKYRDDIDFDELVVDKPREVSKIAPLAPPLPK

SEQ ID NO: 56273 - DNA, 1191 bp, Glycine max
  misc_feature (1)..(1191): Ceres Seq. ID no. 13595202
actccgcactgttcctcggactctcgtctcgctagttccccaacttccggcgcaagctgaaccctcggacccgaccgcggcagccgccgatccagccccgccgcgatggaattcgccctcgtcgacggcgagaagttctcgccctcctgctccacgctcgtcatgcccgcgctttcgatcggcaacgtggggcagctcgccgtggacctgctgataccgtcggcgaaggcgaggcgcgtggcgtacctcgatgagccctccgtgctgccctgcatcggcaacgacgccttcggaccgggcgctgtcggcgacctcgcgctcgcgctcgaagaatacgagtcaccgtctcacgggctggctttcattcaacaaagatctccagttattacggggatgatggtttcgtttgccaaaaatgttgctaatttcatcagtagcattgagaaggaccatgttgttattctttcaagtttagattctggcaagagaagagtaattgatgcatccagtgatatgctgtattacctttcaagctgcaatgaggatggttctgatccagaatgtgagaaactagggtggaagaaacttgaggaatataatccatctcaacgactgtggaaatgtcttgctagtctaattgagggtggtgttctttcagaagatatggctgatgatcctgaagagatgaccgcaagtgattactatgcgaccttaccatttgcagctctattctttgcctgcaaggccaaaggtttgaaagttagctgtgtattatgttactgttcagaaggggacaatatgccagaatctttccacttagcagaagcagtatgcaaacttcgaggtcaagaccctgaacaattccatggaaatgggtcaaatggatggactattcccttgtcatggaaatcaatttatggaccacctcctgatatgtctattttctagactgactgacctaggaagttgcaatcatggacagcgctgtatctagaatgaggaaggatattagctttaggttgtgtactagaaatccccaggatggtgagtcgccgaccctcttttgaagcaacaacagttttcaacttccgtttagaactggagggatcgtgaacctggaatttatctgccgcggctattcctcatgtctaagtggaatagatttattcgtttttattaaaaaaattcact

SEQ ID NO: 56274 - protein, 280 aa, Glycine max
  peptide (1)..(280): Ceres Seq. ID no. 13595203
MEFALVDGEKFSPSCSTLVMPALSIGNVGQLAVDLLIPSAKARRVAYLDEPSVLPCIGNDAFGPGAVGDLALALEEYESPSHGLAFIQQRSPVITGMMVSFAKNVANFISSIEKDHVVILSSLDSGKRRVIDASSDMLYYLSSCNEDGSDPECEKLGWKKLEEYNPSQRLWKCLASLIEGGVLSEDMADDPEEMTASDYYATLPFAALFFACKAKGLKVSCVLCYCSEGDNMPESFHLAEAVCKLRGQDPEQFHGNGSNGWTIPLSWKSIYGPPPDMSIF

SEQ ID NO: 56275 - protein, 261 aa, Glycine max
  peptide (1)..(261): Ceres Seq. ID no. 13595204
MPALSIGNVGQLAVDLLIPSAKARRVAYLDEPSVLPCIGNDAFGPGAVGDLALALEEYESPSHGLAFIQQRSPVITGMMVSFAKNVANFISSIEKDHVVILSSLDSGKRRVIDASSDMLYYLSSCNEDGSDPECEKLGWKKLEEYNPSQRLWKCLASLIEGGVLSEDMADDPEEMTASDYYATLPFAALFFACKAKGLKVSCVLCYCSEGDNMPESFHLAEAVCKLRGQDPEQFHGNGSNGWTIPLSWKSIYGPPPDMSIF

SEQ ID NO: 56276 - protein, 184 aa, Glycine max
  peptide (1)..(184): Ceres Seq. ID no. 13595205
MMVSFAKNVANFISSIEKDHVVILSSLDSGKRRVIDASSDMLYYLSSCNEDGSDPECEKLGWKKLEEYNPSQRLWKCLASLIEGGVLSEDMADDPEEMTASDYYATLPFAALFFACKAKGLKVSCVLCYCSEGDNMPESFHLAEAVCKLRGQDPEQFHGNGSNGWTIPLSWKSIYGPPPDMSIF

SEQ ID NO: 56277 - DNA, 1565 bp, Glycine max
  misc_feature (1)..(1565): Ceres Seq. ID no. 15175492
gtagcaccgcgattcgccatagccactgcccagcgagcggcccagtggtagctaagctgagcgagtgagtgtgcactgcgtgtgacacgacgaccggttggcccatcactagcgcgctagctagacgtacgcacgcacgtgtctacgctacctatctctctctccgtcgaccgaccatgccggccttcgccgagccagccattgatccgccgctggcggacagctaccgcgcgctgctgcgcagcgaccagctccgccgcggcggcattgcgccggcgccggcgtcggagagcgtggccgtgcttgagcgcgccctgccgatgatcgacttgaagcgcctgacgagcggcgacgcgggggagaggaaggcgtgcgcggacgccatggcgaccgcggcgtcggagtggggcttcttccaggtgatcaaccacgacgtggggcgggagctcctggaggagatgcggcgcgagcaggcgcggctgttccgcctgccgttcgacaccaaggagaaggccgggctcctcaacggctcgtaccggtggggcaacccgacggctacgtcgctccggcacctctcgtggtcggaggccttccacgttccgctcgccagcatctcccgggaggactgcgactacgggaagctcagctccttgaggggcgtgatgcaggaggtggcggacgcgatgtcgcgtgtggcggacacggtggcggcggtgctggcggaggacctcgggcacgatgcggggggcggcgagccggcgttcccggcggggtgcgacgggacgacgtgcttcctgcggctcaacaggtacccggcgtgcccgttcgcgccggacacgttcgggctggtgccgcacacggacagcgacttcctcaccatcctctgccaggaccaggtcgggggcctgcagctcatgaaggactcccgctgggtcgccgtgaaaccccgctccgacgcgctcatcgtcaacatcggcgatctgtttcaggcgtggagcaacaacaggtacaagagcgtggagcacaaagtggtggccaacgccaaggcggagcgcctctccgtcgcctacttcctgtgcccgtcgtacgactcgccggtcggcacatgcggcgagccgtccccgtacaggccgttcaccttcggggagtaccggaggaaggtgcaggacgatgtcaagagaaccggcaaaaagattgggctccccaactttctcaaacagtctcccgttgacgccatgaatcacggcctctgtttttaacacgtactcaaatctcaccgtagaagcgtcgtgcgcccgcagtatggaatcggagataatttcccttttttttagttctttctatttctattctagttttgtttcgccccttttgggcctaggtgataggtactataccacgagataatgatggaggaatcaatggaatatataacatgatgctatggtgatacgtctgcccatctgctcccgtttgtttgttcctcgttccttcttttcgtcttgtcgtgcgtactacgaggaacaaacgtggacggacgagcacctaagcttcaacgttgtttc

SEQ ID NO: 56278 - protein, 360 aa, Glycine max
  peptide (1)..(360): Ceres Seq. ID no. 15175493
MPAFAEPAIDPPLADSYRALLRSDQLRRGGIAPAPASESVAVLERALPMIDLKRLTSGDAGERKACADAMATAASEWGFFQVINHDVGRELLEEMRREQARLFRLPFDTKEKAGLLNGSYRWGNPTATSLRHLSWSEAFHVPLASISREDCDYGKLSSLRGVMQEVADAMSRVADTVAAVLAEDLGHDAGGGEPAFPAGCDGTTCFLRLNRYPACPFAPDTFGLVPHTDSDFLTILCQDQVGGLQLMKDSRWVAVKPRSDALIVNIGDLFQAWSNNRYKSVEHKVVANAKAERLSVAYFLCPSYDSPVGTCGEPSPYRPFTFGEYRRKVQDDVKRTGKKIGLPNFLKQSPVDAMNHGLCF

SEQ ID NO: 56279 - protein, 312 aa, Glycine max
  peptide (1)..(312): Ceres Seq. ID no. 15175494
MIDLKRLTSGDAGERKACADAMATAASEWGFFQVINHDVGRELLEEMRREQARLFRLPFDTKEKAGLLNGSYRWGNPTATSLRHLSWSEAFHVPLASISREDCDYGKLSSLRGVMQEVADAMSRVADTVAAVLAEDLGHDAGGGEPAFPAGCDGTTCFLRLNRYPACPFAPDTFGLVPHTDSDFLTILCQDQVGGLQLMKDSRWVAVKPRSDALIVNIGDLFQAWSNNRYKSVEHKVVANAKAERLSVAYFLCPSYDSPVGTCGEPSPYRPFTFGEYRRKVQDDVKRTGKKIGLPNFLKQSPVDAMNHGLCF

SEQ ID NO: 56280 - protein, 291 aa, Glycine max
  peptide (1)..(291): Ceres Seq. ID no. 15175495
MATAASEWGFFQVINHDVGRELLEEMRREQARLFRLPFDTKEKAGLLNGSYRWGNPTATSLRHLSWSEAFHVPLASISREDCDYGKLSSLRGVMQEVADAMSRVADTVAAVLAEDLGHDAGGGEPAFPAGCDGTTCFLRLNRYPACPFAPDTFGLVPHTDSDFLTILCQDQVGGLQLMKDSRWVAVKPRSDALIVNIGDLFQAWSNNRYKSVEHKVVANAKAERLSVAYFLCPSYDSPVGTCGEPSPYRPFTFGEYRRKVQDDVKRTGKKIGLPNFLKQSPVDAMNHGLCF

SEQ ID NO: 56281 - DNA, 800 bp, Glycine max
  misc_feature (1)..(800): Ceres Seq. ID no. 12610442
atcatatcattgcactaaatctcattcttcatctgcagctatttggattactgatattggtgcattttttttagaaagtgtgtactctttttggtgacattggaagctaactcatagacagaggcaaagatgttgggaattttcaagcagaagttagttaatgcacccaaggagctgaacagtccagcttctttgaattcatgcactaagcctaagctaagtcatgaagtcctgaaggatttcatgtcctgcaattcctccaatgctttctccatgtgctttgggaatgatgctttgctagcctattccccttcaaacaagccctccattcatcataggttgtttagtggtttggataacatatactgtgtcttcctgggtggcctgcacaaccttagcatgctcaacaagcagtatgggctatcaaaaggaacaaatgaggccaggtttatcattgaagcgtatcgaactcttcgcgacaggggtccatatccagttgatcaagtcctcaaagaacttgaaggcagtttcggatttgtgatatatgacaacaaggatggaacagtttttgttgcatctggttctaatggccatattgggctctactggggaattgcagcggatggttcggttacaatttctgaaaatctggagcttataaaagcaagctgtgctaaatcatttgcaccatttcctactggtatgcaaatttgatttctctctacctttgcaaaatcagattttgtaatttaagtttggcaaaattacaattaataaaggattccattgataatgtcgcc

SEQ ID NO: 56282 - protein, 194 aa, Glycine max
  peptide (1)..(194): Ceres Seq. ID no. 12610443
MLGIFKQKLVNAPKELNSPASLNSCTKPKLSHEVLKDFMSCNSSNAFSMCFGNDALLAYSPSNKPSIHHRLFSGLDNIYCVFLGGLHNLSMLNKQYGLSKGTNEARFIIEAYRTLRDRGPYPVDQVLKELEGSFGFVIYDNKDGTVFVASGSNGHIGLYWGIAADGSVTISENLELIKASCAKSFAPFPTGMQI

SEQ ID NO: 56283 - protein, 156 aa, Glycine max
  peptide (1)..(156): Ceres Seq. ID no. 12610444
MSCNSSNAFSMCFGNDALLAYSPSNKPSIHHRLFSGLDNIYCVFLGGLHNLSMLNKQYGLSKGTNEARFIIEAYRTLRDRGPYPVDQVLKELEGSFGFVIYDNKDGTVFVASGSNGHIGLYWGIAADGSVTISENLELIKASCAKSFAPFPTGMQI

SEQ ID NO: 56284 - protein, 146 aa, Glycine max
  peptide (1)..(146): Ceres Seq. ID no. 12610445
MCFGNDALLAYSPSNKPSIHHRLFSGLDNIYCVFLGGLHNLSMLNKQYGLSKGTNEARFIIEAYRTLRDRGPYPVDQVLKELEGSFGFVIYDNKDGTVFVASGSNGHIGLYWGIAADGSVTISENLELIKASCAKSFAPFPTGMQI

SEQ ID NO: 56285 - DNA, 791 bp, Glycine max
  misc_feature (1)..(791): Ceres Seq. ID no. 13595210
attcaccgtttctctctcttccttatcatcaaacttgctctgatctgatcagcgcttttgaaaatgtcggagggatcagaagaaacgaagacaaagatcgattccaccggagagttatcggacgtcgataacgagaactgcagtagcagtggaagtggcggcggcgagacgaagaagacatgcgttgattgcggaacattcaaaactcctctctggcgtggtggccctgccggacctaagtcactgtgcaatgcttgtgggatcaagagcaggaagaagaggcaagcggctctcgggatcaaaccagagaagaagatcagaaaaagcaacagctgtgacagtgatctaagcctcgaagatgatggccgtaacgtcaataacaagatcaagaaaggtgatgatcacaaaacttgcagtagcaagagtggtactagtactagtagcagctgcagcaaaagagtgagtaagtttttggatctgggattggaagtgccggtgatgaagagatcagcggttgagaagaagaggctgtggaagaaacgcggcgacgaagaaagagccgccgtgcttctcatggcgctctcttgcggctctgtttatgcgtaaacgatggagatcaagcttctttgtttggtgtcgttcgagaataattaaagtgaggggttctgattaattatttaattaacttaagacaatagagataactgtgtaatagctagtgatgtcgtggttttttttggcttgttcccactgatgttatgtgttcttttgctaatcaagtttcaattttt

SEQ ID NO: 56286 - protein, 180 aa, Glycine max
  peptide (1)..(180): Ceres Seq. ID no. 13595211
MSEGSEETKTKIDSTGELSDVDNENCSSSGSGGGETKKTCVDCGTFKTPLWRGGPAGPKSLCNACGIKSRKKRQAALGIKPEKKIRKSNSCDSDLSLEDDGRNVNNKIKKGDDHKTCSSKSGTSTSSSCSKRVSKFLDLGLEVPVMKRSAVEKKRLWKKRGDEERAAVLLMALSCGSVYA

SEQ ID NO: 56287 - DNA, 1186 bp, Glycine max
  misc_feature (1)..(1186): Ceres Seq. ID no. 13582624
acactcatctcgtaaacaagcagcttgctagagcgggacaagcttggccatccttaaccttatttcgacatggcgaggtcgcccatggcgatgctcccgttcctggtgctcggggtagcagcactagtcctgtctgccgcgggaatggtggccgcgcagaagtgcggctgccgggcgaacgagtgctgcagccagtacggctactgcggcactaccgacgcctactgtggacaagggtgtcagtctggcccgtgctcggggagcggcggcggcggcgggaccggcgcctccgtggagagcgtcgtcaccgaggcgttcttcaacgggatcaagtcccgggccggcaacgggtgcgccggcaaaagcttttacacgcgccggtcgttcctggccggcgcccgggcgaaccccaacttcgggaaaggccgcacgggcgacgacggtaagagggagatagccgccttcttcgcccacgtcacacacgagaccggacacatgtgctacatcgaggagatcggcggggcgagccagaactactgcgacaggaagtacacgcagtggccgtgcgcctcggggaaggggtactacgggcgcgggccgcttcagctgacgtggaactacaactacggggcggcggggaagagcgtggggttcgacgggctgaacaacccggagaaggtggcgcaggacccggaggtggcgttcaaggcggcgctgtggttctggatgaacaacgtgaagcaggtcctgccgcgggggttcggcgcgacgaccagggcgatcaacagcggcgagtgcaacggcgggaacgcggccgccatgaacgcccgggcgggctactacagggcctactgcaagcagttcggcgtcgacccggggagcagcctcacttgctaggtgcttcgggcgggcctgatcgagatctgcatgcatagaacacgcatggcttatgtagaataaacgttcggcgtgcgcatacgcgtctaaagccgtccaaacaagaaataaagggcgaggatgtggtctagtacgtaccaagatccttgcagcagtactgttcacgagctctactctttttcctcatcaacaaacaaaaagagttatgttcttgtttattactcatgtttagatacatttgtatctagaaaaatctaatacgaataattcaggacggagttaatatttt

SEQ ID NO: 56288 - protein, 275 aa, Glycine max
  peptide (1)..(275): Ceres Seq. ID no. 13582625
MARSPMAMLPFLVLGVAALVLSAAGMVAAQKCGCRANECCSQYGYCGTTDAYCGQGCQSGPCSGSGGGGGTGASVESVVTEAFFNGIKSRAGNGCAGKSFYTRRSFLAGARANPNFGKGRTGDDGKREIAAFFAHVTHETGHMCYIEEIGGASQNYCDRKYTQWPCASGKGYYGRGPLQLTWNYNYGAAGKSVGFDGLNNPEKVAQDPEVAFKAALWFWMNNVKQVLPRGFGATTRAINSGECNGGNAAAMNARAGYYRAYCKQFGVDPGSSLTC

SEQ ID NO: 56289 - protein, 270 aa, Glycine max
  peptide (1)..(270): Ceres Seq. ID no. 13582626
MAMLPFLVLGVAALVLSAAGMVAAQKCGCRANECCSQYGYCGTTDAYCGQGCQSGPCSGSGGGGGTGASVESVVTEAFFNGIKSRAGNGCAGKSFYTRRSFLAGARANPNFGKGRTGDDGKREIAAFFAHVTHETGHMCYIEEIGGASQNYCDRKYTQWPCASGKGYYGRGPLQLTWNYNYGAAGKSVGFDGLNNPEKVAQDPEVAFKAALWFWMNNVKQVLPRGFGATTRAINSGECNGGNAAAMNARAGYYRAYCKQFGVDPGSSLTC

SEQ ID NO: 56290 - protein, 268 aa, Glycine max
  peptide (1)..(268): Ceres Seq. ID no. 13582627
MLPFLVLGVAALVLSAAGMVAAQKCGCRANECCSQYGYCGTTDAYCGQGCQSGPCSGSGGGGGTGASVESVVTEAFFNGIKSRAGNGCAGKSFYTRRSFLAGARANPNFGKGRTGDDGKREIAAFFAHVTHETGHMCYIEEIGGASQNYCDRKYTQWPCASGKGYYGRGPLQLTWNYNYGAAGKSVGFDGLNNPEKVAQDPEVAFKAALWFWMNNVKQVLPRGFGATTRAINSGECNGGNAAAMNARAGYYRAYCKQFGVDPGSSLTC

SEQ ID NO: 56291 - DNA, 588 bp, Glycine max
  misc_feature (1)..(588): Ceres Seq. ID no. 12610503
gaacagctggtcgaagcgagcgcctggtctatcaatggcggaggagaccgagaccgagaagcagctcttctctccgtcggatgtctcgctccacgcatccacgaaggactgctgggtcgtcatccatggcaaggtgtacgatgtgaccaaattcctcgaggaccaccccggcggagaggatgtcctcctccatgcatctgcctctggggatgccacggaggcttttgaagatgtgggccacagcacatcagccatcagcatgatgagcagctacctgattggaagcatcgaggactttgtgcctcccagtgcaacgaaggacgccacagttggtggcagtgatgtgcttccagattccagaacaatgaagaggaacaaaggctctcctgctccaaacacatttctggacttcgtgctccctttatgcatgcttgtcctggcctttgtagcttggtactacctaaccttcgtggccgagagctagtaaattcggagaagattcatatcattgcacatttttacgtcactagtgttgctgcagcgatacatttaaggagcgtaaacttggtcatagaatcatttgctctc

SEQ ID NO: 56292 - protein, 160 aa, Glycine max
  peptide (1)..(160): Ceres Seq. ID no. 12610504
NSWSKRAPGLSMAEETETEKQLFSPSDVSLHASTKDCWVVIHGKVYDVTKFLEDHPGGEDVLLHASASGDATEAFEDVGHSTSAISMMSSYLIGSIEDFVPPSATKDATVGGSDVLPDSRTMKRNKGSPAPNTFLDFVLPLCMLVLAFVAWYYLTFVAES

SEQ ID NO: 56293 - protein, 149 aa, Glycine max
  peptide (1)..(149): Ceres Seq. ID no. 12610505
MAEETETEKQLFSPSDVSLHASTKDCWVVIHGKVYDVTKFLEDHPGGEDVLLHASASGDATEAFEDVGHSTSAISMMSSYLIGSIEDFVPPSATKDATVGGSDVLPDSRTMKRNKGSPAPNTFLDFVLPLCMLVLAFVAWYYLTFVAES

SEQ ID NO: 56294 - DNA, 551 bp, Glycine max
  misc_feature (1)..(551): Ceres Seq. ID no. 12610506
acacccaaagcacaccagcctcctcactcctcacagtcgcagcatcctctcagtcctcaccttcctcccctcgccaccacccccccaaggaaaggaggatgtcttgctgcggcggcaactgcggatgcggcgccggctgcaagtgcggcaacggctgcggcgggtgcaagatgttccccgacgttgaggccaccgccggcgccgccgccatggtcatgcccaccgcctcccacaaggggagctccggcgggttcgagacggccggcggggagaccggcggctgcgactgcaccacctgcaagtgcggcacggcctgcggctgctcctgctgcagctgcaactgagccggcgcccaggaggccggccggcgaggcgagcacgaggatgaggaggacaactggacaagcaaccaccaccaccaccaccaccatcactagccgctgcatgcgcccgcccgcgcgcgcgctgaataaaataaaaccgtcgtgtgttccttaactctgtacctgtacgcccgtgttttccaccagcagtgtccttgctcatcctcc

SEQ ID NO: 56295 - protein, 165 aa, Glycine max
  peptide (1)..(165): Ceres Seq. ID no. 12610507
TPKAHQPPHSSQSQHPLSPHLPPLATTPPRKGGCLAAAATADAAPAASAATAAAGARCSPTLRPPPAPPPWSCPPPPTRGAPAGSRRPAGRPAAATAPPASAARPAAAPAAAATEPAPRRPAGEASTRMRRTTGQATTTTTTTITSRCMRPPARALNKIKPSCVP

SEQ ID NO: 56296 - protein, 113 aa, Glycine max
  peptide (1)..(113): Ceres Seq. ID no. 12610508
TQSTPASSLLTVAASSQSSPSSPRHHPPKERRMSCCGGNCGCGAGCKCGNGCGGCKMFPDVEATAGAAAMVMPTASHKGSSGGFETAGGETGGCDCTTCKCGTACGCSCCSCN

SEQ ID NO: 56297 - DNA, 645 bp, Glycine max
  misc_feature (1)..(645): Ceres Seq. ID no. 12583682
cacaagcaaagcataaacattactgatagttctcatccacaacacaatgatttccaatcccatgttaatgttactagttgtggtactgctggtggttggttttgcaaagtcagatttaagtaaggacagagaagaatgtgcagacaaactaattgacctagctagctgtgttccttacgttggtggtgaagccaaaacccccaccatagattgctgcactggtctcaaagcggttcttgaccggagcaagaaatgcctctgcatcctcatcaaagatcgcgacgaccccaatcttggcatcaagatcaatgctactctcgctattcagctaccctctgcttgccactcacctgctaatattactcagtgtgtagatcttttgcatttagcacctaactctcctgatgctaaggtgtttgagggattccaaaaatctgccaaaacaaacagctccaccccagtttcagtttccagtggtgctgagaagggatcaagctcaagtgctcaggaaaagagtggtgctgtctccacaattacaaaggcgcaccacctgttttactctatcttaccattaccattattatttcttgtttgaaccaccatcaagcttgcttgcttcatctatttctagctattattgtgtgc

SEQ ID NO: 56298 - protein, 182 aa, Glycine max
  peptide (1)..(182): Ceres Seq. ID no. 12583683
MISNPMLMLLVVVLLVVGFAKSDLSKDREECADKLIDLASCVPYVGGEAKTPTIDCCTGLKAVLDRSKKCLCILIKDRDDPNLGIKINATLAIQLPSACHSPANITQCVDLLHLAPNSPDAKVFEGFQKSAKTNSSTPVSVSSGAEKGSSSSAQEKSGAVSTITKAHHLFYSILPLPLLFLV

SEQ ID NO: 56299 - protein, 177 aa, Glycine max
  peptide (1)..(177): Ceres Seq. ID no. 12583684
MLMLLVVVLLVVGFAKSDLSKDREECADKLIDLASCVPYVGGEAKTPTIDCCTGLKAVLDRSKKCLCILIKDRDDPNLGIKINATLAIQLPSACHSPANITQCVDLLHLAPNSPDAKVFEGFQKSAKTNSSTPVSVSSGAEKGSSSSAQEKSGAVSTITKAHHLFYSILPLPLLFLV

SEQ ID NO: 56300 - protein, 175 aa, Glycine max
  peptide (1)..(175): Ceres Seq. ID no. 12583685
MLLVVVLLVVGFAKSDLSKDREECADKLIDLASCVPYVGGEAKTPTIDCCTGLKAVLDRSKKCLCILIKDRDDPNLGIKINATLAIQLPSACHSPANITQCVDLLHLAPNSPDAKVFEGFQKSAKTNSSTPVSVSSGAEKGSSSSAQEKSGAVSTITKAHHLFYSILPLPLLFLV

SEQ ID NO: 56301 - DNA, 894 bp, Glycine max
  misc_feature (1)..(894): Ceres Seq. ID no. 13639712
atcaattttcagtgcgttaaagatattgaaacagagacgattcttgtttgtcaattatctctgtgtttctgtgattcttctgttccattcgattcaaccctgaagccaaagaacaacaaggataagccttttaactagttttgtgcgttggatcatctgtttaagctcggcttaatcttaccttcaacacttcacaaggctgctcttgcgttagactgtgtttgaagaagaaccaaagatgtcatcggatgagaagaaccttatagagatcttggaggaaggccacaaagtcgatatagtcaagtacatcgattacgtcagtgcccctcaagccggcgccatagccacattctctggcactacgagagacatgttcgaaggcaaagcagtcttggagctaaggtacgaagcgtacgtaccaatggccacgcgaaccctcacctccatctgcacatccgctagatcaaactgggacatccacaagatcgctgtcgctcaccgtctagggccagttcccgttggagaaaccagcgtgttcattgcggtttcatctgttcaccgtggggatggtttagacgcttgtaagttcttgatcgatgagctaaaggcaacggttccgatttggaagaaggaggtgtacactaatggagagatctggaaggagaatagtgagtttctggagaagagagacggtctagtgaagaaagaacataaaagaagttgctgtggaagtaaagttagagtacaagaagatgaagaagagcataaagataacagttcttgattacttatagcaaagagcaatgtttttttttttttttctactctcgataagcaaattgtcttaaaacacacattgttgaatctaaagacttcaaattccaattcagttgc

SEQ ID NO: 56302 - protein, 181 aa, Glycine max
  peptide (1)..(181): Ceres Seq. ID no. 13639713
MSSDEKNLIEILEEGHKVDIVKYIDYVSAPQAGAIATFSGTTRDMFEGKAVLELRYEAYVPMATRTLTSICTSARSNWDIHKIAVAHRLGPVPVGETSVFIAVSSVHRGDGLDACKFLIDELKATVPIWKKEVYTNGEIWKENSEFLEKRDGLVKKEHKRSCCGSKVRVQEDEEEHKDNSS

SEQ ID NO: 56303 - protein, 137 aa, Glycine max
  peptide (1)..(137): Ceres Seq. ID no. 13639714
MFEGKAVLELRYEAYVPMATRTLTSICTSARSNWDIHKIAVAHRLGPVPVGETSVFIAVSSVHRGDGLDACKFLIDELKATVPIWKKEVYTNGEIWKENSEFLEKRDGLVKKEHKRSCCGSKVRVQEDEEEHKDNSS

SEQ ID NO: 56304 - protein, 120 aa, Glycine max
  peptide (1)..(120): Ceres Seq. ID no. 13639715
MATRTLTSICTSARSNWDIHKIAVAHRLGPVPVGETSVFIAVSSVHRGDGLDACKFLIDELKATVPIWKKEVYTNGEIWKENSEFLEKRDGLVKKEHKRSCCGSKVRVQEDEEEHKDNSS

SEQ ID NO: 56305 - DNA, 737 bp, Glycine max
  misc_feature (1)..(737): Ceres Seq. ID no. 15178344
acattagctccatagttcaatagagagagtaaagagcagacataggaagagataaaatggccatggcaacaaaatcagtttcttacttcaccctcattttcatcctcgttttggtttttttttttgaagcgccggaaatagaagcgcaggatagcgagtgccttaaagaatacggcgggaatgtgggtttcggcttctgtgcgcctcagacatttccgacgatttgttatataagatgccgtgaggacaaggacgcgaaaggtggaagatgcattacgggagatgccggtgcttttgattttaaatgcttatgtgactactgcagtgacaaacctaatgaccagattctacatggtgtcatctgagtcctacatgtgtgatggtttgtgtaataataagtgttctaagtgataatgtaatagtaaggaatatgtgaaataaaaagctgaaagtatctgaggttcacatggtttgattttagatatgggctttgtggtagagaggcgaagagagtaattattaactttcatacacagaccacccgttctgatatttcttatcagaatgatttatttgggttacaacttgcaactaagctaaataatcgctacacgatttagctgcagttcaaagtttcagtcttgtgttaaaattgcgtgtgtctgtttgtgtgtgtgtcatcgtcgacatgttcatgtgtggtattaaaacgagttcacttcttcagtttgcaaact

SEQ ID NO: 56306 - protein, 102 aa, Glycine max
  peptide (1)..(102): Ceres Seq. ID no. 15178345
MAMATKSVSYFTLIFILVLVFFFEAPEIEAQDSECLKEYGGNVGFGFCAPQTFPTICYIRCREDKDAKGGRCITGDAGAFDFKCLCDYCSDKPNDQILHGVI

SEQ ID NO: 56307 - protein, 100 aa, Glycine max
  peptide (1)..(100): Ceres Seq. ID no. 15178346
MATKSVSYFTLIFILVLVFFFEAPEIEAQDSECLKEYGGNVGFGFCAPQTFPTICYIRCREDKDAKGGRCITGDAGAFDFKCLCDYCSDKPNDQILHGVI

SEQ ID NO: 56308 - DNA, 1347 bp, Glycine max
  misc_feature (1)..(1347): Ceres Seq. ID no. 13639090
agaacatcctaatcgaaaaaaatcagatctcgatcccaactttccccgaccttcgctgccctagttctcgattccctctttccccgatcttccccgccctagtttccgatccctagtttcctcgatctcgattctcggagttttcgcgcacctcgtcgaacatggcagcgatcatggcggcgcgcgggcaggggcaggtgcaagatttcgacttcttcgtggtggtggacttcgaggcgacgtgcgtgaaagacgcgcggatctttccgcaggaaatcattgagttccccgccgtgctcgtcgacggcgccaccggccgcatcgagtccgcgtttcgcaggtacgttcgtccaaaacatcaccctgtgctgacccaattttgcagggaactcaccggcatccggcaggaggacgtcgacggcggcgtggatctcggcgaggcgctctggatgcacgactcttggctgaaggcggcgacggcggggggagggagcttggccgtcgtgatctggggagattgggattgccgcaccatgctcgagtccgagtgccgcttcaaggggatagagaagccctcctacttcgatcgctggatcaacctgagggtccccttccaggctgcgctcggcggcggagggcgggtcaccctccaggaggcggtcagggcagcgggactggactgggagggccgcctgcactgcggactggacgacgcgcgcaacacggcgcggcttcttgttgagctgatgcggcgcggggtcaagatgaccatcaccggttcgctggcgccgccgccgccgatccagcagaaggagcagcccccgcagcttctcacaagctcttgcggtggctcatctgtgctggcgccgctgccgatgatccagcagaagcagcagtcgccgcagcttcgcacaagaccttgcggtggctcatcggcactggcgccgccgctgatccagcagaagcagcagccgccgcagccacacatgataagcccctgcggcggctcctctgcgacgtgcttctgctactgcagggtaccgaccagaggaggcgtggtgtccgtgccagggccgatgcagggcaagtgcttcttcgggtgtggcaactggacgccggccatgggacccgtgtgcccctacttcgtatggaccaactgaatgaaccacccatggcagggcaccagaatcagtgtagctcagctgttagtgtaaatcgtgctagccatcagaatcagagcttagctcggctgattctagccagtctaggtgtgaattggtctctggaatcgaatgtatttggtgtctgaattagtattatcaatagaaattctttttagttatgtcc

SEQ ID NO: 56309 - protein, 332 aa, Glycine max
  peptide (1)..(332): Ceres Seq. ID no. 15220453
MAAIMAARGQGQVQDFDFFVVVDFEATCVKDARIFPQEIIEFPAVLVDGATGRIESAFRRYVRPKHHPVLTQFCRELTGIRQEDVDGGVDLGEALWMHDSWLKAATAGGGSLAVVIWGDWDCRTMLESECRFKGIEKPSYFDRWINLRVPFQAALGGGGRVTLQEAVRAAGLDWEGRLHCGLDDARNTARLLVELMRRGVKMTITGSLAPPPPIQQKEQPPQLLTSSCGGSSVLAPLPMIQQKQQSPQLRTRPCGGSSALAPPLIQQKQQPPQPHMISPCGGSSATCFCYCRVPTRGGVVSVPGPMQGKCFFGCGNWTPAMGPVCPYFVWTN

SEQ ID NO: 56310 - protein, 328 aa, Glycine max
  peptide (1)..(328): Ceres Seq. ID no. 15220454
MAARGQGQVQDFDFFVVVDFEATCVKDARIFPQEIIEFPAVLVDGATGRIESAFRRYVRPKHHPVLTQFCRELTGIRQEDVDGGVDLGEALWMHDSWLKAATAGGGSLAVVIWGDWDCRTMLESECRFKGIEKPSYFDRWINLRVPFQAALGGGGRVTLQEAVRAAGLDWEGRLHCGLDDARNTARLLVELMRRGVKMTITGSLAPPPPIQQKEQPPQLLTSSCGGSSVLAPLPMIQQKQQSPQLRTRPCGGSSALAPPLIQQKQQPPQPHMISPCGGSSATCFCYCRVPTRGGVVSVPGPMQGKCFFGCGNWTPAMGPVCPYFVWTN

SEQ ID NO: 56311 - protein, 236 aa, Glycine max
  peptide (1)..(236): Ceres Seq. ID no. 15220455
MHDSWLKAATAGGGSLAVVIWGDWDCRTMLESECRFKGIEKPSYFDRWINLRVPFQAALGGGGRVTLQEAVRAAGLDWEGRLHCGLDDARNTARLLVELMRRGVKMTITGSLAPPPPIQQKEQPPQLLTSSCGGSSVLAPLPMIQQKQQSPQLRTRPCGGSSALAPPLIQQKQQPPQPHMISPCGGSSATCFCYCRVPTRGGVVSVPGPMQGKCFFGCGNWTPAMGPVCPYFVWTN

SEQ ID NO: 56312 - DNA, 588 bp, Glycine max
  misc_feature (1)..(588): Ceres Seq. ID no. 13595222
atgagatgatgagtttgtcattttgttgaatcttatttgatccatcgatctctctcgattccgatcgcgaaaacacgatttgtttattcagcgacgaagacgatgatgaagatgcaaatcggtgtgctggcgtttctggtggctctctctgcgattgaatccggaatcgcttctcccaacaccgtccctgctttcctctggtctccgcatctccaggctggtaatggtgggatggatgaggctgtgaattatcaggtcatgtctgcaaaggatctagttgactctgtcttcacccaaggaggatggtcaaacattctgtgctctgagaagaaggttgagcaccctgttgttgatgttgcacttgtgttcatcggcagagagttactgtcttctgatgtttcttccaaaaggaactcggaaccttcccttgttaacacattgaatggtctctttacagcttccaacttctcattggcattcccatacatttctgcgccagaggaagaaaggatggagagtttattgctttcagggcttaaacaagcttgccctctgtttaaacacaataaagttggaacgggagggggg

SEQ ID NO: 56313 - protein, 162 aa, Glycine max
  peptide (1)..(162): Ceres Seq. ID no. 13595223
MMKMQIGVLAFLVALSAIESGIASPNTVPAFLWSPHLQAGNGGMDEAVNYQVMSAKDLVDSVFTQGGWSNILCSEKKVEHPVVDVALVFIGRELLSSDVSSKRNSEPSLVNTLNGLFTASNFSLAFPYISAPEEERMESLLLSGLKQACPLFKHNKVGTGGG

SEQ ID NO: 56314 - protein, 161 aa, Glycine max
  peptide (1)..(161): Ceres Seq. ID no. 13595224
MKMQIGVLAFLVALSAIESGIASPNTVPAFLWSPHLQAGNGGMDEAVNYQVMSAKDLVDSVFTQGGWSNILCSEKKVEHPVVDVALVFIGRELLSSDVSSKRNSEPSLVNTLNGLFTASNFSLAFPYISAPEEERMESLLLSGLKQACPLFKHNKVGTGGG

SEQ ID NO: 56315 - protein, 159 aa, Glycine max
  peptide (1)..(159): Ceres Seq. ID no. 13595225
MQIGVLAFLVALSAIESGIASPNTVPAFLWSPHLQAGNGGMDEAVNYQVMSAKDLVDSVFTQGGWSNILCSEKKVEHPVVDVALVFIGRELLSSDVSSKRNSEPSLVNTLNGLFTASNFSLAFPYISAPEEERMESLLLSGLKQACPLFKHNKVGTGGG

SEQ ID NO: 56316 - DNA, 1210 bp, Glycine max
  misc_feature (1)..(1210): Ceres Seq. ID no. 13595240
acatcgccacaaagcctgcgcctccatccacctccctcccacacgctccccaccccccgcgccgccgctcgtcggagccccgcctcgccgtgtcaagcccgctaccaatcgagccctgaatggctgccggcaggggcattaaccagcttctgaggaaaactcttcagagccagtcttctggctcatctctgctttcttcatttcggggaaagcatgaagagtcctctgctggactgagagcattggctcttcttggagttggtgcttctggtcttttaagttttggtacgatagcatctgcagatgaagctgagcacggtttggcggctgcagagtacccctggccgcatgctggcatccttagctcatatgatcatgcatcaatccgccgtggacatcaagtttaccagcaagtgtgtgcatcttgtcactccatgtcattgatttcataccgtgatttggttggggtggcctatactgaggaggaaactaaggcaatggctgctgaaattgaagtggttgatggtcctaatgatgagggtgaaatgttcacacgtcctggcaagctgagtgatcgcttcccgcagccttatccaaatgaacaagcagcccgatttgcaaatggtggggcatatcccccagatctcagccttatcacgaaggcaaggcacgatggccagaactacgtgtttgctcttcttactggttaccatgacccacctgctggtgttcagattcgtgagggtctgcattacaatccctacttccctggtggtgccatagccatgcctaagatgcttatggatggagctattgagtatgaagatggtactcctgcaactgaagctcagatgggcaaggatgttgtgtcattcttgtcgtgggctgctgagcctgaaatggaagagaggaaactgatgggtgtcaaatggatcttcctactgtcacttgctcttctccaagccgcatactaccgtcgcatgaggtggtccgtcctcaagtcccgcaagctggtcctggacgtcgtcaactgatgaccattgtttcttctttttattgcaacgttgaggctttaagcagaagcgatcgaaataatgacttccgttgtatatttttgctactggggttgtctcccatcataccttgggtacaatctcttttgttttcttcctctgctgcaaaagcatttctccaaggagcagttattttc

SEQ ID NO: 56317 - protein, 304 aa, Glycine max
  peptide (1)..(304): Ceres Seq. ID no. 13595241
MAAGRGINQLLRKTLQSQSSGSSLLSSFRGKHEESSAGLRALALLGVGASGLLSFGTIASADEAEHGLAAAEYPWPHAGILSSYDHASIRRGHQVYQQVCASCHSMSLISYRDLVGVAYTEEETKAMAAEIEVVDGPNDEGEMFTRPGKLSDRFPQPYPNEQAARFANGGAYPPDLSLITKARHDGQNYVFALLTGYHDPPAGVQIREGLHYNPYFPGGAIAMPKMLMDGAIEYEDGTPATEAQMGKDVVSFLSWAAEPEMEERKLMGVKWIFLLSLALLQAAYYRRMRWSVLKSRKLVLDVVN

SEQ ID NO: 56318 - protein, 199 aa, Glycine max
  peptide (1)..(199): Ceres Seq. ID no. 13595242
MSLISYRDLVGVAYTEEETKAMAAEIEVVDGPNDEGEMFTRPGKLSDRFPQPYPNEQAARFANGGAYPPDLSLITKARHDGQNYVFALLTGYHDPPAGVQIREGLHYNPYFPGGAIAMPKMLMDGAIEYEDGTPATEAQMGKDVVSFLSWAAEPEMEERKLMGVKWIFLLSLALLQAAYYRRMRWSVLKSRKLVLDVVN

SEQ ID NO: 56319 - protein, 178 aa, Glycine max
  peptide (1)..(178): Ceres Seq. ID no. 13595243
MAAEIEVVDGPNDEGEMFTRPGKLSDRFPQPYPNEQAARFANGGAYPPDLSLITKARHDGQNYVFALLTGYHDPPAGVQIREGLHYNPYFPGGAIAMPKMLMDGAIEYEDGTPATEAQMGKDVVSFLSWAAEPEMEERKLMGVKWIFLLSLALLQAAYYRRMRWSVLKSRKLVLDVVN

SEQ ID NO: 56320 - DNA, 1256 bp, Glycine max
  misc_feature (1)..(1256): Ceres Seq. ID no. 12781936
acggcagagttttcccctttcccccctccccactcgccaaaaatcctcgatccaaatccccactccggcgacgcgacgcggccatgcgcagctgccgataggcgacgactgcagcgaccacgcgtgagcggccatggacgagggctacgccagcctccccaccagccacctcctcggctccgtccccgctgtggctgtggctcccgatgagaggaagcccggtgctcccgccgaagttggaaatgccgctgccacctcgcgcctgcagcagtttccgcctgctcctgctgcgaacggaggagggtaccagcctccagggagccctctaggtggagatgtagaaacacagacaaactggaaaggatacttcaatgttgcctcttatactccatatttcaatgttgatactgatgtcgttgttgacagacttatcagttcagtttatccaatggagggatttttcaggaagatagatgttaatcctgacatgtatgggcccttatggatcaccactacactgatatttatgctggctgcattcggaaactttgccacttatctaatgcaaaggaaaagtgatctgaatatatggaactttgatgttagctatttcagtttggcggcatcagtcatgtacggttatgctatcgtggtacctgctgcattctttttcctgtttcagtactttggatcacgcccaagccttatccggttttggtgtatgtggggctattctctgtttatcttcgtaccagcatctatactgctacttattcccgtggaatttcttcgctgggtcatcatagctggtgccggtggtgcatcatcttggttcatctttttaaacttgaaggaatgcaccgaaggagctgatatgatggctttgatcgcaagtgcatcagtgctgcagtttgctctggcactgttcatcaaagttttcttttttgcctgagatctattctgtgttgcttcaggtgagctggatgttttctttgtgtccccgtcgttctgttctgccattcatctttctgaggaccaggcagtggactagtttcaccctacatacatattgaccctagatttgatagaccttgggagtgtctgttttcaagatttttgactctgtgtagttaagggaatttcactgtgtgcgttccagtgcgaagttactaagtttgccatctaaatttgcacctggtgaactttctgccaccgtgctgtacaacaacggtggttagcaagaatgtgaagctctc

SEQ ID NO: 56321 - protein, 272 aa, Glycine max
  peptide (1)..(272): Ceres Seq. ID no. 12781937
MDEGYASLPTSHLLGSVPAVAVAPDERKPGAPAEVGNAAATSRLQQFPPAPAANGGGYQPPGSPLGGDVETQTNWKGYFNVASYTPYFNVDTDVVVDRLISSVYPMEGFFRKIDVNPDMYGPLWITTTLIFMLAAFGNFATYLMQRKSDLNIWNFDVSYFSLAASVMYGYAIVVPAAFFFLFQYFGSRPSLIRFWCMWGYSLFIFVPASILLLIPVEFLRWVIIAGAGGASSWFIFLNLKECTEGADMMALIASASVLQFALALFIKVFFFA

SEQ ID NO: 56322 - protein, 167 aa, Glycine max
  peptide (1)..(167): Ceres Seq. ID no. 12781938
MEGFFRKIDVNPDMYGPLWITTTLIFMLAAFGNFATYLMQRKSDLNIWNFDVSYFSLAASVMYGYAIVVPAAFFFLFQYFGSRPSLIRFWCMWGYSLFIFVPASILLLIPVEFLRWVIIAGAGGASSWFIFLNLKECTEGADMMALIASASVLQFALALFIKVFFFA

SEQ ID NO: 56323 - protein, 154 aa, Glycine max
  peptide (1)..(154): Ceres Seq. ID no. 12781939
MYGPLWITTTLIFMLAAFGNFATYLMQRKSDLNIWNFDVSYFSLAASVMYGYAIVVPAAFFFLFQYFGSRPSLIRFWCMWGYSLFIFVPASILLLIPVEFLRWVIIAGAGGASSWFIFLNLKECTEGADMMALIASASVLQFALALFIKVFFFA

SEQ ID NO: 56324 - DNA, 999 bp, Glycine max
  misc_feature (1)..(999): Ceres Seq. ID no. 12781940
catccatccaccattcatccatcagccacttcacaccagcaagtggcagtagtgcgatccacacaagtttaggcatggcgactccgagagcactcgccctctgcgtcctgctggcgatggccgtcgccaacaccgaggcggcgtcagtcgtcgtcggcctggccaagtgcgccgactgcaccaggaagaacatgcagaccgaggaagccttcaaggctgtgcaggtggcgatcaagtgcaagaacagcgccggcgagtacgagagcaaggcggtgggcggcctcgacggcaccggcgccttcagcgtgcccctggctgccaacctccacggcgccgactgcgtcgctcagctccacagcgccgtctccaacgcgccctgccccggccaggagccgtccaagatcgtgccggtgtccgagggcaccacgtacggcgtcgtcgctggcgagaacgccgccacgccgtctgccgcatcgccggagtgtgcgtccatgaccctatgcgggccgatcaagaagcacatcatcgagcacttccaccacaagaagcctgtgccgccgaagccggagcccaagccccagccccacccggactacggccccgtgcccaagcccgagcccaagccgcagccccacccggactaccacccagtccctcccacccccacctacggcggaggcggcggtggtggataccacggacaccactgagtccagtctaccattgtactcctgcccagcgggttggttgtcagtgagtgatcgacgttgctatttatgatcggtttgcatgggtgggtgcattgtttggtcttctgccattcgctgccccattttagtatctgcactgcagtctgagagttcataataacagctctacgcgtgtgtatcaggcaagtgtgtgggtgtggttggtgtgtttgcttctgtaatttcggtgagttctcttgtagtacaaaggtttttatgaatcaagtaatttaaatcaagtcgattttgt

SEQ ID NO: 56325 - protein, 235 aa, Glycine max
  peptide (1)..(235): Ceres Seq. ID no. 12781941
SIHHSSISHFTPASGSSAIHTSLGMATPRALALCVLLAMAVANTEAASVVVGLAKCADCTRKNMQTEEAFKAVQVAIKCKNSAGEYESKAVGGLDGTGAFSVPLAANLHGADCVAQLHSAVSNAPCPGQEPSKIVPVSEGTTYGVVAGENAATPSAASPECASMTLCGPIKKHIIEHFHHKKPVPPKPEPKPQPHPDYGPVPKPEPKPQPHPDYHPVPPTPTYGGGGGGGYHGHH

SEQ ID NO: 56326 - protein, 211 aa, Glycine max
  peptide (1)..(211): Ceres Seq. ID no. 12781942
MATPRALALCVLLAMAVANTEAASVVVGLAKCADCTRKNMQTEEAFKAVQVAIKCKNSAGEYESKAVGGLDGTGAFSVPLAANLHGADCVAQLHSAVSNAPCPGQEPSKIVPVSEGTTYGVVAGENAATPSAASPECASMTLCGPIKKHIIEHFHHKKPVPPKPEPKPQPHPDYGPVPKPEPKPQPHPDYHPVPPTPTYGGGGGGGYHGHH

SEQ ID NO: 56327 - protein, 197 aa, Glycine max
  peptide (1)..(197): Ceres Seq. ID no. 12781943
MAVANTEAASVVVGLAKCADCTRKNMQTEEAFKAVQVAIKCKNSAGEYESKAVGGLDGTGAFSVPLAANLHGADCVAQLHSAVSNAPCPGQEPSKIVPVSEGTTYGVVAGENAATPSAASPECASMTLCGPIKKHIIEHFHHKKPVPPKPEPKPQPHPDYGPVPKPEPKPQPHPDYHPVPPTPTYGGGGGGGYHGHH

SEQ ID NO: 56328 - DNA, 724 bp, Glycine max
  misc_feature (1)..(724): Ceres Seq. ID no. 13594970
gcttttgttgttcggttagcaccagcgaaacgcagagcgagaggccgaggaagcgatagctctagcgataaggcactgacggatcaatggctgccacggcgtactccgtggccctcctcggtggggcgcgcctccccgccgccaccggcaacctcgccccccgctcctccgcactcctcccgcggcgcaacctccacccgctccgcctccaagatgcgcccaggccgtccctgctccgcgtgaaggccgcctccgacgacacgtcggctagcggcgacgagatcatcgaggacctgaaagggaagtgggaggcgattgaggacaagcccaccttcctcctctacagcggcggcgccgtcgtggctctctggctcaccaccgtcgtcgtcggcgccatcaactccgtgccgttgctccccaagctcctggagctggttgggctcggctacaccgggtggttcgtgtaccgctacctcctcttcaaggaaagcaggaaagagttggccaccgacatcgagagcttgaagaagaagatcgccggaacagaataaactcaagttctctggaacgttttttatggctcttttgtctgtccatgtaatggaagaacacctacttgcttagagtaccatccactgcatttgtgtgttacatacatatctgtatgaacaaagaaatatgctttggttggtgtgcggtgacaatagtgaaattgtatcagttc

SEQ ID NO: 56329 - protein, 154 aa, Glycine max
  peptide (1)..(154): Ceres Seq. ID no. 13594971
MAATAYSVALLGGARLPAATGNLAPRSSALLPRRNLHPLRLQDAPRPSLLRVKAASDDTSASGDEIIEDLKGKWEAIEDKPTFLLYSGGAVVALWLTTVVVGAINSVPLLPKLLELVGLGYTGWFVYRYLLFKESRKELATDIESLKKKIAGTE

SEQ ID NO: 56330 - protein, 80 aa, Glycine max
  peptide (1)..(80): Ceres Seq. ID no. 13594972
AFVVRLAPAKRRARGRGSDSSSDKALTDQWLPRRTPWPSSVGRASPPPPATSPPAPPHSSRGATSTRSASKMRPGRPCSA

SEQ ID NO: 56331 - DNA, 786 bp, Glycine max
  misc_feature (1)..(786): Ceres Seq. ID no. 13595226
ggccaaggccgtttgcaccttatttcgccttacacctcaccatcgacttacatacttctgttggccggagccacacgagctagcaccaccgacaaacaataccttgctgttctgagctcgccgtcccgatggcaagcaccaacatggcgtcggccacctccagattcatgctggcggcgggcatccccagcggctccaacggcggcgtgggcagccgcgtcagcttcgtcccgtccaaccggctcggctggaagctcgtggcccgcgccgaggaggagccgactgccgccgcaccggcggaaccagcaccggccgcggaggagaaaccggaagccgccgtggccaccaaagagcccgccaaagccaagccgccgccaaggggacccaagaggggaaccaaggtgaagattctgaggagggagtcctactggtacaacgggaccggatccgtcgtcacggttgatcaggatcccaacacccgttacccggtggtggtgcgtttcgccaaggtgaactacgccggcgtgtcgaccaacaactacgccctggacgagatcaaggaggttgctgcttaagcgaacgaggctagctgccatgtgctccatccaatgtttgtatcagtagctcgtcgagtgacgatgtgaatgttagcctctcacaaaccttatgtgtaatacctctgcgattatatgtatttgcctgcttcctcatggacctaataatctccttctgttgcttaaaatgattgtattcttgctcacttttgtacaaaagatcggttgttcg

SEQ ID NO: 56332 - protein, 148 aa, Glycine max
  peptide (1)..(148): Ceres Seq. ID no. 15221513
MASTNMASATSRFMLAAGIPSGSNGGVGSRVSFVPSNRLGWKLVARAEEEPTAAAPAEPAPAAEEKPEAAVATKEPAKAKPPPRGPKRGTKVKILRRESYWYNGTGSVVTVDQDPNTRYPVVVRFAKVNYAGVSTNNYALDEIKEVAA

SEQ ID NO: 56333 - protein, 143 aa, Glycine max
  peptide (1)..(143): Ceres Seq. ID no. 15221514
MASATSRFMLAAGIPSGSNGGVGSRVSFVPSNRLGWKLVARAEEEPTAAAPAEPAPAAEEKPEAAVATKEPAKAKPPPRGPKRGTKVKILRRESYWYNGTGSVVTVDQDPNTRYPVVVRFAKVNYAGVSTNNYALDEIKEVAA

SEQ ID NO: 56334 - protein, 135 aa, Glycine max
  peptide (1)..(135): Ceres Seq. ID no. 15221515
MLAAGIPSGSNGGVGSRVSFVPSNRLGWKLVARAEEEPTAAAPAEPAPAAEEKPEAAVATKEPAKAKPPPRGPKRGTKVKILRRESYWYNGTGSVVTVDQDPNTRYPVVVRFAKVNYAGVSTNNYALDEIKEVAA

SEQ ID NO: 56335 - DNA, 704 bp, Glycine max
  misc_feature (1)..(704): Ceres Seq. ID no. 12610189
aataaacacaagagatcgaccgacaccgagacagatcgtgttggtttcattttgcgaggtagatagagaaagggatgcagggcgggaagagctcgagcgcggtgggcgcggccaaggaggcggtggcgaacgtgggcacgtcggcgtgggcgagcaaggagaagaccatggccgtggtgcaggagacggtgaacaaggccaaggcgcacgacccggcggccaaggccgaggcggaggccaggaagcaggagcggatccacgaggcggaggccgccaagcgggacgccatgcgccacaacgccgccgccaaggagcacgccaccgccgcgtcctaccaccccaccaccggcgccggagtggacgcccgcgacgtcgaggtggagggcgcggccgccccgcgcgcggggagcagcgacgacggctacctgccggtgtcgggggcggggcactgggtcggcgagggcggcggtcaccagctgcccgcgcgcggcacgcccggcggccactctgcgtgatgacgaattgacgagactccatccgatgtgatttgcgtgtgaactggctggtttggcaaatagctggtataccttgtgtgcttgttcgagtgtgacccctcctgtagttttgagctctcaagagctgtgcttatttacgttgtgatctgtgaaatgagttttatataatggagatgagggtgtgatttc

SEQ ID NO: 56336 - protein, 174 aa, Glycine max
  peptide (1)..(174): Ceres Seq. ID no. 12610190
INTRDRPTPRQIVLVSFCEVDRERDAGREELERGGRGQGGGGERGHVGVGEQGEDHGRGAGDGEQGQGARPGGQGRGGGQEAGADPRGGGRQAGRHAPQRRRQGARHRRVLPPHHRRRSGRPRRRGGGRGRPARGEQRRRLPAGVGGGALGRRGRRSPAARARHARRPLCVMTN

SEQ ID NO: 56337 - protein, 146 aa, Glycine max
  peptide (1)..(146): Ceres Seq. ID no. 12610191
MQGGKSSSAVGAAKEAVANVGTSAWASKEKTMAVVQETVNKAKAHDPAAKAEAEARKQERIHEAEAAKRDAMRHNAAAKEHATAASYHPTTGAGVDARDVEVEGAAAPRAGSSDDGYLPVSGAGHWVGEGGGHQLPARGTPGGHSA

SEQ ID NO: 56338 - protein, 115 aa, Glycine max
  peptide (1)..(115): Ceres Seq. ID no. 12610192
MAVVQETVNKAKAHDPAAKAEAEARKQERIHEAEAAKRDAMRHNAAAKEHATAASYHPTTGAGVDARDVEVEGAAAPRAGSSDDGYLPVSGAGHWVGEGGGHQLPARGTPGGHSA

SEQ ID NO: 56339 - DNA, 815 bp, Glycine max
  misc_feature (1)..(815): Ceres Seq. ID no. 12781963
accaacggcggagatgggtggtggtgccgcgaggagggttctcgaggcgtggaagctcggagtggtcaagtacggcgacgccctcaggctccaggagaggctcgtcgccgaccggagagccggccgggtcccggacctcgtgctctcgctgcagcatccgcctacctacaccctcggcaagcggcgcaccgaccacaacctgctcgtgccggagtcaagcctcgcgggcctcggcgccgagctctaccgcacggagcggggcggcgacgtcaccttccacggcccgcgccaggccgtgctctaccccatcctctcgctccgggacattgggctaggcgcgcggaggtatgtcgaggggctcgagtccgccatgatcgaggttgcctctctgtacggcgtcaaggcgcggccggggggcgcctgcgagaccggcgtgtgggtcggggacaggaagattggggccatcggggtcaggatctcgtcagggtttacctgccatggcctggccttcaacatcgaccctgatttgggctacttcaagcacatcgtgccctgcggcattgctgacaaggaggtcacatcgctgcggcgggaggccgcggtggaactccctcctgacgaggtgatccatggtcagctcttgcagagcttggcgacaaccttccgtttcagtgatgttaaagtcaaggatgattccgagtgtgcagacatgattagctcagctgcaactgagcaacactgatatgtattttgctctttgtacttttgtatactgggattttgcctcgacacctagttataaacttttgggtttc

SEQ ID NO: 56340 - protein, 246 aa, Glycine max
  peptide (1)..(246): Ceres Seq. ID no. 12781964
PTAEMGGGAARRVLEAWKLGVVKYGDALRLQERLVADRRAGRVPDLVLSLQHPPTYTLGKRRTDHNLLVPESSLAGLGAELYRTERGGDVTFHGPRQAVLYPILSLRDIGLGARRYVEGLESAMIEVASLYGVKARPGGACETGVWVGDRKIGAIGVRISSGFTCHGLAFNIDPDLGYFKHIVPCGIADKEVTSLRREAAVELPPDEVIHGQLLQSLATTFRFSDVKVKDDSECADMISSAATEQH

SEQ ID NO: 56341 - protein, 242 aa, Glycine max
  peptide (1)..(242): Ceres Seq. ID no. 12781965
MGGGAARRVLEAWKLGVVKYGDALRLQERLVADRRAGRVPDLVLSLQHPPTYTLGKRRTDHNLLVPESSLAGLGAELYRTERGGDVTFHGPRQAVLYPILSLRDIGLGARRYVEGLESAMIEVASLYGVKARPGGACETGVWVGDRKIGAIGVRISSGFTCHGLAFNIDPDLGYFKHIVPCGIADKEVTSLRREAAVELPPDEVIHGQLLQSLATTFRFSDVKVKDDSECADMISSAATEQH

SEQ ID NO: 56342 - protein, 174 aa, Glycine max
  peptide (1)..(174): Ceres Seq. ID no. 12781966
TNGGDGWWCREEGSRGVEARSGQVRRRPQAPGEARRRPESRPGPGPRALAAASAYLHPRQAAHRPQPARAGVKPRGPRRRALPHGAGRRRHLPRPAPGRALPHPLAPGHWARRAEVCRGARVRHDRGCLSVRRQGAAGGRLRDRRVGRGQEDWGHRGQDLVRVYLPWPGLQHRP

SEQ ID NO: 56343 - DNA, 1043 bp, Glycine max
  misc_feature (1)..(1043): Ceres Seq. ID no. 14304176
attgtctcataaaaaaacaatcttctctttaaaacgatggagtgtagaccgttggatctgacgataatatccgcagaggacctcaaagacatccagctgatcggcaagcaagacctatacgccgtcgtttccctcaacaacgacgcaaggaccaagcagaagacaaaggtggacaaagactgcgggacgaaacctaagtggaagcatcagatgaagctcaccgtcgacgacacagcagcgcgtgagaaccatctcacacttgtcatccagatcgtcgctgatcgtcccatcgccggtgataaaccagtcggagaggttagcgttccgttgaaggagcttttggatcagaacaacaaggagggtgacgtggaggaggagaaaacggttacgtatgctgtgaagctgcctaacggtaagaccaaaggatctctcaagttctcgttcaagtttggtgagaagtacactttcgggtcttcgagtgatcctcacgcgcctggctcatcgagtgttgaccacaagtctacggatcagcccgtcgcagcttacccgcccggacaaggcgccccggctgcatacccggctcctccaggacatgatgataaacatggcggtgtttacggttacccacaggccggtggatatccgccacctggtggtcccggtggttatcctccagctgggcctggtgggtatccgcctcccggtgcatacccgcaacaaggtggatatccacctcaacaaggaggctacccgggttatccaccacagggtccaggctatgggtatccgccacagggtccaggttatgggtatccgccacagggtccgtatggttacccgcaacagcaagcttatggtggtcaaccgcagaaaccgaagaagcatggaggagctggaatgggtctagggcttggacttggagctgggctattgggtgggttgcttgttggtgaagcaattgatgacatggcagatatgggtgatatgggtgatttctgattgtgcttatctttatggtattagctttcaatttcttgttgttc

SEQ ID NO: 56344 - protein, 320 aa, Glycine max
  peptide (1)..(320): Ceres Seq. ID no. 14304177
MECRPLDLTIISAEDLKDIQLIGKQDLYAVVSLNNDARTKQKTKVDKDCGTKPKWKHQMKLTVDDTAARENHLTLVIQIVADRPIAGDKPVGEVSVPLKELLDQNNKEGDVEEEKTVTYAVKLPNGKTKGSLKFSFKFGEKYTFGSSSDPHAPGSSSVDHKSTDQPVAAYPPGQGAPAAYPAPPGHDDKHGGVYGYPQAGGYPPPGGPGGYPPAGPGGYPPPGAYPQQGGYPPQQGGYPGYPPQGPGYGYPPQGPGYGYPPQGPYGYPQQQAYGGQPQKPKKHGGAGMGLGLGLGAGLLGGLLVGEAIDDMADMGDMGDF

SEQ ID NO: 56345 - protein, 262 aa, Glycine max
  peptide (1)..(262): Ceres Seq. ID no. 14304178
MKLTVDDTAARENHLTLVIQIVADRPIAGDKPVGEVSVPLKELLDQNNKEGDVEEEKTVTYAVKLPNGKTKGSLKFSFKFGEKYTFGSSSDPHAPGSSSVDHKSTDQPVAAYPPGQGAPAAYPAPPGHDDKHGGVYGYPQAGGYPPPGGPGGYPPAGPGGYPPPGAYPQQGGYPPQQGGYPGYPPQGPGYGYPPQGPGYGYPPQGPYGYPQQQAYGGQPQKPKKHGGAGMGLGLGLGAGLLGGLLVGEAIDDMADMGDMGDF

SEQ ID NO: 56346 - DNA, 1150 bp, Glycine max
  misc_feature (1)..(1150): Ceres Seq. ID no. 14304202
acccaccaccgcgcctcagctcacgcatctctctcggctccggcaagcaagcaccagcgctctcctctcccctcgcttcctcgctgcaatgtcgaccgacgtggccgccgatgtcccggcccctgaggtggaggtggccgccgaccccgtcgtggagaccacggccgaggccgccgccggcgacgcgaagccggccaaggagaccaaggccaaggcggccaaggccaagaagccctccgccccgaggaagccccgcgccacccccgcccacccgacctacgccgagatggtgtcggaggccatcaccgccctgaaggagcggacggggtcgagccagtacgccatcgccaagttcgtcgaggacaagcacaaggcgcacctcccggccaacttccgcaagattctgtcggtgcagctcaagaagctggtcgcctccggcaagctgaccaaggtcaaggcctcgtacaagctgtcggccgccgcggccaagcccaagccggcggcgaagaagaagcccgcggcgaagaagaaggcgccagccaagaagaccgccaccaagaccaaggccaaggcgcccgccaagaaggccgccgcgaagcccaaggccaaggcgcccgccaagcccaaggccgccgcgaagcccaaggccgccgcgaagcccaaggccaaggccgccgcgaagcccaaggctgccgccaagcccaagggccgccccgccaaggctgccaagacctcggccaaggacgcgccagggaagaaggcccctgccgccgcggcgcccaagaaggccgccgccaggaagccgcccaccaagagatccacgccggtgaagaaggccgcgcccgccaagaaggctgcgccggcgaagaaggccccggccgccaagaaggccaagaagtagatccttggagggagatcctagggcttggcgatagttttccagtagcagtttttcctgttctgtgctgttagtcgagatgtccgggctgtgtcgggggtgctaggctgtaaatttgaaatctgggttggggtgcactggtgatcctgtgcacccctttgtgtgtgttgtgagaaacggtggcgacgatcgcgttgtagcaagcttatgtatttgtgtaactgaattgggtaattgaatcttcattttagc

SEQ ID NO: 56347 - protein, 299 aa, Glycine max
  peptide (1)..(299): Ceres Seq. ID no. 14304203
PTTAPQLTHLSRLRQASTSALLSPRFLAAMSTDVAADVPAPEVEVAADPVVETTAEAAAGDAKPAKETKAKAAKAKKPSAPRKPRATPAHPTYAEMVSEAITALKERTGSSQYAIAKFVEDKHKAHLPANFRKILSVQLKKLVASGKLTKVKASYKLSAAAAKPKPAAKKKPAAKKKAPAKKTATKTKAKAPAKKAAAKPKAKAPAKPKAAAKPKAAAKPKAKAAAKPKAAAKPKGRPAKAAKTSAKDAPGKKAPAAAAPKKAAARKPPTKRSTPVKKAAPAKKAAPAKKAPAAKKAKK

SEQ ID NO: 56348 - protein, 270 aa, Glycine max
  peptide (1)..(270): Ceres Seq. ID no. 14304204
MSTDVAADVPAPEVEVAADPVVETTAEAAAGDAKPAKETKAKAAKAKKPSAPRKPRATPAHPTYAEMVSEAITALKERTGSSQYAIAKFVEDKHKAHLPANFRKILSVQLKKLVASGKLTKVKASYKLSAAAAKPKPAAKKKPAAKKKAPAKKTATKTKAKAPAKKAAAKPKAKAPAKPKAAAKPKAAAKPKAKAAAKPKAAAKPKGRPAKAAKTSAKDAPGKKAPAAAAPKKAAARKPPTKRSTPVKKAAPAKKAAPAKKAPAAKKAKK

SEQ ID NO: 56349 - protein, 204 aa, Glycine max
  peptide (1)..(204): Ceres Seq. ID no. 14304205
MVSEAITALKERTGSSQYAIAKFVEDKHKAHLPANFRKILSVQLKKLVASGKLTKVKASYKLSAAAAKPKPAAKKKPAAKKKAPAKKTATKTKAKAPAKKAAAKPKAKAPAKPKAAAKPKAAAKPKAKAAAKPKAAAKPKGRPAKAAKTSAKDAPGKKAPAAAAPKKAAARKPPTKRSTPVKKAAPAKKAAPAKKAPAAKKAKK

SEQ ID NO: 56350 - DNA, 1103 bp, Glycine max
  misc_feature (1)..(1103): Ceres Seq. ID no. 14304224
aaactgtaagcattaattttcgaaatgggaaaaaacgaaaaataacttttccaaattcatgacaaccgaatcacacaaaaactattttatatgctgtttttctgtttgaaggatcacacaaactagtaaccagaaaaatggcagaaacaaagttgagctccttcaaagacaaaagatggtcactccatggcatgacagctctagtgacaggaggcacacgaggcatagggtacgcaatagctgaagagttagcagaatttggggcagctgtgcatatttgtgcacgtaaacaacaagatattgataaatgtttagaagaatggaataagaaaggacttcccataacagggtcggcatgtgatgtactatctcgtgaccaacgtgaaaatttaatgaaaaatgttgcttcaatctttaacgggaagctcaacattctgataaacaatgctggaacaactacacctaagaatctcatagattatactgcagaagatgtaacgacaataatggaaactaattttgggtctagttaccacttatgtcaactagcacatccacttctaaaagcatctggatatgggagcatagtgtttatatcctccattgcaggtctgaaagctttgccttacagttctgtgtatgcatcctctaaaggagctatgaatcaattcactaagaacatagcattggaatgggcaaaggataatattcgcgcaaatgctgtggcaccggggactgttaagactgtacttctggattctatcatgaaagctgctgctgaagctgataaagccgttgagtatatagtgtctcaaacaccagttggtagacttggagatcccgaggacatatcaccactggttgttttcctttgccttccagctgcttcatacatcactggccagattattactgcggatgggggttacataatttaaagtgtaatgccaaaaataattataaaataaaataaatgcccaaaacataaatctcaagatcaactaggtttttaagaaggtccgaaactaatgattatctgtagttgttttaagtacaatatttcaagtgttataatgtttccaatgtgtgaagttctttttatc

SEQ ID NO: 56351 - protein, 266 aa, Glycine max
  peptide (1)..(266): Ceres Seq. ID no. 14304225
MAETKLSSFKDKRWSLHGMTALVTGGTRGIGYAIAEELAEFGAAVHICARKQQDIDKCLEEWNKKGLPITGSACDVLSRDQRENLMKNVASIFNGKLNILINNAGTTTPKNLIDYTAEDVTTIMETNFGSSYHLCQLAHPLLKASGYGSIVFISSIAGLKALPYSSVYASSKGAMNQFTKNIALEWAKDNIRANAVAPGTVKTVLLDSIMKAAAEADKAVEYIVSQTPVGRLGDPEDISPLVVFLCLPAASYITGQIITADGGYII

SEQ ID NO: 56352 - protein, 248 aa, Glycine max
  peptide (1)..(248): Ceres Seq. ID no. 14304226
MTALVTGGTRGIGYAIAEELAEFGAAVHICARKQQDIDKCLEEWNKKGLPITGSACDVLSRDQRENLMKNVASIFNGKLNILINNAGTTTPKNLIDYTAEDVTTIMETNFGSSYHLCQLAHPLLKASGYGSIVFISSIAGLKALPYSSVYASSKGAMNQFTKNIALEWAKDNIRANAVAPGTVKTVLLDSIMKAAAEADKAVEYIVSQTPVGRLGDPEDISPLVVFLCLPAASYITGQIITADGGYII

SEQ ID NO: 56353 - protein, 181 aa, Glycine max
  peptide (1)..(181): Ceres Seq. ID no. 14304227
MKNVASIFNGKLNILINNAGTTTPKNLIDYTAEDVTTIMETNFGSSYHLCQLAHPLLKASGYGSIVFISSIAGLKALPYSSVYASSKGAMNQFTKNIALEWAKDNIRANAVAPGTVKTVLLDSIMKAAAEADKAVEYIVSQTPVGRLGDPEDISPLVVFLCLPAASYITGQIITADGGYII

SEQ ID NO: 56354 - DNA, 949 bp, Glycine max
  misc_feature (1)..(949): Ceres Seq. ID no. 15168856
gtcttgttttgcccgtgacgcacactgttcttgctttccccagatttcaatttccctttagcacctcaaatttcttcccttttcctttctgggtctccatctactgttttttttttgggtcaaatacgaagatgggtgttcatccttagccattgagaatctaatctaagatttggagagaaagatgaaggatttcccagggacaccgggcactgtccttggtttggctctaaggatatcacagttcgtttttgctgctggatcaattgcttccatggctaccactcccagtttctttaactttacagctttttgttacttgatagcttcaatgggtttacaagtcatttggagttttgtgcttgctttattggatgcatatgccttggtgaaaaaaaaggtcctccacaacgccgtactggttagcctctttgtagttggagattgggtaacagcaacactatctctagccgcagcgtcttcctcggctggcatcacggttttgtacttcaatgatctgggacactgccattttggagaggaatgccaaaagtacctgatttcagtagcattagcgttcttgagctggttcccgatttcaatatcatccctaattatgctctggctattagctgcagggtagcagtctctacattccgcccgagttctctcatctatcacatgttcatcttattggaaaagttcttagaaagtgtcaataggaaaggaagtagagtagaggtttacacatttaaatcgattccttcatttctaccagaaatgggacagtagcagattgtaaaaagtaaaaatatatacatgattttgccttgcaaagaaattaggctaccgaactgttatcctgatttcctgatcctgtgactagaaggtcaaaactttatgtttacagggaattgggttgctaatgcatgtttgcttgtttacaatt

SEQ ID NO: 56355 - protein, 152 aa, Glycine max
  peptide (1)..(152): Ceres Seq. ID no. 15168857
MKDFPGTPGTVLGLALRISQFVFAAGSIASMATTPSFFNFTAFCYLIASMGLQVIWSFVLALLDAYALVKKKVLHNAVLVSLFVVGDWVTATLSLAAASSSAGITVLYFNDLGHCHFGEECQKYLISVALAFLSWFPISISSLIMLWLLAAG

SEQ ID NO: 56356 - protein, 122 aa, Glycine max
  peptide (1)..(122): Ceres Seq. ID no. 15168858
MATTPSFFNFTAFCYLIASMGLQVIWSFVLALLDAYALVKKKVLHNAVLVSLFVVGDWVTATLSLAAASSSAGITVLYFNDLGHCHFGEECQKYLISVALAFLSWFPISISSLIMLWLLAAG

SEQ ID NO: 56357 - protein, 103 aa, Glycine max
  peptide (1)..(103): Ceres Seq. ID no. 15168859
MGLQVIWSFVLALLDAYALVKKKVLHNAVLVSLFVVGDWVTATLSLAAASSSAGITVLYFNDLGHCHFGEECQKYLISVALAFLSWFPISISSLIMLWLLAAG

SEQ ID NO: 56358 - DNA, 813 bp, Glycine max
  misc_feature (1)..(813): Ceres Seq. ID no. 14304228
cctaaaaaatgtcccgattgctgtcgaaaaccctaattccccacgggagattcttcctccgtcgcttcaacgacgcggcttcgaagaaaacggcggcgccgagcctcgtctgtttcaaccgccgtccctattcatcgaaacctcatctgatcgagatcgacctggactcttcctcgtcagcgacttccaaggccgaagccgaagccgcggttctcaagaagctgaacgagttcgtacggaggatcgtcgttcagaactcgactcccgattggctccctttctccccaggatcctccttctgggtccctccgcaccaaaacaccgccgccaagatcgctaatttggtcgaccaggtgacgcatcctttgacggaggaggaggttctctccctgtcttctccttctggctggccttgctcctctttcttcactcctcctccagatgatgattcttcatctaaacaaagggtggaaggtagcacggagttgaacgttccggggaatgagatgctggaagtcaagctagcgcagtttcccgatccaatctacttgttggaacacggagatgatgatgagtgattttacatttccagctcacgtggaaggccagtcctgatgcatggtttgcgttgacaggctttggagaaaaaaagacagatgattctcgagactgatgaggttgtgtttgtatatacagttgcaagccgtggaattatatcgatgttttggctgtcttaacgctgtttgtgaactataaattatacagcttgatattaattaattaaaaccgtagcagacggtgcaacttcagatt

SEQ ID NO: 56359 - protein, 189 aa, Glycine max
  peptide (1)..(189): Ceres Seq. ID no. 14304229
MSRLLSKTLIPHGRFFLRRFNDAASKKTAAPSLVCFNRRPYSSKPHLIEIDLDSSSSATSKAEAEAAVLKKLNEFVRRIVVQNSTPDWLPFSPGSSFWVPPHQNTAAKIANLVDQVTHPLTEEEVLSLSSPSGWPCSSFFTPPPDDDSSSKQRVEGSTELNVPGNEMLEVKLAQFPDPIYLLEHGDDDE

SEQ ID NO: 56360 - protein, 112 aa, Glycine max
  peptide (1)..(112): Ceres Seq. ID no. 14304230
LKNVPIAVENPNSPREILPPSLQRRGFEENGGAEPRLFQPPSLFIETSSDRDRPGLFLVSDFQGRSRSRGSQEAERVRTEDRRSELDSRLAPFLPRILLLGPSAPKHRRQDR

SEQ ID NO: 56361 - DNA, 1013 bp, Glycine max
  misc_feature (1)..(1013): Ceres Seq. ID no. 14306812
aatcccaatccaaatctcatcgccaagcaatcatcactctagccctttgccctccccacccgcagcagcatggcgagcccgcagtgctgcgcgaacccaccggcgctcaaccccgccgccggcgagggcaaggtcgtggacagcttcggcgggatcaaggcgtacgtcgccggcgcccaggactccaaggccgccgtcgtcctcatctccgacgtctacggttttgaagcgccgaatctgaggaagatagccgataaagttgcttcgtctggatattttgttgtcgtgccagatttcttacatggggatccatttgtacctgaaaacgctgaccgaccaatagcagtgtggataaaggagcataccccgggaaaagcatttgaagaggcaaaacctgttattgctgctctaaaggaacaaggagcgtctagtgttggggctgcaggttattgctggggtgcaaaggtagttgcagagctagggaaagctaatgagatccaggcagctgttatgtcgcacccttcatttgttactgttgatgatataaaagaggtgaaatgccccatctctatacttggagctgaaaccgacgtaatgtccccaccagaattggtcaaggagttcgagcaggttctatcctctaactcacggattgctcactttgtcaagatcttccctggggtttctcatggatggaccgtgagatacaaaagcgaagacgcagctgctgtgaagagcgcctaggaagccctggcggacatggttgactggtttaacaagaacctcaagtaaacctaatgaattagcggccatccttttgtaataagccagtgtcactcttcaggagtcatcacgcgagcacccacggtttatgttatggtcttagctatatagcctatagcgcatgcatctttgtctgccgcaggtctgctggtatgtgtgtgattgctcgtatcggggtctgcttgtgctgaacattgaactactgcactcaaataaaatgtggtatttac

SEQ ID NO: 56362 - protein, 224 aa, Glycine max
  peptide (1)..(224): Ceres Seq. ID no. 14306813
MASPQCCANPPALNPAAGEGKVVDSFGGIKAYVAGAQDSKAAVVLISDVYGFEAPNLRKIADKVASSGYFVVVPDFLHGDPFVPENADRPIAVWIKEHTPGKAFEEAKPVIAALKEQGASSVGAAGYCWGAKVVAELGKANEIQAAVMSHPSFVTVDDIKEVKCPISILGAETDVMSPPELVKEFEQVLSSNSRIAHFVKIFPGVSHGWTVRYKSEDAAAVKSA

SEQ ID NO: 56363 - DNA, 1396 bp, Glycine max
  misc_feature (1)..(1396): Ceres Seq. ID no. 15176057
gctttcttaccttccattctttcattctctctcttgcattacagcgacactgttcaaatctcttttctttctaaaaattaaaagcaaagaatttacgtaagagactgagattgagtgagtgaatggagtttagtaacctcactctggagatcttctccaaactggagcaaaaatggctctcacattgtaaagccaccaacaaaactcgcattctcagcattgacggcggaggaaccaccgccattgtcgccggcgaagctctcatctacctcgaggatcagatccgtgttcacacctccgatcctcacgctcaggtagccgatttcttcgacatcgtcgccggcaccggcattggcgccatccttgccgccatgatcaccgccggcgacgcctttggtaggccgctctacaccgccagggaagccgtccgtctcgtctcggaaagaaactctgaactctacaagctcaaatccggcggaatcttccgccggcgccggagattctcctccaggagcatggacaacgcgttgaagcaagtgttccagagaaaggaggaggacggacggttgttgaccttgaaggacacgtgtaaaccgctccttattccttgcttcgacctcaagagttccgcgccgttcgtgttttcgcgcgccgacgcgtccgagtctccgagcttcgacttcgagctctggaaggtgtgccgtgccacgtcagcgacgccgagccacttcaagccgttcgacttcgcttccgtcgacggcaagacctcgtgctccgccgtcgacggcggcctagtcatgaacaaccctactgcagcggccgtcacgcacgtcctccataacaagcgcgatttcccgtcggtgaacggcgtggaggatctgctcgtcctttccttggggaacggatcgtcgaacgcaaaagcgtgcgagactcgcacgtgctcaacgccgtcggtggttgacattgtgctcgacggtgtttccgagaccattgaccagatgttagggaacgccttctgctggaaccgtacggactacgtcagaatccaggctttcggtttggaaagtgaagcaatgaagaaggaagaggttctcaaagagaggggactcgagtcgttaccgtttggcgggaagcggttactgacagagactaacggaaacagaatagatagcttcgtgcaacgtcttgttgctaccggaaaaccaagcccgccgtcaagtccctgcaaggattccgccgtcaaccctctcgctaacggtcgctagtttttttattttacttaatattttagcttcttttttttttttttagattttaacggtgtaaagtgtaactagtgtttttacctagttatgccagctgtcgtagttaatagcatttaataatttaccactgc

SEQ ID NO: 56364 - protein, 380 aa, Glycine max
  peptide (1)..(380): Ceres Seq. ID no. 15176058
MEFSNLTLEIFSKLEQKWLSHCKATNKTRILSIDGGGTTAIVAGEALIYLEDQIRVHTSDPHAQVADFFDIVAGTGIGAILAAMITAGDAFGRPLYTAREAVRLVSERNSELYKLKSGGIFRRRRRFSSRSMDNALKQVFQRKEEDGRLLTLKDTCKPLLIPCFDLKSSAPFVFSRADASESPSFDFELWKVCRATSATPSHFKPFDFASVDGKTSCSAVDGGLVMNNPTAAAVTHVLHNKRDFPSVNGVEDLLVLSLGNGSSNAKACETRTCSTPSVVDIVLDGVSETIDQMLGNAFCWNRTDYVRIQAFGLESEAMKKEEVLKERGLESLPFGGKRLLTETNGNRIDSFVQRLVATGKPSPPSSPCKDSAVNPLANGR

SEQ ID NO: 56365 - protein, 297 aa, Glycine max
  peptide (1)..(297): Ceres Seq. ID no. 15176059
MITAGDAFGRPLYTAREAVRLVSERNSELYKLKSGGIFRRRRRFSSRSMDNALKQVFQRKEEDGRLLTLKDTCKPLLIPCFDLKSSAPFVFSRADASESPSFDFELWKVCRATSATPSHFKPFDFASVDGKTSCSAVDGGLVMNNPTAAAVTHVLHNKRDFPSVNGVEDLLVLSLGNGSSNAKACETRTCSTPSVVDIVLDGVSETIDQMLGNAFCWNRTDYVRIQAFGLESEAMKKEEVLKERGLESLPFGGKRLLTETNGNRIDSFVQRLVATGKPSPPSSPCKDSAVNPLANGR

SEQ ID NO: 56366 - protein, 249 aa, Glycine max
  peptide (1)..(249): Ceres Seq. ID no. 15176060
MDNALKQVFQRKEEDGRLLTLKDTCKPLLIPCFDLKSSAPFVFSRADASESPSFDFELWKVCRATSATPSHFKPFDFASVDGKTSCSAVDGGLVMNNPTAAAVTHVLHNKRDFPSVNGVEDLLVLSLGNGSSNAKACETRTCSTPSVVDIVLDGVSETIDQMLGNAFCWNRTDYVRIQAFGLESEAMKKEEVLKERGLESLPFGGKRLLTETNGNRIDSFVQRLVATGKPSPPSSPCKDSAVNPLANGR

SEQ ID NO: 56367 - DNA, 774 bp, Glycine max
  misc_feature (1)..(774): Ceres Seq. ID no. 14304167
acataatgcgttctaaatttaattccagtagacccatgcacaccagaacacttccttctgcggcgggttgcttcctcctcttacgagcctttccattcactccatcgattcggtgggtgcgggtgctgcgaaaccgagctagaccctgatcggtgtcggcacaccgccggagaacaagatgatcgtctgcgtcgccgtcgtcggtcaccagaacaatccgctgtacattcagagcttcacggaggccgacgatgctcttaagctccaccacatcgtccattgctcgctcgatgtggtcgacgagcgagtgaacaatcctaaaaagtctggaccgatgcttaatgagacgtttttgggactgctttatcctattgaaaactacaaagtatatggatatctgactaatacgaaggtgaaatttatcttggtgaccacggatctggatgttaaagatgcggatgtaaggaattttttcaggaggttccattctgcatatgtagatgccgtttcaaacccattccatgtaccaggcaaaaagataacctccagaacttttgcagaaagagtgagcacaattgtcaagtcatttggcttgagttctgctgggtgaacatctataactggtgcctagtatgatgatgcttggttgatatttggcacaacttttcttttgttattctaagctcctgccttgtagttttagcagtggtaaatgcttaggaacattttgaacagaatcctattttcaatatatcatattcaaattgaaccatc

SEQ ID NO: 56368 - protein, 143 aa, Glycine max
  peptide (1)..(143): Ceres Seq. ID no. 14304168
MIVCVAVVGHQNNPLYIQSFTEADDALKLHHIVHCSLDVVDERVNNPKKSGPMLNETFLGLLYPIENYKVYGYLTNTKVKFILVTTDLDVKDADVRNFFRRFHSAYVDAVSNPFHVPGKKITSRTFAERVSTIVKSFGLSSAG

SEQ ID NO: 56369 - protein, 91 aa, Glycine max
  peptide (1)..(91): Ceres Seq. ID no. 14304169
MLNETFLGLLYPIENYKVYGYLTNTKVKFILVTTDLDVKDADVRNFFRRFHSAYVDAVSNPFHVPGKKITSRTFAERVSTIVKSFGLSSAG

SEQ ID NO: 56370 - DNA, 818 bp, Glycine max
  misc_feature (1)..(818): Ceres Seq. ID no. 14306814
ctagattagagttgatctcggctggtgatttcactagtccgcgcaggtgccaagcccggattgggcccgctgctcccctctcgtctcccgtcgtcggaccaccggcgacccctcttccaagccgccatcgtcctcacctccggcacttcctcttctccaccactcgacccagctcagcagcagggcggcggacgggaggatgatggggagcaacaaccccggcggcgctgggggagggggagggatggccccgggcacgggggccggcggcagcgacgggcggcacgacgacgaggccgtgctcaccgagttcctctcctccctcatggactacaatcccacgatcccggacgagctcgtggagcactacctcggccgaagcggcttccactgccccgacctacgcctaacaaggctggttgctgtagctgctcaaaagttcatttcagacattgcaagtgactctcttcagcactgcaaagccagggttgcagcacctgtcaaagataacaagagcaaacaaccaaaggatagacgtcttgtattgacaatggatgatctttcaaaagccttgcgtgagcatggtgttaatctgaaacatccagagtattttgcggacagcccatcagcagggatggccccctcaacaagagaggagtagaatcgattgcttcttcaacaagagagggctagaatcaattgtttcttataagcgtacccagtgaacggtcgtgtccttcccaactttatgtaacaaaaccttataagcatgtatcgaatgtcagttcttgatgtattatggacccgtagttgccttc

SEQ ID NO: 56371 - protein, 153 aa, Glycine max
  peptide (1)..(153): Ceres Seq. ID no. 14306815
MMGSNNPGGAGGGGGMAPGTGAGGSDGRHDDEAVLTEFLSSLMDYNPTIPDELVEHYLGRSGFHCPDLRLTRLVAVAAQKFISDIASDSLQHCKARVAAPVKDNKSKQPKDRRLVLTMDDLSKALREHGVNLKHPEYFADSPSAGMAPSTREE

SEQ ID NO: 56372 - protein, 152 aa, Glycine max
  peptide (1)..(152): Ceres Seq. ID no. 14306816
MGSNNPGGAGGGGGMAPGTGAGGSDGRHDDEAVLTEFLSSLMDYNPTIPDELVEHYLGRSGFHCPDLRLTRLVAVAAQKFISDIASDSLQHCKARVAAPVKDNKSKQPKDRRLVLTMDDLSKALREHGVNLKHPEYFADSPSAGMAPSTREE

SEQ ID NO: 56373 - protein, 138 aa, Glycine max
  peptide (1)..(138): Ceres Seq. ID no. 14306817
MAPGTGAGGSDGRHDDEAVLTEFLSSLMDYNPTIPDELVEHYLGRSGFHCPDLRLTRLVAVAAQKFISDIASDSLQHCKARVAAPVKDNKSKQPKDRRLVLTMDDLSKALREHGVNLKHPEYFADSPSAGMAPSTREE

SEQ ID NO: 56374 - DNA, 1493 bp, Glycine max
  misc_feature (1)..(1493): Ceres Seq. ID no. 13582609
atttctttgggattcttgcccttgttttggtgatgccatgggagttagctgtttttgtttcctttctctctgatagaaaaagaactaagaatgggcaaatctttattgatttacttaaaaaaatatcaatatcctttaaaatatacaggcaccagagaattttttattttttatttttaatgttaaaaggtcaatgaatatgattatgagatggaagggagtaccttctttggcttcttcctaagtcctaaccttgacgaggccaattccattcattttgatgtgtctctgttttcaacaaacgttcacaacaacacatttcgccgtttcaaatcactacttaacaccggggcacatagagagagagagacatcatggtctcttctaatggactagctacgagtcagccacttttttcttttggattgatttctgatgtccaatatgctgacattcctgatggccgttcattccttggtgttccacggtattatagacacagtcttctcatattgcagagagcagttaaagaatggaacactcatcagaagcacaagtttgtgattaattttggagattttgttgatgggttttgtcccaaagatcaatctcttgatactgtaaagaaagttgttgatgaatttgagatgttcacaggaggacctgtgtatcatatgattggcaatcactgcctatacaatcttcctcgcagcaagttaccttcattactgaagatccatactcttgatggccgtgcatactatgatttctcgccagtgcctgaatatagatttgttgttctggatgcctatgacatcagtgccattggttggcctcaagatcatccaaaaacactggaggccttgaaaatcctaagggagaagaatccaaatgaagataagaacagtccaacaaatttggagggtcctgaacgaaggtttgtaatgtttaatggagctgttggaaaggaacaggtcgaatggttagatggtgttctcttggagtcaacaaacttgaaacagaaggtggttgtctgctgccatctgcctctacatcctggtgcggcaactgaagagacactgttgtggaattacgatgaagtaatgaatttgatacacagatacaattgcgttaaggtctgtcttgcagggcatgatcataaaggcggatactctattgattctcatgggatacaccatagagtttttgaagctgctttggaatgccctcctggtacggatgcatttggatacattgatgtctatgatgacaggatatcacttgttggaactgacagaatgaaaagtacagagatggattttactcccccaagttaatttgtatgacaggatgtcttcacgtttgtaaaaatacctattattttttcactaatgtttgaaatagtacctatcatcttgttctagtcctacctacagggaagtttgtatttaaagttggaataacttaaattgagttggtactgttcatgaatc

SEQ ID NO: 56375 - protein, 320 aa, Glycine max
  peptide (1)..(320): Ceres Seq. ID no. 13582610
MVSSNGLATSQPLFSFGLISDVQYADIPDGRSFLGVPRYYRHSLLILQRAVKEWNTHQKHKFVINFGDFVDGFCPKDQSLDTVKKVVDEFEMFTGGPVYHMIGNHCLYNLPRSKLPSLLKIHTLDGRAYYDFSPVPEYRFVVLDAYDISAIGWPQDHPKTLEALKILREKNPNEDKNSPTNLEGPERRFVMFNGAVGKEQVEWLDGVLLESTNLKQKVVVCCHLPLHPGAATEETLLWNYDEVMNLIHRYNCVKVCLAGHDHKGGYSIDSHGIHHRVFEAALECPPGTDAFGYIDVYDDRISLVGTDRMKSTEMDFTPPS

SEQ ID NO: 56376 - protein, 229 aa, Glycine max
  peptide (1)..(229): Ceres Seq. ID no. 13582611
MFTGGPVYHMIGNHCLYNLPRSKLPSLLKIHTLDGRAYYDFSPVPEYRFVVLDAYDISAIGWPQDHPKTLEALKILREKNPNEDKNSPTNLEGPERRFVMFNGAVGKEQVEWLDGVLLESTNLKQKVVVCCHLPLHPGAATEETLLWNYDEVMNLIHRYNCVKVCLAGHDHKGGYSIDSHGIHHRVFEAALECPPGTDAFGYIDVYDDRISLVGTDRMKSTEMDFTPPS

SEQ ID NO: 56377 - protein, 220 aa, Glycine max
  peptide (1)..(220): Ceres Seq. ID no. 13582612
MIGNHCLYNLPRSKLPSLLKIHTLDGRAYYDFSPVPEYRFVVLDAYDISAIGWPQDHPKTLEALKILREKNPNEDKNSPTNLEGPERRFVMFNGAVGKEQVEWLDGVLLESTNLKQKVVVCCHLPLHPGAATEETLLWNYDEVMNLIHRYNCVKVCLAGHDHKGGYSIDSHGIHHRVFEAALECPPGTDAFGYIDVYDDRISLVGTDRMKSTEMDFTPPS

SEQ ID NO: 56378 - DNA, 1093 bp, Glycine max
  misc_feature (1)..(1093): Ceres Seq. ID no. 14304124
acgattacgaagcgtgcccaactccatctgcttccttttcctcttccccccgtccccgacgacccccggccgaaaccctagcgaggcgcgatgttcgggtaccggaaggcgccggacctcgacctcgaggcgggcggctcggcggcgctctacccggggatgacggaggacgtggagctgcgctgggccttcatccgcaagatctacgtcatcctctcggtccagctcgccatgaccgccgccgtcgcggggttcgtcgtcaaggtccccgccgtctccgagttcttcgtctcctccaacgctggcctgggcctctacatcttcctcctcgtcctgcccctcatcgtgctctgccccctgcgctactaccaccagaagcaccccgtcaacctcatcctgctcggcgtcttcaccgtctccatcagcttcgccgtcggcatgacgtgcgccttcaccagcggaaaaatcatcttggaagctgcaattctgacagcagtggtggtgatcagcttgactgcctacactttctgggctgcaaagataggccatgatttcaacttcctgggcccgttcctgtttggagctcttatggtgctgctggtgttctcacttatccagatctttttcccactgggcaagatctccaccatgatatatggggccgtggcgtcgatcatcttctgtggctacatcatcttcgacacggacaacatcatcaagcgccacacgtatgacgagtacatctgggctgccgtgtccctctacctcgacatcatcaacctgttcctgaatctgatgcaaattctgcgggcagctgatagctgagcgcaccttgcccaacatcgcatgatttaagtccactagcttgtgcatatcagaaaattcatgaatgcccgcagatacctgtaggcatgtacaatcgttatcagtaaattctgccgtcctagactccatcacatgtcttgtttcctagcttcctggagtatgcaatgtgtgattgaaccaagctgcacgatgaaaatatactcactggtgctttgtgattgcaaggcacgtgaatttaattccctgctacgaaatgttccattttaat

SEQ ID NO: 56379 - protein, 244 aa, Glycine max
  peptide (1)..(244): Ceres Seq. ID no. 14304125
MFGYRKAPDLDLEAGGSAALYPGMTEDVELRWAFIRKIYVILSVQLAMTAAVAGFVVKVPAVSEFFVSSNAGLGLYIFLLVLPLIVLCPLRYYHQKHPVNLILLGVFTVSISFAVGMTCAFTSGKIILEAAILTAVVVISLTAYTFWAAKIGHDFNFLGPFLFGALMVLLVFSLIQIFFPLGKISTMIYGAVASIIFCGYIIFDTDNIIKRHTYDEYIWAAVSLYLDIINLFLNLMQILRAADS

SEQ ID NO: 56380 - protein, 221 aa, Glycine max
  peptide (1)..(221): Ceres Seq. ID no. 14304126
MTEDVELRWAFIRKIYVILSVQLAMTAAVAGFVVKVPAVSEFFVSSNAGLGLYIFLLVLPLIVLCPLRYYHQKHPVNLILLGVFTVSISFAVGMTCAFTSGKIILEAAILTAVVVISLTAYTFWAAKIGHDFNFLGPFLFGALMVLLVFSLIQIFFPLGKISTMIYGAVASIIFCGYIIFDTDNIIKRHTYDEYIWAAVSLYLDIINLFLNLMQILRAADS

SEQ ID NO: 56381 - protein, 197 aa, Glycine max
  peptide (1)..(197): Ceres Seq. ID no. 14304127
MTAAVAGFVVKVPAVSEFFVSSNAGLGLYIFLLVLPLIVLCPLRYYHQKHPVNLILLGVFTVSISFAVGMTCAFTSGKIILEAAILTAVVVISLTAYTFWAAKIGHDFNFLGPFLFGALMVLLVFSLIQIFFPLGKISTMIYGAVASIIFCGYIIFDTDNIIKRHTYDEYIWAAVSLYLDIINLFLNLMQILRAADS

SEQ ID NO: 56382 - DNA, 1476 bp, Glycine max
  misc_feature (1)..(1476): Ceres Seq. ID no. 13582342
acatcttggccaactgggtcgcttccaataccttcagattttggtaggatttcgtgcttttgcataattcgttgagtttctgaagctatggaggcttataagagatgggtgaggcagaacaaagagtttgtgcactccatggagtctttggccaatggattgacatagcttcttcctgaacggttttctgaatcagagattggaccagaagcagtaacaactattctgggaatcatcacagctctcaatgaacatataattgatacagctcctaagcaaaatattacaggctctgtcgagccttattcatttccttatccattatgcttatctgcattaaaggatttggaaacattagttgaagttgtggcacaacaatactatggtgatgataagaaatggaatttccttgccattactgaagcaaccaaggtactggttcggttatctttgtttcggaagagtggatataagatgctgctacaaggaggggaaacacctaatgatgaggagtattcagatagttttacttcacaacatcatatgggcttaaagcccgatgtgcatcataggcctggttatatgaaaaacaatcttggtgcaaaaccaatgaatcaggaaggaagagcattatctgctttggttagatttggagaaaaagcaaaggggtcagatccagtgtggttacgcagggttgaacaccaacaagcaactatggagcctacaacttcaagggtggatagaccaacacttctcaccatattgtctgaaaggggtctttgtggggctctgttttttattggagaagttctacttattagtagaccacttatttatgttttatttattcgaaaatatggtattcggtcatggaccccttggttcctttcgctggctattgattgcataggaaacagtattctttcactcattacatcgtcagtggctggtgggaaggaccgaatgtttcatctgtctgccctagaaaaggatgaggttaaacggcgaaagctgctatttgttctttacctaatgagagatccatttttcagcaagtatactaggcaaagacttgaaagcacggagaaagttttggagcctattcctgtcataggatttctcacagcaaaacttgttgaacttataattggagctcaaacacgatacacttacatgtcaggatcgtgaataaaatccagaacaaatgcctaattgccctccaagattttggaaagatagatattcttactcttcttccacactacctgctgttccaaacttttcaaatgatgaagaggtatcaaaccagctactattatgatttaaaaataacaaaccattgcaagcttgaacttttcttttgcttgacaattccaaacatagaagatgttaagctgcaacccatgtgtgagacaaattgtttgcaaggatagctacactatcaacaactcagtataaattggaatatttattggg

SEQ ID NO: 56383 - protein, 237 aa, Glycine max
  peptide (1)..(237): Ceres Seq. ID no. 13582343
MLLQGGETPNDEEYSDSFTSQHHMGLKPDVHHRPGYMKNNLGAKPMNQEGRALSALVRFGEKAKGSDPVWLRRVEHQQATMEPTTSRVDRPTLLTILSERGLCGALFFIGEVLLISRPLIYVLFIRKYGIRSWTPWFLSLAIDCIGNSILSLITSSVAGGKDRMFHLSALEKDEVKRRKLLFVLYLMRDPFFSKYTRQRLESTEKVLEPIPVIGFLTAKLVELIIGAQTRYTYMSGS

SEQ ID NO: 56384 - protein, 214 aa, Glycine max
  peptide (1)..(214): Ceres Seq. ID no. 13582344
MGLKPDVHHRPGYMKNNLGAKPMNQEGRALSALVRFGEKAKGSDPVWLRRVEHQQATMEPTTSRVDRPTLLTILSERGLCGALFFIGEVLLISRPLIYVLFIRKYGIRSWTPWFLSLAIDCIGNSILSLITSSVAGGKDRMFHLSALEKDEVKRRKLLFVLYLMRDPFFSKYTRQRLESTEKVLEPIPVIGFLTAKLVELIIGAQTRYTYMSGS

SEQ ID NO: 56385 - protein, 201 aa, Glycine max
  peptide (1)..(201): Ceres Seq. ID no. 13582345
MKNNLGAKPMNQEGRALSALVRFGEKAKGSDPVWLRRVEHQQATMEPTTSRVDRPTLLTILSERGLCGALFFIGEVLLISRPLIYVLFIRKYGIRSWTPWFLSLAIDCIGNSILSLITSSVAGGKDRMFHLSALEKDEVKRRKLLFVLYLMRDPFFSKYTRQRLESTEKVLEPIPVIGFLTAKLVELIIGAQTRYTYMSGS

SEQ ID NO: 56386 - DNA, 1747 bp, Glycine max
  misc_feature (1)..(1747): Ceres Seq. ID no. 12583190
cactattattgaaatatagaagcctctttccttcttcttctttttcttcttccttcatagcaaaagccatggccacgagacccgagagtgaaaaagaccctccacaaccaccttcacgtggctttctggccacagtacaagaaatcacaagaatctatagttcactgccacctagaccttctattgaagaagtagaagctgccacgtccactgtggacaccctcaacaacgaggagcaaatcaaactcaacgaaatctcaatgcaacaacaacctcctcacgatgatgtccctcaagacctcttctctgtcctgcaacaactcaaaaagactatggttctgttccacactcatcaacagaggagagatgcgctttatcttcttgagcttgaaaatatgtttcaaaccttcggtgatctcattcagagggcttctgaattagtttctggagatacccagaagcaaaaacttcccactatacccgaggaacacgcggtgatcactgaggaaagtgaaactctggtgaaggaagaggaaggaagacacaagaatgttttccatgtggtaaagccttccttgtctgcaggggatggaagcactgagaaattaagtctaatgaaagtggctactgttatagaaagttgtgctggtagtggagctacaatccttgagcttagagggaaattggtggatcagatggagtggttgcctgtgtcaattgggaaattatctgatgtcactgaaatggacctatctgaaaacagactcatggctcttccaacaaccattgtgggtcttaaggccttaacaaagcttgatcttcactcaaaccaacttataaaccttcctcactcatttggtgaattgataaaccttgttgatctcgacctccacgccaacaaattgaaatcacttcctgctacttttggaaacttgacaaacctcactgatcttgatttgagctcaaatgggttcacagatttaccagagacaattgggaatttgagcagcttgaagcgattgaatgttgaaacgaacgagcttgaggaactgccttacacaattggcaattgctcatcactatccgtgctaaagttggatttgaatcagctcaaggcccttcctgaggcaattgggaagcttgaatgcttggagattctcactttgcactataatagagttaagaggttgccttccacaatggataatctatgcaatttgaaggaacttgatgttagctttaatgaacttgagtttgtaccggagagcctgtgttttgcaactaatttgaagaaattgaacttgggaaagaacttcgcggacctaagagccttgccagcatcaattggaaatcttgaaatgcttgaggagttggacataagtgatgatcaaataaaagctctaccagagtctttcaggttcttgtcaaagttgagagtttttagggctgatgagaccccccttgatttgccaccaagagaattggtcaagttgggttctcaggaagttgtgcagtatatggctgattttgtcaccaagagggatgcaaaacttgtgccatcaaagaagaaaaagaaggggttttggttctggttttgctccatattttgcccccaactgaaatgatacttggacaaaatctctgttaacttatgtttcttgtggttgtatgtcgtttatccgttgcatatgtttggaaaaccttgtttttcctaataaaatgatctgtaatcttggatttgccttgt

SEQ ID NO: 56387 - protein, 540 aa, Glycine max
  peptide (1)..(540): Ceres Seq. ID no. 12583191
LLLKYRSLFPSSSFSSSFIAKAMATRPESEKDPPQPPSRGFLATVQEITRIYSSLPPRPSIEEVEAATSTVDTLNNEEQIKLNEISMQQQPPHDDVPQDLFSVLQQLKKTMVLFHTHQQRRDALYLLELENMFQTFGDLIQRASELVSGDTQKQKLPTIPEEHAVITEESETLVKEEEGRHKNVFHVVKPSLSAGDGSTEKLSLMKVATVIESCAGSGATILELRGKLVDQMEWLPVSIGKLSDVTEMDLSENRLMALPTTIVGLKALTKLDLHSNQLINLPHSFGELINLVDLDLHANKLKSLPATFGNLTNLTDLDLSSNGFTDLPETIGNLSSLKRLNVETNELEELPYTIGNCSSLSVLKLDLNQLKALPEAIGKLECLEILTLHYNRVKRLPSTMDNLCNLKELDVSFNELEFVPESLCFATNLKKLNLGKNFADLRALPASIGNLEMLEELDISDDQIKALPESFRFLSKLRVFRADETPLDLPPRELVKLGSQEVVQYMADFVTKRDAKLVPSKKKKKGFWFWFCSIFCPQLK

SEQ ID NO: 56388 - protein, 518 aa, Glycine max
  peptide (1)..(518): Ceres Seq. ID no. 12583192
MATRPESEKDPPQPPSRGFLATVQEITRIYSSLPPRPSIEEVEAATSTVDTLNNEEQIKLNEISMQQQPPHDDVPQDLFSVLQQLKKTMVLFHTHQQRRDALYLLELENMFQTFGDLIQRASELVSGDTQKQKLPTIPEEHAVITEESETLVKEEEGRHKNVFHVVKPSLSAGDGSTEKLSLMKVATVIESCAGSGATILELRGKLVDQMEWLPVSIGKLSDVTEMDLSENRLMALPTTIVGLKALTKLDLHSNQLINLPHSFGELINLVDLDLHANKLKSLPATFGNLTNLTDLDLSSNGFTDLPETIGNLSSLKRLNVETNELEELPYTIGNCSSLSVLKLDLNQLKALPEAIGKLECLEILTLHYNRVKRLPSTMDNLCNLKELDVSFNELEFVPESLCFATNLKKLNLGKNFADLRALPASIGNLEMLEELDISDDQIKALPESFRFLSKLRVFRADETPLDLPPRELVKLGSQEVVQYMADFVTKRDAKLVPSKKKKKGFWFWFCSIFCPQLK

SEQ ID NO: 56389 - protein, 454 aa, Glycine max
  peptide (1)..(454): Ceres Seq. ID no. 12583193
MQQQPPHDDVPQDLFSVLQQLKKTMVLFHTHQQRRDALYLLELENMFQTFGDLIQRASELVSGDTQKQKLPTIPEEHAVITEESETLVKEEEGRHKNVFHVVKPSLSAGDGSTEKLSLMKVATVIESCAGSGATILELRGKLVDQMEWLPVSIGKLSDVTEMDLSENRLMALPTTIVGLKALTKLDLHSNQLINLPHSFGELINLVDLDLHANKLKSLPATFGNLTNLTDLDLSSNGFTDLPETIGNLSSLKRLNVETNELEELPYTIGNCSSLSVLKLDLNQLKALPEAIGKLECLEILTLHYNRVKRLPSTMDNLCNLKELDVSFNELEFVPESLCFATNLKKLNLGKNFADLRALPASIGNLEMLEELDISDDQIKALPESFRFLSKLRVFRADETPLDLPPRELVKLGSQEVVQYMADFVTKRDAKLVPSKKKKKGFWFWFCSIFCPQLK

SEQ ID NO: 56390 - DNA, 1238 bp, Glycine max
  misc_feature (1)..(1238): Ceres Seq. ID no. 13582153
ctacaacaccagatgttctagataaaaacgtagaaaacaatttacaggagttctggcaggctacctatacaaaatcatcttcagtgactgaggtcccaaatgctgttgcaaatacaaaattggatattgctgatcttgtaaaacaacagagaaattcaccaaagtcaatgtccattccccgcagagcaccagaagttcctcttttggatatgacaaataatagcactatgttgaattgcatttctcgagacaccacagagcaccaatcccgtggcttatctgtccaactgccaccacttcaacaaacagactttgcatataagaatgacatgtctaagccagccaattcacatgaagcgaaaatctctcaagcactgcctgacaaacagatgtggtcatctcagattcgagttataaggctaagtgatggcttacctgtccaacagccaccagagcaacaaacagactttgcatataacaatggaacatctaagccagtcgaatcacaggaagggaagatctctcaagcactgcccaacaaacagatacggccatctcagcttgaggttatagagctatgtgatgacttatctgtccaacagcctccagagcaacaaacaaacttcacatataagaatggcatgtctaagccagccgaatcacaggaagtgaagatctctcaagcactgcccaacaaacagatactgcaatcacagctcgatgttatagagctaagtgatggcttacctgttcagcagctgccagagcaacaaataaattttgcatataagaatgacatgtctaagccagctgaattgcatgaagtgaagatctctcaagcacagtccaacaaacaaatacagccatctcagattcaagttatagagctaagtgatgacgatgatgaagaaaatgaaaaaccaagtactgcaaaactggttccttctgtgcaatcggataccttgatgtggcattacagagatcccatgggaaatgtacaaggaccattttccttaatttctctgaaacgttggagtgatgctggctactttccccgacatttcaaggtctggaagtcaggtaataggcaggatgaagatgtattactggtgaacatactagcccaatttttccccctttagtcaaattgcttattgatgcacattgtaaaatccaggtcaataattgtgttgtgattaccaggtaactgcaattgtaactagaaactcatgctctct

SEQ ID NO: 56391 - protein, 379 aa, Glycine max
  peptide (1)..(379): Ceres Seq. ID no. 13582154
TTPDVLDKNVENNLQEFWQATYTKSSSVTEVPNAVANTKLDIADLVKQQRNSPKSMSIPRRAPEVPLLDMTNNSTMLNCISRDTTEHQSRGLSVQLPPLQQTDFAYKNDMSKPANSHEAKISQALPDKQMWSSQIRVIRLSDGLPVQQPPEQQTDFAYNNGTSKPVESQEGKISQALPNKQIRPSQLEVIELCDDLSVQQPPEQQTNFTYKNGMSKPAESQEVKISQALPNKQILQSQLDVIELSDGLPVQQLPEQQINFAYKNDMSKPAELHEVKISQAQSNKQIQPSQIQVIELSDDDDEENEKPSTAKLVPSVQSDTLMWHYRDPMGNVQGPFSLISLKRWSDAGYFPRHFKVWKSGNRQDEDVLLVNILAQFFPL

SEQ ID NO: 56392 - protein, 324 aa, Glycine max
  peptide (1)..(324): Ceres Seq. ID no. 13582155
MSIPRRAPEVPLLDMTNNSTMLNCISRDTTEHQSRGLSVQLPPLQQTDFAYKNDMSKPANSHEAKISQALPDKQMWSSQIRVIRLSDGLPVQQPPEQQTDFAYNNGTSKPVESQEGKISQALPNKQIRPSQLEVIELCDDLSVQQPPEQQTNFTYKNGMSKPAESQEVKISQALPNKQILQSQLDVIELSDGLPVQQLPEQQINFAYKNDMSKPAELHEVKISQAQSNKQIQPSQIQVIELSDDDDEENEKPSTAKLVPSVQSDTLMWHYRDPMGNVQGPFSLISLKRWSDAGYFPRHFKVWKSGNRQDEDVLLVNILAQFFPL

SEQ ID NO: 56393 - protein, 310 aa, Glycine max
  peptide (1)..(310): Ceres Seq. ID no. 13582156
MTNNSTMLNCISRDTTEHQSRGLSVQLPPLQQTDFAYKNDMSKPANSHEAKISQALPDKQMWSSQIRVIRLSDGLPVQQPPEQQTDFAYNNGTSKPVESQEGKISQALPNKQIRPSQLEVIELCDDLSVQQPPEQQTNFTYKNGMSKPAESQEVKISQALPNKQILQSQLDVIELSDGLPVQQLPEQQINFAYKNDMSKPAELHEVKISQAQSNKQIQPSQIQVIELSDDDDEENEKPSTAKLVPSVQSDTLMWHYRDPMGNVQGPFSLISLKRWSDAGYFPRHFKVWKSGNRQDEDVLLVNILAQFFPL

SEQ ID NO: 56394 - DNA, 766 bp, Glycine max
  misc_feature (1)..(766): Ceres Seq. ID no. 14304110
atgatgctgctagtgctgagtgtgtgtatctgaggaaagaaagagaccattcttatttgtctggtttggttcttgagtaatttttttttcttcttttcttgagtaacttgattcatgtgtcaaagattctgatcattggtattattagctagacatagtgtagtgttgttgagtggggtttgtagacaatgaggagaggtagagggaaagggaagaagcagagtgcatctgctcgggaagatcatggaagcggtgaagaggatgaaaagattccagcttacaggagaagaggaaggccacagaagcctatgaaagatgattttgaagaggaggaagatgaagaagaagagttggtagagaagatggaggaagaagaagaagaggatgattcagtaacaagtaaaaaagaagaaaacgagaggaagaggaagatgattaatggaagcaatacggatgcaaatgaaaaagagaatgggttaggatcaaaatcaagtagagatggttccagttccaccaagtccacatctactggtttcagacagaatgggagcaggaggaaaagcaagcctagacgagctgctgaagctgttgtggaatgtaatggagtttgagaaaactttatgatcaagaactttccaagacacatgatgaaacattaatttgaggtttcttcttcgtttaggttatcttacaagtttctttgtaagttgagaactttggctatcttttggtgtatcaatctgcattgttttttttttcatctctc

SEQ ID NO: 56395 - protein, 140 aa, Glycine max
  peptide (1)..(140): Ceres Seq. ID no. 14304111
MRRGRGKGKKQSASAREDHGSGEEDEKIPAYRRRGRPQKPMKDDFEEEEDEEEELVEKMEEEEEEDDSVTSKKEENERKRKMINGSNTDANEKENGLGSKSSRDGSSSTKSTSTGFRQNGSRRKSKPRRAAEAVVECNGV

SEQ ID NO: 56396 - protein, 100 aa, Glycine max
  peptide (1)..(100): Ceres Seq. ID no. 14304112
MKDDFEEEEDEEEELVEKMEEEEEEDDSVTSKKEENERKRKMINGSNTDANEKENGLGSKSSRDGSSSTKSTSTGFRQNGSRRKSKPRRAAEAVVECNGV

SEQ ID NO: 56397 - protein, 82 aa, Glycine max
  peptide (1)..(82): Ceres Seq. ID no. 14304113
MEEEEEEDDSVTSKKEENERKRKMINGSNTDANEKENGLGSKSSRDGSSSTKSTSTGFRQNGSRRKSKPRRAAEAVVECNGV

SEQ ID NO: 56398 - DNA, 1353 bp, Glycine max
  misc_feature (1)..(1353): Ceres Seq. ID no. 13595341
atttaaagacctttcctttaccaaactttgtctctttctacttcagccatctcttcttctgcctcatcctgcgccagtggaattttgagcctttccctcgaaatcaatgcatgtaaagactcaagctttgatgccgcatattggtttttcatttgcacattcatgtgggtcattgtgtgcttctcttagtttcagcatagtggcaaaatggtctgtgtttgtttgatttgagggtagtagctttgtgttctttttcatattgaggcatgaattttcttgtggggtagattttgatcttcaaaccttaagtgatagcaccccatttggcaaaagtgaggatttcagtgaattgtagtgaagtgggcattttttgttttttgaaaaaggcaaaaggatgattcagttgttgttcttggtgatttttgttgagggggttctggcatttcttttgttggtgaagataggacctttgagagatcttgtgataaagagcctggatcagttgaagatggggaagggtccagctacagtgaaaaccattgctggtaccatgtctgtgattcttctttcaagtctcatgagcattatcaagatccagaacaaaggtgctaaactcggtactatgtcgcccatggatcaagttctatggagatctcacttgctcgaggcttcactcatgggttttacattattccttggattcctaattgatcgtacccaccattatcttcaaaaacttattaatttaaggagtaatgcgggagcttcaaaagaagaattggaaaaccttaaaaaagaaactgtccaacttaaagaaaaggatgagaaagcatccaaggagattaaacagctaaaggaagaactttcatgtctgtccaaaagtttggaaaagattaaatcggaatctgaagagaaggataagaaagtcgagaccgccgaagcacatgttgcttccctccaaaagcaagctgcagatctactacttgaatatgatagactcttagaagaaaaccaaaaccttcaggctcaaacactgggacataagagttgaggaatgactgagatgcattgataaacaaagttttggggtgagacttcattaggaccatccctagttttgttgcaaaatctttattttggaaaaaaaagagtacttttttggtccttttcgatattgcaacattgaccaaaagaactctctgcttaagtttataagttttacagttcattttcagtttgttcaaaattttgttattggatcgtcgctttacaattgccccatctagtttttgtttttgccccttccttttattgtttggatgaatatattttagttgaaggattattggcggg

SEQ ID NO: 56399 - protein, 218 aa, Glycine max
  peptide (1)..(218): Ceres Seq. ID no. 15221545
MIQLLFLVIFVEGVLAFLLLVKIGPLRDLVIKSLDQLKMGKGPATVKTIAGTMSVILLSSLMSIIKIQNKGAKLGTMSPMDQVLWRSHLLEASLMGFTLFLGFLIDRTHHYLQKLINLRSNAGASKEELENLKKETVQLKEKDEKASKEIKQLKEELSCLSKSLEKIKSESEEKDKKVETAEAHVASLQKQAADLLLEYDRLLEENQNLQAQTLGHKS

SEQ ID NO: 56400 - protein, 180 aa, Glycine max
  peptide (1)..(180): Ceres Seq. ID no. 15221546
MGKGPATVKTIAGTMSVILLSSLMSIIKIQNKGAKLGTMSPMDQVLWRSHLLEASLMGFTLFLGFLIDRTHHYLQKLINLRSNAGASKEELENLKKETVQLKEKDEKASKEIKQLKEELSCLSKSLEKIKSESEEKDKKVETAEAHVASLQKQAADLLLEYDRLLEENQNLQAQTLGHKS

SEQ ID NO: 56401 - protein, 166 aa, Glycine max
  peptide (1)..(166): Ceres Seq. ID no. 15221547
MSVILLSSLMSIIKIQNKGAKLGTMSPMDQVLWRSHLLEASLMGFTLFLGFLIDRTHHYLQKLINLRSNAGASKEELENLKKETVQLKEKDEKASKEIKQLKEELSCLSKSLEKIKSESEEKDKKVETAEAHVASLQKQAADLLLEYDRLLEENQNLQAQTLGHKS

SEQ ID NO: 56402 - DNA, 1197 bp, Glycine max
  misc_feature (1)..(1197): Ceres Seq. ID no. 13595857
gactgggcgcagtgcacgctattccgagcatatgaacgacgtcggtttgagcctagcgcagcatttcaatttcgaaggaaattctaacctggttccgttggtgctgagtttcaggcttgcagcagccatagaagtgtaggagttggagagagagtgatcaattcgatgccttcacttcgcatcctaaacaaaatctgttattcgataaaccagaattgcaaatgccagtaccgaacaatctcctccacggcacagttgcagggttcatggatggaaaaggtcaaaaacgtcatcaccggccaaaacagcacgccccagtcccagggagacgcctccgaatcattcagtctgctccgttttgcggatgaaatgaagaatgcaaagagaataggcgcgtttaaggagttcatggttgggcgaagcagcgaagccactttttcctccgccttcgacaaatacgaagccataattcgatttctcggtgctttggaccccactggagagaatctccagacaactcagaaacaagaagcggcaaaacattgtaattgcacgattgctgatgtggagaatgcacttgccaagtttacttgggccaaggaagcacagaagaagttagagaagctaaaagaagaaggaaaaccaatgccaaaaagctttgctgaagtccaaaagctagttggttcaactccattggatcttgctaggtctaatttggcccaagctggacaaattagcaggaatgcactttgtccatgtggttcaaagaagagatacaaaaggtgctgcggaaaggattgaaggaattcagagattaaatgttaaactgccaggaagcctgatctgttatggtggtttcatacctacacatggctaaattgatctgcagttgtaccttattttattcagttcagatcaagttggccaatgcgctagactgcaaacatgcccctaagctgattttaggatgatatattttgcccaacagttgcgtgattttctttagctttctaatttttgaggtgatcataggcagaaccaaacagaatatttttgttttgttcaagagtagttagttagttctcttctttcccttgctcctgcctaattaggcaagggaataagaaataattgtagtctcgttctaaaagtcaaaatgcttaaactcattttttactgatttatgtcatcatcatc

SEQ ID NO: 56403 - protein, 211 aa, Glycine max
  peptide (1)..(211): Ceres Seq. ID no. 13595858
MPSLRILNKICYSINQNCKCQYRTISSTAQLQGSWMEKVKNVITGQNSTPQSQGDASESFSLLRFADEMKNAKRIGAFKEFMVGRSSEATFSSAFDKYEAIIRFLGALDPTGENLQTTQKQEAAKHCNCTIADVENALAKFTWAKEAQKKLEKLKEEGKPMPKSFAEVQKLVGSTPLDLARSNLAQAGQISRNALCPCGSKKRYKRCCGKD

SEQ ID NO: 56404 - protein, 176 aa, Glycine max
  peptide (1)..(176): Ceres Seq. ID no. 13595859
MEKVKNVITGQNSTPQSQGDASESFSLLRFADEMKNAKRIGAFKEFMVGRSSEATFSSAFDKYEAIIRFLGALDPTGENLQTTQKQEAAKHCNCTIADVENALAKFTWAKEAQKKLEKLKEEGKPMPKSFAEVQKLVGSTPLDLARSNLAQAGQISRNALCPCGSKKRYKRCCGKD

SEQ ID NO: 56405 - protein, 143 aa, Glycine max
  peptide (1)..(143): Ceres Seq. ID no. 13595860
MKNAKRIGAFKEFMVGRSSEATFSSAFDKYEAIIRFLGALDPTGENLQTTQKQEAAKHCNCTIADVENALAKFTWAKEAQKKLEKLKEEGKPMPKSFAEVQKLVGSTPLDLARSNLAQAGQISRNALCPCGSKKRYKRCCGKD

SEQ ID NO: 56406 - DNA, 651 bp, Glycine max
  misc_feature (1)..(651): Ceres Seq. ID no. 13595362
cccactttattgtgcttaawcttgctctctctatcccatatactcttaccagctaggtagctaagctgccccttgcaaccaacaatggcgccttcaccgagctggagtgcagctgtgttggccgtgctgctggtggtcgtcctgctattggggatgggatgcccggcggccgctgcgacgccatgtacggactgcacagcgcagtgcaactcaacatgcagcgccgccggggcaaggccgtgcggcgcccactgcagcccggcgccgggatgcccgagctgcctcgccgcgtaccacgccaagtgcttgccgtattgcgtgagcgcgtgcaaagcccaatcacctgctgggtacgactgccaaagcgcgtgcaacaagacacagctgtgcagcagctcgtgcagcgccgtctgcggcgagtcgccgacgtgcaaggcctgccaggacaactactaccgtgggtgcatatccagatgcacctcctactgcaactcccactgcgtctaggtctagcaacgactttcgacactctacggagtacgttttcacgtaaaaaaggattcagcgcctcaccaaggaaaaacgtgtcactgtaattttcttcatccaataatcataggagtgctcatatatgtatctgcctccttttcc

SEQ ID NO: 56407 - protein, 145 aa, Glycine max
  peptide (1)..(145): Ceres Seq. ID no. 15221554
MPGGRCDAMYGLHSAVQLNMQRRRGKAVRRPLQPGAGMPELPRRVPRQVLAVLRERVQSPITCWVRLPKRVQQDTAVQQLVQRRLRRVADVQGLPGQLLPWVHIQMHLLLQLPLRLGLATTFDTLRSTFSRKKGFSASPRKNVSL

SEQ ID NO: 56408 - protein, 140 aa, Glycine max
  peptide (1)..(140): Ceres Seq. ID no. 15221555
MAPSPSWSAAVLAVLLVVVLLLGMGCPAAAATPCTDCTAQCNSTCSAAGARPCGAHCSPAPGCPSCLAAYHAKCLPYCVSACKAQSPAGYDCQSACNKTQLCSSSCSAVCGESPTCKACQDNYYRGCISRCTSYCNSHCV

SEQ ID NO: 56409 - protein, 137 aa, Glycine max
  peptide (1)..(137): Ceres Seq. ID no. 15221556
MYGLHSAVQLNMQRRRGKAVRRPLQPGAGMPELPRRVPRQVLAVLRERVQSPITCWVRLPKRVQQDTAVQQLVQRRLRRVADVQGLPGQLLPWVHIQMHLLLQLPLRLGLATTFDTLRSTFSRKKGFSASPRKNVSL

SEQ ID NO: 56410 - DNA, 1256 bp, Glycine max
  misc_feature (1)..(1256): Ceres Seq. ID no. 12583421
aaaaaaaatcatgagccgcgtcaaatcacatcactgccaattcgaaatttccaatttcacagaacttttgttgcattgatctccgattttgttttccaacgcttcttcgtattctcaccaatctcaaatggcttctatctcccttcttctcgccctgttcgtgttcttcctaattgccacttctcttaccgaaagtaggaaggaattaaggaacaagcaggaaactgcattacagatgttagagcgctcaattcatttttccaacagaattaatccatcacgtgttgtccaaatctcttggcaaccaagggtttttctatacaaagggtttttgtcggacaaggagtgtgactaccttgtttctttggcatatgctgtgaaagaaaaatcctcagggaatggtggcctttcagagggggttgaaacttccttggatatggaagatgatattcttgcaaggattgaagaaagactttcagtttgggctttccttcctaaagagtacagcaagcctttgcaggtcatgcattatgggcctgagcagaatggtcggaacttagattattttacaaacaaaacccaattagaattaagtggacctttaatggcaacaattattttatatctctcaaatgatgttactcaagggggtcaaattctttttcctgaatcattgcctgggagtagcagctggtcaagttgtagtaatagcagcaatattctccaaccagtaaaagggaatgcaattctgtttttctctcttcacccaagtgcttctcctgacaagagtagcttccatgctagatgccctgtccttgagggtgatatgtggtctgcaattaaatacttctatgcaaaaccaattagtagaggtaaagtctcagccacattagatggtggtgaatgcactgatgaagatgacagttgtcccgcttgggcagccgtgggagaatgtcaacgaaaccctgtgttcatgattggatctcctgattattatggtacatgtaggaaaagttgtaatgcatgctgatcacaagttgattttacttttacactttttgtttatataattattctccctagagaaatacatgtggaattatcaattgctttttttaaaaatttcctcaagttcttttgagctgcacatcaaaaggtgctggaaatagtgtataggaaattagaacttgacacgatttagatttcaatttgatgtaatttttttgaatattcttttagtgatgtattgagtgttg

SEQ ID NO: 56411 - protein, 300 aa, Glycine max
  peptide (1)..(300): Ceres Seq. ID no. 12583422
MASISLLLALFVFFLIATSLTESRKELRNKQETALQMLERSIHFSNRINPSRVVQISWQPRVFLYKGFLSDKECDYLVSLAYAVKEKSSGNGGLSEGVETSLDMEDDILARIEERLSVWAFLPKEYSKPLQVMHYGPEQNGRNLDYFTNKTQLELSGPLMATIILYLSNDVTQGGQILFPESLPGSSSWSSCSNSSNILQPVKGNAILFFSLHPSASPDKSSFHARCPVLEGDMWSAIKYFYAKPISRGKVSATLDGGECTDEDDSCPAWAAVGECQRNPVFMIGSPDYYGTCRKSCNAC

SEQ ID NO: 56412 - protein, 264 aa, Glycine max
  peptide (1)..(264): Ceres Seq. ID no. 12583423
MLERSIHFSNRINPSRVVQISWQPRVFLYKGFLSDKECDYLVSLAYAVKEKSSGNGGLSEGVETSLDMEDDILARIEERLSVWAFLPKEYSKPLQVMHYGPEQNGRNLDYFTNKTQLELSGPLMATIILYLSNDVTQGGQILFPESLPGSSSWSSCSNSSNILQPVKGNAILFFSLHPSASPDKSSFHARCPVLEGDMWSAIKYFYAKPISRGKVSATLDGGECTDEDDSCPAWAAVGECQRNPVFMIGSPDYYGTCRKSCNAC

SEQ ID NO: 56413 - protein, 197 aa, Glycine max
  peptide (1)..(197): Ceres Seq. ID no. 12583424
MEDDILARIEERLSVWAFLPKEYSKPLQVMHYGPEQNGRNLDYFTNKTQLELSGPLMATIILYLSNDVTQGGQILFPESLPGSSSWSSCSNSSNILQPVKGNAILFFSLHPSASPDKSSFHARCPVLEGDMWSAIKYFYAKPISRGKVSATLDGGECTDEDDSCPAWAAVGECQRNPVFMIGSPDYYGTCRKSCNAC

SEQ ID NO: 56414 - DNA, 1266 bp, Glycine max
  misc_feature (1)..(1266): Ceres Seq. ID no. 15179641
atcgcaatctcgagtagccgtcccaatcctcgatctgttctcagaccctcctccgtccgtcgcagctccagatttccttccccatggctccgatcaagatcggtatcaacggtttcggccggatcggcaggcttgtggccagggttgcgctccagagccccgatgtcgagctcgtcgccgtcaacgaccccttcatcaccaccgactacatgacctacatgttcaagtatgacactgtccacggacagtggaagcaccatgaagttaaggtgaaggactccaagacccttctcttcggtgagaaggaggttgctgtgtttggctgcaggaaccctgaggagatcccatgggctgctgctggtgctgagtacgttgttgagtccaccggtgttttcaccgacaaggacaaggctgcagctcacattaagggtggtgccaagaaggtcatcatttctgctcccagcaaggatgctcccatgtttgtctgtggtgtcaatgagaaggaatacaagtctgacatcgacattgtctccaacgctagctgcaccactaactgccttgctcctcttgctaaggttatcaatgacaggtttggcattgttgagggtttgatgaccacagttcatgccatgactgcaacccagaagactgttgatggtccttccagcaaggactggagaggtggaagggctgccagcttcaacatcattccaagcagcactggtgccgcaaaggctgttggcaaggtgctcccagagcttaacggaaagttgactggaatggccttccgtgttcccactgttgatgtttctgttgttgatctgactgttagacttgcgaagccagcaacctatgatcagattaaggctgctatcaaggaggagtctgagggaaacctcaagggcattttgggttacgttgatgaggaccttgtttccactgactttcagggtgacaacaggtccagcatcttcgatgccaaggccgggattgctctgaacgacaactttgtcaagcttgtctcctggtacgacaacgagtggggatacagcacccgcgtggtcgacctcatccgtcacatgcacagcaccaagtaaatgagaggcatgaagatacaggggagagtggtttgccccagaggagtgttcaaagcctcttcttctgagaataaatttttgtatggaattatgtcagctaaaaaccttttattggatgtatcctgatggttggtcacattttggtggtattatgtacttgcttgaactg

SEQ ID NO: 56415 - protein, 337 aa, Glycine max
  peptide (1)..(337): Ceres Seq. ID no. 15179642
MAPIKIGINGFGRIGRLVARVALQSPDVELVAVNDPFITTDYMTYMFKYDTVHGQWKHHEVKVKDSKTLLFGEKEVAVFGCRNPEEIPWAAAGAEYVVESTGVFTDKDKAAAHIKGGAKKVIISAPSKDAPMFVCGVNEKEYKSDIDIVSNASCTTNCLAPLAKVINDRFGIVEGLMTTVHAMTATQKTVDGPSSKDWRGGRAASFNIIPSSTGAAKAVGKVLPELNGKLTGMAFRVPTVDVSVVDLTVRLAKPATYDQIKAAIKEESEGNLKGILGYVDEDLVSTDFQGDNRSSIFDAKAGIALNDNFVKLVSWYDNEWGYSTRVVDLIRHMHSTK

SEQ ID NO: 56416 - protein, 295 aa, Glycine max
  peptide (1)..(295): Ceres Seq. ID no. 15179643
MTYMFKYDTVHGQWKHHEVKVKDSKTLLFGEKEVAVFGCRNPEEIPWAAAGAEYVVESTGVFTDKDKAAAHIKGGAKKVIISAPSKDAPMFVCGVNEKEYKSDIDIVSNASCTTNCLAPLAKVINDRFGIVEGLMTTVHAMTATQKTVDGPSSKDWRGGRAASFNIIPSSTGAAKAVGKVLPELNGKLTGMAFRVPTVDVSVVDLTVRLAKPATYDQIKAAIKEESEGNLKGILGYVDEDLVSTDFQGDNRSSIFDAKAGIALNDNFVKLVSWYDNEWGYSTRVVDLIRHMHSTK

SEQ ID NO: 56417 - protein, 292 aa, Glycine max
  peptide (1)..(292): Ceres Seq. ID no. 15179644
MFKYDTVHGQWKHHEVKVKDSKTLLFGEKEVAVFGCRNPEEIPWAAAGAEYVVESTGVFTDKDKAAAHIKGGAKKVIISAPSKDAPMFVCGVNEKEYKSDIDIVSNASCTTNCLAPLAKVINDRFGIVEGLMTTVHAMTATQKTVDGPSSKDWRGGRAASFNIIPSSTGAAKAVGKVLPELNGKLTGMAFRVPTVDVSVVDLTVRLAKPATYDQIKAAIKEESEGNLKGILGYVDEDLVSTDFQGDNRSSIFDAKAGIALNDNFVKLVSWYDNEWGYSTRVVDLIRHMHSTK

SEQ ID NO: 56418 - DNA, 1187 bp, Glycine max
  misc_feature (1)..(1187): Ceres Seq. ID no. 12612330
gttcactagcttcggagtttctttcgaataattttttaaaaaaaaacaatggcgacggttcagttcttcaaccaattcccctgcaaaacacgagtccaaagctcagcaaactcaaaacccctctccaagccaccgtcgctggtgccgacgagcgcgttcactcgccgtccgttgttctcccccggcgaattcgccgtttctcgtgcggatttcagagtcagagtcatcgatgcagaagacgagtttgattcggagaggagtgagggaggatcggctctattgatggcggaggaagcaatcgaatccgtggaagagacggaggttctcaagagatcgctggtggattcgttgtacggcacagaccgagggttgagcgcatcgagcgagacgagagccgagatcggagatctaatcacacagctcgagtccaagaaccctacaccagctcccaccgatgctctcttccttctcaacggcaaatggatcctcgcgtacacatcgttcgttggtttgttcccgttgctttcacgagggatcgtgccgttagttaaagtcgacgagatctcacagactattgattcggaaaacttcacggtcgagaactctgttctgttcgctggtccgttagctacaacctcaatcagcaccaacgccaaattcgaaatccgtagccctaaacgcgtccagattaagttcgaggaaggtgtgatcggcactcctcagctaacggattcgatcgagatcccggagtatgttgagtttcttggtcagaagattgatcttactccgatcagagggttgcttacatctgtacaagacacggctacgtctgtggctagaaccatatcgagccagccaccgttgaaattctccttgccaggggacaatgcccagtcgtggctgctcaccacttatctggacaaggacattaggatctctagaggagatggtggaagcgtctttgtgcttatcaaagaaggaagccctctcttgaactcttgaactctttaatgccaagtacaaactaagtgtttaatattgttgttgtagtgttaatcgtttgtattaactcggatggtatggagttaagaaataatgttgtagctgctaaaaaaaaaaaaaaaaaagcttcgggtggacccggtcaacttcaagctcctaagccactgcctgctggtgagcccatc

SEQ ID NO: 56419 - protein, 317 aa, Glycine max
  peptide (1)..(317): Ceres Seq. ID no. 12612331
MATVQFFNQFPCKTRVQSSANSKPLSKPPSLVPTSAFTRRPLFSPGEFAVSRADFRVRVIDAEDEFDSERSEGGSALLMAEEAIESVEETEVLKRSLVDSLYGTDRGLSASSETRAEIGDLITQLESKNPTPAPTDALFLLNGKWILAYTSFVGLFPLLSRGIVPLVKVDEISQTIDSENFTVENSVLFAGPLATTSISTNAKFEIRSPKRVQIKFEEGVIGTPQLTDSIEIPEYVEFLGQKIDLTPIRGLLTSVQDTATSVARTISSQPPLKFSLPGDNAQSWLLTTYLDKDIRISRGDGGSVFVLIKEGSPLLNS

SEQ ID NO: 56420 - protein, 239 aa, Glycine max
  peptide (1)..(239): Ceres Seq. ID no. 12612332
MAEEAIESVEETEVLKRSLVDSLYGTDRGLSASSETRAEIGDLITQLESKNPTPAPTDALFLLNGKWILAYTSFVGLFPLLSRGIVPLVKVDEISQTIDSENFTVENSVLFAGPLATTSISTNAKFEIRSPKRVQIKFEEGVIGTPQLTDSIEIPEYVEFLGQKIDLTPIRGLLTSVQDTATSVARTISSQPPLKFSLPGDNAQSWLLTTYLDKDIRISRGDGGSVFVLIKEGSPLLNS

SEQ ID NO: 56421 - DNA, 773 bp, Glycine max
  misc_feature (1)..(773): Ceres Seq. ID no. 12612333
atcaaactcatacatagaaaataaataagaagaatttagaaaccctaaccatcatgtctccaaaatcaaaggctaaagctatgttcatcatcttcaaaatattaatgttaaatcttttgccaccaatatatgcatgtgggccatgcactacgccacgttaccccaaagggccgccccatcacggaggaggccggccgaaagtgtcgcctccgctgccgccaatcataatcaaccctccggtggtaccgccaccggtggtgatataccctccaccaatctcaccgccatacccgccgccgcacggtggtggtggttctcctccacaaaggacatgcccagttgatgccctaaaattggggctttgcttggatgtgcttggaggattggtgcatgtgggaatagggaacccagttgagaacgtgtgctgtccagttatacaagggttgcttgatcttgaagctgcaatttgtctttgcaccgttattagggctaagcttcttaacctcagcatcttccttcctattgcacttcaagtcttggtcacttgcgggaagactcctcctcctggttttgtttgtccaccgctgtattaaaccactgcatgcactacttcatactaccccaatactcaagcctatatagttctagttagttactacttactactagattaatatgtctttatcttttctattagggtttatgtaatgactcttatttcgttttatgtgtatgagtttacgctttaattaattatatacttctcaggattt

SEQ ID NO: 56422 - protein, 179 aa, Glycine max
  peptide (1)..(179): Ceres Seq. ID no. 12612334
MSPKSKAKAMFIIFKILMLNLLPPIYACGPCTTPRYPKGPPHHGGGRPKVSPPLPPIIINPPVVPPPVVIYPPPISPPYPPPHGGGGSPPQRTCPVDALKLGLCLDVLGGLVHVGIGNPVENVCCPVIQGLLDLEAAICLCTVIRAKLLNLSIFLPIALQVLVTCGKTPPPGFVCPPLY

SEQ ID NO: 56423 - protein, 170 aa, Glycine max
  peptide (1)..(170): Ceres Seq. ID no. 12612335
MFIIFKILMLNLLPPIYACGPCTTPRYPKGPPHHGGGRPKVSPPLPPIIINPPVVPPPVVIYPPPISPPYPPPHGGGGSPPQRTCPVDALKLGLCLDVLGGLVHVGIGNPVENVCCPVIQGLLDLEAAICLCTVIRAKLLNLSIFLPIALQVLVTCGKTPPPGFVCPPLY

SEQ ID NO: 56424 - protein, 162 aa, Glycine max
  peptide (1)..(162): Ceres Seq. ID no. 12612336
MLNLLPPIYACGPCTTPRYPKGPPHHGGGRPKVSPPLPPIIINPPVVPPPVVIYPPPISPPYPPPHGGGGSPPQRTCPVDALKLGLCLDVLGGLVHVGIGNPVENVCCPVIQGLLDLEAAICLCTVIRAKLLNLSIFLPIALQVLVTCGKTPPPGFVCPPLY

SEQ ID NO: 56425 - DNA, 823 bp, Glycine max
  misc_feature (1)..(823): Ceres Seq. ID no. 14301432
tcactcccttccttcgtcctttgcactcccactcctacgcttcccaacctcgccattccgtcgagcacatcccgggcgacgcaggcggccatggaggacggcggcgcgagagcggcggcggtgcagaagctgatggcggccaaggccaagtccggcaagagcttctccgacatcggggccgagacggggctcaccaacgtgtacgtcgcgcagctgctgcgccgccaggcgcagctcaagcccgacacggcggccgcgctgcgggcggccatcccggcgctcaccgaagagctcgtggaactcatgatgcagccgcccttccgctcgtacaaccctgaaatggtccacgagcccgccatatacagactgaatgaagctatcatgcattttggagagagcatcaaggcaatcatcaatgaggactttggtgatggaatcatgtcagctatagacttctactgtaccgtcgacaaagttaaaggggctgatggaaaagaccgtgtggtgctcacatttgatgggaagtatctgcctcacactgaacagaaagccgcgaatatgatgtcgaagttgccctgcaaggcaccttgagataatgagatggctggtactgggagaaggggggtatgtagcttcactaatgtctgcttatacttcggacaaaaaaattgagcgtcccttttctagtctgaatgatcgaccaaataaagagtggtcatatagtatgtaatgtctgcttgtactttggacctggaacagcattcgacatgcttttcctcgtctgaatgatcgactaaataaagtggcaatatagtttgtaaat

SEQ ID NO: 56426 - protein, 196 aa, Glycine max
  peptide (1)..(196): Ceres Seq. ID no. 14301433
SLPSFVLCTPTPTLPNLAIPSSTSRATQAAMEDGGARAAAVQKLMAAKAKSGKSFSDIGAETGLTNVYVAQLLRRQAQLKPDTAAALRAAIPALTEELVELMMQPPFRSYNPEMVHEPAIYRLNEAIMHFGESIKAIINEDFGDGIMSAIDFYCTVDKVKGADGKDRVVLTFDGKYLPHTEQKAANMMSKLPCKAP

SEQ ID NO: 56427 - protein, 166 aa, Glycine max
  peptide (1)..(166): Ceres Seq. ID no. 14301434
MEDGGARAAAVQKLMAAKAKSGKSFSDIGAETGLTNVYVAQLLRRQAQLKPDTAAALRAAIPALTEELVELMMQPPFRSYNPEMVHEPAIYRLNEAIMHFGESIKAIINEDFGDGIMSAIDFYCTVDKVKGADGKDRVVLTFDGKYLPHTEQKAANMMSKLPCKAP

SEQ ID NO: 56428 - protein, 152 aa, Glycine max
  peptide (1)..(152): Ceres Seq. ID no. 14301435
MAAKAKSGKSFSDIGAETGLTNVYVAQLLRRQAQLKPDTAAALRAAIPALTEELVELMMQPPFRSYNPEMVHEPAIYRLNEAIMHFGESIKAIINEDFGDGIMSAIDFYCTVDKVKGADGKDRVVLTFDGKYLPHTEQKAANMMSKLPCKAP

SEQ ID NO: 56429 - DNA, 1002 bp, Glycine max
  misc_feature (1)..(1002): Ceres Seq. ID no. 13639221
agacattgtctcaatcccacacgcttcttactcctctcataacttttctgctccccgttgagaaagatttgaatccaaaggaaaaataacgctaatggctccaagagacagccgagccaccgcgctcattgggcccggcccaagcctatcaccggcccacaaagagatccgctacagaggcgtcaggaaacgcccctggggccgctacgccgccgagatccgcgatcccggcaagaaaacccgcgtctggctcggcactttcgacaccgccgaggaagccgcgcgcgcctacgacaccgccgcgcgtgagtttcgtggcgccaaggccaagaccaatttcccgacaccctcggaactcatccttaacaacaacaacataaacgctcgtagtcccagccagaccagcaccctcgactcatcctctcccccgccaccgccaccgctagaccttaccctcacccctctctcctccgctgtcttcccggtggcgcgtcctgttctattcttcgacgcattcgcgcgtgcggacaccatggtcgccgtctcgcgccgcgagacctgcggcttcgaacgccccgccgccgatttccgccgcggcgactccgactctgattataaccgccgcatactcctggatcttgacctgaacgtacctcctctcccggaggttgcctgattcatgcagggagttctgtttttttcgcaattattgtttttttggttttttaagcatctgggaggtactactacgcatcttttttgacgaaagtgccctcgagggagcagcaaagtgagtagtggatgacatgatgctcggatttgttgaccattttgtgatgatgaagatatataaccggcacgttatgtaaatacacgttataaccgaaagcaaacgtgcttttgcttggttgcttttttttttgcaactgaggactcttattcagagtatctcatggttgtttctgcaatttctcaaaatatataaatattccaatttccatc

SEQ ID NO: 56430 - protein, 193 aa, Glycine max
  peptide (1)..(193): Ceres Seq. ID no. 13639222
MAPRDSRATALIGPGPSLSPAHKEIRYRGVRKRPWGRYAAEIRDPGKKTRVWLGTFDTAEEAARAYDTAAREFRGAKAKTNFPTPSELILNNNNINARSPSQTSTLDSSSPPPPPPLDLTLTPLSSAVFPVARPVLFFDAFARADTMVAVSRRETCGFERPAADFRRGDSDSDYNRRILLDLDLNVPPLPEVA

SEQ ID NO: 56431 - DNA, 962 bp, Glycine max
  misc_feature (1)..(962): Ceres Seq. ID no. 13594828
tactagcttacttaggacctggcagcctctcaattttctctataaataccagtgcctccgtgtcttctcaattttcaccagccatagtcatacagcgacaataaggagagcaaattagaagcacagatcaaggggaagagaactccgcggctgatcagcaatggcgaccaagatctacatagtgtactactcgacctggggacacgtcgcgacgctggcggaggagatgaagaagggcgccgactccgtccccggcgtcgaggtcaccgtctggcgggtgccagagacgctgccagaggaggtgctcgggaagatgcacgcggcgccggggcgcgaggaccacccggtcatcacggcgagccagctggccgaggccgacggcatcctgttcggcttcccgacgcggttcggcatgatggcggcgcagatgaaggccttcttcgactccaccggcggcctctggcaggcacagagcctctcgggcaagcccgcgggcgtcttcttcgcgacgggcacccagggcggcgggcaggagaccacggctctcacggccgtgacgcagctgacgcaccacggcatgctgttcgtgccggtcgggtacacgcacggcgccggcatgttcgccatggacgaggtcaagggtggcagcccgtacggtgccggcaccttcgctggagccgatggcagcagggtgcccagcgatgccgagctcgccctcgcggcgcaccagggcaagtactttgccggcatcgccaagaagctcaaagccgtctgaactccgatcaccagccgtgtcccatgactcatatcaactactcaatcattacaagatgatttgacacatcattttcagtggagcagatttacataattctagacaattaaactgtactgcatttaatttcttgtttggacaaataatacaatttcttgttttgagtggagcattcggtcttggtttt

SEQ ID NO: 56432 - protein, 204 aa, Glycine max
  peptide (1)..(204): Ceres Seq. ID no. 13594829
MATKIYIVYYSTWGHVATLAEEMKKGADSVPGVEVTVWRVPETLPEEVLGKMHAAPGREDHPVITASQLAEADGILFGFPTRFGMMAAQMKAFFDSTGGLWQAQSLSGKPAGVFFATGTQGGGQETTALTAVTQLTHHGMLFVPVGYTHGAGMFAMDEVKGGSPYGAGTFAGADGSRVPSDAELALAAHQGKYFAGIAKKLKAV

SEQ ID NO: 56433 - protein, 182 aa, Glycine max
  peptide (1)..(182): Ceres Seq. ID no. 13594830
MKKGADSVPGVEVTVWRVPETLPEEVLGKMHAAPGREDHPVITASQLAEADGILFGFPTRFGMMAAQMKAFFDSTGGLWQAQSLSGKPAGVFFATGTQGGGQETTALTAVTQLTHHGMLFVPVGYTHGAGMFAMDEVKGGSPYGAGTFAGADGSRVPSDAELALAAHQGKYFAGIAKKLKAV

SEQ ID NO: 56434 - protein, 153 aa, Glycine max
  peptide (1)..(153): Ceres Seq. ID no. 13594831
MHAAPGREDHPVITASQLAEADGILFGFPTRFGMMAAQMKAFFDSTGGLWQAQSLSGKPAGVFFATGTQGGGQETTALTAVTQLTHHGMLFVPVGYTHGAGMFAMDEVKGGSPYGAGTFAGADGSRVPSDAELALAAHQGKYFAGIAKKLKAV

SEQ ID NO: 56435 - DNA, 1296 bp, Glycine max
  misc_feature (1)..(1296): Ceres Seq. ID no. 12583314
aatgactggcattcaagttagcttagctatgatgaatgaagaggagtatagatggtcaacgtttttggtaagcaactagtaattaagcaagcaagaatcacaaattggaaccatgtttctcaaatgttttggcttcggcgctcagagacagtatccaacggtgatagaagagttgtgccatcgattttctctcgcagatctaaggaaatcaaccaacaatttcgatcaaaacacagtaattgatcgtggaggatgtggcagagtatataaaggttgtctccagcacaatgaacatgcttctgatacagtcgctgtaaagcgattgggaatgggaaatgaagagttgttcaggaatgaaatagagttactctgtcagcttcgtcaccctaatttggtctctcttataggattctgcaacgaccaaaaagagaagattattgtgtacgagtacttgtccaatggatctcttgatcaacttctacaaagtggggtactgtcatggaagaaaagactagagatatgcataggagcagcgcgtggactacactaccttcacgctggagccaaacgcaccatcattcaccgtgacatcaaacccagcaacattcttttggatgataacatggagccaaaactcgcaggtttcagccttagcgtactgggaccgcgttttaagtcaaaacccaaaccaattaaagtagattctgttttgggtacttatggctacctggctgcggagcatctcaaggacctcaccgtcacagataaaactgatgtttactcatttggtatggttctacttgatgttgtgtgtggagggaaatatttcatgaagtcaattaaaacggaatttctggaaaaacctcttgaggagaaaattgatggaattatcgaaggaagtatcgcaccagagtgttggcaagtcttcatagatatcatccgaaagtgcgtgaaatatgaagcacatgagcgaccaacaatgggtgaagtagaggtagaacttgagcatgctctgtcgttgcaggaacaagcagatatcacaaacaacattaaccaacaatgggtgaaattggaagcagatgagcgaccaacaatgggtgaagtaaaggtagaacttgagcatgctctgtccttacaagcactagcagatagagtaaacaccaactgtcgttataccttaatgtccaaaaccgttattaatccctggctcaaagagtcacaagattctgaataaagtattgaaatccataggtgatttgattaggtaagctgaaattaaggttagtgttttgagtc

SEQ ID NO: 56436 - protein, 373 aa, Glycine max
  peptide (1)..(373): Ceres Seq. ID no. 12583315
MFLKCFGFGAQRQYPTVIEELCHRFSLADLRKSTNNFDQNTVIDRGGCGRVYKGCLQHNEHASDTVAVKRLGMGNEELFRNEIELLCQLRHPNLVSLIGFCNDQKEKIIVYEYLSNGSLDQLLQSGVLSWKKRLEICIGAARGLHYLHAGAKRTIIHRDIKPSNILLDDNMEPKLAGFSLSVLGPRFKSKPKPIKVDSVLGTYGYLAAEHLKDLTVTDKTDVYSFGMVLLDVVCGGKYFMKSIKTEFLEKPLEEKIDGIIEGSIAPECWQVFIDIIRKCVKYEAHERPTMGEVEVELEHALSLQEQADITNNINQQWVKLEADERPTMGEVKVELEHALSLQALADRVNTNCRYTLMSKTVINPWLKESQDSE

SEQ ID NO: 56437 - protein, 301 aa, Glycine max
  peptide (1)..(301): Ceres Seq. ID no. 12583316
MGNEELFRNEIELLCQLRHPNLVSLIGFCNDQKEKIIVYEYLSNGSLDQLLQSGVLSWKKRLEICIGAARGLHYLHAGAKRTIIHRDIKPSNILLDDNMEPKLAGFSLSVLGPRFKSKPKPIKVDSVLGTYGYLAAEHLKDLTVTDKTDVYSFGMVLLDVVCGGKYFMKSIKTEFLEKPLEEKIDGIIEGSIAPECWQVFIDIIRKCVKYEAHERPTMGEVEVELEHALSLQEQADITNNINQQWVKLEADERPTMGEVKVELEHALSLQALADRVNTNCRYTLMSKTVINPWLKESQDSE

SEQ ID NO: 56438 - protein, 203 aa, Glycine max
  peptide (1)..(203): Ceres Seq. ID no. 12583317
MEPKLAGFSLSVLGPRFKSKPKPIKVDSVLGTYGYLAAEHLKDLTVTDKTDVYSFGMVLLDVVCGGKYFMKSIKTEFLEKPLEEKIDGIIEGSIAPECWQVFIDIIRKCVKYEAHERPTMGEVEVELEHALSLQEQADITNNINQQWVKLEADERPTMGEVKVELEHALSLQALADRVNTNCRYTLMSKTVINPWLKESQDSE

SEQ ID NO: 56439 - DNA, 1849 bp, Glycine max
  misc_feature (1)..(1849): Ceres Seq. ID no. 15178736
agaaggttgtggggttagggctttagagtgtcttttcttctttttcttcttcttcttcttcgttgaatcgcgattgttctgttgtgcgactgaaagaagagagatcgaaaatggcgttggctttcgacgagttcggaaggcctttcataatcctgaaggaacaggagcagaagagcagacttcgaggtttggacgctcagaaagccaacatctccgccggcaaagccgtcgctcgcatcctccgaacctccctcggccccaaaggcatggacaagatgctccagagccccgacggcgacgtcactatcacgaacgacggtgccacgatccttgaccagatggacgtggacaaccaaatcgcgaagctgatggtggagctctcgcggagtcaggactacgaaatcggcgacggaaccaccggcgtcgtcgtcatggccggcgcgcttctcgagaaggccgagcgcctcctcgagcggggaattcaccccatcaggatcgccaagggttacgaaatggcgtccaggatcgccgtcgagcatctcgagcgcgtcgccaacaagttcgagttcgacgagtccaatttggagcccctcattcaaacttgcatgaccaccctctcctccaaaattgtgaatcggtgtaagcgtagcttggctgagattgctgttaaggctgttcttgctgttgctgatctggcgaggaaggatgttaatttggatctaattaaagtggaagggaaagttgggggtaaattggaggataccgagttgatctatgggattgttgtggacaaggatatgagtcatcctcaaatgcctaagcaaattgaggatgctaaaattgctatcctcacatgcccctttgagcctcccaagccaaagactaagcataaggttgacattgatacagtggagaagttccagacgttgaggttgcaggaacagaagtattttgatgacatggttcagaaatgcaaggatgtgggtgcaacccttgtcatttgccaatggggttttgacgatgaagcaaatcatctcttaatgcacaggaacttgccagctgttagatgggttggtggtgtagagttggaattgatagctatagcaactggtggaagaattgttcctaggtttcaggagttatctccagaaaagttgggaaaggctggtatggttcgagaaaagtcctttggtacaacaaaagaccgaatgctgtacattgaacattgtgcaaactcaagggctgtaactatattcattcgtggaggtaacaaaatgatcattgaggagacaaagcgcagccttcatgatgccttgtgcgtggctaggaatcttatccggaacaactctattgtctatggtggtggttcagctgagatttcttgctctatagctgtggaggcagctgctgatagataccctggagtagaacagtatgcaattagagcatttggggatgctttggaggccatcccaatggcccttgctgaaaatagtggcctgcaaccaattgaaacattatctgctgttaagtctcagcaaataaaggataataaccctcactttggcattgattgtaatgatgttggcactaatgacatgcgtgagcaaaatgtctttgaaactttgatcggaaagcagcaacagctcctactcgctactcaagttgtcaagatgatactgaaaattgatgatgtcatctccccatctgagtactgatatttttaaactcagtcatggtctacgtcaagatgctgaattggtgatactattttgtttcgatcggtttggttgtagtaagagtccgtacgttcacttgaaatgcaagattttggcccggtttgtatcgg

SEQ ID NO: 56440 - protein, 535 aa, Glycine max
  peptide (1)..(535): Ceres Seq. ID no. 15178737
MALAFDEFGRPFIILKEQEQKSRLRGLDAQKANISAGKAVARILRTSLGPKGMDKMLQSPDGDVTITNDGATILDQMDVDNQIAKLMVELSRSQDYEIGDGTTGVVVMAGALLEKAERLLERGIHPIRIAKGYEMASRIAVEHLERVANKFEFDESNLEPLIQTCMTTLSSKIVNRCKRSLAEIAVKAVLAVADLARKDVNLDLIKVEGKVGGKLEDTELIYGIVVDKDMSHPQMPKQIEDAKIAILTCPFEPPKPKTKHKVDIDTVEKFQTLRLQEQKYFDDMVQKCKDVGATLVICQWGFDDEANHLLMHRNLPAVRWVGGVELELIAIATGGRIVPRFQELSPEKLGKAGMVREKSFGTTKDRMLYIEHCANSRAVTIFIRGGNKMIIEETKRSLHDALCVARNLIRNNSIVYGGGSAEISCSIAVEAAADRYPGVEQYAIRAFGDALEAIPMALAENSGLQPIETLSAVKSQQIKDNNPHFGIDCNDVGTNDMREQNVFETLIGKQQQLLLATQVVKMILKIDDVISPSEY

SEQ ID NO: 56441 - protein, 483 aa, Glycine max
  peptide (1)..(483): Ceres Seq. ID no. 15178738
MDKMLQSPDGDVTITNDGATILDQMDVDNQIAKLMVELSRSQDYEIGDGTTGVVVMAGALLEKAERLLERGIHPIRIAKGYEMASRIAVEHLERVANKFEFDESNLEPLIQTCMTTLSSKIVNRCKRSLAEIAVKAVLAVADLARKDVNLDLIKVEGKVGGKLEDTELIYGIVVDKDMSHPQMPKQIEDAKIAILTCPFEPPKPKTKHKVDIDTVEKFQTLRLQEQKYFDDMVQKCKDVGATLVICQWGFDDEANHLLMHRNLPAVRWVGGVELELIAIATGGRIVPRFQELSPEKLGKAGMVREKSFGTTKDRMLYIEHCANSRAVTIFIRGGNKMIIEETKRSLHDALCVARNLIRNNSIVYGGGSAEISCSIAVEAAADRYPGVEQYAIRAFGDALEAIPMALAENSGLQPIETLSAVKSQQIKDNNPHFGIDCNDVGTNDMREQNVFETLIGKQQQLLLATQVVKMILKIDDVISPSEY

SEQ ID NO: 56442 - protein, 480 aa, Glycine max
  peptide (1)..(480): Ceres Seq. ID no. 15178739
MLQSPDGDVTITNDGATILDQMDVDNQIAKLMVELSRSQDYEIGDGTTGVVVMAGALLEKAERLLERGIHPIRIAKGYEMASRIAVEHLERVANKFEFDESNLEPLIQTCMTTLSSKIVNRCKRSLAEIAVKAVLAVADLARKDVNLDLIKVEGKVGGKLEDTELIYGIVVDKDMSHPQMPKQIEDAKIAILTCPFEPPKPKTKHKVDIDTVEKFQTLRLQEQKYFDDMVQKCKDVGATLVICQWGFDDEANHLLMHRNLPAVRWVGGVELELIAIATGGRIVPRFQELSPEKLGKAGMVREKSFGTTKDRMLYIEHCANSRAVTIFIRGGNKMIIEETKRSLHDALCVARNLIRNNSIVYGGGSAEISCSIAVEAAADRYPGVEQYAIRAFGDALEAIPMALAENSGLQPIETLSAVKSQQIKDNNPHFGIDCNDVGTNDMREQNVFETLIGKQQQLLLATQVVKMILKIDDVISPSEY

SEQ ID NO: 56443 - DNA, 1233 bp, Glycine max
  misc_feature (1)..(1233): Ceres Seq. ID no. 13502622
acctagaacatcctaatcgaaaaaagcaagcaagcaacttgtattgttgctacaaggcatataaattttcatcattgcaagttgcaaccattttgaccaaaaaccaataataagctttcgaccaaaagaagaaagaagaacccatttatcatcgttggaaaaaatcccagatctcaaaaaatggaattttcgcagagtcacagggtagagatgataagcatggcagttgctcttgttgccattgttggtggcaccgcttactattactacgtcaccaagaagccaaaagggtgcttggatcctgagaacttcaaagaatttaaacttgttaaacgcactcaactcagccataatgttgccacgttccgatttgatcttcctactcctaagtcagtgttgggacttcctattggacaacatatcagctgcagagggaaggatagtcttggtgaagaagttgtgaaaccatatactcctacaacattggatactgatgttggatactttgaattggttgtgaagatgtatccacaaggacggatgtctcatcactttagggagatacgtgaaggtgattacatggctgtgaagggaccaaagggacgttttaagtaccagcccaaccaagtaagagctttgggtatgattgctggtggcactggcatcaccccaatgtttcaagttacaagagctatattagaaaaccaacaggacaaaaccaacataaatttgatatatgccaatgtcacatttgatgacattcttttgaaggaagagctggatgcctttgccattaagttccctaatcaattcaaagtttactatgttctaaatcagccaccagaaatatggggacggtggtgttggattcgtcactaaggaaatgatccaaacagatttccctgcaccagcatcagatattaagatattaaggtgtggaccacctcccatgaacaaggctatggctgctaatcttgaagctcttggatacagtccccaaatgcagtttcagttttatagtcttgaataaagctcatctatattaaattttttaaaatacacacagcattcgagtccgatatcaatgtttggacatttgttggtattctctttctagatttgacagaataagcgcgcctgtgttacactctaggttagacattttacattgtagtgatgttcaggtttatggaaagttttgatggcgtatgctgtaacattgcaggctgtttc

SEQ ID NO: 56444 - protein, 232 aa, Glycine max
  peptide (1)..(232): Ceres Seq. ID no. 15223184
MEFSQSHRVEMISMAVALVAIVGGTAYYYYVTKKPKGCLDPENFKEFKLVKRTQLSHNVATFRFDLPTPKSVLGLPIGQHISCRGKDSLGEEVVKPYTPTTLDTDVGYFELVVKMYPQGRMSHHFREIREGDYMAVKGPKGRFKYQPNQVRALGMIAGGTGITPMFQVTRAILENQQDKTNINLIYANVTFDDILLKEELDAFAIKFPNQFKVYYVLNQPPEIWGRWCWIRH

SEQ ID NO: 56445 - protein, 222 aa, Glycine max
  peptide (1)..(222): Ceres Seq. ID no. 15223185
MISMAVALVAIVGGTAYYYYVTKKPKGCLDPENFKEFKLVKRTQLSHNVATFRFDLPTPKSVLGLPIGQHISCRGKDSLGEEVVKPYTPTTLDTDVGYFELVVKMYPQGRMSHHFREIREGDYMAVKGPKGRFKYQPNQVRALGMIAGGTGITPMFQVTRAILENQQDKTNINLIYANVTFDDILLKEELDAFAIKFPNQFKVYYVLNQPPEIWGRWCWIRH

SEQ ID NO: 56446 - protein, 219 aa, Glycine max
  peptide (1)..(219): Ceres Seq. ID no. 15223186
MAVALVAIVGGTAYYYYVTKKPKGCLDPENFKEFKLVKRTQLSHNVATFRFDLPTPKSVLGLPIGQHISCRGKDSLGEEVVKPYTPTTLDTDVGYFELVVKMYPQGRMSHHFREIREGDYMAVKGPKGRFKYQPNQVRALGMIAGGTGITPMFQVTRAILENQQDKTNINLIYANVTFDDILLKEELDAFAIKFPNQFKVYYVLNQPPEIWGRWCWIRH

SEQ ID NO: 56447 - DNA, 1343 bp, Glycine max
  misc_feature (1)..(1343): Ceres Seq. ID no. 13582564
gccgagcgtcgttctatctatttttttctctgcctgctgcacacacactgagactgagagaaagagaaccaactactacagtcnacagaaaaccaaaaaaacactgtgtgtgtgtgtttgtgtgtcaaaaaaaaaaaccctaagctaatgatgatggatccgcgacagcgagagaagctacttcacaaaaccgaggcctgtgctttcgtggcaggtgttgttccggagctttcccttgtcaccgttccagggaacaacaacaacaccaacaacgttaacaacaacaacaacaacgtttctcattctcaatctcaccggtcgggtcggatccatgaaaaccaccaccaccaccttggtctcgtggctgctgtcaccaccaccttcggaactgttcacaggaagaaaaggatggccagacaaagaagatccactaaccccactttgttgatgaaccctctcatcaacaacaacaacaacaagtctggttcttctcttccttctccaagtattgcttcctcctcgcacgtgccactctcctcctcaactctcccgcccgcacgtgaaatcgatcaaagaaggttgagattccttttccagaaggagttaaagaacagtgatgttagctcccttaggagaatgatattgccaaagaaagcagcagaggctttccttccagctcttgaatccaaagaaggaattgtaatcagcatggatgatatagatggtcttcatgtatggagtttcaagtacaggttttggcctaacaataacagtcggatgtatgtacttgaaaatactggagactttgtcaacacacatggccttcgctttggagattccattttggtttaccaagatagtgaaaacaacaattatgttattcaggcgaaaaaggcttctgatcaggatgaatttatggaagaaactagtgataccatcaatgatatcttccttaatgattatgaagtgaacaaacctggttgcttcaatgtaacctatcctgcagtgaatgatacaggcatgtcattcatatatgagactaccttctcaaatgactcccctcttgattttttgggtggatcaatgaccaatttttcaaggattggaccagttgaaacctttggctctgttgagaatttgtcacttgatgacttctattaaaggcatcaaatcacaaaggaagcattaacatggtaccaagactagcactattaagtgtgtgcttctttattttggtactaaagaaacatataaagtgtgctttgttgttgtcgtggtcatgaccatgagagaatttgtgtagaataaaagagtagccatgccaatgggcatgtttcctgtcc

SEQ ID NO: 56448 - protein, 337 aa, Glycine max
  peptide (1)..(337): Ceres Seq. ID no. 13582565
MMMDPRQREKLLHKTEACAFVAGVVPELSLVTVPGNNNNTNNVNNNNNNVSHSQSHRSGRIHENHHHHLGLVAAVTTTFGTVHRKKRMARQRRSTNPTLLMNPLINNNNNKSGSSLPSPSIASSSHVPLSSSTLPPAREIDQRRLRFLFQKELKNSDVSSLRRMILPKKAAEAFLPALESKEGIVISMDDIDGLHVWSFKYRFWPNNNSRMYVLENTGDFVNTHGLRFGDSILVYQDSENNNYVIQAKKASDQDEFMEETSDTINDIFLNDYEVNKPGCFNVTYPAVNDTGMSFIYETTFSNDSPLDFLGGSMTNFSRIGPVETFGSVENLSLDDFY

SEQ ID NO: 56449 - protein, 336 aa, Glycine max
  peptide (1)..(336): Ceres Seq. ID no. 13582566
MMDPRQREKLLHKTEACAFVAGVVPELSLVTVPGNNNNTNNVNNNNNNVSHSQSHRSGRIHENHHHHLGLVAAVTTTFGTVHRKKRMARQRRSTNPTLLMNPLINNNNNKSGSSLPSPSIASSSHVPLSSSTLPPAREIDQRRLRFLFQKELKNSDVSSLRRMILPKKAAEAFLPALESKEGIVISMDDIDGLHVWSFKYRFWPNNNSRMYVLENTGDFVNTHGLRFGDSILVYQDSENNNYVIQAKKASDQDEFMEETSDTINDIFLNDYEVNKPGCFNVTYPAVNDTGMSFIYETTFSNDSPLDFLGGSMTNFSRIGPVETFGSVENLSLDDFY

SEQ ID NO: 56450 - protein, 335 aa, Glycine max
  peptide (1)..(335): Ceres Seq. ID no. 13582567
MDPRQREKLLHKTEACAFVAGVVPELSLVTVPGNNNNTNNVNNNNNNVSHSQSHRSGRIHENHHHHLGLVAAVTTTFGTVHRKKRMARQRRSTNPTLLMNPLINNNNNKSGSSLPSPSIASSSHVPLSSSTLPPAREIDQRRLRFLFQKELKNSDVSSLRRMILPKKAAEAFLPALESKEGIVISMDDIDGLHVWSFKYRFWPNNNSRMYVLENTGDFVNTHGLRFGDSILVYQDSENNNYVIQAKKASDQDEFMEETSDTINDIFLNDYEVNKPGCFNVTYPAVNDTGMSFIYETTFSNDSPLDFLGGSMTNFSRIGPVETFGSVENLSLDDFY

SEQ ID NO: 56451 - DNA, 1301 bp, Glycine max
  misc_feature (1)..(1301): Ceres Seq. ID no. 12611435
tttttgagtctgggttttagttcaaaacaaaatgcatgggcagggcctgatcattggaagtatcgaaaatccaaagtctcagaggttcatcctacttctgaagatgggtcgaccctaaaaagtagacagccaaagagtaagagacaaactgaagttgatttaaatttcacaaattctcttgagaaaaaaatgctagatacattttctcctcccaagaatcccaaattgttactgcttcctgaaagcagattaccttgcaatacaaaacttcctgaggattgtcactatcagccagaagatcttgtcaagttatttcttctgtctaatgtaaagtgtctcgggaggaaggcaaacaggttctcagatggatctagagaacaatccgatgaatatgaatcattcccttcgtgggataatggaagtgtttgtggggatgacgctggtgactacggaggtgatcttcatggtgacatggaggacaccgacactcttgttactcagcctcgtcaggtcagtaaaattgaagtccagtatgacaagacttccaaacaagtcgatgttcatgcactaaaaattactctttgggaccatgttcaagaatctgttaaacttcctttagagggtcaaaaagataccttatctttcaggaatatattagccaactttcctagcgaatgcaatgctgctgcaacaattagtgacatctctcctcatctgtgcttcatatgtctattgcatttggcaaacgagaaaggattgagcattcaaaactcccctaatttggatgatcttgccatacggtttccacaagttgctgattctatgaggggaacagtttagattcctcttcactcaattattcttcagctcaggaatcaagaaacgatggggactgttttactagtgaaacacgtccaagaaagcattgaagtgagcaacaagtttgtggttggaggttgcaaatatcagtttgcttatggtggtttaacactcgttaaggaaatttcagacctataatggctccttgttattattctgtacatgaaagtatgcaacacatgtagtgctcaatttcattctccactgcagcccgttacatgaaagtattcaacacatgtagtacgagaatggctagtgttggtataaacaaaggcatagactgatggatgagcgactgattattgaatcgcacttacctatccctccattttctattaattgtcaaactgaaataatcaaatttatttgtaaataataataataataatagtagtagtagtagtaagttttatttatctgcc

SEQ ID NO: 56452 - protein, 279 aa, Glycine max
  peptide (1)..(279): Ceres Seq. ID no. 12611436
FLSLGFSSKQNAWAGPDHWKYRKSKVSEVHPTSEDGSTLKSRQPKSKRQTEVDLNFTNSLEKKMLDTFSPPKNPKLLLLPESRLPCNTKLPEDCHYQPEDLVKLFLLSNVKCLGRKANRFSDGSREQSDEYESFPSWDNGSVCGDDAGDYGGDLHGDMEDTDTLVTQPRQVSKIEVQYDKTSKQVDVHALKITLWDHVQESVKLPLEGQKDTLSFRNILANFPSECNAAATISDISPHLCFICLLHLANEKGLSIQNSPNLDDLAIRFPQVADSMRGTV

SEQ ID NO: 56453 - protein, 216 aa, Glycine max
  peptide (1)..(216): Ceres Seq. ID no. 12611437
MLDTFSPPKNPKLLLLPESRLPCNTKLPEDCHYQPEDLVKLFLLSNVKCLGRKANRFSDGSREQSDEYESFPSWDNGSVCGDDAGDYGGDLHGDMEDTDTLVTQPRQVSKIEVQYDKTSKQVDVHALKITLWDHVQESVKLPLEGQKDTLSFRNILANFPSECNAAATISDISPHLCFICLLHLANEKGLSIQNSPNLDDLAIRFPQVADSMRGTV

SEQ ID NO: 56454 - DNA, 863 bp, Glycine max
  misc_feature (1)..(863): Ceres Seq. ID no. 13595452
aaagaaacattctagagctccgctccactcccagtaatggcggcgacatggacttgttttgtaacttcgttgtgtatttcttcaccttcttataaaccatcgtcgttgcacggtctgtctttccggaggcaagcagtgaccagaacgaacagattttttaccaggatatatgcgctgtctagcaacgacatcaaagtcgggacaagcatagaagtcgatggtgctccgtggcgtgttctggagtttctgcatgtgaagccaggcaaaggtgctgcttttgtcagaaccaaaatcaggaactacgtcaatggtagcacagtcgagagaacctttcgtgctgggattactatagaagaggccaatgtctccaaggagactaagcaattcacttataaagacggctctcagtttgttttcatggacttgagcagttatgaggaaacacgtttaaacgaggctgatatgggcgacaagaccaaatggcttaaagagggaatggactgcaatttgctctactggaaggacaaggtcatcgattttgaacttcccattacagttcagcttaaaatagttgacgttgatcctggtctccgaggtgacactgcacaaggtggaactaaacctgccacactcgagactggtgcagttgtcaatgtacccctctttgtcaatgttggtgaagatattatggtggacacgagaaccggtacgtacatgagccgggtctgacacttcttccctattgctaacgactaaggaatgtgatatttaatgagcggttttgcttagactactctgattagttgagtgaacgcccagaattgctactattggtttccctaataatgattctgtattatttt

SEQ ID NO: 56455 - protein, 230 aa, Glycine max
  peptide (1)..(230): Ceres Seq. ID no. 13595453
MAATWTCFVTSLCISSPSYKPSSLHGLSFRRQAVTRTNRFFTRIYALSSNDIKVGTSIEVDGAPWRVLEFLHVKPGKGAAFVRTKIRNYVNGSTVERTFRAGITIEEANVSKETKQFTYKDGSQFVFMDLSSYEETRLNEADMGDKTKWLKEGMDCNLLYWKDKVIDFELPITVQLKIVDVDPGLRGDTAQGGTKPATLETGAVVNVPLFVNVGEDIMVDTRTGTYMSRV

SEQ ID NO: 56456 - DNA, 1363 bp, Glycine max
  misc_feature (1)..(1363): Ceres Seq. ID no. 13595442
gtttccaaggttgctctgggaatccgaggttctaaactctgcaactaactttaatggcaactgggcaagtcattaataaacctccttcacttcctccgtaccctgaggtatattctaactctttttaatcttttttttttctagctactataattgatctaacattaccctatttatccactgatctaaatctagtccgatttaaaaataaatgttcaggtttatttatttatttatttttcactgttttgactataattgaacattttcatgcgaatttcataatcataaatatagacaaataagtgatgtgttaatttttttaccatagatatagaagggaaaaaaaggtcgattctaccattctacttttatgaaattattattaagtgatgggttaattttttttaaaggaaataattatgaagactgagttaaggtgtgtaatttatctatagatgattcgggaggcaattgaagcactgaatgaagagaatggttcgaataaatcatcaatttcgaagtacatcgaatccacctatggtggattgcctcaggcccacaaggttttgctcaatgtgcacctcgcgaaaatgagggaaagtggagtgctagtgttttggaagaacaactacaccaagcgtgacccaaatgcgccgccacggcggggccgtggcaggccacccaagcccaaggagcctctgccaccgggcactgtcttatcaccgcccaggcccaggggccgtccttcgaaggacccaaatgacctgcagaagcctcttaaggcttcggtggtgggtagtggtaggcctcgaggccggcccagaaaaatggcctggcccactggaggccttggtgaagtatcgcaggcctctaaggcgaagcctgtcactagtaatgggaggcctagaggtaggcctcccaaagtgaaggccgtattcactgaaattagtgtttgactataaaggcttatagggcttgcatggaatagggaagtgttgtttctacaaaaagttggactgagtaacggttttgtgtgtttactagattcttctcttatgtgttacacttagctgaaatgctgaattgttgtgtacaatcgtgtagtgtagtgtagtgtagttagttgctgaggctttgttcgtttgtaaattgtaactgtgaaaataggacaatgggtggagctaatggacgcaatctctcaaattcttgatgtgaagagtctgtgtgttatgcaccaaattgattggaggcaaagtctttaaaaaaaaaaaaaaaaaaaaaaaaaaaaaaaccagaaaaaaaaaaaaaaaaaagcttatcgataccgtcccggacctcgaggggggggccccggtaccca

SEQ ID NO: 56457 - protein, 166 aa, Glycine max
  peptide (1)..(166): Ceres Seq. ID no. 15221580
MIREAIEALNEENGSNKSSISKYIESTYGGLPQAHKVLLNVHLAKMRESGVLVFWKNNYTKRDPNAPPRRGRGRPPKPKEPLPPGTVLSPPRPRGRPSKDPNDLQKPLKASVVGSGRPRGRPRKMAWPTGGLGEVSQASKAKPVTSNGRPRGRPPKVKAVFTEISV

SEQ ID NO: 56458 - protein, 121 aa, Glycine max
  peptide (1)..(121): Ceres Seq. ID no. 15221581
MRESGVLVFWKNNYTKRDPNAPPRRGRGRPPKPKEPLPPGTVLSPPRPRGRPSKDPNDLQKPLKASVVGSGRPRGRPRKMAWPTGGLGEVSQASKAKPVTSNGRPRGRPPKVKAVFTEISV

SEQ ID NO: 56459 - protein, 92 aa, Glycine max
  peptide (1)..(92): Ceres Seq. ID no. 15221582
MRRHGGAVAGHPSPRSLCHRALSYHRPGPGAVLRRTQMTCRSLLRLRWWVVVGLEAGPEKWPGPLEALVKYRRPLRRSLSLVMGGLEVGLPK

SEQ ID NO: 56460 - DNA, 901 bp, Glycine max
  misc_feature (1)..(901): Ceres Seq. ID no. 14304209
aaccacacactgccttgttcatctcgaacataaatcaagagcatatcattctttgtgagctttattgatctaaaccaatggcgaactcgacgattcttcttgattactggccaagcatgttctgtatgagggctagagtcgcgttgagggagaaaggtgttgtgttcgaggccagagaagaggatctcacgaacaagagccctttgctcctccagagtaatccgattcacaagaaggtcccggttctgatccacaacggtaaaccggtttgcgagtccctcaatgttgtccagtacgtggacgaggcttggtctgacaagaacccattcttcccttctgatccttacgggaaagctcaggctaggttttgggctgatttcgtggacaagaagtttagtgatgcccaattcaagatatggggaaagaaaggtgaggaacaagcagcaggggtgaaggagtttattgaggcagtgaagattcttgaagctgagcttggagacaaaccttactttggtggagatagctttggatatgtagacattgcactgattacattctacagttggttcggagcatacgagaagtttggtaacttcagcatcgaggcagagagtccaaaactgattgcttgggctaagaggtgtatggagaaagagagtgtgtctaagtctctccctgaccaagagaaaattgttgcgtacgccgctgagtttaggaagaataatctctgatctgaataaaaccttgtttgtgccttctgtttcggatgatgctgtagtctgtttttaactgtggtttttgtgtgtttcctaataatgcgtgagggcaagcgtcggcctttgtgtggtggtgttgtatggatcctgagtaatgcatttttaaataaaatatattttcaaat

SEQ ID NO: 56461 - protein, 217 aa, Glycine max
  peptide (1)..(217): Ceres Seq. ID no. 14304210
MANSTILLDYWPSMFCMRARVALREKGVVFEAREEDLTNKSPLLLQSNPIHKKVPVLIHNGKPVCESLNVVQYVDEAWSDKNPFFPSDPYGKAQARFWADFVDKKFSDAQFKIWGKKGEEQAAGVKEFIEAVKILEAELGDKPYFGGDSFGYVDIALITFYSWFGAYEKFGNFSIEAESPKLIAWAKRCMEKESVSKSLPDQEKIVAYAAEFRKNNL

SEQ ID NO: 56462 - protein, 204 aa, Glycine max
  peptide (1)..(204): Ceres Seq. ID no. 14304211
MFCMRARVALREKGVVFEAREEDLTNKSPLLLQSNPIHKKVPVLIHNGKPVCESLNVVQYVDEAWSDKNPFFPSDPYGKAQARFWADFVDKKFSDAQFKIWGKKGEEQAAGVKEFIEAVKILEAELGDKPYFGGDSFGYVDIALITFYSWFGAYEKFGNFSIEAESPKLIAWAKRCMEKESVSKSLPDQEKIVAYAAEFRKNNL

SEQ ID NO: 56463 - protein, 201 aa, Glycine max
  peptide (1)..(201): Ceres Seq. ID no. 14304212
MRARVALREKGVVFEAREEDLTNKSPLLLQSNPIHKKVPVLIHNGKPVCESLNVVQYVDEAWSDKNPFFPSDPYGKAQARFWADFVDKKFSDAQFKIWGKKGEEQAAGVKEFIEAVKILEAELGDKPYFGGDSFGYVDIALITFYSWFGAYEKFGNFSIEAESPKLIAWAKRCMEKESVSKSLPDQEKIVAYAAEFRKNNL

SEQ ID NO: 56464 - DNA, 1598 bp, Glycine max
  misc_feature (1)..(1598): Ceres Seq. ID no. 15174875
acacttgtttctctctcttcaatggccgagccccactccaccgccgcgattcttcctccctccaccgcccggttggaggaaactccgtccgggagctctcagactcccctccgctccggaagaggcggctggagtattgtcgatggctccttcgccattgttagggacaatacctgctcctgcttcgtcgtcgtcttcagcttgtggttcttcgtgtcgatgactatgatactgggggtttatgggtccatgaccatcgtgctgggtccaaaatcttcaattgttttccaacctagtcccgtgttcgttcaatctgtgaaggtagaaaacttaaaggcaaaccctggcccaggacccattctttatgggacatatcggtatcccccacttgatgttgttaccacttggggagaaagtattaatgtttctcttccctctggctcatacaaggaatggaaatattatctgaattgtgggtcttcaataaatatttcgtatcacgtgagctctaagagctcttctgttttccttataatcgccgaaggggacgtgagcctcacacggtggctggaggacccaacagaacctaatacaactctgtcatggaatgtgatccatggaactggtatgatcacacaggacatattctggtcgtcgagctattatgtggcattgggcaatttggatgaggatgtggaggtagcattaaacctcagtataagggcctccttgcataatacaacgaatgctttctacaaatgtgatcttgccaatggtccatgcagtttgaatcttttgttttctgatggaagtgcagctgtcttagttactcctggtccacaacagaatgcatccaatgagtggtatgtcaaactgtcctatggaccaagatgggtgacctatatttttggaattggtggattgactttgcttgtgtttggggccttcaacttcttgaacaagcttcagtgtgctcatgaagatagagcaggagttagatctgagggaacagaacgtcagagagcccctttgcttcctcacaaagatgatgatctttcaagttggggttcatcgtatgagtccttgccacaagatgagaaggatcttggctttcttccaggaggccccattgatgggaagactttagttgatggtgaaaccagtaataacacacggcatctttgtgctatttgctttgatgctccgagggactgcttcttccttccatgtggacactgtgtggcttgctttgcttgtggaactaggatagccgaggcagctggtacttgccctgtttgtcgtaggaacatgaagaaggttaggaagattttcactgtttgatcagtgcacttcctagtgtagagattaaatgagtagtcaccagaatcatagaataccttttatgtactcaactatacattattttcttgccaatcattaacaatgatcaagcaaatggtgtctgctgatgagggtcgtattggccattgcagcattgcctactgtaatagtgactagatgaatagccaccggaatcatagattactttttatgtattcaactacacattattttcttgccaatcaacaacaataatc

SEQ ID NO: 56465 - protein, 446 aa, Glycine max
  peptide (1)..(446): Ceres Seq. ID no. 15174876
TLVSLSSMAEPHSTAAILPPSTARLEETPSGSSQTPLRSGRGGWSIVDGSFAIVRDNTCSCFVVVFSLWFFVSMTMILGVYGSMTIVLGPKSSIVFQPSPVFVQSVKVENLKANPGPGPILYGTYRYPPLDVVTTWGESINVSLPSGSYKEWKYYLNCGSSINISYHVSSKSSSVFLIIAEGDVSLTRWLEDPTEPNTTLSWNVIHGTGMITQDIFWSSSYYVALGNLDEDVEVALNLSIRASLHNTTNAFYKCDLANGPCSLNLLFSDGSAAVLVTPGPQQNASNEWYVKLSYGPRWVTYIFGIGGLTLLVFGAFNFLNKLQCAHEDRAGVRSEGTERQRAPLLPHKDDDLSSWGSSYESLPQDEKDLGFLPGGPIDGKTLVDGETSNNTRHLCAICFDAPRDCFFLPCGHCVACFACGTRIAEAAGTCPVCRRNMKKVRKIFTV

SEQ ID NO: 56466 - protein, 439 aa, Glycine max
  peptide (1)..(439): Ceres Seq. ID no. 15174877
MAEPHSTAAILPPSTARLEETPSGSSQTPLRSGRGGWSIVDGSFAIVRDNTCSCFVVVFSLWFFVSMTMILGVYGSMTIVLGPKSSIVFQPSPVFVQSVKVENLKANPGPGPILYGTYRYPPLDVVTTWGESINVSLPSGSYKEWKYYLNCGSSINISYHVSSKSSSVFLIIAEGDVSLTRWLEDPTEPNTTLSWNVIHGTGMITQDIFWSSSYYVALGNLDEDVEVALNLSIRASLHNTTNAFYKCDLANGPCSLNLLFSDGSAAVLVTPGPQQNASNEWYVKLSYGPRWVTYIFGIGGLTLLVFGAFNFLNKLQCAHEDRAGVRSEGTERQRAPLLPHKDDDLSSWGSSYESLPQDEKDLGFLPGGPIDGKTLVDGETSNNTRHLCAICFDAPRDCFFLPCGHCVACFACGTRIAEAAGTCPVCRRNMKKVRKIFTV

SEQ ID NO: 56467 - protein, 373 aa, Glycine max
  peptide (1)..(373): Ceres Seq. ID no. 15174878
MTMILGVYGSMTIVLGPKSSIVFQPSPVFVQSVKVENLKANPGPGPILYGTYRYPPLDVVTTWGESINVSLPSGSYKEWKYYLNCGSSINISYHVSSKSSSVFLIIAEGDVSLTRWLEDPTEPNTTLSWNVIHGTGMITQDIFWSSSYYVALGNLDEDVEVALNLSIRASLHNTTNAFYKCDLANGPCSLNLLFSDGSAAVLVTPGPQQNASNEWYVKLSYGPRWVTYIFGIGGLTLLVFGAFNFLNKLQCAHEDRAGVRSEGTERQRAPLLPHKDDDLSSWGSSYESLPQDEKDLGFLPGGPIDGKTLVDGETSNNTRHLCAICFDAPRDCFFLPCGHCVACFACGTRIAEAAGTCPVCRRNMKKVRKIFTV

SEQ ID NO: 56468 - DNA, 744 bp, Glycine max
  misc_feature (1)..(744): Ceres Seq. ID no. 13582293
aacatcctaatcgaaaaatctttttcaacaaccttatcaacaatgcaagagcttcatgaagcggcaattgcttattacaacaacggctccacggatcaacagactttggcatggcagtttttctgttcaatggacggtgacggtaatggccgtgtcagctttcgagagtataccgacttcttgtgtagaaccaccggtttcgcttgggtccatagcgagatgtttcaggagctcgaccggaatagagacggccagcttgacttctgggaggtcttgacgctttactatgtggctcggacgcggaccattggctgccgcacgtgcctccagcctctcattggtttgtactttacgtgtgtaacgtgctttgaatcgcaatgtgttggcgacacgtttgatctctgcgtcaagtgttatatgcggcggaattataatcatccgcatcgtgtcttcctggatagttttgttttattacgatctaagcgtagccaccctcctatgttgcaggagccgcctggcgaccaaaacatgcccgaacaacatcctgggatgatgggatggtgcaccgcgttgtcagcaatggaagctgcatttgctgtgggatcttttgctggcttttgcactattatgtaaaaatcatgttctatctcattgttgtttttgttcttaaatatttagccaataaacgcactataagtttaaatggcagactacaagataagagagtaatactacaaccttgat

SEQ ID NO: 56469 - protein, 210 aa, Glycine max
  peptide (1)..(210): Ceres Seq. ID no. 13582294
NILIEKSFSTTLSTMQELHEAAIAYYNNGSTDQQTLAWQFFCSMDGDGNGRVSFREYTDFLCRTTGFAWVHSEMFQELDRNRDGQLDFWEVLTLYYVARTRTIGCRTCLQPLIGLYFTCVTCFESQCVGDTFDLCVKCYMRRNYNHPHRVFLDSFVLLRSKRSHPPMLQEPPGDQNMPEQHPGMMGWCTALSAMEAAFAVGSFAGFCTIM

SEQ ID NO: 56470 - protein, 196 aa, Glycine max
  peptide (1)..(196): Ceres Seq. ID no. 13582295
MQELHEAAIAYYNNGSTDQQTLAWQFFCSMDGDGNGRVSFREYTDFLCRTTGFAWVHSEMFQELDRNRDGQLDFWEVLTLYYVARTRTIGCRTCLQPLIGLYFTCVTCFESQCVGDTFDLCVKCYMRRNYNHPHRVFLDSFVLLRSKRSHPPMLQEPPGDQNMPEQHPGMMGWCTALSAMEAAFAVGSFAGFCTIM

SEQ ID NO: 56471 - protein, 167 aa, Glycine max
  peptide (1)..(167): Ceres Seq. ID no. 13582296
MDGDGNGRVSFREYTDFLCRTTGFAWVHSEMFQELDRNRDGQLDFWEVLTLYYVARTRTIGCRTCLQPLIGLYFTCVTCFESQCVGDTFDLCVKCYMRRNYNHPHRVFLDSFVLLRSKRSHPPMLQEPPGDQNMPEQHPGMMGWCTALSAMEAAFAVGSFAGFCTIM

SEQ ID NO: 56472 - DNA, 1137 bp, Glycine max
  misc_feature (1)..(1137): Ceres Seq. ID no. 14304231
gactcctttcgcctcctcctcctcctcctctggattgcggcgcgacggcggccgtgagcgagcggtgctcctactcctcctccacgccctcgcgcccagatccgctccccaatggcgcggaacccggcctccagcgtctacgtaggcaacttggatgagaaggtgcctgaaagagtcttgtatgagattcttattcaggctggtcatgtagtagacctgcacataccatgtgacaaagaaactgggcgtcccaaaggttttgcttttgctgagtatgagacagacgcaattgctcagtatgctgttagacttttttcaggacttgttaggcttaatggtaaaacacttaaatttgcgctttctggacaagacaagccctcatcaaatggcaataatccagtaatgcctaaactcaaccctataccattaccaaagcagcctcagtttgtgcattctagtgatacgcttgtgtcgcataaaccagcatatccggtggtaaatggtgggattccacataatgttttttcacaaggctatcatccttacaatgttcaccctcaagcattaccaactcgacccgtgcatgagcaccgagagtttgtccatggtacgtatggttacaacagtcatgtatatggttctgttctgaatgctagctatggaggttatgttgtgaatgctgttggtcatcgagctgtgaggcaaccaatcatttacccatcctactaggttgtaggcaccaaattgcgggatctggtattcagagtaggcaggttaatcgtagcttcttggtccctcaaattctcagtagcatctttgttgtacccttgtacttcaattccctgcatgtaaatagggctggtatatccattttatcaacggtaagttggcaacggaaagctctgcccactacattgtacacctttgtacttgtctagcctggtacatcttttctctttcttggaattggaaaataaagaaatgcaacatcgtgggctgttttgcccccccactgactcggattatttgagctattcctaaagctccttttcatgtactcgaatgatcattgctgttacttacacagaagatgttgatgtctcagctccggggcctcatataattataaattcaagc

SEQ ID NO: 56473 - protein, 205 aa, Glycine max
  peptide (1)..(205): Ceres Seq. ID no. 14304232
MARNPASSVYVGNLDEKVPERVLYEILIQAGHVVDLHIPCDKETGRPKGFAFAEYETDAIAQYAVRLFSGLVRLNGKTLKFALSGQDKPSSNGNNPVMPKLNPIPLPKQPQFVHSSDTLVSHKPAYPVVNGGIPHNVFSQGYHPYNVHPQALPTRPVHEHREFVHGTYGYNSHVYGSVLNASYGGYVVNAVGHRAVRQPIIYPSY

SEQ ID NO: 56474 - protein, 108 aa, Glycine max
  peptide (1)..(108): Ceres Seq. ID no. 14304233
MPKLNPIPLPKQPQFVHSSDTLVSHKPAYPVVNGGIPHNVFSQGYHPYNVHPQALPTRPVHEHREFVHGTYGYNSHVYGSVLNASYGGYVVNAVGHRAVRQPIIYPSY

SEQ ID NO: 56475 - DNA, 783 bp, Glycine max
  misc_feature (1)..(783): Ceres Seq. ID no. 14304132
atcctctctctcatcagaagaagaagggacgaaagaagaagtatctttgttttcgctctcttctctctcctttcgatctttgacgattagaaaacgaaagtgatggctgcagttaatgggtaccaaggaaacactccggcggcgtcaaagcaatctgctcctctgactaagactgttgatagccaatctgttctcaaaaggctgcaatctgaactaatgggcttgatgatgggtggtgacccggggatatctgctttcccagaggaagacaacatattctgttggaaagggacaataacaggaagcaaagatactgtgtttgaaggaactgagtacagactctcactctctttctccaatgactatcctttcaagcctcctaagatcaagttccacactggttgcttccaccccaatgttgatgtctatggcaatatctgtttggacattcttcaggataaatggtcatctgcatatgatgtgaggacaatactactatcgattcagagccttttgggagaaccgaacatcagctcaccattgaacactcaagcagcgcagctctggagcaaccaagaagagtataggaagatggttgagaagctctacaagccccccagtgcatgataacttcaggatgtgtcattcctttgctctataatttgtttctgatcatcaacagttttatctgtaacattttacctagccttttgacctgagccaaatattgatattgatgtgagcttttcaaaaattaatcagaatgatatacacattcttctt

SEQ ID NO: 56476 - protein, 174 aa, Glycine max
  peptide (1)..(174): Ceres Seq. ID no. 14304133
MAAVNGYQGNTPAASKQSAPLTKTVDSQSVLKRLQSELMGLMMGGDPGISAFPEEDNIFCWKGTITGSKDTVFEGTEYRLSLSFSNDYPFKPPKIKFHTGCFHPNVDVYGNICLDILQDKWSSAYDVRTILLSIQSLLGEPNISSPLNTQAAQLWSNQEEYRKMVEKLYKPPSA

SEQ ID NO: 56477 - protein, 136 aa, Glycine max
  peptide (1)..(136): Ceres Seq. ID no. 14304134
MGLMMGGDPGISAFPEEDNIFCWKGTITGSKDTVFEGTEYRLSLSFSNDYPFKPPKIKFHTGCFHPNVDVYGNICLDILQDKWSSAYDVRTILLSIQSLLGEPNISSPLNTQAAQLWSNQEEYRKMVEKLYKPPSA

SEQ ID NO: 56478 - protein, 133 aa, Glycine max
  peptide (1)..(133): Ceres Seq. ID no. 14304135
MMGGDPGISAFPEEDNIFCWKGTITGSKDTVFEGTEYRLSLSFSNDYPFKPPKIKFHTGCFHPNVDVYGNICLDILQDKWSSAYDVRTILLSIQSLLGEPNISSPLNTQAAQLWSNQEEYRKMVEKLYKPPSA

SEQ ID NO: 56479 - DNA, 1209 bp, Glycine max
  misc_feature (1)..(1209): Ceres Seq. ID no. 14304198
acacactctgcagtgaaacaccctgctccaaactccttcgatggaaaacatccagcacagtcacgtggaagttaagggactaaagctccatgttgctgagattggaagtggtcaaaaggcactggttttcttacatggattcccagaaatatggtatacatggaggcaccagatgattgctgcagcaaatgctggctaccgggctattgcctttgatttcagaggctatggactttctgagcatcctgcggagccagaaaaagcaaacttacttgaccttgttgatgatgtcgtgggtctgttggattcattaagcattaccaaggctgtgcttgttggtaaggactttggtgcctttccagcgtatattgttgccgctctccatccagacaaagtagattcagtcataatgttaggtgttccattcatgcttccaggtccctctgctattcagaacctcccaaaaggctcctacgttattaagtggcaggagcctgggagggcagaagcagattttggccgctttgatgttaagtcagttataaggaacatctacacactcttctctggaagtgagataccaatagcaggtgataatcaggaaatcatggatttgtatgacccaactactcccctgccaccatggttctctgaggaagacctggcaacctatgcatcactatacgaaaaatctggcttcagatttgcattgcaggttccatacaggactcttggagtggatagtggcataagtgatcctaaaatcacagttccggcactgctgatcatgggtgagaaagactatgtcttcaagtgttttggaatggaggactacatccgaagtggcgcagtgaaacattttgtgccagacttggaaatcatatatattccagaaggaagccattttgtgcatgaacaatttcctgagaaggtgaaccagctcatcattgaattccttaacaaacaaagcatttgattgtctgatctgaagctcagagtaggatgcaatattgtataagaagcaactctctgtggcgggatgatttttaaggaatcacttatttccaaataaggcaataagtaacttgaatgagtacttattcgatagaactttgatctacactctacagacattttgataaatactatgtaattcgtatagaattgcttttgctctatcctcaacattaatgatcaatcatctcattg

SEQ ID NO: 56480 - protein, 311 aa, Glycine max
  peptide (1)..(311): Ceres Seq. ID no. 14304199
MENIQHSHVEVKGLKLHVAEIGSGQKALVFLHGFPEIWYTWRHQMIAAANAGYRAIAFDFRGYGLSEHPAEPEKANLLDLVDDVVGLLDSLSITKAVLVGKDFGAFPAYIVAALHPDKVDSVIMLGVPFMLPGPSAIQNLPKGSYVIKWQEPGRAEADFGRFDVKSVIRNIYTLFSGSEIPIAGDNQEIMDLYDPTTPLPPWFSEEDLATYASLYEKSGFRFALQVPYRTLGVDSGISDPKITVPALLIMGEKDYVFKCFGMEDYIRSGAVKHFVPDLEIIYIPEGSHFVHEQFPEKVNQLIIEFLNKQSI

SEQ ID NO: 56481 - protein, 267 aa, Glycine max
  peptide (1)..(267): Ceres Seq. ID no. 14304200
MIAAANAGYRAIAFDFRGYGLSEHPAEPEKANLLDLVDDVVGLLDSLSITKAVLVGKDFGAFPAYIVAALHPDKVDSVIMLGVPFMLPGPSAIQNLPKGSYVIKWQEPGRAEADFGRFDVKSVIRNIYTLFSGSEIPIAGDNQEIMDLYDPTTPLPPWFSEEDLATYASLYEKSGFRFALQVPYRTLGVDSGISDPKITVPALLIMGEKDYVFKCFGMEDYIRSGAVKHFVPDLEIIYIPEGSHFVHEQFPEKVNQLIIEFLNKQSI

SEQ ID NO: 56482 - protein, 188 aa, Glycine max
  peptide (1)..(188): Ceres Seq. ID no. 14304201
MLGVPFMLPGPSAIQNLPKGSYVIKWQEPGRAEADFGRFDVKSVIRNIYTLFSGSEIPIAGDNQEIMDLYDPTTPLPPWFSEEDLATYASLYEKSGFRFALQVPYRTLGVDSGISDPKITVPALLIMGEKDYVFKCFGMEDYIRSGAVKHFVPDLEIIYIPEGSHFVHEQFPEKVNQLIIEFLNKQSI

SEQ ID NO: 56483 - DNA, 1148 bp, Glycine max
  misc_feature (1)..(1148): Ceres Seq. ID no. 14311253
acttgttccccgaagcttctcgtcccctcccctcccctcccctcctctcgcaccgccgggccggagggaggcgcctcgccgtctcctcgccgccgctcgtcgttggtggttcctggcgcgtgagtgacgcccagccggcatggcggccaacgtgggggagtccacgagcgggagcagcagcgtggccggcgacggcgggggcagcttcgagtgcaacatatgcttcgagctgccgcaggagcccatcgtcacgctctgcggccacctcttctgctggccctgcctctacaagtggctgcacatccactcgcactcccccgagtgccccgtctgcaaggccgtcgtcgaggaggacaagctcgtcccgctctatggccgcggcaaggaccgcgtcgaccccaggtccaagggcgtgccgtccggggccgagatccccaaccggccgaccgggcagcggcctgccaccgccccgcaggccgaccccaacaaccacttccccaacgccaaccctaacccctggttcatgggtggagggggcgtccctttggccaacgcgcggtgggggaactacaccttctcggccgcgtttggcggcctgttcccgctgctgagcttccaggtacatggattcccggacgcgaccgcgtacgggcagcctgccgggtttccctatgggtacggacatggacatggccacggccacgggcatgctttccatggtgggaacgcccacgccgccgccccccggcacgcgccgccagggcagcagcagcagcaggcggacgtgtacctcaaggcgctgctcatcctggtcggcttcctcgtgatcgcaagcctcatcacattctaggtttgtcggctcccactattgtcatttgtcaccgtcataataagagaaacgattgtcgtgatacttgtcagatgttgtgtgcattaccttggccccccatacaaagccctggtctagatctgagtggtgcgttttgagcgaaagcgttcatagaactgctgtatatatgtgctatttagacgcggtcctgtggggggcgcctgtgtaccgtagtggtttcgcgctgattcgcgagtgatttggaaacctctcttcggggtggatgtaccagaccaattatatatcatgtgtaattttg

SEQ ID NO: 56484 - protein, 236 aa, Glycine max
  peptide (1)..(236): Ceres Seq. ID no. 14311254
MAANVGESTSGSSSVAGDGGGSFECNICFELPQEPIVTLCGHLFCWPCLYKWLHIHSHSPECPVCKAVVEEDKLVPLYGRGKDRVDPRSKGVPSGAEIPNRPTGQRPATAPQADPNNHFPNANPNPWFMGGGGVPLANARWGNYTFSAAFGGLFPLLSFQVHGFPDATAYGQPAGFPYGYGHGHGHGHGHAFHGGNAHAAAPRHAPPGQQQQQADVYLKALLILVGFLVIASLITF

SEQ ID NO: 56485 - protein, 202 aa, Glycine max
  peptide (1)..(202): Ceres Seq. ID no. 14311255
LFPEASRPLPSPPLLSHRRAGGRRLAVSSPPLVVGGSWRVSDAQPAWRPTWGSPRAGAAAWPATAGAASSATYASSCRRSPSSRSAATSSAGPASTSGCTSTRTPPSAPSARPSSRRTSSSRSMAAARTASTPGPRACRPGPRSPTGRPGSGLPPPRRPTPTTTSPTPTLTPGSWVEGASLWPTRGGGTTPSRPRLAACSRC

SEQ ID NO: 56486 - DNA, 1347 bp, Glycine max
  misc_feature (1)..(1347): Ceres Seq. ID no. 13582297
atccaatcttcactcactctctaatttactacagaaaaaaaaaaaagatgagtagtgttttttcagaacacaaattccaacttcaaccctctcaccaacttctctccctcaagaaatccctgagggacatagacatcccagtcccaccaaggaagctcctcacccgccgctccgccgccgtccacgacgtctccggcgacatgttttccgatgacaccctccggcacaagtaccttccccacaatggctccaccgactcctccgacgatgactccggcgacccctacgcctccgatcaattccgcatgtttgagttcaaggtccggcgctgtactcgcagccggagccatgactggacagactgtccatttgtacatcccggcgagaaggcccgccgtcgggaccctcgccggtttcattactctgcaacagtctgtccagagtttcgccgcggtcagtgtgaccgtggcgatgcatgtgagttttctcatggggtgtttgagtgctggttacacccttctaggtatagaaccgaggcttgcaaggatggtaggaattgcaagcgaaaagtttgcttctttgctcacacccctcgccaactcagggttttgcattccaatgaaaatagcaacaagaaaaagtgcaccaatatgagccctcataacaacaacaacaacaccaacaattgttgtttggtttgccattgctcttcttctactcgttcaccaacttcaaccttgttcggcatgtctcatttttctcctccattgtcaccaccttctccttcttccccttctaggtttgagaccaaccatcatcatggtgttgtgaaatataataaggatgtgctctctgagcttatgtgttccatggagggtttgaattttggtgaggcttcacttttgtctgctgcttctaagcctcacaacaatttgtcttcttggcttgatgtttctgaggatcacaatcaaaaacagttcagtactctttcaccaaccatcactgcttgtggaagcttttccaacaacggaaatgggagatttttgagagaagaaagtggggttgttgatgatgttatttccccagatctcgcatgggtgaatgaattactgatgtagattatatgcatttgaagatgatgatgacaaaaagtggttcgtggtgggaattgtgatgaggatttaccaagtgtaaatacatgttggagctagcaacatatattacatccttggcttcttttcttattattgttttaagaattttattgctttctgaatttgttttaagatttgtcaaattaaattctgtaatttttatgtccattaattagatttgatcttttattcc

SEQ ID NO: 56487 - protein, 371 aa, Glycine max
  peptide (1)..(371): Ceres Seq. ID no. 13582298
PIFTHSLIYYRKKKKMSSVFSEHKFQLQPSHQLLSLKKSLRDIDIPVPPRKLLTRRSAAVHDVSGDMFSDDTLRHKYLPHNGSTDSSDDDSGDPYASDQFRMFEFKVRRCTRSRSHDWTDCPFVHPGEKARRRDPRRFHYSATVCPEFRRGQCDRGDACEFSHGVFECWLHPSRYRTEACKDGRNCKRKVCFFAHTPRQLRVLHSNENSNKKKCTNMSPHNNNNNTNNCCLVCHCSSSTRSPTSTLFGMSHFSPPLSPPSPSSPSRFETNHHHGVVKYNKDVLSELMCSMEGLNFGEASLLSAASKPHNNLSSWLDVSEDHNQKQFSTLSPTITACGSFSNNGNGRFLREESGVVDDVISPDLAWVNELLM

SEQ ID NO: 56488 - protein, 356 aa, Glycine max
  peptide (1)..(356): Ceres Seq. ID no. 13582299
MSSVFSEHKFQLQPSHQLLSLKKSLRDIDIPVPPRKLLTRRSAAVHDVSGDMFSDDTLRHKYLPHNGSTDSSDDDSGDPYASDQFRMFEFKVRRCTRSRSHDWTDCPFVHPGEKARRRDPRRFHYSATVCPEFRRGQCDRGDACEFSHGVFECWLHPSRYRTEACKDGRNCKRKVCFFAHTPRQLRVLHSNENSNKKKCTNMSPHNNNNNTNNCCLVCHCSSSTRSPTSTLFGMSHFSPPLSPPSPSSPSRFETNHHHGVVKYNKDVLSELMCSMEGLNFGEASLLSAASKPHNNLSSWLDVSEDHNQKQFSTLSPTITACGSFSNNGNGRFLREESGVVDDVISPDLAWVNELLM

SEQ ID NO: 56489 - protein, 305 aa, Glycine max
  peptide (1)..(305): Ceres Seq. ID no. 13582300
MFSDDTLRHKYLPHNGSTDSSDDDSGDPYASDQFRMFEFKVRRCTRSRSHDWTDCPFVHPGEKARRRDPRRFHYSATVCPEFRRGQCDRGDACEFSHGVFECWLHPSRYRTEACKDGRNCKRKVCFFAHTPRQLRVLHSNENSNKKKCTNMSPHNNNNNTNNCCLVCHCSSSTRSPTSTLFGMSHFSPPLSPPSPSSPSRFETNHHHGVVKYNKDVLSELMCSMEGLNFGEASLLSAASKPHNNLSSWLDVSEDHNQKQFSTLSPTITACGSFSNNGNGRFLREESGVVDDVISPDLAWVNELLM

SEQ ID NO: 56490 - DNA, 1350 bp, Glycine max
  misc_feature (1)..(1350): Ceres Seq. ID no. 13595438
acgttagcgagaggtaaaaatccgactgcccaggggacgaaccggaacaagggttccgggcccgtctcttcttcgtttcgtttccatccacagctcgtcctccccccaaaccttaccccatgtccgacggcggcggcgagcccggggccggcggctcggcgccggtgtgcaacttcgttcagaagccgccgaagaatattcggaagcgtcccgccgcctccgtcggctctgatgacgaagaaggtagcggcggcgacgattccggggccatcgcggcggcgcgatctaagaagccgccgcctactaccagcaagctcttcttctcctccgccgacaactcacacgagccccgccgtttccagttcgagtcgtcccggactattcagtcctctaccgacaaccgcgccactgcgacgcttgagacggagacggcgtacgaccgtgatgcgcgcgccatccgcgagcgacagctcaagcaggctgaggaatccctcaagaagaacccctctgcctcctcctcctccggggagctctacaaggggatccacggctacacggatcacaaggccggcttccggcgggagcacacggtttccggagagaaggccggcggcgctcacggccccctgcgggcgtcagcgcacatacgcctctccacgcggttcgactaccaacccgacatctgcaaggattataaggagaccggctattgtggctatggcgattcctgcaagttcatgcacgacagaggtgactacaagtccggatggcagctcgagagggagtgggacgaggccgagaaagcccgcaaacggcgcatagcgatgcgtgagttgggtggtagtgatggcgaggcagaggaggaagacagcgacgacgaggaggcactgccctttgcctgcttcatatgcagggagccctttgttgacccggtggtcacaaagtgtaagcattatttctgcgagcattgcgcattaaagcatcactcgaagaacaagaagtgctttgtctgcaataaaccgacgcttggcatcttcaatgcagcgcaggagatccggaagaagattgcccaggacaagaagcagcaggacctttgatgactgctgcacaatgtagcttgtatcatggaggattacttctcttctgtaattgtattgtttgaaaatgagggggaaatgtccaggaatcagttttgtttctttagctctgtactagctcctacttaccattagccattttgccgcaacttaaaaggactacaaggaaggattgtaggagtttttgagaaaatcaacaacgaaagaactagcttattgtggacctatggaaaaatatctcaaaacttgaagg

SEQ ID NO: 56491 - protein, 325 aa, Glycine max
  peptide (1)..(325): Ceres Seq. ID no. 13595439
MSDGGGEPGAGGSAPVCNFVQKPPKNIRKRPAASVGSDDEEGSGGDDSGAIAAARSKKPPPTTSKLFFSSADNSHEPRRFQFESSRTIQSSTDNRATATLETETAYDRDARAIRERQLKQAEESLKKNPSASSSSGELYKGIHGYTDHKAGFRREHTVSGEKAGGAHGPLRASAHIRLSTRFDYQPDICKDYKETGYCGYGDSCKFMHDRGDYKSGWQLEREWDEAEKARKRRIAMRELGGSDGEAEEEDSDDEEALPFACFICREPFVDPVVTKCKHYFCEHCALKHHSKNKKCFVCNKPTLGIFNAAQEIRKKIAQDKKQQDL

SEQ ID NO: 56492 - protein, 273 aa, Glycine max
  peptide (1)..(273): Ceres Seq. ID no. 13595440
TLARGKNPTAQGTNRNKGSGPVSSSFRFHPQLVLPPNLTPCPTAAASPGPAARRRCATSFRSRRRIFGSVPPPPSALMTKKVAAATIPGPSRRRDLRSRRLLPASSSSPPPTTHTSPAVSSSSRPGLFSPLPTTAPLRRLRRRRRTTVMRAPSASDSSSRLRNPSRRTPLPPPPPGSSTRGSTATRITRPASGGSTRFPERRPAALTAPCGRQRTYASPRGSTTNPTSARIIRRPAIVAMAIPASSCTTEVTTSPDGSSRGSGTRPRKPANGA

SEQ ID NO: 56493 - protein, 196 aa, Glycine max
  peptide (1)..(196): Ceres Seq. ID no. 13595441
MTKKVAAATIPGPSRRRDLRSRRLLPASSSSPPPTTHTSPAVSSSSRPGLFSPLPTTAPLRRLRRRRRTTVMRAPSASDSSSRLRNPSRRTPLPPPPPGSSTRGSTATRITRPASGGSTRFPERRPAALTAPCGRQRTYASPRGSTTNPTSARIIRRPAIVAMAIPASSCTTEVTTSPDGSSRGSGTRPRKPANGA

SEQ ID NO: 56494 - DNA, 982 bp, Glycine max
  misc_feature (1)..(982): Ceres Seq. ID no. 14304159
tcaaaaaaaaaactttcaaatccctagaaagatgtcgacggaggaagaaaccaaggtggttgtcgagtcaggagacgccgaagcgacggtgacggagaagaagcctgctgcgaaaggcggcgctaaagctaagaagacgccggcgaagaagaagcctgctgctgctccgaggaagagaaccacttcgtctcaccctccttacgaagagatgatcaaagacgcgatcgtgacgctgaaggagagaaccggatctagccaatacgcgattcagaagttcatcgaggagaagcagaagtcgcttcctccaactttcaggaagcttctcctcgtcaatctcaggagactcgtcgcttccgggaagctagtcaaagtcaaagcctctttcaagattccgtctgcggctaaaccggcggctacgactaaaccggttaacaagaaaccagctgctgctgttactaaaccgaagggtaaagctcctgctaaggccaaaccggctgctaaaggagccaagaaacctgctgctgctgctaagcctaaggcaaagacaacagcaacaactaaagccgctgcgaagcccaaacctaagacgaagagtgtagctgctgtttcaaagaccaaggcggttgctgcgaagcctaaggcgaaggagagacctgttaaagcgtcgaggacttcgactaggacgtctccagggaagaaggcagcagctccggctaagaaagctgctgctgctgcgactaagaaggctccggctaagagtgtgaaggttaaatctccagcgaagagggcttcgacgaggaagaagtgattggttttagcttctcttagggttaaagtctttgtataattgaatcgtctatgaagggggcttgttttttcttcttccaaagtttatctttgtcttggtttcttctcgaaacccttttatcttgtaatttttggtttgtttgaaaattcaatagctatatgtgatggggtttgc

SEQ ID NO: 56495 - protein, 268 aa, Glycine max
  peptide (1)..(268): Ceres Seq. ID no. 14304160
QKKNFQIPRKMSTEEETKVVVESGDAEATVTEKKPAAKGGAKAKKTPAKKKPAAAPRKRTTSSHPPYEEMIKDAIVTLKERTGSSQYAIQKFIEEKQKSLPPTFRKLLLVNLRRLVASGKLVKVKASFKIPSAAKPAATTKPVNKKPAAAVTKPKGKAPAKAKPAAKGAKKPAAAAKPKAKTTATTKAAAKPKPKTKSVAAVSKTKAVAAKPKAKERPVKASRTSTRTSPGKKAAAPAKKAAAAATKKAPAKSVKVKSPAKRASTRKK

SEQ ID NO: 56496 - protein, 258 aa, Glycine max
  peptide (1)..(258): Ceres Seq. ID no. 14304161
MSTEEETKVVVESGDAEATVTEKKPAAKGGAKAKKTPAKKKPAAAPRKRTTSSHPPYEEMIKDAIVTLKERTGSSQYAIQKFIEEKQKSLPPTFRKLLLVNLRRLVASGKLVKVKASFKIPSAAKPAATTKPVNKKPAAAVTKPKGKAPAKAKPAAKGAKKPAAAAKPKAKTTATTKAAAKPKPKTKSVAAVSKTKAVAAKPKAKERPVKASRTSTRTSPGKKAAAPAKKAAAAATKKAPAKSVKVKSPAKRASTRKK

SEQ ID NO: 56497 - protein, 199 aa, Glycine max
  peptide (1)..(199): Ceres Seq. ID no. 14304162
MIKDAIVTLKERTGSSQYAIQKFIEEKQKSLPPTFRKLLLVNLRRLVASGKLVKVKASFKIPSAAKPAATTKPVNKKPAAAVTKPKGKAPAKAKPAAKGAKKPAAAAKPKAKTTATTKAAAKPKPKTKSVAAVSKTKAVAAKPKAKERPVKASRTSTRTSPGKKAAAPAKKAAAAATKKAPAKSVKVKSPAKRASTRKK

SEQ ID NO: 56498 - DNA, 1200 bp, Glycine max
  misc_feature (1)..(1200): Ceres Seq. ID no. 14311163
agtccagagcgccgtgtccgccgaccaccacttcaactcctccactgcagcctgcaggaagctactagctagaacccgaataatctgcacctagccatggtgaagctagccacggcgcgggactgccgcgcgtacagcctcggcgccacgggcggcgagacgtcgcgcaaccggcggtgggagtacatcaacgcaggggtgtacgtcttcgccgccgtcctcctcgtcgttggcttcttggcgcagctgtggccgtgggcggtgtccaccaaggccggcctcgcggtggccgtcgtcgggctgctgggcgtgctgggagcgaacgcgcacgacctgctggcgcacgtcgccggcgtcgactacaaccttggcctggccgggctcgacacccagttcgtgctcgtcgagctcgccgcccccgccgtgcagctcgccggcgccgcgctcaccttggtcgcgctcatcttgttcgagatccagatggagagaggtcaccggcgtggcctggagaagcacggcctgaacctgctcatcgccgggccagcgctgtggtgcctcgggtccatacacaacatgtgccaagtctacgagcgagccaacgggcacgtccagatcctccagaagagcgtgcagatcccgtttctgctcggcagcaccctcttcttcatcggcggcgtcgtcaaccggaacgacgtccacggccactcctcccacagcttcaccctactggggaggagctgggcgtggtactgcctgttcgggagcctgctgttcttggcgggagggctgctgaacctgctcaaggtgttcaagatgcagcagatgggcgggcgggggctggagaagctgcgcggcggcgcgcaggagcggcttagcagggagagggagggcaaggtgcctctcatcctggaggagggacggagggggaagcacggaggcaatgtaggggacacctgggcgccgccggcgccgcggcacgagccgagggctccgccagtcccgccgccgccggagggttcttacaaggacgctgtcgtgagcggcggcaactagtgtgatcttgccgtccacggcggtaacgaataataagagaggacgtgacaaggcagctggtagaggcgaagcattggcttagggcgacgccatcctgtattttcctatctgtacacgatgtcatgtgaattatatcgacttgctgcc

SEQ ID NO: 56499 - protein, 318 aa, Glycine max
  peptide (1)..(318): Ceres Seq. ID no. 14311164
MVKLATARDCRAYSLGATGGETSRNRRWEYINAGVYVFAAVLLVVGFLAQLWPWAVSTKAGLAVAVVGLLGVLGANAHDLLAHVAGVDYNLGLAGLDTQFVLVELAAPAVQLAGAALTLVALILFEIQMERGHRRGLEKHGLNLLIAGPALWCLGSIHNMCQVYERANGHVQILQKSVQIPFLLGSTLFFIGGVVNRNDVHGHSSHSFTLLGRSWAWYCLFGSLLFLAGGLLNLLKVFKMQQMGGRGLEKLRGGAQERLSREREGKVPLILEEGRRGKHGGNVGDTWAPPAPRHEPRAPPVPPPPEGSYKDAVVSGGN

SEQ ID NO: 56500 - protein, 190 aa, Glycine max
  peptide (1)..(190): Ceres Seq. ID no. 14311165
MERGHRRGLEKHGLNLLIAGPALWCLGSIHNMCQVYERANGHVQILQKSVQIPFLLGSTLFFIGGVVNRNDVHGHSSHSFTLLGRSWAWYCLFGSLLFLAGGLLNLLKVFKMQQMGGRGLEKLRGGAQERLSREREGKVPLILEEGRRGKHGGNVGDTWAPPAPRHEPRAPPVPPPPEGSYKDAVVSGGN

SEQ ID NO: 56501 - protein, 159 aa, Glycine max
  peptide (1)..(159): Ceres Seq. ID no. 14311166
MCQVYERANGHVQILQKSVQIPFLLGSTLFFIGGVVNRNDVHGHSSHSFTLLGRSWAWYCLFGSLLFLAGGLLNLLKVFKMQQMGGRGLEKLRGGAQERLSREREGKVPLILEEGRRGKHGGNVGDTWAPPAPRHEPRAPPVPPPPEGSYKDAVVSGGN

SEQ ID NO: 56502 - DNA, 1311 bp, Glycine max
  misc_feature (1)..(1311): Ceres Seq. ID no. 13595454
atcttaaagacgaaccaaaatgagagagagaattattcatgatatgttttgttcttaattggaaaattgtaatgcatgcacactctcttgaagggtaagtttctgagaattttctgtcactttctcggcaaaaaattatgtcttccctctccaatcttgaacgctttctcctacgcgtcactccagatgttccgtcactcactcttcagagctgctgtagtgatctaaatgcacaatggctacctcctggcaaagacacaatcgaatatttcactctgaaagatctttgggactgctactatgaatggagtgcctttggtgctggcattcctatgatattggaaaatggtgacactctggtgcaatactatgctccatatctgtctgctacccaaatctatatcagtaaatctaggattcggaaagagtacggtgaaggagttgaagttgaatgtgattccttgagcgaggacagtgcaagtgataacctttctagatcacccagtaacaattctagcaaagcatgggatgatgcttctttggattcaggctctgaccaagtgggttcatgcacaacaaaggatatgcttggcgctctttacttacaatactctgagaactctccaccttaccagcgggttccattttctgagaagataaccgagttagctaaaagccatccaggattgatgaggttgaagagtgtggatatttcccccacaagttggatggctgtttcatggtatcccatttattccgtaccatgccacaaaaataaaagggaccaaacaagcttcctcactttccattcactttcatctttccaagactgtgcaagcaaatatgacgaaattcacacagggaataacaaaagttgtttaattgattggcgaagtattgtgggagagaaatgcaagaaaaaagagaggggttgcatgtctctctctccttttgggttagccacgtacaaaatgaggaaaaacatatggttaaatccctataacaataaccaagtggtgaccgatctatacaacgctgcagactggtggttgaagcatatcaacgctgaccaccctgacttcaacttcttcacacgccaacctaccttgtagattggtttgtgttgtgttcatcaccaccagctcaatgcccctttgctcagtttgctactctcatttcggtatcagaatttgcttagtttggtactctgaccttcaccctaggtccaactctgagaacattaataaataaaatgtaaagtttagtttaatgggttcatgtaaagtgatatttatcttagcttctttaccc

SEQ ID NO: 56503 - protein, 324 aa, Glycine max
  peptide (1)..(324): Ceres Seq. ID no. 13595455
MSSLSNLERFLLRVTPDVPSLTLQSCCSDLNAQWLPPGKDTIEYFTLKDLWDCYYEWSAFGAGIPMILENGDTLVQYYAPYLSATQIYISKSRIRKEYGEGVEVECDSLSEDSASDNLSRSPSNNSSKAWDDASLDSGSDQVGSCTTKDMLGALYLQYSENSPPYQRVPFSEKITELAKSHPGLMRLKSVDISPTSWMAVSWYPIYSVPCHKNKRDQTSFLTFHSLSSFQDCASKYDEIHTGNNKSCLIDWRSIVGEKCKKKERGCMSLSPFGLATYKMRKNIWLNPYNNNQVVTDLYNAADWWLKHINADHPDFNFFTRQPTL

SEQ ID NO: 56504 - protein, 259 aa, Glycine max
  peptide (1)..(259): Ceres Seq. ID no. 13595456
MILENGDTLVQYYAPYLSATQIYISKSRIRKEYGEGVEVECDSLSEDSASDNLSRSPSNNSSKAWDDASLDSGSDQVGSCTTKDMLGALYLQYSENSPPYQRVPFSEKITELAKSHPGLMRLKSVDISPTSWMAVSWYPIYSVPCHKNKRDQTSFLTFHSLSSFQDCASKYDEIHTGNNKSCLIDWRSIVGEKCKKKERGCMSLSPFGLATYKMRKNIWLNPYNNNQVVTDLYNAADWWLKHINADHPDFNFFTRQPTL

SEQ ID NO: 56505 - protein, 175 aa, Glycine max
  peptide (1)..(175): Ceres Seq. ID no. 13595457
MLGALYLQYSENSPPYQRVPFSEKITELAKSHPGLMRLKSVDISPTSWMAVSWYPIYSVPCHKNKRDQTSFLTFHSLSSFQDCASKYDEIHTGNNKSCLIDWRSIVGEKCKKKERGCMSLSPFGLATYKMRKNIWLNPYNNNQVVTDLYNAADWWLKHINADHPDFNFFTRQPTL

SEQ ID NO: 56506 - DNA, 673 bp, Glycine max
  misc_feature (1)..(673): Ceres Seq. ID no. 12783386
acatcgattccttcctgccactccttcctcgcatgccccctgagttcctgcaccgagactgctagctagctataatctcctcggcttctttctccgtcccctcggccggcctgccacccgatcgttcctgatgtccggcaccgtgtgctccatgtgcggcgacgtcggcttccaggacaagctcttccgctgcgcccgttgccgctgccgcttccaacactcctattgcacgaactactacggcgacgcggccccggctgacgcgggcgccggcgtgtgcgactggtgcctcagcgacgaccccctcgtgaagaacaggcgcccttcggcgccgccggccatgcagcaccgcggtccgccgaccgggatgggctgcggcaaggtcaaggtgaccggcggcggcgagcaggagggcggccggagagtggccaaggcggccgtccgcaggtacaagctcctcaaagacgtccttgctagctagctggtgcatgcatggtcctgggtcaccgcactcctttccttagatcgggacctcgtcatcatgtgtactaaaaaacgatgctgtttaattaagtagtcgatagtcgttgtacctagctagctggcgaggttctgcttccatatcgatccttgtgtgcaaatgtcggcatgtcacaatgagatctacttctgt

SEQ ID NO: 56507 - protein, 116 aa, Glycine max
  peptide (1)..(116): Ceres Seq. ID no. 12783387
MSGTVCSMCGDVGFQDKLFRCARCRCRFQHSYCTNYYGDAAPADAGAGVCDWCLSDDPLVKNRRPSAPPAMQHRGPPTGMGCGKVKVTGGGEQEGGRRVAKAAVRRYKLLKDVLAS

SEQ ID NO: 56508 - protein, 109 aa, Glycine max
  peptide (1)..(109): Ceres Seq. ID no. 12783388
MCGDVGFQDKLFRCARCRCRFQHSYCTNYYGDAAPADAGAGVCDWCLSDDPLVKNRRPSAPPAMQHRGPPTGMGCGKVKVTGGGEQEGGRRVAKAAVRRYKLLKDVLAS

SEQ ID NO: 56509 - DNA, 1365 bp, Glycine max
  misc_feature (1)..(1365): Ceres Seq. ID no. 13582301
agagattagaaactaattactcttgtgatattctctcacaagggtgtgtaattaaggcatagaaaatatggcatcctttgccagcaataattatcctttggtgtttttctttgttctcttttcactggccatgcgcttagctcatgggactaattatgcaccaacattattcatatttggagactcaacttttgatgttggaaccaacaactttcttaattctaaagcaaaggccaacttcccctacaatggcattgatttttatcctccatttcccacaggaaggtttagtaatggcttcaacactgctgaccaaattgcgagacaattcggttataagcagagcccaccaccatttttaactttggagaaagaccaatacagcctaaagaagaacattctgaagggtgtaaattttgcttcagggggatctggaattcttagagaaacagggcactcagaatggggagaagtggttttctttgaaaggcaggtggaacaatttgcatcggttggtggaaacatcagtgagatgttgggacatgcacaagctgctaaatttgtttccaaggctttgtttctcattagcgttggaagcaacgacatcttcgattatgcacgtaacgacagtggctccattcatttgggcgcagaagaatacttagctgttgtacaactcacatattactctcatataaagaaactatatgagttgggggcaaggaaatttggcatcataagcgttgcaaccgtaggttgctgtcctgctgtaagctctctcaatggagggaagtgcgtggaaccactgaatgattttgcagttgcattttatttagctacacaagctcttctgcaaaagttgagttcagaattgaaagggttcaagtactcacttggcaactcttttgaaatgacctcgaccttgttaaagagtccatcgtccttcgggttgaagtatacacagtcagcatgctgcggaattggatatctgaatgggcaaggtggatgcataaaagcccaaaacgccaatctttgcacaaatcgcaatgagttcttgttttgggattggtttcatcccactgagatagcttctttgttggcagctaagacattatttgaaggagacaaagagtttgtaactccagtgaatttacgtcagctagcttattcctattgatcatgtctaagccataacataagtaaccaattactataatttgaagtgaaataacgtagctggcatctctcactagtgccggttttaggctctttttttcttttgttgagaaaaattctcatgcataatctaatgatatgctaataagagttgctatttataaaaaaaaaaaaaaaaaagcttatcga

SEQ ID NO: 56510 - protein, 369 aa, Glycine max
  peptide (1)..(369): Ceres Seq. ID no. 13582302
MASFASNNYPLVFFFVLFSLAMRLAHGTNYAPTLFIFGDSTFDVGTNNFLNSKAKANFPYNGIDFYPPFPTGRFSNGFNTADQIARQFGYKQSPPPFLTLEKDQYSLKKNILKGVNFASGGSGILRETGHSEWGEVVFFERQVEQFASVGGNISEMLGHAQAAKFVSKALFLISVGSNDIFDYARNDSGSIHLGAEEYLAVVQLTYYSHIKKLYELGARKFGIISVATVGCCPAVSSLNGGKCVEPLNDFAVAFYLATQALLQKLSSELKGFKYSLGNSFEMTSTLLKSPSSFGLKYTQSACCGIGYLNGQGGCIKAQNANLCTNRNEFLFWDWFHPTEIASLLAAKTLFEGDKEFVTPVNLRQLAYSY

SEQ ID NO: 56511 - protein, 348 aa, Glycine max
  peptide (1)..(348): Ceres Seq. ID no. 13582303
MRLAHGTNYAPTLFIFGDSTFDVGTNNFLNSKAKANFPYNGIDFYPPFPTGRFSNGFNTADQIARQFGYKQSPPPFLTLEKDQYSLKKNILKGVNFASGGSGILRETGHSEWGEVVFFERQVEQFASVGGNISEMLGHAQAAKFVSKALFLISVGSNDIFDYARNDSGSIHLGAEEYLAVVQLTYYSHIKKLYELGARKFGIISVATVGCCPAVSSLNGGKCVEPLNDFAVAFYLATQALLQKLSSELKGFKYSLGNSFEMTSTLLKSPSSFGLKYTQSACCGIGYLNGQGGCIKAQNANLCTNRNEFLFWDWFHPTEIASLLAAKTLFEGDKEFVTPVNLRQLAYSY

SEQ ID NO: 56512 - protein, 214 aa, Glycine max
  peptide (1)..(214): Ceres Seq. ID no. 13582304
MLGHAQAAKFVSKALFLISVGSNDIFDYARNDSGSIHLGAEEYLAVVQLTYYSHIKKLYELGARKFGIISVATVGCCPAVSSLNGGKCVEPLNDFAVAFYLATQALLQKLSSELKGFKYSLGNSFEMTSTLLKSPSSFGLKYTQSACCGIGYLNGQGGCIKAQNANLCTNRNEFLFWDWFHPTEIASLLAAKTLFEGDKEFVTPVNLRQLAYSY

SEQ ID NO: 56513 - DNA, 808 bp, Glycine max
  misc_feature (1)..(808): Ceres Seq. ID no. 12583465
agaaagattagatagcgtgtgggaaatcaagagcagagctgaaacttcttctcttcacttgaaactgtgtttgaaaaagaaaaaaaacatggccacactattctcacctttgtctctgcactctgctcgcccctcttcttcttccttttcttcttcttcttcttcttcttcatcttctcccttctttgccttttgcagcttccctttgcgctctcgcatttcatctttgaaggcacaaacaattcttcttcagaagatgaagcgcgtggtaaaggcagtggaagaagagacccagcaagaactcaccgctgtggatgagtctgaacaaccatcaacctccgaagcaccacccgttgtggttcccgtttccccatcagatactctcaccatgttctttcaggcagagggaacagtgagtgaaacagctattccagctttaaccaaagctttagaggagacagatggtgttactgatttgaagtttcagcttgccgagggacttgcaattttagagttgaagaagcagacaacagtccaagctacaggagtggcttctggtcttttagaaaccatacaaggttcaggctttaaactacagacattaaatctgagttttgaggatgaagaagttgcagttgcctagactaaatgtgctggtgttataacaatagtttgagggagtaaaaaaaaaatttaaagaacatgcctttcacacattcctgactagagcctcgaacaatcattttggtttgtatagggctgactgaggatattggttattattattattgttgttcttgttatcatt

SEQ ID NO: 56514 - protein, 213 aa, Glycine max
  peptide (1)..(213): Ceres Seq. ID no. 12583466
ERLDSVWEIKSRAETSSLHLKLCLKKKKNMATLFSPLSLHSARPSSSSFSSSSSSSSSSPFFAFCSFPLRSRISSLKAQTILLQKMKRVVKAVEEETQQELTAVDESEQPSTSEAPPVVVPVSPSDTLTMFFQAEGTVSETAIPALTKALEETDGVTDLKFQLAEGLAILELKKQTTVQATGVASGLLETIQGSGFKLQTLNLSFEDEEVAVA

SEQ ID NO: 56515 - protein, 184 aa, Glycine max
  peptide (1)..(184): Ceres Seq. ID no. 12583467
MATLFSPLSLHSARPSSSSFSSSSSSSSSSPFFAFCSFPLRSRISSLKAQTILLQKMKRVVKAVEEETQQELTAVDESEQPSTSEAPPVVVPVSPSDTLTMFFQAEGTVSETAIPALTKALEETDGVTDLKFQLAEGLAILELKKQTTVQATGVASGLLETIQGSGFKLQTLNLSFEDEEVAVA

SEQ ID NO: 56516 - protein, 128 aa, Glycine max
  peptide (1)..(128): Ceres Seq. ID no. 12583468
MKRVVKAVEEETQQELTAVDESEQPSTSEAPPVVVPVSPSDTLTMFFQAEGTVSETAIPALTKALEETDGVTDLKFQLAEGLAILELKKQTTVQATGVASGLLETIQGSGFKLQTLNLSFEDEEVAVA

SEQ ID NO: 56517 - DNA, 1368 bp, Glycine max
  misc_feature (1)..(1368): Ceres Seq. ID no. 12583425
gagattttatctgttaggaagaggtccttttgcttctgaatgagagtgtccaatgaaagtttggtccttgatgcataattaaattgttctattgagtggtggcaagtcaaaaaggtctcggctttttcgtaagagaatattgttttttttagtaagattatatatggtgttgttgctatatttaaattaaagaacctgcaaggccctgtgtgcttcttgtttcagcattgccataatcttcttcttcttcttcttctttttcttcttgttcttcttctcatggctcttatgttaggctatgatccttgttcccatttaagtagggccttttcccattttccttctgtttcttcctctgaggctaacagaaacgttggattcactcttaaagcctgttttgatgccaatagcggtgataatgccaatagggtctttgtgaaggaaaagaaaaaacccaatggttttgcatgtgttcctcaccctcccttgttaggtggtttagagaagggtattgatgttgaagatagatctttgggtggaagtcccaccaaacccttttgtttctctgatcaacaattgccccagaaacttgttgttgctgttgatgttgatgaagtattaggaaactttgtgtcagctctgaacaagttcatagcagatcgatactcatcaaattgttcagtttctgagtatcacgtgtatgagttcttcaagatatggaactgctcacgtgacgaagcaaatacccgtgttcatgagttttttgagacaccatacttcaagtcagggatccaacctatcccaggtgctcagacatccctgcagaagttatcaacattttgtagcctatcagttgtaacatctcggcaaaatgtaatcaaggatcatacacttgagtggatagagaagcatttttcaggattgtttcaggagattcactttggaaaccactttgcccttgatgggatgtctagaccaaagtcggagatttgtaggtctataaatgctacggttctcattgatgataacccaagatacgccatagagtgcgctgaagccggaattagagtcctactttttgattatgaaaactcgtacccttggtccaagaccaattcagctgatgagcatcccctggtgatcaaagttaagaactgggaagaagttgaacaacaattgatgtcattggtagctttgtagttactaaaatcctgcagcaaggatttgttaaaagcactcttattagattaagtagtggatagtttcttatgcctgaaatatctaattaagacaccataaaggtgaaattaggggaagtaactgcaagaagttatagtcctgtttggaaaaatataaaattacctgatt

SEQ ID NO: 56518 - protein, 306 aa, Glycine max
  peptide (1)..(306): Ceres Seq. ID no. 12583426
MALMLGYDPCSHLSRAFSHFPSVSSSEANRNVGFTLKACFDANSGDNANRVFVKEKKKPNGFACVPHPPLLGGLEKGIDVEDRSLGGSPTKPFCFSDQQLPQKLVVAVDVDEVLGNFVSALNKFIADRYSSNCSVSEYHVYEFFKIWNCSRDEANTRVHEFFETPYFKSGIQPIPGAQTSLQKLSTFCSLSVVTSRQNVIKDHTLEWIEKHFSGLFQEIHFGNHFALDGMSRPKSEICRSINATVLIDDNPRYAIECAEAGIRVLLFDYENSYPWSKTNSADEHPLVIKVKNWEEVEQQLMSLVAL

SEQ ID NO: 56519 - protein, 303 aa, Glycine max
  peptide (1)..(303): Ceres Seq. ID no. 12583427
MLGYDPCSHLSRAFSHFPSVSSSEANRNVGFTLKACFDANSGDNANRVFVKEKKKPNGFACVPHPPLLGGLEKGIDVEDRSLGGSPTKPFCFSDQQLPQKLVVAVDVDEVLGNFVSALNKFIADRYSSNCSVSEYHVYEFFKIWNCSRDEANTRVHEFFETPYFKSGIQPIPGAQTSLQKLSTFCSLSVVTSRQNVIKDHTLEWIEKHFSGLFQEIHFGNHFALDGMSRPKSEICRSINATVLIDDNPRYAIECAEAGIRVLLFDYENSYPWSKTNSADEHPLVIKVKNWEEVEQQLMSLVAL

SEQ ID NO: 56520 - DNA, 1412 bp, Glycine max
  misc_feature (1)..(1412): Ceres Seq. ID no. 13582619
agtcacttctcaccgtcactttagtcttctcttgcggtggcacaaactatatcacgtttcgaaagagtaacttggtgaccggtgaggtgttcctagttaccatacgaaagaggattttggtgtaggatgggatcgatagagaacgcttccaaaccaaggaaggaaaatccgaaatttgaattgccagcgggttttagatttcatccaacagatgaagaactcataaatcaatacctcacaaagaaggttgttgacaactgtttctgtgctatagccattggtgaggttgatttgaacaagtgtgagccatgggatttgcctgggttggctaaaatgggtgaaactgagtggtattttttctgtgtgagggacagaaaattcccaactggtataaggactaatagggccactgatattggttattggaaagccacaggaaaagacaaggagataataatggagaatgcactcattgggatgaagaaaaccttggttttctacaagggaagagctcctaaaggtgaaaagacaaactgggttatgcatgaatataggttggaagggaaacataatcaacccaaacctggaaagagtgaatgggtgatttgtagagtctttgagaagagtcgttgtgggaagaaaatgcatgttccaaagtgtgggaggttcaacaacccctttggagaggaaccatcatcaggtgcttctctattgcctcctttgatggattcttctccatacaacagtgaaacaagaaccaccactgctggggagttgtctcaggtgacatgcttctctgatccaaatcaaactgaggatcagaacaacacacatgatgacattgttgatagcatggaaactcctattttgaacttctcacccttttcaaggcctgatgatgcatccactttggccaaagcaaccctttcttcagcctcaaaccaatcagcacagattgcacaccaaattggggaatcacagttcccagattattgttatgcgcctcaagaaccgtccatgttgaggatgctgatggaaaaccatgaaccctgtgcgaagcaaactcagaaagaagagtttcctgagggaagagactttgatggagatatctcatctatgatatacagcagtgacatgataaacagaatgtttgggaatcaagaacattcttcatcagcttctgcagggcctgtggacactgatttcctatggaattactgaaggttaaggaatattatttagtgttaagacagaaaatatgttaattatatttatattcatatgatacatacaggttggttacctgcaacttcatgaacttattgtaggaattatgggaaatgcatgaaattgaatttcccccctctggttgataactttgataaaaactagtgatgaatagtccatatgtt

SEQ ID NO: 56521 - protein, 364 aa, Glycine max
  peptide (1)..(364): Ceres Seq. ID no. 13582620
MGSIENASKPRKENPKFELPAGFRFHPTDEELINQYLTKKVVDNCFCAIAIGEVDLNKCEPWDLPGLAKMGETEWYFFCVRDRKFPTGIRTNRATDIGYWKATGKDKEIIMENALIGMKKTLVFYKGRAPKGEKTNWVMHEYRLEGKHNQPKPGKSEWVICRVFEKSRCGKKMHVPKCGRFNNPFGEEPSSGASLLPPLMDSSPYNSETRTTTAGELSQVTCFSDPNQTEDQNNTHDDIVDSMETPILNFSPFSRPDDASTLAKATLSSASNQSAQIAHQIGESQFPDYCYAPQEPSMLRMLMENHEPCAKQTQKEEFPEGRDFDGDISSMIYSSDMINRMFGNQEHSSSASAGPVDTDFLWNY

SEQ ID NO: 56522 - protein, 295 aa, Glycine max
  peptide (1)..(295): Ceres Seq. ID no. 13582621
MGETEWYFFCVRDRKFPTGIRTNRATDIGYWKATGKDKEIIMENALIGMKKTLVFYKGRAPKGEKTNWVMHEYRLEGKHNQPKPGKSEWVICRVFEKSRCGKKMHVPKCGRFNNPFGEEPSSGASLLPPLMDSSPYNSETRTTTAGELSQVTCFSDPNQTEDQNNTHDDIVDSMETPILNFSPFSRPDDASTLAKATLSSASNQSAQIAHQIGESQFPDYCYAPQEPSMLRMLMENHEPCAKQTQKEEFPEGRDFDGDISSMIYSSDMINRMFGNQEHSSSASAGPVDTDFLWNY

SEQ ID NO: 56523 - protein, 254 aa, Glycine max
  peptide (1)..(254): Ceres Seq. ID no. 13582622
MENALIGMKKTLVFYKGRAPKGEKTNWVMHEYRLEGKHNQPKPGKSEWVICRVFEKSRCGKKMHVPKCGRFNNPFGEEPSSGASLLPPLMDSSPYNSETRTTTAGELSQVTCFSDPNQTEDQNNTHDDIVDSMETPILNFSPFSRPDDASTLAKATLSSASNQSAQIAHQIGESQFPDYCYAPQEPSMLRMLMENHEPCAKQTQKEEFPEGRDFDGDISSMIYSSDMINRMFGNQEHSSSASAGPVDTDFLWNY

SEQ ID NO: 56524 - DNA, 939 bp, Glycine max
  misc_feature (1)..(939): Ceres Seq. ID no. 13595821
ccrtttaamcwagaacatcctaatcgaaaagtcttgtaaagaaatctaaagctcatctcttagctcctctgtactcctcctccacacttccttccctccaacgagttccaaaacgcgagtagccatgtcgctcacgatcccgacgaacctcgttctcaacccgagatccaacaaatctctcactcaatccttgcctaaatccaccgcgagattcgtttgctccgatgacaaatccgcgacgcagcaacagtccatgaaggctttctccgccgcagtcgctctctcttccatcctcctatcagctccgatgccagccgtcgctgatatctcggggttgacaccttgcaaggagtcgaaacagttcgccaagagggagaagcaacagatcaagaagcttcaatcatctcttaagctctacgctcctgaaagtgctcctgctcttgctcttaacgctcagatcgagaagaccaaacgcaggttcgacaactacggcaagtatggacttctctgtggcgcagacggtctaccccacctgatagtgaacggagaccagcggcattggggagagttcataactccaggccttctcttcctttacattgctggatggatcgggtgggttggacgaagctacttgatagcaatcagcgatgagaagaaaccagcaatgaaagagatcatcattgatgttccattggctagtcgcctcatcttccgtggtttcatttggcctgttgctgcttacagagcgttactcaatggcgatctcattgccaaggatgtctagaaaaacaaaaacaaatctatatttgttgttttggtttgcttctctctctttctctctatctcatgttttccagtgtatgtattgatatctctaattaactcttcctttcaaagaaaaaaaaaaaaaaaaaagcttatcgataccgtcgacct

SEQ ID NO: 56525 - protein, 220 aa, Glycine max
  peptide (1)..(220): Ceres Seq. ID no. 15221669
MSLTIPTNLVLNPRSNKSLTQSLPKSTARFVCSDDKSATQQQSMKAFSAAVALSSILLSAPMPAVADISGLTPCKESKQFAKREKQQIKKLQSSLKLYAPESAPALALNAQIEKTKRRFDNYGKYGLLCGADGLPHLIVNGDQRHWGEFITPGLLFLYIAGWIGWVGRSYLIAISDEKKPAMKEIIIDVPLASRLIFRGFIWPVAAYRALLNGDLIAKDV

SEQ ID NO: 56526 - protein, 177 aa, Glycine max
  peptide (1)..(177): Ceres Seq. ID no. 15221670
MKAFSAAVALSSILLSAPMPAVADISGLTPCKESKQFAKREKQQIKKLQSSLKLYAPESAPALALNAQIEKTKRRFDNYGKYGLLCGADGLPHLIVNGDQRHWGEFITPGLLFLYIAGWIGWVGRSYLIAISDEKKPAMKEIIIDVPLASRLIFRGFIWPVAAYRALLNGDLIAKDV

SEQ ID NO: 56527 - protein, 159 aa, Glycine max
  peptide (1)..(159): Ceres Seq. ID no. 15221671
MPAVADISGLTPCKESKQFAKREKQQIKKLQSSLKLYAPESAPALALNAQIEKTKRRFDNYGKYGLLCGADGLPHLIVNGDQRHWGEFITPGLLFLYIAGWIGWVGRSYLIAISDEKKPAMKEIIIDVPLASRLIFRGFIWPVAAYRALLNGDLIAKDV

SEQ ID NO: 56528 - DNA, 722 bp, Glycine max
  misc_feature (1)..(722): Ceres Seq. ID no. 13595411
acacccaaacacgtagtgcaccacttccgctaaaagatcatcagcattcagcagagctacactagctccaagccaccgagagaaaatggccggcttctcgtacacgagccacgttgcagttgcactggtttcggtgctgctgctgagcctcgcgcacggctcactggggctgggggccaggaggctcatggagctgtacaagccggaccccagcgagctcctcacgtaccacaacggcgccgtgctgcagggcgccatcccggtctccgtgctctggtacggccgcttcacgcccgcgcagaaggccgtcgtctccgacttcctcctctcgctcaccaccgcctcgccggcgctgaccccgtccgtctctcagtggtggaacaccatccaccagctctacctctccaaggccaagggcgccaacggccaagcgcgcgacgcaggtggcgctcgccgggcaggtctccgacgagcggtgctcgctcgggaagagcctcaagctaccccagctcgcggcgctggcggcgagcgccaagccccggaagggcgggatcgcgctggtgctcaccgcggaggacgtggccgtggagggcttctgccggagccggtgcggcctgcacggctccgacgccgcggcccgcaccgcgtacgtgtgggtcggcaactccgcctcgcagtgccccgtgttaaacacaataaagtgggaactggaggggggaaag

SEQ ID NO: 56529 - protein, 212 aa, Glycine max
  peptide (1)..(212): Ceres Seq. ID no. 13595412
MAGFSYTSHVAVALVSVLLLSLAHGSLGLGARRLMELYKPDPSELLTYHNGAVLQGAIPVSVLWYGRFTPAQKAVVSDFLLSLTTASPALTPSVSQWWNTIHQLYLSKAKGANGQARDAGGARRAGLRRAVLAREEPQATPARGAGGERQAPEGRDRAGAHRGGRGRGGLLPEPVRPARLRRRGPHRVRVGRQLRLAVPRVKHNKVGTGGGK

SEQ ID NO: 56530 - protein, 178 aa, Glycine max
  peptide (1)..(178): Ceres Seq. ID no. 13595413
MELYKPDPSELLTYHNGAVLQGAIPVSVLWYGRFTPAQKAVVSDFLLSLTTASPALTPSVSQWWNTIHQLYLSKAKGANGQARDAGGARRAGLRRAVLAREEPQATPARGAGGERQAPEGRDRAGAHRGGRGRGGLLPEPVRPARLRRRGPHRVRVGRQLRLAVPRVKHNKVGTGGGK

SEQ ID NO: 56531 - DNA, 890 bp, Glycine max
  misc_feature (1)..(890): Ceres Seq. ID no. 14302532
accgcattcacctgatctagctcgacgccggccagtaaacccaagcagccactcactctcaggttatcactgacacagcaaccaagctcgggacaagggggaaatggaagccgctccggtctcggcgaagcccaccctccgcgtggccgctctcagcggctccctccgcagcaactcgtggcaccacggcctcatccgcgccgccgaggagctgtgcgaggagtgcatcccggggctgcgcatcgaccacgtggacatctccggcctgcccatggccaacccggacctggagaccgacggcggcgacggcttcccgccggccgtggaggccttccgcgacagggtcagcgccgccgactgcttcctcttcgcctcgcccgagtacaactactccgtcaccggctcgctgaagaacgcgctggactgggcgtccaggggcacgcacaaatgctgggccgacaaggcggcggcgatcgtctgcgcgggaggcgacttcggcgggggcagggcgtcgctccacctgcgcgagatcgggatatacctagacctgcacttcatcaacaagccggagctccacatcagggcgtacgaggacccgcccaagttcgacggcgaggggaacctcatcgacgccaaagccagggagcggctcaagaaggtgctcctctcgctgcaggtcttcgcgctcaggctgcaacgcagggagaattgactcgagatcgaataaatttggcaccagagctacctaaataatctgcatttccgctcagatgatcacttttagtttgggctatggccctggtttcgttagtctgagcaattttacttcgtattcgtgtaattgtattttgtacttccgtgaaataaaaagacgatgctgctactgtaac

SEQ ID NO: 56532 - protein, 202 aa, Glycine max
  peptide (1)..(202): Ceres Seq. ID no. 14302533
MEAAPVSAKPTLRVAALSGSLRSNSWHHGLIRAAEELCEECIPGLRIDHVDISGLPMANPDLETDGGDGFPPAVEAFRDRVSAADCFLFASPEYNYSVTGSLKNALDWASRGTHKCWADKAAAIVCAGGDFGGGRASLHLREIGIYLDLHFINKPELHIRAYEDPPKFDGEGNLIDAKARERLKKVLLSLQVFALRLQRREN

SEQ ID NO: 56533 - protein, 146 aa, Glycine max
  peptide (1)..(146): Ceres Seq. ID no. 14302534
MANPDLETDGGDGFPPAVEAFRDRVSAADCFLFASPEYNYSVTGSLKNALDWASRGTHKCWADKAAAIVCAGGDFGGGRASLHLREIGIYLDLHFINKPELHIRAYEDPPKFDGEGNLIDAKARERLKKVLLSLQVFALRLQRREN

SEQ ID NO: 56534 - protein, 101 aa, Glycine max
  peptide (1)..(101): Ceres Seq. ID no. 14302535
MLGRQGGGDRLRGRRLRRGQGVAPPARDRDIPRPALHQQAGAPHQGVRGPAQVRRRGEPHRRQSQGAAQEGAPLAAGLRAQAATQGELTRDRINLAPELPK

SEQ ID NO: 56535 - DNA, 1537 bp, Glycine max
  misc_feature (1)..(1537): Ceres Seq. ID no. 12611314
tatcctccctttctgctttctttcgctcacaagacaaagttgaacgaaatgaagtctttcggttctgtaactggttttgtcttgccagacccaaagaataggttgctcctttggagtgtcctcatcttggtttcattgatttctggtgcttatttcgttggtaatgcattctttgcaaaggaatacaaacaaagattagcacgatgggggctaattcatacaatgccacattcaaaatttaatgcgtgcaagagacaatgcttgccttttggaagtgaggcattgcctgaaggaattattgctagaacatctaacttggaaatgcggcccttatgggactctggtaaagataatagaattttaaaacgcccattgaacttgttggctatggcagtaggacttaagcagaaagaaatagtcaacaaaattgttgaaaagttcttgtcaagtggttttgttgtgatgctttttcattatgatggttttgtggatggatggaagagtttagcctggagcagttgtgccatacatgtatctgctatcaatcaaacaaaatggtggtttgcaaagcggtttttgcatccagacatagttgctgaatacaattatatatttctttgggatgaggatcttcttgttgataattttgacccaaaaaggtatttatctattgttaaagaagaaggacttgagatatcacagccagctctggatcctaccaaatctgaagtacatcatccactgacagtccataaagcagtatcaaaagtgcacagaaggtattataaattaaaaggtagtggaaggtgtgatgacaaaagcactgctcctccttgcattggttgggtggaaatgatggcaccagtgttttctaagaagtcttggcaatgtgtatggcatttgatccagaatgacttaatccatgcatggggcctggataggcagcttggctattgtgcacagggagatcgaatgagaaatgttggtgtggttgattctgagtacatagttcatctgggtctgcctactcttgggggctcaaatggcaatgaggcgccatcagactccccaggagataatagagctaaagttaggatgcagtcatacattgaaatgcaggtttttggtaaaaggtggaaagatgcagcagagaaagacaaatgttggattgatccgtatgaacaggcaaacaagacaagccattagtgtattttgtgaggctttaagtgatcaaaatccaagtacagtgtccatgttcataatcagcttttgttttctagtcttcgttagagcttttgatttgatatctcaggtgtgggatctcgtaagagtttgcaggaacattgcttcctttaccattattttactttcgttttgtcatcaagccattcatttccttaaatattggtgtacatagggtggtatagagttgtttatatggcagcagaaaaatgtgtggcatagattttttttttcatccgtgaagtcaatgtaaagcggttgcttgtatgaaataatctataattttctcggatcc

SEQ ID NO: 56536 - protein, 401 aa, Glycine max
  peptide (1)..(401): Ceres Seq. ID no. 12611315
YPPFLLSFAHKTKLNEMKSFGSVTGFVLPDPKNRLLLWSVLILVSLISGAYFVGNAFFAKEYKQRLARWGLIHTMPHSKFNACKRQCLPFGSEALPEGIIARTSNLEMRPLWDSGKDNRILKRPLNLLAMAVGLKQKEIVNKIVEKFLSSGFVVMLFHYDGFVDGWKSLAWSSCAIHVSAINQTKWWFAKRFLHPDIVAEYNYIFLWDEDLLVDNFDPKRYLSIVKEEGLEISQPALDPTKSEVHHPLTVHKAVSKVHRRYYKLKGSGRCDDKSTAPPCIGWVEMMAPVFSKKSWQCVWHLIQNDLIHAWGLDRQLGYCAQGDRMRNVGVVDSEYIVHLGLPTLGGSNGNEAPSDSPGDNRAKVRMQSYIEMQVFGKRWKDAAEKDKCWIDPYEQANKTSH

SEQ ID NO: 56537 - protein, 385 aa, Glycine max
  peptide (1)..(385): Ceres Seq. ID no. 12611316
MKSFGSVTGFVLPDPKNRLLLWSVLILVSLISGAYFVGNAFFAKEYKQRLARWGLIHTMPHSKFNACKRQCLPFGSEALPEGIIARTSNLEMRPLWDSGKDNRILKRPLNLLAMAVGLKQKEIVNKIVEKFLSSGFVVMLFHYDGFVDGWKSLAWSSCAIHVSAINQTKWWFAKRFLHPDIVAEYNYIFLWDEDLLVDNFDPKRYLSIVKEEGLEISQPALDPTKSEVHHPLTVHKAVSKVHRRYYKLKGSGRCDDKSTAPPCIGWVEMMAPVFSKKSWQCVWHLIQNDLIHAWGLDRQLGYCAQGDRMRNVGVVDSEYIVHLGLPTLGGSNGNEAPSDSPGDNRAKVRMQSYIEMQVFGKRWKDAAEKDKCWIDPYEQANKTSH

SEQ ID NO: 56538 - protein, 327 aa, Glycine max
  peptide (1)..(327): Ceres Seq. ID no. 12611317
MPHSKFNACKRQCLPFGSEALPEGIIARTSNLEMRPLWDSGKDNRILKRPLNLLAMAVGLKQKEIVNKIVEKFLSSGFVVMLFHYDGFVDGWKSLAWSSCAIHVSAINQTKWWFAKRFLHPDIVAEYNYIFLWDEDLLVDNFDPKRYLSIVKEEGLEISQPALDPTKSEVHHPLTVHKAVSKVHRRYYKLKGSGRCDDKSTAPPCIGWVEMMAPVFSKKSWQCVWHLIQNDLIHAWGLDRQLGYCAQGDRMRNVGVVDSEYIVHLGLPTLGGSNGNEAPSDSPGDNRAKVRMQSYIEMQVFGKRWKDAAEKDKCWIDPYEQANKTSH

SEQ ID NO: 56539 - DNA, 1261 bp, Glycine max
  misc_feature (1)..(1261): Ceres Seq. ID no. 13595414
atattataaactacatctcactctcactaccttctcttcacccgcaaatggcgaccgctcctctctccggcttcttcctcacctctctttctccttctcagccttctctccaaaaacagactcttcgttcttctcccaccgtggcttgccttccctcatcctcttcttcctcctcctcctcctcctcctctcgttccgttccaacacttatccgtaacgagcccgtttttgccgctcctgctcctatcatcaccccttactggagcgaagagatgggtagcgaagcatacgaagaggccattgaagctctcaagaagcttattatcgagaaggaggagctaaagactgttgcggccgctaaggtggagcaggccacggcagcacttcagacaggtacttcctccgacaagaaagctttcgaccccgtcgaaaacattaagcaaggcttcatcactttcaagaaggagaaatacgaaaccaaccctgctttgtacggtgagctcgccaagggtcaaagtcctaagtatatggtgtttgcttgttccgactcgcgtgtgtgtccatcgcacgttctcaactttcagccaggagaggccttcgttgtccgtaacatagccaacatggttcctccttttgacaaggtcaaatacggtggagttggagcagccatcgaatacgctgttttgcaccttaaggtggagaacattgtggtgataggacacagcgcttgtggtgggatcaagggacttatgtcttttcctttggatggaaacaactccactgatttcatagaggactgggtcaaaatctgtttaccagccaagtcaaaagtcatatcagaacttggagattcagcctttgaggaccagtgtggccgatgtgaaagggaggcagtgaatgtttcactagcaaacttgttgacatatccattcgtgagagaaggacttgtgaaaggaacccttgctttgaagggaggttactatgattttataaagggtgcttttgagctttggggacttgagtttggcctctccgaaactagctcagtatgaaccaatccaccatcatcatcatgagcatccatcatcatcatatatctctattccatatgtaatttgtaatgtgctgagttgttttcctatcttcatggtatccaactttcatataaataaaaaagaaaatccagatgaaaaaaaaaaaaaaaaaagcttatcgatacctgtttaaacacaataaagwcctaacgggagggggggcccgg

SEQ ID NO: 56540 - protein, 349 aa, Glycine max
  peptide (1)..(349): Ceres Seq. ID no. 15221574
IINYISLSLPSLHPQMATAPLSGFFLTSLSPSQPSLQKQTLRSSPTVACLPSSSSSSSSSSSSRSVPTLIRNEPVFAAPAPIITPYWSEEMGSEAYEEAIEALKKLIIEKEELKTVAAAKVEQATAALQTGTSSDKKAFDPVENIKQGFITFKKEKYETNPALYGELAKGQSPKYMVFACSDSRVCPSHVLNFQPGEAFVVRNIANMVPPFDKVKYGGVGAAIEYAVLHLKVENIVVIGHSACGGIKGLMSFPLDGNNSTDFIEDWVKICLPAKSKVISELGDSAFEDQCGRCEREAVNVSLANLLTYPFVREGLVKGTLALKGGYYDFIKGAFELWGLEFGLSETSSV

SEQ ID NO: 56541 - protein, 334 aa, Glycine max
  peptide (1)..(334): Ceres Seq. ID no. 15221575
MATAPLSGFFLTSLSPSQPSLQKQTLRSSPTVACLPSSSSSSSSSSSSRSVPTLIRNEPVFAAPAPIITPYWSEEMGSEAYEEAIEALKKLIIEKEELKTVAAAKVEQATAALQTGTSSDKKAFDPVENIKQGFITFKKEKYETNPALYGELAKGQSPKYMVFACSDSRVCPSHVLNFQPGEAFVVRNIANMVPPFDKVKYGGVGAAIEYAVLHLKVENIVVIGHSACGGIKGLMSFPLDGNNSTDFIEDWVKICLPAKSKVISELGDSAFEDQCGRCEREAVNVSLANLLTYPFVREGLVKGTLALKGGYYDFIKGAFELWGLEFGLSETSSV

SEQ ID NO: 56542 - protein, 259 aa, Glycine max
  peptide (1)..(259): Ceres Seq. ID no. 15221576
MGSEAYEEAIEALKKLIIEKEELKTVAAAKVEQATAALQTGTSSDKKAFDPVENIKQGFITFKKEKYETNPALYGELAKGQSPKYMVFACSDSRVCPSHVLNFQPGEAFVVRNIANMVPPFDKVKYGGVGAAIEYAVLHLKVENIVVIGHSACGGIKGLMSFPLDGNNSTDFIEDWVKICLPAKSKVISELGDSAFEDQCGRCEREAVNVSLANLLTYPFVREGLVKGTLALKGGYYDFIKGAFELWGLEFGLSETSSV

SEQ ID NO: 56543 - DNA, 921 bp, Glycine max
  misc_feature (1)..(921): Ceres Seq. ID no. 14302561
attttcccaaattctcattatctctctctctctctgtttcgctttcaccgaagaataacttgactttcccgaactccacctgagaaaaagatacccttaattcgcaggcgcgtcttgtgttggacaacaaccacaagatgattaacttcgaagaaaccgagttgcgactcggcctccctggcaacgactcagcactcaagggaagtgctgccaagagaggcttctctgaaactgcttctgttgatttgaagcttaatctttcttcttgcattaacgactctgcctcggattcaccctcatctgtgtctacagagaagcccaaagagaacaagactaccactgctgaacctcctccagctaatgatccagcaaaaccacctgcaaaggcacaagtggtgggttggccaccagttaggtcatttagaaagaacatagttcaaaggaacagcaatgaagaagaggcagagaagagcacgaagaatgctttcgtgaaggtgagcatggatggtgcaccgtatctacgaaaggtggacataaagttgtacaagagctaccaggagctgtcagatgcgctggctaagatgttcagttccttcacgattgaaaagtgtgggtcccaagggatgaaggactttatgaatgagaccaatggctctgactatgtacccacatatgaagacaaggacggagactggatgctcgtcggtgatgtgccctgggagatgttcgttgaatcatgcaagcgtcttcgcataatgaaaggctccgaggcaatcggtcttgcgccaagagccgtggaaaagtgcaagaacagaagctgaagaagtgatttcatctgcgtcacaaggaagcaaattgactcgagcaagatcgagtctaatataggaataagagtttaattatcatgtgcctttgttatct

SEQ ID NO: 56544 - protein, 227 aa, Glycine max
  peptide (1)..(227): Ceres Seq. ID no. 14302562
MINFEETELRLGLPGNDSALKGSAAKRGFSETASVDLKLNLSSCINDSASDSPSSVSTEKPKENKTTTAEPPPANDPAKPPAKAQVVGWPPVRSFRKNIVQRNSNEEEAEKSTKNAFVKVSMDGAPYLRKVDIKLYKSYQELSDALAKMFSSFTIEKCGSQGMKDFMNETNGSDYVPTYEDKDGDWMLVGDVPWEMFVESCKRLRIMKGSEAIGLAPRAVEKCKNRS

SEQ ID NO: 56545 - DNA, 713 bp, Glycine max
  misc_feature (1)..(713): Ceres Seq. ID no. 13595468
aaaataaaactgcatgttgattgcctttactccgaaaaatgaatttttttataatatttatgttgattattgctatgattttaggggtgagcgaagcaatttggcataaagttgttgcgcctttgtctaagtgtgagaagaaccgagtaattattcgaaatgaacttggtccaggtagaagtctagaatatcattgtcattctaatggtaaagatcaaggcgtccagtttttaaaattcaatgaagaaaggaactttgaatttgtcgatcatttttttggaaaaaaaaataaagtgaattgtgttttgaggcaagggttgtggatgcagagttcttctcgagactttgaagcataccatacaagtaaaagtaatggtaacaattgtggacagactcgtgaatggattgcgagaacagatggaacatactttcaaagaaatcgaattaagccagcagcttttgtgtttgcttggattaataaaaaaccttaaaaaaatctaattgatgtttctgattaagacactcaaaatctttaatcgtttctaattttaattattgttgttcgttttgtaaactttgtcatgattctgctttcgtgtcgaatattaagaaaataaatattgtatctatgtaattatgtatatttttttgtttgtcatctatttataatgtgttttaaataataagtatgcaaaaaaaaattggatttgtgg

SEQ ID NO: 56546 - protein, 150 aa, Glycine max
  peptide (1)..(150): Ceres Seq. ID no. 15221586
MNFFIIFMLIIAMILGVSEAIWHKVVAPLSKCEKNRVIIRNELGPGRSLEYHCHSNGKDQGVQFLKFNEERNFEFVDHFFGKKNKVNCVLRQGLWMQSSSRDFEAYHTSKSNGNNCGQTREWIARTDGTYFQRNRIKPAAFVFAWINKKP

SEQ ID NO: 56547 - protein, 143 aa, Glycine max
  peptide (1)..(143): Ceres Seq. ID no. 15221587
MLIIAMILGVSEAIWHKVVAPLSKCEKNRVIIRNELGPGRSLEYHCHSNGKDQGVQFLKFNEERNFEFVDHFFGKKNKVNCVLRQGLWMQSSSRDFEAYHTSKSNGNNCGQTREWIARTDGTYFQRNRIKPAAFVFAWINKKP

SEQ ID NO: 56548 - protein, 138 aa, Glycine max
  peptide (1)..(138): Ceres Seq. ID no. 15221588
MILGVSEAIWHKVVAPLSKCEKNRVIIRNELGPGRSLEYHCHSNGKDQGVQFLKFNEERNFEFVDHFFGKKNKVNCVLRQGLWMQSSSRDFEAYHTSKSNGNNCGQTREWIARTDGTYFQRNRIKPAAFVFAWINKKP

SEQ ID NO: 56549 - DNA, 1087 bp, Glycine max
  misc_feature (1)..(1087): Ceres Seq. ID no. 12611474
aaaaagtgaagaaaacagaccaaaaatagaaagaaagagaaataccaaaaccttggcgcatcatattctttattccctcacttggatcgttaattccgcgaacgagcttctgcccttcaaattaaccatggagaatattggtgaggagtacggctactggccggagaacgacatgcttttccaaaacgaagaccttggcagctgggcgataatggatgaggcagcgttatcagggtcagggtactatgattcaagctccccggacggtactggtgcttcttcatcggtggcatctaagaacattgtctccgagaggaatagaaggaagaagctcaacgataggctttttgctctaagagcagtggtccccaacattaccaagatggataaggcttctatcattaaggatgctattgagtacatccagcacttgcatgaccaagagaagagaatccaagctgagattttggatcttgaatctgggaataaactcaaaaacccaacctatgaatttgaccaggacctccctattctgctcaggtccaagaagaagagaacagaacagctattcggttctgtcagttcaagaaattctccaattgaaataattgacctgagggtaacatacatgggagagaagacgtttgtggtgagcttgacatgtagcaaaaggacagacacaatggtaaaactgtgtgcggtgttcgaatctttaaagctgaaagtcattacggccaatatcacttctttttcaggcacgcttctgaagacagtcttcatccaggcagatgaagaagagagagactttttgcatataaaaattcagacagcgatttcagctctcaatgatcctctaagcccaatgagtatctgatgaagaaacgagttcagatcgaagctgagattgttctgtttgttgagtttccttttctcactcaatgttaattatctgtagtgaatgagtcttaaactcgaaagttggcaagttttctttttcttttccattttctgtatgttgatgttgatagcctctaacgttgtaagctttacgttattaatgaaatcgcattttcatgttcttcatggt

SEQ ID NO: 56550 - protein, 290 aa, Glycine max
  peptide (1)..(290): Ceres Seq. ID no. 12611475
KSEENRPKIERKRNTKTLAHHILYSLTWIVNSANELLPFKLTMENIGEEYGYWPENDMLFQNEDLGSWAIMDEAALSGSGYYDSSSPDGTGASSSVASKNIVSERNRRKKLNDRLFALRAVVPNITKMDKASIIKDAIEYIQHLHDQEKRIQAEILDLESGNKLKNPTYEFDQDLPILLRSKKKRTEQLFGSVSSRNSPIEIIDLRVTYMGEKTFVVSLTCSKRTDTMVKLCAVFESLKLKVITANITSFSGTLLKTVFIQADEEERDFLHIKIQTAISALNDPLSPMSI

SEQ ID NO: 56551 - protein, 248 aa, Glycine max
  peptide (1)..(248): Ceres Seq. ID no. 12611476
MENIGEEYGYWPENDMLFQNEDLGSWAIMDEAALSGSGYYDSSSPDGTGASSSVASKNIVSERNRRKKLNDRLFALRAVVPNITKMDKASIIKDAIEYIQHLHDQEKRIQAEILDLESGNKLKNPTYEFDQDLPILLRSKKKRTEQLFGSVSSRNSPIEIIDLRVTYMGEKTFVVSLTCSKRTDTMVKLCAVFESLKLKVITANITSFSGTLLKTVFIQADEEERDFLHIKIQTAISALNDPLSPMSI

SEQ ID NO: 56552 - protein, 233 aa, Glycine max
  peptide (1)..(233): Ceres Seq. ID no. 12611477
MLFQNEDLGSWAIMDEAALSGSGYYDSSSPDGTGASSSVASKNIVSERNRRKKLNDRLFALRAVVPNITKMDKASIIKDAIEYIQHLHDQEKRIQAEILDLESGNKLKNPTYEFDQDLPILLRSKKKRTEQLFGSVSSRNSPIEIIDLRVTYMGEKTFVVSLTCSKRTDTMVKLCAVFESLKLKVITANITSFSGTLLKTVFIQADEEERDFLHIKIQTAISALNDPLSPMSI

SEQ ID NO: 56553 - DNA, 1309 bp, Glycine max
  misc_feature (1)..(1309): Ceres Seq. ID no. 14301430
atcacatcgtctcaccaagcagcagctagctaagctaagcctagccaaagcttctctagcttcggtagtccaggaaacatgaggctcgcggtggttctcctctgcgccctggtggccgtccaggtcgcgctcctcgccgccccggcggaggccggcgagctggtggtcgggtactacgacaagaaatgcaggggcgtggagaacgtcgtccagtggcacgtcaggagggcgctcaagaccaaccgccgcgccggtgccgccctcgtccgcctcctcttccacgactgcttcgtcaggggttgcgatgcctctgtgctccttgacgcgtcccccgagaaccctcacccggagaaggaggcgccggtgaacatcgggctggccgccttcgacctcctggaggagatcaaggcggccgtcgaggacaggtgccccggcgtggtgtcctgctctgacatcctcatttacgcagcccgtgacgcggcccacgccctcagcaatggcaacatccacttcgacgtccctgccgggcgcctcgacggcctcgtctcctcggccgccgaggcccaggcggagctcccggactccaccttcaccgtgcagcagctcatcgacaacttcgcacgcaaggacttcgacgtggaggagctggtcatcctgtccggcgcgcactccatcggcgtcggccactgctcctccttcaccggccgcctcaccgcgccgccggagcagatcaacccggcctaccgcaaccttctcaaccacaagtgccaccagggcgccaacccggccgtcgtcaacaacgtccgcgatgaggactacgagacggtgtccaagttcatgcccgggttcaccagccgggtgcgcaagatcagcgacttcctcgacaacaccttctaccacaacaacctcgccaggatcgtcagcttcaactccgactggcagctcatgacccacaccgaggccaggggccacgtccacgagtacgccgacaacgccacgctctgggacggcgacttcgcggaatccctgctcaagctcagcaagctgtccatgcccgccgggagcaagggcggcatcaggaagaagtgcagcatcgccacccaccctctctactaaacaagtcgtatgcatgcatgaacaaggtcgatccaacgaagaagagaacctttgcccctggcggtgtgcggatttcttcaataatcatgtgatttttctggttcaatccattcttttgattcccattggttgtgtattttatttatggcaacatatatgtatcacggaaataaagttacggtctttcaaatgt

SEQ ID NO: 56554 - protein, 345 aa, Glycine max
  peptide (1)..(345): Ceres Seq. ID no. 14301431
MRLAVVLLCALVAVQVALLAAPAEAGELVVGYYDKKCRGVENVVQWHVRRALKTNRRAGAALVRLLFHDCFVRGCDASVLLDASPENPHPEKEAPVNIGLAAFDLLEEIKAAVEDRCPGVVSCSDILIYAARDAAHALSNGNIHFDVPAGRLDGLVSSAAEAQAELPDSTFTVQQLIDNFARKDFDVEELVILSGAHSIGVGHCSSFTGRLTAPPEQINPAYRNLLNHKCHQGANPAVVNNVRDEDYETVSKFMPGFTSRVRKISDFLDNTFYHNNLARIVSFNSDWQLMTHTEARGHVHEYADNATLWDGDFAESLLKLSKLSMPAGSKGGIRKKCSIATHPLY

SEQ ID NO: 56555 - DNA, 987 bp, Glycine max
  misc_feature (1)..(987): Ceres Seq. ID no. 13639250
cttctcccttctcctacctcccacacatcctcgaatcacaacctcacacctcctcccctgagtcctgaccgaccaccccgcagctagcttcgcgcagccagcaccgaccgatcacacgctagctgctgctgctgaggcgaccgaccggctatccatggcggtgaaagactgcggcgggcacaagggcgggggctgcgagtgccaccgccgccggctctaccgcaagtgctgcggcgcgctgctggccctcgtcatcctcgccctcttcatcatcctcatcgtctacctggtgctccgcccccacaagccccgcttctacctgcaggacctggcggtgctctgcctcaacgtcacgccgcccacctccgcctacctcttcaccaccatgcaggccacggtcgcggcgcgcaaccccaacgaccgcgtcggcgtctactacgacgaggcggacatgtacgcggagtacaagggcgtgcccatcaccgtccccacccgcctccccgtcgcctaccagggccaccgggaccagtccgtctggtcgccctacctccggtccatggacagcgtcgtgctcccgccgcagctcgccatcgcgctggcgcaggacgagacggccgggtacgtgctggtggacgtcaaggtggacggtcaggtgcgctggaaggtgggcacgtggatctccggccactaccacctccgggtcaactgcccggccctcatcagggtgaacgagggcaagggcagctacggcgccaccaccggcggcggccccgactacttccgcttccagcaggccgccgcctgcgccgtcgacgtctgatcatgcatcatcggttcgacctccaccgatccatgcctgtgtccaaattcaaattcaggggaatcgattgattgcttttctctctctagtttctttcttgcttctttttagtctctttttgacttgttgatcgattggttaaagaaatgaatgaaaacaaaaggttg

SEQ ID NO: 56556 - protein, 221 aa, Glycine max
  peptide (1)..(221): Ceres Seq. ID no. 13639251
MAVKDCGGHKGGGCECHRRRLYRKCCGALLALVILALFIILIVYLVLRPHKPRFYLQDLAVLCLNVTPPTSAYLFTTMQATVAARNPNDRVGVYYDEADMYAEYKGVPITVPTRLPVAYQGHRDQSVWSPYLRSMDSVVLPPQLAIALAQDETAGYVLVDVKVDGQVRWKVGTWISGHYHLRVNCPALIRVNEGKGSYGATTGGGPDYFRFQQAAACAVDV

SEQ ID NO: 56557 - protein, 144 aa, Glycine max
  peptide (1)..(144): Ceres Seq. ID no. 13639252
MQATVAARNPNDRVGVYYDEADMYAEYKGVPITVPTRLPVAYQGHRDQSVWSPYLRSMDSVVLPPQLAIALAQDETAGYVLVDVKVDGQVRWKVGTWISGHYHLRVNCPALIRVNEGKGSYGATTGGGPDYFRFQQAAACAVDV

SEQ ID NO: 56558 - protein, 122 aa, Glycine max
  peptide (1)..(122): Ceres Seq. ID no. 13639253
MYAEYKGVPITVPTRLPVAYQGHRDQSVWSPYLRSMDSVVLPPQLAIALAQDETAGYVLVDVKVDGQVRWKVGTWISGHYHLRVNCPALIRVNEGKGSYGATTGGGPDYFRFQQAAACAVDV

SEQ ID NO: 56559 - DNA, 1105 bp, Glycine max
  misc_feature (1)..(1105): Ceres Seq. ID no. 13595851
atcgccgcctcatcgccgccaggagttcgagttccccccgaaccgtcgccatggctgccgcaccagtcatctccccgaaagaaaatctgcccccttcgctgacctccacctccgagccccctccactcttcgacggcaccaccaggttgtatgttgcatatcactgcccatatgcgcagcgcgcttggattgccaggaactacaagggtttgcaagacaagatcaagatagtcgggatcgatctcgcagacaggccggcttggtacaaggagaaggtttacccacagaacaaggtgccttcactggagcataacaacgaggtgaaaggagaaagcttggatttggtcaagtacattgacagcaatttcgatggcccagcattgctccccgatgattctgcaaagaagcagtttgccgaggagctgcttgtgtacatcgatgagttcaataaagcactatactcatccataacctccaagggagatgtggcagaggaaactgttgctgcgctggataaaatagaagcggccctgggaaagttcagtgatggccctttcttccttggccagttcagtttggtggacattgcatatgtgccatttatcgaaaggtttcagatattcttttctggtatcaaaaactatgatatcaccaaggacagacctaatattcagaaattcatcgaggaagtgaacaagatcgatgcgtacacgcaaacgaaactggacccacaatttctacttgaacacacaaagaagcggcttgggattgagtgaagatgtgaccaaggatgaccaagagaccagggaactactgcagcatggaagatgaagaggaagacactcaggagtgtgcttgcttgctactactactagatcatgaaaggcacgcgttgctgcgcccgtcttatggtaataataaattttaggcttgacacaattgtgcggaagcattgtatgtaaactttagatcttctagtattataaataattttgtgtaatttcatttttacctggaatttaaagcaatgtagtagtattaggcttatgccgttgtcattacaatacaacgattgttcaaagaccttggtgaacaacaacggttc

SEQ ID NO: 56560 - protein, 257 aa, Glycine max
  peptide (1)..(257): Ceres Seq. ID no. 13595852
RRLIAARSSSSPRTVAMAAAPVISPKENLPPSLTSTSEPPPLFDGTTRLYVAYHCPYAQRAWIARNYKGLQDKIKIVGIDLADRPAWYKEKVYPQNKVPSLEHNNEVKGESLDLVKYIDSNFDGPALLPDDSAKKQFAEELLVYIDEFNKALYSSITSKGDVAEETVAALDKIEAALGKFSDGPFFLGQFSLVDIAYVPFIERFQIFFSGIKNYDITKDRPNIQKFIEEVNKIDAYTQTKLDPQFLLEHTKKRLGIE

SEQ ID NO: 56561 - protein, 241 aa, Glycine max
  peptide (1)..(241): Ceres Seq. ID no. 13595853
MAAAPVISPKENLPPSLTSTSEPPPLFDGTTRLYVAYHCPYAQRAWIARNYKGLQDKIKIVGIDLADRPAWYKEKVYPQNKVPSLEHNNEVKGESLDLVKYIDSNFDGPALLPDDSAKKQFAEELLVYIDEFNKALYSSITSKGDVAEETVAALDKIEAALGKFSDGPFFLGQFSLVDIAYVPFIERFQIFFSGIKNYDITKDRPNIQKFIEEVNKIDAYTQTKLDPQFLLEHTKKRLGIE

SEQ ID NO: 56562 - DNA, 1808 bp, Glycine max
  misc_feature (1)..(1808): Ceres Seq. ID no. 13595437
aaaaaccctagattttcaaatctagggttttgttttcttaacttgttacggttatggttatggttctggttcaggaactgaactcccacccttgctaatttcacttttctcttctcaatcttagcctctggtttttctacattttccctccctcgctaacctctgccatgggattttcaatgctgattttgtttcacctctaaagccactccctctcttattttcttcaaccttttggcattcgcaactcatcttctttgtggtgtttctaggtaaacgagacccttgtacgtgcattcacttgacaaaatctccgagcttgttacttgaatatctggagctagcttctgggctttagatcctcttctttcttctttgcattagggttaaagatctattttttccatcattgtgaaagctatttgcttttgactagtagaagggtacctagctaaacccctgtttttacatcttcactagtttcatagtttaagaagttagtagcaccagtgaaagggtttgaagttgaggaggaaaaattatcacaattgacaaacctgttagtaaatgcatggatgggagagaaggcatggcatttcctggtggctctgctccatattacatgcagcatagaggaggaggggttggtgggtctgttccaggaaccgggacacagagtggagggtttcaaccaccctctggctttagagctttgtcaaatgtctctccaggttctgcatttaaagtagagtctcagcctcaacatgctagttttagtcatggcattaacacaggttcctctcctgatggtggaagtggagtgccttcttctggtgagcctgtgaagaagaaaagagggaggcctaggaagtatggccctgatggatctgtttccttgatgctctctcccatgtctgccactgctaattccaccccgggatcgggcacttcttcggagaaacgacccagggggcgcccacctggaagtggaaggaagcaacagcttgccactctaggtgaatggatgaacaattctgcaggactggccttttcacctcatgttatcaccgttggagttggggaggacattgtagcaaagttattgtcatttgcaaggcagagaccaagggctgtgtgcatcttaacaggaactgggacaatttcttcagtcactctgcgccaacccgcttctactagcatcagtgttacatatgagggccgatttcaaatattatgcttgtctggttcttacttggttgctgaagaaggtggacctcacaatagramcgggtggcatgagtgtttccctttctagtcctgatggtcatatcattggtggtggtgttactaggcttgttgctgcaagcccagtgcaggtggtagcatgcagtttcgtatatgggggctccaagccaaagactaaagaagtgaccactaccactactvctacaaaagatagcagttcagagcctcagagtagtgataagttagcgtctccagccagtgctcctccacctaatcaaaactacacctcttcttctccgttcccaggcatttggcctgcatcgtcaaggccagtagaggttaaaagtgcacatccacatactggtattgacttgacgcgtgggtgaagaccatttattattctataagagactttgtagttttgtatagagatctcttgtaaatgaaccgaatttgtgagcattgtgactcttcctatctatcactgttgatgggtgacaagttcgcgctaacctatgctgtaaccaatggatttcagggttaagtaacagtcttgactttgc

SEQ ID NO: 56563 - protein, 247 aa, Glycine max
  peptide (1)..(247): Ceres Seq. ID no. 15221577
  misc_feature (238)..(238): Xaa is any aa, unknown or other
  misc_feature (239)..(239): Xaa is any aa, unknown or other
MDGREGMAFPGGSAPYYMQHRGGGVGGSVPGTGTQSGGFQPPSGFRALSNVSPGSAFKVESQPQHASFSHGINTGSSPDGGSGVPSSGEPVKKKRGRPRKYGPDGSVSLMLSPMSATANSTPGSGTSSEKRPRGRPPGSGRKQQLATLGEWMNNSAGLAFSPHVITVGVGEDIVAKLLSFARQRPRAVCILTGTGTISSVTLRQPASTSISVTYEGRFQILCLSGSYLVAEEGGPHNXXGWHECFPF

SEQ ID NO: 56564 - protein, 241 aa, Glycine max
  peptide (1)..(241): Ceres Seq. ID no. 15221578
  misc_feature (232)..(232): Xaa is any aa, unknown or other
  misc_feature (233)..(233): Xaa is any aa, unknown or other
MAFPGGSAPYYMQHRGGGVGGSVPGTGTQSGGFQPPSGFRALSNVSPGSAFKVESQPQHASFSHGINTGSSPDGGSGVPSSGEPVKKKRGRPRKYGPDGSVSLMLSPMSATANSTPGSGTSSEKRPRGRPPGSGRKQQLATLGEWMNNSAGLAFSPHVITVGVGEDIVAKLLSFARQRPRAVCILTGTGTISSVTLRQPASTSISVTYEGRFQILCLSGSYLVAEEGGPHNXXGWHECFPF

SEQ ID NO: 56565 - protein, 230 aa, Glycine max
  peptide (1)..(230): Ceres Seq. ID no. 15221579
  misc_feature (221)..(221): Xaa is any aa, unknown or other
  misc_feature (222)..(222): Xaa is any aa, unknown or other
MQHRGGGVGGSVPGTGTQSGGFQPPSGFRALSNVSPGSAFKVESQPQHASFSHGINTGSSPDGGSGVPSSGEPVKKKRGRPRKYGPDGSVSLMLSPMSATANSTPGSGTSSEKRPRGRPPGSGRKQQLATLGEWMNNSAGLAFSPHVITVGVGEDIVAKLLSFARQRPRAVCILTGTGTISSVTLRQPASTSISVTYEGRFQILCLSGSYLVAEEGGPHNXXGWHECFPF

SEQ ID NO: 56566 - DNA, 628 bp, Glycine max
  misc_feature (1)..(628): Ceres Seq. ID no. 13595146
atcttctctcgtctccactgatcccaccaaccacacttacttctctcaatggcgacgatgtacgttcctccggcgacgctttacgccggcaaaccgactccagtgacttcaaacctccagagatcgtctttcttgccgtattactcgttgaggatactcggcgacaagaagaagaagtctctttccaagtcttcatcatcctcctctgctccaagattctccatgcgtgtctcctccaagcaagcttatatctgccgtgattgcgggtatatatacaatgacagaactccattcgataagttgcctgataattacttctgtccagtgtgtgctgctcctaaacggcggttcagaccgtacatgcctgatgtgagcaagaacgtcaacgacaaggatgtgagaaaggctagaaaagctgagctccaacgtgacgaagccgttgggaaggctttgcctatagcaattgctgttggggttctagctttagcagctctttacttctatgtcaacagtaccgcatgaactgctgcatcaagaggctagctacattcttgtttcgttttgtattaacatgtcttctctgagttgttgttagacattataaatgaagtaaaatgttgagatttct

SEQ ID NO: 56567 - protein, 157 aa, Glycine max
  peptide (1)..(157): Ceres Seq. ID no. 13595147
MATMYVPPATLYAGKPTPVTSNLQRSSFLPYYSLRILGDKKKKSLSKSSSSSSAPRFSMRVSSKQAYICRDCGYIYNDRTPFDKLPDNYFCPVCAAPKRRFRPYMPDVSKNVNDKDVRKARKAELQRDEAVGKALPIAIAVGVLALAALYFYVNSTA

SEQ ID NO: 56568 - protein, 154 aa, Glycine max
  peptide (1)..(154): Ceres Seq. ID no. 13595148
MYVPPATLYAGKPTPVTSNLQRSSFLPYYSLRILGDKKKKSLSKSSSSSSAPRFSMRVSSKQAYICRDCGYIYNDRTPFDKLPDNYFCPVCAAPKRRFRPYMPDVSKNVNDKDVRKARKAELQRDEAVGKALPIAIAVGVLALAALYFYVNSTA

SEQ ID NO: 56569 - protein, 99 aa, Glycine max
  peptide (1)..(99): Ceres Seq. ID no. 13595149
MRVSSKQAYICRDCGYIYNDRTPFDKLPDNYFCPVCAAPKRRFRPYMPDVSKNVNDKDVRKARKAELQRDEAVGKALPIAIAVGVLALAALYFYVNSTA

SEQ ID NO: 56570 - DNA, 727 bp, Glycine max
  misc_feature (1)..(727): Ceres Seq. ID no. 13582362
tacctagaacatcctaatcgaaaacaaaagcactcaaaatgatcgctctggtctttttggctctcttctcggtagcagctgcatacccgtacaaacacgacatcggttcgagtacgaaggcaaattgggccacaacctcccataccagaaggaattctacggcaaggaatacacccagggcaagggatacccattcggtgaatacttccacaaacaaggttacggatacccacagtaccagggacaatactacggttacccaggatactactcccactggtccacaccatactacggccgccagactggtttcgcccgttacggatacggccagaaccgcattggatacggatatgaatacccacaaggaagctacggctacaaaccattctacggtgaatacggactccacaacttcccatactacggaatcaagaactacgaatacggatcctacggcccatacggatacggtttgggatacaatcctttctaccgctactacggcagctactacccaaaatcctaccttggcgaatacaaatactgaactgatgtttgataattgacaattgaaaattttgccagcttgttcaatagtaactttgtcgaattgacaccaacaatagcgtacctgtaaacagtgcaaacaattagaaacctacaccaaacaattgtaccaatcaaatttcatggattttctctgaaataaaaaatgacttctgat

SEQ ID NO: 56571 - protein, 176 aa, Glycine max
  peptide (1)..(176): Ceres Seq. ID no. 13582363
MIALVFLALFSVAAAYPYKHDIGSSTKANWATTSHTRRNSTARNTPRARDTHSVNTSTNKVTDTHSTRDNTTVTQDTTPTGPHHTTAARLVSPVTDTARTALDTDMNTHKEATATNHSTVNTDSTTSHTTESRTTNTDPTAHTDTVWDTILSTATTAATTQNPTLANTNTELMFDN

SEQ ID NO: 56572 - DNA, 1378 bp, Glycine max
  misc_feature (1)..(1378): Ceres Seq. ID no. 15224803
accaccaccacaccacggccagccatctcacaacataagctagccagcatacacgagtccagactacctagctagcgttgccaaggttccaatcatcaatggcgagagcgatcgtgcatgcggccgtcatggccgcggccgcactgttcgtgctgctggccgctgcgccggcgccggcgagcgccattgacttcggcgaccacgacctggcgtcggaggactccctgtgggcgctgtacgagcgctggagggagcagcacacggtggcgcgagacctcggcgagaaagcccgccgcttcaacgtcttcagggagaacgtccgcctcatccacgagttcaaccgcggcgacgccccctacaagctccgcctcaaccgcttcggcgacatgaccgcggacgagttccgccgcgcctacgcctcctcccgcgtctctcaccaccgcatgttcagccgtaaggagggcgatggcggcttcatgcacgggagcgctcgggacgtgccgccttcggtggactggcggcagaagggcgcggtgaccgccgtcaaggaccaggggcagtgcggcagctgctgggctttctccacgatcgcggccgtggagggcgtcaacgcgatccgcaccaagaacctcacgtctctgtccgagcagcagctcgtggactgcgacaccaagtccaacgccggctgcaacggcggcctcatggactacgccttccagtacatcgccaagcacggcggggtcgccgccgaggacgcgtacccctacaaggcccggcaggcctcctcctgcaacaagaagccgtccgccgtggtcaccatcgacgggtacgaggacgtgccggccaacgacgagacggcgctgaagaaggcggtggccgcgcagccggtggccgtggccatcgaggctagcgggtcgcacttccagttctactcggagggggtgtttgcgggcaagtgcgggacggagctggaccatggcgtgacggcggtggggtacggcgccaccgtggacggcaccaagtactggatcgtgaagaactcgtgggggccggagtggggcgaaaaggggtacatccgcatgaagcgcgatgtgaaagacaaggaggggctctgcggcatcgccatggaggcgtcctaccccgtcaagacctcagccaacccgaagcatgccagtgccaatgacgagctctgaatctctcatcgattgtcttacaaattattggccccaatatgcatgatcagggcattatcgctagggaaaaaaataagtagtcaatcgttatgcacccatcacatatagtgcactactacttaattgtttgtactagtaaaacgcccatgcgttgccacgggcttttgaaaaaaatttaagatgcc

SEQ ID NO: 56573 - protein, 364 aa, Glycine max
  peptide (1)..(364): Ceres Seq. ID no. 15224804
MARAIVHAAVMAAAALFVLLAAAPAPASAIDFGDHDLASEDSLWALYERWREQHTVARDLGEKARRFNVFRENVRLIHEFNRGDAPYKLRLNRFGDMTADEFRRAYASSRVSHHRMFSRKEGDGGFMHGSARDVPPSVDWRQKGAVTAVKDQGQCGSCWAFSTIAAVEGVNAIRTKNLTSLSEQQLVDCDTKSNAGCNGGLMDYAFQYIAKHGGVAAEDAYPYKARQASSCNKKPSAVVTIDGYEDVPANDETALKKAVAAQPVAVAIEASGSHFQFYSEGVFAGKCGTELDHGVTAVGYGATVDGTKYWIVKNSWGPEWGEKGYIRMKRDVKDKEGLCGIAMEASYPVKTSANPKHASANDEL

SEQ ID NO: 56574 - protein, 354 aa, Glycine max
  peptide (1)..(354): Ceres Seq. ID no. 15224805
MAAAALFVLLAAAPAPASAIDFGDHDLASEDSLWALYERWREQHTVARDLGEKARRFNVFRENVRLIHEFNRGDAPYKLRLNRFGDMTADEFRRAYASSRVSHHRMFSRKEGDGGFMHGSARDVPPSVDWRQKGAVTAVKDQGQCGSCWAFSTIAAVEGVNAIRTKNLTSLSEQQLVDCDTKSNAGCNGGLMDYAFQYIAKHGGVAAEDAYPYKARQASSCNKKPSAVVTIDGYEDVPANDETALKKAVAAQPVAVAIEASGSHFQFYSEGVFAGKCGTELDHGVTAVGYGATVDGTKYWIVKNSWGPEWGEKGYIRMKRDVKDKEGLCGIAMEASYPVKTSANPKHASANDEL

SEQ ID NO: 56575 - protein, 268 aa, Glycine max
  peptide (1)..(268): Ceres Seq. ID no. 15224806
MTADEFRRAYASSRVSHHRMFSRKEGDGGFMHGSARDVPPSVDWRQKGAVTAVKDQGQCGSCWAFSTIAAVEGVNAIRTKNLTSLSEQQLVDCDTKSNAGCNGGLMDYAFQYIAKHGGVAAEDAYPYKARQASSCNKKPSAVVTIDGYEDVPANDETALKKAVAAQPVAVAIEASGSHFQFYSEGVFAGKCGTELDHGVTAVGYGATVDGTKYWIVKNSWGPEWGEKGYIRMKRDVKDKEGLCGIAMEASYPVKTSANPKHASANDEL

SEQ ID NO: 56576 - DNA, 1318 bp, Glycine max
  misc_feature (1)..(1318): Ceres Seq. ID no. 13639246
atccgtcaaactcccaagaaacccttcagaaccttcctcactctttctctcttcctttttttttctttttttttctataaacctaacctaaccaaaaaacccttttcattattcttcattcatttattcttattcatcttttcattcactcactctcactcatggctgaagatgggaacaacaacgatgtacccttacacaaattcaaagacagcaatccaaaccctgaagagttcgatgcaaagggttacagcctcagcggaaaaatcatgctttcagcaataatccttcttttcttcgtcgtcgttttgatgttgtgccttcatatctacgcgcgctggtacctccggcgtgctcgccgccgccagctccggcgccaacgcgagctccgccgcacccagcttgtcttttacaacgacgacgccacccccgcagccgtgtcacgtggcctcgacgccgccatccttgccacgctccccgtcttcaccttcgacccggaaaaaaccgggccggagtgcgctgtttgcttgtcggagttcgaacccggtgaaacgggtcgggtcttgcccaaatgtaatcacagtttccacatagaatgtattgacatgtggttccattctcatgacacgtgtcctctttgtcgcgccccggttgaacgcgcgccggaaccggaagttgttgttataacagtacccgatccggtttccgaaaccggttcaggcgaaaatgagaaccgaaccggttcttcttcttcttcctcttcggttggattgagtaagcctaagccttcgttggttggtgtgacaattgaggtgcctccgagggacgagaattttcaaaacgagttgcaaccgagttgcgactcatcctcctcgtttcggtcgccgatgagtcgcatgctgtcgtttacgaggatgctcggcagggaaaagaaggggaacgtgtcgccgtcgtcgtgcggcggcggcgattgtagctccgccgcggagcgaggtgagcgagaggagactcagtgagtcggtgactcgggtgctgacgtggcacttgttggaagcggaaaaacttgggttgttggcgcgtggcggtgtgtaatagtgacgtttctggattttaatgtaggcggtgagcggcgcgtgagttaggtggcgcgagatactgacgtagaatggttttgggatgaacataaatgatgtacttattcgttgatatatatattttttctttatttgtttcttatcttcgggttccaaaaatagttaaatagaatacgaaaattgctaattgtaatgcttgcttacatagaaatgaaaccaatttt

SEQ ID NO: 56577 - protein, 284 aa, Glycine max
  peptide (1)..(284): Ceres Seq. ID no. 13639247
MAEDGNNNDVPLHKFKDSNPNPEEFDAKGYSLSGKIMLSAIILLFFVVVLMLCLHIYARWYLRRARRRQLRRQRELRRTQLVFYNDDATPAAVSRGLDAAILATLPVFTFDPEKTGPECAVCLSEFEPGETGRVLPKCNHSFHIECIDMWFHSHDTCPLCRAPVERAPEPEVVVITVPDPVSETGSGENENRTGSSSSSSSVGLSKPKPSLVGVTIEVPPRDENFQNELQPSCDSSSSFRSPMSRMLSFTRMLGREKKGNVSPSSCGGGDCSSAAERGEREETQ

SEQ ID NO: 56578 - protein, 248 aa, Glycine max
  peptide (1)..(248): Ceres Seq. ID no. 13639248
MLSAIILLFFVVVLMLCLHIYARWYLRRARRRQLRRQRELRRTQLVFYNDDATPAAVSRGLDAAILATLPVFTFDPEKTGPECAVCLSEFEPGETGRVLPKCNHSFHIECIDMWFHSHDTCPLCRAPVERAPEPEVVVITVPDPVSETGSGENENRTGSSSSSSSVGLSKPKPSLVGVTIEVPPRDENFQNELQPSCDSSSSFRSPMSRMLSFTRMLGREKKGNVSPSSCGGGDCSSAAERGEREETQ

SEQ ID NO: 56579 - protein, 234 aa, Glycine max
  peptide (1)..(234): Ceres Seq. ID no. 13639249
MLCLHIYARWYLRRARRRQLRRQRELRRTQLVFYNDDATPAAVSRGLDAAILATLPVFTFDPEKTGPECAVCLSEFEPGETGRVLPKCNHSFHIECIDMWFHSHDTCPLCRAPVERAPEPEVVVITVPDPVSETGSGENENRTGSSSSSSSVGLSKPKPSLVGVTIEVPPRDENFQNELQPSCDSSSSFRSPMSRMLSFTRMLGREKKGNVSPSSCGGGDCSSAAERGEREETQ

SEQ ID NO: 56580 - DNA, 782 bp, Glycine max
  misc_feature (1)..(782): Ceres Seq. ID no. 14301420
ccccaccctttcgcctagtgcccctaggccggcctccgggctcgaacccactgctctaacaaataataaatccgcgtacaaatctacccccactgacccagatcatcctcgtccccatccgcccccgccgccgatccgcgccacaattcacatctgacttcccccaattttatcttgcttcgattcgattctcttggttcgttcgtaggggctagggttgggagccgatcgcgcgccgccggagccggtcgatagggttagggttagagtggggaggggctgagatggagaagaagaaggcggcggtgccgctggtctgccacggccactcgcggccggtcgtcgacctgttctacagccccgtcacgcccgacggctacttcctcatcagcgccagcaaggactcaaatccaatgcttcgtaatggtgagactggagattggattgggacttttgaaggtcataaaggtgctgtttggagctgttgccttgacacaaatgctctgcgtgctgcctctggttcagcagacttttcagctaaagtatgggatgcactaacaggtgatgaactacattcatttgaacacaagcatatagtccgtgcgtgtgcgtgtccatgaataaatcttagcttgtctcggcaagctgggtgcgagtcccttgtttgttttttgtatgattattaccagtgtgcatgcgttgttgtttcttgttgggtttatgggattatcccggccggtcaatccttctctcatgtagtaagattttattttgggcaaatc

SEQ ID NO: 56581 - protein, 111 aa, Glycine max
  peptide (1)..(111): Ceres Seq. ID no. 14301421
MEKKKAAVPLVCHGHSRPVVDLFYSPVTPDGYFLISASKDSNPMLRNGETGDWIGTFEGHKGAVWSCCLDTNALRAASGSADFSAKVWDALTGDELHSFEHKHIVRACACP

SEQ ID NO: 56582 - protein, 68 aa, Glycine max
  peptide (1)..(68): Ceres Seq. ID no. 14301422
MLRNGETGDWIGTFEGHKGAVWSCCLDTNALRAASGSADFSAKVWDALTGDELHSFEHKHIVRACACP

SEQ ID NO: 56583 - DNA, 919 bp, Glycine max
  misc_feature (1)..(919): Ceres Seq. ID no. 13595484
aaatacaaccaacccctctcgccgtctgctcgcttgcccgtccgtccgtccccccaaatccaaccccctccccgcacgaaccccggcggcgtcaccggcgatggagtgcgtcatcggcgtggtcggccgcgacttcgcggtggtggccgcggacacgtccgccgtgcagagcatcctcgtccacaagacggacgaggacaagatcatgctcctcgactcccacaagctcatgggcgcctccggggagcccggcgaccgcgtgcagttcaccgagttcatccagaagaacctccacctctaccagttccgcaacaacatgccgctcagcaccgccgccaccgccaacttcacccgcggcgagctcgccaccgccctccgcaagaatccctactctgtaaacatcatacttgcagggtttgataaagatgctggtgcatcgatgtactacattgactacatcgcaacgctccacaaaattgacaagggagcattcgggtacgggtcgtacttctgtttgtcgctgatggacaagttgtaccgccctgacatgactgtcgaggaagcggtagaccttgttgacaagtgcatcaaggagatcagactccggctggtcgtcgcgcctcagaatttcgccatcaagatcgtggacaaggatggcgccagggactatgctaggcgtgagataggaggtgacagtcctgcagtcgcaaccgcaaccgcaacaatagcaacaactgcctgaggtgattggcgctgtcggtggtcatttggctggctggaggctgaaccctttctgttaattgtttccaagtactgtcactatgtaatcgcaatacgtttcggttcgagaactgtgttgcaaattctcccagatgtggactagtctgtttatgacccctatttcatggttatatgttcc

SEQ ID NO: 56584 - protein, 246 aa, Glycine max
  peptide (1)..(246): Ceres Seq. ID no. 13595485
NTTNPSRRLLACPSVRPPKSNPLPARTPAASPAMECVIGVVGRDFAVVAADTSAVQSILVHKTDEDKIMLLDSHKLMGASGEPGDRVQFTEFIQKNLHLYQFRNNMPLSTAATANFTRGELATALRKNPYSVNIILAGFDKDAGASMYYIDYIATLHKIDKGAFGYGSYFCLSLMDKLYRPDMTVEEAVDLVDKCIKEIRLRLVVAPQNFAIKIVDKDGARDYARREIGGDSPAVATATATIATTA

SEQ ID NO: 56585 - protein, 213 aa, Glycine max
  peptide (1)..(213): Ceres Seq. ID no. 13595486
MECVIGVVGRDFAVVAADTSAVQSILVHKTDEDKIMLLDSHKLMGASGEPGDRVQFTEFIQKNLHLYQFRNNMPLSTAATANFTRGELATALRKNPYSVNIILAGFDKDAGASMYYIDYIATLHKIDKGAFGYGSYFCLSLMDKLYRPDMTVEEAVDLVDKCIKEIRLRLVVAPQNFAIKIVDKDGARDYARREIGGDSPAVATATATIATTA

SEQ ID NO: 56586 - protein, 178 aa, Glycine max
  peptide (1)..(178): Ceres Seq. ID no. 13595487
MLLDSHKLMGASGEPGDRVQFTEFIQKNLHLYQFRNNMPLSTAATANFTRGELATALRKNPYSVNIILAGFDKDAGASMYYIDYIATLHKIDKGAFGYGSYFCLSLMDKLYRPDMTVEEAVDLVDKCIKEIRLRLVVAPQNFAIKIVDKDGARDYARREIGGDSPAVATATATIATTA

SEQ ID NO: 56587 - DNA, 479 bp, Glycine max
  misc_feature (1)..(479): Ceres Seq. ID no. 13595195
gtttgtctatgggcgaatctctccggcaacggcgacctctcttcccctgcgcgtccctcttccggcgttgccaccccgtcgtccatcgctaccagatcgacgaccgccccttcatcctctctggtctctgcagatctacgccggcggcccgccttaccgacggttcttcctagccacgctgaagtctccatcctagagggtagaggcattccatttccttcagttcagtgattgagaatggaaaatggatttcctggcgaagttctgaaggctgtttttcctctactggatggtaaagacttagtcttttgcatgcttgtatgccgccaatggtgcgaaattgcaaaggatgattacttctggaaatgcatctgctcacggaaatggccttccatctgcaagcagcctccttctgacacaaacttccaaaagctctatttaacgttctccaagccacggaagacggtgcaccttcctgt

SEQ ID NO: 56588 - protein, 80 aa, Glycine max
  peptide (1)..(80): Ceres Seq. ID no. 13595196
MENGFPGEVLKAVFPLLDGKDLVFCMLVCRQWCEIAKDDYFWKCICSRKWPSICKQPPSDTNFQKLYLTFSKPRKTVHLP

SEQ ID NO: 56589 - protein, 76 aa, Glycine max
  peptide (1)..(76): Ceres Seq. ID no. 13595197
VCLWANLSGNGDLSSPARPSSGVATPSSIATRSTTAPSSSLVSADLRRRPALPTVLPSHAEVSILEGRGIPFPSVQ

SEQ ID NO: 56590 - protein, 64 aa, Glycine max
  peptide (1)..(64): Ceres Seq. ID no. 13595198
FVYGRISPATATSLPLRVPLPALPPRRPSLPDRRPPLHPLWSLQIYAGGPPYRRFFLATLKSPS

SEQ ID NO: 56591 - DNA, 1114 bp, Glycine max
  misc_feature (1)..(1114): Ceres Seq. ID no. 12610713
acaacatccatgtcccatacatctttagcagcaagagaactcaaacagtttaattttcttcaaaactagtttttttttggttttagttggtatcctcggaagagagagaaaatgttgggaattttcagcggagctatagtatcattgccggaagagctggtggctgccgggaaccgaactccgtcgccgaagacaaccggatcggtcctagtcaacaagttcgtagagaaaaatccctctgccgtgtccgtacaggtcggcgactacgtgcagcttgcttatagccaccacaaagagagtcctctccggccaaggtcatttggggctaaggatgagatattctgcttgttccaaggctcacttgacaacctaggaagccttaaacaacaatatgggctggcaaagaatgcaaacgaggttctcttggtcattgaggcttacaagactctccgtgacagagctccttacccagccaaccacgtcgtgtcacacctaagtggcgattttgcctttgtggtctttgataaatcaacctccactctgtttgtagcctctgaccaagaaggtaaggtaccattgtactgggggataacagctgatgggtatgtggcatttgctgatgatattgagttgctaaaaggtgcttgtggcaaatctcttgcttctttccctcaaggctgtttttactcgactgccttaggtgggcttaggagctttgagaaccctaagaacaagatcactgccattcctgctagagaggaagaaatttggggagccaccttcaaggtggaaggagcagcagttcttgcacatggagagtgaaagaatcaagatccatctctcttaatatctaaactccaacagcaaacaaaataatgatgtagagaaaacaagaagctgttctatgagtttttttttttttttaaatgttatcaatggttggtgatgatgatgcgtgtagtgtgttctctcttttgtacaatccgtgtccgtctcttctgctgtttgtagtgactttgtcccaataagttatgtctcaaaactcaaaatctaccttctcttgatcctttttttatctcatgttcagatcttgtgtttcttcagtaagtcttgc

SEQ ID NO: 56592 - protein, 236 aa, Glycine max
  peptide (1)..(236): Ceres Seq. ID no. 12610714
MLGIFSGAIVSLPEELVAAGNRTPSPKTTGSVLVNKFVEKNPSAVSVQVGDYVQLAYSHHKESPLRPRSFGAKDEIFCLFQGSLDNLGSLKQQYGLAKNANEVLLVIEAYKTLRDRAPYPANHVVSHLSGDFAFVVFDKSTSTLFVASDQEGKVPLYWGITADGYVAFADDIELLKGACGKSLASFPQGCFYSTALGGLRSFENPKNKITAIPAREEEIWGATFKVEGAAVLAHGE

SEQ ID NO: 56593 - DNA, 1380 bp, Glycine max
  misc_feature (1)..(1380): Ceres Seq. ID no. 15176016
aggaaattgggaaagatactaaaactttccctggaactgagttggagtataattttttcttgttttgcgcacttctcagatgaatccctagtttccttacaaggtcctctgtaccatttacaatggaacatgcagataaaggaaaagaatcatcaaatagtgtaaatgaagtagaagtcactaattctccaattatttgtggccttccagatgatatttctcttatgtgcctggcaagaattccaagaaaatatcattctgtcctgaagtgtgtctcaaagagctggaggaacttgatttgcagtgaagaatggttctgttatcgccgaaagcacaaacttgatgaaacctggatttatgctttgtgcagggacaaatcaaatgagattttctgttatgtattggatccaaccttgtcaagaagatactggaagctcattgataaccttccacctcaaatctcgaaaagaaaaggcataggttttgaagctttgggaaataagctattcttattgggtggttgtagcgagtttctagattctactgatgaggtttattcatatgatgcttcctcaaactgttgggctcaagctacttccttgtcaactgctaggtacaactttggttgtgaagttttggataaaaaactatatgctatcgggggaggaggttcaaagtcaagttatcattcttgggagacttttgaccctttgacaaattgttggacatctcagacagatcctaaaattgttaatgaaattaaagattcagtggttcttgacgggaagatatacgtcgnatgtagcagatatcctgtaactcctcatgtatttgctgttgtatatgaaccatcaagtggcacatgggagtatgcagatgatgacatggtttcaggatggactggtcctgcagttgctgttgatggtaccctttatgtcttggatcagagtgcaggaactaagttaatgatgtggcataaagagagacgcgagtggatactcgttggaaagctatcaccattgcctattagacaaccctgccagcttgttgcagttggtaaaagcattttcattgttgggagagtgcttagcactgtggttgttgatgttgataatttggggaatgaggatcaggtgattgtgggttctgctatacctggattattatttgatgtcaatgtaacaagtgttaaatgcttgtcaaactgaagcattaattagtttgtgggtagtgttatgctatgaaacatgcatcaatgttacatgaaacttttttcttttcttggtacaatcatagtactgaagtttgaaccattggcttatatgtaaattactcaaatccggcacagtttgcattgtcaatcctagtagtattttgcat

SEQ ID NO: 56594 - protein, 361 aa, Glycine max
  peptide (1)..(361): Ceres Seq. ID no. 15176017
  misc_feature (226)..(226): Xaa is any aa, unknown or other
MEHADKGKESSNSVNEVEVTNSPIICGLPDDISLMCLARIPRKYHSVLKCVSKSWRNLICSEEWFCYRRKHKLDETWIYALCRDKSNEIFCYVLDPTLSRRYWKLIDNLPPQISKRKGIGFEALGNKLFLLGGCSEFLDSTDEVYSYDASSNCWAQATSLSTARYNFGCEVLDKKLYAIGGGGSKSSYHSWETFDPLTNCWTSQTDPKIVNEIKDSVVLDGKIYVXCSRYPVTPHVFAVVYEPSSGTWEYADDDMVSGWTGPAVAVDGTLYVLDQSAGTKLMMWHKERREWILVGKLSPLPIRQPCQLVAVGKSIFIVGRVLSTVVVDVDNLGNEDQVIVGSAIPGLLFDVNVTSVKCLSN

SEQ ID NO: 56595 - protein, 327 aa, Glycine max
  peptide (1)..(327): Ceres Seq. ID no. 15176018
  misc_feature (192)..(192): Xaa is any aa, unknown or other
MCLARIPRKYHSVLKCVSKSWRNLICSEEWFCYRRKHKLDETWIYALCRDKSNEIFCYVLDPTLSRRYWKLIDNLPPQISKRKGIGFEALGNKLFLLGGCSEFLDSTDEVYSYDASSNCWAQATSLSTARYNFGCEVLDKKLYAIGGGGSKSSYHSWETFDPLTNCWTSQTDPKIVNEIKDSVVLDGKIYVXCSRYPVTPHVFAVVYEPSSGTWEYADDDMVSGWTGPAVAVDGTLYVLDQSAGTKLMMWHKERREWILVGKLSPLPIRQPCQLVAVGKSIFIVGRVLSTVVVDVDNLGNEDQVIVGSAIPGLLFDVNVTSVKCLSN

SEQ ID NO: 56596 - DNA, 787 bp, Glycine max
  misc_feature (1)..(787): Ceres Seq. ID no. 12610718
gaatcaacctaaaaataaaaccaaaccaaccaatctccttattagaagaagcatgaacatagtctgtgtccgcgctctctatccgccctccaggttgctacatcgtgccgagagatgtagagtgggagggagaaactacgaaaaacctgaactcaagcaaagcaacttctcaaaagacgaagacgatctcatccttaggcttcatgcacttcttggcaatagatggtcattgatagcgggaaggttacctggacgaaccgatactgaaataaggatccattgggaaacttacttaaagaggaaactcatgaaaatgggaatagacccaaccaaccatcgtctctaccatcacgcaaactacatttcaagacaatacctcaattcctctcataagaaacttgaaacagatatcattagtgatcaatcttcttcggtatccgaatcatgtgatatgagaatgttacccgtttcaagtaccaattgctatgatagtgctagtagtagtgctggacatagtcgtttgcctgacctcaacatcagtctcatccccgcggagacggtggtttctcggccagtttgtggccttcaagaatctaacagcaatggttcaacgcgtcaagaaacgcttcttcttttccagtgaaatcggatattttattgctacataaaaatgaaaaatggtgtatttatctgtactattttgctagatatttttttttttgtaattttactagataaaaatactcaattgagaggataataaatgatgttcaaaattttcaacccg

SEQ ID NO: 56597 - protein, 213 aa, Glycine max
  peptide (1)..(213): Ceres Seq. ID no. 12610719
NQPKNKTKPTNLLIRRSMNIVCVRALYPPSRLLHRAERCRVGGRNYEKPELKQSNFSKDEDDLILRLHALLGNRWSLIAGRLPGRTDTEIRIHWETYLKRKLMKMGIDPTNHRLYHHANYISRQYLNSSHKKLETDIISDQSSSVSESCDMRMLPVSSTNCYDSASSSAGHSRLPDLNISLIPAETVVSRPVCGLQESNSNGSTRQETLLLFQ

SEQ ID NO: 56598 - protein, 196 aa, Glycine max
  peptide (1)..(196): Ceres Seq. ID no. 12610720
MNIVCVRALYPPSRLLHRAERCRVGGRNYEKPELKQSNFSKDEDDLILRLHALLGNRWSLIAGRLPGRTDTEIRIHWETYLKRKLMKMGIDPTNHRLYHHANYISRQYLNSSHKKLETDIISDQSSSVSESCDMRMLPVSSTNCYDSASSSAGHSRLPDLNISLIPAETVVSRPVCGLQESNSNGSTRQETLLLFQ

SEQ ID NO: 56599 - protein, 111 aa, Glycine max
  peptide (1)..(111): Ceres Seq. ID no. 12610721
MKMGIDPTNHRLYHHANYISRQYLNSSHKKLETDIISDQSSSVSESCDMRMLPVSSTNCYDSASSSAGHSRLPDLNISLIPAETVVSRPVCGLQESNSNGSTRQETLLLFQ

SEQ ID NO: 56600 - DNA, 1352 bp, Glycine max
  misc_feature (1)..(1352): Ceres Seq. ID no. 12611506
aaaaaccaaaaccctagcgaggttggttcccaattcccatggtttctcacccgaaatcgaagttcagtgtctatcaaaacccttccttttcggcggttctcacttccaacagtcttcaaccttccaagttcaccatcctctccttcttctctgcctccgcattcgcttttctcgctgtcttcttcagggaaaacggcttcgtccacattttgagcttcgcagctttttcccctgtcacagcttgtaagtttccaacctcaatttttttaattagggtaatttctgatccctttattgaacttcagattggcttgccaagacgctacaagctatagtgggttttatcttcattgtttctgcactcttcaaagttgtgtttctgcgtagagttaggtatgctggtggaggtgttgttgcggctaagtctctgtctgatgctaacagcgttcataggaatgagattttgctaacaaaacatcaattagggcttttaggagtgaagccaaaggttgatttggctcaacctgattcagcaaagaagccccccaagtctaaacttcaactgccttcttcagatttgcttgttccccttcaccggccaattcccagtcccactcagggttcttcgtctagcattgatgccgatggttcaaattctaataggggtggtgctgctcgttctattggtactccatcgaggtagtcaggttcggtgtcattctatctttcgccaggttcggtttcgcctccaaggggttcggctggagtggattcagcattttcgagtccttggtctaacaggcaagcctcctctgttactaagataacggctgaagaaaagctggagaaattcatagctgaagtggatgaaaggatcaatgagtctgctgggaagatgtctaccccgcctcctattgtttctggttttggcatagtgagccctattacagttacaggctcaaccaatacctctggaactgctaggcgtacgtcattgaggcttgtgaggatgtctccgggctcgcaaaagtttaacactccccctaagaagggtgagggcaagtttcctgcaccaatgtccatggaagaatctgttcaagcttttgaacatcttggcatctatcctcaaattgaacagtggcatgatcaactctggcaatggttttctttgcttctgctcaatcctttgcttaacaagattgagacaagtcacattaaggtttcttttattcttcatttcttctcttatgttcaaagcaaggttaaacaaacaagaaaaatattgactttggaagtcaatatatgtgatggcaacaataattttcaatgacagacaaagtagtatttgatgt

SEQ ID NO: 56601 - protein, 144 aa, Glycine max
  peptide (1)..(144): Ceres Seq. ID no. 12611507
MSTPPPIVSGFGIVSPITVTGSTNTSGTARRTSLRLVRMSPGSQKFNTPPKKGEGKFPAPMSMEESVQAFEHLGIYPQIEQWHDQLWQWFSLLLLNPLLNKIETSHIKVSFILHFFSYVQSKVKQTRKILTLEVNICDGNNNFQ

SEQ ID NO: 56602 - protein, 106 aa, Glycine max
  peptide (1)..(106): Ceres Seq. ID no. 12611508
MSPGSQKFNTPPKKGEGKFPAPMSMEESVQAFEHLGIYPQIEQWHDQLWQWFSLLLLNPLLNKIETSHIKVSFILHFFSYVQSKVKQTRKILTLEVNICDGNNNFQ

SEQ ID NO: 56603 - protein, 98 aa, Glycine max
  peptide (1)..(98): Ceres Seq. ID no. 12611509
MVSHPKSKFSVYQNPSFSAVLTSNSLQPSKFTILSFFSASAFAFLAVFFRENGFVHILSFAAFSPVTACKFPTSIFLIRVISDPFIELQIGLPRRYKL

SEQ ID NO: 56604 - DNA, 882 bp, Glycine max
  misc_feature (1)..(882): Ceres Seq. ID no. 13639080
agcaagcagctgatccgagttaaccattagccaaaagtaatcttgcttttccatttcccgagagagctcagttcgtgtctgcactccagtccagtgtttgtttgagcagcagccatggcctccaaccaggacaaggcaagctaccgcgccggcgaggccaaggcccacaccgaggagaaggccggacaggtgaccggcgcggccaaggacgaggcgtgcgacgccaaggaccgggcgtcgggcgcggcggggcaagcgacggggaaggggcagggcgccgtggaggccacgaagcagaaggccggcgaggcggggcagaagacgtccgagacggcgcaggccggcaaggaccgggccgccgagggcaaggaccggaccggcagctacctcggccacgcgaccgaggggaccaagcagaaggcctccgaggcgacggggtacacgcaggacagggcttccgacgcggcgcagtacaccaaggactccgccgtcgccggcaaggacaagaccggcagcgtcctcagccaggccggcgagcaggtgaagaacgcggtggtcggcgcgaaagacgcggtggcgagcacgctggggatggggggagacaacacctccagcgcaaccaaggacgcgagcaccaccgagaccatcaccaagagccgtcactagattatacctgtcgcggttgcataatgctttctttccttcagttcccctcgagctccacattcctgtggtgtgtccgagtctctatgtcgaggtcgggcgagaatgtctgactgacgagagatgtatcttggtgttcagagttctcgttttaagttccacaatggtgtaataataacaataataataaagtactgcgtaccgtaagtaatttcgtcc

SEQ ID NO: 56605 - protein, 183 aa, Glycine max
  peptide (1)..(183): Ceres Seq. ID no. 13639081
MASNQDKASYRAGEAKAHTEEKAGQVTGAAKDEACDAKDRASGAAGQATGKGQGAVEATKQKAGEAGQKTSETAQAGKDRAAEGKDRTGSYLGHATEGTKQKASEATGYTQDRASDAAQYTKDSAVAGKDKTGSVLSQAGEQVKNAVVGAKDAVASTLGMGGDNTSSATKDASTTETITKSRH

SEQ ID NO: 56606 - DNA, 1706 bp, Glycine max
  misc_feature (1)..(1706): Ceres Seq. ID no. 13595201
aggcaccacacaacacaacttccttgtgcagccaccattattgttgttattggagatttcaattctctgtctttcaaactcctcaagttgggtttatgtgatgatggctctcaacatctcttctccagctgaagtcaagtccatttttttcgctgattccttcaagtctaactgcctcacagcaaaattctcaggtgggtttgcttttaagagaaaagagcgtagagcagcatctggaggacgggtttattgctcagtgcaggcaacaccaccaccaccagcctggccgggacgagcggttccggaacaaggtcgtaagacttgggatggaccaaaacccatttcaattgtggggagtactggttcaattggaactcagacactagatattgtggcagagaatccagataagtttaaagttgtggcacttgcagctggttcaaatgttactcttcttgcagaccaggtaaaaagatttaagcctcaacttgttgctgttagaaatgagtccctaattgctgaacttgaagaggccttgcatgatgttgaagaaaaacctgagatcatccctggagagcagggaatcattgaggttgctcgtcacccagatgcagttagtgtagtcacaggaatagtaggctgtgcaggactgaagccaacmgttgcagcgatagaagcagggaaagacatagctttggccaacaaagagacattgattgctggaggtccttttgttcttcctcttgctcagaagcataatgtaaaaatacttccagctgattcagaacattctgccatctttcagtgtatccaggggttgccagagggtgcacttaggagagttattttaactgcatctggaggtgctttcagggattggccagttgataaactgaaagatgttaaagttgctgatgcattaaaacatcctaactggaatatggggaaaaagataactgtggactctgctaccctttttaataagggtctagaagtaattgaagcacattacttgtttggagctgactacgatcatattgagattgtcattcatccacaatcaatcatacattcaatgattgaaacacaggattcatctgttcttgcacaattggggtggcctgatatgcgtttgccaatcctctatacattatcatggcctgacaggatttattgttctgaagtcacttggccacgccttgatctttgcaagcttggttcacttacatttaaaactccagataatgtaaagtatccatccatgaatcttgcattttctgctggccgtgctggaggcacaatgacaggagttcttagtgcagcaaatgaaaaagctgtagagatgtttattgatgaaaagattagctatttggatatattcaaagttgtggagctaacatgtgagaagcatcaaaatgaattggtatcctctccttcccttgaggaaattattcactatgacctgtgggcgcgaaaatatgctgctagtctgcaagactcttccagcttcactcctattcttgcatgaggatgattaaactagggatgtggctgatgcttcccaattgcctgctttcaccataatttcttcgggcattgaacaatgtagaatggtgcattccacagatgttgaaaattaaataggttttttgtttatggaatgttggtgttttaacacctttcaattgatcttatagttttgtcgt

SEQ ID NO: 56607 - protein, 508 aa, Glycine max
  peptide (1)..(508): Ceres Seq. ID no. 15221510
  misc_feature (220)..(220): Xaa is any aa, unknown or other
GTTQHNFLVQPPLLLLLEISILCLSNSSSWVYVMMALNISSPAEVKSIFFADSFKSNCLTAKFSGGFAFKRKERRAASGGRVYCSVQATPPPPAWPGRAVPEQGRKTWDGPKPISIVGSTGSIGTQTLDIVAENPDKFKVVALAAGSNVTLLADQVKRFKPQLVAVRNESLIAELEEALHDVEEKPEIIPGEQGIIEVARHPDAVSVVTGIVGCAGLKPXVAAIEAGKDIALANKETLIAGGPFVLPLAQKHNVKILPADSEHSAIFQCIQGLPEGALRRVILTASGGAFRDWPVDKLKDVKVADALKHPNWNMGKKITVDSATLFNKGLEVIEAHYLFGADYDHIEIVIHPQSIIHSMIETQDSSVLAQLGWPDMRLPILYTLSWPDRIYCSEVTWPRLDLCKLGSLTFKTPDNVKYPSMNLAFSAGRAGGTMTGVLSAANEKAVEMFIDEKISYLDIFKVVELTCEKHQNELVSSPSLEEIIHYDLWARKYAASLQDSSSFTPILA

SEQ ID NO: 56608 - protein, 475 aa, Glycine max
  peptide (1)..(475): Ceres Seq. ID no. 15221511
  misc_feature (187)..(187): Xaa is any aa, unknown or other
MMALNISSPAEVKSIFFADSFKSNCLTAKFSGGFAFKRKERRAASGGRVYCSVQATPPPPAWPGRAVPEQGRKTWDGPKPISIVGSTGSIGTQTLDIVAENPDKFKVVALAAGSNVTLLADQVKRFKPQLVAVRNESLIAELEEALHDVEEKPEIIPGEQGIIEVARHPDAVSVVTGIVGCAGLKPXVAAIEAGKDIALANKETLIAGGPFVLPLAQKHNVKILPADSEHSAIFQCIQGLPEGALRRVILTASGGAFRDWPVDKLKDVKVADALKHPNWNMGKKITVDSATLFNKGLEVIEAHYLFGADYDHIEIVIHPQSIIHSMIETQDSSVLAQLGWPDMRLPILYTLSWPDRIYCSEVTWPRLDLCKLGSLTFKTPDNVKYPSMNLAFSAGRAGGTMTGVLSAANEKAVEMFIDEKISYLDIFKVVELTCEKHQNELVSSPSLEEIIHYDLWARKYAASLQDSSSFTPILA

SEQ ID NO: 56609 - protein, 474 aa, Glycine max
  peptide (1)..(474): Ceres Seq. ID no. 15221512
  misc_feature (186)..(186): Xaa is any aa, unknown or other
MALNISSPAEVKSIFFADSFKSNCLTAKFSGGFAFKRKERRAASGGRVYCSVQATPPPPAWPGRAVPEQGRKTWDGPKPISIVGSTGSIGTQTLDIVAENPDKFKVVALAAGSNVTLLADQVKRFKPQLVAVRNESLIAELEEALHDVEEKPEIIPGEQGIIEVARHPDAVSVVTGIVGCAGLKPXVAAIEAGKDIALANKETLIAGGPFVLPLAQKHNVKILPADSEHSAIFQCIQGLPEGALRRVILTASGGAFRDWPVDKLKDVKVADALKHPNWNMGKKITVDSATLFNKGLEVIEAHYLFGADYDHIEIVIHPQSIIHSMIETQDSSVLAQLGWPDMRLPILYTLSWPDRIYCSEVTWPRLDLCKLGSLTFKTPDNVKYPSMNLAFSAGRAGGTMTGVLSAANEKAVEMFIDEKISYLDIFKVVELTCEKHQNELVSSPSLEEIIHYDLWARKYAASLQDSSSFTPILA

SEQ ID NO: 56610 - DNA, 1168 bp, Glycine max
  misc_feature (1)..(1168): Ceres Seq. ID no. 13639102
acttgttcttctctagctaccttatcatcataaaaacgagaaacgaatgattcacattagccaaaactaaacgccgctctatttccgtctcattttcactcactatggcttcggatgagaccatgaactttcactcttgttcgttacacgaagatgactttgatgatgatgatgatgatcacccccacaacttgtcgaggctctccgtgtgcactggcagcacctttggtgtcgacgacgatgttgacaatctggcctccatgtgcgtgtcacacttgtccatcgaaagcttcgacgcagatggtgagttatcatccgactcagaaaacgaattgggaagttgttactctctgccctctacgcccccacgaatgaggaaacagcttaaggactatgccagtgacaatgggaatgaaattacaaacaagagtgatccacggagaaggagaagatcctttaggagggagaggtgggggtttgagaagactaagatcaggaaagaggaggggcttagtggggatagtgatcaaagtggtgtcatgctcataactagacccaaaggtggaattaggtctctttgcatggacttggaagaagttaaggcttgtagagatcttggatttgagttggaacacgaacgtatgcttgagatcccttctcgtctctctttttccaattccacacttgacactagcagtggtagcaactctcccatcgccaattggcgtatctctgctccaggtgatgatccacgagacgtgaaggcacggctcaaagtgtgggcgcaggcggtggcacttgcgtctgcctcaaaatacggcacatgaattcaattttcttctaactcgttcttgctttttgttcgattgagactatatgttatagcgtattagtataatataagcctttttgtcttcccactatgattggtggttgtatcattttgttgtagattttaggttgtttttttcccactaggagtgttgaggtttcaggtggaagttcgttttttgagtgatggtcacttttgttctgtacagtagtagtgtttgaataaaatgaagaggccgtgattggagaaagtaaagtagtgtgtgcatagctagtgaaaatatgtagtaccaatgtgaacgcccaaagaaaaaacactggtgaaatttttggattc

SEQ ID NO: 56611 - protein, 240 aa, Glycine max
  peptide (1)..(240): Ceres Seq. ID no. 13639103
MASDETMNFHSCSLHEDDFDDDDDDHPHNLSRLSVCTGSTFGVDDDVDNLASMCVSHLSIESFDADGELSSDSENELGSCYSLPSTPPRMRKQLKDYASDNGNEITNKSDPRRRRRSFRRERWGFEKTKIRKEEGLSGDSDQSGVMLITRPKGGIRSLCMDLEEVKACRDLGFELEHERMLEIPSRLSFSNSTLDTSSGSNSPIANWRISAPGDDPRDVKARLKVWAQAVALASASKYGT

SEQ ID NO: 56612 - protein, 234 aa, Glycine max
  peptide (1)..(234): Ceres Seq. ID no. 13639104
MNFHSCSLHEDDFDDDDDDHPHNLSRLSVCTGSTFGVDDDVDNLASMCVSHLSIESFDADGELSSDSENELGSCYSLPSTPPRMRKQLKDYASDNGNEITNKSDPRRRRRSFRRERWGFEKTKIRKEEGLSGDSDQSGVMLITRPKGGIRSLCMDLEEVKACRDLGFELEHERMLEIPSRLSFSNSTLDTSSGSNSPIANWRISAPGDDPRDVKARLKVWAQAVALASASKYGT

SEQ ID NO: 56613 - protein, 188 aa, Glycine max
  peptide (1)..(188): Ceres Seq. ID no. 13639105
MCVSHLSIESFDADGELSSDSENELGSCYSLPSTPPRMRKQLKDYASDNGNEITNKSDPRRRRRSFRRERWGFEKTKIRKEEGLSGDSDQSGVMLITRPKGGIRSLCMDLEEVKACRDLGFELEHERMLEIPSRLSFSNSTLDTSSGSNSPIANWRISAPGDDPRDVKARLKVWAQAVALASASKYGT

SEQ ID NO: 56614 - DNA, 1221 bp, Glycine max
  misc_feature (1)..(1221): Ceres Seq. ID no. 13505291
aacgtgccctctctcacctcctgcacgttctccctcttttctctcaccatcagaaagcgctttttttttttttttttcttctacctccgtttctccgtctccacatttctccttcacgaactcccgatttttcttcctcttcaatctcgtccctctctgtctctccatccttaaatatacacaacatcttctaaggagaaaggggttccgaaagttacgataaaataaaaatggatccaaacgcggtgaagtccactctctccaatctggcgtttggaaacgtaatggcggcagctgcccgtgattatcagaaggaattgcatgctcaagagaagacacatgcatcaagttcagtacatcaggaggttgaccttgacgagttaatggatgatcctgagttggaaaaattgcatgcagataggattgcagctcttaagaaagaagcagagaaacgggaggaatggaagaagaaaggtcatggagaatttagggaagtaaccgagggtgatttcttaggcgaagtcacaggaagtgaaaaagtgatttgtcacttctaccataaggagttctatagatgcaagataatggataagcatttaaagtctcttgcaccaaagcatatcgatacaaagttcatcaagcttgatgcagagaatgcaccattctttgttacaaaactggctatcaagactttaccctgcgtcatactgttcagacaaggagtagcagtagatagattggtaggatttcaagatgtgggaggtaaagatgattttaccacaagaacgctggaggctctgctgataaagaaaggtataattgaggtgaagaaagctgaggatgatgaagatgatgaatatcaagacagtacacgtagagttgtaagatcctccatgattgctggttctgattctgattctgattaaaattaatcagctggtggcattaaaagaagaatcctctgtttatcttcttcatatccttttggatttcgggcttgtataatctttgctgcacttgtggtttgtttgcttttgggaagtggtttgatgaatccatagcaatcatacagaagctatactgcgctacaactgttgtatgaacctgtccctgtaggaaattgctaacgtttctcgcatccgaggggtatcaaaagttagaacttcatttgtaacagtagaaattgatataggttttctaaaatggatttaattattgttc

SEQ ID NO: 56615 - protein, 231 aa, Glycine max
  peptide (1)..(231): Ceres Seq. ID no. 13505292
MDPNAVKSTLSNLAFGNVMAAAARDYQKELHAQEKTHASSSVHQEVDLDELMDDPELEKLHADRIAALKKEAEKREEWKKKGHGEFREVTEGDFLGEVTGSEKVICHFYHKEFYRCKIMDKHLKSLAPKHIDTKFIKLDAENAPFFVTKLAIKTLPCVILFRQGVAVDRLVGFQDVGGKDDFTTRTLEALLIKKGIIEVKKAEDDEDDEYQDSTRRVVRSSMIAGSDSDSD

SEQ ID NO: 56616 - protein, 213 aa, Glycine max
  peptide (1)..(213): Ceres Seq. ID no. 13505293
MAAAARDYQKELHAQEKTHASSSVHQEVDLDELMDDPELEKLHADRIAALKKEAEKREEWKKKGHGEFREVTEGDFLGEVTGSEKVICHFYHKEFYRCKIMDKHLKSLAPKHIDTKFIKLDAENAPFFVTKLAIKTLPCVILFRQGVAVDRLVGFQDVGGKDDFTTRTLEALLIKKGIIEVKKAEDDEDDEYQDSTRRVVRSSMIAGSDSDSD

SEQ ID NO: 56617 - protein, 180 aa, Glycine max
  peptide (1)..(180): Ceres Seq. ID no. 13505294
MDDPELEKLHADRIAALKKEAEKREEWKKKGHGEFREVTEGDFLGEVTGSEKVICHFYHKEFYRCKIMDKHLKSLAPKHIDTKFIKLDAENAPFFVTKLAIKTLPCVILFRQGVAVDRLVGFQDVGGKDDFTTRTLEALLIKKGIIEVKKAEDDEDDEYQDSTRRVVRSSMIAGSDSDSD

SEQ ID NO: 56618 - DNA, 1064 bp, Glycine max
  misc_feature (1)..(1064): Ceres Seq. ID no. 14302012
agcactttcgccgctgctctccgctttcatagggtttatctctttcctcttcccctctcgcgcacggcagccggattccctaccgcaggcgagccaccacgccggccggagctcggagataaggtagttgtttagcaagcaatcgagaatgtcgtcggtgcagctctccggtgccggtgttgccacggtggccttcaacaacactggtctgcgcccctctcaggcgtcagcagtcagagtgtgctcatcgaggcgctcatctcgtagcctcgttgtcagggctgccactgtcgtcaccccgaagtatacatcactcaagcctctgggagacagagtgcttgtgaagcttagcgcagctgaggagaagaccattggtggaattttgcttccatcctccgcgcagtccaagcctcagggaggcgagattgttgctgttggagggggtagaaccattggggataagaaggtggaggtcagcataccgactggatctcaagttgtatattcaaagtatgctggtactgaggttgaatacaacaactccaagcatcttattatgaaagaggatgacatcataggtattcttgaatctgatgatgtcaaagacatgaagcctctcaatgaccggattctcatcaaggttgcagaggcttcagacaagactgaagctggtcttatcctcaccgagacaaccaaggagaagccatccattggaacagtcgtagctgttggtccgggctctcttgacgaggaaggcaagaggcagccattgccagtgtcaccaggcagcaccgtgctgtactccaagtacgcaggcggcgagttcaagggagctgatggcacgaactacattgtgttgagagtgtctgatgtgatggctgagctctcttaagtgtgtggtttattactttgtttcagttttgagttcacgatataggctagcatgagtggtaagattgctatgtgataaccacttgatgctgtttcggatgattacggaattgtacgagcaaacctgttgtctgggataaaaacatttactgaatttgtttacaaagggagcc

SEQ ID NO: 56619 - protein, 247 aa, Glycine max
  peptide (1)..(247): Ceres Seq. ID no. 14302013
MSSVQLSGAGVATVAFNNTGLRPSQASAVRVCSSRRSSRSLVVRAATVVTPKYTSLKPLGDRVLVKLSAAEEKTIGGILLPSSAQSKPQGGEIVAVGGGRTIGDKKVEVSIPTGSQVVYSKYAGTEVEYNNSKHLIMKEDDIIGILESDDVKDMKPLNDRILIKVAEASDKTEAGLILTETTKEKPSIGTVVAVGPGSLDEEGKRQPLPVSPGSTVLYSKYAGGEFKGADGTNYIVLRVSDVMAELS

SEQ ID NO: 56620 - DNA, 1497 bp, Glycine max
  misc_feature (1)..(1497): Ceres Seq. ID no. 13582369
atctatctctcttcgaatcccctcccccttaacaagttagcactcatgattccctcttcactccgatccactcgcatataacaacccttatttctccattgcaaggttcataaaagcacaggaatggaattaagcgcggagtattttaaaattcataacgatgtagacttatttttttaagaaaatctaaatgtataccgtattatttttacaaaaagaacgaacttggatgagcccgttttttctaacccttataagaaagtatgagtggttgaattagaaaaaattaatagcggcatcacatcgaagctcaatagttaatagcggcctctcgccggcaagaggtggtcgcagcggtggttctgagcattgggagctgacagtggcagcaccgttgctttctgtttcagtttattttaattgatttgtgccttcttgcttctccgtcctcgtcaaggtgtccatggctgaagattcaaggaaacgcacattggaggctttggagagaagaatagcttttgctaaagttgaagttctccaaaaagaaaagaaaaacaaaaagactataaatgaagatgggaaactacctattcctgcagattctacttctaatgatccttccccacatttgttgcattcatcatcagtctcatccaagaaagggaatttcagtttctctggtcataccactttgcaagacattgaagatggtccagcatatgcccaactttctgtgcctgtaaatggaaatctgctcacaactaatgaggagttttctgctgaaagaggaggttcaattgatggcatattgcatgagcttcttcagaagggagatgcagcacataagtacatgcaaggatctagaaacatgaaaattgacaactggatccttcttgataattatgtacaaggacgggtgctttcctctggttctcaagctagggctttgcaacttcattcaaaacgctctaagaaacacatgtctatgaaacggcataagaaggatggatcattagatcttcctcaagagttccagaaatttgatattttcaagccaatgcacgaaatgtggaaagattacataatgttgcttcttaaatccactgggaaaaatcaattggctcaatgtctccttggtgcagatctacatggtgcttttattttagttgtggagtgtaaaataacccattttactggaatttgtggcatcatgattcgtgaaactgcagaagcatttgggataattactgaagataataaattccgagttgttcccaaaaaggtttctgtgtttgtattccaagttgattgctggaaagtcactctgcatggagataaacttggttcaagaaaggttggattatgatattggtgataatccttcaactgtagaatatccacgtgacacctgtgcaatttgaaagtcccaagcagtctatgggagaaagggaaaagtttgattgctgatttgtatcagtagagaagttggaggttgct

SEQ ID NO: 56621 - protein, 300 aa, Glycine max
  peptide (1)..(300): Ceres Seq. ID no. 13582370
MAEDSRKRTLEALERRIAFAKVEVLQKEKKNKKTINEDGKLPIPADSTSNDPSPHLLHSSSVSSKKGNFSFSGHTTLQDIEDGPAYAQLSVPVNGNLLTTNEEFSAERGGSIDGILHELLQKGDAAHKYMQGSRNMKIDNWILLDNYVQGRVLSSGSQARALQLHSKRSKKHMSMKRHKKDGSLDLPQEFQKFDIFKPMHEMWKDYIMLLLKSTGKNQLAQCLLGADLHGAFILVVECKITHFTGICGIMIRETAEAFGIITEDNKFRVVPKKVSVFVFQVDCWKVTLHGDKLGSRKVGL

SEQ ID NO: 56622 - protein, 171 aa, Glycine max
  peptide (1)..(171): Ceres Seq. ID no. 13582371
MQGSRNMKIDNWILLDNYVQGRVLSSGSQARALQLHSKRSKKHMSMKRHKKDGSLDLPQEFQKFDIFKPMHEMWKDYIMLLLKSTGKNQLAQCLLGADLHGAFILVVECKITHFTGICGIMIRETAEAFGIITEDNKFRVVPKKVSVFVFQVDCWKVTLHGDKLGSRKVGL

SEQ ID NO: 56623 - protein, 165 aa, Glycine max
  peptide (1)..(165): Ceres Seq. ID no. 13582372
MKIDNWILLDNYVQGRVLSSGSQARALQLHSKRSKKHMSMKRHKKDGSLDLPQEFQKFDIFKPMHEMWKDYIMLLLKSTGKNQLAQCLLGADLHGAFILVVECKITHFTGICGIMIRETAEAFGIITEDNKFRVVPKKVSVFVFQVDCWKVTLHGDKLGSRKVGL

SEQ ID NO: 56624 - DNA, 983 bp, Glycine max
  misc_feature (1)..(983): Ceres Seq. ID no. 13595495
atctttcattcgtgcctgaagcagcagccattgcccattgctaaccagagtggagtggtagagcagttcgagtttgcttttctctcttgcttgattgatcggtgcctcgatccatcgttcgtcggaggtgcatatagttagcgaggaattctccggccggccaccggcgacgacgaccgcaagtgatccgtgaggatggtgaacacgacggcggctatggtgagcggcggcggcaagggcggcgtgctgccgctggcgtccctgaaccacatcagcatagtgtgcaggtcggtggaggagtcgctcgacttctacatgaacgtcctcgggttcacccccatccgccgccccggctctttcgacttcgacggcgcatggctgttcaactacgggatcggcatccacctgctgcagtcggagcatcccgagagcttaccggcgaagaaggagatcaaccccaaggataaccacatctccttccagtgcgagagcatggtggcggtggagcggcggctcaaggagctgggcatcccgtacatccagcggtgcgtggaggagggcggcatctacgtcgaccagatcttcttccacgaccccgacggcttcatgatcgagatctgcaactgcgacaagctcccggtcgtcccgctcgccggccagaccttcgccatggccgcctgcaagagggtcgcctccgtcaagcaacagcagctgcccatgccagtcgcacaagtagcgcaagcaacccccgctccggcggcggccgcggcttcgcagtgcattccggcgccgaacccggccttgcagcgcgtcggcggcgaggaggcggcgcatatctcgtgcgcgtgaggggtggggggccggggtagccaggccgcccaactggtgggtggcgcgctccgtggagttgtggtttttgtacattgtgatatgacattgtgcgtatgaataaagcgagaggagcagagtgtagtttcagcttc

SEQ ID NO: 56625 - protein, 217 aa, Glycine max
  peptide (1)..(217): Ceres Seq. ID no. 15221592
MVNTTAAMVSGGGKGGVLPLASLNHISIVCRSVEESLDFYMNVLGFTPIRRPGSFDFDGAWLFNYGIGIHLLQSEHPESLPAKKEINPKDNHISFQCESMVAVERRLKELGIPYIQRCVEEGGIYVDQIFFHDPDGFMIEICNCDKLPVVPLAGQTFAMAACKRVASVKQQQLPMPVAQVAQATPAPAAAAASQCIPAPNPALQRVGGEEAAHISCA

SEQ ID NO: 56626 - protein, 210 aa, Glycine max
  peptide (1)..(210): Ceres Seq. ID no. 15221593
MVSGGGKGGVLPLASLNHISIVCRSVEESLDFYMNVLGFTPIRRPGSFDFDGAWLFNYGIGIHLLQSEHPESLPAKKEINPKDNHISFQCESMVAVERRLKELGIPYIQRCVEEGGIYVDQIFFHDPDGFMIEICNCDKLPVVPLAGQTFAMAACKRVASVKQQQLPMPVAQVAQATPAPAAAAASQCIPAPNPALQRVGGEEAAHISCA

SEQ ID NO: 56627 - protein, 177 aa, Glycine max
  peptide (1)..(177): Ceres Seq. ID no. 15221594
MNVLGFTPIRRPGSFDFDGAWLFNYGIGIHLLQSEHPESLPAKKEINPKDNHISFQCESMVAVERRLKELGIPYIQRCVEEGGIYVDQIFFHDPDGFMIEICNCDKLPVVPLAGQTFAMAACKRVASVKQQQLPMPVAQVAQATPAPAAAAASQCIPAPNPALQRVGGEEAAHISCA

SEQ ID NO: 56628 - DNA, 913 bp, Glycine max
  misc_feature (1)..(913): Ceres Seq. ID no. 14302544
ccgtctctgatctcttatcactcactctctctctcccctaactcgccaagcagctacaatggccgttaccttctcagatctacacacagagcagggtgtcaagtccgtggaggagcacctcgccggaaaaacctacatctccggagatcagttgactgtggatgatgtgaaggtatacgctgccatcgtggagaaaccgagcgatgccttccctaatgctagcaagtggtacgattccgtcgcgtcccaccttgctaaaagtttccctggtaaggccgtaggagtttcaatcggtggctctgctgcttctgctcctgctcaagctgaggcacctgcagctgtagctgatgatgatgatgacatggatctgtttggtgacgagaccgaggaggaaaagaaagccgcagaggagagggaggcttctaagaaggacaccaagaagcccaaagagagtggaaagtcatctgtgctcatggaggtcaagccatgggatgacgagactgacatgaagaaacttgaggagtgtgtccgcgctgttgagatgcctggtcttctatggggagcttcaaaactggttccagttggttacgggatcaagaagctcactatcatgctcacaattgttgatgacctcgtgtccccggacaatctcatcgaagactacctcacctgtgagcctaacaacgagtacatccagagtgttgacatcgtcgcattcaacaagatctagagactttaagttgtctccctaccaaaagatacttgatttccttccaagttttgttctttttttttgtgttgttttgcttgagatgtttattttctagtagcaagacctctttcatgttgcagaaaacataaactatcaacgctttactattccttttgccattactaaaaaaaaaaaaaaaac

SEQ ID NO: 56629 - protein, 223 aa, Glycine max
  peptide (1)..(223): Ceres Seq. ID no. 14302545
MAVTFSDLHTEQGVKSVEEHLAGKTYISGDQLTVDDVKVYAAIVEKPSDAFPNASKWYDSVASHLAKSFPGKAVGVSIGGSAASAPAQAEAPAAVADDDDDMDLFGDETEEEKKAAEEREASKKDTKKPKESGKSSVLMEVKPWDDETDMKKLEECVRAVEMPGLLWGASKLVPVGYGIKKLTIMLTIVDDLVSPDNLIEDYLTCEPNNEYIQSVDIVAFNKI

SEQ ID NO: 56630 - protein, 122 aa, Glycine max
  peptide (1)..(122): Ceres Seq. ID no. 14302546
MDLFGDETEEEKKAAEEREASKKDTKKPKESGKSSVLMEVKPWDDETDMKKLEECVRAVEMPGLLWGASKLVPVGYGIKKLTIMLTIVDDLVSPDNLIEDYLTCEPNNEYIQSVDIVAFNKI

SEQ ID NO: 56631 - DNA, 1268 bp, Glycine max
  misc_feature (1)..(1268): Ceres Seq. ID no. 14302757
agaaaagagttgtttcagtttcgagcgcaaacaagaatgaagggagattggttggaattggagttggagaaggaaataggagacgccatttcccgaacccgattcgcgccccactctaacaccctcctcatctcttcttgggactccagtcttcgcctcttcgacgtcgacgcctctctcctcagactccaagctccctcgcaagctcccctcctcgattgctgcttccaggacgacgctgtggccttcgccgccgcctctgatggactaatccgaaggtatgacttgcattcaggacttgttgatacactgggtagtcacgatgatatggcaacatgtattggatattccaatgaaacatgtcagttggtcacatccggatttgacaaaaagttactgttatgggacatgcatatgaagaagacttctttatgtttgagaagtctagatgcagaggtggactccatgtctgtctctggatttaatgttaccgtagccattggagcatcaatgcttgtttatgatttacgttactttgaccaaccagttgagtcaaaagaggcattcaatggaacacacttaagatgtgtcagttcaattccagatgcagaaggattcgcagttgggtctgtagacggacgagtatcactgcagatttccaatccattcagttcaaacgacattagatatatattccggtgtcatccaaaatcaaaggatggacggcattatttggtatcagtgaacgacattgcattcagtccacttgtatctggtgcctttgccactggtgacaatgaaggttatgttaccatatgggatgctggaagtaggagaagactagttgagttgcccaggtatccaaatagtgttgcatccttatcatacaaccacacaggtcagcttctggctgtagcatcaagccatacttaccaagaagcaaaggaaatagaaaaaccacctcgtatattcatccatagagtggacaacattgatattggatcaatttctgctagtaagagaagttgaagcacttatgctatgcttgctgacgaagatttgtgtcatcagagacacaagtggaggcaccggtgaagaaaatagatgctctttaaaaagggatactgggagatcaagaaaaatattggaggaaaatattaaaagagtttgattgataaagtattatcattaagagtttgatttttggcggtgtttaataaaatcatgtactgtatttttatgtataaaaaattaagttatcatttttt

SEQ ID NO: 56632 - protein, 342 aa, Glycine max
  peptide (1)..(342): Ceres Seq. ID no. 14302758
RKELFQFRAQTRMKGDWLELELEKEIGDAISRTRFAPHSNTLLISSWDSSLRLFDVDASLLRLQAPSQAPLLDCCFQDDAVAFAAASDGLIRRYDLHSGLVDTLGSHDDMATCIGYSNETCQLVTSGFDKKLLLWDMHMKKTSLCLRSLDAEVDSMSVSGFNVTVAIGASMLVYDLRYFDQPVESKEAFNGTHLRCVSSIPDAEGFAVGSVDGRVSLQISNPFSSNDIRYIFRCHPKSKDGRHYLVSVNDIAFSPLVSGAFATGDNEGYVTIWDAGSRRRLVELPRYPNSVASLSYNHTGQLLAVASSHTYQEAKEIEKPPRIFIHRVDNIDIGSISASKRS

SEQ ID NO: 56633 - protein, 330 aa, Glycine max
  peptide (1)..(330): Ceres Seq. ID no. 14302759
MKGDWLELELEKEIGDAISRTRFAPHSNTLLISSWDSSLRLFDVDASLLRLQAPSQAPLLDCCFQDDAVAFAAASDGLIRRYDLHSGLVDTLGSHDDMATCIGYSNETCQLVTSGFDKKLLLWDMHMKKTSLCLRSLDAEVDSMSVSGFNVTVAIGASMLVYDLRYFDQPVESKEAFNGTHLRCVSSIPDAEGFAVGSVDGRVSLQISNPFSSNDIRYIFRCHPKSKDGRHYLVSVNDIAFSPLVSGAFATGDNEGYVTIWDAGSRRRLVELPRYPNSVASLSYNHTGQLLAVASSHTYQEAKEIEKPPRIFIHRVDNIDIGSISASKRS

SEQ ID NO: 56634 - protein, 233 aa, Glycine max
  peptide (1)..(233): Ceres Seq. ID no. 14302760
MATCIGYSNETCQLVTSGFDKKLLLWDMHMKKTSLCLRSLDAEVDSMSVSGFNVTVAIGASMLVYDLRYFDQPVESKEAFNGTHLRCVSSIPDAEGFAVGSVDGRVSLQISNPFSSNDIRYIFRCHPKSKDGRHYLVSVNDIAFSPLVSGAFATGDNEGYVTIWDAGSRRRLVELPRYPNSVASLSYNHTGQLLAVASSHTYQEAKEIEKPPRIFIHRVDNIDIGSISASKRS

SEQ ID NO: 56635 - DNA, 1719 bp, Glycine max
  misc_feature (1)..(1719): Ceres Seq. ID no. 14311219
acaaaacacaactcgtcacatcacatcacatcacatctattttcattacttcatcattttcactgcaattttcacaccacacacacaccacaatcatggaagttgatagtaggtttctgaacactggcctcctccttgtggccacaatccttgtggtcaagctcatctcagccttcatagtgcccaaatccagaaagagggtacccccaattgtgaaggggtggcccttaattggaggactcatccgtttcctcaaaggtccaatctttatgctccgtgacgagtaccctaagcttggaagtgtcttcactctcaaactcttccacaagaacatcaccttcctcattggccctgaggtttctgcacacttcttcaaggcctcagagactgatctcagccagcaagaggtgtatcagttcaatgtgccaacttttggacctggggtggtctttgatgttgattactctgtgaggcaagaacagttcaggttcttcactgaggctcttagggccaacaagctcaagggttatgtcaatcagatggttgcagaagctgaggactatttctcaaagtggggaccaagtggtgaggttgatttgaagtatgagcttgagcatctgatcatcttgacagccagtagatgtctcttggggcgtgaagttcgtgacaagctctttgatgatgtctctgcattgttccacgaccttgataatgggatgcttccaatcagtgttctcttcccatacctgccaatcccagctcacaagcgccgtgaccaggcacgcaagaagcttgctgaaatctttgcaagcatcataacatctcgcaaaagtgcaagcaaatcagaagaagacatgctgcagtgcttcattgactcaaaatacaaagatggtcgctcaacaacagaagctgaagtgactgggcttctcattgctgcactttttgccggtcaacacacaagctcgattacctccacttggactggggcatatctgctgtctaacaaccagtacctttcagctgtgcaggaggagcagaagatgttgatagaaaagcatggggacagagttgatcatgatgttttggctgaaatggatgtgctgtataggtgcatcaaagaagctttgagactccatcctcctctaatcatgctgatgagaagctcacacactgattttagtgtcacaacacgagaggggaaagagtatgacattcccaagggtcatataattgccacatcacctgcttttgcaaacaggctaggtcatgttttcaaagaccctgataggtatgatcccgatcgatttgctgtggggagggaagaggacaaggtggcaggtgcattctcatacatttcatttggagggggcagacatggatgccttggggagccatttgcatatctgcagataaaagcaatatggactcatctgcttaggaattttgagctggagttggtgtcaccttttccagagatcgattggaatgccatggttgtgggagtgaaggggaaagtgatggtccgatataagcggaaggagctttcagttaatcaataggaccacataattcagtgtctggcatgattttattttaagcagttattgttagtcttttctggttcagcttctgtcaaagttcgttgtttatttggcaatgaatatctagaatcttgattttgatttttttttcttctaattctattaagtgattttaact

SEQ ID NO: 56636 - protein, 518 aa, Glycine max
  peptide (1)..(518): Ceres Seq. ID no. 14311220
KTQLVTSHHITSIFITSSFSLQFSHHTHTTIMEVDSRFLNTGLLLVATILVVKLISAFIVPKSRKRVPPIVKGWPLIGGLIRFLKGPIFMLRDEYPKLGSVFTLKLFHKNITFLIGPEVSAHFFKASETDLSQQEVYQFNVPTFGPGVVFDVDYSVRQEQFRFFTEALRANKLKGYVNQMVAEAEDYFSKWGPSGEVDLKYELEHLIILTASRCLLGREVRDKLFDDVSALFHDLDNGMLPISVLFPYLPIPAHKRRDQARKKLAEIFASIITSRKSASKSEEDMLQCFIDSKYKDGRSTTEAEVTGLLIAALFAGQHTSSITSTWTGAYLLSNNQYLSAVQEEQKMLIEKHGDRVDHDVLAEMDVLYRCIKEALRLHPPLIMLMRSSHTDFSVTTREGKEYDIPKGHIIATSPAFANRLGHVFKDPDRYDPDRFAVGREEDKVAGAFSYISFGGGRHGCLGEPFAYLQIKAIWTHLLRNFELELVSPFPEIDWNAMVVGVKGKVMVRYKRKELSVNQ

SEQ ID NO: 56637 - protein, 487 aa, Glycine max
  peptide (1)..(487): Ceres Seq. ID no. 14311221
MEVDSRFLNTGLLLVATILVVKLISAFIVPKSRKRVPPIVKGWPLIGGLIRFLKGPIFMLRDEYPKLGSVFTLKLFHKNITFLIGPEVSAHFFKASETDLSQQEVYQFNVPTFGPGVVFDVDYSVRQEQFRFFTEALRANKLKGYVNQMVAEAEDYFSKWGPSGEVDLKYELEHLIILTASRCLLGREVRDKLFDDVSALFHDLDNGMLPISVLFPYLPIPAHKRRDQARKKLAEIFASIITSRKSASKSEEDMLQCFIDSKYKDGRSTTEAEVTGLLIAALFAGQHTSSITSTWTGAYLLSNNQYLSAVQEEQKMLIEKHGDRVDHDVLAEMDVLYRCIKEALRLHPPLIMLMRSSHTDFSVTTREGKEYDIPKGHIIATSPAFANRLGHVFKDPDRYDPDRFAVGREEDKVAGAFSYISFGGGRHGCLGEPFAYLQIKAIWTHLLRNFELELVSPFPEIDWNAMVVGVKGKVMVRYKRKELSVNQ

SEQ ID NO: 56638 - protein, 429 aa, Glycine max
  peptide (1)..(429): Ceres Seq. ID no. 14311222
MLRDEYPKLGSVFTLKLFHKNITFLIGPEVSAHFFKASETDLSQQEVYQFNVPTFGPGVVFDVDYSVRQEQFRFFTEALRANKLKGYVNQMVAEAEDYFSKWGPSGEVDLKYELEHLIILTASRCLLGREVRDKLFDDVSALFHDLDNGMLPISVLFPYLPIPAHKRRDQARKKLAEIFASIITSRKSASKSEEDMLQCFIDSKYKDGRSTTEAEVTGLLIAALFAGQHTSSITSTWTGAYLLSNNQYLSAVQEEQKMLIEKHGDRVDHDVLAEMDVLYRCIKEALRLHPPLIMLMRSSHTDFSVTTREGKEYDIPKGHIIATSPAFANRLGHVFKDPDRYDPDRFAVGREEDKVAGAFSYISFGGGRHGCLGEPFAYLQIKAIWTHLLRNFELELVSPFPEIDWNAMVVGVKGKVMVRYKRKELSVNQ

SEQ ID NO: 56639 - DNA, 736 bp, Glycine max
  misc_feature (1)..(736): Ceres Seq. ID no. 13582048
gagatgacgatgtcgtcgccggcctccacccacctcctccgctccgcgcccgcggcgcccctgctccctcgccgcgcctccctgcagctctcctgcgtcgccagcggagccgcgccaaggagtaggagacggagcggccgcctggaggtagtccgcgcggccaccgcggaggtggccgaggccgccggcgcccccgcctacaccaccgagtccctcatcctctacttcaaggcggagggcaccatggaggagaggtctatccccaagatcacccaggctctcgaggggatggacggcgtcagtgacctggaggtgctcatcgaagaaggcatcggaagtgttgtgttaacgaaggcgacaacagtccaagctactggggtcgcctcaaacctggtggaagccatccagggagttggtttcaagctgcaaactctgagcctcagcttcgaggactttgacaaggaggatgctgctgctgtttcgggagaaggagcagacgtccaagccagcgagtgagcttcacagcgtcgtgcctgcgctgagtgcacacgatgtgctctggtcgttggggttcaatatttcttcggacgtttttctttagttgtcatacactcgctcttagcaatttttcaagctgcacgttttaccttctggcatgactacgtaccctatgtgggcttttagaaatgctgcatcttcccattaaaaatagagaagaaaaagaaattctgcgtct

SEQ ID NO: 56640 - protein, 171 aa, Glycine max
  peptide (1)..(171): Ceres Seq. ID no. 13582049
EMTMSSPASTHLLRSAPAAPLLPRRASLQLSCVASGAAPRSRRRSGRLEVVRAATAEVAEAAGAPAYTTESLILYFKAEGTMEERSIPKITQALEGMDGVSDLEVLIEEGIGSVVLTKATTVQATGVASNLVEAIQGVGFKLQTLSLSFEDFDKEDAAAVSGEGADVQASE

SEQ ID NO: 56641 - protein, 170 aa, Glycine max
  peptide (1)..(170): Ceres Seq. ID no. 13582050
MTMSSPASTHLLRSAPAAPLLPRRASLQLSCVASGAAPRSRRRSGRLEVVRAATAEVAEAAGAPAYTTESLILYFKAEGTMEERSIPKITQALEGMDGVSDLEVLIEEGIGSVVLTKATTVQATGVASNLVEAIQGVGFKLQTLSLSFEDFDKEDAAAVSGEGADVQASE

SEQ ID NO: 56642 - protein, 168 aa, Glycine max
  peptide (1)..(168): Ceres Seq. ID no. 13582051
MSSPASTHLLRSAPAAPLLPRRASLQLSCVASGAAPRSRRRSGRLEVVRAATAEVAEAAGAPAYTTESLILYFKAEGTMEERSIPKITQALEGMDGVSDLEVLIEEGIGSVVLTKATTVQATGVASNLVEAIQGVGFKLQTLSLSFEDFDKEDAAAVSGEGADVQASE

SEQ ID NO: 56643 - DNA, 1276 bp, Glycine max
  misc_feature (1)..(1276): Ceres Seq. ID no. 13595503
acctagaacatcccaatcaaaaaatcaaagccctgctgaatggcgccaccggcaccacccaagtcaagtcagggtcaggtgatgaataatgcaaggattcacttcttttccattctcctcgctctccaatacggtgctcaacctttgatctccaaacgcttcatcagacgtgaagttattgtgacttcatctgttttgacttgtgagcttgcaaaggttatatgtgcagtgttttttatggcaaaagatggtagtctgaggaaattgtataaagagtggactttggttggtgcgttgactgcatcaggacttcctgcagctatatatgcattgcaaaatagtttgctgcaaatttcttacaagaatcttgattcactcacattctcaatgctgaatcagaccaaaatatttttcaccgcgctctttgcatatttcatattgaggcaaaaacaatcgattgagcaaattggagccttgttcttgttaatagttgcggcagttcttttaagtgttggcgaaggctctaccaaaggttctgctattggcaatgctgatcaaattttattttatggaattattcctgtattagttgcttcagtgctctctggattggcttcatccttgtgtcaatgggcctctcaggttaagaaacactcatcatacttgatgactatagaaatgtctattgttggaagtctatgtttgcttgccagtactttgaaatctccagatggggaagctatgagacaacatgggtttttctatggttggactcctcttactttgatcccagtaattttcaatgcccttggaggaattcttgtcggtttagttacaagccatgctggtggtgttcggaaggggtttgtcattgtttctgctttactcattacagcattgctacagtttattttcgatggaaagacaccttcattgtattgccttttggctcttccactagtggtcactagcatttcaatataccagaaatacccctaccaggttaagaagaaggagtcatagaatctgaccatggggaatttatttcattagttccccccgaaactactttgtttttttatccagaatatatagcatattgtaaatgatagaacatagaaggcaagcattcttcttgatgtcttctggatctcaatagaattaggatgttatacagagctatttttttttttttgaatattctggaatctttaaatgatcaattatttgtctcctaaaaaaaaaaaaaaaaaagcttatcgataccgtcgacctc

SEQ ID NO: 56644 - protein, 327 aa, Glycine max
  peptide (1)..(327): Ceres Seq. ID no. 13595504
MAPPAPPKSSQGQVMNNARIHFFSILLALQYGAQPLISKRFIRREVIVTSSVLTCELAKVICAVFFMAKDGSLRKLYKEWTLVGALTASGLPAAIYALQNSLLQISYKNLDSLTFSMLNQTKIFFTALFAYFILRQKQSIEQIGALFLLIVAAVLLSVGEGSTKGSAIGNADQILFYGIIPVLVASVLSGLASSLCQWASQVKKHSSYLMTIEMSIVGSLCLLASTLKSPDGEAMRQHGFFYGWTPLTLIPVIFNALGGILVGLVTSHAGGVRKGFVIVSALLITALLQFIFDGKTPSLYCLLALPLVVTSISIYQKYPYQVKKKES

SEQ ID NO: 56645 - protein, 313 aa, Glycine max
  peptide (1)..(313): Ceres Seq. ID no. 13595505
MNNARIHFFSILLALQYGAQPLISKRFIRREVIVTSSVLTCELAKVICAVFFMAKDGSLRKLYKEWTLVGALTASGLPAAIYALQNSLLQISYKNLDSLTFSMLNQTKIFFTALFAYFILRQKQSIEQIGALFLLIVAAVLLSVGEGSTKGSAIGNADQILFYGIIPVLVASVLSGLASSLCQWASQVKKHSSYLMTIEMSIVGSLCLLASTLKSPDGEAMRQHGFFYGWTPLTLIPVIFNALGGILVGLVTSHAGGVRKGFVIVSALLITALLQFIFDGKTPSLYCLLALPLVVTSISIYQKYPYQVKKKES

SEQ ID NO: 56646 - protein, 261 aa, Glycine max
  peptide (1)..(261): Ceres Seq. ID no. 13595506
MAKDGSLRKLYKEWTLVGALTASGLPAAIYALQNSLLQISYKNLDSLTFSMLNQTKIFFTALFAYFILRQKQSIEQIGALFLLIVAAVLLSVGEGSTKGSAIGNADQILFYGIIPVLVASVLSGLASSLCQWASQVKKHSSYLMTIEMSIVGSLCLLASTLKSPDGEAMRQHGFFYGWTPLTLIPVIFNALGGILVGLVTSHAGGVRKGFVIVSALLITALLQFIFDGKTPSLYCLLALPLVVTSISIYQKYPYQVKKKES

SEQ ID NO: 56647 - DNA, 1262 bp, Glycine max
  misc_feature (1)..(1262): Ceres Seq. ID no. 13595840
atatttatttctcctgctgcgacgactggtacatgatcagcagttcccccattttaagttagattattatcacacctcgtgaacacagattgcagttggtgcggaggatcgatctcgccatgaatttcaattgcactgctaacaaggagcaaaagaaaaccgtagaccaatctatcttattgtgctgcaagttctttgtctctgaatcacgcaacaatgccactctcaatgcaatagaacgagctgcaaggtcaaacccagaaactgtgattgtgaacatgtttcatgatcgagcttataacagggcaaggtacgaccttgtgtcgtatgttttgcatgactgcacaggaaatcccatatacagccccttgcatcaaactgtcatagccatggctgaggctacattcaatgccgtcaaccttgaattccatgaaggtgctcaccctcgcttgggcgcagtggacgacattgttttccatccacttggtcatgcgtcgctcgacgaggcagcgtggctcgccaaagcagtggcagcagacattggcaaccgattcagtgtgccagtgtttctgtacgctgcagcccacccaacagggaaggaacttgacgccataaggcgagagcttggatattacaggccaaattctaggggcagccaatgggccgggtgggcaatgcccgaaacgcttcctctaagcccagatgaagggcctaacgtcgtttcaagagctaaaggcatcacaatgattggtgcacgcccttgggtcacactctacaacgttccaattttgtgcactgatgtgtcagtagcaagaaggattgcaaggaaggtgagtgctcgtggcggtggcctccccactgtgcaaacgattgcgcttgtccatgaggactcaactgagatagcctgcatgcttttggactccaagcaggttggagcggatagggttcaaaatagggttgagatgctggccgcacaagagggactggacatagaacaaggttatttcactgacatttctccagaaatgatcgtagagaaatacatgaaattaatcaatagtgctaacaaatcgtgatcatgcatgtgtgtaactcattgaacttgttgatgagtaatcataaatgatcgaaggctgtaattttcagtaagtgtaaaacaaaggttatgaattgtgattccaaaatggttggctgggataacaaactaagggtaacaaatatatctatctgtatttatatatcaaaataataacctttcgccc

SEQ ID NO: 56648 - protein, 318 aa, Glycine max
  peptide (1)..(318): Ceres Seq. ID no. 13595841
MNFNCTANKEQKKTVDQSILLCCKFFVSESRNNATLNAIERAARSNPETVIVNMFHDRAYNRARYDLVSYVLHDCTGNPIYSPLHQTVIAMAEATFNAVNLEFHEGAHPRLGAVDDIVFHPLGHASLDEAAWLAKAVAADIGNRFSVPVFLYAAAHPTGKELDAIRRELGYYRPNSRGSQWAGWAMPETLPLSPDEGPNVVSRAKGITMIGARPWVTLYNVPILCTDVSVARRIARKVSARGGGLPTVQTIALVHEDSTEIACMLLDSKQVGADRVQNRVEMLAAQEGLDIEQGYFTDISPEMIVEKYMKLINSANKS

SEQ ID NO: 56649 - protein, 265 aa, Glycine max
  peptide (1)..(265): Ceres Seq. ID no. 13595842
MFHDRAYNRARYDLVSYVLHDCTGNPIYSPLHQTVIAMAEATFNAVNLEFHEGAHPRLGAVDDIVFHPLGHASLDEAAWLAKAVAADIGNRFSVPVFLYAAAHPTGKELDAIRRELGYYRPNSRGSQWAGWAMPETLPLSPDEGPNVVSRAKGITMIGARPWVTLYNVPILCTDVSVARRIARKVSARGGGLPTVQTIALVHEDSTEIACMLLDSKQVGADRVQNRVEMLAAQEGLDIEQGYFTDISPEMIVEKYMKLINSANKS

SEQ ID NO: 56650 - protein, 228 aa, Glycine max
  peptide (1)..(228): Ceres Seq. ID no. 13595843
MAEATFNAVNLEFHEGAHPRLGAVDDIVFHPLGHASLDEAAWLAKAVAADIGNRFSVPVFLYAAAHPTGKELDAIRRELGYYRPNSRGSQWAGWAMPETLPLSPDEGPNVVSRAKGITMIGARPWVTLYNVPILCTDVSVARRIARKVSARGGGLPTVQTIALVHEDSTEIACMLLDSKQVGADRVQNRVEMLAAQEGLDIEQGYFTDISPEMIVEKYMKLINSANKS

SEQ ID NO: 56651 - DNA, 1236 bp, Glycine max
  misc_feature (1)..(1236): Ceres Seq. ID no. 13595507
gcggtctcggttttctgcaattggctggcggcctggcgctccaccccgtgcgtccttcagtccttctatccaaaagcgacggagagactcccggcggcgagcaggttgtcctgttgttctatccgattgtgcactgctggttgtcctgctctccagctgactgcagtggtgttcttctcgcagtttgaagatggatctcaaggatagcctctccagatttaagcagcagcaggagaggtgccagtcatctttggccagcatagctgcaagccaagcttcaaccacaaaaccaaagcacagggcccaaccgattaatgctccatctgctccagcaaggcctgcacaacctattaaattttcaaacgatacagaaaggctgcaagacattaattcgattaggaaatctcctgttggggcacagatcaaacttgtcattgaattgctttacaagacaagacaagcttttacggcagagcaaataaatgatgcaacttacgttgatatcaatggtaataaggctgtctttgacagtctgaggaataacctcaaagtacactatgatgggagacgtttctcgtacaagtccaagcatgatctggaggggaaagatcaactacttgatttgataaggtgtcaccaggagggtcttgctgttgtggaagtgaaggatgcatacccaagtgtattggaagatttgcaggctctgaaggcagcaggtgaagtttggctgttgtcaaacatggattcacaggaggacattgtttaccctaatgatccaaaagtgaagatcaaggttgatgatgacctgaaggagctcttccgtgggattgagttaccgcgtgatatggttgatatcgaaaaggagctccagaagaacggcatgaagccgatgaccgacaccacgaaacgacgagcagcagcccagatccatggcgtgaaaccaaaggctaagcctaagaagaagcaacgcgagataactaaacggaccaagctcacgaatgcccatctgcctgagctgttccaacatcttaaatcttgattgtgccgttatcagcaactccgatgtatttcgtttcatcctacctctagttaatgtcatcgattatatgtgcctgcaaccctagtttgtggttatgtgagctccaagatcttgatctgagagccctgttgtatgtagcataatctgacttggaagagtttgagattgttttttatcataatcctctcaaacctgcc

SEQ ID NO: 56652 - protein, 282 aa, Glycine max
  peptide (1)..(282): Ceres Seq. ID no. 13595508
MDLKDSLSRFKQQQERCQSSLASIAASQASTTKPKHRAQPINAPSAPARPAQPIKFSNDTERLQDINSIRKSPVGAQIKLVIELLYKTRQAFTAEQINDATYVDINGNKAVFDSLRNNLKVHYDGRRFSYKSKHDLEGKDQLLDLIRCHQEGLAVVEVKDAYPSVLEDLQALKAAGEVWLLSNMDSQEDIVYPNDPKVKIKVDDDLKELFRGIELPRDMVDIEKELQKNGMKPMTDTTKRRAAAQIHGVKPKAKPKKKQREITKRTKLTNAHLPELFQHLKS

SEQ ID NO: 56653 - DNA, 990 bp, Glycine max
  misc_feature (1)..(990): Ceres Seq. ID no. 14301994
gcacagcttgttccttaattaaagcaaaaaaaaaatcacaatggttaaaacctctctccctctcaccgctttcttcttcctcctcctcatctcctcctccttagccgcagacaccggccggctctttctcaccgtcgtcaaccactgtcccttcaccgtctggccagccattcagcccaacgccggccaccccgtcctcgagaaaggtggcttcgctctcccaaccaacacccaccgctctttctccccaccaaccacccactggtccggtcgtatctggggtcgaaccggctgctcccactacaacggcaaattctcttgcgtcaccggagactgcggaaaccgtctcgagtgcaacggtctcggtggcgcaactccggcttctctcgctcagttcgacctccaccacggtggacacagagacttatcctcctacggtgtctctctagtcgacggtttcaacgttccgatgacagttactcctcacgaaggccgtggagtttgtcccgttgttggttgtcgcgaagacctcttgagaacgtgcccggctcatcttcagctccggtcgggacacggtggacacgtggtggcctgtaagagtgggtgtgaggcgttccgcacggatgagttgtgctgtaggaaccattacaatagtcctcaaacatgtcgtgcttcgagccattcgctgttctttaagcacgcgtgtccttcgactatgacgttcgctcatgatagtccatcgcttatgcatgattgttcttctcctagagagctcaaagtcatcttctgccactaatgtgtctctcttgttcggtttattctgtatggttgtactagtgatatcgcactaatctcttatctttctggtttgattggtttagtttgtgatttcccgcgtcagttatgttgttgttcaaaaactatgtagtccaactatgcgattatgtattattatcttttgaattgattctgcttagttatcttcttcat

SEQ ID NO: 56654 - protein, 251 aa, Glycine max
  peptide (1)..(251): Ceres Seq. ID no. 14301995
MVKTSLPLTAFFFLLLISSSLAADTGRLFLTVVNHCPFTVWPAIQPNAGHPVLEKGGFALPTNTHRSFSPPTTHWSGRIWGRTGCSHYNGKFSCVTGDCGNRLECNGLGGATPASLAQFDLHHGGHRDLSSYGVSLVDGFNVPMTVTPHEGRGVCPVVGCREDLLRTCPAHLQLRSGHGGHVVACKSGCEAFRTDELCCRNHYNSPQTCRASSHSLFFKHACPSTMTFAHDSPSLMHDCSSPRELKVIFCH

SEQ ID NO: 56655 - DNA, 832 bp, Glycine max
  misc_feature (1)..(832): Ceres Seq. ID no. 13595127
acctagaacatcctaatcgaaaaagcagcgtggtaggcgccgcaactcgaccaaaccacacgaaggggaaacccaaattccctcccaacttctctacctctccggcctccacccaggagagccctaagccggaagcgccttacccttaagctctcttgacctctccccatggcgtccgcgtggtgcctcttggcgccggccgccaccggcgcggcgccgggcgctctcggcgtctccgcctccgaatccagaggcgtcttcgccgcgcgggcggcggtccctgagaggacgcggcgcaggtgggactcgctcgtggtgtgcgtggcccccgacgaggagaagattacgcggcgctcgcccctcgatttccccatcgaatgggagaaacctaagcctgggaggagacctgacatcttcccaaagttcagccctatgaaaacaccattgccccatccattaccagctgatgatcctctggatgatgatgaggaagaagaagaggaagaagcacaacctcaagaagaaccacaggaggatgatcctgacaaggaggatcctgaggaagatgacccagacaagccaactgagtaattttggatgaggtggcctgtggtagatagaagccgtgtcgtatcttccagagaatatgtggcgtctgagctattcagaaatgttagttgtgtcggattatataggctctagacataagtttgctcagcagggacctttgagcttttctgaagctatacaaattttgttccactagtttcaatttgaatttatatgtattcttctgaaaggtatttgcctatacgacacaataagctgttgc

SEQ ID NO: 56656 - protein, 140 aa, Glycine max
  peptide (1)..(140): Ceres Seq. ID no. 15221491
MASAWCLLAPAATGAAPGALGVSASESRGVFAARAAVPERTRRRWDSLVVCVAPDEEKITRRSPLDFPIEWEKPKPGRRPDIFPKFSPMKTPLPHPLPADDPLDDDEEEEEEEAQPQEEPQEDDPDKEDPEEDDPDKPTE

SEQ ID NO: 56657 - DNA, 659 bp, Glycine max
  misc_feature (1)..(659): Ceres Seq. ID no. 14301996
tcaaattctcttctgggtttcctaaattctcaacctttttctccaaattcggcttcttaaaatcatggttcgctgtagcaacaacctcgttggcatactcaacttcatcgtcttcctcctctctatccccatcttagctggaggaatctggcttagccaaaacgaaagtggaatccctaacctctacagcctccactcttggattggtattggtgtcatttctctttatggcttccaggtaaaccttagaagtgggttgcttccgtggcacgcaatcctaggcctatttgtttatatactcgcggttgggaacgcagctttagggtttctggagaagctgactttcctggagagtggtgctaagctcgacaagtacgggccagaagcgtttcttgtgaacttcacagccattgtcaccattctctttggtgccttggtggtactcactgcttctgctaagtctccctcctccattgacgatgctgataactacagctattctgctatatgaaaacgctttatacatttcttcagttcctcgcatatctttgctgctacttgtgctgtcaaaagattatataattatatgatgtatttgtagtgaaaacactttgtgtttgtgattccgctgattatgagtttgattacttctggtgtgc

SEQ ID NO: 56658 - protein, 148 aa, Glycine max
  peptide (1)..(148): Ceres Seq. ID no. 14301997
MVRCSNNLVGILNFIVFLLSIPILAGGIWLSQNESGIPNLYSLHSWIGIGVISLYGFQVNLRSGLLPWHAILGLFVYILAVGNAALGFLEKLTFLESGAKLDKYGPEAFLVNFTAIVTILFGALVVLTASAKSPSSIDDADNYSYSAI

SEQ ID NO: 56659 - DNA, 816 bp, Glycine max
  misc_feature (1)..(816): Ceres Seq. ID no. 13595433
ttttttcttcggttcggggttttagcagtgaagtagcgaaaatggcgtctacatcgtgttttgatccttatcaacttgagcgagttgcagatattttcacaggccaagatctaagatccgagttacaaagcaaaatggcgatggtttcaggaagacgttctacgctaaaccccaacgcgcctctctttgtcccagcagccgttagacaagtggaagatttctctccggagtggtggcagttggtgacgacctccacttggtaccacgactactggatcagccagcaccaaggagctgacggattctacgacaacggagagagtggtgaagtcgatgtagctgatcttcttccagagtcgtttgatttcgatgatattgaagatgtcttcgaggccgagtttgatcatcaaggttacggtggatatgttggacaacagatgtatcatgcaccttctgactttggtttagggaagaatggtgagatggtgaggaaatcgagtgggaacaggagtcctaggtcgattgttgaaccggcgaagtatgcagagaagccagcgaaatgggggaaccagaaggttgctccacgaaacattcaccagcctcgttgaagtgcaaagttaactaggcagagtatgttgtatctttagccacttgtacctttgtaatttttagtattttctgctttccacaagagagaacctgtaacttctttgtacctttatgatgttcagtctcaaacttgttatctcaaaaaaaaatgtaaaaacataaaaaaattgtaaaatttgaagagtaatgagaaatagagtttcacat

SEQ ID NO: 56660 - protein, 201 aa, Glycine max
  peptide (1)..(201): Ceres Seq. ID no. 13595434
FSSVRGFSSEVAKMASTSCFDPYQLERVADIFTGQDLRSELQSKMAMVSGRRSTLNPNAPLFVPAAVRQVEDFSPEWWQLVTTSTWYHDYWISQHQGADGFYDNGESGEVDVADLLPESFDFDDIEDVFEAEFDHQGYGGYVGQQMYHAPSDFGLGKNGEMVRKSSGNRSPRSIVEPAKYAEKPAKWGNQKVAPRNIHQPR

SEQ ID NO: 56661 - protein, 188 aa, Glycine max
  peptide (1)..(188): Ceres Seq. ID no. 13595435
MASTSCFDPYQLERVADIFTGQDLRSELQSKMAMVSGRRSTLNPNAPLFVPAAVRQVEDFSPEWWQLVTTSTWYHDYWISQHQGADGFYDNGESGEVDVADLLPESFDFDDIEDVFEAEFDHQGYGGYVGQQMYHAPSDFGLGKNGEMVRKSSGNRSPRSIVEPAKYAEKPAKWGNQKVAPRNIHQPR

SEQ ID NO: 56662 - protein, 157 aa, Glycine max
  peptide (1)..(157): Ceres Seq. ID no. 13595436
MAMVSGRRSTLNPNAPLFVPAAVRQVEDFSPEWWQLVTTSTWYHDYWISQHQGADGFYDNGESGEVDVADLLPESFDFDDIEDVFEAEFDHQGYGGYVGQQMYHAPSDFGLGKNGEMVRKSSGNRSPRSIVEPAKYAEKPAKWGNQKVAPRNIHQPR

SEQ ID NO: 56663 - DNA, 1460 bp, Glycine max
  misc_feature (1)..(1460): Ceres Seq. ID no. 13595513
aatttatagatcgagcgagttcaacaccttattaatttgttttgtttctttcttttgatttccttagagggagggaaagagtgacacaaacaaagcaatgaaggagaagaagagaggtttcaaagaatggttcacatcatcccaagttctattgggtatgatactagtacaaatttttcttactgggttgcagttactatcaaggatcatattggttcgtggctttttcatcttttccctcattgtatatcgtcaccttgttgctgctatttgtgttgccccctttgcattctactttgaaagaggccgcacaaagaaatatactttgaaagtttggttttggctctttgttaacgcattgacagggatggttctggctcaaggattattctattatggtttgagagatacttctgccacttactctgtcaattttctcaacttggttcctatatccaccttctttacctctatcatatttagatgggagaaattgggtctgcacacttgggcgggtagagctaagtgtggaggggcaattttgtgtgttgggggagcattagctagtctttacaaagggaaggaattttatcttggtcatcatagtcatcatgttcaaattgttgttgcggcacacaaaactcacatgcttcggggcactttccttttgatttgcagttgcttctcatacacaacatggtttattgttcaagtccaattgcttaaagtatttccactaaggtatacaggaacaatgctagcatgcattttggcagcaattcaaggaggaataataggtatttgcatagattccagaaaagctgcttggagattagagtggaatttacaattggtcactatattgtactcgggagcactagctacagctgctacattcagcctactatcttgggtaattacaatcaaaggaccaagttatcccccaatgttcaatcccctaggtcttatttttgtggccttttcagaagctatcatacttggcgaaccattaaccgttggaatgttgctaggcatgattttgatcatggtaggattatacttctttttgtggggcaaaaacaatgagactaaacgcatggttcaacaaccaattgtatcaattgcagaagtatcaaacgtgactgatttgtctactggggcagaatcagtggccacaatagtgccaaattcttcacctacaaattcagtaattctagaacttgaaaagtctgacaaaaactaaaaaaaataaataatcctttgaatgtatgagagctaaagttcaaggcagagattagaaaagtgcaatattttttaaccatagtatgtgaaaggtacaacacaatgtttaaatttaaaggattgtgttgtaaaattgatagttagctttggccttcatcacaaagtggataaaatagactaaaatgcttgacatataaattaccctactaaaatgctcg

SEQ ID NO: 56664 - protein, 381 aa, Glycine max
  peptide (1)..(381): Ceres Seq. ID no. 13595514
MKEKKRGFKEWFTSSQVLLGMILVQIFLTGLQLLSRIILVRGFFIFSLIVYRHLVAAICVAPFAFYFERGRTKKYTLKVWFWLFVNALTGMVLAQGLFYYGLRDTSATYSVNFLNLVPISTFFTSIIFRWEKLGLHTWAGRAKCGGAILCVGGALASLYKGKEFYLGHHSHHVQIVVAAHKTHMLRGTFLLICSCFSYTTWFIVQVQLLKVFPLRYTGTMLACILAAIQGGIIGICIDSRKAAWRLEWNLQLVTILYSGALATAATFSLLSWVITIKGPSYPPMFNPLGLIFVAFSEAIILGEPLTVGMLLGMILIMVGLYFFLWGKNNETKRMVQQPIVSIAEVSNVTDLSTGAESVATIVPNSSPTNSVILELEKSDKN

SEQ ID NO: 56665 - protein, 361 aa, Glycine max
  peptide (1)..(361): Ceres Seq. ID no. 13595515
MILVQIFLTGLQLLSRIILVRGFFIFSLIVYRHLVAAICVAPFAFYFERGRTKKYTLKVWFWLFVNALTGMVLAQGLFYYGLRDTSATYSVNFLNLVPISTFFTSIIFRWEKLGLHTWAGRAKCGGAILCVGGALASLYKGKEFYLGHHSHHVQIVVAAHKTHMLRGTFLLICSCFSYTTWFIVQVQLLKVFPLRYTGTMLACILAAIQGGIIGICIDSRKAAWRLEWNLQLVTILYSGALATAATFSLLSWVITIKGPSYPPMFNPLGLIFVAFSEAIILGEPLTVGMLLGMILIMVGLYFFLWGKNNETKRMVQQPIVSIAEVSNVTDLSTGAESVATIVPNSSPTNSVILELEKSDKN

SEQ ID NO: 56666 - protein, 291 aa, Glycine max
  peptide (1)..(291): Ceres Seq. ID no. 13595516
MVLAQGLFYYGLRDTSATYSVNFLNLVPISTFFTSIIFRWEKLGLHTWAGRAKCGGAILCVGGALASLYKGKEFYLGHHSHHVQIVVAAHKTHMLRGTFLLICSCFSYTTWFIVQVQLLKVFPLRYTGTMLACILAAIQGGIIGICIDSRKAAWRLEWNLQLVTILYSGALATAATFSLLSWVITIKGPSYPPMFNPLGLIFVAFSEAIILGEPLTVGMLLGMILIMVGLYFFLWGKNNETKRMVQQPIVSIAEVSNVTDLSTGAESVATIVPNSSPTNSVILELEKSDKN

SEQ ID NO: 56667 - DNA, 1479 bp, Glycine max
  misc_feature (1)..(1479): Ceres Seq. ID no. 13582321
aattactagttctttctggctctgccgctgtctgtttgcgaacgccattacgttatacttgcatctaaacagcatttcacaggtgacgatactgattgagaggtagaaatgcctggtttcagcagtgtaggaaccttcaagatatttgtcgggaacttggcagaaaaaacagtatctgctgatattagacccttattcgagaaatatggaaaagttatcgaatgtgatgtggttaaggattttggatttgtgcatatggaaaatgaagagtcaggcagagacgccattcaaaatctaaatggttatctggtccatggatcagcaatgaaagtggaagctgccaccagtaggaaggggccgaacacacccacaacgaaaattttcgtgggcaacctctcagataacacaagagcacctcaagttcgctcactctttactaaatacggcacagttgtggaatgtgacattgtcagaaactatggatttgtgcacattgattgtccagacgtaaacaaaatggtagaggaactgaatggtcaagtggttgatggacagccaatgaaagtacaaatatcaacaagcaaagttcgccaaaggcctggaatgggcaatccagaacaatgctacagaatgggcccagatcgtttccgtggaagaatgggctttggaagagacccttacccacccccaccaccacccccattcctgagagacaggatgcttagtggaggatttggcggaaaggacagttactacgaccgctattatgacaggccagctgcacgatttgatgaccgggactcatttgataggaggttgccccctcttcctccacgagacttaggaccacgcagagattttatgcctccccctcccatcccaccccgtgagccactccctccccttggtcttaggggcccaccctcctccctgagagactcctttgaacgttccatgtatagccgtcggtcaccaccaccgccttctgccagatatggccgcctctatgatgactattccagggactcatatgatgatcgcagaattggcctgcgaggggcgtcaccgcgccggttcacgccgtattaattactcgctcgggtaatgattggtgagcgagcggtaacggagcggtacgtatcaacagccgacgaccgttccatatgttgacgattacatcttattttatttaagaacctttattgatgtcacactgttggtgactgtcatcacgccatttaatttgtttactatagataatatgtataatgtagttgacgtacattaagtcaaatccgtgcggcttacaatgcattaaaagtcgtgctcggataactgttgtgtgttttgtatgagtcatgttttatatatgtagtaaccgagcaaatgttttgctttctgtcttattaaagaaataaaaccaaaaaaaaaaaaaaaaaagcttatcgataccgtcgacctcgagggggggcccggtac

SEQ ID NO: 56668 - protein, 326 aa, Glycine max
  peptide (1)..(326): Ceres Seq. ID no. 13582322
MPGFSSVGTFKIFVGNLAEKTVSADIRPLFEKYGKVIECDVVKDFGFVHMENEESGRDAIQNLNGYLVHGSAMKVEAATSRKGPNTPTTKIFVGNLSDNTRAPQVRSLFTKYGTVVECDIVRNYGFVHIDCPDVNKMVEELNGQVVDGQPMKVQISTSKVRQRPGMGNPEQCYRMGPDRFRGRMGFGRDPYPPPPPPPFLRDRMLSGGFGGKDSYYDRYYDRPAARFDDRDSFDRRLPPLPPRDLGPRRDFMPPPPIPPREPLPPLGLRGPPSSLRDSFERSMYSRRSPPPPSARYGRLYDDYSRDSYDDRRIGLRGASPRRFTPY

SEQ ID NO: 56669 - protein, 277 aa, Glycine max
  peptide (1)..(277): Ceres Seq. ID no. 13582323
MENEESGRDAIQNLNGYLVHGSAMKVEAATSRKGPNTPTTKIFVGNLSDNTRAPQVRSLFTKYGTVVECDIVRNYGFVHIDCPDVNKMVEELNGQVVDGQPMKVQISTSKVRQRPGMGNPEQCYRMGPDRFRGRMGFGRDPYPPPPPPPFLRDRMLSGGFGGKDSYYDRYYDRPAARFDDRDSFDRRLPPLPPRDLGPRRDFMPPPPIPPREPLPPLGLRGPPSSLRDSFERSMYSRRSPPPPSARYGRLYDDYSRDSYDDRRIGLRGASPRRFTPY

SEQ ID NO: 56670 - protein, 254 aa, Glycine max
  peptide (1)..(254): Ceres Seq. ID no. 13582324
MKVEAATSRKGPNTPTTKIFVGNLSDNTRAPQVRSLFTKYGTVVECDIVRNYGFVHIDCPDVNKMVEELNGQVVDGQPMKVQISTSKVRQRPGMGNPEQCYRMGPDRFRGRMGFGRDPYPPPPPPPFLRDRMLSGGFGGKDSYYDRYYDRPAARFDDRDSFDRRLPPLPPRDLGPRRDFMPPPPIPPREPLPPLGLRGPPSSLRDSFERSMYSRRSPPPPSARYGRLYDDYSRDSYDDRRIGLRGASPRRFTPY

SEQ ID NO: 56671 - DNA, 1349 bp, Glycine max
  misc_feature (1)..(1349): Ceres Seq. ID no. 13595142
acttttcgagaaaaatttacttccttagaaaatgtcgcgtgcgatgtgcaacccatcaatggtgagtaggagtgttctagggtcccaaacgagttcaaaatcggtgacagagacaatgagtggttcccacgagtttgtgatcaagggttactcactaacgaaaggaatgggcattgggaaatacatcgtgagtgagactttcatagtgggagggttccaatgggccatatactttttccctgatggtagggaccccaaagataatgccgcttatgtctctgtcttcgttgcactccattccaagagcaccaatgttcgtgcgttgttcgatctcacgttgctcgacctatgcaagaaaggagagcacaaggttcatagccacttcagtcactccctcacgattgggccttacactctcataaaccatggcagcatgtggggctatacgcggtttttcaaacggagacaccttgagacgtcaaattttctcaaggatgattgcttgaagataaattgcactattgcggttttagtgtcgtccatagattcttctcagttaaacacaatacaggttcctgaatctgatattggtgaacattttgggatgttgttagaggatgaggaatcatttgatgttactttctcggttggtggagaaaggtttcatgctcataagcttgtattggcagctcgatcaaccatgtttgaaactcaattttttaatgctatgaagaaggatgatcaggagatagttgttattgacatggaacctaaggttttcaaggctttacttcattttgtttatagagacactcttttggaagatgaagagctctttatgttggattcgtcattctttccttcgttttctgaatcatttatagcaaagttgttagctgctggagaaaagtatggtttgccaagactaatgttaatgtgtgaatctatactttgtaaagacatatctgtagattctgttgcctatatttttgctcttgcggaccattattgtgctacccacttgaagtccatctgtcaaaaattttctgctgaaaactttgatgcggtgatgcattctgatggttttgagtatcttaagaaaaattgcccattactgcaatcagaactgctaaagactggagtaggatgcgagaaagaatttagttgagagggaaaatactaaattgtatgtgcttaatccaaggtctagtttagaggagtgacgacctaagatccaagtttggaagagaccagaaaaatataaaagaagattatatatatagttttgcagtaatctttttatatattatattatgttactttataaatgaattgaaattacattcttc

SEQ ID NO: 56672 - protein, 378 aa, Glycine max
  peptide (1)..(378): Ceres Seq. ID no. 13595143
MSRAMCNPSMVSRSVLGSQTSSKSVTETMSGSHEFVIKGYSLTKGMGIGKYIVSETFIVGGFQWAIYFFPDGRDPKDNAAYVSVFVALHSKSTNVRALFDLTLLDLCKKGEHKVHSHFSHSLTIGPYTLINHGSMWGYTRFFKRRHLETSNFLKDDCLKINCTIAVLVSSIDSSQLNTIQVPESDIGEHFGMLLEDEESFDVTFSVGGERFHAHKLVLAARSTMFETQFFNAMKKDDQEIVVIDMEPKVFKALLHFVYRDTLLEDEELFMLDSSFFPSFSESFIAKLLAAGEKYGLPRLMLMCESILCKDISVDSVAYIFALADHYCATHLKSICQKFSAENFDAVMHSDGFEYLKKNCPLLQSELLKTGVGCEKEFS

SEQ ID NO: 56673 - protein, 374 aa, Glycine max
  peptide (1)..(374): Ceres Seq. ID no. 13595144
MCNPSMVSRSVLGSQTSSKSVTETMSGSHEFVIKGYSLTKGMGIGKYIVSETFIVGGFQWAIYFFPDGRDPKDNAAYVSVFVALHSKSTNVRALFDLTLLDLCKKGEHKVHSHFSHSLTIGPYTLINHGSMWGYTRFFKRRHLETSNFLKDDCLKINCTIAVLVSSIDSSQLNTIQVPESDIGEHFGMLLEDEESFDVTFSVGGERFHAHKLVLAARSTMFETQFFNAMKKDDQEIVVIDMEPKVFKALLHFVYRDTLLEDEELFMLDSSFFPSFSESFIAKLLAAGEKYGLPRLMLMCESILCKDISVDSVAYIFALADHYCATHLKSICQKFSAENFDAVMHSDGFEYLKKNCPLLQSELLKTGVGCEKEFS

SEQ ID NO: 56674 - protein, 369 aa, Glycine max
  peptide (1)..(369): Ceres Seq. ID no. 13595145
MVSRSVLGSQTSSKSVTETMSGSHEFVIKGYSLTKGMGIGKYIVSETFIVGGFQWAIYFFPDGRDPKDNAAYVSVFVALHSKSTNVRALFDLTLLDLCKKGEHKVHSHFSHSLTIGPYTLINHGSMWGYTRFFKRRHLETSNFLKDDCLKINCTIAVLVSSIDSSQLNTIQVPESDIGEHFGMLLEDEESFDVTFSVGGERFHAHKLVLAARSTMFETQFFNAMKKDDQEIVVIDMEPKVFKALLHFVYRDTLLEDEELFMLDSSFFPSFSESFIAKLLAAGEKYGLPRLMLMCESILCKDISVDSVAYIFALADHYCATHLKSICQKFSAENFDAVMHSDGFEYLKKNCPLLQSELLKTGVGCEKEFS

SEQ ID NO: 56675 - DNA, 1097 bp, Glycine max
  misc_feature (1)..(1097): Ceres Seq. ID no. 14302536
atccagaaataatcactttctccattcgattcttcctcttgctcttgcacccaatctcctcgctacgtagttagctaatctaaccatcagtccaccaaagccaatccactgagtgcgagagctccatctccatctcgatctcgaccaaggagaggaagctagctagctagcaacaggcagcagcaatggcgggcgtgggtcgtaacatggtggcgccgctgctggtgctgaacctcatcatgtacctcattgtcatcggcttcgcaagctggaacctcaaccacttcatcaacggcctcaccaaccgccccggcgtcggcggcaacggagccaccttctacttcctcgtctttgccatcctcgcgggcgtcgtcggcgccgcatccaagctcgccggcgtgcaccacgtccgcacatggcgcggtgacagcctcgccacctccgcctcgtcctcgctcgtggcatgggccatcaccgccttggcgttcgggctggcgtgcaaggagatccacatcggcgggtaccgcgggtggcgcctcagggtgctggaggcgttcgtcattatcctggccttcacgcagctgctttacgtgctggcgctgcactccggcctcttcgggaaccagttgggtggcaaccatgctggtgggtacccggcggagcatgcgtacggcgcaggcggcgacccgcacaacaagggcatgggcatgggcaccggcggcgtcgccagggtctgaatcgggtagagacctcgccgtgctccatcgcttggcggttgacagtgacgggcggataataaggtgtgtgtgtgtgtgtgtgtgtgtgtgtgtgttccgtcccgtatggtgtgagcgtacgttgtatgcagacatggtgtgcacggtaggcatgtagtgacggcgtgcgtgcgtacatgtgtagtactgcaggatgggcccttcttcttagtgtgttttgtgtttattatgtagtccgagatcaagatggagatcgatcagtccatgctatgcttcttcattctccgaccagacaattgcaatgcatgtctgggtgtggatgaatggctgcacttgtttaatttagtactactactctac

SEQ ID NO: 56676 - protein, 183 aa, Glycine max
  peptide (1)..(183): Ceres Seq. ID no. 14302537
MAGVGRNMVAPLLVLNLIMYLIVIGFASWNLNHFINGLTNRPGVGGNGATFYFLVFAILAGVVGAASKLAGVHHVRTWRGDSLATSASSSLVAWAITALAFGLACKEIHIGGYRGWRLRVLEAFVIILAFTQLLYVLALHSGLFGNQLGGNHAGGYPAEHAYGAGGDPHNKGMGMGTGGVARV

SEQ ID NO: 56677 - protein, 176 aa, Glycine max
  peptide (1)..(176): Ceres Seq. ID no. 14302538
MVAPLLVLNLIMYLIVIGFASWNLNHFINGLTNRPGVGGNGATFYFLVFAILAGVVGAASKLAGVHHVRTWRGDSLATSASSSLVAWAITALAFGLACKEIHIGGYRGWRLRVLEAFVIILAFTQLLYVLALHSGLFGNQLGGNHAGGYPAEHAYGAGGDPHNKGMGMGTGGVARV

SEQ ID NO: 56678 - protein, 165 aa, Glycine max
  peptide (1)..(165): Ceres Seq. ID no. 14302539
MYLIVIGFASWNLNHFINGLTNRPGVGGNGATFYFLVFAILAGVVGAASKLAGVHHVRTWRGDSLATSASSSLVAWAITALAFGLACKEIHIGGYRGWRLRVLEAFVIILAFTQLLYVLALHSGLFGNQLGGNHAGGYPAEHAYGAGGDPHNKGMGMGTGGVARV

SEQ ID NO: 56679 - DNA, 1412 bp, Glycine max
  misc_feature (1)..(1412): Ceres Seq. ID no. 13595525
atttaaaatttgccgaagaatccaattcagcgatctccgaagagctccatttgttgcactccaattggaaaaaagaagtgaacttgcgatctgggtatccaattttcgaactctttcgatggggaatgatgcagggtcaccgcagggtccggttacgtgtgggtcgtggattcggaggcccgagaatttgaatttggtggtgttgggaaggtccagacgtggcagttcttgtccttctctcttagagattttctccttcgatcccaaaaccacttctttgtctacctctcctctgaccacttatgtgttggaagcagaggaaggtgatcctgttgccattacagttcacccaagtggggatgattttgtgtgcgctctcagcaatggtagctgcaaattgtttgagctgtatggtcgtgaaacaaacatgaagttgttggctaaggaactggctcctctacagggtattggtcctcagaaatgtatttcttttagtgttgatgggtctaaatttgctgctggcggaatggatggacatctcagaatcatggagtggcctagtatgcgtgtgattttggatgaacctagagcacacaattcagttcaggatatggattttagtctagattcagaatttctagcttcaacttctactgatggttcagcaagaatctggaagactgaagatggtgttcctttgaatactttgtctcgcaactcggatgaaaagattgaattatgtcgattttccaaggacggaaccaaaccatttttattttgctctgttcaaaaaggtgatacttctgtcactgcggtttatgatattagcacatggaataaaattgggcataagaggctgattagaaagtctgcttcagtaatgtcaattagcaatgatgggaaatacctttctctgggcagtaaagatggagacatatgtgtagttgaagtaaagaaaatgcagatataccattatagcaagagactgcacctgggtacaaatattgcatcgcttgagttctgtcccggggaaagggttgtacttacaacctcagtagaatggggagcgctggtcactaagctgactgtacctaaagattggaaagaatggcagatctatttggtgctattgggactatttttagcatcagctgttgcattttacatattctttgagaactctgattcattctggaactttcccatgggcaaagaccaaccagcaagaccaaggtttaaacctgtgttaaaagatccccagtcttatgatgatcaaaatatttgggggccagtagatatgtgatcacacagacgttcttgattttagtcttcagtgctgttttggaagctgtaactggtatcaacatttatttttattttttttattactggtatcaacatttatttaagcc

SEQ ID NO: 56680 - protein, 433 aa, Glycine max
  peptide (1)..(433): Ceres Seq. ID no. 13595526
FKICRRIQFSDLRRAPFVALQLEKRSELAIWVSNFRTLSMGNDAGSPQGPVTCGSWIRRPENLNLVVLGRSRRGSSCPSLLEIFSFDPKTTSLSTSPLTTYVLEAEEGDPVAITVHPSGDDFVCALSNGSCKLFELYGRETNMKLLAKELAPLQGIGPQKCISFSVDGSKFAAGGMDGHLRIMEWPSMRVILDEPRAHNSVQDMDFSLDSEFLASTSTDGSARIWKTEDGVPLNTLSRNSDEKIELCRFSKDGTKPFLFCSVQKGDTSVTAVYDISTWNKIGHKRLIRKSASVMSISNDGKYLSLGSKDGDICVVEVKKMQIYHYSKRLHLGTNIASLEFCPGERVVLTTSVEWGALVTKLTVPKDWKEWQIYLVLLGLFLASAVAFYIFFENSDSFWNFPMGKDQPARPRFKPVLKDPQSYDDQNIWGPVDM

SEQ ID NO: 56681 - protein, 394 aa, Glycine max
  peptide (1)..(394): Ceres Seq. ID no. 13595527
MGNDAGSPQGPVTCGSWIRRPENLNLVVLGRSRRGSSCPSLLEIFSFDPKTTSLSTSPLTTYVLEAEEGDPVAITVHPSGDDFVCALSNGSCKLFELYGRETNMKLLAKELAPLQGIGPQKCISFSVDGSKFAAGGMDGHLRIMEWPSMRVILDEPRAHNSVQDMDFSLDSEFLASTSTDGSARIWKTEDGVPLNTLSRNSDEKIELCRFSKDGTKPFLFCSVQKGDTSVTAVYDISTWNKIGHKRLIRKSASVMSISNDGKYLSLGSKDGDICVVEVKKMQIYHYSKRLHLGTNIASLEFCPGERVVLTTSVEWGALVTKLTVPKDWKEWQIYLVLLGLFLASAVAFYIFFENSDSFWNFPMGKDQPARPRFKPVLKDPQSYDDQNIWGPVDM

SEQ ID NO: 56682 - protein, 291 aa, Glycine max
  peptide (1)..(291): Ceres Seq. ID no. 13595528
MKLLAKELAPLQGIGPQKCISFSVDGSKFAAGGMDGHLRIMEWPSMRVILDEPRAHNSVQDMDFSLDSEFLASTSTDGSARIWKTEDGVPLNTLSRNSDEKIELCRFSKDGTKPFLFCSVQKGDTSVTAVYDISTWNKIGHKRLIRKSASVMSISNDGKYLSLGSKDGDICVVEVKKMQIYHYSKRLHLGTNIASLEFCPGERVVLTTSVEWGALVTKLTVPKDWKEWQIYLVLLGLFLASAVAFYIFFENSDSFWNFPMGKDQPARPRFKPVLKDPQSYDDQNIWGPVDM

SEQ ID NO: 56683 - DNA, 787 bp, Glycine max
  misc_feature (1)..(787): Ceres Seq. ID no. 12611578
gatcgatagcagagcaattctcttgcaacttgataagatcgagatacttccagacacacgcgcacacatagggccggagatagaagaatagttatggcttcatcggcggtgagccacagccacggcgggcagcaccagcagcacctgccggcggcggcagggagcatgatggcgcgggtggaccggctggacctggtggtggggtacctggaggagatgcgccaccacagcggcggcagcggcaggtcgtccaccaccgcgaccagcacgctgtcatcgtcatccccgaccacgcctaggtcttcccggcctcatgggtgccggccggcggaggagctgctgcgggaggccaaggccaaggggagcctggtggagcgcatagcgttcctggaggaccgggtgctccggatggaggaggagcgcatggatctgtcgtccagcatggatacggcggagcagaccacgccgacctcgtcggggaggaggacgatgaggatgatgatgagcggcagcggcggggccggggatgagcatgggagtggcgggagcgggaagaaagggaagaaggggctcaagagcttggtcaagtcatgcgtccgagcaggcgccaagctcaagaccaaggaatagtctagtctttcttttgtttctttattattagtcgtgtgtgtacgtgcatatgttcacgtgtacgtacaccatgtacagtaaacgtatgtgtaaatgtgaatgtacacgttgtaataacgaaaaagtagtaatacatgcttgctgtattatcttcgcc

SEQ ID NO: 56684 - protein, 178 aa, Glycine max
  peptide (1)..(178): Ceres Seq. ID no. 12611579
MASSAVSHSHGGQHQQHLPAAAGSMMARVDRLDLVVGYLEEMRHHSGGSGRSSTTATSTLSSSSPTTPRSSRPHGCRPAEELLREAKAKGSLVERIAFLEDRVLRMEEERMDLSSSMDTAEQTTPTSSGRRTMRMMMSGSGGAGDEHGSGGSGKKGKKGLKSLVKSCVRAGAKLKTKE

SEQ ID NO: 56685 - protein, 154 aa, Glycine max
  peptide (1)..(154): Ceres Seq. ID no. 12611580
MMARVDRLDLVVGYLEEMRHHSGGSGRSSTTATSTLSSSSPTTPRSSRPHGCRPAEELLREAKAKGSLVERIAFLEDRVLRMEEERMDLSSSMDTAEQTTPTSSGRRTMRMMMSGSGGAGDEHGSGGSGKKGKKGLKSLVKSCVRAGAKLKTKE

SEQ ID NO: 56686 - protein, 153 aa, Glycine max
  peptide (1)..(153): Ceres Seq. ID no. 12611581
MARVDRLDLVVGYLEEMRHHSGGSGRSSTTATSTLSSSSPTTPRSSRPHGCRPAEELLREAKAKGSLVERIAFLEDRVLRMEEERMDLSSSMDTAEQTTPTSSGRRTMRMMMSGSGGAGDEHGSGGSGKKGKKGLKSLVKSCVRAGAKLKTKE

SEQ ID NO: 56687 - DNA, 1823 bp, Glycine max
  misc_feature (1)..(1823): Ceres Seq. ID no. 13595529
gtgttcacacttccaacccaatcgggctgtcaaaacgacgacgttgacagcccggttctctggagatagacagatagatataggtacattcccagtttcaggtctggaattttgattctagataaggacaagggttgctacttgttggtgttgtgctgtagtattggtttgacaagcttttgcgttgagttgagttgggttgagtttagtatctgcaatgagttcgttttctggagccattcaaagacctctggtggcggctgccgcagttgctgttgcttctttctctgctgatctctccgataaattgccatcacgtgattgttctacctccgatttggcacattctactccttgtagcaacatacaagaatcagattcatcctgggtttctcatatttcggactctaaacttgctaacctatcttttgtgacccagattccggtgcctgtgcctaatgttcaattccgggtaccgagtttgggacagaattgtgtttcaaatttgtaccattcttcggttgcttcatcaccacttcttcggaatttgtatcactctgctgacttgcctagagtctcgaggtctgctgcatattcccatggtatctccaattcaacttctgaggctgaggtcatgtataaatggcatttacccgaactgaatgctttggatgattctagttgttcattgacaaagtcaaggacagtggtggtcttgctgggatggttgggagcaaggcagaaacacttgaagaagtatgcggaatggtacactytaagggggtttcatgtggttaccttcacgtttccaatgggggaggtcctgagttatcagccgggtggaaaagcggagcaaaatgttcatttgcttgtggaccacttggctgagtggttagaaggggaaagtgataagaatcttgtctttcatactttcagcaacactggatggttaacatatggtgttattcttgaacattttcaaaaccaggatccaactatcacggaaaggattaagggatgcattgtagactctgcacctgttgcgtaccctgacccacaggtctgggcctcaggtttctctgctgcatttctcaagaagaatagtgtggctacaaaaggacgtgttttttccgatcaatctggcattaaagtatcaattggcagtgaagatgatttagggctcaaacctgctctaacagaagcagctttactactaattctaaagaaattttttgagatcattctggatcttccttcagtgaacaggaggctctctgatgttatgagcatgttatcatcaaaacaacccagctgtccacagttatacatgtatagctctgctgacagggttattcctgctgattcagtggaatcatttgtagaggctcagcgcagggctggacatgatgtgagggcatgcaattttgtctcctcaccccatgttgaccactttaggaatgacccaagattgtatacatctcagctcagtcagtttttggaggagtgtgttcttagccgttgtaaatcttactaattctttacattccttggcttactcatacaccatatagttcattcattttgatttttgaaagcagccattccattaatggatgttgccatggtggttaggactttatgaaaagtcaaccacctcaaggggattacacaattgttccctcacaggttataattgattcattgacatattgatagtgcaaatgaaagatatgttacacaattgttacctgacagcttataattgatccctcgatatattgatagtgcaaatgaaagattttgcaactttcttcggagggggg

SEQ ID NO: 56688 - protein, 438 aa, Glycine max
  peptide (1)..(438): Ceres Seq. ID no. 15221602
  misc_feature (187)..(187): Xaa is any aa, unknown or other
MSSFSGAIQRPLVAAAAVAVASFSADLSDKLPSRDCSTSDLAHSTPCSNIQESDSSWVSHISDSKLANLSFVTQIPVPVPNVQFRVPSLGQNCVSNLYHSSVASSPLLRNLYHSADLPRVSRSAAYSHGISNSTSEAEVMYKWHLPELNALDDSSCSLTKSRTVVVLLGWLGARQKHLKKYAEWYTXRGFHVVTFTFPMGEVLSYQPGGKAEQNVHLLVDHLAEWLEGESDKNLVFHTFSNTGWLTYGVILEHFQNQDPTITERIKGCIVDSAPVAYPDPQVWASGFSAAFLKKNSVATKGRVFSDQSGIKVSIGSEDDLGLKPALTEAALLLILKKFFEIILDLPSVNRRLSDVMSMLSSKQPSCPQLYMYSSADRVIPADSVESFVEAQRRAGHDVRACNFVSSPHVDHFRNDPRLYTSQLSQFLEECVLSRCKSY

SEQ ID NO: 56689 - protein, 299 aa, Glycine max
  peptide (1)..(299): Ceres Seq. ID no. 15221603
  misc_feature (48)..(48): Xaa is any aa, unknown or other
MYKWHLPELNALDDSSCSLTKSRTVVVLLGWLGARQKHLKKYAEWYTXRGFHVVTFTFPMGEVLSYQPGGKAEQNVHLLVDHLAEWLEGESDKNLVFHTFSNTGWLTYGVILEHFQNQDPTITERIKGCIVDSAPVAYPDPQVWASGFSAAFLKKNSVATKGRVFSDQSGIKVSIGSEDDLGLKPALTEAALLLILKKFFEIILDLPSVNRRLSDVMSMLSSKQPSCPQLYMYSSADRVIPADSVESFVEAQRRAGHDVRACNFVSSPHVDHFRNDPRLYTSQLSQFLEECVLSRCKSY

SEQ ID NO: 56690 - protein, 240 aa, Glycine max
  peptide (1)..(240): Ceres Seq. ID no. 15221604
MGEVLSYQPGGKAEQNVHLLVDHLAEWLEGESDKNLVFHTFSNTGWLTYGVILEHFQNQDPTITERIKGCIVDSAPVAYPDPQVWASGFSAAFLKKNSVATKGRVFSDQSGIKVSIGSEDDLGLKPALTEAALLLILKKFFEIILDLPSVNRRLSDVMSMLSSKQPSCPQLYMYSSADRVIPADSVESFVEAQRRAGHDVRACNFVSSPHVDHFRNDPRLYTSQLSQFLEECVLSRCKSY

SEQ ID NO: 56691 - DNA, 1028 bp, Glycine max
  misc_feature (1)..(1028): Ceres Seq. ID no. 13639117
gatgatgtttccacggcaatgacagaacaaagatctttctttttctctctgtgtcaggaacttacctctttgaagttataataatattcaagtgaagctcgtcaaggtgaaacagagtttctctgaatcgaagtagcgactcgtgtttttgattccatggctttgacttcgtgcctaaagactggagtagttccgatgtctccgaccaccgggttgtatctttccggcagcctcttgaagtcggacagtggcttcgccgttccgacgaagttacagagtgttcgaaaaagtgatagagagaggttgagaatccaagccgtgttcagctttcctcctgcgttcctaacaagaaacggtcgagcagagaagcagaagcagctgaagcaagaccttctcgaagccattgagcctctcgaacgtggcgccaccgcctcgcctgatgaccagcttcggatcgatcagttggcgcgtaaagtggaagcagtgaatccaaccaaggagcctctgaagtctgatttgctcaatgggaaatgggagctcatttacacaacctctgcttctattctccaggctaagaaaccgaagttcttgagatcaataacaaactaccagtctatcaatgtggataccctcaaggttcaaaacatggagacttggcctttcttcaactcggtaactggagacataagacccctcaattcaaggaaggtcgctgtgcagctcaaagtgtttaaaattctcggccttattcctgtaaatgcacctgaaacagcacgtggtgaactagagattacttatgtggacgaggaactacggttgtcaaggggtgacaagggcaacttgtttatattgaagatgtttgatcccacttaccgaatccctctctgaagccaaatggttccaagcccatcatacatacatacatacccccatcgcttgttctgtctctctcttcatcatcatatgtatagaagaatgtttcttcttctacaaacataaaatcttaataagatcaaaacaagagtctc

SEQ ID NO: 56692 - protein, 243 aa, Glycine max
  peptide (1)..(243): Ceres Seq. ID no. 13639118
MALTSCLKTGVVPMSPTTGLYLSGSLLKSDSGFAVPTKLQSVRKSDRERLRIQAVFSFPPAFLTRNGRAEKQKQLKQDLLEAIEPLERGATASPDDQLRIDQLARKVEAVNPTKEPLKSDLLNGKWELIYTTSASILQAKKPKFLRSITNYQSINVDTLKVQNMETWPFFNSVTGDIRPLNSRKVAVQLKVFKILGLIPVNAPETARGELEITYVDEELRLSRGDKGNLFILKMFDPTYRIPL

SEQ ID NO: 56693 - protein, 230 aa, Glycine max
  peptide (1)..(230): Ceres Seq. ID no. 13639119
MSPTTGLYLSGSLLKSDSGFAVPTKLQSVRKSDRERLRIQAVFSFPPAFLTRNGRAEKQKQLKQDLLEAIEPLERGATASPDDQLRIDQLARKVEAVNPTKEPLKSDLLNGKWELIYTTSASILQAKKPKFLRSITNYQSINVDTLKVQNMETWPFFNSVTGDIRPLNSRKVAVQLKVFKILGLIPVNAPETARGELEITYVDEELRLSRGDKGNLFILKMFDPTYRIPL

SEQ ID NO: 56694 - DNA, 1605 bp, Glycine max
  misc_feature (1)..(1605): Ceres Seq. ID no. 14311136
ataaaactttgcccaaaaagaggatgttaaagctgggcctgaaataataatactactccaatattctcttctcaaacctactcttctatctttcgctctccccctctgcgtttctgacagtgttactgtgtgtgttttccgcggaaaatcaaaatgggtatcattgaaaagatcaaagaaattgaagccgagatggctcggacacagaaaaataaagccacagagtatcatcttgggcagctcaaggctaaaatagcaaaattaaggacacaattattggagcctccaaaaggttctagtggaggtggagaaggatttgaagttacaaaattcggtcatggacgtgttgcactgattggatttccaagtgtggggaagtctactcttttgacaatgttaacgggcacacattctgaagctgcatcttatgagtttactactttgacctgtattcctgggattatacactataatgatactaaaattcagttactcgatcttcctggaattattgaaggtgcatctgaaggcaagggacgtggaagacaggttattgctgttgctaaatcttcagacatagtattgatggttcttgatgcttccaaaagtgagggtcataggcaaatattgaccaaagagctcgaagctgtgggcttgcggttaaacaagagaccacctcagatatattttaaaaagaaaaagacggggggcatttcattcaacagcactttgcctttgactcatgtggatgagaagctttgttatcagattctgcacgagtacaagattcacaatgcagagatccttttccgtgaggatgctacagtggatgatctcatagatgtcattgaaggaaaccgaaaatacatgaagtgtgtatatgtctacaacaagatagatgttattggtattgatgatgtggacagattagcccgtcaaccaaattctgttgtcattagctgcaatttgaagctgaacttagacagactgcttgcaaggatgtgggatgaaatgggtctggttagagtttacacaaaaccacaaggccagcagcctgattttggtgatcctgtggttctttctgctgatagaggtggctgcactgtagaagacttctgcaaccatatacacagaagtttggtgaaggatgtgaagtatgttctggtctggggtactagtgcaaggcactacccgcagcactgtggtcttagtcacaatcttcatgacgaggatgttgttcagattgtgaagaaaaaggaaaaggaagagggaggaaggggacgatttaaatcacattccaatgctcctgccaggatatctgacagagagaagaaggcaccactgaagacataattatatgacacagcctgtgatttcatcattgatttttgcctagtggatgggaaaaatgactataggtgatgatacatccaaaggcaaaggttcttatcttgattgctcatgcaacataggattgaaaattcctcctgagcactaagtggggcacctatatttttttgtcacccaagtgttgtaacatcccctccccctcttttgaataatagtttttatcagttatgaagtgtgcatctatgatttgaagag

SEQ ID NO: 56695 - protein, 399 aa, Glycine max
  peptide (1)..(399): Ceres Seq. ID no. 14311137
MGIIEKIKEIEAEMARTQKNKATEYHLGQLKAKIAKLRTQLLEPPKGSSGGGEGFEVTKFGHGRVALIGFPSVGKSTLLTMLTGTHSEAASYEFTTLTCIPGIIHYNDTKIQLLDLPGIIEGASEGKGRGRQVIAVAKSSDIVLMVLDASKSEGHRQILTKELEAVGLRLNKRPPQIYFKKKKTGGISFNSTLPLTHVDEKLCYQILHEYKIHNAEILFREDATVDDLIDVIEGNRKYMKCVYVYNKIDVIGIDDVDRLARQPNSVVISCNLKLNLDRLLARMWDEMGLVRVYTKPQGQQPDFGDPVVLSADRGGCTVEDFCNHIHRSLVKDVKYVLVWGTSARHYPQHCGLSHNLHDEDVVQIVKKKEKEEGGRGRFKSHSNAPARISDREKKAPLKT

SEQ ID NO: 56696 - protein, 386 aa, Glycine max
  peptide (1)..(386): Ceres Seq. ID no. 14311138
MARTQKNKATEYHLGQLKAKIAKLRTQLLEPPKGSSGGGEGFEVTKFGHGRVALIGFPSVGKSTLLTMLTGTHSEAASYEFTTLTCIPGIIHYNDTKIQLLDLPGIIEGASEGKGRGRQVIAVAKSSDIVLMVLDASKSEGHRQILTKELEAVGLRLNKRPPQIYFKKKKTGGISFNSTLPLTHVDEKLCYQILHEYKIHNAEILFREDATVDDLIDVIEGNRKYMKCVYVYNKIDVIGIDDVDRLARQPNSVVISCNLKLNLDRLLARMWDEMGLVRVYTKPQGQQPDFGDPVVLSADRGGCTVEDFCNHIHRSLVKDVKYVLVWGTSARHYPQHCGLSHNLHDEDVVQIVKKKEKEEGGRGRFKSHSNAPARISDREKKAPLKT

SEQ ID NO: 56697 - protein, 319 aa, Glycine max
  peptide (1)..(319): Ceres Seq. ID no. 14311139
MLTGTHSEAASYEFTTLTCIPGIIHYNDTKIQLLDLPGIIEGASEGKGRGRQVIAVAKSSDIVLMVLDASKSEGHRQILTKELEAVGLRLNKRPPQIYFKKKKTGGISFNSTLPLTHVDEKLCYQILHEYKIHNAEILFREDATVDDLIDVIEGNRKYMKCVYVYNKIDVIGIDDVDRLARQPNSVVISCNLKLNLDRLLARMWDEMGLVRVYTKPQGQQPDFGDPVVLSADRGGCTVEDFCNHIHRSLVKDVKYVLVWGTSARHYPQHCGLSHNLHDEDVVQIVKKKEKEEGGRGRFKSHSNAPARISDREKKAPLKT

SEQ ID NO: 56698 - DNA, 789 bp, Glycine max
  misc_feature (1)..(789): Ceres Seq. ID no. 13595818
atcaatcaattccgctcctcccccttggatccaaacccttcccatcactctcgcttgactccttggaagcagagagaggaggaggaggaggaggaggaggagaccatgtcgtcgtccggtggcaagctcttcaccctggaggaggtcgccaagcacagctccaaggacgactgctggctcgtcatcggcggcaaggtgtacaatgtgaccaagtttcttgatgaccaccctggaggcgacgacgtcttgctgtcttcaactgccaaggacgcgaccgacgacttcgaggacgtgggacacagcacaaccgcccgggcgatgatggacgagtactacgtcggcgagatcgacgcgaccacgatacccaccaaggtcaagtacacgccgcccaagcagccgcactacaaccaggacaagacccccgagttcgtcatcaagatcctccagttcttggtccccctcgcgatactgggcctggccgtcgccgtacggatctacaccaaggcagactctgtctagcaccgtcatcttataccagtcagtcagtcattcggaagtgtccaagagctgaataagttttagtggggatttgcatattttgtaccagcgtcaccgtcctgtcatggaatctgggaactgctctcgacccgtcgttgcgttatggttctactaagacgtccgctgttgaatcgtgactcgggaaaaacggatagatacttggctatattttccatatcgctggtgaatgttcagacatacatattcttaatttgatgtgattagttgtgt

SEQ ID NO: 56699 - protein, 172 aa, Glycine max
  peptide (1)..(172): Ceres Seq. ID no. 13595819
INQFRSSPLDPNPSHHSRLTPWKQREEEEEEEEETMSSSGGKLFTLEEVAKHSSKDDCWLVIGGKVYNVTKFLDDHPGGDDVLLSSTAKDATDDFEDVGHSTTARAMMDEYYVGEIDATTIPTKVKYTPPKQPHYNQDKTPEFVIKILQFLVPLAILGLAVAVRIYTKADSV

SEQ ID NO: 56700 - protein, 137 aa, Glycine max
  peptide (1)..(137): Ceres Seq. ID no. 13595820
MSSSGGKLFTLEEVAKHSSKDDCWLVIGGKVYNVTKFLDDHPGGDDVLLSSTAKDATDDFEDVGHSTTARAMMDEYYVGEIDATTIPTKVKYTPPKQPHYNQDKTPEFVIKILQFLVPLAILGLAVAVRIYTKADSV

SEQ ID NO: 56701 - DNA, 1542 bp, Glycine max
  misc_feature (1)..(1542): Ceres Seq. ID no. 13639300
aatagcagctcagaaagaaacgcaagttttggcatgggtgtgagctctggaactccactcgtgatccaacacgatagagagagaaaaagggtcttgcctttttttctgcttttgatttgactctttacaaatacaaataaataataaaatcccatcaagaagaaataaatatcaagcccaacccagtgcagtgctgcagggactgtcactgaactcaaaaatgaactgtcttcggaatctttctcgattctctgttttgcccttcgaaacacctgttacgcgccaccgcaagaaccttcccctttccctgggtttcgtcaacaattctcgtcaatatccaactatggccctcaaggctgcctcaggttctataccaagtgcagacacaagtagtgccgataaggaggaagaaaagtctgagacatatagtcataacatgacagaagccatgggtgctgttttgacttataggcatgaattaggaatgaactataatttcatccgtccagacttgattgtgggatcatgcctacagactcctgaagatgtagacaagttgcgtagaattggagtgaaaactatattttgcttacaacaagattcagaccttgaatattttggagttgatattaatgccatacgagaatatgccaagacatgcaatgacattcaacacttgcgtgctgagataagggactttgatgcatttgatctacggaggcggcttccagctgtagttagcaaattatacaaggcaataaattccaatggaggtgtaacatatatacattgcactgctggacttggaagagctccagctgttgcgttggcttatatgttttgggttctgggttataaacttaacgaggctcatacactacttcagagcaaaaggtcgtgctttccaaaactggatgccattaaaagtgcaacagctgatattcttacaggcctcagtaagaagtctgtcactttgtcatgggaagacaaaaattgctctaccgtggaaatttcaggacttgatattggatgggggcagagaatacccctaaattttgatgacaaagagggtttgtggtttctcaagagggaattgcctgaaggactctacgagtacaagtacattgttgatggggaatggacatgcaacagcgatgagcttataacctctcccaacaaagatggccatgtcaacaattttattcaagtccttgatgatacaagcagtgttcgtgcctctcttcggaagagattgacggctgatgatcctgatctcacaacagatgaacaactcagaataaaggagtttcttgaagcttgtcctgatgaggattagtgaaccatcaattcacgtggttgttgatatgaaaaatactagatgcgcgcatacatgttacctaataagattaatctaaaccttacaatatgttgggttcctgcggtttattgagttccatagtaatcaaatgtcttggaaattatttaaatagcaccatgaccttcaaatttcaatgtaccatgaaatagaatgtggctataaaa

SEQ ID NO: 56702 - protein, 371 aa, Glycine max
  peptide (1)..(371): Ceres Seq. ID no. 13639301
MNCLRNLSRFSVLPFETPVTRHRKNLPLSLGFVNNSRQYPTMALKAASGSIPSADTSSADKEEEKSETYSHNMTEAMGAVLTYRHELGMNYNFIRPDLIVGSCLQTPEDVDKLRRIGVKTIFCLQQDSDLEYFGVDINAIREYAKTCNDIQHLRAEIRDFDAFDLRRRLPAVVSKLYKAINSNGGVTYIHCTAGLGRAPAVALAYMFWVLGYKLNEAHTLLQSKRSCFPKLDAIKSATADILTGLSKKSVTLSWEDKNCSTVEISGLDIGWGQRIPLNFDDKEGLWFLKRELPEGLYEYKYIVDGEWTCNSDELITSPNKDGHVNNFIQVLDDTSSVRASLRKRLTADDPDLTTDEQLRIKEFLEACPDED

SEQ ID NO: 56703 - protein, 330 aa, Glycine max
  peptide (1)..(330): Ceres Seq. ID no. 13639302
MALKAASGSIPSADTSSADKEEEKSETYSHNMTEAMGAVLTYRHELGMNYNFIRPDLIVGSCLQTPEDVDKLRRIGVKTIFCLQQDSDLEYFGVDINAIREYAKTCNDIQHLRAEIRDFDAFDLRRRLPAVVSKLYKAINSNGGVTYIHCTAGLGRAPAVALAYMFWVLGYKLNEAHTLLQSKRSCFPKLDAIKSATADILTGLSKKSVTLSWEDKNCSTVEISGLDIGWGQRIPLNFDDKEGLWFLKRELPEGLYEYKYIVDGEWTCNSDELITSPNKDGHVNNFIQVLDDTSSVRASLRKRLTADDPDLTTDEQLRIKEFLEACPDED

SEQ ID NO: 56704 - protein, 299 aa, Glycine max
  peptide (1)..(299): Ceres Seq. ID no. 13639303
MTEAMGAVLTYRHELGMNYNFIRPDLIVGSCLQTPEDVDKLRRIGVKTIFCLQQDSDLEYFGVDINAIREYAKTCNDIQHLRAEIRDFDAFDLRRRLPAVVSKLYKAINSNGGVTYIHCTAGLGRAPAVALAYMFWVLGYKLNEAHTLLQSKRSCFPKLDAIKSATADILTGLSKKSVTLSWEDKNCSTVEISGLDIGWGQRIPLNFDDKEGLWFLKRELPEGLYEYKYIVDGEWTCNSDELITSPNKDGHVNNFIQVLDDTSSVRASLRKRLTADDPDLTTDEQLRIKEFLEACPDED

SEQ ID NO: 56705 - DNA, 875 bp, Glycine max
  misc_feature (1)..(875): Ceres Seq. ID no. 13595532
ccacgcagtttcgaatccgcaatgaaactcaaccacgtttgaaaaccatgtcaaacatccccacaacgctctcggagatttgcctcacccagtttcggcttgccatgtccatagcagacccgtggcccttctcaagaacccacccagcaagtcccaagtagcaccctcggtcctccttttcacttccattcattccaatacacaccacaccaaacacatctctctcaattcaaattaaggcacatgtccaagaaccgcggattcaacctcaggaggcgcctcatccgggtctcgaaatggatcttcaggaagatacggacgcgggctccacgcgagtaccattgcctgggtgactctcctccgtcacccatggtgaagctccttacgtggggccgcaagctgacagcgggtgccaagtcccgcttgaaagtggcgtccggatccggttatgcccaattaggaaccgatccggacccgagtgtgccgaaggggcacctggccgtgtacgtagggcagaaggacggcgagttgcaccgtgttctggtgccggtaatatacttcaaccaccctttgtttggagaattgctgaagcaggcggaggaggagttcgggttccaccacgaagggggaatcaccatcccgtgccggttcaccgagtttgaacgggtgaagacccgaattgcatccggatctcgcagaggcacccgtccgaaaagattggcctggcgctgaggactgaggtgatgctgaattgctgcccatcctgtaactcaacaaataatattgctttttaggatttttttttttcgtgttgttaattattttttttaacctcgtttaatccgtgaggtaaattttagctttcctgtttacct

SEQ ID NO: 56706 - protein, 162 aa, Glycine max
  peptide (1)..(162): Ceres Seq. ID no. 13595533
MSKNRGFNLRRRLIRVSKWIFRKIRTRAPREYHCLGDSPPSPMVKLLTWGRKLTAGAKSRLKVASGSGYAQLGTDPDPSVPKGHLAVYVGQKDGELHRVLVPVIYFNHPLFGELLKQAEEEFGFHHEGGITIPCRFTEFERVKTRIASGSRRGTRPKRLAWR

SEQ ID NO: 56707 - protein, 120 aa, Glycine max
  peptide (1)..(120): Ceres Seq. ID no. 13595534
MVKLLTWGRKLTAGAKSRLKVASGSGYAQLGTDPDPSVPKGHLAVYVGQKDGELHRVLVPVIYFNHPLFGELLKQAEEEFGFHHEGGITIPCRFTEFERVKTRIASGSRRGTRPKRLAWR

SEQ ID NO: 56708 - DNA, 1335 bp, Glycine max
  misc_feature (1)..(1335): Ceres Seq. ID no. 13639120
aaaacataactcaaccatggcaaagttcagttccagaaaaaaatcctccatttgggtccccaacggttgcatcttcttcctcggaggagcactcacaaccctccttctcctctggggtctatcctccttcataatccccatcccaaactctgacccagaactcaaccctgtctccacaaaactcagttccctccaattccccacaaacaccgactcaccagaaacaactttttacgacgaccccgaaacgagttacaccatggacaagcccatgcacaactgggacgagaagagaaaacagtggcttttgcatcatccttcattcaccgtcacgacacatgatagcaagatcctcgtcgtgacggggtcgcagccgaagcgctgccacaaccccatcggcgatcaccttctattaaggttcttcaagaacaaggttgactactgccgcctccacaactacgacataatttacaataacgccctattgcaccccaaaatgggatcatactgggccaagtacccggtgatccgagccgccatggtggctcacccggaggccgagtgggtctggtgggtcgactcggacgcggtcttcaccgacatggagttcactctccctctcaaccgctacaaggaccacaacctcgttgtccacggttgggaaaatctcgtacgtgaaaaccgtagctggacggggcttaacgccggcgttttcctcatgagaaactgtcagtggtcgttggattttatggacgtgtgggccagcatgggcccaatgtccccggagtatgaaaaatggggggaaaccttaaaatccacgttcaaggacaaggttcttccggactcggacgatcagacggcgctggcatatctgatcgcggttgagaacaaatgggcggacaagatctttctggagagtgagtactatttccaaggctactggttggagatttcgaagacttactataacgttagcgagaggtacgatgaggtggagagaaaggttaaaggattgaggaggaggcacgcggagaaagtgagtgaaagttatggtttgatgagggaggagtatttgaacgatgtgggagagtggaagaggcctttcatcacgcatttcactgggtgccaaccctgcaatggacaccataaccctgcgtatgatgctatggattgctggaacagcatggagagggctcttaacttcgctgataatcaggtgttgcgcgtctatggttacatgcgtaaggatctcttgaataaggccatttcacctataccttttgattatcccaatgttgtgtagatttactcaggtaaataaataatgatgaaatt

SEQ ID NO: 56709 - protein, 433 aa, Glycine max
  peptide (1)..(433): Ceres Seq. ID no. 13639121
KHNSTMAKFSSRKKSSIWVPNGCIFFLGGALTTLLLLWGLSSFIIPIPNSDPELNPVSTKLSSLQFPTNTDSPETTFYDDPETSYTMDKPMHNWDEKRKQWLLHHPSFTVTTHDSKILVVTGSQPKRCHNPIGDHLLLRFFKNKVDYCRLHNYDIIYNNALLHPKMGSYWAKYPVIRAAMVAHPEAEWVWWVDSDAVFTDMEFTLPLNRYKDHNLVVHGWENLVRENRSWTGLNAGVFLMRNCQWSLDFMDVWASMGPMSPEYEKWGETLKSTFKDKVLPDSDDQTALAYLIAVENKWADKIFLESEYYFQGYWLEISKTYYNVSERYDEVERKVKGLRRRHAEKVSESYGLMREEYLNDVGEWKRPFITHFTGCQPCNGHHNPAYDAMDCWNSMERALNFADNQVLRVYGYMRKDLLNKAISPIPFDYPNVV

SEQ ID NO: 56710 - protein, 428 aa, Glycine max
  peptide (1)..(428): Ceres Seq. ID no. 13639122
MAKFSSRKKSSIWVPNGCIFFLGGALTTLLLLWGLSSFIIPIPNSDPELNPVSTKLSSLQFPTNTDSPETTFYDDPETSYTMDKPMHNWDEKRKQWLLHHPSFTVTTHDSKILVVTGSQPKRCHNPIGDHLLLRFFKNKVDYCRLHNYDIIYNNALLHPKMGSYWAKYPVIRAAMVAHPEAEWVWWVDSDAVFTDMEFTLPLNRYKDHNLVVHGWENLVRENRSWTGLNAGVFLMRNCQWSLDFMDVWASMGPMSPEYEKWGETLKSTFKDKVLPDSDDQTALAYLIAVENKWADKIFLESEYYFQGYWLEISKTYYNVSERYDEVERKVKGLRRRHAEKVSESYGLMREEYLNDVGEWKRPFITHFTGCQPCNGHHNPAYDAMDCWNSMERALNFADNQVLRVYGYMRKDLLNKAISPIPFDYPNVV

SEQ ID NO: 56711 - protein, 347 aa, Glycine max
  peptide (1)..(347): Ceres Seq. ID no. 13639123
MDKPMHNWDEKRKQWLLHHPSFTVTTHDSKILVVTGSQPKRCHNPIGDHLLLRFFKNKVDYCRLHNYDIIYNNALLHPKMGSYWAKYPVIRAAMVAHPEAEWVWWVDSDAVFTDMEFTLPLNRYKDHNLVVHGWENLVRENRSWTGLNAGVFLMRNCQWSLDFMDVWASMGPMSPEYEKWGETLKSTFKDKVLPDSDDQTALAYLIAVENKWADKIFLESEYYFQGYWLEISKTYYNVSERYDEVERKVKGLRRRHAEKVSESYGLMREEYLNDVGEWKRPFITHFTGCQPCNGHHNPAYDAMDCWNSMERALNFADNQVLRVYGYMRKDLLNKAISPIPFDYPNVV

SEQ ID NO: 56712 - DNA, 870 bp, Glycine max
  misc_feature (1)..(870): Ceres Seq. ID no. 13595263
ttacctagaacatcctaatcgaaaaataaaaaccctaaacacaaccaccgtcctcaaccaccatggcagagcgtgaccgccgcgaacgagagagggatagagaccgtgagcgcgaccgcgatagacgccgtgacagagacgaccgtgaccgtgaccgtgggattcgaagcaagaagtcccgatctcgtactccagaccaccaccaccacgctcgccctcctcgccacgtgcgctctcccgagaggtatcgatcccggtcccgctccgctgaccgtgaccgtcatcgccaccacagcaggcgcaggactccctctccagatcccccgccgcggaaacggcctcgccatggctcagcggaagacgacaaggaaaggagtcgcaaacgagaggagactgcgacggagcaagctaagaagaaggagaataaagaaccaagcggcggcggaggaggagaagcggaaacggatgtgaatgagatagagatgatgaagatgttagggatccctactggtttcgactccacgaaagggaagcatgtcgaaggcgctgacgtcagcgggattagggctgttaccaagcgccagccgaggcagtacatgaaccgtcgcggtggctttaaccgtcctttgcctgctgagcgtaaccgctaaaggtccttgtcaatgctgtcttaaacacgaggtcagatgatgagagttcgagcttgtatttactgcaattcttccccagacgctgttctaatgtccttagagaacaaacatgtactctctggagttagaaacatcttatctctttttaggggtttagagttgtgaatgatgttatgtgtattaatttcccggctctaacttttagactatgatttagttg

SEQ ID NO: 56713 - protein, 195 aa, Glycine max
  peptide (1)..(195): Ceres Seq. ID no. 13595264
MAERDRRERERDRDRERDRDRRRDRDDRDRDRGIRSKKSRSRTPDHHHHARPPRHVRSPERYRSRSRSADRDRHRHHSRRRTPSPDPPPRKRPRHGSAEDDKERSRKREETATEQAKKKENKEPSGGGGGEAETDVNEIEMMKMLGIPTGFDSTKGKHVEGADVSGIRAVTKRQPRQYMNRRGGFNRPLPAERNR

SEQ ID NO: 56714 - DNA, 913 bp, Glycine max
  misc_feature (1)..(913): Ceres Seq. ID no. 13595270
aaaaacccaaccaaacccctctccccctccgcctccccaccatggctcccggtgccctagcccgcctcatcatcggccgccgcgcagcgtccccgctcctggcgcgccccttcgccgcgaaggcccgcgcgccgcagcgggcgccggagccggagcccctgtcggaggaggacgacgacttcaccagcggcggggaggccgcccccatccccaccgagggcatcagcaagccgctcgccggcatcctcaaggagctcgggaagagggtccccgagtccctcctgaagacccgcctcgaggacaatggattcgccctcaagtacatcccatggcaccttgctaacaaaattctgaatatgcacgctccagaatggtctggggaggttcgcaacattgtctactcatctgatgggaaatctgtatctgttgtctatcgtgtgactctctatggaactgatgcagagatctatagagaggctactggaactgcttctgttgaggaaaaaggctttggagatcctgtccagaaggctgaaggaatggcttttcgccgagcttgtgcccgccttggtcttggacttcatctctatcatgaagatatgtcatagatgcttactgatcattgtttgtggtctggacttctgcttcatgtctcttagtgcgcggacacttgtcgttcagtaggctacccttttgtgctgaacatgatatggatgtgccggcatataaaactaagtattctagaatgtcgtttagttgtytaatgtaagctacaaaggtggttgatgttctgaatggtgtgcttataatgagccagcttgtttcattttttwaaaaaaaaaaaaaaaaaaaaaaaaaaaaaaaaacccaaaaaaaaaaaaaaaaaagctgtttaaacwcratammgtcgacc

SEQ ID NO: 56715 - protein, 201 aa, Glycine max
  peptide (1)..(201): Ceres Seq. ID no. 15221519
KPNQTPLPLRLPTMAPGALARLIIGRRAASPLLARPFAAKARAPQRAPEPEPLSEEDDDFTSGGEAAPIPTEGISKPLAGILKELGKRVPESLLKTRLEDNGFALKYIPWHLANKILNMHAPEWSGEVRNIVYSSDGKSVSVVYRVTLYGTDAEIYREATGTASVEEKGFGDPVQKAEGMAFRRACARLGLGLHLYHEDMS

SEQ ID NO: 56716 - protein, 188 aa, Glycine max
  peptide (1)..(188): Ceres Seq. ID no. 15221520
MAPGALARLIIGRRAASPLLARPFAAKARAPQRAPEPEPLSEEDDDFTSGGEAAPIPTEGISKPLAGILKELGKRVPESLLKTRLEDNGFALKYIPWHLANKILNMHAPEWSGEVRNIVYSSDGKSVSVVYRVTLYGTDAEIYREATGTASVEEKGFGDPVQKAEGMAFRRACARLGLGLHLYHEDMS

SEQ ID NO: 56717 - protein, 113 aa, Glycine max
  peptide (1)..(113): Ceres Seq. ID no. 15221521
KTQPNPSPPPPPHHGSRCPSPPHHRPPRSVPAPGAPLRREGPRAAAGAGAGAPVGGGRRLHQRRGGRPHPHRGHQQAARRHPQGAREEGPRVPPEDPPRGQWIRPQVHPMAPC

SEQ ID NO: 56718 - DNA, 1358 bp, Glycine max
  misc_feature (1)..(1358): Ceres Seq. ID no. 13639124
aaacaacacacgacacgaaacgaccatcacctctctagtggctactggctagtgcgaaaggaagatggcgactaagctcgcagcgctcgtcgtcttggccgcgttcctcgccgggccggcggcgtgcgacggcgccagcatttgcttcaacggctggctgaggctgcccacctacaacgcggcgctctgtcgccccaggccggacgttcagacgcggcagaggagacctgctccctcggggtcaggactcagctccggctattacaacaccaggtgccctagcgcggagaagatcgtcacggatgccgtgaagaaggccgtggatgcgaaccctggcattggtgccgggctcatccgtctcttcttccatgactgcttcgttcggggctgcgatggttccgtcctcctcaacacgaccaactcgaagaacagcgacacggagagggaaggccctcccaaccagaacagcctccgagggttcgaggtgattgacgaggccaaggcggcgatcgaggctgcctgccccgacacagtctcatgtgccgacatcgtcgcctatgctgcccgcgacgcgtcctacttcctcagcgaccgcaagatcaacatccagatgccgggcggccgctacgacggccgcgagtcattctccaacgagacagaccagctgcctgggcccttctctaacctcacggcgcttcaggggagtttcgcggccaagggactcacctccgacgagatggtcacgctctccggcgcgcacaccatcggccgcgcccgctgcttgttcttctccacccgtttctctgagatggaaccggtatttgccgccaagcttagggcccagtgcaacggcaacgacggcaccaacgtgaaccaagatgatgtgacccccaacatcctggataagcagtactaccagaacgtggtcgacaagaaagtgttgttcacctcagatgccgtgctcaactcgacggaaacgataacgcaggtgacagaaaacgcgaacatgaccggggcgtgggagaggaagttcgagaaagccatggagactatggggaaaatcggggtcaagaccataggcaaccagcaaggcgcagagatcaggaaggtatgctggagagtcaacaactaatacgggccagtagtaatgcctggtagttggccggctccatgtctggatcccgccatggaggagatctaactttgcctagctggtgccgttgttggttttctcatactaaaactctgtatgtgtgtgtgttttggtgtatcatactaaaactctgtatgtgtgtgtgttttgatatattaataaagatataataatatataagtaaccgtgtatgttcacgtacggc

SEQ ID NO: 56719 - protein, 355 aa, Glycine max
  peptide (1)..(355): Ceres Seq. ID no. 15220456
MATKLAALVVLAAFLAGPAACDGASICFNGWLRLPTYNAALCRPRPDVQTRQRRPAPSGSGLSSGYYNTRCPSAEKIVTDAVKKAVDANPGIGAGLIRLFFHDCFVRGCDGSVLLNTTNSKNSDTEREGPPNQNSLRGFEVIDEAKAAIEAACPDTVSCADIVAYAARDASYFLSDRKINIQMPGGRYDGRESFSNETDQLPGPFSNLTALQGSFAAKGLTSDEMVTLSGAHTIGRARCLFFSTRFSEMEPVFAAKLRAQCNGNDGTNVNQDDVTPNILDKQYYQNVVDKKVLFTSDAVLNSTETITQVTENANMTGAWERKFEKAMETMGKIGVKTIGNQQGAEIRKVCWRVNN

SEQ ID NO: 56720 - DNA, 1259 bp, Glycine max
  misc_feature (1)..(1259): Ceres Seq. ID no. 13639236
atcgcgacgagctctcctggcccatttccctcgctgctgctgctaatcccgacccgaccgtcaccgccggcctttgcatcaaacgccctgacagcgcgcgtcgcatcgccacaacacgacggcctcgctcccttgatcgcctccctcgctccctccctgcctacttgcgtgtctacctatctacctgcctacctataccctataccctaatacaccacgcccatcgcccgcgacctgcagcttcgtccggcatctcttcctcacattcacaatggcatcaaagtttctccgagaatacaagttggtggtagtcggcggcggtggagtcggaaagtcgtgtttgactatccagctgatccagagccacttcgtagacgagtacgacccgaccatcgaggattcgtaccgcaagcagtgtgtcattgacaatgaggtcgccctgctcgatgtgctcgatacagcgggacaggaggagtactcggccatgcgcgagcagtacatgcgcacaggagagggcttcctgctcgtctactcgataaccgacaggcagagcttcgaggagattatgacgttccagcaacaaatcctgagagtaaaggacaaggactacttccccatgatcgtcgtcggcaacaagtgcgatctcgacggcgagaggcaagtgtcgacacaagagggccagactctggcgcggaactttggctgcaaattcatcgagacttcggcgaaatcccgcatcaacgttgacaacgccttctacgacatcgtccgagaaatccgcagatacaacaaggaaatgtcctcgtacacaggcgcccctggctcaaacggcaacgggccccagaagacgacattcgacacggacgaccaggcggagaagaagggatgctgtggatgcgtggtaatgtaaggatatggaagccactgtcgttgttgtcgttgttgtcgcgcacgctgtcagagagatacctacaccgctgggttcggttacccgccctggccattggcggtgctgcttggtccagcagaagaaaacacgcgatgctgctgttgcgtactgccagtacaccttctcttcgatactgtcactttgggttcgcattacggggtaacggattcacgtctgctggatgcgcctccgaacaccctacttctactactggtatcgactccatctttcctatctggtggcgctcttcgtattcgccttcatcatctatctagaccgatttctttatggcattttgatcggtactctg

SEQ ID NO: 56721 - protein, 212 aa, Glycine max
  peptide (1)..(212): Ceres Seq. ID no. 15219417
MASKFLREYKLVVVGGGGVGKSCLTIQLIQSHFVDEYDPTIEDSYRKQCVIDNEVALLDVLDTAGQEEYSAMREQYMRTGEGFLLVYSITDRQSFEEIMTFQQQILRVKDKDYFPMIVVGNKCDLDGERQVSTQEGQTLARNFGCKFIETSAKSRINVDNAFYDIVREIRRYNKEMSSYTGAPGSNGNGPQKTTFDTDDQAEKKGCCGCVVM

SEQ ID NO: 56722 - protein, 141 aa, Glycine max
  peptide (1)..(141): Ceres Seq. ID no. 15219418
MREQYMRTGEGFLLVYSITDRQSFEEIMTFQQQILRVKDKDYFPMIVVGNKCDLDGERQVSTQEGQTLARNFGCKFIETSAKSRINVDNAFYDIVREIRRYNKEMSSYTGAPGSNGNGPQKTTFDTDDQAEKKGCCGCVVM

SEQ ID NO: 56723 - protein, 136 aa, Glycine max
  peptide (1)..(136): Ceres Seq. ID no. 15219419
MRTGEGFLLVYSITDRQSFEEIMTFQQQILRVKDKDYFPMIVVGNKCDLDGERQVSTQEGQTLARNFGCKFIETSAKSRINVDNAFYDIVREIRRYNKEMSSYTGAPGSNGNGPQKTTFDTDDQAEKKGCCGCVVM

SEQ ID NO: 56724 - DNA, 973 bp, Glycine max
  misc_feature (1)..(973): Ceres Seq. ID no. 13595535
aattagaataaatcccgtgttttttttcttcgcccctacagaacccatgtcgattaggttttctaaattgctcttccatcttcttccttagagtaggaaatgttaccagttaccaaattatcatcttaaaccctccattactctctcacacatgatctatattcaatgtgatttctggatctgaggcggtggagattcatctataaaaagatccgaaaatcagtctgaaaatgggcaaatacatgaagaaatcgaagattaccaacaacgatacggagcccaccgagccaactttcctgggagttcgcaccagggacgctaaaaccctagctctgaagcggctcaattcctccgcctctgattccgctctagctggagactcttcttgctaccttcagctccacagccgccgcctcgagaaacccccggcgctgacggagccgaaacagccaccgagaattaaggagcctggctcgaagggtcgggttagctccggtttgggttcggttcatgtagctcagagctgtaacggagatgattggtttgggaagtctgaagcttttttgtggagagaacagtcctgattttcaatcgatacaaagtgaaagtactgtggtgtggcgtcatgttcatgggacctagctaagctgttgagaagaactacgagctacctgatgggcaagtgataacaattggttctgagctgttccattgtcctgaggaccaaggttatttaccagccatctatgattcatatggagaatactggtatccatgaaacaactttaactccttaatgaagtgtgatgtagacatcagaaaggatgtgtacggtataacatcgtgaccagtggtggaagcacattttctctgagatcgctaacaatttgagctaagatatcacgtcttggtctacaagcagcatgaagatcatagttgctactcctcctgagagaaataccctgtcttgatt

SEQ ID NO: 56725 - protein, 117 aa, Glycine max
  peptide (1)..(117): Ceres Seq. ID no. 13595536
MGKYMKKSKITNNDTEPTEPTFLGVRTRDAKTLALKRLNSSASDSALAGDSSCYLQLHSRRLEKPPALTEPKQPPRIKEPGSKGRVSSGLGSVHVAQSCNGDDWFGKSEAFLWREQS

SEQ ID NO: 56726 - protein, 113 aa, Glycine max
  peptide (1)..(113): Ceres Seq. ID no. 13595537
MKKSKITNNDTEPTEPTFLGVRTRDAKTLALKRLNSSASDSALAGDSSCYLQLHSRRLEKPPALTEPKQPPRIKEPGSKGRVSSGLGSVHVAQSCNGDDWFGKSEAFLWREQS

SEQ ID NO: 56727 - DNA, 1875 bp, Glycine max
  misc_feature (1)..(1875): Ceres Seq. ID no. 13595556
atttgaaaatcttgcttcccccattcatattccaactattattattattcttttcttcaattccagattgaagcttttcacatcaacaataccctttagagccccaaacccattttcccactcttcattttcgcctccttcaacaggcaatgtaaacatgagtatttgcttttctactagtcagtcctcaataaatgctgttgtcctgaaaggtcgtactccgctgctgatgagcagtaacattcatggcctttggtcccaaggaatatcgacttcaatttcttccagtttgtctcctgggaagtcagagataagtcatgttggtctttctgtttgcacaaaattgtcttgctccactgttatgggccaaacaattagaggaggtttccttggatcatgctgctccaagcaaaggggcaatcctcgattctttagttctgtagtacctcggaagaggtatcatgaaatttcattggcatgccaaactataaatatgaggcttttggtacctaaacaaaatatgatgcgcaaagttaagtgtaatttgggatcagtaagttggccgcggggatgtgcttcagttggcttaatttttggattacttgtatgtaatttaagttctgaacctgctcatgctgagtcacattctgaaaatgaaaataggaaagatgactgcaacgagtatgagtcaaatgttaaagtcttgcatgggaagaaagtttatactaactattctgtaattggaataccaggggatggaagatgcttgttccgctctgttgctcgtggggcctgtttgaggtctggaaagccccctcctaatgaaagcattcagagagagctggcagatgatttacgagccagagttgctgatgagtttatcaaaagaaaggaagagaccgaatggtttgttgaaggtgattttgatacatatgtttcacaaataaggaagcctcatgtgtggggaggtgaacccgaattgttcattgcatcacatgttttgcagatgcctatcacagtatacatgtatgataaagatgctggtggtttgatatcaattgctgagtatggtcaagagtacggcaaagaaaacccaattagagttctctaccatggctttggtcattatgatgcattagagattcctagaaggaagggtcctaagccaagactgtagcatttcatatttaaaatgtggaagagattaaagcttgtattggttcccttcagtaacattcataatgtcatctataggtcaagtttcctgaaaaccttatgccttttatgtcttggaggacgtttggtccaaggcctcagtgaacagtgatattcactttattgctgtgccatgcacacggttgtttatgttggtctgaagaaagagagcctttgacttcaggtggaccttaaaggttcaaactatccactaacttctgtaagccctttctgtgaaaggtagaaataatggtatacccttctgtctctgagtccaccactatggaggggtgcatggatcttggtactgtactgcttccattgagaaaatatatgtaatggctgacaaagctgaaagttggataattatcgagagttcattaatatcaagtacatggggggtaagttgtgtttagggaattactagtgttttaggttttacttaaccaaacttntttgtttgccctattcactttttcatctcttaaanactttcatntccctcatttgcctcacagggtntcnccatttgaatatgttgtagtcaagtgtntcacatttttntgttagtaacaaggatgggtatcaaagcaaaaatatattgtagctaactgaacttaagctaattaaaacttatcaatttgttaacattggttatgg

SEQ ID NO: 56728 - protein, 391 aa, Glycine max
  peptide (1)..(391): Ceres Seq. ID no. 13595557
FENLASPIHIPTIIIILFFNSRLKLFTSTIPFRAPNPFSHSSFSPPSTGNVNMSICFSTSQSSINAVVLKGRTPLLMSSNIHGLWSQGISTSISSSLSPGKSEISHVGLSVCTKLSCSTVMGQTIRGGFLGSCCSKQRGNPRFFSSVVPRKRYHEISLACQTINMRLLVPKQNMMRKVKCNLGSVSWPRGCASVGLIFGLLVCNLSSEPAHAESHSENENRKDDCNEYESNVKVLHGKKVYTNYSVIGIPGDGRCLFRSVARGACLRSGKPPPNESIQRELADDLRARVADEFIKRKEETEWFVEGDFDTYVSQIRKPHVWGGEPELFIASHVLQMPITVYMYDKDAGGLISIAEYGQEYGKENPIRVLYHGFGHYDALEIPRRKGPKPRL

SEQ ID NO: 56729 - protein, 339 aa, Glycine max
  peptide (1)..(339): Ceres Seq. ID no. 13595558
MSICFSTSQSSINAVVLKGRTPLLMSSNIHGLWSQGISTSISSSLSPGKSEISHVGLSVCTKLSCSTVMGQTIRGGFLGSCCSKQRGNPRFFSSVVPRKRYHEISLACQTINMRLLVPKQNMMRKVKCNLGSVSWPRGCASVGLIFGLLVCNLSSEPAHAESHSENENRKDDCNEYESNVKVLHGKKVYTNYSVIGIPGDGRCLFRSVARGACLRSGKPPPNESIQRELADDLRARVADEFIKRKEETEWFVEGDFDTYVSQIRKPHVWGGEPELFIASHVLQMPITVYMYDKDAGGLISIAEYGQEYGKENPIRVLYHGFGHYDALEIPRRKGPKPRL

SEQ ID NO: 56730 - protein, 315 aa, Glycine max
  peptide (1)..(315): Ceres Seq. ID no. 13595559
MSSNIHGLWSQGISTSISSSLSPGKSEISHVGLSVCTKLSCSTVMGQTIRGGFLGSCCSKQRGNPRFFSSVVPRKRYHEISLACQTINMRLLVPKQNMMRKVKCNLGSVSWPRGCASVGLIFGLLVCNLSSEPAHAESHSENENRKDDCNEYESNVKVLHGKKVYTNYSVIGIPGDGRCLFRSVARGACLRSGKPPPNESIQRELADDLRARVADEFIKRKEETEWFVEGDFDTYVSQIRKPHVWGGEPELFIASHVLQMPITVYMYDKDAGGLISIAEYGQEYGKENPIRVLYHGFGHYDALEIPRRKGPKPRL

SEQ ID NO: 56731 - DNA, 635 bp, Glycine max
  misc_feature (1)..(635): Ceres Seq. ID no. 13595610
gatgaagaccgaatccccgcgtcatcttcgtaaccctctgctcgtcctcctcttcctcgcagcagcagcagcagcgtcggcagcccccgtcgtccagatcgccatggcggccgagccggagcaggcgcccgcggcgcaggaggcggccgtgcacatcgtctacgtggaccgccccgaggacgccgaccccgaggagttccacatccgcacccttgcccccgtcctcggcagcgaggagaaggccaggggcgcggtcctctaccactacaagcacgccgccagcggattctccgcaaagctcaccaccgagcaggtcgaggacctcaagaagcaaccaggtgtccttcaggttgtgccgagccagacctaccagctccatggaaatgagggtggacatgccagcacaacccgcaccatgggccttatgtgaaagccccgggtaggctctgttcttctaatgtgggaatggtcgcatctcatggctgtaacctaagaataagagatgtatccacttgactttgaagggatccagttcctgaagtgtgtaaatgtaatgaattaatgcatgatggcgaacaaatgtgctgatctaatctcgtttggctacaagtttgaattaatgtgatggcaaactc

SEQ ID NO: 56732 - protein, 142 aa, Glycine max
  peptide (1)..(142): Ceres Seq. ID no. 13595611
MKTESPRHLRNPLLVLLFLAAAAAASAAPVVQIAMAAEPEQAPAAQEAAVHIVYVDRPEDADPEEFHIRTLAPVLGSEEKARGAVLYHYKHAASGFSAKLTTEQVEDLKKQPGVLQVVPSQTYQLHGNEGGHASTTRTMGLM

SEQ ID NO: 56733 - protein, 108 aa, Glycine max
  peptide (1)..(108): Ceres Seq. ID no. 13595612
MAAEPEQAPAAQEAAVHIVYVDRPEDADPEEFHIRTLAPVLGSEEKARGAVLYHYKHAASGFSAKLTTEQVEDLKKQPGVLQVVPSQTYQLHGNEGGHASTTRTMGLM

SEQ ID NO: 56734 - DNA, 1370 bp, Glycine max
  misc_feature (1)..(1370): Ceres Seq. ID no. 13582350
acactacaactaaacacactagctattagctatagctagaagtccctccaatccctctttgtctttgtgcttttctagttccttccaaaataccaacaaaagcaaagacaatgagttgccaagcatggcccgaacccatagttcgagtccaatccttagctgaaagtggcctaagttcaatcccttcacgctacattaggcctcactcccaaagaccctccaataccacttcttttccaactcctaaaccttttcaaactgatcatcatcatggtcatgatcagaaaacttccgatcatgaccatgatcatgatcatgttaacattcccgtcattgacctgaaacatgttttctcggaggatccgatcctccgagaacaagtgtttgggcaggtggaccaggcatgtcgggagtgggggttcttccaggtggtgaaccatggtgttagccatgagttgatgaagagttctagggaactgtggcgtgagttcttcaaccagccacttgagatgaaggaagagtatgcaaactcccccaccacttatgagggatatggtagtcgcttgggagtgcagaaaggtgccaccttggattggagtgactacttctttctccattacatgcctccttcacttaggaaccaagctaagtggcctgcatttccagaatccttgaggaaagtgattgctgaatatggtgaaggagtggttaagctaggaggaaggatactcaagatgatgtcaataaaccttggtttgaaagaagatttccttctcaatgcatttgggggagagagtgaggttggtgcatgcctaagggtgaatttctatccaaagtgccctcaacctgacctcacttttggactctcccctcactcagatcctggtggcatgaccattcttctccctgatgattttgtgtctggccttcaagtaagaagaggagatgaatggattacagttaagcctgtcccaaatgccttcatcatcaacattggtgaccaaattcaggtgctgagcaatgcaatatacaagagtgtagaacacagggtgattgtgaactcaaacaaagatcgtgtgtccttggccttgttctacaacccgaggagtgatttactcattcaacctgccaaggagcttgtgacagaggagaagccagccttgtactcaccaatgacctatgatgaatacagactttacattaggctaaatggaccttgtggaaaggcccaagttgaatcattggcctcccaaacatgagttaatagtgtgaattaatagcaagtttggtttctcaatgtgattttctatgtttcagatgtcattttaagaagttaataaaaagttaattgttataacttctatattctc

SEQ ID NO: 56735 - protein, 382 aa, Glycine max
  peptide (1)..(382): Ceres Seq. ID no. 13582351
MSCQAWPEPIVRVQSLAESGLSSIPSRYIRPHSQRPSNTTSFPTPKPFQTDHHHGHDQKTSDHDHDHDHVNIPVIDLKHVFSEDPILREQVFGQVDQACREWGFFQVVNHGVSHELMKSSRELWREFFNQPLEMKEEYANSPTTYEGYGSRLGVQKGATLDWSDYFFLHYMPPSLRNQAKWPAFPESLRKVIAEYGEGVVKLGGRILKMMSINLGLKEDFLLNAFGGESEVGACLRVNFYPKCPQPDLTFGLSPHSDPGGMTILLPDDFVSGLQVRRGDEWITVKPVPNAFIINIGDQIQVLSNAIYKSVEHRVIVNSNKDRVSLALFYNPRSDLLIQPAKELVTEEKPALYSPMTYDEYRLYIRLNGPCGKAQVESLASQT

SEQ ID NO: 56736 - protein, 266 aa, Glycine max
  peptide (1)..(266): Ceres Seq. ID no. 13582352
MKSSRELWREFFNQPLEMKEEYANSPTTYEGYGSRLGVQKGATLDWSDYFFLHYMPPSLRNQAKWPAFPESLRKVIAEYGEGVVKLGGRILKMMSINLGLKEDFLLNAFGGESEVGACLRVNFYPKCPQPDLTFGLSPHSDPGGMTILLPDDFVSGLQVRRGDEWITVKPVPNAFIINIGDQIQVLSNAIYKSVEHRVIVNSNKDRVSLALFYNPRSDLLIQPAKELVTEEKPALYSPMTYDEYRLYIRLNGPCGKAQVESLASQT

SEQ ID NO: 56737 - protein, 249 aa, Glycine max
  peptide (1)..(249): Ceres Seq. ID no. 13582353
MKEEYANSPTTYEGYGSRLGVQKGATLDWSDYFFLHYMPPSLRNQAKWPAFPESLRKVIAEYGEGVVKLGGRILKMMSINLGLKEDFLLNAFGGESEVGACLRVNFYPKCPQPDLTFGLSPHSDPGGMTILLPDDFVSGLQVRRGDEWITVKPVPNAFIINIGDQIQVLSNAIYKSVEHRVIVNSNKDRVSLALFYNPRSDLLIQPAKELVTEEKPALYSPMTYDEYRLYIRLNGPCGKAQVESLASQT

SEQ ID NO: 56738 - DNA, 1541 bp, Glycine max
  misc_feature (1)..(1541): Ceres Seq. ID no. 13595560
actgcctcagtgttctccataacaccataaaacactgacccaatctttctcctcctcctccctcacaatctgacacactaacacaccaaaattcaaattacattaccaaaaaaagaaaaatggtgggtacatatgcatatacatatacatatagactactatagagtgaaagtgatatacttcttgctattcaatttttatgtctgttttgaagttaattctgttcactctcctggcgcaaacacagatcaaaattcaaattgcaaagtaaaaaaaaaaaaccatgttcgtttcttcttcatcgcatgttccccgttggctccaagttctcctcacggagaagttctacaacgtttgcataattcacgaagaggcaaagaagaacgagaagaacgtttattgcttggattgttgcattagcctctgccctcactgtttgtccccccaccgctctcatagactcttgcagattagaagatatgtgtatcacgatgttataaggttggatgatgctgcaaagttaattgactgcaattccgttcaatcctacacaaccaacagcgcaaaagtggtatttttaaaccaaaggccacagacaaggaacttcagaggctccggcaatttctgcagcacctgtgacagaagcctgcaagacccataccacttctgctccctctcttgcaaggtctttcctttggtcactcccattttcgccctctcaccaacgttaccattattctttattcttattatatatattattattattactattctttttttctcttatttatgtaatgtgtgtcttctaataatgtttatgtttatgtttatttcctcaatttttttttctcgtttttgtttttgttttaaacagataaattatctcgtcagaacaacggactctctctgcggctacctcttcgagtgcaactacctgccgctactggaatctgggctcgacgatggtctaatgatgactcctgattcggttctcgaaccgtctggttcaggggggtacggaggggtggattgtaggaccaccttggcttgcactgccaccaccgagattgtgaggaagaagaggaccggcggtgccgctttccggcttccgttccggccggcgtgctcgccggtctcggaaatctcggcgtgtctcatgaaccggaggaaagggaacccccagcgggccccactccattgaagaacttgagagagagggtgagtttttttttatatgaaaagagaaaaaaaaacgtttattaaatattaatattctaaatactgttattattattatggagtttaaatctggggttggaacttactatacctttacagggagaaaaaaataacctcctagttttgtagagattatcaccctctgctttgttgctgctgtgtatctatctacccggattgttagaatttattgaggtttattactgcttctgttatagtactagtatatataatttgataatttgaaaraamaamwaaaaaaagyttatcrataccgtcsacctcsagggggggcccgg

SEQ ID NO: 56739 - protein, 306 aa, Glycine max
  peptide (1)..(306): Ceres Seq. ID no. 15221611
MFVSSSSHVPRWLQVLLTEKFYNVCIIHEEAKKNEKNVYCLDCCISLCPHCLSPHRSHRLLQIRRYVYHDVIRLDDAAKLIDCNSVQSYTTNSAKVVFLNQRPQTRNFRGSGNFCSTCDRSLQDPYHFCSLSCKVFPLVTPIFALSPTLPLFFILIIYIIIITILFFSYLCNVCLLIMFMFMFISSIFFSRFCFCFKQINYLVRTTDSLCGYLFECNYLPLLESGLDDGLMMTPDSVLEPSGSGGYGGVDCRTTLACTATTEIVRKKRTGGAAFRLPFRPACSPVSEISACLMNRRKGNPQRAPLH

SEQ ID NO: 56740 - DNA, 2214 bp, Glycine max
  misc_feature (1)..(2214): Ceres Seq. ID no. 12611726
aaaaacatggacgaatggcgcgccaccatcaaaatggatcacagaacccaacgaacttagaaaacctaaccgagtcctccatcagtcatattcccatcgaccgttcagaatgattgatggtagcgatcatgcaacagcagcagcagcatcaacagcaacagcagaacccctctgcactggtgccacctcagctcaagaatccccaatcctccaccacaaccaccaccgccaccaccactccccttaggtcaccctccgcccagtcgccgctctccgtcgtccaacccatccggcaacccccacccccctctcatccggtggtgccggttacgacggtggagcccggtctgacggcggtgccgacgtgtccgctggtcagagtccggctctcggacattgccccctatgacggggcaccagggggaccctatctgagagcaatggaggcactgtgtgggtctctgttgcggcacaatgctgctttgatcgaattggggaacgaagacactgctctgatgcgatgcggcttggaaggtgcgaggttgttcttcagaagtagggcccaccttggttctggcaagggcagccgtggggtttacatgtacagagcaggaagggctttggaggattgggattcttctcccccttgcatggctgatattttcaggtgcatgggaaaggcatctcgatccgccttgtgtgccattgcgaggcatttgcgtcttagaagcgatgtttttaaccatttgcttgatgatgctccattgcctgctaatgaggtgtcttcgtcggttcttgttgtgacctactcacatgcttctttgcaaaatggaaggggtgccattggaggcagtaagcctaccatgaatggtgaagttgagaagggattgttgacgttgatatcttctgacactcctggtcttcaggtatgtgatcccagtggtcgatggtatctggcagacagtgggtttgggcctggagatcttttacttataacaggcaaggcacttagccatgctactgctggcctatgtcctgctgcatcatatagagcttctcctgattattttctgagtcctaatggtggaggaaggtcttctcttgcatataggctcatgccacagggcaatgctatattagattgttccccaattgcagcagctggccatgttattccccaaagctatgttcgaatatctgtaagccaatttatggatgaccttgctgccgaagaactgataggcagcagatgtgataatgctgatgctgctgctcaacacaatgtgaataaggagccatcattaagaagtgttctatcagatcctttatctggcacattccttgaagatgccatgcttgtctcatgtggacattcttttggtggtctcatgctgaggagagtcattgaaacgtcaaaatgtactctctgcaatgtggaaattgaaactggttctttgatccctaatcatgctcttagagctgcagcagctgctgtcaagcatgaggatgatcggaggttatttcgtaatgccgctctccgaaagcggcggaaagaaatgggtgaccaaatggattcaatgagaagagtgaatggggaaaatggagattttactgctgccgatggacttcagcggggagtacaatatccatttttggtaaatgagaaagttgttattaagggcaacaggagaacaccagaaaaatttgttgggaaagaagctgtgattacatctcagtgtctcaatggctggtatttgctcaagattattgaaactggagagaatgtccgcctgcagtaccgttctcttaggaagctcttaaactcaccagcggaccagtgcccctcccagccaattcaaaatagcagctcttaaaatagatttattgtaggttttccttctttcttttttcctccaccagaaaaaggaaacttttgtagtcttgatcctttgaagcaaagaattgactcatctagtcttgatctatgattgtaaagaattacattgactggtccggctccttatagcatgtgatagaggtttataatgtatcaacgaggttatttgtgtagatgccaatgctaggtcggcttataattattgtaaagaagaaagcaggcaaagataaattagatagcatgtaaattgtagcttgcacttactgaaatggatcatatgtttaattttatttattttgcaactattcagtttttgt

SEQ ID NO: 56741 - protein, 585 aa, Glycine max
  peptide (1)..(585): Ceres Seq. ID no. 12611727
MVAIMQQQQQHQQQQQNPSALVPPQLKNPQSSTTTTTATTTPLRSPSAQSPLSVVQPIRQPPPPSHPVVPVTTVEPGLTAVPTCPLVRVRLSDIAPYDGAPGGPYLRAMEALCGSLLRHNAALIELGNEDTALMRCGLEGARLFFRSRAHLGSGKGSRGVYMYRAGRALEDWDSSPPCMADIFRCMGKASRSALCAIARHLRLRSDVFNHLLDDAPLPANEVSSSVLVVTYSHASLQNGRGAIGGSKPTMNGEVEKGLLTLISSDTPGLQVCDPSGRWYLADSGFGPGDLLLITGKALSHATAGLCPAASYRASPDYFLSPNGGGRSSLAYRLMPQGNAILDCSPIAAAGHVIPQSYVRISVSQFMDDLAAEELIGSRCDNADAAAQHNVNKEPSLRSVLSDPLSGTFLEDAMLVSCGHSFGGLMLRRVIETSKCTLCNVEIETGSLIPNHALRAAAAAVKHEDDRRLFRNAALRKRRKEMGDQMDSMRRVNGENGDFTAADGLQRGVQYPFLVNEKVVIKGNRRTPEKFVGKEAVITSQCLNGWYLLKIIETGENVRLQYRSLRKLLNSPADQCPSQPIQNSSS

SEQ ID NO: 56742 - protein, 581 aa, Glycine max
  peptide (1)..(581): Ceres Seq. ID no. 12611728
MQQQQQHQQQQQNPSALVPPQLKNPQSSTTTTTATTTPLRSPSAQSPLSVVQPIRQPPPPSHPVVPVTTVEPGLTAVPTCPLVRVRLSDIAPYDGAPGGPYLRAMEALCGSLLRHNAALIELGNEDTALMRCGLEGARLFFRSRAHLGSGKGSRGVYMYRAGRALEDWDSSPPCMADIFRCMGKASRSALCAIARHLRLRSDVFNHLLDDAPLPANEVSSSVLVVTYSHASLQNGRGAIGGSKPTMNGEVEKGLLTLISSDTPGLQVCDPSGRWYLADSGFGPGDLLLITGKALSHATAGLCPAASYRASPDYFLSPNGGGRSSLAYRLMPQGNAILDCSPIAAAGHVIPQSYVRISVSQFMDDLAAEELIGSRCDNADAAAQHNVNKEPSLRSVLSDPLSGTFLEDAMLVSCGHSFGGLMLRRVIETSKCTLCNVEIETGSLIPNHALRAAAAAVKHEDDRRLFRNAALRKRRKEMGDQMDSMRRVNGENGDFTAADGLQRGVQYPFLVNEKVVIKGNRRTPEKFVGKEAVITSQCLNGWYLLKIIETGENVRLQYRSLRKLLNSPADQCPSQPIQNSSS

SEQ ID NO: 56743 - protein, 477 aa, Glycine max
  peptide (1)..(477): Ceres Seq. ID no. 12611729
MEALCGSLLRHNAALIELGNEDTALMRCGLEGARLFFRSRAHLGSGKGSRGVYMYRAGRALEDWDSSPPCMADIFRCMGKASRSALCAIARHLRLRSDVFNHLLDDAPLPANEVSSSVLVVTYSHASLQNGRGAIGGSKPTMNGEVEKGLLTLISSDTPGLQVCDPSGRWYLADSGFGPGDLLLITGKALSHATAGLCPAASYRASPDYFLSPNGGGRSSLAYRLMPQGNAILDCSPIAAAGHVIPQSYVRISVSQFMDDLAAEELIGSRCDNADAAAQHNVNKEPSLRSVLSDPLSGTFLEDAMLVSCGHSFGGLMLRRVIETSKCTLCNVEIETGSLIPNHALRAAAAAVKHEDDRRLFRNAALRKRRKEMGDQMDSMRRVNGENGDFTAADGLQRGVQYPFLVNEKVVIKGNRRTPEKFVGKEAVITSQCLNGWYLLKIIETGENVRLQYRSLRKLLNSPADQCPSQPIQNSSS

SEQ ID NO: 56744 - DNA, 520 bp, Glycine max
  misc_feature (1)..(520): Ceres Seq. ID no. 12611730
atctcaaaagcattgcccgagagagagaagaatcaaaaacgtagaatcaaatcaattattaagcaatggcatcgatgagcatgacagccacattcgtcccggccgttgcaaaggtcccgtcaaccaccggcggacgaaggctctcagtgatcagagcttcaacgagcgacaacacaaccagcttacaagtcaaggagacacagaacagcaccacgatgaggagggatctcatgttcacagctgcagctgcggcagttttttccttggccaaggcagccatggcagacgaggaggagcccaaacgagggacagatgcagcgaagaagaagtacgctcaagtttgtgtcacaatgccaacagccaagatctgtcgctactgattcaacaatccatctttcatgtctctctccctctatctttctaatatttcggtaaaattttctcaaactttgtttgtaatcatatactaaatcaatttcatattttgctactagattttcgaatataaactaaacttgac

SEQ ID NO: 56745 - protein, 140 aa, Glycine max
  peptide (1)..(140): Ceres Seq. ID no. 12611731
SQKHCPRERRIKNVESNQLLSNGIDEHDSHIRPGRCKGPVNHRRTKALSDQSFNERQHNQLTSQGDTEQHHDEEGSHVHSCSCGSFFLGQGSHGRRGGAQTRDRCSEEEVRSSLCHNANSQDLSLLIQQSIFHVSLPLSF

SEQ ID NO: 56746 - protein, 104 aa, Glycine max
  peptide (1)..(104): Ceres Seq. ID no. 12611732
MASMSMTATFVPAVAKVPSTTGGRRLSVIRASTSDNTTSLQVKETQNSTTMRRDLMFTAAAAAVFSLAKAAMADEEEPKRGTDAAKKKYAQVCVTMPTAKICRY

SEQ ID NO: 56747 - protein, 101 aa, Glycine max
  peptide (1)..(101): Ceres Seq. ID no. 12611733
MSMTATFVPAVAKVPSTTGGRRLSVIRASTSDNTTSLQVKETQNSTTMRRDLMFTAAAAAVFSLAKAAMADEEEPKRGTDAAKKKYAQVCVTMPTAKICRY

SEQ ID NO: 56748 - DNA, 793 bp, Glycine max
  misc_feature (1)..(793): Ceres Seq. ID no. 15226360
cttgatcgacatgcactctctctctcccaaaacgccatgagaaaaagacgaaaaagaagccacaagacccacactcgtctctgctgaagaacaaaatactaggagaagaagctgtaccaaaaaggaaatttcgagtacaaaaccccacaccttcatcttcaaatttcagaaaatgtgctacgtggggaaagcaacaaagatcttcatcttcattgtgacggtgctcgttgttctgggtctagttttgggattggggctccttcgccgccgccaccaccacaacactgcaaataaatgctcagacgaatcttgcattccttcaccaaccacatttccaaaccccaatttcaacacaccaaccccaccttctccaattgacaacaaccccactaccccacaaactcctcagcttccaaatccaattcctccacctccttactccaataacccatctttgccgccgccgccgccgattctgcagtctccgccgccgccggaggaaacaacccctccgactcctcctagtgtggcggcgccgcctatgaacactcccacaccagggtcggcgctgttgaccccaggtcctgtgcatgctatggcctaatgagctatctatctgagtggttcttcttttttactttctttcatatttttactgatggggttatttaatttgtgaatgttttaattgatgagagagagagagagtattgagataattagagcatttgtaaggtgggatagtgaatttacagagccgtccctggcatctatattgattttcaaggatgac

SEQ ID NO: 56749 - protein, 143 aa, Glycine max
  peptide (1)..(143): Ceres Seq. ID no. 15226361
MCYVGKATKIFIFIVTVLVVLGLVLGLGLLRRRHHHNTANKCSDESCIPSPTTFPNPNFNTPTPPSPIDNNPTTPQTPQLPNPIPPPPYSNNPSLPPPPPILQSPPPPEETTPPTPPSVAAPPMNTPTPGSALLTPGPVHAMA

SEQ ID NO: 56750 - DNA, 1242 bp, Glycine max
  misc_feature (1)..(1242): Ceres Seq. ID no. 13595660
aagaatgaatgaaaggcattagaaatcagtgaccggcgtgagagagcaaagatggtggttcttggcaccacctcaccttcaatttcctgcttgccgtcttcaactcaaaccgactacaaggcgcgtcgatactgttcttttccgcaacgcccacgcccacgcccacgcgcttcacgtttcttttgcggattccctttcgctccaaatgccatccattctccttctctgtctgtgacgaatgaagcactgaatgttatgatttctggggctcctgcttctggtaaaggaacccagtgccacctcatcaccaacaagtacggtttggttcatattgctgctggagatttacttagggcagaaattgccactggaagtgataatggaaagcgagccaaacagtatatggagaagggacagttggtccctgacgaaattgttgtgatgatggttaaggagcgtctcttgaaaccagattcgaaagagaatggttggcttttggatggatatcccatgagcttatcacaggccactgcacttgaggctcttggctttcggcctcatatttttcttcttcttgaggtttctgaagatgttcttgtggagagagtagttggacggagattagatcctgttaccggcaagatatatcacttgaagtattctcctccagagacacaagaaatagccgcaaggcttacccaacgctttgatgatacagaagaaaaggtgaaattgcgattgaatacccatcatcaaaatgtggagtcagtcctttccatgtacaaagacataactgttaagattaacggaaatgtctcaaaggaggaagtatttgctcaaattgatagtgcactgacaagtcttatagaggaaaggaaggctgcttcaggatctgtggcagcatagaagacccatcttttgacattttgatctagcatggtgcgttgctggtggtagtggattttaaatgatttatttatagagttaaacaaaagagtcttcactcaaactaagctgcattttctcgtgaagattgtctcacggcttatatcctcccatttggaaagcaatgtgatgattggcttggaccatgcatgaggacctgtgatagtgtagtgcgcagtatattttacaaatttattttttatgagaaaatgattaccttaaattaaaatcgtttttatgtaatgactagcttgtaaatgcaggattttgtgaattatcgtttgttggtttcctgtt

SEQ ID NO: 56751 - protein, 284 aa, Glycine max
  peptide (1)..(284): Ceres Seq. ID no. 13595661
MVVLGTTSPSISCLPSSTQTDYKARRYCSFPQRPRPRPRASRFFCGFPFAPNAIHSPSLSVTNEALNVMISGAPASGKGTQCHLITNKYGLVHIAAGDLLRAEIATGSDNGKRAKQYMEKGQLVPDEIVVMMVKERLLKPDSKENGWLLDGYPMSLSQATALEALGFRPHIFLLLEVSEDVLVERVVGRRLDPVTGKIYHLKYSPPETQEIAARLTQRFDDTEEKVKLRLNTHHQNVESVLSMYKDITVKINGNVSKEEVFAQIDSALTSLIEERKAASGSVAA

SEQ ID NO: 56752 - protein, 216 aa, Glycine max
  peptide (1)..(216): Ceres Seq. ID no. 13595662
MISGAPASGKGTQCHLITNKYGLVHIAAGDLLRAEIATGSDNGKRAKQYMEKGQLVPDEIVVMMVKERLLKPDSKENGWLLDGYPMSLSQATALEALGFRPHIFLLLEVSEDVLVERVVGRRLDPVTGKIYHLKYSPPETQEIAARLTQRFDDTEEKVKLRLNTHHQNVESVLSMYKDITVKINGNVSKEEVFAQIDSALTSLIEERKAASGSVAA

SEQ ID NO: 56753 - protein, 167 aa, Glycine max
  peptide (1)..(167): Ceres Seq. ID no. 13595663
MEKGQLVPDEIVVMMVKERLLKPDSKENGWLLDGYPMSLSQATALEALGFRPHIFLLLEVSEDVLVERVVGRRLDPVTGKIYHLKYSPPETQEIAARLTQRFDDTEEKVKLRLNTHHQNVESVLSMYKDITVKINGNVSKEEVFAQIDSALTSLIEERKAASGSVAA

SEQ ID NO: 56754 - DNA, 740 bp, Glycine max
  misc_feature (1)..(740): Ceres Seq. ID no. 12611816
catttgttcttctttggctgggcggcaatggcggaggagcaaaagacgactaaggttgacgtagaatctccggcggtttcagctccggagaaggaaccagctcctgctccggtggaagcttctacagaggttgcggaggagaaagttcatgatccaccacctcccgtcgagtccaaagctcttgccgttgttgaaaaacccattgaggagcctacaccaaagaaaagttcatctggttcgatcgacagagatgtgaaacttgcagacttggaaaaagagaagaaaacatcattcatcaaagcatgggaagagagtgagaagtcaaaggcagagaacaaggcacaaaagaaggtatctgatgtgctcgcttgggagaacagccagaaagcagccgttgaagcccagctcaggaagattgaagaaaaattagagaagaaaaaggcagagtacggtgagaaaatgaagaacaaagtggctgcgattcacaaggaagcagaagagaagagagcaatggttgaagctaaaagaggagaggagcttcttaaagctgaagaaatggctgccaagtacagagccactggtatagtacccaaggcaacttgtggatgtttctaagctgttctcagctcattgtatttatccatctctcttttttgtgtgattcggttactttttctttgtttgttgtcatgtttatatattggtgactttgtgtttaaaagaagatcagtttcacttcg

SEQ ID NO: 56755 - protein, 204 aa, Glycine max
  peptide (1)..(204): Ceres Seq. ID no. 12611817
HLFFFGWAAMAEEQKTTKVDVESPAVSAPEKEPAPAPVEASTEVAEEKVHDPPPPVESKALAVVEKPIEEPTPKKSSSGSIDRDVKLADLEKEKKTSFIKAWEESEKSKAENKAQKKVSDVLAWENSQKAAVEAQLRKIEEKLEKKKAEYGEKMKNKVAAIHKEAEEKRAMVEAKRGEELLKAEEMAAKYRATGIVPKATCGCF

SEQ ID NO: 56756 - protein, 195 aa, Glycine max
  peptide (1)..(195): Ceres Seq. ID no. 12611818
MAEEQKTTKVDVESPAVSAPEKEPAPAPVEASTEVAEEKVHDPPPPVESKALAVVEKPIEEPTPKKSSSGSIDRDVKLADLEKEKKTSFIKAWEESEKSKAENKAQKKVSDVLAWENSQKAAVEAQLRKIEEKLEKKKAEYGEKMKNKVAAIHKEAEEKRAMVEAKRGEELLKAEEMAAKYRATGIVPKATCGCF

SEQ ID NO: 56757 - DNA, 1250 bp, Glycine max
  misc_feature (1)..(1250): Ceres Seq. ID no. 13595652
attgttattattattattagcagaactcaatgggtgtttgttggtttcattggtgggagtggaagctccaatccaatggcaatttttgtctgtgactgtgatgcacagtgaaataatcaaccctattcatcaatctccagtgttgcactgccatcaatgtccaccaccatttcttcccttcccttctctctcccccttcgccaaaactctagggttacccttttcaatccaccctcttctcctaatccatcccaatcatcagtcacctttcctaaaaaaaaatggagacttttgtggtttaggcatggaaacacttcatcaaaaactgatggttctgagctcaatgaagataaattgtcagaagatttggtgaagctcgaaggtgtccagtccaaagacctgaagaaagactggcttgcaaccatccttacgcactccctaaactactggcttcgaggcaccagcaacctcctaaggagaagaagacacagagaagaagaggtcataactgtcattcgtggtgtggaaccctggacagttccttggacagcaaagaccattgttcaggtaatgctcctgtggattgcctcattttggtttgtaggatcttggatagttccatttttagcatacacagcagggtttagaaaggaatctcttacatacagagggcaagcattgtgcagcctcttgactgatgttgctgaaggcgtggttggaatagcaattcttcgccattgtcttgcaaagtttcaacctctttcatctgattggttcaaatttgaagtcaaggggaagtggcagtttgatgttggtttaggctgcctcatgttcccccttatcaatcagctatcacaaatgaacctaaatttgctgcctgttcttcaatatactccagttaccatctcaagtgtagagcaatccattgttgcgcgagaccctgtggcaatggccctctatgcagtggtagtctcggtttgtgccccaatatgggaggagattgttttccgtggtttccttcttccatctttaaccaagtacatgcctgtatggagtgcaatattagttagctcaatagcttttgccttggcacattttaacattcagagaatgctaccacttgtatttcttggcatggtgatgggtactgtctttgtacggtctaggaacctctttccatcaatgttgttgcatagtttgtggaatgcttttgtatttctggatctcatgaaataaattaaaagtttttg

SEQ ID NO: 56758 - protein, 359 aa, Glycine max
  peptide (1)..(359): Ceres Seq. ID no. 13595653
MSTTISSLPFSLPLRQNSRVTLFNPPSSPNPSQSSVTFPKKKWRLLWFRHGNTSSKTDGSELNEDKLSEDLVKLEGVQSKDLKKDWLATILTHSLNYWLRGTSNLLRRRRHREEEVITVIRGVEPWTVPWTAKTIVQVMLLWIASFWFVGSWIVPFLAYTAGFRKESLTYRGQALCSLLTDVAEGVVGIAILRHCLAKFQPLSSDWFKFEVKGKWQFDVGLGCLMFPLINQLSQMNLNLLPVLQYTPVTISSVEQSIVARDPVAMALYAVVVSVCAPIWEEIVFRGFLLPSLTKYMPVWSAILVSSIAFALAHFNIQRMLPLVFLGMVMGTVFVRSRNLFPSMLLHSLWNAFVFLDLMK

SEQ ID NO: 56759 - protein, 221 aa, Glycine max
  peptide (1)..(221): Ceres Seq. ID no. 13595654
MLLWIASFWFVGSWIVPFLAYTAGFRKESLTYRGQALCSLLTDVAEGVVGIAILRHCLAKFQPLSSDWFKFEVKGKWQFDVGLGCLMFPLINQLSQMNLNLLPVLQYTPVTISSVEQSIVARDPVAMALYAVVVSVCAPIWEEIVFRGFLLPSLTKYMPVWSAILVSSIAFALAHFNIQRMLPLVFLGMVMGTVFVRSRNLFPSMLLHSLWNAFVFLDLMK

SEQ ID NO: 56760 - DNA, 1317 bp, Glycine max
  misc_feature (1)..(1317): Ceres Seq. ID no. 13595567
gaacatcctaatcgaaaacttattattagaccctttctcttagagccaagaggtttaagttatagtaacattacttgaggagattaccacttgctagaaaaatatgaagttccatttggtgctatttgttataatagccgccatttttggagttgggcttgaagggtgccaatgcaaggttgtgcagttcatttttggagactctctctctgatgttggaaataacaattacctttctaagagccttgctcaggcaagtttaccttggtatggtattgatttgggcaatggactccctaatggcaggttctcaaatggtcgcacggttgctgatataataggtgataatatgggccttcctaggcctccagcattccttgacccatctttatctgaagatgttatattggaaaatggagtgaattatgcttctgggggtggaggcatcttgaatgaaacaggcagttattttattcaaaggttttctctctacaagcaaatggagctgtttcaggggacacaagaactgattagaagcagaattgggaaagaggaggcagagaagtttttccagggagctcattatgttgttgctttaggcagcaatgacttcatcaacaactacttgatgcctgtttacagtgattcatggacatataatgatcaaaccttcatggattacttgataggaactctaggagaacaattaaagctactgcatggtctaggagcaaggcagttgatggtgtttgggctgggcccaatgggctgcattccacttcaaagggtgcttagtacatctggggaatgtcaaagtagaacaaataatctggctattagctttaataaggctacaagcaagttagttgttgacttgggaaagcaacttcccaattcaagctacagatttggagatgcatatgacgttgttaatgatgtgattaccaacccgaacaaatatgggttccaaaactctgattcaccctgttgctcctttgggaatattcgaccagctcttacatgtatacctgcatcaaaactgtgcaaagatagaagcaagtacgttttttgggatgagtaccatccttcagacagagctaatgagctaattgccaatgaactcatcaagaaatttgggtttgtgcgtgttgatcaaacaaaacctccttcaccatcacccgctcttgctccgtcttcagacgattaatcgtgcatgtgaaggttttattactaaatgctcttaaattgcttttgttaaatttgtaatcaaagttggttctctttaattacaagtcggttacactaatttattgatgc

SEQ ID NO: 56761 - protein, 367 aa, Glycine max
  peptide (1)..(367): Ceres Seq. ID no. 15221618
MKFHLVLFVIIAAIFGVGLEGCQCKVVQFIFGDSLSDVGNNNYLSKSLAQASLPWYGIDLGNGLPNGRFSNGRTVADIIGDNMGLPRPPAFLDPSLSEDVILENGVNYASGGGGILNETGSYFIQRFSLYKQMELFQGTQELIRSRIGKEEAEKFFQGAHYVVALGSNDFINNYLMPVYSDSWTYNDQTFMDYLIGTLGEQLKLLHGLGARQLMVFGLGPMGCIPLQRVLSTSGECQSRTNNLAISFNKATSKLVVDLGKQLPNSSYRFGDAYDVVNDVITNPNKYGFQNSDSPCCSFGNIRPALTCIPASKLCKDRSKYVFWDEYHPSDRANELIANELIKKFGFVRVDQTKPPSPSPALAPSSDD

SEQ ID NO: 56762 - protein, 285 aa, Glycine max
  peptide (1)..(285): Ceres Seq. ID no. 15221619
MGLPRPPAFLDPSLSEDVILENGVNYASGGGGILNETGSYFIQRFSLYKQMELFQGTQELIRSRIGKEEAEKFFQGAHYVVALGSNDFINNYLMPVYSDSWTYNDQTFMDYLIGTLGEQLKLLHGLGARQLMVFGLGPMGCIPLQRVLSTSGECQSRTNNLAISFNKATSKLVVDLGKQLPNSSYRFGDAYDVVNDVITNPNKYGFQNSDSPCCSFGNIRPALTCIPASKLCKDRSKYVFWDEYHPSDRANELIANELIKKFGFVRVDQTKPPSPSPALAPSSDD

SEQ ID NO: 56763 - protein, 235 aa, Glycine max
  peptide (1)..(235): Ceres Seq. ID no. 15221620
MELFQGTQELIRSRIGKEEAEKFFQGAHYVVALGSNDFINNYLMPVYSDSWTYNDQTFMDYLIGTLGEQLKLLHGLGARQLMVFGLGPMGCIPLQRVLSTSGECQSRTNNLAISFNKATSKLVVDLGKQLPNSSYRFGDAYDVVNDVITNPNKYGFQNSDSPCCSFGNIRPALTCIPASKLCKDRSKYVFWDEYHPSDRANELIANELIKKFGFVRVDQTKPPSPSPALAPSSDD

SEQ ID NO: 56764 - DNA, 995 bp, Glycine max
  misc_feature (1)..(995): Ceres Seq. ID no. 13595568
gaaataatctcgatttggacaaaagacagagaacgatggagtcttgccagcaaaaggttatggagaagctgcttcacggccatgggtgtgccaaccagctcaagctaatcatggaccaccacgccgagtcagattcgtccgttgaaagggaggatctggccaagtccgtcctccattgtttctcggatgctctctccattttgatcgatacgaatgatcataacaaagatgatgataaatccaataactcatctccccaagactcttcacatgttcttgagagcagcaggaaaccttttcacaagaggggaagaaagacatcaatggcggagagctcagattaccgcagacacgaatccccaaacccgatctaccacgacggctttctttggaggaaatacggacaaaagcaaatcaaagaatcggaccaccaaaggagttactacaagtgtgcgtacacaaacgaccagaaatgcgaagcaaagaagcaggttcaaatgatccaaaacaaccctccattgtactcaaccacttacttcggccgccacacatgtcagcttcatcaagcctttgaaacttttcccattgacacctcagatccccaagattcacgcatgatccgatttgataacccagattcctctacccatcaacatcaaaatcagataattcatctcaaagctgaacaaatgatgccctctgagaaagcagaagagtggtcgtccccatctgagtatatgtcctccgaggttgcctacgctgtggaggctttcgggtttaaccctgctcgcacatcaagtgacttatcatgaccatatatgcccttcccgtcgctatcatcagacatctaaagcaactttagttatttgtttcctcataatatcctatagtatacctcctgttactttttttttgtgttttgcatctcatgtatttgcctacctctactttgaacttttgttttgagtttaatattaatcagctttaataacgcg

SEQ ID NO: 56765 - protein, 269 aa, Glycine max
  peptide (1)..(269): Ceres Seq. ID no. 15221621
NNLDLDKRQRTMESCQQKVMEKLLHGHGCANQLKLIMDHHAESDSSVEREDLAKSVLHCFSDALSILIDTNDHNKDDDKSNNSSPQDSSHVLESSRKPFHKRGRKTSMAESSDYRRHESPNPIYHDGFLWRKYGQKQIKESDHQRSYYKCAYTNDQKCEAKKQVQMIQNNPPLYSTTYFGRHTCQLHQAFETFPIDTSDPQDSRMIRFDNPDSSTHQHQNQIIHLKAEQMMPSEKAEEWSSPSEYMSSEVAYAVEAFGFNPARTSSDLS

SEQ ID NO: 56766 - protein, 258 aa, Glycine max
  peptide (1)..(258): Ceres Seq. ID no. 15221622
MESCQQKVMEKLLHGHGCANQLKLIMDHHAESDSSVEREDLAKSVLHCFSDALSILIDTNDHNKDDDKSNNSSPQDSSHVLESSRKPFHKRGRKTSMAESSDYRRHESPNPIYHDGFLWRKYGQKQIKESDHQRSYYKCAYTNDQKCEAKKQVQMIQNNPPLYSTTYFGRHTCQLHQAFETFPIDTSDPQDSRMIRFDNPDSSTHQHQNQIIHLKAEQMMPSEKAEEWSSPSEYMSSEVAYAVEAFGFNPARTSSDLS

SEQ ID NO: 56767 - protein, 250 aa, Glycine max
  peptide (1)..(250): Ceres Seq. ID no. 15221623
MEKLLHGHGCANQLKLIMDHHAESDSSVEREDLAKSVLHCFSDALSILIDTNDHNKDDDKSNNSSPQDSSHVLESSRKPFHKRGRKTSMAESSDYRRHESPNPIYHDGFLWRKYGQKQIKESDHQRSYYKCAYTNDQKCEAKKQVQMIQNNPPLYSTTYFGRHTCQLHQAFETFPIDTSDPQDSRMIRFDNPDSSTHQHQNQIIHLKAEQMMPSEKAEEWSSPSEYMSSEVAYAVEAFGFNPARTSSDLS

SEQ ID NO: 56768 - DNA, 1157 bp, Glycine max
  misc_feature (1)..(1157): Ceres Seq. ID no. 13595655
atcgaaatactgttgtagaaagctttgtgttgtattgtggctgagccaccacaattctgattcctttctcttctcggcagtttgcttcctccgtagcagatcgtaaggaacttttgccttgtaagtgtaactattggtaccatggtgtaaacctaaagcattggaagaactgaaacattgccttatgaagactgtgggagtaggctctagtaaagtgacattgtctctaagataaaattctcaactcagaaagatggtcatattctcaataagtaatgccagatatacttatgtgcatgatcagaaatatccctctaaagatgttgacatacaccatatagtttcaaggaggagtaatgctaaatatctcgtgtatgccacagcacttcttgtattagcatgtgccttgtatctgtatgttcttaagggaaaatcaattagttttgtgtattacagcttgctttttgacatatttcttgtcaagttgttacttgggaagcctgttaagaaagagtctgttgtgattatgccagcttttggagtacagcttgagactcattatgtgagtggaaaagtcatccgatactttgttcccattgacaatattctgaaacctgttctaatagaatgtgtgactccagtgacttgctattggactctatcgttgattattcgtggtgaatcagaaatggtgttagttttcaagaacttacgcccaccagtgaaaatgttggtccatgtctggaaggccctgtgtgctgcaactgatagtaaagaagagacctgtactcatgcagaatgaataattgacagttatggcttatgtactgtttctgtactggtgtgtactccccatcattttacgctgttctgtcacattgaacaccaatcctatgtaagagtaggattggatttcaacatacattggaaagtgaattttttgataaaccacactcttctccagttgatagtttgggacgtgcgttcactatcagcactccaaggcattgaatttagaggccaattggctctaccttttgaaactgcatactaagtagcttatttataactaggtagaaattttgtatcatgacctaggactgatagaactagtatgtttccgtgagtcttttgtaactaaaatagagcacaggttc

SEQ ID NO: 56769 - protein, 182 aa, Glycine max
  peptide (1)..(182): Ceres Seq. ID no. 13595656
MVIFSISNARYTYVHDQKYPSKDVDIHHIVSRRSNAKYLVYATALLVLACALYLYVLKGKSISFVYYSLLFDIFLVKLLLGKPVKKESVVIMPAFGVQLETHYVSGKVIRYFVPIDNILKPVLIECVTPVTCYWTLSLIIRGESEMVLVFKNLRPPVKMLVHVWKALCAATDSKEETCTHAE

SEQ ID NO: 56770 - protein, 91 aa, Glycine max
  peptide (1)..(91): Ceres Seq. ID no. 13595657
MPAFGVQLETHYVSGKVIRYFVPIDNILKPVLIECVTPVTCYWTLSLIIRGESEMVLVFKNLRPPVKMLVHVWKALCAATDSKEETCTHAE

SEQ ID NO: 56771 - DNA, 1211 bp, Glycine max
  misc_feature (1)..(1211): Ceres Seq. ID no. 12611829
atccctctccctttccttcccctctctctctcgctcgtcttccttgccccctcgcgcaacagcagcgccacaacgcagtgagtggcacttccgtgatttcgccgccgcgggggcggggggaggaggaggaggaggaggaggagggaggccatgggcaacgccagcggcagggaggaggacgccgccgcgcccggggaggccgacgccgccgacgtcgacgttgaggacggaggcgacgactcctcggcccgcggcttccctccctacggcggaggcgccaaccacgtgcgccgtgcgtgctcggtgggcgtcgtgggggccagcggcgggcccggatcgccgcccgggagccccggccgctccctctcgccgcggatgttcgtgccccagacacctgtacctccattgcaaagacctgctgatgtaactccagtgttcaatgaaatactgatgaatgaacaagaagaagaatttgatggccctcctcaaaaggaaatacctgctttggttgtttggactctcggaggaaagaatgtatctgttgaaggatcctgggataactggaaatcaaggaaaccaatgcagaaatctggaaaagatcattctcttctgttgatccttccttctggagtttatcgttatagatttgttgtagatggagagagaagatgttttcctgaccttccatgtgaaactgacgccatgggcaatgctgttaaccttcttgatgttcatgattttgttcctgaaagtgttgaaagtgtatcagaatttgaggctcctccatctccagaatctagctacagtttcctggcacccgaggaaaaggactttgcgaaggagccacctgctcttccgtctcagcttcacctcggcgttcttaactcacagaactcagaggaaatatgtgcacggccccagcacatcgtcctcaaccaccttttcattgagaagggttggggtgcccatccgctggtggctcttggtgtaacccacagatttgagtccaaatatgtaacggtcgtcttgtacaagcccatagaacgatagcatagcaaccgcatgaaagttgaagctaatgcttgacaactcaccgcgaaagcagcaacgaacagcaacatcgtggcctctccccctgtaaaagcacttcaggtacaggaatattttcgataacttgcaggagcttctagtcgtgatattgctccccttcg

SEQ ID NO: 56772 - protein, 299 aa, Glycine max
  peptide (1)..(299): Ceres Seq. ID no. 12611830
MGNASGREEDAAAPGEADAADVDVEDGGDDSSARGFPPYGGGANHVRRACSVGVVGASGGPGSPPGSPGRSLSPRMFVPQTPVPPLQRPADVTPVFNEILMNEQEEEFDGPPQKEIPALVVWTLGGKNVSVEGSWDNWKSRKPMQKSGKDHSLLLILPSGVYRYRFVVDGERRCFPDLPCETDAMGNAVNLLDVHDFVPESVESVSEFEAPPSPESSYSFLAPEEKDFAKEPPALPSQLHLGVLNSQNSEEICARPQHIVLNHLFIEKGWGAHPLVALGVTHRFESKYVTVVLYKPIER

SEQ ID NO: 56773 - protein, 224 aa, Glycine max
  peptide (1)..(224): Ceres Seq. ID no. 12611831
MFVPQTPVPPLQRPADVTPVFNEILMNEQEEEFDGPPQKEIPALVVWTLGGKNVSVEGSWDNWKSRKPMQKSGKDHSLLLILPSGVYRYRFVVDGERRCFPDLPCETDAMGNAVNLLDVHDFVPESVESVSEFEAPPSPESSYSFLAPEEKDFAKEPPALPSQLHLGVLNSQNSEEICARPQHIVLNHLFIEKGWGAHPLVALGVTHRFESKYVTVVLYKPIER

SEQ ID NO: 56774 - protein, 199 aa, Glycine max
  peptide (1)..(199): Ceres Seq. ID no. 12611832
MNEQEEEFDGPPQKEIPALVVWTLGGKNVSVEGSWDNWKSRKPMQKSGKDHSLLLILPSGVYRYRFVVDGERRCFPDLPCETDAMGNAVNLLDVHDFVPESVESVSEFEAPPSPESSYSFLAPEEKDFAKEPPALPSQLHLGVLNSQNSEEICARPQHIVLNHLFIEKGWGAHPLVALGVTHRFESKYVTVVLYKPIER

SEQ ID NO: 56775 - DNA, 1169 bp, Glycine max
  misc_feature (1)..(1169): Ceres Seq. ID no. 13595423
atttagaagttgaatcggtgctacggggtatggaggcgaagacacatggcgaggatgaatccgcataactcaaccgccgatcttctttcggaatctctccaagctgctaacgagccgtctgatgtagccagcaagaaccttagttgcggtcaaatcaccaacgaggaagatgaatctcttgacaagcaaaacaagtgttgtagtgacattgtctctgacagttgtaaagatgattcaaattacaagacaggactcaattgccatcaggaggaccagcggaggacgagtctagtagcatcgattgtggagacatctcacgacgctcccactaggagaaccattgatcttggtcatggaagtgacctcatctacatccagaggtttcttccctttcaaaagtcttggactttatttgattatctcgacaagcatattccttggaccaggcccaccatccgcgtctttggtcgttcttgcctccagccaagagatacatgttacgttgcaagtagcggattgactccgctaatgtacagtggataccgacctgatgcctattcttgggatgactttccacctctcaaggacatccttgatgctatttgcgtagcgtttcctggaagcagattcaacagcttgcttttgaataggtacaacggcgccaacgactacgttggttggcatgctgatgatgaaaagctttacggccccactcctgaaattgcttccctctcttttggatgcaaacgtgactttgtgctcaagaaaaagaaacttcaagactcttcccgtgagaaaagaggagagggtggaccagcgaagaagaggttgaagaaaagcagcagcggagaggaggatcagcatagtttcgcattgaagcatggatcgttgctggtgatgaggggatacactcaaagggactggattcattctgtgccaaagcgtgcaaaggcggagggcactcgtatcaacctcaccttcaggcttgttttgtaaaccatgcatcattcatcattcatcatcatcatcaacaagcttagcttgatctcaagtcacattgattgactaggcttttctcatcttagttcttcgacatgagatataacatataagttggtgtagacattttgaaaaatcttaattactaattaacgtgaagattattaagg

SEQ ID NO: 56776 - protein, 316 aa, Glycine max
  peptide (1)..(316): Ceres Seq. ID no. 13595424
MARMNPHNSTADLLSESLQAANEPSDVASKNLSCGQITNEEDESLDKQNKCCSDIVSDSCKDDSNYKTGLNCHQEDQRRTSLVASIVETSHDAPTRRTIDLGHGSDLIYIQRFLPFQKSWTLFDYLDKHIPWTRPTIRVFGRSCLQPRDTCYVASSGLTPLMYSGYRPDAYSWDDFPPLKDILDAICVAFPGSRFNSLLLNRYNGANDYVGWHADDEKLYGPTPEIASLSFGCKRDFVLKKKKLQDSSREKRGEGGPAKKRLKKSSSGEEDQHSFALKHGSLLVMRGYTQRDWIHSVPKRAKAEGTRINLTFRLVL

SEQ ID NO: 56777 - protein, 313 aa, Glycine max
  peptide (1)..(313): Ceres Seq. ID no. 13595425
MNPHNSTADLLSESLQAANEPSDVASKNLSCGQITNEEDESLDKQNKCCSDIVSDSCKDDSNYKTGLNCHQEDQRRTSLVASIVETSHDAPTRRTIDLGHGSDLIYIQRFLPFQKSWTLFDYLDKHIPWTRPTIRVFGRSCLQPRDTCYVASSGLTPLMYSGYRPDAYSWDDFPPLKDILDAICVAFPGSRFNSLLLNRYNGANDYVGWHADDEKLYGPTPEIASLSFGCKRDFVLKKKKLQDSSREKRGEGGPAKKRLKKSSSGEEDQHSFALKHGSLLVMRGYTQRDWIHSVPKRAKAEGTRINLTFRLVL

SEQ ID NO: 56778 - DNA, 1119 bp, Glycine max
  misc_feature (1)..(1119): Ceres Seq. ID no. 13595569
aattcctaagatgctgatcataattgtaataacaaagaccaatattttgtgtgtgccagtgagctagttaggtgttaaatatttgattgcaatattaatatgaaggcacagtgtgagtagtgagaaggggcattagtaaagaggatgggtagacgaccctgctgccccaaagagatcaacaaaggtgcttggtctcgagaagaagatgaaaccctctccaaatatgtttccatccatggagaaggaaaatggcagaaggttgcccaaaatgcagggttaaagcgatgtggaaagagttgcagacaaagatggttgaattatctcaagcccggtataaaaagaggccacatctctgtggatgaagaggatatgattataagacttcatcgtcttcttggtaacagataggcattgattgcaaagaggctacctggacgaacagacaatgaaatcaagaactattggaacacaaatctgtcaaagaagttacaaaaacatccaacatcatcagtttcttcacttcaacacaaacgtcatgaaaaagaaaaaaccatacaaatgcatgtatcacccgaagcaccacggcctaggagagttaatgcagttgaatacagtaaaaatttggagaatggtgggtgtggaaatagacctagtacaactcccagtccctcaaataaagtagagggtagtagtgaagaagcttcttttagtgatttcctcatccacgacattgatcaaaaccaatttttgattgctgatgattcaaactcaaaggtgccacaaatggaagaagatcaccaccacaacaacaaggtggaattaataaccaacaacagtcctagctcttcatcaccttctgatcattgtcaccatctcttgccagagaaatttgacccttttgagacccttttggatgtggagctggcttcctttcttggatttgaaaatgattgatcaagagattttatttattattattgcatgcagtgagatgaatgaaaaaaggtcaagtacttagggagtgttatagataatatcccatctatatatggaatgcctaactaattatgcatctagctatagctagatgtaatatacaaatccagggtttctttttcg

SEQ ID NO: 56779 - protein, 131 aa, Glycine max
  peptide (1)..(131): Ceres Seq. ID no. 13595570
MHVSPEAPRPRRVNAVEYSKNLENGGCGNRPSTTPSPSNKVEGSSEEASFSDFLIHDIDQNQFLIADDSNSKVPQMEEDHHHNNKVELITNNSPSSSSPSDHCHHLLPEKFDPFETLLDVELASFLGFEND

SEQ ID NO: 56780 - protein, 87 aa, Glycine max
  peptide (1)..(87): Ceres Seq. ID no. 13595571
MGRRPCCPKEINKGAWSREEDETLSKYVSIHGEGKWQKVAQNAGLKRCGKSCRQRWLNYLKPGIKRGHISVDEEDMIIRLHRLLGNR

SEQ ID NO: 56781 - protein, 78 aa, Glycine max
  peptide (1)..(78): Ceres Seq. ID no. 13595572
MKSRTIGTQICQRSYKNIQHHQFLHFNTNVMKKKKPYKCMYHPKHHGLGELMQLNTVKIWRMVGVEIDLVQLPVPQIK

SEQ ID NO: 56782 - DNA, 1609 bp, Glycine max
  misc_feature (1)..(1609): Ceres Seq. ID no. 13582380
actgcattaaggccaagtcaccactctcctcttccattggtggatctttttttttctctcttttaatagggaaaccattggtgtgtgtttcagctttgctgacccttctgttgtttctgccaatctctgttagtatttagacccttttgatatacgaagccttcaattacaatgctttacttcctcatatctttcgtctcctttctcatcctttccaagtctttcaccagcaggcctttctcatcaggggagagagggatcaaaccagggtcaattgggttttgggggagtctttcaagttggttagtttctaggctcaagaaaggaagcacaacaggcaccaccccttttagttttttttcagttttctcttggcatgttattgaaaaagaatagtttagtgtctaaggtggagaatgaggaggaggaggggaatgtttctctcttggatttgcctgatttgccattggaatgcatccttgagcacctttcaccagctgaattatgcagggtggcaacagtgtgcacatctctgagggatagatgtaggagtgatcatttatggaagaaacacatggagaggaaatggggtaaggtgtttggtgatgctgcttataggcaatggaaatggcatgtagcttccaagaacagagaaaaaatctcctccaaccagcacaatcagaaaggaatatttgctttccttcgtggtggttttctccccttcatatggatcaaagcaaaatcagaaaagggcacagagtcaagtagctcattaccagaagattcaatagcagctttatatctttctcttgaaagtggcaaattttggttccctgctcaagtctataaccgtgagaatggtcatgctgggttcatgctctcatgttatgatgcccaactatgctatgattctcgatccgacacttttctggcaaggtactcgcctcatgggagatggacaactgaggaaaacatacaatgggaccggctaagagtgccaccaattgctacttctccacatgctcttcacatctctgactgtttggatgacttgagacctggagatcacattgagattcagtggagaagaaacaaagaatttccttatggttggtggtatggtgtcattggtcatttggaacaatgtcaaggacatgggaaccattgccattgtcactataatgatatagtgattttggagttcacacagtacactgctgggtccagatggagacaaaccgtgataaacagaaagcatcatatagaaaaaggcaatgaaatagatggtttttatggaggaatcaggaagctgcatagcaaggaagaaattgcaaggtggaagaacctctggccaactaaaattgtgatacatgattgacttgattagaatttttgtaaattaagcagtcacccttcctaaaatgtgaaggattacttttgtcacagaacgatgtcattcctaacaataggtataaacttggaaagagtttatggaagaattttcagaggctgtaacatctgtagcacgacataacaaatagtggatatgttgcagctttcttatacgtgtctatatataattttatagaagaacattggtgcatagtgc

SEQ ID NO: 56783 - protein, 333 aa, Glycine max
  peptide (1)..(333): Ceres Seq. ID no. 13582381
MLLKKNSLVSKVENEEEEGNVSLLDLPDLPLECILEHLSPAELCRVATVCTSLRDRCRSDHLWKKHMERKWGKVFGDAAYRQWKWHVASKNREKISSNQHNQKGIFAFLRGGFLPFIWIKAKSEKGTESSSSLPEDSIAALYLSLESGKFWFPAQVYNRENGHAGFMLSCYDAQLCYDSRSDTFLARYSPHGRWTTEENIQWDRLRVPPIATSPHALHISDCLDDLRPGDHIEIQWRRNKEFPYGWWYGVIGHLEQCQGHGNHCHCHYNDIVILEFTQYTAGSRWRQTVINRKHHIEKGNEIDGFYGGIRKLHSKEEIARWKNLWPTKIVIHD

SEQ ID NO: 56784 - protein, 267 aa, Glycine max
  peptide (1)..(267): Ceres Seq. ID no. 13582382
MERKWGKVFGDAAYRQWKWHVASKNREKISSNQHNQKGIFAFLRGGFLPFIWIKAKSEKGTESSSSLPEDSIAALYLSLESGKFWFPAQVYNRENGHAGFMLSCYDAQLCYDSRSDTFLARYSPHGRWTTEENIQWDRLRVPPIATSPHALHISDCLDDLRPGDHIEIQWRRNKEFPYGWWYGVIGHLEQCQGHGNHCHCHYNDIVILEFTQYTAGSRWRQTVINRKHHIEKGNEIDGFYGGIRKLHSKEEIARWKNLWPTKIVIHD

SEQ ID NO: 56785 - protein, 167 aa, Glycine max
  peptide (1)..(167): Ceres Seq. ID no. 13582383
MLSCYDAQLCYDSRSDTFLARYSPHGRWTTEENIQWDRLRVPPIATSPHALHISDCLDDLRPGDHIEIQWRRNKEFPYGWWYGVIGHLEQCQGHGNHCHCHYNDIVILEFTQYTAGSRWRQTVINRKHHIEKGNEIDGFYGGIRKLHSKEEIARWKNLWPTKIVIHD

SEQ ID NO: 56786 - DNA, 1051 bp, Glycine max
  misc_feature (1)..(1051): Ceres Seq. ID no. 13595667
ctctaggtttccaccgccgccgcctcccctctactcctcgctatcggccacgctccgcctcctttcctctgccccgcaactccgccgtcctccgcgccgccgcctcgccggacctccgccgccccgacctcccctcctcctcctccggagctacatagaggtttgattgagcgagatggggttgagggacaagaagaggaaccagaggcgcgtgctctcgcgccgctcggctggtcccaagaccggcgagggcaaggatttcctgccgctggaggggaaagagcagagggtccgggagaagaagcagcccgaggagccggagagcacggccaccgtcctctacatcggccatatcccccacggtttctacgaggaccagatgcaaggtttctttcagcagtttggggctgttaagagggtcagggttgcccggaaccgcaagacagggaagtctaagcattatggattcattgagttcgagaaccctgaggtggcgaagattgtggctgatgagatgaataactacctgttgtttgagcacactctgcagattgcgcctgtcccgccggagaaagttcatgccaaattatggaaaggtgtgcgtaagggatttataccagttgaccgatgtttaaacrcaataaagtntgaactggaggsggsttagtaaggataaaacagtggaagagcacaagaagatgctcgaaggaattgtaaagcgggatgagaagcgccgcaaaagaatcaaggctgctggtatcgattacgagtgtccagcccttatcggaagcgttcagccttcagctaagaagatcaagtttgatgaggattagctatagagaaggcagatggatctttctttatcgggtaggagtgacgggactctgctgagttaacctggctggtccattttagctggggatgagatggcgatttcgtactttggctttgtatctgtgtttggtcgatgttatgtaagttgaatgactggtttatgttggtgaagaagcataaagctgtggtggaaaattaatgaacttgctttctttcc

SEQ ID NO: 56787 - protein, 163 aa, Glycine max
  peptide (1)..(163): Ceres Seq. ID no. 15221635
  misc_feature (155)..(155): Xaa is any aa, unknown or other
  misc_feature (158)..(158): Xaa is any aa, unknown or other
  misc_feature (162)..(162): Xaa is any aa, unknown or other
  misc_feature (163)..(163): Xaa is any aa, unknown or other
MGLRDKKRNQRRVLSRRSAGPKTGEGKDFLPLEGKEQRVREKKQPEEPESTATVLYIGHIPHGFYEDQMQGFFQQFGAVKRVRVARNRKTGKSKHYGFIEFENPEVAKIVADEMNNYLLFEHTLQIAPVPPEKVHAKLWKGVRKGFIPVDRCLNXIKXELEXX

SEQ ID NO: 56788 - protein, 95 aa, Glycine max
  peptide (1)..(95): Ceres Seq. ID no. 15221636
  misc_feature (87)..(87): Xaa is any aa, unknown or other
  misc_feature (90)..(90): Xaa is any aa, unknown or other
  misc_feature (94)..(94): Xaa is any aa, unknown or other
  misc_feature (95)..(95): Xaa is any aa, unknown or other
MQGFFQQFGAVKRVRVARNRKTGKSKHYGFIEFENPEVAKIVADEMNNYLLFEHTLQIAPVPPEKVHAKLWKGVRKGFIPVDRCLNXIKXELEXX

SEQ ID NO: 56789 - DNA, 1514 bp, Glycine max
  misc_feature (1)..(1514): Ceres Seq. ID no. 12612425
acccttgagcctttaagcagagaaagcaaaagaaggcaagaagctgagagttttgagttttgagatttgactcacgagaggagagtaatgtgtgggaagtagaagtagaagtagaaggagagaagcaccactacgtcagcgattcctttgcctttttcttctttcttagactcgaagacaagtttgatcctattttgagaatcgcattcagatggaaagcgcatcagagcttgtggaattcccgttgttgctgacaccaatcgattccaactacagagcttgcaccattccttacagattcccctccgataaccctcgcaagcccactcccaccgaaatctcttggattgatctcttcctcaactcaatcccctctttcaagaagcgtgcagagagtgatacttctgttcctgatgctgcagctaaagctgaaaaatttgctcaaagatatgctgatatacttgaagatttgaagaaagatcctgaaagtcatggtgggcctcctgattgcattcttctctgcagacttcgtgaacttgtgcttagagaattgggattcagagatatcttcaaaaaagtcaaggatgaagaaaatgcaaaagccatctcactgtttgagaatgttgttcatcttaatgatgccattgaagatgaaggcaagcgacttgagaatctagttagaggaatttttgctggaaacatatttgatcttggttctgcacagcttgcagaggttttctctaaggatggaatgtcctttttggctagttgtcaaaatctcgttcctcgaccttgggtcattgatgatcttgacactttcaaattgaaatggagcaagaacccatggaagaaggttatcatatttgttgataactctggtgcagatatcattttgggtattatgccatttgcaagagaactacttcggcgtgggagtcaggttgtattggctgctaatgacttaccatccatcaatgatgtgacttgttctgagctagttgaaattatatcaaagttaaaggatgaagatggacagcttgtgggtgtcagtacttcaaatctcttaattgcgaactctggcaatgatttacctgtcattgatcttacaagagtgtcacaggagcttgcttaccttgccagcgatgcagatcttgtcatcttagaagggatgggtcgtggaatagaaacaaatctctatgctcaatttaaatgtgattctcttaagattggaatggtgaaacatcccgaggtagcacaatttctcggtggacgtttgtatgactgtgtattcaaatacaatgaagtttcaagttagctatgaagttatattcttttcctactaatgctgcagacctgcaatttttctactgttaatccttcatcttgatacaccattacatgcctgtagtttggatactctttaaaatgtcattttagtattataaaggtgataaaaccaaaacatcttacttgtaataagaagttattctacatacatgacttggtctctctct

SEQ ID NO: 56790 - protein, 367 aa, Glycine max
  peptide (1)..(367): Ceres Seq. ID no. 12612426
MESASELVEFPLLLTPIDSNYRACTIPYRFPSDNPRKPTPTEISWIDLFLNSIPSFKKRAESDTSVPDAAAKAEKFAQRYADILEDLKKDPESHGGPPDCILLCRLRELVLRELGFRDIFKKVKDEENAKAISLFENVVHLNDAIEDEGKRLENLVRGIFAGNIFDLGSAQLAEVFSKDGMSFLASCQNLVPRPWVIDDLDTFKLKWSKNPWKKVIIFVDNSGADIILGIMPFARELLRRGSQVVLAANDLPSINDVTCSELVEIISKLKDEDGQLVGVSTSNLLIANSGNDLPVIDLTRVSQELAYLASDADLVILEGMGRGIETNLYAQFKCDSLKIGMVKHPEVAQFLGGRLYDCVFKYNEVSS

SEQ ID NO: 56791 - protein, 187 aa, Glycine max
  peptide (1)..(187): Ceres Seq. ID no. 12612427
MSFLASCQNLVPRPWVIDDLDTFKLKWSKNPWKKVIIFVDNSGADIILGIMPFARELLRRGSQVVLAANDLPSINDVTCSELVEIISKLKDEDGQLVGVSTSNLLIANSGNDLPVIDLTRVSQELAYLASDADLVILEGMGRGIETNLYAQFKCDSLKIGMVKHPEVAQFLGGRLYDCVFKYNEVSS

SEQ ID NO: 56792 - DNA, 1076 bp, Glycine max
  misc_feature (1)..(1076): Ceres Seq. ID no. 13595668
atctctcccccacgttttccacccaccagacactcccacggctgccggcaatggcggcggcggcggagcaggactactggggcctgttccgggaggagacgggctggtacaacgagatcttcctcagcgccgtcgtgccgggcggcggcggctggtggcgggcgctgccgcacccgctccgctcctggctgcgcaactgcatcggcggctacctcctctacttcgccaccggcttcctctggtgcttcgtcatctactactggaagcgcaacgcctacatccccaaagatgctgtccctacagtagaagctatgaagaagcaaataattgttgcatcaaaggctatgccgttctactgtgctcttccgtccatatctgagcacatgattgagagtggatggacacggtgtttttttcatatcagtgaagttggttggcctatgtacattgtctatgtgtctctatatctcatctttgtggagttcggaatttactggatgcacagagagttgcatgacataaagccactatacaagcacctacatgcaacccaccacatttacaacaaggagaataccctatcaccatttgctggactagcattccatccattggacgggatactgcaagccatatcgcacgtgattgctctgttccttctgccgatgcacttcaggacgcacattgctctgttattcatagaggcggtgtggacggccaacatccatgactgcatccacggcaagatctggccagtgatgggtgccggctaccacaccatccaccacacgacgtaccggcacaactatggccactacaccgtgtggatggactggctgtttggcaccctccgcgagccggaggatctcctcaagaaggactgagctcgtgtgagcgcggtctttcctgtctctgtagcaatgtgaagtgtagtagaagtgttaaggcttaaccctccatctgttctcttattctgctgaaagatgtttgttgtggtgtttacgacagttagcggtgtgctgtttcagtctccgtccggtaggtggaaataataaggttgttcatttaccagacat

SEQ ID NO: 56793 - protein, 293 aa, Glycine max
  peptide (1)..(293): Ceres Seq. ID no. 13595669
LSPTFSTHQTLPRLPAMAAAAEQDYWGLFREETGWYNEIFLSAVVPGGGGWWRALPHPLRSWLRNCIGGYLLYFATGFLWCFVIYYWKRNAYIPKDAVPTVEAMKKQIIVASKAMPFYCALPSISEHMIESGWTRCFFHISEVGWPMYIVYVSLYLIFVEFGIYWMHRELHDIKPLYKHLHATHHIYNKENTLSPFAGLAFHPLDGILQAISHVIALFLLPMHFRTHIALLFIEAVWTANIHDCIHGKIWPVMGAGYHTIHHTTYRHNYGHYTVWMDWLFGTLREPEDLLKKD

SEQ ID NO: 56794 - protein, 277 aa, Glycine max
  peptide (1)..(277): Ceres Seq. ID no. 13595670
MAAAAEQDYWGLFREETGWYNEIFLSAVVPGGGGWWRALPHPLRSWLRNCIGGYLLYFATGFLWCFVIYYWKRNAYIPKDAVPTVEAMKKQIIVASKAMPFYCALPSISEHMIESGWTRCFFHISEVGWPMYIVYVSLYLIFVEFGIYWMHRELHDIKPLYKHLHATHHIYNKENTLSPFAGLAFHPLDGILQAISHVIALFLLPMHFRTHIALLFIEAVWTANIHDCIHGKIWPVMGAGYHTIHHTTYRHNYGHYTVWMDWLFGTLREPEDLLKKD

SEQ ID NO: 56795 - protein, 190 aa, Glycine max
  peptide (1)..(190): Ceres Seq. ID no. 13595671
MKKQIIVASKAMPFYCALPSISEHMIESGWTRCFFHISEVGWPMYIVYVSLYLIFVEFGIYWMHRELHDIKPLYKHLHATHHIYNKENTLSPFAGLAFHPLDGILQAISHVIALFLLPMHFRTHIALLFIEAVWTANIHDCIHGKIWPVMGAGYHTIHHTTYRHNYGHYTVWMDWLFGTLREPEDLLKKD

SEQ ID NO: 56796 - DNA, 1193 bp, Glycine max
  misc_feature (1)..(1193): Ceres Seq. ID no. 13582317
aactcttgccactgcttttatctatcttctccatcggcaacaccttgcggaagataaaaaggatcgattcttcaatcaagaccagaaaaaaaaaagagcacgtacgtcacgttagactctgtatatcctgtgctgtgtcccattcggtacgcaagcctcaaaatatacatactccttcattttttcttcttctctttatggcggaaatccccaagttggatttgtcatcttcttgttttgacaatggagagcctttggattcggaacagaagagccagaaaatttttgtttcggatcacataaacgcatttcaatacgcagacgagaaagccgatagctttgtgattgacatggatgccttctcttccggccacaacaaagatgccaccaatgctaattcgagaattacgttgcagaggagtctttccaggaagggatctcagcgtctgggtgactggaagctgaataacaatgctacactttatgataaggataccgttcccgccatatgctctccaaaaggtacacttgttgggcctttcacgcccgaaaagccagcggggatggcagtagggcccatgggtcattccatgaacccacacgtccataatctaacagccgacaacatccccacagagagcaaatgtagtataactcggagaaatagttttagacgaccttcttcatgggccattgatcctaaaagggttctccttttctttgccaccttgtcaagcatgggaacaatgttgctgatatacttcactctgacaatcagtaagcaaagtgcagaagaatatggagggtgattggaagcattgactgaaggttttggattatgataacaaaaaaagaaaagaaaaaggacatgcattaattctggagcaaaacttacaagttaattagaagaagacaaccctgcagcaggagtagcaaagcaaaagctaaccaaatttccgccagcctgatgtcaaaatcagttaaaatcatctctttggcaactgcaagaggtaaatacaaagacacaatgtagtactatgacagagatcaggaagaaatcttccattatgtttttttttttttcatgtaaatggaagaaaaacaaacgatcacatggaggacattgccctttagtttatatgttgcgtgatcgcagggtttagtggaggatggatcataaatcaccttttgcc

SEQ ID NO: 56797 - protein, 268 aa, Glycine max
  peptide (1)..(268): Ceres Seq. ID no. 13582318
LLPLLLSIFSIGNTLRKIKRIDSSIKTRKKKEHVRHVRLCISCAVSHSVRKPQNIHTPSFFLLLFMAEIPKLDLSSSCFDNGEPLDSEQKSQKIFVSDHINAFQYADEKADSFVIDMDAFSSGHNKDATNANSRITLQRSLSRKGSQRLGDWKLNNNATLYDKDTVPAICSPKGTLVGPFTPEKPAGMAVGPMGHSMNPHVHNLTADNIPTESKCSITRRNSFRRPSSWAIDPKRVLLFFATLSSMGTMLLIYFTLTISKQSAEEYGG

SEQ ID NO: 56798 - protein, 203 aa, Glycine max
  peptide (1)..(203): Ceres Seq. ID no. 13582319
MAEIPKLDLSSSCFDNGEPLDSEQKSQKIFVSDHINAFQYADEKADSFVIDMDAFSSGHNKDATNANSRITLQRSLSRKGSQRLGDWKLNNNATLYDKDTVPAICSPKGTLVGPFTPEKPAGMAVGPMGHSMNPHVHNLTADNIPTESKCSITRRNSFRRPSSWAIDPKRVLLFFATLSSMGTMLLIYFTLTISKQSAEEYGG

SEQ ID NO: 56799 - protein, 152 aa, Glycine max
  peptide (1)..(152): Ceres Seq. ID no. 13582320
MDAFSSGHNKDATNANSRITLQRSLSRKGSQRLGDWKLNNNATLYDKDTVPAICSPKGTLVGPFTPEKPAGMAVGPMGHSMNPHVHNLTADNIPTESKCSITRRNSFRRPSSWAIDPKRVLLFFATLSSMGTMLLIYFTLTISKQSAEEYGG

SEQ ID NO: 56800 - DNA, 752 bp, Glycine max
  misc_feature (1)..(752): Ceres Seq. ID no. 12611671
aatccaccaactgcattggaacacccttttctccttcaatggaaggtgaggaggggaaacagtcttcccaaaaaaacccttacgttgaactagaagaagttgactttgattttattctagcaatgagcatgcaagaacaagagagagagttcacaatgctttcaactattgaaagtgaaagtgatgaatatctaagtgactcctctatagataatgatgatgatggtgatcctgactttatagcgagtcaagagtttgaaaccgaccttcggtttcttgaaggtgaaggaagcgacgatgatgatgaagacatggaaatggaagaagatgagattgatccagacgaattatcttatgaagaattgatggagttggaagagtttataggagaagaaacaagagggttatcagcaaatgaaatctctttgtgcttgtacccttatacctgccaatgtgctgaaagcaaaagtggcattgatcgttgtgtgatttgtcaggttgaatatgaagaaggtgaagcactagtggcacttcaatgtgagcacccttatcattcagattgcataagaaagtggcttcaaattaagaaggtttgtccaatttgtggaaatgaagtttcaactcccaacttggcttcgaacccttagttatttagtttggattgaaaaattaatgtgtgtacactaattattgtaatctggatttgcatgaaactgtagttgagaaaataaacaaagcatggaagcttaacc

SEQ ID NO: 56801 - protein, 214 aa, Glycine max
  peptide (1)..(214): Ceres Seq. ID no. 12611672
STNCIGTPFSPSMEGEEGKQSSQKNPYVELEEVDFDFILAMSMQEQEREFTMLSTIESESDEYLSDSSIDNDDDGDPDFIASQEFETDLRFLEGEGSDDDDEDMEMEEDEIDPDELSYEELMELEEFIGEETRGLSANEISLCLYPYTCQCAESKSGIDRCVICQVEYEEGEALVALQCEHPYHSDCIRKWLQIKKVCPICGNEVSTPNLASNP

SEQ ID NO: 56802 - protein, 202 aa, Glycine max
  peptide (1)..(202): Ceres Seq. ID no. 12611673
MEGEEGKQSSQKNPYVELEEVDFDFILAMSMQEQEREFTMLSTIESESDEYLSDSSIDNDDDGDPDFIASQEFETDLRFLEGEGSDDDDEDMEMEEDEIDPDELSYEELMELEEFIGEETRGLSANEISLCLYPYTCQCAESKSGIDRCVICQVEYEEGEALVALQCEHPYHSDCIRKWLQIKKVCPICGNEVSTPNLASNP

SEQ ID NO: 56803 - protein, 174 aa, Glycine max
  peptide (1)..(174): Ceres Seq. ID no. 12611674
MSMQEQEREFTMLSTIESESDEYLSDSSIDNDDDGDPDFIASQEFETDLRFLEGEGSDDDDEDMEMEEDEIDPDELSYEELMELEEFIGEETRGLSANEISLCLYPYTCQCAESKSGIDRCVICQVEYEEGEALVALQCEHPYHSDCIRKWLQIKKVCPICGNEVSTPNLASNP

SEQ ID NO: 56804 - DNA, 1378 bp, Glycine max
  misc_feature (1)..(1378): Ceres Seq. ID no. 13595651
agaacatcctaatcgaaaaaaaaagatttgtgatatctctctctcagtgacacccaaactcaaaacacactcaaacaatctctgttcactttaacaatggcggttttgttgcctccaacattctccccacttctactaaacaccaagacagattttgggtcaccaccatttcctcttctcaccctctcctcctcctcacccacctcctcacccctcttcgtctcttacaccaaatccggaaatgggttggccagtgaggacaaaaaaatcttgcttgagaagtatggctacgatattgatgctgatgagtacttttcacagtcatcttctaagtccaagaggagaaaggagcaaccaaggagaagaggagggaagcaagtgcaggacccaccagaggaccctaagcctcctcgtgtaacccataaattgcttcaggttcttggaggaacagctcgaagagtgaagctactttcaccaaagggcatggatgtgcgccccatgatggaagtggtgaaaggtgcagcctttgatatattacaggcagctggtggctgtcctgcagcattgagacctggtcgctggttagacttgtatagcggtacaggttctgttggaattgaagcacttagccgaggatgttctcaggtgcattttgttgagatggatccgtgggttgtatcagatgttttacgtccaaacctggaggaaactggattcctagatgcttcagtcatacatactgtccgtgtagaaaaattctttgagcgtgcagagcaatttgtaggaaacagtggcccatttgattacattagtgtcacccctccatatacacaagttgactatggggtgctgatgaggcagatatcagaatcatccttgattggagagaacacgtttattgtagttgagtatcctttaaaaactgacatgctggattcttgtggaagtcttgtaaagataaccgacagacggtttggacggacactcttggcaatttatggaccaacatggtcccagaagaagaggagatgacacattcaaatgcctaagttgcagtaaaggctgaaaaacatgctggtgcaatatttatctgttacagtggtcaacaggaattagtttttggcacctacctcacttcttcaaaagctgttatacacagtctaatgttggtccctgcaacaggtcatgtcttgtaatgttaatcataaaatcttgcattctttgttataatgtgacccatcttcagctgaaaattgattattaaatctagattaaggtttcattaccaacagtgttgatcacagtagaagtggattgtgattgtaggtgaactttatctaccatattagtgaaatcatcactctaatcattctatttc

SEQ ID NO: 56805 - protein, 311 aa, Glycine max
  peptide (1)..(311): Ceres Seq. ID no. 15221630
MAVLLPPTFSPLLLNTKTDFGSPPFPLLTLSSSSPTSSPLFVSYTKSGNGLASEDKKILLEKYGYDIDADEYFSQSSSKSKRRKEQPRRRGGKQVQDPPEDPKPPRVTHKLLQVLGGTARRVKLLSPKGMDVRPMMEVVKGAAFDILQAAGGCPAALRPGRWLDLYSGTGSVGIEALSRGCSQVHFVEMDPWVVSDVLRPNLEETGFLDASVIHTVRVEKFFERAEQFVGNSGPFDYISVTPPYTQVDYGVLMRQISESSLIGENTFIVVEYPLKTDMLDSCGSLVKITDRRFGRTLLAIYGPTWSQKKRR

SEQ ID NO: 56806 - protein, 182 aa, Glycine max
  peptide (1)..(182): Ceres Seq. ID no. 15221631
MDVRPMMEVVKGAAFDILQAAGGCPAALRPGRWLDLYSGTGSVGIEALSRGCSQVHFVEMDPWVVSDVLRPNLEETGFLDASVIHTVRVEKFFERAEQFVGNSGPFDYISVTPPYTQVDYGVLMRQISESSLIGENTFIVVEYPLKTDMLDSCGSLVKITDRRFGRTLLAIYGPTWSQKKRR

SEQ ID NO: 56807 - protein, 177 aa, Glycine max
  peptide (1)..(177): Ceres Seq. ID no. 15221632
MMEVVKGAAFDILQAAGGCPAALRPGRWLDLYSGTGSVGIEALSRGCSQVHFVEMDPWVVSDVLRPNLEETGFLDASVIHTVRVEKFFERAEQFVGNSGPFDYISVTPPYTQVDYGVLMRQISESSLIGENTFIVVEYPLKTDMLDSCGSLVKITDRRFGRTLLAIYGPTWSQKKRR

SEQ ID NO: 56808 - DNA, 1370 bp, Glycine max
  misc_feature (1)..(1370): Ceres Seq. ID no. 15226004
aattatgagactaatccacatgagggtgtttaatcttaaattgggttagctaggttaaagccaagggcccatgggctcatgctaatgatttgcaagtgttgctttcaagggaaaaacagagctttttggttggttggcccttttagcagattggtgttttgagaggctttgcaatttgcaacaaagtccactggtctgtttgatgtgattttctggattctagagattaattagtttggacattgagtattttgggaggttgaacaagttcaagtgttttcaatgtgatttgaggacaaagatgaaatccttgagtagtgtaggtcttggtctcagtattatttttggttgcctcttgttggctctggtagctgaggtatactatttgctatggtggaagaagaggataaccaacagagagattgagaataattatggcaaccctgtgaaggagttattctacatgttttgttggaaaaggccatcatcatcttctttgaggcaaacaagtttcactcctcctgagctttgctcttccatgagaattggtgacacccttgttcataacccagaacaagttcagtctcaaagtggcaaggactttgttttcaaaccctttggggaagatggcatggatgcagaatacatgagccagcaggacctcttaggtcctccaagattcttgttcaccatagtagaagaatcaaaggaagatttagaatctgatgatggcaaattcaaatgtgacaagagtggaaaaggttcaaggggtagaagcttgggtgatttgctagttgtggagacaccatatatgacacctactacttctccacctttctttactcctcctttcactactcctatcagtccctataaccagcgtggattcaatcctctatttgaaacagcaactgatgctgagttcaacagattaaagtcctcacctcctccaaaattcaagttcttacaggaagcagaagagaagcttagaagaaaactacaacaggatgaaaataagggaaatggagatgaggttgatggttctttcatcacaatagttgttgacaagaaaacagaaagagaggttaatcaccagcctcgtccaccacagtaccattcaggtacttcacaggtacttcccttagcatcttgacacaattcaccaaaatcagaagaaagaaaccagctaacaccaaagttctgtcaagtcaattaagagtttatttcttaattaatctttctaattacatgttgaagaattccactttttttttgtaatgatgggaatttgttcccccagacccccccccccccccgagttgttgtttaggggatgcagcactatggtttaatctaccaagccagttgtg

SEQ ID NO: 56809 - protein, 283 aa, Glycine max
  peptide (1)..(283): Ceres Seq. ID no. 15226005
MKSLSSVGLGLSIIFGCLLLALVAEVYYLLWWKKRITNREIENNYGNPVKELFYMFCWKRPSSSSLRQTSFTPPELCSSMRIGDTLVHNPEQVQSQSGKDFVFKPFGEDGMDAEYMSQQDLLGPPRFLFTIVEESKEDLESDDGKFKCDKSGKGSRGRSLGDLLVVETPYMTPTTSPPFFTPPFTTPISPYNQRGFNPLFETATDAEFNRLKSSPPPKFKFLQEAEEKLRRKLQQDENKGNGDEVDGSFITIVVDKKTEREVNHQPRPPQYHSGTSQVLPLAS

SEQ ID NO: 56810 - protein, 229 aa, Glycine max
  peptide (1)..(229): Ceres Seq. ID no. 15226006
MFCWKRPSSSSLRQTSFTPPELCSSMRIGDTLVHNPEQVQSQSGKDFVFKPFGEDGMDAEYMSQQDLLGPPRFLFTIVEESKEDLESDDGKFKCDKSGKGSRGRSLGDLLVVETPYMTPTTSPPFFTPPFTTPISPYNQRGFNPLFETATDAEFNRLKSSPPPKFKFLQEAEEKLRRKLQQDENKGNGDEVDGSFITIVVDKKTEREVNHQPRPPQYHSGTSQVLPLAS

SEQ ID NO: 56811 - protein, 204 aa, Glycine max
  peptide (1)..(204): Ceres Seq. ID no. 15226007
MRIGDTLVHNPEQVQSQSGKDFVFKPFGEDGMDAEYMSQQDLLGPPRFLFTIVEESKEDLESDDGKFKCDKSGKGSRGRSLGDLLVVETPYMTPTTSPPFFTPPFTTPISPYNQRGFNPLFETATDAEFNRLKSSPPPKFKFLQEAEEKLRRKLQQDENKGNGDEVDGSFITIVVDKKTEREVNHQPRPPQYHSGTSQVLPLAS

SEQ ID NO: 56812 - DNA, 1406 bp, Glycine max
  misc_feature (1)..(1406): Ceres Seq. ID no. 13582388
aagttcttcattttttctcattctgtctgtctgtctgtctctctctcactcactctttaagcactgagtaatttgtaatattattctgttcttgcttttgaggtcactgttctttctgcagttgctgcattagcattttgggaccattttgttctttaccactactttttctctgtgatgccattgttgtattgtactcttccttgtgctagatctgaagctgtgaggccagactctctcatttcatttccatcccgtgtttaaattggaagctggaacctagtttatgccctgcttgatttggttgctcttaacccttttcagaaatcaaaagcacttgtactatgctggtgttccctatagggaaagatgaaattgaagtctaagaaaggatggaaatctattgtaccacttcatttgaaaggaaaatcagcaagccgtttttctttatttcgcaaagtcaattctgctggctatggacctggcaaaacaccagtttatctgaatgtgtatgacttgacacccatgaatggttatgtgtattgggctggtcttggtatctatcactctggtgtagaagttcatggtgtagaatacgcgtttggagctcatgactacccaacaagtggtgttttcgaggttgaacctcgccaatgccctggcttcaagttcaggaagtcaatattcataggaatcacatctttggattctactcaggttagggagttcatggaacgccagtcagcaagatacaacggtgacacatatcacttaattgtcaagaactgcaaccacttctgcaaagacatctgttacaagctgacggggaaatcgattccaacatgggtaaatcgactggccagactaggttcaatttgcaattgcattcttcctgaagcactaaggatttctgctgtggcgcatgatcctaattatcagcctcatgatagtgaaaagagaaggcttcgaagtggcttcaattgcttgtcctcaatctcaatgcgtcaaaaacacctttccacatcttcactgtttctacagtcacccataagaggctgcttgtcgtcgtcatggccctcctcggaattgagaaaatccattaaccgttccttgaaagaaagataaccgaactttgagaaggtaggaaatgaatgattgtaagaatcttgtttatgtaagtaggatttggtttcatcacataacctcattttcttttatttttctttccttgtcttttgcagttaaacctgccctgttttattatttttttattgtggtgactaagaatgatcctttccaagcttagaagaaactttataaatgagcatcaccaccatctgctgtgtattattttaatttttgtacatacattagcatgtaaaatgatgcaccaacaacttcaatct

SEQ ID NO: 56813 - protein, 251 aa, Glycine max
  peptide (1)..(251): Ceres Seq. ID no. 13582389
MKLKSKKGWKSIVPLHLKGKSASRFSLFRKVNSAGYGPGKTPVYLNVYDLTPMNGYVYWAGLGIYHSGVEVHGVEYAFGAHDYPTSGVFEVEPRQCPGFKFRKSIFIGITSLDSTQVREFMERQSARYNGDTYHLIVKNCNHFCKDICYKLTGKSIPTWVNRLARLGSICNCILPEALRISAVAHDPNYQPHDSEKRRLRSGFNCLSSISMRQKHLSTSSLFLQSPIRGCLSSSWPSSELRKSINRSLKER

SEQ ID NO: 56814 - protein, 199 aa, Glycine max
  peptide (1)..(199): Ceres Seq. ID no. 13582390
MNGYVYWAGLGIYHSGVEVHGVEYAFGAHDYPTSGVFEVEPRQCPGFKFRKSIFIGITSLDSTQVREFMERQSARYNGDTYHLIVKNCNHFCKDICYKLTGKSIPTWVNRLARLGSICNCILPEALRISAVAHDPNYQPHDSEKRRLRSGFNCLSSISMRQKHLSTSSLFLQSPIRGCLSSSWPSSELRKSINRSLKER

SEQ ID NO: 56815 - protein, 131 aa, Glycine max
  peptide (1)..(131): Ceres Seq. ID no. 13582391
MERQSARYNGDTYHLIVKNCNHFCKDICYKLTGKSIPTWVNRLARLGSICNCILPEALRISAVAHDPNYQPHDSEKRRLRSGFNCLSSISMRQKHLSTSSLFLQSPIRGCLSSSWPSSELRKSINRSLKER

SEQ ID NO: 56816 - DNA, 1137 bp, Glycine max
  misc_feature (1)..(1137): Ceres Seq. ID no. 12583413
acacaaacatctctctctctctctctctctctctctctctctaagacacacaaacacaacaaacacatcacaatctcacactgttctcaagtttcaacactttctagttctaccatggcggtaggactctccgccgccataaccatgaagtccctcctccgtttccaccaacctcacctgaacctccccaaatcaatcccaacaacactccctttctcccccatgagaattttccaccacacagcatcaccaagaacccaaaaagtttcaactttcaccgtttgtgtcctcatgcaggacccaaaacaaggcacccacatggaaattgagccacaagaacaatctcctcctcctcctcctcctcccgctcaacaagttctgtcaccaaagttggctgagaaattggccagaaaagagtctgagaggttcacttaccttgttgctgcggtcatgtctagcttcggcatcacatccatggcagtgttcgctgtttattgcagattctcgtggcaaatggagggtggagaagtgccttggtctgaaatgtttggcacatttgctctatcagtgggagctgctgtgggtatggaattttgggctagatgggctcatagggctctctggcatgcttcgctgtggcacatgcatgagtcccaccatcgaccaagagaaggacccttcgagcttaacgatgtatttgcaataatcaacgctgtccctgccatcgctctcctttcctatggtttctttaacaagggactggtccctggcctttgctttggtgcgggtcttggaattacggtctttgggatggcctacatgtttgtacacgatggattggttcataagagattcccggtgggccccattgcaaacgtgccctatctcagaagggtggcctctgctcaccaacttcaccattcggaaaaattcaatggagtgccatatgggctgtttttgggacccaaggaaattgaagaggtgggagggctagaagagctggagaaagagataagtaggagagcaagatcatacaaaatagctaatgagaacaactaatacaaatccagaatgtttcgaagaattatcagtgtaaatcagaaatatgaaataaaatgatccaaaaattttgcttgc

SEQ ID NO: 56817 - protein, 352 aa, Glycine max
  peptide (1)..(352): Ceres Seq. ID no. 12583414
TQTSLSLSLSLSLSKTHKHNKHITISHCSQVSTLSSSTMAVGLSAAITMKSLLRFHQPHLNLPKSIPTTLPFSPMRIFHHTASPRTQKVSTFTVCVLMQDPKQGTHMEIEPQEQSPPPPPPPAQQVLSPKLAEKLARKESERFTYLVAAVMSSFGITSMAVFAVYCRFSWQMEGGEVPWSEMFGTFALSVGAAVGMEFWARWAHRALWHASLWHMHESHHRPREGPFELNDVFAIINAVPAIALLSYGFFNKGLVPGLCFGAGLGITVFGMAYMFVHDGLVHKRFPVGPIANVPYLRRVASAHQLHHSEKFNGVPYGLFLGPKEIEEVGGLEELEKEISRRARSYKIANENN

SEQ ID NO: 56818 - protein, 314 aa, Glycine max
  peptide (1)..(314): Ceres Seq. ID no. 12583415
MAVGLSAAITMKSLLRFHQPHLNLPKSIPTTLPFSPMRIFHHTASPRTQKVSTFTVCVLMQDPKQGTHMEIEPQEQSPPPPPPPAQQVLSPKLAEKLARKESERFTYLVAAVMSSFGITSMAVFAVYCRFSWQMEGGEVPWSEMFGTFALSVGAAVGMEFWARWAHRALWHASLWHMHESHHRPREGPFELNDVFAIINAVPAIALLSYGFFNKGLVPGLCFGAGLGITVFGMAYMFVHDGLVHKRFPVGPIANVPYLRRVASAHQLHHSEKFNGVPYGLFLGPKEIEEVGGLEELEKEISRRARSYKIANENN

SEQ ID NO: 56819 - protein, 304 aa, Glycine max
  peptide (1)..(304): Ceres Seq. ID no. 12583416
MKSLLRFHQPHLNLPKSIPTTLPFSPMRIFHHTASPRTQKVSTFTVCVLMQDPKQGTHMEIEPQEQSPPPPPPPAQQVLSPKLAEKLARKESERFTYLVAAVMSSFGITSMAVFAVYCRFSWQMEGGEVPWSEMFGTFALSVGAAVGMEFWARWAHRALWHASLWHMHESHHRPREGPFELNDVFAIINAVPAIALLSYGFFNKGLVPGLCFGAGLGITVFGMAYMFVHDGLVHKRFPVGPIANVPYLRRVASAHQLHHSEKFNGVPYGLFLGPKEIEEVGGLEELEKEISRRARSYKIANENN

SEQ ID NO: 56820 - DNA, 1543 bp, Glycine max
  misc_feature (1)..(1543): Ceres Seq. ID no. 13639243
agaacaccctaatcgaaaaatttgctagggtcttcccactagcttactcactctcactcgattctcttgttccatctttgtcctcttgttgaactcgtctagtcaacaaggcttgaaaccgatcaagcaagcagtgttttcgtgtgactcggttttatattccggaaatggcgagtttgaacccgttcgatctcttaggagatgacgctgaggatccaagccagattgttttgagtttaccgaagaaggtcgagaaagcagctcctgttcagcctgctaaggccgctaagttcccaaccaagccgtctcctccttctcaagctgtgagggagtcaaggaatggtccttcaggaggtcatggtggtggtggtggacgtgggcctcctcgtggttcgtttaaccccggtggaaacagacctcatgatccaaaggatggagaaaggaacggtgggttccgcggataccgtgaaagtggtggtcgtggaggccacattggtggttttgctaatggtaaaactggtgatgttgaacgtccgaggagggtctatgaccgccgtagtggaactggtcgtagtaatgacgtgaaacgtgagggtggtggtcgtggaaactggggtactcctgaagatgatattcaaccagtaaccgaggaacctacaacggaggttgagaagagccctgttgctgagaaggaaggcggtgaggatgccaccactgatgcaaagaaagaagctcctgaagttgagcaagagcctgaggacaaggagatgacgctggaagagtatgagaagattctggaggagaagaagaaagctctgcaagccacaaaggtggaggaaaggaaagttgacaccaaagtgttcgagtctatgcaacagctctctaacaagaagaccaatgatgaggagatcttcatcaagctgggatccgacaaggacaaacgcaaagatgctgctgagaaagaagagaaggccaagaagtcgttgagcataaacgagtttttgaagccggctaatggagagacctacaacccaagaggtggataccgtggaagaggaggacgcagtggtggtcgtggacagagggatggaaaagtcaacggaggaggaaaccaaaggaatggaggagcctctgctcctgctccagctatcggagacagtgctcagttcccatcgttgggcaactaaagacaccctttctggtccttcaagcatctacctatctatctccactctcttttagtttaattttgttgtcttagttctccatcattttttgttacactttcactacaaaacatgtttggtagctgactttatgatggaaaaacaaaattataatatccttttgtctcmaaatwttwtattcttttbcttttcrarrgaaraaaaaaaaaaaaaaaaaaaaaaaaaaaaaaaaaaaaaaaaaaaaaaaaaaaaattaaaaaaaaaaaaaaaaaggtttatcsaaacccgccamccccgagggggggcccggamcccawtycccccaaaagggggccgaataacgcgggccccggggc

SEQ ID NO: 56821 - protein, 339 aa, Glycine max
  peptide (1)..(339): Ceres Seq. ID no. 15219423
MASLNPFDLLGDDAEDPSQIVLSLPKKVEKAAPVQPAKAAKFPTKPSPPSQAVRESRNGPSGGHGGGGGRGPPRGSFNPGGNRPHDPKDGERNGGFRGYRESGGRGGHIGGFANGKTGDVERPRRVYDRRSGTGRSNDVKREGGGRGNWGTPEDDIQPVTEEPTTEVEKSPVAEKEGGEDATTDAKKEAPEVEQEPEDKEMTLEEYEKILEEKKKALQATKVEERKVDTKVFESMQQLSNKKTNDEEIFIKLGSDKDKRKDAAEKEEKAKKSLSINEFLKPANGETYNPRGGYRGRGGRSGGRGQRDGKVNGGGNQRNGGASAPAPAIGDSAQFPSLGN

SEQ ID NO: 56822 - DNA, 1175 bp, Glycine max
  misc_feature (1)..(1175): Ceres Seq. ID no. 13595598
ataagtggtatagtctaggccaattcatttcactatcttctttttctccctcttctgtttccatttgagtctcctactagcacacagattattgagatccaaagatcttaactatatggtggcaagaagaatctaaagagaaacaaccaaagcttaagcaaacagtcttgtctactgttgaaaaacaggagaaaatgtcttgtaataatggaatgtcttttttcccttcaaatttcatgatccaaacctcttacgaagatctacctccttctctttcacctctccttccttcttgctctatacctcaagatcttcatgggtttgcttcgtttctaggtaagcgatctccagtagaagggttagaagctgggaacattatgaacggagaagaggattattcagatgatgggtctcaaatgggagagaagaagaggagattgaacatggagcaagtgaagacattagagaagaacttcgagcttggaaacaagcttgacccagagaggaaaatgcagttggctcgtgccttgggtttacagccaagacagatagcgatttggtttcagaacagaagagctcgctggaaaacaaagcagcttgagaaagattatgatacacttaaacgacagtttgattcccttaaagctgaaaacgatcatcttcaaactcacaaccagaaactccaagctgagataatgagttcaaggaacagagaacaaacagaatcaataaatctgaacaaagaaacagaaggatcttgcagtaacagaagcgacaacagttccgataatttcaggctggacatctcgacggctgtgccatcagtagacagcacaataacaggcggccatccaccagcgccacagactgttggtcgacacttctttccaccagcgaccgcgacgaccaccacaacgactatgcaattctttcaaaactcgtcttctggtcagagtatggttaaagaagaaaacagtatcagtaacatgttctgtgcaatggatgaccactcaggtttttggccatggcttgatcagcaacagtacaactgaaactggtcgacctgtttttatttctttcaaagtttttatatattttgttttgtttttttgttttgatatcagaaagaacatgcatgtttcaaaaacttggaatctatcattcacttttgagtt

SEQ ID NO: 56823 - protein, 285 aa, Glycine max
  peptide (1)..(285): Ceres Seq. ID no. 13595599
MSCNNGMSFFPSNFMIQTSYEDLPPSLSPLLPSCSIPQDLHGFASFLGKRSPVEGLEAGNIMNGEEDYSDDGSQMGEKKRRLNMEQVKTLEKNFELGNKLDPERKMQLARALGLQPRQIAIWFQNRRARWKTKQLEKDYDTLKRQFDSLKAENDHLQTHNQKLQAEIMSSRNREQTESINLNKETEGSCSNRSDNSSDNFRLDISTAVPSVDSTITGGHPPAPQTVGRHFFPPATATTTTTTMQFFQNSSSGQSMVKEENSISNMFCAMDDHSGFWPWLDQQQYN

SEQ ID NO: 56824 - protein, 279 aa, Glycine max
  peptide (1)..(279): Ceres Seq. ID no. 13595600
MSFFPSNFMIQTSYEDLPPSLSPLLPSCSIPQDLHGFASFLGKRSPVEGLEAGNIMNGEEDYSDDGSQMGEKKRRLNMEQVKTLEKNFELGNKLDPERKMQLARALGLQPRQIAIWFQNRRARWKTKQLEKDYDTLKRQFDSLKAENDHLQTHNQKLQAEIMSSRNREQTESINLNKETEGSCSNRSDNSSDNFRLDISTAVPSVDSTITGGHPPAPQTVGRHFFPPATATTTTTTMQFFQNSSSGQSMVKEENSISNMFCAMDDHSGFWPWLDQQQYN

SEQ ID NO: 56825 - protein, 271 aa, Glycine max
  peptide (1)..(271): Ceres Seq. ID no. 13595601
MIQTSYEDLPPSLSPLLPSCSIPQDLHGFASFLGKRSPVEGLEAGNIMNGEEDYSDDGSQMGEKKRRLNMEQVKTLEKNFELGNKLDPERKMQLARALGLQPRQIAIWFQNRRARWKTKQLEKDYDTLKRQFDSLKAENDHLQTHNQKLQAEIMSSRNREQTESINLNKETEGSCSNRSDNSSDNFRLDISTAVPSVDSTITGGHPPAPQTVGRHFFPPATATTTTTTMQFFQNSSSGQSMVKEENSISNMFCAMDDHSGFWPWLDQQQYN

SEQ ID NO: 56826 - DNA, 1454 bp, Glycine max
  misc_feature (1)..(1454): Ceres Seq. ID no. 12611392
atatactgttattagttacatacatagagatatagtcaatggcaattgcagcggcaaactcatcacccaccatgagcctcagccatagccagagccaagaggatgccaccaccaacgacaacaagcccgtcgtcgtcgacgatgatcacgagcacgacatggtcatgcccggctttcgcttccacccaactgaagaagagctcgtggagttctaccttcgccgtaaggtggagggaaagcgtttcaacgttgagcttattactttcctcgatctttatcgctatgacccttgggagcttcccgccttggcagctattggtgagaaggagtggtacttctatgtgcccagagataggaagtatcgcaacggtgatcgtcccaatcgcgttactacctctgggtattggaaggcaacaggagctgataggatgatccgaaccgagaattttcgctctatcggcctcaagaaaaccctagttttctattctgggaaagctcctaaaggcattcgaaccagttggattatgaacgagtatcgcttgccgcaacatgaaactgaacgatatcaaaaggctgagatatcgctttgccgtgtgtacaagagagctggagtcgaagaccatccttccctccctcgctgcctcccacgaggccatcctcatcatcaagggcttcttctgatcacatcaataataataagtcgacgaagcacaatgaaatggttcaacaccacaacatcaacatgggattcatgggacaatcaaagccgccaacaactgaacacatagttgacaaaattaatgaatcggaagcaagcagtgatgtcaacacaactcttggactttctaaatacaatgcttaccgtgctgccaccatggcgcttccagttgttccaatggatgaggaagccttgatgatgatgcagcaatctaagcaagctgctgctgcagcagcacatgttccaacaatcttctctgctgggccttctagttccaacaacagtggagtagtgaatatggatgatctgaataggctaatgagttatcaacatcagtactacaatgttcaaagccaaagccatcccaatcagttctctactttgctgatgcaaccttcaccaatagtgtctctcagctcgctaccaaatccacttccacccaccttctctgaccgactctgggactggaatccaatccctgagtcaccaagtcaagagtacagcaacatatccttcaagtaatatgactcatcaattatatctgtgaactgcacatacacacatatatatacatatatattatagatagagacatttatctgtgctaatttctactatcaattttatgtaggttgtacgttttcgttactctctaattaatctggtatcttattttatatttcaataagataattgtatgacttactttgatcaatgatcaatatgtatttgtcgg

SEQ ID NO: 56827 - protein, 249 aa, Glycine max
  peptide (1)..(249): Ceres Seq. ID no. 12611393
MAIAAANSSPTMSLSHSQSQEDATTNDNKPVVVDDDHEHDMVMPGFRFHPTEEELVEFYLRRKVEGKRFNVELITFLDLYRYDPWELPALAAIGEKEWYFYVPRDRKYRNGDRPNRVTTSGYWKATGADRMIRTENFRSIGLKKTLVFYSGKAPKGIRTSWIMNEYRLPQHETERYQKAEISLCRVYKRAGVEDHPSLPRCLPRGHPHHQGLLLITSIIISRRSTMKWFNTTTSTWDSWDNQSRQQLNT

SEQ ID NO: 56828 - protein, 238 aa, Glycine max
  peptide (1)..(238): Ceres Seq. ID no. 12611394
MSLSHSQSQEDATTNDNKPVVVDDDHEHDMVMPGFRFHPTEEELVEFYLRRKVEGKRFNVELITFLDLYRYDPWELPALAAIGEKEWYFYVPRDRKYRNGDRPNRVTTSGYWKATGADRMIRTENFRSIGLKKTLVFYSGKAPKGIRTSWIMNEYRLPQHETERYQKAEISLCRVYKRAGVEDHPSLPRCLPRGHPHHQGLLLITSIIISRRSTMKWFNTTTSTWDSWDNQSRQQLNT

SEQ ID NO: 56829 - protein, 209 aa, Glycine max
  peptide (1)..(209): Ceres Seq. ID no. 12611395
MVMPGFRFHPTEEELVEFYLRRKVEGKRFNVELITFLDLYRYDPWELPALAAIGEKEWYFYVPRDRKYRNGDRPNRVTTSGYWKATGADRMIRTENFRSIGLKKTLVFYSGKAPKGIRTSWIMNEYRLPQHETERYQKAEISLCRVYKRAGVEDHPSLPRCLPRGHPHHQGLLLITSIIISRRSTMKWFNTTTSTWDSWDNQSRQQLNT

SEQ ID NO: 56830 - DNA, 1539 bp, Glycine max
  misc_feature (1)..(1539): Ceres Seq. ID no. 14314782
aacaacaaaggtgtttcagcaaaataattatttatgtcataaagttgttccaactgaagatgcgaaggctttttctctctctctaaaagcagtggccatcatgttctcttcctaaaccctttcaatcatcatttagctctgaaaaaaataatagaaattaaaacgaaaaatgtcctggctcttcaagtccaaccaccctgacccagaatcttctaatctccacaaccgcaccgttatccactcgtcttcgccgccgcatcccgccgccgatcgccacggcgtcaaggacgacatatcgcatattttccgcggcgtcgccaacttcctcgctccgccgccgccgtcttcctcttcctcttcttcttcttcttcttcttcctcctccgccggcgattcctcctcctcgcaagctctgtcaggaatccggaacgatctcgtggagatcggcggaagcttcaaaaactctctctcgcgcatttcctcgaacaaagccgtcaccggaatctccaagctcgcttcgcagttgttgcagttggagcctgatcaacaacggagcaacgatgacgacgcggtgcctggaacgacggaagatgttgttcgtttcgtgaaggagatttctgcgcggcctcagtgttggactgaattccccttgccactccataacgattttagcatgtccaattctcagagagaacatgcattggctatagagcaactggtacccgaattcattgcactaagactgaatctttgcagttacatgaatgtggaaaagttttggatgatctattttttgttaatacttccaagactaaatcagcatgattttgagcgcctatcaactcccaagaaactaggagagaggaaaaatttgcaagctggagaacctgaaaacccaaggactgtggatacatatcaagagggtagggaggaccgtggaacagaaagtatctcatttgagcaaaatcagatattgactgaggttacaaacgcagtagagggtttagaagttgatgacacggttagcactgaaaaatggttggaagatacagacattgatgctagttcattggcttcctgtacaaaacttcaacaggaagaggacgtctcattcagtgacctagaggatgataggagttatagctccgataaattatctggctacagggaggcgcatgacataaggggttcatcacctgaaggtgctactagtgactgggttcggctgcgtgaaagttctgagagagatggcaggaagaaggttatccgtttgaagggtaaggattcagaagatgagtcaaatgattggctcactgttgatgatttcaattagatagtcttttcttgattcaccaagttgtaaaggttcgatatttacccccttccccgtggttctgtatttagggagtacaaaattatataaatcaaagtatttcttttcttattcacacgtacatatttcttgtttgtacaaggcattgggtagacaacattcaatttttgaaagtgtacaacgcaaataaaatcaaggatttcaag

SEQ ID NO: 56831 - protein, 387 aa, Glycine max
  peptide (1)..(387): Ceres Seq. ID no. 14314783
MSWLFKSNHPDPESSNLHNRTVIHSSSPPHPAADRHGVKDDISHIFRGVANFLAPPPPSSSSSSSSSSSSSSAGDSSSSQALSGIRNDLVEIGGSFKNSLSRISSNKAVTGISKLASQLLQLEPDQQRSNDDDAVPGTTEDVVRFVKEISARPQCWTEFPLPLHNDFSMSNSQREHALAIEQLVPEFIALRLNLCSYMNVEKFWMIYFLLILPRLNQHDFERLSTPKKLGERKNLQAGEPENPRTVDTYQEGREDRGTESISFEQNQILTEVTNAVEGLEVDDTVSTEKWLEDTDIDASSLASCTKLQQEEDVSFSDLEDDRSYSSDKLSGYREAHDIRGSSPEGATSDWVRLRESSERDGRKKVIRLKGKDSEDESNDWLTVDDFN

SEQ ID NO: 56832 - protein, 219 aa, Glycine max
  peptide (1)..(219): Ceres Seq. ID no. 14314784
MSNSQREHALAIEQLVPEFIALRLNLCSYMNVEKFWMIYFLLILPRLNQHDFERLSTPKKLGERKNLQAGEPENPRTVDTYQEGREDRGTESISFEQNQILTEVTNAVEGLEVDDTVSTEKWLEDTDIDASSLASCTKLQQEEDVSFSDLEDDRSYSSDKLSGYREAHDIRGSSPEGATSDWVRLRESSERDGRKKVIRLKGKDSEDESNDWLTVDDFN

SEQ ID NO: 56833 - DNA, 922 bp, Glycine max
  misc_feature (1)..(922): Ceres Seq. ID no. 14306325
aatcgtctccaccttgctttcttctccaatgtccgattctctcaccgatcttgcgccaaatacaaattcgttacatcctaacccagggttccgacgagcatggtggacggtccgacgagtccaggcaatggtagccatgagagtggcgagcatagccctcgctctaacgtgcgcgagtaggacaggtacctccccatcgctaacataagccccatcatgaagaaggcactacctacgaatggtaaaatcgccaaggacgccaaagagactgttcaggaatgcttatccgagtttttaagatcaacctttcagacacatgtattgagatggatggattacattcagcacaagcaagaatttgtaggtttatttgagaaaatattgttgcagaagcctggatttgagcccccggtaacacatcctgttggagttgtggaagctgatttaaaatcaaacaacactgagcaaagcgtaaagaatgtcagcaagtccgaagtagactcaagcaaggataaaaacaaagttgaggattgacggaaaagaaacagccggataagattacaccggtattttctttgcactcgttaactttgcatttttaaaattcataactcatgttttgtttaagggtgaagatttaacattcaacatgagtctaaaggtggggaacatgagtttagtggttgcattggagcagtatatcagcttctttcagagataaagttcctggatggatgaaagatactttttttgtgagtttgtattgttaaggcatagtattttgttatcttttgaagatcaattcttattatagtttaactagtaaatttttattcttttcttttagcctattcttatttttttctcttgttaaaaatcatagtaatgttatatggtgcaatttatggttttaggagtgcac

SEQ ID NO: 56834 - protein, 105 aa, Glycine max
  peptide (1)..(105): Ceres Seq. ID no. 14306326
MKKALPTNGKIAKDAKETVQECLSEFLRSTFQTHVLRWMDYIQHKQEFVGLFEKILLQKPGFEPPVTHPVGVVEADLKSNNTEQSVKNVSKSEVDSSKDKNKVED

SEQ ID NO: 56835 - protein, 68 aa, Glycine max
  peptide (1)..(68): Ceres Seq. ID no. 14306327
IVSTLLSSPMSDSLTDLAPNTNSLHPNPGFRRAWWTVRRVQAMVAMRVASIALALTCASRTGTSPSLT

SEQ ID NO: 56836 - protein, 67 aa, Glycine max
  peptide (1)..(67): Ceres Seq. ID no. 14306328
MDYIQHKQEFVGLFEKILLQKPGFEPPVTHPVGVVEADLKSNNTEQSVKNVSKSEVDSSKDKNKVED

SEQ ID NO: 56837 - DNA, 1583 bp, Glycine max
  misc_feature (1)..(1583): Ceres Seq. ID no. 14314792
cctttattctccgtttctggtccgccccttcccttctcttcccatctcatctaaatctcaatctctgtctctgtctctgtccgcctcagctttcactccaaaccctaaccaaccgatctctttcgccgatcccggaaaccttccgaatcgtttaattgacgctacgccgtggaatctgggcggaacaaatccacgatggcggcctccaccaccagccaggtctacatccaggtaatcgacgatgtcatgaacaaggtccgcgacgagttcgtcaacaacggtggtcccggcgacgaagttctcaaggagcttcaatctatatgggaatcgaagatgatgcaagctggtgccattgttggtcccatagaaaggtccggggcgcctaagccaacgcccggtggtccaattactccggttcatgatcttaacatgccttatgaggggactgaggagtatgaaactcccacagcggaaatgcttttcccccctacgccattgcaaactcctcttcaaacccctttaccaggaactgtggataactcaatgtataacattcccactggacctagtgactacccgtctgctggaaatgagcctggtgcaaataacgagataaaaggtggaaggcctggtccatacatgcaacctcctccttcaacgtggacgaaccagaaccagaaccaaagggctccacttgacgtcaatgttgcttacgtggaagggcgggatgaggcggaaagaggagcttcaaatcaacctctgacacaggacttcttcatgtcctcggggaagcggaaacgtgatgaaattgcttctcaatataatgctggtggatatatacctcagcaagatggagctggagatgctgcttctcaaatttttgaaattgaagtgtatggagggggcatgtccattgatgcaggtcactctacttctaaaggaaaaatgccagcacaatcagacaggccagcttctcagattcctcaacttgatggaccaattccctacgatgatgatgtgctttctactccaaatatatacaattatggagtgttcaatgaagactacaacattgcaaatacaccagctccttccgaagtaccagcaagtacccctgctcccattgctcaaaatgaggttgatgaagaagatgatgatgatgagccccccctaaatgaaaatgatgatgatgatttggatgatttggatcagggagaggatcaaaatacacatcatcttgttttggcccagtttgacaaggtgacacgtaccaagagtagatggaagtgcaccctaaaggatggtatcatgcatataaataataaggacattctcttcaataaggcaactggagaatttgacttctgattttgtcagggattggtcttgccatttttgtggcagtgctttggtgaattacaggtactctgaggcatttcctgaagtttgccatttgtcaagtgggatatgtatgtctattagctctgcatacttggacagtttaaactgcagtgactctcgtggttagttttttagccgtcataaagaacaacgataatgtcaagtttgcttttcttggttcc

SEQ ID NO: 56838 - protein, 390 aa, Glycine max
  peptide (1)..(390): Ceres Seq. ID no. 14314793
MAASTTSQVYIQVIDDVMNKVRDEFVNNGGPGDEVLKELQSIWESKMMQAGAIVGPIERSGAPKPTPGGPITPVHDLNMPYEGTEEYETPTAEMLFPPTPLQTPLQTPLPGTVDNSMYNIPTGPSDYPSAGNEPGANNEIKGGRPGPYMQPPPSTWTNQNQNQRAPLDVNVAYVEGRDEAERGASNQPLTQDFFMSSGKRKRDEIASQYNAGGYIPQQDGAGDAASQIFEIEVYGGGMSIDAGHSTSKGKMPAQSDRPASQIPQLDGPIPYDDDVLSTPNIYNYGVFNEDYNIANTPAPSEVPASTPAPIAQNEVDEEDDDDEPPLNENDDDDLDDLDQGEDQNTHHLVLAQFDKVTRTKSRWKCTLKDGIMHINNKDILFNKATGEFDF

SEQ ID NO: 56839 - protein, 373 aa, Glycine max
  peptide (1)..(373): Ceres Seq. ID no. 14314794
MNKVRDEFVNNGGPGDEVLKELQSIWESKMMQAGAIVGPIERSGAPKPTPGGPITPVHDLNMPYEGTEEYETPTAEMLFPPTPLQTPLQTPLPGTVDNSMYNIPTGPSDYPSAGNEPGANNEIKGGRPGPYMQPPPSTWTNQNQNQRAPLDVNVAYVEGRDEAERGASNQPLTQDFFMSSGKRKRDEIASQYNAGGYIPQQDGAGDAASQIFEIEVYGGGMSIDAGHSTSKGKMPAQSDRPASQIPQLDGPIPYDDDVLSTPNIYNYGVFNEDYNIANTPAPSEVPASTPAPIAQNEVDEEDDDDEPPLNENDDDDLDDLDQGEDQNTHHLVLAQFDKVTRTKSRWKCTLKDGIMHINNKDILFNKATGEFDF

SEQ ID NO: 56840 - protein, 344 aa, Glycine max
  peptide (1)..(344): Ceres Seq. ID no. 14314795
MMQAGAIVGPIERSGAPKPTPGGPITPVHDLNMPYEGTEEYETPTAEMLFPPTPLQTPLQTPLPGTVDNSMYNIPTGPSDYPSAGNEPGANNEIKGGRPGPYMQPPPSTWTNQNQNQRAPLDVNVAYVEGRDEAERGASNQPLTQDFFMSSGKRKRDEIASQYNAGGYIPQQDGAGDAASQIFEIEVYGGGMSIDAGHSTSKGKMPAQSDRPASQIPQLDGPIPYDDDVLSTPNIYNYGVFNEDYNIANTPAPSEVPASTPAPIAQNEVDEEDDDDEPPLNENDDDDLDDLDQGEDQNTHHLVLAQFDKVTRTKSRWKCTLKDGIMHINNKDILFNKATGEFDF

SEQ ID NO: 56841 - DNA, 952 bp, Glycine max
  misc_feature (1)..(952): Ceres Seq. ID no. 14306198
attgctcctcgcgcttaaacactttcgggcgagtgtgtgtgtagcagtttctggttctgtttttggtttcgtttcagcaaaacctctcttcttcttctgattgattccacctcgcgatttttcgattttcgtttgttttcttctttttcggtttctgatctgaactcgattcgattcgctattgccggaaaatgagtcctccggcaagtgtccggtgatgatcgctccctcgagaggttgttgaggttatcgttgttgttcttcgaagtcatggtttcgatctgaggttttggcgctctcgagttcgttttgtactgttttacgtgtgacatgtgaattggaatgcttattccagcttatacaaaacagagacggatctcttcctattgttctcgctttgtttcttttgcagtagcatcatcatcatcaccataccttgttcagattctgctcactttcaccacaacggctttactatttaccgcgtttcgttttcgtgtcaccgcaaataatgaaaggaggtgttccctgtatccactcctcgtcagggaagatctgaagcagtgctagctgctcacgtcctgtaatggacgcatactcctccggcgaagaagtggttgttaagactagaaaaccatatacaatcactaagcaaagggaacgatggacagaggaggagcataataggtttctagaagctttgaaactacacgggcgagcatggcagcgcatagaagagcatataggaacaaagactgccgtgcaaataaggagtcatgcacagaagttctttacaaaggtcaatgggtaccttctcaccttggtttatatgtttaaaatttccttccttttgtttttaacttatgctttaaaagacttgctgtcgatttatgtatcagttccgtatctcttttgattcactttgatgaataaaaatcccttctaactgccc

SEQ ID NO: 56842 - protein, 109 aa, Glycine max
  peptide (1)..(109): Ceres Seq. ID no. 14306199
MDAYSSGEEVVVKTRKPYTITKQRERWTEEEHNRFLEALKLHGRAWQRIEEHIGTKTAVQIRSHAQKFFTKVNGYLLTLVYMFKISFLLFLTYALKDLLSIYVSVPYLF

SEQ ID NO: 56843 - protein, 75 aa, Glycine max
  peptide (1)..(75): Ceres Seq. ID no. 14306200
MLIPAYTKQRRISSYCSRFVSFAVASSSSPYLVQILLTFTTTALLFTAFRFRVTANNERRCSLYPLLVREDLKQC

SEQ ID NO: 56844 - DNA, 1640 bp, Glycine max
  misc_feature (1)..(1640): Ceres Seq. ID no. 14314775
actgaacccaaaacaatcgctagagagagaaaccaagagagagaaagatacaactctcgctttcgctattactattatttcctccctcaaaaaaccgccatggacagtgcagacgcgtggcgcgtggccgcgtgtggcaactccaacgtcaacaaaataatgctccgcttccgcccgatcgcgccgaagccggtcaccggaatttccgccgccgaagctggctccgccgtcggagaagttactcagaacaaccacgtgtcagtcctggggaagagaccgaagaggaagtacgttaggattcggaggaacagtggatacgtgagaaagaataacggagacagtaacggaaaaagtaacggtaacggtaacgatgagtcttccgacgtggcggttgtgacgttgcagttgatgcctgagaaggacgcgccgggaggagacgtcacgctcgccggagattcgtggtgtaagaacgttgatcttgacctaaccgtggagaagattcagatcgtggagaatcggagtgctccaccgccgcgcgcggcggcggagaaaggcgagggaggtaagcgttcagatcttgttgcggcggcgaaggtggcggagtcttgggtgacagtggagagcgtgacaggcacgtgcatgggggagggagacggagagggagggcgagggttattagattgtacggacgcggagaaggtgaagagcctagaagctgacacgtgtcctgcttttgtctgtgacggaagccttagggtgcggtgggtgaatgacgcgtacaagaggatgatgctggaggggcgtgagggtgagggtgagaatatcgtggtgtggttgaaagtgaaggatagtgccatcgcttcgtggtggtgctactctcacccggcgttcacctgcggtgtgaggctgcagtacacgtggcggaacgagaagtgcacgaagatggtgccgtgtgatgtttggagattggactgtggcgggtttgcatggaggctagacgtgaaagctgcgctcagtttgggtctctgaaaaaaaaaaaagaaaaaaaaatcagagacacaaacgcgaccttaaacaaatagatcttttatatatatctatatctctctctctatatatatactcacacctttacataaattgctagctctagttccgtggattgaggtcaagctccctctctgcacaaggacgtgtttggttaggtattatattccagtcagagtttttactactgctactgtttaaagaaaatttaaaaattaggcaaaaaaagaaaagtttatctgatatgcaactacattacatactcagatatgagaaagtaagtgagtaatagaggatagaaaaaaatgatgcttgggaatgagattgggatggtgcttcttattactctatggttagtcttcccttgggagttgggagggaagagaaaaaagtagaaacgtgtgggagttaaacatgcaaagtgctactgaaaaaagtgctttgctttgtggtgctatctatggtcttgtagaactaaagctatattaggtgaagtgtgtgtgtaagtgtgtaactatattattgtcgctccaagactttgcgacaatgaaaaaccgtggtaaatatttgcatatatatatatatagtttagc

SEQ ID NO: 56845 - protein, 342 aa, Glycine max
  peptide (1)..(342): Ceres Seq. ID no. 14314776
TEPKTIARERNQERERYNSRFRYYYYFLPQKTAMDSADAWRVAACGNSNVNKIMLRFRPIAPKPVTGISAAEAGSAVGEVTQNNHVSVLGKRPKRKYVRIRRNSGYVRKNNGDSNGKSNGNGNDESSDVAVVTLQLMPEKDAPGGDVTLAGDSWCKNVDLDLTVEKIQIVENRSAPPPRAAAEKGEGGKRSDLVAAAKVAESWVTVESVTGTCMGEGDGEGGRGLLDCTDAEKVKSLEADTCPAFVCDGSLRVRWVNDAYKRMMLEGREGEGENIVVWLKVKDSAIASWWCYSHPAFTCGVRLQYTWRNEKCTKMVPCDVWRLDCGGFAWRLDVKAALSLGL

SEQ ID NO: 56846 - protein, 309 aa, Glycine max
  peptide (1)..(309): Ceres Seq. ID no. 14314777
MDSADAWRVAACGNSNVNKIMLRFRPIAPKPVTGISAAEAGSAVGEVTQNNHVSVLGKRPKRKYVRIRRNSGYVRKNNGDSNGKSNGNGNDESSDVAVVTLQLMPEKDAPGGDVTLAGDSWCKNVDLDLTVEKIQIVENRSAPPPRAAAEKGEGGKRSDLVAAAKVAESWVTVESVTGTCMGEGDGEGGRGLLDCTDAEKVKSLEADTCPAFVCDGSLRVRWVNDAYKRMMLEGREGEGENIVVWLKVKDSAIASWWCYSHPAFTCGVRLQYTWRNEKCTKMVPCDVWRLDCGGFAWRLDVKAALSLGL

SEQ ID NO: 56847 - protein, 289 aa, Glycine max
  peptide (1)..(289): Ceres Seq. ID no. 14314778
MLRFRPIAPKPVTGISAAEAGSAVGEVTQNNHVSVLGKRPKRKYVRIRRNSGYVRKNNGDSNGKSNGNGNDESSDVAVVTLQLMPEKDAPGGDVTLAGDSWCKNVDLDLTVEKIQIVENRSAPPPRAAAEKGEGGKRSDLVAAAKVAESWVTVESVTGTCMGEGDGEGGRGLLDCTDAEKVKSLEADTCPAFVCDGSLRVRWVNDAYKRMMLEGREGEGENIVVWLKVKDSAIASWWCYSHPAFTCGVRLQYTWRNEKCTKMVPCDVWRLDCGGFAWRLDVKAALSLGL

SEQ ID NO: 56848 - DNA, 1605 bp, Glycine max
  misc_feature (1)..(1605): Ceres Seq. ID no. 15171181
attttcatatctcccaacccccaaatggcttcttcttctcgccactcccctcaattcacccccattctagaggagcgtgaatttgacgacttgagtggccatgacattataagccactccagaagctcccaccctccaacccccattgtccacaagcacactaaatccaatcacaacaaccacaagaaaaagagatcagattccgaggaagatggctccgtctcttgcaacaagtgcagacctcactcccgcgacaaaatcttcatccttcccttggatcactcctccaccaacaactctcacaaaccctcttccttactcgccagccccaacgatattttcaggtcccttgtttccaagctcacccgcaagagtcccatgtcttcttcttcatcccaagaccctctcccaccctccagagaggaacaatggaaaatggcagtcgccgaactctctcacaagctgctccacgccaccagaaaaagagacgaggctcttctagaagcttctagactcatgcactccatgagcgagttggagaagaagctcaacaagctcgaactctattgccacaccttgaaatctggcctcgaacaatgcaccaacaacaacattactacttcccctacttcccttttcaaatctcaaaccctcgaacaggacaccgtgattcaacacttcttggtctcggtgtcggaagcaagatcaagtgtgaggcttttgtctcgttccttaaccatgcaactgaggcacatgggaagcaaggtgtacgagaaagtctccttccttctccaaccatacgacataaaaatatccttctccaagagtccaacaagaagcttacttttctacctagaagcactcttgaacagaaccttctacgaggacttcgaaacaatagggttccagaagaacgcgtgcaacatgatactgaacccaaaggagcgatgcgaggcgagttacgagtcattcaacatggttcacgggctgacgtgggaggaggtgctgagcaaaggaacgaggcacttcagcgaggagttcagcaggttttgcgacaggaagatgagcgagatagtggcgatgttgggctggaaccgggcctggcccgaggcactcttgcaggccttctttggggcctcaaagagcgtgtggaaggtgcacttgttggccaactcgctgcacccgagtctgccgatatttagagtggagaaaggagtaaggtttgattcggtttacatggaggatatgggtggtggtggtggtgacaaggccacttccaacttggtccctgctctggtcagaataatgcttgcgccaggcttttatgtctatggcagtgcagtcaagtgtaaggtcctttgcaggtacttgagtactagtagtaacaaggaagacaaacccttaaccccaaccccttcttgactttggatgaatcactttctttctggttttgtttttttatgtcagctaatattgttcatgatgttgtatattattattatttagtattaagcaatgttggtgctgctgcatgcttgggttgggatggttccatggtggtggtactactatatcgagattttgggtcaaagtaaacaatttggc

SEQ ID NO: 56849 - protein, 473 aa, Glycine max
  peptide (1)..(473): Ceres Seq. ID no. 15171182
IFISPNPQMASSSRHSPQFTPILEEREFDDLSGHDIISHSRSSHPPTPIVHKHTKSNHNNHKKKRSDSEEDGSVSCNKCRPHSRDKIFILPLDHSSTNNSHKPSSLLASPNDIFRSLVSKLTRKSPMSSSSSQDPLPPSREEQWKMAVAELSHKLLHATRKRDEALLEASRLMHSMSELEKKLNKLELYCHTLKSGLEQCTNNNITTSPTSLFKSQTLEQDTVIQHFLVSVSEARSSVRLLSRSLTMQLRHMGSKVYEKVSFLLQPYDIKISFSKSPTRSLLFYLEALLNRTFYEDFETIGFQKNACNMILNPKERCEASYESFNMVHGLTWEEVLSKGTRHFSEEFSRFCDRKMSEIVAMLGWNRAWPEALLQAFFGASKSVWKVHLLANSLHPSLPIFRVEKGVRFDSVYMEDMGGGGGDKATSNLVPALVRIMLAPGFYVYGSAVKCKVLCRYLSTSSNKEDKPLTPTPS

SEQ ID NO: 56850 - protein, 465 aa, Glycine max
  peptide (1)..(465): Ceres Seq. ID no. 15171183
MASSSRHSPQFTPILEEREFDDLSGHDIISHSRSSHPPTPIVHKHTKSNHNNHKKKRSDSEEDGSVSCNKCRPHSRDKIFILPLDHSSTNNSHKPSSLLASPNDIFRSLVSKLTRKSPMSSSSSQDPLPPSREEQWKMAVAELSHKLLHATRKRDEALLEASRLMHSMSELEKKLNKLELYCHTLKSGLEQCTNNNITTSPTSLFKSQTLEQDTVIQHFLVSVSEARSSVRLLSRSLTMQLRHMGSKVYEKVSFLLQPYDIKISFSKSPTRSLLFYLEALLNRTFYEDFETIGFQKNACNMILNPKERCEASYESFNMVHGLTWEEVLSKGTRHFSEEFSRFCDRKMSEIVAMLGWNRAWPEALLQAFFGASKSVWKVHLLANSLHPSLPIFRVEKGVRFDSVYMEDMGGGGGDKATSNLVPALVRIMLAPGFYVYGSAVKCKVLCRYLSTSSNKEDKPLTPTPS

SEQ ID NO: 56851 - protein, 347 aa, Glycine max
  peptide (1)..(347): Ceres Seq. ID no. 15171184
MSSSSSQDPLPPSREEQWKMAVAELSHKLLHATRKRDEALLEASRLMHSMSELEKKLNKLELYCHTLKSGLEQCTNNNITTSPTSLFKSQTLEQDTVIQHFLVSVSEARSSVRLLSRSLTMQLRHMGSKVYEKVSFLLQPYDIKISFSKSPTRSLLFYLEALLNRTFYEDFETIGFQKNACNMILNPKERCEASYESFNMVHGLTWEEVLSKGTRHFSEEFSRFCDRKMSEIVAMLGWNRAWPEALLQAFFGASKSVWKVHLLANSLHPSLPIFRVEKGVRFDSVYMEDMGGGGGDKATSNLVPALVRIMLAPGFYVYGSAVKCKVLCRYLSTSSNKEDKPLTPTPS

SEQ ID NO: 56852 - DNA, 1415 bp, Glycine max
  misc_feature (1)..(1415): Ceres Seq. ID no. 14314737
attgagttgtggtcaacagagagaaagtaggagagaaaaaaaaaaagcctcaccgacttcggcgaaatggatctgccgccggcaccgatccggtggcgcgcaaccgcaatcccattctttgtggcggttctctttgtatccaccatctccccttcgcgcgcaatctactgcgacgaagatgattgctacgatctacttggggtttctcaaagtgccaatgcttccgaaattaaaaaagcttactacaagctctccttgaagtatcacccagataaaaaccctgatccggaatcgcgaaagctgtttgtaaaagtcgccaatgcttatgagattttgaaggatgaggccacgcgagaacaatatgattatgcaattgcacatccggaggaggtgttttataatactgcacgctactatcgggcttactatggtcacaagacggatccccgtgctgtgttggttggccttcttcttattctttcaggttttcaatatctaaatcaatcaacaaggtataatcaggctgtagctatggtcaagaagacacctgcatataaaaataaactaagggcattggaacttgaacgcagtggaggggttacaaacaagaagaagagtcagaagaatatggacaagaaaacagaggaagaccttagtaaagaactcgatctgcagataaccggagctgaaatggcctctgtatggaaacttcttggcgtccgctttgttctattaccatataccttaggcaagctgctgttgtggactgcctgttggttttggagatacaaagtgaaaaagtacccttattcttgggaagatgcttcttatctgacacaaagatccctcagtattcctctcgataggtggagaaatatagatgaagcaacaaaggaagatcttgtgctcagacgcttgtgggagaaatcgaatctggagagctatgtagcagagatgcggaaagaatcgaagcgcagaagatagttgcattagtcgcctctgctgcttttaaagtactaaattttgttgcaaattgattttcggggtggccgtgatagaagcagaatcattcgtgtcaaccacaaaatcgtagaatcatatacaaagtttatttagtttacacatgctattgttgctctctaacagcctgtaaacaatgaacaccaaagaatactgctttagatattgcttttattctttcaatgaatcgggtacctgagcctcaatcttgctacaatcgcatgtttggtagtaattttgagtgcctctctagttcaataattttaaggataaagatgtatggataccctaatgttatttgacaccttgagagagatagaagagaaatataggtatgataagtgatgacttgaatgcagatgtacttgaaatatatatccttcgacttttcgtgt

SEQ ID NO: 56853 - protein, 305 aa, Glycine max
  peptide (1)..(305): Ceres Seq. ID no. 14314738
MDLPPAPIRWRATAIPFFVAVLFVSTISPSRAIYCDEDDCYDLLGVSQSANASEIKKAYYKLSLKYHPDKNPDPESRKLFVKVANAYEILKDEATREQYDYAIAHPEEVFYNTARYYRAYYGHKTDPRAVLVGLLLILSGFQYLNQSTRYNQAVAMVKKTPAYKNKLRALELERSGGVTNKKKSQKNMDKKTEEDLSKELDLQITGAEMASVWKLLGVRFVLLPYTLGKLLLWTACWFWRYKVKKYPYSWEDASYLTQRSLSIPLDRWRNIDEATKEDLVLRRLWEKSNLESYVAEMRKESKRRR

SEQ ID NO: 56854 - DNA, 1073 bp, Glycine max
  misc_feature (1)..(1073): Ceres Seq. ID no. 14314743
gaactctgtctaaaagacactttcttttctgataacatctctactaaaaagttactaaaaatggaaggaagatctatcaccacctccgccgcggagtcatcggagatccaataccatccaccgaaccccccgaaccagatcttcatcctctccggacaaagcaacatggccggacgcggcggcgtcgtcaaggaccaccaccaaaaccgttgggtatgggacaaaatcgttccgtcggaatgctcgccggactcgtcgatcctccgcctgagagcagatctccgatgggaggaagcgcgtgagccgctccacgccgacatcgacaccggcaaagtgtgcggcgtaggtccggggatggcgttcgcgaacgcggtgaggaaacgatccgactcggattccgacgtgatcgggctggttccgtgcgccgtcggtgggacggcgataaaagagtgggagcgtgggagccgtttgtacgagacgatggttaagagagcggaggagagtaggaggtacggtggagagatcaaggcgatgctttggtaccaaggagagagtgacgtgtcggacatccacgacgccgagagttacgggaggaatatgactcgtttggttaagaaccttcgtcatgatcttaaccttccttctcttcccattattcaggtggcgataacatcgggaggagggtatatagataaggtgagggaagcacagttgggtttgaaactttctaatgtggtctgtgtagatgctaaaggattgcagctaaagccggataatcttcacttgaccactgaggctcaagttcagcttggtctctcattagcacaagcttacctttccaacctctgctagactatcaagttattccttgttgagaaatgtgatcgatggtattttaaactctgcgaatgtttgtctacatttctcagaatgagatatgcagtttgagcgatggtactgttgtagagactatgtaatcttttcacctttagagcacacattattattccacgttgttacgttgcaacaatttgctgctctttgtagaatattttgaataaaatgggtttcat

SEQ ID NO: 56855 - protein, 283 aa, Glycine max
  peptide (1)..(283): Ceres Seq. ID no. 14314744
ELCLKDTFFSDNISTKKLLKMEGRSITTSAAESSEIQYHPPNPPNQIFILSGQSNMAGRGGVVKDHHQNRWVWDKIVPSECSPDSSILRLRADLRWEEAREPLHADIDTGKVCGVGPGMAFANAVRKRSDSDSDVIGLVPCAVGGTAIKEWERGSRLYETMVKRAEESRRYGGEIKAMLWYQGESDVSDIHDAESYGRNMTRLVKNLRHDLNLPSLPIIQVAITSGGGYIDKVREAQLGLKLSNVVCVDAKGLQLKPDNLHLTTEAQVQLGLSLAQAYLSNLC

SEQ ID NO: 56856 - protein, 263 aa, Glycine max
  peptide (1)..(263): Ceres Seq. ID no. 14314745
MEGRSITTSAAESSEIQYHPPNPPNQIFILSGQSNMAGRGGVVKDHHQNRWVWDKIVPSECSPDSSILRLRADLRWEEAREPLHADIDTGKVCGVGPGMAFANAVRKRSDSDSDVIGLVPCAVGGTAIKEWERGSRLYETMVKRAEESRRYGGEIKAMLWYQGESDVSDIHDAESYGRNMTRLVKNLRHDLNLPSLPIIQVAITSGGGYIDKVREAQLGLKLSNVVCVDAKGLQLKPDNLHLTTEAQVQLGLSLAQAYLSNLC

SEQ ID NO: 56857 - protein, 228 aa, Glycine max
  peptide (1)..(228): Ceres Seq. ID no. 14314746
MAGRGGVVKDHHQNRWVWDKIVPSECSPDSSILRLRADLRWEEAREPLHADIDTGKVCGVGPGMAFANAVRKRSDSDSDVIGLVPCAVGGTAIKEWERGSRLYETMVKRAEESRRYGGEIKAMLWYQGESDVSDIHDAESYGRNMTRLVKNLRHDLNLPSLPIIQVAITSGGGYIDKVREAQLGLKLSNVVCVDAKGLQLKPDNLHLTTEAQVQLGLSLAQAYLSNLC

SEQ ID NO: 56858 - DNA, 1508 bp, Glycine max
  misc_feature (1)..(1508): Ceres Seq. ID no. 15177652
attcgcactcacactagcacgcaacctgtttgttcgtaaattcggccactccaaagtatatgcaccacaaacaacaacaccatcttaatcttctccacccaaagcgcaacttgcaaaaattacataaattcctagcccaaaaacttgatcagtaaacaaacatgggaagttccgtgcgtgtaaaagaagcatctgtggttacaccttctgagcccactccatcgagtgtgttggctctatcagctcttgattcgcaactcttccttcgtttcaccatagagtatctcttggtctacaacccttgccctggcctggaccaggctgccaccacggcccgtttaaaagcagcattagcccaagcactggttccctactaccccttcgcgggccgggtcaggaccagacccgatggaccgggcctggaggtggtttgcggagcccaaggcgcggtgttcatagaagcctccgctgaccgttacaatgttaacgacttcgagaaagcgcctaaagcagttgcgcactggaggtcgctcttgtcgctccacgtggcagacgttctcaaaggatcgccgccgctggtcgttcagctgacgtggctcggcgacggcgccgccgcaatcggcgtggggatcaaccactgcatctgcgacgggattgggagcgcggagtttctaaaccacttcgccgagttagccaacgagaaacgcgagttgttattattagctcagaggcccaaacataaacctatttgggagcgtcaccttctgaagccaacgcgtgggaagcagacgcgggtagactcggagagtcaccccgagttcaaccgagtcccggatttatgcaacttcatgaacaaagtctcgacggggcttaaaccgacctcggtgaccttcgacaagaggagactaaacgagatgaagagactcgcgagtagcacgagtgaaccaggcgagacggtgtgttacacgtcgttcgaggtgctggcggcgcacgtgtggagaagctgggcgagagcaataaggtttccgccgaatcagaagttgaagctggtgttcagtataaacgtgaggaacagggttaaaccgggtttaccagaggggtattatgggaatgcgtttgttttggggtgtgcggagacgagagcgaaggagctggaggaaagagggatagggttcgggtcgggtttggtgaagcgggcgaaggagagggttgggaatgagcacgtgaggggcgtgatggggatggtgtgggagagaaaagcgtgccctgacccggttggggtgctcatagtgtcgcagtggtccaggctgggtttggagaacattgacctgggtatgggcaagcttcttcacgtcggacccgtgtgctgcgataggtactgcttgtttttgccggtcagagatcagtgtctcagtgtcaaggtcatgctggctgttcccactcacgcccttcacaattaccagctttttatgcgtaataattgatatataaattatcttactcatttt

SEQ ID NO: 56859 - protein, 440 aa, Glycine max
  peptide (1)..(440): Ceres Seq. ID no. 15177653
MGSSVRVKEASVVTPSEPTPSSVLALSALDSQLFLRFTIEYLLVYNPCPGLDQAATTARLKAALAQALVPYYPFAGRVRTRPDGPGLEVVCGAQGAVFIEASADRYNVNDFEKAPKAVAHWRSLLSLHVADVLKGSPPLVVQLTWLGDGAAAIGVGINHCICDGIGSAEFLNHFAELANEKRELLLLAQRPKHKPIWERHLLKPTRGKQTRVDSESHPEFNRVPDLCNFMNKVSTGLKPTSVTFDKRRLNEMKRLASSTSEPGETVCYTSFEVLAAHVWRSWARAIRFPPNQKLKLVFSINVRNRVKPGLPEGYYGNAFVLGCAETRAKELEERGIGFGSGLVKRAKERVGNEHVRGVMGMVWERKACPDPVGVLIVSQWSRLGLENIDLGMGKLLHVGPVCCDRYCLFLPVRDQCLSVKVMLAVPTHALHNYQLFMRNN

SEQ ID NO: 56860 - DNA, 941 bp, Glycine max
  misc_feature (1)..(941): Ceres Seq. ID no. 14306279
atccttttctctgggaattatagtttgtagagaacacatacatacattttcattttcagaggaatgatcatggaagaatcctcggtacacgagatcaaaacccctctcctgtcatctaacaatgaggaagatgaagttggaagcagtactagccataggcagcaaaatgaagagaactcgcccataaaacaagtggccctaacggtgccaaccaccgatgacccatctcttccagttctgacgttccgaatgtgggtgttgggaactctatcatgcgtgctgctgtcgttcctgaaccagttcttctggtaccgcatccagcctctcaccatcaccgcgatctccgcccagatcgcggtggtgccgctcggccaactcatggccgcaacgatcactaagcgcgtgttcttcagaggaacacgctgggaattcactctcaatccgggacccttcaacgtcaaggagcacgttctcatcaccatcttcgccaactccggcgccggcaccgtctacgccatccacgttgttaccgctgtcaaaatcttttaccacaaacacatctccttctttgtctccttgcttgtggtcatcaccacacaggtattgggtttcggatgggctggcatatttagaagatacctggtagagccagcggcaatgtggtggccagcaaatttagttcaagtttcactcttcaggtaataattataatactacagcattaacattttattattctaatttatatggtcaatatgaagagtaaatgtattgaatactatgctctagctagtaacttgacacactacgtaagaattagttagttcgccgacaatatcgtaataagatacaaaagtatccatacctaccaataacatcaatgtaatatatttacgattttttagtttacctatatgtcatcactcactcttgcgtggtgt

SEQ ID NO: 56861 - protein, 212 aa, Glycine max
  peptide (1)..(212): Ceres Seq. ID no. 14306280
MIMEESSVHEIKTPLLSSNNEEDEVGSSTSHRQQNEENSPIKQVALTVPTTDDPSLPVLTFRMWVLGTLSCVLLSFLNQFFWYRIQPLTITAISAQIAVVPLGQLMAATITKRVFFRGTRWEFTLNPGPFNVKEHVLITIFANSGAGTVYAIHVVTAVKIFYHKHISFFVSLLVVITTQVLGFGWAGIFRRYLVEPAAMWWPANLVQVSLFR

SEQ ID NO: 56862 - protein, 210 aa, Glycine max
  peptide (1)..(210): Ceres Seq. ID no. 14306281
MEESSVHEIKTPLLSSNNEEDEVGSSTSHRQQNEENSPIKQVALTVPTTDDPSLPVLTFRMWVLGTLSCVLLSFLNQFFWYRIQPLTITAISAQIAVVPLGQLMAATITKRVFFRGTRWEFTLNPGPFNVKEHVLITIFANSGAGTVYAIHVVTAVKIFYHKHISFFVSLLVVITTQVLGFGWAGIFRRYLVEPAAMWWPANLVQVSLFR

SEQ ID NO: 56863 - protein, 150 aa, Glycine max
  peptide (1)..(150): Ceres Seq. ID no. 14306282
MWVLGTLSCVLLSFLNQFFWYRIQPLTITAISAQIAVVPLGQLMAATITKRVFFRGTRWEFTLNPGPFNVKEHVLITIFANSGAGTVYAIHVVTAVKIFYHKHISFFVSLLVVITTQVLGFGWAGIFRRYLVEPAAMWWPANLVQVSLFR

SEQ ID NO: 56864 - DNA, 1484 bp, Glycine max
  misc_feature (1)..(1484): Ceres Seq. ID no. 14314655
aatcatataaataaataaacatagtataattaattgatcgtcgatggtagtagtatgttgagggggctgtttgtgtttggtggcacgtgctgcaggagattgacgttggcacgacagtccacgcagaaacagaaacagtggtgggatcatcttcatcatcatcttcgctccaaaaaccttcattgggcaggtctcatggagagtaatgggaactcggtgaaggatgctgagaaacaaatcacccgtgttttgttttgtggaccccgtttccctgcttctcatgaatatacaattgagtatttgcaaaatcattcacatatcaaggttgatgttctccctttagaagatgtgccaaaggatattgccaactatcatgtctgcatagtaaaaaacatgaggctagattcagaaataatttctcgtgcagttcagatgcagcttataatgcagtatggtgttgggctggaaggtgttgatattgatgctgcaacaaagcatggaatcaaagttgctaggataccaggtgatgtttcgggaaattcagcttcatgtgctgaaatggccatatatctaatgctgggtctcctccgtaagcaaaatgaactgcaagtttccatacaacaaaagaagcttggagagccaattaccgaaactttacttgggaaaactatattcattttgggctttgggaacattggaatggatttagcaaagcgattgcaaccctttggtgtaaaagttattgctataaagcggagctgggcttcatatgcacaacatgctagcaaattaagcagaaatgatgctgaagatcttgttgatgtgaagggtagtcatgaagatatatatgagtttgcaaggaaggctgacattgttgtttgctgcctaacattaaacagagaaacggttggtataataaacaataagtttatatcttctatgaaaaagggtggccttctggtgaatgttgctagaggtggtcttgtagactatgaggctgtgatcaaccaccttgaatcaggtcatttaggagggttaggcactgatgttgcttggactgagccatttaaccctgatgatcagatatttaaatttaagaatgttatcatgactcctcatgttgcaggcgttacagagcattcttatagatccatggctaaggctgttggtgatgtcgttcttcaacttcatgccgggcttcctttgacagggatagagttagttaactgaattagtgccaacaattcattccagtatcttcaactaaatgacttttataattcaagatgaattttctgaggtgcaaaaacacttaatattttgtaaagaaaatttagatgaggcaatgcttatgtgttgcccatttgttattctatggttgtggtgaaccaattgttctttagtagcgggttgtgttacagtatgcgattttatgaattttctagttctattttgccactatttatatacacggacaaatatat

SEQ ID NO: 56865 - protein, 391 aa, Glycine max
  peptide (1)..(391): Ceres Seq. ID no. 14314656
MLRGLFVFGGTCCRRLTLARQSTQKQKQWWDHLHHHLRSKNLHWAGLMESNGNSVKDAEKQITRVLFCGPRFPASHEYTIEYLQNHSHIKVDVLPLEDVPKDIANYHVCIVKNMRLDSEIISRAVQMQLIMQYGVGLEGVDIDAATKHGIKVARIPGDVSGNSASCAEMAIYLMLGLLRKQNELQVSIQQKKLGEPITETLLGKTIFILGFGNIGMDLAKRLQPFGVKVIAIKRSWASYAQHASKLSRNDAEDLVDVKGSHEDIYEFARKADIVVCCLTLNRETVGIINNKFISSMKKGGLLVNVARGGLVDYEAVINHLESGHLGGLGTDVAWTEPFNPDDQIFKFKNVIMTPHVAGVTEHSYRSMAKAVGDVVLQLHAGLPLTGIELVN

SEQ ID NO: 56866 - protein, 344 aa, Glycine max
  peptide (1)..(344): Ceres Seq. ID no. 14314657
MESNGNSVKDAEKQITRVLFCGPRFPASHEYTIEYLQNHSHIKVDVLPLEDVPKDIANYHVCIVKNMRLDSEIISRAVQMQLIMQYGVGLEGVDIDAATKHGIKVARIPGDVSGNSASCAEMAIYLMLGLLRKQNELQVSIQQKKLGEPITETLLGKTIFILGFGNIGMDLAKRLQPFGVKVIAIKRSWASYAQHASKLSRNDAEDLVDVKGSHEDIYEFARKADIVVCCLTLNRETVGIINNKFISSMKKGGLLVNVARGGLVDYEAVINHLESGHLGGLGTDVAWTEPFNPDDQIFKFKNVIMTPHVAGVTEHSYRSMAKAVGDVVLQLHAGLPLTGIELVN

SEQ ID NO: 56867 - protein, 278 aa, Glycine max
  peptide (1)..(278): Ceres Seq. ID no. 14314658
MRLDSEIISRAVQMQLIMQYGVGLEGVDIDAATKHGIKVARIPGDVSGNSASCAEMAIYLMLGLLRKQNELQVSIQQKKLGEPITETLLGKTIFILGFGNIGMDLAKRLQPFGVKVIAIKRSWASYAQHASKLSRNDAEDLVDVKGSHEDIYEFARKADIVVCCLTLNRETVGIINNKFISSMKKGGLLVNVARGGLVDYEAVINHLESGHLGGLGTDVAWTEPFNPDDQIFKFKNVIMTPHVAGVTEHSYRSMAKAVGDVVLQLHAGLPLTGIELVN

SEQ ID NO: 56868 - DNA, 1983 bp, Glycine max
  misc_feature (1)..(1983): Ceres Seq. ID no. 14314659
aagcgcccgccattgccaaagagaagagtgcgaaacaagaagaagaaaatttctcatttctcgttctgaaaatcggagttcaacgctattattatatttgtgatatcttctatctgattcagcatcatggttcagctaatgaggtctgatacggataatcactgtctgaaaaaggtgaagttggaggttcaagatgaaatcccccctcttcacactcacaagcgacccaaattggaatctccccctaagtgtggtgcaagcgatgaatccatttcaatcccaccagcttcatacaatcccttggatgagccaagccctttgggtttgcgtctcaggaagagtccctcccttttggatttgattcagatgaggctctcgcaacaagaggaatccaaaaagaaagatcaaaaggcttcttcttcttcttctgctgctgctgctgctgctgctgctgattctaaacttaaggcctccaattttcctggaaccattttgaaaattgggaattgggagtataagtctagatatgaaggagacttggtggcgaagtgttactttgcgaagcataagctggtatgggaagtccttgatggttgtcttaagaataagattgaaatcccatggtctgatatcatggctatcaaggctaactaccctgatgatggaccaggtacgctcgaagtagtgcttgcaagaagacccttgttttttagggagatcaatccacagccaaggaagcataccttatggcaggcaacatcggactttactggtggacaagccggcataaacaggcgacattttctgcagtgtccacaaggattgctaggcaagcattttgagaagctcattcagtgtgatccccgtctcaactatctaagccagcaggcggatttggtgttggattctccgtattttgaacctggaacaacttcaattcacgaccacattgaatctagtgatggctttgatagaaaaagcgaagagcgatctggtatttttggattgcaggatgtggagtcaggatctgcagttcaatcatcttcctcaaaaagtgaacataaccttggtaaagctgttgaaaatgtttcccaagaaattacctcacctagctcagtgatgaacatccatgcaatgaaagatttcaggagtagaggagctgaaacattgaagtttcttagtaatttggaccagatcaaattgcctggacttcacccttctatgtcaatggacgatttggttagccacattggacattgcatttcagaacagatgggatctgacaatccaaatttcgctggtgacaaccagtatagcagatctattctggaagaatttactcagtacttgttcaatgactctcaacatgcaactacctccgatgaacagcgtgtcatgtcaaaggtaaactcactctactgccttctgcagaaggatccttctacagcagaagacatgaccaaaaatggcaatagtctgggagatgcaaatgccttgtcaagggtgaactcactatactcccttctgcagaatgcagaagacgcaatggccagaaatggcaatggtctgagagatgcagatgtgatgtcaagggtgaactcgctgtactgtcttctgcagaaggatccttatacagcagaagacacaaacacaatgacaagaaatggcaatggtcttgatgcagatgagggtggaaaagttggtgtgagtaactccactgaattgtcacaaccatgcaaaactaaagtgtctgatttggaagttcaagcggatgatgcttctggctgcaagcagggggggactggtatgtccaggaaggaatcagctggcgatttgcttcttaatcttccaagggtggcatctctgcttcagtttttgtttaacatgtccgaggattctgttaataaagttagatagatagtaaccatctttcaaaacttgcaagaaacacaaaagctatattatcaacaatgtgaatattgt

SEQ ID NO: 56869 - protein, 596 aa, Glycine max
  peptide (1)..(596): Ceres Seq. ID no. 14314660
MVQLMRSDTDNHCLKKVKLEVQDEIPPLHTHKRPKLESPPKCGASDESISIPPASYNPLDEPSPLGLRLRKSPSLLDLIQMRLSQQEESKKKDQKASSSSSAAAAAAAADSKLKASNFPGTILKIGNWEYKSRYEGDLVAKCYFAKHKLVWEVLDGCLKNKIEIPWSDIMAIKANYPDDGPGTLEVVLARRPLFFREINPQPRKHTLWQATSDFTGGQAGINRRHFLQCPQGLLGKHFEKLIQCDPRLNYLSQQADLVLDSPYFEPGTTSIHDHIESSDGFDRKSEERSGIFGLQDVESGSAVQSSSSKSEHNLGKAVENVSQEITSPSSVMNIHAMKDFRSRGAETLKFLSNLDQIKLPGLHPSMSMDDLVSHIGHCISEQMGSDNPNFAGDNQYSRSILEEFTQYLFNDSQHATTSDEQRVMSKVNSLYCLLQKDPSTAEDMTKNGNSLGDANALSRVNSLYSLLQNAEDAMARNGNGLRDADVMSRVNSLYCLLQKDPYTAEDTNTMTRNGNGLDADEGGKVGVSNSTELSQPCKTKVSDLEVQADDASGCKQGGTGMSRKESAGDLLLNLPRVASLLQFLFNMSEDSVNKVR

SEQ ID NO: 56870 - protein, 592 aa, Glycine max
  peptide (1)..(592): Ceres Seq. ID no. 14314661
MRSDTDNHCLKKVKLEVQDEIPPLHTHKRPKLESPPKCGASDESISIPPASYNPLDEPSPLGLRLRKSPSLLDLIQMRLSQQEESKKKDQKASSSSSAAAAAAAADSKLKASNFPGTILKIGNWEYKSRYEGDLVAKCYFAKHKLVWEVLDGCLKNKIEIPWSDIMAIKANYPDDGPGTLEVVLARRPLFFREINPQPRKHTLWQATSDFTGGQAGINRRHFLQCPQGLLGKHFEKLIQCDPRLNYLSQQADLVLDSPYFEPGTTSIHDHIESSDGFDRKSEERSGIFGLQDVESGSAVQSSSSKSEHNLGKAVENVSQEITSPSSVMNIHAMKDFRSRGAETLKFLSNLDQIKLPGLHPSMSMDDLVSHIGHCISEQMGSDNPNFAGDNQYSRSILEEFTQYLFNDSQHATTSDEQRVMSKVNSLYCLLQKDPSTAEDMTKNGNSLGDANALSRVNSLYSLLQNAEDAMARNGNGLRDADVMSRVNSLYCLLQKDPYTAEDTNTMTRNGNGLDADEGGKVGVSNSTELSQPCKTKVSDLEVQADDASGCKQGGTGMSRKESAGDLLLNLPRVASLLQFLFNMSEDSVNKVR

SEQ ID NO: 56871 - protein, 516 aa, Glycine max
  peptide (1)..(516): Ceres Seq. ID no. 14314662
MRLSQQEESKKKDQKASSSSSAAAAAAAADSKLKASNFPGTILKIGNWEYKSRYEGDLVAKCYFAKHKLVWEVLDGCLKNKIEIPWSDIMAIKANYPDDGPGTLEVVLARRPLFFREINPQPRKHTLWQATSDFTGGQAGINRRHFLQCPQGLLGKHFEKLIQCDPRLNYLSQQADLVLDSPYFEPGTTSIHDHIESSDGFDRKSEERSGIFGLQDVESGSAVQSSSSKSEHNLGKAVENVSQEITSPSSVMNIHAMKDFRSRGAETLKFLSNLDQIKLPGLHPSMSMDDLVSHIGHCISEQMGSDNPNFAGDNQYSRSILEEFTQYLFNDSQHATTSDEQRVMSKVNSLYCLLQKDPSTAEDMTKNGNSLGDANALSRVNSLYSLLQNAEDAMARNGNGLRDADVMSRVNSLYCLLQKDPYTAEDTNTMTRNGNGLDADEGGKVGVSNSTELSQPCKTKVSDLEVQADDASGCKQGGTGMSRKESAGDLLLNLPRVASLLQFLFNMSEDSVNKVR

SEQ ID NO: 56872 - DNA, 1731 bp, Glycine max
  misc_feature (1)..(1731): Ceres Seq. ID no. 14314620
gacaaagatctcactcaattcaaccgcctccactctcacgcaaaccatttttcttttctttctctccctctgagcctttcatcgctgcctcggagagatggcagtgtcggaaggatcaccaacccctcagacggttggcaatgcttttgttgagcagtattactccatactgcatcaaaagccagaccaagttcacagattttaccacgagtctagcatcctaagccgacctgaagaagatggtaccatgactatggtgactactactttggaaattaataaaaagatactctctctggattacacaagctttagggtggaaattctgagtgctgatgcacagccttcttacaaggatggggtaattgttgtagtgactggctgcttaactggaagtgacaatctgaaaaggaagtttactcagtcctttttcctagctccccaggacaaaggctactttgttttgaatgatgttttcagatatgttgatgagtataagtcagttgatattgagtctgtgcctgcaaacgatgctgctgatgaaagtgctccaacagatgcttttgtccccgagcctgaggccattcatgttgctgaagatgttcccgctagtcaaactgatgttgttgatgctgacattggtgtcagtaaagaagtgagtcaaccactagagaatggaaatttatcagttactgaaaaggtggtgcctgttgatcatgttaaagaatgcagtcatcaggaacatcattcacacgctgagaaagctgcttctaataattcactggaggatactccaaagaagtcttttgcatccattgtgaatgcactaaaagaaaatgctgctcccttccatgtgagggtttcccctgtgaaacttcttgaacaaccacgtgtttctagtatacctgcaccagaagcaccagctcctagcactgacagtccaccagaaaagaataatgagattggaggtaaggcttatgcaatatttgttgcaaatttgcccatgaatgcaacagttgaacagctggaacgtgttttccagaaattttgggcccattaaacgggatggctttcaggttagaagtaacaagcaacaacaatccttgttttggttttggggaaatttgaatctgctacttcaatgcaaagtgcacttgaggcttctcctcctgttaccttggatggacgtagactttcaattgaagagcgacgagcaaataatgatagggggaggcattcatcaggaaggggcagttaccggaatgacagaaacgataacttcaggggccgtggcaacttcggtggtggccatggtggcggttatggaaacaggaaatgatagtttcgagaagcgaagcgagttctctggccggcctcgtggtggcaacaatggtgggcgtagcaatggagaagctgttccaaggagttatcagaatggaggagcaaaagtcactgtcaaccagtgaaagttcagtaaagtgattcattttgttgggaattgagtgacaacggcatttttcttatagatagcggcatctagggattctggtttgcaactgcattaagagttttttttctctattcctttatagctgtcatgatccttttgcttcagagtttttttggttaaatcacatcattccctatattcctttaaatcacattttgtatctaatattccggaataattgttttggaactgcccacaattatgccatttttttagaagcc

SEQ ID NO: 56873 - protein, 320 aa, Glycine max
  peptide (1)..(320): Ceres Seq. ID no. 14314621
MAVSEGSPTPQTVGNAFVEQYYSILHQKPDQVHRFYHESSILSRPEEDGTMTMVTTTLEINKKILSLDYTSFRVEILSADAQPSYKDGVIVVVTGCLTGSDNLKRKFTQSFFLAPQDKGYFVLNDVFRYVDEYKSVDIESVPANDAADESAPTDAFVPEPEAIHVAEDVPASQTDVVDADIGVSKEVSQPLENGNLSVTEKVVPVDHVKECSHQEHHSHAEKAASNNSLEDTPKKSFASIVNALKENAAPFHVRVSPVKLLEQPRVSSIPAPEAPAPSTDSPPEKNNEIGGKAYAIFVANLPMNATVEQLERVFQKFWAH

SEQ ID NO: 56874 - protein, 270 aa, Glycine max
  peptide (1)..(270): Ceres Seq. ID no. 14314622
MTMVTTTLEINKKILSLDYTSFRVEILSADAQPSYKDGVIVVVTGCLTGSDNLKRKFTQSFFLAPQDKGYFVLNDVFRYVDEYKSVDIESVPANDAADESAPTDAFVPEPEAIHVAEDVPASQTDVVDADIGVSKEVSQPLENGNLSVTEKVVPVDHVKECSHQEHHSHAEKAASNNSLEDTPKKSFASIVNALKENAAPFHVRVSPVKLLEQPRVSSIPAPEAPAPSTDSPPEKNNEIGGKAYAIFVANLPMNATVEQLERVFQKFWAH

SEQ ID NO: 56875 - protein, 268 aa, Glycine max
  peptide (1)..(268): Ceres Seq. ID no. 14314623
MVTTTLEINKKILSLDYTSFRVEILSADAQPSYKDGVIVVVTGCLTGSDNLKRKFTQSFFLAPQDKGYFVLNDVFRYVDEYKSVDIESVPANDAADESAPTDAFVPEPEAIHVAEDVPASQTDVVDADIGVSKEVSQPLENGNLSVTEKVVPVDHVKECSHQEHHSHAEKAASNNSLEDTPKKSFASIVNALKENAAPFHVRVSPVKLLEQPRVSSIPAPEAPAPSTDSPPEKNNEIGGKAYAIFVANLPMNATVEQLERVFQKFWAH

SEQ ID NO: 56876 - DNA, 910 bp, Glycine max
  misc_feature (1)..(910): Ceres Seq. ID no. 14306315
atagttgaatttttaacttgtctgttcttatcttcatcctacgccaatagcccaaaaccttgttctctttttgtggttcatttctctcttccagatgccacttgccgttcttcaccctcacgattttctcaggaaaaacccatctaaccagtaccagaccataatccctcactctcccaacatgaatcctaataagtctcatcggacttcccgaaaccgtaagaagcggcccgatccaagcccacaaggcgttgtcagcccagcccggctcacattatccccgaaaccccaagtcaaaaacaagccgcagcagcaactcgtcatgggtcaggtcaaaatactcaaacgcggccaacttttgacccaaacgacgccggatccaccgccgcagacggaaatcgtcgatcagaagttaactccgcagacggaaaccgtcgaaaaaaaggacttaacttcaatcgtagatggtttatatgcaggctattcgatgttggtgatgtctccacctcctagctccgttccgttaccggctttcatcactaagaagattgcggttgttagtgacgccacgagcgacttgcggaaaatgttacggcttgattttccctaatcctgtggcggtttgtgaatgaacgaggatttgaacggaggttgttggtgattagggcattgtagtgctcgatcttctcttattttttcagcgggaaggtcgtgtcacgaatgcaagtctcttattgtttagaactttcttcagattgccgtacatacatgttactactgggattagtcttcgtactttttagattaattactttgtgatactaattattagttttaaggaataggcttctgtatatctgtgtaatgctttgtaagtatttaggatatagaagcattttcttcctctctc

SEQ ID NO: 56877 - protein, 171 aa, Glycine max
  peptide (1)..(171): Ceres Seq. ID no. 14306316
MPLAVLHPHDFLRKNPSNQYQTIIPHSPNMNPNKSHRTSRNRKKRPDPSPQGVVSPARLTLSPKPQVKNKPQQQLVMGQVKILKRGQLLTQTTPDPPPQTEIVDQKLTPQTETVEKKDLTSIVDGLYAGYSMLVMSPPPSSVPLPAFITKKIAVVSDATSDLRKMLRLDFP

SEQ ID NO: 56878 - protein, 142 aa, Glycine max
  peptide (1)..(142): Ceres Seq. ID no. 14306317
MNPNKSHRTSRNRKKRPDPSPQGVVSPARLTLSPKPQVKNKPQQQLVMGQVKILKRGQLLTQTTPDPPPQTEIVDQKLTPQTETVEKKDLTSIVDGLYAGYSMLVMSPPPSSVPLPAFITKKIAVVSDATSDLRKMLRLDFP

SEQ ID NO: 56879 - protein, 95 aa, Glycine max
  peptide (1)..(95): Ceres Seq. ID no. 14306318
MGQVKILKRGQLLTQTTPDPPPQTEIVDQKLTPQTETVEKKDLTSIVDGLYAGYSMLVMSPPPSSVPLPAFITKKIAVVSDATSDLRKMLRLDFP

SEQ ID NO: 56880 - DNA, 1329 bp, Glycine max
  misc_feature (1)..(1329): Ceres Seq. ID no. 14315035
accacaccaccctactacattcccacctttagtcttgttcttagagatggcttgtgaaaccaagtcatggttggttatgtttcttgttttcttggttgctaattgcatgcaacattgtgtccacggggtgtctcaagtgccttgcctttttatctttggggactctatgtctgatagtggaaacaacaatgaacttccaaccacttcaaaatctaatttcagaccatatgggatcgactttccattaggaccaactgggagatataccaatggccgaacagaaattgacataatcactcaatttctgggatttgagaaatttatcccaccctttgcaaacactagtggttcagacatacttaaaggtgttaactatgcatcaggtggatctggtatacgcaacgaaactggctggcattatggtgctgctatcggcttgggattacagttagcaaatcacagagtcatagtatctgaaattgctaccaaacttggaagtcctgacttagctcgacaataccttgaaaaatgcttgtattatgtgaacataggcagcaatgattacatgggcaattacttccttcccccgttctacccaacaagcaccatttataccattgaggagtttacacaagttctgattgaagagttatctctgaatttacaggctttacatgacattggagcaagaaagtatgccttggctgggttgggccttataggatgcaccccaggtatggtgagtgctcatgggacaaatggatcatgtgctgaagagcaaaatctcgctgcattcaatttcaataacaagcttaaagctcgagtggatcaattcaacaatgatttctattatgctaattccaaattcatctttataaacactcaagcattggccattgagcttcgcgataaatatggttttccggttccggaaactccttgctgcctaccgggattaacaggggagtgtgttcctgatcaagagccgtgctataataggaatgactatgtgttttttgatgctttccatcccaccgagcaatggaacctactcaatgcattgacatcttataattctaccactaattcagccttcacttatccaatggatatcaagcaccttgttgatcatgaaattaagacggaattggagctcacaaatgagtccacttcacaacttagtgccactgaataagttctggttatcatgtagtcgttcatatggagttgaaataattgtgagttgaatatgtattaagtaatggcctgccactgaattgaacgacaaagtggaatgaatcaagtgaataaattggctatcctgcctcg

SEQ ID NO: 56881 - protein, 397 aa, Glycine max
  peptide (1)..(397): Ceres Seq. ID no. 14315036
PHHPTTFPPLVLFLEMACETKSWLVMFLVFLVANCMQHCVHGVSQVPCLFIFGDSMSDSGNNNELPTTSKSNFRPYGIDFPLGPTGRYTNGRTEIDIITQFLGFEKFIPPFANTSGSDILKGVNYASGGSGIRNETGWHYGAAIGLGLQLANHRVIVSEIATKLGSPDLARQYLEKCLYYVNIGSNDYMGNYFLPPFYPTSTIYTIEEFTQVLIEELSLNLQALHDIGARKYALAGLGLIGCTPGMVSAHGTNGSCAEEQNLAAFNFNNKLKARVDQFNNDFYYANSKFIFINTQALAIELRDKYGFPVPETPCCLPGLTGECVPDQEPCYNRNDYVFFDAFHPTEQWNLLNALTSYNSTTNSAFTYPMDIKHLVDHEIKTELELTNESTSQLSATE

SEQ ID NO: 56882 - protein, 382 aa, Glycine max
  peptide (1)..(382): Ceres Seq. ID no. 14315037
MACETKSWLVMFLVFLVANCMQHCVHGVSQVPCLFIFGDSMSDSGNNNELPTTSKSNFRPYGIDFPLGPTGRYTNGRTEIDIITQFLGFEKFIPPFANTSGSDILKGVNYASGGSGIRNETGWHYGAAIGLGLQLANHRVIVSEIATKLGSPDLARQYLEKCLYYVNIGSNDYMGNYFLPPFYPTSTIYTIEEFTQVLIEELSLNLQALHDIGARKYALAGLGLIGCTPGMVSAHGTNGSCAEEQNLAAFNFNNKLKARVDQFNNDFYYANSKFIFINTQALAIELRDKYGFPVPETPCCLPGLTGECVPDQEPCYNRNDYVFFDAFHPTEQWNLLNALTSYNSTTNSAFTYPMDIKHLVDHEIKTELELTNESTSQLSATE

SEQ ID NO: 56883 - protein, 372 aa, Glycine max
  peptide (1)..(372): Ceres Seq. ID no. 14315038
MFLVFLVANCMQHCVHGVSQVPCLFIFGDSMSDSGNNNELPTTSKSNFRPYGIDFPLGPTGRYTNGRTEIDIITQFLGFEKFIPPFANTSGSDILKGVNYASGGSGIRNETGWHYGAAIGLGLQLANHRVIVSEIATKLGSPDLARQYLEKCLYYVNIGSNDYMGNYFLPPFYPTSTIYTIEEFTQVLIEELSLNLQALHDIGARKYALAGLGLIGCTPGMVSAHGTNGSCAEEQNLAAFNFNNKLKARVDQFNNDFYYANSKFIFINTQALAIELRDKYGFPVPETPCCLPGLTGECVPDQEPCYNRNDYVFFDAFHPTEQWNLLNALTSYNSTTNSAFTYPMDIKHLVDHEIKTELELTNESTSQLSATE

SEQ ID NO: 56884 - DNA, 832 bp, Glycine max
  misc_feature (1)..(832): Ceres Seq. ID no. 14306303
aaccttacgcattagatcaatattaaagctaaccactcgtttgcattgtatggtatatcattccaagaatctcagctgcagtaaacaacgaccatgaaactaatgacagcaacaacaacgtttgatgtctctgccacatgcttccgtgcccctcctccttcgtgctcaatgaatccatgccacaccagtttttcagttataaactccctgaatcctcacaagggacgacggataagcgttgctgttccacccaagtttccaaacttccggagggaagcatctctgcaggggaatttggaggctattagagtcccaacttcggtgcctgtgcgtgtagcatacgagcttcttctagctggtcatcgatatttggatgtaaggaccccggaagagttcgatgctggacacgctcctggcgcaattaacattccttatatgttcagagttggatcagggatgacaaagaacagcaactttattagagaggtgtcttcacagtttaggaaagatgatgaaattattgtcgggtgtgagcttggtaaaagatctatgatggccgcaagtgacttgctagctgctgggttcactggactcacagacatggctggtggttatgctgcatggacacaaaatggacttccaacagagctatgaagtgtttctgttggaactgtagctgtaaatagaataagttttgggaggagtccaatgcatggaaatgcagaaacacttcaccaagacagtgacaatctgacactgggaaaacaaaaatctataaatggaaaattaaatgtatttgtcgatatcaacaataaataaaatgttaatatat

SEQ ID NO: 56885 - protein, 186 aa, Glycine max
  peptide (1)..(186): Ceres Seq. ID no. 14306304
MKLMTATTTFDVSATCFRAPPPSCSMNPCHTSFSVINSLNPHKGRRISVAVPPKFPNFRREASLQGNLEAIRVPTSVPVRVAYELLLAGHRYLDVRTPEEFDAGHAPGAINIPYMFRVGSGMTKNSNFIREVSSQFRKDDEIIVGCELGKRSMMAASDLLAAGFTGLTDMAGGYAAWTQNGLPTEL

SEQ ID NO: 56886 - protein, 183 aa, Glycine max
  peptide (1)..(183): Ceres Seq. ID no. 14306305
MTATTTFDVSATCFRAPPPSCSMNPCHTSFSVINSLNPHKGRRISVAVPPKFPNFRREASLQGNLEAIRVPTSVPVRVAYELLLAGHRYLDVRTPEEFDAGHAPGAINIPYMFRVGSGMTKNSNFIREVSSQFRKDDEIIVGCELGKRSMMAASDLLAAGFTGLTDMAGGYAAWTQNGLPTEL

SEQ ID NO: 56887 - protein, 161 aa, Glycine max
  peptide (1)..(161): Ceres Seq. ID no. 14306306
MNPCHTSFSVINSLNPHKGRRISVAVPPKFPNFRREASLQGNLEAIRVPTSVPVRVAYELLLAGHRYLDVRTPEEFDAGHAPGAINIPYMFRVGSGMTKNSNFIREVSSQFRKDDEIIVGCELGKRSMMAASDLLAAGFTGLTDMAGGYAAWTQNGLPTEL

SEQ ID NO: 56888 - DNA, 1260 bp, Glycine max
  misc_feature (1)..(1260): Ceres Seq. ID no. 14314628
attaattcgctccctacaattttactttgccataacggtgagtttagagagggaataatggatggaagaggaggctgttgcatcgccaggtatgtacccggtgcatcccacgggtccaccgtcgacaaaataatgcttaggtttcgtccaatcgctcccaaacccgccgccgcggccaccgcttccgacggctcttcgtccgagagcagtgacgcttttctcaaaaacggaaccactaaaagaaagtacgtaagagataacaactacaccagcaaacgaagaatccgccggagaaagaacacttcctcgccggagaaaaagcagaagccggtggtgactcttccgttgcttccggaaactcccgatcggaaggattctcgggcaaaggatctaactccatcaccagctaaaccagtacgaaacaacaacaacaacaacaacaagagcaagaacttgaatattattaacaagaacgtgccggtgtgggtgagttttgagaatcgaagccttacgatgatgggagggtggtgttcgtgtgtgacggtggagggcgtgacggacacgtgcttggagagcgagtggctggggagtacagacgaggaacggagactgaacctcagcaatgacacgtgtccagggttcatatcagacggttacgggagggtgacgtggacgaacgaggcgtacgggaagatgatgatgatgaagggcgagggtgatgagggacagggaccagtgttgctggtgaataaggtgaatacggtggttccgcacgcgtcgttcacgtgcttggtgagggtggtgcaatactcgtgtgggaaggagagaaactcgctcacggtgccctgcgatgtgtggagaatggactgtggtgggtttgcatggagattagacgttaaaactgcgcttagcttgagattgggttattagttcacaaaggtatcacgaactcgaaatacaaaacggcgtcgctccatggtcgtagaactataacactatttcttctcttttaagagcttagaatcgtgaatatatatatctatatatctatatatatatatatataactactgacgctaagctagcttgtttcactgtaaattcatatatgcatgtagcttgtcttttgttctcttagatggttttttctgatttgagtttgagcttggaacagtagctgtgagctaattatgaataactcgctacgtaccgttatggttatgtaacacttcttctggttagtgaaacttttgttacgtc

SEQ ID NO: 56889 - protein, 309 aa, Glycine max
  peptide (1)..(309): Ceres Seq. ID no. 14314629
INSLPTILLCHNGEFREGIMDGRGGCCIARYVPGASHGSTVDKIMLRFRPIAPKPAAAATASDGSSSESSDAFLKNGTTKRKYVRDNNYTSKRRIRRRKNTSSPEKKQKPVVTLPLLPETPDRKDSRAKDLTPSPAKPVRNNNNNNNKSKNLNIINKNVPVWVSFENRSLTMMGGWCSCVTVEGVTDTCLESEWLGSTDEERRLNLSNDTCPGFISDGYGRVTWTNEAYGKMMMMKGEGDEGQGPVLLVNKVNTVVPHASFTCLVRVVQYSCGKERNSLTVPCDVWRMDCGGFAWRLDVKTALSLRLGY

SEQ ID NO: 56890 - protein, 290 aa, Glycine max
  peptide (1)..(290): Ceres Seq. ID no. 14314630
MDGRGGCCIARYVPGASHGSTVDKIMLRFRPIAPKPAAAATASDGSSSESSDAFLKNGTTKRKYVRDNNYTSKRRIRRRKNTSSPEKKQKPVVTLPLLPETPDRKDSRAKDLTPSPAKPVRNNNNNNNKSKNLNIINKNVPVWVSFENRSLTMMGGWCSCVTVEGVTDTCLESEWLGSTDEERRLNLSNDTCPGFISDGYGRVTWTNEAYGKMMMMKGEGDEGQGPVLLVNKVNTVVPHASFTCLVRVVQYSCGKERNSLTVPCDVWRMDCGGFAWRLDVKTALSLRLGY

SEQ ID NO: 56891 - protein, 265 aa, Glycine max
  peptide (1)..(265): Ceres Seq. ID no. 14314631
MLRFRPIAPKPAAAATASDGSSSESSDAFLKNGTTKRKYVRDNNYTSKRRIRRRKNTSSPEKKQKPVVTLPLLPETPDRKDSRAKDLTPSPAKPVRNNNNNNNKSKNLNIINKNVPVWVSFENRSLTMMGGWCSCVTVEGVTDTCLESEWLGSTDEERRLNLSNDTCPGFISDGYGRVTWTNEAYGKMMMMKGEGDEGQGPVLLVNKVNTVVPHASFTCLVRVVQYSCGKERNSLTVPCDVWRMDCGGFAWRLDVKTALSLRLGY

SEQ ID NO: 56892 - DNA, 1454 bp, Glycine max
  misc_feature (1)..(1454): Ceres Seq. ID no. 15171197
ttctttctctctctttttctgtttttttttttgttcctctctctagattttatttgttgttcttcttctttatgagccctaacttggggacccatcgtcgtcgtcgtctttagccatgtcgctgaggaaggtcttccgctcccgcaagttctccagatcgttcaaggaggtgctgccggcggagggcgccgcaattgtcggcggcgaggacggggtcgccggcgccggtgaggagtcgtcgaatgggaataatggttggtccaacatgcttccagagatcctcggcgagatcgtgcggcgcgtggatgccgccgaggaacagtggccgaaccgccagaacgtcgtcgcatgcgcgtgcgtctgcaagcgttggcgtgacatcacgcgcgaggtcgtgcgcgtgccctcccacaccgggaaaataaccttccctgcgtgccttaagcagccaggaccacgtgacgttccccaccaatgtcttataaagcggaacaagaaaacttcaactttttatttatatcttgcccttacaccatcattcacagataaagggaagtttctgctagcagctaggagatataggtgtggtactcataccgagtatataatttcacttgatgctgatgatttatcccaaggaagcaatgcttatgttggaaagctaagctcggattttcttggcaccaacttcacaatttatgacagccagccaccccatagtggtgcaaaaccatcaagtggcagggccagccgtcggtttgccagcaagcagataagcccacaagttcctgcaggtaactttgaggtggggcaggtctcctacaagttcaaccttttgaaatcaagagggccaaggagaatggtttgctcattgaagtgtcccgtgactcctgtcgtctcaccatcggttgaaagttcagatagcacgccggtcaatggccataagattcccgataaagaacaagttgcatctggctacacaatcttgaagaataaagctccaaggtggcatgagcatttgcaatgttggtgcttgaatttccatggccgtgtgacagtggcctcggtgaagaactttcagctggttgcaacagtggaccaaagccaaccaggagggaaaggagatgaggaaacagttctcctccagtttggtaaagtaggggatgatacttttaccatggattatagacagcccttgtctgctttccaggcttttgccatttgcttaactagctttggcactaaacttgcttgtgagtaatataattttggtgtcactgcttatttattccgtggatgaatgtttaagtgaatagttattttattttttttactcggctttgagtcaacaatttgattgcaggaagcttcttgttgtaaatgtgttatatcatcaaataggacatgacatcttccataaatcaaatatattgccctattcaagcggttggtcc

SEQ ID NO: 56893 - protein, 381 aa, Glycine max
  peptide (1)..(381): Ceres Seq. ID no. 15171198
MSLRKVFRSRKFSRSFKEVLPAEGAAIVGGEDGVAGAGEESSNGNNGWSNMLPEILGEIVRRVDAAEEQWPNRQNVVACACVCKRWRDITREVVRVPSHTGKITFPACLKQPGPRDVPHQCLIKRNKKTSTFYLYLALTPSFTDKGKFLLAARRYRCGTHTEYIISLDADDLSQGSNAYVGKLSSDFLGTNFTIYDSQPPHSGAKPSSGRASRRFASKQISPQVPAGNFEVGQVSYKFNLLKSRGPRRMVCSLKCPVTPVVSPSVESSDSTPVNGHKIPDKEQVASGYTILKNKAPRWHEHLQCWCLNFHGRVTVASVKNFQLVATVDQSQPGGKGDEETVLLQFGKVGDDTFTMDYRQPLSAFQAFAICLTSFGTKLACE

SEQ ID NO: 56894 - protein, 331 aa, Glycine max
  peptide (1)..(331): Ceres Seq. ID no. 15171199
MLPEILGEIVRRVDAAEEQWPNRQNVVACACVCKRWRDITREVVRVPSHTGKITFPACLKQPGPRDVPHQCLIKRNKKTSTFYLYLALTPSFTDKGKFLLAARRYRCGTHTEYIISLDADDLSQGSNAYVGKLSSDFLGTNFTIYDSQPPHSGAKPSSGRASRRFASKQISPQVPAGNFEVGQVSYKFNLLKSRGPRRMVCSLKCPVTPVVSPSVESSDSTPVNGHKIPDKEQVASGYTILKNKAPRWHEHLQCWCLNFHGRVTVASVKNFQLVATVDQSQPGGKGDEETVLLQFGKVGDDTFTMDYRQPLSAFQAFAICLTSFGTKLACE

SEQ ID NO: 56895 - DNA, 1069 bp, Glycine max
  misc_feature (1)..(1069): Ceres Seq. ID no. 14306299
caattggcgattcttcctcacggacctaaaccgcaagtggcctaactcccctacaacaccatagctaaactccaaccacatattcttaaaccaagttcacatatataaattaaggtacatagctcaaaattttgtgccacacaccaacccaagtgccaaaatgaaagcccatttggtccttttcttgctcatgattcttgtcaccttcactagcaatgttaacactctctcgattaatcccaaatctaactcttcaattcctcaattgacccaacagaaaaggcctgacaatgagaccatatatagggtgtcaaagcagctatgttggggttgcattgcggagtcactagagtttttgttcaggcacaacttggtgagagcagccaagtgggaacttccactgatgtgggacttccagctggagcaatacgcgaggtggtgggctggtgaaaggaaagcagattgcaagctcgaacattctttcccagaagatggtttcaagcttggagagaacatttattggggtagtggctcagcgtggacgccaagtgatgctgtaagagcatgggctgatgaagagaaatactacacctacgccactaatacctgtgtgccaggtcagatgtgtggccattacactcaaatagtatggaagagcacccgaagaattggatgtgctcgggttgtatgtgatgatggagatgtcttcatgacttgtaattatgaccctgtgggcaattatgttggagagcgaccctattagattcttataaactatgtgtgcattaattcatgtggatagattgaaactctagtattacataatatgtagtgctagcttatgtgagtgtcatgaatttactagctagtttagtttagcagtgagtatgtgcgagtgtatgtatatagtacttgtgggagaatatgggattggttttaataattacctagtacttggaacaataaataaaagtaccaagaagtaattaaagggtaccagtagttggagatctgttgcctgaggttaaactttgagtcaagtgaaataaaatatttatcctcccatgtg

SEQ ID NO: 56896 - protein, 200 aa, Glycine max
  peptide (1)..(200): Ceres Seq. ID no. 14306300
MKAHLVLFLLMILVTFTSNVNTLSINPKSNSSIPQLTQQKRPDNETIYRVSKQLCWGCIAESLEFLFRHNLVRAAKWELPLMWDFQLEQYARWWAGERKADCKLEHSFPEDGFKLGENIYWGSGSAWTPSDAVRAWADEEKYYTYATNTCVPGQMCGHYTQIVWKSTRRIGCARVVCDDGDVFMTCNYDPVGNYVGERPY

SEQ ID NO: 56897 - protein, 190 aa, Glycine max
  peptide (1)..(190): Ceres Seq. ID no. 14306301
MILVTFTSNVNTLSINPKSNSSIPQLTQQKRPDNETIYRVSKQLCWGCIAESLEFLFRHNLVRAAKWELPLMWDFQLEQYARWWAGERKADCKLEHSFPEDGFKLGENIYWGSGSAWTPSDAVRAWADEEKYYTYATNTCVPGQMCGHYTQIVWKSTRRIGCARVVCDDGDVFMTCNYDPVGNYVGERPY

SEQ ID NO: 56898 - protein, 119 aa, Glycine max
  peptide (1)..(119): Ceres Seq. ID no. 14306302
MWDFQLEQYARWWAGERKADCKLEHSFPEDGFKLGENIYWGSGSAWTPSDAVRAWADEEKYYTYATNTCVPGQMCGHYTQIVWKSTRRIGCARVVCDDGDVFMTCNYDPVGNYVGERPY

SEQ ID NO: 56899 - DNA, 1247 bp, Glycine max
  misc_feature (1)..(1247): Ceres Seq. ID no. 15171212
atgttcttgttcttttacttttctttatatacatcctttaattgctttcgcagttattcatatgaaacgtctgcatatctgccaaaaagttttttactctttaattaaagaatgcatatctataatatgctcattcaatttatccacatgccagcaccctaaaaaagaaaactgtgtgcgtgcatatatatacagatacactagctagattattcttatttaatttgattaatttgatcaggttcttggacaaggcttgtatcagagtacaacagggtacggggagtagcagtaacgacactaaggaaagcccgtggatattgtgcagtgtcgcgcaagttgagcaagcaaagatattgctatcagttattcccatatttgctagcaccattgttttcaacacaatattagcacaactgcaaacattctcggtccaacaagggagttccatggacactcacctcaccaaatcgtttcatgtccctcctgcgtcgcttcaatccattccttacattttgctcattgttgtggtccctctctatgatagtttctttgtcccttttgctagaaaaatcaccggccatgagtccggaatttcacctttgcagcgaataggctttgggctctttctagctacattttctatgatttcagctgcccttgtggagaaaaagagaagggatgcagctgtgaacctcaacgaaactatatccattttttggattaccccacaattcttaatttttggcttgtctgagatgtttacagctgttgggctcattgagttcttctacaaacagtccttgaaagggatgcagacattcttcactgccatcacatattgctcttactcattcggcttttatctgagctcactattggtttctatggtgaataacatcagttcctcttcttcaactggtggttggctccatgacaacgatctcaacaaagacaagcttgactttttctattggttactagctgccctaagcttcctcaacttcctcaactatctcttttggtccagatggtattcttacaagccatcccaatcccaaggcgatactaatgccaatgaaagcattaatctgtttggccacagctctaaaaactactctggagatgacaatattccgtagcaagttgttaatcatatatactctacattaattaattaattaattagtcttgtattaaaattaaagtataaagtacgttatataagaaatctgcacttatctctt

SEQ ID NO: 56900 - protein, 230 aa, Glycine max
  peptide (1)..(230): Ceres Seq. ID no. 15171213
MDTHLTKSFHVPPASLQSIPYILLIVVVPLYDSFFVPFARKITGHESGISPLQRIGFGLFLATFSMISAALVEKKRRDAAVNLNETISIFWITPQFLIFGLSEMFTAVGLIEFFYKQSLKGMQTFFTAITYCSYSFGFYLSSLLVSMVNNISSSSSTGGWLHDNDLNKDKLDFFYWLLAALSFLNFLNYLFWSRWYSYKPSQSQGDTNANESINLFGHSSKNYSGDDNIP

SEQ ID NO: 56901 - protein, 165 aa, Glycine max
  peptide (1)..(165): Ceres Seq. ID no. 15171214
MISAALVEKKRRDAAVNLNETISIFWITPQFLIFGLSEMFTAVGLIEFFYKQSLKGMQTFFTAITYCSYSFGFYLSSLLVSMVNNISSSSSTGGWLHDNDLNKDKLDFFYWLLAALSFLNFLNYLFWSRWYSYKPSQSQGDTNANESINLFGHSSKNYSGDDNIP

SEQ ID NO: 56902 - protein, 127 aa, Glycine max
  peptide (1)..(127): Ceres Seq. ID no. 15171215
MFTAVGLIEFFYKQSLKGMQTFFTAITYCSYSFGFYLSSLLVSMVNNISSSSSTGGWLHDNDLNKDKLDFFYWLLAALSFLNFLNYLFWSRWYSYKPSQSQGDTNANESINLFGHSSKNYSGDDNIP

SEQ ID NO: 56903 - DNA, 1583 bp, Glycine max
  misc_feature (1)..(1583): Ceres Seq. ID no. 14314643
acaacccaccttggattgtttttctgcgaccaaagcacgaacttacacacacacagactccgacttgtgttgtgaaaacctttgtgcattacccgacgcttcttcttttcttgttttcgctccaaaacccattgcttcaatcactaatactccactttcagatcggggtgtgtctctctccaacacgcacaaaaaaaggatttgaagatttggataagttgctttcagtcttgaagtactaaaaaagttgagtgtgaggtgtgaagtgaattttaacagtgataattggtaaatggggacccaaactatggggactcatggtggtggtggagacagtaatgggaaacagtcaccactccagcctctggtgcggcaaaactcaatgtacagtctcacacttgatgaggttcagaatcaattgggcgatttggggaagccgctaactagtatgaacattgatgagcttctaaaaaatgtgtggaccgctgaggcaagtcagaccattggtatggacaatgagggcacagcacaagctagtcaagcttctctgcagcgtcaggctagtctgtcattaaccggtgcactaagcaagaagactgtagatgaggtttggagagatatccaacaaaacaaaatcgtaggggagaagaagttccaagacagacatcctactttgggagaaatgacattggaggatttcttggtgaaagcaggtgttgttgcaggtgcatcttctaatagaacaaataccagtactatagctggagttgattcaaacgtggcagtaccacagtttccttcacaagcacagtggatacaatatccacaagcacaatatcagcatccaccacaaagtttaatggggatgtatatgcctagccaaggtatggtacagccattacacatgggggctggagcttcattagatgtttcgtttgcagataatcagatggcaatgccatcgtctctgatgggaacaatgtcagatacgcagactcctggaagaaaaaagagcacttctgaggacatgatagagaagactgttgagaggagacagaaaaggatgataaaaaatcgggaatctgctgcccgttcaagagcaaggaaacaggcatacacaaatgaattggagaataaagtctcgcgcctggaagaggaaaatgaaaggctgaggaaacgaaaggagctagagcagatgttgtcatgtgcaccccctcctgaacctaaatatcaacttcgccgaatagcatcagctccattctgagatctgtacctagttgtagcggtttgtatatttgagtatcagggaattctccttgtggattactgtgtggttgaatccagtatgtcaagaatagctatgtgatgcatttgcatccaatgacttgcttttaattgttaagttctttataactcctctgtgaaggttctttagaaaaaaatgtaaaatattgtagttttacctttcacaatatagcccttttaataatgccttgaggtacttttacgatttggggatgacaaaattgtggggtcttgccatttttcaagatatgggaaaatagggccactgtttaatattc

SEQ ID NO: 56904 - protein, 323 aa, Glycine max
  peptide (1)..(323): Ceres Seq. ID no. 14314644
MGTQTMGTHGGGGDSNGKQSPLQPLVRQNSMYSLTLDEVQNQLGDLGKPLTSMNIDELLKNVWTAEASQTIGMDNEGTAQASQASLQRQASLSLTGALSKKTVDEVWRDIQQNKIVGEKKFQDRHPTLGEMTLEDFLVKAGVVAGASSNRTNTSTIAGVDSNVAVPQFPSQAQWIQYPQAQYQHPPQSLMGMYMPSQGMVQPLHMGAGASLDVSFADNQMAMPSSLMGTMSDTQTPGRKKSTSEDMIEKTVERRQKRMIKNRESAARSRARKQAYTNELENKVSRLEEENERLRKRKELEQMLSCAPPPEPKYQLRRIASAPF

SEQ ID NO: 56905 - protein, 318 aa, Glycine max
  peptide (1)..(318): Ceres Seq. ID no. 14314645
MGTHGGGGDSNGKQSPLQPLVRQNSMYSLTLDEVQNQLGDLGKPLTSMNIDELLKNVWTAEASQTIGMDNEGTAQASQASLQRQASLSLTGALSKKTVDEVWRDIQQNKIVGEKKFQDRHPTLGEMTLEDFLVKAGVVAGASSNRTNTSTIAGVDSNVAVPQFPSQAQWIQYPQAQYQHPPQSLMGMYMPSQGMVQPLHMGAGASLDVSFADNQMAMPSSLMGTMSDTQTPGRKKSTSEDMIEKTVERRQKRMIKNRESAARSRARKQAYTNELENKVSRLEEENERLRKRKELEQMLSCAPPPEPKYQLRRIASAPF

SEQ ID NO: 56906 - protein, 293 aa, Glycine max
  peptide (1)..(293): Ceres Seq. ID no. 14314646
MYSLTLDEVQNQLGDLGKPLTSMNIDELLKNVWTAEASQTIGMDNEGTAQASQASLQRQASLSLTGALSKKTVDEVWRDIQQNKIVGEKKFQDRHPTLGEMTLEDFLVKAGVVAGASSNRTNTSTIAGVDSNVAVPQFPSQAQWIQYPQAQYQHPPQSLMGMYMPSQGMVQPLHMGAGASLDVSFADNQMAMPSSLMGTMSDTQTPGRKKSTSEDMIEKTVERRQKRMIKNRESAARSRARKQAYTNELENKVSRLEEENERLRKRKELEQMLSCAPPPEPKYQLRRIASAPF

SEQ ID NO: 56907 - DNA, 1131 bp, Glycine max
  misc_feature (1)..(1131): Ceres Seq. ID no. 14306297
gaattgcaacccaagctataggtttaataaacgttgaaactattcctcctgcgccatctccattgctgttttctctctgcttgctattacaatccaattcaagaagttcgttcaactttgatgctcaagtctaacaacatatataaccattgacagatattcaaattcagcataattgtgattaaaattttggtccttccctggaatgaaaatactgtttgtcaataaatttgggagtgatttttgcggttatatttaatgggctgctactgttcaacttcaaagaaaaccgaagcacaaggttatgaggaacccactgttcttgcatctgtgacaccttgtgagtaccatgatccatcattgaatgttactgttagtgaagtagaggccttgcatgaactctacaagaagttgagcaattcaattattgaagatggtcttattcacagggaagaattccagctggcactattcaggaataaaaacaagaaaaatctgtttgcagataggatttttgacttatttgatctcaagcgcaacggggtcattgagtttggggaatttgttcgatcactgggtgtttttcacccaaatgcagcattagaagacaagattacctttgcttttaggttgtatgatctgaggcagacagggtttattgaacgagaggagttaaaggagatggtattggcacttttgcatgagtcggatcttgagctttcagatgatatgattgaaaccattgtggataagacttttagtgatgctgatataaacggtgatggaaggatcgatcaagatgaatggaaagcatttgtgtccaagcatccatccttgataaagaatatgacacttccatatctgaaggatattaccttggcttttcccagttttgtcacaggaacggatattgaagagtcagagatgtgactctgggaggttttggcttcaccaataatgatgctatacactagcatagtagtatttgagtcattttgaatacaaggttagaagtactcttgagaatttttctattggaaaaagttctatatttttaatagaaaagctctaaaaaacacttctggtttgtatccaaacataccatatatatctttgatttcgtctcttgat

SEQ ID NO: 56908 - protein, 223 aa, Glycine max
  peptide (1)..(223): Ceres Seq. ID no. 14306298
MGCYCSTSKKTEAQGYEEPTVLASVTPCEYHDPSLNVTVSEVEALHELYKKLSNSIIEDGLIHREEFQLALFRNKNKKNLFADRIFDLFDLKRNGVIEFGEFVRSLGVFHPNAALEDKITFAFRLYDLRQTGFIEREELKEMVLALLHESDLELSDDMIETIVDKTFSDADINGDGRIDQDEWKAFVSKHPSLIKNMTLPYLKDITLAFPSFVTGTDIEESEM

SEQ ID NO: 56909 - DNA, 843 bp, Glycine max
  misc_feature (1)..(843): Ceres Seq. ID no. 14306286
acgagtcactcttcttagtgatacttatcctttgctgaaccttgttgtgatctgacatggcagaagaacaacaacgacggatcctggtggccgtggatgaaggcgaggagagcatgtatgctctctcatggtgccttaagaaccttgcttttcaaaattccaaagacacccttcttcttctctacgtcaaaccccctcgagtcacttattcagccttcgatggcacaggatatttgttttcctctgacataacggctaccatggagaggtatagccaacaagtggccgattgcgtcttggagaaagccaagaaattgtgtaacaatattgaaaatgtagagacgagggtagagaatggcgatccaagggacgtgatttgtcagatggttcaaaagttgggtgctgatgtcttagtcatgggaagccatggttatggtctcatcaagagggctttccttggaagcgtcagcaatcactgtgcacagaacgtgaagtgcccggttttgattgttaagaagccaaaaccaaccaccggagaaacataataatgataataataataaattaatcgttactagctttgtttttatgtaaaaaatagacaaccagtttgcttctgtcgcttatgtgttatttgggctctgtgtgttttgtttgtttctcctctaaaggaatatctcgccaaatattaaatgttaaaggctaagtgaagatgaggatgcacgccttttggttttgactttattattttctattcaaaagtttcctattcgtttgttacttttacataatttgtactccatgttgaactattgaatattgataatgctcctaaatcatgat

SEQ ID NO: 56910 - protein, 162 aa, Glycine max
  peptide (1)..(162): Ceres Seq. ID no. 14306287
MAEEQQRRILVAVDEGEESMYALSWCLKNLAFQNSKDTLLLLYVKPPRVTYSAFDGTGYLFSSDITATMERYSQQVADCVLEKAKKLCNNIENVETRVENGDPRDVICQMVQKLGADVLVMGSHGYGLIKRAFLGSVSNHCAQNVKCPVLIVKKPKPTTGET

SEQ ID NO: 56911 - protein, 143 aa, Glycine max
  peptide (1)..(143): Ceres Seq. ID no. 14306288
MYALSWCLKNLAFQNSKDTLLLLYVKPPRVTYSAFDGTGYLFSSDITATMERYSQQVADCVLEKAKKLCNNIENVETRVENGDPRDVICQMVQKLGADVLVMGSHGYGLIKRAFLGSVSNHCAQNVKCPVLIVKKPKPTTGET

SEQ ID NO: 56912 - protein, 94 aa, Glycine max
  peptide (1)..(94): Ceres Seq. ID no. 14306289
MERYSQQVADCVLEKAKKLCNNIENVETRVENGDPRDVICQMVQKLGADVLVMGSHGYGLIKRAFLGSVSNHCAQNVKCPVLIVKKPKPTTGET

SEQ ID NO: 56913 - DNA, 402 bp, Glycine max; identical to SEQ ID NO: 52416
  misc_feature (1)..(402): Ceres Seq. ID no. 14306345

SEQ ID NO: 56914 - protein, 56 aa, Glycine max; identical to SEQ ID NO: 52417
  peptide (1)..(56): Ceres Seq. ID no. 14306346

SEQ ID NO: 56915 - protein, 48 aa, Glycine max; identical to SEQ ID NO: 52418
  peptide (1)..(48): Ceres Seq. ID no. 14306347

SEQ ID NO: 56916 - protein, 36 aa, Glycine max; identical to SEQ ID NO: 52419
  peptide (1)..(36): Ceres Seq. ID no. 14306348

SEQ ID NO: 56917 - DNA, 835 bp, Glycine max
  misc_feature (1)..(835): Ceres Seq. ID no. 14306255
aatattaatctcttccatcacttaaatctcaattcaccgcaaaccaaaaaaagcttcatcatcatcttcttcttctctgcatcatcacaatggctgaagtacgttcacaacaacaacaaccccagcatgtgcaagtccacgcaaccacaacacacaccccacaacaccatggcggggaaggtggcagcggcattctgaacctcatcccggagatgtccctcacgggttcccaactcctagctctcctcgccggcgttccccttggtgcaatgctgctcctcctctccggcatctcgctcatcgccagcctcttggggctggcggtggcgacgccgctcttcatcttcttcagcccgctgctggtccccgccgccttcgccataggaatggcggtgaccgcggtgctggcggcgggggcgtgcgggctggcggggctcgtgttgttctcgtgggtggtgaactatctccggcagatgccacgggggacgacgatgatgacggtgctgccggagcaagcgaagcggcacgtggcggacatggcggagtacgtggggcagaagacgaaggaggttgggcaagacattcagacaagggcacatcatgcccagggaacaacaaggatgacagtgcattgagttatcatgagacaagaaaatggtttcaatttatatcgcttatgtatgacttgtgagatatactagtatgtaattaacctttggtacgtgtgttttggactttggaggagttccattttcagtgttccatgttgtgtcactttctgtatttgctcatgtacgtgtaatcagtaatattaatgcatttttcttttgggttc

SEQ ID NO: 56918 - protein, 181 aa, Glycine max
  peptide (1)..(181): Ceres Seq. ID no. 14306256
MAEVRSQQQQPQHVQVHATTTHTPQHHGGEGGSGILNLIPEMSLTGSQLLALLAGVPLGAMLLLLSGISLIASLLGLAVATPLFIFFSPLLVPAAFAIGMAVTAVLAAGACGLAGLVLFSWVVNYLRQMPRGTTMMTVLPEQAKRHVADMAEYVGQKTKEVGQDIQTRAHHAQGTTRMTVH

SEQ ID NO: 56919 - protein, 140 aa, Glycine max
  peptide (1)..(140): Ceres Seq. ID no. 14306257
MSLTGSQLLALLAGVPLGAMLLLLSGISLIASLLGLAVATPLFIFFSPLLVPAAFAIGMAVTAVLAAGACGLAGLVLFSWVVNYLRQMPRGTTMMTVLPEQAKRHVADMAEYVGQKTKEVGQDIQTRAHHAQGTTRMTVH

SEQ ID NO: 56920 - protein, 121 aa, Glycine max
  peptide (1)..(121): Ceres Seq. ID no. 14306258
MLLLLSGISLIASLLGLAVATPLFIFFSPLLVPAAFAIGMAVTAVLAAGACGLAGLVLFSWVVNYLRQMPRGTTMMTVLPEQAKRHVADMAEYVGQKTKEVGQDIQTRAHHAQGTTRMTVH

SEQ ID NO: 56921 - DNA, 576 bp, Glycine max
  misc_feature (1)..(576): Ceres Seq. ID no. 14314609
attgaaatttcttctcctgggtttctctatatatttttctttccttgcaagtagattctagcaatttcttctattccttagtattgtttaaaggatgattctttcgatgaagcaagttttctcactagcaatattcattgcattttgggaactttcttctgttgtagctgatgggggagatgtgactatagttcgagtatcaaataatttaaaccaaggtttaagtttcacaattcattgcaaaaccaataacaaagacttgggaactcaagtggtgaatcaaaattactatgaacgatttgaactccatcgtgacaatgcacctggcttaacattcttgttttgcaaaataacatggagagatgcatcaattctatatgtcctttaccaagatgcaagggattttcgccgtagatgtacaactgattgtaattgggaagtcaacaacgaaaaccttcttggcactaatcaatatactctaaaaccagatattattgtcccatggcctaaaaattgatacccatttagtgaacatccaattttacttggataatttaaataaaaaagtgttgtgtt

SEQ ID NO: 56922 - protein, 140 aa, Glycine max
  peptide (1)..(140): Ceres Seq. ID no. 14314610
MILSMKQVFSLAIFIAFWELSSVVADGGDVTIVRVSNNLNQGLSFTIHCKTNNKDLGTQVVNQNYYERFELHRDNAPGLTFLFCKITWRDASILYVLYQDARDFRRRCTTDCNWEVNNENLLGTNQYTLKPDIIVPWPKN

SEQ ID NO: 56923 - protein, 136 aa, Glycine max
  peptide (1)..(136): Ceres Seq. ID no. 14314611
MKQVFSLAIFIAFWELSSVVADGGDVTIVRVSNNLNQGLSFTIHCKTNNKDLGTQVVNQNYYERFELHRDNAPGLTFLFCKITWRDASILYVLYQDARDFRRRCTTDCNWEVNNENLLGTNQYTLKPDIIVPWPKN

SEQ ID NO: 56924 - DNA, 1637 bp, Glycine max
  misc_feature (1)..(1637): Ceres Seq. ID no. 14314636
gctcttggctgatatttcctgataagtggacagacgcttaaacagagaaactaacacagatttgcatgcatggggaaaataacgcacattgtagtaattcccagtgcagggtacagccacttcgttcccgttatccacttctcaaagagacttgttgagcttcacccagaaattcacgtcacatgcatcattcccattctggggtctctcccaagtgctgcaaaacccattctccaaacccttccacaaaacatcaacacggttttccttccaccggtgaaccctaatgacctaccacaaggtgttcccgtagttgtccaaattcagctagcaatggctcactccatgccctccatccaccacaccctcaagtccataacttcaaagactccctacgtggccatggtggttgattctttcgccatgcatgccctagatttcgctcacgagttcaacatgttgtcctacgtttacttccctatatcagccaccacactctccatgcacttgaacttgcccttgttggacgaggaaacatcatgtgagtacagatatctgccggaggctatcaaattaccgggttgcgtgccgtttcacggccgcgatctctatgcccaagcccaggatcgaaccagtcaactctaccagatgtcgctgaagcgttacaaacgatgctggttcgttaatgggatcttcatcaacagcttcctggcattggaaactggtcctataagagcattgagagatgaggatagaggttaccctgctgtgtaccctgttggaccacttgtccaaagtggtgatgatgatgcaaaagggttattggagtgtgtaacatggttggagaaacagcaagatggttcagttttgtatgtttcttttgggagtggtggaacactttcacaagagcaaatgaatgagctggcttgtggtttggagttgagtaaccacaagttcttgtgggttgtgagagcaccgaacaatgcaaaagctgatgctgcttatcttggtgcacaaaagtgtgttgaccctttgcagttcttaccatgtgagttcttggagaggacaaaagagaaaggtatggttgttccttcatgggcaccgcaggttcaaatccttagccacagttcagttggtgggttcttgactcactgtggctggaattcgaccctcgagagtgtgctgcatggtgtgccattgataacttggccactgtatgctgagcagagaatgaatgcggttgtgctttgtgaggatctcaaagtgggattgaggccgagagttggtgaaaatggtttggtcgagagaaaagaaattgctgatgttgtgaagcgtttgatggaaggaagggaaggtggggaaatgcgaaaaagaatgaagaaactagaagttgcggctgttaatgctctcaaagaagatgggtcttctaccaagactctttcagagttggcactaatgtggaaaaatgtggcttaggaaaacaagttttttatttatgttatgcatgcagcttgtgtagtagtgcctgtaatgttcaggtatttcgtatcttagtttttatttatgtaatgtaatgcagcttgtatggtgcttgtgtttttagttataaataaataaactttggtcattacaagatc

SEQ ID NO: 56925 - protein, 468 aa, Glycine max
  peptide (1)..(468): Ceres Seq. ID no. 14314637
MGKITHIVVIPSAGYSHFVPVIHFSKRLVELHPEIHVTCIIPILGSLPSAAKPILQTLPQNINTVFLPPVNPNDLPQGVPVVVQIQLAMAHSMPSIHHTLKSITSKTPYVAMVVDSFAMHALDFAHEFNMLSYVYFPISATTLSMHLNLPLLDEETSCEYRYLPEAIKLPGCVPFHGRDLYAQAQDRTSQLYQMSLKRYKRCWFVNGIFINSFLALETGPIRALRDEDRGYPAVYPVGPLVQSGDDDAKGLLECVTWLEKQQDGSVLYVSFGSGGTLSQEQMNELACGLELSNHKFLWVVRAPNNAKADAAYLGAQKCVDPLQFLPCEFLERTKEKGMVVPSWAPQVQILSHSSVGGFLTHCGWNSTLESVLHGVPLITWPLYAEQRMNAVVLCEDLKVGLRPRVGENGLVERKEIADVVKRLMEGREGGEMRKRMKKLEVAAVNALKEDGSSTKTLSELALMWKNVA

SEQ ID NO: 56926 - protein, 380 aa, Glycine max
  peptide (1)..(380): Ceres Seq. ID no. 14314638
MAHSMPSIHHTLKSITSKTPYVAMVVDSFAMHALDFAHEFNMLSYVYFPISATTLSMHLNLPLLDEETSCEYRYLPEAIKLPGCVPFHGRDLYAQAQDRTSQLYQMSLKRYKRCWFVNGIFINSFLALETGPIRALRDEDRGYPAVYPVGPLVQSGDDDAKGLLECVTWLEKQQDGSVLYVSFGSGGTLSQEQMNELACGLELSNHKFLWVVRAPNNAKADAAYLGAQKCVDPLQFLPCEFLERTKEKGMVVPSWAPQVQILSHSSVGGFLTHCGWNSTLESVLHGVPLITWPLYAEQRMNAVVLCEDLKVGLRPRVGENGLVERKEIADVVKRLMEGREGGEMRKRMKKLEVAAVNALKEDGSSTKTLSELALMWKNVA

SEQ ID NO: 56927 - protein, 376 aa, Glycine max
  peptide (1)..(376): Ceres Seq. ID no. 14314639
MPSIHHTLKSITSKTPYVAMVVDSFAMHALDFAHEFNMLSYVYFPISATTLSMHLNLPLLDEETSCEYRYLPEAIKLPGCVPFHGRDLYAQAQDRTSQLYQMSLKRYKRCWFVNGIFINSFLALETGPIRALRDEDRGYPAVYPVGPLVQSGDDDAKGLLECVTWLEKQQDGSVLYVSFGSGGTLSQEQMNELACGLELSNHKFLWVVRAPNNAKADAAYLGAQKCVDPLQFLPCEFLERTKEKGMVVPSWAPQVQILSHSSVGGFLTHCGWNSTLESVLHGVPLITWPLYAEQRMNAVVLCEDLKVGLRPRVGENGLVERKEIADVVKRLMEGREGGEMRKRMKKLEVAAVNALKEDGSSTKTLSELALMWKNVA

SEQ ID NO: 56928 - DNA, 898 bp, Glycine max
  misc_feature (1)..(898): Ceres Seq. ID no. 14306223
aagacacaactccaacaaggcattgtttggtttggtttggttacttgaaaatctcgaatcgcttaattttgatttagttttccaccgcaacgcggaacctctttctcgaactggctaactctcaggcaagtggctcggacgctgattccagcaacacacggctggtggttgcactgtatgacgccctaaactccggcgactccaacgccgtcgtcaagatcgtcgccgccgacctcgagtggtggttccatggtccgccctctcaccagtttttgatgcgcatgctcaccggcgactccgccgccgacaactccttccgattcgttccgcagtccatcgccgccttcggctccaccgtcatcgtcgagggctgcgactccgcccgcaacattgcctgggtccacgcctggaccgtcactgatgggatgatcactcaaatcagagagtacttcaacaccgccctcaccgtcactcgcatccacgattccggcgagattgttccggccagatccggcgccggccgtttgccctgcgtctgggagagcagcgtctccggtcgggtcgggaaatccgtccccggtttggttctcgcaatataaaatataaaataagtaattagggaaggacgaggtcacgtgttgccgttgctataataattaaataagggacttgtgcacgtggcggtgactggatcgatcggtttcagggaacattgatactttgtgttagtattggaggttagggagatgtgagagctttgttgttattggtgtggtttgttttgtttgcttgtgtgtttttcaccactatgggcgtattcaggtggttgtatctttcttttgttatttggagtgttgatgatgatgcaataagaatatctatggactatgcttttaag

SEQ ID NO: 56929 - protein, 107 aa, Glycine max
  peptide (1)..(107): Ceres Seq. ID no. 14306224
MRMLTGDSAADNSFRFVPQSIAAFGSTVIVEGCDSARNIAWVHAWTVTDGMITQIREYFNTALTVTRIHDSGEIVPARSGAGRLPCVWESSVSGRVGKSVPGLVLAI

SEQ ID NO: 56930 - protein, 105 aa, Glycine max
  peptide (1)..(105): Ceres Seq. ID no. 14306225
MLTGDSAADNSFRFVPQSIAAFGSTVIVEGCDSARNIAWVHAWTVTDGMITQIREYFNTALTVTRIHDSGEIVPARSGAGRLPCVWESSVSGRVGKSVPGLVLAI

SEQ ID NO: 56931 - protein, 57 aa, Glycine max
  peptide (1)..(57): Ceres Seq. ID no. 14306226
MITQIREYFNTALTVTRIHDSGEIVPARSGAGRLPCVWESSVSGRVGKSVPGLVLAI

SEQ ID NO: 56932 - DNA, 1163 bp, Glycine max
  misc_feature (1)..(1163): Ceres Seq. ID no. 14314019
gtacgattaacatggagcaaatagtttttctccgctcactgcgagcacctttgttgcacggaggaaaagagggctttgttcatctacccaatctccatgcatgctgtgaatcatccaattcccacccatgttctctcaatgcagaaaaccattttaacagttctatttcttaccttggagttgcattgcttggagtaggaatcgctctagatttttttcttacaactgggggaggaagtggatttgagtcttcattgctggagagtgtgtcgttttgcctgtcattgtagggaaccaggaatggaatggcttagaagaaatgtatgtgaaaacggcttgtggtttcacccatagcctgcggaaaatgctttattgtgtttcggatatcaatttaaagttcacagttatgcaaataaccagtgcattagtgaatggcagcgctcttcgtttccacttacctagatttctatgtgtgcgtcatcattcatcaaccaagttgtttgtcacagggctttcctatgataccaatgaaccgattctgagagatgcctttgggcaacatggtgaaatcattgaagttaaagtaatatgtgatcatgtgactgggaaatcaagaggttatggatttgtgcggttcgtttctgaaactacagctgctgcagctcgcaaagaaatgaatggccagatactggatggaagacgcattcgggtgagttatgcacacaaaggcgagcgactaagtctgccaaacaattcataaaacagttcatggttgcaacatattcactttctaactgtgatactcgaagtctatagttttggcttttaattttagccattcaacgcaccttttttcatttgatggcgatctagatagtctcagtttgtttcgatggcttgaattgttgttctcatgttccttgaccttgaaatgctaatatccgatgaataacaaaatataatttagggttcattttgttttgatggatggcttgaattgatgttctcatatcccttgcccttgaaatactaatatcatatcataagatcattgacaatatataatttgggaccaagctgtttttctgtttgtttcttcttttcttttttttttccgtaaattgttacttgaaatagaaagatgagtgtgacatattggcaac

SEQ ID NO: 56933 - protein, 146 aa, Glycine max
  peptide (1)..(146): Ceres Seq. ID no. 14314020
MYVKTACGFTHSLRKMLYCVSDINLKFTVMQITSALVNGSALRFHLPRFLCVRHHSSTKLFVTGLSYDTNEPILRDAFGQHGEIIEVKVICDHVTGKSRGYGFVRFVSETTAAAARKEMNGQILDGRRIRVSYAHKGERLSLPNNS

SEQ ID NO: 56934 - protein, 131 aa, Glycine max
  peptide (1)..(131): Ceres Seq. ID no. 14314021
MLYCVSDINLKFTVMQITSALVNGSALRFHLPRFLCVRHHSSTKLFVTGLSYDTNEPILRDAFGQHGEIIEVKVICDHVTGKSRGYGFVRFVSETTAAAARKEMNGQILDGRRIRVSYAHKGERLSLPNNS

SEQ ID NO: 56935 - protein, 117 aa, Glycine max
  peptide (1)..(117): Ceres Seq. ID no. 14314022
MQITSALVNGSALRFHLPRFLCVRHHSSTKLFVTGLSYDTNEPILRDAFGQHGEIIEVKVICDHVTGKSRGYGFVRFVSETTAAAARKEMNGQILDGRRIRVSYAHKGERLSLPNNS

SEQ ID NO: 56936 - DNA, 1424 bp, Glycine max
  misc_feature (1)..(1424): Ceres Seq. ID no. 15178086
aaaaaaggggttgactgaatgtcttgagtgtctcttcctccccaaggctgagccccgctcgttacgggtctctgtctcctttcctttcacgtatgcatcatagtaatagtaattacgaagagagacggaggagccgcagaggagtaaggaggagagcccagaatgagaatgagaagatggtggatctgccacaggaattgatacatgaaatccttttgcgcttgcccgtcaagtctcttattcgattcaaaactgtctgtaagtcatggctttctcacatctctgatccacactttactgcttcacattttaaactaggggcagcacccactgagagacttttgttcttatcgcctattgctcgtgaattcctatccatagacttcaatgaatcccttaatgatgattctgcttctgccgcattgaattgtgactttgtggaacattttgattaccttgaaatcattggttcatgtagagggtttttactcttggatttccgctatactctctgcgtgtggaatccatccacaggtgtccaccaatttgtgaaatggtcaccttttgtgtcatctaatatcatgggtctcgatgtgggtgatgagttttccttatctattcgtggttttgggtatgacccttcaacagatgattacttggcagttctggcatcgtgcaacgacgagcttgttataatccacatggagtatttctcactcagagctaatacttggaaagaaattgaggctagccatttgtcttttgcagaaatagcttataatgaagtcgggtcgttcttgaacactgctattcattggttggcttttagtcttgaggtatcaatggatgttattgttgcttttgatttaactgaaaaggagtttttcagagatacttctaccaattgattttgatttggacaattttcaactctgtgttttggcggtactgggagaattgctcaatctatgtgctgttggaggagatcagacattcggtagaaatatgggcgatgggagaatacaaagtaaggtcatcttggacaaagaccactgttgtgtctcacgattatttttctagtctctccttatttccaatatgttctaccgaagatggagatattgttgggacagatggctgtaatgtattgataaaatgtaatgacgagggacagctgcaagagtaccaaatctattctaatggtccatatcgatcagctgtgtacacagaatctctactttcactcccttgtgacagggagccagcagaaaatgtttaataagcgaataagaggaattaggttgtgaaatattttctgatacttttactatttgttggatactcatcttatattatcaattcttatggtatattaaagcatgaagaagtgacaggtagattaatgaaattgatatttcatggcc

SEQ ID NO: 56937 - protein, 271 aa, Glycine max
  peptide (1)..(271): Ceres Seq. ID no. 15178087
MHHSNSNYEERRRSRRGVRRRAQNENEKMVDLPQELIHEILLRLPVKSLIRFKTVCKSWLSHISDPHFTASHFKLGAAPTERLLFLSPIAREFLSIDFNESLNDDSASAALNCDFVEHFDYLEIIGSCRGFLLLDFRYTLCVWNPSTGVHQFVKWSPFVSSNIMGLDVGDEFSLSIRGFGYDPSTDDYLAVLASCNDELVIIHMEYFSLRANTWKEIEASHLSFAEIAYNEVGSFLNTAIHWLAFSLEVSMDVIVAFDLTEKEFFRDTSTN

SEQ ID NO: 56938 - protein, 243 aa, Glycine max
  peptide (1)..(243): Ceres Seq. ID no. 15178088
MVDLPQELIHEILLRLPVKSLIRFKTVCKSWLSHISDPHFTASHFKLGAAPTERLLFLSPIAREFLSIDFNESLNDDSASAALNCDFVEHFDYLEIIGSCRGFLLLDFRYTLCVWNPSTGVHQFVKWSPFVSSNIMGLDVGDEFSLSIRGFGYDPSTDDYLAVLASCNDELVIIHMEYFSLRANTWKEIEASHLSFAEIAYNEVGSFLNTAIHWLAFSLEVSMDVIVAFDLTEKEFFRDTSTN

SEQ ID NO: 56939 - DNA, 1574 bp, Glycine max
  misc_feature (1)..(1574): Ceres Seq. ID no. 14314054
aaagcagagagcaaatcaacaaaagaagccatggtagtgttacaagaagtcttcaacgttgtaccaacttccgaatcagaagagtttcagttaccaactcaaacatcgctttccctcaccttcttcgacatcctatggttaaggttaccacctgttcaacgcgtcttcttctatgaattccctcacccaacccatctcttctttgatacccttcttcccaaactcaaacactctctttctcttgcacttgcccactttttccctcttgcgggccacctcacttggccacttcactcccaaaaacccatcatcaattacaaatctggtgacactgttcccctcacagttgctgtatctgaagctgatttcaaccacctagcaggcacagatctttatgaagccaaagaaattccccatcttttaccccacttgaccatatcccacgaaaaagccacgcttttggccctgcaagctaccctctttccaaactctggattttccattggaataacctcacaccatgctgttctagatggcaagacttcaacatcgtttatcaaatcctgggcttatctttgtagagaatcacaatcacccacttctttaccacctgaactgattcctttttatgacagggaagtaatcaaagaccctaaccatttaggggtaaaatatgtcagtgattggttagagcagaatggacccaacaaccgaagcctcttggtttgggatctgcaagctccagaagatgcaactagaggcatatttcaattgtctcgttcggatattgaaaagctgaagcaaatagtggtgtccaagaagaaagggaacaacaccaaccttcgcttgtcaacctttgtgttgtctattgcctatgcttgtgttttcagggtgagagcagaggaaacaaagaacaagagagttatgttggctttgaatgttgattgcagggcacgtttggagccacctattccaccaacatattttggaaactgtgttggagcgagacttgcaattgctgaaacaagagagatattgggggaagatggcctaattgtggttgtggatgcactgaatgatgccttggggagtctcaaggatggagcactgagtggagcagaaaattggtcaaggtggttgcttgaaagttttagtgatgatgtgagaataattggtgttgctgggtcacctaggtttgaggcttatagtaatgactttggttggggaagaccaaagaaagtggagatggcttctatagacagaactggggcactttgtttatcagatagcaaaaatggtgatggggttgaggtaagttttgtgtccaacaaaagagcaatggagacctttgcttatctctttgccaatggccttcgatcttgagtccctcttggtacaatcttgtggtttttcatgaataaaaagttgaggaaaaataaaggtagagtagtgtaggtgttcttatgaaaattcgtttttaacaattaattgtctgaaatgttctggtggtgtgtaatgcttcaattatttgacaattttatgtatattaatcatgtattgctgttgattatccg

SEQ ID NO: 56940 - protein, 460 aa, Glycine max
  peptide (1)..(460): Ceres Seq. ID no. 14314055
KAESKSTKEAMVVLQEVFNVVPTSESEEFQLPTQTSLSLTFFDILWLRLPPVQRVFFYEFPHPTHLFFDTLLPKLKHSLSLALAHFFPLAGHLTWPLHSQKPIINYKSGDTVPLTVAVSEADFNHLAGTDLYEAKEIPHLLPHLTISHEKATLLALQATLFPNSGFSIGITSHHAVLDGKTSTSFIKSWAYLCRESQSPTSLPPELIPFYDREVIKDPNHLGVKYVSDWLEQNGPNNRSLLVWDLQAPEDATRGIFQLSRSDIEKLKQIVVSKKKGNNTNLRLSTFVLSIAYACVFRVRAEETKNKRVMLALNVDCRARLEPPIPPTYFGNCVGARLAIAETREILGEDGLIVVVDALNDALGSLKDGALSGAENWSRWLLESFSDDVRIIGVAGSPRFEAYSNDFGWGRPKKVEMASIDRTGALCLSDSKNGDGVEVSFVSNKRAMETFAYLFANGLRS

SEQ ID NO: 56941 - protein, 450 aa, Glycine max
  peptide (1)..(450): Ceres Seq. ID no. 14314056
MVVLQEVFNVVPTSESEEFQLPTQTSLSLTFFDILWLRLPPVQRVFFYEFPHPTHLFFDTLLPKLKHSLSLALAHFFPLAGHLTWPLHSQKPIINYKSGDTVPLTVAVSEADFNHLAGTDLYEAKEIPHLLPHLTISHEKATLLALQATLFPNSGFSIGITSHHAVLDGKTSTSFIKSWAYLCRESQSPTSLPPELIPFYDREVIKDPNHLGVKYVSDWLEQNGPNNRSLLVWDLQAPEDATRGIFQLSRSDIEKLKQIVVSKKKGNNTNLRLSTFVLSIAYACVFRVRAEETKNKRVMLALNVDCRARLEPPIPPTYFGNCVGARLAIAETREILGEDGLIVVVDALNDALGSLKDGALSGAENWSRWLLESFSDDVRIIGVAGSPRFEAYSNDFGWGRPKKVEMASIDRTGALCLSDSKNGDGVEVSFVSNKRAMETFAYLFANGLRS

SEQ ID NO: 56942 - DNA, 1390 bp, Glycine max
  misc_feature (1)..(1390): Ceres Seq. ID no. 14314015
attcattgcacgcagttcctggaaagtagcaaagtaaagctctcttggttttgggaaccgaaacctaagaaaaacgcagaatctgtttcggaaagcgaaggaggcatggcatttgagtccaacgaagttgcagccacaacgctccaagccatatgctacaagcgcggttccctccagcttctcgatcagagaaagctccctctggagacagtttacttggaaattcgggattcaacggatggctggaatgccatacgggaaatggtggtccggggagcacctgctattgcaattgcagcggcactctctttggctgtggaggtgttcaatttagattttaatgggtcagctactgatgctgtatccttgctgcagaagaaattagaatatcttgtcacaagtcggccaactgcagtgaacctatcagatgctgcgacaaaactcaaagaagtgatatcaaatgctgctgctaccacttcagagggaaggagtgttttccaagtgtatatagatgctgctgaagttatgcttgaggatgatgttgcgtcaaatagagctattggttcttatggagctagtattattcaacaacaaacagagaaacaaaagctttctgttttgactcattgcaacactggaagtctagccacagctggatatggtactgctctgggtgtcatccgtgcacttcatagtgccggagttctaaaaagggcttattgcacagaaacacgcccatttaatcaaggatctagacttactgcctttgagttggtgcatgaaaaaataccaggaactcttattgccgattctgctgcagctgcattaatgaaggcaggacatgtggatgctgttgttgttggggcagatcgggttgcatcaaatggtgacacagccaacaaaattggaacctacagcgttgccttgtccgctaagtttcataatgtacctttttatgtggctgcacccctaacttccattgatctatcactttcttctggacaagaaattgtcattgaggagaggtctcccaaggaattgctgaacacacatggaggacttggagagcagattgctgcctcaggaatttctgtgtggaacccagcttttgatgttactcctgctaatctaatatcggggatcatcactgagaagggtgtcattacgaagacatctgctggtgatgcatttgacatcaaagccttcgtacagaaaacaggttaaggtagagtgagatttttatcacacgttacaacattgtaggcttgaaaagtattggagtggtagggttctttaagagcctctttggtacgcaagttagataagacttattaactttgagacctaattgtataagatgataacatcaatatattatgcaatgtttggt

SEQ ID NO: 56943 - protein, 407 aa, Glycine max
  peptide (1)..(407): Ceres Seq. ID no. 14314016
IHCTQFLESSKVKLSWFWEPKPKKNAESVSESEGGMAFESNEVAATTLQAICYKRGSLQLLDQRKLPLETVYLEIRDSTDGWNAIREMVVRGAPAIAIAAALSLAVEVFNLDFNGSATDAVSLLQKKLEYLVTSRPTAVNLSDAATKLKEVISNAAATTSEGRSVFQVYIDAAEVMLEDDVASNRAIGSYGASIIQQQTEKQKLSVLTHCNTGSLATAGYGTALGVIRALHSAGVLKRAYCTETRPFNQGSRLTAFELVHEKIPGTLIADSAAAALMKAGHVDAVVVGADRVASNGDTANKIGTYSVALSAKFHNVPFYVAAPLTSIDLSLSSGQEIVIEERSPKELLNTHGGLGEQIAASGISVWNPAFDVTPANLISGIITEKGVITKTSAGDAFDIKAFVQKTG

SEQ ID NO: 56944 - protein, 372 aa, Glycine max
  peptide (1)..(372): Ceres Seq. ID no. 14314017
MAFESNEVAATTLQAICYKRGSLQLLDQRKLPLETVYLEIRDSTDGWNAIREMVVRGAPAIAIAAALSLAVEVFNLDFNGSATDAVSLLQKKLEYLVTSRPTAVNLSDAATKLKEVISNAAATTSEGRSVFQVYIDAAEVMLEDDVASNRAIGSYGASIIQQQTEKQKLSVLTHCNTGSLATAGYGTALGVIRALHSAGVLKRAYCTETRPFNQGSRLTAFELVHEKIPGTLIADSAAAALMKAGHVDAVVVGADRVASNGDTANKIGTYSVALSAKFHNVPFYVAAPLTSIDLSLSSGQEIVIEERSPKELLNTHGGLGEQIAASGISVWNPAFDVTPANLISGIITEKGVITKTSAGDAFDIKAFVQKTG

SEQ ID NO: 56945 - protein, 320 aa, Glycine max
  peptide (1)..(320): Ceres Seq. ID no. 14314018
MVVRGAPAIAIAAALSLAVEVFNLDFNGSATDAVSLLQKKLEYLVTSRPTAVNLSDAATKLKEVISNAAATTSEGRSVFQVYIDAAEVMLEDDVASNRAIGSYGASIIQQQTEKQKLSVLTHCNTGSLATAGYGTALGVIRALHSAGVLKRAYCTETRPFNQGSRLTAFELVHEKIPGTLIADSAAAALMKAGHVDAVVVGADRVASNGDTANKIGTYSVALSAKFHNVPFYVAAPLTSIDLSLSSGQEIVIEERSPKELLNTHGGLGEQIAASGISVWNPAFDVTPANLISGIITEKGVITKTSAGDAFDIKAFVQKTG

SEQ ID NO: 56946 - DNA, 945 bp, Glycine max
  misc_feature (1)..(945): Ceres Seq. ID no. 14314070
aaacacaacaactcatcatcctatattctcttcttggatcatcttggttaagctgcagatcagaatagaataataataaataaagataagatggagactcatttggttttcttgcttggtttgatcttcactctagttgccggcgttggagcccaagcccaaggcccatccacctctcctgcgcctcccacaccccaagcatctccacctcccgtccagtcttctccgccacctgttccctcttcacctccaccctctcagtctccaccaccagcttccactccccctccatccccactcagctctcctcctccttcctctcctccaccctcctcccctcctccttcttctccaccccccgcctctcctcctccttcttctccaccccccgcctctcctcctccttcttcccctcccccttcctctccccctcctttttcaccacctcctgccactcctccccccgccactcctccccccgcagttccaccaccctcattgaccccaacagttacacctctttcttctccacctgtctcttctccagctccgtctccttccaaggtgtttgctcctgcactctctccttcccttgctcccggtcccagcctctccaccatctctccctccggcgatgacagtggggctcaaaacttgtggtcctttcagaagatgattgggagcttagtattcggatgtgctttgctgtccatgttgttctagacatcgatctctgtcttcggactcgcagatttttctgccaattcatgttattttgctatttaccctataccttacctttatatattattttgtggatgtgatcgtgggagtttattactgtatttgaactatataaattgcttgcattcttgggagatttgaggggaggttttgtattcgagggcagttattttgtatgacattactattagtttatcgatc

SEQ ID NO: 56947 - protein, 210 aa, Glycine max
  peptide (1)..(210): Ceres Seq. ID no. 14314071
METHLVFLLGLIFTLVAGVGAQAQGPSTSPAPPTPQASPPPVQSSPPPVPSSPPPSQSPPPASTPPPSPLSSPPPSSPPPSSPPPSSPPPASPPPSSPPPASPPPSSPPPSSPPPFSPPPATPPPATPPPAVPPPSLTPTVTPLSSPPVSSPAPSPSKVFAPALSPSLAPGPSLSTISPSGDDSGAQNLWSFQKMIGSLVFGCALLSMLF

SEQ ID NO: 56948 - DNA, 1335 bp, Glycine max
  misc_feature (1)..(1335): Ceres Seq. ID no. 15171228
aattctgcttcagaaatccctgcgtgaagaagaaatcactgtgtgtgattcaattgcatcggtttcttcaattccagcaccggtgcgtgcatctgatttatataaccttgtttgttcactcttatttttatgttatggctatttcatatttgaggtcagcatcataagcagttgttgtttcggaaacacaagatgaattctggtgggtacgctgttgaggttacgggtctctcgccaaaagccacggacaaggatgttcgtgacttctttgctttctccggtgtcattgagaatgttgaaattatcaggtctggtgattatgcttgtaccgcttatgtgacattcaaagatgcatatgctcaagaaactgcatgcttgctcagtggagccactattttagatcaacgtgtatgcataacacgctggggacactatgaagatgaatttgatttttggaaccagccttcgtatagtcatgaggatgagactgcttcaactacaccacaaagcaatcaatttgtttcctctgctggagaagcagttaccatggctcaagaagttgttaggaccatgctgtcaaagggatatgttctcagcaaggatgcactagctaaggctaaagactttgacgagtctcatcaggtttccgccactgcaacagcgaaggtttctgaactgagccagagaattggcctatcagataagatatctgcaggtattggagctgttaaatctgtggatcagagatataatgtctctgaaacaaccatggcggctgcatccacagcaggaagatcggtagcagcggctgcaaactctttggtaaatagcagctatttttcaaaaggagccttgtgggtgtcaggtgctctaacccgagcagctcaggttgcttctgatatgggtactcacagggataggcagtaaataaagcattgacatgattaaacactatcttttagatatgtctgcttctgctaaatagcttttgaaacttcagttagcaatattattatacttttacaatacataaatcctgtttggataattttttggataaacacttatagaagtaaggtaaaatgaattgagcttctctcgtaagttaaaatcaacttatgcacttaacttttataaaagatttttcatttaacttttctgaaggccgaagtacataagttgattttagtttatgagaaaatcacatttcattttactttcttgtaagtatttatagagaaatttatcttaacaggatcatagtgcatgtaattatgaataaatctagtgtatgcccagacaggattgaactatgaaacccgtgctatttctacc

SEQ ID NO: 56949 - protein, 244 aa, Glycine max
  peptide (1)..(244): Ceres Seq. ID no. 15171229
MNSGGYAVEVTGLSPKATDKDVRDFFAFSGVIENVEIIRSGDYACTAYVTFKDAYAQETACLLSGATILDQRVCITRWGHYEDEFDFWNQPSYSHEDETASTTPQSNQFVSSAGEAVTMAQEVVRTMLSKGYVLSKDALAKAKDFDESHQVSATATAKVSELSQRIGLSDKISAGIGAVKSVDQRYNVSETTMAAASTAGRSVAAAANSLVNSSYFSKGALWVSGALTRAAQVASDMGTHRDRQ

SEQ ID NO: 56950 - protein, 126 aa, Glycine max
  peptide (1)..(126): Ceres Seq. ID no. 15171230
MAQEVVRTMLSKGYVLSKDALAKAKDFDESHQVSATATAKVSELSQRIGLSDKISAGIGAVKSVDQRYNVSETTMAAASTAGRSVAAAANSLVNSSYFSKGALWVSGALTRAAQVASDMGTHRDRQ

SEQ ID NO: 56951 - DNA, 1528 bp, Glycine max
  misc_feature (1)..(1528): Ceres Seq. ID no. 14315052
ttaccacttcccatcttcgcacacaacacagccatccctttctctcccttcttttgctctctgccctaaccagcctcaccagatcttttacctccatttccagtgcatcacaccttagcttcaagccatcacaagttgtagatacagttaatactcaatatggagctgagtactataaaagatgcttttgaccgtgttactaagaagcaaaagttatcttgttccaagactcaagaagcaattgatcagatcagacaggaaattgagagtgttttagacacactgcagtcagcgaataacactgaccatgaacttgattataaaactgtcctgaatgaacttaaggccagttttcttttaattgctccacttagtcaaatggaaggtacacagaaggagctaaatgtagcactcaccaagtatgggaagcttcttgagaaacatttcaaccctgatatatccaaggcttacagaaatatcgacattgatagacatacattaaaccaaataattgctaaccatttttatcaccagggcctttttgagataggggaccattttatgagtgtggttggagagcctgaatccgcagccattatgaaatttccgttcgtggaaatgtatcaaatacttgaagccatgcagaatcagaacctagagccagccctcaactgggcttccactaatggtgacaaacttgctcaaagtggatctgatattgtgttgaaacttcactcaatgcaatttgtgaaagtacttcaaaatggaagtagagaggaagctcttcattatgctcgaatgcacctttctccttttgctaccagtcacatgaccgatattcagaaacttatgggctgtcttctatggacgggaaagcttgatcgttctccttaccatgcattactatcaccatctaactgggataagttggctgaggaacttaaaaggcagttctgcaatcttttgggacagtcgtataatagtccattgagcgtgactgtagcagcaggggtccaggttttgccaccactcctcaaatttatgaatgtcatggcagggaagaagaatgaatggcagtctatgaaccagttaccggtgccggttgagttggaccgtgagttccagttccattctatttttgtttgtcctgtctccaaggaacaagcaaccgaggataaccctccgatgttaatgtcctgtggccatgtcctctgcaagcagtctatcttgaagatgtccaagaatagcacaaaagtgtttaagtgcccatattgtccctttgatattgatgcagcacagtgcaagcagctatatttctgatgttgatggatttgtatgaaactcctgtataaattcaatcctgtgttagcaataggtgtaaccacgtttgcaaaggcccatgccttgttgtgatctctgtgtatttcataaatttgttgtaaatagaaattctttttaatctggatatgactggcaagtccttcattatttgaataagttttgatacacttaaagctggtttttcccc

SEQ ID NO: 56952 - protein, 386 aa, Glycine max
  peptide (1)..(386): Ceres Seq. ID no. 14315053
MELSTIKDAFDRVTKKQKLSCSKTQEAIDQIRQEIESVLDTLQSANNTDHELDYKTVLNELKASFLLIAPLSQMEGTQKELNVALTKYGKLLEKHFNPDISKAYRNIDIDRHTLNQIIANHFYHQGLFEIGDHFMSVVGEPESAAIMKFPFVEMYQILEAMQNQNLEPALNWASTNGDKLAQSGSDIVLKLHSMQFVKVLQNGSREEALHYARMHLSPFATSHMTDIQKLMGCLLWTGKLDRSPYHALLSPSNWDKLAEELKRQFCNLLGQSYNSPLSVTVAAGVQVLPPLLKFMNVMAGKKNEWQSMNQLPVPVELDREFQFHSIFVCPVSKEQATEDNPPMLMSCGHVLCKQSILKMSKNSTKVFKCPYCPFDIDAAQCKQLYF

SEQ ID NO: 56953 - protein, 313 aa, Glycine max
  peptide (1)..(313): Ceres Seq. ID no. 14315054
MEGTQKELNVALTKYGKLLEKHFNPDISKAYRNIDIDRHTLNQIIANHFYHQGLFEIGDHFMSVVGEPESAAIMKFPFVEMYQILEAMQNQNLEPALNWASTNGDKLAQSGSDIVLKLHSMQFVKVLQNGSREEALHYARMHLSPFATSHMTDIQKLMGCLLWTGKLDRSPYHALLSPSNWDKLAEELKRQFCNLLGQSYNSPLSVTVAAGVQVLPPLLKFMNVMAGKKNEWQSMNQLPVPVELDREFQFHSIFVCPVSKEQATEDNPPMLMSCGHVLCKQSILKMSKNSTKVFKCPYCPFDIDAAQCKQLYF

SEQ ID NO: 56954 - protein, 252 aa, Glycine max
  peptide (1)..(252): Ceres Seq. ID no. 14315055
MSVVGEPESAAIMKFPFVEMYQILEAMQNQNLEPALNWASTNGDKLAQSGSDIVLKLHSMQFVKVLQNGSREEALHYARMHLSPFATSHMTDIQKLMGCLLWTGKLDRSPYHALLSPSNWDKLAEELKRQFCNLLGQSYNSPLSVTVAAGVQVLPPLLKFMNVMAGKKNEWQSMNQLPVPVELDREFQFHSIFVCPVSKEQATEDNPPMLMSCGHVLCKQSILKMSKNSTKVFKCPYCPFDIDAAQCKQLYF

SEQ ID NO: 56955 - DNA, 1387 bp, Glycine max
  misc_feature (1)..(1387): Ceres Seq. ID no. 14314747
atctaaacattgacaaccttaataatttattctgtttgtggtctcactagctagaaacaacatcactacacacaaatggcacatactttatccactaatctggctcttaaccttcccacatcgaggtatgttcgtccctcgagaccaacccaggtgaagcccatgaaggtcatgatgggtgatgcaagagaaaagctagaacatgtccatgtgcctaaacacaacaagcaccaccagcccctccccaaaaacaaagttgctcctaccccacccgtaggtaattaattaagctcaatcactctttcacataaattattatatacattaaattctaattgagctattcaacttacaagtaaaattaataaaactcaattatgtttcagctaaaaatttgttttagatcttgttcacctttggatcgaccttgaatcatataatagtcctatgtccacgtataagttgaaattgttctaaacgatatattaatttctggcactctgtggatttgtatatgctatgttattgactaagtgcaaacttaattattcttcttcttaattttctagttagcactaaatatatgactatatactgtgtattaattcagttaacatggggaattgaataaacgcagggttgtgggatcgatttcctacggcaaggacagtgcaagagatgatggagacgatggagagaatgatggaggacccttttgcatttagcacacttgagtggccttcatcaccccttccaagtgagggagtgggagggtatcgaagaaggggaagggcaccatgggaaattaaagagtgtgagagtgaatacaagatgaggtttgatatgcctgggatgaacaaggaggatgtgaaggtgtgggtggaggagaagatgcttgtggtcaaggctgagaaggcacaaaagaagaagcaagagaatgagattgtggaattacaacaagaaaagcagcaagaagaggaggaatggtctgctaagagttatggtaggtatagcagtaggattgctttgcctgataatgtgcagtttgagaatattaaggcagaggttaaggatggtatgctttacataaccatacccaaggctaccagctactccaacatccttgatatccaagttcaatgattcattttgttttgaggtcttttcttagtttttttgttttggattttccacatgtctcttcctttggagacaatcctgttagaggtatgatcagatattaaatataaacatcttttttaacagagatttaaacattaatttatcactttatgaaagactaacctcttctcttagacctaattattggtcttttattagtttgatagacaactttcctctaaataaatagaaaatatgtgtagat

SEQ ID NO: 56956 - protein, 154 aa, Glycine max
  peptide (1)..(154): Ceres Seq. ID no. 14314748
MMETMERMMEDPFAFSTLEWPSSPLPSEGVGGYRRRGRAPWEIKECESEYKMRFDMPGMNKEDVKVWVEEKMLVVKAEKAQKKKQENEIVELQQEKQQEEEEWSAKSYGRYSSRIALPDNVQFENIKAEVKDGMLYITIPKATSYSNILDIQVQ

SEQ ID NO: 56957 - protein, 153 aa, Glycine max
  peptide (1)..(153): Ceres Seq. ID no. 14314749
METMERMMEDPFAFSTLEWPSSPLPSEGVGGYRRRGRAPWEIKECESEYKMRFDMPGMNKEDVKVWVEEKMLVVKAEKAQKKKQENEIVELQQEKQQEEEEWSAKSYGRYSSRIALPDNVQFENIKAEVKDGMLYITIPKATSYSNILDIQVQ

SEQ ID NO: 56958 - protein, 150 aa, Glycine max
  peptide (1)..(150): Ceres Seq. ID no. 14314750
MERMMEDPFAFSTLEWPSSPLPSEGVGGYRRRGRAPWEIKECESEYKMRFDMPGMNKEDVKVWVEEKMLVVKAEKAQKKKQENEIVELQQEKQQEEEEWSAKSYGRYSSRIALPDNVQFENIKAEVKDGMLYITIPKATSYSNILDIQVQ

SEQ ID NO: 56959 - DNA, 1310 bp, Glycine max
  misc_feature (1)..(1310): Ceres Seq. ID no. 14315042
accacccccctcattgcagcagtttttgagtttccttacattcttaaagaaaccactcgttgttctttaggatatttctcttttcattttcctcttttcttcaaatcccaaaggatatttgtctctaatatccaaccttcaagatcatggatgttgcgcatttcattttcgggatatttgggaatgcttctggtttgttcctcttcttggccccaatagtgacattctggaggatcgtttcgaacaaatccacagagaagttctcgggggttccttaccctatgacacttctcaattgtctcctttctgcttggtatggtttgccatttgtgtccccaaacaacttacttgtgacaattatcaatggcacaggagcaggaattgaaatcatatacgtctttatattcatctacttcgcaccaaagaaagagaagaccaagattattggccttttctccttcgtggtggcagtgttctctgttgttgttctggtgtcactgtttgctctgcagggcaatgcccgaaagctcttctgtggcttcgctgctgccatattttccatcgtcatgtatggttcacccctctcaattatgaggctagtgataaaaaccaagagcgtggagttcatgcccttcttcctctcactctttgtgttcctctgtggcacatcttggttcatctacgggctactaggccgtgacccatttgtggctgtacctaatggcgttggttctgcgttggggacagcacaactaatattgtattttatctaccgtgacaacaaaagtgatccaaagaagattccaagaacagaagaagaagctatggaaatgggcaccgctaataaaaatcccatatccaactcgaatggaatacaagagggacgcgtctagggacgcgtctagggacgcgtgttagcattaaaaagaacaagccgttatctttgtctctgtctctttctaagcattaagagcacatctttaatttggactatgcttacatctttgttgttgttttttttttcttttttctttttaaaaaatctgttgttgttgctatcatctttgtgactctgtttcctccacgatttgtagtttttgttttttttttcttttagttatgatagttgtactataagtttagccatattgaaacgagtttgtgttgtgtgaattttcttttcttttcttccttttcagtccatttgtcgagacacatccgagcgatatcttgtgtctggataaaatttaaaagagtaatgaatatgtgaatctttctatctttaatttacaatattcatatttttggtt

SEQ ID NO: 56960 - protein, 248 aa, Glycine max
  peptide (1)..(248): Ceres Seq. ID no. 14315043
MDVAHFIFGIFGNASGLFLFLAPIVTFWRIVSNKSTEKFSGVPYPMTLLNCLLSAWYGLPFVSPNNLLVTIINGTGAGIEIIYVFIFIYFAPKKEKTKIIGLFSFVVAVFSVVVLVSLFALQGNARKLFCGFAAAIFSIVMYGSPLSIMRLVIKTKSVEFMPFFLSLFVFLCGTSWFIYGLLGRDPFVAVPNGVGSALGTAQLILYFIYRDNKSDPKKIPRTEEEAMEMGTANKNPISNSNGIQEGRV

SEQ ID NO: 56961 - protein, 203 aa, Glycine max
  peptide (1)..(203): Ceres Seq. ID no. 14315044
MTLLNCLLSAWYGLPFVSPNNLLVTIINGTGAGIEIIYVFIFIYFAPKKEKTKIIGLFSFVVAVFSVVVLVSLFALQGNARKLFCGFAAAIFSIVMYGSPLSIMRLVIKTKSVEFMPFFLSLFVFLCGTSWFIYGLLGRDPFVAVPNGVGSALGTAQLILYFIYRDNKSDPKKIPRTEEEAMEMGTANKNPISNSNGIQEGRV

SEQ ID NO: 56962 - DNA, 1577 bp, Glycine max
  misc_feature (1)..(1577): Ceres Seq. ID no. 15169153
gatctatgttttcccaagtgacagaaaagaaggtttattcaatcttttggaggcctgagtgtcgtccccaatccatagcttggaattccagaaaggcttcagcttcagcttgctgctcccttctcaacttcaacaatttcgatagcacttaatgtcctgttattgtagggacatcagtattgctaatcatgatatggtcaaggctaagtaggagaactcatctcttgccataccttagggctttgcaaacagactcaattgaatccaggtgcctatctatcattcctaaaggatcaagttacaagttcattaatcctaataccagcttccaacacaatttctcttgtaatatacggctatcaaagtttaagcaagaattgagtacaaaaccattccatctgtgttaccgctcttcagctttggcttcacagtatgttggaaagtcatgttccatgcctggtttccgacacttctcttctcatgcatccaaagaacagaaatcacgaaagatgcttttatacttgacgggcttagtttttgctatggttgggtgcacatatgctgcagttcccctttacaggagattttgccaagcaactggctatgggggaactgttacccggcgtgagactgttgaagaaaagattgctcgacatgatagcaataatacagtcaccacaagggaaatcgtggtgcagttcaatgctgatattgctgatgggatgcaatggaagtttgttcccacacagagagaggttagggtcaagcctggtgaaagtgcccttgcattttatactgccgaaaacaaaagttctactccaataacaggtgtttctacgtataatgtcactcctatgaaggctgcagtgtacttcaataaaattcaatgcttctgctttgaggagcagcgacttcttcctggagagcagattgacatgcctgtattcttttatattgacccggaatttgagacggatcctaaaatgaatggtatcaataacattatattatcatataccttcttcaaggtttctgaggaataagaccaacttgaatgttcacatgagattcaaataacaagctccctccatttcaaaggacaaagatgcatagcacattgatgaagttaaagttttggttacctatggtggctgacataaaagacaaattcattttcttatttgtttcacacgtataaagaaggctgcctcttctgtatgcttgccaagttcttgaatattttcagcttcagcaaaactactagaaaacccatgtgatcaacttttgaaggttcaaggtaccatgccatgacatttggaattatgctgattttctggtgctcctaagttaatgcaagcagggatttggagtacctcttcaaattagccatttagatgaatgaataattttgcttttagaatttattgatagtaaaacttatctaagaactgtaaaaggttgagatatattcacaaaatggtaagtgacaatgacgtctacaatcaggggaaactagcatggtatgaatattggtgatagtttaacggggcatttatctttatacttttacaaaaccc

SEQ ID NO: 56963 - protein, 284 aa, Glycine max
  peptide (1)..(284): Ceres Seq. ID no. 15169154
MIWSRLSRRTHLLPYLRALQTDSIESRCLSIIPKGSSYKFINPNTSFQHNFSCNIRLSKFKQELSTKPFHLCYRSSALASQYVGKSCSMPGFRHFSSHASKEQKSRKMLLYLTGLVFAMVGCTYAAVPLYRRFCQATGYGGTVTRRETVEEKIARHDSNNTVTTREIVVQFNADIADGMQWKFVPTQREVRVKPGESALAFYTAENKSSTPITGVSTYNVTPMKAAVYFNKIQCFCFEEQRLLPGEQIDMPVFFYIDPEFETDPKMNGINNIILSYTFFKVSEE

SEQ ID NO: 56964 - protein, 196 aa, Glycine max
  peptide (1)..(196): Ceres Seq. ID no. 15169155
MPGFRHFSSHASKEQKSRKMLLYLTGLVFAMVGCTYAAVPLYRRFCQATGYGGTVTRRETVEEKIARHDSNNTVTTREIVVQFNADIADGMQWKFVPTQREVRVKPGESALAFYTAENKSSTPITGVSTYNVTPMKAAVYFNKIQCFCFEEQRLLPGEQIDMPVFFYIDPEFETDPKMNGINNIILSYTFFKVSEE

SEQ ID NO: 56965 - protein, 177 aa, Glycine max
  peptide (1)..(177): Ceres Seq. ID no. 15169156
MLLYLTGLVFAMVGCTYAAVPLYRRFCQATGYGGTVTRRETVEEKIARHDSNNTVTTREIVVQFNADIADGMQWKFVPTQREVRVKPGESALAFYTAENKSSTPITGVSTYNVTPMKAAVYFNKIQCFCFEEQRLLPGEQIDMPVFFYIDPEFETDPKMNGINNIILSYTFFKVSEE

SEQ ID NO: 56966 - DNA, 2330 bp, Glycine max
  misc_feature (1)..(2330): Ceres Seq. ID no. 13593967
cagctacgtaggccccccccccgacacactatcctcttaacaaaacacaaaccagtgttcagtgttcagtgttcagtgttcagtgttacacttcacacagacaagaatccaagacaacaagggaaaccagacacatcattaacacacgacacaaacatcctcactactcttccatcttcattaagttaagtccttgtgggtcagggagcattcaagcagtgaggcccaactaattaacctgtttctctttactggatataaggcaattaaaccatgcaaacaccaaagacaagaaatggatcctctgatgtgcctcagaaggtgtctccacgtgctgtacgccaactcaagcctactactctggacattgattctgcatcttctttaagtcaggctactaaatcatcaaaagaaagaagccccaaagtcactgaccgcagatcacccagaagcccagttattgagaggaagcgccctagcaaaatatctgagttggaatctcaaatttctcaactccaaaatgatttgaagaaggtgagggaccagtttatcttgtccgaatcatgcaagaagcaagctcagcaagaagctgaggagtccaaggagcaactattggccctatctgcaaaacctgaagagtcacaaaaacaagttctggatctttgtgctactggagaagctcgtgttcttgagctccagaaaattgtagaagaacgtgatatggcatgccgatctgagcttgaggcctccaaaaagcagctctcagttgagtctgcttccctggcatctgcagcgaatgaaattcagttgctcaaggcgcaacttgaattggttgctaattgtgagagcgtgcaatctcaacatgcagaatcagcagacatggagctactaaaccttaagcagaacttgtcagaaactctttctcttgtggacgccttgaaaaaccaagtaagggattgcaaagagtctgaagctcaggcccaagcattggtcaatgaaactacggtgcaacttgaggccgcaaaaggaactgttgagttcctaagggctgatgttgcaagagctgttgatggctacaactccgttgctttagagttagaccagtctaaagctcgggtgaactcactagaggcacttgttagcaaaattgagaaagaccccatcaataataaatgcatcccttctgaaaatgttgcagatgaccataaatctgagcaccaacctgaaatattgaaagagggagaggatcctaatcagctggaagcagaagttgtttttttgaagtccgaggttgaacaattgagatctgctatagagactgctgagactaaataccaagaggaacagattcgaagcatggtgcagatcaggaatgcatatgagttagtagagcagataaaatctgaatcaggtaagagggaatgtgagctagaggctgagttgaaaaagaagaaagctgatattgaagagttgaaggctaacctaatggacaaggaaactgagttgcaaggcattgtggaggagaatgacaacttgaacctaaagcttgaagagagcatgtcatccaaaaatgagcacaaactcaaaagggaaattaaaagactatcagaatgtgtggcagaactgaaggcggatatgatggacaaggagacaacactgcaaagcatatctgaagagaacgaaatgctgaaatcggaaatcaacaacagtggcaaagcgagagaggaagttgctgctgaagtagagggagccaaggcggcagaacacgaggctctcatgaaacttgggattgtgatggaggaagcagataagagcaacaagaaggctgcaagagtggccgagcagctggaagcggcacaagctgcaaacttggaaatggaagctgaactgagaagactgaaggtgcagtctgatcagtggaggaaggctgcagaggcagctgctgctatgatttcaacagggaacaacaatgggaggctcacagagagaactgtgtctttggataacaacaactatatgtgctcaccctatgctgaagacatggatgatgatttccagaggaagaaaaatggcaacatgctgaagaagattggagtcttgtggaagaagcctcaaaaatagttgtgatgatgtctgatttatgaagtgttctgaaattgtagtccaataaatagtgtgttcatgtcatgtttattactatgtcttttgcaattgtctgacccctacattaccctctgcactgcactgtaaatcctgcccctatctgaaactgtttgtgaactgtacttgaaacattggcgtttaattattgaaygaactaagctyttaac

SEQ ID NO: 56967 - protein, 615 aa, Glycine max
  peptide (1)..(615): Ceres Seq. ID no. 15221271
MQTPKTRNGSSDVPQKVSPRAVRQLKPTTLDIDSASSLSQATKSSKERSPKVTDRRSPRSPVIERKRPSKISELESQISQLQNDLKKVRDQFILSESCKKQAQQEAEESKEQLLALSAKPEESQKQVLDLCATGEARVLELQKIVEERDMACRSELEASKKQLSVESASLASAANEIQLLKAQLELVANCESVQSQHAESADMELLNLKQNLSETLSLVDALKNQVRDCKESEAQAQALVNETTVQLEAAKGTVEFLRADVARAVDGYNSVALELDQSKARVNSLEALVSKIEKDPINNKCIPSENVADDHKSEHQPEILKEGEDPNQLEAEVVFLKSEVEQLRSAIETAETKYQEEQIRSMVQIRNAYELVEQIKSESGKRECELEAELKKKKADIEELKANLMDKETELQGIVEENDNLNLKLEESMSSKNEHKLKREIKRLSECVAELKADMMDKETTLQSISEENEMLKSEINNSGKAREEVAAEVEGAKAAEHEALMKLGIVMEEADKSNKKAARVAEQLEAAQAANLEMEAELRRLKVQSDQWRKAAEAAAAMISTGNNNGRLTERTVSLDNNNYMCSPYAEDMDDDFQRKKNGNMLKKIGVLWKKPQK

SEQ ID NO: 56968 - protein, 466 aa, Glycine max
  peptide (1)..(466): Ceres Seq. ID no. 15221272
MACRSELEASKKQLSVESASLASAANEIQLLKAQLELVANCESVQSQHAESADMELLNLKQNLSETLSLVDALKNQVRDCKESEAQAQALVNETTVQLEAAKGTVEFLRADVARAVDGYNSVALELDQSKARVNSLEALVSKIEKDPINNKCIPSENVADDHKSEHQPEILKEGEDPNQLEAEVVFLKSEVEQLRSAIETAETKYQEEQIRSMVQIRNAYELVEQIKSESGKRECELEAELKKKKADIEELKANLMDKETELQGIVEENDNLNLKLEESMSSKNEHKLKREIKRLSECVAELKADMMDKETTLQSISEENEMLKSEINNSGKAREEVAAEVEGAKAAEHEALMKLGIVMEEADKSNKKAARVAEQLEAAQAANLEMEAELRRLKVQSDQWRKAAEAAAAMISTGNNNGRLTERTVSLDNNNYMCSPYAEDMDDDFQRKKNGNMLKKIGVLWKKPQK

SEQ ID NO: 56969 - protein, 413 aa, Glycine max
  peptide (1)..(413): Ceres Seq. ID no. 15221273
MELLNLKQNLSETLSLVDALKNQVRDCKESEAQAQALVNETTVQLEAAKGTVEFLRADVARAVDGYNSVALELDQSKARVNSLEALVSKIEKDPINNKCIPSENVADDHKSEHQPEILKEGEDPNQLEAEVVFLKSEVEQLRSAIETAETKYQEEQIRSMVQIRNAYELVEQIKSESGKRECELEAELKKKKADIEELKANLMDKETELQGIVEENDNLNLKLEESMSSKNEHKLKREIKRLSECVAELKADMMDKETTLQSISEENEMLKSEINNSGKAREEVAAEVEGAKAAEHEALMKLGIVMEEADKSNKKAARVAEQLEAAQAANLEMEAELRRLKVQSDQWRKAAEAAAAMISTGNNNGRLTERTVSLDNNNYMCSPYAEDMDDDFQRKKNGNMLKKIGVLWKKPQK

SEQ ID NO: 56970 - DNA, 1766 bp, Glycine max
  misc_feature (1)..(1766): Ceres Seq. ID no. 15175785
ggtatcttacttactgctgtctgctaaacttgattttttgtttactctttcttgcttccttcatatttatattatattattattttgcccacatttcttcttcaacgactacactctctctcaaccttcaaagcttcaaactcaaaagaaatggcatccgatcccgagcaacccgctcattcctctttcgcaaaggaagcaaggtcaggtggtgagattgggagtgcaatagagcctctgcttaatggggttcatgactctgaaagctattccgtctctgctgcaattctcccatttctcttcccagctttgggtggcctactatttggctatgatattggtgccacatcttctgcaactatttccattcagtcaccaacactaagtggagtatcttggtacaagttgtcttctgttgaaattggtcttcttactagtggatcattgtatggtgccttaattggctccttgttggccttcaatgttgctgacttcttaggtagaagaaaggagctgattggagctgcagtagtttatcttgttggagctcttgtaacagcattagctcctaattttcttgtattggtgcttgggagacttgtatttggcataggaattggactggcaatgcatgctgctccaatgtacattgcagagacagctccaacaccaatacgtggacaactaatatctctaaaagagttctttatagtacttgggatggttgcaggatatggaattggtagcttgttcgtcgaaaccgtatctgggtggcggtatatgtatggagttagtagtcctgtggcaataatcatgggagttggaatgtggtggctcccagcttctcctagatggttacttttacgtgctatacagggaaaaggggatgttcagaattcaaaagacatagcaattcgtagtttgtgtcagcttcgaggtcaagctttttatgattcagttcctcggcaagtagatgagattctggcagaactttcttatctaggtgaagaaaaagaagctacctttggagaactattccaaggaaaatgcttgaaagccctttggattggttcaggattggtcttgtttcagcagatcacagggcaaccaagtgtgctctactatgctggatcaatctttcagagtgcaggattctccggagcatctgatgcaacccgagtctctattctccttgggtttttcaagttgattatgactggagttgctgttgtcgttgttgataaacttggaaggaggcctttactacttgggggagtttcagggatagtgatctctttattctttctcggttcatattacattttcttggataattcaccagttgttgctgtaattggtctgctgttgtacgttggcagttatcagatttcctttggtccaattggttggttaatgatagcagagattttccccttgcgcctaagaggtcgaggactaagtatagctgtactcgtcaattttggtgcaaatgccctggtgacatttgctttttccccactgaaggcattattgggagctggaattttgttttacacattttgtgtaatagccgtggcatctcttgtattcatatactttgttataccagaaaccaaggggcttacactagaggagatcgaggccaaatgcctctagtcagtcaccttgttttacctctataaatatctgtttttagtactctgttgcaacttgtcttgaatattgtaatgacacatatattatattaataaaaatatgcaatgatg

SEQ ID NO: 56971 - protein, 501 aa, Glycine max
  peptide (1)..(501): Ceres Seq. ID no. 15175786
MASDPEQPAHSSFAKEARSGGEIGSAIEPLLNGVHDSESYSVSAAILPFLFPALGGLLFGYDIGATSSATISIQSPTLSGVSWYKLSSVEIGLLTSGSLYGALIGSLLAFNVADFLGRRKELIGAAVVYLVGALVTALAPNFLVLVLGRLVFGIGIGLAMHAAPMYIAETAPTPIRGQLISLKEFFIVLGMVAGYGIGSLFVETVSGWRYMYGVSSPVAIIMGVGMWWLPASPRWLLLRAIQGKGDVQNSKDIAIRSLCQLRGQAFYDSVPRQVDEILAELSYLGEEKEATFGELFQGKCLKALWIGSGLVLFQQITGQPSVLYYAGSIFQSAGFSGASDATRVSILLGFFKLIMTGVAVVVVDKLGRRPLLLGGVSGIVISLFFLGSYYIFLDNSPVVAVIGLLLYVGSYQISFGPIGWLMIAEIFPLRLRGRGLSIAVLVNFGANALVTFAFSPLKALLGAGILFYTFCVIAVASLVFIYFVIPETKGLTLEEIEAKCL

SEQ ID NO: 56972 - protein, 342 aa, Glycine max
  peptide (1)..(342): Ceres Seq. ID no. 15175787
MHAAPMYIAETAPTPIRGQLISLKEFFIVLGMVAGYGIGSLFVETVSGWRYMYGVSSPVAIIMGVGMWWLPASPRWLLLRAIQGKGDVQNSKDIAIRSLCQLRGQAFYDSVPRQVDEILAELSYLGEEKEATFGELFQGKCLKALWIGSGLVLFQQITGQPSVLYYAGSIFQSAGFSGASDATRVSILLGFFKLIMTGVAVVVVDKLGRRPLLLGGVSGIVISLFFLGSYYIFLDNSPVVAVIGLLLYVGSYQISFGPIGWLMIAEIFPLRLRGRGLSIAVLVNFGANALVTFAFSPLKALLGAGILFYTFCVIAVASLVFIYFVIPETKGLTLEEIEAKCL

SEQ ID NO: 56973 - protein, 337 aa, Glycine max
  peptide (1)..(337): Ceres Seq. ID no. 15175788
MYIAETAPTPIRGQLISLKEFFIVLGMVAGYGIGSLFVETVSGWRYMYGVSSPVAIIMGVGMWWLPASPRWLLLRAIQGKGDVQNSKDIAIRSLCQLRGQAFYDSVPRQVDEILAELSYLGEEKEATFGELFQGKCLKALWIGSGLVLFQQITGQPSVLYYAGSIFQSAGFSGASDATRVSILLGFFKLIMTGVAVVVVDKLGRRPLLLGGVSGIVISLFFLGSYYIFLDNSPVVAVIGLLLYVGSYQISFGPIGWLMIAEIFPLRLRGRGLSIAVLVNFGANALVTFAFSPLKALLGAGILFYTFCVIAVASLVFIYFVIPETKGLTLEEIEAKCL

SEQ ID NO: 56974 - DNA, 1110 bp, Glycine max
  misc_feature (1)..(1110): Ceres Seq. ID no. 15168436
cctatcaaatccaaacactgccttaagcctttgattcccaaatcctcccttcctctcccattgcacagtgatcgttgcgatccatgacgacaccaccgtcttcctcctcagcttcgcaatcgcagttcgcctattcaaacccctcctcctcctcctcctacttccccgttccctttcaccttcagcaacccgcaaccactcactacgctgcgccctacgtcgccgccccctccgtgcaaatccccgctcctccagtcgtcggccccgttgcgcccgcccctgtacccggcgtatactccgccgtgccgcaatatcaggcacagcagttatttgagagggatgcgcagataataacgccggaggctctcgagaatgtcaaggcagcgattgcaagcagcgacgtggagcacaaaaccgatgccaaaaagaaagcggttcctcgcaaagctgctggccacgcttgggaggatcctatccttgcagagtggccagaagatgattatcggctcttctgtggggatcttggtaacgaggtgaatgatgatgttctctcaaaagcattttcacgatttccttcctttaacatggcacgagttgtcagagacaagcggactggtaaaacaaaaggttatggatttgtgagctttgccaatccttctgaccttgctggtgctcttaaagaaatgaatggtaagtatgttggaaaccgtcctataaaactacgcaagagtaagtggagggagaggacagattatgaagcactggagaaacagaagaatcacattcaaaagaaaccgaaaatggcaaggaaaggtgtgctgcacaagtgacaggctggaatctgtgtaaatcaggttaactaagtagagaacactttacaaatgctatttcttttttccatctgaaaggtatttcccatgtaaccgaaaaaagcccccccaagacattcctttcccgtttgcaaaatactatagttgttattttaaagtgtatgatgtatgcccaataccaaaaaaccttatttatgtttacatttcaggaatttgtggcagtcgtttaatacagcatgaggaaggaactcagaaaatgtataaaatttgattgactggc

SEQ ID NO: 56975 - protein, 248 aa, Glycine max
  peptide (1)..(248): Ceres Seq. ID no. 15168437
MTTPPSSSSASQSQFAYSNPSSSSSYFPVPFHLQQPATTHYAAPYVAAPSVQIPAPPVVGPVAPAPVPGVYSAVPQYQAQQLFERDAQIITPEALENVKAAIASSDVEHKTDAKKKAVPRKAAGHAWEDPILAEWPEDDYRLFCGDLGNEVNDDVLSKAFSRFPSFNMARVVRDKRTGKTKGYGFVSFANPSDLAGALKEMNGKYVGNRPIKLRKSKWRERTDYEALEKQKNHIQKKPKMARKGVLHK

SEQ ID NO: 56976 - DNA, 1321 bp, Glycine max
  misc_feature (1)..(1321): Ceres Seq. ID no. 15168549
ttttttgtcgtgagatgtttgttgacagctgctaccattctcctattgttttatgaattttggaaggaaaaatagtaataagagagagagatgagcgttgtaataggggttgggttggctcacatgtcccagtctctttccaactctactagtctaagtttgtaactcttgttgattccaaagttgcacaccacactcaacttaccgttccttttcctctcccataaaaccagcaagcaactcactcccacactcaccccagtcaagagagagaatgtcgaaggaagtgagccaagaaggcctgcagaggaaggactacgtagaccctcctccagcccctcttttcgaccttgccgagatcaagctctggtccttctacagagccctcatcgccgagttcattgcctcactcctcttcctctacgtcaccgtcgccaccatcatcggccacaagaaacagaccggaccatgcgacggcgttggccttctcggcatcgcatggtccttcggtggcatgatcttcgtcctcgtctactgcaccgccggcatttctggtggacacatcaaccctgcggtgacttttggcctgttcctggcccgcaaggtgtctctcattcgcgccgtgttctacatggtagcacagtgtcttggtgccatctgcggtgttgggttggtgaaggccttcatgaagcactcctacaactccctcggcggcggtgctaactccgtcagcgcaggctacaacaaaggcagtgctctgggtgctgagattatcggcactttcgtccttgtctacaccgttttctcagctaccgaccccaagagaagcgcgcgtgactcccatgtccccgtgttggccccattgcccattgggtttgccgttttcatggttcacttggccaccattcccatcaccggtaccgggatcaacccagccaggagcttgggtgcagctgttatctacaacaatggcaaagtttgggacgagcattggatattctgggttgggccattggtgggagctttggcggcggcggcataccaccagtacatccttagagcaggggctattaaggccttgggttcattcaggagcaaccctaccaactagttcccaagacaatgtcatcatcaccaattcgcctcttcttttctatttatttcttttgtttgtatgagagatcatcatgcccttgtgtatggggataattcgtctttttttcttcttccttccttttatctccccgcctgtctcatttgtccgttcgcttacacttctaaccaaaattcccgtgaacacaacccacagggtttgctgtcg

SEQ ID NO: 56977 - protein, 278 aa, Glycine max
  peptide (1)..(278): Ceres Seq. ID no. 15168550
MSKEVSQEGLQRKDYVDPPPAPLFDLAEIKLWSFYRALIAEFIASLLFLYVTVATIIGHKKQTGPCDGVGLLGIAWSFGGMIFVLVYCTAGISGGHINPAVTFGLFLARKVSLIRAVFYMVAQCLGAICGVGLVKAFMKHSYNSLGGGANSVSAGYNKGSALGAEIIGTFVLVYTVFSATDPKRSARDSHVPVLAPLPIGFAVFMVHLATIPITGTGINPARSLGAAVIYNNGKVWDEHWIFWVGPLVGALAAAAYHQYILRAGAIKALGSFRSNPTN

SEQ ID NO: 56978 - protein, 198 aa, Glycine max
  peptide (1)..(198): Ceres Seq. ID no. 15168551
MIFVLVYCTAGISGGHINPAVTFGLFLARKVSLIRAVFYMVAQCLGAICGVGLVKAFMKHSYNSLGGGANSVSAGYNKGSALGAEIIGTFVLVYTVFSATDPKRSARDSHVPVLAPLPIGFAVFMVHLATIPITGTGINPARSLGAAVIYNNGKVWDEHWIFWVGPLVGALAAAAYHQYILRAGAIKALGSFRSNPTN

SEQ ID NO: 56979 - protein, 159 aa, Glycine max
  peptide (1)..(159): Ceres Seq. ID no. 15168552
MVAQCLGAICGVGLVKAFMKHSYNSLGGGANSVSAGYNKGSALGAEIIGTFVLVYTVFSATDPKRSARDSHVPVLAPLPIGFAVFMVHLATIPITGTGINPARSLGAAVIYNNGKVWDEHWIFWVGPLVGALAAAAYHQYILRAGAIKALGSFRSNPTN

SEQ ID NO: 56980 - DNA, 1764 bp, Glycine max
  misc_feature (1)..(1764): Ceres Seq. ID no. 15168405
atttttctttttctattctttgcttcagtggccttaccagtgtgttgctcactgagaaaccaccaattttcagcatgacaaagataagtcctgaagttgaaatcaggatgccaatggaggcatttccaccagtttcagctgatgtgagctttatttctaatagttttccgaaatacaaactggatgttgataatcaagttctggaagagccagttgaggataacctgggtccttctttgaaggatgttattgaacaagaagctttcaatttgtcagaccaacacaagcgtatctcagttcgtgaccttgccagtaaatttgacaagaacttggctgcagctgctaagttgtctaatgaggcaaagctgagagaggtggcatctttggagggacatgttcttttgaaaaagctaagagatgcattagaaaatttaagaggacgttttgcaggaataaacaaagaggatgtggagaaagctatctctatggtggaagctttagcagttaagttaactcaaaacgaaggtgaattgattcaagagaagtttgaagtgaagaagcttgtaaactttctcaaacaggcttctgaagatgctaaaaagttggttaatcaagagaagtcttttgcttgtgccgaaattgaaagtgctagagctgtggtgctgagaattggggaggcgcttgaagaacaagaaaaagcttcccaagcttctaaaccacaggatgtggatggactaattgaagaagttcaagaagctagaagaatcaaattgttgcatcagccaagcaaggtgatggccatggaatatgaactacgtgctcttagggatcaaattcgagagaaatctatattttcaattaagcttcagaaagagctaaccatgagcaagagggatgaggaaaataaatctcgtttatacatgttagatggttctgaagctttgggttcatatctgcgagtccagccttgctcagctgaagtgccacaggtttcgaaatgttcatttcagtggtatcgcttgtcttctgaaggcagctggagggaagttatttcaggtgccaacaaaacaatatatgctcctgacccctctgatgttgggagaatcttacaagtagatattgtctcaaatgggaaaaaacttaccctaacaactgatcccattcaaactgtttcaggacttggaagccatgtggagacacttctacgaaaatctaataccgattttaatgtagttatttctcaaatgaatggaaaagatcactcttcacattctactcattcatttaatgtggggagaatgaggataaagctatgcagaggttggattacaaaagcaagagagatttactccccatcaatgcagctatgtggagttagaagtgatatcgctaatgcagcgaaggcgttgttttggcaagcaagaaagggcctctcatttgtattaacctttgaatcagagagagacagaaatgcagccattatggttgccaggaaatatgctcttgattgcaatgtcgtgctcgctgggccagatgatctagtgtaggagcaaaatttaactgactgagtttttccatcaaacgtgagatttatcagattcttggtgtgagtatacatgtgtgcttgttttgttaaagatatgatttcatctttgtgattgggtttcactaattgagttgcattgttttaggcatgttttttatttgcctaatcatgttgtaccaaactcaactttttataattattagttcatttgttcaaag

SEQ ID NO: 56981 - protein, 514 aa, Glycine max
  peptide (1)..(514): Ceres Seq. ID no. 15168406
FSFSILCFSGLTSVLLTEKPPIFSMTKISPEVEIRMPMEAFPPVSADVSFISNSFPKYKLDVDNQVLEEPVEDNLGPSLKDVIEQEAFNLSDQHKRISVRDLASKFDKNLAAAAKLSNEAKLREVASLEGHVLLKKLRDALENLRGRFAGINKEDVEKAISMVEALAVKLTQNEGELIQEKFEVKKLVNFLKQASEDAKKLVNQEKSFACAEIESARAVVLRIGEALEEQEKASQASKPQDVDGLIEEVQEARRIKLLHQPSKVMAMEYELRALRDQIREKSIFSIKLQKELTMSKRDEENKSRLYMLDGSEALGSYLRVQPCSAEVPQVSKCSFQWYRLSSEGSWREVISGANKTIYAPDPSDVGRILQVDIVSNGKKLTLTTDPIQTVSGLGSHVETLLRKSNTDFNVVISQMNGKDHSSHSTHSFNVGRMRIKLCRGWITKAREIYSPSMQLCGVRSDIANAAKALFWQARKGLSFVLTFESERDRNAAIMVARKYALDCNVVLAGPDDLV

SEQ ID NO: 56982 - protein, 490 aa, Glycine max
  peptide (1)..(490): Ceres Seq. ID no. 15168407
MTKISPEVEIRMPMEAFPPVSADVSFISNSFPKYKLDVDNQVLEEPVEDNLGPSLKDVIEQEAFNLSDQHKRISVRDLASKFDKNLAAAAKLSNEAKLREVASLEGHVLLKKLRDALENLRGRFAGINKEDVEKAISMVEALAVKLTQNEGELIQEKFEVKKLVNFLKQASEDAKKLVNQEKSFACAEIESARAVVLRIGEALEEQEKASQASKPQDVDGLIEEVQEARRIKLLHQPSKVMAMEYELRALRDQIREKSIFSIKLQKELTMSKRDEENKSRLYMLDGSEALGSYLRVQPCSAEVPQVSKCSFQWYRLSSEGSWREVISGANKTIYAPDPSDVGRILQVDIVSNGKKLTLTTDPIQTVSGLGSHVETLLRKSNTDFNVVISQMNGKDHSSHSTHSFNVGRMRIKLCRGWITKAREIYSPSMQLCGVRSDIANAAKALFWQARKGLSFVLTFESERDRNAAIMVARKYALDCNVVLAGPDDLV

SEQ ID NO: 56983 - protein, 479 aa, Glycine max
  peptide (1)..(479): Ceres Seq. ID no. 15168408
MPMEAFPPVSADVSFISNSFPKYKLDVDNQVLEEPVEDNLGPSLKDVIEQEAFNLSDQHKRISVRDLASKFDKNLAAAAKLSNEAKLREVASLEGHVLLKKLRDALENLRGRFAGINKEDVEKAISMVEALAVKLTQNEGELIQEKFEVKKLVNFLKQASEDAKKLVNQEKSFACAEIESARAVVLRIGEALEEQEKASQASKPQDVDGLIEEVQEARRIKLLHQPSKVMAMEYELRALRDQIREKSIFSIKLQKELTMSKRDEENKSRLYMLDGSEALGSYLRVQPCSAEVPQVSKCSFQWYRLSSEGSWREVISGANKTIYAPDPSDVGRILQVDIVSNGKKLTLTTDPIQTVSGLGSHVETLLRKSNTDFNVVISQMNGKDHSSHSTHSFNVGRMRIKLCRGWITKAREIYSPSMQLCGVRSDIANAAKALFWQARKGLSFVLTFESERDRNAAIMVARKYALDCNVVLAGPDDLV

SEQ ID NO: 56984 - DNA, 1680 bp, Glycine max
  misc_feature (1)..(1680): Ceres Seq. ID no. 14312196
aaaaattcagagagaactgtccaccctttttcgtttttctccttattacagaccccccttaattgatggtgctctgtatcccctttttcttctgcaagaactacaccaactaaaacctccttcttctttttttttttttttttttggaggctggtgtgtgtttttctttttcttcttcttcttcttccaatccttaaggaaaaaaactaaagaaaaaaaagtgagccatgtcaggcttgtataatcccaacttctctcctgctagagcagcttctcctcagattaggagcaatccagaagtggacagtcagtacctatcagagttgctggcagaacatcagaagcttggacccttcatgcaagtgcttcccatatgcagccgcctcctaaatcaagaaatattaagggtttctggaatgttgtccaatcaaggttttggtgacttcgatagactgcgacatagaagccctagtcctatggcttcttcaaaccttatgtccaatgtcagtgggactgggttgggtggatggaatagtctccagcaagagagattatgtggaccccctggaatgacgatggactggcaaagtgctcctgcaagtcctagttcgttcactgttaagagaatcttgcgcttggaaattccagtagatacatatcccaatttcaattttgttggaagacttctgggccctagaggcaattctttgaaacgggtagaagctacaactggttgtcgtgtgtatattagaggaaaaggatcgataaaggatccagacaaggaagagaaattacgaggaagaccaggttatgagcatctcaatgaaccactgcacattttgattgaggctgaattacctgctaatgttgttgacataaggctcaggcaggctcaggaaattattgaagaactgctcaagcctgtggatgaatcacaggactatatcaagaggcagcagttgcgtgaactcgccatgctgaattcaaatttcagagaagagagtcccgggcccagtggtagtgtgtccccattcaactctagtggaatgaaacgtgcaaagacgggtcgctgaaagttgtccttgattgttggtgtagatgatgagtatcgtggtcctccagctattgattgctgggaatatcttccagtacatgtctcattcaatgcaagctataaaagaataggctaacaattcttgctggttagcactctggtggtttttccttcccctttgtccctacctttttctttttgaacagacaggagacaaagctggaatgaagaatttttaaaagagaacaattatatagttggggtattgagaataggtttgttcaaaccaaccctttttttttctcccttgcaaacttaatacattcattggatttattcatgcgtcagttactttttgagaagtgtggaatatatacatatgatggttggtggtgatgaagttttaggtcctatgacaatgcagtgtttattggcatgtgacattgtcaaagtctcatggtattttaatatttattataagttagcataggctggattctttttagttgtttgtcacaggcatttgtattctcttcggaggactatgcactgtagttggaatgatgcatgccagataaacttcttaccatgtaccattaaagaacaaatgtggtatttgtttatat

SEQ ID NO: 56985 - protein, 281 aa, Glycine max
  peptide (1)..(281): Ceres Seq. ID no. 14312197
MSGLYNPNFSPARAASPQIRSNPEVDSQYLSELLAEHQKLGPFMQVLPICSRLLNQEILRVSGMLSNQGFGDFDRLRHRSPSPMASSNLMSNVSGTGLGGWNSLQQERLCGPPGMTMDWQSAPASPSSFTVKRILRLEIPVDTYPNFNFVGRLLGPRGNSLKRVEATTGCRVYIRGKGSIKDPDKEEKLRGRPGYEHLNEPLHILIEAELPANVVDIRLRQAQEIIEELLKPVDESQDYIKRQQLRELAMLNSNFREESPGPSGSVSPFNSSGMKRAKTGR

SEQ ID NO: 56986 - protein, 238 aa, Glycine max
  peptide (1)..(238): Ceres Seq. ID no. 14312198
MQVLPICSRLLNQEILRVSGMLSNQGFGDFDRLRHRSPSPMASSNLMSNVSGTGLGGWNSLQQERLCGPPGMTMDWQSAPASPSSFTVKRILRLEIPVDTYPNFNFVGRLLGPRGNSLKRVEATTGCRVYIRGKGSIKDPDKEEKLRGRPGYEHLNEPLHILIEAELPANVVDIRLRQAQEIIEELLKPVDESQDYIKRQQLRELAMLNSNFREESPGPSGSVSPFNSSGMKRAKTGR

SEQ ID NO: 56987 - protein, 218 aa, Glycine max
  peptide (1)..(218): Ceres Seq. ID no. 14312199
MLSNQGFGDFDRLRHRSPSPMASSNLMSNVSGTGLGGWNSLQQERLCGPPGMTMDWQSAPASPSSFTVKRILRLEIPVDTYPNFNFVGRLLGPRGNSLKRVEATTGCRVYIRGKGSIKDPDKEEKLRGRPGYEHLNEPLHILIEAELPANVVDIRLRQAQEIIEELLKPVDESQDYIKRQQLRELAMLNSNFREESPGPSGSVSPFNSSGMKRAKTGR

SEQ ID NO: 56988 - DNA, 1339 bp, Glycine max
  misc_feature (1)..(1339): Ceres Seq. ID no. 14315455
agaatattattcactgtactttatccctttctgtgagggaattatggtaattgatatcgaggttttgactcatggattctgatcgccccagaaaaccttccaaaaatttagttcactctcgcttcttccttttcggcttctattgctgggattgggagttcttaaccgctctcctcctttttagttgttccccttaatcttgttccttcatatttttatttttttttcttattagatcagattgaacaaaagggttgctctttattttttaatcttgggggaataatagaaatagaaataagaaaagattagtgaggttgaaatgttgcaacaacgatcggtgccggcaccgttcttgacgaagacgtatcagttggtggaggatccggggacggacgaggtaatatcgtggggtgaaagtgggaacacttttgtggtgtggaagcatgcggattttgcaaaggatttgcttccaaaatatttcaagcacaacaacttctccagctttgttcgacagctcaacacctatggatttcgaaaaattgtgccagacaaatgggaattcgcgaacgaacacttcaagcgagggcagaaggagcttctctcggagatcaaacgccgcaagaccgtgcctcagtcgtcgacacattccccggatgccggaaaacccggcgccgaaggcaactctccgtcgaaccccggcggctgcgacgacgcgggctccacctcaacctcgtcctcgtcctccggttccaagaaccagggatcggtggaaacaaacacaacgccttctcaccagttatcgagcgagaacgagaaactgaagaaggataacgaaacgctgagttgcgagctggcacgtgcgaggaagcagtgcgatgagctcgtggcttttctcagggaccgtctgatggtgggtcccgatcagatcgatcgcatcatgcggcaaggaagttgcggatctgaaaacgcggtaggtgaaggcggtggtggaggacactgtttgaaactgtttggtgtttggttaaaaggggatacactaacagacaaaagaaacaaccacaagagaggccgcgaagaccaaatgggcttcggtgggcctcgcctcaaggagtcaaagcccgttgttgactttagtaggaataggatgatgatgattaatgaaaaaggaaaaggctaagcggtaatcatgtttgggtaaaaagaccaaatgcgctagcctatgcttcctaaacatgttgaggctgtgtaatttttaatgtacgtaggtaaatgcctctatgaatattgattgggaaattaaacaggttttaataatcaatgtatggccttttatgtc

SEQ ID NO: 56989 - protein, 285 aa, Glycine max
  peptide (1)..(285): Ceres Seq. ID no. 14315456
MLQQRSVPAPFLTKTYQLVEDPGTDEVISWGESGNTFVVWKHADFAKDLLPKYFKHNNFSSFVRQLNTYGFRKIVPDKWEFANEHFKRGQKELLSEIKRRKTVPQSSTHSPDAGKPGAEGNSPSNPGGCDDAGSTSTSSSSSGSKNQGSVETNTTPSHQLSSENEKLKKDNETLSCELARARKQCDELVAFLRDRLMVGPDQIDRIMRQGSCGSENAVGEGGGGGHCLKLFGVWLKGDTLTDKRNNHKRGREDQMGFGGPRLKESKPVVDFSRNRMMMINEKGKG

SEQ ID NO: 56990 - DNA, 1419 bp, Glycine max
  misc_feature (1)..(1419): Ceres Seq. ID no. 14315481
gaggtacccctactactacttagagaaagtgaaagtgaaagtgaagtgcaacactgcagatgcagttgcaggggaatcagttaaaccgtatttaattttcacaacctccaactccaccaacttacccaatattctttactttcttcctccgtcttcttccctttcaaaccctagaaacagcaaaatcccccttttgatgcaaatgggatcactccaccaactctagagccacacccttcaagatttagctcatgcccacttcaattatggctccattttccacttccccccacttcacagccttcaccttcctcatcttgttcctcaaaacacaagcttttgatccactctctttcttttccttcacggattttgagaaagatccaaattttaagtcaagtgtggggctttatggcaatgcaaaagttgtcaataatggttctgaggttcttctttctgggaatggtgggagagtcatatacaagaagcccgtcaagcttgttcatggtggagcaagggaattggtctcattttcaacttactttgggttttcaatgtccttggatagtgagaagagtggcttggcttttgttatggttcctagtggtgttgaaggtgaggtttttggtaatagttcatatgggctttcttttggattgaaggaaagggaatttaaggttgtcggtgttcagtttagtgcttatggtaggaatgggggttctggtagttgtattgtgtccattaatgttggtagttctgttcctgttaaaacaatcaatgcctcatctgtcattatgggtctaaaaagtgaggggaaattgcatgcttggattgattatgaggcgagttcaaagcgcttagaagttaggttgaatcaatatggtcaatcaaggccagttgatccattgctttggcattcaatggacttatcaaatgtttggggtactgaagagatgtttgcaggctttagcacagtgaaagagaataatacttctcaaacatgctttctctattcatggagctttattgtgaggcattttccacattggatgcattctgagcctctgaatccaaaggtccttgctaagaagactgaaactccagcagtgaaatccagaagtgattgccttttgagggttcttgctgcaatgatatttggtgctggatgtggagcattgacagcattcattgtgctttatttgtggaccatctttggtaataaacgaccggtggtgccggaggagtatgctatgcagcctgtagattttgagtacaagaaagtgagcattgttgtagataaaacaaccatcatagatgctaaggagtagatctacagttggatgcttgcattgtaaatcagtgtttcttgtattcaggttttgctttgttgtagtttgataaagaactgttttatttacc

SEQ ID NO: 56991 - protein, 358 aa, Glycine max
  peptide (1)..(358): Ceres Seq. ID no. 14315482
MPTSIMAPFSTSPHFTAFTFLILFLKTQAFDPLSFFSFTDFEKDPNFKSSVGLYGNAKVVNNGSEVLLSGNGGRVIYKKPVKLVHGGARELVSFSTYFGFSMSLDSEKSGLAFVMVPSGVEGEVFGNSSYGLSFGLKEREFKVVGVQFSAYGRNGGSGSCIVSINVGSSVPVKTINASSVIMGLKSEGKLHAWIDYEASSKRLEVRLNQYGQSRPVDPLLWHSMDLSNVWGTEEMFAGFSTVKENNTSQTCFLYSWSFIVRHFPHWMHSEPLNPKVLAKKTETPAVKSRSDCLLRVLAAMIFGAGCGALTAFIVLYLWTIFGNKRPVVPEEYAMQPVDFEYKKVSIVVDKTTIIDAKE

SEQ ID NO: 56992 - protein, 353 aa, Glycine max
  peptide (1)..(353): Ceres Seq. ID no. 14315483
MAPFSTSPHFTAFTFLILFLKTQAFDPLSFFSFTDFEKDPNFKSSVGLYGNAKVVNNGSEVLLSGNGGRVIYKKPVKLVHGGARELVSFSTYFGFSMSLDSEKSGLAFVMVPSGVEGEVFGNSSYGLSFGLKEREFKVVGVQFSAYGRNGGSGSCIVSINVGSSVPVKTINASSVIMGLKSEGKLHAWIDYEASSKRLEVRLNQYGQSRPVDPLLWHSMDLSNVWGTEEMFAGFSTVKENNTSQTCFLYSWSFIVRHFPHWMHSEPLNPKVLAKKTETPAVKSRSDCLLRVLAAMIFGAGCGALTAFIVLYLWTIFGNKRPVVPEEYAMQPVDFEYKKVSIVVDKTTIIDAKE

SEQ ID NO: 56993 - protein, 257 aa, Glycine max
  peptide (1)..(257): Ceres Seq. ID no. 14315484
MSLDSEKSGLAFVMVPSGVEGEVFGNSSYGLSFGLKEREFKVVGVQFSAYGRNGGSGSCIVSINVGSSVPVKTINASSVIMGLKSEGKLHAWIDYEASSKRLEVRLNQYGQSRPVDPLLWHSMDLSNVWGTEEMFAGFSTVKENNTSQTCFLYSWSFIVRHFPHWMHSEPLNPKVLAKKTETPAVKSRSDCLLRVLAAMIFGAGCGALTAFIVLYLWTIFGNKRPVVPEEYAMQPVDFEYKKVSIVVDKTTIIDAKE

SEQ ID NO: 56994 - DNA, 1433 bp, Glycine max
  misc_feature (1)..(1433): Ceres Seq. ID no. 15175767
atgatgataataaagcagtgaatgatgactcttccttcattgtcctctctattcttcttcttcttccctaactctctctgcaataacaacaccatcaacaaccccttcaagccggcctaaaccccattacccaaaactttttcttttttctttccttcaacactctctattggatcatcacatattcaatttcattctcttcaaaaattccccttcaaaaaaatttaaaattaaaaaaaagtgctctttttgtgaattttgagccatttgccaccgacagatttcgatcttctccgtgccaaagttgtaatcttttcgaattttggcgaggtgggtcgatctgatttcgctcgaataattgcgggttcgattttgatctgaaaaaggaaaagagaaaaaaagattgggttatttctgattcaagattttgtccttttttgaaatggtctatttccatagctcaatctctctctgcaagttcgttgatcaatcatctttcatggcgaattcaatttgttctgcggatttcggttcgaaatcgagacaaatcaatcaccttcagaagaatcggagaacccctagttcatcatcatcatcatcatcatcatcgaattcccttcagattccaccctgtgatcgatctcgatcggcaatggttgatgttgtgatgttcattgctgttgtttgtgcctgtggctttttgttcttcccttatgtagagtttttggtgacaaagtgttacgaggttattaagggtgttgtgtttttgattaaggaggaggtttctgtggcaccttggatctatatttccatagggttgagtgttgtgtttgctgcattggccacgtgggctgtggtggcttgcaccactaggaagtgtgggaatcccagttgcaagggtctgaggaaggctgctgagtttgacattcagttggagactgaggattgtgtgaagaatttggcttctgcgtcgtcgaatgtagcgaaagatggtggtggtggaacgaagaagggtctctttgaattgcctcgtgatcaccatagggagctggaggctgagctcaagaagatggcaccaccaaatggaagggctgtgctcgtgctccgggcgaggtgtggatgttctgttggtaggttagaggttccaggaccaaggaagcatcttcgaaagatcaacaagaagtagcagcaatcctgttcgagccgagtaggacacaggagaggacacccttttgagttattggatggaattaaggaaagggatggtaattggatcaaatagaaaatttgtacttcttgtcctatgttcattgatctagtaggaaattagaatgtctttgaataagccccttggcaataagttgtaaggaactatgggccatacagtttagttggttatacctggaaatataaaaaaagaacatttttatttt

SEQ ID NO: 56995 - protein, 247 aa, Glycine max
  peptide (1)..(247): Ceres Seq. ID no. 15175768
MVYFHSSISLCKFVDQSSFMANSICSADFGSKSRQINHLQKNRRTPSSSSSSSSSSNSLQIPPCDRSRSAMVDVVMFIAVVCACGFLFFPYVEFLVTKCYEVIKGVVFLIKEEVSVAPWIYISIGLSVVFAALATWAVVACTTRKCGNPSCKGLRKAAEFDIQLETEDCVKNLASASSNVAKDGGGGTKKGLFELPRDHHRELEAELKKMAPPNGRAVLVLRARCGCSVGRLEVPGPRKHLRKINKK

SEQ ID NO: 56996 - protein, 228 aa, Glycine max
  peptide (1)..(228): Ceres Seq. ID no. 15175769
MANSICSADFGSKSRQINHLQKNRRTPSSSSSSSSSSNSLQIPPCDRSRSAMVDVVMFIAVVCACGFLFFPYVEFLVTKCYEVIKGVVFLIKEEVSVAPWIYISIGLSVVFAALATWAVVACTTRKCGNPSCKGLRKAAEFDIQLETEDCVKNLASASSNVAKDGGGGTKKGLFELPRDHHRELEAELKKMAPPNGRAVLVLRARCGCSVGRLEVPGPRKHLRKINKK

SEQ ID NO: 56997 - protein, 177 aa, Glycine max
  peptide (1)..(177): Ceres Seq. ID no. 15175770
MVDVVMFIAVVCACGFLFFPYVEFLVTKCYEVIKGVVFLIKEEVSVAPWIYISIGLSVVFAALATWAVVACTTRKCGNPSCKGLRKAAEFDIQLETEDCVKNLASASSNVAKDGGGGTKKGLFELPRDHHRELEAELKKMAPPNGRAVLVLRARCGCSVGRLEVPGPRKHLRKINKK

SEQ ID NO: 56998 - DNA, 1366 bp, Glycine max
  misc_feature (1)..(1366): Ceres Seq. ID no. 14315911
gttggaacttggaggaacttgtgtctgtgtccctttttacagagtcatgactatggctggagctttgagtctctcccaattcccagttcgtgggtctgtttctttgcccaaaagaagaatacccagaagaagcttttgcattaggggcatgtcagaaatctcttccactttttctgtgagcacccaacaagaagaaccaacttctaatgcttcgtcagtgacaattgcacctccccccaacttcaagccccctgagcctaaacgctttgcaatcagacctgacaagaccagtgaagtatttggagctttgcttcctttgctctttcgctttgctaccggagttttcgtttctgggtattctttttcaattgtttctaaggatgaaattcctccagatgaatatgctttggaacttaatggcgttaccataaaagaaacagcaaaattaggccctcgcccagagaagcctattgagatatatgaatttgagagctgtccattttgccgaaaggttagagaaattgttgccattttggaccttgatgttcttttctatccttgtccaagaaatggcccaaatttccgtcaaaaggttctagagatgggtggcaaactgcagttcccctacatggttgacccaaacacaggcgcttcaatgtatgaatcagatgacataattcggtatttggttgacaaatatggtgatggaaacgttcctctatctttatcacttggatttttaacgaccctaactgctggtcttggtatgcttagtcgtatttcaaaggggactacttatactccagcgaagttccctccaaagccacttaaattatgggcatatgaggggtctcctttctgcaaacttgtacgtgaagtacttgtggaattggagctgccacacttgcttgtctgttgtgctaggggtagcccaaagagaaatatactatatcagaaaactggaactttccaggcaccttttttggaagatccaaacactgggatagaaatgtttgaaagtgcagaaatcatagagtatctaagagcaacatacgctcttcagtaagtgatgcctatgataggaagaggcttgtgagggtttttaagtaaatgtaattgctaatggttctaacagggttacatcaaattttctctatatagaaatttcaaatagtggaatcaagtgcctcaatattcagcaatggtttgaggtggataaaaatttcggttgcaaaatgggaatctgtttcattcttcttttcttctttattattgttattattatttgggactcttttcattcattattactgcacctacaactctgcaataataactacataatacattaatgcccttgaaaatg

SEQ ID NO: 56999 - protein, 354 aa, Glycine max
  peptide (1)..(354): Ceres Seq. ID no. 14315912
LELGGTCVCVPFYRVMTMAGALSLSQFPVRGSVSLPKRRIPRRSFCIRGMSEISSTFSVSTQQEEPTSNASSVTIAPPPNFKPPEPKRFAIRPDKTSEVFGALLPLLFRFATGVFVSGYSFSIVSKDEIPPDEYALELNGVTIKETAKLGPRPEKPIEIYEFESCPFCRKVREIVAILDLDVLFYPCPRNGPNFRQKVLEMGGKLQFPYMVDPNTGASMYESDDIIRYLVDKYGDGNVPLSLSLGFLTTLTAGLGMLSRISKGTTYTPAKFPPKPLKLWAYEGSPFCKLVREVLVELELPHLLVCCARGSPKRNILYQKTGTFQAPFLEDPNTGIEMFESAEIIEYLRATYALQ

SEQ ID NO: 57000 - protein, 339 aa, Glycine max
  peptide (1)..(339): Ceres Seq. ID no. 14315913
MTMAGALSLSQFPVRGSVSLPKRRIPRRSFCIRGMSEISSTFSVSTQQEEPTSNASSVTIAPPPNFKPPEPKRFAIRPDKTSEVFGALLPLLFRFATGVFVSGYSFSIVSKDEIPPDEYALELNGVTIKETAKLGPRPEKPIEIYEFESCPFCRKVREIVAILDLDVLFYPCPRNGPNFRQKVLEMGGKLQFPYMVDPNTGASMYESDDIIRYLVDKYGDGNVPLSLSLGFLTTLTAGLGMLSRISKGTTYTPAKFPPKPLKLWAYEGSPFCKLVREVLVELELPHLLVCCARGSPKRNILYQKTGTFQAPFLEDPNTGIEMFESAEIIEYLRATYALQ

SEQ ID NO: 57001 - protein, 337 aa, Glycine max
  peptide (1)..(337): Ceres Seq. ID no. 14315914
MAGALSLSQFPVRGSVSLPKRRIPRRSFCIRGMSEISSTFSVSTQQEEPTSNASSVTIAPPPNFKPPEPKRFAIRPDKTSEVFGALLPLLFRFATGVFVSGYSFSIVSKDEIPPDEYALELNGVTIKETAKLGPRPEKPIEIYEFESCPFCRKVREIVAILDLDVLFYPCPRNGPNFRQKVLEMGGKLQFPYMVDPNTGASMYESDDIIRYLVDKYGDGNVPLSLSLGFLTTLTAGLGMLSRISKGTTYTPAKFPPKPLKLWAYEGSPFCKLVREVLVELELPHLLVCCARGSPKRNILYQKTGTFQAPFLEDPNTGIEMFESAEIIEYLRATYALQ

SEQ ID NO: 57002 - DNA, 1470 bp, Glycine max
  misc_feature (1)..(1470): Ceres Seq. ID no. 14312140
aaacggatgccattgctgcaccccgtgaaagctctatccctctctttctttgttttccgtggaaaccaacctatcttcctttgttattttcattctgataaaacaaacatattttcttccacctttttccatctttgcaaaggggataaagggttgctagttgctaccatttatggttttattccgccatttggaggaaccttatgctcttaaaacaaataaaacccaaagggttctcttgaaaaacaccagaactttcatctaatcaaaacacgtgttggccaaaaacatcaccttctctttattatcgcatgcaagagcttttttagatgctcctttgtgttcaagattgagagaaaacataacctgggtatgatatgactacgagcatgccccgttaatgtttcaacggtttttgtttctttggttcattttcagacacccccatattcttcttctcaattgaaaaccttggtttttgaatctcccctgttttcctttgtgtgcttcaagttctttttgtctttttctagaaacctatgtcgtctgtgccggcacgaacagggcgacaaagacagcgttatgaggacaatttgcgccttgtctctggatgtattccctatagatggacaaaggacaacacagatcaaatgggggaaacccgggagataatagaagtacttatggtttcttcaccaaaacgtgatgaccttgtattcccaaagggtggatgggaggatgatgagactgttacagaagctgcttgccgcgaggctttagaggaagcaggagttaaaggaatactaagagaaattccactaggaatatgggagttcagaagcaaaaccagtcaagacttatgtagcgtggaaggaggctgcagaggatacatgtttgccttggaggtgactgaagaacttgagacatggccagagcagaaaaaccacgctcgccaatggttaaacataaaagatgcattcaaactcagccgatatgactggatgtgtaatgcacttgaggcatttttgagagtaatggcagaagacagaaagcctgagaaccaagaccagaatgtggaacttgaacccccttcaattgtagaagatatgccagaatgccaaagtatgtcacctaactgctataagagatcctctactatgcagcaccatggtatgcctcctaaagccaatcttctgtcacgtgctactcgagaaatagccatccactttggttattgacattatcaggaggacacttttgaaatatgcttatgtaatggatcaacattgtgcaataactccttaaaattgtgaaagaaaaaactatgaagttattatggcttggatgcacaatccatcaacttcattgttgtaggctctttctttctttctttccaatgtgaccatgatgtaaaatgtggtggtgaaagtctcaagtgtatatgatcttaacagttgtttgcttcacccc

SEQ ID NO: 57003 - protein, 232 aa, Glycine max
  peptide (1)..(232): Ceres Seq. ID no. 14312141
MSSVPARTGRQRQRYEDNLRLVSGCIPYRWTKDNTDQMGETREIIEVLMVSSPKRDDLVFPKGGWEDDETVTEAACREALEEAGVKGILREIPLGIWEFRSKTSQDLCSVEGGCRGYMFALEVTEELETWPEQKNHARQWLNIKDAFKLSRYDWMCNALEAFLRVMAEDRKPENQDQNVELEPPSIVEDMPECQSMSPNCYKRSSTMQHHGMPPKANLLSRATREIAIHFGY

SEQ ID NO: 57004 - protein, 195 aa, Glycine max
  peptide (1)..(195): Ceres Seq. ID no. 14312142
MGETREIIEVLMVSSPKRDDLVFPKGGWEDDETVTEAACREALEEAGVKGILREIPLGIWEFRSKTSQDLCSVEGGCRGYMFALEVTEELETWPEQKNHARQWLNIKDAFKLSRYDWMCNALEAFLRVMAEDRKPENQDQNVELEPPSIVEDMPECQSMSPNCYKRSSTMQHHGMPPKANLLSRATREIAIHFGY

SEQ ID NO: 57005 - protein, 184 aa, Glycine max
  peptide (1)..(184): Ceres Seq. ID no. 14312143
MVSSPKRDDLVFPKGGWEDDETVTEAACREALEEAGVKGILREIPLGIWEFRSKTSQDLCSVEGGCRGYMFALEVTEELETWPEQKNHARQWLNIKDAFKLSRYDWMCNALEAFLRVMAEDRKPENQDQNVELEPPSIVEDMPECQSMSPNCYKRSSTMQHHGMPPKANLLSRATREIAIHFGY

SEQ ID NO: 57006 - DNA, 839 bp, Glycine max
  misc_feature (1)..(839): Ceres Seq. ID no. 14315444
atcattgagaagcttggatgatgactgggatgatgaaaaggcaagtcccatgactcccatccacatgggggctgctaacagtaataacagcattgaagaggttgaatctgatgacaatgtcgaagcaatggaatctgatgacaatgttcaagcaatggagtctgatgacaaagtccaagcaatggaatccgatgacaatgtccaagcagcagaatctgatgacaatggccaagctgtggaatatgatcaaggaaactgggaaataggttttaatggtgcccccagcagatggagtagggatttggtaggaggaattagcgatgaggatgaggatgaggatgcggaagcttctgaagatgacaatgacaatggcattggcattgaaaacaatgaggaggaggattcagaggcagatgctatgagtgaggagggttcagatggtactgcaaacagaattgtaaatgaagaaagctcagactcggatgtctctgaagattcttctgattagaacattgcttttttaagggaaaggatcctcgagtaacatttattttctcaaaaacttaataatggaagaaatggagagaaaaggaaacagaggatcttttctcgttttttaaggctgcgttacattttttccccctatactgcagccagctttacaacgtacctgagctccaaagtcatggcaaggcttcatagttcatactagttttatggttgagtagattaatagtgtataataggatatataaacccgcccattgcgtggattcttaaaaaaaaaataaaaaaaattaatatcattatacaatcaataattcaagaaaacaattcac

SEQ ID NO: 57007 - protein, 168 aa, Glycine max
  peptide (1)..(168): Ceres Seq. ID no. 14315445
SLRSLDDDWDDEKASPMTPIHMGAANSNNSIEEVESDDNVEAMESDDNVQAMESDDKVQAMESDDNVQAAESDDNGQAVEYDQGNWEIGFNGAPSRWSRDLVGGISDEDEDEDAEASEDDNDNGIGIENNEEEDSEADAMSEEGSDGTANRIVNEESSDSDVSEDSSD

SEQ ID NO: 57008 - protein, 152 aa, Glycine max
  peptide (1)..(152): Ceres Seq. ID no. 14315446
MTPIHMGAANSNNSIEEVESDDNVEAMESDDNVQAMESDDKVQAMESDDNVQAAESDDNGQAVEYDQGNWEIGFNGAPSRWSRDLVGGISDEDEDEDAEASEDDNDNGIGIENNEEEDSEADAMSEEGSDGTANRIVNEESSDSDVSEDSSD

SEQ ID NO: 57009 - protein, 147 aa, Glycine max
  peptide (1)..(147): Ceres Seq. ID no. 14315447
MGAANSNNSIEEVESDDNVEAMESDDNVQAMESDDKVQAMESDDNVQAAESDDNGQAVEYDQGNWEIGFNGAPSRWSRDLVGGISDEDEDEDAEASEDDNDNGIGIENNEEEDSEADAMSEEGSDGTANRIVNEESSDSDVSEDSSD

SEQ ID NO: 57010 - DNA, 1560 bp, Glycine max
  misc_feature (1)..(1560): Ceres Seq. ID no. 15179926
atatacactcgttcatatataattctctctgatcttattatttcctttcaagtctcttaatttctctatatttcaaaaactcaaaccctaaaatgaacgacttgttctccggctccttctcccgcaccaatgaccaagtctcgccggaccaccaccatgtgatcgagatggcggccaccgcatcgccaacggccgagggaagcgtgaatctcgaaaagttctttcaagaagttgagcaggtaaaagaggagctgaaggagctagagcgtctccatgaaaatctgcgtgggtcccacgagaaaagcaagatccttcacagcgccaaagctgtgaaggaacttcgcttacgcatggacagtgacgtgacacttgctctaaagaatgcaaagctcgttaaggttcggcttgaggcactggaccggtccaaccagaccagtcaaagcttgcctggttcgggacctggttcgtcctcagaccggaccagaacgtccgttgtgagcggactgaggaagaagctgaaggactcgatggacagcttcaacagcctcagacaaaagatatcgtcagagtatagggaaaccgtgcagcgtagatattatactgtcaccggagagaaccctgatgacaaaaccattgatctccttatttctacgggtgagagtgaaacattcttgcagaaggcgatccagcagcaaggtagagccagtgtgatggacacgatccaagagattcaagagaggcacgacacagtcaaggaaatagagagaaacctaaacgagctccaccaagtgttcttggacatggccgtgctggtgcagtcccagggcgaacaactggacgacatcgagagccacgtggcgcgcgccaattcgtacgtgcggggtggggtccagcagttgcacgtggcaaggaagcaccagaagaacacccgaaagtggacatgcatagccatcatactgctcattattatcatcttgattatagtcctccctatagttctaagaaattgattgatcacatattctaattggttcaaggtggtggctgccaagaaattggactagttcaaacttcaaagattattagtcaggtcaattcatgctgcctagaccattgcattagaaaaatatataccttggcttttgtaatcagttttgttttcttctttttggtcgcatcatgtgttgattagtttacattttccacgtacccatttgtacatgtttgaagattgagacattttggtttggtttggtttctagaagcctatgtatggacacggtgcttgcatgtaccgtttagaattattactttactaccgggaagagaactcattgaagcggttttattctagctagctagggagagaaacgctaagccagggtgatgttcatggtggtacattcttttgcaaatatgtatttaattttaagcagttctatatgggtgaactactataggcattgcaggagttacttcaattgctttgcgtgtttatgccattgcatgtacaaaagaattgcacctttttcactagcatattgataacattgctttcac

SEQ ID NO: 57011 - protein, 305 aa, Glycine max
  peptide (1)..(305): Ceres Seq. ID no. 15179927
MNDLFSGSFSRTNDQVSPDHHHVIEMAATASPTAEGSVNLEKFFQEVEQVKEELKELERLHENLRGSHEKSKILHSAKAVKELRLRMDSDVTLALKNAKLVKVRLEALDRSNQTSQSLPGSGPGSSSDRTRTSVVSGLRKKLKDSMDSFNSLRQKISSEYRETVQRRYYTVTGENPDDKTIDLLISTGESETFLQKAIQQQGRASVMDTIQEIQERHDTVKEIERNLNELHQVFLDMAVLVQSQGEQLDDIESHVARANSYVRGGVQQLHVARKHQKNTRKWTCIAIILLIIIILIIVLPIVLRN

SEQ ID NO: 57012 - protein, 280 aa, Glycine max
  peptide (1)..(280): Ceres Seq. ID no. 15179928
MAATASPTAEGSVNLEKFFQEVEQVKEELKELERLHENLRGSHEKSKILHSAKAVKELRLRMDSDVTLALKNAKLVKVRLEALDRSNQTSQSLPGSGPGSSSDRTRTSVVSGLRKKLKDSMDSFNSLRQKISSEYRETVQRRYYTVTGENPDDKTIDLLISTGESETFLQKAIQQQGRASVMDTIQEIQERHDTVKEIERNLNELHQVFLDMAVLVQSQGEQLDDIESHVARANSYVRGGVQQLHVARKHQKNTRKWTCIAIILLIIIILIIVLPIVLRN

SEQ ID NO: 57013 - protein, 219 aa, Glycine max
  peptide (1)..(219): Ceres Seq. ID no. 15179929
MDSDVTLALKNAKLVKVRLEALDRSNQTSQSLPGSGPGSSSDRTRTSVVSGLRKKLKDSMDSFNSLRQKISSEYRETVQRRYYTVTGENPDDKTIDLLISTGESETFLQKAIQQQGRASVMDTIQEIQERHDTVKEIERNLNELHQVFLDMAVLVQSQGEQLDDIESHVARANSYVRGGVQQLHVARKHQKNTRKWTCIAIILLIIIILIIVLPIVLRN

SEQ ID NO: 57014 - DNA, 1647 bp, Glycine max
  misc_feature (1)..(1647): Ceres Seq. ID no. 14315457
cttgtgttttatggtgtcgtagcctcctccaaaaacagagaagcaccatctcctaacactgctcaaaagcgaaggatggaggttgttttggcgtcgtcgtccgtcgacggcggaatagggtgctgggaccttcacaccggcgcggagcagctccgctacaaatcttgcacctccccttctcatggcctcgtctctgtcgctgctcgcttcatcgcttcgtcgcagcttcgagaagatcaatcagcccctggctctgttctcttctggtcctggtccaagcctcaagttgaagtgaagagttttcctgctgaacaaattaaacctcttgctactaatcacccgggaacctttatagctgctggagctccgtctggtgacatttacttgtgggaggttgaaacgggtaggttgcttaagaagtggcatgctcattttagggcggtttcttgcttggtgttttccgaagatgactcgctgctggtatctggttctgaagatggatccgtaagagtttggtctctcttcatgatatttgatgatttgcgaaatcagcaagcaagtagtctttatgagtatagtttttcagagcacaccctgactgtgactgatgttgttattggtaatggagggtgcaatgcgattatcgtgtcagcttcaaaggatcggacttgtaaggtatggagcttatctaggggaatgctactaagaaatatagtattcccttcaataattaattgcattgcattggatccagccgaacatgtcttttatgctggcagtgaagatggaaagatatttatcgcagcacttaacactgaaagcatcgccactaataattatgggatgcatatcatcagttctttttctaaccacagcaaccaagttacttgcttagcatatggctcaagtgagaatttgttaatatctgggtcagaggatggaatggttcgtgtttggaatgcgagaactcgtaacattgtccgcatgtttaaacattctaaaggacctgtaaataacattctcgttgttagacgagaaaatgactccagtaatcacatatcttctaatgtacaagcatcatcaagaaagcagggatctaatttaccccctccattggaaaaatatgcaaattcaatagatgacgactcagatatgaagactatgatcagccttgggggtggcaggaaatctgtggatccttcatacatcagttctcatgtgatatctaattacattaaggaacttcagcatcaaggttcagctgctgcttctgaaatggagatggagaaactaaaacatgattaccaaaagtcagtgcaaatggctaaccagttgaagaaaatgaatgaaaaattgcatcaattttgtgtaaaggagctgttggatggtagtcaagctagaaccttgggtgaaaatgacaattaagacatttttttttctcttgccagtcacttttctattttgtaggtaaaatgtgtaggatctctggcatcagtagattcccttctgcgagtttgcaattcttcaatgctgctattatattatttttgttgcccctcgtcccctttctctcggtgtgttttgctgctgaatgttgtaaaaagaattttcatcttttgtggatacgataaaagaattgatttctac

SEQ ID NO: 57015 - protein, 449 aa, Glycine max
  peptide (1)..(449): Ceres Seq. ID no. 14315458
MEVVLASSSVDGGIGCWDLHTGAEQLRYKSCTSPSHGLVSVAARFIASSQLREDQSAPGSVLFWSWSKPQVEVKSFPAEQIKPLATNHPGTFIAAGAPSGDIYLWEVETGRLLKKWHAHFRAVSCLVFSEDDSLLVSGSEDGSVRVWSLFMIFDDLRNQQASSLYEYSFSEHTLTVTDVVIGNGGCNAIIVSASKDRTCKVWSLSRGMLLRNIVFPSIINCIALDPAEHVFYAGSEDGKIFIAALNTESIATNNYGMHIISSFSNHSNQVTCLAYGSSENLLISGSEDGMVRVWNARTRNIVRMFKHSKGPVNNILVVRRENDSSNHISSNVQASSRKQGSNLPPPLEKYANSIDDDSDMKTMISLGGGRKSVDPSYISSHVISNYIKELQHQGSAAASEMEMEKLKHDYQKSVQMANQLKKMNEKLHQFCVKELLDGSQARTLGENDN

SEQ ID NO: 57016 - protein, 299 aa, Glycine max
  peptide (1)..(299): Ceres Seq. ID no. 14315459
MIFDDLRNQQASSLYEYSFSEHTLTVTDVVIGNGGCNAIIVSASKDRTCKVWSLSRGMLLRNIVFPSIINCIALDPAEHVFYAGSEDGKIFIAALNTESIATNNYGMHIISSFSNHSNQVTCLAYGSSENLLISGSEDGMVRVWNARTRNIVRMFKHSKGPVNNILVVRRENDSSNHISSNVQASSRKQGSNLPPPLEKYANSIDDDSDMKTMISLGGGRKSVDPSYISSHVISNYIKELQHQGSAAASEMEMEKLKHDYQKSVQMANQLKKMNEKLHQFCVKELLDGSQARTLGENDN

SEQ ID NO: 57017 - protein, 474 aa, Glycine max
  peptide (1)..(474): Ceres Seq. ID no. 14315460
LVFYGVVASSKNREAPSPNTAQKRRMEVVLASSSVDGGIGCWDLHTGAEQLRYKSCTSPSHGLVSVAARFIASSQLREDQSAPGSVLFWSWSKPQVEVKSFPAEQIKPLATNHPGTFIAAGAPSGDIYLWEVETGRLLKKWHAHFRAVSCLVFSEDDSLLVSGSEDGSVRVWSLFMIFDDLRNQQASSLYEYSFSEHTLTVTDVVIGNGGCNAIIVSASKDRTCKVWSLSRGMLLRNIVFPSIINCIALDPAEHVFYAGSEDGKIFIAALNTESIATNNYGMHIISSFSNHSNQVTCLAYGSSENLLISGSEDGMVRVWNARTRNIVRMFKHSKGPVNNILVVRRENDSSNHISSNVQASSRKQGSNLPPPLEKYANSIDDDSDMKTMISLGGGRKSVDPSYISSHVISNYIKELQHQGSAAASEMEMEKLKHDYQKSVQMANQLKKMNEKLHQFCVKELLDGSQARTLGENDN

SEQ ID NO: 57018 - DNA, 1689 bp, Glycine max
  misc_feature (1)..(1689): Ceres Seq. ID no. 14315021
aacatacacttcttctattgcgacccatttttccaatccacaatcgtgggagtgagcgaacaactacaaagggatattagatactattgtgagtgagtgcgtgcgattcattgtgtttgtgtagtagtgactttgggttgggtttcgtctcaactcaacaaacgtcgtcgttctgcatttcccaaccttcctccaatggcttctgcttccttaatcaactcgttgacttgttcttcgcgtgctcccactcagcactgttccactttcacccgcaccaccgccgccacgtcactgagacaatttaacagccactgtcggagaccactcgcgacgaggatctcgccgccttccaccgttgtctgcaaagctgtctccgttaagccccaaaccgaaatcgaaggtctcaacattgctgaagatgtcacccagctcatagggaaaacgccaatggtttacctgaacaatatcgtgaagggttctgtggccaatattgctgccaagcttgagattatggagccctgttgtagtgtaaaggacaggattggttttagtatgataaatgatgctgagcagagaggagctataacacctgggaagagtatattggtggaacctactagcggcaacaccggaattggtcttgcctttatagcagcttcaagaggttataaactcattttgacaatgcctgcttcaatgagtttagaaagacgagttctcttgaaagcatttggggccgagcttgttttgactgatgcagcaaagggcatgaatggagcagttcaaaaagctgaagaaattttaaaaagtacccccaatgcatacatgcttcaacaatttgataatccttcaaatcctaagattcattatgagacaactggcccagagatatgggaagatacaagaggaaagatagatattttagttgcaggaattggaactggtggaactgtttctggagttggccaattcctaaaacaacaaaatccaaaaatacaggttattggtgtagagcctctggaaagcaacatacttactggcggaaagccaggacctcacaaaattcagggtattggggctggttttgtgcccaggaatttggatcaagatgtgcttgatgaagttatagcgatatcaagtgatgaagcagttgaaactgcaaagcaattagcactccaggaaggcttgctggtgggaatttcttcaggagctgctgctgcagctgctttgaaggttggaaagaggcctgagaatgcaggcaagcttattggggttgtcttcccaagctttggtgaaagatatttgtctactattcttttccagtcaattcgggaagaatgcgagaaaatgcaacctgagccatgaattgactttgcttgttaatgtttcatactcattctccacgagtatctgtatgtaaatgacagtgtgacatgtccatgttatgtccgtgtttctcatttttgacactcaagaaattagataactgtgtaaaggtcattgacttgacttacagcacagatcaatggcccttgattgaataagttttttttccttctctctttgggctaaaacttttagatgtagtaggaattactggcattgctcttctttttgtatggcagcgtaagaaatttctgtctaatgttcgctattaaaaaataattgatgaaacagtttatctgttgc

SEQ ID NO: 57019 - protein, 389 aa, Glycine max
  peptide (1)..(389): Ceres Seq. ID no. 14315022
MASASLINSLTCSSRAPTQHCSTFTRTTAATSLRQFNSHCRRPLATRISPPSTVVCKAVSVKPQTEIEGLNIAEDVTQLIGKTPMVYLNNIVKGSVANIAAKLEIMEPCCSVKDRIGFSMINDAEQRGAITPGKSILVEPTSGNTGIGLAFIAASRGYKLILTMPASMSLERRVLLKAFGAELVLTDAAKGMNGAVQKAEEILKSTPNAYMLQQFDNPSNPKIHYETTGPEIWEDTRGKIDILVAGIGTGGTVSGVGQFLKQQNPKIQVIGVEPLESNILTGGKPGPHKIQGIGAGFVPRNLDQDVLDEVIAISSDEAVETAKQLALQEGLLVGISSGAAAAAALKVGKRPENAGKLIGVVFPSFGERYLSTILFQSIREECEKMQPEP

SEQ ID NO: 57020 - protein, 305 aa, Glycine max
  peptide (1)..(305): Ceres Seq. ID no. 14315023
MVYLNNIVKGSVANIAAKLEIMEPCCSVKDRIGFSMINDAEQRGAITPGKSILVEPTSGNTGIGLAFIAASRGYKLILTMPASMSLERRVLLKAFGAELVLTDAAKGMNGAVQKAEEILKSTPNAYMLQQFDNPSNPKIHYETTGPEIWEDTRGKIDILVAGIGTGGTVSGVGQFLKQQNPKIQVIGVEPLESNILTGGKPGPHKIQGIGAGFVPRNLDQDVLDEVIAISSDEAVETAKQLALQEGLLVGISSGAAAAAALKVGKRPENAGKLIGVVFPSFGERYLSTILFQSIREECEKMQPEP

SEQ ID NO: 57021 - protein, 284 aa, Glycine max
  peptide (1)..(284): Ceres Seq. ID no. 14315024
MEPCCSVKDRIGFSMINDAEQRGAITPGKSILVEPTSGNTGIGLAFIAASRGYKLILTMPASMSLERRVLLKAFGAELVLTDAAKGMNGAVQKAEEILKSTPNAYMLQQFDNPSNPKIHYETTGPEIWEDTRGKIDILVAGIGTGGTVSGVGQFLKQQNPKIQVIGVEPLESNILTGGKPGPHKIQGIGAGFVPRNLDQDVLDEVIAISSDEAVETAKQLALQEGLLVGISSGAAAAAALKVGKRPENAGKLIGVVFPSFGERYLSTILFQSIREECEKMQPEP

SEQ ID NO: 57022 - DNA, 1589 bp, Glycine max
  misc_feature (1)..(1589): Ceres Seq. ID no. 15168513
gttacatttcttaccctctttgactctctctagtgtcatcaaatgggtacccccggaaatgatgaaccaggtacccagaccccacaaaacacaaaaagttctccccttttcagatacaattcacccttcattcagatcgttttaattgggttggtctgtttctgttgcccgggaatgttcaacgccctctccggcatgggtggcggtggccaagtcaacgcaaccgcctccaacaacgccctcaccgccctctacaccaccttcgccatcttcggcatcctcggcggcggcatctacaacattctcggaccccacctcaccctcttcgcaggttgctccacctacgtcctctacgcaggctccttcctctactacaaccactaccagcaccagttcttcgccatcgtcgccggcgccatcctcggcgtcggcgcagggctcctctgggccgcgcagggcgccatcatgacctcctaccctccggagaatcggaaaggcacttacatttccatcttctggagcatcttcaacatggggggtgtcatcggtggcctaattcccttcattctcaattacaatcgcggtgactcagctgtcactgtcaacgacggaacctacataggattcatggtatttatggccgttggggctgttctgtcgttgaccattttacccgctagcaaggttgttcgcgacgatgggactcggtgtactaaaatgttgtactccaatgcggcaactgaatccgttgaaattctcaagcttttctacaactggaagatgcttctcattattcccgctgcttggtctagtaattttttttatacctaccagtttaaccatgttaataagccgcagttcaatttgaggactagagggttcaacaatgtgttctattggggggcgcagatggtgggttcggttgggattgggtatgtgatggatttcagctttaggagcaggaggaagagaggggttgtggggattggtgtggttgctcttcttgcttctgctatttggggtggtgcacttgcgaatcagattaagcatgaccccggggtgatcttggatttcaaggactccggttctcgctatgctgggccttttgttttgtatttcagttttgggttgcttgatgccgtgttccaaagcatggtctattgggttatcggtgccctggccaatgattctgagattcttagcaggtatgctgggttctataaaggcatacaaagtgcaggggcagcagtggcttggcaaattgataaccataatgtgtccgctatggctcagttgattgtgaattgggtgctcactactgtgagctatccgttgttgttgattttggttgttttggctgtgaaagaaggagacaacaggggagaagaggaacctgtcaaagaggttgctggctttgcccactgatattgttttgttacctgtaaaaatcaactgcatattttgtctttatttctgttatcttgtttttcattgttaccattgtcatcacatataaaagtctgaaatggatgaagatttatctgtatgagttcatgcgtcggagaatattaaaggcaacaaattaatgc

SEQ ID NO: 57023 - protein, 460 aa, Glycine max
  peptide (1)..(460): Ceres Seq. ID no. 15168514
MGTPGNDEPGTQTPQNTKSSPLFRYNSPFIQIVLIGLVCFCCPGMFNALSGMGGGGQVNATASNNALTALYTTFAIFGILGGGIYNILGPHLTLFAGCSTYVLYAGSFLYYNHYQHQFFAIVAGAILGVGAGLLWAAQGAIMTSYPPENRKGTYISIFWSIFNMGGVIGGLIPFILNYNRGDSAVTVNDGTYIGFMVFMAVGAVLSLTILPASKVVRDDGTRCTKMLYSNAATESVEILKLFYNWKMLLIIPAAWSSNFFYTYQFNHVNKPQFNLRTRGFNNVFYWGAQMVGSVGIGYVMDFSFRSRRKRGVVGIGVVALLASAIWGGALANQIKHDPGVILDFKDSGSRYAGPFVLYFSFGLLDAVFQSMVYWVIGALANDSEILSRYAGFYKGIQSAGAAVAWQIDNHNVSAMAQLIVNWVLTTVSYPLLLILVVLAVKEGDNRGEEEPVKEVAGFAH

SEQ ID NO: 57024 - protein, 416 aa, Glycine max
  peptide (1)..(416): Ceres Seq. ID no. 15168515
MFNALSGMGGGGQVNATASNNALTALYTTFAIFGILGGGIYNILGPHLTLFAGCSTYVLYAGSFLYYNHYQHQFFAIVAGAILGVGAGLLWAAQGAIMTSYPPENRKGTYISIFWSIFNMGGVIGGLIPFILNYNRGDSAVTVNDGTYIGFMVFMAVGAVLSLTILPASKVVRDDGTRCTKMLYSNAATESVEILKLFYNWKMLLIIPAAWSSNFFYTYQFNHVNKPQFNLRTRGFNNVFYWGAQMVGSVGIGYVMDFSFRSRRKRGVVGIGVVALLASAIWGGALANQIKHDPGVILDFKDSGSRYAGPFVLYFSFGLLDAVFQSMVYWVIGALANDSEILSRYAGFYKGIQSAGAAVAWQIDNHNVSAMAQLIVNWVLTTVSYPLLLILVVLAVKEGDNRGEEEPVKEVAGFAH

SEQ ID NO: 57025 - protein, 409 aa, Glycine max
  peptide (1)..(409): Ceres Seq. ID no. 15168516
MGGGGQVNATASNNALTALYTTFAIFGILGGGIYNILGPHLTLFAGCSTYVLYAGSFLYYNHYQHQFFAIVAGAILGVGAGLLWAAQGAIMTSYPPENRKGTYISIFWSIFNMGGVIGGLIPFILNYNRGDSAVTVNDGTYIGFMVFMAVGAVLSLTILPASKVVRDDGTRCTKMLYSNAATESVEILKLFYNWKMLLIIPAAWSSNFFYTYQFNHVNKPQFNLRTRGFNNVFYWGAQMVGSVGIGYVMDFSFRSRRKRGVVGIGVVALLASAIWGGALANQIKHDPGVILDFKDSGSRYAGPFVLYFSFGLLDAVFQSMVYWVIGALANDSEILSRYAGFYKGIQSAGAAVAWQIDNHNVSAMAQLIVNWVLTTVSYPLLLILVVLAVKEGDNRGEEEPVKEVAGFAH

SEQ ID NO: 57026 - DNA, 1485 bp, Glycine max
  misc_feature (1)..(1485): Ceres Seq. ID no. 14315491
gagagagagagagagaacttcactcactcactcatgggctgcgtctcctcaaaacacatcaagaaagacctcaagcaagaagaagaagtcactgtcaccaatggcggcggttacgtgaaccacgtggtatccctgacttcctccacctatggagcactaatgctggacaaggagaaggagcaacttcaacttcaacccaccgtcgaagaagaatccaaaacatcccctcctcggattcgcgaagaacccgaagtcatcaacgcttgggaactcatggagggtctcgaagagggagtgcccatttcaaataaccccatgaaaagccccaagtccacacctttccttcgcggattcatctccaccgacccaaaacccaaaattacccccttcaaattccttaaccaattcgggtcccccaagagtctcaggaagttcacagggaaagagaacaaagttcaagttcaaccacccaatgctggtgttagacgcttggactacaatttcagcccaaagggtattctcaaaccctccaatttttgttctcctctaaaagggtctccgattcgtgctcgaaggaacagtttcgggaccgacattaagcgaaggagtcctagtcctctgttcgatccagagcttctcgcctcttacgaaaaggaactctccgaagaggaagaacagatcaagagaatggtgtgggccacccccaagacccgaagagtcagaaaacctttggattcacaaactttcattaagacgtttgaggaaaaattgccccctggaggagaaaactgcgttgtcatttacaccaccacgttacgggggatcagaaaaacgtttgaggagtgcaacaaggtaaggtccattgtcgagtcctattgcgtgcacgtggtggagcgtgacgtgtcaatggattcggggtttaaggaggagttgcggaagctgatggggaccaaacaagttaaggttccggttgtgttcgtgaaaggaaggttggttgggggtgctgaggaaattgtgaagttggaagaagagggaaaattgggtgttctctttgaagggattccccacaaggctttgggggagtgtgaagggtgtggtggtgtgaggtttgtaatgtgcgtggagtgtaatggaagttgtaaggttttggatcatgagaatcacaagaagactctgaggtgtggccagtgtaatgagaatggattgattcagtgtcctatgtgtcgttgaggttgctgaaaatggagtgttggtttgggttttgggatggtttgtttctgttattgatttgtaggaagagagggacagaacaggcatgatgtgcatgtggtccgttgttaatttgtcatgttccttagtgtagggttctaaagcgtgttttagttccctttttgttgtttgattctgtagtttgtcatgtattttgggacactggttgttccttctctagtctaatttaatttgcactatcactagcttcttttt

SEQ ID NO: 57027 - protein, 409 aa, Glycine max
  peptide (1)..(409): Ceres Seq. ID no. 14315492
ERERENFTHSLMGCVSSKHIKKDLKQEEEVTVTNGGGYVNHVVSLTSSTYGALMLDKEKEQLQLQPTVEEESKTSPPRIREEPEVINAWELMEGLEEGVPISNNPMKSPKSTPFLRGFISTDPKPKITPFKFLNQFGSPKSLRKFTGKENKVQVQPPNAGVRRLDYNFSPKGILKPSNFCSPLKGSPIRARRNSFGTDIKRRSPSPLFDPELLASYEKELSEEEEQIKRMVWATPKTRRVRKPLDSQTFIKTFEEKLPPGGENCVVIYTTTLRGIRKTFEECNKVRSIVESYCVHVVERDVSMDSGFKEELRKLMGTKQVKVPVVFVKGRLVGGAEEIVKLEEEGKLGVLFEGIPHKALGECEGCGGVRFVMCVECNGSCKVLDHENHKKTLRCGQCNENGLIQCPMCR

SEQ ID NO: 57028 - protein, 398 aa, Glycine max
  peptide (1)..(398): Ceres Seq. ID no. 14315493
MGCVSSKHIKKDLKQEEEVTVTNGGGYVNHVVSLTSSTYGALMLDKEKEQLQLQPTVEEESKTSPPRIREEPEVINAWELMEGLEEGVPISNNPMKSPKSTPFLRGFISTDPKPKITPFKFLNQFGSPKSLRKFTGKENKVQVQPPNAGVRRLDYNFSPKGILKPSNFCSPLKGSPIRARRNSFGTDIKRRSPSPLFDPELLASYEKELSEEEEQIKRMVWATPKTRRVRKPLDSQTFIKTFEEKLPPGGENCVVIYTTTLRGIRKTFEECNKVRSIVESYCVHVVERDVSMDSGFKEELRKLMGTKQVKVPVVFVKGRLVGGAEEIVKLEEEGKLGVLFEGIPHKALGECEGCGGVRFVMCVECNGSCKVLDHENHKKTLRCGQCNENGLIQCPMCR

SEQ ID NO: 57029 - protein, 356 aa, Glycine max
  peptide (1)..(356): Ceres Seq. ID no. 14315494
MLDKEKEQLQLQPTVEEESKTSPPRIREEPEVINAWELMEGLEEGVPISNNPMKSPKSTPFLRGFISTDPKPKITPFKFLNQFGSPKSLRKFTGKENKVQVQPPNAGVRRLDYNFSPKGILKPSNFCSPLKGSPIRARRNSFGTDIKRRSPSPLFDPELLASYEKELSEEEEQIKRMVWATPKTRRVRKPLDSQTFIKTFEEKLPPGGENCVVIYTTTLRGIRKTFEECNKVRSIVESYCVHVVERDVSMDSGFKEELRKLMGTKQVKVPVVFVKGRLVGGAEEIVKLEEEGKLGVLFEGIPHKALGECEGCGGVRFVMCVECNGSCKVLDHENHKKTLRCGQCNENGLIQCPMCR

SEQ ID NO: 57030 - DNA, 1358 bp, Glycine max
  misc_feature (1)..(1358): Ceres Seq. ID no. 14312893
gttcgttccctctcaaccaaaaccaaccacttcatgttatcattgctatgacccttcaagcttttcatggctctgcatgttgtttccgttcccaccttcttcacttttcttcttccaccgcttcatctccaccattccttgcttcgaggaggttccaatcatgcccttcaacaagaaaatctctcaagttgaattgcagttcaagtggcaataatggtgaccaagattaccttctggatgctccagtttctgttggagatggattctctttcagtggagggaagtattcagatggccctagtccaagtgatgaatggtttaagcaagggaaaaaggttaaagcctattcaatacctggcactggtgaaaaggcaaaagatccaatttttggacttgctatgggttccggttctcaagctactggcgatcgtttcagatggttttgtgttgaaagcggaagtgctgataatccttcagtgatattaatccatggtttcccttcacaggcatattcttaccgcaaagttcttccagtactctccaaggactatcacgtcatagcctttgactggctaggatttgggttttctgacaagcctcaacccagatatgggtttgactacacactggatgagtatgtctcatcattggagtcacttattgatgaactggctgctactaaagtctcacttgttgtccagggatatttttcgcctgttgtagccaagtatgccagcattcaccaggaaaaagtcagaaacttaatactccttaatccgcctctaacagcccaacatgccaagcttccaccaacattgtccatattcagcaactttctactaggtgaaatattttcacaggatccattaagggccagtgacaaagctctaacaagctgtggcccctataaaatgaaagaagaagatgcaatggtctatcgaagaccctatcttacatctggttcctctggctttgctctaaatgcaattagcaggaacatgaacaaagacctcaagagatatgtggaggatatgcaaacaatactgaaggacaaaaattggaaagttcaaaccacaatatgttggggccaaagagaccgctggttgagctatgatggagtggaggatttctgcaaggattccaatcataaactcattgatgttcctacggctggtcatcatgtgcaggaagattgtggcgaagaagttggacaacttattcgtgggataataagcaaaaggaccaagatataggatattttctcattgcttcttgagatgctgaacaaatttttttgttacatggattcctatcttttccttggtctctatccttccaataaatcttgattcaattcc

SEQ ID NO: 57031 - protein, 416 aa, Glycine max
  peptide (1)..(416): Ceres Seq. ID no. 14312894
SFPLNQNQPLHVIIAMTLQAFHGSACCFRSHLLHFSSSTASSPPFLASRRFQSCPSTRKSLKLNCSSSGNNGDQDYLLDAPVSVGDGFSFSGGKYSDGPSPSDEWFKQGKKVKAYSIPGTGEKAKDPIFGLAMGSGSQATGDRFRWFCVESGSADNPSVILIHGFPSQAYSYRKVLPVLSKDYHVIAFDWLGFGFSDKPQPRYGFDYTLDEYVSSLESLIDELAATKVSLVVQGYFSPVVAKYASIHQEKVRNLILLNPPLTAQHAKLPPTLSIFSNFLLGEIFSQDPLRASDKALTSCGPYKMKEEDAMVYRRPYLTSGSSGFALNAISRNMNKDLKRYVEDMQTILKDKNWKVQTTICWGQRDRWLSYDGVEDFCKDSNHKLIDVPTAGHHVQEDCGEEVGQLIRGIISKRTKI

SEQ ID NO: 57032 - protein, 401 aa, Glycine max
  peptide (1)..(401): Ceres Seq. ID no. 14312895
MTLQAFHGSACCFRSHLLHFSSSTASSPPFLASRRFQSCPSTRKSLKLNCSSSGNNGDQDYLLDAPVSVGDGFSFSGGKYSDGPSPSDEWFKQGKKVKAYSIPGTGEKAKDPIFGLAMGSGSQATGDRFRWFCVESGSADNPSVILIHGFPSQAYSYRKVLPVLSKDYHVIAFDWLGFGFSDKPQPRYGFDYTLDEYVSSLESLIDELAATKVSLVVQGYFSPVVAKYASIHQEKVRNLILLNPPLTAQHAKLPPTLSIFSNFLLGEIFSQDPLRASDKALTSCGPYKMKEEDAMVYRRPYLTSGSSGFALNAISRNMNKDLKRYVEDMQTILKDKNWKVQTTICWGQRDRWLSYDGVEDFCKDSNHKLIDVPTAGHHVQEDCGEEVGQLIRGIISKRTKI

SEQ ID NO: 57033 - protein, 284 aa, Glycine max
  peptide (1)..(284): Ceres Seq. ID no. 14312896
MGSGSQATGDRFRWFCVESGSADNPSVILIHGFPSQAYSYRKVLPVLSKDYHVIAFDWLGFGFSDKPQPRYGFDYTLDEYVSSLESLIDELAATKVSLVVQGYFSPVVAKYASIHQEKVRNLILLNPPLTAQHAKLPPTLSIFSNFLLGEIFSQDPLRASDKALTSCGPYKMKEEDAMVYRRPYLTSGSSGFALNAISRNMNKDLKRYVEDMQTILKDKNWKVQTTICWGQRDRWLSYDGVEDFCKDSNHKLIDVPTAGHHVQEDCGEEVGQLIRGIISKRTKI

SEQ ID NO: 57034 - DNA, 1202 bp, Glycine max
  misc_feature (1)..(1202): Ceres Seq. ID no. 15168484
gtaacaccgttgttcgaaacttcaaatcaaaaaaagctcagagaacccatcccgccgccgccgtgtactccgaccgccacctccattcgccgatgtactctcaatcccttggtaattattgatttcttctattatcctttgagttaaagtcgaaggagtgcgattattctgatttgagaagcaaaaataccaaagagtgaagaaaagaaaagaaaaaatgctgtacataattggtttagggttgggtgatgagcaagacatcactctcaaaggcttggaagctgtgaagaagtgcagcaaggtttacatggaagcctacacttccctcctctcctttggtctctccaccaatggcatctccaacctggaaaaactatacggtaaacccattattcttgctgacagagaaatggtagaagaaaaggctgatgaaattctctctgaagctgatcatgcccatgttgctttccttgttgttggggatccttttggggctaccactcacactgacctggttgttcgagcaaagaagatggcaattgaagtcaaagtagtacacaatgcatctgtgatgaatgctattggagtttgtggtctacagctttaccgttatggggagaccgtttctataccattctttacagagacttggagacctgatagcttctatgaaaagattcaaagaaacctatcaatgggactgcacacgctttgcttgttagatattcgtgtgaaggaacccacactagaatctttgtgcagaggaagaaaagcttatgaaccacccagatatatgacaataaacacagccattgagcagctcttggagattgtgcaagcacgtgaagaacctgcatatactgaggataccgagtgtgttgggcttgcacggcttgggagtgaagatcagatgatagtagctggaacaatgaagcagttgcagatggttgattttggagcacctttgcattgccttgttataacaggccagacccatcctgtggaggaagaaatgctgtatttttacagatgcaggacatcgatacaacattaagacagcagcaccagtttaatttagcaaaaaagacttgtttgtttcttttgaaggaacccttgtatttttgttcttcctgtaaaaactttttggttgctaatcagggccaaaattaactaaattcattggtggctgaaaaattatgggc

SEQ ID NO: 57035 - protein, 278 aa, Glycine max
  peptide (1)..(278): Ceres Seq. ID no. 15168485
MLYIIGLGLGDEQDITLKGLEAVKKCSKVYMEAYTSLLSFGLSTNGISNLEKLYGKPIILADREMVEEKADEILSEADHAHVAFLVVGDPFGATTHTDLVVRAKKMAIEVKVVHNASVMNAIGVCGLQLYRYGETVSIPFFTETWRPDSFYEKIQRNLSMGLHTLCLLDIRVKEPTLESLCRGRKAYEPPRYMTINTAIEQLLEIVQAREEPAYTEDTECVGLARLGSEDQMIVAGTMKQLQMVDFGAPLHCLVITGQTHPVEEEMLYFYRCRTSIQH

SEQ ID NO: 57036 - protein, 248 aa, Glycine max
  peptide (1)..(248): Ceres Seq. ID no. 15168486
MEAYTSLLSFGLSTNGISNLEKLYGKPIILADREMVEEKADEILSEADHAHVAFLVVGDPFGATTHTDLVVRAKKMAIEVKVVHNASVMNAIGVCGLQLYRYGETVSIPFFTETWRPDSFYEKIQRNLSMGLHTLCLLDIRVKEPTLESLCRGRKAYEPPRYMTINTAIEQLLEIVQAREEPAYTEDTECVGLARLGSEDQMIVAGTMKQLQMVDFGAPLHCLVITGQTHPVEEEMLYFYRCRTSIQH

SEQ ID NO: 57037 - protein, 214 aa, Glycine max
  peptide (1)..(214): Ceres Seq. ID no. 15168487
MVEEKADEILSEADHAHVAFLVVGDPFGATTHTDLVVRAKKMAIEVKVVHNASVMNAIGVCGLQLYRYGETVSIPFFTETWRPDSFYEKIQRNLSMGLHTLCLLDIRVKEPTLESLCRGRKAYEPPRYMTINTAIEQLLEIVQAREEPAYTEDTECVGLARLGSEDQMIVAGTMKQLQMVDFGAPLHCLVITGQTHPVEEEMLYFYRCRTSIQH

SEQ ID NO: 57038 - DNA, 731 bp, Glycine max
  misc_feature (1)..(731): Ceres Seq. ID no. 13594213
agcatcaattaataaaactattcaactcacttaagcctgcacaaaaacaacttaatagaagatgccttccaagaggcttcaatggagatccttagtacttggttgtttcaaggccaccaagaaccaatccttggaatctccaaacatagtttccaagaaatcatcttcaagtagaatcttcctttctgatttaagcctaagcgattattcatcagtttctatcatgagtgatttgtccaattctctcgtgggatcaaatcttcgtattttcacctaccaagagctctctgaggttacacacaacttcagcaaatccaactatcttggggaaggtgggtttgggaaggtgtataaaggatttattgatgacaatcttaaacgtggattgaaagctcagactgtggcagttaaggccttaaacttggatggaaaacaaggccacagagagtggttggctgaagtaatctttctggggcaattgaaacatcgccatctggttaacttaattggctactgctgtgaagatgagcataggcttcttgtgtatgagtacatggagaggggcaatctagaggaaaagcttttnnnnggttatttagcagccttgccttggctaacaagaatcaaaatagcaattggggccgcaaagggacttatgtttcttcatgaagaagagaaaccagtcatatatagagatatcaaggcctcaaacattctattagactctgatt

SEQ ID NO: 57039 - protein, 223 aa, Glycine max
  peptide (1)..(223): Ceres Seq. ID no. 13594214
  misc_feature (175)..(175): Xaa is any aa, unknown or other
  misc_feature (176)..(176): Xaa is any aa, unknown or other
MPSKRLQWRSLVLGCFKATKNQSLESPNIVSKKSSSSRIFLSDLSLSDYSSVSIMSDLSNSLVGSNLRIFTYQELSEVTHNFSKSNYLGEGGFGKVYKGFIDDNLKRGLKAQTVAVKALNLDGKQGHREWLAEVIFLGQLKHRHLVNLIGYCCEDEHRLLVYEYMERGNLEEKLXXGYLAALPWLTRIKIAIGAAKGLMFLHEEEKPVIYRDIKASNILLDSD

SEQ ID NO: 57040 - protein, 169 aa, Glycine max
  peptide (1)..(169): Ceres Seq. ID no. 13594215
  misc_feature (121)..(121): Xaa is any aa, unknown or other
  misc_feature (122)..(122): Xaa is any aa, unknown or other
MSDLSNSLVGSNLRIFTYQELSEVTHNFSKSNYLGEGGFGKVYKGFIDDNLKRGLKAQTVAVKALNLDGKQGHREWLAEVIFLGQLKHRHLVNLIGYCCEDEHRLLVYEYMERGNLEEKLXXGYLAALPWLTRIKIAIGAAKGLMFLHEEEKPVIYRDIKASNILLDSD

SEQ ID NO: 57041 - DNA, 1200 bp, Glycine max
  misc_feature (1)..(1200): Ceres Seq. ID no. 15168500
taacacacaacacaacacaaacactacatagacattgaatcaaaaatcaatggtggttgcatccattcgtcttcttccttctccattcctctctttcgcgcctcgtttctctccatattcatattcatggcgctgccgtccctcttccaccattcccttttcttccatccactccaaagcttctactaagggagatggtggagtagtggaatttggtggtgatcaaacagagcttatatttttggggactggaaccagtgaaggggttccacgtgtcagctgcttgactaatcctttacacaaatgtgaggtgtgttcaaaagctgctcaaccgggtaataagaataggagacttaacacaagcatcctcattcgtcaccccggttcctcaggaacacacaataatattcttatagatgctggaaaatttttctatcacagtgctctccggtggtttcctgcttttgggataagaacaattgatgcggtcattattactcattcacatgctgatgcaatcggaggtcttgatgatcttagagattggacaaacaatgttcagcctcatattccaatatatgtagccaagcgtgactttgaggtgatgacaaagacccattattatttagtagatactagtgttatcttacctggtgcccaagtctcagagttgcaattcaatatcgtatcagaagaaccattttttgtacatggactgaagttcaccccattaccagtgtggcacggccagaattatcggtcccttggttttcgttttggtaatatatgttacattagtgatgtcagcgacattcctgaagaaacatatccacttctgaaggactgtgaaattctaatcccggatgctttgaggcctgattgctctacttctacacattttggacttcaaagggccttggacgaagtgcgaaaaattcaacccaaaagaacactttttaccggtatgatgcatctgatggatcatgaagaagtgaatgactcccttgcgaagctattggagtctgaaggccttgatgcacaactgagctatgacgggcttcgtataccaattagactctagtttgtatacagtctctttcataagatgactttttttttttttctcaaagagaaattattaaataaacattcaaataattttacaagttcatacattctgcaggttcctgcatctattct

SEQ ID NO: 57042 - protein, 343 aa, Glycine max
  peptide (1)..(343): Ceres Seq. ID no. 15168501
MVVASIRLLPSPFLSFAPRFSPYSYSWRCRPSSTIPFSSIHSKASTKGDGGVVEFGGDQTELIFLGTGTSEGVPRVSCLTNPLHKCEVCSKAAQPGNKNRRLNTSILIRHPGSSGTHNNILIDAGKFFYHSALRWFPAFGIRTIDAVIITHSHADAIGGLDDLRDWTNNVQPHIPIYVAKRDFEVMTKTHYYLVDTSVILPGAQVSELQFNIVSEEPFFVHGLKFTPLPVWHGQNYRSLGFRFGNICYISDVSDIPEETYPLLKDCEILIPDALRPDCSTSTHFGLQRALDEVRKIQPKRTLFTGMMHLMDHEEVNDSLAKLLESEGLDAQLSYDGLRIPIRL

SEQ ID NO: 57043 - DNA, 1399 bp, Glycine max
  misc_feature (1)..(1399): Ceres Seq. ID no. 13638097
aaaccaaaccacacaaataaacgaccaacacacattatatctctttgttaccttcgcacgaacgagagaagagaagcaaacgatggctacttttctttccaaccaatctctgttgggttcttgtccttgttctactcccttctcttcaaagccctttcaaaccctaaaaccccaaatcttatcttttccatctcgcgggtttccgcgccccctaatttcctcagtcaatcgaagaacccaattgaagtcttcccaagatttccctccaactacaaatgatgaaacagaggagacccagaatgatgtaagagggacaaatgatgatgaagataaaaaacaagtacctagtttaatgatcctccttgaagcatacaaggaagccttttttaatggcgaccaaaataccgtagctcagattgaagaggggatatattcaatagcaaataggaaaaataaattgattcagaaattatcaagtttatcggcagacaaagctgcttccaagaagagttatcttcgtttacaagctgattttgataattttaggaaaaggactgacaaagagagacttaacatccaatccgatgcccagcaacaagtcattgaaaagcttttgttgatggtcgacaattttgagagaacccaacagcaaattaaagcagcaacagagaaagagaagaaaattggtgttagctatcaaggtatttacaaacaatttgtagaggttctgaggaatcataatgtttcagtggtagcaacagtgggcaagccgtttaatcccttgcaacatgaagccgttgcacgtgaggagtccacagagttcaaaaaagggattataattaaagaatcccgacgtggtttcttgctcagagatcgagttctaaggccagcccttgtcaaggtttccttaggtcctggaaataagaaatctcccgtgtctcctgacaagtctgtggagcaaccttcaacagctgctggaatagatgaaagatagtctcttgaacttgttcattaaaaatccagttccacctgcatacctgatatcttgtcattggtcaacttgaaattcttctagtttggtattttggcctgaggtgagtatagtctcttgtagtatggacctcaccaattttaacttgtgtcccgccgcactacaattttttgcttcatcatgacaaagggaattacttttgttcatgagagaatggtgatttcttttgcaatccatttttttttttaccaaagcttagaatgttcattctcggactttgttggcattattgttccttgtctcaatgcttaacaaagggaaatactagagaaagctcgactgcaaaaattacccatgtcattctacaatattgtatgtgttatatatatgccatatcttacgacttgt

SEQ ID NO: 57044 - protein, 330 aa, Glycine max
  peptide (1)..(330): Ceres Seq. ID no. 13638098
NQTTQINDQHTLYLFVTFARTREEKQTMATFLSNQSLLGSCPCSTPFSSKPFQTLKPQILSFPSRGFPRPLISSVNRRTQLKSSQDFPPTTNDETEETQNDVRGTNDDEDKKQVPSLMILLEAYKEAFFNGDQNTVAQIEEGIYSIANRKNKLIQKLSSLSADKAASKKSYLRLQADFDNFRKRTDKERLNIQSDAQQQVIEKLLLMVDNFERTQQQIKAATEKEKKIGVSYQGIYKQFVEVLRNHNVSVVATVGKPFNPLQHEAVAREESTEFKKGIIIKESRRGFLLRDRVLRPALVKVSLGPGNKKSPVSPDKSVEQPSTAAGIDER

SEQ ID NO: 57045 - protein, 303 aa, Glycine max
  peptide (1)..(303): Ceres Seq. ID no. 13638099
MATFLSNQSLLGSCPCSTPFSSKPFQTLKPQILSFPSRGFPRPLISSVNRRTQLKSSQDFPPTTNDETEETQNDVRGTNDDEDKKQVPSLMILLEAYKEAFFNGDQNTVAQIEEGIYSIANRKNKLIQKLSSLSADKAASKKSYLRLQADFDNFRKRTDKERLNIQSDAQQQVIEKLLLMVDNFERTQQQIKAATEKEKKIGVSYQGIYKQFVEVLRNHNVSVVATVGKPFNPLQHEAVAREESTEFKKGIIIKESRRGFLLRDRVLRPALVKVSLGPGNKKSPVSPDKSVEQPSTAAGIDER

SEQ ID NO: 57046 - protein, 213 aa, Glycine max
  peptide (1)..(213): Ceres Seq. ID no. 13638100
MILLEAYKEAFFNGDQNTVAQIEEGIYSIANRKNKLIQKLSSLSADKAASKKSYLRLQADFDNFRKRTDKERLNIQSDAQQQVIEKLLLMVDNFERTQQQIKAATEKEKKIGVSYQGIYKQFVEVLRNHNVSVVATVGKPFNPLQHEAVAREESTEFKKGIIIKESRRGFLLRDRVLRPALVKVSLGPGNKKSPVSPDKSVEQPSTAAGIDER

SEQ ID NO: 57047 - DNA, 1308 bp, Glycine max
  misc_feature (1)..(1308): Ceres Seq. ID no. 15171755
cccttccttccttctttcattcctttccctcattttcctcttttctctctcctttttccccttcacatgtcttctgccggcggcgacaggggcggcggcgctacctccggcgaccctcgccaatacttctgccaccagtgcaaccgcaccgtctcaatttccccttccccctcctccgatctcctctgccccacttgcaacggcggcttcctcgaagaactcgaattcccaatccccaaccctaaccctaaccctcccaatcccttcttccccgacttccccctcgccggcgccgccaccattcccctcgtcctccccggcgccgccgcctcccctcccttcgaggatctctccgccctcttcggaaaccgacccgacgccgccgccgatgccttcaaccccctcgtcttcctccagaactacttccaaaccctaagagccggcggcaacctccaattggtgatagagtccggcgaccctggcggagcgttccgcttccccggcgtcacccacggcgactacttctttgggccgggcctcgaggagctgatccagcatctcgctgagaacgatcccaaccgttacggcaccccgccggcctccaagtcggtcgtcgagggcctgccggacgtctccgtcaccgaggagctgctggcgtcggattcctcgcagtgcgccgtgtgcaaagacaccttcgagctcggcgagaccgcgaagcagatcccctgtaagcatatatatcacgcggattgcattttgccgtggttagaattgcacaattcttgccccgtttgtcggtatgagttgcccacagatgatcctgattacgagcagagggctcgtcgtggtggtagtggtggtggtggtgctgccggcagtggggcagctccacaggtgaattggaacatggcattggggtccggtggttctgcggattcatctggtagcggtggcggtgataattcacagaggagaaggtttagggtgtctttgccatggccgtttaggcaatttgctgagacaagtaatgttgggagtggcaacaatgatagcaacaataacaacaacagcaatagcaatagtgacagtagtggaaataatggtgggcaatcgaactctggaaaccgggggaatcagaattttgactcggagaccagacaggaagatctcgattgagagccactcgtgttttatatgtatcaagagtttttccaaaattgcagcattttgttgaatagaaatgatgctaaatatcaattagtggttagtgacagttgaaaattttatatttgattataatgaacttac

SEQ ID NO: 57048 - protein, 391 aa, Glycine max
  peptide (1)..(391): Ceres Seq. ID no. 15171756
PFLPSFIPFPHFPLFSLLFPLHMSSAGGDRGGGATSGDPRQYFCHQCNRTVSISPSPSSDLLCPTCNGGFLEELEFPIPNPNPNPPNPFFPDFPLAGAATIPLVLPGAAASPPFEDLSALFGNRPDAAADAFNPLVFLQNYFQTLRAGGNLQLVIESGDPGGAFRFPGVTHGDYFFGPGLEELIQHLAENDPNRYGTPPASKSVVEGLPDVSVTEELLASDSSQCAVCKDTFELGETAKQIPCKHIYHADCILPWLELHNSCPVCRYELPTDDPDYEQRARRGGSGGGGAAGSGAAPQVNWNMALGSGGSADSSGSGGGDNSQRRRFRVSLPWPFRQFAETSNVGSGNNDSNNNNNSNSNSDSSGNNGGQSNSGNRGNQNFDSETRQEDLD

SEQ ID NO: 57049 - protein, 369 aa, Glycine max
  peptide (1)..(369): Ceres Seq. ID no. 15171757
MSSAGGDRGGGATSGDPRQYFCHQCNRTVSISPSPSSDLLCPTCNGGFLEELEFPIPNPNPNPPNPFFPDFPLAGAATIPLVLPGAAASPPFEDLSALFGNRPDAAADAFNPLVFLQNYFQTLRAGGNLQLVIESGDPGGAFRFPGVTHGDYFFGPGLEELIQHLAENDPNRYGTPPASKSVVEGLPDVSVTEELLASDSSQCAVCKDTFELGETAKQIPCKHIYHADCILPWLELHNSCPVCRYELPTDDPDYEQRARRGGSGGGGAAGSGAAPQVNWNMALGSGGSADSSGSGGGDNSQRRRFRVSLPWPFRQFAETSNVGSGNNDSNNNNNSNSNSDSSGNNGGQSNSGNRGNQNFDSETRQEDLD

SEQ ID NO: 57050 - DNA, 1335 bp, Glycine max
  misc_feature (1)..(1335): Ceres Seq. ID no. 13594117
gaatttgctctagacaagtttggtgattgacgatgtcgggcttgaagcttggcacgactgcttccatctacgttcgaacagcgaaaaccaaaagcaaacccctcttatcatggagaagcccaccccaacacccccgcagccgcaggtacatgctttccccttccaaaaatcaaatcctagggttcacacctagaaacaaattcccatgctattctttgggaagggctggtcttgtcacagattttggttcgtcagtgccccaacctcaacctcaacctcagccaaagccagagccagaaccagaacctgaaccttccaaattgcttacgttgccaacaattttgactctaggccgtgtcgccgctgtcccacttcttgttgctactttctacatggacggttggcgtggaactgctgctactaccagcattttcgtcgctgcatcaatcactgattggcttgatggctatcttgctcgcaagatgaagttaaaatcttcattcggtgcattcttagatccagttgctgacaagcttatggttgctgctacactggtcttattatgtactagacctttggatggtggtgtgtttggacaagcgccgtggctactcactatacctgcaattgccataattggtagagagataaccatgtctgcagtcagggagtgggctgcttcccaggatagcaagcttttagaggctgttgctgtaaataacttggggaagtggaaaacagccacacagatgacagcattaaccatccttcttgcgacccgggactggagccatggaggaggagctgccattgtagtaggctctggtgttgctttgctttatacttcagcagggcttgccttatggtcgttggttgtatatatgaagaaaatatggagggtgttgttgaggtagcttgcgaacatttaccaatgtcacgaaagggggctgcaattttagtggcatgcaaatgtttttttttttcctgcgcaatctctaaccccatgcagtgtcatttctcctactcgtgtattttctgcgcatttttttggtcctctaaaaaagataagggccactagccatgcttaagcgttacagcagtgattgtgttgggaaaacgttgtgttgtaagttgtaacccacgttttccccaaatccatgaaggcacttgcttctccgtttgatgctttggaaagtgtgaacacacgcattttgttttaggccctaactcaatttagagtcattgaaagtttgagaattgcgaccagagaaaattcacaacaggtcaggaattattgtataatggttgatttgttctgatatagttcaacgatgc

SEQ ID NO: 57051 - protein, 293 aa, Glycine max
  peptide (1)..(293): Ceres Seq. ID no. 13594118
MSGLKLGTTASIYVRTAKTKSKPLLSWRSPPQHPRSRRYMLSPSKNQILGFTPRNKFPCYSLGRAGLVTDFGSSVPQPQPQPQPKPEPEPEPEPSKLLTLPTILTLGRVAAVPLLVATFYMDGWRGTAATTSIFVAASITDWLDGYLARKMKLKSSFGAFLDPVADKLMVAATLVLLCTRPLDGGVFGQAPWLLTIPAIAIIGREITMSAVREWAASQDSKLLEAVAVNNLGKWKTATQMTALTILLATRDWSHGGGAAIVVGSGVALLYTSAGLALWSLVVYMKKIWRVLLR

SEQ ID NO: 57052 - protein, 254 aa, Glycine max
  peptide (1)..(254): Ceres Seq. ID no. 13594119
MLSPSKNQILGFTPRNKFPCYSLGRAGLVTDFGSSVPQPQPQPQPKPEPEPEPEPSKLLTLPTILTLGRVAAVPLLVATFYMDGWRGTAATTSIFVAASITDWLDGYLARKMKLKSSFGAFLDPVADKLMVAATLVLLCTRPLDGGVFGQAPWLLTIPAIAIIGREITMSAVREWAASQDSKLLEAVAVNNLGKWKTATQMTALTILLATRDWSHGGGAAIVVGSGVALLYTSAGLALWSLVVYMKKIWRVLLR

SEQ ID NO: 57053 - protein, 173 aa, Glycine max
  peptide (1)..(173): Ceres Seq. ID no. 13594120
MDGWRGTAATTSIFVAASITDWLDGYLARKMKLKSSFGAFLDPVADKLMVAATLVLLCTRPLDGGVFGQAPWLLTIPAIAIIGREITMSAVREWAASQDSKLLEAVAVNNLGKWKTATQMTALTILLATRDWSHGGGAAIVVGSGVALLYTSAGLALWSLVVYMKKIWRVLLR

SEQ ID NO: 57054 - DNA, 1852 bp, Glycine max
  misc_feature (1)..(1852): Ceres Seq. ID no. 13594216
aaacataattcgttcctgggagtctctctgtcttctacttgtttgttagggttccttttcccgtttcgtttcgtttcgttttttttgcaatggaagaaagccctcgtggtcgcagaaagcgagcacacccttcttctccttctcctccttcgccaatctccaagaagccccaaaccttcccttcgttccaagacatccccaatctcccttctaacatcaaatccctctgccacctcatcgccaccacctccgccgccaccgtcgagcactccctccaatccgccgccatctccgtcatccctcacgacgtcgaagaagtcctcaaactctcctacggcttcccgggccaatccgtcaaattcttccgctggagcggccgccacctcaacgacaaccacacgccctattcctggaacctcgttgtcgatatcctcggcagaaaccgcttcttcgaccccatgtgggacgccgttaagtcaatgaacaaagaagggttactctcgctcgccacattcgcctccgtcttcagcagctatgttgccgctgacagaatccgtgaagcaattatggcgtttgagattatggacaattacggttgtgtgagggatgcttttgctttgaattcgcttttgagtgcaatttgtagcaatggtaggactcttgatgcttgtgattacttgcaggttgctaagaaattcgtccgaccggatacggatacttacgcgattttaatggaggggtgggaaggggagaagagtatggttagtgctaaggagacatttgctgagatggtgattgagattggatgggatcctgcgaatgtgccggcttatgattcgttcttgtgtacacttgttagagggcatgatggattgcttgaggctattaagtttgttgattccatgagggataggaggtgttaccccggtgtgaggtttctgaaggctgcattggatgagtgtgttaagtgccatgatgttaggacagctgagtttttctgggaggtgttggtggttgggaaggtgttgcagcccacctctgagatgtacaatttgatgatcggtttgtgttgctatcgcggtgacaccgatgctgcaaggaggatgctccatgagatggtttaccaaggggcttttcctgatgtggtgacttataacttgttgtttaagttcttgctcaaggggaggaaactgagggaggcttcgtcggtgtttgcggagatggtgcagaatgagtgtgtgccggagcaggataactgtgatttggcagttaaggcgtatgtggattgcggggagcctgttatggcgatcaaggtttggaagtgtttggtggagaattataagaagggtttggagcagaccgcgaattttctggttgtggggctttgcaatttgaacaggccacaggtggcggttaagtatgccgaggatatgattggcaggggaatcagtttgtcctcttccacattgtcgaagctgagacaaagccttgtcaaggagagaagagaatatgtgtatgaggatcttttgagaaagtggaaatctcactaggtagtttggattttttttgctaaaactgtgtaacttaatattagtgccgaatttgaatgttttgcttttgtctgatagagaggggaagaattttgaagtggttattattatctaaaagatgatactttggttctgcattgggataaataggctccagcatgtgttatctttgtatatagttactgcaaaagatcctactagaattgctttagaaggttaaaggtagaggaagtttatataggtttttgtatcaaacttatattataaaaaataaaaaaaagctttatctatttacctatctt

SEQ ID NO: 57055 - protein, 486 aa, Glycine max
  peptide (1)..(486): Ceres Seq. ID no. 13594217
MEESPRGRRKRAHPSSPSPPSPISKKPQTFPSFQDIPNLPSNIKSLCHLIATTSAATVEHSLQSAAISVIPHDVEEVLKLSYGFPGQSVKFFRWSGRHLNDNHTPYSWNLVVDILGRNRFFDPMWDAVKSMNKEGLLSLATFASVFSSYVAADRIREAIMAFEIMDNYGCVRDAFALNSLLSAICSNGRTLDACDYLQVAKKFVRPDTDTYAILMEGWEGEKSMVSAKETFAEMVIEIGWDPANVPAYDSFLCTLVRGHDGLLEAIKFVDSMRDRRCYPGVRFLKAALDECVKCHDVRTAEFFWEVLVVGKVLQPTSEMYNLMIGLCCYRGDTDAARRMLHEMVYQGAFPDVVTYNLLFKFLLKGRKLREASSVFAEMVQNECVPEQDNCDLAVKAYVDCGEPVMAIKVWKCLVENYKKGLEQTANFLVVGLCNLNRPQVAVKYAEDMIGRGISLSSSTLSKLRQSLVKERREYVYEDLLRKWKSH

SEQ ID NO: 57056 - protein, 363 aa, Glycine max
  peptide (1)..(363): Ceres Seq. ID no. 13594218
MWDAVKSMNKEGLLSLATFASVFSSYVAADRIREAIMAFEIMDNYGCVRDAFALNSLLSAICSNGRTLDACDYLQVAKKFVRPDTDTYAILMEGWEGEKSMVSAKETFAEMVIEIGWDPANVPAYDSFLCTLVRGHDGLLEAIKFVDSMRDRRCYPGVRFLKAALDECVKCHDVRTAEFFWEVLVVGKVLQPTSEMYNLMIGLCCYRGDTDAARRMLHEMVYQGAFPDVVTYNLLFKFLLKGRKLREASSVFAEMVQNECVPEQDNCDLAVKAYVDCGEPVMAIKVWKCLVENYKKGLEQTANFLVVGLCNLNRPQVAVKYAEDMIGRGISLSSSTLSKLRQSLVKERREYVYEDLLRKWKSH

SEQ ID NO: 57057 - protein, 356 aa, Glycine max
  peptide (1)..(356): Ceres Seq. ID no. 13594219
MNKEGLLSLATFASVFSSYVAADRIREAIMAFEIMDNYGCVRDAFALNSLLSAICSNGRTLDACDYLQVAKKFVRPDTDTYAILMEGWEGEKSMVSAKETFAEMVIEIGWDPANVPAYDSFLCTLVRGHDGLLEAIKFVDSMRDRRCYPGVRFLKAALDECVKCHDVRTAEFFWEVLVVGKVLQPTSEMYNLMIGLCCYRGDTDAARRMLHEMVYQGAFPDVVTYNLLFKFLLKGRKLREASSVFAEMVQNECVPEQDNCDLAVKAYVDCGEPVMAIKVWKCLVENYKKGLEQTANFLVVGLCNLNRPQVAVKYAEDMIGRGISLSSSTLSKLRQSLVKERREYVYEDLLRKWKSH

SEQ ID NO: 57058 - DNA, 837 bp, Glycine max
  misc_feature (1)..(837): Ceres Seq. ID no. 13594121
acttaccacacacacctcctaaaccaaaattatccaaaaccatgtccagcttcactcatgccaccacactcctccatgcccacatcaaaaccaagcacaaaaaaccctccaccaccaccaccaccaccaccccattaccccataaccattcccccaacagaaggaagctgatttcaacttttctagccacttcaacagcagcactactagtgcatggagtcaccagcaccccacaagcactggcccagagctggggcacgcactccttcatcaaggagcacttcttcgagccggggctctccccggaagacgcggtggcgaggataaagcagactgcggaggggctgcacagcattcgggaggcgctggagaccatgtcttggaggtatatcatgttctacatacgcatcaagcaggcctatcttgaccaggacttgaggactgccttcaccaccttgcctgagagtagacgcaaggagtatgtcaaaactgctaatgagttggtgtctaactttggtgagtttgataggcatattcggacgccaaaggtatatgaatcatacctatactacgagaagacattgaagtcaatagatcaacttgtggccatactagcatagcacaaggaggaagctgcagggtataacggtcttaatttgcaattcttatttttatggtataaagcctcttgttacgttttttttccttccattttaattccgaattgaaatagaaggtattatagcacgaagttcaagcatatattatgtacatgtttgtatgcaacttcaaattcatgaacacaaagaaggttctaaaatgagaagcttcaatctc

SEQ ID NO: 57059 - protein, 205 aa, Glycine max
  peptide (1)..(205): Ceres Seq. ID no. 15221309
LPHTPPKPKLSKTMSSFTHATTLLHAHIKTKHKKPSTTTTTTTPLPHNHSPNRRKLISTFLATSTAALLVHGVTSTPQALAQSWGTHSFIKEHFFEPGLSPEDAVARIKQTAEGLHSIREALETMSWRYIMFYIRIKQAYLDQDLRTAFTTLPESRRKEYVKTANELVSNFGEFDRHIRTPKVYESYLYYEKTLKSIDQLVAILA

SEQ ID NO: 57060 - protein, 192 aa, Glycine max
  peptide (1)..(192): Ceres Seq. ID no. 15221310
MSSFTHATTLLHAHIKTKHKKPSTTTTTTTPLPHNHSPNRRKLISTFLATSTAALLVHGVTSTPQALAQSWGTHSFIKEHFFEPGLSPEDAVARIKQTAEGLHSIREALETMSWRYIMFYIRIKQAYLDQDLRTAFTTLPESRRKEYVKTANELVSNFGEFDRHIRTPKVYESYLYYEKTLKSIDQLVAILA

SEQ ID NO: 57061 - DNA, 1314 bp, Glycine max
  misc_feature (1)..(1314): Ceres Seq. ID no. 15225046
aacaacctaaaaaatattcactaagatttatttcccttattttattcatttattctttgttcctagtctttatcttataatttctcattgcttgcccggtaattcaagatcaacttggaaaatttgcaagatttgggatgaaatctggtcggatcttgctttgtgggatggggattttggtgggtcttatttcaatacaaagctcttcctctctcaatcccatctccctctcttcttcttcttcttcttcttcataacacaaacacaaaacataaacctttcttccaaccaaccttttttccaattcattctttgtttcttcaaaaatcttcaatccattttcaccttttcacaaatggggatggctgcagagtcacagtttcatgtcttggctgttgatgacagtctcatagataggaaactcattgagaggctcctcagaacctcttcttatgaagttactacagttgattctggtagcaaggctttagagtttctggggttgtgtgagaatgatgagagcaacccaagtacaccatatgtttgtcccaacaaccatcaggaggtggaggtgaatcttgttataacagattactgtatgcctggcatgacaggctatgacttgcttaagaaaatcaaggaatcttcatctttgagaaacataccggtggtgattatgtcatctgaaaatgtgccttcaaggattaacagatgtttggaggaaggagcagaagaatttttcttgaagcctgtgaggctgtcagatttaaacaagcttaaaccccatatgaagaaaaccaagttgaaagatcaaaaacaaggaacagtagaaaagcttgaagacttagaagttcaacagcaacagccacaacaacaaatcatcatccaaaatgagcagcaacaagcaccaaaatcccgagatcttcttcagccagagtcagagtcacatccacatgcacaaccaactattgaacaacagcaacaatcactacaacaagccaacaacaatagcaagaggaagaccatggaacagggcctttcacctgagactgacagaacaagaccaagatacagtggcatagccactgtggtatgatcataaatcattggcaaataattttcttgaatttcaaaaatgtaattctcataacttctttcttcttcttttaaaaaaaattaacttaagtgttggttaatataggctctataggagtgtagtagagttgtttcctgtacacattttcctggaaatatttccttccaattttgcttccccccaatataaatgaaaaagaaaaaagaaatattgaattg

SEQ ID NO: 57062 - protein, 246 aa, Glycine max
  peptide (1)..(246): Ceres Seq. ID no. 15225047
MGMAAESQFHVLAVDDSLIDRKLIERLLRTSSYEVTTVDSGSKALEFLGLCENDESNPSTPYVCPNNHQEVEVNLVITDYCMPGMTGYDLLKKIKESSSLRNIPVVIMSSENVPSRINRCLEEGAEEFFLKPVRLSDLNKLKPHMKKTKLKDQKQGTVEKLEDLEVQQQQPQQQIIIQNEQQQAPKSRDLLQPESESHPHAQPTIEQQQQSLQQANNNSKRKTMEQGLSPETDRTRPRYSGIATVV

SEQ ID NO: 57063 - protein, 244 aa, Glycine max
  peptide (1)..(244): Ceres Seq. ID no. 15225048
MAAESQFHVLAVDDSLIDRKLIERLLRTSSYEVTTVDSGSKALEFLGLCENDESNPSTPYVCPNNHQEVEVNLVITDYCMPGMTGYDLLKKIKESSSLRNIPVVIMSSENVPSRINRCLEEGAEEFFLKPVRLSDLNKLKPHMKKTKLKDQKQGTVEKLEDLEVQQQQPQQQIIIQNEQQQAPKSRDLLQPESESHPHAQPTIEQQQQSLQQANNNSKRKTMEQGLSPETDRTRPRYSGIATVV

SEQ ID NO: 57064 - protein, 165 aa, Glycine max
  peptide (1)..(165): Ceres Seq. ID no. 15225049
MPGMTGYDLLKKIKESSSLRNIPVVIMSSENVPSRINRCLEEGAEEFFLKPVRLSDLNKLKPHMKKTKLKDQKQGTVEKLEDLEVQQQQPQQQIIIQNEQQQAPKSRDLLQPESESHPHAQPTIEQQQQSLQQANNNSKRKTMEQGLSPETDRTRPRYSGIATVV

SEQ ID NO: 57065 - DNA, 1163 bp, Glycine max
  misc_feature (1)..(1163): Ceres Seq. ID no. 12608028
atcagtaaccgcgatttcttctccttccctgcttcaactctattcgaaatttcacagtgcggagatcctcctccatggatcgccggaaaagcaacgagacaacgaagtcgtcgacaacctcaaccgtggaattgccaccaccaatctcagcctcagaagcccttatagtcaacgcattatgcgcgcttggcttggccttcgccttctggattgcgaacactgtctactccatcgaactcgttactcatccttctctcacactcttcttcatctggattacagagctccccattgtgacccttctatacagtcgatatcgacaaaatcggaagcaatgcacgtacctgcgagctgttgggagaggggttctaggagtgcctgttggggcactactgaattttttaggagctattgctgtgggggcgcctgttacatttcagtatcttcccaagactgtaaattgggctcttatgatgtctgtgttcacaacaattccagcgtcatgtgttcttggttcatcgtgggctgactggcgacgtatatttgcacaaacaaagccaaaaggatctatagagtacctgatttgtttaccagcacatggagcagttattggagcatggtttggggcttggccaatgcctcttgactgggagaggccatggcaggaatggcccatttctgtgagctatgggaccgtagctggttacctggtggcattggttgcatcattgggctttgttcttgcttgtggtagatcacaacatatcaaaagagaatgaagtgctagtagaagcatctgattatactaattgtgggtgagatgtagaagcataatatcttgatgaactagacatggaagctgtcttctttaggacctgtttgtaggcaatggataatgaattatgatgacaaagggaaaattggtgctataaaactccaggctctcgccatgacatggtccagcatggggttgaatccattatggatctattgtagacagtattaccttgcatttgtaagaggctaatttcgtatgcaaatatgtgacctcctagtcacttggctgcaaatctaactgttgtaccaaggttttctttcagtgatttatgatgataacgatttatttctattttgttttagtaatgttcaagaagtatgctttt

SEQ ID NO: 57066 - protein, 234 aa, Glycine max
  peptide (1)..(234): Ceres Seq. ID no. 12608029
MDRRKSNETTKSSTTSTVELPPPISASEALIVNALCALGLAFAFWIANTVYSIELVTHPSLTLFFIWITELPIVTLLYSRYRQNRKQCTYLRAVGRGVLGVPVGALLNFLGAIAVGAPVTFQYLPKTVNWALMMSVFTTIPASCVLGSSWADWRRIFAQTKPKGSIEYLICLPAHGAVIGAWFGAWPMPLDWERPWQEWPISVSYGTVAGYLVALVASLGFVLACGRSQHIKRE

SEQ ID NO: 57067 - protein, 175 aa, Glycine max
  peptide (1)..(175): Ceres Seq. ID no. 12608030
SVTAISSPSLLQLYSKFHSAEILLHGSPEKQRDNEVVDNLNRGIATTNLSLRSPYSQRIMRAWLGLRLLDCEHCLLHRTRYSSFSHTLLHLDYRAPHCDPSIQSISTKSEAMHVPASCWERGSRSACWGTTEFFRSYCCGGACYISVSSQDCKLGSYDVCVHNNSSVMCSWFIVG

SEQ ID NO: 57068 - DNA, 1019 bp, Glycine max
  misc_feature (1)..(1019): Ceres Seq. ID no. 15168461
atatatatatatgaatagagatagagcatgaggcaaagtcaacagtgaagaggtgtgacagagagacaaaagaaaagatgtcagggcctcaatgctgttcaaatccaccaagcttgaaccccggtggaggagttgggcatgtggacaaagtgggtggtgttgattcctatttcactggatctcctcactccaaactcgctgttcttatgctctccgatgtttttggatatgaagcgccaaatttaaggaagcttgctgacaaagttggggctgctgggtattatgtagttgttcctgacctcttggatggcgaaccctttaatcctcagaattcggacaggccctttcctgcttggataaaagatcatggaccagtggagaaaggtgctgaagctacaaaacccataattgaagccttaaaaagtaaaggtgtttcagctattgcagctgttggtttttgttggggtgcaaaggttgtggttgaacttgcgaaatccagactgatccaaactgcagtgctattgcatccatcatttgtctccctggatgacatcaagggtgttgatattccaattgctatacttggagccgaggtagaccaagtttctcctccagagcttgtgaaacaatttgaacaagtcctagctgctaaatctggggttgccagttttgttaaaatatttcccaaagtttcacacggttgggctgtgagatataacactgaagatgcagaaaccgtaaaggtggcagaagaggcccaccaggacttgctggactggcttgctaaacatcataagtgagacatcttgctctgttaagactgtacaatggagtacttgagtgaaggatgtaatgtaaaatggtactcaatcaacgtagctgtagtttgcaagaaaataaatgttgtattgttacatgttggaagtggatcttattgctagatgatcctaataatgttgctttccgtgatttgagtttggtggacaattgtgatttgagatcttaataaatcatatttc

SEQ ID NO: 57069 - protein, 240 aa, Glycine max
  peptide (1)..(240): Ceres Seq. ID no. 15168462
MSGPQCCSNPPSLNPGGGVGHVDKVGGVDSYFTGSPHSKLAVLMLSDVFGYEAPNLRKLADKVGAAGYYVVVPDLLDGEPFNPQNSDRPFPAWIKDHGPVEKGAEATKPIIEALKSKGVSAIAAVGFCWGAKVVVELAKSRLIQTAVLLHPSFVSLDDIKGVDIPIAILGAEVDQVSPPELVKQFEQVLAAKSGVASFVKIFPKVSHGWAVRYNTEDAETVKVAEEAHQDLLDWLAKHHK

SEQ ID NO: 57070 - protein, 197 aa, Glycine max
  peptide (1)..(197): Ceres Seq. ID no. 15168463
MLSDVFGYEAPNLRKLADKVGAAGYYVVVPDLLDGEPFNPQNSDRPFPAWIKDHGPVEKGAEATKPIIEALKSKGVSAIAAVGFCWGAKVVVELAKSRLIQTAVLLHPSFVSLDDIKGVDIPIAILGAEVDQVSPPELVKQFEQVLAAKSGVASFVKIFPKVSHGWAVRYNTEDAETVKVAEEAHQDLLDWLAKHHK

SEQ ID NO: 57071 - DNA, 1524 bp, Glycine max
  misc_feature (1)..(1524): Ceres Seq. ID no. 15168517
acttgattacatcccctccgttcatggaccaatatgctcaagcttcttcttccatcctcatcctctaaactcatctccagacacattttctcacaactatcacgccccaccaccaccatgtccataaatctacgcacccacgccttcgcgggtaacccgctccgatcccccaaccgggtcgacccgttttcgcccgcctccgcgctcgagaccctcacgacccgaatcctcgacgccgcgcacgtgtcctcaccgtccgtggattttaaggtcttgccttttagaaatgggagggtgctggcttcttcggagagtggtgacacgtggcgcctcgggtggatcgcgctggaggaagtgaagggtctattgggtgcggatttgagcgcggactcgttcgtttatttggggtcagactcggactcagactcggtggtgtactgggcgatcgacgtgtcgagggagagtgggttggtgacggaattcagtggcgtgaggttgtgcttcgtggagctcaggacgctcatggtcgctaccgattgggtggatttgaagaccatggggaacctcgccatcgccggtcatgccagggcacttcttgaatggcataaaatatcacgattttgtggacattgtggagagaaaacagtccctatggaagctgggagacgtaaacagtgctcaaatgaatcatgcaaacagaggatatatccacgacttgacccggtggtcattatgctagtaattgatcgggagaatgaccgtgcccttttgagcaaacaatcgagatttgtacctagaatgtggagctgcttagcaggttttatagagccaggagaaagcttggaggaggctgtaagaagagaaacgtgggaggagactggtattgaagtgggagaagttgtatatcatagctctcagccatggcctgttggaccgaatagcatgccatgtcagctgatggtggggttctttgcatatgcgaaatcccttgaaataaatgtggacaaagaagagttggaagatgctcagtggcacagtagagaatatgtaagaaaggctctgacatttgctgaatacaagaaagcccaacaaactgcggtagcgaaggtagaacaaatgtgtaagggagtagaaaaggctcacagcttgtctaccgatttcaatgtggaaagtggtgaacttgctccaatgtttgttcctggaccctttgcaatagctcatcaccttatttcctcctgggcattcccagatcaaaatgtaaatggcagtgaatgtcattcaaaacaggctagtggttctatgtcaaatttgtaggagtgcaaattatttttttaaaggcacctttgattttacattgttttccatactaaactgatgtgagatataatcaatcaccataagactgactgcattatgttgcattttctttgttgggcgtagaaacataaattgggcagttgaattgtttagggtttttttatgtgtaagaattaaataagatatcaagagatttataacatttac

SEQ ID NO: 57072 - protein, 426 aa, Glycine max
  peptide (1)..(426): Ceres Seq. ID no. 15168518
MLKLLLPSSSSKLISRHIFSQLSRPTTTMSINLRTHAFAGNPLRSPNRVDPFSPASALETLTTRILDAAHVSSPSVDFKVLPFRNGRVLASSESGDTWRLGWIALEEVKGLLGADLSADSFVYLGSDSDSDSVVYWAIDVSRESGLVTEFSGVRLCFVELRTLMVATDWVDLKTMGNLAIAGHARALLEWHKISRFCGHCGEKTVPMEAGRRKQCSNESCKQRIYPRLDPVVIMLVIDRENDRALLSKQSRFVPRMWSCLAGFIEPGESLEEAVRRETWEETGIEVGEVVYHSSQPWPVGPNSMPCQLMVGFFAYAKSLEINVDKEELEDAQWHSREYVRKALTFAEYKKAQQTAVAKVEQMCKGVEKAHSLSTDFNVESGELAPMFVPGPFAIAHHLISSWAFPDQNVNGSECHSKQASGSMSNL

SEQ ID NO: 57073 - protein, 398 aa, Glycine max
  peptide (1)..(398): Ceres Seq. ID no. 15168519
MSINLRTHAFAGNPLRSPNRVDPFSPASALETLTTRILDAAHVSSPSVDFKVLPFRNGRVLASSESGDTWRLGWIALEEVKGLLGADLSADSFVYLGSDSDSDSVVYWAIDVSRESGLVTEFSGVRLCFVELRTLMVATDWVDLKTMGNLAIAGHARALLEWHKISRFCGHCGEKTVPMEAGRRKQCSNESCKQRIYPRLDPVVIMLVIDRENDRALLSKQSRFVPRMWSCLAGFIEPGESLEEAVRRETWEETGIEVGEVVYHSSQPWPVGPNSMPCQLMVGFFAYAKSLEINVDKEELEDAQWHSREYVRKALTFAEYKKAQQTAVAKVEQMCKGVEKAHSLSTDFNVESGELAPMFVPGPFAIAHHLISSWAFPDQNVNGSECHSKQASGSMSNL

SEQ ID NO: 57074 - protein, 263 aa, Glycine max
  peptide (1)..(263): Ceres Seq. ID no. 15168520
MVATDWVDLKTMGNLAIAGHARALLEWHKISRFCGHCGEKTVPMEAGRRKQCSNESCKQRIYPRLDPVVIMLVIDRENDRALLSKQSRFVPRMWSCLAGFIEPGESLEEAVRRETWEETGIEVGEVVYHSSQPWPVGPNSMPCQLMVGFFAYAKSLEINVDKEELEDAQWHSREYVRKALTFAEYKKAQQTAVAKVEQMCKGVEKAHSLSTDFNVESGELAPMFVPGPFAIAHHLISSWAFPDQNVNGSECHSKQASGSMSNL

SEQ ID NO: 57075 - DNA, 1478 bp, Glycine max
  misc_feature (1)..(1478): Ceres Seq. ID no. 15175775
aacctcactgtgaccccttaaggccttcttcaaccttctaaaacaccaccctcttttgcataacttcaccaaaatgtccctctgctacacttccaatttcatctcactgaaccatcaaaagagcttctccttaaccttctcttcagagtcttctcctcacttcatcaacctatttccggttaagcctcagaaaccacaccaccctattaagttcaccgcagaaaggttcaaactttttgcctctctgacatcatctccatccgttgagacctccccatcaagttataggagcaagagccccaaagatgttaacgtcttggtggtgggttcaactgggtacattggaaagttcgtggtgagagagttagttaagagagggtttaatgttacagccatagctagagagaggagtggaattaagggcagtgttgataaggatcagactttgggtcagttgagaggggccaatgtgtgtttctcagacgtgaccaatttggatgtttttgaggaatctctgaacaggttggggaagtcatttgatgttgtggtgtcatgtcttgctagtagaaatggaggtgtgaaggactcttggaagatagattatgaggcaacaaggaatagccttgttgctggaagaaaacgtggggcttcacattttgtgttgctttcagcaatatgtgtgcagaagccgctcctcgagtttcagcgtgccaagttgaagtttgaggatgagttggtgaagttagctgaggaggatggtggattcacttatagcatagtgaggccaactgcatttttcaagagtttggggggtcaggttgagttagtgaaggatgggaaaccttatgttatgtttggagatgggaaactgtgtgcttgtaagcctataagtgagtctgatttggcttcttttattgtggattgtgtgctgagtgaggataagattaaccaggtgttgccaattggagggcctgggaaggcattgactccattggaacaaggggagatgctgtttaggcttttggggaaggagcctaagttcttgaaagttccaatcgggatcatggatttcgccattggggttcttgactttttggttaaggtctttccttcactggaagatgctgctgagtttgggaagattggaaggtactatgcggcggaaagtatgttgcttctggatcccgagaccggagaatacagtgctgagaaaacacctagctatgggaatgatacattggaagagttttttgcaagggttctcagggagggcatggctggtcaagaactaggtgagcaaacaatattttaagatgattgtggttagatatgtatgaacacaataaggcaaatagagcaaccagttttgtttctgtaaatgtatgtattcagctagagtcactgtaatgtttacaagttcaggcattgttgaaagaaattcaagtctctggaaatgaattgttgaagattcattcttc

SEQ ID NO: 57076 - protein, 412 aa, Glycine max
  peptide (1)..(412): Ceres Seq. ID no. 15175776
MSLCYTSNFISLNHQKSFSLTFSSESSPHFINLFPVKPQKPHHPIKFTAERFKLFASLTSSPSVETSPSSYRSKSPKDVNVLVVGSTGYIGKFVVRELVKRGFNVTAIARERSGIKGSVDKDQTLGQLRGANVCFSDVTNLDVFEESLNRLGKSFDVVVSCLASRNGGVKDSWKIDYEATRNSLVAGRKRGASHFVLLSAICVQKPLLEFQRAKLKFEDELVKLAEEDGGFTYSIVRPTAFFKSLGGQVELVKDGKPYVMFGDGKLCACKPISESDLASFIVDCVLSEDKINQVLPIGGPGKALTPLEQGEMLFRLLGKEPKFLKVPIGIMDFAIGVLDFLVKVFPSLEDAAEFGKIGRYYAAESMLLLDPETGEYSAEKTPSYGNDTLEEFFARVLREGMAGQELGEQTIF

SEQ ID NO: 57077 - DNA, 1935 bp, Glycine max
  misc_feature (1)..(1935): Ceres Seq. ID no. 15179918
acagtaactgtaaccgttccaaatttctatgccagcgaggcagagagagaaactagagcgagaaagagagagagcgccacgcaccgttcattccttcgtcctcgccgtttctaaccgtcgcagttttccggcgaagtttctccgatttgtttaaccgaaatggcggatctgtccgttctcggttggattctgtgctccgctctgagcctcttcgcgctctacagcctggccttcggcggagcgagccgtaaccgcgcttcgccggagaagaggaatgagttatcggagaccgtgacgacctccgccggagaatgtagatcagagaaacaccacggcgacgctgacgtcatcattgtcggagccggcgtcgccggcgcctctctggcgcacactctcggcaaggatgggcgtcgggtacacgtcattgaaagagacctgagtgagcctgatcgaattgttggagagttgcttcaacccggtggctatctcaaattaattgagctcggacttgaagattttgtggacaaaattgatgctcagcaagtgtttggttatgcccttttcaaggatgggaaacatactcgtctctcttaccccttggagaagtttcactcggatgtctctggcagaagctttcacaatgggcgctttattcagaggttgcgggagaaagctgcctcacttgccaatgtacgattggagcaaggaacagtcacttccctggttgaagagaagggaacaattaaaggtgtgcaatataagaacaaagatggccaggagttgacaacatatgctcctcttaccattgtttgtgatggttgcttctcaaacttacgccgttctctttgtaatcctaaggtggatattccctcatgttttgttggtttagttttagagaactgtgaacttccatgtgcaaatcatggccatgtcatactgggagacccttcgccgattctattctatcctatcagtagtacagagattcgctgtctggtcgatgtacctggtcagaaggttccttctatatcaaacggtgaaatggaaaagtatttgaagacaatggtggctccacagatccccccccagctttatgatgccttcattgctgctgttgacaaaggcaacataaggacaatgccaaacagaagcatgccagcagatcctcatcctacacccggagcccttctgatgggagatgcattcaacatgcgacatccactaactgggggaggaatgactgtagcattgtctgatattgtggtgctgagaaatcttctaagccctttgtctgacctgaatgatgcacccacactctgtaaataccttgaatcattttataccttgcgtaagcctgtggcatccaccataaatacattggcaggtgctctttacaaagtattttgtgcatcccctgatctggcaaggaaggaaatgcgccaagcttgcttcgattatctcagccttggaggcctattctcggaaggaccagtctctttactttctggattaaaccctcgtcccttgagcttggttctccatttctttgctgttgcaatatacggtgttggccgtctattgttaccatttccttcacctaagagagtatggatcggagcccgattaatctcgggtgcatctgcaatcatccttcccataattaaggccgaagggattcgtcagatgtttttccctgccactgttccagcttattacagaactcctccagttgcacaataaattgagggaaggttgaagttcgtagttctgtaagcattttggcttcttttgtgtgtattctttgtagtctgtagcttgtaatgttttaattgaatgtatcatctctgtctctctctctctctctcctttttggtacactagaaattaaatccatgatattaaactaaattacaatccactctgggcacttaaacc

SEQ ID NO: 57078 - protein, 526 aa, Glycine max
  peptide (1)..(526): Ceres Seq. ID no. 15179919
MADLSVLGWILCSALSLFALYSLAFGGASRNRASPEKRNELSETVTTSAGECRSEKHHGDADVIIVGAGVAGASLAHTLGKDGRRVHVIERDLSEPDRIVGELLQPGGYLKLIELGLEDFVDKIDAQQVFGYALFKDGKHTRLSYPLEKFHSDVSGRSFHNGRFIQRLREKAASLANVRLEQGTVTSLVEEKGTIKGVQYKNKDGQELTTYAPLTIVCDGCFSNLRRSLCNPKVDIPSCFVGLVLENCELPCANHGHVILGDPSPILFYPISSTEIRCLVDVPGQKVPSISNGEMEKYLKTMVAPQIPPQLYDAFIAAVDKGNIRTMPNRSMPADPHPTPGALLMGDAFNMRHPLTGGGMTVALSDIVVLRNLLSPLSDLNDAPTLCKYLESFYTLRKPVASTINTLAGALYKVFCASPDLARKEMRQACFDYLSLGGLFSEGPVSLLSGLNPRPLSLVLHFFAVAIYGVGRLLLPFPSPKRVWIGARLISGASAIILPIIKAEGIRQMFFPATVPAYYRTPPVAQ

SEQ ID NO: 57079 - DNA, 950 bp, Glycine max
  misc_feature (1)..(950): Ceres Seq. ID no. 12608035
agtaactcaaccttcaaacattttgccttttcagctttcattgcccaaccttgtagtgtggccttgctgttttctcaatgagaaaggcttttactctgcaacgcgcacttttgcgcttctctgttgcgttgttgctggttgccagcttcacttgtgctacttctgttatggcaataactgaagtttcagggaatgaagtgaatacagatgggaagcttgtaaatgaagaactagcaaaaacaagccaacaaggatatgacaaagaagcaaaatttaaaggatttttttcaaaacctattccaaaaccaatttctgttgttaagcctattcctattccactatataagtctataccaaaatcaattcccatagtgaaacctatcccaaagtcaattcctaatgaagaagaaaaatttaaaggactttttccaaagcctattcccatagttaagcctattccgaagtcaattcccattgttaagccaatactaaaaccaattcctgttgttaaacctattcctattccagtatacaagtccataccaaaatctgttcctattgttaagcctgtgccaaagttaattccggttgttaaacccataacaaaacccattcctacttttgagccagaatcttttctaaagccgaagcctttctttgaaaaacctgttcctaaattgccactggagcccaaattcaagaaaccacgtattccacattttccggttcaaaagccaatttcaactccaactccataaaactattttgctcagaaagttattcgatccattatctaacgcctatatatctacactaaatatctcaaaattatcagttgcatctgcataatcatcctatcatatttgtgtactgtattggataacatgtggcggatgtaaatcaatattatattaaaatacaagagtcgtattgattttccatttttattt

SEQ ID NO: 57080 - protein, 226 aa, Glycine max
  peptide (1)..(226): Ceres Seq. ID no. 12608036
MRKAFTLQRALLRFSVALLLVASFTCATSVMAITEVSGNEVNTDGKLVNEELAKTSQQGYDKEAKFKGFFSKPIPKPISVVKPIPIPLYKSIPKSIPIVKPIPKSIPNEEEKFKGLFPKPIPIVKPIPKSIPIVKPILKPIPVVKPIPIPVYKSIPKSVPIVKPVPKLIPVVKPITKPIPTFEPESFLKPKPFFEKPVPKLPLEPKFKKPRIPHFPVQKPISTPTP

SEQ ID NO: 57081 - protein, 196 aa, Glycine max
  peptide (1)..(196): Ceres Seq. ID no. 12608037
MAITEVSGNEVNTDGKLVNEELAKTSQQGYDKEAKFKGFFSKPIPKPISVVKPIPIPLYKSIPKSIPIVKPIPKSIPNEEEKFKGLFPKPIPIVKPIPKSIPIVKPILKPIPVVKPIPIPVYKSIPKSVPIVKPVPKLIPVVKPITKPIPTFEPESFLKPKPFFEKPVPKLPLEPKFKKPRIPHFPVQKPISTPTP

SEQ ID NO: 57082 - DNA, 1401 bp, Glycine max
  misc_feature (1)..(1401): Ceres Seq. ID no. 13595727
ctttattgtgcctagaacatcctaatcgaaaaactattcttaagccgaattcgacaacaccgtacagtacttgcttcgacttactgtattgtgcgttgcattgccccttcatcacatcatcaacaacgttcactggtaaatggtgcgtaattttcttctcattgcaagattaactgcatcgttcacacaccacagaagtaccccaatccaattgggttctctgctgcaacacaaacacaatgcttcaatttttttcttcaattccttcacttcaggaatctcttctgattctgaatcagatgatgaaaaccaccacaaaggtgacacctttactgtgtcttacctcatcaactcatgggggttgtccccaaaacgggccagggaactctccaacaggatcaatttgaaaaacccagatggcccaaacgctgttattgatcttctcaacaactatgggtttgaaaaaacccatcttgcaaaacttgtggagagaaagccctcagtgcttcttgcggatgcagagaatacccttttgcctaaactcaagttcttccgttctattgggatttccaacactgacatgcctaaaatcctaattgctagccataatatgttgttcagaagcttgaacaaatgcctcattccacggtatgagatcctaaagagtgtacttcgtgacaaaggggaagttgttagagctttgaaaaatgccccatttagttttacgtatggtgacatgatgaaacgcttggttccaaacattagggttttgagggaatctggtgtgcctcaaggttccatttcttatctgttgatgcattctaggtctctagcttacagggaccattccaaatttgtggaagctgtcaacactgctaaggaatttgggtttaatcctttgagaagaacttttgtcgtgggtgttgaagttcttgccattaagagatgggaatcaaggtttgaggtttatgagaggtgtggctggaaccgcgaaatagctcttcgagcagttcgaaagtttcccagtgttgtgaagttgtcagaggaagtgtttataaaaaaaatgagttttctagtgaaggatatgggttggccatcagaagatattgctgaatatcctcaagttgtaacgtacaacttggagaagaggattatccctagattctcggtaatcaaaatgttgaaatcaaaaggtctgctcaagaataatttgcactttagtggcattatttgcataaccgaggcgaagtttttgaagaaatttgtcattagttttcagaaagatttgcctttcttgccagatttctacaacagtttggcaaatcaacagaatgtattataggctttgaaggcttttgctggtgattgccctaacttccagcttgtctctttcattggacc

SEQ ID NO: 57083 - protein, 400 aa, Glycine max
  peptide (1)..(400): Ceres Seq. ID no. 15221648
MVRNFLLIARLTASFTHHRSTPIQLGSLLQHKHNASIFFFNSFTSGISSDSESDDENHHKGDTFTVSYLINSWGLSPKRARELSNRINLKNPDGPNAVIDLLNNYGFEKTHLAKLVERKPSVLLADAENTLLPKLKFFRSIGISNTDMPKILIASHNMLFRSLNKCLIPRYEILKSVLRDKGEVVRALKNAPFSFTYGDMMKRLVPNIRVLRESGVPQGSISYLLMHSRSLAYRDHSKFVEAVNTAKEFGFNPLRRTFVVGVEVLAIKRWESRFEVYERCGWNREIALRAVRKFPSVVKLSEEVFIKKMSFLVKDMGWPSEDIAEYPQVVTYNLEKRIIPRFSVIKMLKSKGLLKNNLHFSGIICITEAKFLKKFVISFQKDLPFLPDFYNSLANQQNVL

SEQ ID NO: 57084 - protein, 253 aa, Glycine max
  peptide (1)..(253): Ceres Seq. ID no. 15221649
MPKILIASHNMLFRSLNKCLIPRYEILKSVLRDKGEVVRALKNAPFSFTYGDMMKRLVPNIRVLRESGVPQGSISYLLMHSRSLAYRDHSKFVEAVNTAKEFGFNPLRRTFVVGVEVLAIKRWESRFEVYERCGWNREIALRAVRKFPSVVKLSEEVFIKKMSFLVKDMGWPSEDIAEYPQVVTYNLEKRIIPRFSVIKMLKSKGLLKNNLHFSGIICITEAKFLKKFVISFQKDLPFLPDFYNSLANQQNVL

SEQ ID NO: 57085 - protein, 243 aa, Glycine max
  peptide (1)..(243): Ceres Seq. ID no. 15221650
MLFRSLNKCLIPRYEILKSVLRDKGEVVRALKNAPFSFTYGDMMKRLVPNIRVLRESGVPQGSISYLLMHSRSLAYRDHSKFVEAVNTAKEFGFNPLRRTFVVGVEVLAIKRWESRFEVYERCGWNREIALRAVRKFPSVVKLSEEVFIKKMSFLVKDMGWPSEDIAEYPQVVTYNLEKRIIPRFSVIKMLKSKGLLKNNLHFSGIICITEAKFLKKFVISFQKDLPFLPDFYNSLANQQNVL

SEQ ID NO: 57086 - DNA, 1446 bp, Glycine max
  misc_feature (1)..(1446): Ceres Seq. ID no. 15171743
aaaaagaagaagaggagtgtgtgtgtggaagaagaagaagaaggagcatatggagttccaccgcagcgactcatcatcgtccccgtcttcatccacgcccacacccaacaacgccgatcccaataaaacctcttcttcagacccaatgcattcatggtgggaatccgtctctaaagcccgttcacgaatccacgccctcgccgccatcctcccctcctcctcctccgactccctctcctctctcgccgactccgaccgccctgctctctcactcttgtcctcccccgctgcctacgccgccgtctcctcttccctctccggctcccactccgaccccctctgccactggctctacgacaccttcctctcctccgacccccacctccgcctcgtcgtcctctccttcgtccccctcctctctggcctctacctctcccgaatccactcccctgaaccgccgtccctcgccgggttcgaagccgtcctcctcgccctctacgccgccgagaccaaatcccgaaacggcaaacccctcgtggtcacaatccccgacctctcccacccctccatctaccatgcgcccctccgcaaaccccaatcccaaaccctaaccctagcctcaacaccctcggttggactcatttcgccccctttagaaccccagctcggcgtcaaatccaccaagcgcgcctccatcgtcggcgttgcgctacactccttcttctcccagatctcccacatgcccgcctggtccaagctcgaattctgccaattcgccgcagcctgggccggctccgcccactgtccctgccgcaacgagctcgaccgcgatggcaaaatcgaggatttcgccaccgccattgagaacgttcgaattcgcgatggcgattatctggaagaagggaaaggggagaggattcccttgccgtgggagattctgcagccttcgctcagaatcctggggcactgtttattggggcctttgaactctcaggatgtgaaggatgctgcttcctttgcggtgcggtgcttgtacgcccgtgcttcccacgatttggtgccgcaggcaatactcgccactaggagtctcattcagcttgatgtgaggactagagaggctgccagggcgaatgccgccactaactcgaatgccaatacgcccaccaaggccaagaagccggagattcttctggtttccaagtgaggaatggggaggaggttgctgttgctgtgtactattactgtaggtcttcatactgtaagcacaatttgtgtttgtataatagaaacttcatagatgccaattttattttatcttttattatttttttgcttgttctgggttatagtatacatatatatatttatttattttttctaccgagtgattgggtagctgtattggctttgtttcttgatggaaatatgctgagcttcctttgtgtt

SEQ ID NO: 57087 - protein, 400 aa, Glycine max
  peptide (1)..(400): Ceres Seq. ID no. 15171744
KRRRGVCVWKKKKKEHMEFHRSDSSSSPSSSTPTPNNADPNKTSSSDPMHSWWESVSKARSRIHALAAILPSSSSDSLSSLADSDRPALSLLSSPAAYAAVSSSLSGSHSDPLCHWLYDTFLSSDPHLRLVVLSFVPLLSGLYLSRIHSPEPPSLAGFEAVLLALYAAETKSRNGKPLVVTIPDLSHPSIYHAPLRKPQSQTLTLASTPSVGLISPPLEPQLGVKSTKRASIVGVALHSFFSQISHMPAWSKLEFCQFAAAWAGSAHCPCRNELDRDGKIEDFATAIENVRIRDGDYLEEGKGERIPLPWEILQPSLRILGHCLLGPLNSQDVKDAASFAVRCLYARASHDLVPQAILATRSLIQLDVRTREAARANAATNSNANTPTKAKKPEILLVSK

SEQ ID NO: 57088 - protein, 384 aa, Glycine max
  peptide (1)..(384): Ceres Seq. ID no. 15171745
MEFHRSDSSSSPSSSTPTPNNADPNKTSSSDPMHSWWESVSKARSRIHALAAILPSSSSDSLSSLADSDRPALSLLSSPAAYAAVSSSLSGSHSDPLCHWLYDTFLSSDPHLRLVVLSFVPLLSGLYLSRIHSPEPPSLAGFEAVLLALYAAETKSRNGKPLVVTIPDLSHPSIYHAPLRKPQSQTLTLASTPSVGLISPPLEPQLGVKSTKRASIVGVALHSFFSQISHMPAWSKLEFCQFAAAWAGSAHCPCRNELDRDGKIEDFATAIENVRIRDGDYLEEGKGERIPLPWEILQPSLRILGHCLLGPLNSQDVKDAASFAVRCLYARASHDLVPQAILATRSLIQLDVRTREAARANAATNSNANTPTKAKKPEILLVSK

SEQ ID NO: 57089 - protein, 352 aa, Glycine max
  peptide (1)..(352): Ceres Seq. ID no. 15171746
MHSWWESVSKARSRIHALAAILPSSSSDSLSSLADSDRPALSLLSSPAAYAAVSSSLSGSHSDPLCHWLYDTFLSSDPHLRLVVLSFVPLLSGLYLSRIHSPEPPSLAGFEAVLLALYAAETKSRNGKPLVVTIPDLSHPSIYHAPLRKPQSQTLTLASTPSVGLISPPLEPQLGVKSTKRASIVGVALHSFFSQISHMPAWSKLEFCQFAAAWAGSAHCPCRNELDRDGKIEDFATAIENVRIRDGDYLEEGKGERIPLPWEILQPSLRILGHCLLGPLNSQDVKDAASFAVRCLYARASHDLVPQAILATRSLIQLDVRTREAARANAATNSNANTPTKAKKPEILLVSK

SEQ ID NO: 57090 - DNA, 1279 bp, Glycine max
  misc_feature (1)..(1279): Ceres Seq. ID no. 15171717
actgttactgggttgggtcaactctaattacaatgagttatccttcactctcattccaattcgcaccattactctcattttctcttacagcattatccttgccaccattaccggtcttttcgaagcgttactctccatcatcatcttcacctatccccaaagccactccctctcacttattgtcactgttgggttccaaaactcagtcctcagccgtgaatcccgtggtagcacgcggcctcaaattatgcttcaaattcctcgttcctttctctccagtgcagcctcgtcaccggaaattgggtttgggcctgcccaaactcactgtcccaagtcagagagaggagaacgagcttatttggtggccgccagagcccgttttggagctggcgcgtctcgccgtcgattctggcggcgaccccgccgctattcatcgccttcttgacccaaccattatcccgcataggtacctgattgtgaaggatcaaaggaagagcgctgtgagctcaccagaactcgctatggcagacgcttcgtttgaactgaacctgtatctgcagtttttgtttgaactcattgttgatcgaggtccatctgttgggttggatgttgccttgaaccggtttgatctgttccatggtcacctttttctagcgctagactctggaagacttggtatcttattccatgcgaaggaatacccagcatatgataagcaagtgttcccgtacaatatgggtttttgtcagagagggtccaatgtgacatatgatgattcaatgaatctgagaaatattctctggctggctccaatgcttggcgattctggtgaattttgggtggcaccaggtgttcttgtagtgctggatgcttgtcccgatggaatcatatacagagatctaatacccgattatgtaaattttgcaaggactatatatgaagatgatcttggggatgttgctgttgatgtgaactacttgaatgttggatctgaaaccagaaattatcaaatattcatatgctgatgttgggttcgagatatggcgcatgttcacttcccagtgatacaccagcttatataaatgaagattgccgaagcttaaacgaataatgtatatgccaacttcatttgtagtgaagattgcatagcatatttcttccaatatgataggttacttgatagctatgtcaggtactgtatatgcttgtgcaattattggctaacatgacaggtgccgcggatgttgacgtgggttcatgcacttgattgattttgcgt

SEQ ID NO: 57091 - protein, 340 aa, Glycine max
  peptide (1)..(340): Ceres Seq. ID no. 15171718
CYWVGSTLITMSYPSLSFQFAPLLSFSLTALSLPPLPVFSKRYSPSSSSPIPKATPSHLLSLLGSKTQSSAVNPVVARGLKLCFKFLVPFSPVQPRHRKLGLGLPKLTVPSQREENELIWWPPEPVLELARLAVDSGGDPAAIHRLLDPTIIPHRYLIVKDQRKSAVSSPELAMADASFELNLYLQFLFELIVDRGPSVGLDVALNRFDLFHGHLFLALDSGRLGILFHAKEYPAYDKQVFPYNMGFCQRGSNVTYDDSMNLRNILWLAPMLGDSGEFWVAPGVLVVLDACPDGIIYRDLIPDYVNFARTIYEDDLGDVAVDVNYLNVGSETRNYQIFIC

SEQ ID NO: 57092 - protein, 330 aa, Glycine max
  peptide (1)..(330): Ceres Seq. ID no. 15171719
MSYPSLSFQFAPLLSFSLTALSLPPLPVFSKRYSPSSSSPIPKATPSHLLSLLGSKTQSSAVNPVVARGLKLCFKFLVPFSPVQPRHRKLGLGLPKLTVPSQREENELIWWPPEPVLELARLAVDSGGDPAAIHRLLDPTIIPHRYLIVKDQRKSAVSSPELAMADASFELNLYLQFLFELIVDRGPSVGLDVALNRFDLFHGHLFLALDSGRLGILFHAKEYPAYDKQVFPYNMGFCQRGSNVTYDDSMNLRNILWLAPMLGDSGEFWVAPGVLVVLDACPDGIIYRDLIPDYVNFARTIYEDDLGDVAVDVNYLNVGSETRNYQIFIC

SEQ ID NO: 57093 - DNA, 1443 bp, Glycine max
  misc_feature (1)..(1443): Ceres Seq. ID no. 14316532
ttttttttctgcaaacaaatcaaccctcaaatttccttttgcttcctagaaagatttagttcccggaagcttctctctttgcacttgcatgatttgatctccgccgtggattcgtgatggtgattttatgaacttcctcctctgccccctctttccttttctgattatcattatttttatatttaactagagagagagactcatccttccttcgagacatgagatgaggccgatgcaactgccaccgccttccgcttccggggccaaccctgcccctgccaccaccaacaacaacaacaaggagcagcgtccccagcgccgccgcaaggacctcacgctgccgctgccgcagcgagacaccaacttggcggtgccacttcctctgccgccatcgacggcgcctgctgcggcggcgagcggcggagcgagccagcaggcggcgcagcaggtgatccctttctcggagctggagagactgaaccgcatcgggagcgggagcggcgggacggtgtacaaggtggtccaccgcacgagcgggcgcgtgtacgcgctgaaggtgatatacggtcaccacgaggagtcggtgcggcggcagatccaccgggaaatccagatcctccgtgacgtggacgatgcgaacgtggtgaagtgtcacgagatgtacgatcagaacagcgaaatccaggtgctgctggagttcatggacggaggttctctggaggggaaacacatcacgcaggagcagcagctggcagatctgtctcggcagattcttagggggctggcgtacctgcaccggcggcacatcgtccacagggacatcaagccgtcgaatctgcttataaactcgcggaagcaggtgaagatcgctgacttcggggtgggtcggatactgaatcagacgatggatccgtgcaattcgtcggtggggacgatcgcctacatgagtccggagaggatcaatacggacataaacgacgggcaatacgacgcgtacgcaggggacatatggagctttggggttagcatactggagttctacatgggaaggttccccttcgcggttgggaggcagggcgattgggccagtctcatgtgcgccatttgtatgtctcagcctcccgaggctcctccttctgcttcccctcacttcaaggacttcatcttgcgctgtcttcagcgcgatccctctcgccgctggtctgcttccaggttgctcgaacaccccttcattgctccgccgctgcccaaccacaatcagactcctccaaacctccatcagctactccctcctccgccaaggcctcttccctcctagtatgatggatccttctacatgcctattgcctattgcctagctagctagccctgtgtgccgctttattttcattttcattttcattttcatacagaatcaaatcttaatattggattttcagccgt

SEQ ID NO: 57094 - protein, 364 aa, Glycine max
  peptide (1)..(364): Ceres Seq. ID no. 14316533
MRPMQLPPPSASGANPAPATTNNNNKEQRPQRRRKDLTLPLPQRDTNLAVPLPLPPSTAPAAAASGGASQQAAQQVIPFSELERLNRIGSGSGGTVYKVVHRTSGRVYALKVIYGHHEESVRRQIHREIQILRDVDDANVVKCHEMYDQNSEIQVLLEFMDGGSLEGKHITQEQQLADLSRQILRGLAYLHRRHIVHRDIKPSNLLINSRKQVKIADFGVGRILNQTMDPCNSSVGTIAYMSPERINTDINDGQYDAYAGDIWSFGVSILEFYMGRFPFAVGRQGDWASLMCAICMSQPPEAPPSASPHFKDFILRCLQRDPSRRWSASRLLEHPFIAPPLPNHNQTPPNLHQLLPPPPRPLPS

SEQ ID NO: 57095 - protein, 361 aa, Glycine max
  peptide (1)..(361): Ceres Seq. ID no. 14316534
MQLPPPSASGANPAPATTNNNNKEQRPQRRRKDLTLPLPQRDTNLAVPLPLPPSTAPAAAASGGASQQAAQQVIPFSELERLNRIGSGSGGTVYKVVHRTSGRVYALKVIYGHHEESVRRQIHREIQILRDVDDANVVKCHEMYDQNSEIQVLLEFMDGGSLEGKHITQEQQLADLSRQILRGLAYLHRRHIVHRDIKPSNLLINSRKQVKIADFGVGRILNQTMDPCNSSVGTIAYMSPERINTDINDGQYDAYAGDIWSFGVSILEFYMGRFPFAVGRQGDWASLMCAICMSQPPEAPPSASPHFKDFILRCLQRDPSRRWSASRLLEHPFIAPPLPNHNQTPPNLHQLLPPPPRPLPS

SEQ ID NO: 57096 - protein, 219 aa, Glycine max
  peptide (1)..(219): Ceres Seq. ID no. 14316535
MYDQNSEIQVLLEFMDGGSLEGKHITQEQQLADLSRQILRGLAYLHRRHIVHRDIKPSNLLINSRKQVKIADFGVGRILNQTMDPCNSSVGTIAYMSPERINTDINDGQYDAYAGDIWSFGVSILEFYMGRFPFAVGRQGDWASLMCAICMSQPPEAPPSASPHFKDFILRCLQRDPSRRWSASRLLEHPFIAPPLPNHNQTPPNLHQLLPPPPRPLPS

SEQ ID NO: 57097 - DNA, 1436 bp, Glycine max
  misc_feature (1)..(1436): Ceres Seq. ID no. 15168352
caccttccctcccctgttcaaaataccattaccatatcaaaaaccttaaccccattaattcataccctccccaccttcccccccgacacataacagctttcgaaccaaacctgttccttcttccttaatggccacaaacatcctccaagcaaaatggaaccaccactccgaagaagacgaagatcacaaagacaatgagcaacaagaagaagaagaagaagataatgaagcattgtcactctgcgatcttccgatcaacctcgaggacccaccgggaaaccaagaacactctcgccccaacgaaacatcgcaagaagaattcaatttccggttatggcgtgctccctttaacaaagagcccgaaatgtgtgcagcggatgaagtcttcttcaagggccaaatcctcccgttgcgcgtctcgttcagctccgaggccgggttgttagccacggtgtcccaatctcaacaacattacggtaagcaattcgttaggtcagaatcgttggatcgcaattctagcgattatcgtagtagtagtaatagtagtagaagtagtagtctcagaagtcaaaactcttccactagcactagcactagctccacaaccacaaacacaacaattcccaaaagtaagcacaaaattcgaaaccaatttcacacgcacccaagtcccaaaccgcaattaagagcatcagctccaacacacaaccaaggtagaaaatccacgtcagcatggggaattttccgtttaggtgttgtccctgctcccgagatagggttacaagatctcaaggttcgaaaccgaaactgcgtcgtcgtcagtcgtaatagtagtaatagtaacagtaacaacaacaacaacagttcgaaaagtgtcaaaacaagtaacaggaacaacaagaagggcagcagcaattacaataatgttttgaaacagttagtgggcaaaggcggtggtctattgagtggttgtgattgttcctttgaaacagtgcaacccaacaacattgtcatgataaaaggtggtaatggtaatagtggtggtggtaccgctaaaagcacgaacatgacagaaagtacaacgcacgccgcgaaagaaaaagtggtcgagtttaagaagcacaagcagcaaaagcagggaaagaaggttacgtcacgtcgccgaacgtttgaatggataaaggagcttcatgcaagccaacctgatgatgaagaggctttgttatcaaacgcatcatgagtggttccgtcgcatgcttaattggagtttactttaagattcttagattagatttagattagattgggtttagattgcctttcatttgaatattaaattttataatattgtagtgcaggtgctgtaacaaaaagttcttgctttctcgcgaggacgaggctgtaatttatttatttttattattttcattttctcc

SEQ ID NO: 57098 - protein, 370 aa, Glycine max
  peptide (1)..(370): Ceres Seq. ID no. 15168353
MATNILQAKWNHHSEEDEDHKDNEQQEEEEEDNEALSLCDLPINLEDPPGNQEHSRPNETSQEEFNFRLWRAPFNKEPEMCAADEVFFKGQILPLRVSFSSEAGLLATVSQSQQHYGKQFVRSESLDRNSSDYRSSSNSSRSSSLRSQNSSTSTSTSSTTTNTTIPKSKHKIRNQFHTHPSPKPQLRASAPTHNQGRKSTSAWGIFRLGVVPAPEIGLQDLKVRNRNCVVVSRNSSNSNSNNNNNSSKSVKTSNRNNKKGSSNYNNVLKQLVGKGGGLLSGCDCSFETVQPNNIVMIKGGNGNSGGGTAKSTNMTESTTHAAKEKVVEFKKHKQQKQGKKVTSRRRTFEWIKELHASQPDDEEALLSNAS

SEQ ID NO: 57099 - protein, 291 aa, Glycine max
  peptide (1)..(291): Ceres Seq. ID no. 15168354
MCAADEVFFKGQILPLRVSFSSEAGLLATVSQSQQHYGKQFVRSESLDRNSSDYRSSSNSSRSSSLRSQNSSTSTSTSSTTTNTTIPKSKHKIRNQFHTHPSPKPQLRASAPTHNQGRKSTSAWGIFRLGVVPAPEIGLQDLKVRNRNCVVVSRNSSNSNSNNNNNSSKSVKTSNRNNKKGSSNYNNVLKQLVGKGGGLLSGCDCSFETVQPNNIVMIKGGNGNSGGGTAKSTNMTESTTHAAKEKVVEFKKHKQQKQGKKVTSRRRTFEWIKELHASQPDDEEALLSNAS

SEQ ID NO: 57100 - DNA, 1292 bp, Glycine max
  misc_feature (1)..(1292): Ceres Seq. ID no. 15168537
acttcccattttattcttcatttcactgacaccacactttatttacatcttcgtatttccctttcctcgaaacttaattagaactcaaaatatagaaaaataagacaacatattaattcgtcgtgttcctcatcatgttcctatttgaggatctctggtccctcccgcgcctcttctcagagtcgcttaatttacagtctttacgcgaatcctttacgagctcgagctgtgacagaacggagtcggagcaatgccgcgacgagtcggcggcgatggttctgaaattcgtggcggtggcgtcgattctggtcgccggattcgggggagtctcgattccgctggtcgggaagtcgcggcggtttcttcgaccggacggcgacgttttcgcggcggcgaaggcgttcgcggcgggggtgattttagcgacggggttcgtccacatgctgagggactcgtgggacgcgcttcgggagccgtgcttggggacgcactcgcgcgcgtgggcgaagtttcccttcaccggtttcttcgccatggtgtcagcgctctttactctactggttgactttttagcgacggaatattacgagcgcagagaggcgcgtgggcgcgtggagcgagggaaggttgttgattatgatgaaggttgtgacgaggcgttgttggaaacgggaatcgtggaggttaaggatcttgggcgagggggaagacactcccactctcacgacggcgatgatgtggaaagtagtgttcgacacgtcgtcgtttcacaggtattggaacttgggattgtatcacattcgatgataattgggttatctctaggagtttcacaaagtccctgtaccatgaaacccctaattgtggcattatccttccatcaattctttgaaggatttgcacttggtggttgcatctcccaagcccaattcaagaccttatcagcaacaataatgtcatgtttttttgcactaacaacgccacttggtgttgctattggagctagtgttgcttcaatttttaacccttacagtccagtagcactcatcactgaaggcatcttggacgccttgtcagctgggattttagtgtatatggctttagtggacttaatagctgcagattttcttagcaagaaaatgcgttgtaactttaggtttcagataatatgttactgtctgcttttccttggggctggattgatgtcttcacttgcaatttgggcatgatactttcctatgttgctgtaaattatttttcaattaatgttgatatataggtttattgttttc

SEQ ID NO: 57101 - protein, 364 aa, Glycine max
  peptide (1)..(364): Ceres Seq. ID no. 15168538
MFLFEDLWSLPRLFSESLNLQSLRESFTSSSCDRTESEQCRDESAAMVLKFVAVASILVAGFGGVSIPLVGKSRRFLRPDGDVFAAAKAFAAGVILATGFVHMLRDSWDALREPCLGTHSRAWAKFPFTGFFAMVSALFTLLVDFLATEYYERREARGRVERGKVVDYDEGCDEALLETGIVEVKDLGRGGRHSHSHDGDDVESSVRHVVVSQVLELGIVSHSMIIGLSLGVSQSPCTMKPLIVALSFHQFFEGFALGGCISQAQFKTLSATIMSCFFALTTPLGVAIGASVASIFNPYSPVALITEGILDALSAGILVYMALVDLIAADFLSKKMRCNFRFQIICYCLLFLGAGLMSSLAIWA

SEQ ID NO: 57102 - protein, 318 aa, Glycine max
  peptide (1)..(318): Ceres Seq. ID no. 15168539
MVLKFVAVASILVAGFGGVSIPLVGKSRRFLRPDGDVFAAAKAFAAGVILATGFVHMLRDSWDALREPCLGTHSRAWAKFPFTGFFAMVSALFTLLVDFLATEYYERREARGRVERGKVVDYDEGCDEALLETGIVEVKDLGRGGRHSHSHDGDDVESSVRHVVVSQVLELGIVSHSMIIGLSLGVSQSPCTMKPLIVALSFHQFFEGFALGGCISQAQFKTLSATIMSCFFALTTPLGVAIGASVASIFNPYSPVALITEGILDALSAGILVYMALVDLIAADFLSKKMRCNFRFQIICYCLLFLGAGLMSSLAIWA

SEQ ID NO: 57103 - protein, 262 aa, Glycine max
  peptide (1)..(262): Ceres Seq. ID no. 15168540
MLRDSWDALREPCLGTHSRAWAKFPFTGFFAMVSALFTLLVDFLATEYYERREARGRVERGKVVDYDEGCDEALLETGIVEVKDLGRGGRHSHSHDGDDVESSVRHVVVSQVLELGIVSHSMIIGLSLGVSQSPCTMKPLIVALSFHQFFEGFALGGCISQAQFKTLSATIMSCFFALTTPLGVAIGASVASIFNPYSPVALITEGILDALSAGILVYMALVDLIAADFLSKKMRCNFRFQIICYCLLFLGAGLMSSLAIWA

SEQ ID NO: 57104 - DNA, 728 bp, Glycine max
  misc_feature (1)..(728): Ceres Seq. ID no. 12563124
gtgccagtcttacccctcttaataccaattttctagggtttatacaattttcgatggcttcttcagatgttgagtaccgttgctttgtcggtgggctcgcttgggccactgacgaccaagctctcgagagagccttctctcagtacggcgaaatcgttgaaacgaagattatcaacgatcgtgagactggaagatccaggggttttggatttgtgaccttcgcctcggagcagtccatgaaagacgccatcgaagggatgaacggccaaaaccttgacggccgtaacatcactgttaacgaagctcagtcccgtggtggcggtggcggcggaggcggtggaggtggtggatatggtggtggtcgcggtggtggatatggtggtggtggtcgcggtggtggagggggatacaaccgtagcggtggcggtggaggctatggcggcggcggtggatatggcggtggcggtggcggtggctatggcggtggcagagaccgtggttatggtggtggtggtgaccgtggttactctcgtggtggtgacggtggtgatggaggctggagaaactagggcttgatgtcgttgattagggtttatgattatgctcagtaattttagttgtgtttgagtttgagtatctttatggttttgtgtcaccgtggttcttgtttttgaccaatatatctggttgtttatagtcgatttaatgaaatgataatcagaaattgg

SEQ ID NO: 57105 - protein, 188 aa, Glycine max
  peptide (1)..(188): Ceres Seq. ID no. 12563125
ASLTPLNTNFLGFIQFSMASSDVEYRCFVGGLAWATDDQALERAFSQYGEIVETKIINDRETGRSRGFGFVTFASEQSMKDAIEGMNGQNLDGRNITVNEAQSRGGGGGGGGGGGGYGGGRGGGYGGGGRGGGGGYNRSGGGGGYGGGGGYGGGGGGGYGGGRDRGYGGGGDRGYSRGGDGGDGGWRN

SEQ ID NO: 57106 - protein, 171 aa, Glycine max
  peptide (1)..(171): Ceres Seq. ID no. 12563126
MASSDVEYRCFVGGLAWATDDQALERAFSQYGEIVETKIINDRETGRSRGFGFVTFASEQSMKDAIEGMNGQNLDGRNITVNEAQSRGGGGGGGGGGGGYGGGRGGGYGGGGRGGGGGYNRSGGGGGYGGGGGYGGGGGGGYGGGRDRGYGGGGDRGYSRGGDGGDGGWRN

SEQ ID NO: 57107 - protein, 110 aa, Glycine max
  peptide (1)..(110): Ceres Seq. ID no. 12563127
MKDAIEGMNGQNLDGRNITVNEAQSRGGGGGGGGGGGGYGGGRGGGYGGGGRGGGGGYNRSGGGGGYGGGGGYGGGGGGGYGGGRDRGYGGGGDRGYSRGGDGGDGGWRN

SEQ ID NO: 57108 - DNA, 1192 bp, Glycine max
  misc_feature (1)..(1192): Ceres Seq. ID no. 14312262
ttctttccttcattccaaaccacacccaccacttcttccgatcagatgtccgacgatcactggatcaaggtcgccatggctgacgattctctcgtcgtcgaccttctcctccgcctccaccgccctccaccgccgccaccgccctgtctaaacctccactggacggtgcgtcagcggcgctccagatctgctcacaacaaagcggagtccaccagggccagccccaccacgccgctttcctggagcggcgccacgtcagcaagcggcggcaacctcgatggctatgaggagtacagccgcccaagcaaaccaacccaaacctcaagatctaaggttgctaatcccagcgaaacaaccactaccagaaagaccaggagaaaaaagaccttagctgaactaaaagcggaggaggatttgttgctgaaagaaagaagaaatttgaaaaaagaactggcattcttgcgtctcactgttgagaaacatagagccacaaatgaaagcataaagagaaagaagcttgattttgagtcacggcagaattctagtgctgctgctacggcctctgaggtgtctgggaaagctgtgaatggctcatttcaatttgtaaaagcagagtgtcatccatctaattcagtctcacatgacgattcacctgtttgtgcagcaaatgtttctcccaaagcacaagataatattggtaaccaagaatctacattcgtgctccctgatctaaatttgcctgtcgatgaggatatcagcgccaatatcatgcattatattgaactaagctaataaaggataggatctcgaatgacattccgcatactgataagttagacgaacatcatcttgcaagtatgcctaatagtcgtaatagtataaggtatagcatgtcagtcctaacaaattagattttgctactgtaattgtagatgttaaaccattcactttttccacttggtcaaaactgatgtggaaattgtttttttcttcttttttttttcattcatgaaactgagggtagtgtagaaatcctaacacatcaggcttagttccattctttttttcttcacaggtttctacattatccaaaattctttgtggcaaccctcgaccgtcctttattatagatatattttctgataaatgtaattaggtgttctatagataattcaagaattttggttctttt

SEQ ID NO: 57109 - protein, 263 aa, Glycine max
  peptide (1)..(263): Ceres Seq. ID no. 14312263
FFPSFQTTPTTSSDQMSDDHWIKVAMADDSLVVDLLLRLHRPPPPPPPCLNLHWTVRQRRSRSAHNKAESTRASPTTPLSWSGATSASGGNLDGYEEYSRPSKPTQTSRSKVANPSETTTTRKTRRKKTLAELKAEEDLLLKERRNLKKELAFLRLTVEKHRATNESIKRKKLDFESRQNSSAAATASEVSGKAVNGSFQFVKAECHPSNSVSHDDSPVCAANVSPKAQDNIGNQESTFVLPDLNLPVDEDISANIMHYIELS

SEQ ID NO: 57110 - protein, 248 aa, Glycine max
  peptide (1)..(248): Ceres Seq. ID no. 14312264
MSDDHWIKVAMADDSLVVDLLLRLHRPPPPPPPCLNLHWTVRQRRSRSAHNKAESTRASPTTPLSWSGATSASGGNLDGYEEYSRPSKPTQTSRSKVANPSETTTTRKTRRKKTLAELKAEEDLLLKERRNLKKELAFLRLTVEKHRATNESIKRKKLDFESRQNSSAAATASEVSGKAVNGSFQFVKAECHPSNSVSHDDSPVCAANVSPKAQDNIGNQESTFVLPDLNLPVDEDISANIMHYIELS

SEQ ID NO: 57111 - protein, 238 aa, Glycine max
  peptide (1)..(238): Ceres Seq. ID no. 14312265
MADDSLVVDLLLRLHRPPPPPPPCLNLHWTVRQRRSRSAHNKAESTRASPTTPLSWSGATSASGGNLDGYEEYSRPSKPTQTSRSKVANPSETTTTRKTRRKKTLAELKAEEDLLLKERRNLKKELAFLRLTVEKHRATNESIKRKKLDFESRQNSSAAATASEVSGKAVNGSFQFVKAECHPSNSVSHDDSPVCAANVSPKAQDNIGNQESTFVLPDLNLPVDEDISANIMHYIELS

SEQ ID NO: 57112 - DNA, 1484 bp, Glycine max
  misc_feature (1)..(1484): Ceres Seq. ID no. 14315399
ataatatagttcaggcattatggagagagttgtatactccagggaaacaacctgagaaagtgtgcacctcggtcaaaaaacctgccggcactcgtatctgtgacaccgtgttcaattcggatccaaaaatctgatttatcgggtctcttcccaactcccccacctccaaccaacttccaccagtagtaaacagaaatacaagcataagcaaaagaagacccgcgacacatcgcaacatcgtatcatgtctgcaacaaacgtccccaaagtgctgttacaactacaaccaccctccaaatcgaacccactctgcgtgccggtgataggactcggcaccgccgcggtccacaacgacggtgacacggtgaaggctgcagtcatagaggctatcaaactcggttacagacacttcgacaccgcggcacagtacggatcggagcaggctcttggagaagccattgccgaagcacttcgggttggtctcatagcctcaagagacgagcttttcatcacttccaagttatggtgttgtgataatcatccccatcttgttcttcctgctctacaaaattcgcttcggtctcttaaattagattatttggacctatatttaattcattggccaattactgcaaagcctggaatgtgggagatgccttattctgaagagagccttgttccatttgacttaaagagtgtgtgggcagcaatggaagaatgtcacaaacttggccttaccaaatcaattggagttagcaacttctcttgcaagaaacttgaaaatcttctctcttttgctacaattcctccttctgtcaatcaagtggagatgaatattgcctggcagcaaaagaatcttagagcatactgcaaggcaaagggtataattgtgactgcctactctcctttgggagccaaagggagcaaatgggatatcaatcaaattttggacaatgaattgaccaagcagattgcacaggctcatggcaaaactgcagctcaggtatgtcttagatggttatttgagcaaggtgtgactttcataccaaagagctacaataaagagagattaaaggaaaatttagagatatttgattggtcactcaccaaagatgaccatgaaaagattaatcaagtcaaacaggagcgtatgttcaagtacggaacagcagcattcccgcttcctgatctatttgatggggaaacttagtaatacattatcagcttcaatattccattttccttgggatttaggtttctcgtgtctgtgacacaataaaaggatgaagtgtaatctgtctttagaatacccttaaagaaactcaaaattgaaatcactggtttcactttttgtgggaagtttgtttacagcaatgttatgcttttcttccatgtaattttatgtgctacactgttttatctgttgaaatgtaattgtaattcaagctacaggcatccaataaaaactagactgtttatagttt

SEQ ID NO: 57113 - protein, 321 aa, Glycine max
  peptide (1)..(321): Ceres Seq. ID no. 14315400
MSATNVPKVLLQLQPPSKSNPLCVPVIGLGTAAVHNDGDTVKAAVIEAIKLGYRHFDTAAQYGSEQALGEAIAEALRVGLIASRDELFITSKLWCCDNHPHLVLPALQNSLRSLKLDYLDLYLIHWPITAKPGMWEMPYSEESLVPFDLKSVWAAMEECHKLGLTKSIGVSNFSCKKLENLLSFATIPPSVNQVEMNIAWQQKNLRAYCKAKGIIVTAYSPLGAKGSKWDINQILDNELTKQIAQAHGKTAAQVCLRWLFEQGVTFIPKSYNKERLKENLEIFDWSLTKDDHEKINQVKQERMFKYGTAAFPLPDLFDGET

SEQ ID NO: 57114 - protein, 188 aa, Glycine max
  peptide (1)..(188): Ceres Seq. ID no. 14315401
MWEMPYSEESLVPFDLKSVWAAMEECHKLGLTKSIGVSNFSCKKLENLLSFATIPPSVNQVEMNIAWQQKNLRAYCKAKGIIVTAYSPLGAKGSKWDINQILDNELTKQIAQAHGKTAAQVCLRWLFEQGVTFIPKSYNKERLKENLEIFDWSLTKDDHEKINQVKQERMFKYGTAAFPLPDLFDGET

SEQ ID NO: 57115 - protein, 185 aa, Glycine max
  peptide (1)..(185): Ceres Seq. ID no. 14315402
MPYSEESLVPFDLKSVWAAMEECHKLGLTKSIGVSNFSCKKLENLLSFATIPPSVNQVEMNIAWQQKNLRAYCKAKGIIVTAYSPLGAKGSKWDINQILDNELTKQIAQAHGKTAAQVCLRWLFEQGVTFIPKSYNKERLKENLEIFDWSLTKDDHEKINQVKQERMFKYGTAAFPLPDLFDGET

SEQ ID NO: 57116 - DNA, 1445 bp, Glycine max
  misc_feature (1)..(1445): Ceres Seq. ID no. 15168443
ttagtttgggtggaaatatcatttcccttttctattagaatttttcacttccaccgcattctctgaagaaacctcttgcactgtggacgcagcctccgccgcggggcattaccgccattgaagctgattcatgcttttttcaccgttcctcacaagaccaggtttgaagctattgccattggaaattaggacttcttttttgttactgaaaaattagagtagacaaaaaatgctcagacggaggctatctgttctctcaacatcaatcaccagaagctcaaattatagcaaacccagtctcggatacccatctatccaatctcatccctttcagctccctcactctcccagtgcttatcaaataattagtcctaatgcattcccggattttcaaggttttagagcttacagtcttctgagcttgaatgatctgagagataaggttcccagaaaacagccgacgaggaaggggcgtgggattgggtctggaaagggcaagactgcagggaggggtcacaagggtcagagagccagaaaaggtataaaattggggttcgaaggaggtcagacccctcttcgccgaagattacccaaacgtgggttcaagaacccatttagcctcacttttcagccaataggtttggggaaaattgcaaagtttattaatgctgggaagatagattcttctgaactgattacaatgaaaacactaaaggatgcaggggtactagggaagcaaatgaaagatggagtaagattgatggggcgtggttctgagcagatcaagtggccaattcatctagaggtatcaagggttactgttagggctaaggaagcagttgaagcagctggtgggtctgtgagaagggtgtattacaataagttgggcttgaaggcactggtgaagcctgagtggtttgaaaagaaaggaagattgctgcctaaagcagctagacctcctccaaagcaaaaggataaagttgatagcattggtcggttgcctgccccaacaaagccatttccatttttagttgaagcaagcaaggatcttccagttcagcatcttagttgaataactaacatttttggcaccagtttttaggattttgtaattctgtgtggtgcaaacgtctgactcacaagtttttcatgcagttcttgcaaatgctcaggtagttaattcaagaatgagataaatgaatttccttggggacaaatgaaagggagaatcttgtttattatttaatttcttttaaggatttgatcttcgtcactcagttgaaaagagagccttagtttcttgtgtatgtgtgcttggagtaggatcttagccccttcatgaagggaaaattgcaagaacagtctgcaatgtttaacttttctccggatatggatggtacttgtcaaatgacttggctgaattttaataaatggacgattgttcc

SEQ ID NO: 57117 - protein, 280 aa, Glycine max
  peptide (1)..(280): Ceres Seq. ID no. 15168444
MLRRRLSVLSTSITRSSNYSKPSLGYPSIQSHPFQLPHSPSAYQIISPNAFPDFQGFRAYSLLSLNDLRDKVPRKQPTRKGRGIGSGKGKTAGRGHKGQRARKGIKLGFEGGQTPLRRRLPKRGFKNPFSLTFQPIGLGKIAKFINAGKIDSSELITMKTLKDAGVLGKQMKDGVRLMGRGSEQIKWPIHLEVSRVTVRAKEAVEAAGGSVRRVYYNKLGLKALVKPEWFEKKGRLLPKAARPPPKQKDKVDSIGRLPAPTKPFPFLVEASKDLPVQHLS

SEQ ID NO: 57118 - DNA, 1195 bp, Glycine max
  misc_feature (1)..(1195): Ceres Seq. ID no. 14316543
atcgtcaaggaaaactaagttcttcagtcttgacttgagtgctttgagttcatggatccaatccaacacaagttcgtcaacgttggtgctctcaagctccacgtcgcagaaaccggaaccggtccaaacgccgtcgtattcctgcacggcttcccggagatatggtactcgtggcggcaccagatgatagctctcgccggtgccggattcagagcggtttccttcgattacagaggttacggtctctccgacccgccacccgaacccgataagacctcttggtccgatcttctcagtgatctccttcatattcttgatgctcttgctctttctaaggtgtttcttgttgggaaagactttggagctcgtcctgcatatctattttcaattcttcaccctgaaagggtcttgggagttgtcacgttgggagttccatatgttcccccaggcccctctcagtatcacaaattccttcctgaaggcttctacattttgagatggcaggaacctggaagggcagaagctgattttggacgctttgatgcaaagactgttgtgcgaaatatttacatcctcttctcaagaagtgaaataccaatagctaatgaaaaccaggagatcatggatttggtggaacctgatactccgcttcccacttggttcacagaggaagatcttgcaacatacggagccttgtatgagaaatctggattccaaactgcattgcagattccatataggtcattaggtgaagtgcttagcttgccagatcctgtggttaaagttccggcatttctgataatgggtggcaaggattatgttctgaaatttccagggattgaagatttaacaaagggtgaaaaagcaaaatggtttgttccaaacttggaggttacatttatcccggagggaacccattttgttcaagaacagtttcccgagaaggtgaatcagcttattcttgacttccttgccaagcacacttgatattggactgtcgtcatgaatggtgtatgtggattgtgaactgtgggaaaatcagacaaagtgcagcacaaaatgatcgattgctgaagctaaatgatgcaaagcttgctggtagagctttgttagatgaatttcttgtacaaagaattcgtgaaatatgcgactgagttgtctagctaataaataaataaccggtttcttagttaac

SEQ ID NO: 57119 - protein, 311 aa, Glycine max
  peptide (1)..(311): Ceres Seq. ID no. 14316544
MDPIQHKFVNVGALKLHVAETGTGPNAVVFLHGFPEIWYSWRHQMIALAGAGFRAVSFDYRGYGLSDPPPEPDKTSWSDLLSDLLHILDALALSKVFLVGKDFGARPAYLFSILHPERVLGVVTLGVPYVPPGPSQYHKFLPEGFYILRWQEPGRAEADFGRFDAKTVVRNIYILFSRSEIPIANENQEIMDLVEPDTPLPTWFTEEDLATYGALYEKSGFQTALQIPYRSLGEVLSLPDPVVKVPAFLIMGGKDYVLKFPGIEDLTKGEKAKWFVPNLEVTFIPEGTHFVQEQFPEKVNQLILDFLAKHT

SEQ ID NO: 57120 - protein, 267 aa, Glycine max
  peptide (1)..(267): Ceres Seq. ID no. 14316545
MIALAGAGFRAVSFDYRGYGLSDPPPEPDKTSWSDLLSDLLHILDALALSKVFLVGKDFGARPAYLFSILHPERVLGVVTLGVPYVPPGPSQYHKFLPEGFYILRWQEPGRAEADFGRFDAKTVVRNIYILFSRSEIPIANENQEIMDLVEPDTPLPTWFTEEDLATYGALYEKSGFQTALQIPYRSLGEVLSLPDPVVKVPAFLIMGGKDYVLKFPGIEDLTKGEKAKWFVPNLEVTFIPEGTHFVQEQFPEKVNQLILDFLAKHT

SEQ ID NO: 57121 - DNA, 1031 bp, Glycine max
  misc_feature (1)..(1031): Ceres Seq. ID no. 13594220
atcatgatcaataacagtcttaaaaaaagaagtttgaagacctatttagaaaatttcaaatcgtttagggccagttgagtagtttaacgatttttgaattacacctgaacaccaggtacgtaaaaaataaaacaaaacaaaaacacttcctcttcctcctttcccccgaaaaacccttaaaccacgaccttcatatttgcagtgctagtctgtttatttcttcagctatgtttttgtcaagaacacttggacgaacactctttgctgctgctgccagatcaaaacaatatgccactacagcagctgctgctagcagagaaggacacaacccccttcaggagttttttgaggcagacaggagccctgaagatgacaaacctgttgtttatggtcggagttggaaggcgtgtgaactgcgtctgaagtcttgggatgaccttcataagttgtggtatgtgttgttaaaggaaaagaacatgttgatgactcaacgtcaaatgcttaatgcacagaacctgcgttttcctaacccagagcgcatccctaaggtgaggaagtcaatgtgtcgcatcaagcatgtacttactgagagagcaattgaagaaccagatccgaggaggtctgctgagatgaagagaatgataaatgctctttgatggcttaaaatggacctgttcctttagtagcattactgggtatgttgttagaataggacctctacatttgcggatgtaaggttgctaacttgaagcattgtcctaatatattgtttacgaaggagtttacctgtgaatgatttctatttcttgataaagtgttaagtgggttacatcccaaatattttgctgtcctaatttctatttcctacttttagatgtatcaagcaaacaagtgttatcatattatcgtgttagaggttatgcaaaatgttagggaggaagggttgttcctgctttcatgtaataaaaatgtttttccctgttactttaaagggcaacctttgaaaaatgaatagtataattttacctgcc

SEQ ID NO: 57122 - protein, 142 aa, Glycine max
  peptide (1)..(142): Ceres Seq. ID no. 13594221
MFLSRTLGRTLFAAAARSKQYATTAAAASREGHNPLQEFFEADRSPEDDKPVVYGRSWKACELRLKSWDDLHKLWYVLLKEKNMLMTQRQMLNAQNLRFPNPERIPKVRKSMCRIKHVLTERAIEEPDPRRSAEMKRMINAL

SEQ ID NO: 57123 - DNA, 1424 bp, Glycine max
  misc_feature (1)..(1424): Ceres Seq. ID no. 15168576
gcacaagtcccaacctaaacccgcgtctcttcactcttcaattcaatggcttccacgcccttctccactttctgccacttccacaaacccaccctccttttcttagcttccgacgggttcaggctcggtggcgctccggcgatcgccttcggaaaggttcggaagaaccgcaaaatgggaatattccccgtttgcagagctggttctgccgtcgtcttccgcgacctcgacgccgacgactttcgccaccctcttgatcaacagaatacgctgctactgagagcaattccgggattgaacgaactgggaaaagctcttctaggaactgtatctgagcaggttatgctccttgaaaacattgggacatccgtccttgtttctaaaaatcagcttcctgatctttaccacctaatggtcgaagctgccgaaatattaaatgtagatgcccctgatctatatgttcgtcaaagtcctgtgccaaatgcatatacattagctataagtggtaaacgacctttcgttgtcattcatactagccttgtggagctcctgacaaaagcagagttgcaggctgttttggctcatgagctgggtcacctaaaatgtgatcatggtgtgtggcttacatatgcaaatattctaacccttggagcctattctgtacctggtattggcggtatgatagctcagactttggaagagcagctgttccgctggcttcgagcagctgagttgacttgtgatcgtgcagctcttcttgttgctcaagaccctaaggttgtcatctctgtcctcatgaaattagctgggggatgtccatctatggctgatcaactaaatgtggatgcattcctggagcaagctcgctcttatgaaaaagctgcttccagcccaattgggtggtatataaggaatgcacaaacaaggcaactgtcacatcctctgcctgttctacgtgctagcgaaattgatgaatggtcaagaactccagcttataaatctcttttgaaacgaggaattcagatcaaatcttagaacgaaatgtctagcagtgcatgcatggaatttgttgaaagtgcacagcagctcaaggttcttcaagttagtgcgtggtggcagatgttcaaatggtttcaggcggaagtagcatttattatgcatctatctacggctgctgcaaacatgtatgtattcactgtgttatattagtcaacccgtaagtagaattttggtgagttggattattatttcatagaaatattggttttggaaagaaaagaattacctgtacaattctagcttagaaaatttctcggagtagaaaacactattatgtaagttttatgaccgaaaatttttatttgttgtattttacactataagctaagctctttttgaatagtactaaaacattgactgtttcc

SEQ ID NO: 57124 - protein, 329 aa, Glycine max
  peptide (1)..(329): Ceres Seq. ID no. 15168577
MASTPFSTFCHFHKPTLLFLASDGFRLGGAPAIAFGKVRKNRKMGIFPVCRAGSAVVFRDLDADDFRHPLDQQNTLLLRAIPGLNELGKALLGTVSEQVMLLENIGTSVLVSKNQLPDLYHLMVEAAEILNVDAPDLYVRQSPVPNAYTLAISGKRPFVVIHTSLVELLTKAELQAVLAHELGHLKCDHGVWLTYANILTLGAYSVPGIGGMIAQTLEEQLFRWLRAAELTCDRAALLVAQDPKVVISVLMKLAGGCPSMADQLNVDAFLEQARSYEKAASSPIGWYIRNAQTRQLSHPLPVLRASEIDEWSRTPAYKSLLKRGIQIKS

SEQ ID NO: 57125 - protein, 286 aa, Glycine max
  peptide (1)..(286): Ceres Seq. ID no. 15168578
MGIFPVCRAGSAVVFRDLDADDFRHPLDQQNTLLLRAIPGLNELGKALLGTVSEQVMLLENIGTSVLVSKNQLPDLYHLMVEAAEILNVDAPDLYVRQSPVPNAYTLAISGKRPFVVIHTSLVELLTKAELQAVLAHELGHLKCDHGVWLTYANILTLGAYSVPGIGGMIAQTLEEQLFRWLRAAELTCDRAALLVAQDPKVVISVLMKLAGGCPSMADQLNVDAFLEQARSYEKAASSPIGWYIRNAQTRQLSHPLPVLRASEIDEWSRTPAYKSLLKRGIQIKS

SEQ ID NO: 57126 - protein, 230 aa, Glycine max
  peptide (1)..(230): Ceres Seq. ID no. 15168579
MLLENIGTSVLVSKNQLPDLYHLMVEAAEILNVDAPDLYVRQSPVPNAYTLAISGKRPFVVIHTSLVELLTKAELQAVLAHELGHLKCDHGVWLTYANILTLGAYSVPGIGGMIAQTLEEQLFRWLRAAELTCDRAALLVAQDPKVVISVLMKLAGGCPSMADQLNVDAFLEQARSYEKAASSPIGWYIRNAQTRQLSHPLPVLRASEIDEWSRTPAYKSLLKRGIQIKS

SEQ ID NO: 57127 - DNA, 2115 bp, Glycine max
  misc_feature (1)..(2115): Ceres Seq. ID no. 15168584
ataaagaccgagtaattaaaacttttttcaatgaagttggggcccaagaggcaataaaacccagcagcagcgtataagttccggagcggctccgtccgtatcttcccgacctcctttgttttcgacaaaccctccctccctctcaaactgtcacccctttccgtacgtccattcaaacatttcctctttcttatattcttctttttctctcttcactttcaaacacaaaccctaattcactttctaccaattcattcgcaaacaccttttccaatttccaacacacaccaaccatgggctacgaagacaatccgtatcgtgacgaggacggagagcccttgatggactacgacgacattcaatccgatcgcgagccatctcccgagcctcgccgccaggacgacgatttcgatgaggacgtcgacgagtggcgcggccgtgatcggtcgcagacgccggtctatgacaccgatccgtcgcggtcgaagccgcggaagaggctgatcaagaagagcgacgccgggaagcaggcggtggagccggagcttgaggatgaggacgtggaggggtatgttccggaggcgatgttcgacgaggcggacactggaaggaagaggaagaaggggaaggagggtgggagtgggaagaaggagaagaggatgaagggggagaagagttttgggagcagcggtgggaagagtgggtccaaatttgggagtggaaagaaagggtttggtgggaaggcagggaaggatcatgatggtgaagttaaggagatgtgggatacaattgctgggggagattctgaggatgatcaagagggtgtcaggaatgtggatgatgacaacttcatagatgacactggagtggaacctgcttattatggtagtgatgaaccacgttctcctgttgatgctccccaggcggaggagggtgaagaggatgaagaaattaaggatcttttcaagataggtaagaaaaagaagaagaatgagagaagtccagcagaaatagcgtatttagttgagactgtcatggctgagcttgaggttacagctgaggaggatgctgaacttaatagacagggaaagcctgccattaataaactcaagaagttgaatcttctgactgaagtcctctcaaagaaacagcttcaactagagtttttagatcatggagtgctaactttattgaagaattggcttgagccacttcctgatggaagcttgccaaatataaatatacgctcggaagttttgaagatattgaatgattttcctatagatctagagcagtatgatagaagagaacagctgaaaaagagtggtctgggaaaggtcattatgtttttatcaaagtctgatgaagaaatcagtgcaaataggaaactagccaaggagctggttgataagtggagccggcctatatttaataagagtacccggtttgaagacatgagaaatgtggaggatgatagggttccttatcggaggccatcagttaaaaagccggcaaataaatctgcaggaatggaatctagggacagtgatcttgatttggaactttcacagcctaggtctggacagtcctcttctaggcagcatgcatcaaggccggaagcaacacctttggattttgtggtccgtccccagtctaaaattgatccagaagaaattagagcacgagcaaaacaagctgcacaagatcagcagcgtatgaagatgaataagaaattgcagcaattgagggcaccaaaaaagaagcagcttcaggctacaaaactgagcgtggaaggtcgtggtatgatcaaatatttataaatgtgtccacgttgatactggacgggtttgtttgtcctgctgcaagctctcatataatgtgctgcctgcattaatgtggattcttctgaaggtggagatccagtgagctcgataaatggaaatttgaaggagagggatgtcatgaaaatacatccgtatactgcatttgtgtattcatttagtgcagcaggaaacccaaaatacatttgacggttatgcattcgtctattatttcgttttctgttgaataatcatcatgcttgtcatcaatttaatgaatatgtggattttcact

SEQ ID NO: 57128 - protein, 508 aa, Glycine max
  peptide (1)..(508): Ceres Seq. ID no. 15168585
MGYEDNPYRDEDGEPLMDYDDIQSDREPSPEPRRQDDDFDEDVDEWRGRDRSQTPVYDTDPSRSKPRKRLIKKSDAGKQAVEPELEDEDVEGYVPEAMFDEADTGRKRKKGKEGGSGKKEKRMKGEKSFGSSGGKSGSKFGSGKKGFGGKAGKDHDGEVKEMWDTIAGGDSEDDQEGVRNVDDDNFIDDTGVEPAYYGSDEPRSPVDAPQAEEGEEDEEIKDLFKIGKKKKKNERSPAEIAYLVETVMAELEVTAEEDAELNRQGKPAINKLKKLNLLTEVLSKKQLQLEFLDHGVLTLLKNWLEPLPDGSLPNINIRSEVLKILNDFPIDLEQYDRREQLKKSGLGKVIMFLSKSDEEISANRKLAKELVDKWSRPIFNKSTRFEDMRNVEDDRVPYRRPSVKKPANKSAGMESRDSDLDLELSQPRSGQSSSRQHASRPEATPLDFVVRPQSKIDPEEIRARAKQAAQDQQRMKMNKKLQQLRAPKKKQLQATKLSVEGRGMIKYL

SEQ ID NO: 57129 - protein, 492 aa, Glycine max
  peptide (1)..(492): Ceres Seq. ID no. 15168586
MDYDDIQSDREPSPEPRRQDDDFDEDVDEWRGRDRSQTPVYDTDPSRSKPRKRLIKKSDAGKQAVEPELEDEDVEGYVPEAMFDEADTGRKRKKGKEGGSGKKEKRMKGEKSFGSSGGKSGSKFGSGKKGFGGKAGKDHDGEVKEMWDTIAGGDSEDDQEGVRNVDDDNFIDDTGVEPAYYGSDEPRSPVDAPQAEEGEEDEEIKDLFKIGKKKKKNERSPAEIAYLVETVMAELEVTAEEDAELNRQGKPAINKLKKLNLLTEVLSKKQLQLEFLDHGVLTLLKNWLEPLPDGSLPNINIRSEVLKILNDFPIDLEQYDRREQLKKSGLGKVIMFLSKSDEEISANRKLAKELVDKWSRPIFNKSTRFEDMRNVEDDRVPYRRPSVKKPANKSAGMESRDSDLDLELSQPRSGQSSSRQHASRPEATPLDFVVRPQSKIDPEEIRARAKQAAQDQQRMKMNKKLQQLRAPKKKQLQATKLSVEGRGMIKYL

SEQ ID NO: 57130 - protein, 411 aa, Glycine max
  peptide (1)..(411): Ceres Seq. ID no. 15168587
MFDEADTGRKRKKGKEGGSGKKEKRMKGEKSFGSSGGKSGSKFGSGKKGFGGKAGKDHDGEVKEMWDTIAGGDSEDDQEGVRNVDDDNFIDDTGVEPAYYGSDEPRSPVDAPQAEEGEEDEEIKDLFKIGKKKKKNERSPAEIAYLVETVMAELEVTAEEDAELNRQGKPAINKLKKLNLLTEVLSKKQLQLEFLDHGVLTLLKNWLEPLPDGSLPNINIRSEVLKILNDFPIDLEQYDRREQLKKSGLGKVIMFLSKSDEEISANRKLAKELVDKWSRPIFNKSTRFEDMRNVEDDRVPYRRPSVKKPANKSAGMESRDSDLDLELSQPRSGQSSSRQHASRPEATPLDFVVRPQSKIDPEEIRARAKQAAQDQQRMKMNKKLQQLRAPKKKQLQATKLSVEGRGMIKYL

SEQ ID NO: 57131 - DNA, 1271 bp, Glycine max
  misc_feature (1)..(1271): Ceres Seq. ID no. 15171728
aatctcaatctcatcagttaactttacctaatacacaaaccccgttcctccgttcacgcactacctcagtcttctcttctcttttactaaaagaaccaacaatctctagaaccctctcagccaaaaaaaacaatgcagacccaccagaaccctcccacactggattccgacccgcagctcccgcagatcaaaatccaccacccctcctccccgcgccatcaccacccctcctccgccgccacccccacccccaccgccggcgcacgccgcaaaatcggcgtggccgtcgacctctccgacgagagcgcctacgcggtccgctgggccgtgcagcactacatccgccccggggacgccgtgatcctgctccacgtcagccctaccaacgtcctcttcggcgccgactggggctcgatcgacctctccatcaacactgaccccaactccgacgaagacgccgtcagcgccgtcaacagtaacgaccacgccaacgccggcaacagcaaacgcaagctcgaggacgacttcgacgccttcacggcgtcgaaggccgcggatctcgcgaagccgttgagagaatcgcaaattccgttcaagatccatattgtgaaggatcacgacatgaaggagaggctgtgcttggaggtggagaggcttgggttgagcgcggtgattatggggagtagagggtttggcgctgtgaggcgtggcagcgatgggaggcttgggagtgttagtgattactgcgttcatcactgtgtttgtcctgttgtggtggtgcgttatcccgatgataaggatgtggttgcggcggccaccacggcctcggccgtggtggcgctcaaggacggggatgagggcgagacggtgatccagccggtgccgcacaagaaagaggattagttggagccaactcatcacttcaaccctgtctctgaagaatgtttctaatccgaagggattggtggaaatggttgtagagtgctctctttctcttcctgtcaggttgtacttatagagcatttcctgcatatgaactgtggaaagattatggatgattttgtatggcttgatgtgatctcggttccattaggcctttgaagattgtttttggttccgaagtggtatatactctttcatgtagatgtacaagtttgcctgtgactgtttttggggttattttcttcccattctgtatgttgttggaaatcagattatcatgacgagcacttgtttagctatttagataattctatagagctgtgttggtg

SEQ ID NO: 57132 - protein, 256 aa, Glycine max
  peptide (1)..(256): Ceres Seq. ID no. 15171729
MQTHQNPPTLDSDPQLPQIKIHHPSSPRHHHPSSAATPTPTAGARRKIGVAVDLSDESAYAVRWAVQHYIRPGDAVILLHVSPTNVLFGADWGSIDLSINTDPNSDEDAVSAVNSNDHANAGNSKRKLEDDFDAFTASKAADLAKPLRESQIPFKIHIVKDHDMKERLCLEVERLGLSAVIMGSRGFGAVRRGSDGRLGSVSDYCVHHCVCPVVVVRYPDDKDVVAAATTASAVVALKDGDEGETVIQPVPHKKED

SEQ ID NO: 57133 - protein, 144 aa, Glycine max
  peptide (1)..(144): Ceres Seq. ID no. 15171730
SQSHQLTLPNTQTPFLRSRTTSVFSSLLLKEPTISRTLSAKKNNADPPEPSHTGFRPAAPADQNPPPLLPAPSPPLLRRHPHPHRRRTPQNRRGRRPLRRERLRGPLGRAALHPPRGRRDPAPRQPYQRPLRRRLGLDRPLHQH

SEQ ID NO: 57134 - DNA, 1309 bp, Glycine max
  misc_feature (1)..(1309): Ceres Seq. ID no. 15171739
atatacttcccttctggcaactctccaacagcttcccctttctccccttctccagaacctccgcgtcgtccgatgggaacagaaggttacacttacatggggcgcagtttgaccgaactccgcatcaacgacgattcctcttcctccgccttcagcgactgcaacagtgacagatctggcgaattcgccaccgcttcttcgcagacgcggaggtttctgatcgcctgcgccaccgaaaattccgacgacttgattcgccaactcgtttctgatctccactcctcttccatcgactatcagaaacaagccgccatggaaatccggttactcgcgaagaacaagccggagaatcgcatcaaaatcgcgaaagccggcgcaatcaaaccgctaatttctctcattttgtctccggacctccagctccaggaatacggcgtcaccgcgattttgaacctctcgctctgcgacgagaacaaggaggtgatagcctcctccggcgcgatcaagccgctggtccgcgcgctgggcgcgggaaccccgacggcgaaggagaacgcggcgtgcgcgctgctaagactctcgcaggtggaggagagcaaggcggcgatcgggcggtccggcgcgattccacttctggtgagcctcctggagagtggcgggttccgcgcgaagaaggacgcatcgacagcgctgtactcgctgtgcatggtgaaggagaacaagatcagggcggtgaaggcggggatcatgaaggtgctggtggagctgatggcggacttcgagtcgaacatggtggacaagtcggcgtacgtggtgagcgtgctggtggcggtagcggaggcgagggcggcgctggtggaggaaggaggcgtgccggtgctggtggagatcgtcgaggttgggacgcagcggcagaaggaaatcgttgtggttattctcttacaggtttgcgaggacagcgtggcgtatcgcaccatggtcgctcgcgaaggtgcgattcctcctttggtcgctttgtctcagtccggcaccaatcgtgccaagcaaaaggtattattctcttcaacgccatttccattactcttctccgctcgtgacgtggcacccttcccttcaaaccggtttgatccctttttttatttataaggtgagaatcaaataactcacctcagccaagtcaactaaattaaacccttttgacaccagttcggtttggtaactagttacggaaaactatttttgtaccgatgtgacaaatacaattgttgaagattgaagaaccaaaatgcaatactattatttctttgcc

SEQ ID NO: 57135 - protein, 381 aa, Glycine max
  peptide (1)..(381): Ceres Seq. ID no. 15171740
IYFPSGNSPTASPFSPSPEPPRRPMGTEGYTYMGRSLTELRINDDSSSSAFSDCNSDRSGEFATASSQTRRFLIACATENSDDLIRQLVSDLHSSSIDYQKQAAMEIRLLAKNKPENRIKIAKAGAIKPLISLILSPDLQLQEYGVTAILNLSLCDENKEVIASSGAIKPLVRALGAGTPTAKENAACALLRLSQVEESKAAIGRSGAIPLLVSLLESGGFRAKKDASTALYSLCMVKENKIRAVKAGIMKVLVELMADFESNMVDKSAYVVSVLVAVAEARAALVEEGGVPVLVEIVEVGTQRQKEIVVVILLQVCEDSVAYRTMVAREGAIPPLVALSQSGTNRAKQKVLFSSTPFPLLFSARDVAPFPSNRFDPFFYL

SEQ ID NO: 57136 - protein, 357 aa, Glycine max
  peptide (1)..(357): Ceres Seq. ID no. 15171741
MGTEGYTYMGRSLTELRINDDSSSSAFSDCNSDRSGEFATASSQTRRFLIACATENSDDLIRQLVSDLHSSSIDYQKQAAMEIRLLAKNKPENRIKIAKAGAIKPLISLILSPDLQLQEYGVTAILNLSLCDENKEVIASSGAIKPLVRALGAGTPTAKENAACALLRLSQVEESKAAIGRSGAIPLLVSLLESGGFRAKKDASTALYSLCMVKENKIRAVKAGIMKVLVELMADFESNMVDKSAYVVSVLVAVAEARAALVEEGGVPVLVEIVEVGTQRQKEIVVVILLQVCEDSVAYRTMVAREGAIPPLVALSQSGTNRAKQKVLFSSTPFPLLFSARDVAPFPSNRFDPFFYL

SEQ ID NO: 57137 - protein, 349 aa, Glycine max
  peptide (1)..(349): Ceres Seq. ID no. 15171742
MGRSLTELRINDDSSSSAFSDCNSDRSGEFATASSQTRRFLIACATENSDDLIRQLVSDLHSSSIDYQKQAAMEIRLLAKNKPENRIKIAKAGAIKPLISLILSPDLQLQEYGVTAILNLSLCDENKEVIASSGAIKPLVRALGAGTPTAKENAACALLRLSQVEESKAAIGRSGAIPLLVSLLESGGFRAKKDASTALYSLCMVKENKIRAVKAGIMKVLVELMADFESNMVDKSAYVVSVLVAVAEARAALVEEGGVPVLVEIVEVGTQRQKEIVVVILLQVCEDSVAYRTMVAREGAIPPLVALSQSGTNRAKQKVLFSSTPFPLLFSARDVAPFPSNRFDPFFYL

SEQ ID NO: 57138 - DNA, 1617 bp, Glycine max
  misc_feature (1)..(1617): Ceres Seq. ID no. 13582497
aacacctagaacatcctttccgaaaaaattagtgaataccagtttataaaaacattatggaagcacttatctagaaggcggatgaattatattattaagcttctagcaatcactgctatctcagttttcattcttgagttcctggttaacagcttcactgagaggaagctctatacgtggtgttttttgattgccggggccacagcttcattttatctttttaagtcaattccctggagatctggtataccgatatatgtttgcctagcatgttggtttttgtctcttttcacattgatgccagcagaaattcctgacaataatcaattagtagttagtagtggggttattattatcattataggaatagttgcaagatggctagatttgcatgctggtggaaggaagtattggctcagtatatgcaattgcaagttgaaaagttccaaattttcatctctattttacttacaggctcttttggttgctctatcttcagtgatggtgtatttatcaactgttcacagaactgaaaagcgagagttgcttgcatcgcaccaattgataaattggtctgttgctggtttttcaatggtgctcccgctgttctcagaaaatagcctcttatcccgacttacttcgatatttcttggctttgcacctccattccttcttctctccattggatacgaagctatattctatgctgctcttgctcttgtactgatggcttggatactatttgaaaatacaattctcaacttaaatattgtgaataagtcatctgattccactaaaagtgttacaaatcatctcatccatggatctgataatagatctttgcagttatctgatgtgaggattccattggtctttatggttttattcaatgttgctttttttggaacgggaaattttgcaagtattgctagttttgagatttcatctgtctatcggttcattaccatctttagtcccttcctgatggcagcgctactcatcttcaaattatttatacctttcttgcttgtaatatgcgtattcagtgcgattaccaaactaaaccaagttccaaggttgggatgctattttcttgttatattgttctcagacatgatgaccattcacttcttcttcctggttaggaatacaggaagttggatggaaattggaaatagtatcagtcattttggcatcatgagtgcccaagttgtttttgttctattactctttgccctcacaaatacatacacaaaagacatccactgtaactcagcagtatcatcgactcgtaaggcaaattaggtttcaccaaagtcgctctaaacgagctaccttattgccatggaaatgactactcattcttggtgtttgctttgatggttatgaccaacctggattgagaacgggcggcagtgatctggaactcagggaaaggcgagcaaacattgtgcctcaccatgtaaacaaagaactttcatataaactttttccttatattactgcctcttggtagttgatctgtacaggtcctggtcctggccctggcccgggtgatggaatttttgtttgattgtttactgtggtcaacgtaatgttaatgcacttttttcaccc

SEQ ID NO: 57139 - protein, 407 aa, Glycine max
  peptide (1)..(407): Ceres Seq. ID no. 15222748
MNYIIKLLAITAISVFILEFLVNSFTERKLYTWCFLIAGATASFYLFKSIPWRSGIPIYVCLACWFLSLFTLMPAEIPDNNQLVVSSGVIIIIIGIVARWLDLHAGGRKYWLSICNCKLKSSKFSSLFYLQALLVALSSVMVYLSTVHRTEKRELLASHQLINWSVAGFSMVLPLFSENSLLSRLTSIFLGFAPPFLLLSIGYEAIFYAALALVLMAWILFENTILNLNIVNKSSDSTKSVTNHLIHGSDNRSLQLSDVRIPLVFMVLFNVAFFGTGNFASIASFEISSVYRFITIFSPFLMAALLIFKLFIPFLLVICVFSAITKLNQVPRLGCYFLVILFSDMMTIHFFFLVRNTGSWMEIGNSISHFGIMSAQVVFVLLLFALTNTYTKDIHCNSAVSSTRKAN

SEQ ID NO: 57140 - protein, 335 aa, Glycine max
  peptide (1)..(335): Ceres Seq. ID no. 15222749
MPAEIPDNNQLVVSSGVIIIIIGIVARWLDLHAGGRKYWLSICNCKLKSSKFSSLFYLQALLVALSSVMVYLSTVHRTEKRELLASHQLINWSVAGFSMVLPLFSENSLLSRLTSIFLGFAPPFLLLSIGYEAIFYAALALVLMAWILFENTILNLNIVNKSSDSTKSVTNHLIHGSDNRSLQLSDVRIPLVFMVLFNVAFFGTGNFASIASFEISSVYRFITIFSPFLMAALLIFKLFIPFLLVICVFSAITKLNQVPRLGCYFLVILFSDMMTIHFFFLVRNTGSWMEIGNSISHFGIMSAQVVFVLLLFALTNTYTKDIHCNSAVSSTRKAN

SEQ ID NO: 57141 - protein, 267 aa, Glycine max
  peptide (1)..(267): Ceres Seq. ID no. 15222750
MVYLSTVHRTEKRELLASHQLINWSVAGFSMVLPLFSENSLLSRLTSIFLGFAPPFLLLSIGYEAIFYAALALVLMAWILFENTILNLNIVNKSSDSTKSVTNHLIHGSDNRSLQLSDVRIPLVFMVLFNVAFFGTGNFASIASFEISSVYRFITIFSPFLMAALLIFKLFIPFLLVICVFSAITKLNQVPRLGCYFLVILFSDMMTIHFFFLVRNTGSWMEIGNSISHFGIMSAQVVFVLLLFALTNTYTKDIHCNSAVSSTRKAN

SEQ ID NO: 57142 - DNA, 1102 bp, Glycine max
  misc_feature (1)..(1102): Ceres Seq. ID no. 14312886
agaaagcggagacacattgataaataataaaaaaaaggcgggaaagaaagggtgggtcaaaattttgagagccacacccagctttgaatcctccaacaaaatctccgttccgggtttttgcaatcgggagagtgcgagagagacaatacactacacggttgctgcattattgctttcagaggaactcattgcagtcattgattgtaagcaatggaaaaaatgcctgaacaaggtgccaatgcatcattattgccttctaatggaattggatccaggttctccaatttgaacaagtctttcaaatattctcttagatctttgctcacttcatgctcaaaggaggaattttataaagcattttcaagtttctctaacattgaaaaggaattgctccatcgcctatttcttcaggtcattacttcgttgcatgaaaacttagaggatgggtttgagactgtctgtcttcaaacacaggcaggagctactcttgatgctgtggagaaaattgtagaagaacaagatctggatgtcttgttttcagataggagtaacataatggatgttgctgagaatctgtctatggcaaagaagaatgaaatccaacacttaaagcatatggttcaattgggagaggaacataatcaaatgttgcgcacccgactacaactccttaaggaaggcaatcaagtattgtctggtgcctcacaagctgttgagaagttcaaaagcatgaatttaaattatggggcaaacagcggcgatgagatccatgatgtataacatgtcttgctcatgctctcctgcaaattgactaaggttcattctgtggtgaatcattcccatgcttttatgttgtagcaatgcttctaaagattatattaattcacgagtaaatctacatcttagtccttgatattaaagtgtcatgtattttagaagctaagattttagaaatcgtgtattagttcctgaatttttaaaacaccaagtgaatgttaaacattgtatgagtgactttcgttcttttaaatgagccttctgggtcatcctttcaaacactttcataactgattggatcatgcatcatgaactagatattttc

SEQ ID NO: 57143 - protein, 189 aa, Glycine max
  peptide (1)..(189): Ceres Seq. ID no. 14312887
MEKMPEQGANASLLPSNGIGSRFSNLNKSFKYSLRSLLTSCSKEEFYKAFSSFSNIEKELLHRLFLQVITSLHENLEDGFETVCLQTQAGATLDAVEKIVEEQDLDVLFSDRSNIMDVAENLSMAKKNEIQHLKHMVQLGEEHNQMLRTRLQLLKEGNQVLSGASQAVEKFKSMNLNYGANSGDEIHDV

SEQ ID NO: 57144 - protein, 186 aa, Glycine max
  peptide (1)..(186): Ceres Seq. ID no. 14312888
MPEQGANASLLPSNGIGSRFSNLNKSFKYSLRSLLTSCSKEEFYKAFSSFSNIEKELLHRLFLQVITSLHENLEDGFETVCLQTQAGATLDAVEKIVEEQDLDVLFSDRSNIMDVAENLSMAKKNEIQHLKHMVQLGEEHNQMLRTRLQLLKEGNQVLSGASQAVEKFKSMNLNYGANSGDEIHDV

SEQ ID NO: 57145 - protein, 95 aa, Glycine max
  peptide (1)..(95): Ceres Seq. ID no. 14312889
ESGDTLINNKKKAGKKGWVKILRATPSFESSNKISVPGFCNRESARETIHYTVAALLLSEELIAVIDCKQWKKCLNKVPMHHYCLLMELDPGSPI

SEQ ID NO: 57146 - DNA, 941 bp, Glycine max
  misc_feature (1)..(941): Ceres Seq. ID no. 14312901
aaaaaaaaacatggaaaggatatagattatagaatacagaggcaccgacgtagcgacggtcaaggtccacaatccacaatccgcaaccgaataacccactacccacagatttctctctctctctctctgttggattggatcctaatatctgtgttccactttcagaggttgctccttcattcacgcccttgctctcttcaaatctattttcttcctctgctctatctatctcttgttatttttccctctcacgccaatcaccatgccttctccttcagatcaccaccgcccccaaccaaaacctaatcccaacctcctttctctgttcctcaaaccaatcatcatgctccttctcacctccctcttcttcctcttcctcggcttcgctgccttcctcctcctcaacctcttcctcctcggcggcgccttccaccgccttcgcttccgcccctccgttaccaccgcacccacctcctccaacggcctcccccctcgcgaaatcaacaagctcccccgctttcgtgtcgccaatggatccgagacccgacccgactccaattgcgtcgtctgcctggacgcattccataacgcccaatggtgccgaaagcttgctgcgtgcgggcacgtgtttcaccgcaggtgcgtcgacacgtggctccttaaggtcgccgcatgccccacgtgccgcacacccgtgggattcaatgccggtgctacggtacatgacccgcctcagcggtctgaccatttgcatacctgcggaactgactccaatgctctcaccacccttttatagcttgtaagttttcgtttttaagcctttcccaaaccatgtaaggatatcaagtaattgtttttttaatctatgtatatgaattgtagcaatagttttttctcccatttcgacgactattgggaagaaatgaaccaacttaattcac

SEQ ID NO: 57147 - protein, 177 aa, Glycine max
  peptide (1)..(177): Ceres Seq. ID no. 14312902
MPSPSDHHRPQPKPNPNLLSLFLKPIIMLLLTSLFFLFLGFAAFLLLNLFLLGGAFHRLRFRPSVTTAPTSSNGLPPREINKLPRFRVANGSETRPDSNCVVCLDAFHNAQWCRKLAACGHVFHRRCVDTWLLKVAACPTCRTPVGFNAGATVHDPPQRSDHLHTCGTDSNALTTLL

SEQ ID NO: 57148 - protein, 150 aa, Glycine max
  peptide (1)..(150): Ceres Seq. ID no. 14312903
MLLLTSLFFLFLGFAAFLLLNLFLLGGAFHRLRFRPSVTTAPTSSNGLPPREINKLPRFRVANGSETRPDSNCVVCLDAFHNAQWCRKLAACGHVFHRRCVDTWLLKVAACPTCRTPVGFNAGATVHDPPQRSDHLHTCGTDSNALTTLL

SEQ ID NO: 57149 - protein, 101 aa, Glycine max
  peptide (1)..(101): Ceres Seq. ID no. 14312904
KKKHGKDIDYRIQRHRRSDGQGPQSTIRNRITHYPQISLSLSLLDWILISVFHFQRLLLHSRPCSLQIYFLPLLYLSLVIFPSHANHHAFSFRSPPPPTKT

SEQ ID NO: 57150 - DNA, 1006 bp, Glycine max
  misc_feature (1)..(1006): Ceres Seq. ID no. 14315461
acagtatatgcaaacaaagcctccaccaatgtcgctgctgccgccgccgaaacctcaccggagctccggtaactcccctggcgacagcattccagactggatctccgaatcaatcaacggcggctccctccgccgcgtcgacctcaactccggcaccaacggctgggcgtcgccgccaggctccgtgttctccctccgctccgaaagttactttcagaaccgccaaaaatgtcccgccggcgactacctcctctcgccggcgggcatggactggctcaaatccgccgcgaaactcgaccacgtgctctcacgcgcggacaaccgcgtgatgcacgcgctgcgaagatgtcaaaccctaggtcgctccctaaagagcttcgtcttcgcggtgaacctccagatcccgggcgcgaaggagcaccacagcgcggtgttctacttcgcgaccgaggaaccggatccggtccgaaccggttcactcttaaaccggttcgtgcacggcgacgacgcgtttcggaaccagcggttcaagctggtgaaccggatcgcgaaggggccgtggatcgtgaagaaggccgtggggagccacagcgcgtgcttgttagggaaagcgttgaattgcgcttactacaaaggttcgaattacctcgaaattgacgtcgatatcggaagcagcgcgatcgcgaacgcgattctgcacctcgcgttggggtgcgtgacgacggtgacgatcgatatggggtttgtggtggaggcacaggcggaggatgagttgccggagcggttgatcggtgcgattagggtttgccagatggagatggcgtcggccacggtggttgaggcgttgcacgtgccgcgcggggttgggtgggccaaggtgaatcatcataagtctgcggatgagcttgctttggatgattagatatttgtttagtgatagtagtacgaagtttatgatttttttttatattttaattattcttcaatggattttaatttcttgttc

SEQ ID NO: 57151 - protein, 306 aa, Glycine max
  peptide (1)..(306): Ceres Seq. ID no. 14315462
QYMQTKPPPMSLLPPPKPHRSSGNSPGDSIPDWISESINGGSLRRVDLNSGTNGWASPPGSVFSLRSESYFQNRQKCPAGDYLLSPAGMDWLKSAAKLDHVLSRADNRVMHALRRCQTLGRSLKSFVFAVNLQIPGAKEHHSAVFYFATEEPDPVRTGSLLNRFVHGDDAFRNQRFKLVNRIAKGPWIVKKAVGSHSACLLGKALNCAYYKGSNYLEIDVDIGSSAIANAILHLALGCVTTVTIDMGFVVEAQAEDELPERLIGAIRVCQMEMASATVVEALHVPRGVGWAKVNHHKSADELALDD

SEQ ID NO: 57152 - protein, 304 aa, Glycine max
  peptide (1)..(304): Ceres Seq. ID no. 14315463
MQTKPPPMSLLPPPKPHRSSGNSPGDSIPDWISESINGGSLRRVDLNSGTNGWASPPGSVFSLRSESYFQNRQKCPAGDYLLSPAGMDWLKSAAKLDHVLSRADNRVMHALRRCQTLGRSLKSFVFAVNLQIPGAKEHHSAVFYFATEEPDPVRTGSLLNRFVHGDDAFRNQRFKLVNRIAKGPWIVKKAVGSHSACLLGKALNCAYYKGSNYLEIDVDIGSSAIANAILHLALGCVTTVTIDMGFVVEAQAEDELPERLIGAIRVCQMEMASATVVEALHVPRGVGWAKVNHHKSADELALDD

SEQ ID NO: 57153 - protein, 297 aa, Glycine max
  peptide (1)..(297): Ceres Seq. ID no. 14315464
MSLLPPPKPHRSSGNSPGDSIPDWISESINGGSLRRVDLNSGTNGWASPPGSVFSLRSESYFQNRQKCPAGDYLLSPAGMDWLKSAAKLDHVLSRADNRVMHALRRCQTLGRSLKSFVFAVNLQIPGAKEHHSAVFYFATEEPDPVRTGSLLNRFVHGDDAFRNQRFKLVNRIAKGPWIVKKAVGSHSACLLGKALNCAYYKGSNYLEIDVDIGSSAIANAILHLALGCVTTVTIDMGFVVEAQAEDELPERLIGAIRVCQMEMASATVVEALHVPRGVGWAKVNHHKSADELALDD

SEQ ID NO: 57154 - DNA, 759 bp, Glycine max
  misc_feature (1)..(759): Ceres Seq. ID no. 14302702
aaactcaaagatgtcataaggtcactcaaggtatcatcaataggcatagttatattaatgtgtgatgtgttagaggatatgcgcattggtgaagattgaaattagaagcaagaatgaggagggcatgcaggaaaatatggcgatcggtgccttgcacgagcaggaaaagcttgcgaaatgactctaggaaggacatggaggagattctgagggctaagctttcaactattaaggaagagccagaattgtgtgatgagaacttagcatcaccaagacatgtgtgtatggccaagaaacaagggaagaaggttcaaggaagtattcaacatctcgggagataagtatgtcacatttgatggattagcaagagcatgtgctaaggctggtgggttcccagagccagagatcattcactacaaccctaaagattttgattttgggaaaaagaaatcatttccattccgtgaccagcatttctttgcatcagttgagaaagcaaagagcgtgcttggattggaacctgaatttggacttgtagagggtctagcagactcgtacaacctggactttggtagaggaacatatcggaaagaggctgatttctcaacagatgacataattcttggcaagagtcttgttagcgtataaacttttctatttcaattttaagtatttcacttgtatttagaaaagctgttcggatttgctacattatgaagtcgtgaaatattcatgagcttttcgttcagtattttttcc

SEQ ID NO: 57155 - protein, 123 aa, Glycine max
  peptide (1)..(123): Ceres Seq. ID no. 14302703
MCVWPRNKGRRFKEVFNISGDKYVTFDGLARACAKAGGFPEPEIIHYNPKDFDFGKKKSFPFRDQHFFASVEKAKSVLGLEPEFGLVEGLADSYNLDFGRGTYRKEADFSTDDIILGKSLVSV

SEQ ID NO: 57156 - protein, 75 aa, Glycine max
  peptide (1)..(75): Ceres Seq. ID no. 14302704
MRRACRKIWRSVPCTSRKSLRNDSRKDMEEILRAKLSTIKEEPELCDENLASPRHVCMAKKQGKKVQGSIQHLGR

SEQ ID NO: 57157 - DNA, 951 bp, Glycine max
  misc_feature (1)..(951): Ceres Seq. ID no. 14315076
aaagaaaccaaagtctatttttttttttgtttctgagcctcccctcccctctctctaagatccccaaattgcttgtgaatgctagaaaccctagacagattcgattggatgcgctcccatttcacatcaagggcgagcgcattcggttcttgcaagcaagcctggtactaccgctgcctcggcctcgacccctgaatttgaaccattcatcaccacctttcttcattcattcacggttttccttttcgactcgatttgttgttttttttgttttgtttccttgacgatgttgacgatgagcaagcagaagaagaaccagaacgcgaagaggctgttgataagcatcaatgtgctggggagcgcggggcccattaggttcgtggtgaacgaggaggagcttgtggcggcggtcatcgacaccgcacttaagtcctacgcgcgtgagggcaggcttcccgtcctgggaaacaacaccaccggtttcgtgctttattgcccccatcttggatctgatgctttgagtccttgggagagaattggatcacatggggtgaggaatttcgtgctgtttaagaagccagagggtgtggcggatgtagatggaagtacagcactttctcgcagcagcagggggagtgggagctggaaggcttggttcaacaagtccctcaacctcaagatttctacccactaatgaataaatctctcggggaattgaacatgatgccttttgtggtgaatgccactaataatatccataatacgtagtatttcttttggttgtttttgttctcgctagccagagaaccctctctttaggaaattgttcaactttgacatttaggttttgattttgatggaatacaataagttttgattcctcacttccttgccattttttattcaattaaattaaacttaagatggtgaatgtgagctaatattccaagt

SEQ ID NO: 57158 - protein, 135 aa, Glycine max
  peptide (1)..(135): Ceres Seq. ID no. 14315077
MLTMSKQKKNQNAKRLLISINVLGSAGPIRFVVNEEELVAAVIDTALKSYAREGRLPVLGNNTTGFVLYCPHLGSDALSPWERIGSHGVRNFVLFKKPEGVADVDGSTALSRSSRGSGSWKAWFNKSLNLKISTH

SEQ ID NO: 57159 - protein, 132 aa, Glycine max
  peptide (1)..(132): Ceres Seq. ID no. 14315078
MSKQKKNQNAKRLLISINVLGSAGPIRFVVNEEELVAAVIDTALKSYAREGRLPVLGNNTTGFVLYCPHLGSDALSPWERIGSHGVRNFVLFKKPEGVADVDGSTALSRSSRGSGSWKAWFNKSLNLKISTH

SEQ ID NO: 57160 - protein, 93 aa, Glycine max
  peptide (1)..(93): Ceres Seq. ID no. 14315079
RNQSLFFFLFLSLPSPLSKIPKLLVNARNPRQIRLDALPFHIKGERIRFLQASLVLPLPRPRPLNLNHSSPPFFIHSRFSFSTRFVVFFVLFP

SEQ ID NO: 57161 - DNA, 1311 bp, Glycine max
  misc_feature (1)..(1311): Ceres Seq. ID no. 14315440
attcaaaacctcttccccttctcatctatcctcctcctaaaaattggtcaaaatctatccaatctctttgcatattccttcttatcatcatcttcttcttcttctctgttgcctctagaattgaaaagttcttcttcctgcccatagtctttgacacccttttccaacctctagattttttcttccctctataattatctccttcacagaaaccttcttatcccacatatcatcaattaccttgttcctctcaaagtttgattctttttctcttgaattggattgttataatttttgttcatacttacatgttatgcagttatgaatgattgagagacaacacaaatgtcttctccagtgatctccgagatcctcctctctggcttcaccataaactcttccctaagacgcaggacacacttggtgcaatctttctctgttgttttcctccactggttctacgttttctcatgaactaaataaattaacctcgtacatagtataaacatagtacgtaccagtgttcttttttcaaattcaatcattaaacctagctagcagattagggttattattgttcaaatagcagactactgcatggcttctcctggtggaagtggaacctattcatctggttccagttctcttcaaaactctggttctgaaggagacagagacatcatggaacagaggaagaggaagagaatgttgtccaatagggaatcggcacgtagatcgaggataaggaaacagcagcacctggaaggtctgagtgcccaattggatcagcttaaaaaggagaacgcacaaatcaacacaaacataagcatcacgacgcagatgtacctcaacgtggaagctgagaacgcgattctgagggctcaaatgggggaactgagcaacagattgaactctctgaacgaaatgataagtttcattaactccaccaacaacaactgcttgatgatgttcgatgaggcacaggagacgaccactcagttgttcaatgattgtggcttcatggattatgcttggaatggaataccaatcatggcttccgctgacaatgaaatgttgatcatgtattgatcttgagttgtagcacaacacccacgtcttctcttgttttaattttttttttttttttttattgtaatagtgatgtctattgttttcagtttatgttatgtttagggttgtcttgtcttgtgcgtatttcaagagggggattcttttttcttctcgaaaatgtaaaatatcgaccttttattttccagatagtgattttcgttcatttccactttttatttt

SEQ ID NO: 57162 - protein, 163 aa, Glycine max
  peptide (1)..(163): Ceres Seq. ID no. 14315441
MASPGGSGTYSSGSSSLQNSGSEGDRDIMEQRKRKRMLSNRESARRSRIRKQQHLEGLSAQLDQLKKENAQINTNISITTQMYLNVEAENAILRAQMGELSNRLNSLNEMISFINSTNNNCLMMFDEAQETTTQLFNDCGFMDYAWNGIPIMASADNEMLIMY

SEQ ID NO: 57163 - protein, 135 aa, Glycine max
  peptide (1)..(135): Ceres Seq. ID no. 14315442
MEQRKRKRMLSNRESARRSRIRKQQHLEGLSAQLDQLKKENAQINTNISITTQMYLNVEAENAILRAQMGELSNRLNSLNEMISFINSTNNNCLMMFDEAQETTTQLFNDCGFMDYAWNGIPIMASADNEMLIMY

SEQ ID NO: 57164 - protein, 127 aa, Glycine max
  peptide (1)..(127): Ceres Seq. ID no. 14315443
MLSNRESARRSRIRKQQHLEGLSAQLDQLKKENAQINTNISITTQMYLNVEAENAILRAQMGELSNRLNSLNEMISFINSTNNNCLMMFDEAQETTTQLFNDCGFMDYAWNGIPIMASADNEMLIMY

SEQ ID NO: 57165 - DNA, 1149 bp, Glycine max
  misc_feature (1)..(1149): Ceres Seq. ID no. 14316316
atattcctttcttttttgtttcctcaaaataaaaaataaaactttttattatctgcaggttttgcatttgtgtttctgatttttgtgtacctaatcccaatccgtttcttttcaatcttctcttcgaccccatttcctagatctgcttgtttcttccatcatcaactaatcatggttcttcacagagaactcgatcatctcttttcatcccctttcgttgaccctcccaaagatgatgcgaaatccagtggcatgtcaattgaaaagaagattgagttcctcgagagtttgactggaaaggtcacaaatcggaggtctcggaggtggttaaatgatcgtctcttgatggaactagtaccacgtttaaatgcagaggaaattagaggcttgtttgctccaccaccttggggtgatgaagttccaccttcaacattttccatgacgaacatggaggagtgggacagattcaggaatattgacatggataaagaggttaatataatccattccctggaaaactctatagaaaagaggaaaggtcacattgatgctgacaagatggcagtgttgaatggttggcatagaatcgattgtagaacaagagatgcgcttcgccgtagttgtctttctgagctcattgagggttatgaggaatgtgtacgagctttcataacagaaagcacagatggagatattcttgaactacaaattcaggatccttttcatagattgttactgcatggagtttgtgagttctacaatctggcgtcggatacagtgtcaggttataatggcgtggagtcgtcaaggattacaaagataaagaggaagaaaaagggttctcctgtgctcccaaatatcaccctgtcccattttctgaagatgtccaaggaaggaagttggtagtttcttcaggcagtgttgttcatacaataaaactgaaccttagtgttgtcccagggtgaacaatgtgcaatatttcgtatttattcagaatatcactgtaaattagttcgatgacctgtattttaattggtttataccatcggtctacgcaagttgttgattgttggtttacattgttgtagctgattattctgattttaacaaatactatatcttaaggttgaattttcagaagatctatac

SEQ ID NO: 57166 - protein, 244 aa, Glycine max
  peptide (1)..(244): Ceres Seq. ID no. 14316317
MVLHRELDHLFSSPFVDPPKDDAKSSGMSIEKKIEFLESLTGKVTNRRSRRWLNDRLLMELVPRLNAEEIRGLFAPPPWGDEVPPSTFSMTNMEEWDRFRNIDMDKEVNIIHSLENSIEKRKGHIDADKMAVLNGWHRIDCRTRDALRRSCLSELIEGYEECVRAFITESTDGDILELQIQDPFHRLLLHGVCEFYNLASDTVSGYNGVESSRITKIKRKKKGSPVLPNITLSHFLKMSKEGSW

SEQ ID NO: 57167 - protein, 217 aa, Glycine max
  peptide (1)..(217): Ceres Seq. ID no. 14316318
MSIEKKIEFLESLTGKVTNRRSRRWLNDRLLMELVPRLNAEEIRGLFAPPPWGDEVPPSTFSMTNMEEWDRFRNIDMDKEVNIIHSLENSIEKRKGHIDADKMAVLNGWHRIDCRTRDALRRSCLSELIEGYEECVRAFITESTDGDILELQIQDPFHRLLLHGVCEFYNLASDTVSGYNGVESSRITKIKRKKKGSPVLPNITLSHFLKMSKEGSW

SEQ ID NO: 57168 - protein, 186 aa, Glycine max
  peptide (1)..(186): Ceres Seq. ID no. 14316319
MELVPRLNAEEIRGLFAPPPWGDEVPPSTFSMTNMEEWDRFRNIDMDKEVNIIHSLENSIEKRKGHIDADKMAVLNGWHRIDCRTRDALRRSCLSELIEGYEECVRAFITESTDGDILELQIQDPFHRLLLHGVCEFYNLASDTVSGYNGVESSRITKIKRKKKGSPVLPNITLSHFLKMSKEGSW

SEQ ID NO: 57169 - DNA, 1341 bp, Glycine max
  misc_feature (1)..(1341): Ceres Seq. ID no. 14315469
gaaattttccggaaatagaaaacataatttctctctctgtgttgggtgtgtctctgtttctctctctctctccgttgttgttgttgatccatggaagaggaacttcagaacccagaagaaagttgaaacctttgggctaaactccgatacccaattggctgaaagctccaatgcggtgttgttggaggaggagaccctccttgaagaaggaaaatcgtggatctgatgatggtggggacatgggtgatgaagatggtttcaggtggttgtagggttgttgtggggggcaacgatccggtggtggtgcggcagcagcatagacgacgatgcagcttcacttctcgcctagcatgagaagcatcacgatatcgagcaaaaatgggtttattgacttgatgaagatcaaggtcgcagcttgccacatttcctatcgaaccctcttccacaccatcctcatcctcgctttcttgttgccctttgtctttattctcactgctcttgttacccttgaaggtgtcaacaagtgctcctcattcgattgtttaggtaggcggttgggaccaaagcttcttggtagggttgatgatccggcgcagagactagttagagatttttacaatatccttaacgaagtaaagactagggaaattccatctgctctagagcttccggattcatttgatcaactggtttctgatatgaagagcaatcaatatgatgcgaaaacgtttgcattcatgttaaggggaatgatgcagaaatttgagagagaaatcagagaatctaaattttcagagctgatgaataaacattttgcagcaagttcagttcctaaagggattcattgtctgtctttgcgtttgactgatgaatattcgtcaaatgcccatgcacgcaaacaactgcctcctccagaattactacctacactgtctgacaactcttaccatcattttattgtttcaacggataacatcttggctgcttcggtagttgttacttctactgtgcagtcatctcagaaacctgagaatatagtcttccatgtcatcactgacaaaaaaacttatgctggtatgcactcatggtttgctctaaatccagccactcctgctatagttgaggtcagaggcattcaccagtttgactggttgacgagagaaaatgttccagtacttgaagcagtagaaaatcaaaatgggatcaggaatgataactggggttattgatttttcaattagcaaaatgtcaggttgatgttgttctggctggtttaataataactacattgatttctttgtaactcggttctctttttcagttcaaaggatcttatatatg

SEQ ID NO: 57170 - protein, 300 aa, Glycine max
  peptide (1)..(300): Ceres Seq. ID no. 14315470
MQLHFSPSMRSITISSKNGFIDLMKIKVAACHISYRTLFHTILILAFLLPFVFILTALVTLEGVNKCSSFDCLGRRLGPKLLGRVDDPAQRLVRDFYNILNEVKTREIPSALELPDSFDQLVSDMKSNQYDAKTFAFMLRGMMQKFEREIRESKFSELMNKHFAASSVPKGIHCLSLRLTDEYSSNAHARKQLPPPELLPTLSDNSYHHFIVSTDNILAASVVVTSTVQSSQKPENIVFHVITDKKTYAGMHSWFALNPATPAIVEVRGIHQFDWLTRENVPVLEAVENQNGIRNDNWGY

SEQ ID NO: 57171 - protein, 292 aa, Glycine max
  peptide (1)..(292): Ceres Seq. ID no. 14315471
MRSITISSKNGFIDLMKIKVAACHISYRTLFHTILILAFLLPFVFILTALVTLEGVNKCSSFDCLGRRLGPKLLGRVDDPAQRLVRDFYNILNEVKTREIPSALELPDSFDQLVSDMKSNQYDAKTFAFMLRGMMQKFEREIRESKFSELMNKHFAASSVPKGIHCLSLRLTDEYSSNAHARKQLPPPELLPTLSDNSYHHFIVSTDNILAASVVVTSTVQSSQKPENIVFHVITDKKTYAGMHSWFALNPATPAIVEVRGIHQFDWLTRENVPVLEAVENQNGIRNDNWGY

SEQ ID NO: 57172 - protein, 277 aa, Glycine max
  peptide (1)..(277): Ceres Seq. ID no. 14315472
MKIKVAACHISYRTLFHTILILAFLLPFVFILTALVTLEGVNKCSSFDCLGRRLGPKLLGRVDDPAQRLVRDFYNILNEVKTREIPSALELPDSFDQLVSDMKSNQYDAKTFAFMLRGMMQKFEREIRESKFSELMNKHFAASSVPKGIHCLSLRLTDEYSSNAHARKQLPPPELLPTLSDNSYHHFIVSTDNILAASVVVTSTVQSSQKPENIVFHVITDKKTYAGMHSWFALNPATPAIVEVRGIHQFDWLTRENVPVLEAVENQNGIRNDNWGY

SEQ ID NO: 57173 - DNA, 2083 bp, Glycine max
  misc_feature (1)..(2083): Ceres Seq. ID no. 14315473
catacgcgcacactgagtcataacgctaatggactcgttctctttcaccactgttccatagagcaactcaaaaccacacacacaaaaaaacatgaatccccgttttgcccctctctctttctcaatcccttctcttcgaaaaacaccttctctcattggtgctaaccacacctccgctcgcttctgctcccgataaataataccacacaaaaaaaatcccaacttttttttttcttcttcttcttttatttcaattcaattcatttttttttgtgattttttctggttattgttattaatttctgtgagaagtgcacaatttgtttccatggatccaaccgtagcgaagcctggctttctcagaaacgttctggttcggttactcctcttcggcgttttcatcgtcgtcgtacggttcgcttacgtcatcaccctcgccggtgagtcctgcaccgtcggcgacttctgcttcttctctccgtcgatcaacctcgcaatcgccggcaccagatcaggcgccctcgcagcgcgcggaggagccgccgggccgccggagcgctatgccagcaaggactggatcaacggcgtccggttctactcgtcggctttccaggacatgatctccggtggcttcctctcgccggcggcgaaggcgctctgcgtggagacgccgaccggccgcgacgtcctcgcgctgcgcgagatcggcgtcatcgacgccgtcgggatctcgaagaaggcgtctccgccgcttgtgaaatccggcgaggctcgccggattccgttccccgatggctcgttcgacttcgtgttcgccggcgacggcgctttagaaaaatcgccgcggccggcggagttcgccgccgaaatctctcggacgctcaaacccgaagggtttgccgcgttccatgtaaaggccaatgacacttacagttacaattcattcgttgatttgttgaatttttgttgcaacgtggtgaaaataaacgacatgttagggtttgattcatccatacctcacataagagagatcgtggtgaagaaagtgcgtcacacaattgattctgaatccaattcaaactccaattccaatggaaaagaatgctctgttccggagtacaaggaaaagctggtgagaaatgcagaggctttgattgaagaggagccactgaagccatggctgactctaaagaaaaacgtgaagaacataaagtacctatcttcaatggttgatataagcttcaaggataggtatgtgtatgttgatgttggagctagaagctatggttccagcattggacgttggtttaggaaacagtacccgaaacagaacaagacctttcatgtgtatgcaattgaggctgataaaacgtttcatcaggagtatgaaacgaaaaagggtgttactttgttgccttatgctgcatgggtgaggaatgagagtttggtgtttgagattaaccgcgacccgggggagaaggagaaggagaaggagaaggagaaggttaagggtaagggaaggggaatggggaggattcaaccattgaaatcttcaggtggttttgatggtggtgaggttgagaagattcctgggttcgatttcgcagactggttgaagaacacggtttcggagaatgatttcgttgtgatgaagatggatgtggagggtactgagtttgatttgattccaagattgtttgaaactggggctatctgtttggtggatgagatttttcttgagtgccattacaataggtggcagaggtgttgccctggacagaggagccccaagtatgagaaaacttatgatcagtgcttgcagctcttcacttctctcagacaaagtggagttcttgttcatcaatggttttaattaactttgtagaattgcctgatggatgatgggtcaaaccctatatgcatgttcttagcttctgcatgtttcttctttttagttttcttatttttttcccaagccaatagagaagagagagagtgagagtgagagttctttattttttaaaatttctctacttgtaacagttgcaactgaaagtgaaaattaaaaccatccctttacaac

SEQ ID NO: 57174 - protein, 514 aa, Glycine max
  peptide (1)..(514): Ceres Seq. ID no. 14315474
MDPTVAKPGFLRNVLVRLLLFGVFIVVVRFAYVITLAGESCTVGDFCFFSPSINLAIAGTRSGALAARGGAAGPPERYASKDWINGVRFYSSAFQDMISGGFLSPAAKALCVETPTGRDVLALREIGVIDAVGISKKASPPLVKSGEARRIPFPDGSFDFVFAGDGALEKSPRPAEFAAEISRTLKPEGFAAFHVKANDTYSYNSFVDLLNFCCNVVKINDMLGFDSSIPHIREIVVKKVRHTIDSESNSNSNSNGKECSVPEYKEKLVRNAEALIEEEPLKPWLTLKKNVKNIKYLSSMVDISFKDRYVYVDVGARSYGSSIGRWFRKQYPKQNKTFHVYAIEADKTFHQEYETKKGVTLLPYAAWVRNESLVFEINRDPGEKEKEKEKEKVKGKGRGMGRIQPLKSSGGFDGGEVEKIPGFDFADWLKNTVSENDFVVMKMDVEGTEFDLIPRLFETGAICLVDEIFLECHYNRWQRCCPGQRSPKYEKTYDQCLQLFTSLRQSGVLVHQWF

SEQ ID NO: 57175 - protein, 418 aa, Glycine max
  peptide (1)..(418): Ceres Seq. ID no. 14315475
MISGGFLSPAAKALCVETPTGRDVLALREIGVIDAVGISKKASPPLVKSGEARRIPFPDGSFDFVFAGDGALEKSPRPAEFAAEISRTLKPEGFAAFHVKANDTYSYNSFVDLLNFCCNVVKINDMLGFDSSIPHIREIVVKKVRHTIDSESNSNSNSNGKECSVPEYKEKLVRNAEALIEEEPLKPWLTLKKNVKNIKYLSSMVDISFKDRYVYVDVGARSYGSSIGRWFRKQYPKQNKTFHVYAIEADKTFHQEYETKKGVTLLPYAAWVRNESLVFEINRDPGEKEKEKEKEKVKGKGRGMGRIQPLKSSGGFDGGEVEKIPGFDFADWLKNTVSENDFVVMKMDVEGTEFDLIPRLFETGAICLVDEIFLECHYNRWQRCCPGQRSPKYEKTYDQCLQLFTSLRQSGVLVHQWF

SEQ ID NO: 57176 - protein, 293 aa, Glycine max
  peptide (1)..(293): Ceres Seq. ID no. 14315476
MLGFDSSIPHIREIVVKKVRHTIDSESNSNSNSNGKECSVPEYKEKLVRNAEALIEEEPLKPWLTLKKNVKNIKYLSSMVDISFKDRYVYVDVGARSYGSSIGRWFRKQYPKQNKTFHVYAIEADKTFHQEYETKKGVTLLPYAAWVRNESLVFEINRDPGEKEKEKEKEKVKGKGRGMGRIQPLKSSGGFDGGEVEKIPGFDFADWLKNTVSENDFVVMKMDVEGTEFDLIPRLFETGAICLVDEIFLECHYNRWQRCCPGQRSPKYEKTYDQCLQLFTSLRQSGVLVHQWF

SEQ ID NO: 57177 - DNA, 1225 bp, Glycine max
  misc_feature (1)..(1225): Ceres Seq. ID no. 14315477
aaaaaaacgtgtcatgtgcctctctccttttcccccaaaatctgcttcagttcacgttcacgcttcgctacctgcgcctattcattgtctcttctcttcccctgctcaacgtttttcttctcccttcccccacccacctccactcttttcatttctattctcttcccaaacagaacgaccatcggaacaaacggcattttgtcaaacagttacgagactcagcattattcataggtgatagtactggcagtgattaagattgcaattgcacaatcagaatattttttatatacaatgttttcaaggtgactgacaacaattaagattgcaattgcaccaaggggacaaaacaaaacaatgagcagcgttttgcaagggaaacgcaagcgccaggacttggcttcaaggctctcggcctcaatgaataatgaggagggtcgtgtctacaacatcattcgcgggaggaaggagatggggatatggcaaggggacatcaaacgagaagccaacatccccgatagtttgttgaagaaatccatcaagatgcttatcaccaagaaactcgtcaaggaggttgtgaacgtgcagaacaggtccaagaagttgttgatggcatcggatttcgaaccctccaatgagatcagtggtggagagtggtacaccgaaggcaaactcgacacagaatttattgacaagctgtctgaggcttgctttagtagtattcgtcgcctgaaggtcgcgacttgtgagggcatccttgagtggattaggaaggcgggtggtggagtcagtaaagggcagatggagcagattttgaagaagttggttatggagaataaggtgcaggaagtgactagtgatggctctggggattttgagtctgttcctgttggtgaagtttgttatagattggtgaagaaggctgctggtgttggtgccatggcttctattccttgtggggtttgtcctaggattaattcttgtacacccgatggtgttatctcccctacaacttgtcaatattatcagaaatggttggacttctaaatgtgtcccattcaaatccaagtccttttttagtttgggattttacataccttttagttttgaattccatcttttttatttttttatttttcatatggcactttctagagtctttattgattttctgttcaatgtgatacttaaaagaattaattgattttccttttgcatttaaggg

SEQ ID NO: 57178 - protein, 229 aa, Glycine max
  peptide (1)..(229): Ceres Seq. ID no. 14315478
MSSVLQGKRKRQDLASRLSASMNNEEGRVYNIIRGRKEMGIWQGDIKREANIPDSLLKKSIKMLITKKLVKEVVNVQNRSKKLLMASDFEPSNEISGGEWYTEGKLDTEFIDKLSEACFSSIRRLKVATCEGILEWIRKAGGGVSKGQMEQILKKLVMENKVQEVTSDGSGDFESVPVGEVCYRLVKKAAGVGAMASIPCGVCPRINSCTPDGVISPTTCQYYQKWLDF

SEQ ID NO: 57179 - protein, 208 aa, Glycine max
  peptide (1)..(208): Ceres Seq. ID no. 14315479
MNNEEGRVYNIIRGRKEMGIWQGDIKREANIPDSLLKKSIKMLITKKLVKEVVNVQNRSKKLLMASDFEPSNEISGGEWYTEGKLDTEFIDKLSEACFSSIRRLKVATCEGILEWIRKAGGGVSKGQMEQILKKLVMENKVQEVTSDGSGDFESVPVGEVCYRLVKKAAGVGAMASIPCGVCPRINSCTPDGVISPTTCQYYQKWLDF

SEQ ID NO: 57180 - protein, 191 aa, Glycine max
  peptide (1)..(191): Ceres Seq. ID no. 14315480
MGIWQGDIKREANIPDSLLKKSIKMLITKKLVKEVVNVQNRSKKLLMASDFEPSNEISGGEWYTEGKLDTEFIDKLSEACFSSIRRLKVATCEGILEWIRKAGGGVSKGQMEQILKKLVMENKVQEVTSDGSGDFESVPVGEVCYRLVKKAAGVGAMASIPCGVCPRINSCTPDGVISPTTCQYYQKWLDF

SEQ ID NO: 57181 - DNA, 1440 bp, Glycine max
  misc_feature (1)..(1440): Ceres Seq. ID no. 14312907
aactctcagcgcccagcctacagcctccaggtgtgttttgttttgcagatccaacactctctctatttatatccaactgtaccatctcccacttccttattctcaaccctttttatcttttcatcaattcaattcaaaccacgccttcccctgttcacaaccttgcccacacactgcattgttctaattaaacatgtcaccctcactgttaccaccatcacaacacaaccaccatttctaactcaacaacaaccaaaaaaaaaaagattctggagcatcatttcttggattctggttcgcgttggtcacatccatcaaacacccctatactctttcttggcgtgcgtcaggtattcatttttacggcaaccctgacagagtaataagacagttaccgtgttgtacgtgtccttcaaacgtcacccacttcaacacataaaccatcgtttttcccaccagatttatattcattcgtcgtatttaaacccaccacaccaaccaaccatacattatcgttgcaattgttgttacaagcttaggttagggtctgtttggtgataatttagaatcttagatggggaattgccaagctgcggaagcggctacggttgtgattcagcatcctgggaacaagatcgagagggtttattggtcgcttagcgcacacgaggttatgaactcgaatcctgggcactatgttgcgcttgtcgtgtcctcgcccacgctcaaggccgagaatggcgctccgatgaagcagcttaagcttctccgacccgacgatactttgcatattggccaggtttatcggttgatcagcttcgaagatgtgttgaaggagtttgcttccaagaaatgtggtaaacttgggaaattgctcaaggagacgggtagtcatgggattcagatgaagcacaaggactctagagctacaaatcctagcccaaattccaaaaccgaattcggttccattaagggtttctccatttttgtcaaactcactgaccatgaaacttgcggaatgttgatgttgtgtgtggtccaatatatctatcctcttcagcaaaattgcttccttttcgtgtattgattattatatatgtttttataaacacgctctggcacgagcagcgtctgcgatcagttataaacccctcgagaaaataatgctatatgttatctacaaactccacagtccacagcagatgagataacctatctaggctacaagataaaaacaaaagtcctgcactcaattcaaatcttagatccgacatgccccagatagtgcctagctccactaggcaccattaacagattaatgtttgtatgtagcttggttgttttgcttggatggaatcacgggtcaatggtgtaatcactttatcccttgcttttttcattcaattctgcctttaattcaaaagacagggtatttgttct

SEQ ID NO: 57182 - protein, 170 aa, Glycine max
  peptide (1)..(170): Ceres Seq. ID no. 14312908
MGNCQAAEAATVVIQHPGNKIERVYWSLSAHEVMNSNPGHYVALVVSSPTLKAENGAPMKQLKLLRPDDTLHIGQVYRLISFEDVLKEFASKKCGKLGKLLKETGSHGIQMKHKDSRATNPSPNSKTEFGSIKGFSIFVKLTDHETCGMLMLCVVQYIYPLQQNCFLFVY

SEQ ID NO: 57183 - protein, 137 aa, Glycine max
  peptide (1)..(137): Ceres Seq. ID no. 14312909
MNSNPGHYVALVVSSPTLKAENGAPMKQLKLLRPDDTLHIGQVYRLISFEDVLKEFASKKCGKLGKLLKETGSHGIQMKHKDSRATNPSPNSKTEFGSIKGFSIFVKLTDHETCGMLMLCVVQYIYPLQQNCFLFVY

SEQ ID NO: 57184 - protein, 124 aa, Glycine max
  peptide (1)..(124): Ceres Seq. ID no. 14312910
NSQRPAYSLQVCFVLQIQHSLYLYPTVPSPTSLFSTLFIFSSIQFKPRLPLFTTLPTHCIVLIKHVTLTVTTITTQPPFLTQQQPKKKRFWSIISWILVRVGHIHQTPLYSFLACVRYSFLRQP

SEQ ID NO: 57185 - DNA, 1860 bp, Glycine max
  misc_feature (1)..(1860): Ceres Seq. ID no. 15172549
ggcgatgtaaacagagtggagcagctccaactgccaaccaactctcctttgacttctccgctttctttctttccttctttctatttccttcttttcattcactctttcacattcactccctttcttccttccttccgtcattcccttcaaacccttccattctcctcaccatggcttcgccctttctccccgccaaaaccaattccgccaccctctccttctccgccgcagtccccggccgccgcctccacttcgcggcgtctccgtcgcattcccctcgacggaggtcctccctgacggtgaagtcgaagatcagggagatcttcatgcccgccctcagctccaccatgacggagggaaaaatcgtctcgtgggtcaagtccgagggcgacgtcctctccaaaggtgacagcgtcgtcgtcgtcgagtccgacaaggccgacatggacgtcgagacgttctacaatggcatcctcgccgtcatcgttgtcgccgagggccagaccgcccccgtcggtgcccccatcggcctccttgcggagaccgaggccgaagttgccgaggccatggcagccgccaattctgctccaactccacctcccaaagcttccgatacttctccggcgccggcaccggcgccggaagtctctgattcaccacgtaaggcggttgcaacaccgtatgccaagaagctcgcgaagcagcacaaagtgaacataggttcggttgtcgggactggtccgtttggaagagtcactcctgctgacgtggagaaggccgccggtattttgccggcggagagcaatgtagctccggcggcggtggattcggctccaccgaaagctgctgctgcggctccggcggcatcctcggcttcaattccaggttctagtgttgtggcctttacgacaatgcaatctgcggttgcgaagaacatggtggagagtctctctgtgccgacgttccgtgttgggtacccagttaccactgatgcacttgatgctctgtatgagaaggtgagaaaaaagggtgtgaccatgacagcgattctggccaaggcagctgcaatggcactcgttcagcacccagtggtgaatgcctcgtgcaaagatgggaagaactttgcctataatagtaacattaacattgctgttgctgtggcaaccaatggtggtttgattacaccggttcttcaggatgcagataagttggacttgtatcttttgtcccaaaaatggaaagaactagtggaaaaagctcgtgccaagcaattgcaacctcatgaatataattcaggaactttcacactttcaaatttgggaatgtttggagttgacaggtttgacgccatacttcctccaggccagggggctatcatggcggttggagcatcaaaacctactgtcctagcagataaggatggtttctttactgtaaaaagtaaaatgctggtaaatgtaactgctgatcaccgaataatctatggggctgacttggctgcattccttcagacattctcaaaaatcattgagaaccctgaatgcctaacattgtagtcattcaacactttgacataattatctatcttcgatcatccacaagggattacgagttgatagctttcactgagcagactctagcgaaatatacctcattatgtgattatcttgtaatttcacagttttattgttatatatttccagggtctttctgaaggaacattttcttgattttcaatgggaggaacaactttgattttttttcccgctgaaggaaattgtaaaccaatatctatggcaagaaacaaggagagtgaattatgcttatgacttaccaataaaaaaacctagtattctttcc

SEQ ID NO: 57186 - protein, 517 aa, Glycine max
  peptide (1)..(517): Ceres Seq. ID no. 15172550
RCKQSGAAPTANQLSFDFSAFFLSFFLFPSFHSLFHIHSLSSFLPSFPSNPSILLTMASPFLPAKTNSATLSFSAAVPGRRLHFAASPSHSPRRRSSLTVKSKIREIFMPALSSTMTEGKIVSWVKSEGDVLSKGDSVVVVESDKADMDVETFYNGILAVIVVAEGQTAPVGAPIGLLAETEAEVAEAMAAANSAPTPPPKASDTSPAPAPAPEVSDSPRKAVATPYAKKLAKQHKVNIGSVVGTGPFGRVTPADVEKAAGILPAESNVAPAAVDSAPPKAAAAAPAASSASIPGSSVVAFTTMQSAVAKNMVESLSVPTFRVGYPVTTDALDALYEKVRKKGVTMTAILAKAAAMALVQHPVVNASCKDGKNFAYNSNINIAVAVATNGGLITPVLQDADKLDLYLLSQKWKELVEKARAKQLQPHEYNSGTFTLSNLGMFGVDRFDAILPPGQGAIMAVGASKPTVLADKDGFFTVKSKMLVNVTADHRIIYGADLAAFLQTFSKIIENPECLTL

SEQ ID NO: 57187 - protein, 461 aa, Glycine max
  peptide (1)..(461): Ceres Seq. ID no. 15172551
MASPFLPAKTNSATLSFSAAVPGRRLHFAASPSHSPRRRSSLTVKSKIREIFMPALSSTMTEGKIVSWVKSEGDVLSKGDSVVVVESDKADMDVETFYNGILAVIVVAEGQTAPVGAPIGLLAETEAEVAEAMAAANSAPTPPPKASDTSPAPAPAPEVSDSPRKAVATPYAKKLAKQHKVNIGSVVGTGPFGRVTPADVEKAAGILPAESNVAPAAVDSAPPKAAAAAPAASSASIPGSSVVAFTTMQSAVAKNMVESLSVPTFRVGYPVTTDALDALYEKVRKKGVTMTAILAKAAAMALVQHPVVNASCKDGKNFAYNSNINIAVAVATNGGLITPVLQDADKLDLYLLSQKWKELVEKARAKQLQPHEYNSGTFTLSNLGMFGVDRFDAILPPGQGAIMAVGASKPTVLADKDGFFTVKSKMLVNVTADHRIIYGADLAAFLQTFSKIIENPECLTL

SEQ ID NO: 57188 - protein, 409 aa, Glycine max
  peptide (1)..(409): Ceres Seq. ID no. 15172552
MPALSSTMTEGKIVSWVKSEGDVLSKGDSVVVVESDKADMDVETFYNGILAVIVVAEGQTAPVGAPIGLLAETEAEVAEAMAAANSAPTPPPKASDTSPAPAPAPEVSDSPRKAVATPYAKKLAKQHKVNIGSVVGTGPFGRVTPADVEKAAGILPAESNVAPAAVDSAPPKAAAAAPAASSASIPGSSVVAFTTMQSAVAKNMVESLSVPTFRVGYPVTTDALDALYEKVRKKGVTMTAILAKAAAMALVQHPVVNASCKDGKNFAYNSNINIAVAVATNGGLITPVLQDADKLDLYLLSQKWKELVEKARAKQLQPHEYNSGTFTLSNLGMFGVDRFDAILPPGQGAIMAVGASKPTVLADKDGFFTVKSKMLVNVTADHRIIYGADLAAFLQTFSKIIENPECLTL

SEQ ID NO: 57189 - DNA, 1138 bp, Glycine max
  misc_feature (1)..(1138): Ceres Seq. ID no. 14315410
actggaatatttttcacgtttgatttgaccattaaattggagataggatttttgtgcgggccaagaaagatacattcatcgttcaacaatcttcaaacaaacaaaaaataaagtgtcttagaaatgacacgatccttggcaatggcttcttcatcaatgttatgtccgaagctggggagttgtgcagtgtcacatacaaagttccaagcttttcatctctcttcaatgttctctccactgggtcgaggccttgtctcaccttggagtggtttaaagcatctgggtatctcagctaaagcaaagcctcttattcacatagatagaaagggtgggtgtaagggtaaggtggtttatgcttctctctttggggttggagctcctgaggctttggtaattggggtcgttgctttgttggtttttggccctaaaggtcttgctgaggttgctagaaatctgggaaaaacattgcgtacatttcaacccaccattaaagagcttcaggatgtttcaagggaatttaagagtactcttgaacgggagattggtcttgatgacaatttaagtccaacccagaacacatacaattccaacatacgcaataccacaccaacttcatcatccacttccactgttgaccctaatggcacgccagatcctactaaagcatacagctctgaggagtatcttaagattacagaggagcagctgaaggcatctgctgcacaacagcaggggcaaacaccttccaaggaaggtgacaatgagcctcaaatccagccttctggttagtcttttttgtggaacataggcactttttttttttttctccctctttccaccctctttgttcttcacctttctttgatatgtcaacagctgaggaaacagctactactgtacctccacctcagaagccagaaagtgagacgtaaactctgggttcataagcatagggagttaaaataatttgtccaattatcgcttcaatgcccggaagtgggcagtactattggcacaagagatgagaagggtcaggcaattttgttaccagctagtcattagaatcatgtaaaatgtaaagaacaaaaccattaacgattagtatgtttccaaattaattgtagttatatttgtcatc

SEQ ID NO: 57190 - protein, 221 aa, Glycine max
  peptide (1)..(221): Ceres Seq. ID no. 14315411
MTRSLAMASSSMLCPKLGSCAVSHTKFQAFHLSSMFSPLGRGLVSPWSGLKHLGISAKAKPLIHIDRKGGCKGKVVYASLFGVGAPEALVIGVVALLVFGPKGLAEVARNLGKTLRTFQPTIKELQDVSREFKSTLEREIGLDDNLSPTQNTYNSNIRNTTPTSSSTSTVDPNGTPDPTKAYSSEEYLKITEEQLKASAAQQQGQTPSKEGDNEPQIQPSG

SEQ ID NO: 57191 - protein, 215 aa, Glycine max
  peptide (1)..(215): Ceres Seq. ID no. 14315412
MASSSMLCPKLGSCAVSHTKFQAFHLSSMFSPLGRGLVSPWSGLKHLGISAKAKPLIHIDRKGGCKGKVVYASLFGVGAPEALVIGVVALLVFGPKGLAEVARNLGKTLRTFQPTIKELQDVSREFKSTLEREIGLDDNLSPTQNTYNSNIRNTTPTSSSTSTVDPNGTPDPTKAYSSEEYLKITEEQLKASAAQQQGQTPSKEGDNEPQIQPSG

SEQ ID NO: 57192 - protein, 210 aa, Glycine max
  peptide (1)..(210): Ceres Seq. ID no. 14315413
MLCPKLGSCAVSHTKFQAFHLSSMFSPLGRGLVSPWSGLKHLGISAKAKPLIHIDRKGGCKGKVVYASLFGVGAPEALVIGVVALLVFGPKGLAEVARNLGKTLRTFQPTIKELQDVSREFKSTLEREIGLDDNLSPTQNTYNSNIRNTTPTSSSTSTVDPNGTPDPTKAYSSEEYLKITEEQLKASAAQQQGQTPSKEGDNEPQIQPSG

SEQ ID NO: 57193 - DNA, 1255 bp, Glycine max
  misc_feature (1)..(1255): Ceres Seq. ID no. 14312882
aaaaaagcccatgttatcttgttcttttcctccactatgttttttttttttgcaattatctttcttatttaaaagatgaagcaagcaaacagaatcccctcttttgatcttggtttcaatattcatcatcaaatcactggtcctccttttatagaaatcttagatctgcttttaacacaaggttttggtggagaagaagaagcaaagacgacggtgtataaatacaagagtagaagaagaagaagaagcaattagagggagagttagtgagcaaggtggatcgaaggcaagggaagaggtctctccctcctcatgaggagaaaaaagaagctttcaactttcctattattcatccaacaccatctcaaaatcgaaaggaacaagcttcaccatcacccttttcactcctcatgagtaacaacaaaaacaacaccttcttccccaccccacatggccaaataagcacttctgaatttgttaatagccaaaatccgccccaggctacaaatcaaggcattgatgatattaggaaaaagcactatagaggagttaggcagagaccatggggcaaatgggcagcagaaataagagaccctaagaaagcagctagagtgtggcttggcacctttgacacggcagaggctgcagctatggcttatgatgctgctgcattgaggttcaaaggaaacaaagccaaactcaattttcctgaacgtgttgttatgccaatacaaccacaaacaaataacaataattccacttcttcatcagctcctactacacaatcatcttcttctcttccaccaccacaatctctacataataatagttctctttcagcagaagggtttccaaatcttgaggagtatgcaaggttgctgagttgtagcgatgatgatgattttcaacgtgttgcattggggctctaccagcatcacaataatgaggattttatttgtggttcatcacaaccaccaccagtgccgttttttgtgtcctcttcttcttcttcttctgcaatgacatcgtcatattctgattttttgggccaaggagggagtactggttttgatgaagggaacaagagggggtcgtagttttatgtctctgaattttgagcactgcatgcaggttgcttccacaacaattaaggaagttcaaatctctcatctcttatatgttcttttgtttttattattccaattacaaaataacacctgaggtataaaatctataatactcatctttcgtcttt

SEQ ID NO: 57194 - protein, 228 aa, Glycine max
  peptide (1)..(228): Ceres Seq. ID no. 14312883
MSNNKNNTFFPTPHGQISTSEFVNSQNPPQATNQGIDDIRKKHYRGVRQRPWGKWAAEIRDPKKAARVWLGTFDTAEAAAMAYDAAALRFKGNKAKLNFPERVVMPIQPQTNNNNSTSSSAPTTQSSSSLPPPQSLHNNSSLSAEGFPNLEEYARLLSCSDDDDFQRVALGLYQHHNNEDFICGSSQPPPVPFFVSSSSSSSAMTSSYSDFLGQGGSTGFDEGNKRGS

SEQ ID NO: 57195 - protein, 148 aa, Glycine max
  peptide (1)..(148): Ceres Seq. ID no. 14312884
MAYDAAALRFKGNKAKLNFPERVVMPIQPQTNNNNSTSSSAPTTQSSSSLPPPQSLHNNSSLSAEGFPNLEEYARLLSCSDDDDFQRVALGLYQHHNNEDFICGSSQPPPVPFFVSSSSSSSAMTSSYSDFLGQGGSTGFDEGNKRGS

SEQ ID NO: 57196 - protein, 124 aa, Glycine max
  peptide (1)..(124): Ceres Seq. ID no. 14312885
MPIQPQTNNNNSTSSSAPTTQSSSSLPPPQSLHNNSSLSAEGFPNLEEYARLLSCSDDDDFQRVALGLYQHHNNEDFICGSSQPPPVPFFVSSSSSSSAMTSSYSDFLGQGGSTGFDEGNKRGS

SEQ ID NO: 57197 - DNA, 1495 bp, Glycine max
  misc_feature (1)..(1495): Ceres Seq. ID no. 14312152
atcttcaacttgttcaactctctcaaaaccaaataaaatctttcacaactcaaaactcaagctccaaattttcactttacacctttgaattcattttttcacacatggacgagatcgacgtgcctccgttcttcgtgtgccctatttcattagagctcatgaaggaccccgtgacggtctccaccggcatcacctacgaccgcgacagcatcgagaagtggctcttcgccgaggtgaagaacgacacgtgtcccgtcacgaagcagcccctcctcccggacctcactccgaaccacacgctccgcagactcatccaagcctggtgcaccgtcaacgcctcccacggcgtccagagaatccccacaccaaaaccaccggtcgacaaaaccctcatcgagaaactcctccgcaacacctcggcttcggactccccgagcctccagctccggtccctccgaaccctcaagtccattgcctcggaatcccaatcaaacaaacgctgcatcgaatctgcagaaggcgcagttaatttcctagcaacaattataaccaccaccaccaccaccaccaccaacctactcgatgatgacatcgagttggaaataaaaacaagtacagcccacgaagcattgagccttttacacagcattcagctgtcagagtccggtttgaaggctctgttgaaccatccagaatttataaactctctaaccaagatgatgcaaagagggatctacgagtcacgcgcctacgctgttttcttgctgaattccttgtccgaggtggcggatccggcgcagttgattaacctaaaaactgatttgttcactgaattggttcaggttcttaaggatcaggtttcggagaaggtctcgaaggcgaccctgcaggcattgattcaggtgtgttcgtggggcagaaatagggtgaaggctgtggaggctggagctgtgccggttctggtggagcttcttctcgaatgcaacgagagaaaaccgatagaaatggtgctggttttgttggagattttatgtcagagtgctgacgggagggcggggctgttggcccacgcggcgggggtggtgatcgtggcgaagaagattctgagggtttcaacgatggcgaacgatagggcggcgaagattctgctttcggtgtgcagattttcccccacgccgggcttggtgcaggagatggtgcagcttggggtggtggcaaagctttgtctggtgctgcaggtggatagtgggaacaaagcaaaagagatagctagggagattctcaaattgcatgctagggcttggaggaattcgccttgcatctcacaatttgcttgcttcgtttccaatgagttcgtgaaagaaagaaaatccactttgtttttgttttgttcgtgacaccattggatgtaatcgattatttaagaaactaattccttctgtgagatctagtttgcggtgaaagaaaaccgaaagtaaatcacagttgagttttc

SEQ ID NO: 57198 - protein, 464 aa, Glycine max
  peptide (1)..(464): Ceres Seq. ID no. 14312153
LQLVQLSQNQIKSFTTQNSSSKFSLYTFEFIFSHMDEIDVPPFFVCPISLELMKDPVTVSTGITYDRDSIEKWLFAEVKNDTCPVTKQPLLPDLTPNHTLRRLIQAWCTVNASHGVQRIPTPKPPVDKTLIEKLLRNTSASDSPSLQLRSLRTLKSIASESQSNKRCIESAEGAVNFLATIITTTTTTTTNLLDDDIELEIKTSTAHEALSLLHSIQLSESGLKALLNHPEFINSLTKMMQRGIYESRAYAVFLLNSLSEVADPAQLINLKTDLFTELVQVLKDQVSEKVSKATLQALIQVCSWGRNRVKAVEAGAVPVLVELLLECNERKPIEMVLVLLEILCQSADGRAGLLAHAAGVVIVAKKILRVSTMANDRAAKILLSVCRFSPTPGLVQEMVQLGVVAKLCLVLQVDSGNKAKEIAREILKLHARAWRNSPCISQFACFVSNEFVKERKSTLFLFCS

SEQ ID NO: 57199 - protein, 430 aa, Glycine max
  peptide (1)..(430): Ceres Seq. ID no. 14312154
MDEIDVPPFFVCPISLELMKDPVTVSTGITYDRDSIEKWLFAEVKNDTCPVTKQPLLPDLTPNHTLRRLIQAWCTVNASHGVQRIPTPKPPVDKTLIEKLLRNTSASDSPSLQLRSLRTLKSIASESQSNKRCIESAEGAVNFLATIITTTTTTTTNLLDDDIELEIKTSTAHEALSLLHSIQLSESGLKALLNHPEFINSLTKMMQRGIYESRAYAVFLLNSLSEVADPAQLINLKTDLFTELVQVLKDQVSEKVSKATLQALIQVCSWGRNRVKAVEAGAVPVLVELLLECNERKPIEMVLVLLEILCQSADGRAGLLAHAAGVVIVAKKILRVSTMANDRAAKILLSVCRFSPTPGLVQEMVQLGVVAKLCLVLQVDSGNKAKEIAREILKLHARAWRNSPCISQFACFVSNEFVKERKSTLFLFCS

SEQ ID NO: 57200 - protein, 412 aa, Glycine max
  peptide (1)..(412): Ceres Seq. ID no. 14312155
MKDPVTVSTGITYDRDSIEKWLFAEVKNDTCPVTKQPLLPDLTPNHTLRRLIQAWCTVNASHGVQRIPTPKPPVDKTLIEKLLRNTSASDSPSLQLRSLRTLKSIASESQSNKRCIESAEGAVNFLATIITTTTTTTTNLLDDDIELEIKTSTAHEALSLLHSIQLSESGLKALLNHPEFINSLTKMMQRGIYESRAYAVFLLNSLSEVADPAQLINLKTDLFTELVQVLKDQVSEKVSKATLQALIQVCSWGRNRVKAVEAGAVPVLVELLLECNERKPIEMVLVLLEILCQSADGRAGLLAHAAGVVIVAKKILRVSTMANDRAAKILLSVCRFSPTPGLVQEMVQLGVVAKLCLVLQVDSGNKAKEIAREILKLHARAWRNSPCISQFACFVSNEFVKERKSTLFLFCS

SEQ ID NO: 57201 - DNA, 1754 bp, Glycine max
  misc_feature (1)..(1754): Ceres Seq. ID no. 15171626
acacgcaactatttctgactacgttttgctctacgcctctccctctctctcaaaaatcgttctcttcgattttagggttttgttttgctgctgcctccgttccccccttctcataaacaacgcgttttctcttctgcttcgtatctattctttgcttttggttttggttgattcaaggccttcacagcattcgttgcggcattttaatcaatttatccaagcaggactgaatgaactaatggagtctaaaggtgggaaaaagaagtctagtagtagtagtagtaaatcattgttctacgaagctcccctcggatacagcattgaagacgttagaccaaacggtggaatcaagaaattcagatctgctgcttactccaactgcgctcgcaaaccttcctgatatccatccagattgatagttcattgcatgcaaccatagttttattaggttttttcttctttgttttcaattaggtttttgctgctctccttcaaactccgtctttccgaatcctctctttgtgattgtgttctgttctgcttcctaccgcgatagtttctcttctgaagcatggccatggcggtttctgcaattggttttgaaggtttcgagaagaggctggaaatatcctttttccagccgggactttttgctgaccctgagggaatgggtttaagagctcttgcaaagtcccagttggatgagatacttacaccggctgcttgcaccattgtttcatctctcagaaatgatcatgtcgactcctatgttctgtctgagtccagtctctttgtttatgcctacaagatcatcatcaaaacctgtggtactacaaagctactgcttgcaatcccacccatattgaaatttgctgaaatgctttccctcaatgttagatctgtgaattacaccaggggaagtttcatctttcccggtgctcagccctatccccatcgcaacttttctgaggaagttgctattcttgatggctactttggcaagcttagtgcaggaagcaatgcttatattttgggtggccaagacaaatcacagaactggcatgtctactctgcttctgcagattctgtaactccatgcgacaatgtttacactctagagatgtgcatgactggcctggatagagagaaagcacaggttttctacaaagaacaatctgcttcagctgccattatgactgttaattctggcattagaaaaattcttccagattctgagatttgtgactttgactttgagccatgtggttattcaatgaactctgttgaaggtgctgctgtttctaccattcatgttaccccagaagatggtttcagttatgcaagctttgagactgttgggtatgacttcaaagtggtgaatctgaacgaaatggttaagagggtattggcatgttttctcccaactgagttctctgttgcagttcatgtggatggtgcaagcaagttgtttgatcagacgtgttttctggatgttaagggatactgtcgcgaagagaggagccacgaagggcttggaatgggtggttctcttgtctaccaaaaatttgccaagacttgtgactgtggttcacctagatcaactctgaagtgctggaaagaggaagatgaagaagagtagttttcttaagtgtctttattatgtccttgcgaaaataagtccggttttccagacagtgattgtttttctttggtgttttttcccttttatgttagaccattgttagggcgtttgg

SEQ ID NO: 57202 - protein, 355 aa, Glycine max
  peptide (1)..(355): Ceres Seq. ID no. 15171627
MAMAVSAIGFEGFEKRLEISFFQPGLFADPEGMGLRALAKSQLDEILTPAACTIVSSLRNDHVDSYVLSESSLFVYAYKIIIKTCGTTKLLLAIPPILKFAEMLSLNVRSVNYTRGSFIFPGAQPYPHRNFSEEVAILDGYFGKLSAGSNAYILGGQDKSQNWHVYSASADSVTPCDNVYTLEMCMTGLDREKAQVFYKEQSASAAIMTVNSGIRKILPDSEICDFDFEPCGYSMNSVEGAAVSTIHVTPEDGFSYASFETVGYDFKVVNLNEMVKRVLACFLPTEFSVAVHVDGASKLFDQTCFLDVKGYCREERSHEGLGMGGSLVYQKFAKTCDCGSPRSTLKCWKEEDEEE

SEQ ID NO: 57203 - protein, 353 aa, Glycine max
  peptide (1)..(353): Ceres Seq. ID no. 15171628
MAVSAIGFEGFEKRLEISFFQPGLFADPEGMGLRALAKSQLDEILTPAACTIVSSLRNDHVDSYVLSESSLFVYAYKIIIKTCGTTKLLLAIPPILKFAEMLSLNVRSVNYTRGSFIFPGAQPYPHRNFSEEVAILDGYFGKLSAGSNAYILGGQDKSQNWHVYSASADSVTPCDNVYTLEMCMTGLDREKAQVFYKEQSASAAIMTVNSGIRKILPDSEICDFDFEPCGYSMNSVEGAAVSTIHVTPEDGFSYASFETVGYDFKVVNLNEMVKRVLACFLPTEFSVAVHVDGASKLFDQTCFLDVKGYCREERSHEGLGMGGSLVYQKFAKTCDCGSPRSTLKCWKEEDEEE

SEQ ID NO: 57204 - protein, 323 aa, Glycine max
  peptide (1)..(323): Ceres Seq. ID no. 15171629
MGLRALAKSQLDEILTPAACTIVSSLRNDHVDSYVLSESSLFVYAYKIIIKTCGTTKLLLAIPPILKFAEMLSLNVRSVNYTRGSFIFPGAQPYPHRNFSEEVAILDGYFGKLSAGSNAYILGGQDKSQNWHVYSASADSVTPCDNVYTLEMCMTGLDREKAQVFYKEQSASAAIMTVNSGIRKILPDSEICDFDFEPCGYSMNSVEGAAVSTIHVTPEDGFSYASFETVGYDFKVVNLNEMVKRVLACFLPTEFSVAVHVDGASKLFDQTCFLDVKGYCREERSHEGLGMGGSLVYQKFAKTCDCGSPRSTLKCWKEEDEEE

SEQ ID NO: 57205 - DNA, 1134 bp, Glycine max
  misc_feature (1)..(1134): Ceres Seq. ID no. 14315438
atgttctttgtttgattgaggcttctgaacagtttctgacaccgaaattcagccacaaagttgaccatcttgggatggatgagaatatcatcatgttccaccatttccccacattgatacaacaaggagattccaacaattgaaaactccttatcatctttctcttgcaacatcgtttcgcggttcctttgccgtgatttcaattgttgcataagaaaacatcactcactacttctttcctctcctttttcattcaatttctctgattgacacaattgccgcccagatcagtgattgacccaattgagaaaaaaaccttaaaagttccgggttttttttttctttaattgttgctggttttgcaggtggcccagttgggaattcaagatggttctgtgatttaacaagtgccctcttgaaatactacccgagtgagatacttcgatttaactccctctgttgatggctgaaactcaattgaagtgattcactggactactttatcatcttggtctgaggttgaagctatttaatttctgaatttccgtgagtttcttaatccctgagtatggccgggagccaagatcagttagagatcaagtttcggttgagtgatggtacggatattggccccaaaagttattctgctgctactagtattgtaacactaaaagaaagtgttcttgctcaatggccaaaagataaggagtatggaccaagaactgtaaaagatttgaagttaattagtgctggaaaagtattggagaacaacaaaacagtgggagactgtcagagtccattgtgtgatctacctggtggagttacaacaatgcatgtggttgtgcaaccaccttctgtggaggaagatatgaaagtagcaagcgaagcaaagcagagcaaatgtgtttgtgtgatattatagtgtccagattgaatagaaggtgtcatctatttaggtggttaaaagttacacttgtattcattttaaaagtaatctatggctttcaaaagatttcctcatacacaaactgtttcgttgcatgcctcattgtctaattgatgtaaatgctgattgaaatgagaactctaaaattattctcgtgcttcagctagatgcaaagtgcacctagagtt

SEQ ID NO: 57206 - protein, 117 aa, Glycine max
  peptide (1)..(117): Ceres Seq. ID no. 14315439
MAGSQDQLEIKFRLSDGTDIGPKSYSAATSIVTLKESVLAQWPKDKEYGPRTVKDLKLISAGKVLENNKTVGDCQSPLCDLPGGVTTMHVVVQPPSVEEDMKVASEAKQSKCVCVIL

SEQ ID NO: 57207 - DNA, 1468 bp, Glycine max
  misc_feature (1)..(1468): Ceres Seq. ID no. 14312817
cacatttagctaccacgaaacctaatttcaatttctctgtgaagagtcattttccgatgaaacgcaccgttcggcccctcttcgcgctcctcctcctcctcgtattcgccgccacgctcacctcacgcgccgtcctccgccgcggcatcctctccatcgagctcgaatcccgcgtccggatccgccgccatattccgccgccgccgcagctcaacgccacgctcctccaccacgcagccgtcgaaattggcgaggagaagttcaagcaggagatccagagcctccttgatggcaacttcggcagccacgcgcgccaccgcaccttcgtctcctggcgccgcttcatccaccacgaccgcggcagcgccggagtcaccgccgccaaactcccggcgactatccggtcgccgctcttctaccgctcctggctcgacttccggaaggtcctccacgactggttccggaagcgacgattccaacccggtatcatgtccgggttgactcggtcaattaagcttccaattgattcacacaacaacaacaacaaactacaaaccaataacaaaaacaaatactcttcctgtgccgtagttggaaacagcggaattttgttgaatagagactatggtagtgaaattgattcccatgagtttgtgataaggttgaacaatgctagagttgatcactttgagaccaaggttggaaaaaaaactagcatttcattcatgaatagtaacatcttgcatttgtgtgctagaaggggagggtgtttctgccacccttatggtgaccgtgttccgattgttatgtacatttgtcaagccttgcatttcatggactacactgtgtgcaatgcttctcacaaggctcctttgttggtgactgatcctaggtttgatgtgttgtgtgcgaggattgtgaagtactattcgttgaagaggtttgtggaggagagtgggaagggtttggagaagtggggagaggctcatgatggttctctttttcactactcttcagggatgcaggctgtgatgctggctttggggatttgtgatagggttagcatttttgggtttgggaaatcgacttctgctaagcaccattaccacactaaccagaaggctgagcttcacttgcatgactatgaggctgagtatgcgttttatagggaccttgtggatgggaaaaggcctataccctttcttgaggataggtttaaggttcctcctgttgtcatgtatcaatgatgggtgctgaactgctgctgctgctgcaagtggtggtggagggcctctgtgaattgttgttctgttattgtaatacttgtgaaatgcacagatagtggaaagcaaaatactgattcaagattcgtttttgttgtttgtgttgtactgtccaacatgaagcctcaaggcaacaccaagtgtaaattttgttggttagatcaatacagttctttgactccatc

SEQ ID NO: 57208 - protein, 414 aa, Glycine max
  peptide (1)..(414): Ceres Seq. ID no. 14312818
HLATTKPNFNFSVKSHFPMKRTVRPLFALLLLLVFAATLTSRAVLRRGILSIELESRVRIRRHIPPPPQLNATLLHHAAVEIGEEKFKQEIQSLLDGNFGSHARHRTFVSWRRFIHHDRGSAGVTAAKLPATIRSPLFYRSWLDFRKVLHDWFRKRRFQPGIMSGLTRSIKLPIDSHNNNNKLQTNNKNKYSSCAVVGNSGILLNRDYGSEIDSHEFVIRLNNARVDHFETKVGKKTSISFMNSNILHLCARRGGCFCHPYGDRVPIVMYICQALHFMDYTVCNASHKAPLLVTDPRFDVLCARIVKYYSLKRFVEESGKGLEKWGEAHDGSLFHYSSGMQAVMLALGICDRVSIFGFGKSTSAKHHYHTNQKAELHLHDYEAEYAFYRDLVDGKRPIPFLEDRFKVPPVVMYQ

SEQ ID NO: 57209 - protein, 396 aa, Glycine max
  peptide (1)..(396): Ceres Seq. ID no. 14312819
MKRTVRPLFALLLLLVFAATLTSRAVLRRGILSIELESRVRIRRHIPPPPQLNATLLHHAAVEIGEEKFKQEIQSLLDGNFGSHARHRTFVSWRRFIHHDRGSAGVTAAKLPATIRSPLFYRSWLDFRKVLHDWFRKRRFQPGIMSGLTRSIKLPIDSHNNNNKLQTNNKNKYSSCAVVGNSGILLNRDYGSEIDSHEFVIRLNNARVDHFETKVGKKTSISFMNSNILHLCARRGGCFCHPYGDRVPIVMYICQALHFMDYTVCNASHKAPLLVTDPRFDVLCARIVKYYSLKRFVEESGKGLEKWGEAHDGSLFHYSSGMQAVMLALGICDRVSIFGFGKSTSAKHHYHTNQKAELHLHDYEAEYAFYRDLVDGKRPIPFLEDRFKVPPVVMYQ

SEQ ID NO: 57210 - protein, 252 aa, Glycine max
  peptide (1)..(252): Ceres Seq. ID no. 14312820
MSGLTRSIKLPIDSHNNNNKLQTNNKNKYSSCAVVGNSGILLNRDYGSEIDSHEFVIRLNNARVDHFETKVGKKTSISFMNSNILHLCARRGGCFCHPYGDRVPIVMYICQALHFMDYTVCNASHKAPLLVTDPRFDVLCARIVKYYSLKRFVEESGKGLEKWGEAHDGSLFHYSSGMQAVMLALGICDRVSIFGFGKSTSAKHHYHTNQKAELHLHDYEAEYAFYRDLVDGKRPIPFLEDRFKVPPVVMYQ

SEQ ID NO: 57211 - DNA, 1341 bp, Glycine max
  misc_feature (1)..(1341): Ceres Seq. ID no. 14312163
gcttcgttgcttggttggttcaattgtatcagtatatactcagaagccatgatattagttgatggcattccattttctacccattcatctcaccctcagggaaaggatattctacttgatttgttggaaaatcccattctggtatcagcctcaaactctttgaaggctaactcagagaggaagttctcagtatctgatgagtctagtccagagagatcaaaatgggtttatatattccagagagaatatgctaccgttgaccccgcccttgttgattttgttggcaccgatgaagcaacaacgtgtgttggccttgttattcggaaccaaaagaatggaatgacgtcagttgcccatatggattcaccaaaaattgtagaaatgggcctctcccaaatgttatcatcactcgtcgacaacagtttggagactgagtttgatgtgcatcttattggggggtttgaagatgtctcactgcaagtctggccagggtcttctgctttgttagagaattttcaatatatagtttccactcagtgaaagagtaattgtagctggatctattgaacttttttgcagcatgcaaatggtagcacagtatcagaaagccctgcagatttggatggttattcctttcctctgtgtttaaagattgttcacactttatggtcaagagaggagaagtttcacatccgaactatctgtgttcttggacataataccagaagggattctgatggaaacacatacccctttttcaatggatttgtggcggagactacaacaggaatcatcatcccagctatctttgatagaacttctagatgtccagatgaaattgtcagaagaatacgagtatccgtgtcttatgaagatgccaactggaacggaaagttactagaaacatatgattctggcattgactgtttcaaaatcgctccttgtcgctggactcttcgccaaaatcatattgcttcatcacttctgaactattctgattccgaaattctttcaatatgttctacatcacctactgctgaagcctcagattttgtggagaatttaaaaaggcagtggaattatttgatcgagcatccacactggacagaaacctttcccaagaaacagcctcgcacttttgcaaggagttcttctgatggaaggtggataaggtgttgatgacattccaaggttgcgtaggctaatccttgtcaataattagattgccttattaaaatggtcatctctcattaaacgtttcatttctcattcctgttaagttatcaaattgcagccatctttagttttgaactaatatgatatttaattatcattgtgctg

SEQ ID NO: 57212 - protein, 179 aa, Glycine max
  peptide (1)..(179): Ceres Seq. ID no. 14312164
ASLLGWFNCISIYSEAMILVDGIPFSTHSSHPQGKDILLDLLENPILVSASNSLKANSERKFSVSDESSPERSKWVYIFQREYATVDPALVDFVGTDEATTCVGLVIRNQKNGMTSVAHMDSPKIVEMGLSQMLSSLVDNSLETEFDVHLIGGFEDVSLQVWPGSSALLENFQYIVSTQ

SEQ ID NO: 57213 - protein, 163 aa, Glycine max
  peptide (1)..(163): Ceres Seq. ID no. 14312165
MILVDGIPFSTHSSHPQGKDILLDLLENPILVSASNSLKANSERKFSVSDESSPERSKWVYIFQREYATVDPALVDFVGTDEATTCVGLVIRNQKNGMTSVAHMDSPKIVEMGLSQMLSSLVDNSLETEFDVHLIGGFEDVSLQVWPGSSALLENFQYIVSTQ

SEQ ID NO: 57214 - DNA, 1372 bp, Glycine max
  misc_feature (1)..(1372): Ceres Seq. ID no. 15171606
aaaaaaaaaaaaattttaacctcaccctctttacccacaccctctctctctctctctctgtcacgcacagagaaaaactcagacacccacgttcacacttcgcacacaccatctctcactgttctttcttcttcctctttttcttttttttttttcttttctcttaatggaatgatggaacacaacatcatcgtcaacaacaacgtgatcgcaccgtttgtcataaaaacctacaatatggtgaacgatcccaccaccgataaactcatcacgtggggcccagccaacaacagcttcatcgtcctcgatcccctcgacttctcccactccctcctccctactttcttcaagcacaacaacttctccagcttcgttcgccaactcaacacctatggtttcagaaaggtggatccggatcggtgggagttcgcgaacgagtggttcctgcgaggacaaaagcacttattgaggaacatcgtgcggaagaagcacggtggagctgggaggaccaattccaattcgcattattcgcatcccttgaagctggaggagttggacgacgaggctatggtgatggagatagcgaggttgaaggaggagcaaaaagcgttggaggaagagcttcatgaaatgaacaagaggttagagacaacagaaaaacgaccacaacaaatgatggcttttctgtgtaaggttgtcgaggacccgcagattctttctcggattctccgagaaagagaaaagaaacacctgggagagaaaaagcgacgcctcattccgcctccgccgccgacggcagcgacgtcgtcgtcgtcgtcctccggcatcaagacagagttcgaagaagacgaaggtaattataatatcaagtcttcgtcgccggagacagggttggaaatcgacaacaatagtaacaatatttgttcgccgccgccgctggggtgttggggtgaacagggttgttatgggtacaattgcgcctccgtgccggcacctttgacggtggtagcgccggcgtttccgacgatgggaggagggtatttgaggcgtggggggttttggggggaaatggcggcggaggggaatgcggtgccgccttatccgttttcgttgttggaagggggcttttagatttagttttaggttatgaaatgaatgaattattactgccacaaaatttcatcttggattttctgtcgtattgaaagttctatccttttttgtgcgttgattctgtgtaaagaaaaaaggttgggaaaaagagtaaaaaggtagtgggaaaattgttagatatttatagttgtgttcggtttcaggttttttttttcataaatattgtttttaaataaatgctttgcggatggtgtagacc

SEQ ID NO: 57215 - protein, 376 aa, Glycine max
  peptide (1)..(376): Ceres Seq. ID no. 15171607
KKKKILTSPSLPTPSLSLSLSRTEKNSDTHVHTSHTPSLTVLSSSSFSFFFFFSLNGMMEHNIIVNNNVIAPFVIKTYNMVNDPTTDKLITWGPANNSFIVLDPLDFSHSLLPTFFKHNNFSSFVRQLNTYGFRKVDPDRWEFANEWFLRGQKHLLRNIVRKKHGGAGRTNSNSHYSHPLKLEELDDEAMVMEIARLKEEQKALEEELHEMNKRLETTEKRPQQMMAFLCKVVEDPQILSRILREREKKHLGEKKRRLIPPPPPTAATSSSSSSGIKTEFEEDEGNYNIKSSSPETGLEIDNNSNNICSPPPLGCWGEQGCYGYNCASVPAPLTVVAPAFPTMGGGYLRRGGFWGEMAAEGNAVPPYPFSLLEGGF

SEQ ID NO: 57216 - protein, 319 aa, Glycine max
  peptide (1)..(319): Ceres Seq. ID no. 15171608
MMEHNIIVNNNVIAPFVIKTYNMVNDPTTDKLITWGPANNSFIVLDPLDFSHSLLPTFFKHNNFSSFVRQLNTYGFRKVDPDRWEFANEWFLRGQKHLLRNIVRKKHGGAGRTNSNSHYSHPLKLEELDDEAMVMEIARLKEEQKALEEELHEMNKRLETTEKRPQQMMAFLCKVVEDPQILSRILREREKKHLGEKKRRLIPPPPPTAATSSSSSSGIKTEFEEDEGNYNIKSSSPETGLEIDNNSNNICSPPPLGCWGEQGCYGYNCASVPAPLTVVAPAFPTMGGGYLRRGGFWGEMAAEGNAVPPYPFSLLEGGF

SEQ ID NO: 57217 - protein, 318 aa, Glycine max
  peptide (1)..(318): Ceres Seq. ID no. 15171609
MEHNIIVNNNVIAPFVIKTYNMVNDPTTDKLITWGPANNSFIVLDPLDFSHSLLPTFFKHNNFSSFVRQLNTYGFRKVDPDRWEFANEWFLRGQKHLLRNIVRKKHGGAGRTNSNSHYSHPLKLEELDDEAMVMEIARLKEEQKALEEELHEMNKRLETTEKRPQQMMAFLCKVVEDPQILSRILREREKKHLGEKKRRLIPPPPPTAATSSSSSSGIKTEFEEDEGNYNIKSSSPETGLEIDNNSNNICSPPPLGCWGEQGCYGYNCASVPAPLTVVAPAFPTMGGGYLRRGGFWGEMAAEGNAVPPYPFSLLEGGF

SEQ ID NO: 57218 - DNA, 1282 bp, Glycine max
  misc_feature (1)..(1282): Ceres Seq. ID no. 12608114
attacctaccactgtcactatgaatgctctcttttgtttttcaccttctttttttttttttgtgtgttcatcttcaacttcatcctaaccttttacacatcatattttcggcttagaacaaccaaaagcaagttcacattgtcttgtcttttcgggtagtggctgtagaggaaacactcctgttttgtgcgcatattgatattggaatagtctttctctgaaccccatttttgcaaaaaggaagaaagagaaagagagagagagagagagagaagagatatacactgccaagaagaagaacatgaaaattcagtgcgatgtgtgtgagaaagccccggcaaccgtgatttgctgcgcagatgaggcagctttgtgtgccaaatgtgacgttgaagttcatgctgcaaacaagcttgcaagcaagcaccagaggcttctccttcaatctttatctaacaagcttcccagatgtgacatatgtcaagataagccagctttcatattttgtgttgaggacagagcactcttctgtaaagactgtgatgaacctattcatttagccagtagcctttctgcaaaccaccagcgcttccttgctactggtatccgggtggctttgggttctaattgcaccaaaggcaatgaaaaaggtcacgtggaaccatctaaaccaaaagcacaagaagttcctgcgaaaattccttctcagcaagtgcctagcttcacatcctcttgggcagttgatgacttgttggaattaacagactttgaatcaccagacaaagttcagaagcaatcccttgagtttggagaacttgaatggctagcagatgtaggcctttttggtgaacagtttcctcatgaagctttagcggcggctgaagttcctcagcttccaatgactagcagtgttggctcacacaaagcccccaaatccttgttgtcttacaaaaagcctaggattgaagtcctagatgaagatgatgatgagcacttcaccgtaccagatctcggataaagcacatggtcatgtaaacaattgcctgaatcagtaggcagtaggttgacgagttgtatatgcatactaggtgcagatgttaatgaactcttcaatgtgcctggtctagctgaagctcaggaccatgaggactattgcatgaatctgtagattgatgagctgtatatgcatacttctcttaggacagtaagtaatgaagtatgttaactagcttgtggagttgataaatatctcattttaggagctatgaatggtttgattttt

SEQ ID NO: 57219 - protein, 238 aa, Glycine max
  peptide (1)..(238): Ceres Seq. ID no. 12608115
MKIQCDVCEKAPATVICCADEAALCAKCDVEVHAANKLASKHQRLLLQSLSNKLPRCDICQDKPAFIFCVEDRALFCKDCDEPIHLASSLSANHQRFLATGIRVALGSNCTKGNEKGHVEPSKPKAQEVPAKIPSQQVPSFTSSWAVDDLLELTDFESPDKVQKQSLEFGELEWLADVGLFGEQFPHEALAAAEVPQLPMTSSVGSHKAPKSLLSYKKPRIEVLDEDDDEHFTVPDLG

SEQ ID NO: 57220 - DNA, 1068 bp, Glycine max
  misc_feature (1)..(1068): Ceres Seq. ID no. 14305778
acattaaagtccacgcacatagatttgctttcacatccatcacctacaccaccaaaaccaaatcaagccgtgaagacgtgaaagaaaaaacaaatttatcttactctacaattattttaaacaaatttaattctctaatcttatcttagggaacatattcattgtgcttcaaattggctaagaaaataaaattaaaaataattaataaagtattaaattctgccctctttcgtatcctacactatccgcaaagggcgagaatccgcgacgtcgttttcaaacacggcttccatagtgaaggactgattcaataattgacgagtggtttgtttggtttgataggcatagacgacaaccaagtacagagaagtaaagagagttttgctttttgaaatggcagcgtcgtcgtcgtcggagaagcaagtggtgctgataggcatagacgacagcgagcagagcacgtacgcgctgaattgggctttggatcacttcttcccgagcccaatcttcaagctcgttctcatccactcaaggcccaccgccacctccgccgtgggcttcgccggccctggagccgctgagatcttgcctattgtagattccgatttgagaaagattgccgccagagtcctcgaaaccgccaaacaactttgcttcaacaaatccgtgaatgatgtgacagcggaagtggtggaaggtgatcctagaaatgttctttgtgatgctgtggataagtaccgtgctgcaatattggttgtgggcagccatggttatggggctataaaaagggcggttttaggtagtgtcagtgactactgtgctcatcatgctcactgcactgtgatgatcgtgaaaaagccaaaaatcaaacactgatctgtaatggctgcgtctatatagtacaacaataaacataaccggccctttcagccaaagaaaaaaaataatgttcacagaaattcgtaactatgcttgttgtatggatactacatattgtccttatggtttgatacgttgaggtacagcttatttttaaagatggaagtatggaaccatcaaaaagttatt

SEQ ID NO: 57221 - protein, 160 aa, Glycine max
  peptide (1)..(160): Ceres Seq. ID no. 14305779
MAASSSSEKQVVLIGIDDSEQSTYALNWALDHFFPSPIFKLVLIHSRPTATSAVGFAGPGAAEILPIVDSDLRKIAARVLETAKQLCFNKSVNDVTAEVVEGDPRNVLCDAVDKYRAAILVVGSHGYGAIKRAVLGSVSDYCAHHAHCTVMIVKKPKIKH

SEQ ID NO: 57222 - DNA, 921 bp, Glycine max
  misc_feature (1)..(921): Ceres Seq. ID no. 14316363
aatcttgttcacgttacacgttttccatctctcttcttcctttttctcttcctttcttttagttctgttattgcaattttgccaggcctataatgcaaagttaaccaacatttgattccattctttctgtttccttcttcaaatatctttgtatcttgttttgcaagtaaaacaagaacaaccttatttgtatatattttagaaacttcattatttgacagtatattcacccatagttgaatttcaatggggaaaggaggtggttgctttccaagcaaaacaaaggcaccaatttctggagcagaaaaggatccaattattgttgaaagtctaattccaacaaatgatccaagtagcacaagccaagaggtggaagcaccagcaccagcaccagcagcagtgaaaaagctgaaaattttcattgtgttctactcaacttatggccatgtggagtcattggcaaggtccttgaagaaaggggttgattcaattgaaggcgttgaaggggtgttgtaccgcgtgctggagacgctgccaaaggaggttctggaactcatgaaggcacctgagaaggatgagacagtgccactcatatctgaagacaagttggtggaggctgatggcttgctgtttggttttccaacaaggtatggcagcatggcggcgcagatgaaggtgtttttcgattcgaccggtcagttgtggagagagcagaagctggcaggggtgcctgctggcttctttgtcagcactggcactcagggtggaggccaagaaaccacagcgtaagaaggccttttattttctgccttcattgatgcatgcataaataagagccttgctcttcattttattttctttaatggaacttcagaattttatctatgtatataaataaattgatagaatttaattagaaag

SEQ ID NO: 57223 - protein, 180 aa, Glycine max
  peptide (1)..(180): Ceres Seq. ID no. 14316364
MGKGGGCFPSKTKAPISGAEKDPIIVESLIPTNDPSSTSQEVEAPAPAPAAVKKLKIFIVFYSTYGHVESLARSLKKGVDSIEGVEGVLYRVLETLPKEVLELMKAPEKDETVPLISEDKLVEADGLLFGFPTRYGSMAAQMKVFFDSTGQLWREQKLAGVPAGFFVSTGTQGGGQETTA

SEQ ID NO: 57224 - DNA, 1061 bp, Glycine max
  misc_feature (1)..(1061): Ceres Seq. ID no. 14305871
aacattctatgttctgtgccattcctccctctcacttcaccccaccactcaaacaaaggaacccatctcttcaccgtcttccttctcctagaaagcccaaagcctccaccctaagaatttcctctcttggcgctggtttcttcgatgacatcgtccaaattgctcataacaaggttctgattgcagctggtgtctctgtggcgattggtcagctttctaagccattcacttctgtttttctgtatggcaaagggtttgatatcagagcagttgttcaagctggagggttcccttcatcacactcttctgcaacagtggctagtgcaacattatttggccttgagagaggcttctccgatcctatttttggtcttgcagttgtgtatgccggtctcattatgtatgatgctcagggtgtaagaagagaagtagggattcatgccaagacattgaacaaaatactgctccaaatgcaagccaactctttacattccaaagatagagataatttgattaactctcaaccaggactatcaaaacctctaaaagttggtcttgataagtcccttttgtcccaagaagccacttctttggaaccacaagaaacaaatagaggtctattggttaaatcaggaagcaaaataaggcaaacagatgcagatgaaatctcatcaaagttggccattgatggtataccccaactaaaagaatctattggtcatacagagattgaagtcatagctggtgctttactaggctttttggtggctttggctgtgtataatttcaagtaaaatcttgctttttgatgaataatttcatagcatatcttacaacaagtagattattaaattgaaaatcaagctgagttggaaattaaaaggccaagttgacaacaggtttaggttatcatttagcaaaacatttaaggtttgtatatgacctaacagaacaggacattagttaaagatgaaaacccatccaaacagggggttacacacgtacttctcttttcctatgtattgcggtgccttatataaaatttatcaattattgatttt

SEQ ID NO: 57225 - protein, 263 aa, Glycine max
  peptide (1)..(263): Ceres Seq. ID no. 14305872
HSMFCAIPPSHFTPPLKQRNPSLHRLPSPRKPKASTLRISSLGAGFFDDIVQIAHNKVLIAAGVSVAIGQLSKPFTSVFLYGKGFDIRAVVQAGGFPSSHSSATVASATLFGLERGFSDPIFGLAVVYAGLIMYDAQGVRREVGIHAKTLNKILLQMQANSLHSKDRDNLINSQPGLSKPLKVGLDKSLLSQEATSLEPQETNRGLLVKSGSKIRQTDADEISSKLAIDGIPQLKESIGHTEIEVIAGALLGFLVALAVYNFK

SEQ ID NO: 57226 - protein, 261 aa, Glycine max
  peptide (1)..(261): Ceres Seq. ID no. 14305873
MFCAIPPSHFTPPLKQRNPSLHRLPSPRKPKASTLRISSLGAGFFDDIVQIAHNKVLIAAGVSVAIGQLSKPFTSVFLYGKGFDIRAVVQAGGFPSSHSSATVASATLFGLERGFSDPIFGLAVVYAGLIMYDAQGVRREVGIHAKTLNKILLQMQANSLHSKDRDNLINSQPGLSKPLKVGLDKSLLSQEATSLEPQETNRGLLVKSGSKIRQTDADEISSKLAIDGIPQLKESIGHTEIEVIAGALLGFLVALAVYNFK

SEQ ID NO: 57227 - protein, 131 aa, Glycine max
  peptide (1)..(131): Ceres Seq. ID no. 14305874
MYDAQGVRREVGIHAKTLNKILLQMQANSLHSKDRDNLINSQPGLSKPLKVGLDKSLLSQEATSLEPQETNRGLLVKSGSKIRQTDADEISSKLAIDGIPQLKESIGHTEIEVIAGALLGFLVALAVYNFK

SEQ ID NO: 57228 - DNA, 672 bp, Glycine max
  misc_feature (1)..(672): Ceres Seq. ID no. 14316515
attccaacttatcatactatcacattattatcaaccttataatcttcctcttagcaccaaccatgactacccagtttctcattctctcccttctcatctcatgccacgtcctcactgcaaccctagccgaagaaaccggctttgtaggttcactagaccgcaaggcattaggtctagataaaaaagacaaggtcagtcatttccggttctacttccacgagaggttcaccggaagcaacgccacctcggtcaccgtcgttcctccgctgccccagtacaactccaccaccaacttcgggttggtggggatcaccgacaacgccttgaccgtgggacccgaacccgggtccaaggtggtcggaaagatcgaggggttgtacgcgggcacctcacaatcggagttcaatttattgattgttgtgaattttgccttgaccgaaggaaagtataatggcagcaccatcaccgtggtggggcggaaccgcctctccctcaagattagggagatgcctgtgattggaggaagtggggtttttaaatttgccactgggtatgttgaaaccagcactctctatgttgatgctgataggtctaccattgagtacaacatttatgtttcacattactgatcaatttgtggtaactttatgttacaaaacttcttctatgtac

SEQ ID NO: 57229 - protein, 208 aa, Glycine max
  peptide (1)..(208): Ceres Seq. ID no. 14316516
SNLSYYHIIINLIIFLLAPTMTTQFLILSLLISCHVLTATLAEETGFVGSLDRKALGLDKKDKVSHFRFYFHERFTGSNATSVTVVPPLPQYNSTTNFGLVGITDNALTVGPEPGSKVVGKIEGLYAGTSQSEFNLLIVVNFALTEGKYNGSTITVVGRNRLSLKIREMPVIGGSGVFKFATGYVETSTLYVDADRSTIEYNIYVSHY

SEQ ID NO: 57230 - protein, 188 aa, Glycine max
  peptide (1)..(188): Ceres Seq. ID no. 14316517
MTTQFLILSLLISCHVLTATLAEETGFVGSLDRKALGLDKKDKVSHFRFYFHERFTGSNATSVTVVPPLPQYNSTTNFGLVGITDNALTVGPEPGSKVVGKIEGLYAGTSQSEFNLLIVVNFALTEGKYNGSTITVVGRNRLSLKIREMPVIGGSGVFKFATGYVETSTLYVDADRSTIEYNIYVSHY

SEQ ID NO: 57231 - DNA, 1012 bp, Glycine max
  misc_feature (1)..(1012): Ceres Seq. ID no. 14315448
acagactcaggaaccaatagacaaatatctattaacaaaacaacgcaacgcttctctttctttctttctatccctacttcgcctctgtttcatttggcccattgtttctcacaagccacactctttgtttgaagcttaaactccctctaagccccatccttaatttactcaatctcatcaatgtttcatcatctggagttcttcttttgagggctttagcagattccattccttgagtctcatgctggatatgccaatccttttatcctcatttctgatatccttgtttgcatgatcacatcttttccaaggattttaaaaccatgggtagaggtagaggaaagggtaaaaaactaactgttaccaattttgaggatcctgcaagtggtgaggatgaaaaagttcccacgcaaaagagaagagggaggccacaaaaaccactaaaggatgactttgatgaagaagaggtagagaaaatagaagatgacagtgacaatgttaagaatggagtctctaacaaagagatgaaaagtcccactgcaacagaaaatggaaggaaaagaaagcgaaactcacaggtaaaagagaaattagactcagttgaggaagaaaatggcattggcaatggatcaaacaccactgatgagttgacaaagaccaatggttttaggcataatggaagcaggcgcaaaagcacgccccgtcgagctgctgaagcaggtgttcagtgcaagtaaggatcataaaagttgtgcattagctttcttccttttcatattatcagttaaaatcatgagaagataggaagtgcggtgtagtatcatttattttatttacttgttttgtttctttgttctcacttttagtttcctttttcctcggtgagtctgatttgaggggttccatttggtgataccctatcattaattcctttttctttatttcaatcatgaatttgagagtttacaatgctggctgttgtcttataatgctataacacttcgaatttctc

SEQ ID NO: 57232 - protein, 137 aa, Glycine max
  peptide (1)..(137): Ceres Seq. ID no. 14315449
MGRGRGKGKKLTVTNFEDPASGEDEKVPTQKRRGRPQKPLKDDFDEEEVEKIEDDSDNVKNGVSNKEMKSPTATENGRKRKRNSQVKEKLDSVEEENGIGNGSNTTDELTKTNGFRHNGSRRKSTPRRAAEAGVQCK

SEQ ID NO: 57233 - protein, 70 aa, Glycine max
  peptide (1)..(70): Ceres Seq. ID no. 14315450
MKSPTATENGRKRKRNSQVKEKLDSVEEENGIGNGSNTTDELTKTNGFRHNGSRRKSTPRRAAEAGVQCK

SEQ ID NO: 57234 - DNA, 1274 bp, Glycine max
  misc_feature (1)..(1274): Ceres Seq. ID no. 15171735
gaatcagacaagagaagttgataagaacaaacaaaacaacaaccaaaccgtttattttttcttttttcttctctcaacactctcacttcctatctaatttttttcgttccgtcgtttcatcctcgcgagcgtgcatttgcattgcattgctctctctctcacaaaacgacgacgacgacgtcgccaccgcgcaccgttttggttttcctttctcttccgtcgtttgcttccgcaaatagcctttcgcatgggaaacgctaacggcagagaagacggatccattccccccgccgccgccgatccctccgccgccgcacgtggaactcacgcgccgccggtctctctccctccggttcgcgccttctcctccgattcaatggccaatagcccgccgcacagccctcgccgctccagatcgccgatcctcttcggtcctcaggttcctctagctccattacaacgaggtaatggccctccttttctcaatcaaatgtggcagaatgagtctcatggtattgttaatcaccctcctgagcaagggatccctgtcatgattacatggaactatggtggtaacaatgtggctgtggagggatcttgggataactggacatctaggaaggcattacagcgagctggcaaggatcactcattccttatagtccttccaccaggtatatatcattacaggttcattgctgatggtgaagagagatttatcccagagctacctaatgtagctgatgagatggggcatgtctgcaatcttcttgatgttaatgattatgtgccagaaaaccccgatggtgtgtctgagtttgaagcaccaccctcccccgaatccagttatggccaagcatttccagctgaagaagactttgcaaaagagccaatggctgttccttcgcaactgcatcttactgtcctaggtatggaaaactctgacataggttcctcttcaaagccccaacatgttgtgctaaatcatgtcttcatagagaaaaatttggcctcaaagtctgttgttgccctgggactcactcacaggttccagtccaaatatgtgacagttgtcctttacaaaccgctcaagaggtgaaatatataacgcttgtcaattatataaacctttttttcttttttttggtagcctcagtctgtaaagatgaaaatttaaataatactcctcaacgggtggtatatgaaggtcttgtgtctatatatgcttgaggcttctgttcgaattggtaaattaaactttttgtttttcaatt

SEQ ID NO: 57235 - protein, 283 aa, Glycine max
  peptide (1)..(283): Ceres Seq. ID no. 15171736
MGNANGREDGSIPPAAADPSAAARGTHAPPVSLPPVRAFSSDSMANSPPHSPRRSRSPILFGPQVPLAPLQRGNGPPFLNQMWQNESHGIVNHPPEQGIPVMITWNYGGNNVAVEGSWDNWTSRKALQRAGKDHSFLIVLPPGIYHYRFIADGEERFIPELPNVADEMGHVCNLLDVNDYVPENPDGVSEFEAPPSPESSYGQAFPAEEDFAKEPMAVPSQLHLTVLGMENSDIGSSSKPQHVVLNHVFIEKNLASKSVVALGLTHRFQSKYVTVVLYKPLKR

SEQ ID NO: 57236 - protein, 240 aa, Glycine max
  peptide (1)..(240): Ceres Seq. ID no. 15171737
MANSPPHSPRRSRSPILFGPQVPLAPLQRGNGPPFLNQMWQNESHGIVNHPPEQGIPVMITWNYGGNNVAVEGSWDNWTSRKALQRAGKDHSFLIVLPPGIYHYRFIADGEERFIPELPNVADEMGHVCNLLDVNDYVPENPDGVSEFEAPPSPESSYGQAFPAEEDFAKEPMAVPSQLHLTVLGMENSDIGSSSKPQHVVLNHVFIEKNLASKSVVALGLTHRFQSKYVTVVLYKPLKR

SEQ ID NO: 57237 - protein, 202 aa, Glycine max
  peptide (1)..(202): Ceres Seq. ID no. 15171738
MWQNESHGIVNHPPEQGIPVMITWNYGGNNVAVEGSWDNWTSRKALQRAGKDHSFLIVLPPGIYHYRFIADGEERFIPELPNVADEMGHVCNLLDVNDYVPENPDGVSEFEAPPSPESSYGQAFPAEEDFAKEPMAVPSQLHLTVLGMENSDIGSSSKPQHVVLNHVFIEKNLASKSVVALGLTHRFQSKYVTVVLYKPLKR

SEQ ID NO: 57238 - DNA, 1345 bp, Glycine max
  misc_feature (1)..(1345): Ceres Seq. ID no. 15178206
cacctttcttctctcttgctataatcattttcaaccaaacccaaacccaaacccctttctctcataaacaaagcaacaaaggttcatcccagttaggagttaggacctctcttcctttttcatttcctcgaatcccaaacaccacaaaaaccaaaacccacctaaaaaatgcaatcattcccctccactctcgcatgctttactttttcaacgtcactagtactagtactactcttatttctactacctttttctcgggccggtttactctccgaaccggtaagcgaccccaaccagccactcgaaccgggctccaacacggtccctgccttccccgtccagacccaggccctcacctgccgcctcgacctctccgacgagctattcggcggagtcaaggacgcctgcggcaaagacctcgaccggagccgctgctgccccgtcctcgccgcctggctcttcgccgcccacgcccgcaccgccctcgacgtctccgccgccccgcctccatcctccggcgaccttccgatgatgcccgacgactcacaaaaatgcgtcaactcgctccaggactcgcttctctcccgcaacatacgaatccctcagtccaacgccacgtgcgacgccattctctgcttctgcggcatcaggctccaccaaatcacgtcgctgacttgcaacgctgcgtttaacgtctcgctttctcacagaaacgccactccaaccgccgcggttcgcaacctggagaataattgtcgtaactcctcttacgctggttgcactaaatgcctcggtgccctacaaaaggtgaaggggtataaaaatgagacgaagggaagtgatagagtgaagaaaatgttcaaccgggactgtcaattgatggggttaacgtggcttcttgcaaagaacaaaacggcgtacatacccaccgtttcggcggtgctgcgtgcgatgatgtacagtgcgcaccctcacgagtccaagtgtagtcccgaccaggagaacatgccgctggccgttgattcgcttcagttcgagagcggccacgcgccatcgcggccgtccaagttttgcgtgacgattttgcccctcttggttctcttattttccgcttttgttgtgtagaaagaaagggtgggcccacttggtggggttagtgtctgtcctcttctctttctctctctctcgctatcacgtgaaacttagctactcgacaaaacatgcaaacaaacgggggtagtttgttttttacttgagagggtttttctggctgtaaattttcagagtccattgacatgtttgtgtgtacagtgtcaccaacttacatagaaagaagtggttcttt

SEQ ID NO: 57239 - protein, 318 aa, Glycine max
  peptide (1)..(318): Ceres Seq. ID no. 15178207
MQSFPSTLACFTFSTSLVLVLLLFLLPFSRAGLLSEPVSDPNQPLEPGSNTVPAFPVQTQALTCRLDLSDELFGGVKDACGKDLDRSRCCPVLAAWLFAAHARTALDVSAAPPPSSGDLPMMPDDSQKCVNSLQDSLLSRNIRIPQSNATCDAILCFCGIRLHQITSLTCNAAFNVSLSHRNATPTAAVRNLENNCRNSSYAGCTKCLGALQKVKGYKNETKGSDRVKKMFNRDCQLMGLTWLLAKNKTAYIPTVSAVLRAMMYSAHPHESKCSPDQENMPLAVDSLQFESGHAPSRPSKFCVTILPLLVLLFSAFVV

SEQ ID NO: 57240 - protein, 229 aa, Glycine max
  peptide (1)..(229): Ceres Seq. ID no. 15178208
PFFSLAIIIFNQTQTQTPFSHKQSNKGSSQLGVRTSLPFSFPRIPNTTKTKTHLKNAIIPLHSRMLYFFNVTSTSTTLISTTFFSGRFTLRTGKRPQPATRTGLQHGPCLPRPDPGPHLPPRPLRRAIRRSQGRLRQRPRPEPLLPRPRRLALRRPRPHRPRRLRRPASILRRPSDDARRLTKMRQLAPGLASLPQHTNPSVQRHVRRHSLLLRHQAPPNHVADLQRCV

SEQ ID NO: 57241 - protein, 198 aa, Glycine max
  peptide (1)..(198): Ceres Seq. ID no. 15178209
MMPDDSQKCVNSLQDSLLSRNIRIPQSNATCDAILCFCGIRLHQITSLTCNAAFNVSLSHRNATPTAAVRNLENNCRNSSYAGCTKCLGALQKVKGYKNETKGSDRVKKMFNRDCQLMGLTWLLAKNKTAYIPTVSAVLRAMMYSAHPHESKCSPDQENMPLAVDSLQFESGHAPSRPSKFCVTILPLLVLLFSAFVV

SEQ ID NO: 57242 - DNA, 1773 bp, Glycine max
  misc_feature (1)..(1773): Ceres Seq. ID no. 15177414
aaaattcagagcgtgcaaattgcaaaatgcagaaattgctcaacgatttcccccaaaaaatgagtttcacgggaagcgggaagaagacccaccgcaaaaatttcaaaccacaaagacagcattaatattcttcctttcatttccagttcttcttcttaaaccccttattctccttctctcttgcactgtcttacaatttgaattttccaatggcaacttctgagaacaacagcagcgcgcgtccccaacgcgaagcgaagaagagggccgcagctgcaatatcccaaattcatggcaacgccgccaagaagaaacgcgtcgttttaggcgacgtcactaacgtttcctcaagcgacgtcgccgtttccgtttccaaaaaacccgttcagacacataaaaatgttaaactcgagaaaccggccgcgccggttgccacgccggagaaggttgaggaaagacacgacccgcaactctgtgggccctacgtttctgatatatacgaataccttcgcggaatggaggtggatcctagtaagagaccattgatggattatgttcagaagattcagagggatgttaatgctaacatgcgcggtgttcttgtggattggttggtggaagttgcagaagaatacaaacttgtttcggacacgctttatttctctgttgcttatattgataggtttttgtcgttgaatattttgtcgagacagaggttgcaattgctgggggttgcttcaatgctcattgcttcgaaatacgaagagattaagccgcccgaggtggaggatttttgttacattacggataacacatactctaaggaagaggttgtgaacatggaggctgaaatattgaaggctttgaaatttgaattgggtggtcctacagtgaagacattcttgaggagattctccagagttggtcaagagggtgttgatacttctgatctccagtttgagttccttagctgctaccttgccgagctcagtttgttggattataattgtataaagtttttgccatctttggtggctgcatcagttgtattcctagcaagatttatgtttagcacaaagacacatccttggaattcggcactccatcaactcactagatataaacctgctgacttgaaggaatgtgttctaaacttacatgacttgtacctcagtaggagaggggcctctttgcaagctgtgagagagaaatacaaacagcataagttcaaatgtgtggcaacaacaccatctcctcccgagatacctctttctttttttgaatttgaggggcagattcttaggcaattgtaatttggctattcttggtatggctctggtttcaactattggcaggaaagtgtttcctaacactagagatgagagtttcagacattttgttgcacttgtttgtagagagagagaggtgcttgccagaaatgcagcgacaacatactatgctggcctcactgactttgtgattgagcttgtgtgaaaatgagataaatcccattagttgagaattaggttattttttgacaattagaagttctttgtaagatttccttgaaggatttatgatttctatgtatagggaaatgctatacgttttcattgtagttgttccattctaagatgtccaaactctgatattcagaaatcaatttttcagctgtaaacaagtgttggattggttactttaacccaaccatttttgtccgtggtctaaacaaatgtctgtgatagaatataattgagtttgtctgtgtagtct

SEQ ID NO: 57243 - protein, 367 aa, Glycine max
  peptide (1)..(367): Ceres Seq. ID no. 15177415
MATSENNSSARPQREAKKRAAAAISQIHGNAAKKKRVVLGDVTNVSSSDVAVSVSKKPVQTHKNVKLEKPAAPVATPEKVEERHDPQLCGPYVSDIYEYLRGMEVDPSKRPLMDYVQKIQRDVNANMRGVLVDWLVEVAEEYKLVSDTLYFSVAYIDRFLSLNILSRQRLQLLGVASMLIASKYEEIKPPEVEDFCYITDNTYSKEEVVNMEAEILKALKFELGGPTVKTFLRRFSRVGQEGVDTSDLQFEFLSCYLAELSLLDYNCIKFLPSLVAASVVFLARFMFSTKTHPWNSALHQLTRYKPADLKECVLNLHDLYLSRRGASLQAVREKYKQHKFKCVATTPSPPEIPLSFFEFEGQILRQL

SEQ ID NO: 57244 - protein, 265 aa, Glycine max
  peptide (1)..(265): Ceres Seq. ID no. 15177416
MEVDPSKRPLMDYVQKIQRDVNANMRGVLVDWLVEVAEEYKLVSDTLYFSVAYIDRFLSLNILSRQRLQLLGVASMLIASKYEEIKPPEVEDFCYITDNTYSKEEVVNMEAEILKALKFELGGPTVKTFLRRFSRVGQEGVDTSDLQFEFLSCYLAELSLLDYNCIKFLPSLVAASVVFLARFMFSTKTHPWNSALHQLTRYKPADLKECVLNLHDLYLSRRGASLQAVREKYKQHKFKCVATTPSPPEIPLSFFEFEGQILRQL

SEQ ID NO: 57245 - protein, 255 aa, Glycine max
  peptide (1)..(255): Ceres Seq. ID no. 15177417
MDYVQKIQRDVNANMRGVLVDWLVEVAEEYKLVSDTLYFSVAYIDRFLSLNILSRQRLQLLGVASMLIASKYEEIKPPEVEDFCYITDNTYSKEEVVNMEAEILKALKFELGGPTVKTFLRRFSRVGQEGVDTSDLQFEFLSCYLAELSLLDYNCIKFLPSLVAASVVFLARFMFSTKTHPWNSALHQLTRYKPADLKECVLNLHDLYLSRRGASLQAVREKYKQHKFKCVATTPSPPEIPLSFFEFEGQILRQL

SEQ ID NO: 57246 - DNA, 1379 bp, Glycine max
  misc_feature (1)..(1379): Ceres Seq. ID no. 15168355
gattgccctagttggcacctttccgtaagaagcacaagttctctctttttctttccaccgtcaccactcaccatgcaatgcaaataacccaattaagaaaccaaccaaccaacgaggcttgttctgttgtgttgtttgcttagtacgttaatggcaaaccaggtggttcctcgtgaatctcacccttatgcctttcatgtctctggccctcgcaagttcacttcccttaattggagggaccttatcatttccagttggaaggatgcaaattataagagaactgtcattgcctgctttatacaggcagtatacttgcttgaacttgatagacaggagaagagaacacaaggaaatgctcttgccccaaattggtggattcccttcaaatacaagcttaaacaaacactaattgatgaaagagatggatccatttttggcacaattcttgaatgggatagatctgctgcattggctgacttaataccaattagaccaagtggtgcccccagagctgtcttagcactcagaggaacattactcaaaagccctacaatgcgaagagatatcgaagatgacctacgttttgttgcttgggaaagcttgaagggctctgtgaggtttaaagcagctttggaggtactaaaatcgatttgtggtaaatacggaagcaacaacgtatgcattgcagggcattccttgggggctggttttgctcttcaagtgggaaaagaactagcaaaagaagggacttatgtggaggcacatttgtttaatccaccttctgtttcactagccatgagtctcaaaactattggagaaaaggctgagtttgtgtggaataggcttaaatccatgcttccttatagtggtgaggctcaaatcagcaatgatgtagacaaaacttcttcaagtgtaggattgaagagtaggatgcctcaactatctggttctggtttgaaagatgcaagtttgggggtagcaaaatgggttccttatttgtatgttaacaatggtgactatatctgctgctattacaatgatggtgctggcacaagcacaaaggtgaatgtaggaactacaaatggacaagtttcagcaaagttgtttgttgtctctaaggagaaacagaagtttcttgaggctcatggcctggaacaatggtggtcaagtgatgcagaacttcagcaggttatccatagtagcaatctcataagcaggcagcttcgatctttgtacactgctgctccttcccaagtaaacttataagcaggtggtgaaatgtaatttaaaataaaataaaaaaacaagatttgtattcctacatgttttcactgaaatttgatatttgtagtatgttgtaattcatactattttattat

SEQ ID NO: 57247 - protein, 371 aa, Glycine max
  peptide (1)..(371): Ceres Seq. ID no. 15168356
MANQVVPRESHPYAFHVSGPRKFTSLNWRDLIISSWKDANYKRTVIACFIQAVYLLELDRQEKRTQGNALAPNWWIPFKYKLKQTLIDERDGSIFGTILEWDRSAALADLIPIRPSGAPRAVLALRGTLLKSPTMRRDIEDDLRFVAWESLKGSVRFKAALEVLKSICGKYGSNNVCIAGHSLGAGFALQVGKELAKEGTYVEAHLFNPPSVSLAMSLKTIGEKAEFVWNRLKSMLPYSGEAQISNDVDKTSSSVGLKSRMPQLSGSGLKDASLGVAKWVPYLYVNNGDYICCYYNDGAGTSTKVNVGTTNGQVSAKLFVVSKEKQKFLEAHGLEQWWSSDAELQQVIHSSNLISRQLRSLYTAAPSQVNL

SEQ ID NO: 57248 - protein, 237 aa, Glycine max
  peptide (1)..(237): Ceres Seq. ID no. 15168357
MRRDIEDDLRFVAWESLKGSVRFKAALEVLKSICGKYGSNNVCIAGHSLGAGFALQVGKELAKEGTYVEAHLFNPPSVSLAMSLKTIGEKAEFVWNRLKSMLPYSGEAQISNDVDKTSSSVGLKSRMPQLSGSGLKDASLGVAKWVPYLYVNNGDYICCYYNDGAGTSTKVNVGTTNGQVSAKLFVVSKEKQKFLEAHGLEQWWSSDAELQQVIHSSNLISRQLRSLYTAAPSQVNL

SEQ ID NO: 57249 - DNA, 728 bp, Glycine max
  misc_feature (1)..(728): Ceres Seq. ID no. 14315067
attcaaaccctagatcagttttaattagtttcctagttttattcatagtgtgcaagaatgggaaacagcttaaggtgttgtttggcttgtgttcttccatgtggagctctagacttgattcgaatagtccatttgaatggctatgtggaagagattacacgtccaatcacagcaggagaggttctcaaagcaaaccctaaccatgttctaagcaaacctagctctcaaggcgtcgttcgccggattttgatcctttcaccggagaccgagctcaagaggggcagcatctacttcttgatcccggaatcttcgctgccggagaagaaacggctagccggaaagggaagaaatgttggtggtgataatgatataaaaaagaaaccatcaacattgaaagggaacaagggtagtagtgatgatgattattcttcactatcacaagggtgcctcaataaagccactcacaaaggttctaaagagaagaaatcgtcgtgccgggatcgccggaaaggccgcatcggaatatggaggcctcatttggagagtatattggaagattagtcggttttttgtgtcgctggccggtggccggaatccaacatggctggaaaaaagaagaggagaaaaagaagaagaaatatgttaaattattgaaatatagcaacaggactttttttttttttttgttcccttttgttttataaatgtatgtgggaatttgatgggag

SEQ ID NO: 57250 - protein, 167 aa, Glycine max
  peptide (1)..(167): Ceres Seq. ID no. 14315068
MGNSLRCCLACVLPCGALDLIRIVHLNGYVEEITRPITAGEVLKANPNHVLSKPSSQGVVRRILILSPETELKRGSIYFLIPESSLPEKKRLAGKGRNVGGDNDIKKKPSTLKGNKGSSDDDYSSLSQGCLNKATHKGSKEKKSSCRDRRKGRIGIWRPHLESILED

SEQ ID NO: 57251 - DNA, 1078 bp, Glycine max
  misc_feature (1)..(1078): Ceres Seq. ID no. 14312258
gccactaccatttccaacaacatagccatgccctccatgaagacctcatcgtccaaaacctccgagtcctcgactcagttcgactcgccccactcgcctctccgatccttcccgctcttcgacaacgccgaccccttccactcgccgcaaaatgacaactcccgcgccatcgtcatcgtcgagacaacttcgactcaattcgcccaggccgcgccccccgcgccggagtccgagcaccggaacccgcctccggaggccgtggtcacccgccccgtttggccggagacgaagtcgtcggccaccgttggtcggacgcgaccgaggccggtggcgccgcccagttcggtggtgccgaagagagaaatgatggcgaaaaaagttgcattagggtttcggttaagcgaagtagtgctgtgtctgatttcgttttcggttatggccgcggacaaaactcgtggttggagcggtgattcttttgatcgctacaaggaatacaggtattgtttgtctgtgaatgtaatcgcatttgtatacgctgcgtttcaagcgtgtgatctggcgtatcaggtagtaacgggaagacgcataatcaatcaccacctgcgttaccactttgatttcttcatggatcaggttttggcgtatcttttggtatcggctgcatcatctgctgctacacgcgttgatgactggcaatcgaattggggaaaagatgatttcacagagatggcgagtgcttcaattgcgttgacctttcttgcttttgttgcctttgctattagctcgttaatctctggctacaacctctgcactctgttctcatagcaacattttaacctcgtataagctgtctttccattgtacacacaactacacactttttttttcttctttctattcctctattcttactgctgtggaggaatgcattcatgagtgttggtgccagtgatttttttttactgtacagatagacttgtatacgtacaattgagggaatactgttcgtcttaaatccgaaggatggagaaggaaatttttgtgttcaccttaaaatacaattaaatgattgtatttt

SEQ ID NO: 57252 - protein, 274 aa, Glycine max
  peptide (1)..(274): Ceres Seq. ID no. 14312259
ATTISNNIAMPSMKTSSSKTSESSTQFDSPHSPLRSFPLFDNADPFHSPQNDNSRAIVIVETTSTQFAQAAPPAPESEHRNPPPEAVVTRPVWPETKSSATVGRTRPRPVAPPSSVVPKREMMAKKVALGFRLSEVVLCLISFSVMAADKTRGWSGDSFDRYKEYRYCLSVNVIAFVYAAFQACDLAYQVVTGRRIINHHLRYHFDFFMDQVLAYLLVSAASSAATRVDDWQSNWGKDDFTEMASASIALTFLAFVAFAISSLISGYNLCTLFS

SEQ ID NO: 57253 - protein, 265 aa, Glycine max
  peptide (1)..(265): Ceres Seq. ID no. 14312260
MPSMKTSSSKTSESSTQFDSPHSPLRSFPLFDNADPFHSPQNDNSRAIVIVETTSTQFAQAAPPAPESEHRNPPPEAVVTRPVWPETKSSATVGRTRPRPVAPPSSVVPKREMMAKKVALGFRLSEVVLCLISFSVMAADKTRGWSGDSFDRYKEYRYCLSVNVIAFVYAAFQACDLAYQVVTGRRIINHHLRYHFDFFMDQVLAYLLVSAASSAATRVDDWQSNWGKDDFTEMASASIALTFLAFVAFAISSLISGYNLCTLFS

SEQ ID NO: 57254 - protein, 262 aa, Glycine max
  peptide (1)..(262): Ceres Seq. ID no. 14312261
MKTSSSKTSESSTQFDSPHSPLRSFPLFDNADPFHSPQNDNSRAIVIVETTSTQFAQAAPPAPESEHRNPPPEAVVTRPVWPETKSSATVGRTRPRPVAPPSSVVPKREMMAKKVALGFRLSEVVLCLISFSVMAADKTRGWSGDSFDRYKEYRYCLSVNVIAFVYAAFQACDLAYQVVTGRRIINHHLRYHFDFFMDQVLAYLLVSAASSAATRVDDWQSNWGKDDFTEMASASIALTFLAFVAFAISSLISGYNLCTLFS

SEQ ID NO: 57255 - DNA, 1005 bp, Glycine max
  misc_feature (1)..(1005): Ceres Seq. ID no. 14312224
acaacaattgaagcctctctgtcattttcacctcactgttctctatctctgcacgaacgacacaattgaacccttaaacgacaatggcgtggggacagtgccgttgctgcgtttggtgactgatgatgctgcgcgtcgtcgtcgtggacggaggtcgcatggggtggaatctggtgcggccgtgtgcattgtgatcaatcaatcataatgaggaaagaggattgtttgattttgtgattgaaatcgaaagagaaagaaagagagaaatttgttgtgatggctgaattagtggcccgaacaggtcgacatcagcagcgatacgaacacggttatcgccttattgccgggtgtgttccatttaggtataaagatgactgtggagactcttgttccgagaagattgttgaagtgcttatgattaattcgactagtggaccaggtcttttgtttccaaagggaggttgggagaatgatgaaactgttgaggaggctgcagttagagaagctattgaagaagcaggagttcgaggagacctaatggattttcttgggtactatgaatttaggagtaagaccctccaagatgagtgtagtccagaaggtttatgcaaagcagcaatgtttgcattgtttgtgaaagaggaacttgagtcatggcctgagcaaagcaccagaaaaaggagttgggtggctgtatcagaggcactagcaaactgtcgacatgcatggatgagggatgccctgcattgtttctgtaaatggcatgaggagtgcaagggaggatcaagcctgaactgactaaatatttgtagggggcaatgataaaaaagattagtgacatttattttaggaaagatatttcttatcaggattacatagggtgtggttgagtgtctctttttttttttttttttttgtgttcaaagctattttagaaagtatatttgaaaaccttttttcagaaagataagttatttgatgaaattctgagagcagttttaaaag

SEQ ID NO: 57256 - protein, 173 aa, Glycine max
  peptide (1)..(173): Ceres Seq. ID no. 14312225
MAELVARTGRHQQRYEHGYRLIAGCVPFRYKDDCGDSCSEKIVEVLMINSTSGPGLLFPKGGWENDETVEEAAVREAIEEAGVRGDLMDFLGYYEFRSKTLQDECSPEGLCKAAMFALFVKEELESWPEQSTRKRSWVAVSEALANCRHAWMRDALHCFCKWHEECKGGSSLN

SEQ ID NO: 57257 - protein, 127 aa, Glycine max
  peptide (1)..(127): Ceres Seq. ID no. 14312226
MINSTSGPGLLFPKGGWENDETVEEAAVREAIEEAGVRGDLMDFLGYYEFRSKTLQDECSPEGLCKAAMFALFVKEELESWPEQSTRKRSWVAVSEALANCRHAWMRDALHCFCKWHEECKGGSSLN

SEQ ID NO: 57258 - protein, 86 aa, Glycine max
  peptide (1)..(86): Ceres Seq. ID no. 14312227
MDFLGYYEFRSKTLQDECSPEGLCKAAMFALFVKEELESWPEQSTRKRSWVAVSEALANCRHAWMRDALHCFCKWHEECKGGSSLN

SEQ ID NO: 57259 - DNA, 1504 bp, Glycine max
  misc_feature (1)..(1504): Ceres Seq. ID no. 14314308
atctaacaataaattctcaaaaaataaaaaagctttttttcactgtttggaaattgtggggttgggtatctcaactttcaatttctcattagattctgaacagtgaagcttccatttttgcctttttttttataattatttccaatctattctcaactgatctgattaataataaaaatgaaaaagtaaaaaagtatcggaggttaatataattaggagaaaatggaatttaaaaagagaaagaaagggtggaaattgtaggtgtggtgtgtttcacatttgaagtaacactgaaaagaaaggaaagtgaagttgagagtttaagaagaacaagaaatgggggttggttcccaggatgccatcaagcagttccaggcattcattgaccaagttgaggagcctttgcgaacaacgtttcagaatgttcatcaaggatttgtcactgcaactttaatgcggtttctaaaagcaagggactgggatccttacaaggcacagaaaatgttggttgattgtttaaattggagggtgcaaaatgagattgacaatatattatctaaaccaattgttcctgctgatttatacagagcggtgcgtgattcacaactcataggattatcaggttactcaagagagggtctgcctgtctttgcaattggtgttgggcttagcacatttgacaaagcatctgtccattattatgtgcagtcacacattcaaattaatgaatatcgtgagcgtatagtcttgccttctgcatcagagaagcaagggcgacctattaccacttgtataaaggtcttagacatgactggtctgaagttatcagccctgaatcagattaagttgttaactattatatcatccattgatgatctgaactaccctgagaagacaaatacttattacattgtaaatgctccatacatattttcagcttgttggaaggttgtgaagctacttttacaagagaggacaagaagaaaaatacaggtgttaccaggttgtggacgagatgagctgttgactatcatggattactcgtctctaccacatttctgtagaagagaaggttctggatcatccagacattctgagagtggtagtgaaaattgctattccttggatcatcccttccatcaagggctctacaaccacatcaagcagcaagccagactccgtgaagctgttgaacccatcaagcagggatcgtttcatgtagattttccagtacctccagatgatgaagttgagatcgccaagactatagagtcggagttacacaagtttgagaacggaaatgatgtctaatacgttcttttaggatctactgttgagaccttaaaatcagagatcttttgcttagtacaaccaatgtaggaagaagactccacattagaattacttctatcaggattcggcagaattagttagcattgtttatgtatgttaaaagagaaattaaggggtagtcaacttaatgcaaatcccagctttacatcgt

SEQ ID NO: 57260 - protein, 324 aa, Glycine max
  peptide (1)..(324): Ceres Seq. ID no. 14314309
MGVGSQDAIKQFQAFIDQVEEPLRTTFQNVHQGFVTATLMRFLKARDWDPYKAQKMLVDCLNWRVQNEIDNILSKPIVPADLYRAVRDSQLIGLSGYSREGLPVFAIGVGLSTFDKASVHYYVQSHIQINEYRERIVLPSASEKQGRPITTCIKVLDMTGLKLSALNQIKLLTIISSIDDLNYPEKTNTYYIVNAPYIFSACWKVVKLLLQERTRRKIQVLPGCGRDELLTIMDYSSLPHFCRREGSGSSRHSESGSENCYSLDHPFHQGLYNHIKQQARLREAVEPIKQGSFHVDFPVPPDDEVEIAKTIESELHKFENGNDV

SEQ ID NO: 57261 - protein, 285 aa, Glycine max
  peptide (1)..(285): Ceres Seq. ID no. 14314310
MRFLKARDWDPYKAQKMLVDCLNWRVQNEIDNILSKPIVPADLYRAVRDSQLIGLSGYSREGLPVFAIGVGLSTFDKASVHYYVQSHIQINEYRERIVLPSASEKQGRPITTCIKVLDMTGLKLSALNQIKLLTIISSIDDLNYPEKTNTYYIVNAPYIFSACWKVVKLLLQERTRRKIQVLPGCGRDELLTIMDYSSLPHFCRREGSGSSRHSESGSENCYSLDHPFHQGLYNHIKQQARLREAVEPIKQGSFHVDFPVPPDDEVEIAKTIESELHKFENGNDV

SEQ ID NO: 57262 - protein, 269 aa, Glycine max
  peptide (1)..(269): Ceres Seq. ID no. 14314311
MLVDCLNWRVQNEIDNILSKPIVPADLYRAVRDSQLIGLSGYSREGLPVFAIGVGLSTFDKASVHYYVQSHIQINEYRERIVLPSASEKQGRPITTCIKVLDMTGLKLSALNQIKLLTIISSIDDLNYPEKTNTYYIVNAPYIFSACWKVVKLLLQERTRRKIQVLPGCGRDELLTIMDYSSLPHFCRREGSGSSRHSESGSENCYSLDHPFHQGLYNHIKQQARLREAVEPIKQGSFHVDFPVPPDDEVEIAKTIESELHKFENGNDV

SEQ ID NO: 57263 - DNA, 1199 bp, Glycine max
  misc_feature (1)..(1199): Ceres Seq. ID no. 14312148
agaagtcactagcagcacacaaaaaaaaacacattccctcaaattcctctcttgtccacaaacatgaagctatctgcgaaacccatttcgagtccaggtcgcacagacaagttccctcccccactcatgaggtttctcagaagcaatgcgggcagcagaagcagaaggtccaggtcaagccctatgttcgtacgaaagaaaaacaccaccttcgaaacccacacccaggaaccctcttcccccaaggtcacgtgcatgggccaggtccgagtcaaacgcgcttccaaacaacccaccacccaacccgacttagctcccactcggtgccgccgccgccgccgccgctgctgctgcttctggatccgaaggcccaacaacccctgccgctgcaatcccctctggcccaactggcccttcttccgtcgaaagcccaccaagctcaaacaagactcccagtccgagcccaatttctacgcccacgaagaatcggaattaccgttccaagagagagtcaatgtggataaggatagtgattttgcttccaattccagcactcccccgagaaacgctctgcttttaactcgctgtagatccgctccgtacagatcctcctctttggctagtaggttctggagttcccccgtcaaggaccaagaaacggaactacaacacacttccgagggaccccaaacggaacccgaattagggtttctaacagaaaaaattgcttcactcaccgaaccagaaaggttgaggaagttgaaacagaaacagagtctgtgttacgtcctactgtactcactaggtgcaaatcggaaccggcgagaaccggacacagacttgaccctctggtaaataatttgttgaaaaaaagaaggttggaatttgattaattaatcccattatttttaattcgtacctatctccatattttgcttccttcctactactcttcatttaaatatagtcttttttatatgtaattgaattgaatgtgtttgagtctttgacacctagtcgttggtaacataaaaaggtatgagcgtgtagaaaatagaaagtagaaagagaggggaacgtatagaagtgatttcaggtacttattttctgtcctcgtagttaatgcatttcttgtcattacactacacaagcctgaagcctgaatttcttttttctctgccaacgatgttaagaacctg

SEQ ID NO: 57264 - protein, 263 aa, Glycine max
  peptide (1)..(263): Ceres Seq. ID no. 14312149
MKLSAKPISSPGRTDKFPPPLMRFLRSNAGSRSRRSRSSPMFVRKKNTTFETHTQEPSSPKVTCMGQVRVKRASKQPTTQPDLAPTRCRRRRRRCCCFWIRRPNNPCRCNPLWPNWPFFRRKPTKLKQDSQSEPNFYAHEESELPFQERVNVDKDSDFASNSSTPPRNALLLTRCRSAPYRSSSLASRFWSSPVKDQETELQHTSEGPQTEPELGFLTEKIASLTEPERLRKLKQKQSLCYVLLYSLGANRNRREPDTDLTLW

SEQ ID NO: 57265 - protein, 242 aa, Glycine max
  peptide (1)..(242): Ceres Seq. ID no. 14312150
MRFLRSNAGSRSRRSRSSPMFVRKKNTTFETHTQEPSSPKVTCMGQVRVKRASKQPTTQPDLAPTRCRRRRRRCCCFWIRRPNNPCRCNPLWPNWPFFRRKPTKLKQDSQSEPNFYAHEESELPFQERVNVDKDSDFASNSSTPPRNALLLTRCRSAPYRSSSLASRFWSSPVKDQETELQHTSEGPQTEPELGFLTEKIASLTEPERLRKLKQKQSLCYVLLYSLGANRNRREPDTDLTLW

SEQ ID NO: 57266 - protein, 223 aa, Glycine max
  peptide (1)..(223): Ceres Seq. ID no. 14312151
MFVRKKNTTFETHTQEPSSPKVTCMGQVRVKRASKQPTTQPDLAPTRCRRRRRRCCCFWIRRPNNPCRCNPLWPNWPFFRRKPTKLKQDSQSEPNFYAHEESELPFQERVNVDKDSDFASNSSTPPRNALLLTRCRSAPYRSSSLASRFWSSPVKDQETELQHTSEGPQTEPELGFLTEKIASLTEPERLRKLKQKQSLCYVLLYSLGANRNRREPDTDLTLW

SEQ ID NO: 57267 - DNA, 716 bp, Glycine max
  misc_feature (1)..(716): Ceres Seq. ID no. 15170388
atttgtattagaggctctagcttatgagatggatccaatggttgtgccagaaggatatgtgtttgtaatgggcgacaatcggaataaaagctttgattctcataactggggtcccctgccggttgagaacattgttggtaggtccatgtttcggtactggcctccatccaaggcatctgacactgatacccatcgtaaactcccacctggtaacaaacctgtggcaatttcttgacatgattcccgcagctttgtgaaggtgatgaaggtttccagatacggtcgtttgttctaaattgttagcttgagctgactttgcacacagtttgggatgaatatcttattcattgatacaaatttgtcgatgacctaataataccattaagcgttcattagtgccatctgagatgtatttctattgctgaagtgcggggagaaaaaaaagaattaaaaaagcatgatgattttgcccccccccaaaaaaaaaaatgaaacatggtgattgatttgttttgtattctttaaggtatgcatagcgtatgaatgctagaaactggaggaaagatttgacatggagctaattgactccctgtgagttccataatcaagcttcctcccattttgaatctgtctgtaatgccattcagtcatacatgaaattgtatggacttgcctattttaaaataataaagtaagaatgcaatttcactctttcc

SEQ ID NO: 57268 - protein, 77 aa, Glycine max
  peptide (1)..(77): Ceres Seq. ID no. 15170389
FVLEALAYEMDPMVVPEGYVFVMGDNRNKSFDSHNWGPLPVENIVGRSMFRYWPPSKASDTDTHRKLPPGNKPVAIS

SEQ ID NO: 57269 - protein, 68 aa, Glycine max
  peptide (1)..(68): Ceres Seq. ID no. 15170390
MDPMVVPEGYVFVMGDNRNKSFDSHNWGPLPVENIVGRSMFRYWPPSKASDTDTHRKLPPGNKPVAIS

SEQ ID NO: 57270 - protein, 65 aa, Glycine max
  peptide (1)..(65): Ceres Seq. ID no. 15170391
MVVPEGYVFVMGDNRNKSFDSHNWGPLPVENIVGRSMFRYWPPSKASDTDTHRKLPPGNKPVAIS

SEQ ID NO: 57271 - DNA, 1700 bp, Glycine max
  misc_feature (1)..(1700): Ceres Seq. ID no. 14311755
gtaaagtatcttccatttgaaaacaacccccattcattcattcactcactcaccaacaccaccaaacaaagccttgctggtggcggacactccgaggggcctctctctcctctccctctccacaataaaacccaaaaaactcacacaacccgacccacaacacaagagaaaaagcgcactgctcgctcgtgttctgtttctctctgtttctccgttctctgtttttttttcagatctcgaaaaatgcagagcgcggctttcactttctctccctctctccctctccgcaacccttcccctaactcttggaggagaccctctctttctctccgtctccacgccaaacacagcaacaacaacaacaacagtaacagcaccgaaggcgttaactccaatggcgtctcttccacttccttcactcgccgatcttggactcttcttccttcttcttctttcaaattcaggcctcttccttcttcacctcctcgcgccgccgaaaacgccgttcccgaaagcgcagcagcacccgtcgaaaacccgctcttcaaaactctcgaactcggcgccttgtttggcttatggtacctcttcaacatctacttcaacatctacaacaaacaggtgttgaaggcgtttcattatccggtaactgtgactgttgttcagtttgccgttgggactgtgctagtggcatttatgtggggtttgaatctctataagaggccgaaactcagtggtgctatgcttggagcgattttgccgctggctgcagtgcatactttggggaaccttttcactaatatgagtcttgggaaggtggccgtgtctttcactcacactatcaaagccatggagcctttcttttcagtcatcctttctgccatgttccttggagagtttcctacaccgtgggtggttggttcccttgtgcctattgttggtggagttgcactggcgtctgttaccgaggcctctttcaattgggctggattttggagtgcaatggcatctaatgtgacaaatcaatctcgtaatgttcttagcaaaaaggccatggttaagaaagaggattctatggacaacattactctcttctctataataactgtaatgtccttcttcttgttagcacctgtggctatcttcatggagggtgtcaaatttacccctgcttacttgcaatctgctggggtgaatgttagacaactttacatcagatctcttcttgctgctctctgtttccatgcgtatcaacaagtttcgtatatgatattgcaaagggtatcacctgttacccactctgtgggtaattgtgtgaagcgggttgtggtcattgtgagctctgtcatcttcttccaaacacctgtctcacctgtgaatgcttttgggactgctatagctcttgctggagttttcctctattcaagggtgaagcgtattaaggcaaagccaaaaacagcttaattttcaatggtaaaattttgttagttccattgaggaagccaaatagttgcaatctgcaattctgaatttctttgtaggtgagatagggaatgaggattatctttattgatcctcagtcctcacatttcctttttatttcttctccttaagttaccttgtggatttcattatttatgtttgagtaagtgcctaatggttctgctccatgaaaaaattatcctcttctgaattttgct

SEQ ID NO: 57272 - protein, 487 aa, Glycine max
  peptide (1)..(487): Ceres Seq. ID no. 14311756
VKYLPFENNPHSFIHSLTNTTKQSLAGGGHSEGPLSPLPLHNKTQKTHTTRPTTQEKKRTARSCSVSLCFSVLCFFFRSRKMQSAAFTFSPSLPLRNPSPNSWRRPSLSLRLHAKHSNNNNNSNSTEGVNSNGVSSTSFTRRSWTLLPSSSFKFRPLPSSPPRAAENAVPESAAAPVENPLFKTLELGALFGLWYLFNIYFNIYNKQVLKAFHYPVTVTVVQFAVGTVLVAFMWGLNLYKRPKLSGAMLGAILPLAAVHTLGNLFTNMSLGKVAVSFTHTIKAMEPFFSVILSAMFLGEFPTPWVVGSLVPIVGGVALASVTEASFNWAGFWSAMASNVTNQSRNVLSKKAMVKKEDSMDNITLFSIITVMSFFLLAPVAIFMEGVKFTPAYLQSAGVNVRQLYIRSLLAALCFHAYQQVSYMILQRVSPVTHSVGNCVKRVVVIVSSVIFFQTPVSPVNAFGTAIALAGVFLYSRVKRIKAKPKTA

SEQ ID NO: 57273 - protein, 406 aa, Glycine max
  peptide (1)..(406): Ceres Seq. ID no. 14311757
MQSAAFTFSPSLPLRNPSPNSWRRPSLSLRLHAKHSNNNNNSNSTEGVNSNGVSSTSFTRRSWTLLPSSSFKFRPLPSSPPRAAENAVPESAAAPVENPLFKTLELGALFGLWYLFNIYFNIYNKQVLKAFHYPVTVTVVQFAVGTVLVAFMWGLNLYKRPKLSGAMLGAILPLAAVHTLGNLFTNMSLGKVAVSFTHTIKAMEPFFSVILSAMFLGEFPTPWVVGSLVPIVGGVALASVTEASFNWAGFWSAMASNVTNQSRNVLSKKAMVKKEDSMDNITLFSIITVMSFFLLAPVAIFMEGVKFTPAYLQSAGVNVRQLYIRSLLAALCFHAYQQVSYMILQRVSPVTHSVGNCVKRVVVIVSSVIFFQTPVSPVNAFGTAIALAGVFLYSRVKRIKAKPKTA

SEQ ID NO: 57274 - protein, 255 aa, Glycine max
  peptide (1)..(255): Ceres Seq. ID no. 14311758
MWGLNLYKRPKLSGAMLGAILPLAAVHTLGNLFTNMSLGKVAVSFTHTIKAMEPFFSVILSAMFLGEFPTPWVVGSLVPIVGGVALASVTEASFNWAGFWSAMASNVTNQSRNVLSKKAMVKKEDSMDNITLFSIITVMSFFLLAPVAIFMEGVKFTPAYLQSAGVNVRQLYIRSLLAALCFHAYQQVSYMILQRVSPVTHSVGNCVKRVVVIVSSVIFFQTPVSPVNAFGTAIALAGVFLYSRVKRIKAKPKTA

SEQ ID NO: 57275 - DNA, 585 bp, Glycine max
  misc_feature (1)..(585): Ceres Seq. ID no. 13638213
ccttcactctcttctccgatctcaaaatgcccgccgtttatggagctcgcttgaccaccttcgaagactccgagaaggagagtgaatacggttacgttcgcaaggtatcaggaccagtcgtcgttgcagatggcatggctggggctgctatgtatgaactcgtgcgtgttggtcatgataatctcattggtgaaattattcgtctcgaagggaattctgctaccatccaagtttatgaggaaactgctggcttgatggttaatgatccggtgttacggactcacaagcctttatccgtggagttgggacctggaatactggggaatattttcgatggaattcagaggcctttgaaaactattgctaaacgatctggtgatgtctatattcctcgtggtgtctctgttccagcactcgacaaagatacactttgggaatttcaacctaagaaaattggtgaaggcgaccttttaactggtggagatatggtagctttgtttagtttaattaattaacctaattaatgaaattcgaagtttatctctatgaacaatgtagacttggtccacattttgtggctggtgt

SEQ ID NO: 57276 - protein, 170 aa, Glycine max
  peptide (1)..(170): Ceres Seq. ID no. 13638214
FTLFSDLKMPAVYGARLTTFEDSEKESEYGYVRKVSGPVVVADGMAGAAMYELVRVGHDNLIGEIIRLEGNSATIQVYEETAGLMVNDPVLRTHKPLSVELGPGILGNIFDGIQRPLKTIAKRSGDVYIPRGVSVPALDKDTLWEFQPKKIGEGDLLTGGDMVALFSLIN

SEQ ID NO: 57277 - protein, 162 aa, Glycine max
  peptide (1)..(162): Ceres Seq. ID no. 13638215
MPAVYGARLTTFEDSEKESEYGYVRKVSGPVVVADGMAGAAMYELVRVGHDNLIGEIIRLEGNSATIQVYEETAGLMVNDPVLRTHKPLSVELGPGILGNIFDGIQRPLKTIAKRSGDVYIPRGVSVPALDKDTLWEFQPKKIGEGDLLTGGDMVALFSLIN

SEQ ID NO: 57278 - protein, 126 aa, Glycine max
  peptide (1)..(126): Ceres Seq. ID no. 13638216
MAGAAMYELVRVGHDNLIGEIIRLEGNSATIQVYEETAGLMVNDPVLRTHKPLSVELGPGILGNIFDGIQRPLKTIAKRSGDVYIPRGVSVPALDKDTLWEFQPKKIGEGDLLTGGDMVALFSLIN

SEQ ID NO: 57279 - DNA, 1146 bp, Glycine max
  misc_feature (1)..(1146): Ceres Seq. ID no. 15171359
acatccaaatgtcttctttcctcttagcttcgcttgcacttttgttttgcatctcctccttggagaagagctttgcctttcaagcaacaaaggaaagcaacaatcttcgtcaatatcattttgttcacctcaactctctatttccatcatcttcttgcagctcttctgccaaaggatgctcctcatccacagatgcatcatgcatatatgacgtcaaatacggtgacaattccatctcccgcggcttcttgagtcaggagcgccttaccatcaccgccaccgacatcgtccacgacttcctctttggctgtggccaagacaacgagggcctcttcaggggcaccgccggcctcatgggcctcagccgccaccccatttcctttgtccaacaaacctcctcaatttacaacaaaattttctcctactgtctcccctccacccccagctcccttggccacctcaccttcggcgcttccgccgccaccaatgctaacctcaaatacactcccttttccacaatctccggcgaaaactccttctacggtctcgacatcgtcggcatctccgttggcggcaccaaactccctgctgtctcctcctccaccttctccgccggtggctccatcatcgactccggcaccgtgatcacgcggttgcctccgaccgcgtacgccgcgctccggtcggcatttcggcagtttatgatgaagtaccccgttgcctatgggacccgcctacttgacacgtgttatgatttcagtgggtataaggagatttcagttccgaggatagattttgaatttgccggtggcgtcaaggtggagttgccattggtggggatactctatggggaaagtgcgcaacaactgtgtttggcttttgctgcaaatgggaatggcaatgatattacgatatttgggaatgtgcaacaaaagacactagaggtcgtgtatgatgttgagggtgggaggatagggtttggtgctgctgggtgcaactgaagttagtttgattaatagtggtgttaattaaacatgctttgggcttgttagggaggaagaaatcttaattggctctggcatttttaattactattgttgttgttactggaaagtactctaaaacatatgaaaaaataaataaagc

SEQ ID NO: 57280 - protein, 332 aa, Glycine max
  peptide (1)..(332): Ceres Seq. ID no. 15171360
IQMSSFLLASLALLFCISSLEKSFAFQATKESNNLRQYHFVHLNSLFPSSSCSSSAKGCSSSTDASCIYDVKYGDNSISRGFLSQERLTITATDIVHDFLFGCGQDNEGLFRGTAGLMGLSRHPISFVQQTSSIYNKIFSYCLPSTPSSLGHLTFGASAATNANLKYTPFSTISGENSFYGLDIVGISVGGTKLPAVSSSTFSAGGSIIDSGTVITRLPPTAYAALRSAFRQFMMKYPVAYGTRLLDTCYDFSGYKEISVPRIDFEFAGGVKVELPLVGILYGESAQQLCLAFAANGNGNDITIFGNVQQKTLEVVYDVEGGRIGFGAAGCN

SEQ ID NO: 57281 - protein, 330 aa, Glycine max
  peptide (1)..(330): Ceres Seq. ID no. 15171361
MSSFLLASLALLFCISSLEKSFAFQATKESNNLRQYHFVHLNSLFPSSSCSSSAKGCSSSTDASCIYDVKYGDNSISRGFLSQERLTITATDIVHDFLFGCGQDNEGLFRGTAGLMGLSRHPISFVQQTSSIYNKIFSYCLPSTPSSLGHLTFGASAATNANLKYTPFSTISGENSFYGLDIVGISVGGTKLPAVSSSTFSAGGSIIDSGTVITRLPPTAYAALRSAFRQFMMKYPVAYGTRLLDTCYDFSGYKEISVPRIDFEFAGGVKVELPLVGILYGESAQQLCLAFAANGNGNDITIFGNVQQKTLEVVYDVEGGRIGFGAAGCN

SEQ ID NO: 57282 - protein, 215 aa, Glycine max
  peptide (1)..(215): Ceres Seq. ID no. 15171362
MGLSRHPISFVQQTSSIYNKIFSYCLPSTPSSLGHLTFGASAATNANLKYTPFSTISGENSFYGLDIVGISVGGTKLPAVSSSTFSAGGSIIDSGTVITRLPPTAYAALRSAFRQFMMKYPVAYGTRLLDTCYDFSGYKEISVPRIDFEFAGGVKVELPLVGILYGESAQQLCLAFAANGNGNDITIFGNVQQKTLEVVYDVEGGRIGFGAAGCN

SEQ ID NO: 57283 - DNA, 1474 bp, Glycine max
  misc_feature (1)..(1474): Ceres Seq. ID no. 14314312
aatttggaaatgtaaaaaaaaattgggtgtttccgatagtagtagttgtagcggtcaagccgagccgatccgatgacgcgagccactcacacactgggggttcccccaacaacacgcgcccctccccggcgaccgtaccgtattatccctcaccattcccactctttcgccttgccgtttcgctttctctctcttcttcttcttctttctctttctctttctctttctcttttccctttctctttatctctcttccaaccctaattccctttttccgatgccggacttccacgactccctcctcaccaccacgccgccgccatcgcgccccgtccccgtccgcgaggactgctggtccgaggaggcctcctccacgctcgtcgacgcctggggccgccgctacctcgagctcaaccgcggcaacctccgccaaaaggactggcaggacgtcgccgacgccgtcaacgcgctccacggccacaccaaaaagacgcaccgcaccgacgtccagtgcaaaaaccgcatcgacaccattaagaagaagtacaagatcgagaaggctagggtttcggcctccaacggtactctctcttcctcttggcctttctacgagcgcttggacgctctaatcggccctaattttagcgcgaagaaatcaacctcttcgccgtctccgtcgccgccggtggctcttcctttgctgccgcatcggaagaaccagaaccaaaaccagaacccttcctcttctcctgcgattgcggtgccgccgacggccgtcgctctgccgcagaagcgctcctcggcagcggcgatggacgagggttacttcagaaggaattactccgccgtggctgccgcggcggcggcagcggaggctgatgaggacgatgaggaggaagacgaggaggaggcggaggatttggaggaggaggaggaggaagaatgtgaagaggaagggagagggagcgaagtggaggaaggggataaggagagggaagggatgaggaggttggcgaaggcgatagagaggtttggggaagtttatgagagagtggaggcgcagaagctgaggcagatggtggatttggagaaacagaggatgcagtttgctaaagatcttgaagtgcagaggatggagatgtttatggacacacaggttcagctcgagagaattaagcgcggtaaaagatctggctctaatggtgagatacaaaaaaaaattcggccttttatttgcttcccttttggcttgatttgatcacacgttgtactttttagtgttttgttttcaacgaatgaatgatgttttggacttgaggataagtgggtcgctagaggattattctccagtgagttcctttttggtggtaaaagaaaaatagattggtttggactctagagggtgcactgaatgctctgaattggttgtttcttgtagtcctacaattaaatatactagcatgtgatgcacttt

SEQ ID NO: 57284 - protein, 326 aa, Glycine max
  peptide (1)..(326): Ceres Seq. ID no. 14314313
MPDFHDSLLTTTPPPSRPVPVREDCWSEEASSTLVDAWGRRYLELNRGNLRQKDWQDVADAVNALHGHTKKTHRTDVQCKNRIDTIKKKYKIEKARVSASNGTLSSSWPFYERLDALIGPNFSAKKSTSSPSPSPPVALPLLPHRKNQNQNQNPSSSPAIAVPPTAVALPQKRSSAAAMDEGYFRRNYSAVAAAAAAAEADEDDEEEDEEEAEDLEEEEEEECEEEGRGSEVEEGDKEREGMRRLAKAIERFGEVYERVEAQKLRQMVDLEKQRMQFAKDLEVQRMEMFMDTQVQLERIKRGKRSGSNGEIQKKIRPFICFPFGLI

SEQ ID NO: 57285 - protein, 208 aa, Glycine max
  peptide (1)..(208): Ceres Seq. ID no. 14314314
FGNVKKNWVFPIVVVVAVKPSRSDDASHSHTGGSPNNTRPSPATVPYYPSPFPLFRLAVSLSLSSSSSFSFSFSFSFPFLFISLPTLIPFFRCRTSTTPSSPPRRRHRAPSPSARTAGPRRPPPRSSTPGAAATSSSTAATSAKRTGRTSPTPSTRSTATPKRRTAPTSSAKTASTPLRRSTRSRRLGFRPPTVLSLPLGLSTSAWTL

SEQ ID NO: 57286 - DNA, 1665 bp, Glycine max
  misc_feature (1)..(1665): Ceres Seq. ID no. 15171821
acttcataggcctttcttattcttccttctaagaaaccacttcaaatcatcaacttccctagacttacacaccctttgggctgtaacaagcaatctgatcctcttgttatcattcagattgatttctcttctagcacctcgatcaaagggctaaaaaaatttgctacttattgcacttttcttttcatggtttgatacatcttattgattttagtgctatttcaaggggtgaatttgagacatgggtttgagttctaagcaggtttctagcagtggacttgattggaaacaaaccttgttggaggctcagaatttggaacttccaaagcctaatctgatgaggaaacaacagcagcagcagcagcaacaacaacaacaaactcagccgaattcagagtctttgaaatgtccaagatgtgactctaccaacaccaaattttgttactacaacaactacaacaagtctcagcctcgccatttctgcagggcttgcaagaggcactggactaaaggtggaactctacgcaatgttccagttggtggtggaaggaagaacaagagggtcaaaaaatcaatcactccaattacaacatcttccaccaccaccacaccaatcacaaccgccacttcaacttgcactgccacagtcacaacctcaattggcaacaacatggatgctatgttgggttgttatagccacatgacaatccaaactcctcttgcggatgatcagaaaaacatgtcttcctctctctaccaagctctaattcgtccaccacctttgctgctacaacagaatctgctcaacacaagagaattagaaggcaaagattttggtattggtatcggtaataatggtatctttcctagttcaactttggctcttcctactcatcaaagccaaagcctactcttccctttctcagcctcaagcagatcttttgacaccaacccttgttcagtagtgtcaacctctcttagatcctccaatgtttataactatggggaggatcagtttaaagcaatagaggaaccaaccatcaatagtactactgctactatagtgcctagcacaggtggcaccaacaacacacatcatccatgggagatagcagcagcaacaagtggtgttggcttgggaacttcttcaaattcaaactattggaattgggaggattttgattcattggtttcaactgatctaaaagatccctgggatgattcagatatcaaaccctgagaaccaaacaataagcaacaacacatcatgatggggcatgagaagtatttagagctgtcatgttttagtttcagcttcagcttcaagcaaaagggtcccaaaattcctcacaattagttgcaacccactctgtttgcctctttgttcatctctcttatcatttcctctaatctctaataataaaatggtgtattaatgtatgcaaacattgcaaagtagtgtctagcattatttatcaatataggattttgttttttttattttttattttattttttggggagttttgtgagtgctttgtgatgggagtgatatagatatggggtctgctccagcactgctgaactgacagaatgtgattggaagattctttggacatgtatatatcttggaatgatattttatcatacggttttattgcttgc

SEQ ID NO: 57287 - protein, 332 aa, Glycine max
  peptide (1)..(332): Ceres Seq. ID no. 15171822
MGLSSKQVSSSGLDWKQTLLEAQNLELPKPNLMRKQQQQQQQQQQQTQPNSESLKCPRCDSTNTKFCYYNNYNKSQPRHFCRACKRHWTKGGTLRNVPVGGGRKNKRVKKSITPITTSSTTTTPITTATSTCTATVTTSIGNNMDAMLGCYSHMTIQTPLADDQKNMSSSLYQALIRPPPLLLQQNLLNTRELEGKDFGIGIGNNGIFPSSTLALPTHQSQSLLFPFSASSRSFDTNPCSVVSTSLRSSNVYNYGEDQFKAIEEPTINSTTATIVPSTGGTNNTHHPWEIAAATSGVGLGTSSNSNYWNWEDFDSLVSTDLKDPWDDSDIKP

SEQ ID NO: 57288 - protein, 300 aa, Glycine max
  peptide (1)..(300): Ceres Seq. ID no. 15171823
MRKQQQQQQQQQQQTQPNSESLKCPRCDSTNTKFCYYNNYNKSQPRHFCRACKRHWTKGGTLRNVPVGGGRKNKRVKKSITPITTSSTTTTPITTATSTCTATVTTSIGNNMDAMLGCYSHMTIQTPLADDQKNMSSSLYQALIRPPPLLLQQNLLNTRELEGKDFGIGIGNNGIFPSSTLALPTHQSQSLLFPFSASSRSFDTNPCSVVSTSLRSSNVYNYGEDQFKAIEEPTINSTTATIVPSTGGTNNTHHPWEIAAATSGVGLGTSSNSNYWNWEDFDSLVSTDLKDPWDDSDIKP

SEQ ID NO: 57289 - protein, 189 aa, Glycine max
  peptide (1)..(189): Ceres Seq. ID no. 15171824
MDAMLGCYSHMTIQTPLADDQKNMSSSLYQALIRPPPLLLQQNLLNTRELEGKDFGIGIGNNGIFPSSTLALPTHQSQSLLFPFSASSRSFDTNPCSVVSTSLRSSNVYNYGEDQFKAIEEPTINSTTATIVPSTGGTNNTHHPWEIAAATSGVGLGTSSNSNYWNWEDFDSLVSTDLKDPWDDSDIKP

SEQ ID NO: 57290 - DNA, 1145 bp, Glycine max
  misc_feature (1)..(1145): Ceres Seq. ID no. 14312124
attttggtaccaccacaactctctatcactcacaacattttcacacaaacactttctgaaaaaagaattcgtttcttttccctaacatggccagatcacaacagcgataccgaggtgtccgacaaaggcattggggctcttgggtctccgaaattcgacaccccatattgtaagtgccccttttgttttcactccaatgcacatttcacttatctatggactaaaaaatagaccaaatgttggtctagcaaaagaaattagtccatggcaaaccaatttatcaacctccgttaaataaaaaatgttcacatttagtgtgtgacagcatgtcaaaccaatgtttgaatctccgttaaaaaggtgtttacatatagtatctgacagtgtctcgaaacattattgattcaaactttcttctaatttgcaggaaaactaggatatggctaggaacttttgaaactgctgaggatgcagctagagcctatgatgaagcagcaaggctaatgtgtggcacaagagcaagaactaacttcccttacaaccccaatgcgtctcagtcatcatcttccaagcttctctcagcaactttaactgcaaaactgcataggtgctacatggcttctttgcaaatgacaaggccatcatcacaggcagagcctcagagagtggcttcaccaaatgtcatcacctcctccgcgagcaacttctccatgaagagtaacgaaactgagacattgttgttgccacaaaagagacaagaagaggagcaagaagcagaagggaattgggttttcaagaaggttaaggtggaaaatgctcagcagttcaagcctcttgaagaggaccacatcgagcaaatgatagaggagttgctgcattacgggtctattgagctatgctctgtgattccaccacaggctctttgaactcacattgagcaagcatttttattgttagttcacattcttactctgctaatttaatcaactaattctcttggacaatttcagtctctattattattaagtgctttaggtgctagactagactagactagaatagtactatcttctaagtgactcattggacaatgttgtatgtacagccagccaatcatgttgaaattgtgcatttgttctgttcac

SEQ ID NO: 57291 - protein, 140 aa, Glycine max
  peptide (1)..(140): Ceres Seq. ID no. 14312125
MCGTRARTNFPYNPNASQSSSSKLLSATLTAKLHRCYMASLQMTRPSSQAEPQRVASPNVITSSASNFSMKSNETETLLLPQKRQEEEQEAEGNWVFKKVKVENAQQFKPLEEDHIEQMIEELLHYGSIELCSVIPPQAL

SEQ ID NO: 57292 - protein, 103 aa, Glycine max
  peptide (1)..(103): Ceres Seq. ID no. 14312126
MASLQMTRPSSQAEPQRVASPNVITSSASNFSMKSNETETLLLPQKRQEEEQEAEGNWVFKKVKVENAQQFKPLEEDHIEQMIEELLHYGSIELCSVIPPQAL

SEQ ID NO: 57293 - protein, 98 aa, Glycine max
  peptide (1)..(98): Ceres Seq. ID no. 14312127
MTRPSSQAEPQRVASPNVITSSASNFSMKSNETETLLLPQKRQEEEQEAEGNWVFKKVKVENAQQFKPLEEDHIEQMIEELLHYGSIELCSVIPPQAL

SEQ ID NO: 57294 - DNA, 1375 bp, Glycine max
  misc_feature (1)..(1375): Ceres Seq. ID no. 13514389
acctagaacatcctaatcgaaaataaacacccacatgacatggaaaagacgctaacgccacccgtcttcgagcattaaaacccgcgaaacttccaagcagggttacacgccgcattgctctcagcttcacaacaccatggaccacgttagggaaacctctgcttgggtagctagccgctcctcccacgttctcgttgactctgcaggaattgagaaagtggtgagcaccattgattccattcccaaggttgagtgggatttcgaagggattcactactttgataatggaccactcaccgttcagtacctgtttgtgttggacgctttaaatttttgcttctggcctgataaggatttgaattatgatgatttggcatctgggctaaaggcagctcttcaaaatgataaatctgcatttgatgctgatcgtctgcaaaagtacactggtccacaactgcgtgagcttttgaggtggcctagaccccttcctctggaagatgaacgagttaggttactacatgaggttgggattgaattagaaagaaactttgagggtaaagcatccaatcttgtggagtgctgtggaaaatcagccatgaatcttgttgctcttgttgcacgccattttcctggttttagagaccatacagtgtacaaaggacgccaggtatttttatataaaagggctcagatatttgcagcagatttgtttggtgcatttaggggccaaggatatggtgagttcaaagacattggctctctaactataatggcagactatattgtcccagctgtgcttcgacagcttggtgttttaaaatatagtccaacacttgccagtactattgaggccagtggagaaataggtccagggactgaagaggaagttgaactgcgtgcttgctctgtacatgcagtggagaaaatgagggagctaataagtgtaaagtcaggaagacaggtgctcagtgtggagctggatctttggctctgggcttctggtgttcagtccacatctctgcagcaccaccgtacactttcaatatattactgagcacatgatatatggtaacttctagctatcaacaatttagttgttgaacaagaaaattttggctgttttaaggtaattatttaggataatgtgtgaataactacctccttttgcactaaagttttggaatcagcttttgtaattttggaaaagtgatacttaaccagatgctttcaaacttaattttgaatagccatggtattcggattttaggaccttaaatagtttacagggtgaacaattaggctcatggttgttttacaatgggaggttgttaatatttactttgtcaaatataactgttggtatagccgaggttgt

SEQ ID NO: 57295 - protein, 305 aa, Glycine max
  peptide (1)..(305): Ceres Seq. ID no. 13514390
MDHVRETSAWVASRSSHVLVDSAGIEKVVSTIDSIPKVEWDFEGIHYFDNGPLTVQYLFVLDALNFCFWPDKDLNYDDLASGLKAALQNDKSAFDADRLQKYTGPQLRELLRWPRPLPLEDERVRLLHEVGIELERNFEGKASNLVECCGKSAMNLVALVARHFPGFRDHTVYKGRQVFLYKRAQIFAADLFGAFRGQGYGEFKDIGSLTIMADYIVPAVLRQLGVLKYSPTLASTIEASGEIGPGTEEEVELRACSVHAVEKMRELISVKSGRQVLSVELDLWLWASGVQSTSLQHHRTLSIYY

SEQ ID NO: 57296 - protein, 152 aa, Glycine max
  peptide (1)..(152): Ceres Seq. ID no. 13514391
MNLVALVARHFPGFRDHTVYKGRQVFLYKRAQIFAADLFGAFRGQGYGEFKDIGSLTIMADYIVPAVLRQLGVLKYSPTLASTIEASGEIGPGTEEEVELRACSVHAVEKMRELISVKSGRQVLSVELDLWLWASGVQSTSLQHHRTLSIYY

SEQ ID NO: 57297 - DNA, 1112 bp, Glycine max
  misc_feature (1)..(1112): Ceres Seq. ID no. 14316455
aacaacaccgataggaggaattggagaagaaacaggaacagaaaggtttgggaaggaagcagaaatcgggggtggtgtgagagacaagcatggcgacgtgtcttcgccttgggagatttacgactattgattcgctctctctcttcgtttccaccgctagattctccttttcttcatcatcttcgtcgtcgtcctcgtcgtcatcttccggtaagtccaagacggggaagaagctgatggatcgtctttccaccgttatcgacgccgtcaatgatcgcaaactacctcctgagctacgtggccagcgcagcaatgtcaggtcagaaactgacattatcaacgttgttgagcaaagaatatggcataccatggaagaagggaagtttgagaatttgccaggcaaaggcaagccgcttaagctcgacacaaatcctcatgcagatccagctgaagacaccctgtaccgtatcctgtcaaaaaacggatatgcaccggagtgggttgaacttaacaaagagattagatctaaaatatctgaatggaggaagtccttgaagaaagcttgggctactaagtgcagtggagatcactctgagtgggttgaaagttcagaggctttgaaatctcagttacgagaaatcaatgataaggttttccgttataaccttattgtgccttttggtcggcaaatgtttggccttaagtgggagaaagagctaggttacttagaagaaaaatgagaatcattgttgttaaatttgagccagttggttcactatagtagaagattaaaatttgttattttcctgagaaaagtcatgccaggcgactaatcaactaggaactagcttaagttattcagttcaactattgttgattacttttaatttcttagcattatgttactggttatgattcctctttcaggcttattagtatggctatatttatatggttcataacctccgatcatgtacatcccaaggatacaatacaagtaaagatagtgaaaatgtatgtgactcaacaatattagttgtcctgacgattgtattatcagtttttgctttgagacaaattgtagacttcagttttctctttcagtaaaaaat

SEQ ID NO: 57298 - protein, 216 aa, Glycine max
  peptide (1)..(216): Ceres Seq. ID no. 14316456
MATCLRLGRFTTIDSLSLFVSTARFSFSSSSSSSSSSSSSGKSKTGKKLMDRLSTVIDAVNDRKLPPELRGQRSNVRSETDIINVVEQRIWHTMEEGKFENLPGKGKPLKLDTNPHADPAEDTLYRILSKNGYAPEWVELNKEIRSKISEWRKSLKKAWATKCSGDHSEWVESSEALKSQLREINDKVFRYNLIVPFGRQMFGLKWEKELGYLEEK

SEQ ID NO: 57299 - protein, 167 aa, Glycine max
  peptide (1)..(167): Ceres Seq. ID no. 14316457
MDRLSTVIDAVNDRKLPPELRGQRSNVRSETDIINVVEQRIWHTMEEGKFENLPGKGKPLKLDTNPHADPAEDTLYRILSKNGYAPEWVELNKEIRSKISEWRKSLKKAWATKCSGDHSEWVESSEALKSQLREINDKVFRYNLIVPFGRQMFGLKWEKELGYLEEK

SEQ ID NO: 57300 - protein, 123 aa, Glycine max
  peptide (1)..(123): Ceres Seq. ID no. 14316458
MEEGKFENLPGKGKPLKLDTNPHADPAEDTLYRILSKNGYAPEWVELNKEIRSKISEWRKSLKKAWATKCSGDHSEWVESSEALKSQLREINDKVFRYNLIVPFGRQMFGLKWEKELGYLEEK

SEQ ID NO: 57301 - DNA, 1430 bp, Glycine max
  misc_feature (1)..(1430): Ceres Seq. ID no. 14314343
agttcaactaagtacgctgtttttttattttccccacaaaaccatatagccatcggtcgtagatcccacgaaccccatcatcacaccactctctgcagttttcgcaaccaaaccttcttttttgtttttattcctctgcttattggattcaacgaagttgttgtgattaaggagaacataactttttgaatcacacagagagagagagagaagagacccagtactttctgcatccaaaccaatcactactgcggataactggtaagttcataaaggggagattcttcagtgatcatctatctgatttggtccagctaaggaatcattcagaagccaagttgattaagtactagagagatcatattttggattagtaaaagttaatcataagcatgggatctttcaagggtcatgctttgccagggactttgtttcttctagttggggtgtggcacgtatggggctctgtggtgagatatgttcgcaatccaatggcgtttcaagtcagagtttggaatcctgtgccagggtttgatgggaggctgaagcacctggagctatatgttattgcaattggtgctttcgttgacatgtgcatcgagcttttgtattcaccacacctcaagatttttgttggtggagtccttaaccccgctcacatgaatgactttgagcactctggaatgcttcttatgtttttcatctttggtgttgttgccctactttcccaaaagaccagatttcttcccttgccagaaggtgctctttgtttgcttgctgcctcagcattcactgcagagtaccttcttttctacttccattcaacaacacacaagggccttgagggctattaccacaccctccttgtcttcctggttggactgtgcattttatcttcaattgctggagcccttttgccaacaagctttccagtggatttatgcaatggcattgctatagcactgcaaggtttatggttctatcagacagcctttgttctctatggccctatgatgccaagtggttgtaagcttagggaaaacagtgtcacatgtcattctattgatagtgaggttcggggcgaattgcttgctaattttcagctctttgttgcggttcttgtggtccttgtgggaactgtggcatcatatggctttgctgcttcaagatatgggagttctgaagtcaggaacttgcatgcaattcagactgaattagatcaagactaaagttgcgttgctattttttctggtggtagttgaaatgtgttggcagcatagagtttcttatagaacatgtttgttgtatattgaagtgcaaaggatcatgcatgcatgatcactgaaaattgaaaattaacaccccctcctccctcaaaaaggaattatacatttttgacttttaggaatcggatgtcaaaggagcaacag

SEQ ID NO: 57302 - protein, 278 aa, Glycine max
  peptide (1)..(278): Ceres Seq. ID no. 14314344
MGSFKGHALPGTLFLLVGVWHVWGSVVRYVRNPMAFQVRVWNPVPGFDGRLKHLELYVIAIGAFVDMCIELLYSPHLKIFVGGVLNPAHMNDFEHSGMLLMFFIFGVVALLSQKTRFLPLPEGALCLLAASAFTAEYLLFYFHSTTHKGLEGYYHTLLVFLVGLCILSSIAGALLPTSFPVDLCNGIAIALQGLWFYQTAFVLYGPMMPSGCKLRENSVTCHSIDSEVRGELLANFQLFVAVLVVLVGTVASYGFAASRYGSSEVRNLHAIQTELDQD

SEQ ID NO: 57303 - protein, 245 aa, Glycine max
  peptide (1)..(245): Ceres Seq. ID no. 14314345
MAFQVRVWNPVPGFDGRLKHLELYVIAIGAFVDMCIELLYSPHLKIFVGGVLNPAHMNDFEHSGMLLMFFIFGVVALLSQKTRFLPLPEGALCLLAASAFTAEYLLFYFHSTTHKGLEGYYHTLLVFLVGLCILSSIAGALLPTSFPVDLCNGIAIALQGLWFYQTAFVLYGPMMPSGCKLRENSVTCHSIDSEVRGELLANFQLFVAVLVVLVGTVASYGFAASRYGSSEVRNLHAIQTELDQD

SEQ ID NO: 57304 - protein, 212 aa, Glycine max
  peptide (1)..(212): Ceres Seq. ID no. 14314346
MCIELLYSPHLKIFVGGVLNPAHMNDFEHSGMLLMFFIFGVVALLSQKTRFLPLPEGALCLLAASAFTAEYLLFYFHSTTHKGLEGYYHTLLVFLVGLCILSSIAGALLPTSFPVDLCNGIAIALQGLWFYQTAFVLYGPMMPSGCKLRENSVTCHSIDSEVRGELLANFQLFVAVLVVLVGTVASYGFAASRYGSSEVRNLHAIQTELDQD

SEQ ID NO: 57305 - DNA, 1274 bp, Glycine max
  misc_feature (1)..(1274): Ceres Seq. ID no. 14314335
tccttttcctcttatttccctccctttgcttcaacaaaaagtatcttcttgtcatttgtcatgtttgctgcatgttttgcaagttctcatcttttttctcccttttcacactctcctgtgttggatgtctgaaaaaaatgtttactttgtagagggtttcttggttgaattttaagttccttagctttcaaagaaagaaacttggaatgtttgaactttgaacctcattttccagtgaatgtttctcacataatattcagaacttttcctcaaattaaaagtgacttattgttgtttttggactttgttctagcaatagtttgttcagggttaccatgaaagtttctagctttcattcatttggcttaaaatttttgttttgtttgtggtttgcagggggtcacattaacccagcggtgacatttgggctgtttttggctcgcaaggtgtctttgatccgagccatcatgtacatggtggctcagtgcttaggtgctatctgtggagttggtttggttaaggctttccaaaagtcttacttcaacaagtatggtggtggggctaattccctcgctgctgggtacagcacaggtactggattgggtgctgagattattggaacctttgttttggtctacactgtcttctctgccactgaccccaagaggaatgccagagattcccatgtgccggttttggctccacttcccattggatttgctgtgttcatggttcacttggccaccatcccagtcactggtactggtatcaaccctgctaggagtcttggagctgctgttatctacaaccaagataagccatgggatgaccattggatcttttgggtaggaccatttattggggcagccattgcagccttctaccatcagttcatcttaagagcaggtgcagctaaggctcttggatcattcaggagtaacccccataattgagttgtctttctcttccttatgatggctctagtggaaagaagataattggagagatgggggttgatatggcaagtttaataataattgggaatgcttttggcttgtgttttgcaacgtttctttgaccctctcgattatgtcttcaagattgtggataagtgtagattaaagtctctttcatgacagggggagccttttgcactttcctctgtggtgttcttccctttagtgtgtcatttttttcttttaagttattctcttcagctgtcatctctgtactcaaaatatatttatggaaaatgttaaattttaattttaatt

SEQ ID NO: 57306 - protein, 205 aa, Glycine max
  peptide (1)..(205): Ceres Seq. ID no. 14314336
MKVSSFHSFGLKFLFCLWFAGGHINPAVTFGLFLARKVSLIRAIMYMVAQCLGAICGVGLVKAFQKSYFNKYGGGANSLAAGYSTGTGLGAEIIGTFVLVYTVFSATDPKRNARDSHVPVLAPLPIGFAVFMVHLATIPVTGTGINPARSLGAAVIYNQDKPWDDHWIFWVGPFIGAAIAAFYHQFILRAGAAKALGSFRSNPHN

SEQ ID NO: 57307 - protein, 161 aa, Glycine max
  peptide (1)..(161): Ceres Seq. ID no. 14314337
MYMVAQCLGAICGVGLVKAFQKSYFNKYGGGANSLAAGYSTGTGLGAEIIGTFVLVYTVFSATDPKRNARDSHVPVLAPLPIGFAVFMVHLATIPVTGTGINPARSLGAAVIYNQDKPWDDHWIFWVGPFIGAAIAAFYHQFILRAGAAKALGSFRSNPHN

SEQ ID NO: 57308 - protein, 159 aa, Glycine max
  peptide (1)..(159): Ceres Seq. ID no. 14314338
MVAQCLGAICGVGLVKAFQKSYFNKYGGGANSLAAGYSTGTGLGAEIIGTFVLVYTVFSATDPKRNARDSHVPVLAPLPIGFAVFMVHLATIPVTGTGINPARSLGAAVIYNQDKPWDDHWIFWVGPFIGAAIAAFYHQFILRAGAAKALGSFRSNPHN

SEQ ID NO: 57309 - DNA, 1322 bp, Glycine max
  misc_feature (1)..(1322): Ceres Seq. ID no. 15171813
ctttttaaagttgtctttccaaatttatccttctaccttctccgaagctccaccgtcttcgatcacaacgactccaagtcccgccctccctcctccaccatcctttttatttgttctggctaggttatgcgctatgcaacacagtgccatggaagcctccaaattcagtaacagtgatcaaaacgttcgatgccatcactgcgcaggacccctttccaaagacatggaaaccagtcactggaccgtttcgcctctcattagggatagcttctccatgattggttctgccgttggcggcgtggcaagtgcattttatggattcaatcttgttatgccaattgtccaaagaaggatcaaaggacccatgtggttgcattttctcattggtgcaccacctgtgatagtattgtcttcagcctgtgcaggcctggcaggtggggctgttcctgctgcagcacaacttgtttcctcttcttatcatgcagcctactcatctcctatctcacctccgccatcaaaggatgaaaatattcaaaggtcaagaaaatgatataatggacttgtgtctgaccatgcattcatgatgggtgtgctgagagttttgtttttcttgtgtaaatactgctcttgagattggtatgtttggaacttgaatgagaggaaagatagtagaaaagagaaaaaacacgtataatgatgtattttattttgtttttttttttttttttttcttgaaggttgaggccaaaaacgctttggaaaactatgcatacaacatgaggaacaccgtgaaggatgacaagattggtgagaaacttgacccggctgacaagaagaagattgaggatgcaattgagcaagcaatccagtggttagacagcaaccagcttgcagaagcagatgagtttgaggacaaaatgaaggaattggaaagcatctgcaatccaatcattgccaagatgtaccaaggtggtgctggtccagacgtgggtggtgctggtgcagcagaggatgagtatgctgctcctccttctggtggaagtggtgctggccccaagattgaggaagtggactaaatgtagttgctttcctccagatacctgttttaaaaacttattttactttatgcttttttaattggattttaatcgcatgatttttgttggatgggattcaaactatttttcccttctgatatgaacgttgctttaagcattatgttatttgcgttattttcattattagatggtatactcaattgttatgcactttacctgtaggaattattctgtcttgttaaatgacatatcttgtctttagtc

SEQ ID NO: 57310 - protein, 182 aa, Glycine max
  peptide (1)..(182): Ceres Seq. ID no. 15171814
FLKLSFQIYPSTFSEAPPSSITTTPSPALPPPPSFLFVLARLCAMQHSAMEASKFSNSDQNVRCHHCAGPLSKDMETSHWTVSPLIRDSFSMIGSAVGGVASAFYGFNLVMPIVQRRIKGPMWLHFLIGAPPVIVLSSACAGLAGGAVPAAAQLVSSSYHAAYSSPISPPPSKDENIQRSRK

SEQ ID NO: 57311 - protein, 140 aa, Glycine max
  peptide (1)..(140): Ceres Seq. ID no. 15171815
MRGKIVEKRKNTYNDVFYFVFFFFFFLKVEAKNALENYAYNMRNTVKDDKIGEKLDPADKKKIEDAIEQAIQWLDSNQLAEADEFEDKMKELESICNPIIAKMYQGGAGPDVGGAGAAEDEYAAPPSGGSGAGPKIEEVD

SEQ ID NO: 57312 - protein, 138 aa, Glycine max
  peptide (1)..(138): Ceres Seq. ID no. 15171816
MQHSAMEASKFSNSDQNVRCHHCAGPLSKDMETSHWTVSPLIRDSFSMIGSAVGGVASAFYGFNLVMPIVQRRIKGPMWLHFLIGAPPVIVLSSACAGLAGGAVPAAAQLVSSSYHAAYSSPISPPPSKDENIQRSRK

SEQ ID NO: 57313 - DNA, 1326 bp, Glycine max
  misc_feature (1)..(1326): Ceres Seq. ID no. 14304148
attatacatgcacagctagagttaagagaggagatgggagaaatagaaagagaggagatgtcgtcgacaaggtgggagaaggaggaggaagaagaagaagaagaggcccaaatggatatctggaagtacatatttgggtttgtggaactggcagtgataaaatgtgcgattgagcttggcatagctgaagccatagagaagcatggaagtcccatgacactatcggagatatcatcaagtttagggtgtgatacttcacatctgaagcgcatcatgaggttcctggtgcaaagaaagatattcaaaggcgacgggtgcagcaggggctattctcaatcagctctgtctcgtcgattgatgagaaacggcgaacacagcatggctagttttctcttgctggagagtagtcctgtaatgctggcaccttggcacagtctgagtgctcgcgtcatggccaatggcaacccctcatttgcaaaggctcacggtgaagacgtgtggcgctatgctgccgcaaatctcgatcacagcaacctcatcaacgaagcaatggcatgtgatgctaagcttgttatgcctatcatcattcaaagttgcagcgaggcatttcatggcctcaagtccttggtggatgtcggtgggggcaacggcaccgccatgcgcatcctggctaaggcttgcccttccattcgacccatcaattttgatcttcctcatgtcattgccctctgcgatggcgatggcgatggcgtccaacacgtgtcaggcgacatgtttctaagtgttcctaaagctgatgctgcttttcttatgtgggttttgcacgattggtcagacgaagagtgcatccaaatcttaaagaagtgtagggaagccatatcaaattcaaaggaaaacggaagggttattattgtggaggcggtgattgaaggagaaggagaaggagaaggagggaagcatgacggattgaaggatgtgggattgatgctggacatggtaatgatggcgcacactaacttcggcaaagagcgcacactcaaagagtgggaatatgtcatcaaaatggcaggatttagctcatacactgtcaaacccattcatgctgtgcagtccgtcattatggctttctactaaaatatatccaccaaaaattacccttgcaagtttgccactaaaatgcattaaataatttaataaaaaataaaacatattgtgtgatccatcttgcacgtgtaaaacagtgtatgttaatttgttgtaacaatatgaaagcatttcattttctgtatgtttgttcgagaggagaataaaacgtatctttaaatc

SEQ ID NO: 57314 - protein, 377 aa, Glycine max
  peptide (1)..(377): Ceres Seq. ID no. 14304149
IIHAQLELREEMGEIEREEMSSTRWEKEEEEEEEEAQMDIWKYIFGFVELAVIKCAIELGIAEAIEKHGSPMTLSEISSSLGCDTSHLKRIMRFLVQRKIFKGDGCSRGYSQSALSRRLMRNGEHSMASFLLLESSPVMLAPWHSLSARVMANGNPSFAKAHGEDVWRYAAANLDHSNLINEAMACDAKLVMPIIIQSCSEAFHGLKSLVDVGGGNGTAMRILAKACPSIRPINFDLPHVIALCDGDGDGVQHVSGDMFLSVPKADAAFLMWVLHDWSDEECIQILKKCREAISNSKENGRVIIVEAVIEGEGEGEGGKHDGLKDVGLMLDMVMMAHTNFGKERTLKEWEYVIKMAGFSSYTVKPIHAVQSVIMAFY

SEQ ID NO: 57315 - protein, 366 aa, Glycine max
  peptide (1)..(366): Ceres Seq. ID no. 14304150
MGEIEREEMSSTRWEKEEEEEEEEAQMDIWKYIFGFVELAVIKCAIELGIAEAIEKHGSPMTLSEISSSLGCDTSHLKRIMRFLVQRKIFKGDGCSRGYSQSALSRRLMRNGEHSMASFLLLESSPVMLAPWHSLSARVMANGNPSFAKAHGEDVWRYAAANLDHSNLINEAMACDAKLVMPIIIQSCSEAFHGLKSLVDVGGGNGTAMRILAKACPSIRPINFDLPHVIALCDGDGDGVQHVSGDMFLSVPKADAAFLMWVLHDWSDEECIQILKKCREAISNSKENGRVIIVEAVIEGEGEGEGGKHDGLKDVGLMLDMVMMAHTNFGKERTLKEWEYVIKMAGFSSYTVKPIHAVQSVIMAFY

SEQ ID NO: 57316 - protein, 358 aa, Glycine max
  peptide (1)..(358): Ceres Seq. ID no. 14304151
MSSTRWEKEEEEEEEEAQMDIWKYIFGFVELAVIKCAIELGIAEAIEKHGSPMTLSEISSSLGCDTSHLKRIMRFLVQRKIFKGDGCSRGYSQSALSRRLMRNGEHSMASFLLLESSPVMLAPWHSLSARVMANGNPSFAKAHGEDVWRYAAANLDHSNLINEAMACDAKLVMPIIIQSCSEAFHGLKSLVDVGGGNGTAMRILAKACPSIRPINFDLPHVIALCDGDGDGVQHVSGDMFLSVPKADAAFLMWVLHDWSDEECIQILKKCREAISNSKENGRVIIVEAVIEGEGEGEGGKHDGLKDVGLMLDMVMMAHTNFGKERTLKEWEYVIKMAGFSSYTVKPIHAVQSVIMAFY

SEQ ID NO: 57317 - DNA, 2036 bp, Glycine max
  misc_feature (1)..(2036): Ceres Seq. ID no. 15171610
agataatgagtttaccatcgtgagccactcagcctgtgtttggtgggagggattattcagcttccctttttccttccctccacccaaccagagttagacaccgaaaatggctttcaaactgaaatcactacctctcctttgctctcttcactccccttcccgccaaaaccctaattcaacactctcaaaccatcacttttctcgtcgcttcttcgcaccttccattcctcccaccctgtgcctatccggcgcagcctcagcgtccacctttcatcgccatcgcttcttcgtaaccgctcgaagccaagacgaagaccagatcactgaggctcttgaacaagaagaagagaaagacaacgaagaaatatcgaggcagggtgagaaaaaggaactcgcgaagcaaggcacatgggatcagataaaggaaattgtgatgttcacaggaccagcaactggactttggatatgtggaccacttatgagtctcatcgatactgcagttattggtcagagaagttcaattgagcttgctgctttaggtcctgctacagttgtttgtgattacatgtgctacgtgttcatgtttctatcaattgctacttccaatatggttgctactgcccttgccaaacaggacaaagaagaagtacaacatcacatatctgtattgctttttgttgggttatcttgtggcattgcgatgcttttgttcacaaggctatttggtgctgctataataactgctttcactggaccaaagaatgtacacgtagtacctgcagctagcaattatgtaaagattcgaggcttggcatcacctgctttacttgttggatgggtagctcagagtgcaagtcttggtatgaaagattccttgggacccttgaaagctttagctgctgctacagttataaatgtcgctggttgtgtacttttgtgcacctatttaggttatggaattgtaggggctgcgtgggctacaatggtttcacaagttgttgcttcttacatgatgattcaaaatctaaatatgaagggatataatgcacttgccttctccattccttcagggaaggaacttctgacgatatttgggcttgctgctcctgtttttataacattgatgtcaaaggtggctttttacgcactacttatatattttgctacatcaatgggtacacatacaatggctgctcatcaagtcatggtccaaacctatttaatgtgtaccgtatggggtgaacctctctcccaaacctctcaatcatttatgcctgaattgatatgtggagtaaatcggagtttgtcaaaggcccgaatgcttctaaggtctctcgtgataattggagctatacttggattgttgttagggattattggaacatcggttccttggttatttcccaatatttttacacctgatcggatggtcatccaggagatgcataaggtgctgattccatactttatagccctggctgtaacaccccctactgtcagccttgagggaacgttgctggctggacgggatctgaaatttataagtttgtcaatgagtggatgcttttgtgtgggttcactagtattatgggctttgagtagtagatacggtttgcttggctgctggttttccctcgcattatttcaatgggctcggttttcaatggccctccagcgccttctttctcccaaaggcatcttatactcggaagatacagaacagtataagctgctaaagctaaggactgcctagtttgatgaagtcatcacaccagttacaaggatagaagtatgttttaataaaaaaaaaaagaggatagtagtatgttggaccatctcagcttatgggttaagcgagttaagaccaggacaaccggctaaaaagtgagccatcgtttttataatttgtttagtccgcgagctgggttggctcataggttggagttcactttgatacttatatgtgtatgattgctataataattagcatgaaaaattaattcagattcttaattatattgggcgcaatttatatt

SEQ ID NO: 57318 - protein, 548 aa, Glycine max
  peptide (1)..(548): Ceres Seq. ID no. 15171611
MAFKLKSLPLLCSLHSPSRQNPNSTLSNHHFSRRFFAPSIPPTLCLSGAASASTFHRHRFFVTARSQDEDQITEALEQEEEKDNEEISRQGEKKELAKQGTWDQIKEIVMFTGPATGLWICGPLMSLIDTAVIGQRSSIELAALGPATVVCDYMCYVFMFLSIATSNMVATALAKQDKEEVQHHISVLLFVGLSCGIAMLLFTRLFGAAIITAFTGPKNVHVVPAASNYVKIRGLASPALLVGWVAQSASLGMKDSLGPLKALAAATVINVAGCVLLCTYLGYGIVGAAWATMVSQVVASYMMIQNLNMKGYNALAFSIPSGKELLTIFGLAAPVFITLMSKVAFYALLIYFATSMGTHTMAAHQVMVQTYLMCTVWGEPLSQTSQSFMPELICGVNRSLSKARMLLRSLVIIGAILGLLLGIIGTSVPWLFPNIFTPDRMVIQEMHKVLIPYFIALAVTPPTVSLEGTLLAGRDLKFISLSMSGCFCVGSLVLWALSSRYGLLGCWFSLALFQWARFSMALQRLLSPKGILYSEDTEQYKLLKLRTA

SEQ ID NO: 57319 - protein, 439 aa, Glycine max
  peptide (1)..(439): Ceres Seq. ID no. 15171612
MFTGPATGLWICGPLMSLIDTAVIGQRSSIELAALGPATVVCDYMCYVFMFLSIATSNMVATALAKQDKEEVQHHISVLLFVGLSCGIAMLLFTRLFGAAIITAFTGPKNVHVVPAASNYVKIRGLASPALLVGWVAQSASLGMKDSLGPLKALAAATVINVAGCVLLCTYLGYGIVGAAWATMVSQVVASYMMIQNLNMKGYNALAFSIPSGKELLTIFGLAAPVFITLMSKVAFYALLIYFATSMGTHTMAAHQVMVQTYLMCTVWGEPLSQTSQSFMPELICGVNRSLSKARMLLRSLVIIGAILGLLLGIIGTSVPWLFPNIFTPDRMVIQEMHKVLIPYFIALAVTPPTVSLEGTLLAGRDLKFISLSMSGCFCVGSLVLWALSSRYGLLGCWFSLALFQWARFSMALQRLLSPKGILYSEDTEQYKLLKLRTA

SEQ ID NO: 57320 - protein, 424 aa, Glycine max
  peptide (1)..(424): Ceres Seq. ID no. 15171613
MSLIDTAVIGQRSSIELAALGPATVVCDYMCYVFMFLSIATSNMVATALAKQDKEEVQHHISVLLFVGLSCGIAMLLFTRLFGAAIITAFTGPKNVHVVPAASNYVKIRGLASPALLVGWVAQSASLGMKDSLGPLKALAAATVINVAGCVLLCTYLGYGIVGAAWATMVSQVVASYMMIQNLNMKGYNALAFSIPSGKELLTIFGLAAPVFITLMSKVAFYALLIYFATSMGTHTMAAHQVMVQTYLMCTVWGEPLSQTSQSFMPELICGVNRSLSKARMLLRSLVIIGAILGLLLGIIGTSVPWLFPNIFTPDRMVIQEMHKVLIPYFIALAVTPPTVSLEGTLLAGRDLKFISLSMSGCFCVGSLVLWALSSRYGLLGCWFSLALFQWARFSMALQRLLSPKGILYSEDTEQYKLLKLRTA

SEQ ID NO: 57321 - DNA, 1276 bp, Glycine max
  misc_feature (1)..(1276): Ceres Seq. ID no. 14314220
atttgtatgtattcatgttcttaggacttatcttcattattgctaatttcagtttacaagggaaagagtatctgctcccaaggatagactctgttttgaaggtgctttatacctctcaaactttaaaacaataggttattccataataataacacaacacatgttctgaagggacacataatctcgagttccttgcaaggagctaattccacaagttggcctttgttaagcatctacaatctacactgattccttctgttttttcatttcaaaatggaatgtgctgtcttgggcgtgcattttatgaaaatcggtgcttaatcctatgatgcatgaatacatttttctgatttttttcttgaatgtgggttcctctcttctcaggatcattggtgcattattttttaattgaattacactggactttgagtggctgctttttctttgctcaccagtaagtgtttttatttttgttggaactaattatttctgtttttatcagaaatggcgatacatatgctggcgaatactttgcggataagatgcatggatttggggtatacagttttgctaatggccatcgttatgaaggatcctggcatgaaggcaaaaggcaaggtcttggaatgtatacatttagaaatggagaaacccagtctggtcactggcaaaatggagtccttgacattccaagcacacagagtaccacctatcctgtttcccctgttggggtcaatcattccagagtacttaatgcagtccaggaagcaagaagagcagctgagaaagcctatgatgtggccaaggtagatgagagggttaatagagcagtagctgccgctaacagagcagccaatgcagctagagtagctgctgtcaaggccgtgcaaaaccaaatgcttcataatgttaacagcacgagcatcccaattcccattgtgtgaggctgtcagctgcaaacttttgatagtagagatgcacgagattgtcagaagaggtcggtagtttaaactgctttgtttacaccgtcatcatcactgctggctgaatgaaatcaagcagatttattatccatctgccacgagtcttgtatagagggaggaagggtgatggcttccacatggtaaaatactacatatacatactatattttttccctttgcctacattttgtaaatttacttagatgtaaatgctggtgtgcgggtgaaacctcaacccagctactgttgtaagatcgcttggtaaaataaggagagaaacaaacatctagcct

SEQ ID NO: 57322 - protein, 133 aa, Glycine max
  peptide (1)..(133): Ceres Seq. ID no. 14314221
MHGFGVYSFANGHRYEGSWHEGKRQGLGMYTFRNGETQSGHWQNGVLDIPSTQSTTYPVSPVGVNHSRVLNAVQEARRAAEKAYDVAKVDERVNRAVAAANRAANAARVAAVKAVQNQMLHNVNSTSIPIPIV

SEQ ID NO: 57323 - protein, 105 aa, Glycine max
  peptide (1)..(105): Ceres Seq. ID no. 14314222
MYTFRNGETQSGHWQNGVLDIPSTQSTTYPVSPVGVNHSRVLNAVQEARRAAEKAYDVAKVDERVNRAVAAANRAANAARVAAVKAVQNQMLHNVNSTSIPIPIV

SEQ ID NO: 57324 - protein, 101 aa, Glycine max
  peptide (1)..(101): Ceres Seq. ID no. 14314223
MAIHMLANTLRIRCMDLGYTVLLMAIVMKDPGMKAKGKVLECIHLEMEKPSLVTGKMESLTFQAHRVPPILFPLLGSIIPEYLMQSRKQEEQLRKPMMWPR

SEQ ID NO: 57325 - DNA, 1631 bp, Glycine max
  misc_feature (1)..(1631): Ceres Seq. ID no. 15172560
atttttcactggaaagtttcaattgctggggggcttctgcttctggttttgttagttccgagttgccttttgagggaactcaagtagtcaagttcaagcttcctactacttctttgtctcacgttttggggttgccagttactgttgatatcataatggattccccacaatctgttgtgtcacccttcaggagctcagtgttgggtgagagtgagaagcacaagtctgatgttttcccaggaaactctagtcctttttccaaggacattgaagtgaatgggaaggaagttgtcatgtcaaatgtagaggagtatcttggagtgcttgatgtttacatacatcaggccagggacattcaaaacatttgcatataccacaagcaagatgtttatgctaagatttgtctgaccagtaatcctgagacaactgtgtctaccaaaaccatcaatggaggaggaaggaaccctgtgttcaacgagaatcttcgtattgatgttaggactgttgatgcttctctcaagtgtgagatatggatgcttagcagggtgaagaactatcttgaagaccagttgcttggttttgctttggtacccttgtctgaagtactagtccagaatgggaaacttgagaaagagttctctctttcttcaactgatctattccattctccttcgggttttgttcagttgtcgctttcttacactggtgcttcacctgatgttatgacaatttctgcaatgccgaacaaggtggccacagatgccgcagtgcaggactcagaaacgtccgagtcactggccagggatttagacaaaatcgagttcccggatccgaagattgtcaatgaagaccacttgatggtttcagtatacttcggtattccgtgtgaggagactcaatgttccgatagcttggctacttctgatgctgaaaaccagagttccgaagccggtgttcggcttgtggaaagcttctcagcatgcagtgttgagtctgttcagccaactaaggttgattcccctcctagcagtgtgtcaacaaatggggtttcttccccttcagtgccagcaaactcagaatcatctgatgctgctgcttccaagtctcccattcaggagcaagtttcaggcaccaaagaggacaaaaatgtggataccaaagatagtgagagtgattcctcaagtggggttcctagtgaatcattccctaagcctgttgtgactgtgaacattgaacccgagccaaaggtcgtgcagcaggatatagtagacatgtacatgaaaagcatgcagcaattcactgagtcactagcaaaaatgaagctccctatggacttggaaagtgaaccaactagttcaggaaattcaaccactgagcagaaactacagccatcaaagagcaataattctcgtgtgttttatggcagcagagctttcttctgatcttttgcttcccttgttcaagggaatacgagcagtcactgtagatttttagaagaaaactgattttagtagtgaagtgaaataatcaatgtactatcctgtgtggtttccccttctgtatttcatcacatgttggttgtagcttacagggaatataactttgtactctcacaagcttgttgctatctc

SEQ ID NO: 57326 - protein, 479 aa, Glycine max
  peptide (1)..(479): Ceres Seq. ID no. 15172561
FSLESFNCWGASASGFVSSELPFEGTQVVKFKLPTTSLSHVLGLPVTVDIIMDSPQSVVSPFRSSVLGESEKHKSDVFPGNSSPFSKDIEVNGKEVVMSNVEEYLGVLDVYIHQARDIQNICIYHKQDVYAKICLTSNPETTVSTKTINGGGRNPVFNENLRIDVRTVDASLKCEIWMLSRVKNYLEDQLLGFALVPLSEVLVQNGKLEKEFSLSSTDLFHSPSGFVQLSLSYTGASPDVMTISAMPNKVATDAAVQDSETSESLARDLDKIEFPDPKIVNEDHLMVSVYFGIPCEETQCSDSLATSDAENQSSEAGVRLVESFSACSVESVQPTKVDSPPSSVSTNGVSSPSVPANSESSDAAASKSPIQEQVSGTKEDKNVDTKDSESDSSSGVPSESFPKPVVTVNIEPEPKVVQQDIVDMYMKSMQQFTESLAKMKLPMDLESEPTSSGNSTTEQKLQPSKSNNSRVFYGSRAFF

SEQ ID NO: 57327 - protein, 428 aa, Glycine max
  peptide (1)..(428): Ceres Seq. ID no. 15172562
MDSPQSVVSPFRSSVLGESEKHKSDVFPGNSSPFSKDIEVNGKEVVMSNVEEYLGVLDVYIHQARDIQNICIYHKQDVYAKICLTSNPETTVSTKTINGGGRNPVFNENLRIDVRTVDASLKCEIWMLSRVKNYLEDQLLGFALVPLSEVLVQNGKLEKEFSLSSTDLFHSPSGFVQLSLSYTGASPDVMTISAMPNKVATDAAVQDSETSESLARDLDKIEFPDPKIVNEDHLMVSVYFGIPCEETQCSDSLATSDAENQSSEAGVRLVESFSACSVESVQPTKVDSPPSSVSTNGVSSPSVPANSESSDAAASKSPIQEQVSGTKEDKNVDTKDSESDSSSGVPSESFPKPVVTVNIEPEPKVVQQDIVDMYMKSMQQFTESLAKMKLPMDLESEPTSSGNSTTEQKLQPSKSNNSRVFYGSRAFF

SEQ ID NO: 57328 - protein, 382 aa, Glycine max
  peptide (1)..(382): Ceres Seq. ID no. 15172563
MSNVEEYLGVLDVYIHQARDIQNICIYHKQDVYAKICLTSNPETTVSTKTINGGGRNPVFNENLRIDVRTVDASLKCEIWMLSRVKNYLEDQLLGFALVPLSEVLVQNGKLEKEFSLSSTDLFHSPSGFVQLSLSYTGASPDVMTISAMPNKVATDAAVQDSETSESLARDLDKIEFPDPKIVNEDHLMVSVYFGIPCEETQCSDSLATSDAENQSSEAGVRLVESFSACSVESVQPTKVDSPPSSVSTNGVSSPSVPANSESSDAAASKSPIQEQVSGTKEDKNVDTKDSESDSSSGVPSESFPKPVVTVNIEPEPKVVQQDIVDMYMKSMQQFTESLAKMKLPMDLESEPTSSGNSTTEQKLQPSKSNNSRVFYGSRAFF

SEQ ID NO: 57329 - DNA, 1577 bp, Glycine max
  misc_feature (1)..(1577): Ceres Seq. ID no. 15171809
atccaagttccaacatcaactaaactccttctatgttctaactctctctcaccctccatattcctcaacttcaaattctttcttttctataccattttctctcaccaaagtcagctttacctgattcctttgtttagtttgatttattgtgatttcattggttcctttcttactttaaggaacaagtgtggctataatataactctggtgtacataatcacatagatgaggtggtgtggagttggtttattttcatttgttctccttttttctaacttcataaatggtgataatgattcaaaatgtaagtagcttagggaaataaaagtttgtggaaactgggtattcagcactatttttaaaaaataaaactttagtctaatttttggaatctgcattggtttccataaggattaagtgggaagcatgaagaacttatactggttcaaagagatttctaacaacgtgagatcagggagaaggctttcactaggggaatacaagagagcagtgtcatggtcaaagtatttggtctcttctggggcggccataaagggagaaggagaagaagaatggagtgctgatctgtctcagttgttcatagggtcaaaatttgcctctggcaggcatagcaggatctacagaggcatctacaagcacatggatgttgcaattaagctggtgagtcaacctgaggaggatgaggacttggctgttttgcttgagaagcaattcacttctgaggttgctttgctctttcgattgcgccatccaaatatcattacttttgttgcagcttgcaagaaacctcctgtgttctgcataattactgaatatttggctgggggttccttgagaaaatacttggttcagcaagggccacattcagttactcacaaagttgttctgaaattagctttagacatagcacggggaatgcaatatcttcattctcagggtatacttcacagggatctcaaatcagaaaacctgctgttgggggaagatttgtgcgtaaaagtagcagattttgggatctcttgcttggaatctcagacaggcagtgcaaaaggattcactggaacataccgttggatggcacctgaaatgatcaaagaaaagcgtcacaccaagaaagtagatgtctatagtttcgccatagttctatgggagctattaacaggattgacgccatttgacaacatgacaccagagcaagcagcatatgctgtgactcacaagaatgaaaggcctccgttgccatgtgactgtccaaaggcatttagccatctcatcaacagatgctggtcaagcaacccagataaaaggccacattttaatgagatagtcacaattttggagagctacattgaagcacttgagcaggatccagaatttttctctacttacaaaccacgtcctaataatataattctcagatgcttatcaaaatgtagtaatatatttgcttcttgcaaagcttagcattctctttccgataatgtaacatgaattgtattaaatcaatcccaagaaccaaaaatatgtttaattaataactatattaatcctcttcc

SEQ ID NO: 57330 - protein, 352 aa, Glycine max
  peptide (1)..(352): Ceres Seq. ID no. 15171810
MKNLYWFKEISNNVRSGRRLSLGEYKRAVSWSKYLVSSGAAIKGEGEEEWSADLSQLFIGSKFASGRHSRIYRGIYKHMDVAIKLVSQPEEDEDLAVLLEKQFTSEVALLFRLRHPNIITFVAACKKPPVFCIITEYLAGGSLRKYLVQQGPHSVTHKVVLKLALDIARGMQYLHSQGILHRDLKSENLLLGEDLCVKVADFGISCLESQTGSAKGFTGTYRWMAPEMIKEKRHTKKVDVYSFAIVLWELLTGLTPFDNMTPEQAAYAVTHKNERPPLPCDCPKAFSHLINRCWSSNPDKRPHFNEIVTILESYIEALEQDPEFFSTYKPRPNNIILRCLSKCSNIFASCKA

SEQ ID NO: 57331 - protein, 274 aa, Glycine max
  peptide (1)..(274): Ceres Seq. ID no. 15171811
MDVAIKLVSQPEEDEDLAVLLEKQFTSEVALLFRLRHPNIITFVAACKKPPVFCIITEYLAGGSLRKYLVQQGPHSVTHKVVLKLALDIARGMQYLHSQGILHRDLKSENLLLGEDLCVKVADFGISCLESQTGSAKGFTGTYRWMAPEMIKEKRHTKKVDVYSFAIVLWELLTGLTPFDNMTPEQAAYAVTHKNERPPLPCDCPKAFSHLINRCWSSNPDKRPHFNEIVTILESYIEALEQDPEFFSTYKPRPNNIILRCLSKCSNIFASCKA

SEQ ID NO: 57332 - protein, 182 aa, Glycine max
  peptide (1)..(182): Ceres Seq. ID no. 15171812
MQYLHSQGILHRDLKSENLLLGEDLCVKVADFGISCLESQTGSAKGFTGTYRWMAPEMIKEKRHTKKVDVYSFAIVLWELLTGLTPFDNMTPEQAAYAVTHKNERPPLPCDCPKAFSHLINRCWSSNPDKRPHFNEIVTILESYIEALEQDPEFFSTYKPRPNNIILRCLSKCSNIFASCKA

SEQ ID NO: 57333 - DNA, 1223 bp, Glycine max
  misc_feature (1)..(1223): Ceres Seq. ID no. 15172539
tagctctttgttctctgttctcgcgatttcggaagggtcgtgtttccctgcttcagtttcagcttcggcttcgagaagcgtcgattgggtccttaagctgttccttctctgtttctgacaaactgtataactcctatcaaacatgagcggtcgcttttctcgcacaatttatgtcggcaacctgccctctgatataagagagtcagaaattgaagatctattctacaagtatggccgtataatggatattgaattgaaggttcctccccgccctccatgttattgctttgttgagtttgataatgctcgagatgccgaagatgcaattcggggtcgagatggatacaactttgatggttgtcggttaagagtggagcttgctcatggtggtagagggccatcatcaagtgatcgacgtggatatggaggaggaggtggtaatggtggagcaggcgggggtcgttttggcatctcacgccattctgaatttcgagttattgttcgtggactcccatcttctgcatcttggcaagatttgaaggatcatatgcgaaaagctggggacgtgtgttttgctgaggtttcccgtgatagtgaagggacttttggcattgttgattacactaattatgatgacatgaagtatgccattcggaaattggatgacactgagtttagaaatccctgggcgagagcttatattcgggtgaggaagtatgagagtagtcgttctaggagccgcagcaggagccccagcaggagccccagcaggagcagaagtccaaaaagagttagaagtagatctctggagcgttctgtgtctaggtcacgatctagatctcaatcagcatcaccaatcaaatcttctaggccaagatcacgatcccgatcacgatcacgatctggatctggatctcctcatcaggtcctgtcaggtagtggttgaatttctgacaaagctggtggttctctggtgatattgttccattctggtgggcagtatcggaattatattggagttggactaaattgttttaagggaaaattattgatgtgcctaggctgtttggtgattgtcttatttcttttaaattaaaatgttggacattggccttgccctttgtaccttagcaaacacaagaatatctttagtcctcgcaaactgtgaatccaatttgaatggttttaaacagatttataaaaaaaaaatctacatatatcgc

SEQ ID NO: 57334 - protein, 267 aa, Glycine max
  peptide (1)..(267): Ceres Seq. ID no. 15172540
MSGRFSRTIYVGNLPSDIRESEIEDLFYKYGRIMDIELKVPPRPPCYCFVEFDNARDAEDAIRGRDGYNFDGCRLRVELAHGGRGPSSSDRRGYGGGGGNGGAGGGRFGISRHSEFRVIVRGLPSSASWQDLKDHMRKAGDVCFAEVSRDSEGTFGIVDYTNYDDMKYAIRKLDDTEFRNPWARAYIRVRKYESSRSRSRSRSPSRSPSRSRSPKRVRSRSLERSVSRSRSRSQSASPIKSSRPRSRSRSRSRSGSGSPHQVLSGSG

SEQ ID NO: 57335 - protein, 234 aa, Glycine max
  peptide (1)..(234): Ceres Seq. ID no. 15172541
MDIELKVPPRPPCYCFVEFDNARDAEDAIRGRDGYNFDGCRLRVELAHGGRGPSSSDRRGYGGGGGNGGAGGGRFGISRHSEFRVIVRGLPSSASWQDLKDHMRKAGDVCFAEVSRDSEGTFGIVDYTNYDDMKYAIRKLDDTEFRNPWARAYIRVRKYESSRSRSRSRSPSRSPSRSRSPKRVRSRSLERSVSRSRSRSQSASPIKSSRPRSRSRSRSRSGSGSPHQVLSGSG

SEQ ID NO: 57336 - DNA, 1526 bp, Glycine max
  misc_feature (1)..(1526): Ceres Seq. ID no. 15177368
atatatatgtactcctttgtttagtaaccgaccgtgtgcgagagagagagagagagagagagacggctatattcgcgcctcggtctctttatttctccgccaacgacaccaccgcatctttctctctttccgttcccttctctctccgatctgcattttgcattctcttccgatgccgatattctccaattcctcgccctgctgcaccgccgccgccgccgcagtggttaactcctccaaccggaagaccagattcgtctctccttcttggaggaattgcaaggtcacatctccaattttacggctctccgagaatgacaaattcaatgtgtctcggttagctcctagccactctaggcggtcagttaaggaccggaacatatcaatggcattagtgggcgaaactgttggagttggacaaaagggacaggtggccggctcctctagcatcttggcatatgatttgattcagggggcacttgtaagatggagttctgttatggacaggtctttacctgagccaccaacggctgtttttctgcatggaatcctaggttgcaggaaaaactggggaacttttgctaggagattggctcaagagtttcctacatggcagtttcttttagtagacctgcgatgtcatggcgattcagcatcaatccagaagaaagatccccatactgttgcatctgctgctatggatgttttaaaactggttcgagatctgagaataacgccccgtgtgttagttggtcatagttttggggggaaagttgttttgagcatggtagaccaagctgcaaagcctcttgctcggccagtgagagcttggattctggatgcaacccctggaaaagttcgagcaggtggagatggagaagatcatccagaagaactcatatcctttctaagtacactgccaaaggaggtcccttcaaagcggcatgttgtcagagctcttattcaacatggattttccaatgatgtggcgcagtgggttgtgactaacctgcgaccttctggctctcctggttcacaatcatcaagcttctcatgggtgtttgacctaagggggattgcagaaatgtatcaatcctatgaagaaacaaatttgtggaaaattgttgaagatgtacctcgtggggtgcatgtgaactttttgaaagcagaaagaagcttacatagatgggctcttgaagaccttcagcggatccatgcagctgaagagcttgctgttgaggaaggagggggagttgaaatgcatgtccttgaagatgctggccactgggtgcatactgataacccggatggactctttaggatactgtcatcatctttccaattccagggaggcaaaacctgagtttacaaatgtgctctcttgtaatttctatttatacgtggattgccttaacagtttgatgccattccttcttcccattttttgtctagttatcccctttgtatatgctattattttttttaatcttcttgtacatcaccgtaatatatattttttaatcgcg

SEQ ID NO: 57337 - protein, 453 aa, Glycine max
  peptide (1)..(453): Ceres Seq. ID no. 15177369
YICTPLFSNRPCARERERERDGYIRASVSLFLRQRHHRIFLSFRSLLSPICILHSLPMPIFSNSSPCCTAAAAAVVNSSNRKTRFVSPSWRNCKVTSPILRLSENDKFNVSRLAPSHSRRSVKDRNISMALVGETVGVGQKGQVAGSSSILAYDLIQGALVRWSSVMDRSLPEPPTAVFLHGILGCRKNWGTFARRLAQEFPTWQFLLVDLRCHGDSASIQKKDPHTVASAAMDVLKLVRDLRITPRVLVGHSFGGKVVLSMVDQAAKPLARPVRAWILDATPGKVRAGGDGEDHPEELISFLSTLPKEVPSKRHVVRALIQHGFSNDVAQWVVTNLRPSGSPGSQSSSFSWVFDLRGIAEMYQSYEETNLWKIVEDVPRGVHVNFLKAERSLHRWALEDLQRIHAAEELAVEEGGGVEMHVLEDAGHWVHTDNPDGLFRILSSSFQFQGGKT

SEQ ID NO: 57338 - protein, 396 aa, Glycine max
  peptide (1)..(396): Ceres Seq. ID no. 15177370
MPIFSNSSPCCTAAAAAVVNSSNRKTRFVSPSWRNCKVTSPILRLSENDKFNVSRLAPSHSRRSVKDRNISMALVGETVGVGQKGQVAGSSSILAYDLIQGALVRWSSVMDRSLPEPPTAVFLHGILGCRKNWGTFARRLAQEFPTWQFLLVDLRCHGDSASIQKKDPHTVASAAMDVLKLVRDLRITPRVLVGHSFGGKVVLSMVDQAAKPLARPVRAWILDATPGKVRAGGDGEDHPEELISFLSTLPKEVPSKRHVVRALIQHGFSNDVAQWVVTNLRPSGSPGSQSSSFSWVFDLRGIAEMYQSYEETNLWKIVEDVPRGVHVNFLKAERSLHRWALEDLQRIHAAEELAVEEGGGVEMHVLEDAGHWVHTDNPDGLFRILSSSFQFQGGKT

SEQ ID NO: 57339 - protein, 325 aa, Glycine max
  peptide (1)..(325): Ceres Seq. ID no. 15177371
MALVGETVGVGQKGQVAGSSSILAYDLIQGALVRWSSVMDRSLPEPPTAVFLHGILGCRKNWGTFARRLAQEFPTWQFLLVDLRCHGDSASIQKKDPHTVASAAMDVLKLVRDLRITPRVLVGHSFGGKVVLSMVDQAAKPLARPVRAWILDATPGKVRAGGDGEDHPEELISFLSTLPKEVPSKRHVVRALIQHGFSNDVAQWVVTNLRPSGSPGSQSSSFSWVFDLRGIAEMYQSYEETNLWKIVEDVPRGVHVNFLKAERSLHRWALEDLQRIHAAEELAVEEGGGVEMHVLEDAGHWVHTDNPDGLFRILSSSFQFQGGKT

SEQ ID NO: 57340 - DNA, 585 bp, Glycine max
  misc_feature (1)..(585): Ceres Seq. ID no. 13594248
caccaccacggtgcaagttgaagacgaaccacaatctgggaaaaggcaagacaaaaaaagtgcgcagggttaaggttgtggtttatagtttagtttatctatggctagcggcaccacaagaatgctagtgaaggagatgttgcaactctcttcttccacacttcacttctcttcttcggcgcttcgcggcctctctcctcctctgcccttctcaattcaattgcgacgctcgcgggggcgccctgcaattcgatgtgcttcctcttcctcagactcagatgcttccaacaaagtctcgtctcgtctgtcgcaggttcagcatcttcttcagcaggccgaacaccgcgctctctccgccgaccagggcccacctcctaaaatcaccttagatcatgttacggtgagctttgccagaagtggaggacctgggggtcagaatgtcaataaagtgaacaccaaggtggacatgcgcttcaatgttaaaaatgcatattggttgagtgacaggatcagagacaagattttgcaaacggagaaaaaccgtattaactgtttaaacacaataaagttggaacgggagggggg

SEQ ID NO: 57341 - protein, 161 aa, Glycine max
  peptide (1)..(161): Ceres Seq. ID no. 13594249
MASGTTRMLVKEMLQLSSSTLHFSSSALRGLSPPLPFSIQLRRSRGRPAIRCASSSSDSDASNKVSSRLSQVQHLLQQAEHRALSADQGPPPKITLDHVTVSFARSGGPGGQNVNKVNTKVDMRFNVKNAYWLSDRIRDKILQTEKNRINCLNTIKLEREG

SEQ ID NO: 57342 - protein, 154 aa, Glycine max
  peptide (1)..(154): Ceres Seq. ID no. 13594250
MLVKEMLQLSSSTLHFSSSALRGLSPPLPFSIQLRRSRGRPAIRCASSSSDSDASNKVSSRLSQVQHLLQQAEHRALSADQGPPPKITLDHVTVSFARSGGPGGQNVNKVNTKVDMRFNVKNAYWLSDRIRDKILQTEKNRINCLNTIKLEREG

SEQ ID NO: 57343 - protein, 149 aa, Glycine max
  peptide (1)..(149): Ceres Seq. ID no. 13594251
MLQLSSSTLHFSSSALRGLSPPLPFSIQLRRSRGRPAIRCASSSSDSDASNKVSSRLSQVQHLLQQAEHRALSADQGPPPKITLDHVTVSFARSGGPGGQNVNKVNTKVDMRFNVKNAYWLSDRIRDKILQTEKNRINCLNTIKLEREG

SEQ ID NO: 57344 - DNA, 1206 bp, Glycine max
  misc_feature (1)..(1206): Ceres Seq. ID no. 15175898
atatactttttatgttactgttaatttatatttgacttaaatacatgttgattgtaaatccccagacattgtcttcaattcctaccaataaaaaaaaaatagatgttgatatgatttttggaattcaatattatcttactgtgtggttacgcatgtagaccatggcatggatactagatgagtattccaaattccacggttactctcctgcagtagtgactggaaaacctatagatcttggtggatctctcggtagagacgcggctacaggacgaggagtcctctttgcaacagaggctttgcttaatgagtatgggaagagtgtatctggacaacggtttgtcatacagggttttggaaatgtagggtcatgggctgcccaattaattagtaataaaggtggaaaagttgttgctgtgagtgacataactggagccataaagaacagcaatggtcttgacatcccaagcctacttgagcattccaaagtgcacaggggagtaaaaggattcaatggtagtgatccaatagaccctaactcaatattggttgaagattgtgatgttctagtcccagcagctcttgggggtgtcatcaatagggaaaatgcaaatgaaatcaaggccaaatttattgtggaagcagctaatcacccaactgacccagaagctgatgagattttgaagaagaaaggggttgtgatcctcccagacatatttgcaaattcaggaggcgttacagttagctactttgagtgggttcagaacatccaaggtttcatgtgggatgaggagaaagtgaacaatgagctaaagacctacatgaccaaaggtttcaaagatgtgaaggaaatgtgcaaaacccatgaatgtgatcttcgtatgggagccttcaccctggcagttaaccgtgtcgcacgtgctactgtccttaggggctgggaagcttgacatccattgcttctgctttcaataaattaattacagagctcccactctcagcaacacttcacaaagtttttgttgctttcaactaatgtgttgggtgaatcgtattttcacgccaaattttctttcaataaattagtatagtatataaatctttttgtaactacatgtgtggttctatgccacttcttgtgacagccacgctttttaatataatgtcactttgctttgaaaaaaaaaaatttgatttatcaaaggg

SEQ ID NO: 57345 - protein, 262 aa, Glycine max
  peptide (1)..(262): Ceres Seq. ID no. 15175899
MAWILDEYSKFHGYSPAVVTGKPIDLGGSLGRDAATGRGVLFATEALLNEYGKSVSGQRFVIQGFGNVGSWAAQLISNKGGKVVAVSDITGAIKNSNGLDIPSLLEHSKVHRGVKGFNGSDPIDPNSILVEDCDVLVPAALGGVINRENANEIKAKFIVEAANHPTDPEADEILKKKGVVILPDIFANSGGVTVSYFEWVQNIQGFMWDEEKVNNELKTYMTKGFKDVKEMCKTHECDLRMGAFTLAVNRVARATVLRGWEA

SEQ ID NO: 57346 - DNA, 1526 bp, Glycine max
  misc_feature (1)..(1526): Ceres Seq. ID no. 14314382
aaaaaacgcacgaaagattccatccatttgcgacttgggagagagtaccattgctccactccctctccctcttcgccggcggccaccatgtctttgtcggagttccgaccactcgacgacaagttcctcatcgaatacataaagtccgtccccgccctctcctccaaactcgccgacaacttcgacgacttatctgtcaaagaagtcggagatggcaaccttaacttcgtcttcattgtttccaaccccgcaggttcttttgtcatcaaacaggctctgccatacgttcgttgcataggggaatcgtggcctatgacgaaggagagagcgtattttgagtcactggcactgaaagaagagggtcgtttgagccccgaacatgttcctgaagtatatcactttgaccgtaccatgtctttgattggtatgcgttacttggagcctccacatataatcctcagaaaagggttgattgctgggattgagtaccctcttttggctcaacacatggctgatttcatggcaaagacactcttcttcacgtctctgcttttccgttccacatctgaccacaaacgagacgttgccgaattttgtgggaatgtggagttatgcaggctcactgagcaggttgttttctccgacccttataaagtttctcaatataatcgttggacttccccctatctcgatcgtgatgctgaggcagttcgggaagacaatccgctgaagcttgaagttgctgagctgaaatctaagttcattgagagggcccaggcactaatacatggagatctacacactggttctgtgatggttacccgtgaatcaactcaagttattgatccagaatttgcattttatggaccaatgggttttgatattggagcattcttgggaaacttgattttggctttctttgctcaagatgggcatgctgatcaagcaaatgatcgaaaagcctataaggagtggattcttaagacaatcgaagacagttggaatcttttctatcaaaaattcacttcactttgggatgagcacaaaaatggtgctggtgaagcatatcttccaacaatctataacaatcctgaggttcaactgcttgtacagaagaaatacatgacagatttgtttcacgacagtcttggatttggtgctgctaaaattattaggagaattgttggtgtggcacatgttgaggatttcgaatccattactgatgctgctaaacgggcaagttgtgaacggcgggcacttgatttagctaagatgcttctcaaagaaagaagaaaatttgaaggcattgctgaaattatttcagcaattcggcaatactagccataacaaggttttgctatatcaatagttcaatacctccgtaatgtatcgtgttccccaacattttaactgagttgctctagtaacagttttgatcactttctaattatattatccatactgataacatttctcttgtggaccatcttaaaatttatatccaccgtgatttttgaatgattttt

SEQ ID NO: 57347 - protein, 446 aa, Glycine max
  peptide (1)..(446): Ceres Seq. ID no. 14314383
KKRTKDSIHLRLGREYHCSTPSPSSPAATMSLSEFRPLDDKFLIEYIKSVPALSSKLADNFDDLSVKEVGDGNLNFVFIVSNPAGSFVIKQALPYVRCIGESWPMTKERAYFESLALKEEGRLSPEHVPEVYHFDRTMSLIGMRYLEPPHIILRKGLIAGIEYPLLAQHMADFMAKTLFFTSLLFRSTSDHKRDVAEFCGNVELCRLTEQVVFSDPYKVSQYNRWTSPYLDRDAEAVREDNPLKLEVAELKSKFIERAQALIHGDLHTGSVMVTRESTQVIDPEFAFYGPMGFDIGAFLGNLILAFFAQDGHADQANDRKAYKEWILKTIEDSWNLFYQKFTSLWDEHKNGAGEAYLPTIYNNPEVQLLVQKKYMTDLFHDSLGFGAAKIIRRIVGVAHVEDFESITDAAKRASCERRALDLAKMLLKERRKFEGIAEIISAIRQY

SEQ ID NO: 57348 - protein, 417 aa, Glycine max
  peptide (1)..(417): Ceres Seq. ID no. 14314384
MSLSEFRPLDDKFLIEYIKSVPALSSKLADNFDDLSVKEVGDGNLNFVFIVSNPAGSFVIKQALPYVRCIGESWPMTKERAYFESLALKEEGRLSPEHVPEVYHFDRTMSLIGMRYLEPPHIILRKGLIAGIEYPLLAQHMADFMAKTLFFTSLLFRSTSDHKRDVAEFCGNVELCRLTEQVVFSDPYKVSQYNRWTSPYLDRDAEAVREDNPLKLEVAELKSKFIERAQALIHGDLHTGSVMVTRESTQVIDPEFAFYGPMGFDIGAFLGNLILAFFAQDGHADQANDRKAYKEWILKTIEDSWNLFYQKFTSLWDEHKNGAGEAYLPTIYNNPEVQLLVQKKYMTDLFHDSLGFGAAKIIRRIVGVAHVEDFESITDAAKRASCERRALDLAKMLLKERRKFEGIAEIISAIRQY

SEQ ID NO: 57349 - protein, 342 aa, Glycine max
  peptide (1)..(342): Ceres Seq. ID no. 14314385
MTKERAYFESLALKEEGRLSPEHVPEVYHFDRTMSLIGMRYLEPPHIILRKGLIAGIEYPLLAQHMADFMAKTLFFTSLLFRSTSDHKRDVAEFCGNVELCRLTEQVVFSDPYKVSQYNRWTSPYLDRDAEAVREDNPLKLEVAELKSKFIERAQALIHGDLHTGSVMVTRESTQVIDPEFAFYGPMGFDIGAFLGNLILAFFAQDGHADQANDRKAYKEWILKTIEDSWNLFYQKFTSLWDEHKNGAGEAYLPTIYNNPEVQLLVQKKYMTDLFHDSLGFGAAKIIRRIVGVAHVEDFESITDAAKRASCERRALDLAKMLLKERRKFEGIAEIISAIRQY

SEQ ID NO: 57350 - DNA, 970 bp, Glycine max
  misc_feature (1)..(970): Ceres Seq. ID no. 12608154
agaacatcctaatcgaaaaaattctcaaagcaatgcaacaaaaaatgttgaactccacacccacctgcttccaccgcaccaccactctcactccctctccttctcttctatccactcctcttccttcttgttcttcttcttccacccatcatcattcatatctacacccccgccactcctccttccacactcaacctcttcgcttaagcaacctccgctaccacacccatttgccatcaacccccaagacactcaaagtgaactgttccaccagcgagcctctgaaggtcatgatatcaggtgcacctgcatcgggcaaaggcacgcaatgtgaattgattgtccaaaagtttggattggtgcatatatcaacaggggatttgctaagagcagaggtagcggctgggactgaaattggaaataaagcaaaggagttcatgaacacgggtcaattggttcctgatgaaattgtgacagcgatggtggcagcacgattggctcgcgaagatgttaggcataaagggtggcttcttgatgggtaccctcggagttttggccaagcccagagtctggagaaaatgcagatacggcctgatgtgtatatcgtattagatgttcctgatgaaattctgatcgacagatgtgttggtagaaggctagacccagtgacagggaagatatatcatctaaagttttttccaccggatacagaagaaattaaagcaaggctgataactcggcctgatgacactgaggagaagttatttgaaaggatggactcatcatgaaatgatctcctaaagtcttgtctccgtggatgcgcagtagattttgttgcatgacaagtttgatcacaaaattaatgagaatttaaagatcttagttgtcaaagttttagactgtattttcagcagaatcattaaagacgctttatcagttagcataatgcattattaggatggtgtcattt

SEQ ID NO: 57351 - protein, 261 aa, Glycine max
  peptide (1)..(261): Ceres Seq. ID no. 12608155
NILIEKILKAMQQKMLNSTPTCFHRTTTLTPSPSLLSTPLPSCSSSSTHHHSYLHPRHSSFHTQPLRLSNLRYHTHLPSTPKTLKVNCSTSEPLKVMISGAPASGKGTQCELIVQKFGLVHISTGDLLRAEVAAGTEIGNKAKEFMNTGQLVPDEIVTAMVAARLAREDVRHKGWLLDGYPRSFGQAQSLEKMQIRPDVYIVLDVPDEILIDRCVGRRLDPVTGKIYHLKFFPPDTEEIKARLITRPDDTEEKLFERMDSS

SEQ ID NO: 57352 - protein, 251 aa, Glycine max
  peptide (1)..(251): Ceres Seq. ID no. 12608156
MQQKMLNSTPTCFHRTTTLTPSPSLLSTPLPSCSSSSTHHHSYLHPRHSSFHTQPLRLSNLRYHTHLPSTPKTLKVNCSTSEPLKVMISGAPASGKGTQCELIVQKFGLVHISTGDLLRAEVAAGTEIGNKAKEFMNTGQLVPDEIVTAMVAARLAREDVRHKGWLLDGYPRSFGQAQSLEKMQIRPDVYIVLDVPDEILIDRCVGRRLDPVTGKIYHLKFFPPDTEEIKARLITRPDDTEEKLFERMDSS

SEQ ID NO: 57353 - protein, 247 aa, Glycine max
  peptide (1)..(247): Ceres Seq. ID no. 12608157
MLNSTPTCFHRTTTLTPSPSLLSTPLPSCSSSSTHHHSYLHPRHSSFHTQPLRLSNLRYHTHLPSTPKTLKVNCSTSEPLKVMISGAPASGKGTQCELIVQKFGLVHISTGDLLRAEVAAGTEIGNKAKEFMNTGQLVPDEIVTAMVAARLAREDVRHKGWLLDGYPRSFGQAQSLEKMQIRPDVYIVLDVPDEILIDRCVGRRLDPVTGKIYHLKFFPPDTEEIKARLITRPDDTEEKLFERMDSS

SEQ ID NO: 57354 - DNA, 1317 bp, Glycine max
  misc_feature (1)..(1317): Ceres Seq. ID no. 14314327
attatgttaggaagacgcccctttatccatttggccggacaccacacaccgaagctattcagctattgtctattgcattgccattttcaagtaatggcgctactacgtcttgtttgcttaccttcaacaaatcaattatccactcaaccccattcccattcccaatccacctctttctcttttcttcgcaaaacgccccattctcaacccatcaatttcagtctctcttcctttcactttccacgcctatcccttatcacaaccaaacaaacccttaacctcactcccacacattcctccacttccgaacaacaaaccgaggagcctcttgtctctgaagaagaattttctcgcaccaggttgctcgctcagaactgccctggacaagcacccctgaagacattcgcaccctcttcgaaaaacatgggaaagtcctcgaagtcgagctttctatgtataagaaaaacagaaaccggggtttggcctttgtcgaaatgggttccccagaagaggcactggaagctctcaataatctcgaatcgtatgagtttgagggtcgtgtaattaaagtcaattatgctcggccaaaaaaggagaaaacagcgccgccccctgtgaaaccaaaggtggtgacgtttaacttgtttgttgctaacttatcctatgaagcaagctccaaagatcttaaggagttttttgatttgggaactggtagagttgtctctgctgaggttgtgtatcgtgataatcctagaaggccgtctggatatggatttgtgtccttcaagtctaagaaagaagctgaggctgctcttgctgagttccaaggaaaggtttttatgggaaggccaatcagggtggatcggggtcggcgttttgttcaacaaccaggggacgggagtgcaaagtctgaagatactccttctgagttgagtgtgaatggggcagaagctccacaaccagcagaggggagtgcaaagtctgaagatactccttctgagttgagtgtgaatggggaagaagctgacaaagctgattgatatcagtttttccctgatgcatatcgatattattgatgttgtatgtccttgcttcagacattttgaaagtttgctcattcttgcagataatccgaaatctttgattggtttagattatgtgttttactggtggttttcacccttatataccagaggcccttgagatacaaggagcggataggtgtaagcacaagcacttccgtgattcaagaatccatttatcttcattgcataatttaacaattgttggcaagctactatatcttaagaaagcgat

SEQ ID NO: 57355 - protein, 195 aa, Glycine max
  peptide (1)..(195): Ceres Seq. ID no. 14314328
MYKKNRNRGLAFVEMGSPEEALEALNNLESYEFEGRVIKVNYARPKKEKTAPPPVKPKVVTFNLFVANLSYEASSKDLKEFFDLGTGRVVSAEVVYRDNPRRPSGYGFVSFKSKKEAEAALAEFQGKVFMGRPIRVDRGRRFVQQPGDGSAKSEDTPSELSVNGAEAPQPAEGSAKSEDTPSELSVNGEEADKAD

SEQ ID NO: 57356 - protein, 187 aa, Glycine max
  peptide (1)..(187): Ceres Seq. ID no. 14314329
IMLGRRPFIHLAGHHTPKLFSYCLLHCHFQVMALLRLVCLPSTNQLSTQPHSHSQSTSFSFLRKTPHSQPINFSLSSFHFPRLSLITTKQTLNLTPTHSSTSEQQTEEPLVSEEEFSRTRLLAQNCPGQAPLKTFAPSSKNMGKSSKSSFLCIRKTETGVWPLSKWVPQKRHWKLSIISNRMSLRVV

SEQ ID NO: 57357 - protein, 186 aa, Glycine max
  peptide (1)..(186): Ceres Seq. ID no. 14314330
MLGRRPFIHLAGHHTPKLFSYCLLHCHFQVMALLRLVCLPSTNQLSTQPHSHSQSTSFSFLRKTPHSQPINFSLSSFHFPRLSLITTKQTLNLTPTHSSTSEQQTEEPLVSEEEFSRTRLLAQNCPGQAPLKTFAPSSKNMGKSSKSSFLCIRKTETGVWPLSKWVPQKRHWKLSIISNRMSLRVV

SEQ ID NO: 57358 - DNA, 951 bp, Glycine max
  misc_feature (1)..(951): Ceres Seq. ID no. 14306006
agtgaaggaaaactctctctctctcaaaaagagaatcttcaaaatgtcaatcacaacaggaatatgtcaagtagttgctgtttcattgcttttgggattactgagtgtgtattccttggaatgtgatgatgatcgctgcaaaactgggctgtgcaacaacactggtgcctgcatttgcaacctccctgatccttccaccatcttgaatggtgatagaactttcttcggggggaagttttgtgacgaagaaatgaccatgtgtgatgggacaaactccttctggtgtgaacatggggcaacttgtgaggagattgttcaaggagagaagtactcttgcaaatgtcccctaggatttgctggggagcattgtgagcattctggagcaccctgtggtcatactttttgtttccataatgctgaatgcttggctgaaacaggtgatgtttgccagtgcccttctgaatggaaaggcagtgctgattgctctcttccaaccacaccaacagatttttactcaatttcaactgacacaaaatcatctaaagtcagcagcagcagtgactccaataaggcactggctgtcttggcagtttcttcagtgggaggagctgctgctggtgccatttatggcaagaaactattcaacaagaaaaaaagagaggcaaggttccagcaattatctgaaatgcagactcaagggatattggatgatgatggtgatgaggaggatgaaaaccacaatatggtaccccaaagggtccatggtgatatttcacacaattagtgggcacttccttttccagcatcagaacattttagcactcttagctcaagtagttttttttgtcagttttcataattggcagtagcattttatttggtaagcttgagtagtactaatatttatatgattgtgcttaataaaaagatggcatgcaagcacatttttct

SEQ ID NO: 57359 - protein, 260 aa, Glycine max
  peptide (1)..(260): Ceres Seq. ID no. 14306007
VKENSLSLKKRIFKMSITTGICQVVAVSLLLGLLSVYSLECDDDRCKTGLCNNTGACICNLPDPSTILNGDRTFFGGKFCDEEMTMCDGTNSFWCEHGATCEEIVQGEKYSCKCPLGFAGEHCEHSGAPCGHTFCFHNAECLAETGDVCQCPSEWKGSADCSLPTTPTDFYSISTDTKSSKVSSSSDSNKALAVLAVSSVGGAAAGAIYGKKLFNKKKREARFQQLSEMQTQGILDDDGDEEDENHNMVPQRVHGDISHN

SEQ ID NO: 57360 - protein, 246 aa, Glycine max
  peptide (1)..(246): Ceres Seq. ID no. 14306008
MSITTGICQVVAVSLLLGLLSVYSLECDDDRCKTGLCNNTGACICNLPDPSTILNGDRTFFGGKFCDEEMTMCDGTNSFWCEHGATCEEIVQGEKYSCKCPLGFAGEHCEHSGAPCGHTFCFHNAECLAETGDVCQCPSEWKGSADCSLPTTPTDFYSISTDTKSSKVSSSSDSNKALAVLAVSSVGGAAAGAIYGKKLFNKKKREARFQQLSEMQTQGILDDDGDEEDENHNMVPQRVHGDISHN

SEQ ID NO: 57361 - protein, 177 aa, Glycine max
  peptide (1)..(177): Ceres Seq. ID no. 14306009
MTMCDGTNSFWCEHGATCEEIVQGEKYSCKCPLGFAGEHCEHSGAPCGHTFCFHNAECLAETGDVCQCPSEWKGSADCSLPTTPTDFYSISTDTKSSKVSSSSDSNKALAVLAVSSVGGAAAGAIYGKKLFNKKKREARFQQLSEMQTQGILDDDGDEEDENHNMVPQRVHGDISHN

SEQ ID NO: 57362 - DNA, 887 bp, Glycine max
  misc_feature (1)..(887): Ceres Seq. ID no. 13594244
aattgtgaagaaggataataaaaggcatagatggtctagggcgaggggaggcgacgaagaagaaaatgatggcaacaaccgcgcctgtgcggtggcaaccaccaaacattaggtttaggattgagccgaagagagcgatgagagtgaaagcctttggtaagggaggcagggatatggatagggtttggagtgaggcgtggcgaagtgctaacgatgggtttgagcggttcgtcttcgaagcgaagaagactgcggagcgcatcgaccggcgctattccctttcgcggcgtctctcctccgtggcgagggcggccgcagaccgagcccgcgagattgatcgtgagtttgagattggacaacgttaccgcactttgagcatcgatttccaaagaaactggcccaagtacaggaagcagctcaaggactttctggatagtccgcttggaaagagctttgctacactgctgttcatctggttagcactgtctggttggcttttccggatcctgataatcgcaacatgggtacttccatttgcaggacctcttctaattggaactttggccaacaccttagttattaaggggacttgtccggcttgcaagatgcaatttggtggttacaagaatcaaataatccgatgtacaggctgtggcaacattgtgtggcaacccaaaggtagaaccaactccaaatctaataagtcagaccccgacattattgatgtcgactttgaggagaggtgacactctcccagcccattcattctttacttctacactttgtaaagttaccaacatttttccatgcccaccctctccatctattctgttggacttcatatttctctcatgttttcaatttctttgttctttcccaggcataac

SEQ ID NO: 57363 - protein, 226 aa, Glycine max
  peptide (1)..(226): Ceres Seq. ID no. 13594245
MMATTAPVRWQPPNIRFRIEPKRAMRVKAFGKGGRDMDRVWSEAWRSANDGFERFVFEAKKTAERIDRRYSLSRRLSSVARAAADRAREIDREFEIGQRYRTLSIDFQRNWPKYRKQLKDFLDSPLGKSFATLLFIWLALSGWLFRILIIATWVLPFAGPLLIGTLANTLVIKGTCPACKMQFGGYKNQIIRCTGCGNIVWQPKGRTNSKSNKSDPDIIDVDFEER

SEQ ID NO: 57364 - protein, 225 aa, Glycine max
  peptide (1)..(225): Ceres Seq. ID no. 13594246
MATTAPVRWQPPNIRFRIEPKRAMRVKAFGKGGRDMDRVWSEAWRSANDGFERFVFEAKKTAERIDRRYSLSRRLSSVARAAADRAREIDREFEIGQRYRTLSIDFQRNWPKYRKQLKDFLDSPLGKSFATLLFIWLALSGWLFRILIIATWVLPFAGPLLIGTLANTLVIKGTCPACKMQFGGYKNQIIRCTGCGNIVWQPKGRTNSKSNKSDPDIIDVDFEER

SEQ ID NO: 57365 - protein, 202 aa, Glycine max
  peptide (1)..(202): Ceres Seq. ID no. 13594247
MRVKAFGKGGRDMDRVWSEAWRSANDGFERFVFEAKKTAERIDRRYSLSRRLSSVARAAADRAREIDREFEIGQRYRTLSIDFQRNWPKYRKQLKDFLDSPLGKSFATLLFIWLALSGWLFRILIIATWVLPFAGPLLIGTLANTLVIKGTCPACKMQFGGYKNQIIRCTGCGNIVWQPKGRTNSKSNKSDPDIIDVDFEER

SEQ ID NO: 57366 - DNA, 1084 bp, Glycine max
  misc_feature (1)..(1084): Ceres Seq. ID no. 14314194
ttttcaatttcaatatccgctcaaaccctaacctaactcctctcgtcgtcacaaaaagtcttcttctccgatcgttacgatgttggaactccgtctcgtgcaaggttcccttctgaagaaggttctggaatcgatcaaggagctcgtaaacgacgcgaacttcgactgctcctccaccgggttctccctccaggccatggattccagccacgtcgccctcgttgcgctcctcctccggtccgagggctttgagcactaccgctgcgaccgcaatacctccatgggcatgaacctcaacaacatggccaagatgctcaagtgcgccggcaatgacgacatcataaccatcaaggccgacgacggcagcgacaccgtcactttcatgttcgaaagccctacacaagataagatttctgattttgagatgaagctgatggacattgacagtgagcaccttgggattccagaggcagagtatcatgccattgttaagatgccatcctctgagtttgctaggatctgcaaggatctcagtagtattggtgacactgttgtcatttcaattactaaggagggtgttaagttttccaccaaaggagacattggaactgccaatatagtttgcaggcagaatacttctgtggacaagcctgaagaagctactgtcattgagatgaatgagcctgtgtccttgacatttgctttgcgatatatgaactcttttacaaaggcaacgccattgtccaacacagttaccattagtctgtcaaatgagctgccagttgtagtcgagtataagattgctgagatgggttatgtgcggttctatttggctcccaagatagaagaggatgaagaagatacgaaacctcaagtttaatctacctattagatgttgggttaggatattaggattttaatgccttttgaacttgtttttgttatacatctttgaagatattttaaccttgtgagcaacgaattggcattttgtggatttcttatgtgtattagtttcctgccaccttattttctcctgaatttattgtttattgtttagaacaatgtgaaacaattggtgtgc

SEQ ID NO: 57367 - protein, 266 aa, Glycine max
  peptide (1)..(266): Ceres Seq. ID no. 14314195
MLELRLVQGSLLKKVLESIKELVNDANFDCSSTGFSLQAMDSSHVALVALLLRSEGFEHYRCDRNTSMGMNLNNMAKMLKCAGNDDIITIKADDGSDTVTFMFESPTQDKISDFEMKLMDIDSEHLGIPEAEYHAIVKMPSSEFARICKDLSSIGDTVVISITKEGVKFSTKGDIGTANIVCRQNTSVDKPEEATVIEMNEPVSLTFALRYMNSFTKATPLSNTVTISLSNELPVVVEYKIAEMGYVRFYLAPKIEEDEEDTKPQV

SEQ ID NO: 57368 - protein, 227 aa, Glycine max
  peptide (1)..(227): Ceres Seq. ID no. 14314196
MDSSHVALVALLLRSEGFEHYRCDRNTSMGMNLNNMAKMLKCAGNDDIITIKADDGSDTVTFMFESPTQDKISDFEMKLMDIDSEHLGIPEAEYHAIVKMPSSEFARICKDLSSIGDTVVISITKEGVKFSTKGDIGTANIVCRQNTSVDKPEEATVIEMNEPVSLTFALRYMNSFTKATPLSNTVTISLSNELPVVVEYKIAEMGYVRFYLAPKIEEDEEDTKPQV

SEQ ID NO: 57369 - protein, 199 aa, Glycine max
  peptide (1)..(199): Ceres Seq. ID no. 14314197
MGMNLNNMAKMLKCAGNDDIITIKADDGSDTVTFMFESPTQDKISDFEMKLMDIDSEHLGIPEAEYHAIVKMPSSEFARICKDLSSIGDTVVISITKEGVKFSTKGDIGTANIVCRQNTSVDKPEEATVIEMNEPVSLTFALRYMNSFTKATPLSNTVTISLSNELPVVVEYKIAEMGYVRFYLAPKIEEDEEDTKPQV

SEQ ID NO: 57370 - DNA, 1380 bp, Glycine max
  misc_feature (1)..(1380): Ceres Seq. ID no. 15168425
acacagttccctcacttctcttccctttgaccattcaaccttcctcgcctttgcctccgtttcaaaattgcgagaggcacttatttggtgaaggtataatcttgattcagaaaatatgctgcgtgactgagatggctggaggtgttattcagcagatattgaggaggaaactccaccctcggtttactaactctcccttgttgtcacccatcgtagcaaaaaaagatgatgctggctctactggcagtcagtccttaagagcacttgcattaattggagctggtttgtcaggtcttttcagtttttcaacaatggcagcagctgatgaagctgaacatggcctggcatgtccaagctatccatggcctcacaagggaattcttagttcatatgatcacgcttcgattcgtcgtggtcatcaagtttatacagaagtctgtgcttcctgccattctatgtctttgatatcgtatcgtgatttggttggtgttgcttatacagaagaagaggtaaaggctatggcagctgagattgaggtggttgatggccctaacgatgagggtgagatgtttacacgccctggtaaactcagtgatcgttttcctcagccatatgcaaatgaagcagctgctaggtttgctaatggaggagcttatcctccagatctaagtcttgttaccaaagcccgtcacaatggtcagaactatgtttttgcccttctgactggttatcgtgacccacctgctggtgtttcgataagagagggacttcattataatccttactttcctggtggagcaattgccatgcctaaaatgcttaatgatggtgctgtggaatatgaagatggtactcctgctacagaagctcagatggggaaggatgttgtgtcattcttaacttgggccgccgaacccgagatggaagagagaaaactgatgggatttaaatggatatttgtactgtcattggcactacttcaggctgcctattaccgccgcttgaggtggtcagttctaaagtctcgcaagctggttcttgatgttgtcaactagctctgcctcgagtttcattttcacttgaacaaagtttactgttggcaataatttgtcagatgattaagttgtttcatcatttcaaattctttcagctaagttaatgtttaatggaacaacaactagaagagtgttataattttgtttgagataaaaaaaaatgttccatgcacgagatgcgtttaatttttctcatcacccatctcggacttgtgtattgttgcattttccgagagctgttcctgtttcataaactattgaattttgtggaacttgtcgttattattcaagaaaaataatagataaatatgctcacgttggaaat

SEQ ID NO: 57371 - protein, 350 aa, Glycine max
  peptide (1)..(350): Ceres Seq. ID no. 15168426
TVPSLLFPLTIQPSSPLPPFQNCERHLFGEGIILIQKICCVTEMAGGVIQQILRRKLHPRFTNSPLLSPIVAKKDDAGSTGSQSLRALALIGAGLSGLFSFSTMAAADEAEHGLACPSYPWPHKGILSSYDHASIRRGHQVYTEVCASCHSMSLISYRDLVGVAYTEEEVKAMAAEIEVVDGPNDEGEMFTRPGKLSDRFPQPYANEAAARFANGGAYPPDLSLVTKARHNGQNYVFALLTGYRDPPAGVSIREGLHYNPYFPGGAIAMPKMLNDGAVEYEDGTPATEAQMGKDVVSFLTWAAEPEMEERKLMGFKWIFVLSLALLQAAYYRRLRWSVLKSRKLVLDVVN

SEQ ID NO: 57372 - protein, 307 aa, Glycine max; identical to SEQ ID NO: 54344
  peptide (1)..(307): Ceres Seq. ID no. 15168427

SEQ ID NO: 57373 - protein, 247 aa, Glycine max; identical to SEQ ID NO: 54345
  peptide (1)..(247): Ceres Seq. ID no. 15168428

SEQ ID NO: 57374 - DNA, 1457 bp, Glycine max
  misc_feature (1)..(1457): Ceres Seq. ID no. 14314264
gaatcactctgcactctgcactctgcacaatgctttccctctccgtccctcctctcaacctcaaacccataacacccaatgacctctttctctcatcagcctctccctcacctcaccgtcgctacttcgtgaaacccatctccgccgtcctcaactcatcttccttcaagaaacctgagcagcctctgctgccgcagcatcaagtctaccagcccttccgccctcccccgtctcccctcccctcgcaattcggcaccctcgacatcgccggccgaatcgacatcctcgccaaccgcctcggcctctggtacgagtacgcgcccttaatcaattccctaatccgcgaaggcttctcccctccgacaatcgaagaaaccaccggcatctccggcgtcgagcagaaccgcctcatcgtcggggcgcaggtccgcgactccctcgtccactccaaggccgaccccgacctcctcgctgccttcgagaccggcggcgccgagctcctctacgagatccgtctcctcagcgcctcgcagcgcgtcgccgccgcgcgcttcctcgtcgagaatcgctgcgacgggaaggccgcgcaggagctcgcacgttccatgaaggatttcccgagccggcgcggggataaaggatgggcgaggttcgactacactctccccggggactgtctttcttttatgtattacaggcagagcagggagcataggaacccgtcggagcagaggacttcggcgctggagcaggcgctgcgcgtggcggagacggaggcggccaggaatatgattttggaggagttggaggggaatggtgaagagggggataaggtggatgcaggggagggtgctgtgcgtgttccggtggtgaggctgaggattggggaggtggcggaggcgagttcggtggtggtgttgccggtctccgcggcggaggagagggagattttggaggcgccgtatgagagtaggagccagggggtgtttggtgtggtggtggcggagaagggatggggaaaatgggtggtgttgccttcgtgggacccagtggttggtttaggaaaagggggtgttgtggtatcgtttcccgatgctagggttttgccgtggaaggtgaataggtggtataaggaggagcctatattggtggtggctgacaggagtaaaaaagaggtgggtgccgatgatgggttttatcttgtgaatgctgatggtgagggtttgaaggtcgagaggggttcgggattgaaggaaaagggtttcactcagagtttaggaactgtgttattggttgttagacctcccaaagaagaaaatgatgaattgagtgacgaagactgggagtgaactcaaatcaaagggaagggaatgattgagttgctaaagaatagcgataacaccacattatatatatatatatatggttttctcaattcaagaattgctagttaaccc

SEQ ID NO: 57375 - protein, 448 aa, Glycine max
  peptide (1)..(448): Ceres Seq. ID no. 14314265
ITLHSALCTMLSLSVPPLNLKPITPNDLFLSSASPSPHRRYFVKPISAVLNSSSFKKPEQPLLPQHQVYQPFRPPPSPLPSQFGTLDIAGRIDILANRLGLWYEYAPLINSLIREGFSPPTIEETTGISGVEQNRLIVGAQVRDSLVHSKADPDLLAAFETGGAELLYEIRLLSASQRVAAARFLVENRCDGKAAQELARSMKDFPSRRGDKGWARFDYTLPGDCLSFMYYRQSREHRNPSEQRTSALEQALRVAETEAARNMILEELEGNGEEGDKVDAGEGAVRVPVVRLRIGEVAEASSVVVLPVSAAEEREILEAPYESRSQGVFGVVVAEKGWGKWVVLPSWDPVVGLGKGGVVVSFPDARVLPWKVNRWYKEEPILVVADRSKKEVGADDGFYLVNADGEGLKVERGSGLKEKGFTQSLGTVLLVVRPPKEENDELSDEDWE

SEQ ID NO: 57376 - protein, 439 aa, Glycine max
  peptide (1)..(439): Ceres Seq. ID no. 14314266
MLSLSVPPLNLKPITPNDLFLSSASPSPHRRYFVKPISAVLNSSSFKKPEQPLLPQHQVYQPFRPPPSPLPSQFGTLDIAGRIDILANRLGLWYEYAPLINSLIREGFSPPTIEETTGISGVEQNRLIVGAQVRDSLVHSKADPDLLAAFETGGAELLYEIRLLSASQRVAAARFLVENRCDGKAAQELARSMKDFPSRRGDKGWARFDYTLPGDCLSFMYYRQSREHRNPSEQRTSALEQALRVAETEAARNMILEELEGNGEEGDKVDAGEGAVRVPVVRLRIGEVAEASSVVVLPVSAAEEREILEAPYESRSQGVFGVVVAEKGWGKWVVLPSWDPVVGLGKGGVVVSFPDARVLPWKVNRWYKEEPILVVADRSKKEVGADDGFYLVNADGEGLKVERGSGLKEKGFTQSLGTVLLVVRPPKEENDELSDEDWE

SEQ ID NO: 57377 - protein, 247 aa, Glycine max
  peptide (1)..(247): Ceres Seq. ID no. 14314267
MKDFPSRRGDKGWARFDYTLPGDCLSFMYYRQSREHRNPSEQRTSALEQALRVAETEAARNMILEELEGNGEEGDKVDAGEGAVRVPVVRLRIGEVAEASSVVVLPVSAAEEREILEAPYESRSQGVFGVVVAEKGWGKWVVLPSWDPVVGLGKGGVVVSFPDARVLPWKVNRWYKEEPILVVADRSKKEVGADDGFYLVNADGEGLKVERGSGLKEKGFTQSLGTVLLVVRPPKEENDELSDEDWE

SEQ ID NO: 57378 - DNA, 1103 bp, Glycine max
  misc_feature (1)..(1103): Ceres Seq. ID no. 14306066
attcccacaacacaacacaacgcacaaacacacaaaaaatttctagagcgagaaagtgagaggagagagaaagtagctgatcctccatggcctccaccaaggaacgcgaaaactttgtctacaccgccaagctcgccgaacaagccgaacgctatgaagaaatggtggaagcaatgaagaatgtggcgaagctgaacgtggaattgacggtcgaggagcggaaccttctgtcggtagggtacaagaacgtggtgggtgctcgtagggcttcgtggaggattctatcgtcgattgaacagaaagaagaagctaaagggaacgatgtgagtgtgaagaggataaaggagtataggcagaaggtggagtctgagttgtccaatatctgcagtgatatcatgactgttattgatgaacaccttattccctctagctctgctggtgaacctagtgtctttttctacaaaatgaagggggactattaccggtacctcgcggagttcaagtccggtgatgagagaaaagaggctgctgatcattccatgaaggcgtatcagtcggcttccactactgcagaggctgagttaccacccacacatcccatccgtttgggcctggctttgaacttctctgtcttttattatgaaattttgaactctcctgaaagggcctgtcaccttgctaagcaggcatttgatgaagccatctctgagttggatactctgagcgaggagtcttacaaagacagcaccctaattatgcagcttctgagggacaatctcaccctgtggacttctgacatccctgaagaaggagctgaggaacaaaaggtggattctgccagagctgctggaggtgacaatgcatagtgaagcaggtattggctaggaatttgtggtgtcatacgagaaggctagtctttctcttgataatttaccattaggatgtagtaatagaacatggagttggtctctagaaaatcaccatagggctttgtgagccttttattctatgcgtgtgctttctgttactggatggagactggagttgagatttgtatgttgtttgcctgtgattcagtgaatttcttcattttgacttctttc

SEQ ID NO: 57379 - protein, 259 aa, Glycine max
  peptide (1)..(259): Ceres Seq. ID no. 14306067
MASTKERENFVYTAKLAEQAERYEEMVEAMKNVAKLNVELTVEERNLLSVGYKNVVGARRASWRILSSIEQKEEAKGNDVSVKRIKEYRQKVESELSNICSDIMTVIDEHLIPSSSAGEPSVFFYKMKGDYYRYLAEFKSGDERKEAADHSMKAYQSASTTAEAELPPTHPIRLGLALNFSVFYYEILNSPERACHLAKQAFDEAISELDTLSEESYKDSTLIMQLLRDNLTLWTSDIPEEGAEEQKVDSARAAGGDNA

SEQ ID NO: 57380 - protein, 234 aa, Glycine max
  peptide (1)..(234): Ceres Seq. ID no. 14306068
MVEAMKNVAKLNVELTVEERNLLSVGYKNVVGARRASWRILSSIEQKEEAKGNDVSVKRIKEYRQKVESELSNICSDIMTVIDEHLIPSSSAGEPSVFFYKMKGDYYRYLAEFKSGDERKEAADHSMKAYQSASTTAEAELPPTHPIRLGLALNFSVFYYEILNSPERACHLAKQAFDEAISELDTLSEESYKDSTLIMQLLRDNLTLWTSDIPEEGAEEQKVDSARAAGGDNA

SEQ ID NO: 57381 - protein, 230 aa, Glycine max
  peptide (1)..(230): Ceres Seq. ID no. 14306069
MKNVAKLNVELTVEERNLLSVGYKNVVGARRASWRILSSIEQKEEAKGNDVSVKRIKEYRQKVESELSNICSDIMTVIDEHLIPSSSAGEPSVFFYKMKGDYYRYLAEFKSGDERKEAADHSMKAYQSASTTAEAELPPTHPIRLGLALNFSVFYYEILNSPERACHLAKQAFDEAISELDTLSEESYKDSTLIMQLLRDNLTLWTSDIPEEGAEEQKVDSARAAGGDNA

SEQ ID NO: 57382 - DNA, 1866 bp, Glycine max
  misc_feature (1)..(1866): Ceres Seq. ID no. 14314276
aattctccaccaaccccattctctctttctctctttacataactcaatttctccttgtatcattttcactacacatattacattattccttccaaaatgagcacgcagctgaaaaggttcaactcaatggaacgcaggccaagaatgctgaaggacttcctcagcgagaatctaaactcgtgctcctcaagcggcttcaaatcacttccaagaaaaccaaccaacaacaacagcatgcacagcctcatcgaaatggaactcaaatcttcatcaccctttcaaacactcatgaacaccataagaagcatctctctcttcacctcaaaatcaccctccgtgctttctctaccgaggagcctctcacgcaagctatcatcttcaaggagaaaaacaagaacaagaagaagaaggagccatgtgtgcagcagcgatgtcaacatcacaacggtggtgaagatcaaggacatcatacggtggaagtcattcagggatatcgtggtggaaccttctcttccaccaccaccgttggatttcatggtggggtccaccaacaccacttgtagtagctgtagcagtggctctagttggactgagagtgatttttttttaacctcgtcctgggaagaaccacaaaacgacaacgttgaagcgggtaaaaggttttcatttttttcaccccttgttgtcggcaaggactccggggctacggacacttcaacttgccaagaagaacaacacagtccagtttcagttcttcacgttggagaagatgatttctcaccttttgatcaaagtcttgccaatattctaaggagaaaacagaagttcatacaaacagttcaaaaattggagagtcatgcaaaatttgaccttgcaaacttagaccaatgtctctcattggatgacaactctggctatgatgaagaatatgaagaagaagaagatgatgataatgatgacattgaagaacaagattggattgaggaaaaggcaaagcagctgctacattgtgtcaaagcaagagtttcagcacatggctgtatagactatttggatacacttctgttggattttttcagggaagaactaagtggaagtagaaaccaatacaagaatgaagaggagtttgagttggagacattgagaataactgaggattggataaatgggtcatttgcttttgatgcagggcatgctgacaaacatgcttacataaaggacatggagaggagagatcagtggagtaggttggaggaggatcaagaagaattggcctttgaaattgagacagctatattgcatagtttgattgctgatcttctggacctggatgcttaatacttaatagtttcccttttcaaagttcaaatcaagttttggcaattgcttcttcgcctccataatggcttcgtgtacctttttaagtttatgaaacacctaattcggaatgtaaattacattccagaaagactaattcgaaatgtaattttacattccaggttaggtggaagcaattgcctcaagttctttaagatctctgggcctttagcctcacttttctcaacagaaattatctggccgcacttgaagtccgaatcagaaaagtaggtttcatcctacagcacccatttagattttaggcttaccaaccagaccagaaaaataaggatacctaccaaccaagggcagagggatgcctacttttgtggtaacaaaggacatataggtcagagtttggtgagttttggatactgttatatgaaggggtaatgagatgctagtggacataagtacatgattgggctgtactgtacttaaatttagttatggcttaattagattttggactttggagtgtagcatatt

SEQ ID NO: 57383 - protein, 413 aa, Glycine max
  peptide (1)..(413): Ceres Seq. ID no. 14314277
MSTQLKRFNSMERRPRMLKDFLSENLNSCSSSGFKSLPRKPTNNNSMHSLIEMELKSSSPFQTLMNTIRSISLFTSKSPSVLSLPRSLSRKLSSSRRKTRTRRRRSHVCSSDVNITTVVKIKDIIRWKSFRDIVVEPSLPPPPLDFMVGSTNTTCSSCSSGSSWTESDFFLTSSWEEPQNDNVEAGKRFSFFSPLVVGKDSGATDTSTCQEEQHSPVSVLHVGEDDFSPFDQSLANILRRKQKFIQTVQKLESHAKFDLANLDQCLSLDDNSGYDEEYEEEEDDDNDDIEEQDWIEEKAKQLLHCVKARVSAHGCIDYLDTLLLDFFREELSGSRNQYKNEEEFELETLRITEDWINGSFAFDAGHADKHAYIKDMERRDQWSRLEEDQEELAFEIETAILHSLIADLLDLDA

SEQ ID NO: 57384 - protein, 403 aa, Glycine max
  peptide (1)..(403): Ceres Seq. ID no. 14314278
MERRPRMLKDFLSENLNSCSSSGFKSLPRKPTNNNSMHSLIEMELKSSSPFQTLMNTIRSISLFTSKSPSVLSLPRSLSRKLSSSRRKTRTRRRRSHVCSSDVNITTVVKIKDIIRWKSFRDIVVEPSLPPPPLDFMVGSTNTTCSSCSSGSSWTESDFFLTSSWEEPQNDNVEAGKRFSFFSPLVVGKDSGATDTSTCQEEQHSPVSVLHVGEDDFSPFDQSLANILRRKQKFIQTVQKLESHAKFDLANLDQCLSLDDNSGYDEEYEEEEDDDNDDIEEQDWIEEKAKQLLHCVKARVSAHGCIDYLDTLLLDFFREELSGSRNQYKNEEEFELETLRITEDWINGSFAFDAGHADKHAYIKDMERRDQWSRLEEDQEELAFEIETAILHSLIADLLDLDA

SEQ ID NO: 57385 - protein, 397 aa, Glycine max
  peptide (1)..(397): Ceres Seq. ID no. 14314279
MLKDFLSENLNSCSSSGFKSLPRKPTNNNSMHSLIEMELKSSSPFQTLMNTIRSISLFTSKSPSVLSLPRSLSRKLSSSRRKTRTRRRRSHVCSSDVNITTVVKIKDIIRWKSFRDIVVEPSLPPPPLDFMVGSTNTTCSSCSSGSSWTESDFFLTSSWEEPQNDNVEAGKRFSFFSPLVVGKDSGATDTSTCQEEQHSPVSVLHVGEDDFSPFDQSLANILRRKQKFIQTVQKLESHAKFDLANLDQCLSLDDNSGYDEEYEEEEDDDNDDIEEQDWIEEKAKQLLHCVKARVSAHGCIDYLDTLLLDFFREELSGSRNQYKNEEEFELETLRITEDWINGSFAFDAGHADKHAYIKDMERRDQWSRLEEDQEELAFEIETAILHSLIADLLDLDA

SEQ ID NO: 57386 - DNA, 1486 bp, Glycine max
  misc_feature (1)..(1486): Ceres Seq. ID no. 14314300
gcaattcctctgtctgttccttcaattcttcaaatcccgaaattgtcatttttaatctcgctgcaaattgcgctcacgattctttgctttccttcgaaactctcccaaatcccacttctttctctctcataaataaattcgccacctttgtatttttgcgtaactgctctgcaccttattgattcttctctctctctccattctccaattctccatttcgatctgcagctccccgctttcaaagctctgaaatttccgattcgggatggagaaatacgagctcgtgaaggatataggatctgggaatttcggtgtggccaggctcatgcgacacaaagacaccaaggagcttgttgccatgaaatacattgaacggggtcacaagattgatgagaatgttgcgagggaaatcataaaccatagaagtcttcggcaccccaatattattcggttcaaggaggtggttctgactccaacccatctgggtattgttatggagtatgcggctggtggagagctctttgagaggatttgcagtgctggaagattcagcgaagatgaggctcgatatttcttccagcagctcatctcaggagttagctactgtcattccatgcaaatctgtcatcgagacttgaagctggagaacacattattggatggcagcccagccccacggctcaaaatttgtgattttggctattctaagtcatctctgcttcattctaggcctaagtcaacggtgggaaccccggcctacattgcacctgaggttctttcacgtagagagtatgatggaaagttagcagatgtatggtcctgtggagtgactctttatgtaatgctggtgggagcatacccatttgaagaccaagaggatcccaaaaatttcaggaaaaccatcaatcgaattatggctgttcaatacaagattccagactacgttcacatatctcaagactgtagacatcttctatctcgcatttttgtggcaaatccagctaggagaatcaccattaaggaaatcaagtcccacccatggtttgtaaagaacttgcccagagaattaacagaagtagctcaagctgcctactacagaaaagaaaacccaaccttttctcttcagagtatagaggacatcatgaatattgttgaggaggccaaggctccacctccagcatccaggtcaattggaggatttggctggggaggggaggaagaagaagaggatgaaacaaaagaagcagtggctgagactgaagaagatgagtacgaaaagagagtcaaggaagcacaagcaagtggggaatttcatgtcagttaaaaagtgtttatttttagatagagagcaattgattcttggtttcctttgcacttagctaagttcaactaaggtgagtgtgttttgcttgtatgtataaaattaagttttccgcatgggacatatagtttaataaatggctgtacatttttttaaggttgtgcg

SEQ ID NO: 57387 - protein, 352 aa, Glycine max
  peptide (1)..(352): Ceres Seq. ID no. 14314301
MEKYELVKDIGSGNFGVARLMRHKDTKELVAMKYIERGHKIDENVAREIINHRSLRHPNIIRFKEVVLTPTHLGIVMEYAAGGELFERICSAGRFSEDEARYFFQQLISGVSYCHSMQICHRDLKLENTLLDGSPAPRLKICDFGYSKSSLLHSRPKSTVGTPAYIAPEVLSRREYDGKLADVWSCGVTLYVMLVGAYPFEDQEDPKNFRKTINRIMAVQYKIPDYVHISQDCRHLLSRIFVANPARRITIKEIKSHPWFVKNLPRELTEVAQAAYYRKENPTFSLQSIEDIMNIVEEAKAPPPASRSIGGFGWGGEEEEEDETKEAVAETEEDEYEKRVKEAQASGEFHVS

SEQ ID NO: 57388 - protein, 332 aa, Glycine max
  peptide (1)..(332): Ceres Seq. ID no. 14314302
MRHKDTKELVAMKYIERGHKIDENVAREIINHRSLRHPNIIRFKEVVLTPTHLGIVMEYAAGGELFERICSAGRFSEDEARYFFQQLISGVSYCHSMQICHRDLKLENTLLDGSPAPRLKICDFGYSKSSLLHSRPKSTVGTPAYIAPEVLSRREYDGKLADVWSCGVTLYVMLVGAYPFEDQEDPKNFRKTINRIMAVQYKIPDYVHISQDCRHLLSRIFVANPARRITIKEIKSHPWFVKNLPRELTEVAQAAYYRKENPTFSLQSIEDIMNIVEEAKAPPPASRSIGGFGWGGEEEEEDETKEAVAETEEDEYEKRVKEAQASGEFHVS

SEQ ID NO: 57389 - protein, 321 aa, Glycine max
  peptide (1)..(321): Ceres Seq. ID no. 14314303
MKYIERGHKIDENVAREIINHRSLRHPNIIRFKEVVLTPTHLGIVMEYAAGGELFERICSAGRFSEDEARYFFQQLISGVSYCHSMQICHRDLKLENTLLDGSPAPRLKICDFGYSKSSLLHSRPKSTVGTPAYIAPEVLSRREYDGKLADVWSCGVTLYVMLVGAYPFEDQEDPKNFRKTINRIMAVQYKIPDYVHISQDCRHLLSRIFVANPARRITIKEIKSHPWFVKNLPRELTEVAQAAYYRKENPTFSLQSIEDIMNIVEEAKAPPPASRSIGGFGWGGEEEEEDETKEAVAETEEDEYEKRVKEAQASGEFHVS

SEQ ID NO: 57390 - DNA, 1551 bp, Glycine max
  misc_feature (1)..(1551): Ceres Seq. ID no. 14314331
cttgctctcactctcactccgtctccggtggcctcaaaccgctccctcacaattccaaacaccgcgtgcgctgcccacatctccgttcgcatctcctccttgaccagctcgaagtttctctccagtgttgctttgtgagaagtcgttcttgcttgaagtggcttttcattcacaagctctttgagactttcttggagaagagatgtaggagttggactaaggtttcttccaattttcaattgggcacagccacaatcttattctacttaaccttcctcaccttttcggatacctaaggcgaagtatagctaaaaaatgggagtggagagagaagagaaggtgtctttggaactcagcgaagaaattcttcagagtatggaagtgggaatgtccttcaaagactataacggtagaattagttcgttggattttcacagggcatccagttatctagtgaccgctagtgatgatgaatccattcgtctgtatgatgttactggtggaacatgtttgaagacaattaatagcaagaagtatggagttgacctggtttgcttcacatctcatcctacaactgtcatttactcttcaaaaaatggttgggatgaatctttgcggcttctatcgttgcatgataacaagtatttgagatatttcaaaggtcaccatgacagggttgtgtctctaagcttatgctctcgaaaagactgctttatatctggatctctagatcgaactgttttactgtgggatcaaagggctgagaagtgccagggacttttacatgtacaaggaagacctgctatatcatatgatgatccagggcttgtctttgcaattgcctttggaggatacataagaatgtttgatgcccgcaagtatgaaaagggtccctttgagatattttctgttgggggagatatttctgatgcaaatgttgtgaaatttagtaatgatgggagactaatgcttttaacaacggcagatgggcatattcatgtgcttgacacatttcgtggcacacttttatccacatataatgtcacacctgtctcatgcaactccacattagaagcttctttcagccctgagggaatgttcataatatctggttctggagaaggcagcatctacgcatggagtgttcgaagtggcaaagaagttgcaagttggaggagtgcaacttctgatactggacctcctgtaataaagtgggctcctggaagtcttatgtttgctacaggatcatctgagttgtcattctgggttcctgatttgtctaagttgggatcctatgttggaagaaagtagaaacaaatcaaacaatgcatgataaaactattgtttgcctattaacccactgaaaggtaattttttttattaatactacacaaatttaactgtgccgaatggcgtcgtgtgatccatgtagccgacctcacctagtgggataaaactttgttgttgttgcactacacaaagtgacagattttgccatgtttttgtaaatattcttcaccgaagagcaatggatatttcaatgatcctcct

SEQ ID NO: 57391 - protein, 331 aa, Glycine max
  peptide (1)..(331): Ceres Seq. ID no. 14314332
MGVEREEKVSLELSEEILQSMEVGMSFKDYNGRISSLDFHRASSYLVTASDDESIRLYDVTGGTCLKTINSKKYGVDLVCFTSHPTTVIYSSKNGWDESLRLLSLHDNKYLRYFKGHHDRVVSLSLCSRKDCFISGSLDRTVLLWDQRAEKCQGLLHVQGRPAISYDDPGLVFAIAFGGYIRMFDARKYEKGPFEIFSVGGDISDANVVKFSNDGRLMLLTTADGHIHVLDTFRGTLLSTYNVTPVSCNSTLEASFSPEGMFIISGSGEGSIYAWSVRSGKEVASWRSATSDTGPPVIKWAPGSLMFATGSSELSFWVPDLSKLGSYVGRK

SEQ ID NO: 57392 - protein, 311 aa, Glycine max
  peptide (1)..(311): Ceres Seq. ID no. 14314333
MEVGMSFKDYNGRISSLDFHRASSYLVTASDDESIRLYDVTGGTCLKTINSKKYGVDLVCFTSHPTTVIYSSKNGWDESLRLLSLHDNKYLRYFKGHHDRVVSLSLCSRKDCFISGSLDRTVLLWDQRAEKCQGLLHVQGRPAISYDDPGLVFAIAFGGYIRMFDARKYEKGPFEIFSVGGDISDANVVKFSNDGRLMLLTTADGHIHVLDTFRGTLLSTYNVTPVSCNSTLEASFSPEGMFIISGSGEGSIYAWSVRSGKEVASWRSATSDTGPPVIKWAPGSLMFATGSSELSFWVPDLSKLGSYVGRK

SEQ ID NO: 57393 - protein, 307 aa, Glycine max
  peptide (1)..(307): Ceres Seq. ID no. 14314334
MSFKDYNGRISSLDFHRASSYLVTASDDESIRLYDVTGGTCLKTINSKKYGVDLVCFTSHPTTVIYSSKNGWDESLRLLSLHDNKYLRYFKGHHDRVVSLSLCSRKDCFISGSLDRTVLLWDQRAEKCQGLLHVQGRPAISYDDPGLVFAIAFGGYIRMFDARKYEKGPFEIFSVGGDISDANVVKFSNDGRLMLLTTADGHIHVLDTFRGTLLSTYNVTPVSCNSTLEASFSPEGMFIISGSGEGSIYAWSVRSGKEVASWRSATSDTGPPVIKWAPGSLMFATGSSELSFWVPDLSKLGSYVGRK

SEQ ID NO: 57394 - DNA, 868 bp, Glycine max
  misc_feature (1)..(868): Ceres Seq. ID no. 13594241
atatcgatcccaagcctccctccgtagccagttagttctcatttctaatattgcttccaaaatctctctctctctctctctctggggggtatgtgtgttgttcagtacaactagttttggtatagctagctgctcttcatttgattttgctcgcagtcgcagctccaatccaaatatggaggcgatcactgcttccttagagaggtctcttcaaaactgttccttaaacaataccaacaacaaccatcagcagagcaggaggccggaagaagatgatgggtcagctacagatggaggcataggaatctcatcctgctcagacgatgtcccggacccggataatagtcatatctccgacaccactttagagctcaactcccacatctcactcccttatcattgggagcaatgcctagatttaaagacgggggaaatatattacattaactggaggaacgggatgaaagcaaaggaggatccaagaagcaggagggcagattatagtgtaagtagggattgtgagtccgaagaagaagaagaagaagagagctggtacgacagcgaagagtcttcatcggagtcatgcccttcttcatccaaagagcactatgatgagggacaggtagagaaacagaataacaatgttctggtggtggctgggtgcaagggctgtctcatgtatttcatggtgcccaaacaggttgaagactgcccaaaatgtactggtcaactcctccacttcgatcgatccgaaaatggctctccatgattaattcccactcctcttttctccttgtgtttccttcttcgcttctcttttctttttgctgtgactgtcaaattaaactatagttctctctttttttgt

SEQ ID NO: 57395 - protein, 255 aa, Glycine max
  peptide (1)..(255): Ceres Seq. ID no. 13594242
YRSQASLRSQLVLISNIASKISLSLSLWGVCVLFSTTSFGIASCSSFDFARSRSSNPNMEAITASLERSLQNCSLNNTNNNHQQSRRPEEDDGSATDGGIGISSCSDDVPDPDNSHISDTTLELNSHISLPYHWEQCLDLKTGEIYYINWRNGMKAKEDPRSRRADYSVSRDCESEEEEEEESWYDSEESSSESCPSSSKEHYDEGQVEKQNNNVLVVAGCKGCLMYFMVPKQVEDCPKCTGQLLHFDRSENGSP

SEQ ID NO: 57396 - protein, 197 aa, Glycine max
  peptide (1)..(197): Ceres Seq. ID no. 13594243
MEAITASLERSLQNCSLNNTNNNHQQSRRPEEDDGSATDGGIGISSCSDDVPDPDNSHISDTTLELNSHISLPYHWEQCLDLKTGEIYYINWRNGMKAKEDPRSRRADYSVSRDCESEEEEEEESWYDSEESSSESCPSSSKEHYDEGQVEKQNNNVLVVAGCKGCLMYFMVPKQVEDCPKCTGQLLHFDRSENGSP

SEQ ID NO: 57397 - DNA, 1361 bp, Glycine max
  misc_feature (1)..(1361): Ceres Seq. ID no. 14316507
gatagcgcttacagtaagaggtgagaaagagagacaaatcggcagaagcaaggaggctgagagcgagagagcaactgcacgcactgtaactcctaacttcccagatcgtcttcttcctcttttctctccggtgattgttggaactcagagagcttctttgatggaacaggttagtaaaacgcactgcgttttgaagcttcactttcacttttgagtttcgattctttccctctactctgcgtatgtgtgcgttttgtgaatttctgcagtacgagaaggttgagaagataggcgaaggaacatacggcgtcgtttacaagggtcgcgaccgcgtcaccaacgagaccatcgcgttgaagaagattcgcctcgagcaggaggatgagggggttcccagcaccgccattcgcgagatttctctcttgaaagaaatgcagcacaggaacattgttaggttgcaggatgtagtgcacgatgagaagagtttgtatctggtttttgagtaccttgacttagatctaaagaagcacatggattcatctccagaatttgcaaaagatccacgacaagtaaaaatgttcctgtaccaaattctctgtggcattgcatactgtcattcacatagagttcttcatcgagacttaaaaccacagaatttgttgatagatcgcagcactaatgcactgaaacttgcagattttggattggccagggcttttggaattcctgttaggacatttacacatgaggtggtaacactgtggtacagagctccggaaattttgcttggatcccgtcagtattctaccccagttgatatttggtcagtgggatgcatatttgcagagatggtaaatcaacgaccacttttccctggggactctgagattgatgaattgtttaaaatattcagaatcatgggtacaccaaatgaagatacatggcctggagtgacatcattgccagattttaaatcagcctttcccaaatggcaacctaaggacctgaaaaatgtggttccaaatcttgagccagctggtcttgatcttctttctagcatgctttacttggatcccagcaaaagaattactgctaggagcgctcttgagcatgaatacttcaaagacattaaatttgtaccctgatttcttatcttcaaggctgaggtgtcttattagtatgtgtagcatttatgggttttgactcaaacgcgtgttgtccttgcttttttcttcaatgcttttggaccgaatcatatttcatttatttgttcttacatttttatttagtatgtgtgatcttgttacctatttacccgtttaatgtattagtctcgatgcaatgcaactagcaaatttcag

SEQ ID NO: 57398 - protein, 300 aa, Glycine max
  peptide (1)..(300): Ceres Seq. ID no. 14316508
MCAFCEFLQYEKVEKIGEGTYGVVYKGRDRVTNETIALKKIRLEQEDEGVPSTAIREISLLKEMQHRNIVRLQDVVHDEKSLYLVFEYLDLDLKKHMDSSPEFAKDPRQVKMFLYQILCGIAYCHSHRVLHRDLKPQNLLIDRSTNALKLADFGLARAFGIPVRTFTHEVVTLWYRAPEILLGSRQYSTPVDIWSVGCIFAEMVNQRPLFPGDSEIDELFKIFRIMGTPNEDTWPGVTSLPDFKSAFPKWQPKDLKNVVPNLEPAGLDLLSSMLYLDPSKRITARSALEHEYFKDIKFVP

SEQ ID NO: 57399 - protein, 237 aa, Glycine max
  peptide (1)..(237): Ceres Seq. ID no. 14316509
MQHRNIVRLQDVVHDEKSLYLVFEYLDLDLKKHMDSSPEFAKDPRQVKMFLYQILCGIAYCHSHRVLHRDLKPQNLLIDRSTNALKLADFGLARAFGIPVRTFTHEVVTLWYRAPEILLGSRQYSTPVDIWSVGCIFAEMVNQRPLFPGDSEIDELFKIFRIMGTPNEDTWPGVTSLPDFKSAFPKWQPKDLKNVVPNLEPAGLDLLSSMLYLDPSKRITARSALEHEYFKDIKFVP

SEQ ID NO: 57400 - protein, 204 aa, Glycine max
  peptide (1)..(204): Ceres Seq. ID no. 14316510
MDSSPEFAKDPRQVKMFLYQILCGIAYCHSHRVLHRDLKPQNLLIDRSTNALKLADFGLARAFGIPVRTFTHEVVTLWYRAPEILLGSRQYSTPVDIWSVGCIFAEMVNQRPLFPGDSEIDELFKIFRIMGTPNEDTWPGVTSLPDFKSAFPKWQPKDLKNVVPNLEPAGLDLLSSMLYLDPSKRITARSALEHEYFKDIKFVP

SEQ ID NO: 57401 - DNA, 1395 bp, Glycine max
  misc_feature (1)..(1395): Ceres Seq. ID no. 14314212
ctaatcgaaaaaaaaatgcctcctcctcttccatctctctgcaacttcaacttggcgatactcttcctcttcctcacacccactttccaaatccccctcatagccccaatctcaaaagacgacaccacccaactctacactctctccgtgttcctgaaaaccccactccaacccacaaaactccacctccaccttggctcctccctcagctgggtcctctgcgactccacctacacctcctcctcctcccaccacatcccctgcaacacccctctctgcaactccttcccctccaacgcatgctccaacaactcctccctctgcgccctcttccccgaaaaccccgtcacaagaaacaccctcctggacaccgccctcatcgattccctcgctcttcccacctacgacgcttcctcctctctcgtcctcatctccgacttcatcttctcctgcgccacggcccatcttctccagggcctcgccgccaatgcattgggcctcgcctcattgggccggtccaactactccctcccggcccaaatcagcacttcattaacctcacctcgttctttcactctctgcctgccagcttcatcagccaacacaggggcagctatattcgcctccactgcctcctcatttcttttctcttccaaaattgaccttacttacacacaactcatcgtaaaccccgttgccgacaccgtcgtcaccgacaatccacaaccgtctgatgagtatttcataaacttaacctcaatcaaaatcaacggtaagcctctttatatcaactcctccatcctcaccgttgatcagaccggcttcggtgggaccaagataagcactgcggaaccctacactgttttagaaacttctatttacagactatttgttcagcgttttgtgaacgagtcctctgcttttaacttgacggtgacggaagcagttgagccgtttggcgtgtgctaccctgcgggggatctcacggagacacgagttggacccgcggtgcccaccgttgatctggtgatgcacagcgaggacgtgttctggagaatctttggcgggaattcgatggtgagggttgcgaagggaggagtggatgtgtggtgtttgggttttgtggacggtgggacccgcgggagaactcccattgtaatcggagggcatcagttggaggataatttaatgcagtttgatcttgactcaaatagattcggtttcacttcgactctcttgcttcaggatgccaaatgttctaatctcaaggtcaataattttgcaaatggaattaaataaattccaattcaaaaaatatgtataggtaatttgattgtttctattttttctgtaacactattacctgttttattacatgttgtaatcaaatgttcc

SEQ ID NO: 57402 - protein, 432 aa, Glycine max
  peptide (1)..(432): Ceres Seq. ID no. 14314213
LIEKKMPPPLPSLCNFNLAILFLFLTPTFQIPLIAPISKDDTTQLYTLSVFLKTPLQPTKLHLHLGSSLSWVLCDSTYTSSSSHHIPCNTPLCNSFPSNACSNNSSLCALFPENPVTRNTLLDTALIDSLALPTYDASSSLVLISDFIFSCATAHLLQGLAANALGLASLGRSNYSLPAQISTSLTSPRSFTLCLPASSANTGAAIFASTASSFLFSSKIDLTYTQLIVNPVADTVVTDNPQPSDEYFINLTSIKINGKPLYINSSILTVDQTGFGGTKISTAEPYTVLETSIYRLFVQRFVNESSAFNLTVTEAVEPFGVCYPAGDLTETRVGPAVPTVDLVMHSEDVFWRIFGGNSMVRVAKGGVDVWCLGFVDGGTRGRTPIVIGGHQLEDNLMQFDLDSNRFGFTSTLLLQDAKCSNLKVNNFANGIK

SEQ ID NO: 57403 - protein, 427 aa, Glycine max
  peptide (1)..(427): Ceres Seq. ID no. 14314214
MPPPLPSLCNFNLAILFLFLTPTFQIPLIAPISKDDTTQLYTLSVFLKTPLQPTKLHLHLGSSLSWVLCDSTYTSSSSHHIPCNTPLCNSFPSNACSNNSSLCALFPENPVTRNTLLDTALIDSLALPTYDASSSLVLISDFIFSCATAHLLQGLAANALGLASLGRSNYSLPAQISTSLTSPRSFTLCLPASSANTGAAIFASTASSFLFSSKIDLTYTQLIVNPVADTVVTDNPQPSDEYFINLTSIKINGKPLYINSSILTVDQTGFGGTKISTAEPYTVLETSIYRLFVQRFVNESSAFNLTVTEAVEPFGVCYPAGDLTETRVGPAVPTVDLVMHSEDVFWRIFGGNSMVRVAKGGVDVWCLGFVDGGTRGRTPIVIGGHQLEDNLMQFDLDSNRFGFTSTLLLQDAKCSNLKVNNFANGIK

SEQ ID NO: 57404 - protein, 219 aa, Glycine max
  peptide (1)..(219): Ceres Seq. ID no. 14314215
NRKKNASSSSISLQLQLGDTLPLPHTHFPNPPHSPNLKRRHHPTLHSLRVPENPTPTHKTPPPPWLLPQLGPLRLHLHLLLLPPHPLQHPSLQLLPLQRMLQQLLPLRPLPRKPRHKKHPPGHRPHRFPRSSHLRRFLLSRPHLRLHLLLRHGPSSPGPRRQCIGPRLIGPVQLLPPGPNQHFINLTSFFHSLPASFISQHRGSYIRLHCLLISFLFQN

SEQ ID NO: 57405 - DNA, 1380 bp, Glycine max
  misc_feature (1)..(1380): Ceres Seq. ID no. 15177022
actaaaatacactaattgcctctctctttccctttcttcttcttctccgtcttcttcacactgagttgactgagtcttcgtaactcgctctctactgtctcagctactcatcgcattctctgcatttatcctccgatcacattttctctctcttcgttcgactatagctgacagggatgtcggagaaagctcttagggatctcaatacaattcttggaactgaaaggaagaatgaggactccagtaaggcatgtttatccaagccttctgttgacaatgctgttgaaaatattgaagaatggcaaaagaaaaataatagtccctccttggtttctccagctgttaatggaaatctggctgtgactgctaattctggtgcggaggttgtaaatccagaagtagaatatattgaatctgagaacttgaatgatgtagacgatattgatacttgtctcaagaccctattagctggacttgactcaaaggattgggtcctggtttgtgacacactgaataacgtacgtcgattgtctatatttcataaggaagcaatgcttgatatgctgggggatgtgatcacatctattgcaaagtcactgaaaagtcctagaagtgctgtttgcaaaactgccattatgacatctgcagacattttcagtgcatataatgatcttataatagattcattggaccctctgctagtacaacttcttctcaagtcttcacaagacaaacgctttgtatgtgaggcagctgaaaaagccttgatatcaatgactatttggatttcccctatttctttattgccaaaattgcaaccataccttaagaacaagaatcctcgtatccgtgcaaaagcatcaatgtgcttttctcggagtgttcctcagctgggtgcagaaggcataaagacatatgggattgacaaattgatccaagtagctgcatctcagttgagtgaccagctcccagagtccagggaagcggcccgaactctacttctcgagcttcaaaatgtgtatgagaaatctcatgatctcatcaagccagctactcctactgtcaataatgagcatactgtgaatgaggagaatccagaggtgagttcttgggaaagcttctgtcagtcaaaactttctcctcttagtgctcaagctgtacttcgtgtaaccaccagtatcgctcgggagggtcttgtttcatgacacgcacattaaacctcactttgcggctttcatcatttccttgtttgcttatcattttcttctgtaaatacagtgcgacaattgagatgattgagttgagttgtcgtcgaagcacgtattgagcccaagatttataatgtgtattctattattttccccctagctgttgttacct

SEQ ID NO: 57406 - protein, 342 aa, Glycine max
  peptide (1)..(342): Ceres Seq. ID no. 15177023
MSEKALRDLNTILGTERKNEDSSKACLSKPSVDNAVENIEEWQKKNNSPSLVSPAVNGNLAVTANSGAEVVNPEVEYIESENLNDVDDIDTCLKTLLAGLDSKDWVLVCDTLNNVRRLSIFHKEAMLDMLGDVITSIAKSLKSPRSAVCKTAIMTSADIFSAYNDLIIDSLDPLLVQLLLKSSQDKRFVCEAAEKALISMTIWISPISLLPKLQPYLKNKNPRIRAKASMCFSRSVPQLGAEGIKTYGIDKLIQVAASQLSDQLPESREAARTLLLELQNVYEKSHDLIKPATPTVNNEHTVNEENPEVSSWESFCQSKLSPLSAQAVLRVTTSIAREGLVS

SEQ ID NO: 57407 - protein, 217 aa, Glycine max
  peptide (1)..(217): Ceres Seq. ID no. 15177024
MLDMLGDVITSIAKSLKSPRSAVCKTAIMTSADIFSAYNDLIIDSLDPLLVQLLLKSSQDKRFVCEAAEKALISMTIWISPISLLPKLQPYLKNKNPRIRAKASMCFSRSVPQLGAEGIKTYGIDKLIQVAASQLSDQLPESREAARTLLLELQNVYEKSHDLIKPATPTVNNEHTVNEENPEVSSWESFCQSKLSPLSAQAVLRVTTSIAREGLVS

SEQ ID NO: 57408 - protein, 214 aa, Glycine max
  peptide (1)..(214): Ceres Seq. ID no. 15177025
MLGDVITSIAKSLKSPRSAVCKTAIMTSADIFSAYNDLIIDSLDPLLVQLLLKSSQDKRFVCEAAEKALISMTIWISPISLLPKLQPYLKNKNPRIRAKASMCFSRSVPQLGAEGIKTYGIDKLIQVAASQLSDQLPESREAARTLLLELQNVYEKSHDLIKPATPTVNNEHTVNEENPEVSSWESFCQSKLSPLSAQAVLRVTTSIAREGLVS

SEQ ID NO: 57409 - DNA, 1540 bp, Glycine max
  misc_feature (1)..(1540): Ceres Seq. ID no. 13582534
aaaattttgcacaacaggttatgaaaatccacgagaagcaaccggtcgctgcctgtggatattgaggttccacaagtggtacttcctaatccggatcagcaactttcggatgatggcagcaccttggtttctaacggcggaacctttgagttgggtttcttcaatcccgggagttccaataaccgctatgtcggaatctggtacaaaaaaatctctattaaaacagtagtttgggttgccaaccgtgacaacccaatagtcagacacaactcaagcaagctggtcataaggcaagagggaaacctcgtactcctcagcaacaacaaccagtctcttctttggactacaaatgtaacaaaaaaggcttcgagttcgagtccaattgtgcaactcttggacactggaaacttggtaattaaagatggtatcaacgaagagagtgtttttctgtggcaaagctttgaccatccttgtgacacgctattgtcgggaatgaagcttgggtgggacttaagaactgggcttaaccggcgtcttacttcttggaaaagctgggatgatccgtcttcgggagacattgtttgggaggtagtgataggaaacaatcctgaattggtcatgtggaagagtaaagttgactactttaggactgggccttatactgggaatatgttcagtggagtatatgcgccgaggaataacccactttataattggaaatttgtgagtaacaaagatgaagtgtatttccaatacaccttgagtaatagttttgtggtttctataattgttttgaaccaaacccttaatcttcgtcaacgcctcacttggattcccgataccaagacttggacggtttaccaatccttgccactagatagttgtgatgtttataacacttgtgggccaaatggaaattgcatcattgctgggtcgccaatttgccagtgcttagacgggttcaagccgaaatcgccccaacagtggaacgcaatggattggaggcaagggtgtgtgcgcagtgaagagtggagttgtggggtaaaaaataaggatggttttcaaagacttgctagtatgaaactgccaaacactacattttcttgggttaacgaaagtataacacttgaggagtgtagggccaaatgtttggaaaactgttcgtgcacagcttattcgaacttggacacaaggggaggaggtagtgggtgctccatttgggttggtgaacttgttgacatgagagatgtaaaaagcggacaagatttatatgttcgaatagccacttcggatccagatggtaaacatgagcgtcaaaaaaaggtaatcttggtggttgcgatcactgtttcgctggtccttgtgatgttattagcattctgtgtttacatgatcaagaaaaaatataaaggtgagtttcttacctagaaatcttttttatttcacatacattttaaaatttaagagaacacctacaatgtcataaatagaatatttacgcacttgtgaatctcataaattcattcttcatgtttttctc

SEQ ID NO: 57410 - protein, 311 aa, Glycine max
  peptide (1)..(311): Ceres Seq. ID no. 13582535
MKLGWDLRTGLNRRLTSWKSWDDPSSGDIVWEVVIGNNPELVMWKSKVDYFRTGPYTGNMFSGVYAPRNNPLYNWKFVSNKDEVYFQYTLSNSFVVSIIVLNQTLNLRQRLTWIPDTKTWTVYQSLPLDSCDVYNTCGPNGNCIIAGSPICQCLDGFKPKSPQQWNAMDWRQGCVRSEEWSCGVKNKDGFQRLASMKLPNTTFSWVNESITLEECRAKCLENCSCTAYSNLDTRGGGSGCSIWVGELVDMRDVKSGQDLYVRIATSDPDGKHERQKKVILVVAITVSLVLVMLLAFCVYMIKKKYKGEFLT

SEQ ID NO: 57411 - protein, 269 aa, Glycine max
  peptide (1)..(269): Ceres Seq. ID no. 13582536
MWKSKVDYFRTGPYTGNMFSGVYAPRNNPLYNWKFVSNKDEVYFQYTLSNSFVVSIIVLNQTLNLRQRLTWIPDTKTWTVYQSLPLDSCDVYNTCGPNGNCIIAGSPICQCLDGFKPKSPQQWNAMDWRQGCVRSEEWSCGVKNKDGFQRLASMKLPNTTFSWVNESITLEECRAKCLENCSCTAYSNLDTRGGGSGCSIWVGELVDMRDVKSGQDLYVRIATSDPDGKHERQKKVILVVAITVSLVLVMLLAFCVYMIKKKYKGEFLT

SEQ ID NO: 57412 - protein, 252 aa, Glycine max
  peptide (1)..(252): Ceres Seq. ID no. 13582537
MFSGVYAPRNNPLYNWKFVSNKDEVYFQYTLSNSFVVSIIVLNQTLNLRQRLTWIPDTKTWTVYQSLPLDSCDVYNTCGPNGNCIIAGSPICQCLDGFKPKSPQQWNAMDWRQGCVRSEEWSCGVKNKDGFQRLASMKLPNTTFSWVNESITLEECRAKCLENCSCTAYSNLDTRGGGSGCSIWVGELVDMRDVKSGQDLYVRIATSDPDGKHERQKKVILVVAITVSLVLVMLLAFCVYMIKKKYKGEFLT

SEQ ID NO: 57413 - DNA, 915 bp, Glycine max
  misc_feature (1)..(915): Ceres Seq. ID no. 15173851
gtaagggagtgtttggttacttctgagattcttctgttcctaagagagagagagagcgatgacggtagcagcaggaatcggttacgctctggtagcactaggaccctctctctccctcttcgtttccgtcatttccaaaaaacccttcctcattctcacagttctctccagtacgttgttgtggcttattagtttgattgtgctgtctggaatatggaggggggttttgcctctcagcacaacagcttcgtggccttttggaatactcattttctcatctgttgcttttcaagaagccctcagacttttcttctggaaaatatataagaggttagaagacatgttagatgcctttgctgacagagtatcaaaaccacatcttcacctgacagataagatgctgattgctctggctggtgggttgggtcatggtgttgcccatgctgtgttcttctgcatcagcctattaactcctgcatttggtccagcaacgtatttcgttgaccgctgttcaagagttccatttttccttctttctgcaattattgctcttgcatttgtcataatccacactttctcaatggtcatcgcatttaacgggtatacagaggggaacaaagtggatcaatattttgttcccatcgttcacgttgttgctggaatggtgactctggtgaatttggcgcctggcggttgtgctgttggcattcctcttctttatttggttgcaatcttgaccttgattcattgtgggaggatggtttggagaaaattgacagaaaacccaatcaggccagttcactcatagtaactgataatctttgtaaaaaatctcatctatagtttcttggtgcttgccattcctgttggaatacataaagataccgaaagttataatgcacaaaagtttttcct

SEQ ID NO: 57414 - protein, 249 aa, Glycine max
  peptide (1)..(249): Ceres Seq. ID no. 15173852
MTVAAGIGYALVALGPSLSLFVSVISKKPFLILTVLSSTLLWLISLIVLSGIWRGVLPLSTTASWPFGILIFSSVAFQEALRLFFWKIYKRLEDMLDAFADRVSKPHLHLTDKMLIALAGGLGHGVAHAVFFCISLLTPAFGPATYFVDRCSRVPFFLLSAIIALAFVIIHTFSMVIAFNGYTEGNKVDQYFVPIVHVVAGMVTLVNLAPGGCAVGIPLLYLVAILTLIHCGRMVWRKLTENPIRPVHS

SEQ ID NO: 57415 - protein, 155 aa, Glycine max
  peptide (1)..(155): Ceres Seq. ID no. 15173853
MLDAFADRVSKPHLHLTDKMLIALAGGLGHGVAHAVFFCISLLTPAFGPATYFVDRCSRVPFFLLSAIIALAFVIIHTFSMVIAFNGYTEGNKVDQYFVPIVHVVAGMVTLVNLAPGGCAVGIPLLYLVAILTLIHCGRMVWRKLTENPIRPVHS

SEQ ID NO: 57416 - protein, 136 aa, Glycine max
  peptide (1)..(136): Ceres Seq. ID no. 15173854
MLIALAGGLGHGVAHAVFFCISLLTPAFGPATYFVDRCSRVPFFLLSAIIALAFVIIHTFSMVIAFNGYTEGNKVDQYFVPIVHVVAGMVTLVNLAPGGCAVGIPLLYLVAILTLIHCGRMVWRKLTENPIRPVHS

SEQ ID NO: 57417 - DNA, 1324 bp, Glycine max
  misc_feature (1)..(1324): Ceres Seq. ID no. 15171777
gaactgggatctaactctcattctctttctctctctcagttgtcagtacttaaaaatcattgtccttgagtctctgcacactgcacacagcacacagcacacatcgtcgtcgtaatcatcatcatctccctttctgaaacttttgtcatcatgagagtgcgagccaaaccctgttatcagccttaaagcgaaacagtgagagagatagagacaccactttgcatgagaacgatatcactatcacatctcatcatcttattctaccatggccttcctaccttctcacggtttcacgtttaacactactcatgaagaagatcactgccacttccctccaacctctctcgacgccttcccctctttgccaccccagcactttcaagggggtgcacctttcatgttgaagcggtccatgtcgttatcaggcatagagaacaagtgcaatgaagtacatggagatgatgagttatccgatgatggggtcttccagagtggggagaagaagaagaggttgaatttggaacaggtgaaggcccttgagaagagttttgatcaggggaacaaacttgagccagaaaggaaagtgcagttagctaaggctttggggttgcagccaagacaagttgccatatggtttcagaatagaagggctagatggaaaaccaagcaattggagaaagaatatgaagtcctcaagaagcagtttgaagcagtcaaggctgataatgatgttcttaaggttcggaaccagaaactacaggcagagttacaagctgtaaaaagtagggattgttgtgaagctggaataatcagccttaagaaagaaactgagggttcatggagcaatggaagtgataacaactcagatctaaatttagatccctcaagagcactaggtttgaacagtcctatatcttctcataacattaaaaacctactaccaaattcgttaaagccaaacagcataacccaactccttcaagatgatggcttgtgcaacatgtttcacaacattgatgcaccacagaacttttggcccaggcctgatcagcaccaccagcgtttccattgaccctatataagtgatttttggatattaattaatgatatgatatgaggacaaattatacaatacaatcttttttattcagttttttttttccgatttatttatgtgcagtagattggtgtataaagtttgagcaaattaaatctgctattagagtcatgaggagtcggtggactttgagcagtgtaatttctttcctatatgtatacattattgtattacagaataatataaaataatatttaagttaggccg

SEQ ID NO: 57418 - protein, 268 aa, Glycine max
  peptide (1)..(268): Ceres Seq. ID no. 15171778
MAFLPSHGFTFNTTHEEDHCHFPPTSLDAFPSLPPQHFQGGAPFMLKRSMSLSGIENKCNEVHGDDELSDDGVFQSGEKKKRLNLEQVKALEKSFDQGNKLEPERKVQLAKALGLQPRQVAIWFQNRRARWKTKQLEKEYEVLKKQFEAVKADNDVLKVRNQKLQAELQAVKSRDCCEAGIISLKKETEGSWSNGSDNNSDLNLDPSRALGLNSPISSHNIKNLLPNSLKPNSITQLLQDDGLCNMFHNIDAPQNFWPRPDQHHQRFH

SEQ ID NO: 57419 - protein, 224 aa, Glycine max
  peptide (1)..(224): Ceres Seq. ID no. 15171779
MLKRSMSLSGIENKCNEVHGDDELSDDGVFQSGEKKKRLNLEQVKALEKSFDQGNKLEPERKVQLAKALGLQPRQVAIWFQNRRARWKTKQLEKEYEVLKKQFEAVKADNDVLKVRNQKLQAELQAVKSRDCCEAGIISLKKETEGSWSNGSDNNSDLNLDPSRALGLNSPISSHNIKNLLPNSLKPNSITQLLQDDGLCNMFHNIDAPQNFWPRPDQHHQRFH

SEQ ID NO: 57420 - protein, 219 aa, Glycine max
  peptide (1)..(219): Ceres Seq. ID no. 15171780
MSLSGIENKCNEVHGDDELSDDGVFQSGEKKKRLNLEQVKALEKSFDQGNKLEPERKVQLAKALGLQPRQVAIWFQNRRARWKTKQLEKEYEVLKKQFEAVKADNDVLKVRNQKLQAELQAVKSRDCCEAGIISLKKETEGSWSNGSDNNSDLNLDPSRALGLNSPISSHNIKNLLPNSLKPNSITQLLQDDGLCNMFHNIDAPQNFWPRPDQHHQRFH

SEQ ID NO: 57421 - DNA, 2018 bp, Glycine max
  misc_feature (1)..(2018): Ceres Seq. ID no. 14314404
acatttctcactctcgtctcgaagatcgagatatctatttagatctcagaaaaacagtgtttcatttcaattcattcagtcttattattattagggtttggcgattcagagagaaagagaaatgggagaacgaaaaggaatcccaattgctctggggctcttggcgatgctcctcttcttcattgcttcttcctcttcctctcacctcgttcgtgcttccgatgacgccgacgacgcgatcttctacgagtcattcgacgaggattttgacggacggtggattgtgtccgacaacgaggattacaacggtgtctggaagcatgctaagagtgatgggcatgatgattatggacttcttattagtgaacaagcccggaaatatgctatagtcaaaaaacttgacgagcctgtcagtcttaaggatggaacagttgttcttcagtttgagactcgccttcagaatggcctcgaatgtggtggcgcatatattaaatatcttcgaccccaggagagcggatggaaaccaaaggaatttgataacgaatctccatattctatcatgtttggtcctgataagtgtggtgctacaaacaaggtgcacttcattttcaagcataagaatccaaagagtggggagtatgttgaacaccatctcaagtatcctccttctgtcccatctgacaaactaactcatgtatacactgcaattctgaagcccgataatgaattgcaaattttgattgatggtgaggagaagaaaaaggcaaatttcttgtcttctgaggactttgagcctcctcttatcccttccaagacaatccctgatcctgatgataagaaacctgaggactgggacgaaagagccaaaatcccggacccaagtgctgtgaagccagatgactgggatgaggatgcacccatggaaattttagatgaagaagcagagaaacctgaaggatggttggatgacgagccagaggaaattgatgacccagaggcgacaaaacccgaagactgggatgatgaggaggatggtgaatgggaagccccaaagattgaaaacccgaagtgtgaggcagcccctggttgtggtgaatggaagaggccaatgaagaggaatccagcttataagggaaagtggagtgctccttacatcgataaccccaattacaagggcatatggaagcctcgcgagattccaaaccctgaatactttgaactcgagaaacctgattttgagcccattgctgctcttggcattgagatttggacaatgcaggatggcatcctatttgacaatattctgatagctaacgatgataaagttgcagaatcctatcgggagaccacatggaagcccaagtttaccattgagaaagaaaaacagaaggctgaagatgaggctgcaactggttcagatggtattgcaggcttccagaagaaggtatttgacctcttgtacaagattgcagacattcccttcctgagcgaccacaaatctaagatatacgatctcattgagaaagctgagaaacagccaaatctcactattggaattcttgtagcggttgtggttgtcttcgtgtcaattttcttcaggctcatatttggtggcaagaaacctgcaaaggtggagaagaaaccagaacgcacagaagcttccaataaccaaggtggtgcagagaatgaagaaaacaaagagaaagaggaagcatctaatgctccgcgtcggaggccaaggcgagaagattgaaatggttgaatcttttaaatggcgccctgtcaactatcatcaccacagctacagataaattttgggctttagtttcattttaggtgcactctgttttcattcgtttccttttttccctttttttttaagaaaaagaaaagattatttgcttcaggggtgtagatcttctcctgtttttggagacttgagtgtttgagctagtagttgaagttgtacaattattttttgtctttatttttctattaatggatcctgtttttaacac

SEQ ID NO: 57422 - protein, 543 aa, Glycine max
  peptide (1)..(543): Ceres Seq. ID no. 14314405
MGERKGIPIALGLLAMLLFFIASSSSSHLVRASDDADDAIFYESFDEDFDGRWIVSDNEDYNGVWKHAKSDGHDDYGLLISEQARKYAIVKKLDEPVSLKDGTVVLQFETRLQNGLECGGAYIKYLRPQESGWKPKEFDNESPYSIMFGPDKCGATNKVHFIFKHKNPKSGEYVEHHLKYPPSVPSDKLTHVYTAILKPDNELQILIDGEEKKKANFLSSEDFEPPLIPSKTIPDPDDKKPEDWDERAKIPDPSAVKPDDWDEDAPMEILDEEAEKPEGWLDDEPEEIDDPEATKPEDWDDEEDGEWEAPKIENPKCEAAPGCGEWKRPMKRNPAYKGKWSAPYIDNPNYKGIWKPREIPNPEYFELEKPDFEPIAALGIEIWTMQDGILFDNILIANDDKVAESYRETTWKPKFTIEKEKQKAEDEAATGSDGIAGFQKKVFDLLYKIADIPFLSDHKSKIYDLIEKAEKQPNLTIGILVAVVVVFVSIFFRLIFGGKKPAKVEKKPERTEASNNQGGAENEENKEKEEASNAPRRRPRRED

SEQ ID NO: 57423 - protein, 528 aa, Glycine max
  peptide (1)..(528): Ceres Seq. ID no. 14314406
MLLFFIASSSSSHLVRASDDADDAIFYESFDEDFDGRWIVSDNEDYNGVWKHAKSDGHDDYGLLISEQARKYAIVKKLDEPVSLKDGTVVLQFETRLQNGLECGGAYIKYLRPQESGWKPKEFDNESPYSIMFGPDKCGATNKVHFIFKHKNPKSGEYVEHHLKYPPSVPSDKLTHVYTAILKPDNELQILIDGEEKKKANFLSSEDFEPPLIPSKTIPDPDDKKPEDWDERAKIPDPSAVKPDDWDEDAPMEILDEEAEKPEGWLDDEPEEIDDPEATKPEDWDDEEDGEWEAPKIENPKCEAAPGCGEWKRPMKRNPAYKGKWSAPYIDNPNYKGIWKPREIPNPEYFELEKPDFEPIAALGIEIWTMQDGILFDNILIANDDKVAESYRETTWKPKFTIEKEKQKAEDEAATGSDGIAGFQKKVFDLLYKIADIPFLSDHKSKIYDLIEKAEKQPNLTIGILVAVVVVFVSIFFRLIFGGKKPAKVEKKPERTEASNNQGGAENEENKEKEEASNAPRRRPRRED

SEQ ID NO: 57424 - protein, 397 aa, Glycine max
  peptide (1)..(397): Ceres Seq. ID no. 14314407
MFGPDKCGATNKVHFIFKHKNPKSGEYVEHHLKYPPSVPSDKLTHVYTAILKPDNELQILIDGEEKKKANFLSSEDFEPPLIPSKTIPDPDDKKPEDWDERAKIPDPSAVKPDDWDEDAPMEILDEEAEKPEGWLDDEPEEIDDPEATKPEDWDDEEDGEWEAPKIENPKCEAAPGCGEWKRPMKRNPAYKGKWSAPYIDNPNYKGIWKPREIPNPEYFELEKPDFEPIAALGIEIWTMQDGILFDNILIANDDKVAESYRETTWKPKFTIEKEKQKAEDEAATGSDGIAGFQKKVFDLLYKIADIPFLSDHKSKIYDLIEKAEKQPNLTIGILVAVVVVFVSIFFRLIFGGKKPAKVEKKPERTEASNNQGGAENEENKEKEEASNAPRRRPRRED

SEQ ID NO: 57425 - DNA, 1780 bp, Glycine max
  misc_feature (1)..(1780): Ceres Seq. ID no. 15177043
ctctctgaactctgaacaccgaaaatccgccatggattttcgcatctatggcgtcacgatccttctcttcctcttcccaaccctcacattctcaatctcacagggtcagataaactcaaactcaatccttgtcgctctgttggactcccattacaccgaactcgctgagcttgtggaaaaagccatgcttttgcagactctggagaacactgtcatgaacaacagcaacaacatcacaatcttcgctcccagaaacgaagccctcgaacgcgatctcgaccccgatttcaagcgtttcctcctcgaaccccgcaatctccattccctccaaaccctcctgttgtcccacatcgtccccaaaagaatcaccaaacccgaattcaaaaccgggtcgacccgacacagaactttagcgtctcaccaccacctcactctccaagccctgaatttgactcactggaatgttgagtcttcccgggttattaacccgaattcggtaacccgacccgacggagtgatccacggcatcgacactctcctcatccctcgctcagtccaagacgaattcaaccgtcgccggaatctgatctccatcgccgcggtaaaacccgaaccatccccggaggtcgacccgcgaacccaccggttaaagaaaccggcgccggcatcgccggcgggggccccgccggcgctcccgatctacgacgcgatggcgccggggccatcgcttgcaccggcgccagcgccgggtccgggtgggtctcacaagcacttcaatggggaaaagcaagtaaaagatttcatcgagacgttactccactacggcggctacaacgagatggcggatattctggtaaacctaacgtccctggcgacggagatgggaaggttggtttcggagggttacgttttgacggtgttagctcctaacgacgaggccatggcgaagttagcgacggagcaattaagtgaaccgggttcgcccgaacagattatgtactatcacttgatacccgagtatcagaccgaggagagcatgtacaatgccgtcagaaggttcgggaaggtccgttacgacacgttacggttgccgcacaaggtcacggcgcaggaggctgacggctccgttaagttcggccacggggacacgtctgcttacttgttcgaccccgatatttacacggatggacggatctccgttcagggaattgacggcgttctgtttccgcctcaggaggaagaagccgccgggcccgttacccgagcccagcccgctaaggtcgtcgtcaagcaaagaagaggaaaattgttggaaacagcatgttggatgcttggaagctttggacagaactctagattcatctcttgtcaatgaagagctcttatctggatgctagcaagactagttaagaacgaaaaccctgcacaggaaattccaaagatgtaaaaagtcaacggaatatgaaggccaggttacttgaaatgggttaatagcagcagctgctatggatttggttttcccacgtttttgtgatggtctttttttctttctccttctcgatttttcttcttgtggatttgggtcttggacttgagaacaaaagtttctcaagtctagtgaaaacaatatatagtgcaatttagattcagttaggaggttgtgttggtgggatgagaaggttttatgtaataagatggcagtgaaatctgtgcccgattcagtaagtaattttacaaaaatggaaatacagtaataatcaataaaatgattcttttctgt

SEQ ID NO: 57426 - protein, 457 aa, Glycine max
  peptide (1)..(457): Ceres Seq. ID no. 15177044
SLNSEHRKSAMDFRIYGVTILLFLFPTLTFSISQGQINSNSILVALLDSHYTELAELVEKAMLLQTLENTVMNNSNNITIFAPRNEALERDLDPDFKRFLLEPRNLHSLQTLLLSHIVPKRITKPEFKTGSTRHRTLASHHHLTLQALNLTHWNVESSRVINPNSVTRPDGVIHGIDTLLIPRSVQDEFNRRRNLISIAAVKPEPSPEVDPRTHRLKKPAPASPAGAPPALPIYDAMAPGPSLAPAPAPGPGGSHKHFNGEKQVKDFIETLLHYGGYNEMADILVNLTSLATEMGRLVSEGYVLTVLAPNDEAMAKLATEQLSEPGSPEQIMYYHLIPEYQTEESMYNAVRRFGKVRYDTLRLPHKVTAQEADGSVKFGHGDTSAYLFDPDIYTDGRISVQGIDGVLFPPQEEEAAGPVTRAQPAKVVVKQRRGKLLETACWMLGSFGQNSRFISCQ

SEQ ID NO: 57427 - protein, 447 aa, Glycine max
  peptide (1)..(447): Ceres Seq. ID no. 15177045
MDFRIYGVTILLFLFPTLTFSISQGQINSNSILVALLDSHYTELAELVEKAMLLQTLENTVMNNSNNITIFAPRNEALERDLDPDFKRFLLEPRNLHSLQTLLLSHIVPKRITKPEFKTGSTRHRTLASHHHLTLQALNLTHWNVESSRVINPNSVTRPDGVIHGIDTLLIPRSVQDEFNRRRNLISIAAVKPEPSPEVDPRTHRLKKPAPASPAGAPPALPIYDAMAPGPSLAPAPAPGPGGSHKHFNGEKQVKDFIETLLHYGGYNEMADILVNLTSLATEMGRLVSEGYVLTVLAPNDEAMAKLATEQLSEPGSPEQIMYYHLIPEYQTEESMYNAVRRFGKVRYDTLRLPHKVTAQEADGSVKFGHGDTSAYLFDPDIYTDGRISVQGIDGVLFPPQEEEAAGPVTRAQPAKVVVKQRRGKLLETACWMLGSFGQNSRFISCQ

SEQ ID NO: 57428 - protein, 396 aa, Glycine max
  peptide (1)..(396): Ceres Seq. ID no. 15177046
MLLQTLENTVMNNSNNITIFAPRNEALERDLDPDFKRFLLEPRNLHSLQTLLLSHIVPKRITKPEFKTGSTRHRTLASHHHLTLQALNLTHWNVESSRVINPNSVTRPDGVIHGIDTLLIPRSVQDEFNRRRNLISIAAVKPEPSPEVDPRTHRLKKPAPASPAGAPPALPIYDAMAPGPSLAPAPAPGPGGSHKHFNGEKQVKDFIETLLHYGGYNEMADILVNLTSLATEMGRLVSEGYVLTVLAPNDEAMAKLATEQLSEPGSPEQIMYYHLIPEYQTEESMYNAVRRFGKVRYDTLRLPHKVTAQEADGSVKFGHGDTSAYLFDPDIYTDGRISVQGIDGVLFPPQEEEAAGPVTRAQPAKVVVKQRRGKLLETACWMLGSFGQNSRFISCQ

SEQ ID NO: 57429 - DNA, 1614 bp, Glycine max
  misc_feature (1)..(1614): Ceres Seq. ID no. 14314280
aaacactagtagtctagtacattacatcacaaaaatatcatccctctttgttcctaaacacggggcactggtttcgaaccctcgttgtggttaggtcttcttcacctttcgaattttggaatccatgggtcagggaactccgggcggcatgaaccggcagggcgaccggaagccggacggcggcgacaagaaggagaagaagttcgagccgtcggctccgccggcgcgcgtggggcggaaacagcggaagcagaaaggtccggaggcggcggcgcggttgccgacagtgactccggtgacgaagtgcaaactgcggcttctgaagctggagcggatcaaggactaccttctgatggaggaggagttcgtggcgaatcaggagcgactcaagccgcaggaggagaaggccgaggaagacagatccaaggtcgatgatctccgaggctctcccatgagcgtcggaaacctcgaagagctcatcgacgagaatcacgctattgtctcctcctccgttgggcctgagtactatgtcggaatcctgtctttcgttgataaggatcagttggagcctggttgtgctattttgatgcataataaggttctttctgttgttgggcttcttcaagatgaagttgatccaatggtctctgtcatgaaggttgagaaggctcctctggaatcttatgctgacattggtggtttagatgcccaaatacaggaaattaaagaagcagttgagctacccctgacgcatcctgaactatatgaagacattggtatcaagcctcctaagggggtcattttatatggagaacctggaactgggaagacattgcttgcgaaggctgtggcaaactcaacatcagcaacattcttgcgtgttgttggtagtgaactgatacaaaagtacttgggagatggcccaaaacttgtaagagaacttttcagagttgctgatgatctttctccttctattgtattcattgatgaaattgatgcagttggtacaaaaaggtatgatgctcactcaggaggagaacgtgaaattcaaaggaccatgctagagttgctgaaccagttagatggttttgattcaagaggagatgtgaaagtgattctggcaaccaacagaattgaaagtcttgatccagctttgctacgacctggtcgaattgacaggaagatagaatttcctcttcctgatatcaaaacaaggagacgcatcttccagatacacacgtcaaggatgacattagctgatgatgtcaacttggaagaatttgttatgactaaagacgaattctccggagctgatataaaggcaatatgtactgaagctggtttacttgctctacgagaacgtcgaatgaaggtgactcatgccgactttaagaaggccaaggataaagtgatgtttaagaagaaagaaggggtgcctgaagggctgtatatgtgaaaaactatcctctattatctctggccctcttgtctttcttttaacgttctagttatgcgaacaaatgccaattcatttgtattctgcgaacaaatgtcagttgtattttaggggctttgaatctcaacaacgattttaattcaatatagttttctttc

SEQ ID NO: 57430 - protein, 443 aa, Glycine max
  peptide (1)..(443): Ceres Seq. ID no. 14314281
MGQGTPGGMNRQGDRKPDGGDKKEKKFEPSAPPARVGRKQRKQKGPEAAARLPTVTPVTKCKLRLLKLERIKDYLLMEEEFVANQERLKPQEEKAEEDRSKVDDLRGSPMSVGNLEELIDENHAIVSSSVGPEYYVGILSFVDKDQLEPGCAILMHNKVLSVVGLLQDEVDPMVSVMKVEKAPLESYADIGGLDAQIQEIKEAVELPLTHPELYEDIGIKPPKGVILYGEPGTGKTLLAKAVANSTSATFLRVVGSELIQKYLGDGPKLVRELFRVADDLSPSIVFIDEIDAVGTKRYDAHSGGEREIQRTMLELLNQLDGFDSRGDVKVILATNRIESLDPALLRPGRIDRKIEFPLPDIKTRRRIFQIHTSRMTLADDVNLEEFVMTKDEFSGADIKAICTEAGLLALRERRMKVTHADFKKAKDKVMFKKKEGVPEGLYM

SEQ ID NO: 57431 - protein, 435 aa, Glycine max
  peptide (1)..(435): Ceres Seq. ID no. 14314282
MNRQGDRKPDGGDKKEKKFEPSAPPARVGRKQRKQKGPEAAARLPTVTPVTKCKLRLLKLERIKDYLLMEEEFVANQERLKPQEEKAEEDRSKVDDLRGSPMSVGNLEELIDENHAIVSSSVGPEYYVGILSFVDKDQLEPGCAILMHNKVLSVVGLLQDEVDPMVSVMKVEKAPLESYADIGGLDAQIQEIKEAVELPLTHPELYEDIGIKPPKGVILYGEPGTGKTLLAKAVANSTSATFLRVVGSELIQKYLGDGPKLVRELFRVADDLSPSIVFIDEIDAVGTKRYDAHSGGEREIQRTMLELLNQLDGFDSRGDVKVILATNRIESLDPALLRPGRIDRKIEFPLPDIKTRRRIFQIHTSRMTLADDVNLEEFVMTKDEFSGADIKAICTEAGLLALRERRMKVTHADFKKAKDKVMFKKKEGVPEGLYM

SEQ ID NO: 57432 - protein, 367 aa, Glycine max
  peptide (1)..(367): Ceres Seq. ID no. 14314283
MEEEFVANQERLKPQEEKAEEDRSKVDDLRGSPMSVGNLEELIDENHAIVSSSVGPEYYVGILSFVDKDQLEPGCAILMHNKVLSVVGLLQDEVDPMVSVMKVEKAPLESYADIGGLDAQIQEIKEAVELPLTHPELYEDIGIKPPKGVILYGEPGTGKTLLAKAVANSTSATFLRVVGSELIQKYLGDGPKLVRELFRVADDLSPSIVFIDEIDAVGTKRYDAHSGGEREIQRTMLELLNQLDGFDSRGDVKVILATNRIESLDPALLRPGRIDRKIEFPLPDIKTRRRIFQIHTSRMTLADDVNLEEFVMTKDEFSGADIKAICTEAGLLALRERRMKVTHADFKKAKDKVMFKKKEGVPEGLYM

SEQ ID NO: 57433 - DNA, 1739 bp, Glycine max
  misc_feature (1)..(1739): Ceres Seq. ID no. 15171805
ctattcttacacggcatggatctcgtggccactctgttttagtttaatcagaagcaaaatccacaaaactaacagtgtattaaaatttctgaacctgaaaaattgttattattttgatagggtttataggaaaagcagcatacccgagttcacaaacactgaacgccgctgctccgtagtttcgatcgacgcattcttcacttcaagatatcacaatgtctataacgcacagcctcactactccactctcttcttcttcctctgctttcttagctccttcttccttcaattgcaggggacaggtttcgttgcctgtgaagagcgtgagcatttgcaaatgcgttgccacacccgaagctgagactgcctacaagacaggggtcaatcgcaatccaaatatggggaaacttcaagctggctatctctttcccgagattgctagaagaaggtctgcgcacttgctgaagtaccctgatgctaaagtaataagccttggaattggtgatacaactgaacctattcctgaagtcataactgatgcaatgtcaaagagatcacatgcattgtcgactatagaaggatacagtgggtatggagctgaacaaggtgaaaagccattaagaagggcacttgcttcaacattttacagcgatcttggcatagaagaggatgatatatttgtctcagatggagcaaagtgtgatatatctcgtctccagattgtctttgggtcaaatgtaaaaatggctgtgcaagacccttcatatccggcctatgtagactctagtgtaattatgggccagactggcctcttccagaagaatgttgagaagtttgcaaacattgaatacatgaggtgtaatccggaaaatggtttcttccctgatttgtcttcaatttctcgaccagatataatatttttctgttctccaaacaatcctactggtgctgtggcaacaagggaacaactgacccaactagttcagtttgctaaggacaatggttctatagtaatccacgattcagcttatgcaatgtatatttctggtgacaaccctcgctcaatatttgaaattcctggagccaaagaggttgccattgagacttcatcatttagcaagtatgctgggttcactggagtccgattgggttggactgtggttccgaagcagttgctgttttctgatggatttcctgttgccaaggacttcaaccgtattgtatgcacttgtttcaatggtgcttcaaatatttcccaggcaggcggtctggcttgcctttcaccagaaggtcttaaggctatgcgtgatgttattggattctacaaggaaaatactaacataataatggagacatttgattctcttgggtttaaagtctatggagggaaagatgcaccatatgtgtgggtccattttcccggccgaagctcatgggatgtattcgctgagattcttgagaagactcatgtggttacaacccctggtagtggttttggacctggtggtgaaggttttatcagggttagtgcctttggtcacagggaaaatgtcttggaggcatgcagaaggttcaagcagctatacaagtgaagttagaatatctcatttggtttcaagagttgttctcttggactgaagctagggctgtcttatttaaataatgcaattgattttccgtggagtttagattataagatgtaaagacagggtttatcaattgaggaagtatatttttct

SEQ ID NO: 57434 - protein, 458 aa, Glycine max
  peptide (1)..(458): Ceres Seq. ID no. 15171806
MSITHSLTTPLSSSSSAFLAPSSFNCRGQVSLPVKSVSICKCVATPEAETAYKTGVNRNPNMGKLQAGYLFPEIARRRSAHLLKYPDAKVISLGIGDTTEPIPEVITDAMSKRSHALSTIEGYSGYGAEQGEKPLRRALASTFYSDLGIEEDDIFVSDGAKCDISRLQIVFGSNVKMAVQDPSYPAYVDSSVIMGQTGLFQKNVEKFANIEYMRCNPENGFFPDLSSISRPDIIFFCSPNNPTGAVATREQLTQLVQFAKDNGSIVIHDSAYAMYISGDNPRSIFEIPGAKEVAIETSSFSKYAGFTGVRLGWTVVPKQLLFSDGFPVAKDFNRIVCTCFNGASNISQAGGLACLSPEGLKAMRDVIGFYKENTNIIMETFDSLGFKVYGGKDAPYVWVHFPGRSSWDVFAEILEKTHVVTTPGSGFGPGGEGFIRVSAFGHRENVLEACRRFKQLYK

SEQ ID NO: 57435 - protein, 397 aa, Glycine max
  peptide (1)..(397): Ceres Seq. ID no. 15171807
MGKLQAGYLFPEIARRRSAHLLKYPDAKVISLGIGDTTEPIPEVITDAMSKRSHALSTIEGYSGYGAEQGEKPLRRALASTFYSDLGIEEDDIFVSDGAKCDISRLQIVFGSNVKMAVQDPSYPAYVDSSVIMGQTGLFQKNVEKFANIEYMRCNPENGFFPDLSSISRPDIIFFCSPNNPTGAVATREQLTQLVQFAKDNGSIVIHDSAYAMYISGDNPRSIFEIPGAKEVAIETSSFSKYAGFTGVRLGWTVVPKQLLFSDGFPVAKDFNRIVCTCFNGASNISQAGGLACLSPEGLKAMRDVIGFYKENTNIIMETFDSLGFKVYGGKDAPYVWVHFPGRSSWDVFAEILEKTHVVTTPGSGFGPGGEGFIRVSAFGHRENVLEACRRFKQLYK

SEQ ID NO: 57436 - protein, 349 aa, Glycine max
  peptide (1)..(349): Ceres Seq. ID no. 15171808
MSKRSHALSTIEGYSGYGAEQGEKPLRRALASTFYSDLGIEEDDIFVSDGAKCDISRLQIVFGSNVKMAVQDPSYPAYVDSSVIMGQTGLFQKNVEKFANIEYMRCNPENGFFPDLSSISRPDIIFFCSPNNPTGAVATREQLTQLVQFAKDNGSIVIHDSAYAMYISGDNPRSIFEIPGAKEVAIETSSFSKYAGFTGVRLGWTVVPKQLLFSDGFPVAKDFNRIVCTCFNGASNISQAGGLACLSPEGLKAMRDVIGFYKENTNIIMETFDSLGFKVYGGKDAPYVWVHFPGRSSWDVFAEILEKTHVVTTPGSGFGPGGEGFIRVSAFGHRENVLEACRRFKQLYK

SEQ ID NO: 57437 - DNA, 1756 bp, Glycine max
  misc_feature (1)..(1756): Ceres Seq. ID no. 15179924
acactcacacatactcctttttccgttattaccctaaaacatcctccatctacaacacacactcttactcttactaatccaacctcctttgcccctcatgcactaccattaacattaccctctcttttttttctccctcacgaaccttcatttcttctcccgccatggatccttgccctttcgtgaggctcacagtcggcaacctcgccctcaaaattcccgttgcttctaaacccgcgctctccgttgttcatccttcttcttctccttgtttctgcaaaatcaagctcaagaattttcctcttcaatccgccgtcgttcctttcattcctccggaaagccacttccccgactcgcaggtgcatcctattgccgccacgttccacctcagcaagtccgatatcgacaagctcgccggaaaatccatcttcgccgggaagctctgcctcaaaatctcgatctacaccggccggagaggcaccacctgcggcgtcagctccgggagactcctcggccgagtttccgtgcccttggatctcaccggaacggtagccaagaccacagtgttccacaatggttggattaggataggaaaagatgccaaaggctcctccgcgcagtttcatttgaatgtaaaagccgaacccgatcctagatttgtcttccagttcgacggcgaacctgaatgcagtcctcaagttttccagatccaaggcaacatttcacaacctgtttttacctgcaagttcagtttcagaaacaatggcgaccggaatcaccgttccagatcgttacaatcggaaccaggaggttctagaagctggttgagttcgttcggaagcgagcgcgagaggccggggaaggagcgcaaaggatggtccataacggttcacgatctttccggttcaccggtggccgcagcttccatggtcacgcctttcgtcgcttcgcccggttcggaccgggtgagctgctccaaccccggctcgtggctcattcttcgtcctagcgacggcacgtggaagccctgggggaggctcgaggcgtggcgcgaacgcggcggctccgacggcctcggctaccgtttcgaactcattccggacaccaacggcggtatgagcgccgccggcatagtgcttgcggaatccacgctgagcaataacaaaggtggaaagttcgtcatcgatttgagttgtcgtaacggtaacgttagcggaaacggtggatctaatggccgtgcgacgccggggagcgcgacgtcgccggcgtgcagcccgaggagtagtggagattatggatacggcctctggccttattgtatgtatagaggttttgtaatgtcggcgagcgtggagggtgaggggaggtgcagcaagcctacagtggaggtgagcgtgccgcacgtgaattgcacggaggatgcggcggcgtttgtggctttagcggctgccgttgatctgagcgtggatgcgtgcaggcttttctcgcaacggctgaggaaggaactgtgccagcagctggatttgattggctgattccgccgtttttctttgtcgttttttctaatatttttgtttaatggggttgttcattttgagtgagaagcattttactactaacaaacaatttacaggctgtacaggggaaggagagagtattgcagtgcgcgctgtctattcacgtgtggcttttcattgattttctctcttcttttttcatcagttgtggggaatcaagaaaaagcttttttgttttg

SEQ ID NO: 57438 - protein, 456 aa, Glycine max
  peptide (1)..(456): Ceres Seq. ID no. 15179925
MDPCPFVRLTVGNLALKIPVASKPALSVVHPSSSPCFCKIKLKNFPLQSAVVPFIPPESHFPDSQVHPIAATFHLSKSDIDKLAGKSIFAGKLCLKISIYTGRRGTTCGVSSGRLLGRVSVPLDLTGTVAKTTVFHNGWIRIGKDAKGSSAQFHLNVKAEPDPRFVFQFDGEPECSPQVFQIQGNISQPVFTCKFSFRNNGDRNHRSRSLQSEPGGSRSWLSSFGSERERPGKERKGWSITVHDLSGSPVAAASMVTPFVASPGSDRVSCSNPGSWLILRPSDGTWKPWGRLEAWRERGGSDGLGYRFELIPDTNGGMSAAGIVLAESTLSNNKGGKFVIDLSCRNGNVSGNGGSNGRATPGSATSPACSPRSSGDYGYGLWPYCMYRGFVMSASVEGEGRCSKPTVEVSVPHVNCTEDAAAFVALAAAVDLSVDACRLFSQRLRKELCQQLDLIG

SEQ ID NO: 57439 - DNA, 744 bp, Glycine max
  misc_feature (1)..(744): Ceres Seq. ID no. 12608140
aatatctaccattcactactttgattccctgagatttctgcaatctacaaaaattcactatgggagtcacaacctttacacaggaatactcctcctctgttgccccatcacgcatgttcaaggccttgattgtagactccagaaatttgcttccaaagctcttacctcagtttgtaaaagatgtgaatgtgatccaaggtgatggtgaagctggaagcattgaacaagttaacttcaatgaagctagccccttcaaatatctgaaacacaggattgatgtgcttgacaaggacaacttggtttgcaaatacactatgattgaaggggatccattgggcgacaagcttgattctataggttatgaggtgaagtttgaggctactagtgatggaggttgcctatgcaaaatgacaagcaattacaataccattggagagattgatgttaaagaggaagaggtaaaggaaggaagggaaagcggtattgcagtttacagagttgtggagtcatacctgctcgagaacccacaagtgtatgcttaatcacttgcttatttattgtgtcatgtatcatacgatataaaaacatattcaattttttaataacggtgtgcaaccaaatatagggttgtttagaatggttgcaaagacttgaattccttaataagtccttattgtatgaacagccaaaaatggctagtggtttgccaaaaatatttgtactttggtagtaaaaaagagtgaa

SEQ ID NO: 57440 - protein, 160 aa, Glycine max
  peptide (1)..(160): Ceres Seq. ID no. 12608141
MGVTTFTQEYSSSVAPSRMFKALIVDSRNLLPKLLPQFVKDVNVIQGDGEAGSIEQVNFNEASPFKYLKHRIDVLDKDNLVCKYTMIEGDPLGDKLDSIGYEVKFEATSDGGCLCKMTSNYNTIGEIDVKEEEVKEGRESGIAVYRVVESYLLENPQVYA

SEQ ID NO: 57441 - protein, 142 aa, Glycine max
  peptide (1)..(142): Ceres Seq. ID no. 12608142
MFKALIVDSRNLLPKLLPQFVKDVNVIQGDGEAGSIEQVNFNEASPFKYLKHRIDVLDKDNLVCKYTMIEGDPLGDKLDSIGYEVKFEATSDGGCLCKMTSNYNTIGEIDVKEEEVKEGRESGIAVYRVVESYLLENPQVYA

SEQ ID NO: 57442 - DNA, 1365 bp, Glycine max
  misc_feature (1)..(1365): Ceres Seq. ID no. 14314415
ctctcacgcacacatggtgctgccactgtcactcttctcttctcctttctgcttcgccgattctctatttttgcgcgcaatcgagtaacttgattgcatgtggtcctaaacttgcaggatggattgtatgctttgggccagtcgttaatgataacttgaggtctggatgatgctttctgattggttgtttacatattgtaattcagaatgtggaactttgcatcgaattgcattgctggaactgtgggactgaaaaatgattcaaagcctactcattctgcttcggaatgttctgatgatgaaaactctgttataggcagagaggaagggctggaatgcccaatatgctgggaatctttcaatattgttgaaaatgtgccctatgttttatggtgtggccacaccctttgtaaaaattgtatcctcggactgcagtgggctgttgtgaaatttccaacactgcctgttcaacttcccctttttatctcctgtccatggtgcaaccttctgtctttccgtttagtttaccggggaaaccttaaattccctcgcaaaaactactttcttctttggatggttgagagcatgaatggtgatagagggaaatcgcattcacctttctgtggtgataatcagcaacactcaattaaagataatttaaccatgggaagccaagtaagccatggaaaccttcggagggggctagttcgccatccagagacatcgagttccaaccaatatcatggtaatactggtaatcacctcaatacagaaagatttcatgtttatcttcggaagtcactgatcttctttgtccagttgacggctaagttcccattggtcattatattccttttaattgtcttatatgcaataccagcaagtgcagccattttggccctgtatgtacttgttacaattctgtttgccctcccatcatttctcattttgtacttctcatatcctagtttggattggcttgtgagggaaattatcacttaagattgtgaactagtgtaggctccaactttgcaaacattaagacaacagcttatatcttctactttgtaattatccgacttctcctttagaagctgtcatttatcttcccatatagggtcgttatcaatatatgtatacttgagtcttgattgtagctcaggtcgaacttggctagttggtggatgaaatgtcagtttttggcattagcttcgatgtcaatcagggcagtgggatagggtaatgataaatgcttgtgccctttcctggtggcaagaatttgtttgattaatgccatgttttatttcaattctgattatacttatatttgtaaattgtatataataattgagttgtttgtttgac

SEQ ID NO: 57443 - protein, 264 aa, Glycine max
  peptide (1)..(264): Ceres Seq. ID no. 14314416
MWNFASNCIAGTVGLKNDSKPTHSASECSDDENSVIGREEGLECPICWESFNIVENVPYVLWCGHTLCKNCILGLQWAVVKFPTLPVQLPLFISCPWCNLLSFRLVYRGNLKFPRKNYFLLWMVESMNGDRGKSHSPFCGDNQQHSIKDNLTMGSQVSHGNLRRGLVRHPETSSSNQYHGNTGNHLNTERFHVYLRKSLIFFVQLTAKFPLVIIFLLIVLYAIPASAAILALYVLVTILFALPSFLILYFSYPSLDWLVREIIT

SEQ ID NO: 57444 - protein, 142 aa, Glycine max
  peptide (1)..(142): Ceres Seq. ID no. 14314417
MVESMNGDRGKSHSPFCGDNQQHSIKDNLTMGSQVSHGNLRRGLVRHPETSSSNQYHGNTGNHLNTERFHVYLRKSLIFFVQLTAKFPLVIIFLLIVLYAIPASAAILALYVLVTILFALPSFLILYFSYPSLDWLVREIIT

SEQ ID NO: 57445 - protein, 138 aa, Glycine max
  peptide (1)..(138): Ceres Seq. ID no. 14314418
MNGDRGKSHSPFCGDNQQHSIKDNLTMGSQVSHGNLRRGLVRHPETSSSNQYHGNTGNHLNTERFHVYLRKSLIFFVQLTAKFPLVIIFLLIVLYAIPASAAILALYVLVTILFALPSFLILYFSYPSLDWLVREIIT

SEQ ID NO: 57446 - DNA, 1258 bp, Glycine max
  misc_feature (1)..(1258): Ceres Seq. ID no. 14314367
atgggtggctaactcaagcgttaggcttgaggatcttcacggtctcccaagtgaaatcaggatcgtcacgtccaaaatgcccataagcagcagttttctggtacctgaagttgcctcctctcatgagatcaagatggattgctatcattcctggcctgaaatcaaatttctccttaattagagccaatatgtccttgtctggaatcttccccgtttggtatgtgtctacaaacacagaaagtggctctggaactccaattgcataagaaacctgcacaatgcaacgtcgtgcaagccctgaagctaccacgctcttggctgcttgcctaacaatgtatgcaccactcctatcaaccttggttgggtccttgccggagaaggcaccaccaccatgagcaccccaaccaccataggtgtcgataatgatcttccttccagtgagtcctgcatctccatggggtccaccaatcacaaacctaccagaggggttgaggtggaagatggtcttatcatcaaggtatttagctgggatgacaggtttgatcacatgctctttcaattctttagagatttgttcatttgtgacagtttcatcatgctgagttgagatgagaactgtgtgaacccgaataggaatcatggctccaccatcgttcttgtactcaactgtcacttgggttttaccatctggcctcagccaggggcatgttttgttctttctcacctcagtgagcctggcaccaagtttagtagcaagcacatgagtgagtggcattaactcaggtgtttcgtctgtagcataaccaaacatgtggccttggtcaccagcaccaatttcctcaggtttcttggtcatatgaccgtgaactccttgagcaatatcagggctctgttgctcaatgttgaccagaactttgcagttgtcagcatcaagaccaacatctggtgacacaaacccaatgcctttgcaagtgtctcgaactattttctcgtagttcacgctggccttggttgtaatctcaccaaagaccataaccatgttagtttttgtacaggtctcgcaagcaaccttgctttctgggtcttgctccaagcatgcatctaggatggcatctgaaacctggtcacacagcttgtcgggatggccttcgtttacagattctgaggtgaagaggaaagtttccatctctagtgttaagaaaacaaaaaggggttaaattgtattctagagagaaattatgaaagcaattaacttgac

SEQ ID NO: 57447 - protein, 71 aa, Glycine max
  peptide (1)..(71): Ceres Seq. ID no. 14314368
MSTPTTIGVDNDLPSSESCISMGSTNHKPTRGVEVEDGLIIKVFSWDDRFDHMLFQFFRDLFICDSFIMLS

SEQ ID NO: 57448 - protein, 59 aa, Glycine max
  peptide (1)..(59): Ceres Seq. ID no. 14314369
MIFLPVSPASPWGPPITNLPEGLRWKMVLSSRYLAGMTGLITCSFNSLEICSFVTVSSC

SEQ ID NO: 57449 - protein, 59 aa, Glycine max
  peptide (1)..(59): Ceres Seq. ID no. 14314370
WVANSSVRLEDLHGLPSEIRIVTSKMPISSSFLVPEVASSHEIKMDCYHSWPEIKFLLN

SEQ ID NO: 57450 - DNA, 1416 bp, Glycine max
  misc_feature (1)..(1416): Ceres Seq. ID no. 15177055
gaaaaatcatcaccaacaaacaaacaaacattcattccattctctctctaaatcgcactcacatcatctcttctatctcctcagtactccggcgatcggagcctctaatccgccacgttctccctatctcctctttctcaactccagaatctcgtcctcgtgagagaaaataaaagttagttagggttacgcacagttgattaattaattaataatagaaaaaatgagctttcaggacatcgaggccggccgttccttcgcttcccggcgaaatctaatcaacggcaaacaagaccccacgcaggcggtggcttccggcatctttcagatcaacaccgccgtctccacgttccagagactcgtcaacaccctcggaacccccaaggacacccccgaactccgcgataagctgcacaagacgagactgcacattggacaattggtgaaggatacttcggctaagcttaagcaagctagtgagattgatcacaacgttgaagttaatgcaagtaagaagatagcagatgcgaagcttgcaaaagattttcaggcggtgttgaaagaatttcagaaggcacagcgtctttcagcggagagggaaactgcttacactccttttgttccgcaagcacttcttccatccagctatacagccagtgaagtagacattggttctgataagactccagaacagcgtgcacttcttgtggaatccagaagacaggaggtattattcttagataatgagatttccttcaatgaggctatcattgaggaaagagagcaaggcattcaagaaatccagtcgcagattggtgaagtaaatgagattttcaaagatcttgctgtgcttgtccatgagcaaggagcaatgattgatgatatcgggtccaatattgagcattcccatgaagcaactgcgcaagcaaaatctcaacttgccaaagcttcaaagacgcaaagatcaaattcatctttgacatgcttgcttctggtgatattcgggatcgtgcttctaatcgtcatcattgttcttgctgcttagtcatagactctggattctattacaaatcaaatgctcttacatactgagttgcagatacgatctcccttgctgatgactacactgaatggtgatttaccagatctcacgaatgaccggaatttgtctcatcaggtttcagtacatgatgtgggaatattcacaacattagtgtatcgttattttggtgggtatatgttctggtttctttgttggtgtttggggctttaaggatgtgtcacaacctgcctgctgtgtatgttatctttttggtttcttaataaacgatatattaattcgttctttacctgtatacgcaacttgaaaattagcatgactgactcttctttagtaataccttgatccattcaccc

SEQ ID NO: 57451 - protein, 273 aa, Glycine max
  peptide (1)..(273): Ceres Seq. ID no. 15177056
MSFQDIEAGRSFASRRNLINGKQDPTQAVASGIFQINTAVSTFQRLVNTLGTPKDTPELRDKLHKTRLHIGQLVKDTSAKLKQASEIDHNVEVNASKKIADAKLAKDFQAVLKEFQKAQRLSAERETAYTPFVPQALLPSSYTASEVDIGSDKTPEQRALLVESRRQEVLFLDNEISFNEAIIEEREQGIQEIQSQIGEVNEIFKDLAVLVHEQGAMIDDIGSNIEHSHEATAQAKSQLAKASKTQRSNSSLTCLLLVIFGIVLLIVIIVLAA

SEQ ID NO: 57452 - DNA, 669 bp, Glycine max
  misc_feature (1)..(669): Ceres Seq. ID no. 15168438
aatcccaagctcacacacactaaaccaaagtaagaggtatagtgttctaagagtgagcaacttgtgagaaatggcttccaaggctgcacttctcttgtgtctcaatgttctctttttcactgtggttagttccacatatgtgccatgtaatccaccccccaaaactcccaaacacccacctgtcccaaagccaccatccccaaagcaagcaagctgccccaaagacactattaagttcggtgtgtgtgctgatgtgttaggtttgattaatgtgcaacttgggaagccaccaaagaccccatgctgcaacctaattcagggtcttggaaaccttaaaattgcagaaaattgtacacaaatgtttttgcattgtggtggtttcagagaccatgatatttttgacgatgcgggtgcaattgcacttttgtatctccatttcaaaccttgttccttccttcaatggctctacaattgaaagtgaaacgtggtttaaagaataaaactctttcaaagttggaaattttctttactcacatgtcgcttttttattgggggtatgaaatgaagacagtgatttggtacatgtagacagcatgctcttttctcagttcattctgtctatggcaagtgtttagtggcagtggtgtaatggtggttttaagagttttc

SEQ ID NO: 57453 - protein, 134 aa, Glycine max
  peptide (1)..(134): Ceres Seq. ID no. 15168439
MASKAALLLCLNVLFFTVVSSTYVPCNPPPKTPKHPPVPKPPSPKQASCPKDTIKFGVCADVLGLINVQLGKPPKTPCCNLIQGLGNLKIAENCTQMFLHCGGFRDHDIFDDAGAIALLYLHFKPCSFLQWLYN

SEQ ID NO: 57454 - DNA, 1308 bp, Glycine max
  misc_feature (1)..(1308): Ceres Seq. ID no. 14315515
acttctcatacaatacaagaggtcacatatacagaccttctctccctctctctctttctctctcaacattctaccttcttttcttttcctcttttcacaaccatttgtgagattcctccaatgttcttctctcttccattggattgtacagattcccagctacactacacacatcaatcccttcaattctagttgctgtgggattgtttgtttatgtgaaaaaattttaaggactgtaaaagacaaaacttttctgggtttattggtttctgctttatatttattttttcttctgcaaactatcattctgggtttgctcataaaacaaagcctttcaagataactgttgtatttttcagaaaaaaaatccatttttcttagcttatttgtcaaaagaataattttttttctttttcttcctcatttttctgcaaattttcttcatattcctttttattaatttgcggaaaagattgagacatgggcaagcaaggaccttgctatcactgtggagttacaagcacgccactctggcgcaatggaccacccgagaagccagtactatgcaatgcatgtgggtctcgatggagaacaaagggaactcttgcaaattatacccctttacatgctcgagcagaaactgatgattatgatgatcaaagggtttccaggataaagagcatatcgataaataagaagaaagaagtggcattgctcaaacgaaaacagaaccatgataatgtaatgtctggagggtttgcacctgattacaaccagggataccaaaaggttgtagatgaagatattagcaaccggtcgagttcaggatcagctatctctaactcagagagctgtgcacaatttggttatgatggcatggatgctagtgatctgacaggttgaattaagatctttcttcacaactgattacagcagcatttatcattttgaaacaagtattgattttattgcctgtccaggtttatattagcacaatccagaagaggataatggaacgaaggaaaatgaaaaagaaatatattagtttcgtagtcattggttttcctaaaagaaaaacaaatgaactttgttttaactatgtacggttgtgctcttcattgacaaaaagaattgaagaagtggttttaatattttaccaccatgaagctctaattatacttgccaacatttgtaatggcaagtccaataattagacatggtggattatttgttttttgtttagtgtgtaacaatatgtagtacttttccctcccaataatagaatgtcaagtcttgcatatatttttc

SEQ ID NO: 57455 - protein, 140 aa, Glycine max
  peptide (1)..(140): Ceres Seq. ID no. 14315516
MGKQGPCYHCGVTSTPLWRNGPPEKPVLCNACGSRWRTKGTLANYTPLHARAETDDYDDQRVSRIKSISINKKKEVALLKRKQNHDNVMSGGFAPDYNQGYQKVVDEDISNRSSSGSAISNSESCAQFGYDGMDASDLTG

SEQ ID NO: 57456 - protein, 113 aa, Glycine max
  peptide (1)..(113): Ceres Seq. ID no. 14315517
LLIQYKRSHIQTFSPSLSFSLNILPSFLFLFSQPFVRFLQCSSLFHWIVQIPSYTTHINPFNSSCCGIVCLCEKILRTVKDKTFLGLLVSALYLFFLLQTIILGLLIKQSLSR

SEQ ID NO: 57457 - DNA, 1310 bp, Glycine max
  misc_feature (1)..(1310): Ceres Seq. ID no. 14314186
tcgtctttctcttcttcctaagatcccttctcacttctatagttctattctcttctctttctccacctcttcacctcttctctcccctgtcttcttcttaattagcctctctcattgcgtgcaccaccccaaaaaaaatatacatatacatatatacataaaaaaaacaaccccccccctctacgtggccacactcgctcacaacacaacacaccctcttaattaaatctctatataaaaccccttcagggtctctccactatgacgggcagggaaatttttcataagatgaaggaaaaagttttgggctcatctgatcctgattctggtaaaggaaagagcaagatgaagaagaacataactcatggctttcacttggtaaaggggagatcaggtcatgccatggaagactatcttgttgctcaattcaagcaagttgacgacaatgaattgggtttatttgcaatatttgatggccactcaggtcacagtgtacctgattacttgaagtctcatttgtttgataatatcttgaaagagcctaacttctggacagaacctgctgaggctgttaagagagcatatggtataactgattctactattttagacaaatcaggtgaattgggtagagggggttcaactgcggttactgcaatattgatcaactgtcaggagctgctagtggccaatattggggattcccgggctgtcttatgcaagaatggcgtggccaaacaactatcagtggatcatgaaccaagcatagaaagtgaagatataagaaacagaggtggttttgtgtcaaacttcccaggggatgttccacgtgtcgatggtcagttggcggtgtcaagggcatttggtgacaaaagcctgaagatacatttgagctcagaaccatatgtaactttggagatgatagaagatgatgcagagtttcttatactagccagtgatgggttatggaaggtaatgtcaaatcaagaagcagttagtgctatcaaagatgttaaggatgccaggtccgcagctaaggtgcttaccgaagaagcaaagatcaggaaaagttctgatgatatctcttgcgttgttgtgaaatttcagtgatcactgaactcacatagtagatttttatcttcgaacttgaaaatgtaacatatactttagtgtatatggattaatgttgattccctttaggtgttattatgttgtggcattctgtttgtgatattttatctgctttcgtacaaatcaactgtctgagaacgtgttgtttgatgtaacagtgtaaaaaaggatttagtttc

SEQ ID NO: 57458 - protein, 282 aa, Glycine max
  peptide (1)..(282): Ceres Seq. ID no. 14314187
MTGREIFHKMKEKVLGSSDPDSGKGKSKMKKNITHGFHLVKGRSGHAMEDYLVAQFKQVDDNELGLFAIFDGHSGHSVPDYLKSHLFDNILKEPNFWTEPAEAVKRAYGITDSTILDKSGELGRGGSTAVTAILINCQELLVANIGDSRAVLCKNGVAKQLSVDHEPSIESEDIRNRGGFVSNFPGDVPRVDGQLAVSRAFGDKSLKIHLSSEPYVTLEMIEDDAEFLILASDGLWKVMSNQEAVSAIKDVKDARSAAKVLTEEAKIRKSSDDISCVVVKFQ

SEQ ID NO: 57459 - protein, 273 aa, Glycine max
  peptide (1)..(273): Ceres Seq. ID no. 14314188
MKEKVLGSSDPDSGKGKSKMKKNITHGFHLVKGRSGHAMEDYLVAQFKQVDDNELGLFAIFDGHSGHSVPDYLKSHLFDNILKEPNFWTEPAEAVKRAYGITDSTILDKSGELGRGGSTAVTAILINCQELLVANIGDSRAVLCKNGVAKQLSVDHEPSIESEDIRNRGGFVSNFPGDVPRVDGQLAVSRAFGDKSLKIHLSSEPYVTLEMIEDDAEFLILASDGLWKVMSNQEAVSAIKDVKDARSAAKVLTEEAKIRKSSDDISCVVVKFQ

SEQ ID NO: 57460 - protein, 254 aa, Glycine max
  peptide (1)..(254): Ceres Seq. ID no. 14314189
MKKNITHGFHLVKGRSGHAMEDYLVAQFKQVDDNELGLFAIFDGHSGHSVPDYLKSHLFDNILKEPNFWTEPAEAVKRAYGITDSTILDKSGELGRGGSTAVTAILINCQELLVANIGDSRAVLCKNGVAKQLSVDHEPSIESEDIRNRGGFVSNFPGDVPRVDGQLAVSRAFGDKSLKIHLSSEPYVTLEMIEDDAEFLILASDGLWKVMSNQEAVSAIKDVKDARSAAKVLTEEAKIRKSSDDISCVVVKFQ

SEQ ID NO: 57461 - DNA, 1339 bp, Glycine max
  misc_feature (1)..(1339): Ceres Seq. ID no. 14314272
aattcttctttgtattctccatccaccctcattgcactttttagtttttaccctttttcggtgtcttctcatattcctcacacgcacaccctcttcgatctcaacgcctctttggcttatattctcaccgacccacattgccattctcaccattctttgcagatcacgcacccctttaggaagagaggaaggaaagtctagtttttggttcgtgggggttggtttgcgaaatggcctctttctcggtcccatgccccaagtgtcctacaacttcttcttctccccctttggggttgaaatctctaaatgtttcatttcaaagggtgttgagcttgaagccttctctttcattcggatctttgtctgctgaatctgctgcatcaaggattcagtgccttaacaggaagcaattttctgttctgaaggctactaaagttgaaaattccaattctgcccctgtaatggtcaatggacctaatgttgcttcatcgaaagaaaaagaagtgcataatggaaaactctctggtggtactatcccagatgatgcttcaattattgcattcatgtctcaagtttcagaccttgtaaaactcgtggattcgagagatattgtggaacttcaacttaagcaatcagactgtgagctcatgataagaaaaaaagaagcattgcagcctccaccagttatagccccaacatccccaccaatgcactatgccacagttccttctccgccaccaccaccagcagctgctcctgctagctctgcacctccaaaagcagttcctgccttgccttcccctgcaaaagcaggcacatcttctcacccaacgctgaaatgtccgatggcaggaaccttctacaggagtccagcacctggtgaacctgcatttgtcaaggtgggagataaagtgcagaaaggccaggttatttgcattatcgaggctatgaaactgatgaatgaaattgaggctgatcagtcaggaacaatagctgaggtattagctgaggatgggaaaccagtcagtgtggacacgcctctttttgtaatagttccatgagtaccagaagggaccttacttcgaacttgatgtgaaatctcccttgttggagcagcatggtattcgatgacttagactctgtgttcagaaatttgttgagtggtaatgtttgtctcattttaagaaatccttgtcgtctttagcccccacccctcctcttaatttattgagatattttggacataaaagccccagcatatcagaatgagaatatttgacatttcagttctataagcagttttgacatttttagtagtatttatgttctatttttgttt

SEQ ID NO: 57462 - protein, 276 aa, Glycine max
  peptide (1)..(276): Ceres Seq. ID no. 14314273
MASFSVPCPKCPTTSSSPPLGLKSLNVSFQRVLSLKPSLSFGSLSAESAASRIQCLNRKQFSVLKATKVENSNSAPVMVNGPNVASSKEKEVHNGKLSGGTIPDDASIIAFMSQVSDLVKLVDSRDIVELQLKQSDCELMIRKKEALQPPPVIAPTSPPMHYATVPSPPPPPAAAPASSAPPKAVPALPSPAKAGTSSHPTLKCPMAGTFYRSPAPGEPAFVKVGDKVQKGQVICIIEAMKLMNEIEADQSGTIAEVLAEDGKPVSVDTPLFVIVP

SEQ ID NO: 57463 - protein, 199 aa, Glycine max
  peptide (1)..(199): Ceres Seq. ID no. 14314274
MVNGPNVASSKEKEVHNGKLSGGTIPDDASIIAFMSQVSDLVKLVDSRDIVELQLKQSDCELMIRKKEALQPPPVIAPTSPPMHYATVPSPPPPPAAAPASSAPPKAVPALPSPAKAGTSSHPTLKCPMAGTFYRSPAPGEPAFVKVGDKVQKGQVICIIEAMKLMNEIEADQSGTIAEVLAEDGKPVSVDTPLFVIVP

SEQ ID NO: 57464 - protein, 165 aa, Glycine max
  peptide (1)..(165): Ceres Seq. ID no. 14314275
MSQVSDLVKLVDSRDIVELQLKQSDCELMIRKKEALQPPPVIAPTSPPMHYATVPSPPPPPAAAPASSAPPKAVPALPSPAKAGTSSHPTLKCPMAGTFYRSPAPGEPAFVKVGDKVQKGQVICIIEAMKLMNEIEADQSGTIAEVLAEDGKPVSVDTPLFVIVP

SEQ ID NO: 57465 - DNA, 989 bp, Glycine max
  misc_feature (1)..(989): Ceres Seq. ID no. 14316297
attattggtgttgaagatagaaaagaaagagaaagagcgatgccaggatcattgaggcctcggtttgttatctttggttcttccatcgttcaatttggtttttatgatgaaggttgggtggctattctttctcatttgtatgcccgcaaggttgatattgatttgcgaggatatgctggttggaattcaaggcgtgctgtgcaggttctggataaagtttttcccaaggatgcccctatacaaccttcattggttattgtctactttggtggtaatgattcttctgctcccctctcatctggcctaggtcctcatgtgcctctccaagaatacattgaaaatttgaggaagatcgttgaccatctcaagagcctctcagagaacactcgcattctacttctcagtactcctcccctcaatgatgcagcaattacgccaaacagtgatgggaagccaacaaagacaaatgaagcttgtcaaatatattcagaagcatgtttggatgtgtgccgcaagatgaatatcaaggccattgatttgtggtctgctattcagaaaagagataactggcaagatgtttgcttcattgatggaattcacctctcatctgagggaagcaagatagtgttgaaagagatactgaatgtcctcaaaggtgcagaatgggaacctagtctatattggaaatcaatgccaagtgagtttgatgaagattcaccatatgatccagttacaactgatggaaagtcaactattaatctttccagctgggtcttccctgacaatgacaaatgggactagactttatatgtgcattaacggcgagtcactgaatcgcatcgaacgaaaatgcctatttttatcttttttttttgtgttgcatgtttgggttcctttctttatcgtgtttatttctgtattacttgcaaaaaatgacgtctattactatgattaactttgaggttcacgagtcattttcaatcttctcc

SEQ ID NO: 57466 - protein, 266 aa, Glycine max
  peptide (1)..(266): Ceres Seq. ID no. 14316298
IIGVEDRKERERAMPGSLRPRFVIFGSSIVQFGFYDEGWVAILSHLYARKVDIDLRGYAGWNSRRAVQVLDKVFPKDAPIQPSLVIVYFGGNDSSAPLSSGLGPHVPLQEYIENLRKIVDHLKSLSENTRILLLSTPPLNDAAITPNSDGKPTKTNEACQIYSEACLDVCRKMNIKAIDLWSAIQKRDNWQDVCFIDGIHLSSEGSKIVLKEILNVLKGAEWEPSLYWKSMPSEFDEDSPYDPVTTDGKSTINLSSWVFPDNDKWD

SEQ ID NO: 57467 - protein, 253 aa, Glycine max
  peptide (1)..(253): Ceres Seq. ID no. 14316299
MPGSLRPRFVIFGSSIVQFGFYDEGWVAILSHLYARKVDIDLRGYAGWNSRRAVQVLDKVFPKDAPIQPSLVIVYFGGNDSSAPLSSGLGPHVPLQEYIENLRKIVDHLKSLSENTRILLLSTPPLNDAAITPNSDGKPTKTNEACQIYSEACLDVCRKMNIKAIDLWSAIQKRDNWQDVCFIDGIHLSSEGSKIVLKEILNVLKGAEWEPSLYWKSMPSEFDEDSPYDPVTTDGKSTINLSSWVFPDNDKWD

SEQ ID NO: 57468 - DNA, 1004 bp, Glycine max
  misc_feature (1)..(1004): Ceres Seq. ID no. 14315395
acaatggattggaaactttgagctcaatcgtacggttaggaaaatttgcagtttcttagcatagattggaggaagaagattgttggcaactgttcccagggagaacaaccttcatcttcttctgaaggtgctcggtgaaagggtgtttgaccaagagaagaaatccagttccagagattttttattcaaggatgggtgaaaggaaggacactattgctaccttgtgtacttggtggatgtagctcggcattgtggaaatttacaaaaggaggatggcacttatccttgcagcaaatatgtgctccattacaaattccaaaacggttgaagtgataaaaagaatcgatattgaagataaaatgcaatccagatctaatattgcactgcctccttcggaagcttcatcaagtcgcaggcatctcttaatcggtgttggtccttcattgcttaccttgacgtgtggtttatcaccaccaacggtatgggccgaagagaagtctggcgacaaagaggaagaagataaaggggttattggggccatcaaatcactatttgatcctaatgagaaaacaaagtctggaaaggtgttgccaaaggcttacttaaggtcagcaagggaagtagtgaaaacactgcgtgaatctttaaacgaaggcaccgatgataatgccaaatttagacggactgcggactcagcaaaggagtcaattcgggagtatttgggcagttggaggggaaatcagattgttgctcaagaagaatcatatgttattttggaaaaagtaatcagatctttggcaaactattactcaaaagcagggccatcagctccactgtcacatgaagtaaagtctgaaatattagattatctaaatacagctgaagaatttttgtagaacatcctccaatgtgttatagaaacaacaccatttctaactccctggatgtcgtcaatggctgtgataaaagtaaatttattcttcaatcaatttaaattttgtagc

SEQ ID NO: 57469 - protein, 207 aa, Glycine max
  peptide (1)..(207): Ceres Seq. ID no. 14315396
MALILAANMCSITNSKTVEVIKRIDIEDKMQSRSNIALPPSEASSSRRHLLIGVGPSLLTLTCGLSPPTVWAEEKSGDKEEEDKGVIGAIKSLFDPNEKTKSGKVLPKAYLRSAREVVKTLRESLNEGTDDNAKFRRTADSAKESIREYLGSWRGNQIVAQEESYVILEKVIRSLANYYSKAGPSAPLSHEVKSEILDYLNTAEEFL

SEQ ID NO: 57470 - protein, 199 aa, Glycine max
  peptide (1)..(199): Ceres Seq. ID no. 14315397
MCSITNSKTVEVIKRIDIEDKMQSRSNIALPPSEASSSRRHLLIGVGPSLLTLTCGLSPPTVWAEEKSGDKEEEDKGVIGAIKSLFDPNEKTKSGKVLPKAYLRSAREVVKTLRESLNEGTDDNAKFRRTADSAKESIREYLGSWRGNQIVAQEESYVILEKVIRSLANYYSKAGPSAPLSHEVKSEILDYLNTAEEFL

SEQ ID NO: 57471 - protein, 178 aa, Glycine max
  peptide (1)..(178): Ceres Seq. ID no. 14315398
MQSRSNIALPPSEASSSRRHLLIGVGPSLLTLTCGLSPPTVWAEEKSGDKEEEDKGVIGAIKSLFDPNEKTKSGKVLPKAYLRSAREVVKTLRESLNEGTDDNAKFRRTADSAKESIREYLGSWRGNQIVAQEESYVILEKVIRSLANYYSKAGPSAPLSHEVKSEILDYLNTAEEFL

SEQ ID NO: 57472 - DNA, 1320 bp, Glycine max
  misc_feature (1)..(1320): Ceres Seq. ID no. 14314198
attcacaactccaatccctcttcgctttagcaaattccaattcccaatccaaaaccctaatttcgttcaaagaaccaattgtgatggcaccaaaggcagagaagaagccagcggagaagaagcccgcggaggagaagaagtcgacggtgggagacaaggctccggcggagaagaagccgaaggccggaaagaagcttcctaaggagggaggagccggcggagaaggggggaagaagaagaagaggaacaagaagagcgtggagacatacaagatatacatattcaaggtgctgaagcaggtccaccctgacattggtatctcaagcaaggccatgggaatcatgaacagcttcatcaacgacatcttcgagaagcttgctcaggaatcttccagacttgcccgctacaacaagaagcccaccatcacttcaagggaaatccagaccgcgcaaccctcccactcatccttcctacgaggagatgattaaagacgcaattacctcgctgaaggagaaaaccggttcgagccaacacgcgattgcgaagttcatcgaggagaagcacaagcagcttccaccgaacttcaggaagcttcttctctaccatttgaagaaacttgtagccgctggaaaactcgtcaaagtcaaaggctccttcaagctcccacctacccgaccttctgcatcttcttcttcttcgccggcgaagaagaagaagcccgcacctgctaagccccaacccaagcccaagcctaagcctaagcccaagcccgctgctaaagccaaggacactaaggcaactaagtcaaaggcaccagctaatcccaaggcagctgctaagcctaaagccaaagctccagccaagcccaagcccgcccctaaaccaaaggctgctgctgctgctgcttccaagcccaagcctgctgccgccaagcccaaagggactaagccagctgccaagcccaagcccaagcccgctgctaaaacaaaggctgctgctgccaagcccgcggcaaagcccaaagcgaagcccgccaaggcttcaaggacgtcgacacggacttcaccagggaagaaagcagctcctgctgcgaagccggcagcgaagaaagtagcgcctgctaagaaagcgccagtgaagagtgtgaaaccaaagagtgtaaagtctccagcgaaaaaggctacggctaagagagggggtaggaagtgagaatgtggtgggtagagtggttttagggttagttttgtgaagttctttgtcctcttggtggtgtagttggggttacagatgatcctataatatatgaaatctgattttatc

SEQ ID NO: 57473 - protein, 242 aa, Glycine max
  peptide (1)..(242): Ceres Seq. ID no. 14314199
MIKDAITSLKEKTGSSQHAIAKFIEEKHKQLPPNFRKLLLYHLKKLVAAGKLVKVKGSFKLPPTRPSASSSSSPAKKKKPAPAKPQPKPKPKPKPKPAAKAKDTKATKSKAPANPKAAAKPKAKAPAKPKPAPKPKAAAAAASKPKPAAAKPKGTKPAAKPKPKPAAKTKAAAAKPAAKPKAKPAKASRTSTRTSPGKKAAPAAKPAAKKVAPAKKAPVKSVKPKSVKSPAKKATAKRGGRK

SEQ ID NO: 57474 - protein, 161 aa, Glycine max
  peptide (1)..(161): Ceres Seq. ID no. 14314200
SQLQSLFALANSNSQSKTLISFKEPIVMAPKAEKKPAEKKPAEEKKSTVGDKAPAEKKPKAGKKLPKEGGAGGEGGKKKKRNKKSVETYKIYIFKVLKQVHPDIGISSKAMGIMNSFINDIFEKLAQESSRLARYNKKPTITSREIQTAQPSHSSFLRGDD

SEQ ID NO: 57475 - protein, 134 aa, Glycine max
  peptide (1)..(134): Ceres Seq. ID no. 14314201
MAPKAEKKPAEKKPAEEKKSTVGDKAPAEKKPKAGKKLPKEGGAGGEGGKKKKRNKKSVETYKIYIFKVLKQVHPDIGISSKAMGIMNSFINDIFEKLAQESSRLARYNKKPTITSREIQTAQPSHSSFLRGDD

SEQ ID NO: 57476 - DNA, 1228 bp, Glycine max
  misc_feature (1)..(1228): Ceres Seq. ID no. 15171175
atgtgggagtaacagcagaagcaaaacaaaacatcatagacagacacaacattatctttcaactgttgctctgcctctgcacagagaatggtgtgggaggggaaacagacatgatctatctgtgttcacagcaccactgtttccctgcctcacacccttatctagaagaacaagaatcagcacatacacccgccacaacgccatagtcatcatcacttagaagaacttcacaatttttattttggttgtgtcgagtgtttttagctgacacaacctgaaagcttttgtctttattccgaaatttgtggcaatctttgcggtttagcttctggggtgttggggtggaagtaaagtttgtcactttgagatctaggtggggctgatatgcagaaacaacggcaatgagcaaattggcttggatatggcgagtcttgctcttgaaaccgaggatgtaatctcagatatatacctttcactgggacttaaggaatcagacaaaggagtaggagttcctcgagttttatctcttctctcttcacttcttgagagatcagttcagagaaacgaaacgctattggaggcaaagcacgtaaaagatgtagttacagtatttcacggtttaagagctcctactctgagcgttcgaaagtacattgatcgtatcttcaagtactcaggttgcagcccatcatgctttgtcgtggcacacatatatgtggacagattcattcaacacacagaaatcaaattgacttcacttaatgtgcaccggcttctgataacaagcatcatgctagcagcaaagtttatagatgacgcattctacaacaatgcttactatgcaaaagttggaggagtgagcacgtctgaattaaacaggttggagatgagctttctatttggcatagattttaggcttcagtttagtgtagacacgtttggaagatattgtaggcaattggagaaagaagctgcagaagtagtccaaattgaaaggccaatgcaggcttgtcgaattaaagaaagttggtcaaacaaagatgatcctacctgtgcttccacaattgcaagataaaaatgtggcaacaccattgtagcaatatattgctgtcccacaattaaccgagacaaaatgaatttgaagtatttcaaagtaaaaaaaaaaaaagagagagagagagaatagattgttctatacttgccactggaaattcaaccattttttacg

SEQ ID NO: 57477 - protein, 217 aa, Glycine max
  peptide (1)..(217): Ceres Seq. ID no. 15171176
MASLALETEDVISDIYLSLGLKESDKGVGVPRVLSLLSSLLERSVQRNETLLEAKHVKDVVTVFHGLRAPTLSVRKYIDRIFKYSGCSPSCFVVAHIYVDRFIQHTEIKLTSLNVHRLLITSIMLAAKFIDDAFYNNAYYAKVGGVSTSELNRLEMSFLFGIDFRLQFSVDTFGRYCRQLEKEAAEVVQIERPMQACRIKESWSNKDDPTCASTIAR

SEQ ID NO: 57478 - DNA, 1225 bp, Glycine max
  misc_feature (1)..(1225): Ceres Seq. ID no. 15172528
ttcatctttgattgagataaggtaaggttctttacctgcttccactttctactttttcatcactttcattttcgttctctcttttgctatctaattttctgttcaagattcctaacttcccttctttaaaggaacgaactttgcattcaatttgttatgggtcgattcaatttctgttcgttgttactacgttgttttcatcataaaaatcgtgctcaatcatattaaagctgtctttttttaattttttttcaaatttaggaataaaacaattcatgtgaagtagtaattaatatgtttgatgtcgtcaggagttagttacaagtacaatggagttaagatcattgattttgcaaccaaacttgacacacttgtttccaacattcacatgctgtgtcaaactcaaaccttctttccagcatttacagaataatagtaataataaggaattatcactaaaaatccgtagtagaagggtaggggttttggctgccataacttccttgattttgggtggaaatggaatttttaggactcaaagtgcaaatgcatttgagtttaaatttgtggcccctgatatgacagttgaagaggcattgagtggagtgaggggtcatgcacaagatttgttacatgttagagatttgttagagttagagtcatggagagcagcacaaaagacattgagacagagctcagcaattctgaagaaggatatttatatcataatccaaagcaagcctggaattgagagggcacaattaaggaagctctattctactctcttcaacaatgtaactagactagattatgcagcaagggataaagatggaccccaagtctggcagtgttacaagaacattgttgtggctgtcaacgacattctatccagaatataatgatcccttgtcttttgataatgggagattgaactgttcttgataagtttatgcgaacagctgactaacttgcttgttgcaagaagtggagttgtgaaggatatgcactcaaaagtaggctgcacaaaggaaaaaccctgttatataaaattatagactaagagtttgatcattaagagttagataatattgaaggtttaatcatatttgacagaaaaatgatgcccagattctgtgtcatcattgatcaggagcttaaaaagagaacgattgtaagcatatcaattttgataaagagaaatctaagcttaattttttatctgctc

SEQ ID NO: 57479 - protein, 189 aa, Glycine max
  peptide (1)..(189): Ceres Seq. ID no. 15172529
MELRSLILQPNLTHLFPTFTCCVKLKPSFQHLQNNSNNKELSLKIRSRRVGVLAAITSLILGGNGIFRTQSANAFEFKFVAPDMTVEEALSGVRGHAQDLLHVRDLLELESWRAAQKTLRQSSAILKKDIYIIIQSKPGIERAQLRKLYSTLFNNVTRLDYAARDKDGPQVWQCYKNIVVAVNDILSRI

SEQ ID NO: 57480 - protein, 106 aa, Glycine max
  peptide (1)..(106): Ceres Seq. ID no. 15172530
MTVEEALSGVRGHAQDLLHVRDLLELESWRAAQKTLRQSSAILKKDIYIIIQSKPGIERAQLRKLYSTLFNNVTRLDYAARDKDGPQVWQCYKNIVVAVNDILSRI

SEQ ID NO: 57481 - DNA, 1571 bp, Glycine max
  misc_feature (1)..(1571): Ceres Seq. ID no. 15178157
atcatatttaatgccttaagtatctctctatctctctcacacacactcatcattttctagcaaactctctagcctcttcaaatgggctaggaaggttgaatacaaagaaaacaaaccctagcttaattaattaacttgcttgtgttgttaattaatttgttcaacatggaaggaggagtgcctgaagctgatatctctgcctttagagaatgtttgtctctatcatggaaaaatccttatgttcttcgccttgctttctccgctggaattggaggctttctctttggctatgacacaggagtcatatctggagcacttttgtacatcagagatgatttcaaagaggtggatagaaagacgtggctgcaggaagctatagtgagtatggcacttgctggagcaatcataggagcttcagttggtggatggatcaacgatcgatttgggagaaagaaagcaatccttttggcagataccctcttttttatagggtctattgtgatggctgctgctataaacccagctattctgattgttggtcgagttttcgttggccttggggttggaatggcctcaatggcctcacctttgtacatctcagaagcatcaccaacaagagttcgaggtgcccttgttagtctcaatggattcctcatcactggaggacagttcctttcctatgtcatcaacttggccttcacaagcgcaccaggaacatggaggtggatgttaggagtagcagcagtaccagcattgacacaaatcatattgatggttttgctcccagaatcacctcgttggttgttcagaaagggtaaacaagaagaagccaaagaaattttgaggaggatttaccctccccaggatgttgaagatgaaatcaatgctttgaaggaatcaattgaaacggaactcaatgaagaagcttcagcttcaaacaaagtcagcataatgaagctgctgaaaaccaaaactgtgagaagaggtttatatgctggaatgggccttcaaatcttccaacaatttgtggggattaacactgttatgtactacagccccacaattgtgcaattagctggttttgcatcaaatagggttgcactacttctatcacttgtcactgcagggcttaatgcatttggttccattttaagcatatatttcattgacaagactgggaggaggaagcttttgttgtttagtttgtgtggtgttgtggtctcacttgttgttttgaccgtggcttttcatgagactaccactcactcccctatggtcagcacaatcgaaacctctcacttcaacaacacatgccctgattacagcactgctttcaaccctggtgaatgggattgcatgaaatgcctcaaggcctctccagaatgtggcttttgtgcctctagagctaataaggtaaatgtttcataatctcctttagattaagtacatcataaggttttctgattcaaacttggatcctctcgtgtaagatatgaccaagttggagataaaaaagacacaaatgtgacataattagtattattttagtaaaaatgcgtctttctatcttg

SEQ ID NO: 57482 - protein, 420 aa, Glycine max
  peptide (1)..(420): Ceres Seq. ID no. 15178158
MEGGVPEADISAFRECLSLSWKNPYVLRLAFSAGIGGFLFGYDTGVISGALLYIRDDFKEVDRKTWLQEAIVSMALAGAIIGASVGGWINDRFGRKKAILLADTLFFIGSIVMAAAINPAILIVGRVFVGLGVGMASMASPLYISEASPTRVRGALVSLNGFLITGGQFLSYVINLAFTSAPGTWRWMLGVAAVPALTQIILMVLLPESPRWLFRKGKQEEAKEILRRIYPPQDVEDEINALKESIETELNEEASASNKVSIMKLLKTKTVRRGLYAGMGLQIFQQFVGINTVMYYSPTIVQLAGFASNRVALLLSLVTAGLNAFGSILSIYFIDKTGRRKLLLFSLCGVVVSLVVLTVAFHETTTHSPMVSTIETSHFNNTCPDYSTAFNPGEWDCMKCLKASPECGFCASRANKVNVS

SEQ ID NO: 57483 - protein, 347 aa, Glycine max
  peptide (1)..(347): Ceres Seq. ID no. 15178159
MALAGAIIGASVGGWINDRFGRKKAILLADTLFFIGSIVMAAAINPAILIVGRVFVGLGVGMASMASPLYISEASPTRVRGALVSLNGFLITGGQFLSYVINLAFTSAPGTWRWMLGVAAVPALTQIILMVLLPESPRWLFRKGKQEEAKEILRRIYPPQDVEDEINALKESIETELNEEASASNKVSIMKLLKTKTVRRGLYAGMGLQIFQQFVGINTVMYYSPTIVQLAGFASNRVALLLSLVTAGLNAFGSILSIYFIDKTGRRKLLLFSLCGVVVSLVVLTVAFHETTTHSPMVSTIETSHFNNTCPDYSTAFNPGEWDCMKCLKASPECGFCASRANKVNVS

SEQ ID NO: 57484 - protein, 308 aa, Glycine max
  peptide (1)..(308): Ceres Seq. ID no. 15178160
MAAAINPAILIVGRVFVGLGVGMASMASPLYISEASPTRVRGALVSLNGFLITGGQFLSYVINLAFTSAPGTWRWMLGVAAVPALTQIILMVLLPESPRWLFRKGKQEEAKEILRRIYPPQDVEDEINALKESIETELNEEASASNKVSIMKLLKTKTVRRGLYAGMGLQIFQQFVGINTVMYYSPTIVQLAGFASNRVALLLSLVTAGLNAFGSILSIYFIDKTGRRKLLLFSLCGVVVSLVVLTVAFHETTTHSPMVSTIETSHFNNTCPDYSTAFNPGEWDCMKCLKASPECGFCASRANKVNVS

SEQ ID NO: 57485 - DNA, 1145 bp, Glycine max
  misc_feature (1)..(1145): Ceres Seq. ID no. 15170602
gtgttactgttctcagttcccttcatttcatccaaaaacaaaactctctcgttgtgttttgagacatggcatcctcgttggcacctgctaccaaagccgccactaatttgcgcctcacacactctctccgcttctctcctaaacccaacaacctacgctttgccaccaagcctggtaatacgctgttatgcgcaagggttaaggcccaattagatgaggttgcccttgatagttcctcaaatgctactcctcctatcaaagccaaatcaaaggaggaaccacccgcaaaacctttagctgaaccatcttcttcagtcttggcaactcaagaatcggtctctcagtttattactcaagttgcaagtcttgtcaagcttgttgattcgagagacattgtggagttgaagctgaagcagcatgatgttgaagtaacaattaggaaaaaggaggctatgcctcaaccaccacctcctcctcaacctgcggtggtgtattcatcccctccaccagtgttgccaccgccatccgtaccagcatctactccagcacctactctagctcgtgcaaccccttcaccaacttcagcccctgctgtgaagtcagctaaatcatcacttccgcctcttaaaagccccatggcagggacattctaccgaagtcctgcacccggtgaacctccctttgtgaaggttggagacaaagtaaagaaggggcaagttgtatgcatcattgaggcaatgaaattgatgaatgaaatagaagctgatcagtcaggaactatagttgaaattgttgcggaagatgccaaatctgtaagcgttgacactcccctatttgtgattcaaccatagagctcaaagtattcgaatggatggatgaagatctaagtcggtagttgaagtgtgaggctcatcaacccccccccccccccccccccccaccttcaaggtagagaggaagtgtaggaagattttgttctaaattgggatgacacggttgagaagaattattgcttacaatggatttattccttatttttcgcttttatatgattgcactatgttctagtgaaccttttttttgtttaggcaagttaaattgtatgatatttaatctcatgtagtttgtttttactttttgttttg

SEQ ID NO: 57486 - protein, 261 aa, Glycine max
  peptide (1)..(261): Ceres Seq. ID no. 15170603
MASSLAPATKAATNLRLTHSLRFSPKPNNLRFATKPGNTLLCARVKAQLDEVALDSSSNATPPIKAKSKEEPPAKPLAEPSSSVLATQESVSQFITQVASLVKLVDSRDIVELKLKQHDVEVTIRKKEAMPQPPPPPQPAVVYSSPPPVLPPPSVPASTPAPTLARATPSPTSAPAVKSAKSSLPPLKSPMAGTFYRSPAPGEPPFVKVGDKVKKGQVVCIIEAMKLMNEIEADQSGTIVEIVAEDAKSVSVDTPLFVIQP

SEQ ID NO: 57487 - protein, 132 aa, Glycine max
  peptide (1)..(132): Ceres Seq. ID no. 15170604
MPQPPPPPQPAVVYSSPPPVLPPPSVPASTPAPTLARATPSPTSAPAVKSAKSSLPPLKSPMAGTFYRSPAPGEPPFVKVGDKVKKGQVVCIIEAMKLMNEIEADQSGTIVEIVAEDAKSVSVDTPLFVIQP

SEQ ID NO: 57488 - DNA, 1586 bp, Glycine max
  misc_feature (1)..(1586): Ceres Seq. ID no. 13639645
agaacatcctaatcgaaaaaggaagtaacacaagccttcttcaagtgtttaattctcctctttaatttctctttagaatactcaacctttctcaagattctaatcaaaaggagagaaaaataaaatggccaccgaaaagcttagaggttgtgcaaatgtttttgcaagctctaaaccctacttggccatgatctctttacaatttggctatgcaggcatgaacattatcactaaggtttctctcaaccaaggcatgagccactatgtccttgtggtctatcgccacgcttttgccaccgctgtcatagctccttttgccattatttttgaaaggaaaggtcaaccgaagataacattcccagttttcatgcaaatttttattcttgctcttcttgggcctgtgattgatcaaaatttctactatgctgggttgaagctcacatccccaaccttctcatgtgcaatgagcaacatgcttccagccatgacttttgtgatggcagtgttttgccggatggagaagatagaaataaagaaggtgagatgcatggcaaagatagtgggaacattagtcacagtggcaggggctatgctgatgaccttatatagaggtcctatagtggagatggtatgggccaaacatccacacaataaaaccaatgcaacaaccacgacagaatcatttgacaaagattggttcttaggatgcacctttcttatcattgccaccctagcttgggcatccctatttgttttacaagccaaagctattcagacgtacaagaatcatcagttaagtctaacttcacttgtgtgctttattggcactcttcaagctattgctgttacttttgttgttgaacacaatccttctgtatggagaattggctgggatgtgagcttacttgctgctgcatatgctgggattgtgacatcaagcatatcatactatgtacaaggactggtaattaagatgaaaggacctgtctttgcaactgcctttagccctttaatgatgatcattgtggccatcatgggatccttcatccttgcggaacaaatttatcttggaggtgtaattggtgccatcttaatcgttatagggttatactcagttctgtggggaaagcacaaagaacaaatagagagcaaagtggcagatgaaattcccttgcctgtaaaagatgctcaaattgctgtaattgcagggccaatgattgatgccacagataattttactgaagaaaaatatggtcagaaaggagaagccaacaacaacaagctctcttcacacataataactatgcctattccagagcttcccactaaagctaaccaagagagaaagacttgagtaatttggaatgtgaataggaattaatgttttttaaatgtatgttccatcaaccccatttttccctttttagcaattattcctttctcctttctcttttttttttcttttttctttgctaccaaaagggtcttgtttgttgcatttaagcaatatataacatatataaatatgtaaaaaattccaacttgctagtcaaagtagaatagagaatcataaagcttatctctcc

SEQ ID NO: 57489 - protein, 409 aa, Glycine max
  peptide (1)..(409): Ceres Seq. ID no. 15220462
MATEKLRGCANVFASSKPYLAMISLQFGYAGMNIITKVSLNQGMSHYVLVVYRHAFATAVIAPFAIIFERKGQPKITFPVFMQIFILALLGPVIDQNFYYAGLKLTSPTFSCAMSNMLPAMTFVMAVFCRMEKIEIKKVRCMAKIVGTLVTVAGAMLMTLYRGPIVEMVWAKHPHNKTNATTTTESFDKDWFLGCTFLIIATLAWASLFVLQAKAIQTYKNHQLSLTSLVCFIGTLQAIAVTFVVEHNPSVWRIGWDVSLLAAAYAGIVTSSISYYVQGLVIKMKGPVFATAFSPLMMIIVAIMGSFILAEQIYLGGVIGAILIVIGLYSVLWGKHKEQIESKVADEIPLPVKDAQIAVIAGPMIDATDNFTEEKYGQKGEANNNKLSSHIITMPIPELPTKANQERKT

SEQ ID NO: 57490 - protein, 388 aa, Glycine max
  peptide (1)..(388): Ceres Seq. ID no. 15220463
MISLQFGYAGMNIITKVSLNQGMSHYVLVVYRHAFATAVIAPFAIIFERKGQPKITFPVFMQIFILALLGPVIDQNFYYAGLKLTSPTFSCAMSNMLPAMTFVMAVFCRMEKIEIKKVRCMAKIVGTLVTVAGAMLMTLYRGPIVEMVWAKHPHNKTNATTTTESFDKDWFLGCTFLIIATLAWASLFVLQAKAIQTYKNHQLSLTSLVCFIGTLQAIAVTFVVEHNPSVWRIGWDVSLLAAAYAGIVTSSISYYVQGLVIKMKGPVFATAFSPLMMIIVAIMGSFILAEQIYLGGVIGAILIVIGLYSVLWGKHKEQIESKVADEIPLPVKDAQIAVIAGPMIDATDNFTEEKYGQKGEANNNKLSSHIITMPIPELPTKANQERKT

SEQ ID NO: 57491 - protein, 378 aa, Glycine max
  peptide (1)..(378): Ceres Seq. ID no. 15220464
MNIITKVSLNQGMSHYVLVVYRHAFATAVIAPFAIIFERKGQPKITFPVFMQIFILALLGPVIDQNFYYAGLKLTSPTFSCAMSNMLPAMTFVMAVFCRMEKIEIKKVRCMAKIVGTLVTVAGAMLMTLYRGPIVEMVWAKHPHNKTNATTTTESFDKDWFLGCTFLIIATLAWASLFVLQAKAIQTYKNHQLSLTSLVCFIGTLQAIAVTFVVEHNPSVWRIGWDVSLLAAAYAGIVTSSISYYVQGLVIKMKGPVFATAFSPLMMIIVAIMGSFILAEQIYLGGVIGAILIVIGLYSVLWGKHKEQIESKVADEIPLPVKDAQIAVIAGPMIDATDNFTEEKYGQKGEANNNKLSSHIITMPIPELPTKANQERKT

SEQ ID NO: 57492 - DNA, 1132 bp, Glycine max
  misc_feature (1)..(1132): Ceres Seq. ID no. 14314252
gacactgcggtacagagagaggcaagtcccacatggatgttccaaacagcccggaaatctcggttgatgttcctccttaccttcgagtgcacaaagacagcacggtcgagagaattgccggcacccaagtcgttcccgcaggcctcgattccgacaccaacgttgtctccaaagacatcctcgtcgtccccgaaaccggcgtcactggcagactctaccgtcccaattccaccccgccaaccgccaataagctccctttacttgtctacttccacggcggcgccttctgcatctcctccgcctccgatcctctctaccacacctctctcaacaacctcgtcgccgaggccaacgttgtcgctctctccgtcaattacaggctcgcgccagaacaccctcttcccaccgcgtaccaagactcttggtccgcgattcaatgggtcgctgacgcctctcgtgctaaacaacaccaccaagaagattggatcagggacaacgttgactttgacagagtcttcctagcaggggacagcgcaggtgccaacctgggacactacatggccttaaaattgaataataattttccaacaaatgatggtttcgatttcaaggttgcgggtcttatcatggtgaacccttatttctggggaaaggaagcaattggagtggagattactgatccggagaggaagaagatggtggataagtggtggagttttgtttgtccttcggataaagggaacgatgaccctttgattaacccctttgtggaggaggctccgggtattgaaggggttgcttgcgatagggttcttgttactgttgcggagaaagacatactgagggaaagggggaagctttatcacaaaatgttgagtaacagtgactggagaggaactgctgagttccacgagactccaggggaggatcatgtgtttcacatcttcaaccccaactgcgagcaagcaaagagtttgattaaacgcattgctcatttcattaatgaacattgaatgtttactgtcattttgttcttttttcttgtgttgtgttgtgtgtggatccattaataaaattcaactttgacatttaggttttgattttgatggaatacaataagttttgattcctc

SEQ ID NO: 57493 - protein, 336 aa, Glycine max
  peptide (1)..(336): Ceres Seq. ID no. 14314253
HCGTERGKSHMDVPNSPEISVDVPPYLRVHKDSTVERIAGTQVVPAGLDSDTNVVSKDILVVPETGVTGRLYRPNSTPPTANKLPLLVYFHGGAFCISSASDPLYHTSLNNLVAEANVVALSVNYRLAPEHPLPTAYQDSWSAIQWVADASRAKQHHQEDWIRDNVDFDRVFLAGDSAGANLGHYMALKLNNNFPTNDGFDFKVAGLIMVNPYFWGKEAIGVEITDPERKKMVDKWWSFVCPSDKGNDDPLINPFVEEAPGIEGVACDRVLVTVAEKDILRERGKLYHKMLSNSDWRGTAEFHETPGEDHVFHIFNPNCEQAKSLIKRIAHFINEH

SEQ ID NO: 57494 - protein, 326 aa, Glycine max
  peptide (1)..(326): Ceres Seq. ID no. 14314254
MDVPNSPEISVDVPPYLRVHKDSTVERIAGTQVVPAGLDSDTNVVSKDILVVPETGVTGRLYRPNSTPPTANKLPLLVYFHGGAFCISSASDPLYHTSLNNLVAEANVVALSVNYRLAPEHPLPTAYQDSWSAIQWVADASRAKQHHQEDWIRDNVDFDRVFLAGDSAGANLGHYMALKLNNNFPTNDGFDFKVAGLIMVNPYFWGKEAIGVEITDPERKKMVDKWWSFVCPSDKGNDDPLINPFVEEAPGIEGVACDRVLVTVAEKDILRERGKLYHKMLSNSDWRGTAEFHETPGEDHVFHIFNPNCEQAKSLIKRIAHFINEH

SEQ ID NO: 57495 - protein, 173 aa, Glycine max
  peptide (1)..(173): Ceres Seq. ID no. 14314255
DTAVQREASPTWMFQTARKSRLMFLLTFECTKTARSRELPAPKSFPQASIPTPTLSPKTSSSSPKPASLADSTVPIPPRQPPISSLYLSTSTAAPSASPPPPILSTTPLSTTSSPRPTLSLSPSITGSRQNTLFPPRTKTLGPRFNGSLTPLVLNNTTKKIGSGTTLTLTESS

SEQ ID NO: 57496 - DNA, 1371 bp, Glycine max
  misc_feature (1)..(1371): Ceres Seq. ID no. 15172553
aaaccacgaaaggatgcgagaataagaatagctttatagttaacacacacttcgtcttgttgctgagacaagagtcataatcttggctgtaacaggttgaacactgcatcgcaaattctgaatggaaatgtgtggagccacagctctgacatggtctcacaccatctgtccatcgcttcaccttcctcgatccgtctctaccagggaggctaggaggagcttcagtgtttggtgtgtctctgatcaagaccccaagggaaataaaatgatcatatctgtaactggagcaacaggttttattggtagaaggttggtgcaaagattacatgcagacaatcacagtgttcatgtcttgacacgatccaaatctaacgcagaaacaatttttccggcaaaagactttcctggaatcaagatagcagaagagccggaatggaaagatagcattcagggctcaacgggggttgtgaatttggctggactgcccataagtacccgatggtctcctgagataaaaaaggaaatcaagcaaagcaggattcgagtgacctcaaaggttgtagaattgataaacagtgcaccagacgatattcgacctaaagtttttgttagtgctacagctgttggttattatggcaccagtgagacacaagtctttgatgaacaaagtccatcaggaaaggattacttggctgaggtttgtagggaatgggaatcgacagccctaaaggtaaacggaggtgttagagtggctctaattcgcattggtgttgttcttggtaaagatggtggagcattagctaaaatgatacctatgttcaagttgtttgctggtggacctctaggctctggaacacaatggttctcctggattcatttggaagacattgtcaatttaatatatgaaacgctgtcaaatccatcttacaaaggtgttatcaatggaactgcaccaaatcctgtgcgattggcagaattgtgtgatcagctgggacatgccttgggtcgtccctcatggctaccagtaccagactttgcgctcaaggctgtccttggagaaggtgctactgtggttttagaagggcagaaagtgcttcctactcaagctaagaagttgggtttcccattcaaatattcttacgtgaaggatgccctgcaagcaattctttcttgaaagctgcatagcagctactgccacattcttaattcttttgacatcagtggcattcaccgtattgagatttttgaaagcgatagatatacttctgaagatgtgattgaattgtaatctattttatttttggtcatgtgaattcaaaaacgtaactattaactaacaaaaaaaaaaaaaaaaaaaaaaaaaaaaaaaag

SEQ ID NO: 57497 - protein, 350 aa, Glycine max
  peptide (1)..(350): Ceres Seq. ID no. 15172554
MEMCGATALTWSHTICPSLHLPRSVSTREARRSFSVWCVSDQDPKGNKMIISVTGATGFIGRRLVQRLHADNHSVHVLTRSKSNAETIFPAKDFPGIKIAEEPEWKDSIQGSTGVVNLAGLPISTRWSPEIKKEIKQSRIRVTSKVVELINSAPDDIRPKVFVSATAVGYYGTSETQVFDEQSPSGKDYLAEVCREWESTALKVNGGVRVALIRIGVVLGKDGGALAKMIPMFKLFAGGPLGSGTQWFSWIHLEDIVNLIYETLSNPSYKGVINGTAPNPVRLAELCDQLGHALGRPSWLPVPDFALKAVLGEGATVVLEGQKVLPTQAKKLGFPFKYSYVKDALQAILS

SEQ ID NO: 57498 - protein, 348 aa, Glycine max
  peptide (1)..(348): Ceres Seq. ID no. 15172555
MCGATALTWSHTICPSLHLPRSVSTREARRSFSVWCVSDQDPKGNKMIISVTGATGFIGRRLVQRLHADNHSVHVLTRSKSNAETIFPAKDFPGIKIAEEPEWKDSIQGSTGVVNLAGLPISTRWSPEIKKEIKQSRIRVTSKVVELINSAPDDIRPKVFVSATAVGYYGTSETQVFDEQSPSGKDYLAEVCREWESTALKVNGGVRVALIRIGVVLGKDGGALAKMIPMFKLFAGGPLGSGTQWFSWIHLEDIVNLIYETLSNPSYKGVINGTAPNPVRLAELCDQLGHALGRPSWLPVPDFALKAVLGEGATVVLEGQKVLPTQAKKLGFPFKYSYVKDALQAILS

SEQ ID NO: 57499 - protein, 302 aa, Glycine max
  peptide (1)..(302): Ceres Seq. ID no. 15172556
MIISVTGATGFIGRRLVQRLHADNHSVHVLTRSKSNAETIFPAKDFPGIKIAEEPEWKDSIQGSTGVVNLAGLPISTRWSPEIKKEIKQSRIRVTSKVVELINSAPDDIRPKVFVSATAVGYYGTSETQVFDEQSPSGKDYLAEVCREWESTALKVNGGVRVALIRIGVVLGKDGGALAKMIPMFKLFAGGPLGSGTQWFSWIHLEDIVNLIYETLSNPSYKGVINGTAPNPVRLAELCDQLGHALGRPSWLPVPDFALKAVLGEGATVVLEGQKVLPTQAKKLGFPFKYSYVKDALQAILS

SEQ ID NO: 57500 - DNA, 1599 bp, Glycine max
  misc_feature (1)..(1599): Ceres Seq. ID no. 14314319
acccttttcgaagcttgaggaggaagagtgcctcggtattggcgatgaaaaaaatgaagactcaatcatggcgttgatgatgaataagcggggcagtaccttttttgaccaaagaaagaaagccaccacagttaaaataaaaaacttgtccctttgacaagcacttcttagctctctctccgccattctttctttattgctccctccctcctttcccctcctctcccacacgcttcttcttatcctcattccctttcttcaattccattttcacatccttccttcaacttccactgttagaaacttcacgtatgcaaccatgcttctttaccaaccacccaaagaagaggtagaaagaaccatgaagggcaacaacgttttggatctgaaaacgttaattgatgagcttgagtcatcatcaattgaagtcccttcggtttttatctgccctatttcacttgagccaatgctagacccggtgaccctttgcacgggacaaacctacgaccgttccaacatcctcagatggttctccctcggtcacaacacgtgtcccacaacaatgcaagagctttgggatgattcggtcacaccaaacaccacactccaccacttcatactctcttggttctctcacaagtacttggtcatgaagaagaagctcgaggacgttcaaggcacggccttggagctcttggacacgttaaagaaggtaaagggtcaaaatagagttcgagctctcaaacaacttcgccaactcgttgattcccacgtgtccacgaggaaaaccgttgaggaaaataatggttcttctttgatttcttccttgctgggtcctttcacttcccacgctgttggttcggaagcaattgggattctcgtgaatttggagttgggttcggagttgaagaggagtctcatggaccccgcgaaggtgtcgttgttggtggacatcatgaacgagggaacaattcagacaaagatgaattgtgccaaattgattcaaacgttgttggtagaaggtgacccctccgagacagttgttttatcaagtttgagtcttttggttggggtgttgaggttagtgagagataagaaacaccccactagtgttgtaaccggactcatattactcaaaattgtatcttcgcgtgaatccgttagaggctcaattataagcataggagcggtgcctcaattgattcagcttttacccactttgaataatgagtgtttggagatagcacttcatattcttgaggttttgtcaacacttcctgaagggagaatggctttgaaagagtgtccaaatattattcccaatgtggtcaagttgttgatgagagtttcagagagttgcacacaatttgcattgtcgatattgtgggctatttacaagcttgccccagaggaatgtgcttcgaaagctgtggaggcagggttggcggcgaagctactgctagtaattcagagtggttgcaacccggtgttaaagcagaaatctaccgagtttttgaaaatgtgcagcctagattactctactagtattttgatttccaagtgtatgcttactgcaacaatacaatgaaattcaaaacc

SEQ ID NO: 57501 - protein, 422 aa, Glycine max
  peptide (1)..(422): Ceres Seq. ID no. 14314320
MLLYQPPKEEVERTMKGNNVLDLKTLIDELESSSIEVPSVFICPISLEPMLDPVTLCTGQTYDRSNILRWFSLGHNTCPTTMQELWDDSVTPNTTLHHFILSWFSHKYLVMKKKLEDVQGTALELLDTLKKVKGQNRVRALKQLRQLVDSHVSTRKTVEENNGSSLISSLLGPFTSHAVGSEAIGILVNLELGSELKRSLMDPAKVSLLVDIMNEGTIQTKMNCAKLIQTLLVEGDPSETVVLSSLSLLVGVLRLVRDKKHPTSVVTGLILLKIVSSRESVRGSIISIGAVPQLIQLLPTLNNECLEIALHILEVLSTLPEGRMALKECPNIIPNVVKLLMRVSESCTQFALSILWAIYKLAPEECASKAVEAGLAAKLLLVIQSGCNPVLKQKSTEFLKMCSLDYSTSILISKCMLTATIQ

SEQ ID NO: 57502 - protein, 408 aa, Glycine max
  peptide (1)..(408): Ceres Seq. ID no. 14314321
MKGNNVLDLKTLIDELESSSIEVPSVFICPISLEPMLDPVTLCTGQTYDRSNILRWFSLGHNTCPTTMQELWDDSVTPNTTLHHFILSWFSHKYLVMKKKLEDVQGTALELLDTLKKVKGQNRVRALKQLRQLVDSHVSTRKTVEENNGSSLISSLLGPFTSHAVGSEAIGILVNLELGSELKRSLMDPAKVSLLVDIMNEGTIQTKMNCAKLIQTLLVEGDPSETVVLSSLSLLVGVLRLVRDKKHPTSVVTGLILLKIVSSRESVRGSIISIGAVPQLIQLLPTLNNECLEIALHILEVLSTLPEGRMALKECPNIIPNVVKLLMRVSESCTQFALSILWAIYKLAPEECASKAVEAGLAAKLLLVIQSGCNPVLKQKSTEFLKMCSLDYSTSILISKCMLTATIQ

SEQ ID NO: 57503 - protein, 373 aa, Glycine max
  peptide (1)..(373): Ceres Seq. ID no. 14314322
MLDPVTLCTGQTYDRSNILRWFSLGHNTCPTTMQELWDDSVTPNTTLHHFILSWFSHKYLVMKKKLEDVQGTALELLDTLKKVKGQNRVRALKQLRQLVDSHVSTRKTVEENNGSSLISSLLGPFTSHAVGSEAIGILVNLELGSELKRSLMDPAKVSLLVDIMNEGTIQTKMNCAKLIQTLLVEGDPSETVVLSSLSLLVGVLRLVRDKKHPTSVVTGLILLKIVSSRESVRGSIISIGAVPQLIQLLPTLNNECLEIALHILEVLSTLPEGRMALKECPNIIPNVVKLLMRVSESCTQFALSILWAIYKLAPEECASKAVEAGLAAKLLLVIQSGCNPVLKQKSTEFLKMCSLDYSTSILISKCMLTATIQ

SEQ ID NO: 57504 - DNA, 1177 bp, Glycine max
  misc_feature (1)..(1177): Ceres Seq. ID no. 15177758
catctcaagtcttatcatcttcatctcccaagggattcaatacaataccaggctagaagaaactccactcatcaccatctcaagcaactaattaacaagctagtactctttgagtgtttggcaattggcttagatttcttgtacttggaacaagatggaaagcactgtcacatttgagactgatctcaacctcaaggcaaccgagcttagattggggcttccaggaacagaagaaattgttgaaaaaccacttcctgcaagtgctagaattaccaacaaaaggcctttgtctgaaacctctgaggagtgtgcttcaaagggttctagtgctccacatgtggaaactgaagcagcccctcctgccaaggctaagatagtggggtggccaccaatcagatcctacagaaagaacagccttcaggagaatgatggtgctgggatttatgtgaaagtgagcatggatggagctccttacctcagaaagatagacttgaaggtctatggaggctacacacaactcctcaaagctctagaaaacatgttcaagttgaccataggtgagtattctgaaaaagaaggttataagggatctgactatgcacctacatatgaagacaaagatggtgactggatgttagttggagatgttccatgggacatgtttgtgacttcttgcaaaaggctaagaatcatgaaaggatcagaggcaaggggtttgggttgtgctgtatgagaaaaccaaaccactaaaaattactatgagcagagaattaaaaaaagtgttttgggggtgaagggaaaaacatgctgaaaagcttgtgttctcggatctgaagggttttgacttttgaaatcactctagtgtgtgcttttggcatacctttatatggagttatactctgaagcaggagaagatggaagatacggtgcagtttcgatcttcctcaagtttggcaacttttatggttattattttggcatctgtggttggatgctatgcttatgatgttgtttccactgatcctttttgaagtttcatgtgagaaatcttagagatttcaaatgaaactttgtgtagaggagagatagaaaattaaaggttatatgtaatattgtttaatccaagttttttggttgtgttgatacaagaatacaatgtaatatactaagtgttggt

SEQ ID NO: 57505 - protein, 192 aa, Glycine max
  peptide (1)..(192): Ceres Seq. ID no. 15177759
MESTVTFETDLNLKATELRLGLPGTEEIVEKPLPASARITNKRPLSETSEECASKGSSAPHVETEAAPPAKAKIVGWPPIRSYRKNSLQENDGAGIYVKVSMDGAPYLRKIDLKVYGGYTQLLKALENMFKLTIGEYSEKEGYKGSDYAPTYEDKDGDWMLVGDVPWDMFVTSCKRLRIMKGSEARGLGCAV

SEQ ID NO: 57506 - DNA, 1636 bp, Glycine max
  misc_feature (1)..(1636): Ceres Seq. ID no. 14315418
agagtgtaaagtgtaaaacgttggttttctctgagaatggcaatgcaggcaggggaactctgtcagcaccaaagtccacattgccctctcattttcttcaacccgattcccgattttggttccttcagcggagggttgtttctcgagcccaaaatccccgattccttcgttcgttccatttcgctgaagatccactccactcccttttcagaatccaatcctcgccgccaccggagaagggttccggcagcgtgctttctatcggtgagcttgccgagtgcaaatctcgttaccgaacccaaactgcaaaatggcgaacacgtgtcagaccaggtgacaacctcaaacggtgtcgttctgcaaagaaaggttagggtacgaggaggcaatgccgtcaacaccaccaaacatctctgggccggtgctgtagccgctatggtctctagaacttgtgtggctccacttgaaaggcttaagttggagtacatagtccgtggtgagaagaggagcatattcgagcttattagcaaaattgcttcttctcaagggttgagaggattttggaaaggcaaccttgtgaatattctgcggacagctccattcaaagcggttaatttttgtgcttacgatacttatagaaagcagctgcttaggttttctgggaatgaggaaactaccaattttgagaggtttattgctggtgctgctgctgggattactgctaccattatctgcctccctcttgacactatccgaaccaagttggtggcacctggtggagaagctttgggcggtgtaattggtgctttcagatacatgattcgaactgaaggattcttttctctttacaagggtttagtgccatcaattataaaaggaatgaagagaatccagaatatgcataaacagggtcaggaactgagtgcctttgaccaacttgagttgggaccggtaaggacattgttgaatggggctattgctggtgcttgtgcagaagctgctacatacccatttgaagtggtgagaaggcaacttcaattgcaagtccaggctacaaaattaagttcttttgcaacatttgccaaaatagttgaacagggaggcattccagctctctatgcaggacttattcccagcttattacaggtgcttccttcagcttccataagtttctttgtctatgagttcatgaagattgttctgaaagtggagtaggcaatgaacaaattcccaggtatatactgctaagaagctgcaccatgatttacgggcaagctgctaaaatagttacagaatagtaacattcaattttaattggcaatcatatttgatgtctgcctttgagggtgaaaggataattcaggtctgctatcccgtacaactgatcacagtatcaacagaatttttggattgactctacactcaatatacccaggcttcaagtctgcaaagtgaaaataaatttattttgttactcccagatcttgaatcctattctcattaggtttacacaattttgttagttttttttttccatctggcagtaagtcttgatcattatcatggggcgtacaagcaaagtccaattactttataagttataacctgaaatgtagcttataaattattcttgtgc

SEQ ID NO: 57507 - protein, 392 aa, Glycine max
  peptide (1)..(392): Ceres Seq. ID no. 14315419
MAMQAGELCQHQSPHCPLIFFNPIPDFGSFSGGLFLEPKIPDSFVRSISLKIHSTPFSESNPRRHRRRVPAACFLSVSLPSANLVTEPKLQNGEHVSDQVTTSNGVVLQRKVRVRGGNAVNTTKHLWAGAVAAMVSRTCVAPLERLKLEYIVRGEKRSIFELISKIASSQGLRGFWKGNLVNILRTAPFKAVNFCAYDTYRKQLLRFSGNEETTNFERFIAGAAAGITATIICLPLDTIRTKLVAPGGEALGGVIGAFRYMIRTEGFFSLYKGLVPSIIKGMKRIQNMHKQGQELSAFDQLELGPVRTLLNGAIAGACAEAATYPFEVVRRQLQLQVQATKLSSFATFAKIVEQGGIPALYAGLIPSLLQVLPSASISFFVYEFMKIVLKVE

SEQ ID NO: 57508 - protein, 390 aa, Glycine max
  peptide (1)..(390): Ceres Seq. ID no. 14315420
MQAGELCQHQSPHCPLIFFNPIPDFGSFSGGLFLEPKIPDSFVRSISLKIHSTPFSESNPRRHRRRVPAACFLSVSLPSANLVTEPKLQNGEHVSDQVTTSNGVVLQRKVRVRGGNAVNTTKHLWAGAVAAMVSRTCVAPLERLKLEYIVRGEKRSIFELISKIASSQGLRGFWKGNLVNILRTAPFKAVNFCAYDTYRKQLLRFSGNEETTNFERFIAGAAAGITATIICLPLDTIRTKLVAPGGEALGGVIGAFRYMIRTEGFFSLYKGLVPSIIKGMKRIQNMHKQGQELSAFDQLELGPVRTLLNGAIAGACAEAATYPFEVVRRQLQLQVQATKLSSFATFAKIVEQGGIPALYAGLIPSLLQVLPSASISFFVYEFMKIVLKVE

SEQ ID NO: 57509 - protein, 259 aa, Glycine max
  peptide (1)..(259): Ceres Seq. ID no. 14315421
MVSRTCVAPLERLKLEYIVRGEKRSIFELISKIASSQGLRGFWKGNLVNILRTAPFKAVNFCAYDTYRKQLLRFSGNEETTNFERFIAGAAAGITATIICLPLDTIRTKLVAPGGEALGGVIGAFRYMIRTEGFFSLYKGLVPSIIKGMKRIQNMHKQGQELSAFDQLELGPVRTLLNGAIAGACAEAATYPFEVVRRQLQLQVQATKLSSFATFAKIVEQGGIPALYAGLIPSLLQVLPSASISFFVYEFMKIVLKVE

SEQ ID NO: 57510 - DNA, 1252 bp, Glycine max
  misc_feature (1)..(1252): Ceres Seq. ID no. 15170595
atgttcacaccaactaactacacatccgaatccatgaacaccaatctcataaggccttgtctctcgctctcgctctcgcgtcgctgctctattccgttcttcacgtgacatcacggcctcaagaaacgtcgtcgtattagagaaaggcgcgtaacgcatgaagagacaaatgttgcatgatctgattgagaatgcaggaggctgcgctgtcaccgatggaggattcgccacgcagctcgaaaagcatggagcctccatcaacgatcctctttggagcgccatctatttgatcaaagacccacatcttatcaaacaggttcacttggaatacttggaggctggtgctgatatattggttacttcatcataccaggctacacttcctggattttcatcgaagggtctatccattgaggaaggggaatcactactagagaagagtgtcaaattggcagttgaagcccgtgatggtttctggaattcagctataataaatcctgggaataaatacagaagagctttggttgcagcctccattggaagctacggatcttaccttgctgatggctcagaatacagtggctgctatggacctgatgtaaatttaaagaagttgaaggattttcatcgccgcagattgcaagttcttgttgaagctggtccagatttacttgcctttgagaccattccaaacaaacttgaagctcaggcttgtgtcgaattgcttgaagaagaaagtgtcaaaatcccatcttggatctgttttaccactgtagatggtgagaatgctccctcaggagagagtttcaaggactgccttgaagcattaaataagagtaacaaagtagatgctgttggtataaactgtgcacctccccatcttatggaaaatctcatttgcaaatttaagcagttaacaaagaaggccatcattgtttatcccaatagtggggaggtatgggatggtaaagccaagaaatggcttccatctaagtgttttcacgatgatgaatttggatttaatgcaacaaggtggcgtgatttgggagctaaaataataggaggttgttgccggactacaccctccaccattcaaattatttcaaatgctttaagagaaaaatcttgattgtgctagtagatgcaactttttttgacaaattgcaatatcttgtctagttattttctataatctatagtctaaatttaaattgtttaaaaaaaaaaaaaaaaaaaaaaaaaaaaaaaaaag

SEQ ID NO: 57511 - protein, 323 aa, Glycine max
  peptide (1)..(323): Ceres Seq. ID no. 15170596
MKRQMLHDLIENAGGCAVTDGGFATQLEKHGASINDPLWSAIYLIKDPHLIKQVHLEYLEAGADILVTSSYQATLPGFSSKGLSIEEGESLLEKSVKLAVEARDGFWNSAIINPGNKYRRALVAASIGSYGSYLADGSEYSGCYGPDVNLKKLKDFHRRRLQVLVEAGPDLLAFETIPNKLEAQACVELLEEESVKIPSWICFTTVDGENAPSGESFKDCLEALNKSNKVDAVGINCAPPHLMENLICKFKQLTKKAIIVYPNSGEVWDGKAKKWLPSKCFHDDEFGFNATRWRDLGAKIIGGCCRTTPSTIQIISNALREKS

SEQ ID NO: 57512 - protein, 319 aa, Glycine max
  peptide (1)..(319): Ceres Seq. ID no. 15170597
MLHDLIENAGGCAVTDGGFATQLEKHGASINDPLWSAIYLIKDPHLIKQVHLEYLEAGADILVTSSYQATLPGFSSKGLSIEEGESLLEKSVKLAVEARDGFWNSAIINPGNKYRRALVAASIGSYGSYLADGSEYSGCYGPDVNLKKLKDFHRRRLQVLVEAGPDLLAFETIPNKLEAQACVELLEEESVKIPSWICFTTVDGENAPSGESFKDCLEALNKSNKVDAVGINCAPPHLMENLICKFKQLTKKAIIVYPNSGEVWDGKAKKWLPSKCFHDDEFGFNATRWRDLGAKIIGGCCRTTPSTIQIISNALREKS

SEQ ID NO: 57513 - DNA, 1043 bp, Glycine max
  misc_feature (1)..(1043): Ceres Seq. ID no. 14306138
tctctgttagcactctcctctcgacgattccctgtgatctctctctctctttctctctctttctctctcagtcttctctcgctgtggttcagatttcagagcaggatccaaaagccttgcttggtcaagactcattcatgtctgttcctaatgaggaaaacttgtcgtcacattcccagctttcttctcattttttcttggatctccttgattccatcatagttgatgtagcatcagagtgtcacagagtagcaaggctggggcttgattctaatttggaagaagaagatgaagaattgaagctatcggcacaagccagggttagggtggctgatcctagtaacagtaatgaagcaaatggcaagtatgtggttgacatatttggacaaacccatcctcctgtggcaaatgaaatatttgattgcatgaattgtggtcgatccatcatgactgggaggtttgctccacatttggagaagtgcatgggaaagggtaggaaggcacgtctgaaagtgacaagaagcagcacagccgcgcagaaccggtattcacgaggcagtcctagtcctggttctacatattctccatattcaaattactctaccaatagcatgaatcggttggcaaatggaacctccacttttgcaggtgaggagcactcaaatgggacactggagtcatgaactagttcatgtgtaatggctggaatacaggatttctgtcataccttgaacttgtttcttcgccgggagatgtggctgaatttaattgtgtttgaaaataatatttcaaacattttggacctaaacataacaaccatcgttgcctacatcctcgaattgttgtctaccttaaaaaaaaaaaactttgctttttacagtgagttccattgtaattttattatgttttactcctagttccgttgtaattttattataattttactatctgttaacatatgtatattgtgtgcaactatgaactagtattgttcatggatgaaaagatgctcagggttgagatgaataatacacagacatttg

SEQ ID NO: 57514 - protein, 226 aa, Glycine max
  peptide (1)..(226): Ceres Seq. ID no. 14306139
SVSTLLSTIPCDLSLSFSLFLSQSSLAVVQISEQDPKALLGQDSFMSVPNEENLSSHSQLSSHFFLDLLDSIIVDVASECHRVARLGLDSNLEEEDEELKLSAQARVRVADPSNSNEANGKYVVDIFGQTHPPVANEIFDCMNCGRSIMTGRFAPHLEKCMGKGRKARLKVTRSSTAAQNRYSRGSPSPGSTYSPYSNYSTNSMNRLANGTSTFAGEEHSNGTLES

SEQ ID NO: 57515 - protein, 181 aa, Glycine max
  peptide (1)..(181): Ceres Seq. ID no. 14306140
MSVPNEENLSSHSQLSSHFFLDLLDSIIVDVASECHRVARLGLDSNLEEEDEELKLSAQARVRVADPSNSNEANGKYVVDIFGQTHPPVANEIFDCMNCGRSIMTGRFAPHLEKCMGKGRKARLKVTRSSTAAQNRYSRGSPSPGSTYSPYSNYSTNSMNRLANGTSTFAGEEHSNGTLES

SEQ ID NO: 57516 - DNA, 594 bp, Glycine max
  misc_feature (1)..(594): Ceres Seq. ID no. 15168472
aagtgaggatagaggctggggctgtggctgaggctgagttctgtaattgtgttttggctgtggacaatggctctgtcttctgggcttttcttgtgttcttcttcccgtgttctcccaccaccagaaacccacactttcatgaggaccaggccttcttctgctgccttgcgcaccatttccgttagctgttgcaccgtctctcagtcgtctaagccagcccgcaaaatccgtggtatcatgaaaccccgcaaagtctcccccgagatggaagacctcgtcggcgctcccgagatggctcgaacccaagtcctcaaacggatttgggcttacattaaggacaacaatcttcaggaccctacagacaagaggactataaattgcgatgagaagctgaagaaggtgtttgcagggaaagatcaagttgagatgctagagattgctcgcttgattagccctcacttccttaaaagtgaaagtgaaagttaagtttttgtatgaaggtcatgctttggtgtattgaacaattacatttggccttgagacatagtagcgtttagtttttgtggtactctgaaaacagaacgagccttgttg

SEQ ID NO: 57517 - protein, 139 aa, Glycine max
  peptide (1)..(139): Ceres Seq. ID no. 15168473
MALSSGLFLCSSSRVLPPPETHTFMRTRPSSAALRTISVSCCTVSQSSKPARKIRGIMKPRKVSPEMEDLVGAPEMARTQVLKRIWAYIKDNNLQDPTDKRTINCDEKLKKVFAGKDQVEMLEIARLISPHFLKSESES

SEQ ID NO: 57518 - protein, 115 aa, Glycine max
  peptide (1)..(115): Ceres Seq. ID no. 15168474
MRTRPSSAALRTISVSCCTVSQSSKPARKIRGIMKPRKVSPEMEDLVGAPEMARTQVLKRIWAYIKDNNLQDPTDKRTINCDEKLKKVFAGKDQVEMLEIARLISPHFLKSESES

SEQ ID NO: 57519 - protein, 82 aa, Glycine max
  peptide (1)..(82): Ceres Seq. ID no. 15168475
MKPRKVSPEMEDLVGAPEMARTQVLKRIWAYIKDNNLQDPTDKRTINCDEKLKKVFAGKDQVEMLEIARLISPHFLKSESES

SEQ ID NO: 57520 - DNA, 749 bp, Glycine max
  misc_feature (1)..(749): Ceres Seq. ID no. 15173807
aaaaaaaatatttgagaggatcgtgagagggacggtagcagagattccgtgagttgcaaaaatgaaaacaattctttctgcagagaccatgaacatcccggacggcgtgagcgtcaaggttaatgccaaggtcatcgaagttgagggcccccgcggaaaattggtgcgagacttcaagcacttgaatctcgattttcagctcatcactgacgaaaacggtaaaaggaagctgaaggtggaggcctggttcggttctcggaaaacatccgccgccattcgcaccgccctgagccacgtggagaatctgatcaccggcgtcaccaagggctaccgctacaaaatgaggttcgtttatgcccattttcccatcaacgcaagcatcggcaacgacaacaagtctattgagatcagaaatttccttggcgaaaagaaggtgagaaaagtggaccttcttaacggtgtttccgttgttcgatctgaaaaagttaaagatgaattgattttggatgggaacgacattgaacttgtttctaggtcctgtgctctcattaaccagaaatgccatgttaaaaagaaggatatcaggaaatttctcgatggcatttatgttagtgagaagggaacaatactggaagagtagatgttgaaaacaacaagcaccttgattgtttagtttgggttgcttttttgttaactgtttgagattggattttacaattttgtgttgtcaaacttttccttttgcgaat

SEQ ID NO: 57521 - protein, 192 aa, Glycine max
  peptide (1)..(192): Ceres Seq. ID no. 15173808
MKTILSAETMNIPDGVSVKVNAKVIEVEGPRGKLVRDFKHLNLDFQLITDENGKRKLKVEAWFGSRKTSAAIRTALSHVENLITGVTKGYRYKMRFVYAHFPINASIGNDNKSIEIRNFLGEKKVRKVDLLNGVSVVRSEKVKDELILDGNDIELVSRSCALINQKCHVKKKDIRKFLDGIYVSEKGTILEE

SEQ ID NO: 57522 - protein, 183 aa, Glycine max
  peptide (1)..(183): Ceres Seq. ID no. 15173809
MNIPDGVSVKVNAKVIEVEGPRGKLVRDFKHLNLDFQLITDENGKRKLKVEAWFGSRKTSAAIRTALSHVENLITGVTKGYRYKMRFVYAHFPINASIGNDNKSIEIRNFLGEKKVRKVDLLNGVSVVRSEKVKDELILDGNDIELVSRSCALINQKCHVKKKDIRKFLDGIYVSEKGTILEE

SEQ ID NO: 57523 - protein, 99 aa, Glycine max
  peptide (1)..(99): Ceres Seq. ID no. 15173810
MRFVYAHFPINASIGNDNKSIEIRNFLGEKKVRKVDLLNGVSVVRSEKVKDELILDGNDIELVSRSCALINQKCHVKKKDIRKFLDGIYVSEKGTILEE

SEQ ID NO: 57524 - DNA, 1129 bp, Glycine max
  misc_feature (1)..(1129): Ceres Seq. ID no. 14306062
tccactccctcttcttctcttcttcccccaacaaactaaaccaaaccataccattaagaaacaacacatctatctcagtccccaaaccaagaaaccctaaattaaattcatgtgctcctccaggtctaccagtgctgcaccaacaagaccttgttacttggaacaaggccacggcttggcttccttaaaacacatggatgcgtgtcataatcgtgccaacaactttgtctctaggtccatgaccatgggttacggcacttcctaccacagaactagtttaaggaacaacaacaacaacaacaacaacaacgtttctgtttcttcaccaagatctgcgagattctacgacgccagattcgaagatcaacaccacccccacttcctctccgcttgtttcctctgcaaaaaatctctcggggacaatagagacatcttcatgtatagaggggacacaccgttttgtagcgaagagtgcaggcaagagcagattgagatagacgaagccaaagagaagaataggaacctttcttcatcgatgaaagctttaaggaacaaggagcagagaaataataataataaatccacgtcgccaaacaaggcgcaacaagactactcgttccgtacgggggcagttgcggcggcgtagggtacaagtacaacgtaggattcctcgagagaggaaccaacaaatgaacgaacggaactgagggcagtgttcccggaaaaggaaagaaaacatttttagaaaagaagaaaaaaaaagtgtgactgaaaaggaaagtaaacaaagggaagttaagttgcgagctttggtttacttctcttcctttttttctttctttctttccacgaacaaagggtctcaaagagaaaggggaattttgtgagctgtgaatggtatacgtgtggcaaagtgtgtgtgcttacaacagtgggagattctctctgccaaatgactcaaaattttcgggtttgctttttttttttttctttttcttttattttttatggggatcaaatttggttttgtttccttttgtatatcaccctacctcgttgagttatagtggttgtgctaatagtttcagttttcaaaaaacggaaactgaatacaatggaaattttctcc

SEQ ID NO: 57525 - protein, 178 aa, Glycine max
  peptide (1)..(178): Ceres Seq. ID no. 14306063
MCSSRSTSAAPTRPCYLEQGHGLASLKHMDACHNRANNFVSRSMTMGYGTSYHRTSLRNNNNNNNNNVSVSSPRSARFYDARFEDQHHPHFLSACFLCKKSLGDNRDIFMYRGDTPFCSEECRQEQIEIDEAKEKNRNLSSSMKALRNKEQRNNNNKSTSPNKAQQDYSFRTGAVAAA

SEQ ID NO: 57526 - protein, 150 aa, Glycine max
  peptide (1)..(150): Ceres Seq. ID no. 14306064
MDACHNRANNFVSRSMTMGYGTSYHRTSLRNNNNNNNNNVSVSSPRSARFYDARFEDQHHPHFLSACFLCKKSLGDNRDIFMYRGDTPFCSEECRQEQIEIDEAKEKNRNLSSSMKALRNKEQRNNNNKSTSPNKAQQDYSFRTGAVAAA

SEQ ID NO: 57527 - protein, 135 aa, Glycine max
  peptide (1)..(135): Ceres Seq. ID no. 14306065
MTMGYGTSYHRTSLRNNNNNNNNNVSVSSPRSARFYDARFEDQHHPHFLSACFLCKKSLGDNRDIFMYRGDTPFCSEECRQEQIEIDEAKEKNRNLSSSMKALRNKEQRNNNNKSTSPNKAQQDYSFRTGAVAAA

SEQ ID NO: 57528 - DNA, 931 bp, Glycine max
  misc_feature (1)..(931): Ceres Seq. ID no. 13594252
ctctttcctcttgtgcgtgcagtagtgactagtgagcaaaaacgaaagaaagagccaccgtaaccgtaatcgcactgttagtaatatcaattctatagtttgttactgacgctgcacccaccgctaaactaaacttccccaatcaccatgggagattctaaacatatttccgttcaccgtcttctcggcgaaggcttaattgctgatgtggtgctgtggaagaattggcgcggagcggttgcggtgcttgtatctgccaccgcattgtggtacctcttcgagcgagccggttacaatttcttgtccttcgtcgccaatgtagtgttgcttcttgttgttattctctttttctgggccaaagctgctaaccttctcaatagacctcttcctcctctccccgatctggagatctcagaggaaactattgccagggttgctgatgcactgcaaatttggatgaatcgggctttgtccgttgcacatgacatagcaattgagaggaatttgctgctttgcctccaggttgttggtgtattgtgggtaatatcttacattggtagtttgttcaactttttgactttgatctattttggtgttcttctttgcttgtctcttcctgtgttgtatgacaagtaccaggaccaagttgatgacaggctgtgtgtgattcatgggattattcagacacagtatacaaaagttcacagtactgttttaagcaagattccaaaactctcaaacaaagaaaagaaggtgcagtaggaacatggtaagagcattctataatttggcatgtatttgatgcaaatagttactcaaaagcatattatcttacttatgtttgtagccaacttgtctattgaatgattaaatgtccatgattctactgttaatagcaatgtaacttattttagttctgcctgtggaagag

SEQ ID NO: 57529 - protein, 204 aa, Glycine max
  peptide (1)..(204): Ceres Seq. ID no. 13594253
MGDSKHISVHRLLGEGLIADVVLWKNWRGAVAVLVSATALWYLFERAGYNFLSFVANVVLLLVVILFFWAKAANLLNRPLPPLPDLEISEETIARVADALQIWMNRALSVAHDIAIERNLLLCLQVVGVLWVISYIGSLFNFLTLIYFGVLLCLSLPVLYDKYQDQVDDRLCVIHGIIQTQYTKVHSTVLSKIPKLSNKEKKVQ

SEQ ID NO: 57530 - DNA, 870 bp, Glycine max
  misc_feature (1)..(870): Ceres Seq. ID no. 12582457
accctttattctcttacgtctccaactaatcatacagatcgataatcataatcatatctatagctaattaacttaattattttcatccctctactcttcttctctcctctaaactctcttttccattcttgcttcctttgtgggttgtttgagttttctttccttcaatttaattgaaagatggcttgcttggtatctcgctcgggaagggaattgcagaggtacaacaacatgggtggccggcaagttgttgggtgcataccttatagatataaacaagacatagagggtaaaatgagcaacgaattggaagtactagtggttagttcacagaaaggtcaaggattgatgttccctaagggaggatgggaacttgatgaatccgtagaagaagcagcttatagggaatcccttgaagaagcaggagtaatgggaatgattgagcgtgaactggggcaatggaatttcattagcaaaagatatggcatatactatgaaggacacatgttccccatgtttgtcaaggaacaacttgatatatggcccgagaaaaatctacggagaagaatatggatgactgttgctgaagctagagaagtttgtcagcattggtggatgaaggaagcattagatatactggttcaaagaatcgtgtcttcacaacaacgaaaagaagatttatacagcatcggatgattctctaagttttaaaacaatttagtctaggtgggcctaggtcagattgccaagattttgaatcttcaaacattgagagttgttatacagaggattgatttagggagaggaacagaattgtagataaatatggaattgcaattcaatttaatttacacacttatagaacttacg

SEQ ID NO: 57531 - protein, 171 aa, Glycine max
  peptide (1)..(171): Ceres Seq. ID no. 12582458
MACLVSRSGRELQRYNNMGGRQVVGCIPYRYKQDIEGKMSNELEVLVVSSQKGQGLMFPKGGWELDESVEEAAYRESLEEAGVMGMIERELGQWNFISKRYGIYYEGHMFPMFVKEQLDIWPEKNLRRRIWMTVAEAREVCQHWWMKEALDILVQRIVSSQQRKEDLYSIG

SEQ ID NO: 57532 - protein, 154 aa, Glycine max
  peptide (1)..(154): Ceres Seq. ID no. 12582459
MGGRQVVGCIPYRYKQDIEGKMSNELEVLVVSSQKGQGLMFPKGGWELDESVEEAAYRESLEEAGVMGMIERELGQWNFISKRYGIYYEGHMFPMFVKEQLDIWPEKNLRRRIWMTVAEAREVCQHWWMKEALDILVQRIVSSQQRKEDLYSIG

SEQ ID NO: 57533 - protein, 133 aa, Glycine max
  peptide (1)..(133): Ceres Seq. ID no. 12582460
MSNELEVLVVSSQKGQGLMFPKGGWELDESVEEAAYRESLEEAGVMGMIERELGQWNFISKRYGIYYEGHMFPMFVKEQLDIWPEKNLRRRIWMTVAEAREVCQHWWMKEALDILVQRIVSSQQRKEDLYSIG

SEQ ID NO: 57534 - DNA, 932 bp, Glycine max
  misc_feature (1)..(932): Ceres Seq. ID no. 13594254
aacttattcagccaacatagtaaggtgcaacagatagtaaccaagtgaagattccattcaagatgaaactctttgctcactttttctttatgttgttgttcttggtggccttttccaacatccaagtttgtttgggggactgtgataatcttcaggacacttgtccagcagttccacccaataagcagaccatattcatcaatggtcttcaatgcaaaaacccagttaatgtaacagctcaagatttcaggaccacagaactaagcaaaactggccctagagacatttttggtgcatctttgaaaattgtgagtgctgctgagttcattggcctcaatactcttggcctctccattggaagaactgaccttgatgggaatggcctggtgaacttccactatcatcctagggctactgagataatctatgtcaccaaaggggtgttgttggctggttttgttgacaccaaaaaccagtatttccagaagtttcttaaagtaggtgatgtctttgtgttccccaaggctttgttccacttctttctaaatactgattttgaagaagccactgttttctcagtgtacaacagccagaatcctggctttgtgtcccttagtcctacaacttttgacacaacattggagtcattggacaagatcaagaagagactcatctcactctctgcctctgaagctcaagctcaagctcaagatgtcaacagtttcatctctccagaattggaaaccatttacagttagccatttcaaattgcgtcaaattttgttatttacagcatttatttttcaaatatatagcgcttatccaaaaaagcgctgtatatattctccataacagcacttcaggcagtacatatatagcatttttttaaggagaagcgctatatattctggtatatatacagcacctgtttg

SEQ ID NO: 57535 - protein, 231 aa, Glycine max
  peptide (1)..(231): Ceres Seq. ID no. 13594255
MKLFAHFFFMLLFLVAFSNIQVCLGDCDNLQDTCPAVPPNKQTIFINGLQCKNPVNVTAQDFRTTELSKTGPRDIFGASLKIVSAAEFIGLNTLGLSIGRTDLDGNGLVNFHYHPRATEIIYVTKGVLLAGFVDTKNQYFQKFLKVGDVFVFPKALFHFFLNTDFEEATVFSVYNSQNPGFVSLSPTTFDTTLESLDKIKKRLISLSASEAQAQAQDVNSFISPELETIYS

SEQ ID NO: 57536 - protein, 222 aa, Glycine max
  peptide (1)..(222): Ceres Seq. ID no. 13594256
MLLFLVAFSNIQVCLGDCDNLQDTCPAVPPNKQTIFINGLQCKNPVNVTAQDFRTTELSKTGPRDIFGASLKIVSAAEFIGLNTLGLSIGRTDLDGNGLVNFHYHPRATEIIYVTKGVLLAGFVDTKNQYFQKFLKVGDVFVFPKALFHFFLNTDFEEATVFSVYNSQNPGFVSLSPTTFDTTLESLDKIKKRLISLSASEAQAQAQDVNSFISPELETIYS

SEQ ID NO: 57537 - DNA, 830 bp, Glycine max
  misc_feature (1)..(830): Ceres Seq. ID no. 15173757
attctgaaagagaagatagggagggtgggtggtttggtttggtgcaaatcaatggattccttagaagacagcggctattgggattttctcgattactctttcattgatcaagcgccccctgatttcctttggtccaataatactattagtgtgaacaccgaagttgacattccaggtgatgctgctgcgtgtcaagagaacaccaagaagaggggacatgctgattcaagctgccaggtgggatctaaagcttgccgtgagaagttgcggagggagagactcaatgaaaggttctgtgacttgagctctgttttggagccagggagacctgtgagaacagataaaccagctatacttgatgatgctatcagagtcttgagtcaacttaaaactgaagctcaggagctcaaaaaaacaaatgaaaaattactagaggaaataaaatgtttaaaggcagagaaaaatgaacttcgggaagagaaacttgttctgaaagcagataaggaaaggattgagaagcagttgaaggccttacccgttgcaccagcagggtatatgactccacctgtagctgctgctgcatatcaagcaggggttaacaagatggctctttatccaaactatggctacatcccaatgtggcaatatcttcctcaatctgtcagagacacatctcatgatcatgagctcaggcctcctgctgcatagttggttccttccattgttactctttggataattatttcacaacattggcgaagtattgacatgtaaatattgtcatccttcgatttttttttataataaaaatgagaaataattttgataat

SEQ ID NO: 57538 - protein, 235 aa, Glycine max
  peptide (1)..(235): Ceres Seq. ID no. 15173758
ILKEKIGRVGGLVWCKSMDSLEDSGYWDFLDYSFIDQAPPDFLWSNNTISVNTEVDIPGDAAACQENTKKRGHADSSCQVGSKACREKLRRERLNERFCDLSSVLEPGRPVRTDKPAILDDAIRVLSQLKTEAQELKKTNEKLLEEIKCLKAEKNELREEKLVLKADKERIEKQLKALPVAPAGYMTPPVAAAAYQAGVNKMALYPNYGYIPMWQYLPQSVRDTSHDHELRPPAA

SEQ ID NO: 57539 - protein, 218 aa, Glycine max
  peptide (1)..(218): Ceres Seq. ID no. 15173759
MDSLEDSGYWDFLDYSFIDQAPPDFLWSNNTISVNTEVDIPGDAAACQENTKKRGHADSSCQVGSKACREKLRRERLNERFCDLSSVLEPGRPVRTDKPAILDDAIRVLSQLKTEAQELKKTNEKLLEEIKCLKAEKNELREEKLVLKADKERIEKQLKALPVAPAGYMTPPVAAAAYQAGVNKMALYPNYGYIPMWQYLPQSVRDTSHDHELRPPAA

SEQ ID NO: 57540 - DNA, 943 bp, Glycine max
  misc_feature (1)..(943): Ceres Seq. ID no. 12608163
aaggtagcaattgaactgtcttcgaaatcaacaacaatctctctctgtctctggctatggctgctattcatgttcatgatgatggtgaagttggttttgaagaaggaatgctatggttaccctctcatgttctgaacgaggcatgcggcactaaggtatgtttgaggaaccgccaccaaaagttccaaaaccatcagcaaatgcatcagcagcgtcatcataaatcacctggagaaccaaaatcacagtactcaaaatctgcctcaagatcttcgtatcaaaggccaaaacttgccaatggtggacctggaatgcgagctattttcttaggatccacgcatagatcatgtggcactggtgtgttcttaccccaaagagcaggcacaaacttccaaccaagcaagaggccagcttgtgctcctatcctagttccagctggagttattcaagctctaaatcttaatgtgcgtgcattaggtctgcagatttcacccccgcaagttcagagttataacccaagatgcagggaagtatacaataataattcagaagaaaagaaaagtgatcagaaagattcgtccaagcaatgtcgttttatatctcagaatcaatgttctactccagagatatttctcccaaaggaatggacttactagctagcttttcattttcaaagagaaaatttaaatttgggaagcacacaaaggggagttaacatcggaccgtgtacatacaaataaaaaaaaaatgaaatcatgctttatgtagaatgctgggaaagtttaaagtgcaattaatttattgctagctgtactgttagattctttgatcatgtatagatgttagcttttgtaataatagattaatggcaacccaagtctcacgagggtcttgtttgtaattgcatgcttcagtattgatataattatattcagtggttctc

SEQ ID NO: 57541 - protein, 199 aa, Glycine max
  peptide (1)..(199): Ceres Seq. ID no. 12608164
MAAIHVHDDGEVGFEEGMLWLPSHVLNEACGTKVCLRNRHQKFQNHQQMHQQRHHKSPGEPKSQYSKSASRSSYQRPKLANGGPGMRAIFLGSTHRSCGTGVFLPQRAGTNFQPSKRPACAPILVPAGVIQALNLNVRALGLQISPPQVQSYNPRCREVYNNNSEEKKSDQKDSSKQCRFISQNQCSTPEIFLPKEWTY

SEQ ID NO: 57542 - protein, 182 aa, Glycine max
  peptide (1)..(182): Ceres Seq. ID no. 12608165
MLWLPSHVLNEACGTKVCLRNRHQKFQNHQQMHQQRHHKSPGEPKSQYSKSASRSSYQRPKLANGGPGMRAIFLGSTHRSCGTGVFLPQRAGTNFQPSKRPACAPILVPAGVIQALNLNVRALGLQISPPQVQSYNPRCREVYNNNSEEKKSDQKDSSKQCRFISQNQCSTPEIFLPKEWTY

SEQ ID NO: 57543 - protein, 151 aa, Glycine max
  peptide (1)..(151): Ceres Seq. ID no. 12608166
MHQQRHHKSPGEPKSQYSKSASRSSYQRPKLANGGPGMRAIFLGSTHRSCGTGVFLPQRAGTNFQPSKRPACAPILVPAGVIQALNLNVRALGLQISPPQVQSYNPRCREVYNNNSEEKKSDQKDSSKQCRFISQNQCSTPEIFLPKEWTY

SEQ ID NO: 57544 - DNA, 1230 bp, Glycine max
  misc_feature (1)..(1230): Ceres Seq. ID no. 15175591
atgaatgatgtgttctagcaattttcctgtgtcgtatcatcaaagcgacggattggtgggggtggcgccttcggccattggcacgtacacctcctaaaaacgacaactcgtttccacggcttggtattttagcaggcaaaacgcaaggacctgggcgagtggcgaaatggcagttccagcagagaggaaccacaaccatttctcagttttgatcgtactctttcttttcctcgtccacaatgctctctgcattaggttcccggatcggatcgcccaacccgccctcgacccgctcgaccaacaccgcctgcgggtcgccgtcttcgccctcggaagcttctggagatccgaagcggtgttcggttgtttaccgggcgttgttcgcaccaccgtcggctacgccggcggatccaagtccaaccccgaataccgaagcctcggtgaccacgccgagtccgttaaggttgagtatgatccgcagctgattagctttagggaactcctggatgtcttttggtcaagtcacgatcctaggcaagtgtatggccaaggtcctgatgtgggtagtcagtacagatctattatttttgttaatggaaccgaagaatcaagaatggctgctgtcagcaaagaacaggaacaaaccctgtcaagaagcagcattgtgactacacaaattctgcaacttggaacattttaccctgcagagccagagcaccagaaatttgaactcaagcaaaataccatccttcttcagttaattgggaaccttccggcagaggagcttgagaggtctagcctggcaacgaaattgaatggatatgttgcagagctttgccctccaaatatccaaaagcaaattgatgccaagatcaacaatattattaaaaagggttggccaattttgagagatttgtagttggcctcgtgggaagttactcagattgtcaacttgtcatttttcaactaacctgcttcgtttcagtacctataggttttattcaatagcttgtatcagttgccgggcttgatttaacgattgtgttgtaattattgtacttgtaaagtcttgagtctccctgtcatccttcaaaaaagaaaccctttgattttttttatttattttttgttttcattcatttaccttttttatttatgaggacaacagagaacctttattattattttattactattattcaaaagagggacaaagaaactagtaattcc

SEQ ID NO: 57545 - protein, 250 aa, Glycine max
  peptide (1)..(250): Ceres Seq. ID no. 15175592
MAVPAERNHNHFSVLIVLFLFLVHNALCIRFPDRIAQPALDPLDQHRLRVAVFALGSFWRSEAVFGCLPGVVRTTVGYAGGSKSNPEYRSLGDHAESVKVEYDPQLISFRELLDVFWSSHDPRQVYGQGPDVGSQYRSIIFVNGTEESRMAAVSKEQEQTLSRSSIVTTQILQLGTFYPAEPEHQKFELKQNTILLQLIGNLPAEELERSSLATKLNGYVAELCPPNIQKQIDAKINNIIKKGWPILRDL

SEQ ID NO: 57546 - DNA, 540 bp, Glycine max
  misc_feature (1)..(540): Ceres Seq. ID no. 13582542
caatgaatttttgttatacaataaagaatatatatgatgatatacttatgtgttattgcgtgcatgtgtgtatggtattgataggagctagagaatccttccgttttcggagaaggtcaacatcagatgcgtacgagaagacaggccagaacagatcaagctcttcttctcctttcgatgtgtgagaaatgagcctgaccactatatatcctccatggatcgatgactgaaataaaatatatatagtagtttgtttttctctagcctttgcggatgatgctgtatccatttttgtttatgttaattttgtgcatatatatagtatatagtatatagcatatgtatgaatatgtttacgagttcatcagttgagcgattgaagtcctgaaacgatcgaggtagctgtgtgtggtttaacagcttggtcttgttttattgttgaactggtttatggttcggaagctgtaaataagtaataacgtagtataggtgtgtttttgttacgtgtactttgtatatatataaaagcctttccattcc

SEQ ID NO: 57547 - protein, 60 aa, Glycine max
  peptide (1)..(60): Ceres Seq. ID no. 13582543
MNFCYTIKNIYDDILMCYCVHVCMVLIGARESFRFRRRSTSDAYEKTGQNRSSSSSPFDV

SEQ ID NO: 57548 - protein, 45 aa, Glycine max
  peptide (1)..(45): Ceres Seq. ID no. 13582544
MCYCVHVCMVLIGARESFRFRRRSTSDAYEKTGQNRSSSSSPFDV

SEQ ID NO: 57549 - protein, 37 aa, Glycine max
  peptide (1)..(37): Ceres Seq. ID no. 13582545
MVLIGARESFRFRRRSTSDAYEKTGQNRSSSSSPFDV

SEQ ID NO: 57550 - DNA, 818 bp, Glycine max
  misc_feature (1)..(818): Ceres Seq. ID no. 15173764
gtagttctgttttgccagtgattgaagctagttagaacaagatgttgcagctactctacactgcgattttctccgaaatgcttttgattctcacgctcgtcttcaaaaccccactgagaaaactcgtcatcgtttccctcgatagtgtgaagcgcggtcgcggtcccgtggtggtttccaccgtgggcgccacattgatggtggttctcgcttcgagcctctacagcatggccaagatccagcaacgcaccctcgaggccggcatagtcaaccccaccgaccaagtcctcatgtccaagcacatgctcgaagcttctctcatggggtttctgctgttcctctctctgatgattgatagattgcaccattacataagagagcttcggtcactcaggaagaccatggaagctattaagaaacaaagccgaagttttgaagatggtaaaaatggaaattcagaggaacataaagcattgaatgaagaaattaccacattgaagtctaaaattaagaaactagaatctgaatgtgaggcaaaaggaagtcaagctaagactttggaaactgaagtagaggctcttaaaaagcaatccgaggggttccttatggaatatgatcgcctcttggaagacaatcagagtcttaggagtcagttgcaggccattgaccagagccctttgaattttgataataaaaagagtatgtgattgttgaaatatccagaaaacagtttttatcctttgttttaactcttgtttgagtgtcacatactttcttaatgaggttacagttgtaaataccaagtgtttacagacagg

SEQ ID NO: 57551 - protein, 221 aa, Glycine max
  peptide (1)..(221): Ceres Seq. ID no. 15173765
MLQLLYTAIFSEMLLILTLVFKTPLRKLVIVSLDSVKRGRGPVVVSTVGATLMVVLASSLYSMAKIQQRTLEAGIVNPTDQVLMSKHMLEASLMGFLLFLSLMIDRLHHYIRELRSLRKTMEAIKKQSRSFEDGKNGNSEEHKALNEEITTLKSKIKKLESECEAKGSQAKTLETEVEALKKQSEGFLMEYDRLLEDNQSLRSQLQAIDQSPLNFDNKKSM

SEQ ID NO: 57552 - protein, 209 aa, Glycine max
  peptide (1)..(209): Ceres Seq. ID no. 15173766
MLLILTLVFKTPLRKLVIVSLDSVKRGRGPVVVSTVGATLMVVLASSLYSMAKIQQRTLEAGIVNPTDQVLMSKHMLEASLMGFLLFLSLMIDRLHHYIRELRSLRKTMEAIKKQSRSFEDGKNGNSEEHKALNEEITTLKSKIKKLESECEAKGSQAKTLETEVEALKKQSEGFLMEYDRLLEDNQSLRSQLQAIDQSPLNFDNKKSM

SEQ ID NO: 57553 - protein, 169 aa, Glycine max
  peptide (1)..(169): Ceres Seq. ID no. 15173767
MVVLASSLYSMAKIQQRTLEAGIVNPTDQVLMSKHMLEASLMGFLLFLSLMIDRLHHYIRELRSLRKTMEAIKKQSRSFEDGKNGNSEEHKALNEEITTLKSKIKKLESECEAKGSQAKTLETEVEALKKQSEGFLMEYDRLLEDNQSLRSQLQAIDQSPLNFDNKKSM

SEQ ID NO: 57554 - DNA, 713 bp, Glycine max
  misc_feature (1)..(713): Ceres Seq. ID no. 15177004
acagctagaactttctactgtatccgatatactagtcttggtctttttcgctatatatactagtaagatgagacaaccctagtagtaacgtacagaaatgggtgctctggatcacatctctgagctctttgactgctcccataccagctccaagctcaagaagaagcgcaaacaattccagacggtggaggtgaaagtgaagatggactgcgaagggtgtgagagaaaggtgaagaaatcggtggagggaatgaaaggggtgacagaggtggaggtggatagaaaggccagcaaggtaactgtttccggctatgtggaaccctcaaaggtggtttctcgcatcgctcaccggactggtaagagagcggagctatggccatacttgccgtacgacgtcgttgcgcacccttacgcgccaggtgtctacgacaggaaagcgccatctggctacgtgcgaaacgctgatgtagaccctcggctcaccaacctcgcacgtgccagctccactgaggtcaagtacaccaccgctttcagcgacgacaaccccgccgcatgtgtcgttatgtgattattcattttctctcttgtatcatagtagcaaagaaaaacatcaaatgttcacgtggggaacgcttttggcacaatggacatgtatcctttaaagtgatgttcggaaatttgatatcttaagatggtaattaattaatgattcc

SEQ ID NO: 57555 - protein, 156 aa, Glycine max
  peptide (1)..(156): Ceres Seq. ID no. 15177005
MGALDHISELFDCSHTSSKLKKKRKQFQTVEVKVKMDCEGCERKVKKSVEGMKGVTEVEVDRKASKVTVSGYVEPSKVVSRIAHRTGKRAELWPYLPYDVVAHPYAPGVYDRKAPSGYVRNADVDPRLTNLARASSTEVKYTTAFSDDNPAACVVM

SEQ ID NO: 57556 - protein, 121 aa, Glycine max
  peptide (1)..(121): Ceres Seq. ID no. 15177006
MDCEGCERKVKKSVEGMKGVTEVEVDRKASKVTVSGYVEPSKVVSRIAHRTGKRAELWPYLPYDVVAHPYAPGVYDRKAPSGYVRNADVDPRLTNLARASSTEVKYTTAFSDDNPAACVVM

SEQ ID NO: 57557 - protein, 105 aa, Glycine max
  peptide (1)..(105): Ceres Seq. ID no. 15177007
MKGVTEVEVDRKASKVTVSGYVEPSKVVSRIAHRTGKRAELWPYLPYDVVAHPYAPGVYDRKAPSGYVRNADVDPRLTNLARASSTEVKYTTAFSDDNPAACVVM

SEQ ID NO: 57558 - DNA, 956 bp, Glycine max
  misc_feature (1)..(956): Ceres Seq. ID no. 13594260
attttagccgccaccatctccattgggaagattgaatttcacaaaccaatcatatctttgatcaccgcattgtcattttgcagatcccaagaagaagcataacaatcaacttcattcattctaatcttgcatttttacttgatgaaaccaaactgggaactcaaaaactgctgcaaccacgaccaggtggtgtttctggtcactgttgctgtctgcactgtcgttatacttgcactacggagaacagttttactcagaccctttaagcttgttgccgtatttcttcatgaggcaagccatgcaattgcttgtaaacttacttgcggtcatgtagaaggaatccaggttcatgcagatgaaggtggaacaacccaaacacgtggaggcatatactggttaatcttgccagctggatatcttggttcatctttctggggcatggtattgatacttgcatcaacaaatcttcttaccgctagaatagctgctggctgttttattgctgctctacttattgtcctcttcattgccaaaaattggactcttcggggactttgcattgtatatgatatttacgacgatctgatctcccgtagagtacattccagtgatgcagaaaaatttgcggaagtgtgcccctgtccttgtactggtgtaggatggggtgttatttgggggttaatatcttttgtgtttctttgcggagctgtgtatctgggtgctgtgatcttgtcataactgataaagaaagaagattgtaattcaagttctatgaccgctgagaagccatgtgattcaatccatctggctttactgcttttacagactaattctgaatattgtcgagtcaggtcctttggcagtttggcttcattcctaatcatattcagggtgatttataccagattaaaatgaaaaagtagttctgatataaatacccatttagtctagttttc

SEQ ID NO: 57559 - protein, 198 aa, Glycine max
  peptide (1)..(198): Ceres Seq. ID no. 15221328
MKPNWELKNCCNHDQVVFLVTVAVCTVVILALRRTVLLRPFKLVAVFLHEASHAIACKLTCGHVEGIQVHADEGGTTQTRGGIYWLILPAGYLGSSFWGMVLILASTNLLTARIAAGCFIAALLIVLFIAKNWTLRGLCIVYDIYDDLISRRVHSSDAEKFAEVCPCPCTGVGWGVIWGLISFVFLCGAVYLGAVILS

SEQ ID NO: 57560 - protein, 99 aa, Glycine max
  peptide (1)..(99): Ceres Seq. ID no. 15221329
MVLILASTNLLTARIAAGCFIAALLIVLFIAKNWTLRGLCIVYDIYDDLISRRVHSSDAEKFAEVCPCPCTGVGWGVIWGLISFVFLCGAVYLGAVILS

SEQ ID NO: 57561 - DNA, 1346 bp, Glycine max
  misc_feature (1)..(1346): Ceres Seq. ID no. 15177764
aaaaaaatagaaaaaagtattttggtccaccttccttcttctatcgtcgttgtcttccttcctccatcgtgttagggtttccactttgcagagtttcaatttactctcattatcatatcgcaattcctccgtgtttctgttttgataactcgtaaaaatcctactccatagcaccatatctcgttccctgaatactgattttgaacttcccctgatttttttttcagggaaacaaattattgccccttcctctcttttccaatcatctccagtgaaaaaaaaaaacaatacaaaaactatatctgaaacttattggggatcaggtattgggagatgcctcgagacttgtcgcgatcccgatcacctccctataggcggaggcattcaccatctcctgtgggacacaggtatagcaggaggagcagaagagacagaagcagatctccttattcatcctactcttacaacaggcgaaaaagtcgttctatttcaccaagaggtcacagaagtccttctactactccaagacgtcgtagaagccgaactccatctgctaaacgatacagaagacatagaagtaggagttcctcgttgtctcctactcgtaaatcttccagtccaagtcttgggtcagtagagcacaaaagtgccactgaaaaactaaagaaagaagaagagaagaaaaggcgtcaactagaagcagagttgaaattaatagaagaagagactgcaaagagagttgaagaagcaatccgtaagagagttgaagaaagcttgaaatctgaggaggttcaggtggagattgaaaggcggttggaagagggacggaagagacttaatgatgaagttgcagctcaacttgaaaaagaaaaggaagctgctattattgaggctaaacagaaggaggagcaagcccgtaaagagaaagaagatcttgaaaggatgcttgaggagaaccggaggaaggttgaagaagctcagagaagggaagctttagagcagcaaagaagggaggaagaaagatataaagagctagaagagatgcaaagacagaaggaagaagccatgcgaaggaagaaacacgaggaggagcaagaacgtctaaaccaaataaagttgttgggtaaaaacaaatcccgaccaaaattgtcatttgctcttggatccaaatgaccatgggcttcggcaacatgtgtctatttatttagtctaaagtgtgtatgggcttaatttaattccctatttgtgtctgtaatttgaggaaattatacagccctcctcagctatagtgtgacagcgttgttactgtttccagtttgcattagatttcattgtttgtcattgcc

SEQ ID NO: 57562 - protein, 279 aa, Glycine max
  peptide (1)..(279): Ceres Seq. ID no. 15177765
MPRDLSRSRSPPYRRRHSPSPVGHRYSRRSRRDRSRSPYSSYSYNRRKSRSISPRGHRSPSTTPRRRRSRTPSAKRYRRHRSRSSSLSPTRKSSSPSLGSVEHKSATEKLKKEEEKKRRQLEAELKLIEEETAKRVEEAIRKRVEESLKSEEVQVEIERRLEEGRKRLNDEVAAQLEKEKEAAIIEAKQKEEQARKEKEDLERMLEENRRKVEEAQRREALEQQRREEERYKELEEMQRQKEEAMRRKKHEEEQERLNQIKLLGKNKSRPKLSFALGSK

SEQ ID NO: 57563 - DNA, 923 bp, Glycine max
  misc_feature (1)..(923): Ceres Seq. ID no. 15175041
attttcaccagctaccatatttagttatcagcaatggacttctactttggaaaccctcatccttatcccaatattcatcaatatcatgctcataattctgtagtcagcatgactccatcttcccctgagatcgcactatctgattatctcatgctcgatgactatgttgatcatcaagattctcgatcatcacaaagcactgagtcatcagaaaaagcaaccttctgtgatcccactcacggattcagcactggtgcaacctctaagaacaataacatgaagtgcaaaaatgggattaatgaaaacaaaagaggagtgggtccaaggatcgcgttcagaaccaaatcagagcttgagatcatggatgatggatacaagtggaggaagtacggcaagaagtctgtgaagagcaatcccaatctaaggaactactacaaatgttcaagtggaggatgcagtgtgaagaaaagggtggaaagggatagagatgactccagctatgtgataacaacttatgaaggtgtgcacaatcatgagagcccatttaccacatactacagccccatctccttcgtacattctgatactactttcaaatgacaccatctccaaccccttttctgctcttacacctccctagcttaattatgtgccgagaaaaagcttggaagattcgatcgagcaagggaagctgtgtcaatgcattgtctaattaatcttaattattttcatgctgtaataggttgaagagagtttctttacccttctttttccattttgtttttagatgagtttaatatctcacttaatgaaaaatcaacctttgttagttcatgtgacaaagaacatgattttccatgtgtaaagttgttcaaatcttaaaatagaatggaatgcttcgtcttgttacagttaataaattc

SEQ ID NO: 57564 - protein, 188 aa, Glycine max
  peptide (1)..(188): Ceres Seq. ID no. 15175042
MDFYFGNPHPYPNIHQYHAHNSVVSMTPSSPEIALSDYLMLDDYVDHQDSRSSQSTESSEKATFCDPTHGFSTGATSKNNNMKCKNGINENKRGVGPRIAFRTKSELEIMDDGYKWRKYGKKSVKSNPNLRNYYKCSSGGCSVKKRVERDRDDSSYVITTYEGVHNHESPFTTYYSPISFVHSDTTFK

SEQ ID NO: 57565 - protein, 163 aa, Glycine max
  peptide (1)..(163): Ceres Seq. ID no. 15175043
MTPSSPEIALSDYLMLDDYVDHQDSRSSQSTESSEKATFCDPTHGFSTGATSKNNNMKCKNGINENKRGVGPRIAFRTKSELEIMDDGYKWRKYGKKSVKSNPNLRNYYKCSSGGCSVKKRVERDRDDSSYVITTYEGVHNHESPFTTYYSPISFVHSDTTFK

SEQ ID NO: 57566 - protein, 149 aa, Glycine max
  peptide (1)..(149): Ceres Seq. ID no. 15175044
MLDDYVDHQDSRSSQSTESSEKATFCDPTHGFSTGATSKNNNMKCKNGINENKRGVGPRIAFRTKSELEIMDDGYKWRKYGKKSVKSNPNLRNYYKCSSGGCSVKKRVERDRDDSSYVITTYEGVHNHESPFTTYYSPISFVHSDTTFK

SEQ ID NO: 57567 - DNA, 1007 bp, Glycine max
  misc_feature (1)..(1007): Ceres Seq. ID no. 14316539
aaaggagtccagagtttaggataagagatatgcgccagagttgaagcgagaaggaagggtccgcgcgccatggctggcatcaccacctcccccttcaaactctctcactttccgactctcttctcttcttctgattccaaactcttcggccttcccctctccaatccctattccctcaaattcgacccttcttctctctccactacctctctctcctacgtcaaagcccgctactacggcggcggcggcggccctccccgctcccccaacgactcccgcttccgcgagtcctccgattccgacgacgacgataaagctctcgacctctccactctcaggtcagataccgtgaggcttattgatcagagccagaatatggtcggagtagtgtcaattgatgacgccattcaaatggctgaagatgtcgaacttgacttggtaatattatccccagatgcagatcctcctgttgttagaataatggattacagcaaatatagatatgaacagcaaaagaagaaaagaggacagcagaagaaaagtgctgctaatcggatggatttgaaggagctcaaaatgggatacaacatagatgaacatgattattcagtgcgtttgaaagctgcacagaaatttttgaaagatggcaacaaggttaaggtcatagtaaacctcaagggtcgtgaaaatgaattccggaatatggctattgcgcttattacacgttttcagaatgatgttggggagcttggaatagaggagacaaaaaacttccgtgacagaaatatcttcataattttggttccaaataaagttgctgtgcagaaaactcaagaaccaccaaagaaaagagacaagtcagctgcagatgaagtctccgttagtgcccaagcataaccgcaaacttccacgctagtttctaattgtagaatggatattgtgagtaacttgtattggtccgagttggaaaattttccgagcattatataattgtataattcatgtgt

SEQ ID NO: 57568 - protein, 275 aa, Glycine max
  peptide (1)..(275): Ceres Seq. ID no. 14316540
MAGITTSPFKLSHFPTLFSSSDSKLFGLPLSNPYSLKFDPSSLSTTSLSYVKARYYGGGGGPPRSPNDSRFRESSDSDDDDKALDLSTLRSDTVRLIDQSQNMVGVVSIDDAIQMAEDVELDLVILSPDADPPVVRIMDYSKYRYEQQKKKRGQQKKSAANRMDLKELKMGYNIDEHDYSVRLKAAQKFLKDGNKVKVIVNLKGRENEFRNMAIALITRFQNDVGELGIEETKNFRDRNIFIILVPNKVAVQKTQEPPKKRDKSAADEVSVSAQA

SEQ ID NO: 57569 - protein, 173 aa, Glycine max
  peptide (1)..(173): Ceres Seq. ID no. 14316541
MVGVVSIDDAIQMAEDVELDLVILSPDADPPVVRIMDYSKYRYEQQKKKRGQQKKSAANRMDLKELKMGYNIDEHDYSVRLKAAQKFLKDGNKVKVIVNLKGRENEFRNMAIALITRFQNDVGELGIEETKNFRDRNIFIILVPNKVAVQKTQEPPKKRDKSAADEVSVSAQA

SEQ ID NO: 57570 - protein, 161 aa, Glycine max
  peptide (1)..(161): Ceres Seq. ID no. 14316542
MAEDVELDLVILSPDADPPVVRIMDYSKYRYEQQKKKRGQQKKSAANRMDLKELKMGYNIDEHDYSVRLKAAQKFLKDGNKVKVIVNLKGRENEFRNMAIALITRFQNDVGELGIEETKNFRDRNIFIILVPNKVAVQKTQEPPKKRDKSAADEVSVSAQA

SEQ ID NO: 57571 - DNA, 1296 bp, Glycine max
  misc_feature (1)..(1296): Ceres Seq. ID no. 14315989
acaattccacgcatcaaccaaatctaactctctttctctgtcccccacacccctccctcctatgtcctatcccattctgaagaaacacaattacaggttagaaccccccatatcaaagctaaagtcttttggagccaaacttgaagttttattcatcatcttcacctcgaatcagatgagggagaagttcctattattcaacttttgttagcagtaaaagctctcttctttatttttttatttatttattttgtttctaataaggagttaaagacaatttgttgttggtgttgccatgagggagtttccttcttgttttggagaaaatggggttcagattgctgactcatcctcatcaagcaccacaagagcagctcaaaatgtggttacgtgtgtctatcagtgcaaattaagaggccgttcatgcctgattacagtctggtggacaaaaactctgatgggtcaaggcttgagtgtgggaatagatgacttgggaaaccattgcctctgcaaggtggagataaagccatggctcttctcgaagagaaaagggtcaaagaatttggaggtccaatctggtaaagttgacatcttttgggatttgagttgtgccaagtttggttcagggcctgagccattggaggggttctacttagcggttgtgttcaacaaggagatggtgttgctcctaggggatctgaaaaaggaggcatgcaagaagattgagagtgattgtgccttttctcactgtggtgctgtttgcattgcaaagagagagcacattattgggaagaagttttatggtgcaaaggctcagttttgtgacaaggggcaggtgcatgatgtcacaattgagtgtgacactttggggcccagcgatccctctcttgtgattcgaattgatagcaagacagtgatgcaggtgaagcgtctcaagtggaagttccgagggaatcacaccattttggtggatggtgttccggttgaagtgttttgggatgtgcacagttggctctttgggaatgctatgggcaatgcagtgttcatgttccaaacatgcatttcaaatgataagatgtgggaaggccaatcagtttctgatccctctgcattaacatgggcttcttctcagcagtttagggattctcaattgcaaggctttgggttctctctcattttttatgtttggaaacatgagtaatcaatagaggtgttaagtcttattcctcaatgttacatttatattgacagccacatttttcaacaatgaaactgatcaacttgcccctttttccc

SEQ ID NO: 57572 - protein, 301 aa, Glycine max
  peptide (1)..(301): Ceres Seq. ID no. 14315990
MREFPSCFGENGVQIADSSSSSTTRAAQNVVTCVYQCKLRGRSCLITVWWTKTLMGQGLSVGIDDLGNHCLCKVEIKPWLFSKRKGSKNLEVQSGKVDIFWDLSCAKFGSGPEPLEGFYLAVVFNKEMVLLLGDLKKEACKKIESDCAFSHCGAVCIAKREHIIGKKFYGAKAQFCDKGQVHDVTIECDTLGPSDPSLVIRIDSKTVMQVKRLKWKFRGNHTILVDGVPVEVFWDVHSWLFGNAMGNAVFMFQTCISNDKMWEGQSVSDPSALTWASSQQFRDSQLQGFGFSLIFYVWKHE

SEQ ID NO: 57573 - protein, 247 aa, Glycine max
  peptide (1)..(247): Ceres Seq. ID no. 14315991
MGQGLSVGIDDLGNHCLCKVEIKPWLFSKRKGSKNLEVQSGKVDIFWDLSCAKFGSGPEPLEGFYLAVVFNKEMVLLLGDLKKEACKKIESDCAFSHCGAVCIAKREHIIGKKFYGAKAQFCDKGQVHDVTIECDTLGPSDPSLVIRIDSKTVMQVKRLKWKFRGNHTILVDGVPVEVFWDVHSWLFGNAMGNAVFMFQTCISNDKMWEGQSVSDPSALTWASSQQFRDSQLQGFGFSLIFYVWKHE

SEQ ID NO: 57574 - protein, 174 aa, Glycine max
  peptide (1)..(174): Ceres Seq. ID no. 14315992
MVLLLGDLKKEACKKIESDCAFSHCGAVCIAKREHIIGKKFYGAKAQFCDKGQVHDVTIECDTLGPSDPSLVIRIDSKTVMQVKRLKWKFRGNHTILVDGVPVEVFWDVHSWLFGNAMGNAVFMFQTCISNDKMWEGQSVSDPSALTWASSQQFRDSQLQGFGFSLIFYVWKHE

SEQ ID NO: 57575 - DNA, 774 bp, Glycine max
  misc_feature (1)..(774): Ceres Seq. ID no. 12583650
gttctgccctggatcaacattaactgaaacagaaaacgtgttttttcctgtcatggatcatttgacttcgattgatttttaaatgggtattgctatgtcgttgttgaatgaatggggttgttgctagaagcagtcttccatgtgggttttgattgtcctgtactgaaagacttcataacatactgtgtgtgtgagggactcggtgctgctttaattactgctcttgtgaaggtgaactgtgaacttggttggtcagagcttgccaacaggcagaaagttgctgaagtccctcaattgtgcttccctgcctcctttcccaaagtctctgtctggtgcaatggtttatataactgagtgggacaagtttgtggagcaatccattgagctgttccgtgcagatcctgattctacaaggtatgtcatgaagtacaggcactgtgatggcaagttggtactcaaggtcactgataaccgacagtgtctaaagtataagacaggccaagcacaagaggctaagaagatggagaaactgaataatatgttctttgctttgatggctcgtggtcccgatgttgatctatcagaagtcccgggaaaagagcaaatggatgctcagcccaccaagaaaggaagaggaaggaagcaataacttacttggccttttgctagacaagatggttttatgaatccctggactaagaatttgaatagttatatttttttccctacctaatgattacttcagattcttatgatgtgagaggtttatatttg

SEQ ID NO: 57576 - protein, 103 aa, Glycine max
  peptide (1)..(103): Ceres Seq. ID no. 12583651
MVYITEWDKFVEQSIELFRADPDSTRYVMKYRHCDGKLVLKVTDNRQCLKYKTGQAQEAKKMEKLNNMFFALMARGPDVDLSEVPGKEQMDAQPTKKGRGRKQ

SEQ ID NO: 57577 - protein, 80 aa, Glycine max
  peptide (1)..(80): Ceres Seq. ID no. 12583652
MGLLLEAVFHVGFDCPVLKDFITYCVCEGLGAALITALVKVNCELGWSELANRQKVAEVPQLCFPASFPKVSVWCNGLYN

SEQ ID NO: 57578 - protein, 75 aa, Glycine max
  peptide (1)..(75): Ceres Seq. ID no. 12583653
MKYRHCDGKLVLKVTDNRQCLKYKTGQAQEAKKMEKLNNMFFALMARGPDVDLSEVPGKEQMDAQPTKKGRGRKQ

SEQ ID NO: 57579 - DNA, 1004 bp, Glycine max
  misc_feature (1)..(1004): Ceres Seq. ID no. 12608127
actgttttctcttaccataatcatcaatggcttccttatccctctcctctcccccatctctctcttccgcacaccacaacgcctccacgcgccttattctacgcacccctaactcccttaaactgcgcactccaccccactccctccccgccatccgcgccatcaccctcacccaggacgacctcaagagactcgccgccgacaaggccgtggagtccgtcaagagcggcatggtcctcggcctaggcaccggctccactgctgccttcgtcgtcctgggtgagggtgatggcgcggaatgcacggagtacgtgaaggagtacatgaccgggaaggggtacgcggtcgacctcgaaatggtctccaaagaggcggaggagttcgcgaggagtgtgcctctcggcggcgacgggaaggacgcgtggattttcgacatcgacgagactctcctctccaatctcccctattatgccgcacacggatacgggcttgaggtctttgaccacgagaagtttaacaattgggtggagaagggtgtagctccagccattgaacccagtttaaagctctatgaagatgttttgaatctgggattcaaggttattctactgacaggacggagtgaaaggcacaggagtgtcactgttgataatttgatcaatgctgggtttaaggaatgggaccagctcatactaagaaactcagatgatcaagggaaacgagctgtactctacaaatcagagaagaggagtgagatggagaaagatggatacaggattcttggaaattctggtgaccagtggagcgatttattaggttcttcagtatctgttcggtccttcaagcttccaaatcccatgtattacattccatagtaaatgtctcattcatttgcaaataattgctgtttgaattgtacataacgaaagtggatcaattcgtatactgaatatcattgcaaataattcataaactgaatgtcattgaaattctaatacataccg

SEQ ID NO: 57580 - protein, 282 aa, Glycine max
  peptide (1)..(282): Ceres Seq. ID no. 12608128
MASLSLSSPPSLSSAHHNASTRLILRTPNSLKLRTPPHSLPAIRAITLTQDDLKRLAADKAVESVKSGMVLGLGTGSTAAFVVLGEGDGAECTEYVKEYMTGKGYAVDLEMVSKEAEEFARSVPLGGDGKDAWIFDIDETLLSNLPYYAAHGYGLEVFDHEKFNNWVEKGVAPAIEPSLKLYEDVLNLGFKVILLTGRSERHRSVTVDNLINAGFKEWDQLILRNSDDQGKRAVLYKSEKRSEMEKDGYRILGNSGDQWSDLLGSSVSVRSFKLPNPMYYIP

SEQ ID NO: 57581 - protein, 214 aa, Glycine max
  peptide (1)..(214): Ceres Seq. ID no. 12608129
MVLGLGTGSTAAFVVLGEGDGAECTEYVKEYMTGKGYAVDLEMVSKEAEEFARSVPLGGDGKDAWIFDIDETLLSNLPYYAAHGYGLEVFDHEKFNNWVEKGVAPAIEPSLKLYEDVLNLGFKVILLTGRSERHRSVTVDNLINAGFKEWDQLILRNSDDQGKRAVLYKSEKRSEMEKDGYRILGNSGDQWSDLLGSSVSVRSFKLPNPMYYIP

SEQ ID NO: 57582 - protein, 183 aa, Glycine max
  peptide (1)..(183): Ceres Seq. ID no. 12608130
MTGKGYAVDLEMVSKEAEEFARSVPLGGDGKDAWIFDIDETLLSNLPYYAAHGYGLEVFDHEKFNNWVEKGVAPAIEPSLKLYEDVLNLGFKVILLTGRSERHRSVTVDNLINAGFKEWDQLILRNSDDQGKRAVLYKSEKRSEMEKDGYRILGNSGDQWSDLLGSSVSVRSFKLPNPMYYIP

SEQ ID NO: 57583 - DNA, 1164 bp, Glycine max
  misc_feature (1)..(1164): Ceres Seq. ID no. 14315915
cacttcactcgccgccactctccactcacaatgcaaccccttcaccgtctcgcatcctgcacgcgccgcgtcgccacatcgtcgctccgtcacgacagcctccttccccgagccccttcaggaatcctctccttctccaccgacgcgcccgccggaggaggaggctccttcgacgcggcatgggagagcgcctcctcgtggtcgacgggcctcgccggcgaccacttcaacggccaggccccgtccgaggtcctcgcgtacctccaggacacggaggacaggctccgcgagctggaggcggagaaccgccgagggaaggcctactgtgacagctggaagagtcgcttggaggagacgacggtgcttctgaagcaggttcaggagcccggcgcgcgaggctcgtatctgaaggattccgagaaggcggagatgtaccggctgcacaagaagaaccctcaggtctacaccgtggagaagctcgctagggattacaggatcatgcggcagagggttcacgccatcctctggctcaaggagatcgaggaggaggaagagaagaggctcggccacccgctcgacgattccgtcgagcagttgctcgattcttgccctgagttttttaattcgcatgatagggagtttcatgtggcgtctctgccgtacaagccggacttcaaggttatgccggaggggtgggatggcattaccaaggatgtggatgaggtgcattatgagatctccatgaaggaggatgagatgctctatcgggagtttgtcgagaagatgaacttcaataaaaagaaaatggctggagaggtaaaatgccataagtatagtcgacgacgcccttcagatggatggacttttacagtagagaaattgggacatcagggaaagcgtggaggtggtggtggctggaagtttgctagcatgccagatggatcaagccgaccactgaatgatatggagaaaatgtatgtgaagcgagagacaccacgccggcgacgcaggattcttccttgattacttgatttttttttttggaagttttgattagctgttaaaattagattttttacccattgtattcaatggtttgggatgtgtagtgtcaattgttgtcttttttcttttggatgagttattgtattagaagatttactt

SEQ ID NO: 57584 - protein, 340 aa, Glycine max
  peptide (1)..(340): Ceres Seq. ID no. 14315916
HFTRRHSPLTMQPLHRLASCTRRVATSSLRHDSLLPRAPSGILSFSTDAPAGGGGSFDAAWESASSWSTGLAGDHFNGQAPSEVLAYLQDTEDRLRELEAENRRGKAYCDSWKSRLEETTVLLKQVQEPGARGSYLKDSEKAEMYRLHKKNPQVYTVEKLARDYRIMRQRVHAILWLKEIEEEEEKRLGHPLDDSVEQLLDSCPEFFNSHDREFHVASLPYKPDFKVMPEGWDGITKDVDEVHYEISMKEDEMLYREFVEKMNFNKKKMAGEVKCHKYSRRRPSDGWTFTVEKLGHQGKRGGGGGWKFASMPDGSSRPLNDMEKMYVKRETPRRRRRILP

SEQ ID NO: 57585 - protein, 330 aa, Glycine max
  peptide (1)..(330): Ceres Seq. ID no. 14315917
MQPLHRLASCTRRVATSSLRHDSLLPRAPSGILSFSTDAPAGGGGSFDAAWESASSWSTGLAGDHFNGQAPSEVLAYLQDTEDRLRELEAENRRGKAYCDSWKSRLEETTVLLKQVQEPGARGSYLKDSEKAEMYRLHKKNPQVYTVEKLARDYRIMRQRVHAILWLKEIEEEEEKRLGHPLDDSVEQLLDSCPEFFNSHDREFHVASLPYKPDFKVMPEGWDGITKDVDEVHYEISMKEDEMLYREFVEKMNFNKKKMAGEVKCHKYSRRRPSDGWTFTVEKLGHQGKRGGGGGWKFASMPDGSSRPLNDMEKMYVKRETPRRRRRILP

SEQ ID NO: 57586 - protein, 197 aa, Glycine max
  peptide (1)..(197): Ceres Seq. ID no. 14315918
MYRLHKKNPQVYTVEKLARDYRIMRQRVHAILWLKEIEEEEEKRLGHPLDDSVEQLLDSCPEFFNSHDREFHVASLPYKPDFKVMPEGWDGITKDVDEVHYEISMKEDEMLYREFVEKMNFNKKKMAGEVKCHKYSRRRPSDGWTFTVEKLGHQGKRGGGGGWKFASMPDGSSRPLNDMEKMYVKRETPRRRRRILP

SEQ ID NO: 57587 - DNA, 656 bp, Glycine max
  misc_feature (1)..(656): Ceres Seq. ID no. 13638232
ttcattcccttacccgagaaaatgaggtggagctcactctttgtgccctcttttctactccatattcttcttctatcttgcatttttttcacaccaactgattcctctgatggggatggggatggggatttggtagaccaaatatgcaaaaaaacacccttttatgacctttgcagctccatcttacactcaaatcccttagcccccaaaagtgatccaaagggtatggccctcataatggtcaatggaattctgacaaatgctactgacacactcagttacattgaagagcttatcaagcagacctcagatgaacaattagagcaacagttggctttctgtgctgagtcatacatcccagttgtgaagtacattctcccacaagcagctgatgccataaaccaaggtcgatttgggtttgccagttactgcatagttgatgctcagaaggaagtaaatgcttgcgacaagaaattctcgggctcaactcaagcacccttaagtgatagaaatgacattatgcagaagctggtggatgtggctgctgccataattaaactattattaaatggctgatttatttttctcttcctcctttccagcctcatttcttgtagaatatagcaattattagtgcccttatcttatccaataaa

SEQ ID NO: 57588 - protein, 191 aa, Glycine max
  peptide (1)..(191): Ceres Seq. ID no. 13638233
FIPLPEKMRWSSLFVPSFLLHILLLSCIFFTPTDSSDGDGDGDLVDQICKKTPFYDLCSSILHSNPLAPKSDPKGMALIMVNGILTNATDTLSYIEELIKQTSDEQLEQQLAFCAESYIPVVKYILPQAADAINQGRFGFASYCIVDAQKEVNACDKKFSGSTQAPLSDRNDIMQKLVDVAAAIIKLLLNG

SEQ ID NO: 57589 - protein, 184 aa, Glycine max
  peptide (1)..(184): Ceres Seq. ID no. 13638234
MRWSSLFVPSFLLHILLLSCIFFTPTDSSDGDGDGDLVDQICKKTPFYDLCSSILHSNPLAPKSDPKGMALIMVNGILTNATDTLSYIEELIKQTSDEQLEQQLAFCAESYIPVVKYILPQAADAINQGRFGFASYCIVDAQKEVNACDKKFSGSTQAPLSDRNDIMQKLVDVAAAIIKLLLNG

SEQ ID NO: 57590 - protein, 116 aa, Glycine max
  peptide (1)..(116): Ceres Seq. ID no. 13638235
MALIMVNGILTNATDTLSYIEELIKQTSDEQLEQQLAFCAESYIPVVKYILPQAADAINQGRFGFASYCIVDAQKEVNACDKKFSGSTQAPLSDRNDIMQKLVDVAAAIIKLLLNG

SEQ ID NO: 57591 - DNA, 760 bp, Glycine max
  misc_feature (1)..(760): Ceres Seq. ID no. 15169960
acattcatcgtgaaccatcgcgaacatcccaatgaccaaaaatcctccaatatatatatataacttccccgttctctcacactcaacagaaaattgaaaaccaacataacaatgtcgttgattccaagtttcttcggcaccgggcgaagaaccaacgtcttcgaccccttctccctcgacgtgtgggacccattccatggcttccccggcaccaccgccctctccgctccgcgctccgagacggcggccttcgccaacacgcgtatcgactggaaggagacggcggaggcgcacgtgttcaaggcagacctgccggggctgaagaaggaagaggtgaaggtggagatcgaggaggagggaagggtgctgcagataagcggacagagaacaaaggagaaggaggacaagaacgacacgtggcaccgcctcgaacgctccagcggcagctttctccgccgcttccgcctgccggagaacgcgaaactcgatcaggtgaaggccggcatggagaacggagtgctcactgtcactgttcccaaggtggatgtcaagaagcccgatgtcaagcccgttcagatcactgaaggctaagttgtgttctcaatcaatcaaaattcatgtgtctcaataattgagtttgaggtgtgttgtgtgagatattattaccatgtattgttatagtgtggtgaactgttggtcgtgttgtgtaactttttttaataataaagaatattgatatatgaatatttttattttaaac

SEQ ID NO: 57592 - protein, 159 aa, Glycine max
  peptide (1)..(159): Ceres Seq. ID no. 15169961
MSLIPSFFGTGRRTNVFDPFSLDVWDPFHGFPGTTALSAPRSETAAFANTRIDWKETAEAHVFKADLPGLKKEEVKVEIEEEGRVLQISGQRTKEKEDKNDTWHRLERSSGSFLRRFRLPENAKLDQVKAGMENGVLTVTVPKVDVKKPDVKPVQITEG

SEQ ID NO: 57593 - DNA, 974 bp, Glycine max
  misc_feature (1)..(974): Ceres Seq. ID no. 15171634
ccattgttcaaaaccttcattcatttcaagcaaataatagtttcacatgcatatgtacgtgccctaaacattcaaaaccctacgtacgtcaacatctccgaaaaataaaaatggcgaaaaggagcatgtgtgtttttttgtgcgtgactttgttcatggttgggttttcggagtgttcgagcacgagcacgttcctctacagcgggtgcacgcagcaacggtacactcccaactcgccctacgagtggaatatcaactcgctactcacctcgctggtgaactcagcgacgtactcggcttataacaacttcactgtggtggggtccactcagcaggacgcggtgtacgggctctaccagtgtcgcggcgacctcgccatgccggactgcgccgcgtgcgtggcgcgcgccgtcacccgcgccggcgacatctgccgcggcacgtgcggtggctcggtgcagctcgacggctgcttcgtgaagtacgacaacgcgacgttcctcggcgcgcaggacaaggcggtggtgctgaagaagtgcgggccgtcggtagggtacaaccccgatgccatggggagtcgcgacgccgtgctggccggactcgccgccgccggggggaactttcgcgtcggcgggtctggcggggttcacggcgtggcgcagtgcaccggcgatctcagctacggcgagtgccaggactgcgtggcggaggcgatctcgcggctgaagagcgattgcggcacggcggattacggggacatgtttctcgggaagtgctacgcgaggtactcagtgggtggggcccacgatgagtccaaggcccacggtaaggcccagcatcgtcgcatgcttcctcttctcttactacctctcatgggtttcaagttttaaattcgcttgtagattgaaattgatgtaaaaaaaatgaaaattgtaattttctttgtgaagttgtaagaatcaaaggtttaagag

SEQ ID NO: 57594 - protein, 295 aa, Glycine max
  peptide (1)..(295): Ceres Seq. ID no. 15171635
IVQNLHSFQANNSFTCICTCPKHSKPYVRQHLRKIKMAKRSMCVFLCVTLFMVGFSECSSTSTFLYSGCTQQRYTPNSPYEWNINSLLTSLVNSATYSAYNNFTVVGSTQQDAVYGLYQCRGDLAMPDCAACVARAVTRAGDICRGTCGGSVQLDGCFVKYDNATFLGAQDKAVVLKKCGPSVGYNPDAMGSRDAVLAGLAAAGGNFRVGGSGGVHGVAQCTGDLSYGECQDCVAEAISRLKSDCGTADYGDMFLGKCYARYSVGGAHDESKAHGKAQHRRMLPLLLLPLMGFKF

SEQ ID NO: 57595 - protein, 259 aa, Glycine max
  peptide (1)..(259): Ceres Seq. ID no. 15171636
MAKRSMCVFLCVTLFMVGFSECSSTSTFLYSGCTQQRYTPNSPYEWNINSLLTSLVNSATYSAYNNFTVVGSTQQDAVYGLYQCRGDLAMPDCAACVARAVTRAGDICRGTCGGSVQLDGCFVKYDNATFLGAQDKAVVLKKCGPSVGYNPDAMGSRDAVLAGLAAAGGNFRVGGSGGVHGVAQCTGDLSYGECQDCVAEAISRLKSDCGTADYGDMFLGKCYARYSVGGAHDESKAHGKAQHRRMLPLLLLPLMGFKF

SEQ ID NO: 57596 - protein, 254 aa, Glycine max
  peptide (1)..(254): Ceres Seq. ID no. 15171637
MCVFLCVTLFMVGFSECSSTSTFLYSGCTQQRYTPNSPYEWNINSLLTSLVNSATYSAYNNFTVVGSTQQDAVYGLYQCRGDLAMPDCAACVARAVTRAGDICRGTCGGSVQLDGCFVKYDNATFLGAQDKAVVLKKCGPSVGYNPDAMGSRDAVLAGLAAAGGNFRVGGSGGVHGVAQCTGDLSYGECQDCVAEAISRLKSDCGTADYGDMFLGKCYARYSVGGAHDESKAHGKAQHRRMLPLLLLPLMGFKF

SEQ ID NO: 57597 - DNA, 1138 bp, Glycine max
  misc_feature (1)..(1138): Ceres Seq. ID no. 14315896
ctgtccaacaaaaatctcgaccaatagctatattctctcatggctggagattaggtagagacaaaattgggcaagagatatggggtagtttttatgatgctttggggaatgaatttaatatccatctatcgagaatgagtttgatgtcagcactggaatggtggctggtataccatcccagcatccagaagttctcatggaagcctcctcacacccctttctcctcccctctcttccttagtctctccatcctcagctacctctccctcaccctcctcctcaccctcctccctctcccacccttcccacaccgcctcctgaagcccatcaccgccctccacaacctcctcctcctcctcctctccctcctcatgctcctgggctgctccctcaccctcctcatccacacccctcacctccgctgggccgtctgcttcccaccccacaccaatcccaccgggcccctcttcttctgggcctacatcttctacctctccaaaatcctcgaattcctcgacacgctcttcatcgtcctctcccgctccttccgacgcctctccttcctccacgtctaccaccacgccaccgtcctcctcatgtgctacctctggctccaaacctcccaatccctcttccccgtcgcgctcctcaccaatgcctccgtccacgtcatcatgtacggttactacttcctcagcgccctcggcatccgcccctcctggaagcgcgccgtcaccgactgccagatcatccagttcgtcttcagcttcgcaatttcgggtctcatgctccactaccacttctccggatccggatgctccgggatttggggctggtgcttcaatgcggtttttaatgcctctctcttggccctctttgttgattttcatctcaagagttatgctaagaaacgcactcttaataaggactcatgaattcctcgtccatttcattggtagcatactttatcttctgtaagacaagagaaaaaaaatattcattggaattcaatgacaatgttttttttttcctcctccttgttaaaggattattacaagataataatgccttacattacctgtcatctttattttctttcctttttccttaccattcaagggatgcaacttttaatccg

SEQ ID NO: 57598 - protein, 310 aa, Glycine max
  peptide (1)..(310): Ceres Seq. ID no. 14315897
VQQKSRPIAIFSHGWRLGRDKIGQEIWGSFYDALGNEFNIHLSRMSLMSALEWWLVYHPSIQKFSWKPPHTPFSSPLFLSLSILSYLSLTLLLTLLPLPPFPHRLLKPITALHNLLLLLLSLLMLLGCSLTLLIHTPHLRWAVCFPPHTNPTGPLFFWAYIFYLSKILEFLDTLFIVLSRSFRRLSFLHVYHHATVLLMCYLWLQTSQSLFPVALLTNASVHVIMYGYYFLSALGIRPSWKRAVTDCQIIQFVFSFAISGLMLHYHFSGSGCSGIWGWCFNAVFNASLLALFVDFHLKSYAKKRTLNKDS

SEQ ID NO: 57599 - protein, 266 aa, Glycine max
  peptide (1)..(266): Ceres Seq. ID no. 14315898
MSLMSALEWWLVYHPSIQKFSWKPPHTPFSSPLFLSLSILSYLSLTLLLTLLPLPPFPHRLLKPITALHNLLLLLLSLLMLLGCSLTLLIHTPHLRWAVCFPPHTNPTGPLFFWAYIFYLSKILEFLDTLFIVLSRSFRRLSFLHVYHHATVLLMCYLWLQTSQSLFPVALLTNASVHVIMYGYYFLSALGIRPSWKRAVTDCQIIQFVFSFAISGLMLHYHFSGSGCSGIWGWCFNAVFNASLLALFVDFHLKSYAKKRTLNKDS

SEQ ID NO: 57600 - protein, 263 aa, Glycine max
  peptide (1)..(263): Ceres Seq. ID no. 14315899
MSALEWWLVYHPSIQKFSWKPPHTPFSSPLFLSLSILSYLSLTLLLTLLPLPPFPHRLLKPITALHNLLLLLLSLLMLLGCSLTLLIHTPHLRWAVCFPPHTNPTGPLFFWAYIFYLSKILEFLDTLFIVLSRSFRRLSFLHVYHHATVLLMCYLWLQTSQSLFPVALLTNASVHVIMYGYYFLSALGIRPSWKRAVTDCQIIQFVFSFAISGLMLHYHFSGSGCSGIWGWCFNAVFNASLLALFVDFHLKSYAKKRTLNKDS

SEQ ID NO: 57601 - DNA, 1312 bp, Glycine max
  misc_feature (1)..(1312): Ceres Seq. ID no. 14314378
aaggatcctccaaaacctcgtccaaggtttgtgttgtgttgggtgagattttattctaacatcgtttcatcaaatggcttttatgtctggagttcagcgtctgcttcgccgcactccacttgttcattcccactatgcttctattcgtctcagctcaactctcacttcccccaattttttttttttttttgtaacacaaattgaatttgctgctttattactaataattattgcaaacacaacaacagggtacaacacaaaaatgccacaataaatagaaaagcaatcatacacgaccatattaatctatgaacaaataaattaaagagatcactaaaaatggactgtacttttcacatttacttggcatttacatttcaaatctctctttcctgtttggatttgtccgtcacttgaacacaataagatcaggacgtgcaagatggccatcaaacaaatagaatcaacctgatctgaatcataaacattgtagcatagagatgacacattcagacttttattcaaagaacttggacaggaagatagatgtttcacttgactccaaatagagcttgcctttattcctcgataaaaactagaacatgatttatcgtgaatggtgcttccgcaattcgaacttacttgtagataggtggaggtggggaagcatatatgtaaactggaggtggaggtgatttgtaaatgtacttgggagcgggagctggggaaggaggaggtggtgatgtgtaatggtatggtggaggaggagatggagaaggtggtggagggctcacatagtggtaaggtggaggagcataagaagaaagtggaggccaaaaatgcattggaaaattatgcctataacatgaggaacacaatcaaggatgacaagattgcttccaaactgtcttctgatgataagaagaaaattgaagatgcgattgagcaggctatccaatggctagatggaaaccaacttgctgaggctgacgaatttgaggataagatgaaggagttggagagcatttgtaatcccatcatagcaaagatgtaccagggtgctggtggtgatgcgggtggagccatggatgaggatggtcctgcagctggcagtggaagcggtgctggacccaaaattgaggaagtcgattaagcagaagattctcatgggttgttcttgattttgtcaaagacccttttgaagtttagataacagcgtgtcattatgtttttattgcgattttatttttctcttttttttttaatgtacttttccccgtttctacttgaacaatgatataagtttttgctc

SEQ ID NO: 57602 - protein, 136 aa, Glycine max
  peptide (1)..(136): Ceres Seq. ID no. 14314379
MCNGMVEEEMEKVVEGSHSGKVEEHKKKVEAKNALENYAYNMRNTIKDDKIASKLSSDDKKKIEDAIEQAIQWLDGNQLAEADEFEDKMKELESICNPIIAKMYQGAGGDAGGAMDEDGPAAGSGSGAGPKIEEVD

SEQ ID NO: 57603 - protein, 132 aa, Glycine max
  peptide (1)..(132): Ceres Seq. ID no. 14314380
MVEEEMEKVVEGSHSGKVEEHKKKVEAKNALENYAYNMRNTIKDDKIASKLSSDDKKKIEDAIEQAIQWLDGNQLAEADEFEDKMKELESICNPIIAKMYQGAGGDAGGAMDEDGPAAGSGSGAGPKIEEVD

SEQ ID NO: 57604 - protein, 127 aa, Glycine max
  peptide (1)..(127): Ceres Seq. ID no. 14314381
MEKVVEGSHSGKVEEHKKKVEAKNALENYAYNMRNTIKDDKIASKLSSDDKKKIEDAIEQAIQWLDGNQLAEADEFEDKMKELESICNPIIAKMYQGAGGDAGGAMDEDGPAAGSGSGAGPKIEEVD

SEQ ID NO: 57605 - DNA, 789 bp, Glycine max
  misc_feature (1)..(789): Ceres Seq. ID no. 15173608
gaaaaatttctctcgtcaaatttatccattcaccacagagtttcttcaatggcccagcctcaaccagagtcccacgccaccaatggctcacacgagccattgctcaaaatcccaaagctccaccaaaacggcgacgtttccgcaaccgctccctttctccgcgtcaagaagctctccgacaaggccgttttgccctctagggcttcccctctctccgccggttacgatctctctagcgcggtggagacgaaggtcccggcgagagggaaggctctggtggccactgacatcagcatcgcgattccagagggcacatatgctcgcgttgcgccgcgttcggggttggcgtggaagcactcgatcgacgtgggtgcgggggtgatagatgcggattacaggggtccggttggggttatacttttcaaccattcggacacggattttgaggtgaaggttggggacagggttgcgcaacttatcattgagaagattgtgacaccgaatgttgttacagaggtcgaggatttggatgagactgttagaggtgaaggtgggtttggatccaccggtgtttgattttgttctgttctcttggtaattttgtagagcagttggtgggtgtaatcgaatgaagaacctgtctttatcttttggcttgttagtgttctgtgtgtgtccaagttatgatggtattgatttggtcatcggggaatggcagtaggtattaggtaaatgctttcaaagctagaaaactttattgaacaagataattaattttattattgtctt

SEQ ID NO: 57606 - protein, 191 aa, Glycine max
  peptide (1)..(191): Ceres Seq. ID no. 15173609
EKFLSSNLSIHHRVSSMAQPQPESHATNGSHEPLLKIPKLHQNGDVSATAPFLRVKKLSDKAVLPSRASPLSAGYDLSSAVETKVPARGKALVATDISIAIPEGTYARVAPRSGLAWKHSIDVGAGVIDADYRGPVGVILFNHSDTDFEVKVGDRVAQLIIEKIVTPNVVTEVEDLDETVRGEGGFGSTGV

SEQ ID NO: 57607 - protein, 175 aa, Glycine max
  peptide (1)..(175): Ceres Seq. ID no. 15173610
MAQPQPESHATNGSHEPLLKIPKLHQNGDVSATAPFLRVKKLSDKAVLPSRASPLSAGYDLSSAVETKVPARGKALVATDISIAIPEGTYARVAPRSGLAWKHSIDVGAGVIDADYRGPVGVILFNHSDTDFEVKVGDRVAQLIIEKIVTPNVVTEVEDLDETVRGEGGFGSTGV

SEQ ID NO: 57608 - protein, 126 aa, Glycine max
  peptide (1)..(126): Ceres Seq. ID no. 15173611
KNFSRQIYPFTTEFLQWPSLNQSPTPPMAHTSHCSKSQSSTKTATFPQPLPFSASRSSPTRPFCPLGLPLSPPVTISLARWRRRSRREGRLWWPLTSASRFQRAHMLALRRVRGWRGSTRSTWVRG

SEQ ID NO: 57609 - DNA, 1073 bp, Glycine max
  misc_feature (1)..(1073): Ceres Seq. ID no. 13504447
ttatcaggtaggactgtgttattgaagagtagagaccgaatccgtatcgtagcaaaacgcacacgttagggggcggcgatgggagggtcatcggaggatttctcggtggtggtgctggcgtcggacctcggcgtcgatgcacgacccttcctcgaacacgaccaacagcaacaagaagaagagaattggcacgactgttcccagtacctctcccccgacgaggacttctccgatctcgatcagttgcaattcctccgcctccaaggctccgacaaaaactccaatcgcattctccgcatcgtcggcaagtactttcccgcaaccgttgtgagtgcggagcggctgaagaggtatgtgttccacaaaatttgcagtgagttgccagaggggccattttgtattgtttacatgcacagcaccgttcagaaggaggacaattcccctggcatcaccatcttgaggtggatctatgaagaacttcctgctgatttcaaggacaggcttcagactgtgtatttcgtccaccctggctttcggtcccggctagtcatcgctactcttggccgctttttcttgagtggaggattatattggaagatcaagtatgtaagccggcttcagtacctttgggatgacataaagaaaggagagattgagataccggattttgtgaaaagtcatgatgatattctggagaatagaccactcactgattatggcattgaacctgacccctttcacttgactgggatgccttcaactacctactcatttggaaagtacgaggagagatgggcgggaaggaattatgtgtcttagtatgtgtattgtcttattacatgatgaacccaaaccttttgtacagaatgactctagtattgtatttgtatttcctatactctcatctttgagtttctttgtttgtttagttaaacttgactgtgtacgaataggaggactacatgttttctatgccataagaaacttttatgtaagttgtatgctgtgtactgcacgattatcaccttcctgtgagcttttgaaataagaaacatgcagcttgtttttactgt

SEQ ID NO: 57610 - protein, 246 aa, Glycine max
  peptide (1)..(246): Ceres Seq. ID no. 15223285
MGGSSEDFSVVVLASDLGVDARPFLEHDQQQQEEENWHDCSQYLSPDEDFSDLDQLQFLRLQGSDKNSNRILRIVGKYFPATVVSAERLKRYVFHKICSELPEGPFCIVYMHSTVQKEDNSPGITILRWIYEELPADFKDRLQTVYFVHPGFRSRLVIATLGRFFLSGGLYWKIKYVSRLQYLWDDIKKGEIEIPDFVKSHDDILENRPLTDYGIEPDPFHLTGMPSTTYSFGKYEERWAGRNYVS

SEQ ID NO: 57611 - protein, 136 aa, Glycine max
  peptide (1)..(136): Ceres Seq. ID no. 15223286
MHSTVQKEDNSPGITILRWIYEELPADFKDRLQTVYFVHPGFRSRLVIATLGRFFLSGGLYWKIKYVSRLQYLWDDIKKGEIEIPDFVKSHDDILENRPLTDYGIEPDPFHLTGMPSTTYSFGKYEERWAGRNYVS

SEQ ID NO: 57612 - DNA, 804 bp, Glycine max
  misc_feature (1)..(804): Ceres Seq. ID no. 15173567
cttccaaactctttaatctctcttctttcttgaatcaaactaaattcctttgttcagagacaaagaacaacaacaacaactgtaaccatgcttgtctaccaagatcttcttacaggtgacgagcttctctctgactcattcccgtacaaggaaactgagaatggaatgctgtgggaagtggaaggaaagtgggttgttcaaggagcagtcaatgtagatattggtgctaacccttctgcagaaggtggggatgaggacgagggagttgatgatcaagctgtcaaagtagttgatattgttgacacttttaggcttcaggaacaaccaccctttgataagaaacaatttattacttatatgaagagatatattaagttgctgacggccaaattagagggtgagcagcaagagttgttcaagaagcacatcgagggagcaactaagtccctcctatcaaagctcaaagacctccaattttttgtgggggagagtatgcacgatgatggaagccttgtctttgcttactacaaggaaggtgctactgatccaacttttatctactttgcctatggattgaaggaaatcaagtgctgagcacatgcaatgcatgccccttagttatcttttatctgagttgaaaaattgtctttaattttagttcttgtgttttgggttttggttatgttattaggacttaggaggttgtttcaagagtttaatttgtatgcgtttttatgttggttggtatgagaggaacatgttatcgtataatagtaatttaaaagagtatcatgtgttttagtc

SEQ ID NO: 57613 - protein, 168 aa, Glycine max
  peptide (1)..(168): Ceres Seq. ID no. 15173568
MLVYQDLLTGDELLSDSFPYKETENGMLWEVEGKWVVQGAVNVDIGANPSAEGGDEDEGVDDQAVKVVDIVDTFRLQEQPPFDKKQFITYMKRYIKLLTAKLEGEQQELFKKHIEGATKSLLSKLKDLQFFVGESMHDDGSLVFAYYKEGATDPTFIYFAYGLKEIKC

SEQ ID NO: 57614 - protein, 142 aa, Glycine max
  peptide (1)..(142): Ceres Seq. ID no. 15173569
MLWEVEGKWVVQGAVNVDIGANPSAEGGDEDEGVDDQAVKVVDIVDTFRLQEQPPFDKKQFITYMKRYIKLLTAKLEGEQQELFKKHIEGATKSLLSKLKDLQFFVGESMHDDGSLVFAYYKEGATDPTFIYFAYGLKEIKC

SEQ ID NO: 57615 - DNA, 649 bp, Glycine max
  misc_feature (1)..(649): Ceres Seq. ID no. 13532783
gtttatattgtgtgctagttctttgaagaataagcagtgccacaagttcacacaccccataccacctgccaatttcagaagaattcctgacccaaccacagcacaactagagagagtgagagggatggaggcgtttccaagagaccaacgaggttcgctcgaagtgttcaacccttcttcttcttactccaccgagaagtcggtgaactcgcctgtgcgtgttcaatccacgtggaagacgtggattgacgagttaccggaacaacaacaacaacaacaatgtggtggtactaacgaggtgaccgccacgtcatggatggcgcttaaggactccgctcctccaccgccgacgctcgccgcagtgctgggcgagtctctgtcagcggcggtgggggaggttggcaacgccgcgaagcgcgcggcggagtggggcctggtgctgaagacggacacggagaccgggaagccgcagggagtgaaggttcggacctccggcggggaggagctgggctttgtcccaaacatctttattttttcattcttctgagtcgcatgagtaacctgtacgttgacttaaggacaagttactccttcctttgaattcgatgtttcttaactgtgaaagtagaatatcgaagtcttgtgtgtt

SEQ ID NO: 57616 - protein, 181 aa, Glycine max
  peptide (1)..(181): Ceres Seq. ID no. 13532784
FILCASSLKNKQCHKFTHPIPPANFRRIPDPTTAQLERVRGMEAFPRDQRGSLEVFNPSSSYSTEKSVNSPVRVQSTWKTWIDELPEQQQQQQCGGTNEVTATSWMALKDSAPPPPTLAAVLGESLSAAVGEVGNAAKRAAEWGLVLKTDTETGKPQGVKVRTSGGEELGFVPNIFIFSFF

SEQ ID NO: 57617 - protein, 140 aa, Glycine max
  peptide (1)..(140): Ceres Seq. ID no. 13532785
MEAFPRDQRGSLEVFNPSSSYSTEKSVNSPVRVQSTWKTWIDELPEQQQQQQCGGTNEVTATSWMALKDSAPPPPTLAAVLGESLSAAVGEVGNAAKRAAEWGLVLKTDTETGKPQGVKVRTSGGEELGFVPNIFIFSFF

SEQ ID NO: 57618 - DNA, 1412 bp, Glycine max
  misc_feature (1)..(1412): Ceres Seq. ID no. 14315430
atcccttcttttcaaaaccctaattcctcttttctctcttccaatctcatttctcaagatcgctttcgctgcttcctcaggaattatgtcttttgtgcggaattatcaagcagaagatcgtagtttacatagtggttactggtccacctttgatggaaacaactatggtaacaacaataggaaaagaagcaggaacaattattataacaggaattgtaacatttacaatgataaccggacaaaatttggggaccattttaatttttacaatgctgatcatgctaattatgctagatatgatgctgttcgatcatctttgaaaaggagaaaatattcagcccctgtttggcaagaaagccagcagtactatgttccacccatggtccatgacaatatcccttcagcctataatttccaaggtcctccgacaagatctgatggtgatgcctctacatcagctagctgcaagcgtgattgctctatttttgaagatgataaacctgtcttcatgtcaagggacgaaattgatagacactctccatcaagaaaagatggtattgatgtacatcatgagacacacttgcggtactcctattgtgccttccttcagaatcttggaatgcgtcttgagctgcctcaaaacatcattgggacagctatggttctgtgccaccgtttctttgttcgacgatcacatgcttgccatgatagatttttgattgctactgctgctctttttcttactgcaaagtcagaggaagctccacgtcatttgaataacgtattgagaacatccagtgaaattttatataaacaagattttgctttgttatcctaccggtttcctgttgattggtttgaacagtatcgggagcgggtgcttgaggctgaacaactgatacttactactctaaattttgaactcaatgtgcaacatccatatgtacctcttacatctgttcttaacaagttgggtctatcaaagactgttttggtgaatctggcattaaacttggtcagtgaagggcttcggagttctctgtggcttcaatttaaaccccatcatattgctgctggagctgcatatcttgctgccaagtttctgaacatggatctcgcagcttatcagaacatctggcaagagttccagacaacaccatccatacttcaagatgtctcgcagcaattaatggagctcttttaaaagtatggaagaactggattacagcgttcttcttagtagagtaggttttgagtatataattcaaaatgttatttactttggagggagacattaggaactatgacatatttggtgagttacaggattagtggttgtgtgacctacggatttttaagttttaccaacttctctgaatcttctgctaacatgtcgagcatgccttgcgttc

SEQ ID NO: 57619 - protein, 400 aa, Glycine max
  peptide (1)..(400): Ceres Seq. ID no. 14315431
SLLFKTLIPLFSLPISFLKIAFAASSGIMSFVRNYQAEDRSLHSGYWSTFDGNNYGNNNRKRSRNNYYNRNCNIYNDNRTKFGDHFNFYNADHANYARYDAVRSSLKRRKYSAPVWQESQQYYVPPMVHDNIPSAYNFQGPPTRSDGDASTSASCKRDCSIFEDDKPVFMSRDEIDRHSPSRKDGIDVHHETHLRYSYCAFLQNLGMRLELPQNIIGTAMVLCHRFFVRRSHACHDRFLIATAALFLTAKSEEAPRHLNNVLRTSSEILYKQDFALLSYRFPVDWFEQYRERVLEAEQLILTTLNFELNVQHPYVPLTSVLNKLGLSKTVLVNLALNLVSEGLRSSLWLQFKPHHIAAGAAYLAAKFLNMDLAAYQNIWQEFQTTPSILQDVSQQLMELF

SEQ ID NO: 57620 - protein, 372 aa, Glycine max
  peptide (1)..(372): Ceres Seq. ID no. 14315432
MSFVRNYQAEDRSLHSGYWSTFDGNNYGNNNRKRSRNNYYNRNCNIYNDNRTKFGDHFNFYNADHANYARYDAVRSSLKRRKYSAPVWQESQQYYVPPMVHDNIPSAYNFQGPPTRSDGDASTSASCKRDCSIFEDDKPVFMSRDEIDRHSPSRKDGIDVHHETHLRYSYCAFLQNLGMRLELPQNIIGTAMVLCHRFFVRRSHACHDRFLIATAALFLTAKSEEAPRHLNNVLRTSSEILYKQDFALLSYRFPVDWFEQYRERVLEAEQLILTTLNFELNVQHPYVPLTSVLNKLGLSKTVLVNLALNLVSEGLRSSLWLQFKPHHIAAGAAYLAAKFLNMDLAAYQNIWQEFQTTPSILQDVSQQLMELF

SEQ ID NO: 57621 - protein, 274 aa, Glycine max
  peptide (1)..(274): Ceres Seq. ID no. 14315433
MVHDNIPSAYNFQGPPTRSDGDASTSASCKRDCSIFEDDKPVFMSRDEIDRHSPSRKDGIDVHHETHLRYSYCAFLQNLGMRLELPQNIIGTAMVLCHRFFVRRSHACHDRFLIATAALFLTAKSEEAPRHLNNVLRTSSEILYKQDFALLSYRFPVDWFEQYRERVLEAEQLILTTLNFELNVQHPYVPLTSVLNKLGLSKTVLVNLALNLVSEGLRSSLWLQFKPHHIAAGAAYLAAKFLNMDLAAYQNIWQEFQTTPSILQDVSQQLMELF

SEQ ID NO: 57622 - DNA, 1292 bp, Glycine max
  misc_feature (1)..(1292): Ceres Seq. ID no. 14316091
aaaaaaaacacaacacaacgagtagatccagaaagagcgttgaaacattgaaccttttgaatgagttggacggtttcgcagaaattgacgtttgaattgtagtcgcacgcacgtttcatcatcctctcgcaatcgccaatactccgatccccaaccagagaaaacctaagcgaacaacaacatgagtgctgacgccccaccccaaacccaagccaccaacaccaaaccggaagaatctcaatctcaatctcagtctcagcctcagcgtcactccggcgattatgctccataccctaaactggaccccaccgatgttgcgccaccacaacaaccactgaacactgaatctcgcgctcccatttccgaagatgctgccactactatgcccaaagactccaatccctatgtcactcctgctcccgtcactgcttcttctactaagactactttagattcggtgaaagacgttctcgggaaatgggggaagaaagccgccgaggccaccaagaaggccgaggatctcgccggcaacatgtggcagcacttgaaaacgggaccgagttttgctgatgctgccgtggggaggattgctcagggaactaaggttcttgcagaaggagggtatgaaaagatctttaggcaaacatttgagacagttccggaggagcagcttctcaaaacttatgcatgctacttgtctacctcggctggacctgtgatgggagtcttatatttgtcaacggctaagctggcattttgtagtgataacccactttcttaccaagtgggtgaccagactcaatggagctattataaggtggtcattccattgcaccagctgagagctgtaaacgcatccacaagcaaaaccaaccaatctgaaaaatatatacagattatctctgttgacaaccatgaattttggtttatgggctttgtgcactatgacagcgctgttaaaaatattcaaggagcattgcagcctcattgacaaacaagggattgaaaagcaccatgtattgtttataccagagatgaggtttgtgttgataaattatccatccatcaaagaaacatttatatgtttatctttacgtggttagttcgctagtctagtttgtggagctgttattattgtattaaaattgaaactcattcagtgttcacatgatatatttgctttaccttgttgctttctgaaagcgagagtcaattgatttgttgtaagttgaattgatatatagacggtggatttacatttaaatctattaaaatatcttttttttttgtat

SEQ ID NO: 57623 - protein, 269 aa, Glycine max
  peptide (1)..(269): Ceres Seq. ID no. 14316092
MSADAPPQTQATNTKPEESQSQSQSQPQRHSGDYAPYPKLDPTDVAPPQQPLNTESRAPISEDAATTMPKDSNPYVTPAPVTASSTKTTLDSVKDVLGKWGKKAAEATKKAEDLAGNMWQHLKTGPSFADAAVGRIAQGTKVLAEGGYEKIFRQTFETVPEEQLLKTYACYLSTSAGPVMGVLYLSTAKLAFCSDNPLSYQVGDQTQWSYYKVVIPLHQLRAVNASTSKTNQSEKYIQIISVDNHEFWFMGFVHYDSAVKNIQGALQPH

SEQ ID NO: 57624 - protein, 202 aa, Glycine max
  peptide (1)..(202): Ceres Seq. ID no. 14316093
MPKDSNPYVTPAPVTASSTKTTLDSVKDVLGKWGKKAAEATKKAEDLAGNMWQHLKTGPSFADAAVGRIAQGTKVLAEGGYEKIFRQTFETVPEEQLLKTYACYLSTSAGPVMGVLYLSTAKLAFCSDNPLSYQVGDQTQWSYYKVVIPLHQLRAVNASTSKTNQSEKYIQIISVDNHEFWFMGFVHYDSAVKNIQGALQPH

SEQ ID NO: 57625 - protein, 152 aa, Glycine max
  peptide (1)..(152): Ceres Seq. ID no. 14316094
MWQHLKTGPSFADAAVGRIAQGTKVLAEGGYEKIFRQTFETVPEEQLLKTYACYLSTSAGPVMGVLYLSTAKLAFCSDNPLSYQVGDQTQWSYYKVVIPLHQLRAVNASTSKTNQSEKYIQIISVDNHEFWFMGFVHYDSAVKNIQGALQPH

SEQ ID NO: 57626 - DNA, 985 bp, Glycine max
  misc_feature (1)..(985): Ceres Seq. ID no. 14316367
tttttctttcgctcttcttccattccacactaaaaagtaacagtttcggagggaaacacaatacaacacaaaaagccccccccacaaagcaaatcacctttttttcctttcaaaatgttcgccgaagagaatggcctcaagggagaccccagactccaagccatttcccaagccatcagagtcgtccctcacttccccaaacatggaataatgttccaagacataacgacattgctgttggatcacaaggcgtttaaagacaccgtcgacatttttgtcgatcgttacagagacatgcacatttccgtagttgctggaattgaggcaagggggttcatgtttggtccctcaattgcgttgggcattggtgcaaagtttgttcctttacgcaaaccacggaagctgccaggtgaagtaatttcagaaaaatatgctctagaatatggaactgattgcttggagttgcatgttggtgctgcccagcccggtgaacgggccataataattgatgacttggtggccacaggtggaactctgtcagcaggagtaaaacttctagaacgtgttggggctgaagtggtggaatgtgcttgtgtcattggtgtgcctgatgtcaaggggcagtgcaggagtattggaaagccactttatgttcttgttgagccacgtaaagcagataaatgtcaagctcaagcagataaatgttactgagatgtgatgttggttcgatcttgaactgacatacaaaaaggacgcttagtgtgagaaacacaggccataatgtgatccttaagttttcggctgatggagagttgtgttcatggcaattgccaaatatcatcctgggaaatgttcccccttttcatatctttttatctttgtacatgttagccatcatgttatgtggccagcagtttagaacaataacaatcattaaagaagggatggattttatggcattttataaaatgtcaatttaaggtcc

SEQ ID NO: 57627 - protein, 198 aa, Glycine max
  peptide (1)..(198): Ceres Seq. ID no. 14316368
MFAEENGLKGDPRLQAISQAIRVVPHFPKHGIMFQDITTLLLDHKAFKDTVDIFVDRYRDMHISVVAGIEARGFMFGPSIALGIGAKFVPLRKPRKLPGEVISEKYALEYGTDCLELHVGAAQPGERAIIIDDLVATGGTLSAGVKLLERVGAEVVECACVIGVPDVKGQCRSIGKPLYVLVEPRKADKCQAQADKCY

SEQ ID NO: 57628 - protein, 166 aa, Glycine max
  peptide (1)..(166): Ceres Seq. ID no. 14316369
MFQDITTLLLDHKAFKDTVDIFVDRYRDMHISVVAGIEARGFMFGPSIALGIGAKFVPLRKPRKLPGEVISEKYALEYGTDCLELHVGAAQPGERAIIIDDLVATGGTLSAGVKLLERVGAEVVECACVIGVPDVKGQCRSIGKPLYVLVEPRKADKCQAQADKCY

SEQ ID NO: 57629 - protein, 138 aa, Glycine max
  peptide (1)..(138): Ceres Seq. ID no. 14316370
MHISVVAGIEARGFMFGPSIALGIGAKFVPLRKPRKLPGEVISEKYALEYGTDCLELHVGAAQPGERAIIIDDLVATGGTLSAGVKLLERVGAEVVECACVIGVPDVKGQCRSIGKPLYVLVEPRKADKCQAQADKCY

SEQ ID NO: 57630 - DNA, 1974 bp, Glycine max
  misc_feature (1)..(1974): Ceres Seq. ID no. 14315204
aaattttacgtatttataagcgctcgcaaagcagtgaagacttgagagagggagagagagaatccaaattcggatttttgaaacgggatcgactccattcctcttcttcttcactgtcacacacactcacacactcctgtccatcgtttctccccactgattcacgaaaccctaatttttcgtggttcctcttctggggagcgaagatttagggttagattgagctgaggtggcagatgcagcagcatctcctctgagaaaaaaaatggaaggtggcaagagaattacggtgagccctcgaccttgctgcggccgcagaatcgttgccgcgaagaagagaccgcgtgcgaacgatggcttcgtcaacagcgtcaagaaactacagagacgcgaaatcagctccaagcgtgatcgcgctttcaccatgagcgacgctcaagagagattccggaatattcgcttgcaggaagaatatgatacgcatgatccgaaaggtccttcatctatggtgttgccgtttctgagaaaaagatcaaagattattgagattgtagcagcacgcgatattgtttttgctcttgcacaatcgggtgtttgtgcggcatttagccgagagaccaatcaacggatatgctttttgaatgttagtcctgatgaagttataagaagtctgttttataacaaaaataacgactcacttatcacagtttctgtatatgcttcagacagttacagttctttgaagtgcagaagcacaaggattgaatatataaggaggggtacaccagatgctggctttgctctttttgaatccgagtctctgaagtggccaggttttgttgagtttgatgatgtaaatgggaaggtattaacgtactctgctcaagacagcatatacaaggtatttgacctgaaaaactatacgatgctgtactctatttcggataaaaatgtccaagagattaagatcagcccgggaatcatgttgttgatttatgctaaagcaagtagccatgtcccccttaaaatcctttcaatagaagatggtactattttgaagtcattcagtcatctcctttatcggaataagaaggtagattttattgaacagttcaacgaaaagctacttgtaaagcaagaaaacgagaacctccaaattcttgatgtgcggacttttgaacatacggaagtttgcagaagtgaatttatgacaccgtctgcatttatttttctatatgagaaccaattgttcctaacatttcgaaatcgtactgtggctgtgtggaacttccgtggagagctggtaacttcttttgaggatcacctcttgtggcatcctgactgcaacaccaacaatatatatataaccagtgaccaggatcttatcatatcctactgtaaagctgattctgatgattcgttgtctgaaggaaatgcaggttccatcaacgtcagcaacatcttaactggcaagtgtctggccaaaataagagcaagtaacagctttccagtggataacagttgcagtgacaatccttcaggtagctgttgttgtaattcaaagaagcgaaaacatggatccaagacgaggagcactgttgcagaagccttggaagacattactgctctcttctatgatgaagagcgcaatgaaatctatacaggcaacaggcatggactagttcatgtctggtccaactaatggatatattattgaatgttctgttgcactttgtttttcttagtgggtacattgattattctgatctgctattgagaacttttggggggatgtaactataagtgcctttgaatcattcatttttttttctcttgacatttacgccttaggcgagtttgttcggtagttgtaagaggtgtatgaagatgctgttaactcaccggatgttgcttctgctgtaatctatatttttacattaatggagcggcttcgatggaatttagcatgtgaat

SEQ ID NO: 57631 - protein, 478 aa, Glycine max
  peptide (1)..(478): Ceres Seq. ID no. 14315205
MEGGKRITVSPRPCCGRRIVAAKKRPRANDGFVNSVKKLQRREISSKRDRAFTMSDAQERFRNIRLQEEYDTHDPKGPSSMVLPFLRKRSKIIEIVAARDIVFALAQSGVCAAFSRETNQRICFLNVSPDEVIRSLFYNKNNDSLITVSVYASDSYSSLKCRSTRIEYIRRGTPDAGFALFESESLKWPGFVEFDDVNGKVLTYSAQDSIYKVFDLKNYTMLYSISDKNVQEIKISPGIMLLIYAKASSHVPLKILSIEDGTILKSFSHLLYRNKKVDFIEQFNEKLLVKQENENLQILDVRTFEHTEVCRSEFMTPSAFIFLYENQLFLTFRNRTVAVWNFRGELVTSFEDHLLWHPDCNTNNIYITSDQDLIISYCKADSDDSLSEGNAGSINVSNILTGKCLAKIRASNSFPVDNSCSDNPSGSCCCNSKKRKHGSKTRSTVAEALEDITALFYDEERNEIYTGNRHGLVHVWSN

SEQ ID NO: 57632 - protein, 425 aa, Glycine max
  peptide (1)..(425): Ceres Seq. ID no. 14315206
MSDAQERFRNIRLQEEYDTHDPKGPSSMVLPFLRKRSKIIEIVAARDIVFALAQSGVCAAFSRETNQRICFLNVSPDEVIRSLFYNKNNDSLITVSVYASDSYSSLKCRSTRIEYIRRGTPDAGFALFESESLKWPGFVEFDDVNGKVLTYSAQDSIYKVFDLKNYTMLYSISDKNVQEIKISPGIMLLIYAKASSHVPLKILSIEDGTILKSFSHLLYRNKKVDFIEQFNEKLLVKQENENLQILDVRTFEHTEVCRSEFMTPSAFIFLYENQLFLTFRNRTVAVWNFRGELVTSFEDHLLWHPDCNTNNIYITSDQDLIISYCKADSDDSLSEGNAGSINVSNILTGKCLAKIRASNSFPVDNSCSDNPSGSCCCNSKKRKHGSKTRSTVAEALEDITALFYDEERNEIYTGNRHGLVHVWSN

SEQ ID NO: 57633 - protein, 398 aa, Glycine max
  peptide (1)..(398): Ceres Seq. ID no. 14315207
MVLPFLRKRSKIIEIVAARDIVFALAQSGVCAAFSRETNQRICFLNVSPDEVIRSLFYNKNNDSLITVSVYASDSYSSLKCRSTRIEYIRRGTPDAGFALFESESLKWPGFVEFDDVNGKVLTYSAQDSIYKVFDLKNYTMLYSISDKNVQEIKISPGIMLLIYAKASSHVPLKILSIEDGTILKSFSHLLYRNKKVDFIEQFNEKLLVKQENENLQILDVRTFEHTEVCRSEFMTPSAFIFLYENQLFLTFRNRTVAVWNFRGELVTSFEDHLLWHPDCNTNNIYITSDQDLIISYCKADSDDSLSEGNAGSINVSNILTGKCLAKIRASNSFPVDNSCSDNPSGSCCCNSKKRKHGSKTRSTVAEALEDITALFYDEERNEIYTGNRHGLVHVWSN

SEQ ID NO: 57634 - DNA, 1263 bp, Glycine max
  misc_feature (1)..(1263): Ceres Seq. ID no. 14315951
ttttgttctctgttctcgcgatttcggaagggtcgtgtttccctgcttcagtttcagcttcggcttcgagaagcgtcgattgggtccttaagctgttccttctctgtttctgctttggagcatcttggagcaaatgagcaatggagcttgtggagcacggctcacctcaaggattgctctcttgacaaactgtataactcctatcaaacatgagcggtcgcttttctcgcacaatttatgtcggcaacctgccctctgatataagagagtcagaaattgaagatctattctacaagtatggccgtataatggatattgaattgaaggttcctccccgccctccatgttattgctttgttgagtttgataatgctcgagatgccgaagatgcaattcggggtcgagatggatacaactttgatggttgtcggttaagagtggagcttgctcatggtggtagagggccatcatcaagtgatcgacgtggatatggaggaggaggtggtaatggtggagcaggcgggggtcgttttggcatctcacgccattctgaatttcgagttattgttcgtggactcccatcttctgcatcttggcaagatttgaaggatcatatgcgaaaagctggggacgtgtgttttgctgaggtttcccgtgatagtgaagggacttttggcattgttgattacactaattatgatgacatgaagtatgccattcggaaattggatgacactgagtttagaaatccctgggcgagagcttatattcgggtgaggaagtatgagagtagtcgttctaggagccgcagcaggagccccagcaggagccccagcaggagcagaagtccaaaaagagttagaagatctctggagcgttctgtgtctaggtcacgatctagatctcaatcagcatcaccaatcaaatcttctaggccaagatcacgatcccgatcacgatcacgatctggatctggatctcctcatcaggtcctgtcaggtagtggttgaatttctgacaaagctggtggttctctggtgatattgttccattctggtgggcagtatcggaattatattggagttggactaaattgttttaagggaaaattattgatgtgcctaggctgtttggtgattgtcttatttcttttaaattaaaatgttggacattggccttgccctttgtaccttagcaaacacaagaatatctttagtcctcgcaaactgtgaatccaatttgaatggttttaaacagatttat

SEQ ID NO: 57635 - protein, 266 aa, Glycine max
  peptide (1)..(266): Ceres Seq. ID no. 14315952
MSGRFSRTIYVGNLPSDIRESEIEDLFYKYGRIMDIELKVPPRPPCYCFVEFDNARDAEDAIRGRDGYNFDGCRLRVELAHGGRGPSSSDRRGYGGGGGNGGAGGGRFGISRHSEFRVIVRGLPSSASWQDLKDHMRKAGDVCFAEVSRDSEGTFGIVDYTNYDDMKYAIRKLDDTEFRNPWARAYIRVRKYESSRSRSRSRSPSRSPSRSRSPKRVRRSLERSVSRSRSRSQSASPIKSSRPRSRSRSRSRSGSGSPHQVLSGSG

SEQ ID NO: 57636 - protein, 233 aa, Glycine max
  peptide (1)..(233): Ceres Seq. ID no. 14315953
MDIELKVPPRPPCYCFVEFDNARDAEDAIRGRDGYNFDGCRLRVELAHGGRGPSSSDRRGYGGGGGNGGAGGGRFGISRHSEFRVIVRGLPSSASWQDLKDHMRKAGDVCFAEVSRDSEGTFGIVDYTNYDDMKYAIRKLDDTEFRNPWARAYIRVRKYESSRSRSRSRSPSRSPSRSRSPKRVRRSLERSVSRSRSRSQSASPIKSSRPRSRSRSRSRSGSGSPHQVLSGSG

SEQ ID NO: 57637 - DNA, 1220 bp, Glycine max
  misc_feature (1)..(1220): Ceres Seq. ID no. 14315973
atgcatccaacgtgacatccacactcaactcaaaaaccaattccaataatggcgaccttatctatgtcatcttgatcgtaatccccgtcatcaaactctttctttattctacgattcacaatcaaaacccaacaacttcaactctccaatctctatcctcaattcaacccttttggtggcaacttctatttatgctacaaaaaatgctgcgattgcacttcaccaccgcactctctcactttgcttccaaggcctcaccttttcctctcacacccgtttccgttaccgtttccagagctattgtttgcaacaaccccaccaggttcagatcgcaaatgggttctttctccacttcctcttcctcttcctccaaactcttgttccgccagctttttgagaaggaatcttccacctacacttaccttctcgctgatgcctcgcacccagaaaaacctgcacttctgattgacccagttgataggacagtagacagggacttgtcgatcattgagcaactggggttgaagcttgtgtatgccatgaacacacatgtgcatgcggatcatgtcactgggactggccttatcaagagcaaagttccttctgtaaaatctgttatttcaaaagcaagtggtgcaacggcagatctttatgtggagccaggtgataaggtccaaattggtgatctttttctagagggtgggagttcagagcagctttacaaatcaatccattcacagattttaacactgcccaagagtacgttaatctatccagctcatgactacaaaggattcactgtgagcactgttggagaggagctgcaaaacaatccacgcataacaaaggatgaggaaactttcaagaacatcatgggaaatcttaacctgtcatatcctaaaatgattgacatagctgtcccagctaatatggtttgcggaatccaatccaatccaaagcaagctgaggcttcataagccttatctgagagtcacacactgatgttatttgacacaaagaccttgcaagcaaaagggggaaaaattgttatagccctttgaattgaagagaaaaatggaaattgtaaataaataaaatggtatttgtgttgtggcccaatataattagaattaggttccagtgattatgctgtgtttctgttgtatctgattgtttatgttaaaacttcctaatcctatacttcaaagccaaattttcag

SEQ ID NO: 57638 - protein, 324 aa, Glycine max
  peptide (1)..(324): Ceres Seq. ID no. 14315974
ASNVTSTLNSKTNSNNGDLIYVILIVIPVIKLFLYSTIHNQNPTTSTLQSLSSIQPFWWQLLFMLQKMLRLHFTTALSHFASKASPFPLTPVSVTVSRAIVCNNPTRFRSQMGSFSTSSSSSSKLLFRQLFEKESSTYTYLLADASHPEKPALLIDPVDRTVDRDLSIIEQLGLKLVYAMNTHVHADHVTGTGLIKSKVPSVKSVISKASGATADLYVEPGDKVQIGDLFLEGGSSEQLYKSIHSQILTLPKSTLIYPAHDYKGFTVSTVGEELQNNPRITKDEETFKNIMGNLNLSYPKMIDIAVPANMVCGIQSNPKQAEAS

SEQ ID NO: 57639 - protein, 261 aa, Glycine max
  peptide (1)..(261): Ceres Seq. ID no. 14315975
MLQKMLRLHFTTALSHFASKASPFPLTPVSVTVSRAIVCNNPTRFRSQMGSFSTSSSSSSKLLFRQLFEKESSTYTYLLADASHPEKPALLIDPVDRTVDRDLSIIEQLGLKLVYAMNTHVHADHVTGTGLIKSKVPSVKSVISKASGATADLYVEPGDKVQIGDLFLEGGSSEQLYKSIHSQILTLPKSTLIYPAHDYKGFTVSTVGEELQNNPRITKDEETFKNIMGNLNLSYPKMIDIAVPANMVCGIQSNPKQAEAS

SEQ ID NO: 57640 - protein, 257 aa, Glycine max
  peptide (1)..(257): Ceres Seq. ID no. 14315976
MLRLHFTTALSHFASKASPFPLTPVSVTVSRAIVCNNPTRFRSQMGSFSTSSSSSSKLLFRQLFEKESSTYTYLLADASHPEKPALLIDPVDRTVDRDLSIIEQLGLKLVYAMNTHVHADHVTGTGLIKSKVPSVKSVISKASGATADLYVEPGDKVQIGDLFLEGGSSEQLYKSIHSQILTLPKSTLIYPAHDYKGFTVSTVGEELQNNPRITKDEETFKNIMGNLNLSYPKMIDIAVPANMVCGIQSNPKQAEAS

SEQ ID NO: 57641 - DNA, 1019 bp, Glycine max
  misc_feature (1)..(1019): Ceres Seq. ID no. 14316404
aaccaaatgttattccctcctttcttagtctgctgtgttttctctttctagagaatccaagcctaccattgaagtggaattctgtgaggctaagtaaaatggggtaccagccattggaaaagggaaaaccaaaacataagaaggggttatggtcacctgaagaagacaacaaactcagaaaccacatccttaaacatggtcatggctgttggagttctgtccccattaaggcaggcttgcaaaggaatggaaagagctgtagattaaggtggattaactatctaaggccaggattaaagagagggaaattcagcaaacaggaagaggagacaatcctcacccttcaccacatgctaggcaacaagtggtcacggatatcacagcatttgcctggaaggacagacaatgagattaaaaactattggcattcatatttgaaaaagagagtggccaaagctaaggaaatggaatctcataaccaaattaagtatgctagctcaagctcagatactatggactcttcacattctctccaaaatcttgcaactcaatgcccactgaattataacttcaccaaagaggcttctcaaagttccttaccaaaactgttatttgctgagtggctttcactggatcatttaaactctgcaaattcagttgactctttgggtttgaggaatggatttgatcaaaattcatcttttcatgaagctgcaattcatgacatgtcagaggtaccctttggtggagagtataatagatgtgtaagtaacatttcagcccctgagatgttcaattcacagcttaagtatggaaatcaaatggtggaaaatggttacattcattgtatgcctggggttgacttaagtagcaatttcagcataagcaatgatgcaataatgtacatatgagagctaagtttccgggctggtcagcaaggaataatatcattttctaattttatacatactgaaaacaatcaaactttagcaatatatataaaataataattccattgc

SEQ ID NO: 57642 - protein, 302 aa, Glycine max
  peptide (1)..(302): Ceres Seq. ID no. 14316405
PNVIPSFLSLLCFLFLENPSLPLKWNSVRLSKMGYQPLEKGKPKHKKGLWSPEEDNKLRNHILKHGHGCWSSVPIKAGLQRNGKSCRLRWINYLRPGLKRGKFSKQEEETILTLHHMLGNKWSRISQHLPGRTDNEIKNYWHSYLKKRVAKAKEMESHNQIKYASSSSDTMDSSHSLQNLATQCPLNYNFTKEASQSSLPKLLFAEWLSLDHLNSANSVDSLGLRNGFDQNSSFHEAAIHDMSEVPFGGEYNRCVSNISAPEMFNSQLKYGNQMVENGYIHCMPGVDLSSNFSISNDAIMYI

SEQ ID NO: 57643 - protein, 270 aa, Glycine max
  peptide (1)..(270): Ceres Seq. ID no. 14316406
MGYQPLEKGKPKHKKGLWSPEEDNKLRNHILKHGHGCWSSVPIKAGLQRNGKSCRLRWINYLRPGLKRGKFSKQEEETILTLHHMLGNKWSRISQHLPGRTDNEIKNYWHSYLKKRVAKAKEMESHNQIKYASSSSDTMDSSHSLQNLATQCPLNYNFTKEASQSSLPKLLFAEWLSLDHLNSANSVDSLGLRNGFDQNSSFHEAAIHDMSEVPFGGEYNRCVSNISAPEMFNSQLKYGNQMVENGYIHCMPGVDLSSNFSISNDAIMYI

SEQ ID NO: 57644 - protein, 186 aa, Glycine max
  peptide (1)..(186): Ceres Seq. ID no. 14316407
MLGNKWSRISQHLPGRTDNEIKNYWHSYLKKRVAKAKEMESHNQIKYASSSSDTMDSSHSLQNLATQCPLNYNFTKEASQSSLPKLLFAEWLSLDHLNSANSVDSLGLRNGFDQNSSFHEAAIHDMSEVPFGGEYNRCVSNISAPEMFNSQLKYGNQMVENGYIHCMPGVDLSSNFSISNDAIMYI

SEQ ID NO: 57645 - DNA, 1486 bp, Glycine max
  misc_feature (1)..(1486): Ceres Seq. ID no. 15171681
aaaactccaatcaaatcgcagaaccaaaaccaaaaccaaaccctttccctctcttcaattcaaccttctccatgtctctgaaaccgtcgaattcgtcggagaatctgatgctcccggtgtctgatcctcccaagagccacgacgctgacgacaagctcttcaaaggctccgccatgaccaaacgcggagccttcgccgccgtctcctacatgtcctgcgccgttttgttggtgatgttcaataaagcagcgctttcgtcttataactttccgtccgctaacgtcatcacacttcttcagatggtatgttcgtgttgctttctctatttattgagacgctggaggatgatttctttctcaacaggtgaatccttacacatatcagataactcgacaaaatttgtatcattgaagactttgaagcacactcttcctctgtcaggagcttatttattttacatgctagtcaccatggagtctgttcgtggagtaaatgttccaatgtacacaactcttaggaggaccacagtggtatttacaatgcttgtagagtttgttctggtggggcagagatatacaccttctgttattttcagtgttggcttgattgtctttggtgcgtttgttgctggagcacgggatttatcttttgatgcttatggctatgctgttgttttcatgtcgaacatcgccacagcaatatatcttgcaaccatagcccgcattgggaaaactagtggtcttaatagctttggcctaatgtggtgcaatggtattatatgtgggcctgttttgctcatctggacatttgttcgtggtgacttgatgacaacaatcaattttccgtacctcttctcacctggttttattgttattttgcttttttcctgcgtgctggcattcttcttgaattactgtatttttctgaacacaacactaaattcagctgtgacacagacaatttgtggtaatctgaaggatctctttactattggccttggctggataatttttggtgggctaccatttgatttttggaatataattgggcaatttctcggttttgccggatctggcttatacgcctactacaagctcattggcaagtaacttattcaagtcctctagatgatgtctttttttcaatttgggagtgccatgtgcttcagtcttctgcccatctctgcatcccttgagaagggagaagaatctgaatcaaactcaggtttgggaacttgtgatcgactaatcttatactatggggaagttttgctaatacaagttgacatacaaacagtttctggggaatcagacgagcaaggctggtcatggctttaatgtattcaaacatcaaacttctaattatctaatagtatgttcacccattgcatttgatgaatctcatgcatatctttgtaagatgtaactgttaacaagcactgtattctgatctaagagaaaatttaaatctagcaattcatttcatt

SEQ ID NO: 57646 - protein, 368 aa, Glycine max
  peptide (1)..(368): Ceres Seq. ID no. 15171682
NSNQIAEPKPKPNPFPLFNSTFSMSLKPSNSSENLMLPVSDPPKSHDADDKLFKGSAMTKRGAFAAVSYMSCAVLLVMFNKAALSSYNFPSANVITLLQMVCSCCFLYLLRRWRMISFSTGESLHISDNSTKFVSLKTLKHTLPLSGAYLFYMLVTMESVRGVNVPMYTTLRRTTVVFTMLVEFVLVGQRYTPSVIFSVGLIVFGAFVAGARDLSFDAYGYAVVFMSNIATAIYLATIARIGKTSGLNSFGLMWCNGIICGPVLLIWTFVRGDLMTTINFPYLFSPGFIVILLFSCVLAFFLNYCIFLNTTLNSAVTQTICGNLKDLFTIGLGWIIFGGLPFDFWNIIGQFLGFAGSGLYAYYKLIGK

SEQ ID NO: 57647 - protein, 345 aa, Glycine max
  peptide (1)..(345): Ceres Seq. ID no. 15171683
MSLKPSNSSENLMLPVSDPPKSHDADDKLFKGSAMTKRGAFAAVSYMSCAVLLVMFNKAALSSYNFPSANVITLLQMVCSCCFLYLLRRWRMISFSTGESLHISDNSTKFVSLKTLKHTLPLSGAYLFYMLVTMESVRGVNVPMYTTLRRTTVVFTMLVEFVLVGQRYTPSVIFSVGLIVFGAFVAGARDLSFDAYGYAVVFMSNIATAIYLATIARIGKTSGLNSFGLMWCNGIICGPVLLIWTFVRGDLMTTINFPYLFSPGFIVILLFSCVLAFFLNYCIFLNTTLNSAVTQTICGNLKDLFTIGLGWIIFGGLPFDFWNIIGQFLGFAGSGLYAYYKLIGK

SEQ ID NO: 57648 - protein, 333 aa, Glycine max
  peptide (1)..(333): Ceres Seq. ID no. 15171684
MLPVSDPPKSHDADDKLFKGSAMTKRGAFAAVSYMSCAVLLVMFNKAALSSYNFPSANVITLLQMVCSCCFLYLLRRWRMISFSTGESLHISDNSTKFVSLKTLKHTLPLSGAYLFYMLVTMESVRGVNVPMYTTLRRTTVVFTMLVEFVLVGQRYTPSVIFSVGLIVFGAFVAGARDLSFDAYGYAVVFMSNIATAIYLATIARIGKTSGLNSFGLMWCNGIICGPVLLIWTFVRGDLMTTINFPYLFSPGFIVILLFSCVLAFFLNYCIFLNTTLNSAVTQTICGNLKDLFTIGLGWIIFGGLPFDFWNIIGQFLGFAGSGLYAYYKLIGK

SEQ ID NO: 57649 - DNA, 1359 bp, Glycine max
  misc_feature (1)..(1359): Ceres Seq. ID no. 13595748
aaaattctgggagaattgaagaagccccgaattagatcggggtttgtggcaagagtgcaaattcgtgtctggagttttggtcaacagagagaaagtagggaaaagaaaaaaagcctcatcaccgacttcggcgaaatggatccgccgccggtaccgatccggtggcgcgcaaccgccatcccattctttgtgttggttctctttctatccaccatctccccttcgcgcgcaatctactgcgacgaagatgattgctacgatctacttggggttactcaaagtgccaatgcttccgaaatcaaaaaagcttactacaaactctccttgaagtatcacccggacaaaaaccctgatccggaatcgcgaaagctgtttgtaaaagtcgccaatgcttatgagattttgaaggatgaggccacgcgagagcaatatgattatgcaattgcacatccggaggaggtgttttataatactgcacgctattatcgggcttactatggtcacaagacggatccccgtgctgtgttggtcggccttcttcttattctttcaggttttcaatatctaaatcaatcaacaaggtataatcaggctgtagccatggtcaagaagacacctgcatataaaaataaactaagggcattggaacttgaacgcagtggaggggttacaaacaagaagaagagtcagaagaatatggacaagaaaacggaagaagaccttagcaaagaactcgatctgcagataactggagctgaaatgccctctgtatggaaacttcttggcgtccgctttgttctattaccgtataccttaggcaagctgctgttgtggactgcctgttggttttggagatacaaagtgaaaaagtacccttattccttggaagatgcttcttatctgacacaaagatccctcagtattcctctcgatagatggagaaatatagatgaagcaacaaaggaagatcttgtgctcagacgcttatgggagaaatcaaatctggagaactatgtagcagagatgcggaaagaatcaaagcgcagaagatagttgcattagtcggctctgccgcttttaaattactaaattttgttgcaaattgattttcggggtgggggtgataaaagcagaattattcgtggcaaccacgaaattgtggaatcatatacgtagtttattacgtttacacatgttattgttgctctctaacagtctgtaaacaatgaacaccaaagaatactgctttagatattgcttttattctttcaatgaatcgggtacataagcctcaatcttgctacaatcgcatgtttggtagtaattttgagtgcctctagttcaataattttaagggtt

SEQ ID NO: 57650 - protein, 350 aa, Glycine max
  peptide (1)..(350): Ceres Seq. ID no. 15221656
KILGELKKPRIRSGFVARVQIRVWSFGQQRESREKKKSLITDFGEMDPPPVPIRWRATAIPFFVLVLFLSTISPSRAIYCDEDDCYDLLGVTQSANASEIKKAYYKLSLKYHPDKNPDPESRKLFVKVANAYEILKDEATREQYDYAIAHPEEVFYNTARYYRAYYGHKTDPRAVLVGLLLILSGFQYLNQSTRYNQAVAMVKKTPAYKNKLRALELERSGGVTNKKKSQKNMDKKTEEDLSKELDLQITGAEMPSVWKLLGVRFVLLPYTLGKLLLWTACWFWRYKVKKYPYSLEDASYLTQRSLSIPLDRWRNIDEATKEDLVLRRLWEKSNLENYVAEMRKESKRRR

SEQ ID NO: 57651 - protein, 305 aa, Glycine max
  peptide (1)..(305): Ceres Seq. ID no. 15221657
MDPPPVPIRWRATAIPFFVLVLFLSTISPSRAIYCDEDDCYDLLGVTQSANASEIKKAYYKLSLKYHPDKNPDPESRKLFVKVANAYEILKDEATREQYDYAIAHPEEVFYNTARYYRAYYGHKTDPRAVLVGLLLILSGFQYLNQSTRYNQAVAMVKKTPAYKNKLRALELERSGGVTNKKKSQKNMDKKTEEDLSKELDLQITGAEMPSVWKLLGVRFVLLPYTLGKLLLWTACWFWRYKVKKYPYSLEDASYLTQRSLSIPLDRWRNIDEATKEDLVLRRLWEKSNLENYVAEMRKESKRRR

SEQ ID NO: 57652 - DNA, 2222 bp, Glycine max
  misc_feature (1)..(2222): Ceres Seq. ID no. 15177274
ctgatgtttcaatagggtttcgaatttttctctgtttccctctgagactctctctatgctttggttttctcagatttttccaaattcgcggctcttccaggttgaatttggtagttttttcaatctagggttagggttttgtgcgtgctagtcaatggtttgttgcgtgcaaatttcatgaagagtgttatttatatttccgtacccgcttcagtttcttcgtaggttctgttgcagtgagaattgggcactttctcctttcgattttccggtcgaatcaagcatcaaaatctgagatttttcttttttgcaagtggtttttttagatttggggtagattttttttttgttttctttttattttgggcttcgtagtgcattgaattggcgcggcattcactggaatttgcgacgtgggagctggagaagctgcgatgaagtgtggtgcttggagggtattcttaaagtagcactcaattcgaggtttaatgtttggtcagagcatggattctgcaaggaatgcgggtggtgtggcagggacagtgctaattcccatgcgttttgtgtggccatatggaggaaggagtgtgtttctcagtggttctttcacaaggtggttggagcttctaccgatgtcgccagtggaaggttgtccaactgtgtttcaagtgatttataacttgccacccgggtaccatcagtacaagttttttgttgatggagaatggcgccatgatgaacatcaaccttatgtacctggagattatgggatagtcaacactgtcttcttggccactgatcctaactacatacctgttttacccccagacgttgcttctggaaatagcatggatgtggataatgatgcttttcgacgaatggtccgtctgaccgatggaacactgagtgaggtgctgccaagaatatcagatactgatgtacagatctcccgtcagcgtatttctgcatttctatcttcacacaccgcttatgaattacttcctgagtcaggcaaggttgttgctttggatgttgatctacccgtgaaacaggcatttcatatattgcatgagcagggaattttcatggctcctctttgggacttctgcaaagggcaatttgttggtgttcttagtgctttggattttattttaattttaagagagctggggaatcatggatctaatctgacagaagaggagcttgaaacacataccatatcagcttggaaagaaggaaagtcgtacttaaatagacagaacaatggacatggaactatgttttcaagacgatttatccatgcaggaccatatgataatctgaaagatattgccatgaagatcttgcaaaaggaggtttcaacagttcctattatccattcatcttctgaagatgcttcatttccacagttactacatcttgcttcactttcaggaatacttaaatgcatttgtaggtattttaggcactgctctagttccctgcctgtacttcaacttccaatctgtgcaatacctgtgggcacgtgggtgcccaaaattggggaatcaaatcggcagcctctagcaatgttgagaccaaccgcttctcttgcgtcagccctaaatttattagttcaagcccaagtaagctcaataccaatagttgatgataatgactcattactggatatatattgtcggagtgacataacagctttggcaaagaacagagcatatgcacatattaatcttgatgaaatgacagttcatcaggctttgcagttgggccaggacgcatatagtccctatgagcttagaagtcaaagatgtcagatgtgtttgcgttctgatcctctgcataaagtgatggaacgcttggcaaatccaggtgtcaggcggcttgtcatcgtggaagctggcagcaagcgtgtagaaggcattgtttcattgagggacatattcaagttcttcattggtgattagttttggattggtgaatggaaaagtaaaatggtatgtgctgtggttatgatactagagcatccatacaaccagccaccatcacttgtccaaccattgaaagtgctttctacacggtgattttatctctcatttcattgtaatacaattggattggcctcttgctttattgccttttttaagattttaggctgagaaagaggcctgtaaattcagagtatttgattgccccaaatttattcatctctccccattcgtatt

SEQ ID NO: 57653 - protein, 491 aa, Glycine max
  peptide (1)..(491): Ceres Seq. ID no. 15177275
MFGQSMDSARNAGGVAGTVLIPMRFVWPYGGRSVFLSGSFTRWLELLPMSPVEGCPTVFQVIYNLPPGYHQYKFFVDGEWRHDEHQPYVPGDYGIVNTVFLATDPNYIPVLPPDVASGNSMDVDNDAFRRMVRLTDGTLSEVLPRISDTDVQISRQRISAFLSSHTAYELLPESGKVVALDVDLPVKQAFHILHEQGIFMAPLWDFCKGQFVGVLSALDFILILRELGNHGSNLTEEELETHTISAWKEGKSYLNRQNNGHGTMFSRRFIHAGPYDNLKDIAMKILQKEVSTVPIIHSSSEDASFPQLLHLASLSGILKCICRYFRHCSSSLPVLQLPICAIPVGTWVPKIGESNRQPLAMLRPTASLASALNLLVQAQVSSIPIVDDNDSLLDIYCRSDITALAKNRAYAHINLDEMTVHQALQLGQDAYSPYELRSQRCQMCLRSDPLHKVMERLANPGVRRLVIVEAGSKRVEGIVSLRDIFKFFIGD

SEQ ID NO: 57654 - protein, 486 aa, Glycine max
  peptide (1)..(486): Ceres Seq. ID no. 15177276
MDSARNAGGVAGTVLIPMRFVWPYGGRSVFLSGSFTRWLELLPMSPVEGCPTVFQVIYNLPPGYHQYKFFVDGEWRHDEHQPYVPGDYGIVNTVFLATDPNYIPVLPPDVASGNSMDVDNDAFRRMVRLTDGTLSEVLPRISDTDVQISRQRISAFLSSHTAYELLPESGKVVALDVDLPVKQAFHILHEQGIFMAPLWDFCKGQFVGVLSALDFILILRELGNHGSNLTEEELETHTISAWKEGKSYLNRQNNGHGTMFSRRFIHAGPYDNLKDIAMKILQKEVSTVPIIHSSSEDASFPQLLHLASLSGILKCICRYFRHCSSSLPVLQLPICAIPVGTWVPKIGESNRQPLAMLRPTASLASALNLLVQAQVSSIPIVDDNDSLLDIYCRSDITALAKNRAYAHINLDEMTVHQALQLGQDAYSPYELRSQRCQMCLRSDPLHKVMERLANPGVRRLVIVEAGSKRVEGIVSLRDIFKFFIGD

SEQ ID NO: 57655 - protein, 469 aa, Glycine max
  peptide (1)..(469): Ceres Seq. ID no. 15177277
MRFVWPYGGRSVFLSGSFTRWLELLPMSPVEGCPTVFQVIYNLPPGYHQYKFFVDGEWRHDEHQPYVPGDYGIVNTVFLATDPNYIPVLPPDVASGNSMDVDNDAFRRMVRLTDGTLSEVLPRISDTDVQISRQRISAFLSSHTAYELLPESGKVVALDVDLPVKQAFHILHEQGIFMAPLWDFCKGQFVGVLSALDFILILRELGNHGSNLTEEELETHTISAWKEGKSYLNRQNNGHGTMFSRRFIHAGPYDNLKDIAMKILQKEVSTVPIIHSSSEDASFPQLLHLASLSGILKCICRYFRHCSSSLPVLQLPICAIPVGTWVPKIGESNRQPLAMLRPTASLASALNLLVQAQVSSIPIVDDNDSLLDIYCRSDITALAKNRAYAHINLDEMTVHQALQLGQDAYSPYELRSQRCQMCLRSDPLHKVMERLANPGVRRLVIVEAGSKRVEGIVSLRDIFKFFIGD

SEQ ID NO: 57656 - DNA, 1438 bp, Glycine max
  misc_feature (1)..(1438): Ceres Seq. ID no. 13594269
agttaaacctctggtcttcggcatgaacgaaaacctgttcgaacgaatgttgtgctccttcaaagcttctagtgttcttccaatttcgctccttcaacacttcggccccaattgctgttagtggtcgtcttctttgttcaaccacgcttctctctagtctctatgaatagcgcgcatttgtagaatctgttctggagatacgagtaagcccacagattttttttttgtttttcctgtgggtgtgcatggtttacatgtgatgcaaggtttctgttaagctagcttggcaatcatttggctggcatggacatagcacattgctatttaaagggtaatgctgatgctgtggagttttgtccacatgatccctaccataatgttttagcagtatccacttacacattacaagaaggttctcagccctgtcgacatggaagcatttcactcttcaatgttgatgtggaaccaggtcaccttgacatggtttttagtgaggaaactgctgggatttttgacataaagtggaatccacctggcgggcatgcaagtccttttctagctcaagcagatgctgatggatacttgagaattaaaatgctggagggttgctgtaatggagtggaaggggttaatctaaaggagatcacaaatgaaaaaatcagtaactctatgtgcttgtacctggattggaacccttcagccacatccatcacagtggggctttctgacggctctgtgtctattgtttcttttcttgaatccaagctggaaattcaagaagagtggaaagctcatgattatgaactttggacaacctcctttgatatccaccaaccaaatttggtatacactggctctgatgattgtaaattcagttgttgggatttgcgagataaacctcccaatgtggtatttcagagctctaaagtccacaaaatgggtgtttgttgcattgagaagagtccacatgacccaaataccttgttaactggcagttatgatgaattcctaagggtatgggatttaagatcaatctcaaaaccccttaattcaattaacttggggggaggagtttggagggttaagcaccaccccttcattccaggcttggttttggctgcttgtatgcacaatggttttgctattgtcgccattaaaggcaacaatgccgaagtgtcggaaacttacaagaagcatgattctcttgcctatggagcagattggcagaaaggagaagcaaatcacataggtgggaataccaaaccactggtggctacttgctcattctacgacaaacttgttcgggtgtggaggccaggaaatgatcttatcttgtagaatgtagattgatgcttaacgttaagtcatgaacccacttgaaaatgtgatacgtagtttatttattgaattatggttgaattacatgacactttcattt

SEQ ID NO: 57657 - protein, 344 aa, Glycine max
  peptide (1)..(344): Ceres Seq. ID no. 13594270
MDIAHCYLKGNADAVEFCPHDPYHNVLAVSTYTLQEGSQPCRHGSISLFNVDVEPGHLDMVFSEETAGIFDIKWNPPGGHASPFLAQADADGYLRIKMLEGCCNGVEGVNLKEITNEKISNSMCLYLDWNPSATSITVGLSDGSVSIVSFLESKLEIQEEWKAHDYELWTTSFDIHQPNLVYTGSDDCKFSCWDLRDKPPNVVFQSSKVHKMGVCCIEKSPHDPNTLLTGSYDEFLRVWDLRSISKPLNSINLGGGVWRVKHHPFIPGLVLAACMHNGFAIVAIKGNNAEVSETYKKHDSLAYGADWQKGEANHIGGNTKPLVATCSFYDKLVRVWRPGNDLIL

SEQ ID NO: 57658 - protein, 285 aa, Glycine max
  peptide (1)..(285): Ceres Seq. ID no. 13594271
MVFSEETAGIFDIKWNPPGGHASPFLAQADADGYLRIKMLEGCCNGVEGVNLKEITNEKISNSMCLYLDWNPSATSITVGLSDGSVSIVSFLESKLEIQEEWKAHDYELWTTSFDIHQPNLVYTGSDDCKFSCWDLRDKPPNVVFQSSKVHKMGVCCIEKSPHDPNTLLTGSYDEFLRVWDLRSISKPLNSINLGGGVWRVKHHPFIPGLVLAACMHNGFAIVAIKGNNAEVSETYKKHDSLAYGADWQKGEANHIGGNTKPLVATCSFYDKLVRVWRPGNDLIL

SEQ ID NO: 57659 - protein, 247 aa, Glycine max
  peptide (1)..(247): Ceres Seq. ID no. 13594272
MLEGCCNGVEGVNLKEITNEKISNSMCLYLDWNPSATSITVGLSDGSVSIVSFLESKLEIQEEWKAHDYELWTTSFDIHQPNLVYTGSDDCKFSCWDLRDKPPNVVFQSSKVHKMGVCCIEKSPHDPNTLLTGSYDEFLRVWDLRSISKPLNSINLGGGVWRVKHHPFIPGLVLAACMHNGFAIVAIKGNNAEVSETYKKHDSLAYGADWQKGEANHIGGNTKPLVATCSFYDKLVRVWRPGNDLIL

SEQ ID NO: 57660 - DNA, 613 bp, Glycine max
  misc_feature (1)..(613): Ceres Seq. ID no. 13638275
tttattatcatagtagatattcattccccttatctttctctcttctctctccccgcccaaaccctaactccctaccctattccgctttctctcatccatcatgaaaggaggaaagtccaagaccgaatctaagagagccgatgccaaacttgctgtgaataagaagggcgccgccaccaagactaggaaacccgccggaaaggggaaggcagcgaaagatcctaacaagccaaagaggcctccaagtgctttcttcgttttcatggaggaattcaggaaggtgttcaacaaggaacatcccgacaacaaagcagtgtctgctgtgggcaaagctgctggagcaaaatggaagacgatgaaagcacttggatttgagtcataaccatctctgtggcaagattccccttggctctccttttgatcatctcgaagcctcctcctttgtctacaacgattgtctctgcgggaagcccctcaaaccttgctactagctcaccattacatgcaaactcaaatatcttggaaaaatatatgtatatttgcagttagaccagtgtgtaccatccttagttaactcatcggtccgtttcatgtatycaatttgttgtttgtc

SEQ ID NO: 57661 - protein, 93 aa, Glycine max
  peptide (1)..(93): Ceres Seq. ID no. 15219404
MKGGKSKTESKRADAKLAVNKKGAATKTRKPAGKGKAAKDPNKPKRPPSAFFVFMEEFRKVFNKEHPDNKAVSAVGKAAGAKWKTMKALGFES

SEQ ID NO: 57662 - DNA, 1299 bp, Glycine max
  misc_feature (1)..(1299): Ceres Seq. ID no. 14316550
ctcaagatcagatcctcatctaccaccattccaggtgtagccatcaaaacaacgtttgtttaacaaaacccattatcagatcagatccgatcagatcctcttcagattcggatcaccgccgagtccatgagcacgccagcgctttcagggggcacgggcctcttctctggattcacgcgtttatgcaagggccttgcggtggtgcttgtttgcggtcacattgcggttcagtttatcccttcagctgttaactatcttgctcttattcccgccaggacaatcccatttgcctggaatctcattacagctggatatgttgaacaatctatatatggggtagtggtcagcacattaagtctcctgtttattgggaagctgcttgaaccaatatggggctccagggaattctttaaatttatctttgtggttaatcttctaacttcagtatgtttattcatcactgctattgccttatactacattacaaggctggagacttacctttacatgccactttctggatttcatggagttgtatctggtttcttggttggcattaagcaaattataccagatcaagagcttcctttcattaagataaaaacaaagtggttgccatctatcactgtattgctttccattgctattagcttctggacactagaggctacagcatatcttccaaccattatatctggcacgtatataagctggatttatcttagatactggcagaggaaaccagaaactaaacatagaggtgatctgagtgaagattttgctttctccacatttttcccagaatttttaagaccagtcatagaccctatcgcttcaatatttcatcgaatgctctgtggaagatatgatgcttctaatgatggtcaaggcaacagtctggaaagtgagcctttaccaggttcggactcaattgaggcatccaggagacgagaaagaggtgctcgagcactggaagaacgattggctgcagagaggttggctgttgcacgacgtgagttgcaaagagaggctgaggaaaatgtataattccccagcgtttgtaaattttggatcagttcaggcaatatgcacctattaggagtgatattttcagaggtcgtacagtaattagaaattttttgtttaggtcaaggaaaattttaatgtggttttgccatggactatgatctttacaaaaccgaaggtttctctttcttttgtcagataaatatatttgactttcttgtgtactttacacaaatacatagaatctaaagagtttttcagttgttgtctccc

SEQ ID NO: 57663 - protein, 306 aa, Glycine max
  peptide (1)..(306): Ceres Seq. ID no. 14316551
MSTPALSGGTGLFSGFTRLCKGLAVVLVCGHIAVQFIPSAVNYLALIPARTIPFAWNLITAGYVEQSIYGVVVSTLSLLFIGKLLEPIWGSREFFKFIFVVNLLTSVCLFITAIALYYITRLETYLYMPLSGFHGVVSGFLVGIKQIIPDQELPFIKIKTKWLPSITVLLSIAISFWTLEATAYLPTIISGTYISWIYLRYWQRKPETKHRGDLSEDFAFSTFFPEFLRPVIDPIASIFHRMLCGRYDASNDGQGNSLESEPLPGSDSIEASRRRERGARALEERLAAERLAVARRELQREAEENV

SEQ ID NO: 57664 - protein, 179 aa, Glycine max
  peptide (1)..(179): Ceres Seq. ID no. 14316552
MPLSGFHGVVSGFLVGIKQIIPDQELPFIKIKTKWLPSITVLLSIAISFWTLEATAYLPTIISGTYISWIYLRYWQRKPETKHRGDLSEDFAFSTFFPEFLRPVIDPIASIFHRMLCGRYDASNDGQGNSLESEPLPGSDSIEASRRRERGARALEERLAAERLAVARRELQREAEENV

SEQ ID NO: 57665 - DNA, 1269 bp, Glycine max
  misc_feature (1)..(1269): Ceres Seq. ID no. 14303116
gtttataaacttgaaagaaaaaaaagaaaaagctaccctcaagcggaaagaatcaaccttcttccctttcatttctcactttcagtgttcactcactcatctccactgtgcttcttcttcatcatcattcatcttcttcttctccctctccctctcttcccttcccaatgtcctctctccaccttcttcccggcgccaccaccgcccccaactccgcattcctcctccgcccccattctcccctcttcccctccaaaaccctaacccccaaaaaacccaaacctccctccgccctcctccagtggaatcgcaagcccgagctctccggctccaccccccgcgtcgccgtcatcacctccggcaagggtggcgtgggcaagaccaccaccaccgccaacatcggcctctccctcgcccgtctcggcttctccgtggtcgccatcgacgccgacgtcggcctccgcaacctcgacctcctcctcggcctcgagaaccgcgtcaactacaccgtgatcgaggtcctgaatggcgaatgccgcctcgaccaagccctcgtccgcgacaagcgctggtccaacttcgaactcctctgcatctccaaaccccgatccaaactccccctcggattcggcggcaaggccctcacctggctcgtggacgcgctgaaagcacgttcacagggctgccccgacttcatcctcatcgactgccccgccggcattgacgccggcttcatcaccgccatcacgcccgccaacgaggccgtcctcatcactacccccgacatcaccagcctccgcgacgccgaccgcgtcaccggcctcctcgaatgcgacggaattcgggacatcaagatgatcgtcaaccgggttcggaccgacatgatcaaaggggaggacatgatgtcggtgttggacgtgcaagagatgttagggttgcctttgctcggggttattcctgaggatagtgaggttattagaagcaccaatagaggtttccctcttgtgctcaacaagcctcccactttggccggattggcgttcgaacaagccgcgtggaggctcgtggagcaagatagcatgcaggccgtggtggtggaagaacaacccaaacgtgggtttttctccttttttggtgggtaggatttaaacaaggttatgcgtaatggtgtgtatagttagttggttgggttagagcatgtttggatgagtgttgacaaaattgattttgaattgaattgatttgatttatgtttgaatggtttttatt

SEQ ID NO: 57666 - protein, 324 aa, Glycine max
  peptide (1)..(324): Ceres Seq. ID no. 14303117
MSSLHLLPGATTAPNSAFLLRPHSPLFPSKTLTPKKPKPPSALLQWNRKPELSGSTPRVAVITSGKGGVGKTTTTANIGLSLARLGFSVVAIDADVGLRNLDLLLGLENRVNYTVIEVLNGECRLDQALVRDKRWSNFELLCISKPRSKLPLGFGGKALTWLVDALKARSQGCPDFILIDCPAGIDAGFITAITPANEAVLITTPDITSLRDADRVTGLLECDGIRDIKMIVNRVRTDMIKGEDMMSVLDVQEMLGLPLLGVIPEDSEVIRSTNRGFPLVLNKPPTLAGLAFEQAAWRLVEQDSMQAVVVEEQPKRGFFSFFGG

SEQ ID NO: 57667 - protein, 240 aa, Glycine max
  peptide (1)..(240): Ceres Seq. ID no. 14303118
FINLKEKKEKATLKRKESTFFPFISHFQCSLTHLHCASSSSSFIFFFSLSLSSLPNVLSPPSSRRHHRPQLRIPPPPPFSPLPLQNPNPQKTQTSLRPPPVESQARALRLHPPRRRHHLRQGWRGQDHHHRQHRPLPRPSRLLRGRHRRRRRPPQPRPPPRPREPRQLHRDRGPEWRMPPRPSPRPRQALVQLRTPLHLQTPIQTPPRIRRQGPHLARGRAESTFTGLPRLHPHRLPRRH

SEQ ID NO: 57668 - DNA, 803 bp, Glycine max
  misc_feature (1)..(803): Ceres Seq. ID no. 14315039
ctcattgttgttcttctctttcttttattgcttcctttcccattcttcatcttcttctctctgaaccgtactcaaactcactttcccacttatttatacaatgtcggcttacaaagaccaggatccccgtcttcatggcatcaaaactaagattcgtgtcgtccccaatttccccaaatccggtcttatgttcctagacattactactctattgcttgatcccaaagcatttaaggactcaatagatttgttcgtggagcggtacaagggcaaaaacatttctgttgttgcaggaattgaagctcgaggttttatttttggtccccccattgcgctggctataggagcaaagtttgtaccattgaggaaaccaaagaagttgcctggaaaagttatttctcaagaatatattctggaatatggaagggactgtcttgagatgcatgttggagctgttgatgatttgattgcaactggcggaacactctgtgccgctatggacttgttagaacgtgtgggagcagaagtagtggagtgtgcatgtgtaattgaattaccagaattgaagggtcgtgaacgtttgaacgggaagcccttgtgcgtgttggtggaatatgtggatatatgattatgaagaagtgggcaaaagaatattaagatgtagatttgggagatgatgtgtctttcagtgggtgctttcccattctgattacaattctagcttgtagtaggaacgatcaaatcaaattaatgcatttgtatgacccactctttgggctcatcttctcatctctttttcgaat

SEQ ID NO: 57669 - protein, 175 aa, Glycine max
  peptide (1)..(175): Ceres Seq. ID no. 14315040
MSAYKDQDPRLHGIKTKIRVVPNFPKSGLMFLDITTLLLDPKAFKDSIDLFVERYKGKNISVVAGIEARGFIFGPPIALAIGAKFVPLRKPKKLPGKVISQEYILEYGRDCLEMHVGAVDDLIATGGTLCAAMDLLERVGAEVVECACVIELPELKGRERLNGKPLCVLVEYVDI

SEQ ID NO: 57670 - protein, 146 aa, Glycine max
  peptide (1)..(146): Ceres Seq. ID no. 14315041
MFLDITTLLLDPKAFKDSIDLFVERYKGKNISVVAGIEARGFIFGPPIALAIGAKFVPLRKPKKLPGKVISQEYILEYGRDCLEMHVGAVDDLIATGGTLCAAMDLLERVGAEVVECACVIELPELKGRERLNGKPLCVLVEYVDI

SEQ ID NO: 57671 - DNA, 1066 bp, Glycine max
  misc_feature (1)..(1066): Ceres Seq. ID no. 15168506
aataatttaatagtgtaatgtccgaagatcaaaaccctctgatggggcatcgtatttgattggtcggtcatagcaattagcaactccacccttcaaacttgaaaggaaaaaaggactttggttatccacgccacaccacgctgtaattaactaaactttctagaatcttcttctctcgccatggccgcgccgtcgtcctccgccgcggcaaacatcatgctggcgatctccgagaagaagacgaacagtgtagatctgtatcgccctctccgcaactacgtggccttccactactcggagcgagaggcgcagaacctcgagtatgatctccaaaccctgaagcaactccgctccgatgtggagcgccactccgatccatcgctcccggcgcgccgtgatctcctccaatcctactacaaatctctctgcctcgtggagacgcggttccctatctcttccgaccccgatcacgtcaacgccctcaccttcgtctggttcgacgccttcaagcccaagcagaaggcctcgcagcagaacatccacctcgagaaggcctccgtgctcttcaatttgggtgccgtttacagccagattggtttgtcctatgatcggaacactgtagatggccgccgtcaggcctcccacgccttcatcgcggctgccggatccttcgccttccttcgcgacaatgcttccctgaaggcctccgttgggagttccaccactgtggatttgtccgttgagtgcgccgggatgctggagaagctcatgctcgcgcaggcgcaggagtgcgtcttcgagaacaccattgccaaagggagcactcccggtgtctatgccaagatctctaggcaggtccggtgctagtttgttctatgttttaacttataatcattctttcatgtttgatacttgagttgagtgattatgaagatggttggtacaatttcgatttcgttattatagttttgctctcatttgtgttgttttttgatgttgaaatggtttttctttatgcatgggcaatgagtttcaatgtattaggggtatccgcgcttattgaagc

SEQ ID NO: 57672 - protein, 228 aa, Glycine max
  peptide (1)..(228): Ceres Seq. ID no. 15168507
MAAPSSSAAANIMLAISEKKTNSVDLYRPLRNYVAFHYSEREAQNLEYDLQTLKQLRSDVERHSDPSLPARRDLLQSYYKSLCLVETRFPISSDPDHVNALTFVWFDAFKPKQKASQQNIHLEKASVLFNLGAVYSQIGLSYDRNTVDGRRQASHAFIAAAGSFAFLRDNASLKASVGSSTTVDLSVECAGMLEKLMLAQAQECVFENTIAKGSTPGVYAKISRQVRC

SEQ ID NO: 57673 - protein, 216 aa, Glycine max
  peptide (1)..(216): Ceres Seq. ID no. 15168508
MLAISEKKTNSVDLYRPLRNYVAFHYSEREAQNLEYDLQTLKQLRSDVERHSDPSLPARRDLLQSYYKSLCLVETRFPISSDPDHVNALTFVWFDAFKPKQKASQQNIHLEKASVLFNLGAVYSQIGLSYDRNTVDGRRQASHAFIAAAGSFAFLRDNASLKASVGSSTTVDLSVECAGMLEKLMLAQAQECVFENTIAKGSTPGVYAKISRQVRC

SEQ ID NO: 57674 - DNA, 1039 bp, Glycine max
  misc_feature (1)..(1039): Ceres Seq. ID no. 13638279
agcattaccggattacccggtcactagtcccttcccacgacaacacccacagtcctatttccacacccatcgaaatcgttaaagcagcacagtcactctctaaatcgttcaacctcacacccactcctccgatattcttttctgctttaatcttcgctctgttttcgggggtcagatcttaatgccgaaggcttcgtattctgtttgaattttgttatctattgggagtggagtagtatttgagatcgagcgtaaaatatataaaaataataaaagaagcaaaggcgatgtttttgtttgattggttttatgggattctggcatcgcttgggttgtggcagaaggaggccaagatcttattcttaggtctcgataatgccggaaagaccaccttgcttcacatgctcaaagacgagagactagttcagcatcagcctacacagtatccaacatcagaggagttgagtattgggaggatcaagtttaaagcttttgatctcgggggtcaccagattgcacgaagagtctggaaagattactatgctaaggtagatgcagtggtctacttggtagattcatatgacaaggaacgatttgccgagtctaaaaaagagttagatgctctgctctctgatgagtctttgactactgtccctttccttatccttggaaacaagatagatattccatatgctgcctcagaagaagagttgcgttaccatttgggcctgaccaatttcactacgggcaagggaaatgtaaatttgtcagattctaatgtccgtcctatggaggttttcatgtgcagtattgtgaagaaaatgggttacggagatggtttcaaatggctctctcagtacatcaaataaatagtccatgtagtaagagatggcttggtatcctgtttctagacgcttattcctatagttatgctatagaaatgttgttagtacaaattgctgttaaacattttttttagtacaaaaaattgtttaaagaatattttattaaaagaaaatgacacttatccctttctttc

SEQ ID NO: 57675 - protein, 193 aa, Glycine max
  peptide (1)..(193): Ceres Seq. ID no. 13638280
MFLFDWFYGILASLGLWQKEAKILFLGLDNAGKTTLLHMLKDERLVQHQPTQYPTSEELSIGRIKFKAFDLGGHQIARRVWKDYYAKVDAVVYLVDSYDKERFAESKKELDALLSDESLTTVPFLILGNKIDIPYAASEEELRYHLGLTNFTTGKGNVNLSDSNVRPMEVFMCSIVKKMGYGDGFKWLSQYIK

SEQ ID NO: 57676 - protein, 155 aa, Glycine max
  peptide (1)..(155): Ceres Seq. ID no. 13638281
MLKDERLVQHQPTQYPTSEELSIGRIKFKAFDLGGHQIARRVWKDYYAKVDAVVYLVDSYDKERFAESKKELDALLSDESLTTVPFLILGNKIDIPYAASEEELRYHLGLTNFTTGKGNVNLSDSNVRPMEVFMCSIVKKMGYGDGFKWLSQYIK

SEQ ID NO: 57677 - DNA, 1002 bp, Glycine max
  misc_feature (1)..(1002): Ceres Seq. ID no. 13595782
attttcttgttgaggaagaaagatgctgatgaaattcaaataccctcgtcgatcacacgcacccaagaccaagaactcaagaagggtaccacattcgctttatcactattaacttcataacttagtttctcttctagtccagaagtacaagtaagtgatggtggtgtttccggtggtgaagctagcaacactcgctctgagaaccgcgtgcaaaccaatcgccaacaggctcaagaaggaggccggttaccaccccaagttccgaaatttcatcatcagcattgcccaggccaatcatagattgacgacgagagtgcagagacgaatttacggtcatgccactgatgttgcaatccaccctctgaacgaggagaaggctgtgcaagctgctgctgatctgcttggagaactctttgtcttctcggttgcaggagctgccatcatctttgaggtgcaaagaagttcaagatcagaagcaagaaaagaagaattacgtagacaggagatacaggaaataaagactaagaatgaagaattggctagagaaattgaacttcttgcacaaaagcttgaagagctggaacaactttccaggggacgaggactacttggcactcttaacttcagacacactcgtgtctctgaagatagaaaatccaattgattgttgcaattgttaagcattgcacacagattttgattaacaagcaatacctcttggtgtggcaagaagcatgatattgacaatgtgcagatgggttactgtatattatatatggaggtacaatcagagctaaaaccaaattttaggtgtggtgaggggctttgaggattttttttttgagaggggctttgaggattaatcttgttcatacgaaataaaacaaaattgtacaacacatttatgaatgcgttctttttgaaaatttcctttccagggacaaattcagcctgctaactacagttttctagccttttggataatctacatttgtttcctcc

SEQ ID NO: 57678 - protein, 168 aa, Glycine max
  peptide (1)..(168): Ceres Seq. ID no. 13595783
MVVFPVVKLATLALRTACKPIANRLKKEAGYHPKFRNFIISIAQANHRLTTRVQRRIYGHATDVAIHPLNEEKAVQAAADLLGELFVFSVAGAAIIFEVQRSSRSEARKEELRRQEIQEIKTKNEELAREIELLAQKLEELEQLSRGRGLLGTLNFRHTRVSEDRKSN

SEQ ID NO: 57679 - DNA, 709 bp, Glycine max
  misc_feature (1)..(709): Ceres Seq. ID no. 15175098
aatcgaccttcaaggtattttcatcgattgcaaacaattagacagaaacttccaacctcgaacacttttttcaggcaaaccaacacacataaccgcacacaaacatcacatgtgtgtgggtggtcactgttgtttttcttgcttgtcttgttcctacacatgttttcttaatttttattttcttcattttatcttgatatgaaaattaaacataagccaacatattaattaagcatgtgcttgtccgtttcaggttaggaaggagaaattaggtgacagaattaccgcccttcatcaactcgtttccccattcggaaagactgacacggcttctgtcttattagaagctattggctatatcagattccttcagagtcaaattgaggcccttagcttaccatacttgggcagtggatcaggaaacatgaggcagcaacaatccgttcaaggagagaacaattgtatattccctgaagaccccggtcagttgctgaatgaaaactgtttgaagaggaaagcagctagtgagcaggattctcaagaagaacaaaagaaagacctgaggagtagagggttatgcttggttccagtgtcatgcacgctgcaagttggaagtgacaatggagctgactattgggctcctgcttttggtgggggatttcggtagattgcttaacttactattaataggttatcatatgcagcatac

SEQ ID NO: 57680 - protein, 80 aa, Glycine max
  peptide (1)..(80): Ceres Seq. ID no. 15175099
MRQQQSVQGENNCIFPEDPGQLLNENCLKRKAASEQDSQEEQKKDLRSRGLCLVPVSCTLQVGSDNGADYWAPAFGGGFR

SEQ ID NO: 57681 - protein, 66 aa, Glycine max
  peptide (1)..(66): Ceres Seq. ID no. 15175100
IDLQGIFIDCKQLDRNFQPRTLFSGKPTHITAHKHHMCVGGHCCFSCLSCSYTCFLNFYFLHFILI

SEQ ID NO: 57682 - protein, 56 aa, Glycine max
  peptide (1)..(56): Ceres Seq. ID no. 15175101
NRPSRYFHRLQTIRQKLPTSNTFFRQTNTHNRTQTSHVCGWSLLFFLLVLFLHMFS

SEQ ID NO: 57683 - DNA, 2220 bp, Glycine max
  misc_feature (1)..(2220): Ceres Seq. ID no. 14314411
cacttatcaagaaaccctaatacagatacagtttccctctctctttctcaagcaatccaaagtcacaacccacacacactgtacgggttgtgcagatcagagggtgttggtacactctatctatcttttttctcccataagcagaaacaccctctctaatgtttctctctttgtcccatacccatacctcattctgcaagcgtccccttaaataataaatacaccgcgtgtgtgtgtgtatgtgagagagagagagtaagaaataaagcaaatctctctgctgtttctcttacgtctttctattttgggctctcatggattcgggtaacagtgggagtatgcaatcttccagcaccgccggtgatgaagagtacgattcacgcgccgacccatctttgtcgtcatcaatctctgcgttctttaatagtaactcccatccttcagctccaccacaaccaacaacgttaacaaaccacgttggtcctcctttctctactcagcaccaccacgtgttcgaccctttatcatccaattacttggatccgacacaaagatcgccgcaatcaaaccaaatcctcaacctcgacatggtgcggtccaaggttgccgccagatccggacccgattttagctccttcataccttcatcttccccacacaacaacaacaaccaagcttttctgttaactcaattgggaggaggaggagttaacaacgttggtgcttttcccagtaccactctccctccagaaagtggaggaggcggattagtaatgaatgaacaagtaaacagtagcaacaccaacaaaaacatggttcgaaacccgaagaaaaggtcaagagcttctaggcgtgcacccaccactgttctcactacggacaccacgaatttccgagccatggttcaggaattcactggcatcccagcacctcctttcacttcctcctcctcgtctttcccaagaacaaggttagatctctttgccacctctaatgcttcttcttcatccattattagagaacaaacaccttcttatcttcttcgcccctttgcacacaaagtccaagctcaagtaccttcttcaatcccaccaccctcttcctttcaacccatgttgaacaactaccaccaccaccaccaccagcataacccaattctcagcttccaatccattctccaaccgcatcaactcattggttctaaaactcaacaacaaccctccttggaaataccgcctagtgctcttgggttggaggaattaggattgaaccatgctcatcatcaaaacatcaacatgcgttcgtcttcatcggatggaacattgtcaagggtcaacaacgacaataacaacatgcgtggtccttcggcagattgggcccaggcccaggcccaaagaattgataacaatgatggaggacttttggggtctcttactggtgccaccttaaactacagaagcaatattgtttcggatcagcgagtcaaggttactaataattcggattttcatggagaaaaaggaccggaatgtgttgtggctgtacgaagcgaaggtatggtcgaatcgtggattaattgttcttctgattgagagcagaaataagcaaccatcaaatgggaaaagaatatatgaacaaagaaaaaaagggagattcataaatatattttcctcacacggtttaaagcaactgatgatggtagtatactaattcatgagagacagaatcttggtaattggtatcctcagcttaaccatgaccgtcaaattaattaaacacctttttcttcttcttttatttggttctttgtgtccattagaattatgcgtaaataactagcagctaccttgtctttctctactcctttattttattttatttgttttcttctcaaaatctcaattgtggttttgatcgatattatatacagctatatacgaattagaatcctggagggttttcgtttcgacgtacgtttgtttcatcgtaatttgtgtctctatttggtaaactagagagctacatacatacaatggcagcatcatatgatcagtttgtggttcgtgtcactgtatatggattttggttttgactacttgtgtgaaattatggttcagagaatgtacaatgtgcacagcatagaatgaacaacacagacaaaactgtatgtatcctctcttttcctgttttgtcgcaccttctattctctgattttacctc

SEQ ID NO: 57684 - protein, 425 aa, Glycine max
  peptide (1)..(425): Ceres Seq. ID no. 14314412
MDSGNSGSMQSSSTAGDEEYDSRADPSLSSSISAFFNSNSHPSAPPQPTTLTNHVGPPFSTQHHHVFDPLSSNYLDPTQRSPQSNQILNLDMVRSKVAARSGPDFSSFIPSSSPHNNNNQAFLLTQLGGGGVNNVGAFPSTTLPPESGGGGLVMNEQVNSSNTNKNMVRNPKKRSRASRRAPTTVLTTDTTNFRAMVQEFTGIPAPPFTSSSSSFPRTRLDLFATSNASSSSIIREQTPSYLLRPFAHKVQAQVPSSIPPPSSFQPMLNNYHHHHHQHNPILSFQSILQPHQLIGSKTQQQPSLEIPPSALGLEELGLNHAHHQNINMRSSSSDGTLSRVNNDNNNMRGPSADWAQAQAQRIDNNDGGLLGSLTGATLNYRSNIVSDQRVKVTNNSDFHGEKGPECVVAVRSEGMVESWINCSSD

SEQ ID NO: 57685 - protein, 417 aa, Glycine max
  peptide (1)..(417): Ceres Seq. ID no. 14314413
MQSSSTAGDEEYDSRADPSLSSSISAFFNSNSHPSAPPQPTTLTNHVGPPFSTQHHHVFDPLSSNYLDPTQRSPQSNQILNLDMVRSKVAARSGPDFSSFIPSSSPHNNNNQAFLLTQLGGGGVNNVGAFPSTTLPPESGGGGLVMNEQVNSSNTNKNMVRNPKKRSRASRRAPTTVLTTDTTNFRAMVQEFTGIPAPPFTSSSSSFPRTRLDLFATSNASSSSIIREQTPSYLLRPFAHKVQAQVPSSIPPPSSFQPMLNNYHHHHHQHNPILSFQSILQPHQLIGSKTQQQPSLEIPPSALGLEELGLNHAHHQNINMRSSSSDGTLSRVNNDNNNMRGPSADWAQAQAQRIDNNDGGLLGSLTGATLNYRSNIVSDQRVKVTNNSDFHGEKGPECVVAVRSEGMVESWINCSSD

SEQ ID NO: 57686 - protein, 334 aa, Glycine max
  peptide (1)..(334): Ceres Seq. ID no. 14314414
MVRSKVAARSGPDFSSFIPSSSPHNNNNQAFLLTQLGGGGVNNVGAFPSTTLPPESGGGGLVMNEQVNSSNTNKNMVRNPKKRSRASRRAPTTVLTTDTTNFRAMVQEFTGIPAPPFTSSSSSFPRTRLDLFATSNASSSSIIREQTPSYLLRPFAHKVQAQVPSSIPPPSSFQPMLNNYHHHHHQHNPILSFQSILQPHQLIGSKTQQQPSLEIPPSALGLEELGLNHAHHQNINMRSSSSDGTLSRVNNDNNNMRGPSADWAQAQAQRIDNNDGGLLGSLTGATLNYRSNIVSDQRVKVTNNSDFHGEKGPECVVAVRSEGMVESWINCSSD

SEQ ID NO: 57687 - DNA, 1130 bp, Glycine max
  misc_feature (1)..(1130): Ceres Seq. ID no. 14305671
aaaaaagcctcctcctctttctcttgttcaaccttcccacaaacactgcatgcgtctttgaccacaactgcttcttcaatttccaatctttttggacaccctctattgctattcctcccttggtgttgtttgtgttaaagggtatctctctacttaatataaagttccattgtctcttgaggcaattttcaaccttagttgtgtgtttcggagagtttttttgtgttgttttgttgaggttgggtttgtgagtgagagaatggtgggtgctctatctgttgtgggttcatcagtgatggactctcacactggcccttgtttgtgtgttgatgctctcccaacaactagtgttaatctcaagagtggtggagatgttttgtgcaagaatttgatgggaaggaagcataatttggtgaagcatggtggtgggaccatgaagttgagcagttcatttgttgatcctggaagagagtggaggctctttgttaacaaaagttgcaagaggcagcgcaaggataggagagtgaccattgttaatgaacttggaggacaatatgaggacacttttgaagatgttaaagcgcaaatgctcaactatttcacatacaaggctgtgaggactgttcttcatcagttgtatgagatgaatccacctaaatacacgtggttctataattttgttgcttcaaacaaaccagcagatgggaaacgttttattcgatcacttgggaaggagcaacaagagcttgctgaaagagtgatggtaactcggcttcacctttatggaaaatgggtcaagaaatgtaatcatgctgagatatatcaagaaatctctgatgaaaacttggagttaatgagggaacggctcatggagacagtaatatggccctcagatgacacaaacacggaaaagattggctgataattcatctcaaatttttactttctgtcttcaacctcttcctagtctaggtatattttttgtttcaatatcaatctgttttgtttccaaaattgtcatttgtgtcattttcctttgataggattctcagttttacgttatgtaaattatgtatatatttgtaccttgttaaatacacaatccattatatatcgctagtttcagatgt

SEQ ID NO: 57688 - protein, 220 aa, Glycine max
  peptide (1)..(220): Ceres Seq. ID no. 14305672
MVGALSVVGSSVMDSHTGPCLCVDALPTTSVNLKSGGDVLCKNLMGRKHNLVKHGGGTMKLSSSFVDPGREWRLFVNKSCKRQRKDRRVTIVNELGGQYEDTFEDVKAQMLNYFTYKAVRTVLHQLYEMNPPKYTWFYNFVASNKPADGKRFIRSLGKEQQELAERVMVTRLHLYGKWVKKCNHAEIYQEISDENLELMRERLMETVIWPSDDTNTEKIG

SEQ ID NO: 57689 - protein, 208 aa, Glycine max
  peptide (1)..(208): Ceres Seq. ID no. 14305673
MDSHTGPCLCVDALPTTSVNLKSGGDVLCKNLMGRKHNLVKHGGGTMKLSSSFVDPGREWRLFVNKSCKRQRKDRRVTIVNELGGQYEDTFEDVKAQMLNYFTYKAVRTVLHQLYEMNPPKYTWFYNFVASNKPADGKRFIRSLGKEQQELAERVMVTRLHLYGKWVKKCNHAEIYQEISDENLELMRERLMETVIWPSDDTNTEKIG

SEQ ID NO: 57690 - protein, 176 aa, Glycine max
  peptide (1)..(176): Ceres Seq. ID no. 14305674
MGRKHNLVKHGGGTMKLSSSFVDPGREWRLFVNKSCKRQRKDRRVTIVNELGGQYEDTFEDVKAQMLNYFTYKAVRTVLHQLYEMNPPKYTWFYNFVASNKPADGKRFIRSLGKEQQELAERVMVTRLHLYGKWVKKCNHAEIYQEISDENLELMRERLMETVIWPSDDTNTEKIG

SEQ ID NO: 57691 - DNA, 1377 bp, Glycine max
  misc_feature (1)..(1377): Ceres Seq. ID no. 14314400
aggaatgtgtcactactgaactgtgcaatatgagtgcttgcaaaaccctttcatgtttctccctctcttcttcctcttccttcttcaaacccacccttctccaccctcgccaacgtctaaccctaactcggagatgttccacgtcagccctactcgaagaaccggaaccccaatctccgagcgttcagcacctcctcacgagtcccgacggcgtctccacgctgatgaagatggaccgcaagcctcttctccctcacgagccgcacgttcgctggttcccttacctcgacgcctaccgctgccgaaacggctgcgttttgagcagcgccgaggtcgtccaggccctcgcgccctgcatctccgacgaccggaggcagaggttcgggagcgtggttcggaaccggagctactcggtctgcctcgtcgtggaagggctctgcgacttcggcaacgtctccgccacgttccggtccgcggacgcgcttggcgtccagtccgtccacgtcgtgtcgtgtgacgccaacaaaaggtataaagataatcgccatgtgagcatgggtgcagagaaatggttggacattgaactgtgggactctacaaaggagtgctttaaaatgttgaaatcacgcggttatcgaattgcgacaactcatgtgggaatggatgcggtttctattcatgacttagattggtcctgcccaactgcaatcgtggttgggaatgaaaataggggtattagtgatgaggcattggagctgtcagatttgcattgcagtattcctatggcaggaatggtggactctttcaatgtttcagttgctgcgggaatcctcatgcaccactctgtttgtgatagaatatctcgtatgggccgtcatggtgatctaacagtggaagaatgccagattctacttgcagagttttctctgcgccatagcaagagttcgattagtattgttgaagattatgcaatgcgtaaagcagcgacattgacctaacagcaataacaggaagtcaaacttcttctgactgtgcttggctgcttgcctgtacttggcaaggagacaaaccagagactagattgtctctgattgattgaatgattcctacaaactagcattagcttatgcatgctgtgcaaggctcacagatgacaatggggaccttaccaacacccagcttcttggactatagaatatttccttaatgatgtgcttactagccccactttacttagcaatgggggaatgatgctgtcaaaagtgcaattgcaattttatttatgtggatttttcgggccttacagtatctaatggtttttatttggatgagaaaagaaaatagaaaagggaaattttttacctcctatttttaagc

SEQ ID NO: 57692 - protein, 331 aa, Glycine max
  peptide (1)..(331): Ceres Seq. ID no. 14314401
ECVTTELCNMSACKTLSCFSLSSSSSFFKPTLLHPRQRLTLTRRCSTSALLEEPEPQSPSVQHLLTSPDGVSTLMKMDRKPLLPHEPHVRWFPYLDAYRCRNGCVLSSAEVVQALAPCISDDRRQRFGSVVRNRSYSVCLVVEGLCDFGNVSATFRSADALGVQSVHVVSCDANKRYKDNRHVSMGAEKWLDIELWDSTKECFKMLKSRGYRIATTHVGMDAVSIHDLDWSCPTAIVVGNENRGISDEALELSDLHCSIPMAGMVDSFNVSVAAGILMHHSVCDRISRMGRHGDLTVEECQILLAEFSLRHSKSSISIVEDYAMRKAATLT

SEQ ID NO: 57693 - protein, 322 aa, Glycine max
  peptide (1)..(322): Ceres Seq. ID no. 14314402
MSACKTLSCFSLSSSSSFFKPTLLHPRQRLTLTRRCSTSALLEEPEPQSPSVQHLLTSPDGVSTLMKMDRKPLLPHEPHVRWFPYLDAYRCRNGCVLSSAEVVQALAPCISDDRRQRFGSVVRNRSYSVCLVVEGLCDFGNVSATFRSADALGVQSVHVVSCDANKRYKDNRHVSMGAEKWLDIELWDSTKECFKMLKSRGYRIATTHVGMDAVSIHDLDWSCPTAIVVGNENRGISDEALELSDLHCSIPMAGMVDSFNVSVAAGILMHHSVCDRISRMGRHGDLTVEECQILLAEFSLRHSKSSISIVEDYAMRKAATLT

SEQ ID NO: 57694 - protein, 257 aa, Glycine max
  peptide (1)..(257): Ceres Seq. ID no. 14314403
MKMDRKPLLPHEPHVRWFPYLDAYRCRNGCVLSSAEVVQALAPCISDDRRQRFGSVVRNRSYSVCLVVEGLCDFGNVSATFRSADALGVQSVHVVSCDANKRYKDNRHVSMGAEKWLDIELWDSTKECFKMLKSRGYRIATTHVGMDAVSIHDLDWSCPTAIVVGNENRGISDEALELSDLHCSIPMAGMVDSFNVSVAAGILMHHSVCDRISRMGRHGDLTVEECQILLAEFSLRHSKSSISIVEDYAMRKAATLT

SEQ ID NO: 57695 - DNA, 1092 bp, Glycine max
  misc_feature (1)..(1092): Ceres Seq. ID no. 13581686
attcttctgattttgtttaatcatgaacggtgctcccaagcacgaacgccgctgggcgtccgacaccgtgccggagatggcattcgtcagcgccgggacttcgccgggaactgagtacaactccgtcaccgacgagtacgttgaggtcactctcgatgttcacgacgatcacaccatcgttctccgcgacgttgagccggtgactgtcgttaacatcgacgacggcgtcgcaacaagtggaaacgaaactccgacgtcctccgcgtggtcgccgtcgatcaggaggagctctcctaaccggtggcggcagttctcgcaggagctgaaggccgaggcggttgcgaaggcgaggcagttttcgcaggagctcaaggcggagctgcggtggttctcgtggagccaaggcggatctgaaacggcgttggtggctcgagatctcaggaagcagcgcgctcagcttgaccgcaaccgctccggtacgaagaaagcgctccgtggactgaaatttattagcagtaaatccaatggcgctgacgcctggaacgaggtgcaaagcaatttctatagtcttgccaaggacggttatctttatcgcactgattttgcgcaatgcatagggatgaaggactctaaggagttcgctctggaactatttgacgcgctgagtcgtagacgtagactgaaggttgaaaagatcagcagagacgagcttaacgaattctggtcgcaaattaccgatcaaagctttgattcgcggcttcagatattctttgacatggtggacaagaatgaagatggtaggatcaccgaagaagaagtgaaagagatcattatgctaagcgcttcagcaaataaattatccagattgaaagagcaggccgaggaatacgcagctctgatcatggaagagttagaccctgaaagacttggctacatcgaggtgggagttctctacaaatgataacatatgaatttatcaagaatacatgcatatattttaattctctaacacatatgagtacgtcacaaaagaaaatctttgtaagtgatagacattaatgttaatccaatccatgattaatttggtttccg

SEQ ID NO: 57696 - protein, 312 aa, Glycine max
  peptide (1)..(312): Ceres Seq. ID no. 13581687
MNGAPKHERRWASDTVPEMAFVSAGTSPGTEYNSVTDEYVEVTLDVHDDHTIVLRDVEPVTVVNIDDGVATSGNETPTSSAWSPSIRRSSPNRWRQFSQELKAEAVAKARQFSQELKAELRWFSWSQGGSETALVARDLRKQRAQLDRNRSGTKKALRGLKFISSKSNGADAWNEVQSNFYSLAKDGYLYRTDFAQCIGMKDSKEFALELFDALSRRRRLKVEKISRDELNEFWSQITDQSFDSRLQIFFDMVDKNEDGRITEEEVKEIIMLSASANKLSRLKEQAEEYAALIMEELDPERLGYIEVGVLYK

SEQ ID NO: 57697 - protein, 294 aa, Glycine max
  peptide (1)..(294): Ceres Seq. ID no. 13581688
MAFVSAGTSPGTEYNSVTDEYVEVTLDVHDDHTIVLRDVEPVTVVNIDDGVATSGNETPTSSAWSPSIRRSSPNRWRQFSQELKAEAVAKARQFSQELKAELRWFSWSQGGSETALVARDLRKQRAQLDRNRSGTKKALRGLKFISSKSNGADAWNEVQSNFYSLAKDGYLYRTDFAQCIGMKDSKEFALELFDALSRRRRLKVEKISRDELNEFWSQITDQSFDSRLQIFFDMVDKNEDGRITEEEVKEIIMLSASANKLSRLKEQAEEYAALIMEELDPERLGYIEVGVLYK

SEQ ID NO: 57698 - DNA, 1628 bp, Glycine max
  misc_feature (1)..(1628): Ceres Seq. ID no. 14315196
tccattttgtttggaacactgcgtaaggctgcgccaccacctccgcctccgtcgtccacggccagttgcttgcgttcctttcactttttttataattggctaagaataataatggcgtaccggcgctgcctcttgataagagggagcctcgtggatcggaggtgccatctgtctttcagttatgttctccacagcaacgaggggaagcgcgaacgcaccaatgaaaaatcatcttcaggaggggttggtgattttactcaaacaaggtcctttggaagctctcttaatggacagatgcggttcttctcgccttcccgagatagatttctttctccatgcaccggatatggtttctgccaatatatgtcgacggtgaatcggggttcagataagattggcagtgatgtaatgactgatgtggctgatgtcctcgctgacacgaccatggattctgtagcttctcaggctcctgttgttaatgaggttgctattgctgctgctgattcttttttgcctgtacaggccttgcagtacgtgatagatgctgtgcatttctacactggcttaaattggtgggcagccatagttctaacaaccctgttgattcgaaccgctacagttccactcttaataaatcaacttaaggccacttctaaacttacgttaatgaggcctcacttagaagagataaagcaagaaatggagggactgactatggatcctgtagctgttgctaaaggtcagcagcagatgaagaagctatttaaggaatatggtgtgagtccttttacgccattgaaaggactctttattcaaggccctatttttgttagtttttttcttgcgataacaaatatggctgaaaaagtgccgtcattcaagcatggtggagcttcttggtttattgatctctcaactcctgatgccctgtacgtttttccagttttgacagcattgtcattcttaataacagtagagtgtaatatgcaagaagggatggaaggaaatcctgtggctggtaccatgaaaaatgtctctaggggtcttgctgttcttacagttcctttcaccatgggatttccaaaggcaatattctgttactgggttacatcaaatttgttttcacttgtgtatggacttgtgcttaaagttcctggcgtaaagaaaactttgggtattcctgaaatacctgttgctccacccaccacgaccagtgctactcaatctcccttttctatatttcctgctctaaaacaagctacatctgcaacaacaaatgggtcaagctcaataccagatgaagcttcaaaacattcaaataaaaagatatcttctgcttctgttattagtcaaaggcttagaagtttagagaaacaagtgaaaggaagaaagaagaacaagaagtgaggaaaatttacaataatcctaaattataacatctatacatggagcaattgtgctcagcattttgttatattttattatcctgggatgagggagaaattagttcgaactttgtatgtttagtctacactcgattcatcggtttctcaattcttgtgtaaaacttggtccctatcagaaagggcggcctcaataattttatataacttttcatccttcatttt

SEQ ID NO: 57699 - protein, 468 aa, Glycine max
  peptide (1)..(468): Ceres Seq. ID no. 14315197
SILFGTLRKAAPPPPPPSSTASCLRSFHFFYNWLRIIMAYRRCLLIRGSLVDRRCHLSFSYVLHSNEGKRERTNEKSSSGGVGDFTQTRSFGSSLNGQMRFFSPSRDRFLSPCTGYGFCQYMSTVNRGSDKIGSDVMTDVADVLADTTMDSVASQAPVVNEVAIAAADSFLPVQALQYVIDAVHFYTGLNWWAAIVLTTLLIRTATVPLLINQLKATSKLTLMRPHLEEIKQEMEGLTMDPVAVAKGQQQMKKLFKEYGVSPFTPLKGLFIQGPIFVSFFLAITNMAEKVPSFKHGGASWFIDLSTPDALYVFPVLTALSFLITVECNMQEGMEGNPVAGTMKNVSRGLAVLTVPFTMGFPKAIFCYWVTSNLFSLVYGLVLKVPGVKKTLGIPEIPVAPPTTTSATQSPFSIFPALKQATSATTNGSSSIPDEASKHSNKKISSASVISQRLRSLEKQVKGRKKNKK

SEQ ID NO: 57700 - protein, 431 aa, Glycine max
  peptide (1)..(431): Ceres Seq. ID no. 14315198
MAYRRCLLIRGSLVDRRCHLSFSYVLHSNEGKRERTNEKSSSGGVGDFTQTRSFGSSLNGQMRFFSPSRDRFLSPCTGYGFCQYMSTVNRGSDKIGSDVMTDVADVLADTTMDSVASQAPVVNEVAIAAADSFLPVQALQYVIDAVHFYTGLNWWAAIVLTTLLIRTATVPLLINQLKATSKLTLMRPHLEEIKQEMEGLTMDPVAVAKGQQQMKKLFKEYGVSPFTPLKGLFIQGPIFVSFFLAITNMAEKVPSFKHGGASWFIDLSTPDALYVFPVLTALSFLITVECNMQEGMEGNPVAGTMKNVSRGLAVLTVPFTMGFPKAIFCYWVTSNLFSLVYGLVLKVPGVKKTLGIPEIPVAPPTTTSATQSPFSIFPALKQATSATTNGSSSIPDEASKHSNKKISSASVISQRLRSLEKQVKGRKKNKK

SEQ ID NO: 57701 - protein, 370 aa, Glycine max
  peptide (1)..(370): Ceres Seq. ID no. 14315199
MRFFSPSRDRFLSPCTGYGFCQYMSTVNRGSDKIGSDVMTDVADVLADTTMDSVASQAPVVNEVAIAAADSFLPVQALQYVIDAVHFYTGLNWWAAIVLTTLLIRTATVPLLINQLKATSKLTLMRPHLEEIKQEMEGLTMDPVAVAKGQQQMKKLFKEYGVSPFTPLKGLFIQGPIFVSFFLAITNMAEKVPSFKHGGASWFIDLSTPDALYVFPVLTALSFLITVECNMQEGMEGNPVAGTMKNVSRGLAVLTVPFTMGFPKAIFCYWVTSNLFSLVYGLVLKVPGVKKTLGIPEIPVAPPTTTSATQSPFSIFPALKQATSATTNGSSSIPDEASKHSNKKISSASVISQRLRSLEKQVKGRKKNKK

SEQ ID NO: 57702 - DNA, 1129 bp, Glycine max
  misc_feature (1)..(1129): Ceres Seq. ID no. 14315189
atcaaatcctcaatacttgtttatcactatcacttccccttcctatctctgaagccattctcgttcattttgtttttttatcttctctttatctccctcaacaagattcctataaagttcgtagcggctttcacacaactttaagaaaatctcgtgaatccgtgatcgcaaacaaaacaatgtctcccccttctatgttaggcaaccgcaaagacggttctgaaatggactctttgaggggctaaaagcacatagaactgaagatgggcatgtacttttatttcgaccagatgagaatgctcaacgcatgaaacgaggtgcagatagattgtgtatgccatccccatctcctggccaatttgttaatgctgtaaagcagatagttattgccaacaaacgttgggtgcctccaccagggaaagggtcactatatattaggccattgctgataggaacaggagcattgttaggggtggcacctgcccctgagtatacatttcttatttattgttctccagttggcagctaccagaagggtgcactaaatttaaaggttgaggataaactatatagagcaatatctggctgtggtggaactggagggatcaaaagtgtcaccaattatgcccctgtttatactgcaatggctgatgcaaaggccaacggattctctgatgtgctgttcttagactcagcaactggaaaacatatagaggaggcctcagcatgcaatgtatttgttttgaaggacaatgctatctccactcctgcaatagatggaaccatcctacctggtatcacccgaaaatccatcattgacattgccattgatttgggttatcaggtcatggaacgttccgtatcagtggaggagatgctaggtgctgatgaaatgttctgcactggaactgcagttgttgtcaactctgttgcatctgtaacttataaggaaacaagggtggattacaaaacaggcccagcaacattgtcctcaaaactacggaaaacacttgttggaattcaaacagggtgtcttgaggacaaaaaatcatggacagtccgagtagattcaacaatatagcaccgtttccgtcacaaataaaaagagaaaaatattgcaccgtttgtc

SEQ ID NO: 57703 - protein, 257 aa, Glycine max
  peptide (1)..(257): Ceres Seq. ID no. 14315190
MKRGADRLCMPSPSPGQFVNAVKQIVIANKRWVPPPGKGSLYIRPLLIGTGALLGVAPAPEYTFLIYCSPVGSYQKGALNLKVEDKLYRAISGCGGTGGIKSVTNYAPVYTAMADAKANGFSDVLFLDSATGKHIEEASACNVFVLKDNAISTPAIDGTILPGITRKSIIDIAIDLGYQVMERSVSVEEMLGADEMFCTGTAVVVNSVASVTYKETRVDYKTGPATLSSKLRKTLVGIQTGCLEDKKSWTVRVDSTI

SEQ ID NO: 57704 - protein, 248 aa, Glycine max
  peptide (1)..(248): Ceres Seq. ID no. 14315191
MPSPSPGQFVNAVKQIVIANKRWVPPPGKGSLYIRPLLIGTGALLGVAPAPEYTFLIYCSPVGSYQKGALNLKVEDKLYRAISGCGGTGGIKSVTNYAPVYTAMADAKANGFSDVLFLDSATGKHIEEASACNVFVLKDNAISTPAIDGTILPGITRKSIIDIAIDLGYQVMERSVSVEEMLGADEMFCTGTAVVVNSVASVTYKETRVDYKTGPATLSSKLRKTLVGIQTGCLEDKKSWTVRVDSTI

SEQ ID NO: 57705 - protein, 145 aa, Glycine max
  peptide (1)..(145): Ceres Seq. ID no. 14315192
MADAKANGFSDVLFLDSATGKHIEEASACNVFVLKDNAISTPAIDGTILPGITRKSIIDIAIDLGYQVMERSVSVEEMLGADEMFCTGTAVVVNSVASVTYKETRVDYKTGPATLSSKLRKTLVGIQTGCLEDKKSWTVRVDSTI

SEQ ID NO: 57706 - DNA, 1294 bp, Glycine max
  misc_feature (1)..(1294): Ceres Seq. ID no. 13594308
attcaaccaaataaccactccccccttcgtagtagtgggtgcacccatccacgcaccacaaaattaataacccaaaaaatacaaaaacaactttgcaatttcgtaggagatgctcaggagcagcacgctaacacagagtgttacagtcacctgtgttcgtcacagtcacagacaatggttccaatcaattcccgtaaattatagattctttgacgctgctcggaactctctatcatcacccaactccgcgatcttcaaatggaaaagaaaggccaattataaccgtcatagttctggaatggggaccttcaccactcgcgcgttggcgcagccgcttcagaacgccgacgaactcatcgactccgtcgagacatttatcttcgattgtgacggagttatatggaaaggtgataaattaatagacggagtgcctgaaacgcttgacatgcttcggtcaaagggcaaaagattagtttttgtcaccaataactcaacaaagtctaggaagcaatatggaaagaagtttgaaacacttggcctgaatgtcagcgaggaggagattttcgcatcattctttgcagctgctgcatatctgaagtccattgatttcccaaaagataaaaaggtttatgtcatcggagaagatggcatcttgaaggagcttgagcttgctggataccagtaccttggtgggccggaagatggtgggaaaaaaatagaactgaagccaggatttttgatggagcatgatgaagatgttggagcagttgttgttgggtttgatcgctacttcaactactataaaatccagtatgggacactctgtatacgtgaaaaccctggatgtcttttcattgctacaaaccgagatgctgttactcatctcacagatgctcaagaatgggcaggtgggggctcaatggttggcgctctcagtggatctactcaacgtgagccattagttgttggaaaaccctcaacgtttatgatggattacttggcaaacaaatttggcatttcgaagtcacagatatgtatggttggggacagattagacactgatatcttgtttggacaaaatggtggttgcaaaactcttcttgtgctctcaggggtcaccacactggccatgcttcagagccctaacaactccatacagccagacttttataccaataaaatttcagattttctttccctgaaagctgcagctgtatgactataatatttatacattatccccacacgatggtgggaaaagccatgtatttaagaagtaagttgaattttatcc

SEQ ID NO: 57707 - protein, 369 aa, Glycine max
  peptide (1)..(369): Ceres Seq. ID no. 13594309
MLRSSTLTQSVTVTCVRHSHRQWFQSIPVNYRFFDAARNSLSSPNSAIFKWKRKANYNRHSSGMGTFTTRALAQPLQNADELIDSVETFIFDCDGVIWKGDKLIDGVPETLDMLRSKGKRLVFVTNNSTKSRKQYGKKFETLGLNVSEEEIFASFFAAAAYLKSIDFPKDKKVYVIGEDGILKELELAGYQYLGGPEDGGKKIELKPGFLMEHDEDVGAVVVGFDRYFNYYKIQYGTLCIRENPGCLFIATNRDAVTHLTDAQEWAGGGSMVGALSGSTQREPLVVGKPSTFMMDYLANKFGISKSQICMVGDRLDTDILFGQNGGCKTLLVLSGVTTLAMLQSPNNSIQPDFYTNKISDFLSLKAAAV

SEQ ID NO: 57708 - protein, 306 aa, Glycine max
  peptide (1)..(306): Ceres Seq. ID no. 13594310
MGTFTTRALAQPLQNADELIDSVETFIFDCDGVIWKGDKLIDGVPETLDMLRSKGKRLVFVTNNSTKSRKQYGKKFETLGLNVSEEEIFASFFAAAAYLKSIDFPKDKKVYVIGEDGILKELELAGYQYLGGPEDGGKKIELKPGFLMEHDEDVGAVVVGFDRYFNYYKIQYGTLCIRENPGCLFIATNRDAVTHLTDAQEWAGGGSMVGALSGSTQREPLVVGKPSTFMMDYLANKFGISKSQICMVGDRLDTDILFGQNGGCKTLLVLSGVTTLAMLQSPNNSIQPDFYTNKISDFLSLKAAAV

SEQ ID NO: 57709 - protein, 257 aa, Glycine max
  peptide (1)..(257): Ceres Seq. ID no. 13594311
MLRSKGKRLVFVTNNSTKSRKQYGKKFETLGLNVSEEEIFASFFAAAAYLKSIDFPKDKKVYVIGEDGILKELELAGYQYLGGPEDGGKKIELKPGFLMEHDEDVGAVVVGFDRYFNYYKIQYGTLCIRENPGCLFIATNRDAVTHLTDAQEWAGGGSMVGALSGSTQREPLVVGKPSTFMMDYLANKFGISKSQICMVGDRLDTDILFGQNGGCKTLLVLSGVTTLAMLQSPNNSIQPDFYTNKISDFLSLKAAAV

SEQ ID NO: 57710 - DNA, 1120 bp, Glycine max
  misc_feature (1)..(1120): Ceres Seq. ID no. 14305353
aaaaaaaaaaatatatgctctcaataaacacacacgcaccggcagcacccgccgccggtggaacccattaacaaacaccacaagaaacttatcattcccttgttcttctccttcctcctcatcttctcttacccattttccatctaataaaaattcgaatacccaattggaaaaagcaatcaactttgcaaacactcggtggaaaaaacgcattccacctccaatcttcattcgcattgagctctgtttcttttccacatgaaacggcgatgaagtagctgtcgtttttcgattcagaacgccgccgcagaatgctgtgcaggaagagctccaaaaacgacgtcggctcgggatcggtgccggtgcacctcaacgtctacgatttgacacccatcaacggttacgcttattggttcggcctcggagtgtatcattccggcgtgcaagttcacggcgttgagttcgcgttcggggctcacgagtactcgttgacggggatattcgaaggagaaccgaagaggtgcgaaggtttcgcgttcaggaaaacgattctgatcggaaaaaccgatatgagacccggtgaggttaaggcggtgatggaagaacttgctgctaagtacagaggtaatgcttacaatctcatcacaaagaattgcaaccatttctgtaacgatgcttgtcttagactcaccggaaatcctattccaagttgggtcaatcgtcttgctcgaattggatttatgtgcaattgtgttcttccggtgacattgaactcaacaaaagttaggcatcacaagatggaagaaaagcaatgtgaaggagagaaacaagcattagcgactaaggcaaagaaacttagtgcttcaaattcatcatcatcttcccctgagggactgcgcaggggaaggagtagaaaccgacgtgcccttcctccatcttcacctttgattattggatcttcttcatcttgatgcccaaactcttaatttttatttatttttttatctttaatatggccaattacagaagttgctctaaggaagaaaggcaacagattggattttcaatttaaaattgttttttttcattcttttcatccaatgaccatataaagttatgg

SEQ ID NO: 57711 - protein, 219 aa, Glycine max
  peptide (1)..(219): Ceres Seq. ID no. 14305354
MLCRKSSKNDVGSGSVPVHLNVYDLTPINGYAYWFGLGVYHSGVQVHGVEFAFGAHEYSLTGIFEGEPKRCEGFAFRKTILIGKTDMRPGEVKAVMEELAAKYRGNAYNLITKNCNHFCNDACLRLTGNPIPSWVNRLARIGFMCNCVLPVTLNSTKVRHHKMEEKQCEGEKQALATKAKKLSASNSSSSSPEGLRRGRSRNRRALPPSSPLIIGSSSS

SEQ ID NO: 57712 - protein, 133 aa, Glycine max
  peptide (1)..(133): Ceres Seq. ID no. 14305355
MRPGEVKAVMEELAAKYRGNAYNLITKNCNHFCNDACLRLTGNPIPSWVNRLARIGFMCNCVLPVTLNSTKVRHHKMEEKQCEGEKQALATKAKKLSASNSSSSSPEGLRRGRSRNRRALPPSSPLIIGSSSS

SEQ ID NO: 57713 - protein, 124 aa, Glycine max
  peptide (1)..(124): Ceres Seq. ID no. 14305356
MEELAAKYRGNAYNLITKNCNHFCNDACLRLTGNPIPSWVNRLARIGFMCNCVLPVTLNSTKVRHHKMEEKQCEGEKQALATKAKKLSASNSSSSSPEGLRRGRSRNRRALPPSSPLIIGSSSS

SEQ ID NO: 57714 - DNA, 1406 bp, Glycine max
  misc_feature (1)..(1406): Ceres Seq. ID no. 14315889
ctctctctcaattgcattcccccttcccatttctgagaaggtgggagagaaaccccagagaaattcaatccacccctttctctgggtctgatcccatatctctctccagatttgctcgcccttttacttcaatttctcaaaaccggcacgcattcttttgtcttctaatttctggtggctgaatatcaaaaaccctagagagcactgttttggggctacgtttctgtttcggacggagaacgagaaaaggcgagggttttgcgcccgacccatttcgactggaaggccctagattcaaagggatcgtttgatttcattggataatcccccgacacgaaagggggtagttgcggagaaaccccctctgaaaactggaagccctaattgagagattcaaatcgttcttctaaatcgatggattcagcgttttcgcccttgagtttggttattttcggtatttcaattagcttttacgcatttattgtccaatcgcagacgcaaaatgggaacaatggcgctgaattagcaccaccggcgtattgggtgtcaagtccaccgctgcctccgcctcctccgccacctcctccgccgttgtcactgtctcctccgccgccaccctcaaaatctatgacactcagtttcgttcccccgccgggagcgccgccgccctatcctaacaatatgcccaacgtgagaagacctcctcaccgccgccgccgccaccgcagaccgcctccgccgccgccaccaccaccaccgcacaagatgaatgccggtaaaaaggttggacttttgtttgtgggcattgcggcaatcatgcaagttggcgtggttgggttcttggtaatcaagagaagacaacttttgaagagcgatgacagatacgagagttgttcttgaacgagattttccacggttttcttatcaaattctttttttattttaatttaatgggttgaaattctttgctgaacgaggtttggttcgaggaaggggaatattggttggattttgcagaatctggtgggaggaacatgaaaaaggcaagcatggaaagacatggagaatttgaggaatcattggaacatgaattgtgcaattgatgccatcatttcggcccctttggcgttactgtgtatattggtactgctagttcacgtttccttcacgtttcaagttgtgttgcccctttttcccttagttccattacattggctggcttataatggaaaagaaaaagtagccctcatgtacctttttatttattatttttttttttaatttgatttttctctaacatgttccgtgtacaatgatgttaggaatccttaaaggattaacaatgacacaatcttatattctttggcttttcacctcgaattgatgatgtcaggttcaatgttctc

SEQ ID NO: 57715 - protein, 161 aa, Glycine max
  peptide (1)..(161): Ceres Seq. ID no. 14315890
MDSAFSPLSLVIFGISISFYAFIVQSQTQNGNNGAELAPPAYWVSSPPLPPPPPPPPPPLSLSPPPPPSKSMTLSFVPPPGAPPPYPNNMPNVRRPPHRRRRHRRPPPPPPPPPPHKMNAGKKVGLLFVGIAAIMQVGVVGFLVIKRRQLLKSDDRYESCS

SEQ ID NO: 57716 - protein, 90 aa, Glycine max
  peptide (1)..(90): Ceres Seq. ID no. 14315891
MTLSFVPPPGAPPPYPNNMPNVRRPPHRRRRHRRPPPPPPPPPPHKMNAGKKVGLLFVGIAAIMQVGVVGFLVIKRRQLLKSDDRYESCS

SEQ ID NO: 57717 - DNA, 1145 bp, Glycine max
  misc_feature (1)..(1145): Ceres Seq. ID no. 14314390
agtggagtggaagtagtagcaagtacgtcgtatatgtggttgatcttttgctggttgtttgttttgttccttccaattgtcagatctgaatcaccggactcactcttcacactcactcacactgaatggcttctgaaggcgaccatcaccaccaccaccaccaccatcaagatcacgatcatcatcatcatgatcatgatcaccatcatcatcacgatggagagggagagaccaactcatgggtaggtaaggatgggaaggtgtaccatagccacgatggtctggcgccgcattctcacgaacccatttactcccccggctacttcaccagaagagctccaccgcttctcaacagaaacttcaacgaaagagccttcaccgtcggaatcggtggacccgtcggtactggcaaaacagctctcatgttggccctttgtgaactcttgcgcgaaaactacagtctcgcagctgtgacaaatgatatattcactaaagaggatggtgagttcttggtgaagcacaaagcacttcctgaggaaaggatacgcgctgtagaaactgggggttgcccacatgctgctattcgggaggacatcagtattaatcttggaccgctggaggagctttctaacctcttcaaagcagatatacttctttgtgaatctgggggagataacctggctgccaatttcagcagggaattggctgactatattatttacataatagacgtgtctggcggtgataaaattcctcggaaaggtggtcctggaatcacgcaagctgatctccttgtgataaacaagactgaccttgctcctgcaattggggctgatttggcagtcatgcagcgggatgctctgcggatgagagatggagggccatttgtctttgcacaggtgaagcataagattggagtagaagaaattgggaatcttgtcttgcaggcatgggaagcagccacagggaataagcgtcattaacatttctttgaaaaacggtttcctttgtgttgtatattttcttagcatgtttagtaataactccagaaacatgatgttcacgacgtggattcgagttcttatgttgtgtctgttcctgcatgttacagtatcaagttcataaacatgttactacttggacat

SEQ ID NO: 57718 - protein, 285 aa, Glycine max
  peptide (1)..(285): Ceres Seq. ID no. 14314391
MASEGDHHHHHHHHQDHDHHHHDHDHHHHHDGEGETNSWVGKDGKVYHSHDGLAPHSHEPIYSPGYFTRRAPPLLNRNFNERAFTVGIGGPVGTGKTALMLALCELLRENYSLAAVTNDIFTKEDGEFLVKHKALPEERIRAVETGGCPHAAIREDISINLGPLEELSNLFKADILLCESGGDNLAANFSRELADYIIYIIDVSGGDKIPRKGGPGITQADLLVINKTDLAPAIGADLAVMQRDALRMRDGGPFVFAQVKHKIGVEEIGNLVLQAWEAATGNKRH

SEQ ID NO: 57719 - protein, 186 aa, Glycine max
  peptide (1)..(186): Ceres Seq. ID no. 14314392
MLALCELLRENYSLAAVTNDIFTKEDGEFLVKHKALPEERIRAVETGGCPHAAIREDISINLGPLEELSNLFKADILLCESGGDNLAANFSRELADYIIYIIDVSGGDKIPRKGGPGITQADLLVINKTDLAPAIGADLAVMQRDALRMRDGGPFVFAQVKHKIGVEEIGNLVLQAWEAATGNKRH

SEQ ID NO: 57720 - DNA, 1749 bp, Glycine max
  misc_feature (1)..(1749): Ceres Seq. ID no. 14315985
actctggagaatttatgaaccggagtttgtatttttctctgttaattctataatttttttctcaaaattttgtgttaatttcgaagctttctgtgttctctgcaatggtgcagatttgagctcacagcactgcgattttctcggtggccaagctcaaactgctccaatttcatttctgggtttcatcttttcaccattttagacaaaaaaaattgtgtttttaaagtttcctgtaagattataaattttttctgcacccaaatctgtttcctcttaaataaagttagtatttaccccctttaaaaaaattcaatttttttgtgatttttttgggtgattgggtgtggaagagcccgaatcttcaatggatagggtttaagtgaagttttgaggttttggggtatcttagttttttttctttgatttgcataaaaatggagggaagagagaattttggtgttgtggtgggtgatgaggccccagagagcttccatgtggctcctagaattgagaacaacttggacttttcaagggccaccgtgccggcgccggcgccggccacggaggggaagaagaagagagggaggccgaggaagtatgggccggatgggaagccggcgttgggggcggtgacagcgctttcgccgatgccgatttcttcgtcgattccgttgaccggcgagttctctgcttggaagagtggtagagggaggcctgttgaatctatcaagaagtcatcgtttaagtttgaggttgaaagccctggaccagttgagggaatagcatactcagttggtgccaatttcacaccacatgtgctcacagtaaatgctggcgaggatgtcactatgaaaattatgaccttctctcaacaaggatcacgtgctatatgcattctctcagcaactgggacaatttcaaatgttactcttcgtcaaccgtcttcttgtgggggtactttaacgtatgagggactgtttgagattctttccttgtctggttcctttatgccaactgagaatggagttacaagaagtagatctggtgggatgagtgtctctttggctggtccagatggtcgagtaatggggggcggacttgctggtttgttggtagctgctggtccagtgcaggttgtggtggccagttttcttcctggtcaccagttggagcataaaaccaaaaagcaaagggtggagcatgtatcaactattagcccttcacctgttaatcttatcactagtgaggaaataaaagtaagttttggtggagtaaagcctattatgacccctgctgcttttcaagaagagaatattgcttcttttaacaatgttcaagactctaggaactcatctgctgatgacaaagatcctttgcctgaaaaggagtctaacctaagccaatcaaatgctgaggctgcatgctaaacatattccctgtgaattatttgatgttatgcagagtcaacctcatttaggctctcactcatgcttgactgacagctgacaattaacttacaaagacaactctgatggtcagatgagtgtcacacgatggttttgactcaacagttgcactctttggttggtactaggtgttagttggcaaatctgtttgttaggttttccacgtgtcatttctccagatgtatctgtagtattgtttactcattgttgtatcaattagatataggatatatgttgtgccattttctcccttatttatattctatatggatatgtatgttat

SEQ ID NO: 57721 - protein, 330 aa, Glycine max
  peptide (1)..(330): Ceres Seq. ID no. 14315986
MEGRENFGVVVGDEAPESFHVAPRIENNLDFSRATVPAPAPATEGKKKRGRPRKYGPDGKPALGAVTALSPMPISSSIPLTGEFSAWKSGRGRPVESIKKSSFKFEVESPGPVEGIAYSVGANFTPHVLTVNAGEDVTMKIMTFSQQGSRAICILSATGTISNVTLRQPSSCGGTLTYEGLFEILSLSGSFMPTENGVTRSRSGGMSVSLAGPDGRVMGGGLAGLLVAAGPVQVVVASFLPGHQLEHKTKKQRVEHVSTISPSPVNLITSEEIKVSFGGVKPIMTPAAFQEENIASFNNVQDSRNSSADDKDPLPEKESNLSQSNAEAAC

SEQ ID NO: 57722 - protein, 259 aa, Glycine max
  peptide (1)..(259): Ceres Seq. ID no. 14315987
MPISSSIPLTGEFSAWKSGRGRPVESIKKSSFKFEVESPGPVEGIAYSVGANFTPHVLTVNAGEDVTMKIMTFSQQGSRAICILSATGTISNVTLRQPSSCGGTLTYEGLFEILSLSGSFMPTENGVTRSRSGGMSVSLAGPDGRVMGGGLAGLLVAAGPVQVVVASFLPGHQLEHKTKKQRVEHVSTISPSPVNLITSEEIKVSFGGVKPIMTPAAFQEENIASFNNVQDSRNSSADDKDPLPEKESNLSQSNAEAAC

SEQ ID NO: 57723 - protein, 192 aa, Glycine max
  peptide (1)..(192): Ceres Seq. ID no. 14315988
MKIMTFSQQGSRAICILSATGTISNVTLRQPSSCGGTLTYEGLFEILSLSGSFMPTENGVTRSRSGGMSVSLAGPDGRVMGGGLAGLLVAAGPVQVVVASFLPGHQLEHKTKKQRVEHVSTISPSPVNLITSEEIKVSFGGVKPIMTPAAFQEENIASFNNVQDSRNSSADDKDPLPEKESNLSQSNAEAAC

SEQ ID NO: 57724 - DNA, 1202 bp, Glycine max
  misc_feature (1)..(1202): Ceres Seq. ID no. 13582538
taatcgaaaagtcgaggtctaaactctcaagcaaaatattattttcttgtaaaaaaacaagcatgtgaagaacaaaaaaacaaaaatctaaactagatcctcacatgtctgtttaatatggttgcaagggacagaatcacataggcaagctcgtgtaaccctctcattcctcttatcttgcttcattttcatgtggttaacatccttctcctgctaaaaacaacatatataggttgaaatgtacaccctgtcttatccacattccttggaaaatctcaagtaatgctaacgtggccttatccaaatatttttcaaaccatcttcaactcttcatacataaaatctatgctatgtctcatattagcattcaagaccaagaacacaaaaaccacttaattagtccttctcacatccaaaatcttgtgccagcaaatcaaacatggcatccatgactatgcttcagaccatgattcctaagaatgcaccgaacctccctcctcgtgttggtgcttcttccaacaacactactaagatctcatttggtggctcaggtagggtactgtggaccgggattcagaggaacaggaataataggtcttcttcgattgtagttgctgcagttggagatgtttcatctgatggcactgcgtaccttgttgctggtgccattgctgtggctctagttggaacggccttccccatcttcttctctcgcaaagacacatgccctgaatgtgatggagcagggtttgtgcggaaggctaatgtgacattgagagcaaatgcagcacgaaaggatcaaacccaaatcgtttgtgctcgctgcaatggtttgggcaaacttaaccaaattgacaaatagacaacattatgctccctacattgcccctttctttcttttcttattactatgtaattatttaaggataatatattattgatatcccctcctcgtgtttcttcgtcctatgagatgaacattataatatatcatgataggagagaaaagcacaaatttcacttgttcagaaacctaccattttgattttgcattgcgtatctgatttgtgtttttctctcccgtatcatgataccccgatgttcctaatctgttgtttaattgtgcatatgttgtatgtacttgaagtacacttgacaacaagaaagtccaataaatatgatatatgttcgtcctttcttcc

SEQ ID NO: 57725 - protein, 140 aa, Glycine max
  peptide (1)..(140): Ceres Seq. ID no. 13582539
MASMTMLQTMIPKNAPNLPPRVGASSNNTTKISFGGSGRVLWTGIQRNRNNRSSSIVVAAVGDVSSDGTAYLVAGAIAVALVGTAFPIFFSRKDTCPECDGAGFVRKANVTLRANAARKDQTQIVCARCNGLGKLNQIDK

SEQ ID NO: 57726 - protein, 137 aa, Glycine max
  peptide (1)..(137): Ceres Seq. ID no. 13582540
MTMLQTMIPKNAPNLPPRVGASSNNTTKISFGGSGRVLWTGIQRNRNNRSSSIVVAAVGDVSSDGTAYLVAGAIAVALVGTAFPIFFSRKDTCPECDGAGFVRKANVTLRANAARKDQTQIVCARCNGLGKLNQIDK

SEQ ID NO: 57727 - protein, 135 aa, Glycine max
  peptide (1)..(135): Ceres Seq. ID no. 13582541
MLQTMIPKNAPNLPPRVGASSNNTTKISFGGSGRVLWTGIQRNRNNRSSSIVVAAVGDVSSDGTAYLVAGAIAVALVGTAFPIFFSRKDTCPECDGAGFVRKANVTLRANAARKDQTQIVCARCNGLGKLNQIDK

SEQ ID NO: 57728 - DNA, 632 bp, Glycine max
  misc_feature (1)..(632): Ceres Seq. ID no. 13594276
gctctttgcagtacatgtttagttgtttgctgaagccaaaccaaataattcttcatttgatcactgtgtctttattttgattcaaaggctacaagacttcataactacctactaaatgcttatcttgttcctcatttcctggatcataacccaacctcttcattttgcctcatcaattcctcttcttagagatggcttgtgaaaccaagacatggttggttatggttcttcttttcttggctgctaactacttgcaagattgtgttcatggggtatcccaagttccttgccttttcatctttggggactctttatctgacagtggaaacaacaatgaacttccaacctctgcaaaatctaattacagaccatatgggatcgactttccattaggaccaacaggaagatttaccaatggcagaacagaaattgacataattactcaacttctgggatttgagaaattcatcccaccctttgcaaacactagtggttcagacatacttaaaggtgtgaactatgcatcaggtggagctggaatacgcgttgaaaccagctcgcatttgggtgctactatcagctttggattacagttagcaaatcacagagtcatagtttctcaaattgctagc

SEQ ID NO: 57729 - protein, 147 aa, Glycine max
  peptide (1)..(147): Ceres Seq. ID no. 13594277
MACETKTWLVMVLLFLAANYLQDCVHGVSQVPCLFIFGDSLSDSGNNNELPTSAKSNYRPYGIDFPLGPTGRFTNGRTEIDIITQLLGFEKFIPPFANTSGSDILKGVNYASGGAGIRVETSSHLGATISFGLQLANHRVIVSQIAS

SEQ ID NO: 57730 - protein, 137 aa, Glycine max
  peptide (1)..(137): Ceres Seq. ID no. 13594278
MVLLFLAANYLQDCVHGVSQVPCLFIFGDSLSDSGNNNELPTSAKSNYRPYGIDFPLGPTGRFTNGRTEIDIITQLLGFEKFIPPFANTSGSDILKGVNYASGGAGIRVETSSHLGATISFGLQLANHRVIVSQIAS

SEQ ID NO: 57731 - DNA, 1275 bp, Glycine max
  misc_feature (1)..(1275): Ceres Seq. ID no. 15177246
agtgaaggcagaagaagaagattcctggattgattgtgaagatggctgagtcggacaacgactcgggaggggcgcagaacgcgggaaacagtggaaacttgagcgagttgtcgcctcgggaacaggaccggtttctccccatagcgaacgtgagcaggatcatgaagaaggccttgccggcgaacgcgaagatctcgaaggacgcgaaggagacggtgcaggaatgcgtgtcggagttcatcagcttcataacgggtgaggcgtcggacaagtgccagagggagaagcgcaagaccatcaacggcgacgatcttctctgggccatgacaaccctgggattcgaagagtacgtggagcctctgaagatttacctccagcgcttccgcgagatggagggagagaagaccgtggccgcccgcgactcttctaaggactcggcctccgcctcctcctatcatcagggacacgtgtacggctcccctgcctaccatcatcaagtgcctgggcccacttatcctgcccctggtagacccagatgacgtgctcctctattcgccactccctagactttttatattatattatttaattaaactctcttctccactcaacctttgcaagatcactgggttggttagtcttgttacttgttactgtttctctctatcatacctatactcactcttcctcctcatctattatttacatccaatgcaaattctcaaatattcctttttcaaaaaaaaaaaaaaaaaaaaaaaaaaaaaaaaaaaatagatagctccttcaattagggtttttgtgatctgcaagctacgatgggtaagggaacggggagtttcggtaagagaaggaacaagacccacaccctctgtgtgaggtgtggccgccgcagtttccacctccagaagagtcgttgcgccgcgtgcgctttccccgctgcgcgcaccaggaaatataactggagcgtgaaggccattaggagaaagaccaccggaactggaaggatgaggtacttgcgtaacgtgccccgtagatttaagagtggcttcagagacggtaccgaagctgcacccaggaagagaggagctgctgcctctacctaagctttgaataatagcaatttttgctgggtcagtgaattatataggatttaatgtttctatgttgatgccgagctctttggaacacgtttctttctgtcgttttaatttcatttaatatgtagtggctttgtatttcgacgtgaggattgcaaggaatttttgttttttc

SEQ ID NO: 57732 - protein, 165 aa, Glycine max
  peptide (1)..(165): Ceres Seq. ID no. 15177247
MAESDNDSGGAQNAGNSGNLSELSPREQDRFLPIANVSRIMKKALPANAKISKDAKETVQECVSEFISFITGEASDKCQREKRKTINGDDLLWAMTTLGFEEYVEPLKIYLQRFREMEGEKTVAARDSSKDSASASSYHQGHVYGSPAYHHQVPGPTYPAPGRPR

SEQ ID NO: 57733 - protein, 125 aa, Glycine max
  peptide (1)..(125): Ceres Seq. ID no. 15177248
MKKALPANAKISKDAKETVQECVSEFISFITGEASDKCQREKRKTINGDDLLWAMTTLGFEEYVEPLKIYLQRFREMEGEKTVAARDSSKDSASASSYHQGHVYGSPAYHHQVPGPTYPAPGRPR

SEQ ID NO: 57734 - protein, 95 aa, Glycine max
  peptide (1)..(95): Ceres Seq. ID no. 15177249
MGKGTGSFGKRRNKTHTLCVRCGRRSFHLQKSRCAACAFPAARTRKYNWSVKAIRRKTTGTGRMRYLRNVPRRFKSGFRDGTEAAPRKRGAAAST

SEQ ID NO: 57735 - DNA, 884 bp, Glycine max
  misc_feature (1)..(884): Ceres Seq. ID no. 13595752
acctagaacatcctaatcgaaaaattatcattgccgttcattttccttcttatcactactcagacaataaacgcctcagtctctcatttcagggtgcaaaatcttccatgtataaatattactatgtgcttgcattaactgattgatttactccaaaatttaggttctaatgattataaaaggattgtttggaaggtacgaaagatggaaccctgttcatccaactcatggagccttttggggaatgggtgtgggcgttggttgtggtgtcggatggggtcctgggtttggccctgaagtgataggctatgttggagctggttgtggcattggattcaatgtaggcatcacttttgctggtgttggagttggcctacctgctaattttatctttgaaggtccatataatggggttagctggattggaaatttaccttgtatctctgacttgcaaagagaagccaatggaaaattgtttgaatttaggcaaaagcatttatcaataaagggaattaacttctttgacaagaagaacagcttgcctttgctcacttctgccagtaaaagtatacaagcattccgtaaccaaatattcagctctcataaagggaaagattgatgacttccaccactgtcagttttgtgcttacattttttgacacattttgtattttgttgggtcggaggcgaagctcttgttttcacagttaaccagataatctattattgttctgctctatctctccccacatggccacattcaaattcagttgtattttatagtcttgttacatgtgtttcttcagaaaatctcagccaaattttgtaaccaatatattaaaagcatatttatactagtaagaaataagatttcctactgtggg

SEQ ID NO: 57736 - protein, 149 aa, Glycine max
  peptide (1)..(149): Ceres Seq. ID no. 13595753
MIIKGLFGRYERWNPVHPTHGAFWGMGVGVGCGVGWGPGFGPEVIGYVGAGCGIGFNVGITFAGVGVGLPANFIFEGPYNGVSWIGNLPCISDLQREANGKLFEFRQKHLSIKGINFFDKKNSLPLLTSASKSIQAFRNQIFSSHKGKD

SEQ ID NO: 57737 - protein, 124 aa, Glycine max
  peptide (1)..(124): Ceres Seq. ID no. 13595754
MGVGVGCGVGWGPGFGPEVIGYVGAGCGIGFNVGITFAGVGVGLPANFIFEGPYNGVSWIGNLPCISDLQREANGKLFEFRQKHLSIKGINFFDKKNSLPLLTSASKSIQAFRNQIFSSHKGKD

SEQ ID NO: 57738 - DNA, 1401 bp, Glycine max
  misc_feature (1)..(1401): Ceres Seq. ID no. 13638292
atgaccattcaaagaaatgttatctttaccgaactgagctggaaaagactgaacaatattggaaaggctggtatgaaggcctctcagataaatttttgtcatgtcctgtgccaaaactgttgttattagccggaacagatagattggacaggtctctcacaattggtcaaatgcaagggaagtttcaaatggtagttgtaaggcatacagggcatgctattcaggaagatgtacctgatgaatttgcaactctgattgttaacttcatttctcgtaaccgaataggccctcatggaattgagatacctggccttcgcaagccagccttttccaaaccttgaatctggtattagataaaccaagaatgaccaccactgcaagatgaagatgatgaattttttttttttttttttcttaaaaaacttaaaatattattattccttgtttttttttttcctcctcctcctccctactactaccactctccaccaccaccatccccatcaccgccgtctccatattattacaaatcccctccacctccatctccatctccaccacctccttactactatcaaagtcctcctccaccatctcccacttctcatcctccctattactacaaatcccctccaccaccaacgtcatatcctccacctccttaccactacgtgagccctccaccaccttctccatctcctcccccaccataccattacacatcaccacctcctccttccccagctcctgctcccaagtacatttacaaatcacctccacctccggtttatatctatgcttccccacctccacctatctacaagtaagctcaaattgtgaaagcaccattcatgatgaatcatgttctagttttcatcgaggaataaaggcaagctctattttgagccaagtgaaacatctatcttcctgtctaagttctttgaataaaagtctgaatgtgtcatctctatgctacaatgtttatgattcagatcaggttgattctatttgtttgatggccatcttgcacgtcctgatcttattgtgttcaagtgacggacaaatccaaacaggaaagagagatttgaaatgtaaatgccaagtaaatgtgaaaagtacagtccatttttagtgatctctttaatttatttgttcatagattaatatggtcgtgtatgattgcttttctatttattgtggcatttttgtgttgtaccctgttgttgtgtttgcaataattattagtaataaagcagcaaatttcaatttgtgttcatgcatcnnnaaaaaaaaaaaaaaaaaaaaaaaaaaaaaaaaaaaaaaaaaaaaaaaaaaaaaaaaaaaaaaaaaaaaaaaaaaaaaaaagtttatcgatcccgccaacctcaaggggggccccgg

SEQ ID NO: 57739 - protein, 112 aa, Glycine max
  peptide (1)..(112): Ceres Seq. ID no. 15219405
DHSKKCYLYRTELEKTEQYWKGWYEGLSDKFLSCPVPKLLLLAGTDRLDRSLTIGQMQGKFQMVVVRHTGHAIQEDVPDEFATLIVNFISRNRIGPHGIEIPGLRKPAFSKP

SEQ ID NO: 57740 - protein, 97 aa, Glycine max
  peptide (1)..(97): Ceres Seq. ID no. 15219406
MKMMNFFFFFFLKNLKYYYSLFFFFLLLLPTTTTLHHHHPHHRRLHIITNPLHLHLHLHHLLTTIKVLLHHLPLLILPITTNPLHHQRHILHLLTTT

SEQ ID NO: 57741 - protein, 95 aa, Glycine max
  peptide (1)..(95): Ceres Seq. ID no. 15219407
MMNFFFFFFLKNLKYYYSLFFFFLLLLPTTTTLHHHHPHHRRLHIITNPLHLHLHLHHLLTTIKVLLHHLPLLILPITTNPLHHQRHILHLLTTT

SEQ ID NO: 57742 - protein, 56 aa, Glycine max
  peptide (1)..(56): Ceres Seq. ID no. 15219408
MQGKFQMVVVRHTGHAIQEDVPDEFATLIVNFISRNRIGPHGIEIPGLRKPAFSKP

SEQ ID NO: 57743 - DNA, 1290 bp, Glycine max
  misc_feature (1)..(1290): Ceres Seq. ID no. 14315193
attctattctctcgtgtctctctctctctctctgaaaccatgcctgtcacaaacacaacaacacctacagtggcagaacacatcaaatggagaaggcccagaaaccaattcaaccaccaccatcatcaccatcaccaccccatttcagaaacagatccaaaccctcaaatcccttccataatccaatccactaggtgcaagtccaccatttcctccctgctcctctccactttctccaacaacacctccaataatgccactgcccacagcaagaaaaaaagcaacttttctgcatcaaccttcagagggttgggctgcactgctggctcgtcgcagcaggtgtcggtgccggcggtgattcgctcctccgccgattggcaagggaagaaaacaagaaaaaagaagcacaagagaagcaacagaagcagcaagaacaagactttccatggtggggttctggaaggttccaatccagggtgtgtggattttcaagatgtttggtgtggccctggaattgggttctcaacagatgctgctgcctctgttgattgtgttgtggccaggaagaatgtctcttctgcaagagggaaaattgatgtggataagatcactcacagggagataatgatgcttcaagggagtctactaatgggtggacaactaaattcacatgatcatttcagagactggagactggatgttgataacatgtcctatgagcaattgctagagcttggtgagagaattggtcatgtgaacactggactcaaggaagatgagatgggacggaacataaggaagactaggattcaattttgggatgatacatcaaagcttcaagtagataaagagtgcagcatttgtcaggaggagtatgaagcgggtgatgagttggggaggctaaattgtgagcacagttatcactttcagtgtataaaacaatgggttgcacaaaaaaatttctgcccagtatgtaagcaacaagttgcggctcgacactgagtgactcaacccttctgtttttttggacagcttccattctcatccataaatttgtgtatagtttttcatatccaatacaagcaagagttttcattctttgctgtcaattatcatttcatctttcaaaattcctgcatcctctgcgaggaatcggcaattatatgttatcgagtaaaggtttatattcgggctgagacctttgcatattatacgcaagagttgccttgcttaagagcagttattattatttttttgttttgggtttttaatgaagttgtgtctgtgacc

SEQ ID NO: 57744 - protein, 333 aa, Glycine max
  peptide (1)..(333): Ceres Seq. ID no. 14315194
ILFSRVSLSLSETMPVTNTTTPTVAEHIKWRRPRNQFNHHHHHHHHPISETDPNPQIPSIIQSTRCKSTISSLLLSTFSNNTSNNATAHSKKKSNFSASTFRGLGCTAGSSQQVSVPAVIRSSADWQGKKTRKKKHKRSNRSSKNKTFHGGVLEGSNPGCVDFQDVWCGPGIGFSTDAAASVDCVVARKNVSSARGKIDVDKITHREIMMLQGSLLMGGQLNSHDHFRDWRLDVDNMSYEQLLELGERIGHVNTGLKEDEMGRNIRKTRIQFWDDTSKLQVDKECSICQEEYEAGDELGRLNCEHSYHFQCIKQWVAQKNFCPVCKQQVAARH

SEQ ID NO: 57745 - protein, 320 aa, Glycine max
  peptide (1)..(320): Ceres Seq. ID no. 14315195
MPVTNTTTPTVAEHIKWRRPRNQFNHHHHHHHHPISETDPNPQIPSIIQSTRCKSTISSLLLSTFSNNTSNNATAHSKKKSNFSASTFRGLGCTAGSSQQVSVPAVIRSSADWQGKKTRKKKHKRSNRSSKNKTFHGGVLEGSNPGCVDFQDVWCGPGIGFSTDAAASVDCVVARKNVSSARGKIDVDKITHREIMMLQGSLLMGGQLNSHDHFRDWRLDVDNMSYEQLLELGERIGHVNTGLKEDEMGRNIRKTRIQFWDDTSKLQVDKECSICQEEYEAGDELGRLNCEHSYHFQCIKQWVAQKNFCPVCKQQVAARH

SEQ ID NO: 57746 - DNA, 1227 bp, Glycine max
  misc_feature (1)..(1227): Ceres Seq. ID no. 14316378
gttctatttttccgctctgctgtacatggcgtcggctgcaggtgaggggaggagccgggtgctggtgataggcggcacgggctacatcggccgcttcatcgtcgccgccagcgcacgcgagggccaccccaccgccgtcctcgtccgcgacgccgcgcccgccgacccagccaaggccgccgtcctccagggattccgggatgccggcgtcaccatcgtcaagggtgatatgtatgatcatgagagcctggtgacagccattaaatcagcagatgttgtgatctcggccgtaggttatcaacagctaccggatcaaactctcattatctcggcaattaaggaagttgggcatgtaaagagattcttcccatcagagtatggtaatgatgtggatcgtaaccatgcagttgaacctgcaaagacagtattcggtgggaaagctcgtataaggcgtgccattgaggctgaggggattccctacacatatgtctcttccaacttctttgctggtcgtttcttgcgaagccttgcgcagattgggatcatggagcctccaactgagaaggttctcattatgggtgatggaaatgtaaaaggaatctttgcggcggaagaagacgtgggaacctacactattaaagctgtagatgatccaaggaccctgaacaaaattctgtatctgagaccacgaagcaacactttgtcccataacgagcttgtctcactctgggagaagaaacttggtaagacacttgagagggtgtacctcccagaggacgaactcctgaataagattcaagagtcgtcagcgccgctgaatgtagcactggcaatcagccactctgtctggttgaagggggaccacactaactttgagatcgacccatcatttggagttgaagcaactgagctttaccccgatgtgcattatattaccgtggatgaatacctaaataggttcctttaaactcctaaatcctatcgtccccaatattcatatactttgaataagtgttggaggttgtgtatttttattagaatggcacgtgaattacgtaatcagagtgtgagacctcaatcatgtgaggaatgcatcttgcattcccttgagcttagaatatataaactgaggttgtataaatttggaaattttagcttgatggaacatgataccgtatgtaacagcccgggggtttatgccaaattagaaattgtttgttatttaac

SEQ ID NO: 57747 - protein, 321 aa, Glycine max
  peptide (1)..(321): Ceres Seq. ID no. 14316379
FYFSALLYMASAAGEGRSRVLVIGGTGYIGRFIVAASAREGHPTAVLVRDAAPADPAKAAVLQGFRDAGVTIVKGDMYDHESLVTAIKSADVVISAVGYQQLPDQTLIISAIKEVGHVKRFFPSEYGNDVDRNHAVEPAKTVFGGKARIRRAIEAEGIPYTYVSSNFFAGRFLRSLAQIGIMEPPTEKVLIMGDGNVKGIFAAEEDVGTYTIKAVDDPRTLNKILYLRPRSNTLSHNELVSLWEKKLGKTLERVYLPEDELLNKIQESSAPLNVALAISHSVWLKGDHTNFEIDPSFGVEATELYPDVHYITVDEYLNRFL

SEQ ID NO: 57748 - protein, 313 aa, Glycine max
  peptide (1)..(313): Ceres Seq. ID no. 14316380
MASAAGEGRSRVLVIGGTGYIGRFIVAASAREGHPTAVLVRDAAPADPAKAAVLQGFRDAGVTIVKGDMYDHESLVTAIKSADVVISAVGYQQLPDQTLIISAIKEVGHVKRFFPSEYGNDVDRNHAVEPAKTVFGGKARIRRAIEAEGIPYTYVSSNFFAGRFLRSLAQIGIMEPPTEKVLIMGDGNVKGIFAAEEDVGTYTIKAVDDPRTLNKILYLRPRSNTLSHNELVSLWEKKLGKTLERVYLPEDELLNKIQESSAPLNVALAISHSVWLKGDHTNFEIDPSFGVEATELYPDVHYITVDEYLNRFL

SEQ ID NO: 57749 - protein, 245 aa, Glycine max
  peptide (1)..(245): Ceres Seq. ID no. 14316381
MYDHESLVTAIKSADVVISAVGYQQLPDQTLIISAIKEVGHVKRFFPSEYGNDVDRNHAVEPAKTVFGGKARIRRAIEAEGIPYTYVSSNFFAGRFLRSLAQIGIMEPPTEKVLIMGDGNVKGIFAAEEDVGTYTIKAVDDPRTLNKILYLRPRSNTLSHNELVSLWEKKLGKTLERVYLPEDELLNKIQESSAPLNVALAISHSVWLKGDHTNFEIDPSFGVEATELYPDVHYITVDEYLNRFL

SEQ ID NO: 57750 - DNA, 809 bp, Glycine max
  misc_feature (1)..(809): Ceres Seq. ID no. 15168553
atcctcatccaaattatcccatcatacctttactttaccccacccaaagcgaaaaaaaaaaggattcaaacatatttgccttatacaattcaaatggcacacacaaaagtggatatgggtttggttttggtggtaatggccatgctatgcgcaggagctgcagctcaatctcaatcgagttgcacaaatgtgttagtgagcctgtcaccgtgccttaactatatcacagggaattcttcaaccccatcttcaggatgctgctcacagcttgccagtgtggtgcgctcacaaccacaatgcctatgtcaggttcttagcggcggtggatcatcactggggatcaacattaaccaaactcaggctctggctttgcctgttgcttgcaaggtgcagaccccacccaccagtcaatgtaacaatgctgctgcttcaccaccaacaggaacagttgcggaatctccaaattcagctccatcaggaaccggaggatccaaaaacctacccacaactgataatggctcatccagcgggaattccatcaagttatcgattcctctgatacttattttggcagcaacatacgtgtcaactttcacaacatactgattctatattcggtcgattttccatttgctattttttgcttgtttgccaattgtccttgtttaatcatttgctattattgagcttccttagtctgaagggttcaatctattcattcgtgacccctactgggatacattgttttgtataatctgagacatgtgttctctcatttatcaataaaatgggttgtaacttggtttgct

SEQ ID NO: 57751 - protein, 201 aa, Glycine max
  peptide (1)..(201): Ceres Seq. ID no. 15168554
ILIQIIPSYLYFTPPKAKKKRIQTYLPYTIQMAHTKVDMGLVLVVMAMLCAGAAAQSQSSCTNVLVSLSPCLNYITGNSSTPSSGCCSQLASVVRSQPQCLCQVLSGGGSSLGININQTQALALPVACKVQTPPTSQCNNAAASPPTGTVAESPNSAPSGTGGSKNLPTTDNGSSSGNSIKLSIPLILILAATYVSTFTTY

SEQ ID NO: 57752 - protein, 170 aa, Glycine max
  peptide (1)..(170): Ceres Seq. ID no. 15168555
MAHTKVDMGLVLVVMAMLCAGAAAQSQSSCTNVLVSLSPCLNYITGNSSTPSSGCCSQLASVVRSQPQCLCQVLSGGGSSLGININQTQALALPVACKVQTPPTSQCNNAAASPPTGTVAESPNSAPSGTGGSKNLPTTDNGSSSGNSIKLSIPLILILAATYVSTFTTY

SEQ ID NO: 57753 - protein, 163 aa, Glycine max
  peptide (1)..(163): Ceres Seq. ID no. 15168556
MGLVLVVMAMLCAGAAAQSQSSCTNVLVSLSPCLNYITGNSSTPSSGCCSQLASVVRSQPQCLCQVLSGGGSSLGININQTQALALPVACKVQTPPTSQCNNAAASPPTGTVAESPNSAPSGTGGSKNLPTTDNGSSSGNSIKLSIPLILILAATYVSTFTTY

SEQ ID NO: 57754 - DNA, 1107 bp, Glycine max
  misc_feature (1)..(1107): Ceres Seq. ID no. 14316459
atctctcataattgaaactaagctacctaccattctttcccattcctgagtttccattgccgcgacatctgaattcctccttgtcactcataatcaccaaatagaagccataaacaaatgaatgccatagcagcagaacaagtgctggagccatggcacaagctagacgacaaagtcgttttggtgacgggtgcttcctcggggctcgggcgagatttctgcatcgacctcgccaaagctggctgctgtgtcgtcgcggcagctcgtcgcctcgatcgcctcacttccctctgccacgaaatcaaccaccgatggccctcgaacgtcggaatccaccgcgcggtggcggtggagcttgatgtcgccgccgatggccccgccatcgacagggctgtgcagaaggcctgggacgcctttggccgcgttgattccttgattaacaacgctggtgtcagaggaagtgttaaatcacccttgaaattgtctgaagaggaatgggatcatgtcttcaagactaacctaactggttgttggttggtgtcaaaatatgtatgcaaacgcatgtgtgatatccagcttaagggatcaattattaatatttcttcagtttctggtttaaatcgggggcaattgcctggagctgctgcatatgcatcttcgaaggcaggggtaaacatgctgactaaggtcatggctatggaattggggatgcacaaaattagagtaaattccatatcccctggaattttcaaatctgaaataactgaaaatttattacaaaaagattggctgaatgatgtggtcaggaaaataatgcctttgagaagattaggtacttcagatccagcattaacatctctagctcgttatcttattcatgattcttctgagtacgtcacgggcaacaattttattgtcgattatggaggcaccttaccaggtgtaccaatttattcttctctgtaaattttggtacattatgcactaacgaaaagtaatactatgaattattccattacatatcttcaaattagacaatatggagttctgaagtctatgtatatggagaattattgtgaagtggctaccaccttgatcttaccatgt

SEQ ID NO: 57755 - protein, 282 aa, Glycine max
  peptide (1)..(282): Ceres Seq. ID no. 14316460
MNAIAAEQVLEPWHKLDDKVVLVTGASSGLGRDFCIDLAKAGCCVVAAARRLDRLTSLCHEINHRWPSNVGIHRAVAVELDVAADGPAIDRAVQKAWDAFGRVDSLINNAGVRGSVKSPLKLSEEEWDHVFKTNLTGCWLVSKYVCKRMCDIQLKGSIINISSVSGLNRGQLPGAAAYASSKAGVNMLTKVMAMELGMHKIRVNSISPGIFKSEITENLLQKDWLNDVVRKIMPLRRLGTSDPALTSLARYLIHDSSEYVTGNNFIVDYGGTLPGVPIYSSL

SEQ ID NO: 57756 - DNA, 1361 bp, Glycine max
  misc_feature (1)..(1361): Ceres Seq. ID no. 14316382
agtttatcaagaactcttgttccaccaaccccaaaattgtgaacctttcaaagagacgaagccttcgaatctctctgaaacttttctcttctctttgattcttctctatcagttaaacattagaatgagccgttcacaggatccacacccttcccgatctttcttcccttttggaaatccttttcggatgatatcacctaaaggctctcgcatgtctccacaacttcttgcagtgttgcaagcttttgaggcaacattggcagagaggctgaaaaatcttatgcctaaaagcaaggatgaaatcctcaccttgtcttggatgactttagctatgaagtcactttgtgaaagtcacaatgacatacggacccttatgactgcccttgagcttcctgtgagtgattgggaggacaaatggattgatatgtacttggacataagttcaaagttgctagacatttgcaatgcattcagctctgagctttcacgtctgaaccagggaaaccttcctcttaagtgtgcactgcacaatttagactctgcctcttcaaagcagtatcttcgggcatgttccctacttgatgattggaggcagcatgttagttctaggaaccctagaattgagaaatgtagttctatgttagataatcttgtgggctcacttgatcttcctaaggttaaaaattctgccaaaggaaaggttttgatgcaagctatgtatggagttaaggtggagactgtatttatttgcagggtgtttactgcagcattctctggctcgtcaaagaagttatcagacttgaatgtggccgacatacattcatgggctccagattttagaaggttgcaggatcttgtaaatgaggaaattagagttagattttctggtggtaaatttactgtattgaatgagttggaagcggttgatgcctctgtgaagatattatatcctactatccaagctggtgtagataccgttgagacagaatggcttgtgaagactgttgaggaattacgtgcgggtgccgagaagctttcgcaaggaattgatcttcttgcaaagggagtagatgggtttttttcaagccgttatgactagtcgcgatactttgctcagctctgtgaggtttgataaaactgtaaatgatcgttccccaggccgtaacagagacatgcaggtagttcactaattatgcagtagcctaactctggtaggttttgggggggtgttcctttgtaggattagtagtattttcggtcttataggtgataatagtatttagccgaaatgtatatgagtggggatgttatgtgtaatgtcaaacaattacaaaatgcagatctttgttaaaaaaaaaaag

SEQ ID NO: 57757 - protein, 365 aa, Glycine max
  peptide (1)..(365): Ceres Seq. ID no. 14316383
VYQELLFHQPQNCEPFKETKPSNLSETFLFSLILLYQLNIRMSRSQDPHPSRSFFPFGNPFRMISPKGSRMSPQLLAVLQAFEATLAERLKNLMPKSKDEILTLSWMTLAMKSLCESHNDIRTLMTALELPVSDWEDKWIDMYLDISSKLLDICNAFSSELSRLNQGNLPLKCALHNLDSASSKQYLRACSLLDDWRQHVSSRNPRIEKCSSMLDNLVGSLDLPKVKNSAKGKVLMQAMYGVKVETVFICRVFTAAFSGSSKKLSDLNVADIHSWAPDFRRLQDLVNEEIRVRFSGGKFTVLNELEAVDASVKILYPTIQAGVDTVETEWLVKTVEELRAGAEKLSQGIDLLAKGVDGFFSSRYD

SEQ ID NO: 57758 - protein, 324 aa, Glycine max
  peptide (1)..(324): Ceres Seq. ID no. 14316384
MSRSQDPHPSRSFFPFGNPFRMISPKGSRMSPQLLAVLQAFEATLAERLKNLMPKSKDEILTLSWMTLAMKSLCESHNDIRTLMTALELPVSDWEDKWIDMYLDISSKLLDICNAFSSELSRLNQGNLPLKCALHNLDSASSKQYLRACSLLDDWRQHVSSRNPRIEKCSSMLDNLVGSLDLPKVKNSAKGKVLMQAMYGVKVETVFICRVFTAAFSGSSKKLSDLNVADIHSWAPDFRRLQDLVNEEIRVRFSGGKFTVLNELEAVDASVKILYPTIQAGVDTVETEWLVKTVEELRAGAEKLSQGIDLLAKGVDGFFSSRYD

SEQ ID NO: 57759 - protein, 303 aa, Glycine max
  peptide (1)..(303): Ceres Seq. ID no. 14316385
MISPKGSRMSPQLLAVLQAFEATLAERLKNLMPKSKDEILTLSWMTLAMKSLCESHNDIRTLMTALELPVSDWEDKWIDMYLDISSKLLDICNAFSSELSRLNQGNLPLKCALHNLDSASSKQYLRACSLLDDWRQHVSSRNPRIEKCSSMLDNLVGSLDLPKVKNSAKGKVLMQAMYGVKVETVFICRVFTAAFSGSSKKLSDLNVADIHSWAPDFRRLQDLVNEEIRVRFSGGKFTVLNELEAVDASVKILYPTIQAGVDTVETEWLVKTVEELRAGAEKLSQGIDLLAKGVDGFFSSRYD

SEQ ID NO: 57760 - DNA, 1297 bp, Glycine max
  misc_feature (1)..(1297): Ceres Seq. ID no. 14315013
gcacggtagtaggaaaaaatgacggaggtggttgcttcggatcccttatccaatcatggcgttgttgttaatcggagtgagcagaggatccgttgttcctcttcctcttctcccgttcgcctctctcctccaccatctcctcgagaaagttctccaagattgcggcaacgacatcgactccgctattagaagcttaaaccagttacgcttaggaggagcaccaccacctccttctcttgattctactctcatcgcatctgacactgctcctcctcaattccaaggtgaagcaaaatgtgatgcagaagttgcaggttctgatgatccagtagctggactaaattatcctacaaacggtgccgaatgggtagagctttttgttaattaaatgatgaatgcttcaagcatggatgatgccaaatctcgagcttcaagaatgctagaggcgttggagaagtccatttgcgcaagagcaagtgctgaaacagagcgaaacatccaccaggaaaataaggtgctgaaggaacaagtggaggcccttgttcaagaaaacgtgattctgaagtgcgctatctgtattcagcacgaacgccagaaagaatatgaagacagaaatcaagagttgaagcatttgaagcaattagtgtcgcagtaccaggaacaggtaagagctttagaggtaaacaattatgcattgacaatgcacctaaagcaggctgaactaggtaacatggctgtttctgtagtttaaataatcatgatcaaagaaaagaaacgaggtaatgaatttatactactccacattttttattaatggtggatagtgaagatttatactattttatgatgcgtggatgtggcaaaaaaatcggtcctacccatagattattagctcttttgatgtagatacccatgtgataaatattttggatgtgttagaaattttatttggcatgcctcatgtaagcccctggatgatctgggattttgtctaactgtctattactgttgttttctgctgccaccatcgtttttgacaagcttctagcaactcaaatgcgtaacgatcgatcatgtttgtgctgagacagaagagttgccacctgatgcgaagagtgaatctgtcatttttgcagccattccatgatgagttgcccttatgtaagatggtgggtttggactctaataaaaattgggtgcttagatagtctgtgagtatggattcttctgtagtaaaatcttgtagtattgtgtaaacttttttttttatatagaaaggtaagttatttattagctc

SEQ ID NO: 57761 - protein, 120 aa, Glycine max
  peptide (1)..(120): Ceres Seq. ID no. 14315014
MMNASSMDDAKSRASRMLEALEKSICARASAETERNIHQENKVLKEQVEALVQENVILKCAICIQHERQKEYEDRNQELKHLKQLVSQYQEQVRALEVNNYALTMHLKQAELGNMAVSVV

SEQ ID NO: 57762 - protein, 119 aa, Glycine max
  peptide (1)..(119): Ceres Seq. ID no. 14315015
MNASSMDDAKSRASRMLEALEKSICARASAETERNIHQENKVLKEQVEALVQENVILKCAICIQHERQKEYEDRNQELKHLKQLVSQYQEQVRALEVNNYALTMHLKQAELGNMAVSVV

SEQ ID NO: 57763 - protein, 114 aa, Glycine max
  peptide (1)..(114): Ceres Seq. ID no. 14315016
MDDAKSRASRMLEALEKSICARASAETERNIHQENKVLKEQVEALVQENVILKCAICIQHERQKEYEDRNQELKHLKQLVSQYQEQVRALEVNNYALTMHLKQAELGNMAVSVV

SEQ ID NO: 57764 - DNA, 1100 bp, Glycine max
  misc_feature (1)..(1100): Ceres Seq. ID no. 13594296
atttttttttttccaccaatccatgtgtccacacatgacatatcccacacaacttgttgtccctttaaggcttaagctccaccacgaaacaccaatcctcaacacacacaaaattctgttcagtttcacccactaaaccaccactactcctaagatctccttcaaaacacaaccaaaatcttaactttcttggaacctttttaattgtttcttctttaaaaatcaatttcctttaaggctttaactttaatattagagttctttctctttcattcatccttggtaatggcttgtgcattgcaagcaaccttagcagccaacacctatgccttttcttccaggagattctccttgaagcaccaaaagaacagtaagagaaggttttctttgttcactgttagagctgattctgatgactctgactgcaatgaggaagagtgtgccccggataaggaagtagggaaggtcagtgtggaatggttagctggggagaagacaaaagtagtgggcacattcccacctcgtcgtaagccgggttggactggctatgttgagaaggacactgctgggcagacaaacatatattcagttgagccagcagtttatgtggcagaaagtgctataagttcaggaactgctggctcttcttctgatggagctgagaacacagcagcaattgttgcaggccttgctctgatatcgattgcagcagcatcgtcgatactgctacaagttggtaagaatgctcctcctcagatccagacggctcaatactctggaccatcacttagttactacatcaacaaattcacgccgccggaaattactcaagtgtctgtgccaagtgaggctgaactatcctcatctgttcaacctgaaagcccacctccggaagtttcccaggttcaggttgaagctcaagcttctgagacctctagtgtgaacattgaatcgtaggtgtatcaagtggttaccacttttgctaccaaaacataccaaagaagtttattttgtgtatacacaactaaaggttaatggatgcaaatgttgaacatcattcttggtatgccactgctaccaactgaaagtgtgtttatctt

SEQ ID NO: 57765 - protein, 223 aa, Glycine max
  peptide (1)..(223): Ceres Seq. ID no. 13594297
MACALQATLAANTYAFSSRRFSLKHQKNSKRRFSLFTVRADSDDSDCNEEECAPDKEVGKVSVEWLAGEKTKVVGTFPPRRKPGWTGYVEKDTAGQTNIYSVEPAVYVAESAISSGTAGSSSDGAENTAAIVAGLALISIAAASSILLQVGKNAPPQIQTAQYSGPSLSYYINKFTPPEITQVSVPSEAELSSSVQPESPPPEVSQVQVEAQASETSSVNIES

SEQ ID NO: 57766 - DNA, 995 bp, Glycine max
  misc_feature (1)..(995): Ceres Seq. ID no. 13581670
acacaagtacacagcatagtcaagcttcgaattgttgaatgtggaaggaggagaaggagaaggagggtgttgcgccacgaacacatgaattagaaaagaagcagctgcagcaacttttcttgttcaatacccatcaaatgcaaatacaaagacactctcttttttaattactactgttttatgttcctttcttccttctgaatctgaccaaccagtaggactccttcaaagggattttgagtattgtttgaattgctggagacctgagagtgaaaactaactccacaatccatggataaagatgctagggtggaagagactgttgatttgcgaaccaatgtggagttggtgagatcagtctctgataagcatcatgatcttttaaggccatctgctcggaactattcaagaggacaatcaacagatacaactggccgtggaaagggaaagtatgccttaattagagacccagaggacttccaaatgggagtttatgataagccccttccatgttttggatgtggaatcggatggttctcatttctttttggatttctatgccctcctatgtggttctatgctacaattctctattttggaaatcactatcggaaggatcctagggagcgagcagggctgggagcctctgcaattgctgcattagtgtgttctgtaacgtcgctgataattggagtaattcttgtgttgcggtacctctatttctaattcacgtgcaaaggtgaaaattgagaagcaaaagcatttggaatcaattctggcgggatattagaaacaattggacatatgtatataagaacttcaaatagatgggaaaaggcttgcatatattgctggtgaagtaattcacagcatgaaatctgtcgtctataccataagttgagagaagataatgcgtcatatcccttatttgtttattttctgaactgatgtatactcaaaaagaaaccttttgatgagtgtttatgaatttcccg

SEQ ID NO: 57767 - protein, 144 aa, Glycine max
  peptide (1)..(144): Ceres Seq. ID no. 13581671
MDKDARVEETVDLRTNVELVRSVSDKHHDLLRPSARNYSRGQSTDTTGRGKGKYALIRDPEDFQMGVYDKPLPCFGCGIGWFSFLFGFLCPPMWFYATILYFGNHYRKDPRERAGLGASAIAALVCSVTSLIIGVILVLRYLYF

SEQ ID NO: 57768 - protein, 80 aa, Glycine max
  peptide (1)..(80): Ceres Seq. ID no. 13581672
MGVYDKPLPCFGCGIGWFSFLFGFLCPPMWFYATILYFGNHYRKDPRERAGLGASAIAALVCSVTSLIIGVILVLRYLYF

SEQ ID NO: 57769 - DNA, 1306 bp, Glycine max
  misc_feature (1)..(1306): Ceres Seq. ID no. 14315966
attcgaaaacaccaactacgactttgagtggtcaaaaacctctgcgcttctctctcaagtctcaaagacacgctccctgaaaaccctaacatctaccacttctctgagatctccgccgcaaccgccaatttctccgcgccacgcctttcctcttcctcctggcgctgcgtaattcgtcaccgcgaagtcgtcgtttcgcgccgcgacttccgccgtcaaattgatatcccggagctcagccgccgcctcgccctcatctgccggagtcaccacagcagcctcttgaaactcctcggcgcgtcggtctctggcgccgtcatcttcctcgtcaacgagttcgtccccggcgccagcctcgccgactgcctccgcaaccgccggaaccctagcttcaccgatctcaacacgtggatctctcggatgcagatcgcgtccgacgtggcgcacggtctcgattacatccacaatttctctggttccggttcggattccggttccggatcaggatccggattcgttcacaagcacatcaagagttcgagcattgttatcacggaggagaatctgcgcgcgagaatctgccacttcggcgtgtcgggtctctgcggcgaggccgtcgccggcgacggcgatccttctggcggccggactgtgaggatctaggggaggagaggctacatggcgccggagtttcagatcagcggcgtcgcgacgaagaagagcgacgtgtacgctttcggagtggtggttttggagctgctgagcggggaagaggcggtgaagttcgaattcaacgacgacggcggttatcgcaggattagcgtggtggagacggcaaagattgcggcggaggagaacggcggcgtgaggaagtgggtggatacgaggctgagggattcatttcccgtgaatgttgcggagagaatgattcgggtcggattggaatgtgtcggggatgacccgaatgagagacccgatatgggttgggtttctgatgaggtgtcgaagttgtatttggatctcgttggccccacggtgacttcttttggttgggtttgaggggttttcttttctttttatttgcattcgctatgaattttgattgtaaagaaagagaaaaaactgactgtgaaaagagattgatgtataattttatactttgtatagtacatgattgcggatatgaaggaaaaggtgaagtttgaagcactcaaatcagccaattgggcttgagtggaatggaaggattctgtcttgtgtagaatttggattttgaacaaaataaacatatttagttaagcaagcg

SEQ ID NO: 57770 - protein, 126 aa, Glycine max
  peptide (1)..(126): Ceres Seq. ID no. 14315967
MAPEFQISGVATKKSDVYAFGVVVLELLSGEEAVKFEFNDDGGYRRISVVETAKIAAEENGGVRKWVDTRLRDSFPVNVAERMIRVGLECVGDDPNERPDMGWVSDEVSKLYLDLVGPTVTSFGWV

SEQ ID NO: 57771 - protein, 80 aa, Glycine max
  peptide (1)..(80): Ceres Seq. ID no. 14315968
MQIASDVAHGLDYIHNFSGSGSDSGSGSGSGFVHKHIKSSSIVITEENLRARICHFGVSGLCGEAVAGDGDPSGGRTVRI

SEQ ID NO: 57772 - DNA, 1550 bp, Glycine max
  misc_feature (1)..(1550): Ceres Seq. ID no. 15177750
aaaccaaagtggttttgtcatttgttttgatgaatctttcggtggtctatctcaccttcttttctttctcactaatcactataaaaaaaaatctacactatctatccttccacaacacaacacaattcaataccatttaccaaactcactcatcaattctcatctttcttctcactaactattaattcatcatgtcgagcacagctggccaagtcatcaaatgcaaagctgcggtttcatgggaggcagggaagccacttgtgattgaagaagtagaggttgcgccaccacaagctggtgaagtgcgtttgaagatcctctacacctctctttgccacactgatgtttacttctgggaagctaagggccaaactccattgtttcctcgtatatttggtcatgaagctggagggattgtggagagcgtaggtgagggtgtgactcatctgaaaccaggggaccatgccctccctgtgtttaccggggagtgtggggactgccctcattgcaagtcagaggagagcaacatgtgtgatcttctcaggatcaacactgataggggtgtcatgatccatgatagccaaacaaggttttctataaagggacaacctatttaccattttgttggtacctctacattcagtgaatacactgttgttcatgctggatgtgttgccaaagtcaaccctgctgccccacttgacaaaatctgtgttctcagttgtggaatttgcacaggtcttggggccactatcaatgttgcaaaaccaaaacctggttcttctgttgccatttttggacttggagctgttggccttgccgctgctgaaggggcaaggatttctggtgcatcaagaatcattggggttgatttagtttctagcagatttgaagaagctaagaagtttggggtcaatgaatttgtgaacccaaaagatcatgacaaacctgtacaagaggtgattgctgcaatgacaaatgggggtgtggatcgtgctgttgaatgtactggcagcatccaagccatgatctcagcattcgaatgcgtccacgatggttggggtgttgctgtacttgttggagtgccaaacaaagatgatgcattcaaaactcatccagtgaatttcttgaatgagaggactctaaagggtaccttctatggaaactacaaaccccgcactgaccttccttctgttgtggagaagtacatgaatggggaattggaactggagaaattcatcactcacacagttccattctctgagattaacaaggcttttgattacatgctgaaaggggagtccatcagatgcatcattcgtatgggggagtaaatctatcaaaccaatgatgacatggtccctgtgagggactgagttctctttctagttgtgaaagtgaaaagaagaaaataaatttcatatatatgatatatccctttagaattattgaattagtgaaaacttgtgtaagtttgaatgttgagaatgataggacctttgctgctgttattgtctaatgcatgataaataaaatgtggtttttttgtc

SEQ ID NO: 57773 - protein, 380 aa, Glycine max
  peptide (1)..(380): Ceres Seq. ID no. 15177751
MSSTAGQVIKCKAAVSWEAGKPLVIEEVEVAPPQAGEVRLKILYTSLCHTDVYFWEAKGQTPLFPRIFGHEAGGIVESVGEGVTHLKPGDHALPVFTGECGDCPHCKSEESNMCDLLRINTDRGVMIHDSQTRFSIKGQPIYHFVGTSTFSEYTVVHAGCVAKVNPAAPLDKICVLSCGICTGLGATINVAKPKPGSSVAIFGLGAVGLAAAEGARISGASRIIGVDLVSSRFEEAKKFGVNEFVNPKDHDKPVQEVIAAMTNGGVDRAVECTGSIQAMISAFECVHDGWGVAVLVGVPNKDDAFKTHPVNFLNERTLKGTFYGNYKPRTDLPSVVEKYMNGELELEKFITHTVPFSEINKAFDYMLKGESIRCIIRMGE

SEQ ID NO: 57774 - protein, 268 aa, Glycine max
  peptide (1)..(268): Ceres Seq. ID no. 15177752
MCDLLRINTDRGVMIHDSQTRFSIKGQPIYHFVGTSTFSEYTVVHAGCVAKVNPAAPLDKICVLSCGICTGLGATINVAKPKPGSSVAIFGLGAVGLAAAEGARISGASRIIGVDLVSSRFEEAKKFGVNEFVNPKDHDKPVQEVIAAMTNGGVDRAVECTGSIQAMISAFECVHDGWGVAVLVGVPNKDDAFKTHPVNFLNERTLKGTFYGNYKPRTDLPSVVEKYMNGELELEKFITHTVPFSEINKAFDYMLKGESIRCIIRMGE

SEQ ID NO: 57775 - protein, 255 aa, Glycine max
  peptide (1)..(255): Ceres Seq. ID no. 15177753
MIHDSQTRFSIKGQPIYHFVGTSTFSEYTVVHAGCVAKVNPAAPLDKICVLSCGICTGLGATINVAKPKPGSSVAIFGLGAVGLAAAEGARISGASRIIGVDLVSSRFEEAKKFGVNEFVNPKDHDKPVQEVIAAMTNGGVDRAVECTGSIQAMISAFECVHDGWGVAVLVGVPNKDDAFKTHPVNFLNERTLKGTFYGNYKPRTDLPSVVEKYMNGELELEKFITHTVPFSEINKAFDYMLKGESIRCIIRMGE

SEQ ID NO: 57776 - DNA, 1393 bp, Glycine max
  misc_feature (1)..(1393): Ceres Seq. ID no. 14315892
ttttttcccttaacgcaaactgtcatcttgtcattcaccgagaaagtcgtactgattcctcttcatctttcgttaaagcgagtacttttcgttcttgatctgttggttacgatgtcgtattcaaggagatctaggtattctccttctccttctccttctccatacaagcgatacggtaggtctgtgtccaggtctctctcaatgtcaagatccagaagccgttcaaggagtttatcaagagatgcagaaaatccaggaaacaatttgtatgtgacaggattgtctcctaggattaccaagagagaactggagaaacattttgctgctgaaggaaaagtgatagatgtccatctggtagttgatccttggacaagggaatcccgtgggtttggctttgtgacaatggagactcttgaggaggctgaacgatgtgtaaagtatctgaatcactctgtacttgaagggcgtgtcatcacggtggagaaggctaaaagacgacgtggtcgaaccccaacgccagggaggtatctaggactgagaactattcgtgctcgacgtcgctctccaagttactctcctcgtcgctctcctagctattctcccttcagaagaagctacagtcgctctccctattcttcagaccgaagtaggagtcgttcttactctcctgactatcagaggaggtcttactctccatatcactccaggcggaggtcttactctccattctatagccggtacaggtcctattctcgatatgatcgacacaggtcatattctcgatctcgctctccgtatagcaggtcacctgtcagcatgcgtgacagatcatactctccatatgaaatacgatatgactcgccggatgcgcactcctacagaaggcaccgttaccgatctgtttcacaaagtgcctcgcctgatgatcgttattatggaaggcaccgttacaggtctgtttctcggagtgcctcacccaggccaaggagaaggtcaaggaggagctactcacggagtgccacacctgtttcaaagagaagcaactcacgaaatgtgtcccccaggtcaaggaggagccattcaagaagctctaagaggagtggcaaatgtgagaaacgctactcaagaagctcgagtgtgaatgcaagttcaagatcagtatcgaggtcaaatactccaaggtctacctctccttcaacttgaaatttgttggtcctatatggcttaacatcttaggcttatagtggataatatattagtgtggtatatgtatgcagttctagatggagttttcgtttggttccgttcaggacttgtctaaaaaccacctgatcttatttcatgtagtatgggattgaaattatgttactcagtatagattatctaatttcgt

SEQ ID NO: 57777 - protein, 400 aa, Glycine max
  peptide (1)..(400): Ceres Seq. ID no. 14315893
FFPLTQTVILSFTEKVVLIPLHLSLKRVLFVLDLLVTMSYSRRSRYSPSPSPSPYKRYGRSVSRSLSMSRSRSRSRSLSRDAENPGNNLYVTGLSPRITKRELEKHFAAEGKVIDVHLVVDPWTRESRGFGFVTMETLEEAERCVKYLNHSVLEGRVITVEKAKRRRGRTPTPGRYLGLRTIRARRRSPSYSPRRSPSYSPFRRSYSRSPYSSDRSRSRSYSPDYQRRSYSPYHSRRRSYSPFYSRYRSYSRYDRHRSYSRSRSPYSRSPVSMRDRSYSPYEIRYDSPDAHSYRRHRYRSVSQSASPDDRYYGRHRYRSVSRSASPRPRRRSRRSYSRSATPVSKRSNSRNVSPRSRRSHSRSSKRSGKCEKRYSRSSSVNASSRSVSRSNTPRSTSPST

SEQ ID NO: 57778 - protein, 363 aa, Glycine max
  peptide (1)..(363): Ceres Seq. ID no. 14315894
MSYSRRSRYSPSPSPSPYKRYGRSVSRSLSMSRSRSRSRSLSRDAENPGNNLYVTGLSPRITKRELEKHFAAEGKVIDVHLVVDPWTRESRGFGFVTMETLEEAERCVKYLNHSVLEGRVITVEKAKRRRGRTPTPGRYLGLRTIRARRRSPSYSPRRSPSYSPFRRSYSRSPYSSDRSRSRSYSPDYQRRSYSPYHSRRRSYSPFYSRYRSYSRYDRHRSYSRSRSPYSRSPVSMRDRSYSPYEIRYDSPDAHSYRRHRYRSVSQSASPDDRYYGRHRYRSVSRSASPRPRRRSRRSYSRSATPVSKRSNSRNVSPRSRRSHSRSSKRSGKCEKRYSRSSSVNASSRSVSRSNTPRSTSPST

SEQ ID NO: 57779 - protein, 333 aa, Glycine max
  peptide (1)..(333): Ceres Seq. ID no. 14315895
MSRSRSRSRSLSRDAENPGNNLYVTGLSPRITKRELEKHFAAEGKVIDVHLVVDPWTRESRGFGFVTMETLEEAERCVKYLNHSVLEGRVITVEKAKRRRGRTPTPGRYLGLRTIRARRRSPSYSPRRSPSYSPFRRSYSRSPYSSDRSRSRSYSPDYQRRSYSPYHSRRRSYSPFYSRYRSYSRYDRHRSYSRSRSPYSRSPVSMRDRSYSPYEIRYDSPDAHSYRRHRYRSVSQSASPDDRYYGRHRYRSVSRSASPRPRRRSRRSYSRSATPVSKRSNSRNVSPRSRRSHSRSSKRSGKCEKRYSRSSSVNASSRSVSRSNTPRSTSPST

SEQ ID NO: 57780 - DNA, 1750 bp, Glycine max
  misc_feature (1)..(1750): Ceres Seq. ID no. 14316196
aaaaaactctttctctttagccctcaaaggtacccctgaaaagtgaaaggtcttgctcccatttctttaacggcttgttttttattttttaataatcccatcgtaattatcgctttttctcgttgtccactaagaatgtcaagacaggagatcaagatctgaagccttgttgaagaggctgcttctttggatctgaacaatgcctctggctctggatctttgccgcgccttcaaacattgaaaaagacttccatttcttctcgaaggtctggtactgccactttccctagtcctggtacactcaattatcgcgttgcaatgcacaagggatggagctccgagcgagttcccttgcatgcaggtgctacccggaagcacgttttgccgttcaacaatgggaaaacattgccgtcaaagtgggaagatgctgagaggtggattctcagccctgtttcggcagatggcactgggagggcctcgcttaatgcaccccaaaggaggccaaagtccaagagcggtcctcttggaccccctggtgttgcgtatcattctatgtactcgccggccgcgccggtgtttgaagtggggaatggggggagttttatggaaggttctccgtttacaggtgatggtttaataatctgcaccggtggccatggtggagctctttccgtgagaacagaaccttgcatggcacgctcagcaagtgtccacggatgctctaagatacagagtcagtcatcatcaatgcccctccaagaggataagtttggggggttcaaagatgtgggcaccaatgtgtcccgtgccacttcaaggagggacatggcgacccagatgagcccacagggtagctcacgctcctctcctaatctgaggccttctttctctgcctccaccccatcaaccttgcctgtcacagaattgcggactgttggttcctctaaagtggatattagggatgtgcaggtagatgaacacgttaccgtgacaagatggtccaagaaacatagggccctattcactggcagaggctcagaaaaagtcgaaagctggaaaaaagaactaagcactcaatcgtcaacttgggacgtttctgaaacgtcaaagcctgcctcaaagacaagaagtgaggaagccaaaatctctgcatgggagaacttgcaaaaggcaaaagcagaagcagcaatacggaaactagagatgaaattggaaaaaaggcgagcatcctctatggataagattatgaacaagcttagattggcccagaaaaaagctcaggaaatgagaagttcagttccacacaaccaaaccgatcgggttgtaagaacttcacacaaggcttcatcatttcttagaaccagccagatgcgttctttgagtggttgtttcacttgccatgtcttttaagcattctttcatgtttgagtgatggtgggtttccgaaggattcaaatgggccacatgttaatgattgaaaggggcacaacagttgacaaaattggtgttgttgcgttttgctatccatggcaccttctttgaaagtctcagatatcataaaatctaagccccgtgttcgggagtttggattcaatgggtagcaatatttgtaagtaggccaaattttagaaataagatcttttgtatttttttctctcctcccaacatgattgtgtgctgttcaaaaacttcaaatgtaatctaccttatagttgaacgagaaaagcaaccacaatatcatttcgttctc

SEQ ID NO: 57781 - protein, 363 aa, Glycine max
  peptide (1)..(363): Ceres Seq. ID no. 14316197
MHKGWSSERVPLHAGATRKHVLPFNNGKTLPSKWEDAERWILSPVSADGTGRASLNAPQRRPKSKSGPLGPPGVAYHSMYSPAAPVFEVGNGGSFMEGSPFTGDGLIICTGGHGGALSVRTEPCMARSASVHGCSKIQSQSSSMPLQEDKFGGFKDVGTNVSRATSRRDMATQMSPQGSSRSSPNLRPSFSASTPSTLPVTELRTVGSSKVDIRDVQVDEHVTVTRWSKKHRALFTGRGSEKVESWKKELSTQSSTWDVSETSKPASKTRSEEAKISAWENLQKAKAEAAIRKLEMKLEKRRASSMDKIMNKLRLAQKKAQEMRSSVPHNQTDRVVRTSHKASSFLRTSQMRSLSGCFTCHVF

SEQ ID NO: 57782 - protein, 285 aa, Glycine max
  peptide (1)..(285): Ceres Seq. ID no. 14316198
MYSPAAPVFEVGNGGSFMEGSPFTGDGLIICTGGHGGALSVRTEPCMARSASVHGCSKIQSQSSSMPLQEDKFGGFKDVGTNVSRATSRRDMATQMSPQGSSRSSPNLRPSFSASTPSTLPVTELRTVGSSKVDIRDVQVDEHVTVTRWSKKHRALFTGRGSEKVESWKKELSTQSSTWDVSETSKPASKTRSEEAKISAWENLQKAKAEAAIRKLEMKLEKRRASSMDKIMNKLRLAQKKAQEMRSSVPHNQTDRVVRTSHKASSFLRTSQMRSLSGCFTCHVF

SEQ ID NO: 57783 - protein, 268 aa, Glycine max
  peptide (1)..(268): Ceres Seq. ID no. 14316199
MEGSPFTGDGLIICTGGHGGALSVRTEPCMARSASVHGCSKIQSQSSSMPLQEDKFGGFKDVGTNVSRATSRRDMATQMSPQGSSRSSPNLRPSFSASTPSTLPVTELRTVGSSKVDIRDVQVDEHVTVTRWSKKHRALFTGRGSEKVESWKKELSTQSSTWDVSETSKPASKTRSEEAKISAWENLQKAKAEAAIRKLEMKLEKRRASSMDKIMNKLRLAQKKAQEMRSSVPHNQTDRVVRTSHKASSFLRTSQMRSLSGCFTCHVF

SEQ ID NO: 57784 - DNA, 1186 bp, Glycine max
  misc_feature (1)..(1186): Ceres Seq. ID no. 15225673
gttgccttagtctgtgttgagacttgagagttgtgtgcataacacaatcaattaagaagctgtgattctgattcagaatcagaatgttgcgaagatggagcaaagcagttactccaatctccaaatttggatcgcagcagagtcatttgaatttcgtgaaggacgtcacgcgccaaagctacgccggggttgcacccgcgccaacaacgatagaggataaacctcaaccccccgtggttaaacttgacaaaatgttttggtctaagccctgttcgctggccctgccccgggactcacccctcaaagctgaagaacctgattatcagggcatcaagcgtttcatgctcaagctcatgctgttttatagtaagcagagcaagtcaattcgaggcgctaatgttgtgtaccgaagaattgtttctcaaattgataaacctcccatttatgaagtgtttaacttggagaaaacattcaaaacaacattctctttacttgtacttcatatgtggttatgtttgcgtcgcttgaagcaagagggaaatgagggtgttgaatttggccagtacctttatgagatttacaatcatgatgtggagctaagagtctctaaagctggagttaatctactactgactaagtggatgaaagagctcgagaagattttttatgggaacattgttgcttatgatactgccatacttccagaagctaaaccgggtgatttttctaatgttatatggaggaatatattctctgaagatggttcttcaacaccagatgctgctgcatctcaatcagtacaggcgatggccagatatgctcgccgtgaagtaagttgcatgaccttaacagataaagaagcactatattcagggaattttatgttcacctctttgaagcatgagaacagaagcggaaaggggcctcaatgatgaagtggtgatttctaaatttgtgatttagcaaattgaaaatacacgctgttcttattttatttattttttacaaaaaattgttgaataattatgacataaagctcatgtccttctccgtaaggcttttattatacttgattagcttggtgcccagaaactagaactctcatattcttgccctgtaaaatgagaaaagaaaaagggcagaagtgactgaaaaatgttgttctttctcaaaaaaaaaaaaaaaa

SEQ ID NO: 57785 - protein, 282 aa, Glycine max
  peptide (1)..(282): Ceres Seq. ID no. 15225674
MLRRWSKAVTPISKFGSQQSHLNFVKDVTRQSYAGVAPAPTTIEDKPQPPVVKLDKMFWSKPCSLALPRDSPLKAEEPDYQGIKRFMLKLMLFYSKQSKSIRGANVVYRRIVSQIDKPPIYEVFNLEKTFKTTFSLLVLHMWLCLRRLKQEGNEGVEFGQYLYEIYNHDVELRVSKAGVNLLLTKWMKELEKIFYGNIVAYDTAILPEAKPGDFSNVIWRNIFSEDGSSTPDAAASQSVQAMARYARREVSCMTLTDKEALYSGNFMFTSLKHENRSGKGPQ

SEQ ID NO: 57786 - protein, 226 aa, Glycine max
  peptide (1)..(226): Ceres Seq. ID no. 15225675
MFWSKPCSLALPRDSPLKAEEPDYQGIKRFMLKLMLFYSKQSKSIRGANVVYRRIVSQIDKPPIYEVFNLEKTFKTTFSLLVLHMWLCLRRLKQEGNEGVEFGQYLYEIYNHDVELRVSKAGVNLLLTKWMKELEKIFYGNIVAYDTAILPEAKPGDFSNVIWRNIFSEDGSSTPDAAASQSVQAMARYARREVSCMTLTDKEALYSGNFMFTSLKHENRSGKGPQ

SEQ ID NO: 57787 - protein, 196 aa, Glycine max
  peptide (1)..(196): Ceres Seq. ID no. 15225676
MLKLMLFYSKQSKSIRGANVVYRRIVSQIDKPPIYEVFNLEKTFKTTFSLLVLHMWLCLRRLKQEGNEGVEFGQYLYEIYNHDVELRVSKAGVNLLLTKWMKELEKIFYGNIVAYDTAILPEAKPGDFSNVIWRNIFSEDGSSTPDAAASQSVQAMARYARREVSCMTLTDKEALYSGNFMFTSLKHENRSGKGPQ

SEQ ID NO: 57788 - DNA, 1820 bp, Glycine max
  misc_feature (1)..(1820): Ceres Seq. ID no. 14315993
agtattttggttcgtttcttgttaaaaacgcccccatccccttcgtttcccatttccgaggttgttgccggccacccaaacccaattcacatcattatcttttttctttctttcttgtgtttgtgtgtttcctcaaaattcacaattacaatcctcacaatcctcctcccttcatttctcaaattcccaatatttcaccaattcaaaacccttcatcattgatcttttcactcttttcttctttgctcgcaacattcattcacaatttgggtgctccttctgtttcttctcctcaccattggattggataatctgcaatttcttcaattgacaaaagcaacgggagttgggttccaacggaattatggttttcctcattgcgatgtttagggaagccagctatgtcatttgtcttttgctttgagaaacctaatttgtgatttttaaatggaaaagaaaagattggatgactatgaacctggtcctgttccttcaccaagagcattagatagatttgggtttgtaaaacaggatgttaatacttctgaaggcttagtcaagaatagatcagcctacgagtatgagagatatagggaggagagaagggttagaaaatggaggaagatgattggggttggtggcagtgactggaagcattatctaaggagaaaacctcatgttgtgaaaaggcgtataaggaaaggaattcccgattgtttaaggggccttgtttggcaattgatatctggaagtcgagacctattgctgatgaaccctggagtttatgagcaactagtcatatatgagacatctgcctctgaactggatataattcgagatatttctcgaaccttcccttcacatgtattctttcaacagagacatggacctgggcagcggtccctctacaatgttctaaaagcttactctgtctttgacagagatgtaggctatgttcagggcatgggatttttagcggggcttttgcttctttatatgagtgaggaggatgcattttggttgttggtggcattgctaaaaggagccgttcatgctccaatggagggcttgtatctggcaggattgcctctggtacagcaatacctctttcaatttgaatgctcggtgagggagcatctaccaaagttgggagaacatttttcctatgaaatgataaatcctagcatgtatgctagccagtggttcataactgtattttcatattcctttccatttcatttggctcttcgaatttgggatgtcttcctctacgagggtgttaaaattgtctttaaagttggcttggccctattaaagtactgccatgatgacttgattaaactacctttcgaaaaactcatacatgccttgaaaaactttcccgagggtgcaatgaatccggatacattgttaccactggcttattctatcaagatatccaagcgtttagaagaattgaaacaagagtatgagaagaagaatggaaagataagacgatctggagaactttctgaaaaaccaatacttcctagtgtccagggcaattgaagcaggacatatgcaagacaacatttgctggacatgtaaaactattggtaaagctgagcggaggacctcccagtgaaggtctatctttcctgctgggaactaatccattgtgaaaaccataccctcaaattctatgttgagaccatatgttgcatactatgtacagttgtattagttgctcactcttgtcaaaattcagtgttttataaagatgaagttgtctttataaattgtggttattgttattatgcttaattactattttagttccc

SEQ ID NO: 57789 - protein, 366 aa, Glycine max
  peptide (1)..(366): Ceres Seq. ID no. 14315994
MEKKRLDDYEPGPVPSPRALDRFGFVKQDVNTSEGLVKNRSAYEYERYREERRVRKWRKMIGVGGSDWKHYLRRKPHVVKRRIRKGIPDCLRGLVWQLISGSRDLLLMNPGVYEQLVIYETSASELDIIRDISRTFPSHVFFQQRHGPGQRSLYNVLKAYSVFDRDVGYVQGMGFLAGLLLLYMSEEDAFWLLVALLKGAVHAPMEGLYLAGLPLVQQYLFQFECSVREHLPKLGEHFSYEMINPSMYASQWFITVFSYSFPFHLALRIWDVFLYEGVKIVFKVGLALLKYCHDDLIKLPFEKLIHALKNFPEGAMNPDTLLPLAYSIKISKRLEELKQEYEKKNGKIRRSGELSEKPILPSVQGN

SEQ ID NO: 57790 - protein, 307 aa, Glycine max
  peptide (1)..(307): Ceres Seq. ID no. 14315995
MIGVGGSDWKHYLRRKPHVVKRRIRKGIPDCLRGLVWQLISGSRDLLLMNPGVYEQLVIYETSASELDIIRDISRTFPSHVFFQQRHGPGQRSLYNVLKAYSVFDRDVGYVQGMGFLAGLLLLYMSEEDAFWLLVALLKGAVHAPMEGLYLAGLPLVQQYLFQFECSVREHLPKLGEHFSYEMINPSMYASQWFITVFSYSFPFHLALRIWDVFLYEGVKIVFKVGLALLKYCHDDLIKLPFEKLIHALKNFPEGAMNPDTLLPLAYSIKISKRLEELKQEYEKKNGKIRRSGELSEKPILPSVQGN

SEQ ID NO: 57791 - protein, 259 aa, Glycine max
  peptide (1)..(259): Ceres Seq. ID no. 14315996
MNPGVYEQLVIYETSASELDIIRDISRTFPSHVFFQQRHGPGQRSLYNVLKAYSVFDRDVGYVQGMGFLAGLLLLYMSEEDAFWLLVALLKGAVHAPMEGLYLAGLPLVQQYLFQFECSVREHLPKLGEHFSYEMINPSMYASQWFITVFSYSFPFHLALRIWDVFLYEGVKIVFKVGLALLKYCHDDLIKLPFEKLIHALKNFPEGAMNPDTLLPLAYSIKISKRLEELKQEYEKKNGKIRRSGELSEKPILPSVQGN

SEQ ID NO: 57792 - DNA, 1810 bp, Glycine max
  misc_feature (1)..(1810): Ceres Seq. ID no. 15176053
acaacggaaacacacaaacatttcccggtctcaaactcacagaagcagagccatacagtacaggtcgctgatattttctcctccttcctgaatcctgagtgaccaccggtccggtccaccatggctctcgtctggatggtggccgcggccgtggcggcggtgctggcatcgtgggcgttcaacgcgctggtgtacctcgtgtggcggccgcgggccatcacccggcagctccgcgcgcagggcgtcggcgggccgggctacaggttcttcgccgggaacctcgccgagatcaagcggctccgcgccgacagcgccggcgccgcgctggacatcggcaaccacgacttcgtccccatggtccaaccgcacttccgcaaatggatccccatccacgggcgcacgttcctgtactggttcggagccaggccgacactgtgcgtggccgacgtgaacgtggtgaagcaggtgctctccgaccgcagcgggctgtaccccaagagcatcgggaacccgcacatcgcccggctgctcggcaaggggctcgtgctcaccgacggcgacgactggaagcgccaccgcaaggtcgtccaccccgccttcaacatggacaagctcaagatgatgacggtgaccatgtccgactgtgccgggtcaatgatgtccgagtggaaggcaaagatggagaagggcggcagcgtagaggtcgacctgagccaccagtttgaggagctcaccgcggatgtcatctctcacacggcattcggaagcagctacgaacaggggaaaaaggtcttcctggcgcagagggagctccaattccttgccttttccaccgtattcaacgtgcaaatcccagcattcaggtaccttccaactgaaaagaacctcaaaatatggaagcttgacaaagaggtgaggaccatgctgatgaacatcatcaaaggccgtcttgccaccaaagacaccatgggctacggcagcgacctcctcgggcttatgttggaggcgtgcgcgccagaggatgggcaaaatccgcttttgagtatggatgagatcatagatgagtgcaagaccttcttctttgccgggcatgacaccagctcgcacctgctcacatggaccatgttcttgctgagcacgcaccctgagtggcaggagaagctcagggaggaggtgctaagagagtgtggcaacggtgttcccaccggtgacatgctcaacaaactacagctggtcaacatgttcctactagaaactctcaggttatacgcccctgtatcggccattcagaggaaggcgggttcggatctcgaggttggtggcataaaagtgcctgaaggcacggtcttgacgattcccatcgcgacggtacatcgtgacaaggaggtatggggagaagatgccaatgaattcaagcctacgaggttcgagaatggagtgacaagagccggaaagcaccccaatgctttgttgtctttctctagtgggccgaggtcatgcatagggcagaactttgcaatgatcgaggccaaggctgtgatcgctgtgattcttcagagattttcattctccctatcaccgaagtatgtccatgcccccatggatgtgatcacgctgcggcctaagtttgggcttcccatgatcctcaagagcctagagatgtagaaaaatgtatatggtctcaagtataacacatggttttgtattatttgactggagtttagtttatattgcgcactagaaaatcttgtaaaattaccaatgtataatgtatcctatttgtaaatataaataatgaagtgttctattt

SEQ ID NO: 57793 - protein, 514 aa, Glycine max
  peptide (1)..(514): Ceres Seq. ID no. 15176054
MALVWMVAAAVAAVLASWAFNALVYLVWRPRAITRQLRAQGVGGPGYRFFAGNLAEIKRLRADSAGAALDIGNHDFVPMVQPHFRKWIPIHGRTFLYWFGARPTLCVADVNVVKQVLSDRSGLYPKSIGNPHIARLLGKGLVLTDGDDWKRHRKVVHPAFNMDKLKMMTVTMSDCAGSMMSEWKAKMEKGGSVEVDLSHQFEELTADVISHTAFGSSYEQGKKVFLAQRELQFLAFSTVFNVQIPAFRYLPTEKNLKIWKLDKEVRTMLMNIIKGRLATKDTMGYGSDLLGLMLEACAPEDGQNPLLSMDEIIDECKTFFFAGHDTSSHLLTWTMFLLSTHPEWQEKLREEVLRECGNGVPTGDMLNKLQLVNMFLLETLRLYAPVSAIQRKAGSDLEVGGIKVPEGTVLTIPIATVHRDKEVWGEDANEFKPTRFENGVTRAGKHPNALLSFSSGPRSCIGQNFAMIEAKAVIAVILQRFSFSLSPKYVHAPMDVITLRPKFGLPMILKSLEM

SEQ ID NO: 57794 - protein, 509 aa, Glycine max
  peptide (1)..(509): Ceres Seq. ID no. 15176055
MVAAAVAAVLASWAFNALVYLVWRPRAITRQLRAQGVGGPGYRFFAGNLAEIKRLRADSAGAALDIGNHDFVPMVQPHFRKWIPIHGRTFLYWFGARPTLCVADVNVVKQVLSDRSGLYPKSIGNPHIARLLGKGLVLTDGDDWKRHRKVVHPAFNMDKLKMMTVTMSDCAGSMMSEWKAKMEKGGSVEVDLSHQFEELTADVISHTAFGSSYEQGKKVFLAQRELQFLAFSTVFNVQIPAFRYLPTEKNLKIWKLDKEVRTMLMNIIKGRLATKDTMGYGSDLLGLMLEACAPEDGQNPLLSMDEIIDECKTFFFAGHDTSSHLLTWTMFLLSTHPEWQEKLREEVLRECGNGVPTGDMLNKLQLVNMFLLETLRLYAPVSAIQRKAGSDLEVGGIKVPEGTVLTIPIATVHRDKEVWGEDANEFKPTRFENGVTRAGKHPNALLSFSSGPRSCIGQNFAMIEAKAVIAVILQRFSFSLSPKYVHAPMDVITLRPKFGLPMILKSLEM

SEQ ID NO: 57795 - protein, 436 aa, Glycine max
  peptide (1)..(436): Ceres Seq. ID no. 15176056
MVQPHFRKWIPIHGRTFLYWFGARPTLCVADVNVVKQVLSDRSGLYPKSIGNPHIARLLGKGLVLTDGDDWKRHRKVVHPAFNMDKLKMMTVTMSDCAGSMMSEWKAKMEKGGSVEVDLSHQFEELTADVISHTAFGSSYEQGKKVFLAQRELQFLAFSTVFNVQIPAFRYLPTEKNLKIWKLDKEVRTMLMNIIKGRLATKDTMGYGSDLLGLMLEACAPEDGQNPLLSMDEIIDECKTFFFAGHDTSSHLLTWTMFLLSTHPEWQEKLREEVLRECGNGVPTGDMLNKLQLVNMFLLETLRLYAPVSAIQRKAGSDLEVGGIKVPEGTVLTIPIATVHRDKEVWGEDANEFKPTRFENGVTRAGKHPNALLSFSSGPRSCIGQNFAMIEAKAVIAVILQRFSFSLSPKYVHAPMDVITLRPKFGLPMILKSLEM

SEQ ID NO: 57796 - DNA, 1643 bp, Glycine max
  misc_feature (1)..(1643): Ceres Seq. ID no. 13594317
acattgtaacagccaaaggcaggtggaatccaattctcaaaccccaatcgttagactaagcaagaggtcgttcagtgtaagtactccttgttcttgtttctgtttcatcatttttgatcttatgctagtcgaatcaattgtgatgcttagaattagtcaatgaagctccctgtgcgttacttgattgttattttgaccttcgtctgcacctcggtttgctacatcgaacgagttgggttttccatcgcgtacacagttgctgctgacggtgccggagtgaatcaatcgagcaaaggtacaatactgtccaccttctattacggatacgcctgttctcaagttcccggaggatgggcagctcagaaaatcggggggaggagggtcctgcttctttcctttctgttgtggtcattaacttgtgcactacttcctctagatcccaatcgcgttatgcttttagtcattgctcgtttgctcgttggtatagcacaaggcttcattttcccctccatccacacagttctagctcaatgggttccccctcacgagagatctagatccgtctctctcaccacttctgggatgtacctaggtgcagctctaggtatgcttcttcttcctactctagtcaagttcagaggtcctcaatctgtgtttcttgcggaggccgcattgggcgcttcatggtctttactttggttcaaatacgccactgatcccaaatccactgcctctggtgtcggggaatcagtcttgcccgtcaataaaaaaattgacactcacaacaaaaaaccgctttcagccaaaatcccctgggtcaaaattttaaccagcttccctgtgtgggcgattgttgtcaacaatttcacctttcactatgctttatatgtgctcatgaactggctcccaacctactttgaattgggccttcagcttagcctgcaagatatgggttcctctaaaatgatgccctatctcaacatgttcctcttctccaacattggcggtgttgtcgcggactacttgatcaccaggagaatattatctgtcaccaaaaccaggaaattcttgaacactgtcggattcttggttgcttctcttgccttggtgatcattcccagtttcagaacttctggtggtgctgtcttctgttcttccgtggctcttggtttcttggcacttggcagagctggctttgccgtgaaccacatggacattgctcctagatacgctggaatagtgatgggtgtttctaatactgccggtacgttagctggcattgttggcgttgacctgactgggaagcttcttgaagctgctaaggctgctaattctgatctttcaagtccagaaagctggagggcagtgttttccattcctgggtttctatgcatttttagttcttttgtatttctactattttcaactggggagagaatttttgattgaggtaaccttgtcattttcatgactcatcagctgttgttattctgaggatttactttttattacatctccatgttatatcattcttggataggagagctcatattgtcataattggatatgaatttttgttgttattattattatttccccatcttgtaaaaaaaaaaaaaaaaaagcttatcgataccgtcgac

SEQ ID NO: 57797 - protein, 429 aa, Glycine max
  peptide (1)..(429): Ceres Seq. ID no. 13594318
MKLPVRYLIVILTFVCTSVCYIERVGFSIAYTVAADGAGVNQSSKGTILSTFYYGYACSQVPGGWAAQKIGGRRVLLLSFLLWSLTCALLPLDPNRVMLLVIARLLVGIAQGFIFPSIHTVLAQWVPPHERSRSVSLTTSGMYLGAALGMLLLPTLVKFRGPQSVFLAEAALGASWSLLWFKYATDPKSTASGVGESVLPVNKKIDTHNKKPLSAKIPWVKILTSFPVWAIVVNNFTFHYALYVLMNWLPTYFELGLQLSLQDMGSSKMMPYLNMFLFSNIGGVVADYLITRRILSVTKTRKFLNTVGFLVASLALVIIPSFRTSGGAVFCSSVALGFLALGRAGFAVNHMDIAPRYAGIVMGVSNTAGTLAGIVGVDLTGKLLEAAKAANSDLSSPESWRAVFSIPGFLCIFSSFVFLLFSTGERIFD

SEQ ID NO: 57798 - protein, 332 aa, Glycine max
  peptide (1)..(332): Ceres Seq. ID no. 13594319
MLLVIARLLVGIAQGFIFPSIHTVLAQWVPPHERSRSVSLTTSGMYLGAALGMLLLPTLVKFRGPQSVFLAEAALGASWSLLWFKYATDPKSTASGVGESVLPVNKKIDTHNKKPLSAKIPWVKILTSFPVWAIVVNNFTFHYALYVLMNWLPTYFELGLQLSLQDMGSSKMMPYLNMFLFSNIGGVVADYLITRRILSVTKTRKFLNTVGFLVASLALVIIPSFRTSGGAVFCSSVALGFLALGRAGFAVNHMDIAPRYAGIVMGVSNTAGTLAGIVGVDLTGKLLEAAKAANSDLSSPESWRAVFSIPGFLCIFSSFVFLLFSTGERIFD

SEQ ID NO: 57799 - protein, 288 aa, Glycine max
  peptide (1)..(288): Ceres Seq. ID no. 13594320
MYLGAALGMLLLPTLVKFRGPQSVFLAEAALGASWSLLWFKYATDPKSTASGVGESVLPVNKKIDTHNKKPLSAKIPWVKILTSFPVWAIVVNNFTFHYALYVLMNWLPTYFELGLQLSLQDMGSSKMMPYLNMFLFSNIGGVVADYLITRRILSVTKTRKFLNTVGFLVASLALVIIPSFRTSGGAVFCSSVALGFLALGRAGFAVNHMDIAPRYAGIVMGVSNTAGTLAGIVGVDLTGKLLEAAKAANSDLSSPESWRAVFSIPGFLCIFSSFVFLLFSTGERIFD

SEQ ID NO: 57800 - DNA, 1232 bp, Glycine max
  misc_feature (1)..(1232): Ceres Seq. ID no. 12608262
gaattaatagagatacagataacgtgaaactgaaaggaaaatggcactctcagtctcctcaccctcatgcgtacgcgttccttcatgtttttggaaaccaaatggcaagagttgcaaagagcgtactaaggtttcatgtgcagctcacaatgataataagaatccgttggttggaatcggtattggggttgtaacgtcttgtgtgatgggtttaactgcattggatgcggacgccacgagaatcgaatactacgcaacagtggcagagcctttgtgtgagtacaactatgttaagtctggcctcggctactgcgatattgctgagggcttcggtgacgaagctccactgggtgagcttatcaatgttcactatactgcgagattcgctgatgggatagtattcgatagcagctataaacgtgctagacctctcaccatgcgcattggtgtgggcaaggtaatcaagggactggatcaggggattttagggggtgaaggagtacctccaatgcggataggtgggaaacgcaaactgcagattcctccgcacttagcatatggccctgaacctgcagggtgcttctcaggtgactgcaatatacccgccaatgccactcttctgtatgatattaattttgttgaggtttattcggggaacagatcaaagtgaagtcagtcaaaactggtcagatacatatatacatatgaaccacagatggatgggtttagagcaatgaaatggacattttgctagagaatatggatcaacttgtttggcagaatcttcttcctgattacaactacctcaagttactgttcctggttagtggagttgtacatgattgacctggatatcccttttgagagtaatgagcaatccttcctggtgatatatattaagataattcatgtgtatctctgcacatgacatgcgaacagtttgtgcatctttagtgtaaatgtaattttcaatactgctctgaatgataaaaaattgttaattcttcatttgataaatgcctgtctctaatacgtgatatgctttacccttttcaccttcctgtctgaaataggcatggctctacatgcttagagcagtaaaatgcaaagggagaatcataatttcaaaagattaacaggattagcagttaaacgtgttcaaatatgatttctatgctgaattgattaatcacccgtttgcaggtaattcatctaaagttagaaatatgttc

SEQ ID NO: 57801 - protein, 209 aa, Glycine max
  peptide (1)..(209): Ceres Seq. ID no. 12608263
MALSVSSPSCVRVPSCFWKPNGKSCKERTKVSCAAHNDNKNPLVGIGIGVVTSCVMGLTALDADATRIEYYATVAEPLCEYNYVKSGLGYCDIAEGFGDEAPLGELINVHYTARFADGIVFDSSYKRARPLTMRIGVGKVIKGLDQGILGGEGVPPMRIGGKRKLQIPPHLAYGPEPAGCFSGDCNIPANATLLYDINFVEVYSGNRSK

SEQ ID NO: 57802 - protein, 154 aa, Glycine max
  peptide (1)..(154): Ceres Seq. ID no. 12608264
MGLTALDADATRIEYYATVAEPLCEYNYVKSGLGYCDIAEGFGDEAPLGELINVHYTARFADGIVFDSSYKRARPLTMRIGVGKVIKGLDQGILGGEGVPPMRIGGKRKLQIPPHLAYGPEPAGCFSGDCNIPANATLLYDINFVEVYSGNRSK

SEQ ID NO: 57803 - DNA, 1199 bp, Glycine max
  misc_feature (1)..(1199): Ceres Seq. ID no. 13594298
acaaccaataccatcaacacttcatttcttactctcactgaaaaaaaatagcttgttcacaccatcctattttttcaactcatatatacaaatatatataacatggcttctaccttctctcgaagcctagcacttgtaagcttttacattgtcgtttgtgctgccggtaacttgaaccaagactttcagcttacgtggggagatggtcgtgctaaaatactcaacaacgaaaatcttctcactctctcccttgacaaggcctctggctctggcttccaatccaaaaacgaatacttatatggcaagattgacatgcagctcaagctcgttcctggaaactctgctggcactgtcaccgcctattatctgtcttcaaaaggatcaacatgggatgagattgacttcgagttcttggggaatctgagtggcgatccatacattctacacaccaatgtgttcagccaaggcaagggcaacagagagcaacaattctatctctggtttgacccaactgcagatttccacacttattcaattctttggaatccccaacgcattgttttttctgtggatggcacccccatcagggaattcaagaatttggaatcaataggagttccttttccaaagagccaaccgatgaggatatactcaagcctatggaacgctgatgattgggccacaaggggtggactcatcaagactgactggtccaaagctcctttcactgcatcctacagaaacttcaacgccaatgcttgtgtttggaactctggaaaatcctcatgcaaatcaaattcttcaccttcctctgcatctcccactaatgcatggttatcacaagagcttgattccactgctcagcagaggttgcgttgggtgcagaagaactacttgatttacaattactgcaccgacaacaagagatttcctcaaggccttccactcgaatgcaaacactcctagagcctataggactcacatctcgcactacccataacaagtgttgcaatataatcttatgaaccattcttttaatttttgtattcctttttttttttttgttcgatgcttgagtgctatagtgctgttattatacaaatatacaatgtaaaaatatcccatgtaaaataatgcttctgtttttttttttaaaaaaaaaataatgcttctcttgtttgtatgactgaattttgtgt

SEQ ID NO: 57804 - protein, 287 aa, Glycine max
  peptide (1)..(287): Ceres Seq. ID no. 13594299
MASTFSRSLALVSFYIVVCAAGNLNQDFQLTWGDGRAKILNNENLLTLSLDKASGSGFQSKNEYLYGKIDMQLKLVPGNSAGTVTAYYLSSKGSTWDEIDFEFLGNLSGDPYILHTNVFSQGKGNREQQFYLWFDPTADFHTYSILWNPQRIVFSVDGTPIREFKNLESIGVPFPKSQPMRIYSSLWNADDWATRGGLIKTDWSKAPFTASYRNFNANACVWNSGKSSCKSNSSPSSASPTNAWLSQELDSTAQQRLRWVQKNYLIYNYCTDNKRFPQGLPLECKHS

SEQ ID NO: 57805 - protein, 217 aa, Glycine max
  peptide (1)..(217): Ceres Seq. ID no. 13594300
MQLKLVPGNSAGTVTAYYLSSKGSTWDEIDFEFLGNLSGDPYILHTNVFSQGKGNREQQFYLWFDPTADFHTYSILWNPQRIVFSVDGTPIREFKNLESIGVPFPKSQPMRIYSSLWNADDWATRGGLIKTDWSKAPFTASYRNFNANACVWNSGKSSCKSNSSPSSASPTNAWLSQELDSTAQQRLRWVQKNYLIYNYCTDNKRFPQGLPLECKHS

SEQ ID NO: 57806 - DNA, 1320 bp, Glycine max
  misc_feature (1)..(1320): Ceres Seq. ID no. 14316277
attccaatagcgaggcgagacatcgattccaaaggtgcgtttctgctgtgctagggtttctgcatcttccacctccgtcgcgatgaaaccaggcttcatctgattccgatttcccttcgctccttctcctccttaacattcatcttcttcgattcctctacaaattatgattattattatgatgaactccatcttcgcctcgcataaccttcgcgtcttcggtcccggcttgaatcccttcgcaccttattgcatcgccaatcactcccttttcctttccctttcctctcgctaaattacaattccctttctttttcctctccaacttctccttctccgtttctccgaacatgtaaattcggaggacaccgtctttgattcggtctatttttttgggggttactttacttcggttacgcgtcgtcgttttgcttttctttgtcgtcgtttttgcgttgcgttgattgctgagaaagaaagaaagaaagaaagatgctggaggaacagcctgttgttttgttcaggaagagcccttccaggaggcgcttgagatctgcttttgctaccgatgataggggttggacctcgcttcatgttttcgctcgaaaaggcgatctcaaattggttaaaaaacttctcaatgaaggaatggatgtcaatgtgtctgcatggggccccaaatcaaaaggggtgacccctctccaccttgctgccgaaggtggtcacattggagtgatggatgtactacttgagtgtggtgctgacattgatgccagaactaagggtgcttgtggctggacgccgctccacattgcagccaaggaaaggaggagggatgctgtgaaattcttgatagagaatggagccttcatgccacctgatatcagtgatagcagatttaacccaccgcttcattactgccccggactggaatgggcctatgaggagatgaagcgacttcgtcaggaagacttgtctgctggagagacatgttacagctctgaaagttaatttgcttttcagggatttggttggtgtttgatagtgtgtttggatgccattcagaggagatcaaagttaatataactagcttttgcgtcacctttacaaatttgacatgaaaatatgctgatacgtacattcagaaagcgtatccagacatgcactgtatctgtattgtatgaataaatgtacaattgaaataaaactactatgtagtgtatggggatgttttactattttagcatcttggatgcccttgtttatggaaacaattatgtacgattattaatgtgatatgctgtgattgttgatgtttcc

SEQ ID NO: 57807 - protein, 172 aa, Glycine max
  peptide (1)..(172): Ceres Seq. ID no. 14316278
MLEEQPVVLFRKSPSRRRLRSAFATDDRGWTSLHVFARKGDLKLVKKLLNEGMDVNVSAWGPKSKGVTPLHLAAEGGHIGVMDVLLECGADIDARTKGACGWTPLHIAAKERRRDAVKFLIENGAFMPPDISDSRFNPPLHYCPGLEWAYEEMKRLRQEDLSAGETCYSSES

SEQ ID NO: 57808 - protein, 120 aa, Glycine max
  peptide (1)..(120): Ceres Seq. ID no. 14316279
MDVNVSAWGPKSKGVTPLHLAAEGGHIGVMDVLLECGADIDARTKGACGWTPLHIAAKERRRDAVKFLIENGAFMPPDISDSRFNPPLHYCPGLEWAYEEMKRLRQEDLSAGETCYSSES

SEQ ID NO: 57809 - protein, 91 aa, Glycine max
  peptide (1)..(91): Ceres Seq. ID no. 14316280
MDVLLECGADIDARTKGACGWTPLHIAAKERRRDAVKFLIENGAFMPPDISDSRFNPPLHYCPGLEWAYEEMKRLRQEDLSAGETCYSSES

SEQ ID NO: 57810 - DNA, 1674 bp, Glycine max
  misc_feature (1)..(1674): Ceres Seq. ID no. 15170350
atctttagtttctttgttgttgttctccaatctgcactgaaacgtggctgaatgcctctctcagtcccagccagagcgagaatccaccatctccatggaccctcctttttcccttccatttccaaaccaaaacaaaaacccatttggccaacccttttgcctctgaatcgcgcattcgggtgcagaagcctcgaaatcgccgtccctagcccctcctcctcgctcccttccaacgttggaccgaatagttggaaacacgtggacgttgccactctgagcaacctctgcgtcgacatcgtcctcaatgtcccgcagttgccccctccctcccctcttcaacgcaaggctttcatggaccgcttggcccaatctccccctgacaagaaatattgggaagctggtgggaactgcaatatggctatagcagctgcaaggttaggactcaactgcatatcaattggtcatgtgggtaatgaaatctatgggaagtttctgtcagatgtgcttcgtgatgagggcattggtttggttgggatgattactaatgacgatatcgtcaacagctctagtggtagtgcctcttgtgaaactcttttatgttgggttcttgttgatcctttacaaagacatggtttttgcagtcgggctgatttttgcgaggagcctatattgcattggatgagtaaattgtccagtgaagttaaaatggctattaaaaattcaaaggtcttgttctgtaatggatatggatttgatgagctctctcctggtgcactactctcagcaatggaatatgctgttgaagttggcacatcaatcttctttgatcctggaccacgtggaaagagtctctccactgggaccccagatgaacaaagagctcttaaccagttactgagaatgagtgatgttcttcttctaacttctgaggaggctgaggaattaaccggcataaacgatccaatattagcagggcaggagtttctcaaaagagggattcgcacaaaatgggtgattgtaaaaatgggttctaagggttcaattcttataacagcatcgagtgtagcttgtgcacctgcattcaaggtgaatgttattgacactgttggatgtggagacagttttgttgctgctattgtctatggttttatacataatatgccactggttaatacattggcaattgcaaatgcagtgggtgctgcaacagccatgggctgtggtgctggtaggaatgtagcaacactggagaatgtagtacatatattaagatcatcaaacctcagcgaagatgatgaattttggattgaaatacttgaaaagaatgtggttactcaggaaataacatacctgtcaaatgttatgaacggaaacaaaaaccgtctcaaccttgtctcatttgacaaggttgcctctgagctcttgcctaagcttgaacttccacaaacagtggggaatgcgccaacttgataggttgtggaaaaatagattgaagtgcattcatgcgaaagaacacttctgattcttgggttcttggctttatcctgtaaaagtaaaaatttaagcattaagactgcagagttttatctctcttgggttacataaattgccgtagctaaattgctttgagcaagtacatgaaaggtagctagcttctcatcaagcactttaacc

SEQ ID NO: 57811 - protein, 472 aa, Glycine max
  peptide (1)..(472): Ceres Seq. ID no. 15170351
MPLSVPARARIHHLHGPSFFPSISKPKQKPIWPTLLPLNRAFGCRSLEIAVPSPSSSLPSNVGPNSWKHVDVATLSNLCVDIVLNVPQLPPPSPLQRKAFMDRLAQSPPDKKYWEAGGNCNMAIAAARLGLNCISIGHVGNEIYGKFLSDVLRDEGIGLVGMITNDDIVNSSSGSASCETLLCWVLVDPLQRHGFCSRADFCEEPILHWMSKLSSEVKMAIKNSKVLFCNGYGFDELSPGALLSAMEYAVEVGTSIFFDPGPRGKSLSTGTPDEQRALNQLLRMSDVLLLTSEEAEELTGINDPILAGQEFLKRGIRTKWVIVKMGSKGSILITASSVACAPAFKVNVIDTVGCGDSFVAAIVYGFIHNMPLVNTLAIANAVGAATAMGCGAGRNVATLENVVHILRSSNLSEDDEFWIEILEKNVVTQEITYLSNVMNGNKNRLNLVSFDKVASELLPKLELPQTVGNAPT

SEQ ID NO: 57812 - protein, 372 aa, Glycine max
  peptide (1)..(372): Ceres Seq. ID no. 15170352
MDRLAQSPPDKKYWEAGGNCNMAIAAARLGLNCISIGHVGNEIYGKFLSDVLRDEGIGLVGMITNDDIVNSSSGSASCETLLCWVLVDPLQRHGFCSRADFCEEPILHWMSKLSSEVKMAIKNSKVLFCNGYGFDELSPGALLSAMEYAVEVGTSIFFDPGPRGKSLSTGTPDEQRALNQLLRMSDVLLLTSEEAEELTGINDPILAGQEFLKRGIRTKWVIVKMGSKGSILITASSVACAPAFKVNVIDTVGCGDSFVAAIVYGFIHNMPLVNTLAIANAVGAATAMGCGAGRNVATLENVVHILRSSNLSEDDEFWIEILEKNVVTQEITYLSNVMNGNKNRLNLVSFDKVASELLPKLELPQTVGNAPT

SEQ ID NO: 57813 - protein, 351 aa, Glycine max
  peptide (1)..(351): Ceres Seq. ID no. 15170353
MAIAAARLGLNCISIGHVGNEIYGKFLSDVLRDEGIGLVGMITNDDIVNSSSGSASCETLLCWVLVDPLQRHGFCSRADFCEEPILHWMSKLSSEVKMAIKNSKVLFCNGYGFDELSPGALLSAMEYAVEVGTSIFFDPGPRGKSLSTGTPDEQRALNQLLRMSDVLLLTSEEAEELTGINDPILAGQEFLKRGIRTKWVIVKMGSKGSILITASSVACAPAFKVNVIDTVGCGDSFVAAIVYGFIHNMPLVNTLAIANAVGAATAMGCGAGRNVATLENVVHILRSSNLSEDDEFWIEILEKNVVTQEITYLSNVMNGNKNRLNLVSFDKVASELLPKLELPQTVGNAPT

SEQ ID NO: 57814 - DNA, 874 bp, Glycine max
  misc_feature (1)..(874): Ceres Seq. ID no. 14316176
actcacaaccacaacacaacgcggcagagcgaagagaaggggcaaaagagaaagaagcgcttatcgaactcggacggaagcactgagttgactcggagggagtggaaagtgttgttgcgtaatgtctggtggtatcgctcgtggacgcctcaccgaggagcgcaagtcgtggcggaagaaccatccccatggttttgttgcgaagccggagacgctgcccgatggaaccgtgaatttgatggtgtggcattgcactattcccgggaagactgggactgattgggagggtggctacttcccacttacgctgcactttagtgaagactaccctagcaagcctccaaagtgtaaattcccacaaggtttcttccaccctaatgtttatccttctgggactgtttgcttgtctatacttaacgaggatagtgggtggaggccagccataacagttaagcaaattctcgtgggcatccaagacttacttgaccagccaaatcctgctgaccctgcccagacagaaggctatcatctattcatccaggatgcagcagagtacaagagaagggtccgccagcaggcaaagcaatatccacctcttctctagggttgcatcagctaaatttatgaactatttttactatggcagatgtttcttcttttgtcccgtgttaaaactgtgttgtcattgtgattaatggctgccataacattaaacatgaatgttttagctatttatgattactcccagatctggaagaagtgttaatatataaaaaaaatgtgaaagtcaaccaatgaatacttgttggtgacatgtttctgatgtttgctgctacatttttatatgaatggatcattactataagtctataac

SEQ ID NO: 57815 - protein, 160 aa, Glycine max
  peptide (1)..(160): Ceres Seq. ID no. 14316177
MSGGIARGRLTEERKSWRKNHPHGFVAKPETLPDGTVNLMVWHCTIPGKTGTDWEGGYFPLTLHFSEDYPSKPPKCKFPQGFFHPNVYPSGTVCLSILNEDSGWRPAITVKQILVGIQDLLDQPNPADPAQTEGYHLFIQDAAEYKRRVRQQAKQYPPLL

SEQ ID NO: 57816 - protein, 121 aa, Glycine max
  peptide (1)..(121): Ceres Seq. ID no. 14316178
MVWHCTIPGKTGTDWEGGYFPLTLHFSEDYPSKPPKCKFPQGFFHPNVYPSGTVCLSILNEDSGWRPAITVKQILVGIQDLLDQPNPADPAQTEGYHLFIQDAAEYKRRVRQQAKQYPPLL

SEQ ID NO: 57817 - protein, 92 aa, Glycine max
  peptide (1)..(92): Ceres Seq. ID no. 14316179
THNHNTTRQSEEKGQKRKKRLSNSDGSTELTRREWKVLLRNVWWYRSWTPHRGAQVVAEEPSPWFCCEAGDAARWNREFDGVALHYSREDWD

SEQ ID NO: 57818 - DNA, 1968 bp, Glycine max
  misc_feature (1)..(1968): Ceres Seq. ID no. 15168429
aaaatcacaatcacaagttaagcctcttccacgcgcttcttgagcgactgaatcttaagccagaaacagcaccatctatcacgctctgccactgcatgtggttttaaatactttaacctcactcacatttctctctctctctctctctcactaatctctcgttgataaacacaatcaacaatcttgttcaaacaccccacgagcttctccagcattttcaatcctcttctcttttatcctcatcgctctgcaccaaaacctccccactcctcaattatttatttatctctcccactttttctcacacacattttctcaaacacatggtgtcctcactccttcacttcactctagcttaaataacccaacaaagttcacttcaaacctcaaccatggccctcgaaacgctcctcgtgaaggtcaaaaccgccatatcaaacagcatcgactcggtcccgccgaagctcctgaagaagaagccttctttcaaagcgaagcaaaacgtcggcgttttggcgttcgagatcggcggcgtgatgtcgaagctcctccacctctggcactcgctctccgacgcaaccatcgtgcgcgtccgaaacgacgccgtgaacctcgagggcgttcggaagatcatctccaacgacgagtcgttcctcctcggactcgcctgcgccgagttctccgagtcgctccgagtcgccgctaactcggtgacgcggctcagcgcgcgctgcgaggattccgccctgcgctccttccacctggccttcctcgagttcgcggactcgggccgcgacccgaacgggtgggccctctccggcccaaaagaaaccgattcgaagctcaagaaaatggagcgttacgtgacgttcacggcaacactctaccgcgaaatggaggagctcacggttcttgaaaactccttaagaaaagccctgaatcacgctgacggcaacagcgttgggagcaaagatcagcagaagctctacgagcttcagcagaagatcttttggcagaagcaagaggtgaaggatctaaaagaaagatctttatggagcagaagcttcgacaatgttgttgtactcctcgtaaggttcagcttcaccgttttagcaaggattaaggttgtcttcggaatcggtcaccacatgccttgtctgtctcgtactttgtcggcttccgccactgtttatccgtctgatcaaaaccctaatgggttcgtttatgagtcattggaagaagaagactcgaagcttgaagaagaggccgtgaatgggttttttgaggcaaactcgaagcttttgagaccacccgagagcacgctgggtgctgcgggtttggctttgcattacgcgaatctgatcatagtgatggagaagatgataaagtcaccgcacttggtgggtgtggatgcgagggatgatttgtatgggatgttgccgaggagcataaggtggggtttgaggggaaggttgagaggggtggggttttgtgcgagtgatcctctgctcgctggtgagtggagagatgcgttagggagaatattggggtggttgtcacctttggcacataacatgatcaagtggcaaagtgagagaagctttgagcaacacaatttggtgcccaagaccaatgtgttgttgttgcagactttgtttttcgctaacaaggacaagactgaggctgccatcactgaacttcttgtggggttgaactatatttggaggtttgagagggaaatgactgctaaggctttgtttgaatgcgccaattctaatgggctattgttaaagttgaacaaatccagtcaatgagagaggttcatatatatatatatgatgagtttcttttagtttcttactatttcttcacaggggctcgaattgtgtctctcttgaagtttaattttatgggggttgatcattttagacgatgtattgaaattgaatcgagtgatcgatcgatgat

SEQ ID NO: 57819 - protein, 473 aa, Glycine max
  peptide (1)..(473): Ceres Seq. ID no. 15168430
MALETLLVKVKTAISNSIDSVPPKLLKKKPSFKAKQNVGVLAFEIGGVMSKLLHLWHSLSDATIVRVRNDAVNLEGVRKIISNDESFLLGLACAEFSESLRVAANSVTRLSARCEDSALRSFHLAFLEFADSGRDPNGWALSGPKETDSKLKKMERYVTFTATLYREMEELTVLENSLRKALNHADGNSVGSKDQQKLYELQQKIFWQKQEVKDLKERSLWSRSFDNVVVLLVRFSFTVLARIKVVFGIGHHMPCLSRTLSASATVYPSDQNPNGFVYESLEEEDSKLEEEAVNGFFEANSKLLRPPESTLGAAGLALHYANLIIVMEKMIKSPHLVGVDARDDLYGMLPRSIRWGLRGRLRGVGFCASDPLLAGEWRDALGRILGWLSPLAHNMIKWQSERSFEQHNLVPKTNVLLLQTLFFANKDKTEAAITELLVGLNYIWRFEREMTAKALFECANSNGLLLKLNKSSQ

SEQ ID NO: 57820 - protein, 425 aa, Glycine max
  peptide (1)..(425): Ceres Seq. ID no. 15168431
MSKLLHLWHSLSDATIVRVRNDAVNLEGVRKIISNDESFLLGLACAEFSESLRVAANSVTRLSARCEDSALRSFHLAFLEFADSGRDPNGWALSGPKETDSKLKKMERYVTFTATLYREMEELTVLENSLRKALNHADGNSVGSKDQQKLYELQQKIFWQKQEVKDLKERSLWSRSFDNVVVLLVRFSFTVLARIKVVFGIGHHMPCLSRTLSASATVYPSDQNPNGFVYESLEEEDSKLEEEAVNGFFEANSKLLRPPESTLGAAGLALHYANLIIVMEKMIKSPHLVGVDARDDLYGMLPRSIRWGLRGRLRGVGFCASDPLLAGEWRDALGRILGWLSPLAHNMIKWQSERSFEQHNLVPKTNVLLLQTLFFANKDKTEAAITELLVGLNYIWRFEREMTAKALFECANSNGLLLKLNKSSQ

SEQ ID NO: 57821 - protein, 320 aa, Glycine max
  peptide (1)..(320): Ceres Seq. ID no. 15168432
MERYVTFTATLYREMEELTVLENSLRKALNHADGNSVGSKDQQKLYELQQKIFWQKQEVKDLKERSLWSRSFDNVVVLLVRFSFTVLARIKVVFGIGHHMPCLSRTLSASATVYPSDQNPNGFVYESLEEEDSKLEEEAVNGFFEANSKLLRPPESTLGAAGLALHYANLIIVMEKMIKSPHLVGVDARDDLYGMLPRSIRWGLRGRLRGVGFCASDPLLAGEWRDALGRILGWLSPLAHNMIKWQSERSFEQHNLVPKTNVLLLQTLFFANKDKTEAAITELLVGLNYIWRFEREMTAKALFECANSNGLLLKLNKSSQ

SEQ ID NO: 57822 - DNA, 881 bp, Glycine max
  misc_feature (1)..(881): Ceres Seq. ID no. 15168573
atttccattagagagaaaatagagatcaagcgcagacatgggaacttaacaaaggaagaaacgcgaattgatgatggaggtcaccaaagacgaagctgcaaccccaggagcaggaggtgctcaacctcgcaatccaaatccaaatccaaatccaactccaaatccaaaccctaaccctaaccctcctcacaccaccagaggatctaaaggaaaatcgtgtaagggatgcacctactactcatcgcttcataaagccaagtccaaaaaccccacatgcgttggtttctccagaacactccagcaagtacccccctttgttgtcggagaatctgagttggaagcttccaaagagggccgcagccttaccaatttcaagtatgcatgtgttggatactctgtctacttagacaacaaagattcttcagctgactcgcaggataaaacagcaaaattgcccttttgcgttggtcttgaggtggtcttagaggagaaagcttcaaattcacatgcaggccatgttcctgctactcataaaactgaagatgaacatgctgctcctcaacctagaagatatatacctccaaatcatacgacagagttcttgaacaggtttcaaagaaatgcaggcctggtggcatctggtgttgccaaaaacttgaacagagtgggtaactatgtgaaagatctcctaaatgacattctaaactaattctacaatgcaccttgcatgggtggtacattcatgctcccttatgttgatttttcatttcaatcctcaccccctaatgtgcaaggcgcattatagaactactccgacattctatttaggcgaacgacggtgacaactgtagttcgtgtacgaaataaattcaattttacac

SEQ ID NO: 57823 - protein, 212 aa, Glycine max
  peptide (1)..(212): Ceres Seq. ID no. 15168574
MMEVTKDEAATPGAGGAQPRNPNPNPNPTPNPNPNPNPPHTTRGSKGKSCKGCTYYSSLHKAKSKNPTCVGFSRTLQQVPPFVVGESELEASKEGRSLTNFKYACVGYSVYLDNKDSSADSQDKTAKLPFCVGLEVVLEEKASNSHAGHVPATHKTEDEHAAPQPRRYIPPNHTTEFLNRFQRNAGLVASGVAKNLNRVGNYVKDLLNDILN

SEQ ID NO: 57824 - protein, 211 aa, Glycine max
  peptide (1)..(211): Ceres Seq. ID no. 15168575
MEVTKDEAATPGAGGAQPRNPNPNPNPTPNPNPNPNPPHTTRGSKGKSCKGCTYYSSLHKAKSKNPTCVGFSRTLQQVPPFVVGESELEASKEGRSLTNFKYACVGYSVYLDNKDSSADSQDKTAKLPFCVGLEVVLEEKASNSHAGHVPATHKTEDEHAAPQPRRYIPPNHTTEFLNRFQRNAGLVASGVAKNLNRVGNYVKDLLNDILN

SEQ ID NO: 57825 - DNA, 945 bp, Glycine max
  misc_feature (1)..(945): Ceres Seq. ID no. 15176643
ataaaatattaattatttagttaaaaggccaatcctttattcacaatggctgaggaacaaactactcaagttgccgaactcggtgaagaacaaaagaacttccaagctcaattcaagcttttcggtaagttcgactactccgaaatcaaggttgaagatgtctgcttcaaggattacatcgccgtcagcaacatcaagtcccaagtcttcatcccccacactgctggtagatggcaaatcaagaaattcagaaaggcccaatgccccatcgtcgaaagactcattggctctatcatgttccacggaagaaacactggtaagaagaacctcgccatcagaatcgtcaagcacgctttcgaaatcatccacatcatgactggcaagaaccccatccaagtcttcatcgaagccgtccaaaacggtggtgccagagaaggctctaccagaatcggtactggtggtgtcgtcagaagacaagccgtcgacgtttccccccttaagagagctaacctctccatctacttcatgaccgtcggtgccagaaaggccgctttcaagagcatgaagtccatcgctgaatgcttggctgatgaaatcatgaactgcgccaagaactcccccaactccactgccatcagaaagagagatgataccgaaagcgtgcttgacgattctgatggcgaggttcttcttaccagtgtttcttccgtggaacatgatagagccaatgagtctttcgacgatggggcattgggcctttctgaatttcttgatttgcctcttctgtgtaggggatggagttttttggattcttatatacttgcagatgtactcgggctttattgattctgatagcagacattttccctccatttttcatccatggttctcgagtgtttgaaccccccttccttttctgctttgaattaaagattcgtgttttat

SEQ ID NO: 57826 - protein, 266 aa, Glycine max
  peptide (1)..(266): Ceres Seq. ID no. 15176644
MAEEQTTQVAELGEEQKNFQAQFKLFGKFDYSEIKVEDVCFKDYIAVSNIKSQVFIPHTAGRWQIKKFRKAQCPIVERLIGSIMFHGRNTGKKNLAIRIVKHAFEIIHIMTGKNPIQVFIEAVQNGGAREGSTRIGTGGVVRRQAVDVSPLKRANLSIYFMTVGARKAAFKSMKSIAECLADEIMNCAKNSPNSTAIRKRDDTESVLDDSDGEVLLTSVSSVEHDRANESFDDGALGLSEFLDLPLLCRGWSFLDSYILADVLGLY

SEQ ID NO: 57827 - protein, 183 aa, Glycine max
  peptide (1)..(183): Ceres Seq. ID no. 15176645
MFHGRNTGKKNLAIRIVKHAFEIIHIMTGKNPIQVFIEAVQNGGAREGSTRIGTGGVVRRQAVDVSPLKRANLSIYFMTVGARKAAFKSMKSIAECLADEIMNCAKNSPNSTAIRKRDDTESVLDDSDGEVLLTSVSSVEHDRANESFDDGALGLSEFLDLPLLCRGWSFLDSYILADVLGLY

SEQ ID NO: 57828 - protein, 157 aa, Glycine max
  peptide (1)..(157): Ceres Seq. ID no. 15176646
MTGKNPIQVFIEAVQNGGAREGSTRIGTGGVVRRQAVDVSPLKRANLSIYFMTVGARKAAFKSMKSIAECLADEIMNCAKNSPNSTAIRKRDDTESVLDDSDGEVLLTSVSSVEHDRANESFDDGALGLSEFLDLPLLCRGWSFLDSYILADVLGLY

SEQ ID NO: 57829 - DNA, 1295 bp, Glycine max
  misc_feature (1)..(1295): Ceres Seq. ID no. 15168545
gttggttaacggatctagaatttgttgaagcaggaaccgctccatctcgccccgcgccaaaccatttgatttcaaagcggagatttagggactgcaaattctctgcttctctacacatggagccggtgtcgcgtgctaatttcttttcattccaaagattttggctaccgtttcagggacagggagggatgaggcagcaagttgatccctcggctcacacaatcaagtcccatggagcatcacttgcaagaaaacacgctcgtgattggcttatattgctgcttctcatagtgatagagattgtcctttttgtcattcatccatttaaacgctttgtgggaagggacatgatggaggaccttagatatcctatgaaagaaaacacggtgcctgtatgggctgttcctttatatgcggttctgttgccaatggccgttttccttctcttctatatgcgcaggagagatgtttatgatttgcaccacagtgttctaggtttgttatttgctgttctgataactggggtcttcaccgatgcaataaaaaatgcagttggccggcctcgcccagacttctattggcgttgcttccccgatggggtagagaattatgatagttggggaggtgtggtatgtcatggcaatgctagcgatataaaagaaggacacaagagtttcccaagcggccatacatcatggtcctttgcaggtctaggttttctgtctctgtacctatcggggaagattaaagcttttgatcgcaaagggcacgtggcaaaattatgcattgtgtttcttcctctacttgttgcttgcctagttgcaatctctcgagtggatgactattggcaccattggcaagatgtgtttgccggaggcattctagggcttgttgtggcaaccttttgttatatgcagttcttccctgcgccctataatgatgaaggatggggtccatatgcatatttccgggcaatggaggaatcacgagcgaatgcaaatattaatcgggaattaccagttgggcaggccatggaggatcgggtaacgaatcaagaaccaaggagaaatggtgataccacctttaccccttactcttaccgtagcccaaccttggaagccatggaaatgggacagaagtaatagtcttctatagcactaatcttctccctagctacctagttccttacttttgtgtatacttatgagcttctctacacggcaaccactagatttagctaattgtgcagcttctgtttcttcttgcattattattattattggcactgccactgt

SEQ ID NO: 57830 - protein, 379 aa, Glycine max
  peptide (1)..(379): Ceres Seq. ID no. 15168546
WLTDLEFVEAGTAPSRPAPNHLISKRRFRDCKFSASLHMEPVSRANFFSFQRFWLPFQGQGGMRQQVDPSAHTIKSHGASLARKHARDWLILLLLIVIEIVLFVIHPFKRFVGRDMMEDLRYPMKENTVPVWAVPLYAVLLPMAVFLLFYMRRRDVYDLHHSVLGLLFAVLITGVFTDAIKNAVGRPRPDFYWRCFPDGVENYDSWGGVVCHGNASDIKEGHKSFPSGHTSWSFAGLGFLSLYLSGKIKAFDRKGHVAKLCIVFLPLLVACLVAISRVDDYWHHWQDVFAGGILGLVVATFCYMQFFPAPYNDEGWGPYAYFRAMEESRANANINRELPVGQAMEDRVTNQEPRRNGDTTFTPYSYRSPTLEAMEMGQK

SEQ ID NO: 57831 - protein, 341 aa, Glycine max
  peptide (1)..(341): Ceres Seq. ID no. 15168547
MEPVSRANFFSFQRFWLPFQGQGGMRQQVDPSAHTIKSHGASLARKHARDWLILLLLIVIEIVLFVIHPFKRFVGRDMMEDLRYPMKENTVPVWAVPLYAVLLPMAVFLLFYMRRRDVYDLHHSVLGLLFAVLITGVFTDAIKNAVGRPRPDFYWRCFPDGVENYDSWGGVVCHGNASDIKEGHKSFPSGHTSWSFAGLGFLSLYLSGKIKAFDRKGHVAKLCIVFLPLLVACLVAISRVDDYWHHWQDVFAGGILGLVVATFCYMQFFPAPYNDEGWGPYAYFRAMEESRANANINRELPVGQAMEDRVTNQEPRRNGDTTFTPYSYRSPTLEAMEMGQK

SEQ ID NO: 57832 - protein, 317 aa, Glycine max
  peptide (1)..(317): Ceres Seq. ID no. 15168548
MRQQVDPSAHTIKSHGASLARKHARDWLILLLLIVIEIVLFVIHPFKRFVGRDMMEDLRYPMKENTVPVWAVPLYAVLLPMAVFLLFYMRRRDVYDLHHSVLGLLFAVLITGVFTDAIKNAVGRPRPDFYWRCFPDGVENYDSWGGVVCHGNASDIKEGHKSFPSGHTSWSFAGLGFLSLYLSGKIKAFDRKGHVAKLCIVFLPLLVACLVAISRVDDYWHHWQDVFAGGILGLVVATFCYMQFFPAPYNDEGWGPYAYFRAMEESRANANINRELPVGQAMEDRVTNQEPRRNGDTTFTPYSYRSPTLEAMEMGQK

SEQ ID NO: 57833 - DNA, 1249 bp, Glycine max
  misc_feature (1)..(1249): Ceres Seq. ID no. 15171766
aaaaccataaccgttgttgaacctccgaaaaacaagactccctccaagaagaaaaatgctgaaagccgtggcgccactcttcagccgtagccacaagcagcagtctcggtccttcaaggagtactacgcagagtggttcaacaccctcaagaacaaccacctccccctcctccgccactccatctccggcgactccctcaccattctctccacccacgtcgagatgctccaccagcacttccagtcctactaccacgccctcgacgccgccgccacctccgacgcctcccagctcctctcccaggagtggcgcaactccctcgagaaacccctcctctggctcggcgacctccacccctccctcttcaccaacctcgcccgctccttcctccaagacgaacattcccccgaccacaccgacgacgaagatgattccgatccccaccaccaccaccaccaccaccaccactttcccctccccgaacgcccctggcaggtggcgatggcctggcgcaacccttcggaggctctaactgcccgcatggaccagatcgagtgcggcctccgcgtgattgtaccggccctttcggaccgcctgaaacacgcggaggacgcattcgtgggccgcgtaatggggaactggttccgctgccgtgaccatcatcacaagggcagcggagcctcgtccaaggttgctgtgggggccgatgtgaaggcccacatggaggagctcgtgagcgtgttcctctacgcaaaccgcctcaggaggaacgtgcttgtggacatacttagtgccaccaccgtttaccaggccgcgctgtttcttgaagggttggcccagtttcttattgggttcagggaccatgggttggtgaacgccgttgaacactgcaaggccttgcctctcgcaaacaataaacagtgtcgtcctcgctgccattgatgatgataatgcaacagtgtatgtatctatttcgttcctctcattgtgattgtgtggaacttttcgtggaaaaatactgtggaatggatggttactgtgttttaggtttagcattgatattctttacaattttgttgtttgtatttgataagatttttaggtttggaagatgacactggagacttaatttctgtgtcaatggattaattacgttttgtatttgtggagggaataagtgttagtgaacactgaacagtttcttcaattgagggaaatttctgttaacaatgttgatggatttgcagt

SEQ ID NO: 57834 - protein, 295 aa, Glycine max
  peptide (1)..(295): Ceres Seq. ID no. 15171767
MLKAVAPLFSRSHKQQSRSFKEYYAEWFNTLKNNHLPLLRHSISGDSLTILSTHVEMLHQHFQSYYHALDAAATSDASQLLSQEWRNSLEKPLLWLGDLHPSLFTNLARSFLQDEHSPDHTDDEDDSDPHHHHHHHHHFPLPERPWQVAMAWRNPSEALTARMDQIECGLRVIVPALSDRLKHAEDAFVGRVMGNWFRCRDHHHKGSGASSKVAVGADVKAHMEELVSVFLYANRLRRNVLVDILSATTVYQAALFLEGLAQFLIGFRDHGLVNAVEHCKALPLANNKQCRPRCH

SEQ ID NO: 57835 - protein, 239 aa, Glycine max
  peptide (1)..(239): Ceres Seq. ID no. 15171768
MLHQHFQSYYHALDAAATSDASQLLSQEWRNSLEKPLLWLGDLHPSLFTNLARSFLQDEHSPDHTDDEDDSDPHHHHHHHHHFPLPERPWQVAMAWRNPSEALTARMDQIECGLRVIVPALSDRLKHAEDAFVGRVMGNWFRCRDHHHKGSGASSKVAVGADVKAHMEELVSVFLYANRLRRNVLVDILSATTVYQAALFLEGLAQFLIGFRDHGLVNAVEHCKALPLANNKQCRPRCH

SEQ ID NO: 57836 - DNA, 1300 bp, Glycine max
  misc_feature (1)..(1300): Ceres Seq. ID no. 15168591
gatatattaaaattagtcgattaaaattgaaatttccacaaacgtaacactcgaagaactatcctccttcttcttcgtttctatggtcactacttgtcggcactcatgtccaaaccaaaacacttgtaatttaaatccaacgttgctctctgttaacctataattccccgaagaaatctccgcaaacatgaaaacagagcatcatagaagaccttcaccttcgttaacacctatactcgtcaaaagagcaaaacccgccgcgtattttattctccttttgctaacgtacaccttaggttacttatcccaccacccttcttccacttcattaccactctcaccatcatcgtcgccatcgccatcgtcgttagaacctattattcggttctcaattaacaccaccgaggtgaacccgttccgagtcacaactcgctgcgccgatccaattccgccggagtccgttcgccggacgctcgttgaccgcctcttcaacggcacctcgccgtttgaaaactttccgccgccgcatgcggcggcaaagctccggcgaacgactaaagtcaagggatggggctccaccggcaaggttttcgagaatctcatccgccgggtgcggccgcgaaccgtcgtggaagttggcacgttcctcggcgcgtcggcgatacacatggccgagttgactcggcgactcggcctcgaaactcagatcctctgcgtcgacgactttcgaggctgggccgggttcagggaccggttcagtaaaataccgatgcaaaacggtgacgtttggctcttttaccagttccttcagaatgtggttacttttaaccagaccgggtcggtaatgcccgttccattttcgagcgggtcgaccctgatgttgttttgcgagtggggggtgtttgcggatttgattgagatcgatgctggccacgattttttatcggcctgggccgatattaatcgtggatttcggatcctccaacccggtggggttatattcgggcacgattatttcaccgcagcggataatagaggtgttcggagagccgttgatttgtttgccaaagtcaacaatcttaaggtaaatgttgatggtcaacattgggttatttattcttcctaatgtttagaatttcatgtatcgtgtatagtggaaaacatctgtttattgaataagttgataggattctttgggtgtataaattatacaatttgaaggaaggaaagacttgcggactttttgttatccattgtcctttcagtggtcaataattcaatttgaagcttccgtttcagt

SEQ ID NO: 57837 - protein, 312 aa, Glycine max
  peptide (1)..(312): Ceres Seq. ID no. 15168592
MKTEHHRRPSPSLTPILVKRAKPAAYFILLLLTYTLGYLSHHPSSTSLPLSPSSSPSPSSLEPIIRFSINTTEVNPFRVTTRCADPIPPESVRRTLVDRLFNGTSPFENFPPPHAAAKLRRTTKVKGWGSTGKVFENLIRRVRPRTVVEVGTFLGASAIHMAELTRRLGLETQILCVDDFRGWAGFRDRFSKIPMQNGDVWLFYQFLQNVVTFNQTGSVMPVPFSSGSTLMLFCEWGVFADLIEIDAGHDFLSAWADINRGFRILQPGGVIFGHDYFTAADNRGVRRAVDLFAKVNNLKVNVDGQHWVIYSS

SEQ ID NO: 57838 - DNA, 963 bp, Glycine max
  misc_feature (1)..(963): Ceres Seq. ID no. 13594304
agaacacctaatcgaaaaatttttacggcactgagtgaggtggttcactgtctctgcctctttctcttctttgttcctagaaacaaaccatcatcttcttagatctataccaacgtcgaaggaaataatctcttgccaaaagcaaaaccctaaacacttcctccgagtatttaccagaaccatagtttttaaaagctgagagcgtcaaaggcacagctgtcgcgtgggaagatcccaatgtgtgctagaaattaaaaagatcattgacaccattgccgaagaaggggtctgtgacctcactcgcgtccctcttcccagtagaggaggtgcagaaggtggccaagcgcattgaagacaccattgccgacaagcagagcgaaattaaccgcgtacgaggttttgtcgtcgacaaaacagcctcatcaacctcgtccacaagctccttgaacagctctcctacgacatcatggttccgtttgggaaagcaacattcttcccaggtcgtttgattcacaccaatgagttcctggttcttttgggagaaggatattatgctgagagaacttcgaagcaaaccgttgagattttacagcgaagagggaagtccttggattcgcgggttgattctcttgaggccaatatcaaggaccctgaagcagaggcttcatttctcaatgccacggcttcatttttggttgctaggttcttttgggagaagggtattatgttgaatttttaatgctgaaatgctgaatttgttctatgttaattcttccattaaaaatattgggaattttgattttttatctcaaacgtgtagagagactggagagcctgtgaccgtcaatttttatgtgtacaatggaagcaatttttcatgttaattctgcagttcaattcaacttcaaaaaaaaaaaaaaaaaagcttatcgataccgtcgacctcgagggggggcccggtac

SEQ ID NO: 57839 - protein, 90 aa, Glycine max
  peptide (1)..(90): Ceres Seq. ID no. 13594305
MVPFGKATFFPGRLIHTNEFLVLLGEGYYAERTSKQTVEILQRRGKSLDSRVDSLEANIKDPEAEASFLNATASFLVARFFWEKGIMLNF

SEQ ID NO: 57840 - protein, 70 aa, Glycine max
  peptide (1)..(70): Ceres Seq. ID no. 13594306
MSSWFFWEKDIMLRELRSKPLRFYSEEGSPWIRGLILLRPISRTLKQRLHFSMPRLHFWLLGSFGRRVLC

SEQ ID NO: 57841 - protein, 59 aa, Glycine max
  peptide (1)..(59): Ceres Seq. ID no. 13594307
MLRELRSKPLRFYSEEGSPWIRGLILLRPISRTLKQRLHFSMPRLHFWLLGSFGRRVLC

SEQ ID NO: 57842 - DNA, 1095 bp, Glycine max
  misc_feature (1)..(1095): Ceres Seq. ID no. 14313959
acaaactcacttcacctgtttcgtgcaaaaacaattcctgttgtctctccacagtccctccctcacattctctctctagctttttagagagagagagagagaagaagaagaagacatggagatcaagaagaggtttggggtgttgatgtgtgcagaggattcggagtacgtgaaaaaagtgtacggagggtattctggggttttcgtgagaatgctggcggaggagggagagacatgggacgtgtacaaggtggcgcgtggggagtttcctgacgaagatgatttgggtctctatgatgggtttgtgatcactggcagctgcagtgacgcacatggcaacgacacatgggtcagtgatcttctcaacttgcttcgcaaactcgattccatcaacaccaagatcctcggcatttgctttggccaccagatacttgggcgtgcattgggagggaaggtgactcgttctactactggatgggatcttggtgtcagaaccataacattgtcaccatctttgcgatttgctttgtcttctcttgatcttccatcaagactttccattatcgaatgccacagggatgagatccgagagctaccagccaaggcagaggttattgcttggtcggataagactggaattgaaatgttcaggtatggagatcacattatgggaatccaaggtcaccctgagtactccaaagacattcttttgcaccttattgaccgtctcattcaacgcaattacatcatagatgcttttggtaaacaagcaagggagagggctgcgttgtgggagccagatagggaggcttggaagaaactctgtgtcacttttttgaagggtagattgtgacataaaaatggcattgaaaagaggaatttcagttctgtaaagaagcgataatatttaaaagtagtcgtatgggaggggtctatgcatagaagttataggttggtagcactaatgtggtgtgttaattagttggctttgttaggttgccagccattaatgttgataggtgctttctatgtaagctcaactatatcaatggtcaaataattagagcaataaaaagtttcagtgttctcccgttt

SEQ ID NO: 57843 - protein, 245 aa, Glycine max
  peptide (1)..(245): Ceres Seq. ID no. 14313960
MEIKKRFGVLMCAEDSEYVKKVYGGYSGVFVRMLAEEGETWDVYKVARGEFPDEDDLGLYDGFVITGSCSDAHGNDTWVSDLLNLLRKLDSINTKILGICFGHQILGRALGGKVTRSTTGWDLGVRTITLSPSLRFALSSLDLPSRLSIIECHRDEIRELPAKAEVIAWSDKTGIEMFRYGDHIMGIQGHPEYSKDILLHLIDRLIQRNYIIDAFGKQARERAALWEPDREAWKKLCVTFLKGRL

SEQ ID NO: 57844 - protein, 235 aa, Glycine max
  peptide (1)..(235): Ceres Seq. ID no. 14313961
MCAEDSEYVKKVYGGYSGVFVRMLAEEGETWDVYKVARGEFPDEDDLGLYDGFVITGSCSDAHGNDTWVSDLLNLLRKLDSINTKILGICFGHQILGRALGGKVTRSTTGWDLGVRTITLSPSLRFALSSLDLPSRLSIIECHRDEIRELPAKAEVIAWSDKTGIEMFRYGDHIMGIQGHPEYSKDILLHLIDRLIQRNYIIDAFGKQARERAALWEPDREAWKKLCVTFLKGRL

SEQ ID NO: 57845 - protein, 213 aa, Glycine max
  peptide (1)..(213): Ceres Seq. ID no. 14313962
MLAEEGETWDVYKVARGEFPDEDDLGLYDGFVITGSCSDAHGNDTWVSDLLNLLRKLDSINTKILGICFGHQILGRALGGKVTRSTTGWDLGVRTITLSPSLRFALSSLDLPSRLSIIECHRDEIRELPAKAEVIAWSDKTGIEMFRYGDHIMGIQGHPEYSKDILLHLIDRLIQRNYIIDAFGKQARERAALWEPDREAWKKLCVTFLKGRL

SEQ ID NO: 57846 - DNA, 2105 bp, Glycine max
  misc_feature (1)..(2105): Ceres Seq. ID no. 15171762
attcaaaaactcgcaaaagaaacccaaaatctcttcggctctctctcttttccatatccatatatatccccaaaccctaccgttaggttccccaattcaacaccccgtggaccggtgcgctgcttctttgttcgtacggtttccgtcgattgcctccgaaacgatgtcgtatcgcccaagcgggaactccaggaccgaggtccgccgcaaccggtacaaggtggcggtggacgcggacgaaggtcggagacgacgagaggacacgatggtggagatccgcaagaaccgcagagaagagagtttgcagaagaagaggcgcgaaggattccaacctcagcagatacctgcgtccgttcactctagtttggtagagaagaagttggaacacctaccatctatggttactggtgtttggactgatgataataacctgcagctcgaggcgacgacgcagttccggaagctgctttcgattgaacgtagtccgccgattgaggaggttatacagactggtgtggtttctcgctttgttgagtttctcatgagggaagactttccacagttgcagtttgaggcagcctgggctttgacaaatatagcttctgggacgtctgaaaacaccaaggttgtcattgatcacggggctgtcccaattttcgtgaagctacttgcttctcctagtgatgatgtccgtgaacaggcagtgtgggcattaggcaatgtcgcgggggattcacctagatgtcgtgatcttgttctcagtcatggggctttgcttcctttgttggcacaattaaatgaacatgccaagctttctatgcttagaaatgctacctggacactttcaaacttctgcaggggcaagccacagcctccttttgatcaggttaaacctgcacttcctgctcttgcccgtcttatccattcaaacgatgaagaagtattgactgatgcatgttgggcactgtcatatctttctgatggcacaaatgataaaattcaagctgtaattgaagctggtgtttgtccccgacttgttgagctgctgctgcacccatccccttcagtgctaattcctgctcttcgaactgttggaaatattgtcactggagatgatatgcagactcaggttatcatcaatcaccaggctcttccttgccttcttaatctgttgaccaataattataaaaaaagcatcaagaaggaagcttgttggaccatatccaatatcacagctggtaataagcagcagattcaggctgtgattgaggctaatctaattgctcctttggtcaatctgcttcaaaatgctgagtttgatatcaagaaagaagctgcttgggctatctcaaatgctacatccggtggttctcatgaacaaatcaagttcctagtaagccaagggtgtattaagcccttgtgtgatcttctcatctgtcctgatcctagaattgttacagtttgtctggaaggccttgaaaacatcttgaaggtgggagaagctgataaaaacataggaaatactggtgatgtgaatctatatgcccaaatgattgatgaagctgagggattggagaaaattgagaacctccagagtcatgacaacacagagatttacgaaaaggcggtcaagattcttgagacatactggttggaggaggaagatgagactatgcctccaggggatgcttctcagtcagggttcaactttggtagcagtgacgctcctgctgtgccgtccggtggattcaactttaattagaagatattcatgctctactggggagttttggttggtctatctgtgaagtcctcctttatgacacgacagcagttgggggacaagtcaacgtcttgtcattgtcctaatgtccttgggttgtacgaggtccagcaagtaaatacatggttgctggactgccttgggtttttgcaatgcctgatatttcatatctcatggtgtaaaatgctttgtggctatatttttttgccaccgtagagaatactagagtcttctttctgccaagtgatcatttcatagaattaatgaatgctcagtctcgtgattttttttttcctttgttatatatgtcctagattggagc

SEQ ID NO: 57847 - protein, 586 aa, Glycine max
  peptide (1)..(586): Ceres Seq. ID no. 15171763
FKNSQKKPKISSALSLFHIHIYPQTLPLGSPIQHPVDRCAASLFVRFPSIASETMSYRPSGNSRTEVRRNRYKVAVDADEGRRRREDTMVEIRKNRREESLQKKRREGFQPQQIPASVHSSLVEKKLEHLPSMVTGVWTDDNNLQLEATTQFRKLLSIERSPPIEEVIQTGVVSRFVEFLMREDFPQLQFEAAWALTNIASGTSENTKVVIDHGAVPIFVKLLASPSDDVREQAVWALGNVAGDSPRCRDLVLSHGALLPLLAQLNEHAKLSMLRNATWTLSNFCRGKPQPPFDQVKPALPALARLIHSNDEEVLTDACWALSYLSDGTNDKIQAVIEAGVCPRLVELLLHPSPSVLIPALRTVGNIVTGDDMQTQVIINHQALPCLLNLLTNNYKKSIKKEACWTISNITAGNKQQIQAVIEANLIAPLVNLLQNAEFDIKKEAAWAISNATSGGSHEQIKFLVSQGCIKPLCDLLICPDPRIVTVCLEGLENILKVGEADKNIGNTGDVNLYAQMIDEAEGLEKIENLQSHDNTEIYEKAVKILETYWLEEEDETMPPGDASQSGFNFGSSDAPAVPSGGFNFN

SEQ ID NO: 57848 - protein, 532 aa, Glycine max
  peptide (1)..(532): Ceres Seq. ID no. 15171764
MSYRPSGNSRTEVRRNRYKVAVDADEGRRRREDTMVEIRKNRREESLQKKRREGFQPQQIPASVHSSLVEKKLEHLPSMVTGVWTDDNNLQLEATTQFRKLLSIERSPPIEEVIQTGVVSRFVEFLMREDFPQLQFEAAWALTNIASGTSENTKVVIDHGAVPIFVKLLASPSDDVREQAVWALGNVAGDSPRCRDLVLSHGALLPLLAQLNEHAKLSMLRNATWTLSNFCRGKPQPPFDQVKPALPALARLIHSNDEEVLTDACWALSYLSDGTNDKIQAVIEAGVCPRLVELLLHPSPSVLIPALRTVGNIVTGDDMQTQVIINHQALPCLLNLLTNNYKKSIKKEACWTISNITAGNKQQIQAVIEANLIAPLVNLLQNAEFDIKKEAAWAISNATSGGSHEQIKFLVSQGCIKPLCDLLICPDPRIVTVCLEGLENILKVGEADKNIGNTGDVNLYAQMIDEAEGLEKIENLQSHDNTEIYEKAVKILETYWLEEEDETMPPGDASQSGFNFGSSDAPAVPSGGFNFN

SEQ ID NO: 57849 - protein, 498 aa, Glycine max
  peptide (1)..(498): Ceres Seq. ID no. 15171765
MVEIRKNRREESLQKKRREGFQPQQIPASVHSSLVEKKLEHLPSMVTGVWTDDNNLQLEATTQFRKLLSIERSPPIEEVIQTGVVSRFVEFLMREDFPQLQFEAAWALTNIASGTSENTKVVIDHGAVPIFVKLLASPSDDVREQAVWALGNVAGDSPRCRDLVLSHGALLPLLAQLNEHAKLSMLRNATWTLSNFCRGKPQPPFDQVKPALPALARLIHSNDEEVLTDACWALSYLSDGTNDKIQAVIEAGVCPRLVELLLHPSPSVLIPALRTVGNIVTGDDMQTQVIINHQALPCLLNLLTNNYKKSIKKEACWTISNITAGNKQQIQAVIEANLIAPLVNLLQNAEFDIKKEAAWAISNATSGGSHEQIKFLVSQGCIKPLCDLLICPDPRIVTVCLEGLENILKVGEADKNIGNTGDVNLYAQMIDEAEGLEKIENLQSHDNTEIYEKAVKILETYWLEEEDETMPPGDASQSGFNFGSSDAPAVPSGGFNFN

SEQ ID NO: 57850 - DNA, 1553 bp, Glycine max
  misc_feature (1)..(1553): Ceres Seq. ID no. 13639663
gaatcagaatcacctggcttggcctagcgcttattctctcgcattccgtggagatctagtgcttctgctgcaagacctcgctgaaaattagggtttcgattcggaggtagacgaagatgttcggaagggctccgaagaaaagcgacagcaccaggtactacgaaatcctcggcgtttccaagaacgcttcgccggatgacttaaagaaggcttacaagaaagccgccattaagaaccatcctgacaaaggcggggatcccgagaagtttaaagagcttgctcaagcctatgaggttctgagtgaccctgagaagcgcgagatttatgatacatatggagaagatgctcttaaggaaggaatgggtggtggtggcggtggccatgatccatttgatatcttcagttcattctttggtggaagtccgtttgggtcaggtggtagcagtagaggacggaggcagaggcggggagaagatgtggttcatcccctgaaggtctctctggaggatctttacctcggaacttcaaagaaactctctctttcacgaaacgtgttgtgctcaaaatgcaatgggaagggctcaaagtctggggcttcaatgacctgtgctggttgccagggtactggcatgaaggtgtctattaggcaccttggtccttctatgattcagcaaatgcagcatccttgcaatgagtgtaagggtactggagagacaatcaatgacagagacaggtgccaacagtgcaagggagagaaggttgttcaggagaagaaagtacttgaagttgttgtggagaagggaatgcagaatggacagaagattacattccctggtgaagctgatgaagcgcctgatacagtcacaggggatattgtctttgtcctacaacagaaggaacacccaaagttcaaacgaaaggcagatgacctttttgtagaacacacattgtctcttactgaggctctatgtggcttccagtttgtgctgactcacctggatagcaggcagcttctgatcaaatcaaaccctggggaggttgttaagcctgagtcattcaaggcaataaatgatgagggaatgccaaactaccagaggcacttcctgaagggaaagctttacattcatttctcagtggaatttcctgataccctgagtcttgatcaggtgaaggctttggaggctgttctgccatcaaagccaacatcacagttgtcagacatggagctggatgagtgtgaggagaccacactccatgatgtgaacatggaggaagagacaaggaggaggcaacaagctcagcaggaggcatatgatgaggatgaggatatgcatggtggtgctcagagagtgcagtgcgctcagcagtaatgagccacaggagcgctagagtagacatgtgatgatctcgatcatcttattttttagccgtttgtgcgggtctaaacatatttagtgtttgatatctcagacgattttagcaaccaaacactgtagcattattgtccaagaaattatttcacaagacatcctaatacaattttttttccttct

SEQ ID NO: 57851 - protein, 417 aa, Glycine max
  peptide (1)..(417): Ceres Seq. ID no. 13639664
MFGRAPKKSDSTRYYEILGVSKNASPDDLKKAYKKAAIKNHPDKGGDPEKFKELAQAYEVLSDPEKREIYDTYGEDALKEGMGGGGGGHDPFDIFSSFFGGSPFGSGGSSRGRRQRRGEDVVHPLKVSLEDLYLGTSKKLSLSRNVLCSKCNGKGSKSGASMTCAGCQGTGMKVSIRHLGPSMIQQMQHPCNECKGTGETINDRDRCQQCKGEKVVQEKKVLEVVVEKGMQNGQKITFPGEADEAPDTVTGDIVFVLQQKEHPKFKRKADDLFVEHTLSLTEALCGFQFVLTHLDSRQLLIKSNPGEVVKPESFKAINDEGMPNYQRHFLKGKLYIHFSVEFPDTLSLDQVKALEAVLPSKPTSQLSDMELDECEETTLHDVNMEEETRRRQQAQQEAYDEDEDMHGGAQRVQCAQQ

SEQ ID NO: 57852 - protein, 336 aa, Glycine max
  peptide (1)..(336): Ceres Seq. ID no. 13639665
MGGGGGGHDPFDIFSSFFGGSPFGSGGSSRGRRQRRGEDVVHPLKVSLEDLYLGTSKKLSLSRNVLCSKCNGKGSKSGASMTCAGCQGTGMKVSIRHLGPSMIQQMQHPCNECKGTGETINDRDRCQQCKGEKVVQEKKVLEVVVEKGMQNGQKITFPGEADEAPDTVTGDIVFVLQQKEHPKFKRKADDLFVEHTLSLTEALCGFQFVLTHLDSRQLLIKSNPGEVVKPESFKAINDEGMPNYQRHFLKGKLYIHFSVEFPDTLSLDQVKALEAVLPSKPTSQLSDMELDECEETTLHDVNMEEETRRRQQAQQEAYDEDEDMHGGAQRVQCAQQ

SEQ ID NO: 57853 - protein, 256 aa, Glycine max
  peptide (1)..(256): Ceres Seq. ID no. 13639666
MTCAGCQGTGMKVSIRHLGPSMIQQMQHPCNECKGTGETINDRDRCQQCKGEKVVQEKKVLEVVVEKGMQNGQKITFPGEADEAPDTVTGDIVFVLQQKEHPKFKRKADDLFVEHTLSLTEALCGFQFVLTHLDSRQLLIKSNPGEVVKPESFKAINDEGMPNYQRHFLKGKLYIHFSVEFPDTLSLDQVKALEAVLPSKPTSQLSDMELDECEETTLHDVNMEEETRRRQQAQQEAYDEDEDMHGGAQRVQCAQQ

SEQ ID NO: 57854 - DNA, 1277 bp, Glycine max
  misc_feature (1)..(1277): Ceres Seq. ID no. 14316261
agcctcatcactcactctaatctaacgatgaatctgaataccaagctttctcactcataagttcccactccctctcttatcatttatcaaacaaatttttcatctttccccacttgttggattaatggctgcctcagctttgtcactaacatccccattccatttcagaaaaccccacaacagggtttcacctctcaatgctcatcctctcattctcatccaaaagggtaaacaatctcttaaatcaaacttctcattctcaaccctgaatgcttccccccacttcagaccccctattgccattgctccttccacactgaccctaacaagagcttcttcctctgatgaatgctttgaccctgctggtgaagcccaaaggttgctgctttctgaggaaaaaccagttaattttgctttctgggtcatattttgggcctctttgtccctggcttggtttgctgtttcaagggatgctaatgctgctgttgaatcctccatcaaagcctctggctttggcttcaacattgccaattcgttgaggaaattgggttggcctgattgggttgtggtgttcacccttgccactcttcctgtgcttgagcttcgtggggctatacctgttggttactggatgcaacttaaccctgtaactttaacagtgttatctattctggggaacatggtccctgtgccattcatcgtgctctaccttaaaaaaattgcgtctttcgttgctgcgaggagcccttctgcgtctcgattccttgacatgctgttcgagaatgccaaagagaaggctggtccagtggaggagtttcagtggcttggtctgatgctctttgtggctgttccttttcctggaacaggagcatggaccggagcctttatagcatccattcttgatatgccattttgggctgctgtgtctgctaatttctttggtgttgtatttgctgggttgctagtaaatttgttagtgaaccttggtctgaagtatgccatcattactggtgtcatccttttctttgtttccacattcatgtggagtgtccttagaaatcttaaaaaaggtttgagctcgtcaaattgacgtgaaatgtctgattttcctttaccaacatgatgacaattgttagttttgttgttcattctcttggttttcattttcttatattttcataattgagcatcctagttcagtgatatgtaaaaatgaaaaggcttatgtcttgtatataccctttttctgatgttttaaaaatcatgggctgactgac

SEQ ID NO: 57855 - protein, 321 aa, Glycine max
  peptide (1)..(321): Ceres Seq. ID no. 14316262
MAASALSLTSPFHFRKPHNRVSPLNAHPLILIQKGKQSLKSNFSFSTLNASPHFRPPIAIAPSTLTLTRASSSDECFDPAGEAQRLLLSEEKPVNFAFWVIFWASLSLAWFAVSRDANAAVESSIKASGFGFNIANSLRKLGWPDWVVVFTLATLPVLELRGAIPVGYWMQLNPVTLTVLSILGNMVPVPFIVLYLKKIASFVAARSPSASRFLDMLFENAKEKAGPVEEFQWLGLMLFVAVPFPGTGAWTGAFIASILDMPFWAAVSANFFGVVFAGLLVNLLVNLGLKYAIITGVILFFVSTFMWSVLRNLKKGLSSSN

SEQ ID NO: 57856 - DNA, 1179 bp, Glycine max
  misc_feature (1)..(1179): Ceres Seq. ID no. 14316328
attttcatttccccactctgtttactccgtgtccgcagaagatggaaagtggattacctttgcttaattatctcttgcagcagactctcagaaccatttgcacttctcccaattcttccactccttctaagtgggtatatgctgtcttctggaggatattacctcgcaactttcctccaccaaggtgggaatttggaggaactgctcttgatctctccaaaggaaataaaaggaactggatccttgtctgggaagatgggttctgcgattttaacgaatgcgagcaaaggaagagtggtagtggttacttgaacggtagatttggagctgacgtattcttcaaaatgtcgcatgaggtttacaattatggagagggactcgtgggaaaagttgccgcagataatagtcacaaatgggtttacaatgagagtcacaatgagtgtgaatctagctatattgcttcatggaatgcttcagtcgaacctcaaccaaaggcgtgggagtttcagttcaattcaggcattcagagtatagtcataatcgccgtcagagaaggcgtagtgcaattgggttcttttaacaagatatcagaggacctgaatctggtgatcagcatacagaggcaattcagctaccttcagagcatacctggtgtgtttggtattcaaagaccatacctacctcttcaacatccatacattgtgaagccaagtttcatagaaaacaatgcaatgactctatatgatatggggtggaacaccaaccctcagaatggagcaccaggcccatctctttgttcaggttctccttctctaccactaccaaccatgccctgtagttttggagctttgctatcaaagttaccatctggaatcccaccctataattccactcaagtccttgatgcagggacacaaagcaccattgagagagtgaagatagaggattgtgaatttcatcctacccttgatgacgatcacaaaggaagaaaggtcggttccctgaacaagtagcatggatttggaattggaagattaattaattaagagacaggaaccactttgaccataatgactcctaaatcatagtcagtatgttaagaaatggttagttatttattttctttcacttggccacaatgtgtattgtggtatgtttattggtggccgacaacctatc

SEQ ID NO: 57857 - protein, 336 aa, Glycine max
  peptide (1)..(336): Ceres Seq. ID no. 14316329
FHFPTLFTPCPQKMESGLPLLNYLLQQTLRTICTSPNSSTPSKWVYAVFWRILPRNFPPPRWEFGGTALDLSKGNKRNWILVWEDGFCDFNECEQRKSGSGYLNGRFGADVFFKMSHEVYNYGEGLVGKVAADNSHKWVYNESHNECESSYIASWNASVEPQPKAWEFQFNSGIQSIVIIAVREGVVQLGSFNKISEDLNLVISIQRQFSYLQSIPGVFGIQRPYLPLQHPYIVKPSFIENNAMTLYDMGWNTNPQNGAPGPSLCSGSPSLPLPTMPCSFGALLSKLPSGIPPYNSTQVLDAGTQSTIERVKIEDCEFHPTLDDDHKGRKVGSLNK

SEQ ID NO: 57858 - protein, 323 aa, Glycine max
  peptide (1)..(323): Ceres Seq. ID no. 14316330
MESGLPLLNYLLQQTLRTICTSPNSSTPSKWVYAVFWRILPRNFPPPRWEFGGTALDLSKGNKRNWILVWEDGFCDFNECEQRKSGSGYLNGRFGADVFFKMSHEVYNYGEGLVGKVAADNSHKWVYNESHNECESSYIASWNASVEPQPKAWEFQFNSGIQSIVIIAVREGVVQLGSFNKISEDLNLVISIQRQFSYLQSIPGVFGIQRPYLPLQHPYIVKPSFIENNAMTLYDMGWNTNPQNGAPGPSLCSGSPSLPLPTMPCSFGALLSKLPSGIPPYNSTQVLDAGTQSTIERVKIEDCEFHPTLDDDHKGRKVGSLNK

SEQ ID NO: 57859 - protein, 222 aa, Glycine max
  peptide (1)..(222): Ceres Seq. ID no. 14316331
MSHEVYNYGEGLVGKVAADNSHKWVYNESHNECESSYIASWNASVEPQPKAWEFQFNSGIQSIVIIAVREGVVQLGSFNKISEDLNLVISIQRQFSYLQSIPGVFGIQRPYLPLQHPYIVKPSFIENNAMTLYDMGWNTNPQNGAPGPSLCSGSPSLPLPTMPCSFGALLSKLPSGIPPYNSTQVLDAGTQSTIERVKIEDCEFHPTLDDDHKGRKVGSLNK

SEQ ID NO: 57860 - DNA, 1411 bp, Glycine max
  misc_feature (1)..(1411): Ceres Seq. ID no. 15170324
acacagtaacggaacacaacaatggctctgtcttcgccacttcagaacctctctgcactcatctccgccaaaggcaatgccaccgccgtcgccacaccccggccgccgagagggcggccctgggcggttcacgcggcggcgtccgacaccaccgcctctgcgtcggtgcaaatgggtgagtacgaagaagggaagctggagcgaccaaagtgggttggggagacccctctttcacgtctcgttcaagctctcatctccttcaagcctttctactctgttctcaagcttggtgctagaagggctttgataagtacagctgagaagaacaacataccttggaggcaaatggcgaaagagattttagagtcagaagtttatagggagctggacaacattcaaaaccagtctttagtgtaccctgattattatttgaatccattccatgcatatgatgagggcaatcttacatggctggcggcagcagaagcagaggctgctacattgtcaatagctaaacgagcaattccagatgcttcttcaacgcaggaagcaaatcagatactgcgtggcaattggcttcgtgcaattgaacaacaccatatgcagtattcagaatcatctgtgatcaatgacattctagatattggatgctctgtaggtataagcacaagatatcttgcagacaagttccccacagccaaagtcaccgggctagatctgtcaccctattttcttgctgtggctcagcataaggaaaagaatgcaccgcctagaaaatttcctataagatggatacatgcaaatggagaagacacgggcctgccttctaaatcattcaaccttgtttctattgcttttgtggttcatgaatgtcctgcaagagctatagtgaatttagtgagggaagcattccgtctccttcggcctggaggcacactagctttggtagattctacgacaaagtcaaaggtccttcaggaattgtctcctgtcctgtttacattgcttaagagcacagaaccctttctggatgagtattacttgactgatatggatgaaacactgagggaagctggttttgggaacataacatcaatccttacggaccccagacacgtgacaattactgcaacagtgccttaatgaaacatcacatcttgagattattttatttttattttacttggtacatgaacatcttcttgggtttggcttcaagctagtcagtccgtggttgatgtatgtccaatagaatagcgtgtcaaaaattgattaaattatgtatccacgtgccacgatcttttattattagttattggttttgtagattatcccaagatctggtgcaacaataattagacatggcaatggggtgggatagagatgaatattatttttctaatcttcgatc

SEQ ID NO: 57861 - protein, 373 aa, Glycine max
  peptide (1)..(373): Ceres Seq. ID no. 15170325
MALSSPLQNLSALISAKGNATAVATPRPPRGRPWAVHAAASDTTASASVQMGEYEEGKLERPKWVGETPLSRLVQALISFKPFYSVLKLGARRALISTAEKNNIPWRQMAKEILESEVYRELDNIQNQSLVYPDYYLNPFHAYDEGNLTWLAAAEAEAATLSIAKRAIPDASSTQEANQILRGNWLRAIEQHHMQYSESSVINDILDIGCSVGISTRYLADKFPTAKVTGLDLSPYFLAVAQHKEKNAPPRKFPIRWIHANGEDTGLPSKSFNLVSIAFVVHECPARAIVNLVREAFRLLRPGGTLALVDSTTKSKVLQELSPVLFTLLKSTEPFLDEYYLTDMDETLREAGFGNITSILTDPRHVTITATVP

SEQ ID NO: 57862 - protein, 323 aa, Glycine max
  peptide (1)..(323): Ceres Seq. ID no. 15170326
MGEYEEGKLERPKWVGETPLSRLVQALISFKPFYSVLKLGARRALISTAEKNNIPWRQMAKEILESEVYRELDNIQNQSLVYPDYYLNPFHAYDEGNLTWLAAAEAEAATLSIAKRAIPDASSTQEANQILRGNWLRAIEQHHMQYSESSVINDILDIGCSVGISTRYLADKFPTAKVTGLDLSPYFLAVAQHKEKNAPPRKFPIRWIHANGEDTGLPSKSFNLVSIAFVVHECPARAIVNLVREAFRLLRPGGTLALVDSTTKSKVLQELSPVLFTLLKSTEPFLDEYYLTDMDETLREAGFGNITSILTDPRHVTITATVP

SEQ ID NO: 57863 - protein, 265 aa, Glycine max
  peptide (1)..(265): Ceres Seq. ID no. 15170327
MAKEILESEVYRELDNIQNQSLVYPDYYLNPFHAYDEGNLTWLAAAEAEAATLSIAKRAIPDASSTQEANQILRGNWLRAIEQHHMQYSESSVINDILDIGCSVGISTRYLADKFPTAKVTGLDLSPYFLAVAQHKEKNAPPRKFPIRWIHANGEDTGLPSKSFNLVSIAFVVHECPARAIVNLVREAFRLLRPGGTLALVDSTTKSKVLQELSPVLFTLLKSTEPFLDEYYLTDMDETLREAGFGNITSILTDPRHVTITATVP

SEQ ID NO: 57864 - DNA, 829 bp, Glycine max
  misc_feature (1)..(829): Ceres Seq. ID no. 13595763
actttgtctacttaattaataaaggtttcaactttgaggataaacctcaccggttgtcacagggtttatcgtttaacggttgaaacgaagcgaaacttccaacttcatcttcaaccctgcgcttcttttgaactggtaaaaacttcgatcattttttgctctttagtcggtgttcatttcaactcagaagtcagaacatcggagctcatcaagcatggcaagctctttgacaacattagccattacctattctcctgtcaacaatggttccaggggtttcagaaagtctgttaatgcttctaaaggaaggggttgcataaaagcaatgaggatagagaaatccttggaggaattgtacaatgtgaaggtggaaagaaaagttcctcctgagagactagccgagcttggagtttcaaaatggtcagtgtggaagactgggaaaagcaggttaccttgggactggcaggtagaccaactggtgtacgtagaagaaggggaagtgagagttgtgcctgaaggaagcaagcgtttcatgcaatttgtggccggagacttggtccggtacccaaagtggtttgaagctgacctatggttcaatggtccatatcaagaacgttatagtttcagagcatatggtgatgatcattgatgagaagatgatgcttggtaaccacataaaagtcacatgcacatcttatttggatgttttatgtaatggatgtttttcaaaagttatagttttccagttctaaatgtattaccaatatttttgaatgtttgtgatactttgccatcatttaaaagaaatagtcctaaatgcttctgttgt

SEQ ID NO: 57865 - protein, 144 aa, Glycine max
  peptide (1)..(144): Ceres Seq. ID no. 13595764
MASSLTTLAITYSPVNNGSRGFRKSVNASKGRGCIKAMRIEKSLEELYNVKVERKVPPERLAELGVSKWSVWKTGKSRLPWDWQVDQLVYVEEGEVRVVPEGSKRFMQFVAGDLVRYPKWFEADLWFNGPYQERYSFRAYGDDH

SEQ ID NO: 57866 - protein, 107 aa, Glycine max
  peptide (1)..(107): Ceres Seq. ID no. 13595765
MRIEKSLEELYNVKVERKVPPERLAELGVSKWSVWKTGKSRLPWDWQVDQLVYVEEGEVRVVPEGSKRFMQFVAGDLVRYPKWFEADLWFNGPYQERYSFRAYGDDH

SEQ ID NO: 57867 - DNA, 1385 bp, Glycine max
  misc_feature (1)..(1385): Ceres Seq. ID no. 15177766
gattacctattatgatggaaagagaaaaaggtttacctttgatgatctctaacacaaatctcagcagcagcagcagcagtgtgatgagggtcaacaaaaacctcccagatgagatcatgttgttcaagatcctccctttgctcccatcaaagacccttattcgattcaggtgcgtgtgcaagttatgggactgtttcatacgcgacccttcattccttcatcttcgaaaactcactaataaccccacccaccactttctcttcctctcacccaaccaaaactcttcacatcccttcctttatggtgctcctcaccccaacaatagcattgtcacaacaccccttcgtccttcgatcctctttgccctcccaaacaaccttcaaatctccgaaacaaatgtccaatgtgtcaatggtttgctctgtttctacccgagaagccatgttagcttttattctcatgccgatgctttcactctcatagcaaaccccaccaccagagagattattactctccccagtgataactattactctgtaaaagcaaattcagagtttttcgcttcaactcattttggatatgaccctgttcgagaccagttcaaggttcttcgctttcttaagtatcaagcaactctccaagtcaaggtttttactcttggtcgcgacacttcatggaggcttgttactgctgaaacaccctttgctatgttgcatcttgaaaaccttttgtcttctcatggtaatagtagtagcctttgtgtcaatggtgctatttattggagacatttagatggtcttcttatgttcgatgtggcagccgaacagttcagggagatactcgttccttcaggagatggaagcgtccttggattctcgctatacccggatctcagggaaattgatgggtgtttgtgtttggttggattcagtaaccatggtttgaagttgtggattctgagggactaccaggctcagctgtgggaacatgaaaccggtgacctcagagccggcccaaaggcctcactcgctgttggaccaatcctgggtgacctccctcctctttatccgctttgcagagttcccacgggtgagatcctacttctgccacattatgttcctacaggtgttgaaagagtcaattttagagcgatttactatgacatggacacaaagagctctaggagtgctgttatcatggaaatgccattgacatggacaacaacattcagagaagttggcattgtcttttgtcaagaaagctttaggttactaaagtagcagcatcataactagagaaatacctttctatttgcttgcatggggccttaaattgtgttggaatggttatgacctattgatatggatttcttttttgccctactg

SEQ ID NO: 57868 - protein, 425 aa, Glycine max
  peptide (1)..(425): Ceres Seq. ID no. 15177767
LPIMMEREKGLPLMISNTNLSSSSSSVMRVNKNLPDEIMLFKILPLLPSKTLIRFRCVCKLWDCFIRDPSFLHLRKLTNNPTHHFLFLSPNQNSSHPFLYGAPHPNNSIVTTPLRPSILFALPNNLQISETNVQCVNGLLCFYPRSHVSFYSHADAFTLIANPTTREIITLPSDNYYSVKANSEFFASTHFGYDPVRDQFKVLRFLKYQATLQVKVFTLGRDTSWRLVTAETPFAMLHLENLLSSHGNSSSLCVNGAIYWRHLDGLLMFDVAAEQFREILVPSGDGSVLGFSLYPDLREIDGCLCLVGFSNHGLKLWILRDYQAQLWEHETGDLRAGPKASLAVGPILGDLPPLYPLCRVPTGEILLLPHYVPTGVERVNFRAIYYDMDTKSSRSAVIMEMPLTWTTTFREVGIVFCQESFRLLK

SEQ ID NO: 57869 - protein, 422 aa, Glycine max
  peptide (1)..(422): Ceres Seq. ID no. 15177768
MMEREKGLPLMISNTNLSSSSSSVMRVNKNLPDEIMLFKILPLLPSKTLIRFRCVCKLWDCFIRDPSFLHLRKLTNNPTHHFLFLSPNQNSSHPFLYGAPHPNNSIVTTPLRPSILFALPNNLQISETNVQCVNGLLCFYPRSHVSFYSHADAFTLIANPTTREIITLPSDNYYSVKANSEFFASTHFGYDPVRDQFKVLRFLKYQATLQVKVFTLGRDTSWRLVTAETPFAMLHLENLLSSHGNSSSLCVNGAIYWRHLDGLLMFDVAAEQFREILVPSGDGSVLGFSLYPDLREIDGCLCLVGFSNHGLKLWILRDYQAQLWEHETGDLRAGPKASLAVGPILGDLPPLYPLCRVPTGEILLLPHYVPTGVERVNFRAIYYDMDTKSSRSAVIMEMPLTWTTTFREVGIVFCQESFRLLK

SEQ ID NO: 57870 - protein, 421 aa, Glycine max
  peptide (1)..(421): Ceres Seq. ID no. 15177769
MEREKGLPLMISNTNLSSSSSSVMRVNKNLPDEIMLFKILPLLPSKTLIRFRCVCKLWDCFIRDPSFLHLRKLTNNPTHHFLFLSPNQNSSHPFLYGAPHPNNSIVTTPLRPSILFALPNNLQISETNVQCVNGLLCFYPRSHVSFYSHADAFTLIANPTTREIITLPSDNYYSVKANSEFFASTHFGYDPVRDQFKVLRFLKYQATLQVKVFTLGRDTSWRLVTAETPFAMLHLENLLSSHGNSSSLCVNGAIYWRHLDGLLMFDVAAEQFREILVPSGDGSVLGFSLYPDLREIDGCLCLVGFSNHGLKLWILRDYQAQLWEHETGDLRAGPKASLAVGPILGDLPPLYPLCRVPTGEILLLPHYVPTGVERVNFRAIYYDMDTKSSRSAVIMEMPLTWTTTFREVGIVFCQESFRLLK

SEQ ID NO: 57871 - DNA, 1142 bp, Glycine max
  misc_feature (1)..(1142): Ceres Seq. ID no. 12608276
gtttccaagtgtaatggattcgagttccattaacagcaacagtaaggagataaccatggagattccaagcttggttcgactttacaaggatggcaccattgaacgcctccaaaactcaccaattgtgccacccacgcttcaagatccaacttcttccaaagacgtcgtcatctctggtgaccccctcatctctgctcgtcttttccttccaaaccggattcgatcccagcaagagggtcataaagtccccatcttggtctactttcatggtggaggtttcttctttgaatctgccttcaaccaactccaccataactatttcaacaagtttgtctccgtagcagatgttttagtcgtttccgtcgagtataggttggctccagagacccttcttcctgcagcttatgatgactgctgggatgctcttaaatgggtcgccaccaacaccgaaccatggcttgtncaacacggtgatttcaacagagtcttcattggaggtgacagcgctggtgctaatatagttcataacattgccatgcgtgctggggctgaagctttacctggtggtgtcaaactcttgggtgcttttctttctcattcctacttctacggttcaaagccaattggatcggaacctgttgcagggcaccaacagagcgtgccctatttggtatgggattttgtttatccatctgcgcctggagggattgacaaccctatgatcaatccaatggttactggggcgcctagcttggctggacttgggtgttctaagattctggtttgcgttgctgaaaaggatctgataaaggatagaggggttgcgtactatgaggctgtgaagaagagtggctggcaaggtgaagcggaactgttcgaagtggagggcgaggatcatgctttccacatccacaatccacaaacccagaatgccatgaaaatgatcaaacgcctctcggattttctcctccactaaaacacataccctgaggattctgagttttaatgtctcatggatgtaatctaatgtaatgcttcaactctgcttattattattaagcaaataaaatttggaaatcagaagccagtgtagctggcctagttcgtgtgatctaaagtctaataatattctctattatgct

SEQ ID NO: 57872 - protein, 324 aa, Glycine max
  peptide (1)..(324): Ceres Seq. ID no. 12608277
  misc_feature (154)..(154): Xaa is any aa, unknown or other
FPSVMDSSSINSNSKEITMEIPSLVRLYKDGTIERLQNSPIVPPTLQDPTSSKDVVISGDPLISARLFLPNRIRSQQEGHKVPILVYFHGGGFFFESAFNQLHHNYFNKFVSVADVLVVSVEYRLAPETLLPAAYDDCWDALKWVATNTEPWLXQHGDFNRVFIGGDSAGANIVHNIAMRAGAEALPGGVKLLGAFLSHSYFYGSKPIGSEPVAGHQQSVPYLVWDFVYPSAPGGIDNPMINPMVTGAPSLAGLGCSKILVCVAEKDLIKDRGVAYYEAVKKSGWQGEAELFEVEGEDHAFHIHNPQTQNAMKMIKRLSDFLLH

SEQ ID NO: 57873 - protein, 320 aa, Glycine max
  peptide (1)..(320): Ceres Seq. ID no. 12608278
  misc_feature (150)..(150): Xaa is any aa, unknown or other
MDSSSINSNSKEITMEIPSLVRLYKDGTIERLQNSPIVPPTLQDPTSSKDVVISGDPLISARLFLPNRIRSQQEGHKVPILVYFHGGGFFFESAFNQLHHNYFNKFVSVADVLVVSVEYRLAPETLLPAAYDDCWDALKWVATNTEPWLXQHGDFNRVFIGGDSAGANIVHNIAMRAGAEALPGGVKLLGAFLSHSYFYGSKPIGSEPVAGHQQSVPYLVWDFVYPSAPGGIDNPMINPMVTGAPSLAGLGCSKILVCVAEKDLIKDRGVAYYEAVKKSGWQGEAELFEVEGEDHAFHIHNPQTQNAMKMIKRLSDFLLH

SEQ ID NO: 57874 - protein, 306 aa, Glycine max
  peptide (1)..(306): Ceres Seq. ID no. 12608279
  misc_feature (136)..(136): Xaa is any aa, unknown or other
MEIPSLVRLYKDGTIERLQNSPIVPPTLQDPTSSKDVVISGDPLISARLFLPNRIRSQQEGHKVPILVYFHGGGFFFESAFNQLHHNYFNKFVSVADVLVVSVEYRLAPETLLPAAYDDCWDALKWVATNTEPWLXQHGDFNRVFIGGDSAGANIVHNIAMRAGAEALPGGVKLLGAFLSHSYFYGSKPIGSEPVAGHQQSVPYLVWDFVYPSAPGGIDNPMINPMVTGAPSLAGLGCSKILVCVAEKDLIKDRGVAYYEAVKKSGWQGEAELFEVEGEDHAFHIHNPQTQNAMKMIKRLSDFLLH

SEQ ID NO: 57875 - DNA, 1199 bp, Glycine max
  misc_feature (1)..(1199): Ceres Seq. ID no. 15175723
actcttttattcttattttgttttttaaactttcttaacgcaacaaacacatagccacatcttctctttctcttcccatggcattctgactcatacccaaatcattgattgtttgtctatcgaatcggtgagaaaatggcagtggagctgatggggttcccccaaatgggcgaacagaaggcaattgaagaagcagccgccgaaggcctcaagggcatggaacacctcctccgtctcctctcccatcaaccttcccacctccgcactcaccacaccgacgccaccgtttccaacttcaaaaaactcatctcccttctcaaccgccgcaccggccatgcccgtttccgccgcgcacccctcccttccacttccaactctctcgccccatcccctccaccggctaacccggtcaccttcgccccttcgcagtcacagagtctaaccctcgatttctcaaaacctaacatgttcaacaccaccaacgccaaatccatggacctcgagttctctaaagaaaccttcagcgtctcctccaactcctccttcatgtcctccgctatcaccggcgacggtagcgtctccaatggcaaactaggatcctccctcttcctcactcctccgccagtctccgccggaaaacctcctctctcgtttgctccgatcaagaagaggtgccacgaccaccgcgagcactccgacgacatctccgggaaactctccggctccagcaagtgccactgcatcaagagaaggaagaatcgtgtgaagaaaacggttagagttccggcgattagttcgaaggtcgccgatattccgccggatgagtactcgtggaggaagtacggacagaagccgatcaagggatcaccgtacccgagggggtattacaagtgcagtaccgtgagagggtgcccggcgaggaaacacgtggagcgtgcttcggacgatccgacgatgttgattgtaacgtacgagggggagcaccgacactcgattcagaccgcgatgcaggagaacatttccgggggagtgggtttggtattcgagtcaacgtgagtgtggaattaaagaaaggggaactgttggggggctttttttttgtagtaggaaaaaaaaaagaggtgaataggaaaattgaattaaggtggtggttgcaatgtaaatctgaccttattgaaagaaaatattattgtgctgct

SEQ ID NO: 57876 - protein, 306 aa, Glycine max
  peptide (1)..(306): Ceres Seq. ID no. 15175724
MAVELMGFPQMGEQKAIEEAAAEGLKGMEHLLRLLSHQPSHLRTHHTDATVSNFKKLISLLNRRTGHARFRRAPLPSTSNSLAPSPPPANPVTFAPSQSQSLTLDFSKPNMFNTTNAKSMDLEFSKETFSVSSNSSFMSSAITGDGSVSNGKLGSSLFLTPPPVSAGKPPLSFAPIKKRCHDHREHSDDISGKLSGSSKCHCIKRRKNRVKKTVRVPAISSKVADIPPDEYSWRKYGQKPIKGSPYPRGYYKCSTVRGCPARKHVERASDDPTMLIVTYEGEHRHSIQTAMQENISGGVGLVFEST

SEQ ID NO: 57877 - protein, 301 aa, Glycine max
  peptide (1)..(301): Ceres Seq. ID no. 15175725
MGFPQMGEQKAIEEAAAEGLKGMEHLLRLLSHQPSHLRTHHTDATVSNFKKLISLLNRRTGHARFRRAPLPSTSNSLAPSPPPANPVTFAPSQSQSLTLDFSKPNMFNTTNAKSMDLEFSKETFSVSSNSSFMSSAITGDGSVSNGKLGSSLFLTPPPVSAGKPPLSFAPIKKRCHDHREHSDDISGKLSGSSKCHCIKRRKNRVKKTVRVPAISSKVADIPPDEYSWRKYGQKPIKGSPYPRGYYKCSTVRGCPARKHVERASDDPTMLIVTYEGEHRHSIQTAMQENISGGVGLVFEST

SEQ ID NO: 57878 - protein, 296 aa, Glycine max
  peptide (1)..(296): Ceres Seq. ID no. 15175726
MGEQKAIEEAAAEGLKGMEHLLRLLSHQPSHLRTHHTDATVSNFKKLISLLNRRTGHARFRRAPLPSTSNSLAPSPPPANPVTFAPSQSQSLTLDFSKPNMFNTTNAKSMDLEFSKETFSVSSNSSFMSSAITGDGSVSNGKLGSSLFLTPPPVSAGKPPLSFAPIKKRCHDHREHSDDISGKLSGSSKCHCIKRRKNRVKKTVRVPAISSKVADIPPDEYSWRKYGQKPIKGSPYPRGYYKCSTVRGCPARKHVERASDDPTMLIVTYEGEHRHSIQTAMQENISGGVGLVFEST

SEQ ID NO: 57879 - DNA, 1405 bp, Glycine max
  misc_feature (1)..(1405): Ceres Seq. ID no. 14304140
aaaacaatacttctactattagctttgtgagtgcaaccattcgcatcttcattcccagatttaaccaaacctctgaatgttcaaagcttccttgcctataatagcaaaaatccacacaaagcactcaccaaactcttaagaatctatggacctcttatgactttgaaatcaggcagcataagcaccatagttatttcctctcctcaagtagcaaaacgagtgctgcatgaaaatattctccccacaaatggaggaaccttagaagagtttgtgccacaaaaatattctccccacaagtgctcgactccactcaaatccttcgccaacaaaagcttcgggatttattggattttgtgaaagaaagttgcaagaaaggtgaggttgtggacattggtgcggttgtctttgcaacaatacttaattccatttcaaccacttagaaaagcctcaagagttcaagaacattattcggggtatgatggaagaagctggaaggcctaatgttgcagatttctttcccattcttcgtccacttgaccctcaacgtgtccttgcaaggaggagcatttatattaagaagttgtttgagattatcgatggaattattgaagagtgtgttcaagagcttcaaaaactgactccatggatgtattggattcacttcttaacaacaatgaagaaactggttctctgttgagtcgcgatgagacgatacacttgttcatgctcactaaacctatctcagaaaaacaaagatctcagactcattcaccattggatcgtcgtgaaatttaaacaccaagttcacaacccagttccgagcattctcaccgttgggaatttcaaaatcatgtctgagcttataggaaaatcattcgcattgtagccttttaatttcccgcagaaacccaaaactgtctcgataaaactatgatcccggtttcgttaaccgttggattttcatgaaatttggatatgttgttcgaaattcaattgcgcacacttgaaccgttgggatttgcgagataatattcgtgagggagaaaaatgaatcacatgaagacagtacaagtggaggtttcaatttcttcttcatctctctgacgtttgggaattctatcggagcaatcggaggaataactgaaggaatctcaggggaccgctagagatgctgctatcgctggctaaagacacgtgagtcctctcagaggtaagagatgagttattcacaattgagaattagcgaaaaaatgtgtacagatccttagagatatcaactgaaataagttttggggtatttttccaattttcattttattcttataattattacagtgaattatatatgtttgacagaccaatttttgtgaaattgatatgctattgtgttgagcgtgaaccctat

SEQ ID NO: 57880 - protein, 73 aa, Glycine max
  peptide (1)..(73): Ceres Seq. ID no. 14304141
MMEEAGRPNVADFFPILRPLDPQRVLARRSIYIKKLFEIIDGIIEECVQELQKLTPWMYWIHFLTTMKKLVLC

SEQ ID NO: 57881 - protein, 72 aa, Glycine max
  peptide (1)..(72): Ceres Seq. ID no. 14304142
MEEAGRPNVADFFPILRPLDPQRVLARRSIYIKKLFEIIDGIIEECVQELQKLTPWMYWIHFLTTMKKLVLC

SEQ ID NO: 57882 - protein, 66 aa, Glycine max
  peptide (1)..(66): Ceres Seq. ID no. 14304143
MTLKSGSISTIVISSPQVAKRVLHENILPTNGGTLEEFVPQKYSPHKCSTPLKSFANKSFGIYWIL

SEQ ID NO: 57883 - DNA, 2139 bp, Glycine max
  misc_feature (1)..(2139): Ceres Seq. ID no. 15170362
attcaagtcctaaaataccaaaaacccattcacttttccacaagccttagttcttctcatttattctctttttcaaaatactttcactctctctaaccttccagttctcactaaacctcgtgaagctcgtgatggacaccaagataggttcactagacgcgcccaagcccaacagcaacgacgtcgtatcatgcaacctcaccagcagcgccgccatccagccctgcttgccggcgacggtgatcaacggcgccggctgtagtgactccaccttgggcggccacctggcccgccggctggtggaaatcggcgtcaccgacgtgttctccgttcccggggacttcaacctgacgctgctggaccacctcatcgcggagccggcgctgcacctggtcgggtgctgcaacgagctcaacgccgggtacgccgccgacggctacgcgcgcgccaggggagtcggcgcgtgcgtggtgacgttcaccgtcggcggcctcagcgtgctcaacgccatcgccggagcgtacagcgagaacttgccgctaatttgcatcgtcggtgggcccaactccaacgactacggcaccagtcggatcctccatcacaccatcgggttacccgatttcagccaggagctaaggtgctttcagaccattacttgcttccaggctgtggtgaataacttggaagatgctcatgagttgattgatacagcaatctcaactgcgctgaaagaaagcaaacctgtgtatataagcattagctgtaacttgcctgggattcctcaccccactttcagtcgtgaccctgttcgtttttcattgtctccaagattgagtaataagatggggttggaggccgcagtggaggcagcggcggaattccttaacaaggcagtgaaaccagtgctggtaggtggtcctaaactgagggtggcaacagcatctgatgcctttgtcgaactggctgatgcgtgtggttatgcgcttgctgtgatgccgtcggctaaagggcaggttccagagcaccatccccattttatcggaacttattggggtgctgtgagcactgccttctgtgctgagattgtggagtctgcggatgcatacttgtttgctggtccaatttttaatgactacagctctgtggggtattcacttcttctcaagaaggagaaggcgatcattgtgcagcctgatcgggttgtgatcgcgaatggacctgcttttgggtgtgtgctgatgaaggatttcctcaaggcactcgcaaagcgcctcaagcacaacaatactgcatatgaaaattaccacaggatatttgtccctgatgggcatcctttgaaggctgcacccagagagcctttgagggttaatgttctgttccaacatatacaaaatatgctgtctggtgaaactgctgtaattgctgagacaggggactcctggtttaattgccaaaagctgaaattgccaaaggcatgtgggtatgagttccaaatgcaatatggttcaattggatggtctgttggtgctactctgggttatgctcaagccgttcctgagaagcgagtgattgcctgcattggtgatggaagttttcaggtgactgcccaagatgtatcgacaatgttacggtgcgggcaaaaaaccatcatctttctgatcaacaatggtggatacaccatcgaggttgaaattcatgatgggccgtacaatgtgattaagaactggaattacactgggttgattgatgcaatccacaatggtgaagggaaatgctggactgccaaggtgttctgtgaagaggagctagttgaagcaattgccacagccacaggacccaagaaagactccttatgcttcattgaggtgattgttcataaggatgacaccagtaaagaattgcttgaatggggctcaagggtttctgctgccaatagccgtcctcccaatcctcagtaatcttcagaatttatcctatgactaaattgctgcagttgccctttagctctatgaaagtgagaatcatttgagatgatgcccttgtagggaatttacctttgttaatggcttgaaacatttatgctaaactgactccccacttgtttgtgtaaattctttcacttttgttcacctttgtttg

SEQ ID NO: 57884 - protein, 608 aa, Glycine max
  peptide (1)..(608): Ceres Seq. ID no. 15170363
MDTKIGSLDAPKPNSNDVVSCNLTSSAAIQPCLPATVINGAGCSDSTLGGHLARRLVEIGVTDVFSVPGDFNLTLLDHLIAEPALHLVGCCNELNAGYAADGYARARGVGACVVTFTVGGLSVLNAIAGAYSENLPLICIVGGPNSNDYGTSRILHHTIGLPDFSQELRCFQTITCFQAVVNNLEDAHELIDTAISTALKESKPVYISISCNLPGIPHPTFSRDPVRFSLSPRLSNKMGLEAAVEAAAEFLNKAVKPVLVGGPKLRVATASDAFVELADACGYALAVMPSAKGQVPEHHPHFIGTYWGAVSTAFCAEIVESADAYLFAGPIFNDYSSVGYSLLLKKEKAIIVQPDRVVIANGPAFGCVLMKDFLKALAKRLKHNNTAYENYHRIFVPDGHPLKAAPREPLRVNVLFQHIQNMLSGETAVIAETGDSWFNCQKLKLPKACGYEFQMQYGSIGWSVGATLGYAQAVPEKRVIACIGDGSFQVTAQDVSTMLRCGQKTIIFLINNGGYTIEVEIHDGPYNVIKNWNYTGLIDAIHNGEGKCWTAKVFCEEELVEAIATATGPKKDSLCFIEVIVHKDDTSKELLEWGSRVSAANSRPPNPQ

SEQ ID NO: 57885 - protein, 371 aa, Glycine max
  peptide (1)..(371): Ceres Seq. ID no. 15170364
MGLEAAVEAAAEFLNKAVKPVLVGGPKLRVATASDAFVELADACGYALAVMPSAKGQVPEHHPHFIGTYWGAVSTAFCAEIVESADAYLFAGPIFNDYSSVGYSLLLKKEKAIIVQPDRVVIANGPAFGCVLMKDFLKALAKRLKHNNTAYENYHRIFVPDGHPLKAAPREPLRVNVLFQHIQNMLSGETAVIAETGDSWFNCQKLKLPKACGYEFQMQYGSIGWSVGATLGYAQAVPEKRVIACIGDGSFQVTAQDVSTMLRCGQKTIIFLINNGGYTIEVEIHDGPYNVIKNWNYTGLIDAIHNGEGKCWTAKVFCEEELVEAIATATGPKKDSLCFIEVIVHKDDTSKELLEWGSRVSAANSRPPNPQ

SEQ ID NO: 57886 - protein, 321 aa, Glycine max
  peptide (1)..(321): Ceres Seq. ID no. 15170365
MPSAKGQVPEHHPHFIGTYWGAVSTAFCAEIVESADAYLFAGPIFNDYSSVGYSLLLKKEKAIIVQPDRVVIANGPAFGCVLMKDFLKALAKRLKHNNTAYENYHRIFVPDGHPLKAAPREPLRVNVLFQHIQNMLSGETAVIAETGDSWFNCQKLKLPKACGYEFQMQYGSIGWSVGATLGYAQAVPEKRVIACIGDGSFQVTAQDVSTMLRCGQKTIIFLINNGGYTIEVEIHDGPYNVIKNWNYTGLIDAIHNGEGKCWTAKVFCEEELVEAIATATGPKKDSLCFIEVIVHKDDTSKELLEWGSRVSAANSRPPNPQ

SEQ ID NO: 57887 - DNA, 759 bp, Glycine max
  misc_feature (1)..(759): Ceres Seq. ID no. 15168440
aaaaagagaagattggattggggattaggaaaaaatggcgtgcaggggtatgcttcgttccaccattctcatagaacccagcctactccgttctttaaatttcaattctaacaaacatcacatagcttcactcaaccaatggtcttgccggtttcattctccaaaacccccttattcttcctctcagaacgaaacgccgttgtctcaggaccctgtcttgaaggccatttcagagatttccaaaggcgaagggagggttggccaaacaacaaacgtaattattggaagcactgctgccgatgattctaacaatgaatggttggctttggaccagaaggtgaactcgtacccaaccgatcgaggatttaccgccattggaactggaggtgaggattttgtgcaagccatggttgttgctgtcgaatctgtaatccaacaaccaattcctcagggatatgtgaagcaaaagttatcgtcggggggcaaatatgtatctgtaaatattgggcccattcaagttgtttctagtgaacaggtccaagctgtatataatgccatgaggacagacaaccgggtgaaatattttttataatctgtcacattgttttgtagagaacaccacgattgcaaggtatgtaccaacatggtttttttactacctaagcattaattaacccatgatatcattctaatcagagtaatcatggtgcaatttggatttcttttgtaatccctgaagatgtaacatcatgatttgtt

SEQ ID NO: 57888 - protein, 185 aa, Glycine max
  peptide (1)..(185): Ceres Seq. ID no. 15168441
MACRGMLRSTILIEPSLLRSLNFNSNKHHIASLNQWSCRFHSPKPPYSSSQNETPLSQDPVLKAISEISKGEGRVGQTTNVIIGSTAADDSNNEWLALDQKVNSYPTDRGFTAIGTGGEDFVQAMVVAVESVIQQPIPQGYVKQKLSSGGKYVSVNIGPIQVVSSEQVQAVYNAMRTDNRVKYFL

SEQ ID NO: 57889 - protein, 180 aa, Glycine max
  peptide (1)..(180): Ceres Seq. ID no. 15168442
MLRSTILIEPSLLRSLNFNSNKHHIASLNQWSCRFHSPKPPYSSSQNETPLSQDPVLKAISEISKGEGRVGQTTNVIIGSTAADDSNNEWLALDQKVNSYPTDRGFTAIGTGGEDFVQAMVVAVESVIQQPIPQGYVKQKLSSGGKYVSVNIGPIQVVSSEQVQAVYNAMRTDNRVKYFL

SEQ ID NO: 57890 - DNA, 428 bp, Glycine max
  misc_feature (1)..(428): Ceres Seq. ID no. 15225482
aaggaatgaagcagtaagcttttgtgaagggtggaaatggagtctcaaaaatctcaaaatcatgctaaaaaggcaaacaagtacattattatggaagttaccaagcgcaacatagcaccatgtagcaaaaactgcctaccgccagcatcaaatccttacaacagaggatgctccaggatatgcaaatgcagaaaatgaagtcttcagttcgttcaatgggaagaataaggaaatcatatacctatttttcatcttttatatttatgcagtcgtctatgatgaattgatgagtgttttcctggccatgtgtgttgttttggcttctgctttgtaaacacaagataataatacaggcacaataataaactgtataatgacatgaagatcaatatctttctttgaagctaagaaaaattgttatagcatgc

SEQ ID NO: 57891 - protein, 53 aa, Glycine max
  peptide (1)..(53): Ceres Seq. ID no. 15225483
MESQKSQNHAKKANKYIIMEVTKRNIAPCSKNCLPPASNPYNRGCSRICKCRK

SEQ ID NO: 57892 - protein, 39 aa, Glycine max
  peptide (1)..(39): Ceres Seq. ID no. 15225484
MLQDMQMQKMKSSVRSMGRIRKSYTYFSSFIFMQSSMMN

SEQ ID NO: 57893 - protein, 37 aa, Glycine max
  peptide (1)..(37): Ceres Seq. ID no. 15225485
RNEAVSFCEGWKWSLKNLKIMLKRQTSTLLWKLPSAT

SEQ ID NO: 57894 - DNA, 566 bp, Glycine max
  misc_feature (1)..(566): Ceres Seq. ID no. 13594336
aatttgtctcttttattcgacctcaactcagtctccttcactccatatccatatcttcctctctcacactctctaagtgatggctttcaattccaaaagggcaccgatctcaagttcaaaagccatagctgatgcagcctcatggtgctgtgcatgttttcttgtgtccctcttattgctatgcatattcagagacatctctgcccttcatgatgatcaagggaacttgatgatgagaagcagccatgtcttgtccaagccatcatgtgatgaaatatatgtggttggagaaggtgagacacttcatacaatcagtgacaagtgtggtgatccctttattgtggaaaagaaccctcatatccatgaccctgatgatgtcttcccaggacttgttctcaagattacacgctcacaaacaacatagcttgaataattgaaagttaattcctatacatgtatgtatctttcttcaatatagaacaaggaaaaaaaacttccttatgggcatcctctaaagtttttagttttggtttgcttgttgtatgtactacactttgcctagcaag

SEQ ID NO: 57895 - protein, 114 aa, Glycine max
  peptide (1)..(114): Ceres Seq. ID no. 13594337
MAFNSKRAPISSSKAIADAASWCCACFLVSLLLLCIFRDISALHDDQGNLMMRSSHVLSKPSCDEIYVVGEGETLHTISDKCGDPFIVEKNPHIHDPDDVFPGLVLKITRSQTT

SEQ ID NO: 57896 - protein, 64 aa, Glycine max
  peptide (1)..(64): Ceres Seq. ID no. 13594338
MMRSSHVLSKPSCDEIYVVGEGETLHTISDKCGDPFIVEKNPHIHDPDDVFPGLVLKITRSQTT

SEQ ID NO: 57897 - protein, 63 aa, Glycine max
  peptide (1)..(63): Ceres Seq. ID no. 13594339
MRSSHVLSKPSCDEIYVVGEGETLHTISDKCGDPFIVEKNPHIHDPDDVFPGLVLKITRSQTT

SEQ ID NO: 57898 - DNA, 981 bp, Glycine max
  misc_feature (1)..(981): Ceres Seq. ID no. 15173454
agacgccattctgcaccgagattcattcttcaccaaaacttcgcaaagaaacactacacatccatggcaactgctggcgtgcaagaagttcgtgttccccctctaacttccacctctgagccaccttctctctttgacggaaccaccaggttgtacatcagttatatttgtccctatgcgcagcgtgtttggatcactcggaactataagggactacaagacaagatcaaactggttcctattgacctacaaaacaggcctgcttggtataaggagaaagtctaccctgaaaacaaggtgccatcattggagcacaatggaaaggtcttgggtgaaagtctcgatttggtcaaatacatagatgacaactttgaagggccgtctctagttcccagtgatcctgccaagaaagagtttggtgaggagttgatttcccatgttgatacattcaccaaagagctgtattctgcattgaaaggagatccaatacatcaagccggtcctgcctttgattacttagagaatgctcttggtaaatttggtgatgggccattctttcttggtcaattcagctgggtggatattgcttatgttccatttgttgaaagattccagctcgtctttgctgatgtgttcaagcatgatataactgaaggaagacctaaacttgcaacatggattgaggaagtgaacaagattagtgcttatacacagacaagagctgatccaaaggaaatcgttgatcttttcaagaaacgttttttggctcaacagtgaaaatttggttgcagtgggtatcctctaagttgtagattgttgtcaataaagtgttgtgtgtttatcggatgcttctttagtcacatgttgttttgtcactttgtctgctagagctgcaaataatttgatttcagggtcggtgatgtttatgtaccagcttgtctgatgtcagactaataaaatgatgcttgtgtatcggctttt

SEQ ID NO: 57899 - protein, 258 aa, Glycine max
  peptide (1)..(258): Ceres Seq. ID no. 15173455
RRHSAPRFILHQNFAKKHYTSMATAGVQEVRVPPLTSTSEPPSLFDGTTRLYISYICPYAQRVWITRNYKGLQDKIKLVPIDLQNRPAWYKEKVYPENKVPSLEHNGKVLGESLDLVKYIDDNFEGPSLVPSDPAKKEFGEELISHVDTFTKELYSALKGDPIHQAGPAFDYLENALGKFGDGPFFLGQFSWVDIAYVPFVERFQLVFADVFKHDITEGRPKLATWIEEVNKISAYTQTRADPKEIVDLFKKRFLAQQ

SEQ ID NO: 57900 - protein, 237 aa, Glycine max
  peptide (1)..(237): Ceres Seq. ID no. 15173456
MATAGVQEVRVPPLTSTSEPPSLFDGTTRLYISYICPYAQRVWITRNYKGLQDKIKLVPIDLQNRPAWYKEKVYPENKVPSLEHNGKVLGESLDLVKYIDDNFEGPSLVPSDPAKKEFGEELISHVDTFTKELYSALKGDPIHQAGPAFDYLENALGKFGDGPFFLGQFSWVDIAYVPFVERFQLVFADVFKHDITEGRPKLATWIEEVNKISAYTQTRADPKEIVDLFKKRFLAQQ

SEQ ID NO: 57901 - DNA, 859 bp, Glycine max
  misc_feature (1)..(859): Ceres Seq. ID no. 15170341
acagcatcaaaacaaacaaacaacacagtttttcttgtctctatattcttccggccaccgcagatggcggcggagcacgacagctgctgctcgcgctgtgtcaccttcctaataaccataggcctcacagcgctcttcctatggctgagtctccgcgttgacgaaccaaaatgctacctcgactacatttacgttcctgccctcaacaaaaccctaaattccaattccactcacaacaaaaacaccacaatactcttcgctctcaagctcaccaacgggaacaaggacaaaggcatccaatacgacgacgttctcctctccttcagagtcttcgagagcgtcaacctcacgcgcccactcggcaacgccaccgtgcaaaggttctaccagggccaccagaagaaggccaccaagcacggaaacttcagcggcggcggcggaaacctcaccgcggcggtggctgggagaatgtggtaccgtgtggactatgctactgcggtgaagtacaagattctcttctggtacacgaaacggcaccgtttatggggaggggcaaatgtggaaattggcgattcgggaatgaaggtgtatcgtaaagccgttaggcttggagggaagaaccccgtggtgatcgagtccggcgcatctaagctcagtggacgctatcgtgcgcttcttctttcccttcttctccctttttgtggcttgtgggtttagttgacttgactttttcacttcacccacttttgtgtgtattgttattattttatttttgtaatttgtattgtgacttttctttttgtctagttccaattcaaagattagagatgattatattcgattacacgagtttgaatcc

SEQ ID NO: 57902 - protein, 238 aa, Glycine max
  peptide (1)..(238): Ceres Seq. ID no. 15170342
TASKQTNNTVFLVSIFFRPPQMAAEHDSCCSRCVTFLITIGLTALFLWLSLRVDEPKCYLDYIYVPALNKTLNSNSTHNKNTTILFALKLTNGNKDKGIQYDDVLLSFRVFESVNLTRPLGNATVQRFYQGHQKKATKHGNFSGGGGNLTAAVAGRMWYRVDYATAVKYKILFWYTKRHRLWGGANVEIGDSGMKVYRKAVRLGGKNPVVIESGASKLSGRYRALLLSLLLPFCGLWV

SEQ ID NO: 57903 - protein, 217 aa, Glycine max
  peptide (1)..(217): Ceres Seq. ID no. 15170343
MAAEHDSCCSRCVTFLITIGLTALFLWLSLRVDEPKCYLDYIYVPALNKTLNSNSTHNKNTTILFALKLTNGNKDKGIQYDDVLLSFRVFESVNLTRPLGNATVQRFYQGHQKKATKHGNFSGGGGNLTAAVAGRMWYRVDYATAVKYKILFWYTKRHRLWGGANVEIGDSGMKVYRKAVRLGGKNPVVIESGASKLSGRYRALLLSLLLPFCGLWV

SEQ ID NO: 57904 - protein, 141 aa, Glycine max
  peptide (1)..(141): Ceres Seq. ID no. 15170344
MLPRLHLRSCPQQNPKFQFHSQQKHHNTLRSQAHQREQGQRHPIRRRSPLLQSLRERQPHAPTRQRHRAKVLPGPPEEGHQARKLQRRRRKPHRGGGWENVVPCGLCYCGEVQDSLLVHETAPFMGRGKCGNWRFGNEGVS

SEQ ID NO: 57905 - DNA, 585 bp, Glycine max
  misc_feature (1)..(585): Ceres Seq. ID no. 15175285
aaaaagggcaatggcctcttggaagaagaccatcacaactccattcaaaaaggcttgcactttctttaaccagcaaccaacatctgcaagggatcaaaagaagtctcaaacagagcaagagaggcaagtaatggatctgcacggggaagtgatggcatgtgggtatgaagatgttcaagtgatgtggtctattctggataagtcgaaatccacaaactgcaatataacctcttcaacctgacccaataaaaaaacaagaaagtggcacttcagcaattagcggatgtttttgtatgctaatgtttaaggtcataattgcatcatactaacatatctatttggtatgaatgtaattctcattctcatagtagaaaatgaaaaatgatgtgtagtgtgtaggtgtttgatatggtaggatttaacgaggtgaagagaagagaagacggtgacggtgtgttgtaattgtaagtcaaaatgtgtagggaatccccatgattgatgagagaaaatcatggcgagattatgatatgaagaaatattagatttgattctctcaatagtcaatgttaaaatctcgagacttgc

SEQ ID NO: 57906 - protein, 79 aa, Glycine max
  peptide (1)..(79): Ceres Seq. ID no. 15175286
KRAMASWKKTITTPFKKACTFFNQQPTSARDQKKSQTEQERQVMDLHGEVMACGYEDVQVMWSILDKSKSTNCNITSST

SEQ ID NO: 57907 - protein, 76 aa, Glycine max
  peptide (1)..(76): Ceres Seq. ID no. 15175287
MASWKKTITTPFKKACTFFNQQPTSARDQKKSQTEQERQVMDLHGEVMACGYEDVQVMWSILDKSKSTNCNITSST

SEQ ID NO: 57908 - protein, 42 aa, Glycine max
  peptide (1)..(42): Ceres Seq. ID no. 15175288
KGQWPLGRRPSQLHSKRLALSLTSNQHLQGIKRSLKQSKRGK

SEQ ID NO: 57909 - DNA, 1326 bp, Glycine max
  misc_feature (1)..(1326): Ceres Seq. ID no. 15168509
aacaccaccaaaaccagcaccacccccctctctatctcttttctcccttgttgccgttgaacttccttaacctaaaaatgtccaattctatctccgacccgacccgaataattcactctcaggatccgaataccaccgcggaccctcaggttccgcttcggaacctttcccaggttcggaacagaatggattctctacaacacttcctatctcaatccatcaataccaacactcccctcaccgtcgatcaaatcgccatggtctccagccagatcctctcctccatccaccaagtcatcgtcaacggcgccgccctcgtctcttactctcagaattccatcgccgccggagcaccggatccaccgccgtatccgaagaagccgaagccggaaccttcagttgccgataaagcgaagcaaacactcgattccaaactcgagcctctcgaaggcgacgacagcgaaatcgtggagctcgacgccgtcgaaatcctcgcggagcacatgcacttttgcgagatctgcgggaaaggcttccggcgcgacgcgaacctccgcatgcacatgcgcgcgcacggagaacagttcaagacggcggaggcgctggcgaagccttcggagaaagcctcgtggctgcgtgcgacgcggttctcgtgtccgttcgtaggctgcaaccggaacaagctccaccggcggttccggccgctgaaatcggtgatttgcgtgaagaaccacttcaagcgaagccactgcccgaagatgtacacgtgcgagcggtgtcgcaagaagcacttctcggtgctctcggatttgaggagccacttgaagcattgcggaggagaggccaggtggaagtgcacgtgcgggaccacgttctcaaggaaagacaagttgtttggccacattgcgctgtttgagggccacgcgcctgcgctcgcgtgtgacgaagagggtaaagggaaacaaatggtggaggacgacgaagatccaatgttgatgagtgaaagtggatttgaattggatgattgttttttggatcaagagtttcccgaaggcttctttgatgattttgggtccattgatgactactgttaaggtaagtgttttagggtttcctagtaatagactttgattatgtatgtgtatttagggaatattcatattcaattgctagatttgtatttatgtccctatgttattgaaggattaaaattaaacagtgtttataacacaggatggaaataaacgattaattttatttttgtgtctgaaataatattgaaaaaaaattcaaataaattaacacataaagatatttatttggtgt

SEQ ID NO: 57910 - protein, 363 aa, Glycine max
  peptide (1)..(363): Ceres Seq. ID no. 15168510
HHQNQHHPPLYLFSPLLPLNFLNLKMSNSISDPTRIIHSQDPNTTADPQVPLRNLSQVRNRMDSLQHFLSQSINTNTPLTVDQIAMVSSQILSSIHQVIVNGAALVSYSQNSIAAGAPDPPPYPKKPKPEPSVADKAKQTLDSKLEPLEGDDSEIVELDAVEILAEHMHFCEICGKGFRRDANLRMHMRAHGEQFKTAEALAKPSEKASWLRATRFSCPFVGCNRNKLHRRFRPLKSVICVKNHFKRSHCPKMYTCERCRKKHFSVLSDLRSHLKHCGGEARWKCTCGTTFSRKDKLFGHIALFEGHAPALACDEEGKGKQMVEDDEDPMLMSESGFELDDCFLDQEFPEGFFDDFGSIDDYC

SEQ ID NO: 57911 - protein, 338 aa, Glycine max
  peptide (1)..(338): Ceres Seq. ID no. 15168511
MSNSISDPTRIIHSQDPNTTADPQVPLRNLSQVRNRMDSLQHFLSQSINTNTPLTVDQIAMVSSQILSSIHQVIVNGAALVSYSQNSIAAGAPDPPPYPKKPKPEPSVADKAKQTLDSKLEPLEGDDSEIVELDAVEILAEHMHFCEICGKGFRRDANLRMHMRAHGEQFKTAEALAKPSEKASWLRATRFSCPFVGCNRNKLHRRFRPLKSVICVKNHFKRSHCPKMYTCERCRKKHFSVLSDLRSHLKHCGGEARWKCTCGTTFSRKDKLFGHIALFEGHAPALACDEEGKGKQMVEDDEDPMLMSESGFELDDCFLDQEFPEGFFDDFGSIDDYC

SEQ ID NO: 57912 - protein, 302 aa, Glycine max
  peptide (1)..(302): Ceres Seq. ID no. 15168512
MDSLQHFLSQSINTNTPLTVDQIAMVSSQILSSIHQVIVNGAALVSYSQNSIAAGAPDPPPYPKKPKPEPSVADKAKQTLDSKLEPLEGDDSEIVELDAVEILAEHMHFCEICGKGFRRDANLRMHMRAHGEQFKTAEALAKPSEKASWLRATRFSCPFVGCNRNKLHRRFRPLKSVICVKNHFKRSHCPKMYTCERCRKKHFSVLSDLRSHLKHCGGEARWKCTCGTTFSRKDKLFGHIALFEGHAPALACDEEGKGKQMVEDDEDPMLMSESGFELDDCFLDQEFPEGFFDDFGSIDDYC

SEQ ID NO: 57913 - DNA, 920 bp, Glycine max
  misc_feature (1)..(920): Ceres Seq. ID no. 13581682
aaatcacaactatcgtactagtattttacatttaagtgaaatatgcatatatcaataaaaaaaaaaccataaattaaaaaaagatgcatagttgattcatttataatcttaaaaataagaatgacattttccaaaaaaaaaaaaattgattacggatgggaagagggtgaggccaaggtgaaaaaaaagggtagtgtacaggtccatgtatctatataacgcagcttgttcttgttcactttccccaattttctcttgacgcagaaagaaagaaatctctttgatgggtttcccagtggggtactcggagctcctgttcccgaagcttctccttcacatcctctccctcttgggcctcctcaggaagctgatttgcagcctcctccgcttcatgggcctccacgacttcctcgagcccgacattgccgcctggcccgaaacccgaatgcccgaagaattcgagtccgtgtcggccacgctcatccgggaaatcctgccggtggtgaagttccgggagctggtggaccccccggagacgtgcgcggtgtgtctgagcgagttcgaggaaaacgatgagatcagacagctggcgaattgtcgccacatattccaccgaggatgtttggaccgttggatggggtacgatcagagaacatgccctctctgcagaatgccctttatacccgacgaaatgcaaggtgcttttattgagagactctgggctgcctctggtatcgctgaatatccgcatgttgctcctttctagtatcattcatatttccttattttacttttttggggaagggatatcaaaagccataaccagaagaggttcttttgatttcgtggttttttttttgtgtatgtgtatatatacagagacctctatcaattgtatatcgatttctcttagatgatgg

SEQ ID NO: 57914 - protein, 160 aa, Glycine max
  peptide (1)..(160): Ceres Seq. ID no. 13581683
MGFPVGYSELLFPKLLLHILSLLGLLRKLICSLLRFMGLHDFLEPDIAAWPETRMPEEFESVSATLIREILPVVKFRELVDPPETCAVCLSEFEENDEIRQLANCRHIFHRGCLDRWMGYDQRTCPLCRMPFIPDEMQGAFIERLWAASGIAEYPHVAPF

SEQ ID NO: 57915 - protein, 124 aa, Glycine max
  peptide (1)..(124): Ceres Seq. ID no. 13581684
MGLHDFLEPDIAAWPETRMPEEFESVSATLIREILPVVKFRELVDPPETCAVCLSEFEENDEIRQLANCRHIFHRGCLDRWMGYDQRTCPLCRMPFIPDEMQGAFIERLWAASGIAEYPHVAPF

SEQ ID NO: 57916 - protein, 114 aa, Glycine max
  peptide (1)..(114): Ceres Seq. ID no. 13581685
MRSDSWRIVATYSTEDVWTVGWGTIREHALSAECPLYPTKCKVLLLRDSGLPLVSLNIRMLLLSSIIHISLFYFFGEGISKAITRRGSFDFVVFFLCMCIYTETSINCISISLR

SEQ ID NO: 57917 - DNA, 914 bp, Glycine max
  misc_feature (1)..(914): Ceres Seq. ID no. 13594341
acccagttgcttccttttattcctgtaatccatgaaataaaattgctagcttaatagtgatccgtatagaagactagggaacttgtttgctatggcaactctgagcaattcaactaatatcttttggcaagattgtcaaataggaaggcctgaaaggcagaagctacttaaccaaaagggatgtgttgtatggattactggactcagcggatcaggaaaaagcacattggcatgctccctaagcagagaactgcactcaaggggaaagttatcttatgtccttgatggagataaccttcggcatggactaaacaaggatcttggttttaaagctgaagatcgcactgaaaatattcgcagaactggagaagtggcaaaactcttcgctgatgctggtttaatatgtgttgctagtctgatatctccttacagaagagatcgagacacttgccgtgccatgttacctgatgcaaattttattgaggttttcatgaacatgcctctagaattgtgcgaggcacgagatccaaaaggcctctataagcttgctcgtgcagggaaaatcaaaggttttaccggcattgatgatccttatgaaccgcccataaattgtgagattgaaataaagcaggaaaatgggaattgtccaacacctactatgatggctggacaagtagttacttacttggagaataaaggatttcttgaatcttagagtttttaagtttaattattctctaataatggtgtttcttctaaatgaagttaaaaaggaatcctaggaagtgcaggtaggagagtggtgagaggataaatggacttgtaaagttcatcaagtataaataataattaataattgttgcaattcattctataggttgatcaagaatttcagtatattttatcggcgtttg

SEQ ID NO: 57918 - protein, 207 aa, Glycine max
  peptide (1)..(207): Ceres Seq. ID no. 15221336
MATLSNSTNIFWQDCQIGRPERQKLLNQKGCVVWITGLSGSGKSTLACSLSRELHSRGKLSYVLDGDNLRHGLNKDLGFKAEDRTENIRRTGEVAKLFADAGLICVASLISPYRRDRDTCRAMLPDANFIEVFMNMPLELCEARDPKGLYKLARAGKIKGFTGIDDPYEPPINCEIEIKQENGNCPTPTMMAGQVVTYLENKGFLES

SEQ ID NO: 57919 - DNA, 820 bp, Glycine max
  misc_feature (1)..(820): Ceres Seq. ID no. 15178436
atgataatttcaaacattgttgttgttgttgcatcaaaccttttgcaaaatgtccatagcagaggaggagagtccaagtgtgatgccaaaagtgatcactttcctctgctctcttcttgagagggtggctgagtcaaatgatcacaaccaacacctccaacagcaccagaagatctcagtgttccatggcctgacaaggccaaacatctcaattcagtgctatcttgagagaatcttcaagtacgcgaattgcagcccttcatgcttcgtcgtcgcctacgtctacctcgatcgattcactcagagacaaccctctttgcccatcaactccttcaacgtgcaccgtttactgatcactagtgtcatggtagctgccaagttcatggatgacatgttctacaacaatgctcactatgccaaagttggaggaatcaccaaagtagagatgaattttcttgagttggatttcctctttggtttgggtttccatttaaatgtgaccccaggcaccttccaagcctattgtgtccatctccaaagagaaatgttgttgatccaacctctaaatttttcagattccaccctaaatttaggacaatcactaaaggctcacttgtgcttcaatgaggatgaatgttctcatcaaaagcagaaacaacaacaacagctagctgtttgattccttgcattttctcagtgcatgtgtagtatggttgactagttgtaaatgtagtgattctattacagactggcaagtaaactacttttccttgtgcaatccgcttgctccttttttattctaattctttctactttttcc

SEQ ID NO: 57920 - protein, 209 aa, Glycine max
  peptide (1)..(209): Ceres Seq. ID no. 15178437
MSIAEEESPSVMPKVITFLCSLLERVAESNDHNQHLQQHQKISVFHGLTRPNISIQCYLERIFKYANCSPSCFVVAYVYLDRFTQRQPSLPINSFNVHRLLITSVMVAAKFMDDMFYNNAHYAKVGGITKVEMNFLELDFLFGLGFHLNVTPGTFQAYCVHLQREMLLIQPLNFSDSTLNLGQSLKAHLCFNEDECSHQKQKQQQQLAV

SEQ ID NO: 57921 - protein, 198 aa, Glycine max
  peptide (1)..(198): Ceres Seq. ID no. 15178438
MPKVITFLCSLLERVAESNDHNQHLQQHQKISVFHGLTRPNISIQCYLERIFKYANCSPSCFVVAYVYLDRFTQRQPSLPINSFNVHRLLITSVMVAAKFMDDMFYNNAHYAKVGGITKVEMNFLELDFLFGLGFHLNVTPGTFQAYCVHLQREMLLIQPLNFSDSTLNLGQSLKAHLCFNEDECSHQKQKQQQQLAV

SEQ ID NO: 57922 - protein, 104 aa, Glycine max
  peptide (1)..(104): Ceres Seq. ID no. 15178439
MVAAKFMDDMFYNNAHYAKVGGITKVEMNFLELDFLFGLGFHLNVTPGTFQAYCVHLQREMLLIQPLNFSDSTLNLGQSLKAHLCFNEDECSHQKQKQQQQLAV

SEQ ID NO: 57923 - DNA, 882 bp, Glycine max
  misc_feature (1)..(882): Ceres Seq. ID no. 15173213
ttccctctgatgaatgctctactctactctgactctcacacatcgttttatccgaaagcaagcattatcagaagcagaaagaaagaataagaggttgcagcaacaatggcagccatggctgcgcttcagagctcaatggtcggtctctccctctcctccaactctttcttaggccaacgcctttctcccatcaccctcccctctcttcttccgggtaagtcaacagagaagcaatgtcctattgtaatgaggcttaaacgatgggaacggaaggagtgtaaaccaaacagccttcctatcttgcacaaaatgcatgttaaacttggagatacggtgcaagtcatatctggacgtgaaaggggtaaagttggggagattactaaaatcttcaagcataacagcactgttatagtgaaagatttaaatttgaagacaaagcatgtgaagagtagagaagagggggaaccagggcaaattattaagattgaaggtcctatccacagctcaaatgtgatgctctactccaaagatcagaaggtagcaagccgtgtggggcataaagtccttgataatggtaaaaaagtccgctaccttataaaaactggtgaaataattgatagtgcagagaactggaagaaactgaaggaggctactaagcaaactgaagaagctactgctgctgctgcctagttttacctacgtaattcattcattcactagtaatgtaactctagcagtacttgttgtgatctctcttccattttgttatctaatgtatatttttggtctgtctattgatctccatataatgaaacctgggtgatcaaatttgtctattgcttattgagcaattgagattttttgaagaactattgttcatac

SEQ ID NO: 57924 - protein, 194 aa, Glycine max
  peptide (1)..(194): Ceres Seq. ID no. 15173214
MAAMAALQSSMVGLSLSSNSFLGQRLSPITLPSLLPGKSTEKQCPIVMRLKRWERKECKPNSLPILHKMHVKLGDTVQVISGRERGKVGEITKIFKHNSTVIVKDLNLKTKHVKSREEGEPGQIIKIEGPIHSSNVMLYSKDQKVASRVGHKVLDNGKKVRYLIKTGEIIDSAENWKKLKEATKQTEEATAAAA

SEQ ID NO: 57925 - protein, 191 aa, Glycine max
  peptide (1)..(191): Ceres Seq. ID no. 15173215
MAALQSSMVGLSLSSNSFLGQRLSPITLPSLLPGKSTEKQCPIVMRLKRWERKECKPNSLPILHKMHVKLGDTVQVISGRERGKVGEITKIFKHNSTVIVKDLNLKTKHVKSREEGEPGQIIKIEGPIHSSNVMLYSKDQKVASRVGHKVLDNGKKVRYLIKTGEIIDSAENWKKLKEATKQTEEATAAAA

SEQ ID NO: 57926 - protein, 184 aa, Glycine max
  peptide (1)..(184): Ceres Seq. ID no. 15173216
MVGLSLSSNSFLGQRLSPITLPSLLPGKSTEKQCPIVMRLKRWERKECKPNSLPILHKMHVKLGDTVQVISGRERGKVGEITKIFKHNSTVIVKDLNLKTKHVKSREEGEPGQIIKIEGPIHSSNVMLYSKDQKVASRVGHKVLDNGKKVRYLIKTGEIIDSAENWKKLKEATKQTEEATAAAA

SEQ ID NO: 57927 - DNA, 1148 bp, Glycine max
  misc_feature (1)..(1148): Ceres Seq. ID no. 15168480
acacaaacatctctctctctctctctctctctcatctctctctctctctctctctaagacacacaaacactacacatcacaatctcacattgttctcaagtttcaacactttctagttctaccatggcggtaggactctccgccgccataaccatgaagtccctcctccgtttccaccaacctcacctgaacctccccaaatcaatcccaacaacactccctttctcccccatgagaattttccaccacacagcatcaccaagaacccaaaaagtttcaactttcaccgtttgtgtcctcatgcaggacccaaaacaaggcacccacatggaaattgagccacaagaacaacctcctcctcctcctcctcctcccgctcaacaagttctgtcaccaaagttggctgagaaattggccagaaaagagtctgagaggttcacttaccttgttgctgctgtcatgtctagcttcggcatcacatccatggcagtgttcgctgtttattgcagattctcgtggcaaatggagggtggagaagtgccttggtctgaaatgtttggcacatttgctctatcagtgggagctgctgtgggtatggaattttgggctagatgggctcatagggctctctggcatgcttcgctgtggcacatgcatgagtcccaccatcgaccaagagaaggacccttcgagcttaacgatgtatttgcaataatcaacgctgtccctgccatcgctctcctttcctatggtttctttaacaagggactggtccctggcctttgctttggtgcgggtcttggaattacggtctttgggatggcctacatgtttgtacacgatggattggttcataagagattcccggtgggccccattgcaaacgtgccctatctcagaagggtggcctctgctcaccaacttcaccattcggaaaaattcaatggagtgccatatgggctgtttttgggacccaaggaaattgaagaggtgggagggctagaagagctggagaaagagataagtaggagagcaagatcatacaaaatagctaatgagaacaactaatacaaatcaagaatgtttcgaagaattatcagtgtaaatcagaaatatgaaataaaatgatccaaaaattttgcttgcac

SEQ ID NO: 57928 - protein, 314 aa, Glycine max
  peptide (1)..(314): Ceres Seq. ID no. 15168481
MAVGLSAAITMKSLLRFHQPHLNLPKSIPTTLPFSPMRIFHHTASPRTQKVSTFTVCVLMQDPKQGTHMEIEPQEQPPPPPPPPAQQVLSPKLAEKLARKESERFTYLVAAVMSSFGITSMAVFAVYCRFSWQMEGGEVPWSEMFGTFALSVGAAVGMEFWARWAHRALWHASLWHMHESHHRPREGPFELNDVFAIINAVPAIALLSYGFFNKGLVPGLCFGAGLGITVFGMAYMFVHDGLVHKRFPVGPIANVPYLRRVASAHQLHHSEKFNGVPYGLFLGPKEIEEVGGLEELEKEISRRARSYKIANENN

SEQ ID NO: 57929 - protein, 304 aa, Glycine max
  peptide (1)..(304): Ceres Seq. ID no. 15168482
MKSLLRFHQPHLNLPKSIPTTLPFSPMRIFHHTASPRTQKVSTFTVCVLMQDPKQGTHMEIEPQEQPPPPPPPPAQQVLSPKLAEKLARKESERFTYLVAAVMSSFGITSMAVFAVYCRFSWQMEGGEVPWSEMFGTFALSVGAAVGMEFWARWAHRALWHASLWHMHESHHRPREGPFELNDVFAIINAVPAIALLSYGFFNKGLVPGLCFGAGLGITVFGMAYMFVHDGLVHKRFPVGPIANVPYLRRVASAHQLHHSEKFNGVPYGLFLGPKEIEEVGGLEELEKEISRRARSYKIANENN

SEQ ID NO: 57930 - protein, 278 aa, Glycine max
  peptide (1)..(278): Ceres Seq. ID no. 15168483
MRIFHHTASPRTQKVSTFTVCVLMQDPKQGTHMEIEPQEQPPPPPPPPAQQVLSPKLAEKLARKESERFTYLVAAVMSSFGITSMAVFAVYCRFSWQMEGGEVPWSEMFGTFALSVGAAVGMEFWARWAHRALWHASLWHMHESHHRPREGPFELNDVFAIINAVPAIALLSYGFFNKGLVPGLCFGAGLGITVFGMAYMFVHDGLVHKRFPVGPIANVPYLRRVASAHQLHHSEKFNGVPYGLFLGPKEIEEVGGLEELEKEISRRARSYKIANENN

SEQ ID NO: 57931 - DNA, 707 bp, Glycine max
  misc_feature (1)..(707): Ceres Seq. ID no. 15168561
ataaccaaaaccaaacattcttgggggaaaatggggtcactaatggcctctgcttctatcactcttgcattagccataatccttttcagcctcccatctgaaatctcagcaaacaactacatctactcctctcctccaccacccaaaaagccttaccgctatccatctcctcctcctccagttccttcaccacctccaccaaaggccctccaccaccaaccaagtctccaccaccaccagtttacatttatgcttcccctccaccacccatctacaagtaagcttggaattaagaagcagcaacaataataagtcatgttctagtattcattgtggaataaatttccgttccatttggagcagagttaagcatataatttgttatacaagttctttgaataagagtctgagtgtatcacctctaagctacgatcttcatgactcatatgaggttgcttctatttatttggtggccatttttcaagtgttgttcttactaagttcaaggaagcgacaaatcaaaaagattcaagacaaggaagcaagattagaaatgttgatatcaattcaggctgcttttagagctttcttatttgtttctttgtagattaatatggttgattgtgtatgatttcattcaaattattgtgaaattcttttaatatatctttttgtgttgtttgcaataaatttgtcaatatttgcat

SEQ ID NO: 57932 - protein, 102 aa, Glycine max
  peptide (1)..(102): Ceres Seq. ID no. 15168562
ITKTKHSWGKMGSLMASASITLALAIILFSLPSEISANNYIYSSPPPPKKPYRYPSPPPPVPSPPPPKALHHQPSLHHHQFTFMLPLHHPSTSKLGIKKQQQ

SEQ ID NO: 57933 - protein, 92 aa, Glycine max
  peptide (1)..(92): Ceres Seq. ID no. 15168563
MGSLMASASITLALAIILFSLPSEISANNYIYSSPPPPKKPYRYPSPPPPVPSPPPPKALHHQPSLHHHQFTFMLPLHHPSTSKLGIKKQQQ

SEQ ID NO: 57934 - protein, 88 aa, Glycine max
  peptide (1)..(88): Ceres Seq. ID no. 15168564
MASASITLALAIILFSLPSEISANNYIYSSPPPPKKPYRYPSPPPPVPSPPPPKALHHQPSLHHHQFTFMLPLHHPSTSKLGIKKQQQ

SEQ ID NO: 57935 - DNA, 1166 bp, Glycine max
  misc_feature (1)..(1166): Ceres Seq. ID no. 15177746
attttagttccttttcctctttaattcattcatttctctgcaatcccatgggcaagaaaatgaagctcccttccctactacacaacaaaccctcttcttcttcttggccctgccaccaaccgcgaaccctctctttccgaacccaaaacgacgccgcattcaaaaccatcaacgccgcttacttggacacgctggagagctccgaaacttccttcttcacagtctcccctgactccggaagcttctcaactgcctcagaacaagattctagaagaccccactcactagactccgtcattcgcggcttgcgttccgaccgcttattcttcgagccagacgagacaagctccatattagaggccaaaccaccaccaccaccaccaccaccaccatcaccaccaccaccaccaacaacaacaacaacgttgccgttcaaagacagcgttgtcatgtccgtggactctcaggacccttacgtcgatttccgcaggtccatggaggagatggtggaggcgcagtgcgtcaaggactgggagggtctccaagagcttctgtgttggtatttgaaagtcaatggaaaaaccaaccatggctatattgttggcgctttcgtcgatttattggtcgcttcttcttcttcttcttcctcttcctctttctcggtttcttcttcttctaataataataacaactcccaaatagtatctccttcttcccctttatctttttatagctcttctctctcttcctcttgcagcactcgctgtgtttcttgtttggaagctgaggtcgtcgaggttcataatgatatagccactagtactcctacttcttctttcttgttacaacaagttagggaagaccagccatcatcttcttcttcttcctatttgaattaaatattacttttttttttatttgaacctaagggaaatcagttatttttaattgtaatatttgttctgtattatatacttagtagtttataattagtagttgcatttttgtttcatatatggcgcgcgagcttccatggctctgttaatggaggaaattaatactgcaaccgtacgtgagagagagagagagagagagagattgtcaatttttgtttcctttatcccatgggaagccaacaaggagtaaaaatttctatatttgtcttg

SEQ ID NO: 57936 - protein, 298 aa, Glycine max
  peptide (1)..(298): Ceres Seq. ID no. 15177747
FSSFSSLIHSFLCNPMGKKMKLPSLLHNKPSSSSWPCHQPRTLSFRTQNDAAFKTINAAYLDTLESSETSFFTVSPDSGSFSTASEQDSRRPHSLDSVIRGLRSDRLFFEPDETSSILEAKPPPPPPPPPSPPPPPTTTTTLPFKDSVVMSVDSQDPYVDFRRSMEEMVEAQCVKDWEGLQELLCWYLKVNGKTNHGYIVGAFVDLLVASSSSSSSSSFSVSSSSNNNNNSQIVSPSSPLSFYSSSLSSSCSTRCVSCLEAEVVEVHNDIATSTPTSSFLLQQVREDQPSSSSSSYLN

SEQ ID NO: 57937 - protein, 283 aa, Glycine max
  peptide (1)..(283): Ceres Seq. ID no. 15177748
MGKKMKLPSLLHNKPSSSSWPCHQPRTLSFRTQNDAAFKTINAAYLDTLESSETSFFTVSPDSGSFSTASEQDSRRPHSLDSVIRGLRSDRLFFEPDETSSILEAKPPPPPPPPPSPPPPPTTTTTLPFKDSVVMSVDSQDPYVDFRRSMEEMVEAQCVKDWEGLQELLCWYLKVNGKTNHGYIVGAFVDLLVASSSSSSSSSFSVSSSSNNNNNSQIVSPSSPLSFYSSSLSSSCSTRCVSCLEAEVVEVHNDIATSTPTSSFLLQQVREDQPSSSSSSYLN

SEQ ID NO: 57938 - protein, 279 aa, Glycine max
  peptide (1)..(279): Ceres Seq. ID no. 15177749
MKLPSLLHNKPSSSSWPCHQPRTLSFRTQNDAAFKTINAAYLDTLESSETSFFTVSPDSGSFSTASEQDSRRPHSLDSVIRGLRSDRLFFEPDETSSILEAKPPPPPPPPPSPPPPPTTTTTLPFKDSVVMSVDSQDPYVDFRRSMEEMVEAQCVKDWEGLQELLCWYLKVNGKTNHGYIVGAFVDLLVASSSSSSSSSFSVSSSSNNNNNSQIVSPSSPLSFYSSSLSSSCSTRCVSCLEAEVVEVHNDIATSTPTSSFLLQQVREDQPSSSSSSYLN

SEQ ID NO: 57939 - DNA, 763 bp, Glycine max
  misc_feature (1)..(763): Ceres Seq. ID no. 15172788
attgtttcctttccattgctgatatatgacaaaacacccgtagccatccaataagaccaccacacacacacacacacacatttcttcaaactcactcctttctttccattccctcactttcacacccacaagtcacacccacttggttccttcctccaccccattatttttttctctttttttgatccaaacatgtcctccacacacccaaaaaacccagcaacgacaacaacatccactactctcatcgtgctctcaattatactcctttgttttccgacaaccgcaaaaaccgacaaccctccatgcccttatccgtgttacccaccacccattggaacggttactcccaccactccttcaggtggttccactgttccaccagcaccacctcaacccggattactatatccaccaccttctgggaattacccttattaccccacaccaccttacggcggcggcggtcgtgttggcagcaacgacggtagcggtagcggtagtggtggttttggcagcccaccaccaccggaccctattctaccctactttccattctactacagaaagcctcctcacaagccagaagacaattcagcatcaacaaccactatgtacaaatggacagggatggttggtattactagtctattatcttcatctttgcttcttctctttgtataactctcatgaatcatgatcaaaatcttcatgtaatatctaaacagttaatttaatgcttgttaatttaatggtatttttt

SEQ ID NO: 57940 - protein, 163 aa, Glycine max
  peptide (1)..(163): Ceres Seq. ID no. 15172789
MSSTHPKNPATTTTSTTLIVLSIILLCFPTTAKTDNPPCPYPCYPPPIGTVTPTTPSGGSTVPPAPPQPGLLYPPPSGNYPYYPTPPYGGGGRVGSNDGSGSGSGGFGSPPPPDPILPYFPFYYRKPPHKPEDNSASTTTMYKWTGMVGITSLLSSSLLLLFV

SEQ ID NO: 57941 - DNA, 898 bp, Glycine max
  misc_feature (1)..(898): Ceres Seq. ID no. 14316400
accaaaggcagtagtgtgttcaccgtggaactgttcttctctctcataacatgccctctgcccaggatccattttacgttgtcaaggccgagattcaagattctattgataagctgcaatctacttttcaccaatgggaaagcaagtccggtgctgcggaacaaggacatcttacaaaggaggttcttgctggatgcgaaagcatagagtggcaggtggatgaattggataaggcaattgctatagcatctagagatccttcttggtatgggatagatgaagctgaggtcgaaagccgaaggagatggacaagtaacactcgttctcaggttggcacaatgaagaaagcagtggaatctggcaagggctcaagtaccacaagccatgctagtgttaatgggatgcgccgagaactaatgaggctaccaaattctcatcaaactgatagctctaaccagtatgctgcccgagataatgatgatttcatactatcagaatcagatagacaaacacttcttataaagagacaggatgaggggtgggatgagcttagtgaaagtgtacgaagaatcggaggtgttgnacttacaatacatgatgaactcactgcacaggaaaagattctagatgaacttggttccgagatggacagtacaacaaatcgtcttgattttgtccaaaaaaaagtggcgatggttatgaaaaaggctagtgcaaagggtcagatcatgatgatattgggtttgttggccctgttcatcttcctctttatcttagtattcttcacctagtcattgagatgggaccagtctctgtgctgtttgtacatgaaaagagatctaatatttttttgttcagattcaagagtaataatagacatgcatttaactattcagtt

SEQ ID NO: 57942 - protein, 246 aa, Glycine max
  peptide (1)..(246): Ceres Seq. ID no. 14316401
  misc_feature (178)..(178): Xaa is any aa, unknown or other
MPSAQDPFYVVKAEIQDSIDKLQSTFHQWESKSGAAEQGHLTKEVLAGCESIEWQVDELDKAIAIASRDPSWYGIDEAEVESRRRWTSNTRSQVGTMKKAVESGKGSSTTSHASVNGMRRELMRLPNSHQTDSSNQYAARDNDDFILSESDRQTLLIKRQDEGWDELSESVRRIGGVXLTIHDELTAQEKILDELGSEMDSTTNRLDFVQKKVAMVMKKASAKGQIMMILGLLALFIFLFILVFFT

SEQ ID NO: 57943 - protein, 150 aa, Glycine max
  peptide (1)..(150): Ceres Seq. ID no. 14316402
  misc_feature (82)..(82): Xaa is any aa, unknown or other
MKKAVESGKGSSTTSHASVNGMRRELMRLPNSHQTDSSNQYAARDNDDFILSESDRQTLLIKRQDEGWDELSESVRRIGGVXLTIHDELTAQEKILDELGSEMDSTTNRLDFVQKKVAMVMKKASAKGQIMMILGLLALFIFLFILVFFT

SEQ ID NO: 57944 - protein, 129 aa, Glycine max
  peptide (1)..(129): Ceres Seq. ID no. 14316403
  misc_feature (61)..(61): Xaa is any aa, unknown or other
MRRELMRLPNSHQTDSSNQYAARDNDDFILSESDRQTLLIKRQDEGWDELSESVRRIGGVXLTIHDELTAQEKILDELGSEMDSTTNRLDFVQKKVAMVMKKASAKGQIMMILGLLALFIFLFILVFFT

SEQ ID NO: 57945 - DNA, 902 bp, Glycine max
  misc_feature (1)..(902): Ceres Seq. ID no. 15177754
atcaacaccttttggtttccacggatatttggagacaacacagggcaatataggttactaataatggttaccaaggtttacattgtttattattctacgtatggacacattgagaagctagctagagagattgaaaaaggtgctgcttccgtggagggagtagaagcaaaactgtggcaggtacctgaaacactgtctgaagaagtccttgtgaagaagggagcacctccaaagagtgatgatgttcctattattaaaccccgtgagcttgccgatgccgatggctttctgttcggttttccaacaacatttggaaccatggcttctcaattcaaagcatttttagaaggcactatagggctgtggcatacacaggcactagcaggaaaacctgcagggttcttctctagcactagttctcaaggaggtggacaagaagagaccccgttgacctctgtcactcagcttgttcaccatggaatgatttttgttccggttgggtacacatttggagatggcatgtatgagatggagaaggtcaaaggtgggtccccttatggctcaggaactgttgtcggggatggctcaaggcaacctagtgacttggaattggctcaagcttttcatcagggtaaatactttgcagccattgcaaaaaagctcaagggatagataagatacatctcattcatctatctcccacactatactctctctccagttaccctattattaatatcaaaccagaataaggtcatgttagtagaaaaaataaaagtacgtacgtgtgagataatgatgaattaatacttcatcttcgatacaattgttgtcacttaattgtcataatatatgtatcctgtaatgcagtgtttgttgtcaataacaagaatttggtgatt

SEQ ID NO: 57946 - protein, 223 aa, Glycine max
  peptide (1)..(223): Ceres Seq. ID no. 15177755
INTFWFPRIFGDNTGQYRLLIMVTKVYIVYYSTYGHIEKLAREIEKGAASVEGVEAKLWQVPETLSEEVLVKKGAPPKSDDVPIIKPRELADADGFLFGFPTTFGTMASQFKAFLEGTIGLWHTQALAGKPAGFFSSTSSQGGGQEETPLTSVTQLVHHGMIFVPVGYTFGDGMYEMEKVKGGSPYGSGTVVGDGSRQPSDLELAQAFHQGKYFAAIAKKLKG

SEQ ID NO: 57947 - protein, 202 aa, Glycine max
  peptide (1)..(202): Ceres Seq. ID no. 15177756
MVTKVYIVYYSTYGHIEKLAREIEKGAASVEGVEAKLWQVPETLSEEVLVKKGAPPKSDDVPIIKPRELADADGFLFGFPTTFGTMASQFKAFLEGTIGLWHTQALAGKPAGFFSSTSSQGGGQEETPLTSVTQLVHHGMIFVPVGYTFGDGMYEMEKVKGGSPYGSGTVVGDGSRQPSDLELAQAFHQGKYFAAIAKKLKG

SEQ ID NO: 57948 - protein, 117 aa, Glycine max
  peptide (1)..(117): Ceres Seq. ID no. 15177757
MASQFKAFLEGTIGLWHTQALAGKPAGFFSSTSSQGGGQEETPLTSVTQLVHHGMIFVPVGYTFGDGMYEMEKVKGGSPYGSGTVVGDGSRQPSDLELAQAFHQGKYFAAIAKKLKG

SEQ ID NO: 57949 - DNA, 757 bp, Glycine max
  misc_feature (1)..(757): Ceres Seq. ID no. 13639656
aacaaacatgggaagcaagaaaacctacgaggaagaagaaagcacggctctattttcccattcccaaacacaaacagacttgctgttacccttcaacgagaacgacccacaggacatggtcatataccaagtcctccacgaagccaatgctctcaccaacacattcctccctcagcccaccagaaacataacaaagaagcactacagaggagtccgccgccgtccttggggaaaatacgccgctgagattcgcgactcggcgcgccacggcgccaggatatggctcggcaccttccaaaccgctgaagaggctgccatggcttatgaccgagccgcgttcaagatgaggggctccaaggctttgctcaatttcccagctgaaattgttgctgctgctactgcaacagagttatctttcaaaagtagtagtaataataataataataataataataacaatcccgatgctgtttctgattccagtgctggtagctcttgcacgaacaattccacttgggtaaataggaatcagtcagaaatcacaagtggcacaggttagctaaatggtgttgaagttgaacaattaattgtagaaatctttttttgtttctttttctcaatcgttttggtttgttataactattataattatttgtatctgtctgtccaactggacaacaaaaattaattaattgaatgtgataccatgatcatgcatgggttaaaattataatggttagtgatttttcttcttctt

SEQ ID NO: 57950 - protein, 185 aa, Glycine max
  peptide (1)..(185): Ceres Seq. ID no. 13639657
TNMGSKKTYEEEESTALFSHSQTQTDLLLPFNENDPQDMVIYQVLHEANALTNTFLPQPTRNITKKHYRGVRRRPWGKYAAEIRDSARHGARIWLGTFQTAEEAAMAYDRAAFKMRGSKALLNFPAEIVAAATATELSFKSSSNNNNNNNNNNPDAVSDSSAGSSCTNNSTWVNRNQSEITSGTG

SEQ ID NO: 57951 - protein, 183 aa, Glycine max
  peptide (1)..(183): Ceres Seq. ID no. 13639658
MGSKKTYEEEESTALFSHSQTQTDLLLPFNENDPQDMVIYQVLHEANALTNTFLPQPTRNITKKHYRGVRRRPWGKYAAEIRDSARHGARIWLGTFQTAEEAAMAYDRAAFKMRGSKALLNFPAEIVAAATATELSFKSSSNNNNNNNNNNPDAVSDSSAGSSCTNNSTWVNRNQSEITSGTG

SEQ ID NO: 57952 - protein, 147 aa, Glycine max
  peptide (1)..(147): Ceres Seq. ID no. 13639659
MVIYQVLHEANALTNTFLPQPTRNITKKHYRGVRRRPWGKYAAEIRDSARHGARIWLGTFQTAEEAAMAYDRAAFKMRGSKALLNFPAEIVAAATATELSFKSSSNNNNNNNNNNPDAVSDSSAGSSCTNNSTWVNRNQSEITSGTG

SEQ ID NO: 57953 - DNA, 741 bp, Glycine max
  misc_feature (1)..(741): Ceres Seq. ID no. 15172821
aaacccatcatcgctcccagaaagttgtatcggtttctcttcttaagttttcttcaccatctcaagattaagctttttgggttcattacaggaaaatgttgaaattcttgtcgagagtgaaaatcgagttcaacgcgttggacccgcgaacggcgtcgtgtatggagtttctggcgcaatgcaactcgcggaaggcgaaggagtcgaacccggcgtgcgaagtggaggtgaagcgcgtgagggaagagcgcgcgccgcagataacggtgacgttcgttaacggcgttgaggaagtgttcgacgcgacggcgacgccggctcagagcatacgaaacttgattctggaaaagggtcagcacctcgagacggagcagatgttccgcgaagctggggaaccctggcccgttgtcatccccgacgaggagctctcgcaaatcgcaccccctaccaaaccaaggaaagcagaagacaagaagcaataggcaatagctgaatattgttgagcttattaacggctatggattcttctgggttttgtcaccctttctcttgtttctttttggtgggagatatggcatctgattcctgctgttggtgctgcataccttgctgtatttcagcacttaattattgaatgcataactatgtatgagttgcacaataatgtaaggctctgaattgctaattttgaaactgtaatcttgtcatgattgtttttgcttagtttggtttccagaggat

SEQ ID NO: 57954 - protein, 128 aa, Glycine max
  peptide (1)..(128): Ceres Seq. ID no. 15172822
MLKFLSRVKIEFNALDPRTASCMEFLAQCNSRKAKESNPACEVEVKRVREERAPQITVTFVNGVEEVFDATATPAQSIRNLILEKGQHLETEQMFREAGEPWPVVIPDEELSQIAPPTKPRKAEDKKQ

SEQ ID NO: 57955 - protein, 106 aa, Glycine max
  peptide (1)..(106): Ceres Seq. ID no. 15172823
MEFLAQCNSRKAKESNPACEVEVKRVREERAPQITVTFVNGVEEVFDATATPAQSIRNLILEKGQHLETEQMFREAGEPWPVVIPDEELSQIAPPTKPRKAEDKKQ

SEQ ID NO: 57956 - DNA, 1168 bp, Glycine max
  misc_feature (1)..(1168): Ceres Seq. ID no. 14316451
aactatcccttcttcctttctctcttctattctcattcgcatttcgcaccaagtcaatggcttccaccaccactctctccttccacttcccatatccaacaacatcgctctcttctcactctcaactttcgccctctccgcaaccttccccattcaaaccctgcaccgttgcttcccgccaaaacctctgcacctccaacaccctctctgtctctgcttccagaaaaaactcaacctctccaatttttctcgctacggcttctggcaaatctgagcctatgctccctcctttcaacgttttgattactggctcaaccaaaggaatagggtatgcgttggcgaaagagtttttaaaagctggtgacaacgtcctgatttgctcaagatcagatgaaagggtaaagactgctgtccagaacttgagagtagaatttggggagcagcatgtgtggggaactaaatgtgatgtaaaaaatgcagaggatgtgaagaatttagtttcatttgctcaagaaaaaatgaaatacattgatatatggataaacaatgctggatcaaatgcatatagctataagccacttgttgaggcttcagatgaagatcttattgaggtggttacaacaaatacacttggcttgatgatatgttgtcgagaggcaatcaagatgatggtgaaccaacctcgtggaggtcatattttcaatatagacggggcaggttcagatggaagaccaactcctaggtttgctgcatatggagcaacaaagagaagtgtggtgcatttaacaaagtcattacaggcagaattgcggatgcaagatgttaaaaacgttgtggtgcataatctttcgccaggaatggttacaacggatcttctcatgtctggtgttaatacaaagcaggcaaagtttttcattaatgtcttggcagaaccagctgaagtggttgcagaatacttagttccaaacattagatctgtccctgcaaatggatcaatgaaaccaacatacattcgattcctcacgggtttgaaagcctattcccagatattttcaagattggcattcggcgcaagaaggaatcgatacattcttgaagattgaactgcataaatatttgtgctatgtgcaacttttatttcttgttttaaatatctattcatcccccc

SEQ ID NO: 57957 - protein, 366 aa, Glycine max
  peptide (1)..(366): Ceres Seq. ID no. 14316452
LSLLPFSLLFSFAFRTKSMASTTTLSFHFPYPTTSLSSHSQLSPSPQPSPFKPCTVASRQNLCTSNTLSVSASRKNSTSPIFLATASGKSEPMLPPFNVLITGSTKGIGYALAKEFLKAGDNVLICSRSDERVKTAVQNLRVEFGEQHVWGTKCDVKNAEDVKNLVSFAQEKMKYIDIWINNAGSNAYSYKPLVEASDEDLIEVVTTNTLGLMICCREAIKMMVNQPRGGHIFNIDGAGSDGRPTPRFAAYGATKRSVVHLTKSLQAELRMQDVKNVVVHNLSPGMVTTDLLMSGVNTKQAKFFINVLAEPAEVVAEYLVPNIRSVPANGSMKPTYIRFLTGLKAYSQIFSRLAFGARRNRYILED

SEQ ID NO: 57958 - protein, 348 aa, Glycine max
  peptide (1)..(348): Ceres Seq. ID no. 14316453
MASTTTLSFHFPYPTTSLSSHSQLSPSPQPSPFKPCTVASRQNLCTSNTLSVSASRKNSTSPIFLATASGKSEPMLPPFNVLITGSTKGIGYALAKEFLKAGDNVLICSRSDERVKTAVQNLRVEFGEQHVWGTKCDVKNAEDVKNLVSFAQEKMKYIDIWINNAGSNAYSYKPLVEASDEDLIEVVTTNTLGLMICCREAIKMMVNQPRGGHIFNIDGAGSDGRPTPRFAAYGATKRSVVHLTKSLQAELRMQDVKNVVVHNLSPGMVTTDLLMSGVNTKQAKFFINVLAEPAEVVAEYLVPNIRSVPANGSMKPTYIRFLTGLKAYSQIFSRLAFGARRNRYILED

SEQ ID NO: 57959 - protein, 274 aa, Glycine max
  peptide (1)..(274): Ceres Seq. ID no. 14316454
MLPPFNVLITGSTKGIGYALAKEFLKAGDNVLICSRSDERVKTAVQNLRVEFGEQHVWGTKCDVKNAEDVKNLVSFAQEKMKYIDIWINNAGSNAYSYKPLVEASDEDLIEVVTTNTLGLMICCREAIKMMVNQPRGGHIFNIDGAGSDGRPTPRFAAYGATKRSVVHLTKSLQAELRMQDVKNVVVHNLSPGMVTTDLLMSGVNTKQAKFFINVLAEPAEVVAEYLVPNIRSVPANGSMKPTYIRFLTGLKAYSQIFSRLAFGARRNRYILED

SEQ ID NO: 57960 - DNA, 765 bp, Glycine max
  misc_feature (1)..(765): Ceres Seq. ID no. 14316428
acaatctctcatcccttgtttgtttccatttcttgcttctattatttacttgtttttctctagtattcatggtgctcgctggtaaacttagtactgaacttggggtgaaagcatccgctaccaaatggttcaacctcttaaccacgcaacttcaccatgttcagaacctttgtgaaagagtgcatgaaaccaagctgcatgatggtgatgactggcacggtgttggtaattcggttaaacactggacttatgtcatagacggcaaggtacacacatgtcaggagagtattgaagccattgatgaagagaacaaaacaatcaaattcatgctcttcggtggagatattagtcagcactacaagagctttaagctgatctttgaagtgactgataagaacgatggcggtgctgctgttaaatggactcttgaatatgagaagatcaaagagaatattgatcctccacatggctacatggactactttgacaaatccactaaagagatggatgcttatcttgtcaaggcatagctcctaaaattatcaagaaaataacaacaaaggagtaatggatttggctttgaggatatatatatatatatatatatatatatatatatatatatatatatatatatataagtgttttatctatatagttattgtgatgtttgaaatgtagaataaaattataatatgcgtgtttgcttctgtccatccttcgtttctgtcgaataaatgcaggttggtggattgaagtatatgt

SEQ ID NO: 57961 - protein, 175 aa, Glycine max
  peptide (1)..(175): Ceres Seq. ID no. 14316429
NLSSLVCFHFLLLLFTCFSLVFMVLAGKLSTELGVKASATKWFNLLTTQLHHVQNLCERVHETKLHDGDDWHGVGNSVKHWTYVIDGKVHTCQESIEAIDEENKTIKFMLFGGDISQHYKSFKLIFEVTDKNDGGAAVKWTLEYEKIKENIDPPHGYMDYFDKSTKEMDAYLVKA

SEQ ID NO: 57962 - protein, 153 aa, Glycine max
  peptide (1)..(153): Ceres Seq. ID no. 14316430
MVLAGKLSTELGVKASATKWFNLLTTQLHHVQNLCERVHETKLHDGDDWHGVGNSVKHWTYVIDGKVHTCQESIEAIDEENKTIKFMLFGGDISQHYKSFKLIFEVTDKNDGGAAVKWTLEYEKIKENIDPPHGYMDYFDKSTKEMDAYLVKA

SEQ ID NO: 57963 - DNA, 958 bp, Glycine max
  misc_feature (1)..(958): Ceres Seq. ID no. 14306809
cattactttcaggtttcatttcaaaatattctctctctcctcttaaagcaaaacccttaattattaccaacgaccacacaccacagccactttcatcaatttccttaatccccacctccacataacaacaacaacgaactaacgccaccacattcattctttccttctttgtgcctacaatactactactactactactaattctacatggatggcaactcttttggaaacgtgccacccccaccaatacaagttcctgataacttggctatctcctcctcctcttcgccaactcccacgacatcatctccgtctccgacaccctctggaggctttcggtaccgcgggacgcggtgccggagcggaaagtgggtgtcggagataagggagccacgtaaaacgaatcgcatttggctggggacttacccgacagcggaaatggctgcggcggcatatgatgtcgccgcactcgcgttgaagggtcccgacacgcccgtcaacttccctaattcgatactgtcgtaccctattcctgcttcattgtcctccacggacattcgcgccgcggctgcggccgcggcgcaggctaggatcgtgagggcgccgcaggagagtgaggaaacggtaaaccctgatgatggcgggcaagggttatcggagaggcgtgaggagtacatttatgaggatgagttgttgaacatgccgaatttgctcgatgaaatggccagaggaatgcaggttagtccccttaggatcacttcctattcttcagatgattcgcctgggaattctgatggagataacctttggagttataccctttgatcactgatttgttgtttgttcagtgagtgagtatggtaatttgttttgtgtttgtttgaaagttcgagtcttgattatgtatgttcaaccttgttaaatatttgaaaggagggctttataacgggattgtggg

SEQ ID NO: 57964 - protein, 205 aa, Glycine max
  peptide (1)..(205): Ceres Seq. ID no. 14306810
MDGNSFGNVPPPPIQVPDNLAISSSSSPTPTTSSPSPTPSGGFRYRGTRCRSGKWVSEIREPRKTNRIWLGTYPTAEMAAAAYDVAALALKGPDTPVNFPNSILSYPIPASLSSTDIRAAAAAAAQARIVRAPQESEETVNPDDGGQGLSERREEYIYEDELLNMPNLLDEMARGMQVSPLRITSYSSDDSPGNSDGDNLWSYTL

SEQ ID NO: 57965 - protein, 128 aa, Glycine max
  peptide (1)..(128): Ceres Seq. ID no. 14306811
MAAAAYDVAALALKGPDTPVNFPNSILSYPIPASLSSTDIRAAAAAAAQARIVRAPQESEETVNPDDGGQGLSERREEYIYEDELLNMPNLLDEMARGMQVSPLRITSYSSDDSPGNSDGDNLWSYTL

SEQ ID NO: 57966 - DNA, 843 bp, Glycine max
  misc_feature (1)..(843): Ceres Seq. ID no. 15175208
ttattcatttcattgttcatactcactcgcacctaactccgccatggcttctcttcccaccactttcgctataaccaaatctgggttttcaaattctggtttctgccttaacgatgtcagtgtttcaaaaatcatcctccataaacaaggtggaccactctctggtcaagatcaaaccatacaacttctctctcaatctaaatcgtcaagggaccatgcaaacatctttaaccagaaggcctctaacaattcaagctacgtatagtgatggtggaaggcccagcagtgctagtgtatttgttggtgggtttctcttgggaggattaatagttggtactcttggttgcgtgtatgcacctcagatcagcaaggccctagctggagctgacaggaaggagttaatgagaaaattgccaaagtttatatatgatgaagaaaaggctttagagaaaacccggaaagtactggctgagaagattgaacaactgaatgctgccatagatgatgtttctgctcagctaaggtcagaggaggcctcaaatggagtagctgtgaactctgatgaaattgaagctgccacatgagactgctgcagtgatgtcatggtacacaatcggctattactctgtccagtaaaaatcttgttggtacaaaatgtatttgaatttcttgtaatatctttctatttcttcttaataataaactaagttgttttctgtttttggccaccgctactgtgggtatatagtcgtactgtttttatggctgatttcttgtgttctattggccatttagttatagtgaaaagtttccatgattggcataatactggaatttctagtt

SEQ ID NO: 57967 - protein, 156 aa, Glycine max
  peptide (1)..(156): Ceres Seq. ID no. 15175209
MSVFQKSSSINKVDHSLVKIKPYNFSLNLNRQGTMQTSLTRRPLTIQATYSDGGRPSSASVFVGGFLLGGLIVGTLGCVYAPQISKALAGADRKELMRKLPKFIYDEEKALEKTRKVLAEKIEQLNAAIDDVSAQLRSEEASNGVAVNSDEIEAAT

SEQ ID NO: 57968 - protein, 122 aa, Glycine max
  peptide (1)..(122): Ceres Seq. ID no. 15175210
MQTSLTRRPLTIQATYSDGGRPSSASVFVGGFLLGGLIVGTLGCVYAPQISKALAGADRKELMRKLPKFIYDEEKALEKTRKVLAEKIEQLNAAIDDVSAQLRSEEASNGVAVNSDEIEAAT

SEQ ID NO: 57969 - protein, 87 aa, Glycine max
  peptide (1)..(87): Ceres Seq. ID no. 15175211
YSFHCSYSLAPNSAMASLPTTFAITKSGFSNSGFCLNDVSVSKIILHKQGGPLSGQDQTIQLLSQSKSSRDHANIFNQKASNNSSYV

SEQ ID NO: 57970 - DNA, 1026 bp, Glycine max
  misc_feature (1)..(1026): Ceres Seq. ID no. 15170337
aaaaaacgcagccaaaacagcaacaaacgacagagattcttcctcaacacaatcgaaaaaaaaaaaagcttccgattctaaaaccagaacaacaaaaaagtaaaacacacacgtcattttaaaacatttcatttttttggttatttatttaaagagcgagtgttgtaacaaatggtgaagccgaagagcgtggagaaacccgcagaggaacaacaacaacgaagtgtttcatcgtacagaggagtacggaagaggaagtgggggaagtacgtgtcggaaattaggttacccaacagccgtcaaaggatttggttgggttcctatgacagcgccgagaaggcggcacgcgcgttcgacgctgccatgttctgcttacgtggcagcggcgccaaatttaatttcccgagtgacccacccaacatcgccggcggggggaacatgacctcctcccagattcagatcgcggcggcgcgtttcgccaattcggagccccgaaatgagcgttcggatcaacccgtggagtctttaacttcggatgaggaaacggcatcgtttccggtcatttcggatacggatacatcatctcctcctctctcagacgtgacgttccaaaacgacgccgaattagtgactgggtcgttccctgatatgttttcggatttcgggtcgggcgattttgtgcccgatttctccgattttccgagcttcgacgatttcagccgggacttcttcttgcatgaacttccgggtttcaatttcggagaagagaacttggatggattgataattcaggactcgttcttgtggaatttctaagcgggtcagggttcggataattttattatatccgaacccgatatcagaatccggatcggatccgggtttgggttgggtcaaattttgcgtgccaagccctccatgtgttagtagttagtgatgattatagttttttttttaacgtaccaagtagtcaaatgtttcgattttttgggatgcgaatcataattcatttatttgtcatgactc

SEQ ID NO: 57971 - protein, 214 aa, Glycine max
  peptide (1)..(214): Ceres Seq. ID no. 15170338
MVKPKSVEKPAEEQQQRSVSSYRGVRKRKWGKYVSEIRLPNSRQRIWLGSYDSAEKAARAFDAAMFCLRGSGAKFNFPSDPPNIAGGGNMTSSQIQIAAARFANSEPRNERSDQPVESLTSDEETASFPVISDTDTSSPPLSDVTFQNDAELVTGSFPDMFSDFGSGDFVPDFSDFPSFDDFSRDFFLHELPGFNFGEENLDGLIIQDSFLWNF

SEQ ID NO: 57972 - protein, 150 aa, Glycine max
  peptide (1)..(150): Ceres Seq. ID no. 15170339
MFCLRGSGAKFNFPSDPPNIAGGGNMTSSQIQIAAARFANSEPRNERSDQPVESLTSDEETASFPVISDTDTSSPPLSDVTFQNDAELVTGSFPDMFSDFGSGDFVPDFSDFPSFDDFSRDFFLHELPGFNFGEENLDGLIIQDSFLWNF

SEQ ID NO: 57973 - protein, 125 aa, Glycine max
  peptide (1)..(125): Ceres Seq. ID no. 15170340
MTSSQIQIAAARFANSEPRNERSDQPVESLTSDEETASFPVISDTDTSSPPLSDVTFQNDAELVTGSFPDMFSDFGSGDFVPDFSDFPSFDDFSRDFFLHELPGFNFGEENLDGLIIQDSFLWNF

SEQ ID NO: 57974 - DNA, 1848 bp, Glycine max
  misc_feature (1)..(1848): Ceres Seq. ID no. 12608629
aatggaaaactcagacgaacaacttcccttctctccacaaaaccctaacaatgccgaagaagaagacgacgacatcgaagagccagaagacgaagacgaagaagaggaggaagacgacgacgacgacgacggcgtcgtttcgcaggagcaatccccattgtcgcggctgcgcgagcagcgttcgaagctggaaaccctgtcccggcgattggcgtcggagctggtcccaatccgagtccacgacgtgctgattcgcggcaacacgaagacgaaggagtgggtgatcgaggcggagctcaagctcctcgaggaggccaccaacgtgcaggagctcattcgcgcctccgaaatcgccctcgccaggctccgcggcctcgagattttcgacaccgccgagctcacgctccaggccgggccgccggagctgcctcacaccgccaatgtcgtcgtcgacgtcgtcgagtccgccaacagaatctccggcgatttcggcgtttacaccaaacccgcgactagttcttggtctgctgaaggtggtcttaagtacaaaaacttattaggttatggtgatctatgggatgcctcgttggcctatggtgccaaccaaacaacagaggtaagtgtaggagtgtatgcccctcgactgaaaggattgttaaccccctttgtagcacgactatccatgctttctcaagattggcaagagttctcttcatataaagagcagttgctaggcttgtctcttggcttgatctcaacaaggcaccatgacttagtctacactcttggatggcgtaccttgactgatccatcacaaatgtcatccaggtctataaggaggcaacttgggcatggtttactatcatccttgaagtatacatttaaaattgacaggagaaactcaccaattaggcctacaaatggatatgcttttctttctaccactcactttggtggccttacaccagatcatcggagcttgcgatttctgcgccaggaatttgatgttcgctgtgccatcccctttgggttttataatacggcacttaaccttgggatttctgccagtgctgtttttccctgggggcatggcttcatgaacaagccatctccgcttcctgaaaggttttatttgggtggtgatttctctccagtttgcacccttggaggaccaataacattgtggggatttaaaactaggggattaggtcctactgaaccacgaagacgaagtagagatggaattattgatgacagtgatgattcctctagatgggacttcattggaggagatctagctgttactgcatttgcagacctgtcttttgatcttccaattaggtggttgagagatcatggaattcatggtcatgtttttgctggtgctgggaatactgctaaattaactcagaatgaatataagcacttttcacctcggaagttcttagaatcctttcgaacatctgtgggatgtggatttgttgttcccactagactttttcgcctagagggtaatttctattacatactcaagcagaatgagcatgatcgtgggaaaactggatttaggttcagcttctcggctccttcttagtgattgagtccacagctgagattctttttctttttcatttattctgtagcattaaacatttttgctgcctgtcaatggatggctagtactcttctttttcttctcgtttaaaagccagactgaaatcgggaaagggcactgttccagtgttgaggatttataggatcagtttttggaaaagacattacccctcgagacatataagccgatgctcattgcatgacgatggtgtatgaaattccaaattattcgcg

SEQ ID NO: 57975 - protein, 530 aa, Glycine max
  peptide (1)..(530): Ceres Seq. ID no. 12608630
MENSDEQLPFSPQNPNNAEEEDDDIEEPEDEDEEEEEDDDDDDGVVSQEQSPLSRLREQRSKLETLSRRLASELVPIRVHDVLIRGNTKTKEWVIEAELKLLEEATNVQELIRASEIALARLRGLEIFDTAELTLQAGPPELPHTANVVVDVVESANRISGDFGVYTKPATSSWSAEGGLKYKNLLGYGDLWDASLAYGANQTTEVSVGVYAPRLKGLLTPFVARLSMLSQDWQEFSSYKEQLLGLSLGLISTRHHDLVYTLGWRTLTDPSQMSSRSIRRQLGHGLLSSLKYTFKIDRRNSPIRPTNGYAFLSTTHFGGLTPDHRSLRFLRQEFDVRCAIPFGFYNTALNLGISASAVFPWGHGFMNKPSPLPERFYLGGDFSPVCTLGGPITLWGFKTRGLGPTEPRRRSRDGIIDDSDDSSRWDFIGGDLAVTAFADLSFDLPIRWLRDHGIHGHVFAGAGNTAKLTQNEYKHFSPRKFLESFRTSVGCGFVVPTRLFRLEGNFYYILKQNEHDRGKTGFRFSFSAPS

SEQ ID NO: 57976 - protein, 303 aa, Glycine max
  peptide (1)..(303): Ceres Seq. ID no. 12608631
MLSQDWQEFSSYKEQLLGLSLGLISTRHHDLVYTLGWRTLTDPSQMSSRSIRRQLGHGLLSSLKYTFKIDRRNSPIRPTNGYAFLSTTHFGGLTPDHRSLRFLRQEFDVRCAIPFGFYNTALNLGISASAVFPWGHGFMNKPSPLPERFYLGGDFSPVCTLGGPITLWGFKTRGLGPTEPRRRSRDGIIDDSDDSSRWDFIGGDLAVTAFADLSFDLPIRWLRDHGIHGHVFAGAGNTAKLTQNEYKHFSPRKFLESFRTSVGCGFVVPTRLFRLEGNFYYILKQNEHDRGKTGFRFSFSAPS

SEQ ID NO: 57977 - DNA, 1535 bp, Glycine max
  misc_feature (1)..(1535): Ceres Seq. ID no. 13594435
attcacttctgatttgattcttttccccactttcagaacatcaacaaagtagagagagagaaccaaaaaaaaaaaactactactcaacaaaaagagctagagagaagataccccttaaatcctaatttctacctcaaagaaagtactcttcaaacattttgtattcactgaagaaggatctttgcacttgcacctgcagccatctaccatggttaagtcagaacacaagatcaaaaccgaaccatcatcaaaggcaatgcggttatcttcaccctcatcatcaacatcagattgcaagaagaagaagtacaagggagtgagaatgaggagctggggatcatgggtttctgagattagagcaccaaatcagaaaacaagaatatggttaggctcttattcaaccccagaagctgcagctagagcctatgatgctgcacttctatgccttaaaggctcctcagcaaatctcaatttccctttaagctcttcacaacaatacattcctggagatgctgtcatgtcccccaaatcaatccaaagagttgctgcggccgccgcaaatagtttcatcgacaatgccaccactcccccttccccacctccggcttcgaccccatcatcatcatcattggcctcatccccctcattggtttcttctccctcggatcaaatcgatgacgacgccttgctgatatcgtctttccaagcctacactagttgtggtcaagcaaatcaatcaatggctgtgaatgtgatggagccttggtacacctttggtgatggtcttcaatcccccaagtatgctgatcagatgctaagtggtgatttcttccatgtcgattcttcccatctgcttgatgatctatacgaagaaagtgacattcgtttgtggagcttctgctgagaaaaaaaatcaattcaagccacctacaatatttcttcttttctcaaaaattcaattcgtttgtcttcagtggtatagcttaagatgttactgactgtgaccaaattaaaatttgtataccctatgctacataaatggtgcattttagatgaaattcatatagagataagacaattttcggcctctcatgtgaatttctaagagtttgaaattatgtatcatcgatacaaatcttggtatgtcaatgtcatgaatggtttcccatgtgtcacagaatataagggagaaaaaaaaatgtagtcaccaaaatccttaggtataagcaattcgtttcactgtttttggaatgtaactatgggaggagacttttgctattgtgagtatctttggaaggcctttgttgcatgggaaggtatcagagatgcttatttccaattcagtgagaatagggaaccatgtacagagcgtggtaacttgaaaccattggaaaaattgcatcttttctaagccttgtctgctctcccgcgtgcccaaagaacaaagagtgttcccttgttttgatgtttaagtttggtattttataccctattctattcttcttttagatggaaataaatcctggttaattttc

SEQ ID NO: 57978 - protein, 231 aa, Glycine max
  peptide (1)..(231): Ceres Seq. ID no. 15221357
MVKSEHKIKTEPSSKAMRLSSPSSSTSDCKKKKYKGVRMRSWGSWVSEIRAPNQKTRIWLGSYSTPEAAARAYDAALLCLKGSSANLNFPLSSSQQYIPGDAVMSPKSIQRVAAAAANSFIDNATTPPSPPPASTPSSSSLASSPSLVSSPSDQIDDDALLISSFQAYTSCGQANQSMAVNVMEPWYTFGDGLQSPKYADQMLSGDFFHVDSSHLLDDLYEESDIRLWSFC

SEQ ID NO: 57979 - protein, 215 aa, Glycine max
  peptide (1)..(215): Ceres Seq. ID no. 15221358
MRLSSPSSSTSDCKKKKYKGVRMRSWGSWVSEIRAPNQKTRIWLGSYSTPEAAARAYDAALLCLKGSSANLNFPLSSSQQYIPGDAVMSPKSIQRVAAAAANSFIDNATTPPSPPPASTPSSSSLASSPSLVSSPSDQIDDDALLISSFQAYTSCGQANQSMAVNVMEPWYTFGDGLQSPKYADQMLSGDFFHVDSSHLLDDLYEESDIRLWSFC

SEQ ID NO: 57980 - protein, 193 aa, Glycine max
  peptide (1)..(193): Ceres Seq. ID no. 15221359
MRSWGSWVSEIRAPNQKTRIWLGSYSTPEAAARAYDAALLCLKGSSANLNFPLSSSQQYIPGDAVMSPKSIQRVAAAAANSFIDNATTPPSPPPASTPSSSSLASSPSLVSSPSDQIDDDALLISSFQAYTSCGQANQSMAVNVMEPWYTFGDGLQSPKYADQMLSGDFFHVDSSHLLDDLYEESDIRLWSFC

SEQ ID NO: 57981 - DNA, 1283 bp, Glycine max
  misc_feature (1)..(1283): Ceres Seq. ID no. 14311675
gttgtgtgtaagtgtgaagagaagagaatggtagtaggattgaatgtgcctcagccatttctgtcaccagtttgcaagacggcaccttacccacttgatctcatcgccaccgccgcgtccctccacttcggccaccttctccgccgccgcgcgacccaccatctccgccttggggttcttcttcactcctgtttcaagaaactcgctcctttaactcacatttttagattgaacgataagtggtgtcaaagatgctttcaactcaatgggttgaactatcttcaactgtcagccggtgatttgacttcctcatggtcaactagtttctctttctttaatgggggaggagatggaggccgccgctatggaaaggctgggatgtccaactccaagatgtctggaaaagatccatttaatggaaggaaatggacagaaattctccttgctgccaatgttttattttatattgcacaacttgcaacccaaggcaagctattattgtggggagcaaagataaatagtctaattgacaaaggacaactttggagacttgccacgtcttcctttttgcatgccaacatcggacaccttttggtaaattgttattccttgaactcagttggtcctactgtggagagcttcagtggccctcggagatttcttgcagtttactttatctctgcaattgcaagttctgctacgagttattggttctgcagaatgcctgctgtaggtgcatcaggagcaatttttggactagttggatcagttgccgtatttgtattaaggcacaaagaccttgtgggaggtggtaaaaaagatttacaacacatagcccaagtaattgccctcaatatggttattgggctattatccactgggattgacaactggggacatttaggagggttggttggtggagttgctgcatcatggtttattggaccggcatggaaacatgaatccacatcaagtgatggaagaagacttttcattgacactgcaccaatgtataaactcttcaagattaaaagagtacctaagcaatggaaatagaaacatttcattatgtatggaatggaactcataactaatcattgctcgttgtttattggtaaaatgattcactgctgtgagcttctcttaaaatacttaatattgtggggttgtagtacaagtacctgacacgtctgaattattttgtatactttaataaccttcacactgggacattgtatttataaattgtatttgtgtaattggtatccttcattttccctctt

SEQ ID NO: 57982 - protein, 351 aa, Glycine max
  peptide (1)..(351): Ceres Seq. ID no. 14311676
VVCKCEEKRMVVGLNVPQPFLSPVCKTAPYPLDLIATAASLHFGHLLRRRATHHLRLGVLLHSCFKKLAPLTHIFRLNDKWCQRCFQLNGLNYLQLSAGDLTSSWSTSFSFFNGGGDGGRRYGKAGMSNSKMSGKDPFNGRKWTEILLAANVLFYIAQLATQGKLLLWGAKINSLIDKGQLWRLATSSFLHANIGHLLVNCYSLNSVGPTVESFSGPRRFLAVYFISAIASSATSYWFCRMPAVGASGAIFGLVGSVAVFVLRHKDLVGGGKKDLQHIAQVIALNMVIGLLSTGIDNWGHLGGLVGGVAASWFIGPAWKHESTSSDGRRLFIDTAPMYKLFKIKRVPKQWK

SEQ ID NO: 57983 - protein, 342 aa, Glycine max
  peptide (1)..(342): Ceres Seq. ID no. 14311677
MVVGLNVPQPFLSPVCKTAPYPLDLIATAASLHFGHLLRRRATHHLRLGVLLHSCFKKLAPLTHIFRLNDKWCQRCFQLNGLNYLQLSAGDLTSSWSTSFSFFNGGGDGGRRYGKAGMSNSKMSGKDPFNGRKWTEILLAANVLFYIAQLATQGKLLLWGAKINSLIDKGQLWRLATSSFLHANIGHLLVNCYSLNSVGPTVESFSGPRRFLAVYFISAIASSATSYWFCRMPAVGASGAIFGLVGSVAVFVLRHKDLVGGGKKDLQHIAQVIALNMVIGLLSTGIDNWGHLGGLVGGVAASWFIGPAWKHESTSSDGRRLFIDTAPMYKLFKIKRVPKQWK

SEQ ID NO: 57984 - protein, 225 aa, Glycine max
  peptide (1)..(225): Ceres Seq. ID no. 14311678
MSNSKMSGKDPFNGRKWTEILLAANVLFYIAQLATQGKLLLWGAKINSLIDKGQLWRLATSSFLHANIGHLLVNCYSLNSVGPTVESFSGPRRFLAVYFISAIASSATSYWFCRMPAVGASGAIFGLVGSVAVFVLRHKDLVGGGKKDLQHIAQVIALNMVIGLLSTGIDNWGHLGGLVGGVAASWFIGPAWKHESTSSDGRRLFIDTAPMYKLFKIKRVPKQWK

SEQ ID NO: 57985 - DNA, 1363 bp, Glycine max
  misc_feature (1)..(1363): Ceres Seq. ID no. 14314925
atcttctcttctcacaacacgttcccattcctctctccctaacctcaccggcagcgccttcacggtcatcgccgccgacaccccccctcccttcttaatggcctcaatcccagtcgcgtgttccacacaccccaggctccaagcctcacccttattccaatcccacgcgcgctcccgcagcgcgtccttctggagggttcagcagaggggttcgatgggtggtggtggtgccgcgtcgagtttcgcctgctccacttctcagttccgcggcggattcgggttccggttccaccggagacaggggaagttctcgttgctctctttcggcggtgacgacgacggaagcgccgttggcggcgaagcgagagaaagagacttgtctcagcttctctccgcattgcttcccgttgttgttgctgccaccgccgttgccgctctcgctaaaccctccacttttacttgggtatcaaaagagttatatgctcctgcacttggtgggattatgttgtctattggaataagactatccgtagatgacttcgctcttgcatttaaaagacctttgccacttaccattgggttaattgcgcaatacgtgcttaagcctgttcttggaatcttggttgcaaaggcttttggtttgtctaggatgttttacgcgggctttgtcctcacagcttgtgtttcgggggctcaactatccagctatgcaaacttcttaagcaaaggggatgtagccttgggcattcttctcacaagctataccacaattgcatcagttattgttacacctctgttaactggtcttctgattggatcagtagtgccagttgatgcagttgccatgtcaaagtcaattctgcaggttgtacttgttccggtgacccttggtcttcttctcaatacatatgcaaagtcagttgtatctgttcttcaacctgtgatgccctttgttgccatgatttgtacttcactgtgcattggcagccctcttgctttaaacaggagtcaaattttgacaggcgaaggtctccggttggtttttccagtattaacatttcatgttgttgccttcactttaggatattggttctcaaagattccatccttgaggcaggaagaacaggtgagcaggacgatttcactatgcactggaatgcagagttccacccttgcaggactccttgcaacgcaatttttggatagtagtcaggcagttcctcctgcatgttctgtcattgctatggctataatgggtctctgtcttgcctctttttggggaagtggctttgtaattagaaacctgttgccattacctcctctcagaaccaattctgctgttaaaacttaacttttttgtttc

SEQ ID NO: 57986 - protein, 449 aa, Glycine max
  peptide (1)..(449): Ceres Seq. ID no. 14314926
SSLLTTRSHSSLPNLTGSAFTVIAADTPPPFLMASIPVACSTHPRLQASPLFQSHARSRSASFWRVQQRGSMGGGGAASSFACSTSQFRGGFGFRFHRRQGKFSLLSFGGDDDGSAVGGEARERDLSQLLSALLPVVVAATAVAALAKPSTFTWVSKELYAPALGGIMLSIGIRLSVDDFALAFKRPLPLTIGLIAQYVLKPVLGILVAKAFGLSRMFYAGFVLTACVSGAQLSSYANFLSKGDVALGILLTSYTTIASVIVTPLLTGLLIGSVVPVDAVAMSKSILQVVLVPVTLGLLLNTYAKSVVSVLQPVMPFVAMICTSLCIGSPLALNRSQILTGEGLRLVFPVLTFHVVAFTLGYWFSKIPSLRQEEQVSRTISLCTGMQSSTLAGLLATQFLDSSQAVPPACSVIAMAIMGLCLASFWGSGFVIRNLLPLPPLRTNSAVKT

SEQ ID NO: 57987 - protein, 417 aa, Glycine max
  peptide (1)..(417): Ceres Seq. ID no. 14314927
MASIPVACSTHPRLQASPLFQSHARSRSASFWRVQQRGSMGGGGAASSFACSTSQFRGGFGFRFHRRQGKFSLLSFGGDDDGSAVGGEARERDLSQLLSALLPVVVAATAVAALAKPSTFTWVSKELYAPALGGIMLSIGIRLSVDDFALAFKRPLPLTIGLIAQYVLKPVLGILVAKAFGLSRMFYAGFVLTACVSGAQLSSYANFLSKGDVALGILLTSYTTIASVIVTPLLTGLLIGSVVPVDAVAMSKSILQVVLVPVTLGLLLNTYAKSVVSVLQPVMPFVAMICTSLCIGSPLALNRSQILTGEGLRLVFPVLTFHVVAFTLGYWFSKIPSLRQEEQVSRTISLCTGMQSSTLAGLLATQFLDSSQAVPPACSVIAMAIMGLCLASFWGSGFVIRNLLPLPPLRTNSAVKT

SEQ ID NO: 57988 - protein, 378 aa, Glycine max
  peptide (1)..(378): Ceres Seq. ID no. 14314928
MGGGGAASSFACSTSQFRGGFGFRFHRRQGKFSLLSFGGDDDGSAVGGEARERDLSQLLSALLPVVVAATAVAALAKPSTFTWVSKELYAPALGGIMLSIGIRLSVDDFALAFKRPLPLTIGLIAQYVLKPVLGILVAKAFGLSRMFYAGFVLTACVSGAQLSSYANFLSKGDVALGILLTSYTTIASVIVTPLLTGLLIGSVVPVDAVAMSKSILQVVLVPVTLGLLLNTYAKSVVSVLQPVMPFVAMICTSLCIGSPLALNRSQILTGEGLRLVFPVLTFHVVAFTLGYWFSKIPSLRQEEQVSRTISLCTGMQSSTLAGLLATQFLDSSQAVPPACSVIAMAIMGLCLASFWGSGFVIRNLLPLPPLRTNSAVKT

SEQ ID NO: 57989 - DNA, 1773 bp, Glycine max
  misc_feature (1)..(1773): Ceres Seq. ID no. 14315028
actcactctgaaaccctaaacatgccgccattagcgcctctgcatcttcggaagctcttactccgttctcgttccttatcattcacttctcccactccgattcaccctcctcctctgtttccccaacaaccttcttcccatttccattcccgaaccctcctcactccttcttcgctcttcataatcagacatttctcatcggaaacccaaacggatcagattgcgcactccctctcctcagagcttctcaaagagccagactcggacgctctctccgtctcgcagcgccttcacctgagcttctcccacatcactccaacccccaatttgattctccaaaccctaaacctctcccacgaatctggccgcactgtattagggttccatcaatggctctcttccaacccccaattctcccacacggacgacactctttcctacttcgtcgactactttggccgccgtaaggacttcaaggccacgcatgacgtcctctccgccgcttcccccgccgccggccccaaaaccctagcctccgcgatcgaccgcctcgtccgcgcgggccgccccagccaggcggttcagttcttcgagcgaatggagagagactacgggctgaagcgcgatcgtgcttccttaaaagtggtcgtggagaagctgtgttcgaagggtttcgctagttacgcggaaaaaatggttaaggatttggcgaaggtgtttttccccgacgaagccacgtgtgatatgttgatcaaagggtggtgcgttgatgggaagctcgatgaagctcaaaggctcgccggtgagatgtatcgtggtgggtttgagcttggtgtggggtcttacaatgccatgcttgattgcgtttgcaagctttgtcgccaaaaggatccgtttcaacttcactcggaagcagagaaggtgttggtggagatggagcaccgtggggttccaaggaatgtggagacattcaatgtgttgataacgaatttatgtaagattaggaagaccgaagatgctttgggattgtttcgtagcatgggagagtgggggtgttaccctaatgagactacttttcttgttttgattaggagtctgtatcaggctgctaggttggaagagggggatgagatgattgataggatgaggtctgctgggtttggtgagtttctagataagaaggcttactatcagctcctcaagattttgtgtggcattgagagggttgatcatgctttgagtgtgtttgctatgatgaaggatggtgggtgtgaacccgggcttataacttatgacttgttgatgggaaaattgggtgctcacaatcgtatcgataaggctaatgctctattcaatgaagcgaagagtagagggctgcctgtgatgctcaaagagtatgctgttgacccgaggtatttgaagaagaagaaggttgtcaagggtgtgaagaagagggaaaccttgcctgagaaaatggctaggaagagaagccgcctgaaacagattcggttgagttttgtgaagaagcccaaaagagtgatgggtcgttgatcattttttgtactttataaaggtttcggaatagatttccttatttaatcatcattttctttgtttcattgttagttttgaatatttggagataaatctttgcatggaaatggctccattgtaggacataaatgccgccacatattcagaaataattttttgtacttggtgctttatgttggttcaacttctgggagatgtatgctgggcttcttaatgatt

SEQ ID NO: 57990 - protein, 516 aa, Glycine max
  peptide (1)..(516): Ceres Seq. ID no. 14315029
THSETLNMPPLAPLHLRKLLLRSRSLSFTSPTPIHPPPLFPQQPSSHFHSRTLLTPSSLFIIRHFSSETQTDQIAHSLSSELLKEPDSDALSVSQRLHLSFSHITPTPNLILQTLNLSHESGRTVLGFHQWLSSNPQFSHTDDTLSYFVDYFGRRKDFKATHDVLSAASPAAGPKTLASAIDRLVRAGRPSQAVQFFERMERDYGLKRDRASLKVVVEKLCSKGFASYAEKMVKDLAKVFFPDEATCDMLIKGWCVDGKLDEAQRLAGEMYRGGFELGVGSYNAMLDCVCKLCRQKDPFQLHSEAEKVLVEMEHRGVPRNVETFNVLITNLCKIRKTEDALGLFRSMGEWGCYPNETTFLVLIRSLYQAARLEEGDEMIDRMRSAGFGEFLDKKAYYQLLKILCGIERVDHALSVFAMMKDGGCEPGLITYDLLMGKLGAHNRIDKANALFNEAKSRGLPVMLKEYAVDPRYLKKKKVVKGVKKRETLPEKMARKRSRLKQIRLSFVKKPKRVMGR

SEQ ID NO: 57991 - protein, 509 aa, Glycine max
  peptide (1)..(509): Ceres Seq. ID no. 14315030
MPPLAPLHLRKLLLRSRSLSFTSPTPIHPPPLFPQQPSSHFHSRTLLTPSSLFIIRHFSSETQTDQIAHSLSSELLKEPDSDALSVSQRLHLSFSHITPTPNLILQTLNLSHESGRTVLGFHQWLSSNPQFSHTDDTLSYFVDYFGRRKDFKATHDVLSAASPAAGPKTLASAIDRLVRAGRPSQAVQFFERMERDYGLKRDRASLKVVVEKLCSKGFASYAEKMVKDLAKVFFPDEATCDMLIKGWCVDGKLDEAQRLAGEMYRGGFELGVGSYNAMLDCVCKLCRQKDPFQLHSEAEKVLVEMEHRGVPRNVETFNVLITNLCKIRKTEDALGLFRSMGEWGCYPNETTFLVLIRSLYQAARLEEGDEMIDRMRSAGFGEFLDKKAYYQLLKILCGIERVDHALSVFAMMKDGGCEPGLITYDLLMGKLGAHNRIDKANALFNEAKSRGLPVMLKEYAVDPRYLKKKKVVKGVKKRETLPEKMARKRSRLKQIRLSFVKKPKRVMGR

SEQ ID NO: 57992 - protein, 317 aa, Glycine max
  peptide (1)..(317): Ceres Seq. ID no. 14315031
MERDYGLKRDRASLKVVVEKLCSKGFASYAEKMVKDLAKVFFPDEATCDMLIKGWCVDGKLDEAQRLAGEMYRGGFELGVGSYNAMLDCVCKLCRQKDPFQLHSEAEKVLVEMEHRGVPRNVETFNVLITNLCKIRKTEDALGLFRSMGEWGCYPNETTFLVLIRSLYQAARLEEGDEMIDRMRSAGFGEFLDKKAYYQLLKILCGIERVDHALSVFAMMKDGGCEPGLITYDLLMGKLGAHNRIDKANALFNEAKSRGLPVMLKEYAVDPRYLKKKKVVKGVKKRETLPEKMARKRSRLKQIRLSFVKKPKRVMGR

SEQ ID NO: 57993 - DNA, 871 bp, Glycine max
  misc_feature (1)..(871): Ceres Seq. ID no. 13594385
gaacatcctaatcgaaaagaggaaacatttgcaatggctaacaacgtcgttgttgttcttaaggtagctcctgtttctctgcctccatttcccataacaaacaatgctctcactttcaagagccaaagacacacacttcatctgaattgcttccaaaccaaaaacagaacaacctcattcccttcttcctcgtcaatcctcagaaacaaagctagttgctctgtgttggcgtgtctccctcctgaatcctcaacctcatcttccactgctaaaccctcttttccttctcctcaaactaagctttatgtcagtgggctatcatttcgtaccactgaagagagtttgcgaaatgcatttaagaattttggtcaacttgtggaagtcaagctggtgatggatagaattgctaatagaccaagagggtttgcttttcttcgttatgcaactgaagaagagtcgcagaaggctattgagggaatgcatggaaagttcttggatggaagggtcatatttgtggaagttgccaaaccgagatcagagttagcgccaaggaaacaggaagacactagattgtaatgaagatccaatcaaaggatacagtagccatatgttcatcttggattcttggtgtgcaataggaagaatcattgcagcattgtacttgacattttataaaagacccctacttgattaaagttttttgcctcccttattttccaccccactgacactcttaggattcagcaatgaaaactcttttaagcaccacggccatttctgcaatatattgccaaatttatgccatttgtgcataatgtactcgttgacaatgttacaaatgtcaatggcgtttcttgaagtagttgttatc

SEQ ID NO: 57994 - protein, 191 aa, Glycine max
  peptide (1)..(191): Ceres Seq. ID no. 13594386
EHPNRKEETFAMANNVVVVLKVAPVSLPPFPITNNALTFKSQRHTLHLNCFQTKNRTTSFPSSSSILRNKASCSVLACLPPESSTSSSTAKPSFPSPQTKLYVSGLSFRTTEESLRNAFKNFGQLVEVKLVMDRIANRPRGFAFLRYATEEESQKAIEGMHGKFLDGRVIFVEVAKPRSELAPRKQEDTRL

SEQ ID NO: 57995 - protein, 180 aa, Glycine max
  peptide (1)..(180): Ceres Seq. ID no. 13594387
MANNVVVVLKVAPVSLPPFPITNNALTFKSQRHTLHLNCFQTKNRTTSFPSSSSILRNKASCSVLACLPPESSTSSSTAKPSFPSPQTKLYVSGLSFRTTEESLRNAFKNFGQLVEVKLVMDRIANRPRGFAFLRYATEEESQKAIEGMHGKFLDGRVIFVEVAKPRSELAPRKQEDTRL

SEQ ID NO: 57996 - DNA, 1125 bp, Glycine max
  misc_feature (1)..(1125): Ceres Seq. ID no. 14305461
cttcttcggttaaacctttttcaccttccccctttgtttctcaacatcattctcctcattcccctacctacccccaattttcccttctgtatttctctttttcaattctcgatttcccttctcccttttgtgtcttcataatccagatcctctcttcgatctagggtttctggcttaattaacaatcaaatgtttaaggaagaatttctatgacgattcgcaaccccatgcgacgaatccgtctcctccactccttctccgtcgtcttcctctactggttctacgtcttctcatgaactaactccctctcaatcccctaccctaattcctccaatttccccattttttttctaattaatcagatttgcaaaatcctaatttctctatcctaacaaaacccccaaattcaaacaaatccaatggcttcgattccgcgtccggcgagttcgggatcttcggagggaggaggagatccggctgcgatggacgagagaamgaggaagcggatggagtcgaaccgcgagtccgcacggcgatcgcggatgaagaagcagaagctgctcgaagacctatccgacgtagcgagtcgccttcaaggcgagaacgtgcgcttagcgcagagcataaaggcgaaggaggaagcgtacgttgagatcgaagccgcgaacgacatcctcagagcacagaccatggaactcgccgaccggttaaggtttctgaactccattctcgagatcgccgatgaggtcggcggcggtggtgaatccttcgagattccgcagattccagaccctctcttcatgccctggcagatcccccaccctatgatggcgtcacctgacatgctcctccatggaaatcaaggcctgtttgcttgatagtacttcaattaggctaggtttattgttgatgttccctagtgttttggtgaataaagaaagggaatggtgttagatgtttatgagttatatcgtgtgttggtgtgctgttttttttttttaagatctgtgtttatgttttgtgtgtgcactatcgtcgttatatagttgaattgaatgtatctgctttgtcgtagtgactggcattgtgtatcgatataaaattatgtttctgtttaaaattaat

SEQ ID NO: 57997 - protein, 152 aa, Glycine max
  peptide (1)..(152): Ceres Seq. ID no. 14305462
  misc_feature (26)..(26): Xaa is any aa, unknown or other
MASIPRPASSGSSEGGGDPAAMDERXRKRMESNRESARRSRMKKQKLLEDLSDVASRLQGENVRLAQSIKAKEEAYVEIEAANDILRAQTMELADRLRFLNSILEIADEVGGGGESFEIPQIPDPLFMPWQIPHPMMASPDMLLHGNQGLFA

SEQ ID NO: 57998 - protein, 131 aa, Glycine max
  peptide (1)..(131): Ceres Seq. ID no. 14305463
  misc_feature (5)..(5): Xaa is any aa, unknown or other
MDERXRKRMESNRESARRSRMKKQKLLEDLSDVASRLQGENVRLAQSIKAKEEAYVEIEAANDILRAQTMELADRLRFLNSILEIADEVGGGGESFEIPQIPDPLFMPWQIPHPMMASPDMLLHGNQGLFA

SEQ ID NO: 57999 - protein, 123 aa, Glycine max
  peptide (1)..(123): Ceres Seq. ID no. 14305464
MESNRESARRSRMKKQKLLEDLSDVASRLQGENVRLAQSIKAKEEAYVEIEAANDILRAQTMELADRLRFLNSILEIADEVGGGGESFEIPQIPDPLFMPWQIPHPMMASPDMLLHGNQGLFA

SEQ ID NO: 58000 - DNA, 1205 bp, Glycine max
  misc_feature (1)..(1205): Ceres Seq. ID no. 13639619
gaacatcctaatcgaaaacttcgggttctcgtcaaaacgcaaagatgcaagttccattgatcgacatcgacagaatcaacgatctccaagtgggtctgaactctctgcagaacccatccttcccaatcccttctcagatcacaacctccctcgcttacaatttctgcaaatggggcgcagtcattctcgcccttgtcgccaccttcggcagcatcatcaacagagtcactatcttcatcatccgcttccgcgccaaagccccttctctcccatccctaaccctaaacgacgacaatttttacacctcctcctcctctgacgacgacgacgacgacgataacgacgacgacctaacctactcctcttccgagcccgaagacgagccctccgcgtcttccagtttcatccgtttggacgactatttccgactcagaggaaccgataataataataataataacctagacgacgagtttcagactcaaaacggcacgcacaaacgatgtcgtagcatcggggatattttctccctctcggaactagccaacagcaagagcgtggtgaagctctgggacaccataggcttcggcctgggcttggacttcgatgattacgatggttactacgttggtaacgcggcggttccgacgagctccaccgcgtctccctcggtggttgtctcggcgggggaaggcgcgtgcgggaatctggcgctggagatctgggacacgcggctgcggcggcggaagcccacggtggtggcggagtggggtcccaccgtgggaaagaccctgcgcgtggaatctggtggcgtccagaaggtctacgtcatagatgacgggcgttacggcgtgacggtcggggatatgagaaaggtcagcacgccgttagagagcgtaacggaatctgacgcggatacttggtgggatgcggacgctattgttgtttcggacgagtcttttggcgaacagcaatcaatgttgcaacaaccaacttgaataataattgcagttcctttttcggtgctggaaatataattataataatcgaaaaaaaaataaggcgccaccatccgagattttctcaagagaaattgtttatttgtattattattcaatttaaaatttatacattgtatattcatcaaaaaaaaaaaaaaaaaagcttatcgataccgtcgacctcgagggggggcccggtaccca

SEQ ID NO: 58001 - protein, 317 aa, Glycine max
  peptide (1)..(317): Ceres Seq. ID no. 13639620
MQVPLIDIDRINDLQVGLNSLQNPSFPIPSQITTSLAYNFCKWGAVILALVATFGSIINRVTIFIIRFRAKAPSLPSLTLNDDNFYTSSSSDDDDDDDNDDDLTYSSSEPEDEPSASSSFIRLDDYFRLRGTDNNNNNNLDDEFQTQNGTHKRCRSIGDIFSLSELANSKSVVKLWDTIGFGLGLDFDDYDGYYVGNAAVPTSSTASPSVVVSAGEGACGNLALEIWDTRLRRRKPTVVAEWGPTVGKTLRVESGGVQKVYVIDDGRYGVTVGDMRKVSTPLESVTESDADTWWDADAIVVSDESFGEQQSMLQQPT

SEQ ID NO: 58002 - DNA, 1085 bp, Glycine max
  misc_feature (1)..(1085): Ceres Seq. ID no. 14314909
aagtcttttttccttcgtaacatcttttttctctttttcttcccatagcattctgactcatacccaaattatttattgtttgtctacgaaagcagtgaaaaaaaatgacagtggagcttatggggttccccaaaatggaggaacagaaggcaattcaagaagctgcctccgaaggcctcaaggccatggaacacctcctccgtctcctatcctatcaaccctctcacctccacgctcaccacaccgacgccaccgtttccaacttcaaaaaactcatctccttactcagccgccgcaccggccacgcccgtttccgtcgcgcacctctcccttccccgccaccggctaacccggtcaccctccaccaacctccctccaccttcgtcccttcgcactcccagtctctaaccctcgatttcacaaaacctagcattttcgcctccaacgccaaatccatggacctccaattctctaaagaaaccttcagcgtctcctccaactcctccttcatgtcctccgccatcaccggcgacgccagtgtctcttacggcaaactaggatcctccctcttcctcactcctccgccagtctcagccggaaaacctcctctctcctccgctccgatcaagaagaggtgtcacgaccaccgcgaacactccgacgagatctccgggaaactctccggctccagcaagtgccactgcactaagagaaggaagaatcgagtgaagaaaacggtaagagttccggtgatcagttcgaagatcgccgatattccgccggacgagtactcgtggaggaagtacgggcagaagccgatcaagggatcgccgtacccgagggggtattacaagtgcagtagcgttatagggtgtccggcgaggaaacacgtggagcgtgctccggacgatccgacgatgttgattgtgacatatgaaggggagcaccggcactcgatgcaggagaacatttccgggggagtgggtttgggattcgagtcaacgtgagggtggttgcaatgtaaatctgacattattaaaagaaaagattatattacaggggaatcttaatcttctcccgaaaag

SEQ ID NO: 58003 - protein, 300 aa, Glycine max
  peptide (1)..(300): Ceres Seq. ID no. 14314910
MTVELMGFPKMEEQKAIQEAASEGLKAMEHLLRLLSYQPSHLHAHHTDATVSNFKKLISLLSRRTGHARFRRAPLPSPPPANPVTLHQPPSTFVPSHSQSLTLDFTKPSIFASNAKSMDLQFSKETFSVSSNSSFMSSAITGDASVSYGKLGSSLFLTPPPVSAGKPPLSSAPIKKRCHDHREHSDEISGKLSGSSKCHCTKRRKNRVKKTVRVPVISSKIADIPPDEYSWRKYGQKPIKGSPYPRGYYKCSSVIGCPARKHVERAPDDPTMLIVTYEGEHRHSMQENISGGVGLGFEST
